(19) United States
(12) Patent Application Publication
(10) Pub. No.: US 2022/0267394 A1
(43) Pub. Date: Aug. 25, 2022

(54) COMPOUNDS FOR INDUCING TISSUE FORMATION AND USES THEREOF

(71) Applicant: HISTIDE AG, Schindellegi (CH)

(72) Inventor: Omar F. ZOUANI, Einsiedeln (CH)

(21) Appl. No.: 17/532,484

(22) Filed: Nov. 22, 2021

Related U.S. Application Data
(63) Continuation of application No. 15/744,980, filed on Jan. 15, 2018, now abandoned.
(60) Provisional application No. 62/209,406, filed on Aug. 25, 2015.

(30) Foreign Application Priority Data
Dec. 23, 2015 (EP) 15307126.1

(51) Int. Cl. C07K 14/51; G06N 7/00; G06N 3/00; C07K 14/71

(52) U.S. Cl. CPC C07K 14/51; G06N 7/00; C07K 2299/00; C07K 14/71; G06N 3/00

(57) ABSTRACT

The present disclosure provides a peptide, or a variant or analog thereof, or peptidomimetic comprising between 25 and 60 amino acids, having growth factor receptor-binding capability, wherein the RMSD value of the structure coordinates of said peptide, variant or analog thereof with respect to PEPREF is 2.45 Å (Angstroms) or less.

### CROSS-REFERENCE TO RELATED APPLICATIONS

[0001] This application is a continuation of U.S. application Ser. No. 15/744,980 filed on 15 Jan. 2018, which is a U.S. National Stage application of International Application No. PCT/EP2016/070130 filed 25 Aug. 2016, which claims priority to U.S. Provisional Application No. 62/209,406 filed 25 Aug. 2015 and European Application No. 15307126.1 filed 23 Dec. 2015, the entire disclosures of which are hereby incorporated by reference in their entireties.

### SEQUENCE LISTING

[0002] The instant application contains a Sequence Listing which has been submitted electronically in ASCII format and is hereby incorporated by reference in its entirety. Said ASCII copy, created 27 Oct. 2020, is named 2020-11-04_Replacement_sequence_listing.txt and is 47,759,945 bytes in size.

### FIELD OF THE INVENTION

[0003] The invention relates to compounds for inducing tissue formation, biomaterials and medical devices comprising such compounds, such compounds for use in medical methods and use of such compounds in non-medical methods.

### BACKGROUND

[0004] Tissue regeneration forms an important part of the healing process subsequent to disease, trauma, or surgery. In situations where disease or trauma produces a tissue defect, for example a bone, cartilage, skin, vascular tissue, or eye retina defect, tissue regeneration is a central goal of recovery. It is not, however, a goal that is always or easily achieved and much research has been devoted to newer and more effective ways to promote tissue repair and regeneration. Conventional technics to achieve tissue regeneration involve the activation of tissue-specific stem cells present in adult tissues with repair and/or regenerative capabilities called mesenchymal stem cell(s) or MSC(s) using recombinant proteins called growth factors (GFs). MSCs or MSC-like cells may be found in the bone marrow, but also in tissues such as fat, umbilical cord blood, amniotic fluid, placenta, dental pulp, tendons, synovial membrane and skeletal muscle. Natural regulation of the MSCs is effected through the participation of a number of growth factors (GFs), including vascular endothelial growth factors (VEGF), which trigger angiogenesis crucial for the repair of most tissues, bone morphogenetic proteins (BMP), which induce the formation of new bone and regulate capillary stem cell activation, transforming growth factors (TGF), which induce cartilage formation, and platelet-derived growth factor-BB (PDGF-BB), which is involved in the formation of granulation tissues and the recruitment of stem cells. Naturally occurring growth factors are found within the tissues themselves and are only present in small amounts. Thus, to provide industrially useful and reproducible amounts of human growth factors, traditional technics involve the production of GFs by genetic recombination. These recombinant molecules are typically grafted onto the surface of a biocompatible material and placed, where needed, inside or on the body of a patient.

### Bone

[0005] It is conventionally known that mature osteoblasts are the cells responsible for bone formation and are derived from osteoblast precursors. Differentiation of human bone marrow mesenchymal stem cells and osteoblast precursors is one of the important processes for bone regeneration. Osteoblasts differentiate from mesenchymal stem cells. Mature osteoblasts differentiate from osteoblast precursors and into osteocytes which are non-dividing cells. Upon cell activation osteoblasts begin to secrete some extracellular matrix around themselves. Calcification, i.e., deposition of insoluble calcium salts in the bone matrix, begins a short time after the matrix has been secreted. Upon termination of bone matrix synthesis, osteoblasts either undergo cell death by apoptosis or differentiate into osteocytes or bone lining cells. Mesenchymal stem cells are found in large numbers in the periosteum, the fibrous-like layer on the outside surface of bones, and in the bone marrow. During cellular differentiation of osteoblasts, the developing progenitor cells express the regulatory transcription factor Cbfa1/Runx2. A second important transcription factor required for osteoblastic differentiation is osterix. Osteoprogenitors differentiate under the influence of growth factors. Important growth factors in skeletal differentiation include bone morphogenetic proteins (BMPs), transforming growth factor beta (TGF-β) and fibroblast growth factors (FGFs). Differentiation of osteoblasts is also characterized by the expression of alkaline phosphatase as an early marker of pre-osteoblasts. As a result, acting on the differentiation cycle of mammal bone marrow mesenchymal stem cells and osteoblast precursors may have applications in bone tissue regeneration.

### Osteoporosis

[0006] Osteoporosis is a progressive bone disease that is characterized by a decrease in bone mass and density which can lead to an increased risk of fracture. In osteoporosis, the bone mineral density (BMD) is reduced, bone microarchitecture deteriorates, and the amount and variety of proteins in bone are altered. Osteoporosis is defined by the World Health Organization as a bone mineral density of 2.5 standard deviations or more below the mean peak bone mass (average of young, healthy adults) as measured by dual-energy X-ray absorptiometry; the term “established osteoporosis” includes the presence of a fragility fracture. The treatment of osteoporotic fractures is often hindered by reduced bone healing and higher rates of complications. Studies in osteoporotic animal models revealed delayed callus formation and enchondral ossification, resulting in impaired biomechanical properties of the bone. The cellular sources of fracture healing are mesenchymal stem cells (MSCs). MSCs migrate to the fracture site, where they proliferate and differentiate into osteoblasts upon stimulation with osteoinductive cytokines. Molecular biological alterations of MSCs, such as decreased proliferative capacity, production of collagen I deficient matrix, preferableness of adipogenic differentiation, and impaired osteogenic differentiation have been described in osteoporotic patients. With regards to the osteoinduction of MSCs, key agents are BMPs. Of these, BMP-2 is one of the most potent osteoinductive cytokines which physiologically contributes to the early phase of fracture healing. Beyond that, BMP-2 is already clinically approved for the treatment of distinct fracture entities. The predominant role of BMP-2 in osteoinduction and bone formation led to a scientific quest regarding its involvement in the pathophysiology of osteoporosis. Osteoporotic animal models revealed inconsistent data with regard to BMP-2 expression levels. BMP-2 was found to be overexpressed in the callus of mandibles and down-regulated in MSCs derived from tibial and femoral bone. In humans, genetic polymorphisms in BMP-2 have been identified as risk factors for the development of familial osteoporosis and osteoporotic fractures. All these findings directly link the BMP pathways to osteoporosis. Other studies investigated the therapeutic potential of BMP-2 in osteoporotic animal models. The systemic administration of rhBMP-2 increased the volume of trabecular bone and stimulated bone formation in osteoporotic mice. The local application of adenoviral BMP-2 at the site of injury enhanced callus formation and improved mechanical properties of the healing bone in osteoporotic sheep. Stimulating the differentiation of MSCs and/or inducing growth factor activity, in particular of BMPs, may thus lead to the development of new osteoporosis treatments.

### Cartilage

[0007] Although native chondrocytes offer little assistance to injured articular cartilage, these cells are responsible for the synthesis and turnover of the cartilage extracellular matrix (ECM), which provides an environment of nutrition diffusion for chondrocytes and provides the joint surface with biomechanical competence. Chondrogenic cells arise from pluripotential adult mesenchymal stem cells (MSCs) through a series of differentiation pathways. Subsequently, it was shown that a number of cytokines and transcription factors are involved in chondrocyte maturation and cartilage formation. Chondrogenic differentiation of MSCs is induced by various intrinsic and extrinsic factors. Growth factors play the most important role in this process. They represent a group of biologically active polypeptides produced by the body, which can stimulate cell proliferation, differentiation and maturation. In the hyaline cartilage, growth factors regulate homeostasis and integrity, as well as development.

[0008] Important growth factors intervening in cartilage regeneration include TGF-β1, TGF-β3, BMP-2, BMP-4, BMP-7 and GDF-5. As a result, acting on the differentiation cycle of mammal mesenchymal stem cells and chondroblast precursors may have applications in cartilage tissue regeneration.

### Muscles

[0009] Skeletal muscle is a highly complex and heterogeneous tissue serving a multitude of functions in the organism. The process of generating muscle—myogenesis—can be divided into several distinct phases. During embryonic myogenesis, mesoderm-derived structures generate the first muscle fibers of the body proper, and in subsequent waves additional fibers are generated along these template fibers. In the perinatal phase, muscle resident myogenic progenitors initially proliferate extensively but, later on, decrease as the number of myonuclei reaches a steady state and myofibrillar protein synthesis peaks. Once the muscle has matured, these progenitors will enter quiescence and henceforth reside within it as satellite cells. Adult skeletal muscle, like all renewing organs, relies on a mechanism that compensates for the turnover of terminally differentiated cells to maintain tissue homeostasis. This type of myogenesis depends on the activation of satellite cells that have the potential to differentiate into new fibers. The most comprehensively studied form of myogenesis takes place when mature muscle is damaged and large cohorts of satellite cells expand mitotically and differentiate to repair the tissue and reestablish homeostasis. Many similarities, such as common transcription factors and signaling molecules, between embryonic myogenesis and regeneration in the mature skeletal musculature have been discovered. It is now generally accepted that satellite cells are closely related to progenitors of somitic origin. The activation of the network of transcription factors that controls skeletal muscle development depends on paracrine factors that are released by adjacent tissues, such as the neural tube, notochord, surface ectoderm and lateral mesoderm. Several secreted factors have been identified that determine the spatial and temporal onset of myogenesis. However, no consensus has been reached as to whether these molecules instruct naive cells (instructive induction), amplify a pool of committed progenitors and/or enable a default differentiation pathway (permissive induction) or primarily prevent programmed cell death of muscle progenitor cells. Sonic hedgehog (SHH) and WNT signaling have been reported to have pivotal roles in the induction of myogenesis.

[0010] Likewise, other signalling molecules, such as Noggin and bone morphogenetic proteins (BMPs)—which inactivate and activate receptors of the transforming growth factor-β (TGFβ) superfamily, respectively—are known to play an important part in orchestrating the activation of myogenesis. Muscle tissue degenerative diseases or disorders include, but are not limited to, myopathies, muscular atrophy, disuse atrophy, denervation atrophy, muscular dystrophies such as the Duchenne muscular dystrophy (DMD), and the Becker muscular dystrophy (BMD), fibrosis, fibrositis, muscle weakness, fatigue, cramps, fibromyalgia, or chronic muscle pain syndrome.

### Vascular

[0011] The vasculature in the human body forms through two distinct processes: vasculogenesis and angiogenesis. Vasculogenesis is defined as the process of de novo blood vessel formation occurring when endothelial precursor cells (angioblasts) migrate and differentiate into endothelial cells which form the new vessel. These vascular trees are then extended through angiogenesis which is defined as the new vessel formation secondary to proliferation of endothelial cells from pre-existing vessels. Vasculogenesis as well as angiogenesis occur during the embryologic development of the circulatory system but also in the adult organism from circulating endothelial progenitor cells (derivatives of stem cells) able to contribute, albeit to varying degrees, to neovascularization. An example of where these processes can occur in adults is the revascularization following trauma, e.g., after cardiac ischemia. It is known that the ablation of the endothelial progenitor cells (EPCs) in the bone marrow leads to a significant decrease in the vasculature development which would place endothelial progenitor cells as a novel therapeutic target. The differentiation of the EPCs is a consequence of the interplay amongst different signaling molecules such as growth factors. These include FGF, VEGF, PDGF and others. Vascular endothelial growth factor (VEGF) is a signal protein produced by cells that stimulates vasculogenesis and angiogenesis. It is part of the system that restores the oxygen supply to tissues when blood circulation is inadequate. VEGF is a sub-family of growth factors, to be specific, the platelet-derived growth factor family of cystine-knot growth factors. VEGF causes an important signaling cascade in endothelial cells. Binding to VEGF receptor-2 (VEGFR-2) starts a tyrosine kinase signaling cascade that stimulates the production of factors that variously stimulate vessel permeability, proliferation/survival, migration and finally differentiation into mature blood vessels. Recent reports have also indicated that different somatic cells (other than the EPCs) could be reprogrammed towards distinct endothelial cell lineages. This somatic reprogramming as well as the stimulation of EPCs differentiation, both represent promising therapeutic targets in regenerative vascular medicine.

### Wound Healing

[0012] Wound healing is a complex and dynamic process of replacing devitalized and missing cellular structures and tissue layers. Upon injury to the skin, a set of complex biochemical events takes place in a closely orchestrated cascade to repair the damage and restore the protective barrier which in the normal skin is formed by the epidermis (outermost layer) and the dermis (inner or deeper layer) which exist in a steady-state equilibrium. The human adult wound healing process can be divided into 4 distinct phases: hemostasis, inflammatory, fibroblastic, and maturation (or remodeling). These phases are initiated and regulated by various secreted factors such as growth factors. In the first phase, the damaged blood vessels are sealed via different substances secreted by the platelets such as the platelet-derived growth factor (PDGF). The second phase corresponds to an inflammatory response which causes the blood vessels to become leaky thus releasing plasma and PMN's into the surrounding tissue. The neutrophils phagocytize debris and microorganisms and provide the first line of defence against infection. The cells macrophages are able to phagocytize bacteria and provide a second line of defence. They also secrete a variety of chemotactic and growth factors such as fibroblast growth factor (FGF), epidermal growth factor (EGF), transforming growth factor beta (TGF β and interleukin-1 (IL-1) which appears to direct the next stages of wound healing. The third phase involves the replacement of dermal and subdermal tissues. The fibroblasts secrete the collagen framework onto which further dermal regeneration occurs. The pericytes which regenerate the outer layers of capillaries and the endothelial cells which produce the lining are involved in the angiogenesis. The keratinocytes are responsible for the epithelialization. In the final stage of epithelialization, contracture occurs as the keratinocytes differentiate to form the protective outer layer or stratum corneum. The last and 4th phase of wound healing involves remodeling the dermal tissues to produce greater tensile strength. The principle cells involved in this process are the fibroblasts. For a wound to heal successfully, all four phases must occur in the proper sequence and time frame. Many factors can interfere with one or more phases of this process, thus causing improper or impaired wound healing. Recent research has also shown that adult stem cells could be involved in wound healing. In particular hematopoietic progenitor cells (that give rise to mature cells in the blood) may have the ability to de-differentiate back into hematopoietic stem cells and/or trans-differentiate into non-lineage cells, such as fibroblasts. It is thought that the extent of the stem cell involvement in skin wound healing is complex as the epidermis and dermis could be reconstituted by mitotically active stem cells that reside at the apex of rete ridges (basal stem cells or BSC), the bulge of hair follicles (hair follicular stem cell or HFSC), and the papillary dermis (dermal stem cells). Moreover, the bone marrow may also contain stem cells that could play a major role in cutaneous wound healing. Therefore, activating adult stem cells as well as the different cells and growth factors intervening during the four phases of the skin wound healing process, most certainly represents a promising therapeutic target.

### Tissue Closure

[0013] Wound healing not only applies to skin tissue repair but also to the closure of all tissue layers damaged e.g. in an injury or during surgery. For instance, during bone repair surgery, the different layers of tissues incised in order for the surgeon to reach the damaged bone part and repair it would all need to be closed for the overall healing process to occur. The mediation of this complex, “multi-layered” healing process, involves the participation of many different factors such as growth factors.

### Neurons

[0014] For a long time, the human nervous system has been considered fixed and incapable or regeneration since neurons do not divide within the central nervous system (CNS). Recently in has been discovered that neural cells can be regenerated from neural stem cells (NSCs). These are self-renewing, multipotent adult stem cells that generate the main phenotype of the nervous system. They undergo asymmetric cell division into two daughter cells, one non-specialized and one specialized. NSCs primarily differentiate into neurons, astrocytes, and oligodendrocytes. NSCs are generated throughout an adult's life via the process of neurogenesis. NSCs can be differentiated to replace lost or injured neurons or in many cases even glial cells. NSCs are stimulated to begin differentiation via exogenous cues from their microenvironment, or the neural stem cell niche. This niche defines a zone in which stem cells are retained after embryonic development for the production of new cells of the nervous system. This continual supply of new neurons and glia then provides the postnatal and adult brain with an added capacity for cellular plasticity. Critical to the maintenance of the stem cell niche are microenvironmental cues and cell-cell interactions that act to balance stem cell quiescence with proliferation and to direct neurogenesis versus gliogenesis lineage decisions. Several proteins like different growth factors are involved in the mechanisms of the neural stem cell niche as well as in the maintenance and growth of the newly formed neurons. These include the BMPs, FGFs, PDGF, VEGF, TGF β, BDNF and others. Nerve growth factor (NGF) is a small secreted protein that is important for the growth, maintenance, and survival of certain target neurons (nerve cells). It also functions as a signaling molecule. While “nerve growth factor” refers to a single factor, “nerve growth factors” refers to a family of factors also known as neurotrophins. Other members of the neurotrophin family that are well recognized include Brain-Derived Neurotrophic Factor (BDNF), Neurotrophin-3 (NT-3), and Neurotrophin 4/5 (NT-4/5). NGF is critical for the survival and maintenance of sympathetic and sensory neurons. Without it, these neurons undergo apoptosis. Nerve growth factor causes axonal growth. Studies have shown that it causes also axonal branching and elongation. Several brain diseases are considered to be caused by disorders in the neural stem cell niche and especially in the precise signaling of this microenvironment. Therefore restoring correct growth factor signaling is a promising target for the treatment of brain diseases.

### Eye Retina

[0015] The vertebrate retina is a light-sensitive layer of tissue, lining the inner surface of the eye. Light striking the retina initiates a cascade of chemical and electrical events that ultimately trigger nerve impulses. These are sent to various visual centers of the brain through the fibers of the optic nerve. In vertebrate embryonic development, the retina and the optic nerve originate as outgrowths of the developing brain, so the retina is considered part of the central nervous system (CNS) and is actually brain tissue. Retinal development involves a complex progression of tissue induction, proliferation of retinal progenitor cell (RPC) populations and terminal differentiation of these cells into specific functional types. Growing evidence indicates that several extrinsic cues play a critical role in the retinal cell development. One such extrinsic molecule type, bone morphogenetic protein (BMP), is a member of the transforming growth factor (TGF)-β family of signaling molecules, which are known to regulate a variety of cell functions in the developing nervous system, including neural induction, cell fate determination, apoptosis, and proliferation. BMP-2, -4, and -7 and their receptors (BMPRs) are expressed in the eye during embryogenesis and are essential for multiple aspects of retinal development. There are many inherited and acquired diseases or disorders that may affect the retina like for example the macular degeneration. It is a degenerative disease that usually affects older adults and results in a loss of vision in the center of the visual field (the macula) because of damage to the retina. Age-related macular degeneration is the leading cause of irreversible blindness in North America. Regenerating the retina via the growth factor signaling responsible for its development is thus a significant potential therapeutic target.

### Kidneys

[0016] The kidney is a complex tissue consisting of several different cell types including glomerular podocytes, endothelial cells, mesangial cells, interstitial cells, tubular epithelial cells, and connecting duct cells. These cell types interact to establish a precise cellular environment that functions as an efficient tissue. Kidney diseases are currently a global public health problem, with an incidence that has reached epidemic proportions and continues to climb worldwide. Kidney failure can be associated with chronic kidney disease (CKD), which is a progressive loss in renal function over a period of months or years. Renal fibrosis, the common pathological feature of CKDs, is characterized by excessive accumulation of ECM (extracellular matrix). TGF-β (transforming growth factor-β) and BMP-7 (bone morphogenetic protein-7), two key members in the TGF-β superfamily, play important but diverse roles in CKDs (chronic kidney diseases). Both TGF-β and BMP-7 share similar downstream Smad signalling pathways, but counter-regulate each other to maintain the balance of their biological activities. During renal injury in CKDs, this balance is significantly altered because TGF-β signalling is up-regulated by inducing TGF-β1 and activating Smad3, whereas BMP-7 and its downstream Smad1/5/8 are down-regulated. In the context of renal fibrosis, Smad3 is pathogenic, whereas Smad2 and Smad7 are renoprotective. However, this counter-balancing mechanism is also altered because TGF-β1 induces Smurf2, an ubiquitin E3-ligase, to target Smad7 as well as Smad2 for degradation. Thus overexpression of renal Smad7 restores the balance of TGF-β/Smad signaling and has therapeutic effect on CKDs. It may this be that restoring the BMP-7 signaling is a potential therapeutic target in renal regenerative therapies.

### Ligaments and Tendons

[0017] Tendons and ligaments (T/L) are dense connective tissues of mesodermal origin. They connect and transmit force from muscle to bone and bone to bone, respectively. Both tissues are able to store elastic energy and withstand hightensile forces, on which locomotion is entirely dependent. T/L are predominantly composed of collagen type I fibrils organized in a highly hierarchical manner that is unique for the T/L. Other collagens (types XI, XII, XIV, and XV) and various proteoglycans (decorin, cartilage oligomeric matrix protein (COMP), byglican, lumican, fibromodulin, tenascin-C, etc.) are building the remaining T/L substance. The cellular content of T/L is dominated by tendon-specific fibroblasts named tenocytes. During embryonic development, the tendon-specific cells descend from a sub-set of mesenchymal progenitors condensed in the syndetome, a dorsolateral domain of the sclerotome. Moreover, Mesenchymal stem cells (MSCs), multipotent adult cells that give rise to tissues of mesodermal origin, have been shown to generate in vitro T/L progenitor cells. Several tendon injuries result from gradual wear and tear to the tendon from overuse or aging. Tendon healing is a complex and highly-regulated process that is initiated, sustained and eventually terminated by a large number and variety of molecules. Growth factors represent one of the most important molecule families involved in regeneration. The activity of five growth factors has been best characterized during this process: insulin-like growth factor-I (IGF-I), transforming growth factor beta (TGFbeta), vascular endothelial growth factor (VEGF), platelet-derived growth factor (PDGF), and basic fibroblast growth factor (bFGF). Stimulating the differentiation of MSCs and/or inducing growth factor activity thus represent two potentially significant therapeutic targets in T/L regeneration and healing.

### Fertility and Reproduction

[0018] Reproduction (or procreation) is the biological process by which new offspring individual organisms are produced from their parents. Sexual reproduction is a biological process by which organisms create descendants that have a combination of genetic material contributed from two (usually) different members of the species. Fertility is the natural capability to produce offspring. The development and physiological functions of basic structures in the mammalian reproductive system are influenced by the tissue-specific expression of members of different growth factors families like the BMP family. The establishment of the germ line is a fundamental aspect of reproduction. Germ cell determination is induced in epiblast cells by the extraembryonic ectoderm, and is not acquired through the inheritance of preformed germ plasma. There is some strong evidence that BMP-4 and -8b play a central role in determining primordial germ cell (PGC) formation in the embryo. The genes encoding BMP-4 and -8b have overlapping expression in the extraembryonic ectoderm before gastrulation, i.e., before PGCs are seen. Thus, PGC formation requires BMP-4 expression. There is also evidence from knockout mammals that BMP-8b is required for PGC formation. Furthermore, there is increasing evidence that locally produced BMPs play a major role in the differentiation of the pituitary gonadotrope. Restoring the BMPs signaling would thus be an important factor in infertility therapies.

### Hair

[0019] Tissue homeostasis and regeneration are regulated through balancing quiescence and activation of quiescent epithelial stem cells (SCs). Hair follicles (HFs) follow this process. Throughout adult life, they undergo dynamic, synchronized cycles of degeneration (catagen), quiescence (telogen), and regeneration (anagen). During telogen, which can last for months, HFSCs are quiescent and reside within a specialized microenvironment called the bulge. Within this niche, HFSCs surround the hair shaft produced in the previous cycle. Throughout telogen, the base of the bulge, called the secondary hair germ (HG), directly abuts the underlying mesenchymal dermal papillae (DP), a key signaling center for HFSCs. The telogen/anagen transition relies upon DP-HFSC crosstalk to generate the necessary threshold of activating factors. Upon activation, HFSCs in the HG are the first to proliferate and initiate HF regeneration, whereas HFSCs within the bulge become active several days later. As the new HF emerges, the DP stimulus is pushed increasingly further from niche SCs, which return to quiescence. In contrast, throughout anagen, relatively undifferentiated bulge cell progeny along the outer root sheath (ORS) accelerate proliferation as they approach the DP. This fuels a steady production of transiently amplifying matrix cells, which undergo a few divisions while in contact with DP and then terminally differentiate to form the hair and inner root sheath (IRS). At the anagen/catagen transition, matrix cells apoptosis and the DP retracts upward along with the dying/differentiating epithelial strand. As the HF reenters telogen, growth factors from the inner layer of non-SC niche cells and from surrounding dermal tissue impose a threshold, which must be overcome to initiate the next cycle. When cells in the telogen phase are not able to reenter into the anagen phase, hair stop their growth, and conditions such as hair loss emerge. As a result, acting on the differentiation cycle of mammal hair follicle mesenchymal stem cells and precursor cells may have applications in hair follicle tissue regeneration thus preventing hair-loss and activating hair-growth, preventing/treating alopecia areata, alopecia totalis, alopecia universalis, androgenic alopecia (male pattern baldness), telogen effluvium, anagen effluvium or chemotherapy-induced alopecia, but is not limited.

### Skin

[0020] The skin constantly renews itself throughout adult life. Stem cells (SCs) residing in the epidermis ensure the maintenance of adult skin homeostasis, but they also participate in the repair of the epidermis after injuries. The skin protects the body from dehydration, injury and infection. The skin consists of an underlying dermis, separated by a basement membrane from the multilayered overlaying epidermis. The dermis is of mesodermal embryonic origin and contains as adult stem cells fibroblastic mesenchymal stem-cell-like cells. These cells have a multi-lineage differentiation potential, being also able to form adipose tissue or bones. The stratified epidermis is of ectodermal origin and composed of keratinocytes that differentiate to a water-impermeable stratum corneum. The terminally differentiated cells in the epidermis are shed from the skin, necessitating a continuous delivery of newly differentiating cells. The epidermis is completely renewed about every four weeks. Given that the differentiated cells cannot divide anymore, their replacement depends on epidermal stem cells. Skin stem cells are of special interest because they are easily accessible. In recent years, several products said to have a link with skin stem cells have found their way to the cosmetic products market such as AMATOKIN®, a face care product line commercialised by Voss Laboratories and said to stimulate stem cells in the skin, or Dior's CAPTURE® R60/80 XP product line used as anti-wrinkles whose mechanism is said to be based on the protection of the life force of stem cells. As a result, there is thus some potential in acting on the differentiation cycle of mammal skin mesenchymal stem cells and precursor cells with potential applications in skin tissue regeneration thus preventing wrinkles formation and generally improving skin appearance.

### Blood

[0021] Blood is a bodily fluid in animals that delivers necessary substances such as nutrients and oxygen to the cells and transports metabolic waste products away from those cells. When it reaches the lungs, gas exchange occurs wherein carbon dioxide is diffused out of the blood into the alveoli and oxygen is diffused into the blood. This oxygenated blood is pumped to the left hand side of the heart in the pulmonary vein and enters the left atrium. From here it passes through the bicuspid valve, through the ventricle and taken all around the body by the aorta. Blood contains antibodies, nutrients, oxygen and much more to help the body work. In vertebrates, it is composed of blood cells suspended in blood plasma. Plasma, which constitutes 55% of blood fluid, is mostly water (92% by volume), and contains dissipated proteins, glucose, mineral ions, hormones, carbon dioxide (plasma being the main medium for excretory product transportation), and blood cells themselves. Albumin is the main protein in plasma, and it functions to regulate the colloidal osmotic pressure of blood. Hematopoietic stem cells (HSCs) are the blood cells that give rise to all the other blood cells and are derived from the mesoderm. They are located in the red bone marrow, which is contained in the core of most bones. The HSCs give rise to the myeloid lineage (monocytes and macrophages, neutrophils, basophils, eosinophils, erythrocytes, megakaryocytes/platelets, dendritic cells), and to the lymphoid lineages (T-cells, B-cells, NK-cells). The most abundant cells in the vertebrate blood are red blood cells (also called RBSs or erythrocytes). These contain hemoglobin, an iron-containing protein, which facilitates oxygen transport by reversibly binding to this respiratory gas and greatly increasing its solubility in blood. Blood cell degeneration-related diseases, conditions or disorders include, but are not limited to, Anemia, Iron-deficiency anemia, Anemia of chronic disease, Pernicious anemia, Aplastic anemia, Autoimmune hemolytic anemia, Thalassemia, Sickle cell anemia, Polycythemia vera, Vitamin deficiency anemia, Hemolytic anemia, Thrombocytopenia, Idiopathic thrombocytopenic purpura, Heparin-induced thrombocytopenia, Thrombotic thrombocytopenic purpura, Essential thrombocytosis (primary thrombocythemia), Thrombosis, Hemophilia, von Willebrand disease, Hypercoaguable state (hypercoagulable state), Deep venous thrombosis, Disseminated intravascular coagulation (DIC), Thrombocytopenia, Immune Thrombocytopenia (ITP), Drug-induced thrombocytopenia (DITP), Gestational thrombocytopenia, Thrombotic microangiopathies (TMA), Drug-induced thrombotic microangiopathies, Complement-mediated thrombotic microangiopathies, Mixed cryoglobulinemia, Eosinophilia, Eosinopenia, Idiopathic hypereosinophilic syndrome, Antiphospholipid syndrome (Hughes syndrome), Glanzmann's thrombasthenia, Wiskott-Aldrich syndrome (WAS), Leishmania infection, Toxoplasmosis, Hereditary hypogammaglobulinemia, Nonfamilial hypogammaglobulinemia, Leukopenia, Agranulocytosis, Basopenia, Bernard-Soulier syndrome (BSS), Malaria, Sepsis, or Hemolytic uremic syndrome (HUS).

### Adipose Tissue

[0022] Adipose tissue is loose connective tissue composed mostly of adipocytes. In addition to adipocytes, adipose tissue contains the stromal vascular fraction (SVF) of cells including preadipocytes, fibroblasts, vascular endothelial cells and a variety of immune cells (i.e. adipose tissue macrophages (ATMs)). Adipose tissue is derived from preadipocytes. Its main role is to store energy in the form of lipids, although it also cushions and insulates the body. Pre-adipocytes are thought to be undifferentiated fibroblasts that can be stimulated to form adipocytes. The pre-adipocytes originate from mesenchymal stem cells. Areolar connective tissue is composed of adipocytes. The term “lipoblast” is used to describe the precursor of the adult cell. Adipose tissue degeneration-related diseases, conditions or disorders include, but are not limited to, Obesity, Dercum's disease (DD), Multiple symmetric lipomatosis (MSL), Familial multiple lipomatosis (FML), Lipodystrophy, Lipedema, or Atherosclerosis.

### Lung

[0023] The lung is the essential respiration organ in many air-breathing animals. In mammals the two lungs are located near the backbone on either side of the heart. Their principal function is to transport oxygen from the atmosphere into the bloodstream, and to release carbon dioxide from the bloodstream into the atmosphere. A large surface area is needed for this exchange of gases, which is accomplished by the mosaic of specialized cells that form millions of tiny, exceptionally thin-walled air sacs called alveoli. Lung cells include, but are not limited to, type I pneumocytes, type II pneumocytes, clara cells and goblet cells. Lung tissue degeneration-related diseases, conditions or disorders include, but are not limited to, Asthma, Chronic obstructive pulmonary disease (COPD), Chronic bronchitis, Emphysema, Cystic fibrosis, Pulmonary edema, Acute respiratory distress syndrome (ARDS), Pneumoconiosis, Interstitial lung disease (ILD), Sarcoidosis, Idiopathic pulmonary fibrosis, Pulmonary embolism (PE), Pulmonary hypertension, Pleural effusion, Pneumothorax, Mesothelioma, Granulomatosis with polyangiitis (GPA), Goodpasture syndrome (GPS), Pulmonary hyperplasia, Infant respiratory distress syndrome (IRDS), Chronic obstructive pulmonary disease (COPD), Silicosis, Sleep Apnea, Severe Acute Respiratory Syndrome (SARS), Pulmonary fibrosis, Primary ciliary dyskinesia (PCD), Pneumoconiosis (Black Lung Disease), Hypersensitivity Pneumonitis, Cryptogenic Organizing Pneumonia (Bronchiolitis Obliterans Organizing Pneumonia (BOOP)), Byssinosis, Bronchopulmonary Dysplasia, Bronchiolitis, Bronchiectasis, Asbestosis, Pertussis, Middle Eastern Respiratory Syndrome (MERS), Pneumonia, Tuberculosis, Bronchitis, Histoplasmosis, Coccidioidomycosis (Cocci), or Acute bronchitis.

[0024] The present invention thus provides compounds, compositions, microenvironments, functionalised bioactive carriers, medical devices, kits, methods and processes for the design, preparation, manufacture and/or formulation of such compounds, compositions, functionalised bioactive carriers, medical devices and kits, and methods and uses thereof for regenerating or recoding mammalian tissues.

### BRIEF DESCRIPTION OF THE DRAWINGS

[0025] FIG. 1 is a diagram representing a fluorescence intensity of certain embodiments of the present disclosure covalently grafted onto a titanium surface.

[0026] FIG. 2 is a diagram showing a proliferation of osteoblast precursors after 48 hours of culture on a native apatite ceramic biomaterial and on a covalently modified apatite ceramic biomaterial of the present disclosure.

[0027] FIG. 3 is a diagram representing a commitment of human Bone Marrow Mesenchymal Stem Cells towards osteoblast-like cells after 62 hours of culture on titanium biomaterials covalently modified according to the present disclosure using Runx2 and Osterix immunofluorescent stainings.

[0028] FIG. 4 is a diagram representing an Optical Profilometry micrograph showing an ECM produced by osteoblast precursors cultured for 24 h on a titanium biomaterial of the present disclosure.

[0029] FIG. 5 is a diagram representing a Quantitative Real Time PCR analysis for the expression of Runx2 for cells cultured on a non-modified PEEK biomaterial (control) and on a PEEK biomaterial covalently modified according to the present disclosure, (P<0.001).

[0030] FIG. 6 is a representation of a fluorescence intensity of non-covalently deposited osteogenic GFR-binding compounds of the present disclosure mixed with type-I collagen or with apatite ceramics substrates. The images represent surfaces non-covalently coated with osteogenic peptides-FITC.

[0031] FIG. 7 is a representation of a fluorescence intensity of osteogenic GFR-binding compounds of the present disclosure mixed with a type-I collagen substrate after 3, 7 and 10 days (a). The images represent surfaces non-covalently coated with osteogenic peptides-FITC. (b) is a fluorescence intensity of osteogenic peptides-FITC coated on apatite ceramics after incubation in cell culture medium for the given indicated times (up to 10 days).

[0032] FIG. 8 is a diagram representing a quantification of the proliferation of osteoblast precursors after 48 hours of cell culture on apatite ceramics and on collagen coated with osteogenic GFR-binding compounds of the present disclosure.

[0033] FIG. 9 is a representation of the commitment of human Bone Marrow Mesenchymal Stem Cells towards osteoblast-like cells after 48 hours of culture on collagen and on apatite ceramics coated with osteogenic GFR-binding compounds of the present disclosure using Runx2 and Osterix immunofluorescent stainings (a). (b) is an analysis for Alkaline Phosphatase Activity.

[0034] FIG. 10 is a representation of an immunofluorescent staining of F-actin (green) and Osteopontin (red) for hMSC showing their differentiation into osteoblast cells after 96 hours of culture on a type-I collagen scaffold non-covalently modified with a GFR-binding compound of the present disclosure.

[0035] FIG. 11 is a representation of a Quantitative Real Time PCR analysis of the expression of Runx2 in cells cultured on native type-I collagen and on native type-I collagen scaffold non-covalently modified with osteogenic GFR-binding compounds of the present disclosure (P<0.005).

[0036] FIG. 12 is (a) a representation of a quantification of the cell area of hMSCs cultured on a native hydrogel (control) and on a hydrogel covalently modified with chondrogenic GFR-binding compounds of the present disclosure. hMSCs committed towards chondrocyte differentiation as seen by positive Sox9 (Transcription factor) immunofluorescent staining. (b) is a representation of a Quantitative Real Time PCR analysis of the expression of the Sox9 gene and a semi-quantitative RT-PCR analysis for the expression of the Aggrecan gene.

[0037] FIG. 13 is a representation of a distribution of the endothelial cell adherens junction's size. The results were obtained from immunofluorescence staining with an antibody against CD31 (PECAM1).

[0038] FIG. 14 is confocal images of endothelial cells (ECs) cultured on native polymer and covalently modified polymer. The fluorescence intensities corresponding to CMFDA was represented in gray.

[0039] FIG. 15 is a representation of (a) a Phase-contrast Micrograph showing the progression of migrating cells after scratching and (b) a Mean epithelial cell velocity measured for cells cultured on a native polymer or on a polymer covalently modified with a GFR-binding compound of the present disclosure.

[0040] FIG. 16 is (a) a diagram representing the results of a Quantitative Real Time PCR analysis for the expression of Sox2 for cells cultured on a native hydrogel (control) and on a hydrogel covalently modified with a GFR-binding compound of the present disclosure. (b) The total BMP-6 immunofluorescence intensity in the cell culture medium was quantified for Hair Follicle Stem Cells cultured for 96 h.

[0041] FIG. 17 is (a) a quantification of the cell area of hMSCs cultured on native hydrogel (control) and on hydrogel covalently modified with a GFR-binding compound of the present disclosure. The average cell area was estimated from approximately 25 cells from 2 different passages. (b) is a Quantitative Real Time PCR analysis for the expression of the COMP gene (Cartilage Oligomeric Matrix Protein, a tendon/ligament lineage gene).

[0042] FIG. 18 is (a) Representative images of neurons cultured on a native polymer and on a covalently modified polymer coated with a GFR-binding compound of the present disclosure. Phalloidin and vinculin immunostainings are represented in green and red, respectively. The nucleus was stained with DAPI and is represented in blue. (b) is a diagram representing the results of a Quantitative Real Time PCR analysis of the expression of the Growth Associated Protein 43 (GAP43) gene for the expression of cells cultured on the native polymer (PET, control) and on a polymer (PET) covalently modified with a GFR-binding compound of the present disclosure.

[0043] FIG. 19 is diagram representing the amount of STRO-1 (a hMSC stemness marker) present in the cells expressed as an average fluorescence intensity, normalized by the number of cells.

[0044] FIG. 20 is a screen shot of the Standard Protein Blast online software used in the RMSD calculation procedure.

[0045] FIG. 21 is an overview of the experimental protocol used to demonstrate the effect of several embodiments according to the present disclosure on osteoporosis.

[0046] FIG. 22 is a Histological analysis of coronal sections of the femoral defect site for the “No implantation” condition, 3 weeks (left) and 12 weeks (right) after inducing a critical size defect. 3 types of stainings were performed on the sections: Haematoxylin and Eosin staining (HE) to qualitatively analyze tissue morphology; Tartrate-Resistant Acid Phosphatase (TRAP) staining to highlight the active osteoclasts (red) fraction inside bone tissue (light blue); Von Kossa and Van Gieson (VKVG) staining to highlight mineralized bone tissue (black), non mineralized osteoid tissue (dark pink) and fibrous tissue (light pink). The discontinuous lines on the HE staining indicate the approximate defect site area and the black arrows indicate the defect site entry.

[0047] FIG. 23 is a Histological analysis of coronal sections of the femoral defect sites for representative GFR-binding compound of the present disclosure, released as a solution from a capsule, as compared to Control 1, 3 weeks (left) and 12 weeks (right) after administration in the critical size induced defect. 3 types of stainings were performed on the sections: Haematoxylin and Eosin staining (HE) to qualitatively analyze tissue morphology; Tartrate-Resistant Acid Phosphatase (TRAP) staining to highlight the active osteoclasts (red) fraction inside bone tissue (light blue); Von Kossa and Van Gieson (VKVG) staining to highlight mineralized bone tissue (black), non mineralized osteoid tissue (dark pink) and fibrous tissue (light pink). The discontinuous lines on the HE staining indicate the approximate defect site area.

### DETAILED DESCRIPTION

[0048] Cellular differentiation is the process by which a cell type becomes specialized, and involves a highly controlled switch from one gene expression pattern to another. In each specific lineage, cells progress through various stages of differentiation and maturation. In the case of bone lineage, osteoblast progenitors are derived from adult bone marrow mesenchymal stem cells, followed by osteoblast precursors, mature osteoblasts and osteocytes.

[0049] Mesenchymal stem cells or MSCs are multipotent stromal cells that can differentiate into a variety of cell types including osteoblasts (bone cells), chondrocytes (cartilage cells), neurons, endothelial cells and adipocytes (fat cells). Growth factors generally modulate MSC activity through non-covalent binding to specific receptors called growth factor receptors (GFRs). Growth factors (GF) bind to serine-threonine kinase receptors on the cell surface, triggering specific intracellular pathways that activate and influence gene transcription, having effects in cell proliferation and/or differentiation. There are three or more receptors (types I, II and III) for GF members but only types I and II are required for binding and signalling. After binding of signal molecule, receptors are activated which leads into induction of SMAD pathway. Type I receptors phosphorylate receptor-regulated Smads (R-Smads) which form a complex with common-partner Smad (Co-Smad). This complex is translocated into the nucleus and modulates gene transcription with other transcription factors required for chondrogenic differentiation.

[0050] Modulation of such an activity may typically be performed using recombinant growth factors. However, studies indicated that prior attempts using this technology, for instance, in the field of spinal fusion, may be harmful to the patient treated and lead in certain cases to the development of tumors and other serious side-effects. The real clinical advantage over previously employed technics not involving the use of recombinant growth factors may also be questioned.

[0051] Other attempts to induce tissue formation involve the use of synthetic peptides reproducing parts of the natural sequences of growth factors. For example, these synthetic peptides have been studied for their potential use in improving bone repair. However, these peptides generally often lack sufficient biological activity and suffer from poor in-vitro and/or in-vivo stability. Furthermore, the tissue-induction activity of conventional synthetic peptides is not rapid. For example, in-vitro osteogenic differentiation of mesenchymal stem cells cultured on biomaterials using such conventional peptides is generally observed after 3 weeks of cell culture.

[0052] The present invention thus provides embodiments for:
[0053] Modifying and/or enhancing and/or modulating and/or promoting and/or activating tissue regeneration in mammals, preferably humans;
[0054] Modifying and/or enhancing and/or modulating and/or promoting and/or activating bone, and/or cartilage, and/or vascular, and/or neuronal, and/or retinal, and/or organs such as kidneys or lungs, and/or ligament/tendon, and/or hair follicle, and/or skin, and/or blood, and/or adipose, tissue regeneration;
[0055] Modifying and/or enhancing and/or modulating and/or promoting and/or activating embryonic patterning;
[0056] Modifying and/or enhancing and/or modulating and/or promoting and/or activating cellular migration and wound healing;
[0057] Modifying and/or enhancing and/or modulating and/or promoting and/or activating the closure of any type of living tissues;
[0058] Modifying and/or enhancing and/or modulating and/or promoting and/or activating female fertility;
[0059] Preventing and/or suppressing or avoiding or reducing tissue degeneration in mammals, preferably humans;
[0060] Preventing and/or suppressing or avoiding or reducing bone, and/or cartilage, and/or vascular, and/or neuronal, and/or retinal, and/or organs such as kidneys or lungs, and/or ligament/tendon, and/or hair follicle, and/or skin, and/or blood, and/or adipose, tissue degeneration;
[0061] Protecting a subject from a tissue degeneration disease, disorder or condition;
[0062] Protecting a subject from osteoporosis;
[0063] Preventing and/or suppressing or avoiding or reducing cellular immobilization and wound formation and/or progression;
[0064] Preventing and/or suppressing or avoiding or reducing the misclosure of any type of living tissue;
[0065] Preventing and/or suppressing or avoiding or reducing female infertility;
[0066] Preventing and/or suppressing or avoiding or reducing hair-loss;
[0067] Preventing/treating alopecia areata, alopecia totalis, alopecia universalis, androgenic alopecia (male pattern baldness), telogen effluvium, anagen effluvium or chemotherapy-induced alopecia,
[0068] Modifying and/or enhancing and/or modulating and/or promoting and/or activating the osteogenicity, and/or the chondrogenecity, and/or the endothelization and vascularization ability, and/or hair growth ability, and/or the wound healing ability, and/or the skin repair ability, and/or the tissue defect closure ability, and/or the neuroregeneration ability, and/or the ligament/tendon tissue regeneration ability, and/or the female fertility ability, of a bioactive carrier such as a biomaterial which may be useful in the manufacturing of medical devices;
[0069] Modifying and/or enhancing and/or activating anti-aging/anti-wrinkle effects/properties in cosmetic products;
[0070] Modifying and/or enhancing and/or activating hair growth effects/properties in cosmetic products;
[0071] Modifying and/or enhancing and/or modulating and/or promoting and/or inducing and/or activating stem cells, preferably adult stem cells, more preferably mesenchymal stem cells, commitment and/or differentiation in a specific lineage of cells;
[0072] Modifying and/or enhancing and/or modulating and/or promoting and/or inducing and/or activating progenitor cells differentiation and/or maturation;
[0073] Obtaining/producing functional differentiated cells;
[0074] Obtaining/producing differentiated cells with modified and/or improved functionality and/or physiological activity.

### I. Definitions

[0075] Those skilled in the art will recognize, or be able to ascertain using no more than routine experimentation, many equivalents to the specific embodiments in accordance with the invention described herein. The scope of the present invention is not intended to be limited to the present description, but rather is as set forth in the appended claims.

[0076] In the claims, articles such as “a”, “an”, and “the” may mean one or more than one unless indicated to the contrary or otherwise evident from the context. Claims or descriptions that include “or” between one or more members of a group are considered satisfied if one, more than one, or all of the group members are present in, employed in, or otherwise relevant to a given product or process unless indicated to the contrary or otherwise evident from the context. The invention includes embodiments in which exactly one member of the group is present in, employed in, or otherwise relevant to a given product or process. The invention includes embodiments in which more than one, or all of the group members are present in, employed in, or otherwise relevant to a given product or process.

[0077] It is also noted that the term “comprising” is intended to be open and permits but does not require the inclusion of additional elements or steps. When the term “comprising” is used herein, the terms “consisting of”, “consisting essentially of”, “consisting substantially of” and “consisting exclusively of” are thus also encompassed and disclosed.

[0078] As used herein, the term “approximately” or “about,” as applied to one or more values of interest, refers to a value that is similar to a stated reference value. In certain embodiments, the term “approximately” or “about” refers to a range of values that fall within 25%, 20%, 19%, 18%, 17%, 16%, 15%, 14%, 13%, 12%, 11%, 10%, 9%, 8%, 7%, 6%, 5%, 4%, 3%, 2%, 1%, or less in either direction (greater than or less than) of the stated reference value unless otherwise indicated, self-evident or contradictory in context (e.g. except where such number would exceed 100% of a possible value).

[0079] As used herein and unless otherwise indicated or contradictory in context, the term “with” followed by a specific number of amino acids, when used to define a particular peptide, variant or analog thereof, such as in “a peptide with three amino acids”, means that such peptide, variant or analog thereof, contains exclusively the specific number of amino acids specified after this term.

[0080] As used herein and unless otherwise indicated or contradictory in context, the term “Ci-alkyl” is intended to specifically and individually disclose any branched or unbranched radical, moiety or functional group having “i” carbon atom(s).

[0081] The carbon atom content of the various hydrocarbon-containing moieties herein may be indicated by a prefix designating the minimum and maximum number of carbon atoms in the moiety. For example, in certain embodiments, (Ca-Cb)alkyl indicates an alkyl moiety of the integer “a” to the integer “b” carbon atoms, inclusive.

[0082] At various places in the present specification, substituents of compounds of the present disclosure may be disclosed in groups or in ranges. It is specifically intended that the present disclosure include each and every individual sub-combination of the members of such groups and ranges. For example, in certain embodiments, the term “C1-C5 alkyl” is an abbreviation for (and thus is specifically intended to individually disclose) C1-alkyl (i.e. methyl), C2-alkyl (i.e. ethyl), C3-alkyl (i.e. 1-propyl and 2-propyl), C4-alkyl (i.e. 1-butyl, sec-butyl, iso-butyl and tert-butyl), and C5-alkyl (i.e. 1-pentyl, 2-pentyl, 3-pentyl, 2-methyl-1-butyl, 3-methyl-1-butyl, 2-methyl-2-butyl, 3-methyl-2-butyl, 2,2-dimethyl-1-propyl and 1,1-dimethyl-1-propyl).

[0083] As used herein, unless indicated otherwise or contradictory in context, the terms “alkyl” and “(Ca-Cb)alkyl” refer to monovalent hydrocarbon radicals containing the requisite number of carbon atoms as described above, having straight or branched moieties or combinations thereof. As used herein, alkyl groups may be optionally substituted with between one to four substitutes. Non-limiting examples of alkyl groups include, e.g. methyl, ethyl, n-propyl, isopropyl, n-butyl, isobutyl, sec-butyl, t-butyl, etc. Of course, other alkyl groups will be readily apparent to those of skilled in the art given the benefit of the present disclosure.

[0084] Where ranges are given, endpoints are included. Furthermore, it is to be understood that unless otherwise indicated or otherwise evident from the context and understanding of one of ordinary skill in the art, values that are expressed as ranges can assume any specific value or sub-range within the stated ranges in different embodiments of the invention, to the tenth of the unit of the lower limit of the range, unless the context clearly dictates otherwise. For example, in certain embodiments, a disclosed 0-10 range would, for example, in certain embodiments, also specifically and individually disclose the following values and ranges: 0, 1, 2, 3, 4, 5, 6, 7, 8, 9, 10, 0.1, 0.2, 0.3, 0.4, 0.5, 0.6, 0.7, 0.8, 0.9, 1, 1.1, 1.2, 1.3, 1.4, 1.5, 1.6, 1.7, 1.8, 1.9, 2, 2.1, 2.2, 2.3, 2.4, 2.5, 2.6, 2.7, 2.8, 2.9, 3, 3.1, 3.2, 3.3, 3.4, 3.5, 3.6, 3.7, 3.8, 3.9, 4, 4.1, 4.2, 4.3, 4.4, 4.5, 4.6, 4.7, 4.8, 4.9, 5, 5.1, 5.2, 5.3, 5.4, 5.5, 5.6, 5.7, 5.8, 5.9, 6, 6.1, 6.2, 6.3, 6.4, 6.5, 6.6, 6.7, 6.8, 6.9, 7, 7.1, 7.2, 7.3, 7.4, 7.5, 7.6, 7.7, 7.8, 7.9, 8, 8.1, 8.2, 8.3, 8.4, 8.5, 8.6, 8.7, 8.8, 8.9, 9, 9.1, 9.2, 9.3, 9.4, 9.5, 9.6, 9.7, 9.8, 9.9, 10, 0-1, 0-2, 0-3, 0-4, 0-5, 0-6, 0-7, 0-8, 0-9, 1-2, 1-3, 1-4, 1-5, 1-6, 1-7, 1-8, 1-9, 2-3, 2-4, 2-5, 2-6, 2-7, 2-8, 2-9, 2-10, 3-4, 3-5, 3-6, 3-7, 3-8, 3-9, 3-10, 4-5, 4-6, 4-7, 4-8, 4-9, 4-10, 5-6, 5-7, 5-8, 5-9, 5-10, 6-7, 6-8, 6-9, 6-10, 7-8, 7-9, 7-10, 8-9, 8-10, 9-10, 0-0.1, 0-0.2, 0-0.3, 0-0.4, 0-0.5, 0-0.6, 0-0.7, 0-0.8, 0-0.9, 0-1.1, 0-1.2, etc.

[0085] As used herein and unless otherwise indicated or contradictory in context, the term “substantially” refers to the qualitative condition of exhibiting total or near-total extent or degree of a characteristic or property of interest. One of ordinary skill in the biological arts will understand that biological and chemical phenomena rarely, if ever, go to completion and/or proceed to completeness or achieve or avoid an absolute result. The term “substantially” is therefore used herein to capture the potential lack of completeness inherent in many biological and chemical phenomena.

[0086] In addition, it is to be understood that any particular embodiment of the present invention that falls within the prior art may be explicitly excluded from any one or more of the claims using the appropriate disclaimer(s) or proviso(s). Since such embodiments are deemed to be known to one of ordinary skill in the art, they may be excluded even if the exclusion is not set forth explicitly herein. Any particular embodiment of the compositions of the invention (e.g., any nucleic acid or protein encoded thereby; any method of production; any method of use; etc.) can be excluded from any one or more claims, for any reason, whether or not related to the existence of prior art.

[0087] All cited sources, for example, in certain embodiments, references, publications, databases, database entries, and art cited herein, are incorporated into this application by reference in their entirety, even if not expressly stated in the citation. In case of conflicting statements of a cited source and the instant application, the statement in the instant application shall control.

[0088] As the case may be, and unless otherwise indicated or contradictory in context, macromolecules molecular weights should be understood in the present description as being number averaged molecular weights.

[0089] The peptides mentioned in the present description may not follow the usual representation conventions. For instance, the N-terminal amino acid of a peptide sequence may be the first amino acid in the sequence or the last amino acid. Likewise, the C-terminal amino acid of a peptide sequence may be the first amino acid in the sequence or the last amino acid. For example, in the peptide sequence NAIS (SEQ ID NO: 84113), “N” may be N-terminal or C-terminal, and “S” may be N-terminal or C-terminal. Consequently, for the purpose of the present disclosure, e.g. NAIS (SEQ ID NO: 84113) also covers SIAN (SEQ ID NO: 84999), SAIS (SEQ ID NO: 84116) also covers SIAS (SEQ ID NO: 85000), SPIN (SEQ ID NO: 84119) also covers NIPS (SEQ ID NO: 85001), etc.

[0090] In the present application, when reference is made to a certain peptide (e.g. a GFR-binding compound as provided herein) comprising one or more other peptide(s), said one or more other peptide(s) is(are) understood to be stably (in most cases, covalently) attached/bound to at least one part of said peptide. The attachment/binding may be located anywhere on the peptide unless indicated otherwise, contradictory in context or contradictory to general scientific rules. No specific attachment/binding location of said one or more other peptide(s) to said peptide shall be assumed unless specifically mentioned.

[0091] Peptide or polypeptide: As used herein, the term “peptide” or “polypeptide” are used interchangeably and refers to a polymer of less than or equal to 100 amino acids long, e.g., about 2, 3, 4, 5, 10, 15, 20, 25, 30, 35, 40, 45, 50, 55, 60, 65, 70, 75, 80, 85, 90, 95 or 100 amino acids long. The terms apply to amino acid polymers in which one or more amino acid residue is an artificial chemical mimetic of a corresponding naturally occurring amino acid, as well as to naturally occurring amino acid polymers, non-naturally occurring amino acid polymers, peptide analogs, peptide variants and peptide mimetics. Conventional techniques for synthesising peptides involve the activation of the carboxylic acid function of an amino acid or of a peptide, using a coupling agent. This activated acid is then contacted with an amino acid or a peptide in which the N-terminal amino acid is not protected, thus forming an amide bond also called peptide bond. Coupling reaction conditions together with coupling agents are well known in the art and described, for instance, in Greene, “Protective Groups in Organic Synthesis”, Wiley, New York, 2007 4th edition. In addition, suitable peptide synthesis routes are described, for instance, in Hojo H., Recent progress in the chemical synthesis of proteins, Curr Opin Struct Biol. 2014; 26C:16-23 and Saranya Chandrudu, et al., Chemical Methods for Peptide and Protein Production, Molecules, 2013, 18, 4373-4388, each of which is incorporated herein by reference in its entirety. There are two main strategies for peptide synthesis i.e. liquid-phase peptide synthesis and solid-phase peptide synthesis (SPPS) which is now most commonly used for peptide synthesis. Instead of C-terminal protection with a chemical group, the C-terminus of the first amino acid is coupled to an activated solid support, such as polystyrene or polyacrylamide. This type of approach has a two-fold function: the resin acts as the C-terminal protecting group and provides a rapid method to separate the growing peptide product from the different reaction mixtures during synthesis. As with many different biological manufacturing processes, peptide synthesizers have been developed for automation and high-throughput peptide production. SPPS allows the synthesis of natural peptides which are difficult to express in bacteria, the incorporation of unnatural amino acids, peptide/protein backbone modification, and the synthesis of D-proteins, which consist of D-amino acids. Very long peptide can be accessed by using native chemical ligation to couple two peptides together with quantitative yields.

[0092] Peptide analogs: As used herein, unless indicated otherwise or contradictory in context, the term “peptide analogs” refers to polypeptide variants which differ by one or more amino acid alterations, e.g., substitutions, additions or deletions of amino acid residues that still maintain one or more of the properties of the parent or starting peptide.

[0093] Peptide variants: As used herein, unless indicated otherwise or contradictory in context, the term “peptide variants” refers to a peptide which has a certain identity with a native or reference compound sequence. In one example, the peptide variant refers to any post-administration, application, injection modified peptide. Such post-administration, application, injection modifications include, but are not limited to, phosphorylation, acetylation, glutamylation, tyrosination, palmitoylation, glycosylation, myristoylation, palmitoylation, isoprenylation, glypiation, lipoylation, phosphopantetheinylation, acylation, alkylation, amidation, arginylation, polyglutamylation, polyglycylation, butyrylation, gamma-carboxylation, glycosylation, polysialylation, malonylation, hydroxylation, iodination, nucleotide addition, oxidation, adenylylation, propionylation, pyroglutamate formation, S-glutathionylation, S-nitrosylation, succinylation, sulfation, glycation, biotinylation, pegylation, ISGylation, SUMOylation, ubiquitination, Neddylation, Pupylation, citrullination, deamidation, eliminylation, carbamylation, and racemization.

[0094] Peptido-mimetic: As used herein, unless indicated otherwise or contradictory in context, the term “peptido-mimetic” or “peptidomimetic” refers to a synthetic chemical compound which comprises amino acids but not only and that is able to mimic the biological action of a peptide, often because the mimetic has a basic structure that mimics the basic structure of the peptide and/or has the salient biological properties of that peptide. In one particular example, a peptidomimetic is a hybrid molecule containing both, at least one peptide, and at least one of a polysaccharide, a polynucleotide or a linear or branched, saturated or unsaturated, hydrocarbon chain.

[0095] Linear peptide: As used herein, unless indicated otherwise or contradictory in context, the term “linear peptide” means a peptide in which the C-terminal and the N-terminal amino acid residues do not covalently interact with each other and none of the C-terminal or the N-terminal amino acid residues covalently interacts with another amino acid residue of the peptide chain.

[0096] Cyclic peptide: As used herein, unless indicated otherwise or contradictory in context, the term “cyclic peptide” means peptide in which the C-terminal and N-terminal amino acid residues do covalently interact with each other or the C-terminal and/or the N-terminal amino acid residues covalently interact with at least one other amino acid residue of the peptide chain so as to form a ring-like structure.

[0097] Amino acid: As used herein, unless indicated otherwise or contradictory in context, the term “amino acid” refers to naturally occurring and non-naturally occurring amino acids including amino acid analogs. Naturally occurring amino acids are those encoded by the genetic code, as well as those amino acids that are later modified, e.g., hydroxyproline, [gamma]-carboxyglutamate, and O-phosphoserine. Naturally encoded amino acids are the 20 common amino acids glycine (Gly, G), alanine (Ala, A), valine (Val, V), leucine (Leu, L), isoleucine (Ile, I), serine (Ser, S), threonine (Thr, T), phenylalanine (Phe, F), tyrosine (Tyr, Y), tryptophane (Trp, W), cysteine (Cys, C), methionine (Met, M), proline (Pro, P), aspartic acid (Asp, D), asparagine (Asn, N), glutamine (Gln, Q), glutamic acid (Glu, E), histidine (His, H), arginine (Arg, R) et lysine (Lys, K) and pyrrolysine and selenocysteine. Non-naturally occurring amino acids include, but are not limited to, the dextrogyre (D) isomers of the above-cited naturally-occurring amino acids. Amino acid analogs refers to compounds that have the same basic chemical structure as a naturally occurring amino acid i.e., an [alpha] carbon that is bound to a hydrogen, a carboxyl group, an amino group, and an R group (i.e. side chain), and which may be used in replacement thereof without substantially affecting the overall function of the peptide to which it belongs. Amino acid analogs (or non-naturally occurring amino acids) that may be suitable for implementing embodiments of the present invention include, but are not limited to, amino acids comprising a photoactivatable cross-linker, spin-labeled amino acids, fluorescent amino acids, metal binding amino acids, metal-containing amino acids, radioactive amino acids, amino acids with novel functional groups, amino acids that covalently or noncovalently interact with other molecules, photocaged and/or photoisomerizable amino acids, amino acids comprising biotin or a biotin analogue, glycosylated amino acids such as a sugar substituted serine, other carbohydrate modified amino acids, keto-containing amino acids, amino acids comprising polyethylene glycol or polyether, heavy atom substituted amino acids, chemically cleavable and/or photocleavable amino acids, amino acids with an elongated side chains as compared to natural amino acids, including but not limited to, polyethers or long chain hydrocarbons, including but not limited to, greater than about 5 or greater than about 10 carbons, carbon-linked sugar-containing amino acids, redox-active amino acids, amino thioacid containing amino acids, and amino acids comprising one or more toxic moiety. The term “AA^{I}” (AA roman numeral one) may be used in the description and refers to an amino acid which may be any amino acid as defined above in particular any naturally occurring and non-naturally occurring amino acids.

[0098] Amino acid side chain: As used herein, unless indicated otherwise or contradictory in context, the term “amino acid side chain” means the functional group of an amino acid that differentiates it from other amino acids. All amino acid structures have a carboxyl group, an amine group and a specific side chain.

[0099] AA^{II} (AA roman numeral two): As used herein, unless indicated otherwise or contradictory in context, the terms “polar amino acid” or “AA^{II}” means amino acids having a polar, non-charged group-containing side chain. Polar amino acids are protonated at physiological pH (about 7). Examples of polar amino acids include, but are not limited to, Cys (C), Asn (N), Gln (Q), Ser (S), Thr (T), or Tyr (Y).

[0100] AA^{III} (AA roman numeral three): As used herein, unless indicated otherwise or contradictory in context, the terms “acidic amino acid” or “AA^{III}” means amino acids having an acidic group-containing side chain. Acidic amino acid deprotonated forms predominate at physiological pH (about 7). Examples of acidic amino acids include, but are not limited to, Asn (N) and Glu (E).

[0101] AA^{IV} (AA roman numeral four): As used herein, unless indicated otherwise or contradictory in context, the terms “aliphatic amino acid” or “AA^{IV}” means amino acids having an aliphatic side chain. Examples of aliphatic amino acids include, but are not limited to, Ala (A), Leu (L), Ile (I), Gly (G), Val (V) and any analogs and derivatives thereof.

[0102] AA^{V} (AA roman numeral five): As used herein, unless indicated otherwise or contradictory in context, the terms “apolar amino acid” or “AA^{V}” means amino acids having an apolar side chain. Examples of apolar amino acids include, but are not limited to, Ala (A), Phe (F), Gly (G), Ile (I), Leu (L), Met (M), Pro (P), Val (V) or Trp (W).

[0103] AA^{VI} (AA roman numeral six): As used herein, unless indicated otherwise or contradictory in context, the term “aromatic amino acid” or “AA^{VI}” means amino acids having an aromatic group-containing side chain. Examples of aromatic amino acids include, but are not limited to, Trp (W), Tyr (Y) or Phe (F).

[0104] AA^{VII} (AA roman numeral seven): As used herein, unless indicated otherwise or contradictory in context, the term “basic amino acid” or “AA^{VII}” means amino acids having a basic group-containing side chain. Basic amino acid protonated forms predominate at physiological pH (about 7). Examples of basic amino acids include, but are not limited to, Arg (R), His (H), or Lys (K).

[0105] AA^{VIII} (AA roman numeral eight): As used herein, unless indicated otherwise or contradictory in context, the term means Leu (L) or Ile (I) and any analogs and derivatives thereof.

[0106] AA^{IX} (AA roman numeral nine): As used herein, unless indicated otherwise or contradictory in context, the term “charged amino acid” or “AA^{IX}” means amino acids having either an acidic group-containing side chain or an basic group-containing side chain. Charged amino acid charged forms predominate at physiological pH (about 7). Examples of charged amino acids include, but are not limited to, Asn (N), Glu (E), His (H), Lys (K) or Arg (R).

[0107] AAⁿ: As used herein, unless indicated otherwise or contradictory in context, the term “AAⁿ”, in which n is a positive integer arbitrarily chosen to identify a specific position within the primary sequence of a peptide. For instance, AA¹³ means the amino acid of position 13. The terms “amino acid” and “AA” are interchangeably used in the present description.

[0108] N-terminal: As used herein, unless indicated otherwise or contradictory in context, the term “N-terminal” means the amine (—NH₂) function/group/moiety located at one (terminal) end of a protein or polypeptide. This functional group is the only amine group which is not engage in n amide peptide bond.

[0109] C-terminal: As used herein, unless indicated otherwise or contradictory in context, the term “C-terminal” means the carboxylate (—CO₂H) function/group/moiety located at one (terminal) end of a protein or polypeptide. This functional group is the only carboxylic acid group which is not engage in n amide peptide bond.

[0110] Naturally-occurring peptide: As used herein, unless indicated otherwise or contradictory in context, the terms “naturally-occurring peptide” or “natural peptide” means a peptide which may be found in nature without human direct intervention (except for its extraction and/or isolation).

[0111] Synthetic peptide: As used herein, unless indicated otherwise or contradictory in context, the terms “synthetic peptide” or “non-natural peptide” means a peptide which may not be found in nature without human direct intervention (except for its extraction and/or isolation). For example, in certain embodiments, a synthetic peptide may have the amino acid sequence of a natural peptide except for at least one amino acid deletion or substitution relative to the natural sequence. In the case of a substitution, an amino acid from the natural sequence is replaced by another, different, naturally-occurring or non-naturally occurring amino acid. For example, in certain embodiments, a synthetic peptide may not possess a post-translational modification of the natural peptide such as the attachment of an acetate group, a phosphate group, a lipid, a carbohydrate, or the formation of a disulfide bridge.

[0112] Covalent interaction: As used herein, unless indicated otherwise or contradictory in context, the term “interact covalently”, “covalent interaction” or “covalent bond” are interchangeably used and means a chemical bond or interaction that involves the sharing of electron pairs between atoms. Examples of such interactions are σ-bonding and π-bonding.

[0113] Non-covalent interaction: As used herein, unless indicated otherwise or contradictory in context, the term “interact non-covalently”, “non-covalent interaction” or “non-covalent bond” are interchangeably used and means a chemical bond or interaction that does not involve the sharing of electron pairs between atoms but rather involves more dispersed variations of electromagnetic interactions between molecules or within a molecule. Non-covalent interactions can be generally classified into four categories, electrostatic interactions, π-interactions, van der Waals forces, and hydrophobic interactions.

[0114] Electrophile: As used herein, unless indicated otherwise or contradictory in context, the term “electrophile” means an organic molecule attracted to electrons that participates in a chemical reaction by accepting an electron pair in order to bond to a nucleophile. Most electrophiles are positively charged, have an atom that carries a partial positive charge, or have an atom that does not have an octet of electrons.

[0115] Nucleophile: As used herein, unless indicated otherwise or contradictory in context, the term “nucleophile” means an organic molecule that donates an electron pair to an electrophile to form a chemical bond in relation to a reaction. All molecules or ions with a free pair of electrons or at least one pi bond can act as nucleophiles.

[0116] Polysaccharide: As used herein, unless indicated otherwise or contradictory in context, the term “polysaccharide” means polymeric carbohydrate molecules composed of long chains of monosaccharide units bound together by glycosidic linkages and which upon hydrolysis provide monosaccharides or oligosaccharides. They range in structure from linear to highly branched polymers.

[0117] Polynucleotide: As used herein, the term “polynucleotide” or “nucleic acid”, which are used interchangeably, refers to the phosphate ester polymeric form of ribonucleosides (“RNA molecules”) or deoxyribonucleosides (“DNA molecules”), or any phosphoester analogs thereof, such as phosphorothioates and thioesters, in either single stranded form, or a double-stranded helix. The term “nucleic acid” includes double-stranded DNA round, inter alia, in linear (e.g., restriction fragments) or circular DNA molecules. In particular, nucleic acids as used herein refer to nucleic acids such as RNAs encoding for agonist of growth factor receptors as defined herein.

[0118] Nucleoside: As used herein, the term “nucleoside” refers to a compound containing a sugar molecule (e.g., a pentose or ribose) or derivative thereof in combination with an organic base (e.g., a purine or pyrimidine) or a derivative thereof (also referred to herein as “nucleobase”).

[0119] Nucleotide: As used herein, the term “nucleotide” refers to a nucleoside including a phosphate group.

[0120] Dendrimer: As used herein, unless indicated otherwise or contradictory in context, the term “dendrimer” means any repetitively branched molecules. Examples of dendrimers are phosphorous dendrimers, polylysine dendrimers, polypropylenimine dendrimers and PAMAM dendrimers, such as the ones described, for instance, in Scientific World Journal. 2013; 2013:732340; Curr Opin Chem Biol. 1998; 2(6):733-42; J Pept Sci. 1999; 5(5):203-20; and J Pept Sci. 2008; 14(1):2-43, which may be used for implementing embodiments of the present invention, each of which being herein incorporated by reference in its entirety.

[0121] Synthetic molecule: As used herein, unless indicated otherwise or contradictory in context, the term “synthetic molecule” means a molecule which may not be found in nature without human direct intervention (except for its extraction and/or isolation).

[0122] Synthetic polymers: As used herein, unless indicated otherwise or contradictory in context, the term “synthetic polymer” refers to a macromolecule or polymer which may not be found in nature without human direct intervention (except for its extraction and/or isolation).

[0123] Biocompatible: As used herein, unless indicated otherwise or contradictory in context, the term “biocompatible” means compatible with living cells, tissues, organs or systems posing little to no risk of injury, toxicity or rejection by the immune system.

[0124] Biologically active: As used herein, unless indicated otherwise or contradictory in context, the term “biologically active” refers to a characteristic of any substance that has activity in a biological system and/or organism. For instance, a substance that, when administered to an organism, has a biological effect on that organism, is considered to be biologically active. In particular examples, a compound, substance or pharmaceutical composition of the present disclosure may be considered biologically active even if a portion of the compound, substance or pharmaceutical composition is biologically active or mimics an activity considered biologically relevant.

[0125] Stem cells: As used herein, unless indicated otherwise or contradictory in context, the term “stem cell” refers to the term as it is generally understood in the art. For example, in certain embodiments, stem cells, regardless of their source, are cells that are capable of dividing and renewing themselves for long periods, are at least to a degree unspecialized (undifferentiated), and can give rise to (differentiate into) specialized cell types (i.e., they are progenitor or precursor cells for a variety of different, specialized cell types).

[0126] Mesenchymal stem cells: As used herein, unless indicated otherwise or contradictory in context, the term “mesenchymal stem cells” generally means multipotent adult stromal cells that can differentiate into a variety of cell types, such as osteoblasts, chondrocytes, and adipocytes.

[0127] Stem cell-like: As used herein, unless indicated otherwise or contradictory in context, the term “Stem cell-like” refers to a cell which is not a stem cell by its origin but functions as a stem cell and presents similar characteristics such as, for example, the expression of stemness markers like Stro-1 and/or is multipotent thus has the ability to differentiate into various cell types.

[0128] Progenitor cells: As used herein, unless indicated otherwise or contradictory in context, the term “progenitor cells” generally means a biological cell that, like any stem cell, has a tendency to differentiate into a specific type of cell, but is already more specific than a stem cell and is pushed to differentiate into its “target” cell. Stem cells can generally replicate indefinitely, whereas progenitor cells can divide only a limited number of times.

[0129] Adult stem cells: As used herein, unless indicated otherwise or contradictory in context, the term “adult stem cells” means undifferentiated cells, found throughout the body after development, that multiply by cell division to replenish dying cells and regenerate damaged tissues. Also known as somatic stem cells, they can be found in juvenile as well as adult animals and human bodies.

[0130] Differentiation: As used herein, unless indicated otherwise or contradictory in context, the term “differentiation” refers to the process by which a less specialized cell becomes a more specialized cell type and involves a switch from one gene expression pattern to another.

[0131] Differentiated cells: As used herein, unless indicated otherwise or contradictory in context, the term “differentiated cells” generally means any cell of a specific lineage at the exception of cells containing stem cell specific markers.

[0132] Non-terminally differentiated: As used herein, unless indicated otherwise or contradictory in context, the term “non-terminally differentiated”, when used in relation to a cell, refers to a differentiated cell as defined herein which has not reached its final state of differentiation. For example, in certain embodiments, in the Osteoblast cell lineage, a non-terminally differentiated cell is any differentiated cell of the lineage at the exception of an osteocyte.

[0133] Terminally differentiated: As used herein, unless indicated otherwise or contradictory in context, the term “terminally differentiated”, when used in relation to a cell, refers to a differentiated cell as defined herein which has reached its final state of differentiation. For example, in certain embodiments, in the Osteoblast cell lineage, a terminally differentiated cell is an osteocyte.

[0134] Methods for obtaining stem cells: Methods for obtaining such stem cells and providing initial culture conditions, such as a liquid culture or semi-solid culture medium, are known in the art. The cells are initially expanded in vivo or in vitro, by contacting the source of the stem cells with a suitable reagent that expands or enriches such cells in the tissue source or in culture. Preferably, adult stem cells are isolated from a tissue source and then expanded or enriched in vitro by exposure to a suitable agent. Cells are obtained from an individual by any suitable method for obtaining a cell sample from an animal, including, but not limited, to, collection of bone marrow collection of a bodily fluid (e.g., blood), collection of umbilical cord blood, tissue punch, and tissue dissection, including particularly, but not limited to, any biopsies of skin, intestine, cornea, spinal cord, brain tissue, scalp, stomach, breast, lung (e.g., including lavage and bronchioschopy), fine needle aspirates of the bone marrow, amniotic fluid, placenta and yolk sac.

[0135] Osteogenesis: As used herein, unless indicated otherwise or contradictory in context, the term “osteogenesis” refers to the process by which bone is produced. An entity, molecule, compound, association, combination or composition may be said to be “osteogenic” when it has an effect on the development, growth, or repair of bone. This process involves the participation of stem cells.

[0136] Chondrogenesis: As used herein, unless indicated otherwise or contradictory in context, the term “chondrogenesis” refers to the process by which cartilage is produced. An entity, molecule, compound, association, combination or composition may be said to be “chondrogenic” when it has an effect on the development, growth, or repair of cartilage. This process involves the participation of stem cells.

[0137] Endothelialisation: As used herein, unless indicated otherwise or contradictory in context, the term “endothelialization” or “re-endothelialization” refers to the process that maintains or restores normal vascular homeostasis and regulates neointimal hyperplasia. In native tissue, the endothelium maintains vessel integrity with dynamic mechanisms that prevent thrombosis and intimal hyperplasia. The endothelial progenitor cells are an important component of the response to vascular injury, having the potential to accelerate vascular repair through rapid re-endothelialization. For example, drug-eluting stents are generally implanted during angioplasty into patients suffering from atherosclerosis and resulting in stenosis or restenosis. In drug-eluting stents, the drug is typically coated onto a metal alloy framework and is mainly employed to inhibit neointimal growth (due to proliferation of smooth muscle cells) which would cause restenosis. Because much of the neointimal hyperplasia seems to be caused by inflammation, immunosuppressive and antiproliferative drugs are conventionally used. Drugs such as sirolimus and paclitaxel are currently used. Re-endothelialization in drug-eluting stents is generally delayed which can increase the risk for late stent thrombosis which thus may also require the administration of antiplatelet drugs such as Clopidogrel and aspirin.

[0138] Vascularization/angiogenesis: As used herein, unless indicated otherwise or contradictory in context, the term “vascularization/angiogenesis” refers to a physiological process through which new blood vessels are produced from pre-existing vessels. This process involves the participation of stem cells.

[0139] Wound healing: As used herein, unless indicated otherwise or contradictory in context, the term “wound healing” refers to a process whereby the skin (or another organ-tissue) repairs itself after injury. This process involves the participation of stem cells.

[0140] Skin repair: As used herein, unless indicated otherwise or contradictory in context, the term “skin repair” means the reparation of the dermis through the participation of stem cells. These active cells produce collagenous fibers and ground substance. Blood vessels soon grow into the dermis, restoring circulation.

[0141] Neuron-regeneration: As used herein, unless indicated otherwise or contradictory in context, the term “neuron-regeneration”or “neuroregeneration” refers to the regrowth or repair of nervous tissues, cells or cell products involving the participation of stem cells. Such mechanisms may include generation of new neurons, glia, axons, myelin, or synapses.

[0142] Tissue closure: As used herein, unless indicated otherwise or contradictory in context, the term “tissue closure” refers to the closure of all tissue layers damaged e.g. in an injury or during surgery. For instance, during bone repair surgery, the different layers of tissues incised in order for the surgeon to reach the damaged bone part and repair it would all need to be closed for the overall healing process to occur.

[0143] Cell lineage: As used herein, unless indicated otherwise or contradictory in context, the term “cell lineage” refers to the developmental history of a particular cell from its primary state in the fertilized egg or embryo through to its fully differentiated state. The different steps and phases involved in the development of a cell produces many intermediate cells which may be referred to as progenitor or precursor cells in the present application and form an integral part of the cell lineage.

[0144] Osteoblast cell lineage: As used herein, unless indicated otherwise or contradictory in context, the term “osteoblast cell lineage” refers to bone cells at any stage of their development and thus include, but are not limited to, mesenchymal stem cells, osteoblasts, osteocytes or any precursors thereof.

[0145] Chondrocytic cell lineage: As used herein, unless indicated otherwise or contradictory in context, the term “chondrocytic cell lineage” refers to cartilage cells at any stage of their development and thus include, but are not limited to, mesenchymal stem cells,

[0146] Muscle cell lineage: As used herein, unless indicated otherwise or contradictory in context, the term “muscle cell lineage” refers to muscle cells at any stage of their development and thus include, but are not limited to, mesenchymal stem cells, myoblasts, myocytes or any precursors thereof.

[0147] Vascular cell lineage: As used herein, unless indicated otherwise or contradictory in context, the term “vascular cell lineage” refers to vascular cells at any stage of their development and thus include, but are not limited to, mesenchymal stem cells, angioblast, pericytes and endothelial cells or any precursors thereof.

[0148] Neuronal cell lineage: As used herein, unless indicated otherwise or contradictory in context, the term “neuron lineage” refers to brain cells at any stage of their development and thus include, but are not limited to, neural stem cells, neuroblast, neurocyte and neuroglial cells or any precursors thereof.

[0149] Retinal cell lineage: As used herein, unless indicated otherwise or contradictory in context, the term “retinal cell lineage” refers to eye retina cells at any stage of their development and thus include, but are not limited to, photoreceptor, bipolar cells, rod and cone cells or any precursors thereof.

[0150] Renal cell lineage: As used herein, unless indicated otherwise or contradictory in context, the term “renal cell lineage” refers to renal cells at any stage of their development and thus include, but are not limited to, mesenchymal stem cells, podocytes, or any precursors thereof.

[0151] Ligament and tendon cell lineage: As used herein, unless indicated otherwise or contradictory in context, the term “ligament and tendon cell lineage” or “LIT cell lineage” refers to bone or cartilage cells at any stage of their development and thus include, but are not limited to, mesenchymal stem cells, fibroblasts, fibrocytes, or any precursors thereof.

[0152] Fibroblast lineage: As used herein, unless indicated otherwise or contradictory in context, the term “fibroblast lineage” refers to skin cells at any stage of their development and thus include, but are not limited to, mesenchymal stem cells, fibroblasts, keratinocytes, Merkel cells, melanocytes, Langerhans cells, and any precursor cells thereof.

[0153] Reproduction system lineage: As used herein, unless indicated otherwise or contradictory in context, the term “reproduction system lineage” refers to Sertoli cells, Leydig cell and Germ cell at any stage of their development, in particular, mesenchymal stem cells.

[0154] Blood cell lineages (myeloid lineage and lymphoid lineage): As used herein, unless indicated otherwise or contradictory in context, the term “blood cell lineages” refers to blood cells at any stage of their development from the myeloid or from the lymphoid lineage, and thus include, but are not limited to, hematopoietic stem cells (HSC), myeloid progenitors, lymphoid progenitors, mast cells, myeloblasts, monocytes, macrophages, neutrophils, basophils, eosinophils, erythrocytes, megakaryocytes, thrombocytes, dendritic cells, small lymphocytes, T-lymphocytes (T-cells), B-lymphocytes (B-cells), natural killer (NK)-cells, and any precursor cells thereof.

[0155] Adipocyte lineage: As used herein, unless indicated otherwise or contradictory in context, the term “adipocyte cell lineage” refers to adipocyte cells at any stage of their development and thus include, but are not limited to, mesenchymal stem cells, areolar connective cells, adipocytes, pre-adipocytes/lipoblasts, and any precursor cells thereof.

[0156] Lung cell Lineages: As used herein, unless indicated otherwise or contradictory in context, the term “lung cell Lineage” refers to lung cells at any stage of their development and thus include, but are not limited to, epithelial cells, erythrocytes, alveolar cells and any precursor cells thereof.

[0157] Ratio: As used herein, unless indicated otherwise or contradictory in context, the term “ratio”, when used in relation to GFR-binding compound with respect to the bioactive carrier in the pharmaceutical association or composition disclosed herein, refers to the (molar, weight or part as specified) ratio between the quantity of GFR-binding compound and the quantity of bioactive carrier. The ratio may be a molar ratio, a weight ratio or a part ratio and will be specified as needed on a case by case basis. Quantity units may conventionally be mole, millimole, gram, milligram or parts. For example, in certain embodiments, it is convenient to express the relative quantity between GFR-binding compounds and bioactive carriers using densities. It shall be understood that this ratio may be varied according to the cell type to be treated.

[0158] Density: As used herein, unless indicated otherwise or contradictory in context, the term “density”, when used in relation to GFR-binding compound with respect to the bioactive carrier in the pharmaceutical composition disclosed herein, refers to the quantity of GFR-binding compounds, expressed in e.g. mole, millimole, gram, or milligram, with respect to one standardised surface unit e.g. squared millimetre (mm²), squared micrometre (μm²), or squared nanometre (nm²)). For example, in certain embodiments, the ratio between a GFR-binding compound and a bioactive carrier in the pharmaceutical association or composition disclosed herein may be expressed in pmol per mm² or pmol/mm².

[0159] Recoding: As used herein, unless indicated otherwise or contradictory in context, the term “recoding”, when used in relation to a cell (in particular a mesenchymal stem cell or progenitor stem cell), refers to the action of contacting (in-vitro, ex-vivo or in-vivo) a stem cell to be treated with a suitable extracellular micro-environment (e.g. containing a peptide, variant or analog thereof, peptidomimetic, a biomaterial, a medical device, or a medical or cosmetic composition as defined herein) thus providing appropriate extracellular signals so that the cell may undergo efficient differentiation into a more specialised cell type.

[0160] Recoding therapy: As used herein, unless indicated otherwise or contradictory in context, the term “recoding therapy” refers to a therapy that promotes efficient stem cell differentiation in an aim to regenerate mammalian tissues.

[0161] Extracellular micro-environment: As used herein, unless indicated otherwise or contradictory in context, the term “extracellular micro-environment” refers to the environment surrounding (in functional proximity with) a specific stem cell which is characterized by biophysical, mechanical and biochemical properties specific for each tissue and is able to regulate cell behavior. Modification of the extracellular micro-environment of a specific mesenchymal stem cell using, for instance, a peptide, variant or analog thereof, peptidomimetic, a biomaterial, a medical device, or a medical or cosmetic composition as defined herein, allows for the efficient differentiation of this cell into a more specialised cell type.

[0162] Physiologically functional cell: As used herein, unless indicated otherwise or contradictory in context, the term “physiologically functional cell” refers to a cell which is able to perform normally all of the cell functions associated with a particular cell type and necessary for the normal physiology of a cell. These functions include all of the intracellular molecular mechanisms but also all of the activities necessary for a normal communication between the cell and its microenvironment. One method which may be used to verify if a cell is physiologically functional is the grafting of the cell, after the introduction of fluorescent markers, in other mammalian model organisms such as mouse models. The cell is grafted in the tissue corresponding to its cell type. The cell characteristics and normal functions are monitored after a period of time with various methods such as in vivo microscopy or histological staining. The term “functional” when used in relation to a molecule, compound or substance refers to a biological molecule in a form in which it exhibits a property and/or activity by which it is characterized.

[0163] Shorter period of time: As used herein, unless indicated otherwise or contradictory in context, the term “shorter period of time”, when used in relation to differentiation or recoding duration, means substantially shorter to provide a substantial benefit for the treated patient in comparison with existing treatments. In certain embodiments, a shorter period of time includes at least 1.5-fold, at least 2-fold, at least 2.5-fold, at least 3-fold, at least 3.5-fold, at least 4-fold, at least 4.5-fold, at least 5-fold, at least 6-fold, at least 7-fold, at least 8-fold, at least 9-fold or at least 10-fold reduction with respect to an existing treatment.

[0164] Exogenous: As used herein, unless indicated otherwise or contradictory in context, the term “exogenous” refers to a substance coming from outside a living system such as a cell, an organ, or an individual organism. For example, in certain embodiments, exogenous factors in medicine include pathogens and therapeutics. DNA introduced into a cell via transfection or viral infection may be considered as an exogenous factor. Carcinogens are also commonly referred to as exogenous factors.

[0165] Endogenous: As used herein, unless indicated otherwise or contradictory in context, the term “endogenous” refers to substances that originate from within an organism, tissue, or cell.

[0166] Intracellular: As used herein, unless indicated otherwise or contradictory in context, the term “intracellular” generally means “inside the cell”. In vertebrates, such as animals, the cell membrane is the barrier between the inside of the cell and the outside of the cell (the extracellular milieu). Thus, treatments and therapies in which at least one substance, compound, pharmaceutical association, combination or composition penetrates the cell wall of a cell to be treated in order to produce/deliver its (effective) biological effect are considered as intracellular treatments and therapies.

[0167] Extracellular: As used herein, unless indicated otherwise or contradictory in context, the term “extracellular” means “outside the cell”. In vertebrates, such as animals, the cell membrane is the barrier between the inside of the cell (the intracellular milieu) and the outside of the cell. Thus, treatments and therapies in which no substance, compound, pharmaceutical association, combination or composition requires penetration of the cell membrane in order to produce/deliver its (effective) biological effect (e.g. by interacting with trans-membrane receptors) are considered as extracellular treatments and therapies. In other words, a therapy using a plurality of substances in order to provide the desired biological effect wherein one or more of these substances require the entry into the intracellular compartment to provide (or deliver) its biological effect is not considered as an extracellular therapy in the sense of the present disclosure.

[0168] In vitro: As used herein, unless indicated otherwise or contradictory in context, the term “in vitro” refers to events that occur in an artificial environment, e.g., in a test tube or reaction vessel, in cell culture, in a Petri dish, etc., rather than within an organism (e.g., animal, plant, or microbe).

[0169] In vivo: As used herein, unless indicated otherwise or contradictory in context, the term “in vivo” refers to events that occur within an organism (e.g., animal, plant, or microbe or cell or tissue thereof).

[0170] Ex vivo: As used herein, unless indicated otherwise or contradictory in context, the term “ex vivo” refers to events that occur in an external environment on tissues sourced from an organism (e.g., animal, plant, or microbe) in an attempt to replicate natural living conditions outside such an organism.

[0171] Patient/subject: As used herein, unless indicated otherwise or contradictory in context, the term “patient” or “subject”, which are used interchangeably, refers to any organism to which a composition in accordance with the invention may be administered, e.g., for experimental, diagnostic, prophylactic, and/or therapeutic purposes. Typical subjects include animals (e.g., mammals such as mice, rats, rabbits, non-human primates, and humans) and/or plants. As used herein, patients/subjects include those individuals who may seek or be in need of treatment, requires treatment, is receiving treatment, will receive treatment, or a subject who is under care by a trained professional for a particular disease or condition.

[0172] Purified: As used herein, unless indicated otherwise or contradictory in context, the term “purify,” “purified,” “purification” means to make substantially pure or clear from unwanted components, material defilement, admixture or imperfection.

[0173] Targeted Cells: As used herein, unless indicated otherwise or contradictory in context, the term “targeted cells” refers to any one or more cells of interest. The cells may be found in vitro, in vivo, in situ or in the tissue or organ of an organism. The organism may be an animal, preferably a mammal, more preferably a human and most preferably a patient.

[0174] Molecule length: As used herein, unless indicated otherwise or contradictory in context, the term molecule or peptide “length” or “size” means the longest 2D or 3D distance which may possibly be measured within the molecule. For cyclic molecules, “length” or “size” means the longest measurable distance across the cyclic structure. Throughout the present disclosure, when a molecule size or length is given (in general using the nanometre, nm, unit), the following procedures were used to calculate them:
[0175] The so-called «2D» procedure: a 2D chemical structure was drawn in e.g. the ChemDraw® Software. Then, size measurement was carried out via the available ChemDraw length measurement tools. The length value given herein corresponds to the longest 2D length of the molecule using the default settings 2D bond sizes and angles of the software.
[0176] Alternatively, the so-called “3D” procedure may be followed:
[0177] (1) Drawing of the chemical structure of the molecule using suitable softwares (such as ChemDraw).
[0178] (2) Creating a 3D structure model of the molecule hereby drawn using SCWRL (Protein Sci. 2003; 12(9):2001-14) or MODELLER (Current Protocols in Bioinformatics. 15:5.6:5.6.1-5.6.30), each of which is hereby incorporated by reference in its entirety.
[0179] (3) Incubating the obtained 3D structure model in a box simulation containing water for few milliseconds using AMBER (J. Computat. Chem. 2005; 26, 1668-1688), which is hereby incorporated by reference in its entirety.
[0180] (4) Measuring the size of the molecule hereby obtained using softwares such as Pymol® using available Pymol length measurement tools (DeLano Scientific LLC, world wide web at pymol.org).

[0181] Root Mean Square Deviation: As used herein, unless indicated otherwise or contradictory in context, the term “Root Mean Square Deviation” or “RMSD” is well known in the art and means the square root of the arithmetic mean of the square of the distances between certain matched atoms. One can represent a molecular conformation as a vector whose components are the Cartesian coordinates of the molecule's atoms. Therefore, a conformation for a molecule with N atoms can be represented as a 3N-dimensional vector of real numbers. To calculate the RMSD of a pair of peptides or peptidomimetics (e.g. x and y), each one of them must be represented as a 3N-length (assuming N atoms) vector of coordinates. The RMSD is therefore the square root of the arithmetic mean of the square of the distances between corresponding atoms of x and y. It is a measure of the average atomic displacement between the conformations of the two structures:

$$\sqrt{\frac{1}{N} {\sum }_{i = 1}^{N} \vert xi - yi \vert {1}^{2}}$$

[0182] In other words, the RMSD is the measure of the average distance between the atoms (usually the backbone atoms) of superimposed polypeptides or peptidomimetics. In the study of globular protein conformations, one customarily measures the similarity in three-dimensional structure by the RMSD of the Ca atomic coordinates after optimal rigid body superposition.

[0183] The RMSD value of a given peptide or peptidomimetic with respect to a specifically selected reference structure (hereinafter may also be referred to as “PEPREF”) may be calculated using various methods all well know by the skilled person. However, for the purpose of the present disclosure and for the avoidance of doubts, the RMSD of a given peptide or peptidomimetic as used in the present disclosure is obtained precisely using the following procedure:

[0184] STEP 1: Creating a 3-dimensional model of (i.e. obtaining 3D structure coordinates for) a peptide or peptidomimetic for which the RMSD is to be calculated, by:

[0185] STEP 1.1: Obtaining a set of polypeptide 3D structure coordinates based on the alignment with the sequence of a peptide or peptidomometic for which the RMSD value is to be calculated, using the BLAST algorithm according to the following procedure:
[0186] 1. Open the following link to access the “Standard Protein Blast” tool:
   blast.ncbi.nlm.nih.gov/Biast.cgi?PROGRAM:blastp&PAGE_TYPE:BiastSearch&LINK_LOC:blasthome
[0187] 2. Enter the amino acid sequence of the peptide or peptidomimetic of interest in the “Enter Query Sequence” section. The alignment is performed one sequence after the other (this is not a multiple alignment tool).
[0188] 3. In the section “Choose Search Set”, choose the following database: Protein Data Bank Proteins (pdb).
[0189] 4. In the section “Choose Search Set”, do not exclude «Models (XM/XP)» and do not Exclude «Uncultured/environmental sample sequences».
[0190] 5. In the section “Program Selection”, choose the following algorithm: blastp (protein-protein BLAST)
[0191] 6. Leave other fields as shown on the screenshot in FIG. 20.
[0192] 7. Run BLAST.
[0193] 8. The results obtained from the query are presented in the form of several pdb files.
[0194] 9. From this output results, the first ten (10) PDB files corresponding to the best sequence alignments are retained. This set of 10 PDB files or structures will be used in the next step (Step 2: structural alignments with STAMP).
[0195] 10. Finally, clean up the 10 structures contained in the 10 PDB files by removing all e.g. additional small molecules, receptors or portions thereof, dimers or portions thereof, so as to retain only the polypeptide chain of interest.

[0196] The set of pdf files contains the polypeptide 3D structure coordinates of the 10 structures having the highest sequence homology with the peptide or peptidomometic for which the RMSD value is to be calculated.

[0197] STEP 1.2: Performing the structural alignment of the set of 3D structure coordinates obtained in STEP 1.1, thereby obtaining a set of aligned polypeptide 3D structure coordinates, by using STAMP (Structural Alignment of Multiple Proteins Version 4.2) according to the following procedure:

[0198] Open the following link to access the “STAMP superposition” tool: world wide web at russelllab.orgkgibin/pdc/stamp.pl
[0199] 1. In the section entitled “Structure A”, input the PDB file corresponding to the first structure from the set of ten 3D structure coordinates obtained in STEP 1.1, which corresponds to the best sequence alignment with BLAST.
[0200] 2. In the section entitled “Structure B”, input the PDB file corresponding to the second structure from the set of ten 3D structure coordinates obtained in STEP 1.1, which corresponds to the second best sequence alignment with BLAST.
[0201] 3. Run STAMP.
[0202] 4. Repeat steps 2 to 4 with the other eight pdb files from the set of ten 3D structure coordinates identified in STEP 1.1 by successively entering the PDB files in the field “Structure B”.
[0203] 5. As a result, the structural alignment of the 10 structures contained in the set of PDB files obtained in STEP 1.1 is obtained in the form of 9 distinct PDB files each containing a pair of aligned polypeptide 3D structure (structure 1 with structure 2, structure 1 with structure 3, structure 1 with structure 4, . . . , structure 1 with structure 10).
[0204] 6. From these 9 “pair” PDB files, 10 PDB files each containing one of structures 1 to 10 are created.
[0205] 7. 10 PDB files containing the aligned 3D structure coordinates are thus obtained from STEP 1.2. for use in the next step.

[0206] STEP 1.3: Modelling the sequence of peptide or peptidomometic for which the RMSD value is to be calculated against the set of aligned polypeptide 3D structure coordinates obtained in STEP 1.2, thereby obtaining a set of 3D structure coordinates for the peptide or peptidomometic for which the RMSD value is to be calculated, using SCWRL (reference: “SCWRL and MollDE: computer programs for side-chain conformation prediction and homology modeling”, Nature Protocols VOL.3 NO.12 2008, Qiang Wang et al.; which is hereby incorporated by reference in its entirety) according to the following procedure:
[0207] 1. Insert the input sequence of a peptide or peptidomometic for which the RMSD value is to be calculated in Fasta format.
[0208] 2. Import the first PDB file containing the aligned polypeptide 3D structure coordinates obtained in STEP 1.2.
[0209] 3. Run SCWRL by typing the following command for Unix based systems: “scwrl_path/scwrl3 -i inputpdbfile -o outputpdbfile -s sequencefile 4 logfile”.
[0210] 4. As a result, a first PBD file is obtained containing the predicted 3D structure coordinates of the peptide or peptidomometic for which the RMSD value is to be calculated.
[0211] 5. Repeat steps 1 to 3 using the 9 remaining PDB files obtained in STEP 1.2.
[0212] 6. 10 PDB files are obtained from STEP 1.3 for use in the following STEP 1.4.

[0213] STEP 1.4: Minimizing the free energy (ΔG) of the set of 3D structure coordinates for the peptide or peptidomometic for which the RMSD value is to be calculated obtained in STEP 1.3 using GROMACS (Reference: Hess B, Kutzner C, Van Der Spoel D, Lindahl E (2008). “GROMACS 4: Algorithms for Highly Efficient, Load-Balanced, and Scalable Molecular Simulation”. J Chem Theory Comput 4 (2): 435; which is hereby incorporated by reference in its entirety) according to the following procedure:
[0214] 1. Create a Gromacs topology (gmx) file from the first PDB file of the modeled peptide or peptidomometic for which the RMSD value is to be calculated obtained in STEP 1.3, by using the command «pdb2gmx -f NOMDUFICHIERPDB.pdb -water spc». “NOMDUFICHIERPDB” is the name of the input PDB file.
[0215] 2. Create a box around the imported modeled peptide or peptidomometic by using the command «editconf -f conf.gro -bt cubic d 0.7 o box.gro».
[0216] 3. Add solvent (water) molecules into the box by using the command «genbox -cp box.gro -cs spc216.gro -p topol.top -o solvated.gro».
[0217] 4. Prepare the input for the molecular dynamics (MD) run with the command «vim em.mdp». Default run is set to 1000 nsteps.
[0218] 5. Create an input for the MD run by using the command «grompp -f em.mdp -p topol.top -c solvated.gro -o em.tpr».
[0219] 6. Run the command «mdrun -v -deffnm em» to perform the actual energy minimization.
[0220] 7. Run the command «g energy -f em.edr -s em.tpr -o em.xvg» and then run option «7».
[0221] 8. As a result, a first XMG file is obtained. To view the XMG file run the command «xmgrace em.xvg».
[0222] 9. Repeat steps 1 to 8 with the 9 remaining structures obtained in STEP 1.3. 10 XMG files are thus obtained.
[0223] 10. The structure of lowest energy is obtained from each XMG file in the form of a PDB file. 10 PDB files each containing one structure of lowest energy are thus obtained from STEP 1.4 for use in the next step.

[0224] STEP 2: Calculating the RMSD of the peptide or peptidomimetic for which the RMSD value is to be calculated by comparing the 3D structure coordinates of the peptide or peptidomimetic obtained in STEP 1.4 with the 3D structure coordinates of PEPREF to obtain the lowest possible RMSD value using FATCAT (Flexible structure AlignmenT by Chaining Aligned fragment pairs allowing Twists) according to the following procedure:

[0225] Open the following link to access the “FATCAT” software: fatcat.burnham.org
[0226] 1. Open the “pairwise alignment” tool.
[0227] 2. Import the PDB file containing the structure coordinates of PEPREF in the “Get the 1st structure” section.
[0228] 3. Import the first PDB file of the peptide or peptidomimetic for which the RMSD value is to be calculated with minimized energy obtained in STEP 1.4.
[0229] 4. Run FATCAT.
[0230] 5. As a result, a first RMSD value of the first structure of the peptide or peptidomimetic for which the RMSD value is to be calculated as obtained in STEP 1.4 will be obtained in the output report.
[0231] 6. Repeat steps 1 to 5 with the 9 remaining structures (PDB files) obtained from STEP 1.4.
[0232] 7. The peptide or peptidomimetic structure with the lowest RMSD (out of the ten RMSD values successively obtained) is the value taken into account in the present application to select peptides or peptidomimetics having cell differentiation and tissue regeneration capabilities.

[0233] 3D structure coordinates of PEPREF: As used herein, unless indicated otherwise or contradictory in context, the 3D structure coordinates of PEPREF are as follows:

| | | | | | | | | |
|---|---|---|---|---|---|---|---|---|
| ATOM | 511 | N | LYS | A | 1 | −14.570 | 46.437 | 27.424 |
| ATOM | 512 | CA | LYS | A | 1 | −13.512 | 45.748 | 28.151 |
| ATOM | 513 | C | LYS | A | 1 | −13.655 | 44.259 | 27.884 |
| ATOM | 514 | O | LYS | A | 1 | −12.769 | 43.463 | 28.197 |
| ATOM | 515 | CB | LYS | A | 1 | −13.605 | 46.029 | 29.652 |
| ATOM | 516 | CG | LYS | A | 1 | −13.640 | 47.509 | 29.991 |
| ATOM | 517 | CD | LYS | A | 1 | −12.615 | 48.297 | 29.183 |
| ATOM | 518 | CE | LYS | A | 1 | −12.625 | 49.768 | 29.575 |
| ATOM | 519 | NZ | LYS | A | 1 | −13.994 | 50.369 | 29.497 |
| ATOM | 520 | N | ILE | A | 2 | −14.792 | 43.890 | 27.309 |
| ATOM | 521 | CA | ILE | A | 2 | −15.051 | 42.499 | 26.967 |
| ATOM | 522 | C | ILE | A | 2 | −14.911 | 42.370 | 25.444 |
| ATOM | 523 | O | ILE | A | 2 | −15.531 | 43.125 | 24.683 |
| ATOM | 524 | CB | ILE | A | 2 | −16.466 | 42.065 | 27.401 |
| ATOM | 525 | CG1 | ILE | A | 2 | −16.630 | 42.238 | 28.915 |
| ATOM | 526 | CG2 | ILE | A | 2 | −16.710 | 40.629 | 26.985 |
| ATOM | 527 | CD1 | ILE | A | 2 | −15.631 | 41.478 | 29.30 |
| ATOM | 528 | N | PRO | A | 3 | −14.085 | 41.411 | 24.989 |
| ATOM | 529 | CA | PRO | A | 3 | −13.789 | 41.109 | 23.588 |
| ATOM | 530 | C | PRO | A | 3 | −14.998 | 40.695 | 22.768 |
| ATOM | 531 | O | PRO | A | 3 | −15.969 | 40.164 | 23.305 |
| ATOM | 532 | CB | PRO | A | 3 | −12.785 | 39.968 | 23.688 |
| ATOM | 533 | CG | PRO | A | 3 | −12.156 | 40.166 | 25.007 |
| ATOM | 534 | CD | PRO | A | 3 | −13.330 | 40.506 | 25.867 |
| ATOM | 535 | N | LYS | A | 4 | −14.937 | 40.937 | 21.463 |
| ATOM | 536 | CA | LYS | A | 4 | −16.023 | 40.529 | 20.590 |
| ATOM | 537 | C | LYS | A | 4 | −15.886 | 39.015 | 20.391 |
| ATOM | 538 | O | LYS | A | 4 | −14.903 | 38.415 | 20.831 |
| ATOM | 539 | CB | LYS | A | 4 | −15.926 | 41.244 | 19.245 |
| ATOM | 540 | CG | LYS | A | 4 | −15.802 | 42.751 | 19.355 |
| ATOM | 541 | CD | LYS | A | 4 | −16.292 | 43.433 | 18.083 |
| ATOM | 542 | CE | LYS | A | 4 | −16.162 | 44.943 | 18.177 |
| ATOM | 543 | NZ | LYS | A | 4 | −16.825 | 45.628 | 17.019 |
| ATOM | 544 | N | ALA | A | 5 | −16.85 | 38.393 | 19.759 |
| ATOM | 545 | CA | ALA | A | 5 | −16.811 | 36.955 | 19.507 |
| ATOM | 546 | C | ALA | A | 5 | −15.772 | 36.771 | 18.416 |
| ATOM | 547 | O | ALA | A | 5 | −15.727 | 37.534 | 17.455 |
| ATOM | 548 | CB | ALA | A | 5 | −18.168 | 36.419 | 19.043 |
| ATOM | 549 | N | CYS | A | 5 | −14.935 | 35.756 | 18.562 |
| ATOM | 550 | CA | CYS | A | 6 | −13.887 | 35.518 | 17.584 |
| ATOM | 551 | C | CYS | A | 6 | −14.347 | 34.765 | 16.338 |
| ATOM | 552 | O | CYS | A | 6 | −15.327 | 34.018 | 16.368 |
| ATOM | 553 | CB | CYS | A | 6 | −12.743 | 34.768 | 18.241 |
| ATOM | 554 | SG | CYS | A | 6 | −11.198 | 34.959 | 17.353 |
| ATOM | 555 | N | CYS | A | 7 | −13.623 | 34.973 | 15.243 |
| ATOM | 556 | CA | CYS | A | 7 | −13.931 | 34.328 | 13.969 |
| ATOM | 557 | C | CYS | A | 7 | −13.091 | 33.071 | 13.798 |
| ATOM | 558 | O | CYS | A | 7 | −11.961 | 33.123 | 13.302 |
| ATOM | 559 | CB | CYS | A | 7 | −13.653 | 35.290 | 12.824 |
| ATOM | 560 | SG | CYS | A | 7 | −13.930 | 34.633 | 11.154 |
| ATOM | 561 | N | VAL | A | 8 | −13.654 | 31.941 | 14.209 |
| ATOM | 562 | CA | VAL | A | 8 | −12.949 | 30.684 | 14.110 |
| ATOM | 563 | C | VAL | A | 8 | −13.653 | 29.733 | 13.157 |
| ATOM | 564 | O | VAL | A | 8 | −14.759 | 30.016 | 12.687 |
| ATOM | 565 | CB | VAL | A | 8 | −12.814 | 30.038 | 15.492 |
| ATOM | 566 | CG1 | VAL | A | 8 | −11.807 | 30.825 | 16.337 |
| ATOM | 567 | CG2 | VAL | A | 8 | −14.161 | 30.006 | 16.170 |
| ATOM | 568 | N | PRO | A | 9 | −13.003 | 28.601 | 12.828 |
| ATOM | 569 | CA | PRO | A | 9 | −13.593 | 27.615 | 11.918 |
| ATOM | 570 | C | PRO | A | 9 | −14.726 | 26.886 | 12.631 |
| ATOM | 571 | O | PRO | A | 9 | −14.581 | 26.476 | 13.780 |
| ATOM | 572 | CB | PRO | A | 9 | −12.423 | 26.676 | 11.601 |
| ATOM | 573 | CG | PRO | A | 9 | −11.204 | 27.487 | 11.925 |
| ATOM | 574 | CD | PRO | A | 9 | −11.620 | 28.226 | 13.163 |
| ATOM | 575 | N | THR | A | 10 | −15.847 | 26.721 | 11.942 |
| ATOM | 576 | CA | THR | A | 10 | −16.999 | 26.060 | 12.527 |
| ATOM | 577 | C | THR | A | 10 | −17.334 | 24.767 | 11.804 |
| ATOM | 578 | O | THR | A | 10 | −18.097 | 23.943 | 12.303 |
| ATOM | 579 | CB | THR | A | 10 | −18.211 | 27.010 | 12.523 |
| ATOM | 580 | OG1 | THR | A | 10 | −18.491 | 27.445 | 11.185 |
| ATOM | 581 | CG2 | THR | A | 10 | −17.902 | 28.230 | 13.375 |
| ATOM | 582 | N | GLU | A | 11 | −16.750 | 24.586 | 10.627 |
| ATOM | 583 | CA | GLU | A | 11 | −16.980 | 23.377 | 9.848 |
| ATOM | 584 | C | GLU | A | 11 | −15.643 | 22.935 | 9.246 |
| ATOM | 585 | O | GLU | A | 11 | −15.029 | 23.666 | 8.464 |
| ATOM | 586 | CB | GLU | A | 11 | −17.981 | 23.624 | 8.715 |
| ATOM | 587 | CG | GLU | A | 11 | −19.421 | 23.807 | 9.163 |
| ATOM | 588 | CD | GLU | A | 11 | −19.686 | 25.166 | 9.770 |
| ATOM | 589 | OE1 | GLU | A | 11 | −19.478 | 26.175 | 9.073 |
| ATOM | 590 | OE2 | GLU | A | 11 | −20.111 | 25.227 | 10.939 |
| ATOM | 591 | N | LEU | A | 12 | −15.183 | 21.749 | 9.622 |
| ATOM | 592 | CA | LEU | A | 12 | −13.923 | 21.254 | 9.104 |
| ATOM | 593 | C | LEU | A | 12 | −14.062 | 19.912 | 8.386 |
| ATOM | 594 | O | LEU | A | 12 | −15.136 | 19.299 | 8.359 |
| ATOM | 595 | CB | LEU | A | 12 | −12.893 | 21.144 | 10.230 |
| ATOM | 596 | CG | LEU | A | 12 | −12.660 | 22.422 | 11.054 |
| ATOM | 597 | CD1 | LEU | A | 12 | −13.475 | 22.350 | 12.337 |
| ATOM | 598 | CD2 | LEU | A | 12 | −11.181 | 22.586 | 11.399 |
| ATOM | 599 | N | SER | A | 13 | −12.971 | 19.476 | 7.771 |
| ATOM | 600 | CA | SER | A | 13 | −12.964 | 18.218 | 7.046 |
| ATOM | 601 | C | SER | A | 13 | −11.568 | 17.628 | 7.164 |
| ATOM | 602 | O | SER | A | 13 | −10.613 | 18.320 | 7.550 |
| ATOM | 603 | CB | SER | A | 13 | −13.346 | 18.435 | 5.578 |
| ATOM | 604 | OG | SER | A | 13 | −12.404 | 19.261 | 4.923 |
| ATOM | 605 | N | ALA | A | 13 | −11.449 | 16.352 | 6.818 |
| ATOM | 606 | CA | ALA | A | 13 | −10.179 | 15.665 | 6.949 |
| ATOM | 607 | C | ALA | A | 13 | −9.421 | 15.471 | 5.652 |
| ATOM | 608 | O | ALA | A | 13 | −9.941 | 15.720 | 4.563 |
| ATOM | 609 | CB | ALA | A | 13 | −10.413 | 14.306 | 7.626 |
| ATOM | 610 | N | ILE | A | 14 | −8.171 | 15.046 | 5.783 |
| ATOM | 611 | CA | ILE | A | 14 | −7.343 | 14.746 | 4.623 |
| ATOM | 612 | C | ILE | A | 14 | −6.475 | 13.559 | 5.004 |
| ATOM | 613 | O | ILE | A | 14 | −6.212 | 13.316 | 6.183 |
| ATOM | 614 | CB | ILE | A | 14 | −6.401 | 15.916 | 4.183 |
| ATOM | 615 | CG1 | ILE | A | 14 | −5.284 | 16.106 | 5.200 |
| ATOM | 616 | CG2 | ILE | A | 14 | −7.188 | 17.211 | 3.982 |
| ATOM | 617 | CD1 | ILE | A | 14 | −4.173 | 16.973 | 4.696 |
| ATOM | 618 | N | SER | A | 15 | −6.045 | 12.806 | 3.999 |
| ATOM | 619 | CA | SER | A | 15 | −5.187 | 11.662 | 4.242 |
| ATOM | 620 | C | SER | A | 15 | −3.740 | 12.089 | 4.217 |
| ATOM | 621 | O | SER | A | 15 | −3.360 | 13.020 | 3.508 |
| ATOM | 622 | CB | SER | A | 15 | −5.416 | 10.584 | 3.185 |
| ATOM | 623 | OG | SER | A | 15 | −6.667 | 9.971 | 3.401 |
| ATOM | 624 | N | MET | A | 16 | −2.933 | 11.409 | 5.012 |
| ATOM | 625 | CA | MET | A | 16 | −1.518 | 11.700 | 5.047 |
| ATOM | 626 | C | MET | A | 16 | −0.778 | 10.414 | 5.244 |
| ATOM | 627 | O | MET | A | 16 | −1.137 | 9.594 | 6.078 |
| ATOM | 628 | CB | MET | A | 16 | −1.170 | 12.694 | 6.164 |
| ATOM | 629 | CG | MET | A | 16 | −1.848 | 14.042 | 5.974 |
| ATOM | 630 | SD | MET | A | 16 | −1.017 | 15.431 | 6.760 |
| ATOM | 631 | CE | MET | A | 16 | −0.799 | 14.823 | 8.475 |
| ATOM | 632 | N | LEU | A | 17 | 0.238 | 10.231 | 4.426 |
| ATOM | 633 | CA | LEU | A | 17 | 1.077 | 9.065 | 4.508 |
| ATOM | 634 | C | LEU | A | 17 | 2.289 | 9.610 | 5.264 |
| ATOM | 635 | O | LEU | A | 17 | 2.939 | 10.565 | 4.818 |
| ATOM | 636 | CB | LEU | A | 17 | 1.461 | 8.608 | 3.100 |
| ATOM | 637 | CG | LEU | A | 17 | 2.324 | 7.355 | 2.955 |
| ATOM | 638 | CD1 | LEU | A | 17 | 1.553 | 6.145 | 3.445 |
| ATOM | 639 | CD2 | LEU | A | 17 | 2.723 | 7.190 | 1.492 |
| ATOM | 640 | N | TYR | A | 18 | 2.581 | 9.029 | 6.418 |
| ATOM | 641 | CA | TYR | A | 18 | 3.706 | 9.501 | 7.196 |
| ATOM | 642 | C | TYR | A | 18 | 4.434 | 8.333 | 7.835 |
| ATOM | 643 | O | TYR | A | 18 | 4.081 | 7.186 | 7.603 |
| ATOM | 644 | CB | TYR | A | 18 | 3.222 | 10.458 | 8.281 |
| ATOM | 645 | CG | TYR | A | 18 | 2.386 | 9.782 | 9.346 |
| ATOM | 646 | CD1 | TYR | A | 18 | 1.029 | 9.527 | 9.147 |
| ATOM | 647 | CD2 | TYR | A | 18 | 2.961 | 9.379 | 10.550 |
| ATOM | 648 | CE1 | TYR | A | 18 | 0.273 | 8.894 | 10.128 |
| ATOM | 649 | CE2 | TYR | A | 18 | 2.218 | 8.745 | 11.526 |
| ATOM | 650 | CZ | TYR | A | 18 | 0.877 | 8.508 | 11.317 |
| ATOM | 651 | OH | TYR | A | 18 | 0.134 | 7.922 | 12.318 |
| ATOM | 652 | N | LEU | A | 19 | 5.439 | 8.651 | 8.650 |
| ATOM | 653 | CA | LEU | A | 19 | 6.255 | 7.661 | 9.347 |
| ATOM | 654 | C | LEU | A | 19 | 6.210 | 7.946 | 10.847 |
| ATOM | 655 | O | LEU | A | 19 | 6.685 | 8.992 | 11.288 |
| ATOM | 656 | CB | LEU | A | 19 | 7.701 | 7.763 | 8.871 |
| ATOM | 657 | CG | LEU | A | 19 | 7.901 | 7.850 | 7.359 |
| ATOM | 658 | CD1 | LEU | A | 19 | 9.300 | 8.379 | 7.039 |
| ATOM | 659 | CD2 | LEU | A | 19 | 7.669 | 6.482 | 6.748 |
| ATOM | 660 | N | ASP | A | 20 | 5.652 | 7.035 | 11.639 |
| ATOM | 661 | CA | ASP | A | 20 | 5.594 | 7.282 | 13.071 |
| ATOM | 662 | C | ASP | A | 20 | 7.001 | 7.289 | 13.662 |
| ATOM | 663 | O | ASP | A | 20 | 7.985 | 7.185 | 12.932 |
| ATOM | 664 | CB | ASP | A | 20 | 4.714 | 6.244 | 13.786 |
| ATOM | 665 | CG | ASP | A | 20 | 5.292 | 4.837 | 13.752 |
| ATOM | 666 | OD1 | ASP | A | 20 | 6.533 | 4.678 | 13.775 |
| ATOM | 667 | OD2 | ASP | A | 20 | 4.491 | 3.882 | 13.732 |
| ATOM | 668 | N | GLU | A | 21 | 7.089 | 7.413 | 14.981 |
| ATOM | 669 | CA | GLU | A | 21 | 8.375 | 7.451 | 15.669 |
| ATOM | 670 | C | GLU | A | 21 | 9.250 | 6.212 | 15.463 |
| ATOM | 671 | O | GLU | A | 21 | 10.459 | 6.246 | 15.738 |
| ATOM | 672 | CB | GLU | A | 21 | 8.164 | 7.699 | 17.171 |
| ATOM | 673 | CG | GLU | A | 21 | 7.220 | 6.731 | 17.868 |
| ATOM | 674 | CD | GLU | A | 21 | 5.828 | 6.726 | 17.257 |
| ATOM | 675 | OE1 | GLU | A | 21 | 5.347 | 7.810 | 16.856 |
| ATOM | 676 | OE2 | GLU | A | 21 | 5.210 | 5.640 | 17.185 |
| ATOM | 677 | N | ASN | A | 22 | 8.646 | 5.133 | 14.966 |
| ATOM | 678 | CA | ASN | A | 22 | 9.377 | 3.889 | 14.727 |
| ATOM | 679 | C | ASN | A | 22 | 9.682 | 3.647 | 13.249 |
| ATOM | 680 | O | ASN | A | 22 | 10.095 | 2.554 | 12.853 |
| ATOM | 681 | CB | ASN | A | 22 | 8.591 | 2.707 | 15.299 |
| ATOM | 682 | CG | ASN | A | 22 | 8.384 | 2.827 | 16.794 |
| ATOM | 683 | OD1 | ASN | A | 22 | 9.349 | 2.930 | 17.560 |
| ATOM | 684 | ND2 | ASN | A | 22 | 7.125 | 2.819 | 17.221 |
| ATOM | 685 | N | GLU | A | 23 | 9.485 | 4.672 | 12.435 |
| ATOM | 686 | CA | GLU | A | 23 | 9.749 | 4.558 | 11.015 |
| ATOM | 687 | C | GLU | A | 23 | 8.790 | 3.603 | 10.299 |
| ATOM | 688 | O | GLU | A | 23 | 9.145 | 2.996 | 9.292 |
| ATOM | 689 | CB | GLU | A | 23 | 11.203 | 4.129 | 10.784 |
| ATOM | 690 | CG | GLU | A | 23 | 12.232 | 5.210 | 11.082 |
| ATOM | 691 | CD | GLU | A | 23 | 12.072 | 6.410 | 10.166 |
| ATOM | 692 | OE1 | GLU | A | 23 | 12.108 | 6.218 | 8.928 |
| ATOM | 693 | OE2 | GLU | A | 23 | 11.907 | 7.541 | 10.677 |
| ATOM | 694 | N | LYS | A | 24 | 7.580 | 3.459 | 10.826 |
| ATOM | 695 | CA | LYS | A | 24 | 6.583 | 2.624 | 10.175 |
| ATOM | 696 | C | LYS | A | 24 | 5.815 | 3.540 | 9.228 |
| ATOM | 697 | O | LYS | A | 24 | 5.553 | 4.692 | 9.552 |
| ATOM | 698 | CB | LYS | A | 24 | 5.602 | 2.039 | 11.182 |
| ATOM | 699 | CG | LYS | A | 24 | 6.163 | 0.963 | 12.058 |
| ATOM | 700 | CD | LYS | A | 24 | 5.068 | 0.387 | 12.947 |
| ATOM | 701 | CE | LYS | A | 24 | 5.648 | −0.511 | 14.031 |
| ATOM | 702 | NZ | LYS | A | 24 | 4.577 | −1.091 | 14.886 |
| ATOM | 703 | N | VAL | A | 25 | 5.455 | 3.037 | 8.057 |
| ATOM | 704 | CA | VAL | A | 25 | 4.713 | 3.849 | 7.116 |
| ATOM | 705 | C | VAL | A | 25 | 3.237 | 3.737 | 7.444 |
| ATOM | 706 | O | VAL | A | 25 | 2.657 | 2.659 | 7.383 |
| ATOM | 707 | CB | VAL | A | 25 | 4.969 | 3.396 | 5.681 |
| ATOM | 708 | CG1 | VAL | A | 25 | 4.250 | 4.317 | 4.708 |
| ATOM | 709 | CG2 | VAL | A | 25 | 6.462 | 3.393 | 5.422 |
| ATOM | 710 | N | VAL | A | 25 | 2.637 | 4.864 | 7.800 |
| ATOM | 711 | CA | VAL | A | 25 | 1.231 | 4.916 | 8.170 |
| ATOM | 712 | C | VAL | A | 25 | 0.418 | 5.778 | 7.213 |
| ATOM | 713 | O | VAL | A | 25 | 0.871 | 6.841 | 6.774 |
| ATOM | 714 | CB | VAL | A | 25 | 1.062 | 5.531 | 9.577 |
| ATOM | 715 | CG1 | VAL | A | 25 | −0.341 | 5.253 | 10.115 |
| ATOM | 716 | CG2 | VAL | A | 25 | 2.128 | 5.006 | 10.506 |
| ATOM | 717 | N | LEU | A | 26 | −0.779 | 5.306 | 6.887 |
| ATOM | 718 | CA | LEU | A | 26 | −1.706 | 6.048 | 6.040 |
| ATOM | 719 | C | LEU | A | 26 | −2.862 | 6.358 | 6.992 |
| ATOM | 720 | O | LEU | A | 26 | −3.679 | 5.497 | 7.297 |
| ATOM | 721 | CB | LEU | A | 26 | −2.201 | 5.189 | 4.876 |
| ATOM | 722 | CG | LEU | A | 26 | −3.204 | 5.898 | 3.952 |
| ATOM | 723 | CD1 | LEU | A | 26 | −2.519 | 7.077 | 3.262 |
| ATOM | 724 | CD2 | LEU | A | 26 | −3.755 | 4.925 | 2.929 |
| ATOM | 725 | N | LYS | A | 27 | −2.910 | 7.584 | 7.489 |
| ATOM | 726 | CA | LYS | A | 27 | −3.952 | 7.965 | 8.430 |
| ATOM | 727 | C | LYS | A | 27 | −4.831 | 9.082 | 7.881 |
| ATOM | 728 | O | LYS | A | 27 | −4.374 | 9.924 | 7.103 |
| ATOM | 729 | CB | LYS | A | 27 | −3.305 | 8.409 | 9.738 |
| ATOM | 730 | CG | LYS | A | 27 | −4.265 | 8.720 | 10.859 |
| ATOM | 731 | CD | LYS | A | 27 | −3.509 | 9.382 | 11.994 |
| ATOM | 732 | CE | LYS | A | 27 | −4.397 | 9.654 | 13.186 |
| ATOM | 733 | NZ | LYS | A | 27 | −4.839 | 8.377 | 13.816 |
| ATOM | 734 | N | ASN | A | 28 | −6.098 | 9.078 | 8.279 |
| ATOM | 735 | CA | ASN | A | 28 | −7.045 | 10.095 | 7.843 |
| ATOM | 736 | C | ASN | A | 28 | −7.147 | 11.103 | 8.979 |
| ATOM | 737 | O | ASN | A | 28 | −7.815 | 10.842 | 9.969 |
| ATOM | 738 | CB | ASN | A | 28 | −8.408 | 9.455 | 7.560 |
| ATOM | 739 | CG | ASN | A | 28 | −9.518 | 10.485 | 7.364 |
| ATOM | 740 | OD1 | ASN | A | 28 | −9.360 | 11.444 | 6.597 |
| ATOM | 741 | ND2 | ASN | A | 28 | −10.653 | 10.288 | 8.050 |
| ATOM | 742 | N | TYR | A | 29 | −6.473 | 12.241 | 8.837 |
| ATOM | 743 | CA | TYR | A | 29 | −6.470 | 13.278 | 9.869 |
| ATOM | 744 | C | TYR | A | 29 | −7.680 | 14.204 | 9.836 |
| ATOM | 745 | O | TYR | A | 29 | −7.928 | 14.870 | 8.835 |
| ATOM | 746 | CB | TYR | A | 29 | −5.197 | 14.130 | 9.768 |
| ATOM | 747 | CG | TYR | A | 29 | −3.913 | 13.420 | 10.155 |
| ATOM | 748 | CD1 | TYR | A | 29 | −3.378 | 12.394 | 9.363 |
| ATOM | 749 | CD2 | TYR | A | 29 | −3.220 | 13.792 | 11.306 |
| ATOM | 750 | CE1 | TYR | A | 29 | −2.181 | 11.765 | 9.713 |
| ATOM | 751 | CE2 | TYR | A | 29 | −2.032 | 13.171 | 11.665 |
| ATOM | 752 | CZ | TYR | A | 29 | −1.516 | 12.167 | 10.869 |
| ATOM | 753 | OH | TYR | A | 29 | −0.319 | 11.603 | 11.231 |
| ATOM | 754 | N | GLN | A | 30 | −8.408 | 14.254 | 10.950 |
| ATOM | 755 | CA | GLN | A | 30 | −9.606 | 15.088 | 11.089 |
| ATOM | 756 | C | GLN | A | 30 | −9.287 | 16.541 | 11.431 |
| ATOM | 757 | O | GLN | A | 30 | −8.213 | 16.847 | 11.925 |
| ATOM | 758 | CB | GLN | A | 30 | −10.500 | 14.541 | 12.202 |
| ATOM | 759 | CG | GLN | A | 30 | −10.807 | 13.074 | 12.104 |
| ATOM | 760 | CD | GLN | A | 30 | −11.744 | 12.749 | 10.969 |
| ATOM | 761 | OE1 | GLN | A | 30 | −11.900 | 11.582 | 10.602 |
| ATOM | 762 | NE2 | GLN | A | 30 | −12.385 | 13.773 | 10.405 |
| ATOM | 763 | N | ASP | A | 31 | −10.238 | 17.430 | 11.173 |
| ATOM | 764 | CA | ASP | A | 31 | −10.085 | 18.851 | 11.495 |
| ATOM | 765 | C | ASP | A | 31 | −8.867 | 19.494 | 10.842 |
| ATOM | 766 | O | ASP | A | 31 | −8.195 | 20.335 | 11.442 |
| ATOM | 767 | CB | ASP | A | 31 | −10.000 | 19.025 | 13.019 |
| ATOM | 768 | CG | ASP | A | 31 | −11.247 | 18.520 | 13.742 |
| ATOM | 769 | OD1 | ASP | A | 31 | −12.349 | 18.587 | 13.155 |
| ATOM | 770 | OD2 | ASP | A | 31 | −11.130 | 18.069 | 14.908 |
| ATOM | 771 | N | MET | A | 32 | −8.582 | 19.113 | 9.606 |
| ATOM | 772 | CA | MET | A | 32 | −7.426 | 19.662 | 8.918 |
| ATOM | 773 | C | MET | A | 32 | −7.780 | 20.808 | 7.987 |
| ATOM | 774 | O | MET | A | 32 | −7.021 | 21.768 | 7.855 |
| ATOM | 775 | CB | MET | A | 32 | −6.741 | 18.559 | 8.125 |
| ATOM | 776 | CG | MET | A | 32 | −6.037 | 17.540 | 8.980 |
| ATOM | 777 | SD | MET | A | 32 | −4.559 | 18.231 | 9.714 |
| ATOM | 778 | CE | MET | A | 32 | −3.406 | 18.041 | 8.318 |
| ATOM | 779 | N | VAL | A | 33 | −8.942 | 20.707 | 7.351 |
| ATOM | 780 | CA | VAL | A | 33 | −9.381 | 21.719 | 6.401 |
| ATOM | 781 | C | VAL | A | 33 | −10.579 | 22.536 | 6.858 |
| ATOM | 782 | O | VAL | A | 33 | −11.586 | 21.988 | 7.292 |
| ATOM | 783 | CB | VAL | A | 33 | −9.701 | 21.056 | 5.027 |
| ATOM | 784 | CG1 | VAL | A | 33 | −10.388 | 22.040 | 4.087 |
| ATOM | 785 | CG2 | VAL | A | 33 | −8.423 | 20.561 | 4.412 |
| ATOM | 786 | N | VAL | A | 34 | −10.465 | 23.855 | 6.739 |
| ATOM | 787 | CA | VAL | A | 34 | −11.553 | 24.745 | 7.113 |
| ATOM | 788 | C | VAL | A | 34 | −12.610 | 24.835 | 6.016 |
| ATOM | 789 | O | VAL | A | 34 | −12.373 | 25.403 | 4.950 |
| ATOM | 790 | CB | VAL | A | 34 | −11.057 | 26.176 | 7.407 |
| ATOM | 791 | CG1 | VAL | A | 34 | −12.240 | 27.097 | 7.601 |
| ATOM | 792 | CG2 | VAL | A | 34 | −10.222 | 26.186 | 8.655 |
| ATOM | 793 | N | GLU | A | 35 | −13.779 | 24.266 | 6.282 |
| ATOM | 794 | CA | GLU | A | 35 | −14.870 | 24.311 | 5.321 |
| ATOM | 795 | C | GLU | A | 35 | −15.702 | 25.565 | 5.572 |
| ATOM | 796 | O | GLU | A | 35 | −16.011 | 26.303 | 4.645 |
| ATOM | 797 | CB | GLU | A | 35 | −15.733 | 23.054 | 5.447 |
| ATOM | 798 | CG | GLU | A | 35 | −14.969 | 21.782 | 5.128 |
| ATOM | 799 | CD | GLU | A | 35 | −14.515 | 21.732 | 3.676 |
| ATOM | 800 | OE1 | GLU | A | 35 | −15.036 | 22.519 | 2.858 |
| ATOM | 801 | OE2 | GLU | A | 35 | −13.643 | 20.902 | 3.344 |
| ATOM | 802 | N | GLY | A | 36 | −16.053 | 25.811 | 6.829 |
| ATOM | 803 | CA | GLY | A | 36 | −16.834 | 26.990 | 7.152 |
| ATOM | 804 | C | GLY | A | 36 | −16.322 | 27.785 | 8.341 |
| ATOM | 805 | O | GLY | A | 36 | −15.671 | 27.249 | 9.237 |
| ATOM | 806 | N | CYS | A | 37 | −16.616 | 29.077 | 8.360 |
| ATOM | 807 | CA | CYS | A | 37 | −16.177 | 29.917 | 9.466 |
| ATOM | 808 | C | CYS | A | 37 | −17.347 | 30.502 | 10.249 |
| ATOM | 809 | O | CYS | A | 37 | −18.467 | 30.628 | 9.741 |
| ATOM | 810 | CB | CYS | A | 37 | −15.301 | 31.058 | 8.967 |
| ATOM | 811 | SG | CYS | A | 37 | −13.785 | 30.558 | 8.098 |
| ATOM | 812 | N | GLY | A | 38 | −17.079 | 30.867 | 11.494 |
| ATOM | 813 | CA | GLY | A | 38 | −18.129 | 31.430 | 12.309 |
| ATOM | 814 | C | GLY | A | 38 | −17.622 | 32.176 | 13.518 |
| ATOM | 815 | O | GLY | A | 38 | −16.425 | 32.235 | 13.791 |
| ATOM | 816 | N | CYS | A | 39 | −18.564 | 32.753 | 14.245 |
| ATOM | 817 | CA | CYS | A | 39 | −18.253 | 33.505 | 15.439 |
| ATOM | 818 | C | CYS | A | 39 | −18.543 | 32.670 | 16.665 |
| ATOM | 819 | O | CYS | A | 39 | −19.620 | 32.084 | 16.794 |
| ATOM | 820 | CB | CYS | A | 39 | −19.068 | 34.779 | 15.442 |
| ATOM | 821 | SG | CYS | A | 39 | −18.539 | 35.799 | 14.053 |

[0234] Structure coordinates: As used herein, unless indicated otherwise or contradictory in context, the “structure coordinates” refers to Cartesian coordinates derived from mathematical equations related to the patterns obtained on diffraction of a monochromatic beam of X-rays by the atoms (scattering centers) of a protein, protein complex or peptide in crystal form. The diffraction data are used to calculate an electron density map of the repeating unit of the crystal. The electron density maps are then used to establish the positions of the individual atoms of the molecule or molecular complex.

[0235] STAMP: STAMP (Structural Alignment of Multiple Proteins) is a tool for aligning protein sequences based on a three-dimensional structure. Its algorithm minimizes the Ca distance between aligned residues of each molecule by applying globally optimal rigid-body rotations and translations. This program provides some information on the equivalence of the residues between the selected models.

[0236] SCWRL: This program predicts and optimizes the protein side-chain conformations. It is using the backbone of a support protein and a backbone-dependent rotamer library. The possible conformations are explored by minimizing the steric hindrance between the side-chains and between the side-chains and the backbone. GROMACS: GROMACS is a molecular dynamics package. The “gmx rms” tool included in GROMACS compares two structures by computing the root mean square deviation (RMSD).

### II. Growth Factor Receptor-Binding Compounds

[0237] In one aspect, the present disclosure provides for growth factor receptor-binding compounds having the ability to induce stem cell differentiation and promote tissue regeneration.

[0238] As used herein, the term “growth factor receptor-binding compound”, “GFR-binding compound” or “GFRBC” refers to an exogenous or endogenous compound, molecule or substance having an (binding) affinity for a growth factor receptor as defined herein, and optionally comprising the ability to associate or combine with a bioactive carrier as defined herein.

[0239] There are many ways to test, measure and present the binding affinity of a given substance for a given receptor, but for the purpose of the present disclosure, and for the avoidance of any doubts, the (binding) affinity values of a given GFR-binding compound to a given GFR are provided using the method of fluorescence anisotropy. In this method, a GFR-binding compound is fluorescently labelled using technics well established in the art. Binding of the resulting labelled compound to a growth factor receptor results in a fluctuation of fluorescence anisotropy which is used to construct an affinity binding curve from which the GFR-binding compound binding affinity value is derived. Using this technique, binding affinity values are given in the form of dissociation constants Kd. In certain embodiments, GFR-binding compounds of the present disclosure have Kd values as measured by fluorescence anisotropy of more than 1 (one) picomolar (pM). In certain embodiments, GFR-binding compounds of the present disclosure have Kd values as measured by fluorescence anisotropy of more than 1 (one) nanomolar (nM). In certain embodiments, GFR-binding compounds of the present disclosure have Kd values as measured by fluorescence anisotropy of more than 10 (ten) nanomolar (nM). In certain embodiments, GFR-binding compounds of the present disclosure have Kd values as measured by fluorescence anisotropy of more than 100 (one hundred) nanomolar (nM). In certain embodiments, GFR-binding compounds of the present disclosure have Kd values as measured by fluorescence anisotropy of more than 1 (one) micromolar (μM). In certain embodiments, GFR-binding compounds of the present disclosure have Kd values as measured by fluorescence anisotropy of more than 10 (ten) micromolar (μM). In certain embodiments, GFR-binding compounds of the present disclosure have Kd values as measured by fluorescence anisotropy of more than 100 (one hundred) micromolar (μM).

[0240] A GFR-binding compound is said to possess the ability to associate or combine with a bioactive carrier if it comprises a functional chemical element, function or group allowing for the covalent or non-covalent assembly of the GFR-binding compound and the bioactive carrier. Such a functional chemical element, function or group, also referred to as a bioactive carrier-affinity-containing group or bioactive carrier-high-affinity-containing group, include, but is not limited to, a thiol-containing compound, a cysteine-containing compound, a cysteine, or a GTPGP (SEQ ID NO: 84983) or a WWFWG (SEQ ID NO: 84984) peptide fragment.

[0241] Growth factor receptor: As used herein, unless indicated otherwise or contradictory in context, the term “growth factor receptor” or “GFR” is a receptor which binds to growth factors which are naturally occurring substances capable of stimulating, for instance, cellular growth, proliferation, healing, and cellular differentiation. Suitable as growth factor receptors for implementing embodiments of the present invention include epidermal growth factor receptors (EGFR), fibroblast growth factor receptors (FGFR), vascular endothelial growth factor receptors (VEGFR), nerve growth factor receptors (NGFR), Insulin receptor family, Trk receptor family, Eph receptor family, AXL receptor family, LTK receptor family, TIE receptor family, ROR receptor family, DDR receptor family, RET receptor family, KLG receptor family, RYK receptor family, MuSK receptor family, hepatocyte growth factor receptors (HGFR), somatomedin or insulin-like growth factor receptors (SGFR), platelet-derived growth factor receptors (PDGFR), transforming growth factor beta (TGF-β) superfamily proteins such as AMH, ARTN, BMP10, BMP15, BMP2, BMP3, BMP4, BMP5, BMP6, BMP7, BMP8A, BMP8B, GDF1, GDF10, GDF11, GDF15, GDF2, GDF3, GDF3A, GDF5, GDF6, GDF7, GDF8, GDF9, GDNF, INHA, INHBA, INHBB, INHBC, INHBE, LEFTY1, LEFTY2, MSTN, NODAL, NRTN, PSPN, TGFB1, TGFB2 and TGFB3, and any combination thereof.

[0242] Growth factor: As used herein, unless indicated otherwise or contradictory in context, the term “growth factor” refers to any substance(s) having the ability to bind to a growth factor receptor and produce (a) biological effect(s) or reaction(s), such as promoting the growth of tissues, by activating such a growth factor receptor. Exemplary growth factors include, but are not limited to, platelet-derived growth factor (PDGF), platelet-derived angiogenesis factor (PDAF), vascular endotheial growth factor (VEGF), platelet-derived epidermal growth factor (PDEGF), transforming growth factor beta (TGF-β), transforming growth factor A (TGF-A), epidermal growth factor (EGF), fibroblast growth factor (FGF), acidic fibroblast growth factor (FGF-A), basic fibroblast growth factor (FGF-B), insulin-like growth factors 1 and 2 (IGF-I and IGF-2), keratinocyte growth factor (KGF), tumor necrosis factor (TNF), fibroblast growth factor (FGF) and interleukin-1 (IL-I), Keratinocyte Growth Factor-2 (KGF-2), and combinations thereof.

[0243] Activation of growth factor receptors: As used herein, unless indicated otherwise or contradictory in context, the term “activating” or “activation of”, when used in relation to a growth factor receptor, refers to the phosphorylation of the tyrosine kinase domain of such a growth factor receptor.

[0244] In one aspect, the present disclosure provides a GFR-binding compound having mesenchymal stem cell and progenitor cell commitment and/or differentiation and/or maturation capacities resulting in tissue regeneration.

[0245] In one example, said GFR-binding compound has a molecular weight of less than 8,000 Daltons. In one particular example, said GFR-binding compound has a molecular weight of less than 6,000 Daltons. In one particular example, said GFR-binding compound has a molecular weight comprised between 2,000 and 8,000 Daltons. In one particular example, said GFR-binding compound has a molecular weight comprised between 2,000 and 6,000 Daltons. Between 2,000 and 6,000 Daltons is particularly preferred.

[0246] In one particular example, the growth factor receptor involved in the interaction with said GFR-binding compound is an epidermal growth factor receptor. In one particular example, the growth factor receptor involved in the interaction with said GFR-binding compound is a fibroblast growth factor receptor. In one particular example, the growth factor receptor involved in the interaction with said GFR-binding compound is a vascular endothelial growth factor receptor. In one particular example, the growth factor receptor involved in the interaction with said GFR-binding compound is a nerve growth factor receptor. In one particular example, the growth factor receptor involved in the interaction with said GFR-binding compound is a hepatocyte growth factor receptor. In one particular example, the growth factor receptor involved in the interaction with said GFR-binding compound is a somatomedin or insulin-like growth factor receptor. In one particular example, the growth factor receptor involved in the interaction with said GFR-binding compound is a platelet-derived growth factor receptor. In one particular example, the growth factor receptor involved in the interaction with said GFR-binding compound is a protein from the transforming growth factor beta (TGF-β) superfamily.

[0247] In one particular example, the growth factor receptor(s) involved in the interaction with said GFR-binding compound is (are) preferably selected from epidermal growth factor receptors, fibroblast growth factor receptors, vascular endothelial growth factor receptors, nerve growth factor receptors, hepatocyte growth factor receptors, somatomedin or insulin-like growth factor receptors, platelet-derived growth factor receptors, and transforming growth factor beta (TGF-β) superfamily proteins.

[0248] In one particular example, said GFR-binding compound is a peptide, or a variant or analog thereof, having growth factor receptor-binding capability or capabilities, with (exclusively consisting of, or constituted of) between 25-60 amino acids, in particular between 25-50 amino acids, and more particularly between 25-45 amino acids; wherein the RMSD value of the three dimensional (3D) atomic coordinates of said GFR-binding compound with respect to PEPREF is 2.45 Å (Angstroms) or less, in particular is 2 Å or less, and more particularly is 1.79 Å or less, and wherein PEPREF is the set of 3D atomic coordinates already defined herein (hereinafter also referred to as “wherein the RMSD is 2.45 Å or less” for the sake of conciseness).

[0249] In one particular example, said GFR-binding compound is a peptide, or a variant or analog thereof, having growth factor receptor-binding capability or capabilities, with (exclusively consisting of, or constituted of) between 25-60 amino acids; wherein the RMSD value of the three dimensional (3D) atomic coordinates of said GFR-binding compound with respect to PEPREF is 2.45 Å (Angstroms) or less, in particular is 2 Å or less, and more particularly is 1.79 Å or less, and wherein PEPREF is the set of 3D atomic coordinates already defined herein.

[0250] In one particular example, said GFR-binding compound is a peptide, or a variant or analog thereof, having growth factor receptor-binding capability or capabilities, with (exclusively consisting of, or constituted of) between 25-50 amino acids; wherein the RMSD value of the three dimensional (3D) atomic coordinates of said GFR-binding compound with respect to PEPREF is 2.45 Å (Angstroms) or less, in particular is 2 Å or less, and more particularly is 1.79 Å or less, and wherein PEPREF is the set of 3D atomic coordinates already defined herein.

[0251] In one particular example, said GFR-binding compound is a peptide, or a variant or analog thereof, having growth factor receptor-binding capability or capabilities, with (exclusively consisting of, or constituted of) between 25-45 amino acids; wherein the RMSD value of the three dimensional (3D) atomic coordinates of said GFR-binding compound with respect to PEPREF is 2.45 Å (Angstroms) or less, in particular is 2 Å or less, and more particularly is 1.79 Å or less, and wherein PEPREF is the set of 3D atomic coordinates already defined herein.

[0252] In one particular example, said GFR-binding compound is a peptidomimetic as defined herein, having growth factor receptor-binding capability or capabilities, comprising (consecutively or non consecutively) between 20-60 amino acids, in particular between 20-50 or 20-45 amino acids, and more particularly, between 23-60, 23-50 or 23-45 amino acids; wherein said GFR-binding compound has a molecular weight comprised between 2,000 and 8,000 Daltons (in particular, between 2,000 and 6,000 Da); and wherein the RMSD is 2.45 Å or less.

[0253] In one particular example, said GFR-binding compound is a peptidomimetic as defined herein, having growth factor receptor-binding capability or capabilities, comprising (consecutively or non consecutively) between 20-60 amino acids, in particular between 20-50 or 20-45 amino acids, and more particularly, between 23-60, 23-50 or 23-45 amino acids; and containing at least one peptide portion or fragment with between 5-20 amino acids (in particular containing two peptide portions or fragments, each of which with between 5-20 amino acids); wherein said GFR-binding compound has a molecular weight comprised between 2,000 and 8,000 Daltons (in particular, between 2,000 and 6,000 Da); and wherein the RMSD is 2.45 Å or less.

[0254] In one aspect, the present disclosure provides a GFR-binding compound, wherein said GFR-binding compound is a peptide, a variant or analog thereof, or a peptidomimetic as defined herein, having growth factor receptor-binding capability or capabilities, having a molecular weight of less than 8,000 Da, in particular of between 2,000 and 8,000 Da, more particularly of between 2,000 and 6,000 Da; and wherein the RMSD is 2.45 Å or less.

[0255] In one aspect, the present disclosure provides a GFR-binding compound, wherein said GFR-binding compound is a peptide, a variant or analog thereof, or a peptidomimetic as defined herein, having growth factor receptor-binding capability or capabilities, with between 20 and 60 (in particular between 20 and 50, and more particularly, between 20 and 45) amino acids, comprising a peptide with four amino acids (PEP1) and a peptide with five amino acids (PEP2); and wherein the RMSD is 2.45 Å or less.

[0256] In one aspect, the present disclosure provides a GFR-binding compound, wherein said GFR-binding compound is a peptide, a variant or analog thereof, or a peptidomimetic as defined herein, with between 20 and 60 (in particular between 20 and 50, and more particularly, between 20 and 45) amino acids, comprising a peptide with eight amino acids (PEP12) and a peptide with five amino acids (PEP2); and wherein the RMSD is 2.45 Å or less.

[0257] In one aspect, the present disclosure provides a GFR-binding compound, wherein said GFR-binding compound is a peptide, a variant or analog thereof, or a peptidomimetic as defined herein, with between 20 and 60 (in particular between 20 and 50, and more particularly, between 20 and 45) amino acids, comprising a peptide with four amino acids (PEP1) and a peptide with five amino acids (PEP2); wherein said GFR-binding compound further comprises a peptide with three amino acids (PEP3) and a peptide with three amino acids (PEP4); and wherein the RMSD is 2.45 Å or less.

[0258] In one aspect, the present disclosure provides a GFR-binding compound, wherein said GFR-binding compound is a peptide, a variant or analog thereof, or a peptidomimetic as defined herein, with between 20 and 60 (in particular between 20 and 50, and more particularly, between 20 and 45) amino acids, comprising a peptide with eight amino acids (PEP12) and a peptide with five amino acids (PEP2); wherein said GFR-binding compound further comprises a peptide with three amino acids (PEP3) and a peptide with three amino acids (PEP4); and wherein the RMSD is 2.45 Å or less.

[0259] In one aspect, the present disclosure provides a GFR-binding compound, wherein said GFR-binding compound is a peptide, a variant or analog thereof, or a peptidomimetic as defined herein, with between 20 and 60 (in particular between 20 and 50, and more particularly, between 20 and 45) amino acids, comprising a peptide with four amino acids (PEP1) and a peptide with five amino acids (PEP2); wherein said GFR-binding compound further comprises a peptide with five amino acids (PEP5) and a peptide with between five and seven amino acids (PEP6); and wherein the RMSD is 2.45 Å or less.

[0260] In one aspect, the present disclosure provides a GFR-binding compound, wherein said GFR-binding compound is a peptide, a variant or analog thereof, or a peptidomimetic as defined herein, with between 20 and 60 (in particular between 20 and 50, and more particularly, between 20 and 45) amino acids, comprising a peptide with eight amino acids (PEP12) and a peptide with five amino acids (PEP2); wherein said GFR-binding compound further comprises a peptide with five amino acids (PEP5) and a peptide with between five and seven amino acids (PEP6); and wherein the RMSD is 2.45 Å or less.

[0261] In one aspect, the present disclosure provides a GFR-binding compound, wherein said GFR-binding compound is a peptide, a variant or analog thereof, or a peptidomimetic as defined herein, with between 20 and 60 (in particular between 20 and 50, and more particularly, between 20 and 45) amino acids, comprising a peptide with four amino acids (PEP1) and a peptide with five amino acids (PEP2); wherein said GFR-binding compound further comprises a peptide with between six and twelve amino acids (PEP9) and a peptide with between six and eleven amino acids (PEP10); and wherein the RMSD is 2.45 Å or less.

[0262] In one aspect, the present disclosure provides a GFR-binding compound, wherein said GFR-binding compound is a peptide, a variant or analog thereof, or a peptidomimetic as defined herein, with between 20 and 60 (in particular between 20 and 50, and more particularly, between 20 and 45) amino acids, comprising a peptide with eight amino acids (PEP12) and a peptide with five amino acids (PEP2); wherein said GFR-binding compound further comprises a peptide with between six and twelve amino acids (PEP9) and a peptide with between six and eleven amino acids (PEP10); and wherein the RMSD is 2.45 Å or less.

[0263] In one aspect, the present disclosure provides a GFR-binding compound, wherein said GFR-binding compound is a peptide, a variant or analog thereof, or a peptidomimetic as defined herein, with between 20 and 60 (in particular between 20 and 50, and more particularly, between 20 and 45) amino acids, comprising a peptide with four amino acids (PEP1) and a peptide with five amino acids (PEP2); wherein said GFR-binding compound further comprises a peptide with three amino acids (PEP3) and a peptide with between five and seven amino acids (PEP6); and wherein the RMSD is 2.45 Å or less.

[0264] In one aspect, the present disclosure provides a GFR-binding compound, wherein said GFR-binding compound is a peptide, a variant or analog thereof, or a peptidomimetic as defined herein, with between 20 and 60 (in particular between 20 and 50, and more particularly, between 20 and 45) amino acids, comprising a peptide with eight amino acids (PEP12) and a peptide with five amino acids (PEP2); wherein said GFR-binding compound further comprises a peptide with three amino acids (PEP3) and a peptide with between five and seven amino acids (PEP6); and wherein the RMSD is 2.45 Å or less.

[0265] In one aspect, the present disclosure provides a GFR-binding compound, wherein said GFR-binding compound is a peptide, a variant or analog thereof, or a peptidomimetic as defined herein, with between 20 and 60 (in particular between 20 and 50, and more particularly, between 20 and 45) amino acids, comprising a peptide with four amino acids (PEP1) and a peptide with five amino acids (PEP2); wherein said GFR-binding compound further comprises a peptide with three amino acids (PEP3) and a peptide with between six and eleven amino acids (PEP10); and wherein the RMSD is 2.45 Å or less.

[0266] In one aspect, the present disclosure provides a GFR-binding compound, wherein said GFR-binding compound is a peptide, a variant or analog thereof, or a peptidomimetic as defined herein, with between 20 and 60 (in particular between 20 and 50, and more particularly, between 20 and 45) amino acids, comprising a peptide with eight amino acids (PEP12) and a peptide with five amino acids (PEP2); wherein said GFR-binding compound further comprises a peptide with three amino acids (PEP3) and a peptide with between six and eleven amino acids (PEP10); and wherein the RMSD is 2.45 Å or less.

[0267] In one aspect, the present disclosure provides a GFR-binding compound, wherein said GFR-binding compound is a peptide, a variant or analog thereof, or a peptidomimetic as defined herein, with between 20 and 60 (in particular between 20 and 50, and more particularly, between 20 and 45) amino acids, comprising a peptide with four amino acids (PEP1) and a peptide with five amino acids (PEP2); wherein said GFR-binding compound further comprises a peptide with five amino acids (PEP3) and a peptide with three amino acids (PEP4); and wherein the RMSD is 2.45 Å or less.

[0268] In one aspect, the present disclosure provides a GFR-binding compound, wherein said GFR-binding compound is a peptide, a variant or analog thereof, or a peptidomimetic as defined herein, with between 20 and 60 (in particular between 20 and 50, and more particularly, between 20 and 45) amino acids, comprising a peptide with four amino acids (PEP12) and a peptide with five amino acids (PEP2); wherein said GFR-binding compound further comprises a peptide with five amino acids (PEP5) and a peptide with three amino acids (PEP4); and wherein the RMSD is 2.45 Å or less.

[0269] In one aspect, the present disclosure provides a GFR-binding compound, wherein said GFR-binding compound is a peptide, a variant or analog thereof, or a peptidomimetic as defined herein, with between 20 and 60 (in particular between 20 and 50, and more particularly, between 20 and 45) amino acids, comprising a peptide with four amino acids (PEP1) and a peptide with five amino acids (PEP2); wherein said GFR-binding compound further comprises a peptide with between six and twelve amino acids (PEP9) and a peptide with three amino acids (PEP4); and wherein the RMSD is 2.45 Å or less.

[0270] In one aspect, the present disclosure provides a GFR-binding compound, wherein said GFR-binding compound is a peptide, a variant or analog thereof, or a peptidomimetic as defined herein, with between 20 and 60 (in particular between 20 and 50, and more particularly, between 20 and 45) amino acids, comprising a peptide with four amino acids (PEP12) and a peptide with five amino acids (PEP2); wherein said GFR-binding compound further comprises a peptide with between six and twelve amino acids (PEP9) and a peptide with three amino acids (PEP4); and wherein the RMSD is 2.45 Å or less.

[0271] In one aspect, the present disclosure provides a GFR-binding compound, wherein said GFR-binding compound is a peptide, a variant or analog thereof, or a peptidomimetic as defined herein, with between 20 and 60 (in particular between 20 and 50, and more particularly, between 20 and 45) amino acids, comprising a peptide with four amino acids (PEP1) and a peptide with five amino acids (PEP2); wherein said GFR-binding compound further comprises a peptide with five amino acids (PEP5) and a peptide with between six and eleven amino acids (PEP10); and wherein the RMSD is 2.45 Å or less.

[0272] In one aspect, the present disclosure provides a GFR-binding compound, wherein said GFR-binding compound is a peptide, a variant or analog thereof, or a peptidomimetic as defined herein, with between 20 and 60 (in particular between 20 and 50, and more particularly, between 20 and 45) amino acids, comprising a peptide with four amino acids (PEP12) and a peptide with five amino acids (PEP2); wherein said GFR-binding compound further comprises a peptide with five amino acids (PEP5) and a peptide with between six and eleven amino acids (PEP10); and wherein the RMSD is 2.45 Å or less.

[0273] In one aspect, the present disclosure provides a GFR-binding compound, wherein said GFR-binding compound is a peptide, a variant or analog thereof, or a peptidomimetic as defined herein, with between 20 and 60 (in particular between 20 and 50, and more particularly, between 20 and 45) amino acids, comprising a peptide with four amino acids (PEP1) and a peptide with five amino acids (PEP2); wherein said GFR-binding compound further comprises a peptide with between six and twelve amino acids (PEP9) and a peptide with between five and seven amino acids (PEP6); and wherein the RMSD is 2.45 Å or less.

[0274] In one aspect, the present disclosure provides a GFR-binding compound, wherein said GFR-binding compound is a peptide, a variant or analog thereof, or a peptidomimetic as defined herein, with between 20 and 60 (in particular between 20 and 50, and more particularly, between 20 and 45) amino acids, comprising a peptide with four amino acids (PEP12) and a peptide with five amino acids (PEP2); wherein said GFR-binding compound further comprises a peptide with between six and twelve amino acids (PEP9) and a peptide with between five and seven amino acids (PEP6); and wherein the RMSD is 2.45 Å or less.

[0275] In one aspect, the present disclosure provides a GFR-binding compound, wherein said GFR-binding compound is a peptide, a variant or analog thereof, or a peptidomimetic as defined herein, with between 20 and 60 (in particular between 20 and 50, and more particularly, between 20 and 45) amino acids, comprising a peptide with four amino acids (PEP1) and a peptide with five amino acids (PEP2); wherein said GFR-binding compound further comprises a peptide with three amino acids (PEP3), an amino acid or a peptide with between two and seven amino acids (PEP7), and a peptide with three amino acids (PEP4); and wherein the RMSD is 2.45 Å or less.

[0276] In one aspect, the present disclosure provides a GFR-binding compound, wherein said GFR-binding compound is a peptide, a variant or analog thereof, or a peptidomimetic as defined herein, with between 20 and 60 (in particular between 20 and 50, and more particularly, between 20 and 45) amino acids, comprising a peptide with four amino acids (PEP12) and a peptide with five amino acids (PEP2); wherein said GFR-binding compound further comprises a peptide with three amino acids (PEP3), an amino acid or a peptide with between two and seven amino acids (PEP7), and a peptide with three amino acids (PEP4); and wherein the RMSD is 2.45 Å or less.

[0277] In one aspect, the present disclosure provides a GFR-binding compound, wherein said GFR-binding compound is a peptide, a variant or analog thereof, or a peptidomimetic as defined herein, with between 20 and 60 (in particular between 20 and 50, and more particularly, between 20 and 45) amino acids, comprising a peptide with four amino acids (PEP1) and a peptide with five amino acids (PEP2); wherein said GFR-binding compound further comprises a peptide with three amino acids (PEP3), an amino acid or a peptide with between two and seven amino acids (PEP7), and a peptide with between five and seven amino acids (PEP6); and wherein the RMSD is 2.45 Å or less.

[0278] In one aspect, the present disclosure provides a GFR-binding compound, wherein said GFR-binding compound is a peptide, a variant or analog thereof, or a peptidomimetic as defined herein, with between 20 and 60 (in particular between 20 and 50, and more particularly, between 20 and 45) amino acids, comprising a peptide with four amino acids (PEP12) and a peptide with five amino acids (PEP2); wherein said GFR-binding compound further comprises a peptide with three amino acids (PEP3), an amino acid or a peptide with between two and seven amino acids (PEP7), and a peptide with between five and seven amino acids (PEP6); and wherein the RMSD is 2.45 Å or less.

[0279] In one aspect, the present disclosure provides a GFR-binding compound, wherein said GFR-binding compound is a peptide, a variant or analog thereof, or a peptidomimetic as defined herein, with between 20 and 60 (in particular between 20 and 50, and more particularly, between 20 and 45) amino acids, comprising a peptide with four amino acids (PEP1) and a peptide with five amino acids (PEP2); wherein said GFR-binding compound further comprises a peptide with three amino acids (PEP3), an amino acid or a peptide with between two and seven amino acids (PEP7), and a peptide with between six and eleven amino acids (PEP10); and wherein the RMSD is 2.45 Å or less.

[0280] In one aspect, the present disclosure provides a GFR-binding compound, wherein said GFR-binding compound is a peptide, a variant or analog thereof, or a peptidomimetic as defined herein, with between 20 and 60 (in particular between 20 and 50, and more particularly, between 20 and 45) amino acids, comprising a peptide with four amino acids (PEP12) and a peptide with five amino acids (PEP2); wherein said GFR-binding compound further comprises a peptide with three amino acids (PEP3), an amino acid or a peptide with between two and seven amino acids (PEP7), and a peptide with between six and eleven amino acids (PEP10); and wherein the RMSD is 2.45 Å or less.

[0281] In one aspect, the present disclosure provides a GFR-binding compound, wherein said GFR-binding compound is a peptide, a variant or analog thereof, or a peptidomimetic as defined herein, with between 20 and 60 (in particular between 20 and 50, and more particularly, between 20 and 45) amino acids, comprising a peptide with four amino acids (PEP1) and a peptide with five amino acids (PEP2); wherein said GFR-binding compound further comprises a peptide with three amino acids (PEP3), an amino acid or a peptide with between two and seven amino acids (PEP7), a peptide with three amino acids (PEP4), and an amino acid or a peptide with between two and six amino acids (PEP8); and wherein the RMSD is 2.45 Å or less.

[0282] In one aspect, the present disclosure provides a GFR-binding compound, wherein said GFR-binding compound is a peptide, a variant or analog thereof, or a peptidomimetic as defined herein, with between 20 and 60 (in particular between 20 and 50, and more particularly, between 20 and 45) amino acids, comprising a peptide with four amino acids (PEP12) and a peptide with five amino acids (PEP2); wherein said GFR-binding compound further comprises a peptide with three amino acids (PEP3), an amino acid or a peptide with between two and seven amino acids (PEP7), a peptide with three amino acids (PEP4), and an amino acid or a peptide with between two and six amino acids (PEP8); and wherein the RMSD is 2.45 Å or less.

[0283] In one aspect, the present disclosure provides a GFR-binding compound, wherein said GFR-binding compound is a peptide, a variant or analog thereof, or a peptidomimetic as defined herein, with between 20 and 60 (in particular between 20 and 50, and more particularly, between 20 and 45) amino acids, comprising a peptide with four amino acids (PEP1) and a peptide with five amino acids (PEP2); wherein said GFR-binding compound further comprises a peptide with three amino acids (PEP3), an amino acid or a peptide with between two and seven amino acids (PEP7), a peptide with between five and seven amino acids (PEP6), and an amino acid or a peptide with between two and six amino acids (PEP8); and wherein the RMSD is 2.45 Å or less.

[0284] In one aspect, the present disclosure provides a GFR-binding compound, wherein said GFR-binding compound is a peptide, a variant or analog thereof, or a peptidomimetic as defined herein, with between 20 and 60 (in particular between 20 and 50, and more particularly, between 20 and 45) amino acids, comprising a peptide with four amino acids (PEP12) and a peptide with five amino acids (PEP2); wherein said GFR-binding compound further comprises a peptide with three amino acids (PEP3), an amino acid or a peptide with between two and seven amino acids (PEP7), a peptide with between five and seven amino acids (PEP6), and an amino acid or a peptide with between two and six amino acids (PEP8); and wherein the RMSD is 2.45 Å or less.

[0285] In one aspect, the present disclosure provides a GFR-binding compound, wherein said GFR-binding compound is a peptide, a variant or analog thereof, or a peptidomimetic as defined herein, with between 20 and 60 (in particular between 20 and 50, and more particularly, between 20 and 45) amino acids, comprising a peptide with four amino acids (PEP1) and a peptide with five amino acids (PEP2); wherein said GFR-binding compound further comprises a peptide with five amino acids (PEP5), an amino acid or a peptide with between two and seven amino acids (PEP7), and a peptide with three amino acids (PEP4); and wherein the RMSD is 2.45 Å or less.

[0286] In one aspect, the present disclosure provides a GFR-binding compound, wherein said GFR-binding compound is a peptide, a variant or analog thereof, or a peptidomimetic as defined herein, with between 20 and 60 (in particular between 20 and 50, and more particularly, between 20 and 45) amino acids, comprising a peptide with four amino acids (PEP12) and a peptide with five amino acids (PEP2); wherein said GFR-binding compound further comprises a peptide with five amino acids (PEP5), an amino acid or a peptide with between two and seven amino acids (PEP7), and a peptide with three amino acids (PEP4); and wherein the RMSD is 2.45 Å or less.

[0287] In one aspect, the present disclosure provides a GFR-binding compound, wherein said GFR-binding compound is a peptide, a variant or analog thereof, or a peptidomimetic as defined herein, with between 20 and 60 (in particular between 20 and 50, and more particularly, between 20 and 45) amino acids, comprising a peptide with four amino acids (PEP1) and a peptide with five amino acids (PEP2); wherein said GFR-binding compound further comprises a peptide with five amino acids (PEP5), an amino acid or a peptide with between two and seven amino acids (PEP7), and a peptide with between five and seven amino acids (PEP6); and wherein the RMSD is 2.45 Å or less.

[0288] In one aspect, the present disclosure provides a GFR-binding compound, wherein said GFR-binding compound is a peptide, a variant or analog thereof, or a peptidomimetic as defined herein, with between 20 and 60 (in particular between 20 and 50, and more particularly, between 20 and 45) amino acids, comprising a peptide with four amino acids (PEP12) and a peptide with five amino acids (PEP2); wherein said GFR-binding compound further comprises a peptide with five amino acids (PEP5), an amino acid or a peptide with between two and seven amino acids (PEP7), and a peptide with between five and seven amino acids (PEP6); and wherein the RMSD is 2.45 Å or less.

[0289] In one aspect, the present disclosure provides a GFR-binding compound, wherein said GFR-binding compound is a peptide, a variant or analog thereof, or a peptidomimetic as defined herein, with between 20 and 60 (in particular between 20 and 50, and more particularly, between 20 and 45) amino acids, comprising a peptide with four amino acids (PEP1) and a peptide with five amino acids (PEP2); wherein said GFR-binding compound further comprises a peptide with five amino acids (PEP5), an amino acid or a peptide with between two and seven amino acids (PEP7), and a peptide with between six and eleven amino acids (PEP10); and wherein the RMSD is 2.45 Å or less.

[0290] In one aspect, the present disclosure provides a GFR-binding compound, wherein said GFR-binding compound is a peptide, a variant or analog thereof, or a peptidomimetic as defined herein, with between 20 and 60 (in particular between 20 and 50, and more particularly, between 20 and 45) amino acids, comprising a peptide with four amino acids (PEP12) and a peptide with five amino acids (PEP2); wherein said GFR-binding compound further comprises a peptide with five amino acids (PEP5), an amino acid or a peptide with between two and seven amino acids (PEP7), and a peptide with between six and eleven amino acids (PEP10); and wherein the RMSD is 2.45 Å or less.

[0291] In one aspect, the present disclosure provides a GFR-binding compound, wherein said GFR-binding compound is a peptide, a variant or analog thereof, or a peptidomimetic as defined herein, with between 20 and 60 (in particular between 20 and 50, and more particularly, between 20 and 45) amino acids, comprising a peptide with four amino acids (PEP1) and a peptide with five amino acids (PEP2); wherein said GFR-binding compound further comprises a peptide with five amino acids (PEP5), an amino acid or a peptide with between two and seven amino acids (PEP7), a peptide with three amino acids (PEP4), and an amino acid or a peptide with between two and six amino acids (PEP8); and wherein the RMSD is 2.45 Å or less.

[0292] In one aspect, the present disclosure provides a GFR-binding compound, wherein said GFR-binding compound is a peptide, a variant or analog thereof, or a peptidomimetic as defined herein, with between 20 and 60 (in particular between 20 and 50, and more particularly, between 20 and 45) amino acids, comprising a peptide with four amino acids (PEP12) and a peptide with five amino acids (PEP2); wherein said GFR-binding compound further comprises a peptide with five amino acids (PEP5), an amino acid or a peptide with between two and seven amino acids (PEP7), a peptide with three amino acids (PEP4), and an amino acid or a peptide with between two and six amino acids (PEP8); and wherein the RMSD is 2.45 Å or less.

[0293] In one aspect, the present disclosure provides a GFR-binding compound, wherein said GFR-binding compound is a peptide, a variant or analog thereof, or a peptidomimetic as defined herein, with between 20 and 60 (in particular between 20 and 50, and more particularly, between 20 and 45) amino acids, comprising a peptide with four amino acids (PEP1) and a peptide with five amino acids (PEP2); wherein said GFR-binding compound further comprises a peptide with five amino acids (PEP5), an amino acid or a peptide with between two and seven amino acids (PEP7), a peptide with between five and seven amino acids (PEP6), and an amino acid or a peptide with between two and six amino acids (PEP8); and wherein the RMSD is 2.45 Å or less.

[0294] In one aspect, the present disclosure provides a GFR-binding compound, wherein said GFR-binding compound is a peptide, a variant or analog thereof, or a peptidomimetic as defined herein, with between 20 and 60 (in particular between 20 and 50, and more particularly, between 20 and 45) amino acids, comprising a peptide with four amino acids (PEP12) and a peptide with five amino acids (PEP2); wherein said GFR-binding compound further comprises a peptide with five amino acids (PEP5), an amino acid or a peptide with between two and seven amino acids (PEP7), a peptide with between five and seven amino acids (PEP6), and an amino acid or a peptide with between two and six amino acids (PEP8); and wherein the RMSD is 2.45 Å or less.

[0295] In one aspect, the present disclosure provides a GFR-binding compound, wherein said GFR-binding compound is a peptide, a variant or analog thereof, or a peptidomimetic as defined herein, with between 20 and 60 (in particular between 20 and 50, and more particularly, between 20 and 45) amino acids, comprising a peptide with four amino acids (PEP1) and a peptide with five amino acids (PEP2); wherein said GFR-binding compound further comprises a peptide with between six and twelve amino acids (PEP9), a peptide with three amino acids (PEP4), and an amino acid or a peptide with between two and six amino acids (PEP8); and wherein the RMSD is 2.45 Å or less.

[0296] In one aspect, the present disclosure provides a GFR-binding compound, wherein said GFR-binding compound is a peptide, a variant or analog thereof, or a peptidomimetic as defined herein, with between 20 and 60 (in particular between 20 and 50, and more particularly, between 20 and 45) amino acids, comprising a peptide with four amino acids (PEP12) and a peptide with five amino acids (PEP2); wherein said GFR-binding compound further comprises a peptide with between six and twelve amino acids (PEP9), a peptide with three amino acids (PEP4), and an amino acid or a peptide with between two and six amino acids (PEP8); and wherein the RMSD is 2.45 Å or less.

[0297] In one aspect, the present disclosure provides a GFR-binding compound, wherein said GFR-binding compound is a peptide, a variant or analog thereof, or a peptidomimetic as defined herein, with between 20 and 60 (in particular between 20 and 50, and more particularly, between 20 and 45) amino acids, comprising a peptide with four amino acids (PEP1) and a peptide with five amino acids (PEP2); wherein said GFR-binding compound further comprises a peptide with between six and twelve amino acids (PEP9), a peptide with between five and seven amino acids (PEP6), and an amino acid or a peptide with between two and six amino acids (PEP8); and wherein the RMSD is 2.45 Å or less.

[0298] In one aspect, the present disclosure provides a GFR-binding compound, wherein said GFR-binding compound is a peptide, a variant or analog thereof, or a peptidomimetic as defined herein, with between 20 and 60 (in particular between 20 and 50, and more particularly, between 20 and 45) amino acids, comprising a peptide with four amino acids (PEP12) and a peptide with five amino acids (PEP2); wherein said GFR-binding compound further comprises a peptide with between six and twelve amino acids (PEP9), a peptide with between five and seven amino acids (PEP6), and an amino acid or a peptide with between two and six amino acids (PEP8); and wherein the RMSD is 2.45 Å or less.

[0299] In one aspect, the present disclosure provides a GFR-binding compound, wherein said GFR-binding compound is a peptide, a variant or analog thereof, or a peptidomimetic as defined herein, with between 20 and 60 (in particular between 20 and 50, and more particularly, between 20 and 45) amino acids, having the following general formula (I) (hereinafter may also be referred to as compound (I) or peptide (I)):

PEP(A)-LINKER-PEP(B) (I)

wherein one end of LINKER interacts covalently with one end of PEP(A); wherein another end of LINKER interacts covalently with one end of PEP(B); wherein PEP(A) comprises PEP1; wherein PEP(B) comprises PEP2; wherein LINKER is a linear or branched organic divalent radical, moiety or compound having a molecular weight (Mw) comprised between about 28 and about 2,000 Da, in particular, between about 300 and about 1000 Da; and wherein the RMSD is 2.45 Å or less.

[0300] In the present description, the molecular weight of LINKER refer to the calculated molecular weight prior to being connected to/reacted with any of the elements it is configured to connect to or react with e.g. PEP(A), PEP(B) or any other groups defined herein.

[0301] In one aspect, the present disclosure provides a GFR-binding compound, wherein said GFR-binding compound is a peptide, a variant or analog thereof, or a peptidomimetic as defined herein, with between 20 and 60 (in particular between 20 and 50, and more particularly, between 20 and 45) amino acids, having the following general formula (I) (hereinafter may also be referred to as compound (I) or peptide (I)):

PEP(A)-LINKER-PEP(B) (I)

wherein one end of LINKER interacts covalently with one end of PEP(A); wherein another end of LINKER interacts covalently with one end of PEP(B); wherein PEP(A) comprises PEP12; wherein PEP(B) comprises PEP2; wherein LINKER is a linear or branched organic divalent radical, moiety or compound having a molecular weight (Mw) comprised between about 28 and about 2,000 Da, in particular, between about 300 and about 1000 Da; and wherein the RMSD is 2.45 Å or less.

[0302] In one aspect, the present disclosure provides a GFR-binding compound of general formula (I), wherein PEP(A) comprises PEP1; wherein PEP(B) comprises PEP2; wherein PEP(A) further comprises PEP3; wherein PEP(B) further comprises PEP4; and wherein the RMSD is 2.45 Å or less.

[0303] In one aspect, the present disclosure provides a GFR-binding compound of general formula (I), wherein PEP(A) comprises PEP12; wherein PEP(B) comprises PEP2; wherein PEP(A) further comprises PEP3; wherein PEP(B) further comprises PEP4; and wherein the RMSD is 2.45 Å or less.

[0304] In one aspect, the present disclosure provides a GFR-binding compound of general formula (I), wherein PEP(A) comprises PEP1; wherein PEP(B) comprises PEP2; wherein PEP(A) further comprises PEP5; wherein PEP(B) further comprises PEP6; and wherein the RMSD is 2.45 Å or less.

[0305] In one aspect, the present disclosure provides a GFR-binding compound of general formula (I), wherein PEP(A) comprises PEP12; wherein PEP(B) comprises PEP2; wherein PEP(A) further comprises PEP5; wherein PEP(B) further comprises PEP6; and wherein the RMSD is 2.45 Å or less.

[0306] In one aspect, the present disclosure provides a GFR-binding compound of general formula (I), wherein PEP(A) comprises PEP1; wherein PEP(B) comprises PEP2; wherein PEP(A) further comprises PEP9; wherein PEP(B) further comprises PEP10; and wherein the RMSD is 2.45 Å or less.

[0307] In one aspect, the present disclosure provides a GFR-binding compound of general formula (I), wherein PEP(A) comprises PEP12; wherein PEP(B) comprises PEP2; wherein PEP(A) further comprises PEP9; wherein PEP(B) further comprises PEP10; and wherein the RMSD is 2.45 Å or less.

[0308] In one aspect, the present disclosure provides a GFR-binding compound of general formula (I), wherein PEP(A) comprises PEP1; wherein PEP(B) comprises PEP2; wherein PEP(A) further comprises PEP3; wherein PEP(B) further comprises PEP6; and wherein the RMSD is 2.45 Å or less.

[0309] In one aspect, the present disclosure provides a GFR-binding compound of general formula (I), wherein PEP(A) comprises PEP12; wherein PEP(B) comprises PEP2; wherein PEP(A) further comprises PEP3; wherein PEP(B) further comprises PEP6; and wherein the RMSD is 2.45 Å or less.

[0310] In one aspect, the present disclosure provides a GFR-binding compound of general formula (I), wherein PEP(A) comprises PEP1; wherein PEP(B) comprises PEP2; wherein PEP(A) further comprises PEP3; wherein PEP(B) further comprises PEP10; and wherein the RMSD is 2.45 Å or less.

[0311] In one aspect, the present disclosure provides a GFR-binding compound of general formula (I), wherein PEP(A) comprises PEP12; wherein PEP(B) comprises PEP2; wherein PEP(A) further comprises PEP3; wherein PEP(B) further comprises PEP10; and wherein the RMSD is 2.45 Å or less.

[0312] In one aspect, the present disclosure provides a GFR-binding compound of general formula (I), wherein PEP(A) comprises PEP1; wherein PEP(B) comprises PEP2; wherein PEP(A) further comprises PEP5; wherein PEP(B) further comprises PEP4; and wherein the RMSD is 2.45 Å or less.

[0313] In one aspect, the present disclosure provides a GFR-binding compound of general formula (I), wherein PEP(A) comprises PEP12; wherein PEP(B) comprises PEP2; wherein PEP(A) further comprises PEP5; wherein PEP(B) further comprises PEP4; and wherein the RMSD is 2.45 Å or less.

[0314] In one aspect, the present disclosure provides a GFR-binding compound of general formula (I), wherein PEP(A) comprises PEP1; wherein PEP(B) comprises PEP2; wherein PEP(A) further comprises PEP9; wherein PEP(B) further comprises PEP4; and wherein the RMSD is 2.45 Å or less.

[0315] In one aspect, the present disclosure provides a GFR-binding compound of general formula (I), wherein PEP(A) comprises PEP12; wherein PEP(B) comprises PEP2; wherein PEP(A) further comprises PEP9; wherein PEP(B) further comprises PEP4; and wherein the RMSD is 2.45 Å or less.

[0316] In one aspect, the present disclosure provides a GFR-binding compound of general formula (I), wherein PEP(A) comprises PEP1; wherein PEP(B) comprises PEP2; wherein PEP(A) further comprises PEP5; wherein PEP(B) further comprises PEP10; and wherein the RMSD is 2.45 Å or less.

[0317] In one aspect, the present disclosure provides a GFR-binding compound of general formula (I), wherein PEP(A) comprises PEP12; wherein PEP(B) comprises PEP2; wherein PEP(A) further comprises PEP5; wherein PEP(B) further comprises PEP10; and wherein the RMSD is 2.45 Å or less.

[0318] In one aspect, the present disclosure provides a GFR-binding compound of general formula (I), wherein PEP(A) comprises PEP1; wherein PEP(B) comprises PEP2; wherein PEP(A) further comprises PEP9; wherein PEP(B) further comprises PEP6; and wherein the RMSD is 2.45 Å or less.

[0319] In one aspect, the present disclosure provides a GFR-binding compound of general formula (I), wherein PEP(A) comprises PEP12; wherein PEP(B) comprises PEP2; wherein PEP(A) further comprises PEP9; wherein PEP(B) further comprises PEP6; and wherein the RMSD is 2.45 Å or less.

[0320] In one aspect, the present disclosure provides a GFR-binding compound of general formula (I), wherein PEP(A) comprises PEP1; wherein PEP(B) comprises PEP2; wherein PEP(A) further comprises PEP3 and PEP7; wherein PEP(B) further comprises PEP4; and wherein the RMSD is 2.45 Å or less.

[0321] In one aspect, the present disclosure provides a GFR-binding compound of general formula (I), wherein PEP(A) comprises PEP12; wherein PEP(B) comprises PEP2; wherein PEP(A) further comprises PEP3 and PEP7; wherein PEP(B) further comprises PEP4; and wherein the RMSD is 2.45 Å or less.

[0322] In one aspect, the present disclosure provides a GFR-binding compound of general formula (I), wherein PEP(A) comprises PEP1; wherein PEP(B) comprises PEP2; wherein PEP(A) further comprises PEP3 and PEP7; wherein PEP(B) further comprises PEP6; and wherein the RMSD is 2.45 Å or less.

[0323] In one aspect, the present disclosure provides a GFR-binding compound of general formula (I), wherein PEP(A) comprises PEP12; wherein PEP(B) comprises PEP2; wherein PEP(A) further comprises PEP3 and PEP7; wherein PEP(B) further comprises PEP6; and wherein the RMSD is 2.45 Å or less.

[0324] In one aspect, the present disclosure provides a GFR-binding compound of general formula (I), wherein PEP(A) comprises PEP1; wherein PEP(B) comprises PEP2; wherein PEP(A) further comprises PEP3 and PEP7; wherein PEP(B) further comprises PEP10; and wherein the RMSD is 2.45 Å or less.

[0325] In one aspect, the present disclosure provides a GFR-binding compound of general formula (I), wherein PEP(A) comprises PEP12; wherein PEP(B) comprises PEP2; wherein PEP(A) further comprises PEP3 and PEP7; wherein PEP(B) further comprises PEP10; and wherein the RMSD is 2.45 Å or less.

[0326] In one aspect, the present disclosure provides a GFR-binding compound of general formula (I), wherein PEP(A) comprises PEP1; wherein PEP(B) comprises PEP2; wherein PEP(A) further comprises PEP7; wherein PEP(B) further comprises PEP4 and PEP8; and wherein the RMSD is 2.45 Å or less.

[0327] In one aspect, the present disclosure provides a GFR-binding compound of general formula (I), wherein PEP(A) comprises PEP12; wherein PEP(B) comprises PEP2; wherein PEP(A) further comprises PEP7; wherein PEP(B) further comprises PEP4 and PEP8; and wherein the RMSD is 2.45 Å or less.

[0328] In one aspect, the present disclosure provides a GFR-binding compound of general formula (I), wherein PEP(A) comprises PEP1; wherein PEP(B) comprises PEP2; wherein PEP(A) further comprises PEP7; wherein PEP(B) further comprises PEP6 and PEP8; and wherein the RMSD is 2.45 Å or less.

[0329] In one aspect, the present disclosure provides a GFR-binding compound of general formula (I), wherein PEP(A) comprises PEP12; wherein PEP(B) comprises PEP2; wherein PEP(A) further comprises PEP7; wherein PEP(B) further comprises PEP6 and PEP8; and wherein the RMSD is 2.45 Å or less.

[0330] In one aspect, the present disclosure provides a GFR-binding compound of general formula (I), wherein PEP(A) comprises PEP1; wherein PEP(B) comprises PEP2; wherein PEP(A) further comprises PEP5 and PEP7; wherein PEP(B) further comprises PEP4; and wherein the RMSD is 2.45 Å or less.

[0331] In one aspect, the present disclosure provides a GFR-binding compound of general formula (I), wherein PEP(A) comprises PEP12; wherein PEP(B) comprises PEP2; wherein PEP(A) further comprises PEP5 and PEP7; wherein PEP(B) further comprises PEP4; and wherein the RMSD is 2.45 Å or less.

[0332] In one aspect, the present disclosure provides a GFR-binding compound of general formula (I), wherein PEP(A) comprises PEP1; wherein PEP(B) comprises PEP2; wherein PEP(A) further comprises PEP5 and PEP7; wherein PEP(B) further comprises PEP6; and wherein the RMSD is 2.45 Å or less.

[0333] In one aspect, the present disclosure provides a GFR-binding compound of general formula (I), wherein PEP(A) comprises PEP12; wherein PEP(B) comprises PEP2; wherein PEP(A) further comprises PEP5 and PEP7; wherein PEP(B) further comprises PEP6; and wherein the RMSD is 2.45 Å or less.

[0334] In one aspect, the present disclosure provides a GFR-binding compound of general formula (I), wherein PEP(A) comprises PEP1; wherein PEP(B) comprises PEP2; wherein PEP(A) further comprises PEP5 and PEP7; wherein PEP(B) further comprises PEP10; and wherein the RMSD is 2.45 Å or less.

[0335] In one aspect, the present disclosure provides a GFR-binding compound of general formula (I), wherein PEP(A) comprises PEP12; wherein PEP(B) comprises PEP2; wherein PEP(A) further comprises PEP5 and PEP7; wherein PEP(B) further comprises PEP10; and wherein the RMSD is 2.45 Å or less.

[0336] In one aspect, the present disclosure provides a GFR-binding compound of general formula (I), wherein PEP(A) comprises PEP1; wherein PEP(B) comprises PEP2; wherein PEP(A) further comprises PEP5 and PEP7; wherein PEP(B) further comprises PEP4 and PEP8; and wherein the RMSD is 2.45 Å or less.

[0337] In one aspect, the present disclosure provides a GFR-binding compound of general formula (I), wherein PEP(A) comprises PEP12; wherein PEP(B) comprises PEP2; wherein PEP(A) further comprises PEP5 and PEP7; wherein PEP(B) further comprises PEP4 and PEP8; and wherein the RMSD is 2.45 Å or less.

[0338] In one aspect, the present disclosure provides a GFR-binding compound of general formula (I), wherein PEP(A) comprises PEP1; wherein PEP(B) comprises PEP2; wherein PEP(A) further comprises PEP5 and PEP7; wherein PEP(B) further comprises PEP6 and PEP8; and wherein the RMSD is 2.45 Å or less.

[0339] In one aspect, the present disclosure provides a GFR-binding compound of general formula (I), wherein PEP(A) comprises PEP12; wherein PEP(B) comprises PEP2; wherein PEP(A) further comprises PEP5 and PEP7; wherein PEP(B) further comprises PEP6 and PEP8; and wherein the RMSD is 2.45 Å or less.

[0340] In one aspect, the present disclosure provides a GFR-binding compound of general formula (I), wherein PEP(A) comprises PEP1; wherein PEP(B) comprises PEP2; wherein PEP(A) further comprises PEP9; wherein PEP(B) further comprises PEP4 and PEP8; and wherein the RMSD is 2.45 Å or less.

[0341] In one aspect, the present disclosure provides a GFR-binding compound of general formula (I), wherein PEP(A) comprises PEP12; wherein PEP(B) comprises PEP2; wherein PEP(A) further comprises PEP9; wherein PEP(B) further comprises PEP4 and PEP8; and wherein the RMSD is 2.45 Å or less.

[0342] In one aspect, the present disclosure provides a GFR-binding compound of general formula (I), wherein PEP(A) comprises PEP1; wherein PEP(B) comprises PEP2; wherein PEP(A) further comprises PEP9; wherein PEP(B) further comprises PEP6 and PEP8; and wherein the RMSD is 2.45 Å or less.

[0343] In one aspect, the present disclosure provides a GFR-binding compound of general formula (I), wherein PEP(A) comprises PEP12; wherein PEP(B) comprises PEP2; wherein PEP(A) further comprises PEP9; wherein PEP(B) further comprises PEP6 and PEP8; and wherein the RMSD is 2.45 Å or less.

[0344] In one aspect, the present disclosure provides a GFR-binding compound, wherein said GFR-binding compound is a peptide, a variant or analog thereof, or a peptidomimetic as defined herein, with between 20 and 60 (in particular between 20 and 50, and more particularly, between 20 and 45) amino acids, having the following general formula (II) (hereinafter may also be referred to as compound (II) or peptide (II)):

PEP(C)-PEP12-LINKER-PEP2-PEP(D) (II)

wherein LINKER is a linear or branched organic divalent radical, moiety or compound having a molecular weight (Mw) comprised between about 28 and about 2,000 Da, in particular, between about 300 and about 1000 Da; wherein PEP12 is a peptide with 8 amino acids of formula PEP1-AA¹⁷-PEP11 as defined herein; wherein PEP2 is a peptide with five amino acids as already defined herein; wherein one end of PEP(C) interacts covalently with PEP12 via one end of PEP1; wherein one end of PEP(D) interacts covalently with one end of PEP2; wherein one end of LINKER interacts covalently with one end of PEP12 via one end of PEP11; wherein another end of LINKER interacts covalently with another end of PEP2; wherein PEP(C) is a peptide with at least 5 amino acids, in particular a peptide with between 5 and 12 amino acids; wherein PEP(D) is a peptide with at least 5 amino acids, in particular a peptide with between 5 and 11 amino acids; and wherein the RMSD is 2.45 Å or less.

[0345] In one aspect, the present disclosure provides a GFR-binding compound of general formula (II), wherein PEP(C) comprises PEP3; wherein PEP(D) comprises PEP4; and wherein the RMSD is 2.45 Å or less.

[0346] In one aspect, the present disclosure provides a GFR-binding compound of general formula (II), wherein PEP(C) comprises PEP5; wherein PEP(D) comprises PEP6; and wherein the RMSD is 2.45 Å or less. In one particular example, PEP(C) is PEP5; and PEP(D) is PEP6.

[0347] In one aspect, the present disclosure provides a GFR-binding compound of general formula (II), wherein PEP(C) comprises PEP9; wherein PEP(D) comprises PEP10; and wherein the RMSD is 2.45 Å or less. In one particular example, PEP(C) is PEP9; and PEP(D) is PEP10.

[0348] In one aspect, the present disclosure provides a GFR-binding compound of general formula (II), wherein PEP(C) comprises PEP3; wherein PEP(D) comprises PEP6; and wherein the RMSD is 2.45 Å or less. In one particular example, PEP(C) comprises PEP3 and PEP(D) is PEP6.

[0349] In one aspect, the present disclosure provides a GFR-binding compound of general formula (II), wherein PEP(C) comprises PEP3; wherein PEP(D) comprises PEP10; and wherein the RMSD is 2.45 Å or less. In one particular example, PEP(C) comprises PEP3 and PEP(D) is PEP10.

[0350] In one aspect, the present disclosure provides a GFR-binding compound of general formula (II), wherein PEP(C) comprises PEP5; wherein PEP(D) comprises PEP4; and wherein the RMSD is 2.45 Å or less. In one particular example, PEP(C) is PEP5 and PEP(D) comprises PEP4.

[0351] In one aspect, the present disclosure provides a GFR-binding compound of general formula (II), wherein PEP(C) comprises PEP9; wherein PEP(D) comprises PEP4; and wherein the RMSD is 2.45 Å or less. In one particular example, PEP(C) is PEP9 and PEP(D) comprises PEP4.

[0352] In one aspect, the present disclosure provides a GFR-binding compound of general formula (II), wherein PEP(C) comprises PEP5; wherein PEP(D) comprises PEP10; and wherein the RMSD is 2.45 Å or less. In one particular example, PEP(C) is PEP5 and PEP(D) is PEP10.

[0353] In one aspect, the present disclosure provides a GFR-binding compound of general formula (II), wherein PEP(C) comprises PEP9; wherein PEP(D) comprises PEP6; and wherein the RMSD is 2.45 Å or less. In one particular example, PEP(C) is PEP9 and PEP(D) is PEP6.

[0354] In one aspect, the present disclosure provides a GFR-binding compound of general formula (II), wherein PEP(C) comprises PEP3 and PEP7; wherein PEP(D) comprises PEP4; and wherein the RMSD is 2.45 Å or less.

[0355] In one aspect, the present disclosure provides a GFR-binding compound of general formula (II), wherein PEP(C) comprises PEP3 and PEP7; wherein PEP(D) comprises PEP6; and wherein the RMSD is 2.45 Å or less. In one particular example, PEP(C) comprises PEP3 and PEP7, and PEP(D) is PEP6.

[0356] In one aspect, the present disclosure provides a GFR-binding compound of general formula (II), wherein PEP(C) comprises PEP3 and PEP7; wherein PEP(D) comprises PEP10; and wherein the RMSD is 2.45 Å or less. In one particular example, PEP(C) comprises PEP3 and PEP7, and PEP(D) is PEP10.

[0357] In one aspect, the present disclosure provides a GFR-binding compound of general formula (II), wherein PEP(C) comprises PEP7; wherein PEP(D) comprises PEP4 and PEP8; and wherein the RMSD is 2.45 Å or less.

[0358] In one aspect, the present disclosure provides a GFR-binding compound of general formula (II), wherein PEP(C) comprises PEP7; wherein PEP(D) comprises PEP6 and PEP8; and wherein the RMSD is 2.45 Å or less.

[0359] In one aspect, the present disclosure provides a GFR-binding compound of general formula (II), wherein PEP(C) comprises PEP5 and PEP7; wherein PEP(D) comprises PEP4; and wherein the RMSD is 2.45 Å or less.

[0360] In one aspect, the present disclosure provides a GFR-binding compound of general formula (II), wherein PEP(C) comprises PEP5 and PEP7; wherein PEP(D) comprises PEP6; and wherein the RMSD is 2.45 Å or less.

[0361] In one aspect, the present disclosure provides a GFR-binding compound of general formula (II), wherein PEP(C) comprises PEP5 and PEP7; wherein PEP(D) comprises PEP10; and wherein the RMSD is 2.45 Å or less.

[0362] In one aspect, the present disclosure provides a GFR-binding compound of general formula (II), wherein PEP(C) comprises PEP5 and PEP7; wherein PEP(D) comprises PEP4 and PEP8; and wherein the RMSD is 2.45 Å or less.

[0363] In one aspect, the present disclosure provides a GFR-binding compound of general formula (II), wherein PEP(C) comprises PEP5 and PEP7; wherein PEP(D) comprises PEP6 and PEP8; and wherein the RMSD is 2.45 Å or less.

[0364] In one aspect, the present disclosure provides a GFR-binding compound of general formula (II), wherein PEP(C) comprises PEP9; wherein PEP(D) comprises PEP4 and PEP8; and wherein the RMSD is 2.45 Å or less.

[0365] In one aspect, the present disclosure provides a GFR-binding compound of general formula (II), wherein PEP(C) comprises PEP9; wherein PEP(D) comprises PEP6 and PEP8; and wherein the RMSD is 2.45 Å or less.

[0366] In one aspect, the present disclosure provides a GFR-binding compound of general formula (II), wherein PEP(C) is PEP5 or PEP9 and wherein PEP(D) is PEP6 or PEP10; and wherein the RMSD is 2.45 Å or less.

[0367] In one aspect, the present disclosure provides a GFR-binding compound, wherein said GFR-binding compound is a peptide, a variant or analog thereof, or a peptidomimetic as defined herein, with between 20 and 60 (in particular between 20 and 50, and more particularly, between 20 and 45) amino acids, having the following general formula (III) (hereinafter may also be referred to as compound (III) or peptide (III)):

PEP7-PEP5-PEP12-LINKER-PEP2-PEP6-PEP8 (III)

wherein LINKER is a linear or branched organic divalent radical, moiety or compound having a molecular weight (Mw) comprised between about 28 and about 2,000 Da, in particular, between about 300 and about 1000 Da; wherein PEP12 is a peptide with 8 amino acids of formula PEP1-AA¹⁷-PEP11 as defined herein; wherein PEP2 is a peptide with five amino acids as already defined herein; wherein PEP5 is a peptide with five amino acids as already defined herein; wherein PEP6 is a peptide with between five and seven amino acids as already defined herein; wherein PEP7 an amino acid or a peptide with between two and seven amino acids as already defined herein; wherein PEP8 an amino acid or a peptide with between two and six amino acids as already defined herein; wherein one end of LINKER interacts covalently with one end of PEP12 via AA²⁰; wherein another end of LINKER interacts covalently with one end of PEP2 via AA²¹; wherein one end of PEP5 interacts covalently with another end of PEP12 via AA¹²; wherein another end of PEP5 interacts covalently with one end of PEP7 via AA⁸; wherein one end of PEP6 interacts covalently with another end of PEP2 via AA²⁶; wherein another end of PEP6 interacts covalently with one end of PEP8 via AA³²; and wherein the RMSD is 2.45 Å or less.

[0368] In one aspect, the present disclosure provides a GFR-binding compound, wherein said GFR-binding compound is a peptide, a variant or analog thereof, or a peptidomimetic as defined herein, with between 20 and 60 (in particular between 20 and 50, and more particularly, between 20 and 45) amino acids, having the following general formula (IV) (hereinafter may also be referred to as compound (IV) or peptide (IV)):

(IV)
AA¹-AA²-AA³-AA⁴-AA⁵-AA⁶-AA⁷-AA⁸-AA⁹-AA¹⁰-AA¹¹-AA¹²-AA¹³-
AA¹⁴-AA¹⁵-AA¹⁶-AA¹⁷-AA¹⁸-AA¹⁹-AA²⁰-LINKER-AA²¹-AA²²-AA²³-
AA²⁴-AA²⁵-AA²⁶-AA²⁷-AA²⁸-AA²⁹-AA³⁰-AA³¹-AA³²-AA³³-AA³⁴-
AA³⁵-AA³⁶-AA³⁷-AA³⁸

wherein LINKER is a linear or branched organic divalent radical, moiety or compound having a molecular weight (Mw) comprised between about 28 and about 2,000 Da, in particular, between about 300 and about 1000 Da; wherein AA¹-AA²-AA³-AA⁴-AA⁵-AA⁶-AA⁷ (SEQ ID NO: 84948) is PEP7 as defined herein; wherein AA¹³-AA¹⁴-AA¹⁵-AA¹⁸-AA¹⁷-AA¹⁸-AA¹⁹-AA²⁰ is PEP12 as defined herein; wherein AA²¹-AA²²-AA²³-AA²⁴-AA²⁵ is PEP2 as already defined herein; wherein AA⁸-AA⁹-AA¹⁰ is PEP3 as defined herein; wherein AA³⁰-AA³¹-AA³² is PEP4 as defined herein; wherein AA³³-AA³⁴-AA³⁵-AA³⁶-AA³⁷-AA³⁸ (SEQ ID NO: 84949) is PEP8 as defined herein; wherein AA¹¹, AA¹², AA²⁶, AA²⁷, AA²⁸, and AA²⁹ are as defined herein; wherein one end of LINKER interacts covalently with AA²⁰; wherein another end of LINKER interacts covalently with AA²¹; wherein AA¹ and AA²¹ may be both N-terminal amino acids or both C-terminal amino acids; wherein AA³⁸ and AA²⁰ may be both N-terminal amino acids or both C-terminal amino acids; and wherein the RMSD is 2.45 Å or less.

[0369] In certain embodiments, PEP1 is selected from the group consisting of SAIS (SEQ ID NO: 84116), SSLS (SEQ ID NO: 84121), NAIS (SEQ ID NO: 84113), SATS (SEQ ID NO: 84117), SPIS (SEQ ID NO: 84120), EPIS (SEQ ID NO: 84109), SPIN (SEQ ID NO: 84119), KPLS (SEQ ID NO: 84112), EPLP (SEQ ID NO: 84110), EPLT (SEQ ID NO: 84111), SNIT (SEQ ID NO: 84118), RSVK (SEQ ID NO: 84115) and RPVQ (SEQ ID NO: 84114).

[0370] In certain embodiments, PEP2 is selected from the group consisting of LKNYQ (SEQ ID NO: 84230), LKVYP (SEQ ID NO: 84231), LKKYR (SEQ ID NO: 84229), LRKHR (SEQ ID NO: 84233), LKYHY (SEQ ID NO: 84232), KFKYE (SEQ ID NO: 84211), YGKIP (SEQ ID NO: 84397), YKQYE (SEQ ID NO: 84398), DHHKD (SEQ ID NO: 84149), EQLSN (SEQ ID NO: 84178), IGEMS (SEQ ID NO: 84209), LGEMS (SEQ ID NO: 84228), KEVQV (SEQ ID NO: 84210) and KKATV (SEQ ID NO: 84212).

[0371] In certain embodiments, the pair PEP1:PEP2 is selected from the group consisting of SAIS (SEQ ID NO: 84116):LKNYQ (SEQ ID NO: 84230), SSLS (SEQ ID NO: 84121):LKVYP (SEQ ID NO: 84231), NAIS (SEQ ID NO: 84113):LKKYR (SEQ ID NO: 84229), SATS (SEQ ID NO: 84117):LRKHR (SEQ ID NO: 84233), SPIS (SEQ ID NO: 84120):LKYHY (SEQ ID NO: 84232), EPIS (SEQ ID NO: 84109):KFKYE (SEQ ID NO: 84211), SPIN (SEQ ID NO: 84119):YGKIP (SEQ ID NO: 84397), SPIS (SEQ ID NO: 84120):YKQYE (SEQ ID NO: 84398), KPLS (SEQ ID NO: 84112):DHHKD (SEQ ID NO: 84149), EPLP (SEQ ID NO: 84110):EQLSN (SEQ ID NO: 84178), EPLT (SEQ ID NO: 84111):EQLSN (SEQ ID NO: 84178), SNIT (SEQ ID NO: 84118):IGEMS (SEQ ID NO: 84209), SNIT (SEQ ID NO: 84118):LGEMS (SEQ ID NO: 84228), RSVK (SEQ ID NO: 84115):KEVQV (SEQ ID NO: 84210) and RPVQ (SEQ ID NO: 84114):KKATV (SEQ ID NO: 84212).

[0372] In certain embodiments, PEP3 is selected from the group consisting of VPT, VPE, APT, TPT, VPA, APV, VPQ, VSQ, SRV and TQV.

[0373] In certain embodiments, PEP4 is selected from the group consisting of VVE, TVE, VVR, VVK, VAE, AVS, VVD, VEE, VRS, VKS, QHN, EHS, EEH and EDH.

[0374] In certain embodiments, PEP5 is a peptide of general formula PEP3-AA¹¹-AA¹²; wherein PEP3 is selected from the group consisting of VPT, VPE, APT, TPT, VPA, APV, VPQ, VSQ, SRV and TQV; wherein AA¹¹ is selected from the group consisting of E, K, Q, R, A, D, G and H; and wherein AA¹² is selected from the group consisting of L, M, T, E, Q and H. In one particular example, PEP5 is selected from the group consisting of VPTEL (SEQ ID NO: 84378), VPEKM (SEQ ID NO: 84360), APTKL (SEQ ID NO: 84131), APTQL (SEQ ID NO: 84134), VPTKL (SEQ ID NO: 84381), TPTKM (SEQ ID NO: 84327), VPARL (SEQ ID NO: 84352), VPTRL (SEQ ID NO: 84385), APVKT (SEQ ID NO: 84144), VPQAL (SEQ ID NO: 84364), VSQDL (SEQ ID NO: 84387), VPQDL (SEQ ID NO: 84365), VPTEE (SEQ ID NO: 84377), VPTGQ (SEQ ID NO: 84379), SRVHH (SEQ ID NO: 84297) and TQVQL (SEQ ID NO: 84340).

[0375] In certain embodiments, PEP6 is a peptide of general formula AA²⁶-AA²⁷-AA²⁸-AA²⁹-PEP4; wherein PEP4 is selected from the group consisting of VVE, TVE, VVR, VVK, VAE, AVS, VVD, VEE, VRS, VKS, QHN, EHS, EEH and EDH; wherein AA²⁶ is absent or selected from the group consisting of AA^{III} amino acids, preferably is absent or is E; wherein AA²⁷ and AA²⁸ are independently selected from the group consisting of AA^{III} and AP^{V}/amino acids; and wherein AA²⁹ is absent or selected from the group consisting of AA^{II} amino acids, preferably is absent or is S. In one particular example, PEP6 is selected from the group consisting of DMVVE (SEQ ID NO: 84161), NMTVE (SEQ ID NO: 84267), EMVVE (SEQ ID NO: 84175), NMVVR (SEQ ID NO: 84275), NMVVK (SEQ ID NO: 84274), EGMSVAE (SEQ ID NO: 84411), GMAVS (SEQ ID NO: 84194), GMVVD (SEQ ID NO: 84204), MIVEE (SEQ ID NO: 84241), MIVRS (SEQ ID NO: 84243), MIVKS (SEQ ID NO: 84242), MVVKS (SEQ ID NO: 84256), FLQHN (SEQ ID NO: 84184), LEEHS (SEQ ID NO: 84217), RLEEH (SEQ ID NO: 84279) and TLEDH (SEQ ID NO: 84307).

[0376] In certain embodiments, PEP7 is an amino acid or a peptide with between two and seven amino acids of general formula AA¹-AA²-AA³-AA⁴-AA⁵-AA⁶-AA⁷ (SEQ ID NO: 84948); wherein AA¹, AA², AA³, AA⁴, and AA⁵ are independently absent or AA′ as defined herein; wherein AA⁶ is absent or selected from the group consisting of S, T, C, E, Q, P and R; wherein AA⁷ is absent or is selected from the group consisting of S, T, C, E, Q, P and R, and wherein at least one of AA¹, AA², AA³, AA⁴, AA⁵, AA⁶ or AA⁷ is not absent. In one particular example, PEP7 is selected from the group consisting of KIPKAXX (SEQ ID NO: 84424), GIPEPXX (SEQ ID NO: 84419), SIPKAXX (SEQ ID NO: 84429), HVTKPTX (SEQ ID NO: 84422), YVPKPXX (SEQ ID NO: 84433), TVPKPXX (SEQ ID NO: 84432), AVPKAXX (SEQ ID NO: 84404), KVGKAXX (SEQ ID NO: 84425), KASKAXX (SEQ ID NO: 84423), GSAGPXX (SEQ ID NO: 84420), AAPASXX (SEQ ID NO: 84401), STPPTXX (SEQ ID NO: 84431), HVPKPXX (SEQ ID NO: 84421), RVPSTXX (SEQ ID NO: 84428), ASAAPXX (SEQ ID NO: 84402), ASASPXX (SEQ ID NO: 84403), NDEGLEX (SEQ ID NO: 84426), SSVKXQP (SEQ ID NO: 84430) and RNVQXRP (SEQ ID NO: 84427), wherein X is C or S throughout the present description.

[0377] In certain embodiments, PEP8 is an amino acid or a peptide with between two and six amino acids of general formula AA³³-AA³⁴-AA³⁵-AA³⁶-AA³⁷-AA³⁸ (SEQ ID NO: 84949); wherein AA³³ is absent or is selected from the group consisting of AA^{I} amino acids at the exception of AA^{VI} amino acids; AA³⁴ is absent or is selected from the group consisting of AA^{III} and AA^{IV} amino acids; wherein AA³⁵ is absent or is selected from the group consisting of AA^{II} amino acids, preferably is S or C; wherein AA³⁶ is absent or is selected from the group consisting of AA^{III} and AA^{IV} amino acids; wherein AA³⁷ is absent or is selected from the group consisting of AA^{II} amino acids, preferably is S or C; wherein AA³⁸ is absent or is selected from the group consisting of AA′; and wherein at least one of AA³³, AA³⁴, AA³⁵, AA³⁶, AA³⁷ or AA³⁸ is not absent. In one particular example, PEP8 is selected from the group consisting of GXGXR (SEQ ID NO: 84208), SXAXR (SEQ ID NO: 84303), SXGXH (SEQ ID NO: 84304), AXGXH (SEQ ID NO: 84147), XGXR (SEQ ID NO: 84123), EXGXR (SEQ ID NO: 84179), RXGXS (SEQ ID NO: 84291), AXGXR (SEQ ID NO: 84148), SXGXR (SEQ ID NO: 84305), XGXL (SEQ ID NO: 84122), XKXS (SEQ ID NO: 84124), KXEXR (SEQ ID NO: 84213), QXEXR (SEQ ID NO: 84276), LEXAXA (SEQ ID NO: 84400) and LAXKXE (SEQ ID NO: 84399).

[0378] In certain embodiments, PEP9 is a peptide of general formula PEP7-PEP5; wherein PEP5 is a peptide of formula PEP3-AA¹¹-AA¹²; wherein PEP3 is selected from the group consisting of VPT, VPE, APT, TPT, VPA, APV, VPQ, VSQ, SRV and TQV; wherein AA¹¹ is selected from the group consisting of E, K, Q, R, A, D, G and H; and wherein AA¹² is selected from the group consisting of L, M, T, E, Q and H; wherein PEP7 is an amino acid or a peptide with between two and seven amino acids of general formula AA¹-AA²-AA³-AA⁴-AA⁵-AA⁶-AA⁷ (SEQ ID NO: 84948); wherein AA¹, AA², AA³, AA⁴, and AA⁵ are independently absent or AA′ as defined herein; wherein AA⁶ is absent or selected from the group consisting of S, T, C, E, Q, P and R; wherein AA⁷ is absent or is selected from the group consisting of S, T, C, E, Q, P and R. In one particular example, PEP9 is selected from the group consisting of KIPKAXXVPTEL (SEQ ID NO: 84770), GIPEPXXVPEKM (SEQ ID NO: 84718), SIPKAXXVPTEL (SEQ ID NO: 84830), HVTKPTXAPTKL (SEQ ID NO: 84742), YVPKPXXAPTKL (SEQ ID NO: 84864), TVPKPXXAPTQL (SEQ ID NO: 84854), AVPKAXXAPTKL (SEQ ID NO: 84704), KVGKAXXVPTKL (SEQ ID NO: 84780), KASKAXXVPTKL (SEQ ID NO: 84760), GSAGPXXTPTKM (SEQ ID NO: 84726), AAPASXXVPARL (SEQ ID NO: 84677), STPPTXXVPTRL (SEQ ID NO: 84850), HVPKPXXAPTKL (SEQ ID NO: 84734), RVPSTXXAPVKT (SEQ ID NO: 84815), ASAAPXXVPQAL (SEQ ID NO: 84689), ASASPXXVSQDL (SEQ ID NO: 84701), ASASPXXVPQDL (SEQ ID NO: 84699), NDEGLEXVPTEE (SEQ ID NO: 84798), NDEGLEXVPTGQ (SEQ ID NO: 84799), SSVKXQPSRVHH (SEQ ID NO: 84834) and RNVQXRPTQVQL (SEQ ID NO: 84806), wherein X is C or S throughout the present description.

[0379] In certain embodiments, PEP10 is a peptide of general formula PEP6-PEP8; wherein PEP6 is a peptide of formula AA²⁶-AA²⁷-AA²⁸-AA²⁹-PEP4; wherein PEP4 is selected from the group consisting of VVE, TVE, VVR, VVK, VAE, AVS, VVD, VEE, VRS, VKS, QHN, EHS, EEH and EDH; wherein AA²⁶ is absent or selected from the group consisting of AA^{III} amino acids, preferably is absent or is E; wherein AA²⁷ and AA²⁸ are independently selected from the group consisting of AA^{III} and AA^{V} amino acids; and wherein AA²⁹ is absent or selected from the group consisting of AA^{II} amino acids, preferably is absent or is S; wherein PEP8 is an amino acid or a peptide with between two and six amino acids of general formula AA³³-AA³⁴-AA³⁵-AA³⁶-AA³⁷-AA³⁸ (SEQ ID NO: 84949); AA³³ is absent or is selected from the group consisting of AA^{I} amino acids at the exception of AA^{VI} amino acids; AA³⁴ is absent or is selected from the group consisting of AA^{III} and AA^{IV} amino acids; wherein AA³⁵ is absent or is selected from the group consisting of AA^{II} amino acids, preferably is S or C; wherein AA³⁶ is absent or is selected from the group consisting of AA^{III} and AA^{IV} amino acids; wherein AA³⁷ is absent or is selected from the group consisting of AA^{II} amino acids, preferably is S or C; wherein AA³⁸ is absent or is selected from the group consisting of AA^{I}. In one particular example, PEP10 is selected from the group consisting of DMVVEGXGXR (SEQ ID NO: 84510), NMTVESXAXR (SEQ ID NO: 84604), EMVVEGXGXR (SEQ ID NO: 84529), NMVVRSXGXH (SEQ ID NO: 84629), NMVVRAXGXH (SEQ ID NO: 84627), NMVVKAXGXH (SEQ ID NO: 84624), EGMSVAEXGXR (SEQ ID NO: 84636), GMAVSEXGXR (SEQ ID NO: 84546), GMVVDRXGXS (SEQ ID NO: 84567), DMVVEAXGXR (SEQ ID NO: 84509), DMVVESXGXR (SEQ ID NO: 84511), MIVEEXGXL (SEQ ID NO: 84448), MIVRSXKXS (SEQ ID NO: 84453), MIVKSXKXS (SEQ ID NO: 84451), MVVKSXKXS (SEQ ID NO: 84470), FLQHNKXEXR (SEQ ID NO: 84536), LEEHSQXEXR (SEQ ID NO: 84577), RLEEHLEXAXA (SEQ ID NO: 84646) and TLEDHLAXKXE (SEQ ID NO: 84659).

[0380] In certain embodiments, PEP12 is a peptide of general formula PEP1-AA¹⁷-PEP11; wherein AA¹⁷ is selected from the group consisting of G, A, V, L, I, P, F, M, W, T and S (in particular is selected from the group consisting of M, I, L, V and T); wherein PEP1 is selected from the group consisting of SAIS (SEQ ID NO: 84116), SSLS (SEQ ID NO: 84121), NAIS (SEQ ID NO: 84113), SATS (SEQ ID NO: 84117), SPIS (SEQ ID NO: 84120), EPIS (SEQ ID NO: 84109), SPIN (SEQ ID NO: 84119), KPLS (SEQ ID NO: 84112), EPLP (SEQ ID NO: 84110), EPLT (SEQ ID NO: 84111), SNIT (SEQ ID NO: 84118), RSVK (SEQ ID NO: 84115) and RPVQ (SEQ ID NO: 84114).

[0381] In certain embodiments, the pair PEP12:PEP2 is selected from the group consisting of SAIS-AA¹⁷-LYL (SEQ ID NO: 84881):LKNYQ (SEQ ID NO: 84230), SSLS-AA¹⁷-LFF (SEQ ID NO: 84889):LKVYP (SEQ ID NO: 84231), NAIS-AA¹⁷-LYF (SEQ ID NO: 84878):LKKYR (SEQ ID NO: 84229), SATS-AA¹⁷-LYY (SEQ ID NO: 84882):LRKHR (SEQ ID NO: 84233), SPIS-AA¹⁷-LYK (SEQ ID NO: 84887):LKYHY (SEQ ID NO: 84232), EPIS-AA¹⁷-LYL (SEQ ID NO: 84874):KFKYE (SEQ ID NO: 84211), SPIN-AA¹⁷-LYF (SEQ ID NO: 84884):YGKIP (SEQ ID NO: 84397), SPIS-AA¹⁷-LYI (SEQ ID NO: 84886):YKQYE (SEQ ID NO: 84398), SPIS-AA¹⁷-LFI (SEQ ID NO: 84885):YKQYE (SEQ ID NO: 84398), KPLS-AA¹⁷-LYV (SEQ ID NO: 84877):DHHKD (SEQ ID NO: 84149), EPLP-AA¹⁷-VYY (SEQ ID NO: 84875):EQLSN (SEQ ID NO: 84178), EPLT-AA¹⁷-LYY (SEQ ID NO: 84876):EQLSN (SEQ ID NO: 84178), SNIT-AA¹⁷-QIM (SEQ ID NO: 84883):IGEMS (SEQ ID NO: 84209), SNIT-AA¹⁷-QIM (SEQ ID NO: 84883):LGEMS (SEQ ID NO: 84228), RSVK-AA¹⁷-AKV (SEQ ID NO: 84880):KEVQV (SEQ ID NO: 84210) and RPVQ-AA¹⁷-RKI (SEQ ID NO: 84879):KKATV (SEQ ID NO: 84212); wherein AA¹⁷ is selected from the group consisting of G, A, V, L, I, P, F, M, W, T and S (in particular is selected from the group consisting of M, I, L, V and T).

[0382] In certain embodiments, PEP11 is a peptide with 3 amino acids of general formula AA¹⁸-AA¹⁸-AA²⁰; wherein AA¹⁸ is selected from the group consisting of L, V, Q, A and R; wherein AA¹⁸ is selected from the group consisting of F, W, H, Y, I and K; wherein AA²⁰ is selected from the group consisting of L, F, Y, K, I, V and M. In one particular example, PEP11 is selected from the group consisting of LYL, LFF, LYF, LYY, LYK, LYI, LFI, LYV, VYY, QIM, AKV and RKI.

[0383] In certain embodiments, PEP3 is selected from the group consisting of VPT, VPE, APT, TPT, VPA, APV, VPQ, VSQ, SRV and TQV; PEP4 is selected from the group consisting of VVE, TVE, VVR, VVK, VAE, AVS, VVD, VEE, VRS, VKS, QHN, EHS, EEH and EDH; and wherein the pair PEP3:PEP4 is selected from the group consisting of VPT:VVE, VPE:TVE, APT:VVR, APT:VVK, VPT:VAE, VPT:AVS, TPT:VVD, VPA:VVE, APV:VEE, VPQ:VRS, VSQ:VKS, VPQ:VKS, VPT:QHN, VPT:EHS, SRV:EEH and TQV:EDH.

[0384] In certain embodiments, PEP5 is selected from the group consisting of VPT-AA¹¹-AA¹² (SEQ ID NO: 84895), VPE-AA¹¹-AA¹²-AA¹¹-AA¹², APT-AA¹¹-AA¹² (SEQ ID NO: 84872), TPT-AA¹¹-AA¹² (SEQ ID NO: 84890), VPA-AA¹¹-AA¹² (SEQ ID NO: 84892), VPT-AA¹¹-AA¹² (SEQ ID NO: 84895), APV-AA¹¹-AA¹² (SEQ ID NO: 84873), VPQ-AA¹¹-AA¹² (SEQ ID NO: 84894), VSQ-AA¹¹-AA¹² (SEQ ID NO: 84896), VPQ-AA¹¹-AA¹² (SEQ ID NO: 84894), SRV-AA¹¹-AA¹² (SEQ ID NO: 84888) and TQV-AA¹¹-AA¹² (SEQ ID NO: 84891); wherein AA¹¹ is selected from the group consisting of E, K, Q, R, A, D, G and H; and wherein AA¹² is selected from the group consisting of L, M, T, E, Q and H; PEP6 is selected from the group consisting of AA²⁶-AA²⁷-AA²⁸-AA²⁹-VVE (SEQ ID NO: 84928), AA²⁶-AA²⁷-AA²⁸-AA²⁸-TVE (SEQ ID NO: 84922), AA²⁶-AA²⁷-AA²⁸-AA²⁸-VVR (SEQ ID NO: 84930), AA²⁶-AA²⁷-AA²⁸-AA²⁸-VVK (SEQ ID NO: 84929), AA²⁶-AA²⁷-AA²⁸-AA²⁸-VAE (SEQ ID NO: 84923), AA²⁶-AA²⁷-AA²⁸-AA²⁸-AVS (SEQ ID NO: 84917), AA²⁶-AA²⁷-AA²⁸-AA²⁸-VVD (SEQ ID NO: 84927), AA²⁶-AA²⁷-AA²⁸-AA²⁸-VEE (SEQ ID NO: 84924), AA²⁶-AA²⁷-AA²⁸-AA²⁸-VRS (SEQ ID NO: 84926), AA²⁶-AA²⁷-AA²⁸-AA²⁸-VKS (SEQ ID NO: 84925), AA²⁶-AA²⁷-AA²⁸-AA²⁸-QHN (SEQ ID NO: 84921), AA²⁶-AA²⁷-AA²⁸-AA²⁸-EHS (SEQ ID NO: 84920), AA²⁶-AA²⁷-AA²⁸-AA²⁸-EEH (SEQ ID NO: 84919) and AA²⁶-AA²⁷-AA²⁸-AA²⁸-EDH (SEQ ID NO: 84918); wherein AA²⁶ is absent or selected from the group consisting of AA^{III} amino acids, preferably is absent or is E; wherein AA²⁷ and AA²⁸ are independently selected from the group consisting of AA^{III} and AA^{V} amino acids; and wherein AA²⁸ is absent or selected from the group consisting of AA^{II} amino acids, preferably is absent or is S; wherein the pair PEP5:PEP6 is selected from the group consisting of VPT-AA¹¹-AA¹² (SEQ ID NO: 84895):AA²⁶-AA²⁷-AA²⁸-AA²⁹-VVE (SEQ ID NO: 84928), VPE-AA¹¹-AA¹² (SEQ ID NO: 84893):AA²⁶-AA²⁷-AA²⁸-AA²⁹-TVE (SEQ ID NO: 84922), APT-AA¹¹-AA¹² (SEQ ID NO: 84872):AA²⁶-AA²⁷-AA²⁸-AA²⁹-VVR (SEQ ID NO: 84930), APT-AA¹¹-AA¹² (SEQ ID NO: 84872):AA²⁶-AA²⁷-AA²⁸-AA²⁹-VVK (SEQ ID NO: 84929), VPT-AA¹¹-AA¹² (SEQ ID NO: 84895):AA²⁶-AA²⁷-AA²⁸-AA²⁹-VAE (SEQ ID NO: 84923), VPT-AA¹¹-AA¹² (SEQ ID NO: 84895):AA²⁶-AA²⁷-AA²⁸-AA²⁹-AVS (SEQ ID NO: 84917), TPT-AA¹¹-AA¹² (SEQ ID NO: 84890):AA²⁶-AA²⁷-AA²⁸-AA²⁹-VVD (SEQ ID NO: 84927), VPA-AA¹¹-AA¹² (SEQ ID NO: 84892):AA²⁶-AA²⁷-AA²⁸-AA²⁹-VVE (SEQ ID NO: 84928), APV-AA¹¹-AA¹² (SEQ ID NO: 84873):AA²⁶-AA²⁷-AA²⁸-AA²⁹-VEE (SEQ ID NO: 84924), VPQ-AA¹¹-AA¹² (SEQ ID NO: 84894):AA²⁶-AA²⁷-AA²⁸-AA²⁹-VRS (SEQ ID NO: 84926), VSQ-AA¹¹-AA¹² (SEQ ID NO: 84896):AA²⁶-AA²⁷-AA²⁸-AA²⁹-VKS (SEQ ID NO: 84925), VPQ-AA¹¹-AA¹² (SEQ ID NO: 84894):AA²⁶-AA²⁷-AA²⁸-AA²⁹-VKS (SEQ ID NO: 84925), VPT-AA¹¹-AA¹² (SEQ ID NO: 84895):AA²⁶-AA²⁷-AA²⁸-AA²⁹-QHN (SEQ ID NO: 84921), VPT-AA¹¹-AA¹² (SEQ ID NO: 84895):AA²⁶-AA²⁷-AA²⁸-AA²⁹-EHS (SEQ ID NO: 84920), SRV-AA¹¹-AA¹² (SEQ ID NO: 84888):AA²⁶-AA²⁷-AA²⁸-AA²⁹-EEH (SEQ ID NO: 84919) and TQV-AA¹¹-AA¹² (SEQ ID NO: 84891):AA²⁶-AA²⁷-AA²⁸-AA²⁹-EDH (SEQ ID NO: 84918).

[0385] In certain embodiments, PEP5 is selected from the group consisting of VPTEL (SEQ ID NO: 84378), VPEKM (SEQ ID NO: 84360), APTKL (SEQ ID NO: 84131), APTQL (SEQ ID NO: 84134), VPTKL (SEQ ID NO: 84381), TPTKM (SEQ ID NO: 84327), VPARL (SEQ ID NO: 84352), VPTRL (SEQ ID NO: 84385), APVKT (SEQ ID NO: 84144), VPQAL (SEQ ID NO: 84364), VSQDL (SEQ ID NO: 84387), VPQDL (SEQ ID NO: 84365), VPTEE (SEQ ID NO: 84377), VPTGQ (SEQ ID NO: 84379), SRVHH (SEQ ID NO: 84297) and TQVQL (SEQ ID NO: 84340); PEP6 is selected from the group consisting of DMVVE (SEQ ID NO: 84161), NMTVE (SEQ ID NO: 84267), EMVVE (SEQ ID NO: 84175), NMVVR (SEQ ID NO: 84275), NMVVK (SEQ ID NO: 84274), EGMSVAE (SEQ ID NO: 84411), GMAVS (SEQ ID NO: 84194), GMVVD (SEQ ID NO: 84204), MIVEE (SEQ ID NO: 84241), MIVRS (SEQ ID NO: 84243), MIVKS (SEQ ID NO: 84242), MVVKS (SEQ ID NO: 84256), FLQHN (SEQ ID NO: 84184), LEEHS (SEQ ID NO: 84217), RLEEH (SEQ ID NO: 84279) and TLEDH (SEQ ID NO: 84307); and wherein the pair PEP5:PEP6 is selected from the group consisting of VPTEL (SEQ ID NO: 84378):DMVVE (SEQ ID NO: 84161), VPEKM (SEQ ID NO: 84360):NMTVE (SEQ ID NO: 84267), VPTEL (SEQ ID NO: 84378):EMVVE (SEQ ID NO: 84175), APTKL (SEQ ID NO: 84131):NMVVR (SEQ ID NO: 84275), APTQL (SEQ ID NO: 84134):NMVVR (SEQ ID NO: 84275), APTKL (SEQ ID NO: 84131):NMVVK (SEQ ID NO: 84274), VPTKL (SEQ ID NO: 84381):EGMSVAE (SEQ ID NO: 84411), VPTKL (SEQ ID NO: 84381):GMAVS (SEQ ID NO: 84194), TPTKM (SEQ ID NO: 84327):GMVVD (SEQ ID NO: 84204), VPARL (SEQ ID NO: 84352):DMVVE (SEQ ID NO: 84161), VPTRL (SEQ ID NO: 84385):DMVVE (SEQ ID NO: 84161), APVKT (SEQ ID NO: 84144):MIVEE (SEQ ID NO: 84241), VPQAL (SEQ ID NO: 84364):MIVRS (SEQ ID NO: 84243), VSQDL (SEQ ID NO: 84387):MIVKS (SEQ ID NO: 84242), VPQDL (SEQ ID NO: 84365):MVVKS (SEQ ID NO: 84256), VPTEE (SEQ ID NO: 84377):FLQHN (SEQ ID NO: 84184), VPTGQ (SEQ ID NO: 84379):LEEHS (SEQ ID NO: 84217), SRVHH (SEQ ID NO: 84297):RLEEH (SEQ ID NO: 84279) and TQVQL (SEQ ID NO: 84340):TLEDH (SEQ ID NO: 84307).

[0386] In certain embodiments, PEP7 is selected from the group consisting of KIPKAXX (SEQ ID NO: 84424), GIPEPXX (SEQ ID NO: 84419), SIPKAXX (SEQ ID NO: 84429), HVTKPTX (SEQ ID NO: 84422), YVPKPXX (SEQ ID NO: 84433), TVPKPXX (SEQ ID NO: 84432), AVPKAXX (SEQ ID NO: 84404), KVGKAXX (SEQ ID NO: 84425), KASKAXX (SEQ ID NO: 84423), GSAGPXX (SEQ ID NO: 84420), AAPASXX (SEQ ID NO: 84401), STPPTXX (SEQ ID NO: 84431), HVPKPXX (SEQ ID NO: 84421), RVPSTXX (SEQ ID NO: 84428), ASAAPXX (SEQ ID NO: 84402), ASASPXX (SEQ ID NO: 84403), NDEGLEX (SEQ ID NO: 84426), SSVKXQP (SEQ ID NO: 84430) and RNVQXRP (SEQ ID NO: 84427); wherein PEP8 is selected from the group consisting of GXGXR (SEQ ID NO: 84208), SXAXR (SEQ ID NO: 84303), SXGXH (SEQ ID NO: 84304), AXGXH (SEQ ID NO: 84147), XGXR (SEQ ID NO: 84123), EXGXR (SEQ ID NO: 84179), RXGXS (SEQ ID NO: 84291), AXGXR (SEQ ID NO: 84148), SXGXR (SEQ ID NO: 84305), XGXL (SEQ ID NO: 84122), XKXS (SEQ ID NO: 84124), KXEXR (SEQ ID NO: 84213), QXEXR (SEQ ID NO: 84276), LEXAXA (SEQ ID NO: 84400) and LAXKXE (SEQ ID NO: 84399); and wherein the pair PEP7:PEP8 is selected from the group consisting of KIPKAXX (SEQ ID NO: 84424):GXGXR (SEQ ID NO: 84208), GIPEPXX (SEQ ID NO: 84419):SXAXR (SEQ ID NO: 84303), SIPKAXX (SEQ ID NO: 84429):GXGXR (SEQ ID NO: 84208), HVTKPTX (SEQ ID NO: 84422):SXGXH (SEQ ID NO: 84304), YVPKPXX (SEQ ID NO: 84433):SXGXH (SEQ ID NO: 84304), TVPKPXX (SEQ ID NO: 84432):AXGXH (SEQ ID NO: 84147), AVPKAXX (SEQ ID NO: 84404):AXGXH (SEQ ID NO: 84147), KVGKAXX (SEQ ID NO: 84425):XGXR (SEQ ID NO: 84123), KASKAXX (SEQ ID NO: 84423):EXGXR (SEQ ID NO: 84179), GSAGPXX (SEQ ID NO: 84420):RXGXS (SEQ ID NO: 84291), AAPASXX (SEQ ID NO: 84401):AXGXR (SEQ ID NO: 84148), STPPTXX (SEQ ID NO: 84431):SXGXR (SEQ ID NO: 84305), HVPKPXX (SEQ ID NO: 84421):SXGXH (SEQ ID NO: 84304), RVPSTXX (SEQ ID NO: 84428):XGXL (SEQ ID NO: 84122), ASAAPXX (SEQ ID NO: 84402):XKXS (SEQ ID NO: 84124), ASASPXX (SEQ ID NO: 84403):XKXS (SEQ ID NO: 84124), NDEGLEX (SEQ ID NO: 84426):KXEXR (SEQ ID NO: 84213), NDEGLEX (SEQ ID NO: 84426):QXEXR (SEQ ID NO: 84276), SSVKXQP (SEQ ID NO: 84430):LEXAXA (SEQ ID NO: 84400) and RNVQXRP (SEQ ID NO: 84427):LAXKXE (SEQ ID NO: 84399).

[0387] In certain embodiments, PEP9 is selected from the group consisting of KIPKAXXVPT-AA¹¹-AA¹² (SEQ ID NO: 84907), GIPEPXXVPE-AA¹¹-AA¹² (SEQ ID NO: 84902), SIPKAXXVPT-AA¹¹-AA¹² (SEQ ID NO: 84912), HVTKPTXAPT-AA¹¹-AA¹² (SEQ ID NO: 84905), YVPKPXXAPT-AA¹¹-AA¹² (SEQ ID NO: 84916), TVPKPXXAPT-AA¹¹-AA¹² (SEQ ID NO: 84915), AVPKAXXAPT-AA¹¹-AA¹² (SEQ ID NO: 84901), KVGKAXXVPT-AA¹¹-AA¹² (SEQ ID NO: 84908), KASKAXXVPT-AA¹¹-AA¹² (SEQ ID NO: 84906), GSAGPXXTPT-AA¹¹-AA¹² (SEQ ID NO: 84903), AAPASXXVPA-AA¹¹-AA¹² (SEQ ID NO: 84897), STPPTXXVPT-AA¹¹-AA¹² (SEQ ID NO: 84914), HVPKPXXAPT-AA¹¹-AA¹² (SEQ ID NO: 84904), RVPSTXXAPV-AA¹¹-AA¹² (SEQ ID NO: 84911), ASAAPXXVPQ-AA¹¹-AA¹² (SEQ ID NO: 84898), ASASPXXVSQ-AA¹¹-AA¹² (SEQ ID NO: 84900), ASASPXXVPQ-AA¹¹-AA¹² (SEQ ID NO: 84899), NDEGLEXVPT-AA¹¹-AA¹² (SEQ ID NO: 84909), NDEGLEXVPT-AA¹¹-AA¹² (SEQ ID NO: 84909), SSVKXQPSRV-AA¹¹-AA¹² (SEQ ID NO: 84913) and RNVQXRPTQV-AA¹¹-AA¹² (SEQ ID NO: 84910); wherein AA¹¹ is selected from the group consisting of E, K, Q, R, A, D, G and H; and wherein AA¹² is selected from the group consisting of L, M, T, E, Q and H; PEP10 is selected from the group consisting of AA²⁶-AA²⁷-AA²⁸-AA²⁹-VVEGXGXR (SEQ ID NO: 84941), AA²⁶-AA²⁷-AA²⁸-AA²⁹-TVESXAXR (SEQ ID NO: 84938), AA²⁶-AA²⁷-AA²⁸-AA²⁹-VVEGXGXR (SEQ ID NO: 84941), AA²⁶-AA²⁷-AA²⁸-AA²⁹-VVRSXGXH (SEQ ID NO: 84945), AA²⁶-AA²⁷-AA²⁸-AA²⁹-VVRAXGXH (SEQ ID NO: 84944), AA²⁶-AA²⁷-AA²⁸-AA²⁹-VVKAXGXH (SEQ ID NO: 84943), AA²⁶-AA²⁷-AA²⁸-AA²⁹-VAEXGXR (SEQ ID NO: 84931), AA²⁶-AA²⁷-AA²⁸-AA²⁹-AVSEXGXR (SEQ ID NO: 84935), AA²⁶-AA²⁷-AA²⁸-AA²⁹-VVDRXGXS (SEQ ID NO: 84939), AA²⁶-AA²⁷-AA²⁸-AA²⁹-VVEAXGXR (SEQ ID NO: 84940), AA²⁶-AA²⁷-AA²⁸-AA²⁹-VVESXGXR (SEQ ID NO: 84942), AA²⁶-AA²⁷-AA²⁸-AA²⁹-VEEXGXL (SEQ ID NO: 84932), AA²⁶-AA²⁷-AA²⁸-AA²⁹-VRSXKXS (SEQ ID NO: 84934), AA²⁶-AA²⁷-AA²⁸-AA²⁹-VKSXKXS (SEQ ID NO: 84933), AA²⁶-AA²⁷-AA²⁸-AA²⁹-VKSXKXS (SEQ ID NO: 84933), AA²⁶-AA²⁷-AA²⁸-AA²⁹-QHNKXEXR (SEQ ID NO: 84937), AA²⁶-AA²⁷-AA²⁸-AA²⁹-EHSQXEXR (SEQ ID NO: 84936), AA²⁶-AA²⁷-AA²⁸-AA²⁹-EEHLEXAXA (SEQ ID NO: 84947) and AA²⁶-AA²⁷-AA²⁸-AA²⁹-EDHLAXKXE (SEQ ID NO: 84946); wherein AA²⁶ is absent or selected from the group consisting of AA^{III} amino acids, preferably is absent or is E; wherein AA²⁷ and AA²⁸ are independently selected from the group consisting of AA^{III} and AP^{V} amino acids; and wherein AA²⁹ is absent or selected from the group consisting of AA^{III} amino acids, preferably is absent or is S; and wherein the pair PEP9:PEP10 is selected from the group consisting of KIPKAXXVPT-AA¹¹-AA¹² (SEQ ID NO: 84907):AA²⁶-AA²⁷-AA²⁸-AA²⁹-VVEGXGXR (SEQ ID NO: 84941), GIPEPXXVPE-AA¹¹-AA¹² (SEQ ID NO: 84902):AA²⁶-AA²⁷-AA²⁸-AA²⁹-TVESXAXR (SEQ ID NO: 84938), SIPKAXXVPT-AA¹¹-AA¹² (SEQ ID NO: 84912):AA²⁶-AA²⁷-AA²⁸-AA²⁹-VVEGXGXR (SEQ ID NO: 84941), HVTKPTXAPT-AA¹¹-AA¹² (SEQ ID NO: 84905):AA²⁶-AA²⁷-AA²⁸-AA²⁹-VVRSXGXH (SEQ ID NO: 84945), YVPKPXXAPT-AA¹¹-AA¹² (SEQ ID NO: 84916):AA²⁶-AA²⁷-AA²⁸-AA²⁹-VVRSXGXH (SEQ ID NO: 84945), TVPKPXXAPT-AA¹¹-AA¹² (SEQ ID NO: 84915):AA²⁶-AA²⁷-AA²⁸-AA²⁹-VVRAXGXH (SEQ ID NO: 84944), AVPKAXXAPT-AA¹¹-AA¹² (SEQ ID NO: 84901):AA²⁶-AA²⁷-AA²⁸-AA²⁹-VVKAXGXH (SEQ ID NO: 84943), KVGKAXXVPT-AA¹¹-AA¹² (SEQ ID NO: 84908):AA²⁶-AA²⁷-AA²⁸-AA²⁹-VAEXGXR (SEQ ID NO: 84931), KASKAXXVPT-AA¹¹-AA¹²-AA¹¹-AA¹²:AA²⁶-AA²⁷-AA²⁸-AA²⁹-AVSEXGXR (SEQ ID NO: 84935), GSAGPXXTPT-AA¹¹-AA¹² (SEQ ID NO: 84903):AA²⁶-AA²⁷-AA²⁸-AA²⁹-VVDRXGXS (SEQ ID NO: 84939), AAPASXXVPA-AA¹¹-AA¹² (SEQ ID NO: 84897):AA²⁶-AA²⁷-AA²⁸-AA²⁹-VVEAXGXR (SEQ ID NO: 84940), STPPTXXVPT-AA¹¹-AA¹²-AA¹¹-AA¹²:AA²⁶-AA²⁷-AA²⁸-AA²⁹-VVESXGXR (SEQ ID NO: 84942), HVPKPXXAPT-AA¹¹-AA¹² (SEQ ID NO: 84904):AA²⁶-AA²⁷-AA²⁸-AA²⁹-VVRSXGXH (SEQ ID NO: 84945), RVPSTXXAPV-AA¹¹-AA¹² (SEQ ID NO: 84911):AA²⁶-AA²⁷-AA²⁸-AA²⁹-VEEXGXL (SEQ ID NO: 84932), ASAAPXXVPQ-AA¹¹-AA¹² (SEQ ID NO: 84898):AA²⁶-AA²⁷-AA²⁸-AA²⁹-VRSXKXS (SEQ ID NO: 84934), ASASPXXVSQ-AA¹¹-AA¹² (SEQ ID NO: 84900):AA²⁶-AA²⁷-AA²⁸-AA²⁹-VKSXKXS (SEQ ID NO: 84933), ASASPXXVPQ-AA¹¹-AA¹² (SEQ ID NO: 84899):AA²⁶-AA²⁷-AA²⁸-AA²⁹-VKSXKXS (SEQ ID NO: 84933), NDEGLEXVPT-AA¹¹-AA¹² (SEQ ID NO: 84909):AA²⁶-AA²⁷-AA²⁸-AA²⁹-QHNKXEXR (SEQ ID NO: 84937), NDEGLEXVPT-AA¹¹-AA¹² (SEQ ID NO: 84909):AA²⁶-AA²⁷-AA²⁸-AA²⁹-EHSQXEXR (SEQ ID NO: 84936), SSVKXQPSRV-AA¹¹-AA¹² (SEQ ID NO: 84913):AA²⁶-AA²⁷-AA²⁸-AA²⁹-EEHLEXAXA (SEQ ID NO: 84947) and RNVQXRPTQV-AA¹¹-AA¹² (SEQ ID NO: 84910):AA²⁶-AA²⁷-AA²⁸-AA²⁹-EDHLAXKXE (SEQ ID NO: 84946).

[0388] In certain embodiments, PEP9 is selected from the group consisting of KIPKAXXVPTEL (SEQ ID NO: 84770), GIPEPXXVPEKM (SEQ ID NO: 84718), SIPKAXXVPTEL (SEQ ID NO: 84830), HVTKPTXAPTKL (SEQ ID NO: 84742), YVPKPXXAPTKL (SEQ ID NO: 84864), TVPKPXXAPTQL (SEQ ID NO: 84854), AVPKAXXAPTKL (SEQ ID NO: 84704), KVGKAXXVPTKL (SEQ ID NO: 84780), KASKAXXVPTKL (SEQ ID NO: 84760), GSAGPXXTPTKM (SEQ ID NO: 84726), AAPASXXVPARL (SEQ ID NO: 84677), STPPTXXVPTRL (SEQ ID NO: 84850), HVPKPXXAPTKL (SEQ ID NO: 84734), RVPSTXXAPVKT (SEQ ID NO: 84815), ASAAPXXVPQAL (SEQ ID NO: 84689), ASASPXXVSQDL (SEQ ID NO: 84701), ASASPXXVPQDL (SEQ ID NO: 84699), NDEGLEXVPTEE (SEQ ID NO: 84798), NDEGLEXVPTGQ (SEQ ID NO: 84799), SSVKXQPSRVHH (SEQ ID NO: 84834) and RNVQXRPTQVQL (SEQ ID NO: 84806); PEP10 is selected from the group consisting of DMVVEGXGXR (SEQ ID NO: 84510), NMTVESXAXR (SEQ ID NO: 84604), EMVVEGXGXR (SEQ ID NO: 84529), NMVVRSXGXH (SEQ ID NO: 84629), NMVVRAXGXH (SEQ ID NO: 84627), NMVVKAXGXH (SEQ ID NO: 84624), EGMSVAEXGXR (SEQ ID NO: 84636), GMAVSEXGXR (SEQ ID NO: 84546), GMVVDRXGXS (SEQ ID NO: 84567), DMVVEAXGXR (SEQ ID NO: 84509), DMVVESXGXR (SEQ ID NO: 84511), MIVEEXGXL (SEQ ID NO: 84448), MIVRSXKXS (SEQ ID NO: 84453), MIVKSXKXS (SEQ ID NO: 84451), MVVKSXKXS (SEQ ID NO: 84470), FLQHNKXEXR (SEQ ID NO: 84536), LEEHSQXEXR (SEQ ID NO: 84577), RLEEHLEXAXA (SEQ ID NO: 84646) and TLEDHLAXKXE (SEQ ID NO: 84659); and wherein the pair PEP9:PEP10 is selected from the group consisting of KIPKAXXVPTEL (SEQ ID NO: 84770):DMVVEGXGXR (SEQ ID NO: 84510), GIPEPXXVPEKM (SEQ ID NO: 84718):NMTVESXAXR (SEQ ID NO: 84604), SIPKAXXVPTEL (SEQ ID NO: 84830):EMVVEGXGXR (SEQ ID NO: 84529), HVTKPTXAPTKL (SEQ ID NO: 84742):NMVVRSXGXH (SEQ ID NO: 84629), YVPKPXXAPTKL (SEQ ID NO: 84864):NMVVRSXGXH (SEQ ID NO: 84629), TVPKPXXAPTQL (SEQ ID NO: 84854):NMVVRAXGXH (SEQ ID NO: 84627), AVPKAXXAPTKL (SEQ ID NO: 84704):NMVVKAXGXH (SEQ ID NO: 84624), KVGKAXXVPTKL (SEQ ID NO: 84780):EGMSVAEXGXR (SEQ ID NO: 84636), KASKAXXVPTKL (SEQ ID NO: 84760):GMAVSEXGXR (SEQ ID NO: 84546), GSAGPXXTPTKM (SEQ ID NO: 84726):GMVVDRXGXS (SEQ ID NO: 84567), AAPASXXVPARL (SEQ ID NO: 84677):DMVVEAXGXR (SEQ ID NO: 84509), STPPTXXVPTRL (SEQ ID NO: 84850):DMVVESXGXR (SEQ ID NO: 84511), HVPKPXXAPTKL (SEQ ID NO: 84734):NMVVRSXGXH (SEQ ID NO: 84629), RVPSTXXAPVKT (SEQ ID NO: 84815):MIVEEXGXL (SEQ ID NO: 84448), ASAAPXXVPQAL (SEQ ID NO: 84689):MIVRSXKXS (SEQ ID NO: 84453), ASASPXXVSQDL (SEQ ID NO: 84701):MIVKSXKXS (SEQ ID NO: 84451), ASASPXXVPQDL (SEQ ID NO: 84699):MVVKSXKXS (SEQ ID NO: 84470), NDEGLEXVPTEE (SEQ ID NO: 84798):FLQHNKXEXR (SEQ ID NO: 84536), NDEGLEXVPTGQ (SEQ ID NO: 84799):LEEHSQXEXR (SEQ ID NO: 84577), NDEGLEXVPTEE (SEQ ID NO: 84798):FLQHNKXEXR (SEQ ID NO: 84536), NDEGLEXVPTEE (SEQ ID NO: 84798):FLQHNKXEXR (SEQ ID NO: 84536), SSVKXQPSRVHH (SEQ ID NO: 84834):RLEEHLEXAXA (SEQ ID NO: 84646) and RNVQXRPTQVQL (SEQ ID NO: 84806):TLEDHLAXKXE (SEQ ID NO: 84659).

[0389] In certain embodiments, PEP5 is selected from the group consisting of VPTEL (SEQ ID NO: 84378), VPEKM (SEQ ID NO: 84360), APTKL (SEQ ID NO: 84131), APTQL (SEQ ID NO: 84134), VPTKL (SEQ ID NO: 84381), TPTKM (SEQ ID NO: 84327), VPARL (SEQ ID NO: 84352), VPTRL (SEQ ID NO: 84385), APVKT (SEQ ID NO: 84144), VPQAL (SEQ ID NO: 84364), VSQDL (SEQ ID NO: 84387), VPQDL (SEQ ID NO: 84365), VPTEE (SEQ ID NO: 84377), VPTGQ (SEQ ID NO: 84379), SRVHH (SEQ ID NO: 84297) and TQVQL (SEQ ID NO: 84340); PEP6 is selected from the group consisting of DMVVE (SEQ ID NO: 84161), NMTVE (SEQ ID NO: 84267), EMVVE (SEQ ID NO: 84175), NMVVR (SEQ ID NO: 84275), NMVVK (SEQ ID NO: 84274), EGMSVAE (SEQ ID NO: 84411), GMAVS (SEQ ID NO: 84194), GMVVD (SEQ ID NO: 84204), MIVEE (SEQ ID NO: 84241), MIVRS (SEQ ID NO: 84243), MIVKS (SEQ ID NO: 84242), MVVKS (SEQ ID NO: 84256), FLQHN (SEQ ID NO: 84184), LEEHS (SEQ ID NO: 84217), RLEEH (SEQ ID NO: 84279) and TLEDH (SEQ ID NO: 84307); wherein the pair PEP5:PEP6 is selected from the group consisting of VPTEL (SEQ ID NO: 84378):DMVVE (SEQ ID NO: 84161), VPEKM (SEQ ID NO: 84360):NMTVE (SEQ ID NO: 84267), VPTEL (SEQ ID NO: 84378):EMVVE (SEQ ID NO: 84175), APTKL (SEQ ID NO: 84131):NMVVR (SEQ ID NO: 84275), APTQL (SEQ ID NO: 84134):NMVVR (SEQ ID NO: 84275), APTKL (SEQ ID NO: 84131):NMVVK (SEQ ID NO: 84274), VPTKL (SEQ ID NO: 84381):EGMSVAE (SEQ ID NO: 84411), VPTKL (SEQ ID NO: 84381):GMAVS (SEQ ID NO: 84194), TPTKM (SEQ ID NO: 84327):GMVVD (SEQ ID NO: 84204), VPARL (SEQ ID NO: 84352):DMVVE (SEQ ID NO: 84161), VPTRL (SEQ ID NO: 84385):DMVVE (SEQ ID NO: 84161), APVKT (SEQ ID NO: 84144):MIVEE (SEQ ID NO: 84241), VPQAL (SEQ ID NO: 84364):MIVRS (SEQ ID NO: 84243), VSQDL (SEQ ID NO: 84387):MIVKS (SEQ ID NO: 84242), VPQDL (SEQ ID NO: 84365):MVVKS (SEQ ID NO: 84256), VPTEE (SEQ ID NO: 84377):FLQHN (SEQ ID NO: 84184), VPTGQ (SEQ ID NO: 84379):LEEHS (SEQ ID NO: 84217), SRVHH (SEQ ID NO: 84297):RLEEH (SEQ ID NO: 84279) and TQVQL (SEQ ID NO: 84340):TLEDH (SEQ ID NO: 84307); and wherein the pair PEP5:PEP6 is not VPTEL (SEQ ID NO: 84378):DMVVE (SEQ ID NO: 84161) when PEP1 is SAIS (SEQ ID NO: 84116) and PEP2 is LKNYQ (SEQ ID NO: 84230); wherein the pair PEP5:PEP6 is not VPEKM (SEQ ID NO: 84360):NMTVE (SEQ ID NO: 84267) when PEP1 is SSLS (SEQ ID NO: 84121) and PEP2 is LKVYP (SEQ ID NO: 84231); wherein the pair PEP5:PEP6 is not VPTEL (SEQ ID NO: 84378):EMVVE (SEQ ID NO: 84175) when PEP1 is SAIS (SEQ ID NO: 84116) and PEP2 is LKNYQ (SEQ ID NO: 84230); wherein the pair PEP5:PEP6 is not APTKL (SEQ ID NO: 84131):NMVVR (SEQ ID NO: 84275) when PEP1 is NAIS (SEQ ID NO: 84113) and PEP2 is LKKYR (SEQ ID NO: 84229); wherein the pair PEP5:PEP6 is not APTQL (SEQ ID NO: 84134):NMVVR (SEQ ID NO: 84275) when PEP1 is NAIS (SEQ ID NO: 84113) and PEP2 is LKKYR (SEQ ID NO: 84229); wherein the pair PEP5:PEP6 is not APTKL (SEQ ID NO: 84131):NMVVK (SEQ ID NO: 84274) when PEP1 is SATS (SEQ ID NO: 84117) and PEP2 is LRKHR (SEQ ID NO: 84233); wherein the pair PEP5:PEP6 is not VPTKL (SEQ ID NO: 84381):EGMSVAE (SEQ ID NO: 84411) when PEP1 is SPIS (SEQ ID NO: 84120) and PEP2 is LKYHY (SEQ ID NO: 84232); wherein the pair PEP5:PEP6 is not VPTKL (SEQ ID NO: 84381):GMAVS (SEQ ID NO: 84194) when PEP1 is EPIS (SEQ ID NO: 84109) and PEP2 is KFKYE (SEQ ID NO: 84211); wherein the pair PEP5:PEP6 is not TPTKM (SEQ ID NO: 84327):GMVVD (SEQ ID NO: 84204) when PEP1 is SPIN (SEQ ID NO: 84119) and PEP2 is YGKIP (SEQ ID NO: 84397); wherein the pair PEP5:PEP6 is not VPARL (SEQ ID NO: 84352):DMVVE (SEQ ID NO: 84161) when PEP1 is SPIS (SEQ ID NO: 84120) and PEP2 is YKQYE (SEQ ID NO: 84398); wherein the pair PEP5:PEP6 is not VPTRL (SEQ ID NO: 84385):DMVVE (SEQ ID NO: 84161) when PEP1 is SPIS (SEQ ID NO: 84120) and PEP2 is YKQYE (SEQ ID NO: 84398); wherein the pair PEP5:PEP6 is not APVKT (SEQ ID NO: 84144):MIVEE (SEQ ID NO: 84241) when PEP1 is KPLS (SEQ ID NO: 84112) and PEP2 is DHHKD (SEQ ID NO: 84149); wherein the pair PEP5:PEP6 is not VPQAL (SEQ ID NO: 84364):MIVRS (SEQ ID NO: 84243) when PEP1 is EPLP (SEQ ID NO: 84110) and PEP2 is EQLSN (SEQ ID NO: 84178); wherein the pair PEP5:PEP6 is not VSQDL (SEQ ID NO: 84387):MIVKS (SEQ ID NO: 84242) when PEP1 is EPLT (SEQ ID NO: 84111) and PEP2 is EQLSN (SEQ ID NO: 84178); wherein the pair PEP5:PEP6 is not VPQDL (SEQ ID NO: 84365):MVVKS (SEQ ID NO: 84256) when PEP1 is EPLT (SEQ ID NO: 84111) and PEP2 is EQLSN (SEQ ID NO: 84178); wherein the pair PEP5:PEP6 is not VPTEE (SEQ ID NO: 84377):FLQHN (SEQ ID NO: 84184) when PEP1 is SNIT (SEQ ID NO: 84118) and PEP2 is IGEMS (SEQ ID NO: 84209); wherein the pair PEP5:PEP6 is not VPTGQ (SEQ ID NO: 84379):LEEHS (SEQ ID NO: 84217) when PEP1 is SNIT (SEQ ID NO: 84118) and PEP2 is LGEMS (SEQ ID NO: 84228); wherein the pair PEP5:PEP6 is not SRVHH (SEQ ID NO: 84297):RLEEH (SEQ ID NO: 84279) when PEP1 is RSVK (SEQ ID NO: 84115) and PEP2 is KEVQV (SEQ ID NO: 84210); and wherein the pair PEP5:PEP6 is not TQVQL (SEQ ID NO: 84340):TLEDH (SEQ ID NO: 84307) when PEP1 is RPVQ (SEQ ID NO: 84114) and PEP2 is KKATV (SEQ ID NO: 84212).

[0390] In certain embodiments, PEP9 is selected from the group consisting of KIPKAXXVPT-AA¹¹-AA¹² (SEQ ID NO: 84907), GIPEPXXVPE-AA¹¹-AA¹² (SEQ ID NO: 84902), SIPKAXXVPT-AA¹¹-AA¹² (SEQ ID NO: 84912), HVTKPTXAPT-AA¹¹-AA¹² (SEQ ID NO: 84905), YVPKPXXAPT-AA¹¹-AA¹² (SEQ ID NO: 84916), TVPKPXXAPT-AA¹¹-AA¹² (SEQ ID NO: 84915), AVPKAXXAPT-AA¹¹-AA¹² (SEQ ID NO: 84901), KVGKAXXVPT-AA¹¹-AA¹² (SEQ ID NO: 84908), KASKAXXVPT-AA¹¹-AA¹² (SEQ ID NO: 84906), GSAGPXXTPT-AA¹¹-AA¹² (SEQ ID NO: 84903), AAPASXXVPA-AA¹¹-AA¹² (SEQ ID NO: 84897), STPPTXXVPT-AA¹¹-AA¹² (SEQ ID NO: 84914), HVPKPXXAPT-AA¹¹-AA¹² (SEQ ID NO: 84904), RVPSTXXAPV-AA¹¹-AA¹² (SEQ ID NO: 84911), ASAAPXXVPQ-AA¹¹-AA¹² (SEQ ID NO: 84898), ASASPXXVSQ-AA¹¹-AA¹² (SEQ ID NO: 84900), ASASPXXVPQ-AA¹¹-AA¹² (SEQ ID NO: 84899), NDEGLEXVPT-AA¹¹-AA¹² (SEQ ID NO: 84909), NDEGLEXVPT-AA¹¹-AA¹² (SEQ ID NO: 84909), SSVKXQPSRV-AA¹¹-AA¹² (SEQ ID NO: 84913) and RNVQXRPTQV-AA¹¹-AA¹² (SEQ ID NO: 84910); wherein AA¹¹ is selected from the group consisting of E, K, Q, R, A, D, G and H; and wherein AA¹² is selected from the group consisting of L, M, T, E, Q and H; PEP10 is selected from the group consisting of AA²⁶-AA²⁷-AA²⁸-AA²⁹-VVEGXGXR (SEQ ID NO: 84941), AA²⁶-AA²⁷-AA²⁸-AA²⁹-TVESXAXR (SEQ ID NO: 84938), AA²⁶-AA²⁷-AA²⁸-AA²⁹-VVEGXGXR (SEQ ID NO: 84941), AA²⁶-AA²⁷-AA²⁸-AA²⁹-VVRSXGXH (SEQ ID NO: 84945), AA²⁶-AA²⁷-AA²⁸-AA²⁹-VVRAXGXH (SEQ ID NO: 84944), AA²⁶-AA²⁷-AA²⁸-AA²⁹-VVKAXGXH (SEQ ID NO: 84943), AA²⁶-AA²⁷-AA²⁸-AA²⁹-VAEXGXR (SEQ ID NO: 84931), AA²⁶-AA²⁷-AA²⁸-AA²⁹-AVSEXGXR (SEQ ID NO: 84935), AA²⁶-AA²⁷-AA²⁸-AA²⁹-VVDRXGXS (SEQ ID NO: 84939), AA²⁶-AA²⁷-AA²⁸-AA²⁹-VVEAXGXR (SEQ ID NO: 84940), AA²⁶-AA²⁷-AA²⁸-AA²⁹-VVESXGXR (SEQ ID NO: 84942), AA²⁶-AA²⁷-AA²⁸-AA²⁹-VEEXGXL (SEQ ID NO: 84932), AA²⁶-AA²⁷-AA²⁸-AA²⁹-VRSXKXS (SEQ ID NO: 84934), AA²⁶-AA²⁷-AA²⁸-AA²⁹-VKSXKXS (SEQ ID NO: 84933), AA²⁶-AA²⁷-AA²⁸-AA²⁹-VKSXKXS (SEQ ID NO: 84933), AA²⁶-AA²⁷-AA²⁸-AA²⁹-QHNKXEXR (SEQ ID NO: 84937), AA²⁶-AA²⁷-AA²⁸-AA²⁹-EHSQXEXR (SEQ ID NO: 84936), AA²⁶-AA²⁷-AA²⁸-AA²⁹-EEHLEXAXA (SEQ ID NO: 84947) and AA²⁶-AA²⁷-AA²⁸-AA²⁹-EDHLAXKXE (SEQ ID NO: 84946); wherein AA²⁶ is absent or selected from the group consisting of AA^{III} amino acids, preferably is absent or is E; wherein AA²⁷ and AA²⁸ are independently selected from the group consisting of AA^{III} and AA^{V} amino acids; and wherein AA²⁹ is absent or selected from the group consisting of AA^{II} amino acids, preferably is absent or is S; and wherein the pair PEP9:PEP10 is selected from the group consisting of KIPKAXXVPT-AA¹¹-AA¹² (SEQ ID NO: 84907):AA²⁶-AA²⁷-AA²⁸-AA²⁹-VVEGXGXR (SEQ ID NO: 84941), GIPEPXXVPE-AA¹¹-AA¹² (SEQ ID NO: 84902):AA²⁶-AA²⁷-AA²⁸-AA²⁹-TVESXAXR (SEQ ID NO: 84938), SIPKAXXVPT-AA¹¹-AA¹² (SEQ ID NO: 84912):AA²⁶-AA²⁷-AA²⁸-AA²⁹-VVEGXGXR (SEQ ID NO: 84941), HVTKPTXAPT-AA¹¹-AA¹² (SEQ ID NO: 84905):AA²⁶-AA²⁷-AA²⁸-AA²⁹-VVRSXGXH (SEQ ID NO: 84945), YVPKPXXAPT-AA¹¹-AA¹² (SEQ ID NO: 84916):AA²⁶-AA²⁷-AA²⁸-AA²⁹-VVRSXGXH (SEQ ID NO: 84945), TVPKPXXAPT-AA¹¹-AA¹² (SEQ ID NO: 84915):AA²⁶-AA²⁷-AA²⁸-AA²⁹-VVRAXGXH (SEQ ID NO: 84944), AVPKAXXAPT-AA¹¹-AA¹² (SEQ ID NO: 84901):AA²⁶-AA²⁷-AA²⁸-AA²⁹-VVKAXGXH (SEQ ID NO: 84943), KVGKAXXVPT-AA¹¹-AA¹² (SEQ ID NO: 84908):AA²⁶-AA²⁷-AA²⁸-AA²⁹-VAEXGXR (SEQ ID NO: 84931), KASKAXXVPT-AA¹¹-AA¹²-AA¹¹-AA¹²:AA²⁶-AA²⁷-AA²⁸-AA²⁹-AVSEXGXR (SEQ ID NO: 84935), GSAGPXXTPT-AA¹¹-AA¹² (SEQ ID NO: 84903):AA²⁶-AA²⁷-AA²⁸-AA²⁹-VVDRXGXS (SEQ ID NO: 84939), AAPASXXVPA-AA¹¹-AA¹² (SEQ ID NO: 84897):AA²⁶-AA²⁷-AA²⁸-AA²⁹-VVEAXGXR (SEQ ID NO: 84940), STPPTXXVPT-AA¹¹-AA¹²-AA¹¹-AA¹²:AA²⁶-AA²⁷-AA²⁸-AA²⁹-VVESXGXR (SEQ ID NO: 84942), HVPKPXXAPT-AA¹¹-AA¹² (SEQ ID NO: 84904):AA²⁶-AA²⁷-AA²⁸-AA²⁹-VVRSXGXH (SEQ ID NO: 84945), RVPSTXXAPV-AA¹¹-AA¹² (SEQ ID NO: 84911):AA²⁶-AA²⁷-AA²⁸-AA²⁹-VEEXGXL (SEQ ID NO: 84932), ASAAPXXVPQ-AA¹¹-AA¹² (SEQ ID NO: 84898):AA²⁶-AA²⁷-AA²⁸-AA²⁹-VRSXKXS (SEQ ID NO: 84934), ASASPXXVSQ-AA¹¹-AA¹² (SEQ ID NO: 84900):AA²⁶-AA²⁷-AA²⁸-AA²⁹-VKSXKXS (SEQ ID NO: 84933), ASASPXXVPQ-AA¹¹-AA¹² (SEQ ID NO: 84899):AA²⁶-AA²⁷-AA²⁸-AA²⁹-VKSXKXS (SEQ ID NO: 84933), NDEGLEXVPT-AA¹¹-AA¹² (SEQ ID NO: 84909):AA²⁶-AA²⁷-AA²⁸-AA²⁹-QHNKXEXR (SEQ ID NO: 84937), NDEGLEXVPT-AA¹¹-AA¹² (SEQ ID NO: 84909):AA²⁶-AA²⁷-AA²⁸-AA²⁹-EHSQXEXR (SEQ ID NO: 84936), SSVKXQPSRV-AA¹¹-AA¹² (SEQ ID NO: 84913):AA²⁶-AA²⁷-AA²⁸-AA²⁹-EEHLEXAXA (SEQ ID NO: 84947) and RNVQXRPTQV-AA¹¹-AA¹² (SEQ ID NO: 84910):AA²⁶-AA²⁷-AA²⁸-AA²⁹-EDHLAXKXE (SEQ ID NO: 84946); and wherein PEP9:PEP10 is not KIPKAXXVPT-AA¹¹-AA¹² (SEQ ID NO: 84907):AA²⁶-AA²⁷-AA²⁸-AA²⁹-VVEGXGXR (SEQ ID NO: 84941) when PEP1 is SAIS (SEQ ID NO: 84116) and PEP2 is LKNYQ (SEQ ID NO: 84230); wherein PEP9:PEP10 is not GIPEPXXVPE-AA¹¹-AA¹² (SEQ ID NO: 84902):AA²⁶-AA²⁷-AA²⁸-AA²⁹-TVESXAXR (SEQ ID NO: 84938) when PEP1 is SSLS (SEQ ID NO: 84121) and PEP2 is LKVYP (SEQ ID NO: 84231); wherein PEP9:PEP10 is not SIPKAXXVPT-AA¹¹-AA¹² (SEQ ID NO: 84912):AA²⁶-AA²⁷-AA²⁸-AA²⁹-VVEGXGXR (SEQ ID NO: 84941) when PEP1 is SAIS (SEQ ID NO: 84116) and PEP2 is LKNYQ (SEQ ID NO: 84230); wherein PEP9:PEP10 is not HVTKPTXAPT-AA¹¹-AA¹² (SEQ ID NO: 84905):AA²⁶-AA²⁷-AA²⁸-AA²⁹-VVRSXGXH (SEQ ID NO: 84945) when PEP1 is NAIS (SEQ ID NO: 84113) and PEP2 is LKKYR (SEQ ID NO: 84229); wherein PEP9:PEP10 is not YVPKPXXAPT-AA¹¹-AA¹² (SEQ ID NO: 84916):AA²⁶-AA²⁷-AA²⁸-AA²⁹-VVRSXGXH (SEQ ID NO: 84945) when PEP1 is NAIS (SEQ ID NO: 84113) and PEP2 is LKKYR (SEQ ID NO: 84229); wherein PEP9:PEP10 is not TVPKPXXAPT-AA¹¹-AA¹² (SEQ ID NO: 84915):AA²⁶-AA²⁷-AA²⁸-AA²⁹-VVRAXGXH (SEQ ID NO: 84944) when PEP1 is NAIS (SEQ ID NO: 84113) and PEP2 is LKKYR (SEQ ID NO: 84229); wherein PEP9:PEP10 is not AVPKAXXAPT-AA¹¹-AA¹² (SEQ ID NO: 84901):AA²⁶-AA²⁷-AA²⁸-AA²⁹-VVKAXGXH (SEQ ID NO: 84943) when PEP1 is SATS (SEQ ID NO: 84117) and PEP2 is LRKHR (SEQ ID NO: 84233); wherein PEP9:PEP10 is not KVGKAXXVPT-AA¹¹-AA¹² (SEQ ID NO: 84908):AA²⁶-AA²⁷-AA²⁸-AA²⁹-VAEXGXR (SEQ ID NO: 84931) when PEP1 is SPIS (SEQ ID NO: 84120) and PEP2 is LKYHY (SEQ ID NO: 84232); wherein PEP9:PEP10 is not KASKAXXVPT-AA¹¹-AA¹²-AA¹¹-AA¹²:AA²⁶-AA²⁷-AA²⁸-AA²⁹-AVSEXGXR (SEQ ID NO: 84935) when PEP1 is EPIS (SEQ ID NO: 84109) and PEP2 is KFKYE (SEQ ID NO: 84211); wherein PEP9:PEP10 is not GSAGPXXTPT-AA¹¹-AA¹² (SEQ ID NO: 84903):AA²⁶-AA²⁷-AA²⁸-AA²⁹-VVDRXGXS (SEQ ID NO: 84939) when PEP1 is SPIN (SEQ ID NO: 84119) and PEP2 is YGKIP (SEQ ID NO: 84397); wherein PEP9:PEP10 is not AAPASXXVPA-AA¹¹-AA¹² (SEQ ID NO: 84897):AA²⁶-AA²⁷-AA²⁸-AA²⁹-VVEAXGXR (SEQ ID NO: 84940) when PEP1 is SPIS (SEQ ID NO: 84120) and PEP2 is YKQYE (SEQ ID NO: 84398); wherein PEP9:PEP10 is not STPPTXXVPT-AA¹¹-AA¹²-AA¹¹-AA¹²:AA²⁶-AA²⁷-AA²⁸-AA²⁹-VVESXGXR (SEQ ID NO: 84942) when PEP1 is SPIS (SEQ ID NO: 84120) and PEP2 is YKQYE (SEQ ID NO: 84398); wherein PEP9:PEP10 is not HVPKPXXAPT-AA¹¹-AA¹² (SEQ ID NO: 84904):AA²⁶-AA²⁷-AA²⁸-AA²⁹-VVRSXGXH (SEQ ID NO: 84945) when PEP1 is NAIS (SEQ ID NO: 84113) and PEP2 is LKKYR (SEQ ID NO: 84229); wherein PEP9:PEP10 is not RVPSTXXAPV-AA¹¹-AA¹² (SEQ ID NO: 84911):AA²⁶-AA²⁷-AA²⁸-AA²⁹-VEEXGXL (SEQ ID NO: 84932) when PEP1 is KPLS (SEQ ID NO: 84112) and PEP2 is DHHKD (SEQ ID NO: 84149); wherein PEP9:PEP10 is not ASAAPXXVPQ-AA¹¹-AA¹² (SEQ ID NO: 84898):AA²⁶-AA²⁷-AA²⁸-AA²⁹-VRSXKXS (SEQ ID NO: 84934) when PEP1 is EPLP (SEQ ID NO: 84110) and PEP2 is EQLSN (SEQ ID NO: 84178); ASASPXXVSQ-AA¹¹-AA¹² (SEQ ID NO: 84900):AA²⁶-AA²⁷-AA²⁸-AA²⁹-VKSXKXS (SEQ ID NO: 84933) when PEP1 is EPLT (SEQ ID NO: 84111) and PEP2 is EQLSN (SEQ ID NO: 84178); wherein PEP9:PEP10 is not ASASPXXVPQ-AA¹¹-AA¹² (SEQ ID NO: 84899):AA²⁶-AA²⁷-AA²⁸-AA²⁹-VKSXKXS (SEQ ID NO: 84933) when PEP1 is EPLT (SEQ ID NO: 84111) and PEP2 is EQLSN (SEQ ID NO: 84178); wherein PEP9:PEP10 is not NDEGLEXVPT-AA¹¹-AA¹² (SEQ ID NO: 84909):AA²⁶-AA²⁷-AA²⁸-AA²⁹-QHNKXEXR (SEQ ID NO: 84937) when PEP1 is SNIT (SEQ ID NO: 84118) and PEP2 is IGEMS (SEQ ID NO: 84209); wherein PEP9:PEP10 is not NDEGLEXVPT-AA¹¹-AA¹² (SEQ ID NO: 84909):AA²⁶-AA²⁷-AA²⁸-AA²⁹-EHSQXEXR (SEQ ID NO: 84936) when PEP1 is SNIT (SEQ ID NO: 84118) and PEP2 is LGEMS (SEQ ID NO: 84228); wherein PEP9:PEP10 is not SSVKXQPSRV-AA¹¹-AA¹² (SEQ ID NO: 84913):AA²⁶-AA²⁷-AA²⁸-AA²⁹-EEHLEXAXA (SEQ ID NO: 84947) when PEP1 is RSVK (SEQ ID NO: 84115) and PEP2 is KEVQV (SEQ ID NO: 84210); and wherein PEP9:PEP10 is not RNVQXRPTQV-AA¹¹-AA¹² (SEQ ID NO: 84910):AA²⁶-AA²⁷-AA²⁸-AA²⁹-EDHLAXKXE (SEQ ID NO: 84946) when PEP1 is RPVQ (SEQ ID NO: 84114) and PEP2 is KKATV (SEQ ID NO: 84212).

[0391] In certain embodiments, PEP9 is selected from the group consisting of KIPKAXXVPTEL (SEQ ID NO: 84770), GIPEPXXVPEKM (SEQ ID NO: 84718), SIPKAXXVPTEL (SEQ ID NO: 84830), HVTKPTXAPTKL (SEQ ID NO: 84742), YVPKPXXAPTKL (SEQ ID NO: 84864), TVPKPXXAPTQL (SEQ ID NO: 84854), AVPKAXXAPTKL (SEQ ID NO: 84704), KVGKAXXVPTKL (SEQ ID NO: 84780), KASKAXXVPTKL (SEQ ID NO: 84760), GSAGPXXTPTKM (SEQ ID NO: 84726), AAPASXXVPARL (SEQ ID NO: 84677), STPPTXXVPTRL (SEQ ID NO: 84850), HVPKPXXAPTKL (SEQ ID NO: 84734), RVPSTXXAPVKT (SEQ ID NO: 84815), ASAAPXXVPQAL (SEQ ID NO: 84689), ASASPXXVSQDL (SEQ ID NO: 84701), ASASPXXVPQDL (SEQ ID NO: 84699), NDEGLEXVPTEE (SEQ ID NO: 84798), NDEGLEXVPTGQ (SEQ ID NO: 84799), SSVKXQPSRVHH (SEQ ID NO: 84834) and RNVQXRPTQVQL (SEQ ID NO: 84806); PEP10 is selected from the group consisting of DMVVEGXGXR (SEQ ID NO: 84510), NMTVESXAXR (SEQ ID NO: 84604), EMVVEGXGXR (SEQ ID NO: 84529), NMVVRSXGXH (SEQ ID NO: 84629), NMVVRAXGXH (SEQ ID NO: 84627), NMVVKAXGXH (SEQ ID NO: 84624), EGMSVAEXGXR (SEQ ID NO: 84636), GMAVSEXGXR (SEQ ID NO: 84546), GMVVDRXGXS (SEQ ID NO: 84567), DMVVEAXGXR (SEQ ID NO: 84509), DMVVESXGXR (SEQ ID NO: 84511), MIVEEXGXL (SEQ ID NO: 84448), MIVRSXKXS (SEQ ID NO: 84453), MIVKSXKXS (SEQ ID NO: 84451), MVVKSXKXS (SEQ ID NO: 84470), FLQHNKXEXR (SEQ ID NO: 84536), LEEHSQXEXR (SEQ ID NO: 84577), RLEEHLEXAXA (SEQ ID NO: 84646) and TLEDHLAXKXE (SEQ ID NO: 84659); and wherein the pair PEP9:PEP10 is selected from the group consisting of KIPKAXXVPTEL (SEQ ID NO: 84770):DMVVEGXGXR (SEQ ID NO: 84510), GIPEPXXVPEKM (SEQ ID NO: 84718):NMTVESXAXR (SEQ ID NO: 84604), SIPKAXXVPTEL (SEQ ID NO: 84830):EMVVEGXGXR (SEQ ID NO: 84529), HVTKPTXAPTKL (SEQ ID NO: 84742):NMVVRSXGXH (SEQ ID NO: 84629), YVPKPXXAPTKL (SEQ ID NO: 84864):NMVVRSXGXH (SEQ ID NO: 84629), TVPKPXXAPTQL (SEQ ID NO: 84854):NMVVRAXGXH (SEQ ID NO: 84627), AVPKAXXAPTKL (SEQ ID NO: 84704):NMVVKAXGXH (SEQ ID NO: 84624), KVGKAXXVPTKL (SEQ ID NO: 84780):EGMSVAEXGXR (SEQ ID NO: 84636), KASKAXXVPTKL (SEQ ID NO: 84760):GMAVSEXGXR (SEQ ID NO: 84546), GSAGPXXTPTKM (SEQ ID NO: 84726):GMVVDRXGXS (SEQ ID NO: 84567), AAPASXXVPARL (SEQ ID NO: 84677):DMVVEAXGXR (SEQ ID NO: 84509), STPPTXXVPTRL (SEQ ID NO: 84850):DMVVESXGXR (SEQ ID NO: 84511), HVPKPXXAPTKL (SEQ ID NO: 84734):NMVVRSXGXH (SEQ ID NO: 84629), RVPSTXXAPVKT (SEQ ID NO: 84815):MIVEEXGXL (SEQ ID NO: 84448), ASAAPXXVPQAL (SEQ ID NO: 84689):MIVRSXKXS (SEQ ID NO: 84453), ASASPXXVSQDL (SEQ ID NO: 84701):MIVKSXKXS (SEQ ID NO: 84451), ASASPXXVPQDL (SEQ ID NO: 84699):MVVKSXKXS (SEQ ID NO: 84470), NDEGLEXVPTEE (SEQ ID NO: 84798):FLQHNKXEXR (SEQ ID NO: 84536), NDEGLEXVPTGQ (SEQ ID NO: 84799):LEEHSQXEXR (SEQ ID NO: 84577), NDEGLEXVPTEE (SEQ ID NO: 84798):FLQHNKXEXR (SEQ ID NO: 84536), NDEGLEXVPTEE (SEQ ID NO: 84798):FLQHNKXEXR (SEQ ID NO: 84536), SSVKXQPSRVHH (SEQ ID NO: 84834):RLEEHLEXAXA (SEQ ID NO: 84646) and RNVQXRPTQVQL (SEQ ID NO: 84806):TLEDHLAXKXE (SEQ ID NO: 84659); and wherein PEP9:PEP10 is not KIPKAXXVPTEL (SEQ ID NO: 84770):DMVVEGXGXR (SEQ ID NO: 84510) when PEP1 is SAIS (SEQ ID NO: 84116) and PEP2 is LKNYQ (SEQ ID NO: 84230); wherein PEP9:PEP10 is not GIPEPXXVPEKM (SEQ ID NO: 84718):NMTVESXAXR (SEQ ID NO: 84604) when PEP1 is SSLS (SEQ ID NO: 84121) and PEP2 is LKVYP (SEQ ID NO: 84231); wherein PEP9:PEP10 is not SIPKAXXVPTEL (SEQ ID NO: 84830):EMVVEGXGXR (SEQ ID NO: 84529) when PEP1 is SAIS (SEQ ID NO: 84116) and PEP2 is LKNYQ (SEQ ID NO: 84230); wherein PEP9:PEP10 is not HVTKPTXAPTKL (SEQ ID NO: 84742):NMVVRSXGXH (SEQ ID NO: 84629) when PEP1 is NAIS (SEQ ID NO: 84113) and PEP2 is LKKYR (SEQ ID NO: 84229); wherein PEP9:PEP10 is not YVPKPXXAPTKL (SEQ ID NO: 84864):NMVVRSXGXH (SEQ ID NO: 84629) when PEP1 is NAIS (SEQ ID NO: 84113) and PEP2 is LKKYR (SEQ ID NO: 84229); wherein PEP9:PEP10 is not TVPKPXXAPTQL (SEQ ID NO: 84854):NMVVRAXGXH (SEQ ID NO: 84627) when PEP1 is NAIS (SEQ ID NO: 84113) and PEP2 is LKKYR (SEQ ID NO: 84229); wherein PEP9:PEP10 is not AVPKAXXAPTKL (SEQ ID NO: 84704):NMVVKAXGXH (SEQ ID NO: 84624) when PEP1 is SATS (SEQ ID NO: 84117) and PEP2 is LRKHR (SEQ ID NO: 84233); wherein PEP9:PEP10 is not KVGKAXXVPTKL (SEQ ID NO: 84780):EGMSVAEXGXR (SEQ ID NO: 84636) when PEP1 is SPIS (SEQ ID NO: 84120) and PEP2 is LKYHY (SEQ ID NO: 84232); wherein PEP9:PEP10 is not KASKAXXVPTKL (SEQ ID NO: 84760):GMAVSEXGXR (SEQ ID NO: 84546) when PEP1 is EPIS (SEQ ID NO: 84109) and PEP2 is KFKYE (SEQ ID NO: 84211); wherein PEP9:PEP10 is not GSAGPXXTPTKM (SEQ ID NO: 84726):GMVVDRXGXS (SEQ ID NO: 84567) when PEP1 is SPIN (SEQ ID NO: 84119) and PEP2 is YGKIP (SEQ ID NO: 84397); wherein PEP9:PEP10 is not AAPASXXVPARL (SEQ ID NO: 84677):DMVVEAXGXR (SEQ ID NO: 84509) when PEP1 is SPIS (SEQ ID NO: 84120) and PEP2 is YKQYE (SEQ ID NO: 84398); wherein PEP9:PEP10 is not STPPTXXVPTRL (SEQ ID NO: 84850):DMVVESXGXR (SEQ ID NO: 84511) when PEP1 is SPIS (SEQ ID NO: 84120) and PEP2 is YKQYE (SEQ ID NO: 84398); wherein PEP9:PEP10 is not HVPKPXXAPTKL (SEQ ID NO: 84734):NMVVRSXGXH (SEQ ID NO: 84629) when PEP1 is NAIS (SEQ ID NO: 84113) and PEP2 is LKKYR (SEQ ID NO: 84229); wherein PEP9:PEP10 is not RVPSTXXAPVKT (SEQ ID NO: 84815):MIVEEXGXL (SEQ ID NO: 84448) when PEP1 is KPLS (SEQ ID NO: 84112) and PEP2 is DHHKD (SEQ ID NO: 84149); wherein PEP9:PEP10 is not ASAAPXXVPQAL (SEQ ID NO: 84689):MIVRSXKXS (SEQ ID NO: 84453) when PEP1 is EPLP (SEQ ID NO: 84110) and PEP2 is EQLSN (SEQ ID NO: 84178); ASASPXXVSQDL (SEQ ID NO: 84701):MIVKSXKXS (SEQ ID NO: 84451) when PEP1 is EPLT (SEQ ID NO: 84111) and PEP2 is EQLSN (SEQ ID NO: 84178); wherein PEP9:PEP10 is not ASASPXXVPQDL (SEQ ID NO: 84699):MVVKSXKXS (SEQ ID NO: 84470) when PEP1 is EPLT (SEQ ID NO: 84111) and PEP2 is EQLSN (SEQ ID NO: 84178); wherein PEP9:PEP10 is not NDEGLEXVPTEE (SEQ ID NO: 84798):FLQHNKXEXR (SEQ ID NO: 84536) when PEP1 is SNIT (SEQ ID NO: 84118) and PEP2 is IGEMS (SEQ ID NO: 84209); wherein PEP9:PEP10 is not NDEGLEXVPTGQ (SEQ ID NO: 84799):LEEHSQXEXR (SEQ ID NO: 84577) when PEP1 is SNIT (SEQ ID NO: 84118) and PEP2 is LGEMS (SEQ ID NO: 84228); wherein PEP9:PEP10 is not NDEGLEXVPTEE (SEQ ID NO: 84798):FLQHNKXEXR (SEQ ID NO: 84536) when PEP1 is SNIT (SEQ ID NO: 84118) and PEP2 is IGEMS (SEQ ID NO: 84209); wherein PEP9:PEP10 is not NDEGLEXVPTEE (SEQ ID NO: 84798):FLQHNKXEXR (SEQ ID NO: 84536) when PEP1 is SNIT (SEQ ID NO: 84118) and PEP2 is IGEMS (SEQ ID NO: 84209); wherein PEP9:PEP10 is not SSVKXQPSRVHH (SEQ ID NO: 84834):RLEEHLEXAXA (SEQ ID NO: 84646) when PEP1 is RSVK (SEQ ID NO: 84115) and PEP2 is KEVQV (SEQ ID NO: 84210); and wherein PEP9:PEP10 is not RNVQXRPTQVQL (SEQ ID NO: 84806):TLEDHLAXKXE (SEQ ID NO: 84659) when PEP1 is RPVQ (SEQ ID NO: 84114) and PEP2 is KKATV (SEQ ID NO: 84212).

[0392] In certain embodiments, PEP1 is selected from the group consisting of SAIS (SEQ ID NO: 84116), SSLS (SEQ ID NO: 84121), NAIS (SEQ ID NO: 84113), SATS (SEQ ID NO: 84117), SPIS (SEQ ID NO: 84120), EPIS (SEQ ID NO: 84109), SPIN (SEQ ID NO: 84119), KPLS (SEQ ID NO: 84112), EPLP (SEQ ID NO: 84110), EPLT (SEQ ID NO: 84111), SNIT (SEQ ID NO: 84118), RSVK (SEQ ID NO: 84115) and RPVQ (SEQ ID NO: 84114); PEP11 is selected from the group consisting of LYL, LFF, LYF, LYY, LYK, LYI, LFI, LYV, VYY, QIM, AKV and RKI; and the pair PEP1:PEP11 is selected from the group consisting of SAIS (SEQ ID NO: 84116):LYL, SSLS (SEQ ID NO: 84121):LFF, NAIS (SEQ ID NO: 84113):LYF, SATS (SEQ ID NO: 84117):LYY, SPIS (SEQ ID NO: 84120):LYK, SPIS (SEQ ID NO: 84120):LYI, SPIS (SEQ ID NO: 84120):LFI, EPIS (SEQ ID NO: 84109):LYL, SPIN (SEQ ID NO: 84119):LYF, KPLS (SEQ ID NO: 84112):LYV, EPLP (SEQ ID NO: 84110):VYY, EPLT (SEQ ID NO: 84111):LYY, SNIT (SEQ ID NO: 84118):QIM, RSVK (SEQ ID NO: 84115):AKV and RPVQ (SEQ ID NO: 84114):RKI.

[0393] In one aspect, the present disclosure provides a GFR-binding compound, wherein said GFR-binding compound is a peptide, a variant or analog thereof, or a peptidomimetic as defined herein, with between 20 and 60 (in particular between 20 and 50, and more particularly, between 20 and 45) amino acids, comprising a peptide with four amino acids (PEP1) or a peptide with eight amino acids (PEP12), a peptide with five amino acids (PEP2), and optionally a pair of peptides selected form the group consisting of PEP3:PEP4, PEP3:PEP6, PEP3:PEP10, PEP5:PEP4, PEP9:PEP4, PEP5:PEP6, PEP5:PEP10, PEP9:PEP6 and PEP9:PEP10; wherein said GFR-binding compound does not comprise the pair of peptides VPTEL (SEQ ID NO: 84378):DMVVE (SEQ ID NO: 84161) when PEP1 is SAIS (SEQ ID NO: 84116) and PEP2 is LKNYQ (SEQ ID NO: 84230); wherein said GFR-binding compound does not comprise the pair of peptides VPEKM (SEQ ID NO: 84360):NMTVE (SEQ ID NO: 84267) when PEP1 is SSLS (SEQ ID NO: 84121) and PEP2 is LKVYP (SEQ ID NO: 84231); wherein said GFR-binding compound does not comprise the pair of peptides VPTEL (SEQ ID NO: 84378):EMVVE (SEQ ID NO: 84175) when PEP1 is SAIS (SEQ ID NO: 84116) and PEP2 is LKNYQ (SEQ ID NO: 84230); wherein said GFR-binding compound does not comprise the pair of peptides APTKL (SEQ ID NO: 84131):NMVVR (SEQ ID NO: 84275) when PEP1 is NAIS (SEQ ID NO: 84113) and PEP2 is LKKYR (SEQ ID NO: 84229); wherein said GFR-binding compound does not comprise the pair of peptides APTQL (SEQ ID NO: 84134):NMVVR (SEQ ID NO: 84275) when PEP1 is NAIS (SEQ ID NO: 84113) and PEP2 is LKKYR (SEQ ID NO: 84229); wherein said GFR-binding compound does not comprise the pair of peptides APTKL (SEQ ID NO: 84131):NMVVK (SEQ ID NO: 84274) when PEP1 is SATS (SEQ ID NO: 84117) and PEP2 is LRKHR (SEQ ID NO: 84233); wherein said GFR-binding compound does not comprise the pair of peptides VPTKL (SEQ ID NO: 84381):EGMSVAE (SEQ ID NO: 84411) when PEP1 is SPIS (SEQ ID NO: 84120) and PEP2 is LKYHY (SEQ ID NO: 84232); wherein said GFR-binding compound does not comprise the pair of peptides VPTKL (SEQ ID NO: 84381):GMAVS (SEQ ID NO: 84194) when PEP1 is EPIS (SEQ ID NO: 84109) and PEP2 is KFKYE (SEQ ID NO: 84211); wherein said GFR-binding compound does not comprise the pair of peptides TPTKM (SEQ ID NO: 84327):GMVVD (SEQ ID NO: 84204) when PEP1 is SPIN (SEQ ID NO: 84119) and PEP2 is YGKIP (SEQ ID NO: 84397); wherein said GFR-binding compound does not comprise the pair of peptides VPARL (SEQ ID NO: 84352):DMVVE (SEQ ID NO: 84161) when PEP1 is SPIS (SEQ ID NO: 84120) and PEP2 is YKQYE (SEQ ID NO: 84398); wherein said GFR-binding compound does not comprise the pair of peptides VPTRL (SEQ ID NO: 84385):DMVVE (SEQ ID NO: 84161) when PEP1 is SPIS (SEQ ID NO: 84120) and PEP2 is YKQYE (SEQ ID NO: 84398); wherein said GFR-binding compound does not comprise the pair of peptides APVKT (SEQ ID NO: 84144):MIVEE (SEQ ID NO: 84241) when PEP1 is KPLS (SEQ ID NO: 84112) and PEP2 is DHHKD (SEQ ID NO: 84149); wherein said GFR-binding compound does not comprise the pair of peptides VPQAL (SEQ ID NO: 84364):MIVRS (SEQ ID NO: 84243) when PEP1 is EPLP (SEQ ID NO: 84110) and PEP2 is EQLSN (SEQ ID NO: 84178); wherein said GFR-binding compound does not comprise the pair of peptides VSQDL (SEQ ID NO: 84387):MIVKS (SEQ ID NO: 84242) when PEP1 is EPLT (SEQ ID NO: 84111) and PEP2 is EQLSN (SEQ ID NO: 84178); wherein said GFR-binding compound does not comprise the pair of peptides VPQDL (SEQ ID NO: 84365):MVVKS (SEQ ID NO: 84256) when PEP1 is EPLT (SEQ ID NO: 84111) and PEP2 is EQLSN (SEQ ID NO: 84178); wherein said GFR-binding compound does not comprise the pair of peptides VPTEE (SEQ ID NO: 84377):FLQHN (SEQ ID NO: 84184) when PEP1 is SNIT (SEQ ID NO: 84118) and PEP2 is IGEMS (SEQ ID NO: 84209); wherein said GFR-binding compound does not comprise the pair of peptides VPTGQ (SEQ ID NO: 84379):LEEHS (SEQ ID NO: 84217) when PEP1 is SNIT (SEQ ID NO: 84118) and PEP2 is LGEMS (SEQ ID NO: 84228); wherein said GFR-binding compound does not comprise the pair of peptides SRVHH (SEQ ID NO: 84297):RLEEH (SEQ ID NO: 84279) when PEP1 is RSVK (SEQ ID NO: 84115) and PEP2 is KEVQV (SEQ ID NO: 84210); and wherein said GFR-binding compound does not comprise the pair of peptides TQVQL (SEQ ID NO: 84340):TLEDH (SEQ ID NO: 84307) when PEP1 is RPVQ (SEQ ID NO: 84114) and PEP2 is KKATV (SEQ ID NO: 84212); and wherein the RMSD is 2.45 Å or less.

[0394] In one aspect, the present disclosure provides a GFR-binding compound, wherein said GFR-binding compound is a peptide, a variant or analog thereof, or a peptidomimetic as defined herein, with between 20 and 60 (in particular between 20 and 50, and more particularly, between 20 and 45) amino acids, comprising a peptide with four amino acids (PEP1) or a peptide with eight amino acids (PEP12), a peptide with five amino acids (PEP2), and optionally a pair of peptides selected form the group consisting of PEP3:PEP4, PEP3:PEP6, PEP3:PEP10, PEP5:PEP4, PEP9:PEP4, PEP5:PEP6, PEP5:PEP10, PEP9:PEP6 and PEP9:PEP10; wherein said GFR-binding compound does not comprise the pair of peptides KIPKAXXVPTEL (SEQ ID NO: 84770):DMVVEGXGXR (SEQ ID NO: 84510) when PEP1 is SAIS (SEQ ID NO: 84116) and PEP2 is LKNYQ (SEQ ID NO: 84230); wherein said GFR-binding compound does not comprise the pair of peptides GIPEPXXVPEKM (SEQ ID NO: 84718):NMTVESXAXR (SEQ ID NO: 84604) when PEP1 is SSLS (SEQ ID NO: 84121) and PEP2 is LKVYP (SEQ ID NO: 84231); wherein said GFR-binding compound does not comprise the pair of peptides SIPKAXXVPTEL (SEQ ID NO: 84830):EMVVEGXGXR (SEQ ID NO: 84529) when PEP1 is SAIS (SEQ ID NO: 84116) and PEP2 is LKNYQ (SEQ ID NO: 84230); wherein said GFR-binding compound does not comprise the pair of peptides HVTKPTXAPTKL (SEQ ID NO: 84742):NMVVRSXGXH (SEQ ID NO: 84629) when PEP1 is NAIS (SEQ ID NO: 84113) and PEP2 is LKKYR (SEQ ID NO: 84229); wherein said GFR-binding compound does not comprise the pair of peptides YVPKPXXAPTKL (SEQ ID NO: 84864):NMVVRSXGXH (SEQ ID NO: 84629) when PEP1 is NAIS (SEQ ID NO: 84113) and PEP2 is LKKYR (SEQ ID NO: 84229); wherein said GFR-binding compound does not comprise the pair of peptides TVPKPXXAPTQL (SEQ ID NO: 84854):NMVVRAXGXH (SEQ ID NO: 84627) when PEP1 is NAIS (SEQ ID NO: 84113) and PEP2 is LKKYR (SEQ ID NO: 84229); wherein said GFR-binding compound does not comprise the pair of peptides AVPKAXXAPTKL (SEQ ID NO: 84704):NMVVKAXGXH (SEQ ID NO: 84624) when PEP1 is SATS (SEQ ID NO: 84117) and PEP2 is LRKHR (SEQ ID NO: 84233); wherein said GFR-binding compound does not comprise the pair of peptides KVGKAXXVPTKL (SEQ ID NO: 84780):EGMSVAEXGXR (SEQ ID NO: 84636) when PEP1 is SPIS (SEQ ID NO: 84120) and PEP2 is LKYHY (SEQ ID NO: 84232); wherein said GFR-binding compound does not comprise the pair of peptides KASKAXXVPTKL (SEQ ID NO: 84760):GMAVSEXGXR (SEQ ID NO: 84546) when PEP1 is EPIS (SEQ ID NO: 84109) and PEP2 is KFKYE (SEQ ID NO: 84211); wherein said GFR-binding compound does not comprise the pair of peptides GSAGPXXTPTKM (SEQ ID NO: 84726):GMVVDRXGXS (SEQ ID NO: 84567) when PEP1 is SPIN (SEQ ID NO: 84119) and PEP2 is YGKIP (SEQ ID NO: 84397); wherein said GFR-binding compound does not comprise the pair of peptides AAPASXXVPARL (SEQ ID NO: 84677):DMVVEAXGXR (SEQ ID NO: 84509) when PEP1 is SPIS (SEQ ID NO: 84120) and PEP2 is YKQYE (SEQ ID NO: 84398); wherein said GFR-binding compound does not comprise the pair of peptides STPPTXXVPTRL (SEQ ID NO: 84850):DMVVESXGXR (SEQ ID NO: 84511) when PEP1 is SPIS (SEQ ID NO: 84120) and PEP2 is YKQYE (SEQ ID NO: 84398); wherein said GFR-binding compound does not comprise the pair of peptides HVPKPXXAPTKL (SEQ ID NO: 84734):NMVVRSXGXH (SEQ ID NO: 84629) when PEP1 is NAIS (SEQ ID NO: 84113) and PEP2 is LKKYR (SEQ ID NO: 84229); wherein said GFR-binding compound does not comprise the pair of peptides RVPSTXXAPVKT (SEQ ID NO: 84815):MIVEEXGXL (SEQ ID NO: 84448) when PEP1 is KPLS (SEQ ID NO: 84112) and PEP2 is DHHKD (SEQ ID NO: 84149); wherein said GFR-binding compound does not comprise the pair of peptides ASAAPXXVPQAL (SEQ ID NO: 84689):MIVRSXKXS (SEQ ID NO: 84453) when PEP1 is EPLP (SEQ ID NO: 84110) and PEP2 is EQLSN (SEQ ID NO: 84178); ASASPXXVSQDL (SEQ ID NO: 84701):MIVKSXKXS (SEQ ID NO: 84451) when PEP1 is EPLT (SEQ ID NO: 84111) and PEP2 is EQLSN (SEQ ID NO: 84178); wherein said GFR-binding compound does not comprise the pair of peptides ASASPXXVPQDL (SEQ ID NO: 84699):MVVKSXKXS (SEQ ID NO: 84470) when PEP1 is EPLT (SEQ ID NO: 84111) and PEP2 is EQLSN (SEQ ID NO: 84178); wherein said GFR-binding compound does not comprise the pair of peptides NDEGLEXVPTEE (SEQ ID NO: 84798):FLQHNKXEXR (SEQ ID NO: 84536) when PEP1 is SNIT (SEQ ID NO: 84118) and PEP2 is IGEMS (SEQ ID NO: 84209); wherein said GFR-binding compound does not comprise the pair of peptides NDEGLEXVPTGQ (SEQ ID NO: 84799):LEEHSQXEXR (SEQ ID NO: 84577) when PEP1 is SNIT (SEQ ID NO: 84118) and PEP2 is LGEMS (SEQ ID NO: 84228); wherein said GFR-binding compound does not comprise the pair of peptides NDEGLEXVPTEE (SEQ ID NO: 84798):FLQHNKXEXR (SEQ ID NO: 84536) when PEP1 is SNIT (SEQ ID NO: 84118) and PEP2 is IGEMS (SEQ ID NO: 84209); wherein said GFR-binding compound does not comprise the pair of peptides NDEGLEXVPTEE (SEQ ID NO: 84798):FLQHNKXEXR (SEQ ID NO: 84536) when PEP1 is SNIT (SEQ ID NO: 84118) and PEP2 is IGEMS (SEQ ID NO: 84209); wherein said GFR-binding compound does not comprise the pair of peptides SSVKXQPSRVHH (SEQ ID NO: 84834):RLEEHLEXAXA (SEQ ID NO: 84646) when PEP1 is RSVK (SEQ ID NO: 84115) and PEP2 is KEVQV (SEQ ID NO: 84210); wherein said GFR-binding compound does not comprise the pair of peptides RNVQXRPTQVQL (SEQ ID NO: 84806):TLEDHLAXKXE (SEQ ID NO: 84659) when PEP1 is RPVQ (SEQ ID NO: 84114) and PEP2 is KKATV (SEQ ID NO: 84212); and wherein the RMSD is 2.45 Å or less.

[0395] In particular, in certain embodiments, the quadruplet PEP3:PEP1:PEP2:PEP4 is selected from the group consisting of VPT:SAIS (SEQ ID NO: 84116):LKNYQ (SEQ ID NO: 84230):VVE, VPE:SAIS (SEQ ID NO: 84116):LKNYQ (SEQ ID NO: 84230):TVE, APT:SAIS (SEQ ID NO: 84116):LKNYQ (SEQ ID NO: 84230):VVR, APT:SAIS (SEQ ID NO: 84116):LKNYQ (SEQ ID NO: 84230):VVK, VPT:SAIS (SEQ ID NO: 84116):LKNYQ (SEQ ID NO: 84230):VAE, VPT:SAIS (SEQ ID NO: 84116):LKNYQ (SEQ ID NO: 84230):AVS, TPT:SAIS (SEQ ID NO: 84116):LKNYQ (SEQ ID NO: 84230):VVD, VPA:SAIS (SEQ ID NO: 84116):LKNYQ (SEQ ID NO: 84230):VVE, APV:SAIS (SEQ ID NO: 84116):LKNYQ (SEQ ID NO: 84230):VEE, VPQ:SAIS (SEQ ID NO: 84116):LKNYQ (SEQ ID NO: 84230):VRS, VSQ:SAIS (SEQ ID NO: 84116):LKNYQ (SEQ ID NO: 84230):VKS, VPQ:SAIS (SEQ ID NO: 84116):LKNYQ (SEQ ID NO: 84230):VKS, VPT:SAIS (SEQ ID NO: 84116):LKNYQ (SEQ ID NO: 84230):QHN, VPT:SAIS (SEQ ID NO: 84116):LKNYQ (SEQ ID NO: 84230):EHS, SRV:SAIS (SEQ ID NO: 84116):LKNYQ (SEQ ID NO: 84230):EEH, TQV:SAIS (SEQ ID NO: 84116):LKNYQ (SEQ ID NO: 84230):EDH, VPE:SSLS (SEQ ID NO: 84121):LKVYP (SEQ ID NO: 84231):TVE, VPT:SSLS (SEQ ID NO: 84121):LKVYP (SEQ ID NO: 84231):VVE, APT:SSLS (SEQ ID NO: 84121):LKVYP (SEQ ID NO: 84231):VVR, APT:SSLS (SEQ ID NO: 84121):LKVYP (SEQ ID NO: 84231):VVK, VPT:SSLS (SEQ ID NO: 84121):LKVYP (SEQ ID NO: 84231):VAE, VPT:SSLS (SEQ ID NO: 84121):LKVYP (SEQ ID NO: 84231):AVS, TPT:SSLS (SEQ ID NO: 84121):LKVYP (SEQ ID NO: 84231):VVD, VPA:SSLS (SEQ ID NO: 84121):LKVYP (SEQ ID NO: 84231):VVE, APV:SSLS (SEQ ID NO: 84121):LKVYP (SEQ ID NO: 84231):VEE, VPQ:SSLS (SEQ ID NO: 84121):LKVYP (SEQ ID NO: 84231):VRS, VSQ:SSLS (SEQ ID NO: 84121):LKVYP (SEQ ID NO: 84231):VKS, VPQ:SSLS (SEQ ID NO: 84121):LKVYP (SEQ ID NO: 84231):VKS, VPT:SSLS (SEQ ID NO: 84121):LKVYP (SEQ ID NO: 84231):QHN, VPT:SSLS (SEQ ID NO: 84121):LKVYP (SEQ ID NO: 84231):EHS, SRV:SSLS (SEQ ID NO: 84121):LKVYP (SEQ ID NO: 84231):EEH, TQV:SSLS (SEQ ID NO: 84121):LKVYP (SEQ ID NO: 84231):EDH, APT:NAIS (SEQ ID NO: 84113):LKKYR (SEQ ID NO: 84229):VVR, VPT:NAIS (SEQ ID NO: 84113):LKKYR (SEQ ID NO: 84229):VVE, VPE:NAIS (SEQ ID NO: 84113):LKKYR (SEQ ID NO: 84229):TVE, APT:NAIS (SEQ ID NO: 84113):LKKYR (SEQ ID NO: 84229):VVK, VPT:NAIS (SEQ ID NO: 84113):LKKYR (SEQ ID NO: 84229):VAE, VPT:NAIS (SEQ ID NO: 84113):LKKYR (SEQ ID NO: 84229):AVS, TPT:NAIS (SEQ ID NO: 84113):LKKYR (SEQ ID NO: 84229):VVD, VPA:NAIS (SEQ ID NO: 84113):LKKYR (SEQ ID NO: 84229):VVE, APV:NAIS (SEQ ID NO: 84113):LKKYR (SEQ ID NO: 84229):VEE, VPQ:NAIS (SEQ ID NO: 84113):LKKYR (SEQ ID NO: 84229):VRS, VSQ:NAIS (SEQ ID NO: 84113):LKKYR (SEQ ID NO: 84229):VKS, VPQ:NAIS (SEQ ID NO: 84113):LKKYR (SEQ ID NO: 84229):VKS, VPT:NAIS (SEQ ID NO: 84113):LKKYR (SEQ ID NO: 84229):QHN, VPT:NAIS (SEQ ID NO: 84113):LKKYR (SEQ ID NO: 84229):EHS, SRV:NAIS (SEQ ID NO: 84113):LKKYR (SEQ ID NO: 84229):EEH, TQV:NAIS (SEQ ID NO: 84113):LKKYR (SEQ ID NO: 84229):EDH, APT:SATS (SEQ ID NO: 84117):LRKHR (SEQ ID NO: 84233):VVK, VPT:SATS (SEQ ID NO: 84117):LRKHR (SEQ ID NO: 84233):VVE, VPE:SATS (SEQ ID NO: 84117):LRKHR (SEQ ID NO: 84233):TVE, APT:SATS (SEQ ID NO: 84117):LRKHR (SEQ ID NO: 84233):VVR, VPT:SATS (SEQ ID NO: 84117):LRKHR (SEQ ID NO: 84233):VAE, VPT:SATS (SEQ ID NO: 84117):LRKHR (SEQ ID NO: 84233):AVS, TPT:SATS (SEQ ID NO: 84117):LRKHR (SEQ ID NO: 84233):VVD, VPA:SATS (SEQ ID NO: 84117):LRKHR (SEQ ID NO: 84233):VVE, APV:SATS (SEQ ID NO: 84117):LRKHR (SEQ ID NO: 84233):VEE, VPQ:SATS (SEQ ID NO: 84117):LRKHR (SEQ ID NO: 84233):VRS, VSQ:SATS (SEQ ID NO: 84117):LRKHR (SEQ ID NO: 84233):VKS, VPQ:SATS (SEQ ID NO: 84117):LRKHR (SEQ ID NO: 84233):VKS, VPT:SATS (SEQ ID NO: 84117):LRKHR (SEQ ID NO: 84233):QHN, VPT:SATS (SEQ ID NO: 84117):LRKHR (SEQ ID NO: 84233):EHS, SRV:SATS (SEQ ID NO: 84117):LRKHR (SEQ ID NO: 84233):EEH, TQV:SATS (SEQ ID NO: 84117):LRKHR (SEQ ID NO: 84233):EDH, VPT:SPIS (SEQ ID NO: 84120):LKYHY (SEQ ID NO: 84232):VAE, VPT:SPIS (SEQ ID NO: 84120):LKYHY (SEQ ID NO: 84232):VVE, VPE:SPIS (SEQ ID NO: 84120):LKYHY (SEQ ID NO: 84232):TVE, APT:SPIS (SEQ ID NO: 84120):LKYHY (SEQ ID NO: 84232):VVR, APT:SPIS (SEQ ID NO: 84120):LKYHY (SEQ ID NO: 84232):VVK, VPT:SPIS (SEQ ID NO: 84120):LKYHY (SEQ ID NO: 84232):AVS, TPT:SPIS (SEQ ID NO: 84120):LKYHY (SEQ ID NO: 84232):VVD, VPA:SPIS (SEQ ID NO: 84120):LKYHY (SEQ ID NO: 84232):VVE, APV:SPIS (SEQ ID NO: 84120):LKYHY (SEQ ID NO: 84232):VEE, VPQ:SPIS (SEQ ID NO: 84120):LKYHY (SEQ ID NO: 84232):VRS, VSQ:SPIS (SEQ ID NO: 84120):LKYHY (SEQ ID NO: 84232):VKS, VPQ:SPIS (SEQ ID NO: 84120):LKYHY (SEQ ID NO: 84232):VKS, VPT:SPIS (SEQ ID NO: 84120):LKYHY (SEQ ID NO: 84232):QHN, VPT:SPIS (SEQ ID NO: 84120):LKYHY (SEQ ID NO: 84232):EHS, SRV:SPIS (SEQ ID NO: 84120):LKYHY (SEQ ID NO: 84232):EEH, TQV:SPIS (SEQ ID NO: 84120):LKYHY (SEQ ID NO: 84232):EDH, VPT:EPIS (SEQ ID NO: 84109):KFKYE (SEQ ID NO: 84211):AVS, VPT:EPIS (SEQ ID NO: 84109):KFKYE (SEQ ID NO: 84211):VVE, VPE:EPIS (SEQ ID NO: 84109):KFKYE (SEQ ID NO: 84211):TVE, APT:EPIS (SEQ ID NO: 84109):KFKYE (SEQ ID NO: 84211):VVR, APT:EPIS (SEQ ID NO: 84109):KFKYE (SEQ ID NO: 84211):VVK, VPT:EPIS (SEQ ID NO: 84109):KFKYE (SEQ ID NO: 84211):VAE, TPT:EPIS (SEQ ID NO: 84109):KFKYE (SEQ ID NO: 84211):VVD, VPA:EPIS (SEQ ID NO: 84109):KFKYE (SEQ ID NO: 84211):VVE, APV:EPIS (SEQ ID NO: 84109):KFKYE (SEQ ID NO: 84211):VEE, VPQ:EPIS (SEQ ID NO: 84109):KFKYE (SEQ ID NO: 84211):VRS, VSQ:EPIS (SEQ ID NO: 84109):KFKYE (SEQ ID NO: 84211):VKS, VPQ:EPIS (SEQ ID NO: 84109):KFKYE (SEQ ID NO: 84211):VKS, VPT:EPIS (SEQ ID NO: 84109):KFKYE (SEQ ID NO: 84211):QHN, VPT:EPIS (SEQ ID NO: 84109):KFKYE (SEQ ID NO: 84211):EHS, SRV:EPIS (SEQ ID NO: 84109):KFKYE (SEQ ID NO: 84211):EEH, TQV:EPIS (SEQ ID NO: 84109):KFKYE (SEQ ID NO: 84211):EDH, TPT:SPIN (SEQ ID NO: 84119):YGKIP (SEQ ID NO: 84397):VVD, VPT:SPIN (SEQ ID NO: 84119):YGKIP (SEQ ID NO: 84397):VVE, VPE:SPIN (SEQ ID NO: 84119):YGKIP (SEQ ID NO: 84397):TVE, APT:SPIN (SEQ ID NO: 84119):YGKIP (SEQ ID NO: 84397):VVR, APT:SPIN (SEQ ID NO: 84119):YGKIP (SEQ ID NO: 84397):VVK, VPT:SPIN (SEQ ID NO: 84119):YGKIP (SEQ ID NO: 84397):VAE, VPT:SPIN (SEQ ID NO: 84119):YGKIP (SEQ ID NO: 84397):AVS, VPA:SPIN (SEQ ID NO: 84119):YGKIP (SEQ ID NO: 84397):VVE, APV:SPIN (SEQ ID NO: 84119):YGKIP (SEQ ID NO: 84397):VEE, VPQ:SPIN (SEQ ID NO: 84119):YGKIP (SEQ ID NO: 84397):VRS, VSQ:SPIN (SEQ ID NO: 84119):YGKIP (SEQ ID NO: 84397):VKS, VPQ:SPIN (SEQ ID NO: 84119):YGKIP (SEQ ID NO: 84397):VKS, VPT:SPIN (SEQ ID NO: 84119):YGKIP (SEQ ID NO: 84397):QHN, VPT:SPIN (SEQ ID NO: 84119):YGKIP (SEQ ID NO: 84397):EHS, SRV:SPIN (SEQ ID NO: 84119):YGKIP (SEQ ID NO: 84397):EEH, TQV:SPIN (SEQ ID NO: 84119):YGKIP (SEQ ID NO: 84397):EDH, VPA:SPIS (SEQ ID NO: 84120):YKQYE (SEQ ID NO: 84398):VVE, VPT:SPIS (SEQ ID NO: 84120):YKQYE (SEQ ID NO: 84398):VVE, VPE:SPIS (SEQ ID NO: 84120):YKQYE (SEQ ID NO: 84398):TVE, APT:SPIS (SEQ ID NO: 84120):YKQYE (SEQ ID NO: 84398):VVR, APT:SPIS (SEQ ID NO: 84120):YKQYE (SEQ ID NO: 84398):VVK, VPT:SPIS (SEQ ID NO: 84120):YKQYE (SEQ ID NO: 84398):VAE, VPT:SPIS (SEQ ID NO: 84120):YKQYE (SEQ ID NO: 84398):AVS, TPT:SPIS (SEQ ID NO: 84120):YKQYE (SEQ ID NO: 84398):VVD, APV:SPIS (SEQ ID NO: 84120):YKQYE (SEQ ID NO: 84398):VEE, VPQ:SPIS (SEQ ID NO: 84120):YKQYE (SEQ ID NO: 84398):VRS, VSQ:SPIS (SEQ ID NO: 84120):YKQYE (SEQ ID NO: 84398):VKS, VPQ:SPIS (SEQ ID NO: 84120):YKQYE (SEQ ID NO: 84398):VKS, VPT:SPIS (SEQ ID NO: 84120):YKQYE (SEQ ID NO: 84398):QHN, VPT:SPIS (SEQ ID NO: 84120):YKQYE (SEQ ID NO: 84398):EHS, SRV:SPIS (SEQ ID NO: 84120):YKQYE (SEQ ID NO: 84398):EEH, TQV:SPIS (SEQ ID NO: 84120):YKQYE (SEQ ID NO: 84398):EDH, APV:KPLS (SEQ ID NO: 84112):DHHKD (SEQ ID NO: 84149):VEE, VPT:KPLS (SEQ ID NO: 84112):DHHKD (SEQ ID NO: 84149):VVE, VPE:KPLS (SEQ ID NO: 84112):DHHKD (SEQ ID NO: 84149):TVE, APT:KPLS (SEQ ID NO: 84112):DHHKD (SEQ ID NO: 84149):VVR, APT:KPLS (SEQ ID NO: 84112):DHHKD (SEQ ID NO: 84149):VVK, VPT:KPLS (SEQ ID NO: 84112):DHHKD (SEQ ID NO: 84149):VAE, VPT:KPLS (SEQ ID NO: 84112):DHHKD (SEQ ID NO: 84149):AVS, TPT:KPLS (SEQ ID NO: 84112):DHHKD (SEQ ID NO: 84149):VVD, VPA:KPLS (SEQ ID NO: 84112):DHHKD (SEQ ID NO: 84149):VVE, VPQ:KPLS (SEQ ID NO: 84112):DHHKD (SEQ ID NO: 84149):VRS, VSQ:KPLS (SEQ ID NO: 84112):DHHKD (SEQ ID NO: 84149):VKS, VPQ:KPLS (SEQ ID NO: 84112):DHHKD (SEQ ID NO: 84149):VKS, VPT:KPLS (SEQ ID NO: 84112):DHHKD (SEQ ID NO: 84149):QHN, VPT:KPLS (SEQ ID NO: 84112):DHHKD (SEQ ID NO: 84149):EHS, SRV:KPLS (SEQ ID NO: 84112):DHHKD (SEQ ID NO: 84149):EEH, TQV:KPLS (SEQ ID NO: 84112):DHHKD (SEQ ID NO: 84149):EDH, VPQ:EPLP (SEQ ID NO: 84110):EQLSN (SEQ ID NO: 84178):VRS, VPT:EPLP (SEQ ID NO: 84110):EQLSN (SEQ ID NO: 84178):VVE, VPE:EPLP (SEQ ID NO: 84110):EQLSN (SEQ ID NO: 84178):TVE, APT:EPLP (SEQ ID NO: 84110):EQLSN (SEQ ID NO: 84178):VVR, APT:EPLP (SEQ ID NO: 84110):EQLSN (SEQ ID NO: 84178):VVK, VPT:EPLP (SEQ ID NO: 84110):EQLSN (SEQ ID NO: 84178):VAE, VPT:EPLP (SEQ ID NO: 84110):EQLSN (SEQ ID NO: 84178):AVS, TPT:EPLP (SEQ ID NO: 84110):EQLSN (SEQ ID NO: 84178):VVD, VPA:EPLP (SEQ ID NO: 84110):EQLSN (SEQ ID NO: 84178):VVE, APV:EPLP (SEQ ID NO: 84110):EQLSN (SEQ ID NO: 84178):VEE, VSQ:EPLP (SEQ ID NO: 84110):EQLSN (SEQ ID NO: 84178):VKS, VPQ:EPLP (SEQ ID NO: 84110):EQLSN (SEQ ID NO: 84178):VKS, VPT:EPLP (SEQ ID NO: 84110):EQLSN (SEQ ID NO: 84178):QHN, VPT:EPLP (SEQ ID NO: 84110):EQLSN (SEQ ID NO: 84178):EHS, SRV:EPLP (SEQ ID NO: 84110):EQLSN (SEQ ID NO: 84178):EEH, TQV:EPLP (SEQ ID NO: 84110):EQLSN (SEQ ID NO: 84178):EDH, VSQ:EPLT (SEQ ID NO: 84111):EQLSN (SEQ ID NO: 84178):VKS, VPT:EPLT (SEQ ID NO: 84111):EQLSN (SEQ ID NO: 84178):VVE, VPE:EPLT (SEQ ID NO: 84111):EQLSN (SEQ ID NO: 84178):TVE, APT:EPLT (SEQ ID NO: 84111):EQLSN (SEQ ID NO: 84178):VVR, APT:EPLT (SEQ ID NO: 84111):EQLSN (SEQ ID NO: 84178):VVK, VPT:EPLT (SEQ ID NO: 84111):EQLSN (SEQ ID NO: 84178):VAE, VPT:EPLT (SEQ ID NO: 84111):EQLSN (SEQ ID NO: 84178):AVS, TPT:EPLT (SEQ ID NO: 84111):EQLSN (SEQ ID NO: 84178):VVD, VPA:EPLT (SEQ ID NO: 84111):EQLSN (SEQ ID NO: 84178):VVE, APV:EPLT (SEQ ID NO: 84111):EQLSN (SEQ ID NO: 84178):VEE, VPQ:EPLT (SEQ ID NO: 84111):EQLSN (SEQ ID NO: 84178):VRS, VPQ:EPLT (SEQ ID NO: 84111):EQLSN (SEQ ID NO: 84178):VKS, VPT:EPLT (SEQ ID NO: 84111):EQLSN (SEQ ID NO: 84178):QHN, VPT:EPLT (SEQ ID NO: 84111):EQLSN (SEQ ID NO: 84178):EHS, SRV:EPLT (SEQ ID NO: 84111):EQLSN (SEQ ID NO: 84178):EEH, TQV:EPLT (SEQ ID NO: 84111):EQLSN (SEQ ID NO: 84178):EDH, VPT:SNIT (SEQ ID NO: 84118):IGEMS (SEQ ID NO: 84209):QHN, VPT:SNIT (SEQ ID NO: 84118):IGEMS (SEQ ID NO: 84209):VVE, VPE:SNIT (SEQ ID NO: 84118):IGEMS (SEQ ID NO: 84209):TVE, APT:SNIT (SEQ ID NO: 84118):IGEMS (SEQ ID NO: 84209):VVR, APT:SNIT (SEQ ID NO: 84118):IGEMS (SEQ ID NO: 84209):VVK, VPT:SNIT (SEQ ID NO: 84118):IGEMS (SEQ ID NO: 84209):VAE, VPT:SNIT (SEQ ID NO: 84118):IGEMS (SEQ ID NO: 84209):AVS, TPT:SNIT (SEQ ID NO: 84118):IGEMS (SEQ ID NO: 84209):VVD, VPA:SNIT (SEQ ID NO: 84118):IGEMS (SEQ ID NO: 84209):VVE, APV:SNIT (SEQ ID NO: 84118):IGEMS (SEQ ID NO: 84209):VEE, VPQ:SNIT (SEQ ID NO: 84118):IGEMS (SEQ ID NO: 84209):VRS, VSQ:SNIT (SEQ ID NO: 84118):IGEMS (SEQ ID NO: 84209):VKS, VPQ:SNIT (SEQ ID NO: 84118):IGEMS (SEQ ID NO: 84209):VKS, VPT:SNIT (SEQ ID NO: 84118):IGEMS (SEQ ID NO: 84209):EHS, SRV:SNIT (SEQ ID NO: 84118):IGEMS (SEQ ID NO: 84209):EEH, TQV:SNIT (SEQ ID NO: 84118):IGEMS (SEQ ID NO: 84209):EDH, VPT:SNIT (SEQ ID NO: 84118):LGEMS (SEQ ID NO: 84228):EHS, VPT:SNIT (SEQ ID NO: 84118):LGEMS (SEQ ID NO: 84228):VVE, VPE:SNIT (SEQ ID NO: 84118):LGEMS (SEQ ID NO: 84228):TVE, APT:SNIT (SEQ ID NO: 84118):LGEMS (SEQ ID NO: 84228):VVR, APT:SNIT (SEQ ID NO: 84118):LGEMS (SEQ ID NO: 84228):VVK, VPT:SNIT (SEQ ID NO: 84118):LGEMS (SEQ ID NO: 84228):VAE, VPT:SNIT (SEQ ID NO: 84118):LGEMS (SEQ ID NO: 84228):AVS, TPT:SNIT (SEQ ID NO: 84118):LGEMS (SEQ ID NO: 84228):VVD, VPA:SNIT (SEQ ID NO: 84118):LGEMS (SEQ ID NO: 84228):VVE, APV:SNIT (SEQ ID NO: 84118):LGEMS (SEQ ID NO: 84228):VEE, VPQ:SNIT (SEQ ID NO: 84118):LGEMS (SEQ ID NO: 84228):VRS, VSQ:SNIT (SEQ ID NO: 84118):LGEMS (SEQ ID NO: 84228):VKS, VPQ:SNIT (SEQ ID NO: 84118):LGEMS (SEQ ID NO: 84228):VKS, VPT:SNIT (SEQ ID NO: 84118):LGEMS (SEQ ID NO: 84228):QHN, SRV:SNIT (SEQ ID NO: 84118):LGEMS (SEQ ID NO: 84228):EEH, TQV:SNIT (SEQ ID NO: 84118):LGEMS (SEQ ID NO: 84228):EDH, SRV:RSVK (SEQ ID NO: 84115):KEVQV (SEQ ID NO: 84210):EEH, VPT:RSVK (SEQ ID NO: 84115):KEVQV (SEQ ID NO: 84210):VVE, VPE:RSVK (SEQ ID NO: 84115):KEVQV (SEQ ID NO: 84210):TVE, APT:RSVK (SEQ ID NO: 84115):KEVQV (SEQ ID NO: 84210):VVR, APT:RSVK (SEQ ID NO: 84115):KEVQV (SEQ ID NO: 84210):VVK, VPT:RSVK (SEQ ID NO: 84115):KEVQV (SEQ ID NO: 84210):VAE, VPT:RSVK (SEQ ID NO: 84115):KEVQV (SEQ ID NO: 84210):AVS, TPT:RSVK (SEQ ID NO: 84115):KEVQV (SEQ ID NO: 84210):VVD, VPA:RSVK (SEQ ID NO: 84115):KEVQV (SEQ ID NO: 84210):VVE, APV:RSVK (SEQ ID NO: 84115):KEVQV (SEQ ID NO: 84210):VEE, VPQ:RSVK (SEQ ID NO: 84115):KEVQV (SEQ ID NO: 84210):VRS, VSQ:RSVK (SEQ ID NO: 84115):KEVQV (SEQ ID NO: 84210):VKS, VPQ:RSVK (SEQ ID NO: 84115):KEVQV (SEQ ID NO: 84210):VKS, VPT:RSVK (SEQ ID NO: 84115):KEVQV (SEQ ID NO: 84210):QHN, VPT:RSVK (SEQ ID NO: 84115):KEVQV (SEQ ID NO: 84210):EHS, TQV:RSVK (SEQ ID NO: 84115):KEVQV (SEQ ID NO: 84210):EDH, TQV:RPVQ (SEQ ID NO: 84114):KKATV (SEQ ID NO: 84212):EDH, VPT:RPVQ (SEQ ID NO: 84114):KKATV (SEQ ID NO: 84212):VVE, VPE:RPVQ (SEQ ID NO: 84114):KKATV (SEQ ID NO: 84212):TVE, APT:RPVQ (SEQ ID NO: 84114):KKATV (SEQ ID NO: 84212):VVR, APT:RPVQ (SEQ ID NO: 84114):KKATV (SEQ ID NO: 84212):VVK, VPT:RPVQ (SEQ ID NO: 84114):KKATV (SEQ ID NO: 84212):VAE, VPT:RPVQ (SEQ ID NO: 84114):KKATV (SEQ ID NO: 84212):AVS, TPT:RPVQ (SEQ ID NO: 84114):KKATV (SEQ ID NO: 84212):VVD, VPA:RPVQ (SEQ ID NO: 84114):KKATV (SEQ ID NO: 84212):VVE, APV:RPVQ (SEQ ID NO: 84114):KKATV (SEQ ID NO: 84212):VEE, VPQ:RPVQ (SEQ ID NO: 84114):KKATV (SEQ ID NO: 84212):VRS, VSQ:RPVQ (SEQ ID NO: 84114):KKATV (SEQ ID NO: 84212):VKS, VPQ:RPVQ (SEQ ID NO: 84114):KKATV (SEQ ID NO: 84212):VKS, VPT:RPVQ (SEQ ID NO: 84114):KKATV (SEQ ID NO: 84212):QHN, VPT:RPVQ (SEQ ID NO: 84114):KKATV (SEQ ID NO: 84212):EHS and SRV:RPVQ (SEQ ID NO: 84114):KKATV (SEQ ID NO: 84212):EEH.

[0396] In particular, in certain embodiments, the quadruplet PEP3:PEP12:PEP2:PEP4 is selected from the group consisting of VPT:SAIS-AA¹⁷-LYL (SEQ ID NO: 84881):LKNYQ (SEQ ID NO: 84230):VVE, VPE:SAIS-AA¹⁷-LYL (SEQ ID NO: 84881):LKNYQ (SEQ ID NO: 84230):TVE, APT:SAIS-AA¹⁷-LYL (SEQ ID NO: 84881):LKNYQ (SEQ ID NO: 84230):VVR, APT:SAIS-AA¹⁷-LYL (SEQ ID NO: 84881):LKNYQ (SEQ ID NO: 84230):VVK, VPT:SAIS-AA¹⁷-LYL (SEQ ID NO: 84881):LKNYQ (SEQ ID NO: 84230):VAE, VPT:SAIS-AA¹⁷-LYL (SEQ ID NO: 84881):LKNYQ (SEQ ID NO: 84230):AVS, TPT:SAIS-AA¹⁷-LYL (SEQ ID NO: 84881):LKNYQ (SEQ ID NO: 84230):VVD, VPA:SAIS-AA¹⁷-LYL (SEQ ID NO: 84881):LKNYQ (SEQ ID NO: 84230):VVE, APV:SAIS-AA¹⁷-LYL (SEQ ID NO: 84881):LKNYQ (SEQ ID NO: 84230):VEE, VPQ:SAIS-AA¹⁷-LYL (SEQ ID NO: 84881):LKNYQ (SEQ ID NO: 84230):VRS, VSQ:SAIS-AA¹⁷-LYL (SEQ ID NO: 84881):LKNYQ (SEQ ID NO: 84230):VKS, VPQ:SAIS-AA¹⁷-LYL (SEQ ID NO: 84881):LKNYQ (SEQ ID NO: 84230):VKS, VPT:SAIS-AA¹⁷-LYL (SEQ ID NO: 84881):LKNYQ (SEQ ID NO: 84230):QHN, VPT:SAIS-AA¹⁷-LYL (SEQ ID NO: 84881):LKNYQ (SEQ ID NO: 84230):EHS, SRV:SAIS-AA¹⁷-LYL (SEQ ID NO: 84881):LKNYQ (SEQ ID NO: 84230):EEH, TQV:SAIS-AA¹⁷-LYL (SEQ ID NO: 84881):LKNYQ (SEQ ID NO: 84230):EDH, VPE:SSLS-AA¹⁷-LFF (SEQ ID NO: 84889):LKVYP (SEQ ID NO: 84231):TVE, VPT:SSLS-AA¹⁷-LFF (SEQ ID NO: 84889):LKVYP (SEQ ID NO: 84231):VVE, APT:SSLS-AA¹⁷-LFF (SEQ ID NO: 84889):LKVYP (SEQ ID NO: 84231):VVR, APT:SSLS-AA¹⁷-LFF (SEQ ID NO: 84889):LKVYP (SEQ ID NO: 84231):VVK, VPT:SSLS-AA¹⁷-LFF (SEQ ID NO: 84889):LKVYP (SEQ ID NO: 84231):VAE, VPT:SSLS-AA¹⁷-LFF (SEQ ID NO: 84889):LKVYP (SEQ ID NO: 84231):AVS, TPT:SSLS-AA¹⁷-LFF (SEQ ID NO: 84889):LKVYP (SEQ ID NO: 84231):VVD, VPA:SSLS-AA¹⁷-LFF (SEQ ID NO: 84889):LKVYP (SEQ ID NO: 84231):VVE, APV:SSLS-AA¹⁷-LFF (SEQ ID NO: 84889):LKVYP (SEQ ID NO: 84231):VEE, VPQ:SSLS-AA¹⁷-LFF (SEQ ID NO: 84889):LKVYP (SEQ ID NO: 84231):VRS, VSQ:SSLS-AA¹⁷-LFF (SEQ ID NO: 84889):LKVYP (SEQ ID NO: 84231):VKS, VPQ:SSLS-AA¹⁷-LFF (SEQ ID NO: 84889):LKVYP (SEQ ID NO: 84231):VKS, VPT:SSLS-AA¹⁷-LFF (SEQ ID NO: 84889):LKVYP (SEQ ID NO: 84231):QHN, VPT:SSLS-AA¹⁷-LFF (SEQ ID NO: 84889):LKVYP (SEQ ID NO: 84231):EHS, SRV:SSLS-AA¹⁷-LFF (SEQ ID NO: 84889):LKVYP (SEQ ID NO: 84231):EEH, TQV:SSLS-AA¹⁷-LFF (SEQ ID NO: 84889):LKVYP (SEQ ID NO: 84231):EDH, APT:NAIS-AA¹⁷-LYF (SEQ ID NO: 84878):LKKYR (SEQ ID NO: 84229):VVR, VPT:NAIS-AA¹⁷-LYF (SEQ ID NO: 84878):LKKYR (SEQ ID NO: 84229):VVE, VPE:NAIS-AA¹⁷-LYF (SEQ ID NO: 84878):LKKYR (SEQ ID NO: 84229):TVE, APT:NAIS-AA¹⁷-LYF (SEQ ID NO: 84878):LKKYR (SEQ ID NO: 84229):VVK, VPT:NAIS-AA¹⁷-LYF (SEQ ID NO: 84878):LKKYR (SEQ ID NO: 84229):VAE, VPT:NAIS-AA¹⁷-LYF (SEQ ID NO: 84878):LKKYR (SEQ ID NO: 84229):AVS, TPT:NAIS-AA¹⁷-LYF (SEQ ID NO: 84878):LKKYR (SEQ ID NO: 84229):VVD, VPA:NAIS-AA¹⁷-LYF (SEQ ID NO: 84878):LKKYR (SEQ ID NO: 84229):VVE, APV:NAIS-AA¹⁷-LYF (SEQ ID NO: 84878):LKKYR (SEQ ID NO: 84229):VEE, VPQ:NAIS-AA¹⁷-LYF (SEQ ID NO: 84878):LKKYR (SEQ ID NO: 84229):VRS, VSQ:NAIS-AA¹⁷-LYF (SEQ ID NO: 84878):LKKYR (SEQ ID NO: 84229):VKS, VPQ:NAIS-AA¹⁷-LYF (SEQ ID NO: 84878):LKKYR (SEQ ID NO: 84229):VKS, VPT:NAIS-AA¹⁷-LYF (SEQ ID NO: 84878):LKKYR (SEQ ID NO: 84229):QHN, VPT:NAIS-AA¹⁷-LYF (SEQ ID NO: 84878):LKKYR (SEQ ID NO: 84229):EHS, SRV:NAIS-AA¹⁷-LYF (SEQ ID NO: 84878):LKKYR (SEQ ID NO: 84229):EEH, TQV:NAIS-AA¹⁷-LYF (SEQ ID NO: 84878):LKKYR (SEQ ID NO: 84229):EDH, APT:SATS-AA¹⁷-LYY (SEQ ID NO: 84882):LRKHR (SEQ ID NO: 84233):VVK, VPT:SATS-AA¹⁷-LYY (SEQ ID NO: 84882):LRKHR (SEQ ID NO: 84233):VVE, VPE:SATS-AA¹⁷-LYY (SEQ ID NO: 84882):LRKHR (SEQ ID NO: 84233):TVE, APT:SATS-AA¹⁷-LYY (SEQ ID NO: 84882):LRKHR (SEQ ID NO: 84233):VVR, VPT:SATS-AA¹⁷-LYY (SEQ ID NO: 84882):LRKHR (SEQ ID NO: 84233):VAE, VPT:SATS-AA¹⁷-LYY (SEQ ID NO: 84882):LRKHR (SEQ ID NO: 84233):AVS, TPT:SATS-AA¹⁷-LYY (SEQ ID NO: 84882):LRKHR (SEQ ID NO: 84233):VVD, VPA:SATS-AA¹⁷-LYY (SEQ ID NO: 84882):LRKHR (SEQ ID NO: 84233):VVE, APV:SATS-AA¹⁷-LYY (SEQ ID NO: 84882):LRKHR (SEQ ID NO: 84233):VEE, VPQ:SATS-AA¹⁷-LYY (SEQ ID NO: 84882):LRKHR (SEQ ID NO: 84233):VRS, VSQ:SATS-AA¹⁷-LYY (SEQ ID NO: 84882):LRKHR (SEQ ID NO: 84233):VKS, VPQ:SATS-AA¹⁷-LYY (SEQ ID NO: 84882):LRKHR (SEQ ID NO: 84233):VKS, VPT:SATS-AA¹⁷-LYY (SEQ ID NO: 84882):LRKHR (SEQ ID NO: 84233):QHN, VPT:SATS-AA¹⁷-LYY (SEQ ID NO: 84882):LRKHR (SEQ ID NO: 84233):EHS, SRV:SATS-AA¹⁷-LYY (SEQ ID NO: 84882):LRKHR (SEQ ID NO: 84233):EEH, TQV:SATS-AA¹⁷-LYY (SEQ ID NO: 84882):LRKHR (SEQ ID NO: 84233):EDH, VPT:SPIS-AA¹⁷-LYK (SEQ ID NO: 84887):LKYHY (SEQ ID NO: 84232):VAE, VPT:SPIS-AA¹⁷-LYK (SEQ ID NO: 84887):LKYHY (SEQ ID NO: 84232):VVE, VPE:SPIS-AA¹⁷-LYK (SEQ ID NO: 84887):LKYHY (SEQ ID NO: 84232):TVE, APT:SPIS-AA¹⁷-LYK (SEQ ID NO: 84887):LKYHY (SEQ ID NO: 84232):VVR, APT:SPIS-AA¹⁷-LYK (SEQ ID NO: 84887):LKYHY (SEQ ID NO: 84232):VVK, VPT:SPIS-AA¹⁷-LYK (SEQ ID NO: 84887):LKYHY (SEQ ID NO: 84232):AVS, TPT:SPIS-AA¹⁷-LYK (SEQ ID NO: 84887):LKYHY (SEQ ID NO: 84232):VVD, VPA:SPIS-AA¹⁷-LYK (SEQ ID NO: 84887):LKYHY (SEQ ID NO: 84232):VVE, APV:SPIS-AA¹⁷-LYK (SEQ ID NO: 84887):LKYHY (SEQ ID NO: 84232):VEE, VPQ:SPIS-AA¹⁷-LYK (SEQ ID NO: 84887):LKYHY (SEQ ID NO: 84232):VRS, VSQ:SPIS-AA¹⁷-LYK (SEQ ID NO: 84887):LKYHY (SEQ ID NO: 84232):VKS, VPQ:SPIS-AA¹⁷-LYK (SEQ ID NO: 84887):LKYHY (SEQ ID NO: 84232):VKS, VPT:SPIS-AA¹⁷-LYK (SEQ ID NO: 84887):LKYHY (SEQ ID NO: 84232):QHN, VPT:SPIS-AA¹⁷-LYK (SEQ ID NO: 84887):LKYHY (SEQ ID NO: 84232):EHS, SRV:SPIS-AA¹⁷-LYK (SEQ ID NO: 84887):LKYHY (SEQ ID NO: 84232):EEH, TQV:SPIS-AA¹⁷-LYK (SEQ ID NO: 84887):LKYHY (SEQ ID NO: 84232):EDH, VPT:EPIS-AA¹⁷-LYL (SEQ ID NO: 84874):KFKYE (SEQ ID NO: 84211):AVS, VPT:EPIS-AA¹⁷-LYL (SEQ ID NO: 84874):KFKYE (SEQ ID NO: 84211):VVE, VPE:EPIS-AA¹⁷-LYL (SEQ ID NO: 84874):KFKYE (SEQ ID NO: 84211):TVE, APT:EPIS-AA¹⁷-LYL (SEQ ID NO: 84874):KFKYE (SEQ ID NO: 84211):VVR, APT:EPIS-AA¹⁷-LYL (SEQ ID NO: 84874):KFKYE (SEQ ID NO: 84211):VVK, VPT:EPIS-AA¹⁷-LYL (SEQ ID NO: 84874):KFKYE (SEQ ID NO: 84211):VAE, TPT:EPIS-AA¹⁷-LYL (SEQ ID NO: 84874):KFKYE (SEQ ID NO: 84211):VVD, VPA:EPIS-AA¹⁷-LYL (SEQ ID NO: 84874):KFKYE (SEQ ID NO: 84211):VVE, APV:EPIS-AA¹⁷-LYL (SEQ ID NO: 84874):KFKYE (SEQ ID NO: 84211):VEE, VPQ:EPIS-AA¹⁷-LYL (SEQ ID NO: 84874):KFKYE (SEQ ID NO: 84211):VRS, VSQ:EPIS-AA¹⁷-LYL (SEQ ID NO: 84874):KFKYE (SEQ ID NO: 84211):VKS, VPQ:EPIS-AA¹⁷-LYL (SEQ ID NO: 84874):KFKYE (SEQ ID NO: 84211):VKS, VPT:EPIS-AA¹⁷-LYL (SEQ ID NO: 84874):KFKYE (SEQ ID NO: 84211):QHN, VPT:EPIS-AA¹⁷-LYL (SEQ ID NO: 84874):KFKYE (SEQ ID NO: 84211):EHS, SRV:EPIS-AA¹⁷-LYL (SEQ ID NO: 84874):KFKYE (SEQ ID NO: 84211):EEH, TQV:EPIS-AA¹⁷-LYL (SEQ ID NO: 84874):KFKYE (SEQ ID NO: 84211):EDH, TPT:SPIN-AA¹⁷-LYF (SEQ ID NO: 84884):YGKIP (SEQ ID NO: 84397):VVD, VPT:SPIN-AA¹⁷-LYF (SEQ ID NO: 84884):YGKIP (SEQ ID NO: 84397):VVE, VPE:SPIN-AA¹⁷-LYF (SEQ ID NO: 84884):YGKIP (SEQ ID NO: 84397):TVE, APT:SPIN-AA¹⁷-LYF (SEQ ID NO: 84884):YGKIP (SEQ ID NO: 84397):VVR, APT:SPIN-AA¹⁷-LYF (SEQ ID NO: 84884):YGKIP (SEQ ID NO: 84397):VVK, VPT:SPIN-AA¹⁷-LYF (SEQ ID NO: 84884):YGKIP (SEQ ID NO: 84397):VAE, VPT:SPIN-AA¹⁷-LYF (SEQ ID NO: 84884):YGKIP (SEQ ID NO: 84397):AVS, VPA:SPIN-AA¹⁷-LYF (SEQ ID NO: 84884):YGKIP (SEQ ID NO: 84397):VVE, APV:SPIN-AA¹⁷-LYF (SEQ ID NO: 84884):YGKIP (SEQ ID NO: 84397):VEE, VPQ:SPIN-AA¹⁷-LYF (SEQ ID NO: 84884):YGKIP (SEQ ID NO: 84397):VRS, VSQ:SPIN-AA¹⁷-LYF (SEQ ID NO: 84884):YGKIP (SEQ ID NO: 84397):VKS, VPQ:SPIN-AA¹⁷-LYF (SEQ ID NO: 84884):YGKIP (SEQ ID NO: 84397):VKS, VPT:SPIN-AA¹⁷-LYF (SEQ ID NO: 84884):YGKIP (SEQ ID NO: 84397):QHN, VPT:SPIN-AA¹⁷-LYF (SEQ ID NO: 84884):YGKIP (SEQ ID NO: 84397):EHS, SRV:SPIN-AA¹⁷-LYF (SEQ ID NO: 84884):YGKIP (SEQ ID NO: 84397):EEH, TQV:SPIN-AA¹⁷-LYF (SEQ ID NO: 84884):YGKIP (SEQ ID NO: 84397):EDH, VPA:SPIS-AA¹⁷-LYI (SEQ ID NO: 84886):YKQYE (SEQ ID NO: 84398):VVE, VPT:SPIS-AA¹⁷-LYI (SEQ ID NO: 84886):YKQYE (SEQ ID NO: 84398):VVE, VPE:SPIS-AA¹⁷-LYI (SEQ ID NO: 84886):YKQYE (SEQ ID NO: 84398):TVE, APT:SPIS-AA¹⁷-LYI (SEQ ID NO: 84886):YKQYE (SEQ ID NO: 84398):VVR, APT:SPIS-AA¹⁷-LYI (SEQ ID NO: 84886):YKQYE (SEQ ID NO: 84398):VVK, VPT:SPIS-AA¹⁷-LYI (SEQ ID NO: 84886):YKQYE (SEQ ID NO: 84398):VAE, VPT:SPIS-AA¹⁷-LYI (SEQ ID NO: 84886):YKQYE (SEQ ID NO: 84398):AVS, TPT:SPIS-AA¹⁷-LYI (SEQ ID NO: 84886):YKQYE (SEQ ID NO: 84398):VVD, APV:SPIS-AA¹⁷-LYI (SEQ ID NO: 84886):YKQYE (SEQ ID NO: 84398):VEE, VPQ:SPIS-AA¹⁷-LYI (SEQ ID NO: 84886):YKQYE (SEQ ID NO: 84398):VRS, VSQ:SPIS-AA¹⁷-LYI (SEQ ID NO: 84886):YKQYE (SEQ ID NO: 84398):VKS, VPQ:SPIS-AA¹⁷-LYI (SEQ ID NO: 84886):YKQYE (SEQ ID NO: 84398):VKS, VPT:SPIS-AA¹⁷-LYI (SEQ ID NO: 84886):YKQYE (SEQ ID NO: 84398):QHN, VPT:SPIS-AA¹⁷-LYI (SEQ ID NO: 84886):YKQYE (SEQ ID NO: 84398):EHS, SRV:SPIS-AA¹⁷-LYI (SEQ ID NO: 84886):YKQYE (SEQ ID NO: 84398):EEH, TQV:SPIS-AA¹⁷-LYI (SEQ ID NO: 84886):YKQYE (SEQ ID NO: 84398):EDH, VPT:SPIS-AA¹⁷-LFI (SEQ ID NO: 84885):YKQYE (SEQ ID NO: 84398):VVE, VPE:SPIS-AA¹⁷-LFI (SEQ ID NO: 84885):YKQYE (SEQ ID NO: 84398):TVE, APT:SPIS-AA¹⁷-LFI (SEQ ID NO: 84885):YKQYE (SEQ ID NO: 84398):VVR, APT:SPIS-AA¹⁷-LFI (SEQ ID NO: 84885):YKQYE (SEQ ID NO: 84398):VVK, VPT:SPIS-AA¹⁷-LFI (SEQ ID NO: 84885):YKQYE (SEQ ID NO: 84398):VAE, VPT:SPIS-AA¹⁷-LFI (SEQ ID NO: 84885):YKQYE (SEQ ID NO: 84398):AVS, TPT:SPIS-AA¹⁷-LFI (SEQ ID NO: 84885):YKQYE (SEQ ID NO: 84398):VVD, VPA:SPIS-AA¹⁷-LFI (SEQ ID NO: 84885):YKQYE (SEQ ID NO: 84398):VVE, APV:SPIS-AA¹⁷-LFI (SEQ ID NO: 84885):YKQYE (SEQ ID NO: 84398):VEE, VPQ:SPIS-AA¹⁷-LFI (SEQ ID NO: 84885):YKQYE (SEQ ID NO: 84398):VRS, VSQ:SPIS-AA¹⁷-LFI (SEQ ID NO: 84885):YKQYE (SEQ ID NO: 84398):VKS, VPQ:SPIS-AA¹⁷-LFI (SEQ ID NO: 84885):YKQYE (SEQ ID NO: 84398):VKS, VPT:SPIS-AA¹⁷-LFI (SEQ ID NO: 84885):YKQYE (SEQ ID NO: 84398):QHN, VPT:SPIS-AA¹⁷-LFI (SEQ ID NO: 84885):YKQYE (SEQ ID NO: 84398):EHS, SRV:SPIS-AA¹⁷-LFI (SEQ ID NO: 84885):YKQYE (SEQ ID NO: 84398):EEH, TQV:SPIS-AA¹⁷-LFI (SEQ ID NO: 84885):YKQYE (SEQ ID NO: 84398):EDH, APV:KPLS-AA¹⁷-LYV (SEQ ID NO: 84877):DHHKD (SEQ ID NO: 84149):VEE, VPT:KPLS-AA¹⁷-LYV (SEQ ID NO: 84877):DHHKD (SEQ ID NO: 84149):VVE, VPE:KPLS-AA¹⁷-LYV (SEQ ID NO: 84877):DHHKD (SEQ ID NO: 84149):TVE, APT:KPLS-AA¹⁷-LYV (SEQ ID NO: 84877):DHHKD (SEQ ID NO: 84149):VVR, APT:KPLS-AA¹⁷-LYV (SEQ ID NO: 84877):DHHKD (SEQ ID NO: 84149):VVK, VPT:KPLS-AA¹⁷-LYV (SEQ ID NO: 84877):DHHKD (SEQ ID NO: 84149):VAE, VPT:KPLS-AA¹⁷-LYV (SEQ ID NO: 84877):DHHKD (SEQ ID NO: 84149):AVS, TPT:KPLS-AA¹⁷-LYV (SEQ ID NO: 84877):DHHKD (SEQ ID NO: 84149):VVD, VPA:KPLS-AA¹⁷-LYV (SEQ ID NO: 84877):DHHKD (SEQ ID NO: 84149):VVE, VPQ:KPLS-AA¹⁷-LYV (SEQ ID NO: 84877):DHHKD (SEQ ID NO: 84149):VRS, VSQ:KPLS-AA¹⁷-LYV (SEQ ID NO: 84877):DHHKD (SEQ ID NO: 84149):VKS, VPQ:KPLS-AA¹⁷-LYV (SEQ ID NO: 84877):DHHKD (SEQ ID NO: 84149):VKS, VPT:KPLS-AA¹⁷-LYV (SEQ ID NO: 84877):DHHKD (SEQ ID NO: 84149):QHN, VPT:KPLS-AA¹⁷-LYV (SEQ ID NO: 84877):DHHKD (SEQ ID NO: 84149):EHS, SRV:KPLS-AA¹⁷-LYV (SEQ ID NO: 84877):DHHKD (SEQ ID NO: 84149):EEH, TQV:KPLS-AA¹⁷-LYV (SEQ ID NO: 84877):DHHKD (SEQ ID NO: 84149):EDH, VPQ:EPLP-AA¹⁷-VYY (SEQ ID NO: 84875):EQLSN (SEQ ID NO: 84178):VRS, VPT:EPLP-AA¹⁷-VYY (SEQ ID NO: 84875):EQLSN (SEQ ID NO: 84178):VVE, VPE:EPLP-AA¹⁷-VYY (SEQ ID NO: 84875):EQLSN (SEQ ID NO: 84178):TVE, APT:EPLP-AA¹⁷-VYY (SEQ ID NO: 84875):EQLSN (SEQ ID NO: 84178):VVR, APT:EPLP-AA¹⁷-VYY (SEQ ID NO: 84875):EQLSN (SEQ ID NO: 84178):VVK, VPT:EPLP-AA¹⁷-VYY (SEQ ID NO: 84875):EQLSN (SEQ ID NO: 84178):VAE, VPT:EPLP-AA¹⁷-VYY (SEQ ID NO: 84875):EQLSN (SEQ ID NO: 84178):AVS, TPT:EPLP-AA¹⁷-VYY (SEQ ID NO: 84875):EQLSN (SEQ ID NO: 84178):VVD, VPA:EPLP-AA¹⁷-VYY (SEQ ID NO: 84875):EQLSN (SEQ ID NO: 84178):VVE, APV:EPLP-AA¹⁷-VYY (SEQ ID NO: 84875):EQLSN (SEQ ID NO: 84178):VEE, VSQ:EPLP-AA¹⁷-VYY (SEQ ID NO: 84875):EQLSN (SEQ ID NO: 84178):VKS, VPQ:EPLP-AA¹⁷-VYY (SEQ ID NO: 84875):EQLSN (SEQ ID NO: 84178):VKS, VPT:EPLP-AA¹⁷-VYY (SEQ ID NO: 84875):EQLSN (SEQ ID NO: 84178):QHN, VPT:EPLP-AA¹⁷-VYY (SEQ ID NO: 84875):EQLSN (SEQ ID NO: 84178):EHS, SRV:EPLP-AA¹⁷-VYY (SEQ ID NO: 84875):EQLSN (SEQ ID NO: 84178):EEH, TQV:EPLP-AA¹⁷-VYY (SEQ ID NO: 84875):EQLSN (SEQ ID NO: 84178):EDH, VSQ:EPLT-AA¹⁷-LYY (SEQ ID NO: 84876):EQLSN (SEQ ID NO: 84178):VKS, VPT:EPLT-AA¹⁷-LYY (SEQ ID NO: 84876):EQLSN (SEQ ID NO: 84178):VVE, VPE:EPLT-AA¹⁷-LYY (SEQ ID NO: 84876):EQLSN (SEQ ID NO: 84178):TVE, APT:EPLT-AA¹⁷-LYY (SEQ ID NO: 84876):EQLSN (SEQ ID NO: 84178):VVR, APT:EPLT-AA¹⁷-LYY (SEQ ID NO: 84876):EQLSN (SEQ ID NO: 84178):VVK, VPT:EPLT-AA¹⁷-LYY (SEQ ID NO: 84876):EQLSN (SEQ ID NO: 84178):VAE, VPT:EPLT-AA¹⁷-LYY (SEQ ID NO: 84876):EQLSN (SEQ ID NO: 84178):AVS, TPT:EPLT-AA¹⁷-LYY (SEQ ID NO: 84876):EQLSN (SEQ ID NO: 84178):VVD, VPA:EPLT-AA¹⁷-LYY (SEQ ID NO: 84876):EQLSN (SEQ ID NO: 84178):VVE, APV:EPLT-AA¹⁷-LYY (SEQ ID NO: 84876):EQLSN (SEQ ID NO: 84178):VEE, VPQ:EPLT-AA¹⁷-LYY (SEQ ID NO: 84876):EQLSN (SEQ ID NO: 84178):VRS, VPQ:EPLT-AA¹⁷-LYY (SEQ ID NO: 84876):EQLSN (SEQ ID NO: 84178):VKS, VPT:EPLT-AA¹⁷-LYY (SEQ ID NO: 84876):EQLSN (SEQ ID NO: 84178):QHN, VPT:EPLT-AA¹⁷-LYY (SEQ ID NO: 84876):EQLSN (SEQ ID NO: 84178):EHS, SRV:EPLT-AA¹⁷-LYY (SEQ ID NO: 84876):EQLSN (SEQ ID NO: 84178):EEH, TQV:EPLT-AA¹⁷-LYY (SEQ ID NO: 84876):EQLSN (SEQ ID NO: 84178):EDH, VPT:SNIT-AA¹⁷-QIM (SEQ ID NO: 84883):IGEMS (SEQ ID NO: 84209):QHN, VPT:SNIT-AA¹⁷-QIM (SEQ ID NO: 84883):IGEMS (SEQ ID NO: 84209):VVE, VPE:SNIT-AA¹⁷-QIM (SEQ ID NO: 84883):IGEMS (SEQ ID NO: 84209):TVE, APT:SNIT-AA¹⁷-QIM (SEQ ID NO: 84883):IGEMS (SEQ ID NO: 84209):VVR, APT:SNIT-AA¹⁷-QIM (SEQ ID NO: 84883):IGEMS (SEQ ID NO: 84209):VVK, VPT:SNIT-AA¹⁷-QIM (SEQ ID NO: 84883):IGEMS (SEQ ID NO: 84209):VAE, VPT:SNIT-AA¹⁷-QIM (SEQ ID NO: 84883):IGEMS (SEQ ID NO: 84209):AVS, TPT:SNIT-AA¹⁷-QIM (SEQ ID NO: 84883):IGEMS (SEQ ID NO: 84209):VVD, VPA:SNIT-AA¹⁷-QIM (SEQ ID NO: 84883):IGEMS (SEQ ID NO: 84209):VVE, APV:SNIT-AA¹⁷-QIM (SEQ ID NO: 84883):IGEMS (SEQ ID NO: 84209):VEE, VPQ:SNIT-AA¹⁷-QIM (SEQ ID NO: 84883):IGEMS (SEQ ID NO: 84209):VRS, VSQ:SNIT-AA¹⁷-QIM (SEQ ID NO: 84883):IGEMS (SEQ ID NO: 84209):VKS, VPQ:SNIT-AA¹⁷-QIM (SEQ ID NO: 84883):IGEMS (SEQ ID NO: 84209):VKS, VPT:SNIT-AA¹⁷-QIM (SEQ ID NO: 84883):IGEMS (SEQ ID NO: 84209):EHS, SRV:SNIT-AA¹⁷-QIM (SEQ ID NO: 84883):IGEMS (SEQ ID NO: 84209):EEH, TQV:SNIT-AA¹⁷-QIM (SEQ ID NO: 84883):IGEMS (SEQ ID NO: 84209):EDH, VPT:SNIT-AA¹⁷-QIM (SEQ ID NO: 84883):LGEMS (SEQ ID NO: 84228):EHS, VPT:SNIT-AA¹⁷-QIM (SEQ ID NO: 84883):LGEMS (SEQ ID NO: 84228):VVE, VPE:SNIT-AA¹⁷-QIM (SEQ ID NO: 84883):LGEMS (SEQ ID NO: 84228):TVE, APT:SNIT-AA¹⁷-QIM (SEQ ID NO: 84883):LGEMS (SEQ ID NO: 84228):VVR, APT:SNIT-AA¹⁷-QIM (SEQ ID NO: 84883):LGEMS (SEQ ID NO: 84228):VVK, VPT:SNIT-AA¹⁷-QIM (SEQ ID NO: 84883):LGEMS (SEQ ID NO: 84228):VAE, VPT:SNIT-AA¹⁷-QIM (SEQ ID NO: 84883):LGEMS (SEQ ID NO: 84228):AVS, TPT:SNIT-AA¹⁷-QIM (SEQ ID NO: 84883):LGEMS (SEQ ID NO: 84228):VVD, VPA:SNIT-AA¹⁷-QIM (SEQ ID NO: 84883):LGEMS (SEQ ID NO: 84228):VVE, APV:SNIT-AA¹⁷-QIM (SEQ ID NO: 84883):LGEMS (SEQ ID NO: 84228):VEE, VPQ:SNIT-AA¹⁷-QIM (SEQ ID NO: 84883):LGEMS (SEQ ID NO: 84228):VRS, VSQ:SNIT-AA¹⁷-QIM (SEQ ID NO: 84883):LGEMS (SEQ ID NO: 84228):VKS, VPQ:SNIT-AA¹⁷-QIM (SEQ ID NO: 84883):LGEMS (SEQ ID NO: 84228):VKS, VPT:SNIT-AA¹⁷-QIM (SEQ ID NO: 84883):LGEMS (SEQ ID NO: 84228):QHN, SRV:SNIT-AA¹⁷-QIM (SEQ ID NO: 84883):LGEMS (SEQ ID NO: 84228):EEH, TQV:SNIT-AA¹⁷-QIM (SEQ ID NO: 84883):LGEMS (SEQ ID NO: 84228):EDH, SRV:RSVK-AA¹⁷-AKV (SEQ ID NO: 84880):KEVQV (SEQ ID NO: 84210):EEH, VPT:RSVK-AA¹⁷-AKV (SEQ ID NO: 84880):KEVQV (SEQ ID NO: 84210):VVE, VPE:RSVK-AA¹⁷-AKV (SEQ ID NO: 84880):KEVQV (SEQ ID NO: 84210):TVE, APT:RSVK-AA¹⁷-AKV (SEQ ID NO: 84880):KEVQV (SEQ ID NO: 84210):VVR, APT:RSVK-AA¹⁷-AKV (SEQ ID NO: 84880):KEVQV (SEQ ID NO: 84210):VVK, VPT:RSVK-AA¹⁷-AKV (SEQ ID NO: 84880):KEVQV (SEQ ID NO: 84210):VAE, VPT:RSVK-AA¹⁷-AKV (SEQ ID NO: 84880):KEVQV (SEQ ID NO: 84210):AVS, TPT:RSVK-AA¹⁷-AKV (SEQ ID NO: 84880):KEVQV (SEQ ID NO: 84210):VVD, VPA:RSVK-AA¹⁷-AKV (SEQ ID NO: 84880):KEVQV (SEQ ID NO: 84210):VVE, APV:RSVK-AA¹⁷-AKV (SEQ ID NO: 84880):KEVQV (SEQ ID NO: 84210):VEE, VPQ:RSVK-AA¹⁷-AKV (SEQ ID NO: 84880):KEVQV (SEQ ID NO: 84210):VRS, VSQ:RSVK-AA¹⁷-AKV (SEQ ID NO: 84880):KEVQV (SEQ ID NO: 84210):VKS, VPQ:RSVK-AA¹⁷-AKV (SEQ ID NO: 84880):KEVQV (SEQ ID NO: 84210):VKS, VPT:RSVK-AA¹⁷-AKV (SEQ ID NO: 84880):KEVQV (SEQ ID NO: 84210):QHN, VPT:RSVK-AA¹⁷-AKV (SEQ ID NO: 84880):KEVQV (SEQ ID NO: 84210):EHS, TQV:RSVK-AA¹⁷-AKV (SEQ ID NO: 84880):KEVQV (SEQ ID NO: 84210):EDH, TQV:RPVQ-AA¹⁷-RKI (SEQ ID NO: 84879):KKATV (SEQ ID NO: 84212):EDH, VPT:RPVQ-AA¹⁷-RKI (SEQ ID NO: 84879):KKATV (SEQ ID NO: 84212):VVE, VPE:RPVQ-AA¹⁷-RKI (SEQ ID NO: 84879):KKATV (SEQ ID NO: 84212):TVE, APT:RPVQ-AA¹⁷-RKI (SEQ ID NO: 84879):KKATV (SEQ ID NO: 84212):VVR, APT:RPVQ-AA¹⁷-RKI (SEQ ID NO: 84879):KKATV (SEQ ID NO: 84212):VVK, VPT:RPVQ-AA¹⁷-RKI (SEQ ID NO: 84879):KKATV (SEQ ID NO: 84212):VAE, VPT:RPVQ-AA¹⁷-RKI (SEQ ID NO: 84879):KKATV (SEQ ID NO: 84212):AVS, TPT:RPVQ-AA¹⁷-RKI (SEQ ID NO: 84879):KKATV (SEQ ID NO: 84212):VVD, VPA:RPVQ-AA¹⁷-RKI (SEQ ID NO: 84879):KKATV (SEQ ID NO: 84212):VVE, APV:RPVQ-AA¹⁷-RKI (SEQ ID NO: 84879):KKATV (SEQ ID NO: 84212):VEE, VPQ:RPVQ-AA¹⁷-RKI (SEQ ID NO: 84879):KKATV (SEQ ID NO: 84212):VRS, VSQ:RPVQ-AA¹⁷-RKI (SEQ ID NO: 84879):KKATV (SEQ ID NO: 84212):VKS, VPQ:RPVQ-AA¹⁷-RKI (SEQ ID NO: 84879):KKATV (SEQ ID NO: 84212):VKS, VPT:RPVQ-AA¹⁷-RKI (SEQ ID NO: 84879):KKATV (SEQ ID NO: 84212):QHN, VPT:RPVQ-AA¹⁷-RKI (SEQ ID NO: 84879):KKATV (SEQ ID NO: 84212):EHS and SRV:RPVQ-AA17-RKI (SEQ ID NO: 84879):KKATV (SEQ ID NO: 84212):EEH; and wherein AA¹⁷ is selected from the group consisting of G, A, V, L, I, P, F, M, W, T and S (in particular is selected from the group consisting of M, I, L, V and T).

[0397] In particular, in certain embodiments, the quadruplet PEP5:PEP1:PEP2:PEP6 is selected from the group consisting of VPTKM (SEQ ID NO: 84382):SAIS (SEQ ID NO: 84116):LKNYQ (SEQ ID NO: 84230):NMVVE (SEQ ID NO: 84273), VPTEL (SEQ ID NO: 84378):SAIS (SEQ ID NO: 84116):LKNYQ (SEQ ID NO: 84230):EMVVE (SEQ ID NO: 84175), VPTKL (SEQ ID NO: 84381):SAIS (SEQ ID NO: 84116):LKNYQ (SEQ ID NO: 84230):NMVVE (SEQ ID NO: 84273), VPTQL (SEQ ID NO: 84384):SAIS (SEQ ID NO: 84116):LKNYQ (SEQ ID NO: 84230):NMVVE (SEQ ID NO: 84273), VPTKL (SEQ ID NO: 84381):SAIS (SEQ ID NO: 84116):LKNYQ (SEQ ID NO: 84230):EGMSVVE (SEQ ID NO: 84416), VPTKL (SEQ ID NO: 84381):SAIS (SEQ ID NO: 84116):LKNYQ (SEQ ID NO: 84230):GMVVE (SEQ ID NO: 84205), VPTKM (SEQ ID NO: 84382):SAIS (SEQ ID NO: 84116):LKNYQ (SEQ ID NO: 84230):GMVVE (SEQ ID NO: 84205), VPTRL (SEQ ID NO: 84385):SAIS (SEQ ID NO: 84116):LKNYQ (SEQ ID NO: 84230):DMVVE (SEQ ID NO: 84161), VPTKT (SEQ ID NO: 84383):SAIS (SEQ ID NO: 84116):LKNYQ (SEQ ID NO: 84230):MIVVE (SEQ ID NO: 84245), VPTAL (SEQ ID NO: 84375):SAIS (SEQ ID NO: 84116):LKNYQ (SEQ ID NO: 84230):MIVVE (SEQ ID NO: 84245), VPTDL (SEQ ID NO: 84376):SAIS (SEQ ID NO: 84116):LKNYQ (SEQ ID NO: 84230):MIVVE (SEQ ID NO: 84245), VPTDL (SEQ ID NO: 84376):SAIS (SEQ ID NO: 84116):LKNYQ (SEQ ID NO: 84230):MVVVE (SEQ ID NO: 84259), VPTEE (SEQ ID NO: 84377):SAIS (SEQ ID NO: 84116):LKNYQ (SEQ ID NO: 84230):FLVVE (SEQ ID NO: 84191), VPTGQ (SEQ ID NO: 84379):SAIS (SEQ ID NO: 84116):LKNYQ (SEQ ID NO: 84230):LEVVE (SEQ ID NO: 84225), VPTHH (SEQ ID NO: 84380):SAIS (SEQ ID NO: 84116):LKNYQ (SEQ ID NO: 84230):RLVVE (SEQ ID NO: 84288), VPTQL (SEQ ID NO: 84384):SAIS (SEQ ID NO: 84116):LKNYQ (SEQ ID NO: 84230):TLVVE (SEQ ID NO: 84317), VPEKM (SEQ ID NO: 84360):SAIS (SEQ ID NO: 84116):LKNYQ (SEQ ID NO: 84230):NMTVE (SEQ ID NO: 84267), APTKL (SEQ ID NO: 84131):SAIS (SEQ ID NO: 84116):LKNYQ (SEQ ID NO: 84230):NMVVR (SEQ ID NO: 84275), APTQL (SEQ ID NO: 84134):SAIS (SEQ ID NO: 84116):LKNYQ (SEQ ID NO: 84230):NMVVR (SEQ ID NO: 84275), APTKL (SEQ ID NO: 84131):SAIS (SEQ ID NO: 84116):LKNYQ (SEQ ID NO: 84230):NMVVK (SEQ ID NO: 84274), VPTKL (SEQ ID NO: 84381):SAIS (SEQ ID NO: 84116):LKNYQ (SEQ ID NO: 84230):EGMSVAE (SEQ ID NO: 84411), VPTKL (SEQ ID NO: 84381):SAIS (SEQ ID NO: 84116):LKNYQ (SEQ ID NO: 84230):GMAVS (SEQ ID NO: 84194), TPTKM (SEQ ID NO: 84327):SAIS (SEQ ID NO: 84116):LKNYQ (SEQ ID NO: 84230):GMVVD (SEQ ID NO: 84204), VPARL (SEQ ID NO: 84352):SAIS (SEQ ID NO: 84116):LKNYQ (SEQ ID NO: 84230):DMVVE (SEQ ID NO: 84161), APVKT (SEQ ID NO: 84144):SAIS (SEQ ID NO: 84116):LKNYQ (SEQ ID NO: 84230):MIVEE (SEQ ID NO: 84241), VPQAL (SEQ ID NO: 84364):SAIS (SEQ ID NO: 84116):LKNYQ (SEQ ID NO: 84230):MIVRS (SEQ ID NO: 84243), VSQDL (SEQ ID NO: 84387):SAIS (SEQ ID NO: 84116):LKNYQ (SEQ ID NO: 84230):MIVKS (SEQ ID NO: 84242), VPQDL (SEQ ID NO: 84365):SAIS (SEQ ID NO: 84116):LKNYQ (SEQ ID NO: 84230):MVVKS (SEQ ID NO: 84256), VPTEE (SEQ ID NO: 84377):SAIS (SEQ ID NO: 84116):LKNYQ (SEQ ID NO: 84230):FLQHN (SEQ ID NO: 84184), VPTGQ (SEQ ID NO: 84379):SAIS (SEQ ID NO: 84116):LKNYQ (SEQ ID NO: 84230):LEEHS (SEQ ID NO: 84217), SRVHH (SEQ ID NO: 84297):SAIS (SEQ ID NO: 84116):LKNYQ (SEQ ID NO: 84230):RLEEH (SEQ ID NO: 84279), TQVQL (SEQ ID NO: 84340):SAIS (SEQ ID NO: 84116):LKNYQ (SEQ ID NO: 84230):TLEDH (SEQ ID NO: 84307), VPEEL (SEQ ID NO: 84356):SSLS (SEQ ID NO: 84121):LKVYP (SEQ ID NO: 84231):DMTVE (SEQ ID NO: 84155), VPEEL (SEQ ID NO: 84356):SSLS (SEQ ID NO: 84121):LKVYP (SEQ ID NO: 84231):EMTVE (SEQ ID NO: 84169), VPEKL (SEQ ID NO: 84359):SSLS (SEQ ID NO: 84121):LKVYP (SEQ ID NO: 84231):NMTVE (SEQ ID NO: 84267), VPEQL (SEQ ID NO: 84362):SSLS (SEQ ID NO: 84121):LKVYP (SEQ ID NO: 84231):NMTVE (SEQ ID NO: 84267), VPEKL (SEQ ID NO: 84359):SSLS (SEQ ID NO: 84121):LKVYP (SEQ ID NO: 84231):EGMSTVE (SEQ ID NO: 84410), VPEKL (SEQ ID NO: 84359):SSLS (SEQ ID NO: 84121):LKVYP (SEQ ID NO: 84231):GMTVE (SEQ ID NO: 84199), VPEKM (SEQ ID NO: 84360):SSLS (SEQ ID NO: 84121):LKVYP (SEQ ID NO: 84231):GMTVE (SEQ ID NO: 84199), VPERL (SEQ ID NO: 84363):SSLS (SEQ ID NO: 84121):LKVYP (SEQ ID NO: 84231):DMTVE (SEQ ID NO: 84155), VPEKT (SEQ ID NO: 84361):SSLS (SEQ ID NO: 84121):LKVYP (SEQ ID NO: 84231):MITVE (SEQ ID NO: 84239), VPEAL (SEQ ID NO: 84353):SSLS (SEQ ID NO: 84121):LKVYP (SEQ ID NO: 84231):MITVE (SEQ ID NO: 84239), VPEDL (SEQ ID NO: 84354):SSLS (SEQ ID NO: 84121):LKVYP (SEQ ID NO: 84231):MITVE (SEQ ID NO: 84239), VPEDL (SEQ ID NO: 84354):SSLS (SEQ ID NO: 84121):LKVYP (SEQ ID NO: 84231):MVTVE (SEQ ID NO: 84253), VPEEE (SEQ ID NO: 84355):SSLS (SEQ ID NO: 84121):LKVYP (SEQ ID NO: 84231):FLTVE (SEQ ID NO: 84185), VPEGQ (SEQ ID NO: 84357):SSLS (SEQ ID NO: 84121):LKVYP (SEQ ID NO: 84231):LETVE (SEQ ID NO: 84219), VPEHH (SEQ ID NO: 84358):SSLS (SEQ ID NO: 84121):LKVYP (SEQ ID NO: 84231):RLTVE (SEQ ID NO: 84282), VPEQL (SEQ ID NO: 84362):SSLS (SEQ ID NO: 84121):LKVYP (SEQ ID NO: 84231):TLTVE (SEQ ID NO: 84311), VPTEL (SEQ ID NO: 84378):SSLS (SEQ ID NO: 84121):LKVYP (SEQ ID NO: 84231):DMVVE (SEQ ID NO: 84161), VPTEL (SEQ ID NO: 84378):SSLS (SEQ ID NO: 84121):LKVYP (SEQ ID NO: 84231):EMVVE (SEQ ID NO: 84175), APTKL (SEQ ID NO: 84131):SSLS (SEQ ID NO: 84121):LKVYP (SEQ ID NO: 84231):NMVVR (SEQ ID NO: 84275), APTQL (SEQ ID NO: 84134):SSLS (SEQ ID NO: 84121):LKVYP (SEQ ID NO: 84231):NMVVR (SEQ ID NO: 84275), APTKL (SEQ ID NO: 84131):SSLS (SEQ ID NO: 84121):LKVYP (SEQ ID NO: 84231):NMVVK (SEQ ID NO: 84274), VPTKL (SEQ ID NO: 84381):SSLS (SEQ ID NO: 84121):LKVYP (SEQ ID NO: 84231):EGMSVAE (SEQ ID NO: 84411), VPTKL (SEQ ID NO: 84381):SSLS (SEQ ID NO: 84121):LKVYP (SEQ ID NO: 84231):GMAVS (SEQ ID NO: 84194), TPTKM (SEQ ID NO: 84327):SSLS (SEQ ID NO: 84121):LKVYP (SEQ ID NO: 84231):GMVVD (SEQ ID NO: 84204), VPARL (SEQ ID NO: 84352):SSLS (SEQ ID NO: 84121):LKVYP (SEQ ID NO: 84231):DMVVE (SEQ ID NO: 84161), VPTRL (SEQ ID NO: 84385):SSLS (SEQ ID NO: 84121):LKVYP (SEQ ID NO: 84231):DMVVE (SEQ ID NO: 84161), APVKT (SEQ ID NO: 84144):SSLS (SEQ ID NO: 84121):LKVYP (SEQ ID NO: 84231):MIVEE (SEQ ID NO: 84241), VPQAL (SEQ ID NO: 84364):SSLS (SEQ ID NO: 84121):LKVYP (SEQ ID NO: 84231):MIVRS (SEQ ID NO: 84243), VSQDL (SEQ ID NO: 84387):SSLS (SEQ ID NO: 84121):LKVYP (SEQ ID NO: 84231):MIVKS (SEQ ID NO: 84242), VPQDL (SEQ ID NO: 84365):SSLS (SEQ ID NO: 84121):LKVYP (SEQ ID NO: 84231):MVVKS (SEQ ID NO: 84256), VPTEE (SEQ ID NO: 84377):SSLS (SEQ ID NO: 84121):LKVYP (SEQ ID NO: 84231):FLQHN (SEQ ID NO: 84184), VPTGQ (SEQ ID NO: 84379):SSLS (SEQ ID NO: 84121):LKVYP (SEQ ID NO: 84231):LEEHS (SEQ ID NO: 84217), SRVHH (SEQ ID NO: 84297):SSLS (SEQ ID NO: 84121):LKVYP (SEQ ID NO: 84231):RLEEH (SEQ ID NO: 84279), TQVQL (SEQ ID NO: 84340):SSLS (SEQ ID NO: 84121):LKVYP (SEQ ID NO: 84231):TLEDH (SEQ ID NO: 84307), VPTEL (SEQ ID NO: 84378):SAIS (SEQ ID NO: 84116):LKNYQ (SEQ ID NO: 84230):DMVVE (SEQ ID NO: 84161), APTEL (SEQ ID NO: 84128):NAIS (SEQ ID NO: 84113):LKKYR (SEQ ID NO: 84229):DMVVR (SEQ ID NO: 84163), APTKM (SEQ ID NO: 84132):NAIS (SEQ ID NO: 84113):LKKYR (SEQ ID NO: 84229):NMVVR (SEQ ID NO: 84275), APTEL (SEQ ID NO: 84128):NAIS (SEQ ID NO: 84113):LKKYR (SEQ ID NO: 84229):EMVVR (SEQ ID NO: 84177), APTKL (SEQ ID NO: 84131):NAIS (SEQ ID NO: 84113):LKKYR (SEQ ID NO: 84229):NMVVR (SEQ ID NO: 84275), APTQL (SEQ ID NO: 84134):NAIS (SEQ ID NO: 84113):LKKYR (SEQ ID NO: 84229):NMVVR (SEQ ID NO: 84275), APTKL (SEQ ID NO: 84131):NAIS (SEQ ID NO: 84113):LKKYR (SEQ ID NO: 84229):EGMSVVR (SEQ ID NO: 84418), APTKL (SEQ ID NO: 84131):NAIS (SEQ ID NO: 84113):LKKYR (SEQ ID NO: 84229):GMVVR (SEQ ID NO: 84207), APTKM (SEQ ID NO: 84132):NAIS (SEQ ID NO: 84113):LKKYR (SEQ ID NO: 84229):GMVVR (SEQ ID NO: 84207), APTRL (SEQ ID NO: 84135):NAIS (SEQ ID NO: 84113):LKKYR (SEQ ID NO: 84229):DMVVR (SEQ ID NO: 84163), APTKT (SEQ ID NO: 84133):NAIS (SEQ ID NO: 84113):LKKYR (SEQ ID NO: 84229):MIVVR (SEQ ID NO: 84247), APTAL (SEQ ID NO: 84125):NAIS (SEQ ID NO: 84113):LKKYR (SEQ ID NO: 84229):MIVVR (SEQ ID NO: 84247), APTDL (SEQ ID NO: 84126):NAIS (SEQ ID NO: 84113):LKKYR (SEQ ID NO: 84229):MIVVR (SEQ ID NO: 84247), APTDL (SEQ ID NO: 84126):NAIS (SEQ ID NO: 84113):LKKYR (SEQ ID NO: 84229):MVVVR (SEQ ID NO: 84261), APTEE (SEQ ID NO: 84127):NAIS (SEQ ID NO: 84113):LKKYR (SEQ ID NO: 84229):FLVVR (SEQ ID NO: 84193), APTGQ (SEQ ID NO: 84129):NAIS (SEQ ID NO: 84113):LKKYR (SEQ ID NO: 84229):LEVVR (SEQ ID NO: 84227), APTHH (SEQ ID NO: 84130):NAIS (SEQ ID NO: 84113):LKKYR (SEQ ID NO: 84229):RLVVR (SEQ ID NO: 84290), APTQL (SEQ ID NO: 84134):NAIS (SEQ ID NO: 84113):LKKYR (SEQ ID NO: 84229):TLVVR (SEQ ID NO: 84319), VPTEL (SEQ ID NO: 84378):NAIS (SEQ ID NO: 84113):LKKYR (SEQ ID NO: 84229):DMVVE (SEQ ID NO: 84161), VPEKM (SEQ ID NO: 84360):NAIS (SEQ ID NO: 84113):LKKYR (SEQ ID NO: 84229):NMTVE (SEQ ID NO: 84267), VPTEL (SEQ ID NO: 84378):NAIS (SEQ ID NO: 84113):LKKYR (SEQ ID NO: 84229):EMVVE (SEQ ID NO: 84175), APTKL (SEQ ID NO: 84131):NAIS (SEQ ID NO: 84113):LKKYR (SEQ ID NO: 84229):NMVVK (SEQ ID NO: 84274), VPTKL (SEQ ID NO: 84381):NAIS (SEQ ID NO: 84113):LKKYR (SEQ ID NO: 84229):EGMSVAE (SEQ ID NO: 84411), VPTKL (SEQ ID NO: 84381):NAIS (SEQ ID NO: 84113):LKKYR (SEQ ID NO: 84229):GMAVS (SEQ ID NO: 84194), TPTKM (SEQ ID NO: 84327):NAIS (SEQ ID NO: 84113):LKKYR (SEQ ID NO: 84229):GMVVD (SEQ ID NO: 84204), VPARL (SEQ ID NO: 84352):NAIS (SEQ ID NO: 84113):LKKYR (SEQ ID NO: 84229):DMVVE (SEQ ID NO: 84161), VPTRL (SEQ ID NO: 84385):NAIS (SEQ ID NO: 84113):LKKYR (SEQ ID NO: 84229):DMVVE (SEQ ID NO: 84161), APVKT (SEQ ID NO: 84144):NAIS (SEQ ID NO: 84113):LKKYR (SEQ ID NO: 84229):MIVEE (SEQ ID NO: 84241), VPQAL (SEQ ID NO: 84364):NAIS (SEQ ID NO: 84113):LKKYR (SEQ ID NO: 84229):MIVRS (SEQ ID NO: 84243), VSQDL (SEQ ID NO: 84387):NAIS (SEQ ID NO: 84113):LKKYR (SEQ ID NO: 84229):MIVKS (SEQ ID NO: 84242), VPQDL (SEQ ID NO: 84365):NAIS (SEQ ID NO: 84113):LKKYR (SEQ ID NO: 84229):MVVKS (SEQ ID NO: 84256), VPTEE (SEQ ID NO: 84377):NAIS (SEQ ID NO: 84113):LKKYR (SEQ ID NO: 84229):FLQHN (SEQ ID NO: 84184), VPTGQ (SEQ ID NO: 84379):NAIS (SEQ ID NO: 84113):LKKYR (SEQ ID NO: 84229):LEEHS (SEQ ID NO: 84217), SRVHH (SEQ ID NO: 84297):NAIS (SEQ ID NO: 84113):LKKYR (SEQ ID NO: 84229):RLEEH (SEQ ID NO: 84279), TQVQL (SEQ ID NO: 84340):NAIS (SEQ ID NO: 84113):LKKYR (SEQ ID NO: 84229):TLEDH (SEQ ID NO: 84307), APTEL (SEQ ID NO: 84128):SATS (SEQ ID NO: 84117):LRKHR (SEQ ID NO: 84233):DMVVK (SEQ ID NO: 84162), APTKM (SEQ ID NO: 84132):SATS (SEQ ID NO: 84117):LRKHR (SEQ ID NO: 84233):NMVVK (SEQ ID NO: 84274), APTEL (SEQ ID NO: 84128):SATS (SEQ ID NO: 84117):LRKHR (SEQ ID NO: 84233):EMVVK (SEQ ID NO: 84176), APTKL (SEQ ID NO: 84131):SATS (SEQ ID NO: 84117):LRKHR (SEQ ID NO: 84233):NMVVK (SEQ ID NO: 84274), APTQL (SEQ ID NO: 84134):SATS (SEQ ID NO: 84117):LRKHR (SEQ ID NO: 84233):NMVVK (SEQ ID NO: 84274), APTKL (SEQ ID NO: 84131):SATS (SEQ ID NO: 84117):LRKHR (SEQ ID NO: 84233):EGMSVVK (SEQ ID NO: 84417), APTKL (SEQ ID NO: 84131):SATS (SEQ ID NO: 84117):LRKHR (SEQ ID NO: 84233):GMVVK (SEQ ID NO: 84206), APTKM (SEQ ID NO: 84132):SATS (SEQ ID NO: 84117):LRKHR (SEQ ID NO: 84233):GMVVK (SEQ ID NO: 84206), APTRL (SEQ ID NO: 84135):SATS (SEQ ID NO: 84117):LRKHR (SEQ ID NO: 84233):DMVVK (SEQ ID NO: 84162), APTKT (SEQ ID NO: 84133):SATS (SEQ ID NO: 84117):LRKHR (SEQ ID NO: 84233):MIVVK (SEQ ID NO: 84246), APTAL (SEQ ID NO: 84125):SATS (SEQ ID NO: 84117):LRKHR (SEQ ID NO: 84233):MIVVK (SEQ ID NO: 84246), APTDL (SEQ ID NO: 84126):SATS (SEQ ID NO: 84117):LRKHR (SEQ ID NO: 84233):MIVVK (SEQ ID NO: 84246), APTDL (SEQ ID NO: 84126):SATS (SEQ ID NO: 84117):LRKHR (SEQ ID NO: 84233):MVVVK (SEQ ID NO: 84260), APTEE (SEQ ID NO: 84127):SATS (SEQ ID NO: 84117):LRKHR (SEQ ID NO: 84233):FLVVK (SEQ ID NO: 84192), APTGQ (SEQ ID NO: 84129):SATS (SEQ ID NO: 84117):LRKHR (SEQ ID NO: 84233):LEVVK (SEQ ID NO: 84226), APTHH (SEQ ID NO: 84130):SATS (SEQ ID NO: 84117):LRKHR (SEQ ID NO: 84233):RLVVK (SEQ ID NO: 84289), APTQL (SEQ ID NO: 84134):SATS (SEQ ID NO: 84117):LRKHR (SEQ ID NO: 84233):TLVVK (SEQ ID NO: 84318), VPTEL (SEQ ID NO: 84378):SATS (SEQ ID NO: 84117):LRKHR (SEQ ID NO: 84233):DMVVE (SEQ ID NO: 84161), VPEKM (SEQ ID NO: 84360):SATS (SEQ ID NO: 84117):LRKHR (SEQ ID NO: 84233):NMTVE (SEQ ID NO: 84267), VPTEL (SEQ ID NO: 84378):SATS (SEQ ID NO: 84117):LRKHR (SEQ ID NO: 84233):EMVVE (SEQ ID NO: 84175), APTKL (SEQ ID NO: 84131):SATS (SEQ ID NO: 84117):LRKHR (SEQ ID NO: 84233):NMVVR (SEQ ID NO: 84275), APTQL (SEQ ID NO: 84134):SATS (SEQ ID NO: 84117):LRKHR (SEQ ID NO: 84233):NMVVR (SEQ ID NO: 84275), VPTKL (SEQ ID NO: 84381):SATS (SEQ ID NO: 84117):LRKHR (SEQ ID NO: 84233):EGMSVAE (SEQ ID NO: 84411), VPTKL (SEQ ID NO: 84381):SATS (SEQ ID NO: 84117):LRKHR (SEQ ID NO: 84233):GMAVS (SEQ ID NO: 84194), TPTKM (SEQ ID NO: 84327):SATS (SEQ ID NO: 84117):LRKHR (SEQ ID NO: 84233):GMVVD (SEQ ID NO: 84204), VPARL (SEQ ID NO: 84352):SATS (SEQ ID NO: 84117):LRKHR (SEQ ID NO: 84233):DMVVE (SEQ ID NO: 84161), VPTRL (SEQ ID NO: 84385):SATS (SEQ ID NO: 84117):LRKHR (SEQ ID NO: 84233):DMVVE (SEQ ID NO: 84161), APVKT (SEQ ID NO: 84144):SATS (SEQ ID NO: 84117):LRKHR (SEQ ID NO: 84233):MIVEE (SEQ ID NO: 84241), VPQAL (SEQ ID NO: 84364):SATS (SEQ ID NO: 84117):LRKHR (SEQ ID NO: 84233):MIVRS (SEQ ID NO: 84243), VSQDL (SEQ ID NO: 84387):SATS (SEQ ID NO: 84117):LRKHR (SEQ ID NO: 84233):MIVKS (SEQ ID NO: 84242), VPQDL (SEQ ID NO: 84365):SATS (SEQ ID NO: 84117):LRKHR (SEQ ID NO: 84233):MVVKS (SEQ ID NO: 84256), VPTEE (SEQ ID NO: 84377):SATS (SEQ ID NO: 84117):LRKHR (SEQ ID NO: 84233):FLQHN (SEQ ID NO: 84184), VPTGQ (SEQ ID NO: 84379):SATS (SEQ ID NO: 84117):LRKHR (SEQ ID NO: 84233):LEEHS (SEQ ID NO: 84217), SRVHH (SEQ ID NO: 84297):SATS (SEQ ID NO: 84117):LRKHR (SEQ ID NO: 84233):RLEEH (SEQ ID NO: 84279), TQVQL (SEQ ID NO: 84340):SATS (SEQ ID NO: 84117):LRKHR (SEQ ID NO: 84233):TLEDH (SEQ ID NO: 84307), VPTEL (SEQ ID NO: 84378):SPIS (SEQ ID NO: 84120):LKYHY (SEQ ID NO: 84232):DMVAE (SEQ ID NO: 84156), VPTKM (SEQ ID NO: 84382):SPIS (SEQ ID NO: 84120):LKYHY (SEQ ID NO: 84232):NMVAE (SEQ ID NO: 84268), VPTEL (SEQ ID NO: 84378):SPIS (SEQ ID NO: 84120):LKYHY (SEQ ID NO: 84232):EMVAE (SEQ ID NO: 84170), VPTKL (SEQ ID NO: 84381):SPIS (SEQ ID NO: 84120):LKYHY (SEQ ID NO: 84232):NMVAE (SEQ ID NO: 84268), VPTQL (SEQ ID NO: 84384):SPIS (SEQ ID NO: 84120):LKYHY (SEQ ID NO: 84232):NMVAE (SEQ ID NO: 84268), VPTKL (SEQ ID NO: 84381):SPIS (SEQ ID NO: 84120):LKYHY (SEQ ID NO: 84232):GMVAE (SEQ ID NO: 84200), VPTKM (SEQ ID NO: 84382):SPIS (SEQ ID NO: 84120):LKYHY (SEQ ID NO: 84232):GMVAE (SEQ ID NO: 84200), VPTRL (SEQ ID NO: 84385):SPIS (SEQ ID NO: 84120):LKYHY (SEQ ID NO: 84232):DMVAE (SEQ ID NO: 84156), VPTKT (SEQ ID NO: 84383):SPIS (SEQ ID NO: 84120):LKYHY (SEQ ID NO: 84232):MIVAE (SEQ ID NO: 84240), VPTAL (SEQ ID NO: 84375):SPIS (SEQ ID NO: 84120):LKYHY (SEQ ID NO: 84232):MIVAE (SEQ ID NO: 84240), VPTDL (SEQ ID NO: 84376):SPIS (SEQ ID NO: 84120):LKYHY (SEQ ID NO: 84232):MIVAE (SEQ ID NO: 84240), VPTDL (SEQ ID NO: 84376):SPIS (SEQ ID NO: 84120):LKYHY (SEQ ID NO: 84232):MVVAE (SEQ ID NO: 84254), VPTEE (SEQ ID NO: 84377):SPIS (SEQ ID NO: 84120):LKYHY (SEQ ID NO: 84232):FLVAE (SEQ ID NO: 84186), VPTGQ (SEQ ID NO: 84379):SPIS (SEQ ID NO: 84120):LKYHY (SEQ ID NO: 84232):LEVAE (SEQ ID NO: 84220), VPTHH (SEQ ID NO: 84380):SPIS (SEQ ID NO: 84120):LKYHY (SEQ ID NO: 84232):RLVAE (SEQ ID NO: 84283), VPTQL (SEQ ID NO: 84384):SPIS (SEQ ID NO: 84120):LKYHY (SEQ ID NO: 84232):TLVAE (SEQ ID NO: 84312), VPTEL (SEQ ID NO: 84378):SPIS (SEQ ID NO: 84120):LKYHY (SEQ ID NO: 84232):DMVVE (SEQ ID NO: 84161), VPEKM (SEQ ID NO: 84360):SPIS (SEQ ID NO: 84120):LKYHY (SEQ ID NO: 84232):NMTVE (SEQ ID NO: 84267), VPTEL (SEQ ID NO: 84378):SPIS (SEQ ID NO: 84120):LKYHY (SEQ ID NO: 84232):EMVVE (SEQ ID NO: 84175), APTKL (SEQ ID NO: 84131):SPIS (SEQ ID NO: 84120):LKYHY (SEQ ID NO: 84232):NMVVR (SEQ ID NO: 84275), APTQL (SEQ ID NO: 84134):SPIS (SEQ ID NO: 84120):LKYHY (SEQ ID NO: 84232):NMVVR (SEQ ID NO: 84275), APTKL (SEQ ID NO: 84131):SPIS (SEQ ID NO: 84120):LKYHY (SEQ ID NO: 84232):NMVVK (SEQ ID NO: 84274), VPTKL (SEQ ID NO: 84381):SPIS (SEQ ID NO: 84120):LKYHY (SEQ ID NO: 84232):GMAVS (SEQ ID NO: 84194), TPTKM (SEQ ID NO: 84327):SPIS (SEQ ID NO: 84120):LKYHY (SEQ ID NO: 84232):GMVVD (SEQ ID NO: 84204), VPARL (SEQ ID NO: 84352):SPIS (SEQ ID NO: 84120):LKYHY (SEQ ID NO: 84232):DMVVE (SEQ ID NO: 84161), VPTRL (SEQ ID NO: 84385):SPIS (SEQ ID NO: 84120):LKYHY (SEQ ID NO: 84232):DMVVE (SEQ ID NO: 84161), APVKT (SEQ ID NO: 84144):SPIS (SEQ ID NO: 84120):LKYHY (SEQ ID NO: 84232):MIVEE (SEQ ID NO: 84241), VPQAL (SEQ ID NO: 84364):SPIS (SEQ ID NO: 84120):LKYHY (SEQ ID NO: 84232):MIVRS (SEQ ID NO: 84243), VSQDL (SEQ ID NO: 84387):SPIS (SEQ ID NO: 84120):LKYHY (SEQ ID NO: 84232):MIVKS (SEQ ID NO: 84242), VPQDL (SEQ ID NO: 84365):SPIS (SEQ ID NO: 84120):LKYHY (SEQ ID NO: 84232):MVVKS (SEQ ID NO: 84256), VPTEE (SEQ ID NO: 84377):SPIS (SEQ ID NO: 84120):LKYHY (SEQ ID NO: 84232):FLQHN (SEQ ID NO: 84184), VPTGQ (SEQ ID NO: 84379):SPIS (SEQ ID NO: 84120):LKYHY (SEQ ID NO: 84232):LEEHS (SEQ ID NO: 84217), SRVHH (SEQ ID NO: 84297):SPIS (SEQ ID NO: 84120):LKYHY (SEQ ID NO: 84232):RLEEH (SEQ ID NO: 84279), TQVQL (SEQ ID NO: 84340):SPIS (SEQ ID NO: 84120):LKYHY (SEQ ID NO: 84232):TLEDH (SEQ ID NO: 84307), VPTEL (SEQ ID NO: 84378):EPIS (SEQ ID NO: 84109):KFKYE (SEQ ID NO: 84211):DMAVS (SEQ ID NO: 84150), VPTKM (SEQ ID NO: 84382):EPIS (SEQ ID NO: 84109):KFKYE (SEQ ID NO: 84211):NMAVS (SEQ ID NO: 84262), VPTEL (SEQ ID NO: 84378):EPIS (SEQ ID NO: 84109):KFKYE (SEQ ID NO: 84211):EMAVS (SEQ ID NO: 84164), VPTKL (SEQ ID NO: 84381):EPIS (SEQ ID NO: 84109):KFKYE (SEQ ID NO: 84211):NMAVS (SEQ ID NO: 84262), VPTQL (SEQ ID NO: 84384):EPIS (SEQ ID NO: 84109):KFKYE (SEQ ID NO: 84211):NMAVS (SEQ ID NO: 84262), VPTKL (SEQ ID NO: 84381):EPIS (SEQ ID NO: 84109):KFKYE (SEQ ID NO: 84211):EGMSAVS (SEQ ID NO: 84405), VPTKM (SEQ ID NO: 84382):EPIS (SEQ ID NO: 84109):KFKYE (SEQ ID NO: 84211):GMAVS (SEQ ID NO: 84194), VPTRL (SEQ ID NO: 84385):EPIS (SEQ ID NO: 84109):KFKYE (SEQ ID NO: 84211):DMAVS (SEQ ID NO: 84150), VPTKT (SEQ ID NO: 84383):EPIS (SEQ ID NO: 84109):KFKYE (SEQ ID NO: 84211):MIAVS (SEQ ID NO: 84234), VPTAL (SEQ ID NO: 84375):EPIS (SEQ ID NO: 84109):KFKYE (SEQ ID NO: 84211):MIAVS (SEQ ID NO: 84234), VPTDL (SEQ ID NO: 84376):EPIS (SEQ ID NO: 84109):KFKYE (SEQ ID NO: 84211):MIAVS (SEQ ID NO: 84234), VPTDL (SEQ ID NO: 84376):EPIS (SEQ ID NO: 84109):KFKYE (SEQ ID NO: 84211):MVAVS (SEQ ID NO: 84248), VPTEE (SEQ ID NO: 84377):EPIS (SEQ ID NO: 84109):KFKYE (SEQ ID NO: 84211):FLAVS (SEQ ID NO: 84180), VPTGQ (SEQ ID NO: 84379):EPIS (SEQ ID NO: 84109):KFKYE (SEQ ID NO: 84211):LEAVS (SEQ ID NO: 84214), VPTHH (SEQ ID NO: 84380):EPIS (SEQ ID NO: 84109):KFKYE (SEQ ID NO: 84211):RLAVS (SEQ ID NO: 84277), VPTQL (SEQ ID NO: 84384):EPIS (SEQ ID NO: 84109):KFKYE (SEQ ID NO: 84211):TLAVS (SEQ ID NO: 84306), VPTEL (SEQ ID NO: 84378):EPIS (SEQ ID NO: 84109):KFKYE (SEQ ID NO: 84211):DMVVE (SEQ ID NO: 84161), VPEKM (SEQ ID NO: 84360):EPIS (SEQ ID NO: 84109):KFKYE (SEQ ID NO: 84211):NMTVE (SEQ ID NO: 84267), VPTEL (SEQ ID NO: 84378):EPIS (SEQ ID NO: 84109):KFKYE (SEQ ID NO: 84211):EMVVE (SEQ ID NO: 84175), APTKL (SEQ ID NO: 84131):EPIS (SEQ ID NO: 84109):KFKYE (SEQ ID NO: 84211):NMVVR (SEQ ID NO: 84275), APTQL (SEQ ID NO: 84134):EPIS (SEQ ID NO: 84109):KFKYE (SEQ ID NO: 84211):NMVVR (SEQ ID NO: 84275), APTKL (SEQ ID NO: 84131):EPIS (SEQ ID NO: 84109):KFKYE (SEQ ID NO: 84211):NMVVK (SEQ ID NO: 84274), VPTKL (SEQ ID NO: 84381):EPIS (SEQ ID NO: 84109):KFKYE (SEQ ID NO: 84211):EGMSVAE (SEQ ID NO: 84411), TPTKM (SEQ ID NO: 84327):EPIS (SEQ ID NO: 84109):KFKYE (SEQ ID NO: 84211):GMVVD (SEQ ID NO: 84204), VPARL (SEQ ID NO: 84352):EPIS (SEQ ID NO: 84109):KFKYE (SEQ ID NO: 84211):DMVVE (SEQ ID NO: 84161), VPTRL (SEQ ID NO: 84385):EPIS (SEQ ID NO: 84109):KFKYE (SEQ ID NO: 84211):DMVVE (SEQ ID NO: 84161), APVKT (SEQ ID NO: 84144):EPIS (SEQ ID NO: 84109):KFKYE (SEQ ID NO: 84211):MIVEE (SEQ ID NO: 84241), VPQAL (SEQ ID NO: 84364):EPIS (SEQ ID NO: 84109):KFKYE (SEQ ID NO: 84211):MIVRS (SEQ ID NO: 84243), VSQDL (SEQ ID NO: 84387):EPIS (SEQ ID NO: 84109):KFKYE (SEQ ID NO: 84211):MIVKS (SEQ ID NO: 84242), VPQDL (SEQ ID NO: 84365):EPIS (SEQ ID NO: 84109):KFKYE (SEQ ID NO: 84211):MVVKS (SEQ ID NO: 84256), VPTEE (SEQ ID NO: 84377):EPIS (SEQ ID NO: 84109):KFKYE (SEQ ID NO: 84211):FLQHN (SEQ ID NO: 84184), VPTGQ (SEQ ID NO: 84379):EPIS (SEQ ID NO: 84109):KFKYE (SEQ ID NO: 84211):LEEHS (SEQ ID NO: 84217), SRVHH (SEQ ID NO: 84297):EPIS (SEQ ID NO: 84109):KFKYE (SEQ ID NO: 84211):RLEEH (SEQ ID NO: 84279), TQVQL (SEQ ID NO: 84340):EPIS (SEQ ID NO: 84109):KFKYE (SEQ ID NO: 84211):TLEDH (SEQ ID NO: 84307), TPTEL (SEQ ID NO: 84323):SPIN (SEQ ID NO: 84119):YGKIP (SEQ ID NO: 84397):DMVVD (SEQ ID NO: 84160), TPTKM (SEQ ID NO: 84327):SPIN (SEQ ID NO: 84119):YGKIP (SEQ ID NO: 84397):NMVVD (SEQ ID NO: 84272), TPTEL (SEQ ID NO: 84323):SPIN (SEQ ID NO: 84119):YGKIP (SEQ ID NO: 84397):EMVVD (SEQ ID NO: 84174), TPTKL (SEQ ID NO: 84326):SPIN (SEQ ID NO: 84119):YGKIP (SEQ ID NO: 84397):NMVVD (SEQ ID NO: 84272), TPTQL (SEQ ID NO: 84329):SPIN (SEQ ID NO: 84119):YGKIP (SEQ ID NO: 84397):NMVVD (SEQ ID NO: 84272), TPTKL (SEQ ID NO: 84326):SPIN (SEQ ID NO: 84119):YGKIP (SEQ ID NO: 84397):EGMSVVD (SEQ ID NO: 84415), TPTKL (SEQ ID NO: 84326):SPIN (SEQ ID NO: 84119):YGKIP (SEQ ID NO: 84397):GMVVD (SEQ ID NO: 84204), TPTRL (SEQ ID NO: 84330):SPIN (SEQ ID NO: 84119):YGKIP (SEQ ID NO: 84397):DMVVD (SEQ ID NO: 84160), TPTKT (SEQ ID NO: 84328):SPIN (SEQ ID NO: 84119):YGKIP (SEQ ID NO: 84397):MIVVD (SEQ ID NO: 84244), TPTAL (SEQ ID NO: 84320):SPIN (SEQ ID NO: 84119):YGKIP (SEQ ID NO: 84397):MIVVD (SEQ ID NO: 84244), TPTDL (SEQ ID NO: 84321):SPIN (SEQ ID NO: 84119):YGKIP (SEQ ID NO: 84397):MIVVD (SEQ ID NO: 84244), TPTDL (SEQ ID NO: 84321):SPIN (SEQ ID NO: 84119):YGKIP (SEQ ID NO: 84397):MVVVD (SEQ ID NO: 84258), TPTEE (SEQ ID NO: 84322):SPIN (SEQ ID NO: 84119):YGKIP (SEQ ID NO: 84397):FLVVD (SEQ ID NO: 84190), TPTGQ (SEQ ID NO: 84324):SPIN (SEQ ID NO: 84119):YGKIP (SEQ ID NO: 84397):LEVVD (SEQ ID NO: 84224), TPTHH (SEQ ID NO: 84325):SPIN (SEQ ID NO: 84119):YGKIP (SEQ ID NO: 84397):RLVVD (SEQ ID NO: 84287), TPTQL (SEQ ID NO: 84329):SPIN (SEQ ID NO: 84119):YGKIP (SEQ ID NO: 84397):TLVVD (SEQ ID NO: 84316), VPTEL (SEQ ID NO: 84378):SPIN (SEQ ID NO: 84119):YGKIP (SEQ ID NO: 84397):DMVVE (SEQ ID NO: 84161), VPEKM (SEQ ID NO: 84360):SPIN (SEQ ID NO: 84119):YGKIP (SEQ ID NO: 84397):NMTVE (SEQ ID NO: 84267), VPTEL (SEQ ID NO: 84378):SPIN (SEQ ID NO: 84119):YGKIP (SEQ ID NO: 84397):EMVVE (SEQ ID NO: 84175), APTKL (SEQ ID NO: 84131):SPIN (SEQ ID NO: 84119):YGKIP (SEQ ID NO: 84397):NMVVR (SEQ ID NO: 84275), APTQL (SEQ ID NO: 84134):SPIN (SEQ ID NO: 84119):YGKIP (SEQ ID NO: 84397):NMVVR (SEQ ID NO: 84275), APTKL (SEQ ID NO: 84131):SPIN (SEQ ID NO: 84119):YGKIP (SEQ ID NO: 84397):NMVVK (SEQ ID NO: 84274), VPTKL (SEQ ID NO: 84381):SPIN (SEQ ID NO: 84119):YGKIP (SEQ ID NO: 84397):EGMSVAE (SEQ ID NO: 84411), VPTKL (SEQ ID NO: 84381):SPIN (SEQ ID NO: 84119):YGKIP (SEQ ID NO: 84397):GMAVS (SEQ ID NO: 84194), VPARL (SEQ ID NO: 84352):SPIN (SEQ ID NO: 84119):YGKIP (SEQ ID NO: 84397):DMVVE (SEQ ID NO: 84161), VPTRL (SEQ ID NO: 84385):SPIN (SEQ ID NO: 84119):YGKIP (SEQ ID NO: 84397):DMVVE (SEQ ID NO: 84161), APVKT (SEQ ID NO: 84144):SPIN (SEQ ID NO: 84119):YGKIP (SEQ ID NO: 84397):MIVEE (SEQ ID NO: 84241), VPQAL (SEQ ID NO: 84364):SPIN (SEQ ID NO: 84119):YGKIP (SEQ ID NO: 84397):MIVRS (SEQ ID NO: 84243), VSQDL (SEQ ID NO: 84387):SPIN (SEQ ID NO: 84119):YGKIP (SEQ ID NO: 84397):MIVKS (SEQ ID NO: 84242), VPQDL (SEQ ID NO: 84365):SPIN (SEQ ID NO: 84119):YGKIP (SEQ ID NO: 84397):MVVKS (SEQ ID NO: 84256), VPTEE (SEQ ID NO: 84377):SPIN (SEQ ID NO: 84119):YGKIP (SEQ ID NO: 84397):FLQHN (SEQ ID NO: 84184), VPTGQ (SEQ ID NO: 84379):SPIN (SEQ ID NO: 84119):YGKIP (SEQ ID NO: 84397):LEEHS (SEQ ID NO: 84217), SRVHH (SEQ ID NO: 84297):SPIN (SEQ ID NO: 84119):YGKIP (SEQ ID NO: 84397):RLEEH (SEQ ID NO: 84279), TQVQL (SEQ ID NO: 84340):SPIN (SEQ ID NO: 84119):YGKIP (SEQ ID NO: 84397):TLEDH (SEQ ID NO: 84307), VPAEL (SEQ ID NO: 84345):SPIS (SEQ ID NO: 84120):YKQYE (SEQ ID NO: 84398):DMVVE (SEQ ID NO: 84161), VPAKM (SEQ ID NO: 84349):SPIS (SEQ ID NO: 84120):YKQYE (SEQ ID NO: 84398):NMVVE (SEQ ID NO: 84273), VPAEL (SEQ ID NO: 84345):SPIS (SEQ ID NO: 84120):YKQYE (SEQ ID NO: 84398):EMVVE (SEQ ID NO: 84175), VPAKL (SEQ ID NO: 84348):SPIS (SEQ ID NO: 84120):YKQYE (SEQ ID NO: 84398):NMVVE (SEQ ID NO: 84273), VPAQL (SEQ ID NO: 84351):SPIS (SEQ ID NO: 84120):YKQYE (SEQ ID NO: 84398):NMVVE (SEQ ID NO: 84273), VPAKL (SEQ ID NO: 84348):SPIS (SEQ ID NO: 84120):YKQYE (SEQ ID NO: 84398):EGMSVVE (SEQ ID NO: 84416), VPAKL (SEQ ID NO: 84348):SPIS (SEQ ID NO: 84120):YKQYE (SEQ ID NO: 84398):GMVVE (SEQ ID NO: 84205), VPAKM (SEQ ID NO: 84349):SPIS (SEQ ID NO: 84120):YKQYE (SEQ ID NO: 84398):GMVVE (SEQ ID NO: 84205), VPARL (SEQ ID NO: 84352):SPIS (SEQ ID NO: 84120):YKQYE (SEQ ID NO: 84398):DMVVE (SEQ ID NO: 84161), VPAKT (SEQ ID NO: 84350):SPIS (SEQ ID NO: 84120):YKQYE (SEQ ID NO: 84398):MIVVE (SEQ ID NO: 84245), VPAAL (SEQ ID NO: 84342):SPIS (SEQ ID NO: 84120):YKQYE (SEQ ID NO: 84398):MIVVE (SEQ ID NO: 84245), VPADL (SEQ ID NO: 84343):SPIS (SEQ ID NO: 84120):YKQYE (SEQ ID NO: 84398):MIVVE (SEQ ID NO: 84245), VPADL (SEQ ID NO: 84343):SPIS (SEQ ID NO: 84120):YKQYE (SEQ ID NO: 84398):MVVVE (SEQ ID NO: 84259), VPAEE (SEQ ID NO: 84344):SPIS (SEQ ID NO: 84120):YKQYE (SEQ ID NO: 84398):FLVVE (SEQ ID NO: 84191), VPAGQ (SEQ ID NO: 84346):SPIS (SEQ ID NO: 84120):YKQYE (SEQ ID NO: 84398):LEVVE (SEQ ID NO: 84225), VPAHH (SEQ ID NO: 84347):SPIS (SEQ ID NO: 84120):YKQYE (SEQ ID NO: 84398):RLVVE (SEQ ID NO: 84288), VPAQL (SEQ ID NO: 84351):SPIS (SEQ ID NO: 84120):YKQYE (SEQ ID NO: 84398):TLVVE (SEQ ID NO: 84317), VPTEL (SEQ ID NO: 84378):SPIS (SEQ ID NO: 84120):YKQYE (SEQ ID NO: 84398):DMVVE (SEQ ID NO: 84161), VPEKM (SEQ ID NO: 84360):SPIS (SEQ ID NO: 84120):YKQYE (SEQ ID NO: 84398):NMTVE (SEQ ID NO: 84267), VPTEL (SEQ ID NO: 84378):SPIS (SEQ ID NO: 84120):YKQYE (SEQ ID NO: 84398):EMVVE (SEQ ID NO: 84175), APTKL (SEQ ID NO: 84131):SPIS (SEQ ID NO: 84120):YKQYE (SEQ ID NO: 84398):NMVVR (SEQ ID NO: 84275), APTQL (SEQ ID NO: 84134):SPIS (SEQ ID NO: 84120):YKQYE (SEQ ID NO: 84398):NMVVR (SEQ ID NO: 84275), APTKL (SEQ ID NO: 84131):SPIS (SEQ ID NO: 84120):YKQYE (SEQ ID NO: 84398):NMVVK (SEQ ID NO: 84274), VPTKL (SEQ ID NO: 84381):SPIS (SEQ ID NO: 84120):YKQYE (SEQ ID NO: 84398):EGMSVAE (SEQ ID NO: 84411), VPTKL (SEQ ID NO: 84381):SPIS (SEQ ID NO: 84120):YKQYE (SEQ ID NO: 84398):GMAVS (SEQ ID NO: 84194), TPTKM (SEQ ID NO: 84327):SPIS (SEQ ID NO: 84120):YKQYE (SEQ ID NO: 84398):GMVVD (SEQ ID NO: 84204), VPTRL (SEQ ID NO: 84385):SPIS (SEQ ID NO: 84120):YKQYE (SEQ ID NO: 84398):DMVVE (SEQ ID NO: 84161), APVKT (SEQ ID NO: 84144):SPIS (SEQ ID NO: 84120):YKQYE (SEQ ID NO: 84398):MIVEE (SEQ ID NO: 84241), VPQAL (SEQ ID NO: 84364):SPIS (SEQ ID NO: 84120):YKQYE (SEQ ID NO: 84398):MIVRS (SEQ ID NO: 84243), VSQDL (SEQ ID NO: 84387):SPIS (SEQ ID NO: 84120):YKQYE (SEQ ID NO: 84398):MIVKS (SEQ ID NO: 84242), VPQDL (SEQ ID NO: 84365):SPIS (SEQ ID NO: 84120):YKQYE (SEQ ID NO: 84398):MVVKS (SEQ ID NO: 84256), VPTEE (SEQ ID NO: 84377):SPIS (SEQ ID NO: 84120):YKQYE (SEQ ID NO: 84398):FLQHN (SEQ ID NO: 84184), VPTGQ (SEQ ID NO: 84379):SPIS (SEQ ID NO: 84120):YKQYE (SEQ ID NO: 84398):LEEHS (SEQ ID NO: 84217), SRVHH (SEQ ID NO: 84297):SPIS (SEQ ID NO: 84120):YKQYE (SEQ ID NO: 84398):RLEEH (SEQ ID NO: 84279), TQVQL (SEQ ID NO: 84340):SPIS (SEQ ID NO: 84120):YKQYE (SEQ ID NO: 84398):TLEDH (SEQ ID NO: 84307), VPTKM (SEQ ID NO: 84382):SPIS (SEQ ID NO: 84120):YKQYE (SEQ ID NO: 84398):NMVVE (SEQ ID NO: 84273), VPTKL (SEQ ID NO: 84381):SPIS (SEQ ID NO: 84120):YKQYE (SEQ ID NO: 84398):NMVVE (SEQ ID NO: 84273), VPTQL (SEQ ID NO: 84384):SPIS (SEQ ID NO: 84120):YKQYE (SEQ ID NO: 84398):NMVVE (SEQ ID NO: 84273), VPTKL (SEQ ID NO: 84381):SPIS (SEQ ID NO: 84120):YKQYE (SEQ ID NO: 84398):EGMSVVE (SEQ ID NO: 84416), VPTKL (SEQ ID NO: 84381):SPIS (SEQ ID NO: 84120):YKQYE (SEQ ID NO: 84398):GMVVE (SEQ ID NO: 84205), VPTKM (SEQ ID NO: 84382):SPIS (SEQ ID NO: 84120):YKQYE (SEQ ID NO: 84398):GMVVE (SEQ ID NO: 84205), VPTKT (SEQ ID NO: 84383):SPIS (SEQ ID NO: 84120):YKQYE (SEQ ID NO: 84398):MIVVE (SEQ ID NO: 84245), VPTAL (SEQ ID NO: 84375):SPIS (SEQ ID NO: 84120):YKQYE (SEQ ID NO: 84398):MIVVE (SEQ ID NO: 84245), VPTDL (SEQ ID NO: 84376):SPIS (SEQ ID NO: 84120):YKQYE (SEQ ID NO: 84398):MIVVE (SEQ ID NO: 84245), VPTDL (SEQ ID NO: 84376):SPIS (SEQ ID NO: 84120):YKQYE (SEQ ID NO: 84398):MVVVE (SEQ ID NO: 84259), VPTEE (SEQ ID NO: 84377):SPIS (SEQ ID NO: 84120):YKQYE (SEQ ID NO: 84398):FLVVE (SEQ ID NO: 84191), VPTGQ (SEQ ID NO: 84379):SPIS (SEQ ID NO: 84120):YKQYE (SEQ ID NO: 84398):LEVVE (SEQ ID NO: 84225), VPTHH (SEQ ID NO: 84380):SPIS (SEQ ID NO: 84120):YKQYE (SEQ ID NO: 84398):RLVVE (SEQ ID NO: 84288), VPTQL (SEQ ID NO: 84384):SPIS (SEQ ID NO: 84120):YKQYE (SEQ ID NO: 84398):TLVVE (SEQ ID NO: 84317), APVEL (SEQ ID NO: 84139):KPLS (SEQ ID NO: 84112):DHHKD (SEQ ID NO: 84149):DMVEE (SEQ ID NO: 84157), APVKM (SEQ ID NO: 84143):KPLS (SEQ ID NO: 84112):DHHKD (SEQ ID NO: 84149):NMVEE (SEQ ID NO: 84269), APVEL (SEQ ID NO: 84139):KPLS (SEQ ID NO: 84112):DHHKD (SEQ ID NO: 84149):EMVEE (SEQ ID NO: 84171), APVKL (SEQ ID NO: 84142):KPLS (SEQ ID NO: 84112):DHHKD (SEQ ID NO: 84149):NMVEE (SEQ ID NO: 84269), APVQL (SEQ ID NO: 84145):KPLS (SEQ ID NO: 84112):DHHKD (SEQ ID NO: 84149):NMVEE (SEQ ID NO: 84269), APVKL (SEQ ID NO: 84142):KPLS (SEQ ID NO: 84112):DHHKD (SEQ ID NO: 84149):EGMSVEE (SEQ ID NO: 84412), APVKL (SEQ ID NO: 84142):KPLS (SEQ ID NO: 84112):DHHKD (SEQ ID NO: 84149):GMVEE (SEQ ID NO: 84201), APVKM (SEQ ID NO: 84143):KPLS (SEQ ID NO: 84112):DHHKD (SEQ ID NO: 84149):GMVEE (SEQ ID NO: 84201), APVRL (SEQ ID NO: 84146):KPLS (SEQ ID NO: 84112):DHHKD (SEQ ID NO: 84149):DMVEE (SEQ ID NO: 84157), APVAL (SEQ ID NO: 84136):KPLS (SEQ ID NO: 84112):DHHKD (SEQ ID NO: 84149):MIVEE (SEQ ID NO: 84241), APVDL (SEQ ID NO: 84137):KPLS (SEQ ID NO: 84112):DHHKD (SEQ ID NO: 84149):MIVEE (SEQ ID NO: 84241), APVDL (SEQ ID NO: 84137):KPLS (SEQ ID NO: 84112):DHHKD (SEQ ID NO: 84149):MVVEE (SEQ ID NO: 84255), APVEE (SEQ ID NO: 84138):KPLS (SEQ ID NO: 84112):DHHKD (SEQ ID NO: 84149):FLVEE (SEQ ID NO: 84187), APVGQ (SEQ ID NO: 84140):KPLS (SEQ ID NO: 84112):DHHKD (SEQ ID NO: 84149):LEVEE (SEQ ID NO: 84221), APVHH (SEQ ID NO: 84141):KPLS (SEQ ID NO: 84112):DHHKD (SEQ ID NO: 84149):RLVEE (SEQ ID NO: 84284), APVQL (SEQ ID NO: 84145):KPLS (SEQ ID NO: 84112):DHHKD (SEQ ID NO: 84149):TLVEE (SEQ ID NO: 84313), VPTEL (SEQ ID NO: 84378):KPLS (SEQ ID NO: 84112):DHHKD (SEQ ID NO: 84149):DMVVE (SEQ ID NO: 84161), VPEKM (SEQ ID NO: 84360):KPLS (SEQ ID NO: 84112):DHHKD (SEQ ID NO: 84149):NMTVE (SEQ ID NO: 84267), VPTEL (SEQ ID NO: 84378):KPLS (SEQ ID NO: 84112):DHHKD (SEQ ID NO: 84149):EMVVE (SEQ ID NO: 84175), APTKL (SEQ ID NO: 84131):KPLS (SEQ ID NO: 84112):DHHKD (SEQ ID NO: 84149):NMVVR (SEQ ID NO: 84275), APTQL (SEQ ID NO: 84134):KPLS (SEQ ID NO: 84112):DHHKD (SEQ ID NO: 84149):NMVVR (SEQ ID NO: 84275), APTKL (SEQ ID NO: 84131):KPLS (SEQ ID NO: 84112):DHHKD (SEQ ID NO: 84149):NMVVK (SEQ ID NO: 84274), VPTKL (SEQ ID NO: 84381):KPLS (SEQ ID NO: 84112):DHHKD (SEQ ID NO: 84149):EGMSVAE (SEQ ID NO: 84411), VPTKL (SEQ ID NO: 84381):KPLS (SEQ ID NO: 84112):DHHKD (SEQ ID NO: 84149):GMAVS (SEQ ID NO: 84194), TPTKM (SEQ ID NO: 84327):KPLS (SEQ ID NO: 84112):DHHKD (SEQ ID NO: 84149):GMVVD (SEQ ID NO: 84204), VPARL (SEQ ID NO: 84352):KPLS (SEQ ID NO: 84112):DHHKD (SEQ ID NO: 84149):DMVVE (SEQ ID NO: 84161), VPTRL (SEQ ID NO: 84385):KPLS (SEQ ID NO: 84112):DHHKD (SEQ ID NO: 84149):DMVVE (SEQ ID NO: 84161), VPQAL (SEQ ID NO: 84364):KPLS (SEQ ID NO: 84112):DHHKD (SEQ ID NO: 84149):MIVRS (SEQ ID NO: 84243), VSQDL (SEQ ID NO: 84387):KPLS (SEQ ID NO: 84112):DHHKD (SEQ ID NO: 84149):MIVKS (SEQ ID NO: 84242), VPQDL (SEQ ID NO: 84365):KPLS (SEQ ID NO: 84112):DHHKD (SEQ ID NO: 84149):MVVKS (SEQ ID NO: 84256), VPTEE (SEQ ID NO: 84377):KPLS (SEQ ID NO: 84112):DHHKD (SEQ ID NO: 84149):FLQHN (SEQ ID NO: 84184), VPTGQ (SEQ ID NO: 84379):KPLS (SEQ ID NO: 84112):DHHKD (SEQ ID NO: 84149):LEEHS (SEQ ID NO: 84217), SRVHH (SEQ ID NO: 84297):KPLS (SEQ ID NO: 84112):DHHKD (SEQ ID NO: 84149):RLEEH (SEQ ID NO: 84279), TQVQL (SEQ ID NO: 84340):KPLS (SEQ ID NO: 84112):DHHKD (SEQ ID NO: 84149):TLEDH (SEQ ID NO: 84307), VPQEL (SEQ ID NO: 84367):EPLP (SEQ ID NO: 84110):EQLSN (SEQ ID NO: 84178):DMVRS (SEQ ID NO: 84159), VPQKM (SEQ ID NO: 84371):EPLP (SEQ ID NO: 84110):EQLSN (SEQ ID NO: 84178):NMVRS (SEQ ID NO: 84271), VPQEL (SEQ ID NO: 84367):EPLP (SEQ ID NO: 84110):EQLSN (SEQ ID NO: 84178):EMVRS (SEQ ID NO: 84173), VPQKL (SEQ ID NO: 84370):EPLP (SEQ ID NO: 84110):EQLSN (SEQ ID NO: 84178):NMVRS (SEQ ID NO: 84271), VPQQL (SEQ ID NO: 84373):EPLP (SEQ ID NO: 84110):EQLSN (SEQ ID NO: 84178):NMVRS (SEQ ID NO: 84271), VPQKL (SEQ ID NO: 84370):EPLP (SEQ ID NO: 84110):EQLSN (SEQ ID NO: 84178):EGMSVRS (SEQ ID NO: 84414), VPQKL (SEQ ID NO: 84370):EPLP (SEQ ID NO: 84110):EQLSN (SEQ ID NO: 84178):GMVRS (SEQ ID NO: 84203), VPQKM (SEQ ID NO: 84371):EPLP (SEQ ID NO: 84110):EQLSN (SEQ ID NO: 84178):GMVRS (SEQ ID NO: 84203), VPQRL (SEQ ID NO: 84374):EPLP (SEQ ID NO: 84110):EQLSN (SEQ ID NO: 84178):DMVRS (SEQ ID NO: 84159), VPQKT (SEQ ID NO: 84372):EPLP (SEQ ID NO: 84110):EQLSN (SEQ ID NO: 84178):MIVRS (SEQ ID NO: 84243), VPQDL (SEQ ID NO: 84365):EPLP (SEQ ID NO: 84110):EQLSN (SEQ ID NO: 84178):MIVRS (SEQ ID NO: 84243), VPQDL (SEQ ID NO: 84365):EPLP (SEQ ID NO: 84110):EQLSN (SEQ ID NO: 84178):MVVRS (SEQ ID NO: 84257), VPQEE (SEQ ID NO: 84366):EPLP (SEQ ID NO: 84110):EQLSN (SEQ ID NO: 84178):FLVRS (SEQ ID NO: 84189), VPQGQ (SEQ ID NO: 84368):EPLP (SEQ ID NO: 84110):EQLSN (SEQ ID NO: 84178):LEVRS (SEQ ID NO: 84223), VPQHH (SEQ ID NO: 84369):EPLP (SEQ ID NO: 84110):EQLSN (SEQ ID NO: 84178):RLVRS (SEQ ID NO: 84286), VPQQL (SEQ ID NO: 84373):EPLP (SEQ ID NO: 84110):EQLSN (SEQ ID NO: 84178):TLVRS (SEQ ID NO: 84315), VPTEL (SEQ ID NO: 84378):EPLP (SEQ ID NO: 84110):EQLSN (SEQ ID NO: 84178):DMVVE (SEQ ID NO: 84161), VPEKM (SEQ ID NO: 84360):EPLP (SEQ ID NO: 84110):EQLSN (SEQ ID NO: 84178):NMTVE (SEQ ID NO: 84267), VPTEL (SEQ ID NO: 84378):EPLP (SEQ ID NO: 84110):EQLSN (SEQ ID NO: 84178):EMVVE (SEQ ID NO: 84175), APTKL (SEQ ID NO: 84131):EPLP (SEQ ID NO: 84110):EQLSN (SEQ ID NO: 84178):NMVVR (SEQ ID NO: 84275), APTQL (SEQ ID NO: 84134):EPLP (SEQ ID NO: 84110):EQLSN (SEQ ID NO: 84178):NMVVR (SEQ ID NO: 84275), APTKL (SEQ ID NO: 84131):EPLP (SEQ ID NO: 84110):EQLSN (SEQ ID NO: 84178):NMVVK (SEQ ID NO: 84274), VPTKL (SEQ ID NO: 84381):EPLP (SEQ ID NO: 84110):EQLSN (SEQ ID NO: 84178):EGMSVAE (SEQ ID NO: 84411), VPTKL (SEQ ID NO: 84381):EPLP (SEQ ID NO: 84110):EQLSN (SEQ ID NO: 84178):GMAVS (SEQ ID NO: 84194), TPTKM (SEQ ID NO: 84327):EPLP (SEQ ID NO: 84110):EQLSN (SEQ ID NO: 84178):GMVVD (SEQ ID NO: 84204), VPARL (SEQ ID NO: 84352):EPLP (SEQ ID NO: 84110):EQLSN (SEQ ID NO: 84178):DMVVE (SEQ ID NO: 84161), VPTRL (SEQ ID NO: 84385):EPLP (SEQ ID NO: 84110):EQLSN (SEQ ID NO: 84178):DMVVE (SEQ ID NO: 84161), APVKT (SEQ ID NO: 84144):EPLP (SEQ ID NO: 84110):EQLSN (SEQ ID NO: 84178):MIVEE (SEQ ID NO: 84241), VSQDL (SEQ ID NO: 84387):EPLP (SEQ ID NO: 84110):EQLSN (SEQ ID NO: 84178):MIVKS (SEQ ID NO: 84242), VPQDL (SEQ ID NO: 84365):EPLP (SEQ ID NO: 84110):EQLSN (SEQ ID NO: 84178):MVVKS (SEQ ID NO: 84256), VPTEE (SEQ ID NO: 84377):EPLP (SEQ ID NO: 84110):EQLSN (SEQ ID NO: 84178):FLQHN (SEQ ID NO: 84184), VPTGQ (SEQ ID NO: 84379):EPLP (SEQ ID NO: 84110):EQLSN (SEQ ID NO: 84178):LEEHS (SEQ ID NO: 84217), SRVHH (SEQ ID NO: 84297):EPLP (SEQ ID NO: 84110):EQLSN (SEQ ID NO: 84178):RLEEH (SEQ ID NO: 84279), TQVQL (SEQ ID NO: 84340):EPLP (SEQ ID NO: 84110):EQLSN (SEQ ID NO: 84178):TLEDH (SEQ ID NO: 84307), VSQEL (SEQ ID NO: 84389):EPLT (SEQ ID NO: 84111):EQLSN (SEQ ID NO: 84178):DMVKS (SEQ ID NO: 84158), VSQKM (SEQ ID NO: 84393):EPLT (SEQ ID NO: 84111):EQLSN (SEQ ID NO: 84178):NMVKS (SEQ ID NO: 84270), VSQEL (SEQ ID NO: 84389):EPLT (SEQ ID NO: 84111):EQLSN (SEQ ID NO: 84178):EMVKS (SEQ ID NO: 84172), VSQKL (SEQ ID NO: 84392):EPLT (SEQ ID NO: 84111):EQLSN (SEQ ID NO: 84178):NMVKS (SEQ ID NO: 84270), VSQQL (SEQ ID NO: 84395):EPLT (SEQ ID NO: 84111):EQLSN (SEQ ID NO: 84178):NMVKS (SEQ ID NO: 84270), VSQKL (SEQ ID NO: 84392):EPLT (SEQ ID NO: 84111):EQLSN (SEQ ID NO: 84178):EGMSVKS (SEQ ID NO: 84413), VSQKL (SEQ ID NO: 84392):EPLT (SEQ ID NO: 84111):EQLSN (SEQ ID NO: 84178):GMVKS (SEQ ID NO: 84202), VSQKM (SEQ ID NO: 84393):EPLT (SEQ ID NO: 84111):EQLSN (SEQ ID NO: 84178):GMVKS (SEQ ID NO: 84202), VSQRL (SEQ ID NO: 84396):EPLT (SEQ ID NO: 84111):EQLSN (SEQ ID NO: 84178):DMVKS (SEQ ID NO: 84158), VSQKT (SEQ ID NO: 84394):EPLT (SEQ ID NO: 84111):EQLSN (SEQ ID NO: 84178):MIVKS (SEQ ID NO: 84242), VSQAL (SEQ ID NO: 84386):EPLT (SEQ ID NO: 84111):EQLSN (SEQ ID NO: 84178):MIVKS (SEQ ID NO: 84242), VSQDL (SEQ ID NO: 84387):EPLT (SEQ ID NO: 84111):EQLSN (SEQ ID NO: 84178):MVVKS (SEQ ID NO: 84256), VSQEE (SEQ ID NO: 84388):EPLT (SEQ ID NO: 84111):EQLSN (SEQ ID NO: 84178):FLVKS (SEQ ID NO: 84188), VSQGQ (SEQ ID NO: 84390):EPLT (SEQ ID NO: 84111):EQLSN (SEQ ID NO: 84178):LEVKS (SEQ ID NO: 84222), VSQHH (SEQ ID NO: 84391):EPLT (SEQ ID NO: 84111):EQLSN (SEQ ID NO: 84178):RLVKS (SEQ ID NO: 84285), VSQQL (SEQ ID NO: 84395):EPLT (SEQ ID NO: 84111):EQLSN (SEQ ID NO: 84178):TLVKS (SEQ ID NO: 84314), VPTEL (SEQ ID NO: 84378):EPLT (SEQ ID NO: 84111):EQLSN (SEQ ID NO: 84178):DMVVE (SEQ ID NO: 84161), VPEKM (SEQ ID NO: 84360):EPLT (SEQ ID NO: 84111):EQLSN (SEQ ID NO: 84178):NMTVE (SEQ ID NO: 84267), VPTEL (SEQ ID NO: 84378):EPLT (SEQ ID NO: 84111):EQLSN (SEQ ID NO: 84178):EMVVE (SEQ ID NO: 84175), APTKL (SEQ ID NO: 84131):EPLT (SEQ ID NO: 84111):EQLSN (SEQ ID NO: 84178):NMVVR (SEQ ID NO: 84275), APTQL (SEQ ID NO: 84134):EPLT (SEQ ID NO: 84111):EQLSN (SEQ ID NO: 84178):NMVVR (SEQ ID NO: 84275), APTKL (SEQ ID NO: 84131):EPLT (SEQ ID NO: 84111):EQLSN (SEQ ID NO: 84178):NMVVK (SEQ ID NO: 84274), VPTKL (SEQ ID NO: 84381):EPLT (SEQ ID NO: 84111):EQLSN (SEQ ID NO: 84178):EGMSVAE (SEQ ID NO: 84411), VPTKL (SEQ ID NO: 84381):EPLT (SEQ ID NO: 84111):EQLSN (SEQ ID NO: 84178):GMAVS (SEQ ID NO: 84194), TPTKM (SEQ ID NO: 84327):EPLT (SEQ ID NO: 84111):EQLSN (SEQ ID NO: 84178):GMVVD (SEQ ID NO: 84204), VPARL (SEQ ID NO: 84352):EPLT (SEQ ID NO: 84111):EQLSN (SEQ ID NO: 84178):DMVVE (SEQ ID NO: 84161), VPTRL (SEQ ID NO: 84385):EPLT (SEQ ID NO: 84111):EQLSN (SEQ ID NO: 84178):DMVVE (SEQ ID NO: 84161), APVKT (SEQ ID NO: 84144):EPLT (SEQ ID NO: 84111):EQLSN (SEQ ID NO: 84178):MIVEE (SEQ ID NO: 84241), VPQAL (SEQ ID NO: 84364):EPLT (SEQ ID NO: 84111):EQLSN (SEQ ID NO: 84178):MIVRS (SEQ ID NO: 84243), VPQDL (SEQ ID NO: 84365):EPLT (SEQ ID NO: 84111):EQLSN (SEQ ID NO: 84178):MVVKS (SEQ ID NO: 84256), VPTEE (SEQ ID NO: 84377):EPLT (SEQ ID NO: 84111):EQLSN (SEQ ID NO: 84178):FLQHN (SEQ ID NO: 84184), VPTGQ (SEQ ID NO: 84379):EPLT (SEQ ID NO: 84111):EQLSN (SEQ ID NO: 84178):LEEHS (SEQ ID NO: 84217), SRVHH (SEQ ID NO: 84297):EPLT (SEQ ID NO: 84111):EQLSN (SEQ ID NO: 84178):RLEEH (SEQ ID NO: 84279), TQVQL (SEQ ID NO: 84340):EPLT (SEQ ID NO: 84111):EQLSN (SEQ ID NO: 84178):TLEDH (SEQ ID NO: 84307), VPQEL (SEQ ID NO: 84367):EPLT (SEQ ID NO: 84111):EQLSN (SEQ ID NO: 84178):DMVKS (SEQ ID NO: 84158), VPQKM (SEQ ID NO: 84371):EPLT (SEQ ID NO: 84111):EQLSN (SEQ ID NO: 84178):NMVKS (SEQ ID NO: 84270), VPQEL (SEQ ID NO: 84367):EPLT (SEQ ID NO: 84111):EQLSN (SEQ ID NO: 84178):EMVKS (SEQ ID NO: 84172), VPQKL (SEQ ID NO: 84370):EPLT (SEQ ID NO: 84111):EQLSN (SEQ ID NO: 84178):NMVKS (SEQ ID NO: 84270), VPQQL (SEQ ID NO: 84373):EPLT (SEQ ID NO: 84111):EQLSN (SEQ ID NO: 84178):NMVKS (SEQ ID NO: 84270), VPQKL (SEQ ID NO: 84370):EPLT (SEQ ID NO: 84111):EQLSN (SEQ ID NO: 84178):EGMSVKS (SEQ ID NO: 84413), VPQKL (SEQ ID NO: 84370):EPLT (SEQ ID NO: 84111):EQLSN (SEQ ID NO: 84178):GMVKS (SEQ ID NO: 84202), VPQKM (SEQ ID NO: 84371):EPLT (SEQ ID NO: 84111):EQLSN (SEQ ID NO: 84178):GMVKS (SEQ ID NO: 84202), VPQRL (SEQ ID NO: 84374):EPLT (SEQ ID NO: 84111):EQLSN (SEQ ID NO: 84178):DMVKS (SEQ ID NO: 84158), VPQKT (SEQ ID NO: 84372):EPLT (SEQ ID NO: 84111):EQLSN (SEQ ID NO: 84178):MIVKS (SEQ ID NO: 84242), VPQAL (SEQ ID NO: 84364):EPLT (SEQ ID NO: 84111):EQLSN (SEQ ID NO: 84178):MIVKS (SEQ ID NO: 84242), VPQDL (SEQ ID NO: 84365):EPLT (SEQ ID NO: 84111):EQLSN (SEQ ID NO: 84178):MIVKS (SEQ ID NO: 84242), VPQEE (SEQ ID NO: 84366):EPLT (SEQ ID NO: 84111):EQLSN (SEQ ID NO: 84178):FLVKS (SEQ ID NO: 84188), VPQGQ (SEQ ID NO: 84368):EPLT (SEQ ID NO: 84111):EQLSN (SEQ ID NO: 84178):LEVKS (SEQ ID NO: 84222), VPQHH (SEQ ID NO: 84369):EPLT (SEQ ID NO: 84111):EQLSN (SEQ ID NO: 84178):RLVKS (SEQ ID NO: 84285), VPQQL (SEQ ID NO: 84373):EPLT (SEQ ID NO: 84111):EQLSN (SEQ ID NO: 84178):TLVKS (SEQ ID NO: 84314), VSQDL (SEQ ID NO: 84387):EPLT (SEQ ID NO: 84111):EQLSN (SEQ ID NO: 84178):MIVKS (SEQ ID NO: 84242), VPTEL (SEQ ID NO: 84378):SNIT (SEQ ID NO: 84118):IGEMS (SEQ ID NO: 84209):DMQHN (SEQ ID NO: 84154), VPTKM (SEQ ID NO: 84382):SNIT (SEQ ID NO: 84118):IGEMS (SEQ ID NO: 84209):NMQHN (SEQ ID NO: 84266), VPTEL (SEQ ID NO: 84378):SNIT (SEQ ID NO: 84118):IGEMS (SEQ ID NO: 84209):EMQHN (SEQ ID NO: 84168), VPTKL (SEQ ID NO: 84381):SNIT (SEQ ID NO: 84118):IGEMS (SEQ ID NO: 84209):NMQHN (SEQ ID NO: 84266), VPTQL (SEQ ID NO: 84384):SNIT (SEQ ID NO: 84118):IGEMS (SEQ ID NO: 84209):NMQHN (SEQ ID NO: 84266), VPTKL (SEQ ID NO: 84381):SNIT (SEQ ID NO: 84118):IGEMS (SEQ ID NO: 84209):EGMSQHN (SEQ ID NO: 84409), VPTKL (SEQ ID NO: 84381):SNIT (SEQ ID NO: 84118):IGEMS (SEQ ID NO: 84209):GMQHN (SEQ ID NO: 84198), VPTKM (SEQ ID NO: 84382):SNIT (SEQ ID NO: 84118):IGEMS (SEQ ID NO: 84209):GMQHN (SEQ ID NO: 84198), VPTRL (SEQ ID NO: 84385):SNIT (SEQ ID NO: 84118):IGEMS (SEQ ID NO: 84209):DMQHN (SEQ ID NO: 84154), VPTKT (SEQ ID NO: 84383):SNIT (SEQ ID NO: 84118):IGEMS (SEQ ID NO: 84209):MIQHN (SEQ ID NO: 84238), VPTAL (SEQ ID NO: 84375):SNIT (SEQ ID NO: 84118):IGEMS (SEQ ID NO: 84209):MIQHN (SEQ ID NO: 84238), VPTDL (SEQ ID NO: 84376):SNIT (SEQ ID NO: 84118):IGEMS (SEQ ID NO: 84209):MIQHN (SEQ ID NO: 84238), VPTDL (SEQ ID NO: 84376):SNIT (SEQ ID NO: 84118):IGEMS (SEQ ID NO: 84209):MVQHN (SEQ ID NO: 84252), VPTGQ (SEQ ID NO: 84379):SNIT (SEQ ID NO: 84118):IGEMS (SEQ ID NO: 84209):LEQHN (SEQ ID NO: 84218), VPTEE (SEQ ID NO: 84377):SNIT (SEQ ID NO: 84118):IGEMS (SEQ ID NO: 84209):FLQHN (SEQ ID NO: 84184), VPTHH (SEQ ID NO: 84380):SNIT (SEQ ID NO: 84118):IGEMS (SEQ ID NO: 84209):RLQHN (SEQ ID NO: 84281), VPTQL (SEQ ID NO: 84384):SNIT (SEQ ID NO: 84118):IGEMS (SEQ ID NO: 84209):TLQHN (SEQ ID NO: 84310), VPTEL (SEQ ID NO: 84378):SNIT (SEQ ID NO: 84118):IGEMS (SEQ ID NO: 84209):DMVVE (SEQ ID NO: 84161), VPEKM (SEQ ID NO: 84360):SNIT (SEQ ID NO: 84118):IGEMS (SEQ ID NO: 84209):NMTVE (SEQ ID NO: 84267), VPTEL (SEQ ID NO: 84378):SNIT (SEQ ID NO: 84118):IGEMS (SEQ ID NO: 84209):EMVVE (SEQ ID NO: 84175), APTKL (SEQ ID NO: 84131):SNIT (SEQ ID NO: 84118):IGEMS (SEQ ID NO: 84209):NMVVR (SEQ ID NO: 84275), APTQL (SEQ ID NO: 84134):SNIT (SEQ ID NO: 84118):IGEMS (SEQ ID NO: 84209):NMVVR (SEQ ID NO: 84275), APTKL (SEQ ID NO: 84131):SNIT (SEQ ID NO: 84118):IGEMS (SEQ ID NO: 84209):NMVVK (SEQ ID NO: 84274), VPTKL (SEQ ID NO: 84381):SNIT (SEQ ID NO: 84118):IGEMS (SEQ ID NO: 84209):EGMSVAE (SEQ ID NO: 84411), VPTKL (SEQ ID NO: 84381):SNIT (SEQ ID NO: 84118):IGEMS (SEQ ID NO: 84209):GMAVS (SEQ ID NO: 84194), TPTKM (SEQ ID NO: 84327):SNIT (SEQ ID NO: 84118):IGEMS (SEQ ID NO: 84209):GMVVD (SEQ ID NO: 84204), VPARL (SEQ ID NO: 84352):SNIT (SEQ ID NO: 84118):IGEMS (SEQ ID NO: 84209):DMVVE (SEQ ID NO: 84161), VPTRL (SEQ ID NO: 84385):SNIT (SEQ ID NO: 84118):IGEMS (SEQ ID NO: 84209):DMVVE (SEQ ID NO: 84161), APVKT (SEQ ID NO: 84144):SNIT (SEQ ID NO: 84118):IGEMS (SEQ ID NO: 84209):MIVEE (SEQ ID NO: 84241), VPQAL (SEQ ID NO: 84364):SNIT (SEQ ID NO: 84118):IGEMS (SEQ ID NO: 84209):MIVRS (SEQ ID NO: 84243), VSQDL (SEQ ID NO: 84387):SNIT (SEQ ID NO: 84118):IGEMS (SEQ ID NO: 84209):MIVKS (SEQ ID NO: 84242), VPQDL (SEQ ID NO: 84365):SNIT (SEQ ID NO: 84118):IGEMS (SEQ ID NO: 84209):MVVKS (SEQ ID NO: 84256), VPTGQ (SEQ ID NO: 84379):SNIT (SEQ ID NO: 84118):IGEMS (SEQ ID NO: 84209):LEEHS (SEQ ID NO: 84217), SRVHH (SEQ ID NO: 84297):SNIT (SEQ ID NO: 84118):IGEMS (SEQ ID NO: 84209):RLEEH (SEQ ID NO: 84279), TQVQL (SEQ ID NO: 84340):SNIT (SEQ ID NO: 84118):IGEMS (SEQ ID NO: 84209):TLEDH (SEQ ID NO: 84307), VPTEL (SEQ ID NO: 84378):SNIT (SEQ ID NO: 84118):LGEMS (SEQ ID NO: 84228):DMEHS (SEQ ID NO: 84153), VPTKM (SEQ ID NO: 84382):SNIT (SEQ ID NO: 84118):LGEMS (SEQ ID NO: 84228):NMEHS (SEQ ID NO: 84265), VPTEL (SEQ ID NO: 84378):SNIT (SEQ ID NO: 84118):LGEMS (SEQ ID NO: 84228):EMEHS (SEQ ID NO: 84167), VPTKL (SEQ ID NO: 84381):SNIT (SEQ ID NO: 84118):LGEMS (SEQ ID NO: 84228):NMEHS (SEQ ID NO: 84265), VPTQL (SEQ ID NO: 84384):SNIT (SEQ ID NO: 84118):LGEMS (SEQ ID NO: 84228):NMEHS (SEQ ID NO: 84265), VPTKL (SEQ ID NO: 84381):SNIT (SEQ ID NO: 84118):LGEMS (SEQ ID NO: 84228):EGMSEHS (SEQ ID NO: 84408), VPTKL (SEQ ID NO: 84381):SNIT (SEQ ID NO: 84118):LGEMS (SEQ ID NO: 84228):GMEHS (SEQ ID NO: 84197), VPTKM (SEQ ID NO: 84382):SNIT (SEQ ID NO: 84118):LGEMS (SEQ ID NO: 84228):GMEHS (SEQ ID NO: 84197), VPTRL (SEQ ID NO: 84385):SNIT (SEQ ID NO: 84118):LGEMS (SEQ ID NO: 84228):DMEHS (SEQ ID NO: 84153), VPTKT (SEQ ID NO: 84383):SNIT (SEQ ID NO: 84118):LGEMS (SEQ ID NO: 84228):MIEHS (SEQ ID NO: 84237), VPTAL (SEQ ID NO: 84375):SNIT (SEQ ID NO: 84118):LGEMS (SEQ ID NO: 84228):MIEHS (SEQ ID NO: 84237), VPTDL (SEQ ID NO: 84376):SNIT (SEQ ID NO: 84118):LGEMS (SEQ ID NO: 84228):MIEHS (SEQ ID NO: 84237), VPTDL (SEQ ID NO: 84376):SNIT (SEQ ID NO: 84118):LGEMS (SEQ ID NO: 84228):MVEHS (SEQ ID NO: 84251), VPTEE (SEQ ID NO: 84377):SNIT (SEQ ID NO: 84118):LGEMS (SEQ ID NO: 84228):FLEHS (SEQ ID NO: 84183), VPTHH (SEQ ID NO: 84380):SNIT (SEQ ID NO: 84118):LGEMS (SEQ ID NO: 84228):RLEHS (SEQ ID NO: 84280), VPTQL (SEQ ID NO: 84384):SNIT (SEQ ID NO: 84118):LGEMS (SEQ ID NO: 84228):TLEHS (SEQ ID NO: 84309), VPTEL (SEQ ID NO: 84378):SNIT (SEQ ID NO: 84118):LGEMS (SEQ ID NO: 84228):DMVVE (SEQ ID NO: 84161), VPEKM (SEQ ID NO: 84360):SNIT (SEQ ID NO: 84118):LGEMS (SEQ ID NO: 84228):NMTVE (SEQ ID NO: 84267), VPTEL (SEQ ID NO: 84378):SNIT (SEQ ID NO: 84118):LGEMS (SEQ ID NO: 84228):EMVVE (SEQ ID NO: 84175), APTKL (SEQ ID NO: 84131):SNIT (SEQ ID NO: 84118):LGEMS (SEQ ID NO: 84228):NMVVR (SEQ ID NO: 84275), APTQL (SEQ ID NO: 84134):SNIT (SEQ ID NO: 84118):LGEMS (SEQ ID NO: 84228):NMVVR (SEQ ID NO: 84275), APTKL (SEQ ID NO: 84131):SNIT (SEQ ID NO: 84118):LGEMS (SEQ ID NO: 84228):NMVVK (SEQ ID NO: 84274), VPTKL (SEQ ID NO: 84381):SNIT (SEQ ID NO: 84118):LGEMS (SEQ ID NO: 84228):EGMSVAE (SEQ ID NO: 84411), VPTKL (SEQ ID NO: 84381):SNIT (SEQ ID NO: 84118):LGEMS (SEQ ID NO: 84228):GMAVS (SEQ ID NO: 84194), TPTKM (SEQ ID NO: 84327):SNIT (SEQ ID NO: 84118):LGEMS (SEQ ID NO: 84228):GMVVD (SEQ ID NO: 84204), VPARL (SEQ ID NO: 84352):SNIT (SEQ ID NO: 84118):LGEMS (SEQ ID NO: 84228):DMVVE (SEQ ID NO: 84161), VPTRL (SEQ ID NO: 84385):SNIT (SEQ ID NO: 84118):LGEMS (SEQ ID NO: 84228):DMVVE (SEQ ID NO: 84161), APVKT (SEQ ID NO: 84144):SNIT (SEQ ID NO: 84118):LGEMS (SEQ ID NO: 84228):MIVEE (SEQ ID NO: 84241), VPQAL (SEQ ID NO: 84364):SNIT (SEQ ID NO: 84118):LGEMS (SEQ ID NO: 84228):MIVRS (SEQ ID NO: 84243), VSQDL (SEQ ID NO: 84387):SNIT (SEQ ID NO: 84118):LGEMS (SEQ ID NO: 84228):MIVKS (SEQ ID NO: 84242), VPQDL (SEQ ID NO: 84365):SNIT (SEQ ID NO: 84118):LGEMS (SEQ ID NO: 84228):MVVKS (SEQ ID NO: 84256), VPTEE (SEQ ID NO: 84377):SNIT (SEQ ID NO: 84118):LGEMS (SEQ ID NO: 84228):FLQHN (SEQ ID NO: 84184), SRVHH (SEQ ID NO: 84297):SNIT (SEQ ID NO: 84118):LGEMS (SEQ ID NO: 84228):RLEEH (SEQ ID NO: 84279), TQVQL (SEQ ID NO: 84340):SNIT (SEQ ID NO: 84118):LGEMS (SEQ ID NO: 84228):TLEDH (SEQ ID NO: 84307), SRVEL (SEQ ID NO: 84295):RSVK (SEQ ID NO: 84115):KEVQV (SEQ ID NO: 84210):DMEEH (SEQ ID NO: 84152), SRVKM (SEQ ID NO: 84299):RSVK (SEQ ID NO: 84115):KEVQV (SEQ ID NO: 84210):NMEEH (SEQ ID NO: 84264), SRVEL (SEQ ID NO: 84295):RSVK (SEQ ID NO: 84115):KEVQV (SEQ ID NO: 84210):EMEEH (SEQ ID NO: 84166), SRVKL (SEQ ID NO: 84298):RSVK (SEQ ID NO: 84115):KEVQV (SEQ ID NO: 84210):NMEEH (SEQ ID NO: 84264), SRVQL (SEQ ID NO: 84301):RSVK (SEQ ID NO: 84115):KEVQV (SEQ ID NO: 84210):NMEEH (SEQ ID NO: 84264), SRVKL (SEQ ID NO: 84298):RSVK (SEQ ID NO: 84115):KEVQV (SEQ ID NO: 84210):EGMSEEH (SEQ ID NO: 84407), SRVKL (SEQ ID NO: 84298):RSVK (SEQ ID NO: 84115):KEVQV (SEQ ID NO: 84210):GMEEH (SEQ ID NO: 84196), SRVKM (SEQ ID NO: 84299):RSVK (SEQ ID NO: 84115):KEVQV (SEQ ID NO: 84210):GMEEH (SEQ ID NO: 84196), SRVRL (SEQ ID NO: 84302):RSVK (SEQ ID NO: 84115):KEVQV (SEQ ID NO: 84210):DMEEH (SEQ ID NO: 84152), SRVKT (SEQ ID NO: 84300):RSVK (SEQ ID NO: 84115):KEVQV (SEQ ID NO: 84210):MIEEH (SEQ ID NO: 84236), SRVAL (SEQ ID NO: 84292):RSVK (SEQ ID NO: 84115):KEVQV (SEQ ID NO: 84210):MIEEH (SEQ ID NO: 84236), SRVDL (SEQ ID NO: 84293):RSVK (SEQ ID NO: 84115):KEVQV (SEQ ID NO: 84210):MIEEH (SEQ ID NO: 84236), SRVDL (SEQ ID NO: 84293):RSVK (SEQ ID NO: 84115):KEVQV (SEQ ID NO: 84210):MVEEH (SEQ ID NO: 84250), SRVEE (SEQ ID NO: 84294):RSVK (SEQ ID NO: 84115):KEVQV (SEQ ID NO: 84210):FLEEH (SEQ ID NO: 84182), SRVGQ (SEQ ID NO: 84296):RSVK (SEQ ID NO: 84115):KEVQV (SEQ ID NO: 84210):LEEEH (SEQ ID NO: 84216), SRVQL (SEQ ID NO: 84301):RSVK (SEQ ID NO: 84115):KEVQV (SEQ ID NO: 84210):TLEEH (SEQ ID NO: 84308), VPTEL (SEQ ID NO: 84378):RSVK (SEQ ID NO: 84115):KEVQV (SEQ ID NO: 84210):DMVVE (SEQ ID NO: 84161), VPEKM (SEQ ID NO: 84360):RSVK (SEQ ID NO: 84115):KEVQV (SEQ ID NO: 84210):NMTVE (SEQ ID NO: 84267), VPTEL (SEQ ID NO: 84378):RSVK (SEQ ID NO: 84115):KEVQV (SEQ ID NO: 84210):EMVVE (SEQ ID NO: 84175), APTKL (SEQ ID NO: 84131):RSVK (SEQ ID NO: 84115):KEVQV (SEQ ID NO: 84210):NMVVR (SEQ ID NO: 84275), APTQL (SEQ ID NO: 84134):RSVK (SEQ ID NO: 84115):KEVQV (SEQ ID NO: 84210):NMVVR (SEQ ID NO: 84275), APTKL (SEQ ID NO: 84131):RSVK (SEQ ID NO: 84115):KEVQV (SEQ ID NO: 84210):NMVVK (SEQ ID NO: 84274), VPTKL (SEQ ID NO: 84381):RSVK (SEQ ID NO: 84115):KEVQV (SEQ ID NO: 84210):EGMSVAE (SEQ ID NO: 84411), VPTKL (SEQ ID NO: 84381):RSVK (SEQ ID NO: 84115):KEVQV (SEQ ID NO: 84210):GMAVS (SEQ ID NO: 84194), TPTKM (SEQ ID NO: 84327):RSVK (SEQ ID NO: 84115):KEVQV (SEQ ID NO: 84210):GMVVD (SEQ ID NO: 84204), VPARL (SEQ ID NO: 84352):RSVK (SEQ ID NO: 84115):KEVQV (SEQ ID NO: 84210):DMVVE (SEQ ID NO: 84161), VPTRL (SEQ ID NO: 84385):RSVK (SEQ ID NO: 84115):KEVQV (SEQ ID NO: 84210):DMVVE (SEQ ID NO: 84161), APVKT (SEQ ID NO: 84144):RSVK (SEQ ID NO: 84115):KEVQV (SEQ ID NO: 84210):MIVEE (SEQ ID NO: 84241), VPQAL (SEQ ID NO: 84364):RSVK (SEQ ID NO: 84115):KEVQV (SEQ ID NO: 84210):MIVRS (SEQ ID NO: 84243), VSQDL (SEQ ID NO: 84387):RSVK (SEQ ID NO: 84115):KEVQV (SEQ ID NO: 84210):MIVKS (SEQ ID NO: 84242), VPQDL (SEQ ID NO: 84365):RSVK (SEQ ID NO: 84115):KEVQV (SEQ ID NO: 84210):MVVKS (SEQ ID NO: 84256), VPTEE (SEQ ID NO: 84377):RSVK (SEQ ID NO: 84115):KEVQV (SEQ ID NO: 84210):FLQHN (SEQ ID NO: 84184), VPTGQ (SEQ ID NO: 84379):RSVK (SEQ ID NO: 84115):KEVQV (SEQ ID NO: 84210):LEEHS (SEQ ID NO: 84217), TQVQL (SEQ ID NO: 84340):RSVK (SEQ ID NO: 84115):KEVQV (SEQ ID NO: 84210):TLEDH (SEQ ID NO: 84307), TQVEL (SEQ ID NO: 84334):RPVQ (SEQ ID NO: 84114):KKATV (SEQ ID NO: 84212):DMEDH (SEQ ID NO: 84151), TQVKM (SEQ ID NO: 84338):RPVQ (SEQ ID NO: 84114):KKATV (SEQ ID NO: 84212):NMEDH (SEQ ID NO: 84263), TQVEL (SEQ ID NO: 84334):RPVQ (SEQ ID NO: 84114):KKATV (SEQ ID NO: 84212):EMEDH (SEQ ID NO: 84165), TQVKL (SEQ ID NO: 84337):RPVQ (SEQ ID NO: 84114):KKATV (SEQ ID NO: 84212):NMEDH (SEQ ID NO: 84263), TQVQL (SEQ ID NO: 84340):RPVQ (SEQ ID NO: 84114):KKATV (SEQ ID NO: 84212):NMEDH (SEQ ID NO: 84263), TQVKL (SEQ ID NO: 84337):RPVQ (SEQ ID NO: 84114):KKATV (SEQ ID NO: 84212):EGMSEDH (SEQ ID NO: 84406), TQVKL (SEQ ID NO: 84337):RPVQ (SEQ ID NO: 84114):KKATV (SEQ ID NO: 84212):GMEDH (SEQ ID NO: 84195), TQVKM (SEQ ID NO: 84338):RPVQ (SEQ ID NO: 84114):KKATV (SEQ ID NO: 84212):GMEDH (SEQ ID NO: 84195), TQVRL (SEQ ID NO: 84341):RPVQ (SEQ ID NO: 84114):KKATV (SEQ ID NO: 84212):DMEDH (SEQ ID NO: 84151), TQVKT (SEQ ID NO: 84339):RPVQ (SEQ ID NO: 84114):KKATV (SEQ ID NO: 84212):MIEDH (SEQ ID NO: 84235), TQVAL (SEQ ID NO: 84331):RPVQ (SEQ ID NO: 84114):KKATV (SEQ ID NO: 84212):MIEDH (SEQ ID NO: 84235), TQVDL (SEQ ID NO: 84332):RPVQ (SEQ ID NO: 84114):KKATV (SEQ ID NO: 84212):MIEDH (SEQ ID NO: 84235), TQVDL (SEQ ID NO: 84332):RPVQ (SEQ ID NO: 84114):KKATV (SEQ ID NO: 84212):MVEDH (SEQ ID NO: 84249), TQVEE (SEQ ID NO: 84333):RPVQ (SEQ ID NO: 84114):KKATV (SEQ ID NO: 84212):FLEDH (SEQ ID NO: 84181), TQVGQ (SEQ ID NO: 84335):RPVQ (SEQ ID NO: 84114):KKATV (SEQ ID NO: 84212):LEEDH (SEQ ID NO: 84215), TQVHH (SEQ ID NO: 84336):RPVQ (SEQ ID NO: 84114):KKATV (SEQ ID NO: 84212):RLEDH (SEQ ID NO: 84278), VPTEL (SEQ ID NO: 84378):RPVQ (SEQ ID NO: 84114):KKATV (SEQ ID NO: 84212):DMVVE (SEQ ID NO: 84161), VPEKM (SEQ ID NO: 84360):RPVQ (SEQ ID NO: 84114):KKATV (SEQ ID NO: 84212):NMTVE (SEQ ID NO: 84267), VPTEL (SEQ ID NO: 84378):RPVQ (SEQ ID NO: 84114):KKATV (SEQ ID NO: 84212):EMVVE (SEQ ID NO: 84175), APTKL (SEQ ID NO: 84131):RPVQ (SEQ ID NO: 84114):KKATV (SEQ ID NO: 84212):NMVVR (SEQ ID NO: 84275), APTQL (SEQ ID NO: 84134):RPVQ (SEQ ID NO: 84114):KKATV (SEQ ID NO: 84212):NMVVR (SEQ ID NO: 84275), APTKL (SEQ ID NO: 84131):RPVQ (SEQ ID NO: 84114):KKATV (SEQ ID NO: 84212):NMVVK (SEQ ID NO: 84274), VPTKL (SEQ ID NO: 84381):RPVQ (SEQ ID NO: 84114):KKATV (SEQ ID NO: 84212):EGMSVAE (SEQ ID NO: 84411), VPTKL (SEQ ID NO: 84381):RPVQ (SEQ ID NO: 84114):KKATV (SEQ ID NO: 84212):GMAVS (SEQ ID NO: 84194), TPTKM (SEQ ID NO: 84327):RPVQ (SEQ ID NO: 84114):KKATV (SEQ ID NO: 84212):GMVVD (SEQ ID NO: 84204), VPARL (SEQ ID NO: 84352):RPVQ (SEQ ID NO: 84114):KKATV (SEQ ID NO: 84212):DMVVE (SEQ ID NO: 84161), VPTRL (SEQ ID NO: 84385):RPVQ (SEQ ID NO: 84114):KKATV (SEQ ID NO: 84212):DMVVE (SEQ ID NO: 84161), APVKT (SEQ ID NO: 84144):RPVQ (SEQ ID NO: 84114):KKATV (SEQ ID NO: 84212):MIVEE (SEQ ID NO: 84241), VPQAL (SEQ ID NO: 84364):RPVQ (SEQ ID NO: 84114):KKATV (SEQ ID NO: 84212):MIVRS (SEQ ID NO: 84243), VSQDL (SEQ ID NO: 84387):RPVQ (SEQ ID NO: 84114):KKATV (SEQ ID NO: 84212):MIVKS (SEQ ID NO: 84242), VPQDL (SEQ ID NO: 84365):RPVQ (SEQ ID NO: 84114):KKATV (SEQ ID NO: 84212):MVVKS (SEQ ID NO: 84256), VPTEE (SEQ ID NO: 84377):RPVQ (SEQ ID NO: 84114):KKATV (SEQ ID NO: 84212):FLQHN (SEQ ID NO: 84184), VPTGQ (SEQ ID NO: 84379):RPVQ (SEQ ID NO: 84114):KKATV (SEQ ID NO: 84212):LEEHS (SEQ ID NO: 84217) and SRVHH (SEQ ID NO: 84297):RPVQ (SEQ ID NO: 84114):KKATV (SEQ ID NO: 84212):RLEEH (SEQ ID NO: 84279). More particularly, the quadruplet PEP5:PEP1:PEP2:PEP6 is selected from the group consisting of VPTKM (SEQ ID NO: 84382):SAIS (SEQ ID NO: 84116):LKNYQ (SEQ ID NO: 84230):NMVVE (SEQ ID NO: 84273), VPTKL (SEQ ID NO: 84381):SAIS (SEQ ID NO: 84116):LKNYQ (SEQ ID NO: 84230):NMVVE (SEQ ID NO: 84273), VPTQL (SEQ ID NO: 84384):SAIS (SEQ ID NO: 84116):LKNYQ (SEQ ID NO: 84230):NMVVE (SEQ ID NO: 84273), VPTKL (SEQ ID NO: 84381):SAIS (SEQ ID NO: 84116):LKNYQ (SEQ ID NO: 84230):EGMSVVE (SEQ ID NO: 84416), VPTKL (SEQ ID NO: 84381):SAIS (SEQ ID NO: 84116):LKNYQ (SEQ ID NO: 84230):GMVVE (SEQ ID NO: 84205), VPTKM (SEQ ID NO: 84382):SAIS (SEQ ID NO: 84116):LKNYQ (SEQ ID NO: 84230):GMVVE (SEQ ID NO: 84205), VPTRL (SEQ ID NO: 84385):SAIS (SEQ ID NO: 84116):LKNYQ (SEQ ID NO: 84230):DMVVE (SEQ ID NO: 84161), VPTKT (SEQ ID NO: 84383):SAIS (SEQ ID NO: 84116):LKNYQ (SEQ ID NO: 84230):MIVVE (SEQ ID NO: 84245), VPTAL (SEQ ID NO: 84375):SAIS (SEQ ID NO: 84116):LKNYQ (SEQ ID NO: 84230):MIVVE (SEQ ID NO: 84245), VPTDL (SEQ ID NO: 84376):SAIS (SEQ ID NO: 84116):LKNYQ (SEQ ID NO: 84230):MIVVE (SEQ ID NO: 84245), VPTDL (SEQ ID NO: 84376):SAIS (SEQ ID NO: 84116):LKNYQ (SEQ ID NO: 84230):MVVVE (SEQ ID NO: 84259), VPEKM (SEQ ID NO: 84360):SAIS (SEQ ID NO: 84116):LKNYQ (SEQ ID NO: 84230):NMTVE (SEQ ID NO: 84267), APTKL (SEQ ID NO: 84131):SAIS (SEQ ID NO: 84116):LKNYQ (SEQ ID NO: 84230):NMVVR (SEQ ID NO: 84275), APTQL (SEQ ID NO: 84134):SAIS (SEQ ID NO: 84116):LKNYQ (SEQ ID NO: 84230):NMVVR (SEQ ID NO: 84275), APTKL (SEQ ID NO: 84131):SAIS (SEQ ID NO: 84116):LKNYQ (SEQ ID NO: 84230):NMVVK (SEQ ID NO: 84274), VPTKL (SEQ ID NO: 84381):SAIS (SEQ ID NO: 84116):LKNYQ (SEQ ID NO: 84230):EGMSVAE (SEQ ID NO: 84411), VPTKL (SEQ ID NO: 84381):SAIS (SEQ ID NO: 84116):LKNYQ (SEQ ID NO: 84230):GMAVS (SEQ ID NO: 84194), TPTKM (SEQ ID NO: 84327):SAIS (SEQ ID NO: 84116):LKNYQ (SEQ ID NO: 84230):GMVVD (SEQ ID NO: 84204), VPARL (SEQ ID NO: 84352):SAIS (SEQ ID NO: 84116):LKNYQ (SEQ ID NO: 84230):DMVVE (SEQ ID NO: 84161), APVKT (SEQ ID NO: 84144):SAIS (SEQ ID NO: 84116):LKNYQ (SEQ ID NO: 84230):MIVEE (SEQ ID NO: 84241), VPQAL (SEQ ID NO: 84364):SAIS (SEQ ID NO: 84116):LKNYQ (SEQ ID NO: 84230):MIVRS (SEQ ID NO: 84243), VSQDL (SEQ ID NO: 84387):SAIS (SEQ ID NO: 84116):LKNYQ (SEQ ID NO: 84230):MIVKS (SEQ ID NO: 84242), VPQDL (SEQ ID NO: 84365):SAIS (SEQ ID NO: 84116):LKNYQ (SEQ ID NO: 84230):MVVKS (SEQ ID NO: 84256), VPTEE (SEQ ID NO: 84377):SAIS (SEQ ID NO: 84116):LKNYQ (SEQ ID NO: 84230):FLQHN (SEQ ID NO: 84184), VPTGQ (SEQ ID NO: 84379):SAIS (SEQ ID NO: 84116):LKNYQ (SEQ ID NO: 84230):LEEHS (SEQ ID NO: 84217), SRVHH (SEQ ID NO: 84297):SAIS (SEQ ID NO: 84116):LKNYQ (SEQ ID NO: 84230):RLEEH (SEQ ID NO: 84279), TQVQL (SEQ ID NO: 84340):SAIS (SEQ ID NO: 84116):LKNYQ (SEQ ID NO: 84230):TLEDH (SEQ ID NO: 84307), VPEEL (SEQ ID NO: 84356):SSLS (SEQ ID NO: 84121):LKVYP (SEQ ID NO: 84231):DMTVE (SEQ ID NO: 84155), VPEEL (SEQ ID NO: 84356):SSLS (SEQ ID NO: 84121):LKVYP (SEQ ID NO: 84231):EMTVE (SEQ ID NO: 84169), VPEKL (SEQ ID NO: 84359):SSLS (SEQ ID NO: 84121):LKVYP (SEQ ID NO: 84231):NMTVE (SEQ ID NO: 84267), VPEQL (SEQ ID NO: 84362):SSLS (SEQ ID NO: 84121):LKVYP (SEQ ID NO: 84231):NMTVE (SEQ ID NO: 84267), VPEKL (SEQ ID NO: 84359):SSLS (SEQ ID NO: 84121):LKVYP (SEQ ID NO: 84231):EGMSTVE (SEQ ID NO: 84410), VPEKL (SEQ ID NO: 84359):SSLS (SEQ ID NO: 84121):LKVYP (SEQ ID NO: 84231):GMTVE (SEQ ID NO: 84199), VPEKM (SEQ ID NO: 84360):SSLS (SEQ ID NO: 84121):LKVYP (SEQ ID NO: 84231):GMTVE (SEQ ID NO: 84199), VPERL (SEQ ID NO: 84363):SSLS (SEQ ID NO: 84121):LKVYP (SEQ ID NO: 84231):DMTVE (SEQ ID NO: 84155), VPEKT (SEQ ID NO: 84361):SSLS (SEQ ID NO: 84121):LKVYP (SEQ ID NO: 84231):MITVE (SEQ ID NO: 84239), VPEAL (SEQ ID NO: 84353):SSLS (SEQ ID NO: 84121):LKVYP (SEQ ID NO: 84231):MITVE (SEQ ID NO: 84239), VPEDL (SEQ ID NO: 84354):SSLS (SEQ ID NO: 84121):LKVYP (SEQ ID NO: 84231):MITVE (SEQ ID NO: 84239), VPEDL (SEQ ID NO: 84354):SSLS (SEQ ID NO: 84121):LKVYP (SEQ ID NO: 84231):MVTVE (SEQ ID NO: 84253), VPTEL (SEQ ID NO: 84378):SSLS (SEQ ID NO: 84121):LKVYP (SEQ ID NO: 84231):DMVVE (SEQ ID NO: 84161), VPTEL (SEQ ID NO: 84378):SSLS (SEQ ID NO: 84121):LKVYP (SEQ ID NO: 84231):EMVVE (SEQ ID NO: 84175), APTKL (SEQ ID NO: 84131):SSLS (SEQ ID NO: 84121):LKVYP (SEQ ID NO: 84231):NMVVR (SEQ ID NO: 84275), APTQL (SEQ ID NO: 84134):SSLS (SEQ ID NO: 84121):LKVYP (SEQ ID NO: 84231):NMVVR (SEQ ID NO: 84275), APTKL (SEQ ID NO: 84131):SSLS (SEQ ID NO: 84121):LKVYP (SEQ ID NO: 84231):NMVVK (SEQ ID NO: 84274), VPTKL (SEQ ID NO: 84381):SSLS (SEQ ID NO: 84121):LKVYP (SEQ ID NO: 84231):EGMSVAE (SEQ ID NO: 84411), VPTKL (SEQ ID NO: 84381):SSLS (SEQ ID NO: 84121):LKVYP (SEQ ID NO: 84231):GMAVS (SEQ ID NO: 84194), TPTKM (SEQ ID NO: 84327):SSLS (SEQ ID NO: 84121):LKVYP (SEQ ID NO: 84231):GMVVD (SEQ ID NO: 84204), VPARL (SEQ ID NO: 84352):SSLS (SEQ ID NO: 84121):LKVYP (SEQ ID NO: 84231):DMVVE (SEQ ID NO: 84161), VPTRL (SEQ ID NO: 84385):SSLS (SEQ ID NO: 84121):LKVYP (SEQ ID NO: 84231):DMVVE (SEQ ID NO: 84161), APVKT (SEQ ID NO: 84144):SSLS (SEQ ID NO: 84121):LKVYP (SEQ ID NO: 84231):MIVEE (SEQ ID NO: 84241), VPQAL (SEQ ID NO: 84364):SSLS (SEQ ID NO: 84121):LKVYP (SEQ ID NO: 84231):MIVRS (SEQ ID NO: 84243), VSQDL (SEQ ID NO: 84387):SSLS (SEQ ID NO: 84121):LKVYP (SEQ ID NO: 84231):MIVKS (SEQ ID NO: 84242), VPQDL (SEQ ID NO: 84365):SSLS (SEQ ID NO: 84121):LKVYP (SEQ ID NO: 84231):MVVKS (SEQ ID NO: 84256), VPTEE (SEQ ID NO: 84377):SSLS (SEQ ID NO: 84121):LKVYP (SEQ ID NO: 84231):FLQHN (SEQ ID NO: 84184), VPTGQ (SEQ ID NO: 84379):SSLS (SEQ ID NO: 84121):LKVYP (SEQ ID NO: 84231):LEEHS (SEQ ID NO: 84217), SRVHH (SEQ ID NO: 84297):SSLS (SEQ ID NO: 84121):LKVYP (SEQ ID NO: 84231):RLEEH (SEQ ID NO: 84279), TQVQL (SEQ ID NO: 84340):SSLS (SEQ ID NO: 84121):LKVYP (SEQ ID NO: 84231):TLEDH (SEQ ID NO: 84307), APTEL (SEQ ID NO: 84128):NAIS (SEQ ID NO: 84113):LKKYR (SEQ ID NO: 84229):DMVVR (SEQ ID NO: 84163), APTKM (SEQ ID NO: 84132):NAIS (SEQ ID NO: 84113):LKKYR (SEQ ID NO: 84229):NMVVR (SEQ ID NO: 84275), APTEL (SEQ ID NO: 84128):NAIS (SEQ ID NO: 84113):LKKYR (SEQ ID NO: 84229):EMVVR (SEQ ID NO: 84177), APTKL (SEQ ID NO: 84131):NAIS (SEQ ID NO: 84113):LKKYR (SEQ ID NO: 84229):NMVVR (SEQ ID NO: 84275), APTKL (SEQ ID NO: 84131):NAIS (SEQ ID NO: 84113):LKKYR (SEQ ID NO: 84229):EGMSVVR (SEQ ID NO: 84418), APTKL (SEQ ID NO: 84131):NAIS (SEQ ID NO: 84113):LKKYR (SEQ ID NO: 84229):GMVVR (SEQ ID NO: 84207), APTKM (SEQ ID NO: 84132):NAIS (SEQ ID NO: 84113):LKKYR (SEQ ID NO: 84229):GMVVR (SEQ ID NO: 84207), APTRL (SEQ ID NO: 84135):NAIS (SEQ ID NO: 84113):LKKYR (SEQ ID NO: 84229):DMVVR (SEQ ID NO: 84163), APTKT (SEQ ID NO: 84133):NAIS (SEQ ID NO: 84113):LKKYR (SEQ ID NO: 84229):MIVVR (SEQ ID NO: 84247), APTAL (SEQ ID NO: 84125):NAIS (SEQ ID NO: 84113):LKKYR (SEQ ID NO: 84229):MIVVR (SEQ ID NO: 84247), APTDL (SEQ ID NO: 84126):NAIS (SEQ ID NO: 84113):LKKYR (SEQ ID NO: 84229):MIVVR (SEQ ID NO: 84247), APTDL (SEQ ID NO: 84126):NAIS (SEQ ID NO: 84113):LKKYR (SEQ ID NO: 84229):MVVVR (SEQ ID NO: 84261), VPTEL (SEQ ID NO: 84378):NAIS (SEQ ID NO: 84113):LKKYR (SEQ ID NO: 84229):DMVVE (SEQ ID NO: 84161), VPEKM (SEQ ID NO: 84360):NAIS (SEQ ID NO: 84113):LKKYR (SEQ ID NO: 84229):NMTVE (SEQ ID NO: 84267), VPTEL (SEQ ID NO: 84378):NAIS (SEQ ID NO: 84113):LKKYR (SEQ ID NO: 84229):EMVVE (SEQ ID NO: 84175), APTKL (SEQ ID NO: 84131):NAIS (SEQ ID NO: 84113):LKKYR (SEQ ID NO: 84229):NMVVK (SEQ ID NO: 84274), VPTKL (SEQ ID NO: 84381):NAIS (SEQ ID NO: 84113):LKKYR (SEQ ID NO: 84229):EGMSVAE (SEQ ID NO: 84411), VPTKL (SEQ ID NO: 84381):NAIS (SEQ ID NO: 84113):LKKYR (SEQ ID NO: 84229):GMAVS (SEQ ID NO: 84194), TPTKM (SEQ ID NO: 84327):NAIS (SEQ ID NO: 84113):LKKYR (SEQ ID NO: 84229):GMVVD (SEQ ID NO: 84204), VPARL (SEQ ID NO: 84352):NAIS (SEQ ID NO: 84113):LKKYR (SEQ ID NO: 84229):DMVVE (SEQ ID NO: 84161), VPTRL (SEQ ID NO: 84385):NAIS (SEQ ID NO: 84113):LKKYR (SEQ ID NO: 84229):DMVVE (SEQ ID NO: 84161), APVKT (SEQ ID NO: 84144):NAIS (SEQ ID NO: 84113):LKKYR (SEQ ID NO: 84229):MIVEE (SEQ ID NO: 84241), VPQAL (SEQ ID NO: 84364):NAIS (SEQ ID NO: 84113):LKKYR (SEQ ID NO: 84229):MIVRS (SEQ ID NO: 84243), VSQDL (SEQ ID NO: 84387):NAIS (SEQ ID NO: 84113):LKKYR (SEQ ID NO: 84229):MIVKS (SEQ ID NO: 84242), VPQDL (SEQ ID NO: 84365):NAIS (SEQ ID NO: 84113):LKKYR (SEQ ID NO: 84229):MVVKS (SEQ ID NO: 84256), VPTEE (SEQ ID NO: 84377):NAIS (SEQ ID NO: 84113):LKKYR (SEQ ID NO: 84229):FLQHN (SEQ ID NO: 84184), VPTGQ (SEQ ID NO: 84379):NAIS (SEQ ID NO: 84113):LKKYR (SEQ ID NO: 84229):LEEHS (SEQ ID NO: 84217), SRVHH (SEQ ID NO: 84297):NAIS (SEQ ID NO: 84113):LKKYR (SEQ ID NO: 84229):RLEEH (SEQ ID NO: 84279), TQVQL (SEQ ID NO: 84340):NAIS (SEQ ID NO: 84113):LKKYR (SEQ ID NO: 84229):TLEDH (SEQ ID NO: 84307), APTEL (SEQ ID NO: 84128):SATS (SEQ ID NO: 84117):LRKHR (SEQ ID NO: 84233):DMVVK (SEQ ID NO: 84162), APTKM (SEQ ID NO: 84132):SATS (SEQ ID NO: 84117):LRKHR (SEQ ID NO: 84233):NMVVK (SEQ ID NO: 84274), APTEL (SEQ ID NO: 84128):SATS (SEQ ID NO: 84117):LRKHR (SEQ ID NO: 84233):EMVVK (SEQ ID NO: 84176), APTKL (SEQ ID NO: 84131):SATS (SEQ ID NO: 84117):LRKHR (SEQ ID NO: 84233):NMVVK (SEQ ID NO: 84274), APTQL (SEQ ID NO: 84134):SATS (SEQ ID NO: 84117):LRKHR (SEQ ID NO: 84233):NMVVK (SEQ ID NO: 84274), APTKL (SEQ ID NO: 84131):SATS (SEQ ID NO: 84117):LRKHR (SEQ ID NO: 84233):EGMSVVK (SEQ ID NO: 84417), APTKL (SEQ ID NO: 84131):SATS (SEQ ID NO: 84117):LRKHR (SEQ ID NO: 84233):GMVVK (SEQ ID NO: 84206), APTKM (SEQ ID NO: 84132):SATS (SEQ ID NO: 84117):LRKHR (SEQ ID NO: 84233):GMVVK (SEQ ID NO: 84206), APTRL (SEQ ID NO: 84135):SATS (SEQ ID NO: 84117):LRKHR (SEQ ID NO: 84233):DMVVK (SEQ ID NO: 84162), APTKT (SEQ ID NO: 84133):SATS (SEQ ID NO: 84117):LRKHR (SEQ ID NO: 84233):MIVVK (SEQ ID NO: 84246), APTAL (SEQ ID NO: 84125):SATS (SEQ ID NO: 84117):LRKHR (SEQ ID NO: 84233):MIVVK (SEQ ID NO: 84246), APTDL (SEQ ID NO: 84126):SATS (SEQ ID NO: 84117):LRKHR (SEQ ID NO: 84233):MIVVK (SEQ ID NO: 84246), APTDL (SEQ ID NO: 84126):SATS (SEQ ID NO: 84117):LRKHR (SEQ ID NO: 84233):MVVVK (SEQ ID NO: 84260), VPTEL (SEQ ID NO: 84378):SATS (SEQ ID NO: 84117):LRKHR (SEQ ID NO: 84233):DMVVE (SEQ ID NO: 84161), VPEKM (SEQ ID NO: 84360):SATS (SEQ ID NO: 84117):LRKHR (SEQ ID NO: 84233):NMTVE (SEQ ID NO: 84267), VPTEL (SEQ ID NO: 84378):SATS (SEQ ID NO: 84117):LRKHR (SEQ ID NO: 84233):EMVVE (SEQ ID NO: 84175), APTKL (SEQ ID NO: 84131):SATS (SEQ ID NO: 84117):LRKHR (SEQ ID NO: 84233):NMVVR (SEQ ID NO: 84275), APTQL (SEQ ID NO: 84134):SATS (SEQ ID NO: 84117):LRKHR (SEQ ID NO: 84233):NMVVR (SEQ ID NO: 84275), VPTKL (SEQ ID NO: 84381):SATS (SEQ ID NO: 84117):LRKHR (SEQ ID NO: 84233):EGMSVAE (SEQ ID NO: 84411), VPTKL (SEQ ID NO: 84381):SATS (SEQ ID NO: 84117):LRKHR (SEQ ID NO: 84233):GMAVS (SEQ ID NO: 84194), TPTKM (SEQ ID NO: 84327):SATS (SEQ ID NO: 84117):LRKHR (SEQ ID NO: 84233):GMVVD (SEQ ID NO: 84204), VPARL (SEQ ID NO: 84352):SATS (SEQ ID NO: 84117):LRKHR (SEQ ID NO: 84233):DMVVE (SEQ ID NO: 84161), VPTRL (SEQ ID NO: 84385):SATS (SEQ ID NO: 84117):LRKHR (SEQ ID NO: 84233):DMVVE (SEQ ID NO: 84161), APVKT (SEQ ID NO: 84144):SATS (SEQ ID NO: 84117):LRKHR (SEQ ID NO: 84233):MIVEE (SEQ ID NO: 84241), VPQAL (SEQ ID NO: 84364):SATS (SEQ ID NO: 84117):LRKHR (SEQ ID NO: 84233):MIVRS (SEQ ID NO: 84243), VSQDL (SEQ ID NO: 84387):SATS (SEQ ID NO: 84117):LRKHR (SEQ ID NO: 84233):MIVKS (SEQ ID NO: 84242), VPQDL (SEQ ID NO: 84365):SATS (SEQ ID NO: 84117):LRKHR (SEQ ID NO: 84233):MVVKS (SEQ ID NO: 84256), VPTEE (SEQ ID NO: 84377):SATS (SEQ ID NO: 84117):LRKHR (SEQ ID NO: 84233):FLQHN (SEQ ID NO: 84184), VPTGQ (SEQ ID NO: 84379):SATS (SEQ ID NO: 84117):LRKHR (SEQ ID NO: 84233):LEEHS (SEQ ID NO: 84217), SRVHH (SEQ ID NO: 84297):SATS (SEQ ID NO: 84117):LRKHR (SEQ ID NO: 84233):RLEEH (SEQ ID NO: 84279), TQVQL (SEQ ID NO: 84340):SATS (SEQ ID NO: 84117):LRKHR (SEQ ID NO: 84233):TLEDH (SEQ ID NO: 84307), VPTEL (SEQ ID NO: 84378):SPIS (SEQ ID NO: 84120):LKYHY (SEQ ID NO: 84232):DMVAE (SEQ ID NO: 84156), VPTKM (SEQ ID NO: 84382):SPIS (SEQ ID NO: 84120):LKYHY (SEQ ID NO: 84232):NMVAE (SEQ ID NO: 84268), VPTEL (SEQ ID NO: 84378):SPIS (SEQ ID NO: 84120):LKYHY (SEQ ID NO: 84232):EMVAE (SEQ ID NO: 84170), VPTKL (SEQ ID NO: 84381):SPIS (SEQ ID NO: 84120):LKYHY (SEQ ID NO: 84232):NMVAE (SEQ ID NO: 84268), VPTQL (SEQ ID NO: 84384):SPIS (SEQ ID NO: 84120):LKYHY (SEQ ID NO: 84232):NMVAE (SEQ ID NO: 84268), VPTKL (SEQ ID NO: 84381):SPIS (SEQ ID NO: 84120):LKYHY (SEQ ID NO: 84232):GMVAE (SEQ ID NO: 84200), VPTKM (SEQ ID NO: 84382):SPIS (SEQ ID NO: 84120):LKYHY (SEQ ID NO: 84232):GMVAE (SEQ ID NO: 84200), VPTRL (SEQ ID NO: 84385):SPIS (SEQ ID NO: 84120):LKYHY (SEQ ID NO: 84232):DMVAE (SEQ ID NO: 84156), VPTKT (SEQ ID NO: 84383):SPIS (SEQ ID NO: 84120):LKYHY (SEQ ID NO: 84232):MIVAE (SEQ ID NO: 84240), VPTAL (SEQ ID NO: 84375):SPIS (SEQ ID NO: 84120):LKYHY (SEQ ID NO: 84232):MIVAE (SEQ ID NO: 84240), VPTDL (SEQ ID NO: 84376):SPIS (SEQ ID NO: 84120):LKYHY (SEQ ID NO: 84232):MIVAE (SEQ ID NO: 84240), VPTDL (SEQ ID NO: 84376):SPIS (SEQ ID NO: 84120):LKYHY (SEQ ID NO: 84232):MVVAE (SEQ ID NO: 84254), VPTEL (SEQ ID NO: 84378):SPIS (SEQ ID NO: 84120):LKYHY (SEQ ID NO: 84232):DMVVE (SEQ ID NO: 84161), VPEKM (SEQ ID NO: 84360):SPIS (SEQ ID NO: 84120):LKYHY (SEQ ID NO: 84232):NMTVE (SEQ ID NO: 84267), VPTEL (SEQ ID NO: 84378):SPIS (SEQ ID NO: 84120):LKYHY (SEQ ID NO: 84232):EMVVE (SEQ ID NO: 84175), APTKL (SEQ ID NO: 84131):SPIS (SEQ ID NO: 84120):LKYHY (SEQ ID NO: 84232):NMVVR (SEQ ID NO: 84275), APTQL (SEQ ID NO: 84134):SPIS (SEQ ID NO: 84120):LKYHY (SEQ ID NO: 84232):NMVVR (SEQ ID NO: 84275), APTKL (SEQ ID NO: 84131):SPIS (SEQ ID NO: 84120):LKYHY (SEQ ID NO: 84232):NMVVK (SEQ ID NO: 84274), VPTKL (SEQ ID NO: 84381):SPIS (SEQ ID NO: 84120):LKYHY (SEQ ID NO: 84232):GMAVS (SEQ ID NO: 84194), TPTKM (SEQ ID NO: 84327):SPIS (SEQ ID NO: 84120):LKYHY (SEQ ID NO: 84232):GMVVD (SEQ ID NO: 84204), VPARL (SEQ ID NO: 84352):SPIS (SEQ ID NO: 84120):LKYHY (SEQ ID NO: 84232):DMVVE (SEQ ID NO: 84161), VPTRL (SEQ ID NO: 84385):SPIS (SEQ ID NO: 84120):LKYHY (SEQ ID NO: 84232):DMVVE (SEQ ID NO: 84161), APVKT (SEQ ID NO: 84144):SPIS (SEQ ID NO: 84120):LKYHY (SEQ ID NO: 84232):MIVEE (SEQ ID NO: 84241), VPQAL (SEQ ID NO: 84364):SPIS (SEQ ID NO: 84120):LKYHY (SEQ ID NO: 84232):MIVRS (SEQ ID NO: 84243), VSQDL (SEQ ID NO: 84387):SPIS (SEQ ID NO: 84120):LKYHY (SEQ ID NO: 84232):MIVKS (SEQ ID NO: 84242), VPQDL (SEQ ID NO: 84365):SPIS (SEQ ID NO: 84120):LKYHY (SEQ ID NO: 84232):MVVKS (SEQ ID NO: 84256), VPTEE (SEQ ID NO: 84377):SPIS (SEQ ID NO: 84120):LKYHY (SEQ ID NO: 84232):FLQHN (SEQ ID NO: 84184), VPTGQ (SEQ ID NO: 84379):SPIS (SEQ ID NO: 84120):LKYHY (SEQ ID NO: 84232):LEEHS (SEQ ID NO: 84217), SRVHH (SEQ ID NO: 84297):SPIS (SEQ ID NO: 84120):LKYHY (SEQ ID NO: 84232):RLEEH (SEQ ID NO: 84279), TQVQL (SEQ ID NO: 84340):SPIS (SEQ ID NO: 84120):LKYHY (SEQ ID NO: 84232):TLEDH (SEQ ID NO: 84307), VPTEL (SEQ ID NO: 84378):EPIS (SEQ ID NO: 84109):KFKYE (SEQ ID NO: 84211):DMAVS (SEQ ID NO: 84150), VPTKM (SEQ ID NO: 84382):EPIS (SEQ ID NO: 84109):KFKYE (SEQ ID NO: 84211):NMAVS (SEQ ID NO: 84262), VPTEL (SEQ ID NO: 84378):EPIS (SEQ ID NO: 84109):KFKYE (SEQ ID NO: 84211):EMAVS (SEQ ID NO: 84164), VPTKL (SEQ ID NO: 84381):EPIS (SEQ ID NO: 84109):KFKYE (SEQ ID NO: 84211):NMAVS (SEQ ID NO: 84262), VPTQL (SEQ ID NO: 84384):EPIS (SEQ ID NO: 84109):KFKYE (SEQ ID NO: 84211):NMAVS (SEQ ID NO: 84262), VPTKL (SEQ ID NO: 84381):EPIS (SEQ ID NO: 84109):KFKYE (SEQ ID NO: 84211):EGMSAVS (SEQ ID NO: 84405), VPTKM (SEQ ID NO: 84382):EPIS (SEQ ID NO: 84109):KFKYE (SEQ ID NO: 84211):GMAVS (SEQ ID NO: 84194), VPTRL (SEQ ID NO: 84385):EPIS (SEQ ID NO: 84109):KFKYE (SEQ ID NO: 84211):DMAVS (SEQ ID NO: 84150), VPTKT (SEQ ID NO: 84383):EPIS (SEQ ID NO: 84109):KFKYE (SEQ ID NO: 84211):MIAVS (SEQ ID NO: 84234), VPTAL (SEQ ID NO: 84375):EPIS (SEQ ID NO: 84109):KFKYE (SEQ ID NO: 84211):MIAVS (SEQ ID NO: 84234), VPTDL (SEQ ID NO: 84376):EPIS (SEQ ID NO: 84109):KFKYE (SEQ ID NO: 84211):MIAVS (SEQ ID NO: 84234), VPTDL (SEQ ID NO: 84376):EPIS (SEQ ID NO: 84109):KFKYE (SEQ ID NO: 84211):MVAVS (SEQ ID NO: 84248), VPTEL (SEQ ID NO: 84378):EPIS (SEQ ID NO: 84109):KFKYE (SEQ ID NO: 84211):DMVVE (SEQ ID NO: 84161), VPEKM (SEQ ID NO: 84360):EPIS (SEQ ID NO: 84109):KFKYE (SEQ ID NO: 84211):NMTVE (SEQ ID NO: 84267), VPTEL (SEQ ID NO: 84378):EPIS (SEQ ID NO: 84109):KFKYE (SEQ ID NO: 84211):EMVVE (SEQ ID NO: 84175), APTKL (SEQ ID NO: 84131):EPIS (SEQ ID NO: 84109):KFKYE (SEQ ID NO: 84211):NMVVR (SEQ ID NO: 84275), APTQL (SEQ ID NO: 84134):EPIS (SEQ ID NO: 84109):KFKYE (SEQ ID NO: 84211):NMVVR (SEQ ID NO: 84275), APTKL (SEQ ID NO: 84131):EPIS (SEQ ID NO: 84109):KFKYE (SEQ ID NO: 84211):NMVVK (SEQ ID NO: 84274), VPTKL (SEQ ID NO: 84381):EPIS (SEQ ID NO: 84109):KFKYE (SEQ ID NO: 84211):EGMSVAE (SEQ ID NO: 84411), TPTKM (SEQ ID NO: 84327):EPIS (SEQ ID NO: 84109):KFKYE (SEQ ID NO: 84211):GMVVD (SEQ ID NO: 84204), VPARL (SEQ ID NO: 84352):EPIS (SEQ ID NO: 84109):KFKYE (SEQ ID NO: 84211):DMVVE (SEQ ID NO: 84161), VPTRL (SEQ ID NO: 84385):EPIS (SEQ ID NO: 84109):KFKYE (SEQ ID NO: 84211):DMVVE (SEQ ID NO: 84161), APVKT (SEQ ID NO: 84144):EPIS (SEQ ID NO: 84109):KFKYE (SEQ ID NO: 84211):MIVEE (SEQ ID NO: 84241), VPQAL (SEQ ID NO: 84364):EPIS (SEQ ID NO: 84109):KFKYE (SEQ ID NO: 84211):MIVRS (SEQ ID NO: 84243), VSQDL (SEQ ID NO: 84387):EPIS (SEQ ID NO: 84109):KFKYE (SEQ ID NO: 84211):MIVKS (SEQ ID NO: 84242), VPQDL (SEQ ID NO: 84365):EPIS (SEQ ID NO: 84109):KFKYE (SEQ ID NO: 84211):MVVKS (SEQ ID NO: 84256), VPTEE (SEQ ID NO: 84377):EPIS (SEQ ID NO: 84109):KFKYE (SEQ ID NO: 84211):FLQHN (SEQ ID NO: 84184), VPTGQ (SEQ ID NO: 84379):EPIS (SEQ ID NO: 84109):KFKYE (SEQ ID NO: 84211):LEEHS (SEQ ID NO: 84217), SRVHH (SEQ ID NO: 84297):EPIS (SEQ ID NO: 84109):KFKYE (SEQ ID NO: 84211):RLEEH (SEQ ID NO: 84279), TQVQL (SEQ ID NO: 84340):EPIS (SEQ ID NO: 84109):KFKYE (SEQ ID NO: 84211):TLEDH (SEQ ID NO: 84307), TPTEL (SEQ ID NO: 84323):SPIN (SEQ ID NO: 84119):YGKIP (SEQ ID NO: 84397):DMVVD (SEQ ID NO: 84160), TPTKM (SEQ ID NO: 84327):SPIN (SEQ ID NO: 84119):YGKIP (SEQ ID NO: 84397):NMVVD (SEQ ID NO: 84272), TPTEL (SEQ ID NO: 84323):SPIN (SEQ ID NO: 84119):YGKIP (SEQ ID NO: 84397):EMVVD (SEQ ID NO: 84174), TPTKL (SEQ ID NO: 84326):SPIN (SEQ ID NO: 84119):YGKIP (SEQ ID NO: 84397):NMVVD (SEQ ID NO: 84272), TPTQL (SEQ ID NO: 84329):SPIN (SEQ ID NO: 84119):YGKIP (SEQ ID NO: 84397):NMVVD (SEQ ID NO: 84272), TPTKL (SEQ ID NO: 84326):SPIN (SEQ ID NO: 84119):YGKIP (SEQ ID NO: 84397):EGMSVVD (SEQ ID NO: 84415), TPTKL (SEQ ID NO: 84326):SPIN (SEQ ID NO: 84119):YGKIP (SEQ ID NO: 84397):GMVVD (SEQ ID NO: 84204), TPTRL (SEQ ID NO: 84330):SPIN (SEQ ID NO: 84119):YGKIP (SEQ ID NO: 84397):DMVVD (SEQ ID NO: 84160), TPTKT (SEQ ID NO: 84328):SPIN (SEQ ID NO: 84119):YGKIP (SEQ ID NO: 84397):MIVVD (SEQ ID NO: 84244), TPTAL (SEQ ID NO: 84320):SPIN (SEQ ID NO: 84119):YGKIP (SEQ ID NO: 84397):MIVVD (SEQ ID NO: 84244), TPTDL (SEQ ID NO: 84321):SPIN (SEQ ID NO: 84119):YGKIP (SEQ ID NO: 84397):MIVVD (SEQ ID NO: 84244), TPTDL (SEQ ID NO: 84321):SPIN (SEQ ID NO: 84119):YGKIP (SEQ ID NO: 84397):MVVVD (SEQ ID NO: 84258), VPTEL (SEQ ID NO: 84378):SPIN (SEQ ID NO: 84119):YGKIP (SEQ ID NO: 84397):DMVVE (SEQ ID NO: 84161), VPEKM (SEQ ID NO: 84360):SPIN (SEQ ID NO: 84119):YGKIP (SEQ ID NO: 84397):NMTVE (SEQ ID NO: 84267), VPTEL (SEQ ID NO: 84378):SPIN (SEQ ID NO: 84119):YGKIP (SEQ ID NO: 84397):EMVVE (SEQ ID NO: 84175), APTKL (SEQ ID NO: 84131):SPIN (SEQ ID NO: 84119):YGKIP (SEQ ID NO: 84397):NMVVR (SEQ ID NO: 84275), APTQL (SEQ ID NO: 84134):SPIN (SEQ ID NO: 84119):YGKIP (SEQ ID NO: 84397):NMVVR (SEQ ID NO: 84275), APTKL (SEQ ID NO: 84131):SPIN (SEQ ID NO: 84119):YGKIP (SEQ ID NO: 84397):NMVVK (SEQ ID NO: 84274), VPTKL (SEQ ID NO: 84381):SPIN (SEQ ID NO: 84119):YGKIP (SEQ ID NO: 84397):EGMSVAE (SEQ ID NO: 84411), VPTKL (SEQ ID NO: 84381):SPIN (SEQ ID NO: 84119):YGKIP (SEQ ID NO: 84397):GMAVS (SEQ ID NO: 84194), VPARL (SEQ ID NO: 84352):SPIN (SEQ ID NO: 84119):YGKIP (SEQ ID NO: 84397):DMVVE (SEQ ID NO: 84161), VPTRL (SEQ ID NO: 84385):SPIN (SEQ ID NO: 84119):YGKIP (SEQ ID NO: 84397):DMVVE (SEQ ID NO: 84161), APVKT (SEQ ID NO: 84144):SPIN (SEQ ID NO: 84119):YGKIP (SEQ ID NO: 84397):MIVEE (SEQ ID NO: 84241), VPQAL (SEQ ID NO: 84364):SPIN (SEQ ID NO: 84119):YGKIP (SEQ ID NO: 84397):MIVRS (SEQ ID NO: 84243), VSQDL (SEQ ID NO: 84387):SPIN (SEQ ID NO: 84119):YGKIP (SEQ ID NO: 84397):MIVKS (SEQ ID NO: 84242), VPQDL (SEQ ID NO: 84365):SPIN (SEQ ID NO: 84119):YGKIP (SEQ ID NO: 84397):MVVKS (SEQ ID NO: 84256), VPTEE (SEQ ID NO: 84377):SPIN (SEQ ID NO: 84119):YGKIP (SEQ ID NO: 84397):FLQHN (SEQ ID NO: 84184), VPTGQ (SEQ ID NO: 84379):SPIN (SEQ ID NO: 84119):YGKIP (SEQ ID NO: 84397):LEEHS (SEQ ID NO: 84217), SRVHH (SEQ ID NO: 84297):SPIN (SEQ ID NO: 84119):YGKIP (SEQ ID NO: 84397):RLEEH (SEQ ID NO: 84279), TQVQL (SEQ ID NO: 84340):SPIN (SEQ ID NO: 84119):YGKIP (SEQ ID NO: 84397):TLEDH (SEQ ID NO: 84307), VPAEL (SEQ ID NO: 84345):SPIS (SEQ ID NO: 84120):YKQYE (SEQ ID NO: 84398):DMVVE (SEQ ID NO: 84161), VPAKM (SEQ ID NO: 84349):SPIS (SEQ ID NO: 84120):YKQYE (SEQ ID NO: 84398):NMVVE (SEQ ID NO: 84273), VPAEL (SEQ ID NO: 84345):SPIS (SEQ ID NO: 84120):YKQYE (SEQ ID NO: 84398):EMVVE (SEQ ID NO: 84175), VPAKL (SEQ ID NO: 84348):SPIS (SEQ ID NO: 84120):YKQYE (SEQ ID NO: 84398):NMVVE (SEQ ID NO: 84273), VPAQL (SEQ ID NO: 84351):SPIS (SEQ ID NO: 84120):YKQYE (SEQ ID NO: 84398):NMVVE (SEQ ID NO: 84273), VPAKL (SEQ ID NO: 84348):SPIS (SEQ ID NO: 84120):YKQYE (SEQ ID NO: 84398):EGMSVVE (SEQ ID NO: 84416), VPAKL (SEQ ID NO: 84348):SPIS (SEQ ID NO: 84120):YKQYE (SEQ ID NO: 84398):GMVVE (SEQ ID NO: 84205), VPAKM (SEQ ID NO: 84349):SPIS (SEQ ID NO: 84120):YKQYE (SEQ ID NO: 84398):GMVVE (SEQ ID NO: 84205), VPARL (SEQ ID NO: 84352):SPIS (SEQ ID NO: 84120):YKQYE (SEQ ID NO: 84398):DMVVE (SEQ ID NO: 84161), VPAKT (SEQ ID NO: 84350):SPIS (SEQ ID NO: 84120):YKQYE (SEQ ID NO: 84398):MIVVE (SEQ ID NO: 84245), VPAAL (SEQ ID NO: 84342):SPIS (SEQ ID NO: 84120):YKQYE (SEQ ID NO: 84398):MIVVE (SEQ ID NO: 84245), VPADL (SEQ ID NO: 84343):SPIS (SEQ ID NO: 84120):YKQYE (SEQ ID NO: 84398):MIVVE (SEQ ID NO: 84245), VPADL (SEQ ID NO: 84343):SPIS (SEQ ID NO: 84120):YKQYE (SEQ ID NO: 84398):MVVVE (SEQ ID NO: 84259), VPTEL (SEQ ID NO: 84378):SPIS (SEQ ID NO: 84120):YKQYE (SEQ ID NO: 84398):DMVVE (SEQ ID NO: 84161), VPEKM (SEQ ID NO: 84360):SPIS (SEQ ID NO: 84120):YKQYE (SEQ ID NO: 84398):NMTVE (SEQ ID NO: 84267), VPTEL (SEQ ID NO: 84378):SPIS (SEQ ID NO: 84120):YKQYE (SEQ ID NO: 84398):EMVVE (SEQ ID NO: 84175), APTKL (SEQ ID NO: 84131):SPIS (SEQ ID NO: 84120):YKQYE (SEQ ID NO: 84398):NMVVR (SEQ ID NO: 84275), APTQL (SEQ ID NO: 84134):SPIS (SEQ ID NO: 84120):YKQYE (SEQ ID NO: 84398):NMVVR (SEQ ID NO: 84275), APTKL (SEQ ID NO: 84131):SPIS (SEQ ID NO: 84120):YKQYE (SEQ ID NO: 84398):NMVVK (SEQ ID NO: 84274), VPTKL (SEQ ID NO: 84381):SPIS (SEQ ID NO: 84120):YKQYE (SEQ ID NO: 84398):EGMSVAE (SEQ ID NO: 84411), VPTKL (SEQ ID NO: 84381):SPIS (SEQ ID NO: 84120):YKQYE (SEQ ID NO: 84398):GMAVS (SEQ ID NO: 84194), TPTKM (SEQ ID NO: 84327):SPIS (SEQ ID NO: 84120):YKQYE (SEQ ID NO: 84398):GMVVD (SEQ ID NO: 84204), VPTRL (SEQ ID NO: 84385):SPIS (SEQ ID NO: 84120):YKQYE (SEQ ID NO: 84398):DMVVE (SEQ ID NO: 84161), APVKT (SEQ ID NO: 84144):SPIS (SEQ ID NO: 84120):YKQYE (SEQ ID NO: 84398):MIVEE (SEQ ID NO: 84241), VPQAL (SEQ ID NO: 84364):SPIS (SEQ ID NO: 84120):YKQYE (SEQ ID NO: 84398):MIVRS (SEQ ID NO: 84243), VSQDL (SEQ ID NO: 84387):SPIS (SEQ ID NO: 84120):YKQYE (SEQ ID NO: 84398):MIVKS (SEQ ID NO: 84242), VPQDL (SEQ ID NO: 84365):SPIS (SEQ ID NO: 84120):YKQYE (SEQ ID NO: 84398):MVVKS (SEQ ID NO: 84256), VPTEE (SEQ ID NO: 84377):SPIS (SEQ ID NO: 84120):YKQYE (SEQ ID NO: 84398):FLQHN (SEQ ID NO: 84184), VPTGQ (SEQ ID NO: 84379):SPIS (SEQ ID NO: 84120):YKQYE (SEQ ID NO: 84398):LEEHS (SEQ ID NO: 84217), SRVHH (SEQ ID NO: 84297):SPIS (SEQ ID NO: 84120):YKQYE (SEQ ID NO: 84398):RLEEH (SEQ ID NO: 84279), TQVQL (SEQ ID NO: 84340):SPIS (SEQ ID NO: 84120):YKQYE (SEQ ID NO: 84398):TLEDH (SEQ ID NO: 84307), VPTKM (SEQ ID NO: 84382):SPIS (SEQ ID NO: 84120):YKQYE (SEQ ID NO: 84398):NMVVE (SEQ ID NO: 84273), VPTKL (SEQ ID NO: 84381):SPIS (SEQ ID NO: 84120):YKQYE (SEQ ID NO: 84398):NMVVE (SEQ ID NO: 84273), VPTQL (SEQ ID NO: 84384):SPIS (SEQ ID NO: 84120):YKQYE (SEQ ID NO: 84398):NMVVE (SEQ ID NO: 84273), VPTKL (SEQ ID NO: 84381):SPIS (SEQ ID NO: 84120):YKQYE (SEQ ID NO: 84398):EGMSVVE (SEQ ID NO: 84416), VPTKL (SEQ ID NO: 84381):SPIS (SEQ ID NO: 84120):YKQYE (SEQ ID NO: 84398):GMVVE (SEQ ID NO: 84205), VPTKM (SEQ ID NO: 84382):SPIS (SEQ ID NO: 84120):YKQYE (SEQ ID NO: 84398):GMVVE (SEQ ID NO: 84205), VPTKT (SEQ ID NO: 84383):SPIS (SEQ ID NO: 84120):YKQYE (SEQ ID NO: 84398):MIVVE (SEQ ID NO: 84245), VPTAL (SEQ ID NO: 84375):SPIS (SEQ ID NO: 84120):YKQYE (SEQ ID NO: 84398):MIVVE (SEQ ID NO: 84245), VPTDL (SEQ ID NO: 84376):SPIS (SEQ ID NO: 84120):YKQYE (SEQ ID NO: 84398):MIVVE (SEQ ID NO: 84245), VPTDL (SEQ ID NO: 84376):SPIS (SEQ ID NO: 84120):YKQYE (SEQ ID NO: 84398):MVVVE (SEQ ID NO: 84259), APVEL (SEQ ID NO: 84139):KPLS (SEQ ID NO: 84112):DHHKD (SEQ ID NO: 84149):DMVEE (SEQ ID NO: 84157), APVKM (SEQ ID NO: 84143):KPLS (SEQ ID NO: 84112):DHHKD (SEQ ID NO: 84149):NMVEE (SEQ ID NO: 84269), APVEL (SEQ ID NO: 84139):KPLS (SEQ ID NO: 84112):DHHKD (SEQ ID NO: 84149):EMVEE (SEQ ID NO: 84171), APVKL (SEQ ID NO: 84142):KPLS (SEQ ID NO: 84112):DHHKD (SEQ ID NO: 84149):NMVEE (SEQ ID NO: 84269), APVQL (SEQ ID NO: 84145):KPLS (SEQ ID NO: 84112):DHHKD (SEQ ID NO: 84149):NMVEE (SEQ ID NO: 84269), APVKL (SEQ ID NO: 84142):KPLS (SEQ ID NO: 84112):DHHKD (SEQ ID NO: 84149):EGMSVEE (SEQ ID NO: 84412), APVKL (SEQ ID NO: 84142):KPLS (SEQ ID NO: 84112):DHHKD (SEQ ID NO: 84149):GMVEE (SEQ ID NO: 84201), APVKM (SEQ ID NO: 84143):KPLS (SEQ ID NO: 84112):DHHKD (SEQ ID NO: 84149):GMVEE (SEQ ID NO: 84201), APVRL (SEQ ID NO: 84146):KPLS (SEQ ID NO: 84112):DHHKD (SEQ ID NO: 84149):DMVEE (SEQ ID NO: 84157), APVAL (SEQ ID NO: 84136):KPLS (SEQ ID NO: 84112):DHHKD (SEQ ID NO: 84149):MIVEE (SEQ ID NO: 84241), APVDL (SEQ ID NO: 84137):KPLS (SEQ ID NO: 84112):DHHKD (SEQ ID NO: 84149):MIVEE (SEQ ID NO: 84241), APVDL (SEQ ID NO: 84137):KPLS (SEQ ID NO: 84112):DHHKD (SEQ ID NO: 84149):MVVEE (SEQ ID NO: 84255), VPTEL (SEQ ID NO: 84378):KPLS (SEQ ID NO: 84112):DHHKD (SEQ ID NO: 84149):DMVVE (SEQ ID NO: 84161), VPEKM (SEQ ID NO: 84360):KPLS (SEQ ID NO: 84112):DHHKD (SEQ ID NO: 84149):NMTVE (SEQ ID NO: 84267), VPTEL (SEQ ID NO: 84378):KPLS (SEQ ID NO: 84112):DHHKD (SEQ ID NO: 84149):EMVVE (SEQ ID NO: 84175), APTKL (SEQ ID NO: 84131):KPLS (SEQ ID NO: 84112):DHHKD (SEQ ID NO: 84149):NMVVR (SEQ ID NO: 84275), APTQL (SEQ ID NO: 84134):KPLS (SEQ ID NO: 84112):DHHKD (SEQ ID NO: 84149):NMVVR (SEQ ID NO: 84275), APTKL (SEQ ID NO: 84131):KPLS (SEQ ID NO: 84112):DHHKD (SEQ ID NO: 84149):NMVVK (SEQ ID NO: 84274), VPTKL (SEQ ID NO: 84381):KPLS (SEQ ID NO: 84112):DHHKD (SEQ ID NO: 84149):EGMSVAE (SEQ ID NO: 84411), VPTKL (SEQ ID NO: 84381):KPLS (SEQ ID NO: 84112):DHHKD (SEQ ID NO: 84149):GMAVS (SEQ ID NO: 84194), TPTKM (SEQ ID NO: 84327):KPLS (SEQ ID NO: 84112):DHHKD (SEQ ID NO: 84149):GMVVD (SEQ ID NO: 84204), VPARL (SEQ ID NO: 84352):KPLS (SEQ ID NO: 84112):DHHKD (SEQ ID NO: 84149):DMVVE (SEQ ID NO: 84161), VPTRL (SEQ ID NO: 84385):KPLS (SEQ ID NO: 84112):DHHKD (SEQ ID NO: 84149):DMVVE (SEQ ID NO: 84161), VPQAL (SEQ ID NO: 84364):KPLS (SEQ ID NO: 84112):DHHKD (SEQ ID NO: 84149):MIVRS (SEQ ID NO: 84243), VSQDL (SEQ ID NO: 84387):KPLS (SEQ ID NO: 84112):DHHKD (SEQ ID NO: 84149):MIVKS (SEQ ID NO: 84242), VPQDL (SEQ ID NO: 84365):KPLS (SEQ ID NO: 84112):DHHKD (SEQ ID NO: 84149):MVVKS (SEQ ID NO: 84256), VPTEE (SEQ ID NO: 84377):KPLS (SEQ ID NO: 84112):DHHKD (SEQ ID NO: 84149):FLQHN (SEQ ID NO: 84184), VPTGQ (SEQ ID NO: 84379):KPLS (SEQ ID NO: 84112):DHHKD (SEQ ID NO: 84149):LEEHS (SEQ ID NO: 84217), SRVHH (SEQ ID NO: 84297):KPLS (SEQ ID NO: 84112):DHHKD (SEQ ID NO: 84149):RLEEH (SEQ ID NO: 84279), TQVQL (SEQ ID NO: 84340):KPLS (SEQ ID NO: 84112):DHHKD (SEQ ID NO: 84149):TLEDH (SEQ ID NO: 84307), VPQEL (SEQ ID NO: 84367):EPLP (SEQ ID NO: 84110):EQLSN (SEQ ID NO: 84178):DMVRS (SEQ ID NO: 84159), VPQKM (SEQ ID NO: 84371):EPLP (SEQ ID NO: 84110):EQLSN (SEQ ID NO: 84178):NMVRS (SEQ ID NO: 84271), VPQEL (SEQ ID NO: 84367):EPLP (SEQ ID NO: 84110):EQLSN (SEQ ID NO: 84178):EMVRS (SEQ ID NO: 84173), VPQKL (SEQ ID NO: 84370):EPLP (SEQ ID NO: 84110):EQLSN (SEQ ID NO: 84178):NMVRS (SEQ ID NO: 84271), VPQQL (SEQ ID NO: 84373):EPLP (SEQ ID NO: 84110):EQLSN (SEQ ID NO: 84178):NMVRS (SEQ ID NO: 84271), VPQKL (SEQ ID NO: 84370):EPLP (SEQ ID NO: 84110):EQLSN (SEQ ID NO: 84178):EGMSVRS (SEQ ID NO: 84414), VPQKL (SEQ ID NO: 84370):EPLP (SEQ ID NO: 84110):EQLSN (SEQ ID NO: 84178):GMVRS (SEQ ID NO: 84203), VPQKM (SEQ ID NO: 84371):EPLP (SEQ ID NO: 84110):EQLSN (SEQ ID NO: 84178):GMVRS (SEQ ID NO: 84203), VPQRL (SEQ ID NO: 84374):EPLP (SEQ ID NO: 84110):EQLSN (SEQ ID NO: 84178):DMVRS (SEQ ID NO: 84159), VPQKT (SEQ ID NO: 84372):EPLP (SEQ ID NO: 84110):EQLSN (SEQ ID NO: 84178):MIVRS (SEQ ID NO: 84243), VPQDL (SEQ ID NO: 84365):EPLP (SEQ ID NO: 84110):EQLSN (SEQ ID NO: 84178):MIVRS (SEQ ID NO: 84243), VPQDL (SEQ ID NO: 84365):EPLP (SEQ ID NO: 84110):EQLSN (SEQ ID NO: 84178):MVVRS (SEQ ID NO: 84257), VPTEL (SEQ ID NO: 84378):EPLP (SEQ ID NO: 84110):EQLSN (SEQ ID NO: 84178):DMVVE (SEQ ID NO: 84161), VPEKM (SEQ ID NO: 84360):EPLP (SEQ ID NO: 84110):EQLSN (SEQ ID NO: 84178):NMTVE (SEQ ID NO: 84267), VPTEL (SEQ ID NO: 84378):EPLP (SEQ ID NO: 84110):EQLSN (SEQ ID NO: 84178):EMVVE (SEQ ID NO: 84175), APTKL (SEQ ID NO: 84131):EPLP (SEQ ID NO: 84110):EQLSN (SEQ ID NO: 84178):NMVVR (SEQ ID NO: 84275), APTQL (SEQ ID NO: 84134):EPLP (SEQ ID NO: 84110):EQLSN (SEQ ID NO: 84178):NMVVR (SEQ ID NO: 84275), APTKL (SEQ ID NO: 84131):EPLP (SEQ ID NO: 84110):EQLSN (SEQ ID NO: 84178):NMVVK (SEQ ID NO: 84274), VPTKL (SEQ ID NO: 84381):EPLP (SEQ ID NO: 84110):EQLSN (SEQ ID NO: 84178):EGMSVAE (SEQ ID NO: 84411), VPTKL (SEQ ID NO: 84381):EPLP (SEQ ID NO: 84110):EQLSN (SEQ ID NO: 84178):GMAVS (SEQ ID NO: 84194), TPTKM (SEQ ID NO: 84327):EPLP (SEQ ID NO: 84110):EQLSN (SEQ ID NO: 84178):GMVVD (SEQ ID NO: 84204), VPARL (SEQ ID NO: 84352):EPLP (SEQ ID NO: 84110):EQLSN (SEQ ID NO: 84178):DMVVE (SEQ ID NO: 84161), VPTRL (SEQ ID NO: 84385):EPLP (SEQ ID NO: 84110):EQLSN (SEQ ID NO: 84178):DMVVE (SEQ ID NO: 84161), APVKT (SEQ ID NO: 84144):EPLP (SEQ ID NO: 84110):EQLSN (SEQ ID NO: 84178):MIVEE (SEQ ID NO: 84241), VSQDL (SEQ ID NO: 84387):EPLP (SEQ ID NO: 84110):EQLSN (SEQ ID NO: 84178):MIVKS (SEQ ID NO: 84242), VPQDL (SEQ ID NO: 84365):EPLP (SEQ ID NO: 84110):EQLSN (SEQ ID NO: 84178):MVVKS (SEQ ID NO: 84256), VPTEE (SEQ ID NO: 84377):EPLP (SEQ ID NO: 84110):EQLSN (SEQ ID NO: 84178):FLQHN (SEQ ID NO: 84184), VPTGQ (SEQ ID NO: 84379):EPLP (SEQ ID NO: 84110):EQLSN (SEQ ID NO: 84178):LEEHS (SEQ ID NO: 84217), SRVHH (SEQ ID NO: 84297):EPLP (SEQ ID NO: 84110):EQLSN (SEQ ID NO: 84178):RLEEH (SEQ ID NO: 84279), TQVQL (SEQ ID NO: 84340):EPLP (SEQ ID NO: 84110):EQLSN (SEQ ID NO: 84178):TLEDH (SEQ ID NO: 84307), VSQEL (SEQ ID NO: 84389):EPLT (SEQ ID NO: 84111):EQLSN (SEQ ID NO: 84178):DMVKS (SEQ ID NO: 84158), VSQKM (SEQ ID NO: 84393):EPLT (SEQ ID NO: 84111):EQLSN (SEQ ID NO: 84178):NMVKS (SEQ ID NO: 84270), VSQEL (SEQ ID NO: 84389):EPLT (SEQ ID NO: 84111):EQLSN (SEQ ID NO: 84178):EMVKS (SEQ ID NO: 84172), VSQKL (SEQ ID NO: 84392):EPLT (SEQ ID NO: 84111):EQLSN (SEQ ID NO: 84178):NMVKS (SEQ ID NO: 84270), VSQQL (SEQ ID NO: 84395):EPLT (SEQ ID NO: 84111):EQLSN (SEQ ID NO: 84178):NMVKS (SEQ ID NO: 84270), VSQKL (SEQ ID NO: 84392):EPLT (SEQ ID NO: 84111):EQLSN (SEQ ID NO: 84178):EGMSVKS (SEQ ID NO: 84413), VSQKL (SEQ ID NO: 84392):EPLT (SEQ ID NO: 84111):EQLSN (SEQ ID NO: 84178):GMVKS (SEQ ID NO: 84202), VSQKM (SEQ ID NO: 84393):EPLT (SEQ ID NO: 84111):EQLSN (SEQ ID NO: 84178):GMVKS (SEQ ID NO: 84202), VSQRL (SEQ ID NO: 84396):EPLT (SEQ ID NO: 84111):EQLSN (SEQ ID NO: 84178):DMVKS (SEQ ID NO: 84158), VSQKT (SEQ ID NO: 84394):EPLT (SEQ ID NO: 84111):EQLSN (SEQ ID NO: 84178):MIVKS (SEQ ID NO: 84242), VSQAL (SEQ ID NO: 84386):EPLT (SEQ ID NO: 84111):EQLSN (SEQ ID NO: 84178):MIVKS (SEQ ID NO: 84242), VSQDL (SEQ ID NO: 84387):EPLT (SEQ ID NO: 84111):EQLSN (SEQ ID NO: 84178):MVVKS (SEQ ID NO: 84256), VPTEL (SEQ ID NO: 84378):EPLT (SEQ ID NO: 84111):EQLSN (SEQ ID NO: 84178):DMVVE (SEQ ID NO: 84161), VPEKM (SEQ ID NO: 84360):EPLT (SEQ ID NO: 84111):EQLSN (SEQ ID NO: 84178):NMTVE (SEQ ID NO: 84267), VPTEL (SEQ ID NO: 84378):EPLT (SEQ ID NO: 84111):EQLSN (SEQ ID NO: 84178):EMVVE (SEQ ID NO: 84175), APTKL (SEQ ID NO: 84131):EPLT (SEQ ID NO: 84111):EQLSN (SEQ ID NO: 84178):NMVVR (SEQ ID NO: 84275), APTQL (SEQ ID NO: 84134):EPLT (SEQ ID NO: 84111):EQLSN (SEQ ID NO: 84178):NMVVR (SEQ ID NO: 84275), APTKL (SEQ ID NO: 84131):EPLT (SEQ ID NO: 84111):EQLSN (SEQ ID NO: 84178):NMVVK (SEQ ID NO: 84274), VPTKL (SEQ ID NO: 84381):EPLT (SEQ ID NO: 84111):EQLSN (SEQ ID NO: 84178):EGMSVAE (SEQ ID NO: 84411), VPTKL (SEQ ID NO: 84381):EPLT (SEQ ID NO: 84111):EQLSN (SEQ ID NO: 84178):GMAVS (SEQ ID NO: 84194), TPTKM (SEQ ID NO: 84327):EPLT (SEQ ID NO: 84111):EQLSN (SEQ ID NO: 84178):GMVVD (SEQ ID NO: 84204), VPARL (SEQ ID NO: 84352):EPLT (SEQ ID NO: 84111):EQLSN (SEQ ID NO: 84178):DMVVE (SEQ ID NO: 84161), VPTRL (SEQ ID NO: 84385):EPLT (SEQ ID NO: 84111):EQLSN (SEQ ID NO: 84178):DMVVE (SEQ ID NO: 84161), APVKT (SEQ ID NO: 84144):EPLT (SEQ ID NO: 84111):EQLSN (SEQ ID NO: 84178):MIVEE (SEQ ID NO: 84241), VPQAL (SEQ ID NO: 84364):EPLT (SEQ ID NO: 84111):EQLSN (SEQ ID NO: 84178):MIVRS (SEQ ID NO: 84243), VPTEE (SEQ ID NO: 84377):EPLT (SEQ ID NO: 84111):EQLSN (SEQ ID NO: 84178):FLQHN (SEQ ID NO: 84184), VPTGQ (SEQ ID NO: 84379):EPLT (SEQ ID NO: 84111):EQLSN (SEQ ID NO: 84178):LEEHS (SEQ ID NO: 84217), SRVHH (SEQ ID NO: 84297):EPLT (SEQ ID NO: 84111):EQLSN (SEQ ID NO: 84178):RLEEH (SEQ ID NO: 84279), TQVQL (SEQ ID NO: 84340):EPLT (SEQ ID NO: 84111):EQLSN (SEQ ID NO: 84178):TLEDH (SEQ ID NO: 84307), VPQEL (SEQ ID NO: 84367):EPLT (SEQ ID NO: 84111):EQLSN (SEQ ID NO: 84178):DMVKS (SEQ ID NO: 84158), VPQKM (SEQ ID NO: 84371):EPLT (SEQ ID NO: 84111):EQLSN (SEQ ID NO: 84178):NMVKS (SEQ ID NO: 84270), VPQEL (SEQ ID NO: 84367):EPLT (SEQ ID NO: 84111):EQLSN (SEQ ID NO: 84178):EMVKS (SEQ ID NO: 84172), VPQKL (SEQ ID NO: 84370):EPLT (SEQ ID NO: 84111):EQLSN (SEQ ID NO: 84178):NMVKS (SEQ ID NO: 84270), VPQQL (SEQ ID NO: 84373):EPLT (SEQ ID NO: 84111):EQLSN (SEQ ID NO: 84178):NMVKS (SEQ ID NO: 84270), VPQKL (SEQ ID NO: 84370):EPLT (SEQ ID NO: 84111):EQLSN (SEQ ID NO: 84178):EGMSVKS (SEQ ID NO: 84413), VPQKL (SEQ ID NO: 84370):EPLT (SEQ ID NO: 84111):EQLSN (SEQ ID NO: 84178):GMVKS (SEQ ID NO: 84202), VPQKM (SEQ ID NO: 84371):EPLT (SEQ ID NO: 84111):EQLSN (SEQ ID NO: 84178):GMVKS (SEQ ID NO: 84202), VPQRL (SEQ ID NO: 84374):EPLT (SEQ ID NO: 84111):EQLSN (SEQ ID NO: 84178):DMVKS (SEQ ID NO: 84158), VPQKT (SEQ ID NO: 84372):EPLT (SEQ ID NO: 84111):EQLSN (SEQ ID NO: 84178):MIVKS (SEQ ID NO: 84242), VPQAL (SEQ ID NO: 84364):EPLT (SEQ ID NO: 84111):EQLSN (SEQ ID NO: 84178):MIVKS (SEQ ID NO: 84242), VPQDL (SEQ ID NO: 84365):EPLT (SEQ ID NO: 84111):EQLSN (SEQ ID NO: 84178):MIVKS (SEQ ID NO: 84242), VPTGQ (SEQ ID NO: 84379):SNIT (SEQ ID NO: 84118):IGEMS (SEQ ID NO: 84209):LEQHN (SEQ ID NO: 84218), VPTEL (SEQ ID NO: 84378):SNIT (SEQ ID NO: 84118):IGEMS (SEQ ID NO: 84209):DMVVE (SEQ ID NO: 84161), VPEKM (SEQ ID NO: 84360):SNIT (SEQ ID NO: 84118):IGEMS (SEQ ID NO: 84209):NMTVE (SEQ ID NO: 84267), VPTEL (SEQ ID NO: 84378):SNIT (SEQ ID NO: 84118):IGEMS (SEQ ID NO: 84209):EMVVE (SEQ ID NO: 84175), APTKL (SEQ ID NO: 84131):SNIT (SEQ ID NO: 84118):IGEMS (SEQ ID NO: 84209):NMVVR (SEQ ID NO: 84275), APTQL (SEQ ID NO: 84134):SNIT (SEQ ID NO: 84118):IGEMS (SEQ ID NO: 84209):NMVVR (SEQ ID NO: 84275), APTKL (SEQ ID NO: 84131):SNIT (SEQ ID NO: 84118):IGEMS (SEQ ID NO: 84209):NMVVK (SEQ ID NO: 84274), VPTKL (SEQ ID NO: 84381):SNIT (SEQ ID NO: 84118):IGEMS (SEQ ID NO: 84209):EGMSVAE (SEQ ID NO: 84411), VPTKL (SEQ ID NO: 84381):SNIT (SEQ ID NO: 84118):IGEMS (SEQ ID NO: 84209):GMAVS (SEQ ID NO: 84194), TPTKM (SEQ ID NO: 84327):SNIT (SEQ ID NO: 84118):IGEMS (SEQ ID NO: 84209):GMVVD (SEQ ID NO: 84204), VPARL (SEQ ID NO: 84352):SNIT (SEQ ID NO: 84118):IGEMS (SEQ ID NO: 84209):DMVVE (SEQ ID NO: 84161), VPTRL (SEQ ID NO: 84385):SNIT (SEQ ID NO: 84118):IGEMS (SEQ ID NO: 84209):DMVVE (SEQ ID NO: 84161), APVKT (SEQ ID NO: 84144):SNIT (SEQ ID NO: 84118):IGEMS (SEQ ID NO: 84209):MIVEE (SEQ ID NO: 84241), VPQAL (SEQ ID NO: 84364):SNIT (SEQ ID NO: 84118):IGEMS (SEQ ID NO: 84209):MIVRS (SEQ ID NO: 84243), VSQDL (SEQ ID NO: 84387):SNIT (SEQ ID NO: 84118):IGEMS (SEQ ID NO: 84209):MIVKS (SEQ ID NO: 84242), VPQDL (SEQ ID NO: 84365):SNIT (SEQ ID NO: 84118):IGEMS (SEQ ID NO: 84209):MVVKS (SEQ ID NO: 84256), VPTGQ (SEQ ID NO: 84379):SNIT (SEQ ID NO: 84118):IGEMS (SEQ ID NO: 84209):LEEHS (SEQ ID NO: 84217), SRVHH (SEQ ID NO: 84297):SNIT (SEQ ID NO: 84118):IGEMS (SEQ ID NO: 84209):RLEEH (SEQ ID NO: 84279), TQVQL (SEQ ID NO: 84340):SNIT (SEQ ID NO: 84118):IGEMS (SEQ ID NO: 84209):TLEDH (SEQ ID NO: 84307), VPTEE (SEQ ID NO: 84377):SNIT (SEQ ID NO: 84118):LGEMS (SEQ ID NO: 84228):FLEHS (SEQ ID NO: 84183), VPTEL (SEQ ID NO: 84378):SNIT (SEQ ID NO: 84118):LGEMS (SEQ ID NO: 84228):DMVVE (SEQ ID NO: 84161), VPEKM (SEQ ID NO: 84360):SNIT (SEQ ID NO: 84118):LGEMS (SEQ ID NO: 84228):NMTVE (SEQ ID NO: 84267), VPTEL (SEQ ID NO: 84378):SNIT (SEQ ID NO: 84118):LGEMS (SEQ ID NO: 84228):EMVVE (SEQ ID NO: 84175), APTKL (SEQ ID NO: 84131):SNIT (SEQ ID NO: 84118):LGEMS (SEQ ID NO: 84228):NMVVR (SEQ ID NO: 84275), APTQL (SEQ ID NO: 84134):SNIT (SEQ ID NO: 84118):LGEMS (SEQ ID NO: 84228):NMVVR (SEQ ID NO: 84275), APTKL (SEQ ID NO: 84131):SNIT (SEQ ID NO: 84118):LGEMS (SEQ ID NO: 84228):NMVVK (SEQ ID NO: 84274), VPTKL (SEQ ID NO: 84381):SNIT (SEQ ID NO: 84118):LGEMS (SEQ ID NO: 84228):EGMSVAE (SEQ ID NO: 84411), VPTKL (SEQ ID NO: 84381):SNIT (SEQ ID NO: 84118):LGEMS (SEQ ID NO: 84228):GMAVS (SEQ ID NO: 84194), TPTKM (SEQ ID NO: 84327):SNIT (SEQ ID NO: 84118):LGEMS (SEQ ID NO: 84228):GMVVD (SEQ ID NO: 84204), VPARL (SEQ ID NO: 84352):SNIT (SEQ ID NO: 84118):LGEMS (SEQ ID NO: 84228):DMVVE (SEQ ID NO: 84161), VPTRL (SEQ ID NO: 84385):SNIT (SEQ ID NO: 84118):LGEMS (SEQ ID NO: 84228):DMVVE (SEQ ID NO: 84161), APVKT (SEQ ID NO: 84144):SNIT (SEQ ID NO: 84118):LGEMS (SEQ ID NO: 84228):MIVEE (SEQ ID NO: 84241), VPQAL (SEQ ID NO: 84364):SNIT (SEQ ID NO: 84118):LGEMS (SEQ ID NO: 84228):MIVRS (SEQ ID NO: 84243), VSQDL (SEQ ID NO: 84387):SNIT (SEQ ID NO: 84118):LGEMS (SEQ ID NO: 84228):MIVKS (SEQ ID NO: 84242), VPQDL (SEQ ID NO: 84365):SNIT (SEQ ID NO: 84118):LGEMS (SEQ ID NO: 84228):MVVKS (SEQ ID NO: 84256), VPTEE (SEQ ID NO: 84377):SNIT (SEQ ID NO: 84118):LGEMS (SEQ ID NO: 84228):FLQHN (SEQ ID NO: 84184), SRVHH (SEQ ID NO: 84297):SNIT (SEQ ID NO: 84118):LGEMS (SEQ ID NO: 84228):RLEEH (SEQ ID NO: 84279), TQVQL (SEQ ID NO: 84340):SNIT (SEQ ID NO: 84118):LGEMS (SEQ ID NO: 84228):TLEDH (SEQ ID NO: 84307), SRVQL (SEQ ID NO: 84301):RSVK (SEQ ID NO: 84115):KEVQV (SEQ ID NO: 84210):TLEEH (SEQ ID NO: 84308), VPTEL (SEQ ID NO: 84378):RSVK (SEQ ID NO: 84115):KEVQV (SEQ ID NO: 84210):DMVVE (SEQ ID NO: 84161), VPEKM (SEQ ID NO: 84360):RSVK (SEQ ID NO: 84115):KEVQV (SEQ ID NO: 84210):NMTVE (SEQ ID NO: 84267), VPTEL (SEQ ID NO: 84378):RSVK (SEQ ID NO: 84115):KEVQV (SEQ ID NO: 84210):EMVVE (SEQ ID NO: 84175), APTKL (SEQ ID NO: 84131):RSVK (SEQ ID NO: 84115):KEVQV (SEQ ID NO: 84210):NMVVR (SEQ ID NO: 84275), APTQL (SEQ ID NO: 84134):RSVK (SEQ ID NO: 84115):KEVQV (SEQ ID NO: 84210):NMVVR (SEQ ID NO: 84275), APTKL (SEQ ID NO: 84131):RSVK (SEQ ID NO: 84115):KEVQV (SEQ ID NO: 84210):NMVVK (SEQ ID NO: 84274), VPTKL (SEQ ID NO: 84381):RSVK (SEQ ID NO: 84115):KEVQV (SEQ ID NO: 84210):EGMSVAE (SEQ ID NO: 84411), VPTKL (SEQ ID NO: 84381):RSVK (SEQ ID NO: 84115):KEVQV (SEQ ID NO: 84210):GMAVS (SEQ ID NO: 84194), TPTKM (SEQ ID NO: 84327):RSVK (SEQ ID NO: 84115):KEVQV (SEQ ID NO: 84210):GMVVD (SEQ ID NO: 84204), VPARL (SEQ ID NO: 84352):RSVK (SEQ ID NO: 84115):KEVQV (SEQ ID NO: 84210):DMVVE (SEQ ID NO: 84161), VPTRL (SEQ ID NO: 84385):RSVK (SEQ ID NO: 84115):KEVQV (SEQ ID NO: 84210):DMVVE (SEQ ID NO: 84161), APVKT (SEQ ID NO: 84144):RSVK (SEQ ID NO: 84115):KEVQV (SEQ ID NO: 84210):MIVEE (SEQ ID NO: 84241), VPQAL (SEQ ID NO: 84364):RSVK (SEQ ID NO: 84115):KEVQV (SEQ ID NO: 84210):MIVRS (SEQ ID NO: 84243), VSQDL (SEQ ID NO: 84387):RSVK (SEQ ID NO: 84115):KEVQV (SEQ ID NO: 84210):MIVKS (SEQ ID NO: 84242), VPQDL (SEQ ID NO: 84365):RSVK (SEQ ID NO: 84115):KEVQV (SEQ ID NO: 84210):MVVKS (SEQ ID NO: 84256), VPTEE (SEQ ID NO: 84377):RSVK (SEQ ID NO: 84115):KEVQV (SEQ ID NO: 84210):FLQHN (SEQ ID NO: 84184), VPTGQ (SEQ ID NO: 84379):RSVK (SEQ ID NO: 84115):KEVQV (SEQ ID NO: 84210):LEEHS (SEQ ID NO: 84217), TQVQL (SEQ ID NO: 84340):RSVK (SEQ ID NO: 84115):KEVQV (SEQ ID NO: 84210):TLEDH (SEQ ID NO: 84307), TQVHH (SEQ ID NO: 84336):RPVQ (SEQ ID NO: 84114):KKATV (SEQ ID NO: 84212):RLEDH (SEQ ID NO: 84278), VPTEL (SEQ ID NO: 84378):RPVQ (SEQ ID NO: 84114):KKATV (SEQ ID NO: 84212):DMVVE (SEQ ID NO: 84161), VPEKM (SEQ ID NO: 84360):RPVQ (SEQ ID NO: 84114):KKATV (SEQ ID NO: 84212):NMTVE (SEQ ID NO: 84267), VPTEL (SEQ ID NO: 84378):RPVQ (SEQ ID NO: 84114):KKATV (SEQ ID NO: 84212):EMVVE (SEQ ID NO: 84175), APTKL (SEQ ID NO: 84131):RPVQ (SEQ ID NO: 84114):KKATV (SEQ ID NO: 84212):NMVVR (SEQ ID NO: 84275), APTQL (SEQ ID NO: 84134):RPVQ (SEQ ID NO: 84114):KKATV (SEQ ID NO: 84212):NMVVR (SEQ ID NO: 84275), APTKL (SEQ ID NO: 84131):RPVQ (SEQ ID NO: 84114):KKATV (SEQ ID NO: 84212):NMVVK (SEQ ID NO: 84274), VPTKL (SEQ ID NO: 84381):RPVQ (SEQ ID NO: 84114):KKATV (SEQ ID NO: 84212):EGMSVAE (SEQ ID NO: 84411), VPTKL (SEQ ID NO: 84381):RPVQ (SEQ ID NO: 84114):KKATV (SEQ ID NO: 84212):GMAVS (SEQ ID NO: 84194), TPTKM (SEQ ID NO: 84327):RPVQ (SEQ ID NO: 84114):KKATV (SEQ ID NO: 84212):GMVVD (SEQ ID NO: 84204), VPARL (SEQ ID NO: 84352):RPVQ (SEQ ID NO: 84114):KKATV (SEQ ID NO: 84212):DMVVE (SEQ ID NO: 84161), VPTRL (SEQ ID NO: 84385):RPVQ (SEQ ID NO: 84114):KKATV (SEQ ID NO: 84212):DMVVE (SEQ ID NO: 84161), APVKT (SEQ ID NO: 84144):RPVQ (SEQ ID NO: 84114):KKATV (SEQ ID NO: 84212):MIVEE (SEQ ID NO: 84241), VPQAL (SEQ ID NO: 84364):RPVQ (SEQ ID NO: 84114):KKATV (SEQ ID NO: 84212):MIVRS (SEQ ID NO: 84243), VSQDL (SEQ ID NO: 84387):RPVQ (SEQ ID NO: 84114):KKATV (SEQ ID NO: 84212):MIVKS (SEQ ID NO: 84242), VPQDL (SEQ ID NO: 84365):RPVQ (SEQ ID NO: 84114):KKATV (SEQ ID NO: 84212):MVVKS (SEQ ID NO: 84256), VPTEE (SEQ ID NO: 84377):RPVQ (SEQ ID NO: 84114):KKATV (SEQ ID NO: 84212):FLQHN (SEQ ID NO: 84184), VPTGQ (SEQ ID NO: 84379):RPVQ (SEQ ID NO: 84114):KKATV (SEQ ID NO: 84212):LEEHS (SEQ ID NO: 84217) and SRVHH (SEQ ID NO: 84297):RPVQ (SEQ ID NO: 84114):KKATV (SEQ ID NO: 84212):RLEEH (SEQ ID NO: 84279).

[0398] In particular, in certain embodiments, the quadruplet PEP5:PEP12:PEP2:PEP6 is selected from the group consisting of VPTKM (SEQ ID NO: 84382):SAIS-AA¹⁷-LYL (SEQ ID NO: 84881):LKNYQ (SEQ ID NO: 84230):NMVVE (SEQ ID NO: 84273), VPTEL (SEQ ID NO: 84378):SAIS-AA¹⁷-LYL (SEQ ID NO: 84881):LKNYQ (SEQ ID NO: 84230):EMVVE (SEQ ID NO: 84175), VPTKL (SEQ ID NO: 84381):SAIS-AA¹⁷-LYL (SEQ ID NO: 84881):LKNYQ (SEQ ID NO: 84230):NMVVE (SEQ ID NO: 84273), VPTQL (SEQ ID NO: 84384):SAIS-AA¹⁷-LYL (SEQ ID NO: 84881):LKNYQ (SEQ ID NO: 84230):NMVVE (SEQ ID NO: 84273), VPTKL (SEQ ID NO: 84381):SAIS-AA¹⁷-LYL (SEQ ID NO: 84881):LKNYQ (SEQ ID NO: 84230):EGMSVVE (SEQ ID NO: 84416), VPTKL (SEQ ID NO: 84381):SAIS-AA¹⁷-LYL (SEQ ID NO: 84881):LKNYQ (SEQ ID NO: 84230):GMVVE (SEQ ID NO: 84205), VPTKM (SEQ ID NO: 84382):SAIS-AA¹⁷-LYL (SEQ ID NO: 84881):LKNYQ (SEQ ID NO: 84230):GMVVE (SEQ ID NO: 84205), VPTRL (SEQ ID NO: 84385):SAIS-AA¹⁷-LYL (SEQ ID NO: 84881):LKNYQ (SEQ ID NO: 84230):DMVVE (SEQ ID NO: 84161), VPTKT (SEQ ID NO: 84383):SAIS-AA¹⁷-LYL (SEQ ID NO: 84881):LKNYQ (SEQ ID NO: 84230):MIVVE (SEQ ID NO: 84245), VPTAL (SEQ ID NO: 84375):SAIS-AA¹⁷-LYL (SEQ ID NO: 84881):LKNYQ (SEQ ID NO: 84230):MIVVE (SEQ ID NO: 84245), VPTDL (SEQ ID NO: 84376):SAIS-AA¹⁷-LYL (SEQ ID NO: 84881):LKNYQ (SEQ ID NO: 84230):MIVVE (SEQ ID NO: 84245), VPTDL (SEQ ID NO: 84376):SAIS-AA¹⁷-LYL (SEQ ID NO: 84881):LKNYQ (SEQ ID NO: 84230):MVVVE (SEQ ID NO: 84259), VPTEE (SEQ ID NO: 84377):SAIS-AA¹⁷-LYL (SEQ ID NO: 84881):LKNYQ (SEQ ID NO: 84230):FLVVE (SEQ ID NO: 84191), VPTGQ (SEQ ID NO: 84379):SAIS-AA¹⁷-LYL (SEQ ID NO: 84881):LKNYQ (SEQ ID NO: 84230):LEVVE (SEQ ID NO: 84225), VPTHH (SEQ ID NO: 84380):SAIS-AA¹⁷-LYL (SEQ ID NO: 84881):LKNYQ (SEQ ID NO: 84230):RLVVE (SEQ ID NO: 84288), VPTQL (SEQ ID NO: 84384):SAIS-AA¹⁷-LYL (SEQ ID NO: 84881):LKNYQ (SEQ ID NO: 84230):TLVVE (SEQ ID NO: 84317), VPEKM (SEQ ID NO: 84360):SAIS-AA¹⁷-LYL (SEQ ID NO: 84881):LKNYQ (SEQ ID NO: 84230):NMTVE (SEQ ID NO: 84267), APTKL (SEQ ID NO: 84131):SAIS-AA¹⁷-LYL (SEQ ID NO: 84881):LKNYQ (SEQ ID NO: 84230):NMVVR (SEQ ID NO: 84275), APTQL (SEQ ID NO: 84134):SAIS-AA¹⁷-LYL (SEQ ID NO: 84881):LKNYQ (SEQ ID NO: 84230):NMVVR (SEQ ID NO: 84275), APTKL (SEQ ID NO: 84131):SAIS-AA¹⁷-LYL (SEQ ID NO: 84881):LKNYQ (SEQ ID NO: 84230):NMVVK (SEQ ID NO: 84274), VPTKL (SEQ ID NO: 84381):SAIS-AA⁴¹-LYL (SEQ ID NO: 84881):LKNYQ (SEQ ID NO: 84230):EGMSVAE (SEQ ID NO: 84411), VPTKL (SEQ ID NO: 84381):SAIS-AA¹⁷-LYL (SEQ ID NO: 84881):LKNYQ (SEQ ID NO: 84230):GMAVS (SEQ ID NO: 84194), TPTKM (SEQ ID NO: 84327):SAIS-AA¹⁷-LYL (SEQ ID NO: 84881):LKNYQ (SEQ ID NO: 84230):GMVVD (SEQ ID NO: 84204), VPARL (SEQ ID NO: 84352):SAIS-AA¹⁷-LYL (SEQ ID NO: 84881):LKNYQ (SEQ ID NO: 84230):DMVVE (SEQ ID NO: 84161), APVKT (SEQ ID NO: 84144):SAIS-AA¹⁷-LYL (SEQ ID NO: 84881):LKNYQ (SEQ ID NO: 84230):MIVEE (SEQ ID NO: 84241), VPQAL (SEQ ID NO: 84364):SAIS-AA¹⁷-LYL (SEQ ID NO: 84881):LKNYQ (SEQ ID NO: 84230):MIVRS (SEQ ID NO: 84243), VSQDL (SEQ ID NO: 84387):SAIS-AA¹⁷-LYL (SEQ ID NO: 84881):LKNYQ (SEQ ID NO: 84230):MIVKS (SEQ ID NO: 84242), VPQDL (SEQ ID NO: 84365):SAIS-AA¹⁷-LYL (SEQ ID NO: 84881):LKNYQ (SEQ ID NO: 84230):MVVKS (SEQ ID NO: 84256), VPTEE (SEQ ID NO: 84377):SAIS-AA¹⁷-LYL (SEQ ID NO: 84881):LKNYQ (SEQ ID NO: 84230):FLQHN (SEQ ID NO: 84184), VPTGQ (SEQ ID NO: 84379):SAIS-AA¹⁷-LYL (SEQ ID NO: 84881):LKNYQ (SEQ ID NO: 84230):LEEHS (SEQ ID NO: 84217), SRVHH (SEQ ID NO: 84297):SAIS-AA¹⁷-LYL (SEQ ID NO: 84881):LKNYQ (SEQ ID NO: 84230):RLEEH (SEQ ID NO: 84279), TQVQL (SEQ ID NO: 84340):SAIS-AA¹⁷-LYL (SEQ ID NO: 84881):LKNYQ (SEQ ID NO: 84230):TLEDH (SEQ ID NO: 84307), VPEEL (SEQ ID NO: 84356):SSLS-AA¹⁷-LFF (SEQ ID NO: 84889):LKVYP (SEQ ID NO: 84231):DMTVE (SEQ ID NO: 84155), VPEEL (SEQ ID NO: 84356):SSLS-AA¹⁷-LFF (SEQ ID NO: 84889):LKVYP (SEQ ID NO: 84231):EMTVE (SEQ ID NO: 84169), VPEKL (SEQ ID NO: 84359):SSLS-AA¹⁷-LFF (SEQ ID NO: 84889):LKVYP (SEQ ID NO: 84231):NMTVE (SEQ ID NO: 84267), VPEQL (SEQ ID NO: 84362):SSLS-AA¹⁷-LFF (SEQ ID NO: 84889):LKVYP (SEQ ID NO: 84231):NMTVE (SEQ ID NO: 84267), VPEKL (SEQ ID NO: 84359):SSLS-AA¹⁷-LFF (SEQ ID NO: 84889):LKVYP (SEQ ID NO: 84231):EGMSTVE (SEQ ID NO: 84410), VPEKL (SEQ ID NO: 84359):SSLS-AA¹⁷-LFF (SEQ ID NO: 84889):LKVYP (SEQ ID NO: 84231):GMTVE (SEQ ID NO: 84199), VPEKM (SEQ ID NO: 84360):SSLS-AA¹⁷-LFF (SEQ ID NO: 84889):LKVYP (SEQ ID NO: 84231):GMTVE (SEQ ID NO: 84199), VPERL (SEQ ID NO: 84363):SSLS-AA¹⁷-LFF (SEQ ID NO: 84889):LKVYP (SEQ ID NO: 84231):DMTVE (SEQ ID NO: 84155), VPEKT (SEQ ID NO: 84361):SSLS-AA¹⁷-LFF (SEQ ID NO: 84889):LKVYP (SEQ ID NO: 84231):MITVE (SEQ ID NO: 84239), VPEAL (SEQ ID NO: 84353):SSLS-AA¹⁷-LFF (SEQ ID NO: 84889):LKVYP (SEQ ID NO: 84231):MITVE (SEQ ID NO: 84239), VPEDL (SEQ ID NO: 84354):SSLS-AA¹⁷-LFF (SEQ ID NO: 84889):LKVYP (SEQ ID NO: 84231):MITVE (SEQ ID NO: 84239), VPEDL (SEQ ID NO: 84354):SSLS-AA¹⁷-LFF (SEQ ID NO: 84889):LKVYP (SEQ ID NO: 84231):MVTVE (SEQ ID NO: 84253), VPEEE (SEQ ID NO: 84355):SSLS-AA¹⁷-LFF (SEQ ID NO: 84889):LKVYP (SEQ ID NO: 84231):FLTVE (SEQ ID NO: 84185), VPEGQ (SEQ ID NO: 84357):SSLS-AA¹⁷-LFF (SEQ ID NO: 84889):LKVYP (SEQ ID NO: 84231):LETVE (SEQ ID NO: 84219), VPEHH (SEQ ID NO: 84358):SSLS-AA¹⁷-LFF (SEQ ID NO: 84889):LKVYP (SEQ ID NO: 84231):RLTVE (SEQ ID NO: 84282), VPEQL (SEQ ID NO: 84362):SSLS-AA¹⁷-LFF (SEQ ID NO: 84889):LKVYP (SEQ ID NO: 84231):TLTVE (SEQ ID NO: 84311), VPTEL (SEQ ID NO: 84378):SSLS-AA¹⁷-LFF (SEQ ID NO: 84889):LKVYP (SEQ ID NO: 84231):DMVVE (SEQ ID NO: 84161), VPTEL (SEQ ID NO: 84378):SSLS-AA¹⁷-LFF (SEQ ID NO: 84889):LKVYP (SEQ ID NO: 84231):EMVVE (SEQ ID NO: 84175), APTKL (SEQ ID NO: 84131):SSLS-AA¹⁷-LFF (SEQ ID NO: 84889):LKVYP (SEQ ID NO: 84231):NMVVR (SEQ ID NO: 84275), APTQL (SEQ ID NO: 84134):SSLS-AA¹⁷-LFF (SEQ ID NO: 84889):LKVYP (SEQ ID NO: 84231):NMVVR (SEQ ID NO: 84275), APTKL (SEQ ID NO: 84131):SSLS-AA¹⁷-LFF (SEQ ID NO: 84889):LKVYP (SEQ ID NO: 84231):NMVVK (SEQ ID NO: 84274), VPTKL (SEQ ID NO: 84381):SSLS-AA¹⁷-LFF (SEQ ID NO: 84889):LKVYP (SEQ ID NO: 84231):EGMSVAE (SEQ ID NO: 84411), VPTKL (SEQ ID NO: 84381):SSLS-AA¹⁷-LFF (SEQ ID NO: 84889):LKVYP (SEQ ID NO: 84231):GMAVS (SEQ ID NO: 84194), TPTKM (SEQ ID NO: 84327):SSLS-AA¹⁷-LFF (SEQ ID NO: 84889):LKVYP (SEQ ID NO: 84231):GMVVD (SEQ ID NO: 84204), VPARL (SEQ ID NO: 84352):SSLS-AA¹⁷-LFF (SEQ ID NO: 84889):LKVYP (SEQ ID NO: 84231):DMVVE (SEQ ID NO: 84161), VPTRL (SEQ ID NO: 84385):SSLS-AA¹⁷-LFF (SEQ ID NO: 84889):LKVYP (SEQ ID NO: 84231):DMVVE (SEQ ID NO: 84161), APVKT (SEQ ID NO: 84144):SSLS-AA¹⁷-LFF (SEQ ID NO: 84889):LKVYP (SEQ ID NO: 84231):MIVEE (SEQ ID NO: 84241), VPQAL (SEQ ID NO: 84364):SSLS-AA¹⁷-LFF (SEQ ID NO: 84889):LKVYP (SEQ ID NO: 84231):MIVRS (SEQ ID NO: 84243), VSQDL (SEQ ID NO: 84387):SSLS-AA¹⁷-LFF (SEQ ID NO: 84889):LKVYP (SEQ ID NO: 84231):MIVKS (SEQ ID NO: 84242), VPQDL (SEQ ID NO: 84365):SSLS-AA¹⁷-LFF (SEQ ID NO: 84889):LKVYP (SEQ ID NO: 84231):MVVKS (SEQ ID NO: 84256), VPTEE (SEQ ID NO: 84377):SSLS-AA¹⁷-LFF (SEQ ID NO: 84889):LKVYP (SEQ ID NO: 84231):FLQHN (SEQ ID NO: 84184), VPTGQ (SEQ ID NO: 84379):SSLS-AA¹⁷-LFF (SEQ ID NO: 84889):LKVYP (SEQ ID NO: 84231):LEEHS (SEQ ID NO: 84217), SRVHH (SEQ ID NO: 84297):SSLS-AA¹⁷-LFF (SEQ ID NO: 84889):LKVYP (SEQ ID NO: 84231):RLEEH (SEQ ID NO: 84279), TQVQL (SEQ ID NO: 84340):SSLS-AA¹⁷-LFF (SEQ ID NO: 84889):LKVYP (SEQ ID NO: 84231):TLEDH (SEQ ID NO: 84307), VPTEL (SEQ ID NO: 84378):SAIS-AA¹⁷-LYL (SEQ ID NO: 84881):LKNYQ (SEQ ID NO: 84230):DMVVE (SEQ ID NO: 84161), APTEL (SEQ ID NO: 84128):NAIS-AA¹⁷-LYF (SEQ ID NO: 84878):LKKYR (SEQ ID NO: 84229):DMVVR (SEQ ID NO: 84163), APTKM (SEQ ID NO: 84132):NAIS-AA¹⁷-LYF (SEQ ID NO: 84878):LKKYR (SEQ ID NO: 84229):NMVVR (SEQ ID NO: 84275), APTEL (SEQ ID NO: 84128):NAIS-AA¹⁷-LYF (SEQ ID NO: 84878):LKKYR (SEQ ID NO: 84229):EMVVR (SEQ ID NO: 84177), APTKL (SEQ ID NO: 84131):NAIS-AA¹⁷-LYF (SEQ ID NO: 84878):LKKYR (SEQ ID NO: 84229):NMVVR (SEQ ID NO: 84275), APTQL (SEQ ID NO: 84134):NAIS-AA¹⁷-LYF (SEQ ID NO: 84878):LKKYR (SEQ ID NO: 84229):NMVVR (SEQ ID NO: 84275), APTKL (SEQ ID NO: 84131):NAIS-AA¹⁷-LYF (SEQ ID NO: 84878):LKKYR (SEQ ID NO: 84229):EGMSVVR (SEQ ID NO: 84418), APTKL (SEQ ID NO: 84131):NAIS-AA¹⁷-LYF (SEQ ID NO: 84878):LKKYR (SEQ ID NO: 84229):GMVVR (SEQ ID NO: 84207), APTKM (SEQ ID NO: 84132):NAIS-AA¹⁷-LYF (SEQ ID NO: 84878):LKKYR (SEQ ID NO: 84229):GMVVR (SEQ ID NO: 84207), APTRL (SEQ ID NO: 84135):NAIS-AA¹⁷-LYF (SEQ ID NO: 84878):LKKYR (SEQ ID NO: 84229):DMVVR (SEQ ID NO: 84163), APTKT (SEQ ID NO: 84133):NAIS-AA¹⁷-LYF (SEQ ID NO: 84878):LKKYR (SEQ ID NO: 84229):MIVVR (SEQ ID NO: 84247), APTAL (SEQ ID NO: 84125):NAIS-AA¹⁷-LYF (SEQ ID NO: 84878):LKKYR (SEQ ID NO: 84229):MIVVR (SEQ ID NO: 84247), APTDL (SEQ ID NO: 84126):NAIS-AA¹⁷-LYF (SEQ ID NO: 84878):LKKYR (SEQ ID NO: 84229):MIVVR (SEQ ID NO: 84247), APTDL (SEQ ID NO: 84126):NAIS-AA¹⁷-LYF (SEQ ID NO: 84878):LKKYR (SEQ ID NO: 84229):MVVVR (SEQ ID NO: 84261), APTEE (SEQ ID NO: 84127):NAIS-AA¹⁷-LYF (SEQ ID NO: 84878):LKKYR (SEQ ID NO: 84229):FLVVR (SEQ ID NO: 84193), APTGQ (SEQ ID NO: 84129):NAIS-AA¹⁷-LYF (SEQ ID NO: 84878):LKKYR (SEQ ID NO: 84229):LEVVR (SEQ ID NO: 84227), APTHH (SEQ ID NO: 84130):NAIS-AA¹⁷-LYF (SEQ ID NO: 84878):LKKYR (SEQ ID NO: 84229):RLVVR (SEQ ID NO: 84290), APTQL (SEQ ID NO: 84134):NAIS-AA¹⁷-LYF (SEQ ID NO: 84878):LKKYR (SEQ ID NO: 84229):TLVVR (SEQ ID NO: 84319), VPTEL (SEQ ID NO: 84378):NAIS-AA¹⁷-LYF (SEQ ID NO: 84878):LKKYR (SEQ ID NO: 84229):DMVVE (SEQ ID NO: 84161), VPEKM (SEQ ID NO: 84360):NAIS-AA¹⁷-LYF (SEQ ID NO: 84878):LKKYR (SEQ ID NO: 84229):NMTVE (SEQ ID NO: 84267), VPTEL (SEQ ID NO: 84378):NAIS-AA¹⁷-LYF (SEQ ID NO: 84878):LKKYR (SEQ ID NO: 84229):EMVVE (SEQ ID NO: 84175), APTKL (SEQ ID NO: 84131):NAIS-AA¹⁷-LYF (SEQ ID NO: 84878):LKKYR (SEQ ID NO: 84229):NMVVK (SEQ ID NO: 84274), VPTKL (SEQ ID NO: 84381):NAIS-AA¹⁷-LYF (SEQ ID NO: 84878):LKKYR (SEQ ID NO: 84229):EGMSVAE (SEQ ID NO: 84411), VPTKL (SEQ ID NO: 84381):NAIS-AA¹⁷-LYF (SEQ ID NO: 84878):LKKYR (SEQ ID NO: 84229):GMAVS (SEQ ID NO: 84194), TPTKM (SEQ ID NO: 84327):NAIS-AA¹⁷-LYF (SEQ ID NO: 84878):LKKYR (SEQ ID NO: 84229):GMVVD (SEQ ID NO: 84204), VPARL (SEQ ID NO: 84352):NAIS-AA¹⁷-LYF (SEQ ID NO: 84878):LKKYR (SEQ ID NO: 84229):DMVVE (SEQ ID NO: 84161), VPTRL (SEQ ID NO: 84385):NAIS-AA¹⁷-LYF (SEQ ID NO: 84878):LKKYR (SEQ ID NO: 84229):DMVVE (SEQ ID NO: 84161), APVKT (SEQ ID NO: 84144):NAIS-AA¹⁷-LYF (SEQ ID NO: 84878):LKKYR (SEQ ID NO: 84229):MIVEE (SEQ ID NO: 84241), VPQAL (SEQ ID NO: 84364):NAIS-AA¹⁷-LYF (SEQ ID NO: 84878):LKKYR (SEQ ID NO: 84229):MIVRS (SEQ ID NO: 84243), VSQDL (SEQ ID NO: 84387):NAIS-AA¹⁷-LYF (SEQ ID NO: 84878):LKKYR (SEQ ID NO: 84229):MIVKS (SEQ ID NO: 84242), VPQDL (SEQ ID NO: 84365):NAIS-AA¹⁷-LYF (SEQ ID NO: 84878):LKKYR (SEQ ID NO: 84229):MVVKS (SEQ ID NO: 84256), VPTEE (SEQ ID NO: 84377):NAIS-AA¹⁷-LYF (SEQ ID NO: 84878):LKKYR (SEQ ID NO: 84229):FLQHN (SEQ ID NO: 84184), VPTGQ (SEQ ID NO: 84379):NAIS-AA¹⁷-LYF (SEQ ID NO: 84878):LKKYR (SEQ ID NO: 84229):LEEHS (SEQ ID NO: 84217), SRVHH (SEQ ID NO: 84297):NAIS-AA¹⁷-LYF (SEQ ID NO: 84878):LKKYR (SEQ ID NO: 84229):RLEEH (SEQ ID NO: 84279), TQVQL (SEQ ID NO: 84340):NAIS-AA¹⁷-LYF (SEQ ID NO: 84878):LKKYR (SEQ ID NO: 84229):TLEDH (SEQ ID NO: 84307), APTEL (SEQ ID NO: 84128):SATS-AA¹⁷-LYY (SEQ ID NO: 84882):LRKHR (SEQ ID NO: 84233):DMVVK (SEQ ID NO: 84162), APTKM (SEQ ID NO: 84132):SATS-AA¹⁷-LYY (SEQ ID NO: 84882):LRKHR (SEQ ID NO: 84233):NMVVK (SEQ ID NO: 84274), APTEL (SEQ ID NO: 84128):SATS-AA¹⁷-LYY (SEQ ID NO: 84882):LRKHR (SEQ ID NO: 84233):EMVVK (SEQ ID NO: 84176), APTKL (SEQ ID NO: 84131):SATS-AA¹⁷-LYY (SEQ ID NO: 84882):LRKHR (SEQ ID NO: 84233):NMVVK (SEQ ID NO: 84274), APTQL (SEQ ID NO: 84134):SATS-AA¹⁷-LYY (SEQ ID NO: 84882):LRKHR (SEQ ID NO: 84233):NMVVK (SEQ ID NO: 84274), APTKL (SEQ ID NO: 84131):SATS-AA¹⁷-LYY (SEQ ID NO: 84882):LRKHR (SEQ ID NO: 84233):EGMSVVK (SEQ ID NO: 84417), APTKL (SEQ ID NO: 84131):SATS-AA¹⁷-LYY (SEQ ID NO: 84882):LRKHR (SEQ ID NO: 84233):GMVVK (SEQ ID NO: 84206), APTKM (SEQ ID NO: 84132):SATS-AA¹⁷-LYY (SEQ ID NO: 84882):LRKHR (SEQ ID NO: 84233):GMVVK (SEQ ID NO: 84206), APTRL (SEQ ID NO: 84135):SATS-AA¹⁷-LYY (SEQ ID NO: 84882):LRKHR (SEQ ID NO: 84233):DMVVK (SEQ ID NO: 84162), APTKT (SEQ ID NO: 84133):SATS-AA¹⁷-LYY (SEQ ID NO: 84882):LRKHR (SEQ ID NO: 84233):MIVVK (SEQ ID NO: 84246), APTAL (SEQ ID NO: 84125):SATS-AA¹⁷-LYY (SEQ ID NO: 84882):LRKHR (SEQ ID NO: 84233):MIVVK (SEQ ID NO: 84246), APTDL (SEQ ID NO: 84126):SATS-AA¹⁷-LYY (SEQ ID NO: 84882):LRKHR (SEQ ID NO: 84233):MIVVK (SEQ ID NO: 84246), APTDL (SEQ ID NO: 84126):SATS-AA¹⁷-LYY (SEQ ID NO: 84882):LRKHR (SEQ ID NO: 84233):MVVVK (SEQ ID NO: 84260), APTEE (SEQ ID NO: 84127):SATS-AA¹⁷-LYY (SEQ ID NO: 84882):LRKHR (SEQ ID NO: 84233):FLVVK (SEQ ID NO: 84192), APTGQ (SEQ ID NO: 84129):SATS-AA¹⁷-LYY (SEQ ID NO: 84882):LRKHR (SEQ ID NO: 84233):LEVVK (SEQ ID NO: 84226), APTHH (SEQ ID NO: 84130):SATS-AA¹⁷-LYY (SEQ ID NO: 84882):LRKHR (SEQ ID NO: 84233):RLVVK (SEQ ID NO: 84289), APTQL (SEQ ID NO: 84134):SATS-AA¹⁷-LYY (SEQ ID NO: 84882):LRKHR (SEQ ID NO: 84233):TLVVK (SEQ ID NO: 84318), VPTEL (SEQ ID NO: 84378):SATS-AA¹⁷-LYY (SEQ ID NO: 84882):LRKHR (SEQ ID NO: 84233):DMVVE (SEQ ID NO: 84161), VPEKM (SEQ ID NO: 84360):SATS-AA¹⁷-LYY (SEQ ID NO: 84882):LRKHR (SEQ ID NO: 84233):NMTVE (SEQ ID NO: 84267), VPTEL (SEQ ID NO: 84378):SATS-AA¹⁷-LYY (SEQ ID NO: 84882):LRKHR (SEQ ID NO: 84233):EMVVE (SEQ ID NO: 84175), APTKL (SEQ ID NO: 84131):SATS-AA¹⁷-LYY (SEQ ID NO: 84882):LRKHR (SEQ ID NO: 84233):NMVVR (SEQ ID NO: 84275), APTQL (SEQ ID NO: 84134):SATS-AA¹⁷-LYY (SEQ ID NO: 84882):LRKHR (SEQ ID NO: 84233):NMVVR (SEQ ID NO: 84275), VPTKL (SEQ ID NO: 84381):SATS-AA¹⁷-LYY (SEQ ID NO: 84882):LRKHR (SEQ ID NO: 84233):EGMSVAE (SEQ ID NO: 84411), VPTKL (SEQ ID NO: 84381):SATS-AA¹⁷-LYY (SEQ ID NO: 84882):LRKHR (SEQ ID NO: 84233):GMAVS (SEQ ID NO: 84194), TPTKM (SEQ ID NO: 84327):SATS-AA¹⁷-LYY (SEQ ID NO: 84882):LRKHR (SEQ ID NO: 84233):GMVVD (SEQ ID NO: 84204), VPARL (SEQ ID NO: 84352):SATS-AA¹⁷-LYY (SEQ ID NO: 84882):LRKHR (SEQ ID NO: 84233):DMVVE (SEQ ID NO: 84161), VPTRL (SEQ ID NO: 84385):SATS-AA¹⁷-LYY (SEQ ID NO: 84882):LRKHR (SEQ ID NO: 84233):DMVVE (SEQ ID NO: 84161), APVKT (SEQ ID NO: 84144):SATS-AA¹⁷-LYY (SEQ ID NO: 84882):LRKHR (SEQ ID NO: 84233):MIVEE (SEQ ID NO: 84241), VPQAL (SEQ ID NO: 84364):SATS-AA¹⁷-LYY (SEQ ID NO: 84882):LRKHR (SEQ ID NO: 84233):MIVRS (SEQ ID NO: 84243), VSQDL (SEQ ID NO: 84387):SATS-AA¹⁷-LYY (SEQ ID NO: 84882):LRKHR (SEQ ID NO: 84233):MIVKS (SEQ ID NO: 84242), VPQDL (SEQ ID NO: 84365):SATS-AA¹⁷-LYY (SEQ ID NO: 84882):LRKHR (SEQ ID NO: 84233):MVVKS (SEQ ID NO: 84256), VPTEE (SEQ ID NO: 84377):SATS-AA¹⁷-LYY (SEQ ID NO: 84882):LRKHR (SEQ ID NO: 84233):FLQHN (SEQ ID NO: 84184), VPTGQ (SEQ ID NO: 84379):SATS-AA¹⁷-LYY (SEQ ID NO: 84882):LRKHR (SEQ ID NO: 84233):LEEHS (SEQ ID NO: 84217), SRVHH (SEQ ID NO: 84297):SATS-AA¹⁷-LYY (SEQ ID NO: 84882):LRKHR (SEQ ID NO: 84233):RLEEH (SEQ ID NO: 84279), TQVQL (SEQ ID NO: 84340):SATS-AA¹⁷-LYY (SEQ ID NO: 84882):LRKHR (SEQ ID NO: 84233):TLEDH (SEQ ID NO: 84307), VPTEL (SEQ ID NO: 84378):SPIS-AA¹⁷-LYK (SEQ ID NO: 84887):LKYHY (SEQ ID NO: 84232):DMVAE (SEQ ID NO: 84156), VPTKM (SEQ ID NO: 84382):SPIS-AA¹⁷-LYK (SEQ ID NO: 84887):LKYHY (SEQ ID NO: 84232):NMVAE (SEQ ID NO: 84268), VPTEL (SEQ ID NO: 84378):SPIS-AA¹⁷-LYK (SEQ ID NO: 84887):LKYHY (SEQ ID NO: 84232):EMVAE (SEQ ID NO: 84170), VPTKL (SEQ ID NO: 84381):SPIS-AA¹⁷-LYK (SEQ ID NO: 84887):LKYHY (SEQ ID NO: 84232):NMVAE (SEQ ID NO: 84268), VPTQL (SEQ ID NO: 84384):SPIS-AA¹⁷-LYK (SEQ ID NO: 84887):LKYHY (SEQ ID NO: 84232):NMVAE (SEQ ID NO: 84268), VPTKL (SEQ ID NO: 84381):SPIS-AA¹⁷-LYK (SEQ ID NO: 84887):LKYHY (SEQ ID NO: 84232):GMVAE (SEQ ID NO: 84200), VPTKM (SEQ ID NO: 84382):SPIS-AA¹⁷-LYK (SEQ ID NO: 84887):LKYHY (SEQ ID NO: 84232):GMVAE (SEQ ID NO: 84200), VPTRL (SEQ ID NO: 84385):SPIS-AA¹⁷-LYK (SEQ ID NO: 84887):LKYHY (SEQ ID NO: 84232):DMVAE (SEQ ID NO: 84156), VPTKT (SEQ ID NO: 84383):SPIS-AA¹⁷-LYK (SEQ ID NO: 84887):LKYHY (SEQ ID NO: 84232):MIVAE (SEQ ID NO: 84240), VPTAL (SEQ ID NO: 84375):SPIS-AA¹⁷-LYK (SEQ ID NO: 84887):LKYHY (SEQ ID NO: 84232):MIVAE (SEQ ID NO: 84240), VPTDL (SEQ ID NO: 84376):SPIS-AA¹⁷-LYK (SEQ ID NO: 84887):LKYHY (SEQ ID NO: 84232):MIVAE (SEQ ID NO: 84240), VPTDL (SEQ ID NO: 84376):SPIS-AA¹⁷-LYK (SEQ ID NO: 84887):LKYHY (SEQ ID NO: 84232):MVVAE (SEQ ID NO: 84254), VPTEE (SEQ ID NO: 84377):SPIS-AA¹⁷-LYK (SEQ ID NO: 84887):LKYHY (SEQ ID NO: 84232):FLVAE (SEQ ID NO: 84186), VPTGQ (SEQ ID NO: 84379):SPIS-AA¹⁷-LYK (SEQ ID NO: 84887):LKYHY (SEQ ID NO: 84232):LEVAE (SEQ ID NO: 84220), VPTHH (SEQ ID NO: 84380):SPIS-AA¹⁷-LYK (SEQ ID NO: 84887):LKYHY (SEQ ID NO: 84232):RLVAE (SEQ ID NO: 84283), VPTQL (SEQ ID NO: 84384):SPIS-AA¹⁷-LYK (SEQ ID NO: 84887):LKYHY (SEQ ID NO: 84232):TLVAE (SEQ ID NO: 84312), VPTEL (SEQ ID NO: 84378):SPIS-AA¹⁷-LYK (SEQ ID NO: 84887):LKYHY (SEQ ID NO: 84232):DMVVE (SEQ ID NO: 84161), VPEKM (SEQ ID NO: 84360):SPIS-AA¹⁷-LYK (SEQ ID NO: 84887):LKYHY (SEQ ID NO: 84232):NMTVE (SEQ ID NO: 84267), VPTEL (SEQ ID NO: 84378):SPIS-AA¹⁷-LYK (SEQ ID NO: 84887):LKYHY (SEQ ID NO: 84232):EMVVE (SEQ ID NO: 84175), APTKL (SEQ ID NO: 84131):SPIS-AA¹⁷-LYK (SEQ ID NO: 84887):LKYHY (SEQ ID NO: 84232):NMVVR (SEQ ID NO: 84275), APTQL (SEQ ID NO: 84134):SPIS-AA¹⁷-LYK (SEQ ID NO: 84887):LKYHY (SEQ ID NO: 84232):NMVVR (SEQ ID NO: 84275), APTKL (SEQ ID NO: 84131):SPIS-AA¹⁷-LYK (SEQ ID NO: 84887):LKYHY (SEQ ID NO: 84232):NMVVK (SEQ ID NO: 84274), VPTKL (SEQ ID NO: 84381):SPIS-AA¹⁷-LYK (SEQ ID NO: 84887):LKYHY (SEQ ID NO: 84232):GMAVS (SEQ ID NO: 84194), TPTKM (SEQ ID NO: 84327):SPIS-AA¹⁷-LYK (SEQ ID NO: 84887):LKYHY (SEQ ID NO: 84232):GMVVD (SEQ ID NO: 84204), VPARL (SEQ ID NO: 84352):SPIS-AA¹⁷-LYK (SEQ ID NO: 84887):LKYHY (SEQ ID NO: 84232):DMVVE (SEQ ID NO: 84161), VPTRL (SEQ ID NO: 84385):SPIS-AA¹⁷-LYK (SEQ ID NO: 84887):LKYHY (SEQ ID NO: 84232):DMVVE (SEQ ID NO: 84161), APVKT (SEQ ID NO: 84144):SPIS-AA¹⁷-LYK (SEQ ID NO: 84887):LKYHY (SEQ ID NO: 84232):MIVEE (SEQ ID NO: 84241), VPQAL (SEQ ID NO: 84364):SPIS-AA¹⁷-LYK (SEQ ID NO: 84887):LKYHY (SEQ ID NO: 84232):MIVRS (SEQ ID NO: 84243), VSQDL (SEQ ID NO: 84387):SPIS-AA¹⁷-LYK (SEQ ID NO: 84887):LKYHY (SEQ ID NO: 84232):MIVKS (SEQ ID NO: 84242), VPQDL (SEQ ID NO: 84365):SPIS-AA¹⁷-LYK (SEQ ID NO: 84887):LKYHY (SEQ ID NO: 84232):MVVKS (SEQ ID NO: 84256), VPTEE (SEQ ID NO: 84377):SPIS-AA¹⁷-LYK (SEQ ID NO: 84887):LKYHY (SEQ ID NO: 84232):FLQHN (SEQ ID NO: 84184), VPTGQ (SEQ ID NO: 84379):SPIS-AA¹⁷-LYK (SEQ ID NO: 84887):LKYHY (SEQ ID NO: 84232):LEEHS (SEQ ID NO: 84217), SRVHH (SEQ ID NO: 84297):SPIS-AA¹⁷-LYK (SEQ ID NO: 84887):LKYHY (SEQ ID NO: 84232):RLEEH (SEQ ID NO: 84279), TQVQL (SEQ ID NO: 84340):SPIS-AA¹⁷-LYK (SEQ ID NO: 84887):LKYHY (SEQ ID NO: 84232):TLEDH (SEQ ID NO: 84307), VPTEL (SEQ ID NO: 84378):EPIS-AA¹⁷-LYL (SEQ ID NO: 84874):KFKYE (SEQ ID NO: 84211):DMAVS (SEQ ID NO: 84150), VPTKM (SEQ ID NO: 84382):EPIS-AA¹⁷-LYL (SEQ ID NO: 84874):KFKYE (SEQ ID NO: 84211):NMAVS (SEQ ID NO: 84262), VPTEL (SEQ ID NO: 84378):EPIS-AA¹⁷-LYL (SEQ ID NO: 84874):KFKYE (SEQ ID NO: 84211):EMAVS (SEQ ID NO: 84164), VPTKL (SEQ ID NO: 84381):EPIS-AA¹⁷-LYL (SEQ ID NO: 84874):KFKYE (SEQ ID NO: 84211):NMAVS (SEQ ID NO: 84262), VPTQL (SEQ ID NO: 84384):EPIS-AA¹⁷-LYL (SEQ ID NO: 84874):KFKYE (SEQ ID NO: 84211):NMAVS (SEQ ID NO: 84262), VPTKL (SEQ ID NO: 84381):EPIS-AA¹⁷-LYL (SEQ ID NO: 84874):KFKYE (SEQ ID NO: 84211):EGMSAVS (SEQ ID NO: 84405), VPTKM (SEQ ID NO: 84382):EPIS-AA¹⁷-LYL (SEQ ID NO: 84874):KFKYE (SEQ ID NO: 84211):GMAVS (SEQ ID NO: 84194), VPTRL (SEQ ID NO: 84385):EPIS-AA¹⁷-LYL (SEQ ID NO: 84874):KFKYE (SEQ ID NO: 84211):DMAVS (SEQ ID NO: 84150), VPTKT (SEQ ID NO: 84383):EPIS-AA¹⁷-LYL (SEQ ID NO: 84874):KFKYE (SEQ ID NO: 84211):MIAVS (SEQ ID NO: 84234), VPTAL (SEQ ID NO: 84375):EPIS-AA¹⁷-LYL (SEQ ID NO: 84874):KFKYE (SEQ ID NO: 84211):MIAVS (SEQ ID NO: 84234), VPTDL (SEQ ID NO: 84376):EPIS-AA¹⁷-LYL (SEQ ID NO: 84874):KFKYE (SEQ ID NO: 84211):MIAVS (SEQ ID NO: 84234), VPTDL (SEQ ID NO: 84376):EPIS-AA¹⁷-LYL (SEQ ID NO: 84874):KFKYE (SEQ ID NO: 84211):MVAVS (SEQ ID NO: 84248), VPTEE (SEQ ID NO: 84377):EPIS-AA¹⁷-LYL (SEQ ID NO: 84874):KFKYE (SEQ ID NO: 84211):FLAVS (SEQ ID NO: 84180), VPTGQ (SEQ ID NO: 84379):EPIS-AA¹⁷-LYL (SEQ ID NO: 84874):KFKYE (SEQ ID NO: 84211):LEAVS (SEQ ID NO: 84214), VPTHH (SEQ ID NO: 84380):EPIS-AA¹⁷-LYL (SEQ ID NO: 84874):KFKYE (SEQ ID NO: 84211):RLAVS (SEQ ID NO: 84277), VPTQL (SEQ ID NO: 84384):EPIS-AA¹⁷-LYL (SEQ ID NO: 84874):KFKYE (SEQ ID NO: 84211):TLAVS (SEQ ID NO: 84306), VPTEL (SEQ ID NO: 84378):EPIS-AA¹⁷-LYL (SEQ ID NO: 84874):KFKYE (SEQ ID NO: 84211):DMVVE (SEQ ID NO: 84161), VPEKM (SEQ ID NO: 84360):EPIS-AA¹⁷-LYL (SEQ ID NO: 84874):KFKYE (SEQ ID NO: 84211):NMTVE (SEQ ID NO: 84267), VPTEL (SEQ ID NO: 84378):EPIS-AA¹⁷-LYL (SEQ ID NO: 84874):KFKYE (SEQ ID NO: 84211):EMVVE (SEQ ID NO: 84175), APTKL (SEQ ID NO: 84131):EPIS-AA¹⁷-LYL (SEQ ID NO: 84874):KFKYE (SEQ ID NO: 84211):NMVVR (SEQ ID NO: 84275), APTQL (SEQ ID NO: 84134):EPIS-AA¹⁷-LYL (SEQ ID NO: 84874):KFKYE (SEQ ID NO: 84211):NMVVR (SEQ ID NO: 84275), APTKL (SEQ ID NO: 84131):EPIS-AA¹⁷-LYL (SEQ ID NO: 84874):KFKYE (SEQ ID NO: 84211):NMVVK (SEQ ID NO: 84274), VPTKL (SEQ ID NO: 84381):EPIS-AA¹⁷-LYL (SEQ ID NO: 84874):KFKYE (SEQ ID NO: 84211):EGMSVAE (SEQ ID NO: 84411), TPTKM (SEQ ID NO: 84327):EPIS-AA¹⁷-LYL (SEQ ID NO: 84874):KFKYE (SEQ ID NO: 84211):GMVVD (SEQ ID NO: 84204), VPARL (SEQ ID NO: 84352):EPIS-AA¹⁷-LYL (SEQ ID NO: 84874):KFKYE (SEQ ID NO: 84211):DMVVE (SEQ ID NO: 84161), VPTRL (SEQ ID NO: 84385):EPIS-AA¹⁷-LYL (SEQ ID NO: 84874):KFKYE (SEQ ID NO: 84211):DMVVE (SEQ ID NO: 84161), APVKT (SEQ ID NO: 84144):EPIS-AA¹⁷-LYL (SEQ ID NO: 84874):KFKYE (SEQ ID NO: 84211):MIVEE (SEQ ID NO: 84241), VPQAL (SEQ ID NO: 84364):EPIS-AA¹⁷-LYL (SEQ ID NO: 84874):KFKYE (SEQ ID NO: 84211):MIVRS (SEQ ID NO: 84243), VSQDL (SEQ ID NO: 84387):EPIS-AA¹⁷-LYL (SEQ ID NO: 84874):KFKYE (SEQ ID NO: 84211):MIVKS (SEQ ID NO: 84242), VPQDL (SEQ ID NO: 84365):EPIS-AA¹⁷-LYL (SEQ ID NO: 84874):KFKYE (SEQ ID NO: 84211):MVVKS (SEQ ID NO: 84256), VPTEE (SEQ ID NO: 84377):EPIS-AA¹⁷-LYL (SEQ ID NO: 84874):KFKYE (SEQ ID NO: 84211):FLQHN (SEQ ID NO: 84184), VPTGQ (SEQ ID NO: 84379):EPIS-AA¹⁷-LYL (SEQ ID NO: 84874):KFKYE (SEQ ID NO: 84211):LEEHS (SEQ ID NO: 84217), SRVHH (SEQ ID NO: 84297):EPIS-AA¹⁷-LYL (SEQ ID NO: 84874):KFKYE (SEQ ID NO: 84211):RLEEH (SEQ ID NO: 84279), TQVQL (SEQ ID NO: 84340):EPIS-AA¹⁷-LYL (SEQ ID NO: 84874):KFKYE (SEQ ID NO: 84211):TLEDH (SEQ ID NO: 84307), TPTEL (SEQ ID NO: 84323):SPIN-AA¹⁷-LYF (SEQ ID NO: 84884):YGKIP (SEQ ID NO: 84397):DMVVD (SEQ ID NO: 84160), TPTKM (SEQ ID NO: 84327):SPIN-AA¹⁷-LYF (SEQ ID NO: 84884):YGKIP (SEQ ID NO: 84397):NMVVD (SEQ ID NO: 84272), TPTEL (SEQ ID NO: 84323):SPIN-AA¹⁷-LYF (SEQ ID NO: 84884):YGKIP (SEQ ID NO: 84397):EMVVD (SEQ ID NO: 84174), TPTKL (SEQ ID NO: 84326):SPIN-AA¹⁷-LYF (SEQ ID NO: 84884):YGKIP (SEQ ID NO: 84397):NMVVD (SEQ ID NO: 84272), TPTQL (SEQ ID NO: 84329):SPIN-AA¹⁷-LYF (SEQ ID NO: 84884):YGKIP (SEQ ID NO: 84397):NMVVD (SEQ ID NO: 84272), TPTKL (SEQ ID NO: 84326):SPIN-AA¹⁷-LYF (SEQ ID NO: 84884):YGKIP (SEQ ID NO: 84397):EGMSVVD (SEQ ID NO: 84415), TPTKL (SEQ ID NO: 84326):SPIN-AA¹⁷-LYF (SEQ ID NO: 84884):YGKIP (SEQ ID NO: 84397):GMVVD (SEQ ID NO: 84204), TPTRL (SEQ ID NO: 84330):SPIN-AA¹⁷-LYF (SEQ ID NO: 84884):YGKIP (SEQ ID NO: 84397):DMVVD (SEQ ID NO: 84160), TPTKT (SEQ ID NO: 84328):SPIN-AA¹⁷-LYF (SEQ ID NO: 84884):YGKIP (SEQ ID NO: 84397):MIVVD (SEQ ID NO: 84244), TPTAL (SEQ ID NO: 84320):SPIN-AA¹⁷-LYF (SEQ ID NO: 84884):YGKIP (SEQ ID NO: 84397):MIVVD (SEQ ID NO: 84244), TPTDL (SEQ ID NO: 84321):SPIN-AA¹⁷-LYF (SEQ ID NO: 84884):YGKIP (SEQ ID NO: 84397):MIVVD (SEQ ID NO: 84244), TPTDL (SEQ ID NO: 84321):SPIN-AA¹⁷-LYF (SEQ ID NO: 84884):YGKIP (SEQ ID NO: 84397):MVVVD (SEQ ID NO: 84258), TPTEE (SEQ ID NO: 84322):SPIN-AA¹⁷-LYF (SEQ ID NO: 84884):YGKIP (SEQ ID NO: 84397):FLVVD (SEQ ID NO: 84190), TPTGQ (SEQ ID NO: 84324):SPIN-AA¹⁷-LYF (SEQ ID NO: 84884):YGKIP (SEQ ID NO: 84397):LEVVD (SEQ ID NO: 84224), TPTHH (SEQ ID NO: 84325):SPIN-AA¹⁷-LYF (SEQ ID NO: 84884):YGKIP (SEQ ID NO: 84397):RLVVD (SEQ ID NO: 84287), TPTQL (SEQ ID NO: 84329):SPIN-AA¹⁷-LYF (SEQ ID NO: 84884):YGKIP (SEQ ID NO: 84397):TLVVD (SEQ ID NO: 84316), VPTEL (SEQ ID NO: 84378):SPIN-AA¹⁷-LYF (SEQ ID NO: 84884):YGKIP (SEQ ID NO: 84397):DMVVE (SEQ ID NO: 84161), VPEKM (SEQ ID NO: 84360):SPIN-AA¹⁷-LYF (SEQ ID NO: 84884):YGKIP (SEQ ID NO: 84397):NMTVE (SEQ ID NO: 84267), VPTEL (SEQ ID NO: 84378):SPIN-AA¹⁷-LYF (SEQ ID NO: 84884):YGKIP (SEQ ID NO: 84397):EMVVE (SEQ ID NO: 84175), APTKL (SEQ ID NO: 84131):SPIN-AA¹⁷-LYF (SEQ ID NO: 84884):YGKIP (SEQ ID NO: 84397):NMVVR (SEQ ID NO: 84275), APTQL (SEQ ID NO: 84134):SPIN-AA¹⁷-LYF (SEQ ID NO: 84884):YGKIP (SEQ ID NO: 84397):NMVVR (SEQ ID NO: 84275), APTKL (SEQ ID NO: 84131):SPIN-AA¹⁷-LYF (SEQ ID NO: 84884):YGKIP (SEQ ID NO: 84397):NMVVK (SEQ ID NO: 84274), VPTKL (SEQ ID NO: 84381):SPIN-AA¹⁷-LYF (SEQ ID NO: 84884):YGKIP (SEQ ID NO: 84397):EGMSVAE (SEQ ID NO: 84411), VPTKL (SEQ ID NO: 84381):SPIN-AA¹⁷-LYF (SEQ ID NO: 84884):YGKIP (SEQ ID NO: 84397):GMAVS (SEQ ID NO: 84194), VPARL (SEQ ID NO: 84352):SPIN-AA¹⁷-LYF (SEQ ID NO: 84884):YGKIP (SEQ ID NO: 84397):DMVVE (SEQ ID NO: 84161), VPTRL (SEQ ID NO: 84385):SPIN-AA¹⁷-LYF (SEQ ID NO: 84884):YGKIP (SEQ ID NO: 84397):DMVVE (SEQ ID NO: 84161), APVKT (SEQ ID NO: 84144):SPIN-AA¹⁷-LYF (SEQ ID NO: 84884):YGKIP (SEQ ID NO: 84397):MIVEE (SEQ ID NO: 84241), VPQAL (SEQ ID NO: 84364):SPIN-AA¹⁷-LYF (SEQ ID NO: 84884):YGKIP (SEQ ID NO: 84397):MIVRS (SEQ ID NO: 84243), VSQDL (SEQ ID NO: 84387):SPIN-AA¹⁷-LYF (SEQ ID NO: 84884):YGKIP (SEQ ID NO: 84397):MIVKS (SEQ ID NO: 84242), VPQDL (SEQ ID NO: 84365):SPIN-AA¹⁷-LYF (SEQ ID NO: 84884):YGKIP (SEQ ID NO: 84397):MVVKS (SEQ ID NO: 84256), VPTEE (SEQ ID NO: 84377):SPIN-AA¹⁷-LYF (SEQ ID NO: 84884):YGKIP (SEQ ID NO: 84397):FLQHN (SEQ ID NO: 84184), VPTGQ (SEQ ID NO: 84379):SPIN-AA¹⁷-LYF (SEQ ID NO: 84884):YGKIP (SEQ ID NO: 84397):LEEHS (SEQ ID NO: 84217), SRVHH (SEQ ID NO: 84297):SPIN-AA¹⁷-LYF (SEQ ID NO: 84884):YGKIP (SEQ ID NO: 84397):RLEEH (SEQ ID NO: 84279), TQVQL (SEQ ID NO: 84340):SPIN-AA¹⁷-LYF (SEQ ID NO: 84884):YGKIP (SEQ ID NO: 84397):TLEDH (SEQ ID NO: 84307), VPAEL (SEQ ID NO: 84345):SPIS-AA¹⁷-LYI (SEQ ID NO: 84886):YKQYE (SEQ ID NO: 84398):DMVVE (SEQ ID NO: 84161), VPAKM (SEQ ID NO: 84349):SPIS-AA¹⁷-LYI (SEQ ID NO: 84886):YKQYE (SEQ ID NO: 84398):NMVVE (SEQ ID NO: 84273), VPAEL (SEQ ID NO: 84345):SPIS-AA¹⁷-LYI (SEQ ID NO: 84886):YKQYE (SEQ ID NO: 84398):EMVVE (SEQ ID NO: 84175), VPAKL (SEQ ID NO: 84348):SPIS-AA¹⁷-LYI (SEQ ID NO: 84886):YKQYE (SEQ ID NO: 84398):NMVVE (SEQ ID NO: 84273), VPAQL (SEQ ID NO: 84351):SPIS-AA¹⁷-LYI (SEQ ID NO: 84886):YKQYE (SEQ ID NO: 84398):NMVVE (SEQ ID NO: 84273), VPAKL (SEQ ID NO: 84348):SPIS-AA¹⁷-LYI (SEQ ID NO: 84886):YKQYE (SEQ ID NO: 84398):EGMSVVE (SEQ ID NO: 84416), VPAKL (SEQ ID NO: 84348):SPIS-AA¹⁷-LYI (SEQ ID NO: 84886):YKQYE (SEQ ID NO: 84398):GMVVE (SEQ ID NO: 84205), VPAKM (SEQ ID NO: 84349):SPIS-AA¹⁷-LYI (SEQ ID NO: 84886):YKQYE (SEQ ID NO: 84398):GMVVE (SEQ ID NO: 84205), VPARL (SEQ ID NO: 84352):SPIS-AA¹⁷-LYI (SEQ ID NO: 84886):YKQYE (SEQ ID NO: 84398):DMVVE (SEQ ID NO: 84161), VPAKT (SEQ ID NO: 84350):SPIS-AA¹⁷-LYI (SEQ ID NO: 84886):YKQYE (SEQ ID NO: 84398):MIVVE (SEQ ID NO: 84245), VPAAL (SEQ ID NO: 84342):SPIS-AA¹⁷-LYI (SEQ ID NO: 84886):YKQYE (SEQ ID NO: 84398):MIVVE (SEQ ID NO: 84245), VPADL (SEQ ID NO: 84343):SPIS-AA¹⁷-LYI (SEQ ID NO: 84886):YKQYE (SEQ ID NO: 84398):MIVVE (SEQ ID NO: 84245), VPADL (SEQ ID NO: 84343):SPIS-AA¹⁷-LYI (SEQ ID NO: 84886):YKQYE (SEQ ID NO: 84398):MVVVE (SEQ ID NO: 84259), VPAEE (SEQ ID NO: 84344):SPIS-AA¹⁷-LYI (SEQ ID NO: 84886):YKQYE (SEQ ID NO: 84398):FLVVE (SEQ ID NO: 84191), VPAGQ (SEQ ID NO: 84346):SPIS-AA¹⁷-LYI (SEQ ID NO: 84886):YKQYE (SEQ ID NO: 84398):LEVVE (SEQ ID NO: 84225), VPAHH (SEQ ID NO: 84347):SPIS-AA¹⁷-LYI (SEQ ID NO: 84886):YKQYE (SEQ ID NO: 84398):RLVVE (SEQ ID NO: 84288), VPAQL (SEQ ID NO: 84351):SPIS-AA17-LYI (SEQ ID NO: 84886):YKQYE (SEQ ID NO: 84398):TLVVE (SEQ ID NO: 84317), VPTEL (SEQ ID NO: 84378):SPIS-AA¹⁷-LYI (SEQ ID NO: 84886):YKQYE (SEQ ID NO: 84398):DMVVE (SEQ ID NO: 84161), VPEKM (SEQ ID NO: 84360):SPIS-AA¹⁷-LYI (SEQ ID NO: 84886):YKQYE (SEQ ID NO: 84398):NMTVE (SEQ ID NO: 84267), VPTEL (SEQ ID NO: 84378):SPIS-AA¹⁷-LYI (SEQ ID NO: 84886):YKQYE (SEQ ID NO: 84398):EMVVE (SEQ ID NO: 84175), APTKL (SEQ ID NO: 84131):SPIS-AA¹⁷-LYI (SEQ ID NO: 84886):YKQYE (SEQ ID NO: 84398):NMVVR (SEQ ID NO: 84275), APTQL (SEQ ID NO: 84134):SPIS-AA¹⁷-LYI (SEQ ID NO: 84886):YKQYE (SEQ ID NO: 84398):NMVVR (SEQ ID NO: 84275), APTKL (SEQ ID NO: 84131):SPIS-AA¹⁷-LYI (SEQ ID NO: 84886):YKQYE (SEQ ID NO: 84398):NMVVK (SEQ ID NO: 84274), VPTKL (SEQ ID NO: 84381):SPIS-AA¹⁷-LYI (SEQ ID NO: 84886):YKQYE (SEQ ID NO: 84398):EGMSVAE (SEQ ID NO: 84411), VPTKL (SEQ ID NO: 84381):SPIS-AA¹⁷-LYI (SEQ ID NO: 84886):YKQYE (SEQ ID NO: 84398):GMAVS (SEQ ID NO: 84194), TPTKM (SEQ ID NO: 84327):SPIS-AA¹⁷-LYI (SEQ ID NO: 84886):YKQYE (SEQ ID NO: 84398):GMVVD (SEQ ID NO: 84204), VPTRL (SEQ ID NO: 84385):SPIS-AA¹⁷-LYI (SEQ ID NO: 84886):YKQYE (SEQ ID NO: 84398):DMVVE (SEQ ID NO: 84161), APVKT (SEQ ID NO: 84144):SPIS-AA¹⁷-LYI (SEQ ID NO: 84886):YKQYE (SEQ ID NO: 84398):MIVEE (SEQ ID NO: 84241), VPQAL (SEQ ID NO: 84364):SPIS-AA¹⁷-LYI (SEQ ID NO: 84886):YKQYE (SEQ ID NO: 84398):MIVRS (SEQ ID NO: 84243), VSQDL (SEQ ID NO: 84387):SPIS-AA¹⁷-LYI (SEQ ID NO: 84886):YKQYE (SEQ ID NO: 84398):MIVKS (SEQ ID NO: 84242), VPQDL (SEQ ID NO: 84365):SPIS-AA¹⁷-LYI (SEQ ID NO: 84886):YKQYE (SEQ ID NO: 84398):MVVKS (SEQ ID NO: 84256), VPTEE (SEQ ID NO: 84377):SPIS-AA¹⁷-LYI (SEQ ID NO: 84886):YKQYE (SEQ ID NO: 84398):FLQHN (SEQ ID NO: 84184), VPTGQ (SEQ ID NO: 84379):SPIS-AA¹⁷-LYI (SEQ ID NO: 84886):YKQYE (SEQ ID NO: 84398):LEEHS (SEQ ID NO: 84217), SRVHH (SEQ ID NO: 84297):SPIS-AA¹⁷-LYI (SEQ ID NO: 84886):YKQYE (SEQ ID NO: 84398):RLEEH (SEQ ID NO: 84279), TQVQL (SEQ ID NO: 84340):SPIS-AA¹⁷-LYI (SEQ ID NO: 84886):YKQYE (SEQ ID NO: 84398):TLEDH (SEQ ID NO: 84307), VPTEL (SEQ ID NO: 84378):SPIS-AA¹⁷-LFI (SEQ ID NO: 84885):YKQYE (SEQ ID NO: 84398):DMVVE (SEQ ID NO: 84161), VPTKM (SEQ ID NO: 84382):SPIS-AA¹⁷-LFI (SEQ ID NO: 84885):YKQYE (SEQ ID NO: 84398):NMVVE (SEQ ID NO: 84273), VPTEL (SEQ ID NO: 84378):SPIS-AA¹⁷-LFI (SEQ ID NO: 84885):YKQYE (SEQ ID NO: 84398):EMVVE (SEQ ID NO: 84175), VPTKL (SEQ ID NO: 84381):SPIS-AA¹⁷-LFI (SEQ ID NO: 84885):YKQYE (SEQ ID NO: 84398):NMVVE (SEQ ID NO: 84273), VPTQL (SEQ ID NO: 84384):SPIS-AA¹⁷-LFI (SEQ ID NO: 84885):YKQYE (SEQ ID NO: 84398):NMVVE (SEQ ID NO: 84273), VPTKL (SEQ ID NO: 84381):SPIS-AA¹⁷-LFI (SEQ ID NO: 84885):YKQYE (SEQ ID NO: 84398):EGMSVVE (SEQ ID NO: 84416), VPTKL (SEQ ID NO: 84381):SPIS-AA¹⁷-LFI (SEQ ID NO: 84885):YKQYE (SEQ ID NO: 84398):GMVVE (SEQ ID NO: 84205), VPTKM (SEQ ID NO: 84382):SPIS-AA¹⁷-LFI (SEQ ID NO: 84885):YKQYE (SEQ ID NO: 84398):GMVVE (SEQ ID NO: 84205), VPTRL (SEQ ID NO: 84385):SPIS-AA¹⁷-LFI (SEQ ID NO: 84885):YKQYE (SEQ ID NO: 84398):DMVVE (SEQ ID NO: 84161), VPTKT (SEQ ID NO: 84383):SPIS-AA¹⁷-LFI (SEQ ID NO: 84885):YKQYE (SEQ ID NO: 84398):MIVVE (SEQ ID NO: 84245), VPTAL (SEQ ID NO: 84375):SPIS-AA¹⁷-LFI (SEQ ID NO: 84885):YKQYE (SEQ ID NO: 84398):MIVVE (SEQ ID NO: 84245), VPTDL (SEQ ID NO: 84376):SPIS-AA¹⁷-LFI (SEQ ID NO: 84885):YKQYE (SEQ ID NO: 84398):MIVVE (SEQ ID NO: 84245), VPTDL (SEQ ID NO: 84376):SPIS-AA¹⁷-LFI (SEQ ID NO: 84885):YKQYE (SEQ ID NO: 84398):MVVVE (SEQ ID NO: 84259), VPTEE (SEQ ID NO: 84377):SPIS-AA¹⁷-LFI (SEQ ID NO: 84885):YKQYE (SEQ ID NO: 84398):FLVVE (SEQ ID NO: 84191), VPTGQ (SEQ ID NO: 84379):SPIS-AA¹⁷-LFI (SEQ ID NO: 84885):YKQYE (SEQ ID NO: 84398):LEVVE (SEQ ID NO: 84225), VPTHH (SEQ ID NO: 84380):SPIS-AA¹⁷-LFI (SEQ ID NO: 84885):YKQYE (SEQ ID NO: 84398):RLVVE (SEQ ID NO: 84288), VPTQL (SEQ ID NO: 84384):SPIS-AA¹⁷-LFI (SEQ ID NO: 84885):YKQYE (SEQ ID NO: 84398):TLVVE (SEQ ID NO: 84317), VPEKM (SEQ ID NO: 84360):SPIS-AA¹⁷-LFI (SEQ ID NO: 84885):YKQYE (SEQ ID NO: 84398):NMTVE (SEQ ID NO: 84267), APTKL (SEQ ID NO: 84131):SPIS-AA¹⁷-LFI (SEQ ID NO: 84885):YKQYE (SEQ ID NO: 84398):NMVVR (SEQ ID NO: 84275), APTQL (SEQ ID NO: 84134):SPIS-AA¹⁷-LFI (SEQ ID NO: 84885):YKQYE (SEQ ID NO: 84398):NMVVR (SEQ ID NO: 84275), APTKL (SEQ ID NO: 84131):SPIS-AA¹⁷-LFI (SEQ ID NO: 84885):YKQYE (SEQ ID NO: 84398):NMVVK (SEQ ID NO: 84274), VPTKL (SEQ ID NO: 84381):SPIS-AA¹⁷-LFI (SEQ ID NO: 84885):YKQYE (SEQ ID NO: 84398):EGMSVAE (SEQ ID NO: 84411), VPTKL (SEQ ID NO: 84381):SPIS-AA¹⁷-LFI (SEQ ID NO: 84885):YKQYE (SEQ ID NO: 84398):GMAVS (SEQ ID NO: 84194), TPTKM (SEQ ID NO: 84327):SPIS-AA¹⁷-LFI (SEQ ID NO: 84885):YKQYE (SEQ ID NO: 84398):GMVVD (SEQ ID NO: 84204), VPARL (SEQ ID NO: 84352):SPIS-AA¹⁷-LFI (SEQ ID NO: 84885):YKQYE (SEQ ID NO: 84398):DMVVE (SEQ ID NO: 84161), APVKT (SEQ ID NO: 84144):SPIS-AA¹⁷-LFI (SEQ ID NO: 84885):YKQYE (SEQ ID NO: 84398):MIVEE (SEQ ID NO: 84241), VPQAL (SEQ ID NO: 84364):SPIS-AA¹⁷-LFI (SEQ ID NO: 84885):YKQYE (SEQ ID NO: 84398):MIVRS (SEQ ID NO: 84243), VSQDL (SEQ ID NO: 84387):SPIS-AA¹⁷-LFI (SEQ ID NO: 84885):YKQYE (SEQ ID NO: 84398):MIVKS (SEQ ID NO: 84242), VPQDL (SEQ ID NO: 84365):SPIS-AA¹⁷-LFI (SEQ ID NO: 84885):YKQYE (SEQ ID NO: 84398):MVVKS (SEQ ID NO: 84256), VPTEE (SEQ ID NO: 84377):SPIS-AA¹⁷-LFI (SEQ ID NO: 84885):YKQYE (SEQ ID NO: 84398):FLQHN (SEQ ID NO: 84184), VPTGQ (SEQ ID NO: 84379):SPIS-AA¹⁷-LFI (SEQ ID NO: 84885):YKQYE (SEQ ID NO: 84398):LEEHS (SEQ ID NO: 84217), SRVHH (SEQ ID NO: 84297):SPIS-AA¹⁷-LFI (SEQ ID NO: 84885):YKQYE (SEQ ID NO: 84398):RLEEH (SEQ ID NO: 84279), TQVQL (SEQ ID NO: 84340):SPIS-AA¹⁷-LFI (SEQ ID NO: 84885):YKQYE (SEQ ID NO: 84398):TLEDH (SEQ ID NO: 84307), APVEL (SEQ ID NO: 84139):KPLS-AA¹⁷-LYV (SEQ ID NO: 84877):DHHKD (SEQ ID NO: 84149):DMVEE (SEQ ID NO: 84157), APVKM (SEQ ID NO: 84143):KPLS-AA¹⁷-LYV (SEQ ID NO: 84877):DHHKD (SEQ ID NO: 84149):NMVEE (SEQ ID NO: 84269), APVEL (SEQ ID NO: 84139):KPLS-AA¹⁷-LYV (SEQ ID NO: 84877):DHHKD (SEQ ID NO: 84149):EMVEE (SEQ ID NO: 84171), APVKL (SEQ ID NO: 84142):KPLS-AA¹⁷-LYV (SEQ ID NO: 84877):DHHKD (SEQ ID NO: 84149):NMVEE (SEQ ID NO: 84269), APVQL (SEQ ID NO: 84145):KPLS-AA¹⁷-LYV (SEQ ID NO: 84877):DHHKD (SEQ ID NO: 84149):NMVEE (SEQ ID NO: 84269), APVKL (SEQ ID NO: 84142):KPLS-AA¹⁷-LYV (SEQ ID NO: 84877):DHHKD (SEQ ID NO: 84149):EGMSVEE (SEQ ID NO: 84412), APVKL (SEQ ID NO: 84142):KPLS-AA¹⁷-LYV (SEQ ID NO: 84877):DHHKD (SEQ ID NO: 84149):GMVEE (SEQ ID NO: 84201), APVKM (SEQ ID NO: 84143):KPLS-AA¹⁷-LYV (SEQ ID NO: 84877):DHHKD (SEQ ID NO: 84149):GMVEE (SEQ ID NO: 84201), APVRL (SEQ ID NO: 84146):KPLS-AA¹⁷-LYV (SEQ ID NO: 84877):DHHKD (SEQ ID NO: 84149):DMVEE (SEQ ID NO: 84157), APVAL (SEQ ID NO: 84136):KPLS-AA¹⁷-LYV (SEQ ID NO: 84877):DHHKD (SEQ ID NO: 84149):MIVEE (SEQ ID NO: 84241), APVDL (SEQ ID NO: 84137):KPLS-AA¹⁷-LYV (SEQ ID NO: 84877):DHHKD (SEQ ID NO: 84149):MIVEE (SEQ ID NO: 84241), APVDL (SEQ ID NO: 84137):KPLS-AA¹⁷-LYV (SEQ ID NO: 84877):DHHKD (SEQ ID NO: 84149):MVVEE (SEQ ID NO: 84255), APVEE (SEQ ID NO: 84138):KPLS-AA¹⁷-LYV (SEQ ID NO: 84877):DHHKD (SEQ ID NO: 84149):FLVEE (SEQ ID NO: 84187), APVGQ (SEQ ID NO: 84140):KPLS-AA¹⁷-LYV (SEQ ID NO: 84877):DHHKD (SEQ ID NO: 84149):LEVEE (SEQ ID NO: 84221), APVHH (SEQ ID NO: 84141):KPLS-AA¹⁷-LYV (SEQ ID NO: 84877):DHHKD (SEQ ID NO: 84149):RLVEE (SEQ ID NO: 84284), APVQL (SEQ ID NO: 84145):KPLS-AA¹⁷-LYV (SEQ ID NO: 84877):DHHKD (SEQ ID NO: 84149):TLVEE (SEQ ID NO: 84313), VPTEL (SEQ ID NO: 84378):KPLS-AA¹⁷-LYV (SEQ ID NO: 84877):DHHKD (SEQ ID NO: 84149):DMVVE (SEQ ID NO: 84161), VPEKM (SEQ ID NO: 84360):KPLS-AA¹⁷-LYV (SEQ ID NO: 84877):DHHKD (SEQ ID NO: 84149):NMTVE (SEQ ID NO: 84267), VPTEL (SEQ ID NO: 84378):KPLS-AA¹⁷-LYV (SEQ ID NO: 84877):DHHKD (SEQ ID NO: 84149):EMVVE (SEQ ID NO: 84175), APTKL (SEQ ID NO: 84131):KPLS-AA¹⁷-LYV (SEQ ID NO: 84877):DHHKD (SEQ ID NO: 84149):NMVVR (SEQ ID NO: 84275), APTQL (SEQ ID NO: 84134):KPLS-AA¹⁷-LYV (SEQ ID NO: 84877):DHHKD (SEQ ID NO: 84149):NMVVR (SEQ ID NO: 84275), APTKL (SEQ ID NO: 84131):KPLS-AA¹⁷-LYV (SEQ ID NO: 84877):DHHKD (SEQ ID NO: 84149):NMVVK (SEQ ID NO: 84274), VPTKL (SEQ ID NO: 84381):KPLS-AA¹⁷-LYV (SEQ ID NO: 84877):DHHKD (SEQ ID NO: 84149):EGMSVAE (SEQ ID NO: 84411), VPTKL (SEQ ID NO: 84381):KPLS-AA¹⁷-LYV (SEQ ID NO: 84877):DHHKD (SEQ ID NO: 84149):GMAVS (SEQ ID NO: 84194), TPTKM (SEQ ID NO: 84327):KPLS-AA¹⁷-LYV (SEQ ID NO: 84877):DHHKD (SEQ ID NO: 84149):GMVVD (SEQ ID NO: 84204), VPARL (SEQ ID NO: 84352):KPLS-AA¹⁷-LYV (SEQ ID NO: 84877):DHHKD (SEQ ID NO: 84149):DMVVE (SEQ ID NO: 84161), VPTRL (SEQ ID NO: 84385):KPLS-AA¹⁷-LYV (SEQ ID NO: 84877):DHHKD (SEQ ID NO: 84149):DMVVE (SEQ ID NO: 84161), VPQAL (SEQ ID NO: 84364):KPLS-AA¹⁷-LYV (SEQ ID NO: 84877):DHHKD (SEQ ID NO: 84149):MIVRS (SEQ ID NO: 84243), VSQDL (SEQ ID NO: 84387):KPLS-AA¹⁷-LYV (SEQ ID NO: 84877):DHHKD (SEQ ID NO: 84149):MIVKS (SEQ ID NO: 84242), VPQDL (SEQ ID NO: 84365):KPLS-AA¹⁷-LYV (SEQ ID NO: 84877):DHHKD (SEQ ID NO: 84149):MVVKS (SEQ ID NO: 84256), VPTEE (SEQ ID NO: 84377):KPLS-AA¹⁷-LYV (SEQ ID NO: 84877):DHHKD (SEQ ID NO: 84149):FLQHN (SEQ ID NO: 84184), VPTGQ (SEQ ID NO: 84379):KPLS-AA¹⁷-LYV (SEQ ID NO: 84877):DHHKD (SEQ ID NO: 84149):LEEHS (SEQ ID NO: 84217), SRVHH (SEQ ID NO: 84297):KPLS-AA¹⁷-LYV (SEQ ID NO: 84877):DHHKD (SEQ ID NO: 84149):RLEEH (SEQ ID NO: 84279), TQVQL (SEQ ID NO: 84340):KPLS-AA¹⁷-LYV (SEQ ID NO: 84877):DHHKD (SEQ ID NO: 84149):TLEDH (SEQ ID NO: 84307), VPQEL (SEQ ID NO: 84367):EPLP-AA¹⁷-VYY (SEQ ID NO: 84875):EQLSN (SEQ ID NO: 84178):DMVRS (SEQ ID NO: 84159), VPQKM (SEQ ID NO: 84371):EPLP-AA¹⁷-VYY (SEQ ID NO: 84875):EQLSN (SEQ ID NO: 84178):NMVRS (SEQ ID NO: 84271), VPQEL (SEQ ID NO: 84367):EPLP-AA¹⁷-VYY (SEQ ID NO: 84875):EQLSN (SEQ ID NO: 84178):EMVRS (SEQ ID NO: 84173), VPQKL (SEQ ID NO: 84370):EPLP-AA¹⁷-VYY (SEQ ID NO: 84875):EQLSN (SEQ ID NO: 84178):NMVRS (SEQ ID NO: 84271), VPQQL (SEQ ID NO: 84373):EPLP-AA¹⁷-VYY (SEQ ID NO: 84875):EQLSN (SEQ ID NO: 84178):NMVRS (SEQ ID NO: 84271), VPQKL (SEQ ID NO: 84370):EPLP-AA¹⁷-VYY (SEQ ID NO: 84875):EQLSN (SEQ ID NO: 84178):EGMSVRS (SEQ ID NO: 84414), VPQKL (SEQ ID NO: 84370):EPLP-AA¹⁷-VYY (SEQ ID NO: 84875):EQLSN (SEQ ID NO: 84178):GMVRS (SEQ ID NO: 84203), VPQKM (SEQ ID NO: 84371):EPLP-AA¹⁷-VYY (SEQ ID NO: 84875):EQLSN (SEQ ID NO: 84178):GMVRS (SEQ ID NO: 84203), VPQRL (SEQ ID NO: 84374):EPLP-AA¹⁷-VYY (SEQ ID NO: 84875):EQLSN (SEQ ID NO: 84178):DMVRS (SEQ ID NO: 84159), VPQKT (SEQ ID NO: 84372):EPLP-AA¹⁷-VYY (SEQ ID NO: 84875):EQLSN (SEQ ID NO: 84178):MIVRS (SEQ ID NO: 84243), VPQDL (SEQ ID NO: 84365):EPLP-AA¹⁷-VYY (SEQ ID NO: 84875):EQLSN (SEQ ID NO: 84178):MIVRS (SEQ ID NO: 84243), VPQDL (SEQ ID NO: 84365):EPLP-AA¹⁷-VYY (SEQ ID NO: 84875):EQLSN (SEQ ID NO: 84178):MVVRS (SEQ ID NO: 84257), VPQEE (SEQ ID NO: 84366):EPLP-AA¹⁷-VYY (SEQ ID NO: 84875):EQLSN (SEQ ID NO: 84178):FLVRS (SEQ ID NO: 84189), VPQGQ (SEQ ID NO: 84368):EPLP-AA¹⁷-VYY (SEQ ID NO: 84875):EQLSN (SEQ ID NO: 84178):LEVRS (SEQ ID NO: 84223), VPQHH (SEQ ID NO: 84369):EPLP-AA¹⁷-VYY (SEQ ID NO: 84875):EQLSN (SEQ ID NO: 84178):RLVRS (SEQ ID NO: 84286), VPQQL (SEQ ID NO: 84373):EPLP-AA¹⁷-VYY (SEQ ID NO: 84875):EQLSN (SEQ ID NO: 84178):TLVRS (SEQ ID NO: 84315), VPTEL (SEQ ID NO: 84378):EPLP-AA¹⁷-VYY (SEQ ID NO: 84875):EQLSN (SEQ ID NO: 84178):DMVVE (SEQ ID NO: 84161), VPEKM (SEQ ID NO: 84360):EPLP-AA¹⁷-VYY (SEQ ID NO: 84875):EQLSN (SEQ ID NO: 84178):NMTVE (SEQ ID NO: 84267), VPTEL (SEQ ID NO: 84378):EPLP-AA¹⁷-VYY (SEQ ID NO: 84875):EQLSN (SEQ ID NO: 84178):EMVVE (SEQ ID NO: 84175), APTKL (SEQ ID NO: 84131):EPLP-AA¹⁷-VYY (SEQ ID NO: 84875):EQLSN (SEQ ID NO: 84178):NMVVR (SEQ ID NO: 84275), APTQL (SEQ ID NO: 84134):EPLP-AA¹⁷-VYY (SEQ ID NO: 84875):EQLSN (SEQ ID NO: 84178):NMVVR (SEQ ID NO: 84275), APTKL (SEQ ID NO: 84131):EPLP-AA¹⁷-VYY (SEQ ID NO: 84875):EQLSN (SEQ ID NO: 84178):NMVVK (SEQ ID NO: 84274), VPTKL (SEQ ID NO: 84381):EPLP-AA¹⁷-VYY (SEQ ID NO: 84875):EQLSN (SEQ ID NO: 84178):EGMSVAE (SEQ ID NO: 84411), VPTKL (SEQ ID NO: 84381):EPLP-AA¹⁷-VYY (SEQ ID NO: 84875):EQLSN (SEQ ID NO: 84178):GMAVS (SEQ ID NO: 84194), TPTKM (SEQ ID NO: 84327):EPLP-AA¹⁷-VYY (SEQ ID NO: 84875):EQLSN (SEQ ID NO: 84178):GMVVD (SEQ ID NO: 84204), VPARL (SEQ ID NO: 84352):EPLP-AA¹⁷-VYY (SEQ ID NO: 84875):EQLSN (SEQ ID NO: 84178):DMVVE (SEQ ID NO: 84161), VPTRL (SEQ ID NO: 84385):EPLP-AA¹⁷-VYY (SEQ ID NO: 84875):EQLSN (SEQ ID NO: 84178):DMVVE (SEQ ID NO: 84161), APVKT (SEQ ID NO: 84144):EPLP-AA¹⁷-VYY (SEQ ID NO: 84875):EQLSN (SEQ ID NO: 84178):MIVEE (SEQ ID NO: 84241), VSQDL (SEQ ID NO: 84387):EPLP-AA¹⁷-VYY (SEQ ID NO: 84875):EQLSN (SEQ ID NO: 84178):MIVKS (SEQ ID NO: 84242), VPQDL (SEQ ID NO: 84365):EPLP-AA¹⁷-VYY (SEQ ID NO: 84875):EQLSN (SEQ ID NO: 84178):MVVKS (SEQ ID NO: 84256), VPTEE (SEQ ID NO: 84377):EPLP-AA¹⁷-VYY (SEQ ID NO: 84875):EQLSN (SEQ ID NO: 84178):FLQHN (SEQ ID NO: 84184), VPTGQ (SEQ ID NO: 84379):EPLP-AA¹⁷-VYY (SEQ ID NO: 84875):EQLSN (SEQ ID NO: 84178):LEEHS (SEQ ID NO: 84217), SRVHH (SEQ ID NO: 84297):EPLP-AA¹⁷-VYY (SEQ ID NO: 84875):EQLSN (SEQ ID NO: 84178):RLEEH (SEQ ID NO: 84279), TQVQL (SEQ ID NO: 84340):EPLP-AA¹⁷-VYY (SEQ ID NO: 84875):EQLSN (SEQ ID NO: 84178):TLEDH (SEQ ID NO: 84307), VSQEL (SEQ ID NO: 84389):EPLT-AA¹⁷-LYY (SEQ ID NO: 84876):EQLSN (SEQ ID NO: 84178):DMVKS (SEQ ID NO: 84158), VSQKM (SEQ ID NO: 84393):EPLT-AA¹⁷-LYY (SEQ ID NO: 84876):EQLSN (SEQ ID NO: 84178):NMVKS (SEQ ID NO: 84270), VSQEL (SEQ ID NO: 84389):EPLT-AA¹⁷-LYY (SEQ ID NO: 84876):EQLSN (SEQ ID NO: 84178):EMVKS (SEQ ID NO: 84172), VSQKL (SEQ ID NO: 84392):EPLT-AA¹⁷-LYY (SEQ ID NO: 84876):EQLSN (SEQ ID NO: 84178):NMVKS (SEQ ID NO: 84270), VSQQL (SEQ ID NO: 84395):EPLT-AA¹⁷-LYY (SEQ ID NO: 84876):EQLSN (SEQ ID NO: 84178):NMVKS (SEQ ID NO: 84270), VSQKL (SEQ ID NO: 84392):EPLT-AA¹⁷-LYY (SEQ ID NO: 84876):EQLSN (SEQ ID NO: 84178):EGMSVKS (SEQ ID NO: 84413), VSQKL (SEQ ID NO: 84392):EPLT-AA¹⁷-LYY (SEQ ID NO: 84876):EQLSN (SEQ ID NO: 84178):GMVKS (SEQ ID NO: 84202), VSQKM (SEQ ID NO: 84393):EPLT-AA¹⁷-LYY (SEQ ID NO: 84876):EQLSN (SEQ ID NO: 84178):GMVKS (SEQ ID NO: 84202), VSQRL (SEQ ID NO: 84396):EPLT-AA¹⁷-LYY (SEQ ID NO: 84876):EQLSN (SEQ ID NO: 84178):DMVKS (SEQ ID NO: 84158), VSQKT (SEQ ID NO: 84394):EPLT-AA¹⁷-LYY (SEQ ID NO: 84876):EQLSN (SEQ ID NO: 84178):MIVKS (SEQ ID NO: 84242), VSQAL (SEQ ID NO: 84386):EPLT-AA¹⁷-LYY (SEQ ID NO: 84876):EQLSN (SEQ ID NO: 84178):MIVKS (SEQ ID NO: 84242), VSQDL (SEQ ID NO: 84387):EPLT-AA¹⁷-LYY (SEQ ID NO: 84876):EQLSN (SEQ ID NO: 84178):MVVKS (SEQ ID NO: 84256), VSQEE (SEQ ID NO: 84388):EPLT-AA¹⁷-LYY (SEQ ID NO: 84876):EQLSN (SEQ ID NO: 84178):FLVKS (SEQ ID NO: 84188), VSQGQ (SEQ ID NO: 84390):EPLT-AA¹⁷-LYY (SEQ ID NO: 84876):EQLSN (SEQ ID NO: 84178):LEVKS (SEQ ID NO: 84222), VSQHH (SEQ ID NO: 84391):EPLT-AA¹⁷-LYY (SEQ ID NO: 84876):EQLSN (SEQ ID NO: 84178):RLVKS (SEQ ID NO: 84285), VSQQL (SEQ ID NO: 84395):EPLT-AA¹⁷-LYY (SEQ ID NO: 84876):EQLSN (SEQ ID NO: 84178):TLVKS (SEQ ID NO: 84314), VPTEL (SEQ ID NO: 84378):EPLT-AA¹⁷-LYY (SEQ ID NO: 84876):EQLSN (SEQ ID NO: 84178):DMVVE (SEQ ID NO: 84161), VPEKM (SEQ ID NO: 84360):EPLT-AA¹⁷-LYY (SEQ ID NO: 84876):EQLSN (SEQ ID NO: 84178):NMTVE (SEQ ID NO: 84267), VPTEL (SEQ ID NO: 84378):EPLT-AA¹⁷-LYY (SEQ ID NO: 84876):EQLSN (SEQ ID NO: 84178):EMVVE (SEQ ID NO: 84175), APTKL (SEQ ID NO: 84131):EPLT-AA¹⁷-LYY (SEQ ID NO: 84876):EQLSN (SEQ ID NO: 84178):NMVVR (SEQ ID NO: 84275), APTQL (SEQ ID NO: 84134):EPLT-AA¹⁷-LYY (SEQ ID NO: 84876):EQLSN (SEQ ID NO: 84178):NMVVR (SEQ ID NO: 84275), APTKL (SEQ ID NO: 84131):EPLT-AA¹⁷-LYY (SEQ ID NO: 84876):EQLSN (SEQ ID NO: 84178):NMVVK (SEQ ID NO: 84274), VPTKL (SEQ ID NO: 84381):EPLT-AA¹⁷-LYY (SEQ ID NO: 84876):EQLSN (SEQ ID NO: 84178):EGMSVAE (SEQ ID NO: 84411), VPTKL (SEQ ID NO: 84381):EPLT-AA¹⁷-LYY (SEQ ID NO: 84876):EQLSN (SEQ ID NO: 84178):GMAVS (SEQ ID NO: 84194), TPTKM (SEQ ID NO: 84327):EPLT-AA¹⁷-LYY (SEQ ID NO: 84876):EQLSN (SEQ ID NO: 84178):GMVVD (SEQ ID NO: 84204), VPARL (SEQ ID NO: 84352):EPLT-AA¹⁷-LYY (SEQ ID NO: 84876):EQLSN (SEQ ID NO: 84178):DMVVE (SEQ ID NO: 84161), VPTRL (SEQ ID NO: 84385):EPLT-AA¹⁷-LYY (SEQ ID NO: 84876):EQLSN (SEQ ID NO: 84178):DMVVE (SEQ ID NO: 84161), APVKT (SEQ ID NO: 84144):EPLT-AA¹⁷-LYY (SEQ ID NO: 84876):EQLSN (SEQ ID NO: 84178):MIVEE (SEQ ID NO: 84241), VPQAL (SEQ ID NO: 84364):EPLT-AA¹⁷-LYY (SEQ ID NO: 84876):EQLSN (SEQ ID NO: 84178):MIVRS (SEQ ID NO: 84243), VPQDL (SEQ ID NO: 84365):EPLT-AA¹⁷-LYY (SEQ ID NO: 84876):EQLSN (SEQ ID NO: 84178):MVVKS (SEQ ID NO: 84256), VPTEE (SEQ ID NO: 84377):EPLT-AA¹⁷-LYY (SEQ ID NO: 84876):EQLSN (SEQ ID NO: 84178):FLQHN (SEQ ID NO: 84184), VPTGQ (SEQ ID NO: 84379):EPLT-AA¹⁷-LYY (SEQ ID NO: 84876):EQLSN (SEQ ID NO: 84178):LEEHS (SEQ ID NO: 84217), SRVHH (SEQ ID NO: 84297):EPLT-AA¹⁷-LYY (SEQ ID NO: 84876):EQLSN (SEQ ID NO: 84178):RLEEH (SEQ ID NO: 84279), TQVQL (SEQ ID NO: 84340):EPLT-AA¹⁷-LYY (SEQ ID NO: 84876):EQLSN (SEQ ID NO: 84178):TLEDH (SEQ ID NO: 84307), VPQEL (SEQ ID NO: 84367):EPLT-AA¹⁷-LYY (SEQ ID NO: 84876):EQLSN (SEQ ID NO: 84178):DMVKS (SEQ ID NO: 84158), VPQKM (SEQ ID NO: 84371):EPLT-AA¹⁷-LYY (SEQ ID NO: 84876):EQLSN (SEQ ID NO: 84178):NMVKS (SEQ ID NO: 84270), VPQEL (SEQ ID NO: 84367):EPLT-AA¹⁷-LYY (SEQ ID NO: 84876):EQLSN (SEQ ID NO: 84178):EMVKS (SEQ ID NO: 84172), VPQKL (SEQ ID NO: 84370):EPLT-AA¹⁷-LYY (SEQ ID NO: 84876):EQLSN (SEQ ID NO: 84178):NMVKS (SEQ ID NO: 84270), VPQQL (SEQ ID NO: 84373):EPLT-AA¹⁷-LYY (SEQ ID NO: 84876):EQLSN (SEQ ID NO: 84178):NMVKS (SEQ ID NO: 84270), VPQKL (SEQ ID NO: 84370):EPLT-AA¹⁷-LYY (SEQ ID NO: 84876):EQLSN (SEQ ID NO: 84178):EGMSVKS (SEQ ID NO: 84413), VPQKL (SEQ ID NO: 84370):EPLT-AA¹⁷-LYY (SEQ ID NO: 84876):EQLSN (SEQ ID NO: 84178):GMVKS (SEQ ID NO: 84202), VPQKM (SEQ ID NO: 84371):EPLT-AA¹⁷-LYY (SEQ ID NO: 84876):EQLSN (SEQ ID NO: 84178):GMVKS (SEQ ID NO: 84202), VPQRL (SEQ ID NO: 84374):EPLT-AA¹⁷-LYY (SEQ ID NO: 84876):EQLSN (SEQ ID NO: 84178):DMVKS (SEQ ID NO: 84158), VPQKT (SEQ ID NO: 84372):EPLT-AA¹⁷-LYY (SEQ ID NO: 84876):EQLSN (SEQ ID NO: 84178):MIVKS (SEQ ID NO: 84242), VPQAL (SEQ ID NO: 84364):EPLT-AA¹⁷-LYY (SEQ ID NO: 84876):EQLSN (SEQ ID NO: 84178):MIVKS (SEQ ID NO: 84242), VPQDL (SEQ ID NO: 84365):EPLT-AA¹⁷-LYY (SEQ ID NO: 84876):EQLSN (SEQ ID NO: 84178):MIVKS (SEQ ID NO: 84242), VPQEE (SEQ ID NO: 84366):EPLT-AA¹⁷-LYY (SEQ ID NO: 84876):EQLSN (SEQ ID NO: 84178):FLVKS (SEQ ID NO: 84188), VPQGQ (SEQ ID NO: 84368):EPLT-AA¹⁷-LYY (SEQ ID NO: 84876):EQLSN (SEQ ID NO: 84178):LEVKS (SEQ ID NO: 84222), VPQHH (SEQ ID NO: 84369):EPLT-AA¹⁷-LYY (SEQ ID NO: 84876):EQLSN (SEQ ID NO: 84178):RLVKS (SEQ ID NO: 84285), VPQQL (SEQ ID NO: 84373):EPLT-AA¹⁷-LYY (SEQ ID NO: 84876):EQLSN (SEQ ID NO: 84178):TLVKS (SEQ ID NO: 84314), VSQDL (SEQ ID NO: 84387):EPLT-AA¹⁷-LYY (SEQ ID NO: 84876):EQLSN (SEQ ID NO: 84178):MIVKS (SEQ ID NO: 84242), VPTEL (SEQ ID NO: 84378):SNIT-AA¹⁷-QIM (SEQ ID NO: 84883):IGEMS (SEQ ID NO: 84209):DMQHN (SEQ ID NO: 84154), VPTKM (SEQ ID NO: 84382):SNIT-AA¹⁷-QIM (SEQ ID NO: 84883):IGEMS (SEQ ID NO: 84209):NMQHN (SEQ ID NO: 84266), VPTEL (SEQ ID NO: 84378):SNIT-AA¹⁷-QIM (SEQ ID NO: 84883):IGEMS (SEQ ID NO: 84209):EMQHN (SEQ ID NO: 84168), VPTKL (SEQ ID NO: 84381):SNIT-AA¹⁷-QIM (SEQ ID NO: 84883):IGEMS (SEQ ID NO: 84209):NMQHN (SEQ ID NO: 84266), VPTQL (SEQ ID NO: 84384):SNIT-AA¹⁷-QIM (SEQ ID NO: 84883):IGEMS (SEQ ID NO: 84209):NMQHN (SEQ ID NO: 84266), VPTKL (SEQ ID NO: 84381):SNIT-AA¹⁷-QIM (SEQ ID NO: 84883):IGEMS (SEQ ID NO: 84209):EGMSQHN (SEQ ID NO: 84409), VPTKL (SEQ ID NO: 84381):SNIT-AA¹⁷-QIM (SEQ ID NO: 84883):IGEMS (SEQ ID NO: 84209):GMQHN (SEQ ID NO: 84198), VPTKM (SEQ ID NO: 84382):SNIT-AA¹⁷-QIM (SEQ ID NO: 84883):IGEMS (SEQ ID NO: 84209):GMQHN (SEQ ID NO: 84198), VPTRL (SEQ ID NO: 84385):SNIT-AA¹⁷-QIM (SEQ ID NO: 84883):IGEMS (SEQ ID NO: 84209):DMQHN (SEQ ID NO: 84154), VPTKT (SEQ ID NO: 84383):SNIT-AA¹⁷-QIM (SEQ ID NO: 84883):IGEMS (SEQ ID NO: 84209):MIQHN (SEQ ID NO: 84238), VPTAL (SEQ ID NO: 84375):SNIT-AA¹⁷-QIM (SEQ ID NO: 84883):IGEMS (SEQ ID NO: 84209):MIQHN (SEQ ID NO: 84238), VPTDL (SEQ ID NO: 84376):SNIT-AA¹⁷-QIM (SEQ ID NO: 84883):IGEMS (SEQ ID NO: 84209):MIQHN (SEQ ID NO: 84238), VPTDL (SEQ ID NO: 84376):SNIT-AA¹⁷-QIM (SEQ ID NO: 84883):IGEMS (SEQ ID NO: 84209):MVQHN (SEQ ID NO: 84252), VPTGQ (SEQ ID NO: 84379):SNIT-AA¹⁷-QIM (SEQ ID NO: 84883):IGEMS (SEQ ID NO: 84209):LEQHN (SEQ ID NO: 84218), VPTEE (SEQ ID NO: 84377):SNIT-AA¹⁷-QIM (SEQ ID NO: 84883):IGEMS (SEQ ID NO: 84209):FLQHN (SEQ ID NO: 84184), VPTHH (SEQ ID NO: 84380):SNIT-AA¹⁷-QIM (SEQ ID NO: 84883):IGEMS (SEQ ID NO: 84209):RLQHN (SEQ ID NO: 84281), VPTQL (SEQ ID NO: 84384):SNIT-AA¹⁷-QIM (SEQ ID NO: 84883):IGEMS (SEQ ID NO: 84209):TLQHN (SEQ ID NO: 84310), VPTEL (SEQ ID NO: 84378):SNIT-AA¹⁷-QIM (SEQ ID NO: 84883):IGEMS (SEQ ID NO: 84209):DMVVE (SEQ ID NO: 84161), VPEKM (SEQ ID NO: 84360):SNIT-AA¹⁷-QIM (SEQ ID NO: 84883):IGEMS (SEQ ID NO: 84209):NMTVE (SEQ ID NO: 84267), VPTEL (SEQ ID NO: 84378):SNIT-AA¹⁷-QIM (SEQ ID NO: 84883):IGEMS (SEQ ID NO: 84209):EMVVE (SEQ ID NO: 84175), APTKL (SEQ ID NO: 84131):SNIT-AA¹⁷-QIM (SEQ ID NO: 84883):IGEMS (SEQ ID NO: 84209):NMVVR (SEQ ID NO: 84275), APTQL (SEQ ID NO: 84134):SNIT-AA¹⁷-QIM (SEQ ID NO: 84883):IGEMS (SEQ ID NO: 84209):NMVVR (SEQ ID NO: 84275), APTKL (SEQ ID NO: 84131):SNIT-AA¹⁷-QIM (SEQ ID NO: 84883):IGEMS (SEQ ID NO: 84209):NMVVK (SEQ ID NO: 84274), VPTKL (SEQ ID NO: 84381):SNIT-AA¹⁷-QIM (SEQ ID NO: 84883):IGEMS (SEQ ID NO: 84209):EGMSVAE (SEQ ID NO: 84411), VPTKL (SEQ ID NO: 84381):SNIT-AA¹⁷-QIM (SEQ ID NO: 84883):IGEMS (SEQ ID NO: 84209):GMAVS (SEQ ID NO: 84194), TPTKM (SEQ ID NO: 84327):SNIT-AA¹⁷-QIM (SEQ ID NO: 84883):IGEMS (SEQ ID NO: 84209):GMVVD (SEQ ID NO: 84204), VPARL (SEQ ID NO: 84352):SNIT-AA¹⁷-QIM (SEQ ID NO: 84883):IGEMS (SEQ ID NO: 84209):DMVVE (SEQ ID NO: 84161), VPTRL (SEQ ID NO: 84385):SNIT-AA¹⁷-QIM (SEQ ID NO: 84883):IGEMS (SEQ ID NO: 84209):DMVVE (SEQ ID NO: 84161), APVKT (SEQ ID NO: 84144):SNIT-AA¹⁷-QIM (SEQ ID NO: 84883):IGEMS (SEQ ID NO: 84209):MIVEE (SEQ ID NO: 84241), VPQAL (SEQ ID NO: 84364):SNIT-AA¹⁷-QIM (SEQ ID NO: 84883):IGEMS (SEQ ID NO: 84209):MIVRS (SEQ ID NO: 84243), VSQDL (SEQ ID NO: 84387):SNIT-AA¹⁷-QIM (SEQ ID NO: 84883):IGEMS (SEQ ID NO: 84209):MIVKS (SEQ ID NO: 84242), VPQDL (SEQ ID NO: 84365):SNIT-AA¹⁷-QIM (SEQ ID NO: 84883):IGEMS (SEQ ID NO: 84209):MVVKS (SEQ ID NO: 84256), VPTGQ (SEQ ID NO: 84379):SNIT-AA¹⁷-QIM (SEQ ID NO: 84883):IGEMS (SEQ ID NO: 84209):LEEHS (SEQ ID NO: 84217), SRVHH (SEQ ID NO: 84297):SNIT-AA¹⁷-QIM (SEQ ID NO: 84883):IGEMS (SEQ ID NO: 84209):RLEEH (SEQ ID NO: 84279), TQVQL (SEQ ID NO: 84340):SNIT-AA¹⁷-QIM (SEQ ID NO: 84883):IGEMS (SEQ ID NO: 84209):TLEDH (SEQ ID NO: 84307), VPTEL (SEQ ID NO: 84378):SNIT-AA¹⁷-QIM (SEQ ID NO: 84883):LGEMS (SEQ ID NO: 84228):DMEHS (SEQ ID NO: 84153), VPTKM (SEQ ID NO: 84382):SNIT-AA¹⁷-QIM (SEQ ID NO: 84883):LGEMS (SEQ ID NO: 84228):NMEHS (SEQ ID NO: 84265), VPTEL (SEQ ID NO: 84378):SNIT-AA¹⁷-QIM (SEQ ID NO: 84883):LGEMS (SEQ ID NO: 84228):EMEHS (SEQ ID NO: 84167), VPTKL (SEQ ID NO: 84381):SNIT-AA¹⁷-QIM (SEQ ID NO: 84883):LGEMS (SEQ ID NO: 84228):NMEHS (SEQ ID NO: 84265), VPTQL (SEQ ID NO: 84384):SNIT-AA¹⁷-QIM (SEQ ID NO: 84883):LGEMS (SEQ ID NO: 84228):NMEHS (SEQ ID NO: 84265), VPTKL (SEQ ID NO: 84381):SNIT-AA¹⁷-QIM (SEQ ID NO: 84883):LGEMS (SEQ ID NO: 84228):EGMSEHS (SEQ ID NO: 84408), VPTKL (SEQ ID NO: 84381):SNIT-AA¹⁷-QIM (SEQ ID NO: 84883):LGEMS (SEQ ID NO: 84228):GMEHS (SEQ ID NO: 84197), VPTKM (SEQ ID NO: 84382):SNIT-AA¹⁷-QIM (SEQ ID NO: 84883):LGEMS (SEQ ID NO: 84228):GMEHS (SEQ ID NO: 84197), VPTRL (SEQ ID NO: 84385):SNIT-AA¹⁷-QIM (SEQ ID NO: 84883):LGEMS (SEQ ID NO: 84228):DMEHS (SEQ ID NO: 84153), VPTKT (SEQ ID NO: 84383):SNIT-AA¹⁷-QIM (SEQ ID NO: 84883):LGEMS (SEQ ID NO: 84228):MIEHS (SEQ ID NO: 84237), VPTAL (SEQ ID NO: 84375):SNIT-AA¹⁷-QIM (SEQ ID NO: 84883):LGEMS (SEQ ID NO: 84228):MIEHS (SEQ ID NO: 84237), VPTDL (SEQ ID NO: 84376):SNIT-AA¹⁷-QIM (SEQ ID NO: 84883):LGEMS (SEQ ID NO: 84228):MIEHS (SEQ ID NO: 84237), VPTDL (SEQ ID NO: 84376):SNIT-AA¹⁷-QIM (SEQ ID NO: 84883):LGEMS (SEQ ID NO: 84228):MVEHS (SEQ ID NO: 84251), VPTEE (SEQ ID NO: 84377):SNIT-AA¹⁷-QIM (SEQ ID NO: 84883):LGEMS (SEQ ID NO: 84228):FLEHS (SEQ ID NO: 84183), VPTHH (SEQ ID NO: 84380):SNIT-AA¹⁷-QIM (SEQ ID NO: 84883):LGEMS (SEQ ID NO: 84228):RLEHS (SEQ ID NO: 84280), VPTQL (SEQ ID NO: 84384):SNIT-AA¹⁷-QIM (SEQ ID NO: 84883):LGEMS (SEQ ID NO: 84228):TLEHS (SEQ ID NO: 84309), VPTEL (SEQ ID NO: 84378):SNIT-AA¹⁷-QIM (SEQ ID NO: 84883):LGEMS (SEQ ID NO: 84228):DMVVE (SEQ ID NO: 84161), VPEKM (SEQ ID NO: 84360):SNIT-AA¹⁷-QIM (SEQ ID NO: 84883):LGEMS (SEQ ID NO: 84228):NMTVE (SEQ ID NO: 84267), VPTEL (SEQ ID NO: 84378):SNIT-AA¹⁷-QIM (SEQ ID NO: 84883):LGEMS (SEQ ID NO: 84228):EMVVE (SEQ ID NO: 84175), APTKL (SEQ ID NO: 84131):SNIT-AA¹⁷-QIM (SEQ ID NO: 84883):LGEMS (SEQ ID NO: 84228):NMVVR (SEQ ID NO: 84275), APTQL (SEQ ID NO: 84134):SNIT-AA¹⁷-QIM (SEQ ID NO: 84883):LGEMS (SEQ ID NO: 84228):NMVVR (SEQ ID NO: 84275), APTKL (SEQ ID NO: 84131):SNIT-AA¹⁷-QIM (SEQ ID NO: 84883):LGEMS (SEQ ID NO: 84228):NMVVK (SEQ ID NO: 84274), VPTKL (SEQ ID NO: 84381):SNIT-AA¹⁷-QIM (SEQ ID NO: 84883):LGEMS (SEQ ID NO: 84228):EGMSVAE (SEQ ID NO: 84411), VPTKL (SEQ ID NO: 84381):SNIT-AA¹⁷-QIM (SEQ ID NO: 84883):LGEMS (SEQ ID NO: 84228):GMAVS (SEQ ID NO: 84194), TPTKM (SEQ ID NO: 84327):SNIT-AA¹⁷-QIM (SEQ ID NO: 84883):LGEMS (SEQ ID NO: 84228):GMVVD (SEQ ID NO: 84204), VPARL (SEQ ID NO: 84352):SNIT-AA¹⁷-QIM (SEQ ID NO: 84883):LGEMS (SEQ ID NO: 84228):DMVVE (SEQ ID NO: 84161), VPTRL (SEQ ID NO: 84385):SNIT-AA¹⁷-QIM (SEQ ID NO: 84883):LGEMS (SEQ ID NO: 84228):DMVVE (SEQ ID NO: 84161), APVKT (SEQ ID NO: 84144):SNIT-AA¹⁷-QIM (SEQ ID NO: 84883):LGEMS (SEQ ID NO: 84228):MIVEE (SEQ ID NO: 84241), VPQAL (SEQ ID NO: 84364):SNIT-AA¹⁷-QIM (SEQ ID NO: 84883):LGEMS (SEQ ID NO: 84228):MIVRS (SEQ ID NO: 84243), VSQDL (SEQ ID NO: 84387):SNIT-AA¹⁷-QIM (SEQ ID NO: 84883):LGEMS (SEQ ID NO: 84228):MIVKS (SEQ ID NO: 84242), VPQDL (SEQ ID NO: 84365):SNIT-AA¹⁷-QIM (SEQ ID NO: 84883):LGEMS (SEQ ID NO: 84228):MVVKS (SEQ ID NO: 84256), VPTEE (SEQ ID NO: 84377):SNIT-AA¹⁷-QIM (SEQ ID NO: 84883):LGEMS (SEQ ID NO: 84228):FLQHN (SEQ ID NO: 84184), SRVHH (SEQ ID NO: 84297):SNIT-AA¹⁷-QIM (SEQ ID NO: 84883):LGEMS (SEQ ID NO: 84228):RLEEH (SEQ ID NO: 84279), TQVQL (SEQ ID NO: 84340):SNIT-AA¹⁷-QIM (SEQ ID NO: 84883):LGEMS (SEQ ID NO: 84228):TLEDH (SEQ ID NO: 84307), SRVEL (SEQ ID NO: 84295):RSVK-AA¹⁷-AKV (SEQ ID NO: 84880):KEVQV (SEQ ID NO: 84210):DMEEH (SEQ ID NO: 84152), SRVKM (SEQ ID NO: 84299):RSVK-AA¹⁷-AKV (SEQ ID NO: 84880):KEVQV (SEQ ID NO: 84210):NMEEH (SEQ ID NO: 84264), SRVEL (SEQ ID NO: 84295):RSVK-AA¹⁷-AKV (SEQ ID NO: 84880):KEVQV (SEQ ID NO: 84210):EMEEH (SEQ ID NO: 84166), SRVKL (SEQ ID NO: 84298):RSVK-AA¹⁷-AKV (SEQ ID NO: 84880):KEVQV (SEQ ID NO: 84210):NMEEH (SEQ ID NO: 84264), SRVQL (SEQ ID NO: 84301):RSVK-AA¹⁷-AKV (SEQ ID NO: 84880):KEVQV (SEQ ID NO: 84210):NMEEH (SEQ ID NO: 84264), SRVKL (SEQ ID NO: 84298):RSVK-AA¹⁷-AKV (SEQ ID NO: 84880):KEVQV (SEQ ID NO: 84210):EGMSEEH (SEQ ID NO: 84407), SRVKL (SEQ ID NO: 84298):RSVK-AA¹⁷-AKV (SEQ ID NO: 84880):KEVQV (SEQ ID NO: 84210):GMEEH (SEQ ID NO: 84196), SRVKM (SEQ ID NO: 84299):RSVK-AA¹⁷-AKV (SEQ ID NO: 84880):KEVQV (SEQ ID NO: 84210):GMEEH (SEQ ID NO: 84196), SRVRL (SEQ ID NO: 84302):RSVK-AA¹⁷-AKV (SEQ ID NO: 84880):KEVQV (SEQ ID NO: 84210):DMEEH (SEQ ID NO: 84152), SRVKT (SEQ ID NO: 84300):RSVK-AA¹⁷-AKV (SEQ ID NO: 84880):KEVQV (SEQ ID NO: 84210):MIEEH (SEQ ID NO: 84236), SRVAL (SEQ ID NO: 84292):RSVK-AA¹⁷-AKV (SEQ ID NO: 84880):KEVQV (SEQ ID NO: 84210):MIEEH (SEQ ID NO: 84236), SRVDL (SEQ ID NO: 84293):RSVK-AA¹⁷-AKV (SEQ ID NO: 84880):KEVQV (SEQ ID NO: 84210):MIEEH (SEQ ID NO: 84236), SRVDL (SEQ ID NO: 84293):RSVK-AA¹⁷-AKV (SEQ ID NO: 84880):KEVQV (SEQ ID NO: 84210):MVEEH (SEQ ID NO: 84250), SRVEE (SEQ ID NO: 84294):RSVK-AA¹⁷-AKV (SEQ ID NO: 84880):KEVQV (SEQ ID NO: 84210):FLEEH (SEQ ID NO: 84182), SRVGQ (SEQ ID NO: 84296):RSVK-AA¹⁷-AKV (SEQ ID NO: 84880):KEVQV (SEQ ID NO: 84210):LEEEH (SEQ ID NO: 84216), SRVQL (SEQ ID NO: 84301):RSVK-AA¹⁷-AKV (SEQ ID NO: 84880):KEVQV (SEQ ID NO: 84210):TLEEH (SEQ ID NO: 84308), VPTEL (SEQ ID NO: 84378):RSVK-AA¹⁷-AKV (SEQ ID NO: 84880):KEVQV (SEQ ID NO: 84210):DMVVE (SEQ ID NO: 84161), VPEKM (SEQ ID NO: 84360):RSVK-AA¹⁷-AKV (SEQ ID NO: 84880):KEVQV (SEQ ID NO: 84210):NMTVE (SEQ ID NO: 84267), VPTEL (SEQ ID NO: 84378):RSVK-AA¹⁷-AKV (SEQ ID NO: 84880):KEVQV (SEQ ID NO: 84210):EMVVE (SEQ ID NO: 84175), APTKL (SEQ ID NO: 84131):RSVK-AA¹⁷-AKV (SEQ ID NO: 84880):KEVQV (SEQ ID NO: 84210):NMVVR (SEQ ID NO: 84275), APTQL (SEQ ID NO: 84134):RSVK-AA¹⁷-AKV (SEQ ID NO: 84880):KEVQV (SEQ ID NO: 84210):NMVVR (SEQ ID NO: 84275), APTKL (SEQ ID NO: 84131):RSVK-AA¹⁷-AKV (SEQ ID NO: 84880):KEVQV (SEQ ID NO: 84210):NMVVK (SEQ ID NO: 84274), VPTKL (SEQ ID NO: 84381):RSVK-AA¹⁷-AKV (SEQ ID NO: 84880):KEVQV (SEQ ID NO: 84210):EGMSVAE (SEQ ID NO: 84411), VPTKL (SEQ ID NO: 84381):RSVK-AA¹⁷-AKV (SEQ ID NO: 84880):KEVQV (SEQ ID NO: 84210):GMAVS (SEQ ID NO: 84194), TPTKM (SEQ ID NO: 84327):RSVK-AA¹⁷-AKV (SEQ ID NO: 84880):KEVQV (SEQ ID NO: 84210):GMVVD (SEQ ID NO: 84204), VPARL (SEQ ID NO: 84352):RSVK-AA¹⁷-AKV (SEQ ID NO: 84880):KEVQV (SEQ ID NO: 84210):DMVVE (SEQ ID NO: 84161), VPTRL (SEQ ID NO: 84385):RSVK-AA¹⁷-AKV (SEQ ID NO: 84880):KEVQV (SEQ ID NO: 84210):DMVVE (SEQ ID NO: 84161), APVKT (SEQ ID NO: 84144):RSVK-AA¹⁷-AKV (SEQ ID NO: 84880):KEVQV (SEQ ID NO: 84210):MIVEE (SEQ ID NO: 84241), VPQAL (SEQ ID NO: 84364):RSVK-AA¹⁷-AKV (SEQ ID NO: 84880):KEVQV (SEQ ID NO: 84210):MIVRS (SEQ ID NO: 84243), VSQDL (SEQ ID NO: 84387):RSVK-AA¹⁷-AKV (SEQ ID NO: 84880):KEVQV (SEQ ID NO: 84210):MIVKS (SEQ ID NO: 84242), VPQDL (SEQ ID NO: 84365):RSVK-AA¹⁷-AKV (SEQ ID NO: 84880):KEVQV (SEQ ID NO: 84210):MVVKS (SEQ ID NO: 84256), VPTEE (SEQ ID NO: 84377):RSVK-AA¹⁷-AKV (SEQ ID NO: 84880):KEVQV (SEQ ID NO: 84210):FLQHN (SEQ ID NO: 84184), VPTGQ (SEQ ID NO: 84379):RSVK-AA¹⁷-AKV (SEQ ID NO: 84880):KEVQV (SEQ ID NO: 84210):LEEHS (SEQ ID NO: 84217), TQVQL (SEQ ID NO: 84340):RSVK-AA¹⁷-AKV (SEQ ID NO: 84880):KEVQV (SEQ ID NO: 84210):TLEDH (SEQ ID NO: 84307), TQVEL (SEQ ID NO: 84334):RPVQ-AA¹⁷-RKI (SEQ ID NO: 84879):KKATV (SEQ ID NO: 84212):DMEDH (SEQ ID NO: 84151), TQVKM (SEQ ID NO: 84338):RPVQ-AA¹⁷-RKI (SEQ ID NO: 84879):KKATV (SEQ ID NO: 84212):NMEDH (SEQ ID NO: 84263), TQVEL (SEQ ID NO: 84334):RPVQ-AA¹⁷-RKI (SEQ ID NO: 84879):KKATV (SEQ ID NO: 84212):EMEDH (SEQ ID NO: 84165), TQVKL (SEQ ID NO: 84337):RPVQ-AA¹⁷-RKI (SEQ ID NO: 84879):KKATV (SEQ ID NO: 84212):NMEDH (SEQ ID NO: 84263), TQVQL (SEQ ID NO: 84340):RPVQ-AA¹⁷-RKI (SEQ ID NO: 84879):KKATV (SEQ ID NO: 84212):NMEDH (SEQ ID NO: 84263), TQVKL (SEQ ID NO: 84337):RPVQ-AA¹⁷-RKI (SEQ ID NO: 84879):KKATV (SEQ ID NO: 84212):EGMSEDH (SEQ ID NO: 84406), TQVKL (SEQ ID NO: 84337):RPVQ-AA¹⁷-RKI (SEQ ID NO: 84879):KKATV (SEQ ID NO: 84212):GMEDH (SEQ ID NO: 84195), TQVKM (SEQ ID NO: 84338):RPVQ-AA¹⁷-RKI (SEQ ID NO: 84879):KKATV (SEQ ID NO: 84212):GMEDH (SEQ ID NO: 84195), TQVRL (SEQ ID NO: 84341):RPVQ-AA¹⁷-RKI (SEQ ID NO: 84879):KKATV (SEQ ID NO: 84212):DMEDH (SEQ ID NO: 84151), TQVKT (SEQ ID NO: 84339):RPVQ-AA¹⁷-RKI (SEQ ID NO: 84879):KKATV (SEQ ID NO: 84212):MIEDH (SEQ ID NO: 84235), TQVAL (SEQ ID NO: 84331):RPVQ-AA¹⁷-RKI (SEQ ID NO: 84879):KKATV (SEQ ID NO: 84212):MIEDH (SEQ ID NO: 84235), TQVDL (SEQ ID NO: 84332):RPVQ-AA¹⁷-RKI (SEQ ID NO: 84879):KKATV (SEQ ID NO: 84212):MIEDH (SEQ ID NO: 84235), TQVDL (SEQ ID NO: 84332):RPVQ-AA¹⁷-RKI (SEQ ID NO: 84879):KKATV (SEQ ID NO: 84212):MVEDH (SEQ ID NO: 84249), TQVEE (SEQ ID NO: 84333):RPVQ-AA¹⁷-RKI (SEQ ID NO: 84879):KKATV (SEQ ID NO: 84212):FLEDH (SEQ ID NO: 84181), TQVGQ (SEQ ID NO: 84335):RPVQ-AA¹⁷-RKI (SEQ ID NO: 84879):KKATV (SEQ ID NO: 84212):LEEDH (SEQ ID NO: 84215), TQVHH (SEQ ID NO: 84336):RPVQ-AA¹⁷-RKI (SEQ ID NO: 84879):KKATV (SEQ ID NO: 84212):RLEDH (SEQ ID NO: 84278), VPTEL (SEQ ID NO: 84378):RPVQ-AA¹⁷-RKI (SEQ ID NO: 84879):KKATV (SEQ ID NO: 84212):DMVVE (SEQ ID NO: 84161), VPEKM (SEQ ID NO: 84360):RPVQ-AA¹⁷-RKI (SEQ ID NO: 84879):KKATV (SEQ ID NO: 84212):NMTVE (SEQ ID NO: 84267), VPTEL (SEQ ID NO: 84378):RPVQ-AA¹⁷-RKI (SEQ ID NO: 84879):KKATV (SEQ ID NO: 84212):EMVVE (SEQ ID NO: 84175), APTKL (SEQ ID NO: 84131):RPVQ-AA¹⁷-RKI (SEQ ID NO: 84879):KKATV (SEQ ID NO: 84212):NMVVR (SEQ ID NO: 84275), APTQL (SEQ ID NO: 84134):RPVQ-AA¹⁷-RKI (SEQ ID NO: 84879):KKATV (SEQ ID NO: 84212):NMVVR (SEQ ID NO: 84275), APTKL (SEQ ID NO: 84131):RPVQ-AA¹⁷-RKI (SEQ ID NO: 84879):KKATV (SEQ ID NO: 84212):NMVVK (SEQ ID NO: 84274), VPTKL (SEQ ID NO: 84381):RPVQ-AA¹⁷-RKI (SEQ ID NO: 84879):KKATV (SEQ ID NO: 84212):EGMSVAE (SEQ ID NO: 84411), VPTKL (SEQ ID NO: 84381):RPVQ-AA¹⁷-RKI (SEQ ID NO: 84879):KKATV (SEQ ID NO: 84212):GMAVS (SEQ ID NO: 84194), TPTKM (SEQ ID NO: 84327):RPVQ-AA¹⁷-RKI (SEQ ID NO: 84879):KKATV (SEQ ID NO: 84212):GMVVD (SEQ ID NO: 84204), VPARL (SEQ ID NO: 84352):RPVQ-AA¹⁷-RKI (SEQ ID NO: 84879):KKATV (SEQ ID NO: 84212):DMVVE (SEQ ID NO: 84161), VPTRL (SEQ ID NO: 84385):RPVQ-AA¹⁷-RKI (SEQ ID NO: 84879):KKATV (SEQ ID NO: 84212):DMVVE (SEQ ID NO: 84161), APVKT (SEQ ID NO: 84144):RPVQ-AA¹⁷-RKI (SEQ ID NO: 84879):KKATV (SEQ ID NO: 84212):MIVEE (SEQ ID NO: 84241), VPQAL (SEQ ID NO: 84364):RPVQ-AA¹⁷-RKI (SEQ ID NO: 84879):KKATV (SEQ ID NO: 84212):MIVRS (SEQ ID NO: 84243), VSQDL (SEQ ID NO: 84387):RPVQ-AA¹⁷-RKI (SEQ ID NO: 84879):KKATV (SEQ ID NO: 84212):MIVKS (SEQ ID NO: 84242), VPQDL (SEQ ID NO: 84365):RPVQ-AA¹⁷-RKI (SEQ ID NO: 84879):KKATV (SEQ ID NO: 84212):MVVKS (SEQ ID NO: 84256), VPTEE (SEQ ID NO: 84377):RPVQ-AA¹⁷-RKI (SEQ ID NO: 84879):KKATV (SEQ ID NO: 84212):FLQHN (SEQ ID NO: 84184), VPTGQ (SEQ ID NO: 84379):RPVQ-AA¹⁷-RKI (SEQ ID NO: 84879):KKATV (SEQ ID NO: 84212):LEEHS (SEQ ID NO: 84217) and SRVHH (SEQ ID NO: 84297):RPVQ-AA¹⁷-RKI (SEQ ID NO: 84879):KKATV (SEQ ID NO: 84212):RLEEH (SEQ ID NO: 84279); and wherein AA¹⁷ is selected from the group consisting of G, A, V, L, I, P, F, M, W, T and S (in particular is selected from the group consisting of M, I, L, V and T). More particularly, the quadruplet PEP5:PEP12:PEP2:PEP6 is selected from the group consisting of VPTKM (SEQ ID NO: 84382):SAIS-AA¹⁷-LYL (SEQ ID NO: 84881):LKNYQ (SEQ ID NO: 84230):NMVVE (SEQ ID NO: 84273), VPTKL (SEQ ID NO: 84381):SAIS-AA¹⁷-LYL (SEQ ID NO: 84881):LKNYQ (SEQ ID NO: 84230):NMVVE (SEQ ID NO: 84273), VPTQL (SEQ ID NO: 84384):SAIS-AA¹⁷-LYL (SEQ ID NO: 84881):LKNYQ (SEQ ID NO: 84230):NMVVE (SEQ ID NO: 84273), VPTKL (SEQ ID NO: 84381):SAIS-AA¹⁷-LYL (SEQ ID NO: 84881):LKNYQ (SEQ ID NO: 84230):EGMSVVE (SEQ ID NO: 84416), VPTKL (SEQ ID NO: 84381):SAIS-AA¹⁷-LYL (SEQ ID NO: 84881):LKNYQ (SEQ ID NO: 84230):GMVVE (SEQ ID NO: 84205), VPTKM (SEQ ID NO: 84382):SAIS-AA¹⁷-LYL (SEQ ID NO: 84881):LKNYQ (SEQ ID NO: 84230):GMVVE (SEQ ID NO: 84205), VPTRL (SEQ ID NO: 84385):SAIS-AA¹⁷-LYL (SEQ ID NO: 84881):LKNYQ (SEQ ID NO: 84230):DMVVE (SEQ ID NO: 84161), VPTKT (SEQ ID NO: 84383):SAIS-AA¹⁷-LYL (SEQ ID NO: 84881):LKNYQ (SEQ ID NO: 84230):MIVVE (SEQ ID NO: 84245), VPTAL (SEQ ID NO: 84375):SAIS-AA¹⁷-LYL (SEQ ID NO: 84881):LKNYQ (SEQ ID NO: 84230):MIVVE (SEQ ID NO: 84245), VPTDL (SEQ ID NO: 84376):SAIS-AA¹⁷-LYL (SEQ ID NO: 84881):LKNYQ (SEQ ID NO: 84230):MIVVE (SEQ ID NO: 84245), VPTDL (SEQ ID NO: 84376):SAIS-AA¹⁷-LYL (SEQ ID NO: 84881):LKNYQ (SEQ ID NO: 84230):MVVVE (SEQ ID NO: 84259), VPEKM (SEQ ID NO: 84360):SAIS-AA¹⁷-LYL (SEQ ID NO: 84881):LKNYQ (SEQ ID NO: 84230):NMTVE (SEQ ID NO: 84267), APTKL (SEQ ID NO: 84131):SAIS-AA¹⁷-LYL (SEQ ID NO: 84881):LKNYQ (SEQ ID NO: 84230):NMVVR (SEQ ID NO: 84275), APTQL (SEQ ID NO: 84134):SAIS-AA¹⁷-LYL (SEQ ID NO: 84881):LKNYQ (SEQ ID NO: 84230):NMVVR (SEQ ID NO: 84275), APTKL (SEQ ID NO: 84131):SAIS-AA¹⁷-LYL (SEQ ID NO: 84881):LKNYQ (SEQ ID NO: 84230):NMVVK (SEQ ID NO: 84274), VPTKL (SEQ ID NO: 84381):SAIS-AA¹⁷-LYL (SEQ ID NO: 84881):LKNYQ (SEQ ID NO: 84230):EGMSVAE (SEQ ID NO: 84411), VPTKL (SEQ ID NO: 84381):SAIS-AA¹⁷-LYL (SEQ ID NO: 84881):LKNYQ (SEQ ID NO: 84230):GMAVS (SEQ ID NO: 84194), TPTKM (SEQ ID NO: 84327):SAIS-AA¹⁷-LYL (SEQ ID NO: 84881):LKNYQ (SEQ ID NO: 84230):GMVVD (SEQ ID NO: 84204), VPARL (SEQ ID NO: 84352):SAIS-AA¹⁷-LYL (SEQ ID NO: 84881):LKNYQ (SEQ ID NO: 84230):DMVVE (SEQ ID NO: 84161), APVKT (SEQ ID NO: 84144):SAIS-AA¹⁷-LYL (SEQ ID NO: 84881):LKNYQ (SEQ ID NO: 84230):MIVEE (SEQ ID NO: 84241), VPQAL (SEQ ID NO: 84364):SAIS-AA¹⁷-LYL (SEQ ID NO: 84881):LKNYQ (SEQ ID NO: 84230):MIVRS (SEQ ID NO: 84243), VSQDL (SEQ ID NO: 84387):SAIS-AA¹⁷-LYL (SEQ ID NO: 84881):LKNYQ (SEQ ID NO: 84230):MIVKS (SEQ ID NO: 84242), VPQDL (SEQ ID NO: 84365):SAIS-AA¹⁷-LYL (SEQ ID NO: 84881):LKNYQ (SEQ ID NO: 84230):MVVKS (SEQ ID NO: 84256), VPTEE (SEQ ID NO: 84377):SAIS-AA¹⁷-LYL (SEQ ID NO: 84881):LKNYQ (SEQ ID NO: 84230):FLQHN (SEQ ID NO: 84184), VPTGQ (SEQ ID NO: 84379):SAIS-AA¹⁷-LYL (SEQ ID NO: 84881):LKNYQ (SEQ ID NO: 84230):LEEHS (SEQ ID NO: 84217), SRVHH (SEQ ID NO: 84297):SAIS-AA¹⁷-LYL (SEQ ID NO: 84881):LKNYQ (SEQ ID NO: 84230):RLEEH (SEQ ID NO: 84279), TQVQL (SEQ ID NO: 84340):SAIS-AA¹⁷-LYL (SEQ ID NO: 84881):LKNYQ (SEQ ID NO: 84230):TLEDH (SEQ ID NO: 84307), VPEEL (SEQ ID NO: 84356):SSLS-AA¹⁷-LFF (SEQ ID NO: 84889):LKVYP (SEQ ID NO: 84231):DMTVE (SEQ ID NO: 84155), VPEEL (SEQ ID NO: 84356):SSLS-AA¹⁷-LFF (SEQ ID NO: 84889):LKVYP (SEQ ID NO: 84231):EMTVE (SEQ ID NO: 84169), VPEKL (SEQ ID NO: 84359):SSLS-AA¹⁷-LFF (SEQ ID NO: 84889):LKVYP (SEQ ID NO: 84231):NMTVE (SEQ ID NO: 84267), VPEQL (SEQ ID NO: 84362):SSLS-AA¹⁷-LFF (SEQ ID NO: 84889):LKVYP (SEQ ID NO: 84231):NMTVE (SEQ ID NO: 84267), VPEKL (SEQ ID NO: 84359):SSLS-AA¹⁷-LFF (SEQ ID NO: 84889):LKVYP (SEQ ID NO: 84231):EGMSTVE (SEQ ID NO: 84410), VPEKL (SEQ ID NO: 84359):SSLS-AA¹⁷-LFF (SEQ ID NO: 84889):LKVYP (SEQ ID NO: 84231):GMTVE (SEQ ID NO: 84199), VPEKM (SEQ ID NO: 84360):SSLS-AA¹⁷-LFF (SEQ ID NO: 84889):LKVYP (SEQ ID NO: 84231):GMTVE (SEQ ID NO: 84199), VPERL (SEQ ID NO: 84363):SSLS-AA¹⁷-LFF (SEQ ID NO: 84889):LKVYP (SEQ ID NO: 84231):DMTVE (SEQ ID NO: 84155), VPEKT (SEQ ID NO: 84361):SSLS-AA¹⁷-LFF (SEQ ID NO: 84889):LKVYP (SEQ ID NO: 84231):MITVE (SEQ ID NO: 84239), VPEAL (SEQ ID NO: 84353):SSLS-AA¹⁷-LFF (SEQ ID NO: 84889):LKVYP (SEQ ID NO: 84231):MITVE (SEQ ID NO: 84239), VPEDL (SEQ ID NO: 84354):SSLS-AA¹⁷-LFF (SEQ ID NO: 84889):LKVYP (SEQ ID NO: 84231):MITVE (SEQ ID NO: 84239), VPEDL (SEQ ID NO: 84354):SSLS-AA¹⁷-LFF (SEQ ID NO: 84889):LKVYP (SEQ ID NO: 84231):MVTVE (SEQ ID NO: 84253), VPTEL (SEQ ID NO: 84378):SSLS-AA¹⁷-LFF (SEQ ID NO: 84889):LKVYP (SEQ ID NO: 84231):DMVVE (SEQ ID NO: 84161), VPTEL (SEQ ID NO: 84378):SSLS-AA¹⁷-LFF (SEQ ID NO: 84889):LKVYP (SEQ ID NO: 84231):EMVVE (SEQ ID NO: 84175), APTKL (SEQ ID NO: 84131):SSLS-AA¹⁷-LFF (SEQ ID NO: 84889):LKVYP (SEQ ID NO: 84231):NMVVR (SEQ ID NO: 84275), APTQL (SEQ ID NO: 84134):SSLS-AA¹⁷-LFF (SEQ ID NO: 84889):LKVYP (SEQ ID NO: 84231):NMVVR (SEQ ID NO: 84275), APTKL (SEQ ID NO: 84131):SSLS-AA¹⁷-LFF (SEQ ID NO: 84889):LKVYP (SEQ ID NO: 84231):NMVVK (SEQ ID NO: 84274), VPTKL (SEQ ID NO: 84381):SSLS-AA¹⁷-LFF (SEQ ID NO: 84889):LKVYP (SEQ ID NO: 84231):EGMSVAE (SEQ ID NO: 84411), VPTKL (SEQ ID NO: 84381):SSLS-AA¹⁷-LFF (SEQ ID NO: 84889):LKVYP (SEQ ID NO: 84231):GMAVS (SEQ ID NO: 84194), TPTKM (SEQ ID NO: 84327):SSLS-AA¹⁷-LFF (SEQ ID NO: 84889):LKVYP (SEQ ID NO: 84231):GMVVD (SEQ ID NO: 84204), VPARL (SEQ ID NO: 84352):SSLS-AA¹⁷-LFF (SEQ ID NO: 84889):LKVYP (SEQ ID NO: 84231):DMVVE (SEQ ID NO: 84161), VPTRL (SEQ ID NO: 84385):SSLS-AA¹⁷-LFF (SEQ ID NO: 84889):LKVYP (SEQ ID NO: 84231):DMVVE (SEQ ID NO: 84161), APVKT (SEQ ID NO: 84144):SSLS-AA¹⁷-LFF (SEQ ID NO: 84889):LKVYP (SEQ ID NO: 84231):MIVEE (SEQ ID NO: 84241), VPQAL (SEQ ID NO: 84364):SSLS-AA¹⁷-LFF (SEQ ID NO: 84889):LKVYP (SEQ ID NO: 84231):MIVRS (SEQ ID NO: 84243), VSQDL (SEQ ID NO: 84387):SSLS-AA¹⁷-LFF (SEQ ID NO: 84889):LKVYP (SEQ ID NO: 84231):MIVKS (SEQ ID NO: 84242), VPQDL (SEQ ID NO: 84365):SSLS-AA¹⁷-LFF (SEQ ID NO: 84889):LKVYP (SEQ ID NO: 84231):MVVKS (SEQ ID NO: 84256), VPTEE (SEQ ID NO: 84377):SSLS-AA¹⁷-LFF (SEQ ID NO: 84889):LKVYP (SEQ ID NO: 84231):FLQHN (SEQ ID NO: 84184), VPTGQ (SEQ ID NO: 84379):SSLS-AA¹⁷-LFF (SEQ ID NO: 84889):LKVYP (SEQ ID NO: 84231):LEEHS (SEQ ID NO: 84217), SRVHH (SEQ ID NO: 84297):SSLS-AA¹⁷-LFF (SEQ ID NO: 84889):LKVYP (SEQ ID NO: 84231):RLEEH (SEQ ID NO: 84279), TQVQL (SEQ ID NO: 84340):SSLS-AA¹⁷-LFF (SEQ ID NO: 84889):LKVYP (SEQ ID NO: 84231):TLEDH (SEQ ID NO: 84307), APTEL (SEQ ID NO: 84128):NAIS-AA¹⁷-LYF (SEQ ID NO: 84878):LKKYR (SEQ ID NO: 84229):DMVVR (SEQ ID NO: 84163), APTKM (SEQ ID NO: 84132):NAIS-AA¹⁷-LYF (SEQ ID NO: 84878):LKKYR (SEQ ID NO: 84229):NMVVR (SEQ ID NO: 84275), APTEL (SEQ ID NO: 84128):NAIS-AA¹⁷-LYF (SEQ ID NO: 84878):LKKYR (SEQ ID NO: 84229):EMVVR (SEQ ID NO: 84177), APTKL (SEQ ID NO: 84131):NAIS-AA¹⁷-LYF (SEQ ID NO: 84878):LKKYR (SEQ ID NO: 84229):NMVVR (SEQ ID NO: 84275), APTKL (SEQ ID NO: 84131):NAIS-AA¹⁷-LYF (SEQ ID NO: 84878):LKKYR (SEQ ID NO: 84229):EGMSVVR (SEQ ID NO: 84418), APTKL (SEQ ID NO: 84131):NAIS-AA¹⁷-LYF (SEQ ID NO: 84878):LKKYR (SEQ ID NO: 84229):GMVVR (SEQ ID NO: 84207), APTKM (SEQ ID NO: 84132):NAIS-AA¹⁷-LYF (SEQ ID NO: 84878):LKKYR (SEQ ID NO: 84229):GMVVR (SEQ ID NO: 84207), APTRL (SEQ ID NO: 84135):NAIS-AA¹⁷-LYF (SEQ ID NO: 84878):LKKYR (SEQ ID NO: 84229):DMVVR (SEQ ID NO: 84163), APTKT (SEQ ID NO: 84133):NAIS-AA¹⁷-LYF (SEQ ID NO: 84878):LKKYR (SEQ ID NO: 84229):MIVVR (SEQ ID NO: 84247), APTAL (SEQ ID NO: 84125):NAIS-AA¹⁷-LYF (SEQ ID NO: 84878):LKKYR (SEQ ID NO: 84229):MIVVR (SEQ ID NO: 84247), APTDL (SEQ ID NO: 84126):NAIS-AA¹⁷-LYF (SEQ ID NO: 84878):LKKYR (SEQ ID NO: 84229):MIVVR (SEQ ID NO: 84247), APTDL (SEQ ID NO: 84126):NAIS-AA¹⁷-LYF (SEQ ID NO: 84878):LKKYR (SEQ ID NO: 84229):MVVVR (SEQ ID NO: 84261), VPTEL (SEQ ID NO: 84378):NAIS-AA¹⁷-LYF (SEQ ID NO: 84878):LKKYR (SEQ ID NO: 84229):DMVVE (SEQ ID NO: 84161), VPEKM (SEQ ID NO: 84360):NAIS-AA¹⁷-LYF (SEQ ID NO: 84878):LKKYR (SEQ ID NO: 84229):NMTVE (SEQ ID NO: 84267), VPTEL (SEQ ID NO: 84378):NAIS-AA¹⁷-LYF (SEQ ID NO: 84878):LKKYR (SEQ ID NO: 84229):EMVVE (SEQ ID NO: 84175), APTKL (SEQ ID NO: 84131):NAIS-AA¹⁷-LYF (SEQ ID NO: 84878):LKKYR (SEQ ID NO: 84229):NMVVK (SEQ ID NO: 84274), VPTKL (SEQ ID NO: 84381):NAIS-AA¹⁷-LYF (SEQ ID NO: 84878):LKKYR (SEQ ID NO: 84229):EGMSVAE (SEQ ID NO: 84411), VPTKL (SEQ ID NO: 84381):NAIS-AA¹⁷-LYF (SEQ ID NO: 84878):LKKYR (SEQ ID NO: 84229):GMAVS (SEQ ID NO: 84194), TPTKM (SEQ ID NO: 84327):NAIS-AA¹⁷-LYF (SEQ ID NO: 84878):LKKYR (SEQ ID NO: 84229):GMVVD (SEQ ID NO: 84204), VPARL (SEQ ID NO: 84352):NAIS-AA¹⁷-LYF (SEQ ID NO: 84878):LKKYR (SEQ ID NO: 84229):DMVVE (SEQ ID NO: 84161), VPTRL (SEQ ID NO: 84385):NAIS-AA¹⁷-LYF (SEQ ID NO: 84878):LKKYR (SEQ ID NO: 84229):DMVVE (SEQ ID NO: 84161), APVKT (SEQ ID NO: 84144):NAIS-AA¹⁷-LYF (SEQ ID NO: 84878):LKKYR (SEQ ID NO: 84229):MIVEE (SEQ ID NO: 84241), VPQAL (SEQ ID NO: 84364):NAIS-AA¹⁷-LYF (SEQ ID NO: 84878):LKKYR (SEQ ID NO: 84229):MIVRS (SEQ ID NO: 84243), VSQDL (SEQ ID NO: 84387):NAIS-AA¹⁷-LYF (SEQ ID NO: 84878):LKKYR (SEQ ID NO: 84229):MIVKS (SEQ ID NO: 84242), VPQDL (SEQ ID NO: 84365):NAIS-AA¹⁷-LYF (SEQ ID NO: 84878):LKKYR (SEQ ID NO: 84229):MVVKS (SEQ ID NO: 84256), VPTEE (SEQ ID NO: 84377):NAIS-AA¹⁷-LYF (SEQ ID NO: 84878):LKKYR (SEQ ID NO: 84229):FLQHN (SEQ ID NO: 84184), VPTGQ (SEQ ID NO: 84379):NAIS-AA¹⁷-LYF (SEQ ID NO: 84878):LKKYR (SEQ ID NO: 84229):LEEHS (SEQ ID NO: 84217), SRVHH (SEQ ID NO: 84297):NAIS-AA¹⁷-LYF (SEQ ID NO: 84878):LKKYR (SEQ ID NO: 84229):RLEEH (SEQ ID NO: 84279), TQVQL (SEQ ID NO: 84340):NAIS-AA¹⁷-LYF (SEQ ID NO: 84878):LKKYR (SEQ ID NO: 84229):TLEDH (SEQ ID NO: 84307), APTEL (SEQ ID NO: 84128):SATS-AA¹⁷-LYY (SEQ ID NO: 84882):LRKHR (SEQ ID NO: 84233):DMVVK (SEQ ID NO: 84162), APTKM (SEQ ID NO: 84132):SATS-AA¹⁷-LYY (SEQ ID NO: 84882):LRKHR (SEQ ID NO: 84233):NMVVK (SEQ ID NO: 84274), APTEL (SEQ ID NO: 84128):SATS-AA¹⁷-LYY (SEQ ID NO: 84882):LRKHR (SEQ ID NO: 84233):EMVVK (SEQ ID NO: 84176), APTKL (SEQ ID NO: 84131):SATS-AA¹⁷-LYY (SEQ ID NO: 84882):LRKHR (SEQ ID NO: 84233):NMVVK (SEQ ID NO: 84274), APTQL (SEQ ID NO: 84134):SATS-AA¹⁷-LYY (SEQ ID NO: 84882):LRKHR (SEQ ID NO: 84233):NMVVK (SEQ ID NO: 84274), APTKL (SEQ ID NO: 84131):SATS-AA¹⁷-LYY (SEQ ID NO: 84882):LRKHR (SEQ ID NO: 84233):EGMSVVK (SEQ ID NO: 84417), APTKL (SEQ ID NO: 84131):SATS-AA¹⁷-LYY (SEQ ID NO: 84882):LRKHR (SEQ ID NO: 84233):GMVVK (SEQ ID NO: 84206), APTKM (SEQ ID NO: 84132):SATS-AA¹⁷-LYY (SEQ ID NO: 84882):LRKHR (SEQ ID NO: 84233):GMVVK (SEQ ID NO: 84206), APTRL (SEQ ID NO: 84135):SATS-AA¹⁷-LYY (SEQ ID NO: 84882):LRKHR (SEQ ID NO: 84233):DMVVK (SEQ ID NO: 84162), APTKT (SEQ ID NO: 84133):SATS-AA¹⁷-LYY (SEQ ID NO: 84882):LRKHR (SEQ ID NO: 84233):MIVVK (SEQ ID NO: 84246), APTAL (SEQ ID NO: 84125):SATS-AA¹⁷-LYY (SEQ ID NO: 84882):LRKHR (SEQ ID NO: 84233):MIVVK (SEQ ID NO: 84246), APTDL (SEQ ID NO: 84126):SATS-AA¹⁷-LYY (SEQ ID NO: 84882):LRKHR (SEQ ID NO: 84233):MIVVK (SEQ ID NO: 84246), APTDL (SEQ ID NO: 84126):SATS-AA¹⁷-LYY (SEQ ID NO: 84882):LRKHR (SEQ ID NO: 84233):MVVVK (SEQ ID NO: 84260), VPTEL (SEQ ID NO: 84378):SATS-AA¹⁷-LYY (SEQ ID NO: 84882):LRKHR (SEQ ID NO: 84233):DMVVE (SEQ ID NO: 84161), VPEKM (SEQ ID NO: 84360):SATS-AA¹⁷-LYY (SEQ ID NO: 84882):LRKHR (SEQ ID NO: 84233):NMTVE (SEQ ID NO: 84267), VPTEL (SEQ ID NO: 84378):SATS-AA¹⁷-LYY (SEQ ID NO: 84882):LRKHR (SEQ ID NO: 84233):EMVVE (SEQ ID NO: 84175), APTKL (SEQ ID NO: 84131):SATS-AA¹⁷-LYY (SEQ ID NO: 84882):LRKHR (SEQ ID NO: 84233):NMVVR (SEQ ID NO: 84275), APTQL (SEQ ID NO: 84134):SATS-AA¹⁷-LYY (SEQ ID NO: 84882):LRKHR (SEQ ID NO: 84233):NMVVR (SEQ ID NO: 84275), VPTKL (SEQ ID NO: 84381):SATS-AA¹⁷-LYY (SEQ ID NO: 84882):LRKHR (SEQ ID NO: 84233):EGMSVAE (SEQ ID NO: 84411), VPTKL (SEQ ID NO: 84381):SATS-AA¹⁷-LYY (SEQ ID NO: 84882):LRKHR (SEQ ID NO: 84233):GMAVS (SEQ ID NO: 84194), TPTKM (SEQ ID NO: 84327):SATS-AA¹⁷-LYY (SEQ ID NO: 84882):LRKHR (SEQ ID NO: 84233):GMVVD (SEQ ID NO: 84204), VPARL (SEQ ID NO: 84352):SATS-AA¹⁷-LYY (SEQ ID NO: 84882):LRKHR (SEQ ID NO: 84233):DMVVE (SEQ ID NO: 84161), VPTRL (SEQ ID NO: 84385):SATS-AA¹⁷-LYY (SEQ ID NO: 84882):LRKHR (SEQ ID NO: 84233):DMVVE (SEQ ID NO: 84161), APVKT (SEQ ID NO: 84144):SATS-AA¹⁷-LYY (SEQ ID NO: 84882):LRKHR (SEQ ID NO: 84233):MIVEE (SEQ ID NO: 84241), VPQAL (SEQ ID NO: 84364):SATS-AA¹⁷-LYY (SEQ ID NO: 84882):LRKHR (SEQ ID NO: 84233):MIVRS (SEQ ID NO: 84243), VSQDL (SEQ ID NO: 84387):SATS-AA¹⁷-LYY (SEQ ID NO: 84882):LRKHR (SEQ ID NO: 84233):MIVKS (SEQ ID NO: 84242), VPQDL (SEQ ID NO: 84365):SATS-AA¹⁷-LYY (SEQ ID NO: 84882):LRKHR (SEQ ID NO: 84233):MVVKS (SEQ ID NO: 84256), VPTEE (SEQ ID NO: 84377):SATS-AA¹⁷-LYY (SEQ ID NO: 84882):LRKHR (SEQ ID NO: 84233):FLQHN (SEQ ID NO: 84184), VPTGQ (SEQ ID NO: 84379):SATS-AA¹⁷-LYY (SEQ ID NO: 84882):LRKHR (SEQ ID NO: 84233):LEEHS (SEQ ID NO: 84217), SRVHH (SEQ ID NO: 84297):SATS-AA¹⁷-LYY (SEQ ID NO: 84882):LRKHR (SEQ ID NO: 84233):RLEEH (SEQ ID NO: 84279), TQVQL (SEQ ID NO: 84340):SATS-AA¹⁷-LYY (SEQ ID NO: 84882):LRKHR (SEQ ID NO: 84233):TLEDH (SEQ ID NO: 84307), VPTEL (SEQ ID NO: 84378):SPIS-AA¹⁷-LYK (SEQ ID NO: 84887):LKYHY (SEQ ID NO: 84232):DMVAE (SEQ ID NO: 84156), VPTKM (SEQ ID NO: 84382):SPIS-AA¹⁷-LYK (SEQ ID NO: 84887):LKYHY (SEQ ID NO: 84232):NMVAE (SEQ ID NO: 84268), VPTEL (SEQ ID NO: 84378):SPIS-AA¹⁷-LYK (SEQ ID NO: 84887):LKYHY (SEQ ID NO: 84232):EMVAE (SEQ ID NO: 84170), VPTKL (SEQ ID NO: 84381):SPIS-AA¹⁷-LYK (SEQ ID NO: 84887):LKYHY (SEQ ID NO: 84232):NMVAE (SEQ ID NO: 84268), VPTQL (SEQ ID NO: 84384):SPIS-AA¹⁷-LYK (SEQ ID NO: 84887):LKYHY (SEQ ID NO: 84232):NMVAE (SEQ ID NO: 84268), VPTKL (SEQ ID NO: 84381):SPIS-AA¹⁷-LYK (SEQ ID NO: 84887):LKYHY (SEQ ID NO: 84232):GMVAE (SEQ ID NO: 84200), VPTKM (SEQ ID NO: 84382):SPIS-AA¹⁷-LYK (SEQ ID NO: 84887):LKYHY (SEQ ID NO: 84232):GMVAE (SEQ ID NO: 84200), VPTRL (SEQ ID NO: 84385):SPIS-AA¹⁷-LYK (SEQ ID NO: 84887):LKYHY (SEQ ID NO: 84232):DMVAE (SEQ ID NO: 84156), VPTKT (SEQ ID NO: 84383):SPIS-AA¹⁷-LYK (SEQ ID NO: 84887):LKYHY (SEQ ID NO: 84232):MIVAE (SEQ ID NO: 84240), VPTAL (SEQ ID NO: 84375):SPIS-AA¹⁷-LYK (SEQ ID NO: 84887):LKYHY (SEQ ID NO: 84232):MIVAE (SEQ ID NO: 84240), VPTDL (SEQ ID NO: 84376):SPIS-AA¹⁷-LYK (SEQ ID NO: 84887):LKYHY (SEQ ID NO: 84232):MIVAE (SEQ ID NO: 84240), VPTDL (SEQ ID NO: 84376):SPIS-AA¹⁷-LYK (SEQ ID NO: 84887):LKYHY (SEQ ID NO: 84232):MVVAE (SEQ ID NO: 84254), VPTEL (SEQ ID NO: 84378):SPIS-AA¹⁷-LYK (SEQ ID NO: 84887):LKYHY (SEQ ID NO: 84232):DMVVE (SEQ ID NO: 84161), VPEKM (SEQ ID NO: 84360):SPIS-AA¹⁷-LYK (SEQ ID NO: 84887):LKYHY (SEQ ID NO: 84232):NMTVE (SEQ ID NO: 84267), VPTEL (SEQ ID NO: 84378):SPIS-AA¹⁷-LYK (SEQ ID NO: 84887):LKYHY (SEQ ID NO: 84232):EMVVE (SEQ ID NO: 84175), APTKL (SEQ ID NO: 84131):SPIS-AA¹⁷-LYK (SEQ ID NO: 84887):LKYHY (SEQ ID NO: 84232):NMVVR (SEQ ID NO: 84275), APTQL (SEQ ID NO: 84134):SPIS-AA¹⁷-LYK (SEQ ID NO: 84887):LKYHY (SEQ ID NO: 84232):NMVVR (SEQ ID NO: 84275), APTKL (SEQ ID NO: 84131):SPIS-AA¹⁷-LYK (SEQ ID NO: 84887):LKYHY (SEQ ID NO: 84232):NMVVK (SEQ ID NO: 84274), VPTKL (SEQ ID NO: 84381):SPIS-AA¹⁷-LYK (SEQ ID NO: 84887):LKYHY (SEQ ID NO: 84232):GMAVS (SEQ ID NO: 84194), TPTKM (SEQ ID NO: 84327):SPIS-AA¹⁷-LYK (SEQ ID NO: 84887):LKYHY (SEQ ID NO: 84232):GMVVD (SEQ ID NO: 84204), VPARL (SEQ ID NO: 84352):SPIS-AA¹⁷-LYK (SEQ ID NO: 84887):LKYHY (SEQ ID NO: 84232):DMVVE (SEQ ID NO: 84161), VPTRL (SEQ ID NO: 84385):SPIS-AA¹⁷-LYK (SEQ ID NO: 84887):LKYHY (SEQ ID NO: 84232):DMVVE (SEQ ID NO: 84161), APVKT (SEQ ID NO: 84144):SPIS-AA¹⁷-LYK (SEQ ID NO: 84887):LKYHY (SEQ ID NO: 84232):MIVEE (SEQ ID NO: 84241), VPQAL (SEQ ID NO: 84364):SPIS-AA¹⁷-LYK (SEQ ID NO: 84887):LKYHY (SEQ ID NO: 84232):MIVRS (SEQ ID NO: 84243), VSQDL (SEQ ID NO: 84387):SPIS-AA¹⁷-LYK (SEQ ID NO: 84887):LKYHY (SEQ ID NO: 84232):MIVKS (SEQ ID NO: 84242), VPQDL (SEQ ID NO: 84365):SPIS-AA¹⁷-LYK (SEQ ID NO: 84887):LKYHY (SEQ ID NO: 84232):MVVKS (SEQ ID NO: 84256), VPTEE (SEQ ID NO: 84377):SPIS-AA¹⁷-LYK (SEQ ID NO: 84887):LKYHY (SEQ ID NO: 84232):FLQHN (SEQ ID NO: 84184), VPTGQ (SEQ ID NO: 84379):SPIS-AA¹⁷-LYK (SEQ ID NO: 84887):LKYHY (SEQ ID NO: 84232):LEEHS (SEQ ID NO: 84217), SRVHH (SEQ ID NO: 84297):SPIS-AA¹⁷-LYK (SEQ ID NO: 84887):LKYHY (SEQ ID NO: 84232):RLEEH (SEQ ID NO: 84279), TQVQL (SEQ ID NO: 84340):SPIS-AA¹⁷-LYK (SEQ ID NO: 84887):LKYHY (SEQ ID NO: 84232):TLEDH (SEQ ID NO: 84307), VPTEL (SEQ ID NO: 84378):EPIS-AA¹⁷-LYL (SEQ ID NO: 84874):KFKYE (SEQ ID NO: 84211):DMAVS (SEQ ID NO: 84150), VPTKM (SEQ ID NO: 84382):EPIS-AA¹⁷-LYL (SEQ ID NO: 84874):KFKYE (SEQ ID NO: 84211):NMAVS (SEQ ID NO: 84262), VPTEL (SEQ ID NO: 84378):EPIS-AA¹⁷-LYL (SEQ ID NO: 84874):KFKYE (SEQ ID NO: 84211):EMAVS (SEQ ID NO: 84164), VPTKL (SEQ ID NO: 84381):EPIS-AA¹⁷-LYL (SEQ ID NO: 84874):KFKYE (SEQ ID NO: 84211):NMAVS (SEQ ID NO: 84262), VPTQL (SEQ ID NO: 84384):EPIS-AA¹⁷-LYL (SEQ ID NO: 84874):KFKYE (SEQ ID NO: 84211):NMAVS (SEQ ID NO: 84262), VPTKL (SEQ ID NO: 84381):EPIS-AA¹⁷-LYL (SEQ ID NO: 84874):KFKYE (SEQ ID NO: 84211):EGMSAVS (SEQ ID NO: 84405), VPTKM (SEQ ID NO: 84382):EPIS-AA¹⁷-LYL (SEQ ID NO: 84874):KFKYE (SEQ ID NO: 84211):GMAVS (SEQ ID NO: 84194), VPTRL (SEQ ID NO: 84385):EPIS-AA¹⁷-LYL (SEQ ID NO: 84874):KFKYE (SEQ ID NO: 84211):DMAVS (SEQ ID NO: 84150), VPTKT (SEQ ID NO: 84383):EPIS-AA¹⁷-LYL (SEQ ID NO: 84874):KFKYE (SEQ ID NO: 84211):MIAVS (SEQ ID NO: 84234), VPTAL (SEQ ID NO: 84375):EPIS-AA¹⁷-LYL (SEQ ID NO: 84874):KFKYE (SEQ ID NO: 84211):MIAVS (SEQ ID NO: 84234), VPTDL (SEQ ID NO: 84376):EPIS-AA¹⁷-LYL (SEQ ID NO: 84874):KFKYE (SEQ ID NO: 84211):MIAVS (SEQ ID NO: 84234), VPTDL (SEQ ID NO: 84376):EPIS-AA¹⁷-LYL (SEQ ID NO: 84874):KFKYE (SEQ ID NO: 84211):MVAVS (SEQ ID NO: 84248), VPTEL (SEQ ID NO: 84378):EPIS-AA¹⁷-LYL (SEQ ID NO: 84874):KFKYE (SEQ ID NO: 84211):DMVVE (SEQ ID NO: 84161), VPEKM (SEQ ID NO: 84360):EPIS-AA¹⁷-LYL (SEQ ID NO: 84874):KFKYE (SEQ ID NO: 84211):NMTVE (SEQ ID NO: 84267), VPTEL (SEQ ID NO: 84378):EPIS-AA¹⁷-LYL (SEQ ID NO: 84874):KFKYE (SEQ ID NO: 84211):EMVVE (SEQ ID NO: 84175), APTKL (SEQ ID NO: 84131):EPIS-AA¹⁷-LYL (SEQ ID NO: 84874):KFKYE (SEQ ID NO: 84211):NMVVR (SEQ ID NO: 84275), APTQL (SEQ ID NO: 84134):EPIS-AA¹⁷-LYL (SEQ ID NO: 84874):KFKYE (SEQ ID NO: 84211):NMVVR (SEQ ID NO: 84275), APTKL (SEQ ID NO: 84131):EPIS-AA¹⁷-LYL (SEQ ID NO: 84874):KFKYE (SEQ ID NO: 84211):NMVVK (SEQ ID NO: 84274), VPTKL (SEQ ID NO: 84381):EPIS-AA¹⁷-LYL (SEQ ID NO: 84874):KFKYE (SEQ ID NO: 84211):EGMSVAE (SEQ ID NO: 84411), TPTKM (SEQ ID NO: 84327):EPIS-AA¹⁷-LYL (SEQ ID NO: 84874):KFKYE (SEQ ID NO: 84211):GMVVD (SEQ ID NO: 84204), VPARL (SEQ ID NO: 84352):EPIS-AA¹⁷-LYL (SEQ ID NO: 84874):KFKYE (SEQ ID NO: 84211):DMVVE (SEQ ID NO: 84161), VPTRL (SEQ ID NO: 84385):EPIS-AA¹⁷-LYL (SEQ ID NO: 84874):KFKYE (SEQ ID NO: 84211):DMVVE (SEQ ID NO: 84161), APVKT (SEQ ID NO: 84144):EPIS-AA¹⁷-LYL (SEQ ID NO: 84874):KFKYE (SEQ ID NO: 84211):MIVEE (SEQ ID NO: 84241), VPQAL (SEQ ID NO: 84364):EPIS-AA¹⁷-LYL (SEQ ID NO: 84874):KFKYE (SEQ ID NO: 84211):MIVRS (SEQ ID NO: 84243), VSQDL (SEQ ID NO: 84387):EPIS-AA¹⁷-LYL (SEQ ID NO: 84874):KFKYE (SEQ ID NO: 84211):MIVKS (SEQ ID NO: 84242), VPQDL (SEQ ID NO: 84365):EPIS-AA¹⁷-LYL (SEQ ID NO: 84874):KFKYE (SEQ ID NO: 84211):MVVKS (SEQ ID NO: 84256), VPTEE (SEQ ID NO: 84377):EPIS-AA¹⁷-LYL (SEQ ID NO: 84874):KFKYE (SEQ ID NO: 84211):FLQHN (SEQ ID NO: 84184), VPTGQ (SEQ ID NO: 84379):EPIS-AA¹⁷-LYL (SEQ ID NO: 84874):KFKYE (SEQ ID NO: 84211):LEEHS (SEQ ID NO: 84217), SRVHH (SEQ ID NO: 84297):EPIS-AA¹⁷-LYL (SEQ ID NO: 84874):KFKYE (SEQ ID NO: 84211):RLEEH (SEQ ID NO: 84279), TQVQL (SEQ ID NO: 84340):EPIS-AA¹⁷-LYL (SEQ ID NO: 84874):KFKYE (SEQ ID NO: 84211):TLEDH (SEQ ID NO: 84307), TPTEL (SEQ ID NO: 84323):SPIN-AA¹⁷-LYF (SEQ ID NO: 84884):YGKIP (SEQ ID NO: 84397):DMVVD (SEQ ID NO: 84160), TPTKM (SEQ ID NO: 84327):SPIN-AA¹⁷-LYF (SEQ ID NO: 84884):YGKIP (SEQ ID NO: 84397):NMVVD (SEQ ID NO: 84272), TPTEL (SEQ ID NO: 84323):SPIN-AA¹⁷-LYF (SEQ ID NO: 84884):YGKIP (SEQ ID NO: 84397):EMVVD (SEQ ID NO: 84174), TPTKL (SEQ ID NO: 84326):SPIN-AA¹⁷-LYF (SEQ ID NO: 84884):YGKIP (SEQ ID NO: 84397):NMVVD (SEQ ID NO: 84272), TPTQL (SEQ ID NO: 84329):SPIN-AA¹⁷-LYF (SEQ ID NO: 84884):YGKIP (SEQ ID NO: 84397):NMVVD (SEQ ID NO: 84272), TPTKL (SEQ ID NO: 84326):SPIN-AA¹⁷-LYF (SEQ ID NO: 84884):YGKIP (SEQ ID NO: 84397):EGMSVVD (SEQ ID NO: 84415), TPTKL (SEQ ID NO: 84326):SPIN-AA¹⁷-LYF (SEQ ID NO: 84884):YGKIP (SEQ ID NO: 84397):GMVVD (SEQ ID NO: 84204), TPTRL (SEQ ID NO: 84330):SPIN-AA¹⁷-LYF (SEQ ID NO: 84884):YGKIP (SEQ ID NO: 84397):DMVVD (SEQ ID NO: 84160), TPTKT (SEQ ID NO: 84328):SPIN-AA¹⁷-LYF (SEQ ID NO: 84884):YGKIP (SEQ ID NO: 84397):MIVVD (SEQ ID NO: 84244), TPTAL (SEQ ID NO: 84320):SPIN-AA¹⁷-LYF (SEQ ID NO: 84884):YGKIP (SEQ ID NO: 84397):MIVVD (SEQ ID NO: 84244), TPTDL (SEQ ID NO: 84321):SPIN-AA¹⁷-LYF (SEQ ID NO: 84884):YGKIP (SEQ ID NO: 84397):MIVVD (SEQ ID NO: 84244), TPTDL (SEQ ID NO: 84321):SPIN-AA¹⁷-LYF (SEQ ID NO: 84884):YGKIP (SEQ ID NO: 84397):MVVVD (SEQ ID NO: 84258), VPTEL (SEQ ID NO: 84378):SPIN-AA¹⁷-LYF (SEQ ID NO: 84884):YGKIP (SEQ ID NO: 84397):DMVVE (SEQ ID NO: 84161), VPEKM (SEQ ID NO: 84360):SPIN-AA¹⁷-LYF (SEQ ID NO: 84884):YGKIP (SEQ ID NO: 84397):NMTVE (SEQ ID NO: 84267), VPTEL (SEQ ID NO: 84378):SPIN-AA¹⁷-LYF (SEQ ID NO: 84884):YGKIP (SEQ ID NO: 84397):EMVVE (SEQ ID NO: 84175), APTKL (SEQ ID NO: 84131):SPIN-AA¹⁷-LYF (SEQ ID NO: 84884):YGKIP (SEQ ID NO: 84397):NMVVR (SEQ ID NO: 84275), APTQL (SEQ ID NO: 84134):SPIN-AA¹⁷-LYF (SEQ ID NO: 84884):YGKIP (SEQ ID NO: 84397):NMVVR (SEQ ID NO: 84275), APTKL (SEQ ID NO: 84131):SPIN-AA¹⁷-LYF (SEQ ID NO: 84884):YGKIP (SEQ ID NO: 84397):NMVVK (SEQ ID NO: 84274), VPTKL (SEQ ID NO: 84381):SPIN-AA¹⁷-LYF (SEQ ID NO: 84884):YGKIP (SEQ ID NO: 84397):EGMSVAE (SEQ ID NO: 84411), VPTKL (SEQ ID NO: 84381):SPIN-AA¹⁷-LYF (SEQ ID NO: 84884):YGKIP (SEQ ID NO: 84397):GMAVS (SEQ ID NO: 84194), VPARL (SEQ ID NO: 84352):SPIN-AA¹⁷-LYF (SEQ ID NO: 84884):YGKIP (SEQ ID NO: 84397):DMVVE (SEQ ID NO: 84161), VPTRL (SEQ ID NO: 84385):SPIN-AA¹⁷-LYF (SEQ ID NO: 84884):YGKIP (SEQ ID NO: 84397):DMVVE (SEQ ID NO: 84161), APVKT (SEQ ID NO: 84144):SPIN-AA¹⁷-LYF (SEQ ID NO: 84884):YGKIP (SEQ ID NO: 84397):MIVEE (SEQ ID NO: 84241), VPQAL (SEQ ID NO: 84364):SPIN-AA¹⁷-LYF (SEQ ID NO: 84884):YGKIP (SEQ ID NO: 84397):MIVRS (SEQ ID NO: 84243), VSQDL (SEQ ID NO: 84387):SPIN-AA¹⁷-LYF (SEQ ID NO: 84884):YGKIP (SEQ ID NO: 84397):MIVKS (SEQ ID NO: 84242), VPQDL (SEQ ID NO: 84365):SPIN-AA¹⁷-LYF (SEQ ID NO: 84884):YGKIP (SEQ ID NO: 84397):MVVKS (SEQ ID NO: 84256), VPTEE (SEQ ID NO: 84377):SPIN-AA¹⁷-LYF (SEQ ID NO: 84884):YGKIP (SEQ ID NO: 84397):FLQHN (SEQ ID NO: 84184), VPTGQ (SEQ ID NO: 84379):SPIN-AA¹⁷-LYF (SEQ ID NO: 84884):YGKIP (SEQ ID NO: 84397):LEEHS (SEQ ID NO: 84217), SRVHH (SEQ ID NO: 84297):SPIN-AA¹⁷-LYF (SEQ ID NO: 84884):YGKIP (SEQ ID NO: 84397):RLEEH (SEQ ID NO: 84279), TQVQL (SEQ ID NO: 84340):SPIN-AA¹⁷-LYF (SEQ ID NO: 84884):YGKIP (SEQ ID NO: 84397):TLEDH (SEQ ID NO: 84307), VPAEL (SEQ ID NO: 84345):SPIS-AA¹⁷-LYI (SEQ ID NO: 84886):YKQYE (SEQ ID NO: 84398):DMVVE (SEQ ID NO: 84161), VPAKM (SEQ ID NO: 84349):SPIS-AA¹⁷-LYI (SEQ ID NO: 84886):YKQYE (SEQ ID NO: 84398):NMVVE (SEQ ID NO: 84273), VPAEL (SEQ ID NO: 84345):SPIS-AA¹⁷-LYI (SEQ ID NO: 84886):YKQYE (SEQ ID NO: 84398):EMVVE (SEQ ID NO: 84175), VPAKL (SEQ ID NO: 84348):SPIS-AA¹⁷-LYI (SEQ ID NO: 84886):YKQYE (SEQ ID NO: 84398):NMVVE (SEQ ID NO: 84273), VPAQL (SEQ ID NO: 84351):SPIS-AA¹⁷-LYI (SEQ ID NO: 84886):YKQYE (SEQ ID NO: 84398):NMVVE (SEQ ID NO: 84273), VPAKL (SEQ ID NO: 84348):SPIS-AA¹⁷-LYI (SEQ ID NO: 84886):YKQYE (SEQ ID NO: 84398):EGMSVVE (SEQ ID NO: 84416), VPAKL (SEQ ID NO: 84348):SPIS-AA¹⁷-LYI (SEQ ID NO: 84886):YKQYE (SEQ ID NO: 84398):GMVVE (SEQ ID NO: 84205), VPAKM (SEQ ID NO: 84349):SPIS-AA¹⁷-LYI (SEQ ID NO: 84886):YKQYE (SEQ ID NO: 84398):GMVVE (SEQ ID NO: 84205), VPARL (SEQ ID NO: 84352):SPIS-AA¹⁷-LYI (SEQ ID NO: 84886):YKQYE (SEQ ID NO: 84398):DMVVE (SEQ ID NO: 84161), VPAKT (SEQ ID NO: 84350):SPIS-AA¹⁷-LYI (SEQ ID NO: 84886):YKQYE (SEQ ID NO: 84398):MIVVE (SEQ ID NO: 84245), VPAAL (SEQ ID NO: 84342):SPIS-AA¹⁷-LYI (SEQ ID NO: 84886):YKQYE (SEQ ID NO: 84398):MIVVE (SEQ ID NO: 84245), VPADL (SEQ ID NO: 84343):SPIS-AA¹⁷-LYI (SEQ ID NO: 84886):YKQYE (SEQ ID NO: 84398):MIVVE (SEQ ID NO: 84245), VPADL (SEQ ID NO: 84343):SPIS-AA¹⁷-LYI (SEQ ID NO: 84886):YKQYE (SEQ ID NO: 84398):MVVVE (SEQ ID NO: 84259), VPTEL (SEQ ID NO: 84378):SPIS-AA¹⁷-LYI (SEQ ID NO: 84886):YKQYE (SEQ ID NO: 84398):DMVVE (SEQ ID NO: 84161), VPEKM (SEQ ID NO: 84360):SPIS-AA¹⁷-LYI (SEQ ID NO: 84886):YKQYE (SEQ ID NO: 84398):NMTVE (SEQ ID NO: 84267), VPTEL (SEQ ID NO: 84378):SPIS-AA¹⁷-LYI (SEQ ID NO: 84886):YKQYE (SEQ ID NO: 84398):EMVVE (SEQ ID NO: 84175), APTKL (SEQ ID NO: 84131):SPIS-AA¹⁷-LYI (SEQ ID NO: 84886):YKQYE (SEQ ID NO: 84398):NMVVR (SEQ ID NO: 84275), APTQL (SEQ ID NO: 84134):SPIS-AA¹⁷-LYI (SEQ ID NO: 84886):YKQYE (SEQ ID NO: 84398):NMVVR (SEQ ID NO: 84275), APTKL (SEQ ID NO: 84131):SPIS-AA¹⁷-LYI (SEQ ID NO: 84886):YKQYE (SEQ ID NO: 84398):NMVVK (SEQ ID NO: 84274), VPTKL (SEQ ID NO: 84381):SPIS-AA¹⁷-LYI (SEQ ID NO: 84886):YKQYE (SEQ ID NO: 84398):EGMSVAE (SEQ ID NO: 84411), VPTKL (SEQ ID NO: 84381):SPIS-AA¹⁷-LYI (SEQ ID NO: 84886):YKQYE (SEQ ID NO: 84398):GMAVS (SEQ ID NO: 84194), TPTKM (SEQ ID NO: 84327):SPIS-AA¹⁷-LYI (SEQ ID NO: 84886):YKQYE (SEQ ID NO: 84398):GMVVD (SEQ ID NO: 84204), VPTRL (SEQ ID NO: 84385):SPIS-AA¹⁷-LYI (SEQ ID NO: 84886):YKQYE (SEQ ID NO: 84398):DMVVE (SEQ ID NO: 84161), APVKT (SEQ ID NO: 84144):SPIS-AA¹⁷-LYI (SEQ ID NO: 84886):YKQYE (SEQ ID NO: 84398):MIVEE (SEQ ID NO: 84241), VPQAL (SEQ ID NO: 84364):SPIS-AA¹⁷-LYI (SEQ ID NO: 84886):YKQYE (SEQ ID NO: 84398):MIVRS (SEQ ID NO: 84243), VSQDL (SEQ ID NO: 84387):SPIS-AA¹⁷-LYI (SEQ ID NO: 84886):YKQYE (SEQ ID NO: 84398):MIVKS (SEQ ID NO: 84242), VPQDL (SEQ ID NO: 84365):SPIS-AA¹⁷-LYI (SEQ ID NO: 84886):YKQYE (SEQ ID NO: 84398):MVVKS (SEQ ID NO: 84256), VPTEE (SEQ ID NO: 84377):SPIS-AA¹⁷-LYI (SEQ ID NO: 84886):YKQYE (SEQ ID NO: 84398):FLQHN (SEQ ID NO: 84184), VPTGQ (SEQ ID NO: 84379):SPIS-AA¹⁷-LYI (SEQ ID NO: 84886):YKQYE (SEQ ID NO: 84398):LEEHS (SEQ ID NO: 84217), SRVHH (SEQ ID NO: 84297):SPIS-AA¹⁷-LYI (SEQ ID NO: 84886):YKQYE (SEQ ID NO: 84398):RLEEH (SEQ ID NO: 84279), TQVQL (SEQ ID NO: 84340):SPIS-AA¹⁷-LYI (SEQ ID NO: 84886):YKQYE (SEQ ID NO: 84398):TLEDH (SEQ ID NO: 84307), VPTEL (SEQ ID NO: 84378):SPIS-AA¹⁷-LFI (SEQ ID NO: 84885):YKQYE (SEQ ID NO: 84398):DMVVE (SEQ ID NO: 84161), VPTKM (SEQ ID NO: 84382):SPIS-AA¹⁷-LFI (SEQ ID NO: 84885):YKQYE (SEQ ID NO: 84398):NMVVE (SEQ ID NO: 84273), VPTEL (SEQ ID NO: 84378):SPIS-AA¹⁷-LFI (SEQ ID NO: 84885):YKQYE (SEQ ID NO: 84398):EMVVE (SEQ ID NO: 84175), VPTKL (SEQ ID NO: 84381):SPIS-AA¹⁷-LFI (SEQ ID NO: 84885):YKQYE (SEQ ID NO: 84398):NMVVE (SEQ ID NO: 84273), VPTQL (SEQ ID NO: 84384):SPIS-AA¹⁷-LFI (SEQ ID NO: 84885):YKQYE (SEQ ID NO: 84398):NMVVE (SEQ ID NO: 84273), VPTKL (SEQ ID NO: 84381):SPIS-AA¹⁷-LFI (SEQ ID NO: 84885):YKQYE (SEQ ID NO: 84398):EGMSVVE (SEQ ID NO: 84416), VPTKL (SEQ ID NO: 84381):SPIS-AA¹⁷-LFI (SEQ ID NO: 84885):YKQYE (SEQ ID NO: 84398):GMVVE (SEQ ID NO: 84205), VPTKM (SEQ ID NO: 84382):SPIS-AA¹⁷-LFI (SEQ ID NO: 84885):YKQYE (SEQ ID NO: 84398):GMVVE (SEQ ID NO: 84205), VPTRL (SEQ ID NO: 84385):SPIS-AA¹⁷-LFI (SEQ ID NO: 84885):YKQYE (SEQ ID NO: 84398):DMVVE (SEQ ID NO: 84161), VPTKT (SEQ ID NO: 84383):SPIS-AA¹⁷-LFI (SEQ ID NO: 84885):YKQYE (SEQ ID NO: 84398):MIVVE (SEQ ID NO: 84245), VPTAL (SEQ ID NO: 84375):SPIS-AA¹⁷-LFI (SEQ ID NO: 84885):YKQYE (SEQ ID NO: 84398):MIVVE (SEQ ID NO: 84245), VPTDL (SEQ ID NO: 84376):SPIS-AA¹⁷-LFI (SEQ ID NO: 84885):YKQYE (SEQ ID NO: 84398):MIVVE (SEQ ID NO: 84245), VPTDL (SEQ ID NO: 84376):SPIS-AA¹⁷-LFI (SEQ ID NO: 84885):YKQYE (SEQ ID NO: 84398):MVVVE (SEQ ID NO: 84259), VPEKM (SEQ ID NO: 84360):SPIS-AA¹⁷-LFI (SEQ ID NO: 84885):YKQYE (SEQ ID NO: 84398):NMTVE (SEQ ID NO: 84267), APTKL (SEQ ID NO: 84131):SPIS-AA¹⁷-LFI (SEQ ID NO: 84885):YKQYE (SEQ ID NO: 84398):NMVVR (SEQ ID NO: 84275), APTQL (SEQ ID NO: 84134):SPIS-AA¹⁷-LFI (SEQ ID NO: 84885):YKQYE (SEQ ID NO: 84398):NMVVR (SEQ ID NO: 84275), APTKL (SEQ ID NO: 84131):SPIS-AA¹⁷-LFI (SEQ ID NO: 84885):YKQYE (SEQ ID NO: 84398):NMVVK (SEQ ID NO: 84274), VPTKL (SEQ ID NO: 84381):SPIS-AA¹⁷-LFI (SEQ ID NO: 84885):YKQYE (SEQ ID NO: 84398):EGMSVAE (SEQ ID NO: 84411), VPTKL (SEQ ID NO: 84381):SPIS-AA¹⁷-LFI (SEQ ID NO: 84885):YKQYE (SEQ ID NO: 84398):GMAVS (SEQ ID NO: 84194), TPTKM (SEQ ID NO: 84327):SPIS-AA¹⁷-LFI (SEQ ID NO: 84885):YKQYE (SEQ ID NO: 84398):GMVVD (SEQ ID NO: 84204), VPARL (SEQ ID NO: 84352):SPIS-AA¹⁷-LFI (SEQ ID NO: 84885):YKQYE (SEQ ID NO: 84398):DMVVE (SEQ ID NO: 84161), APVKT (SEQ ID NO: 84144):SPIS-AA¹⁷-LFI (SEQ ID NO: 84885):YKQYE (SEQ ID NO: 84398):MIVEE (SEQ ID NO: 84241), VPQAL (SEQ ID NO: 84364):SPIS-AA¹⁷-LFI (SEQ ID NO: 84885):YKQYE (SEQ ID NO: 84398):MIVRS (SEQ ID NO: 84243), VSQDL (SEQ ID NO: 84387):SPIS-AA¹⁷-LFI (SEQ ID NO: 84885):YKQYE (SEQ ID NO: 84398):MIVKS (SEQ ID NO: 84242), VPQDL (SEQ ID NO: 84365):SPIS-AA¹⁷-LFI (SEQ ID NO: 84885):YKQYE (SEQ ID NO: 84398):MVVKS (SEQ ID NO: 84256), VPTEE (SEQ ID NO: 84377):SPIS-AA¹⁷-LFI (SEQ ID NO: 84885):YKQYE (SEQ ID NO: 84398):FLQHN (SEQ ID NO: 84184), VPTGQ (SEQ ID NO: 84379):SPIS-AA¹⁷-LFI (SEQ ID NO: 84885):YKQYE (SEQ ID NO: 84398):LEEHS (SEQ ID NO: 84217), SRVHH (SEQ ID NO: 84297):SPIS-AA¹⁷-LFI (SEQ ID NO: 84885):YKQYE (SEQ ID NO: 84398):RLEEH (SEQ ID NO: 84279), TQVQL (SEQ ID NO: 84340):SPIS-AA¹⁷-LFI (SEQ ID NO: 84885):YKQYE (SEQ ID NO: 84398):TLEDH (SEQ ID NO: 84307), APVEL (SEQ ID NO: 84139):KPLS-AA¹⁷-LYV (SEQ ID NO: 84877):DHHKD (SEQ ID NO: 84149):DMVEE (SEQ ID NO: 84157), APVKM (SEQ ID NO: 84143):KPLS-AA¹⁷-LYV (SEQ ID NO: 84877):DHHKD (SEQ ID NO: 84149):NMVEE (SEQ ID NO: 84269), APVEL (SEQ ID NO: 84139):KPLS-AA¹⁷-LYV (SEQ ID NO: 84877):DHHKD (SEQ ID NO: 84149):EMVEE (SEQ ID NO: 84171), APVKL (SEQ ID NO: 84142):KPLS-AA¹⁷-LYV (SEQ ID NO: 84877):DHHKD (SEQ ID NO: 84149):NMVEE (SEQ ID NO: 84269), APVQL (SEQ ID NO: 84145):KPLS-AA¹⁷-LYV (SEQ ID NO: 84877):DHHKD (SEQ ID NO: 84149):NMVEE (SEQ ID NO: 84269), APVKL (SEQ ID NO: 84142):KPLS-AA¹⁷-LYV (SEQ ID NO: 84877):DHHKD (SEQ ID NO: 84149):EGMSVEE (SEQ ID NO: 84412), APVKL (SEQ ID NO: 84142):KPLS-AA¹⁷-LYV (SEQ ID NO: 84877):DHHKD (SEQ ID NO: 84149):GMVEE (SEQ ID NO: 84201), APVKM (SEQ ID NO: 84143):KPLS-AA¹⁷-LYV (SEQ ID NO: 84877):DHHKD (SEQ ID NO: 84149):GMVEE (SEQ ID NO: 84201), APVRL (SEQ ID NO: 84146):KPLS-AA¹⁷-LYV (SEQ ID NO: 84877):DHHKD (SEQ ID NO: 84149):DMVEE (SEQ ID NO: 84157), APVAL (SEQ ID NO: 84136):KPLS-AA¹⁷-LYV (SEQ ID NO: 84877):DHHKD (SEQ ID NO: 84149):MIVEE (SEQ ID NO: 84241), APVDL (SEQ ID NO: 84137):KPLS-AA¹⁷-LYV (SEQ ID NO: 84877):DHHKD (SEQ ID NO: 84149):MIVEE (SEQ ID NO: 84241), APVDL (SEQ ID NO: 84137):KPLS-AA¹⁷-LYV (SEQ ID NO: 84877):DHHKD (SEQ ID NO: 84149):MVVEE (SEQ ID NO: 84255), VPTEL (SEQ ID NO: 84378):KPLS-AA¹⁷-LYV (SEQ ID NO: 84877):DHHKD (SEQ ID NO: 84149):DMVVE (SEQ ID NO: 84161), VPEKM (SEQ ID NO: 84360):KPLS-AA¹⁷-LYV (SEQ ID NO: 84877):DHHKD (SEQ ID NO: 84149):NMTVE (SEQ ID NO: 84267), VPTEL (SEQ ID NO: 84378):KPLS-AA¹⁷-LYV (SEQ ID NO: 84877):DHHKD (SEQ ID NO: 84149):EMVVE (SEQ ID NO: 84175), APTKL (SEQ ID NO: 84131):KPLS-AA¹⁷-LYV (SEQ ID NO: 84877):DHHKD (SEQ ID NO: 84149):NMVVR (SEQ ID NO: 84275), APTQL (SEQ ID NO: 84134):KPLS-AA¹⁷-LYV (SEQ ID NO: 84877):DHHKD (SEQ ID NO: 84149):NMVVR (SEQ ID NO: 84275), APTKL (SEQ ID NO: 84131):KPLS-AA¹⁷-LYV (SEQ ID NO: 84877):DHHKD (SEQ ID NO: 84149):NMVVK (SEQ ID NO: 84274), VPTKL (SEQ ID NO: 84381):KPLS-AA¹⁷-LYV (SEQ ID NO: 84877):DHHKD (SEQ ID NO: 84149):EGMSVAE (SEQ ID NO: 84411), VPTKL (SEQ ID NO: 84381):KPLS-AA¹⁷-LYV (SEQ ID NO: 84877):DHHKD (SEQ ID NO: 84149):GMAVS (SEQ ID NO: 84194), TPTKM (SEQ ID NO: 84327):KPLS-AA¹⁷-LYV (SEQ ID NO: 84877):DHHKD (SEQ ID NO: 84149):GMVVD (SEQ ID NO: 84204), VPARL (SEQ ID NO: 84352):KPLS-AA¹⁷-LYV (SEQ ID NO: 84877):DHHKD (SEQ ID NO: 84149):DMVVE (SEQ ID NO: 84161), VPTRL (SEQ ID NO: 84385):KPLS-AA¹⁷-LYV (SEQ ID NO: 84877):DHHKD (SEQ ID NO: 84149):DMVVE (SEQ ID NO: 84161), VPQAL (SEQ ID NO: 84364):KPLS-AA¹⁷-LYV (SEQ ID NO: 84877):DHHKD (SEQ ID NO: 84149):MIVRS (SEQ ID NO: 84243), VSQDL (SEQ ID NO: 84387):KPLS-AA¹⁷-LYV (SEQ ID NO: 84877):DHHKD (SEQ ID NO: 84149):MIVKS (SEQ ID NO: 84242), VPQDL (SEQ ID NO: 84365):KPLS-AA¹⁷-LYV (SEQ ID NO: 84877):DHHKD (SEQ ID NO: 84149):MVVKS (SEQ ID NO: 84256), VPTEE (SEQ ID NO: 84377):KPLS-AA¹⁷-LYV (SEQ ID NO: 84877):DHHKD (SEQ ID NO: 84149):FLQHN (SEQ ID NO: 84184), VPTGQ (SEQ ID NO: 84379):KPLS-AA¹⁷-LYV (SEQ ID NO: 84877):DHHKD (SEQ ID NO: 84149):LEEHS (SEQ ID NO: 84217), SRVHH (SEQ ID NO: 84297):KPLS-AA¹⁷-LYV (SEQ ID NO: 84877):DHHKD (SEQ ID NO: 84149):RLEEH (SEQ ID NO: 84279), TQVQL (SEQ ID NO: 84340):KPLS-AA¹⁷-LYV (SEQ ID NO: 84877):DHHKD (SEQ ID NO: 84149):TLEDH (SEQ ID NO: 84307), VPQEL (SEQ ID NO: 84367):EPLP-AA¹⁷-VYY (SEQ ID NO: 84875):EQLSN (SEQ ID NO: 84178):DMVRS (SEQ ID NO: 84159), VPQKM (SEQ ID NO: 84371):EPLP-AA¹⁷-VYY (SEQ ID NO: 84875):EQLSN (SEQ ID NO: 84178):NMVRS (SEQ ID NO: 84271), VPQEL (SEQ ID NO: 84367):EPLP-AA¹⁷-VYY (SEQ ID NO: 84875):EQLSN (SEQ ID NO: 84178):EMVRS (SEQ ID NO: 84173), VPQKL (SEQ ID NO: 84370):EPLP-AA¹⁷-VYY (SEQ ID NO: 84875):EQLSN (SEQ ID NO: 84178):NMVRS (SEQ ID NO: 84271), VPQQL (SEQ ID NO: 84373):EPLP-AA¹⁷-VYY (SEQ ID NO: 84875):EQLSN (SEQ ID NO: 84178):NMVRS (SEQ ID NO: 84271), VPQKL (SEQ ID NO: 84370):EPLP-AA¹⁷-VYY (SEQ ID NO: 84875):EQLSN (SEQ ID NO: 84178):EGMSVRS (SEQ ID NO: 84414), VPQKL (SEQ ID NO: 84370):EPLP-AA¹⁷-VYY (SEQ ID NO: 84875):EQLSN (SEQ ID NO: 84178):GMVRS (SEQ ID NO: 84203), VPQKM (SEQ ID NO: 84371):EPLP-AA¹⁷-VYY (SEQ ID NO: 84875):EQLSN (SEQ ID NO: 84178):GMVRS (SEQ ID NO: 84203), VPQRL (SEQ ID NO: 84374):EPLP-AA¹⁷-VYY (SEQ ID NO: 84875):EQLSN (SEQ ID NO: 84178):DMVRS (SEQ ID NO: 84159), VPQKT (SEQ ID NO: 84372):EPLP-AA¹⁷-VYY (SEQ ID NO: 84875):EQLSN (SEQ ID NO: 84178):MIVRS (SEQ ID NO: 84243), VPQDL (SEQ ID NO: 84365):EPLP-AA¹⁷-VYY (SEQ ID NO: 84875):EQLSN (SEQ ID NO: 84178):MIVRS (SEQ ID NO: 84243), VPQDL (SEQ ID NO: 84365):EPLP-AA¹⁷-VYY (SEQ ID NO: 84875):EQLSN (SEQ ID NO: 84178):MVVRS (SEQ ID NO: 84257), VPTEL (SEQ ID NO: 84378):EPLP-AA¹⁷-VYY (SEQ ID NO: 84875):EQLSN (SEQ ID NO: 84178):DMVVE (SEQ ID NO: 84161), VPEKM (SEQ ID NO: 84360):EPLP-AA¹⁷-VYY (SEQ ID NO: 84875):EQLSN (SEQ ID NO: 84178):NMTVE (SEQ ID NO: 84267), VPTEL (SEQ ID NO: 84378):EPLP-AA¹⁷-VYY (SEQ ID NO: 84875):EQLSN (SEQ ID NO: 84178):EMVVE (SEQ ID NO: 84175), APTKL (SEQ ID NO: 84131):EPLP-AA¹⁷-VYY (SEQ ID NO: 84875):EQLSN (SEQ ID NO: 84178):NMVVR (SEQ ID NO: 84275), APTQL (SEQ ID NO: 84134):EPLP-AA¹⁷-VYY (SEQ ID NO: 84875):EQLSN (SEQ ID NO: 84178):NMVVR (SEQ ID NO: 84275), APTKL (SEQ ID NO: 84131):EPLP-AA¹⁷-VYY (SEQ ID NO: 84875):EQLSN (SEQ ID NO: 84178):NMVVK (SEQ ID NO: 84274), VPTKL (SEQ ID NO: 84381):EPLP-AA¹⁷-VYY (SEQ ID NO: 84875):EQLSN (SEQ ID NO: 84178):EGMSVAE (SEQ ID NO: 84411), VPTKL (SEQ ID NO: 84381):EPLP-AA¹⁷-VYY (SEQ ID NO: 84875):EQLSN (SEQ ID NO: 84178):GMAVS (SEQ ID NO: 84194), TPTKM (SEQ ID NO: 84327):EPLP-AA¹⁷-VYY (SEQ ID NO: 84875):EQLSN (SEQ ID NO: 84178):GMVVD (SEQ ID NO: 84204), VPARL (SEQ ID NO: 84352):EPLP-AA¹⁷-VYY (SEQ ID NO: 84875):EQLSN (SEQ ID NO: 84178):DMVVE (SEQ ID NO: 84161), VPTRL (SEQ ID NO: 84385):EPLP-AA¹⁷-VYY (SEQ ID NO: 84875):EQLSN (SEQ ID NO: 84178):DMVVE (SEQ ID NO: 84161), APVKT (SEQ ID NO: 84144):EPLP-AA¹⁷-VYY (SEQ ID NO: 84875):EQLSN (SEQ ID NO: 84178):MIVEE (SEQ ID NO: 84241), VSQDL (SEQ ID NO: 84387):EPLP-AA¹⁷-VYY (SEQ ID NO: 84875):EQLSN (SEQ ID NO: 84178):MIVKS (SEQ ID NO: 84242), VPQDL (SEQ ID NO: 84365):EPLP-AA¹⁷-VYY (SEQ ID NO: 84875):EQLSN (SEQ ID NO: 84178):MVVKS (SEQ ID NO: 84256), VPTEE (SEQ ID NO: 84377):EPLP-AA¹⁷-VYY (SEQ ID NO: 84875):EQLSN (SEQ ID NO: 84178):FLQHN (SEQ ID NO: 84184), VPTGQ (SEQ ID NO: 84379):EPLP-AA¹⁷-VYY (SEQ ID NO: 84875):EQLSN (SEQ ID NO: 84178):LEEHS (SEQ ID NO: 84217), SRVHH (SEQ ID NO: 84297):EPLP-AA¹⁷-VYY (SEQ ID NO: 84875):EQLSN (SEQ ID NO: 84178):RLEEH (SEQ ID NO: 84279), TQVQL (SEQ ID NO: 84340):EPLP-AA¹⁷-VYY (SEQ ID NO: 84875):EQLSN (SEQ ID NO: 84178):TLEDH (SEQ ID NO: 84307), VSQEL (SEQ ID NO: 84389):EPLT-AA¹⁷-LYY (SEQ ID NO: 84876):EQLSN (SEQ ID NO: 84178):DMVKS (SEQ ID NO: 84158), VSQKM (SEQ ID NO: 84393):EPLT-AA¹⁷-LYY (SEQ ID NO: 84876):EQLSN (SEQ ID NO: 84178):NMVKS (SEQ ID NO: 84270), VSQEL (SEQ ID NO: 84389):EPLT-AA¹⁷-LYY (SEQ ID NO: 84876):EQLSN (SEQ ID NO: 84178):EMVKS (SEQ ID NO: 84172), VSQKL (SEQ ID NO: 84392):EPLT-AA¹⁷-LYY (SEQ ID NO: 84876):EQLSN (SEQ ID NO: 84178):NMVKS (SEQ ID NO: 84270), VSQQL (SEQ ID NO: 84395):EPLT-AA¹⁷-LYY (SEQ ID NO: 84876):EQLSN (SEQ ID NO: 84178):NMVKS (SEQ ID NO: 84270), VSQKL (SEQ ID NO: 84392):EPLT-AA¹⁷-LYY (SEQ ID NO: 84876):EQLSN (SEQ ID NO: 84178):EGMSVKS (SEQ ID NO: 84413), VSQKL (SEQ ID NO: 84392):EPLT-AA¹⁷-LYY (SEQ ID NO: 84876):EQLSN (SEQ ID NO: 84178):GMVKS (SEQ ID NO: 84202), VSQKM (SEQ ID NO: 84393):EPLT-AA¹⁷-LYY (SEQ ID NO: 84876):EQLSN (SEQ ID NO: 84178):GMVKS (SEQ ID NO: 84202), VSQRL (SEQ ID NO: 84396):EPLT-AA¹⁷-LYY (SEQ ID NO: 84876):EQLSN (SEQ ID NO: 84178):DMVKS (SEQ ID NO: 84158), VSQKT (SEQ ID NO: 84394):EPLT-AA¹⁷-LYY (SEQ ID NO: 84876):EQLSN (SEQ ID NO: 84178):MIVKS (SEQ ID NO: 84242), VSQAL (SEQ ID NO: 84386):EPLT-AA¹⁷-LYY (SEQ ID NO: 84876):EQLSN (SEQ ID NO: 84178):MIVKS (SEQ ID NO: 84242), VSQDL (SEQ ID NO: 84387):EPLT-AA¹⁷-LYY (SEQ ID NO: 84876):EQLSN (SEQ ID NO: 84178):MVVKS (SEQ ID NO: 84256), VPTEL (SEQ ID NO: 84378):EPLT-AA¹⁷-LYY (SEQ ID NO: 84876):EQLSN (SEQ ID NO: 84178):DMVVE (SEQ ID NO: 84161), VPEKM (SEQ ID NO: 84360):EPLT-AA¹⁷-LYY (SEQ ID NO: 84876):EQLSN (SEQ ID NO: 84178):NMTVE (SEQ ID NO: 84267), VPTEL (SEQ ID NO: 84378):EPLT-AA¹⁷-LYY (SEQ ID NO: 84876):EQLSN (SEQ ID NO: 84178):EMVVE (SEQ ID NO: 84175), APTKL (SEQ ID NO: 84131):EPLT-AA¹⁷-LYY (SEQ ID NO: 84876):EQLSN (SEQ ID NO: 84178):NMVVR (SEQ ID NO: 84275), APTQL (SEQ ID NO: 84134):EPLT-AA¹⁷-LYY (SEQ ID NO: 84876):EQLSN (SEQ ID NO: 84178):NMVVR (SEQ ID NO: 84275), APTKL (SEQ ID NO: 84131):EPLT-AA¹⁷-LYY (SEQ ID NO: 84876):EQLSN (SEQ ID NO: 84178):NMVVK (SEQ ID NO: 84274), VPTKL (SEQ ID NO: 84381):EPLT-AA¹⁷-LYY (SEQ ID NO: 84876):EQLSN (SEQ ID NO: 84178):EGMSVAE (SEQ ID NO: 84411), VPTKL (SEQ ID NO: 84381):EPLT-AA¹⁷-LYY (SEQ ID NO: 84876):EQLSN (SEQ ID NO: 84178):GMAVS (SEQ ID NO: 84194), TPTKM (SEQ ID NO: 84327):EPLT-AA¹⁷-LYY (SEQ ID NO: 84876):EQLSN (SEQ ID NO: 84178):GMVVD (SEQ ID NO: 84204), VPARL (SEQ ID NO: 84352):EPLT-AA¹⁷-LYY (SEQ ID NO: 84876):EQLSN (SEQ ID NO: 84178):DMVVE (SEQ ID NO: 84161), VPTRL (SEQ ID NO: 84385):EPLT-AA¹⁷-LYY (SEQ ID NO: 84876):EQLSN (SEQ ID NO: 84178):DMVVE (SEQ ID NO: 84161), APVKT (SEQ ID NO: 84144):EPLT-AA¹⁷-LYY (SEQ ID NO: 84876):EQLSN (SEQ ID NO: 84178):MIVEE (SEQ ID NO: 84241), VPQAL (SEQ ID NO: 84364):EPLT-AA¹⁷-LYY (SEQ ID NO: 84876):EQLSN (SEQ ID NO: 84178):MIVRS (SEQ ID NO: 84243), VPTEE (SEQ ID NO: 84377):EPLT-AA¹⁷-LYY (SEQ ID NO: 84876):EQLSN (SEQ ID NO: 84178):FLQHN (SEQ ID NO: 84184), VPTGQ (SEQ ID NO: 84379):EPLT-AA¹⁷-LYY (SEQ ID NO: 84876):EQLSN (SEQ ID NO: 84178):LEEHS (SEQ ID NO: 84217), SRVHH (SEQ ID NO: 84297):EPLT-AA¹⁷-LYY (SEQ ID NO: 84876):EQLSN (SEQ ID NO: 84178):RLEEH (SEQ ID NO: 84279), TQVQL (SEQ ID NO: 84340):EPLT-AA¹⁷-LYY (SEQ ID NO: 84876):EQLSN (SEQ ID NO: 84178):TLEDH (SEQ ID NO: 84307), VPQEL (SEQ ID NO: 84367):EPLT-AA¹⁷-LYY (SEQ ID NO: 84876):EQLSN (SEQ ID NO: 84178):DMVKS (SEQ ID NO: 84158), VPQKM (SEQ ID NO: 84371):EPLT-AA¹⁷-LYY (SEQ ID NO: 84876):EQLSN (SEQ ID NO: 84178):NMVKS (SEQ ID NO: 84270), VPQEL (SEQ ID NO: 84367):EPLT-AA¹⁷-LYY (SEQ ID NO: 84876):EQLSN (SEQ ID NO: 84178):EMVKS (SEQ ID NO: 84172), VPQKL (SEQ ID NO: 84370):EPLT-AA¹⁷-LYY (SEQ ID NO: 84876):EQLSN (SEQ ID NO: 84178):NMVKS (SEQ ID NO: 84270), VPQQL (SEQ ID NO: 84373):EPLT-AA¹⁷-LYY (SEQ ID NO: 84876):EQLSN (SEQ ID NO: 84178):NMVKS (SEQ ID NO: 84270), VPQKL (SEQ ID NO: 84370):EPLT-AA¹⁷-LYY (SEQ ID NO: 84876):EQLSN (SEQ ID NO: 84178):EGMSVKS (SEQ ID NO: 84413), VPQKL (SEQ ID NO: 84370):EPLT-AA¹⁷-LYY (SEQ ID NO: 84876):EQLSN (SEQ ID NO: 84178):GMVKS (SEQ ID NO: 84202), VPQKM (SEQ ID NO: 84371):EPLT-AA¹⁷-LYY (SEQ ID NO: 84876):EQLSN (SEQ ID NO: 84178):GMVKS (SEQ ID NO: 84202), VPQRL (SEQ ID NO: 84374):EPLT-AA¹⁷-LYY (SEQ ID NO: 84876):EQLSN (SEQ ID NO: 84178):DMVKS (SEQ ID NO: 84158), VPQKT (SEQ ID NO: 84372):EPLT-AA¹⁷-LYY (SEQ ID NO: 84876):EQLSN (SEQ ID NO: 84178):MIVKS (SEQ ID NO: 84242), VPQAL (SEQ ID NO: 84364):EPLT-AA¹⁷-LYY (SEQ ID NO: 84876):EQLSN (SEQ ID NO: 84178):MIVKS (SEQ ID NO: 84242), VPQDL (SEQ ID NO: 84365):EPLT-AA¹⁷-LYY (SEQ ID NO: 84876):EQLSN (SEQ ID NO: 84178):MIVKS (SEQ ID NO: 84242), VPTGQ (SEQ ID NO: 84379):SNIT-AA¹⁷-QIM (SEQ ID NO: 84883):IGEMS (SEQ ID NO: 84209):LEQHN (SEQ ID NO: 84218), VPTEL (SEQ ID NO: 84378):SNIT-AA¹⁷-QIM (SEQ ID NO: 84883):IGEMS (SEQ ID NO: 84209):DMVVE (SEQ ID NO: 84161), VPEKM (SEQ ID NO: 84360):SNIT-AA¹⁷-QIM (SEQ ID NO: 84883):IGEMS (SEQ ID NO: 84209):NMTVE (SEQ ID NO: 84267), VPTEL (SEQ ID NO: 84378):SNIT-AA¹⁷-QIM (SEQ ID NO: 84883):IGEMS (SEQ ID NO: 84209):EMVVE (SEQ ID NO: 84175), APTKL (SEQ ID NO: 84131):SNIT-AA¹⁷-QIM (SEQ ID NO: 84883):IGEMS (SEQ ID NO: 84209):NMVVR (SEQ ID NO: 84275), APTQL (SEQ ID NO: 84134):SNIT-AA¹⁷-QIM (SEQ ID NO: 84883):IGEMS (SEQ ID NO: 84209):NMVVR (SEQ ID NO: 84275), APTKL (SEQ ID NO: 84131):SNIT-AA¹⁷-QIM (SEQ ID NO: 84883):IGEMS (SEQ ID NO: 84209):NMVVK (SEQ ID NO: 84274), VPTKL (SEQ ID NO: 84381):SNIT-AA¹⁷-QIM (SEQ ID NO: 84883):IGEMS (SEQ ID NO: 84209):EGMSVAE (SEQ ID NO: 84411), VPTKL (SEQ ID NO: 84381):SNIT-AA¹⁷-QIM (SEQ ID NO: 84883):IGEMS (SEQ ID NO: 84209):GMAVS (SEQ ID NO: 84194), TPTKM (SEQ ID NO: 84327):SNIT-AA¹⁷-QIM (SEQ ID NO: 84883):IGEMS (SEQ ID NO: 84209):GMVVD (SEQ ID NO: 84204), VPARL (SEQ ID NO: 84352):SNIT-AA¹⁷-QIM (SEQ ID NO: 84883):IGEMS (SEQ ID NO: 84209):DMVVE (SEQ ID NO: 84161), VPTRL (SEQ ID NO: 84385):SNIT-AA¹⁷-QIM (SEQ ID NO: 84883):IGEMS (SEQ ID NO: 84209):DMVVE (SEQ ID NO: 84161), APVKT (SEQ ID NO: 84144):SNIT-AA¹⁷-QIM (SEQ ID NO: 84883):IGEMS (SEQ ID NO: 84209):MIVEE (SEQ ID NO: 84241), VPQAL (SEQ ID NO: 84364):SNIT-AA¹⁷-QIM (SEQ ID NO: 84883):IGEMS (SEQ ID NO: 84209):MIVRS (SEQ ID NO: 84243), VSQDL (SEQ ID NO: 84387):SNIT-AA¹⁷-QIM (SEQ ID NO: 84883):IGEMS (SEQ ID NO: 84209):MIVKS (SEQ ID NO: 84242), VPQDL (SEQ ID NO: 84365):SNIT-AA¹⁷-QIM (SEQ ID NO: 84883):IGEMS (SEQ ID NO: 84209):MVVKS (SEQ ID NO: 84256), VPTGQ (SEQ ID NO: 84379):SNIT-AA¹⁷-QIM (SEQ ID NO: 84883):IGEMS (SEQ ID NO: 84209):LEEHS (SEQ ID NO: 84217), SRVHH (SEQ ID NO: 84297):SNIT-AA¹⁷-QIM (SEQ ID NO: 84883):IGEMS (SEQ ID NO: 84209):RLEEH (SEQ ID NO: 84279), TQVQL (SEQ ID NO: 84340):SNIT-AA¹⁷-QIM (SEQ ID NO: 84883):IGEMS (SEQ ID NO: 84209):TLEDH (SEQ ID NO: 84307), VPTEE (SEQ ID NO: 84377):SNIT-AA¹⁷-QIM (SEQ ID NO: 84883):LGEMS (SEQ ID NO: 84228):FLEHS (SEQ ID NO: 84183), VPTEL (SEQ ID NO: 84378):SNIT-AA¹⁷-QIM (SEQ ID NO: 84883):LGEMS (SEQ ID NO: 84228):DMVVE (SEQ ID NO: 84161), VPEKM (SEQ ID NO: 84360):SNIT-AA¹⁷-QIM (SEQ ID NO: 84883):LGEMS (SEQ ID NO: 84228):NMTVE (SEQ ID NO: 84267), VPTEL (SEQ ID NO: 84378):SNIT-AA¹⁷-QIM (SEQ ID NO: 84883):LGEMS (SEQ ID NO: 84228):EMVVE (SEQ ID NO: 84175), APTKL (SEQ ID NO: 84131):SNIT-AA¹⁷-QIM (SEQ ID NO: 84883):LGEMS (SEQ ID NO: 84228):NMVVR (SEQ ID NO: 84275), APTQL (SEQ ID NO: 84134):SNIT-AA¹⁷-QIM (SEQ ID NO: 84883):LGEMS (SEQ ID NO: 84228):NMVVR (SEQ ID NO: 84275), APTKL (SEQ ID NO: 84131):SNIT-AA¹⁷-QIM (SEQ ID NO: 84883):LGEMS (SEQ ID NO: 84228):NMVVK (SEQ ID NO: 84274), VPTKL (SEQ ID NO: 84381):SNIT-AA¹⁷-QIM (SEQ ID NO: 84883):LGEMS (SEQ ID NO: 84228):EGMSVAE (SEQ ID NO: 84411), VPTKL (SEQ ID NO: 84381):SNIT-AA¹⁷-QIM (SEQ ID NO: 84883):LGEMS (SEQ ID NO: 84228):GMAVS (SEQ ID NO: 84194), TPTKM (SEQ ID NO: 84327):SNIT-AA¹⁷-QIM (SEQ ID NO: 84883):LGEMS (SEQ ID NO: 84228):GMVVD (SEQ ID NO: 84204), VPARL (SEQ ID NO: 84352):SNIT-AA¹⁷-QIM (SEQ ID NO: 84883):LGEMS (SEQ ID NO: 84228):DMVVE (SEQ ID NO: 84161), VPTRL (SEQ ID NO: 84385):SNIT-AA¹⁷-QIM (SEQ ID NO: 84883):LGEMS (SEQ ID NO: 84228):DMVVE (SEQ ID NO: 84161), APVKT (SEQ ID NO: 84144):SNIT-AA¹⁷-QIM (SEQ ID NO: 84883):LGEMS (SEQ ID NO: 84228):MIVEE (SEQ ID NO: 84241), VPQAL (SEQ ID NO: 84364):SNIT-AA¹⁷-QIM (SEQ ID NO: 84883):LGEMS (SEQ ID NO: 84228):MIVRS (SEQ ID NO: 84243), VSQDL (SEQ ID NO: 84387):SNIT-AA¹⁷-QIM (SEQ ID NO: 84883):LGEMS (SEQ ID NO: 84228):MIVKS (SEQ ID NO: 84242), VPQDL (SEQ ID NO: 84365):SNIT-AA¹⁷-QIM (SEQ ID NO: 84883):LGEMS (SEQ ID NO: 84228):MVVKS (SEQ ID NO: 84256), VPTEE (SEQ ID NO: 84377):SNIT-AA¹⁷-QIM (SEQ ID NO: 84883):LGEMS (SEQ ID NO: 84228):FLQHN (SEQ ID NO: 84184), SRVHH (SEQ ID NO: 84297):SNIT-AA¹⁷-QIM (SEQ ID NO: 84883):LGEMS (SEQ ID NO: 84228):RLEEH (SEQ ID NO: 84279), TQVQL (SEQ ID NO: 84340):SNIT-AA¹⁷-QIM (SEQ ID NO: 84883):LGEMS (SEQ ID NO: 84228):TLEDH (SEQ ID NO: 84307), SRVQL (SEQ ID NO: 84301):RSVK-AA¹⁷-AKV (SEQ ID NO: 84880):KEVQV (SEQ ID NO: 84210):TLEEH (SEQ ID NO: 84308), VPTEL (SEQ ID NO: 84378):RSVK-AA¹⁷-AKV (SEQ ID NO: 84880):KEVQV (SEQ ID NO: 84210):DMVVE (SEQ ID NO: 84161), VPEKM (SEQ ID NO: 84360):RSVK-AA¹⁷-AKV (SEQ ID NO: 84880):KEVQV (SEQ ID NO: 84210):NMTVE (SEQ ID NO: 84267), VPTEL (SEQ ID NO: 84378):RSVK-AA¹⁷-AKV (SEQ ID NO: 84880):KEVQV (SEQ ID NO: 84210):EMVVE (SEQ ID NO: 84175), APTKL (SEQ ID NO: 84131):RSVK-AA¹⁷-AKV (SEQ ID NO: 84880):KEVQV (SEQ ID NO: 84210):NMVVR (SEQ ID NO: 84275), APTQL (SEQ ID NO: 84134):RSVK-AA¹⁷-AKV (SEQ ID NO: 84880):KEVQV (SEQ ID NO: 84210):NMVVR (SEQ ID NO: 84275), APTKL (SEQ ID NO: 84131):RSVK-AA¹⁷-AKV (SEQ ID NO: 84880):KEVQV (SEQ ID NO: 84210):NMVVK (SEQ ID NO: 84274), VPTKL (SEQ ID NO: 84381):RSVK-AA¹⁷-AKV (SEQ ID NO: 84880):KEVQV (SEQ ID NO: 84210):EGMSVAE (SEQ ID NO: 84411), VPTKL (SEQ ID NO: 84381):RSVK-AA¹⁷-AKV (SEQ ID NO: 84880):KEVQV (SEQ ID NO: 84210):GMAVS (SEQ ID NO: 84194), TPTKM (SEQ ID NO: 84327):RSVK-AA¹⁷-AKV (SEQ ID NO: 84880):KEVQV (SEQ ID NO: 84210):GMVVD (SEQ ID NO: 84204), VPARL (SEQ ID NO: 84352):RSVK-AA¹⁷-AKV (SEQ ID NO: 84880):KEVQV (SEQ ID NO: 84210):DMVVE (SEQ ID NO: 84161), VPTRL (SEQ ID NO: 84385):RSVK-AA¹⁷-AKV (SEQ ID NO: 84880):KEVQV (SEQ ID NO: 84210):DMVVE (SEQ ID NO: 84161), APVKT (SEQ ID NO: 84144):RSVK-AA¹⁷-AKV (SEQ ID NO: 84880):KEVQV (SEQ ID NO: 84210):MIVEE (SEQ ID NO: 84241), VPQAL (SEQ ID NO: 84364):RSVK-AA¹⁷-AKV (SEQ ID NO: 84880):KEVQV (SEQ ID NO: 84210):MIVRS (SEQ ID NO: 84243), VSQDL (SEQ ID NO: 84387):RSVK-AA¹⁷-AKV (SEQ ID NO: 84880):KEVQV (SEQ ID NO: 84210):MIVKS (SEQ ID NO: 84242), VPQDL (SEQ ID NO: 84365):RSVK-AA¹⁷-AKV (SEQ ID NO: 84880):KEVQV (SEQ ID NO: 84210):MVVKS (SEQ ID NO: 84256), VPTEE (SEQ ID NO: 84377):RSVK-AA¹⁷-AKV (SEQ ID NO: 84880):KEVQV (SEQ ID NO: 84210):FLQHN (SEQ ID NO: 84184), VPTGQ (SEQ ID NO: 84379):RSVK-AA¹⁷-AKV (SEQ ID NO: 84880):KEVQV (SEQ ID NO: 84210):LEEHS (SEQ ID NO: 84217), TQVQL (SEQ ID NO: 84340):RSVK-AA¹⁷-AKV (SEQ ID NO: 84880):KEVQV (SEQ ID NO: 84210):TLEDH (SEQ ID NO: 84307), TQVHH (SEQ ID NO: 84336):RPVQ-AA¹⁷-RKI (SEQ ID NO: 84879):KKATV (SEQ ID NO: 84212):RLEDH (SEQ ID NO: 84278), VPTEL (SEQ ID NO: 84378):RPVQ-AA¹⁷-RKI (SEQ ID NO: 84879):KKATV (SEQ ID NO: 84212):DMVVE (SEQ ID NO: 84161), VPEKM (SEQ ID NO: 84360):RPVQ-AA¹⁷-RKI (SEQ ID NO: 84879):KKATV (SEQ ID NO: 84212):NMTVE (SEQ ID NO: 84267), VPTEL (SEQ ID NO: 84378):RPVQ-AA¹⁷-RKI (SEQ ID NO: 84879):KKATV (SEQ ID NO: 84212):EMVVE (SEQ ID NO: 84175), APTKL (SEQ ID NO: 84131):RPVQ-AA¹⁷-RKI (SEQ ID NO: 84879):KKATV (SEQ ID NO: 84212):NMVVR (SEQ ID NO: 84275), APTQL (SEQ ID NO: 84134):RPVQ-AA¹⁷-RKI (SEQ ID NO: 84879):KKATV (SEQ ID NO: 84212):NMVVR (SEQ ID NO: 84275), APTKL (SEQ ID NO: 84131):RPVQ-AA¹⁷-RKI (SEQ ID NO: 84879):KKATV (SEQ ID NO: 84212):NMVVK (SEQ ID NO: 84274), VPTKL (SEQ ID NO: 84381):RPVQ-AA¹⁷-RKI (SEQ ID NO: 84879):KKATV (SEQ ID NO: 84212):EGMSVAE (SEQ ID NO: 84411), VPTKL (SEQ ID NO: 84381):RPVQ-AA¹⁷-RKI (SEQ ID NO: 84879):KKATV (SEQ ID NO: 84212):GMAVS (SEQ ID NO: 84194), TPTKM (SEQ ID NO: 84327):RPVQ-AA¹⁷-RKI (SEQ ID NO: 84879):KKATV (SEQ ID NO: 84212):GMVVD (SEQ ID NO: 84204), VPARL (SEQ ID NO: 84352):RPVQ-AA¹⁷-RKI (SEQ ID NO: 84879):KKATV (SEQ ID NO: 84212):DMVVE (SEQ ID NO: 84161), VPTRL (SEQ ID NO: 84385):RPVQ-AA¹⁷-RKI (SEQ ID NO: 84879):KKATV (SEQ ID NO: 84212):DMVVE (SEQ ID NO: 84161), APVKT (SEQ ID NO: 84144):RPVQ-AA¹⁷-RKI (SEQ ID NO: 84879):KKATV (SEQ ID NO: 84212):MIVEE (SEQ ID NO: 84241), VPQAL (SEQ ID NO: 84364):RPVQ-AA¹⁷-RKI (SEQ ID NO: 84879):KKATV (SEQ ID NO: 84212):MIVRS (SEQ ID NO: 84243), VSQDL (SEQ ID NO: 84387):RPVQ-AA¹⁷-RKI (SEQ ID NO: 84879):KKATV (SEQ ID NO: 84212):MIVKS (SEQ ID NO: 84242), VPQDL (SEQ ID NO: 84365):RPVQ-AA¹⁷-RKI (SEQ ID NO: 84879):KKATV (SEQ ID NO: 84212):MVVKS (SEQ ID NO: 84256), VPTEE (SEQ ID NO: 84377):RPVQ-AA¹⁷-RKI (SEQ ID NO: 84879):KKATV (SEQ ID NO: 84212):FLQHN (SEQ ID NO: 84184), VPTGQ (SEQ ID NO: 84379):RPVQ-AA¹⁷-RKI (SEQ ID NO: 84879):KKATV (SEQ ID NO: 84212):LEEHS (SEQ ID NO: 84217) and SRVHH (SEQ ID NO: 84297):RPVQ-AA¹⁷-RKI (SEQ ID NO: 84879):KKATV (SEQ ID NO: 84212):RLEEH (SEQ ID NO: 84279); and wherein AA¹⁷ is selected from the group consisting of G, A, V, L, I, P, F, M, W, T and S (in particular is selected from the group consisting of M, I, L, V and T).

[0399] In particular, in certain embodiments, the quadruplet PEP9:PEP1:PEP2:PEP10 is selected from the group consisting of GIPEPXXVPTKM (SEQ ID NO: 84720):SAIS (SEQ ID NO: 84116):LKNYQ (SEQ ID NO: 84230):NMVVESXAXR (SEQ ID NO: 84622), SIPKAXXVPTEL (SEQ ID NO: 84830):SAIS (SEQ ID NO: 84116):LKNYQ (SEQ ID NO: 84230):EMVVEGXGXR (SEQ ID NO: 84529), HVTKPTXVPTKL (SEQ ID NO: 84750):SAIS (SEQ ID NO: 84116):LKNYQ (SEQ ID NO: 84230):NMVVESXGXH (SEQ ID NO: 84623), YVPKPXXVPTKL (SEQ ID NO: 84870):SAIS (SEQ ID NO: 84116):LKNYQ (SEQ ID NO: 84230):NMVVESXGXH (SEQ ID NO: 84623), TVPKPXXVPTQL (SEQ ID NO: 84860):SAIS (SEQ ID NO: 84116):LKNYQ (SEQ ID NO: 84230):NMVVEAXGXH (SEQ ID NO: 84621), AVPKAXXVPTKL (SEQ ID NO: 84710):SAIS (SEQ ID NO: 84116):LKNYQ (SEQ ID NO: 84230):NMVVEAXGXH (SEQ ID NO: 84621), KVGKAXXVPTKL (SEQ ID NO: 84780):SAIS (SEQ ID NO: 84116):LKNYQ (SEQ ID NO: 84230):EGMSVVEXGXR (SEQ ID NO: 84641), KASKAXXVPTKL (SEQ ID NO: 84760):SAIS (SEQ ID NO: 84116):LKNYQ (SEQ ID NO: 84230):GMVVEEXGXR (SEQ ID NO: 84568), GSAGPXXVPTKM (SEQ ID NO: 84730):SAIS (SEQ ID NO: 84116):LKNYQ (SEQ ID NO: 84230):GMVVERXGXS (SEQ ID NO: 84569), AAPASXXVPTRL (SEQ ID NO: 84680):SAIS (SEQ ID NO: 84116):LKNYQ (SEQ ID NO: 84230):DMVVEAXGXR (SEQ ID NO: 84509), STPPTXXVPTRL (SEQ ID NO: 84850):SAIS (SEQ ID NO: 84116):LKNYQ (SEQ ID NO: 84230):DMVVESXGXR (SEQ ID NO: 84511), HVPKPXXVPTKL (SEQ ID NO: 84740):SAIS (SEQ ID NO: 84116):LKNYQ (SEQ ID NO: 84230):NMVVESXGXH (SEQ ID NO: 84623), RVPSTXXVPTKT (SEQ ID NO: 84820):SAIS (SEQ ID NO: 84116):LKNYQ (SEQ ID NO: 84230):MIVVEXGXL (SEQ ID NO: 84456), ASAAPXXVPTAL (SEQ ID NO: 84690):SAIS (SEQ ID NO: 84116):LKNYQ (SEQ ID NO: 84230):MIVVEXKXS (SEQ ID NO: 84457), ASASPXXVPTDL (SEQ ID NO: 84700):SAIS (SEQ ID NO: 84116):LKNYQ (SEQ ID NO: 84230):MIVVEXKXS (SEQ ID NO: 84457), ASASPXXVPTDL (SEQ ID NO: 84700):SAIS (SEQ ID NO: 84116):LKNYQ (SEQ ID NO: 84230):MVVVEXKXS (SEQ ID NO: 84473), NDEGLEXVPTEE (SEQ ID NO: 84798):SAIS (SEQ ID NO: 84116):LKNYQ (SEQ ID NO: 84230):FLVVEKXEXR (SEQ ID NO: 84543), NDEGLEXVPTGQ (SEQ ID NO: 84799):SAIS (SEQ ID NO: 84116):LKNYQ (SEQ ID NO: 84230):LEVVEQXEXR (SEQ ID NO: 84585), SSVKXQPVPTHH (SEQ ID NO: 84840):SAIS (SEQ ID NO: 84116):LKNYQ (SEQ ID NO: 84230):RLVVELEXAXA (SEQ ID NO: 84655), RNVQXRPVPTQL (SEQ ID NO: 84810):SAIS (SEQ ID NO: 84116):LKNYQ (SEQ ID NO: 84230):TLVVELAXKXE (SEQ ID NO: 84669), GIPEPXXVPEKM (SEQ ID NO: 84718):SAIS (SEQ ID NO: 84116):LKNYQ (SEQ ID NO: 84230):NMTVESXAXR (SEQ ID NO: 84604), HVTKPTXAPTKL (SEQ ID NO: 84742):SAIS (SEQ ID NO: 84116):LKNYQ (SEQ ID NO: 84230):NMVVRSXGXH (SEQ ID NO: 84629), YVPKPXXAPTKL (SEQ ID NO: 84864):SAIS (SEQ ID NO: 84116):LKNYQ (SEQ ID NO: 84230):NMVVRSXGXH (SEQ ID NO: 84629), TVPKPXXAPTQL (SEQ ID NO: 84854):SAIS (SEQ ID NO: 84116):LKNYQ (SEQ ID NO: 84230):NMVVRAXGXH (SEQ ID NO: 84627), AVPKAXXAPTKL (SEQ ID NO: 84704):SAIS (SEQ ID NO: 84116):LKNYQ (SEQ ID NO: 84230):NMVVKAXGXH (SEQ ID NO: 84624), KVGKAXXVPTKL (SEQ ID NO: 84780):SAIS (SEQ ID NO: 84116):LKNYQ (SEQ ID NO: 84230):EGMSVAEXGXR (SEQ ID NO: 84636), KASKAXXVPTKL (SEQ ID NO: 84760):SAIS (SEQ ID NO: 84116):LKNYQ (SEQ ID NO: 84230):GMAVSEXGXR (SEQ ID NO: 84546), GSAGPXXTPTKM (SEQ ID NO: 84726):SAIS (SEQ ID NO: 84116):LKNYQ (SEQ ID NO: 84230):GMVVDRXGXS (SEQ ID NO: 84567), AAPASXXVPARL (SEQ ID NO: 84677):SAIS (SEQ ID NO: 84116):LKNYQ (SEQ ID NO: 84230):DMVVEAXGXR (SEQ ID NO: 84509), HVPKPXXAPTKL (SEQ ID NO: 84734):SAIS (SEQ ID NO: 84116):LKNYQ (SEQ ID NO: 84230):NMVVRSXGXH (SEQ ID NO: 84629), RVPSTXXAPVKT (SEQ ID NO: 84815):SAIS (SEQ ID NO: 84116):LKNYQ (SEQ ID NO: 84230):MIVEEXGXL (SEQ ID NO: 84448), ASAAPXXVPQAL (SEQ ID NO: 84689):SAIS (SEQ ID NO: 84116):LKNYQ (SEQ ID NO: 84230):MIVRSXKXS (SEQ ID NO: 84453), ASASPXXVSQDL (SEQ ID NO: 84701):SAIS (SEQ ID NO: 84116):LKNYQ (SEQ ID NO: 84230):MIVKSXKXS (SEQ ID NO: 84451), ASASPXXVPQDL (SEQ ID NO: 84699):SAIS (SEQ ID NO: 84116):LKNYQ (SEQ ID NO: 84230):MVVKSXKXS (SEQ ID NO: 84470), NDEGLEXVPTEE (SEQ ID NO: 84798):SAIS (SEQ ID NO: 84116):LKNYQ (SEQ ID NO: 84230):FLQHNKXEXR (SEQ ID NO: 84536), NDEGLEXVPTGQ (SEQ ID NO: 84799):SAIS (SEQ ID NO: 84116):LKNYQ (SEQ ID NO: 84230):LEEHSQXEXR (SEQ ID NO: 84577), SSVKXQPSRVHH (SEQ ID NO: 84834):SAIS (SEQ ID NO: 84116):LKNYQ (SEQ ID NO: 84230):RLEEHLEXAXA (SEQ ID NO: 84646), RNVQXRPTQVQL (SEQ ID NO: 84806):SAIS (SEQ ID NO: 84116):LKNYQ (SEQ ID NO: 84230):TLEDHLAXKXE (SEQ ID NO: 84659), KIPKAXXVPEEL (SEQ ID NO: 84768):SSLS (SEQ ID NO: 84121):LKVYP (SEQ ID NO: 84231):DMTVEGXGXR (SEQ ID NO: 84492), SIPKAXXVPEEL (SEQ ID NO: 84828):SSLS (SEQ ID NO: 84121):LKVYP (SEQ ID NO: 84231):EMTVEGXGXR (SEQ ID NO: 84523), HVTKPTXVPEKL (SEQ ID NO: 84748):SSLS (SEQ ID NO: 84121):LKVYP (SEQ ID NO: 84231):NMTVESXGXH (SEQ ID NO: 84605), YVPKPXXVPEKL (SEQ ID NO: 84868):SSLS (SEQ ID NO: 84121):LKVYP (SEQ ID NO: 84231):NMTVESXGXH (SEQ ID NO: 84605), TVPKPXXVPEQL (SEQ ID NO: 84858):SSLS (SEQ ID NO: 84121):LKVYP (SEQ ID NO: 84231):NMTVEAXGXH (SEQ ID NO: 84603), AVPKAXXVPEKL (SEQ ID NO: 84708):SSLS (SEQ ID NO: 84121):LKVYP (SEQ ID NO: 84231):NMTVEAXGXH (SEQ ID NO: 84603), KVGKAXXVPEKL (SEQ ID NO: 84778):SSLS (SEQ ID NO: 84121):LKVYP (SEQ ID NO: 84231):EGMSTVEXGXR (SEQ ID NO: 84635), KASKAXXVPEKL (SEQ ID NO: 84758):SSLS (SEQ ID NO: 84121):LKVYP (SEQ ID NO: 84231):GMTVEEXGXR (SEQ ID NO: 84556), GSAGPXXVPEKM (SEQ ID NO: 84728):SSLS (SEQ ID NO: 84121):LKVYP (SEQ ID NO: 84231):GMTVERXGXS (SEQ ID NO: 84557), AAPASXXVPERL (SEQ ID NO: 84678):SSLS (SEQ ID NO: 84121):LKVYP (SEQ ID NO: 84231):DMTVEAXGXR (SEQ ID NO: 84491), STPPTXXVPERL (SEQ ID NO: 84848):SSLS (SEQ ID NO: 84121):LKVYP (SEQ ID NO: 84231):DMTVESXGXR (SEQ ID NO: 84493), HVPKPXXVPEKL (SEQ ID NO: 84738):SSLS (SEQ ID NO: 84121):LKVYP (SEQ ID NO: 84231):NMTVESXGXH (SEQ ID NO: 84605), RVPSTXXVPEKT (SEQ ID NO: 84818):SSLS (SEQ ID NO: 84121):LKVYP (SEQ ID NO: 84231):MITVEXGXL (SEQ ID NO: 84444), ASAAPXXVPEAL (SEQ ID NO: 84688):SSLS (SEQ ID NO: 84121):LKVYP (SEQ ID NO: 84231):MITVEXKXS (SEQ ID NO: 84445), ASASPXXVPEDL (SEQ ID NO: 84698):SSLS (SEQ ID NO: 84121):LKVYP (SEQ ID NO: 84231):MITVEXKXS (SEQ ID NO: 84445), ASASPXXVPEDL (SEQ ID NO: 84698):SSLS (SEQ ID NO: 84121):LKVYP (SEQ ID NO: 84231):MVTVEXKXS (SEQ ID NO: 84467), NDEGLEXVPEEE (SEQ ID NO: 84794):SSLS (SEQ ID NO: 84121):LKVYP (SEQ ID NO: 84231):FLTVEKXEXR (SEQ ID NO: 84537), NDEGLEXVPEGQ (SEQ ID NO: 84795):SSLS (SEQ ID NO: 84121):LKVYP (SEQ ID NO: 84231):LETVEQXEXR (SEQ ID NO: 84579), SSVKXQPVPEHH (SEQ ID NO: 84838):SSLS (SEQ ID NO: 84121):LKVYP (SEQ ID NO: 84231):RLTVELEXAXA (SEQ ID NO: 84649), RNVQXRPVPEQL (SEQ ID NO: 84808):SSLS (SEQ ID NO: 84121):LKVYP (SEQ ID NO: 84231):TLTVELAXKXE (SEQ ID NO: 84663), KIPKAXXVPTEL (SEQ ID NO: 84770):SSLS (SEQ ID NO: 84121):LKVYP (SEQ ID NO: 84231):DMVVEGXGXR (SEQ ID NO: 84510), SIPKAXXVPTEL (SEQ ID NO: 84830):SSLS (SEQ ID NO: 84121):LKVYP (SEQ ID NO: 84231):EMVVEGXGXR (SEQ ID NO: 84529), HVTKPTXAPTKL (SEQ ID NO: 84742):SSLS (SEQ ID NO: 84121):LKVYP (SEQ ID NO: 84231):NMVVRSXGXH (SEQ ID NO: 84629), YVPKPXXAPTKL (SEQ ID NO: 84864):SSLS (SEQ ID NO: 84121):LKVYP (SEQ ID NO: 84231):NMVVRSXGXH (SEQ ID NO: 84629), TVPKPXXAPTQL (SEQ ID NO: 84854):SSLS (SEQ ID NO: 84121):LKVYP (SEQ ID NO: 84231):NMVVRAXGXH (SEQ ID NO: 84627), AVPKAXXAPTKL (SEQ ID NO: 84704):SSLS (SEQ ID NO: 84121):LKVYP (SEQ ID NO: 84231):NMVVKAXGXH (SEQ ID NO: 84624), KVGKAXXVPTKL (SEQ ID NO: 84780):SSLS (SEQ ID NO: 84121):LKVYP (SEQ ID NO: 84231):EGMSVAEXGXR (SEQ ID NO: 84636), KASKAXXVPTKL (SEQ ID NO: 84760):SSLS (SEQ ID NO: 84121):LKVYP (SEQ ID NO: 84231):GMAVSEXGXR (SEQ ID NO: 84546), GSAGPXXTPTKM (SEQ ID NO: 84726):SSLS (SEQ ID NO: 84121):LKVYP (SEQ ID NO: 84231):GMVVDRXGXS (SEQ ID NO: 84567), AAPASXXVPARL (SEQ ID NO: 84677):SSLS (SEQ ID NO: 84121):LKVYP (SEQ ID NO: 84231):DMVVEAXGXR (SEQ ID NO: 84509), STPPTXXVPTRL (SEQ ID NO: 84850):SSLS (SEQ ID NO: 84121):LKVYP (SEQ ID NO: 84231):DMVVESXGXR (SEQ ID NO: 84511), HVPKPXXAPTKL (SEQ ID NO: 84734):SSLS (SEQ ID NO: 84121):LKVYP (SEQ ID NO: 84231):NMVVRSXGXH (SEQ ID NO: 84629), RVPSTXXAPVKT (SEQ ID NO: 84815):SSLS (SEQ ID NO: 84121):LKVYP (SEQ ID NO: 84231):MIVEEXGXL (SEQ ID NO: 84448), ASAAPXXVPQAL (SEQ ID NO: 84689):SSLS (SEQ ID NO: 84121):LKVYP (SEQ ID NO: 84231):MIVRSXKXS (SEQ ID NO: 84453), ASASPXXVSQDL (SEQ ID NO: 84701):SSLS (SEQ ID NO: 84121):LKVYP (SEQ ID NO: 84231):MIVKSXKXS (SEQ ID NO: 84451), ASASPXXVPQDL (SEQ ID NO: 84699):SSLS (SEQ ID NO: 84121):LKVYP (SEQ ID NO: 84231):MVVKSXKXS (SEQ ID NO: 84470), NDEGLEXVPTEE (SEQ ID NO: 84798):SSLS (SEQ ID NO: 84121):LKVYP (SEQ ID NO: 84231):FLQHNKXEXR (SEQ ID NO: 84536), NDEGLEXVPTGQ (SEQ ID NO: 84799):SSLS (SEQ ID NO: 84121):LKVYP (SEQ ID NO: 84231):LEEHSQXEXR (SEQ ID NO: 84577), SSVKXQPSRVHH (SEQ ID NO: 84834):SSLS (SEQ ID NO: 84121):LKVYP (SEQ ID NO: 84231):RLEEHLEXAXA (SEQ ID NO: 84646), RNVQXRPTQVQL (SEQ ID NO: 84806):SSLS (SEQ ID NO: 84121):LKVYP (SEQ ID NO: 84231):TLEDHLAXKXE (SEQ ID NO: 84659), KIPKAXXVPTEL (SEQ ID NO: 84770):SAIS (SEQ ID NO: 84116):LKNYQ (SEQ ID NO: 84230):DMVVEGXGXR (SEQ ID NO: 84510), KIPKAXXAPTEL (SEQ ID NO: 84764):NAIS (SEQ ID NO: 84113):LKKYR (SEQ ID NO: 84229):DMVVRGXGXR (SEQ ID NO: 84516), GIPEPXXAPTKM (SEQ ID NO: 84714):NAIS (SEQ ID NO: 84113):LKKYR (SEQ ID NO: 84229):NMVVRSXAXR (SEQ ID NO: 84628), SIPKAXXAPTEL (SEQ ID NO: 84824):NAIS (SEQ ID NO: 84113):LKKYR (SEQ ID NO: 84229):EMVVRGXGXR (SEQ ID NO: 84531), YVPKPXXAPTKL (SEQ ID NO: 84864):NAIS (SEQ ID NO: 84113):LKKYR (SEQ ID NO: 84229):NMVVRSXGXH (SEQ ID NO: 84629), TVPKPXXAPTQL (SEQ ID NO: 84854):NAIS (SEQ ID NO: 84113):LKKYR (SEQ ID NO: 84229):NMVVRAXGXH (SEQ ID NO: 84627), AVPKAXXAPTKL (SEQ ID NO: 84704):NAIS (SEQ ID NO: 84113):LKKYR (SEQ ID NO: 84229):NMVVRAXGXH (SEQ ID NO: 84627), KVGKAXXAPTKL (SEQ ID NO: 84774):NAIS (SEQ ID NO: 84113):LKKYR (SEQ ID NO: 84229):EGMSVVRXGXR (SEQ ID NO: 84643), KASKAXXAPTKL (SEQ ID NO: 84754):NAIS (SEQ ID NO: 84113):LKKYR (SEQ ID NO: 84229):GMVVREXGXR (SEQ ID NO: 84572), GSAGPXXAPTKM (SEQ ID NO: 84724):NAIS (SEQ ID NO: 84113):LKKYR (SEQ ID NO: 84229):GMVVRRXGXS (SEQ ID NO: 84573), AAPASXXAPTRL (SEQ ID NO: 84674):NAIS (SEQ ID NO: 84113):LKKYR (SEQ ID NO: 84229):DMVVRAXGXR (SEQ ID NO: 84515), STPPTXXAPTRL (SEQ ID NO: 84844):NAIS (SEQ ID NO: 84113):LKKYR (SEQ ID NO: 84229):DMVVRSXGXR (SEQ ID NO: 84517), HVPKPXXAPTKL (SEQ ID NO: 84734):NAIS (SEQ ID NO: 84113):LKKYR (SEQ ID NO: 84229):NMVVRSXGXH (SEQ ID NO: 84629), RVPSTXXAPTKT (SEQ ID NO: 84814):NAIS (SEQ ID NO: 84113):LKKYR (SEQ ID NO: 84229):MIVVRXGXL (SEQ ID NO: 84460), ASAAPXXAPTAL (SEQ ID NO: 84684):NAIS (SEQ ID NO: 84113):LKKYR (SEQ ID NO: 84229):MIVVRXKXS (SEQ ID NO: 84461), ASASPXXAPTDL (SEQ ID NO: 84694):NAIS (SEQ ID NO: 84113):LKKYR (SEQ ID NO: 84229):MIVVRXKXS (SEQ ID NO: 84461), ASASPXXAPTDL (SEQ ID NO: 84694):NAIS (SEQ ID NO: 84113):LKKYR (SEQ ID NO: 84229):MVVVRXKXS (SEQ ID NO: 84475), NDEGLESAPTEE (SEQ ID NO: 84782):NAIS (SEQ ID NO: 84113):LKKYR (SEQ ID NO: 84229):FLVVRKXEXR (SEQ ID NO: 84545), NDEGLESAPTGQ (SEQ ID NO: 84783):NAIS (SEQ ID NO: 84113):LKKYR (SEQ ID NO: 84229):LEVVRQXEXR (SEQ ID NO: 84587), SSVKXQPAPTHH (SEQ ID NO: 84832):NAIS (SEQ ID NO: 84113):LKKYR (SEQ ID NO: 84229):RLVVRLEXAXA (SEQ ID NO: 84657), RNVQXRPAPTQL (SEQ ID NO: 84802):NAIS (SEQ ID NO: 84113):LKKYR (SEQ ID NO: 84229):TLVVRLAXKXE (SEQ ID NO: 84671), KIPKAXXVPTEL (SEQ ID NO: 84770):NAIS (SEQ ID NO: 84113):LKKYR (SEQ ID NO: 84229):DMVVEGXGXR (SEQ ID NO: 84510), GIPEPXXVPEKM (SEQ ID NO: 84718):NAIS (SEQ ID NO: 84113):LKKYR (SEQ ID NO: 84229):NMTVESXAXR (SEQ ID NO: 84604), SIPKAXXVPTEL (SEQ ID NO: 84830):NAIS (SEQ ID NO: 84113):LKKYR (SEQ ID NO: 84229):EMVVEGXGXR (SEQ ID NO: 84529), AVPKAXXAPTKL (SEQ ID NO: 84704):NAIS (SEQ ID NO: 84113):LKKYR (SEQ ID NO: 84229):NMVVKAXGXH (SEQ ID NO: 84624), KVGKAXXVPTKL (SEQ ID NO: 84780):NAIS (SEQ ID NO: 84113):LKKYR (SEQ ID NO: 84229):EGMSVAEXGXR (SEQ ID NO: 84636), KASKAXXVPTKL (SEQ ID NO: 84760):NAIS (SEQ ID NO: 84113):LKKYR (SEQ ID NO: 84229):GMAVSEXGXR (SEQ ID NO: 84546), GSAGPXXTPTKM (SEQ ID NO: 84726):NAIS (SEQ ID NO: 84113):LKKYR (SEQ ID NO: 84229):GMVVDRXGXS (SEQ ID NO: 84567), AAPASXXVPARL (SEQ ID NO: 84677):NAIS (SEQ ID NO: 84113):LKKYR (SEQ ID NO: 84229):DMVVEAXGXR (SEQ ID NO: 84509), STPPTXXVPTRL (SEQ ID NO: 84850):NAIS (SEQ ID NO: 84113):LKKYR (SEQ ID NO: 84229):DMVVESXGXR (SEQ ID NO: 84511), RVPSTXXAPVKT (SEQ ID NO: 84815):NAIS (SEQ ID NO: 84113):LKKYR (SEQ ID NO: 84229):MIVEEXGXL (SEQ ID NO: 84448), ASAAPXXVPQAL (SEQ ID NO: 84689):NAIS (SEQ ID NO: 84113):LKKYR (SEQ ID NO: 84229):MIVRSXKXS (SEQ ID NO: 84453), ASASPXXVSQDL (SEQ ID NO: 84701):NAIS (SEQ ID NO: 84113):LKKYR (SEQ ID NO: 84229):MIVKSXKXS (SEQ ID NO: 84451), ASASPXXVPQDL (SEQ ID NO: 84699):NAIS (SEQ ID NO: 84113):LKKYR (SEQ ID NO: 84229):MVVKSXKXS (SEQ ID NO: 84470), NDEGLEXVPTEE (SEQ ID NO: 84798):NAIS (SEQ ID NO: 84113):LKKYR (SEQ ID NO: 84229):FLQHNKXEXR (SEQ ID NO: 84536), NDEGLEXVPTGQ (SEQ ID NO: 84799):NAIS (SEQ ID NO: 84113):LKKYR (SEQ ID NO: 84229):LEEHSQXEXR (SEQ ID NO: 84577), SSVKXQPSRVHH (SEQ ID NO: 84834):NAIS (SEQ ID NO: 84113):LKKYR (SEQ ID NO: 84229):RLEEHLEXAXA (SEQ ID NO: 84646), RNVQXRPTQVQL (SEQ ID NO: 84806):NAIS (SEQ ID NO: 84113):LKKYR (SEQ ID NO: 84229):TLEDHLAXKXE (SEQ ID NO: 84659), HVTKPTXAPTKL (SEQ ID NO: 84742):NAIS (SEQ ID NO: 84113):LKKYR (SEQ ID NO: 84229):NMVVRSXGXH (SEQ ID NO: 84629), KIPKAXXAPTEL (SEQ ID NO: 84764):SATS (SEQ ID NO: 84117):LRKHR (SEQ ID NO: 84233):DMVVKGXGXR (SEQ ID NO: 84513), GIPEPXXAPTKM (SEQ ID NO: 84714):SATS (SEQ ID NO: 84117):LRKHR (SEQ ID NO: 84233):NMVVKSXAXR (SEQ ID NO: 84625), SIPKAXXAPTEL (SEQ ID NO: 84824):SATS (SEQ ID NO: 84117):LRKHR (SEQ ID NO: 84233):EMVVKGXGXR (SEQ ID NO: 84530), HVTKPTXAPTKL (SEQ ID NO: 84742):SATS (SEQ ID NO: 84117):LRKHR (SEQ ID NO: 84233):NMVVKSXGXH (SEQ ID NO: 84626), YVPKPXXAPTKL (SEQ ID NO: 84864):SATS (SEQ ID NO: 84117):LRKHR (SEQ ID NO: 84233):NMVVKSXGXH (SEQ ID NO: 84626), TVPKPXXAPTQL (SEQ ID NO: 84854):SATS (SEQ ID NO: 84117):LRKHR (SEQ ID NO: 84233):NMVVKAXGXH (SEQ ID NO: 84624), KVGKAXXAPTKL (SEQ ID NO: 84774):SATS (SEQ ID NO: 84117):LRKHR (SEQ ID NO: 84233):EGMSVVKXGXR (SEQ ID NO: 84642), KASKAXXAPTKL (SEQ ID NO: 84754):SATS (SEQ ID NO: 84117):LRKHR (SEQ ID NO: 84233):GMVVKEXGXR (SEQ ID NO: 84570), GSAGPXXAPTKM (SEQ ID NO: 84724):SATS (SEQ ID NO: 84117):LRKHR (SEQ ID NO: 84233):GMVVKRXGXS (SEQ ID NO: 84571), AAPASXXAPTRL (SEQ ID NO: 84674):SATS (SEQ ID NO: 84117):LRKHR (SEQ ID NO: 84233):DMVVKAXGXR (SEQ ID NO: 84512), STPPTXXAPTRL (SEQ ID NO: 84844):SATS (SEQ ID NO: 84117):LRKHR (SEQ ID NO: 84233):DMVVKSXGXR (SEQ ID NO: 84514), HVPKPXXAPTKL (SEQ ID NO: 84734):SATS (SEQ ID NO: 84117):LRKHR (SEQ ID NO: 84233):NMVVKSXGXH (SEQ ID NO: 84626), RVPSTXXAPTKT (SEQ ID NO: 84814):SATS (SEQ ID NO: 84117):LRKHR (SEQ ID NO: 84233):MIVVKXGXL (SEQ ID NO: 84458), ASAAPXXAPTAL (SEQ ID NO: 84684):SATS (SEQ ID NO: 84117):LRKHR (SEQ ID NO: 84233):MIVVKXKXS (SEQ ID NO: 84459), ASASPXXAPTDL (SEQ ID NO: 84694):SATS (SEQ ID NO: 84117):LRKHR (SEQ ID NO: 84233):MIVVKXKXS (SEQ ID NO: 84459), ASASPXXAPTDL (SEQ ID NO: 84694):SATS (SEQ ID NO: 84117):LRKHR (SEQ ID NO: 84233):MVVVKXKXS (SEQ ID NO: 84474), NDEGLESAPTEE (SEQ ID NO: 84782):SATS (SEQ ID NO: 84117):LRKHR (SEQ ID NO: 84233):FLVVKKXEXR (SEQ ID NO: 84544), NDEGLESAPTGQ (SEQ ID NO: 84783):SATS (SEQ ID NO: 84117):LRKHR (SEQ ID NO: 84233):LEVVKQXEXR (SEQ ID NO: 84586), SSVKXQPAPTHH (SEQ ID NO: 84832):SATS (SEQ ID NO: 84117):LRKHR (SEQ ID NO: 84233):RLVVKLEXAXA (SEQ ID NO: 84656), RNVQXRPAPTQL (SEQ ID NO: 84802):SATS (SEQ ID NO: 84117):LRKHR (SEQ ID NO: 84233):TLVVKLAXKXE (SEQ ID NO: 84670), KIPKAXXVPTEL (SEQ ID NO: 84770):SATS (SEQ ID NO: 84117):LRKHR (SEQ ID NO: 84233):DMVVEGXGXR (SEQ ID NO: 84510), GIPEPXXVPEKM (SEQ ID NO: 84718):SATS (SEQ ID NO: 84117):LRKHR (SEQ ID NO: 84233):NMTVESXAXR (SEQ ID NO: 84604), SIPKAXXVPTEL (SEQ ID NO: 84830):SATS (SEQ ID NO: 84117):LRKHR (SEQ ID NO: 84233):EMVVEGXGXR (SEQ ID NO: 84529), HVTKPTXAPTKL (SEQ ID NO: 84742):SATS (SEQ ID NO: 84117):LRKHR (SEQ ID NO: 84233):NMVVRSXGXH (SEQ ID NO: 84629), YVPKPXXAPTKL (SEQ ID NO: 84864):SATS (SEQ ID NO: 84117):LRKHR (SEQ ID NO: 84233):NMVVRSXGXH (SEQ ID NO: 84629), TVPKPXXAPTQL (SEQ ID NO: 84854):SATS (SEQ ID NO: 84117):LRKHR (SEQ ID NO: 84233):NMVVRAXGXH (SEQ ID NO: 84627), KVGKAXXVPTKL (SEQ ID NO: 84780):SATS (SEQ ID NO: 84117):LRKHR (SEQ ID NO: 84233):EGMSVAEXGXR (SEQ ID NO: 84636), KASKAXXVPTKL (SEQ ID NO: 84760):SATS (SEQ ID NO: 84117):LRKHR (SEQ ID NO: 84233):GMAVSEXGXR (SEQ ID NO: 84546), GSAGPXXTPTKM (SEQ ID NO: 84726):SATS (SEQ ID NO: 84117):LRKHR (SEQ ID NO: 84233):GMVVDRXGXS (SEQ ID NO: 84567), AAPASXXVPARL (SEQ ID NO: 84677):SATS (SEQ ID NO: 84117):LRKHR (SEQ ID NO: 84233):DMVVEAXGXR (SEQ ID NO: 84509), STPPTXXVPTRL (SEQ ID NO: 84850):SATS (SEQ ID NO: 84117):LRKHR (SEQ ID NO: 84233):DMVVESXGXR (SEQ ID NO: 84511), HVPKPXXAPTKL (SEQ ID NO: 84734):SATS (SEQ ID NO: 84117):LRKHR (SEQ ID NO: 84233):NMVVRSXGXH (SEQ ID NO: 84629), RVPSTXXAPVKT (SEQ ID NO: 84815):SATS (SEQ ID NO: 84117):LRKHR (SEQ ID NO: 84233):MIVEEXGXL (SEQ ID NO: 84448), ASAAPXXVPQAL (SEQ ID NO: 84689):SATS (SEQ ID NO: 84117):LRKHR (SEQ ID NO: 84233):MIVRSXKXS (SEQ ID NO: 84453), ASASPXXVSQDL (SEQ ID NO: 84701):SATS (SEQ ID NO: 84117):LRKHR (SEQ ID NO: 84233):MIVKSXKXS (SEQ ID NO: 84451), ASASPXXVPQDL (SEQ ID NO: 84699):SATS (SEQ ID NO: 84117):LRKHR (SEQ ID NO: 84233):MVVKSXKXS (SEQ ID NO: 84470), NDEGLEXVPTEE (SEQ ID NO: 84798):SATS (SEQ ID NO: 84117):LRKHR (SEQ ID NO: 84233):FLQHNKXEXR (SEQ ID NO: 84536), NDEGLEXVPTGQ (SEQ ID NO: 84799):SATS (SEQ ID NO: 84117):LRKHR (SEQ ID NO: 84233):LEEHSQXEXR (SEQ ID NO: 84577), SSVKXQPSRVHH (SEQ ID NO: 84834):SATS (SEQ ID NO: 84117):LRKHR (SEQ ID NO: 84233):RLEEHLEXAXA (SEQ ID NO: 84646), RNVQXRPTQVQL (SEQ ID NO: 84806):SATS (SEQ ID NO: 84117):LRKHR (SEQ ID NO: 84233):TLEDHLAXKXE (SEQ ID NO: 84659), KIPKAXXVPTEL (SEQ ID NO: 84770):SPIS (SEQ ID NO: 84120):LKYHY (SEQ ID NO: 84232):DMVAEGXGXR (SEQ ID NO: 84495), GIPEPXXVPTKM (SEQ ID NO: 84720):SPIS (SEQ ID NO: 84120):LKYHY (SEQ ID NO: 84232):NMVAESXAXR (SEQ ID NO: 84607), SIPKAXXVPTEL (SEQ ID NO: 84830):SPIS (SEQ ID NO: 84120):LKYHY (SEQ ID NO: 84232):EMVAEGXGXR (SEQ ID NO: 84524), HVTKPTXVPTKL (SEQ ID NO: 84750):SPIS (SEQ ID NO: 84120):LKYHY (SEQ ID NO: 84232):NMVAESXGXH (SEQ ID NO: 84608), YVPKPXXVPTKL (SEQ ID NO: 84870):SPIS (SEQ ID NO: 84120):LKYHY (SEQ ID NO: 84232):NMVAESXGXH (SEQ ID NO: 84608), TVPKPXXVPTQL (SEQ ID NO: 84860):SPIS (SEQ ID NO: 84120):LKYHY (SEQ ID NO: 84232):NMVAEAXGXH (SEQ ID NO: 84606), AVPKAXXVPTKL (SEQ ID NO: 84710):SPIS (SEQ ID NO: 84120):LKYHY (SEQ ID NO: 84232):NMVAEAXGXH (SEQ ID NO: 84606), KASKAXXVPTKL (SEQ ID NO: 84760):SPIS (SEQ ID NO: 84120):LKYHY (SEQ ID NO: 84232):GMVAEEXGXR (SEQ ID NO: 84558), GSAGPXXVPTKM (SEQ ID NO: 84730):SPIS (SEQ ID NO: 84120):LKYHY (SEQ ID NO: 84232):GMVAERXGXS (SEQ ID NO: 84559), AAPASXXVPTRL (SEQ ID NO: 84680):SPIS (SEQ ID NO: 84120):LKYHY (SEQ ID NO: 84232):DMVAEAXGXR (SEQ ID NO: 84494), STPPTXXVPTRL (SEQ ID NO: 84850):SPIS (SEQ ID NO: 84120):LKYHY (SEQ ID NO: 84232):DMVAESXGXR (SEQ ID NO: 84496), HVPKPXXVPTKL (SEQ ID NO: 84740):SPIS (SEQ ID NO: 84120):LKYHY (SEQ ID NO: 84232):NMVAESXGXH (SEQ ID NO: 84608), RVPSTXXVPTKT (SEQ ID NO: 84820):SPIS (SEQ ID NO: 84120):LKYHY (SEQ ID NO: 84232):MIVAEXGXL (SEQ ID NO: 84446), ASAAPXXVPTAL (SEQ ID NO: 84690):SPIS (SEQ ID NO: 84120):LKYHY (SEQ ID NO: 84232):MIVAEXKXS (SEQ ID NO: 84447), ASASPXXVPTDL (SEQ ID NO: 84700):SPIS (SEQ ID NO: 84120):LKYHY (SEQ ID NO: 84232):MIVAEXKXS (SEQ ID NO: 84447), ASASPXXVPTDL (SEQ ID NO: 84700):SPIS (SEQ ID NO: 84120):LKYHY (SEQ ID NO: 84232):MVVAEXKXS (SEQ ID NO: 84468), NDEGLEXVPTEE (SEQ ID NO: 84798):SPIS (SEQ ID NO: 84120):LKYHY (SEQ ID NO: 84232):FLVAEKXEXR (SEQ ID NO: 84538), NDEGLEXVPTGQ (SEQ ID NO: 84799):SPIS (SEQ ID NO: 84120):LKYHY (SEQ ID NO: 84232):LEVAEQXEXR (SEQ ID NO: 84580), SSVKXQPVPTHH (SEQ ID NO: 84840):SPIS (SEQ ID NO: 84120):LKYHY (SEQ ID NO: 84232):RLVAELEXAXA (SEQ ID NO: 84650), RNVQXRPVPTQL (SEQ ID NO: 84810):SPIS (SEQ ID NO: 84120):LKYHY (SEQ ID NO: 84232):TLVAELAXKXE (SEQ ID NO: 84664), KIPKAXXVPTEL (SEQ ID NO: 84770):SPIS (SEQ ID NO: 84120):LKYHY (SEQ ID NO: 84232):DMVVEGXGXR (SEQ ID NO: 84510), GIPEPXXVPEKM (SEQ ID NO: 84718):SPIS (SEQ ID NO: 84120):LKYHY (SEQ ID NO: 84232):NMTVESXAXR (SEQ ID NO: 84604), SIPKAXXVPTEL (SEQ ID NO: 84830):SPIS (SEQ ID NO: 84120):LKYHY (SEQ ID NO: 84232):EMVVEGXGXR (SEQ ID NO: 84529), HVTKPTXAPTKL (SEQ ID NO: 84742):SPIS (SEQ ID NO: 84120):LKYHY (SEQ ID NO: 84232):NMVVRSXGXH (SEQ ID NO: 84629), YVPKPXXAPTKL (SEQ ID NO: 84864):SPIS (SEQ ID NO: 84120):LKYHY (SEQ ID NO: 84232):NMVVRSXGXH (SEQ ID NO: 84629), TVPKPXXAPTQL (SEQ ID NO: 84854):SPIS (SEQ ID NO: 84120):LKYHY (SEQ ID NO: 84232):NMVVRAXGXH (SEQ ID NO: 84627), AVPKAXXAPTKL (SEQ ID NO: 84704):SPIS (SEQ ID NO: 84120):LKYHY (SEQ ID NO: 84232):NMVVKAXGXH (SEQ ID NO: 84624), KASKAXXVPTKL (SEQ ID NO: 84760):SPIS (SEQ ID NO: 84120):LKYHY (SEQ ID NO: 84232):GMAVSEXGXR (SEQ ID NO: 84546), GSAGPXXTPTKM (SEQ ID NO: 84726):SPIS (SEQ ID NO: 84120):LKYHY (SEQ ID NO: 84232):GMVVDRXGXS (SEQ ID NO: 84567), AAPASXXVPARL (SEQ ID NO: 84677):SPIS (SEQ ID NO: 84120):LKYHY (SEQ ID NO: 84232):DMVVEAXGXR (SEQ ID NO: 84509), STPPTXXVPTRL (SEQ ID NO: 84850):SPIS (SEQ ID NO: 84120):LKYHY (SEQ ID NO: 84232):DMVVESXGXR (SEQ ID NO: 84511), HVPKPXXAPTKL (SEQ ID NO: 84734):SPIS (SEQ ID NO: 84120):LKYHY (SEQ ID NO: 84232):NMVVRSXGXH (SEQ ID NO: 84629), RVPSTXXAPVKT (SEQ ID NO: 84815):SPIS (SEQ ID NO: 84120):LKYHY (SEQ ID NO: 84232):MIVEEXGXL (SEQ ID NO: 84448), ASAAPXXVPQAL (SEQ ID NO: 84689):SPIS (SEQ ID NO: 84120):LKYHY (SEQ ID NO: 84232):MIVRSXKXS (SEQ ID NO: 84453), ASASPXXVSQDL (SEQ ID NO: 84701):SPIS (SEQ ID NO: 84120):LKYHY (SEQ ID NO: 84232):MIVKSXKXS (SEQ ID NO: 84451), ASASPXXVPQDL (SEQ ID NO: 84699):SPIS (SEQ ID NO: 84120):LKYHY (SEQ ID NO: 84232):MVVKSXKXS (SEQ ID NO: 84470), NDEGLEXVPTEE (SEQ ID NO: 84798):SPIS (SEQ ID NO: 84120):LKYHY (SEQ ID NO: 84232):FLQHNKXEXR (SEQ ID NO: 84536), NDEGLEXVPTGQ (SEQ ID NO: 84799):SPIS (SEQ ID NO: 84120):LKYHY (SEQ ID NO: 84232):LEEHSQXEXR (SEQ ID NO: 84577), SSVKXQPSRVHH (SEQ ID NO: 84834):SPIS (SEQ ID NO: 84120):LKYHY (SEQ ID NO: 84232):RLEEHLEXAXA (SEQ ID NO: 84646), RNVQXRPTQVQL (SEQ ID NO: 84806):SPIS (SEQ ID NO: 84120):LKYHY (SEQ ID NO: 84232):TLEDHLAXKXE (SEQ ID NO: 84659), KIPKAXXVPTEL (SEQ ID NO: 84770):EPIS (SEQ ID NO: 84109):KFKYE (SEQ ID NO: 84211):DMAVXGXGSR (SEQ ID NO: 84478), GIPEPXXVPTKM (SEQ ID NO: 84720):EPIS (SEQ ID NO: 84109):KFKYE (SEQ ID NO: 84211):NMAVSSXAXR (SEQ ID NO: 84589), SIPKAXXVPTEL (SEQ ID NO: 84830):EPIS (SEQ ID NO: 84109):KFKYE (SEQ ID NO: 84211):EMAVXGXGSR (SEQ ID NO: 84518), HVTKPTXVPTKL (SEQ ID NO: 84750):EPIS (SEQ ID NO: 84109):KFKYE (SEQ ID NO: 84211):NMAVSSXGXH (SEQ ID NO: 84590), YVPKPXXVPTKL (SEQ ID NO: 84870):EPIS (SEQ ID NO: 84109):KFKYE (SEQ ID NO: 84211):NMAVSSXGXH (SEQ ID NO: 84590), TVPKPXXVPTQL (SEQ ID NO: 84860):EPIS (SEQ ID NO: 84109):KFKYE (SEQ ID NO: 84211):NMAVSAXGXH (SEQ ID NO: 84588), AVPKAXXVPTKL (SEQ ID NO: 84710):EPIS (SEQ ID NO: 84109):KFKYE (SEQ ID NO: 84211):NMAVSAXGXH (SEQ ID NO: 84588), KVGKAXXVPTKL (SEQ ID NO: 84780):EPIS (SEQ ID NO: 84109):KFKYE (SEQ ID NO: 84211):EGMSAVSXGXR (SEQ ID NO: 84630), GSAGPXXVPTKM (SEQ ID NO: 84730):EPIS (SEQ ID NO: 84109):KFKYE (SEQ ID NO: 84211):GMAVSRXGXS (SEQ ID NO: 84547), AAPASXXVPTRL (SEQ ID NO: 84680):EPIS (SEQ ID NO: 84109):KFKYE (SEQ ID NO: 84211):DMAVSAXGXR (SEQ ID NO: 84476), STPPTXXVPTRL (SEQ ID NO: 84850):EPIS (SEQ ID NO: 84109):KFKYE (SEQ ID NO: 84211):DMAVSSXGXR (SEQ ID NO: 84477), HVPKPXXVPTKL (SEQ ID NO: 84740):EPIS (SEQ ID NO: 84109):KFKYE (SEQ ID NO: 84211):NMAVSSXGXH (SEQ ID NO: 84590), RVPSTXXVPTKT (SEQ ID NO: 84820):EPIS (SEQ ID NO: 84109):KFKYE (SEQ ID NO: 84211):MIAVSXGXL (SEQ ID NO: 84434), ASAAPXXVPTAL (SEQ ID NO: 84690):EPIS (SEQ ID NO: 84109):KFKYE (SEQ ID NO: 84211):MIAVSXKXS (SEQ ID NO: 84435), ASASPXXVPTDL (SEQ ID NO: 84700):EPIS (SEQ ID NO: 84109):KFKYE (SEQ ID NO: 84211):MIAVSXKXS (SEQ ID NO: 84435), ASASPXXVPTDL (SEQ ID NO: 84700):EPIS (SEQ ID NO: 84109):KFKYE (SEQ ID NO: 84211):MVAVSXKXS (SEQ ID NO: 84462), NDEGLEXVPTEE (SEQ ID NO: 84798):EPIS (SEQ ID NO: 84109):KFKYE (SEQ ID NO: 84211):FLAVXKXESR (SEQ ID NO: 84532), NDEGLEXVPTGQ (SEQ ID NO: 84799):EPIS (SEQ ID NO: 84109):KFKYE (SEQ ID NO: 84211):LEAVSQXEXR (SEQ ID NO: 84574), SSVKXQPVPTHH (SEQ ID NO: 84840):EPIS (SEQ ID NO: 84109):KFKYE (SEQ ID NO: 84211):RLAVSLEXAXA (SEQ ID NO: 84644), RNVQXRPVPTQL (SEQ ID NO: 84810):EPIS (SEQ ID NO: 84109):KFKYE (SEQ ID NO: 84211):TLAVSLAXKXE (SEQ ID NO: 84658), KIPKAXXVPTEL (SEQ ID NO: 84770):EPIS (SEQ ID NO: 84109):KFKYE (SEQ ID NO: 84211):DMVVEGXGXR (SEQ ID NO: 84510), GIPEPXXVPEKM (SEQ ID NO: 84718):EPIS (SEQ ID NO: 84109):KFKYE (SEQ ID NO: 84211):NMTVESXAXR (SEQ ID NO: 84604), SIPKAXXVPTEL (SEQ ID NO: 84830):EPIS (SEQ ID NO: 84109):KFKYE (SEQ ID NO: 84211):EMVVEGXGXR (SEQ ID NO: 84529), HVTKPTXAPTKL (SEQ ID NO: 84742):EPIS (SEQ ID NO: 84109):KFKYE (SEQ ID NO: 84211):NMVVRSXGXH (SEQ ID NO: 84629), YVPKPXXAPTKL (SEQ ID NO: 84864):EPIS (SEQ ID NO: 84109):KFKYE (SEQ ID NO: 84211):NMVVRSXGXH (SEQ ID NO: 84629), TVPKPXXAPTQL (SEQ ID NO: 84854):EPIS (SEQ ID NO: 84109):KFKYE (SEQ ID NO: 84211):NMVVRAXGXH (SEQ ID NO: 84627), AVPKAXXAPTKL (SEQ ID NO: 84704):EPIS (SEQ ID NO: 84109):KFKYE (SEQ ID NO: 84211):NMVVKAXGXH (SEQ ID NO: 84624), KVGKAXXVPTKL (SEQ ID NO: 84780):EPIS (SEQ ID NO: 84109):KFKYE (SEQ ID NO: 84211):EGMSVAEXGXR (SEQ ID NO: 84636), GSAGPXXTPTKM (SEQ ID NO: 84726):EPIS (SEQ ID NO: 84109):KFKYE (SEQ ID NO: 84211):GMVVDRXGXS (SEQ ID NO: 84567), AAPASXXVPARL (SEQ ID NO: 84677):EPIS (SEQ ID NO: 84109):KFKYE (SEQ ID NO: 84211):DMVVEAXGXR (SEQ ID NO: 84509), STPPTXXVPTRL (SEQ ID NO: 84850):EPIS (SEQ ID NO: 84109):KFKYE (SEQ ID NO: 84211):DMVVESXGXR (SEQ ID NO: 84511), HVPKPXXAPTKL (SEQ ID NO: 84734):EPIS (SEQ ID NO: 84109):KFKYE (SEQ ID NO: 84211):NMVVRSXGXH (SEQ ID NO: 84629), RVPSTXXAPVKT (SEQ ID NO: 84815):EPIS (SEQ ID NO: 84109):KFKYE (SEQ ID NO: 84211):MIVEEXGXL (SEQ ID NO: 84448), ASAAPXXVPQAL (SEQ ID NO: 84689):EPIS (SEQ ID NO: 84109):KFKYE (SEQ ID NO: 84211):MIVRSXKXS (SEQ ID NO: 84453), ASASPXXVSQDL (SEQ ID NO: 84701):EPIS (SEQ ID NO: 84109):KFKYE (SEQ ID NO: 84211):MIVKSXKXS (SEQ ID NO: 84451), ASASPXXVPQDL (SEQ ID NO: 84699):EPIS (SEQ ID NO: 84109):KFKYE (SEQ ID NO: 84211):MVVKSXKXS (SEQ ID NO: 84470), NDEGLEXVPTEE (SEQ ID NO: 84798):EPIS (SEQ ID NO: 84109):KFKYE (SEQ ID NO: 84211):FLQHNKXEXR (SEQ ID NO: 84536), NDEGLEXVPTGQ (SEQ ID NO: 84799):EPIS (SEQ ID NO: 84109):KFKYE (SEQ ID NO: 84211):LEEHSQXEXR (SEQ ID NO: 84577), SSVKXQPSRVHH (SEQ ID NO: 84834):EPIS (SEQ ID NO: 84109):KFKYE (SEQ ID NO: 84211):RLEEHLEXAXA (SEQ ID NO: 84646), RNVQXRPTQVQL (SEQ ID NO: 84806):EPIS (SEQ ID NO: 84109):KFKYE (SEQ ID NO: 84211):TLEDHLAXKXE (SEQ ID NO: 84659), KIPKAXXTPTEL (SEQ ID NO: 84766):SPIN (SEQ ID NO: 84119):YGKIP (SEQ ID NO: 84397):DMVVDGXGXR (SEQ ID NO: 84507), GIPEPXXTPTKM (SEQ ID NO: 84716):SPIN (SEQ ID NO: 84119):YGKIP (SEQ ID NO: 84397):NMVVDSXAXR (SEQ ID NO: 84619), SIPKAXXTPTEL (SEQ ID NO: 84826):SPIN (SEQ ID NO: 84119):YGKIP (SEQ ID NO: 84397):EMVVDGXGXR (SEQ ID NO: 84528), HVTKPTXTPTKL (SEQ ID NO: 84745):SPIN (SEQ ID NO: 84119):YGKIP (SEQ ID NO: 84397):NMVVDSXGXH (SEQ ID NO: 84620), YVPKPXXTPTKL (SEQ ID NO: 84866):SPIN (SEQ ID NO: 84119):YGKIP (SEQ ID NO: 84397):NMVVDSXGXH (SEQ ID NO: 84620), TVPKPXXTPTQL (SEQ ID NO: 84856):SPIN (SEQ ID NO: 84119):YGKIP (SEQ ID NO: 84397):NMVVDAXGXH (SEQ ID NO: 84618), AVPKAXXTPTKL (SEQ ID NO: 84706):SPIN (SEQ ID NO: 84119):YGKIP (SEQ ID NO: 84397):NMVVDAXGXH (SEQ ID NO: 84618), KVGKAXXTPTKL (SEQ ID NO: 84776):SPIN (SEQ ID NO: 84119):YGKIP (SEQ ID NO: 84397):EGMSVVDXGXR (SEQ ID NO: 84640), KASKAXXTPTKL (SEQ ID NO: 84756):SPIN (SEQ ID NO: 84119):YGKIP (SEQ ID NO: 84397):GMVVDEXGXR (SEQ ID NO: 84566), AAPASXXTPTRL (SEQ ID NO: 84676):SPIN (SEQ ID NO: 84119):YGKIP (SEQ ID NO: 84397):DMVVDAXGXR (SEQ ID NO: 84506), STPPTXXTPTRL (SEQ ID NO: 84846):SPIN (SEQ ID NO: 84119):YGKIP (SEQ ID NO: 84397):DMVVDSXGXR (SEQ ID NO: 84508), HVPKPXXTPTKL (SEQ ID NO: 84736):SPIN (SEQ ID NO: 84119):YGKIP (SEQ ID NO: 84397):NMVVDSXGXH (SEQ ID NO: 84620), RVPSTXXTPTKT (SEQ ID NO: 84816):SPIN (SEQ ID NO: 84119):YGKIP (SEQ ID NO: 84397):MIVVDXGXL (SEQ ID NO: 84454), ASAAPXXTPTAL (SEQ ID NO: 84686):SPIN (SEQ ID NO: 84119):YGKIP (SEQ ID NO: 84397):MIVVDXKXS (SEQ ID NO: 84455), ASASPXXTPTDL (SEQ ID NO: 84696):SPIN (SEQ ID NO: 84119):YGKIP (SEQ ID NO: 84397):MIVVDXKXS (SEQ ID NO: 84455), ASASPXXTPTDL (SEQ ID NO: 84696):SPIN (SEQ ID NO: 84119):YGKIP (SEQ ID NO: 84397):MVVVDXKXS (SEQ ID NO: 84472), NDEGLESTPTEE (SEQ ID NO: 84788):SPIN (SEQ ID NO: 84119):YGKIP (SEQ ID NO: 84397):FLVVDKXEXR (SEQ ID NO: 84542), NDEGLESTPTGQ (SEQ ID NO: 84789):SPIN (SEQ ID NO: 84119):YGKIP (SEQ ID NO: 84397):LEVVDQXEXR (SEQ ID NO: 84584), SSVKXQPTPTHH (SEQ ID NO: 84835):SPIN (SEQ ID NO: 84119):YGKIP (SEQ ID NO: 84397):RLVVDLEXAXA (SEQ ID NO: 84654), RNVQXRPTPTQL (SEQ ID NO: 84805):SPIN (SEQ ID NO: 84119):YGKIP (SEQ ID NO: 84397):TLVVDLAXKXE (SEQ ID NO: 84668), KIPKAXXVPTEL (SEQ ID NO: 84770):SPIN (SEQ ID NO: 84119):YGKIP (SEQ ID NO: 84397):DMVVEGXGXR (SEQ ID NO: 84510), GIPEPXXVPEKM (SEQ ID NO: 84718):SPIN (SEQ ID NO: 84119):YGKIP (SEQ ID NO: 84397):NMTVESXAXR (SEQ ID NO: 84604), SIPKAXXVPTEL (SEQ ID NO: 84830):SPIN (SEQ ID NO: 84119):YGKIP (SEQ ID NO: 84397):EMVVEGXGXR (SEQ ID NO: 84529), HVTKPTXAPTKL (SEQ ID NO: 84742):SPIN (SEQ ID NO: 84119):YGKIP (SEQ ID NO: 84397):NMVVRSXGXH (SEQ ID NO: 84629), YVPKPXXAPTKL (SEQ ID NO: 84864):SPIN (SEQ ID NO: 84119):YGKIP (SEQ ID NO: 84397):NMVVRSXGXH (SEQ ID NO: 84629), TVPKPXXAPTQL (SEQ ID NO: 84854):SPIN (SEQ ID NO: 84119):YGKIP (SEQ ID NO: 84397):NMVVRAXGXH (SEQ ID NO: 84627), AVPKAXXAPTKL (SEQ ID NO: 84704):SPIN (SEQ ID NO: 84119):YGKIP (SEQ ID NO: 84397):NMVVKAXGXH (SEQ ID NO: 84624), KVGKAXXVPTKL (SEQ ID NO: 84780):SPIN (SEQ ID NO: 84119):YGKIP (SEQ ID NO: 84397):EGMSVAEXGXR (SEQ ID NO: 84636), KASKAXXVPTKL (SEQ ID NO: 84760):SPIN (SEQ ID NO: 84119):YGKIP (SEQ ID NO: 84397):GMAVSEXGXR (SEQ ID NO: 84546), AAPASXXVPARL (SEQ ID NO: 84677):SPIN (SEQ ID NO: 84119):YGKIP (SEQ ID NO: 84397):DMVVEAXGXR (SEQ ID NO: 84509), STPPTXXVPTRL (SEQ ID NO: 84850):SPIN (SEQ ID NO: 84119):YGKIP (SEQ ID NO: 84397):DMVVESXGXR (SEQ ID NO: 84511), HVPKPXXAPTKL (SEQ ID NO: 84734):SPIN (SEQ ID NO: 84119):YGKIP (SEQ ID NO: 84397):NMVVRSXGXH (SEQ ID NO: 84629), RVPSTXXAPVKT (SEQ ID NO: 84815):SPIN (SEQ ID NO: 84119):YGKIP (SEQ ID NO: 84397):MIVEEXGXL (SEQ ID NO: 84448), ASAAPXXVPQAL (SEQ ID NO: 84689):SPIN (SEQ ID NO: 84119):YGKIP (SEQ ID NO: 84397):MIVRSXKXS (SEQ ID NO: 84453), ASASPXXVSQDL (SEQ ID NO: 84701):SPIN (SEQ ID NO: 84119):YGKIP (SEQ ID NO: 84397):MIVKSXKXS (SEQ ID NO: 84451), ASASPXXVPQDL (SEQ ID NO: 84699):SPIN (SEQ ID NO: 84119):YGKIP (SEQ ID NO: 84397):MVVKSXKXS (SEQ ID NO: 84470), NDEGLEXVPTEE (SEQ ID NO: 84798):SPIN (SEQ ID NO: 84119):YGKIP (SEQ ID NO: 84397):FLQHNKXEXR (SEQ ID NO: 84536), NDEGLEXVPTGQ (SEQ ID NO: 84799):SPIN (SEQ ID NO: 84119):YGKIP (SEQ ID NO: 84397):LEEHSQXEXR (SEQ ID NO: 84577), SSVKXQPSRVHH (SEQ ID NO: 84834):SPIN (SEQ ID NO: 84119):YGKIP (SEQ ID NO: 84397):RLEEHLEXAXA (SEQ ID NO: 84646), RNVQXRPTQVQL (SEQ ID NO: 84806):SPIN (SEQ ID NO: 84119):YGKIP (SEQ ID NO: 84397):TLEDHLAXKXE (SEQ ID NO: 84659), KIPKAXXVPAEL (SEQ ID NO: 84767):SPIS (SEQ ID NO: 84120):YKQYE (SEQ ID NO: 84398):DMVVEGXGXR (SEQ ID NO: 84510), GIPEPXXVPAKM (SEQ ID NO: 84717):SPIS (SEQ ID NO: 84120):YKQYE (SEQ ID NO: 84398):NMVVESXAXR (SEQ ID NO: 84622), SIPKAXXVPAEL (SEQ ID NO: 84827):SPIS (SEQ ID NO: 84120):YKQYE (SEQ ID NO: 84398):EMVVEGXGXR (SEQ ID NO: 84529), HVTKPTXVPAKL (SEQ ID NO: 84747):SPIS (SEQ ID NO: 84120):YKQYE (SEQ ID NO: 84398):NMVVESXGXH (SEQ ID NO: 84623), YVPKPXXVPAKL (SEQ ID NO: 84867):SPIS (SEQ ID NO: 84120):YKQYE (SEQ ID NO: 84398):NMVVESXGXH (SEQ ID NO: 84623), TVPKPXXVPAQL (SEQ ID NO: 84857):SPIS (SEQ ID NO: 84120):YKQYE (SEQ ID NO: 84398):NMVVEAXGXH (SEQ ID NO: 84621), AVPKAXXVPAKL (SEQ ID NO: 84707):SPIS (SEQ ID NO: 84120):YKQYE (SEQ ID NO: 84398):NMVVEAXGXH (SEQ ID NO: 84621), KVGKAXXVPAKL (SEQ ID NO: 84777):SPIS (SEQ ID NO: 84120):YKQYE (SEQ ID NO: 84398):EGMSVVEXGXR (SEQ ID NO: 84641), KASKAXXVPAKL (SEQ ID NO: 84757):SPIS (SEQ ID NO: 84120):YKQYE (SEQ ID NO: 84398):GMVVEEXGXR (SEQ ID NO: 84568), GSAGPXXVPAKM (SEQ ID NO: 84727):SPIS (SEQ ID NO: 84120):YKQYE (SEQ ID NO: 84398):GMVVERXGXS (SEQ ID NO: 84569), STPPTXXVPARL (SEQ ID NO: 84847):SPIS (SEQ ID NO: 84120):YKQYE (SEQ ID NO: 84398):DMVVESXGXR (SEQ ID NO: 84511), HVPKPXXVPAKL (SEQ ID NO: 84737):SPIS (SEQ ID NO: 84120):YKQYE (SEQ ID NO: 84398):NMVVESXGXH (SEQ ID NO: 84623), RVPSTXXVPAKT (SEQ ID NO: 84817):SPIS (SEQ ID NO: 84120):YKQYE (SEQ ID NO: 84398):MIVVEXGXL (SEQ ID NO: 84456), ASAAPXXVPAAL (SEQ ID NO: 84687):SPIS (SEQ ID NO: 84120):YKQYE (SEQ ID NO: 84398):MIVVEXKXS (SEQ ID NO: 84457), ASASPXXVPADL (SEQ ID NO: 84697):SPIS (SEQ ID NO: 84120):YKQYE (SEQ ID NO: 84398):MIVVEXKXS (SEQ ID NO: 84457), ASASPXXVPADL (SEQ ID NO: 84697):SPIS (SEQ ID NO: 84120):YKQYE (SEQ ID NO: 84398):MVVVEXKXS (SEQ ID NO: 84473), NDEGLEXVPAEE (SEQ ID NO: 84792):SPIS (SEQ ID NO: 84120):YKQYE (SEQ ID NO: 84398):FLVVEKXEXR (SEQ ID NO: 84543), NDEGLEXVPAGQ (SEQ ID NO: 84793):SPIS (SEQ ID NO: 84120):YKQYE (SEQ ID NO: 84398):LEVVEQXEXR (SEQ ID NO: 84585), SSVKXQPVPAHH (SEQ ID NO: 84837):SPIS (SEQ ID NO: 84120):YKQYE (SEQ ID NO: 84398):RLVVELEXAXA (SEQ ID NO: 84655), RNVQXRPVPAQL (SEQ ID NO: 84807):SPIS (SEQ ID NO: 84120):YKQYE (SEQ ID NO: 84398):TLVVELAXKXE (SEQ ID NO: 84669), KIPKAXXVPTEL (SEQ ID NO: 84770):SPIS (SEQ ID NO: 84120):YKQYE (SEQ ID NO: 84398):DMVVEGXGXR (SEQ ID NO: 84510), GIPEPXXVPEKM (SEQ ID NO: 84718):SPIS (SEQ ID NO: 84120):YKQYE (SEQ ID NO: 84398):NMTVESXAXR (SEQ ID NO: 84604), SIPKAXXVPTEL (SEQ ID NO: 84830):SPIS (SEQ ID NO: 84120):YKQYE (SEQ ID NO: 84398):EMVVEGXGXR (SEQ ID NO: 84529), HVTKPTXAPTKL (SEQ ID NO: 84742):SPIS (SEQ ID NO: 84120):YKQYE (SEQ ID NO: 84398):NMVVRSXGXH (SEQ ID NO: 84629), YVPKPXXAPTKL (SEQ ID NO: 84864):SPIS (SEQ ID NO: 84120):YKQYE (SEQ ID NO: 84398):NMVVRSXGXH (SEQ ID NO: 84629), TVPKPXXAPTQL (SEQ ID NO: 84854):SPIS (SEQ ID NO: 84120):YKQYE (SEQ ID NO: 84398):NMVVRAXGXH (SEQ ID NO: 84627), AVPKAXXAPTKL (SEQ ID NO: 84704):SPIS (SEQ ID NO: 84120):YKQYE (SEQ ID NO: 84398):NMVVKAXGXH (SEQ ID NO: 84624), KVGKAXXVPTKL (SEQ ID NO: 84780):SPIS (SEQ ID NO: 84120):YKQYE (SEQ ID NO: 84398):EGMSVAEXGXR (SEQ ID NO: 84636), KASKAXXVPTKL (SEQ ID NO: 84760):SPIS (SEQ ID NO: 84120):YKQYE (SEQ ID NO: 84398):GMAVSEXGXR (SEQ ID NO: 84546), GSAGPXXTPTKM (SEQ ID NO: 84726):SPIS (SEQ ID NO: 84120):YKQYE (SEQ ID NO: 84398):GMVVDRXGXS (SEQ ID NO: 84567), STPPTXXVPTRL (SEQ ID NO: 84850):SPIS (SEQ ID NO: 84120):YKQYE (SEQ ID NO: 84398):DMVVESXGXR (SEQ ID NO: 84511), HVPKPXXAPTKL (SEQ ID NO: 84734):SPIS (SEQ ID NO: 84120):YKQYE (SEQ ID NO: 84398):NMVVRSXGXH (SEQ ID NO: 84629), RVPSTXXAPVKT (SEQ ID NO: 84815):SPIS (SEQ ID NO: 84120):YKQYE (SEQ ID NO: 84398):MIVEEXGXL (SEQ ID NO: 84448), ASAAPXXVPQAL (SEQ ID NO: 84689):SPIS (SEQ ID NO: 84120):YKQYE (SEQ ID NO: 84398):MIVRSXKXS (SEQ ID NO: 84453), ASASPXXVSQDL (SEQ ID NO: 84701):SPIS (SEQ ID NO: 84120):YKQYE (SEQ ID NO: 84398):MIVKSXKXS (SEQ ID NO: 84451), ASASPXXVPQDL (SEQ ID NO: 84699):SPIS (SEQ ID NO: 84120):YKQYE (SEQ ID NO: 84398):MVVKSXKXS (SEQ ID NO: 84470), NDEGLEXVPTEE (SEQ ID NO: 84798):SPIS (SEQ ID NO: 84120):YKQYE (SEQ ID NO: 84398):FLQHNKXEXR (SEQ ID NO: 84536), NDEGLEXVPTGQ (SEQ ID NO: 84799):SPIS (SEQ ID NO: 84120):YKQYE (SEQ ID NO: 84398):LEEHSQXEXR (SEQ ID NO: 84577), SSVKXQPSRVHH (SEQ ID NO: 84834):SPIS (SEQ ID NO: 84120):YKQYE (SEQ ID NO: 84398):RLEEHLEXAXA (SEQ ID NO: 84646), RNVQXRPTQVQL (SEQ ID NO: 84806):SPIS (SEQ ID NO: 84120):YKQYE (SEQ ID NO: 84398):TLEDHLAXKXE (SEQ ID NO: 84659), GIPEPXXVPTKM (SEQ ID NO: 84720):SPIS (SEQ ID NO: 84120):YKQYE (SEQ ID NO: 84398):NMVVESXAXR (SEQ ID NO: 84622), HVTKPTXVPTKL (SEQ ID NO: 84750):SPIS (SEQ ID NO: 84120):YKQYE (SEQ ID NO: 84398):NMVVESXGXH (SEQ ID NO: 84623), YVPKPXXVPTKL (SEQ ID NO: 84870):SPIS (SEQ ID NO: 84120):YKQYE (SEQ ID NO: 84398):NMVVESXGXH (SEQ ID NO: 84623), TVPKPXXVPTQL (SEQ ID NO: 84860):SPIS (SEQ ID NO: 84120):YKQYE (SEQ ID NO: 84398):NMVVEAXGXH (SEQ ID NO: 84621), AVPKAXXVPTKL (SEQ ID NO: 84710):SPIS (SEQ ID NO: 84120):YKQYE (SEQ ID NO: 84398):NMVVEAXGXH (SEQ ID NO: 84621), KVGKAXXVPTKL (SEQ ID NO: 84780):SPIS (SEQ ID NO: 84120):YKQYE (SEQ ID NO: 84398):EGMSVVEXGXR (SEQ ID NO: 84641), KASKAXXVPTKL (SEQ ID NO: 84760):SPIS (SEQ ID NO: 84120):YKQYE (SEQ ID NO: 84398):GMVVEEXGXR (SEQ ID NO: 84568), GSAGPXXVPTKM (SEQ ID NO: 84730):SPIS (SEQ ID NO: 84120):YKQYE (SEQ ID NO: 84398):GMVVERXGXS (SEQ ID NO: 84569), AAPASXXVPTRL (SEQ ID NO: 84680):SPIS (SEQ ID NO: 84120):YKQYE (SEQ ID NO: 84398):DMVVEAXGXR (SEQ ID NO: 84509), HVPKPXXVPTKL (SEQ ID NO: 84740):SPIS (SEQ ID NO: 84120):YKQYE (SEQ ID NO: 84398):NMVVESXGXH (SEQ ID NO: 84623), RVPSTXXVPTKT (SEQ ID NO: 84820):SPIS (SEQ ID NO: 84120):YKQYE (SEQ ID NO: 84398):MIVVEXGXL (SEQ ID NO: 84456), ASAAPXXVPTAL (SEQ ID NO: 84690):SPIS (SEQ ID NO: 84120):YKQYE (SEQ ID NO: 84398):MIVVEXKXS (SEQ ID NO: 84457), ASASPXXVPTDL (SEQ ID NO: 84700):SPIS (SEQ ID NO: 84120):YKQYE (SEQ ID NO: 84398):MIVVEXKXS (SEQ ID NO: 84457), ASASPXXVPTDL (SEQ ID NO: 84700):SPIS (SEQ ID NO: 84120):YKQYE (SEQ ID NO: 84398):MVVVEXKXS (SEQ ID NO: 84473), NDEGLEXVPTEE (SEQ ID NO: 84798):SPIS (SEQ ID NO: 84120):YKQYE (SEQ ID NO: 84398):FLVVEKXEXR (SEQ ID NO: 84543), NDEGLEXVPTGQ (SEQ ID NO: 84799):SPIS (SEQ ID NO: 84120):YKQYE (SEQ ID NO: 84398):LEVVEQXEXR (SEQ ID NO: 84585), SSVKXQPVPTHH (SEQ ID NO: 84840):SPIS (SEQ ID NO: 84120):YKQYE (SEQ ID NO: 84398):RLVVELEXAXA (SEQ ID NO: 84655), RNVQXRPVPTQL (SEQ ID NO: 84810):SPIS (SEQ ID NO: 84120):YKQYE (SEQ ID NO: 84398):TLVVELAXKXE (SEQ ID NO: 84669), AAPASXXVPARL (SEQ ID NO: 84677):SPIS (SEQ ID NO: 84120):YKQYE (SEQ ID NO: 84398):DMVVEAXGXR (SEQ ID NO: 84509), KIPKAXXAPVEL (SEQ ID NO: 84765):KPLS (SEQ ID NO: 84112):DHHKD (SEQ ID NO: 84149):DMVEEGXGXR (SEQ ID NO: 84498), GIPEPXXAPVKM (SEQ ID NO: 84715):KPLS (SEQ ID NO: 84112):DHHKD (SEQ ID NO: 84149):NMVEESXAXR (SEQ ID NO: 84610), SIPKAXXAPVEL (SEQ ID NO: 84825):KPLS (SEQ ID NO: 84112):DHHKD (SEQ ID NO: 84149):EMVEEGXGXR (SEQ ID NO: 84525), HVTKPTXAPVKL (SEQ ID NO: 84743):KPLS (SEQ ID NO: 84112):DHHKD (SEQ ID NO: 84149):NMVEESXGXH (SEQ ID NO: 84611), YVPKPXXAPVKL (SEQ ID NO: 84865):KPLS (SEQ ID NO: 84112):DHHKD (SEQ ID NO: 84149):NMVEESXGXH (SEQ ID NO: 84611), TVPKPXXAPVQL (SEQ ID NO: 84855):KPLS (SEQ ID NO: 84112):DHHKD (SEQ ID NO: 84149):NMVEEAXGXH (SEQ ID NO: 84609), AVPKAXXAPVKL (SEQ ID NO: 84705):KPLS (SEQ ID NO: 84112):DHHKD (SEQ ID NO: 84149):NMVEEAXGXH (SEQ ID NO: 84609), KVGKAXXAPVKL (SEQ ID NO: 84775):KPLS (SEQ ID NO: 84112):DHHKD (SEQ ID NO: 84149):EGMSVEEXGXR (SEQ ID NO: 84637), KASKAXXAPVKL (SEQ ID NO: 84755):KPLS (SEQ ID NO: 84112):DHHKD (SEQ ID NO: 84149):GMVEEEXGXR (SEQ ID NO: 84560), GSAGPXXAPVKM (SEQ ID NO: 84725):KPLS (SEQ ID NO: 84112):DHHKD (SEQ ID NO: 84149):GMVEERXGXS (SEQ ID NO: 84561), AAPASXXAPVRL (SEQ ID NO: 84675):KPLS (SEQ ID NO: 84112):DHHKD (SEQ ID NO: 84149):DMVEEAXGXR (SEQ ID NO: 84497), STPPTXXAPVRL (SEQ ID NO: 84845):KPLS (SEQ ID NO: 84112):DHHKD (SEQ ID NO: 84149):DMVEESXGXR (SEQ ID NO: 84499), HVPKPXXAPVKL (SEQ ID NO: 84735):KPLS (SEQ ID NO: 84112):DHHKD (SEQ ID NO: 84149):NMVEESXGXH (SEQ ID NO: 84611), ASAAPXXAPVAL (SEQ ID NO: 84685):KPLS (SEQ ID NO: 84112):DHHKD (SEQ ID NO: 84149):MIVEEXKXS (SEQ ID NO: 84449), ASASPXXAPVDL (SEQ ID NO: 84695):KPLS (SEQ ID NO: 84112):DHHKD (SEQ ID NO: 84149):MIVEEXKXS (SEQ ID NO: 84449), ASASPXXAPVDL (SEQ ID NO: 84695):KPLS (SEQ ID NO: 84112):DHHKD (SEQ ID NO: 84149):MVVEEXKXS (SEQ ID NO: 84469), NDEGLESAPVEE (SEQ ID NO: 84784):KPLS (SEQ ID NO: 84112):DHHKD (SEQ ID NO: 84149):FLVEEKXEXR (SEQ ID NO: 84539), NDEGLESAPVGQ (SEQ ID NO: 84785):KPLS (SEQ ID NO: 84112):DHHKD (SEQ ID NO: 84149):LEVEEQXEXR (SEQ ID NO: 84581), SSVKXQPAPVHH (SEQ ID NO: 84833):KPLS (SEQ ID NO: 84112):DHHKD (SEQ ID NO: 84149):RLVEELEXAXA (SEQ ID NO: 84651), RNVQXRPAPVQL (SEQ ID NO: 84803):KPLS (SEQ ID NO: 84112):DHHKD (SEQ ID NO: 84149):TLVEELAXKXE (SEQ ID NO: 84665), KIPKAXXVPTEL (SEQ ID NO: 84770):KPLS (SEQ ID NO: 84112):DHHKD (SEQ ID NO: 84149):DMVVEGXGXR (SEQ ID NO: 84510), GIPEPXXVPEKM (SEQ ID NO: 84718):KPLS (SEQ ID NO: 84112):DHHKD (SEQ ID NO: 84149):NMTVESXAXR (SEQ ID NO: 84604), SIPKAXXVPTEL (SEQ ID NO: 84830):KPLS (SEQ ID NO: 84112):DHHKD (SEQ ID NO: 84149):EMVVEGXGXR (SEQ ID NO: 84529), HVTKPTXAPTKL (SEQ ID NO: 84742):KPLS (SEQ ID NO: 84112):DHHKD (SEQ ID NO: 84149):NMVVRSXGXH (SEQ ID NO: 84629), YVPKPXXAPTKL (SEQ ID NO: 84864):KPLS (SEQ ID NO: 84112):DHHKD (SEQ ID NO: 84149):NMVVRSXGXH (SEQ ID NO: 84629), TVPKPXXAPTQL (SEQ ID NO: 84854):KPLS (SEQ ID NO: 84112):DHHKD (SEQ ID NO: 84149):NMVVRAXGXH (SEQ ID NO: 84627), AVPKAXXAPTKL (SEQ ID NO: 84704):KPLS (SEQ ID NO: 84112):DHHKD (SEQ ID NO: 84149):NMVVKAXGXH (SEQ ID NO: 84624), KVGKAXXVPTKL (SEQ ID NO: 84780):KPLS (SEQ ID NO: 84112):DHHKD (SEQ ID NO: 84149):EGMSVAEXGXR (SEQ ID NO: 84636), KASKAXXVPTKL (SEQ ID NO: 84760):KPLS (SEQ ID NO: 84112):DHHKD (SEQ ID NO: 84149):GMAVSEXGXR (SEQ ID NO: 84546), GSAGPXXTPTKM (SEQ ID NO: 84726):KPLS (SEQ ID NO: 84112):DHHKD (SEQ ID NO: 84149):GMVVDRXGXS (SEQ ID NO: 84567), AAPASXXVPARL (SEQ ID NO: 84677):KPLS (SEQ ID NO: 84112):DHHKD (SEQ ID NO: 84149):DMVVEAXGXR (SEQ ID NO: 84509), STPPTXXVPTRL (SEQ ID NO: 84850):KPLS (SEQ ID NO: 84112):DHHKD (SEQ ID NO: 84149):DMVVESXGXR (SEQ ID NO: 84511), HVPKPXXAPTKL (SEQ ID NO: 84734):KPLS (SEQ ID NO: 84112):DHHKD (SEQ ID NO: 84149):NMVVRSXGXH (SEQ ID NO: 84629), ASAAPXXVPQAL (SEQ ID NO: 84689):KPLS (SEQ ID NO: 84112):DHHKD (SEQ ID NO: 84149):MIVRSXKXS (SEQ ID NO: 84453), ASASPXXVSQDL (SEQ ID NO: 84701):KPLS (SEQ ID NO: 84112):DHHKD (SEQ ID NO: 84149):MIVKSXKXS (SEQ ID NO: 84451), ASASPXXVPQDL (SEQ ID NO: 84699):KPLS (SEQ ID NO: 84112):DHHKD (SEQ ID NO: 84149):MVVKSXKXS (SEQ ID NO: 84470), NDEGLEXVPTEE (SEQ ID NO: 84798):KPLS (SEQ ID NO: 84112):DHHKD (SEQ ID NO: 84149):FLQHNKXEXR (SEQ ID NO: 84536), NDEGLEXVPTGQ (SEQ ID NO: 84799):KPLS (SEQ ID NO: 84112):DHHKD (SEQ ID NO: 84149):LEEHSQXEXR (SEQ ID NO: 84577), SSVKXQPSRVHH (SEQ ID NO: 84834):KPLS (SEQ ID NO: 84112):DHHKD (SEQ ID NO: 84149):RLEEHLEXAXA (SEQ ID NO: 84646), RNVQXRPTQVQL (SEQ ID NO: 84806):KPLS (SEQ ID NO: 84112):DHHKD (SEQ ID NO: 84149):TLEDHLAXKXE (SEQ ID NO: 84659), KIPKAXXVPQEL (SEQ ID NO: 84769):EPLP (SEQ ID NO: 84110):EQLSN (SEQ ID NO: 84178):DMVRXGXGSR (SEQ ID NO: 84505), GIPEPXXVPQKM (SEQ ID NO: 84719):EPLP (SEQ ID NO: 84110):EQLSN (SEQ ID NO: 84178):NMVRSSXAXR (SEQ ID NO: 84616), SIPKAXXVPQEL (SEQ ID NO: 84829):EPLP (SEQ ID NO: 84110):EQLSN (SEQ ID NO: 84178):EMVRXGXGSR (SEQ ID NO: 84527), HVTKPTXVPQKL (SEQ ID NO: 84749):EPLP (SEQ ID NO: 84110):EQLSN (SEQ ID NO: 84178):NMVRSSXGXH (SEQ ID NO: 84617), YVPKPXXVPQKL (SEQ ID NO: 84869):EPLP (SEQ ID NO: 84110):EQLSN (SEQ ID NO: 84178):NMVRSSXGXH (SEQ ID NO: 84617), TVPKPXXVPQQL (SEQ ID NO: 84859):EPLP (SEQ ID NO: 84110):EQLSN (SEQ ID NO: 84178):NMVRSAXGXH (SEQ ID NO: 84615), AVPKAXXVPQKL (SEQ ID NO: 84709):EPLP (SEQ ID NO: 84110):EQLSN (SEQ ID NO: 84178):NMVRSAXGXH (SEQ ID NO: 84615), KVGKAXXVPQKL (SEQ ID NO: 84779):EPLP (SEQ ID NO: 84110):EQLSN (SEQ ID NO: 84178):EGMSVRSXGXR (SEQ ID NO: 84639), KASKAXXVPQKL (SEQ ID NO: 84759):EPLP (SEQ ID NO: 84110):EQLSN (SEQ ID NO: 84178):GMVRSEXGXR (SEQ ID NO: 84564), GSAGPXXVPQKM (SEQ ID NO: 84729):EPLP (SEQ ID NO: 84110):EQLSN (SEQ ID NO: 84178):GMVRSRXGXS (SEQ ID NO: 84565), AAPASXXVPQRL (SEQ ID NO: 84679):EPLP (SEQ ID NO: 84110):EQLSN (SEQ ID NO: 84178):DMVRSAXGXR (SEQ ID NO: 84503), STPPTXXVPQRL (SEQ ID NO: 84849):EPLP (SEQ ID NO: 84110):EQLSN (SEQ ID NO: 84178):DMVRSSXGXR (SEQ ID NO: 84504), HVPKPXXVPQKL (SEQ ID NO: 84739):EPLP (SEQ ID NO: 84110):EQLSN (SEQ ID NO: 84178):NMVRSSXGXH (SEQ ID NO: 84617), RVPSTXXVPQKT (SEQ ID NO: 84819):EPLP (SEQ ID NO: 84110):EQLSN (SEQ ID NO: 84178):MIVRSXGXL (SEQ ID NO: 84452), ASASPXXVPQDL (SEQ ID NO: 84699):EPLP (SEQ ID NO: 84110):EQLSN (SEQ ID NO: 84178):MIVRSXKXS (SEQ ID NO: 84453), ASASPXXVPQDL (SEQ ID NO: 84699):EPLP (SEQ ID NO: 84110):EQLSN (SEQ ID NO: 84178):MVVRSXKXS (SEQ ID NO: 84471), NDEGLEXVPQEE (SEQ ID NO: 84796):EPLP (SEQ ID NO: 84110):EQLSN (SEQ ID NO: 84178):FLVRXKXESR (SEQ ID NO: 84541), NDEGLEXVPQGQ (SEQ ID NO: 84797):EPLP (SEQ ID NO: 84110):EQLSN (SEQ ID NO: 84178):LEVRSQXEXR (SEQ ID NO: 84583), SSVKXQPVPQHH (SEQ ID NO: 84839):EPLP (SEQ ID NO: 84110):EQLSN (SEQ ID NO: 84178):RLVRSLEXAXA (SEQ ID NO: 84653), RNVQXRPVPQQL (SEQ ID NO: 84809):EPLP (SEQ ID NO: 84110):EQLSN (SEQ ID NO: 84178):TLVRSLAXKXE (SEQ ID NO: 84667), KIPKAXXVPTEL (SEQ ID NO: 84770):EPLP (SEQ ID NO: 84110):EQLSN (SEQ ID NO: 84178):DMVVEGXGXR (SEQ ID NO: 84510), GIPEPXXVPEKM (SEQ ID NO: 84718):EPLP (SEQ ID NO: 84110):EQLSN (SEQ ID NO: 84178):NMTVESXAXR (SEQ ID NO: 84604), SIPKAXXVPTEL (SEQ ID NO: 84830):EPLP (SEQ ID NO: 84110):EQLSN (SEQ ID NO: 84178):EMVVEGXGXR (SEQ ID NO: 84529), HVTKPTXAPTKL (SEQ ID NO: 84742):EPLP (SEQ ID NO: 84110):EQLSN (SEQ ID NO: 84178):NMVVRSXGXH (SEQ ID NO: 84629), YVPKPXXAPTKL (SEQ ID NO: 84864):EPLP (SEQ ID NO: 84110):EQLSN (SEQ ID NO: 84178):NMVVRSXGXH (SEQ ID NO: 84629), TVPKPXXAPTQL (SEQ ID NO: 84854):EPLP (SEQ ID NO: 84110):EQLSN (SEQ ID NO: 84178):NMVVRAXGXH (SEQ ID NO: 84627), AVPKAXXAPTKL (SEQ ID NO: 84704):EPLP (SEQ ID NO: 84110):EQLSN (SEQ ID NO: 84178):NMVVKAXGXH (SEQ ID NO: 84624), KVGKAXXVPTKL (SEQ ID NO: 84780):EPLP (SEQ ID NO: 84110):EQLSN (SEQ ID NO: 84178):EGMSVAEXGXR (SEQ ID NO: 84636), KASKAXXVPTKL (SEQ ID NO: 84760):EPLP (SEQ ID NO: 84110):EQLSN (SEQ ID NO: 84178):GMAVSEXGXR (SEQ ID NO: 84546), GSAGPXXTPTKM (SEQ ID NO: 84726):EPLP (SEQ ID NO: 84110):EQLSN (SEQ ID NO: 84178):GMVVDRXGXS (SEQ ID NO: 84567), AAPASXXVPARL (SEQ ID NO: 84677):EPLP (SEQ ID NO: 84110):EQLSN (SEQ ID NO: 84178):DMVVEAXGXR (SEQ ID NO: 84509), STPPTXXVPTRL (SEQ ID NO: 84850):EPLP (SEQ ID NO: 84110):EQLSN (SEQ ID NO: 84178):DMVVESXGXR (SEQ ID NO: 84511), HVPKPXXAPTKL (SEQ ID NO: 84734):EPLP (SEQ ID NO: 84110):EQLSN (SEQ ID NO: 84178):NMVVRSXGXH (SEQ ID NO: 84629), RVPSTXXAPVKT (SEQ ID NO: 84815):EPLP (SEQ ID NO: 84110):EQLSN (SEQ ID NO: 84178):MIVEEXGXL (SEQ ID NO: 84448), ASASPXXVSQDL (SEQ ID NO: 84701):EPLP (SEQ ID NO: 84110):EQLSN (SEQ ID NO: 84178):MIVKSXKXS (SEQ ID NO: 84451), ASASPXXVPQDL (SEQ ID NO: 84699):EPLP (SEQ ID NO: 84110):EQLSN (SEQ ID NO: 84178):MVVKSXKXS (SEQ ID NO: 84470), NDEGLEXVPTEE (SEQ ID NO: 84798):EPLP (SEQ ID NO: 84110):EQLSN (SEQ ID NO: 84178):FLQHNKXEXR (SEQ ID NO: 84536), NDEGLEXVPTGQ (SEQ ID NO: 84799):EPLP (SEQ ID NO: 84110):EQLSN (SEQ ID NO: 84178):LEEHSQXEXR (SEQ ID NO: 84577), SSVKXQPSRVHH (SEQ ID NO: 84834):EPLP (SEQ ID NO: 84110):EQLSN (SEQ ID NO: 84178):RLEEHLEXAXA (SEQ ID NO: 84646), RNVQXRPTQVQL (SEQ ID NO: 84806):EPLP (SEQ ID NO: 84110):EQLSN (SEQ ID NO: 84178):TLEDHLAXKXE (SEQ ID NO: 84659), KIPKAXXVSQEL (SEQ ID NO: 84771):EPLT (SEQ ID NO: 84111):EQLSN (SEQ ID NO: 84178):DMVKXGXGSR (SEQ ID NO: 84502), GIPEPXXVSQKM (SEQ ID NO: 84721):EPLT (SEQ ID NO: 84111):EQLSN (SEQ ID NO: 84178):NMVKSSXAXR (SEQ ID NO: 84613), SIPKAXXVSQEL (SEQ ID NO: 84831):EPLT (SEQ ID NO: 84111):EQLSN (SEQ ID NO: 84178):EMVKXGXGSR (SEQ ID NO: 84526), HVTKPTXVSQKL (SEQ ID NO: 84751):EPLT (SEQ ID NO: 84111):EQLSN (SEQ ID NO: 84178):NMVKSSXGXH (SEQ ID NO: 84614), YVPKPXXVSQKL (SEQ ID NO: 84871):EPLT (SEQ ID NO: 84111):EQLSN (SEQ ID NO: 84178):NMVKSSXGXH (SEQ ID NO: 84614), TVPKPXXVSQQL (SEQ ID NO: 84861):EPLT (SEQ ID NO: 84111):EQLSN (SEQ ID NO: 84178):NMVKSAXGXH (SEQ ID NO: 84612), AVPKAXXVSQKL (SEQ ID NO: 84711):EPLT (SEQ ID NO: 84111):EQLSN (SEQ ID NO: 84178):NMVKSAXGXH (SEQ ID NO: 84612), KVGKAXXVSQKL (SEQ ID NO: 84781):EPLT (SEQ ID NO: 84111):EQLSN (SEQ ID NO: 84178):EGMSVKSXGXR (SEQ ID NO: 84638), KASKAXXVSQKL (SEQ ID NO: 84761):EPLT (SEQ ID NO: 84111):EQLSN (SEQ ID NO: 84178):GMVKSEXGXR (SEQ ID NO: 84562), GSAGPXXVSQKM (SEQ ID NO: 84731):EPLT (SEQ ID NO: 84111):EQLSN (SEQ ID NO: 84178):GMVKSRXGXS (SEQ ID NO: 84563), AAPASXXVSQRL (SEQ ID NO: 84681):EPLT (SEQ ID NO: 84111):EQLSN (SEQ ID NO: 84178):DMVKSAXGXR (SEQ ID NO: 84500), STPPTXXVSQRL (SEQ ID NO: 84851):EPLT (SEQ ID NO: 84111):EQLSN (SEQ ID NO: 84178):DMVKSSXGXR (SEQ ID NO: 84501), HVPKPXXVSQKL (SEQ ID NO: 84741):EPLT (SEQ ID NO: 84111):EQLSN (SEQ ID NO: 84178):NMVKSSXGXH (SEQ ID NO: 84614), RVPSTXXVSQKT (SEQ ID NO: 84821):EPLT (SEQ ID NO: 84111):EQLSN (SEQ ID NO: 84178):MIVKSXGXL (SEQ ID NO: 84450), ASAAPXXVSQAL (SEQ ID NO: 84691):EPLT (SEQ ID NO: 84111):EQLSN (SEQ ID NO: 84178):MIVKSXKXS (SEQ ID NO: 84451), ASASPXXVSQDL (SEQ ID NO: 84701):EPLT (SEQ ID NO: 84111):EQLSN (SEQ ID NO: 84178):MVVKSXKXS (SEQ ID NO: 84470), NDEGLEXVSQEE (SEQ ID NO: 84800):EPLT (SEQ ID NO: 84111):EQLSN (SEQ ID NO: 84178):FLVKXKXESR (SEQ ID NO: 84540), NDEGLEXVSQGQ (SEQ ID NO: 84801):EPLT (SEQ ID NO: 84111):EQLSN (SEQ ID NO: 84178):LEVKSQXEXR (SEQ ID NO: 84582), SSVKXQPVSQHH (SEQ ID NO: 84841):EPLT (SEQ ID NO: 84111):EQLSN (SEQ ID NO: 84178):RLVKSLEXAXA (SEQ ID NO: 84652), RNVQXRPVSQQL (SEQ ID NO: 84811):EPLT (SEQ ID NO: 84111):EQLSN (SEQ ID NO: 84178):TLVKSLAXKXE (SEQ ID NO: 84666), KIPKAXXVPTEL (SEQ ID NO: 84770):EPLT (SEQ ID NO: 84111):EQLSN (SEQ ID NO: 84178):DMVVEGXGXR (SEQ ID NO: 84510), GIPEPXXVPEKM (SEQ ID NO: 84718):EPLT (SEQ ID NO: 84111):EQLSN (SEQ ID NO: 84178):NMTVESXAXR (SEQ ID NO: 84604), SIPKAXXVPTEL (SEQ ID NO: 84830):EPLT (SEQ ID NO: 84111):EQLSN (SEQ ID NO: 84178):EMVVEGXGXR (SEQ ID NO: 84529), HVTKPTXAPTKL (SEQ ID NO: 84742):EPLT (SEQ ID NO: 84111):EQLSN (SEQ ID NO: 84178):NMVVRSXGXH (SEQ ID NO: 84629), YVPKPXXAPTKL (SEQ ID NO: 84864):EPLT (SEQ ID NO: 84111):EQLSN (SEQ ID NO: 84178):NMVVRSXGXH (SEQ ID NO: 84629), TVPKPXXAPTQL (SEQ ID NO: 84854):EPLT (SEQ ID NO: 84111):EQLSN (SEQ ID NO: 84178):NMVVRAXGXH (SEQ ID NO: 84627), AVPKAXXAPTKL (SEQ ID NO: 84704):EPLT (SEQ ID NO: 84111):EQLSN (SEQ ID NO: 84178):NMVVKAXGXH (SEQ ID NO: 84624), KVGKAXXVPTKL (SEQ ID NO: 84780):EPLT (SEQ ID NO: 84111):EQLSN (SEQ ID NO: 84178):EGMSVAEXGXR (SEQ ID NO: 84636), KASKAXXVPTKL (SEQ ID NO: 84760):EPLT (SEQ ID NO: 84111):EQLSN (SEQ ID NO: 84178):GMAVSEXGXR (SEQ ID NO: 84546), GSAGPXXTPTKM (SEQ ID NO: 84726):EPLT (SEQ ID NO: 84111):EQLSN (SEQ ID NO: 84178):GMVVDRXGXS (SEQ ID NO: 84567), AAPASXXVPARL (SEQ ID NO: 84677):EPLT (SEQ ID NO: 84111):EQLSN (SEQ ID NO: 84178):DMVVEAXGXR (SEQ ID NO: 84509), STPPTXXVPTRL (SEQ ID NO: 84850):EPLT (SEQ ID NO: 84111):EQLSN (SEQ ID NO: 84178):DMVVESXGXR (SEQ ID NO: 84511), HVPKPXXAPTKL (SEQ ID NO: 84734):EPLT (SEQ ID NO: 84111):EQLSN (SEQ ID NO: 84178):NMVVRSXGXH (SEQ ID NO: 84629), RVPSTXXAPVKT (SEQ ID NO: 84815):EPLT (SEQ ID NO: 84111):EQLSN (SEQ ID NO: 84178):MIVEEXGXL (SEQ ID NO: 84448), ASAAPXXVPQAL (SEQ ID NO: 84689):EPLT (SEQ ID NO: 84111):EQLSN (SEQ ID NO: 84178):MIVRSXKXS (SEQ ID NO: 84453), ASASPXXVPQDL (SEQ ID NO: 84699):EPLT (SEQ ID NO: 84111):EQLSN (SEQ ID NO: 84178):MVVKSXKXS (SEQ ID NO: 84470), NDEGLEXVPTEE (SEQ ID NO: 84798):EPLT (SEQ ID NO: 84111):EQLSN (SEQ ID NO: 84178):FLQHNKXEXR (SEQ ID NO: 84536), NDEGLEXVPTGQ (SEQ ID NO: 84799):EPLT (SEQ ID NO: 84111):EQLSN (SEQ ID NO: 84178):LEEHSQXEXR (SEQ ID NO: 84577), SSVKXQPSRVHH (SEQ ID NO: 84834):EPLT (SEQ ID NO: 84111):EQLSN (SEQ ID NO: 84178):RLEEHLEXAXA (SEQ ID NO: 84646), RNVQXRPTQVQL (SEQ ID NO: 84806):EPLT (SEQ ID NO: 84111):EQLSN (SEQ ID NO: 84178):TLEDHLAXKXE (SEQ ID NO: 84659), KIPKAXXVPQEL (SEQ ID NO: 84769):EPLT (SEQ ID NO: 84111):EQLSN (SEQ ID NO: 84178):DMVKXGXGSR (SEQ ID NO: 84502), GIPEPXXVPQKM (SEQ ID NO: 84719):EPLT (SEQ ID NO: 84111):EQLSN (SEQ ID NO: 84178):NMVKSSXAXR (SEQ ID NO: 84613), SIPKAXXVPQEL (SEQ ID NO: 84829):EPLT (SEQ ID NO: 84111):EQLSN (SEQ ID NO: 84178):EMVKXGXGSR (SEQ ID NO: 84526), HVTKPTXVPQKL (SEQ ID NO: 84749):EPLT (SEQ ID NO: 84111):EQLSN (SEQ ID NO: 84178):NMVKSSXGXH (SEQ ID NO: 84614), YVPKPXXVPQKL (SEQ ID NO: 84869):EPLT (SEQ ID NO: 84111):EQLSN (SEQ ID NO: 84178):NMVKSSXGXH (SEQ ID NO: 84614), TVPKPXXVPQQL (SEQ ID NO: 84859):EPLT (SEQ ID NO: 84111):EQLSN (SEQ ID NO: 84178):NMVKSAXGXH (SEQ ID NO: 84612), AVPKAXXVPQKL (SEQ ID NO: 84709):EPLT (SEQ ID NO: 84111):EQLSN (SEQ ID NO: 84178):NMVKSAXGXH (SEQ ID NO: 84612), KVGKAXXVPQKL (SEQ ID NO: 84779):EPLT (SEQ ID NO: 84111):EQLSN (SEQ ID NO: 84178):EGMSVKSXGXR (SEQ ID NO: 84638), KASKAXXVPQKL (SEQ ID NO: 84759):EPLT (SEQ ID NO: 84111):EQLSN (SEQ ID NO: 84178):GMVKSEXGXR (SEQ ID NO: 84562), GSAGPXXVPQKM (SEQ ID NO: 84729):EPLT (SEQ ID NO: 84111):EQLSN (SEQ ID NO: 84178):GMVKSRXGXS (SEQ ID NO: 84563), AAPASXXVPQRL (SEQ ID NO: 84679):EPLT (SEQ ID NO: 84111):EQLSN (SEQ ID NO: 84178):DMVKSAXGXR (SEQ ID NO: 84500), STPPTXXVPQRL (SEQ ID NO: 84849):EPLT (SEQ ID NO: 84111):EQLSN (SEQ ID NO: 84178):DMVKSSXGXR (SEQ ID NO: 84501), HVPKPXXVPQKL (SEQ ID NO: 84739):EPLT (SEQ ID NO: 84111):EQLSN (SEQ ID NO: 84178):NMVKSSXGXH (SEQ ID NO: 84614), RVPSTXXVPQKT (SEQ ID NO: 84819):EPLT (SEQ ID NO: 84111):EQLSN (SEQ ID NO: 84178):MIVKSXGXL (SEQ ID NO: 84450), ASAAPXXVPQAL (SEQ ID NO: 84689):EPLT (SEQ ID NO: 84111):EQLSN (SEQ ID NO: 84178):MIVKSXKXS (SEQ ID NO: 84451), ASASPXXVPQDL (SEQ ID NO: 84699):EPLT (SEQ ID NO: 84111):EQLSN (SEQ ID NO: 84178):MIVKSXKXS (SEQ ID NO: 84451), NDEGLEXVPQEE (SEQ ID NO: 84796):EPLT (SEQ ID NO: 84111):EQLSN (SEQ ID NO: 84178):FLVKXKXESR (SEQ ID NO: 84540), NDEGLEXVPQGQ (SEQ ID NO: 84797):EPLT (SEQ ID NO: 84111):EQLSN (SEQ ID NO: 84178):LEVKSQXEXR (SEQ ID NO: 84582), SSVKXQPVPQHH (SEQ ID NO: 84839):EPLT (SEQ ID NO: 84111):EQLSN (SEQ ID NO: 84178):RLVKSLEXAXA (SEQ ID NO: 84652), RNVQXRPVPQQL (SEQ ID NO: 84809):EPLT (SEQ ID NO: 84111):EQLSN (SEQ ID NO: 84178):TLVKSLAXKXE (SEQ ID NO: 84666), ASASPXXVSQDL (SEQ ID NO: 84701):EPLT (SEQ ID NO: 84111):EQLSN (SEQ ID NO: 84178):MIVKSXKXS (SEQ ID NO: 84451), KIPKAXXVPTEL (SEQ ID NO: 84770):SNIT (SEQ ID NO: 84118):IGEMS (SEQ ID NO: 84209):DMQHNGXGXR (SEQ ID NO: 84489), GIPEPXXVPTKM (SEQ ID NO: 84720):SNIT (SEQ ID NO: 84118):IGEMS (SEQ ID NO: 84209):NMQHNSXAXR (SEQ ID NO: 84601), SIPKAXXVPTEL (SEQ ID NO: 84830):SNIT (SEQ ID NO: 84118):IGEMS (SEQ ID NO: 84209):EMQHNGXGXR (SEQ ID NO: 84522), HVTKPTXVPTKL (SEQ ID NO: 84750):SNIT (SEQ ID NO: 84118):IGEMS (SEQ ID NO: 84209):NMQHNSXGXH (SEQ ID NO: 84602), YVPKPXXVPTKL (SEQ ID NO: 84870):SNIT (SEQ ID NO: 84118):IGEMS (SEQ ID NO: 84209):NMQHNSXGXH (SEQ ID NO: 84602), TVPKPXXVPTQL (SEQ ID NO: 84860):SNIT (SEQ ID NO: 84118):IGEMS (SEQ ID NO: 84209):NMQHNAXGXH (SEQ ID NO: 84600), AVPKAXXVPTKL (SEQ ID NO: 84710):SNIT (SEQ ID NO: 84118):IGEMS (SEQ ID NO: 84209):NMQHNAXGXH (SEQ ID NO: 84600), KVGKAXXVPTKL (SEQ ID NO: 84780):SNIT (SEQ ID NO: 84118):IGEMS (SEQ ID NO: 84209):EGMSQHNXGXR (SEQ ID NO: 84634), KASKAXXVPTKL (SEQ ID NO: 84760):SNIT (SEQ ID NO: 84118):IGEMS (SEQ ID NO: 84209):GMQHNEXGXR (SEQ ID NO: 84554), GSAGPXXVPTKM (SEQ ID NO: 84730):SNIT (SEQ ID NO: 84118):IGEMS (SEQ ID NO: 84209):GMQHNRXGXS (SEQ ID NO: 84555), AAPASXXVPTRL (SEQ ID NO: 84680):SNIT (SEQ ID NO: 84118):IGEMS (SEQ ID NO: 84209):DMQHNAXGXR (SEQ ID NO: 84488), STPPTXXVPTRL (SEQ ID NO: 84850):SNIT (SEQ ID NO: 84118):IGEMS (SEQ ID NO: 84209):DMQHNSXGXR (SEQ ID NO: 84490), HVPKPXXVPTKL (SEQ ID NO: 84740):SNIT (SEQ ID NO: 84118):IGEMS (SEQ ID NO: 84209):NMQHNSXGXH (SEQ ID NO: 84602), RVPSTXXVPTKT (SEQ ID NO: 84820):SNIT (SEQ ID NO: 84118):IGEMS (SEQ ID NO: 84209):MIQHNXGXL (SEQ ID NO: 84442), ASAAPXXVPTAL (SEQ ID NO: 84690):SNIT (SEQ ID NO: 84118):IGEMS (SEQ ID NO: 84209):MIQHNXKXS (SEQ ID NO: 84443), ASASPXXVPTDL (SEQ ID NO: 84700):SNIT (SEQ ID NO: 84118):IGEMS (SEQ ID NO: 84209):MIQHNXKXS (SEQ ID NO: 84443), ASASPXXVPTDL (SEQ ID NO: 84700):SNIT (SEQ ID NO: 84118):IGEMS (SEQ ID NO: 84209):MVQHNXKXS (SEQ ID NO: 84466), NDEGLEXVPTGQ (SEQ ID NO: 84799):SNIT (SEQ ID NO: 84118):IGEMS (SEQ ID NO: 84209):LEQHNQXEXR (SEQ ID NO: 84578), NDEGLEXVPTEE (SEQ ID NO: 84798):SNIT (SEQ ID NO: 84118):IGEMS (SEQ ID NO: 84209):FLQHNKXEXR (SEQ ID NO: 84536), SSVKXQPVPTHH (SEQ ID NO: 84840):SNIT (SEQ ID NO: 84118):IGEMS (SEQ ID NO: 84209):RLQHNLEXAXA (SEQ ID NO: 84648), RNVQXRPVPTQL (SEQ ID NO: 84810):SNIT (SEQ ID NO: 84118):IGEMS (SEQ ID NO: 84209):TLQHNLAXKXE (SEQ ID NO: 84662), KIPKAXXVPTEL (SEQ ID NO: 84770):SNIT (SEQ ID NO: 84118):IGEMS (SEQ ID NO: 84209):DMVVEGXGXR (SEQ ID NO: 84510), GIPEPXXVPEKM (SEQ ID NO: 84718):SNIT (SEQ ID NO: 84118):IGEMS (SEQ ID NO: 84209):NMTVESXAXR (SEQ ID NO: 84604), SIPKAXXVPTEL (SEQ ID NO: 84830):SNIT (SEQ ID NO: 84118):IGEMS (SEQ ID NO: 84209):EMVVEGXGXR (SEQ ID NO: 84529), HVTKPTXAPTKL (SEQ ID NO: 84742):SNIT (SEQ ID NO: 84118):IGEMS (SEQ ID NO: 84209):NMVVRSXGXH (SEQ ID NO: 84629), YVPKPXXAPTKL (SEQ ID NO: 84864):SNIT (SEQ ID NO: 84118):IGEMS (SEQ ID NO: 84209):NMVVRSXGXH (SEQ ID NO: 84629), TVPKPXXAPTQL (SEQ ID NO: 84854):SNIT (SEQ ID NO: 84118):IGEMS (SEQ ID NO: 84209):NMVVRAXGXH (SEQ ID NO: 84627), AVPKAXXAPTKL (SEQ ID NO: 84704):SNIT (SEQ ID NO: 84118):IGEMS (SEQ ID NO: 84209):NMVVKAXGXH (SEQ ID NO: 84624), KVGKAXXVPTKL (SEQ ID NO: 84780):SNIT (SEQ ID NO: 84118):IGEMS (SEQ ID NO: 84209):EGMSVAEXGXR (SEQ ID NO: 84636), KASKAXXVPTKL (SEQ ID NO: 84760):SNIT (SEQ ID NO: 84118):IGEMS (SEQ ID NO: 84209):GMAVSEXGXR (SEQ ID NO: 84546), GSAGPXXTPTKM (SEQ ID NO: 84726):SNIT (SEQ ID NO: 84118):IGEMS (SEQ ID NO: 84209):GMVVDRXGXS (SEQ ID NO: 84567), AAPASXXVPARL (SEQ ID NO: 84677):SNIT (SEQ ID NO: 84118):IGEMS (SEQ ID NO: 84209):DMVVEAXGXR (SEQ ID NO: 84509), STPPTXXVPTRL (SEQ ID NO: 84850):SNIT (SEQ ID NO: 84118):IGEMS (SEQ ID NO: 84209):DMVVESXGXR (SEQ ID NO: 84511), HVPKPXXAPTKL (SEQ ID NO: 84734):SNIT (SEQ ID NO: 84118):IGEMS (SEQ ID NO: 84209):NMVVRSXGXH (SEQ ID NO: 84629), RVPSTXXAPVKT (SEQ ID NO: 84815):SNIT (SEQ ID NO: 84118):IGEMS (SEQ ID NO: 84209):MIVEEXGXL (SEQ ID NO: 84448), ASAAPXXVPQAL (SEQ ID NO: 84689):SNIT (SEQ ID NO: 84118):IGEMS (SEQ ID NO: 84209):MIVRSXKXS (SEQ ID NO: 84453), ASASPXXVSQDL (SEQ ID NO: 84701):SNIT (SEQ ID NO: 84118):IGEMS (SEQ ID NO: 84209):MIVKSXKXS (SEQ ID NO: 84451), ASASPXXVPQDL (SEQ ID NO: 84699):SNIT (SEQ ID NO: 84118):IGEMS (SEQ ID NO: 84209):MVVKSXKXS (SEQ ID NO: 84470), NDEGLEXVPTGQ (SEQ ID NO: 84799):SNIT (SEQ ID NO: 84118):IGEMS (SEQ ID NO: 84209):LEEHSQXEXR (SEQ ID NO: 84577), SSVKXQPSRVHH (SEQ ID NO: 84834):SNIT (SEQ ID NO: 84118):IGEMS (SEQ ID NO: 84209):RLEEHLEXAXA (SEQ ID NO: 84646), RNVQXRPTQVQL (SEQ ID NO: 84806):SNIT (SEQ ID NO: 84118):IGEMS (SEQ ID NO: 84209):TLEDHLAXKXE (SEQ ID NO: 84659), KIPKAXXVPTEL (SEQ ID NO: 84770):SNIT (SEQ ID NO: 84118):LGEMS (SEQ ID NO: 84228):DMEHXGXGSR (SEQ ID NO: 84487), GIPEPXXVPTKM (SEQ ID NO: 84720):SNIT (SEQ ID NO: 84118):LGEMS (SEQ ID NO: 84228):NMEHSSXAXR (SEQ ID NO: 84598), SIPKAXXVPTEL (SEQ ID NO: 84830):SNIT (SEQ ID NO: 84118):LGEMS (SEQ ID NO: 84228):EMEHXGXGSR (SEQ ID NO: 84521), HVTKPTXVPTKL (SEQ ID NO: 84750):SNIT (SEQ ID NO: 84118):LGEMS (SEQ ID NO: 84228):NMEHSSXGXH (SEQ ID NO: 84599), YVPKPXXVPTKL (SEQ ID NO: 84870):SNIT (SEQ ID NO: 84118):LGEMS (SEQ ID NO: 84228):NMEHSSXGXH (SEQ ID NO: 84599), TVPKPXXVPTQL (SEQ ID NO: 84860):SNIT (SEQ ID NO: 84118):LGEMS (SEQ ID NO: 84228):NMEHSAXGXH (SEQ ID NO: 84597), AVPKAXXVPTKL (SEQ ID NO: 84710):SNIT (SEQ ID NO: 84118):LGEMS (SEQ ID NO: 84228):NMEHSAXGXH (SEQ ID NO: 84597), KVGKAXXVPTKL (SEQ ID NO: 84780):SNIT (SEQ ID NO: 84118):LGEMS (SEQ ID NO: 84228):EGMSEHSXGXR (SEQ ID NO: 84633), KASKAXXVPTKL (SEQ ID NO: 84760):SNIT (SEQ ID NO: 84118):LGEMS (SEQ ID NO: 84228):GMEHSEXGXR (SEQ ID NO: 84552), GSAGPXXVPTKM (SEQ ID NO: 84730):SNIT (SEQ ID NO: 84118):LGEMS (SEQ ID NO: 84228):GMEHSRXGXS (SEQ ID NO: 84553), AAPASXXVPTRL (SEQ ID NO: 84680):SNIT (SEQ ID NO: 84118):LGEMS (SEQ ID NO: 84228):DMEHSAXGXR (SEQ ID NO: 84485), STPPTXXVPTRL (SEQ ID NO: 84850):SNIT (SEQ ID NO: 84118):LGEMS (SEQ ID NO: 84228):DMEHSSXGXR (SEQ ID NO: 84486), HVPKPXXVPTKL (SEQ ID NO: 84740):SNIT (SEQ ID NO: 84118):LGEMS (SEQ ID NO: 84228):NMEHSSXGXH (SEQ ID NO: 84599), RVPSTXXVPTKT (SEQ ID NO: 84820):SNIT (SEQ ID NO: 84118):LGEMS (SEQ ID NO: 84228):MIEHSXGXL (SEQ ID NO: 84440), ASAAPXXVPTAL (SEQ ID NO: 84690):SNIT (SEQ ID NO: 84118):LGEMS (SEQ ID NO: 84228):MIEHSXKXS (SEQ ID NO: 84441), ASASPXXVPTDL (SEQ ID NO: 84700):SNIT (SEQ ID NO: 84118):LGEMS (SEQ ID NO: 84228):MIEHSXKXS (SEQ ID NO: 84441), ASASPXXVPTDL (SEQ ID NO: 84700):SNIT (SEQ ID NO: 84118):LGEMS (SEQ ID NO: 84228):MVEHSXKXS (SEQ ID NO: 84465), NDEGLEXVPTEE (SEQ ID NO: 84798):SNIT (SEQ ID NO: 84118):LGEMS (SEQ ID NO: 84228):FLEHXKXESR (SEQ ID NO: 84535), SSVKXQPVPTHH (SEQ ID NO: 84840):SNIT (SEQ ID NO: 84118):LGEMS (SEQ ID NO: 84228):RLEHSLEXAXA (SEQ ID NO: 84647), RNVQXRPVPTQL (SEQ ID NO: 84810):SNIT (SEQ ID NO: 84118):LGEMS (SEQ ID NO: 84228):TLEHSLAXKXE (SEQ ID NO: 84661), KIPKAXXVPTEL (SEQ ID NO: 84770):SNIT (SEQ ID NO: 84118):LGEMS (SEQ ID NO: 84228):DMVVEGXGXR (SEQ ID NO: 84510), GIPEPXXVPEKM (SEQ ID NO: 84718):SNIT (SEQ ID NO: 84118):LGEMS (SEQ ID NO: 84228):NMTVESXAXR (SEQ ID NO: 84604), SIPKAXXVPTEL (SEQ ID NO: 84830):SNIT (SEQ ID NO: 84118):LGEMS (SEQ ID NO: 84228):EMVVEGXGXR (SEQ ID NO: 84529), HVTKPTXAPTKL (SEQ ID NO: 84742):SNIT (SEQ ID NO: 84118):LGEMS (SEQ ID NO: 84228):NMVVRSXGXH (SEQ ID NO: 84629), YVPKPXXAPTKL (SEQ ID NO: 84864):SNIT (SEQ ID NO: 84118):LGEMS (SEQ ID NO: 84228):NMVVRSXGXH (SEQ ID NO: 84629), TVPKPXXAPTQL (SEQ ID NO: 84854):SNIT (SEQ ID NO: 84118):LGEMS (SEQ ID NO: 84228):NMVVRAXGXH (SEQ ID NO: 84627), AVPKAXXAPTKL (SEQ ID NO: 84704):SNIT (SEQ ID NO: 84118):LGEMS (SEQ ID NO: 84228):NMVVKAXGXH (SEQ ID NO: 84624), KVGKAXXVPTKL (SEQ ID NO: 84780):SNIT (SEQ ID NO: 84118):LGEMS (SEQ ID NO: 84228):EGMSVAEXGXR (SEQ ID NO: 84636), KASKAXXVPTKL (SEQ ID NO: 84760):SNIT (SEQ ID NO: 84118):LGEMS (SEQ ID NO: 84228):GMAVSEXGXR (SEQ ID NO: 84546), GSAGPXXTPTKM (SEQ ID NO: 84726):SNIT (SEQ ID NO: 84118):LGEMS (SEQ ID NO: 84228):GMVVDRXGXS (SEQ ID NO: 84567), AAPASXXVPARL (SEQ ID NO: 84677):SNIT (SEQ ID NO: 84118):LGEMS (SEQ ID NO: 84228):DMVVEAXGXR (SEQ ID NO: 84509), STPPTXXVPTRL (SEQ ID NO: 84850):SNIT (SEQ ID NO: 84118):LGEMS (SEQ ID NO: 84228):DMVVESXGXR (SEQ ID NO: 84511), HVPKPXXAPTKL (SEQ ID NO: 84734):SNIT (SEQ ID NO: 84118):LGEMS (SEQ ID NO: 84228):NMVVRSXGXH (SEQ ID NO: 84629), RVPSTXXAPVKT (SEQ ID NO: 84815):SNIT (SEQ ID NO: 84118):LGEMS (SEQ ID NO: 84228):MIVEEXGXL (SEQ ID NO: 84448), ASAAPXXVPQAL (SEQ ID NO: 84689):SNIT (SEQ ID NO: 84118):LGEMS (SEQ ID NO: 84228):MIVRSXKXS (SEQ ID NO: 84453), ASASPXXVSQDL (SEQ ID NO: 84701):SNIT (SEQ ID NO: 84118):LGEMS (SEQ ID NO: 84228):MIVKSXKXS (SEQ ID NO: 84451), ASASPXXVPQDL (SEQ ID NO: 84699):SNIT (SEQ ID NO: 84118):LGEMS (SEQ ID NO: 84228):MVVKSXKXS (SEQ ID NO: 84470), NDEGLEXVPTEE (SEQ ID NO: 84798):SNIT (SEQ ID NO: 84118):LGEMS (SEQ ID NO: 84228):FLQHNKXEXR (SEQ ID NO: 84536), SSVKXQPSRVHH (SEQ ID NO: 84834):SNIT (SEQ ID NO: 84118):LGEMS (SEQ ID NO: 84228):RLEEHLEXAXA (SEQ ID NO: 84646), RNVQXRPTQVQL (SEQ ID NO: 84806):SNIT (SEQ ID NO: 84118):LGEMS (SEQ ID NO: 84228):TLEDHLAXKXE (SEQ ID NO: 84659), KIPKASSSRVEL (SEQ ID NO: 84762):RSVK (SEQ ID NO: 84115):KEVQV (SEQ ID NO: 84210):DMEEHGXGXR (SEQ ID NO: 84483), GIPEPSSSRVKM (SEQ ID NO: 84712):RSVK (SEQ ID NO: 84115):KEVQV (SEQ ID NO: 84210):NMEEHSXAXR (SEQ ID NO: 84595), SIPKASSSRVEL (SEQ ID NO: 84822):RSVK (SEQ ID NO: 84115):KEVQV (SEQ ID NO: 84210):EMEEHGXGXR (SEQ ID NO: 84520), HVTKPTXSRVKL (SEQ ID NO: 84744):RSVK (SEQ ID NO: 84115):KEVQV (SEQ ID NO: 84210):NMEEHSXGXH (SEQ ID NO: 84596), YVPKPSSSRVKL (SEQ ID NO: 84862):RSVK (SEQ ID NO: 84115):KEVQV (SEQ ID NO: 84210):NMEEHSXGXH (SEQ ID NO: 84596), TVPKPSSSRVQL (SEQ ID NO: 84852):RSVK (SEQ ID NO: 84115):KEVQV (SEQ ID NO: 84210):NMEEHAXGXH (SEQ ID NO: 84594), AVPKASSSRVKL (SEQ ID NO: 84702):RSVK (SEQ ID NO: 84115):KEVQV (SEQ ID NO: 84210):NMEEHAXGXH (SEQ ID NO: 84594), KVGKASSSRVKL (SEQ ID NO: 84772):RSVK (SEQ ID NO: 84115):KEVQV (SEQ ID NO: 84210):EGMSEEHXGXR (SEQ ID NO: 84632), KASKASSSRVKL (SEQ ID NO: 84752):RSVK (SEQ ID NO: 84115):KEVQV (SEQ ID NO: 84210):GMEEHEXGXR (SEQ ID NO: 84550), GSAGPSSSRVKM (SEQ ID NO: 84722):RSVK (SEQ ID NO: 84115):KEVQV (SEQ ID NO: 84210):GMEEHRXGXS (SEQ ID NO: 84551), AAPASSSSRVRL (SEQ ID NO: 84672):RSVK (SEQ ID NO: 84115):KEVQV (SEQ ID NO: 84210):DMEEHAXGXR (SEQ ID NO: 84482), STPPTSSSRVRL (SEQ ID NO: 84842):RSVK (SEQ ID NO: 84115):KEVQV (SEQ ID NO: 84210):DMEEHSXGXR (SEQ ID NO: 84484), HVPKPSSSRVKL (SEQ ID NO: 84732):RSVK (SEQ ID NO: 84115):KEVQV (SEQ ID NO: 84210):NMEEHSXGXH (SEQ ID NO: 84596), RVPSTSSSRVKT (SEQ ID NO: 84812):RSVK (SEQ ID NO: 84115):KEVQV (SEQ ID NO: 84210):MIEEHXGXL (SEQ ID NO: 84438), ASAAPSSSRVAL (SEQ ID NO: 84682):RSVK (SEQ ID NO: 84115):KEVQV (SEQ ID NO: 84210):MIEEHXKXS (SEQ ID NO: 84439), ASASPSSSRVDL (SEQ ID NO: 84692):RSVK (SEQ ID NO: 84115):KEVQV (SEQ ID NO: 84210):MIEEHXKXS (SEQ ID NO: 84439), ASASPSSSRVDL (SEQ ID NO: 84692):RSVK (SEQ ID NO: 84115):KEVQV (SEQ ID NO: 84210):MVEEHXKXS (SEQ ID NO: 84464), NDEGLESSRVEE (SEQ ID NO: 84786):RSVK (SEQ ID NO: 84115):KEVQV (SEQ ID NO: 84210):FLEEHKXEXR (SEQ ID NO: 84534), NDEGLESSRVGQ (SEQ ID NO: 84787):RSVK (SEQ ID NO: 84115):KEVQV (SEQ ID NO: 84210):LEEEHQXEXR (SEQ ID NO: 84576), RNVQXRPSRVQL (SEQ ID NO: 84804):RSVK (SEQ ID NO: 84115):KEVQV (SEQ ID NO: 84210):TLEEHLAXKXE (SEQ ID NO: 84660), KIPKAXXVPTEL (SEQ ID NO: 84770):RSVK (SEQ ID NO: 84115):KEVQV (SEQ ID NO: 84210):DMVVEGXGXR (SEQ ID NO: 84510), GIPEPXXVPEKM (SEQ ID NO: 84718):RSVK (SEQ ID NO: 84115):KEVQV (SEQ ID NO: 84210):NMTVESXAXR (SEQ ID NO: 84604), SIPKAXXVPTEL (SEQ ID NO: 84830):RSVK (SEQ ID NO: 84115):KEVQV (SEQ ID NO: 84210):EMVVEGXGXR (SEQ ID NO: 84529), HVTKPTXAPTKL (SEQ ID NO: 84742):RSVK (SEQ ID NO: 84115):KEVQV (SEQ ID NO: 84210):NMVVRSXGXH (SEQ ID NO: 84629), YVPKPXXAPTKL (SEQ ID NO: 84864):RSVK (SEQ ID NO: 84115):KEVQV (SEQ ID NO: 84210):NMVVRSXGXH (SEQ ID NO: 84629), TVPKPXXAPTQL (SEQ ID NO: 84854):RSVK (SEQ ID NO: 84115):KEVQV (SEQ ID NO: 84210):NMVVRAXGXH (SEQ ID NO: 84627), AVPKAXXAPTKL (SEQ ID NO: 84704):RSVK (SEQ ID NO: 84115):KEVQV (SEQ ID NO: 84210):NMVVKAXGXH (SEQ ID NO: 84624), KVGKAXXVPTKL (SEQ ID NO: 84780):RSVK (SEQ ID NO: 84115):KEVQV (SEQ ID NO: 84210):EGMSVAEXGXR (SEQ ID NO: 84636), KASKAXXVPTKL (SEQ ID NO: 84760):RSVK (SEQ ID NO: 84115):KEVQV (SEQ ID NO: 84210):GMAVSEXGXR (SEQ ID NO: 84546), GSAGPXXTPTKM (SEQ ID NO: 84726):RSVK (SEQ ID NO: 84115):KEVQV (SEQ ID NO: 84210):GMVVDRXGXS (SEQ ID NO: 84567), AAPASXXVPARL (SEQ ID NO: 84677):RSVK (SEQ ID NO: 84115):KEVQV (SEQ ID NO: 84210):DMVVEAXGXR (SEQ ID NO: 84509), STPPTXXVPTRL (SEQ ID NO: 84850):RSVK (SEQ ID NO: 84115):KEVQV (SEQ ID NO: 84210):DMVVESXGXR (SEQ ID NO: 84511), HVPKPXXAPTKL (SEQ ID NO: 84734):RSVK (SEQ ID NO: 84115):KEVQV (SEQ ID NO: 84210):NMVVRSXGXH (SEQ ID NO: 84629), RVPSTXXAPVKT (SEQ ID NO: 84815):RSVK (SEQ ID NO: 84115):KEVQV (SEQ ID NO: 84210):MIVEEXGXL (SEQ ID NO: 84448), ASAAPXXVPQAL (SEQ ID NO: 84689):RSVK (SEQ ID NO: 84115):KEVQV (SEQ ID NO: 84210):MIVRSXKXS (SEQ ID NO: 84453), ASASPXXVSQDL (SEQ ID NO: 84701):RSVK (SEQ ID NO: 84115):KEVQV (SEQ ID NO: 84210):MIVKSXKXS (SEQ ID NO: 84451), ASASPXXVPQDL (SEQ ID NO: 84699):RSVK (SEQ ID NO: 84115):KEVQV (SEQ ID NO: 84210):MVVKSXKXS (SEQ ID NO: 84470), NDEGLEXVPTEE (SEQ ID NO: 84798):RSVK (SEQ ID NO: 84115):KEVQV (SEQ ID NO: 84210):FLQHNKXEXR (SEQ ID NO: 84536), NDEGLEXVPTGQ (SEQ ID NO: 84799):RSVK (SEQ ID NO: 84115):KEVQV (SEQ ID NO: 84210):LEEHSQXEXR (SEQ ID NO: 84577), RNVQXRPTQVQL (SEQ ID NO: 84806):RSVK (SEQ ID NO: 84115):KEVQV (SEQ ID NO: 84210):TLEDHLAXKXE (SEQ ID NO: 84659), KIPKASSTQVEL (SEQ ID NO: 84763):RPVQ (SEQ ID NO: 84114):KKATV (SEQ ID NO: 84212):DMEDHGXGXR (SEQ ID NO: 84480), GIPEPSSTQVKM (SEQ ID NO: 84713):RPVQ (SEQ ID NO: 84114):KKATV (SEQ ID NO: 84212):NMEDHSXAXR (SEQ ID NO: 84592), SIPKASSTQVEL (SEQ ID NO: 84823):RPVQ (SEQ ID NO: 84114):KKATV (SEQ ID NO: 84212):EMEDHGXGXR (SEQ ID NO: 84519), HVTKPTXTQVKL (SEQ ID NO: 84746):RPVQ (SEQ ID NO: 84114):KKATV (SEQ ID NO: 84212):NMEDHSXGXH (SEQ ID NO: 84593), YVPKPSSTQVKL (SEQ ID NO: 84863):RPVQ (SEQ ID NO: 84114):KKATV (SEQ ID NO: 84212):NMEDHSXGXH (SEQ ID NO: 84593), TVPKPSSTQVQL (SEQ ID NO: 84853):RPVQ (SEQ ID NO: 84114):KKATV (SEQ ID NO: 84212):NMEDHAXGXH (SEQ ID NO: 84591), AVPKASSTQVKL (SEQ ID NO: 84703):RPVQ (SEQ ID NO: 84114):KKATV (SEQ ID NO: 84212):NMEDHAXGXH (SEQ ID NO: 84591), KVGKASSTQVKL (SEQ ID NO: 84773):RPVQ (SEQ ID NO: 84114):KKATV (SEQ ID NO: 84212):EGMSEDHXGXR (SEQ ID NO: 84631), KASKASSTQVKL (SEQ ID NO: 84753):RPVQ (SEQ ID NO: 84114):KKATV (SEQ ID NO: 84212):GMEDHEXGXR (SEQ ID NO: 84548), GSAGPSSTQVKM (SEQ ID NO: 84723):RPVQ (SEQ ID NO: 84114):KKATV (SEQ ID NO: 84212):GMEDHRXGXS (SEQ ID NO: 84549), AAPASSSTQVRL (SEQ ID NO: 84673):RPVQ (SEQ ID NO: 84114):KKATV (SEQ ID NO: 84212):DMEDHAXGXR (SEQ ID NO: 84479), STPPTSSTQVRL (SEQ ID NO: 84843):RPVQ (SEQ ID NO: 84114):KKATV (SEQ ID NO: 84212):DMEDHSXGXR (SEQ ID NO: 84481), HVPKPSSTQVKL (SEQ ID NO: 84733):RPVQ (SEQ ID NO: 84114):KKATV (SEQ ID NO: 84212):NMEDHSXGXH (SEQ ID NO: 84593), RVPSTSSTQVKT (SEQ ID NO: 84813):RPVQ (SEQ ID NO: 84114):KKATV (SEQ ID NO: 84212):MIEDHXGXL (SEQ ID NO: 84436), ASAAPSSTQVAL (SEQ ID NO: 84683):RPVQ (SEQ ID NO: 84114):KKATV (SEQ ID NO: 84212):MIEDHXKXS (SEQ ID NO: 84437), ASASPSSTQVDL (SEQ ID NO: 84693):RPVQ (SEQ ID NO: 84114):KKATV (SEQ ID NO: 84212):MIEDHXKXS (SEQ ID NO: 84437), ASASPSSTQVDL (SEQ ID NO: 84693):RPVQ (SEQ ID NO: 84114):KKATV (SEQ ID NO: 84212):MVEDHXKXS (SEQ ID NO: 84463), NDEGLESTQVEE (SEQ ID NO: 84790):RPVQ (SEQ ID NO: 84114):KKATV (SEQ ID NO: 84212):FLEDHKXEXR (SEQ ID NO: 84533), NDEGLESTQVGQ (SEQ ID NO: 84791):RPVQ (SEQ ID NO: 84114):KKATV (SEQ ID NO: 84212):LEEDHQXEXR (SEQ ID NO: 84575), SSVKXQPTQVHH (SEQ ID NO: 84836):RPVQ (SEQ ID NO: 84114):KKATV (SEQ ID NO: 84212):RLEDHLEXAXA (SEQ ID NO: 84645), KIPKAXXVPTEL (SEQ ID NO: 84770):RPVQ (SEQ ID NO: 84114):KKATV (SEQ ID NO: 84212):DMVVEGXGXR (SEQ ID NO: 84510), GIPEPXXVPEKM (SEQ ID NO: 84718):RPVQ (SEQ ID NO: 84114):KKATV (SEQ ID NO: 84212):NMTVESXAXR (SEQ ID NO: 84604), SIPKAXXVPTEL (SEQ ID NO: 84830):RPVQ (SEQ ID NO: 84114):KKATV (SEQ ID NO: 84212):EMVVEGXGXR (SEQ ID NO: 84529), HVTKPTXAPTKL (SEQ ID NO: 84742):RPVQ (SEQ ID NO: 84114):KKATV (SEQ ID NO: 84212):NMVVRSXGXH (SEQ ID NO: 84629), YVPKPXXAPTKL (SEQ ID NO: 84864):RPVQ (SEQ ID NO: 84114):KKATV (SEQ ID NO: 84212):NMVVRSXGXH (SEQ ID NO: 84629), TVPKPXXAPTQL (SEQ ID NO: 84854):RPVQ (SEQ ID NO: 84114):KKATV (SEQ ID NO: 84212):NMVVRAXGXH (SEQ ID NO: 84627), AVPKAXXAPTKL (SEQ ID NO: 84704):RPVQ (SEQ ID NO: 84114):KKATV (SEQ ID NO: 84212):NMVVKAXGXH (SEQ ID NO: 84624), KVGKAXXVPTKL (SEQ ID NO: 84780):RPVQ (SEQ ID NO: 84114):KKATV (SEQ ID NO: 84212):EGMSVAEXGXR (SEQ ID NO: 84636), KASKAXXVPTKL (SEQ ID NO: 84760):RPVQ (SEQ ID NO: 84114):KKATV (SEQ ID NO: 84212):GMAVSEXGXR (SEQ ID NO: 84546), GSAGPXXTPTKM (SEQ ID NO: 84726):RPVQ (SEQ ID NO: 84114):KKATV (SEQ ID NO: 84212):GMVVDRXGXS (SEQ ID NO: 84567), AAPASXXVPARL (SEQ ID NO: 84677):RPVQ (SEQ ID NO: 84114):KKATV (SEQ ID NO: 84212):DMVVEAXGXR (SEQ ID NO: 84509), STPPTXXVPTRL (SEQ ID NO: 84850):RPVQ (SEQ ID NO: 84114):KKATV (SEQ ID NO: 84212):DMVVESXGXR (SEQ ID NO: 84511), HVPKPXXAPTKL (SEQ ID NO: 84734):RPVQ (SEQ ID NO: 84114):KKATV (SEQ ID NO: 84212):NMVVRSXGXH (SEQ ID NO: 84629), RVPSTXXAPVKT (SEQ ID NO: 84815):RPVQ (SEQ ID NO: 84114):KKATV (SEQ ID NO: 84212):MIVEEXGXL (SEQ ID NO: 84448), ASAAPXXVPQAL (SEQ ID NO: 84689):RPVQ (SEQ ID NO: 84114):KKATV (SEQ ID NO: 84212):MIVRSXKXS (SEQ ID NO: 84453), ASASPXXVSQDL (SEQ ID NO: 84701):RPVQ (SEQ ID NO: 84114):KKATV (SEQ ID NO: 84212):MIVKSXKXS (SEQ ID NO: 84451), ASASPXXVPQDL (SEQ ID NO: 84699):RPVQ (SEQ ID NO: 84114):KKATV (SEQ ID NO: 84212):MVVKSXKXS (SEQ ID NO: 84470), NDEGLEXVPTEE (SEQ ID NO: 84798):RPVQ (SEQ ID NO: 84114):KKATV (SEQ ID NO: 84212):FLQHNKXEXR (SEQ ID NO: 84536), NDEGLEXVPTGQ (SEQ ID NO: 84799):RPVQ (SEQ ID NO: 84114):KKATV (SEQ ID NO: 84212):LEEHSQXEXR (SEQ ID NO: 84577) and SSVKXQPSRVHH (SEQ ID NO: 84834):RPVQ (SEQ ID NO: 84114):KKATV (SEQ ID NO: 84212):RLEEHLEXAXA (SEQ ID NO: 84646). More particularly, the quadruplet PEP9:PEP1:PEP2:PEP10 is selected from the group consisting of GIPEPXXVPTKM (SEQ ID NO: 84720):SAIS (SEQ ID NO: 84116):LKNYQ (SEQ ID NO: 84230):NMVVESXAXR (SEQ ID NO: 84622), HVTKPTXVPTKL (SEQ ID NO: 84750):SAIS (SEQ ID NO: 84116):LKNYQ (SEQ ID NO: 84230):NMVVESXGXH (SEQ ID NO: 84623), YVPKPXXVPTKL (SEQ ID NO: 84870):SAIS (SEQ ID NO: 84116):LKNYQ (SEQ ID NO: 84230):NMVVESXGXH (SEQ ID NO: 84623), TVPKPXXVPTQL (SEQ ID NO: 84860):SAIS (SEQ ID NO: 84116):LKNYQ (SEQ ID NO: 84230):NMVVEAXGXH (SEQ ID NO: 84621), AVPKAXXVPTKL (SEQ ID NO: 84710):SAIS (SEQ ID NO: 84116):LKNYQ (SEQ ID NO: 84230):NMVVEAXGXH (SEQ ID NO: 84621), KVGKAXXVPTKL (SEQ ID NO: 84780):SAIS (SEQ ID NO: 84116):LKNYQ (SEQ ID NO: 84230):EGMSVVEXGXR (SEQ ID NO: 84641), KASKAXXVPTKL (SEQ ID NO: 84760):SAIS (SEQ ID NO: 84116):LKNYQ (SEQ ID NO: 84230):GMVVEEXGXR (SEQ ID NO: 84568), GSAGPXXVPTKM (SEQ ID NO: 84730):SAIS (SEQ ID NO: 84116):LKNYQ (SEQ ID NO: 84230):GMVVERXGXS (SEQ ID NO: 84569), AAPASXXVPTRL (SEQ ID NO: 84680):SAIS (SEQ ID NO: 84116):LKNYQ (SEQ ID NO: 84230):DMVVEAXGXR (SEQ ID NO: 84509), STPPTXXVPTRL (SEQ ID NO: 84850):SAIS (SEQ ID NO: 84116):LKNYQ (SEQ ID NO: 84230):DMVVESXGXR (SEQ ID NO: 84511), HVPKPXXVPTKL (SEQ ID NO: 84740):SAIS (SEQ ID NO: 84116):LKNYQ (SEQ ID NO: 84230):NMVVESXGXH (SEQ ID NO: 84623), RVPSTXXVPTKT (SEQ ID NO: 84820):SAIS (SEQ ID NO: 84116):LKNYQ (SEQ ID NO: 84230):MIVVEXGXL (SEQ ID NO: 84456), ASAAPXXVPTAL (SEQ ID NO: 84690):SAIS (SEQ ID NO: 84116):LKNYQ (SEQ ID NO: 84230):MIVVEXKXS (SEQ ID NO: 84457), ASASPXXVPTDL (SEQ ID NO: 84700):SAIS (SEQ ID NO: 84116):LKNYQ (SEQ ID NO: 84230):MIVVEXKXS (SEQ ID NO: 84457), ASASPXXVPTDL (SEQ ID NO: 84700):SAIS (SEQ ID NO: 84116):LKNYQ (SEQ ID NO: 84230):MVVVEXKXS (SEQ ID NO: 84473), GIPEPXXVPEKM (SEQ ID NO: 84718):SAIS (SEQ ID NO: 84116):LKNYQ (SEQ ID NO: 84230):NMTVESXAXR (SEQ ID NO: 84604), HVTKPTXAPTKL (SEQ ID NO: 84742):SAIS (SEQ ID NO: 84116):LKNYQ (SEQ ID NO: 84230):NMVVRSXGXH (SEQ ID NO: 84629), YVPKPXXAPTKL (SEQ ID NO: 84864):SAIS (SEQ ID NO: 84116):LKNYQ (SEQ ID NO: 84230):NMVVRSXGXH (SEQ ID NO: 84629), TVPKPXXAPTQL (SEQ ID NO: 84854):SAIS (SEQ ID NO: 84116):LKNYQ (SEQ ID NO: 84230):NMVVRAXGXH (SEQ ID NO: 84627), AVPKAXXAPTKL (SEQ ID NO: 84704):SAIS (SEQ ID NO: 84116):LKNYQ (SEQ ID NO: 84230):NMVVKAXGXH (SEQ ID NO: 84624), KVGKAXXVPTKL (SEQ ID NO: 84780):SAIS (SEQ ID NO: 84116):LKNYQ (SEQ ID NO: 84230):EGMSVAEXGXR (SEQ ID NO: 84636), KASKAXXVPTKL (SEQ ID NO: 84760):SAIS (SEQ ID NO: 84116):LKNYQ (SEQ ID NO: 84230):GMAVSEXGXR (SEQ ID NO: 84546), GSAGPXXTPTKM (SEQ ID NO: 84726):SAIS (SEQ ID NO: 84116):LKNYQ (SEQ ID NO: 84230):GMVVDRXGXS (SEQ ID NO: 84567), AAPASXXVPARL (SEQ ID NO: 84677):SAIS (SEQ ID NO: 84116):LKNYQ (SEQ ID NO: 84230):DMVVEAXGXR (SEQ ID NO: 84509), HVPKPXXAPTKL (SEQ ID NO: 84734):SAIS (SEQ ID NO: 84116):LKNYQ (SEQ ID NO: 84230):NMVVRSXGXH (SEQ ID NO: 84629), RVPSTXXAPVKT (SEQ ID NO: 84815):SAIS (SEQ ID NO: 84116):LKNYQ (SEQ ID NO: 84230):MIVEEXGXL (SEQ ID NO: 84448), ASAAPXXVPQAL (SEQ ID NO: 84689):SAIS (SEQ ID NO: 84116):LKNYQ (SEQ ID NO: 84230):MIVRSXKXS (SEQ ID NO: 84453), ASASPSSVSQDL (SEQ ID NO: 85002):SAIS (SEQ ID NO: 84116):LKNYQ (SEQ ID NO: 84230):MIVKSXKXS (SEQ ID NO: 84451), ASASPXXVPQDL (SEQ ID NO: 84699):SAIS (SEQ ID NO: 84116):LKNYQ (SEQ ID NO: 84230):MVVKSXKXS (SEQ ID NO: 84470), NDEGLEXVPTEE (SEQ ID NO: 84798):SAIS (SEQ ID NO: 84116):LKNYQ (SEQ ID NO: 84230):FLQHNKXEXR (SEQ ID NO: 84536), NDEGLEXVPTGQ (SEQ ID NO: 84799):SAIS (SEQ ID NO: 84116):LKNYQ (SEQ ID NO: 84230):LEEHSQXEXR (SEQ ID NO: 84577), SSVKXQPSRVHH (SEQ ID NO: 84834):SAIS (SEQ ID NO: 84116):LKNYQ (SEQ ID NO: 84230):RLEEHLEXAXA (SEQ ID NO: 84646), RNVQXRPTQVQL (SEQ ID NO: 84806):SAIS (SEQ ID NO: 84116):LKNYQ (SEQ ID NO: 84230):TLEDHLAXKXE (SEQ ID NO: 84659), KIPKAXXVPEEL (SEQ ID NO: 84768):SSLS (SEQ ID NO: 84121):LKVYP (SEQ ID NO: 84231):DMTVEGXGXR (SEQ ID NO: 84492), SIPKAXXVPEEL (SEQ ID NO: 84828):SSLS (SEQ ID NO: 84121):LKVYP (SEQ ID NO: 84231):EMTVEGXGXR (SEQ ID NO: 84523), HVTKPTXVPEKL (SEQ ID NO: 84748):SSLS (SEQ ID NO: 84121):LKVYP (SEQ ID NO: 84231):NMTVESXGXH (SEQ ID NO: 84605), YVPKPXXVPEKL (SEQ ID NO: 84868):SSLS (SEQ ID NO: 84121):LKVYP (SEQ ID NO: 84231):NMTVESXGXH (SEQ ID NO: 84605), TVPKPXXVPEQL (SEQ ID NO: 84858):SSLS (SEQ ID NO: 84121):LKVYP (SEQ ID NO: 84231):NMTVEAXGXH (SEQ ID NO: 84603), AVPKAXXVPEKL (SEQ ID NO: 84708):SSLS (SEQ ID NO: 84121):LKVYP (SEQ ID NO: 84231):NMTVEAXGXH (SEQ ID NO: 84603), KVGKAXXVPEKL (SEQ ID NO: 84778):SSLS (SEQ ID NO: 84121):LKVYP (SEQ ID NO: 84231):EGMSTVEXGXR (SEQ ID NO: 84635), KASKAXXVPEKL (SEQ ID NO: 84758):SSLS (SEQ ID NO: 84121):LKVYP (SEQ ID NO: 84231):GMTVEEXGXR (SEQ ID NO: 84556), GSAGPXXVPEKM (SEQ ID NO: 84728):SSLS (SEQ ID NO: 84121):LKVYP (SEQ ID NO: 84231):GMTVERXGXS (SEQ ID NO: 84557), AAPASXXVPERL (SEQ ID NO: 84678):SSLS (SEQ ID NO: 84121):LKVYP (SEQ ID NO: 84231):DMTVEAXGXR (SEQ ID NO: 84491), STPPTXXVPERL (SEQ ID NO: 84848):SSLS (SEQ ID NO: 84121):LKVYP (SEQ ID NO: 84231):DMTVESXGXR (SEQ ID NO: 84493), HVPKPXXVPEKL (SEQ ID NO: 84738):SSLS (SEQ ID NO: 84121):LKVYP (SEQ ID NO: 84231):NMTVESXGXH (SEQ ID NO: 84605), RVPSTXXVPEKT (SEQ ID NO: 84818):SSLS (SEQ ID NO: 84121):LKVYP (SEQ ID NO: 84231):MITVEXGXL (SEQ ID NO: 84444), ASAAPXXVPEAL (SEQ ID NO: 84688):SSLS (SEQ ID NO: 84121):LKVYP (SEQ ID NO: 84231):MITVEXKXS (SEQ ID NO: 84445), ASASPXXVPEDL (SEQ ID NO: 84698):SSLS (SEQ ID NO: 84121):LKVYP (SEQ ID NO: 84231):MITVEXKXS (SEQ ID NO: 84445), ASASPXXVPEDL (SEQ ID NO: 84698):SSLS (SEQ ID NO: 84121):LKVYP (SEQ ID NO: 84231):MVTVEXKXS (SEQ ID NO: 84467), KIPKAXXVPTEL (SEQ ID NO: 84770):SSLS (SEQ ID NO: 84121):LKVYP (SEQ ID NO: 84231):DMVVEGXGXR (SEQ ID NO: 84510), SIPKAXXVPTEL (SEQ ID NO: 84830):SSLS (SEQ ID NO: 84121):LKVYP (SEQ ID NO: 84231):EMVVEGXGXR (SEQ ID NO: 84529), HVTKPTXAPTKL (SEQ ID NO: 84742):SSLS (SEQ ID NO: 84121):LKVYP (SEQ ID NO: 84231):NMVVRSXGXH (SEQ ID NO: 84629), YVPKPXXAPTKL (SEQ ID NO: 84864):SSLS (SEQ ID NO: 84121):LKVYP (SEQ ID NO: 84231):NMVVRSXGXH (SEQ ID NO: 84629), TVPKPXXAPTQL (SEQ ID NO: 84854):SSLS (SEQ ID NO: 84121):LKVYP (SEQ ID NO: 84231):NMVVRAXGXH (SEQ ID NO: 84627), AVPKAXXAPTKL (SEQ ID NO: 84704):SSLS (SEQ ID NO: 84121):LKVYP (SEQ ID NO: 84231):NMVVKAXGXH (SEQ ID NO: 84624), KVGKAXXVPTKL (SEQ ID NO: 84780):SSLS (SEQ ID NO: 84121):LKVYP (SEQ ID NO: 84231):EGMSVAEXGXR (SEQ ID NO: 84636), KASKAXXVPTKL (SEQ ID NO: 84760):SSLS (SEQ ID NO: 84121):LKVYP (SEQ ID NO: 84231):GMAVSEXGXR (SEQ ID NO: 84546), GSAGPXXTPTKM (SEQ ID NO: 84726):SSLS (SEQ ID NO: 84121):LKVYP (SEQ ID NO: 84231):GMVVDRXGXS (SEQ ID NO: 84567), AAPASXXVPARL (SEQ ID NO: 84677):SSLS (SEQ ID NO: 84121):LKVYP (SEQ ID NO: 84231):DMVVEAXGXR (SEQ ID NO: 84509), STPPTXXVPTRL (SEQ ID NO: 84850):SSLS (SEQ ID NO: 84121):LKVYP (SEQ ID NO: 84231):DMVVESXGXR (SEQ ID NO: 84511), HVPKPXXAPTKL (SEQ ID NO: 84734):SSLS (SEQ ID NO: 84121):LKVYP (SEQ ID NO: 84231):NMVVRSXGXH (SEQ ID NO: 84629), RVPSTXXAPVKT (SEQ ID NO: 84815):SSLS (SEQ ID NO: 84121):LKVYP (SEQ ID NO: 84231):MIVEEXGXL (SEQ ID NO: 84448), ASAAPXXVPQAL (SEQ ID NO: 84689):SSLS (SEQ ID NO: 84121):LKVYP (SEQ ID NO: 84231):MIVRSXKXS (SEQ ID NO: 84453), ASASPSSVSQDL (SEQ ID NO: 85002):SSLS (SEQ ID NO: 84121):LKVYP (SEQ ID NO: 84231):MIVKSXKXS (SEQ ID NO: 84451), ASASPXXVPQDL (SEQ ID NO: 84699):SSLS (SEQ ID NO: 84121):LKVYP (SEQ ID NO: 84231):MVVKSXKXS (SEQ ID NO: 84470), NDEGLEXVPTEE (SEQ ID NO: 84798):SSLS (SEQ ID NO: 84121):LKVYP (SEQ ID NO: 84231):FLQHNKXEXR (SEQ ID NO: 84536), NDEGLEXVPTGQ (SEQ ID NO: 84799):SSLS (SEQ ID NO: 84121):LKVYP (SEQ ID NO: 84231):LEEHSQXEXR (SEQ ID NO: 84577), SSVKXQPSRVHH (SEQ ID NO: 84834):SSLS (SEQ ID NO: 84121):LKVYP (SEQ ID NO: 84231):RLEEHLEXAXA (SEQ ID NO: 84646), RNVQXRPTQVQL (SEQ ID NO: 84806):SSLS (SEQ ID NO: 84121):LKVYP (SEQ ID NO: 84231):TLEDHLAXKXE (SEQ ID NO: 84659), KIPKAXXAPTEL (SEQ ID NO: 84764):NAIS (SEQ ID NO: 84113):LKKYR (SEQ ID NO: 84229):DMVVRGXGXR (SEQ ID NO: 84516), GIPEPXXAPTKM (SEQ ID NO: 84714):NAIS (SEQ ID NO: 84113):LKKYR (SEQ ID NO: 84229):NMVVRSXAXR (SEQ ID NO: 84628), SIPKAXXAPTEL (SEQ ID NO: 84824):NAIS (SEQ ID NO: 84113):LKKYR (SEQ ID NO: 84229):EMVVRGXGXR (SEQ ID NO: 84531), AVPKAXXAPTKL (SEQ ID NO: 84704):NAIS (SEQ ID NO: 84113):LKKYR (SEQ ID NO: 84229):NMVVRAXGXH (SEQ ID NO: 84627), KVGKAXXAPTKL (SEQ ID NO: 84774):NAIS (SEQ ID NO: 84113):LKKYR (SEQ ID NO: 84229):EGMSVVRXGXR (SEQ ID NO: 84643), KASKAXXAPTKL (SEQ ID NO: 84754):NAIS (SEQ ID NO: 84113):LKKYR (SEQ ID NO: 84229):GMVVREXGXR (SEQ ID NO: 84572), GSAGPXXAPTKM (SEQ ID NO: 84724):NAIS (SEQ ID NO: 84113):LKKYR (SEQ ID NO: 84229):GMVVRRXGXS (SEQ ID NO: 84573), AAPASXXAPTRL (SEQ ID NO: 84674):NAIS (SEQ ID NO: 84113):LKKYR (SEQ ID NO: 84229):DMVVRAXGXR (SEQ ID NO: 84515), STPPTXXAPTRL (SEQ ID NO: 84844):NAIS (SEQ ID NO: 84113):LKKYR (SEQ ID NO: 84229):DMVVRSXGXR (SEQ ID NO: 84517), RVPSTXXAPTKT (SEQ ID NO: 84814):NAIS (SEQ ID NO: 84113):LKKYR (SEQ ID NO: 84229):MIVVRXGXL (SEQ ID NO: 84460), ASAAPXXAPTAL (SEQ ID NO: 84684):NAIS (SEQ ID NO: 84113):LKKYR (SEQ ID NO: 84229):MIVVRXKXS (SEQ ID NO: 84461), ASASPXXAPTDL (SEQ ID NO: 84694):NAIS (SEQ ID NO: 84113):LKKYR (SEQ ID NO: 84229):MIVVRXKXS (SEQ ID NO: 84461), ASASPXXAPTDL (SEQ ID NO: 84694):NAIS (SEQ ID NO: 84113):LKKYR (SEQ ID NO: 84229):MVVVRXKXS (SEQ ID NO: 84475), KIPKAXXVPTEL (SEQ ID NO: 84770):NAIS (SEQ ID NO: 84113):LKKYR (SEQ ID NO: 84229):DMVVEGXGXR (SEQ ID NO: 84510), GIPEPXXVPEKM (SEQ ID NO: 84718):NAIS (SEQ ID NO: 84113):LKKYR (SEQ ID NO: 84229):NMTVESXAXR (SEQ ID NO: 84604), SIPKAXXVPTEL (SEQ ID NO: 84830):NAIS (SEQ ID NO: 84113):LKKYR (SEQ ID NO: 84229):EMVVEGXGXR (SEQ ID NO: 84529), AVPKAXXAPTKL (SEQ ID NO: 84704):NAIS (SEQ ID NO: 84113):LKKYR (SEQ ID NO: 84229):NMVVKAXGXH (SEQ ID NO: 84624), KVGKAXXVPTKL (SEQ ID NO: 84780):NAIS (SEQ ID NO: 84113):LKKYR (SEQ ID NO: 84229):EGMSVAEXGXR (SEQ ID NO: 84636), KASKAXXVPTKL (SEQ ID NO: 84760):NAIS (SEQ ID NO: 84113):LKKYR (SEQ ID NO: 84229):GMAVSEXGXR (SEQ ID NO: 84546), GSAGPXXTPTKM (SEQ ID NO: 84726):NAIS (SEQ ID NO: 84113):LKKYR (SEQ ID NO: 84229):GMVVDRXGXS (SEQ ID NO: 84567), AAPASXXVPARL (SEQ ID NO: 84677):NAIS (SEQ ID NO: 84113):LKKYR (SEQ ID NO: 84229):DMVVEAXGXR (SEQ ID NO: 84509), STPPTXXVPTRL (SEQ ID NO: 84850):NAIS (SEQ ID NO: 84113):LKKYR (SEQ ID NO: 84229):DMVVESXGXR (SEQ ID NO: 84511), RVPSTXXAPVKT (SEQ ID NO: 84815):NAIS (SEQ ID NO: 84113):LKKYR (SEQ ID NO: 84229):MIVEEXGXL (SEQ ID NO: 84448), ASAAPXXVPQAL (SEQ ID NO: 84689):NAIS (SEQ ID NO: 84113):LKKYR (SEQ ID NO: 84229):MIVRSXKXS (SEQ ID NO: 84453), ASASPSSVSQDL (SEQ ID NO: 85002):NAIS (SEQ ID NO: 84113):LKKYR (SEQ ID NO: 84229):MIVKSXKXS (SEQ ID NO: 84451), ASASPXXVPQDL (SEQ ID NO: 84699):NAIS (SEQ ID NO: 84113):LKKYR (SEQ ID NO: 84229):MVVKSXKXS (SEQ ID NO: 84470), NDEGLEXVPTEE (SEQ ID NO: 84798):NAIS (SEQ ID NO: 84113):LKKYR (SEQ ID NO: 84229):FLQHNKXEXR (SEQ ID NO: 84536), NDEGLEXVPTGQ (SEQ ID NO: 84799):NAIS (SEQ ID NO: 84113):LKKYR (SEQ ID NO: 84229):LEEHSQXEXR (SEQ ID NO: 84577), SSVKXQPSRVHH (SEQ ID NO: 84834):NAIS (SEQ ID NO: 84113):LKKYR (SEQ ID NO: 84229):RLEEHLEXAXA (SEQ ID NO: 84646), RNVQXRPTQVQL (SEQ ID NO: 84806):NAIS (SEQ ID NO: 84113):LKKYR (SEQ ID NO: 84229):TLEDHLAXKXE (SEQ ID NO: 84659), KIPKAXXAPTEL (SEQ ID NO: 84764):SATS (SEQ ID NO: 84117):LRKHR (SEQ ID NO: 84233):DMVVKGXGXR (SEQ ID NO: 84513), GIPEPXXAPTKM (SEQ ID NO: 84714):SATS (SEQ ID NO: 84117):LRKHR (SEQ ID NO: 84233):NMVVKSXAXR (SEQ ID NO: 84625), SIPKAXXAPTEL (SEQ ID NO: 84824):SATS (SEQ ID NO: 84117):LRKHR (SEQ ID NO: 84233):EMVVKGXGXR (SEQ ID NO: 84530), HVTKPTXAPTKL (SEQ ID NO: 84742):SATS (SEQ ID NO: 84117):LRKHR (SEQ ID NO: 84233):NMVVKSXGXH (SEQ ID NO: 84626), YVPKPXXAPTKL (SEQ ID NO: 84864):SATS (SEQ ID NO: 84117):LRKHR (SEQ ID NO: 84233):NMVVKSXGXH (SEQ ID NO: 84626), TVPKPXXAPTQL (SEQ ID NO: 84854):SATS (SEQ ID NO: 84117):LRKHR (SEQ ID NO: 84233):NMVVKAXGXH (SEQ ID NO: 84624), KVGKAXXAPTKL (SEQ ID NO: 84774):SATS (SEQ ID NO: 84117):LRKHR (SEQ ID NO: 84233):EGMSVVKXGXR (SEQ ID NO: 84642), KASKAXXAPTKL (SEQ ID NO: 84754):SATS (SEQ ID NO: 84117):LRKHR (SEQ ID NO: 84233):GMVVKEXGXR (SEQ ID NO: 84570), GSAGPXXAPTKM (SEQ ID NO: 84724):SATS (SEQ ID NO: 84117):LRKHR (SEQ ID NO: 84233):GMVVKRXGXS (SEQ ID NO: 84571), AAPASXXAPTRL (SEQ ID NO: 84674):SATS (SEQ ID NO: 84117):LRKHR (SEQ ID NO: 84233):DMVVKAXGXR (SEQ ID NO: 84512), STPPTXXAPTRL (SEQ ID NO: 84844):SATS (SEQ ID NO: 84117):LRKHR (SEQ ID NO: 84233):DMVVKSXGXR (SEQ ID NO: 84514), HVPKPXXAPTKL (SEQ ID NO: 84734):SATS (SEQ ID NO: 84117):LRKHR (SEQ ID NO: 84233):NMVVKSXGXH (SEQ ID NO: 84626), RVPSTXXAPTKT (SEQ ID NO: 84814):SATS (SEQ ID NO: 84117):LRKHR (SEQ ID NO: 84233):MIVVKXGXL (SEQ ID NO: 84458), ASAAPXXAPTAL (SEQ ID NO: 84684):SATS (SEQ ID NO: 84117):LRKHR (SEQ ID NO: 84233):MIVVKXKXS (SEQ ID NO: 84459), ASASPXXAPTDL (SEQ ID NO: 84694):SATS (SEQ ID NO: 84117):LRKHR (SEQ ID NO: 84233):MIVVKXKXS (SEQ ID NO: 84459), ASASPXXAPTDL (SEQ ID NO: 84694):SATS (SEQ ID NO: 84117):LRKHR (SEQ ID NO: 84233):MVVVKXKXS (SEQ ID NO: 84474), KIPKAXXVPTEL (SEQ ID NO: 84770):SATS (SEQ ID NO: 84117):LRKHR (SEQ ID NO: 84233):DMVVEGXGXR (SEQ ID NO: 84510), GIPEPXXVPEKM (SEQ ID NO: 84718):SATS (SEQ ID NO: 84117):LRKHR (SEQ ID NO: 84233):NMTVESXAXR (SEQ ID NO: 84604), SIPKAXXVPTEL (SEQ ID NO: 84830):SATS (SEQ ID NO: 84117):LRKHR (SEQ ID NO: 84233):EMVVEGXGXR (SEQ ID NO: 84529), HVTKPTXAPTKL (SEQ ID NO: 84742):SATS (SEQ ID NO: 84117):LRKHR (SEQ ID NO: 84233):NMVVRSXGXH (SEQ ID NO: 84629), YVPKPXXAPTKL (SEQ ID NO: 84864):SATS (SEQ ID NO: 84117):LRKHR (SEQ ID NO: 84233):NMVVRSXGXH (SEQ ID NO: 84629), TVPKPXXAPTQL (SEQ ID NO: 84854):SATS (SEQ ID NO: 84117):LRKHR (SEQ ID NO: 84233):NMVVRAXGXH (SEQ ID NO: 84627), KVGKAXXVPTKL (SEQ ID NO: 84780):SATS (SEQ ID NO: 84117):LRKHR (SEQ ID NO: 84233):EGMSVAEXGXR (SEQ ID NO: 84636), KASKAXXVPTKL (SEQ ID NO: 84760):SATS (SEQ ID NO: 84117):LRKHR (SEQ ID NO: 84233):GMAVSEXGXR (SEQ ID NO: 84546), GSAGPXXTPTKM (SEQ ID NO: 84726):SATS (SEQ ID NO: 84117):LRKHR (SEQ ID NO: 84233):GMVVDRXGXS (SEQ ID NO: 84567), AAPASXXVPARL (SEQ ID NO: 84677):SATS (SEQ ID NO: 84117):LRKHR (SEQ ID NO: 84233):DMVVEAXGXR (SEQ ID NO: 84509), STPPTXXVPTRL (SEQ ID NO: 84850):SATS (SEQ ID NO: 84117):LRKHR (SEQ ID NO: 84233):DMVVESXGXR (SEQ ID NO: 84511), HVPKPXXAPTKL (SEQ ID NO: 84734):SATS (SEQ ID NO: 84117):LRKHR (SEQ ID NO: 84233):NMVVRSXGXH (SEQ ID NO: 84629), RVPSTXXAPVKT (SEQ ID NO: 84815):SATS (SEQ ID NO: 84117):LRKHR (SEQ ID NO: 84233):MIVEEXGXL (SEQ ID NO: 84448), ASAAPXXVPQAL (SEQ ID NO: 84689):SATS (SEQ ID NO: 84117):LRKHR (SEQ ID NO: 84233):MIVRSXKXS (SEQ ID NO: 84453), ASASPSSVSQDL (SEQ ID NO: 85002):SATS (SEQ ID NO: 84117):LRKHR (SEQ ID NO: 84233):MIVKSXKXS (SEQ ID NO: 84451), ASASPXXVPQDL (SEQ ID NO: 84699):SATS (SEQ ID NO: 84117):LRKHR (SEQ ID NO: 84233):MVVKSXKXS (SEQ ID NO: 84470), NDEGLEXVPTEE (SEQ ID NO: 84798):SATS (SEQ ID NO: 84117):LRKHR (SEQ ID NO: 84233):FLQHNKXEXR (SEQ ID NO: 84536), NDEGLEXVPTGQ (SEQ ID NO: 84799):SATS (SEQ ID NO: 84117):LRKHR (SEQ ID NO: 84233):LEEHSQXEXR (SEQ ID NO: 84577), SSVKXQPSRVHH (SEQ ID NO: 84834):SATS (SEQ ID NO: 84117):LRKHR (SEQ ID NO: 84233):RLEEHLEXAXA (SEQ ID NO: 84646), RNVQXRPTQVQL (SEQ ID NO: 84806):SATS (SEQ ID NO: 84117):LRKHR (SEQ ID NO: 84233):TLEDHLAXKXE (SEQ ID NO: 84659), KIPKAXXVPTEL (SEQ ID NO: 84770):SPIS (SEQ ID NO: 84120):LKYHY (SEQ ID NO: 84232):DMVAEGXGXR (SEQ ID NO: 84495), GIPEPXXVPTKM (SEQ ID NO: 84720):SPIS (SEQ ID NO: 84120):LKYHY (SEQ ID NO: 84232):NMVAESXAXR (SEQ ID NO: 84607), SIPKAXXVPTEL (SEQ ID NO: 84830):SPIS (SEQ ID NO: 84120):LKYHY (SEQ ID NO: 84232):EMVAEGXGXR (SEQ ID NO: 84524), HVTKPTXVPTKL (SEQ ID NO: 84750):SPIS (SEQ ID NO: 84120):LKYHY (SEQ ID NO: 84232):NMVAESXGXH (SEQ ID NO: 84608), YVPKPXXVPTKL (SEQ ID NO: 84870):SPIS (SEQ ID NO: 84120):LKYHY (SEQ ID NO: 84232):NMVAESXGXH (SEQ ID NO: 84608), TVPKPXXVPTQL (SEQ ID NO: 84860):SPIS (SEQ ID NO: 84120):LKYHY (SEQ ID NO: 84232):NMVAEAXGXH (SEQ ID NO: 84606), AVPKAXXVPTKL (SEQ ID NO: 84710):SPIS (SEQ ID NO: 84120):LKYHY (SEQ ID NO: 84232):NMVAEAXGXH (SEQ ID NO: 84606), KASKAXXVPTKL (SEQ ID NO: 84760):SPIS (SEQ ID NO: 84120):LKYHY (SEQ ID NO: 84232):GMVAEEXGXR (SEQ ID NO: 84558), GSAGPXXVPTKM (SEQ ID NO: 84730):SPIS (SEQ ID NO: 84120):LKYHY (SEQ ID NO: 84232):GMVAERXGXS (SEQ ID NO: 84559), AAPASXXVPTRL (SEQ ID NO: 84680):SPIS (SEQ ID NO: 84120):LKYHY (SEQ ID NO: 84232):DMVAEAXGXR (SEQ ID NO: 84494), STPPTXXVPTRL (SEQ ID NO: 84850):SPIS (SEQ ID NO: 84120):LKYHY (SEQ ID NO: 84232):DMVAESXGXR (SEQ ID NO: 84496), HVPKPXXVPTKL (SEQ ID NO: 84740):SPIS (SEQ ID NO: 84120):LKYHY (SEQ ID NO: 84232):NMVAESXGXH (SEQ ID NO: 84608), RVPSTXXVPTKT (SEQ ID NO: 84820):SPIS (SEQ ID NO: 84120):LKYHY (SEQ ID NO: 84232):MIVAEXGXL (SEQ ID NO: 84446), ASAAPXXVPTAL (SEQ ID NO: 84690):SPIS (SEQ ID NO: 84120):LKYHY (SEQ ID NO: 84232):MIVAEXKXS (SEQ ID NO: 84447), ASASPXXVPTDL (SEQ ID NO: 84700):SPIS (SEQ ID NO: 84120):LKYHY (SEQ ID NO: 84232):MIVAEXKXS (SEQ ID NO: 84447), ASASPXXVPTDL (SEQ ID NO: 84700):SPIS (SEQ ID NO: 84120):LKYHY (SEQ ID NO: 84232):MVVAEXKXS (SEQ ID NO: 84468), KIPKAXXVPTEL (SEQ ID NO: 84770):SPIS (SEQ ID NO: 84120):LKYHY (SEQ ID NO: 84232):DMVVEGXGXR (SEQ ID NO: 84510), GIPEPXXVPEKM (SEQ ID NO: 84718):SPIS (SEQ ID NO: 84120):LKYHY (SEQ ID NO: 84232):NMTVESXAXR (SEQ ID NO: 84604), SIPKAXXVPTEL (SEQ ID NO: 84830):SPIS (SEQ ID NO: 84120):LKYHY (SEQ ID NO: 84232):EMVVEGXGXR (SEQ ID NO: 84529), HVTKPTXAPTKL (SEQ ID NO: 84742):SPIS (SEQ ID NO: 84120):LKYHY (SEQ ID NO: 84232):NMVVRSXGXH (SEQ ID NO: 84629), YVPKPXXAPTKL (SEQ ID NO: 84864):SPIS (SEQ ID NO: 84120):LKYHY (SEQ ID NO: 84232):NMVVRSXGXH (SEQ ID NO: 84629), TVPKPXXAPTQL (SEQ ID NO: 84854):SPIS (SEQ ID NO: 84120):LKYHY (SEQ ID NO: 84232):NMVVRAXGXH (SEQ ID NO: 84627), AVPKAXXAPTKL (SEQ ID NO: 84704):SPIS (SEQ ID NO: 84120):LKYHY (SEQ ID NO: 84232):NMVVKAXGXH (SEQ ID NO: 84624), KASKAXXVPTKL (SEQ ID NO: 84760):SPIS (SEQ ID NO: 84120):LKYHY (SEQ ID NO: 84232):GMAVSEXGXR (SEQ ID NO: 84546), GSAGPXXTPTKM (SEQ ID NO: 84726):SPIS (SEQ ID NO: 84120):LKYHY (SEQ ID NO: 84232):GMVVDRXGXS (SEQ ID NO: 84567), AAPASXXVPARL (SEQ ID NO: 84677):SPIS (SEQ ID NO: 84120):LKYHY (SEQ ID NO: 84232):DMVVEAXGXR (SEQ ID NO: 84509), STPPTXXVPTRL (SEQ ID NO: 84850):SPIS (SEQ ID NO: 84120):LKYHY (SEQ ID NO: 84232):DMVVESXGXR (SEQ ID NO: 84511), HVPKPXXAPTKL (SEQ ID NO: 84734):SPIS (SEQ ID NO: 84120):LKYHY (SEQ ID NO: 84232):NMVVRSXGXH (SEQ ID NO: 84629), RVPSTXXAPVKT (SEQ ID NO: 84815):SPIS (SEQ ID NO: 84120):LKYHY (SEQ ID NO: 84232):MIVEEXGXL (SEQ ID NO: 84448), ASAAPXXVPQAL (SEQ ID NO: 84689):SPIS (SEQ ID NO: 84120):LKYHY (SEQ ID NO: 84232):MIVRSXKXS (SEQ ID NO: 84453), ASASPSSVSQDL (SEQ ID NO: 85002):SPIS (SEQ ID NO: 84120):LKYHY (SEQ ID NO: 84232):MIVKSXKXS (SEQ ID NO: 84451), ASASPXXVPQDL (SEQ ID NO: 84699):SPIS (SEQ ID NO: 84120):LKYHY (SEQ ID NO: 84232):MVVKSXKXS (SEQ ID NO: 84470), NDEGLEXVPTEE (SEQ ID NO: 84798):SPIS (SEQ ID NO: 84120):LKYHY (SEQ ID NO: 84232):FLQHNKXEXR (SEQ ID NO: 84536), NDEGLEXVPTGQ (SEQ ID NO: 84799):SPIS (SEQ ID NO: 84120):LKYHY (SEQ ID NO: 84232):LEEHSQXEXR (SEQ ID NO: 84577), SSVKXQPSRVHH (SEQ ID NO: 84834):SPIS (SEQ ID NO: 84120):LKYHY (SEQ ID NO: 84232):RLEEHLEXAXA (SEQ ID NO: 84646), RNVQXRPTQVQL (SEQ ID NO: 84806):SPIS (SEQ ID NO: 84120):LKYHY (SEQ ID NO: 84232):TLEDHLAXKXE (SEQ ID NO: 84659), KIPKAXXVPTEL (SEQ ID NO: 84770):EPIS (SEQ ID NO: 84109):KFKYE (SEQ ID NO: 84211):DMAVXGXGSR (SEQ ID NO: 84478), GIPEPXXVPTKM (SEQ ID NO: 84720):EPIS (SEQ ID NO: 84109):KFKYE (SEQ ID NO: 84211):NMAVSSXAXR (SEQ ID NO: 84589), SIPKAXXVPTEL (SEQ ID NO: 84830):EPIS (SEQ ID NO: 84109):KFKYE (SEQ ID NO: 84211):EMAVXGXGSR (SEQ ID NO: 84518), HVTKPTXVPTKL (SEQ ID NO: 84750):EPIS (SEQ ID NO: 84109):KFKYE (SEQ ID NO: 84211):NMAVSSXGXH (SEQ ID NO: 84590), YVPKPXXVPTKL (SEQ ID NO: 84870):EPIS (SEQ ID NO: 84109):KFKYE (SEQ ID NO: 84211):NMAVSSXGXH (SEQ ID NO: 84590), TVPKPXXVPTQL (SEQ ID NO: 84860):EPIS (SEQ ID NO: 84109):KFKYE (SEQ ID NO: 84211):NMAVSAXGXH (SEQ ID NO: 84588), AVPKAXXVPTKL (SEQ ID NO: 84710):EPIS (SEQ ID NO: 84109):KFKYE (SEQ ID NO: 84211):NMAVSAXGXH (SEQ ID NO: 84588), KVGKAXXVPTKL (SEQ ID NO: 84780):EPIS (SEQ ID NO: 84109):KFKYE (SEQ ID NO: 84211):EGMSAVSXGXR (SEQ ID NO: 84630), GSAGPXXVPTKM (SEQ ID NO: 84730):EPIS (SEQ ID NO: 84109):KFKYE (SEQ ID NO: 84211):GMAVSRXGXS (SEQ ID NO: 84547), AAPASXXVPTRL (SEQ ID NO: 84680):EPIS (SEQ ID NO: 84109):KFKYE (SEQ ID NO: 84211):DMAVSAXGXR (SEQ ID NO: 84476), STPPTXXVPTRL (SEQ ID NO: 84850):EPIS (SEQ ID NO: 84109):KFKYE (SEQ ID NO: 84211):DMAVSSXGXR (SEQ ID NO: 84477), HVPKPXXVPTKL (SEQ ID NO: 84740):EPIS (SEQ ID NO: 84109):KFKYE (SEQ ID NO: 84211):NMAVSSXGXH (SEQ ID NO: 84590), RVPSTXXVPTKT (SEQ ID NO: 84820):EPIS (SEQ ID NO: 84109):KFKYE (SEQ ID NO: 84211):MIAVSXGXL (SEQ ID NO: 84434), ASAAPXXVPTAL (SEQ ID NO: 84690):EPIS (SEQ ID NO: 84109):KFKYE (SEQ ID NO: 84211):MIAVSXKXS (SEQ ID NO: 84435), ASASPXXVPTDL (SEQ ID NO: 84700):EPIS (SEQ ID NO: 84109):KFKYE (SEQ ID NO: 84211):MIAVSXKXS (SEQ ID NO: 84435), ASASPXXVPTDL (SEQ ID NO: 84700):EPIS (SEQ ID NO: 84109):KFKYE (SEQ ID NO: 84211):MVAVSXKXS (SEQ ID NO: 84462), KIPKAXXVPTEL (SEQ ID NO: 84770):EPIS (SEQ ID NO: 84109):KFKYE (SEQ ID NO: 84211):DMVVEGXGXR (SEQ ID NO: 84510), GIPEPXXVPEKM (SEQ ID NO: 84718):EPIS (SEQ ID NO: 84109):KFKYE (SEQ ID NO: 84211):NMTVESXAXR (SEQ ID NO: 84604), SIPKAXXVPTEL (SEQ ID NO: 84830):EPIS (SEQ ID NO: 84109):KFKYE (SEQ ID NO: 84211):EMVVEGXGXR (SEQ ID NO: 84529), HVTKPTXAPTKL (SEQ ID NO: 84742):EPIS (SEQ ID NO: 84109):KFKYE (SEQ ID NO: 84211):NMVVRSXGXH (SEQ ID NO: 84629), YVPKPXXAPTKL (SEQ ID NO: 84864):EPIS (SEQ ID NO: 84109):KFKYE (SEQ ID NO: 84211):NMVVRSXGXH (SEQ ID NO: 84629), TVPKPXXAPTQL (SEQ ID NO: 84854):EPIS (SEQ ID NO: 84109):KFKYE (SEQ ID NO: 84211):NMVVRAXGXH (SEQ ID NO: 84627), AVPKAXXAPTKL (SEQ ID NO: 84704):EPIS (SEQ ID NO: 84109):KFKYE (SEQ ID NO: 84211):NMVVKAXGXH (SEQ ID NO: 84624), KVGKAXXVPTKL (SEQ ID NO: 84780):EPIS (SEQ ID NO: 84109):KFKYE (SEQ ID NO: 84211):EGMSVAEXGXR (SEQ ID NO: 84636), GSAGPXXTPTKM (SEQ ID NO: 84726):EPIS (SEQ ID NO: 84109):KFKYE (SEQ ID NO: 84211):GMVVDRXGXS (SEQ ID NO: 84567), AAPASXXVPARL (SEQ ID NO: 84677):EPIS (SEQ ID NO: 84109):KFKYE (SEQ ID NO: 84211):DMVVEAXGXR (SEQ ID NO: 84509), STPPTXXVPTRL (SEQ ID NO: 84850):EPIS (SEQ ID NO: 84109):KFKYE (SEQ ID NO: 84211):DMVVESXGXR (SEQ ID NO: 84511), HVPKPXXAPTKL (SEQ ID NO: 84734):EPIS (SEQ ID NO: 84109):KFKYE (SEQ ID NO: 84211):NMVVRSXGXH (SEQ ID NO: 84629), RVPSTXXAPVKT (SEQ ID NO: 84815):EPIS (SEQ ID NO: 84109):KFKYE (SEQ ID NO: 84211):MIVEEXGXL (SEQ ID NO: 84448), ASAAPXXVPQAL (SEQ ID NO: 84689):EPIS (SEQ ID NO: 84109):KFKYE (SEQ ID NO: 84211):MIVRSXKXS (SEQ ID NO: 84453), ASASPSSVSQDL (SEQ ID NO: 85002):EPIS (SEQ ID NO: 84109):KFKYE (SEQ ID NO: 84211):MIVKSXKXS (SEQ ID NO: 84451), ASASPXXVPQDL (SEQ ID NO: 84699):EPIS (SEQ ID NO: 84109):KFKYE (SEQ ID NO: 84211):MVVKSXKXS (SEQ ID NO: 84470), NDEGLEXVPTEE (SEQ ID NO: 84798):EPIS (SEQ ID NO: 84109):KFKYE (SEQ ID NO: 84211):FLQHNKXEXR (SEQ ID NO: 84536), NDEGLEXVPTGQ (SEQ ID NO: 84799):EPIS (SEQ ID NO: 84109):KFKYE (SEQ ID NO: 84211):LEEHSQXEXR (SEQ ID NO: 84577), SSVKXQPSRVHH (SEQ ID NO: 84834):EPIS (SEQ ID NO: 84109):KFKYE (SEQ ID NO: 84211):RLEEHLEXAXA (SEQ ID NO: 84646), RNVQXRPTQVQL (SEQ ID NO: 84806):EPIS (SEQ ID NO: 84109):KFKYE (SEQ ID NO: 84211):TLEDHLAXKXE (SEQ ID NO: 84659), KIPKAXXTPTEL (SEQ ID NO: 84766):SPIN (SEQ ID NO: 84119):YGKIP (SEQ ID NO: 84397):DMVVDGXGXR (SEQ ID NO: 84507), GIPEPXXTPTKM (SEQ ID NO: 84716):SPIN (SEQ ID NO: 84119):YGKIP (SEQ ID NO: 84397):NMVVDSXAXR (SEQ ID NO: 84619), SIPKAXXTPTEL (SEQ ID NO: 84826):SPIN (SEQ ID NO: 84119):YGKIP (SEQ ID NO: 84397):EMVVDGXGXR (SEQ ID NO: 84528), HVTKPTXTPTKL (SEQ ID NO: 84745):SPIN (SEQ ID NO: 84119):YGKIP (SEQ ID NO: 84397):NMVVDSXGXH (SEQ ID NO: 84620), YVPKPXXTPTKL (SEQ ID NO: 84866):SPIN (SEQ ID NO: 84119):YGKIP (SEQ ID NO: 84397):NMVVDSXGXH (SEQ ID NO: 84620), TVPKPXXTPTQL (SEQ ID NO: 84856):SPIN (SEQ ID NO: 84119):YGKIP (SEQ ID NO: 84397):NMVVDAXGXH (SEQ ID NO: 84618), AVPKAXXTPTKL (SEQ ID NO: 84706):SPIN (SEQ ID NO: 84119):YGKIP (SEQ ID NO: 84397):NMVVDAXGXH (SEQ ID NO: 84618), KVGKAXXTPTKL (SEQ ID NO: 84776):SPIN (SEQ ID NO: 84119):YGKIP (SEQ ID NO: 84397):EGMSVVDXGXR (SEQ ID NO: 84640), KASKAXXTPTKL (SEQ ID NO: 84756):SPIN (SEQ ID NO: 84119):YGKIP (SEQ ID NO: 84397):GMVVDEXGXR (SEQ ID NO: 84566), AAPASXXTPTRL (SEQ ID NO: 84676):SPIN (SEQ ID NO: 84119):YGKIP (SEQ ID NO: 84397):DMVVDAXGXR (SEQ ID NO: 84506), STPPTXXTPTRL (SEQ ID NO: 84846):SPIN (SEQ ID NO: 84119):YGKIP (SEQ ID NO: 84397):DMVVDSXGXR (SEQ ID NO: 84508), HVPKPXXTPTKL (SEQ ID NO: 84736):SPIN (SEQ ID NO: 84119):YGKIP (SEQ ID NO: 84397):NMVVDSXGXH (SEQ ID NO: 84620), RVPSTXXTPTKT (SEQ ID NO: 84816):SPIN (SEQ ID NO: 84119):YGKIP (SEQ ID NO: 84397):MIVVDXGXL (SEQ ID NO: 84454), ASAAPXXTPTAL (SEQ ID NO: 84686):SPIN (SEQ ID NO: 84119):YGKIP (SEQ ID NO: 84397):MIVVDXKXS (SEQ ID NO: 84455), ASASPXXTPTDL (SEQ ID NO: 84696):SPIN (SEQ ID NO: 84119):YGKIP (SEQ ID NO: 84397):MIVVDXKXS (SEQ ID NO: 84455), ASASPXXTPTDL (SEQ ID NO: 84696):SPIN (SEQ ID NO: 84119):YGKIP (SEQ ID NO: 84397):MVVVDXKXS (SEQ ID NO: 84472), KIPKAXXVPTEL (SEQ ID NO: 84770):SPIN (SEQ ID NO: 84119):YGKIP (SEQ ID NO: 84397):DMVVEGXGXR (SEQ ID NO: 84510), GIPEPXXVPEKM (SEQ ID NO: 84718):SPIN (SEQ ID NO: 84119):YGKIP (SEQ ID NO: 84397):NMTVESXAXR (SEQ ID NO: 84604), SIPKAXXVPTEL (SEQ ID NO: 84830):SPIN (SEQ ID NO: 84119):YGKIP (SEQ ID NO: 84397):EMVVEGXGXR (SEQ ID NO: 84529), HVTKPTXAPTKL (SEQ ID NO: 84742):SPIN (SEQ ID NO: 84119):YGKIP (SEQ ID NO: 84397):NMVVRSXGXH (SEQ ID NO: 84629), YVPKPXXAPTKL (SEQ ID NO: 84864):SPIN (SEQ ID NO: 84119):YGKIP (SEQ ID NO: 84397):NMVVRSXGXH (SEQ ID NO: 84629), TVPKPXXAPTQL (SEQ ID NO: 84854):SPIN (SEQ ID NO: 84119):YGKIP (SEQ ID NO: 84397):NMVVRAXGXH (SEQ ID NO: 84627), AVPKAXXAPTKL (SEQ ID NO: 84704):SPIN (SEQ ID NO: 84119):YGKIP (SEQ ID NO: 84397):NMVVKAXGXH (SEQ ID NO: 84624), KVGKAXXVPTKL (SEQ ID NO: 84780):SPIN (SEQ ID NO: 84119):YGKIP (SEQ ID NO: 84397):EGMSVAEXGXR (SEQ ID NO: 84636), KASKAXXVPTKL (SEQ ID NO: 84760):SPIN (SEQ ID NO: 84119):YGKIP (SEQ ID NO: 84397):GMAVSEXGXR (SEQ ID NO: 84546), AAPASXXVPARL (SEQ ID NO: 84677):SPIN (SEQ ID NO: 84119):YGKIP (SEQ ID NO: 84397):DMVVEAXGXR (SEQ ID NO: 84509), STPPTXXVPTRL (SEQ ID NO: 84850):SPIN (SEQ ID NO: 84119):YGKIP (SEQ ID NO: 84397):DMVVESXGXR (SEQ ID NO: 84511), HVPKPXXAPTKL (SEQ ID NO: 84734):SPIN (SEQ ID NO: 84119):YGKIP (SEQ ID NO: 84397):NMVVRSXGXH (SEQ ID NO: 84629), RVPSTXXAPVKT (SEQ ID NO: 84815):SPIN (SEQ ID NO: 84119):YGKIP (SEQ ID NO: 84397):MIVEEXGXL (SEQ ID NO: 84448), ASAAPXXVPQAL (SEQ ID NO: 84689):SPIN (SEQ ID NO: 84119):YGKIP (SEQ ID NO: 84397):MIVRSXKXS (SEQ ID NO: 84453), ASASPSSVSQDL (SEQ ID NO: 85002):SPIN (SEQ ID NO: 84119):YGKIP (SEQ ID NO: 84397):MIVKSXKXS (SEQ ID NO: 84451), ASASPXXVPQDL (SEQ ID NO: 84699):SPIN (SEQ ID NO: 84119):YGKIP (SEQ ID NO: 84397):MVVKSXKXS (SEQ ID NO: 84470), NDEGLEXVPTEE (SEQ ID NO: 84798):SPIN (SEQ ID NO: 84119):YGKIP (SEQ ID NO: 84397):FLQHNKXEXR (SEQ ID NO: 84536), NDEGLEXVPTGQ (SEQ ID NO: 84799):SPIN (SEQ ID NO: 84119):YGKIP (SEQ ID NO: 84397):LEEHSQXEXR (SEQ ID NO: 84577), SSVKXQPSRVHH (SEQ ID NO: 84834):SPIN (SEQ ID NO: 84119):YGKIP (SEQ ID NO: 84397):RLEEHLEXAXA (SEQ ID NO: 84646), RNVQXRPTQVQL (SEQ ID NO: 84806):SPIN (SEQ ID NO: 84119):YGKIP (SEQ ID NO: 84397):TLEDHLAXKXE (SEQ ID NO: 84659), KIPKAXXVPAEL (SEQ ID NO: 84767):SPIS (SEQ ID NO: 84120):YKQYE (SEQ ID NO: 84398):DMVVEGXGXR (SEQ ID NO: 84510), GIPEPXXVPAKM (SEQ ID NO: 84717):SPIS (SEQ ID NO: 84120):YKQYE (SEQ ID NO: 84398):NMVVESXAXR (SEQ ID NO: 84622), SIPKAXXVPAEL (SEQ ID NO: 84827):SPIS (SEQ ID NO: 84120):YKQYE (SEQ ID NO: 84398):EMVVEGXGXR (SEQ ID NO: 84529), HVTKPTXVPAKL (SEQ ID NO: 84747):SPIS (SEQ ID NO: 84120):YKQYE (SEQ ID NO: 84398):NMVVESXGXH (SEQ ID NO: 84623), YVPKPXXVPAKL (SEQ ID NO: 84867):SPIS (SEQ ID NO: 84120):YKQYE (SEQ ID NO: 84398):NMVVESXGXH (SEQ ID NO: 84623), TVPKPXXVPAQL (SEQ ID NO: 84857):SPIS (SEQ ID NO: 84120):YKQYE (SEQ ID NO: 84398):NMVVEAXGXH (SEQ ID NO: 84621), AVPKAXXVPAKL (SEQ ID NO: 84707):SPIS (SEQ ID NO: 84120):YKQYE (SEQ ID NO: 84398):NMVVEAXGXH (SEQ ID NO: 84621), KVGKAXXVPAKL (SEQ ID NO: 84777):SPIS (SEQ ID NO: 84120):YKQYE (SEQ ID NO: 84398):EGMSVVEXGXR (SEQ ID NO: 84641), KASKAXXVPAKL (SEQ ID NO: 84757):SPIS (SEQ ID NO: 84120):YKQYE (SEQ ID NO: 84398):GMVVEEXGXR (SEQ ID NO: 84568), GSAGPXXVPAKM (SEQ ID NO: 84727):SPIS (SEQ ID NO: 84120):YKQYE (SEQ ID NO: 84398):GMVVERXGXS (SEQ ID NO: 84569), STPPTXXVPARL (SEQ ID NO: 84847):SPIS (SEQ ID NO: 84120):YKQYE (SEQ ID NO: 84398):DMVVESXGXR (SEQ ID NO: 84511), HVPKPXXVPAKL (SEQ ID NO: 84737):SPIS (SEQ ID NO: 84120):YKQYE (SEQ ID NO: 84398):NMVVESXGXH (SEQ ID NO: 84623), RVPSTXXVPAKT (SEQ ID NO: 84817):SPIS (SEQ ID NO: 84120):YKQYE (SEQ ID NO: 84398):MIVVEXGXL (SEQ ID NO: 84456), ASAAPXXVPAAL (SEQ ID NO: 84687):SPIS (SEQ ID NO: 84120):YKQYE (SEQ ID NO: 84398):MIVVEXKXS (SEQ ID NO: 84457), ASASPXXVPADL (SEQ ID NO: 84697):SPIS (SEQ ID NO: 84120):YKQYE (SEQ ID NO: 84398):MIVVEXKXS (SEQ ID NO: 84457), ASASPXXVPADL (SEQ ID NO: 84697):SPIS (SEQ ID NO: 84120):YKQYE (SEQ ID NO: 84398):MVVVEXKXS (SEQ ID NO: 84473), KIPKAXXVPTEL (SEQ ID NO: 84770):SPIS (SEQ ID NO: 84120):YKQYE (SEQ ID NO: 84398):DMVVEGXGXR (SEQ ID NO: 84510), GIPEPXXVPEKM (SEQ ID NO: 84718):SPIS (SEQ ID NO: 84120):YKQYE (SEQ ID NO: 84398):NMTVESXAXR (SEQ ID NO: 84604), SIPKAXXVPTEL (SEQ ID NO: 84830):SPIS (SEQ ID NO: 84120):YKQYE (SEQ ID NO: 84398):EMVVEGXGXR (SEQ ID NO: 84529), HVTKPTXAPTKL (SEQ ID NO: 84742):SPIS (SEQ ID NO: 84120):YKQYE (SEQ ID NO: 84398):NMVVRSXGXH (SEQ ID NO: 84629), YVPKPXXAPTKL (SEQ ID NO: 84864):SPIS (SEQ ID NO: 84120):YKQYE (SEQ ID NO: 84398):NMVVRSXGXH (SEQ ID NO: 84629), TVPKPXXAPTQL (SEQ ID NO: 84854):SPIS (SEQ ID NO: 84120):YKQYE (SEQ ID NO: 84398):NMVVRAXGXH (SEQ ID NO: 84627), AVPKAXXAPTKL (SEQ ID NO: 84704):SPIS (SEQ ID NO: 84120):YKQYE (SEQ ID NO: 84398):NMVVKAXGXH (SEQ ID NO: 84624), KVGKAXXVPTKL (SEQ ID NO: 84780):SPIS (SEQ ID NO: 84120):YKQYE (SEQ ID NO: 84398):EGMSVAEXGXR (SEQ ID NO: 84636), KASKAXXVPTKL (SEQ ID NO: 84760):SPIS (SEQ ID NO: 84120):YKQYE (SEQ ID NO: 84398):GMAVSEXGXR (SEQ ID NO: 84546), GSAGPXXTPTKM (SEQ ID NO: 84726):SPIS (SEQ ID NO: 84120):YKQYE (SEQ ID NO: 84398):GMVVDRXGXS (SEQ ID NO: 84567), STPPTXXVPTRL (SEQ ID NO: 84850):SPIS (SEQ ID NO: 84120):YKQYE (SEQ ID NO: 84398):DMVVESXGXR (SEQ ID NO: 84511), HVPKPXXAPTKL (SEQ ID NO: 84734):SPIS (SEQ ID NO: 84120):YKQYE (SEQ ID NO: 84398):NMVVRSXGXH (SEQ ID NO: 84629), RVPSTXXAPVKT (SEQ ID NO: 84815):SPIS (SEQ ID NO: 84120):YKQYE (SEQ ID NO: 84398):MIVEEXGXL (SEQ ID NO: 84448), ASAAPXXVPQAL (SEQ ID NO: 84689):SPIS (SEQ ID NO: 84120):YKQYE (SEQ ID NO: 84398):MIVRSXKXS (SEQ ID NO: 84453), ASASPSSVSQDL (SEQ ID NO: 85002):SPIS (SEQ ID NO: 84120):YKQYE (SEQ ID NO: 84398):MIVKSXKXS (SEQ ID NO: 84451), ASASPXXVPQDL (SEQ ID NO: 84699):SPIS (SEQ ID NO: 84120):YKQYE (SEQ ID NO: 84398):MVVKSXKXS (SEQ ID NO: 84470), NDEGLEXVPTEE (SEQ ID NO: 84798):SPIS (SEQ ID NO: 84120):YKQYE (SEQ ID NO: 84398):FLQHNKXEXR (SEQ ID NO: 84536), NDEGLEXVPTGQ (SEQ ID NO: 84799):SPIS (SEQ ID NO: 84120):YKQYE (SEQ ID NO: 84398):LEEHSQXEXR (SEQ ID NO: 84577), SSVKXQPSRVHH (SEQ ID NO: 84834):SPIS (SEQ ID NO: 84120):YKQYE (SEQ ID NO: 84398):RLEEHLEXAXA (SEQ ID NO: 84646), RNVQXRPTQVQL (SEQ ID NO: 84806):SPIS (SEQ ID NO: 84120):YKQYE (SEQ ID NO: 84398):TLEDHLAXKXE (SEQ ID NO: 84659), GIPEPXXVPTKM (SEQ ID NO: 84720):SPIS (SEQ ID NO: 84120):YKQYE (SEQ ID NO: 84398):NMVVESXAXR (SEQ ID NO: 84622), HVTKPTXVPTKL (SEQ ID NO: 84750):SPIS (SEQ ID NO: 84120):YKQYE (SEQ ID NO: 84398):NMVVESXGXH (SEQ ID NO: 84623), YVPKPXXVPTKL (SEQ ID NO: 84870):SPIS (SEQ ID NO: 84120):YKQYE (SEQ ID NO: 84398):NMVVESXGXH (SEQ ID NO: 84623), TVPKPXXVPTQL (SEQ ID NO: 84860):SPIS (SEQ ID NO: 84120):YKQYE (SEQ ID NO: 84398):NMVVEAXGXH (SEQ ID NO: 84621), AVPKAXXVPTKL (SEQ ID NO: 84710):SPIS (SEQ ID NO: 84120):YKQYE (SEQ ID NO: 84398):NMVVEAXGXH (SEQ ID NO: 84621), KVGKAXXVPTKL (SEQ ID NO: 84780):SPIS (SEQ ID NO: 84120):YKQYE (SEQ ID NO: 84398):EGMSVVEXGXR (SEQ ID NO: 84641), KASKAXXVPTKL (SEQ ID NO: 84760):SPIS (SEQ ID NO: 84120):YKQYE (SEQ ID NO: 84398):GMVVEEXGXR (SEQ ID NO: 84568), GSAGPXXVPTKM (SEQ ID NO: 84730):SPIS (SEQ ID NO: 84120):YKQYE (SEQ ID NO: 84398):GMVVERXGXS (SEQ ID NO: 84569), AAPASXXVPTRL (SEQ ID NO: 84680):SPIS (SEQ ID NO: 84120):YKQYE (SEQ ID NO: 84398):DMVVEAXGXR (SEQ ID NO: 84509), HVPKPXXVPTKL (SEQ ID NO: 84740):SPIS (SEQ ID NO: 84120):YKQYE (SEQ ID NO: 84398):NMVVESXGXH (SEQ ID NO: 84623), RVPSTXXVPTKT (SEQ ID NO: 84820):SPIS (SEQ ID NO: 84120):YKQYE (SEQ ID NO: 84398):MIVVEXGXL (SEQ ID NO: 84456), ASAAPXXVPTAL (SEQ ID NO: 84690):SPIS (SEQ ID NO: 84120):YKQYE (SEQ ID NO: 84398):MIVVEXKXS (SEQ ID NO: 84457), ASASPXXVPTDL (SEQ ID NO: 84700):SPIS (SEQ ID NO: 84120):YKQYE (SEQ ID NO: 84398):MIVVEXKXS (SEQ ID NO: 84457), ASASPXXVPTDL (SEQ ID NO: 84700):SPIS (SEQ ID NO: 84120):YKQYE (SEQ ID NO: 84398):MVVVEXKXS (SEQ ID NO: 84473), AAPASXXVPARL (SEQ ID NO: 84677):SPIS (SEQ ID NO: 84120):YKQYE (SEQ ID NO: 84398):DMVVEAXGXR (SEQ ID NO: 84509), KIPKAXXAPVEL (SEQ ID NO: 84765):KPLS (SEQ ID NO: 84112):DHHKD (SEQ ID NO: 84149):DMVEEGXGXR (SEQ ID NO: 84498), GIPEPXXAPVKM (SEQ ID NO: 84715):KPLS (SEQ ID NO: 84112):DHHKD (SEQ ID NO: 84149):NMVEESXAXR (SEQ ID NO: 84610), SIPKAXXAPVEL (SEQ ID NO: 84825):KPLS (SEQ ID NO: 84112):DHHKD (SEQ ID NO: 84149):EMVEEGXGXR (SEQ ID NO: 84525), HVTKPTXAPVKL (SEQ ID NO: 84743):KPLS (SEQ ID NO: 84112):DHHKD (SEQ ID NO: 84149):NMVEESXGXH (SEQ ID NO: 84611), YVPKPXXAPVKL (SEQ ID NO: 84865):KPLS (SEQ ID NO: 84112):DHHKD (SEQ ID NO: 84149):NMVEESXGXH (SEQ ID NO: 84611), TVPKPXXAPVQL (SEQ ID NO: 84855):KPLS (SEQ ID NO: 84112):DHHKD (SEQ ID NO: 84149):NMVEEAXGXH (SEQ ID NO: 84609), AVPKAXXAPVKL (SEQ ID NO: 84705):KPLS (SEQ ID NO: 84112):DHHKD (SEQ ID NO: 84149):NMVEEAXGXH (SEQ ID NO: 84609), KVGKAXXAPVKL (SEQ ID NO: 84775):KPLS (SEQ ID NO: 84112):DHHKD (SEQ ID NO: 84149):EGMSVEEXGXR (SEQ ID NO: 84637), KASKAXXAPVKL (SEQ ID NO: 84755):KPLS (SEQ ID NO: 84112):DHHKD (SEQ ID NO: 84149):GMVEEEXGXR (SEQ ID NO: 84560), GSAGPXXAPVKM (SEQ ID NO: 84725):KPLS (SEQ ID NO: 84112):DHHKD (SEQ ID NO: 84149):GMVEERXGXS (SEQ ID NO: 84561), AAPASXXAPVRL (SEQ ID NO: 84675):KPLS (SEQ ID NO: 84112):DHHKD (SEQ ID NO: 84149):DMVEEAXGXR (SEQ ID NO: 84497), STPPTXXAPVRL (SEQ ID NO: 84845):KPLS (SEQ ID NO: 84112):DHHKD (SEQ ID NO: 84149):DMVEESXGXR (SEQ ID NO: 84499), HVPKPXXAPVKL (SEQ ID NO: 84735):KPLS (SEQ ID NO: 84112):DHHKD (SEQ ID NO: 84149):NMVEESXGXH (SEQ ID NO: 84611), ASAAPXXAPVAL (SEQ ID NO: 84685):KPLS (SEQ ID NO: 84112):DHHKD (SEQ ID NO: 84149):MIVEEXKXS (SEQ ID NO: 84449), ASASPXXAPVDL (SEQ ID NO: 84695):KPLS (SEQ ID NO: 84112):DHHKD (SEQ ID NO: 84149):MIVEEXKXS (SEQ ID NO: 84449), ASASPXXAPVDL (SEQ ID NO: 84695):KPLS (SEQ ID NO: 84112):DHHKD (SEQ ID NO: 84149):MVVEEXKXS (SEQ ID NO: 84469), KIPKAXXVPTEL (SEQ ID NO: 84770):KPLS (SEQ ID NO: 84112):DHHKD (SEQ ID NO: 84149):DMVVEGXGXR (SEQ ID NO: 84510), GIPEPXXVPEKM (SEQ ID NO: 84718):KPLS (SEQ ID NO: 84112):DHHKD (SEQ ID NO: 84149):NMTVESXAXR (SEQ ID NO: 84604), SIPKAXXVPTEL (SEQ ID NO: 84830):KPLS (SEQ ID NO: 84112):DHHKD (SEQ ID NO: 84149):EMVVEGXGXR (SEQ ID NO: 84529), HVTKPTXAPTKL (SEQ ID NO: 84742):KPLS (SEQ ID NO: 84112):DHHKD (SEQ ID NO: 84149):NMVVRSXGXH (SEQ ID NO: 84629), YVPKPXXAPTKL (SEQ ID NO: 84864):KPLS (SEQ ID NO: 84112):DHHKD (SEQ ID NO: 84149):NMVVRSXGXH (SEQ ID NO: 84629), TVPKPXXAPTQL (SEQ ID NO: 84854):KPLS (SEQ ID NO: 84112):DHHKD (SEQ ID NO: 84149):NMVVRAXGXH (SEQ ID NO: 84627), AVPKAXXAPTKL (SEQ ID NO: 84704):KPLS (SEQ ID NO: 84112):DHHKD (SEQ ID NO: 84149):NMVVKAXGXH (SEQ ID NO: 84624), KVGKAXXVPTKL (SEQ ID NO: 84780):KPLS (SEQ ID NO: 84112):DHHKD (SEQ ID NO: 84149):EGMSVAEXGXR (SEQ ID NO: 84636), KASKAXXVPTKL (SEQ ID NO: 84760):KPLS (SEQ ID NO: 84112):DHHKD (SEQ ID NO: 84149):GMAVSEXGXR (SEQ ID NO: 84546), GSAGPXXTPTKM (SEQ ID NO: 84726):KPLS (SEQ ID NO: 84112):DHHKD (SEQ ID NO: 84149):GMVVDRXGXS (SEQ ID NO: 84567), AAPASXXVPARL (SEQ ID NO: 84677):KPLS (SEQ ID NO: 84112):DHHKD (SEQ ID NO: 84149):DMVVEAXGXR (SEQ ID NO: 84509), STPPTXXVPTRL (SEQ ID NO: 84850):KPLS (SEQ ID NO: 84112):DHHKD (SEQ ID NO: 84149):DMVVESXGXR (SEQ ID NO: 84511), HVPKPXXAPTKL (SEQ ID NO: 84734):KPLS (SEQ ID NO: 84112):DHHKD (SEQ ID NO: 84149):NMVVRSXGXH (SEQ ID NO: 84629), ASAAPXXVPQAL (SEQ ID NO: 84689):KPLS (SEQ ID NO: 84112):DHHKD (SEQ ID NO: 84149):MIVRSXKXS (SEQ ID NO: 84453), ASASPSSVSQDL (SEQ ID NO: 85002):KPLS (SEQ ID NO: 84112):DHHKD (SEQ ID NO: 84149):MIVKSXKXS (SEQ ID NO: 84451), ASASPXXVPQDL (SEQ ID NO: 84699):KPLS (SEQ ID NO: 84112):DHHKD (SEQ ID NO: 84149):MVVKSXKXS (SEQ ID NO: 84470), NDEGLEXVPTEE (SEQ ID NO: 84798):KPLS (SEQ ID NO: 84112):DHHKD (SEQ ID NO: 84149):FLQHNKXEXR (SEQ ID NO: 84536), NDEGLEXVPTGQ (SEQ ID NO: 84799):KPLS (SEQ ID NO: 84112):DHHKD (SEQ ID NO: 84149):LEEHSQXEXR (SEQ ID NO: 84577), SSVKXQPSRVHH (SEQ ID NO: 84834):KPLS (SEQ ID NO: 84112):DHHKD (SEQ ID NO: 84149):RLEEHLEXAXA (SEQ ID NO: 84646), RNVQXRPTQVQL (SEQ ID NO: 84806):KPLS (SEQ ID NO: 84112):DHHKD (SEQ ID NO: 84149):TLEDHLAXKXE (SEQ ID NO: 84659), KIPKAXXVPQEL (SEQ ID NO: 84769):EPLP (SEQ ID NO: 84110):EQLSN (SEQ ID NO: 84178):DMVRXGXGSR (SEQ ID NO: 84505), GIPEPXXVPQKM (SEQ ID NO: 84719):EPLP (SEQ ID NO: 84110):EQLSN (SEQ ID NO: 84178):NMVRSSXAXR (SEQ ID NO: 84616), SIPKAXXVPQEL (SEQ ID NO: 84829):EPLP (SEQ ID NO: 84110):EQLSN (SEQ ID NO: 84178):EMVRXGXGSR (SEQ ID NO: 84527), HVTKPTXVPQKL (SEQ ID NO: 84749):EPLP (SEQ ID NO: 84110):EQLSN (SEQ ID NO: 84178):NMVRSSXGXH (SEQ ID NO: 84617), YVPKPXXVPQKL (SEQ ID NO: 84869):EPLP (SEQ ID NO: 84110):EQLSN (SEQ ID NO: 84178):NMVRSSXGXH (SEQ ID NO: 84617), TVPKPXXVPQQL (SEQ ID NO: 84859):EPLP (SEQ ID NO: 84110):EQLSN (SEQ ID NO: 84178):NMVRSAXGXH (SEQ ID NO: 84615), AVPKAXXVPQKL (SEQ ID NO: 84709):EPLP (SEQ ID NO: 84110):EQLSN (SEQ ID NO: 84178):NMVRSAXGXH (SEQ ID NO: 84615), KVGKAXXVPQKL (SEQ ID NO: 84779):EPLP (SEQ ID NO: 84110):EQLSN (SEQ ID NO: 84178):EGMSVRSXGXR (SEQ ID NO: 84639), KASKAXXVPQKL (SEQ ID NO: 84759):EPLP (SEQ ID NO: 84110):EQLSN (SEQ ID NO: 84178):GMVRSEXGXR (SEQ ID NO: 84564), GSAGPXXVPQKM (SEQ ID NO: 84729):EPLP (SEQ ID NO: 84110):EQLSN (SEQ ID NO: 84178):GMVRSRXGXS (SEQ ID NO: 84565), AAPASXXVPQRL (SEQ ID NO: 84679):EPLP (SEQ ID NO: 84110):EQLSN (SEQ ID NO: 84178):DMVRSAXGXR (SEQ ID NO: 84503), STPPTXXVPQRL (SEQ ID NO: 84849):EPLP (SEQ ID NO: 84110):EQLSN (SEQ ID NO: 84178):DMVRSSXGXR (SEQ ID NO: 84504), HVPKPXXVPQKL (SEQ ID NO: 84739):EPLP (SEQ ID NO: 84110):EQLSN (SEQ ID NO: 84178):NMVRSSXGXH (SEQ ID NO: 84617), RVPSTXXVPQKT (SEQ ID NO: 84819):EPLP (SEQ ID NO: 84110):EQLSN (SEQ ID NO: 84178):MIVRSXGXL (SEQ ID NO: 84452), ASASPXXVPQDL (SEQ ID NO: 84699):EPLP (SEQ ID NO: 84110):EQLSN (SEQ ID NO: 84178):MIVRSXKXS (SEQ ID NO: 84453), ASASPXXVPQDL (SEQ ID NO: 84699):EPLP (SEQ ID NO: 84110):EQLSN (SEQ ID NO: 84178):MVVRSXKXS (SEQ ID NO: 84471), KIPKAXXVPTEL (SEQ ID NO: 84770):EPLP (SEQ ID NO: 84110):EQLSN (SEQ ID NO: 84178):DMVVEGXGXR (SEQ ID NO: 84510), GIPEPXXVPEKM (SEQ ID NO: 84718):EPLP (SEQ ID NO: 84110):EQLSN (SEQ ID NO: 84178):NMTVESXAXR (SEQ ID NO: 84604), SIPKAXXVPTEL (SEQ ID NO: 84830):EPLP (SEQ ID NO: 84110):EQLSN (SEQ ID NO: 84178):EMVVEGXGXR (SEQ ID NO: 84529), HVTKPTXAPTKL (SEQ ID NO: 84742):EPLP (SEQ ID NO: 84110):EQLSN (SEQ ID NO: 84178):NMVVRSXGXH (SEQ ID NO: 84629), YVPKPXXAPTKL (SEQ ID NO: 84864):EPLP (SEQ ID NO: 84110):EQLSN (SEQ ID NO: 84178):NMVVRSXGXH (SEQ ID NO: 84629), TVPKPXXAPTQL (SEQ ID NO: 84854):EPLP (SEQ ID NO: 84110):EQLSN (SEQ ID NO: 84178):NMVVRAXGXH (SEQ ID NO: 84627), AVPKAXXAPTKL (SEQ ID NO: 84704):EPLP (SEQ ID NO: 84110):EQLSN (SEQ ID NO: 84178):NMVVKAXGXH (SEQ ID NO: 84624), KVGKAXXVPTKL (SEQ ID NO: 84780):EPLP (SEQ ID NO: 84110):EQLSN (SEQ ID NO: 84178):EGMSVAEXGXR (SEQ ID NO: 84636), KASKAXXVPTKL (SEQ ID NO: 84760):EPLP (SEQ ID NO: 84110):EQLSN (SEQ ID NO: 84178):GMAVSEXGXR (SEQ ID NO: 84546), GSAGPXXTPTKM (SEQ ID NO: 84726):EPLP (SEQ ID NO: 84110):EQLSN (SEQ ID NO: 84178):GMVVDRXGXS (SEQ ID NO: 84567), AAPASXXVPARL (SEQ ID NO: 84677):EPLP (SEQ ID NO: 84110):EQLSN (SEQ ID NO: 84178):DMVVEAXGXR (SEQ ID NO: 84509), STPPTXXVPTRL (SEQ ID NO: 84850):EPLP (SEQ ID NO: 84110):EQLSN (SEQ ID NO: 84178):DMVVESXGXR (SEQ ID NO: 84511), HVPKPXXAPTKL (SEQ ID NO: 84734):EPLP (SEQ ID NO: 84110):EQLSN (SEQ ID NO: 84178):NMVVRSXGXH (SEQ ID NO: 84629), RVPSTXXAPVKT (SEQ ID NO: 84815):EPLP (SEQ ID NO: 84110):EQLSN (SEQ ID NO: 84178):MIVEEXGXL (SEQ ID NO: 84448), ASASPSSVSQDL (SEQ ID NO: 85002):EPLP (SEQ ID NO: 84110):EQLSN (SEQ ID NO: 84178):MIVKSXKXS (SEQ ID NO: 84451), ASASPXXVPQDL (SEQ ID NO: 84699):EPLP (SEQ ID NO: 84110):EQLSN (SEQ ID NO: 84178):MVVKSXKXS (SEQ ID NO: 84470), NDEGLEXVPTEE (SEQ ID NO: 84798):EPLP (SEQ ID NO: 84110):EQLSN (SEQ ID NO: 84178):FLQHNKXEXR (SEQ ID NO: 84536), NDEGLEXVPTGQ (SEQ ID NO: 84799):EPLP (SEQ ID NO: 84110):EQLSN (SEQ ID NO: 84178):LEEHSQXEXR (SEQ ID NO: 84577), SSVKXQPSRVHH (SEQ ID NO: 84834):EPLP (SEQ ID NO: 84110):EQLSN (SEQ ID NO: 84178):RLEEHLEXAXA (SEQ ID NO: 84646), RNVQXRPTQVQL (SEQ ID NO: 84806):EPLP (SEQ ID NO: 84110):EQLSN (SEQ ID NO: 84178):TLEDHLAXKXE (SEQ ID NO: 84659), KIPKASSVSQEL (SEQ ID NO: 85003):EPLT (SEQ ID NO: 84111):EQLSN (SEQ ID NO: 84178):DMVKXGXGSR (SEQ ID NO: 84502), GIPEPSSVSQKM (SEQ ID NO: 85004):EPLT (SEQ ID NO: 84111):EQLSN (SEQ ID NO: 84178):NMVKSSXAXR (SEQ ID NO: 84613), SIPKASSVSQEL (SEQ ID NO: 85005):EPLT (SEQ ID NO: 84111):EQLSN (SEQ ID NO: 84178):EMVKXGXGSR (SEQ ID NO: 84526), HVTKPTXVSQKL (SEQ ID NO: 84751):EPLT (SEQ ID NO: 84111):EQLSN (SEQ ID NO: 84178):NMVKSSXGXH (SEQ ID NO: 84614), YVPKPSSVSQKL (SEQ ID NO: 85006):EPLT (SEQ ID NO: 84111):EQLSN (SEQ ID NO: 84178):NMVKSSXGXH (SEQ ID NO: 84614), TVPKPSSVSQQL (SEQ ID NO: 85007):EPLT (SEQ ID NO: 84111):EQLSN (SEQ ID NO: 84178):NMVKSAXGXH (SEQ ID NO: 84612), AVPKASSVSQKL (SEQ ID NO: 85008):EPLT (SEQ ID NO: 84111):EQLSN (SEQ ID NO: 84178):NMVKSAXGXH (SEQ ID NO: 84612), KVGKASSVSQKL (SEQ ID NO: 85009):EPLT (SEQ ID NO: 84111):EQLSN (SEQ ID NO: 84178):EGMSVKSXGXR (SEQ ID NO: 84638), KASKASSVSQKL (SEQ ID NO: 85010):EPLT (SEQ ID NO: 84111):EQLSN (SEQ ID NO: 84178):GMVKSEXGXR (SEQ ID NO: 84562), GSAGPSSVSQKM (SEQ ID NO: 85011):EPLT (SEQ ID NO: 84111):EQLSN (SEQ ID NO: 84178):GMVKSRXGXS (SEQ ID NO: 84563), AAPASSSVSQRL (SEQ ID NO: 85012):EPLT (SEQ ID NO: 84111):EQLSN (SEQ ID NO: 84178):DMVKSAXGXR (SEQ ID NO: 84500), STPPTSSVSQRL (SEQ ID NO: 85013):EPLT (SEQ ID NO: 84111):EQLSN (SEQ ID NO: 84178):DMVKSSXGXR (SEQ ID NO: 84501), HVPKPSSVSQKL (SEQ ID NO: 85014):EPLT (SEQ ID NO: 84111):EQLSN (SEQ ID NO: 84178):NMVKSSXGXH (SEQ ID NO: 84614), RVPSTSSVSQKT (SEQ ID NO: 85015):EPLT (SEQ ID NO: 84111):EQLSN (SEQ ID NO: 84178):MIVKSXGXL (SEQ ID NO: 84450), ASAAPSSVSQAL (SEQ ID NO: 85016):EPLT (SEQ ID NO: 84111):EQLSN (SEQ ID NO: 84178):MIVKSXKXS (SEQ ID NO: 84451), ASASPSSVSQDL (SEQ ID NO: 85002):EPLT (SEQ ID NO: 84111):EQLSN (SEQ ID NO: 84178):MVVKSXKXS (SEQ ID NO: 84470), KIPKAXXVPTEL (SEQ ID NO: 84770):EPLT (SEQ ID NO: 84111):EQLSN (SEQ ID NO: 84178):DMVVEGXGXR (SEQ ID NO: 84510), GIPEPXXVPEKM (SEQ ID NO: 84718):EPLT (SEQ ID NO: 84111):EQLSN (SEQ ID NO: 84178):NMTVESXAXR (SEQ ID NO: 84604), SIPKAXXVPTEL (SEQ ID NO: 84830):EPLT (SEQ ID NO: 84111):EQLSN (SEQ ID NO: 84178):EMVVEGXGXR (SEQ ID NO: 84529), HVTKPTXAPTKL (SEQ ID NO: 84742):EPLT (SEQ ID NO: 84111):EQLSN (SEQ ID NO: 84178):NMVVRSXGXH (SEQ ID NO: 84629), YVPKPXXAPTKL (SEQ ID NO: 84864):EPLT (SEQ ID NO: 84111):EQLSN (SEQ ID NO: 84178):NMVVRSXGXH (SEQ ID NO: 84629), TVPKPXXAPTQL (SEQ ID NO: 84854):EPLT (SEQ ID NO: 84111):EQLSN (SEQ ID NO: 84178):NMVVRAXGXH (SEQ ID NO: 84627), AVPKAXXAPTKL (SEQ ID NO: 84704):EPLT (SEQ ID NO: 84111):EQLSN (SEQ ID NO: 84178):NMVVKAXGXH (SEQ ID NO: 84624), KVGKAXXVPTKL (SEQ ID NO: 84780):EPLT (SEQ ID NO: 84111):EQLSN (SEQ ID NO: 84178):EGMSVAEXGXR (SEQ ID NO: 84636), KASKAXXVPTKL (SEQ ID NO: 84760):EPLT (SEQ ID NO: 84111):EQLSN (SEQ ID NO: 84178):GMAVSEXGXR (SEQ ID NO: 84546), GSAGPXXTPTKM (SEQ ID NO: 84726):EPLT (SEQ ID NO: 84111):EQLSN (SEQ ID NO: 84178):GMVVDRXGXS (SEQ ID NO: 84567), AAPASXXVPARL (SEQ ID NO: 84677):EPLT (SEQ ID NO: 84111):EQLSN (SEQ ID NO: 84178):DMVVEAXGXR (SEQ ID NO: 84509), STPPTXXVPTRL (SEQ ID NO: 84850):EPLT (SEQ ID NO: 84111):EQLSN (SEQ ID NO: 84178):DMVVESXGXR (SEQ ID NO: 84511), HVPKPXXAPTKL (SEQ ID NO: 84734):EPLT (SEQ ID NO: 84111):EQLSN (SEQ ID NO: 84178):NMVVRSXGXH (SEQ ID NO: 84629), RVPSTXXAPVKT (SEQ ID NO: 84815):EPLT (SEQ ID NO: 84111):EQLSN (SEQ ID NO: 84178):MIVEEXGXL (SEQ ID NO: 84448), ASAAPXXVPQAL (SEQ ID NO: 84689):EPLT (SEQ ID NO: 84111):EQLSN (SEQ ID NO: 84178):MIVRSXKXS (SEQ ID NO: 84453), NDEGLEXVPTEE (SEQ ID NO: 84798):EPLT (SEQ ID NO: 84111):EQLSN (SEQ ID NO: 84178):FLQHNKXEXR (SEQ ID NO: 84536), NDEGLEXVPTGQ (SEQ ID NO: 84799):EPLT (SEQ ID NO: 84111):EQLSN (SEQ ID NO: 84178):LEEHSQXEXR (SEQ ID NO: 84577), SSVKXQPSRVHH (SEQ ID NO: 84834):EPLT (SEQ ID NO: 84111):EQLSN (SEQ ID NO: 84178):RLEEHLEXAXA (SEQ ID NO: 84646), RNVQXRPTQVQL (SEQ ID NO: 84806):EPLT (SEQ ID NO: 84111):EQLSN (SEQ ID NO: 84178):TLEDHLAXKXE (SEQ ID NO: 84659), KIPKAXXVPQEL (SEQ ID NO: 84769):EPLT (SEQ ID NO: 84111):EQLSN (SEQ ID NO: 84178):DMVKXGXGSR (SEQ ID NO: 84502), GIPEPXXVPQKM (SEQ ID NO: 84719):EPLT (SEQ ID NO: 84111):EQLSN (SEQ ID NO: 84178):NMVKSSXAXR (SEQ ID NO: 84613), SIPKAXXVPQEL (SEQ ID NO: 84829):EPLT (SEQ ID NO: 84111):EQLSN (SEQ ID NO: 84178):EMVKXGXGSR (SEQ ID NO: 84526), HVTKPTXVPQKL (SEQ ID NO: 84749):EPLT (SEQ ID NO: 84111):EQLSN (SEQ ID NO: 84178):NMVKSSXGXH (SEQ ID NO: 84614), YVPKPXXVPQKL (SEQ ID NO: 84869):EPLT (SEQ ID NO: 84111):EQLSN (SEQ ID NO: 84178):NMVKSSXGXH (SEQ ID NO: 84614), TVPKPXXVPQQL (SEQ ID NO: 84859):EPLT (SEQ ID NO: 84111):EQLSN (SEQ ID NO: 84178):NMVKSAXGXH (SEQ ID NO: 84612), AVPKAXXVPQKL (SEQ ID NO: 84709):EPLT (SEQ ID NO: 84111):EQLSN (SEQ ID NO: 84178):NMVKSAXGXH (SEQ ID NO: 84612), KVGKAXXVPQKL (SEQ ID NO: 84779):EPLT (SEQ ID NO: 84111):EQLSN (SEQ ID NO: 84178):EGMSVKSXGXR (SEQ ID NO: 84638), KASKAXXVPQKL (SEQ ID NO: 84759):EPLT (SEQ ID NO: 84111):EQLSN (SEQ ID NO: 84178):GMVKSEXGXR (SEQ ID NO: 84562), GSAGPXXVPQKM (SEQ ID NO: 84729):EPLT (SEQ ID NO: 84111):EQLSN (SEQ ID NO: 84178):GMVKSRXGXS (SEQ ID NO: 84563), AAPASXXVPQRL (SEQ ID NO: 84679):EPLT (SEQ ID NO: 84111):EQLSN (SEQ ID NO: 84178):DMVKSAXGXR (SEQ ID NO: 84500), STPPTXXVPQRL (SEQ ID NO: 84849):EPLT (SEQ ID NO: 84111):EQLSN (SEQ ID NO: 84178):DMVKSSXGXR (SEQ ID NO: 84501), HVPKPXXVPQKL (SEQ ID NO: 84739):EPLT (SEQ ID NO: 84111):EQLSN (SEQ ID NO: 84178):NMVKSSXGXH (SEQ ID NO: 84614), RVPSTXXVPQKT (SEQ ID NO: 84819):EPLT (SEQ ID NO: 84111):EQLSN (SEQ ID NO: 84178):MIVKSXGXL (SEQ ID NO: 84450), ASAAPXXVPQAL (SEQ ID NO: 84689):EPLT (SEQ ID NO: 84111):EQLSN (SEQ ID NO: 84178):MIVKSXKXS (SEQ ID NO: 84451), ASASPXXVPQDL (SEQ ID NO: 84699):EPLT (SEQ ID NO: 84111):EQLSN (SEQ ID NO: 84178):MIVKSXKXS (SEQ ID NO: 84451), NDEGLEXVPTGQ (SEQ ID NO: 84799):SNIT (SEQ ID NO: 84118):IGEMS (SEQ ID NO: 84209):LEQHNQXEXR (SEQ ID NO: 84578), KIPKAXXVPTEL (SEQ ID NO: 84770):SNIT (SEQ ID NO: 84118):IGEMS (SEQ ID NO: 84209):DMVVEGXGXR (SEQ ID NO: 84510), GIPEPXXVPEKM (SEQ ID NO: 84718):SNIT (SEQ ID NO: 84118):IGEMS (SEQ ID NO: 84209):NMTVESXAXR (SEQ ID NO: 84604), SIPKAXXVPTEL (SEQ ID NO: 84830):SNIT (SEQ ID NO: 84118):IGEMS (SEQ ID NO: 84209):EMVVEGXGXR (SEQ ID NO: 84529), HVTKPTXAPTKL (SEQ ID NO: 84742):SNIT (SEQ ID NO: 84118):IGEMS (SEQ ID NO: 84209):NMVVRSXGXH (SEQ ID NO: 84629), YVPKPXXAPTKL (SEQ ID NO: 84864):SNIT (SEQ ID NO: 84118):IGEMS (SEQ ID NO: 84209):NMVVRSXGXH (SEQ ID NO: 84629), TVPKPXXAPTQL (SEQ ID NO: 84854):SNIT (SEQ ID NO: 84118):IGEMS (SEQ ID NO: 84209):NMVVRAXGXH (SEQ ID NO: 84627), AVPKAXXAPTKL (SEQ ID NO: 84704):SNIT (SEQ ID NO: 84118):IGEMS (SEQ ID NO: 84209):NMVVKAXGXH (SEQ ID NO: 84624), KVGKAXXVPTKL (SEQ ID NO: 84780):SNIT (SEQ ID NO: 84118):IGEMS (SEQ ID NO: 84209):EGMSVAEXGXR (SEQ ID NO: 84636), KASKAXXVPTKL (SEQ ID NO: 84760):SNIT (SEQ ID NO: 84118):IGEMS (SEQ ID NO: 84209):GMAVSEXGXR (SEQ ID NO: 84546), GSAGPXXTPTKM (SEQ ID NO: 84726):SNIT (SEQ ID NO: 84118):IGEMS (SEQ ID NO: 84209):GMVVDRXGXS (SEQ ID NO: 84567), AAPASXXVPARL (SEQ ID NO: 84677):SNIT (SEQ ID NO: 84118):IGEMS (SEQ ID NO: 84209):DMVVEAXGXR (SEQ ID NO: 84509), STPPTXXVPTRL (SEQ ID NO: 84850):SNIT (SEQ ID NO: 84118):IGEMS (SEQ ID NO: 84209):DMVVESXGXR (SEQ ID NO: 84511), HVPKPXXAPTKL (SEQ ID NO: 84734):SNIT (SEQ ID NO: 84118):IGEMS (SEQ ID NO: 84209):NMVVRSXGXH (SEQ ID NO: 84629), RVPSTXXAPVKT (SEQ ID NO: 84815):SNIT (SEQ ID NO: 84118):IGEMS (SEQ ID NO: 84209):MIVEEXGXL (SEQ ID NO: 84448), ASAAPXXVPQAL (SEQ ID NO: 84689):SNIT (SEQ ID NO: 84118):IGEMS (SEQ ID NO: 84209):MIVRSXKXS (SEQ ID NO: 84453), ASASPSSVSQDL (SEQ ID NO: 85002):SNIT (SEQ ID NO: 84118):IGEMS (SEQ ID NO: 84209):MIVKSXKXS (SEQ ID NO: 84451), ASASPXXVPQDL (SEQ ID NO: 84699):SNIT (SEQ ID NO: 84118):IGEMS (SEQ ID NO: 84209):MVVKSXKXS (SEQ ID NO: 84470), NDEGLEXVPTGQ (SEQ ID NO: 84799):SNIT (SEQ ID NO: 84118):IGEMS (SEQ ID NO: 84209):LEEHSQXEXR (SEQ ID NO: 84577), SSVKXQPSRVHH (SEQ ID NO: 84834):SNIT (SEQ ID NO: 84118):IGEMS (SEQ ID NO: 84209):RLEEHLEXAXA (SEQ ID NO: 84646), RNVQXRPTQVQL (SEQ ID NO: 84806):SNIT (SEQ ID NO: 84118):IGEMS (SEQ ID NO: 84209):TLEDHLAXKXE (SEQ ID NO: 84659), NDEGLEXVPTEE (SEQ ID NO: 84798):SNIT (SEQ ID NO: 84118):LGEMS (SEQ ID NO: 84228):FLEHXKXESR (SEQ ID NO: 84535), KIPKAXXVPTEL (SEQ ID NO: 84770):SNIT (SEQ ID NO: 84118):LGEMS (SEQ ID NO: 84228):DMVVEGXGXR (SEQ ID NO: 84510), GIPEPXXVPEKM (SEQ ID NO: 84718):SNIT (SEQ ID NO: 84118):LGEMS (SEQ ID NO: 84228):NMTVESXAXR (SEQ ID NO: 84604), SIPKAXXVPTEL (SEQ ID NO: 84830):SNIT (SEQ ID NO: 84118):LGEMS (SEQ ID NO: 84228):EMVVEGXGXR (SEQ ID NO: 84529), HVTKPTXAPTKL (SEQ ID NO: 84742):SNIT (SEQ ID NO: 84118):LGEMS (SEQ ID NO: 84228):NMVVRSXGXH (SEQ ID NO: 84629), YVPKPXXAPTKL (SEQ ID NO: 84864):SNIT (SEQ ID NO: 84118):LGEMS (SEQ ID NO: 84228):NMVVRSXGXH (SEQ ID NO: 84629), TVPKPXXAPTQL (SEQ ID NO: 84854):SNIT (SEQ ID NO: 84118):LGEMS (SEQ ID NO: 84228):NMVVRAXGXH (SEQ ID NO: 84627), AVPKAXXAPTKL (SEQ ID NO: 84704):SNIT (SEQ ID NO: 84118):LGEMS (SEQ ID NO: 84228):NMVVKAXGXH (SEQ ID NO: 84624), KVGKAXXVPTKL (SEQ ID NO: 84780):SNIT (SEQ ID NO: 84118):LGEMS (SEQ ID NO: 84228):EGMSVAEXGXR (SEQ ID NO: 84636), KASKAXXVPTKL (SEQ ID NO: 84760):SNIT (SEQ ID NO: 84118):LGEMS (SEQ ID NO: 84228):GMAVSEXGXR (SEQ ID NO: 84546), GSAGPXXTPTKM (SEQ ID NO: 84726):SNIT (SEQ ID NO: 84118):LGEMS (SEQ ID NO: 84228):GMVVDRXGXS (SEQ ID NO: 84567), AAPASXXVPARL (SEQ ID NO: 84677):SNIT (SEQ ID NO: 84118):LGEMS (SEQ ID NO: 84228):DMVVEAXGXR (SEQ ID NO: 84509), STPPTXXVPTRL (SEQ ID NO: 84850):SNIT (SEQ ID NO: 84118):LGEMS (SEQ ID NO: 84228):DMVVESXGXR (SEQ ID NO: 84511), HVPKPXXAPTKL (SEQ ID NO: 84734):SNIT (SEQ ID NO: 84118):LGEMS (SEQ ID NO: 84228):NMVVRSXGXH (SEQ ID NO: 84629), RVPSTXXAPVKT (SEQ ID NO: 84815):SNIT (SEQ ID NO: 84118):LGEMS (SEQ ID NO: 84228):MIVEEXGXL (SEQ ID NO: 84448), ASAAPXXVPQAL (SEQ ID NO: 84689):SNIT (SEQ ID NO: 84118):LGEMS (SEQ ID NO: 84228):MIVRSXKXS (SEQ ID NO: 84453), ASASPSSVSQDL (SEQ ID NO: 85002):SNIT (SEQ ID NO: 84118):LGEMS (SEQ ID NO: 84228):MIVKSXKXS (SEQ ID NO: 84451), ASASPXXVPQDL (SEQ ID NO: 84699):SNIT (SEQ ID NO: 84118):LGEMS (SEQ ID NO: 84228):MVVKSXKXS (SEQ ID NO: 84470), NDEGLEXVPTEE (SEQ ID NO: 84798):SNIT (SEQ ID NO: 84118):LGEMS (SEQ ID NO: 84228):FLQHNKXEXR (SEQ ID NO: 84536), SSVKXQPSRVHH (SEQ ID NO: 84834):SNIT (SEQ ID NO: 84118):LGEMS (SEQ ID NO: 84228):RLEEHLEXAXA (SEQ ID NO: 84646), RNVQXRPTQVQL (SEQ ID NO: 84806):SNIT (SEQ ID NO: 84118):LGEMS (SEQ ID NO: 84228):TLEDHLAXKXE (SEQ ID NO: 84659), RNVQXRPSRVQL (SEQ ID NO: 84804):RSVK (SEQ ID NO: 84115):KEVQV (SEQ ID NO: 84210):TLEEHLAXKXE (SEQ ID NO: 84660), KIPKAXXVPTEL (SEQ ID NO: 84770):RSVK (SEQ ID NO: 84115):KEVQV (SEQ ID NO: 84210):DMVVEGXGXR (SEQ ID NO: 84510), GIPEPXXVPEKM (SEQ ID NO: 84718):RSVK (SEQ ID NO: 84115):KEVQV (SEQ ID NO: 84210):NMTVESXAXR (SEQ ID NO: 84604), SIPKAXXVPTEL (SEQ ID NO: 84830):RSVK (SEQ ID NO: 84115):KEVQV (SEQ ID NO: 84210):EMVVEGXGXR (SEQ ID NO: 84529), HVTKPTXAPTKL (SEQ ID NO: 84742):RSVK (SEQ ID NO: 84115):KEVQV (SEQ ID NO: 84210):NMVVRSXGXH (SEQ ID NO: 84629), YVPKPXXAPTKL (SEQ ID NO: 84864):RSVK (SEQ ID NO: 84115):KEVQV (SEQ ID NO: 84210):NMVVRSXGXH (SEQ ID NO: 84629), TVPKPXXAPTQL (SEQ ID NO: 84854):RSVK (SEQ ID NO: 84115):KEVQV (SEQ ID NO: 84210):NMVVRAXGXH (SEQ ID NO: 84627), AVPKAXXAPTKL (SEQ ID NO: 84704):RSVK (SEQ ID NO: 84115):KEVQV (SEQ ID NO: 84210):NMVVKAXGXH (SEQ ID NO: 84624), KVGKAXXVPTKL (SEQ ID NO: 84780):RSVK (SEQ ID NO: 84115):KEVQV (SEQ ID NO: 84210):EGMSVAEXGXR (SEQ ID NO: 84636), KASKAXXVPTKL (SEQ ID NO: 84760):RSVK (SEQ ID NO: 84115):KEVQV (SEQ ID NO: 84210):GMAVSEXGXR (SEQ ID NO: 84546), GSAGPXXTPTKM (SEQ ID NO: 84726):RSVK (SEQ ID NO: 84115):KEVQV (SEQ ID NO: 84210):GMVVDRXGXS (SEQ ID NO: 84567), AAPASXXVPARL (SEQ ID NO: 84677):RSVK (SEQ ID NO: 84115):KEVQV (SEQ ID NO: 84210):DMVVEAXGXR (SEQ ID NO: 84509), STPPTXXVPTRL (SEQ ID NO: 84850):RSVK (SEQ ID NO: 84115):KEVQV (SEQ ID NO: 84210):DMVVESXGXR (SEQ ID NO: 84511), HVPKPXXAPTKL (SEQ ID NO: 84734):RSVK (SEQ ID NO: 84115):KEVQV (SEQ ID NO: 84210):NMVVRSXGXH (SEQ ID NO: 84629), RVPSTXXAPVKT (SEQ ID NO: 84815):RSVK (SEQ ID NO: 84115):KEVQV (SEQ ID NO: 84210):MIVEEXGXL (SEQ ID NO: 84448), ASAAPXXVPQAL (SEQ ID NO: 84689):RSVK (SEQ ID NO: 84115):KEVQV (SEQ ID NO: 84210):MIVRSXKXS (SEQ ID NO: 84453), ASASPSSVSQDL (SEQ ID NO: 85002):RSVK (SEQ ID NO: 84115):KEVQV (SEQ ID NO: 84210):MIVKSXKXS (SEQ ID NO: 84451), ASASPXXVPQDL (SEQ ID NO: 84699):RSVK (SEQ ID NO: 84115):KEVQV (SEQ ID NO: 84210):MVVKSXKXS (SEQ ID NO: 84470), NDEGLEXVPTEE (SEQ ID NO: 84798):RSVK (SEQ ID NO: 84115):KEVQV (SEQ ID NO: 84210):FLQHNKXEXR (SEQ ID NO: 84536), NDEGLEXVPTGQ (SEQ ID NO: 84799):RSVK (SEQ ID NO: 84115):KEVQV (SEQ ID NO: 84210):LEEHSQXEXR (SEQ ID NO: 84577), RNVQXRPTQVQL (SEQ ID NO: 84806):RSVK (SEQ ID NO: 84115):KEVQV (SEQ ID NO: 84210):TLEDHLAXKXE (SEQ ID NO: 84659), SSVKXQPTQVHH (SEQ ID NO: 84836):RPVQ (SEQ ID NO: 84114):KKATV (SEQ ID NO: 84212):RLEDHLEXAXA (SEQ ID NO: 84645), KIPKAXXVPTEL (SEQ ID NO: 84770):RPVQ (SEQ ID NO: 84114):KKATV (SEQ ID NO: 84212):DMVVEGXGXR (SEQ ID NO: 84510), GIPEPXXVPEKM (SEQ ID NO: 84718):RPVQ (SEQ ID NO: 84114):KKATV (SEQ ID NO: 84212):NMTVESXAXR (SEQ ID NO: 84604), SIPKAXXVPTEL (SEQ ID NO: 84830):RPVQ (SEQ ID NO: 84114):KKATV (SEQ ID NO: 84212):EMVVEGXGXR (SEQ ID NO: 84529), HVTKPTXAPTKL (SEQ ID NO: 84742):RPVQ (SEQ ID NO: 84114):KKATV (SEQ ID NO: 84212):NMVVRSXGXH (SEQ ID NO: 84629), YVPKPXXAPTKL (SEQ ID NO: 84864):RPVQ (SEQ ID NO: 84114):KKATV (SEQ ID NO: 84212):NMVVRSXGXH (SEQ ID NO: 84629), TVPKPXXAPTQL (SEQ ID NO: 84854):RPVQ (SEQ ID NO: 84114):KKATV (SEQ ID NO: 84212):NMVVRAXGXH (SEQ ID NO: 84627), AVPKAXXAPTKL (SEQ ID NO: 84704):RPVQ (SEQ ID NO: 84114):KKATV (SEQ ID NO: 84212):NMVVKAXGXH (SEQ ID NO: 84624), KVGKAXXVPTKL (SEQ ID NO: 84780):RPVQ (SEQ ID NO: 84114):KKATV (SEQ ID NO: 84212):EGMSVAEXGXR (SEQ ID NO: 84636), KASKAXXVPTKL (SEQ ID NO: 84760):RPVQ (SEQ ID NO: 84114):KKATV (SEQ ID NO: 84212):GMAVSEXGXR (SEQ ID NO: 84546), GSAGPXXTPTKM (SEQ ID NO: 84726):RPVQ (SEQ ID NO: 84114):KKATV (SEQ ID NO: 84212):GMVVDRXGXS (SEQ ID NO: 84567), AAPASXXVPARL (SEQ ID NO: 84677):RPVQ (SEQ ID NO: 84114):KKATV (SEQ ID NO: 84212):DMVVEAXGXR (SEQ ID NO: 84509), STPPTXXVPTRL (SEQ ID NO: 84850):RPVQ (SEQ ID NO: 84114):KKATV (SEQ ID NO: 84212):DMVVESXGXR (SEQ ID NO: 84511), HVPKPXXAPTKL (SEQ ID NO: 84734):RPVQ (SEQ ID NO: 84114):KKATV (SEQ ID NO: 84212):NMVVRSXGXH (SEQ ID NO: 84629), RVPSTXXAPVKT (SEQ ID NO: 84815):RPVQ (SEQ ID NO: 84114):KKATV (SEQ ID NO: 84212):MIVEEXGXL (SEQ ID NO: 84448), ASAAPXXVPQAL (SEQ ID NO: 84689):RPVQ (SEQ ID NO: 84114):KKATV (SEQ ID NO: 84212):MIVRSXKXS (SEQ ID NO: 84453), ASASPSSVSQDL (SEQ ID NO: 85002):RPVQ (SEQ ID NO: 84114):KKATV (SEQ ID NO: 84212):MIVKSXKXS (SEQ ID NO: 84451), ASASPXXVPQDL (SEQ ID NO: 84699):RPVQ (SEQ ID NO: 84114):KKATV (SEQ ID NO: 84212):MVVKSXKXS (SEQ ID NO: 84470), NDEGLEXVPTEE (SEQ ID NO: 84798):RPVQ (SEQ ID NO: 84114):KKATV (SEQ ID NO: 84212):FLQHNKXEXR (SEQ ID NO: 84536), NDEGLEXVPTGQ (SEQ ID NO: 84799):RPVQ (SEQ ID NO: 84114):KKATV (SEQ ID NO: 84212):LEEHSQXEXR (SEQ ID NO: 84577) and SSVKXQPSRVHH (SEQ ID NO: 84834):RPVQ (SEQ ID NO: 84114):KKATV (SEQ ID NO: 84212):RLEEHLEXAXA (SEQ ID NO: 84646).

[0400] In particular, in certain embodiments, the quadruplet PEP9:PEP12:PEP2:PEP10 is selected from the group consisting of GIPEPXXVPTKM (SEQ ID NO: 84720):SAIS-AA¹⁷-LYL (SEQ ID NO: 84881):LKNYQ (SEQ ID NO: 84230):NMVVESXAXR (SEQ ID NO: 84622), SIPKAXXVPTEL (SEQ ID NO: 84830):SAIS-AA¹⁷-LYL (SEQ ID NO: 84881):LKNYQ (SEQ ID NO: 84230):EMVVEGXGXR (SEQ ID NO: 84529), HVTKPTXVPTKL (SEQ ID NO: 84750):SAIS-AA¹⁷-LYL (SEQ ID NO: 84881):LKNYQ (SEQ ID NO: 84230):NMVVESXGXH (SEQ ID NO: 84623), YVPKPXXVPTKL (SEQ ID NO: 84870):SAIS-AA¹⁷-LYL (SEQ ID NO: 84881):LKNYQ (SEQ ID NO: 84230):NMVVESXGXH (SEQ ID NO: 84623), TVPKPXXVPTQL (SEQ ID NO: 84860):SAIS-AA¹⁷-LYL (SEQ ID NO: 84881):LKNYQ (SEQ ID NO: 84230):NMVVEAXGXH (SEQ ID NO: 84621), AVPKAXXVPTKL (SEQ ID NO: 84710):SAIS-AA¹⁷-LYL (SEQ ID NO: 84881):LKNYQ (SEQ ID NO: 84230):NMVVEAXGXH (SEQ ID NO: 84621), KVGKAXXVPTKL (SEQ ID NO: 84780):SAIS-AA¹⁷-LYL (SEQ ID NO: 84881):LKNYQ (SEQ ID NO: 84230):EGMSVVEXGXR (SEQ ID NO: 84641), KASKAXXVPTKL (SEQ ID NO: 84760):SAIS-AA¹⁷-LYL (SEQ ID NO: 84881):LKNYQ (SEQ ID NO: 84230):GMVVEEXGXR (SEQ ID NO: 84568), GSAGPXXVPTKM (SEQ ID NO: 84730):SAIS-AA¹⁷-LYL (SEQ ID NO: 84881):LKNYQ (SEQ ID NO: 84230):GMVVERXGXS (SEQ ID NO: 84569), AAPASXXVPTRL (SEQ ID NO: 84680):SAIS-AA¹⁷-LYL (SEQ ID NO: 84881):LKNYQ (SEQ ID NO: 84230):DMVVEAXGXR (SEQ ID NO: 84509), STPPTXXVPTRL (SEQ ID NO: 84850):SAIS-AA¹⁷-LYL (SEQ ID NO: 84881):LKNYQ (SEQ ID NO: 84230):DMVVESXGXR (SEQ ID NO: 84511), HVPKPXXVPTKL (SEQ ID NO: 84740):SAIS-AA¹⁷-LYL (SEQ ID NO: 84881):LKNYQ (SEQ ID NO: 84230):NMVVESXGXH (SEQ ID NO: 84623), RVPSTXXVPTKT (SEQ ID NO: 84820):SAIS-AA¹⁷-LYL (SEQ ID NO: 84881):LKNYQ (SEQ ID NO: 84230):MIVVEXGXL (SEQ ID NO: 84456), ASAAPXXVPTAL (SEQ ID NO: 84690):SAIS-AA¹⁷-LYL (SEQ ID NO: 84881):LKNYQ (SEQ ID NO: 84230):MIVVEXKXS (SEQ ID NO: 84457), ASASPXXVPTDL (SEQ ID NO: 84700):SAIS-AA¹⁷-LYL (SEQ ID NO: 84881):LKNYQ (SEQ ID NO: 84230):MIVVEXKXS (SEQ ID NO: 84457), ASASPXXVPTDL (SEQ ID NO: 84700):SAIS-AA¹⁷-LYL (SEQ ID NO: 84881):LKNYQ (SEQ ID NO: 84230):MVVVEXKXS (SEQ ID NO: 84473), NDEGLEXVPTEE (SEQ ID NO: 84798):SAIS-AA¹⁷-LYL (SEQ ID NO: 84881):LKNYQ (SEQ ID NO: 84230):FLVVEKXEXR (SEQ ID NO: 84543), NDEGLEXVPTGQ (SEQ ID NO: 84799):SAIS-AA¹⁷-LYL (SEQ ID NO: 84881):LKNYQ (SEQ ID NO: 84230):LEVVEQXEXR (SEQ ID NO: 84585), SSVKXQPVPTHH (SEQ ID NO: 84840):SAIS-AA¹⁷-LYL (SEQ ID NO: 84881):LKNYQ (SEQ ID NO: 84230):RLVVELEXAXA (SEQ ID NO: 84655), RNVQXRPVPTQL (SEQ ID NO: 84810):SAIS-AA¹⁷-LYL (SEQ ID NO: 84881):LKNYQ (SEQ ID NO: 84230):TLVVELAXKXE (SEQ ID NO: 84669), GIPEPXXVPEKM (SEQ ID NO: 84718):SAIS-AA¹⁷-LYL (SEQ ID NO: 84881):LKNYQ (SEQ ID NO: 84230):NMTVESXAXR (SEQ ID NO: 84604), HVTKPTXAPTKL (SEQ ID NO: 84742):SAIS-AA¹⁷-LYL (SEQ ID NO: 84881):LKNYQ (SEQ ID NO: 84230):NMVVRSXGXH (SEQ ID NO: 84629), YVPKPXXAPTKL (SEQ ID NO: 84864):SAIS-AA¹⁷-LYL (SEQ ID NO: 84881):LKNYQ (SEQ ID NO: 84230):NMVVRSXGXH (SEQ ID NO: 84629), TVPKPXXAPTQL (SEQ ID NO: 84854):SAIS-AA¹⁷-LYL (SEQ ID NO: 84881):LKNYQ (SEQ ID NO: 84230):NMVVRAXGXH (SEQ ID NO: 84627), AVPKAXXAPTKL (SEQ ID NO: 84704):SAIS-AA¹⁷-LYL (SEQ ID NO: 84881):LKNYQ (SEQ ID NO: 84230):NMVVKAXGXH (SEQ ID NO: 84624), KVGKAXXVPTKL (SEQ ID NO: 84780):SAIS-AA¹⁷-LYL (SEQ ID NO: 84881):LKNYQ (SEQ ID NO: 84230):EGMSVAEXGXR (SEQ ID NO: 84636), KASKAXXVPTKL (SEQ ID NO: 84760):SAIS-AA¹⁷-LYL (SEQ ID NO: 84881):LKNYQ (SEQ ID NO: 84230):GMAVSEXGXR (SEQ ID NO: 84546), GSAGPXXTPTKM (SEQ ID NO: 84726):SAIS-AA¹⁷-LYL (SEQ ID NO: 84881):LKNYQ (SEQ ID NO: 84230):GMVVDRXGXS (SEQ ID NO: 84567), AAPASXXVPARL (SEQ ID NO: 84677):SAIS-AA¹⁷-LYL (SEQ ID NO: 84881):LKNYQ (SEQ ID NO: 84230):DMVVEAXGXR (SEQ ID NO: 84509), HVPKPXXAPTKL (SEQ ID NO: 84734):SAIS-AA¹⁷-LYL (SEQ ID NO: 84881):LKNYQ (SEQ ID NO: 84230):NMVVRSXGXH (SEQ ID NO: 84629), RVPSTXXAPVKT (SEQ ID NO: 84815):SAIS-AA¹⁷-LYL (SEQ ID NO: 84881):LKNYQ (SEQ ID NO: 84230):MIVEEXGXL (SEQ ID NO: 84448), ASAAPXXVPQAL (SEQ ID NO: 84689):SAIS-AA¹⁷-LYL (SEQ ID NO: 84881):LKNYQ (SEQ ID NO: 84230):MIVRSXKXS (SEQ ID NO: 84453), ASASPXXVSQDL (SEQ ID NO: 84701):SAIS-AA¹⁷-LYL (SEQ ID NO: 84881):LKNYQ (SEQ ID NO: 84230):MIVKSXKXS (SEQ ID NO: 84451), ASASPXXVPQDL (SEQ ID NO: 84699):SAIS-AA¹⁷-LYL (SEQ ID NO: 84881):LKNYQ (SEQ ID NO: 84230):MVVKSXKXS (SEQ ID NO: 84470), NDEGLEXVPTEE (SEQ ID NO: 84798):SAIS-AA¹⁷-LYL (SEQ ID NO: 84881):LKNYQ (SEQ ID NO: 84230):FLQHNKXEXR (SEQ ID NO: 84536), NDEGLEXVPTGQ (SEQ ID NO: 84799):SAIS-AA¹⁷-LYL (SEQ ID NO: 84881):LKNYQ (SEQ ID NO: 84230):LEEHSQXEXR (SEQ ID NO: 84577), SSVKXQPSRVHH (SEQ ID NO: 84834):SAIS-AA¹⁷-LYL (SEQ ID NO: 84881):LKNYQ (SEQ ID NO: 84230):RLEEHLEXAXA (SEQ ID NO: 84646), RNVQXRPTQVQL (SEQ ID NO: 84806):SAIS-AA¹⁷-LYL (SEQ ID NO: 84881):LKNYQ (SEQ ID NO: 84230):TLEDHLAXKXE (SEQ ID NO: 84659), KIPKAXXVPEEL (SEQ ID NO: 84768):SSLS-AA¹⁷-LFF (SEQ ID NO: 84889):LKVYP (SEQ ID NO: 84231):DMTVEGXGXR (SEQ ID NO: 84492), SIPKAXXVPEEL (SEQ ID NO: 84828):SSLS-AA¹⁷-LFF (SEQ ID NO: 84889):LKVYP (SEQ ID NO: 84231):EMTVEGXGXR (SEQ ID NO: 84523), HVTKPTXVPEKL (SEQ ID NO: 84748):SSLS-AA¹⁷-LFF (SEQ ID NO: 84889):LKVYP (SEQ ID NO: 84231):NMTVESXGXH (SEQ ID NO: 84605), YVPKPXXVPEKL (SEQ ID NO: 84868):SSLS-AA¹⁷-LFF (SEQ ID NO: 84889):LKVYP (SEQ ID NO: 84231):NMTVESXGXH (SEQ ID NO: 84605), TVPKPXXVPEQL (SEQ ID NO: 84858):SSLS-AA¹⁷-LFF (SEQ ID NO: 84889):LKVYP (SEQ ID NO: 84231):NMTVEAXGXH (SEQ ID NO: 84603), AVPKAXXVPEKL (SEQ ID NO: 84708):SSLS-AA¹⁷-LFF (SEQ ID NO: 84889):LKVYP (SEQ ID NO: 84231):NMTVEAXGXH (SEQ ID NO: 84603), KVGKAXXVPEKL (SEQ ID NO: 84778):SSLS-AA¹⁷-LFF (SEQ ID NO: 84889):LKVYP (SEQ ID NO: 84231):EGMSTVEXGXR (SEQ ID NO: 84635), KASKAXXVPEKL (SEQ ID NO: 84758):SSLS-AA¹⁷-LFF (SEQ ID NO: 84889):LKVYP (SEQ ID NO: 84231):GMTVEEXGXR (SEQ ID NO: 84556), GSAGPXXVPEKM (SEQ ID NO: 84728):SSLS-AA¹⁷-LFF (SEQ ID NO: 84889):LKVYP (SEQ ID NO: 84231):GMTVERXGXS (SEQ ID NO: 84557), AAPASXXVPERL (SEQ ID NO: 84678):SSLS-AA¹⁷-LFF (SEQ ID NO: 84889):LKVYP (SEQ ID NO: 84231):DMTVEAXGXR (SEQ ID NO: 84491), STPPTXXVPERL (SEQ ID NO: 84848):SSLS-AA¹⁷-LFF (SEQ ID NO: 84889):LKVYP (SEQ ID NO: 84231):DMTVESXGXR (SEQ ID NO: 84493), HVPKPXXVPEKL (SEQ ID NO: 84738):SSLS-AA¹⁷-LFF (SEQ ID NO: 84889):LKVYP (SEQ ID NO: 84231):NMTVESXGXH (SEQ ID NO: 84605), RVPSTXXVPEKT (SEQ ID NO: 84818):SSLS-AA¹⁷-LFF (SEQ ID NO: 84889):LKVYP (SEQ ID NO: 84231):MITVEXGXL (SEQ ID NO: 84444), ASAAPXXVPEAL (SEQ ID NO: 84688):SSLS-AA¹⁷-LFF (SEQ ID NO: 84889):LKVYP (SEQ ID NO: 84231):MITVEXKXS (SEQ ID NO: 84445), ASASPXXVPEDL (SEQ ID NO: 84698):SSLS-AA¹⁷-LFF (SEQ ID NO: 84889):LKVYP (SEQ ID NO: 84231):MITVEXKXS (SEQ ID NO: 84445), ASASPXXVPEDL (SEQ ID NO: 84698):SSLS-AA¹⁷-LFF (SEQ ID NO: 84889):LKVYP (SEQ ID NO: 84231):MVTVEXKXS (SEQ ID NO: 84467), NDEGLEXVPEEE (SEQ ID NO: 84794):SSLS-AA¹⁷-LFF (SEQ ID NO: 84889):LKVYP (SEQ ID NO: 84231):FLTVEKXEXR (SEQ ID NO: 84537), NDEGLEXVPEGQ (SEQ ID NO: 84795):SSLS-AA¹⁷-LFF (SEQ ID NO: 84889):LKVYP (SEQ ID NO: 84231):LETVEQXEXR (SEQ ID NO: 84579), SSVKXQPVPEHH (SEQ ID NO: 84838):SSLS-AA¹⁷-LFF (SEQ ID NO: 84889):LKVYP (SEQ ID NO: 84231):RLTVELEXAXA (SEQ ID NO: 84649), RNVQXRPVPEQL (SEQ ID NO: 84808):SSLS-AA¹⁷-LFF (SEQ ID NO: 84889):LKVYP (SEQ ID NO: 84231):TLTVELAXKXE (SEQ ID NO: 84663), KIPKAXXVPTEL (SEQ ID NO: 84770):SSLS-AA¹⁷-LFF (SEQ ID NO: 84889):LKVYP (SEQ ID NO: 84231):DMVVEGXGXR (SEQ ID NO: 84510), SIPKAXXVPTEL (SEQ ID NO: 84830):SSLS-AA¹⁷-LFF (SEQ ID NO: 84889):LKVYP (SEQ ID NO: 84231):EMVVEGXGXR (SEQ ID NO: 84529), HVTKPTXAPTKL (SEQ ID NO: 84742):SSLS-AA¹⁷-LFF (SEQ ID NO: 84889):LKVYP (SEQ ID NO: 84231):NMVVRSXGXH (SEQ ID NO: 84629), YVPKPXXAPTKL (SEQ ID NO: 84864):SSLS-AA¹⁷-LFF (SEQ ID NO: 84889):LKVYP (SEQ ID NO: 84231):NMVVRSXGXH (SEQ ID NO: 84629), TVPKPXXAPTQL (SEQ ID NO: 84854):SSLS-AA¹⁷-LFF (SEQ ID NO: 84889):LKVYP (SEQ ID NO: 84231):NMVVRAXGXH (SEQ ID NO: 84627), AVPKAXXAPTKL (SEQ ID NO: 84704):SSLS-AA¹⁷-LFF (SEQ ID NO: 84889):LKVYP (SEQ ID NO: 84231):NMVVKAXGXH (SEQ ID NO: 84624), KVGKAXXVPTKL (SEQ ID NO: 84780):SSLS-AA¹⁷-LFF (SEQ ID NO: 84889):LKVYP (SEQ ID NO: 84231):EGMSVAEXGXR (SEQ ID NO: 84636), KASKAXXVPTKL (SEQ ID NO: 84760):SSLS-AA¹⁷-LFF (SEQ ID NO: 84889):LKVYP (SEQ ID NO: 84231):GMAVSEXGXR (SEQ ID NO: 84546), GSAGPXXTPTKM (SEQ ID NO: 84726):SSLS-AA¹⁷-LFF (SEQ ID NO: 84889):LKVYP (SEQ ID NO: 84231):GMVVDRXGXS (SEQ ID NO: 84567), AAPASXXVPARL (SEQ ID NO: 84677):SSLS-AA¹⁷-LFF (SEQ ID NO: 84889):LKVYP (SEQ ID NO: 84231):DMVVEAXGXR (SEQ ID NO: 84509), STPPTXXVPTRL (SEQ ID NO: 84850):SSLS-AA¹⁷-LFF (SEQ ID NO: 84889):LKVYP (SEQ ID NO: 84231):DMVVESXGXR (SEQ ID NO: 84511), HVPKPXXAPTKL (SEQ ID NO: 84734):SSLS-AA¹⁷-LFF (SEQ ID NO: 84889):LKVYP (SEQ ID NO: 84231):NMVVRSXGXH (SEQ ID NO: 84629), RVPSTXXAPVKT (SEQ ID NO: 84815):SSLS-AA¹⁷-LFF (SEQ ID NO: 84889):LKVYP (SEQ ID NO: 84231):MIVEEXGXL (SEQ ID NO: 84448), ASAAPXXVPQAL (SEQ ID NO: 84689):SSLS-AA¹⁷-LFF (SEQ ID NO: 84889):LKVYP (SEQ ID NO: 84231):MIVRSXKXS (SEQ ID NO: 84453), ASASPXXVSQDL (SEQ ID NO: 84701):SSLS-AA¹⁷-LFF (SEQ ID NO: 84889):LKVYP (SEQ ID NO: 84231):MIVKSXKXS (SEQ ID NO: 84451), ASASPXXVPQDL (SEQ ID NO: 84699):SSLS-AA¹⁷-LFF (SEQ ID NO: 84889):LKVYP (SEQ ID NO: 84231):MVVKSXKXS (SEQ ID NO: 84470), NDEGLEXVPTEE (SEQ ID NO: 84798):SSLS-AA¹⁷-LFF (SEQ ID NO: 84889):LKVYP (SEQ ID NO: 84231):FLQHNKXEXR (SEQ ID NO: 84536), NDEGLEXVPTGQ (SEQ ID NO: 84799):SSLS-AA¹⁷-LFF (SEQ ID NO: 84889):LKVYP (SEQ ID NO: 84231):LEEHSQXEXR (SEQ ID NO: 84577), SSVKXQPSRVHH (SEQ ID NO: 84834):SSLS-AA¹⁷-LFF (SEQ ID NO: 84889):LKVYP (SEQ ID NO: 84231):RLEEHLEXAXA (SEQ ID NO: 84646), RNVQXRPTQVQL (SEQ ID NO: 84806):SSLS-AA¹⁷-LFF (SEQ ID NO: 84889):LKVYP (SEQ ID NO: 84231):TLEDHLAXKXE (SEQ ID NO: 84659), KIPKAXXVPTEL (SEQ ID NO: 84770):SAIS-AA¹⁷-LYL (SEQ ID NO: 84881):LKNYQ (SEQ ID NO: 84230):DMVVEGXGXR (SEQ ID NO: 84510), KIPKAXXAPTEL (SEQ ID NO: 84764):NAIS-AA¹⁷-LYF (SEQ ID NO: 84878):LKKYR (SEQ ID NO: 84229):DMVVRGXGXR (SEQ ID NO: 84516), GIPEPXXAPTKM (SEQ ID NO: 84714):NAIS-AA¹⁷-LYF (SEQ ID NO: 84878):LKKYR (SEQ ID NO: 84229):NMVVRSXAXR (SEQ ID NO: 84628), SIPKAXXAPTEL (SEQ ID NO: 84824):NAIS-AA¹⁷-LYF (SEQ ID NO: 84878):LKKYR (SEQ ID NO: 84229):EMVVRGXGXR (SEQ ID NO: 84531), YVPKPXXAPTKL (SEQ ID NO: 84864):NAIS-AA¹⁷-LYF (SEQ ID NO: 84878):LKKYR (SEQ ID NO: 84229):NMVVRSXGXH (SEQ ID NO: 84629), TVPKPXXAPTQL (SEQ ID NO: 84854):NAIS-AA¹⁷-LYF (SEQ ID NO: 84878):LKKYR (SEQ ID NO: 84229):NMVVRAXGXH (SEQ ID NO: 84627), AVPKAXXAPTKL (SEQ ID NO: 84704):NAIS-AA¹⁷-LYF (SEQ ID NO: 84878):LKKYR (SEQ ID NO: 84229):NMVVRAXGXH (SEQ ID NO: 84627), KVGKAXXAPTKL (SEQ ID NO: 84774):NAIS-AA¹⁷-LYF (SEQ ID NO: 84878):LKKYR (SEQ ID NO: 84229):EGMSVVRXGXR (SEQ ID NO: 84643), KASKAXXAPTKL (SEQ ID NO: 84754):NAIS-AA¹⁷-LYF (SEQ ID NO: 84878):LKKYR (SEQ ID NO: 84229):GMVVREXGXR (SEQ ID NO: 84572), GSAGPXXAPTKM (SEQ ID NO: 84724):NAIS-AA¹⁷-LYF (SEQ ID NO: 84878):LKKYR (SEQ ID NO: 84229):GMVVRRXGXS (SEQ ID NO: 84573), AAPASXXAPTRL (SEQ ID NO: 84674):NAIS-AA¹⁷-LYF (SEQ ID NO: 84878):LKKYR (SEQ ID NO: 84229):DMVVRAXGXR (SEQ ID NO: 84515), STPPTXXAPTRL (SEQ ID NO: 84844):NAIS-AA¹⁷-LYF (SEQ ID NO: 84878):LKKYR (SEQ ID NO: 84229):DMVVRSXGXR (SEQ ID NO: 84517), HVPKPXXAPTKL (SEQ ID NO: 84734):NAIS-AA¹⁷-LYF (SEQ ID NO: 84878):LKKYR (SEQ ID NO: 84229):NMVVRSXGXH (SEQ ID NO: 84629), RVPSTXXAPTKT (SEQ ID NO: 84814):NAIS-AA¹⁷-LYF (SEQ ID NO: 84878):LKKYR (SEQ ID NO: 84229):MIVVRXGXL (SEQ ID NO: 84460), ASAAPXXAPTAL (SEQ ID NO: 84684):NAIS-AA¹⁷-LYF (SEQ ID NO: 84878):LKKYR (SEQ ID NO: 84229):MIVVRXKXS (SEQ ID NO: 84461), ASASPXXAPTDL (SEQ ID NO: 84694):NAIS-AA¹⁷-LYF (SEQ ID NO: 84878):LKKYR (SEQ ID NO: 84229):MIVVRXKXS (SEQ ID NO: 84461), ASASPXXAPTDL (SEQ ID NO: 84694):NAIS-AA¹⁷-LYF (SEQ ID NO: 84878):LKKYR (SEQ ID NO: 84229):MVVVRXKXS (SEQ ID NO: 84475), NDEGLESAPTEE (SEQ ID NO: 84782):NAIS-AA¹⁷-LYF (SEQ ID NO: 84878):LKKYR (SEQ ID NO: 84229):FLVVRKXEXR (SEQ ID NO: 84545), NDEGLESAPTGQ (SEQ ID NO: 84783):NAIS-AA¹⁷-LYF (SEQ ID NO: 84878):LKKYR (SEQ ID NO: 84229):LEVVRQXEXR (SEQ ID NO: 84587), SSVKXQPAPTHH (SEQ ID NO: 84832):NAIS-AA¹⁷-LYF (SEQ ID NO: 84878):LKKYR (SEQ ID NO: 84229):RLVVRLEXAXA (SEQ ID NO: 84657), RNVQXRPAPTQL (SEQ ID NO: 84802):NAIS-AA¹⁷-LYF (SEQ ID NO: 84878):LKKYR (SEQ ID NO: 84229):TLVVRLAXKXE (SEQ ID NO: 84671), KIPKAXXVPTEL (SEQ ID NO: 84770):NAIS-AA¹⁷-LYF (SEQ ID NO: 84878):LKKYR (SEQ ID NO: 84229):DMVVEGXGXR (SEQ ID NO: 84510), GIPEPXXVPEKM (SEQ ID NO: 84718):NAIS-AA¹⁷-LYF (SEQ ID NO: 84878):LKKYR (SEQ ID NO: 84229):NMTVESXAXR (SEQ ID NO: 84604), SIPKAXXVPTEL (SEQ ID NO: 84830):NAIS-AA¹⁷-LYF (SEQ ID NO: 84878):LKKYR (SEQ ID NO: 84229):EMVVEGXGXR (SEQ ID NO: 84529), AVPKAXXAPTKL (SEQ ID NO: 84704):NAIS-AA¹⁷-LYF (SEQ ID NO: 84878):LKKYR (SEQ ID NO: 84229):NMVVKAXGXH (SEQ ID NO: 84624), KVGKAXXVPTKL (SEQ ID NO: 84780):NAIS-AA¹⁷-LYF (SEQ ID NO: 84878):LKKYR (SEQ ID NO: 84229):EGMSVAEXGXR (SEQ ID NO: 84636), KASKAXXVPTKL (SEQ ID NO: 84760):NAIS-AA¹⁷-LYF (SEQ ID NO: 84878):LKKYR (SEQ ID NO: 84229):GMAVSEXGXR (SEQ ID NO: 84546), GSAGPXXTPTKM (SEQ ID NO: 84726):NAIS-AA¹⁷-LYF (SEQ ID NO: 84878):LKKYR (SEQ ID NO: 84229):GMVVDRXGXS (SEQ ID NO: 84567), AAPASXXVPARL (SEQ ID NO: 84677):NAIS-AA¹⁷-LYF (SEQ ID NO: 84878):LKKYR (SEQ ID NO: 84229):DMVVEAXGXR (SEQ ID NO: 84509), STPPTXXVPTRL (SEQ ID NO: 84850):NAIS-AA¹⁷-LYF (SEQ ID NO: 84878):LKKYR (SEQ ID NO: 84229):DMVVESXGXR (SEQ ID NO: 84511), RVPSTXXAPVKT (SEQ ID NO: 84815):NAIS-AA¹⁷-LYF (SEQ ID NO: 84878):LKKYR (SEQ ID NO: 84229):MIVEEXGXL (SEQ ID NO: 84448), ASAAPXXVPQAL (SEQ ID NO: 84689):NAIS-AA¹⁷-LYF (SEQ ID NO: 84878):LKKYR (SEQ ID NO: 84229):MIVRSXKXS (SEQ ID NO: 84453), ASASPXXVSQDL (SEQ ID NO: 84701):NAIS-AA¹⁷-LYF (SEQ ID NO: 84878):LKKYR (SEQ ID NO: 84229):MIVKSXKXS (SEQ ID NO: 84451), ASASPXXVPQDL (SEQ ID NO: 84699):NAIS-AA¹⁷-LYF (SEQ ID NO: 84878):LKKYR (SEQ ID NO: 84229):MVVKSXKXS (SEQ ID NO: 84470), NDEGLEXVPTEE (SEQ ID NO: 84798):NAIS-AA¹⁷-LYF (SEQ ID NO: 84878):LKKYR (SEQ ID NO: 84229):FLQHNKXEXR (SEQ ID NO: 84536), NDEGLEXVPTGQ (SEQ ID NO: 84799):NAIS-AA¹⁷-LYF (SEQ ID NO: 84878):LKKYR (SEQ ID NO: 84229):LEEHSQXEXR (SEQ ID NO: 84577), SSVKXQPSRVHH (SEQ ID NO: 84834):NAIS-AA¹⁷-LYF (SEQ ID NO: 84878):LKKYR (SEQ ID NO: 84229):RLEEHLEXAXA (SEQ ID NO: 84646), RNVQXRPTQVQL (SEQ ID NO: 84806):NAIS-AA¹⁷-LYF (SEQ ID NO: 84878):LKKYR (SEQ ID NO: 84229):TLEDHLAXKXE (SEQ ID NO: 84659), HVTKPTXAPTKL (SEQ ID NO: 84742):NAIS-AA¹⁷-LYF (SEQ ID NO: 84878):LKKYR (SEQ ID NO: 84229):NMVVRSXGXH (SEQ ID NO: 84629), KIPKAXXAPTEL (SEQ ID NO: 84764):SATS-AA¹⁷-LYY (SEQ ID NO: 84882):LRKHR (SEQ ID NO: 84233):DMVVKGXGXR (SEQ ID NO: 84513), GIPEPXXAPTKM (SEQ ID NO: 84714):SATS-AA¹⁷-LYY (SEQ ID NO: 84882):LRKHR (SEQ ID NO: 84233):NMVVKSXAXR (SEQ ID NO: 84625), SIPKAXXAPTEL (SEQ ID NO: 84824):SATS-AA¹⁷-LYY (SEQ ID NO: 84882):LRKHR (SEQ ID NO: 84233):EMVVKGXGXR (SEQ ID NO: 84530), HVTKPTXAPTKL (SEQ ID NO: 84742):SATS-AA¹⁷-LYY (SEQ ID NO: 84882):LRKHR (SEQ ID NO: 84233):NMVVKSXGXH (SEQ ID NO: 84626), YVPKPXXAPTKL (SEQ ID NO: 84864):SATS-AA¹⁷-LYY (SEQ ID NO: 84882):LRKHR (SEQ ID NO: 84233):NMVVKSXGXH (SEQ ID NO: 84626), TVPKPXXAPTQL (SEQ ID NO: 84854):SATS-AA¹⁷-LYY (SEQ ID NO: 84882):LRKHR (SEQ ID NO: 84233):NMVVKAXGXH (SEQ ID NO: 84624), KVGKAXXAPTKL (SEQ ID NO: 84774):SATS-AA¹⁷-LYY (SEQ ID NO: 84882):LRKHR (SEQ ID NO: 84233):EGMSVVKXGXR (SEQ ID NO: 84642), KASKAXXAPTKL (SEQ ID NO: 84754):SATS-AA¹⁷-LYY (SEQ ID NO: 84882):LRKHR (SEQ ID NO: 84233):GMVVKEXGXR (SEQ ID NO: 84570), GSAGPXXAPTKM (SEQ ID NO: 84724):SATS-AA¹⁷-LYY (SEQ ID NO: 84882):LRKHR (SEQ ID NO: 84233):GMVVKRXGXS (SEQ ID NO: 84571), AAPASXXAPTRL (SEQ ID NO: 84674):SATS-AA¹⁷-LYY (SEQ ID NO: 84882):LRKHR (SEQ ID NO: 84233):DMVVKAXGXR (SEQ ID NO: 84512), STPPTXXAPTRL (SEQ ID NO: 84844):SATS-AA¹⁷-LYY (SEQ ID NO: 84882):LRKHR (SEQ ID NO: 84233):DMVVKSXGXR (SEQ ID NO: 84514), HVPKPXXAPTKL (SEQ ID NO: 84734):SATS-AA¹⁷-LYY (SEQ ID NO: 84882):LRKHR (SEQ ID NO: 84233):NMVVKSXGXH (SEQ ID NO: 84626), RVPSTXXAPTKT (SEQ ID NO: 84814):SATS-AA¹⁷-LYY (SEQ ID NO: 84882):LRKHR (SEQ ID NO: 84233):MIVVKXGXL (SEQ ID NO: 84458), ASAAPXXAPTAL (SEQ ID NO: 84684):SATS-AA¹⁷-LYY (SEQ ID NO: 84882):LRKHR (SEQ ID NO: 84233):MIVVKXKXS (SEQ ID NO: 84459), ASASPXXAPTDL (SEQ ID NO: 84694):SATS-AA¹⁷-LYY (SEQ ID NO: 84882):LRKHR (SEQ ID NO: 84233):MIVVKXKXS (SEQ ID NO: 84459), ASASPXXAPTDL (SEQ ID NO: 84694):SATS-AA¹⁷-LYY (SEQ ID NO: 84882):LRKHR (SEQ ID NO: 84233):MVVVKXKXS (SEQ ID NO: 84474), NDEGLESAPTEE (SEQ ID NO: 84782):SATS-AA¹⁷-LYY (SEQ ID NO: 84882):LRKHR (SEQ ID NO: 84233):FLVVKKXEXR (SEQ ID NO: 84544), NDEGLESAPTGQ (SEQ ID NO: 84783):SATS-AA¹⁷-LYY (SEQ ID NO: 84882):LRKHR (SEQ ID NO: 84233):LEVVKQXEXR (SEQ ID NO: 84586), SSVKXQPAPTHH (SEQ ID NO: 84832):SATS-AA¹⁷-LYY (SEQ ID NO: 84882):LRKHR (SEQ ID NO: 84233):RLVVKLEXAXA (SEQ ID NO: 84656), RNVQXRPAPTQL (SEQ ID NO: 84802):SATS-AA¹⁷-LYY (SEQ ID NO: 84882):LRKHR (SEQ ID NO: 84233):TLVVKLAXKXE (SEQ ID NO: 84670), KIPKAXXVPTEL (SEQ ID NO: 84770):SATS-AA¹⁷-LYY (SEQ ID NO: 84882):LRKHR (SEQ ID NO: 84233):DMVVEGXGXR (SEQ ID NO: 84510), GIPEPXXVPEKM (SEQ ID NO: 84718):SATS-AA¹⁷-LYY (SEQ ID NO: 84882):LRKHR (SEQ ID NO: 84233):NMTVESXAXR (SEQ ID NO: 84604), SIPKAXXVPTEL (SEQ ID NO: 84830):SATS-AA¹⁷-LYY (SEQ ID NO: 84882):LRKHR (SEQ ID NO: 84233):EMVVEGXGXR (SEQ ID NO: 84529), HVTKPTXAPTKL (SEQ ID NO: 84742):SATS-AA¹⁷-LYY (SEQ ID NO: 84882):LRKHR (SEQ ID NO: 84233):NMVVRSXGXH (SEQ ID NO: 84629), YVPKPXXAPTKL (SEQ ID NO: 84864):SATS-AA¹⁷-LYY (SEQ ID NO: 84882):LRKHR (SEQ ID NO: 84233):NMVVRSXGXH (SEQ ID NO: 84629), TVPKPXXAPTQL (SEQ ID NO: 84854):SATS-AA¹⁷-LYY (SEQ ID NO: 84882):LRKHR (SEQ ID NO: 84233):NMVVRAXGXH (SEQ ID NO: 84627), KVGKAXXVPTKL (SEQ ID NO: 84780):SATS-AA¹⁷-LYY (SEQ ID NO: 84882):LRKHR (SEQ ID NO: 84233):EGMSVAEXGXR (SEQ ID NO: 84636), KASKAXXVPTKL (SEQ ID NO: 84760):SATS-AA¹⁷-LYY (SEQ ID NO: 84882):LRKHR (SEQ ID NO: 84233):GMAVSEXGXR (SEQ ID NO: 84546), GSAGPXXTPTKM (SEQ ID NO: 84726):SATS-AA¹⁷-LYY (SEQ ID NO: 84882):LRKHR (SEQ ID NO: 84233):GMVVDRXGXS (SEQ ID NO: 84567), AAPASXXVPARL (SEQ ID NO: 84677):SATS-AA¹⁷-LYY (SEQ ID NO: 84882):LRKHR (SEQ ID NO: 84233):DMVVEAXGXR (SEQ ID NO: 84509), STPPTXXVPTRL (SEQ ID NO: 84850):SATS-AA¹⁷-LYY (SEQ ID NO: 84882):LRKHR (SEQ ID NO: 84233):DMVVESXGXR (SEQ ID NO: 84511), HVPKPXXAPTKL (SEQ ID NO: 84734):SATS-AA¹⁷-LYY (SEQ ID NO: 84882):LRKHR (SEQ ID NO: 84233):NMVVRSXGXH (SEQ ID NO: 84629), RVPSTXXAPVKT (SEQ ID NO: 84815):SATS-AA¹⁷-LYY (SEQ ID NO: 84882):LRKHR (SEQ ID NO: 84233):MIVEEXGXL (SEQ ID NO: 84448), ASAAPXXVPQAL (SEQ ID NO: 84689):SATS-AA¹⁷-LYY (SEQ ID NO: 84882):LRKHR (SEQ ID NO: 84233):MIVRSXKXS (SEQ ID NO: 84453), ASASPXXVSQDL (SEQ ID NO: 84701):SATS-AA¹⁷-LYY (SEQ ID NO: 84882):LRKHR (SEQ ID NO: 84233):MIVKSXKXS (SEQ ID NO: 84451), ASASPXXVPQDL (SEQ ID NO: 84699):SATS-AA¹⁷-LYY (SEQ ID NO: 84882):LRKHR (SEQ ID NO: 84233):MVVKSXKXS (SEQ ID NO: 84470), NDEGLEXVPTEE (SEQ ID NO: 84798):SATS-AA¹⁷-LYY (SEQ ID NO: 84882):LRKHR (SEQ ID NO: 84233):FLQHNKXEXR (SEQ ID NO: 84536), NDEGLEXVPTGQ (SEQ ID NO: 84799):SATS-AA¹⁷-LYY (SEQ ID NO: 84882):LRKHR (SEQ ID NO: 84233):LEEHSQXEXR (SEQ ID NO: 84577), SSVKXQPSRVHH (SEQ ID NO: 84834):SATS-AA¹⁷-LYY (SEQ ID NO: 84882):LRKHR (SEQ ID NO: 84233):RLEEHLEXAXA (SEQ ID NO: 84646), RNVQXRPTQVQL (SEQ ID NO: 84806):SATS-AA¹⁷-LYY (SEQ ID NO: 84882):LRKHR (SEQ ID NO: 84233):TLEDHLAXKXE (SEQ ID NO: 84659), KIPKAXXVPTEL (SEQ ID NO: 84770):SPIS-AA¹⁷-LYK (SEQ ID NO: 84887):LKYHY (SEQ ID NO: 84232):DMVAEGXGXR (SEQ ID NO: 84495), GIPEPXXVPTKM (SEQ ID NO: 84720):SPIS-AA¹⁷-LYK (SEQ ID NO: 84887):LKYHY (SEQ ID NO: 84232):NMVAESXAXR (SEQ ID NO: 84607), SIPKAXXVPTEL (SEQ ID NO: 84830):SPIS-AA¹⁷-LYK (SEQ ID NO: 84887):LKYHY (SEQ ID NO: 84232):EMVAEGXGXR (SEQ ID NO: 84524), HVTKPTXVPTKL (SEQ ID NO: 84750):SPIS-AA¹⁷-LYK (SEQ ID NO: 84887):LKYHY (SEQ ID NO: 84232):NMVAESXGXH (SEQ ID NO: 84608), YVPKPXXVPTKL (SEQ ID NO: 84870):SPIS-AA¹⁷-LYK (SEQ ID NO: 84887):LKYHY (SEQ ID NO: 84232):NMVAESXGXH (SEQ ID NO: 84608), TVPKPXXVPTQL (SEQ ID NO: 84860):SPIS-AA¹⁷-LYK (SEQ ID NO: 84887):LKYHY (SEQ ID NO: 84232):NMVAEAXGXH (SEQ ID NO: 84606), AVPKAXXVPTKL (SEQ ID NO: 84710):SPIS-AA¹⁷-LYK (SEQ ID NO: 84887):LKYHY (SEQ ID NO: 84232):NMVAEAXGXH (SEQ ID NO: 84606), KASKAXXVPTKL (SEQ ID NO: 84760):SPIS-AA¹⁷-LYK (SEQ ID NO: 84887):LKYHY (SEQ ID NO: 84232):GMVAEEXGXR (SEQ ID NO: 84558), GSAGPXXVPTKM (SEQ ID NO: 84730):SPIS-AA¹⁷-LYK (SEQ ID NO: 84887):LKYHY (SEQ ID NO: 84232):GMVAERXGXS (SEQ ID NO: 84559), AAPASXXVPTRL (SEQ ID NO: 84680):SPIS-AA¹⁷-LYK (SEQ ID NO: 84887):LKYHY (SEQ ID NO: 84232):DMVAEAXGXR (SEQ ID NO: 84494), STPPTXXVPTRL (SEQ ID NO: 84850):SPIS-AA¹⁷-LYK (SEQ ID NO: 84887):LKYHY (SEQ ID NO: 84232):DMVAESXGXR (SEQ ID NO: 84496), HVPKPXXVPTKL (SEQ ID NO: 84740):SPIS-AA¹⁷-LYK (SEQ ID NO: 84887):LKYHY (SEQ ID NO: 84232):NMVAESXGXH (SEQ ID NO: 84608), RVPSTXXVPTKT (SEQ ID NO: 84820):SPIS-AA¹⁷-LYK (SEQ ID NO: 84887):LKYHY (SEQ ID NO: 84232):MIVAEXGXL (SEQ ID NO: 84446), ASAAPXXVPTAL (SEQ ID NO: 84690):SPIS-AA¹⁷-LYK (SEQ ID NO: 84887):LKYHY (SEQ ID NO: 84232):MIVAEXKXS (SEQ ID NO: 84447), ASASPXXVPTDL (SEQ ID NO: 84700):SPIS-AA¹⁷-LYK (SEQ ID NO: 84887):LKYHY (SEQ ID NO: 84232):MIVAEXKXS (SEQ ID NO: 84447), ASASPXXVPTDL (SEQ ID NO: 84700):SPIS-AA¹⁷-LYK (SEQ ID NO: 84887):LKYHY (SEQ ID NO: 84232):MVVAEXKXS (SEQ ID NO: 84468), NDEGLEXVPTEE (SEQ ID NO: 84798):SPIS-AA¹⁷-LYK (SEQ ID NO: 84887):LKYHY (SEQ ID NO: 84232):FLVAEKXEXR (SEQ ID NO: 84538), NDEGLEXVPTGQ (SEQ ID NO: 84799):SPIS-AA¹⁷-LYK (SEQ ID NO: 84887):LKYHY (SEQ ID NO: 84232):LEVAEQXEXR (SEQ ID NO: 84580), SSVKXQPVPTHH (SEQ ID NO: 84840):SPIS-AA¹⁷-LYK (SEQ ID NO: 84887):LKYHY (SEQ ID NO: 84232):RLVAELEXAXA (SEQ ID NO: 84650), RNVQXRPVPTQL (SEQ ID NO: 84810):SPIS-AA¹⁷-LYK (SEQ ID NO: 84887):LKYHY (SEQ ID NO: 84232):TLVAELAXKXE (SEQ ID NO: 84664), KIPKAXXVPTEL (SEQ ID NO: 84770):SPIS-AA¹⁷-LYK (SEQ ID NO: 84887):LKYHY (SEQ ID NO: 84232):DMVVEGXGXR (SEQ ID NO: 84510), GIPEPXXVPEKM (SEQ ID NO: 84718):SPIS-AA¹⁷-LYK (SEQ ID NO: 84887):LKYHY (SEQ ID NO: 84232):NMTVESXAXR (SEQ ID NO: 84604), SIPKAXXVPTEL (SEQ ID NO: 84830):SPIS-AA¹⁷-LYK (SEQ ID NO: 84887):LKYHY (SEQ ID NO: 84232):EMVVEGXGXR (SEQ ID NO: 84529), HVTKPTXAPTKL (SEQ ID NO: 84742):SPIS-AA¹⁷-LYK (SEQ ID NO: 84887):LKYHY (SEQ ID NO: 84232):NMVVRSXGXH (SEQ ID NO: 84629), YVPKPXXAPTKL (SEQ ID NO: 84864):SPIS-AA¹⁷-LYK (SEQ ID NO: 84887):LKYHY (SEQ ID NO: 84232):NMVVRSXGXH (SEQ ID NO: 84629), TVPKPXXAPTQL (SEQ ID NO: 84854):SPIS-AA¹⁷-LYK (SEQ ID NO: 84887):LKYHY (SEQ ID NO: 84232):NMVVRAXGXH (SEQ ID NO: 84627), AVPKAXXAPTKL (SEQ ID NO: 84704):SPIS-AA¹⁷-LYK (SEQ ID NO: 84887):LKYHY (SEQ ID NO: 84232):NMVVKAXGXH (SEQ ID NO: 84624), KASKAXXVPTKL (SEQ ID NO: 84760):SPIS-AA¹⁷-LYK (SEQ ID NO: 84887):LKYHY (SEQ ID NO: 84232):GMAVSEXGXR (SEQ ID NO: 84546), GSAGPXXTPTKM (SEQ ID NO: 84726):SPIS-AA¹⁷-LYK (SEQ ID NO: 84887):LKYHY (SEQ ID NO: 84232):GMVVDRXGXS (SEQ ID NO: 84567), AAPASXXVPARL (SEQ ID NO: 84677):SPIS-AA¹⁷-LYK (SEQ ID NO: 84887):LKYHY (SEQ ID NO: 84232):DMVVEAXGXR (SEQ ID NO: 84509), STPPTXXVPTRL (SEQ ID NO: 84850):SPIS-AA¹⁷-LYK (SEQ ID NO: 84887):LKYHY (SEQ ID NO: 84232):DMVVESXGXR (SEQ ID NO: 84511), HVPKPXXAPTKL (SEQ ID NO: 84734):SPIS-AA¹⁷-LYK (SEQ ID NO: 84887):LKYHY (SEQ ID NO: 84232):NMVVRSXGXH (SEQ ID NO: 84629), RVPSTXXAPVKT (SEQ ID NO: 84815):SPIS-AA¹⁷-LYK (SEQ ID NO: 84887):LKYHY (SEQ ID NO: 84232):MIVEEXGXL (SEQ ID NO: 84448), ASAAPXXVPQAL (SEQ ID NO: 84689):SPIS-AA¹⁷-LYK (SEQ ID NO: 84887):LKYHY (SEQ ID NO: 84232):MIVRSXKXS (SEQ ID NO: 84453), ASASPXXVSQDL (SEQ ID NO: 84701):SPIS-AA¹⁷-LYK (SEQ ID NO: 84887):LKYHY (SEQ ID NO: 84232):MIVKSXKXS (SEQ ID NO: 84451), ASASPXXVPQDL (SEQ ID NO: 84699):SPIS-AA¹⁷-LYK (SEQ ID NO: 84887):LKYHY (SEQ ID NO: 84232):MVVKSXKXS (SEQ ID NO: 84470), NDEGLEXVPTEE (SEQ ID NO: 84798):SPIS-AA¹⁷-LYK (SEQ ID NO: 84887):LKYHY (SEQ ID NO: 84232):FLQHNKXEXR (SEQ ID NO: 84536), NDEGLEXVPTGQ (SEQ ID NO: 84799):SPIS-AA¹⁷-LYK (SEQ ID NO: 84887):LKYHY (SEQ ID NO: 84232):LEEHSQXEXR (SEQ ID NO: 84577), SSVKXQPSRVHH (SEQ ID NO: 84834):SPIS-AA¹⁷-LYK (SEQ ID NO: 84887):LKYHY (SEQ ID NO: 84232):RLEEHLEXAXA (SEQ ID NO: 84646), RNVQXRPTQVQL (SEQ ID NO: 84806):SPIS-AA¹⁷-LYK (SEQ ID NO: 84887):LKYHY (SEQ ID NO: 84232):TLEDHLAXKXE (SEQ ID NO: 84659), KIPKAXXVPTEL (SEQ ID NO: 84770):EPIS-AA¹⁷-LYL (SEQ ID NO: 84874):KFKYE (SEQ ID NO: 84211):DMAVXGXGSR (SEQ ID NO: 84478), GIPEPXXVPTKM (SEQ ID NO: 84720):EPIS-AA¹⁷-LYL (SEQ ID NO: 84874):KFKYE (SEQ ID NO: 84211):NMAVSSXAXR (SEQ ID NO: 84589), SIPKAXXVPTEL (SEQ ID NO: 84830):EPIS-AA¹⁷-LYL (SEQ ID NO: 84874):KFKYE (SEQ ID NO: 84211):EMAVXGXGSR (SEQ ID NO: 84518), HVTKPTXVPTKL (SEQ ID NO: 84750):EPIS-AA¹⁷-LYL (SEQ ID NO: 84874):KFKYE (SEQ ID NO: 84211):NMAVSSXGXH (SEQ ID NO: 84590), YVPKPXXVPTKL (SEQ ID NO: 84870):EPIS-AA¹⁷-LYL (SEQ ID NO: 84874):KFKYE (SEQ ID NO: 84211):NMAVSSXGXH (SEQ ID NO: 84590), TVPKPXXVPTQL (SEQ ID NO: 84860):EPIS-AA¹⁷-LYL (SEQ ID NO: 84874):KFKYE (SEQ ID NO: 84211):NMAVSAXGXH (SEQ ID NO: 84588), AVPKAXXVPTKL (SEQ ID NO: 84710):EPIS-AA¹⁷-LYL (SEQ ID NO: 84874):KFKYE (SEQ ID NO: 84211):NMAVSAXGXH (SEQ ID NO: 84588), KVGKAXXVPTKL (SEQ ID NO: 84780):EPIS-AA¹⁷-LYL (SEQ ID NO: 84874):KFKYE (SEQ ID NO: 84211):EGMSAVSXGXR (SEQ ID NO: 84630), GSAGPXXVPTKM (SEQ ID NO: 84730):EPIS-AA¹⁷-LYL (SEQ ID NO: 84874):KFKYE (SEQ ID NO: 84211):GMAVSRXGXS (SEQ ID NO: 84547), AAPASXXVPTRL (SEQ ID NO: 84680):EPIS-AA¹⁷-LYL (SEQ ID NO: 84874):KFKYE (SEQ ID NO: 84211):DMAVSAXGXR (SEQ ID NO: 84476), STPPTXXVPTRL (SEQ ID NO: 84850):EPIS-AA¹⁷-LYL (SEQ ID NO: 84874):KFKYE (SEQ ID NO: 84211):DMAVSSXGXR (SEQ ID NO: 84477), HVPKPXXVPTKL (SEQ ID NO: 84740):EPIS-AA¹⁷-LYL (SEQ ID NO: 84874):KFKYE (SEQ ID NO: 84211):NMAVSSXGXH (SEQ ID NO: 84590), RVPSTXXVPTKT (SEQ ID NO: 84820):EPIS-AA¹⁷-LYL (SEQ ID NO: 84874):KFKYE (SEQ ID NO: 84211):MIAVSXGXL (SEQ ID NO: 84434), ASAAPXXVPTAL (SEQ ID NO: 84690):EPIS-AA¹⁷-LYL (SEQ ID NO: 84874):KFKYE (SEQ ID NO: 84211):MIAVSXKXS (SEQ ID NO: 84435), ASASPXXVPTDL (SEQ ID NO: 84700):EPIS-AA¹⁷-LYL (SEQ ID NO: 84874):KFKYE (SEQ ID NO: 84211):MIAVSXKXS (SEQ ID NO: 84435), ASASPXXVPTDL (SEQ ID NO: 84700):EPIS-AA¹⁷-LYL (SEQ ID NO: 84874):KFKYE (SEQ ID NO: 84211):MVAVSXKXS (SEQ ID NO: 84462), NDEGLEXVPTEE (SEQ ID NO: 84798):EPIS-AA¹⁷-LYL (SEQ ID NO: 84874):KFKYE (SEQ ID NO: 84211):FLAVXKXESR (SEQ ID NO: 84532), NDEGLEXVPTGQ (SEQ ID NO: 84799):EPIS-AA¹⁷-LYL (SEQ ID NO: 84874):KFKYE (SEQ ID NO: 84211):LEAVSQXEXR (SEQ ID NO: 84574), SSVKXQPVPTHH (SEQ ID NO: 84840):EPIS-AA¹⁷-LYL (SEQ ID NO: 84874):KFKYE (SEQ ID NO: 84211):RLAVSLEXAXA (SEQ ID NO: 84644), RNVQXRPVPTQL (SEQ ID NO: 84810):EPIS-AA¹⁷-LYL (SEQ ID NO: 84874):KFKYE (SEQ ID NO: 84211):TLAVSLAXKXE (SEQ ID NO: 84658), KIPKAXXVPTEL (SEQ ID NO: 84770):EPIS-AA¹⁷-LYL (SEQ ID NO: 84874):KFKYE (SEQ ID NO: 84211):DMVVEGXGXR (SEQ ID NO: 84510), GIPEPXXVPEKM (SEQ ID NO: 84718):EPIS-AA¹⁷-LYL (SEQ ID NO: 84874):KFKYE (SEQ ID NO: 84211):NMTVESXAXR (SEQ ID NO: 84604), SIPKAXXVPTEL (SEQ ID NO: 84830):EPIS-AA¹⁷-LYL (SEQ ID NO: 84874):KFKYE (SEQ ID NO: 84211):EMVVEGXGXR (SEQ ID NO: 84529), HVTKPTXAPTKL (SEQ ID NO: 84742):EPIS-AA¹⁷-LYL (SEQ ID NO: 84874):KFKYE (SEQ ID NO: 84211):NMVVRSXGXH (SEQ ID NO: 84629), YVPKPXXAPTKL (SEQ ID NO: 84864):EPIS-AA¹⁷-LYL (SEQ ID NO: 84874):KFKYE (SEQ ID NO: 84211):NMVVRSXGXH (SEQ ID NO: 84629), TVPKPXXAPTQL (SEQ ID NO: 84854):EPIS-AA¹⁷-LYL (SEQ ID NO: 84874):KFKYE (SEQ ID NO: 84211):NMVVRAXGXH (SEQ ID NO: 84627), AVPKAXXAPTKL (SEQ ID NO: 84704):EPIS-AA¹⁷-LYL (SEQ ID NO: 84874):KFKYE (SEQ ID NO: 84211):NMVVKAXGXH (SEQ ID NO: 84624), KVGKAXXVPTKL (SEQ ID NO: 84780):EPIS-AA¹⁷-LYL (SEQ ID NO: 84874):KFKYE (SEQ ID NO: 84211):EGMSVAEXGXR (SEQ ID NO: 84636), GSAGPXXTPTKM (SEQ ID NO: 84726):EPIS-AA¹⁷-LYL (SEQ ID NO: 84874):KFKYE (SEQ ID NO: 84211):GMVVDRXGXS (SEQ ID NO: 84567), AAPASXXVPARL (SEQ ID NO: 84677):EPIS-AA¹⁷-LYL (SEQ ID NO: 84874):KFKYE (SEQ ID NO: 84211):DMVVEAXGXR (SEQ ID NO: 84509), STPPTXXVPTRL (SEQ ID NO: 84850):EPIS-AA¹⁷-LYL (SEQ ID NO: 84874):KFKYE (SEQ ID NO: 84211):DMVVESXGXR (SEQ ID NO: 84511), HVPKPXXAPTKL (SEQ ID NO: 84734):EPIS-AA¹⁷-LYL (SEQ ID NO: 84874):KFKYE (SEQ ID NO: 84211):NMVVRSXGXH (SEQ ID NO: 84629), RVPSTXXAPVKT (SEQ ID NO: 84815):EPIS-AA¹⁷-LYL (SEQ ID NO: 84874):KFKYE (SEQ ID NO: 84211):MIVEEXGXL (SEQ ID NO: 84448), ASAAPXXVPQAL (SEQ ID NO: 84689):EPIS-AA¹⁷-LYL (SEQ ID NO: 84874):KFKYE (SEQ ID NO: 84211):MIVRSXKXS (SEQ ID NO: 84453), ASASPXXVSQDL (SEQ ID NO: 84701):EPIS-AA¹⁷-LYL (SEQ ID NO: 84874):KFKYE (SEQ ID NO: 84211):MIVKSXKXS (SEQ ID NO: 84451), ASASPXXVPQDL (SEQ ID NO: 84699):EPIS-AA¹⁷-LYL (SEQ ID NO: 84874):KFKYE (SEQ ID NO: 84211):MVVKSXKXS (SEQ ID NO: 84470), NDEGLEXVPTEE (SEQ ID NO: 84798):EPIS-AA¹⁷-LYL (SEQ ID NO: 84874):KFKYE (SEQ ID NO: 84211):FLQHNKXEXR (SEQ ID NO: 84536), NDEGLEXVPTGQ (SEQ ID NO: 84799):EPIS-AA¹⁷-LYL (SEQ ID NO: 84874):KFKYE (SEQ ID NO: 84211):LEEHSQXEXR (SEQ ID NO: 84577), SSVKXQPSRVHH (SEQ ID NO: 84834):EPIS-AA¹⁷-LYL (SEQ ID NO: 84874):KFKYE (SEQ ID NO: 84211):RLEEHLEXAXA (SEQ ID NO: 84646), RNVQXRPTQVQL (SEQ ID NO: 84806):EPIS-AA¹⁷-LYL (SEQ ID NO: 84874):KFKYE (SEQ ID NO: 84211):TLEDHLAXKXE (SEQ ID NO: 84659), KIPKASSTPTEL:SPIN-AA¹⁷-LYF (SEQ ID NO: 84884):YGKIP (SEQ ID NO: 84397):DMVVDGXGXR (SEQ ID NO: 84507), GIPEPXXTPTKM (SEQ ID NO: 84716):SPIN-AA¹⁷-LYF (SEQ ID NO: 84884):YGKIP (SEQ ID NO: 84397):NMVVDSXAXR (SEQ ID NO: 84619), SIPKASSTPTEL:SPIN-AA¹⁷-LYF (SEQ ID NO: 84884):YGKIP (SEQ ID NO: 84397):EMVVDGXGXR (SEQ ID NO: 84528), HVTKPTSTPTKL (SEQ ID NO: 85018):SPIN-AA¹⁷-LYF (SEQ ID NO: 84884):YGKIP (SEQ ID NO: 84397):NMVVDSXGXH (SEQ ID NO: 84620), YVPKPXXTPTKL (SEQ ID NO: 84866):SPIN-AA¹⁷-LYF (SEQ ID NO: 84884):YGKIP (SEQ ID NO: 84397):NMVVDSXGXH (SEQ ID NO: 84620), TVPKPXXTPTQL (SEQ ID NO: 84856):SPIN-AA¹⁷-LYF (SEQ ID NO: 84884):YGKIP (SEQ ID NO: 84397):NMVVDAXGXH (SEQ ID NO: 84618), AVPKASSTPTKL:SPIN-AA¹⁷-LYF (SEQ ID NO: 84884):YGKIP (SEQ ID NO: 84397):NMVVDAXGXH (SEQ ID NO: 84618), KVGKASSTPTKL:SPIN-AA¹⁷-LYF (SEQ ID NO: 84884):YGKIP (SEQ ID NO: 84397):EGMSVVDXGXR (SEQ ID NO: 84640), KASKASSTPTKL:SPIN-AA¹⁷-LYF (SEQ ID NO: 84884):YGKIP (SEQ ID NO: 84397):GMVVDEXGXR (SEQ ID NO: 84566), AAPASSSTPTRL:SPIN-AA¹⁷-LYF (SEQ ID NO: 84884):YGKIP (SEQ ID NO: 84397):DMVVDAXGXR (SEQ ID NO: 84506), STPPTSSTPTRL:SPIN-AA¹⁷-LYF (SEQ ID NO: 84884):YGKIP (SEQ ID NO: 84397):DMVVDSXGXR (SEQ ID NO: 84508), HVPKPXXTPTKL (SEQ ID NO: 84736):SPIN-AA¹⁷-LYF (SEQ ID NO: 84884):YGKIP (SEQ ID NO: 84397):NMVVDSXGXH (SEQ ID NO: 84620), RVPSTSSTPTKT:SPIN-AA¹⁷-LYF (SEQ ID NO: 84884):YGKIP (SEQ ID NO: 84397):MIVVDXGXL (SEQ ID NO: 84454), ASAAPXXTPTAL (SEQ ID NO: 84686):SPIN-AA¹⁷-LYF (SEQ ID NO: 84884):YGKIP (SEQ ID NO: 84397):MIVVDXKXS (SEQ ID NO: 84455), ASASPXXTPTDL (SEQ ID NO: 84696):SPIN-AA¹⁷-LYF (SEQ ID NO: 84884):YGKIP (SEQ ID NO: 84397):MIVVDXKXS (SEQ ID NO: 84455), ASASPXXTPTDL (SEQ ID NO: 84696):SPIN-AA¹⁷-LYF (SEQ ID NO: 84884):YGKIP (SEQ ID NO: 84397):MVVVDXKXS (SEQ ID NO: 84472), NDEGLESTPTEE (SEQ ID NO: 84788):SPIN-AA¹⁷-LYF (SEQ ID NO: 84884):YGKIP (SEQ ID NO: 84397):FLVVDKXEXR (SEQ ID NO: 84542), NDEGLESTPTGQ (SEQ ID NO: 84789):SPIN-AA¹⁷-LYF (SEQ ID NO: 84884):YGKIP (SEQ ID NO: 84397):LEVVDQXEXR (SEQ ID NO: 84584), SSVKXQPTPTHH (SEQ ID NO: 84835):SPIN-AA¹⁷-LYF (SEQ ID NO: 84884):YGKIP (SEQ ID NO: 84397):RLVVDLEXAXA (SEQ ID NO: 84654), RNVQXRPTPTQL (SEQ ID NO: 84805):SPIN-AA¹⁷-LYF (SEQ ID NO: 84884):YGKIP (SEQ ID NO: 84397):TLVVDLAXKXE (SEQ ID NO: 84668), KIPKAXXVPTEL (SEQ ID NO: 84770):SPIN-AA¹⁷-LYF (SEQ ID NO: 84884):YGKIP (SEQ ID NO: 84397):DMVVEGXGXR (SEQ ID NO: 84510), GIPEPXXVPEKM (SEQ ID NO: 84718):SPIN-AA¹⁷-LYF (SEQ ID NO: 84884):YGKIP (SEQ ID NO: 84397):NMTVESXAXR (SEQ ID NO: 84604), SIPKAXXVPTEL (SEQ ID NO: 84830):SPIN-AA¹⁷-LYF (SEQ ID NO: 84884):YGKIP (SEQ ID NO: 84397):EMVVEGXGXR (SEQ ID NO: 84529), HVTKPTXAPTKL (SEQ ID NO: 84742):SPIN-AA¹⁷-LYF (SEQ ID NO: 84884):YGKIP (SEQ ID NO: 84397):NMVVRSXGXH (SEQ ID NO: 84629), YVPKPXXAPTKL (SEQ ID NO: 84864):SPIN-AA¹⁷-LYF (SEQ ID NO: 84884):YGKIP (SEQ ID NO: 84397):NMVVRSXGXH (SEQ ID NO: 84629), TVPKPXXAPTQL (SEQ ID NO: 84854):SPIN-AA¹⁷-LYF (SEQ ID NO: 84884):YGKIP (SEQ ID NO: 84397):NMVVRAXGXH (SEQ ID NO: 84627), AVPKAXXAPTKL (SEQ ID NO: 84704):SPIN-AA¹⁷-LYF (SEQ ID NO: 84884):YGKIP (SEQ ID NO: 84397):NMVVKAXGXH (SEQ ID NO: 84624), KVGKAXXVPTKL (SEQ ID NO: 84780):SPIN-AA¹⁷-LYF (SEQ ID NO: 84884):YGKIP (SEQ ID NO: 84397):EGMSVAEXGXR (SEQ ID NO: 84636), KASKAXXVPTKL (SEQ ID NO: 84760):SPIN-AA¹⁷-LYF (SEQ ID NO: 84884):YGKIP (SEQ ID NO: 84397):GMAVSEXGXR (SEQ ID NO: 84546), AAPASXXVPARL (SEQ ID NO: 84677):SPIN-AA¹⁷-LYF (SEQ ID NO: 84884):YGKIP (SEQ ID NO: 84397):DMVVEAXGXR (SEQ ID NO: 84509), STPPTXXVPTRL (SEQ ID NO: 84850):SPIN-AA¹⁷-LYF (SEQ ID NO: 84884):YGKIP (SEQ ID NO: 84397):DMVVESXGXR (SEQ ID NO: 84511), HVPKPXXAPTKL (SEQ ID NO: 84734):SPIN-AA¹⁷-LYF (SEQ ID NO: 84884):YGKIP (SEQ ID NO: 84397):NMVVRSXGXH (SEQ ID NO: 84629), RVPSTXXAPVKT (SEQ ID NO: 84815):SPIN-AA¹⁷-LYF (SEQ ID NO: 84884):YGKIP (SEQ ID NO: 84397):MIVEEXGXL (SEQ ID NO: 84448), ASAAPXXVPQAL (SEQ ID NO: 84689):SPIN-AA¹⁷-LYF (SEQ ID NO: 84884):YGKIP (SEQ ID NO: 84397):MIVRSXKXS (SEQ ID NO: 84453), ASASPXXVSQDL (SEQ ID NO: 84701):SPIN-AA¹⁷-LYF (SEQ ID NO: 84884):YGKIP (SEQ ID NO: 84397):MIVKSXKXS (SEQ ID NO: 84451), ASASPXXVPQDL (SEQ ID NO: 84699):SPIN-AA¹⁷-LYF (SEQ ID NO: 84884):YGKIP (SEQ ID NO: 84397):MVVKSXKXS (SEQ ID NO: 84470), NDEGLEXVPTEE (SEQ ID NO: 84798):SPIN-AA¹⁷-LYF (SEQ ID NO: 84884):YGKIP (SEQ ID NO: 84397):FLQHNKXEXR (SEQ ID NO: 84536), NDEGLEXVPTGQ (SEQ ID NO: 84799):SPIN-AA¹⁷-LYF (SEQ ID NO: 84884):YGKIP (SEQ ID NO: 84397):LEEHSQXEXR (SEQ ID NO: 84577), SSVKXQPSRVHH (SEQ ID NO: 84834):SPIN-AA¹⁷-LYF (SEQ ID NO: 84884):YGKIP (SEQ ID NO: 84397):RLEEHLEXAXA (SEQ ID NO: 84646), RNVQXRPTQVQL (SEQ ID NO: 84806):SPIN-AA¹⁷-LYF (SEQ ID NO: 84884):YGKIP (SEQ ID NO: 84397):TLEDHLAXKXE (SEQ ID NO: 84659), KIPKAXXVPAEL (SEQ ID NO: 84767):SPIS-AA¹⁷-LYI (SEQ ID NO: 84886):YKQYE (SEQ ID NO: 84398):DMVVEGXGXR (SEQ ID NO: 84510), GIPEPXXVPAKM (SEQ ID NO: 84717):SPIS-AA¹⁷-LYI (SEQ ID NO: 84886):YKQYE (SEQ ID NO: 84398):NMVVESXAXR (SEQ ID NO: 84622), SIPKAXXVPAEL (SEQ ID NO: 84827):SPIS-AA¹⁷-LYI (SEQ ID NO: 84886):YKQYE (SEQ ID NO: 84398):EMVVEGXGXR (SEQ ID NO: 84529), HVTKPTXVPAKL (SEQ ID NO: 84747):SPIS-AA¹⁷-LYI (SEQ ID NO: 84886):YKQYE (SEQ ID NO: 84398):NMVVESXGXH (SEQ ID NO: 84623), YVPKPXXVPAKL (SEQ ID NO: 84867):SPIS-AA¹⁷-LYI (SEQ ID NO: 84886):YKQYE (SEQ ID NO: 84398):NMVVESXGXH (SEQ ID NO: 84623), TVPKPXXVPAQL (SEQ ID NO: 84857):SPIS-AA¹⁷-LYI (SEQ ID NO: 84886):YKQYE (SEQ ID NO: 84398):NMVVEAXGXH (SEQ ID NO: 84621), AVPKAXXVPAKL (SEQ ID NO: 84707):SPIS-AA¹⁷-LYI (SEQ ID NO: 84886):YKQYE (SEQ ID NO: 84398):NMVVEAXGXH (SEQ ID NO: 84621), KVGKAXXVPAKL (SEQ ID NO: 84777):SPIS-AA¹⁷-LYI (SEQ ID NO: 84886):YKQYE (SEQ ID NO: 84398):EGMSVVEXGXR (SEQ ID NO: 84641), KASKAXXVPAKL (SEQ ID NO: 84757):SPIS-AA¹⁷-LYI (SEQ ID NO: 84886):YKQYE (SEQ ID NO: 84398):GMVVEEXGXR (SEQ ID NO: 84568), GSAGPXXVPAKM (SEQ ID NO: 84727):SPIS-AA¹⁷-LYI (SEQ ID NO: 84886):YKQYE (SEQ ID NO: 84398):GMVVERXGXS (SEQ ID NO: 84569), STPPTXXVPARL (SEQ ID NO: 84847):SPIS-AA¹⁷-LYI (SEQ ID NO: 84886):YKQYE (SEQ ID NO: 84398):DMVVESXGXR (SEQ ID NO: 84511), HVPKPXXVPAKL (SEQ ID NO: 84737):SPIS-AA¹⁷-LYI (SEQ ID NO: 84886):YKQYE (SEQ ID NO: 84398):NMVVESXGXH (SEQ ID NO: 84623), RVPSTXXVPAKT (SEQ ID NO: 84817):SPIS-AA¹⁷-LYI (SEQ ID NO: 84886):YKQYE (SEQ ID NO: 84398):MIVVEXGXL (SEQ ID NO: 84456), ASAAPXXVPAAL (SEQ ID NO: 84687):SPIS-AA¹⁷-LYI (SEQ ID NO: 84886):YKQYE (SEQ ID NO: 84398):MIVVEXKXS (SEQ ID NO: 84457), ASASPXXVPADL (SEQ ID NO: 84697):SPIS-AA¹⁷-LYI (SEQ ID NO: 84886):YKQYE (SEQ ID NO: 84398):MIVVEXKXS (SEQ ID NO: 84457), ASASPXXVPADL (SEQ ID NO: 84697):SPIS-AA¹⁷-LYI (SEQ ID NO: 84886):YKQYE (SEQ ID NO: 84398):MVVVEXKXS (SEQ ID NO: 84473), NDEGLEXVPAEE (SEQ ID NO: 84792):SPIS-AA¹⁷-LYI (SEQ ID NO: 84886):YKQYE (SEQ ID NO: 84398):FLVVEKXEXR (SEQ ID NO: 84543), NDEGLEXVPAGQ (SEQ ID NO: 84793):SPIS-AA¹⁷-LYI (SEQ ID NO: 84886):YKQYE (SEQ ID NO: 84398):LEVVEQXEXR (SEQ ID NO: 84585), SSVKXQPVPAHH (SEQ ID NO: 84837):SPIS-AA¹⁷-LYI (SEQ ID NO: 84886):YKQYE (SEQ ID NO: 84398):RLVVELEXAXA (SEQ ID NO: 84655), RNVQXRPVPAQL (SEQ ID NO: 84807):SPIS-AA¹⁷-LYI (SEQ ID NO: 84886):YKQYE (SEQ ID NO: 84398):TLVVELAXKXE (SEQ ID NO: 84669), KIPKAXXVPTEL (SEQ ID NO: 84770):SPIS-AA¹⁷-LYI (SEQ ID NO: 84886):YKQYE (SEQ ID NO: 84398):DMVVEGXGXR (SEQ ID NO: 84510), GIPEPXXVPEKM (SEQ ID NO: 84718):SPIS-AA¹⁷-LYI (SEQ ID NO: 84886):YKQYE (SEQ ID NO: 84398):NMTVESXAXR (SEQ ID NO: 84604), SIPKAXXVPTEL (SEQ ID NO: 84830):SPIS-AA¹⁷-LYI (SEQ ID NO: 84886):YKQYE (SEQ ID NO: 84398):EMVVEGXGXR (SEQ ID NO: 84529), HVTKPTXAPTKL (SEQ ID NO: 84742):SPIS-AA¹⁷-LYI (SEQ ID NO: 84886):YKQYE (SEQ ID NO: 84398):NMVVRSXGXH (SEQ ID NO: 84629), YVPKPXXAPTKL (SEQ ID NO: 84864):SPIS-AA¹⁷-LYI (SEQ ID NO: 84886):YKQYE (SEQ ID NO: 84398):NMVVRSXGXH (SEQ ID NO: 84629), TVPKPXXAPTQL (SEQ ID NO: 84854):SPIS-AA¹⁷-LYI (SEQ ID NO: 84886):YKQYE (SEQ ID NO: 84398):NMVVRAXGXH (SEQ ID NO: 84627), AVPKAXXAPTKL (SEQ ID NO: 84704):SPIS-AA¹⁷-LYI (SEQ ID NO: 84886):YKQYE (SEQ ID NO: 84398):NMVVKAXGXH (SEQ ID NO: 84624), KVGKAXXVPTKL (SEQ ID NO: 84780):SPIS-AA¹⁷-LYI (SEQ ID NO: 84886):YKQYE (SEQ ID NO: 84398):EGMSVAEXGXR (SEQ ID NO: 84636), KASKAXXVPTKL (SEQ ID NO: 84760):SPIS-AA¹⁷-LYI (SEQ ID NO: 84886):YKQYE (SEQ ID NO: 84398):GMAVSEXGXR (SEQ ID NO: 84546), GSAGPXXTPTKM (SEQ ID NO: 84726):SPIS-AA¹⁷-LYI (SEQ ID NO: 84886):YKQYE (SEQ ID NO: 84398):GMVVDRXGXS (SEQ ID NO: 84567), STPPTXXVPTRL (SEQ ID NO: 84850):SPIS-AA¹⁷-LYI (SEQ ID NO: 84886):YKQYE (SEQ ID NO: 84398):DMVVESXGXR (SEQ ID NO: 84511), HVPKPXXAPTKL (SEQ ID NO: 84734):SPIS-AA¹⁷-LYI (SEQ ID NO: 84886):YKQYE (SEQ ID NO: 84398):NMVVRSXGXH (SEQ ID NO: 84629), RVPSTXXAPVKT (SEQ ID NO: 84815):SPIS-AA¹⁷-LYI (SEQ ID NO: 84886):YKQYE (SEQ ID NO: 84398):MIVEEXGXL (SEQ ID NO: 84448), ASAAPXXVPQAL (SEQ ID NO: 84689):SPIS-AA¹⁷-LYI (SEQ ID NO: 84886):YKQYE (SEQ ID NO: 84398):MIVRSXKXS (SEQ ID NO: 84453), ASASPXXVSQDL (SEQ ID NO: 84701):SPIS-AA¹⁷-LYI (SEQ ID NO: 84886):YKQYE (SEQ ID NO: 84398):MIVKSXKXS (SEQ ID NO: 84451), ASASPXXVPQDL (SEQ ID NO: 84699):SPIS-AA¹⁷-LYI (SEQ ID NO: 84886):YKQYE (SEQ ID NO: 84398):MVVKSXKXS (SEQ ID NO: 84470), NDEGLEXVPTEE (SEQ ID NO: 84798):SPIS-AA¹⁷-LYI (SEQ ID NO: 84886):YKQYE (SEQ ID NO: 84398):FLQHNKXEXR (SEQ ID NO: 84536), NDEGLEXVPTGQ (SEQ ID NO: 84799):SPIS-AA¹⁷-LYI (SEQ ID NO: 84886):YKQYE (SEQ ID NO: 84398):LEEHSQXEXR (SEQ ID NO: 84577), SSVKXQPSRVHH (SEQ ID NO: 84834):SPIS-AA¹⁷-LYI (SEQ ID NO: 84886):YKQYE (SEQ ID NO: 84398):RLEEHLEXAXA (SEQ ID NO: 84646), RNVQXRPTQVQL (SEQ ID NO: 84806):SPIS-AA¹⁷-LYI (SEQ ID NO: 84886):YKQYE (SEQ ID NO: 84398):TLEDHLAXKXE (SEQ ID NO: 84659), KIPKAXXVPTEL (SEQ ID NO: 84770):SPIS-AA¹⁷-LFI (SEQ ID NO: 84885):YKQYE (SEQ ID NO: 84398):DMVVEGXGXR (SEQ ID NO: 84510), GIPEPXXVPTKM (SEQ ID NO: 84720):SPIS-AA¹⁷-LFI (SEQ ID NO: 84885):YKQYE (SEQ ID NO: 84398):NMVVESXAXR (SEQ ID NO: 84622), SIPKAXXVPTEL (SEQ ID NO: 84830):SPIS-AA¹⁷-LFI (SEQ ID NO: 84885):YKQYE (SEQ ID NO: 84398):EMVVEGXGXR (SEQ ID NO: 84529), HVTKPTXVPTKL (SEQ ID NO: 84750):SPIS-AA¹⁷-LFI (SEQ ID NO: 84885):YKQYE (SEQ ID NO: 84398):NMVVESXGXH (SEQ ID NO: 84623), YVPKPXXVPTKL (SEQ ID NO: 84870):SPIS-AA¹⁷-LFI (SEQ ID NO: 84885):YKQYE (SEQ ID NO: 84398):NMVVESXGXH (SEQ ID NO: 84623), TVPKPXXVPTQL (SEQ ID NO: 84860):SPIS-AA¹⁷-LFI (SEQ ID NO: 84885):YKQYE (SEQ ID NO: 84398):NMVVEAXGXH (SEQ ID NO: 84621), AVPKAXXVPTKL (SEQ ID NO: 84710):SPIS-AA¹⁷-LFI (SEQ ID NO: 84885):YKQYE (SEQ ID NO: 84398):NMVVEAXGXH (SEQ ID NO: 84621), KVGKAXXVPTKL (SEQ ID NO: 84780):SPIS-AA¹⁷-LFI (SEQ ID NO: 84885):YKQYE (SEQ ID NO: 84398):EGMSVVEXGXR (SEQ ID NO: 84641), KASKAXXVPTKL (SEQ ID NO: 84760):SPIS-AA¹⁷-LFI (SEQ ID NO: 84885):YKQYE (SEQ ID NO: 84398):GMVVEEXGXR (SEQ ID NO: 84568), GSAGPXXVPTKM (SEQ ID NO: 84730):SPIS-AA¹⁷-LFI (SEQ ID NO: 84885):YKQYE (SEQ ID NO: 84398):GMVVERXGXS (SEQ ID NO: 84569), AAPASXXVPTRL (SEQ ID NO: 84680):SPIS-AA¹⁷-LFI (SEQ ID NO: 84885):YKQYE (SEQ ID NO: 84398):DMVVEAXGXR (SEQ ID NO: 84509), HVPKPXXVPTKL (SEQ ID NO: 84740):SPIS-AA¹⁷-LFI (SEQ ID NO: 84885):YKQYE (SEQ ID NO: 84398):NMVVESXGXH (SEQ ID NO: 84623), RVPSTXXVPTKT (SEQ ID NO: 84820):SPIS-AA¹⁷-LFI (SEQ ID NO: 84885):YKQYE (SEQ ID NO: 84398):MIVVEXGXL (SEQ ID NO: 84456), ASAAPXXVPTAL (SEQ ID NO: 84690):SPIS-AA¹⁷-LFI (SEQ ID NO: 84885):YKQYE (SEQ ID NO: 84398):MIVVEXKXS (SEQ ID NO: 84457), ASASPXXVPTDL (SEQ ID NO: 84700):SPIS-AA¹⁷-LFI (SEQ ID NO: 84885):YKQYE (SEQ ID NO: 84398):MIVVEXKXS (SEQ ID NO: 84457), ASASPXXVPTDL (SEQ ID NO: 84700):SPIS-AA¹⁷-LFI (SEQ ID NO: 84885):YKQYE (SEQ ID NO: 84398):MVVVEXKXS (SEQ ID NO: 84473), NDEGLEXVPTEE (SEQ ID NO: 84798):SPIS-AA¹⁷-LFI (SEQ ID NO: 84885):YKQYE (SEQ ID NO: 84398):FLVVEKXEXR (SEQ ID NO: 84543), NDEGLEXVPTGQ (SEQ ID NO: 84799):SPIS-AA¹⁷-LFI (SEQ ID NO: 84885):YKQYE (SEQ ID NO: 84398):LEVVEQXEXR (SEQ ID NO: 84585), SSVKXQPVPTHH (SEQ ID NO: 84840):SPIS-AA¹⁷-LFI (SEQ ID NO: 84885):YKQYE (SEQ ID NO: 84398):RLVVELEXAXA (SEQ ID NO: 84655), RNVQXRPVPTQL (SEQ ID NO: 84810):SPIS-AA¹⁷-LFI (SEQ ID NO: 84885):YKQYE (SEQ ID NO: 84398):TLVVELAXKXE (SEQ ID NO: 84669), GIPEPXXVPEKM (SEQ ID NO: 84718):SPIS-AA¹⁷-LFI (SEQ ID NO: 84885):YKQYE (SEQ ID NO: 84398):NMTVESXAXR (SEQ ID NO: 84604), HVTKPTXAPTKL (SEQ ID NO: 84742):SPIS-AA¹⁷-LFI (SEQ ID NO: 84885):YKQYE (SEQ ID NO: 84398):NMVVRSXGXH (SEQ ID NO: 84629), YVPKPXXAPTKL (SEQ ID NO: 84864):SPIS-AA¹⁷-LFI (SEQ ID NO: 84885):YKQYE (SEQ ID NO: 84398):NMVVRSXGXH (SEQ ID NO: 84629), TVPKPXXAPTQL (SEQ ID NO: 84854):SPIS-AA¹⁷-LFI (SEQ ID NO: 84885):YKQYE (SEQ ID NO: 84398):NMVVRAXGXH (SEQ ID NO: 84627), AVPKAXXAPTKL (SEQ ID NO: 84704):SPIS-AA¹⁷-LFI (SEQ ID NO: 84885):YKQYE (SEQ ID NO: 84398):NMVVKAXGXH (SEQ ID NO: 84624), KVGKAXXVPTKL (SEQ ID NO: 84780):SPIS-AA¹⁷-LFI (SEQ ID NO: 84885):YKQYE (SEQ ID NO: 84398):EGMSVAEXGXR (SEQ ID NO: 84636), KASKAXXVPTKL (SEQ ID NO: 84760):SPIS-AA¹⁷-LFI (SEQ ID NO: 84885):YKQYE (SEQ ID NO: 84398):GMAVSEXGXR (SEQ ID NO: 84546), GSAGPXXTPTKM (SEQ ID NO: 84726):SPIS-AA¹⁷-LFI (SEQ ID NO: 84885):YKQYE (SEQ ID NO: 84398):GMVVDRXGXS (SEQ ID NO: 84567), AAPASXXVPARL (SEQ ID NO: 84677):SPIS-AA¹⁷-LFI (SEQ ID NO: 84885):YKQYE (SEQ ID NO: 84398):DMVVEAXGXR (SEQ ID NO: 84509), HVPKPXXAPTKL (SEQ ID NO: 84734):SPIS-AA¹⁷-LFI (SEQ ID NO: 84885):YKQYE (SEQ ID NO: 84398):NMVVRSXGXH (SEQ ID NO: 84629), RVPSTXXAPVKT (SEQ ID NO: 84815):SPIS-AA¹⁷-LFI (SEQ ID NO: 84885):YKQYE (SEQ ID NO: 84398):MIVEEXGXL (SEQ ID NO: 84448), ASAAPXXVPQAL (SEQ ID NO: 84689):SPIS-AA¹⁷-LFI (SEQ ID NO: 84885):YKQYE (SEQ ID NO: 84398):MIVRSXKXS (SEQ ID NO: 84453), ASASPXXVSQDL (SEQ ID NO: 84701):SPIS-AA¹⁷-LFI (SEQ ID NO: 84885):YKQYE (SEQ ID NO: 84398):MIVKSXKXS (SEQ ID NO: 84451), ASASPXXVPQDL (SEQ ID NO: 84699):SPIS-AA¹⁷-LFI (SEQ ID NO: 84885):YKQYE (SEQ ID NO: 84398):MVVKSXKXS (SEQ ID NO: 84470), NDEGLEXVPTEE (SEQ ID NO: 84798):SPIS-AA¹⁷-LFI (SEQ ID NO: 84885):YKQYE (SEQ ID NO: 84398):FLQHNKXEXR (SEQ ID NO: 84536), NDEGLEXVPTGQ (SEQ ID NO: 84799):SPIS-AA¹⁷-LFI (SEQ ID NO: 84885):YKQYE (SEQ ID NO: 84398):LEEHSQXEXR (SEQ ID NO: 84577), SSVKXQPSRVHH (SEQ ID NO: 84834):SPIS-AA¹⁷-LFI (SEQ ID NO: 84885):YKQYE (SEQ ID NO: 84398):RLEEHLEXAXA (SEQ ID NO: 84646), RNVQXRPTQVQL (SEQ ID NO: 84806):SPIS-AA¹⁷-LFI (SEQ ID NO: 84885):YKQYE (SEQ ID NO: 84398):TLEDHLAXKXE (SEQ ID NO: 84659), KIPKAXXAPVEL (SEQ ID NO: 84765):KPLS-AA¹⁷-LYV (SEQ ID NO: 84877):DHHKD (SEQ ID NO: 84149):DMVEEGXGXR (SEQ ID NO: 84498), GIPEPXXAPVKM (SEQ ID NO: 84715):KPLS-AA¹⁷-LYV (SEQ ID NO: 84877):DHHKD (SEQ ID NO: 84149):NMVEESXAXR (SEQ ID NO: 84610), SIPKAXXAPVEL (SEQ ID NO: 84825):KPLS-AA¹⁷-LYV (SEQ ID NO: 84877):DHHKD (SEQ ID NO: 84149):EMVEEGXGXR (SEQ ID NO: 84525), HVTKPTXAPVKL (SEQ ID NO: 84743):KPLS-AA¹⁷-LYV (SEQ ID NO: 84877):DHHKD (SEQ ID NO: 84149):NMVEESXGXH (SEQ ID NO: 84611), YVPKPXXAPVKL (SEQ ID NO: 84865):KPLS-AA¹⁷-LYV (SEQ ID NO: 84877):DHHKD (SEQ ID NO: 84149):NMVEESXGXH (SEQ ID NO: 84611), TVPKPXXAPVQL (SEQ ID NO: 84855):KPLS-AA¹⁷-LYV (SEQ ID NO: 84877):DHHKD (SEQ ID NO: 84149):NMVEEAXGXH (SEQ ID NO: 84609), AVPKAXXAPVKL (SEQ ID NO: 84705):KPLS-AA¹⁷-LYV (SEQ ID NO: 84877):DHHKD (SEQ ID NO: 84149):NMVEEAXGXH (SEQ ID NO: 84609), KVGKAXXAPVKL (SEQ ID NO: 84775):KPLS-AA¹⁷-LYV (SEQ ID NO: 84877):DHHKD (SEQ ID NO: 84149):EGMSVEEXGXR (SEQ ID NO: 84637), KASKAXXAPVKL (SEQ ID NO: 84755):KPLS-AA¹⁷-LYV (SEQ ID NO: 84877):DHHKD (SEQ ID NO: 84149):GMVEEEXGXR (SEQ ID NO: 84560), GSAGPXXAPVKM (SEQ ID NO: 84725):KPLS-AA¹⁷-LYV (SEQ ID NO: 84877):DHHKD (SEQ ID NO: 84149):GMVEERXGXS (SEQ ID NO: 84561), AAPASXXAPVRL (SEQ ID NO: 84675):KPLS-AA¹⁷-LYV (SEQ ID NO: 84877):DHHKD (SEQ ID NO: 84149):DMVEEAXGXR (SEQ ID NO: 84497), STPPTXXAPVRL (SEQ ID NO: 84845):KPLS-AA¹⁷-LYV (SEQ ID NO: 84877):DHHKD (SEQ ID NO: 84149):DMVEESXGXR (SEQ ID NO: 84499), HVPKPXXAPVKL (SEQ ID NO: 84735):KPLS-AA¹⁷-LYV (SEQ ID NO: 84877):DHHKD (SEQ ID NO: 84149):NMVEESXGXH (SEQ ID NO: 84611), ASAAPXXAPVAL (SEQ ID NO: 84685):KPLS-AA¹⁷-LYV (SEQ ID NO: 84877):DHHKD (SEQ ID NO: 84149):MIVEEXKXS (SEQ ID NO: 84449), ASASPXXAPVDL (SEQ ID NO: 84695):KPLS-AA¹⁷-LYV (SEQ ID NO: 84877):DHHKD (SEQ ID NO: 84149):MIVEEXKXS (SEQ ID NO: 84449), ASASPXXAPVDL (SEQ ID NO: 84695):KPLS-AA¹⁷-LYV (SEQ ID NO: 84877):DHHKD (SEQ ID NO: 84149):MVVEEXKXS (SEQ ID NO: 84469), NDEGLESAPVEE (SEQ ID NO: 84784):KPLS-AA¹⁷-LYV (SEQ ID NO: 84877):DHHKD (SEQ ID NO: 84149):FLVEEKXEXR (SEQ ID NO: 84539), NDEGLESAPVGQ (SEQ ID NO: 84785):KPLS-AA¹⁷-LYV (SEQ ID NO: 84877):DHHKD (SEQ ID NO: 84149):LEVEEQXEXR (SEQ ID NO: 84581), SSVKXQPAPVHH (SEQ ID NO: 84833):KPLS-AA¹⁷-LYV (SEQ ID NO: 84877):DHHKD (SEQ ID NO: 84149):RLVEELEXAXA (SEQ ID NO: 84651), RNVQXRPAPVQL (SEQ ID NO: 84803):KPLS-AA¹⁷-LYV (SEQ ID NO: 84877):DHHKD (SEQ ID NO: 84149):TLVEELAXKXE (SEQ ID NO: 84665), KIPKAXXVPTEL (SEQ ID NO: 84770):KPLS-AA¹⁷-LYV (SEQ ID NO: 84877):DHHKD (SEQ ID NO: 84149):DMVVEGXGXR (SEQ ID NO: 84510), GIPEPXXVPEKM (SEQ ID NO: 84718):KPLS-AA¹⁷-LYV (SEQ ID NO: 84877):DHHKD (SEQ ID NO: 84149):NMTVESXAXR (SEQ ID NO: 84604), SIPKAXXVPTEL (SEQ ID NO: 84830):KPLS-AA¹⁷-LYV (SEQ ID NO: 84877):DHHKD (SEQ ID NO: 84149):EMVVEGXGXR (SEQ ID NO: 84529), HVTKPTXAPTKL (SEQ ID NO: 84742):KPLS-AA¹⁷-LYV (SEQ ID NO: 84877):DHHKD (SEQ ID NO: 84149):NMVVRSXGXH (SEQ ID NO: 84629), YVPKPXXAPTKL (SEQ ID NO: 84864):KPLS-AA¹⁷-LYV (SEQ ID NO: 84877):DHHKD (SEQ ID NO: 84149):NMVVRSXGXH (SEQ ID NO: 84629), TVPKPXXAPTQL (SEQ ID NO: 84854):KPLS-AA¹⁷-LYV (SEQ ID NO: 84877):DHHKD (SEQ ID NO: 84149):NMVVRAXGXH (SEQ ID NO: 84627), AVPKAXXAPTKL (SEQ ID NO: 84704):KPLS-AA¹⁷-LYV (SEQ ID NO: 84877):DHHKD (SEQ ID NO: 84149):NMVVKAXGXH (SEQ ID NO: 84624), KVGKAXXVPTKL (SEQ ID NO: 84780):KPLS-AA¹⁷-LYV (SEQ ID NO: 84877):DHHKD (SEQ ID NO: 84149):EGMSVAEXGXR (SEQ ID NO: 84636), KASKAXXVPTKL (SEQ ID NO: 84760):KPLS-AA¹⁷-LYV (SEQ ID NO: 84877):DHHKD (SEQ ID NO: 84149):GMAVSEXGXR (SEQ ID NO: 84546), GSAGPXXTPTKM (SEQ ID NO: 84726):KPLS-AA¹⁷-LYV (SEQ ID NO: 84877):DHHKD (SEQ ID NO: 84149):GMVVDRXGXS (SEQ ID NO: 84567), AAPASXXVPARL (SEQ ID NO: 84677):KPLS-AA¹⁷-LYV (SEQ ID NO: 84877):DHHKD (SEQ ID NO: 84149):DMVVEAXGXR (SEQ ID NO: 84509), STPPTXXVPTRL (SEQ ID NO: 84850):KPLS-AA¹⁷-LYV (SEQ ID NO: 84877):DHHKD (SEQ ID NO: 84149):DMVVESXGXR (SEQ ID NO: 84511), HVPKPXXAPTKL (SEQ ID NO: 84734):KPLS-AA¹⁷-LYV (SEQ ID NO: 84877):DHHKD (SEQ ID NO: 84149):NMVVRSXGXH (SEQ ID NO: 84629), ASAAPXXVPQAL (SEQ ID NO: 84689):KPLS-AA¹⁷-LYV (SEQ ID NO: 84877):DHHKD (SEQ ID NO: 84149):MIVRSXKXS (SEQ ID NO: 84453), ASASPXXVSQDL (SEQ ID NO: 84701):KPLS-AA¹⁷-LYV (SEQ ID NO: 84877):DHHKD (SEQ ID NO: 84149):MIVKSXKXS (SEQ ID NO: 84451), ASASPXXVPQDL (SEQ ID NO: 84699):KPLS-AA¹⁷-LYV (SEQ ID NO: 84877):DHHKD (SEQ ID NO: 84149):MVVKSXKXS (SEQ ID NO: 84470), NDEGLEXVPTEE (SEQ ID NO: 84798):KPLS-AA¹⁷-LYV (SEQ ID NO: 84877):DHHKD (SEQ ID NO: 84149):FLQHNKXEXR (SEQ ID NO: 84536), NDEGLEXVPTGQ (SEQ ID NO: 84799):KPLS-AA¹⁷-LYV (SEQ ID NO: 84877):DHHKD (SEQ ID NO: 84149):LEEHSQXEXR (SEQ ID NO: 84577), SSVKXQPSRVHH (SEQ ID NO: 84834):KPLS-AA¹⁷-LYV (SEQ ID NO: 84877):DHHKD (SEQ ID NO: 84149):RLEEHLEXAXA (SEQ ID NO: 84646), RNVQXRPTQVQL (SEQ ID NO: 84806):KPLS-AA¹⁷-LYV (SEQ ID NO: 84877):DHHKD (SEQ ID NO: 84149):TLEDHLAXKXE (SEQ ID NO: 84659), KIPKAXXVPQEL (SEQ ID NO: 84769):EPLP-AA¹⁷-VYY (SEQ ID NO: 84875):EQLSN (SEQ ID NO: 84178):DMVRXGXGSR (SEQ ID NO: 84505), GIPEPXXVPQKM (SEQ ID NO: 84719):EPLP-AA¹⁷-VYY (SEQ ID NO: 84875):EQLSN (SEQ ID NO: 84178):NMVRSSXAXR (SEQ ID NO: 84616), SIPKAXXVPQEL (SEQ ID NO: 84829):EPLP-AA¹⁷-VYY (SEQ ID NO: 84875):EQLSN (SEQ ID NO: 84178):EMVRXGXGSR (SEQ ID NO: 84527), HVTKPTXVPQKL (SEQ ID NO: 84749):EPLP-AA¹⁷-VYY (SEQ ID NO: 84875):EQLSN (SEQ ID NO: 84178):NMVRSSXGXH (SEQ ID NO: 84617), YVPKPXXVPQKL (SEQ ID NO: 84869):EPLP-AA¹⁷-VYY (SEQ ID NO: 84875):EQLSN (SEQ ID NO: 84178):NMVRSSXGXH (SEQ ID NO: 84617), TVPKPXXVPQQL (SEQ ID NO: 84859):EPLP-AA¹⁷-VYY (SEQ ID NO: 84875):EQLSN (SEQ ID NO: 84178):NMVRSAXGXH (SEQ ID NO: 84615), AVPKAXXVPQKL (SEQ ID NO: 84709):EPLP-AA¹⁷-VYY (SEQ ID NO: 84875):EQLSN (SEQ ID NO: 84178):NMVRSAXGXH (SEQ ID NO: 84615), KVGKAXXVPQKL (SEQ ID NO: 84779):EPLP-AA¹⁷-VYY (SEQ ID NO: 84875):EQLSN (SEQ ID NO: 84178):EGMSVRSXGXR (SEQ ID NO: 84639), KASKAXXVPQKL (SEQ ID NO: 84759):EPLP-AA¹⁷-VYY (SEQ ID NO: 84875):EQLSN (SEQ ID NO: 84178):GMVRSEXGXR (SEQ ID NO: 84564), GSAGPXXVPQKM (SEQ ID NO: 84729):EPLP-AA¹⁷-VYY (SEQ ID NO: 84875):EQLSN (SEQ ID NO: 84178):GMVRSRXGXS (SEQ ID NO: 84565), AAPASXXVPQRL (SEQ ID NO: 84679):EPLP-AA¹⁷-VYY (SEQ ID NO: 84875):EQLSN (SEQ ID NO: 84178):DMVRSAXGXR (SEQ ID NO: 84503), STPPTXXVPQRL (SEQ ID NO: 84849):EPLP-AA¹⁷-VYY (SEQ ID NO: 84875):EQLSN (SEQ ID NO: 84178):DMVRSSXGXR (SEQ ID NO: 84504), HVPKPXXVPQKL (SEQ ID NO: 84739):EPLP-AA¹⁷-VYY (SEQ ID NO: 84875):EQLSN (SEQ ID NO: 84178):NMVRSSXGXH (SEQ ID NO: 84617), RVPSTXXVPQKT (SEQ ID NO: 84819):EPLP-AA¹⁷-VYY (SEQ ID NO: 84875):EQLSN (SEQ ID NO: 84178):MIVRSXGXL (SEQ ID NO: 84452), ASASPXXVPQDL (SEQ ID NO: 84699):EPLP-AA¹⁷-VYY (SEQ ID NO: 84875):EQLSN (SEQ ID NO: 84178):MIVRSXKXS (SEQ ID NO: 84453), ASASPXXVPQDL (SEQ ID NO: 84699):EPLP-AA¹⁷-VYY (SEQ ID NO: 84875):EQLSN (SEQ ID NO: 84178):MVVRSXKXS (SEQ ID NO: 84471), NDEGLEXVPQEE (SEQ ID NO: 84796):EPLP-AA¹⁷-VYY (SEQ ID NO: 84875):EQLSN (SEQ ID NO: 84178):FLVRXKXESR (SEQ ID NO: 84541), NDEGLEXVPQGQ (SEQ ID NO: 84797):EPLP-AA¹⁷-VYY (SEQ ID NO: 84875):EQLSN (SEQ ID NO: 84178):LEVRSQXEXR (SEQ ID NO: 84583), SSVKXQPVPQHH (SEQ ID NO: 84839):EPLP-AA¹⁷-VYY (SEQ ID NO: 84875):EQLSN (SEQ ID NO: 84178):RLVRSLEXAXA (SEQ ID NO: 84653), RNVQXRPVPQQL (SEQ ID NO: 84809):EPLP-AA¹⁷-VYY (SEQ ID NO: 84875):EQLSN (SEQ ID NO: 84178):TLVRSLAXKXE (SEQ ID NO: 84667), KIPKAXXVPTEL (SEQ ID NO: 84770):EPLP-AA¹⁷-VYY (SEQ ID NO: 84875):EQLSN (SEQ ID NO: 84178):DMVVEGXGXR (SEQ ID NO: 84510), GIPEPXXVPEKM (SEQ ID NO: 84718):EPLP-AA¹⁷-VYY (SEQ ID NO: 84875):EQLSN (SEQ ID NO: 84178):NMTVESXAXR (SEQ ID NO: 84604), SIPKAXXVPTEL (SEQ ID NO: 84830):EPLP-AA¹⁷-VYY (SEQ ID NO: 84875):EQLSN (SEQ ID NO: 84178):EMVVEGXGXR (SEQ ID NO: 84529), HVTKPTXAPTKL (SEQ ID NO: 84742):EPLP-AA¹⁷-VYY (SEQ ID NO: 84875):EQLSN (SEQ ID NO: 84178):NMVVRSXGXH (SEQ ID NO: 84629), YVPKPXXAPTKL (SEQ ID NO: 84864):EPLP-AA¹⁷-VYY (SEQ ID NO: 84875):EQLSN (SEQ ID NO: 84178):NMVVRSXGXH (SEQ ID NO: 84629), TVPKPXXAPTQL (SEQ ID NO: 84854):EPLP-AA¹⁷-VYY (SEQ ID NO: 84875):EQLSN (SEQ ID NO: 84178):NMVVRAXGXH (SEQ ID NO: 84627), AVPKAXXAPTKL (SEQ ID NO: 84704):EPLP-AA¹⁷-VYY (SEQ ID NO: 84875):EQLSN (SEQ ID NO: 84178):NMVVKAXGXH (SEQ ID NO: 84624), KVGKAXXVPTKL (SEQ ID NO: 84780):EPLP-AA¹⁷-VYY (SEQ ID NO: 84875):EQLSN (SEQ ID NO: 84178):EGMSVAEXGXR (SEQ ID NO: 84636), KASKAXXVPTKL (SEQ ID NO: 84760):EPLP-AA¹⁷-VYY (SEQ ID NO: 84875):EQLSN (SEQ ID NO: 84178):GMAVSEXGXR (SEQ ID NO: 84546), GSAGPXXTPTKM (SEQ ID NO: 84726):EPLP-AA¹⁷-VYY (SEQ ID NO: 84875):EQLSN (SEQ ID NO: 84178):GMVVDRXGXS (SEQ ID NO: 84567), AAPASXXVPARL (SEQ ID NO: 84677):EPLP-AA¹⁷-VYY (SEQ ID NO: 84875):EQLSN (SEQ ID NO: 84178):DMVVEAXGXR (SEQ ID NO: 84509), STPPTXXVPTRL (SEQ ID NO: 84850):EPLP-AA¹⁷-VYY (SEQ ID NO: 84875):EQLSN (SEQ ID NO: 84178):DMVVESXGXR (SEQ ID NO: 84511), HVPKPXXAPTKL (SEQ ID NO: 84734):EPLP-AA¹⁷-VYY (SEQ ID NO: 84875):EQLSN (SEQ ID NO: 84178):NMVVRSXGXH (SEQ ID NO: 84629), RVPSTXXAPVKT (SEQ ID NO: 84815):EPLP-AA¹⁷-VYY (SEQ ID NO: 84875):EQLSN (SEQ ID NO: 84178):MIVEEXGXL (SEQ ID NO: 84448), ASASPXXVSQDL (SEQ ID NO: 84701):EPLP-AA¹⁷-VYY (SEQ ID NO: 84875):EQLSN (SEQ ID NO: 84178):MIVKSXKXS (SEQ ID NO: 84451), ASASPXXVPQDL (SEQ ID NO: 84699):EPLP-AA¹⁷-VYY (SEQ ID NO: 84875):EQLSN (SEQ ID NO: 84178):MVVKSXKXS (SEQ ID NO: 84470), NDEGLEXVPTEE (SEQ ID NO: 84798):EPLP-AA¹⁷-VYY (SEQ ID NO: 84875):EQLSN (SEQ ID NO: 84178):FLQHNKXEXR (SEQ ID NO: 84536), NDEGLEXVPTGQ (SEQ ID NO: 84799):EPLP-AA¹⁷-VYY (SEQ ID NO: 84875):EQLSN (SEQ ID NO: 84178):LEEHSQXEXR (SEQ ID NO: 84577), SSVKXQPSRVHH (SEQ ID NO: 84834):EPLP-AA¹⁷-VYY (SEQ ID NO: 84875):EQLSN (SEQ ID NO: 84178):RLEEHLEXAXA (SEQ ID NO: 84646), RNVQXRPTQVQL (SEQ ID NO: 84806):EPLP-AA¹⁷-VYY (SEQ ID NO: 84875):EQLSN (SEQ ID NO: 84178):TLEDHLAXKXE (SEQ ID NO: 84659), KIPKASSVSQEL (SEQ ID NO: 85003):EPLT-AA¹⁷-LYY (SEQ ID NO: 84876):EQLSN (SEQ ID NO: 84178):DMVKXGXGSR (SEQ ID NO: 84502), GIPEPXXVSQKM (SEQ ID NO: 84721):EPLT-AA¹⁷-LYY (SEQ ID NO: 84876):EQLSN (SEQ ID NO: 84178):NMVKSSXAXR (SEQ ID NO: 84613), SIPKASSVSQEL (SEQ ID NO: 85005):EPLT-AA¹⁷-LYY (SEQ ID NO: 84876):EQLSN (SEQ ID NO: 84178):EMVKXGXGSR (SEQ ID NO: 84526), HVTKPTXVSQKL (SEQ ID NO: 84751):EPLT-AA¹⁷-LYY (SEQ ID NO: 84876):EQLSN (SEQ ID NO: 84178):NMVKSSXGXH (SEQ ID NO: 84614), YVPKPXXVSQKL (SEQ ID NO: 84871):EPLT-AA¹⁷-LYY (SEQ ID NO: 84876):EQLSN (SEQ ID NO: 84178):NMVKSSXGXH (SEQ ID NO: 84614), TVPKPXXVSQQL (SEQ ID NO: 84861):EPLT-AA¹⁷-LYY (SEQ ID NO: 84876):EQLSN (SEQ ID NO: 84178):NMVKSAXGXH (SEQ ID NO: 84612), AVPKASSVSQKL (SEQ ID NO: 85008):EPLT-AA¹⁷-LYY (SEQ ID NO: 84876):EQLSN (SEQ ID NO: 84178):NMVKSAXGXH (SEQ ID NO: 84612), KVGKASSVSQKL (SEQ ID NO: 85009):EPLT-AA¹⁷-LYY (SEQ ID NO: 84876):EQLSN (SEQ ID NO: 84178):EGMSVKSXGXR (SEQ ID NO: 84638), KASKASSVSQKL (SEQ ID NO: 85010):EPLT-AA¹⁷-LYY (SEQ ID NO: 84876):EQLSN (SEQ ID NO: 84178):GMVKSEXGXR (SEQ ID NO: 84562), GSAGPXXVSQKM (SEQ ID NO: 84731):EPLT-AA¹⁷-LYY (SEQ ID NO: 84876):EQLSN (SEQ ID NO: 84178):GMVKSRXGXS (SEQ ID NO: 84563), AAPASSSVSQRL (SEQ ID NO: 85012):EPLT-AA¹⁷-LYY (SEQ ID NO: 84876):EQLSN (SEQ ID NO: 84178):DMVKSAXGXR (SEQ ID NO: 84500), STPPTSSVSQRL (SEQ ID NO: 85013):EPLT-AA¹⁷-LYY (SEQ ID NO: 84876):EQLSN (SEQ ID NO: 84178):DMVKSSXGXR (SEQ ID NO: 84501), HVPKPXXVSQKL (SEQ ID NO: 84741):EPLT-AA¹⁷-LYY (SEQ ID NO: 84876):EQLSN (SEQ ID NO: 84178):NMVKSSXGXH (SEQ ID NO: 84614), RVPSTSSVSQKT (SEQ ID NO: 85015):EPLT-AA¹⁷-LYY (SEQ ID NO: 84876):EQLSN (SEQ ID NO: 84178):MIVKSXGXL (SEQ ID NO: 84450), ASAAPXXVSQAL (SEQ ID NO: 84691):EPLT-AA¹⁷-LYY (SEQ ID NO: 84876):EQLSN (SEQ ID NO: 84178):MIVKSXKXS (SEQ ID NO: 84451), ASASPXXVSQDL (SEQ ID NO: 84701):EPLT-AA¹⁷-LYY (SEQ ID NO: 84876):EQLSN (SEQ ID NO: 84178):MVVKSXKXS (SEQ ID NO: 84470), NDEGLEXVSQEE (SEQ ID NO: 84800):EPLT-AA¹⁷-LYY (SEQ ID NO: 84876):EQLSN (SEQ ID NO: 84178):FLVKXKXESR (SEQ ID NO: 84540), NDEGLEXVSQGQ (SEQ ID NO: 84801):EPLT-AA¹⁷-LYY (SEQ ID NO: 84876):EQLSN (SEQ ID NO: 84178):LEVKSQXEXR (SEQ ID NO: 84582), SSVKXQPVSQHH (SEQ ID NO: 84841):EPLT-AA¹⁷-LYY (SEQ ID NO: 84876):EQLSN (SEQ ID NO: 84178):RLVKSLEXAXA (SEQ ID NO: 84652), RNVQXRPVSQQL (SEQ ID NO: 84811):EPLT-AA¹⁷-LYY (SEQ ID NO: 84876):EQLSN (SEQ ID NO: 84178):TLVKSLAXKXE (SEQ ID NO: 84666), KIPKAXXVPTEL (SEQ ID NO: 84770):EPLT-AA¹⁷-LYY (SEQ ID NO: 84876):EQLSN (SEQ ID NO: 84178):DMVVEGXGXR (SEQ ID NO: 84510), GIPEPXXVPEKM (SEQ ID NO: 84718):EPLT-AA¹⁷-LYY (SEQ ID NO: 84876):EQLSN (SEQ ID NO: 84178):NMTVESXAXR (SEQ ID NO: 84604), SIPKAXXVPTEL (SEQ ID NO: 84830):EPLT-AA¹⁷-LYY (SEQ ID NO: 84876):EQLSN (SEQ ID NO: 84178):EMVVEGXGXR (SEQ ID NO: 84529), HVTKPTXAPTKL (SEQ ID NO: 84742):EPLT-AA¹⁷-LYY (SEQ ID NO: 84876):EQLSN (SEQ ID NO: 84178):NMVVRSXGXH (SEQ ID NO: 84629), YVPKPXXAPTKL (SEQ ID NO: 84864):EPLT-AA¹⁷-LYY (SEQ ID NO: 84876):EQLSN (SEQ ID NO: 84178):NMVVRSXGXH (SEQ ID NO: 84629), TVPKPXXAPTQL (SEQ ID NO: 84854):EPLT-AA¹⁷-LYY (SEQ ID NO: 84876):EQLSN (SEQ ID NO: 84178):NMVVRAXGXH (SEQ ID NO: 84627), AVPKAXXAPTKL (SEQ ID NO: 84704):EPLT-AA¹⁷-LYY (SEQ ID NO: 84876):EQLSN (SEQ ID NO: 84178):NMVVKAXGXH (SEQ ID NO: 84624), KVGKAXXVPTKL (SEQ ID NO: 84780):EPLT-AA¹⁷-LYY (SEQ ID NO: 84876):EQLSN (SEQ ID NO: 84178):EGMSVAEXGXR (SEQ ID NO: 84636), KASKAXXVPTKL (SEQ ID NO: 84760):EPLT-AA¹⁷-LYY (SEQ ID NO: 84876):EQLSN (SEQ ID NO: 84178):GMAVSEXGXR (SEQ ID NO: 84546), GSAGPXXTPTKM (SEQ ID NO: 84726):EPLT-AA¹⁷-LYY (SEQ ID NO: 84876):EQLSN (SEQ ID NO: 84178):GMVVDRXGXS (SEQ ID NO: 84567), AAPASXXVPARL (SEQ ID NO: 84677):EPLT-AA¹⁷-LYY (SEQ ID NO: 84876):EQLSN (SEQ ID NO: 84178):DMVVEAXGXR (SEQ ID NO: 84509), STPPTXXVPTRL (SEQ ID NO: 84850):EPLT-AA¹⁷-LYY (SEQ ID NO: 84876):EQLSN (SEQ ID NO: 84178):DMVVESXGXR (SEQ ID NO: 84511), HVPKPXXAPTKL (SEQ ID NO: 84734):EPLT-AA¹⁷-LYY (SEQ ID NO: 84876):EQLSN (SEQ ID NO: 84178):NMVVRSXGXH (SEQ ID NO: 84629), RVPSTXXAPVKT (SEQ ID NO: 84815):EPLT-AA¹⁷-LYY (SEQ ID NO: 84876):EQLSN (SEQ ID NO: 84178):MIVEEXGXL (SEQ ID NO: 84448), ASAAPXXVPQAL (SEQ ID NO: 84689):EPLT-AA¹⁷-LYY (SEQ ID NO: 84876):EQLSN (SEQ ID NO: 84178):MIVRSXKXS (SEQ ID NO: 84453), ASASPXXVPQDL (SEQ ID NO: 84699):EPLT-AA¹⁷-LYY (SEQ ID NO: 84876):EQLSN (SEQ ID NO: 84178):MVVKSXKXS (SEQ ID NO: 84470), NDEGLEXVPTEE (SEQ ID NO: 84798):EPLT-AA¹⁷-LYY (SEQ ID NO: 84876):EQLSN (SEQ ID NO: 84178):FLQHNKXEXR (SEQ ID NO: 84536), NDEGLEXVPTGQ (SEQ ID NO: 84799):EPLT-AA¹⁷-LYY (SEQ ID NO: 84876):EQLSN (SEQ ID NO: 84178):LEEHSQXEXR (SEQ ID NO: 84577), SSVKXQPSRVHH (SEQ ID NO: 84834):EPLT-AA¹⁷-LYY (SEQ ID NO: 84876):EQLSN (SEQ ID NO: 84178):RLEEHLEXAXA (SEQ ID NO: 84646), RNVQXRPTQVQL (SEQ ID NO: 84806):EPLT-AA¹⁷-LYY (SEQ ID NO: 84876):EQLSN (SEQ ID NO: 84178):TLEDHLAXKXE (SEQ ID NO: 84659), KIPKAXXVPQEL (SEQ ID NO: 84769):EPLT-AA¹⁷-LYY (SEQ ID NO: 84876):EQLSN (SEQ ID NO: 84178):DMVKXGXGSR (SEQ ID NO: 84502), GIPEPXXVPQKM (SEQ ID NO: 84719):EPLT-AA¹⁷-LYY (SEQ ID NO: 84876):EQLSN (SEQ ID NO: 84178):NMVKSSXAXR (SEQ ID NO: 84613), SIPKAXXVPQEL (SEQ ID NO: 84829):EPLT-AA¹⁷-LYY (SEQ ID NO: 84876):EQLSN (SEQ ID NO: 84178):EMVKXGXGSR (SEQ ID NO: 84526), HVTKPTXVPQKL (SEQ ID NO: 84749):EPLT-AA¹⁷-LYY (SEQ ID NO: 84876):EQLSN (SEQ ID NO: 84178):NMVKSSXGXH (SEQ ID NO: 84614), YVPKPXXVPQKL (SEQ ID NO: 84869):EPLT-AA¹⁷-LYY (SEQ ID NO: 84876):EQLSN (SEQ ID NO: 84178):NMVKSSXGXH (SEQ ID NO: 84614), TVPKPXXVPQQL (SEQ ID NO: 84859):EPLT-AA¹⁷-LYY (SEQ ID NO: 84876):EQLSN (SEQ ID NO: 84178):NMVKSAXGXH (SEQ ID NO: 84612), AVPKAXXVPQKL (SEQ ID NO: 84709):EPLT-AA¹⁷-LYY (SEQ ID NO: 84876):EQLSN (SEQ ID NO: 84178):NMVKSAXGXH (SEQ ID NO: 84612), KVGKAXXVPQKL (SEQ ID NO: 84779):EPLT-AA¹⁷-LYY (SEQ ID NO: 84876):EQLSN (SEQ ID NO: 84178):EGMSVKSXGXR (SEQ ID NO: 84638), KASKAXXVPQKL (SEQ ID NO: 84759):EPLT-AA¹⁷-LYY (SEQ ID NO: 84876):EQLSN (SEQ ID NO: 84178):GMVKSEXGXR (SEQ ID NO: 84562), GSAGPXXVPQKM (SEQ ID NO: 84729):EPLT-AA¹⁷-LYY (SEQ ID NO: 84876):EQLSN (SEQ ID NO: 84178):GMVKSRXGXS (SEQ ID NO: 84563), AAPASXXVPQRL (SEQ ID NO: 84679):EPLT-AA¹⁷-LYY (SEQ ID NO: 84876):EQLSN (SEQ ID NO: 84178):DMVKSAXGXR (SEQ ID NO: 84500), STPPTXXVPQRL (SEQ ID NO: 84849):EPLT-AA¹⁷-LYY (SEQ ID NO: 84876):EQLSN (SEQ ID NO: 84178):DMVKSSXGXR (SEQ ID NO: 84501), HVPKPXXVPQKL (SEQ ID NO: 84739):EPLT-AA¹⁷-LYY (SEQ ID NO: 84876):EQLSN (SEQ ID NO: 84178):NMVKSSXGXH (SEQ ID NO: 84614), RVPSTXXVPQKT (SEQ ID NO: 84819):EPLT-AA¹⁷-LYY (SEQ ID NO: 84876):EQLSN (SEQ ID NO: 84178):MIVKSXGXL (SEQ ID NO: 84450), ASAAPXXVPQAL (SEQ ID NO: 84689):EPLT-AA¹⁷-LYY (SEQ ID NO: 84876):EQLSN (SEQ ID NO: 84178):MIVKSXKXS (SEQ ID NO: 84451), ASASPXXVPQDL (SEQ ID NO: 84699):EPLT-AA¹⁷-LYY (SEQ ID NO: 84876):EQLSN (SEQ ID NO: 84178):MIVKSXKXS (SEQ ID NO: 84451), NDEGLEXVPQEE (SEQ ID NO: 84796):EPLT-AA¹⁷-LYY (SEQ ID NO: 84876):EQLSN (SEQ ID NO: 84178):FLVKXKXESR (SEQ ID NO: 84540), NDEGLEXVPQGQ (SEQ ID NO: 84797):EPLT-AA¹⁷-LYY (SEQ ID NO: 84876):EQLSN (SEQ ID NO: 84178):LEVKSQXEXR (SEQ ID NO: 84582), SSVKXQPVPQHH (SEQ ID NO: 84839):EPLT-AA¹⁷-LYY (SEQ ID NO: 84876):EQLSN (SEQ ID NO: 84178):RLVKSLEXAXA (SEQ ID NO: 84652), RNVQXRPVPQQL (SEQ ID NO: 84809):EPLT-AA¹⁷-LYY (SEQ ID NO: 84876):EQLSN (SEQ ID NO: 84178):TLVKSLAXKXE (SEQ ID NO: 84666), ASASPXXVSQDL (SEQ ID NO: 84701):EPLT-AA¹⁷-LYY (SEQ ID NO: 84876):EQLSN (SEQ ID NO: 84178):MIVKSXKXS (SEQ ID NO: 84451), KIPKAXXVPTEL (SEQ ID NO: 84770):SNIT-AA¹⁷-QIM (SEQ ID NO: 84883):IGEMS (SEQ ID NO: 84209):DMQHNGXGXR (SEQ ID NO: 84489), GIPEPXXVPTKM (SEQ ID NO: 84720):SNIT-AA¹⁷-QIM (SEQ ID NO: 84883):IGEMS (SEQ ID NO: 84209):NMQHNSXAXR (SEQ ID NO: 84601), SIPKAXXVPTEL (SEQ ID NO: 84830):SNIT-AA¹⁷-QIM (SEQ ID NO: 84883):IGEMS (SEQ ID NO: 84209):EMQHNGXGXR (SEQ ID NO: 84522), HVTKPTXVPTKL (SEQ ID NO: 84750):SNIT-AA¹⁷-QIM (SEQ ID NO: 84883):IGEMS (SEQ ID NO: 84209):NMQHNSXGXH (SEQ ID NO: 84602), YVPKPXXVPTKL (SEQ ID NO: 84870):SNIT-AA¹⁷-QIM (SEQ ID NO: 84883):IGEMS (SEQ ID NO: 84209):NMQHNSXGXH (SEQ ID NO: 84602), TVPKPXXVPTQL (SEQ ID NO: 84860):SNIT-AA¹⁷-QIM (SEQ ID NO: 84883):IGEMS (SEQ ID NO: 84209):NMQHNAXGXH (SEQ ID NO: 84600), AVPKAXXVPTKL (SEQ ID NO: 84710):SNIT-AA¹⁷-QIM (SEQ ID NO: 84883):IGEMS (SEQ ID NO: 84209):NMQHNAXGXH (SEQ ID NO: 84600), KVGKAXXVPTKL (SEQ ID NO: 84780):SNIT-AA¹⁷-QIM (SEQ ID NO: 84883):IGEMS (SEQ ID NO: 84209):EGMSQHNXGXR (SEQ ID NO: 84634), KASKAXXVPTKL (SEQ ID NO: 84760):SNIT-AA¹⁷-QIM (SEQ ID NO: 84883):IGEMS (SEQ ID NO: 84209):GMQHNEXGXR (SEQ ID NO: 84554), GSAGPXXVPTKM (SEQ ID NO: 84730):SNIT-AA¹⁷-QIM (SEQ ID NO: 84883):IGEMS (SEQ ID NO: 84209):GMQHNRXGXS (SEQ ID NO: 84555), AAPASXXVPTRL (SEQ ID NO: 84680):SNIT-AA¹⁷-QIM (SEQ ID NO: 84883):IGEMS (SEQ ID NO: 84209):DMQHNAXGXR (SEQ ID NO: 84488), STPPTXXVPTRL (SEQ ID NO: 84850):SNIT-AA¹⁷-QIM (SEQ ID NO: 84883):IGEMS (SEQ ID NO: 84209):DMQHNSXGXR (SEQ ID NO: 84490), HVPKPXXVPTKL (SEQ ID NO: 84740):SNIT-AA¹⁷-QIM (SEQ ID NO: 84883):IGEMS (SEQ ID NO: 84209):NMQHNSXGXH (SEQ ID NO: 84602), RVPSTXXVPTKT (SEQ ID NO: 84820):SNIT-AA¹⁷-QIM (SEQ ID NO: 84883):IGEMS (SEQ ID NO: 84209):MIQHNXGXL (SEQ ID NO: 84442), ASAAPXXVPTAL (SEQ ID NO: 84690):SNIT-AA¹⁷-QIM (SEQ ID NO: 84883):IGEMS (SEQ ID NO: 84209):MIQHNXKXS (SEQ ID NO: 84443), ASASPXXVPTDL (SEQ ID NO: 84700):SNIT-AA¹⁷-QIM (SEQ ID NO: 84883):IGEMS (SEQ ID NO: 84209):MIQHNXKXS (SEQ ID NO: 84443), ASASPXXVPTDL (SEQ ID NO: 84700):SNIT-AA¹⁷-QIM (SEQ ID NO: 84883):IGEMS (SEQ ID NO: 84209):MVQHNXKXS (SEQ ID NO: 84466), NDEGLEXVPTGQ (SEQ ID NO: 84799):SNIT-AA¹⁷-QIM (SEQ ID NO: 84883):IGEMS (SEQ ID NO: 84209):LEQHNQXEXR (SEQ ID NO: 84578), NDEGLEXVPTEE (SEQ ID NO: 84798):SNIT-AA¹⁷-QIM (SEQ ID NO: 84883):IGEMS (SEQ ID NO: 84209):FLQHNKXEXR (SEQ ID NO: 84536), SSVKXQPVPTHH (SEQ ID NO: 84840):SNIT-AA¹⁷-QIM (SEQ ID NO: 84883):IGEMS (SEQ ID NO: 84209):RLQHNLEXAXA (SEQ ID NO: 84648), RNVQXRPVPTQL (SEQ ID NO: 84810):SNIT-AA¹⁷-QIM (SEQ ID NO: 84883):IGEMS (SEQ ID NO: 84209):TLQHNLAXKXE (SEQ ID NO: 84662), KIPKAXXVPTEL (SEQ ID NO: 84770):SNIT-AA¹⁷-QIM (SEQ ID NO: 84883):IGEMS (SEQ ID NO: 84209):DMVVEGXGXR (SEQ ID NO: 84510), GIPEPXXVPEKM (SEQ ID NO: 84718):SNIT-AA¹⁷-QIM (SEQ ID NO: 84883):IGEMS (SEQ ID NO: 84209):NMTVESXAXR (SEQ ID NO: 84604), SIPKAXXVPTEL (SEQ ID NO: 84830):SNIT-AA¹⁷-QIM (SEQ ID NO: 84883):IGEMS (SEQ ID NO: 84209):EMVVEGXGXR (SEQ ID NO: 84529), HVTKPTXAPTKL (SEQ ID NO: 84742):SNIT-AA¹⁷-QIM (SEQ ID NO: 84883):IGEMS (SEQ ID NO: 84209):NMVVRSXGXH (SEQ ID NO: 84629), YVPKPXXAPTKL (SEQ ID NO: 84864):SNIT-AA¹⁷-QIM (SEQ ID NO: 84883):IGEMS (SEQ ID NO: 84209):NMVVRSXGXH (SEQ ID NO: 84629), TVPKPXXAPTQL (SEQ ID NO: 84854):SNIT-AA¹⁷-QIM (SEQ ID NO: 84883):IGEMS (SEQ ID NO: 84209):NMVVRAXGXH (SEQ ID NO: 84627), AVPKAXXAPTKL (SEQ ID NO: 84704):SNIT-AA¹⁷-QIM (SEQ ID NO: 84883):IGEMS (SEQ ID NO: 84209):NMVVKAXGXH (SEQ ID NO: 84624), KVGKAXXVPTKL (SEQ ID NO: 84780):SNIT-AA¹⁷-QIM (SEQ ID NO: 84883):IGEMS (SEQ ID NO: 84209):EGMSVAEXGXR (SEQ ID NO: 84636), KASKAXXVPTKL (SEQ ID NO: 84760):SNIT-AA¹⁷-QIM (SEQ ID NO: 84883):IGEMS (SEQ ID NO: 84209):GMAVSEXGXR (SEQ ID NO: 84546), GSAGPXXTPTKM (SEQ ID NO: 84726):SNIT-AA¹⁷-QIM (SEQ ID NO: 84883):IGEMS (SEQ ID NO: 84209):GMVVDRXGXS (SEQ ID NO: 84567), AAPASXXVPARL (SEQ ID NO: 84677):SNIT-AA¹⁷-QIM (SEQ ID NO: 84883):IGEMS (SEQ ID NO: 84209):DMVVEAXGXR (SEQ ID NO: 84509), STPPTXXVPTRL (SEQ ID NO: 84850):SNIT-AA¹⁷-QIM (SEQ ID NO: 84883):IGEMS (SEQ ID NO: 84209):DMVVESXGXR (SEQ ID NO: 84511), HVPKPXXAPTKL (SEQ ID NO: 84734):SNIT-AA¹⁷-QIM (SEQ ID NO: 84883):IGEMS (SEQ ID NO: 84209):NMVVRSXGXH (SEQ ID NO: 84629), RVPSTXXAPVKT (SEQ ID NO: 84815):SNIT-AA¹⁷-QIM (SEQ ID NO: 84883):IGEMS (SEQ ID NO: 84209):MIVEEXGXL (SEQ ID NO: 84448), ASAAPXXVPQAL (SEQ ID NO: 84689):SNIT-AA¹⁷-QIM (SEQ ID NO: 84883):IGEMS (SEQ ID NO: 84209):MIVRSXKXS (SEQ ID NO: 84453), ASASPXXVSQDL (SEQ ID NO: 84701):SNIT-AA¹⁷-QIM (SEQ ID NO: 84883):IGEMS (SEQ ID NO: 84209):MIVKSXKXS (SEQ ID NO: 84451), ASASPXXVPQDL (SEQ ID NO: 84699):SNIT-AA¹⁷-QIM (SEQ ID NO: 84883):IGEMS (SEQ ID NO: 84209):MVVKSXKXS (SEQ ID NO: 84470), NDEGLEXVPTGQ (SEQ ID NO: 84799):SNIT-AA¹⁷-QIM (SEQ ID NO: 84883):IGEMS (SEQ ID NO: 84209):LEEHSQXEXR (SEQ ID NO: 84577), SSVKXQPSRVHH (SEQ ID NO: 84834):SNIT-AA¹⁷-QIM (SEQ ID NO: 84883):IGEMS (SEQ ID NO: 84209):RLEEHLEXAXA (SEQ ID NO: 84646), RNVQXRPTQVQL (SEQ ID NO: 84806):SNIT-AA¹⁷-QIM (SEQ ID NO: 84883):IGEMS (SEQ ID NO: 84209):TLEDHLAXKXE (SEQ ID NO: 84659), KIPKAXXVPTEL (SEQ ID NO: 84770):SNIT-AA¹⁷-QIM (SEQ ID NO: 84883):LGEMS (SEQ ID NO: 84228):DMEHXGXGSR (SEQ ID NO: 84487), GIPEPXXVPTKM (SEQ ID NO: 84720):SNIT-AA¹⁷-QIM (SEQ ID NO: 84883):LGEMS (SEQ ID NO: 84228):NMEHSSXAXR (SEQ ID NO: 84598), SIPKAXXVPTEL (SEQ ID NO: 84830):SNIT-AA¹⁷-QIM (SEQ ID NO: 84883):LGEMS (SEQ ID NO: 84228):EMEHXGXGSR (SEQ ID NO: 84521), HVTKPTXVPTKL (SEQ ID NO: 84750):SNIT-AA¹⁷-QIM (SEQ ID NO: 84883):LGEMS (SEQ ID NO: 84228):NMEHSSXGXH (SEQ ID NO: 84599), YVPKPXXVPTKL (SEQ ID NO: 84870):SNIT-AA¹⁷-QIM (SEQ ID NO: 84883):LGEMS (SEQ ID NO: 84228):NMEHSSXGXH (SEQ ID NO: 84599), TVPKPXXVPTQL (SEQ ID NO: 84860):SNIT-AA¹⁷-QIM (SEQ ID NO: 84883):LGEMS (SEQ ID NO: 84228):NMEHSAXGXH (SEQ ID NO: 84597), AVPKAXXVPTKL (SEQ ID NO: 84710):SNIT-AA¹⁷-QIM (SEQ ID NO: 84883):LGEMS (SEQ ID NO: 84228):NMEHSAXGXH (SEQ ID NO: 84597), KVGKAXXVPTKL (SEQ ID NO: 84780):SNIT-AA¹⁷-QIM (SEQ ID NO: 84883):LGEMS (SEQ ID NO: 84228):EGMSEHSXGXR (SEQ ID NO: 84633), KASKAXXVPTKL (SEQ ID NO: 84760):SNIT-AA¹⁷-QIM (SEQ ID NO: 84883):LGEMS (SEQ ID NO: 84228):GMEHSEXGXR (SEQ ID NO: 84552), GSAGPXXVPTKM (SEQ ID NO: 84730):SNIT-AA¹⁷-QIM (SEQ ID NO: 84883):LGEMS (SEQ ID NO: 84228):GMEHSRXGXS (SEQ ID NO: 84553), AAPASXXVPTRL (SEQ ID NO: 84680):SNIT-AA¹⁷-QIM (SEQ ID NO: 84883):LGEMS (SEQ ID NO: 84228):DMEHSAXGXR (SEQ ID NO: 84485), STPPTXXVPTRL (SEQ ID NO: 84850):SNIT-AA¹⁷-QIM (SEQ ID NO: 84883):LGEMS (SEQ ID NO: 84228):DMEHSSXGXR (SEQ ID NO: 84486), HVPKPXXVPTKL (SEQ ID NO: 84740):SNIT-AA¹⁷-QIM (SEQ ID NO: 84883):LGEMS (SEQ ID NO: 84228):NMEHSSXGXH (SEQ ID NO: 84599), RVPSTXXVPTKT (SEQ ID NO: 84820):SNIT-AA¹⁷-QIM (SEQ ID NO: 84883):LGEMS (SEQ ID NO: 84228):MIEHSXGXL (SEQ ID NO: 84440), ASAAPXXVPTAL (SEQ ID NO: 84690):SNIT-AA¹⁷-QIM (SEQ ID NO: 84883):LGEMS (SEQ ID NO: 84228):MIEHSXKXS (SEQ ID NO: 84441), ASASPXXVPTDL (SEQ ID NO: 84700):SNIT-AA¹⁷-QIM (SEQ ID NO: 84883):LGEMS (SEQ ID NO: 84228):MIEHSXKXS (SEQ ID NO: 84441), ASASPXXVPTDL (SEQ ID NO: 84700):SNIT-AA¹⁷-QIM (SEQ ID NO: 84883):LGEMS (SEQ ID NO: 84228):MVEHSXKXS (SEQ ID NO: 84465), NDEGLEXVPTEE (SEQ ID NO: 84798):SNIT-AA¹⁷-QIM (SEQ ID NO: 84883):LGEMS (SEQ ID NO: 84228):FLEHXKXESR (SEQ ID NO: 84535), SSVKXQPVPTHH (SEQ ID NO: 84840):SNIT-AA¹⁷-QIM (SEQ ID NO: 84883):LGEMS (SEQ ID NO: 84228):RLEHSLEXAXA (SEQ ID NO: 84647), RNVQXRPVPTQL (SEQ ID NO: 84810):SNIT-AA¹⁷-QIM (SEQ ID NO: 84883):LGEMS (SEQ ID NO: 84228):TLEHSLAXKXE (SEQ ID NO: 84661), KIPKAXXVPTEL (SEQ ID NO: 84770):SNIT-AA¹⁷-QIM (SEQ ID NO: 84883):LGEMS (SEQ ID NO: 84228):DMVVEGXGXR (SEQ ID NO: 84510), GIPEPXXVPEKM (SEQ ID NO: 84718):SNIT-AA¹⁷-QIM (SEQ ID NO: 84883):LGEMS (SEQ ID NO: 84228):NMTVESXAXR (SEQ ID NO: 84604), SIPKAXXVPTEL (SEQ ID NO: 84830):SNIT-AA¹⁷-QIM (SEQ ID NO: 84883):LGEMS (SEQ ID NO: 84228):EMVVEGXGXR (SEQ ID NO: 84529), HVTKPTXAPTKL (SEQ ID NO: 84742):SNIT-AA¹⁷-QIM (SEQ ID NO: 84883):LGEMS (SEQ ID NO: 84228):NMVVRSXGXH (SEQ ID NO: 84629), YVPKPXXAPTKL (SEQ ID NO: 84864):SNIT-AA¹⁷-QIM (SEQ ID NO: 84883):LGEMS (SEQ ID NO: 84228):NMVVRSXGXH (SEQ ID NO: 84629), TVPKPXXAPTQL (SEQ ID NO: 84854):SNIT-AA¹⁷-QIM (SEQ ID NO: 84883):LGEMS (SEQ ID NO: 84228):NMVVRAXGXH (SEQ ID NO: 84627), AVPKAXXAPTKL (SEQ ID NO: 84704):SNIT-AA¹⁷-QIM (SEQ ID NO: 84883):LGEMS (SEQ ID NO: 84228):NMVVKAXGXH (SEQ ID NO: 84624), KVGKAXXVPTKL (SEQ ID NO: 84780):SNIT-AA¹⁷-QIM (SEQ ID NO: 84883):LGEMS (SEQ ID NO: 84228):EGMSVAEXGXR (SEQ ID NO: 84636), KASKAXXVPTKL (SEQ ID NO: 84760):SNIT-AA¹⁷-QIM (SEQ ID NO: 84883):LGEMS (SEQ ID NO: 84228):GMAVSEXGXR (SEQ ID NO: 84546), GSAGPXXTPTKM (SEQ ID NO: 84726):SNIT-AA¹⁷-QIM (SEQ ID NO: 84883):LGEMS (SEQ ID NO: 84228):GMVVDRXGXS (SEQ ID NO: 84567), AAPASXXVPARL (SEQ ID NO: 84677):SNIT-AA¹⁷-QIM (SEQ ID NO: 84883):LGEMS (SEQ ID NO: 84228):DMVVEAXGXR (SEQ ID NO: 84509), STPPTXXVPTRL (SEQ ID NO: 84850):SNIT-AA¹⁷-QIM (SEQ ID NO: 84883):LGEMS (SEQ ID NO: 84228):DMVVESXGXR (SEQ ID NO: 84511), HVPKPXXAPTKL (SEQ ID NO: 84734):SNIT-AA¹⁷-QIM (SEQ ID NO: 84883):LGEMS (SEQ ID NO: 84228):NMVVRSXGXH (SEQ ID NO: 84629), RVPSTXXAPVKT (SEQ ID NO: 84815):SNIT-AA¹⁷-QIM (SEQ ID NO: 84883):LGEMS (SEQ ID NO: 84228):MIVEEXGXL (SEQ ID NO: 84448), ASAAPXXVPQAL (SEQ ID NO: 84689):SNIT-AA¹⁷-QIM (SEQ ID NO: 84883):LGEMS (SEQ ID NO: 84228):MIVRSXKXS (SEQ ID NO: 84453), ASASPXXVSQDL (SEQ ID NO: 84701):SNIT-AA¹⁷-QIM (SEQ ID NO: 84883):LGEMS (SEQ ID NO: 84228):MIVKSXKXS (SEQ ID NO: 84451), ASASPXXVPQDL (SEQ ID NO: 84699):SNIT-AA¹⁷-QIM (SEQ ID NO: 84883):LGEMS (SEQ ID NO: 84228):MVVKSXKXS (SEQ ID NO: 84470), NDEGLEXVPTEE (SEQ ID NO: 84798):SNIT-AA¹⁷-QIM (SEQ ID NO: 84883):LGEMS (SEQ ID NO: 84228):FLQHNKXEXR (SEQ ID NO: 84536), SSVKXQPSRVHH (SEQ ID NO: 84834):SNIT-AA¹⁷-QIM (SEQ ID NO: 84883):LGEMS (SEQ ID NO: 84228):RLEEHLEXAXA (SEQ ID NO: 84646), RNVQXRPTQVQL (SEQ ID NO: 84806):SNIT-AA¹⁷-QIM (SEQ ID NO: 84883):LGEMS (SEQ ID NO: 84228):TLEDHLAXKXE (SEQ ID NO: 84659), KIPKASSSRVEL (SEQ ID NO: 84762):RSVK-AA¹⁷-AKV (SEQ ID NO: 84880):KEVQV (SEQ ID NO: 84210):DMEEHGXGXR (SEQ ID NO: 84483), GIPEPXXSRVKM (SEQ ID NO: 84988):RSVK-AA¹⁷-AKV (SEQ ID NO: 84880):KEVQV (SEQ ID NO: 84210):NMEEHSXAXR (SEQ ID NO: 84595), SIPKASSSRVEL (SEQ ID NO: 84822):RSVK-AA¹⁷-AKV (SEQ ID NO: 84880):KEVQV (SEQ ID NO: 84210):EMEEHGXGXR (SEQ ID NO: 84520), HVTKPTSSRVKL (SEQ ID NO: 85017):RSVK-AA¹⁷-AKV (SEQ ID NO: 84880):KEVQV (SEQ ID NO: 84210):NMEEHSXGXH (SEQ ID NO: 84596), YVPKPXXSRVKL (SEQ ID NO: 84996):RSVK-AA¹⁷-AKV (SEQ ID NO: 84880):KEVQV (SEQ ID NO: 84210):NMEEHSXGXH (SEQ ID NO: 84596), TVPKPXXSRVQL (SEQ ID NO: 84994):RSVK-AA¹⁷-AKV (SEQ ID NO: 84880):KEVQV (SEQ ID NO: 84210):NMEEHAXGXH (SEQ ID NO: 84594), AVPKASSSRVKL (SEQ ID NO: 84702):RSVK-AA¹⁷-AKV (SEQ ID NO: 84880):KEVQV (SEQ ID NO: 84210):NMEEHAXGXH (SEQ ID NO: 84594), KVGKASSSRVKL (SEQ ID NO: 84772):RSVK-AA¹⁷-AKV (SEQ ID NO: 84880):KEVQV (SEQ ID NO: 84210):EGMSEEHXGXR (SEQ ID NO: 84632), KASKASSSRVKL (SEQ ID NO: 84752):RSVK-AA¹⁷-AKV (SEQ ID NO: 84880):KEVQV (SEQ ID NO: 84210):GMEEHEXGXR (SEQ ID NO: 84550), GSAGPXXSRVKM (SEQ ID NO: 84990):RSVK-AA¹⁷-AKV (SEQ ID NO: 84880):KEVQV (SEQ ID NO: 84210):GMEEHRXGXS (SEQ ID NO: 84551), AAPASSSSRVRL (SEQ ID NO: 84672):RSVK-AA¹⁷-AKV (SEQ ID NO: 84880):KEVQV (SEQ ID NO: 84210):DMEEHAXGXR (SEQ ID NO: 84482), STPPTSSSRVRL (SEQ ID NO: 84842):RSVK-AA¹⁷-AKV (SEQ ID NO: 84880):KEVQV (SEQ ID NO: 84210):DMEEHSXGXR (SEQ ID NO: 84484), HVPKPXXSRVKL (SEQ ID NO: 84992):RSVK-AA¹⁷-AKV (SEQ ID NO: 84880):KEVQV (SEQ ID NO: 84210):NMEEHSXGXH (SEQ ID NO: 84596), RVPSTSSSRVKT (SEQ ID NO: 84812):RSVK-AA¹⁷-AKV (SEQ ID NO: 84880):KEVQV (SEQ ID NO: 84210):MIEEHXGXL (SEQ ID NO: 84438), ASAAPXXSRVAL (SEQ ID NO: 84985):RSVK-AA¹⁷-AKV (SEQ ID NO: 84880):KEVQV (SEQ ID NO: 84210):MIEEHXKXS (SEQ ID NO: 84439), ASASPXXSRVDL (SEQ ID NO: 84987):RSVK-AA¹⁷-AKV (SEQ ID NO: 84880):KEVQV (SEQ ID NO: 84210):MIEEHXKXS (SEQ ID NO: 84439), ASASPXXSRVDL (SEQ ID NO: 84987):RSVK-AA¹⁷-AKV (SEQ ID NO: 84880):KEVQV (SEQ ID NO: 84210):MVEEHXKXS (SEQ ID NO: 84464), NDEGLESSRVEE (SEQ ID NO: 84786):RSVK-AA¹⁷-AKV (SEQ ID NO: 84880):KEVQV (SEQ ID NO: 84210):FLEEHKXEXR (SEQ ID NO: 84534), NDEGLESSRVGQ (SEQ ID NO: 84787):RSVK-AA¹⁷-AKV (SEQ ID NO: 84880):KEVQV (SEQ ID NO: 84210):LEEEHQXEXR (SEQ ID NO: 84576), RNVQXRPSRVQL (SEQ ID NO: 84804):RSVK-AA¹⁷-AKV (SEQ ID NO: 84880):KEVQV (SEQ ID NO: 84210):TLEEHLAXKXE (SEQ ID NO: 84660), KIPKAXXVPTEL (SEQ ID NO: 84770):RSVK-AA¹⁷-AKV (SEQ ID NO: 84880):KEVQV (SEQ ID NO: 84210):DMVVEGXGXR (SEQ ID NO: 84510), GIPEPXXVPEKM (SEQ ID NO: 84718):RSVK-AA¹⁷-AKV (SEQ ID NO: 84880):KEVQV (SEQ ID NO: 84210):NMTVESXAXR (SEQ ID NO: 84604), SIPKAXXVPTEL (SEQ ID NO: 84830):RSVK-AA¹⁷-AKV (SEQ ID NO: 84880):KEVQV (SEQ ID NO: 84210):EMVVEGXGXR (SEQ ID NO: 84529), HVTKPTXAPTKL (SEQ ID NO: 84742):RSVK-AA¹⁷-AKV (SEQ ID NO: 84880):KEVQV (SEQ ID NO: 84210):NMVVRSXGXH (SEQ ID NO: 84629), YVPKPXXAPTKL (SEQ ID NO: 84864):RSVK-AA¹⁷-AKV (SEQ ID NO: 84880):KEVQV (SEQ ID NO: 84210):NMVVRSXGXH (SEQ ID NO: 84629), TVPKPXXAPTQL (SEQ ID NO: 84854):RSVK-AA¹⁷-AKV (SEQ ID NO: 84880):KEVQV (SEQ ID NO: 84210):NMVVRAXGXH (SEQ ID NO: 84627), AVPKAXXAPTKL (SEQ ID NO: 84704):RSVK-AA¹⁷-AKV (SEQ ID NO: 84880):KEVQV (SEQ ID NO: 84210):NMVVKAXGXH (SEQ ID NO: 84624), KVGKAXXVPTKL (SEQ ID NO: 84780):RSVK-AA¹⁷-AKV (SEQ ID NO: 84880):KEVQV (SEQ ID NO: 84210):EGMSVAEXGXR (SEQ ID NO: 84636), KASKAXXVPTKL (SEQ ID NO: 84760):RSVK-AA¹⁷-AKV (SEQ ID NO: 84880):KEVQV (SEQ ID NO: 84210):GMAVSEXGXR (SEQ ID NO: 84546), GSAGPXXTPTKM (SEQ ID NO: 84726):RSVK-AA¹⁷-AKV (SEQ ID NO: 84880):KEVQV (SEQ ID NO: 84210):GMVVDRXGXS (SEQ ID NO: 84567), AAPASXXVPARL (SEQ ID NO: 84677):RSVK-AA¹⁷-AKV (SEQ ID NO: 84880):KEVQV (SEQ ID NO: 84210):DMVVEAXGXR (SEQ ID NO: 84509), STPPTXXVPTRL (SEQ ID NO: 84850):RSVK-AA¹⁷-AKV (SEQ ID NO: 84880):KEVQV (SEQ ID NO: 84210):DMVVESXGXR (SEQ ID NO: 84511), HVPKPXXAPTKL (SEQ ID NO: 84734):RSVK-AA¹⁷-AKV (SEQ ID NO: 84880):KEVQV (SEQ ID NO: 84210):NMVVRSXGXH (SEQ ID NO: 84629), RVPSTXXAPVKT (SEQ ID NO: 84815):RSVK-AA¹⁷-AKV (SEQ ID NO: 84880):KEVQV (SEQ ID NO: 84210):MIVEEXGXL (SEQ ID NO: 84448), ASAAPXXVPQAL (SEQ ID NO: 84689):RSVK-AA¹⁷-AKV (SEQ ID NO: 84880):KEVQV (SEQ ID NO: 84210):MIVRSXKXS (SEQ ID NO: 84453), ASASPXXVSQDL (SEQ ID NO: 84701):RSVK-AA¹⁷-AKV (SEQ ID NO: 84880):KEVQV (SEQ ID NO: 84210):MIVKSXKXS (SEQ ID NO: 84451), ASASPXXVPQDL (SEQ ID NO: 84699):RSVK-AA¹⁷-AKV (SEQ ID NO: 84880):KEVQV (SEQ ID NO: 84210):MVVKSXKXS (SEQ ID NO: 84470), NDEGLEXVPTEE (SEQ ID NO: 84798):RSVK-AA¹⁷-AKV (SEQ ID NO: 84880):KEVQV (SEQ ID NO: 84210):FLQHNKXEXR (SEQ ID NO: 84536), NDEGLEXVPTGQ (SEQ ID NO: 84799):RSVK-AA¹⁷-AKV (SEQ ID NO: 84880):KEVQV (SEQ ID NO: 84210):LEEHSQXEXR (SEQ ID NO: 84577), RNVQXRPTQVQL (SEQ ID NO: 84806):RSVK-AA¹⁷-AKV (SEQ ID NO: 84880):KEVQV (SEQ ID NO: 84210):TLEDHLAXKXE (SEQ ID NO: 84659), KIPKASSTQVEL (SEQ ID NO: 84763):RPVQ-AA¹⁷-RKI (SEQ ID NO: 84879):KKATV (SEQ ID NO: 84212):DMEDHGXGXR (SEQ ID NO: 84480), GIPEPXXTQVKM (SEQ ID NO: 84989):RPVQ-AA¹⁷-RKI (SEQ ID NO: 84879):KKATV (SEQ ID NO: 84212):NMEDHSXAXR (SEQ ID NO: 84592), SIPKASSTQVEL (SEQ ID NO: 84823):RPVQ-AA¹⁷-RKI (SEQ ID NO: 84879):KKATV (SEQ ID NO: 84212):EMEDHGXGXR (SEQ ID NO: 84519), HVTKPTSTQVKL (SEQ ID NO: 84998):RPVQ-AA¹⁷-RKI (SEQ ID NO: 84879):KKATV (SEQ ID NO: 84212):NMEDHSXGXH (SEQ ID NO: 84593), YVPKPXXTQVKL (SEQ ID NO: 84997):RPVQ-AA¹⁷-RKI (SEQ ID NO: 84879):KKATV (SEQ ID NO: 84212):NMEDHSXGXH (SEQ ID NO: 84593), TVPKPXXTQVQL (SEQ ID NO: 84995):RPVQ-AA¹⁷-RKI (SEQ ID NO: 84879):KKATV (SEQ ID NO: 84212):NMEDHAXGXH (SEQ ID NO: 84591), AVPKASSTQVKL (SEQ ID NO: 84703):RPVQ-AA¹⁷-RKI (SEQ ID NO: 84879):KKATV (SEQ ID NO: 84212):NMEDHAXGXH (SEQ ID NO: 84591), KVGKASSTQVKL (SEQ ID NO: 84773):RPVQ-AA¹⁷-RKI (SEQ ID NO: 84879):KKATV (SEQ ID NO: 84212):EGMSEDHXGXR (SEQ ID NO: 84631), KASKASSTQVKL (SEQ ID NO: 84753):RPVQ-AA¹⁷-RKI (SEQ ID NO: 84879):KKATV (SEQ ID NO: 84212):GMEDHEXGXR (SEQ ID NO: 84548), GSAGPXXTQVKM (SEQ ID NO: 84991):RPVQ-AA¹⁷-RKI (SEQ ID NO: 84879):KKATV (SEQ ID NO: 84212):GMEDHRXGXS (SEQ ID NO: 84549), AAPASSSTQVRL (SEQ ID NO: 84673):RPVQ-AA¹⁷-RKI (SEQ ID NO: 84879):KKATV (SEQ ID NO: 84212):DMEDHAXGXR (SEQ ID NO: 84479), STPPTSSTQVRL (SEQ ID NO: 84843):RPVQ-AA¹⁷-RKI (SEQ ID NO: 84879):KKATV (SEQ ID NO: 84212):DMEDHSXGXR (SEQ ID NO: 84481), HVPKPXXTQVKL (SEQ ID NO: 84993):RPVQ-AA¹⁷-RKI (SEQ ID NO: 84879):KKATV (SEQ ID NO: 84212):NMEDHSXGXH (SEQ ID NO: 84593), RVPSTSSTQVKT (SEQ ID NO: 84813):RPVQ-AA¹⁷-RKI (SEQ ID NO: 84879):KKATV (SEQ ID NO: 84212):MIEDHXGXL (SEQ ID NO: 84436), ASAAPXXTQVAL (SEQ ID NO: 84986):RPVQ-AA¹⁷-RKI (SEQ ID NO: 84879):KKATV (SEQ ID NO: 84212):MIEDHXKXS (SEQ ID NO: 84437), ASASPXXTQVDL:RPVQ-AA¹⁷-RKI (SEQ ID NO: 84879):KKATV (SEQ ID NO: 84212):MIEDHXKXS (SEQ ID NO: 84437), ASASPXXTQVDL:RPVQ-AA¹⁷-RKI (SEQ ID NO: 84879):KKATV (SEQ ID NO: 84212):MVEDHXKXS (SEQ ID NO: 84463), NDEGLESTQVEE (SEQ ID NO: 84790):RPVQ-AA¹⁷-RKI (SEQ ID NO: 84879):KKATV (SEQ ID NO: 84212):FLEDHKXEXR (SEQ ID NO: 84533), NDEGLESTQVGQ (SEQ ID NO: 84791):RPVQ-AA¹⁷-RKI (SEQ ID NO: 84879):KKATV (SEQ ID NO: 84212):LEEDHQXEXR (SEQ ID NO: 84575), SSVKXQPTQVHH (SEQ ID NO: 84836):RPVQ-AA¹⁷-RKI (SEQ ID NO: 84879):KKATV (SEQ ID NO: 84212):RLEDHLEXAXA (SEQ ID NO: 84645), KIPKAXXVPTEL (SEQ ID NO: 84770):RPVQ-AA¹⁷-RKI (SEQ ID NO: 84879):KKATV (SEQ ID NO: 84212):DMVVEGXGXR (SEQ ID NO: 84510), GIPEPXXVPEKM (SEQ ID NO: 84718):RPVQ-AA¹⁷-RKI (SEQ ID NO: 84879):KKATV (SEQ ID NO: 84212):NMTVESXAXR (SEQ ID NO: 84604), SIPKAXXVPTEL (SEQ ID NO: 84830):RPVQ-AA¹⁷-RKI (SEQ ID NO: 84879):KKATV (SEQ ID NO: 84212):EMVVEGXGXR (SEQ ID NO: 84529), HVTKPTXAPTKL (SEQ ID NO: 84742):RPVQ-AA¹⁷-RKI (SEQ ID NO: 84879):KKATV (SEQ ID NO: 84212):NMVVRSXGXH (SEQ ID NO: 84629), YVPKPXXAPTKL (SEQ ID NO: 84864):RPVQ-AA¹⁷-RKI (SEQ ID NO: 84879):KKATV (SEQ ID NO: 84212):NMVVRSXGXH (SEQ ID NO: 84629), TVPKPXXAPTQL (SEQ ID NO: 84854):RPVQ-AA¹⁷-RKI (SEQ ID NO: 84879):KKATV (SEQ ID NO: 84212):NMVVRAXGXH (SEQ ID NO: 84627), AVPKAXXAPTKL (SEQ ID NO: 84704):RPVQ-AA¹⁷-RKI (SEQ ID NO: 84879):KKATV (SEQ ID NO: 84212):NMVVKAXGXH (SEQ ID NO: 84624), KVGKAXXVPTKL (SEQ ID NO: 84780):RPVQ-AA¹⁷-RKI (SEQ ID NO: 84879):KKATV (SEQ ID NO: 84212):EGMSVAEXGXR (SEQ ID NO: 84636), KASKAXXVPTKL (SEQ ID NO: 84760):RPVQ-AA¹⁷-RKI (SEQ ID NO: 84879):KKATV (SEQ ID NO: 84212):GMAVSEXGXR (SEQ ID NO: 84546), GSAGPXXTPTKM (SEQ ID NO: 84726):RPVQ-AA¹⁷-RKI (SEQ ID NO: 84879):KKATV (SEQ ID NO: 84212):GMVVDRXGXS (SEQ ID NO: 84567), AAPASXXVPARL (SEQ ID NO: 84677):RPVQ-AA¹⁷-RKI (SEQ ID NO: 84879):KKATV (SEQ ID NO: 84212):DMVVEAXGXR (SEQ ID NO: 84509), STPPTXXVPTRL (SEQ ID NO: 84850):RPVQ-AA¹⁷-RKI (SEQ ID NO: 84879):KKATV (SEQ ID NO: 84212):DMVVESXGXR (SEQ ID NO: 84511), HVPKPXXAPTKL (SEQ ID NO: 84734):RPVQ-AA¹⁷-RKI (SEQ ID NO: 84879):KKATV (SEQ ID NO: 84212):NMVVRSXGXH (SEQ ID NO: 84629), RVPSTXXAPVKT (SEQ ID NO: 84815):RPVQ-AA¹⁷-RKI (SEQ ID NO: 84879):KKATV (SEQ ID NO: 84212):MIVEEXGXL (SEQ ID NO: 84448), ASAAPXXVPQAL (SEQ ID NO: 84689):RPVQ-AA¹⁷-RKI (SEQ ID NO: 84879):KKATV (SEQ ID NO: 84212):MIVRSXKXS (SEQ ID NO: 84453), ASASPXXVSQDL (SEQ ID NO: 84701):RPVQ-AA¹⁷-RKI (SEQ ID NO: 84879):KKATV (SEQ ID NO: 84212):MIVKSXKXS (SEQ ID NO: 84451), ASASPXXVPQDL (SEQ ID NO: 84699):RPVQ-AA¹⁷-RKI (SEQ ID NO: 84879):KKATV (SEQ ID NO: 84212):MVVKSXKXS (SEQ ID NO: 84470), NDEGLEXVPTEE (SEQ ID NO: 84798):RPVQ-AA¹⁷-RKI (SEQ ID NO: 84879):KKATV (SEQ ID NO: 84212):FLQHNKXEXR (SEQ ID NO: 84536), NDEGLEXVPTGQ (SEQ ID NO: 84799):RPVQ-AA¹⁷-RKI (SEQ ID NO: 84879):KKATV (SEQ ID NO: 84212):LEEHSQXEXR (SEQ ID NO: 84577) and SSVKXQPSRVHH (SEQ ID NO: 84834):RPVQ-AA¹⁷-RKI (SEQ ID NO: 84879):KKATV (SEQ ID NO: 84212):RLEEHLEXAXA (SEQ ID NO: 84646); and wherein AA¹⁷ is selected from the group consisting of G, A, V, L, I, P, F, M, W, T and S (in particular is selected from the group consisting of M, I, L, V and T). More particularly, the quadruplet PEP9:PEP12:PEP2:PEP10 is selected from the group consisting of GIPEPXXVPTKM (SEQ ID NO: 84720):SAIS-AA¹⁷-LYL (SEQ ID NO: 84881):LKNYQ (SEQ ID NO: 84230):NMVVESXAXR (SEQ ID NO: 84622), HVTKPTXVPTKL (SEQ ID NO: 84750):SAIS-AA¹⁷-LYL (SEQ ID NO: 84881):LKNYQ (SEQ ID NO: 84230):NMVVESXGXH (SEQ ID NO: 84623), YVPKPXXVPTKL (SEQ ID NO: 84870):SAIS-AA¹⁷-LYL (SEQ ID NO: 84881):LKNYQ (SEQ ID NO: 84230):NMVVESXGXH (SEQ ID NO: 84623), TVPKPXXVPTQL (SEQ ID NO: 84860):SAIS-AA¹⁷-LYL (SEQ ID NO: 84881):LKNYQ (SEQ ID NO: 84230):NMVVEAXGXH (SEQ ID NO: 84621), AVPKAXXVPTKL (SEQ ID NO: 84710):SAIS-AA¹⁷-LYL (SEQ ID NO: 84881):LKNYQ (SEQ ID NO: 84230):NMVVEAXGXH (SEQ ID NO: 84621), KVGKAXXVPTKL (SEQ ID NO: 84780):SAIS-AA¹⁷-LYL (SEQ ID NO: 84881):LKNYQ (SEQ ID NO: 84230):EGMSVVEXGXR (SEQ ID NO: 84641), KASKAXXVPTKL (SEQ ID NO: 84760):SAIS-AA¹⁷-LYL (SEQ ID NO: 84881):LKNYQ (SEQ ID NO: 84230):GMVVEEXGXR (SEQ ID NO: 84568), GSAGPXXVPTKM (SEQ ID NO: 84730):SAIS-AA¹⁷-LYL (SEQ ID NO: 84881):LKNYQ (SEQ ID NO: 84230):GMVVERXGXS (SEQ ID NO: 84569), AAPASXXVPTRL (SEQ ID NO: 84680):SAIS-AA¹⁷-LYL (SEQ ID NO: 84881):LKNYQ (SEQ ID NO: 84230):DMVVEAXGXR (SEQ ID NO: 84509), STPPTXXVPTRL (SEQ ID NO: 84850):SAIS-AA¹⁷-LYL (SEQ ID NO: 84881):LKNYQ (SEQ ID NO: 84230):DMVVESXGXR (SEQ ID NO: 84511), HVPKPXXVPTKL (SEQ ID NO: 84740):SAIS-AA¹⁷-LYL (SEQ ID NO: 84881):LKNYQ (SEQ ID NO: 84230):NMVVESXGXH (SEQ ID NO: 84623), RVPSTXXVPTKT (SEQ ID NO: 84820):SAIS-AA¹⁷-LYL (SEQ ID NO: 84881):LKNYQ (SEQ ID NO: 84230):MIVVEXGXL (SEQ ID NO: 84456), ASAAPXXVPTAL (SEQ ID NO: 84690):SAIS-AA¹⁷-LYL (SEQ ID NO: 84881):LKNYQ (SEQ ID NO: 84230):MIVVEXKXS (SEQ ID NO: 84457), ASASPXXVPTDL (SEQ ID NO: 84700):SAIS-AA¹⁷-LYL (SEQ ID NO: 84881):LKNYQ (SEQ ID NO: 84230):MIVVEXKXS (SEQ ID NO: 84457), ASASPXXVPTDL (SEQ ID NO: 84700):SAIS-AA¹⁷-LYL (SEQ ID NO: 84881):LKNYQ (SEQ ID NO: 84230):MVVVEXKXS (SEQ ID NO: 84473), GIPEPXXVPEKM (SEQ ID NO: 84718):SAIS-AA¹⁷-LYL (SEQ ID NO: 84881):LKNYQ (SEQ ID NO: 84230):NMTVESXAXR (SEQ ID NO: 84604), HVTKPTXAPTKL (SEQ ID NO: 84742):SAIS-AA¹⁷-LYL (SEQ ID NO: 84881):LKNYQ (SEQ ID NO: 84230):NMVVRSXGXH (SEQ ID NO: 84629), YVPKPXXAPTKL (SEQ ID NO: 84864):SAIS-AA¹⁷-LYL (SEQ ID NO: 84881):LKNYQ (SEQ ID NO: 84230):NMVVRSXGXH (SEQ ID NO: 84629), TVPKPXXAPTQL (SEQ ID NO: 84854):SAIS-AA¹⁷-LYL (SEQ ID NO: 84881):LKNYQ (SEQ ID NO: 84230):NMVVRAXGXH (SEQ ID NO: 84627), AVPKAXXAPTKL (SEQ ID NO: 84704):SAIS-AA¹⁷-LYL (SEQ ID NO: 84881):LKNYQ (SEQ ID NO: 84230):NMVVKAXGXH (SEQ ID NO: 84624), KVGKAXXVPTKL (SEQ ID NO: 84780):SAIS-AA¹⁷-LYL (SEQ ID NO: 84881):LKNYQ (SEQ ID NO: 84230):EGMSVAEXGXR (SEQ ID NO: 84636), KASKAXXVPTKL (SEQ ID NO: 84760):SAIS-AA¹⁷-LYL (SEQ ID NO: 84881):LKNYQ (SEQ ID NO: 84230):GMAVSEXGXR (SEQ ID NO: 84546), GSAGPXXTPTKM (SEQ ID NO: 84726):SAIS-AA¹⁷-LYL (SEQ ID NO: 84881):LKNYQ (SEQ ID NO: 84230):GMVVDRXGXS (SEQ ID NO: 84567), AAPASXXVPARL (SEQ ID NO: 84677):SAIS-AA¹⁷-LYL (SEQ ID NO: 84881):LKNYQ (SEQ ID NO: 84230):DMVVEAXGXR (SEQ ID NO: 84509), HVPKPXXAPTKL (SEQ ID NO: 84734):SAIS-AA¹⁷-LYL (SEQ ID NO: 84881):LKNYQ (SEQ ID NO: 84230):NMVVRSXGXH (SEQ ID NO: 84629), RVPSTXXAPVKT (SEQ ID NO: 84815):SAIS-AA¹⁷-LYL (SEQ ID NO: 84881):LKNYQ (SEQ ID NO: 84230):MIVEEXGXL (SEQ ID NO: 84448), ASAAPXXVPQAL (SEQ ID NO: 84689):SAIS-AA¹⁷-LYL (SEQ ID NO: 84881):LKNYQ (SEQ ID NO: 84230):MIVRSXKXS (SEQ ID NO: 84453), ASASPXXVSQDL (SEQ ID NO: 84701):SAIS-AA¹⁷-LYL (SEQ ID NO: 84881):LKNYQ (SEQ ID NO: 84230):MIVKSXKXS (SEQ ID NO: 84451), ASASPXXVPQDL (SEQ ID NO: 84699):SAIS-AA¹⁷-LYL (SEQ ID NO: 84881):LKNYQ (SEQ ID NO: 84230):MVVKSXKXS (SEQ ID NO: 84470), NDEGLEXVPTEE (SEQ ID NO: 84798):SAIS-AA¹⁷-LYL (SEQ ID NO: 84881):LKNYQ (SEQ ID NO: 84230):FLQHNKXEXR (SEQ ID NO: 84536), NDEGLEXVPTGQ (SEQ ID NO: 84799):SAIS-AA¹⁷-LYL (SEQ ID NO: 84881):LKNYQ (SEQ ID NO: 84230):LEEHSQXEXR (SEQ ID NO: 84577), SSVKXQPSRVHH (SEQ ID NO: 84834):SAIS-AA¹⁷-LYL (SEQ ID NO: 84881):LKNYQ (SEQ ID NO: 84230):RLEEHLEXAXA (SEQ ID NO: 84646), RNVQXRPTQVQL (SEQ ID NO: 84806):SAIS-AA¹⁷-LYL (SEQ ID NO: 84881):LKNYQ (SEQ ID NO: 84230):TLEDHLAXKXE (SEQ ID NO: 84659), KIPKAXXVPEEL (SEQ ID NO: 84768):SSLS-AA¹⁷-LFF (SEQ ID NO: 84889):LKVYP (SEQ ID NO: 84231):DMTVEGXGXR (SEQ ID NO: 84492), SIPKAXXVPEEL (SEQ ID NO: 84828):SSLS-AA¹⁷-LFF (SEQ ID NO: 84889):LKVYP (SEQ ID NO: 84231):EMTVEGXGXR (SEQ ID NO: 84523), HVTKPTXVPEKL (SEQ ID NO: 84748):SSLS-AA¹⁷-LFF (SEQ ID NO: 84889):LKVYP (SEQ ID NO: 84231):NMTVESXGXH (SEQ ID NO: 84605), YVPKPXXVPEKL (SEQ ID NO: 84868):SSLS-AA¹⁷-LFF (SEQ ID NO: 84889):LKVYP (SEQ ID NO: 84231):NMTVESXGXH (SEQ ID NO: 84605), TVPKPXXVPEQL (SEQ ID NO: 84858):SSLS-AA¹⁷-LFF (SEQ ID NO: 84889):LKVYP (SEQ ID NO: 84231):NMTVEAXGXH (SEQ ID NO: 84603), AVPKAXXVPEKL (SEQ ID NO: 84708):SSLS-AA¹⁷-LFF (SEQ ID NO: 84889):LKVYP (SEQ ID NO: 84231):NMTVEAXGXH (SEQ ID NO: 84603), KVGKAXXVPEKL (SEQ ID NO: 84778):SSLS-AA¹⁷-LFF (SEQ ID NO: 84889):LKVYP (SEQ ID NO: 84231):EGMSTVEXGXR (SEQ ID NO: 84635), KASKAXXVPEKL (SEQ ID NO: 84758):SSLS-AA¹⁷-LFF (SEQ ID NO: 84889):LKVYP (SEQ ID NO: 84231):GMTVEEXGXR (SEQ ID NO: 84556), GSAGPXXVPEKM (SEQ ID NO: 84728):SSLS-AA¹⁷-LFF (SEQ ID NO: 84889):LKVYP (SEQ ID NO: 84231):GMTVERXGXS (SEQ ID NO: 84557), AAPASXXVPERL (SEQ ID NO: 84678):SSLS-AA¹⁷-LFF (SEQ ID NO: 84889):LKVYP (SEQ ID NO: 84231):DMTVEAXGXR (SEQ ID NO: 84491), STPPTXXVPERL (SEQ ID NO: 84848):SSLS-AA¹⁷-LFF (SEQ ID NO: 84889):LKVYP (SEQ ID NO: 84231):DMTVESXGXR (SEQ ID NO: 84493), HVPKPXXVPEKL (SEQ ID NO: 84738):SSLS-AA¹⁷-LFF (SEQ ID NO: 84889):LKVYP (SEQ ID NO: 84231):NMTVESXGXH (SEQ ID NO: 84605), RVPSTXXVPEKT (SEQ ID NO: 84818):SSLS-AA¹⁷-LFF (SEQ ID NO: 84889):LKVYP (SEQ ID NO: 84231):MITVEXGXL (SEQ ID NO: 84444), ASAAPXXVPEAL (SEQ ID NO: 84688):SSLS-AA¹⁷-LFF (SEQ ID NO: 84889):LKVYP (SEQ ID NO: 84231):MITVEXKXS (SEQ ID NO: 84445), ASASPXXVPEDL (SEQ ID NO: 84698):SSLS-AA¹⁷-LFF (SEQ ID NO: 84889):LKVYP (SEQ ID NO: 84231):MITVEXKXS (SEQ ID NO: 84445), ASASPXXVPEDL (SEQ ID NO: 84698):SSLS-AA¹⁷-LFF (SEQ ID NO: 84889):LKVYP (SEQ ID NO: 84231):MVTVEXKXS (SEQ ID NO: 84467), KIPKAXXVPTEL (SEQ ID NO: 84770):SSLS-AA¹⁷-LFF (SEQ ID NO: 84889):LKVYP (SEQ ID NO: 84231):DMVVEGXGXR (SEQ ID NO: 84510), SIPKAXXVPTEL (SEQ ID NO: 84830):SSLS-AA¹⁷-LFF (SEQ ID NO: 84889):LKVYP (SEQ ID NO: 84231):EMVVEGXGXR (SEQ ID NO: 84529), HVTKPTXAPTKL (SEQ ID NO: 84742):SSLS-AA¹⁷-LFF (SEQ ID NO: 84889):LKVYP (SEQ ID NO: 84231):NMVVRSXGXH (SEQ ID NO: 84629), YVPKPXXAPTKL (SEQ ID NO: 84864):SSLS-AA¹⁷-LFF (SEQ ID NO: 84889):LKVYP (SEQ ID NO: 84231):NMVVRSXGXH (SEQ ID NO: 84629), TVPKPXXAPTQL (SEQ ID NO: 84854):SSLS-AA¹⁷-LFF (SEQ ID NO: 84889):LKVYP (SEQ ID NO: 84231):NMVVRAXGXH (SEQ ID NO: 84627), AVPKAXXAPTKL (SEQ ID NO: 84704):SSLS-AA¹⁷-LFF (SEQ ID NO: 84889):LKVYP (SEQ ID NO: 84231):NMVVKAXGXH (SEQ ID NO: 84624), KVGKAXXVPTKL (SEQ ID NO: 84780):SSLS-AA¹⁷-LFF (SEQ ID NO: 84889):LKVYP (SEQ ID NO: 84231):EGMSVAEXGXR (SEQ ID NO: 84636), KASKAXXVPTKL (SEQ ID NO: 84760):SSLS-AA¹⁷-LFF (SEQ ID NO: 84889):LKVYP (SEQ ID NO: 84231):GMAVSEXGXR (SEQ ID NO: 84546), GSAGPXXTPTKM (SEQ ID NO: 84726):SSLS-AA¹⁷-LFF (SEQ ID NO: 84889):LKVYP (SEQ ID NO: 84231):GMVVDRXGXS (SEQ ID NO: 84567), AAPASXXVPARL (SEQ ID NO: 84677):SSLS-AA¹⁷-LFF (SEQ ID NO: 84889):LKVYP (SEQ ID NO: 84231):DMVVEAXGXR (SEQ ID NO: 84509), STPPTXXVPTRL (SEQ ID NO: 84850):SSLS-AA¹⁷-LFF (SEQ ID NO: 84889):LKVYP (SEQ ID NO: 84231):DMVVESXGXR (SEQ ID NO: 84511), HVPKPXXAPTKL (SEQ ID NO: 84734):SSLS-AA¹⁷-LFF (SEQ ID NO: 84889):LKVYP (SEQ ID NO: 84231):NMVVRSXGXH (SEQ ID NO: 84629), RVPSTXXAPVKT (SEQ ID NO: 84815):SSLS-AA¹⁷-LFF (SEQ ID NO: 84889):LKVYP (SEQ ID NO: 84231):MIVEEXGXL (SEQ ID NO: 84448), ASAAPXXVPQAL (SEQ ID NO: 84689):SSLS-AA¹⁷-LFF (SEQ ID NO: 84889):LKVYP (SEQ ID NO: 84231):MIVRSXKXS (SEQ ID NO: 84453), ASASPXXVSQDL (SEQ ID NO: 84701):SSLS-AA¹⁷-LFF (SEQ ID NO: 84889):LKVYP (SEQ ID NO: 84231):MIVKSXKXS (SEQ ID NO: 84451), ASASPXXVPQDL (SEQ ID NO: 84699):SSLS-AA¹⁷-LFF (SEQ ID NO: 84889):LKVYP (SEQ ID NO: 84231):MVVKSXKXS (SEQ ID NO: 84470), NDEGLEXVPTEE (SEQ ID NO: 84798):SSLS-AA¹⁷-LFF (SEQ ID NO: 84889):LKVYP (SEQ ID NO: 84231):FLQHNKXEXR (SEQ ID NO: 84536), NDEGLEXVPTGQ (SEQ ID NO: 84799):SSLS-AA¹⁷-LFF (SEQ ID NO: 84889):LKVYP (SEQ ID NO: 84231):LEEHSQXEXR (SEQ ID NO: 84577), SSVKXQPSRVHH (SEQ ID NO: 84834):SSLS-AA¹⁷-LFF (SEQ ID NO: 84889):LKVYP (SEQ ID NO: 84231):RLEEHLEXAXA (SEQ ID NO: 84646), RNVQXRPTQVQL (SEQ ID NO: 84806):SSLS-AA¹⁷-LFF (SEQ ID NO: 84889):LKVYP (SEQ ID NO: 84231):TLEDHLAXKXE (SEQ ID NO: 84659), KIPKAXXAPTEL (SEQ ID NO: 84764):NAIS-AA¹⁷-LYF (SEQ ID NO: 84878):LKKYR (SEQ ID NO: 84229):DMVVRGXGXR (SEQ ID NO: 84516), GIPEPXXAPTKM (SEQ ID NO: 84714):NAIS-AA¹⁷-LYF (SEQ ID NO: 84878):LKKYR (SEQ ID NO: 84229):NMVVRSXAXR (SEQ ID NO: 84628), SIPKAXXAPTEL (SEQ ID NO: 84824):NAIS-AA¹⁷-LYF (SEQ ID NO: 84878):LKKYR (SEQ ID NO: 84229):EMVVRGXGXR (SEQ ID NO: 84531), AVPKAXXAPTKL (SEQ ID NO: 84704):NAIS-AA¹⁷-LYF (SEQ ID NO: 84878):LKKYR (SEQ ID NO: 84229):NMVVRAXGXH (SEQ ID NO: 84627), KVGKAXXAPTKL (SEQ ID NO: 84774):NAIS-AA¹⁷-LYF (SEQ ID NO: 84878):LKKYR (SEQ ID NO: 84229):EGMSVVRXGXR (SEQ ID NO: 84643), KASKAXXAPTKL (SEQ ID NO: 84754):NAIS-AA¹⁷-LYF (SEQ ID NO: 84878):LKKYR (SEQ ID NO: 84229):GMVVREXGXR (SEQ ID NO: 84572), GSAGPXXAPTKM (SEQ ID NO: 84724):NAIS-AA¹⁷-LYF (SEQ ID NO: 84878):LKKYR (SEQ ID NO: 84229):GMVVRRXGXS (SEQ ID NO: 84573), AAPASXXAPTRL (SEQ ID NO: 84674):NAIS-AA¹⁷-LYF (SEQ ID NO: 84878):LKKYR (SEQ ID NO: 84229):DMVVRAXGXR (SEQ ID NO: 84515), STPPTXXAPTRL (SEQ ID NO: 84844):NAIS-AA¹⁷-LYF (SEQ ID NO: 84878):LKKYR (SEQ ID NO: 84229):DMVVRSXGXR (SEQ ID NO: 84517), RVPSTXXAPTKT (SEQ ID NO: 84814):NAIS-AA¹⁷-LYF (SEQ ID NO: 84878):LKKYR (SEQ ID NO: 84229):MIVVRXGXL (SEQ ID NO: 84460), ASAAPXXAPTAL (SEQ ID NO: 84684):NAIS-AA¹⁷-LYF (SEQ ID NO: 84878):LKKYR (SEQ ID NO: 84229):MIVVRXKXS (SEQ ID NO: 84461), ASASPXXAPTDL (SEQ ID NO: 84694):NAIS-AA¹⁷-LYF (SEQ ID NO: 84878):LKKYR (SEQ ID NO: 84229):MIVVRXKXS (SEQ ID NO: 84461), ASASPXXAPTDL (SEQ ID NO: 84694):NAIS-AA¹⁷-LYF (SEQ ID NO: 84878):LKKYR (SEQ ID NO: 84229):MVVVRXKXS (SEQ ID NO: 84475), KIPKAXXVPTEL (SEQ ID NO: 84770):NAIS-AA¹⁷-LYF (SEQ ID NO: 84878):LKKYR (SEQ ID NO: 84229):DMVVEGXGXR (SEQ ID NO: 84510), GIPEPXXVPEKM (SEQ ID NO: 84718):NAIS-AA¹⁷-LYF (SEQ ID NO: 84878):LKKYR (SEQ ID NO: 84229):NMTVESXAXR (SEQ ID NO: 84604), SIPKAXXVPTEL (SEQ ID NO: 84830):NAIS-AA¹⁷-LYF (SEQ ID NO: 84878):LKKYR (SEQ ID NO: 84229):EMVVEGXGXR (SEQ ID NO: 84529), AVPKAXXAPTKL (SEQ ID NO: 84704):NAIS-AA¹⁷-LYF (SEQ ID NO: 84878):LKKYR (SEQ ID NO: 84229):NMVVKAXGXH (SEQ ID NO: 84624), KVGKAXXVPTKL (SEQ ID NO: 84780):NAIS-AA¹⁷-LYF (SEQ ID NO: 84878):LKKYR (SEQ ID NO: 84229):EGMSVAEXGXR (SEQ ID NO: 84636), KASKAXXVPTKL (SEQ ID NO: 84760):NAIS-AA¹⁷-LYF (SEQ ID NO: 84878):LKKYR (SEQ ID NO: 84229):GMAVSEXGXR (SEQ ID NO: 84546), GSAGPXXTPTKM (SEQ ID NO: 84726):NAIS-AA¹⁷-LYF (SEQ ID NO: 84878):LKKYR (SEQ ID NO: 84229):GMVVDRXGXS (SEQ ID NO: 84567), AAPASXXVPARL (SEQ ID NO: 84677):NAIS-AA¹⁷-LYF (SEQ ID NO: 84878):LKKYR (SEQ ID NO: 84229):DMVVEAXGXR (SEQ ID NO: 84509), STPPTXXVPTRL (SEQ ID NO: 84850):NAIS-AA¹⁷-LYF (SEQ ID NO: 84878):LKKYR (SEQ ID NO: 84229):DMVVESXGXR (SEQ ID NO: 84511), RVPSTXXAPVKT (SEQ ID NO: 84815):NAIS-AA¹⁷-LYF (SEQ ID NO: 84878):LKKYR (SEQ ID NO: 84229):MIVEEXGXL (SEQ ID NO: 84448), ASAAPXXVPQAL (SEQ ID NO: 84689):NAIS-AA¹⁷-LYF (SEQ ID NO: 84878):LKKYR (SEQ ID NO: 84229):MIVRSXKXS (SEQ ID NO: 84453), ASASPXXVSQDL (SEQ ID NO: 84701):NAIS-AA¹⁷-LYF (SEQ ID NO: 84878):LKKYR (SEQ ID NO: 84229):MIVKSXKXS (SEQ ID NO: 84451), ASASPXXVPQDL (SEQ ID NO: 84699):NAIS-AA¹⁷-LYF (SEQ ID NO: 84878):LKKYR (SEQ ID NO: 84229):MVVKSXKXS (SEQ ID NO: 84470), NDEGLEXVPTEE (SEQ ID NO: 84798):NAIS-AA¹⁷-LYF (SEQ ID NO: 84878):LKKYR (SEQ ID NO: 84229):FLQHNKXEXR (SEQ ID NO: 84536), NDEGLEXVPTGQ (SEQ ID NO: 84799):NAIS-AA¹⁷-LYF (SEQ ID NO: 84878):LKKYR (SEQ ID NO: 84229):LEEHSQXEXR (SEQ ID NO: 84577), SSVKXQPSRVHH (SEQ ID NO: 84834):NAIS-AA¹⁷-LYF (SEQ ID NO: 84878):LKKYR (SEQ ID NO: 84229):RLEEHLEXAXA (SEQ ID NO: 84646), RNVQXRPTQVQL (SEQ ID NO: 84806):NAIS-AA¹⁷-LYF (SEQ ID NO: 84878):LKKYR (SEQ ID NO: 84229):TLEDHLAXKXE (SEQ ID NO: 84659), KIPKAXXAPTEL (SEQ ID NO: 84764):SATS-AA¹⁷-LYY (SEQ ID NO: 84882):LRKHR (SEQ ID NO: 84233):DMVVKGXGXR (SEQ ID NO: 84513), GIPEPXXAPTKM (SEQ ID NO: 84714):SATS-AA¹⁷-LYY (SEQ ID NO: 84882):LRKHR (SEQ ID NO: 84233):NMVVKSXAXR (SEQ ID NO: 84625), SIPKAXXAPTEL (SEQ ID NO: 84824):SATS-AA¹⁷-LYY (SEQ ID NO: 84882):LRKHR (SEQ ID NO: 84233):EMVVKGXGXR (SEQ ID NO: 84530), HVTKPTXAPTKL (SEQ ID NO: 84742):SATS-AA¹⁷-LYY (SEQ ID NO: 84882):LRKHR (SEQ ID NO: 84233):NMVVKSXGXH (SEQ ID NO: 84626), YVPKPXXAPTKL (SEQ ID NO: 84864):SATS-AA¹⁷-LYY (SEQ ID NO: 84882):LRKHR (SEQ ID NO: 84233):NMVVKSXGXH (SEQ ID NO: 84626), TVPKPXXAPTQL (SEQ ID NO: 84854):SATS-AA¹⁷-LYY (SEQ ID NO: 84882):LRKHR (SEQ ID NO: 84233):NMVVKAXGXH (SEQ ID NO: 84624), KVGKAXXAPTKL (SEQ ID NO: 84774):SATS-AA¹⁷-LYY (SEQ ID NO: 84882):LRKHR (SEQ ID NO: 84233):EGMSVVKXGXR (SEQ ID NO: 84642), KASKAXXAPTKL (SEQ ID NO: 84754):SATS-AA¹⁷-LYY (SEQ ID NO: 84882):LRKHR (SEQ ID NO: 84233):GMVVKEXGXR (SEQ ID NO: 84570), GSAGPXXAPTKM (SEQ ID NO: 84724):SATS-AA¹⁷-LYY (SEQ ID NO: 84882):LRKHR (SEQ ID NO: 84233):GMVVKRXGXS (SEQ ID NO: 84571), AAPASXXAPTRL (SEQ ID NO: 84674):SATS-AA¹⁷-LYY (SEQ ID NO: 84882):LRKHR (SEQ ID NO: 84233):DMVVKAXGXR (SEQ ID NO: 84512), STPPTXXAPTRL (SEQ ID NO: 84844):SATS-AA¹⁷-LYY (SEQ ID NO: 84882):LRKHR (SEQ ID NO: 84233):DMVVKSXGXR (SEQ ID NO: 84514), HVPKPXXAPTKL (SEQ ID NO: 84734):SATS-AA¹⁷-LYY (SEQ ID NO: 84882):LRKHR (SEQ ID NO: 84233):NMVVKSXGXH (SEQ ID NO: 84626), RVPSTXXAPTKT (SEQ ID NO: 84814):SATS-AA¹⁷-LYY (SEQ ID NO: 84882):LRKHR (SEQ ID NO: 84233):MIVVKXGXL (SEQ ID NO: 84458), ASAAPXXAPTAL (SEQ ID NO: 84684):SATS-AA¹⁷-LYY (SEQ ID NO: 84882):LRKHR (SEQ ID NO: 84233):MIVVKXKXS (SEQ ID NO: 84459), ASASPXXAPTDL (SEQ ID NO: 84694):SATS-AA¹⁷-LYY (SEQ ID NO: 84882):LRKHR (SEQ ID NO: 84233):MIVVKXKXS (SEQ ID NO: 84459), ASASPXXAPTDL (SEQ ID NO: 84694):SATS-AA¹⁷-LYY (SEQ ID NO: 84882):LRKHR (SEQ ID NO: 84233):MVVVKXKXS (SEQ ID NO: 84474), KIPKAXXVPTEL (SEQ ID NO: 84770):SATS-AA¹⁷-LYY (SEQ ID NO: 84882):LRKHR (SEQ ID NO: 84233):DMVVEGXGXR (SEQ ID NO: 84510), GIPEPXXVPEKM (SEQ ID NO: 84718):SATS-AA¹⁷-LYY (SEQ ID NO: 84882):LRKHR (SEQ ID NO: 84233):NMTVESXAXR (SEQ ID NO: 84604), SIPKAXXVPTEL (SEQ ID NO: 84830):SATS-AA¹⁷-LYY (SEQ ID NO: 84882):LRKHR (SEQ ID NO: 84233):EMVVEGXGXR (SEQ ID NO: 84529), HVTKPTXAPTKL (SEQ ID NO: 84742):SATS-AA¹⁷-LYY (SEQ ID NO: 84882):LRKHR (SEQ ID NO: 84233):NMVVRSXGXH (SEQ ID NO: 84629), YVPKPXXAPTKL (SEQ ID NO: 84864):SATS-AA¹⁷-LYY (SEQ ID NO: 84882):LRKHR (SEQ ID NO: 84233):NMVVRSXGXH (SEQ ID NO: 84629), TVPKPXXAPTQL (SEQ ID NO: 84854):SATS-AA¹⁷-LYY (SEQ ID NO: 84882):LRKHR (SEQ ID NO: 84233):NMVVRAXGXH (SEQ ID NO: 84627), KVGKAXXVPTKL (SEQ ID NO: 84780):SATS-AA¹⁷-LYY (SEQ ID NO: 84882):LRKHR (SEQ ID NO: 84233):EGMSVAEXGXR (SEQ ID NO: 84636), KASKAXXVPTKL (SEQ ID NO: 84760):SATS-AA¹⁷-LYY (SEQ ID NO: 84882):LRKHR (SEQ ID NO: 84233):GMAVSEXGXR (SEQ ID NO: 84546), GSAGPXXTPTKM (SEQ ID NO: 84726):SATS-AA¹⁷-LYY (SEQ ID NO: 84882):LRKHR (SEQ ID NO: 84233):GMVVDRXGXS (SEQ ID NO: 84567), AAPASXXVPARL (SEQ ID NO: 84677):SATS-AA¹⁷-LYY (SEQ ID NO: 84882):LRKHR (SEQ ID NO: 84233):DMVVEAXGXR (SEQ ID NO: 84509), STPPTXXVPTRL (SEQ ID NO: 84850):SATS-AA¹⁷-LYY (SEQ ID NO: 84882):LRKHR (SEQ ID NO: 84233):DMVVESXGXR (SEQ ID NO: 84511), HVPKPXXAPTKL (SEQ ID NO: 84734):SATS-AA¹⁷-LYY (SEQ ID NO: 84882):LRKHR (SEQ ID NO: 84233):NMVVRSXGXH (SEQ ID NO: 84629), RVPSTXXAPVKT (SEQ ID NO: 84815):SATS-AA¹⁷-LYY (SEQ ID NO: 84882):LRKHR (SEQ ID NO: 84233):MIVEEXGXL (SEQ ID NO: 84448), ASAAPXXVPQAL (SEQ ID NO: 84689):SATS-AA¹⁷-LYY (SEQ ID NO: 84882):LRKHR (SEQ ID NO: 84233):MIVRSXKXS (SEQ ID NO: 84453), ASASPXXVSQDL (SEQ ID NO: 84701):SATS-AA¹⁷-LYY (SEQ ID NO: 84882):LRKHR (SEQ ID NO: 84233):MIVKSXKXS (SEQ ID NO: 84451), ASASPXXVPQDL (SEQ ID NO: 84699):SATS-AA¹⁷-LYY (SEQ ID NO: 84882):LRKHR (SEQ ID NO: 84233):MVVKSXKXS (SEQ ID NO: 84470), NDEGLEXVPTEE (SEQ ID NO: 84798):SATS-AA¹⁷-LYY (SEQ ID NO: 84882):LRKHR (SEQ ID NO: 84233):FLQHNKXEXR (SEQ ID NO: 84536), NDEGLEXVPTGQ (SEQ ID NO: 84799):SATS-AA¹⁷-LYY (SEQ ID NO: 84882):LRKHR (SEQ ID NO: 84233):LEEHSQXEXR (SEQ ID NO: 84577), SSVKXQPSRVHH (SEQ ID NO: 84834):SATS-AA¹⁷-LYY (SEQ ID NO: 84882):LRKHR (SEQ ID NO: 84233):RLEEHLEXAXA (SEQ ID NO: 84646), RNVQXRPTQVQL (SEQ ID NO: 84806):SATS-AA¹⁷-LYY (SEQ ID NO: 84882):LRKHR (SEQ ID NO: 84233):TLEDHLAXKXE (SEQ ID NO: 84659), KIPKAXXVPTEL (SEQ ID NO: 84770):SPIS-AA¹⁷-LYK (SEQ ID NO: 84887):LKYHY (SEQ ID NO: 84232):DMVAEGXGXR (SEQ ID NO: 84495), GIPEPXXVPTKM (SEQ ID NO: 84720):SPIS-AA¹⁷-LYK (SEQ ID NO: 84887):LKYHY (SEQ ID NO: 84232):NMVAESXAXR (SEQ ID NO: 84607), SIPKAXXVPTEL (SEQ ID NO: 84830):SPIS-AA¹⁷-LYK (SEQ ID NO: 84887):LKYHY (SEQ ID NO: 84232):EMVAEGXGXR (SEQ ID NO: 84524), HVTKPTXVPTKL (SEQ ID NO: 84750):SPIS-AA¹⁷-LYK (SEQ ID NO: 84887):LKYHY (SEQ ID NO: 84232):NMVAESXGXH (SEQ ID NO: 84608), YVPKPXXVPTKL (SEQ ID NO: 84870):SPIS-AA¹⁷-LYK (SEQ ID NO: 84887):LKYHY (SEQ ID NO: 84232):NMVAESXGXH (SEQ ID NO: 84608), TVPKPXXVPTQL (SEQ ID NO: 84860):SPIS-AA¹⁷-LYK (SEQ ID NO: 84887):LKYHY (SEQ ID NO: 84232):NMVAEAXGXH (SEQ ID NO: 84606), AVPKAXXVPTKL (SEQ ID NO: 84710):SPIS-AA¹⁷-LYK (SEQ ID NO: 84887):LKYHY (SEQ ID NO: 84232):NMVAEAXGXH (SEQ ID NO: 84606), KASKAXXVPTKL (SEQ ID NO: 84760):SPIS-AA¹⁷-LYK (SEQ ID NO: 84887):LKYHY (SEQ ID NO: 84232):GMVAEEXGXR (SEQ ID NO: 84558), GSAGPXXVPTKM (SEQ ID NO: 84730):SPIS-AA¹⁷-LYK (SEQ ID NO: 84887):LKYHY (SEQ ID NO: 84232):GMVAERXGXS (SEQ ID NO: 84559), AAPASXXVPTRL (SEQ ID NO: 84680):SPIS-AA¹⁷-LYK (SEQ ID NO: 84887):LKYHY (SEQ ID NO: 84232):DMVAEAXGXR (SEQ ID NO: 84494), STPPTXXVPTRL (SEQ ID NO: 84850):SPIS-AA¹⁷-LYK (SEQ ID NO: 84887):LKYHY (SEQ ID NO: 84232):DMVAESXGXR (SEQ ID NO: 84496), HVPKPXXVPTKL (SEQ ID NO: 84740):SPIS-AA¹⁷-LYK (SEQ ID NO: 84887):LKYHY (SEQ ID NO: 84232):NMVAESXGXH (SEQ ID NO: 84608), RVPSTXXVPTKT (SEQ ID NO: 84820):SPIS-AA¹⁷-LYK (SEQ ID NO: 84887):LKYHY (SEQ ID NO: 84232):MIVAEXGXL (SEQ ID NO: 84446), ASAAPXXVPTAL (SEQ ID NO: 84690):SPIS-AA¹⁷-LYK (SEQ ID NO: 84887):LKYHY (SEQ ID NO: 84232):MIVAEXKXS (SEQ ID NO: 84447), ASASPXXVPTDL (SEQ ID NO: 84700):SPIS-AA¹⁷-LYK (SEQ ID NO: 84887):LKYHY (SEQ ID NO: 84232):MIVAEXKXS (SEQ ID NO: 84447), ASASPXXVPTDL (SEQ ID NO: 84700):SPIS-AA¹⁷-LYK (SEQ ID NO: 84887):LKYHY (SEQ ID NO: 84232):MVVAEXKXS (SEQ ID NO: 84468), KIPKAXXVPTEL (SEQ ID NO: 84770):SPIS-AA¹⁷-LYK (SEQ ID NO: 84887):LKYHY (SEQ ID NO: 84232):DMVVEGXGXR (SEQ ID NO: 84510), GIPEPXXVPEKM (SEQ ID NO: 84718):SPIS-AA¹⁷-LYK (SEQ ID NO: 84887):LKYHY (SEQ ID NO: 84232):NMTVESXAXR (SEQ ID NO: 84604), SIPKAXXVPTEL (SEQ ID NO: 84830):SPIS-AA¹⁷-LYK (SEQ ID NO: 84887):LKYHY (SEQ ID NO: 84232):EMVVEGXGXR (SEQ ID NO: 84529), HVTKPTXAPTKL (SEQ ID NO: 84742):SPIS-AA¹⁷-LYK (SEQ ID NO: 84887):LKYHY (SEQ ID NO: 84232):NMVVRSXGXH (SEQ ID NO: 84629), YVPKPXXAPTKL (SEQ ID NO: 84864):SPIS-AA¹⁷-LYK (SEQ ID NO: 84887):LKYHY (SEQ ID NO: 84232):NMVVRSXGXH (SEQ ID NO: 84629), TVPKPXXAPTQL (SEQ ID NO: 84854):SPIS-AA¹⁷-LYK (SEQ ID NO: 84887):LKYHY (SEQ ID NO: 84232):NMVVRAXGXH (SEQ ID NO: 84627), AVPKAXXAPTKL (SEQ ID NO: 84704):SPIS-AA¹⁷-LYK (SEQ ID NO: 84887):LKYHY (SEQ ID NO: 84232):NMVVKAXGXH (SEQ ID NO: 84624), KASKAXXVPTKL (SEQ ID NO: 84760):SPIS-AA¹⁷-LYK (SEQ ID NO: 84887):LKYHY (SEQ ID NO: 84232):GMAVSEXGXR (SEQ ID NO: 84546), GSAGPXXTPTKM (SEQ ID NO: 84726):SPIS-AA¹⁷-LYK (SEQ ID NO: 84887):LKYHY (SEQ ID NO: 84232):GMVVDRXGXS (SEQ ID NO: 84567), AAPASXXVPARL (SEQ ID NO: 84677):SPIS-AA¹⁷-LYK (SEQ ID NO: 84887):LKYHY (SEQ ID NO: 84232):DMVVEAXGXR (SEQ ID NO: 84509), STPPTXXVPTRL (SEQ ID NO: 84850):SPIS-AA¹⁷-LYK (SEQ ID NO: 84887):LKYHY (SEQ ID NO: 84232):DMVVESXGXR (SEQ ID NO: 84511), HVPKPXXAPTKL (SEQ ID NO: 84734):SPIS-AA¹⁷-LYK (SEQ ID NO: 84887):LKYHY (SEQ ID NO: 84232):NMVVRSXGXH (SEQ ID NO: 84629), RVPSTXXAPVKT (SEQ ID NO: 84815):SPIS-AA¹⁷-LYK (SEQ ID NO: 84887):LKYHY (SEQ ID NO: 84232):MIVEEXGXL (SEQ ID NO: 84448), ASAAPXXVPQAL (SEQ ID NO: 84689):SPIS-AA¹⁷-LYK (SEQ ID NO: 84887):LKYHY (SEQ ID NO: 84232):MIVRSXKXS (SEQ ID NO: 84453), ASASPXXVSQDL (SEQ ID NO: 84701):SPIS-AA¹⁷-LYK (SEQ ID NO: 84887):LKYHY (SEQ ID NO: 84232):MIVKSXKXS (SEQ ID NO: 84451), ASASPXXVPQDL (SEQ ID NO: 84699):SPIS-AA¹⁷-LYK (SEQ ID NO: 84887):LKYHY (SEQ ID NO: 84232):MVVKSXKXS (SEQ ID NO: 84470), NDEGLEXVPTEE (SEQ ID NO: 84798):SPIS-AA¹⁷-LYK (SEQ ID NO: 84887):LKYHY (SEQ ID NO: 84232):FLQHNKXEXR (SEQ ID NO: 84536), NDEGLEXVPTGQ (SEQ ID NO: 84799):SPIS-AA¹⁷-LYK (SEQ ID NO: 84887):LKYHY (SEQ ID NO: 84232):LEEHSQXEXR (SEQ ID NO: 84577), SSVKXQPSRVHH (SEQ ID NO: 84834):SPIS-AA¹⁷-LYK (SEQ ID NO: 84887):LKYHY (SEQ ID NO: 84232):RLEEHLEXAXA (SEQ ID NO: 84646), RNVQXRPTQVQL (SEQ ID NO: 84806):SPIS-AA¹⁷-LYK (SEQ ID NO: 84887):LKYHY (SEQ ID NO: 84232):TLEDHLAXKXE (SEQ ID NO: 84659), KIPKAXXVPTEL (SEQ ID NO: 84770):EPIS-AA¹⁷-LYL (SEQ ID NO: 84874):KFKYE (SEQ ID NO: 84211):DMAVXGXGSR (SEQ ID NO: 84478), GIPEPXXVPTKM (SEQ ID NO: 84720):EPIS-AA¹⁷-LYL (SEQ ID NO: 84874):KFKYE (SEQ ID NO: 84211):NMAVSSXAXR (SEQ ID NO: 84589), SIPKAXXVPTEL (SEQ ID NO: 84830):EPIS-AA¹⁷-LYL (SEQ ID NO: 84874):KFKYE (SEQ ID NO: 84211):EMAVXGXGSR (SEQ ID NO: 84518), HVTKPTXVPTKL (SEQ ID NO: 84750):EPIS-AA¹⁷-LYL (SEQ ID NO: 84874):KFKYE (SEQ ID NO: 84211):NMAVSSXGXH (SEQ ID NO: 84590), YVPKPXXVPTKL (SEQ ID NO: 84870):EPIS-AA¹⁷-LYL (SEQ ID NO: 84874):KFKYE (SEQ ID NO: 84211):NMAVSSXGXH (SEQ ID NO: 84590), TVPKPXXVPTQL (SEQ ID NO: 84860):EPIS-AA¹⁷-LYL (SEQ ID NO: 84874):KFKYE (SEQ ID NO: 84211):NMAVSAXGXH (SEQ ID NO: 84588), AVPKAXXVPTKL (SEQ ID NO: 84710):EPIS-AA¹⁷-LYL (SEQ ID NO: 84874):KFKYE (SEQ ID NO: 84211):NMAVSAXGXH (SEQ ID NO: 84588), KVGKAXXVPTKL (SEQ ID NO: 84780):EPIS-AA¹⁷-LYL (SEQ ID NO: 84874):KFKYE (SEQ ID NO: 84211):EGMSAVSXGXR (SEQ ID NO: 84630), GSAGPXXVPTKM (SEQ ID NO: 84730):EPIS-AA¹⁷-LYL (SEQ ID NO: 84874):KFKYE (SEQ ID NO: 84211):GMAVSRXGXS (SEQ ID NO: 84547), AAPASXXVPTRL (SEQ ID NO: 84680):EPIS-AA¹⁷-LYL (SEQ ID NO: 84874):KFKYE (SEQ ID NO: 84211):DMAVSAXGXR (SEQ ID NO: 84476), STPPTXXVPTRL (SEQ ID NO: 84850):EPIS-AA¹⁷-LYL (SEQ ID NO: 84874):KFKYE (SEQ ID NO: 84211):DMAVSSXGXR (SEQ ID NO: 84477), HVPKPXXVPTKL (SEQ ID NO: 84740):EPIS-AA¹⁷-LYL (SEQ ID NO: 84874):KFKYE (SEQ ID NO: 84211):NMAVSSXGXH (SEQ ID NO: 84590), RVPSTXXVPTKT (SEQ ID NO: 84820):EPIS-AA¹⁷-LYL (SEQ ID NO: 84874):KFKYE (SEQ ID NO: 84211):MIAVSXGXL (SEQ ID NO: 84434), ASAAPXXVPTAL (SEQ ID NO: 84690):EPIS-AA¹⁷-LYL (SEQ ID NO: 84874):KFKYE (SEQ ID NO: 84211):MIAVSXKXS (SEQ ID NO: 84435), ASASPXXVPTDL (SEQ ID NO: 84700):EPIS-AA¹⁷-LYL (SEQ ID NO: 84874):KFKYE (SEQ ID NO: 84211):MIAVSXKXS (SEQ ID NO: 84435), ASASPXXVPTDL (SEQ ID NO: 84700):EPIS-AA¹⁷-LYL (SEQ ID NO: 84874):KFKYE (SEQ ID NO: 84211):MVAVSXKXS (SEQ ID NO: 84462), KIPKAXXVPTEL (SEQ ID NO: 84770):EPIS-AA¹⁷-LYL (SEQ ID NO: 84874):KFKYE (SEQ ID NO: 84211):DMVVEGXGXR (SEQ ID NO: 84510), GIPEPXXVPEKM (SEQ ID NO: 84718):EPIS-AA¹⁷-LYL (SEQ ID NO: 84874):KFKYE (SEQ ID NO: 84211):NMTVESXAXR (SEQ ID NO: 84604), SIPKAXXVPTEL (SEQ ID NO: 84830):EPIS-AA¹⁷-LYL (SEQ ID NO: 84874):KFKYE (SEQ ID NO: 84211):EMVVEGXGXR (SEQ ID NO: 84529), HVTKPTXAPTKL (SEQ ID NO: 84742):EPIS-AA¹⁷-LYL (SEQ ID NO: 84874):KFKYE (SEQ ID NO: 84211):NMVVRSXGXH (SEQ ID NO: 84629), YVPKPXXAPTKL (SEQ ID NO: 84864):EPIS-AA¹⁷-LYL (SEQ ID NO: 84874):KFKYE (SEQ ID NO: 84211):NMVVRSXGXH (SEQ ID NO: 84629), TVPKPXXAPTQL (SEQ ID NO: 84854):EPIS-AA¹⁷-LYL (SEQ ID NO: 84874):KFKYE (SEQ ID NO: 84211):NMVVRAXGXH (SEQ ID NO: 84627), AVPKAXXAPTKL (SEQ ID NO: 84704):EPIS-AA¹⁷-LYL (SEQ ID NO: 84874):KFKYE (SEQ ID NO: 84211):NMVVKAXGXH (SEQ ID NO: 84624), KVGKAXXVPTKL (SEQ ID NO: 84780):EPIS-AA¹⁷-LYL (SEQ ID NO: 84874):KFKYE (SEQ ID NO: 84211):EGMSVAEXGXR (SEQ ID NO: 84636), GSAGPXXTPTKM (SEQ ID NO: 84726):EPIS-AA¹⁷-LYL (SEQ ID NO: 84874):KFKYE (SEQ ID NO: 84211):GMVVDRXGXS (SEQ ID NO: 84567), AAPASXXVPARL (SEQ ID NO: 84677):EPIS-AA¹⁷-LYL (SEQ ID NO: 84874):KFKYE (SEQ ID NO: 84211):DMVVEAXGXR (SEQ ID NO: 84509), STPPTXXVPTRL (SEQ ID NO: 84850):EPIS-AA¹⁷-LYL (SEQ ID NO: 84874):KFKYE (SEQ ID NO: 84211):DMVVESXGXR (SEQ ID NO: 84511), HVPKPXXAPTKL (SEQ ID NO: 84734):EPIS-AA¹⁷-LYL (SEQ ID NO: 84874):KFKYE (SEQ ID NO: 84211):NMVVRSXGXH (SEQ ID NO: 84629), RVPSTXXAPVKT (SEQ ID NO: 84815):EPIS-AA¹⁷-LYL (SEQ ID NO: 84874):KFKYE (SEQ ID NO: 84211):MIVEEXGXL (SEQ ID NO: 84448), ASAAPXXVPQAL (SEQ ID NO: 84689):EPIS-AA¹⁷-LYL (SEQ ID NO: 84874):KFKYE (SEQ ID NO: 84211):MIVRSXKXS (SEQ ID NO: 84453), ASASPXXVSQDL (SEQ ID NO: 84701):EPIS-AA¹⁷-LYL (SEQ ID NO: 84874):KFKYE (SEQ ID NO: 84211):MIVKSXKXS (SEQ ID NO: 84451), ASASPXXVPQDL (SEQ ID NO: 84699):EPIS-AA¹⁷-LYL (SEQ ID NO: 84874):KFKYE (SEQ ID NO: 84211):MVVKSXKXS (SEQ ID NO: 84470), NDEGLEXVPTEE (SEQ ID NO: 84798):EPIS-AA¹⁷-LYL (SEQ ID NO: 84874):KFKYE (SEQ ID NO: 84211):FLQHNKXEXR (SEQ ID NO: 84536), NDEGLEXVPTGQ (SEQ ID NO: 84799):EPIS-AA¹⁷-LYL (SEQ ID NO: 84874):KFKYE (SEQ ID NO: 84211):LEEHSQXEXR (SEQ ID NO: 84577), SSVKXQPSRVHH (SEQ ID NO: 84834):EPIS-AA¹⁷-LYL (SEQ ID NO: 84874):KFKYE (SEQ ID NO: 84211):RLEEHLEXAXA (SEQ ID NO: 84646), RNVQXRPTQVQL (SEQ ID NO: 84806):EPIS-AA¹⁷-LYL (SEQ ID NO: 84874):KFKYE (SEQ ID NO: 84211):TLEDHLAXKXE (SEQ ID NO: 84659), KIPKAXXTPTEL (SEQ ID NO: 84766):SPIN-AA¹⁷-LYF (SEQ ID NO: 84884):YGKIP (SEQ ID NO: 84397):DMVVDGXGXR (SEQ ID NO: 84507), GIPEPXXTPTKM (SEQ ID NO: 84716):SPIN-AA¹⁷-LYF (SEQ ID NO: 84884):YGKIP (SEQ ID NO: 84397):NMVVDSXAXR (SEQ ID NO: 84619), SIPKAXXTPTEL (SEQ ID NO: 84826):SPIN-AA¹⁷-LYF (SEQ ID NO: 84884):YGKIP (SEQ ID NO: 84397):EMVVDGXGXR (SEQ ID NO: 84528), HVTKPTSTPTKL (SEQ ID NO: 85018):SPIN-AA¹⁷-LYF (SEQ ID NO: 84884):YGKIP (SEQ ID NO: 84397):NMVVDSXGXH (SEQ ID NO: 84620), YVPKPXXTPTKL (SEQ ID NO: 84866):SPIN-AA¹⁷-LYF (SEQ ID NO: 84884):YGKIP (SEQ ID NO: 84397):NMVVDSXGXH (SEQ ID NO: 84620), TVPKPXXTPTQL (SEQ ID NO: 84856):SPIN-AA¹⁷-LYF (SEQ ID NO: 84884):YGKIP (SEQ ID NO: 84397):NMVVDAXGXH (SEQ ID NO: 84618), AVPKAXXTPTKL (SEQ ID NO: 84706):SPIN-AA¹⁷-LYF (SEQ ID NO: 84884):YGKIP (SEQ ID NO: 84397):NMVVDAXGXH (SEQ ID NO: 84618), KVGKAXXTPTKL (SEQ ID NO: 84776):SPIN-AA¹⁷-LYF (SEQ ID NO: 84884):YGKIP (SEQ ID NO: 84397):EGMSVVDXGXR (SEQ ID NO: 84640), KASKAXXTPTKL (SEQ ID NO: 84756):SPIN-AA¹⁷-LYF (SEQ ID NO: 84884):YGKIP (SEQ ID NO: 84397):GMVVDEXGXR (SEQ ID NO: 84566), AAPASXXTPTRL (SEQ ID NO: 84676):SPIN-AA¹⁷-LYF (SEQ ID NO: 84884):YGKIP (SEQ ID NO: 84397):DMVVDAXGXR (SEQ ID NO: 84506), STPPTXXTPTRL (SEQ ID NO: 84846):SPIN-AA¹⁷-LYF (SEQ ID NO: 84884):YGKIP (SEQ ID NO: 84397):DMVVDSXGXR (SEQ ID NO: 84508), HVPKPXXTPTKL (SEQ ID NO: 84736):SPIN-AA¹⁷-LYF (SEQ ID NO: 84884):YGKIP (SEQ ID NO: 84397):NMVVDSXGXH (SEQ ID NO: 84620), RVPSTXXTPTKT (SEQ ID NO: 84816):SPIN-AA¹⁷-LYF (SEQ ID NO: 84884):YGKIP (SEQ ID NO: 84397):MIVVDXGXL (SEQ ID NO: 84454), ASAAPXXTPTAL (SEQ ID NO: 84686):SPIN-AA¹⁷-LYF (SEQ ID NO: 84884):YGKIP (SEQ ID NO: 84397):MIVVDXKXS (SEQ ID NO: 84455), ASASPXXTPTDL (SEQ ID NO: 84696):SPIN-AA¹⁷-LYF (SEQ ID NO: 84884):YGKIP (SEQ ID NO: 84397):MIVVDXKXS (SEQ ID NO: 84455), ASASPXXTPTDL (SEQ ID NO: 84696):SPIN-AA¹⁷-LYF (SEQ ID NO: 84884):YGKIP (SEQ ID NO: 84397):MVVVDXKXS (SEQ ID NO: 84472), KIPKAXXVPTEL (SEQ ID NO: 84770):SPIN-AA¹⁷-LYF (SEQ ID NO: 84884):YGKIP (SEQ ID NO: 84397):DMVVEGXGXR (SEQ ID NO: 84510), GIPEPXXVPEKM (SEQ ID NO: 84718):SPIN-AA¹⁷-LYF (SEQ ID NO: 84884):YGKIP (SEQ ID NO: 84397):NMTVESXAXR (SEQ ID NO: 84604), SIPKAXXVPTEL (SEQ ID NO: 84830):SPIN-AA¹⁷-LYF (SEQ ID NO: 84884):YGKIP (SEQ ID NO: 84397):EMVVEGXGXR (SEQ ID NO: 84529), HVTKPTXAPTKL (SEQ ID NO: 84742):SPIN-AA¹⁷-LYF (SEQ ID NO: 84884):YGKIP (SEQ ID NO: 84397):NMVVRSXGXH (SEQ ID NO: 84629), YVPKPXXAPTKL (SEQ ID NO: 84864):SPIN-AA¹⁷-LYF (SEQ ID NO: 84884):YGKIP (SEQ ID NO: 84397):NMVVRSXGXH (SEQ ID NO: 84629), TVPKPXXAPTQL (SEQ ID NO: 84854):SPIN-AA¹⁷-LYF (SEQ ID NO: 84884):YGKIP (SEQ ID NO: 84397):NMVVRAXGXH (SEQ ID NO: 84627), AVPKAXXAPTKL (SEQ ID NO: 84704):SPIN-AA¹⁷-LYF (SEQ ID NO: 84884):YGKIP (SEQ ID NO: 84397):NMVVKAXGXH (SEQ ID NO: 84624), KVGKAXXVPTKL (SEQ ID NO: 84780):SPIN-AA¹⁷-LYF (SEQ ID NO: 84884):YGKIP (SEQ ID NO: 84397):EGMSVAEXGXR (SEQ ID NO: 84636), KASKAXXVPTKL (SEQ ID NO: 84760):SPIN-AA¹⁷-LYF (SEQ ID NO: 84884):YGKIP (SEQ ID NO: 84397):GMAVSEXGXR (SEQ ID NO: 84546), AAPASXXVPARL (SEQ ID NO: 84677):SPIN-AA¹⁷-LYF (SEQ ID NO: 84884):YGKIP (SEQ ID NO: 84397):DMVVEAXGXR (SEQ ID NO: 84509), STPPTXXVPTRL (SEQ ID NO: 84850):SPIN-AA¹⁷-LYF (SEQ ID NO: 84884):YGKIP (SEQ ID NO: 84397):DMVVESXGXR (SEQ ID NO: 84511), HVPKPXXAPTKL (SEQ ID NO: 84734):SPIN-AA¹⁷-LYF (SEQ ID NO: 84884):YGKIP (SEQ ID NO: 84397):NMVVRSXGXH (SEQ ID NO: 84629), RVPSTXXAPVKT (SEQ ID NO: 84815):SPIN-AA¹⁷-LYF (SEQ ID NO: 84884):YGKIP (SEQ ID NO: 84397):MIVEEXGXL (SEQ ID NO: 84448), ASAAPXXVPQAL (SEQ ID NO: 84689):SPIN-AA¹⁷-LYF (SEQ ID NO: 84884):YGKIP (SEQ ID NO: 84397):MIVRSXKXS (SEQ ID NO: 84453), ASASPXXVSQDL (SEQ ID NO: 84701):SPIN-AA¹⁷-LYF (SEQ ID NO: 84884):YGKIP (SEQ ID NO: 84397):MIVKSXKXS (SEQ ID NO: 84451), ASASPXXVPQDL (SEQ ID NO: 84699):SPIN-AA¹⁷-LYF (SEQ ID NO: 84884):YGKIP (SEQ ID NO: 84397):MVVKSXKXS (SEQ ID NO: 84470), NDEGLEXVPTEE (SEQ ID NO: 84798):SPIN-AA¹⁷-LYF (SEQ ID NO: 84884):YGKIP (SEQ ID NO: 84397):FLQHNKXEXR (SEQ ID NO: 84536), NDEGLEXVPTGQ (SEQ ID NO: 84799):SPIN-AA¹⁷-LYF (SEQ ID NO: 84884):YGKIP (SEQ ID NO: 84397):LEEHSQXEXR (SEQ ID NO: 84577), SSVKXQPSRVHH (SEQ ID NO: 84834):SPIN-AA¹⁷-LYF (SEQ ID NO: 84884):YGKIP (SEQ ID NO: 84397):RLEEHLEXAXA (SEQ ID NO: 84646), RNVQXRPTQVQL (SEQ ID NO: 84806):SPIN-AA¹⁷-LYF (SEQ ID NO: 84884):YGKIP (SEQ ID NO: 84397):TLEDHLAXKXE (SEQ ID NO: 84659), KIPKAXXVPAEL (SEQ ID NO: 84767):SPIS-AA¹⁷-LYI (SEQ ID NO: 84886):YKQYE (SEQ ID NO: 84398):DMVVEGXGXR (SEQ ID NO: 84510), GIPEPXXVPAKM (SEQ ID NO: 84717):SPIS-AA¹⁷-LYI (SEQ ID NO: 84886):YKQYE (SEQ ID NO: 84398):NMVVESXAXR (SEQ ID NO: 84622), SIPKAXXVPAEL (SEQ ID NO: 84827):SPIS-AA¹⁷-LYI (SEQ ID NO: 84886):YKQYE (SEQ ID NO: 84398):EMVVEGXGXR (SEQ ID NO: 84529), HVTKPTXVPAKL (SEQ ID NO: 84747):SPIS-AA¹⁷-LYI (SEQ ID NO: 84886):YKQYE (SEQ ID NO: 84398):NMVVESXGXH (SEQ ID NO: 84623), YVPKPXXVPAKL (SEQ ID NO: 84867):SPIS-AA¹⁷-LYI (SEQ ID NO: 84886):YKQYE (SEQ ID NO: 84398):NMVVESXGXH (SEQ ID NO: 84623), TVPKPXXVPAQL (SEQ ID NO: 84857):SPIS-AA¹⁷-LYI (SEQ ID NO: 84886):YKQYE (SEQ ID NO: 84398):NMVVEAXGXH (SEQ ID NO: 84621), AVPKAXXVPAKL (SEQ ID NO: 84707):SPIS-AA¹⁷-LYI (SEQ ID NO: 84886):YKQYE (SEQ ID NO: 84398):NMVVEAXGXH (SEQ ID NO: 84621), KVGKAXXVPAKL (SEQ ID NO: 84777):SPIS-AA¹⁷-LYI (SEQ ID NO: 84886):YKQYE (SEQ ID NO: 84398):EGMSVVEXGXR (SEQ ID NO: 84641), KASKAXXVPAKL (SEQ ID NO: 84757):SPIS-AA¹⁷-LYI (SEQ ID NO: 84886):YKQYE (SEQ ID NO: 84398):GMVVEEXGXR (SEQ ID NO: 84568), GSAGPXXVPAKM (SEQ ID NO: 84727):SPIS-AA¹⁷-LYI (SEQ ID NO: 84886):YKQYE (SEQ ID NO: 84398):GMVVERXGXS (SEQ ID NO: 84569), STPPTXXVPARL (SEQ ID NO: 84847):SPIS-AA¹⁷-LYI (SEQ ID NO: 84886):YKQYE (SEQ ID NO: 84398):DMVVESXGXR (SEQ ID NO: 84511), HVPKPXXVPAKL (SEQ ID NO: 84737):SPIS-AA¹⁷-LYI (SEQ ID NO: 84886):YKQYE (SEQ ID NO: 84398):NMVVESXGXH (SEQ ID NO: 84623), RVPSTXXVPAKT (SEQ ID NO: 84817):SPIS-AA¹⁷-LYI (SEQ ID NO: 84886):YKQYE (SEQ ID NO: 84398):MIVVEXGXL (SEQ ID NO: 84456), ASAAPXXVPAAL (SEQ ID NO: 84687):SPIS-AA¹⁷-LYI (SEQ ID NO: 84886):YKQYE (SEQ ID NO: 84398):MIVVEXKXS (SEQ ID NO: 84457), ASASPXXVPADL (SEQ ID NO: 84697):SPIS-AA¹⁷-LYI (SEQ ID NO: 84886):YKQYE (SEQ ID NO: 84398):MIVVEXKXS (SEQ ID NO: 84457), ASASPXXVPADL (SEQ ID NO: 84697):SPIS-AA¹⁷-LYI (SEQ ID NO: 84886):YKQYE (SEQ ID NO: 84398):MVVVEXKXS (SEQ ID NO: 84473), KIPKAXXVPTEL (SEQ ID NO: 84770):SPIS-AA¹⁷-LYI (SEQ ID NO: 84886):YKQYE (SEQ ID NO: 84398):DMVVEGXGXR (SEQ ID NO: 84510), GIPEPXXVPEKM (SEQ ID NO: 84718):SPIS-AA¹⁷-LYI (SEQ ID NO: 84886):YKQYE (SEQ ID NO: 84398):NMTVESXAXR (SEQ ID NO: 84604), SIPKAXXVPTEL (SEQ ID NO: 84830):SPIS-AA¹⁷-LYI (SEQ ID NO: 84886):YKQYE (SEQ ID NO: 84398):EMVVEGXGXR (SEQ ID NO: 84529), HVTKPTXAPTKL (SEQ ID NO: 84742):SPIS-AA¹⁷-LYI (SEQ ID NO: 84886):YKQYE (SEQ ID NO: 84398):NMVVRSXGXH (SEQ ID NO: 84629), YVPKPXXAPTKL (SEQ ID NO: 84864):SPIS-AA¹⁷-LYI (SEQ ID NO: 84886):YKQYE (SEQ ID NO: 84398):NMVVRSXGXH (SEQ ID NO: 84629), TVPKPXXAPTQL (SEQ ID NO: 84854):SPIS-AA¹⁷-LYI (SEQ ID NO: 84886):YKQYE (SEQ ID NO: 84398):NMVVRAXGXH (SEQ ID NO: 84627), AVPKAXXAPTKL (SEQ ID NO: 84704):SPIS-AA¹⁷-LYI (SEQ ID NO: 84886):YKQYE (SEQ ID NO: 84398):NMVVKAXGXH (SEQ ID NO: 84624), KVGKAXXVPTKL (SEQ ID NO: 84780):SPIS-AA¹⁷-LYI (SEQ ID NO: 84886):YKQYE (SEQ ID NO: 84398):EGMSVAEXGXR (SEQ ID NO: 84636), KASKAXXVPTKL (SEQ ID NO: 84760):SPIS-AA¹⁷-LYI (SEQ ID NO: 84886):YKQYE (SEQ ID NO: 84398):GMAVSEXGXR (SEQ ID NO: 84546), GSAGPXXTPTKM (SEQ ID NO: 84726):SPIS-AA¹⁷-LYI (SEQ ID NO: 84886):YKQYE (SEQ ID NO: 84398):GMVVDRXGXS (SEQ ID NO: 84567), STPPTXXVPTRL (SEQ ID NO: 84850):SPIS-AA¹⁷-LYI (SEQ ID NO: 84886):YKQYE (SEQ ID NO: 84398):DMVVESXGXR (SEQ ID NO: 84511), HVPKPXXAPTKL (SEQ ID NO: 84734):SPIS-AA¹⁷-LYI (SEQ ID NO: 84886):YKQYE (SEQ ID NO: 84398):NMVVRSXGXH (SEQ ID NO: 84629), RVPSTXXAPVKT (SEQ ID NO: 84815):SPIS-AA¹⁷-LYI (SEQ ID NO: 84886):YKQYE (SEQ ID NO: 84398):MIVEEXGXL (SEQ ID NO: 84448), ASAAPXXVPQAL (SEQ ID NO: 84689):SPIS-AA¹⁷-LYI (SEQ ID NO: 84886):YKQYE (SEQ ID NO: 84398):MIVRSXKXS (SEQ ID NO: 84453), ASASPXXVSQDL (SEQ ID NO: 84701):SPIS-AA¹⁷-LYI (SEQ ID NO: 84886):YKQYE (SEQ ID NO: 84398):MIVKSXKXS (SEQ ID NO: 84451), ASASPXXVPQDL (SEQ ID NO: 84699):SPIS-AA¹⁷-LYI (SEQ ID NO: 84886):YKQYE (SEQ ID NO: 84398):MVVKSXKXS (SEQ ID NO: 84470), NDEGLEXVPTEE (SEQ ID NO: 84798):SPIS-AA¹⁷-LYI (SEQ ID NO: 84886):YKQYE (SEQ ID NO: 84398):FLQHNKXEXR (SEQ ID NO: 84536), NDEGLEXVPTGQ (SEQ ID NO: 84799):SPIS-AA¹⁷-LYI (SEQ ID NO: 84886):YKQYE (SEQ ID NO: 84398):LEEHSQXEXR (SEQ ID NO: 84577), SSVKXQPSRVHH (SEQ ID NO: 84834):SPIS-AA¹⁷-LYI (SEQ ID NO: 84886):YKQYE (SEQ ID NO: 84398):RLEEHLEXAXA (SEQ ID NO: 84646), RNVQXRPTQVQL (SEQ ID NO: 84806):SPIS-AA¹⁷-LYI (SEQ ID NO: 84886):YKQYE (SEQ ID NO: 84398):TLEDHLAXKXE (SEQ ID NO: 84659), KIPKAXXVPTEL (SEQ ID NO: 84770):SPIS-AA¹⁷-LFI (SEQ ID NO: 84885):YKQYE (SEQ ID NO: 84398):DMVVEGXGXR (SEQ ID NO: 84510), GIPEPXXVPTKM (SEQ ID NO: 84720):SPIS-AA¹⁷-LFI (SEQ ID NO: 84885):YKQYE (SEQ ID NO: 84398):NMVVESXAXR (SEQ ID NO: 84622), SIPKAXXVPTEL (SEQ ID NO: 84830):SPIS-AA¹⁷-LFI (SEQ ID NO: 84885):YKQYE (SEQ ID NO: 84398):EMVVEGXGXR (SEQ ID NO: 84529), HVTKPTXVPTKL (SEQ ID NO: 84750):SPIS-AA¹⁷-LFI (SEQ ID NO: 84885):YKQYE (SEQ ID NO: 84398):NMVVESXGXH (SEQ ID NO: 84623), YVPKPXXVPTKL (SEQ ID NO: 84870):SPIS-AA¹⁷-LFI (SEQ ID NO: 84885):YKQYE (SEQ ID NO: 84398):NMVVESXGXH (SEQ ID NO: 84623), TVPKPXXVPTQL (SEQ ID NO: 84860):SPIS-AA¹⁷-LFI (SEQ ID NO: 84885):YKQYE (SEQ ID NO: 84398):NMVVEAXGXH (SEQ ID NO: 84621), AVPKAXXVPTKL (SEQ ID NO: 84710):SPIS-AA¹⁷-LFI (SEQ ID NO: 84885):YKQYE (SEQ ID NO: 84398):NMVVEAXGXH (SEQ ID NO: 84621), KVGKAXXVPTKL (SEQ ID NO: 84780):SPIS-AA¹⁷-LFI (SEQ ID NO: 84885):YKQYE (SEQ ID NO: 84398):EGMSVVEXGXR (SEQ ID NO: 84641), KASKAXXVPTKL (SEQ ID NO: 84760):SPIS-AA¹⁷-LFI (SEQ ID NO: 84885):YKQYE (SEQ ID NO: 84398):GMVVEEXGXR (SEQ ID NO: 84568), GSAGPXXVPTKM (SEQ ID NO: 84730):SPIS-AA¹⁷-LFI (SEQ ID NO: 84885):YKQYE (SEQ ID NO: 84398):GMVVERXGXS (SEQ ID NO: 84569), AAPASXXVPTRL (SEQ ID NO: 84680):SPIS-AA¹⁷-LFI (SEQ ID NO: 84885):YKQYE (SEQ ID NO: 84398):DMVVEAXGXR (SEQ ID NO: 84509), HVPKPXXVPTKL (SEQ ID NO: 84740):SPIS-AA¹⁷-LFI (SEQ ID NO: 84885):YKQYE (SEQ ID NO: 84398):NMVVESXGXH (SEQ ID NO: 84623), RVPSTXXVPTKT (SEQ ID NO: 84820):SPIS-AA¹⁷-LFI (SEQ ID NO: 84885):YKQYE (SEQ ID NO: 84398):MIVVEXGXL (SEQ ID NO: 84456), ASAAPXXVPTAL (SEQ ID NO: 84690):SPIS-AA¹⁷-LFI (SEQ ID NO: 84885):YKQYE (SEQ ID NO: 84398):MIVVEXKXS (SEQ ID NO: 84457), ASASPXXVPTDL (SEQ ID NO: 84700):SPIS-AA¹⁷-LFI (SEQ ID NO: 84885):YKQYE (SEQ ID NO: 84398):MIVVEXKXS (SEQ ID NO: 84457), ASASPXXVPTDL (SEQ ID NO: 84700):SPIS-AA¹⁷-LFI (SEQ ID NO: 84885):YKQYE (SEQ ID NO: 84398):MVVVEXKXS (SEQ ID NO: 84473), GIPEPXXVPEKM (SEQ ID NO: 84718):SPIS-AA¹⁷-LFI (SEQ ID NO: 84885):YKQYE (SEQ ID NO: 84398):NMTVESXAXR (SEQ ID NO: 84604), HVTKPTXAPTKL (SEQ ID NO: 84742):SPIS-AA¹⁷-LFI (SEQ ID NO: 84885):YKQYE (SEQ ID NO: 84398):NMVVRSXGXH (SEQ ID NO: 84629), YVPKPXXAPTKL (SEQ ID NO: 84864):SPIS-AA¹⁷-LFI (SEQ ID NO: 84885):YKQYE (SEQ ID NO: 84398):NMVVRSXGXH (SEQ ID NO: 84629), TVPKPXXAPTQL (SEQ ID NO: 84854):SPIS-AA¹⁷-LFI (SEQ ID NO: 84885):YKQYE (SEQ ID NO: 84398):NMVVRAXGXH (SEQ ID NO: 84627), AVPKAXXAPTKL (SEQ ID NO: 84704):SPIS-AA¹⁷-LFI (SEQ ID NO: 84885):YKQYE (SEQ ID NO: 84398):NMVVKAXGXH (SEQ ID NO: 84624), KVGKAXXVPTKL (SEQ ID NO: 84780):SPIS-AA¹⁷-LFI (SEQ ID NO: 84885):YKQYE (SEQ ID NO: 84398):EGMSVAEXGXR (SEQ ID NO: 84636), KASKAXXVPTKL (SEQ ID NO: 84760):SPIS-AA¹⁷-LFI (SEQ ID NO: 84885):YKQYE (SEQ ID NO: 84398):GMAVSEXGXR (SEQ ID NO: 84546), GSAGPXXTPTKM (SEQ ID NO: 84726):SPIS-AA¹⁷-LFI (SEQ ID NO: 84885):YKQYE (SEQ ID NO: 84398):GMVVDRXGXS (SEQ ID NO: 84567), AAPASXXVPARL (SEQ ID NO: 84677):SPIS-AA¹⁷-LFI (SEQ ID NO: 84885):YKQYE (SEQ ID NO: 84398):DMVVEAXGXR (SEQ ID NO: 84509), HVPKPXXAPTKL (SEQ ID NO: 84734):SPIS-AA¹⁷-LFI (SEQ ID NO: 84885):YKQYE (SEQ ID NO: 84398):NMVVRSXGXH (SEQ ID NO: 84629), RVPSTXXAPVKT (SEQ ID NO: 84815):SPIS-AA¹⁷-LFI (SEQ ID NO: 84885):YKQYE (SEQ ID NO: 84398):MIVEEXGXL (SEQ ID NO: 84448), ASAAPXXVPQAL (SEQ ID NO: 84689):SPIS-AA¹⁷-LFI (SEQ ID NO: 84885):YKQYE (SEQ ID NO: 84398):MIVRSXKXS (SEQ ID NO: 84453), ASASPXXVSQDL (SEQ ID NO: 84701):SPIS-AA¹⁷-LFI (SEQ ID NO: 84885):YKQYE (SEQ ID NO: 84398):MIVKSXKXS (SEQ ID NO: 84451), ASASPXXVPQDL (SEQ ID NO: 84699):SPIS-AA¹⁷-LFI (SEQ ID NO: 84885):YKQYE (SEQ ID NO: 84398):MVVKSXKXS (SEQ ID NO: 84470), NDEGLEXVPTEE (SEQ ID NO: 84798):SPIS-AA¹⁷-LFI (SEQ ID NO: 84885):YKQYE (SEQ ID NO: 84398):FLQHNKXEXR (SEQ ID NO: 84536), NDEGLEXVPTGQ (SEQ ID NO: 84799):SPIS-AA¹⁷-LFI (SEQ ID NO: 84885):YKQYE (SEQ ID NO: 84398):LEEHSQXEXR (SEQ ID NO: 84577), SSVKXQPSRVHH (SEQ ID NO: 84834):SPIS-AA¹⁷-LFI (SEQ ID NO: 84885):YKQYE (SEQ ID NO: 84398):RLEEHLEXAXA (SEQ ID NO: 84646), RNVQXRPTQVQL (SEQ ID NO: 84806):SPIS-AA¹⁷-LFI (SEQ ID NO: 84885):YKQYE (SEQ ID NO: 84398):TLEDHLAXKXE (SEQ ID NO: 84659), KIPKAXXAPVEL (SEQ ID NO: 84765):KPLS-AA¹⁷-LYV (SEQ ID NO: 84877):DHHKD (SEQ ID NO: 84149):DMVEEGXGXR (SEQ ID NO: 84498), GIPEPXXAPVKM (SEQ ID NO: 84715):KPLS-AA¹⁷-LYV (SEQ ID NO: 84877):DHHKD (SEQ ID NO: 84149):NMVEESXAXR (SEQ ID NO: 84610), SIPKAXXAPVEL (SEQ ID NO: 84825):KPLS-AA¹⁷-LYV (SEQ ID NO: 84877):DHHKD (SEQ ID NO: 84149):EMVEEGXGXR (SEQ ID NO: 84525), HVTKPTXAPVKL (SEQ ID NO: 84743):KPLS-AA¹⁷-LYV (SEQ ID NO: 84877):DHHKD (SEQ ID NO: 84149):NMVEESXGXH (SEQ ID NO: 84611), YVPKPXXAPVKL (SEQ ID NO: 84865):KPLS-AA¹⁷-LYV (SEQ ID NO: 84877):DHHKD (SEQ ID NO: 84149):NMVEESXGXH (SEQ ID NO: 84611), TVPKPXXAPVQL (SEQ ID NO: 84855):KPLS-AA¹⁷-LYV (SEQ ID NO: 84877):DHHKD (SEQ ID NO: 84149):NMVEEAXGXH (SEQ ID NO: 84609), AVPKAXXAPVKL (SEQ ID NO: 84705):KPLS-AA¹⁷-LYV (SEQ ID NO: 84877):DHHKD (SEQ ID NO: 84149):NMVEEAXGXH (SEQ ID NO: 84609), KVGKAXXAPVKL (SEQ ID NO: 84775):KPLS-AA¹⁷-LYV (SEQ ID NO: 84877):DHHKD (SEQ ID NO: 84149):EGMSVEEXGXR (SEQ ID NO: 84637), KASKAXXAPVKL (SEQ ID NO: 84755):KPLS-AA¹⁷-LYV (SEQ ID NO: 84877):DHHKD (SEQ ID NO: 84149):GMVEEEXGXR (SEQ ID NO: 84560), GSAGPXXAPVKM (SEQ ID NO: 84725):KPLS-AA¹⁷-LYV (SEQ ID NO: 84877):DHHKD (SEQ ID NO: 84149):GMVEERXGXS (SEQ ID NO: 84561), AAPASXXAPVRL (SEQ ID NO: 84675):KPLS-AA¹⁷-LYV (SEQ ID NO: 84877):DHHKD (SEQ ID NO: 84149):DMVEEAXGXR (SEQ ID NO: 84497), STPPTXXAPVRL (SEQ ID NO: 84845):KPLS-AA¹⁷-LYV (SEQ ID NO: 84877):DHHKD (SEQ ID NO: 84149):DMVEESXGXR (SEQ ID NO: 84499), HVPKPXXAPVKL (SEQ ID NO: 84735):KPLS-AA¹⁷-LYV (SEQ ID NO: 84877):DHHKD (SEQ ID NO: 84149):NMVEESXGXH (SEQ ID NO: 84611), ASAAPXXAPVAL (SEQ ID NO: 84685):KPLS-AA¹⁷-LYV (SEQ ID NO: 84877):DHHKD (SEQ ID NO: 84149):MIVEEXKXS (SEQ ID NO: 84449), ASASPXXAPVDL (SEQ ID NO: 84695):KPLS-AA¹⁷-LYV (SEQ ID NO: 84877):DHHKD (SEQ ID NO: 84149):MIVEEXKXS (SEQ ID NO: 84449), ASASPXXAPVDL (SEQ ID NO: 84695):KPLS-AA¹⁷-LYV (SEQ ID NO: 84877):DHHKD (SEQ ID NO: 84149):MVVEEXKXS (SEQ ID NO: 84469), KIPKAXXVPTEL (SEQ ID NO: 84770):KPLS-AA¹⁷-LYV (SEQ ID NO: 84877):DHHKD (SEQ ID NO: 84149):DMVVEGXGXR (SEQ ID NO: 84510), GIPEPXXVPEKM (SEQ ID NO: 84718):KPLS-AA¹⁷-LYV (SEQ ID NO: 84877):DHHKD (SEQ ID NO: 84149):NMTVESXAXR (SEQ ID NO: 84604), SIPKAXXVPTEL (SEQ ID NO: 84830):KPLS-AA¹⁷-LYV (SEQ ID NO: 84877):DHHKD (SEQ ID NO: 84149):EMVVEGXGXR (SEQ ID NO: 84529), HVTKPTXAPTKL (SEQ ID NO: 84742):KPLS-AA¹⁷-LYV (SEQ ID NO: 84877):DHHKD (SEQ ID NO: 84149):NMVVRSXGXH (SEQ ID NO: 84629), YVPKPXXAPTKL (SEQ ID NO: 84864):KPLS-AA¹⁷-LYV (SEQ ID NO: 84877):DHHKD (SEQ ID NO: 84149):NMVVRSXGXH (SEQ ID NO: 84629), TVPKPXXAPTQL (SEQ ID NO: 84854):KPLS-AA¹⁷-LYV (SEQ ID NO: 84877):DHHKD (SEQ ID NO: 84149):NMVVRAXGXH (SEQ ID NO: 84627), AVPKAXXAPTKL (SEQ ID NO: 84704):KPLS-AA¹⁷-LYV (SEQ ID NO: 84877):DHHKD (SEQ ID NO: 84149):NMVVKAXGXH (SEQ ID NO: 84624), KVGKAXXVPTKL (SEQ ID NO: 84780):KPLS-AA¹⁷-LYV (SEQ ID NO: 84877):DHHKD (SEQ ID NO: 84149):EGMSVAEXGXR (SEQ ID NO: 84636), KASKAXXVPTKL (SEQ ID NO: 84760):KPLS-AA¹⁷-LYV (SEQ ID NO: 84877):DHHKD (SEQ ID NO: 84149):GMAVSEXGXR (SEQ ID NO: 84546), GSAGPXXTPTKM (SEQ ID NO: 84726):KPLS-AA¹⁷-LYV (SEQ ID NO: 84877):DHHKD (SEQ ID NO: 84149):GMVVDRXGXS (SEQ ID NO: 84567), AAPASXXVPARL (SEQ ID NO: 84677):KPLS-AA¹⁷-LYV (SEQ ID NO: 84877):DHHKD (SEQ ID NO: 84149):DMVVEAXGXR (SEQ ID NO: 84509), STPPTXXVPTRL (SEQ ID NO: 84850):KPLS-AA¹⁷-LYV (SEQ ID NO: 84877):DHHKD (SEQ ID NO: 84149):DMVVESXGXR (SEQ ID NO: 84511), HVPKPXXAPTKL (SEQ ID NO: 84734):KPLS-AA¹⁷-LYV (SEQ ID NO: 84877):DHHKD (SEQ ID NO: 84149):NMVVRSXGXH (SEQ ID NO: 84629), ASAAPXXVPQAL (SEQ ID NO: 84689):KPLS-AA¹⁷-LYV (SEQ ID NO: 84877):DHHKD (SEQ ID NO: 84149):MIVRSXKXS (SEQ ID NO: 84453), ASASPXXVSQDL (SEQ ID NO: 84701):KPLS-AA¹⁷-LYV (SEQ ID NO: 84877):DHHKD (SEQ ID NO: 84149):MIVKSXKXS (SEQ ID NO: 84451), ASASPXXVPQDL (SEQ ID NO: 84699):KPLS-AA¹⁷-LYV (SEQ ID NO: 84877):DHHKD (SEQ ID NO: 84149):MVVKSXKXS (SEQ ID NO: 84470), NDEGLEXVPTEE (SEQ ID NO: 84798):KPLS-AA¹⁷-LYV (SEQ ID NO: 84877):DHHKD (SEQ ID NO: 84149):FLQHNKXEXR (SEQ ID NO: 84536), NDEGLEXVPTGQ (SEQ ID NO: 84799):KPLS-AA¹⁷-LYV (SEQ ID NO: 84877):DHHKD (SEQ ID NO: 84149):LEEHSQXEXR (SEQ ID NO: 84577), SSVKXQPSRVHH (SEQ ID NO: 84834):KPLS-AA¹⁷-LYV (SEQ ID NO: 84877):DHHKD (SEQ ID NO: 84149):RLEEHLEXAXA (SEQ ID NO: 84646), RNVQXRPTQVQL (SEQ ID NO: 84806):KPLS-AA¹⁷-LYV (SEQ ID NO: 84877):DHHKD (SEQ ID NO: 84149):TLEDHLAXKXE (SEQ ID NO: 84659), KIPKAXXVPQEL (SEQ ID NO: 84769):EPLP-AA¹⁷-VYY (SEQ ID NO: 84875):EQLSN (SEQ ID NO: 84178):DMVRXGXGSR (SEQ ID NO: 84505), GIPEPXXVPQKM (SEQ ID NO: 84719):EPLP-AA¹⁷-VYY (SEQ ID NO: 84875):EQLSN (SEQ ID NO: 84178):NMVRSSXAXR (SEQ ID NO: 84616), SIPKAXXVPQEL (SEQ ID NO: 84829):EPLP-AA¹⁷-VYY (SEQ ID NO: 84875):EQLSN (SEQ ID NO: 84178):EMVRXGXGSR (SEQ ID NO: 84527), HVTKPTXVPQKL (SEQ ID NO: 84749):EPLP-AA¹⁷-VYY (SEQ ID NO: 84875):EQLSN (SEQ ID NO: 84178):NMVRSSXGXH (SEQ ID NO: 84617), YVPKPXXVPQKL (SEQ ID NO: 84869):EPLP-AA¹⁷-VYY (SEQ ID NO: 84875):EQLSN (SEQ ID NO: 84178):NMVRSSXGXH (SEQ ID NO: 84617), TVPKPXXVPQQL (SEQ ID NO: 84859):EPLP-AA¹⁷-VYY (SEQ ID NO: 84875):EQLSN (SEQ ID NO: 84178):NMVRSAXGXH (SEQ ID NO: 84615), AVPKAXXVPQKL (SEQ ID NO: 84709):EPLP-AA¹⁷-VYY (SEQ ID NO: 84875):EQLSN (SEQ ID NO: 84178):NMVRSAXGXH (SEQ ID NO: 84615), KVGKAXXVPQKL (SEQ ID NO: 84779):EPLP-AA¹⁷-VYY (SEQ ID NO: 84875):EQLSN (SEQ ID NO: 84178):EGMSVRSXGXR (SEQ ID NO: 84639), KASKAXXVPQKL (SEQ ID NO: 84759):EPLP-AA¹⁷-VYY (SEQ ID NO: 84875):EQLSN (SEQ ID NO: 84178):GMVRSEXGXR (SEQ ID NO: 84564), GSAGPXXVPQKM (SEQ ID NO: 84729):EPLP-AA¹⁷-VYY (SEQ ID NO: 84875):EQLSN (SEQ ID NO: 84178):GMVRSRXGXS (SEQ ID NO: 84565), AAPASXXVPQRL (SEQ ID NO: 84679):EPLP-AA¹⁷-VYY (SEQ ID NO: 84875):EQLSN (SEQ ID NO: 84178):DMVRSAXGXR (SEQ ID NO: 84503), STPPTXXVPQRL (SEQ ID NO: 84849):EPLP-AA¹⁷-VYY (SEQ ID NO: 84875):EQLSN (SEQ ID NO: 84178):DMVRSSXGXR (SEQ ID NO: 84504), HVPKPXXVPQKL (SEQ ID NO: 84739):EPLP-AA¹⁷-VYY (SEQ ID NO: 84875):EQLSN (SEQ ID NO: 84178):NMVRSSXGXH (SEQ ID NO: 84617), RVPSTXXVPQKT (SEQ ID NO: 84819):EPLP-AA¹⁷-VYY (SEQ ID NO: 84875):EQLSN (SEQ ID NO: 84178):MIVRSXGXL (SEQ ID NO: 84452), ASASPXXVPQDL (SEQ ID NO: 84699):EPLP-AA¹⁷-VYY (SEQ ID NO: 84875):EQLSN (SEQ ID NO: 84178):MIVRSXKXS (SEQ ID NO: 84453), ASASPXXVPQDL (SEQ ID NO: 84699):EPLP-AA¹⁷-VYY (SEQ ID NO: 84875):EQLSN (SEQ ID NO: 84178):MVVRSXKXS (SEQ ID NO: 84471), KIPKAXXVPTEL (SEQ ID NO: 84770):EPLP-AA¹⁷-VYY (SEQ ID NO: 84875):EQLSN (SEQ ID NO: 84178):DMVVEGXGXR (SEQ ID NO: 84510), GIPEPXXVPEKM (SEQ ID NO: 84718):EPLP-AA¹⁷-VYY (SEQ ID NO: 84875):EQLSN (SEQ ID NO: 84178):NMTVESXAXR (SEQ ID NO: 84604), SIPKAXXVPTEL (SEQ ID NO: 84830):EPLP-AA¹⁷-VYY (SEQ ID NO: 84875):EQLSN (SEQ ID NO: 84178):EMVVEGXGXR (SEQ ID NO: 84529), HVTKPTXAPTKL (SEQ ID NO: 84742):EPLP-AA¹⁷-VYY (SEQ ID NO: 84875):EQLSN (SEQ ID NO: 84178):NMVVRSXGXH (SEQ ID NO: 84629), YVPKPXXAPTKL (SEQ ID NO: 84864):EPLP-AA¹⁷-VYY (SEQ ID NO: 84875):EQLSN (SEQ ID NO: 84178):NMVVRSXGXH (SEQ ID NO: 84629), TVPKPXXAPTQL (SEQ ID NO: 84854):EPLP-AA¹⁷-VYY (SEQ ID NO: 84875):EQLSN (SEQ ID NO: 84178):NMVVRAXGXH (SEQ ID NO: 84627), AVPKAXXAPTKL (SEQ ID NO: 84704):EPLP-AA¹⁷-VYY (SEQ ID NO: 84875):EQLSN (SEQ ID NO: 84178):NMVVKAXGXH (SEQ ID NO: 84624), KVGKAXXVPTKL (SEQ ID NO: 84780):EPLP-AA¹⁷-VYY (SEQ ID NO: 84875):EQLSN (SEQ ID NO: 84178):EGMSVAEXGXR (SEQ ID NO: 84636), KASKAXXVPTKL (SEQ ID NO: 84760):EPLP-AA¹⁷-VYY (SEQ ID NO: 84875):EQLSN (SEQ ID NO: 84178):GMAVSEXGXR (SEQ ID NO: 84546), GSAGPXXTPTKM (SEQ ID NO: 84726):EPLP-AA¹⁷-VYY (SEQ ID NO: 84875):EQLSN (SEQ ID NO: 84178):GMVVDRXGXS (SEQ ID NO: 84567), AAPASXXVPARL (SEQ ID NO: 84677):EPLP-AA¹⁷-VYY (SEQ ID NO: 84875):EQLSN (SEQ ID NO: 84178):DMVVEAXGXR (SEQ ID NO: 84509), STPPTXXVPTRL (SEQ ID NO: 84850):EPLP-AA¹⁷-VYY (SEQ ID NO: 84875):EQLSN (SEQ ID NO: 84178):DMVVESXGXR (SEQ ID NO: 84511), HVPKPXXAPTKL (SEQ ID NO: 84734):EPLP-AA¹⁷-VYY (SEQ ID NO: 84875):EQLSN (SEQ ID NO: 84178):NMVVRSXGXH (SEQ ID NO: 84629), RVPSTXXAPVKT (SEQ ID NO: 84815):EPLP-AA¹⁷-VYY (SEQ ID NO: 84875):EQLSN (SEQ ID NO: 84178):MIVEEXGXL (SEQ ID NO: 84448), ASASPXXVSQDL (SEQ ID NO: 84701):EPLP-AA¹⁷-VYY (SEQ ID NO: 84875):EQLSN (SEQ ID NO: 84178):MIVKSXKXS (SEQ ID NO: 84451), ASASPXXVPQDL (SEQ ID NO: 84699):EPLP-AA¹⁷-VYY (SEQ ID NO: 84875):EQLSN (SEQ ID NO: 84178):MVVKSXKXS (SEQ ID NO: 84470), NDEGLEXVPTEE (SEQ ID NO: 84798):EPLP-AA¹⁷-VYY (SEQ ID NO: 84875):EQLSN (SEQ ID NO: 84178):FLQHNKXEXR (SEQ ID NO: 84536), NDEGLEXVPTGQ (SEQ ID NO: 84799):EPLP-AA¹⁷-VYY (SEQ ID NO: 84875):EQLSN (SEQ ID NO: 84178):LEEHSQXEXR (SEQ ID NO: 84577), SSVKXQPSRVHH (SEQ ID NO: 84834):EPLP-AA¹⁷-VYY (SEQ ID NO: 84875):EQLSN (SEQ ID NO: 84178):RLEEHLEXAXA (SEQ ID NO: 84646), RNVQXRPTQVQL (SEQ ID NO: 84806):EPLP-AA¹⁷-VYY (SEQ ID NO: 84875):EQLSN (SEQ ID NO: 84178):TLEDHLAXKXE (SEQ ID NO: 84659), KIPKAXXVSQEL (SEQ ID NO: 84771):EPLT-AA¹⁷-LYY (SEQ ID NO: 84876):EQLSN (SEQ ID NO: 84178):DMVKXGXGSR (SEQ ID NO: 84502), GIPEPXXVSQKM (SEQ ID NO: 84721):EPLT-AA¹⁷-LYY (SEQ ID NO: 84876):EQLSN (SEQ ID NO: 84178):NMVKSSXAXR (SEQ ID NO: 84613), SIPKAXXVSQEL (SEQ ID NO: 84831):EPLT-AA¹⁷-LYY (SEQ ID NO: 84876):EQLSN (SEQ ID NO: 84178):EMVKXGXGSR (SEQ ID NO: 84526), HVTKPTXVSQKL (SEQ ID NO: 84751):EPLT-AA¹⁷-LYY (SEQ ID NO: 84876):EQLSN (SEQ ID NO: 84178):NMVKSSXGXH (SEQ ID NO: 84614), YVPKPXXVSQKL (SEQ ID NO: 84871):EPLT-AA¹⁷-LYY (SEQ ID NO: 84876):EQLSN (SEQ ID NO: 84178):NMVKSSXGXH (SEQ ID NO: 84614), TVPKPXXVSQQL (SEQ ID NO: 84861):EPLT-AA¹⁷-LYY (SEQ ID NO: 84876):EQLSN (SEQ ID NO: 84178):NMVKSAXGXH (SEQ ID NO: 84612), AVPKAXXVSQKL (SEQ ID NO: 84711):EPLT-AA¹⁷-LYY (SEQ ID NO: 84876):EQLSN (SEQ ID NO: 84178):NMVKSAXGXH (SEQ ID NO: 84612), KVGKAXXVSQKL (SEQ ID NO: 84781):EPLT-AA¹⁷-LYY (SEQ ID NO: 84876):EQLSN (SEQ ID NO: 84178):EGMSVKSXGXR (SEQ ID NO: 84638), KASKAXXVSQKL (SEQ ID NO: 84761):EPLT-AA¹⁷-LYY (SEQ ID NO: 84876):EQLSN (SEQ ID NO: 84178):GMVKSEXGXR (SEQ ID NO: 84562), GSAGPXXVSQKM (SEQ ID NO: 84731):EPLT-AA¹⁷-LYY (SEQ ID NO: 84876):EQLSN (SEQ ID NO: 84178):GMVKSRXGXS (SEQ ID NO: 84563), AAPASXXVSQRL (SEQ ID NO: 84681):EPLT-AA¹⁷-LYY (SEQ ID NO: 84876):EQLSN (SEQ ID NO: 84178):DMVKSAXGXR (SEQ ID NO: 84500), STPPTXXVSQRL (SEQ ID NO: 84851):EPLT-AA¹⁷-LYY (SEQ ID NO: 84876):EQLSN (SEQ ID NO: 84178):DMVKSSXGXR (SEQ ID NO: 84501), HVPKPXXVSQKL (SEQ ID NO: 84741):EPLT-AA¹⁷-LYY (SEQ ID NO: 84876):EQLSN (SEQ ID NO: 84178):NMVKSSXGXH (SEQ ID NO: 84614), RVPSTXXVSQKT (SEQ ID NO: 84821):EPLT-AA¹⁷-LYY (SEQ ID NO: 84876):EQLSN (SEQ ID NO: 84178):MIVKSXGXL (SEQ ID NO: 84450), ASAAPXXVSQAL (SEQ ID NO: 84691):EPLT-AA¹⁷-LYY (SEQ ID NO: 84876):EQLSN (SEQ ID NO: 84178):MIVKSXKXS (SEQ ID NO: 84451), ASASPXXVSQDL (SEQ ID NO: 84701):EPLT-AA¹⁷-LYY (SEQ ID NO: 84876):EQLSN (SEQ ID NO: 84178):MVVKSXKXS (SEQ ID NO: 84470), KIPKAXXVPTEL (SEQ ID NO: 84770):EPLT-AA¹⁷-LYY (SEQ ID NO: 84876):EQLSN (SEQ ID NO: 84178):DMVVEGXGXR (SEQ ID NO: 84510), GIPEPXXVPEKM (SEQ ID NO: 84718):EPLT-AA¹⁷-LYY (SEQ ID NO: 84876):EQLSN (SEQ ID NO: 84178):NMTVESXAXR (SEQ ID NO: 84604), SIPKAXXVPTEL (SEQ ID NO: 84830):EPLT-AA¹⁷-LYY (SEQ ID NO: 84876):EQLSN (SEQ ID NO: 84178):EMVVEGXGXR (SEQ ID NO: 84529), HVTKPTXAPTKL (SEQ ID NO: 84742):EPLT-AA¹⁷-LYY (SEQ ID NO: 84876):EQLSN (SEQ ID NO: 84178):NMVVRSXGXH (SEQ ID NO: 84629), YVPKPXXAPTKL (SEQ ID NO: 84864):EPLT-AA¹⁷-LYY (SEQ ID NO: 84876):EQLSN (SEQ ID NO: 84178):NMVVRSXGXH (SEQ ID NO: 84629), TVPKPXXAPTQL (SEQ ID NO: 84854):EPLT-AA¹⁷-LYY (SEQ ID NO: 84876):EQLSN (SEQ ID NO: 84178):NMVVRAXGXH (SEQ ID NO: 84627), AVPKAXXAPTKL (SEQ ID NO: 84704):EPLT-AA¹⁷-LYY (SEQ ID NO: 84876):EQLSN (SEQ ID NO: 84178):NMVVKAXGXH (SEQ ID NO: 84624), KVGKAXXVPTKL (SEQ ID NO: 84780):EPLT-AA¹⁷-LYY (SEQ ID NO: 84876):EQLSN (SEQ ID NO: 84178):EGMSVAEXGXR (SEQ ID NO: 84636), KASKAXXVPTKL (SEQ ID NO: 84760):EPLT-AA¹⁷-LYY (SEQ ID NO: 84876):EQLSN (SEQ ID NO: 84178):GMAVSEXGXR (SEQ ID NO: 84546), GSAGPXXTPTKM (SEQ ID NO: 84726):EPLT-AA¹⁷-LYY (SEQ ID NO: 84876):EQLSN (SEQ ID NO: 84178):GMVVDRXGXS (SEQ ID NO: 84567), AAPASXXVPARL (SEQ ID NO: 84677):EPLT-AA¹⁷-LYY (SEQ ID NO: 84876):EQLSN (SEQ ID NO: 84178):DMVVEAXGXR (SEQ ID NO: 84509), STPPTXXVPTRL (SEQ ID NO: 84850):EPLT-AA¹⁷-LYY (SEQ ID NO: 84876):EQLSN (SEQ ID NO: 84178):DMVVESXGXR (SEQ ID NO: 84511), HVPKPXXAPTKL (SEQ ID NO: 84734):EPLT-AA¹⁷-LYY (SEQ ID NO: 84876):EQLSN (SEQ ID NO: 84178):NMVVRSXGXH (SEQ ID NO: 84629), RVPSTXXAPVKT (SEQ ID NO: 84815):EPLT-AA¹⁷-LYY (SEQ ID NO: 84876):EQLSN (SEQ ID NO: 84178):MIVEEXGXL (SEQ ID NO: 84448), ASAAPXXVPQAL (SEQ ID NO: 84689):EPLT-AA¹⁷-LYY (SEQ ID NO: 84876):EQLSN (SEQ ID NO: 84178):MIVRSXKXS (SEQ ID NO: 84453), NDEGLEXVPTEE (SEQ ID NO: 84798):EPLT-AA¹⁷-LYY (SEQ ID NO: 84876):EQLSN (SEQ ID NO: 84178):FLQHNKXEXR (SEQ ID NO: 84536), NDEGLEXVPTGQ (SEQ ID NO: 84799):EPLT-AA¹⁷-LYY (SEQ ID NO: 84876):EQLSN (SEQ ID NO: 84178):LEEHSQXEXR (SEQ ID NO: 84577), SSVKXQPSRVHH (SEQ ID NO: 84834):EPLT-AA¹⁷-LYY (SEQ ID NO: 84876):EQLSN (SEQ ID NO: 84178):RLEEHLEXAXA (SEQ ID NO: 84646), RNVQXRPTQVQL (SEQ ID NO: 84806):EPLT-AA¹⁷-LYY (SEQ ID NO: 84876):EQLSN (SEQ ID NO: 84178):TLEDHLAXKXE (SEQ ID NO: 84659), KIPKAXXVPQEL (SEQ ID NO: 84769):EPLT-AA¹⁷-LYY (SEQ ID NO: 84876):EQLSN (SEQ ID NO: 84178):DMVKXGXGSR (SEQ ID NO: 84502), GIPEPXXVPQKM (SEQ ID NO: 84719):EPLT-AA¹⁷-LYY (SEQ ID NO: 84876):EQLSN (SEQ ID NO: 84178):NMVKSSXAXR (SEQ ID NO: 84613), SIPKAXXVPQEL (SEQ ID NO: 84829):EPLT-AA¹⁷-LYY (SEQ ID NO: 84876):EQLSN (SEQ ID NO: 84178):EMVKXGXGSR (SEQ ID NO: 84526), HVTKPTXVPQKL (SEQ ID NO: 84749):EPLT-AA¹⁷-LYY (SEQ ID NO: 84876):EQLSN (SEQ ID NO: 84178):NMVKSSXGXH (SEQ ID NO: 84614), YVPKPXXVPQKL (SEQ ID NO: 84869):EPLT-AA¹⁷-LYY (SEQ ID NO: 84876):EQLSN (SEQ ID NO: 84178):NMVKSSXGXH (SEQ ID NO: 84614), TVPKPXXVPQQL (SEQ ID NO: 84859):EPLT-AA¹⁷-LYY (SEQ ID NO: 84876):EQLSN (SEQ ID NO: 84178):NMVKSAXGXH (SEQ ID NO: 84612), AVPKAXXVPQKL (SEQ ID NO: 84709):EPLT-AA¹⁷-LYY (SEQ ID NO: 84876):EQLSN (SEQ ID NO: 84178):NMVKSAXGXH (SEQ ID NO: 84612), KVGKAXXVPQKL (SEQ ID NO: 84779):EPLT-AA¹⁷-LYY (SEQ ID NO: 84876):EQLSN (SEQ ID NO: 84178):EGMSVKSXGXR (SEQ ID NO: 84638), KASKAXXVPQKL (SEQ ID NO: 84759):EPLT-AA¹⁷-LYY (SEQ ID NO: 84876):EQLSN (SEQ ID NO: 84178):GMVKSEXGXR (SEQ ID NO: 84562), GSAGPXXVPQKM (SEQ ID NO: 84729):EPLT-AA¹⁷-LYY (SEQ ID NO: 84876):EQLSN (SEQ ID NO: 84178):GMVKSRXGXS (SEQ ID NO: 84563), AAPASXXVPQRL (SEQ ID NO: 84679):EPLT-AA¹⁷-LYY (SEQ ID NO: 84876):EQLSN (SEQ ID NO: 84178):DMVKSAXGXR (SEQ ID NO: 84500), STPPTXXVPQRL (SEQ ID NO: 84849):EPLT-AA¹⁷-LYY (SEQ ID NO: 84876):EQLSN (SEQ ID NO: 84178):DMVKSSXGXR (SEQ ID NO: 84501), HVPKPXXVPQKL (SEQ ID NO: 84739):EPLT-AA¹⁷-LYY (SEQ ID NO: 84876):EQLSN (SEQ ID NO: 84178):NMVKSSXGXH (SEQ ID NO: 84614), RVPSTXXVPQKT (SEQ ID NO: 84819):EPLT-AA¹⁷-LYY (SEQ ID NO: 84876):EQLSN (SEQ ID NO: 84178):MIVKSXGXL (SEQ ID NO: 84450), ASAAPXXVPQAL (SEQ ID NO: 84689):EPLT-AA¹⁷-LYY (SEQ ID NO: 84876):EQLSN (SEQ ID NO: 84178):MIVKSXKXS (SEQ ID NO: 84451), ASASPXXVPQDL (SEQ ID NO: 84699):EPLT-AA¹⁷-LYY (SEQ ID NO: 84876):EQLSN (SEQ ID NO: 84178):MIVKSXKXS (SEQ ID NO: 84451), NDEGLEXVPTGQ (SEQ ID NO: 84799):SNIT-AA¹⁷-QIM (SEQ ID NO: 84883):IGEMS (SEQ ID NO: 84209):LEQHNQXEXR (SEQ ID NO: 84578), KIPKAXXVPTEL (SEQ ID NO: 84770):SNIT-AA¹⁷-QIM (SEQ ID NO: 84883):IGEMS (SEQ ID NO: 84209):DMVVEGXGXR (SEQ ID NO: 84510), GIPEPXXVPEKM (SEQ ID NO: 84718):SNIT-AA¹⁷-QIM (SEQ ID NO: 84883):IGEMS (SEQ ID NO: 84209):NMTVESXAXR (SEQ ID NO: 84604), SIPKAXXVPTEL (SEQ ID NO: 84830):SNIT-AA¹⁷-QIM (SEQ ID NO: 84883):IGEMS (SEQ ID NO: 84209):EMVVEGXGXR (SEQ ID NO: 84529), HVTKPTXAPTKL (SEQ ID NO: 84742):SNIT-AA¹⁷-QIM (SEQ ID NO: 84883):IGEMS (SEQ ID NO: 84209):NMVVRSXGXH (SEQ ID NO: 84629), YVPKPXXAPTKL (SEQ ID NO: 84864):SNIT-AA¹⁷-QIM (SEQ ID NO: 84883):IGEMS (SEQ ID NO: 84209):NMVVRSXGXH (SEQ ID NO: 84629), TVPKPXXAPTQL (SEQ ID NO: 84854):SNIT-AA¹⁷-QIM (SEQ ID NO: 84883):IGEMS (SEQ ID NO: 84209):NMVVRAXGXH (SEQ ID NO: 84627), AVPKAXXAPTKL (SEQ ID NO: 84704):SNIT-AA¹⁷-QIM (SEQ ID NO: 84883):IGEMS (SEQ ID NO: 84209):NMVVKAXGXH (SEQ ID NO: 84624), KVGKAXXVPTKL (SEQ ID NO: 84780):SNIT-AA¹⁷-QIM (SEQ ID NO: 84883):IGEMS (SEQ ID NO: 84209):EGMSVAEXGXR (SEQ ID NO: 84636), KASKAXXVPTKL (SEQ ID NO: 84760):SNIT-AA¹⁷-QIM (SEQ ID NO: 84883):IGEMS (SEQ ID NO: 84209):GMAVSEXGXR (SEQ ID NO: 84546), GSAGPXXTPTKM (SEQ ID NO: 84726):SNIT-AA¹⁷-QIM (SEQ ID NO: 84883):IGEMS (SEQ ID NO: 84209):GMVVDRXGXS (SEQ ID NO: 84567), AAPASXXVPARL (SEQ ID NO: 84677):SNIT-AA¹⁷-QIM (SEQ ID NO: 84883):IGEMS (SEQ ID NO: 84209):DMVVEAXGXR (SEQ ID NO: 84509), STPPTXXVPTRL (SEQ ID NO: 84850):SNIT-AA¹⁷-QIM (SEQ ID NO: 84883):IGEMS (SEQ ID NO: 84209):DMVVESXGXR (SEQ ID NO: 84511), HVPKPXXAPTKL (SEQ ID NO: 84734):SNIT-AA¹⁷-QIM (SEQ ID NO: 84883):IGEMS (SEQ ID NO: 84209):NMVVRSXGXH (SEQ ID NO: 84629), RVPSTXXAPVKT (SEQ ID NO: 84815):SNIT-AA¹⁷-QIM (SEQ ID NO: 84883):IGEMS (SEQ ID NO: 84209):MIVEEXGXL (SEQ ID NO: 84448), ASAAPXXVPQAL (SEQ ID NO: 84689):SNIT-AA¹⁷-QIM (SEQ ID NO: 84883):IGEMS (SEQ ID NO: 84209):MIVRSXKXS (SEQ ID NO: 84453), ASASPXXVSQDL (SEQ ID NO: 84701):SNIT-AA¹⁷-QIM (SEQ ID NO: 84883):IGEMS (SEQ ID NO: 84209):MIVKSXKXS (SEQ ID NO: 84451), ASASPXXVPQDL (SEQ ID NO: 84699):SNIT-AA¹⁷-QIM (SEQ ID NO: 84883):IGEMS (SEQ ID NO: 84209):MVVKSXKXS (SEQ ID NO: 84470), NDEGLEXVPTGQ (SEQ ID NO: 84799):SNIT-AA¹⁷-QIM (SEQ ID NO: 84883):IGEMS (SEQ ID NO: 84209):LEEHSQXEXR (SEQ ID NO: 84577), SSVKXQPSRVHH (SEQ ID NO: 84834):SNIT-AA¹⁷-QIM (SEQ ID NO: 84883):IGEMS (SEQ ID NO: 84209):RLEEHLEXAXA (SEQ ID NO: 84646), RNVQXRPTQVQL (SEQ ID NO: 84806):SNIT-AA¹⁷-QIM (SEQ ID NO: 84883):IGEMS (SEQ ID NO: 84209):TLEDHLAXKXE (SEQ ID NO: 84659), NDEGLEXVPTEE (SEQ ID NO: 84798):SNIT-AA¹⁷-QIM (SEQ ID NO: 84883):LGEMS (SEQ ID NO: 84228):FLEHXKXESR (SEQ ID NO: 84535), KIPKAXXVPTEL (SEQ ID NO: 84770):SNIT-AA¹⁷-QIM (SEQ ID NO: 84883):LGEMS (SEQ ID NO: 84228):DMVVEGXGXR (SEQ ID NO: 84510), GIPEPXXVPEKM (SEQ ID NO: 84718):SNIT-AA¹⁷-QIM (SEQ ID NO: 84883):LGEMS (SEQ ID NO: 84228):NMTVESXAXR (SEQ ID NO: 84604), SIPKAXXVPTEL (SEQ ID NO: 84830):SNIT-AA¹⁷-QIM (SEQ ID NO: 84883):LGEMS (SEQ ID NO: 84228):EMVVEGXGXR (SEQ ID NO: 84529), HVTKPTXAPTKL (SEQ ID NO: 84742):SNIT-AA¹⁷-QIM (SEQ ID NO: 84883):LGEMS (SEQ ID NO: 84228):NMVVRSXGXH (SEQ ID NO: 84629), YVPKPXXAPTKL (SEQ ID NO: 84864):SNIT-AA¹⁷-QIM (SEQ ID NO: 84883):LGEMS (SEQ ID NO: 84228):NMVVRSXGXH (SEQ ID NO: 84629), TVPKPXXAPTQL (SEQ ID NO: 84854):SNIT-AA¹⁷-QIM (SEQ ID NO: 84883):LGEMS (SEQ ID NO: 84228):NMVVRAXGXH (SEQ ID NO: 84627), AVPKAXXAPTKL (SEQ ID NO: 84704):SNIT-AA¹⁷-QIM (SEQ ID NO: 84883):LGEMS (SEQ ID NO: 84228):NMVVKAXGXH (SEQ ID NO: 84624), KVGKAXXVPTKL (SEQ ID NO: 84780):SNIT-AA¹⁷-QIM (SEQ ID NO: 84883):LGEMS (SEQ ID NO: 84228):EGMSVAEXGXR (SEQ ID NO: 84636), KASKAXXVPTKL (SEQ ID NO: 84760):SNIT-AA¹⁷-QIM (SEQ ID NO: 84883):LGEMS (SEQ ID NO: 84228):GMAVSEXGXR (SEQ ID NO: 84546), GSAGPXXTPTKM (SEQ ID NO: 84726):SNIT-AA¹⁷-QIM (SEQ ID NO: 84883):LGEMS (SEQ ID NO: 84228):GMVVDRXGXS (SEQ ID NO: 84567), AAPASXXVPARL (SEQ ID NO: 84677):SNIT-AA¹⁷-QIM (SEQ ID NO: 84883):LGEMS (SEQ ID NO: 84228):DMVVEAXGXR (SEQ ID NO: 84509), STPPTXXVPTRL (SEQ ID NO: 84850):SNIT-AA¹⁷-QIM (SEQ ID NO: 84883):LGEMS (SEQ ID NO: 84228):DMVVESXGXR (SEQ ID NO: 84511), HVPKPXXAPTKL (SEQ ID NO: 84734):SNIT-AA¹⁷-QIM (SEQ ID NO: 84883):LGEMS (SEQ ID NO: 84228):NMVVRSXGXH (SEQ ID NO: 84629), RVPSTXXAPVKT (SEQ ID NO: 84815):SNIT-AA¹⁷-QIM (SEQ ID NO: 84883):LGEMS (SEQ ID NO: 84228):MIVEEXGXL (SEQ ID NO: 84448), ASAAPXXVPQAL (SEQ ID NO: 84689):SNIT-AA¹⁷-QIM (SEQ ID NO: 84883):LGEMS (SEQ ID NO: 84228):MIVRSXKXS (SEQ ID NO: 84453), ASASPXXVSQDL (SEQ ID NO: 84701):SNIT-AA¹⁷-QIM (SEQ ID NO: 84883):LGEMS (SEQ ID NO: 84228):MIVKSXKXS (SEQ ID NO: 84451), ASASPXXVPQDL (SEQ ID NO: 84699):SNIT-AA¹⁷-QIM (SEQ ID NO: 84883):LGEMS (SEQ ID NO: 84228):MVVKSXKXS (SEQ ID NO: 84470), NDEGLEXVPTEE (SEQ ID NO: 84798):SNIT-AA¹⁷-QIM (SEQ ID NO: 84883):LGEMS (SEQ ID NO: 84228):FLQHNKXEXR (SEQ ID NO: 84536), SSVKXQPSRVHH (SEQ ID NO: 84834):SNIT-AA¹⁷-QIM (SEQ ID NO: 84883):LGEMS (SEQ ID NO: 84228):RLEEHLEXAXA (SEQ ID NO: 84646), RNVQXRPTQVQL (SEQ ID NO: 84806):SNIT-AA¹⁷-QIM (SEQ ID NO: 84883):LGEMS (SEQ ID NO: 84228):TLEDHLAXKXE (SEQ ID NO: 84659), RNVQXRPSRVQL (SEQ ID NO: 84804):RSVK-AA¹⁷-AKV (SEQ ID NO: 84880):KEVQV (SEQ ID NO: 84210):TLEEHLAXKXE (SEQ ID NO: 84660), KIPKAXXVPTEL (SEQ ID NO: 84770):RSVK-AA¹⁷-AKV (SEQ ID NO: 84880):KEVQV (SEQ ID NO: 84210):DMVVEGXGXR (SEQ ID NO: 84510), GIPEPXXVPEKM (SEQ ID NO: 84718):RSVK-AA¹⁷-AKV (SEQ ID NO: 84880):KEVQV (SEQ ID NO: 84210):NMTVESXAXR (SEQ ID NO: 84604), SIPKAXXVPTEL (SEQ ID NO: 84830):RSVK-AA¹⁷-AKV (SEQ ID NO: 84880):KEVQV (SEQ ID NO: 84210):EMVVEGXGXR (SEQ ID NO: 84529), HVTKPTXAPTKL (SEQ ID NO: 84742):RSVK-AA¹⁷-AKV (SEQ ID NO: 84880):KEVQV (SEQ ID NO: 84210):NMVVRSXGXH (SEQ ID NO: 84629), YVPKPXXAPTKL (SEQ ID NO: 84864):RSVK-AA¹⁷-AKV (SEQ ID NO: 84880):KEVQV (SEQ ID NO: 84210):NMVVRSXGXH (SEQ ID NO: 84629), TVPKPXXAPTQL (SEQ ID NO: 84854):RSVK-AA¹⁷-AKV (SEQ ID NO: 84880):KEVQV (SEQ ID NO: 84210):NMVVRAXGXH (SEQ ID NO: 84627), AVPKAXXAPTKL (SEQ ID NO: 84704):RSVK-AA¹⁷-AKV (SEQ ID NO: 84880):KEVQV (SEQ ID NO: 84210):NMVVKAXGXH (SEQ ID NO: 84624), KVGKAXXVPTKL (SEQ ID NO: 84780):RSVK-AA¹⁷-AKV (SEQ ID NO: 84880):KEVQV (SEQ ID NO: 84210):EGMSVAEXGXR (SEQ ID NO: 84636), KASKAXXVPTKL (SEQ ID NO: 84760):RSVK-AA¹⁷-AKV (SEQ ID NO: 84880):KEVQV (SEQ ID NO: 84210):GMAVSEXGXR (SEQ ID NO: 84546), GSAGPXXTPTKM (SEQ ID NO: 84726):RSVK-AA¹⁷-AKV (SEQ ID NO: 84880):KEVQV (SEQ ID NO: 84210):GMVVDRXGXS (SEQ ID NO: 84567), AAPASXXVPARL (SEQ ID NO: 84677):RSVK-AA¹⁷-AKV (SEQ ID NO: 84880):KEVQV (SEQ ID NO: 84210):DMVVEAXGXR (SEQ ID NO: 84509), STPPTXXVPTRL (SEQ ID NO: 84850):RSVK-AA¹⁷-AKV (SEQ ID NO: 84880):KEVQV (SEQ ID NO: 84210):DMVVESXGXR (SEQ ID NO: 84511), HVPKPXXAPTKL (SEQ ID NO: 84734):RSVK-AA¹⁷-AKV (SEQ ID NO: 84880):KEVQV (SEQ ID NO: 84210):NMVVRSXGXH (SEQ ID NO: 84629), RVPSTXXAPVKT (SEQ ID NO: 84815):RSVK-AA¹⁷-AKV (SEQ ID NO: 84880):KEVQV (SEQ ID NO: 84210):MIVEEXGXL (SEQ ID NO: 84448), ASAAPXXVPQAL (SEQ ID NO: 84689):RSVK-AA¹⁷-AKV (SEQ ID NO: 84880):KEVQV (SEQ ID NO: 84210):MIVRSXKXS (SEQ ID NO: 84453), ASASPXXVSQDL (SEQ ID NO: 84701):RSVK-AA¹⁷-AKV (SEQ ID NO: 84880):KEVQV (SEQ ID NO: 84210):MIVKSXKXS (SEQ ID NO: 84451), ASASPXXVPQDL (SEQ ID NO: 84699):RSVK-AA¹⁷-AKV (SEQ ID NO: 84880):KEVQV (SEQ ID NO: 84210):MVVKSXKXS (SEQ ID NO: 84470), NDEGLEXVPTEE (SEQ ID NO: 84798):RSVK-AA¹⁷-AKV (SEQ ID NO: 84880):KEVQV (SEQ ID NO: 84210):FLQHNKXEXR (SEQ ID NO: 84536), NDEGLEXVPTGQ (SEQ ID NO: 84799):RSVK-AA¹⁷-AKV (SEQ ID NO: 84880):KEVQV (SEQ ID NO: 84210):LEEHSQXEXR (SEQ ID NO: 84577), RNVQXRPTQVQL (SEQ ID NO: 84806):RSVK-AA¹⁷-AKV (SEQ ID NO: 84880):KEVQV (SEQ ID NO: 84210):TLEDHLAXKXE (SEQ ID NO: 84659), SSVKXQPTQVHH (SEQ ID NO: 84836):RPVQ-AA¹⁷-RKI (SEQ ID NO: 84879):KKATV (SEQ ID NO: 84212):RLEDHLEXAXA (SEQ ID NO: 84645), KIPKAXXVPTEL (SEQ ID NO: 84770):RPVQ-AA¹⁷-RKI (SEQ ID NO: 84879):KKATV (SEQ ID NO: 84212):DMVVEGXGXR (SEQ ID NO: 84510), GIPEPXXVPEKM (SEQ ID NO: 84718):RPVQ-AA¹⁷-RKI (SEQ ID NO: 84879):KKATV (SEQ ID NO: 84212):NMTVESXAXR (SEQ ID NO: 84604), SIPKAXXVPTEL (SEQ ID NO: 84830):RPVQ-AA¹⁷-RKI (SEQ ID NO: 84879):KKATV (SEQ ID NO: 84212):EMVVEGXGXR (SEQ ID NO: 84529), HVTKPTXAPTKL (SEQ ID NO: 84742):RPVQ-AA¹⁷-RKI (SEQ ID NO: 84879):KKATV (SEQ ID NO: 84212):NMVVRSXGXH (SEQ ID NO: 84629), YVPKPXXAPTKL (SEQ ID NO: 84864):RPVQ-AA¹⁷-RKI (SEQ ID NO: 84879):KKATV (SEQ ID NO: 84212):NMVVRSXGXH (SEQ ID NO: 84629), TVPKPXXAPTQL (SEQ ID NO: 84854):RPVQ-AA¹⁷-RKI (SEQ ID NO: 84879):KKATV (SEQ ID NO: 84212):NMVVRAXGXH (SEQ ID NO: 84627), AVPKAXXAPTKL (SEQ ID NO: 84704):RPVQ-AA¹⁷-RKI (SEQ ID NO: 84879):KKATV (SEQ ID NO: 84212):NMVVKAXGXH (SEQ ID NO: 84624), KVGKAXXVPTKL (SEQ ID NO: 84780):RPVQ-AA¹⁷-RKI (SEQ ID NO: 84879):KKATV (SEQ ID NO: 84212):EGMSVAEXGXR (SEQ ID NO: 84636), KASKAXXVPTKL (SEQ ID NO: 84760):RPVQ-AA¹⁷-RKI (SEQ ID NO: 84879):KKATV (SEQ ID NO: 84212):GMAVSEXGXR (SEQ ID NO: 84546), GSAGPXXTPTKM (SEQ ID NO: 84726):RPVQ-AA¹⁷-RKI (SEQ ID NO: 84879):KKATV (SEQ ID NO: 84212):GMVVDRXGXS (SEQ ID NO: 84567), AAPASXXVPARL (SEQ ID NO: 84677):RPVQ-AA¹⁷-RKI (SEQ ID NO: 84879):KKATV (SEQ ID NO: 84212):DMVVEAXGXR (SEQ ID NO: 84509), STPPTXXVPTRL (SEQ ID NO: 84850):RPVQ-AA¹⁷-RKI (SEQ ID NO: 84879):KKATV (SEQ ID NO: 84212):DMVVESXGXR (SEQ ID NO: 84511), HVPKPXXAPTKL (SEQ ID NO: 84734):RPVQ-AA¹⁷-RKI (SEQ ID NO: 84879):KKATV (SEQ ID NO: 84212):NMVVRSXGXH (SEQ ID NO: 84629), RVPSTXXAPVKT (SEQ ID NO: 84815):RPVQ-AA¹⁷-RKI (SEQ ID NO: 84879):KKATV (SEQ ID NO: 84212):MIVEEXGXL (SEQ ID NO: 84448), ASAAPXXVPQAL (SEQ ID NO: 84689):RPVQ-AA¹⁷-RKI (SEQ ID NO: 84879):KKATV (SEQ ID NO: 84212):MIVRSXKXS (SEQ ID NO: 84453), ASASPXXVSQDL (SEQ ID NO: 84701):RPVQ-AA¹⁷-RKI (SEQ ID NO: 84879):KKATV (SEQ ID NO: 84212):MIVKSXKXS (SEQ ID NO: 84451), ASASPXXVPQDL (SEQ ID NO: 84699):RPVQ-AA¹⁷-RKI (SEQ ID NO: 84879):KKATV (SEQ ID NO: 84212):MVVKSXKXS (SEQ ID NO: 84470), NDEGLEXVPTEE (SEQ ID NO: 84798):RPVQ-AA¹⁷-RKI (SEQ ID NO: 84879):KKATV (SEQ ID NO: 84212):FLQHNKXEXR (SEQ ID NO: 84536), NDEGLEXVPTGQ (SEQ ID NO: 84799):RPVQ-AA¹⁷-RKI (SEQ ID NO: 84879):KKATV (SEQ ID NO: 84212):LEEHSQXEXR (SEQ ID NO: 84577) and SSVKXQPSRVHH (SEQ ID NO: 84834):RPVQ-AA¹⁷-RKI (SEQ ID NO: 84879):KKATV (SEQ ID NO: 84212):RLEEHLEXAXA (SEQ ID NO: 84646); and wherein AA¹⁷ is selected from the group consisting of G, A, V, L, I, P, F, M, W, T and S (in particular is selected from the group consisting of M, I, L, V and T).

[0401] In particular, in certain embodiments, the hexaplet PEP7:PEP3:PEP1:PEP2:PEP4:PEP8 is selected from the group consisting of GIPEPXX (SEQ ID NO: 84419):VPT:SAIS (SEQ ID NO: 84116):LKNYQ (SEQ ID NO: 84230):VVE:SXAXR (SEQ ID NO: 84303), SIPKAXX (SEQ ID NO: 84429):VPT:SAIS (SEQ ID NO: 84116):LKNYQ (SEQ ID NO: 84230):VVE:GXGXR (SEQ ID NO: 84208), HVTKPTX (SEQ ID NO: 84422):VPT:SAIS (SEQ ID NO: 84116):LKNYQ (SEQ ID NO: 84230):VVE:SXGXH (SEQ ID NO: 84304), YVPKPXX (SEQ ID NO: 84433):VPT:SAIS (SEQ ID NO: 84116):LKNYQ (SEQ ID NO: 84230):VVE:SXGXH (SEQ ID NO: 84304), TVPKPXX (SEQ ID NO: 84432):VPT:SAIS (SEQ ID NO: 84116):LKNYQ (SEQ ID NO: 84230):VVE:AXGXH (SEQ ID NO: 84147), AVPKAXX (SEQ ID NO: 84404):VPT:SAIS (SEQ ID NO: 84116):LKNYQ (SEQ ID NO: 84230):VVE:AXGXH (SEQ ID NO: 84147), KVGKAXX (SEQ ID NO: 84425):VPT:SAIS (SEQ ID NO: 84116):LKNYQ (SEQ ID NO: 84230):VVE:XGXR (SEQ ID NO: 84123), KASKAXX (SEQ ID NO: 84423):VPT:SAIS (SEQ ID NO: 84116):LKNYQ (SEQ ID NO: 84230):VVE:EXGXR (SEQ ID NO: 84179), GSAGPXX (SEQ ID NO: 84420):VPT:SAIS (SEQ ID NO: 84116):LKNYQ (SEQ ID NO: 84230):VVE:RXGXS (SEQ ID NO: 84291), AAPASXX (SEQ ID NO: 84401):VPT:SAIS (SEQ ID NO: 84116):LKNYQ (SEQ ID NO: 84230):VVE:AXGXR (SEQ ID NO: 84148), STPPTXX (SEQ ID NO: 84431):VPT:SAIS (SEQ ID NO: 84116):LKNYQ (SEQ ID NO: 84230):VVE:SXGXR (SEQ ID NO: 84305), HVPKPXX (SEQ ID NO: 84421):VPT:SAIS (SEQ ID NO: 84116):LKNYQ (SEQ ID NO: 84230):VVE:SXGXH (SEQ ID NO: 84304), RVPSTXX (SEQ ID NO: 84428):VPT:SAIS (SEQ ID NO: 84116):LKNYQ (SEQ ID NO: 84230):VVE:XGXL (SEQ ID NO: 84122), ASAAPXX (SEQ ID NO: 84402):VPT:SAIS (SEQ ID NO: 84116):LKNYQ (SEQ ID NO: 84230):VVE:XKXS (SEQ ID NO: 84124), ASASPXX (SEQ ID NO: 84403):VPT:SAIS (SEQ ID NO: 84116):LKNYQ (SEQ ID NO: 84230):VVE:XKXS (SEQ ID NO: 84124), NDEGLEX (SEQ ID NO: 84426):VPT:SAIS (SEQ ID NO: 84116):LKNYQ (SEQ ID NO: 84230):VVE:KXEXR (SEQ ID NO: 84213), NDEGLEX (SEQ ID NO: 84426):VPT:SAIS (SEQ ID NO: 84116):LKNYQ (SEQ ID NO: 84230):VVE:QXEXR (SEQ ID NO: 84276), SSVKXQP (SEQ ID NO: 84430):VPT:SAIS (SEQ ID NO: 84116):LKNYQ (SEQ ID NO: 84230):VVE:LEXAXA (SEQ ID NO: 84400), RNVQXRP (SEQ ID NO: 84427):VPT:SAIS (SEQ ID NO: 84116):LKNYQ (SEQ ID NO: 84230):VVE:LAXKXE (SEQ ID NO: 84399), GIPEPXX (SEQ ID NO: 84419):VPE:SAIS (SEQ ID NO: 84116):LKNYQ (SEQ ID NO: 84230):TVE:SXAXR (SEQ ID NO: 84303), HVTKPTX (SEQ ID NO: 84422):APT:SAIS (SEQ ID NO: 84116):LKNYQ (SEQ ID NO: 84230):VVR:SXGXH (SEQ ID NO: 84304), YVPKPXX (SEQ ID NO: 84433):APT:SAIS (SEQ ID NO: 84116):LKNYQ (SEQ ID NO: 84230):VVR:SXGXH (SEQ ID NO: 84304), TVPKPXX (SEQ ID NO: 84432):APT:SAIS (SEQ ID NO: 84116):LKNYQ (SEQ ID NO: 84230):VVR:AXGXH (SEQ ID NO: 84147), AVPKAXX (SEQ ID NO: 84404):APT:SAIS (SEQ ID NO: 84116):LKNYQ (SEQ ID NO: 84230):VVK:AXGXH (SEQ ID NO: 84147), KVGKAXX (SEQ ID NO: 84425):VPT:SAIS (SEQ ID NO: 84116):LKNYQ (SEQ ID NO: 84230):VAE:XGXR (SEQ ID NO: 84123), KASKAXX (SEQ ID NO: 84423):VPT:SAIS (SEQ ID NO: 84116):LKNYQ (SEQ ID NO: 84230):AVS:EXGXR (SEQ ID NO: 84179), GSAGPXX (SEQ ID NO: 84420):TPT:SAIS (SEQ ID NO: 84116):LKNYQ (SEQ ID NO: 84230):VVD:RXGXS (SEQ ID NO: 84291), AAPASXX (SEQ ID NO: 84401):VPA:SAIS (SEQ ID NO: 84116):LKNYQ (SEQ ID NO: 84230):VVE:AXGXR (SEQ ID NO: 84148), HVPKPXX (SEQ ID NO: 84421):APT:SAIS (SEQ ID NO: 84116):LKNYQ (SEQ ID NO: 84230):VVR:SXGXH (SEQ ID NO: 84304), RVPSTXX (SEQ ID NO: 84428):APV:SAIS (SEQ ID NO: 84116):LKNYQ (SEQ ID NO: 84230):VEE:XGXL (SEQ ID NO: 84122), ASAAPXX (SEQ ID NO: 84402):VPQ:SAIS (SEQ ID NO: 84116):LKNYQ (SEQ ID NO: 84230):VRS:XKXS (SEQ ID NO: 84124), ASASPXX (SEQ ID NO: 84403):VSQ:SAIS (SEQ ID NO: 84116):LKNYQ (SEQ ID NO: 84230):VKS:XKXS (SEQ ID NO: 84124), ASASPXX (SEQ ID NO: 84403):VPQ:SAIS (SEQ ID NO: 84116):LKNYQ (SEQ ID NO: 84230):VKS:XKXS (SEQ ID NO: 84124), NDEGLEX (SEQ ID NO: 84426):VPT:SAIS (SEQ ID NO: 84116):LKNYQ (SEQ ID NO: 84230):QHN:KXEXR (SEQ ID NO: 84213), NDEGLEX (SEQ ID NO: 84426):VPT:SAIS (SEQ ID NO: 84116):LKNYQ (SEQ ID NO: 84230):EHS:QXEXR (SEQ ID NO: 84276), SSVKXQP (SEQ ID NO: 84430):SRV:SAIS (SEQ ID NO: 84116):LKNYQ (SEQ ID NO: 84230):EEH:LEXAXA (SEQ ID NO: 84400), RNVQXRP (SEQ ID NO: 84427):TQV:SAIS (SEQ ID NO: 84116):LKNYQ (SEQ ID NO: 84230):EDH:LAXKXE (SEQ ID NO: 84399), KIPKAXX (SEQ ID NO: 84424):VPE:SSLS (SEQ ID NO: 84121):LKVYP (SEQ ID NO: 84231):TVE:GXGXR (SEQ ID NO: 84208), SIPKAXX (SEQ ID NO: 84429):VPE:SSLS (SEQ ID NO: 84121):LKVYP (SEQ ID NO: 84231):TVE:GXGXR (SEQ ID NO: 84208), HVTKPTX (SEQ ID NO: 84422):VPE:SSLS (SEQ ID NO: 84121):LKVYP (SEQ ID NO: 84231):TVE:SXGXH (SEQ ID NO: 84304), YVPKPXX (SEQ ID NO: 84433):VPE:SSLS (SEQ ID NO: 84121):LKVYP (SEQ ID NO: 84231):TVE:SXGXH (SEQ ID NO: 84304), TVPKPXX (SEQ ID NO: 84432):VPE:SSLS (SEQ ID NO: 84121):LKVYP (SEQ ID NO: 84231):TVE:AXGXH (SEQ ID NO: 84147), AVPKAXX (SEQ ID NO: 84404):VPE:SSLS (SEQ ID NO: 84121):LKVYP (SEQ ID NO: 84231):TVE:AXGXH (SEQ ID NO: 84147), KVGKAXX (SEQ ID NO: 84425):VPE:SSLS (SEQ ID NO: 84121):LKVYP (SEQ ID NO: 84231):TVE:XGXR (SEQ ID NO: 84123), KASKAXX (SEQ ID NO: 84423):VPE:SSLS (SEQ ID NO: 84121):LKVYP (SEQ ID NO: 84231):TVE:EXGXR (SEQ ID NO: 84179), GSAGPXX (SEQ ID NO: 84420):VPE:SSLS (SEQ ID NO: 84121):LKVYP (SEQ ID NO: 84231):TVE:RXGXS (SEQ ID NO: 84291), AAPASXX (SEQ ID NO: 84401):VPE:SSLS (SEQ ID NO: 84121):LKVYP (SEQ ID NO: 84231):TVE:AXGXR (SEQ ID NO: 84148), STPPTXX (SEQ ID NO: 84431):VPE:SSLS (SEQ ID NO: 84121):LKVYP (SEQ ID NO: 84231):TVE:SXGXR (SEQ ID NO: 84305), HVPKPXX (SEQ ID NO: 84421):VPE:SSLS (SEQ ID NO: 84121):LKVYP (SEQ ID NO: 84231):TVE:SXGXH (SEQ ID NO: 84304), RVPSTXX (SEQ ID NO: 84428):VPE:SSLS (SEQ ID NO: 84121):LKVYP (SEQ ID NO: 84231):TVE:XGXL (SEQ ID NO: 84122), ASAAPXX (SEQ ID NO: 84402):VPE:SSLS (SEQ ID NO: 84121):LKVYP (SEQ ID NO: 84231):TVE:XKXS (SEQ ID NO: 84124), ASASPXX (SEQ ID NO: 84403):VPE:SSLS (SEQ ID NO: 84121):LKVYP (SEQ ID NO: 84231):TVE:XKXS (SEQ ID NO: 84124), NDEGLEX (SEQ ID NO: 84426):VPE:SSLS (SEQ ID NO: 84121):LKVYP (SEQ ID NO: 84231):TVE:KXEXR (SEQ ID NO: 84213), NDEGLEX (SEQ ID NO: 84426):VPE:SSLS (SEQ ID NO: 84121):LKVYP (SEQ ID NO: 84231):TVE:QXEXR (SEQ ID NO: 84276), SSVKXQP (SEQ ID NO: 84430):VPE:SSLS (SEQ ID NO: 84121):LKVYP (SEQ ID NO: 84231):TVE:LEXAXA (SEQ ID NO: 84400), RNVQXRP (SEQ ID NO: 84427):VPE:SSLS (SEQ ID NO: 84121):LKVYP (SEQ ID NO: 84231):TVE:LAXKXE (SEQ ID NO: 84399), KIPKAXX (SEQ ID NO: 84424):VPT:SSLS (SEQ ID NO: 84121):LKVYP (SEQ ID NO: 84231):VVE:GXGXR (SEQ ID NO: 84208), SIPKAXX (SEQ ID NO: 84429):VPT:SSLS (SEQ ID NO: 84121):LKVYP (SEQ ID NO: 84231):VVE:GXGXR (SEQ ID NO: 84208), HVTKPTX (SEQ ID NO: 84422):APT:SSLS (SEQ ID NO: 84121):LKVYP (SEQ ID NO: 84231):VVR:SXGXH (SEQ ID NO: 84304), YVPKPXX (SEQ ID NO: 84433):APT:SSLS (SEQ ID NO: 84121):LKVYP (SEQ ID NO: 84231):VVR:SXGXH (SEQ ID NO: 84304), TVPKPXX (SEQ ID NO: 84432):APT:SSLS (SEQ ID NO: 84121):LKVYP (SEQ ID NO: 84231):VVR:AXGXH (SEQ ID NO: 84147), AVPKAXX (SEQ ID NO: 84404):APT:SSLS (SEQ ID NO: 84121):LKVYP (SEQ ID NO: 84231):VVK:AXGXH (SEQ ID NO: 84147), KVGKAXX (SEQ ID NO: 84425):VPT:SSLS (SEQ ID NO: 84121):LKVYP (SEQ ID NO: 84231):VAE:XGXR (SEQ ID NO: 84123), KASKAXX (SEQ ID NO: 84423):VPT:SSLS (SEQ ID NO: 84121):LKVYP (SEQ ID NO: 84231):AVS:EXGXR (SEQ ID NO: 84179), GSAGPXX (SEQ ID NO: 84420):TPT:SSLS (SEQ ID NO: 84121):LKVYP (SEQ ID NO: 84231):VVD:RXGXS (SEQ ID NO: 84291), AAPASXX (SEQ ID NO: 84401):VPA:SSLS (SEQ ID NO: 84121):LKVYP (SEQ ID NO: 84231):VVE:AXGXR (SEQ ID NO: 84148), STPPTXX (SEQ ID NO: 84431):VPT:SSLS (SEQ ID NO: 84121):LKVYP (SEQ ID NO: 84231):VVE:SXGXR (SEQ ID NO: 84305), HVPKPXX (SEQ ID NO: 84421):APT:SSLS (SEQ ID NO: 84121):LKVYP (SEQ ID NO: 84231):VVR:SXGXH (SEQ ID NO: 84304), RVPSTXX (SEQ ID NO: 84428):APV:SSLS (SEQ ID NO: 84121):LKVYP (SEQ ID NO: 84231):VEE:XGXL (SEQ ID NO: 84122), ASAAPXX (SEQ ID NO: 84402):VPQ:SSLS (SEQ ID NO: 84121):LKVYP (SEQ ID NO: 84231):VRS:XKXS (SEQ ID NO: 84124), ASASPXX (SEQ ID NO: 84403):VSQ:SSLS (SEQ ID NO: 84121):LKVYP (SEQ ID NO: 84231):VKS:XKXS (SEQ ID NO: 84124), ASASPXX (SEQ ID NO: 84403):VPQ:SSLS (SEQ ID NO: 84121):LKVYP (SEQ ID NO: 84231):VKS:XKXS (SEQ ID NO: 84124), NDEGLEX (SEQ ID NO: 84426):VPT:SSLS (SEQ ID NO: 84121):LKVYP (SEQ ID NO: 84231):QHN:KXEXR (SEQ ID NO: 84213), NDEGLEX (SEQ ID NO: 84426):VPT:SSLS (SEQ ID NO: 84121):LKVYP (SEQ ID NO: 84231):EHS:QXEXR (SEQ ID NO: 84276), SSVKXQP (SEQ ID NO: 84430):SRV:SSLS (SEQ ID NO: 84121):LKVYP (SEQ ID NO: 84231):EEH:LEXAXA (SEQ ID NO: 84400), RNVQXRP (SEQ ID NO: 84427):TQV:SSLS (SEQ ID NO: 84121):LKVYP (SEQ ID NO: 84231):EDH:LAXKXE (SEQ ID NO: 84399), KIPKAXX (SEQ ID NO: 84424):VPT:SAIS (SEQ ID NO: 84116):LKNYQ (SEQ ID NO: 84230):VVE:GXGXR (SEQ ID NO: 84208), KIPKAXX (SEQ ID NO: 84424):APT:NAIS (SEQ ID NO: 84113):LKKYR (SEQ ID NO: 84229):VVR:GXGXR (SEQ ID NO: 84208), GIPEPXX (SEQ ID NO: 84419):APT:NAIS (SEQ ID NO: 84113):LKKYR (SEQ ID NO: 84229):VVR:SXAXR (SEQ ID NO: 84303), SIPKAXX (SEQ ID NO: 84429):APT:NAIS (SEQ ID NO: 84113):LKKYR (SEQ ID NO: 84229):VVR:GXGXR (SEQ ID NO: 84208), YVPKPXX (SEQ ID NO: 84433):APT:NAIS (SEQ ID NO: 84113):LKKYR (SEQ ID NO: 84229):VVR:SXGXH (SEQ ID NO: 84304), TVPKPXX (SEQ ID NO: 84432):APT:NAIS (SEQ ID NO: 84113):LKKYR (SEQ ID NO: 84229):VVR:AXGXH (SEQ ID NO: 84147), AVPKAXX (SEQ ID NO: 84404):APT:NAIS (SEQ ID NO: 84113):LKKYR (SEQ ID NO: 84229):VVR:AXGXH (SEQ ID NO: 84147), KVGKAXX (SEQ ID NO: 84425):APT:NAIS (SEQ ID NO: 84113):LKKYR (SEQ ID NO: 84229):VVR:XGXR (SEQ ID NO: 84123), KASKAXX (SEQ ID NO: 84423):APT:NAIS (SEQ ID NO: 84113):LKKYR (SEQ ID NO: 84229):VVR:EXGXR (SEQ ID NO: 84179), GSAGPXX (SEQ ID NO: 84420):APT:NAIS (SEQ ID NO: 84113):LKKYR (SEQ ID NO: 84229):VVR:RXGXS (SEQ ID NO: 84291), AAPASXX (SEQ ID NO: 84401):APT:NAIS (SEQ ID NO: 84113):LKKYR (SEQ ID NO: 84229):VVR:AXGXR (SEQ ID NO: 84148), STPPTXX (SEQ ID NO: 84431):APT:NAIS (SEQ ID NO: 84113):LKKYR (SEQ ID NO: 84229):VVR:SXGXR (SEQ ID NO: 84305), HVPKPXX (SEQ ID NO: 84421):APT:NAIS (SEQ ID NO: 84113):LKKYR (SEQ ID NO: 84229):VVR:SXGXH (SEQ ID NO: 84304), RVPSTXX (SEQ ID NO: 84428):APT:NAIS (SEQ ID NO: 84113):LKKYR (SEQ ID NO: 84229):VVR:XGXL (SEQ ID NO: 84122), ASAAPXX (SEQ ID NO: 84402):APT:NAIS (SEQ ID NO: 84113):LKKYR (SEQ ID NO: 84229):VVR:XKXS (SEQ ID NO: 84124), ASASPXX (SEQ ID NO: 84403):APT:NAIS (SEQ ID NO: 84113):LKKYR (SEQ ID NO: 84229):VVR:XKXS (SEQ ID NO: 84124), NDEGLEX (SEQ ID NO: 84426):APT:NAIS (SEQ ID NO: 84113):LKKYR (SEQ ID NO: 84229):VVR:KXEXR (SEQ ID NO: 84213), NDEGLEX (SEQ ID NO: 84426):APT:NAIS (SEQ ID NO: 84113):LKKYR (SEQ ID NO: 84229):VVR:QXEXR (SEQ ID NO: 84276), SSVKXQP (SEQ ID NO: 84430):APT:NAIS (SEQ ID NO: 84113):LKKYR (SEQ ID NO: 84229):VVR:LEXAXA (SEQ ID NO: 84400), RNVQXRP (SEQ ID NO: 84427):APT:NAIS (SEQ ID NO: 84113):LKKYR (SEQ ID NO: 84229):VVR:LAXKXE (SEQ ID NO: 84399), KIPKAXX (SEQ ID NO: 84424):VPT:NAIS (SEQ ID NO: 84113):LKKYR (SEQ ID NO: 84229):VVE:GXGXR (SEQ ID NO: 84208), GIPEPXX (SEQ ID NO: 84419):VPE:NAIS (SEQ ID NO: 84113):LKKYR (SEQ ID NO: 84229):TVE:SXAXR (SEQ ID NO: 84303), SIPKAXX (SEQ ID NO: 84429):VPT:NAIS (SEQ ID NO: 84113):LKKYR (SEQ ID NO: 84229):VVE:GXGXR (SEQ ID NO: 84208), AVPKAXX (SEQ ID NO: 84404):APT:NAIS (SEQ ID NO: 84113):LKKYR (SEQ ID NO: 84229):VVK:AXGXH (SEQ ID NO: 84147), KVGKAXX (SEQ ID NO: 84425):VPT:NAIS (SEQ ID NO: 84113):LKKYR (SEQ ID NO: 84229):VAE:XGXR (SEQ ID NO: 84123), KASKAXX (SEQ ID NO: 84423):VPT:NAIS (SEQ ID NO: 84113):LKKYR (SEQ ID NO: 84229):AVS:EXGXR (SEQ ID NO: 84179), GSAGPXX (SEQ ID NO: 84420):TPT:NAIS (SEQ ID NO: 84113):LKKYR (SEQ ID NO: 84229):VVD:RXGXS (SEQ ID NO: 84291), AAPASXX (SEQ ID NO: 84401):VPA:NAIS (SEQ ID NO: 84113):LKKYR (SEQ ID NO: 84229):VVE:AXGXR (SEQ ID NO: 84148), STPPTXX (SEQ ID NO: 84431):VPT:NAIS (SEQ ID NO: 84113):LKKYR (SEQ ID NO: 84229):VVE:SXGXR (SEQ ID NO: 84305), RVPSTXX (SEQ ID NO: 84428):APV:NAIS (SEQ ID NO: 84113):LKKYR (SEQ ID NO: 84229):VEE:XGXL (SEQ ID NO: 84122), ASAAPXX (SEQ ID NO: 84402):VPQ:NAIS (SEQ ID NO: 84113):LKKYR (SEQ ID NO: 84229):VRS:XKXS (SEQ ID NO: 84124), ASASPXX (SEQ ID NO: 84403):VSQ:NAIS (SEQ ID NO: 84113):LKKYR (SEQ ID NO: 84229):VKS:XKXS (SEQ ID NO: 84124), ASASPXX (SEQ ID NO: 84403):VPQ:NAIS (SEQ ID NO: 84113):LKKYR (SEQ ID NO: 84229):VKS:XKXS (SEQ ID NO: 84124), NDEGLEX (SEQ ID NO: 84426):VPT:NAIS (SEQ ID NO: 84113):LKKYR (SEQ ID NO: 84229):QHN:KXEXR (SEQ ID NO: 84213), NDEGLEX (SEQ ID NO: 84426):VPT:NAIS (SEQ ID NO: 84113):LKKYR (SEQ ID NO: 84229):EHS:QXEXR (SEQ ID NO: 84276), SSVKXQP (SEQ ID NO: 84430):SRV:NAIS (SEQ ID NO: 84113):LKKYR (SEQ ID NO: 84229):EEH:LEXAXA (SEQ ID NO: 84400), RNVQXRP (SEQ ID NO: 84427):TQV:NAIS (SEQ ID NO: 84113):LKKYR (SEQ ID NO: 84229):EDH:LAXKXE (SEQ ID NO: 84399), HVTKPTX (SEQ ID NO: 84422):APT:NAIS (SEQ ID NO: 84113):LKKYR (SEQ ID NO: 84229):VVR:SXGXH (SEQ ID NO: 84304), KIPKAXX (SEQ ID NO: 84424):APT:SATS (SEQ ID NO: 84117):LRKHR (SEQ ID NO: 84233):VVK:GXGXR (SEQ ID NO: 84208), GIPEPXX (SEQ ID NO: 84419):APT:SATS (SEQ ID NO: 84117):LRKHR (SEQ ID NO: 84233):VVK:SXAXR (SEQ ID NO: 84303), SIPKAXX (SEQ ID NO: 84429):APT:SATS (SEQ ID NO: 84117):LRKHR (SEQ ID NO: 84233):VVK:GXGXR (SEQ ID NO: 84208), HVTKPTX (SEQ ID NO: 84422):APT:SATS (SEQ ID NO: 84117):LRKHR (SEQ ID NO: 84233):VVK:SXGXH (SEQ ID NO: 84304), YVPKPXX (SEQ ID NO: 84433):APT:SATS (SEQ ID NO: 84117):LRKHR (SEQ ID NO: 84233):VVK:SXGXH (SEQ ID NO: 84304), TVPKPXX (SEQ ID NO: 84432):APT:SATS (SEQ ID NO: 84117):LRKHR (SEQ ID NO: 84233):VVK:AXGXH (SEQ ID NO: 84147), KVGKAXX (SEQ ID NO: 84425):APT:SATS (SEQ ID NO: 84117):LRKHR (SEQ ID NO: 84233):VVK:XGXR (SEQ ID NO: 84123), KASKAXX (SEQ ID NO: 84423):APT:SATS (SEQ ID NO: 84117):LRKHR (SEQ ID NO: 84233):VVK:EXGXR (SEQ ID NO: 84179), GSAGPXX (SEQ ID NO: 84420):APT:SATS (SEQ ID NO: 84117):LRKHR (SEQ ID NO: 84233):VVK:RXGXS (SEQ ID NO: 84291), AAPASXX (SEQ ID NO: 84401):APT:SATS (SEQ ID NO: 84117):LRKHR (SEQ ID NO: 84233):VVK:AXGXR (SEQ ID NO: 84148), STPPTXX (SEQ ID NO: 84431):APT:SATS (SEQ ID NO: 84117):LRKHR (SEQ ID NO: 84233):VVK:SXGXR (SEQ ID NO: 84305), HVPKPXX (SEQ ID NO: 84421):APT:SATS (SEQ ID NO: 84117):LRKHR (SEQ ID NO: 84233):VVK:SXGXH (SEQ ID NO: 84304), RVPSTXX (SEQ ID NO: 84428):APT:SATS (SEQ ID NO: 84117):LRKHR (SEQ ID NO: 84233):VVK:XGXL (SEQ ID NO: 84122), ASAAPXX (SEQ ID NO: 84402):APT:SATS (SEQ ID NO: 84117):LRKHR (SEQ ID NO: 84233):VVK:XKXS (SEQ ID NO: 84124), ASASPXX (SEQ ID NO: 84403):APT:SATS (SEQ ID NO: 84117):LRKHR (SEQ ID NO: 84233):VVK:XKXS (SEQ ID NO: 84124), NDEGLEX (SEQ ID NO: 84426):APT:SATS (SEQ ID NO: 84117):LRKHR (SEQ ID NO: 84233):VVK:KXEXR (SEQ ID NO: 84213), NDEGLEX (SEQ ID NO: 84426):APT:SATS (SEQ ID NO: 84117):LRKHR (SEQ ID NO: 84233):VVK:QXEXR (SEQ ID NO: 84276), SSVKXQP (SEQ ID NO: 84430):APT:SATS (SEQ ID NO: 84117):LRKHR (SEQ ID NO: 84233):VVK:LEXAXA (SEQ ID NO: 84400), RNVQXRP (SEQ ID NO: 84427):APT:SATS (SEQ ID NO: 84117):LRKHR (SEQ ID NO: 84233):VVK:LAXKXE (SEQ ID NO: 84399), KIPKAXX (SEQ ID NO: 84424):VPT:SATS (SEQ ID NO: 84117):LRKHR (SEQ ID NO: 84233):VVE:GXGXR (SEQ ID NO: 84208), GIPEPXX (SEQ ID NO: 84419):VPE:SATS (SEQ ID NO: 84117):LRKHR (SEQ ID NO: 84233):TVE:SXAXR (SEQ ID NO: 84303), SIPKAXX (SEQ ID NO: 84429):VPT:SATS (SEQ ID NO: 84117):LRKHR (SEQ ID NO: 84233):VVE:GXGXR (SEQ ID NO: 84208), HVTKPTX (SEQ ID NO: 84422):APT:SATS (SEQ ID NO: 84117):LRKHR (SEQ ID NO: 84233):VVR:SXGXH (SEQ ID NO: 84304), YVPKPXX (SEQ ID NO: 84433):APT:SATS (SEQ ID NO: 84117):LRKHR (SEQ ID NO: 84233):VVR:SXGXH (SEQ ID NO: 84304), TVPKPXX (SEQ ID NO: 84432):APT:SATS (SEQ ID NO: 84117):LRKHR (SEQ ID NO: 84233):VVR:AXGXH (SEQ ID NO: 84147), KVGKAXX (SEQ ID NO: 84425):VPT:SATS (SEQ ID NO: 84117):LRKHR (SEQ ID NO: 84233):VAE:XGXR (SEQ ID NO: 84123), KASKAXX (SEQ ID NO: 84423):VPT:SATS (SEQ ID NO: 84117):LRKHR (SEQ ID NO: 84233):AVS:EXGXR (SEQ ID NO: 84179), GSAGPXX (SEQ ID NO: 84420):TPT:SATS (SEQ ID NO: 84117):LRKHR (SEQ ID NO: 84233):VVD:RXGXS (SEQ ID NO: 84291), AAPASXX (SEQ ID NO: 84401):VPA:SATS (SEQ ID NO: 84117):LRKHR (SEQ ID NO: 84233):VVE:AXGXR (SEQ ID NO: 84148), STPPTXX (SEQ ID NO: 84431):VPT:SATS (SEQ ID NO: 84117):LRKHR (SEQ ID NO: 84233):VVE:SXGXR (SEQ ID NO: 84305), HVPKPXX (SEQ ID NO: 84421):APT:SATS (SEQ ID NO: 84117):LRKHR (SEQ ID NO: 84233):VVR:SXGXH (SEQ ID NO: 84304), RVPSTXX (SEQ ID NO: 84428):APV:SATS (SEQ ID NO: 84117):LRKHR (SEQ ID NO: 84233):VEE:XGXL (SEQ ID NO: 84122), ASAAPXX (SEQ ID NO: 84402):VPQ:SATS (SEQ ID NO: 84117):LRKHR (SEQ ID NO: 84233):VRS:XKXS (SEQ ID NO: 84124), ASASPXX (SEQ ID NO: 84403):VSQ:SATS (SEQ ID NO: 84117):LRKHR (SEQ ID NO: 84233):VKS:XKXS (SEQ ID NO: 84124), ASASPXX (SEQ ID NO: 84403):VPQ:SATS (SEQ ID NO: 84117):LRKHR (SEQ ID NO: 84233):VKS:XKXS (SEQ ID NO: 84124), NDEGLEX (SEQ ID NO: 84426):VPT:SATS (SEQ ID NO: 84117):LRKHR (SEQ ID NO: 84233):QHN:KXEXR (SEQ ID NO: 84213), NDEGLEX (SEQ ID NO: 84426):VPT:SATS (SEQ ID NO: 84117):LRKHR (SEQ ID NO: 84233):EHS:QXEXR (SEQ ID NO: 84276), SSVKXQP (SEQ ID NO: 84430):SRV:SATS (SEQ ID NO: 84117):LRKHR (SEQ ID NO: 84233):EEH:LEXAXA (SEQ ID NO: 84400), RNVQXRP (SEQ ID NO: 84427):TQV:SATS (SEQ ID NO: 84117):LRKHR (SEQ ID NO: 84233):EDH:LAXKXE (SEQ ID NO: 84399), KIPKAXX (SEQ ID NO: 84424):VPT:SPIS (SEQ ID NO: 84120):LKYHY (SEQ ID NO: 84232):VAE:GXGXR (SEQ ID NO: 84208), GIPEPXX (SEQ ID NO: 84419):VPT:SPIS (SEQ ID NO: 84120):LKYHY (SEQ ID NO: 84232):VAE:SXAXR (SEQ ID NO: 84303), SIPKAXX (SEQ ID NO: 84429):VPT:SPIS (SEQ ID NO: 84120):LKYHY (SEQ ID NO: 84232):VAE:GXGXR (SEQ ID NO: 84208), HVTKPTX (SEQ ID NO: 84422):VPT:SPIS (SEQ ID NO: 84120):LKYHY (SEQ ID NO: 84232):VAE:SXGXH (SEQ ID NO: 84304), YVPKPXX (SEQ ID NO: 84433):VPT:SPIS (SEQ ID NO: 84120):LKYHY (SEQ ID NO: 84232):VAE:SXGXH (SEQ ID NO: 84304), TVPKPXX (SEQ ID NO: 84432):VPT:SPIS (SEQ ID NO: 84120):LKYHY (SEQ ID NO: 84232):VAE:AXGXH (SEQ ID NO: 84147), AVPKAXX (SEQ ID NO: 84404):VPT:SPIS (SEQ ID NO: 84120):LKYHY (SEQ ID NO: 84232):VAE:AXGXH (SEQ ID NO: 84147), KASKAXX (SEQ ID NO: 84423):VPT:SPIS (SEQ ID NO: 84120):LKYHY (SEQ ID NO: 84232):VAE:EXGXR (SEQ ID NO: 84179), GSAGPXX (SEQ ID NO: 84420):VPT:SPIS (SEQ ID NO: 84120):LKYHY (SEQ ID NO: 84232):VAE:RXGXS (SEQ ID NO: 84291), AAPASXX (SEQ ID NO: 84401):VPT:SPIS (SEQ ID NO: 84120):LKYHY (SEQ ID NO: 84232):VAE:AXGXR (SEQ ID NO: 84148), STPPTXX (SEQ ID NO: 84431):VPT:SPIS (SEQ ID NO: 84120):LKYHY (SEQ ID NO: 84232):VAE:SXGXR (SEQ ID NO: 84305), HVPKPXX (SEQ ID NO: 84421):VPT:SPIS (SEQ ID NO: 84120):LKYHY (SEQ ID NO: 84232):VAE:SXGXH (SEQ ID NO: 84304), RVPSTXX (SEQ ID NO: 84428):VPT:SPIS (SEQ ID NO: 84120):LKYHY (SEQ ID NO: 84232):VAE:XGXL (SEQ ID NO: 84122), ASAAPXX (SEQ ID NO: 84402):VPT:SPIS (SEQ ID NO: 84120):LKYHY (SEQ ID NO: 84232):VAE:XKXS (SEQ ID NO: 84124), ASASPXX (SEQ ID NO: 84403):VPT:SPIS (SEQ ID NO: 84120):LKYHY (SEQ ID NO: 84232):VAE:XKXS (SEQ ID NO: 84124), NDEGLEX (SEQ ID NO: 84426):VPT:SPIS (SEQ ID NO: 84120):LKYHY (SEQ ID NO: 84232):VAE:KXEXR (SEQ ID NO: 84213), NDEGLEX (SEQ ID NO: 84426):VPT:SPIS (SEQ ID NO: 84120):LKYHY (SEQ ID NO: 84232):VAE:QXEXR (SEQ ID NO: 84276), SSVKXQP (SEQ ID NO: 84430):VPT:SPIS (SEQ ID NO: 84120):LKYHY (SEQ ID NO: 84232):VAE:LEXAXA (SEQ ID NO: 84400), RNVQXRP (SEQ ID NO: 84427):VPT:SPIS (SEQ ID NO: 84120):LKYHY (SEQ ID NO: 84232):VAE:LAXKXE (SEQ ID NO: 84399), KIPKAXX (SEQ ID NO: 84424):VPT:SPIS (SEQ ID NO: 84120):LKYHY (SEQ ID NO: 84232):VVE:GXGXR (SEQ ID NO: 84208), GIPEPXX (SEQ ID NO: 84419):VPE:SPIS (SEQ ID NO: 84120):LKYHY (SEQ ID NO: 84232):TVE:SXAXR (SEQ ID NO: 84303), SIPKAXX (SEQ ID NO: 84429):VPT:SPIS (SEQ ID NO: 84120):LKYHY (SEQ ID NO: 84232):VVE:GXGXR (SEQ ID NO: 84208), HVTKPTX (SEQ ID NO: 84422):APT:SPIS (SEQ ID NO: 84120):LKYHY (SEQ ID NO: 84232):VVR:SXGXH (SEQ ID NO: 84304), YVPKPXX (SEQ ID NO: 84433):APT:SPIS (SEQ ID NO: 84120):LKYHY (SEQ ID NO: 84232):VVR:SXGXH (SEQ ID NO: 84304), TVPKPXX (SEQ ID NO: 84432):APT:SPIS (SEQ ID NO: 84120):LKYHY (SEQ ID NO: 84232):VVR:AXGXH (SEQ ID NO: 84147), AVPKAXX (SEQ ID NO: 84404):APT:SPIS (SEQ ID NO: 84120):LKYHY (SEQ ID NO: 84232):VVK:AXGXH (SEQ ID NO: 84147), KASKAXX (SEQ ID NO: 84423):VPT:SPIS (SEQ ID NO: 84120):LKYHY (SEQ ID NO: 84232):AVS:EXGXR (SEQ ID NO: 84179), GSAGPXX (SEQ ID NO: 84420):TPT:SPIS (SEQ ID NO: 84120):LKYHY (SEQ ID NO: 84232):VVD:RXGXS (SEQ ID NO: 84291), AAPASXX (SEQ ID NO: 84401):VPA:SPIS (SEQ ID NO: 84120):LKYHY (SEQ ID NO: 84232):VVE:AXGXR (SEQ ID NO: 84148), STPPTXX (SEQ ID NO: 84431):VPT:SPIS (SEQ ID NO: 84120):LKYHY (SEQ ID NO: 84232):VVE:SXGXR (SEQ ID NO: 84305), HVPKPXX (SEQ ID NO: 84421):APT:SPIS (SEQ ID NO: 84120):LKYHY (SEQ ID NO: 84232):VVR:SXGXH (SEQ ID NO: 84304), RVPSTXX (SEQ ID NO: 84428):APV:SPIS (SEQ ID NO: 84120):LKYHY (SEQ ID NO: 84232):VEE:XGXL (SEQ ID NO: 84122), ASAAPXX (SEQ ID NO: 84402):VPQ:SPIS (SEQ ID NO: 84120):LKYHY (SEQ ID NO: 84232):VRS:XKXS (SEQ ID NO: 84124), ASASPXX (SEQ ID NO: 84403):VSQ:SPIS (SEQ ID NO: 84120):LKYHY (SEQ ID NO: 84232):VKS:XKXS (SEQ ID NO: 84124), ASASPXX (SEQ ID NO: 84403):VPQ:SPIS (SEQ ID NO: 84120):LKYHY (SEQ ID NO: 84232):VKS:XKXS (SEQ ID NO: 84124), NDEGLEX (SEQ ID NO: 84426):VPT:SPIS (SEQ ID NO: 84120):LKYHY (SEQ ID NO: 84232):QHN:KXEXR (SEQ ID NO: 84213), NDEGLEX (SEQ ID NO: 84426):VPT:SPIS (SEQ ID NO: 84120):LKYHY (SEQ ID NO: 84232):EHS:QXEXR (SEQ ID NO: 84276), SSVKXQP (SEQ ID NO: 84430):SRV:SPIS (SEQ ID NO: 84120):LKYHY (SEQ ID NO: 84232):EEH:LEXAXA (SEQ ID NO: 84400), RNVQXRP (SEQ ID NO: 84427):TQV:SPIS (SEQ ID NO: 84120):LKYHY (SEQ ID NO: 84232):EDH:LAXKXE (SEQ ID NO: 84399), KIPKAXX (SEQ ID NO: 84424):VPT:EPIS (SEQ ID NO: 84109):KFKYE (SEQ ID NO: 84211):AVS:GXGXR (SEQ ID NO: 84208), GIPEPXX (SEQ ID NO: 84419):VPT:EPIS (SEQ ID NO: 84109):KFKYE (SEQ ID NO: 84211):AVS:SXAXR (SEQ ID NO: 84303), SIPKAXX (SEQ ID NO: 84429):VPT:EPIS (SEQ ID NO: 84109):KFKYE (SEQ ID NO: 84211):AVS:GXGXR (SEQ ID NO: 84208), HVTKPTX (SEQ ID NO: 84422):VPT:EPIS (SEQ ID NO: 84109):KFKYE (SEQ ID NO: 84211):AVS:SXGXH (SEQ ID NO: 84304), YVPKPXX (SEQ ID NO: 84433):VPT:EPIS (SEQ ID NO: 84109):KFKYE (SEQ ID NO: 84211):AVS:SXGXH (SEQ ID NO: 84304), TVPKPXX (SEQ ID NO: 84432):VPT:EPIS (SEQ ID NO: 84109):KFKYE (SEQ ID NO: 84211):AVS:AXGXH (SEQ ID NO: 84147), AVPKAXX (SEQ ID NO: 84404):VPT:EPIS (SEQ ID NO: 84109):KFKYE (SEQ ID NO: 84211):AVS:AXGXH (SEQ ID NO: 84147), KVGKAXX (SEQ ID NO: 84425):VPT:EPIS (SEQ ID NO: 84109):KFKYE (SEQ ID NO: 84211):AVS:XGXR (SEQ ID NO: 84123), GSAGPXX (SEQ ID NO: 84420):VPT:EPIS (SEQ ID NO: 84109):KFKYE (SEQ ID NO: 84211):AVS:RXGXS (SEQ ID NO: 84291), AAPASXX (SEQ ID NO: 84401):VPT:EPIS (SEQ ID NO: 84109):KFKYE (SEQ ID NO: 84211):AVS:AXGXR (SEQ ID NO: 84148), STPPTXX (SEQ ID NO: 84431):VPT:EPIS (SEQ ID NO: 84109):KFKYE (SEQ ID NO: 84211):AVS:SXGXR (SEQ ID NO: 84305), HVPKPXX (SEQ ID NO: 84421):VPT:EPIS (SEQ ID NO: 84109):KFKYE (SEQ ID NO: 84211):AVS:SXGXH (SEQ ID NO: 84304), RVPSTXX (SEQ ID NO: 84428):VPT:EPIS (SEQ ID NO: 84109):KFKYE (SEQ ID NO: 84211):AVS:XGXL (SEQ ID NO: 84122), ASAAPXX (SEQ ID NO: 84402):VPT:EPIS (SEQ ID NO: 84109):KFKYE (SEQ ID NO: 84211):AVS:XKXS (SEQ ID NO: 84124), ASASPXX (SEQ ID NO: 84403):VPT:EPIS (SEQ ID NO: 84109):KFKYE (SEQ ID NO: 84211):AVS:XKXS (SEQ ID NO: 84124), NDEGLEX (SEQ ID NO: 84426):VPT:EPIS (SEQ ID NO: 84109):KFKYE (SEQ ID NO: 84211):AVS:KXEXR (SEQ ID NO: 84213), NDEGLEX (SEQ ID NO: 84426):VPT:EPIS (SEQ ID NO: 84109):KFKYE (SEQ ID NO: 84211):AVS:QXEXR (SEQ ID NO: 84276), SSVKXQP (SEQ ID NO: 84430):VPT:EPIS (SEQ ID NO: 84109):KFKYE (SEQ ID NO: 84211):AVS:LEXAXA (SEQ ID NO: 84400), RNVQXRP (SEQ ID NO: 84427):VPT:EPIS (SEQ ID NO: 84109):KFKYE (SEQ ID NO: 84211):AVS:LAXKXE (SEQ ID NO: 84399), KIPKAXX (SEQ ID NO: 84424):VPT:EPIS (SEQ ID NO: 84109):KFKYE (SEQ ID NO: 84211):VVE:GXGXR (SEQ ID NO: 84208), GIPEPXX (SEQ ID NO: 84419):VPE:EPIS (SEQ ID NO: 84109):KFKYE (SEQ ID NO: 84211):TVE:SXAXR (SEQ ID NO: 84303), SIPKAXX (SEQ ID NO: 84429):VPT:EPIS (SEQ ID NO: 84109):KFKYE (SEQ ID NO: 84211):VVE:GXGXR (SEQ ID NO: 84208), HVTKPTX (SEQ ID NO: 84422):APT:EPIS (SEQ ID NO: 84109):KFKYE (SEQ ID NO: 84211):VVR:SXGXH (SEQ ID NO: 84304), YVPKPXX (SEQ ID NO: 84433):APT:EPIS (SEQ ID NO: 84109):KFKYE (SEQ ID NO: 84211):VVR:SXGXH (SEQ ID NO: 84304), TVPKPXX (SEQ ID NO: 84432):APT:EPIS (SEQ ID NO: 84109):KFKYE (SEQ ID NO: 84211):VVR:AXGXH (SEQ ID NO: 84147), AVPKAXX (SEQ ID NO: 84404):APT:EPIS (SEQ ID NO: 84109):KFKYE (SEQ ID NO: 84211):VVK:AXGXH (SEQ ID NO: 84147), KVGKAXX (SEQ ID NO: 84425):VPT:EPIS (SEQ ID NO: 84109):KFKYE (SEQ ID NO: 84211):VAE:XGXR (SEQ ID NO: 84123), GSAGPXX (SEQ ID NO: 84420):TPT:EPIS (SEQ ID NO: 84109):KFKYE (SEQ ID NO: 84211):VVD:RXGXS (SEQ ID NO: 84291), AAPASXX (SEQ ID NO: 84401):VPA:EPIS (SEQ ID NO: 84109):KFKYE (SEQ ID NO: 84211):VVE:AXGXR (SEQ ID NO: 84148), STPPTXX (SEQ ID NO: 84431):VPT:EPIS (SEQ ID NO: 84109):KFKYE (SEQ ID NO: 84211):VVE:SXGXR (SEQ ID NO: 84305), HVPKPXX (SEQ ID NO: 84421):APT:EPIS (SEQ ID NO: 84109):KFKYE (SEQ ID NO: 84211):VVR:SXGXH (SEQ ID NO: 84304), RVPSTXX (SEQ ID NO: 84428):APV:EPIS (SEQ ID NO: 84109):KFKYE (SEQ ID NO: 84211):VEE:XGXL (SEQ ID NO: 84122), ASAAPXX (SEQ ID NO: 84402):VPQ:EPIS (SEQ ID NO: 84109):KFKYE (SEQ ID NO: 84211):VRS:XKXS (SEQ ID NO: 84124), ASASPXX (SEQ ID NO: 84403):VSQ:EPIS (SEQ ID NO: 84109):KFKYE (SEQ ID NO: 84211):VKS:XKXS (SEQ ID NO: 84124), ASASPXX (SEQ ID NO: 84403):VPQ:EPIS (SEQ ID NO: 84109):KFKYE (SEQ ID NO: 84211):VKS:XKXS (SEQ ID NO: 84124), NDEGLEX (SEQ ID NO: 84426):VPT:EPIS (SEQ ID NO: 84109):KFKYE (SEQ ID NO: 84211):QHN:KXEXR (SEQ ID NO: 84213), NDEGLEX (SEQ ID NO: 84426):VPT:EPIS (SEQ ID NO: 84109):KFKYE (SEQ ID NO: 84211):EHS:QXEXR (SEQ ID NO: 84276), SSVKXQP (SEQ ID NO: 84430):SRV:EPIS (SEQ ID NO: 84109):KFKYE (SEQ ID NO: 84211):EEH:LEXAXA (SEQ ID NO: 84400), RNVQXRP (SEQ ID NO: 84427):TQV:EPIS (SEQ ID NO: 84109):KFKYE (SEQ ID NO: 84211):EDH:LAXKXE (SEQ ID NO: 84399), KIPKAXX (SEQ ID NO: 84424):TPT:SPIN (SEQ ID NO: 84119):YGKIP (SEQ ID NO: 84397):VVD:GXGXR (SEQ ID NO: 84208), GIPEPXX (SEQ ID NO: 84419):TPT:SPIN (SEQ ID NO: 84119):YGKIP (SEQ ID NO: 84397):VVD:SXAXR (SEQ ID NO: 84303), SIPKAXX (SEQ ID NO: 84429):TPT:SPIN (SEQ ID NO: 84119):YGKIP (SEQ ID NO: 84397):VVD:GXGXR (SEQ ID NO: 84208), HVTKPTX (SEQ ID NO: 84422):TPT:SPIN (SEQ ID NO: 84119):YGKIP (SEQ ID NO: 84397):VVD:SXGXH (SEQ ID NO: 84304), YVPKPXX (SEQ ID NO: 84433):TPT:SPIN (SEQ ID NO: 84119):YGKIP (SEQ ID NO: 84397):VVD:SXGXH (SEQ ID NO: 84304), TVPKPXX (SEQ ID NO: 84432):TPT:SPIN (SEQ ID NO: 84119):YGKIP (SEQ ID NO: 84397):VVD:AXGXH (SEQ ID NO: 84147), AVPKAXX (SEQ ID NO: 84404):TPT:SPIN (SEQ ID NO: 84119):YGKIP (SEQ ID NO: 84397):VVD:AXGXH (SEQ ID NO: 84147), KVGKAXX (SEQ ID NO: 84425):TPT:SPIN (SEQ ID NO: 84119):YGKIP (SEQ ID NO: 84397):VVD:XGXR (SEQ ID NO: 84123), KASKAXX (SEQ ID NO: 84423):TPT:SPIN (SEQ ID NO: 84119):YGKIP (SEQ ID NO: 84397):VVD:EXGXR (SEQ ID NO: 84179), AAPASXX (SEQ ID NO: 84401):TPT:SPIN (SEQ ID NO: 84119):YGKIP (SEQ ID NO: 84397):VVD:AXGXR (SEQ ID NO: 84148), STPPTXX (SEQ ID NO: 84431):TPT:SPIN (SEQ ID NO: 84119):YGKIP (SEQ ID NO: 84397):VVD:SXGXR (SEQ ID NO: 84305), HVPKPXX (SEQ ID NO: 84421):TPT:SPIN (SEQ ID NO: 84119):YGKIP (SEQ ID NO: 84397):VVD:SXGXH (SEQ ID NO: 84304), RVPSTXX (SEQ ID NO: 84428):TPT:SPIN (SEQ ID NO: 84119):YGKIP (SEQ ID NO: 84397):VVD:XGXL (SEQ ID NO: 84122), ASAAPXX (SEQ ID NO: 84402):TPT:SPIN (SEQ ID NO: 84119):YGKIP (SEQ ID NO: 84397):VVD:XKXS (SEQ ID NO: 84124), ASASPXX (SEQ ID NO: 84403):TPT:SPIN (SEQ ID NO: 84119):YGKIP (SEQ ID NO: 84397):VVD:XKXS (SEQ ID NO: 84124), NDEGLEX (SEQ ID NO: 84426):TPT:SPIN (SEQ ID NO: 84119):YGKIP (SEQ ID NO: 84397):VVD:KXEXR (SEQ ID NO: 84213), NDEGLEX (SEQ ID NO: 84426):TPT:SPIN (SEQ ID NO: 84119):YGKIP (SEQ ID NO: 84397):VVD:QXEXR (SEQ ID NO: 84276), SSVKXQP (SEQ ID NO: 84430):TPT:SPIN (SEQ ID NO: 84119):YGKIP (SEQ ID NO: 84397):VVD:LEXAXA (SEQ ID NO: 84400), RNVQXRP (SEQ ID NO: 84427):TPT:SPIN (SEQ ID NO: 84119):YGKIP (SEQ ID NO: 84397):VVD:LAXKXE (SEQ ID NO: 84399), KIPKAXX (SEQ ID NO: 84424):VPT:SPIN (SEQ ID NO: 84119):YGKIP (SEQ ID NO: 84397):VVE:GXGXR (SEQ ID NO: 84208), GIPEPXX (SEQ ID NO: 84419):VPE:SPIN (SEQ ID NO: 84119):YGKIP (SEQ ID NO: 84397):TVE:SXAXR (SEQ ID NO: 84303), SIPKAXX (SEQ ID NO: 84429):VPT:SPIN (SEQ ID NO: 84119):YGKIP (SEQ ID NO: 84397):VVE:GXGXR (SEQ ID NO: 84208), HVTKPTX (SEQ ID NO: 84422):APT:SPIN (SEQ ID NO: 84119):YGKIP (SEQ ID NO: 84397):VVR:SXGXH (SEQ ID NO: 84304), YVPKPXX (SEQ ID NO: 84433):APT:SPIN (SEQ ID NO: 84119):YGKIP (SEQ ID NO: 84397):VVR:SXGXH (SEQ ID NO: 84304), TVPKPXX (SEQ ID NO: 84432):APT:SPIN (SEQ ID NO: 84119):YGKIP (SEQ ID NO: 84397):VVR:AXGXH (SEQ ID NO: 84147), AVPKAXX (SEQ ID NO: 84404):APT:SPIN (SEQ ID NO: 84119):YGKIP (SEQ ID NO: 84397):VVK:AXGXH (SEQ ID NO: 84147), KVGKAXX (SEQ ID NO: 84425):VPT:SPIN (SEQ ID NO: 84119):YGKIP (SEQ ID NO: 84397):VAE:XGXR (SEQ ID NO: 84123), KASKAXX (SEQ ID NO: 84423):VPT:SPIN (SEQ ID NO: 84119):YGKIP (SEQ ID NO: 84397):AVS:EXGXR (SEQ ID NO: 84179), AAPASXX (SEQ ID NO: 84401):VPA:SPIN (SEQ ID NO: 84119):YGKIP (SEQ ID NO: 84397):VVE:AXGXR (SEQ ID NO: 84148), STPPTXX (SEQ ID NO: 84431):VPT:SPIN (SEQ ID NO: 84119):YGKIP (SEQ ID NO: 84397):VVE:SXGXR (SEQ ID NO: 84305), HVPKPXX (SEQ ID NO: 84421):APT:SPIN (SEQ ID NO: 84119):YGKIP (SEQ ID NO: 84397):VVR:SXGXH (SEQ ID NO: 84304), RVPSTXX (SEQ ID NO: 84428):APV:SPIN (SEQ ID NO: 84119):YGKIP (SEQ ID NO: 84397):VEE:XGXL (SEQ ID NO: 84122), ASAAPXX (SEQ ID NO: 84402):VPQ:SPIN (SEQ ID NO: 84119):YGKIP (SEQ ID NO: 84397):VRS:XKXS (SEQ ID NO: 84124), ASASPXX (SEQ ID NO: 84403):VSQ:SPIN (SEQ ID NO: 84119):YGKIP (SEQ ID NO: 84397):VKS:XKXS (SEQ ID NO: 84124), ASASPXX (SEQ ID NO: 84403):VPQ:SPIN (SEQ ID NO: 84119):YGKIP (SEQ ID NO: 84397):VKS:XKXS (SEQ ID NO: 84124), NDEGLEX (SEQ ID NO: 84426):VPT:SPIN (SEQ ID NO: 84119):YGKIP (SEQ ID NO: 84397):QHN:KXEXR (SEQ ID NO: 84213), NDEGLEX (SEQ ID NO: 84426):VPT:SPIN (SEQ ID NO: 84119):YGKIP (SEQ ID NO: 84397):EHS:QXEXR (SEQ ID NO: 84276), SSVKXQP (SEQ ID NO: 84430):SRV:SPIN (SEQ ID NO: 84119):YGKIP (SEQ ID NO: 84397):EEH:LEXAXA (SEQ ID NO: 84400), RNVQXRP (SEQ ID NO: 84427):TQV:SPIN (SEQ ID NO: 84119):YGKIP (SEQ ID NO: 84397):EDH:LAXKXE (SEQ ID NO: 84399), KIPKAXX (SEQ ID NO: 84424):VPA:SPIS (SEQ ID NO: 84120):YKQYE (SEQ ID NO: 84398):VVE:GXGXR (SEQ ID NO: 84208), GIPEPXX (SEQ ID NO: 84419):VPA:SPIS (SEQ ID NO: 84120):YKQYE (SEQ ID NO: 84398):VVE:SXAXR (SEQ ID NO: 84303), SIPKAXX (SEQ ID NO: 84429):VPA:SPIS (SEQ ID NO: 84120):YKQYE (SEQ ID NO: 84398):VVE:GXGXR (SEQ ID NO: 84208), HVTKPTX (SEQ ID NO: 84422):VPA:SPIS (SEQ ID NO: 84120):YKQYE (SEQ ID NO: 84398):VVE:SXGXH (SEQ ID NO: 84304), YVPKPXX (SEQ ID NO: 84433):VPA:SPIS (SEQ ID NO: 84120):YKQYE (SEQ ID NO: 84398):VVE:SXGXH (SEQ ID NO: 84304), TVPKPXX (SEQ ID NO: 84432):VPA:SPIS (SEQ ID NO: 84120):YKQYE (SEQ ID NO: 84398):VVE:AXGXH (SEQ ID NO: 84147), AVPKAXX (SEQ ID NO: 84404):VPA:SPIS (SEQ ID NO: 84120):YKQYE (SEQ ID NO: 84398):VVE:AXGXH (SEQ ID NO: 84147), KVGKAXX (SEQ ID NO: 84425):VPA:SPIS (SEQ ID NO: 84120):YKQYE (SEQ ID NO: 84398):VVE:XGXR (SEQ ID NO: 84123), KASKAXX (SEQ ID NO: 84423):VPA:SPIS (SEQ ID NO: 84120):YKQYE (SEQ ID NO: 84398):VVE:EXGXR (SEQ ID NO: 84179), GSAGPXX (SEQ ID NO: 84420):VPA:SPIS (SEQ ID NO: 84120):YKQYE (SEQ ID NO: 84398):VVE:RXGXS (SEQ ID NO: 84291), STPPTXX (SEQ ID NO: 84431):VPA:SPIS (SEQ ID NO: 84120):YKQYE (SEQ ID NO: 84398):VVE:SXGXR (SEQ ID NO: 84305), HVPKPXX (SEQ ID NO: 84421):VPA:SPIS (SEQ ID NO: 84120):YKQYE (SEQ ID NO: 84398):VVE:SXGXH (SEQ ID NO: 84304), RVPSTXX (SEQ ID NO: 84428):VPA:SPIS (SEQ ID NO: 84120):YKQYE (SEQ ID NO: 84398):VVE:XGXL (SEQ ID NO: 84122), ASAAPXX (SEQ ID NO: 84402):VPA:SPIS (SEQ ID NO: 84120):YKQYE (SEQ ID NO: 84398):VVE:XKXS (SEQ ID NO: 84124), ASASPXX (SEQ ID NO: 84403):VPA:SPIS (SEQ ID NO: 84120):YKQYE (SEQ ID NO: 84398):VVE:XKXS (SEQ ID NO: 84124), NDEGLEX (SEQ ID NO: 84426):VPA:SPIS (SEQ ID NO: 84120):YKQYE (SEQ ID NO: 84398):VVE:KXEXR (SEQ ID NO: 84213), NDEGLEX (SEQ ID NO: 84426):VPA:SPIS (SEQ ID NO: 84120):YKQYE (SEQ ID NO: 84398):VVE:QXEXR (SEQ ID NO: 84276), SSVKXQP (SEQ ID NO: 84430):VPA:SPIS (SEQ ID NO: 84120):YKQYE (SEQ ID NO: 84398):VVE:LEXAXA (SEQ ID NO: 84400), RNVQXRP (SEQ ID NO: 84427):VPA:SPIS (SEQ ID NO: 84120):YKQYE (SEQ ID NO: 84398):VVE:LAXKXE (SEQ ID NO: 84399), KIPKAXX (SEQ ID NO: 84424):VPT:SPIS (SEQ ID NO: 84120):YKQYE (SEQ ID NO: 84398):VVE:GXGXR (SEQ ID NO: 84208), GIPEPXX (SEQ ID NO: 84419):VPE:SPIS (SEQ ID NO: 84120):YKQYE (SEQ ID NO: 84398):TVE:SXAXR (SEQ ID NO: 84303), SIPKAXX (SEQ ID NO: 84429):VPT:SPIS (SEQ ID NO: 84120):YKQYE (SEQ ID NO: 84398):VVE:GXGXR (SEQ ID NO: 84208), HVTKPTX (SEQ ID NO: 84422):APT:SPIS (SEQ ID NO: 84120):YKQYE (SEQ ID NO: 84398):VVR:SXGXH (SEQ ID NO: 84304), YVPKPXX (SEQ ID NO: 84433):APT:SPIS (SEQ ID NO: 84120):YKQYE (SEQ ID NO: 84398):VVR:SXGXH (SEQ ID NO: 84304), TVPKPXX (SEQ ID NO: 84432):APT:SPIS (SEQ ID NO: 84120):YKQYE (SEQ ID NO: 84398):VVR:AXGXH (SEQ ID NO: 84147), AVPKAXX (SEQ ID NO: 84404):APT:SPIS (SEQ ID NO: 84120):YKQYE (SEQ ID NO: 84398):VVK:AXGXH (SEQ ID NO: 84147), KVGKAXX (SEQ ID NO: 84425):VPT:SPIS (SEQ ID NO: 84120):YKQYE (SEQ ID NO: 84398):VAE:XGXR (SEQ ID NO: 84123), KASKAXX (SEQ ID NO: 84423):VPT:SPIS (SEQ ID NO: 84120):YKQYE (SEQ ID NO: 84398):AVS:EXGXR (SEQ ID NO: 84179), GSAGPXX (SEQ ID NO: 84420):TPT:SPIS (SEQ ID NO: 84120):YKQYE (SEQ ID NO: 84398):VVD:RXGXS (SEQ ID NO: 84291), STPPTXX (SEQ ID NO: 84431):VPT:SPIS (SEQ ID NO: 84120):YKQYE (SEQ ID NO: 84398):VVE:SXGXR (SEQ ID NO: 84305), HVPKPXX (SEQ ID NO: 84421):APT:SPIS (SEQ ID NO: 84120):YKQYE (SEQ ID NO: 84398):VVR:SXGXH (SEQ ID NO: 84304), RVPSTXX (SEQ ID NO: 84428):APV:SPIS (SEQ ID NO: 84120):YKQYE (SEQ ID NO: 84398):VEE:XGXL (SEQ ID NO: 84122), ASAAPXX (SEQ ID NO: 84402):VPQ:SPIS (SEQ ID NO: 84120):YKQYE (SEQ ID NO: 84398):VRS:XKXS (SEQ ID NO: 84124), ASASPXX (SEQ ID NO: 84403):VSQ:SPIS (SEQ ID NO: 84120):YKQYE (SEQ ID NO: 84398):VKS:XKXS (SEQ ID NO: 84124), ASASPXX (SEQ ID NO: 84403):VPQ:SPIS (SEQ ID NO: 84120):YKQYE (SEQ ID NO: 84398):VKS:XKXS (SEQ ID NO: 84124), NDEGLEX (SEQ ID NO: 84426):VPT:SPIS (SEQ ID NO: 84120):YKQYE (SEQ ID NO: 84398):QHN:KXEXR (SEQ ID NO: 84213), NDEGLEX (SEQ ID NO: 84426):VPT:SPIS (SEQ ID NO: 84120):YKQYE (SEQ ID NO: 84398):EHS:QXEXR (SEQ ID NO: 84276), SSVKXQP (SEQ ID NO: 84430):SRV:SPIS (SEQ ID NO: 84120):YKQYE (SEQ ID NO: 84398):EEH:LEXAXA (SEQ ID NO: 84400), RNVQXRP (SEQ ID NO: 84427):TQV:SPIS (SEQ ID NO: 84120):YKQYE (SEQ ID NO: 84398):EDH:LAXKXE (SEQ ID NO: 84399), GIPEPXX (SEQ ID NO: 84419):VPT:SPIS (SEQ ID NO: 84120):YKQYE (SEQ ID NO: 84398):VVE:SXAXR (SEQ ID NO: 84303), HVTKPTX (SEQ ID NO: 84422):VPT:SPIS (SEQ ID NO: 84120):YKQYE (SEQ ID NO: 84398):VVE:SXGXH (SEQ ID NO: 84304), YVPKPXX (SEQ ID NO: 84433):VPT:SPIS (SEQ ID NO: 84120):YKQYE (SEQ ID NO: 84398):VVE:SXGXH (SEQ ID NO: 84304), TVPKPXX (SEQ ID NO: 84432):VPT:SPIS (SEQ ID NO: 84120):YKQYE (SEQ ID NO: 84398):VVE:AXGXH (SEQ ID NO: 84147), AVPKAXX (SEQ ID NO: 84404):VPT:SPIS (SEQ ID NO: 84120):YKQYE (SEQ ID NO: 84398):VVE:AXGXH (SEQ ID NO: 84147), KVGKAXX (SEQ ID NO: 84425):VPT:SPIS (SEQ ID NO: 84120):YKQYE (SEQ ID NO: 84398):VVE:XGXR (SEQ ID NO: 84123), KASKAXX (SEQ ID NO: 84423):VPT:SPIS (SEQ ID NO: 84120):YKQYE (SEQ ID NO: 84398):VVE:EXGXR (SEQ ID NO: 84179), GSAGPXX (SEQ ID NO: 84420):VPT:SPIS (SEQ ID NO: 84120):YKQYE (SEQ ID NO: 84398):VVE:RXGXS (SEQ ID NO: 84291), AAPASXX (SEQ ID NO: 84401):VPT:SPIS (SEQ ID NO: 84120):YKQYE (SEQ ID NO: 84398):VVE:AXGXR (SEQ ID NO: 84148), HVPKPXX (SEQ ID NO: 84421):VPT:SPIS (SEQ ID NO: 84120):YKQYE (SEQ ID NO: 84398):VVE:SXGXH (SEQ ID NO: 84304), RVPSTXX (SEQ ID NO: 84428):VPT:SPIS (SEQ ID NO: 84120):YKQYE (SEQ ID NO: 84398):VVE:XGXL (SEQ ID NO: 84122), ASAAPXX (SEQ ID NO: 84402):VPT:SPIS (SEQ ID NO: 84120):YKQYE (SEQ ID NO: 84398):VVE:XKXS (SEQ ID NO: 84124), ASASPXX (SEQ ID NO: 84403):VPT:SPIS (SEQ ID NO: 84120):YKQYE (SEQ ID NO: 84398):VVE:XKXS (SEQ ID NO: 84124), NDEGLEX (SEQ ID NO: 84426):VPT:SPIS (SEQ ID NO: 84120):YKQYE (SEQ ID NO: 84398):VVE:KXEXR (SEQ ID NO: 84213), NDEGLEX (SEQ ID NO: 84426):VPT:SPIS (SEQ ID NO: 84120):YKQYE (SEQ ID NO: 84398):VVE:QXEXR (SEQ ID NO: 84276), SSVKXQP (SEQ ID NO: 84430):VPT:SPIS (SEQ ID NO: 84120):YKQYE (SEQ ID NO: 84398):VVE:LEXAXA (SEQ ID NO: 84400), RNVQXRP (SEQ ID NO: 84427):VPT:SPIS (SEQ ID NO: 84120):YKQYE (SEQ ID NO: 84398):VVE:LAXKXE (SEQ ID NO: 84399), AAPASXX (SEQ ID NO: 84401):VPA:SPIS (SEQ ID NO: 84120):YKQYE (SEQ ID NO: 84398):VVE:AXGXR (SEQ ID NO: 84148), KIPKAXX (SEQ ID NO: 84424):APV:KPLS (SEQ ID NO: 84112):DHHKD (SEQ ID NO: 84149):VEE:GXGXR (SEQ ID NO: 84208), GIPEPXX (SEQ ID NO: 84419):APV:KPLS (SEQ ID NO: 84112):DHHKD (SEQ ID NO: 84149):VEE:SXAXR (SEQ ID NO: 84303), SIPKAXX (SEQ ID NO: 84429):APV:KPLS (SEQ ID NO: 84112):DHHKD (SEQ ID NO: 84149):VEE:GXGXR (SEQ ID NO: 84208), HVTKPTX (SEQ ID NO: 84422):APV:KPLS (SEQ ID NO: 84112):DHHKD (SEQ ID NO: 84149):VEE:SXGXH (SEQ ID NO: 84304), YVPKPXX (SEQ ID NO: 84433):APV:KPLS (SEQ ID NO: 84112):DHHKD (SEQ ID NO: 84149):VEE:SXGXH (SEQ ID NO: 84304), TVPKPXX (SEQ ID NO: 84432):APV:KPLS (SEQ ID NO: 84112):DHHKD (SEQ ID NO: 84149):VEE:AXGXH (SEQ ID NO: 84147), AVPKAXX (SEQ ID NO: 84404):APV:KPLS (SEQ ID NO: 84112):DHHKD (SEQ ID NO: 84149):VEE:AXGXH (SEQ ID NO: 84147), KVGKAXX (SEQ ID NO: 84425):APV:KPLS (SEQ ID NO: 84112):DHHKD (SEQ ID NO: 84149):VEE:XGXR (SEQ ID NO: 84123), KASKAXX (SEQ ID NO: 84423):APV:KPLS (SEQ ID NO: 84112):DHHKD (SEQ ID NO: 84149):VEE:EXGXR (SEQ ID NO: 84179), GSAGPXX (SEQ ID NO: 84420):APV:KPLS (SEQ ID NO: 84112):DHHKD (SEQ ID NO: 84149):VEE:RXGXS (SEQ ID NO: 84291), AAPASXX (SEQ ID NO: 84401):APV:KPLS (SEQ ID NO: 84112):DHHKD (SEQ ID NO: 84149):VEE:AXGXR (SEQ ID NO: 84148), STPPTXX (SEQ ID NO: 84431):APV:KPLS (SEQ ID NO: 84112):DHHKD (SEQ ID NO: 84149):VEE:SXGXR (SEQ ID NO: 84305), HVPKPXX (SEQ ID NO: 84421):APV:KPLS (SEQ ID NO: 84112):DHHKD (SEQ ID NO: 84149):VEE:SXGXH (SEQ ID NO: 84304), ASAAPXX (SEQ ID NO: 84402):APV:KPLS (SEQ ID NO: 84112):DHHKD (SEQ ID NO: 84149):VEE:XKXS (SEQ ID NO: 84124), ASASPXX (SEQ ID NO: 84403):APV:KPLS (SEQ ID NO: 84112):DHHKD (SEQ ID NO: 84149):VEE:XKXS (SEQ ID NO: 84124), NDEGLEX (SEQ ID NO: 84426):APV:KPLS (SEQ ID NO: 84112):DHHKD (SEQ ID NO: 84149):VEE:KXEXR (SEQ ID NO: 84213), NDEGLEX (SEQ ID NO: 84426):APV:KPLS (SEQ ID NO: 84112):DHHKD (SEQ ID NO: 84149):VEE:QXEXR (SEQ ID NO: 84276), SSVKXQP (SEQ ID NO: 84430):APV:KPLS (SEQ ID NO: 84112):DHHKD (SEQ ID NO: 84149):VEE:LEXAXA (SEQ ID NO: 84400), RNVQXRP (SEQ ID NO: 84427):APV:KPLS (SEQ ID NO: 84112):DHHKD (SEQ ID NO: 84149):VEE:LAXKXE (SEQ ID NO: 84399), KIPKAXX (SEQ ID NO: 84424):VPT:KPLS (SEQ ID NO: 84112):DHHKD (SEQ ID NO: 84149):VVE:GXGXR (SEQ ID NO: 84208), GIPEPXX (SEQ ID NO: 84419):VPE:KPLS (SEQ ID NO: 84112):DHHKD (SEQ ID NO: 84149):TVE:SXAXR (SEQ ID NO: 84303), SIPKAXX (SEQ ID NO: 84429):VPT:KPLS (SEQ ID NO: 84112):DHHKD (SEQ ID NO: 84149):VVE:GXGXR (SEQ ID NO: 84208), HVTKPTX (SEQ ID NO: 84422):APT:KPLS (SEQ ID NO: 84112):DHHKD (SEQ ID NO: 84149):VVR:SXGXH (SEQ ID NO: 84304), YVPKPXX (SEQ ID NO: 84433):APT:KPLS (SEQ ID NO: 84112):DHHKD (SEQ ID NO: 84149):VVR:SXGXH (SEQ ID NO: 84304), TVPKPXX (SEQ ID NO: 84432):APT:KPLS (SEQ ID NO: 84112):DHHKD (SEQ ID NO: 84149):VVR:AXGXH (SEQ ID NO: 84147), AVPKAXX (SEQ ID NO: 84404):APT:KPLS (SEQ ID NO: 84112):DHHKD (SEQ ID NO: 84149):VVK:AXGXH (SEQ ID NO: 84147), KVGKAXX (SEQ ID NO: 84425):VPT:KPLS (SEQ ID NO: 84112):DHHKD (SEQ ID NO: 84149):VAE:XGXR (SEQ ID NO: 84123), KASKAXX (SEQ ID NO: 84423):VPT:KPLS (SEQ ID NO: 84112):DHHKD (SEQ ID NO: 84149):AVS:EXGXR (SEQ ID NO: 84179), GSAGPXX (SEQ ID NO: 84420):TPT:KPLS (SEQ ID NO: 84112):DHHKD (SEQ ID NO: 84149):VVD:RXGXS (SEQ ID NO: 84291), AAPASXX (SEQ ID NO: 84401):VPA:KPLS (SEQ ID NO: 84112):DHHKD (SEQ ID NO: 84149):VVE:AXGXR (SEQ ID NO: 84148), STPPTXX (SEQ ID NO: 84431):VPT:KPLS (SEQ ID NO: 84112):DHHKD (SEQ ID NO: 84149):VVE:SXGXR (SEQ ID NO: 84305), HVPKPXX (SEQ ID NO: 84421):APT:KPLS (SEQ ID NO: 84112):DHHKD (SEQ ID NO: 84149):VVR:SXGXH (SEQ ID NO: 84304), ASAAPXX (SEQ ID NO: 84402):VPQ:KPLS (SEQ ID NO: 84112):DHHKD (SEQ ID NO: 84149):VRS:XKXS (SEQ ID NO: 84124), ASASPXX (SEQ ID NO: 84403):VSQ:KPLS (SEQ ID NO: 84112):DHHKD (SEQ ID NO: 84149):VKS:XKXS (SEQ ID NO: 84124), ASASPXX (SEQ ID NO: 84403):VPQ:KPLS (SEQ ID NO: 84112):DHHKD (SEQ ID NO: 84149):VKS:XKXS (SEQ ID NO: 84124), NDEGLEX (SEQ ID NO: 84426):VPT:KPLS (SEQ ID NO: 84112):DHHKD (SEQ ID NO: 84149):QHN:KXEXR (SEQ ID NO: 84213), NDEGLEX (SEQ ID NO: 84426):VPT:KPLS (SEQ ID NO: 84112):DHHKD (SEQ ID NO: 84149):EHS:QXEXR (SEQ ID NO: 84276), SSVKXQP (SEQ ID NO: 84430):SRV:KPLS (SEQ ID NO: 84112):DHHKD (SEQ ID NO: 84149):EEH:LEXAXA (SEQ ID NO: 84400), RNVQXRP (SEQ ID NO: 84427):TQV:KPLS (SEQ ID NO: 84112):DHHKD (SEQ ID NO: 84149):EDH:LAXKXE (SEQ ID NO: 84399), KIPKAXX (SEQ ID NO: 84424):VPQ:EPLP (SEQ ID NO: 84110):EQLSN (SEQ ID NO: 84178):VRS:GXGXR (SEQ ID NO: 84208), GIPEPXX (SEQ ID NO: 84419):VPQ:EPLP (SEQ ID NO: 84110):EQLSN (SEQ ID NO: 84178):VRS:SXAXR (SEQ ID NO: 84303), SIPKAXX (SEQ ID NO: 84429):VPQ:EPLP (SEQ ID NO: 84110):EQLSN (SEQ ID NO: 84178):VRS:GXGXR (SEQ ID NO: 84208), HVTKPTX (SEQ ID NO: 84422):VPQ:EPLP (SEQ ID NO: 84110):EQLSN (SEQ ID NO: 84178):VRS:SXGXH (SEQ ID NO: 84304), YVPKPXX (SEQ ID NO: 84433):VPQ:EPLP (SEQ ID NO: 84110):EQLSN (SEQ ID NO: 84178):VRS:SXGXH (SEQ ID NO: 84304), TVPKPXX (SEQ ID NO: 84432):VPQ:EPLP (SEQ ID NO: 84110):EQLSN (SEQ ID NO: 84178):VRS:AXGXH (SEQ ID NO: 84147), AVPKAXX (SEQ ID NO: 84404):VPQ:EPLP (SEQ ID NO: 84110):EQLSN (SEQ ID NO: 84178):VRS:AXGXH (SEQ ID NO: 84147), KVGKAXX (SEQ ID NO: 84425):VPQ:EPLP (SEQ ID NO: 84110):EQLSN (SEQ ID NO: 84178):VRS:XGXR (SEQ ID NO: 84123), KASKAXX (SEQ ID NO: 84423):VPQ:EPLP (SEQ ID NO: 84110):EQLSN (SEQ ID NO: 84178):VRS:EXGXR (SEQ ID NO: 84179), GSAGPXX (SEQ ID NO: 84420):VPQ:EPLP (SEQ ID NO: 84110):EQLSN (SEQ ID NO: 84178):VRS:RXGXS (SEQ ID NO: 84291), AAPASXX (SEQ ID NO: 84401):VPQ:EPLP (SEQ ID NO: 84110):EQLSN (SEQ ID NO: 84178):VRS:AXGXR (SEQ ID NO: 84148), STPPTXX (SEQ ID NO: 84431):VPQ:EPLP (SEQ ID NO: 84110):EQLSN (SEQ ID NO: 84178):VRS:SXGXR (SEQ ID NO: 84305), HVPKPXX (SEQ ID NO: 84421):VPQ:EPLP (SEQ ID NO: 84110):EQLSN (SEQ ID NO: 84178):VRS:SXGXH (SEQ ID NO: 84304), RVPSTXX (SEQ ID NO: 84428):VPQ:EPLP (SEQ ID NO: 84110):EQLSN (SEQ ID NO: 84178):VRS:XGXL (SEQ ID NO: 84122), ASASPXX (SEQ ID NO: 84403):VPQ:EPLP (SEQ ID NO: 84110):EQLSN (SEQ ID NO: 84178):VRS:XKXS (SEQ ID NO: 84124), NDEGLEX (SEQ ID NO: 84426):VPQ:EPLP (SEQ ID NO: 84110):EQLSN (SEQ ID NO: 84178):VRS:KXEXR (SEQ ID NO: 84213), NDEGLEX (SEQ ID NO: 84426):VPQ:EPLP (SEQ ID NO: 84110):EQLSN (SEQ ID NO: 84178):VRS:QXEXR (SEQ ID NO: 84276), SSVKXQP (SEQ ID NO: 84430):VPQ:EPLP (SEQ ID NO: 84110):EQLSN (SEQ ID NO: 84178):VRS:LEXAXA (SEQ ID NO: 84400), RNVQXRP (SEQ ID NO: 84427):VPQ:EPLP (SEQ ID NO: 84110):EQLSN (SEQ ID NO: 84178):VRS:LAXKXE (SEQ ID NO: 84399), KIPKAXX (SEQ ID NO: 84424):VPT:EPLP (SEQ ID NO: 84110):EQLSN (SEQ ID NO: 84178):VVE:GXGXR (SEQ ID NO: 84208), GIPEPXX (SEQ ID NO: 84419):VPE:EPLP (SEQ ID NO: 84110):EQLSN (SEQ ID NO: 84178):TVE:SXAXR (SEQ ID NO: 84303), SIPKAXX (SEQ ID NO: 84429):VPT:EPLP (SEQ ID NO: 84110):EQLSN (SEQ ID NO: 84178):VVE:GXGXR (SEQ ID NO: 84208), HVTKPTX (SEQ ID NO: 84422):APT:EPLP (SEQ ID NO: 84110):EQLSN (SEQ ID NO: 84178):VVR:SXGXH (SEQ ID NO: 84304), YVPKPXX (SEQ ID NO: 84433):APT:EPLP (SEQ ID NO: 84110):EQLSN (SEQ ID NO: 84178):VVR:SXGXH (SEQ ID NO: 84304), TVPKPXX (SEQ ID NO: 84432):APT:EPLP (SEQ ID NO: 84110):EQLSN (SEQ ID NO: 84178):VVR:AXGXH (SEQ ID NO: 84147), AVPKAXX (SEQ ID NO: 84404):APT:EPLP (SEQ ID NO: 84110):EQLSN (SEQ ID NO: 84178):VVK:AXGXH (SEQ ID NO: 84147), KVGKAXX (SEQ ID NO: 84425):VPT:EPLP (SEQ ID NO: 84110):EQLSN (SEQ ID NO: 84178):VAE:XGXR (SEQ ID NO: 84123), KASKAXX (SEQ ID NO: 84423):VPT:EPLP (SEQ ID NO: 84110):EQLSN (SEQ ID NO: 84178):AVS:EXGXR (SEQ ID NO: 84179), GSAGPXX (SEQ ID NO: 84420):TPT:EPLP (SEQ ID NO: 84110):EQLSN (SEQ ID NO: 84178):VVD:RXGXS (SEQ ID NO: 84291), AAPASXX (SEQ ID NO: 84401):VPA:EPLP (SEQ ID NO: 84110):EQLSN (SEQ ID NO: 84178):VVE:AXGXR (SEQ ID NO: 84148), STPPTXX (SEQ ID NO: 84431):VPT:EPLP (SEQ ID NO: 84110):EQLSN (SEQ ID NO: 84178):VVE:SXGXR (SEQ ID NO: 84305), HVPKPXX (SEQ ID NO: 84421):APT:EPLP (SEQ ID NO: 84110):EQLSN (SEQ ID NO: 84178):VVR:SXGXH (SEQ ID NO: 84304), RVPSTXX (SEQ ID NO: 84428):APV:EPLP (SEQ ID NO: 84110):EQLSN (SEQ ID NO: 84178):VEE:XGXL (SEQ ID NO: 84122), ASASPXX (SEQ ID NO: 84403):VSQ:EPLP (SEQ ID NO: 84110):EQLSN (SEQ ID NO: 84178):VKS:XKXS (SEQ ID NO: 84124), ASASPXX (SEQ ID NO: 84403):VPQ:EPLP (SEQ ID NO: 84110):EQLSN (SEQ ID NO: 84178):VKS:XKXS (SEQ ID NO: 84124), NDEGLEX (SEQ ID NO: 84426):VPT:EPLP (SEQ ID NO: 84110):EQLSN (SEQ ID NO: 84178):QHN:KXEXR (SEQ ID NO: 84213), NDEGLEX (SEQ ID NO: 84426):VPT:EPLP (SEQ ID NO: 84110):EQLSN (SEQ ID NO: 84178):EHS:QXEXR (SEQ ID NO: 84276), SSVKXQP (SEQ ID NO: 84430):SRV:EPLP (SEQ ID NO: 84110):EQLSN (SEQ ID NO: 84178):EEH:LEXAXA (SEQ ID NO: 84400), RNVQXRP (SEQ ID NO: 84427):TQV:EPLP (SEQ ID NO: 84110):EQLSN (SEQ ID NO: 84178):EDH:LAXKXE (SEQ ID NO: 84399), KIPKAXX (SEQ ID NO: 84424):VSQ:EPLT (SEQ ID NO: 84111):EQLSN (SEQ ID NO: 84178):VKS:GXGXR (SEQ ID NO: 84208), GIPEPXX (SEQ ID NO: 84419):VSQ:EPLT (SEQ ID NO: 84111):EQLSN (SEQ ID NO: 84178):VKS:SXAXR (SEQ ID NO: 84303), SIPKAXX (SEQ ID NO: 84429):VSQ:EPLT (SEQ ID NO: 84111):EQLSN (SEQ ID NO: 84178):VKS:GXGXR (SEQ ID NO: 84208), HVTKPTX (SEQ ID NO: 84422):VSQ:EPLT (SEQ ID NO: 84111):EQLSN (SEQ ID NO: 84178):VKS:SXGXH (SEQ ID NO: 84304), YVPKPXX (SEQ ID NO: 84433):VSQ:EPLT (SEQ ID NO: 84111):EQLSN (SEQ ID NO: 84178):VKS:SXGXH (SEQ ID NO: 84304), TVPKPXX (SEQ ID NO: 84432):VSQ:EPLT (SEQ ID NO: 84111):EQLSN (SEQ ID NO: 84178):VKS:AXGXH (SEQ ID NO: 84147), AVPKAXX (SEQ ID NO: 84404):VSQ:EPLT (SEQ ID NO: 84111):EQLSN (SEQ ID NO: 84178):VKS:AXGXH (SEQ ID NO: 84147), KVGKAXX (SEQ ID NO: 84425):VSQ:EPLT (SEQ ID NO: 84111):EQLSN (SEQ ID NO: 84178):VKS:XGXR (SEQ ID NO: 84123), KASKAXX (SEQ ID NO: 84423):VSQ:EPLT (SEQ ID NO: 84111):EQLSN (SEQ ID NO: 84178):VKS:EXGXR (SEQ ID NO: 84179), GSAGPXX (SEQ ID NO: 84420):VSQ:EPLT (SEQ ID NO: 84111):EQLSN (SEQ ID NO: 84178):VKS:RXGXS (SEQ ID NO: 84291), AAPASXX (SEQ ID NO: 84401):VSQ:EPLT (SEQ ID NO: 84111):EQLSN (SEQ ID NO: 84178):VKS:AXGXR (SEQ ID NO: 84148), STPPTXX (SEQ ID NO: 84431):VSQ:EPLT (SEQ ID NO: 84111):EQLSN (SEQ ID NO: 84178):VKS:SXGXR (SEQ ID NO: 84305), HVPKPXX (SEQ ID NO: 84421):VSQ:EPLT (SEQ ID NO: 84111):EQLSN (SEQ ID NO: 84178):VKS:SXGXH (SEQ ID NO: 84304), RVPSTXX (SEQ ID NO: 84428):VSQ:EPLT (SEQ ID NO: 84111):EQLSN (SEQ ID NO: 84178):VKS:XGXL (SEQ ID NO: 84122), ASAAPXX (SEQ ID NO: 84402):VSQ:EPLT (SEQ ID NO: 84111):EQLSN (SEQ ID NO: 84178):VKS:XKXS (SEQ ID NO: 84124), ASASPXX (SEQ ID NO: 84403):VSQ:EPLT (SEQ ID NO: 84111):EQLSN (SEQ ID NO: 84178):VKS:XKXS (SEQ ID NO: 84124), NDEGLEX (SEQ ID NO: 84426):VSQ:EPLT (SEQ ID NO: 84111):EQLSN (SEQ ID NO: 84178):VKS:KXEXR (SEQ ID NO: 84213), NDEGLEX (SEQ ID NO: 84426):VSQ:EPLT (SEQ ID NO: 84111):EQLSN (SEQ ID NO: 84178):VKS:QXEXR (SEQ ID NO: 84276), SSVKXQP (SEQ ID NO: 84430):VSQ:EPLT (SEQ ID NO: 84111):EQLSN (SEQ ID NO: 84178):VKS:LEXAXA (SEQ ID NO: 84400), RNVQXRP (SEQ ID NO: 84427):VSQ:EPLT (SEQ ID NO: 84111):EQLSN (SEQ ID NO: 84178):VKS:LAXKXE (SEQ ID NO: 84399), KIPKAXX (SEQ ID NO: 84424):VPT:EPLT (SEQ ID NO: 84111):EQLSN (SEQ ID NO: 84178):VVE:GXGXR (SEQ ID NO: 84208), GIPEPXX (SEQ ID NO: 84419):VPE:EPLT (SEQ ID NO: 84111):EQLSN (SEQ ID NO: 84178):TVE:SXAXR (SEQ ID NO: 84303), SIPKAXX (SEQ ID NO: 84429):VPT:EPLT (SEQ ID NO: 84111):EQLSN (SEQ ID NO: 84178):VVE:GXGXR (SEQ ID NO: 84208), HVTKPTX (SEQ ID NO: 84422):APT:EPLT (SEQ ID NO: 84111):EQLSN (SEQ ID NO: 84178):VVR:SXGXH (SEQ ID NO: 84304), YVPKPXX (SEQ ID NO: 84433):APT:EPLT (SEQ ID NO: 84111):EQLSN (SEQ ID NO: 84178):VVR:SXGXH (SEQ ID NO: 84304), TVPKPXX (SEQ ID NO: 84432):APT:EPLT (SEQ ID NO: 84111):EQLSN (SEQ ID NO: 84178):VVR:AXGXH (SEQ ID NO: 84147), AVPKAXX (SEQ ID NO: 84404):APT:EPLT (SEQ ID NO: 84111):EQLSN (SEQ ID NO: 84178):VVK:AXGXH (SEQ ID NO: 84147), KVGKAXX (SEQ ID NO: 84425):VPT:EPLT (SEQ ID NO: 84111):EQLSN (SEQ ID NO: 84178):VAE:XGXR (SEQ ID NO: 84123), KASKAXX (SEQ ID NO: 84423):VPT:EPLT (SEQ ID NO: 84111):EQLSN (SEQ ID NO: 84178):AVS:EXGXR (SEQ ID NO: 84179), GSAGPXX (SEQ ID NO: 84420):TPT:EPLT (SEQ ID NO: 84111):EQLSN (SEQ ID NO: 84178):VVD:RXGXS (SEQ ID NO: 84291), AAPASXX (SEQ ID NO: 84401):VPA:EPLT (SEQ ID NO: 84111):EQLSN (SEQ ID NO: 84178):VVE:AXGXR (SEQ ID NO: 84148), STPPTXX (SEQ ID NO: 84431):VPT:EPLT (SEQ ID NO: 84111):EQLSN (SEQ ID NO: 84178):VVE:SXGXR (SEQ ID NO: 84305), HVPKPXX (SEQ ID NO: 84421):APT:EPLT (SEQ ID NO: 84111):EQLSN (SEQ ID NO: 84178):VVR:SXGXH (SEQ ID NO: 84304), RVPSTXX (SEQ ID NO: 84428):APV:EPLT (SEQ ID NO: 84111):EQLSN (SEQ ID NO: 84178):VEE:XGXL (SEQ ID NO: 84122), ASAAPXX (SEQ ID NO: 84402):VPQ:EPLT (SEQ ID NO: 84111):EQLSN (SEQ ID NO: 84178):VRS:XKXS (SEQ ID NO: 84124), ASASPXX (SEQ ID NO: 84403):VPQ:EPLT (SEQ ID NO: 84111):EQLSN (SEQ ID NO: 84178):VKS:XKXS (SEQ ID NO: 84124), NDEGLEX (SEQ ID NO: 84426):VPT:EPLT (SEQ ID NO: 84111):EQLSN (SEQ ID NO: 84178):QHN:KXEXR (SEQ ID NO: 84213), NDEGLEX (SEQ ID NO: 84426):VPT:EPLT (SEQ ID NO: 84111):EQLSN (SEQ ID NO: 84178):EHS:QXEXR (SEQ ID NO: 84276), SSVKXQP (SEQ ID NO: 84430):SRV:EPLT (SEQ ID NO: 84111):EQLSN (SEQ ID NO: 84178):EEH:LEXAXA (SEQ ID NO: 84400), RNVQXRP (SEQ ID NO: 84427):TQV:EPLT (SEQ ID NO: 84111):EQLSN (SEQ ID NO: 84178):EDH:LAXKXE (SEQ ID NO: 84399), KIPKAXX (SEQ ID NO: 84424):VPQ:EPLT (SEQ ID NO: 84111):EQLSN (SEQ ID NO: 84178):VKS:GXGXR (SEQ ID NO: 84208), GIPEPXX (SEQ ID NO: 84419):VPQ:EPLT (SEQ ID NO: 84111):EQLSN (SEQ ID NO: 84178):VKS:SXAXR (SEQ ID NO: 84303), SIPKAXX (SEQ ID NO: 84429):VPQ:EPLT (SEQ ID NO: 84111):EQLSN (SEQ ID NO: 84178):VKS:GXGXR (SEQ ID NO: 84208), HVTKPTX (SEQ ID NO: 84422):VPQ:EPLT (SEQ ID NO: 84111):EQLSN (SEQ ID NO: 84178):VKS:SXGXH (SEQ ID NO: 84304), YVPKPXX (SEQ ID NO: 84433):VPQ:EPLT (SEQ ID NO: 84111):EQLSN (SEQ ID NO: 84178):VKS:SXGXH (SEQ ID NO: 84304), TVPKPXX (SEQ ID NO: 84432):VPQ:EPLT (SEQ ID NO: 84111):EQLSN (SEQ ID NO: 84178):VKS:AXGXH (SEQ ID NO: 84147), AVPKAXX (SEQ ID NO: 84404):VPQ:EPLT (SEQ ID NO: 84111):EQLSN (SEQ ID NO: 84178):VKS:AXGXH (SEQ ID NO: 84147), KVGKAXX (SEQ ID NO: 84425):VPQ:EPLT (SEQ ID NO: 84111):EQLSN (SEQ ID NO: 84178):VKS:XGXR (SEQ ID NO: 84123), KASKAXX (SEQ ID NO: 84423):VPQ:EPLT (SEQ ID NO: 84111):EQLSN (SEQ ID NO: 84178):VKS:EXGXR (SEQ ID NO: 84179), GSAGPXX (SEQ ID NO: 84420):VPQ:EPLT (SEQ ID NO: 84111):EQLSN (SEQ ID NO: 84178):VKS:RXGXS (SEQ ID NO: 84291), AAPASXX (SEQ ID NO: 84401):VPQ:EPLT (SEQ ID NO: 84111):EQLSN (SEQ ID NO: 84178):VKS:AXGXR (SEQ ID NO: 84148), STPPTXX (SEQ ID NO: 84431):VPQ:EPLT (SEQ ID NO: 84111):EQLSN (SEQ ID NO: 84178):VKS:SXGXR (SEQ ID NO: 84305), HVPKPXX (SEQ ID NO: 84421):VPQ:EPLT (SEQ ID NO: 84111):EQLSN (SEQ ID NO: 84178):VKS:SXGXH (SEQ ID NO: 84304), RVPSTXX (SEQ ID NO: 84428):VPQ:EPLT (SEQ ID NO: 84111):EQLSN (SEQ ID NO: 84178):VKS:XGXL (SEQ ID NO: 84122), ASAAPXX (SEQ ID NO: 84402):VPQ:EPLT (SEQ ID NO: 84111):EQLSN (SEQ ID NO: 84178):VKS:XKXS (SEQ ID NO: 84124), NDEGLEX (SEQ ID NO: 84426):VPQ:EPLT (SEQ ID NO: 84111):EQLSN (SEQ ID NO: 84178):VKS:KXEXR (SEQ ID NO: 84213), NDEGLEX (SEQ ID NO: 84426):VPQ:EPLT (SEQ ID NO: 84111):EQLSN (SEQ ID NO: 84178):VKS:QXEXR (SEQ ID NO: 84276), SSVKXQP (SEQ ID NO: 84430):VPQ:EPLT (SEQ ID NO: 84111):EQLSN (SEQ ID NO: 84178):VKS:LEXAXA (SEQ ID NO: 84400), RNVQXRP (SEQ ID NO: 84427):VPQ:EPLT (SEQ ID NO: 84111):EQLSN (SEQ ID NO: 84178):VKS:LAXKXE (SEQ ID NO: 84399), KIPKAXX (SEQ ID NO: 84424):VPT:SNIT (SEQ ID NO: 84118):IGEMS (SEQ ID NO: 84209):QHN:GXGXR (SEQ ID NO: 84208), GIPEPXX (SEQ ID NO: 84419):VPT:SNIT (SEQ ID NO: 84118):IGEMS (SEQ ID NO: 84209):QHN:SXAXR (SEQ ID NO: 84303), SIPKAXX (SEQ ID NO: 84429):VPT:SNIT (SEQ ID NO: 84118):IGEMS (SEQ ID NO: 84209):QHN:GXGXR (SEQ ID NO: 84208), HVTKPTX (SEQ ID NO: 84422):VPT:SNIT (SEQ ID NO: 84118):IGEMS (SEQ ID NO: 84209):QHN:SXGXH (SEQ ID NO: 84304), YVPKPXX (SEQ ID NO: 84433):VPT:SNIT (SEQ ID NO: 84118):IGEMS (SEQ ID NO: 84209):QHN:SXGXH (SEQ ID NO: 84304), TVPKPXX (SEQ ID NO: 84432):VPT:SNIT (SEQ ID NO: 84118):IGEMS (SEQ ID NO: 84209):QHN:AXGXH (SEQ ID NO: 84147), AVPKAXX (SEQ ID NO: 84404):VPT:SNIT (SEQ ID NO: 84118):IGEMS (SEQ ID NO: 84209):QHN:AXGXH (SEQ ID NO: 84147), KVGKAXX (SEQ ID NO: 84425):VPT:SNIT (SEQ ID NO: 84118):IGEMS (SEQ ID NO: 84209):QHN:XGXR (SEQ ID NO: 84123), KASKAXX (SEQ ID NO: 84423):VPT:SNIT (SEQ ID NO: 84118):IGEMS (SEQ ID NO: 84209):QHN:EXGXR (SEQ ID NO: 84179), GSAGPXX (SEQ ID NO: 84420):VPT:SNIT (SEQ ID NO: 84118):IGEMS (SEQ ID NO: 84209):QHN:RXGXS (SEQ ID NO: 84291), AAPASXX (SEQ ID NO: 84401):VPT:SNIT (SEQ ID NO: 84118):IGEMS (SEQ ID NO: 84209):QHN:AXGXR (SEQ ID NO: 84148), STPPTXX (SEQ ID NO: 84431):VPT:SNIT (SEQ ID NO: 84118):IGEMS (SEQ ID NO: 84209):QHN:SXGXR (SEQ ID NO: 84305), HVPKPXX (SEQ ID NO: 84421):VPT:SNIT (SEQ ID NO: 84118):IGEMS (SEQ ID NO: 84209):QHN:SXGXH (SEQ ID NO: 84304), RVPSTXX (SEQ ID NO: 84428):VPT:SNIT (SEQ ID NO: 84118):IGEMS (SEQ ID NO: 84209):QHN:XGXL (SEQ ID NO: 84122), ASAAPXX (SEQ ID NO: 84402):VPT:SNIT (SEQ ID NO: 84118):IGEMS (SEQ ID NO: 84209):QHN:XKXS (SEQ ID NO: 84124), ASASPXX (SEQ ID NO: 84403):VPT:SNIT (SEQ ID NO: 84118):IGEMS (SEQ ID NO: 84209):QHN:XKXS (SEQ ID NO: 84124), NDEGLEX (SEQ ID NO: 84426):VPT:SNIT (SEQ ID NO: 84118):IGEMS (SEQ ID NO: 84209):QHN:QXEXR (SEQ ID NO: 84276), NDEGLEX (SEQ ID NO: 84426):VPT:SNIT (SEQ ID NO: 84118):IGEMS (SEQ ID NO: 84209):QHN:KXEXR (SEQ ID NO: 84213), SSVKXQP (SEQ ID NO: 84430):VPT:SNIT (SEQ ID NO: 84118):IGEMS (SEQ ID NO: 84209):QHN:LEXAXA (SEQ ID NO: 84400), RNVQXRP (SEQ ID NO: 84427):VPT:SNIT (SEQ ID NO: 84118):IGEMS (SEQ ID NO: 84209):QHN:LAXKXE (SEQ ID NO: 84399), KIPKAXX (SEQ ID NO: 84424):VPT:SNIT (SEQ ID NO: 84118):IGEMS (SEQ ID NO: 84209):VVE:GXGXR (SEQ ID NO: 84208), GIPEPXX (SEQ ID NO: 84419):VPE:SNIT (SEQ ID NO: 84118):IGEMS (SEQ ID NO: 84209):TVE:SXAXR (SEQ ID NO: 84303), SIPKAXX (SEQ ID NO: 84429):VPT:SNIT (SEQ ID NO: 84118):IGEMS (SEQ ID NO: 84209):VVE:GXGXR (SEQ ID NO: 84208), HVTKPTX (SEQ ID NO: 84422):APT:SNIT (SEQ ID NO: 84118):IGEMS (SEQ ID NO: 84209):VVR:SXGXH (SEQ ID NO: 84304), YVPKPXX (SEQ ID NO: 84433):APT:SNIT (SEQ ID NO: 84118):IGEMS (SEQ ID NO: 84209):VVR:SXGXH (SEQ ID NO: 84304), TVPKPXX (SEQ ID NO: 84432):APT:SNIT (SEQ ID NO: 84118):IGEMS (SEQ ID NO: 84209):VVR:AXGXH (SEQ ID NO: 84147), AVPKAXX (SEQ ID NO: 84404):APT:SNIT (SEQ ID NO: 84118):IGEMS (SEQ ID NO: 84209):VVK:AXGXH (SEQ ID NO: 84147), KVGKAXX (SEQ ID NO: 84425):VPT:SNIT (SEQ ID NO: 84118):IGEMS (SEQ ID NO: 84209):VAE:XGXR (SEQ ID NO: 84123), KASKAXX (SEQ ID NO: 84423):VPT:SNIT (SEQ ID NO: 84118):IGEMS (SEQ ID NO: 84209):AVS:EXGXR (SEQ ID NO: 84179), GSAGPXX (SEQ ID NO: 84420):TPT:SNIT (SEQ ID NO: 84118):IGEMS (SEQ ID NO: 84209):VVD:RXGXS (SEQ ID NO: 84291), AAPASXX (SEQ ID NO: 84401):VPA:SNIT (SEQ ID NO: 84118):IGEMS (SEQ ID NO: 84209):VVE:AXGXR (SEQ ID NO: 84148), STPPTXX (SEQ ID NO: 84431):VPT:SNIT (SEQ ID NO: 84118):IGEMS (SEQ ID NO: 84209):VVE:SXGXR (SEQ ID NO: 84305), HVPKPXX (SEQ ID NO: 84421):APT:SNIT (SEQ ID NO: 84118):IGEMS (SEQ ID NO: 84209):VVR:SXGXH (SEQ ID NO: 84304), RVPSTXX (SEQ ID NO: 84428):APV:SNIT (SEQ ID NO: 84118):IGEMS (SEQ ID NO: 84209):VEE:XGXL (SEQ ID NO: 84122), ASAAPXX (SEQ ID NO: 84402):VPQ:SNIT (SEQ ID NO: 84118):IGEMS (SEQ ID NO: 84209):VRS:XKXS (SEQ ID NO: 84124), ASASPXX (SEQ ID NO: 84403):VSQ:SNIT (SEQ ID NO: 84118):IGEMS (SEQ ID NO: 84209):VKS:XKXS (SEQ ID NO: 84124), ASASPXX (SEQ ID NO: 84403):VPQ:SNIT (SEQ ID NO: 84118):IGEMS (SEQ ID NO: 84209):VKS:XKXS (SEQ ID NO: 84124), NDEGLEX (SEQ ID NO: 84426):VPT:SNIT (SEQ ID NO: 84118):IGEMS (SEQ ID NO: 84209):EHS:QXEXR (SEQ ID NO: 84276), SSVKXQP (SEQ ID NO: 84430):SRV:SNIT (SEQ ID NO: 84118):IGEMS (SEQ ID NO: 84209):EEH:LEXAXA (SEQ ID NO: 84400), RNVQXRP (SEQ ID NO: 84427):TQV:SNIT (SEQ ID NO: 84118):IGEMS (SEQ ID NO: 84209):EDH:LAXKXE (SEQ ID NO: 84399), KIPKAXX (SEQ ID NO: 84424):VPT:SNIT (SEQ ID NO: 84118):LGEMS (SEQ ID NO: 84228):EHS:GXGXR (SEQ ID NO: 84208), GIPEPXX (SEQ ID NO: 84419):VPT:SNIT (SEQ ID NO: 84118):LGEMS (SEQ ID NO: 84228):EHS:SXAXR (SEQ ID NO: 84303), SIPKAXX (SEQ ID NO: 84429):VPT:SNIT (SEQ ID NO: 84118):LGEMS (SEQ ID NO: 84228):EHS:GXGXR (SEQ ID NO: 84208), HVTKPTX (SEQ ID NO: 84422):VPT:SNIT (SEQ ID NO: 84118):LGEMS (SEQ ID NO: 84228):EHS:SXGXH (SEQ ID NO: 84304), YVPKPXX (SEQ ID NO: 84433):VPT:SNIT (SEQ ID NO: 84118):LGEMS (SEQ ID NO: 84228):EHS:SXGXH (SEQ ID NO: 84304), TVPKPXX (SEQ ID NO: 84432):VPT:SNIT (SEQ ID NO: 84118):LGEMS (SEQ ID NO: 84228):EHS:AXGXH (SEQ ID NO: 84147), AVPKAXX (SEQ ID NO: 84404):VPT:SNIT (SEQ ID NO: 84118):LGEMS (SEQ ID NO: 84228):EHS:AXGXH (SEQ ID NO: 84147), KVGKAXX (SEQ ID NO: 84425):VPT:SNIT (SEQ ID NO: 84118):LGEMS (SEQ ID NO: 84228):EHS:XGXR (SEQ ID NO: 84123), KASKAXX (SEQ ID NO: 84423):VPT:SNIT (SEQ ID NO: 84118):LGEMS (SEQ ID NO: 84228):EHS:EXGXR (SEQ ID NO: 84179), GSAGPXX (SEQ ID NO: 84420):VPT:SNIT (SEQ ID NO: 84118):LGEMS (SEQ ID NO: 84228):EHS:RXGXS (SEQ ID NO: 84291), AAPASXX (SEQ ID NO: 84401):VPT:SNIT (SEQ ID NO: 84118):LGEMS (SEQ ID NO: 84228):EHS:AXGXR (SEQ ID NO: 84148), STPPTXX (SEQ ID NO: 84431):VPT:SNIT (SEQ ID NO: 84118):LGEMS (SEQ ID NO: 84228):EHS:SXGXR (SEQ ID NO: 84305), HVPKPXX (SEQ ID NO: 84421):VPT:SNIT (SEQ ID NO: 84118):LGEMS (SEQ ID NO: 84228):EHS:SXGXH (SEQ ID NO: 84304), RVPSTXX (SEQ ID NO: 84428):VPT:SNIT (SEQ ID NO: 84118):LGEMS (SEQ ID NO: 84228):EHS:XGXL (SEQ ID NO: 84122), ASAAPXX (SEQ ID NO: 84402):VPT:SNIT (SEQ ID NO: 84118):LGEMS (SEQ ID NO: 84228):EHS:XKXS (SEQ ID NO: 84124), ASASPXX (SEQ ID NO: 84403):VPT:SNIT (SEQ ID NO: 84118):LGEMS (SEQ ID NO: 84228):EHS:XKXS (SEQ ID NO: 84124), NDEGLEX (SEQ ID NO: 84426):VPT:SNIT (SEQ ID NO: 84118):LGEMS (SEQ ID NO: 84228):EHS:KXEXR (SEQ ID NO: 84213), SSVKXQP (SEQ ID NO: 84430):VPT:SNIT (SEQ ID NO: 84118):LGEMS (SEQ ID NO: 84228):EHS:LEXAXA (SEQ ID NO: 84400), RNVQXRP (SEQ ID NO: 84427):VPT:SNIT (SEQ ID NO: 84118):LGEMS (SEQ ID NO: 84228):EHS:LAXKXE (SEQ ID NO: 84399), KIPKAXX (SEQ ID NO: 84424):VPT:SNIT (SEQ ID NO: 84118):LGEMS (SEQ ID NO: 84228):VVE:GXGXR (SEQ ID NO: 84208), GIPEPXX (SEQ ID NO: 84419):VPE:SNIT (SEQ ID NO: 84118):LGEMS (SEQ ID NO: 84228):TVE:SXAXR (SEQ ID NO: 84303), SIPKAXX (SEQ ID NO: 84429):VPT:SNIT (SEQ ID NO: 84118):LGEMS (SEQ ID NO: 84228):VVE:GXGXR (SEQ ID NO: 84208), HVTKPTX (SEQ ID NO: 84422):APT:SNIT (SEQ ID NO: 84118):LGEMS (SEQ ID NO: 84228):VVR:SXGXH (SEQ ID NO: 84304), YVPKPXX (SEQ ID NO: 84433):APT:SNIT (SEQ ID NO: 84118):LGEMS (SEQ ID NO: 84228):VVR:SXGXH (SEQ ID NO: 84304), TVPKPXX (SEQ ID NO: 84432):APT:SNIT (SEQ ID NO: 84118):LGEMS (SEQ ID NO: 84228):VVR:AXGXH (SEQ ID NO: 84147), AVPKAXX (SEQ ID NO: 84404):APT:SNIT (SEQ ID NO: 84118):LGEMS (SEQ ID NO: 84228):VVK:AXGXH (SEQ ID NO: 84147), KVGKAXX (SEQ ID NO: 84425):VPT:SNIT (SEQ ID NO: 84118):LGEMS (SEQ ID NO: 84228):VAE:XGXR (SEQ ID NO: 84123), KASKAXX (SEQ ID NO: 84423):VPT:SNIT (SEQ ID NO: 84118):LGEMS (SEQ ID NO: 84228):AVS:EXGXR (SEQ ID NO: 84179), GSAGPXX (SEQ ID NO: 84420):TPT:SNIT (SEQ ID NO: 84118):LGEMS (SEQ ID NO: 84228):VVD:RXGXS (SEQ ID NO: 84291), AAPASXX (SEQ ID NO: 84401):VPA:SNIT (SEQ ID NO: 84118):LGEMS (SEQ ID NO: 84228):VVE:AXGXR (SEQ ID NO: 84148), STPPTXX (SEQ ID NO: 84431):VPT:SNIT (SEQ ID NO: 84118):LGEMS (SEQ ID NO: 84228):VVE:SXGXR (SEQ ID NO: 84305), HVPKPXX (SEQ ID NO: 84421):APT:SNIT (SEQ ID NO: 84118):LGEMS (SEQ ID NO: 84228):VVR:SXGXH (SEQ ID NO: 84304), RVPSTXX (SEQ ID NO: 84428):APV:SNIT (SEQ ID NO: 84118):LGEMS (SEQ ID NO: 84228):VEE:XGXL (SEQ ID NO: 84122), ASAAPXX (SEQ ID NO: 84402):VPQ:SNIT (SEQ ID NO: 84118):LGEMS (SEQ ID NO: 84228):VRS:XKXS (SEQ ID NO: 84124), ASASPXX (SEQ ID NO: 84403):VSQ:SNIT (SEQ ID NO: 84118):LGEMS (SEQ ID NO: 84228):VKS:XKXS (SEQ ID NO: 84124), ASASPXX (SEQ ID NO: 84403):VPQ:SNIT (SEQ ID NO: 84118):LGEMS (SEQ ID NO: 84228):VKS:XKXS (SEQ ID NO: 84124), NDEGLEX (SEQ ID NO: 84426):VPT:SNIT (SEQ ID NO: 84118):LGEMS (SEQ ID NO: 84228):QHN:KXEXR (SEQ ID NO: 84213), SSVKXQP (SEQ ID NO: 84430):SRV:SNIT (SEQ ID NO: 84118):LGEMS (SEQ ID NO: 84228):EEH:LEXAXA (SEQ ID NO: 84400), RNVQXRP (SEQ ID NO: 84427):TQV:SNIT (SEQ ID NO: 84118):LGEMS (SEQ ID NO: 84228):EDH:LAXKXE (SEQ ID NO: 84399), KIPKAXX (SEQ ID NO: 84424):SRV:RSVK (SEQ ID NO: 84115):KEVQV (SEQ ID NO: 84210):EEH:GXGXR (SEQ ID NO: 84208), GIPEPXX (SEQ ID NO: 84419):SRV:RSVK (SEQ ID NO: 84115):KEVQV (SEQ ID NO: 84210):EEH:SXAXR (SEQ ID NO: 84303), SIPKAXX (SEQ ID NO: 84429):SRV:RSVK (SEQ ID NO: 84115):KEVQV (SEQ ID NO: 84210):EEH:GXGXR (SEQ ID NO: 84208), HVTKPTX (SEQ ID NO: 84422):SRV:RSVK (SEQ ID NO: 84115):KEVQV (SEQ ID NO: 84210):EEH:SXGXH (SEQ ID NO: 84304), YVPKPXX (SEQ ID NO: 84433):SRV:RSVK (SEQ ID NO: 84115):KEVQV (SEQ ID NO: 84210):EEH:SXGXH (SEQ ID NO: 84304), TVPKPXX (SEQ ID NO: 84432):SRV:RSVK (SEQ ID NO: 84115):KEVQV (SEQ ID NO: 84210):EEH:AXGXH (SEQ ID NO: 84147), AVPKAXX (SEQ ID NO: 84404):SRV:RSVK (SEQ ID NO: 84115):KEVQV (SEQ ID NO: 84210):EEH:AXGXH (SEQ ID NO: 84147), KVGKAXX (SEQ ID NO: 84425):SRV:RSVK (SEQ ID NO: 84115):KEVQV (SEQ ID NO: 84210):EEH:XGXR (SEQ ID NO: 84123), KASKAXX (SEQ ID NO: 84423):SRV:RSVK (SEQ ID NO: 84115):KEVQV (SEQ ID NO: 84210):EEH:EXGXR (SEQ ID NO: 84179), GSAGPXX (SEQ ID NO: 84420):SRV:RSVK (SEQ ID NO: 84115):KEVQV (SEQ ID NO: 84210):EEH:RXGXS (SEQ ID NO: 84291), AAPASXX (SEQ ID NO: 84401):SRV:RSVK (SEQ ID NO: 84115):KEVQV (SEQ ID NO: 84210):EEH:AXGXR (SEQ ID NO: 84148), STPPTXX (SEQ ID NO: 84431):SRV:RSVK (SEQ ID NO: 84115):KEVQV (SEQ ID NO: 84210):EEH:SXGXR (SEQ ID NO: 84305), HVPKPXX (SEQ ID NO: 84421):SRV:RSVK (SEQ ID NO: 84115):KEVQV (SEQ ID NO: 84210):EEH:SXGXH (SEQ ID NO: 84304), RVPSTXX (SEQ ID NO: 84428):SRV:RSVK (SEQ ID NO: 84115):KEVQV (SEQ ID NO: 84210):EEH:XGXL (SEQ ID NO: 84122), ASAAPXX (SEQ ID NO: 84402):SRV:RSVK (SEQ ID NO: 84115):KEVQV (SEQ ID NO: 84210):EEH:XKXS (SEQ ID NO: 84124), ASASPXX (SEQ ID NO: 84403):SRV:RSVK (SEQ ID NO: 84115):KEVQV (SEQ ID NO: 84210):EEH:XKXS (SEQ ID NO: 84124), NDEGLEX (SEQ ID NO: 84426):SRV:RSVK (SEQ ID NO: 84115):KEVQV (SEQ ID NO: 84210):EEH:KXEXR (SEQ ID NO: 84213), NDEGLEX (SEQ ID NO: 84426):SRV:RSVK (SEQ ID NO: 84115):KEVQV (SEQ ID NO: 84210):EEH:QXEXR (SEQ ID NO: 84276), RNVQXRP (SEQ ID NO: 84427):SRV:RSVK (SEQ ID NO: 84115):KEVQV (SEQ ID NO: 84210):EEH:LAXKXE (SEQ ID NO: 84399), KIPKAXX (SEQ ID NO: 84424):VPT:RSVK (SEQ ID NO: 84115):KEVQV (SEQ ID NO: 84210):VVE:GXGXR (SEQ ID NO: 84208), GIPEPXX (SEQ ID NO: 84419):VPE:RSVK (SEQ ID NO: 84115):KEVQV (SEQ ID NO: 84210):TVE:SXAXR (SEQ ID NO: 84303), SIPKAXX (SEQ ID NO: 84429):VPT:RSVK (SEQ ID NO: 84115):KEVQV (SEQ ID NO: 84210):VVE:GXGXR (SEQ ID NO: 84208), HVTKPTX (SEQ ID NO: 84422):APT:RSVK (SEQ ID NO: 84115):KEVQV (SEQ ID NO: 84210):VVR:SXGXH (SEQ ID NO: 84304), YVPKPXX (SEQ ID NO: 84433):APT:RSVK (SEQ ID NO: 84115):KEVQV (SEQ ID NO: 84210):VVR:SXGXH (SEQ ID NO: 84304), TVPKPXX (SEQ ID NO: 84432):APT:RSVK (SEQ ID NO: 84115):KEVQV (SEQ ID NO: 84210):VVR:AXGXH (SEQ ID NO: 84147), AVPKAXX (SEQ ID NO: 84404):APT:RSVK (SEQ ID NO: 84115):KEVQV (SEQ ID NO: 84210):VVK:AXGXH (SEQ ID NO: 84147), KVGKAXX (SEQ ID NO: 84425):VPT:RSVK (SEQ ID NO: 84115):KEVQV (SEQ ID NO: 84210):VAE:XGXR (SEQ ID NO: 84123), KASKAXX (SEQ ID NO: 84423):VPT:RSVK (SEQ ID NO: 84115):KEVQV (SEQ ID NO: 84210):AVS:EXGXR (SEQ ID NO: 84179), GSAGPXX (SEQ ID NO: 84420):TPT:RSVK (SEQ ID NO: 84115):KEVQV (SEQ ID NO: 84210):VVD:RXGXS (SEQ ID NO: 84291), AAPASXX (SEQ ID NO: 84401):VPA:RSVK (SEQ ID NO: 84115):KEVQV (SEQ ID NO: 84210):VVE:AXGXR (SEQ ID NO: 84148), STPPTXX (SEQ ID NO: 84431):VPT:RSVK (SEQ ID NO: 84115):KEVQV (SEQ ID NO: 84210):VVE:SXGXR (SEQ ID NO: 84305), HVPKPXX (SEQ ID NO: 84421):APT:RSVK (SEQ ID NO: 84115):KEVQV (SEQ ID NO: 84210):VVR:SXGXH (SEQ ID NO: 84304), RVPSTXX (SEQ ID NO: 84428):APV:RSVK (SEQ ID NO: 84115):KEVQV (SEQ ID NO: 84210):VEE:XGXL (SEQ ID NO: 84122), ASAAPXX (SEQ ID NO: 84402):VPQ:RSVK (SEQ ID NO: 84115):KEVQV (SEQ ID NO: 84210):VRS:XKXS (SEQ ID NO: 84124), ASASPXX (SEQ ID NO: 84403):VSQ:RSVK (SEQ ID NO: 84115):KEVQV (SEQ ID NO: 84210):VKS:XKXS (SEQ ID NO: 84124), ASASPXX (SEQ ID NO: 84403):VPQ:RSVK (SEQ ID NO: 84115):KEVQV (SEQ ID NO: 84210):VKS:XKXS (SEQ ID NO: 84124), NDEGLEX (SEQ ID NO: 84426):VPT:RSVK (SEQ ID NO: 84115):KEVQV (SEQ ID NO: 84210):QHN:KXEXR (SEQ ID NO: 84213), NDEGLEX (SEQ ID NO: 84426):VPT:RSVK (SEQ ID NO: 84115):KEVQV (SEQ ID NO: 84210):EHS:QXEXR (SEQ ID NO: 84276), RNVQXRP (SEQ ID NO: 84427):TQV:RSVK (SEQ ID NO: 84115):KEVQV (SEQ ID NO: 84210):EDH:LAXKXE (SEQ ID NO: 84399), KIPKAXX (SEQ ID NO: 84424):TQV:RPVQ (SEQ ID NO: 84114):KKATV (SEQ ID NO: 84212):EDH:GXGXR (SEQ ID NO: 84208), GIPEPXX (SEQ ID NO: 84419):TQV:RPVQ (SEQ ID NO: 84114):KKATV (SEQ ID NO: 84212):EDH:SXAXR (SEQ ID NO: 84303), SIPKAXX (SEQ ID NO: 84429):TQV:RPVQ (SEQ ID NO: 84114):KKATV (SEQ ID NO: 84212):EDH:GXGXR (SEQ ID NO: 84208), HVTKPTX (SEQ ID NO: 84422):TQV:RPVQ (SEQ ID NO: 84114):KKATV (SEQ ID NO: 84212):EDH:SXGXH (SEQ ID NO: 84304), YVPKPXX (SEQ ID NO: 84433):TQV:RPVQ (SEQ ID NO: 84114):KKATV (SEQ ID NO: 84212):EDH:SXGXH (SEQ ID NO: 84304), TVPKPXX (SEQ ID NO: 84432):TQV:RPVQ (SEQ ID NO: 84114):KKATV (SEQ ID NO: 84212):EDH:AXGXH (SEQ ID NO: 84147), AVPKAXX (SEQ ID NO: 84404):TQV:RPVQ (SEQ ID NO: 84114):KKATV (SEQ ID NO: 84212):EDH:AXGXH (SEQ ID NO: 84147), KVGKAXX (SEQ ID NO: 84425):TQV:RPVQ (SEQ ID NO: 84114):KKATV (SEQ ID NO: 84212):EDH:XGXR (SEQ ID NO: 84123), KASKAXX (SEQ ID NO: 84423):TQV:RPVQ (SEQ ID NO: 84114):KKATV (SEQ ID NO: 84212):EDH:EXGXR (SEQ ID NO: 84179), GSAGPXX (SEQ ID NO: 84420):TQV:RPVQ (SEQ ID NO: 84114):KKATV (SEQ ID NO: 84212):EDH:RXGXS (SEQ ID NO: 84291), AAPASXX (SEQ ID NO: 84401):TQV:RPVQ (SEQ ID NO: 84114):KKATV (SEQ ID NO: 84212):EDH:AXGXR (SEQ ID NO: 84148), STPPTXX (SEQ ID NO: 84431):TQV:RPVQ (SEQ ID NO: 84114):KKATV (SEQ ID NO: 84212):EDH:SXGXR (SEQ ID NO: 84305), HVPKPXX (SEQ ID NO: 84421):TQV:RPVQ (SEQ ID NO: 84114):KKATV (SEQ ID NO: 84212):EDH:SXGXH (SEQ ID NO: 84304), RVPSTXX (SEQ ID NO: 84428):TQV:RPVQ (SEQ ID NO: 84114):KKATV (SEQ ID NO: 84212):EDH:XGXL (SEQ ID NO: 84122), ASAAPXX (SEQ ID NO: 84402):TQV:RPVQ (SEQ ID NO: 84114):KKATV (SEQ ID NO: 84212):EDH:XKXS (SEQ ID NO: 84124), ASASPXX (SEQ ID NO: 84403):TQV:RPVQ (SEQ ID NO: 84114):KKATV (SEQ ID NO: 84212):EDH:XKXS (SEQ ID NO: 84124), NDEGLEX (SEQ ID NO: 84426):TQV:RPVQ (SEQ ID NO: 84114):KKATV (SEQ ID NO: 84212):EDH:KXEXR (SEQ ID NO: 84213), NDEGLEX (SEQ ID NO: 84426):TQV:RPVQ (SEQ ID NO: 84114):KKATV (SEQ ID NO: 84212):EDH:QXEXR (SEQ ID NO: 84276), SSVKXQP (SEQ ID NO: 84430):TQV:RPVQ (SEQ ID NO: 84114):KKATV (SEQ ID NO: 84212):EDH:LEXAXA (SEQ ID NO: 84400), KIPKAXX (SEQ ID NO: 84424):VPT:RPVQ (SEQ ID NO: 84114):KKATV (SEQ ID NO: 84212):VVE:GXGXR (SEQ ID NO: 84208), GIPEPXX (SEQ ID NO: 84419):VPE:RPVQ (SEQ ID NO: 84114):KKATV (SEQ ID NO: 84212):TVE:SXAXR (SEQ ID NO: 84303), SIPKAXX (SEQ ID NO: 84429):VPT:RPVQ (SEQ ID NO: 84114):KKATV (SEQ ID NO: 84212):VVE:GXGXR (SEQ ID NO: 84208), HVTKPTX (SEQ ID NO: 84422):APT:RPVQ (SEQ ID NO: 84114):KKATV (SEQ ID NO: 84212):VVR:SXGXH (SEQ ID NO: 84304), YVPKPXX (SEQ ID NO: 84433):APT:RPVQ (SEQ ID NO: 84114):KKATV (SEQ ID NO: 84212):VVR:SXGXH (SEQ ID NO: 84304), TVPKPXX (SEQ ID NO: 84432):APT:RPVQ (SEQ ID NO: 84114):KKATV (SEQ ID NO: 84212):VVR:AXGXH (SEQ ID NO: 84147), AVPKAXX (SEQ ID NO: 84404):APT:RPVQ (SEQ ID NO: 84114):KKATV (SEQ ID NO: 84212):VVK:AXGXH (SEQ ID NO: 84147), KVGKAXX (SEQ ID NO: 84425):VPT:RPVQ (SEQ ID NO: 84114):KKATV (SEQ ID NO: 84212):VAE:XGXR (SEQ ID NO: 84123), KASKAXX (SEQ ID NO: 84423):VPT:RPVQ (SEQ ID NO: 84114):KKATV (SEQ ID NO: 84212):AVS:EXGXR (SEQ ID NO: 84179), GSAGPXX (SEQ ID NO: 84420):TPT:RPVQ (SEQ ID NO: 84114):KKATV (SEQ ID NO: 84212):VVD:RXGXS (SEQ ID NO: 84291), AAPASXX (SEQ ID NO: 84401):VPA:RPVQ (SEQ ID NO: 84114):KKATV (SEQ ID NO: 84212):VVE:AXGXR (SEQ ID NO: 84148), STPPTXX (SEQ ID NO: 84431):VPT:RPVQ (SEQ ID NO: 84114):KKATV (SEQ ID NO: 84212):VVE:SXGXR (SEQ ID NO: 84305), HVPKPXX (SEQ ID NO: 84421):APT:RPVQ (SEQ ID NO: 84114):KKATV (SEQ ID NO: 84212):VVR:SXGXH (SEQ ID NO: 84304), RVPSTXX (SEQ ID NO: 84428):APV:RPVQ (SEQ ID NO: 84114):KKATV (SEQ ID NO: 84212):VEE:XGXL (SEQ ID NO: 84122), ASAAPXX (SEQ ID NO: 84402):VPQ:RPVQ (SEQ ID NO: 84114):KKATV (SEQ ID NO: 84212):VRS:XKXS (SEQ ID NO: 84124), ASASPXX (SEQ ID NO: 84403):VSQ:RPVQ (SEQ ID NO: 84114):KKATV (SEQ ID NO: 84212):VKS:XKXS (SEQ ID NO: 84124), ASASPXX (SEQ ID NO: 84403):VPQ:RPVQ (SEQ ID NO: 84114):KKATV (SEQ ID NO: 84212):VKS:XKXS (SEQ ID NO: 84124), NDEGLEX (SEQ ID NO: 84426):VPT:RPVQ (SEQ ID NO: 84114):KKATV (SEQ ID NO: 84212):QHN:KXEXR (SEQ ID NO: 84213), NDEGLEX (SEQ ID NO: 84426):VPT:RPVQ (SEQ ID NO: 84114):KKATV (SEQ ID NO: 84212):EHS:QXEXR (SEQ ID NO: 84276) and SSVKXQP (SEQ ID NO: 84430):SRV:RPVQ (SEQ ID NO: 84114):KKATV (SEQ ID NO: 84212):EEH:LEXAXA (SEQ ID NO: 84400). More particularly, the hexaplet PEP7:PEP3:PEP1:PEP2:PEP4:PEP8 is selected from the group consisting of GIPEPXX (SEQ ID NO: 84419):VPT:SAIS (SEQ ID NO: 84116):LKNYQ (SEQ ID NO: 84230):VVE:SXAXR (SEQ ID NO: 84303), HVTKPTX (SEQ ID NO: 84422):VPT:SAIS (SEQ ID NO: 84116):LKNYQ (SEQ ID NO: 84230):VVE:SXGXH (SEQ ID NO: 84304), YVPKPXX (SEQ ID NO: 84433):VPT:SAIS (SEQ ID NO: 84116):LKNYQ (SEQ ID NO: 84230):VVE:SXGXH (SEQ ID NO: 84304), TVPKPXX (SEQ ID NO: 84432):VPT:SAIS (SEQ ID NO: 84116):LKNYQ (SEQ ID NO: 84230):VVE:AXGXH (SEQ ID NO: 84147), AVPKAXX (SEQ ID NO: 84404):VPT:SAIS (SEQ ID NO: 84116):LKNYQ (SEQ ID NO: 84230):VVE:AXGXH (SEQ ID NO: 84147), KVGKAXX (SEQ ID NO: 84425):VPT:SAIS (SEQ ID NO: 84116):LKNYQ (SEQ ID NO: 84230):VVE:XGXR (SEQ ID NO: 84123), KASKAXX (SEQ ID NO: 84423):VPT:SAIS (SEQ ID NO: 84116):LKNYQ (SEQ ID NO: 84230):VVE:EXGXR (SEQ ID NO: 84179), GSAGPXX (SEQ ID NO: 84420):VPT:SAIS (SEQ ID NO: 84116):LKNYQ (SEQ ID NO: 84230):VVE:RXGXS (SEQ ID NO: 84291), AAPASXX (SEQ ID NO: 84401):VPT:SAIS (SEQ ID NO: 84116):LKNYQ (SEQ ID NO: 84230):VVE:AXGXR (SEQ ID NO: 84148), STPPTXX (SEQ ID NO: 84431):VPT:SAIS (SEQ ID NO: 84116):LKNYQ (SEQ ID NO: 84230):VVE:SXGXR (SEQ ID NO: 84305), HVPKPXX (SEQ ID NO: 84421):VPT:SAIS (SEQ ID NO: 84116):LKNYQ (SEQ ID NO: 84230):VVE:SXGXH (SEQ ID NO: 84304), RVPSTXX (SEQ ID NO: 84428):VPT:SAIS (SEQ ID NO: 84116):LKNYQ (SEQ ID NO: 84230):VVE:XGXL (SEQ ID NO: 84122), ASAAPXX (SEQ ID NO: 84402):VPT:SAIS (SEQ ID NO: 84116):LKNYQ (SEQ ID NO: 84230):VVE:XKXS (SEQ ID NO: 84124), ASASPXX (SEQ ID NO: 84403):VPT:SAIS (SEQ ID NO: 84116):LKNYQ (SEQ ID NO: 84230):VVE:XKXS (SEQ ID NO: 84124), GIPEPXX (SEQ ID NO: 84419):VPE:SAIS (SEQ ID NO: 84116):LKNYQ (SEQ ID NO: 84230):TVE:SXAXR (SEQ ID NO: 84303), HVTKPTX (SEQ ID NO: 84422):APT:SAIS (SEQ ID NO: 84116):LKNYQ (SEQ ID NO: 84230):VVR:SXGXH (SEQ ID NO: 84304), YVPKPXX (SEQ ID NO: 84433):APT:SAIS (SEQ ID NO: 84116):LKNYQ (SEQ ID NO: 84230):VVR:SXGXH (SEQ ID NO: 84304), TVPKPXX (SEQ ID NO: 84432):APT:SAIS (SEQ ID NO: 84116):LKNYQ (SEQ ID NO: 84230):VVR:AXGXH (SEQ ID NO: 84147), AVPKAXX (SEQ ID NO: 84404):APT:SAIS (SEQ ID NO: 84116):LKNYQ (SEQ ID NO: 84230):VVK:AXGXH (SEQ ID NO: 84147), KVGKAXX (SEQ ID NO: 84425):VPT:SAIS (SEQ ID NO: 84116):LKNYQ (SEQ ID NO: 84230):VAE:XGXR (SEQ ID NO: 84123), KASKAXX (SEQ ID NO: 84423):VPT:SAIS (SEQ ID NO: 84116):LKNYQ (SEQ ID NO: 84230):AVS:EXGXR (SEQ ID NO: 84179), GSAGPXX (SEQ ID NO: 84420):TPT:SAIS (SEQ ID NO: 84116):LKNYQ (SEQ ID NO: 84230):VVD:RXGXS (SEQ ID NO: 84291), AAPASXX (SEQ ID NO: 84401):VPA:SAIS (SEQ ID NO: 84116):LKNYQ (SEQ ID NO: 84230):VVE:AXGXR (SEQ ID NO: 84148), HVPKPXX (SEQ ID NO: 84421):APT:SAIS (SEQ ID NO: 84116):LKNYQ (SEQ ID NO: 84230):VVR:SXGXH (SEQ ID NO: 84304), RVPSTXX (SEQ ID NO: 84428):APV:SAIS (SEQ ID NO: 84116):LKNYQ (SEQ ID NO: 84230):VEE:XGXL (SEQ ID NO: 84122), ASAAPXX (SEQ ID NO: 84402):VPQ:SAIS (SEQ ID NO: 84116):LKNYQ (SEQ ID NO: 84230):VRS:XKXS (SEQ ID NO: 84124), ASASPXX (SEQ ID NO: 84403):VSQ:SAIS (SEQ ID NO: 84116):LKNYQ (SEQ ID NO: 84230):VKS:XKXS (SEQ ID NO: 84124), ASASPXX (SEQ ID NO: 84403):VPQ:SAIS (SEQ ID NO: 84116):LKNYQ (SEQ ID NO: 84230):VKS:XKXS (SEQ ID NO: 84124), NDEGLEX (SEQ ID NO: 84426):VPT:SAIS (SEQ ID NO: 84116):LKNYQ (SEQ ID NO: 84230):QHN:KXEXR (SEQ ID NO: 84213), NDEGLEX (SEQ ID NO: 84426):VPT:SAIS (SEQ ID NO: 84116):LKNYQ (SEQ ID NO: 84230):EHS:QXEXR (SEQ ID NO: 84276), SSVKXQP (SEQ ID NO: 84430):SRV:SAIS (SEQ ID NO: 84116):LKNYQ (SEQ ID NO: 84230):EEH:LEXAXA (SEQ ID NO: 84400), RNVQXRP (SEQ ID NO: 84427):TQV:SAIS (SEQ ID NO: 84116):LKNYQ (SEQ ID NO: 84230):EDH:LAXKXE (SEQ ID NO: 84399), KIPKAXX (SEQ ID NO: 84424):VPE:SSLS (SEQ ID NO: 84121):LKVYP (SEQ ID NO: 84231):TVE:GXGXR (SEQ ID NO: 84208), SIPKAXX (SEQ ID NO: 84429):VPE:SSLS (SEQ ID NO: 84121):LKVYP (SEQ ID NO: 84231):TVE:GXGXR (SEQ ID NO: 84208), HVTKPTX (SEQ ID NO: 84422):VPE:SSLS (SEQ ID NO: 84121):LKVYP (SEQ ID NO: 84231):TVE:SXGXH (SEQ ID NO: 84304), YVPKPXX (SEQ ID NO: 84433):VPE:SSLS (SEQ ID NO: 84121):LKVYP (SEQ ID NO: 84231):TVE:SXGXH (SEQ ID NO: 84304), TVPKPXX (SEQ ID NO: 84432):VPE:SSLS (SEQ ID NO: 84121):LKVYP (SEQ ID NO: 84231):TVE:AXGXH (SEQ ID NO: 84147), AVPKAXX (SEQ ID NO: 84404):VPE:SSLS (SEQ ID NO: 84121):LKVYP (SEQ ID NO: 84231):TVE:AXGXH (SEQ ID NO: 84147), KVGKAXX (SEQ ID NO: 84425):VPE:SSLS (SEQ ID NO: 84121):LKVYP (SEQ ID NO: 84231):TVE:XGXR (SEQ ID NO: 84123), KASKAXX (SEQ ID NO: 84423):VPE:SSLS (SEQ ID NO: 84121):LKVYP (SEQ ID NO: 84231):TVE:EXGXR (SEQ ID NO: 84179), GSAGPXX (SEQ ID NO: 84420):VPE:SSLS (SEQ ID NO: 84121):LKVYP (SEQ ID NO: 84231):TVE:RXGXS (SEQ ID NO: 84291), AAPASXX (SEQ ID NO: 84401):VPE:SSLS (SEQ ID NO: 84121):LKVYP (SEQ ID NO: 84231):TVE:AXGXR (SEQ ID NO: 84148), STPPTXX (SEQ ID NO: 84431):VPE:SSLS (SEQ ID NO: 84121):LKVYP (SEQ ID NO: 84231):TVE:SXGXR (SEQ ID NO: 84305), HVPKPXX (SEQ ID NO: 84421):VPE:SSLS (SEQ ID NO: 84121):LKVYP (SEQ ID NO: 84231):TVE:SXGXH (SEQ ID NO: 84304), RVPSTXX (SEQ ID NO: 84428):VPE:SSLS (SEQ ID NO: 84121):LKVYP (SEQ ID NO: 84231):TVE:XGXL (SEQ ID NO: 84122), ASAAPXX (SEQ ID NO: 84402):VPE:SSLS (SEQ ID NO: 84121):LKVYP (SEQ ID NO: 84231):TVE:XKXS (SEQ ID NO: 84124), ASASPXX (SEQ ID NO: 84403):VPE:SSLS (SEQ ID NO: 84121):LKVYP (SEQ ID NO: 84231):TVE:XKXS (SEQ ID NO: 84124), KIPKAXX (SEQ ID NO: 84424):VPT:SSLS (SEQ ID NO: 84121):LKVYP (SEQ ID NO: 84231):VVE:GXGXR (SEQ ID NO: 84208), SIPKAXX (SEQ ID NO: 84429):VPT:SSLS (SEQ ID NO: 84121):LKVYP (SEQ ID NO: 84231):VVE:GXGXR (SEQ ID NO: 84208), HVTKPTX (SEQ ID NO: 84422):APT:SSLS (SEQ ID NO: 84121):LKVYP (SEQ ID NO: 84231):VVR:SXGXH (SEQ ID NO: 84304), YVPKPXX (SEQ ID NO: 84433):APT:SSLS (SEQ ID NO: 84121):LKVYP (SEQ ID NO: 84231):VVR:SXGXH (SEQ ID NO: 84304), TVPKPXX (SEQ ID NO: 84432):APT:SSLS (SEQ ID NO: 84121):LKVYP (SEQ ID NO: 84231):VVR:AXGXH (SEQ ID NO: 84147), AVPKAXX (SEQ ID NO: 84404):APT:SSLS (SEQ ID NO: 84121):LKVYP (SEQ ID NO: 84231):VVK:AXGXH (SEQ ID NO: 84147), KVGKAXX (SEQ ID NO: 84425):VPT:SSLS (SEQ ID NO: 84121):LKVYP (SEQ ID NO: 84231):VAE:XGXR (SEQ ID NO: 84123), KASKAXX (SEQ ID NO: 84423):VPT:SSLS (SEQ ID NO: 84121):LKVYP (SEQ ID NO: 84231):AVS:EXGXR (SEQ ID NO: 84179), GSAGPXX (SEQ ID NO: 84420):TPT:SSLS (SEQ ID NO: 84121):LKVYP (SEQ ID NO: 84231):VVD:RXGXS (SEQ ID NO: 84291), AAPASXX (SEQ ID NO: 84401):VPA:SSLS (SEQ ID NO: 84121):LKVYP (SEQ ID NO: 84231):VVE:AXGXR (SEQ ID NO: 84148), STPPTXX (SEQ ID NO: 84431):VPT:SSLS (SEQ ID NO: 84121):LKVYP (SEQ ID NO: 84231):VVE:SXGXR (SEQ ID NO: 84305), HVPKPXX (SEQ ID NO: 84421):APT:SSLS (SEQ ID NO: 84121):LKVYP (SEQ ID NO: 84231):VVR:SXGXH (SEQ ID NO: 84304), RVPSTXX (SEQ ID NO: 84428):APV:SSLS (SEQ ID NO: 84121):LKVYP (SEQ ID NO: 84231):VEE:XGXL (SEQ ID NO: 84122), ASAAPXX (SEQ ID NO: 84402):VPQ:SSLS (SEQ ID NO: 84121):LKVYP (SEQ ID NO: 84231):VRS:XKXS (SEQ ID NO: 84124), ASASPXX (SEQ ID NO: 84403):VSQ:SSLS (SEQ ID NO: 84121):LKVYP (SEQ ID NO: 84231):VKS:XKXS (SEQ ID NO: 84124), ASASPXX (SEQ ID NO: 84403):VPQ:SSLS (SEQ ID NO: 84121):LKVYP (SEQ ID NO: 84231):VKS:XKXS (SEQ ID NO: 84124), NDEGLEX (SEQ ID NO: 84426):VPT:SSLS (SEQ ID NO: 84121):LKVYP (SEQ ID NO: 84231):QHN:KXEXR (SEQ ID NO: 84213), NDEGLEX (SEQ ID NO: 84426):VPT:SSLS (SEQ ID NO: 84121):LKVYP (SEQ ID NO: 84231):EHS:QXEXR (SEQ ID NO: 84276), SSVKXQP (SEQ ID NO: 84430):SRV:SSLS (SEQ ID NO: 84121):LKVYP (SEQ ID NO: 84231):EEH:LEXAXA (SEQ ID NO: 84400), RNVQXRP (SEQ ID NO: 84427):TQV:SSLS (SEQ ID NO: 84121):LKVYP (SEQ ID NO: 84231):EDH:LAXKXE (SEQ ID NO: 84399), KIPKAXX (SEQ ID NO: 84424):APT:NAIS (SEQ ID NO: 84113):LKKYR (SEQ ID NO: 84229):VVR:GXGXR (SEQ ID NO: 84208), GIPEPXX (SEQ ID NO: 84419):APT:NAIS (SEQ ID NO: 84113):LKKYR (SEQ ID NO: 84229):VVR:SXAXR (SEQ ID NO: 84303), SIPKAXX (SEQ ID NO: 84429):APT:NAIS (SEQ ID NO: 84113):LKKYR (SEQ ID NO: 84229):VVR:GXGXR (SEQ ID NO: 84208), AVPKAXX (SEQ ID NO: 84404):APT:NAIS (SEQ ID NO: 84113):LKKYR (SEQ ID NO: 84229):VVR:AXGXH (SEQ ID NO: 84147), KVGKAXX (SEQ ID NO: 84425):APT:NAIS (SEQ ID NO: 84113):LKKYR (SEQ ID NO: 84229):VVR:XGXR (SEQ ID NO: 84123), KASKAXX (SEQ ID NO: 84423):APT:NAIS (SEQ ID NO: 84113):LKKYR (SEQ ID NO: 84229):VVR:EXGXR (SEQ ID NO: 84179), GSAGPXX (SEQ ID NO: 84420):APT:NAIS (SEQ ID NO: 84113):LKKYR (SEQ ID NO: 84229):VVR:RXGXS (SEQ ID NO: 84291), AAPASXX (SEQ ID NO: 84401):APT:NAIS (SEQ ID NO: 84113):LKKYR (SEQ ID NO: 84229):VVR:AXGXR (SEQ ID NO: 84148), STPPTXX (SEQ ID NO: 84431):APT:NAIS (SEQ ID NO: 84113):LKKYR (SEQ ID NO: 84229):VVR:SXGXR (SEQ ID NO: 84305), RVPSTXX (SEQ ID NO: 84428):APT:NAIS (SEQ ID NO: 84113):LKKYR (SEQ ID NO: 84229):VVR:XGXL (SEQ ID NO: 84122), ASAAPXX (SEQ ID NO: 84402):APT:NAIS (SEQ ID NO: 84113):LKKYR (SEQ ID NO: 84229):VVR:XKXS (SEQ ID NO: 84124), ASASPXX (SEQ ID NO: 84403):APT:NAIS (SEQ ID NO: 84113):LKKYR (SEQ ID NO: 84229):VVR:XKXS (SEQ ID NO: 84124), KIPKAXX (SEQ ID NO: 84424):VPT:NAIS (SEQ ID NO: 84113):LKKYR (SEQ ID NO: 84229):VVE:GXGXR (SEQ ID NO: 84208), GIPEPXX (SEQ ID NO: 84419):VPE:NAIS (SEQ ID NO: 84113):LKKYR (SEQ ID NO: 84229):TVE:SXAXR (SEQ ID NO: 84303), SIPKAXX (SEQ ID NO: 84429):VPT:NAIS (SEQ ID NO: 84113):LKKYR (SEQ ID NO: 84229):VVE:GXGXR (SEQ ID NO: 84208), AVPKAXX (SEQ ID NO: 84404):APT:NAIS (SEQ ID NO: 84113):LKKYR (SEQ ID NO: 84229):VVK:AXGXH (SEQ ID NO: 84147), KVGKAXX (SEQ ID NO: 84425):VPT:NAIS (SEQ ID NO: 84113):LKKYR (SEQ ID NO: 84229):VAE:XGXR (SEQ ID NO: 84123), KASKAXX (SEQ ID NO: 84423):VPT:NAIS (SEQ ID NO: 84113):LKKYR (SEQ ID NO: 84229):AVS:EXGXR (SEQ ID NO: 84179), GSAGPXX (SEQ ID NO: 84420):TPT:NAIS (SEQ ID NO: 84113):LKKYR (SEQ ID NO: 84229):VVD:RXGXS (SEQ ID NO: 84291), AAPASXX (SEQ ID NO: 84401):VPA:NAIS (SEQ ID NO: 84113):LKKYR (SEQ ID NO: 84229):VVE:AXGXR (SEQ ID NO: 84148), STPPTXX (SEQ ID NO: 84431):VPT:NAIS (SEQ ID NO: 84113):LKKYR (SEQ ID NO: 84229):VVE:SXGXR (SEQ ID NO: 84305), RVPSTXX (SEQ ID NO: 84428):APV:NAIS (SEQ ID NO: 84113):LKKYR (SEQ ID NO: 84229):VEE:XGXL (SEQ ID NO: 84122), ASAAPXX (SEQ ID NO: 84402):VPQ:NAIS (SEQ ID NO: 84113):LKKYR (SEQ ID NO: 84229):VRS:XKXS (SEQ ID NO: 84124), ASASPXX (SEQ ID NO: 84403):VSQ:NAIS (SEQ ID NO: 84113):LKKYR (SEQ ID NO: 84229):VKS:XKXS (SEQ ID NO: 84124), ASASPXX (SEQ ID NO: 84403):VPQ:NAIS (SEQ ID NO: 84113):LKKYR (SEQ ID NO: 84229):VKS:XKXS (SEQ ID NO: 84124), NDEGLEX (SEQ ID NO: 84426):VPT:NAIS (SEQ ID NO: 84113):LKKYR (SEQ ID NO: 84229):QHN:KXEXR (SEQ ID NO: 84213), NDEGLEX (SEQ ID NO: 84426):VPT:NAIS (SEQ ID NO: 84113):LKKYR (SEQ ID NO: 84229):EHS:QXEXR (SEQ ID NO: 84276), SSVKXQP (SEQ ID NO: 84430):SRV:NAIS (SEQ ID NO: 84113):LKKYR (SEQ ID NO: 84229):EEH:LEXAXA (SEQ ID NO: 84400), RNVQXRP (SEQ ID NO: 84427):TQV:NAIS (SEQ ID NO: 84113):LKKYR (SEQ ID NO: 84229):EDH:LAXKXE (SEQ ID NO: 84399), KIPKAXX (SEQ ID NO: 84424):APT:SATS (SEQ ID NO: 84117):LRKHR (SEQ ID NO: 84233):VVK:GXGXR (SEQ ID NO: 84208), GIPEPXX (SEQ ID NO: 84419):APT:SATS (SEQ ID NO: 84117):LRKHR (SEQ ID NO: 84233):VVK:SXAXR (SEQ ID NO: 84303), SIPKAXX (SEQ ID NO: 84429):APT:SATS (SEQ ID NO: 84117):LRKHR (SEQ ID NO: 84233):VVK:GXGXR (SEQ ID NO: 84208), HVTKPTX (SEQ ID NO: 84422):APT:SATS (SEQ ID NO: 84117):LRKHR (SEQ ID NO: 84233):VVK:SXGXH (SEQ ID NO: 84304), YVPKPXX (SEQ ID NO: 84433):APT:SATS (SEQ ID NO: 84117):LRKHR (SEQ ID NO: 84233):VVK:SXGXH (SEQ ID NO: 84304), TVPKPXX (SEQ ID NO: 84432):APT:SATS (SEQ ID NO: 84117):LRKHR (SEQ ID NO: 84233):VVK:AXGXH (SEQ ID NO: 84147), KVGKAXX (SEQ ID NO: 84425):APT:SATS (SEQ ID NO: 84117):LRKHR (SEQ ID NO: 84233):VVK:XGXR (SEQ ID NO: 84123), KASKAXX (SEQ ID NO: 84423):APT:SATS (SEQ ID NO: 84117):LRKHR (SEQ ID NO: 84233):VVK:EXGXR (SEQ ID NO: 84179), GSAGPXX (SEQ ID NO: 84420):APT:SATS (SEQ ID NO: 84117):LRKHR (SEQ ID NO: 84233):VVK:RXGXS (SEQ ID NO: 84291), AAPASXX (SEQ ID NO: 84401):APT:SATS (SEQ ID NO: 84117):LRKHR (SEQ ID NO: 84233):VVK:AXGXR (SEQ ID NO: 84148), STPPTXX (SEQ ID NO: 84431):APT:SATS (SEQ ID NO: 84117):LRKHR (SEQ ID NO: 84233):VVK:SXGXR (SEQ ID NO: 84305), HVPKPXX (SEQ ID NO: 84421):APT:SATS (SEQ ID NO: 84117):LRKHR (SEQ ID NO: 84233):VVK:SXGXH (SEQ ID NO: 84304), RVPSTXX (SEQ ID NO: 84428):APT:SATS (SEQ ID NO: 84117):LRKHR (SEQ ID NO: 84233):VVK:XGXL (SEQ ID NO: 84122), ASAAPXX (SEQ ID NO: 84402):APT:SATS (SEQ ID NO: 84117):LRKHR (SEQ ID NO: 84233):VVK:XKXS (SEQ ID NO: 84124), ASASPXX (SEQ ID NO: 84403):APT:SATS (SEQ ID NO: 84117):LRKHR (SEQ ID NO: 84233):VVK:XKXS (SEQ ID NO: 84124), KIPKAXX (SEQ ID NO: 84424):VPT:SATS (SEQ ID NO: 84117):LRKHR (SEQ ID NO: 84233):VVE:GXGXR (SEQ ID NO: 84208), GIPEPXX (SEQ ID NO: 84419):VPE:SATS (SEQ ID NO: 84117):LRKHR (SEQ ID NO: 84233):TVE:SXAXR (SEQ ID NO: 84303), SIPKAXX (SEQ ID NO: 84429):VPT:SATS (SEQ ID NO: 84117):LRKHR (SEQ ID NO: 84233):VVE:GXGXR (SEQ ID NO: 84208), HVTKPTX (SEQ ID NO: 84422):APT:SATS (SEQ ID NO: 84117):LRKHR (SEQ ID NO: 84233):VVR:SXGXH (SEQ ID NO: 84304), YVPKPXX (SEQ ID NO: 84433):APT:SATS (SEQ ID NO: 84117):LRKHR (SEQ ID NO: 84233):VVR:SXGXH (SEQ ID NO: 84304), TVPKPXX (SEQ ID NO: 84432):APT:SATS (SEQ ID NO: 84117):LRKHR (SEQ ID NO: 84233):VVR:AXGXH (SEQ ID NO: 84147), KVGKAXX (SEQ ID NO: 84425):VPT:SATS (SEQ ID NO: 84117):LRKHR (SEQ ID NO: 84233):VAE:XGXR (SEQ ID NO: 84123), KASKAXX (SEQ ID NO: 84423):VPT:SATS (SEQ ID NO: 84117):LRKHR (SEQ ID NO: 84233):AVS:EXGXR (SEQ ID NO: 84179), GSAGPXX (SEQ ID NO: 84420):TPT:SATS (SEQ ID NO: 84117):LRKHR (SEQ ID NO: 84233):VVD:RXGXS (SEQ ID NO: 84291), AAPASXX (SEQ ID NO: 84401):VPA:SATS (SEQ ID NO: 84117):LRKHR (SEQ ID NO: 84233):VVE:AXGXR (SEQ ID NO: 84148), STPPTXX (SEQ ID NO: 84431):VPT:SATS (SEQ ID NO: 84117):LRKHR (SEQ ID NO: 84233):VVE:SXGXR (SEQ ID NO: 84305), HVPKPXX (SEQ ID NO: 84421):APT:SATS (SEQ ID NO: 84117):LRKHR (SEQ ID NO: 84233):VVR:SXGXH (SEQ ID NO: 84304), RVPSTXX (SEQ ID NO: 84428):APV:SATS (SEQ ID NO: 84117):LRKHR (SEQ ID NO: 84233):VEE:XGXL (SEQ ID NO: 84122), ASAAPXX (SEQ ID NO: 84402):VPQ:SATS (SEQ ID NO: 84117):LRKHR (SEQ ID NO: 84233):VRS:XKXS (SEQ ID NO: 84124), ASASPXX (SEQ ID NO: 84403):VSQ:SATS (SEQ ID NO: 84117):LRKHR (SEQ ID NO: 84233):VKS:XKXS (SEQ ID NO: 84124), ASASPXX (SEQ ID NO: 84403):VPQ:SATS (SEQ ID NO: 84117):LRKHR (SEQ ID NO: 84233):VKS:XKXS (SEQ ID NO: 84124), NDEGLEX (SEQ ID NO: 84426):VPT:SATS (SEQ ID NO: 84117):LRKHR (SEQ ID NO: 84233):QHN:KXEXR (SEQ ID NO: 84213), NDEGLEX (SEQ ID NO: 84426):VPT:SATS (SEQ ID NO: 84117):LRKHR (SEQ ID NO: 84233):EHS:QXEXR (SEQ ID NO: 84276), SSVKXQP (SEQ ID NO: 84430):SRV:SATS (SEQ ID NO: 84117):LRKHR (SEQ ID NO: 84233):EEH:LEXAXA (SEQ ID NO: 84400), RNVQXRP (SEQ ID NO: 84427):TQV:SATS (SEQ ID NO: 84117):LRKHR (SEQ ID NO: 84233):EDH:LAXKXE (SEQ ID NO: 84399), KIPKAXX (SEQ ID NO: 84424):VPT:SPIS (SEQ ID NO: 84120):LKYHY (SEQ ID NO: 84232):VAE:GXGXR (SEQ ID NO: 84208), GIPEPXX (SEQ ID NO: 84419):VPT:SPIS (SEQ ID NO: 84120):LKYHY (SEQ ID NO: 84232):VAE:SXAXR (SEQ ID NO: 84303), SIPKAXX (SEQ ID NO: 84429):VPT:SPIS (SEQ ID NO: 84120):LKYHY (SEQ ID NO: 84232):VAE:GXGXR (SEQ ID NO: 84208), HVTKPTX (SEQ ID NO: 84422):VPT:SPIS (SEQ ID NO: 84120):LKYHY (SEQ ID NO: 84232):VAE:SXGXH (SEQ ID NO: 84304), YVPKPXX (SEQ ID NO: 84433):VPT:SPIS (SEQ ID NO: 84120):LKYHY (SEQ ID NO: 84232):VAE:SXGXH (SEQ ID NO: 84304), TVPKPXX (SEQ ID NO: 84432):VPT:SPIS (SEQ ID NO: 84120):LKYHY (SEQ ID NO: 84232):VAE:AXGXH (SEQ ID NO: 84147), AVPKAXX (SEQ ID NO: 84404):VPT:SPIS (SEQ ID NO: 84120):LKYHY (SEQ ID NO: 84232):VAE:AXGXH (SEQ ID NO: 84147), KASKAXX (SEQ ID NO: 84423):VPT:SPIS (SEQ ID NO: 84120):LKYHY (SEQ ID NO: 84232):VAE:EXGXR (SEQ ID NO: 84179), GSAGPXX (SEQ ID NO: 84420):VPT:SPIS (SEQ ID NO: 84120):LKYHY (SEQ ID NO: 84232):VAE:RXGXS (SEQ ID NO: 84291), AAPASXX (SEQ ID NO: 84401):VPT:SPIS (SEQ ID NO: 84120):LKYHY (SEQ ID NO: 84232):VAE:AXGXR (SEQ ID NO: 84148), STPPTXX (SEQ ID NO: 84431):VPT:SPIS (SEQ ID NO: 84120):LKYHY (SEQ ID NO: 84232):VAE:SXGXR (SEQ ID NO: 84305), HVPKPXX (SEQ ID NO: 84421):VPT:SPIS (SEQ ID NO: 84120):LKYHY (SEQ ID NO: 84232):VAE:SXGXH (SEQ ID NO: 84304), RVPSTXX (SEQ ID NO: 84428):VPT:SPIS (SEQ ID NO: 84120):LKYHY (SEQ ID NO: 84232):VAE:XGXL (SEQ ID NO: 84122), ASAAPXX (SEQ ID NO: 84402):VPT:SPIS (SEQ ID NO: 84120):LKYHY (SEQ ID NO: 84232):VAE:XKXS (SEQ ID NO: 84124), ASASPXX (SEQ ID NO: 84403):VPT:SPIS (SEQ ID NO: 84120):LKYHY (SEQ ID NO: 84232):VAE:XKXS (SEQ ID NO: 84124), KIPKAXX (SEQ ID NO: 84424):VPT:SPIS (SEQ ID NO: 84120):LKYHY (SEQ ID NO: 84232):VVE:GXGXR (SEQ ID NO: 84208), GIPEPXX (SEQ ID NO: 84419):VPE:SPIS (SEQ ID NO: 84120):LKYHY (SEQ ID NO: 84232):TVE:SXAXR (SEQ ID NO: 84303), SIPKAXX (SEQ ID NO: 84429):VPT:SPIS (SEQ ID NO: 84120):LKYHY (SEQ ID NO: 84232):VVE:GXGXR (SEQ ID NO: 84208), HVTKPTX (SEQ ID NO: 84422):APT:SPIS (SEQ ID NO: 84120):LKYHY (SEQ ID NO: 84232):VVR:SXGXH (SEQ ID NO: 84304), YVPKPXX (SEQ ID NO: 84433):APT:SPIS (SEQ ID NO: 84120):LKYHY (SEQ ID NO: 84232):VVR:SXGXH (SEQ ID NO: 84304), TVPKPXX (SEQ ID NO: 84432):APT:SPIS (SEQ ID NO: 84120):LKYHY (SEQ ID NO: 84232):VVR:AXGXH (SEQ ID NO: 84147), AVPKAXX (SEQ ID NO: 84404):APT:SPIS (SEQ ID NO: 84120):LKYHY (SEQ ID NO: 84232):VVK:AXGXH (SEQ ID NO: 84147), KASKAXX (SEQ ID NO: 84423):VPT:SPIS (SEQ ID NO: 84120):LKYHY (SEQ ID NO: 84232):AVS:EXGXR (SEQ ID NO: 84179), GSAGPXX (SEQ ID NO: 84420):TPT:SPIS (SEQ ID NO: 84120):LKYHY (SEQ ID NO: 84232):VVD:RXGXS (SEQ ID NO: 84291), AAPASXX (SEQ ID NO: 84401):VPA:SPIS (SEQ ID NO: 84120):LKYHY (SEQ ID NO: 84232):VVE:AXGXR (SEQ ID NO: 84148), STPPTXX (SEQ ID NO: 84431):VPT:SPIS (SEQ ID NO: 84120):LKYHY (SEQ ID NO: 84232):VVE:SXGXR (SEQ ID NO: 84305), HVPKPXX (SEQ ID NO: 84421):APT:SPIS (SEQ ID NO: 84120):LKYHY (SEQ ID NO: 84232):VVR:SXGXH (SEQ ID NO: 84304), RVPSTXX (SEQ ID NO: 84428):APV:SPIS (SEQ ID NO: 84120):LKYHY (SEQ ID NO: 84232):VEE:XGXL (SEQ ID NO: 84122), ASAAPXX (SEQ ID NO: 84402):VPQ:SPIS (SEQ ID NO: 84120):LKYHY (SEQ ID NO: 84232):VRS:XKXS (SEQ ID NO: 84124), ASASPXX (SEQ ID NO: 84403):VSQ:SPIS (SEQ ID NO: 84120):LKYHY (SEQ ID NO: 84232):VKS:XKXS (SEQ ID NO: 84124), ASASPXX (SEQ ID NO: 84403):VPQ:SPIS (SEQ ID NO: 84120):LKYHY (SEQ ID NO: 84232):VKS:XKXS (SEQ ID NO: 84124), NDEGLEX (SEQ ID NO: 84426):VPT:SPIS (SEQ ID NO: 84120):LKYHY (SEQ ID NO: 84232):QHN:KXEXR (SEQ ID NO: 84213), NDEGLEX (SEQ ID NO: 84426):VPT:SPIS (SEQ ID NO: 84120):LKYHY (SEQ ID NO: 84232):EHS:QXEXR (SEQ ID NO: 84276), SSVKXQP (SEQ ID NO: 84430):SRV:SPIS (SEQ ID NO: 84120):LKYHY (SEQ ID NO: 84232):EEH:LEXAXA (SEQ ID NO: 84400), RNVQXRP (SEQ ID NO: 84427):TQV:SPIS (SEQ ID NO: 84120):LKYHY (SEQ ID NO: 84232):EDH:LAXKXE (SEQ ID NO: 84399), KIPKAXX (SEQ ID NO: 84424):VPT:EPIS (SEQ ID NO: 84109):KFKYE (SEQ ID NO: 84211):AVS:GXGXR (SEQ ID NO: 84208), GIPEPXX (SEQ ID NO: 84419):VPT:EPIS (SEQ ID NO: 84109):KFKYE (SEQ ID NO: 84211):AVS:SXAXR (SEQ ID NO: 84303), SIPKAXX (SEQ ID NO: 84429):VPT:EPIS (SEQ ID NO: 84109):KFKYE (SEQ ID NO: 84211):AVS:GXGXR (SEQ ID NO: 84208), HVTKPTX (SEQ ID NO: 84422):VPT:EPIS (SEQ ID NO: 84109):KFKYE (SEQ ID NO: 84211):AVS:SXGXH (SEQ ID NO: 84304), YVPKPXX (SEQ ID NO: 84433):VPT:EPIS (SEQ ID NO: 84109):KFKYE (SEQ ID NO: 84211):AVS:SXGXH (SEQ ID NO: 84304), TVPKPXX (SEQ ID NO: 84432):VPT:EPIS (SEQ ID NO: 84109):KFKYE (SEQ ID NO: 84211):AVS:AXGXH (SEQ ID NO: 84147), AVPKAXX (SEQ ID NO: 84404):VPT:EPIS (SEQ ID NO: 84109):KFKYE (SEQ ID NO: 84211):AVS:AXGXH (SEQ ID NO: 84147), KVGKAXX (SEQ ID NO: 84425):VPT:EPIS (SEQ ID NO: 84109):KFKYE (SEQ ID NO: 84211):AVS:XGXR (SEQ ID NO: 84123), GSAGPXX (SEQ ID NO: 84420):VPT:EPIS (SEQ ID NO: 84109):KFKYE (SEQ ID NO: 84211):AVS:RXGXS (SEQ ID NO: 84291), AAPASXX (SEQ ID NO: 84401):VPT:EPIS (SEQ ID NO: 84109):KFKYE (SEQ ID NO: 84211):AVS:AXGXR (SEQ ID NO: 84148), STPPTXX (SEQ ID NO: 84431):VPT:EPIS (SEQ ID NO: 84109):KFKYE (SEQ ID NO: 84211):AVS:SXGXR (SEQ ID NO: 84305), HVPKPXX (SEQ ID NO: 84421):VPT:EPIS (SEQ ID NO: 84109):KFKYE (SEQ ID NO: 84211):AVS:SXGXH (SEQ ID NO: 84304), RVPSTXX (SEQ ID NO: 84428):VPT:EPIS (SEQ ID NO: 84109):KFKYE (SEQ ID NO: 84211):AVS:XGXL (SEQ ID NO: 84122), ASAAPXX (SEQ ID NO: 84402):VPT:EPIS (SEQ ID NO: 84109):KFKYE (SEQ ID NO: 84211):AVS:XKXS (SEQ ID NO: 84124), ASASPXX (SEQ ID NO: 84403):VPT:EPIS (SEQ ID NO: 84109):KFKYE (SEQ ID NO: 84211):AVS:XKXS (SEQ ID NO: 84124), KIPKAXX (SEQ ID NO: 84424):VPT:EPIS (SEQ ID NO: 84109):KFKYE (SEQ ID NO: 84211):VVE:GXGXR (SEQ ID NO: 84208), GIPEPXX (SEQ ID NO: 84419):VPE:EPIS (SEQ ID NO: 84109):KFKYE (SEQ ID NO: 84211):TVE:SXAXR (SEQ ID NO: 84303), SIPKAXX (SEQ ID NO: 84429):VPT:EPIS (SEQ ID NO: 84109):KFKYE (SEQ ID NO: 84211):VVE:GXGXR (SEQ ID NO: 84208), HVTKPTX (SEQ ID NO: 84422):APT:EPIS (SEQ ID NO: 84109):KFKYE (SEQ ID NO: 84211):VVR:SXGXH (SEQ ID NO: 84304), YVPKPXX (SEQ ID NO: 84433):APT:EPIS (SEQ ID NO: 84109):KFKYE (SEQ ID NO: 84211):VVR:SXGXH (SEQ ID NO: 84304), TVPKPXX (SEQ ID NO: 84432):APT:EPIS (SEQ ID NO: 84109):KFKYE (SEQ ID NO: 84211):VVR:AXGXH (SEQ ID NO: 84147), AVPKAXX (SEQ ID NO: 84404):APT:EPIS (SEQ ID NO: 84109):KFKYE (SEQ ID NO: 84211):VVK:AXGXH (SEQ ID NO: 84147), KVGKAXX (SEQ ID NO: 84425):VPT:EPIS (SEQ ID NO: 84109):KFKYE (SEQ ID NO: 84211):VAE:XGXR (SEQ ID NO: 84123), GSAGPXX (SEQ ID NO: 84420):TPT:EPIS (SEQ ID NO: 84109):KFKYE (SEQ ID NO: 84211):VVD:RXGXS (SEQ ID NO: 84291), AAPASXX (SEQ ID NO: 84401):VPA:EPIS (SEQ ID NO: 84109):KFKYE (SEQ ID NO: 84211):VVE:AXGXR (SEQ ID NO: 84148), STPPTXX (SEQ ID NO: 84431):VPT:EPIS (SEQ ID NO: 84109):KFKYE (SEQ ID NO: 84211):VVE:SXGXR (SEQ ID NO: 84305), HVPKPXX (SEQ ID NO: 84421):APT:EPIS (SEQ ID NO: 84109):KFKYE (SEQ ID NO: 84211):VVR:SXGXH (SEQ ID NO: 84304), RVPSTXX (SEQ ID NO: 84428):APV:EPIS (SEQ ID NO: 84109):KFKYE (SEQ ID NO: 84211):VEE:XGXL (SEQ ID NO: 84122), ASAAPXX (SEQ ID NO: 84402):VPQ:EPIS (SEQ ID NO: 84109):KFKYE (SEQ ID NO: 84211):VRS:XKXS (SEQ ID NO: 84124), ASASPXX (SEQ ID NO: 84403):VSQ:EPIS (SEQ ID NO: 84109):KFKYE (SEQ ID NO: 84211):VKS:XKXS (SEQ ID NO: 84124), ASASPXX (SEQ ID NO: 84403):VPQ:EPIS (SEQ ID NO: 84109):KFKYE (SEQ ID NO: 84211):VKS:XKXS (SEQ ID NO: 84124), NDEGLEX (SEQ ID NO: 84426):VPT:EPIS (SEQ ID NO: 84109):KFKYE (SEQ ID NO: 84211):QHN:KXEXR (SEQ ID NO: 84213), NDEGLEX (SEQ ID NO: 84426):VPT:EPIS (SEQ ID NO: 84109):KFKYE (SEQ ID NO: 84211):EHS:QXEXR (SEQ ID NO: 84276), SSVKXQP (SEQ ID NO: 84430):SRV:EPIS (SEQ ID NO: 84109):KFKYE (SEQ ID NO: 84211):EEH:LEXAXA (SEQ ID NO: 84400), RNVQXRP (SEQ ID NO: 84427):TQV:EPIS (SEQ ID NO: 84109):KFKYE (SEQ ID NO: 84211):EDH:LAXKXE (SEQ ID NO: 84399), KIPKAXX (SEQ ID NO: 84424):TPT:SPIN (SEQ ID NO: 84119):YGKIP (SEQ ID NO: 84397):VVD:GXGXR (SEQ ID NO: 84208), GIPEPXX (SEQ ID NO: 84419):TPT:SPIN (SEQ ID NO: 84119):YGKIP (SEQ ID NO: 84397):VVD:SXAXR (SEQ ID NO: 84303), SIPKAXX (SEQ ID NO: 84429):TPT:SPIN (SEQ ID NO: 84119):YGKIP (SEQ ID NO: 84397):VVD:GXGXR (SEQ ID NO: 84208), HVTKPTX (SEQ ID NO: 84422):TPT:SPIN (SEQ ID NO: 84119):YGKIP (SEQ ID NO: 84397):VVD:SXGXH (SEQ ID NO: 84304), YVPKPXX (SEQ ID NO: 84433):TPT:SPIN (SEQ ID NO: 84119):YGKIP (SEQ ID NO: 84397):VVD:SXGXH (SEQ ID NO: 84304), TVPKPXX (SEQ ID NO: 84432):TPT:SPIN (SEQ ID NO: 84119):YGKIP (SEQ ID NO: 84397):VVD:AXGXH (SEQ ID NO: 84147), AVPKAXX (SEQ ID NO: 84404):TPT:SPIN (SEQ ID NO: 84119):YGKIP (SEQ ID NO: 84397):VVD:AXGXH (SEQ ID NO: 84147), KVGKAXX (SEQ ID NO: 84425):TPT:SPIN (SEQ ID NO: 84119):YGKIP (SEQ ID NO: 84397):VVD:XGXR (SEQ ID NO: 84123), KASKAXX (SEQ ID NO: 84423):TPT:SPIN (SEQ ID NO: 84119):YGKIP (SEQ ID NO: 84397):VVD:EXGXR (SEQ ID NO: 84179), AAPASXX (SEQ ID NO: 84401):TPT:SPIN (SEQ ID NO: 84119):YGKIP (SEQ ID NO: 84397):VVD:AXGXR (SEQ ID NO: 84148), STPPTXX (SEQ ID NO: 84431):TPT:SPIN (SEQ ID NO: 84119):YGKIP (SEQ ID NO: 84397):VVD:SXGXR (SEQ ID NO: 84305), HVPKPXX (SEQ ID NO: 84421):TPT:SPIN (SEQ ID NO: 84119):YGKIP (SEQ ID NO: 84397):VVD:SXGXH (SEQ ID NO: 84304), RVPSTXX (SEQ ID NO: 84428):TPT:SPIN (SEQ ID NO: 84119):YGKIP (SEQ ID NO: 84397):VVD:XGXL (SEQ ID NO: 84122), ASAAPXX (SEQ ID NO: 84402):TPT:SPIN (SEQ ID NO: 84119):YGKIP (SEQ ID NO: 84397):VVD:XKXS (SEQ ID NO: 84124), ASASPXX (SEQ ID NO: 84403):TPT:SPIN (SEQ ID NO: 84119):YGKIP (SEQ ID NO: 84397):VVD:XKXS (SEQ ID NO: 84124), KIPKAXX (SEQ ID NO: 84424):VPT:SPIN (SEQ ID NO: 84119):YGKIP (SEQ ID NO: 84397):VVE:GXGXR (SEQ ID NO: 84208), GIPEPXX (SEQ ID NO: 84419):VPE:SPIN (SEQ ID NO: 84119):YGKIP (SEQ ID NO: 84397):TVE:SXAXR (SEQ ID NO: 84303), SIPKAXX (SEQ ID NO: 84429):VPT:SPIN (SEQ ID NO: 84119):YGKIP (SEQ ID NO: 84397):VVE:GXGXR (SEQ ID NO: 84208), HVTKPTX (SEQ ID NO: 84422):APT:SPIN (SEQ ID NO: 84119):YGKIP (SEQ ID NO: 84397):VVR:SXGXH (SEQ ID NO: 84304), YVPKPXX (SEQ ID NO: 84433):APT:SPIN (SEQ ID NO: 84119):YGKIP (SEQ ID NO: 84397):VVR:SXGXH (SEQ ID NO: 84304), TVPKPXX (SEQ ID NO: 84432):APT:SPIN (SEQ ID NO: 84119):YGKIP (SEQ ID NO: 84397):VVR:AXGXH (SEQ ID NO: 84147), AVPKAXX (SEQ ID NO: 84404):APT:SPIN (SEQ ID NO: 84119):YGKIP (SEQ ID NO: 84397):VVK:AXGXH (SEQ ID NO: 84147), KVGKAXX (SEQ ID NO: 84425):VPT:SPIN (SEQ ID NO: 84119):YGKIP (SEQ ID NO: 84397):VAE:XGXR (SEQ ID NO: 84123), KASKAXX (SEQ ID NO: 84423):VPT:SPIN (SEQ ID NO: 84119):YGKIP (SEQ ID NO: 84397):AVS:EXGXR (SEQ ID NO: 84179), AAPASXX (SEQ ID NO: 84401):VPA:SPIN (SEQ ID NO: 84119):YGKIP (SEQ ID NO: 84397):VVE:AXGXR (SEQ ID NO: 84148), STPPTXX (SEQ ID NO: 84431):VPT:SPIN (SEQ ID NO: 84119):YGKIP (SEQ ID NO: 84397):VVE:SXGXR (SEQ ID NO: 84305), HVPKPXX (SEQ ID NO: 84421):APT:SPIN (SEQ ID NO: 84119):YGKIP (SEQ ID NO: 84397):VVR:SXGXH (SEQ ID NO: 84304), RVPSTXX (SEQ ID NO: 84428):APV:SPIN (SEQ ID NO: 84119):YGKIP (SEQ ID NO: 84397):VEE:XGXL (SEQ ID NO: 84122), ASAAPXX (SEQ ID NO: 84402):VPQ:SPIN (SEQ ID NO: 84119):YGKIP (SEQ ID NO: 84397):VRS:XKXS (SEQ ID NO: 84124), ASASPXX (SEQ ID NO: 84403):VSQ:SPIN (SEQ ID NO: 84119):YGKIP (SEQ ID NO: 84397):VKS:XKXS (SEQ ID NO: 84124), ASASPXX (SEQ ID NO: 84403):VPQ:SPIN (SEQ ID NO: 84119):YGKIP (SEQ ID NO: 84397):VKS:XKXS (SEQ ID NO: 84124), NDEGLEX (SEQ ID NO: 84426):VPT:SPIN (SEQ ID NO: 84119):YGKIP (SEQ ID NO: 84397):QHN:KXEXR (SEQ ID NO: 84213), NDEGLEX (SEQ ID NO: 84426):VPT:SPIN (SEQ ID NO: 84119):YGKIP (SEQ ID NO: 84397):EHS:QXEXR (SEQ ID NO: 84276), SSVKXQP (SEQ ID NO: 84430):SRV:SPIN (SEQ ID NO: 84119):YGKIP (SEQ ID NO: 84397):EEH:LEXAXA (SEQ ID NO: 84400), RNVQXRP (SEQ ID NO: 84427):TQV:SPIN (SEQ ID NO: 84119):YGKIP (SEQ ID NO: 84397):EDH:LAXKXE (SEQ ID NO: 84399), KIPKAXX (SEQ ID NO: 84424):VPA:SPIS (SEQ ID NO: 84120):YKQYE (SEQ ID NO: 84398):VVE:GXGXR (SEQ ID NO: 84208), GIPEPXX (SEQ ID NO: 84419):VPA:SPIS (SEQ ID NO: 84120):YKQYE (SEQ ID NO: 84398):VVE:SXAXR (SEQ ID NO: 84303), SIPKAXX (SEQ ID NO: 84429):VPA:SPIS (SEQ ID NO: 84120):YKQYE (SEQ ID NO: 84398):VVE:GXGXR (SEQ ID NO: 84208), HVTKPTX (SEQ ID NO: 84422):VPA:SPIS (SEQ ID NO: 84120):YKQYE (SEQ ID NO: 84398):VVE:SXGXH (SEQ ID NO: 84304), YVPKPXX (SEQ ID NO: 84433):VPA:SPIS (SEQ ID NO: 84120):YKQYE (SEQ ID NO: 84398):VVE:SXGXH (SEQ ID NO: 84304), TVPKPXX (SEQ ID NO: 84432):VPA:SPIS (SEQ ID NO: 84120):YKQYE (SEQ ID NO: 84398):VVE:AXGXH (SEQ ID NO: 84147), AVPKAXX (SEQ ID NO: 84404):VPA:SPIS (SEQ ID NO: 84120):YKQYE (SEQ ID NO: 84398):VVE:AXGXH (SEQ ID NO: 84147), KVGKAXX (SEQ ID NO: 84425):VPA:SPIS (SEQ ID NO: 84120):YKQYE (SEQ ID NO: 84398):VVE:XGXR (SEQ ID NO: 84123), KASKAXX (SEQ ID NO: 84423):VPA:SPIS (SEQ ID NO: 84120):YKQYE (SEQ ID NO: 84398):VVE:EXGXR (SEQ ID NO: 84179), GSAGPXX (SEQ ID NO: 84420):VPA:SPIS (SEQ ID NO: 84120):YKQYE (SEQ ID NO: 84398):VVE:RXGXS (SEQ ID NO: 84291), STPPTXX (SEQ ID NO: 84431):VPA:SPIS (SEQ ID NO: 84120):YKQYE (SEQ ID NO: 84398):VVE:SXGXR (SEQ ID NO: 84305), HVPKPXX (SEQ ID NO: 84421):VPA:SPIS (SEQ ID NO: 84120):YKQYE (SEQ ID NO: 84398):VVE:SXGXH (SEQ ID NO: 84304), RVPSTXX (SEQ ID NO: 84428):VPA:SPIS (SEQ ID NO: 84120):YKQYE (SEQ ID NO: 84398):VVE:XGXL (SEQ ID NO: 84122), ASAAPXX (SEQ ID NO: 84402):VPA:SPIS (SEQ ID NO: 84120):YKQYE (SEQ ID NO: 84398):VVE:XKXS (SEQ ID NO: 84124), ASASPXX (SEQ ID NO: 84403):VPA:SPIS (SEQ ID NO: 84120):YKQYE (SEQ ID NO: 84398):VVE:XKXS (SEQ ID NO: 84124), KIPKAXX (SEQ ID NO: 84424):VPT:SPIS (SEQ ID NO: 84120):YKQYE (SEQ ID NO: 84398):VVE:GXGXR (SEQ ID NO: 84208), GIPEPXX (SEQ ID NO: 84419):VPE:SPIS (SEQ ID NO: 84120):YKQYE (SEQ ID NO: 84398):TVE:SXAXR (SEQ ID NO: 84303), SIPKAXX (SEQ ID NO: 84429):VPT:SPIS (SEQ ID NO: 84120):YKQYE (SEQ ID NO: 84398):VVE:GXGXR (SEQ ID NO: 84208), HVTKPTX (SEQ ID NO: 84422):APT:SPIS (SEQ ID NO: 84120):YKQYE (SEQ ID NO: 84398):VVR:SXGXH (SEQ ID NO: 84304), YVPKPXX (SEQ ID NO: 84433):APT:SPIS (SEQ ID NO: 84120):YKQYE (SEQ ID NO: 84398):VVR:SXGXH (SEQ ID NO: 84304), TVPKPXX (SEQ ID NO: 84432):APT:SPIS (SEQ ID NO: 84120):YKQYE (SEQ ID NO: 84398):VVR:AXGXH (SEQ ID NO: 84147), AVPKAXX (SEQ ID NO: 84404):APT:SPIS (SEQ ID NO: 84120):YKQYE (SEQ ID NO: 84398):VVK:AXGXH (SEQ ID NO: 84147), KVGKAXX (SEQ ID NO: 84425):VPT:SPIS (SEQ ID NO: 84120):YKQYE (SEQ ID NO: 84398):VAE:XGXR (SEQ ID NO: 84123), KASKAXX (SEQ ID NO: 84423):VPT:SPIS (SEQ ID NO: 84120):YKQYE (SEQ ID NO: 84398):AVS:EXGXR (SEQ ID NO: 84179), GSAGPXX (SEQ ID NO: 84420):TPT:SPIS (SEQ ID NO: 84120):YKQYE (SEQ ID NO: 84398):VVD:RXGXS (SEQ ID NO: 84291), STPPTXX (SEQ ID NO: 84431):VPT:SPIS (SEQ ID NO: 84120):YKQYE (SEQ ID NO: 84398):VVE:SXGXR (SEQ ID NO: 84305), HVPKPXX (SEQ ID NO: 84421):APT:SPIS (SEQ ID NO: 84120):YKQYE (SEQ ID NO: 84398):VVR:SXGXH (SEQ ID NO: 84304), RVPSTXX (SEQ ID NO: 84428):APV:SPIS (SEQ ID NO: 84120):YKQYE (SEQ ID NO: 84398):VEE:XGXL (SEQ ID NO: 84122), ASAAPXX (SEQ ID NO: 84402):VPQ:SPIS (SEQ ID NO: 84120):YKQYE (SEQ ID NO: 84398):VRS:XKXS (SEQ ID NO: 84124), ASASPXX (SEQ ID NO: 84403):VSQ:SPIS (SEQ ID NO: 84120):YKQYE (SEQ ID NO: 84398):VKS:XKXS (SEQ ID NO: 84124), ASASPXX (SEQ ID NO: 84403):VPQ:SPIS (SEQ ID NO: 84120):YKQYE (SEQ ID NO: 84398):VKS:XKXS (SEQ ID NO: 84124), NDEGLEX (SEQ ID NO: 84426):VPT:SPIS (SEQ ID NO: 84120):YKQYE (SEQ ID NO: 84398):QHN:KXEXR (SEQ ID NO: 84213), NDEGLEX (SEQ ID NO: 84426):VPT:SPIS (SEQ ID NO: 84120):YKQYE (SEQ ID NO: 84398):EHS:QXEXR (SEQ ID NO: 84276), SSVKXQP (SEQ ID NO: 84430):SRV:SPIS (SEQ ID NO: 84120):YKQYE (SEQ ID NO: 84398):EEH:LEXAXA (SEQ ID NO: 84400), RNVQXRP (SEQ ID NO: 84427):TQV:SPIS (SEQ ID NO: 84120):YKQYE (SEQ ID NO: 84398):EDH:LAXKXE (SEQ ID NO: 84399), GIPEPXX (SEQ ID NO: 84419):VPT:SPIS (SEQ ID NO: 84120):YKQYE (SEQ ID NO: 84398):VVE:SXAXR (SEQ ID NO: 84303), HVTKPTX (SEQ ID NO: 84422):VPT:SPIS (SEQ ID NO: 84120):YKQYE (SEQ ID NO: 84398):VVE:SXGXH (SEQ ID NO: 84304), YVPKPXX (SEQ ID NO: 84433):VPT:SPIS (SEQ ID NO: 84120):YKQYE (SEQ ID NO: 84398):VVE:SXGXH (SEQ ID NO: 84304), TVPKPXX (SEQ ID NO: 84432):VPT:SPIS (SEQ ID NO: 84120):YKQYE (SEQ ID NO: 84398):VVE:AXGXH (SEQ ID NO: 84147), AVPKAXX (SEQ ID NO: 84404):VPT:SPIS (SEQ ID NO: 84120):YKQYE (SEQ ID NO: 84398):VVE:AXGXH (SEQ ID NO: 84147), KVGKAXX (SEQ ID NO: 84425):VPT:SPIS (SEQ ID NO: 84120):YKQYE (SEQ ID NO: 84398):VVE:XGXR (SEQ ID NO: 84123), KASKAXX (SEQ ID NO: 84423):VPT:SPIS (SEQ ID NO: 84120):YKQYE (SEQ ID NO: 84398):VVE:EXGXR (SEQ ID NO: 84179), GSAGPXX (SEQ ID NO: 84420):VPT:SPIS (SEQ ID NO: 84120):YKQYE (SEQ ID NO: 84398):VVE:RXGXS (SEQ ID NO: 84291), AAPASXX (SEQ ID NO: 84401):VPT:SPIS (SEQ ID NO: 84120):YKQYE (SEQ ID NO: 84398):VVE:AXGXR (SEQ ID NO: 84148), HVPKPXX (SEQ ID NO: 84421):VPT:SPIS (SEQ ID NO: 84120):YKQYE (SEQ ID NO: 84398):VVE:SXGXH (SEQ ID NO: 84304), RVPSTXX (SEQ ID NO: 84428):VPT:SPIS (SEQ ID NO: 84120):YKQYE (SEQ ID NO: 84398):VVE:XGXL (SEQ ID NO: 84122), ASAAPXX (SEQ ID NO: 84402):VPT:SPIS (SEQ ID NO: 84120):YKQYE (SEQ ID NO: 84398):VVE:XKXS (SEQ ID NO: 84124), ASASPXX (SEQ ID NO: 84403):VPT:SPIS (SEQ ID NO: 84120):YKQYE (SEQ ID NO: 84398):VVE:XKXS (SEQ ID NO: 84124), AAPASXX (SEQ ID NO: 84401):VPA:SPIS (SEQ ID NO: 84120):YKQYE (SEQ ID NO: 84398):VVE:AXGXR (SEQ ID NO: 84148), KIPKAXX (SEQ ID NO: 84424):APV:KPLS (SEQ ID NO: 84112):DHHKD (SEQ ID NO: 84149):VEE:GXGXR (SEQ ID NO: 84208), GIPEPXX (SEQ ID NO: 84419):APV:KPLS (SEQ ID NO: 84112):DHHKD (SEQ ID NO: 84149):VEE:SXAXR (SEQ ID NO: 84303), SIPKAXX (SEQ ID NO: 84429):APV:KPLS (SEQ ID NO: 84112):DHHKD (SEQ ID NO: 84149):VEE:GXGXR (SEQ ID NO: 84208), HVTKPTX (SEQ ID NO: 84422):APV:KPLS (SEQ ID NO: 84112):DHHKD (SEQ ID NO: 84149):VEE:SXGXH (SEQ ID NO: 84304), YVPKPXX (SEQ ID NO: 84433):APV:KPLS (SEQ ID NO: 84112):DHHKD (SEQ ID NO: 84149):VEE:SXGXH (SEQ ID NO: 84304), TVPKPXX (SEQ ID NO: 84432):APV:KPLS (SEQ ID NO: 84112):DHHKD (SEQ ID NO: 84149):VEE:AXGXH (SEQ ID NO: 84147), AVPKAXX (SEQ ID NO: 84404):APV:KPLS (SEQ ID NO: 84112):DHHKD (SEQ ID NO: 84149):VEE:AXGXH (SEQ ID NO: 84147), KVGKAXX (SEQ ID NO: 84425):APV:KPLS (SEQ ID NO: 84112):DHHKD (SEQ ID NO: 84149):VEE:XGXR (SEQ ID NO: 84123), KASKAXX (SEQ ID NO: 84423):APV:KPLS (SEQ ID NO: 84112):DHHKD (SEQ ID NO: 84149):VEE:EXGXR (SEQ ID NO: 84179), GSAGPXX (SEQ ID NO: 84420):APV:KPLS (SEQ ID NO: 84112):DHHKD (SEQ ID NO: 84149):VEE:RXGXS (SEQ ID NO: 84291), AAPASXX (SEQ ID NO: 84401):APV:KPLS (SEQ ID NO: 84112):DHHKD (SEQ ID NO: 84149):VEE:AXGXR (SEQ ID NO: 84148), STPPTXX (SEQ ID NO: 84431):APV:KPLS (SEQ ID NO: 84112):DHHKD (SEQ ID NO: 84149):VEE:SXGXR (SEQ ID NO: 84305), HVPKPXX (SEQ ID NO: 84421):APV:KPLS (SEQ ID NO: 84112):DHHKD (SEQ ID NO: 84149):VEE:SXGXH (SEQ ID NO: 84304), ASAAPXX (SEQ ID NO: 84402):APV:KPLS (SEQ ID NO: 84112):DHHKD (SEQ ID NO: 84149):VEE:XKXS (SEQ ID NO: 84124), ASASPXX (SEQ ID NO: 84403):APV:KPLS (SEQ ID NO: 84112):DHHKD (SEQ ID NO: 84149):VEE:XKXS (SEQ ID NO: 84124), KIPKAXX (SEQ ID NO: 84424):VPT:KPLS (SEQ ID NO: 84112):DHHKD (SEQ ID NO: 84149):VVE:GXGXR (SEQ ID NO: 84208), GIPEPXX (SEQ ID NO: 84419):VPE:KPLS (SEQ ID NO: 84112):DHHKD (SEQ ID NO: 84149):TVE:SXAXR (SEQ ID NO: 84303), SIPKAXX (SEQ ID NO: 84429):VPT:KPLS (SEQ ID NO: 84112):DHHKD (SEQ ID NO: 84149):VVE:GXGXR (SEQ ID NO: 84208), HVTKPTX (SEQ ID NO: 84422):APT:KPLS (SEQ ID NO: 84112):DHHKD (SEQ ID NO: 84149):VVR:SXGXH (SEQ ID NO: 84304), YVPKPXX (SEQ ID NO: 84433):APT:KPLS (SEQ ID NO: 84112):DHHKD (SEQ ID NO: 84149):VVR:SXGXH (SEQ ID NO: 84304), TVPKPXX (SEQ ID NO: 84432):APT:KPLS (SEQ ID NO: 84112):DHHKD (SEQ ID NO: 84149):VVR:AXGXH (SEQ ID NO: 84147), AVPKAXX (SEQ ID NO: 84404):APT:KPLS (SEQ ID NO: 84112):DHHKD (SEQ ID NO: 84149):VVK:AXGXH (SEQ ID NO: 84147), KVGKAXX (SEQ ID NO: 84425):VPT:KPLS (SEQ ID NO: 84112):DHHKD (SEQ ID NO: 84149):VAE:XGXR (SEQ ID NO: 84123), KASKAXX (SEQ ID NO: 84423):VPT:KPLS (SEQ ID NO: 84112):DHHKD (SEQ ID NO: 84149):AVS:EXGXR (SEQ ID NO: 84179), GSAGPXX (SEQ ID NO: 84420):TPT:KPLS (SEQ ID NO: 84112):DHHKD (SEQ ID NO: 84149):VVD:RXGXS (SEQ ID NO: 84291), AAPASXX (SEQ ID NO: 84401):VPA:KPLS (SEQ ID NO: 84112):DHHKD (SEQ ID NO: 84149):VVE:AXGXR (SEQ ID NO: 84148), STPPTXX (SEQ ID NO: 84431):VPT:KPLS (SEQ ID NO: 84112):DHHKD (SEQ ID NO: 84149):VVE:SXGXR (SEQ ID NO: 84305), HVPKPXX (SEQ ID NO: 84421):APT:KPLS (SEQ ID NO: 84112):DHHKD (SEQ ID NO: 84149):VVR:SXGXH (SEQ ID NO: 84304), ASAAPXX (SEQ ID NO: 84402):VPQ:KPLS (SEQ ID NO: 84112):DHHKD (SEQ ID NO: 84149):VRS:XKXS (SEQ ID NO: 84124), ASASPXX (SEQ ID NO: 84403):VSQ:KPLS (SEQ ID NO: 84112):DHHKD (SEQ ID NO: 84149):VKS:XKXS (SEQ ID NO: 84124), ASASPXX (SEQ ID NO: 84403):VPQ:KPLS (SEQ ID NO: 84112):DHHKD (SEQ ID NO: 84149):VKS:XKXS (SEQ ID NO: 84124), NDEGLEX (SEQ ID NO: 84426):VPT:KPLS (SEQ ID NO: 84112):DHHKD (SEQ ID NO: 84149):QHN:KXEXR (SEQ ID NO: 84213), NDEGLEX (SEQ ID NO: 84426):VPT:KPLS (SEQ ID NO: 84112):DHHKD (SEQ ID NO: 84149):EHS:QXEXR (SEQ ID NO: 84276), SSVKXQP (SEQ ID NO: 84430):SRV:KPLS (SEQ ID NO: 84112):DHHKD (SEQ ID NO: 84149):EEH:LEXAXA (SEQ ID NO: 84400), RNVQXRP (SEQ ID NO: 84427):TQV:KPLS (SEQ ID NO: 84112):DHHKD (SEQ ID NO: 84149):EDH:LAXKXE (SEQ ID NO: 84399), KIPKAXX (SEQ ID NO: 84424):VPQ:EPLP (SEQ ID NO: 84110):EQLSN (SEQ ID NO: 84178):VRS:GXGXR (SEQ ID NO: 84208), GIPEPXX (SEQ ID NO: 84419):VPQ:EPLP (SEQ ID NO: 84110):EQLSN (SEQ ID NO: 84178):VRS:SXAXR (SEQ ID NO: 84303), SIPKAXX (SEQ ID NO: 84429):VPQ:EPLP (SEQ ID NO: 84110):EQLSN (SEQ ID NO: 84178):VRS:GXGXR (SEQ ID NO: 84208), HVTKPTX (SEQ ID NO: 84422):VPQ:EPLP (SEQ ID NO: 84110):EQLSN (SEQ ID NO: 84178):VRS:SXGXH (SEQ ID NO: 84304), YVPKPXX (SEQ ID NO: 84433):VPQ:EPLP (SEQ ID NO: 84110):EQLSN (SEQ ID NO: 84178):VRS:SXGXH (SEQ ID NO: 84304), TVPKPXX (SEQ ID NO: 84432):VPQ:EPLP (SEQ ID NO: 84110):EQLSN (SEQ ID NO: 84178):VRS:AXGXH (SEQ ID NO: 84147), AVPKAXX (SEQ ID NO: 84404):VPQ:EPLP (SEQ ID NO: 84110):EQLSN (SEQ ID NO: 84178):VRS:AXGXH (SEQ ID NO: 84147), KVGKAXX (SEQ ID NO: 84425):VPQ:EPLP (SEQ ID NO: 84110):EQLSN (SEQ ID NO: 84178):VRS:XGXR (SEQ ID NO: 84123), KASKAXX (SEQ ID NO: 84423):VPQ:EPLP (SEQ ID NO: 84110):EQLSN (SEQ ID NO: 84178):VRS:EXGXR (SEQ ID NO: 84179), GSAGPXX (SEQ ID NO: 84420):VPQ:EPLP (SEQ ID NO: 84110):EQLSN (SEQ ID NO: 84178):VRS:RXGXS (SEQ ID NO: 84291), AAPASXX (SEQ ID NO: 84401):VPQ:EPLP (SEQ ID NO: 84110):EQLSN (SEQ ID NO: 84178):VRS:AXGXR (SEQ ID NO: 84148), STPPTXX (SEQ ID NO: 84431):VPQ:EPLP (SEQ ID NO: 84110):EQLSN (SEQ ID NO: 84178):VRS:SXGXR (SEQ ID NO: 84305), HVPKPXX (SEQ ID NO: 84421):VPQ:EPLP (SEQ ID NO: 84110):EQLSN (SEQ ID NO: 84178):VRS:SXGXH (SEQ ID NO: 84304), RVPSTXX (SEQ ID NO: 84428):VPQ:EPLP (SEQ ID NO: 84110):EQLSN (SEQ ID NO: 84178):VRS:XGXL (SEQ ID NO: 84122), ASASPXX (SEQ ID NO: 84403):VPQ:EPLP (SEQ ID NO: 84110):EQLSN (SEQ ID NO: 84178):VRS:XKXS (SEQ ID NO: 84124), KIPKAXX (SEQ ID NO: 84424):VPT:EPLP (SEQ ID NO: 84110):EQLSN (SEQ ID NO: 84178):VVE:GXGXR (SEQ ID NO: 84208), GIPEPXX (SEQ ID NO: 84419):VPE:EPLP (SEQ ID NO: 84110):EQLSN (SEQ ID NO: 84178):TVE:SXAXR (SEQ ID NO: 84303), SIPKAXX (SEQ ID NO: 84429):VPT:EPLP (SEQ ID NO: 84110):EQLSN (SEQ ID NO: 84178):VVE:GXGXR (SEQ ID NO: 84208), HVTKPTX (SEQ ID NO: 84422):APT:EPLP (SEQ ID NO: 84110):EQLSN (SEQ ID NO: 84178):VVR:SXGXH (SEQ ID NO: 84304), YVPKPXX (SEQ ID NO: 84433):APT:EPLP (SEQ ID NO: 84110):EQLSN (SEQ ID NO: 84178):VVR:SXGXH (SEQ ID NO: 84304), TVPKPXX (SEQ ID NO: 84432):APT:EPLP (SEQ ID NO: 84110):EQLSN (SEQ ID NO: 84178):VVR:AXGXH (SEQ ID NO: 84147), AVPKAXX (SEQ ID NO: 84404):APT:EPLP (SEQ ID NO: 84110):EQLSN (SEQ ID NO: 84178):VVK:AXGXH (SEQ ID NO: 84147), KVGKAXX (SEQ ID NO: 84425):VPT:EPLP (SEQ ID NO: 84110):EQLSN (SEQ ID NO: 84178):VAE:XGXR (SEQ ID NO: 84123), KASKAXX (SEQ ID NO: 84423):VPT:EPLP (SEQ ID NO: 84110):EQLSN (SEQ ID NO: 84178):AVS:EXGXR (SEQ ID NO: 84179), GSAGPXX (SEQ ID NO: 84420):TPT:EPLP (SEQ ID NO: 84110):EQLSN (SEQ ID NO: 84178):VVD:RXGXS (SEQ ID NO: 84291), AAPASXX (SEQ ID NO: 84401):VPA:EPLP (SEQ ID NO: 84110):EQLSN (SEQ ID NO: 84178):VVE:AXGXR (SEQ ID NO: 84148), STPPTXX (SEQ ID NO: 84431):VPT:EPLP (SEQ ID NO: 84110):EQLSN (SEQ ID NO: 84178):VVE:SXGXR (SEQ ID NO: 84305), HVPKPXX (SEQ ID NO: 84421):APT:EPLP (SEQ ID NO: 84110):EQLSN (SEQ ID NO: 84178):VVR:SXGXH (SEQ ID NO: 84304), RVPSTXX (SEQ ID NO: 84428):APV:EPLP (SEQ ID NO: 84110):EQLSN (SEQ ID NO: 84178):VEE:XGXL (SEQ ID NO: 84122), ASASPXX (SEQ ID NO: 84403):VSQ:EPLP (SEQ ID NO: 84110):EQLSN (SEQ ID NO: 84178):VKS:XKXS (SEQ ID NO: 84124), ASASPXX (SEQ ID NO: 84403):VPQ:EPLP (SEQ ID NO: 84110):EQLSN (SEQ ID NO: 84178):VKS:XKXS (SEQ ID NO: 84124), NDEGLEX (SEQ ID NO: 84426):VPT:EPLP (SEQ ID NO: 84110):EQLSN (SEQ ID NO: 84178):QHN:KXEXR (SEQ ID NO: 84213), NDEGLEX (SEQ ID NO: 84426):VPT:EPLP (SEQ ID NO: 84110):EQLSN (SEQ ID NO: 84178):EHS:QXEXR (SEQ ID NO: 84276), SSVKXQP (SEQ ID NO: 84430):SRV:EPLP (SEQ ID NO: 84110):EQLSN (SEQ ID NO: 84178):EEH:LEXAXA (SEQ ID NO: 84400), RNVQXRP (SEQ ID NO: 84427):TQV:EPLP (SEQ ID NO: 84110):EQLSN (SEQ ID NO: 84178):EDH:LAXKXE (SEQ ID NO: 84399), KIPKAXX (SEQ ID NO: 84424):VSQ:EPLT (SEQ ID NO: 84111):EQLSN (SEQ ID NO: 84178):VKS:GXGXR (SEQ ID NO: 84208), GIPEPXX (SEQ ID NO: 84419):VSQ:EPLT (SEQ ID NO: 84111):EQLSN (SEQ ID NO: 84178):VKS:SXAXR (SEQ ID NO: 84303), SIPKAXX (SEQ ID NO: 84429):VSQ:EPLT (SEQ ID NO: 84111):EQLSN (SEQ ID NO: 84178):VKS:GXGXR (SEQ ID NO: 84208), HVTKPTX (SEQ ID NO: 84422):VSQ:EPLT (SEQ ID NO: 84111):EQLSN (SEQ ID NO: 84178):VKS:SXGXH (SEQ ID NO: 84304), YVPKPXX (SEQ ID NO: 84433):VSQ:EPLT (SEQ ID NO: 84111):EQLSN (SEQ ID NO: 84178):VKS:SXGXH (SEQ ID NO: 84304), TVPKPXX (SEQ ID NO: 84432):VSQ:EPLT (SEQ ID NO: 84111):EQLSN (SEQ ID NO: 84178):VKS:AXGXH (SEQ ID NO: 84147), AVPKAXX (SEQ ID NO: 84404):VSQ:EPLT (SEQ ID NO: 84111):EQLSN (SEQ ID NO: 84178):VKS:AXGXH (SEQ ID NO: 84147), KVGKAXX (SEQ ID NO: 84425):VSQ:EPLT (SEQ ID NO: 84111):EQLSN (SEQ ID NO: 84178):VKS:XGXR (SEQ ID NO: 84123), KASKAXX (SEQ ID NO: 84423):VSQ:EPLT (SEQ ID NO: 84111):EQLSN (SEQ ID NO: 84178):VKS:EXGXR (SEQ ID NO: 84179), GSAGPXX (SEQ ID NO: 84420):VSQ:EPLT (SEQ ID NO: 84111):EQLSN (SEQ ID NO: 84178):VKS:RXGXS (SEQ ID NO: 84291), AAPASXX (SEQ ID NO: 84401):VSQ:EPLT (SEQ ID NO: 84111):EQLSN (SEQ ID NO: 84178):VKS:AXGXR (SEQ ID NO: 84148), STPPTXX (SEQ ID NO: 84431):VSQ:EPLT (SEQ ID NO: 84111):EQLSN (SEQ ID NO: 84178):VKS:SXGXR (SEQ ID NO: 84305), HVPKPXX (SEQ ID NO: 84421):VSQ:EPLT (SEQ ID NO: 84111):EQLSN (SEQ ID NO: 84178):VKS:SXGXH (SEQ ID NO: 84304), RVPSTXX (SEQ ID NO: 84428):VSQ:EPLT (SEQ ID NO: 84111):EQLSN (SEQ ID NO: 84178):VKS:XGXL (SEQ ID NO: 84122), ASAAPXX (SEQ ID NO: 84402):VSQ:EPLT (SEQ ID NO: 84111):EQLSN (SEQ ID NO: 84178):VKS:XKXS (SEQ ID NO: 84124), ASASPXX (SEQ ID NO: 84403):VSQ:EPLT (SEQ ID NO: 84111):EQLSN (SEQ ID NO: 84178):VKS:XKXS (SEQ ID NO: 84124), KIPKAXX (SEQ ID NO: 84424):VPT:EPLT (SEQ ID NO: 84111):EQLSN (SEQ ID NO: 84178):VVE:GXGXR (SEQ ID NO: 84208), GIPEPXX (SEQ ID NO: 84419):VPE:EPLT (SEQ ID NO: 84111):EQLSN (SEQ ID NO: 84178):TVE:SXAXR (SEQ ID NO: 84303), SIPKAXX (SEQ ID NO: 84429):VPT:EPLT (SEQ ID NO: 84111):EQLSN (SEQ ID NO: 84178):VVE:GXGXR (SEQ ID NO: 84208), HVTKPTX (SEQ ID NO: 84422):APT:EPLT (SEQ ID NO: 84111):EQLSN (SEQ ID NO: 84178):VVR:SXGXH (SEQ ID NO: 84304), YVPKPXX (SEQ ID NO: 84433):APT:EPLT (SEQ ID NO: 84111):EQLSN (SEQ ID NO: 84178):VVR:SXGXH (SEQ ID NO: 84304), TVPKPXX (SEQ ID NO: 84432):APT:EPLT (SEQ ID NO: 84111):EQLSN (SEQ ID NO: 84178):VVR:AXGXH (SEQ ID NO: 84147), AVPKAXX (SEQ ID NO: 84404):APT:EPLT (SEQ ID NO: 84111):EQLSN (SEQ ID NO: 84178):VVK:AXGXH (SEQ ID NO: 84147), KVGKAXX (SEQ ID NO: 84425):VPT:EPLT (SEQ ID NO: 84111):EQLSN (SEQ ID NO: 84178):VAE:XGXR (SEQ ID NO: 84123), KASKAXX (SEQ ID NO: 84423):VPT:EPLT (SEQ ID NO: 84111):EQLSN (SEQ ID NO: 84178):AVS:EXGXR (SEQ ID NO: 84179), GSAGPXX (SEQ ID NO: 84420):TPT:EPLT (SEQ ID NO: 84111):EQLSN (SEQ ID NO: 84178):VVD:RXGXS (SEQ ID NO: 84291), AAPASXX (SEQ ID NO: 84401):VPA:EPLT (SEQ ID NO: 84111):EQLSN (SEQ ID NO: 84178):VVE:AXGXR (SEQ ID NO: 84148), STPPTXX (SEQ ID NO: 84431):VPT:EPLT (SEQ ID NO: 84111):EQLSN (SEQ ID NO: 84178):VVE:SXGXR (SEQ ID NO: 84305), HVPKPXX (SEQ ID NO: 84421):APT:EPLT (SEQ ID NO: 84111):EQLSN (SEQ ID NO: 84178):VVR:SXGXH (SEQ ID NO: 84304), RVPSTXX (SEQ ID NO: 84428):APV:EPLT (SEQ ID NO: 84111):EQLSN (SEQ ID NO: 84178):VEE:XGXL (SEQ ID NO: 84122), ASAAPXX (SEQ ID NO: 84402):VPQ:EPLT (SEQ ID NO: 84111):EQLSN (SEQ ID NO: 84178):VRS:XKXS (SEQ ID NO: 84124), NDEGLEX (SEQ ID NO: 84426):VPT:EPLT (SEQ ID NO: 84111):EQLSN (SEQ ID NO: 84178):QHN:KXEXR (SEQ ID NO: 84213), NDEGLEX (SEQ ID NO: 84426):VPT:EPLT (SEQ ID NO: 84111):EQLSN (SEQ ID NO: 84178):EHS:QXEXR (SEQ ID NO: 84276), SSVKXQP (SEQ ID NO: 84430):SRV:EPLT (SEQ ID NO: 84111):EQLSN (SEQ ID NO: 84178):EEH:LEXAXA (SEQ ID NO: 84400), RNVQXRP (SEQ ID NO: 84427):TQV:EPLT (SEQ ID NO: 84111):EQLSN (SEQ ID NO: 84178):EDH:LAXKXE (SEQ ID NO: 84399), KIPKAXX (SEQ ID NO: 84424):VPQ:EPLT (SEQ ID NO: 84111):EQLSN (SEQ ID NO: 84178):VKS:GXGXR (SEQ ID NO: 84208), GIPEPXX (SEQ ID NO: 84419):VPQ:EPLT (SEQ ID NO: 84111):EQLSN (SEQ ID NO: 84178):VKS:SXAXR (SEQ ID NO: 84303), SIPKAXX (SEQ ID NO: 84429):VPQ:EPLT (SEQ ID NO: 84111):EQLSN (SEQ ID NO: 84178):VKS:GXGXR (SEQ ID NO: 84208), HVTKPTX (SEQ ID NO: 84422):VPQ:EPLT (SEQ ID NO: 84111):EQLSN (SEQ ID NO: 84178):VKS:SXGXH (SEQ ID NO: 84304), YVPKPXX (SEQ ID NO: 84433):VPQ:EPLT (SEQ ID NO: 84111):EQLSN (SEQ ID NO: 84178):VKS:SXGXH (SEQ ID NO: 84304), TVPKPXX (SEQ ID NO: 84432):VPQ:EPLT (SEQ ID NO: 84111):EQLSN (SEQ ID NO: 84178):VKS:AXGXH (SEQ ID NO: 84147), AVPKAXX (SEQ ID NO: 84404):VPQ:EPLT (SEQ ID NO: 84111):EQLSN (SEQ ID NO: 84178):VKS:AXGXH (SEQ ID NO: 84147), KVGKAXX (SEQ ID NO: 84425):VPQ:EPLT (SEQ ID NO: 84111):EQLSN (SEQ ID NO: 84178):VKS:XGXR (SEQ ID NO: 84123), KASKAXX (SEQ ID NO: 84423):VPQ:EPLT (SEQ ID NO: 84111):EQLSN (SEQ ID NO: 84178):VKS:EXGXR (SEQ ID NO: 84179), GSAGPXX (SEQ ID NO: 84420):VPQ:EPLT (SEQ ID NO: 84111):EQLSN (SEQ ID NO: 84178):VKS:RXGXS (SEQ ID NO: 84291), AAPASXX (SEQ ID NO: 84401):VPQ:EPLT (SEQ ID NO: 84111):EQLSN (SEQ ID NO: 84178):VKS:AXGXR (SEQ ID NO: 84148), STPPTXX (SEQ ID NO: 84431):VPQ:EPLT (SEQ ID NO: 84111):EQLSN (SEQ ID NO: 84178):VKS:SXGXR (SEQ ID NO: 84305), HVPKPXX (SEQ ID NO: 84421):VPQ:EPLT (SEQ ID NO: 84111):EQLSN (SEQ ID NO: 84178):VKS:SXGXH (SEQ ID NO: 84304), RVPSTXX (SEQ ID NO: 84428):VPQ:EPLT (SEQ ID NO: 84111):EQLSN (SEQ ID NO: 84178):VKS:XGXL (SEQ ID NO: 84122), ASAAPXX (SEQ ID NO: 84402):VPQ:EPLT (SEQ ID NO: 84111):EQLSN (SEQ ID NO: 84178):VKS:XKXS (SEQ ID NO: 84124), ASASPXX (SEQ ID NO: 84403):VPQ:EPLT (SEQ ID NO: 84111):EQLSN (SEQ ID NO: 84178):VKS:XKXS (SEQ ID NO: 84124), NDEGLEX (SEQ ID NO: 84426):VPT:SNIT (SEQ ID NO: 84118):IGEMS (SEQ ID NO: 84209):QHN:QXEXR (SEQ ID NO: 84276), KIPKAXX (SEQ ID NO: 84424):VPT:SNIT (SEQ ID NO: 84118):IGEMS (SEQ ID NO: 84209):VVE:GXGXR (SEQ ID NO: 84208), GIPEPXX (SEQ ID NO: 84419):VPE:SNIT (SEQ ID NO: 84118):IGEMS (SEQ ID NO: 84209):TVE:SXAXR (SEQ ID NO: 84303), SIPKAXX (SEQ ID NO: 84429):VPT:SNIT (SEQ ID NO: 84118):IGEMS (SEQ ID NO: 84209):VVE:GXGXR (SEQ ID NO: 84208), HVTKPTX (SEQ ID NO: 84422):APT:SNIT (SEQ ID NO: 84118):IGEMS (SEQ ID NO: 84209):VVR:SXGXH (SEQ ID NO: 84304), YVPKPXX (SEQ ID NO: 84433):APT:SNIT (SEQ ID NO: 84118):IGEMS (SEQ ID NO: 84209):VVR:SXGXH (SEQ ID NO: 84304), TVPKPXX (SEQ ID NO: 84432):APT:SNIT (SEQ ID NO: 84118):IGEMS (SEQ ID NO: 84209):VVR:AXGXH (SEQ ID NO: 84147), AVPKAXX (SEQ ID NO: 84404):APT:SNIT (SEQ ID NO: 84118):IGEMS (SEQ ID NO: 84209):VVK:AXGXH (SEQ ID NO: 84147), KVGKAXX (SEQ ID NO: 84425):VPT:SNIT (SEQ ID NO: 84118):IGEMS (SEQ ID NO: 84209):VAE:XGXR (SEQ ID NO: 84123), KASKAXX (SEQ ID NO: 84423):VPT:SNIT (SEQ ID NO: 84118):IGEMS (SEQ ID NO: 84209):AVS:EXGXR (SEQ ID NO: 84179), GSAGPXX (SEQ ID NO: 84420):TPT:SNIT (SEQ ID NO: 84118):IGEMS (SEQ ID NO: 84209):VVD:RXGXS (SEQ ID NO: 84291), AAPASXX (SEQ ID NO: 84401):VPA:SNIT (SEQ ID NO: 84118):IGEMS (SEQ ID NO: 84209):VVE:AXGXR (SEQ ID NO: 84148), STPPTXX (SEQ ID NO: 84431):VPT:SNIT (SEQ ID NO: 84118):IGEMS (SEQ ID NO: 84209):VVE:SXGXR (SEQ ID NO: 84305), HVPKPXX (SEQ ID NO: 84421):APT:SNIT (SEQ ID NO: 84118):IGEMS (SEQ ID NO: 84209):VVR:SXGXH (SEQ ID NO: 84304), RVPSTXX (SEQ ID NO: 84428):APV:SNIT (SEQ ID NO: 84118):IGEMS (SEQ ID NO: 84209):VEE:XGXL (SEQ ID NO: 84122), ASAAPXX (SEQ ID NO: 84402):VPQ:SNIT (SEQ ID NO: 84118):IGEMS (SEQ ID NO: 84209):VRS:XKXS (SEQ ID NO: 84124), ASASPXX (SEQ ID NO: 84403):VSQ:SNIT (SEQ ID NO: 84118):IGEMS (SEQ ID NO: 84209):VKS:XKXS (SEQ ID NO: 84124), ASASPXX (SEQ ID NO: 84403):VPQ:SNIT (SEQ ID NO: 84118):IGEMS (SEQ ID NO: 84209):VKS:XKXS (SEQ ID NO: 84124), NDEGLEX (SEQ ID NO: 84426):VPT:SNIT (SEQ ID NO: 84118):IGEMS (SEQ ID NO: 84209):EHS:QXEXR (SEQ ID NO: 84276), SSVKXQP (SEQ ID NO: 84430):SRV:SNIT (SEQ ID NO: 84118):IGEMS (SEQ ID NO: 84209):EEH:LEXAXA (SEQ ID NO: 84400), RNVQXRP (SEQ ID NO: 84427):TQV:SNIT (SEQ ID NO: 84118):IGEMS (SEQ ID NO: 84209):EDH:LAXKXE (SEQ ID NO: 84399), NDEGLEX (SEQ ID NO: 84426):VPT:SNIT (SEQ ID NO: 84118):LGEMS (SEQ ID NO: 84228):EHS:KXEXR (SEQ ID NO: 84213), KIPKAXX (SEQ ID NO: 84424):VPT:SNIT (SEQ ID NO: 84118):LGEMS (SEQ ID NO: 84228):VVE:GXGXR (SEQ ID NO: 84208), GIPEPXX (SEQ ID NO: 84419):VPE:SNIT (SEQ ID NO: 84118):LGEMS (SEQ ID NO: 84228):TVE:SXAXR (SEQ ID NO: 84303), SIPKAXX (SEQ ID NO: 84429):VPT:SNIT (SEQ ID NO: 84118):LGEMS (SEQ ID NO: 84228):VVE:GXGXR (SEQ ID NO: 84208), HVTKPTX (SEQ ID NO: 84422):APT:SNIT (SEQ ID NO: 84118):LGEMS (SEQ ID NO: 84228):VVR:SXGXH (SEQ ID NO: 84304), YVPKPXX (SEQ ID NO: 84433):APT:SNIT (SEQ ID NO: 84118):LGEMS (SEQ ID NO: 84228):VVR:SXGXH (SEQ ID NO: 84304), TVPKPXX (SEQ ID NO: 84432):APT:SNIT (SEQ ID NO: 84118):LGEMS (SEQ ID NO: 84228):VVR:AXGXH (SEQ ID NO: 84147), AVPKAXX (SEQ ID NO: 84404):APT:SNIT (SEQ ID NO: 84118):LGEMS (SEQ ID NO: 84228):VVK:AXGXH (SEQ ID NO: 84147), KVGKAXX (SEQ ID NO: 84425):VPT:SNIT (SEQ ID NO: 84118):LGEMS (SEQ ID NO: 84228):VAE:XGXR (SEQ ID NO: 84123), KASKAXX (SEQ ID NO: 84423):VPT:SNIT (SEQ ID NO: 84118):LGEMS (SEQ ID NO: 84228):AVS:EXGXR (SEQ ID NO: 84179), GSAGPXX (SEQ ID NO: 84420):TPT:SNIT (SEQ ID NO: 84118):LGEMS (SEQ ID NO: 84228):VVD:RXGXS (SEQ ID NO: 84291), AAPASXX (SEQ ID NO: 84401):VPA:SNIT (SEQ ID NO: 84118):LGEMS (SEQ ID NO: 84228):VVE:AXGXR (SEQ ID NO: 84148), STPPTXX (SEQ ID NO: 84431):VPT:SNIT (SEQ ID NO: 84118):LGEMS (SEQ ID NO: 84228):VVE:SXGXR (SEQ ID NO: 84305), HVPKPXX (SEQ ID NO: 84421):APT:SNIT (SEQ ID NO: 84118):LGEMS (SEQ ID NO: 84228):VVR:SXGXH (SEQ ID NO: 84304), RVPSTXX (SEQ ID NO: 84428):APV:SNIT (SEQ ID NO: 84118):LGEMS (SEQ ID NO: 84228):VEE:XGXL (SEQ ID NO: 84122), ASAAPXX (SEQ ID NO: 84402):VPQ:SNIT (SEQ ID NO: 84118):LGEMS (SEQ ID NO: 84228):VRS:XKXS (SEQ ID NO: 84124), ASASPXX (SEQ ID NO: 84403):VSQ:SNIT (SEQ ID NO: 84118):LGEMS (SEQ ID NO: 84228):VKS:XKXS (SEQ ID NO: 84124), ASASPXX (SEQ ID NO: 84403):VPQ:SNIT (SEQ ID NO: 84118):LGEMS (SEQ ID NO: 84228):VKS:XKXS (SEQ ID NO: 84124), NDEGLEX (SEQ ID NO: 84426):VPT:SNIT (SEQ ID NO: 84118):LGEMS (SEQ ID NO: 84228):QHN:KXEXR (SEQ ID NO: 84213), SSVKXQP (SEQ ID NO: 84430):SRV:SNIT (SEQ ID NO: 84118):LGEMS (SEQ ID NO: 84228):EEH:LEXAXA (SEQ ID NO: 84400), RNVQXRP (SEQ ID NO: 84427):TQV:SNIT (SEQ ID NO: 84118):LGEMS (SEQ ID NO: 84228):EDH:LAXKXE (SEQ ID NO: 84399), RNVQXRP (SEQ ID NO: 84427):SRV:RSVK (SEQ ID NO: 84115):KEVQV (SEQ ID NO: 84210):EEH:LAXKXE (SEQ ID NO: 84399), KIPKAXX (SEQ ID NO: 84424):VPT:RSVK (SEQ ID NO: 84115):KEVQV (SEQ ID NO: 84210):VVE:GXGXR (SEQ ID NO: 84208), GIPEPXX (SEQ ID NO: 84419):VPE:RSVK (SEQ ID NO: 84115):KEVQV (SEQ ID NO: 84210):TVE:SXAXR (SEQ ID NO: 84303), SIPKAXX (SEQ ID NO: 84429):VPT:RSVK (SEQ ID NO: 84115):KEVQV (SEQ ID NO: 84210):VVE:GXGXR (SEQ ID NO: 84208), HVTKPTX (SEQ ID NO: 84422):APT:RSVK (SEQ ID NO: 84115):KEVQV (SEQ ID NO: 84210):VVR:SXGXH (SEQ ID NO: 84304), YVPKPXX (SEQ ID NO: 84433):APT:RSVK (SEQ ID NO: 84115):KEVQV (SEQ ID NO: 84210):VVR:SXGXH (SEQ ID NO: 84304), TVPKPXX (SEQ ID NO: 84432):APT:RSVK (SEQ ID NO: 84115):KEVQV (SEQ ID NO: 84210):VVR:AXGXH (SEQ ID NO: 84147), AVPKAXX (SEQ ID NO: 84404):APT:RSVK (SEQ ID NO: 84115):KEVQV (SEQ ID NO: 84210):VVK:AXGXH (SEQ ID NO: 84147), KVGKAXX (SEQ ID NO: 84425):VPT:RSVK (SEQ ID NO: 84115):KEVQV (SEQ ID NO: 84210):VAE:XGXR (SEQ ID NO: 84123), KASKAXX (SEQ ID NO: 84423):VPT:RSVK (SEQ ID NO: 84115):KEVQV (SEQ ID NO: 84210):AVS:EXGXR (SEQ ID NO: 84179), GSAGPXX (SEQ ID NO: 84420):TPT:RSVK (SEQ ID NO: 84115):KEVQV (SEQ ID NO: 84210):VVD:RXGXS (SEQ ID NO: 84291), AAPASXX (SEQ ID NO: 84401):VPA:RSVK (SEQ ID NO: 84115):KEVQV (SEQ ID NO: 84210):VVE:AXGXR (SEQ ID NO: 84148), STPPTXX (SEQ ID NO: 84431):VPT:RSVK (SEQ ID NO: 84115):KEVQV (SEQ ID NO: 84210):VVE:SXGXR (SEQ ID NO: 84305), HVPKPXX (SEQ ID NO: 84421):APT:RSVK (SEQ ID NO: 84115):KEVQV (SEQ ID NO: 84210):VVR:SXGXH (SEQ ID NO: 84304), RVPSTXX (SEQ ID NO: 84428):APV:RSVK (SEQ ID NO: 84115):KEVQV (SEQ ID NO: 84210):VEE:XGXL (SEQ ID NO: 84122), ASAAPXX (SEQ ID NO: 84402):VPQ:RSVK (SEQ ID NO: 84115):KEVQV (SEQ ID NO: 84210):VRS:XKXS (SEQ ID NO: 84124), ASASPXX (SEQ ID NO: 84403):VSQ:RSVK (SEQ ID NO: 84115):KEVQV (SEQ ID NO: 84210):VKS:XKXS (SEQ ID NO: 84124), ASASPXX (SEQ ID NO: 84403):VPQ:RSVK (SEQ ID NO: 84115):KEVQV (SEQ ID NO: 84210):VKS:XKXS (SEQ ID NO: 84124), NDEGLEX (SEQ ID NO: 84426):VPT:RSVK (SEQ ID NO: 84115):KEVQV (SEQ ID NO: 84210):QHN:KXEXR (SEQ ID NO: 84213), NDEGLEX (SEQ ID NO: 84426):VPT:RSVK (SEQ ID NO: 84115):KEVQV (SEQ ID NO: 84210):EHS:QXEXR (SEQ ID NO: 84276), RNVQXRP (SEQ ID NO: 84427):TQV:RSVK (SEQ ID NO: 84115):KEVQV (SEQ ID NO: 84210):EDH:LAXKXE (SEQ ID NO: 84399), SSVKXQP (SEQ ID NO: 84430):TQV:RPVQ (SEQ ID NO: 84114):KKATV (SEQ ID NO: 84212):EDH:LEXAXA (SEQ ID NO: 84400), KIPKAXX (SEQ ID NO: 84424):VPT:RPVQ (SEQ ID NO: 84114):KKATV (SEQ ID NO: 84212):VVE:GXGXR (SEQ ID NO: 84208), GIPEPXX (SEQ ID NO: 84419):VPE:RPVQ (SEQ ID NO: 84114):KKATV (SEQ ID NO: 84212):TVE:SXAXR (SEQ ID NO: 84303), SIPKAXX (SEQ ID NO: 84429):VPT:RPVQ (SEQ ID NO: 84114):KKATV (SEQ ID NO: 84212):VVE:GXGXR (SEQ ID NO: 84208), HVTKPTX (SEQ ID NO: 84422):APT:RPVQ (SEQ ID NO: 84114):KKATV (SEQ ID NO: 84212):VVR:SXGXH (SEQ ID NO: 84304), YVPKPXX (SEQ ID NO: 84433):APT:RPVQ (SEQ ID NO: 84114):KKATV (SEQ ID NO: 84212):VVR:SXGXH (SEQ ID NO: 84304), TVPKPXX (SEQ ID NO: 84432):APT:RPVQ (SEQ ID NO: 84114):KKATV (SEQ ID NO: 84212):VVR:AXGXH (SEQ ID NO: 84147), AVPKAXX (SEQ ID NO: 84404):APT:RPVQ (SEQ ID NO: 84114):KKATV (SEQ ID NO: 84212):VVK:AXGXH (SEQ ID NO: 84147), KVGKAXX (SEQ ID NO: 84425):VPT:RPVQ (SEQ ID NO: 84114):KKATV (SEQ ID NO: 84212):VAE:XGXR (SEQ ID NO: 84123), KASKAXX (SEQ ID NO: 84423):VPT:RPVQ (SEQ ID NO: 84114):KKATV (SEQ ID NO: 84212):AVS:EXGXR (SEQ ID NO: 84179), GSAGPXX (SEQ ID NO: 84420):TPT:RPVQ (SEQ ID NO: 84114):KKATV (SEQ ID NO: 84212):VVD:RXGXS (SEQ ID NO: 84291), AAPASXX (SEQ ID NO: 84401):VPA:RPVQ (SEQ ID NO: 84114):KKATV (SEQ ID NO: 84212):VVE:AXGXR (SEQ ID NO: 84148), STPPTXX (SEQ ID NO: 84431):VPT:RPVQ (SEQ ID NO: 84114):KKATV (SEQ ID NO: 84212):VVE:SXGXR (SEQ ID NO: 84305), HVPKPXX (SEQ ID NO: 84421):APT:RPVQ (SEQ ID NO: 84114):KKATV (SEQ ID NO: 84212):VVR:SXGXH (SEQ ID NO: 84304), RVPSTXX (SEQ ID NO: 84428):APV:RPVQ (SEQ ID NO: 84114):KKATV (SEQ ID NO: 84212):VEE:XGXL (SEQ ID NO: 84122), ASAAPXX (SEQ ID NO: 84402):VPQ:RPVQ (SEQ ID NO: 84114):KKATV (SEQ ID NO: 84212):VRS:XKXS (SEQ ID NO: 84124), ASASPXX (SEQ ID NO: 84403):VSQ:RPVQ (SEQ ID NO: 84114):KKATV (SEQ ID NO: 84212):VKS:XKXS (SEQ ID NO: 84124), ASASPXX (SEQ ID NO: 84403):VPQ:RPVQ (SEQ ID NO: 84114):KKATV (SEQ ID NO: 84212):VKS:XKXS (SEQ ID NO: 84124), NDEGLEX (SEQ ID NO: 84426):VPT:RPVQ (SEQ ID NO: 84114):KKATV (SEQ ID NO: 84212):QHN:KXEXR (SEQ ID NO: 84213), NDEGLEX (SEQ ID NO: 84426):VPT:RPVQ (SEQ ID NO: 84114):KKATV (SEQ ID NO: 84212):EHS:QXEXR (SEQ ID NO: 84276) and SSVKXQP (SEQ ID NO: 84430):SRV:RPVQ (SEQ ID NO: 84114):KKATV (SEQ ID NO: 84212):EEH:LEXAXA (SEQ ID NO: 84400).

[0402] In particular, in certain embodiments, the hexaplet PEP7:PEP3:PEP12:PEP2:PEP4:PEP8 is selected from the group consisting of GIPEPXX (SEQ ID NO: 84419):VPT:SAIS-AA¹⁷-LYL (SEQ ID NO: 84881):LKNYQ (SEQ ID NO: 84230):VVE:SXAXR (SEQ ID NO: 84303), SIPKAXX (SEQ ID NO: 84429):VPT:SAIS-AA¹⁷-LYL (SEQ ID NO: 84881):LKNYQ (SEQ ID NO: 84230):VVE:GXGXR (SEQ ID NO: 84208), HVTKPTX (SEQ ID NO: 84422):VPT:SAIS-AA¹⁷-LYL (SEQ ID NO: 84881):LKNYQ (SEQ ID NO: 84230):VVE:SXGXH (SEQ ID NO: 84304), YVPKPXX (SEQ ID NO: 84433):VPT:SAIS-AA¹⁷-LYL (SEQ ID NO: 84881):LKNYQ (SEQ ID NO: 84230):VVE:SXGXH (SEQ ID NO: 84304), TVPKPXX (SEQ ID NO: 84432):VPT:SAIS-AA¹⁷-LYL (SEQ ID NO: 84881):LKNYQ (SEQ ID NO: 84230):VVE:AXGXH (SEQ ID NO: 84147), AVPKAXX (SEQ ID NO: 84404):VPT:SAIS-AA¹⁷-LYL (SEQ ID NO: 84881):LKNYQ (SEQ ID NO: 84230):VVE:AXGXH (SEQ ID NO: 84147), KVGKAXX (SEQ ID NO: 84425):VPT:SAIS-AA¹⁷-LYL (SEQ ID NO: 84881):LKNYQ (SEQ ID NO: 84230):VVE:XGXR (SEQ ID NO: 84123), KASKAXX (SEQ ID NO: 84423):VPT:SAIS-AA¹⁷-LYL (SEQ ID NO: 84881):LKNYQ (SEQ ID NO: 84230):VVE:EXGXR (SEQ ID NO: 84179), GSAGPXX (SEQ ID NO: 84420):VPT:SAIS-AA¹⁷-LYL (SEQ ID NO: 84881):LKNYQ (SEQ ID NO: 84230):VVE:RXGXS (SEQ ID NO: 84291), AAPASXX (SEQ ID NO: 84401):VPT:SAIS-AA¹⁷-LYL (SEQ ID NO: 84881):LKNYQ (SEQ ID NO: 84230):VVE:AXGXR (SEQ ID NO: 84148), STPPTXX (SEQ ID NO: 84431):VPT:SAIS-AA¹⁷-LYL (SEQ ID NO: 84881):LKNYQ (SEQ ID NO: 84230):VVE:SXGXR (SEQ ID NO: 84305), HVPKPXX (SEQ ID NO: 84421):VPT:SAIS-AA¹⁷-LYL (SEQ ID NO: 84881):LKNYQ (SEQ ID NO: 84230):VVE:SXGXH (SEQ ID NO: 84304), RVPSTXX (SEQ ID NO: 84428):VPT:SAIS-AA¹⁷-LYL (SEQ ID NO: 84881):LKNYQ (SEQ ID NO: 84230):VVE:XGXL (SEQ ID NO: 84122), ASAAPXX (SEQ ID NO: 84402):VPT:SAIS-AA¹⁷-LYL (SEQ ID NO: 84881):LKNYQ (SEQ ID NO: 84230):VVE:XKXS (SEQ ID NO: 84124), ASASPXX (SEQ ID NO: 84403):VPT:SAIS-AA¹⁷-LYL (SEQ ID NO: 84881):LKNYQ (SEQ ID NO: 84230):VVE:XKXS (SEQ ID NO: 84124), NDEGLEX (SEQ ID NO: 84426):VPT:SAIS-AA¹⁷-LYL (SEQ ID NO: 84881):LKNYQ (SEQ ID NO: 84230):VVE:KXEXR (SEQ ID NO: 84213), NDEGLEX (SEQ ID NO: 84426):VPT:SAIS-AA¹⁷-LYL (SEQ ID NO: 84881):LKNYQ (SEQ ID NO: 84230):VVE:QXEXR (SEQ ID NO: 84276), SSVKXQP (SEQ ID NO: 84430):VPT:SAIS-AA¹⁷-LYL (SEQ ID NO: 84881):LKNYQ (SEQ ID NO: 84230):VVE:LEXAXA (SEQ ID NO: 84400), RNVQXRP (SEQ ID NO: 84427):VPT:SAIS-AA¹⁷-LYL (SEQ ID NO: 84881):LKNYQ (SEQ ID NO: 84230):VVE:LAXKXE (SEQ ID NO: 84399), GIPEPXX (SEQ ID NO: 84419):VPE:SAIS-AA¹⁷-LYL (SEQ ID NO: 84881):LKNYQ (SEQ ID NO: 84230):TVE:SXAXR (SEQ ID NO: 84303), HVTKPTX (SEQ ID NO: 84422):APT:SAIS-AA¹⁷-LYL (SEQ ID NO: 84881):LKNYQ (SEQ ID NO: 84230):VVR:SXGXH (SEQ ID NO: 84304), YVPKPXX (SEQ ID NO: 84433):APT:SAIS-AA¹⁷-LYL (SEQ ID NO: 84881):LKNYQ (SEQ ID NO: 84230):VVR:SXGXH (SEQ ID NO: 84304), TVPKPXX (SEQ ID NO: 84432):APT:SAIS-AA¹⁷-LYL (SEQ ID NO: 84881):LKNYQ (SEQ ID NO: 84230):VVR:AXGXH (SEQ ID NO: 84147), AVPKAXX (SEQ ID NO: 84404):APT:SAIS-AA¹⁷-LYL (SEQ ID NO: 84881):LKNYQ (SEQ ID NO: 84230):VVK:AXGXH (SEQ ID NO: 84147), KVGKAXX (SEQ ID NO: 84425):VPT:SAIS-AA¹⁷-LYL (SEQ ID NO: 84881):LKNYQ (SEQ ID NO: 84230):VAE:XGXR (SEQ ID NO: 84123), KASKAXX (SEQ ID NO: 84423):VPT:SAIS-AA¹⁷-LYL (SEQ ID NO: 84881):LKNYQ (SEQ ID NO: 84230):AVS:EXGXR (SEQ ID NO: 84179), GSAGPXX (SEQ ID NO: 84420):TPT:SAIS-AA¹⁷-LYL (SEQ ID NO: 84881):LKNYQ (SEQ ID NO: 84230):VVD:RXGXS (SEQ ID NO: 84291), AAPASXX (SEQ ID NO: 84401):VPA:SAIS-AA¹⁷-LYL (SEQ ID NO: 84881):LKNYQ (SEQ ID NO: 84230):VVE:AXGXR (SEQ ID NO: 84148), HVPKPXX (SEQ ID NO: 84421):APT:SAIS-AA¹⁷-LYL (SEQ ID NO: 84881):LKNYQ (SEQ ID NO: 84230):VVR:SXGXH (SEQ ID NO: 84304), RVPSTXX (SEQ ID NO: 84428):APV:SAIS-AA¹⁷-LYL (SEQ ID NO: 84881):LKNYQ (SEQ ID NO: 84230):VEE:XGXL (SEQ ID NO: 84122), ASAAPXX (SEQ ID NO: 84402):VPQ:SAIS-AA¹⁷-LYL (SEQ ID NO: 84881):LKNYQ (SEQ ID NO: 84230):VRS:XKXS (SEQ ID NO: 84124), ASASPXX (SEQ ID NO: 84403):VSQ:SAIS-AA¹⁷-LYL (SEQ ID NO: 84881):LKNYQ (SEQ ID NO: 84230):VKS:XKXS (SEQ ID NO: 84124), ASASPXX (SEQ ID NO: 84403):VPQ:SAIS-AA¹⁷-LYL (SEQ ID NO: 84881):LKNYQ (SEQ ID NO: 84230):VKS:XKXS (SEQ ID NO: 84124), NDEGLEX (SEQ ID NO: 84426):VPT:SAIS-AA¹⁷-LYL (SEQ ID NO: 84881):LKNYQ (SEQ ID NO: 84230):QHN:KXEXR (SEQ ID NO: 84213), NDEGLEX (SEQ ID NO: 84426):VPT:SAIS-AA¹⁷-LYL (SEQ ID NO: 84881):LKNYQ (SEQ ID NO: 84230):EHS:QXEXR (SEQ ID NO: 84276), SSVKXQP (SEQ ID NO: 84430):SRV:SAIS-AA¹⁷-LYL (SEQ ID NO: 84881):LKNYQ (SEQ ID NO: 84230):EEH:LEXAXA (SEQ ID NO: 84400), RNVQXRP (SEQ ID NO: 84427):TQV:SAIS-AA¹⁷-LYL (SEQ ID NO: 84881):LKNYQ (SEQ ID NO: 84230):EDH:LAXKXE (SEQ ID NO: 84399), KIPKAXX (SEQ ID NO: 84424):VPE:SSLS-AA¹⁷-LFF (SEQ ID NO: 84889):LKVYP (SEQ ID NO: 84231):TVE:GXGXR (SEQ ID NO: 84208), SIPKAXX (SEQ ID NO: 84429):VPE:SSLS-AA¹⁷-LFF (SEQ ID NO: 84889):LKVYP (SEQ ID NO: 84231):TVE:GXGXR (SEQ ID NO: 84208), HVTKPTX (SEQ ID NO: 84422):VPE:SSLS-AA¹⁷-LFF (SEQ ID NO: 84889):LKVYP (SEQ ID NO: 84231):TVE:SXGXH (SEQ ID NO: 84304), YVPKPXX (SEQ ID NO: 84433):VPE:SSLS-AA¹⁷-LFF (SEQ ID NO: 84889):LKVYP (SEQ ID NO: 84231):TVE:SXGXH (SEQ ID NO: 84304), TVPKPXX (SEQ ID NO: 84432):VPE:SSLS-AA¹⁷-LFF (SEQ ID NO: 84889):LKVYP (SEQ ID NO: 84231):TVE:AXGXH (SEQ ID NO: 84147), AVPKAXX (SEQ ID NO: 84404):VPE:SSLS-AA¹⁷-LFF (SEQ ID NO: 84889):LKVYP (SEQ ID NO: 84231):TVE:AXGXH (SEQ ID NO: 84147), KVGKAXX (SEQ ID NO: 84425):VPE:SSLS-AA¹⁷-LFF (SEQ ID NO: 84889):LKVYP (SEQ ID NO: 84231):TVE:XGXR (SEQ ID NO: 84123), KASKAXX (SEQ ID NO: 84423):VPE:SSLS-AA¹⁷-LFF (SEQ ID NO: 84889):LKVYP (SEQ ID NO: 84231):TVE:EXGXR (SEQ ID NO: 84179), GSAGPXX (SEQ ID NO: 84420):VPE:SSLS-AA¹⁷-LFF (SEQ ID NO: 84889):LKVYP (SEQ ID NO: 84231):TVE:RXGXS (SEQ ID NO: 84291), AAPASXX (SEQ ID NO: 84401):VPE:SSLS-AA¹⁷-LFF (SEQ ID NO: 84889):LKVYP (SEQ ID NO: 84231):TVE:AXGXR (SEQ ID NO: 84148), STPPTXX (SEQ ID NO: 84431):VPE:SSLS-AA¹⁷-LFF (SEQ ID NO: 84889):LKVYP (SEQ ID NO: 84231):TVE:SXGXR (SEQ ID NO: 84305), HVPKPXX (SEQ ID NO: 84421):VPE:SSLS-AA¹⁷-LFF (SEQ ID NO: 84889):LKVYP (SEQ ID NO: 84231):TVE:SXGXH (SEQ ID NO: 84304), RVPSTXX (SEQ ID NO: 84428):VPE:SSLS-AA¹⁷-LFF (SEQ ID NO: 84889):LKVYP (SEQ ID NO: 84231):TVE:XGXL (SEQ ID NO: 84122), ASAAPXX (SEQ ID NO: 84402):VPE:SSLS-AA¹⁷-LFF (SEQ ID NO: 84889):LKVYP (SEQ ID NO: 84231):TVE:XKXS (SEQ ID NO: 84124), ASASPXX (SEQ ID NO: 84403):VPE:SSLS-AA¹⁷-LFF (SEQ ID NO: 84889):LKVYP (SEQ ID NO: 84231):TVE:XKXS (SEQ ID NO: 84124), NDEGLEX (SEQ ID NO: 84426):VPE:SSLS-AA¹⁷-LFF (SEQ ID NO: 84889):LKVYP (SEQ ID NO: 84231):TVE:KXEXR (SEQ ID NO: 84213), NDEGLEX (SEQ ID NO: 84426):VPE:SSLS-AA¹⁷-LFF (SEQ ID NO: 84889):LKVYP (SEQ ID NO: 84231):TVE:QXEXR (SEQ ID NO: 84276), SSVKXQP (SEQ ID NO: 84430):VPE:SSLS-AA¹⁷-LFF (SEQ ID NO: 84889):LKVYP (SEQ ID NO: 84231):TVE:LEXAXA (SEQ ID NO: 84400), RNVQXRP (SEQ ID NO: 84427):VPE:SSLS-AA¹⁷-LFF (SEQ ID NO: 84889):LKVYP (SEQ ID NO: 84231):TVE:LAXKXE (SEQ ID NO: 84399), KIPKAXX (SEQ ID NO: 84424):VPT:SSLS-AA¹⁷-LFF (SEQ ID NO: 84889):LKVYP (SEQ ID NO: 84231):VVE:GXGXR (SEQ ID NO: 84208), SIPKAXX (SEQ ID NO: 84429):VPT:SSLS-AA¹⁷-LFF (SEQ ID NO: 84889):LKVYP (SEQ ID NO: 84231):VVE:GXGXR (SEQ ID NO: 84208), HVTKPTX (SEQ ID NO: 84422):APT:SSLS-AA¹⁷-LFF (SEQ ID NO: 84889):LKVYP (SEQ ID NO: 84231):VVR:SXGXH (SEQ ID NO: 84304), YVPKPXX (SEQ ID NO: 84433):APT:SSLS-AA¹⁷-LFF (SEQ ID NO: 84889):LKVYP (SEQ ID NO: 84231):VVR:SXGXH (SEQ ID NO: 84304), TVPKPXX (SEQ ID NO: 84432):APT:SSLS-AA¹⁷-LFF (SEQ ID NO: 84889):LKVYP (SEQ ID NO: 84231):VVR:AXGXH (SEQ ID NO: 84147), AVPKAXX (SEQ ID NO: 84404):APT:SSLS-AA¹⁷-LFF (SEQ ID NO: 84889):LKVYP (SEQ ID NO: 84231):VVK:AXGXH (SEQ ID NO: 84147), KVGKAXX (SEQ ID NO: 84425):VPT:SSLS-AA¹⁷-LFF (SEQ ID NO: 84889):LKVYP (SEQ ID NO: 84231):VAE:XGXR (SEQ ID NO: 84123), KASKAXX (SEQ ID NO: 84423):VPT:SSLS-AA¹⁷-LFF (SEQ ID NO: 84889):LKVYP (SEQ ID NO: 84231):AVS:EXGXR (SEQ ID NO: 84179), GSAGPXX (SEQ ID NO: 84420):TPT:SSLS-AA¹⁷-LFF (SEQ ID NO: 84889):LKVYP (SEQ ID NO: 84231):VVD:RXGXS (SEQ ID NO: 84291), AAPASXX (SEQ ID NO: 84401):VPA:SSLS-AA¹⁷-LFF (SEQ ID NO: 84889):LKVYP (SEQ ID NO: 84231):VVE:AXGXR (SEQ ID NO: 84148), STPPTXX (SEQ ID NO: 84431):VPT:SSLS-AA¹⁷-LFF (SEQ ID NO: 84889):LKVYP (SEQ ID NO: 84231):VVE:SXGXR (SEQ ID NO: 84305), HVPKPXX (SEQ ID NO: 84421):APT:SSLS-AA¹⁷-LFF (SEQ ID NO: 84889):LKVYP (SEQ ID NO: 84231):VVR:SXGXH (SEQ ID NO: 84304), RVPSTXX (SEQ ID NO: 84428):APV:SSLS-AA¹⁷-LFF (SEQ ID NO: 84889):LKVYP (SEQ ID NO: 84231):VEE:XGXL (SEQ ID NO: 84122), ASAAPXX (SEQ ID NO: 84402):VPQ:SSLS-AA¹⁷-LFF (SEQ ID NO: 84889):LKVYP (SEQ ID NO: 84231):VRS:XKXS (SEQ ID NO: 84124), ASASPXX (SEQ ID NO: 84403):VSQ:SSLS-AA¹⁷-LFF (SEQ ID NO: 84889):LKVYP (SEQ ID NO: 84231):VKS:XKXS (SEQ ID NO: 84124), ASASPXX (SEQ ID NO: 84403):VPQ:SSLS-AA¹⁷-LFF (SEQ ID NO: 84889):LKVYP (SEQ ID NO: 84231):VKS:XKXS (SEQ ID NO: 84124), NDEGLEX (SEQ ID NO: 84426):VPT:SSLS-AA¹⁷-LFF (SEQ ID NO: 84889):LKVYP (SEQ ID NO: 84231):QHN:KXEXR (SEQ ID NO: 84213), NDEGLEX (SEQ ID NO: 84426):VPT:SSLS-AA¹⁷-LFF (SEQ ID NO: 84889):LKVYP (SEQ ID NO: 84231):EHS:QXEXR (SEQ ID NO: 84276), SSVKXQP (SEQ ID NO: 84430):SRV:SSLS-AA¹⁷-LFF (SEQ ID NO: 84889):LKVYP (SEQ ID NO: 84231):EEH:LEXAXA (SEQ ID NO: 84400), RNVQXRP (SEQ ID NO: 84427):TQV:SSLS-AA¹⁷-LFF (SEQ ID NO: 84889):LKVYP (SEQ ID NO: 84231):EDH:LAXKXE (SEQ ID NO: 84399), KIPKAXX (SEQ ID NO: 84424):VPT:SAIS-AA¹⁷-LYL (SEQ ID NO: 84881):LKNYQ (SEQ ID NO: 84230):VVE:GXGXR (SEQ ID NO: 84208), KIPKAXX (SEQ ID NO: 84424):APT:NAIS-AA¹⁷-LYF (SEQ ID NO: 84878):LKKYR (SEQ ID NO: 84229):VVR:GXGXR (SEQ ID NO: 84208), GIPEPXX (SEQ ID NO: 84419):APT:NAIS-AA¹⁷-LYF (SEQ ID NO: 84878):LKKYR (SEQ ID NO: 84229):VVR:SXAXR (SEQ ID NO: 84303), SIPKAXX (SEQ ID NO: 84429):APT:NAIS-AA¹⁷-LYF (SEQ ID NO: 84878):LKKYR (SEQ ID NO: 84229):VVR:GXGXR (SEQ ID NO: 84208), YVPKPXX (SEQ ID NO: 84433):APT:NAIS-AA¹⁷-LYF (SEQ ID NO: 84878):LKKYR (SEQ ID NO: 84229):VVR:SXGXH (SEQ ID NO: 84304), TVPKPXX (SEQ ID NO: 84432):APT:NAIS-AA¹⁷-LYF (SEQ ID NO: 84878):LKKYR (SEQ ID NO: 84229):VVR:AXGXH (SEQ ID NO: 84147), AVPKAXX (SEQ ID NO: 84404):APT:NAIS-AA¹⁷-LYF (SEQ ID NO: 84878):LKKYR (SEQ ID NO: 84229):VVR:AXGXH (SEQ ID NO: 84147), KVGKAXX (SEQ ID NO: 84425):APT:NAIS-AA¹⁷-LYF (SEQ ID NO: 84878):LKKYR (SEQ ID NO: 84229):VVR:XGXR (SEQ ID NO: 84123), KASKAXX (SEQ ID NO: 84423):APT:NAIS-AA¹⁷-LYF (SEQ ID NO: 84878):LKKYR (SEQ ID NO: 84229):VVR:EXGXR (SEQ ID NO: 84179), GSAGPXX (SEQ ID NO: 84420):APT:NAIS-AA¹⁷-LYF (SEQ ID NO: 84878):LKKYR (SEQ ID NO: 84229):VVR:RXGXS (SEQ ID NO: 84291), AAPASXX (SEQ ID NO: 84401):APT:NAIS-AA¹⁷-LYF (SEQ ID NO: 84878):LKKYR (SEQ ID NO: 84229):VVR:AXGXR (SEQ ID NO: 84148), STPPTXX (SEQ ID NO: 84431):APT:NAIS-AA¹⁷-LYF (SEQ ID NO: 84878):LKKYR (SEQ ID NO: 84229):VVR:SXGXR (SEQ ID NO: 84305), HVPKPXX (SEQ ID NO: 84421):APT:NAIS-AA¹⁷-LYF (SEQ ID NO: 84878):LKKYR (SEQ ID NO: 84229):VVR:SXGXH (SEQ ID NO: 84304), RVPSTXX (SEQ ID NO: 84428):APT:NAIS-AA¹⁷-LYF (SEQ ID NO: 84878):LKKYR (SEQ ID NO: 84229):VVR:XGXL (SEQ ID NO: 84122), ASAAPXX (SEQ ID NO: 84402):APT:NAIS-AA¹⁷-LYF (SEQ ID NO: 84878):LKKYR (SEQ ID NO: 84229):VVR:XKXS (SEQ ID NO: 84124), ASASPXX (SEQ ID NO: 84403):APT:NAIS-AA¹⁷-LYF (SEQ ID NO: 84878):LKKYR (SEQ ID NO: 84229):VVR:XKXS (SEQ ID NO: 84124), NDEGLEX (SEQ ID NO: 84426):APT:NAIS-AA¹⁷-LYF (SEQ ID NO: 84878):LKKYR (SEQ ID NO: 84229):VVR:KXEXR (SEQ ID NO: 84213), NDEGLEX (SEQ ID NO: 84426):APT:NAIS-AA¹⁷-LYF (SEQ ID NO: 84878):LKKYR (SEQ ID NO: 84229):VVR:QXEXR (SEQ ID NO: 84276), SSVKXQP (SEQ ID NO: 84430):APT:NAIS-AA¹⁷-LYF (SEQ ID NO: 84878):LKKYR (SEQ ID NO: 84229):VVR:LEXAXA (SEQ ID NO: 84400), RNVQXRP (SEQ ID NO: 84427):APT:NAIS-AA¹⁷-LYF (SEQ ID NO: 84878):LKKYR (SEQ ID NO: 84229):VVR:LAXKXE (SEQ ID NO: 84399), KIPKAXX (SEQ ID NO: 84424):VPT:NAIS-AA¹⁷-LYF (SEQ ID NO: 84878):LKKYR (SEQ ID NO: 84229):VVE:GXGXR (SEQ ID NO: 84208), GIPEPXX (SEQ ID NO: 84419):VPE:NAIS-AA¹⁷-LYF (SEQ ID NO: 84878):LKKYR (SEQ ID NO: 84229):TVE:SXAXR (SEQ ID NO: 84303), SIPKAXX (SEQ ID NO: 84429):VPT:NAIS-AA¹⁷-LYF (SEQ ID NO: 84878):LKKYR (SEQ ID NO: 84229):VVE:GXGXR (SEQ ID NO: 84208), AVPKAXX (SEQ ID NO: 84404):APT:NAIS-AA¹⁷-LYF (SEQ ID NO: 84878):LKKYR (SEQ ID NO: 84229):VVK:AXGXH (SEQ ID NO: 84147), KVGKAXX (SEQ ID NO: 84425):VPT:NAIS-AA¹⁷-LYF (SEQ ID NO: 84878):LKKYR (SEQ ID NO: 84229):VAE:XGXR (SEQ ID NO: 84123), KASKAXX (SEQ ID NO: 84423):VPT:NAIS-AA¹⁷-LYF (SEQ ID NO: 84878):LKKYR (SEQ ID NO: 84229):AVS:EXGXR (SEQ ID NO: 84179), GSAGPXX (SEQ ID NO: 84420):TPT:NAIS-AA¹⁷-LYF (SEQ ID NO: 84878):LKKYR (SEQ ID NO: 84229):VVD:RXGXS (SEQ ID NO: 84291), AAPASXX (SEQ ID NO: 84401):VPA:NAIS-AA¹⁷-LYF (SEQ ID NO: 84878):LKKYR (SEQ ID NO: 84229):VVE:AXGXR (SEQ ID NO: 84148), STPPTXX (SEQ ID NO: 84431):VPT:NAIS-AA¹⁷-LYF (SEQ ID NO: 84878):LKKYR (SEQ ID NO: 84229):VVE:SXGXR (SEQ ID NO: 84305), RVPSTXX (SEQ ID NO: 84428):APV:NAIS-AA¹⁷-LYF (SEQ ID NO: 84878):LKKYR (SEQ ID NO: 84229):VEE:XGXL (SEQ ID NO: 84122), ASAAPXX (SEQ ID NO: 84402):VPQ:NAIS-AA¹⁷-LYF (SEQ ID NO: 84878):LKKYR (SEQ ID NO: 84229):VRS:XKXS (SEQ ID NO: 84124), ASASPXX (SEQ ID NO: 84403):VSQ:NAIS-AA¹⁷-LYF (SEQ ID NO: 84878):LKKYR (SEQ ID NO: 84229):VKS:XKXS (SEQ ID NO: 84124), ASASPXX (SEQ ID NO: 84403):VPQ:NAIS-AA¹⁷-LYF (SEQ ID NO: 84878):LKKYR (SEQ ID NO: 84229):VKS:XKXS (SEQ ID NO: 84124), NDEGLEX (SEQ ID NO: 84426):VPT:NAIS-AA¹⁷-LYF (SEQ ID NO: 84878):LKKYR (SEQ ID NO: 84229):QHN:KXEXR (SEQ ID NO: 84213), NDEGLEX (SEQ ID NO: 84426):VPT:NAIS-AA¹⁷-LYF (SEQ ID NO: 84878):LKKYR (SEQ ID NO: 84229):EHS:QXEXR (SEQ ID NO: 84276), SSVKXQP (SEQ ID NO: 84430):SRV:NAIS-AA¹⁷-LYF (SEQ ID NO: 84878):LKKYR (SEQ ID NO: 84229):EEH:LEXAXA (SEQ ID NO: 84400), RNVQXRP (SEQ ID NO: 84427):TQV:NAIS-AA¹⁷-LYF (SEQ ID NO: 84878):LKKYR (SEQ ID NO: 84229):EDH:LAXKXE (SEQ ID NO: 84399), HVTKPTX (SEQ ID NO: 84422):APT:NAIS-AA¹⁷-LYF (SEQ ID NO: 84878):LKKYR (SEQ ID NO: 84229):VVR:SXGXH (SEQ ID NO: 84304), KIPKAXX (SEQ ID NO: 84424):APT:SATS-AA¹⁷-LYY (SEQ ID NO: 84882):LRKHR (SEQ ID NO: 84233):VVK:GXGXR (SEQ ID NO: 84208), GIPEPXX (SEQ ID NO: 84419):APT:SATS-AA¹⁷-LYY (SEQ ID NO: 84882):LRKHR (SEQ ID NO: 84233):VVK:SXAXR (SEQ ID NO: 84303), SIPKAXX (SEQ ID NO: 84429):APT:SATS-AA¹⁷-LYY (SEQ ID NO: 84882):LRKHR (SEQ ID NO: 84233):VVK:GXGXR (SEQ ID NO: 84208), HVTKPTX (SEQ ID NO: 84422):APT:SATS-AA¹⁷-LYY (SEQ ID NO: 84882):LRKHR (SEQ ID NO: 84233):VVK:SXGXH (SEQ ID NO: 84304), YVPKPXX (SEQ ID NO: 84433):APT:SATS-AA¹⁷-LYY (SEQ ID NO: 84882):LRKHR (SEQ ID NO: 84233):VVK:SXGXH (SEQ ID NO: 84304), TVPKPXX (SEQ ID NO: 84432):APT:SATS-AA¹⁷-LYY (SEQ ID NO: 84882):LRKHR (SEQ ID NO: 84233):VVK:AXGXH (SEQ ID NO: 84147), KVGKAXX (SEQ ID NO: 84425):APT:SATS-AA¹⁷-LYY (SEQ ID NO: 84882):LRKHR (SEQ ID NO: 84233):VVK:XGXR (SEQ ID NO: 84123), KASKAXX (SEQ ID NO: 84423):APT:SATS-AA¹⁷-LYY (SEQ ID NO: 84882):LRKHR (SEQ ID NO: 84233):VVK:EXGXR (SEQ ID NO: 84179), GSAGPXX (SEQ ID NO: 84420):APT:SATS-AA¹⁷-LYY (SEQ ID NO: 84882):LRKHR (SEQ ID NO: 84233):VVK:RXGXS (SEQ ID NO: 84291), AAPASXX (SEQ ID NO: 84401):APT:SATS-AA¹⁷-LYY (SEQ ID NO: 84882):LRKHR (SEQ ID NO: 84233):VVK:AXGXR (SEQ ID NO: 84148), STPPTXX (SEQ ID NO: 84431):APT:SATS-AA¹⁷-LYY (SEQ ID NO: 84882):LRKHR (SEQ ID NO: 84233):VVK:SXGXR (SEQ ID NO: 84305), HVPKPXX (SEQ ID NO: 84421):APT:SATS-AA¹⁷-LYY (SEQ ID NO: 84882):LRKHR (SEQ ID NO: 84233):VVK:SXGXH (SEQ ID NO: 84304), RVPSTXX (SEQ ID NO: 84428):APT:SATS-AA¹⁷-LYY (SEQ ID NO: 84882):LRKHR (SEQ ID NO: 84233):VVK:XGXL (SEQ ID NO: 84122), ASAAPXX (SEQ ID NO: 84402):APT:SATS-AA¹⁷-LYY (SEQ ID NO: 84882):LRKHR (SEQ ID NO: 84233):VVK:XKXS (SEQ ID NO: 84124), ASASPXX (SEQ ID NO: 84403):APT:SATS-AA¹⁷-LYY (SEQ ID NO: 84882):LRKHR (SEQ ID NO: 84233):VVK:XKXS (SEQ ID NO: 84124), NDEGLEX (SEQ ID NO: 84426):APT:SATS-AA¹⁷-LYY (SEQ ID NO: 84882):LRKHR (SEQ ID NO: 84233):VVK:KXEXR (SEQ ID NO: 84213), NDEGLEX (SEQ ID NO: 84426):APT:SATS-AA¹⁷-LYY (SEQ ID NO: 84882):LRKHR (SEQ ID NO: 84233):VVK:QXEXR (SEQ ID NO: 84276), SSVKXQP (SEQ ID NO: 84430):APT:SATS-AA¹⁷-LYY (SEQ ID NO: 84882):LRKHR (SEQ ID NO: 84233):VVK:LEXAXA (SEQ ID NO: 84400), RNVQXRP (SEQ ID NO: 84427):APT:SATS-AA¹⁷-LYY (SEQ ID NO: 84882):LRKHR (SEQ ID NO: 84233):VVK:LAXKXE (SEQ ID NO: 84399), KIPKAXX (SEQ ID NO: 84424):VPT:SATS-AA¹⁷-LYY (SEQ ID NO: 84882):LRKHR (SEQ ID NO: 84233):VVE:GXGXR (SEQ ID NO: 84208), GIPEPXX (SEQ ID NO: 84419):VPE:SATS-AA¹⁷-LYY (SEQ ID NO: 84882):LRKHR (SEQ ID NO: 84233):TVE:SXAXR (SEQ ID NO: 84303), SIPKAXX (SEQ ID NO: 84429):VPT:SATS-AA¹⁷-LYY (SEQ ID NO: 84882):LRKHR (SEQ ID NO: 84233):VVE:GXGXR (SEQ ID NO: 84208), HVTKPTX (SEQ ID NO: 84422):APT:SATS-AA¹⁷-LYY (SEQ ID NO: 84882):LRKHR (SEQ ID NO: 84233):VVR:SXGXH (SEQ ID NO: 84304), YVPKPXX (SEQ ID NO: 84433):APT:SATS-AA¹⁷-LYY (SEQ ID NO: 84882):LRKHR (SEQ ID NO: 84233):VVR:SXGXH (SEQ ID NO: 84304), TVPKPXX (SEQ ID NO: 84432):APT:SATS-AA¹⁷-LYY (SEQ ID NO: 84882):LRKHR (SEQ ID NO: 84233):VVR:AXGXH (SEQ ID NO: 84147), KVGKAXX (SEQ ID NO: 84425):VPT:SATS-AA¹⁷-LYY (SEQ ID NO: 84882):LRKHR (SEQ ID NO: 84233):VAE:XGXR (SEQ ID NO: 84123), KASKAXX (SEQ ID NO: 84423):VPT:SATS-AA¹⁷-LYY (SEQ ID NO: 84882):LRKHR (SEQ ID NO: 84233):AVS:EXGXR (SEQ ID NO: 84179), GSAGPXX (SEQ ID NO: 84420):TPT:SATS-AA¹⁷-LYY (SEQ ID NO: 84882):LRKHR (SEQ ID NO: 84233):VVD:RXGXS (SEQ ID NO: 84291), AAPASXX (SEQ ID NO: 84401):VPA:SATS-AA¹⁷-LYY (SEQ ID NO: 84882):LRKHR (SEQ ID NO: 84233):VVE:AXGXR (SEQ ID NO: 84148), STPPTXX (SEQ ID NO: 84431):VPT:SATS-AA¹⁷-LYY (SEQ ID NO: 84882):LRKHR (SEQ ID NO: 84233):VVE:SXGXR (SEQ ID NO: 84305), HVPKPXX (SEQ ID NO: 84421):APT:SATS-AA¹⁷-LYY (SEQ ID NO: 84882):LRKHR (SEQ ID NO: 84233):VVR:SXGXH (SEQ ID NO: 84304), RVPSTXX (SEQ ID NO: 84428):APV:SATS-AA¹⁷-LYY (SEQ ID NO: 84882):LRKHR (SEQ ID NO: 84233):VEE:XGXL (SEQ ID NO: 84122), ASAAPXX (SEQ ID NO: 84402):VPQ:SATS-AA¹⁷-LYY (SEQ ID NO: 84882):LRKHR (SEQ ID NO: 84233):VRS:XKXS (SEQ ID NO: 84124), ASASPXX (SEQ ID NO: 84403):VSQ:SATS-AA¹⁷-LYY (SEQ ID NO: 84882):LRKHR (SEQ ID NO: 84233):VKS:XKXS (SEQ ID NO: 84124), ASASPXX (SEQ ID NO: 84403):VPQ:SATS-AA¹⁷-LYY (SEQ ID NO: 84882):LRKHR (SEQ ID NO: 84233):VKS:XKXS (SEQ ID NO: 84124), NDEGLEX (SEQ ID NO: 84426):VPT:SATS-AA¹⁷-LYY (SEQ ID NO: 84882):LRKHR (SEQ ID NO: 84233):QHN:KXEXR (SEQ ID NO: 84213), NDEGLEX (SEQ ID NO: 84426):VPT:SATS-AA¹⁷-LYY (SEQ ID NO: 84882):LRKHR (SEQ ID NO: 84233):EHS:QXEXR (SEQ ID NO: 84276), SSVKXQP (SEQ ID NO: 84430):SRV:SATS-AA¹⁷-LYY (SEQ ID NO: 84882):LRKHR (SEQ ID NO: 84233):EEH:LEXAXA (SEQ ID NO: 84400), RNVQXRP (SEQ ID NO: 84427):TQV:SATS-AA¹⁷-LYY (SEQ ID NO: 84882):LRKHR (SEQ ID NO: 84233):EDH:LAXKXE (SEQ ID NO: 84399), KIPKAXX (SEQ ID NO: 84424):VPT:SPIS-AA¹⁷-LYK (SEQ ID NO: 84887):LKYHY (SEQ ID NO: 84232):VAE:GXGXR (SEQ ID NO: 84208), GIPEPXX (SEQ ID NO: 84419):VPT:SPIS-AA¹⁷-LYK (SEQ ID NO: 84887):LKYHY (SEQ ID NO: 84232):VAE:SXAXR (SEQ ID NO: 84303), SIPKAXX (SEQ ID NO: 84429):VPT:SPIS-AA¹⁷-LYK (SEQ ID NO: 84887):LKYHY (SEQ ID NO: 84232):VAE:GXGXR (SEQ ID NO: 84208), HVTKPTX (SEQ ID NO: 84422):VPT:SPIS-AA¹⁷-LYK (SEQ ID NO: 84887):LKYHY (SEQ ID NO: 84232):VAE:SXGXH (SEQ ID NO: 84304), YVPKPXX (SEQ ID NO: 84433):VPT:SPIS-AA¹⁷-LYK (SEQ ID NO: 84887):LKYHY (SEQ ID NO: 84232):VAE:SXGXH (SEQ ID NO: 84304), TVPKPXX (SEQ ID NO: 84432):VPT:SPIS-AA¹⁷-LYK (SEQ ID NO: 84887):LKYHY (SEQ ID NO: 84232):VAE:AXGXH (SEQ ID NO: 84147), AVPKAXX (SEQ ID NO: 84404):VPT:SPIS-AA¹⁷-LYK (SEQ ID NO: 84887):LKYHY (SEQ ID NO: 84232):VAE:AXGXH (SEQ ID NO: 84147), KASKAXX (SEQ ID NO: 84423):VPT:SPIS-AA¹⁷-LYK (SEQ ID NO: 84887):LKYHY (SEQ ID NO: 84232):VAE:EXGXR (SEQ ID NO: 84179), GSAGPXX (SEQ ID NO: 84420):VPT:SPIS-AA¹⁷-LYK (SEQ ID NO: 84887):LKYHY (SEQ ID NO: 84232):VAE:RXGXS (SEQ ID NO: 84291), AAPASXX (SEQ ID NO: 84401):VPT:SPIS-AA¹⁷-LYK (SEQ ID NO: 84887):LKYHY (SEQ ID NO: 84232):VAE:AXGXR (SEQ ID NO: 84148), STPPTXX (SEQ ID NO: 84431):VPT:SPIS-AA¹⁷-LYK (SEQ ID NO: 84887):LKYHY (SEQ ID NO: 84232):VAE:SXGXR (SEQ ID NO: 84305), HVPKPXX (SEQ ID NO: 84421):VPT:SPIS-AA¹⁷-LYK (SEQ ID NO: 84887):LKYHY (SEQ ID NO: 84232):VAE:SXGXH (SEQ ID NO: 84304), RVPSTXX (SEQ ID NO: 84428):VPT:SPIS-AA¹⁷-LYK (SEQ ID NO: 84887):LKYHY (SEQ ID NO: 84232):VAE:XGXL (SEQ ID NO: 84122), ASAAPXX (SEQ ID NO: 84402):VPT:SPIS-AA¹⁷-LYK (SEQ ID NO: 84887):LKYHY (SEQ ID NO: 84232):VAE:XKXS (SEQ ID NO: 84124), ASASPXX (SEQ ID NO: 84403):VPT:SPIS-AA¹⁷-LYK (SEQ ID NO: 84887):LKYHY (SEQ ID NO: 84232):VAE:XKXS (SEQ ID NO: 84124), NDEGLEX (SEQ ID NO: 84426):VPT:SPIS-AA¹⁷-LYK (SEQ ID NO: 84887):LKYHY (SEQ ID NO: 84232):VAE:KXEXR (SEQ ID NO: 84213), NDEGLEX (SEQ ID NO: 84426):VPT:SPIS-AA¹⁷-LYK (SEQ ID NO: 84887):LKYHY (SEQ ID NO: 84232):VAE:QXEXR (SEQ ID NO: 84276), SSVKXQP (SEQ ID NO: 84430):VPT:SPIS-AA¹⁷-LYK (SEQ ID NO: 84887):LKYHY (SEQ ID NO: 84232):VAE:LEXAXA (SEQ ID NO: 84400), RNVQXRP (SEQ ID NO: 84427):VPT:SPIS-AA¹⁷-LYK (SEQ ID NO: 84887):LKYHY (SEQ ID NO: 84232):VAE:LAXKXE (SEQ ID NO: 84399), KIPKAXX (SEQ ID NO: 84424):VPT:SPIS-AA¹⁷-LYK (SEQ ID NO: 84887):LKYHY (SEQ ID NO: 84232):VVE:GXGXR (SEQ ID NO: 84208), GIPEPXX (SEQ ID NO: 84419):VPE:SPIS-AA¹⁷-LYK (SEQ ID NO: 84887):LKYHY (SEQ ID NO: 84232):TVE:SXAXR (SEQ ID NO: 84303), SIPKAXX (SEQ ID NO: 84429):VPT:SPIS-AA¹⁷-LYK (SEQ ID NO: 84887):LKYHY (SEQ ID NO: 84232):VVE:GXGXR (SEQ ID NO: 84208), HVTKPTX (SEQ ID NO: 84422):APT:SPIS-AA¹⁷-LYK (SEQ ID NO: 84887):LKYHY (SEQ ID NO: 84232):VVR:SXGXH (SEQ ID NO: 84304), YVPKPXX (SEQ ID NO: 84433):APT:SPIS-AA¹⁷-LYK (SEQ ID NO: 84887):LKYHY (SEQ ID NO: 84232):VVR:SXGXH (SEQ ID NO: 84304), TVPKPXX (SEQ ID NO: 84432):APT:SPIS-AA¹⁷-LYK (SEQ ID NO: 84887):LKYHY (SEQ ID NO: 84232):VVR:AXGXH (SEQ ID NO: 84147), AVPKAXX (SEQ ID NO: 84404):APT:SPIS-AA¹⁷-LYK (SEQ ID NO: 84887):LKYHY (SEQ ID NO: 84232):VVK:AXGXH (SEQ ID NO: 84147), KASKAXX (SEQ ID NO: 84423):VPT:SPIS-AA¹⁷-LYK (SEQ ID NO: 84887):LKYHY (SEQ ID NO: 84232):AVS:EXGXR (SEQ ID NO: 84179), GSAGPXX (SEQ ID NO: 84420):TPT:SPIS-AA¹⁷-LYK (SEQ ID NO: 84887):LKYHY (SEQ ID NO: 84232):VVD:RXGXS (SEQ ID NO: 84291), AAPASXX (SEQ ID NO: 84401):VPA:SPIS-AA¹⁷-LYK (SEQ ID NO: 84887):LKYHY (SEQ ID NO: 84232):VVE:AXGXR (SEQ ID NO: 84148), STPPTXX (SEQ ID NO: 84431):VPT:SPIS-AA¹⁷-LYK (SEQ ID NO: 84887):LKYHY (SEQ ID NO: 84232):VVE:SXGXR (SEQ ID NO: 84305), HVPKPXX (SEQ ID NO: 84421):APT:SPIS-AA¹⁷-LYK (SEQ ID NO: 84887):LKYHY (SEQ ID NO: 84232):VVR:SXGXH (SEQ ID NO: 84304), RVPSTXX (SEQ ID NO: 84428):APV:SPIS-AA¹⁷-LYK (SEQ ID NO: 84887):LKYHY (SEQ ID NO: 84232):VEE:XGXL (SEQ ID NO: 84122), ASAAPXX (SEQ ID NO: 84402):VPQ:SPIS-AA¹⁷-LYK (SEQ ID NO: 84887):LKYHY (SEQ ID NO: 84232):VRS:XKXS (SEQ ID NO: 84124), ASASPXX (SEQ ID NO: 84403):VSQ:SPIS-AA¹⁷-LYK (SEQ ID NO: 84887):LKYHY (SEQ ID NO: 84232):VKS:XKXS (SEQ ID NO: 84124), ASASPXX (SEQ ID NO: 84403):VPQ:SPIS-AA¹⁷-LYK (SEQ ID NO: 84887):LKYHY (SEQ ID NO: 84232):VKS:XKXS (SEQ ID NO: 84124), NDEGLEX (SEQ ID NO: 84426):VPT:SPIS-AA¹⁷-LYK (SEQ ID NO: 84887):LKYHY (SEQ ID NO: 84232):QHN:KXEXR (SEQ ID NO: 84213), NDEGLEX (SEQ ID NO: 84426):VPT:SPIS-AA¹⁷-LYK (SEQ ID NO: 84887):LKYHY (SEQ ID NO: 84232):EHS:QXEXR (SEQ ID NO: 84276), SSVKXQP (SEQ ID NO: 84430):SRV:SPIS-AA¹⁷-LYK (SEQ ID NO: 84887):LKYHY (SEQ ID NO: 84232):EEH:LEXAXA (SEQ ID NO: 84400), RNVQXRP (SEQ ID NO: 84427):TQV:SPIS-AA¹⁷-LYK (SEQ ID NO: 84887):LKYHY (SEQ ID NO: 84232):EDH:LAXKXE (SEQ ID NO: 84399), KIPKAXX (SEQ ID NO: 84424):VPT:EPIS-AA¹⁷-LYL (SEQ ID NO: 84874):KFKYE (SEQ ID NO: 84211):AVS:GXGXR (SEQ ID NO: 84208), GIPEPXX (SEQ ID NO: 84419):VPT:EPIS-AA¹⁷-LYL (SEQ ID NO: 84874):KFKYE (SEQ ID NO: 84211):AVS:SXAXR (SEQ ID NO: 84303), SIPKAXX (SEQ ID NO: 84429):VPT:EPIS-AA¹⁷-LYL (SEQ ID NO: 84874):KFKYE (SEQ ID NO: 84211):AVS:GXGXR (SEQ ID NO: 84208), HVTKPTX (SEQ ID NO: 84422):VPT:EPIS-AA¹⁷-LYL (SEQ ID NO: 84874):KFKYE (SEQ ID NO: 84211):AVS:SXGXH (SEQ ID NO: 84304), YVPKPXX (SEQ ID NO: 84433):VPT:EPIS-AA¹⁷-LYL (SEQ ID NO: 84874):KFKYE (SEQ ID NO: 84211):AVS:SXGXH (SEQ ID NO: 84304), TVPKPXX (SEQ ID NO: 84432):VPT:EPIS-AA¹⁷-LYL (SEQ ID NO: 84874):KFKYE (SEQ ID NO: 84211):AVS:AXGXH (SEQ ID NO: 84147), AVPKAXX (SEQ ID NO: 84404):VPT:EPIS-AA¹⁷-LYL (SEQ ID NO: 84874):KFKYE (SEQ ID NO: 84211):AVS:AXGXH (SEQ ID NO: 84147), KVGKAXX (SEQ ID NO: 84425):VPT:EPIS-AA¹⁷-LYL (SEQ ID NO: 84874):KFKYE (SEQ ID NO: 84211):AVS:XGXR (SEQ ID NO: 84123), GSAGPXX (SEQ ID NO: 84420):VPT:EPIS-AA¹⁷-LYL (SEQ ID NO: 84874):KFKYE (SEQ ID NO: 84211):AVS:RXGXS (SEQ ID NO: 84291), AAPASXX (SEQ ID NO: 84401):VPT:EPIS-AA¹⁷-LYL (SEQ ID NO: 84874):KFKYE (SEQ ID NO: 84211):AVS:AXGXR (SEQ ID NO: 84148), STPPTXX (SEQ ID NO: 84431):VPT:EPIS-AA¹⁷-LYL (SEQ ID NO: 84874):KFKYE (SEQ ID NO: 84211):AVS:SXGXR (SEQ ID NO: 84305), HVPKPXX (SEQ ID NO: 84421):VPT:EPIS-AA¹⁷-LYL (SEQ ID NO: 84874):KFKYE (SEQ ID NO: 84211):AVS:SXGXH (SEQ ID NO: 84304), RVPSTXX (SEQ ID NO: 84428):VPT:EPIS-AA¹⁷-LYL (SEQ ID NO: 84874):KFKYE (SEQ ID NO: 84211):AVS:XGXL (SEQ ID NO: 84122), ASAAPXX (SEQ ID NO: 84402):VPT:EPIS-AA¹⁷-LYL (SEQ ID NO: 84874):KFKYE (SEQ ID NO: 84211):AVS:XKXS (SEQ ID NO: 84124), ASASPXX (SEQ ID NO: 84403):VPT:EPIS-AA¹⁷-LYL (SEQ ID NO: 84874):KFKYE (SEQ ID NO: 84211):AVS:XKXS (SEQ ID NO: 84124), NDEGLEX (SEQ ID NO: 84426):VPT:EPIS-AA¹⁷-LYL (SEQ ID NO: 84874):KFKYE (SEQ ID NO: 84211):AVS:KXEXR (SEQ ID NO: 84213), NDEGLEX (SEQ ID NO: 84426):VPT:EPIS-AA¹⁷-LYL (SEQ ID NO: 84874):KFKYE (SEQ ID NO: 84211):AVS:QXEXR (SEQ ID NO: 84276), SSVKXQP (SEQ ID NO: 84430):VPT:EPIS-AA¹⁷-LYL (SEQ ID NO: 84874):KFKYE (SEQ ID NO: 84211):AVS:LEXAXA (SEQ ID NO: 84400), RNVQXRP (SEQ ID NO: 84427):VPT:EPIS-AA¹⁷-LYL (SEQ ID NO: 84874):KFKYE (SEQ ID NO: 84211):AVS:LAXKXE (SEQ ID NO: 84399), KIPKAXX (SEQ ID NO: 84424):VPT:EPIS-AA¹⁷-LYL (SEQ ID NO: 84874):KFKYE (SEQ ID NO: 84211):VVE:GXGXR (SEQ ID NO: 84208), GIPEPXX (SEQ ID NO: 84419):VPE:EPIS-AA¹⁷-LYL (SEQ ID NO: 84874):KFKYE (SEQ ID NO: 84211):TVE:SXAXR (SEQ ID NO: 84303), SIPKAXX (SEQ ID NO: 84429):VPT:EPIS-AA¹⁷-LYL (SEQ ID NO: 84874):KFKYE (SEQ ID NO: 84211):VVE:GXGXR (SEQ ID NO: 84208), HVTKPTX (SEQ ID NO: 84422):APT:EPIS-AA¹⁷-LYL (SEQ ID NO: 84874):KFKYE (SEQ ID NO: 84211):VVR:SXGXH (SEQ ID NO: 84304), YVPKPXX (SEQ ID NO: 84433):APT:EPIS-AA¹⁷-LYL (SEQ ID NO: 84874):KFKYE (SEQ ID NO: 84211):VVR:SXGXH (SEQ ID NO: 84304), TVPKPXX (SEQ ID NO: 84432):APT:EPIS-AA¹⁷-LYL (SEQ ID NO: 84874):KFKYE (SEQ ID NO: 84211):VVR:AXGXH (SEQ ID NO: 84147), AVPKAXX (SEQ ID NO: 84404):APT:EPIS-AA¹⁷-LYL (SEQ ID NO: 84874):KFKYE (SEQ ID NO: 84211):VVK:AXGXH (SEQ ID NO: 84147), KVGKAXX (SEQ ID NO: 84425):VPT:EPIS-AA¹⁷-LYL (SEQ ID NO: 84874):KFKYE (SEQ ID NO: 84211):VAE:XGXR (SEQ ID NO: 84123), GSAGPXX (SEQ ID NO: 84420):TPT:EPIS-AA¹⁷-LYL (SEQ ID NO: 84874):KFKYE (SEQ ID NO: 84211):VVD:RXGXS (SEQ ID NO: 84291), AAPASXX (SEQ ID NO: 84401):VPA:EPIS-AA¹⁷-LYL (SEQ ID NO: 84874):KFKYE (SEQ ID NO: 84211):VVE:AXGXR (SEQ ID NO: 84148), STPPTXX (SEQ ID NO: 84431):VPT:EPIS-AA¹⁷-LYL (SEQ ID NO: 84874):KFKYE (SEQ ID NO: 84211):VVE:SXGXR (SEQ ID NO: 84305), HVPKPXX (SEQ ID NO: 84421):APT:EPIS-AA¹⁷-LYL (SEQ ID NO: 84874):KFKYE (SEQ ID NO: 84211):VVR:SXGXH (SEQ ID NO: 84304), RVPSTXX (SEQ ID NO: 84428):APV:EPIS-AA¹⁷-LYL (SEQ ID NO: 84874):KFKYE (SEQ ID NO: 84211):VEE:XGXL (SEQ ID NO: 84122), ASAAPXX (SEQ ID NO: 84402):VPQ:EPIS-AA¹⁷-LYL (SEQ ID NO: 84874):KFKYE (SEQ ID NO: 84211):VRS:XKXS (SEQ ID NO: 84124), ASASPXX (SEQ ID NO: 84403):VSQ:EPIS-AA¹⁷-LYL (SEQ ID NO: 84874):KFKYE (SEQ ID NO: 84211):VKS:XKXS (SEQ ID NO: 84124), ASASPXX (SEQ ID NO: 84403):VPQ:EPIS-AA¹⁷-LYL (SEQ ID NO: 84874):KFKYE (SEQ ID NO: 84211):VKS:XKXS (SEQ ID NO: 84124), NDEGLEX (SEQ ID NO: 84426):VPT:EPIS-AA¹⁷-LYL (SEQ ID NO: 84874):KFKYE (SEQ ID NO: 84211):QHN:KXEXR (SEQ ID NO: 84213), NDEGLEX (SEQ ID NO: 84426):VPT:EPIS-AA¹⁷-LYL (SEQ ID NO: 84874):KFKYE (SEQ ID NO: 84211):EHS:QXEXR (SEQ ID NO: 84276), SSVKXQP (SEQ ID NO: 84430):SRV:EPIS-AA¹⁷-LYL (SEQ ID NO: 84874):KFKYE (SEQ ID NO: 84211):EEH:LEXAXA (SEQ ID NO: 84400), RNVQXRP (SEQ ID NO: 84427):TQV:EPIS-AA¹⁷-LYL (SEQ ID NO: 84874):KFKYE (SEQ ID NO: 84211):EDH:LAXKXE (SEQ ID NO: 84399), KIPKAXX (SEQ ID NO: 84424):TPT:SPIN-AA¹⁷-LYF (SEQ ID NO: 84884):YGKIP (SEQ ID NO: 84397):VVD:GXGXR (SEQ ID NO: 84208), GIPEPXX (SEQ ID NO: 84419):TPT:SPIN-AA¹⁷-LYF (SEQ ID NO: 84884):YGKIP (SEQ ID NO: 84397):VVD:SXAXR (SEQ ID NO: 84303), SIPKAXX (SEQ ID NO: 84429):TPT:SPIN-AA¹⁷-LYF (SEQ ID NO: 84884):YGKIP (SEQ ID NO: 84397):VVD:GXGXR (SEQ ID NO: 84208), HVTKPTX (SEQ ID NO: 84422):TPT:SPIN-AA¹⁷-LYF (SEQ ID NO: 84884):YGKIP (SEQ ID NO: 84397):VVD:SXGXH (SEQ ID NO: 84304), YVPKPXX (SEQ ID NO: 84433):TPT:SPIN-AA¹⁷-LYF (SEQ ID NO: 84884):YGKIP (SEQ ID NO: 84397):VVD:SXGXH (SEQ ID NO: 84304), TVPKPXX (SEQ ID NO: 84432):TPT:SPIN-AA¹⁷-LYF (SEQ ID NO: 84884):YGKIP (SEQ ID NO: 84397):VVD:AXGXH (SEQ ID NO: 84147), AVPKAXX (SEQ ID NO: 84404):TPT:SPIN-AA¹⁷-LYF (SEQ ID NO: 84884):YGKIP (SEQ ID NO: 84397):VVD:AXGXH (SEQ ID NO: 84147), KVGKAXX (SEQ ID NO: 84425):TPT:SPIN-AA¹⁷-LYF (SEQ ID NO: 84884):YGKIP (SEQ ID NO: 84397):VVD:XGXR (SEQ ID NO: 84123), KASKAXX (SEQ ID NO: 84423):TPT:SPIN-AA¹⁷-LYF (SEQ ID NO: 84884):YGKIP (SEQ ID NO: 84397):VVD:EXGXR (SEQ ID NO: 84179), AAPASXX (SEQ ID NO: 84401):TPT:SPIN-AA¹⁷-LYF (SEQ ID NO: 84884):YGKIP (SEQ ID NO: 84397):VVD:AXGXR (SEQ ID NO: 84148), STPPTXX (SEQ ID NO: 84431):TPT:SPIN-AA¹⁷-LYF (SEQ ID NO: 84884):YGKIP (SEQ ID NO: 84397):VVD:SXGXR (SEQ ID NO: 84305), HVPKPXX (SEQ ID NO: 84421):TPT:SPIN-AA¹⁷-LYF (SEQ ID NO: 84884):YGKIP (SEQ ID NO: 84397):VVD:SXGXH (SEQ ID NO: 84304), RVPSTXX (SEQ ID NO: 84428):TPT:SPIN-AA¹⁷-LYF (SEQ ID NO: 84884):YGKIP (SEQ ID NO: 84397):VVD:XGXL (SEQ ID NO: 84122), ASAAPXX (SEQ ID NO: 84402):TPT:SPIN-AA¹⁷-LYF (SEQ ID NO: 84884):YGKIP (SEQ ID NO: 84397):VVD:XKXS (SEQ ID NO: 84124), ASASPXX (SEQ ID NO: 84403):TPT:SPIN-AA¹⁷-LYF (SEQ ID NO: 84884):YGKIP (SEQ ID NO: 84397):VVD:XKXS (SEQ ID NO: 84124), NDEGLEX (SEQ ID NO: 84426):TPT:SPIN-AA¹⁷-LYF (SEQ ID NO: 84884):YGKIP (SEQ ID NO: 84397):VVD:KXEXR (SEQ ID NO: 84213), NDEGLEX (SEQ ID NO: 84426):TPT:SPIN-AA¹⁷-LYF (SEQ ID NO: 84884):YGKIP (SEQ ID NO: 84397):VVD:QXEXR (SEQ ID NO: 84276), SSVKXQP (SEQ ID NO: 84430):TPT:SPIN-AA¹⁷-LYF (SEQ ID NO: 84884):YGKIP (SEQ ID NO: 84397):VVD:LEXAXA (SEQ ID NO: 84400), RNVQXRP (SEQ ID NO: 84427):TPT:SPIN-AA¹⁷-LYF (SEQ ID NO: 84884):YGKIP (SEQ ID NO: 84397):VVD:LAXKXE (SEQ ID NO: 84399), KIPKAXX (SEQ ID NO: 84424):VPT:SPIN-AA¹⁷-LYF (SEQ ID NO: 84884):YGKIP (SEQ ID NO: 84397):VVE:GXGXR (SEQ ID NO: 84208), GIPEPXX (SEQ ID NO: 84419):VPE:SPIN-AA¹⁷-LYF (SEQ ID NO: 84884):YGKIP (SEQ ID NO: 84397):TVE:SXAXR (SEQ ID NO: 84303), SIPKAXX (SEQ ID NO: 84429):VPT:SPIN-AA¹⁷-LYF (SEQ ID NO: 84884):YGKIP (SEQ ID NO: 84397):VVE:GXGXR (SEQ ID NO: 84208), HVTKPTX (SEQ ID NO: 84422):APT:SPIN-AA¹⁷-LYF (SEQ ID NO: 84884):YGKIP (SEQ ID NO: 84397):VVR:SXGXH (SEQ ID NO: 84304), YVPKPXX (SEQ ID NO: 84433):APT:SPIN-AA¹⁷-LYF (SEQ ID NO: 84884):YGKIP (SEQ ID NO: 84397):VVR:SXGXH (SEQ ID NO: 84304), TVPKPXX (SEQ ID NO: 84432):APT:SPIN-AA¹⁷-LYF (SEQ ID NO: 84884):YGKIP (SEQ ID NO: 84397):VVR:AXGXH (SEQ ID NO: 84147), AVPKAXX (SEQ ID NO: 84404):APT:SPIN-AA¹⁷-LYF (SEQ ID NO: 84884):YGKIP (SEQ ID NO: 84397):VVK:AXGXH (SEQ ID NO: 84147), KVGKAXX (SEQ ID NO: 84425):VPT:SPIN-AA¹⁷-LYF (SEQ ID NO: 84884):YGKIP (SEQ ID NO: 84397):VAE:XGXR (SEQ ID NO: 84123), KASKAXX (SEQ ID NO: 84423):VPT:SPIN-AA¹⁷-LYF (SEQ ID NO: 84884):YGKIP (SEQ ID NO: 84397):AVS:EXGXR (SEQ ID NO: 84179), AAPASXX (SEQ ID NO: 84401):VPA:SPIN-AA¹⁷-LYF (SEQ ID NO: 84884):YGKIP (SEQ ID NO: 84397):VVE:AXGXR (SEQ ID NO: 84148), STPPTXX (SEQ ID NO: 84431):VPT:SPIN-AA¹⁷-LYF (SEQ ID NO: 84884):YGKIP (SEQ ID NO: 84397):VVE:SXGXR (SEQ ID NO: 84305), HVPKPXX (SEQ ID NO: 84421):APT:SPIN-AA¹⁷-LYF (SEQ ID NO: 84884):YGKIP (SEQ ID NO: 84397):VVR:SXGXH (SEQ ID NO: 84304), RVPSTXX (SEQ ID NO: 84428):APV:SPIN-AA¹⁷-LYF (SEQ ID NO: 84884):YGKIP (SEQ ID NO: 84397):VEE:XGXL (SEQ ID NO: 84122), ASAAPXX (SEQ ID NO: 84402):VPQ:SPIN-AA¹⁷-LYF (SEQ ID NO: 84884):YGKIP (SEQ ID NO: 84397):VRS:XKXS (SEQ ID NO: 84124), ASASPXX (SEQ ID NO: 84403):VSQ:SPIN-AA¹⁷-LYF (SEQ ID NO: 84884):YGKIP (SEQ ID NO: 84397):VKS:XKXS (SEQ ID NO: 84124), ASASPXX (SEQ ID NO: 84403):VPQ:SPIN-AA¹⁷-LYF (SEQ ID NO: 84884):YGKIP (SEQ ID NO: 84397):VKS:XKXS (SEQ ID NO: 84124), NDEGLEX (SEQ ID NO: 84426):VPT:SPIN-AA¹⁷-LYF (SEQ ID NO: 84884):YGKIP (SEQ ID NO: 84397):QHN:KXEXR (SEQ ID NO: 84213), NDEGLEX (SEQ ID NO: 84426):VPT:SPIN-AA¹⁷-LYF (SEQ ID NO: 84884):YGKIP (SEQ ID NO: 84397):EHS:QXEXR (SEQ ID NO: 84276), SSVKXQP (SEQ ID NO: 84430):SRV:SPIN-AA¹⁷-LYF (SEQ ID NO: 84884):YGKIP (SEQ ID NO: 84397):EEH:LEXAXA (SEQ ID NO: 84400), RNVQXRP (SEQ ID NO: 84427):TQV:SPIN-AA¹⁷-LYF (SEQ ID NO: 84884):YGKIP (SEQ ID NO: 84397):EDH:LAXKXE (SEQ ID NO: 84399), KIPKAXX (SEQ ID NO: 84424):VPA:SPIS-AA¹⁷-LYI (SEQ ID NO: 84886):YKQYE (SEQ ID NO: 84398):VVE:GXGXR (SEQ ID NO: 84208), GIPEPXX (SEQ ID NO: 84419):VPA:SPIS-AA¹⁷-LYI (SEQ ID NO: 84886):YKQYE (SEQ ID NO: 84398):VVE:SXAXR (SEQ ID NO: 84303), SIPKAXX (SEQ ID NO: 84429):VPA:SPIS-AA¹⁷-LYI (SEQ ID NO: 84886):YKQYE (SEQ ID NO: 84398):VVE:GXGXR (SEQ ID NO: 84208), HVTKPTX (SEQ ID NO: 84422):VPA:SPIS-AA¹⁷-LYI (SEQ ID NO: 84886):YKQYE (SEQ ID NO: 84398):VVE:SXGXH (SEQ ID NO: 84304), YVPKPXX (SEQ ID NO: 84433):VPA:SPIS-AA¹⁷-LYI (SEQ ID NO: 84886):YKQYE (SEQ ID NO: 84398):VVE:SXGXH (SEQ ID NO: 84304), TVPKPXX (SEQ ID NO: 84432):VPA:SPIS-AA¹⁷-LYI (SEQ ID NO: 84886):YKQYE (SEQ ID NO: 84398):VVE:AXGXH (SEQ ID NO: 84147), AVPKAXX (SEQ ID NO: 84404):VPA:SPIS-AA¹⁷-LYI (SEQ ID NO: 84886):YKQYE (SEQ ID NO: 84398):VVE:AXGXH (SEQ ID NO: 84147), KVGKAXX (SEQ ID NO: 84425):VPA:SPIS-AA¹⁷-LYI (SEQ ID NO: 84886):YKQYE (SEQ ID NO: 84398):VVE:XGXR (SEQ ID NO: 84123), KASKAXX (SEQ ID NO: 84423):VPA:SPIS-AA¹⁷-LYI (SEQ ID NO: 84886):YKQYE (SEQ ID NO: 84398):VVE:EXGXR (SEQ ID NO: 84179), GSAGPXX (SEQ ID NO: 84420):VPA:SPIS-AA¹⁷-LYI (SEQ ID NO: 84886):YKQYE (SEQ ID NO: 84398):VVE:RXGXS (SEQ ID NO: 84291), STPPTXX (SEQ ID NO: 84431):VPA:SPIS-AA¹⁷-LYI (SEQ ID NO: 84886):YKQYE (SEQ ID NO: 84398):VVE:SXGXR (SEQ ID NO: 84305), HVPKPXX (SEQ ID NO: 84421):VPA:SPIS-AA¹⁷-LYI (SEQ ID NO: 84886):YKQYE (SEQ ID NO: 84398):VVE:SXGXH (SEQ ID NO: 84304), RVPSTXX (SEQ ID NO: 84428):VPA:SPIS-AA¹⁷-LYI (SEQ ID NO: 84886):YKQYE (SEQ ID NO: 84398):VVE:XGXL (SEQ ID NO: 84122), ASAAPXX (SEQ ID NO: 84402):VPA:SPIS-AA¹⁷-LYI (SEQ ID NO: 84886):YKQYE (SEQ ID NO: 84398):VVE:XKXS (SEQ ID NO: 84124), ASASPXX (SEQ ID NO: 84403):VPA:SPIS-AA¹⁷-LYI (SEQ ID NO: 84886):YKQYE (SEQ ID NO: 84398):VVE:XKXS (SEQ ID NO: 84124), NDEGLEX (SEQ ID NO: 84426):VPA:SPIS-AA¹⁷-LYI (SEQ ID NO: 84886):YKQYE (SEQ ID NO: 84398):VVE:KXEXR (SEQ ID NO: 84213), NDEGLEX (SEQ ID NO: 84426):VPA:SPIS-AA¹⁷-LYI (SEQ ID NO: 84886):YKQYE (SEQ ID NO: 84398):VVE:QXEXR (SEQ ID NO: 84276), SSVKXQP (SEQ ID NO: 84430):VPA:SPIS-AA¹⁷-LYI (SEQ ID NO: 84886):YKQYE (SEQ ID NO: 84398):VVE:LEXAXA (SEQ ID NO: 84400), RNVQXRP (SEQ ID NO: 84427):VPA:SPIS-AA¹⁷-LYI (SEQ ID NO: 84886):YKQYE (SEQ ID NO: 84398):VVE:LAXKXE (SEQ ID NO: 84399), KIPKAXX (SEQ ID NO: 84424):VPT:SPIS-AA¹⁷-LYI (SEQ ID NO: 84886):YKQYE (SEQ ID NO: 84398):VVE:GXGXR (SEQ ID NO: 84208), GIPEPXX (SEQ ID NO: 84419):VPE:SPIS-AA¹⁷-LYI (SEQ ID NO: 84886):YKQYE (SEQ ID NO: 84398):TVE:SXAXR (SEQ ID NO: 84303), SIPKAXX (SEQ ID NO: 84429):VPT:SPIS-AA¹⁷-LYI (SEQ ID NO: 84886):YKQYE (SEQ ID NO: 84398):VVE:GXGXR (SEQ ID NO: 84208), HVTKPTX (SEQ ID NO: 84422):APT:SPIS-AA¹⁷-LYI (SEQ ID NO: 84886):YKQYE (SEQ ID NO: 84398):VVR:SXGXH (SEQ ID NO: 84304), YVPKPXX (SEQ ID NO: 84433):APT:SPIS-AA¹⁷-LYI (SEQ ID NO: 84886):YKQYE (SEQ ID NO: 84398):VVR:SXGXH (SEQ ID NO: 84304), TVPKPXX (SEQ ID NO: 84432):APT:SPIS-AA¹⁷-LYI (SEQ ID NO: 84886):YKQYE (SEQ ID NO: 84398):VVR:AXGXH (SEQ ID NO: 84147), AVPKAXX (SEQ ID NO: 84404):APT:SPIS-AA¹⁷-LYI (SEQ ID NO: 84886):YKQYE (SEQ ID NO: 84398):VVK:AXGXH (SEQ ID NO: 84147), KVGKAXX (SEQ ID NO: 84425):VPT:SPIS-AA¹⁷-LYI (SEQ ID NO: 84886):YKQYE (SEQ ID NO: 84398):VAE:XGXR (SEQ ID NO: 84123), KASKAXX (SEQ ID NO: 84423):VPT:SPIS-AA¹⁷-LYI (SEQ ID NO: 84886):YKQYE (SEQ ID NO: 84398):AVS:EXGXR (SEQ ID NO: 84179), GSAGPXX (SEQ ID NO: 84420):TPT:SPIS-AA¹⁷-LYI (SEQ ID NO: 84886):YKQYE (SEQ ID NO: 84398):VVD:RXGXS (SEQ ID NO: 84291), STPPTXX (SEQ ID NO: 84431):VPT:SPIS-AA¹⁷-LYI (SEQ ID NO: 84886):YKQYE (SEQ ID NO: 84398):VVE:SXGXR (SEQ ID NO: 84305), HVPKPXX (SEQ ID NO: 84421):APT:SPIS-AA¹⁷-LYI (SEQ ID NO: 84886):YKQYE (SEQ ID NO: 84398):VVR:SXGXH (SEQ ID NO: 84304), RVPSTXX (SEQ ID NO: 84428):APV:SPIS-AA¹⁷-LYI (SEQ ID NO: 84886):YKQYE (SEQ ID NO: 84398):VEE:XGXL (SEQ ID NO: 84122), ASAAPXX (SEQ ID NO: 84402):VPQ:SPIS-AA¹⁷-LYI (SEQ ID NO: 84886):YKQYE (SEQ ID NO: 84398):VRS:XKXS (SEQ ID NO: 84124), ASASPXX (SEQ ID NO: 84403):VSQ:SPIS-AA¹⁷-LYI (SEQ ID NO: 84886):YKQYE (SEQ ID NO: 84398):VKS:XKXS (SEQ ID NO: 84124), ASASPXX (SEQ ID NO: 84403):VPQ:SPIS-AA¹⁷-LYI (SEQ ID NO: 84886):YKQYE (SEQ ID NO: 84398):VKS:XKXS (SEQ ID NO: 84124), NDEGLEX (SEQ ID NO: 84426):VPT:SPIS-AA¹⁷-LYI (SEQ ID NO: 84886):YKQYE (SEQ ID NO: 84398):QHN:KXEXR (SEQ ID NO: 84213), NDEGLEX (SEQ ID NO: 84426):VPT:SPIS-AA¹⁷-LYI (SEQ ID NO: 84886):YKQYE (SEQ ID NO: 84398):EHS:QXEXR (SEQ ID NO: 84276), SSVKXQP (SEQ ID NO: 84430):SRV:SPIS-AA¹⁷-LYI (SEQ ID NO: 84886):YKQYE (SEQ ID NO: 84398):EEH:LEXAXA (SEQ ID NO: 84400), RNVQXRP (SEQ ID NO: 84427):TQV:SPIS-AA¹⁷-LYI (SEQ ID NO: 84886):YKQYE (SEQ ID NO: 84398):EDH:LAXKXE (SEQ ID NO: 84399), KIPKAXX (SEQ ID NO: 84424):VPT:SPIS-AA¹⁷-LFI (SEQ ID NO: 84885):YKQYE (SEQ ID NO: 84398):VVE:GXGXR (SEQ ID NO: 84208), GIPEPXX (SEQ ID NO: 84419):VPT:SPIS-AA¹⁷-LFI (SEQ ID NO: 84885):YKQYE (SEQ ID NO: 84398):VVE:SXAXR (SEQ ID NO: 84303), SIPKAXX (SEQ ID NO: 84429):VPT:SPIS-AA¹⁷-LFI (SEQ ID NO: 84885):YKQYE (SEQ ID NO: 84398):VVE:GXGXR (SEQ ID NO: 84208), HVTKPTX (SEQ ID NO: 84422):VPT:SPIS-AA¹⁷-LFI (SEQ ID NO: 84885):YKQYE (SEQ ID NO: 84398):VVE:SXGXH (SEQ ID NO: 84304), YVPKPXX (SEQ ID NO: 84433):VPT:SPIS-AA¹⁷-LFI (SEQ ID NO: 84885):YKQYE (SEQ ID NO: 84398):VVE:SXGXH (SEQ ID NO: 84304), TVPKPXX (SEQ ID NO: 84432):VPT:SPIS-AA¹⁷-LFI (SEQ ID NO: 84885):YKQYE (SEQ ID NO: 84398):VVE:AXGXH (SEQ ID NO: 84147), AVPKAXX (SEQ ID NO: 84404):VPT:SPIS-AA¹⁷-LFI (SEQ ID NO: 84885):YKQYE (SEQ ID NO: 84398):VVE:AXGXH (SEQ ID NO: 84147), KVGKAXX (SEQ ID NO: 84425):VPT:SPIS-AA¹⁷-LFI (SEQ ID NO: 84885):YKQYE (SEQ ID NO: 84398):VVE:XGXR (SEQ ID NO: 84123), KASKAXX (SEQ ID NO: 84423):VPT:SPIS-AA¹⁷-LFI (SEQ ID NO: 84885):YKQYE (SEQ ID NO: 84398):VVE:EXGXR (SEQ ID NO: 84179), GSAGPXX (SEQ ID NO: 84420):VPT:SPIS-AA¹⁷-LFI (SEQ ID NO: 84885):YKQYE (SEQ ID NO: 84398):VVE:RXGXS (SEQ ID NO: 84291), AAPASXX (SEQ ID NO: 84401):VPT:SPIS-AA¹⁷-LFI (SEQ ID NO: 84885):YKQYE (SEQ ID NO: 84398):VVE:AXGXR (SEQ ID NO: 84148), HVPKPXX (SEQ ID NO: 84421):VPT:SPIS-AA¹⁷-LFI (SEQ ID NO: 84885):YKQYE (SEQ ID NO: 84398):VVE:SXGXH (SEQ ID NO: 84304), RVPSTXX (SEQ ID NO: 84428):VPT:SPIS-AA¹⁷-LFI (SEQ ID NO: 84885):YKQYE (SEQ ID NO: 84398):VVE:XGXL (SEQ ID NO: 84122), ASAAPXX (SEQ ID NO: 84402):VPT:SPIS-AA¹⁷-LFI (SEQ ID NO: 84885):YKQYE (SEQ ID NO: 84398):VVE:XKXS (SEQ ID NO: 84124), ASASPXX (SEQ ID NO: 84403):VPT:SPIS-AA¹⁷-LFI (SEQ ID NO: 84885):YKQYE (SEQ ID NO: 84398):VVE:XKXS (SEQ ID NO: 84124), NDEGLEX (SEQ ID NO: 84426):VPT:SPIS-AA¹⁷-LFI (SEQ ID NO: 84885):YKQYE (SEQ ID NO: 84398):VVE:KXEXR (SEQ ID NO: 84213), NDEGLEX (SEQ ID NO: 84426):VPT:SPIS-AA¹⁷-LFI (SEQ ID NO: 84885):YKQYE (SEQ ID NO: 84398):VVE:QXEXR (SEQ ID NO: 84276), SSVKXQP (SEQ ID NO: 84430):VPT:SPIS-AA¹⁷-LFI (SEQ ID NO: 84885):YKQYE (SEQ ID NO: 84398):VVE:LEXAXA (SEQ ID NO: 84400), RNVQXRP (SEQ ID NO: 84427):VPT:SPIS-AA¹⁷-LFI (SEQ ID NO: 84885):YKQYE (SEQ ID NO: 84398):VVE:LAXKXE (SEQ ID NO: 84399), GIPEPXX (SEQ ID NO: 84419):VPE:SPIS-AA¹⁷-LFI (SEQ ID NO: 84885):YKQYE (SEQ ID NO: 84398):TVE:SXAXR (SEQ ID NO: 84303), HVTKPTX (SEQ ID NO: 84422):APT:SPIS-AA¹⁷-LFI (SEQ ID NO: 84885):YKQYE (SEQ ID NO: 84398):VVR:SXGXH (SEQ ID NO: 84304), YVPKPXX (SEQ ID NO: 84433):APT:SPIS-AA¹⁷-LFI (SEQ ID NO: 84885):YKQYE (SEQ ID NO: 84398):VVR:SXGXH (SEQ ID NO: 84304), TVPKPXX (SEQ ID NO: 84432):APT:SPIS-AA¹⁷-LFI (SEQ ID NO: 84885):YKQYE (SEQ ID NO: 84398):VVR:AXGXH (SEQ ID NO: 84147), AVPKAXX (SEQ ID NO: 84404):APT:SPIS-AA¹⁷-LFI (SEQ ID NO: 84885):YKQYE (SEQ ID NO: 84398):VVK:AXGXH (SEQ ID NO: 84147), KVGKAXX (SEQ ID NO: 84425):VPT:SPIS-AA¹⁷-LFI (SEQ ID NO: 84885):YKQYE (SEQ ID NO: 84398):VAE:XGXR (SEQ ID NO: 84123), KASKAXX (SEQ ID NO: 84423):VPT:SPIS-AA¹⁷-LFI (SEQ ID NO: 84885):YKQYE (SEQ ID NO: 84398):AVS:EXGXR (SEQ ID NO: 84179), GSAGPXX (SEQ ID NO: 84420):TPT:SPIS-AA¹⁷-LFI (SEQ ID NO: 84885):YKQYE (SEQ ID NO: 84398):VVD:RXGXS (SEQ ID NO: 84291), AAPASXX (SEQ ID NO: 84401):VPA:SPIS-AA¹⁷-LFI (SEQ ID NO: 84885):YKQYE (SEQ ID NO: 84398):VVE:AXGXR (SEQ ID NO: 84148), HVPKPXX (SEQ ID NO: 84421):APT:SPIS-AA¹⁷-LFI (SEQ ID NO: 84885):YKQYE (SEQ ID NO: 84398):VVR:SXGXH (SEQ ID NO: 84304), RVPSTXX (SEQ ID NO: 84428):APV:SPIS-AA¹⁷-LFI (SEQ ID NO: 84885):YKQYE (SEQ ID NO: 84398):VEE:XGXL (SEQ ID NO: 84122), ASAAPXX (SEQ ID NO: 84402):VPQ:SPIS-AA¹⁷-LFI (SEQ ID NO: 84885):YKQYE (SEQ ID NO: 84398):VRS:XKXS (SEQ ID NO: 84124), ASASPXX (SEQ ID NO: 84403):VSQ:SPIS-AA¹⁷-LFI (SEQ ID NO: 84885):YKQYE (SEQ ID NO: 84398):VKS:XKXS (SEQ ID NO: 84124), ASASPXX (SEQ ID NO: 84403):VPQ:SPIS-AA¹⁷-LFI (SEQ ID NO: 84885):YKQYE (SEQ ID NO: 84398):VKS:XKXS (SEQ ID NO: 84124), NDEGLEX (SEQ ID NO: 84426):VPT:SPIS-AA¹⁷-LFI (SEQ ID NO: 84885):YKQYE (SEQ ID NO: 84398):QHN:KXEXR (SEQ ID NO: 84213), NDEGLEX (SEQ ID NO: 84426):VPT:SPIS-AA¹⁷-LFI (SEQ ID NO: 84885):YKQYE (SEQ ID NO: 84398):EHS:QXEXR (SEQ ID NO: 84276), SSVKXQP (SEQ ID NO: 84430):SRV:SPIS-AA¹⁷-LFI (SEQ ID NO: 84885):YKQYE (SEQ ID NO: 84398):EEH:LEXAXA (SEQ ID NO: 84400), RNVQXRP (SEQ ID NO: 84427):TQV:SPIS-AA¹⁷-LFI (SEQ ID NO: 84885):YKQYE (SEQ ID NO: 84398):EDH:LAXKXE (SEQ ID NO: 84399), KIPKAXX (SEQ ID NO: 84424):APV:KPLS-AA¹⁷-LYV (SEQ ID NO: 84877):DHHKD (SEQ ID NO: 84149):VEE:GXGXR (SEQ ID NO: 84208), GIPEPXX (SEQ ID NO: 84419):APV:KPLS-AA¹⁷-LYV (SEQ ID NO: 84877):DHHKD (SEQ ID NO: 84149):VEE:SXAXR (SEQ ID NO: 84303), SIPKAXX (SEQ ID NO: 84429):APV:KPLS-AA¹⁷-LYV (SEQ ID NO: 84877):DHHKD (SEQ ID NO: 84149):VEE:GXGXR (SEQ ID NO: 84208), HVTKPTX (SEQ ID NO: 84422):APV:KPLS-AA¹⁷-LYV (SEQ ID NO: 84877):DHHKD (SEQ ID NO: 84149):VEE:SXGXH (SEQ ID NO: 84304), YVPKPXX (SEQ ID NO: 84433):APV:KPLS-AA¹⁷-LYV (SEQ ID NO: 84877):DHHKD (SEQ ID NO: 84149):VEE:SXGXH (SEQ ID NO: 84304), TVPKPXX (SEQ ID NO: 84432):APV:KPLS-AA¹⁷-LYV (SEQ ID NO: 84877):DHHKD (SEQ ID NO: 84149):VEE:AXGXH (SEQ ID NO: 84147), AVPKAXX (SEQ ID NO: 84404):APV:KPLS-AA¹⁷-LYV (SEQ ID NO: 84877):DHHKD (SEQ ID NO: 84149):VEE:AXGXH (SEQ ID NO: 84147), KVGKAXX (SEQ ID NO: 84425):APV:KPLS-AA¹⁷-LYV (SEQ ID NO: 84877):DHHKD (SEQ ID NO: 84149):VEE:XGXR (SEQ ID NO: 84123), KASKAXX (SEQ ID NO: 84423):APV:KPLS-AA¹⁷-LYV (SEQ ID NO: 84877):DHHKD (SEQ ID NO: 84149):VEE:EXGXR (SEQ ID NO: 84179), GSAGPXX (SEQ ID NO: 84420):APV:KPLS-AA¹⁷-LYV (SEQ ID NO: 84877):DHHKD (SEQ ID NO: 84149):VEE:RXGXS (SEQ ID NO: 84291), AAPASXX (SEQ ID NO: 84401):APV:KPLS-AA¹⁷-LYV (SEQ ID NO: 84877):DHHKD (SEQ ID NO: 84149):VEE:AXGXR (SEQ ID NO: 84148), STPPTXX (SEQ ID NO: 84431):APV:KPLS-AA¹⁷-LYV (SEQ ID NO: 84877):DHHKD (SEQ ID NO: 84149):VEE:SXGXR (SEQ ID NO: 84305), HVPKPXX (SEQ ID NO: 84421):APV:KPLS-AA¹⁷-LYV (SEQ ID NO: 84877):DHHKD (SEQ ID NO: 84149):VEE:SXGXH (SEQ ID NO: 84304), ASAAPXX (SEQ ID NO: 84402):APV:KPLS-AA¹⁷-LYV (SEQ ID NO: 84877):DHHKD (SEQ ID NO: 84149):VEE:XKXS (SEQ ID NO: 84124), ASASPXX (SEQ ID NO: 84403):APV:KPLS-AA¹⁷-LYV (SEQ ID NO: 84877):DHHKD (SEQ ID NO: 84149):VEE:XKXS (SEQ ID NO: 84124), NDEGLEX (SEQ ID NO: 84426):APV:KPLS-AA¹⁷-LYV (SEQ ID NO: 84877):DHHKD (SEQ ID NO: 84149):VEE:KXEXR (SEQ ID NO: 84213), NDEGLEX (SEQ ID NO: 84426):APV:KPLS-AA¹⁷-LYV (SEQ ID NO: 84877):DHHKD (SEQ ID NO: 84149):VEE:QXEXR (SEQ ID NO: 84276), SSVKXQP (SEQ ID NO: 84430):APV:KPLS-AA¹⁷-LYV (SEQ ID NO: 84877):DHHKD (SEQ ID NO: 84149):VEE:LEXAXA (SEQ ID NO: 84400), RNVQXRP (SEQ ID NO: 84427):APV:KPLS-AA¹⁷-LYV (SEQ ID NO: 84877):DHHKD (SEQ ID NO: 84149):VEE:LAXKXE (SEQ ID NO: 84399), KIPKAXX (SEQ ID NO: 84424):VPT:KPLS-AA¹⁷-LYV (SEQ ID NO: 84877):DHHKD (SEQ ID NO: 84149):VVE:GXGXR (SEQ ID NO: 84208), GIPEPXX (SEQ ID NO: 84419):VPE:KPLS-AA¹⁷-LYV (SEQ ID NO: 84877):DHHKD (SEQ ID NO: 84149):TVE:SXAXR (SEQ ID NO: 84303), SIPKAXX (SEQ ID NO: 84429):VPT:KPLS-AA¹⁷-LYV (SEQ ID NO: 84877):DHHKD (SEQ ID NO: 84149):VVE:GXGXR (SEQ ID NO: 84208), HVTKPTX (SEQ ID NO: 84422):APT:KPLS-AA¹⁷-LYV (SEQ ID NO: 84877):DHHKD (SEQ ID NO: 84149):VVR:SXGXH (SEQ ID NO: 84304), YVPKPXX (SEQ ID NO: 84433):APT:KPLS-AA¹⁷-LYV (SEQ ID NO: 84877):DHHKD (SEQ ID NO: 84149):VVR:SXGXH (SEQ ID NO: 84304), TVPKPXX (SEQ ID NO: 84432):APT:KPLS-AA¹⁷-LYV (SEQ ID NO: 84877):DHHKD (SEQ ID NO: 84149):VVR:AXGXH (SEQ ID NO: 84147), AVPKAXX (SEQ ID NO: 84404):APT:KPLS-AA¹⁷-LYV (SEQ ID NO: 84877):DHHKD (SEQ ID NO: 84149):VVK:AXGXH (SEQ ID NO: 84147), KVGKAXX (SEQ ID NO: 84425):VPT:KPLS-AA¹⁷-LYV (SEQ ID NO: 84877):DHHKD (SEQ ID NO: 84149):VAE:XGXR (SEQ ID NO: 84123), KASKAXX (SEQ ID NO: 84423):VPT:KPLS-AA¹⁷-LYV (SEQ ID NO: 84877):DHHKD (SEQ ID NO: 84149):AVS:EXGXR (SEQ ID NO: 84179), GSAGPXX (SEQ ID NO: 84420):TPT:KPLS-AA¹⁷-LYV (SEQ ID NO: 84877):DHHKD (SEQ ID NO: 84149):VVD:RXGXS (SEQ ID NO: 84291), AAPASXX (SEQ ID NO: 84401):VPA:KPLS-AA¹⁷-LYV (SEQ ID NO: 84877):DHHKD (SEQ ID NO: 84149):VVE:AXGXR (SEQ ID NO: 84148), STPPTXX (SEQ ID NO: 84431):VPT:KPLS-AA¹⁷-LYV (SEQ ID NO: 84877):DHHKD (SEQ ID NO: 84149):VVE:SXGXR (SEQ ID NO: 84305), HVPKPXX (SEQ ID NO: 84421):APT:KPLS-AA¹⁷-LYV (SEQ ID NO: 84877):DHHKD (SEQ ID NO: 84149):VVR:SXGXH (SEQ ID NO: 84304), ASAAPXX (SEQ ID NO: 84402):VPQ:KPLS-AA¹⁷-LYV (SEQ ID NO: 84877):DHHKD (SEQ ID NO: 84149):VRS:XKXS (SEQ ID NO: 84124), ASASPXX (SEQ ID NO: 84403):VSQ:KPLS-AA¹⁷-LYV (SEQ ID NO: 84877):DHHKD (SEQ ID NO: 84149):VKS:XKXS (SEQ ID NO: 84124), ASASPXX (SEQ ID NO: 84403):VPQ:KPLS-AA¹⁷-LYV (SEQ ID NO: 84877):DHHKD (SEQ ID NO: 84149):VKS:XKXS (SEQ ID NO: 84124), NDEGLEX (SEQ ID NO: 84426):VPT:KPLS-AA¹⁷-LYV (SEQ ID NO: 84877):DHHKD (SEQ ID NO: 84149):QHN:KXEXR (SEQ ID NO: 84213), NDEGLEX (SEQ ID NO: 84426):VPT:KPLS-AA¹⁷-LYV (SEQ ID NO: 84877):DHHKD (SEQ ID NO: 84149):EHS:QXEXR (SEQ ID NO: 84276), SSVKXQP (SEQ ID NO: 84430):SRV:KPLS-AA¹⁷-LYV (SEQ ID NO: 84877):DHHKD (SEQ ID NO: 84149):EEH:LEXAXA (SEQ ID NO: 84400), RNVQXRP (SEQ ID NO: 84427):TQV:KPLS-AA¹⁷-LYV (SEQ ID NO: 84877):DHHKD (SEQ ID NO: 84149):EDH:LAXKXE (SEQ ID NO: 84399), KIPKAXX (SEQ ID NO: 84424):VPQ:EPLP-AA¹⁷-VYY (SEQ ID NO: 84875):EQLSN (SEQ ID NO: 84178):VRS:GXGXR (SEQ ID NO: 84208), GIPEPXX (SEQ ID NO: 84419):VPQ:EPLP-AA¹⁷-VYY (SEQ ID NO: 84875):EQLSN (SEQ ID NO: 84178):VRS:SXAXR (SEQ ID NO: 84303), SIPKAXX (SEQ ID NO: 84429):VPQ:EPLP-AA¹⁷-VYY (SEQ ID NO: 84875):EQLSN (SEQ ID NO: 84178):VRS:GXGXR (SEQ ID NO: 84208), HVTKPTX (SEQ ID NO: 84422):VPQ:EPLP-AA¹⁷-VYY (SEQ ID NO: 84875):EQLSN (SEQ ID NO: 84178):VRS:SXGXH (SEQ ID NO: 84304), YVPKPXX (SEQ ID NO: 84433):VPQ:EPLP-AA¹⁷-VYY (SEQ ID NO: 84875):EQLSN (SEQ ID NO: 84178):VRS:SXGXH (SEQ ID NO: 84304), TVPKPXX (SEQ ID NO: 84432):VPQ:EPLP-AA¹⁷-VYY (SEQ ID NO: 84875):EQLSN (SEQ ID NO: 84178):VRS:AXGXH (SEQ ID NO: 84147), AVPKAXX (SEQ ID NO: 84404):VPQ:EPLP-AA¹⁷-VYY (SEQ ID NO: 84875):EQLSN (SEQ ID NO: 84178):VRS:AXGXH (SEQ ID NO: 84147), KVGKAXX (SEQ ID NO: 84425):VPQ:EPLP-AA¹⁷-VYY (SEQ ID NO: 84875):EQLSN (SEQ ID NO: 84178):VRS:XGXR (SEQ ID NO: 84123), KASKAXX (SEQ ID NO: 84423):VPQ:EPLP-AA¹⁷-VYY (SEQ ID NO: 84875):EQLSN (SEQ ID NO: 84178):VRS:EXGXR (SEQ ID NO: 84179), GSAGPXX (SEQ ID NO: 84420):VPQ:EPLP-AA¹⁷-VYY (SEQ ID NO: 84875):EQLSN (SEQ ID NO: 84178):VRS:RXGXS (SEQ ID NO: 84291), AAPASXX (SEQ ID NO: 84401):VPQ:EPLP-AA¹⁷-VYY (SEQ ID NO: 84875):EQLSN (SEQ ID NO: 84178):VRS:AXGXR (SEQ ID NO: 84148), STPPTXX (SEQ ID NO: 84431):VPQ:EPLP-AA¹⁷-VYY (SEQ ID NO: 84875):EQLSN (SEQ ID NO: 84178):VRS:SXGXR (SEQ ID NO: 84305), HVPKPXX (SEQ ID NO: 84421):VPQ:EPLP-AA¹⁷-VYY (SEQ ID NO: 84875):EQLSN (SEQ ID NO: 84178):VRS:SXGXH (SEQ ID NO: 84304), RVPSTXX (SEQ ID NO: 84428):VPQ:EPLP-AA¹⁷-VYY (SEQ ID NO: 84875):EQLSN (SEQ ID NO: 84178):VRS:XGXL (SEQ ID NO: 84122), ASASPXX (SEQ ID NO: 84403):VPQ:EPLP-AA¹⁷-VYY (SEQ ID NO: 84875):EQLSN (SEQ ID NO: 84178):VRS:XKXS (SEQ ID NO: 84124), NDEGLEX (SEQ ID NO: 84426):VPQ:EPLP-AA¹⁷-VYY (SEQ ID NO: 84875):EQLSN (SEQ ID NO: 84178):VRS:KXEXR (SEQ ID NO: 84213), NDEGLEX (SEQ ID NO: 84426):VPQ:EPLP-AA¹⁷-VYY (SEQ ID NO: 84875):EQLSN (SEQ ID NO: 84178):VRS:QXEXR (SEQ ID NO: 84276), SSVKXQP (SEQ ID NO: 84430):VPQ:EPLP-AA¹⁷-VYY (SEQ ID NO: 84875):EQLSN (SEQ ID NO: 84178):VRS:LEXAXA (SEQ ID NO: 84400), RNVQXRP (SEQ ID NO: 84427):VPQ:EPLP-AA¹⁷-VYY (SEQ ID NO: 84875):EQLSN (SEQ ID NO: 84178):VRS:LAXKXE (SEQ ID NO: 84399), KIPKAXX (SEQ ID NO: 84424):VPT:EPLP-AA¹⁷-VYY (SEQ ID NO: 84875):EQLSN (SEQ ID NO: 84178):VVE:GXGXR (SEQ ID NO: 84208), GIPEPXX (SEQ ID NO: 84419):VPE:EPLP-AA¹⁷-VYY (SEQ ID NO: 84875):EQLSN (SEQ ID NO: 84178):TVE:SXAXR (SEQ ID NO: 84303), SIPKAXX (SEQ ID NO: 84429):VPT:EPLP-AA¹⁷-VYY (SEQ ID NO: 84875):EQLSN (SEQ ID NO: 84178):VVE:GXGXR (SEQ ID NO: 84208), HVTKPTX (SEQ ID NO: 84422):APT:EPLP-AA¹⁷-VYY (SEQ ID NO: 84875):EQLSN (SEQ ID NO: 84178):VVR:SXGXH (SEQ ID NO: 84304), YVPKPXX (SEQ ID NO: 84433):APT:EPLP-AA¹⁷-VYY (SEQ ID NO: 84875):EQLSN (SEQ ID NO: 84178):VVR:SXGXH (SEQ ID NO: 84304), TVPKPXX (SEQ ID NO: 84432):APT:EPLP-AA¹⁷-VYY (SEQ ID NO: 84875):EQLSN (SEQ ID NO: 84178):VVR:AXGXH (SEQ ID NO: 84147), AVPKAXX (SEQ ID NO: 84404):APT:EPLP-AA¹⁷-VYY (SEQ ID NO: 84875):EQLSN (SEQ ID NO: 84178):VVK:AXGXH (SEQ ID NO: 84147), KVGKAXX (SEQ ID NO: 84425):VPT:EPLP-AA¹⁷-VYY (SEQ ID NO: 84875):EQLSN (SEQ ID NO: 84178):VAE:XGXR (SEQ ID NO: 84123), KASKAXX (SEQ ID NO: 84423):VPT:EPLP-AA¹⁷-VYY (SEQ ID NO: 84875):EQLSN (SEQ ID NO: 84178):AVS:EXGXR (SEQ ID NO: 84179), GSAGPXX (SEQ ID NO: 84420):TPT:EPLP-AA¹⁷-VYY (SEQ ID NO: 84875):EQLSN (SEQ ID NO: 84178):VVD:RXGXS (SEQ ID NO: 84291), AAPASXX (SEQ ID NO: 84401):VPA:EPLP-AA¹⁷-VYY (SEQ ID NO: 84875):EQLSN (SEQ ID NO: 84178):VVE:AXGXR (SEQ ID NO: 84148), STPPTXX (SEQ ID NO: 84431):VPT:EPLP-AA¹⁷-VYY (SEQ ID NO: 84875):EQLSN (SEQ ID NO: 84178):VVE:SXGXR (SEQ ID NO: 84305), HVPKPXX (SEQ ID NO: 84421):APT:EPLP-AA¹⁷-VYY (SEQ ID NO: 84875):EQLSN (SEQ ID NO: 84178):VVR:SXGXH (SEQ ID NO: 84304), RVPSTXX (SEQ ID NO: 84428):APV:EPLP-AA¹⁷-VYY (SEQ ID NO: 84875):EQLSN (SEQ ID NO: 84178):VEE:XGXL (SEQ ID NO: 84122), ASASPXX (SEQ ID NO: 84403):VSQ:EPLP-AA¹⁷-VYY (SEQ ID NO: 84875):EQLSN (SEQ ID NO: 84178):VKS:XKXS (SEQ ID NO: 84124), ASASPXX (SEQ ID NO: 84403):VPQ:EPLP-AA¹⁷-VYY (SEQ ID NO: 84875):EQLSN (SEQ ID NO: 84178):VKS:XKXS (SEQ ID NO: 84124), NDEGLEX (SEQ ID NO: 84426):VPT:EPLP-AA¹⁷-VYY (SEQ ID NO: 84875):EQLSN (SEQ ID NO: 84178):QHN:KXEXR (SEQ ID NO: 84213), NDEGLEX (SEQ ID NO: 84426):VPT:EPLP-AA¹⁷-VYY (SEQ ID NO: 84875):EQLSN (SEQ ID NO: 84178):EHS:QXEXR (SEQ ID NO: 84276), SSVKXQP (SEQ ID NO: 84430):SRV:EPLP-AA¹⁷-VYY (SEQ ID NO: 84875):EQLSN (SEQ ID NO: 84178):EEH:LEXAXA (SEQ ID NO: 84400), RNVQXRP (SEQ ID NO: 84427):TQV:EPLP-AA¹⁷-VYY (SEQ ID NO: 84875):EQLSN (SEQ ID NO: 84178):EDH:LAXKXE (SEQ ID NO: 84399), KIPKAXX (SEQ ID NO: 84424):VSQ:EPLT-AA¹⁷-LYY (SEQ ID NO: 84876):EQLSN (SEQ ID NO: 84178):VKS:GXGXR (SEQ ID NO: 84208), GIPEPXX (SEQ ID NO: 84419):VSQ:EPLT-AA¹⁷-LYY (SEQ ID NO: 84876):EQLSN (SEQ ID NO: 84178):VKS:SXAXR (SEQ ID NO: 84303), SIPKAXX (SEQ ID NO: 84429):VSQ:EPLT-AA¹⁷-LYY (SEQ ID NO: 84876):EQLSN (SEQ ID NO: 84178):VKS:GXGXR (SEQ ID NO: 84208), HVTKPTX (SEQ ID NO: 84422):VSQ:EPLT-AA¹⁷-LYY (SEQ ID NO: 84876):EQLSN (SEQ ID NO: 84178):VKS:SXGXH (SEQ ID NO: 84304), YVPKPXX (SEQ ID NO: 84433):VSQ:EPLT-AA¹⁷-LYY (SEQ ID NO: 84876):EQLSN (SEQ ID NO: 84178):VKS:SXGXH (SEQ ID NO: 84304), TVPKPXX (SEQ ID NO: 84432):VSQ:EPLT-AA¹⁷-LYY (SEQ ID NO: 84876):EQLSN (SEQ ID NO: 84178):VKS:AXGXH (SEQ ID NO: 84147), AVPKAXX (SEQ ID NO: 84404):VSQ:EPLT-AA¹⁷-LYY (SEQ ID NO: 84876):EQLSN (SEQ ID NO: 84178):VKS:AXGXH (SEQ ID NO: 84147), KVGKAXX (SEQ ID NO: 84425):VSQ:EPLT-AA¹⁷-LYY (SEQ ID NO: 84876):EQLSN (SEQ ID NO: 84178):VKS:XGXR (SEQ ID NO: 84123), KASKAXX (SEQ ID NO: 84423):VSQ:EPLT-AA¹⁷-LYY (SEQ ID NO: 84876):EQLSN (SEQ ID NO: 84178):VKS:EXGXR (SEQ ID NO: 84179), GSAGPXX (SEQ ID NO: 84420):VSQ:EPLT-AA¹⁷-LYY (SEQ ID NO: 84876):EQLSN (SEQ ID NO: 84178):VKS:RXGXS (SEQ ID NO: 84291), AAPASXX (SEQ ID NO: 84401):VSQ:EPLT-AA¹⁷-LYY (SEQ ID NO: 84876):EQLSN (SEQ ID NO: 84178):VKS:AXGXR (SEQ ID NO: 84148), STPPTXX (SEQ ID NO: 84431):VSQ:EPLT-AA¹⁷-LYY (SEQ ID NO: 84876):EQLSN (SEQ ID NO: 84178):VKS:SXGXR (SEQ ID NO: 84305), HVPKPXX (SEQ ID NO: 84421):VSQ:EPLT-AA¹⁷-LYY (SEQ ID NO: 84876):EQLSN (SEQ ID NO: 84178):VKS:SXGXH (SEQ ID NO: 84304), RVPSTXX (SEQ ID NO: 84428):VSQ:EPLT-AA¹⁷-LYY (SEQ ID NO: 84876):EQLSN (SEQ ID NO: 84178):VKS:XGXL (SEQ ID NO: 84122), ASAAPXX (SEQ ID NO: 84402):VSQ:EPLT-AA¹⁷-LYY (SEQ ID NO: 84876):EQLSN (SEQ ID NO: 84178):VKS:XKXS (SEQ ID NO: 84124), ASASPXX (SEQ ID NO: 84403):VSQ:EPLT-AA¹⁷-LYY (SEQ ID NO: 84876):EQLSN (SEQ ID NO: 84178):VKS:XKXS (SEQ ID NO: 84124), NDEGLEX (SEQ ID NO: 84426):VSQ:EPLT-AA¹⁷-LYY (SEQ ID NO: 84876):EQLSN (SEQ ID NO: 84178):VKS:KXEXR (SEQ ID NO: 84213), NDEGLEX (SEQ ID NO: 84426):VSQ:EPLT-AA¹⁷-LYY (SEQ ID NO: 84876):EQLSN (SEQ ID NO: 84178):VKS:QXEXR (SEQ ID NO: 84276), SSVKXQP (SEQ ID NO: 84430):VSQ:EPLT-AA¹⁷-LYY (SEQ ID NO: 84876):EQLSN (SEQ ID NO: 84178):VKS:LEXAXA (SEQ ID NO: 84400), RNVQXRP (SEQ ID NO: 84427):VSQ:EPLT-AA¹⁷-LYY (SEQ ID NO: 84876):EQLSN (SEQ ID NO: 84178):VKS:LAXKXE (SEQ ID NO: 84399), KIPKAXX (SEQ ID NO: 84424):VPT:EPLT-AA¹⁷-LYY (SEQ ID NO: 84876):EQLSN (SEQ ID NO: 84178):VVE:GXGXR (SEQ ID NO: 84208), GIPEPXX (SEQ ID NO: 84419):VPE:EPLT-AA¹⁷-LYY (SEQ ID NO: 84876):EQLSN (SEQ ID NO: 84178):TVE:SXAXR (SEQ ID NO: 84303), SIPKAXX (SEQ ID NO: 84429):VPT:EPLT-AA¹⁷-LYY (SEQ ID NO: 84876):EQLSN (SEQ ID NO: 84178):VVE:GXGXR (SEQ ID NO: 84208), HVTKPTX (SEQ ID NO: 84422):APT:EPLT-AA¹⁷-LYY (SEQ ID NO: 84876):EQLSN (SEQ ID NO: 84178):VVR:SXGXH (SEQ ID NO: 84304), YVPKPXX (SEQ ID NO: 84433):APT:EPLT-AA¹⁷-LYY (SEQ ID NO: 84876):EQLSN (SEQ ID NO: 84178):VVR:SXGXH (SEQ ID NO: 84304), TVPKPXX (SEQ ID NO: 84432):APT:EPLT-AA¹⁷-LYY (SEQ ID NO: 84876):EQLSN (SEQ ID NO: 84178):VVR:AXGXH (SEQ ID NO: 84147), AVPKAXX (SEQ ID NO: 84404):APT:EPLT-AA¹⁷-LYY (SEQ ID NO: 84876):EQLSN (SEQ ID NO: 84178):VVK:AXGXH (SEQ ID NO: 84147), KVGKAXX (SEQ ID NO: 84425):VPT:EPLT-AA¹⁷-LYY (SEQ ID NO: 84876):EQLSN (SEQ ID NO: 84178):VAE:XGXR (SEQ ID NO: 84123), KASKAXX (SEQ ID NO: 84423):VPT:EPLT-AA¹⁷-LYY (SEQ ID NO: 84876):EQLSN (SEQ ID NO: 84178):AVS:EXGXR (SEQ ID NO: 84179), GSAGPXX (SEQ ID NO: 84420):TPT:EPLT-AA¹⁷-LYY (SEQ ID NO: 84876):EQLSN (SEQ ID NO: 84178):VVD:RXGXS (SEQ ID NO: 84291), AAPASXX (SEQ ID NO: 84401):VPA:EPLT-AA¹⁷-LYY (SEQ ID NO: 84876):EQLSN (SEQ ID NO: 84178):VVE:AXGXR (SEQ ID NO: 84148), STPPTXX (SEQ ID NO: 84431):VPT:EPLT-AA¹⁷-LYY (SEQ ID NO: 84876):EQLSN (SEQ ID NO: 84178):VVE:SXGXR (SEQ ID NO: 84305), HVPKPXX (SEQ ID NO: 84421):APT:EPLT-AA¹⁷-LYY (SEQ ID NO: 84876):EQLSN (SEQ ID NO: 84178):VVR:SXGXH (SEQ ID NO: 84304), RVPSTXX (SEQ ID NO: 84428):APV:EPLT-AA¹⁷-LYY (SEQ ID NO: 84876):EQLSN (SEQ ID NO: 84178):VEE:XGXL (SEQ ID NO: 84122), ASAAPXX (SEQ ID NO: 84402):VPQ:EPLT-AA¹⁷-LYY (SEQ ID NO: 84876):EQLSN (SEQ ID NO: 84178):VRS:XKXS (SEQ ID NO: 84124), ASASPXX (SEQ ID NO: 84403):VPQ:EPLT-AA¹⁷-LYY (SEQ ID NO: 84876):EQLSN (SEQ ID NO: 84178):VKS:XKXS (SEQ ID NO: 84124), NDEGLEX (SEQ ID NO: 84426):VPT:EPLT-AA¹⁷-LYY (SEQ ID NO: 84876):EQLSN (SEQ ID NO: 84178):QHN:KXEXR (SEQ ID NO: 84213), NDEGLEX (SEQ ID NO: 84426):VPT:EPLT-AA¹⁷-LYY (SEQ ID NO: 84876):EQLSN (SEQ ID NO: 84178):EHS:QXEXR (SEQ ID NO: 84276), SSVKXQP (SEQ ID NO: 84430):SRV:EPLT-AA¹⁷-LYY (SEQ ID NO: 84876):EQLSN (SEQ ID NO: 84178):EEH:LEXAXA (SEQ ID NO: 84400), RNVQXRP (SEQ ID NO: 84427):TQV:EPLT-AA¹⁷-LYY (SEQ ID NO: 84876):EQLSN (SEQ ID NO: 84178):EDH:LAXKXE (SEQ ID NO: 84399), KIPKAXX (SEQ ID NO: 84424):VPQ:EPLT-AA¹⁷-LYY (SEQ ID NO: 84876):EQLSN (SEQ ID NO: 84178):VKS:GXGXR (SEQ ID NO: 84208), GIPEPXX (SEQ ID NO: 84419):VPQ:EPLT-AA¹⁷-LYY (SEQ ID NO: 84876):EQLSN (SEQ ID NO: 84178):VKS:SXAXR (SEQ ID NO: 84303), SIPKAXX (SEQ ID NO: 84429):VPQ:EPLT-AA¹⁷-LYY (SEQ ID NO: 84876):EQLSN (SEQ ID NO: 84178):VKS:GXGXR (SEQ ID NO: 84208), HVTKPTX (SEQ ID NO: 84422):VPQ:EPLT-AA¹⁷-LYY (SEQ ID NO: 84876):EQLSN (SEQ ID NO: 84178):VKS:SXGXH (SEQ ID NO: 84304), YVPKPXX (SEQ ID NO: 84433):VPQ:EPLT-AA¹⁷-LYY (SEQ ID NO: 84876):EQLSN (SEQ ID NO: 84178):VKS:SXGXH (SEQ ID NO: 84304), TVPKPXX (SEQ ID NO: 84432):VPQ:EPLT-AA¹⁷-LYY (SEQ ID NO: 84876):EQLSN (SEQ ID NO: 84178):VKS:AXGXH (SEQ ID NO: 84147), AVPKAXX (SEQ ID NO: 84404):VPQ:EPLT-AA¹⁷-LYY (SEQ ID NO: 84876):EQLSN (SEQ ID NO: 84178):VKS:AXGXH (SEQ ID NO: 84147), KVGKAXX (SEQ ID NO: 84425):VPQ:EPLT-AA¹⁷-LYY (SEQ ID NO: 84876):EQLSN (SEQ ID NO: 84178):VKS:XGXR (SEQ ID NO: 84123), KASKAXX (SEQ ID NO: 84423):VPQ:EPLT-AA¹⁷-LYY (SEQ ID NO: 84876):EQLSN (SEQ ID NO: 84178):VKS:EXGXR (SEQ ID NO: 84179), GSAGPXX (SEQ ID NO: 84420):VPQ:EPLT-AA¹⁷-LYY (SEQ ID NO: 84876):EQLSN (SEQ ID NO: 84178):VKS:RXGXS (SEQ ID NO: 84291), AAPASXX (SEQ ID NO: 84401):VPQ:EPLT-AA¹⁷-LYY (SEQ ID NO: 84876):EQLSN (SEQ ID NO: 84178):VKS:AXGXR (SEQ ID NO: 84148), STPPTXX (SEQ ID NO: 84431):VPQ:EPLT-AA¹⁷-LYY (SEQ ID NO: 84876):EQLSN (SEQ ID NO: 84178):VKS:SXGXR (SEQ ID NO: 84305), HVPKPXX (SEQ ID NO: 84421):VPQ:EPLT-AA¹⁷-LYY (SEQ ID NO: 84876):EQLSN (SEQ ID NO: 84178):VKS:SXGXH (SEQ ID NO: 84304), RVPSTXX (SEQ ID NO: 84428):VPQ:EPLT-AA¹⁷-LYY (SEQ ID NO: 84876):EQLSN (SEQ ID NO: 84178):VKS:XGXL (SEQ ID NO: 84122), ASAAPXX (SEQ ID NO: 84402):VPQ:EPLT-AA¹⁷-LYY (SEQ ID NO: 84876):EQLSN (SEQ ID NO: 84178):VKS:XKXS (SEQ ID NO: 84124), NDEGLEX (SEQ ID NO: 84426):VPQ:EPLT-AA¹⁷-LYY (SEQ ID NO: 84876):EQLSN (SEQ ID NO: 84178):VKS:KXEXR (SEQ ID NO: 84213), NDEGLEX (SEQ ID NO: 84426):VPQ:EPLT-AA¹⁷-LYY (SEQ ID NO: 84876):EQLSN (SEQ ID NO: 84178):VKS:QXEXR (SEQ ID NO: 84276), SSVKXQP (SEQ ID NO: 84430):VPQ:EPLT-AA¹⁷-LYY (SEQ ID NO: 84876):EQLSN (SEQ ID NO: 84178):VKS:LEXAXA (SEQ ID NO: 84400), RNVQXRP (SEQ ID NO: 84427):VPQ:EPLT-AA¹⁷-LYY (SEQ ID NO: 84876):EQLSN (SEQ ID NO: 84178):VKS:LAXKXE (SEQ ID NO: 84399), KIPKAXX (SEQ ID NO: 84424):VPT:SNIT-AA¹⁷-QIM (SEQ ID NO: 84883):IGEMS (SEQ ID NO: 84209):QHN:GXGXR (SEQ ID NO: 84208), GIPEPXX (SEQ ID NO: 84419):VPT:SNIT-AA¹⁷-QIM (SEQ ID NO: 84883):IGEMS (SEQ ID NO: 84209):QHN:SXAXR (SEQ ID NO: 84303), SIPKAXX (SEQ ID NO: 84429):VPT:SNIT-AA¹⁷-QIM (SEQ ID NO: 84883):IGEMS (SEQ ID NO: 84209):QHN:GXGXR (SEQ ID NO: 84208), HVTKPTX (SEQ ID NO: 84422):VPT:SNIT-AA¹⁷-QIM (SEQ ID NO: 84883):IGEMS (SEQ ID NO: 84209):QHN:SXGXH (SEQ ID NO: 84304), YVPKPXX (SEQ ID NO: 84433):VPT:SNIT-AA¹⁷-QIM (SEQ ID NO: 84883):IGEMS (SEQ ID NO: 84209):QHN:SXGXH (SEQ ID NO: 84304), TVPKPXX (SEQ ID NO: 84432):VPT:SNIT-AA¹⁷-QIM (SEQ ID NO: 84883):IGEMS (SEQ ID NO: 84209):QHN:AXGXH (SEQ ID NO: 84147), AVPKAXX (SEQ ID NO: 84404):VPT:SNIT-AA¹⁷-QIM (SEQ ID NO: 84883):IGEMS (SEQ ID NO: 84209):QHN:AXGXH (SEQ ID NO: 84147), KVGKAXX (SEQ ID NO: 84425):VPT:SNIT-AA¹⁷-QIM (SEQ ID NO: 84883):IGEMS (SEQ ID NO: 84209):QHN:XGXR (SEQ ID NO: 84123), KASKAXX (SEQ ID NO: 84423):VPT:SNIT-AA¹⁷-QIM (SEQ ID NO: 84883):IGEMS (SEQ ID NO: 84209):QHN:EXGXR (SEQ ID NO: 84179), GSAGPXX (SEQ ID NO: 84420):VPT:SNIT-AA¹⁷-QIM (SEQ ID NO: 84883):IGEMS (SEQ ID NO: 84209):QHN:RXGXS (SEQ ID NO: 84291), AAPASXX (SEQ ID NO: 84401):VPT:SNIT-AA¹⁷-QIM (SEQ ID NO: 84883):IGEMS (SEQ ID NO: 84209):QHN:AXGXR (SEQ ID NO: 84148), STPPTXX (SEQ ID NO: 84431):VPT:SNIT-AA¹⁷-QIM (SEQ ID NO: 84883):IGEMS (SEQ ID NO: 84209):QHN:SXGXR (SEQ ID NO: 84305), HVPKPXX (SEQ ID NO: 84421):VPT:SNIT-AA¹⁷-QIM (SEQ ID NO: 84883):IGEMS (SEQ ID NO: 84209):QHN:SXGXH (SEQ ID NO: 84304), RVPSTXX (SEQ ID NO: 84428):VPT:SNIT-AA¹⁷-QIM (SEQ ID NO: 84883):IGEMS (SEQ ID NO: 84209):QHN:XGXL (SEQ ID NO: 84122), ASAAPXX (SEQ ID NO: 84402):VPT:SNIT-AA¹⁷-QIM (SEQ ID NO: 84883):IGEMS (SEQ ID NO: 84209):QHN:XKXS (SEQ ID NO: 84124), ASASPXX (SEQ ID NO: 84403):VPT:SNIT-AA¹⁷-QIM (SEQ ID NO: 84883):IGEMS (SEQ ID NO: 84209):QHN:XKXS (SEQ ID NO: 84124), NDEGLEX (SEQ ID NO: 84426):VPT:SNIT-AA¹⁷-QIM (SEQ ID NO: 84883):IGEMS (SEQ ID NO: 84209):QHN:QXEXR (SEQ ID NO: 84276), NDEGLEX (SEQ ID NO: 84426):VPT:SNIT-AA¹⁷-QIM (SEQ ID NO: 84883):IGEMS (SEQ ID NO: 84209):QHN:KXEXR (SEQ ID NO: 84213), SSVKXQP (SEQ ID NO: 84430):VPT:SNIT-AA¹⁷-QIM (SEQ ID NO: 84883):IGEMS (SEQ ID NO: 84209):QHN:LEXAXA (SEQ ID NO: 84400), RNVQXRP (SEQ ID NO: 84427):VPT:SNIT-AA¹⁷-QIM (SEQ ID NO: 84883):IGEMS (SEQ ID NO: 84209):QHN:LAXKXE (SEQ ID NO: 84399), KIPKAXX (SEQ ID NO: 84424):VPT:SNIT-AA¹⁷-QIM (SEQ ID NO: 84883):IGEMS (SEQ ID NO: 84209):VVE:GXGXR (SEQ ID NO: 84208), GIPEPXX (SEQ ID NO: 84419):VPE:SNIT-AA¹⁷-QIM (SEQ ID NO: 84883):IGEMS (SEQ ID NO: 84209):TVE:SXAXR (SEQ ID NO: 84303), SIPKAXX (SEQ ID NO: 84429):VPT:SNIT-AA¹⁷-QIM (SEQ ID NO: 84883):IGEMS (SEQ ID NO: 84209):VVE:GXGXR (SEQ ID NO: 84208), HVTKPTX (SEQ ID NO: 84422):APT:SNIT-AA¹⁷-QIM (SEQ ID NO: 84883):IGEMS (SEQ ID NO: 84209):VVR:SXGXH (SEQ ID NO: 84304), YVPKPXX (SEQ ID NO: 84433):APT:SNIT-AA¹⁷-QIM (SEQ ID NO: 84883):IGEMS (SEQ ID NO: 84209):VVR:SXGXH (SEQ ID NO: 84304), TVPKPXX (SEQ ID NO: 84432):APT:SNIT-AA¹⁷-QIM (SEQ ID NO: 84883):IGEMS (SEQ ID NO: 84209):VVR:AXGXH (SEQ ID NO: 84147), AVPKAXX (SEQ ID NO: 84404):APT:SNIT-AA¹⁷-QIM (SEQ ID NO: 84883):IGEMS (SEQ ID NO: 84209):VVK:AXGXH (SEQ ID NO: 84147), KVGKAXX (SEQ ID NO: 84425):VPT:SNIT-AA¹⁷-QIM (SEQ ID NO: 84883):IGEMS (SEQ ID NO: 84209):VAE:XGXR (SEQ ID NO: 84123), KASKAXX (SEQ ID NO: 84423):VPT:SNIT-AA¹⁷-QIM (SEQ ID NO: 84883):IGEMS (SEQ ID NO: 84209):AVS:EXGXR (SEQ ID NO: 84179), GSAGPXX (SEQ ID NO: 84420):TPT:SNIT-AA¹⁷-QIM (SEQ ID NO: 84883):IGEMS (SEQ ID NO: 84209):VVD:RXGXS (SEQ ID NO: 84291), AAPASXX (SEQ ID NO: 84401):VPA:SNIT-AA¹⁷-QIM (SEQ ID NO: 84883):IGEMS (SEQ ID NO: 84209):VVE:AXGXR (SEQ ID NO: 84148), STPPTXX (SEQ ID NO: 84431):VPT:SNIT-AA¹⁷-QIM (SEQ ID NO: 84883):IGEMS (SEQ ID NO: 84209):VVE:SXGXR (SEQ ID NO: 84305), HVPKPXX (SEQ ID NO: 84421):APT:SNIT-AA¹⁷-QIM (SEQ ID NO: 84883):IGEMS (SEQ ID NO: 84209):VVR:SXGXH (SEQ ID NO: 84304), RVPSTXX (SEQ ID NO: 84428):APV:SNIT-AA¹⁷-QIM (SEQ ID NO: 84883):IGEMS (SEQ ID NO: 84209):VEE:XGXL (SEQ ID NO: 84122), ASAAPXX (SEQ ID NO: 84402):VPQ:SNIT-AA¹⁷-QIM (SEQ ID NO: 84883):IGEMS (SEQ ID NO: 84209):VRS:XKXS (SEQ ID NO: 84124), ASASPXX (SEQ ID NO: 84403):VSQ:SNIT-AA¹⁷-QIM (SEQ ID NO: 84883):IGEMS (SEQ ID NO: 84209):VKS:XKXS (SEQ ID NO: 84124), ASASPXX (SEQ ID NO: 84403):VPQ:SNIT-AA¹⁷-QIM (SEQ ID NO: 84883):IGEMS (SEQ ID NO: 84209):VKS:XKXS (SEQ ID NO: 84124), NDEGLEX (SEQ ID NO: 84426):VPT:SNIT-AA¹⁷-QIM (SEQ ID NO: 84883):IGEMS (SEQ ID NO: 84209):EHS:QXEXR (SEQ ID NO: 84276), SSVKXQP (SEQ ID NO: 84430):SRV:SNIT-AA¹⁷-QIM (SEQ ID NO: 84883):IGEMS (SEQ ID NO: 84209):EEH:LEXAXA (SEQ ID NO: 84400), RNVQXRP (SEQ ID NO: 84427):TQV:SNIT-AA¹⁷-QIM (SEQ ID NO: 84883):IGEMS (SEQ ID NO: 84209):EDH:LAXKXE (SEQ ID NO: 84399), KIPKAXX (SEQ ID NO: 84424):VPT:SNIT-AA¹⁷-QIM (SEQ ID NO: 84883):LGEMS (SEQ ID NO: 84228):EHS:GXGXR (SEQ ID NO: 84208), GIPEPXX (SEQ ID NO: 84419):VPT:SNIT-AA¹⁷-QIM (SEQ ID NO: 84883):LGEMS (SEQ ID NO: 84228):EHS:SXAXR (SEQ ID NO: 84303), SIPKAXX (SEQ ID NO: 84429):VPT:SNIT-AA¹⁷-QIM (SEQ ID NO: 84883):LGEMS (SEQ ID NO: 84228):EHS:GXGXR (SEQ ID NO: 84208), HVTKPTX (SEQ ID NO: 84422):VPT:SNIT-AA¹⁷-QIM (SEQ ID NO: 84883):LGEMS (SEQ ID NO: 84228):EHS:SXGXH (SEQ ID NO: 84304), YVPKPXX (SEQ ID NO: 84433):VPT:SNIT-AA¹⁷-QIM (SEQ ID NO: 84883):LGEMS (SEQ ID NO: 84228):EHS:SXGXH (SEQ ID NO: 84304), TVPKPXX (SEQ ID NO: 84432):VPT:SNIT-AA¹⁷-QIM (SEQ ID NO: 84883):LGEMS (SEQ ID NO: 84228):EHS:AXGXH (SEQ ID NO: 84147), AVPKAXX (SEQ ID NO: 84404):VPT:SNIT-AA¹⁷-QIM (SEQ ID NO: 84883):LGEMS (SEQ ID NO: 84228):EHS:AXGXH (SEQ ID NO: 84147), KVGKAXX (SEQ ID NO: 84425):VPT:SNIT-AA¹⁷-QIM (SEQ ID NO: 84883):LGEMS (SEQ ID NO: 84228):EHS:XGXR (SEQ ID NO: 84123), KASKAXX (SEQ ID NO: 84423):VPT:SNIT-AA¹⁷-QIM (SEQ ID NO: 84883):LGEMS (SEQ ID NO: 84228):EHS:EXGXR (SEQ ID NO: 84179), GSAGPXX (SEQ ID NO: 84420):VPT:SNIT-AA¹⁷-QIM (SEQ ID NO: 84883):LGEMS (SEQ ID NO: 84228):EHS:RXGXS (SEQ ID NO: 84291), AAPASXX (SEQ ID NO: 84401):VPT:SNIT-AA¹⁷-QIM (SEQ ID NO: 84883):LGEMS (SEQ ID NO: 84228):EHS:AXGXR (SEQ ID NO: 84148), STPPTXX (SEQ ID NO: 84431):VPT:SNIT-AA¹⁷-QIM (SEQ ID NO: 84883):LGEMS (SEQ ID NO: 84228):EHS:SXGXR (SEQ ID NO: 84305), HVPKPXX (SEQ ID NO: 84421):VPT:SNIT-AA¹⁷-QIM (SEQ ID NO: 84883):LGEMS (SEQ ID NO: 84228):EHS:SXGXH (SEQ ID NO: 84304), RVPSTXX (SEQ ID NO: 84428):VPT:SNIT-AA¹⁷-QIM (SEQ ID NO: 84883):LGEMS (SEQ ID NO: 84228):EHS:XGXL (SEQ ID NO: 84122), ASAAPXX (SEQ ID NO: 84402):VPT:SNIT-AA¹⁷-QIM (SEQ ID NO: 84883):LGEMS (SEQ ID NO: 84228):EHS:XKXS (SEQ ID NO: 84124), ASASPXX (SEQ ID NO: 84403):VPT:SNIT-AA¹⁷-QIM (SEQ ID NO: 84883):LGEMS (SEQ ID NO: 84228):EHS:XKXS (SEQ ID NO: 84124), NDEGLEX (SEQ ID NO: 84426):VPT:SNIT-AA¹⁷-QIM (SEQ ID NO: 84883):LGEMS (SEQ ID NO: 84228):EHS:KXEXR (SEQ ID NO: 84213), SSVKXQP (SEQ ID NO: 84430):VPT:SNIT-AA¹⁷-QIM (SEQ ID NO: 84883):LGEMS (SEQ ID NO: 84228):EHS:LEXAXA (SEQ ID NO: 84400), RNVQXRP (SEQ ID NO: 84427):VPT:SNIT-AA¹⁷-QIM (SEQ ID NO: 84883):LGEMS (SEQ ID NO: 84228):EHS:LAXKXE (SEQ ID NO: 84399), KIPKAXX (SEQ ID NO: 84424):VPT:SNIT-AA¹⁷-QIM (SEQ ID NO: 84883):LGEMS (SEQ ID NO: 84228):VVE:GXGXR (SEQ ID NO: 84208), GIPEPXX (SEQ ID NO: 84419):VPE:SNIT-AA¹⁷-QIM (SEQ ID NO: 84883):LGEMS (SEQ ID NO: 84228):TVE:SXAXR (SEQ ID NO: 84303), SIPKAXX (SEQ ID NO: 84429):VPT:SNIT-AA¹⁷-QIM (SEQ ID NO: 84883):LGEMS (SEQ ID NO: 84228):VVE:GXGXR (SEQ ID NO: 84208), HVTKPTX (SEQ ID NO: 84422):APT:SNIT-AA¹⁷-QIM (SEQ ID NO: 84883):LGEMS (SEQ ID NO: 84228):VVR:SXGXH (SEQ ID NO: 84304), YVPKPXX (SEQ ID NO: 84433):APT:SNIT-AA¹⁷-QIM (SEQ ID NO: 84883):LGEMS (SEQ ID NO: 84228):VVR:SXGXH (SEQ ID NO: 84304), TVPKPXX (SEQ ID NO: 84432):APT:SNIT-AA¹⁷-QIM (SEQ ID NO: 84883):LGEMS (SEQ ID NO: 84228):VVR:AXGXH (SEQ ID NO: 84147), AVPKAXX (SEQ ID NO: 84404):APT:SNIT-AA¹⁷-QIM (SEQ ID NO: 84883):LGEMS (SEQ ID NO: 84228):VVK:AXGXH (SEQ ID NO: 84147), KVGKAXX (SEQ ID NO: 84425):VPT:SNIT-AA¹⁷-QIM (SEQ ID NO: 84883):LGEMS (SEQ ID NO: 84228):VAE:XGXR (SEQ ID NO: 84123), KASKAXX (SEQ ID NO: 84423):VPT:SNIT-AA¹⁷-QIM (SEQ ID NO: 84883):LGEMS (SEQ ID NO: 84228):AVS:EXGXR (SEQ ID NO: 84179), GSAGPXX (SEQ ID NO: 84420):TPT:SNIT-AA¹⁷-QIM (SEQ ID NO: 84883):LGEMS (SEQ ID NO: 84228):VVD:RXGXS (SEQ ID NO: 84291), AAPASXX (SEQ ID NO: 84401):VPA:SNIT-AA¹⁷-QIM (SEQ ID NO: 84883):LGEMS (SEQ ID NO: 84228):VVE:AXGXR (SEQ ID NO: 84148), STPPTXX (SEQ ID NO: 84431):VPT:SNIT-AA¹⁷-QIM (SEQ ID NO: 84883):LGEMS (SEQ ID NO: 84228):VVE:SXGXR (SEQ ID NO: 84305), HVPKPXX (SEQ ID NO: 84421):APT:SNIT-AA¹⁷-QIM (SEQ ID NO: 84883):LGEMS (SEQ ID NO: 84228):VVR:SXGXH (SEQ ID NO: 84304), RVPSTXX (SEQ ID NO: 84428):APV:SNIT-AA¹⁷-QIM (SEQ ID NO: 84883):LGEMS (SEQ ID NO: 84228):VEE:XGXL (SEQ ID NO: 84122), ASAAPXX (SEQ ID NO: 84402):VPQ:SNIT-AA¹⁷-QIM (SEQ ID NO: 84883):LGEMS (SEQ ID NO: 84228):VRS:XKXS (SEQ ID NO: 84124), ASASPXX (SEQ ID NO: 84403):VSQ:SNIT-AA¹⁷-QIM (SEQ ID NO: 84883):LGEMS (SEQ ID NO: 84228):VKS:XKXS (SEQ ID NO: 84124), ASASPXX (SEQ ID NO: 84403):VPQ:SNIT-AA¹⁷-QIM (SEQ ID NO: 84883):LGEMS (SEQ ID NO: 84228):VKS:XKXS (SEQ ID NO: 84124), NDEGLEX (SEQ ID NO: 84426):VPT:SNIT-AA¹⁷-QIM (SEQ ID NO: 84883):LGEMS (SEQ ID NO: 84228):QHN:KXEXR (SEQ ID NO: 84213), SSVKXQP (SEQ ID NO: 84430):SRV:SNIT-AA¹⁷-QIM (SEQ ID NO: 84883):LGEMS (SEQ ID NO: 84228):EEH:LEXAXA (SEQ ID NO: 84400), RNVQXRP (SEQ ID NO: 84427):TQV:SNIT-AA¹⁷-QIM (SEQ ID NO: 84883):LGEMS (SEQ ID NO: 84228):EDH:LAXKXE (SEQ ID NO: 84399), KIPKAXX (SEQ ID NO: 84424):SRV:RSVK-AA¹⁷-AKV (SEQ ID NO: 84880):KEVQV (SEQ ID NO: 84210):EEH:GXGXR (SEQ ID NO: 84208), GIPEPXX (SEQ ID NO: 84419):SRV:RSVK-AA¹⁷-AKV (SEQ ID NO: 84880):KEVQV (SEQ ID NO: 84210):EEH:SXAXR (SEQ ID NO: 84303), SIPKAXX (SEQ ID NO: 84429):SRV:RSVK-AA¹⁷-AKV (SEQ ID NO: 84880):KEVQV (SEQ ID NO: 84210):EEH:GXGXR (SEQ ID NO: 84208), HVTKPTX (SEQ ID NO: 84422):SRV:RSVK-AA¹⁷-AKV (SEQ ID NO: 84880):KEVQV (SEQ ID NO: 84210):EEH:SXGXH (SEQ ID NO: 84304), YVPKPXX (SEQ ID NO: 84433):SRV:RSVK-AA¹⁷-AKV (SEQ ID NO: 84880):KEVQV (SEQ ID NO: 84210):EEH:SXGXH (SEQ ID NO: 84304), TVPKPXX (SEQ ID NO: 84432):SRV:RSVK-AA¹⁷-AKV (SEQ ID NO: 84880):KEVQV (SEQ ID NO: 84210):EEH:AXGXH (SEQ ID NO: 84147), AVPKAXX (SEQ ID NO: 84404):SRV:RSVK-AA¹⁷-AKV (SEQ ID NO: 84880):KEVQV (SEQ ID NO: 84210):EEH:AXGXH (SEQ ID NO: 84147), KVGKAXX (SEQ ID NO: 84425):SRV:RSVK-AA¹⁷-AKV (SEQ ID NO: 84880):KEVQV (SEQ ID NO: 84210):EEH:XGXR (SEQ ID NO: 84123), KASKAXX (SEQ ID NO: 84423):SRV:RSVK-AA¹⁷-AKV (SEQ ID NO: 84880):KEVQV (SEQ ID NO: 84210):EEH:EXGXR (SEQ ID NO: 84179), GSAGPXX (SEQ ID NO: 84420):SRV:RSVK-AA¹⁷-AKV (SEQ ID NO: 84880):KEVQV (SEQ ID NO: 84210):EEH:RXGXS (SEQ ID NO: 84291), AAPASXX (SEQ ID NO: 84401):SRV:RSVK-AA¹⁷-AKV (SEQ ID NO: 84880):KEVQV (SEQ ID NO: 84210):EEH:AXGXR (SEQ ID NO: 84148), STPPTXX (SEQ ID NO: 84431):SRV:RSVK-AA¹⁷-AKV (SEQ ID NO: 84880):KEVQV (SEQ ID NO: 84210):EEH:SXGXR (SEQ ID NO: 84305), HVPKPXX (SEQ ID NO: 84421):SRV:RSVK-AA¹⁷-AKV (SEQ ID NO: 84880):KEVQV (SEQ ID NO: 84210):EEH:SXGXH (SEQ ID NO: 84304), RVPSTXX (SEQ ID NO: 84428):SRV:RSVK-AA¹⁷-AKV (SEQ ID NO: 84880):KEVQV (SEQ ID NO: 84210):EEH:XGXL (SEQ ID NO: 84122), ASAAPXX (SEQ ID NO: 84402):SRV:RSVK-AA¹⁷-AKV (SEQ ID NO: 84880):KEVQV (SEQ ID NO: 84210):EEH:XKXS (SEQ ID NO: 84124), ASASPXX (SEQ ID NO: 84403):SRV:RSVK-AA¹⁷-AKV (SEQ ID NO: 84880):KEVQV (SEQ ID NO: 84210):EEH:XKXS (SEQ ID NO: 84124), NDEGLEX (SEQ ID NO: 84426):SRV:RSVK-AA¹⁷-AKV (SEQ ID NO: 84880):KEVQV (SEQ ID NO: 84210):EEH:KXEXR (SEQ ID NO: 84213), NDEGLEX (SEQ ID NO: 84426):SRV:RSVK-AA¹⁷-AKV (SEQ ID NO: 84880):KEVQV (SEQ ID NO: 84210):EEH:QXEXR (SEQ ID NO: 84276), RNVQXRP (SEQ ID NO: 84427):SRV:RSVK-AA¹⁷-AKV (SEQ ID NO: 84880):KEVQV (SEQ ID NO: 84210):EEH:LAXKXE (SEQ ID NO: 84399), KIPKAXX (SEQ ID NO: 84424):VPT:RSVK-AA¹⁷-AKV (SEQ ID NO: 84880):KEVQV (SEQ ID NO: 84210):VVE:GXGXR (SEQ ID NO: 84208), GIPEPXX (SEQ ID NO: 84419):VPE:RSVK-AA¹⁷-AKV (SEQ ID NO: 84880):KEVQV (SEQ ID NO: 84210):TVE:SXAXR (SEQ ID NO: 84303), SIPKAXX (SEQ ID NO: 84429):VPT:RSVK-AA¹⁷-AKV (SEQ ID NO: 84880):KEVQV (SEQ ID NO: 84210):VVE:GXGXR (SEQ ID NO: 84208), HVTKPTX (SEQ ID NO: 84422):APT:RSVK-AA¹⁷-AKV (SEQ ID NO: 84880):KEVQV (SEQ ID NO: 84210):VVR:SXGXH (SEQ ID NO: 84304), YVPKPXX (SEQ ID NO: 84433):APT:RSVK-AA¹⁷-AKV (SEQ ID NO: 84880):KEVQV (SEQ ID NO: 84210):VVR:SXGXH (SEQ ID NO: 84304), TVPKPXX (SEQ ID NO: 84432):APT:RSVK-AA¹⁷-AKV (SEQ ID NO: 84880):KEVQV (SEQ ID NO: 84210):VVR:AXGXH (SEQ ID NO: 84147), AVPKAXX (SEQ ID NO: 84404):APT:RSVK-AA¹⁷-AKV (SEQ ID NO: 84880):KEVQV (SEQ ID NO: 84210):VVK:AXGXH (SEQ ID NO: 84147), KVGKAXX (SEQ ID NO: 84425):VPT:RSVK-AA¹⁷-AKV (SEQ ID NO: 84880):KEVQV (SEQ ID NO: 84210):VAE:XGXR (SEQ ID NO: 84123), KASKAXX (SEQ ID NO: 84423):VPT:RSVK-AA¹⁷-AKV (SEQ ID NO: 84880):KEVQV (SEQ ID NO: 84210):AVS:EXGXR (SEQ ID NO: 84179), GSAGPXX (SEQ ID NO: 84420):TPT:RSVK-AA¹⁷-AKV (SEQ ID NO: 84880):KEVQV (SEQ ID NO: 84210):VVD:RXGXS (SEQ ID NO: 84291), AAPASXX (SEQ ID NO: 84401):VPA:RSVK-AA¹⁷-AKV (SEQ ID NO: 84880):KEVQV (SEQ ID NO: 84210):VVE:AXGXR (SEQ ID NO: 84148), STPPTXX (SEQ ID NO: 84431):VPT:RSVK-AA¹⁷-AKV (SEQ ID NO: 84880):KEVQV (SEQ ID NO: 84210):VVE:SXGXR (SEQ ID NO: 84305), HVPKPXX (SEQ ID NO: 84421):APT:RSVK-AA¹⁷-AKV (SEQ ID NO: 84880):KEVQV (SEQ ID NO: 84210):VVR:SXGXH (SEQ ID NO: 84304), RVPSTXX (SEQ ID NO: 84428):APV:RSVK-AA¹⁷-AKV (SEQ ID NO: 84880):KEVQV (SEQ ID NO: 84210):VEE:XGXL (SEQ ID NO: 84122), ASAAPXX (SEQ ID NO: 84402):VPQ:RSVK-AA¹⁷-AKV (SEQ ID NO: 84880):KEVQV (SEQ ID NO: 84210):VRS:XKXS (SEQ ID NO: 84124), ASASPXX (SEQ ID NO: 84403):VSQ:RSVK-AA¹⁷-AKV (SEQ ID NO: 84880):KEVQV (SEQ ID NO: 84210):VKS:XKXS (SEQ ID NO: 84124), ASASPXX (SEQ ID NO: 84403):VPQ:RSVK-AA¹⁷-AKV (SEQ ID NO: 84880):KEVQV (SEQ ID NO: 84210):VKS:XKXS (SEQ ID NO: 84124), NDEGLEX (SEQ ID NO: 84426):VPT:RSVK-AA¹⁷-AKV (SEQ ID NO: 84880):KEVQV (SEQ ID NO: 84210):QHN:KXEXR (SEQ ID NO: 84213), NDEGLEX (SEQ ID NO: 84426):VPT:RSVK-AA¹⁷-AKV (SEQ ID NO: 84880):KEVQV (SEQ ID NO: 84210):EHS:QXEXR (SEQ ID NO: 84276), RNVQXRP (SEQ ID NO: 84427):TQV:RSVK-AA¹⁷-AKV (SEQ ID NO: 84880):KEVQV (SEQ ID NO: 84210):EDH:LAXKXE (SEQ ID NO: 84399), KIPKAXX (SEQ ID NO: 84424):TQV:RPVQ-AA¹⁷-RKI (SEQ ID NO: 84879):KKATV (SEQ ID NO: 84212):EDH:GXGXR (SEQ ID NO: 84208), GIPEPXX (SEQ ID NO: 84419):TQV:RPVQ-AA¹⁷-RKI (SEQ ID NO: 84879):KKATV (SEQ ID NO: 84212):EDH:SXAXR (SEQ ID NO: 84303), SIPKAXX (SEQ ID NO: 84429):TQV:RPVQ-AA¹⁷-RKI (SEQ ID NO: 84879):KKATV (SEQ ID NO: 84212):EDH:GXGXR (SEQ ID NO: 84208), HVTKPTX (SEQ ID NO: 84422):TQV:RPVQ-AA¹⁷-RKI (SEQ ID NO: 84879):KKATV (SEQ ID NO: 84212):EDH:SXGXH (SEQ ID NO: 84304), YVPKPXX (SEQ ID NO: 84433):TQV:RPVQ-AA¹⁷-RKI (SEQ ID NO: 84879):KKATV (SEQ ID NO: 84212):EDH:SXGXH (SEQ ID NO: 84304), TVPKPXX (SEQ ID NO: 84432):TQV:RPVQ-AA¹⁷-RKI (SEQ ID NO: 84879):KKATV (SEQ ID NO: 84212):EDH:AXGXH (SEQ ID NO: 84147), AVPKAXX (SEQ ID NO: 84404):TQV:RPVQ-AA¹⁷-RKI (SEQ ID NO: 84879):KKATV (SEQ ID NO: 84212):EDH:AXGXH (SEQ ID NO: 84147), KVGKAXX (SEQ ID NO: 84425):TQV:RPVQ-AA¹⁷-RKI (SEQ ID NO: 84879):KKATV (SEQ ID NO: 84212):EDH:XGXR (SEQ ID NO: 84123), KASKAXX (SEQ ID NO: 84423):TQV:RPVQ-AA¹⁷-RKI (SEQ ID NO: 84879):KKATV (SEQ ID NO: 84212):EDH:EXGXR (SEQ ID NO: 84179), GSAGPXX (SEQ ID NO: 84420):TQV:RPVQ-AA¹⁷-RKI (SEQ ID NO: 84879):KKATV (SEQ ID NO: 84212):EDH:RXGXS (SEQ ID NO: 84291), AAPASXX (SEQ ID NO: 84401):TQV:RPVQ-AA¹⁷-RKI (SEQ ID NO: 84879):KKATV (SEQ ID NO: 84212):EDH:AXGXR (SEQ ID NO: 84148), STPPTXX (SEQ ID NO: 84431):TQV:RPVQ-AA¹⁷-RKI (SEQ ID NO: 84879):KKATV (SEQ ID NO: 84212):EDH:SXGXR (SEQ ID NO: 84305), HVPKPXX (SEQ ID NO: 84421):TQV:RPVQ-AA¹⁷-RKI (SEQ ID NO: 84879):KKATV (SEQ ID NO: 84212):EDH:SXGXH (SEQ ID NO: 84304), RVPSTXX (SEQ ID NO: 84428):TQV:RPVQ-AA¹⁷-RKI (SEQ ID NO: 84879):KKATV (SEQ ID NO: 84212):EDH:XGXL (SEQ ID NO: 84122), ASAAPXX (SEQ ID NO: 84402):TQV:RPVQ-AA¹⁷-RKI (SEQ ID NO: 84879):KKATV (SEQ ID NO: 84212):EDH:XKXS (SEQ ID NO: 84124), ASASPXX (SEQ ID NO: 84403):TQV:RPVQ-AA¹⁷-RKI (SEQ ID NO: 84879):KKATV (SEQ ID NO: 84212):EDH:XKXS (SEQ ID NO: 84124), NDEGLEX (SEQ ID NO: 84426):TQV:RPVQ-AA¹⁷-RKI (SEQ ID NO: 84879):KKATV (SEQ ID NO: 84212):EDH:KXEXR (SEQ ID NO: 84213), NDEGLEX (SEQ ID NO: 84426):TQV:RPVQ-AA¹⁷-RKI (SEQ ID NO: 84879):KKATV (SEQ ID NO: 84212):EDH:QXEXR (SEQ ID NO: 84276), SSVKXQP (SEQ ID NO: 84430):TQV:RPVQ-AA¹⁷-RKI (SEQ ID NO: 84879):KKATV (SEQ ID NO: 84212):EDH:LEXAXA (SEQ ID NO: 84400), KIPKAXX (SEQ ID NO: 84424):VPT:RPVQ-AA¹⁷-RKI (SEQ ID NO: 84879):KKATV (SEQ ID NO: 84212):VVE:GXGXR (SEQ ID NO: 84208), GIPEPXX (SEQ ID NO: 84419):VPE:RPVQ-AA¹⁷-RKI (SEQ ID NO: 84879):KKATV (SEQ ID NO: 84212):TVE:SXAXR (SEQ ID NO: 84303), SIPKAXX (SEQ ID NO: 84429):VPT:RPVQ-AA¹⁷-RKI (SEQ ID NO: 84879):KKATV (SEQ ID NO: 84212):VVE:GXGXR (SEQ ID NO: 84208), HVTKPTX (SEQ ID NO: 84422):APT:RPVQ-AA¹⁷-RKI (SEQ ID NO: 84879):KKATV (SEQ ID NO: 84212):VVR:SXGXH (SEQ ID NO: 84304), YVPKPXX (SEQ ID NO: 84433):APT:RPVQ-AA¹⁷-RKI (SEQ ID NO: 84879):KKATV (SEQ ID NO: 84212):VVR:SXGXH (SEQ ID NO: 84304), TVPKPXX (SEQ ID NO: 84432):APT:RPVQ-AA¹⁷-RKI (SEQ ID NO: 84879):KKATV (SEQ ID NO: 84212):VVR:AXGXH (SEQ ID NO: 84147), AVPKAXX (SEQ ID NO: 84404):APT:RPVQ-AA¹⁷-RKI (SEQ ID NO: 84879):KKATV (SEQ ID NO: 84212):VVK:AXGXH (SEQ ID NO: 84147), KVGKAXX (SEQ ID NO: 84425):VPT:RPVQ-AA¹⁷-RKI (SEQ ID NO: 84879):KKATV (SEQ ID NO: 84212):VAE:XGXR (SEQ ID NO: 84123), KASKAXX (SEQ ID NO: 84423):VPT:RPVQ-AA¹⁷-RKI (SEQ ID NO: 84879):KKATV (SEQ ID NO: 84212):AVS:EXGXR (SEQ ID NO: 84179), GSAGPXX (SEQ ID NO: 84420):TPT:RPVQ-AA¹⁷-RKI (SEQ ID NO: 84879):KKATV (SEQ ID NO: 84212):VVD:RXGXS (SEQ ID NO: 84291), AAPASXX (SEQ ID NO: 84401):VPA:RPVQ-AA¹⁷-RKI (SEQ ID NO: 84879):KKATV (SEQ ID NO: 84212):VVE:AXGXR (SEQ ID NO: 84148), STPPTXX (SEQ ID NO: 84431):VPT:RPVQ-AA¹⁷-RKI (SEQ ID NO: 84879):KKATV (SEQ ID NO: 84212):VVE:SXGXR (SEQ ID NO: 84305), HVPKPXX (SEQ ID NO: 84421):APT:RPVQ-AA¹⁷-RKI (SEQ ID NO: 84879):KKATV (SEQ ID NO: 84212):VVR:SXGXH (SEQ ID NO: 84304), RVPSTXX (SEQ ID NO: 84428):APV:RPVQ-AA¹⁷-RKI (SEQ ID NO: 84879):KKATV (SEQ ID NO: 84212):VEE:XGXL (SEQ ID NO: 84122), ASAAPXX (SEQ ID NO: 84402):VPQ:RPVQ-AA¹⁷-RKI (SEQ ID NO: 84879):KKATV (SEQ ID NO: 84212):VRS:XKXS (SEQ ID NO: 84124), ASASPXX (SEQ ID NO: 84403):VSQ:RPVQ-AA¹⁷-RKI (SEQ ID NO: 84879):KKATV (SEQ ID NO: 84212):VKS:XKXS (SEQ ID NO: 84124), ASASPXX (SEQ ID NO: 84403):VPQ:RPVQ-AA¹⁷-RKI (SEQ ID NO: 84879):KKATV (SEQ ID NO: 84212):VKS:XKXS (SEQ ID NO: 84124), NDEGLEX (SEQ ID NO: 84426):VPT:RPVQ-AA¹⁷-RKI (SEQ ID NO: 84879):KKATV (SEQ ID NO: 84212):QHN:KXEXR (SEQ ID NO: 84213), NDEGLEX (SEQ ID NO: 84426):VPT:RPVQ-AA¹⁷-RKI (SEQ ID NO: 84879):KKATV (SEQ ID NO: 84212):EHS:QXEXR (SEQ ID NO: 84276) and SSVKXQP (SEQ ID NO: 84430):SRV:RPVQ-AA¹⁷-RKI (SEQ ID NO: 84879):KKATV (SEQ ID NO: 84212):EEH:LEXAXA (SEQ ID NO: 84400); and wherein AA¹⁷ is selected from the group consisting of G, A, V, L, I, P, F, M, W, T and S (in particular is selected from the group consisting of M, I, L, V and T). More particularly, the hexaplet PEP7:PEP3:PEP12:PEP2:PEP4:PEP8 is selected from the group consisting of GIPEPXX (SEQ ID NO: 84419):VPT:SAIS-AA¹⁷-LYL (SEQ ID NO: 84881):LKNYQ (SEQ ID NO: 84230):VVE:SXAXR (SEQ ID NO: 84303), HVTKPTX (SEQ ID NO: 84422):VPT:SAIS-AA¹⁷-LYL (SEQ ID NO: 84881):LKNYQ (SEQ ID NO: 84230):VVE:SXGXH (SEQ ID NO: 84304), YVPKPXX (SEQ ID NO: 84433):VPT:SAIS-AA¹⁷-LYL (SEQ ID NO: 84881):LKNYQ (SEQ ID NO: 84230):VVE:SXGXH (SEQ ID NO: 84304), TVPKPXX (SEQ ID NO: 84432):VPT:SAIS-AA¹⁷-LYL (SEQ ID NO: 84881):LKNYQ (SEQ ID NO: 84230):VVE:AXGXH (SEQ ID NO: 84147), AVPKAXX (SEQ ID NO: 84404):VPT:SAIS-AA¹⁷-LYL (SEQ ID NO: 84881):LKNYQ (SEQ ID NO: 84230):VVE:AXGXH (SEQ ID NO: 84147), KVGKAXX (SEQ ID NO: 84425):VPT:SAIS-AA¹⁷-LYL (SEQ ID NO: 84881):LKNYQ (SEQ ID NO: 84230):VVE:XGXR (SEQ ID NO: 84123), KASKAXX (SEQ ID NO: 84423):VPT:SAIS-AA¹⁷-LYL (SEQ ID NO: 84881):LKNYQ (SEQ ID NO: 84230):VVE:EXGXR (SEQ ID NO: 84179), GSAGPXX (SEQ ID NO: 84420):VPT:SAIS-AA¹⁷-LYL (SEQ ID NO: 84881):LKNYQ (SEQ ID NO: 84230):VVE:RXGXS (SEQ ID NO: 84291), AAPASXX (SEQ ID NO: 84401):VPT:SAIS-AA¹⁷-LYL (SEQ ID NO: 84881):LKNYQ (SEQ ID NO: 84230):VVE:AXGXR (SEQ ID NO: 84148), STPPTXX (SEQ ID NO: 84431):VPT:SAIS-AA¹⁷-LYL (SEQ ID NO: 84881):LKNYQ (SEQ ID NO: 84230):VVE:SXGXR (SEQ ID NO: 84305), HVPKPXX (SEQ ID NO: 84421):VPT:SAIS-AA¹⁷-LYL (SEQ ID NO: 84881):LKNYQ (SEQ ID NO: 84230):VVE:SXGXH (SEQ ID NO: 84304), RVPSTXX (SEQ ID NO: 84428):VPT:SAIS-AA¹⁷-LYL (SEQ ID NO: 84881):LKNYQ (SEQ ID NO: 84230):VVE:XGXL (SEQ ID NO: 84122), ASAAPXX (SEQ ID NO: 84402):VPT:SAIS-AA¹⁷-LYL (SEQ ID NO: 84881):LKNYQ (SEQ ID NO: 84230):VVE:XKXS (SEQ ID NO: 84124), ASASPXX (SEQ ID NO: 84403):VPT:SAIS-AA¹⁷-LYL (SEQ ID NO: 84881):LKNYQ (SEQ ID NO: 84230):VVE:XKXS (SEQ ID NO: 84124), GIPEPXX (SEQ ID NO: 84419):VPE:SAIS-AA¹⁷-LYL (SEQ ID NO: 84881):LKNYQ (SEQ ID NO: 84230):TVE:SXAXR (SEQ ID NO: 84303), HVTKPTX (SEQ ID NO: 84422):APT:SAIS-AA¹⁷-LYL (SEQ ID NO: 84881):LKNYQ (SEQ ID NO: 84230):VVR:SXGXH (SEQ ID NO: 84304), YVPKPXX (SEQ ID NO: 84433):APT:SAIS-AA¹⁷-LYL (SEQ ID NO: 84881):LKNYQ (SEQ ID NO: 84230):VVR:SXGXH (SEQ ID NO: 84304), TVPKPXX (SEQ ID NO: 84432):APT:SAIS-AA¹⁷-LYL (SEQ ID NO: 84881):LKNYQ (SEQ ID NO: 84230):VVR:AXGXH (SEQ ID NO: 84147), AVPKAXX (SEQ ID NO: 84404):APT:SAIS-AA¹⁷-LYL (SEQ ID NO: 84881):LKNYQ (SEQ ID NO: 84230):VVK:AXGXH (SEQ ID NO: 84147), KVGKAXX (SEQ ID NO: 84425):VPT:SAIS-AA¹⁷-LYL (SEQ ID NO: 84881):LKNYQ (SEQ ID NO: 84230):VAE:XGXR (SEQ ID NO: 84123), KASKAXX (SEQ ID NO: 84423):VPT:SAIS-AA¹⁷-LYL (SEQ ID NO: 84881):LKNYQ (SEQ ID NO: 84230):AVS:EXGXR (SEQ ID NO: 84179), GSAGPXX (SEQ ID NO: 84420):TPT:SAIS-AA¹⁷-LYL (SEQ ID NO: 84881):LKNYQ (SEQ ID NO: 84230):VVD:RXGXS (SEQ ID NO: 84291), AAPASXX (SEQ ID NO: 84401):VPA:SAIS-AA¹⁷-LYL (SEQ ID NO: 84881):LKNYQ (SEQ ID NO: 84230):VVE:AXGXR (SEQ ID NO: 84148), HVPKPXX (SEQ ID NO: 84421):APT:SAIS-AA¹⁷-LYL (SEQ ID NO: 84881):LKNYQ (SEQ ID NO: 84230):VVR:SXGXH (SEQ ID NO: 84304), RVPSTXX (SEQ ID NO: 84428):APV:SAIS-AA¹⁷-LYL (SEQ ID NO: 84881):LKNYQ (SEQ ID NO: 84230):VEE:XGXL (SEQ ID NO: 84122), ASAAPXX (SEQ ID NO: 84402):VPQ:SAIS-AA¹⁷-LYL (SEQ ID NO: 84881):LKNYQ (SEQ ID NO: 84230):VRS:XKXS (SEQ ID NO: 84124), ASASPXX (SEQ ID NO: 84403):VSQ:SAIS-AA¹⁷-LYL (SEQ ID NO: 84881):LKNYQ (SEQ ID NO: 84230):VKS:XKXS (SEQ ID NO: 84124), ASASPXX (SEQ ID NO: 84403):VPQ:SAIS-AA¹⁷-LYL (SEQ ID NO: 84881):LKNYQ (SEQ ID NO: 84230):VKS:XKXS (SEQ ID NO: 84124), NDEGLEX (SEQ ID NO: 84426):VPT:SAIS-AA¹⁷-LYL (SEQ ID NO: 84881):LKNYQ (SEQ ID NO: 84230):QHN:KXEXR (SEQ ID NO: 84213), NDEGLEX (SEQ ID NO: 84426):VPT:SAIS-AA¹⁷-LYL (SEQ ID NO: 84881):LKNYQ (SEQ ID NO: 84230):EHS:QXEXR (SEQ ID NO: 84276), SSVKXQP (SEQ ID NO: 84430):SRV:SAIS-AA¹⁷-LYL (SEQ ID NO: 84881):LKNYQ (SEQ ID NO: 84230):EEH:LEXAXA (SEQ ID NO: 84400), RNVQXRP (SEQ ID NO: 84427):TQV:SAIS-AA¹⁷-LYL (SEQ ID NO: 84881):LKNYQ (SEQ ID NO: 84230):EDH:LAXKXE (SEQ ID NO: 84399), KIPKAXX (SEQ ID NO: 84424):VPE:SSLS-AA¹⁷-LFF (SEQ ID NO: 84889):LKVYP (SEQ ID NO: 84231):TVE:GXGXR (SEQ ID NO: 84208), SIPKAXX (SEQ ID NO: 84429):VPE:SSLS-AA¹⁷-LFF (SEQ ID NO: 84889):LKVYP (SEQ ID NO: 84231):TVE:GXGXR (SEQ ID NO: 84208), HVTKPTX (SEQ ID NO: 84422):VPE:SSLS-AA¹⁷-LFF (SEQ ID NO: 84889):LKVYP (SEQ ID NO: 84231):TVE:SXGXH (SEQ ID NO: 84304), YVPKPXX (SEQ ID NO: 84433):VPE:SSLS-AA¹⁷-LFF (SEQ ID NO: 84889):LKVYP (SEQ ID NO: 84231):TVE:SXGXH (SEQ ID NO: 84304), TVPKPXX (SEQ ID NO: 84432):VPE:SSLS-AA¹⁷-LFF (SEQ ID NO: 84889):LKVYP (SEQ ID NO: 84231):TVE:AXGXH (SEQ ID NO: 84147), AVPKAXX (SEQ ID NO: 84404):VPE:SSLS-AA¹⁷-LFF (SEQ ID NO: 84889):LKVYP (SEQ ID NO: 84231):TVE:AXGXH (SEQ ID NO: 84147), KVGKAXX (SEQ ID NO: 84425):VPE:SSLS-AA¹⁷-LFF (SEQ ID NO: 84889):LKVYP (SEQ ID NO: 84231):TVE:XGXR (SEQ ID NO: 84123), KASKAXX (SEQ ID NO: 84423):VPE:SSLS-AA¹⁷-LFF (SEQ ID NO: 84889):LKVYP (SEQ ID NO: 84231):TVE:EXGXR (SEQ ID NO: 84179), GSAGPXX (SEQ ID NO: 84420):VPE:SSLS-AA¹⁷-LFF (SEQ ID NO: 84889):LKVYP (SEQ ID NO: 84231):TVE:RXGXS (SEQ ID NO: 84291), AAPASXX (SEQ ID NO: 84401):VPE:SSLS-AA¹⁷-LFF (SEQ ID NO: 84889):LKVYP (SEQ ID NO: 84231):TVE:AXGXR (SEQ ID NO: 84148), STPPTXX (SEQ ID NO: 84431):VPE:SSLS-AA¹⁷-LFF (SEQ ID NO: 84889):LKVYP (SEQ ID NO: 84231):TVE:SXGXR (SEQ ID NO: 84305), HVPKPXX (SEQ ID NO: 84421):VPE:SSLS-AA¹⁷-LFF (SEQ ID NO: 84889):LKVYP (SEQ ID NO: 84231):TVE:SXGXH (SEQ ID NO: 84304), RVPSTXX (SEQ ID NO: 84428):VPE:SSLS-AA¹⁷-LFF (SEQ ID NO: 84889):LKVYP (SEQ ID NO: 84231):TVE:XGXL (SEQ ID NO: 84122), ASAAPXX (SEQ ID NO: 84402):VPE:SSLS-AA¹⁷-LFF (SEQ ID NO: 84889):LKVYP (SEQ ID NO: 84231):TVE:XKXS (SEQ ID NO: 84124), ASASPXX (SEQ ID NO: 84403):VPE:SSLS-AA¹⁷-LFF (SEQ ID NO: 84889):LKVYP (SEQ ID NO: 84231):TVE:XKXS (SEQ ID NO: 84124), KIPKAXX (SEQ ID NO: 84424):VPT:SSLS-AA¹⁷-LFF (SEQ ID NO: 84889):LKVYP (SEQ ID NO: 84231):VVE:GXGXR (SEQ ID NO: 84208), SIPKAXX (SEQ ID NO: 84429):VPT:SSLS-AA¹⁷-LFF (SEQ ID NO: 84889):LKVYP (SEQ ID NO: 84231):VVE:GXGXR (SEQ ID NO: 84208), HVTKPTX (SEQ ID NO: 84422):APT:SSLS-AA¹⁷-LFF (SEQ ID NO: 84889):LKVYP (SEQ ID NO: 84231):VVR:SXGXH (SEQ ID NO: 84304), YVPKPXX (SEQ ID NO: 84433):APT:SSLS-AA¹⁷-LFF (SEQ ID NO: 84889):LKVYP (SEQ ID NO: 84231):VVR:SXGXH (SEQ ID NO: 84304), TVPKPXX (SEQ ID NO: 84432):APT:SSLS-AA¹⁷-LFF (SEQ ID NO: 84889):LKVYP (SEQ ID NO: 84231):VVR:AXGXH (SEQ ID NO: 84147), AVPKAXX (SEQ ID NO: 84404):APT:SSLS-AA¹⁷-LFF (SEQ ID NO: 84889):LKVYP (SEQ ID NO: 84231):VVK:AXGXH (SEQ ID NO: 84147), KVGKAXX (SEQ ID NO: 84425):VPT:SSLS-AA¹⁷-LFF (SEQ ID NO: 84889):LKVYP (SEQ ID NO: 84231):VAE:XGXR (SEQ ID NO: 84123), KASKAXX (SEQ ID NO: 84423):VPT:SSLS-AA¹⁷-LFF (SEQ ID NO: 84889):LKVYP (SEQ ID NO: 84231):AVS:EXGXR (SEQ ID NO: 84179), GSAGPXX (SEQ ID NO: 84420):TPT:SSLS-AA¹⁷-LFF (SEQ ID NO: 84889):LKVYP (SEQ ID NO: 84231):VVD:RXGXS (SEQ ID NO: 84291), AAPASXX (SEQ ID NO: 84401):VPA:SSLS-AA¹⁷-LFF (SEQ ID NO: 84889):LKVYP (SEQ ID NO: 84231):VVE:AXGXR (SEQ ID NO: 84148), STPPTXX (SEQ ID NO: 84431):VPT:SSLS-AA¹⁷-LFF (SEQ ID NO: 84889):LKVYP (SEQ ID NO: 84231):VVE:SXGXR (SEQ ID NO: 84305), HVPKPXX (SEQ ID NO: 84421):APT:SSLS-AA¹⁷-LFF (SEQ ID NO: 84889):LKVYP (SEQ ID NO: 84231):VVR:SXGXH (SEQ ID NO: 84304), RVPSTXX (SEQ ID NO: 84428):APV:SSLS-AA¹⁷-LFF (SEQ ID NO: 84889):LKVYP (SEQ ID NO: 84231):VEE:XGXL (SEQ ID NO: 84122), ASAAPXX (SEQ ID NO: 84402):VPQ:SSLS-AA¹⁷-LFF (SEQ ID NO: 84889):LKVYP (SEQ ID NO: 84231):VRS:XKXS (SEQ ID NO: 84124), ASASPXX (SEQ ID NO: 84403):VSQ:SSLS-AA¹⁷-LFF (SEQ ID NO: 84889):LKVYP (SEQ ID NO: 84231):VKS:XKXS (SEQ ID NO: 84124), ASASPXX (SEQ ID NO: 84403):VPQ:SSLS-AA¹⁷-LFF (SEQ ID NO: 84889):LKVYP (SEQ ID NO: 84231):VKS:XKXS (SEQ ID NO: 84124), NDEGLEX (SEQ ID NO: 84426):VPT:SSLS-AA¹⁷-LFF (SEQ ID NO: 84889):LKVYP (SEQ ID NO: 84231):QHN:KXEXR (SEQ ID NO: 84213), NDEGLEX (SEQ ID NO: 84426):VPT:SSLS-AA¹⁷-LFF (SEQ ID NO: 84889):LKVYP (SEQ ID NO: 84231):EHS:QXEXR (SEQ ID NO: 84276), SSVKXQP (SEQ ID NO: 84430):SRV:SSLS-AA¹⁷-LFF (SEQ ID NO: 84889):LKVYP (SEQ ID NO: 84231):EEH:LEXAXA (SEQ ID NO: 84400), RNVQXRP (SEQ ID NO: 84427):TQV:SSLS-AA¹⁷-LFF (SEQ ID NO: 84889):LKVYP (SEQ ID NO: 84231):EDH:LAXKXE (SEQ ID NO: 84399), KIPKAXX (SEQ ID NO: 84424):APT:NAIS-AA¹⁷-LYF (SEQ ID NO: 84878):LKKYR (SEQ ID NO: 84229):VVR:GXGXR (SEQ ID NO: 84208), GIPEPXX (SEQ ID NO: 84419):APT:NAIS-AA¹⁷-LYF (SEQ ID NO: 84878):LKKYR (SEQ ID NO: 84229):VVR:SXAXR (SEQ ID NO: 84303), SIPKAXX (SEQ ID NO: 84429):APT:NAIS-AA¹⁷-LYF (SEQ ID NO: 84878):LKKYR (SEQ ID NO: 84229):VVR:GXGXR (SEQ ID NO: 84208), AVPKAXX (SEQ ID NO: 84404):APT:NAIS-AA¹⁷-LYF (SEQ ID NO: 84878):LKKYR (SEQ ID NO: 84229):VVR:AXGXH (SEQ ID NO: 84147), KVGKAXX (SEQ ID NO: 84425):APT:NAIS-AA¹⁷-LYF (SEQ ID NO: 84878):LKKYR (SEQ ID NO: 84229):VVR:XGXR (SEQ ID NO: 84123), KASKAXX (SEQ ID NO: 84423):APT:NAIS-AA¹⁷-LYF (SEQ ID NO: 84878):LKKYR (SEQ ID NO: 84229):VVR:EXGXR (SEQ ID NO: 84179), GSAGPXX (SEQ ID NO: 84420):APT:NAIS-AA¹⁷-LYF (SEQ ID NO: 84878):LKKYR (SEQ ID NO: 84229):VVR:RXGXS (SEQ ID NO: 84291), AAPASXX (SEQ ID NO: 84401):APT:NAIS-AA¹⁷-LYF (SEQ ID NO: 84878):LKKYR (SEQ ID NO: 84229):VVR:AXGXR (SEQ ID NO: 84148), STPPTXX (SEQ ID NO: 84431):APT:NAIS-AA¹⁷-LYF (SEQ ID NO: 84878):LKKYR (SEQ ID NO: 84229):VVR:SXGXR (SEQ ID NO: 84305), RVPSTXX (SEQ ID NO: 84428):APT:NAIS-AA¹⁷-LYF (SEQ ID NO: 84878):LKKYR (SEQ ID NO: 84229):VVR:XGXL (SEQ ID NO: 84122), ASAAPXX (SEQ ID NO: 84402):APT:NAIS-AA¹⁷-LYF (SEQ ID NO: 84878):LKKYR (SEQ ID NO: 84229):VVR:XKXS (SEQ ID NO: 84124), ASASPXX (SEQ ID NO: 84403):APT:NAIS-AA¹⁷-LYF (SEQ ID NO: 84878):LKKYR (SEQ ID NO: 84229):VVR:XKXS (SEQ ID NO: 84124), KIPKAXX (SEQ ID NO: 84424):VPT:NAIS-AA¹⁷-LYF (SEQ ID NO: 84878):LKKYR (SEQ ID NO: 84229):VVE:GXGXR (SEQ ID NO: 84208), GIPEPXX (SEQ ID NO: 84419):VPE:NAIS-AA¹⁷-LYF (SEQ ID NO: 84878):LKKYR (SEQ ID NO: 84229):TVE:SXAXR (SEQ ID NO: 84303), SIPKAXX (SEQ ID NO: 84429):VPT:NAIS-AA¹⁷-LYF (SEQ ID NO: 84878):LKKYR (SEQ ID NO: 84229):VVE:GXGXR (SEQ ID NO: 84208), AVPKAXX (SEQ ID NO: 84404):APT:NAIS-AA¹⁷-LYF (SEQ ID NO: 84878):LKKYR (SEQ ID NO: 84229):VVK:AXGXH (SEQ ID NO: 84147), KVGKAXX (SEQ ID NO: 84425):VPT:NAIS-AA¹⁷-LYF (SEQ ID NO: 84878):LKKYR (SEQ ID NO: 84229):VAE:XGXR (SEQ ID NO: 84123), KASKAXX (SEQ ID NO: 84423):VPT:NAIS-AA¹⁷-LYF (SEQ ID NO: 84878):LKKYR (SEQ ID NO: 84229):AVS:EXGXR (SEQ ID NO: 84179), GSAGPXX (SEQ ID NO: 84420):TPT:NAIS-AA¹⁷-LYF (SEQ ID NO: 84878):LKKYR (SEQ ID NO: 84229):VVD:RXGXS (SEQ ID NO: 84291), AAPASXX (SEQ ID NO: 84401):VPA:NAIS-AA¹⁷-LYF (SEQ ID NO: 84878):LKKYR (SEQ ID NO: 84229):VVE:AXGXR (SEQ ID NO: 84148), STPPTXX (SEQ ID NO: 84431):VPT:NAIS-AA¹⁷-LYF (SEQ ID NO: 84878):LKKYR (SEQ ID NO: 84229):VVE:SXGXR (SEQ ID NO: 84305), RVPSTXX (SEQ ID NO: 84428):APV:NAIS-AA¹⁷-LYF (SEQ ID NO: 84878):LKKYR (SEQ ID NO: 84229):VEE:XGXL (SEQ ID NO: 84122), ASAAPXX (SEQ ID NO: 84402):VPQ:NAIS-AA¹⁷-LYF (SEQ ID NO: 84878):LKKYR (SEQ ID NO: 84229):VRS:XKXS (SEQ ID NO: 84124), ASASPXX (SEQ ID NO: 84403):VSQ:NAIS-AA¹⁷-LYF (SEQ ID NO: 84878):LKKYR (SEQ ID NO: 84229):VKS:XKXS (SEQ ID NO: 84124), ASASPXX (SEQ ID NO: 84403):VPQ:NAIS-AA¹⁷-LYF (SEQ ID NO: 84878):LKKYR (SEQ ID NO: 84229):VKS:XKXS (SEQ ID NO: 84124), NDEGLEX (SEQ ID NO: 84426):VPT:NAIS-AA¹⁷-LYF (SEQ ID NO: 84878):LKKYR (SEQ ID NO: 84229):QHN:KXEXR (SEQ ID NO: 84213), NDEGLEX (SEQ ID NO: 84426):VPT:NAIS-AA¹⁷-LYF (SEQ ID NO: 84878):LKKYR (SEQ ID NO: 84229):EHS:QXEXR (SEQ ID NO: 84276), SSVKXQP (SEQ ID NO: 84430):SRV:NAIS-AA¹⁷-LYF (SEQ ID NO: 84878):LKKYR (SEQ ID NO: 84229):EEH:LEXAXA (SEQ ID NO: 84400), RNVQXRP (SEQ ID NO: 84427):TQV:NAIS-AA¹⁷-LYF (SEQ ID NO: 84878):LKKYR (SEQ ID NO: 84229):EDH:LAXKXE (SEQ ID NO: 84399), KIPKAXX (SEQ ID NO: 84424):APT:SATS-AA¹⁷-LYY (SEQ ID NO: 84882):LRKHR (SEQ ID NO: 84233):VVK:GXGXR (SEQ ID NO: 84208), GIPEPXX (SEQ ID NO: 84419):APT:SATS-AA¹⁷-LYY (SEQ ID NO: 84882):LRKHR (SEQ ID NO: 84233):VVK:SXAXR (SEQ ID NO: 84303), SIPKAXX (SEQ ID NO: 84429):APT:SATS-AA¹⁷-LYY (SEQ ID NO: 84882):LRKHR (SEQ ID NO: 84233):VVK:GXGXR (SEQ ID NO: 84208), HVTKPTX (SEQ ID NO: 84422):APT:SATS-AA¹⁷-LYY (SEQ ID NO: 84882):LRKHR (SEQ ID NO: 84233):VVK:SXGXH (SEQ ID NO: 84304), YVPKPXX (SEQ ID NO: 84433):APT:SATS-AA¹⁷-LYY (SEQ ID NO: 84882):LRKHR (SEQ ID NO: 84233):VVK:SXGXH (SEQ ID NO: 84304), TVPKPXX (SEQ ID NO: 84432):APT:SATS-AA¹⁷-LYY (SEQ ID NO: 84882):LRKHR (SEQ ID NO: 84233):VVK:AXGXH (SEQ ID NO: 84147), KVGKAXX (SEQ ID NO: 84425):APT:SATS-AA¹⁷-LYY (SEQ ID NO: 84882):LRKHR (SEQ ID NO: 84233):VVK:XGXR (SEQ ID NO: 84123), KASKAXX (SEQ ID NO: 84423):APT:SATS-AA¹⁷-LYY (SEQ ID NO: 84882):LRKHR (SEQ ID NO: 84233):VVK:EXGXR (SEQ ID NO: 84179), GSAGPXX (SEQ ID NO: 84420):APT:SATS-AA¹⁷-LYY (SEQ ID NO: 84882):LRKHR (SEQ ID NO: 84233):VVK:RXGXS (SEQ ID NO: 84291), AAPASXX (SEQ ID NO: 84401):APT:SATS-AA¹⁷-LYY (SEQ ID NO: 84882):LRKHR (SEQ ID NO: 84233):VVK:AXGXR (SEQ ID NO: 84148), STPPTXX (SEQ ID NO: 84431):APT:SATS-AA¹⁷-LYY (SEQ ID NO: 84882):LRKHR (SEQ ID NO: 84233):VVK:SXGXR (SEQ ID NO: 84305), HVPKPXX (SEQ ID NO: 84421):APT:SATS-AA¹⁷-LYY (SEQ ID NO: 84882):LRKHR (SEQ ID NO: 84233):VVK:SXGXH (SEQ ID NO: 84304), RVPSTXX (SEQ ID NO: 84428):APT:SATS-AA¹⁷-LYY (SEQ ID NO: 84882):LRKHR (SEQ ID NO: 84233):VVK:XGXL (SEQ ID NO: 84122), ASAAPXX (SEQ ID NO: 84402):APT:SATS-AA¹⁷-LYY (SEQ ID NO: 84882):LRKHR (SEQ ID NO: 84233):VVK:XKXS (SEQ ID NO: 84124), ASASPXX (SEQ ID NO: 84403):APT:SATS-AA¹⁷-LYY (SEQ ID NO: 84882):LRKHR (SEQ ID NO: 84233):VVK:XKXS (SEQ ID NO: 84124), KIPKAXX (SEQ ID NO: 84424):VPT:SATS-AA¹⁷-LYY (SEQ ID NO: 84882):LRKHR (SEQ ID NO: 84233):VVE:GXGXR (SEQ ID NO: 84208), GIPEPXX (SEQ ID NO: 84419):VPE:SATS-AA¹⁷-LYY (SEQ ID NO: 84882):LRKHR (SEQ ID NO: 84233):TVE:SXAXR (SEQ ID NO: 84303), SIPKAXX (SEQ ID NO: 84429):VPT:SATS-AA¹⁷-LYY (SEQ ID NO: 84882):LRKHR (SEQ ID NO: 84233):VVE:GXGXR (SEQ ID NO: 84208), HVTKPTX (SEQ ID NO: 84422):APT:SATS-AA¹⁷-LYY (SEQ ID NO: 84882):LRKHR (SEQ ID NO: 84233):VVR:SXGXH (SEQ ID NO: 84304), YVPKPXX (SEQ ID NO: 84433):APT:SATS-AA¹⁷-LYY (SEQ ID NO: 84882):LRKHR (SEQ ID NO: 84233):VVR:SXGXH (SEQ ID NO: 84304), TVPKPXX (SEQ ID NO: 84432):APT:SATS-AA¹⁷-LYY (SEQ ID NO: 84882):LRKHR (SEQ ID NO: 84233):VVR:AXGXH (SEQ ID NO: 84147), KVGKAXX (SEQ ID NO: 84425):VPT:SATS-AA¹⁷-LYY (SEQ ID NO: 84882):LRKHR (SEQ ID NO: 84233):VAE:XGXR (SEQ ID NO: 84123), KASKAXX (SEQ ID NO: 84423):VPT:SATS-AA¹⁷-LYY (SEQ ID NO: 84882):LRKHR (SEQ ID NO: 84233):AVS:EXGXR (SEQ ID NO: 84179), GSAGPXX (SEQ ID NO: 84420):TPT:SATS-AA¹⁷-LYY (SEQ ID NO: 84882):LRKHR (SEQ ID NO: 84233):VVD:RXGXS (SEQ ID NO: 84291), AAPASXX (SEQ ID NO: 84401):VPA:SATS-AA¹⁷-LYY (SEQ ID NO: 84882):LRKHR (SEQ ID NO: 84233):VVE:AXGXR (SEQ ID NO: 84148), STPPTXX (SEQ ID NO: 84431):VPT:SATS-AA¹⁷-LYY (SEQ ID NO: 84882):LRKHR (SEQ ID NO: 84233):VVE:SXGXR (SEQ ID NO: 84305), HVPKPXX (SEQ ID NO: 84421):APT:SATS-AA¹⁷-LYY (SEQ ID NO: 84882):LRKHR (SEQ ID NO: 84233):VVR:SXGXH (SEQ ID NO: 84304), RVPSTXX (SEQ ID NO: 84428):APV:SATS-AA¹⁷-LYY (SEQ ID NO: 84882):LRKHR (SEQ ID NO: 84233):VEE:XGXL (SEQ ID NO: 84122), ASAAPXX (SEQ ID NO: 84402):VPQ:SATS-AA¹⁷-LYY (SEQ ID NO: 84882):LRKHR (SEQ ID NO: 84233):VRS:XKXS (SEQ ID NO: 84124), ASASPXX (SEQ ID NO: 84403):VSQ:SATS-AA¹⁷-LYY (SEQ ID NO: 84882):LRKHR (SEQ ID NO: 84233):VKS:XKXS (SEQ ID NO: 84124), ASASPXX (SEQ ID NO: 84403):VPQ:SATS-AA¹⁷-LYY (SEQ ID NO: 84882):LRKHR (SEQ ID NO: 84233):VKS:XKXS (SEQ ID NO: 84124), NDEGLEX (SEQ ID NO: 84426):VPT:SATS-AA¹⁷-LYY (SEQ ID NO: 84882):LRKHR (SEQ ID NO: 84233):QHN:KXEXR (SEQ ID NO: 84213), NDEGLEX (SEQ ID NO: 84426):VPT:SATS-AA¹⁷-LYY (SEQ ID NO: 84882):LRKHR (SEQ ID NO: 84233):EHS:QXEXR (SEQ ID NO: 84276), SSVKXQP (SEQ ID NO: 84430):SRV:SATS-AA¹⁷-LYY (SEQ ID NO: 84882):LRKHR (SEQ ID NO: 84233):EEH:LEXAXA (SEQ ID NO: 84400), RNVQXRP (SEQ ID NO: 84427):TQV:SATS-AA¹⁷-LYY (SEQ ID NO: 84882):LRKHR (SEQ ID NO: 84233):EDH:LAXKXE (SEQ ID NO: 84399), KIPKAXX (SEQ ID NO: 84424):VPT:SPIS-AA¹⁷-LYK (SEQ ID NO: 84887):LKYHY (SEQ ID NO: 84232):VAE:GXGXR (SEQ ID NO: 84208), GIPEPXX (SEQ ID NO: 84419):VPT:SPIS-AA¹⁷-LYK (SEQ ID NO: 84887):LKYHY (SEQ ID NO: 84232):VAE:SXAXR (SEQ ID NO: 84303), SIPKAXX (SEQ ID NO: 84429):VPT:SPIS-AA¹⁷-LYK (SEQ ID NO: 84887):LKYHY (SEQ ID NO: 84232):VAE:GXGXR (SEQ ID NO: 84208), HVTKPTX (SEQ ID NO: 84422):VPT:SPIS-AA¹⁷-LYK (SEQ ID NO: 84887):LKYHY (SEQ ID NO: 84232):VAE:SXGXH (SEQ ID NO: 84304), YVPKPXX (SEQ ID NO: 84433):VPT:SPIS-AA¹⁷-LYK (SEQ ID NO: 84887):LKYHY (SEQ ID NO: 84232):VAE:SXGXH (SEQ ID NO: 84304), TVPKPXX (SEQ ID NO: 84432):VPT:SPIS-AA¹⁷-LYK (SEQ ID NO: 84887):LKYHY (SEQ ID NO: 84232):VAE:AXGXH (SEQ ID NO: 84147), AVPKAXX (SEQ ID NO: 84404):VPT:SPIS-AA¹⁷-LYK (SEQ ID NO: 84887):LKYHY (SEQ ID NO: 84232):VAE:AXGXH (SEQ ID NO: 84147), KASKAXX (SEQ ID NO: 84423):VPT:SPIS-AA¹⁷-LYK (SEQ ID NO: 84887):LKYHY (SEQ ID NO: 84232):VAE:EXGXR (SEQ ID NO: 84179), GSAGPXX (SEQ ID NO: 84420):VPT:SPIS-AA¹⁷-LYK (SEQ ID NO: 84887):LKYHY (SEQ ID NO: 84232):VAE:RXGXS (SEQ ID NO: 84291), AAPASXX (SEQ ID NO: 84401):VPT:SPIS-AA¹⁷-LYK (SEQ ID NO: 84887):LKYHY (SEQ ID NO: 84232):VAE:AXGXR (SEQ ID NO: 84148), STPPTXX (SEQ ID NO: 84431):VPT:SPIS-AA¹⁷-LYK (SEQ ID NO: 84887):LKYHY (SEQ ID NO: 84232):VAE:SXGXR (SEQ ID NO: 84305), HVPKPXX (SEQ ID NO: 84421):VPT:SPIS-AA¹⁷-LYK (SEQ ID NO: 84887):LKYHY (SEQ ID NO: 84232):VAE:SXGXH (SEQ ID NO: 84304), RVPSTXX (SEQ ID NO: 84428):VPT:SPIS-AA¹⁷-LYK (SEQ ID NO: 84887):LKYHY (SEQ ID NO: 84232):VAE:XGXL (SEQ ID NO: 84122), ASAAPXX (SEQ ID NO: 84402):VPT:SPIS-AA¹⁷-LYK (SEQ ID NO: 84887):LKYHY (SEQ ID NO: 84232):VAE:XKXS (SEQ ID NO: 84124), ASASPXX (SEQ ID NO: 84403):VPT:SPIS-AA¹⁷-LYK (SEQ ID NO: 84887):LKYHY (SEQ ID NO: 84232):VAE:XKXS (SEQ ID NO: 84124), KIPKAXX (SEQ ID NO: 84424):VPT:SPIS-AA¹⁷-LYK (SEQ ID NO: 84887):LKYHY (SEQ ID NO: 84232):VVE:GXGXR (SEQ ID NO: 84208), GIPEPXX (SEQ ID NO: 84419):VPE:SPIS-AA¹⁷-LYK (SEQ ID NO: 84887):LKYHY (SEQ ID NO: 84232):TVE:SXAXR (SEQ ID NO: 84303), SIPKAXX (SEQ ID NO: 84429):VPT:SPIS-AA¹⁷-LYK (SEQ ID NO: 84887):LKYHY (SEQ ID NO: 84232):VVE:GXGXR (SEQ ID NO: 84208), HVTKPTX (SEQ ID NO: 84422):APT:SPIS-AA¹⁷-LYK (SEQ ID NO: 84887):LKYHY (SEQ ID NO: 84232):VVR:SXGXH (SEQ ID NO: 84304), YVPKPXX (SEQ ID NO: 84433):APT:SPIS-AA¹⁷-LYK (SEQ ID NO: 84887):LKYHY (SEQ ID NO: 84232):VVR:SXGXH (SEQ ID NO: 84304), TVPKPXX (SEQ ID NO: 84432):APT:SPIS-AA¹⁷-LYK (SEQ ID NO: 84887):LKYHY (SEQ ID NO: 84232):VVR:AXGXH (SEQ ID NO: 84147), AVPKAXX (SEQ ID NO: 84404):APT:SPIS-AA¹⁷-LYK (SEQ ID NO: 84887):LKYHY (SEQ ID NO: 84232):VVK:AXGXH (SEQ ID NO: 84147), KASKAXX (SEQ ID NO: 84423):VPT:SPIS-AA¹⁷-LYK (SEQ ID NO: 84887):LKYHY (SEQ ID NO: 84232):AVS:EXGXR (SEQ ID NO: 84179), GSAGPXX (SEQ ID NO: 84420):TPT:SPIS-AA¹⁷-LYK (SEQ ID NO: 84887):LKYHY (SEQ ID NO: 84232):VVD:RXGXS (SEQ ID NO: 84291), AAPASXX (SEQ ID NO: 84401):VPA:SPIS-AA¹⁷-LYK (SEQ ID NO: 84887):LKYHY (SEQ ID NO: 84232):VVE:AXGXR (SEQ ID NO: 84148), STPPTXX (SEQ ID NO: 84431):VPT:SPIS-AA¹⁷-LYK (SEQ ID NO: 84887):LKYHY (SEQ ID NO: 84232):VVE:SXGXR (SEQ ID NO: 84305), HVPKPXX (SEQ ID NO: 84421):APT:SPIS-AA¹⁷-LYK (SEQ ID NO: 84887):LKYHY (SEQ ID NO: 84232):VVR:SXGXH (SEQ ID NO: 84304), RVPSTXX (SEQ ID NO: 84428):APV:SPIS-AA¹⁷-LYK (SEQ ID NO: 84887):LKYHY (SEQ ID NO: 84232):VEE:XGXL (SEQ ID NO: 84122), ASAAPXX (SEQ ID NO: 84402):VPQ:SPIS-AA¹⁷-LYK (SEQ ID NO: 84887):LKYHY (SEQ ID NO: 84232):VRS:XKXS (SEQ ID NO: 84124), ASASPXX (SEQ ID NO: 84403):VSQ:SPIS-AA¹⁷-LYK (SEQ ID NO: 84887):LKYHY (SEQ ID NO: 84232):VKS:XKXS (SEQ ID NO: 84124), ASASPXX (SEQ ID NO: 84403):VPQ:SPIS-AA¹⁷-LYK (SEQ ID NO: 84887):LKYHY (SEQ ID NO: 84232):VKS:XKXS (SEQ ID NO: 84124), NDEGLEX (SEQ ID NO: 84426):VPT:SPIS-AA¹⁷-LYK (SEQ ID NO: 84887):LKYHY (SEQ ID NO: 84232):QHN:KXEXR (SEQ ID NO: 84213), NDEGLEX (SEQ ID NO: 84426):VPT:SPIS-AA¹⁷-LYK (SEQ ID NO: 84887):LKYHY (SEQ ID NO: 84232):EHS:QXEXR (SEQ ID NO: 84276), SSVKXQP (SEQ ID NO: 84430):SRV:SPIS-AA¹⁷-LYK (SEQ ID NO: 84887):LKYHY (SEQ ID NO: 84232):EEH:LEXAXA (SEQ ID NO: 84400), RNVQXRP (SEQ ID NO: 84427):TQV:SPIS-AA¹⁷-LYK (SEQ ID NO: 84887):LKYHY (SEQ ID NO: 84232):EDH:LAXKXE (SEQ ID NO: 84399), KIPKAXX (SEQ ID NO: 84424):VPT:EPIS-AA¹⁷-LYL (SEQ ID NO: 84874):KFKYE (SEQ ID NO: 84211):AVS:GXGXR (SEQ ID NO: 84208), GIPEPXX (SEQ ID NO: 84419):VPT:EPIS-AA¹⁷-LYL (SEQ ID NO: 84874):KFKYE (SEQ ID NO: 84211):AVS:SXAXR (SEQ ID NO: 84303), SIPKAXX (SEQ ID NO: 84429):VPT:EPIS-AA¹⁷-LYL (SEQ ID NO: 84874):KFKYE (SEQ ID NO: 84211):AVS:GXGXR (SEQ ID NO: 84208), HVTKPTX (SEQ ID NO: 84422):VPT:EPIS-AA¹⁷-LYL (SEQ ID NO: 84874):KFKYE (SEQ ID NO: 84211):AVS:SXGXH (SEQ ID NO: 84304), YVPKPXX (SEQ ID NO: 84433):VPT:EPIS-AA¹⁷-LYL (SEQ ID NO: 84874):KFKYE (SEQ ID NO: 84211):AVS:SXGXH (SEQ ID NO: 84304), TVPKPXX (SEQ ID NO: 84432):VPT:EPIS-AA¹⁷-LYL (SEQ ID NO: 84874):KFKYE (SEQ ID NO: 84211):AVS:AXGXH (SEQ ID NO: 84147), AVPKAXX (SEQ ID NO: 84404):VPT:EPIS-AA¹⁷-LYL (SEQ ID NO: 84874):KFKYE (SEQ ID NO: 84211):AVS:AXGXH (SEQ ID NO: 84147), KVGKAXX (SEQ ID NO: 84425):VPT:EPIS-AA¹⁷-LYL (SEQ ID NO: 84874):KFKYE (SEQ ID NO: 84211):AVS:XGXR (SEQ ID NO: 84123), GSAGPXX (SEQ ID NO: 84420):VPT:EPIS-AA¹⁷-LYL (SEQ ID NO: 84874):KFKYE (SEQ ID NO: 84211):AVS:RXGXS (SEQ ID NO: 84291), AAPASXX (SEQ ID NO: 84401):VPT:EPIS-AA¹⁷-LYL (SEQ ID NO: 84874):KFKYE (SEQ ID NO: 84211):AVS:AXGXR (SEQ ID NO: 84148), STPPTXX (SEQ ID NO: 84431):VPT:EPIS-AA¹⁷-LYL (SEQ ID NO: 84874):KFKYE (SEQ ID NO: 84211):AVS:SXGXR (SEQ ID NO: 84305), HVPKPXX (SEQ ID NO: 84421):VPT:EPIS-AA¹⁷-LYL (SEQ ID NO: 84874):KFKYE (SEQ ID NO: 84211):AVS:SXGXH (SEQ ID NO: 84304), RVPSTXX (SEQ ID NO: 84428):VPT:EPIS-AA¹⁷-LYL (SEQ ID NO: 84874):KFKYE (SEQ ID NO: 84211):AVS:XGXL (SEQ ID NO: 84122), ASAAPXX (SEQ ID NO: 84402):VPT:EPIS-AA¹⁷-LYL (SEQ ID NO: 84874):KFKYE (SEQ ID NO: 84211):AVS:XKXS (SEQ ID NO: 84124), ASASPXX (SEQ ID NO: 84403):VPT:EPIS-AA¹⁷-LYL (SEQ ID NO: 84874):KFKYE (SEQ ID NO: 84211):AVS:XKXS (SEQ ID NO: 84124), KIPKAXX (SEQ ID NO: 84424):VPT:EPIS-AA¹⁷-LYL (SEQ ID NO: 84874):KFKYE (SEQ ID NO: 84211):VVE:GXGXR (SEQ ID NO: 84208), GIPEPXX (SEQ ID NO: 84419):VPE:EPIS-AA¹⁷-LYL (SEQ ID NO: 84874):KFKYE (SEQ ID NO: 84211):TVE:SXAXR (SEQ ID NO: 84303), SIPKAXX (SEQ ID NO: 84429):VPT:EPIS-AA¹⁷-LYL (SEQ ID NO: 84874):KFKYE (SEQ ID NO: 84211):VVE:GXGXR (SEQ ID NO: 84208), HVTKPTX (SEQ ID NO: 84422):APT:EPIS-AA¹⁷-LYL (SEQ ID NO: 84874):KFKYE (SEQ ID NO: 84211):VVR:SXGXH (SEQ ID NO: 84304), YVPKPXX (SEQ ID NO: 84433):APT:EPIS-AA¹⁷-LYL (SEQ ID NO: 84874):KFKYE (SEQ ID NO: 84211):VVR:SXGXH (SEQ ID NO: 84304), TVPKPXX (SEQ ID NO: 84432):APT:EPIS-AA¹⁷-LYL (SEQ ID NO: 84874):KFKYE (SEQ ID NO: 84211):VVR:AXGXH (SEQ ID NO: 84147), AVPKAXX (SEQ ID NO: 84404):APT:EPIS-AA¹⁷-LYL (SEQ ID NO: 84874):KFKYE (SEQ ID NO: 84211):VVK:AXGXH (SEQ ID NO: 84147), KVGKAXX (SEQ ID NO: 84425):VPT:EPIS-AA¹⁷-LYL (SEQ ID NO: 84874):KFKYE (SEQ ID NO: 84211):VAE:XGXR (SEQ ID NO: 84123), GSAGPXX (SEQ ID NO: 84420):TPT:EPIS-AA¹⁷-LYL (SEQ ID NO: 84874):KFKYE (SEQ ID NO: 84211):VVD:RXGXS (SEQ ID NO: 84291), AAPASXX (SEQ ID NO: 84401):VPA:EPIS-AA¹⁷-LYL (SEQ ID NO: 84874):KFKYE (SEQ ID NO: 84211):VVE:AXGXR (SEQ ID NO: 84148), STPPTXX (SEQ ID NO: 84431):VPT:EPIS-AA¹⁷-LYL (SEQ ID NO: 84874):KFKYE (SEQ ID NO: 84211):VVE:SXGXR (SEQ ID NO: 84305), HVPKPXX (SEQ ID NO: 84421):APT:EPIS-AA¹⁷-LYL (SEQ ID NO: 84874):KFKYE (SEQ ID NO: 84211):VVR:SXGXH (SEQ ID NO: 84304), RVPSTXX (SEQ ID NO: 84428):APV:EPIS-AA¹⁷-LYL (SEQ ID NO: 84874):KFKYE (SEQ ID NO: 84211):VEE:XGXL (SEQ ID NO: 84122), ASAAPXX (SEQ ID NO: 84402):VPQ:EPIS-AA¹⁷-LYL (SEQ ID NO: 84874):KFKYE (SEQ ID NO: 84211):VRS:XKXS (SEQ ID NO: 84124), ASASPXX (SEQ ID NO: 84403):VSQ:EPIS-AA¹⁷-LYL (SEQ ID NO: 84874):KFKYE (SEQ ID NO: 84211):VKS:XKXS (SEQ ID NO: 84124), ASASPXX (SEQ ID NO: 84403):VPQ:EPIS-AA¹⁷-LYL (SEQ ID NO: 84874):KFKYE (SEQ ID NO: 84211):VKS:XKXS (SEQ ID NO: 84124), NDEGLEX (SEQ ID NO: 84426):VPT:EPIS-AA¹⁷-LYL (SEQ ID NO: 84874):KFKYE (SEQ ID NO: 84211):QHN:KXEXR (SEQ ID NO: 84213), NDEGLEX (SEQ ID NO: 84426):VPT:EPIS-AA¹⁷-LYL (SEQ ID NO: 84874):KFKYE (SEQ ID NO: 84211):EHS:QXEXR (SEQ ID NO: 84276), SSVKXQP (SEQ ID NO: 84430):SRV:EPIS-AA¹⁷-LYL (SEQ ID NO: 84874):KFKYE (SEQ ID NO: 84211):EEH:LEXAXA (SEQ ID NO: 84400), RNVQXRP (SEQ ID NO: 84427):TQV:EPIS-AA¹⁷-LYL (SEQ ID NO: 84874):KFKYE (SEQ ID NO: 84211):EDH:LAXKXE (SEQ ID NO: 84399), KIPKAXX (SEQ ID NO: 84424):TPT:SPIN-AA¹⁷-LYF (SEQ ID NO: 84884):YGKIP (SEQ ID NO: 84397):VVD:GXGXR (SEQ ID NO: 84208), GIPEPXX (SEQ ID NO: 84419):TPT:SPIN-AA¹⁷-LYF (SEQ ID NO: 84884):YGKIP (SEQ ID NO: 84397):VVD:SXAXR (SEQ ID NO: 84303), SIPKAXX (SEQ ID NO: 84429):TPT:SPIN-AA¹⁷-LYF (SEQ ID NO: 84884):YGKIP (SEQ ID NO: 84397):VVD:GXGXR (SEQ ID NO: 84208), HVTKPTX (SEQ ID NO: 84422):TPT:SPIN-AA¹⁷-LYF (SEQ ID NO: 84884):YGKIP (SEQ ID NO: 84397):VVD:SXGXH (SEQ ID NO: 84304), YVPKPXX (SEQ ID NO: 84433):TPT:SPIN-AA¹⁷-LYF (SEQ ID NO: 84884):YGKIP (SEQ ID NO: 84397):VVD:SXGXH (SEQ ID NO: 84304), TVPKPXX (SEQ ID NO: 84432):TPT:SPIN-AA¹⁷-LYF (SEQ ID NO: 84884):YGKIP (SEQ ID NO: 84397):VVD:AXGXH (SEQ ID NO: 84147), AVPKAXX (SEQ ID NO: 84404):TPT:SPIN-AA¹⁷-LYF (SEQ ID NO: 84884):YGKIP (SEQ ID NO: 84397):VVD:AXGXH (SEQ ID NO: 84147), KVGKAXX (SEQ ID NO: 84425):TPT:SPIN-AA¹⁷-LYF (SEQ ID NO: 84884):YGKIP (SEQ ID NO: 84397):VVD:XGXR (SEQ ID NO: 84123), KASKAXX (SEQ ID NO: 84423):TPT:SPIN-AA¹⁷-LYF (SEQ ID NO: 84884):YGKIP (SEQ ID NO: 84397):VVD:EXGXR (SEQ ID NO: 84179), AAPASXX (SEQ ID NO: 84401):TPT:SPIN-AA¹⁷-LYF (SEQ ID NO: 84884):YGKIP (SEQ ID NO: 84397):VVD:AXGXR (SEQ ID NO: 84148), STPPTXX (SEQ ID NO: 84431):TPT:SPIN-AA¹⁷-LYF (SEQ ID NO: 84884):YGKIP (SEQ ID NO: 84397):VVD:SXGXR (SEQ ID NO: 84305), HVPKPXX (SEQ ID NO: 84421):TPT:SPIN-AA¹⁷-LYF (SEQ ID NO: 84884):YGKIP (SEQ ID NO: 84397):VVD:SXGXH (SEQ ID NO: 84304), RVPSTXX (SEQ ID NO: 84428):TPT:SPIN-AA¹⁷-LYF (SEQ ID NO: 84884):YGKIP (SEQ ID NO: 84397):VVD:XGXL (SEQ ID NO: 84122), ASAAPXX (SEQ ID NO: 84402):TPT:SPIN-AA¹⁷-LYF (SEQ ID NO: 84884):YGKIP (SEQ ID NO: 84397):VVD:XKXS (SEQ ID NO: 84124), ASASPXX (SEQ ID NO: 84403):TPT:SPIN-AA¹⁷-LYF (SEQ ID NO: 84884):YGKIP (SEQ ID NO: 84397):VVD:XKXS (SEQ ID NO: 84124), KIPKAXX (SEQ ID NO: 84424):VPT:SPIN-AA¹⁷-LYF (SEQ ID NO: 84884):YGKIP (SEQ ID NO: 84397):VVE:GXGXR (SEQ ID NO: 84208), GIPEPXX (SEQ ID NO: 84419):VPE:SPIN-AA¹⁷-LYF (SEQ ID NO: 84884):YGKIP (SEQ ID NO: 84397):TVE:SXAXR (SEQ ID NO: 84303), SIPKAXX (SEQ ID NO: 84429):VPT:SPIN-AA¹⁷-LYF (SEQ ID NO: 84884):YGKIP (SEQ ID NO: 84397):VVE:GXGXR (SEQ ID NO: 84208), HVTKPTX (SEQ ID NO: 84422):APT:SPIN-AA¹⁷-LYF (SEQ ID NO: 84884):YGKIP (SEQ ID NO: 84397):VVR:SXGXH (SEQ ID NO: 84304), YVPKPXX (SEQ ID NO: 84433):APT:SPIN-AA¹⁷-LYF (SEQ ID NO: 84884):YGKIP (SEQ ID NO: 84397):VVR:SXGXH (SEQ ID NO: 84304), TVPKPXX (SEQ ID NO: 84432):APT:SPIN-AA¹⁷-LYF (SEQ ID NO: 84884):YGKIP (SEQ ID NO: 84397):VVR:AXGXH (SEQ ID NO: 84147), AVPKAXX (SEQ ID NO: 84404):APT:SPIN-AA¹⁷-LYF (SEQ ID NO: 84884):YGKIP (SEQ ID NO: 84397):VVK:AXGXH (SEQ ID NO: 84147), KVGKAXX (SEQ ID NO: 84425):VPT:SPIN-AA¹⁷-LYF (SEQ ID NO: 84884):YGKIP (SEQ ID NO: 84397):VAE:XGXR (SEQ ID NO: 84123), KASKAXX (SEQ ID NO: 84423):VPT:SPIN-AA¹⁷-LYF (SEQ ID NO: 84884):YGKIP (SEQ ID NO: 84397):AVS:EXGXR (SEQ ID NO: 84179), AAPASXX (SEQ ID NO: 84401):VPA:SPIN-AA¹⁷-LYF (SEQ ID NO: 84884):YGKIP (SEQ ID NO: 84397):VVE:AXGXR (SEQ ID NO: 84148), STPPTXX (SEQ ID NO: 84431):VPT:SPIN-AA¹⁷-LYF (SEQ ID NO: 84884):YGKIP (SEQ ID NO: 84397):VVE:SXGXR (SEQ ID NO: 84305), HVPKPXX (SEQ ID NO: 84421):APT:SPIN-AA¹⁷-LYF (SEQ ID NO: 84884):YGKIP (SEQ ID NO: 84397):VVR:SXGXH (SEQ ID NO: 84304), RVPSTXX (SEQ ID NO: 84428):APV:SPIN-AA¹⁷-LYF (SEQ ID NO: 84884):YGKIP (SEQ ID NO: 84397):VEE:XGXL (SEQ ID NO: 84122), ASAAPXX (SEQ ID NO: 84402):VPQ:SPIN-AA¹⁷-LYF (SEQ ID NO: 84884):YGKIP (SEQ ID NO: 84397):VRS:XKXS (SEQ ID NO: 84124), ASASPXX (SEQ ID NO: 84403):VSQ:SPIN-AA¹⁷-LYF (SEQ ID NO: 84884):YGKIP (SEQ ID NO: 84397):VKS:XKXS (SEQ ID NO: 84124), ASASPXX (SEQ ID NO: 84403):VPQ:SPIN-AA¹⁷-LYF (SEQ ID NO: 84884):YGKIP (SEQ ID NO: 84397):VKS:XKXS (SEQ ID NO: 84124), NDEGLEX (SEQ ID NO: 84426):VPT:SPIN-AA¹⁷-LYF (SEQ ID NO: 84884):YGKIP (SEQ ID NO: 84397):QHN:KXEXR (SEQ ID NO: 84213), NDEGLEX (SEQ ID NO: 84426):VPT:SPIN-AA¹⁷-LYF (SEQ ID NO: 84884):YGKIP (SEQ ID NO: 84397):EHS:QXEXR (SEQ ID NO: 84276), SSVKXQP (SEQ ID NO: 84430):SRV:SPIN-AA¹⁷-LYF (SEQ ID NO: 84884):YGKIP (SEQ ID NO: 84397):EEH:LEXAXA (SEQ ID NO: 84400), RNVQXRP (SEQ ID NO: 84427):TQV:SPIN-AA¹⁷-LYF (SEQ ID NO: 84884):YGKIP (SEQ ID NO: 84397):EDH:LAXKXE (SEQ ID NO: 84399), KIPKAXX (SEQ ID NO: 84424):VPA:SPIS-AA¹⁷-LYI (SEQ ID NO: 84886):YKQYE (SEQ ID NO: 84398):VVE:GXGXR (SEQ ID NO: 84208), GIPEPXX (SEQ ID NO: 84419):VPA:SPIS-AA¹⁷-LYI (SEQ ID NO: 84886):YKQYE (SEQ ID NO: 84398):VVE:SXAXR (SEQ ID NO: 84303), SIPKAXX (SEQ ID NO: 84429):VPA:SPIS-AA¹⁷-LYI (SEQ ID NO: 84886):YKQYE (SEQ ID NO: 84398):VVE:GXGXR (SEQ ID NO: 84208), HVTKPTX (SEQ ID NO: 84422):VPA:SPIS-AA¹⁷-LYI (SEQ ID NO: 84886):YKQYE (SEQ ID NO: 84398):VVE:SXGXH (SEQ ID NO: 84304), YVPKPXX (SEQ ID NO: 84433):VPA:SPIS-AA¹⁷-LYI (SEQ ID NO: 84886):YKQYE (SEQ ID NO: 84398):VVE:SXGXH (SEQ ID NO: 84304), TVPKPXX (SEQ ID NO: 84432):VPA:SPIS-AA¹⁷-LYI (SEQ ID NO: 84886):YKQYE (SEQ ID NO: 84398):VVE:AXGXH (SEQ ID NO: 84147), AVPKAXX (SEQ ID NO: 84404):VPA:SPIS-AA¹⁷-LYI (SEQ ID NO: 84886):YKQYE (SEQ ID NO: 84398):VVE:AXGXH (SEQ ID NO: 84147), KVGKAXX (SEQ ID NO: 84425):VPA:SPIS-AA¹⁷-LYI (SEQ ID NO: 84886):YKQYE (SEQ ID NO: 84398):VVE:XGXR (SEQ ID NO: 84123), KASKAXX (SEQ ID NO: 84423):VPA:SPIS-AA¹⁷-LYI (SEQ ID NO: 84886):YKQYE (SEQ ID NO: 84398):VVE:EXGXR (SEQ ID NO: 84179), GSAGPXX (SEQ ID NO: 84420):VPA:SPIS-AA¹⁷-LYI (SEQ ID NO: 84886):YKQYE (SEQ ID NO: 84398):VVE:RXGXS (SEQ ID NO: 84291), STPPTXX (SEQ ID NO: 84431):VPA:SPIS-AA¹⁷-LYI (SEQ ID NO: 84886):YKQYE (SEQ ID NO: 84398):VVE:SXGXR (SEQ ID NO: 84305), HVPKPXX (SEQ ID NO: 84421):VPA:SPIS-AA¹⁷-LYI (SEQ ID NO: 84886):YKQYE (SEQ ID NO: 84398):VVE:SXGXH (SEQ ID NO: 84304), RVPSTXX (SEQ ID NO: 84428):VPA:SPIS-AA¹⁷-LYI (SEQ ID NO: 84886):YKQYE (SEQ ID NO: 84398):VVE:XGXL (SEQ ID NO: 84122), ASAAPXX (SEQ ID NO: 84402):VPA:SPIS-AA¹⁷-LYI (SEQ ID NO: 84886):YKQYE (SEQ ID NO: 84398):VVE:XKXS (SEQ ID NO: 84124), ASASPXX (SEQ ID NO: 84403):VPA:SPIS-AA¹⁷-LYI (SEQ ID NO: 84886):YKQYE (SEQ ID NO: 84398):VVE:XKXS (SEQ ID NO: 84124), KIPKAXX (SEQ ID NO: 84424):VPT:SPIS-AA¹⁷-LYI (SEQ ID NO: 84886):YKQYE (SEQ ID NO: 84398):VVE:GXGXR (SEQ ID NO: 84208), GIPEPXX (SEQ ID NO: 84419):VPE:SPIS-AA¹⁷-LYI (SEQ ID NO: 84886):YKQYE (SEQ ID NO: 84398):TVE:SXAXR (SEQ ID NO: 84303), SIPKAXX (SEQ ID NO: 84429):VPT:SPIS-AA¹⁷-LYI (SEQ ID NO: 84886):YKQYE (SEQ ID NO: 84398):VVE:GXGXR (SEQ ID NO: 84208), HVTKPTX (SEQ ID NO: 84422):APT:SPIS-AA¹⁷-LYI (SEQ ID NO: 84886):YKQYE (SEQ ID NO: 84398):VVR:SXGXH (SEQ ID NO: 84304), YVPKPXX (SEQ ID NO: 84433):APT:SPIS-AA¹⁷-LYI (SEQ ID NO: 84886):YKQYE (SEQ ID NO: 84398):VVR:SXGXH (SEQ ID NO: 84304), TVPKPXX (SEQ ID NO: 84432):APT:SPIS-AA¹⁷-LYI (SEQ ID NO: 84886):YKQYE (SEQ ID NO: 84398):VVR:AXGXH (SEQ ID NO: 84147), AVPKAXX (SEQ ID NO: 84404):APT:SPIS-AA¹⁷-LYI (SEQ ID NO: 84886):YKQYE (SEQ ID NO: 84398):VVK:AXGXH (SEQ ID NO: 84147), KVGKAXX (SEQ ID NO: 84425):VPT:SPIS-AA¹⁷-LYI (SEQ ID NO: 84886):YKQYE (SEQ ID NO: 84398):VAE:XGXR (SEQ ID NO: 84123), KASKAXX (SEQ ID NO: 84423):VPT:SPIS-AA¹⁷-LYI (SEQ ID NO: 84886):YKQYE (SEQ ID NO: 84398):AVS:EXGXR (SEQ ID NO: 84179), GSAGPXX (SEQ ID NO: 84420):TPT:SPIS-AA¹⁷-LYI (SEQ ID NO: 84886):YKQYE (SEQ ID NO: 84398):VVD:RXGXS (SEQ ID NO: 84291), STPPTXX (SEQ ID NO: 84431):VPT:SPIS-AA¹⁷-LYI (SEQ ID NO: 84886):YKQYE (SEQ ID NO: 84398):VVE:SXGXR (SEQ ID NO: 84305), HVPKPXX (SEQ ID NO: 84421):APT:SPIS-AA¹⁷-LYI (SEQ ID NO: 84886):YKQYE (SEQ ID NO: 84398):VVR:SXGXH (SEQ ID NO: 84304), RVPSTXX (SEQ ID NO: 84428):APV:SPIS-AA¹⁷-LYI (SEQ ID NO: 84886):YKQYE (SEQ ID NO: 84398):VEE:XGXL (SEQ ID NO: 84122), ASAAPXX (SEQ ID NO: 84402):VPQ:SPIS-AA¹⁷-LYI (SEQ ID NO: 84886):YKQYE (SEQ ID NO: 84398):VRS:XKXS (SEQ ID NO: 84124), ASASPXX (SEQ ID NO: 84403):VSQ:SPIS-AA¹⁷-LYI (SEQ ID NO: 84886):YKQYE (SEQ ID NO: 84398):VKS:XKXS (SEQ ID NO: 84124), ASASPXX (SEQ ID NO: 84403):VPQ:SPIS-AA¹⁷-LYI (SEQ ID NO: 84886):YKQYE (SEQ ID NO: 84398):VKS:XKXS (SEQ ID NO: 84124), NDEGLEX (SEQ ID NO: 84426):VPT:SPIS-AA¹⁷-LYI (SEQ ID NO: 84886):YKQYE (SEQ ID NO: 84398):QHN:KXEXR (SEQ ID NO: 84213), NDEGLEX (SEQ ID NO: 84426):VPT:SPIS-AA¹⁷-LYI (SEQ ID NO: 84886):YKQYE (SEQ ID NO: 84398):EHS:QXEXR (SEQ ID NO: 84276), SSVKXQP (SEQ ID NO: 84430):SRV:SPIS-AA¹⁷-LYI (SEQ ID NO: 84886):YKQYE (SEQ ID NO: 84398):EEH:LEXAXA (SEQ ID NO: 84400), RNVQXRP (SEQ ID NO: 84427):TQV:SPIS-AA¹⁷-LYI (SEQ ID NO: 84886):YKQYE (SEQ ID NO: 84398):EDH:LAXKXE (SEQ ID NO: 84399), KIPKAXX (SEQ ID NO: 84424):VPT:SPIS-AA¹⁷-LFI (SEQ ID NO: 84885):YKQYE (SEQ ID NO: 84398):VVE:GXGXR (SEQ ID NO: 84208), GIPEPXX (SEQ ID NO: 84419):VPT:SPIS-AA¹⁷-LFI (SEQ ID NO: 84885):YKQYE (SEQ ID NO: 84398):VVE:SXAXR (SEQ ID NO: 84303), SIPKAXX (SEQ ID NO: 84429):VPT:SPIS-AA¹⁷-LFI (SEQ ID NO: 84885):YKQYE (SEQ ID NO: 84398):VVE:GXGXR (SEQ ID NO: 84208), HVTKPTX (SEQ ID NO: 84422):VPT:SPIS-AA¹⁷-LFI (SEQ ID NO: 84885):YKQYE (SEQ ID NO: 84398):VVE:SXGXH (SEQ ID NO: 84304), YVPKPXX (SEQ ID NO: 84433):VPT:SPIS-AA¹⁷-LFI (SEQ ID NO: 84885):YKQYE (SEQ ID NO: 84398):VVE:SXGXH (SEQ ID NO: 84304), TVPKPXX (SEQ ID NO: 84432):VPT:SPIS-AA¹⁷-LFI (SEQ ID NO: 84885):YKQYE (SEQ ID NO: 84398):VVE:AXGXH (SEQ ID NO: 84147), AVPKAXX (SEQ ID NO: 84404):VPT:SPIS-AA¹⁷-LFI (SEQ ID NO: 84885):YKQYE (SEQ ID NO: 84398):VVE:AXGXH (SEQ ID NO: 84147), KVGKAXX (SEQ ID NO: 84425):VPT:SPIS-AA¹⁷-LFI (SEQ ID NO: 84885):YKQYE (SEQ ID NO: 84398):VVE:XGXR (SEQ ID NO: 84123), KASKAXX (SEQ ID NO: 84423):VPT:SPIS-AA¹⁷-LFI (SEQ ID NO: 84885):YKQYE (SEQ ID NO: 84398):VVE:EXGXR (SEQ ID NO: 84179), GSAGPXX (SEQ ID NO: 84420):VPT:SPIS-AA¹⁷-LFI (SEQ ID NO: 84885):YKQYE (SEQ ID NO: 84398):VVE:RXGXS (SEQ ID NO: 84291), AAPASXX (SEQ ID NO: 84401):VPT:SPIS-AA¹⁷-LFI (SEQ ID NO: 84885):YKQYE (SEQ ID NO: 84398):VVE:AXGXR (SEQ ID NO: 84148), HVPKPXX (SEQ ID NO: 84421):VPT:SPIS-AA¹⁷-LFI (SEQ ID NO: 84885):YKQYE (SEQ ID NO: 84398):VVE:SXGXH (SEQ ID NO: 84304), RVPSTXX (SEQ ID NO: 84428):VPT:SPIS-AA¹⁷-LFI (SEQ ID NO: 84885):YKQYE (SEQ ID NO: 84398):VVE:XGXL (SEQ ID NO: 84122), ASAAPXX (SEQ ID NO: 84402):VPT:SPIS-AA¹⁷-LFI (SEQ ID NO: 84885):YKQYE (SEQ ID NO: 84398):VVE:XKXS (SEQ ID NO: 84124), ASASPXX (SEQ ID NO: 84403):VPT:SPIS-AA¹⁷-LFI (SEQ ID NO: 84885):YKQYE (SEQ ID NO: 84398):VVE:XKXS (SEQ ID NO: 84124), GIPEPXX (SEQ ID NO: 84419):VPE:SPIS-AA¹⁷-LFI (SEQ ID NO: 84885):YKQYE (SEQ ID NO: 84398):TVE:SXAXR (SEQ ID NO: 84303), HVTKPTX (SEQ ID NO: 84422):APT:SPIS-AA¹⁷-LFI (SEQ ID NO: 84885):YKQYE (SEQ ID NO: 84398):VVR:SXGXH (SEQ ID NO: 84304), YVPKPXX (SEQ ID NO: 84433):APT:SPIS-AA¹⁷-LFI (SEQ ID NO: 84885):YKQYE (SEQ ID NO: 84398):VVR:SXGXH (SEQ ID NO: 84304), TVPKPXX (SEQ ID NO: 84432):APT:SPIS-AA¹⁷-LFI (SEQ ID NO: 84885):YKQYE (SEQ ID NO: 84398):VVR:AXGXH (SEQ ID NO: 84147), AVPKAXX (SEQ ID NO: 84404):APT:SPIS-AA¹⁷-LFI (SEQ ID NO: 84885):YKQYE (SEQ ID NO: 84398):VVK:AXGXH (SEQ ID NO: 84147), KVGKAXX (SEQ ID NO: 84425):VPT:SPIS-AA¹⁷-LFI (SEQ ID NO: 84885):YKQYE (SEQ ID NO: 84398):VAE:XGXR (SEQ ID NO: 84123), KASKAXX (SEQ ID NO: 84423):VPT:SPIS-AA¹⁷-LFI (SEQ ID NO: 84885):YKQYE (SEQ ID NO: 84398):AVS:EXGXR (SEQ ID NO: 84179), GSAGPXX (SEQ ID NO: 84420):TPT:SPIS-AA¹⁷-LFI (SEQ ID NO: 84885):YKQYE (SEQ ID NO: 84398):VVD:RXGXS (SEQ ID NO: 84291), AAPASXX (SEQ ID NO: 84401):VPA:SPIS-AA¹⁷-LFI (SEQ ID NO: 84885):YKQYE (SEQ ID NO: 84398):VVE:AXGXR (SEQ ID NO: 84148), HVPKPXX (SEQ ID NO: 84421):APT:SPIS-AA¹⁷-LFI (SEQ ID NO: 84885):YKQYE (SEQ ID NO: 84398):VVR:SXGXH (SEQ ID NO: 84304), RVPSTXX (SEQ ID NO: 84428):APV:SPIS-AA¹⁷-LFI (SEQ ID NO: 84885):YKQYE (SEQ ID NO: 84398):VEE:XGXL (SEQ ID NO: 84122), ASAAPXX (SEQ ID NO: 84402):VPQ:SPIS-AA¹⁷-LFI (SEQ ID NO: 84885):YKQYE (SEQ ID NO: 84398):VRS:XKXS (SEQ ID NO: 84124), ASASPXX (SEQ ID NO: 84403):VSQ:SPIS-AA¹⁷-LFI (SEQ ID NO: 84885):YKQYE (SEQ ID NO: 84398):VKS:XKXS (SEQ ID NO: 84124), ASASPXX (SEQ ID NO: 84403):VPQ:SPIS-AA¹⁷-LFI (SEQ ID NO: 84885):YKQYE (SEQ ID NO: 84398):VKS:XKXS (SEQ ID NO: 84124), NDEGLEX (SEQ ID NO: 84426):VPT:SPIS-AA¹⁷-LFI (SEQ ID NO: 84885):YKQYE (SEQ ID NO: 84398):QHN:KXEXR (SEQ ID NO: 84213), NDEGLEX (SEQ ID NO: 84426):VPT:SPIS-AA¹⁷-LFI (SEQ ID NO: 84885):YKQYE (SEQ ID NO: 84398):EHS:QXEXR (SEQ ID NO: 84276), SSVKXQP (SEQ ID NO: 84430):SRV:SPIS-AA¹⁷-LFI (SEQ ID NO: 84885):YKQYE (SEQ ID NO: 84398):EEH:LEXAXA (SEQ ID NO: 84400), RNVQXRP (SEQ ID NO: 84427):TQV:SPIS-AA¹⁷-LFI (SEQ ID NO: 84885):YKQYE (SEQ ID NO: 84398):EDH:LAXKXE (SEQ ID NO: 84399), KIPKAXX (SEQ ID NO: 84424):APV:KPLS-AA¹⁷-LYV (SEQ ID NO: 84877):DHHKD (SEQ ID NO: 84149):VEE:GXGXR (SEQ ID NO: 84208), GIPEPXX (SEQ ID NO: 84419):APV:KPLS-AA¹⁷-LYV (SEQ ID NO: 84877):DHHKD (SEQ ID NO: 84149):VEE:SXAXR (SEQ ID NO: 84303), SIPKAXX (SEQ ID NO: 84429):APV:KPLS-AA¹⁷-LYV (SEQ ID NO: 84877):DHHKD (SEQ ID NO: 84149):VEE:GXGXR (SEQ ID NO: 84208), HVTKPTX (SEQ ID NO: 84422):APV:KPLS-AA¹⁷-LYV (SEQ ID NO: 84877):DHHKD (SEQ ID NO: 84149):VEE:SXGXH (SEQ ID NO: 84304), YVPKPXX (SEQ ID NO: 84433):APV:KPLS-AA¹⁷-LYV (SEQ ID NO: 84877):DHHKD (SEQ ID NO: 84149):VEE:SXGXH (SEQ ID NO: 84304), TVPKPXX (SEQ ID NO: 84432):APV:KPLS-AA¹⁷-LYV (SEQ ID NO: 84877):DHHKD (SEQ ID NO: 84149):VEE:AXGXH (SEQ ID NO: 84147), AVPKAXX (SEQ ID NO: 84404):APV:KPLS-AA¹⁷-LYV (SEQ ID NO: 84877):DHHKD (SEQ ID NO: 84149):VEE:AXGXH (SEQ ID NO: 84147), KVGKAXX (SEQ ID NO: 84425):APV:KPLS-AA¹⁷-LYV (SEQ ID NO: 84877):DHHKD (SEQ ID NO: 84149):VEE:XGXR (SEQ ID NO: 84123), KASKAXX (SEQ ID NO: 84423):APV:KPLS-AA¹⁷-LYV (SEQ ID NO: 84877):DHHKD (SEQ ID NO: 84149):VEE:EXGXR (SEQ ID NO: 84179), GSAGPXX (SEQ ID NO: 84420):APV:KPLS-AA¹⁷-LYV (SEQ ID NO: 84877):DHHKD (SEQ ID NO: 84149):VEE:RXGXS (SEQ ID NO: 84291), AAPASXX (SEQ ID NO: 84401):APV:KPLS-AA¹⁷-LYV (SEQ ID NO: 84877):DHHKD (SEQ ID NO: 84149):VEE:AXGXR (SEQ ID NO: 84148), STPPTXX (SEQ ID NO: 84431):APV:KPLS-AA¹⁷-LYV (SEQ ID NO: 84877):DHHKD (SEQ ID NO: 84149):VEE:SXGXR (SEQ ID NO: 84305), HVPKPXX (SEQ ID NO: 84421):APV:KPLS-AA¹⁷-LYV (SEQ ID NO: 84877):DHHKD (SEQ ID NO: 84149):VEE:SXGXH (SEQ ID NO: 84304), ASAAPXX (SEQ ID NO: 84402):APV:KPLS-AA¹⁷-LYV (SEQ ID NO: 84877):DHHKD (SEQ ID NO: 84149):VEE:XKXS (SEQ ID NO: 84124), ASASPXX (SEQ ID NO: 84403):APV:KPLS-AA¹⁷-LYV (SEQ ID NO: 84877):DHHKD (SEQ ID NO: 84149):VEE:XKXS (SEQ ID NO: 84124), KIPKAXX (SEQ ID NO: 84424):VPT:KPLS-AA¹⁷-LYV (SEQ ID NO: 84877):DHHKD (SEQ ID NO: 84149):VVE:GXGXR (SEQ ID NO: 84208), GIPEPXX (SEQ ID NO: 84419):VPE:KPLS-AA¹⁷-LYV (SEQ ID NO: 84877):DHHKD (SEQ ID NO: 84149):TVE:SXAXR (SEQ ID NO: 84303), SIPKAXX (SEQ ID NO: 84429):VPT:KPLS-AA¹⁷-LYV (SEQ ID NO: 84877):DHHKD (SEQ ID NO: 84149):VVE:GXGXR (SEQ ID NO: 84208), HVTKPTX (SEQ ID NO: 84422):APT:KPLS-AA¹⁷-LYV (SEQ ID NO: 84877):DHHKD (SEQ ID NO: 84149):VVR:SXGXH (SEQ ID NO: 84304), YVPKPXX (SEQ ID NO: 84433):APT:KPLS-AA¹⁷-LYV (SEQ ID NO: 84877):DHHKD (SEQ ID NO: 84149):VVR:SXGXH (SEQ ID NO: 84304), TVPKPXX (SEQ ID NO: 84432):APT:KPLS-AA¹⁷-LYV (SEQ ID NO: 84877):DHHKD (SEQ ID NO: 84149):VVR:AXGXH (SEQ ID NO: 84147), AVPKAXX (SEQ ID NO: 84404):APT:KPLS-AA¹⁷-LYV (SEQ ID NO: 84877):DHHKD (SEQ ID NO: 84149):VVK:AXGXH (SEQ ID NO: 84147), KVGKAXX (SEQ ID NO: 84425):VPT:KPLS-AA¹⁷-LYV (SEQ ID NO: 84877):DHHKD (SEQ ID NO: 84149):VAE:XGXR (SEQ ID NO: 84123), KASKAXX (SEQ ID NO: 84423):VPT:KPLS-AA¹⁷-LYV (SEQ ID NO: 84877):DHHKD (SEQ ID NO: 84149):AVS:EXGXR (SEQ ID NO: 84179), GSAGPXX (SEQ ID NO: 84420):TPT:KPLS-AA¹⁷-LYV (SEQ ID NO: 84877):DHHKD (SEQ ID NO: 84149):VVD:RXGXS (SEQ ID NO: 84291), AAPASXX (SEQ ID NO: 84401):VPA:KPLS-AA¹⁷-LYV (SEQ ID NO: 84877):DHHKD (SEQ ID NO: 84149):VVE:AXGXR (SEQ ID NO: 84148), STPPTXX (SEQ ID NO: 84431):VPT:KPLS-AA¹⁷-LYV (SEQ ID NO: 84877):DHHKD (SEQ ID NO: 84149):VVE:SXGXR (SEQ ID NO: 84305), HVPKPXX (SEQ ID NO: 84421):APT:KPLS-AA¹⁷-LYV (SEQ ID NO: 84877):DHHKD (SEQ ID NO: 84149):VVR:SXGXH (SEQ ID NO: 84304), ASAAPXX (SEQ ID NO: 84402):VPQ:KPLS-AA¹⁷-LYV (SEQ ID NO: 84877):DHHKD (SEQ ID NO: 84149):VRS:XKXS (SEQ ID NO: 84124), ASASPXX (SEQ ID NO: 84403):VSQ:KPLS-AA¹⁷-LYV (SEQ ID NO: 84877):DHHKD (SEQ ID NO: 84149):VKS:XKXS (SEQ ID NO: 84124), ASASPXX (SEQ ID NO: 84403):VPQ:KPLS-AA¹⁷-LYV (SEQ ID NO: 84877):DHHKD (SEQ ID NO: 84149):VKS:XKXS (SEQ ID NO: 84124), NDEGLEX (SEQ ID NO: 84426):VPT:KPLS-AA¹⁷-LYV (SEQ ID NO: 84877):DHHKD (SEQ ID NO: 84149):QHN:KXEXR (SEQ ID NO: 84213), NDEGLEX (SEQ ID NO: 84426):VPT:KPLS-AA¹⁷-LYV (SEQ ID NO: 84877):DHHKD (SEQ ID NO: 84149):EHS:QXEXR (SEQ ID NO: 84276), SSVKXQP (SEQ ID NO: 84430):SRV:KPLS-AA¹⁷-LYV (SEQ ID NO: 84877):DHHKD (SEQ ID NO: 84149):EEH:LEXAXA (SEQ ID NO: 84400), RNVQXRP (SEQ ID NO: 84427):TQV:KPLS-AA¹⁷-LYV (SEQ ID NO: 84877):DHHKD (SEQ ID NO: 84149):EDH:LAXKXE (SEQ ID NO: 84399), KIPKAXX (SEQ ID NO: 84424):VPQ:EPLP-AA¹⁷-VYY (SEQ ID NO: 84875):EQLSN (SEQ ID NO: 84178):VRS:GXGXR (SEQ ID NO: 84208), GIPEPXX (SEQ ID NO: 84419):VPQ:EPLP-AA¹⁷-VYY (SEQ ID NO: 84875):EQLSN (SEQ ID NO: 84178):VRS:SXAXR (SEQ ID NO: 84303), SIPKAXX (SEQ ID NO: 84429):VPQ:EPLP-AA¹⁷-VYY (SEQ ID NO: 84875):EQLSN (SEQ ID NO: 84178):VRS:GXGXR (SEQ ID NO: 84208), HVTKPTX (SEQ ID NO: 84422):VPQ:EPLP-AA¹⁷-VYY (SEQ ID NO: 84875):EQLSN (SEQ ID NO: 84178):VRS:SXGXH (SEQ ID NO: 84304), YVPKPXX (SEQ ID NO: 84433):VPQ:EPLP-AA¹⁷-VYY (SEQ ID NO: 84875):EQLSN (SEQ ID NO: 84178):VRS:SXGXH (SEQ ID NO: 84304), TVPKPXX (SEQ ID NO: 84432):VPQ:EPLP-AA¹⁷-VYY (SEQ ID NO: 84875):EQLSN (SEQ ID NO: 84178):VRS:AXGXH (SEQ ID NO: 84147), AVPKAXX (SEQ ID NO: 84404):VPQ:EPLP-AA¹⁷-VYY (SEQ ID NO: 84875):EQLSN (SEQ ID NO: 84178):VRS:AXGXH (SEQ ID NO: 84147), KVGKAXX (SEQ ID NO: 84425):VPQ:EPLP-AA¹⁷-VYY (SEQ ID NO: 84875):EQLSN (SEQ ID NO: 84178):VRS:XGXR (SEQ ID NO: 84123), KASKAXX (SEQ ID NO: 84423):VPQ:EPLP-AA¹⁷-VYY (SEQ ID NO: 84875):EQLSN (SEQ ID NO: 84178):VRS:EXGXR (SEQ ID NO: 84179), GSAGPXX (SEQ ID NO: 84420):VPQ:EPLP-AA¹⁷-VYY (SEQ ID NO: 84875):EQLSN (SEQ ID NO: 84178):VRS:RXGXS (SEQ ID NO: 84291), AAPASXX (SEQ ID NO: 84401):VPQ:EPLP-AA¹⁷-VYY (SEQ ID NO: 84875):EQLSN (SEQ ID NO: 84178):VRS:AXGXR (SEQ ID NO: 84148), STPPTXX (SEQ ID NO: 84431):VPQ:EPLP-AA¹⁷-VYY (SEQ ID NO: 84875):EQLSN (SEQ ID NO: 84178):VRS:SXGXR (SEQ ID NO: 84305), HVPKPXX (SEQ ID NO: 84421):VPQ:EPLP-AA¹⁷-VYY (SEQ ID NO: 84875):EQLSN (SEQ ID NO: 84178):VRS:SXGXH (SEQ ID NO: 84304), RVPSTXX (SEQ ID NO: 84428):VPQ:EPLP-AA¹⁷-VYY (SEQ ID NO: 84875):EQLSN (SEQ ID NO: 84178):VRS:XGXL (SEQ ID NO: 84122), ASASPXX (SEQ ID NO: 84403):VPQ:EPLP-AA¹⁷-VYY (SEQ ID NO: 84875):EQLSN (SEQ ID NO: 84178):VRS:XKXS (SEQ ID NO: 84124), KIPKAXX (SEQ ID NO: 84424):VPT:EPLP-AA¹⁷-VYY (SEQ ID NO: 84875):EQLSN (SEQ ID NO: 84178):VVE:GXGXR (SEQ ID NO: 84208), GIPEPXX (SEQ ID NO: 84419):VPE:EPLP-AA¹⁷-VYY (SEQ ID NO: 84875):EQLSN (SEQ ID NO: 84178):TVE:SXAXR (SEQ ID NO: 84303), SIPKAXX (SEQ ID NO: 84429):VPT:EPLP-AA¹⁷-VYY (SEQ ID NO: 84875):EQLSN (SEQ ID NO: 84178):VVE:GXGXR (SEQ ID NO: 84208), HVTKPTX (SEQ ID NO: 84422):APT:EPLP-AA¹⁷-VYY (SEQ ID NO: 84875):EQLSN (SEQ ID NO: 84178):VVR:SXGXH (SEQ ID NO: 84304), YVPKPXX (SEQ ID NO: 84433):APT:EPLP-AA¹⁷-VYY (SEQ ID NO: 84875):EQLSN (SEQ ID NO: 84178):VVR:SXGXH (SEQ ID NO: 84304), TVPKPXX (SEQ ID NO: 84432):APT:EPLP-AA¹⁷-VYY (SEQ ID NO: 84875):EQLSN (SEQ ID NO: 84178):VVR:AXGXH (SEQ ID NO: 84147), AVPKAXX (SEQ ID NO: 84404):APT:EPLP-AA¹⁷-VYY (SEQ ID NO: 84875):EQLSN (SEQ ID NO: 84178):VVK:AXGXH (SEQ ID NO: 84147), KVGKAXX (SEQ ID NO: 84425):VPT:EPLP-AA¹⁷-VYY (SEQ ID NO: 84875):EQLSN (SEQ ID NO: 84178):VAE:XGXR (SEQ ID NO: 84123), KASKAXX (SEQ ID NO: 84423):VPT:EPLP-AA¹⁷-VYY (SEQ ID NO: 84875):EQLSN (SEQ ID NO: 84178):AVS:EXGXR (SEQ ID NO: 84179), GSAGPXX (SEQ ID NO: 84420):TPT:EPLP-AA¹⁷-VYY (SEQ ID NO: 84875):EQLSN (SEQ ID NO: 84178):VVD:RXGXS (SEQ ID NO: 84291), AAPASXX (SEQ ID NO: 84401):VPA:EPLP-AA¹⁷-VYY (SEQ ID NO: 84875):EQLSN (SEQ ID NO: 84178):VVE:AXGXR (SEQ ID NO: 84148), STPPTXX (SEQ ID NO: 84431):VPT:EPLP-AA¹⁷-VYY (SEQ ID NO: 84875):EQLSN (SEQ ID NO: 84178):VVE:SXGXR (SEQ ID NO: 84305), HVPKPXX (SEQ ID NO: 84421):APT:EPLP-AA¹⁷-VYY (SEQ ID NO: 84875):EQLSN (SEQ ID NO: 84178):VVR:SXGXH (SEQ ID NO: 84304), RVPSTXX (SEQ ID NO: 84428):APV:EPLP-AA¹⁷-VYY (SEQ ID NO: 84875):EQLSN (SEQ ID NO: 84178):VEE:XGXL (SEQ ID NO: 84122), ASASPXX (SEQ ID NO: 84403):VSQ:EPLP-AA¹⁷-VYY (SEQ ID NO: 84875):EQLSN (SEQ ID NO: 84178):VKS:XKXS (SEQ ID NO: 84124), ASASPXX (SEQ ID NO: 84403):VPQ:EPLP-AA¹⁷-VYY (SEQ ID NO: 84875):EQLSN (SEQ ID NO: 84178):VKS:XKXS (SEQ ID NO: 84124), NDEGLEX (SEQ ID NO: 84426):VPT:EPLP-AA¹⁷-VYY (SEQ ID NO: 84875):EQLSN (SEQ ID NO: 84178):QHN:KXEXR (SEQ ID NO: 84213), NDEGLEX (SEQ ID NO: 84426):VPT:EPLP-AA¹⁷-VYY (SEQ ID NO: 84875):EQLSN (SEQ ID NO: 84178):EHS:QXEXR (SEQ ID NO: 84276), SSVKXQP (SEQ ID NO: 84430):SRV:EPLP-AA¹⁷-VYY (SEQ ID NO: 84875):EQLSN (SEQ ID NO: 84178):EEH:LEXAXA (SEQ ID NO: 84400), RNVQXRP (SEQ ID NO: 84427):TQV:EPLP-AA¹⁷-VYY (SEQ ID NO: 84875):EQLSN (SEQ ID NO: 84178):EDH:LAXKXE (SEQ ID NO: 84399), KIPKAXX (SEQ ID NO: 84424):VSQ:EPLT-AA¹⁷-LYY (SEQ ID NO: 84876):EQLSN (SEQ ID NO: 84178):VKS:GXGXR (SEQ ID NO: 84208), GIPEPXX (SEQ ID NO: 84419):VSQ:EPLT-AA¹⁷-LYY (SEQ ID NO: 84876):EQLSN (SEQ ID NO: 84178):VKS:SXAXR (SEQ ID NO: 84303), SIPKAXX (SEQ ID NO: 84429):VSQ:EPLT-AA¹⁷-LYY (SEQ ID NO: 84876):EQLSN (SEQ ID NO: 84178):VKS:GXGXR (SEQ ID NO: 84208), HVTKPTX (SEQ ID NO: 84422):VSQ:EPLT-AA¹⁷-LYY (SEQ ID NO: 84876):EQLSN (SEQ ID NO: 84178):VKS:SXGXH (SEQ ID NO: 84304), YVPKPXX (SEQ ID NO: 84433):VSQ:EPLT-AA¹⁷-LYY (SEQ ID NO: 84876):EQLSN (SEQ ID NO: 84178):VKS:SXGXH (SEQ ID NO: 84304), TVPKPXX (SEQ ID NO: 84432):VSQ:EPLT-AA¹⁷-LYY (SEQ ID NO: 84876):EQLSN (SEQ ID NO: 84178):VKS:AXGXH (SEQ ID NO: 84147), AVPKAXX (SEQ ID NO: 84404):VSQ:EPLT-AA¹⁷-LYY (SEQ ID NO: 84876):EQLSN (SEQ ID NO: 84178):VKS:AXGXH (SEQ ID NO: 84147), KVGKAXX (SEQ ID NO: 84425):VSQ:EPLT-AA¹⁷-LYY (SEQ ID NO: 84876):EQLSN (SEQ ID NO: 84178):VKS:XGXR (SEQ ID NO: 84123), KASKAXX (SEQ ID NO: 84423):VSQ:EPLT-AA¹⁷-LYY (SEQ ID NO: 84876):EQLSN (SEQ ID NO: 84178):VKS:EXGXR (SEQ ID NO: 84179), GSAGPXX (SEQ ID NO: 84420):VSQ:EPLT-AA¹⁷-LYY (SEQ ID NO: 84876):EQLSN (SEQ ID NO: 84178):VKS:RXGXS (SEQ ID NO: 84291), AAPASXX (SEQ ID NO: 84401):VSQ:EPLT-AA¹⁷-LYY (SEQ ID NO: 84876):EQLSN (SEQ ID NO: 84178):VKS:AXGXR (SEQ ID NO: 84148), STPPTXX (SEQ ID NO: 84431):VSQ:EPLT-AA¹⁷-LYY (SEQ ID NO: 84876):EQLSN (SEQ ID NO: 84178):VKS:SXGXR (SEQ ID NO: 84305), HVPKPXX (SEQ ID NO: 84421):VSQ:EPLT-AA¹⁷-LYY (SEQ ID NO: 84876):EQLSN (SEQ ID NO: 84178):VKS:SXGXH (SEQ ID NO: 84304), RVPSTXX (SEQ ID NO: 84428):VSQ:EPLT-AA¹⁷-LYY (SEQ ID NO: 84876):EQLSN (SEQ ID NO: 84178):VKS:XGXL (SEQ ID NO: 84122), ASAAPXX (SEQ ID NO: 84402):VSQ:EPLT-AA¹⁷-LYY (SEQ ID NO: 84876):EQLSN (SEQ ID NO: 84178):VKS:XKXS (SEQ ID NO: 84124), ASASPXX (SEQ ID NO: 84403):VSQ:EPLT-AA¹⁷-LYY (SEQ ID NO: 84876):EQLSN (SEQ ID NO: 84178):VKS:XKXS (SEQ ID NO: 84124), KIPKAXX (SEQ ID NO: 84424):VPT:EPLT-AA¹⁷-LYY (SEQ ID NO: 84876):EQLSN (SEQ ID NO: 84178):VVE:GXGXR (SEQ ID NO: 84208), GIPEPXX (SEQ ID NO: 84419):VPE:EPLT-AA¹⁷-LYY (SEQ ID NO: 84876):EQLSN (SEQ ID NO: 84178):TVE:SXAXR (SEQ ID NO: 84303), SIPKAXX (SEQ ID NO: 84429):VPT:EPLT-AA¹⁷-LYY (SEQ ID NO: 84876):EQLSN (SEQ ID NO: 84178):VVE:GXGXR (SEQ ID NO: 84208), HVTKPTX (SEQ ID NO: 84422):APT:EPLT-AA¹⁷-LYY (SEQ ID NO: 84876):EQLSN (SEQ ID NO: 84178):VVR:SXGXH (SEQ ID NO: 84304), YVPKPXX (SEQ ID NO: 84433):APT:EPLT-AA¹⁷-LYY (SEQ ID NO: 84876):EQLSN (SEQ ID NO: 84178):VVR:SXGXH (SEQ ID NO: 84304), TVPKPXX (SEQ ID NO: 84432):APT:EPLT-AA¹⁷-LYY (SEQ ID NO: 84876):EQLSN (SEQ ID NO: 84178):VVR:AXGXH (SEQ ID NO: 84147), AVPKAXX (SEQ ID NO: 84404):APT:EPLT-AA¹⁷-LYY (SEQ ID NO: 84876):EQLSN (SEQ ID NO: 84178):VVK:AXGXH (SEQ ID NO: 84147), KVGKAXX (SEQ ID NO: 84425):VPT:EPLT-AA¹⁷-LYY (SEQ ID NO: 84876):EQLSN (SEQ ID NO: 84178):VAE:XGXR (SEQ ID NO: 84123), KASKAXX (SEQ ID NO: 84423):VPT:EPLT-AA¹⁷-LYY (SEQ ID NO: 84876):EQLSN (SEQ ID NO: 84178):AVS:EXGXR (SEQ ID NO: 84179), GSAGPXX (SEQ ID NO: 84420):TPT:EPLT-AA¹⁷-LYY (SEQ ID NO: 84876):EQLSN (SEQ ID NO: 84178):VVD:RXGXS (SEQ ID NO: 84291), AAPASXX (SEQ ID NO: 84401):VPA:EPLT-AA¹⁷-LYY (SEQ ID NO: 84876):EQLSN (SEQ ID NO: 84178):VVE:AXGXR (SEQ ID NO: 84148), STPPTXX (SEQ ID NO: 84431):VPT:EPLT-AA¹⁷-LYY (SEQ ID NO: 84876):EQLSN (SEQ ID NO: 84178):VVE:SXGXR (SEQ ID NO: 84305), HVPKPXX (SEQ ID NO: 84421):APT:EPLT-AA¹⁷-LYY (SEQ ID NO: 84876):EQLSN (SEQ ID NO: 84178):VVR:SXGXH (SEQ ID NO: 84304), RVPSTXX (SEQ ID NO: 84428):APV:EPLT-AA¹⁷-LYY (SEQ ID NO: 84876):EQLSN (SEQ ID NO: 84178):VEE:XGXL (SEQ ID NO: 84122), ASAAPXX (SEQ ID NO: 84402):VPQ:EPLT-AA¹⁷-LYY (SEQ ID NO: 84876):EQLSN (SEQ ID NO: 84178):VRS:XKXS (SEQ ID NO: 84124), NDEGLEX (SEQ ID NO: 84426):VPT:EPLT-AA¹⁷-LYY (SEQ ID NO: 84876):EQLSN (SEQ ID NO: 84178):QHN:KXEXR (SEQ ID NO: 84213), NDEGLEX (SEQ ID NO: 84426):VPT:EPLT-AA¹⁷-LYY (SEQ ID NO: 84876):EQLSN (SEQ ID NO: 84178):EHS:QXEXR (SEQ ID NO: 84276), SSVKXQP (SEQ ID NO: 84430):SRV:EPLT-AA¹⁷-LYY (SEQ ID NO: 84876):EQLSN (SEQ ID NO: 84178):EEH:LEXAXA (SEQ ID NO: 84400), RNVQXRP (SEQ ID NO: 84427):TQV:EPLT-AA¹⁷-LYY (SEQ ID NO: 84876):EQLSN (SEQ ID NO: 84178):EDH:LAXKXE (SEQ ID NO: 84399), KIPKAXX (SEQ ID NO: 84424):VPQ:EPLT-AA¹⁷-LYY (SEQ ID NO: 84876):EQLSN (SEQ ID NO: 84178):VKS:GXGXR (SEQ ID NO: 84208), GIPEPXX (SEQ ID NO: 84419):VPQ:EPLT-AA¹⁷-LYY (SEQ ID NO: 84876):EQLSN (SEQ ID NO: 84178):VKS:SXAXR (SEQ ID NO: 84303), SIPKAXX (SEQ ID NO: 84429):VPQ:EPLT-AA¹⁷-LYY (SEQ ID NO: 84876):EQLSN (SEQ ID NO: 84178):VKS:GXGXR (SEQ ID NO: 84208), HVTKPTX (SEQ ID NO: 84422):VPQ:EPLT-AA¹⁷-LYY (SEQ ID NO: 84876):EQLSN (SEQ ID NO: 84178):VKS:SXGXH (SEQ ID NO: 84304), YVPKPXX (SEQ ID NO: 84433):VPQ:EPLT-AA¹⁷-LYY (SEQ ID NO: 84876):EQLSN (SEQ ID NO: 84178):VKS:SXGXH (SEQ ID NO: 84304), TVPKPXX (SEQ ID NO: 84432):VPQ:EPLT-AA¹⁷-LYY (SEQ ID NO: 84876):EQLSN (SEQ ID NO: 84178):VKS:AXGXH (SEQ ID NO: 84147), AVPKAXX (SEQ ID NO: 84404):VPQ:EPLT-AA¹⁷-LYY (SEQ ID NO: 84876):EQLSN (SEQ ID NO: 84178):VKS:AXGXH (SEQ ID NO: 84147), KVGKAXX (SEQ ID NO: 84425):VPQ:EPLT-AA¹⁷-LYY (SEQ ID NO: 84876):EQLSN (SEQ ID NO: 84178):VKS:XGXR (SEQ ID NO: 84123), KASKAXX (SEQ ID NO: 84423):VPQ:EPLT-AA¹⁷-LYY (SEQ ID NO: 84876):EQLSN (SEQ ID NO: 84178):VKS:EXGXR (SEQ ID NO: 84179), GSAGPXX (SEQ ID NO: 84420):VPQ:EPLT-AA¹⁷-LYY (SEQ ID NO: 84876):EQLSN (SEQ ID NO: 84178):VKS:RXGXS (SEQ ID NO: 84291), AAPASXX (SEQ ID NO: 84401):VPQ:EPLT-AA¹⁷-LYY (SEQ ID NO: 84876):EQLSN (SEQ ID NO: 84178):VKS:AXGXR (SEQ ID NO: 84148), STPPTXX (SEQ ID NO: 84431):VPQ:EPLT-AA¹⁷-LYY (SEQ ID NO: 84876):EQLSN (SEQ ID NO: 84178):VKS:SXGXR (SEQ ID NO: 84305), HVPKPXX (SEQ ID NO: 84421):VPQ:EPLT-AA¹⁷-LYY (SEQ ID NO: 84876):EQLSN (SEQ ID NO: 84178):VKS:SXGXH (SEQ ID NO: 84304), RVPSTXX (SEQ ID NO: 84428):VPQ:EPLT-AA¹⁷-LYY (SEQ ID NO: 84876):EQLSN (SEQ ID NO: 84178):VKS:XGXL (SEQ ID NO: 84122), ASAAPXX (SEQ ID NO: 84402):VPQ:EPLT-AA¹⁷-LYY (SEQ ID NO: 84876):EQLSN (SEQ ID NO: 84178):VKS:XKXS (SEQ ID NO: 84124), ASASPXX (SEQ ID NO: 84403):VPQ:EPLT-AA¹⁷-LYY (SEQ ID NO: 84876):EQLSN (SEQ ID NO: 84178):VKS:XKXS (SEQ ID NO: 84124), NDEGLEX (SEQ ID NO: 84426):VPT:SNIT-AA¹⁷-QIM (SEQ ID NO: 84883):IGEMS (SEQ ID NO: 84209):QHN:QXEXR (SEQ ID NO: 84276), KIPKAXX (SEQ ID NO: 84424):VPT:SNIT-AA¹⁷-QIM (SEQ ID NO: 84883):IGEMS (SEQ ID NO: 84209):VVE:GXGXR (SEQ ID NO: 84208), GIPEPXX (SEQ ID NO: 84419):VPE:SNIT-AA¹⁷-QIM (SEQ ID NO: 84883):IGEMS (SEQ ID NO: 84209):TVE:SXAXR (SEQ ID NO: 84303), SIPKAXX (SEQ ID NO: 84429):VPT:SNIT-AA¹⁷-QIM (SEQ ID NO: 84883):IGEMS (SEQ ID NO: 84209):VVE:GXGXR (SEQ ID NO: 84208), HVTKPTX (SEQ ID NO: 84422):APT:SNIT-AA¹⁷-QIM (SEQ ID NO: 84883):IGEMS (SEQ ID NO: 84209):VVR:SXGXH (SEQ ID NO: 84304), YVPKPXX (SEQ ID NO: 84433):APT:SNIT-AA¹⁷-QIM (SEQ ID NO: 84883):IGEMS (SEQ ID NO: 84209):VVR:SXGXH (SEQ ID NO: 84304), TVPKPXX (SEQ ID NO: 84432):APT:SNIT-AA¹⁷-QIM (SEQ ID NO: 84883):IGEMS (SEQ ID NO: 84209):VVR:AXGXH (SEQ ID NO: 84147), AVPKAXX (SEQ ID NO: 84404):APT:SNIT-AA¹⁷-QIM (SEQ ID NO: 84883):IGEMS (SEQ ID NO: 84209):VVK:AXGXH (SEQ ID NO: 84147), KVGKAXX (SEQ ID NO: 84425):VPT:SNIT-AA¹⁷-QIM (SEQ ID NO: 84883):IGEMS (SEQ ID NO: 84209):VAE:XGXR (SEQ ID NO: 84123), KASKAXX (SEQ ID NO: 84423):VPT:SNIT-AA¹⁷-QIM (SEQ ID NO: 84883):IGEMS (SEQ ID NO: 84209):AVS:EXGXR (SEQ ID NO: 84179), GSAGPXX (SEQ ID NO: 84420):TPT:SNIT-AA¹⁷-QIM (SEQ ID NO: 84883):IGEMS (SEQ ID NO: 84209):VVD:RXGXS (SEQ ID NO: 84291), AAPASXX (SEQ ID NO: 84401):VPA:SNIT-AA¹⁷-QIM (SEQ ID NO: 84883):IGEMS (SEQ ID NO: 84209):VVE:AXGXR (SEQ ID NO: 84148), STPPTXX (SEQ ID NO: 84431):VPT:SNIT-AA¹⁷-QIM (SEQ ID NO: 84883):IGEMS (SEQ ID NO: 84209):VVE:SXGXR (SEQ ID NO: 84305), HVPKPXX (SEQ ID NO: 84421):APT:SNIT-AA¹⁷-QIM (SEQ ID NO: 84883):IGEMS (SEQ ID NO: 84209):VVR:SXGXH (SEQ ID NO: 84304), RVPSTXX (SEQ ID NO: 84428):APV:SNIT-AA¹⁷-QIM (SEQ ID NO: 84883):IGEMS (SEQ ID NO: 84209):VEE:XGXL (SEQ ID NO: 84122), ASAAPXX (SEQ ID NO: 84402):VPQ:SNIT-AA¹⁷-QIM (SEQ ID NO: 84883):IGEMS (SEQ ID NO: 84209):VRS:XKXS (SEQ ID NO: 84124), ASASPXX (SEQ ID NO: 84403):VSQ:SNIT-AA¹⁷-QIM (SEQ ID NO: 84883):IGEMS (SEQ ID NO: 84209):VKS:XKXS (SEQ ID NO: 84124), ASASPXX (SEQ ID NO: 84403):VPQ:SNIT-AA¹⁷-QIM (SEQ ID NO: 84883):IGEMS (SEQ ID NO: 84209):VKS:XKXS (SEQ ID NO: 84124), NDEGLEX (SEQ ID NO: 84426):VPT:SNIT-AA¹⁷-QIM (SEQ ID NO: 84883):IGEMS (SEQ ID NO: 84209):EHS:QXEXR (SEQ ID NO: 84276), SSVKXQP (SEQ ID NO: 84430):SRV:SNIT-AA¹⁷-QIM (SEQ ID NO: 84883):IGEMS (SEQ ID NO: 84209):EEH:LEXAXA (SEQ ID NO: 84400), RNVQXRP (SEQ ID NO: 84427):TQV:SNIT-AA¹⁷-QIM (SEQ ID NO: 84883):IGEMS (SEQ ID NO: 84209):EDH:LAXKXE (SEQ ID NO: 84399), NDEGLEX (SEQ ID NO: 84426):VPT:SNIT-AA¹⁷-QIM (SEQ ID NO: 84883):LGEMS (SEQ ID NO: 84228):EHS:KXEXR (SEQ ID NO: 84213), KIPKAXX (SEQ ID NO: 84424):VPT:SNIT-AA¹⁷-QIM (SEQ ID NO: 84883):LGEMS (SEQ ID NO: 84228):VVE:GXGXR (SEQ ID NO: 84208), GIPEPXX (SEQ ID NO: 84419):VPE:SNIT-AA¹⁷-QIM (SEQ ID NO: 84883):LGEMS (SEQ ID NO: 84228):TVE:SXAXR (SEQ ID NO: 84303), SIPKAXX (SEQ ID NO: 84429):VPT:SNIT-AA¹⁷-QIM (SEQ ID NO: 84883):LGEMS (SEQ ID NO: 84228):VVE:GXGXR (SEQ ID NO: 84208), HVTKPTX (SEQ ID NO: 84422):APT:SNIT-AA¹⁷-QIM (SEQ ID NO: 84883):LGEMS (SEQ ID NO: 84228):VVR:SXGXH (SEQ ID NO: 84304), YVPKPXX (SEQ ID NO: 84433):APT:SNIT-AA¹⁷-QIM (SEQ ID NO: 84883):LGEMS (SEQ ID NO: 84228):VVR:SXGXH (SEQ ID NO: 84304), TVPKPXX (SEQ ID NO: 84432):APT:SNIT-AA¹⁷-QIM (SEQ ID NO: 84883):LGEMS (SEQ ID NO: 84228):VVR:AXGXH (SEQ ID NO: 84147), AVPKAXX (SEQ ID NO: 84404):APT:SNIT-AA¹⁷-QIM (SEQ ID NO: 84883):LGEMS (SEQ ID NO: 84228):VVK:AXGXH (SEQ ID NO: 84147), KVGKAXX (SEQ ID NO: 84425):VPT:SNIT-AA¹⁷-QIM (SEQ ID NO: 84883):LGEMS (SEQ ID NO: 84228):VAE:XGXR (SEQ ID NO: 84123), KASKAXX (SEQ ID NO: 84423):VPT:SNIT-AA¹⁷-QIM (SEQ ID NO: 84883):LGEMS (SEQ ID NO: 84228):AVS:EXGXR (SEQ ID NO: 84179), GSAGPXX (SEQ ID NO: 84420):TPT:SNIT-AA¹⁷-QIM (SEQ ID NO: 84883):LGEMS (SEQ ID NO: 84228):VVD:RXGXS (SEQ ID NO: 84291), AAPASXX (SEQ ID NO: 84401):VPA:SNIT-AA¹⁷-QIM (SEQ ID NO: 84883):LGEMS (SEQ ID NO: 84228):VVE:AXGXR (SEQ ID NO: 84148), STPPTXX (SEQ ID NO: 84431):VPT:SNIT-AA¹⁷-QIM (SEQ ID NO: 84883):LGEMS (SEQ ID NO: 84228):VVE:SXGXR (SEQ ID NO: 84305), HVPKPXX (SEQ ID NO: 84421):APT:SNIT-AA¹⁷-QIM (SEQ ID NO: 84883):LGEMS (SEQ ID NO: 84228):VVR:SXGXH (SEQ ID NO: 84304), RVPSTXX (SEQ ID NO: 84428):APV:SNIT-AA¹⁷-QIM (SEQ ID NO: 84883):LGEMS (SEQ ID NO: 84228):VEE:XGXL (SEQ ID NO: 84122), ASAAPXX (SEQ ID NO: 84402):VPQ:SNIT-AA¹⁷-QIM (SEQ ID NO: 84883):LGEMS (SEQ ID NO: 84228):VRS:XKXS (SEQ ID NO: 84124), ASASPXX (SEQ ID NO: 84403):VSQ:SNIT-AA¹⁷-QIM (SEQ ID NO: 84883):LGEMS (SEQ ID NO: 84228):VKS:XKXS (SEQ ID NO: 84124), ASASPXX (SEQ ID NO: 84403):VPQ:SNIT-AA¹⁷-QIM (SEQ ID NO: 84883):LGEMS (SEQ ID NO: 84228):VKS:XKXS (SEQ ID NO: 84124), NDEGLEX (SEQ ID NO: 84426):VPT:SNIT-AA¹⁷-QIM (SEQ ID NO: 84883):LGEMS (SEQ ID NO: 84228):QHN:KXEXR (SEQ ID NO: 84213), SSVKXQP (SEQ ID NO: 84430):SRV:SNIT-AA¹⁷-QIM (SEQ ID NO: 84883):LGEMS (SEQ ID NO: 84228):EEH:LEXAXA (SEQ ID NO: 84400), RNVQXRP (SEQ ID NO: 84427):TQV:SNIT-AA¹⁷-QIM (SEQ ID NO: 84883):LGEMS (SEQ ID NO: 84228):EDH:LAXKXE (SEQ ID NO: 84399), RNVQXRP (SEQ ID NO: 84427):SRV:RSVK-AA¹⁷-AKV (SEQ ID NO: 84880):KEVQV (SEQ ID NO: 84210):EEH:LAXKXE (SEQ ID NO: 84399), KIPKAXX (SEQ ID NO: 84424):VPT:RSVK-AA¹⁷-AKV (SEQ ID NO: 84880):KEVQV (SEQ ID NO: 84210):VVE:GXGXR (SEQ ID NO: 84208), GIPEPXX (SEQ ID NO: 84419):VPE:RSVK-AA¹⁷-AKV (SEQ ID NO: 84880):KEVQV (SEQ ID NO: 84210):TVE:SXAXR (SEQ ID NO: 84303), SIPKAXX (SEQ ID NO: 84429):VPT:RSVK-AA¹⁷-AKV (SEQ ID NO: 84880):KEVQV (SEQ ID NO: 84210):VVE:GXGXR (SEQ ID NO: 84208), HVTKPTX (SEQ ID NO: 84422):APT:RSVK-AA¹⁷-AKV (SEQ ID NO: 84880):KEVQV (SEQ ID NO: 84210):VVR:SXGXH (SEQ ID NO: 84304), YVPKPXX (SEQ ID NO: 84433):APT:RSVK-AA¹⁷-AKV (SEQ ID NO: 84880):KEVQV (SEQ ID NO: 84210):VVR:SXGXH (SEQ ID NO: 84304), TVPKPXX (SEQ ID NO: 84432):APT:RSVK-AA¹⁷-AKV (SEQ ID NO: 84880):KEVQV (SEQ ID NO: 84210):VVR:AXGXH (SEQ ID NO: 84147), AVPKAXX (SEQ ID NO: 84404):APT:RSVK-AA¹⁷-AKV (SEQ ID NO: 84880):KEVQV (SEQ ID NO: 84210):VVK:AXGXH (SEQ ID NO: 84147), KVGKAXX (SEQ ID NO: 84425):VPT:RSVK-AA¹⁷-AKV (SEQ ID NO: 84880):KEVQV (SEQ ID NO: 84210):VAE:XGXR (SEQ ID NO: 84123), KASKAXX (SEQ ID NO: 84423):VPT:RSVK-AA¹⁷-AKV (SEQ ID NO: 84880):KEVQV (SEQ ID NO: 84210):AVS:EXGXR (SEQ ID NO: 84179), GSAGPXX (SEQ ID NO: 84420):TPT:RSVK-AA¹⁷-AKV (SEQ ID NO: 84880):KEVQV (SEQ ID NO: 84210):VVD:RXGXS (SEQ ID NO: 84291), AAPASXX (SEQ ID NO: 84401):VPA:RSVK-AA¹⁷-AKV (SEQ ID NO: 84880):KEVQV (SEQ ID NO: 84210):VVE:AXGXR (SEQ ID NO: 84148), STPPTXX (SEQ ID NO: 84431):VPT:RSVK-AA¹⁷-AKV (SEQ ID NO: 84880):KEVQV (SEQ ID NO: 84210):VVE:SXGXR (SEQ ID NO: 84305), HVPKPXX (SEQ ID NO: 84421):APT:RSVK-AA¹⁷-AKV (SEQ ID NO: 84880):KEVQV (SEQ ID NO: 84210):VVR:SXGXH (SEQ ID NO: 84304), RVPSTXX (SEQ ID NO: 84428):APV:RSVK-AA¹⁷-AKV (SEQ ID NO: 84880):KEVQV (SEQ ID NO: 84210):VEE:XGXL (SEQ ID NO: 84122), ASAAPXX (SEQ ID NO: 84402):VPQ:RSVK-AA¹⁷-AKV (SEQ ID NO: 84880):KEVQV (SEQ ID NO: 84210):VRS:XKXS (SEQ ID NO: 84124), ASASPXX (SEQ ID NO: 84403):VSQ:RSVK-AA¹⁷-AKV (SEQ ID NO: 84880):KEVQV (SEQ ID NO: 84210):VKS:XKXS (SEQ ID NO: 84124), ASASPXX (SEQ ID NO: 84403):VPQ:RSVK-AA¹⁷-AKV (SEQ ID NO: 84880):KEVQV (SEQ ID NO: 84210):VKS:XKXS (SEQ ID NO: 84124), NDEGLEX (SEQ ID NO: 84426):VPT:RSVK-AA¹⁷-AKV (SEQ ID NO: 84880):KEVQV (SEQ ID NO: 84210):QHN:KXEXR (SEQ ID NO: 84213), NDEGLEX (SEQ ID NO: 84426):VPT:RSVK-AA¹⁷-AKV (SEQ ID NO: 84880):KEVQV (SEQ ID NO: 84210):EHS:QXEXR (SEQ ID NO: 84276), RNVQXRP (SEQ ID NO: 84427):TQV:RSVK-AA¹⁷-AKV (SEQ ID NO: 84880):KEVQV (SEQ ID NO: 84210):EDH:LAXKXE (SEQ ID NO: 84399), SSVKXQP (SEQ ID NO: 84430):TQV:RPVQ-AA¹⁷-RKI (SEQ ID NO: 84879):KKATV (SEQ ID NO: 84212):EDH:LEXAXA (SEQ ID NO: 84400), KIPKAXX (SEQ ID NO: 84424):VPT:RPVQ-AA¹⁷-RKI (SEQ ID NO: 84879):KKATV (SEQ ID NO: 84212):VVE:GXGXR (SEQ ID NO: 84208), GIPEPXX (SEQ ID NO: 84419):VPE:RPVQ-AA¹⁷-RKI (SEQ ID NO: 84879):KKATV (SEQ ID NO: 84212):TVE:SXAXR (SEQ ID NO: 84303), SIPKAXX (SEQ ID NO: 84429):VPT:RPVQ-AA¹⁷-RKI (SEQ ID NO: 84879):KKATV (SEQ ID NO: 84212):VVE:GXGXR (SEQ ID NO: 84208), HVTKPTX (SEQ ID NO: 84422):APT:RPVQ-AA¹⁷-RKI (SEQ ID NO: 84879):KKATV (SEQ ID NO: 84212):VVR:SXGXH (SEQ ID NO: 84304), YVPKPXX (SEQ ID NO: 84433):APT:RPVQ-AA¹⁷-RKI (SEQ ID NO: 84879):KKATV (SEQ ID NO: 84212):VVR:SXGXH (SEQ ID NO: 84304), TVPKPXX (SEQ ID NO: 84432):APT:RPVQ-AA¹⁷-RKI (SEQ ID NO: 84879):KKATV (SEQ ID NO: 84212):VVR:AXGXH (SEQ ID NO: 84147), AVPKAXX (SEQ ID NO: 84404):APT:RPVQ-AA¹⁷-RKI (SEQ ID NO: 84879):KKATV (SEQ ID NO: 84212):VVK:AXGXH (SEQ ID NO: 84147), KVGKAXX (SEQ ID NO: 84425):VPT:RPVQ-AA¹⁷-RKI (SEQ ID NO: 84879):KKATV (SEQ ID NO: 84212):VAE:XGXR (SEQ ID NO: 84123), KASKAXX (SEQ ID NO: 84423):VPT:RPVQ-AA¹⁷-RKI (SEQ ID NO: 84879):KKATV (SEQ ID NO: 84212):AVS:EXGXR (SEQ ID NO: 84179), GSAGPXX (SEQ ID NO: 84420):TPT:RPVQ-AA¹⁷-RKI (SEQ ID NO: 84879):KKATV (SEQ ID NO: 84212):VVD:RXGXS (SEQ ID NO: 84291), AAPASXX (SEQ ID NO: 84401):VPA:RPVQ-AA¹⁷-RKI (SEQ ID NO: 84879):KKATV (SEQ ID NO: 84212):VVE:AXGXR (SEQ ID NO: 84148), STPPTXX (SEQ ID NO: 84431):VPT:RPVQ-AA¹⁷-RKI (SEQ ID NO: 84879):KKATV (SEQ ID NO: 84212):VVE:SXGXR (SEQ ID NO: 84305), HVPKPXX (SEQ ID NO: 84421):APT:RPVQ-AA¹⁷-RKI (SEQ ID NO: 84879):KKATV (SEQ ID NO: 84212):VVR:SXGXH (SEQ ID NO: 84304), RVPSTXX (SEQ ID NO: 84428):APV:RPVQ-AA¹⁷-RKI (SEQ ID NO: 84879):KKATV (SEQ ID NO: 84212):VEE:XGXL (SEQ ID NO: 84122), ASAAPXX (SEQ ID NO: 84402):VPQ:RPVQ-AA¹⁷-RKI (SEQ ID NO: 84879):KKATV (SEQ ID NO: 84212):VRS:XKXS (SEQ ID NO: 84124), ASASPXX (SEQ ID NO: 84403):VSQ:RPVQ-AA¹⁷-RKI (SEQ ID NO: 84879):KKATV (SEQ ID NO: 84212):VKS:XKXS (SEQ ID NO: 84124), ASASPXX (SEQ ID NO: 84403):VPQ:RPVQ-AA¹⁷-RKI (SEQ ID NO: 84879):KKATV (SEQ ID NO: 84212):VKS:XKXS (SEQ ID NO: 84124), NDEGLEX (SEQ ID NO: 84426):VPT:RPVQ-AA¹⁷-RKI (SEQ ID NO: 84879):KKATV (SEQ ID NO: 84212):QHN:KXEXR (SEQ ID NO: 84213), NDEGLEX (SEQ ID NO: 84426):VPT:RPVQ-AA¹⁷-RKI (SEQ ID NO: 84879):KKATV (SEQ ID NO: 84212):EHS:QXEXR (SEQ ID NO: 84276) and SSVKXQP (SEQ ID NO: 84430):SRV:RPVQ-AA¹⁷-RKI (SEQ ID NO: 84879):KKATV (SEQ ID NO: 84212):EEH:LEXAXA (SEQ ID NO: 84400); and wherein AA¹⁷ is selected from the group consisting of G, A, V, L, I, P, F, M, W, T and S (in particular is selected from the group consisting of M, I, L, V and T).

[0403] In particular, in certain embodiments, the hexaplet PEP7:PEP5:PEP1:PEP2:PEP6:PEP8 is selected from the group consisting of GIPEPXX (SEQ ID NO: 84419):VPTKM (SEQ ID NO: 84382):SAIS (SEQ ID NO: 84116):LKNYQ (SEQ ID NO: 84230):NMVVE (SEQ ID NO: 84273):SXAXR (SEQ ID NO: 84303), SIPKAXX (SEQ ID NO: 84429):VPTEL (SEQ ID NO: 84378):SAIS (SEQ ID NO: 84116):LKNYQ (SEQ ID NO: 84230):EMVVE (SEQ ID NO: 84175):GXGXR (SEQ ID NO: 84208), HVTKPTX (SEQ ID NO: 84422):VPTKL (SEQ ID NO: 84381):SAIS (SEQ ID NO: 84116):LKNYQ (SEQ ID NO: 84230):NMVVE (SEQ ID NO: 84273):SXGXH (SEQ ID NO: 84304), YVPKPXX (SEQ ID NO: 84433):VPTKL (SEQ ID NO: 84381):SAIS (SEQ ID NO: 84116):LKNYQ (SEQ ID NO: 84230):NMVVE (SEQ ID NO: 84273):SXGXH (SEQ ID NO: 84304), TVPKPXX (SEQ ID NO: 84432):VPTQL (SEQ ID NO: 84384):SAIS (SEQ ID NO: 84116):LKNYQ (SEQ ID NO: 84230):NMVVE (SEQ ID NO: 84273):AXGXH (SEQ ID NO: 84147), AVPKAXX (SEQ ID NO: 84404):VPTKL (SEQ ID NO: 84381):SAIS (SEQ ID NO: 84116):LKNYQ (SEQ ID NO: 84230):NMVVE (SEQ ID NO: 84273):AXGXH (SEQ ID NO: 84147), KVGKAXX (SEQ ID NO: 84425):VPTKL (SEQ ID NO: 84381):SAIS (SEQ ID NO: 84116):LKNYQ (SEQ ID NO: 84230):EGMSVVE (SEQ ID NO: 84416):XGXR (SEQ ID NO: 84123), KASKAXX (SEQ ID NO: 84423):VPTKL (SEQ ID NO: 84381):SAIS (SEQ ID NO: 84116):LKNYQ (SEQ ID NO: 84230):GMVVE (SEQ ID NO: 84205):EXGXR (SEQ ID NO: 84179), GSAGPXX (SEQ ID NO: 84420):VPTKM (SEQ ID NO: 84382):SAIS (SEQ ID NO: 84116):LKNYQ (SEQ ID NO: 84230):GMVVE (SEQ ID NO: 84205):RXGXS (SEQ ID NO: 84291), AAPASXX (SEQ ID NO: 84401):VPTRL (SEQ ID NO: 84385):SAIS (SEQ ID NO: 84116):LKNYQ (SEQ ID NO: 84230):DMVVE (SEQ ID NO: 84161):AXGXR (SEQ ID NO: 84148), STPPTXX (SEQ ID NO: 84431):VPTRL (SEQ ID NO: 84385):SAIS (SEQ ID NO: 84116):LKNYQ (SEQ ID NO: 84230):DMVVE (SEQ ID NO: 84161):SXGXR (SEQ ID NO: 84305), HVPKPXX (SEQ ID NO: 84421):VPTKL (SEQ ID NO: 84381):SAIS (SEQ ID NO: 84116):LKNYQ (SEQ ID NO: 84230):NMVVE (SEQ ID NO: 84273):SXGXH (SEQ ID NO: 84304), RVPSTXX (SEQ ID NO: 84428):VPTKT (SEQ ID NO: 84383):SAIS (SEQ ID NO: 84116):LKNYQ (SEQ ID NO: 84230):MIVVE (SEQ ID NO: 84245):XGXL (SEQ ID NO: 84122), ASAAPXX (SEQ ID NO: 84402):VPTAL (SEQ ID NO: 84375):SAIS (SEQ ID NO: 84116):LKNYQ (SEQ ID NO: 84230):MIVVE (SEQ ID NO: 84245):XKXS (SEQ ID NO: 84124), ASASPXX (SEQ ID NO: 84403):VPTDL (SEQ ID NO: 84376):SAIS (SEQ ID NO: 84116):LKNYQ (SEQ ID NO: 84230):MIVVE (SEQ ID NO: 84245):XKXS (SEQ ID NO: 84124), ASASPXX (SEQ ID NO: 84403):VPTDL (SEQ ID NO: 84376):SAIS (SEQ ID NO: 84116):LKNYQ (SEQ ID NO: 84230):MVVVE (SEQ ID NO: 84259):XKXS (SEQ ID NO: 84124), NDEGLEX (SEQ ID NO: 84426):VPTEE (SEQ ID NO: 84377):SAIS (SEQ ID NO: 84116):LKNYQ (SEQ ID NO: 84230):FLVVE (SEQ ID NO: 84191):KXEXR (SEQ ID NO: 84213), NDEGLEX (SEQ ID NO: 84426):VPTGQ (SEQ ID NO: 84379):SAIS (SEQ ID NO: 84116):LKNYQ (SEQ ID NO: 84230):LEVVE (SEQ ID NO: 84225):QXEXR (SEQ ID NO: 84276), SSVKXQP (SEQ ID NO: 84430):VPTHH (SEQ ID NO: 84380):SAIS (SEQ ID NO: 84116):LKNYQ (SEQ ID NO: 84230):RLVVE (SEQ ID NO: 84288):LEXAXA (SEQ ID NO: 84400), RNVQXRP (SEQ ID NO: 84427):VPTQL (SEQ ID NO: 84384):SAIS (SEQ ID NO: 84116):LKNYQ (SEQ ID NO: 84230):TLVVE (SEQ ID NO: 84317):LAXKXE (SEQ ID NO: 84399), GIPEPXX (SEQ ID NO: 84419):VPEKM (SEQ ID NO: 84360):SAIS (SEQ ID NO: 84116):LKNYQ (SEQ ID NO: 84230):NMTVE (SEQ ID NO: 84267):SXAXR (SEQ ID NO: 84303), HVTKPTX (SEQ ID NO: 84422):APTKL (SEQ ID NO: 84131):SAIS (SEQ ID NO: 84116):LKNYQ (SEQ ID NO: 84230):NMVVR (SEQ ID NO: 84275):SXGXH (SEQ ID NO: 84304), YVPKPXX (SEQ ID NO: 84433):APTKL (SEQ ID NO: 84131):SAIS (SEQ ID NO: 84116):LKNYQ (SEQ ID NO: 84230):NMVVR (SEQ ID NO: 84275):SXGXH (SEQ ID NO: 84304), TVPKPXX (SEQ ID NO: 84432):APTQL (SEQ ID NO: 84134):SAIS (SEQ ID NO: 84116):LKNYQ (SEQ ID NO: 84230):NMVVR (SEQ ID NO: 84275):AXGXH (SEQ ID NO: 84147), AVPKAXX (SEQ ID NO: 84404):APTKL (SEQ ID NO: 84131):SAIS (SEQ ID NO: 84116):LKNYQ (SEQ ID NO: 84230):NMVVK (SEQ ID NO: 84274):AXGXH (SEQ ID NO: 84147), KVGKAXX (SEQ ID NO: 84425):VPTKL (SEQ ID NO: 84381):SAIS (SEQ ID NO: 84116):LKNYQ (SEQ ID NO: 84230):EGMSVAE (SEQ ID NO: 84411):XGXR (SEQ ID NO: 84123), KASKAXX (SEQ ID NO: 84423):VPTKL (SEQ ID NO: 84381):SAIS (SEQ ID NO: 84116):LKNYQ (SEQ ID NO: 84230):GMAVS (SEQ ID NO: 84194):EXGXR (SEQ ID NO: 84179), GSAGPXX (SEQ ID NO: 84420):TPTKM (SEQ ID NO: 84327):SAIS (SEQ ID NO: 84116):LKNYQ (SEQ ID NO: 84230):GMVVD (SEQ ID NO: 84204):RXGXS (SEQ ID NO: 84291), AAPASXX (SEQ ID NO: 84401):VPARL (SEQ ID NO: 84352):SAIS (SEQ ID NO: 84116):LKNYQ (SEQ ID NO: 84230):DMVVE (SEQ ID NO: 84161):AXGXR (SEQ ID NO: 84148), HVPKPXX (SEQ ID NO: 84421):APTKL (SEQ ID NO: 84131):SAIS (SEQ ID NO: 84116):LKNYQ (SEQ ID NO: 84230):NMVVR (SEQ ID NO: 84275):SXGXH (SEQ ID NO: 84304), RVPSTXX (SEQ ID NO: 84428):APVKT (SEQ ID NO: 84144):SAIS (SEQ ID NO: 84116):LKNYQ (SEQ ID NO: 84230):MIVEE (SEQ ID NO: 84241):XGXL (SEQ ID NO: 84122), ASAAPXX (SEQ ID NO: 84402):VPQAL (SEQ ID NO: 84364):SAIS (SEQ ID NO: 84116):LKNYQ (SEQ ID NO: 84230):MIVRS (SEQ ID NO: 84243):XKXS (SEQ ID NO: 84124), ASASPXX (SEQ ID NO: 84403):VSQDL (SEQ ID NO: 84387):SAIS (SEQ ID NO: 84116):LKNYQ (SEQ ID NO: 84230):MIVKS (SEQ ID NO: 84242):XKXS (SEQ ID NO: 84124), ASASPXX (SEQ ID NO: 84403):VPQDL (SEQ ID NO: 84365):SAIS (SEQ ID NO: 84116):LKNYQ (SEQ ID NO: 84230):MVVKS (SEQ ID NO: 84256):XKXS (SEQ ID NO: 84124), NDEGLEX (SEQ ID NO: 84426):VPTEE (SEQ ID NO: 84377):SAIS (SEQ ID NO: 84116):LKNYQ (SEQ ID NO: 84230):FLQHN (SEQ ID NO: 84184):KXEXR (SEQ ID NO: 84213), NDEGLEX (SEQ ID NO: 84426):VPTGQ (SEQ ID NO: 84379):SAIS (SEQ ID NO: 84116):LKNYQ (SEQ ID NO: 84230):LEEHS (SEQ ID NO: 84217):QXEXR (SEQ ID NO: 84276), SSVKXQP (SEQ ID NO: 84430):SRVHH (SEQ ID NO: 84297):SAIS (SEQ ID NO: 84116):LKNYQ (SEQ ID NO: 84230):RLEEH (SEQ ID NO: 84279):LEXAXA (SEQ ID NO: 84400), RNVQXRP (SEQ ID NO: 84427):TQVQL (SEQ ID NO: 84340):SAIS (SEQ ID NO: 84116):LKNYQ (SEQ ID NO: 84230):TLEDH (SEQ ID NO: 84307):LAXKXE (SEQ ID NO: 84399), KIPKAXX (SEQ ID NO: 84424):VPEEL (SEQ ID NO: 84356):SSLS (SEQ ID NO: 84121):LKVYP (SEQ ID NO: 84231):DMTVE (SEQ ID NO: 84155):GXGXR (SEQ ID NO: 84208), SIPKAXX (SEQ ID NO: 84429):VPEEL (SEQ ID NO: 84356):SSLS (SEQ ID NO: 84121):LKVYP (SEQ ID NO: 84231):EMTVE (SEQ ID NO: 84169):GXGXR (SEQ ID NO: 84208), HVTKPTX (SEQ ID NO: 84422):VPEKL (SEQ ID NO: 84359):SSLS (SEQ ID NO: 84121):LKVYP (SEQ ID NO: 84231):NMTVE (SEQ ID NO: 84267):SXGXH (SEQ ID NO: 84304), YVPKPXX (SEQ ID NO: 84433):VPEKL (SEQ ID NO: 84359):SSLS (SEQ ID NO: 84121):LKVYP (SEQ ID NO: 84231):NMTVE (SEQ ID NO: 84267):SXGXH (SEQ ID NO: 84304), TVPKPXX (SEQ ID NO: 84432):VPEQL (SEQ ID NO: 84362):SSLS (SEQ ID NO: 84121):LKVYP (SEQ ID NO: 84231):NMTVE (SEQ ID NO: 84267):AXGXH (SEQ ID NO: 84147), AVPKAXX (SEQ ID NO: 84404):VPEKL (SEQ ID NO: 84359):SSLS (SEQ ID NO: 84121):LKVYP (SEQ ID NO: 84231):NMTVE (SEQ ID NO: 84267):AXGXH (SEQ ID NO: 84147), KVGKAXX (SEQ ID NO: 84425):VPEKL (SEQ ID NO: 84359):SSLS (SEQ ID NO: 84121):LKVYP (SEQ ID NO: 84231):EGMSTVE (SEQ ID NO: 84410):XGXR (SEQ ID NO: 84123), KASKAXX (SEQ ID NO: 84423):VPEKL (SEQ ID NO: 84359):SSLS (SEQ ID NO: 84121):LKVYP (SEQ ID NO: 84231):GMTVE (SEQ ID NO: 84199):EXGXR (SEQ ID NO: 84179), GSAGPXX (SEQ ID NO: 84420):VPEKM (SEQ ID NO: 84360):SSLS (SEQ ID NO: 84121):LKVYP (SEQ ID NO: 84231):GMTVE (SEQ ID NO: 84199):RXGXS (SEQ ID NO: 84291), AAPASXX (SEQ ID NO: 84401):VPERL (SEQ ID NO: 84363):SSLS (SEQ ID NO: 84121):LKVYP (SEQ ID NO: 84231):DMTVE (SEQ ID NO: 84155):AXGXR (SEQ ID NO: 84148), STPPTXX (SEQ ID NO: 84431):VPERL (SEQ ID NO: 84363):SSLS (SEQ ID NO: 84121):LKVYP (SEQ ID NO: 84231):DMTVE (SEQ ID NO: 84155):SXGXR (SEQ ID NO: 84305), HVPKPXX (SEQ ID NO: 84421):VPEKL (SEQ ID NO: 84359):SSLS (SEQ ID NO: 84121):LKVYP (SEQ ID NO: 84231):NMTVE (SEQ ID NO: 84267):SXGXH (SEQ ID NO: 84304), RVPSTXX (SEQ ID NO: 84428):VPEKT (SEQ ID NO: 84361):SSLS (SEQ ID NO: 84121):LKVYP (SEQ ID NO: 84231):MITVE (SEQ ID NO: 84239):XGXL (SEQ ID NO: 84122), ASAAPXX (SEQ ID NO: 84402):VPEAL (SEQ ID NO: 84353):SSLS (SEQ ID NO: 84121):LKVYP (SEQ ID NO: 84231):MITVE (SEQ ID NO: 84239):XKXS (SEQ ID NO: 84124), ASASPXX (SEQ ID NO: 84403):VPEDL (SEQ ID NO: 84354):SSLS (SEQ ID NO: 84121):LKVYP (SEQ ID NO: 84231):MITVE (SEQ ID NO: 84239):XKXS (SEQ ID NO: 84124), ASASPXX (SEQ ID NO: 84403):VPEDL (SEQ ID NO: 84354):SSLS (SEQ ID NO: 84121):LKVYP (SEQ ID NO: 84231):MVTVE (SEQ ID NO: 84253):XKXS (SEQ ID NO: 84124), NDEGLEX (SEQ ID NO: 84426):VPEEE (SEQ ID NO: 84355):SSLS (SEQ ID NO: 84121):LKVYP (SEQ ID NO: 84231):FLTVE (SEQ ID NO: 84185):KXEXR (SEQ ID NO: 84213), NDEGLEX (SEQ ID NO: 84426):VPEGQ (SEQ ID NO: 84357):SSLS (SEQ ID NO: 84121):LKVYP (SEQ ID NO: 84231):LETVE (SEQ ID NO: 84219):QXEXR (SEQ ID NO: 84276), SSVKXQP (SEQ ID NO: 84430):VPEHH (SEQ ID NO: 84358):SSLS (SEQ ID NO: 84121):LKVYP (SEQ ID NO: 84231):RLTVE (SEQ ID NO: 84282):LEXAXA (SEQ ID NO: 84400), RNVQXRP (SEQ ID NO: 84427):VPEQL (SEQ ID NO: 84362):SSLS (SEQ ID NO: 84121):LKVYP (SEQ ID NO: 84231):TLTVE (SEQ ID NO: 84311):LAXKXE (SEQ ID NO: 84399), KIPKAXX (SEQ ID NO: 84424):VPTEL (SEQ ID NO: 84378):SSLS (SEQ ID NO: 84121):LKVYP (SEQ ID NO: 84231):DMVVE (SEQ ID NO: 84161):GXGXR (SEQ ID NO: 84208), SIPKAXX (SEQ ID NO: 84429):VPTEL (SEQ ID NO: 84378):SSLS (SEQ ID NO: 84121):LKVYP (SEQ ID NO: 84231):EMVVE (SEQ ID NO: 84175):GXGXR (SEQ ID NO: 84208), HVTKPTX (SEQ ID NO: 84422):APTKL (SEQ ID NO: 84131):SSLS (SEQ ID NO: 84121):LKVYP (SEQ ID NO: 84231):NMVVR (SEQ ID NO: 84275):SXGXH (SEQ ID NO: 84304), YVPKPXX (SEQ ID NO: 84433):APTKL (SEQ ID NO: 84131):SSLS (SEQ ID NO: 84121):LKVYP (SEQ ID NO: 84231):NMVVR (SEQ ID NO: 84275):SXGXH (SEQ ID NO: 84304), TVPKPXX (SEQ ID NO: 84432):APTQL (SEQ ID NO: 84134):SSLS (SEQ ID NO: 84121):LKVYP (SEQ ID NO: 84231):NMVVR (SEQ ID NO: 84275):AXGXH (SEQ ID NO: 84147), AVPKAXX (SEQ ID NO: 84404):APTKL (SEQ ID NO: 84131):SSLS (SEQ ID NO: 84121):LKVYP (SEQ ID NO: 84231):NMVVK (SEQ ID NO: 84274):AXGXH (SEQ ID NO: 84147), KVGKAXX (SEQ ID NO: 84425):VPTKL (SEQ ID NO: 84381):SSLS (SEQ ID NO: 84121):LKVYP (SEQ ID NO: 84231):EGMSVAE (SEQ ID NO: 84411):XGXR (SEQ ID NO: 84123), KASKAXX (SEQ ID NO: 84423):VPTKL (SEQ ID NO: 84381):SSLS (SEQ ID NO: 84121):LKVYP (SEQ ID NO: 84231):GMAVS (SEQ ID NO: 84194):EXGXR (SEQ ID NO: 84179), GSAGPXX (SEQ ID NO: 84420):TPTKM (SEQ ID NO: 84327):SSLS (SEQ ID NO: 84121):LKVYP (SEQ ID NO: 84231):GMVVD (SEQ ID NO: 84204):RXGXS (SEQ ID NO: 84291), AAPASXX (SEQ ID NO: 84401):VPARL (SEQ ID NO: 84352):SSLS (SEQ ID NO: 84121):LKVYP (SEQ ID NO: 84231):DMVVE (SEQ ID NO: 84161):AXGXR (SEQ ID NO: 84148), STPPTXX (SEQ ID NO: 84431):VPTRL (SEQ ID NO: 84385):SSLS (SEQ ID NO: 84121):LKVYP (SEQ ID NO: 84231):DMVVE (SEQ ID NO: 84161):SXGXR (SEQ ID NO: 84305), HVPKPXX (SEQ ID NO: 84421):APTKL (SEQ ID NO: 84131):SSLS (SEQ ID NO: 84121):LKVYP (SEQ ID NO: 84231):NMVVR (SEQ ID NO: 84275):SXGXH (SEQ ID NO: 84304), RVPSTXX (SEQ ID NO: 84428):APVKT (SEQ ID NO: 84144):SSLS (SEQ ID NO: 84121):LKVYP (SEQ ID NO: 84231):MIVEE (SEQ ID NO: 84241):XGXL (SEQ ID NO: 84122), ASAAPXX (SEQ ID NO: 84402):VPQAL (SEQ ID NO: 84364):SSLS (SEQ ID NO: 84121):LKVYP (SEQ ID NO: 84231):MIVRS (SEQ ID NO: 84243):XKXS (SEQ ID NO: 84124), ASASPXX (SEQ ID NO: 84403):VSQDL (SEQ ID NO: 84387):SSLS (SEQ ID NO: 84121):LKVYP (SEQ ID NO: 84231):MIVKS (SEQ ID NO: 84242):XKXS (SEQ ID NO: 84124), ASASPXX (SEQ ID NO: 84403):VPQDL (SEQ ID NO: 84365):SSLS (SEQ ID NO: 84121):LKVYP (SEQ ID NO: 84231):MVVKS (SEQ ID NO: 84256):XKXS (SEQ ID NO: 84124), NDEGLEX (SEQ ID NO: 84426):VPTEE (SEQ ID NO: 84377):SSLS (SEQ ID NO: 84121):LKVYP (SEQ ID NO: 84231):FLQHN (SEQ ID NO: 84184):KXEXR (SEQ ID NO: 84213), NDEGLEX (SEQ ID NO: 84426):VPTGQ (SEQ ID NO: 84379):SSLS (SEQ ID NO: 84121):LKVYP (SEQ ID NO: 84231):LEEHS (SEQ ID NO: 84217):QXEXR (SEQ ID NO: 84276), SSVKXQP (SEQ ID NO: 84430):SRVHH (SEQ ID NO: 84297):SSLS (SEQ ID NO: 84121):LKVYP (SEQ ID NO: 84231):RLEEH (SEQ ID NO: 84279):LEXAXA (SEQ ID NO: 84400), RNVQXRP (SEQ ID NO: 84427):TQVQL (SEQ ID NO: 84340):SSLS (SEQ ID NO: 84121):LKVYP (SEQ ID NO: 84231):TLEDH (SEQ ID NO: 84307):LAXKXE (SEQ ID NO: 84399), KIPKAXX (SEQ ID NO: 84424):VPTEL (SEQ ID NO: 84378):SAIS (SEQ ID NO: 84116):LKNYQ (SEQ ID NO: 84230):DMVVE (SEQ ID NO: 84161):GXGXR (SEQ ID NO: 84208), KIPKAXX (SEQ ID NO: 84424):APTEL (SEQ ID NO: 84128):NAIS (SEQ ID NO: 84113):LKKYR (SEQ ID NO: 84229):DMVVR (SEQ ID NO: 84163):GXGXR (SEQ ID NO: 84208), GIPEPXX (SEQ ID NO: 84419):APTKM (SEQ ID NO: 84132):NAIS (SEQ ID NO: 84113):LKKYR (SEQ ID NO: 84229):NMVVR (SEQ ID NO: 84275):SXAXR (SEQ ID NO: 84303), SIPKAXX (SEQ ID NO: 84429):APTEL (SEQ ID NO: 84128):NAIS (SEQ ID NO: 84113):LKKYR (SEQ ID NO: 84229):EMVVR (SEQ ID NO: 84177):GXGXR (SEQ ID NO: 84208), YVPKPXX (SEQ ID NO: 84433):APTKL (SEQ ID NO: 84131):NAIS (SEQ ID NO: 84113):LKKYR (SEQ ID NO: 84229):NMVVR (SEQ ID NO: 84275):SXGXH (SEQ ID NO: 84304), TVPKPXX (SEQ ID NO: 84432):APTQL (SEQ ID NO: 84134):NAIS (SEQ ID NO: 84113):LKKYR (SEQ ID NO: 84229):NMVVR (SEQ ID NO: 84275):AXGXH (SEQ ID NO: 84147), AVPKAXX (SEQ ID NO: 84404):APTKL (SEQ ID NO: 84131):NAIS (SEQ ID NO: 84113):LKKYR (SEQ ID NO: 84229):NMVVR (SEQ ID NO: 84275):AXGXH (SEQ ID NO: 84147), KVGKAXX (SEQ ID NO: 84425):APTKL (SEQ ID NO: 84131):NAIS (SEQ ID NO: 84113):LKKYR (SEQ ID NO: 84229):EGMSVVR (SEQ ID NO: 84418):XGXR (SEQ ID NO: 84123), KASKAXX (SEQ ID NO: 84423):APTKL (SEQ ID NO: 84131):NAIS (SEQ ID NO: 84113):LKKYR (SEQ ID NO: 84229):GMVVR (SEQ ID NO: 84207):EXGXR (SEQ ID NO: 84179), GSAGPXX (SEQ ID NO: 84420):APTKM (SEQ ID NO: 84132):NAIS (SEQ ID NO: 84113):LKKYR (SEQ ID NO: 84229):GMVVR (SEQ ID NO: 84207):RXGXS (SEQ ID NO: 84291), AAPASXX (SEQ ID NO: 84401):APTRL (SEQ ID NO: 84135):NAIS (SEQ ID NO: 84113):LKKYR (SEQ ID NO: 84229):DMVVR (SEQ ID NO: 84163):AXGXR (SEQ ID NO: 84148), STPPTXX (SEQ ID NO: 84431):APTRL (SEQ ID NO: 84135):NAIS (SEQ ID NO: 84113):LKKYR (SEQ ID NO: 84229):DMVVR (SEQ ID NO: 84163):SXGXR (SEQ ID NO: 84305), HVPKPXX (SEQ ID NO: 84421):APTKL (SEQ ID NO: 84131):NAIS (SEQ ID NO: 84113):LKKYR (SEQ ID NO: 84229):NMVVR (SEQ ID NO: 84275):SXGXH (SEQ ID NO: 84304), RVPSTXX (SEQ ID NO: 84428):APTKT (SEQ ID NO: 84133):NAIS (SEQ ID NO: 84113):LKKYR (SEQ ID NO: 84229):MIVVR (SEQ ID NO: 84247):XGXL (SEQ ID NO: 84122), ASAAPXX (SEQ ID NO: 84402):APTAL (SEQ ID NO: 84125):NAIS (SEQ ID NO: 84113):LKKYR (SEQ ID NO: 84229):MIVVR (SEQ ID NO: 84247):XKXS (SEQ ID NO: 84124), ASASPXX (SEQ ID NO: 84403):APTDL (SEQ ID NO: 84126):NAIS (SEQ ID NO: 84113):LKKYR (SEQ ID NO: 84229):MIVVR (SEQ ID NO: 84247):XKXS (SEQ ID NO: 84124), ASASPXX (SEQ ID NO: 84403):APTDL (SEQ ID NO: 84126):NAIS (SEQ ID NO: 84113):LKKYR (SEQ ID NO: 84229):MVVVR (SEQ ID NO: 84261):XKXS (SEQ ID NO: 84124), NDEGLEX (SEQ ID NO: 84426):APTEE (SEQ ID NO: 84127):NAIS (SEQ ID NO: 84113):LKKYR (SEQ ID NO: 84229):FLVVR (SEQ ID NO: 84193):KXEXR (SEQ ID NO: 84213), NDEGLEX (SEQ ID NO: 84426):APTGQ (SEQ ID NO: 84129):NAIS (SEQ ID NO: 84113):LKKYR (SEQ ID NO: 84229):LEVVR (SEQ ID NO: 84227):QXEXR (SEQ ID NO: 84276), SSVKXQP (SEQ ID NO: 84430):APTHH (SEQ ID NO: 84130):NAIS (SEQ ID NO: 84113):LKKYR (SEQ ID NO: 84229):RLVVR (SEQ ID NO: 84290):LEXAXA (SEQ ID NO: 84400), RNVQXRP (SEQ ID NO: 84427):APTQL (SEQ ID NO: 84134):NAIS (SEQ ID NO: 84113):LKKYR (SEQ ID NO: 84229):TLVVR (SEQ ID NO: 84319):LAXKXE (SEQ ID NO: 84399), KIPKAXX (SEQ ID NO: 84424):VPTEL (SEQ ID NO: 84378):NAIS (SEQ ID NO: 84113):LKKYR (SEQ ID NO: 84229):DMVVE (SEQ ID NO: 84161):GXGXR (SEQ ID NO: 84208), GIPEPXX (SEQ ID NO: 84419):VPEKM (SEQ ID NO: 84360):NAIS (SEQ ID NO: 84113):LKKYR (SEQ ID NO: 84229):NMTVE (SEQ ID NO: 84267):SXAXR (SEQ ID NO: 84303), SIPKAXX (SEQ ID NO: 84429):VPTEL (SEQ ID NO: 84378):NAIS (SEQ ID NO: 84113):LKKYR (SEQ ID NO: 84229):EMVVE (SEQ ID NO: 84175):GXGXR (SEQ ID NO: 84208), AVPKAXX (SEQ ID NO: 84404):APTKL (SEQ ID NO: 84131):NAIS (SEQ ID NO: 84113):LKKYR (SEQ ID NO: 84229):NMVVK (SEQ ID NO: 84274):AXGXH (SEQ ID NO: 84147), KVGKAXX (SEQ ID NO: 84425):VPTKL (SEQ ID NO: 84381):NAIS (SEQ ID NO: 84113):LKKYR (SEQ ID NO: 84229):EGMSVAE (SEQ ID NO: 84411):XGXR (SEQ ID NO: 84123), KASKAXX (SEQ ID NO: 84423):VPTKL (SEQ ID NO: 84381):NAIS (SEQ ID NO: 84113):LKKYR (SEQ ID NO: 84229):GMAVS (SEQ ID NO: 84194):EXGXR (SEQ ID NO: 84179), GSAGPXX (SEQ ID NO: 84420):TPTKM (SEQ ID NO: 84327):NAIS (SEQ ID NO: 84113):LKKYR (SEQ ID NO: 84229):GMVVD (SEQ ID NO: 84204):RXGXS (SEQ ID NO: 84291), AAPASXX (SEQ ID NO: 84401):VPARL (SEQ ID NO: 84352):NAIS (SEQ ID NO: 84113):LKKYR (SEQ ID NO: 84229):DMVVE (SEQ ID NO: 84161):AXGXR (SEQ ID NO: 84148), STPPTXX (SEQ ID NO: 84431):VPTRL (SEQ ID NO: 84385):NAIS (SEQ ID NO: 84113):LKKYR (SEQ ID NO: 84229):DMVVE (SEQ ID NO: 84161):SXGXR (SEQ ID NO: 84305), RVPSTXX (SEQ ID NO: 84428):APVKT (SEQ ID NO: 84144):NAIS (SEQ ID NO: 84113):LKKYR (SEQ ID NO: 84229):MIVEE (SEQ ID NO: 84241):XGXL (SEQ ID NO: 84122), ASAAPXX (SEQ ID NO: 84402):VPQAL (SEQ ID NO: 84364):NAIS (SEQ ID NO: 84113):LKKYR (SEQ ID NO: 84229):MIVRS (SEQ ID NO: 84243):XKXS (SEQ ID NO: 84124), ASASPXX (SEQ ID NO: 84403):VSQDL (SEQ ID NO: 84387):NAIS (SEQ ID NO: 84113):LKKYR (SEQ ID NO: 84229):MIVKS (SEQ ID NO: 84242):XKXS (SEQ ID NO: 84124), ASASPXX (SEQ ID NO: 84403):VPQDL (SEQ ID NO: 84365):NAIS (SEQ ID NO: 84113):LKKYR (SEQ ID NO: 84229):MVVKS (SEQ ID NO: 84256):XKXS (SEQ ID NO: 84124), NDEGLEX (SEQ ID NO: 84426):VPTEE (SEQ ID NO: 84377):NAIS (SEQ ID NO: 84113):LKKYR (SEQ ID NO: 84229):FLQHN (SEQ ID NO: 84184):KXEXR (SEQ ID NO: 84213), NDEGLEX (SEQ ID NO: 84426):VPTGQ (SEQ ID NO: 84379):NAIS (SEQ ID NO: 84113):LKKYR (SEQ ID NO: 84229):LEEHS (SEQ ID NO: 84217):QXEXR (SEQ ID NO: 84276), SSVKXQP (SEQ ID NO: 84430):SRVHH (SEQ ID NO: 84297):NAIS (SEQ ID NO: 84113):LKKYR (SEQ ID NO: 84229):RLEEH (SEQ ID NO: 84279):LEXAXA (SEQ ID NO: 84400), RNVQXRP (SEQ ID NO: 84427):TQVQL (SEQ ID NO: 84340):NAIS (SEQ ID NO: 84113):LKKYR (SEQ ID NO: 84229):TLEDH (SEQ ID NO: 84307):LAXKXE (SEQ ID NO: 84399), HVTKPTX (SEQ ID NO: 84422):APTKL (SEQ ID NO: 84131):NAIS (SEQ ID NO: 84113):LKKYR (SEQ ID NO: 84229):NMVVR (SEQ ID NO: 84275):SXGXH (SEQ ID NO: 84304), KIPKAXX (SEQ ID NO: 84424):APTEL (SEQ ID NO: 84128):SATS (SEQ ID NO: 84117):LRKHR (SEQ ID NO: 84233):DMVVK (SEQ ID NO: 84162):GXGXR (SEQ ID NO: 84208), GIPEPXX (SEQ ID NO: 84419):APTKM (SEQ ID NO: 84132):SATS (SEQ ID NO: 84117):LRKHR (SEQ ID NO: 84233):NMVVK (SEQ ID NO: 84274):SXAXR (SEQ ID NO: 84303), SIPKAXX (SEQ ID NO: 84429):APTEL (SEQ ID NO: 84128):SATS (SEQ ID NO: 84117):LRKHR (SEQ ID NO: 84233):EMVVK (SEQ ID NO: 84176):GXGXR (SEQ ID NO: 84208), HVTKPTX (SEQ ID NO: 84422):APTKL (SEQ ID NO: 84131):SATS (SEQ ID NO: 84117):LRKHR (SEQ ID NO: 84233):NMVVK (SEQ ID NO: 84274):SXGXH (SEQ ID NO: 84304), YVPKPXX (SEQ ID NO: 84433):APTKL (SEQ ID NO: 84131):SATS (SEQ ID NO: 84117):LRKHR (SEQ ID NO: 84233):NMVVK (SEQ ID NO: 84274):SXGXH (SEQ ID NO: 84304), TVPKPXX (SEQ ID NO: 84432):APTQL (SEQ ID NO: 84134):SATS (SEQ ID NO: 84117):LRKHR (SEQ ID NO: 84233):NMVVK (SEQ ID NO: 84274):AXGXH (SEQ ID NO: 84147), KVGKAXX (SEQ ID NO: 84425):APTKL (SEQ ID NO: 84131):SATS (SEQ ID NO: 84117):LRKHR (SEQ ID NO: 84233):EGMSVVK (SEQ ID NO: 84417):XGXR (SEQ ID NO: 84123), KASKAXX (SEQ ID NO: 84423):APTKL (SEQ ID NO: 84131):SATS (SEQ ID NO: 84117):LRKHR (SEQ ID NO: 84233):GMVVK (SEQ ID NO: 84206):EXGXR (SEQ ID NO: 84179), GSAGPXX (SEQ ID NO: 84420):APTKM (SEQ ID NO: 84132):SATS (SEQ ID NO: 84117):LRKHR (SEQ ID NO: 84233):GMVVK (SEQ ID NO: 84206):RXGXS (SEQ ID NO: 84291), AAPASXX (SEQ ID NO: 84401):APTRL (SEQ ID NO: 84135):SATS (SEQ ID NO: 84117):LRKHR (SEQ ID NO: 84233):DMVVK (SEQ ID NO: 84162):AXGXR (SEQ ID NO: 84148), STPPTXX (SEQ ID NO: 84431):APTRL (SEQ ID NO: 84135):SATS (SEQ ID NO: 84117):LRKHR (SEQ ID NO: 84233):DMVVK (SEQ ID NO: 84162):SXGXR (SEQ ID NO: 84305), HVPKPXX (SEQ ID NO: 84421):APTKL (SEQ ID NO: 84131):SATS (SEQ ID NO: 84117):LRKHR (SEQ ID NO: 84233):NMVVK (SEQ ID NO: 84274):SXGXH (SEQ ID NO: 84304), RVPSTXX (SEQ ID NO: 84428):APTKT (SEQ ID NO: 84133):SATS (SEQ ID NO: 84117):LRKHR (SEQ ID NO: 84233):MIVVK (SEQ ID NO: 84246):XGXL (SEQ ID NO: 84122), ASAAPXX (SEQ ID NO: 84402):APTAL (SEQ ID NO: 84125):SATS (SEQ ID NO: 84117):LRKHR (SEQ ID NO: 84233):MIVVK (SEQ ID NO: 84246):XKXS (SEQ ID NO: 84124), ASASPXX (SEQ ID NO: 84403):APTDL (SEQ ID NO: 84126):SATS (SEQ ID NO: 84117):LRKHR (SEQ ID NO: 84233):MIVVK (SEQ ID NO: 84246):XKXS (SEQ ID NO: 84124), ASASPXX (SEQ ID NO: 84403):APTDL (SEQ ID NO: 84126):SATS (SEQ ID NO: 84117):LRKHR (SEQ ID NO: 84233):MVVVK (SEQ ID NO: 84260):XKXS (SEQ ID NO: 84124), NDEGLEX (SEQ ID NO: 84426):APTEE (SEQ ID NO: 84127):SATS (SEQ ID NO: 84117):LRKHR (SEQ ID NO: 84233):FLVVK (SEQ ID NO: 84192):KXEXR (SEQ ID NO: 84213), NDEGLEX (SEQ ID NO: 84426):APTGQ (SEQ ID NO: 84129):SATS (SEQ ID NO: 84117):LRKHR (SEQ ID NO: 84233):LEVVK (SEQ ID NO: 84226):QXEXR (SEQ ID NO: 84276), SSVKXQP (SEQ ID NO: 84430):APTHH (SEQ ID NO: 84130):SATS (SEQ ID NO: 84117):LRKHR (SEQ ID NO: 84233):RLVVK (SEQ ID NO: 84289):LEXAXA (SEQ ID NO: 84400), RNVQXRP (SEQ ID NO: 84427):APTQL (SEQ ID NO: 84134):SATS (SEQ ID NO: 84117):LRKHR (SEQ ID NO: 84233):TLVVK (SEQ ID NO: 84318):LAXKXE (SEQ ID NO: 84399), KIPKAXX (SEQ ID NO: 84424):VPTEL (SEQ ID NO: 84378):SATS (SEQ ID NO: 84117):LRKHR (SEQ ID NO: 84233):DMVVE (SEQ ID NO: 84161):GXGXR (SEQ ID NO: 84208), GIPEPXX (SEQ ID NO: 84419):VPEKM (SEQ ID NO: 84360):SATS (SEQ ID NO: 84117):LRKHR (SEQ ID NO: 84233):NMTVE (SEQ ID NO: 84267):SXAXR (SEQ ID NO: 84303), SIPKAXX (SEQ ID NO: 84429):VPTEL (SEQ ID NO: 84378):SATS (SEQ ID NO: 84117):LRKHR (SEQ ID NO: 84233):EMVVE (SEQ ID NO: 84175):GXGXR (SEQ ID NO: 84208), HVTKPTX (SEQ ID NO: 84422):APTKL (SEQ ID NO: 84131):SATS (SEQ ID NO: 84117):LRKHR (SEQ ID NO: 84233):NMVVR (SEQ ID NO: 84275):SXGXH (SEQ ID NO: 84304), YVPKPXX (SEQ ID NO: 84433):APTKL (SEQ ID NO: 84131):SATS (SEQ ID NO: 84117):LRKHR (SEQ ID NO: 84233):NMVVR (SEQ ID NO: 84275):SXGXH (SEQ ID NO: 84304), TVPKPXX (SEQ ID NO: 84432):APTQL (SEQ ID NO: 84134):SATS (SEQ ID NO: 84117):LRKHR (SEQ ID NO: 84233):NMVVR (SEQ ID NO: 84275):AXGXH (SEQ ID NO: 84147), KVGKAXX (SEQ ID NO: 84425):VPTKL (SEQ ID NO: 84381):SATS (SEQ ID NO: 84117):LRKHR (SEQ ID NO: 84233):EGMSVAE (SEQ ID NO: 84411):XGXR (SEQ ID NO: 84123), KASKAXX (SEQ ID NO: 84423):VPTKL (SEQ ID NO: 84381):SATS (SEQ ID NO: 84117):LRKHR (SEQ ID NO: 84233):GMAVS (SEQ ID NO: 84194):EXGXR (SEQ ID NO: 84179), GSAGPXX (SEQ ID NO: 84420):TPTKM (SEQ ID NO: 84327):SATS (SEQ ID NO: 84117):LRKHR (SEQ ID NO: 84233):GMVVD (SEQ ID NO: 84204):RXGXS (SEQ ID NO: 84291), AAPASXX (SEQ ID NO: 84401):VPARL (SEQ ID NO: 84352):SATS (SEQ ID NO: 84117):LRKHR (SEQ ID NO: 84233):DMVVE (SEQ ID NO: 84161):AXGXR (SEQ ID NO: 84148), STPPTXX (SEQ ID NO: 84431):VPTRL (SEQ ID NO: 84385):SATS (SEQ ID NO: 84117):LRKHR (SEQ ID NO: 84233):DMVVE (SEQ ID NO: 84161):SXGXR (SEQ ID NO: 84305), HVPKPXX (SEQ ID NO: 84421):APTKL (SEQ ID NO: 84131):SATS (SEQ ID NO: 84117):LRKHR (SEQ ID NO: 84233):NMVVR (SEQ ID NO: 84275):SXGXH (SEQ ID NO: 84304), RVPSTXX (SEQ ID NO: 84428):APVKT (SEQ ID NO: 84144):SATS (SEQ ID NO: 84117):LRKHR (SEQ ID NO: 84233):MIVEE (SEQ ID NO: 84241):XGXL (SEQ ID NO: 84122), ASAAPXX (SEQ ID NO: 84402):VPQAL (SEQ ID NO: 84364):SATS (SEQ ID NO: 84117):LRKHR (SEQ ID NO: 84233):MIVRS (SEQ ID NO: 84243):XKXS (SEQ ID NO: 84124), ASASPXX (SEQ ID NO: 84403):VSQDL (SEQ ID NO: 84387):SATS (SEQ ID NO: 84117):LRKHR (SEQ ID NO: 84233):MIVKS (SEQ ID NO: 84242):XKXS (SEQ ID NO: 84124), ASASPXX (SEQ ID NO: 84403):VPQDL (SEQ ID NO: 84365):SATS (SEQ ID NO: 84117):LRKHR (SEQ ID NO: 84233):MVVKS (SEQ ID NO: 84256):XKXS (SEQ ID NO: 84124), NDEGLEX (SEQ ID NO: 84426):VPTEE (SEQ ID NO: 84377):SATS (SEQ ID NO: 84117):LRKHR (SEQ ID NO: 84233):FLQHN (SEQ ID NO: 84184):KXEXR (SEQ ID NO: 84213), NDEGLEX (SEQ ID NO: 84426):VPTGQ (SEQ ID NO: 84379):SATS (SEQ ID NO: 84117):LRKHR (SEQ ID NO: 84233):LEEHS (SEQ ID NO: 84217):QXEXR (SEQ ID NO: 84276), SSVKXQP (SEQ ID NO: 84430):SRVHH (SEQ ID NO: 84297):SATS (SEQ ID NO: 84117):LRKHR (SEQ ID NO: 84233):RLEEH (SEQ ID NO: 84279):LEXAXA (SEQ ID NO: 84400), RNVQXRP (SEQ ID NO: 84427):TQVQL (SEQ ID NO: 84340):SATS (SEQ ID NO: 84117):LRKHR (SEQ ID NO: 84233):TLEDH (SEQ ID NO: 84307):LAXKXE (SEQ ID NO: 84399), KIPKAXX (SEQ ID NO: 84424):VPTEL (SEQ ID NO: 84378):SPIS (SEQ ID NO: 84120):LKYHY (SEQ ID NO: 84232):DMVAE (SEQ ID NO: 84156):GXGXR (SEQ ID NO: 84208), GIPEPXX (SEQ ID NO: 84419):VPTKM (SEQ ID NO: 84382):SPIS (SEQ ID NO: 84120):LKYHY (SEQ ID NO: 84232):NMVAE (SEQ ID NO: 84268):SXAXR (SEQ ID NO: 84303), SIPKAXX (SEQ ID NO: 84429):VPTEL (SEQ ID NO: 84378):SPIS (SEQ ID NO: 84120):LKYHY (SEQ ID NO: 84232):EMVAE (SEQ ID NO: 84170):GXGXR (SEQ ID NO: 84208), HVTKPTX (SEQ ID NO: 84422):VPTKL (SEQ ID NO: 84381):SPIS (SEQ ID NO: 84120):LKYHY (SEQ ID NO: 84232):NMVAE (SEQ ID NO: 84268):SXGXH (SEQ ID NO: 84304), YVPKPXX (SEQ ID NO: 84433):VPTKL (SEQ ID NO: 84381):SPIS (SEQ ID NO: 84120):LKYHY (SEQ ID NO: 84232):NMVAE (SEQ ID NO: 84268):SXGXH (SEQ ID NO: 84304), TVPKPXX (SEQ ID NO: 84432):VPTQL (SEQ ID NO: 84384):SPIS (SEQ ID NO: 84120):LKYHY (SEQ ID NO: 84232):NMVAE (SEQ ID NO: 84268):AXGXH (SEQ ID NO: 84147), AVPKAXX (SEQ ID NO: 84404):VPTKL (SEQ ID NO: 84381):SPIS (SEQ ID NO: 84120):LKYHY (SEQ ID NO: 84232):NMVAE (SEQ ID NO: 84268):AXGXH (SEQ ID NO: 84147), KASKAXX (SEQ ID NO: 84423):VPTKL (SEQ ID NO: 84381):SPIS (SEQ ID NO: 84120):LKYHY (SEQ ID NO: 84232):GMVAE (SEQ ID NO: 84200):EXGXR (SEQ ID NO: 84179), GSAGPXX (SEQ ID NO: 84420):VPTKM (SEQ ID NO: 84382):SPIS (SEQ ID NO: 84120):LKYHY (SEQ ID NO: 84232):GMVAE (SEQ ID NO: 84200):RXGXS (SEQ ID NO: 84291), AAPASXX (SEQ ID NO: 84401):VPTRL (SEQ ID NO: 84385):SPIS (SEQ ID NO: 84120):LKYHY (SEQ ID NO: 84232):DMVAE (SEQ ID NO: 84156):AXGXR (SEQ ID NO: 84148), STPPTXX (SEQ ID NO: 84431):VPTRL (SEQ ID NO: 84385):SPIS (SEQ ID NO: 84120):LKYHY (SEQ ID NO: 84232):DMVAE (SEQ ID NO: 84156):SXGXR (SEQ ID NO: 84305), HVPKPXX (SEQ ID NO: 84421):VPTKL (SEQ ID NO: 84381):SPIS (SEQ ID NO: 84120):LKYHY (SEQ ID NO: 84232):NMVAE (SEQ ID NO: 84268):SXGXH (SEQ ID NO: 84304), RVPSTXX (SEQ ID NO: 84428):VPTKT (SEQ ID NO: 84383):SPIS (SEQ ID NO: 84120):LKYHY (SEQ ID NO: 84232):MIVAE (SEQ ID NO: 84240):XGXL (SEQ ID NO: 84122), ASAAPXX (SEQ ID NO: 84402):VPTAL (SEQ ID NO: 84375):SPIS (SEQ ID NO: 84120):LKYHY (SEQ ID NO: 84232):MIVAE (SEQ ID NO: 84240):XKXS (SEQ ID NO: 84124), ASASPXX (SEQ ID NO: 84403):VPTDL (SEQ ID NO: 84376):SPIS (SEQ ID NO: 84120):LKYHY (SEQ ID NO: 84232):MIVAE (SEQ ID NO: 84240):XKXS (SEQ ID NO: 84124), ASASPXX (SEQ ID NO: 84403):VPTDL (SEQ ID NO: 84376):SPIS (SEQ ID NO: 84120):LKYHY (SEQ ID NO: 84232):MVVAE (SEQ ID NO: 84254):XKXS (SEQ ID NO: 84124), NDEGLEX (SEQ ID NO: 84426):VPTEE (SEQ ID NO: 84377):SPIS (SEQ ID NO: 84120):LKYHY (SEQ ID NO: 84232):FLVAE (SEQ ID NO: 84186):KXEXR (SEQ ID NO: 84213), NDEGLEX (SEQ ID NO: 84426):VPTGQ (SEQ ID NO: 84379):SPIS (SEQ ID NO: 84120):LKYHY (SEQ ID NO: 84232):LEVAE (SEQ ID NO: 84220):QXEXR (SEQ ID NO: 84276), SSVKXQP (SEQ ID NO: 84430):VPTHH (SEQ ID NO: 84380):SPIS (SEQ ID NO: 84120):LKYHY (SEQ ID NO: 84232):RLVAE (SEQ ID NO: 84283):LEXAXA (SEQ ID NO: 84400), RNVQXRP (SEQ ID NO: 84427):VPTQL (SEQ ID NO: 84384):SPIS (SEQ ID NO: 84120):LKYHY (SEQ ID NO: 84232):TLVAE (SEQ ID NO: 84312):LAXKXE (SEQ ID NO: 84399), KIPKAXX (SEQ ID NO: 84424):VPTEL (SEQ ID NO: 84378):SPIS (SEQ ID NO: 84120):LKYHY (SEQ ID NO: 84232):DMVVE (SEQ ID NO: 84161):GXGXR (SEQ ID NO: 84208), GIPEPXX (SEQ ID NO: 84419):VPEKM (SEQ ID NO: 84360):SPIS (SEQ ID NO: 84120):LKYHY (SEQ ID NO: 84232):NMTVE (SEQ ID NO: 84267):SXAXR (SEQ ID NO: 84303), SIPKAXX (SEQ ID NO: 84429):VPTEL (SEQ ID NO: 84378):SPIS (SEQ ID NO: 84120):LKYHY (SEQ ID NO: 84232):EMVVE (SEQ ID NO: 84175):GXGXR (SEQ ID NO: 84208), HVTKPTX (SEQ ID NO: 84422):APTKL (SEQ ID NO: 84131):SPIS (SEQ ID NO: 84120):LKYHY (SEQ ID NO: 84232):NMVVR (SEQ ID NO: 84275):SXGXH (SEQ ID NO: 84304), YVPKPXX (SEQ ID NO: 84433):APTKL (SEQ ID NO: 84131):SPIS (SEQ ID NO: 84120):LKYHY (SEQ ID NO: 84232):NMVVR (SEQ ID NO: 84275):SXGXH (SEQ ID NO: 84304), TVPKPXX (SEQ ID NO: 84432):APTQL (SEQ ID NO: 84134):SPIS (SEQ ID NO: 84120):LKYHY (SEQ ID NO: 84232):NMVVR (SEQ ID NO: 84275):AXGXH (SEQ ID NO: 84147), AVPKAXX (SEQ ID NO: 84404):APTKL (SEQ ID NO: 84131):SPIS (SEQ ID NO: 84120):LKYHY (SEQ ID NO: 84232):NMVVK (SEQ ID NO: 84274):AXGXH (SEQ ID NO: 84147), KASKAXX (SEQ ID NO: 84423):VPTKL (SEQ ID NO: 84381):SPIS (SEQ ID NO: 84120):LKYHY (SEQ ID NO: 84232):GMAVS (SEQ ID NO: 84194):EXGXR (SEQ ID NO: 84179), GSAGPXX (SEQ ID NO: 84420):TPTKM (SEQ ID NO: 84327):SPIS (SEQ ID NO: 84120):LKYHY (SEQ ID NO: 84232):GMVVD (SEQ ID NO: 84204):RXGXS (SEQ ID NO: 84291), AAPASXX (SEQ ID NO: 84401):VPARL (SEQ ID NO: 84352):SPIS (SEQ ID NO: 84120):LKYHY (SEQ ID NO: 84232):DMVVE (SEQ ID NO: 84161):AXGXR (SEQ ID NO: 84148), STPPTXX (SEQ ID NO: 84431):VPTRL (SEQ ID NO: 84385):SPIS (SEQ ID NO: 84120):LKYHY (SEQ ID NO: 84232):DMVVE (SEQ ID NO: 84161):SXGXR (SEQ ID NO: 84305), HVPKPXX (SEQ ID NO: 84421):APTKL (SEQ ID NO: 84131):SPIS (SEQ ID NO: 84120):LKYHY (SEQ ID NO: 84232):NMVVR (SEQ ID NO: 84275):SXGXH (SEQ ID NO: 84304), RVPSTXX (SEQ ID NO: 84428):APVKT (SEQ ID NO: 84144):SPIS (SEQ ID NO: 84120):LKYHY (SEQ ID NO: 84232):MIVEE (SEQ ID NO: 84241):XGXL (SEQ ID NO: 84122), ASAAPXX (SEQ ID NO: 84402):VPQAL (SEQ ID NO: 84364):SPIS (SEQ ID NO: 84120):LKYHY (SEQ ID NO: 84232):MIVRS (SEQ ID NO: 84243):XKXS (SEQ ID NO: 84124), ASASPXX (SEQ ID NO: 84403):VSQDL (SEQ ID NO: 84387):SPIS (SEQ ID NO: 84120):LKYHY (SEQ ID NO: 84232):MIVKS (SEQ ID NO: 84242):XKXS (SEQ ID NO: 84124), ASASPXX (SEQ ID NO: 84403):VPQDL (SEQ ID NO: 84365):SPIS (SEQ ID NO: 84120):LKYHY (SEQ ID NO: 84232):MVVKS (SEQ ID NO: 84256):XKXS (SEQ ID NO: 84124), NDEGLEX (SEQ ID NO: 84426):VPTEE (SEQ ID NO: 84377):SPIS (SEQ ID NO: 84120):LKYHY (SEQ ID NO: 84232):FLQHN (SEQ ID NO: 84184):KXEXR (SEQ ID NO: 84213), NDEGLEX (SEQ ID NO: 84426):VPTGQ (SEQ ID NO: 84379):SPIS (SEQ ID NO: 84120):LKYHY (SEQ ID NO: 84232):LEEHS (SEQ ID NO: 84217):QXEXR (SEQ ID NO: 84276), SSVKXQP (SEQ ID NO: 84430):SRVHH (SEQ ID NO: 84297):SPIS (SEQ ID NO: 84120):LKYHY (SEQ ID NO: 84232):RLEEH (SEQ ID NO: 84279):LEXAXA (SEQ ID NO: 84400), RNVQXRP (SEQ ID NO: 84427):TQVQL (SEQ ID NO: 84340):SPIS (SEQ ID NO: 84120):LKYHY (SEQ ID NO: 84232):TLEDH (SEQ ID NO: 84307):LAXKXE (SEQ ID NO: 84399), KIPKAXX (SEQ ID NO: 84424):VPTEL (SEQ ID NO: 84378):EPIS (SEQ ID NO: 84109):KFKYE (SEQ ID NO: 84211):DMAVS (SEQ ID NO: 84150):GXGXR (SEQ ID NO: 84208), GIPEPXX (SEQ ID NO: 84419):VPTKM (SEQ ID NO: 84382):EPIS (SEQ ID NO: 84109):KFKYE (SEQ ID NO: 84211):NMAVS (SEQ ID NO: 84262):SXAXR (SEQ ID NO: 84303), SIPKAXX (SEQ ID NO: 84429):VPTEL (SEQ ID NO: 84378):EPIS (SEQ ID NO: 84109):KFKYE (SEQ ID NO: 84211):EMAVS (SEQ ID NO: 84164):GXGXR (SEQ ID NO: 84208), HVTKPTX (SEQ ID NO: 84422):VPTKL (SEQ ID NO: 84381):EPIS (SEQ ID NO: 84109):KFKYE (SEQ ID NO: 84211):NMAVS (SEQ ID NO: 84262):SXGXH (SEQ ID NO: 84304), YVPKPXX (SEQ ID NO: 84433):VPTKL (SEQ ID NO: 84381):EPIS (SEQ ID NO: 84109):KFKYE (SEQ ID NO: 84211):NMAVS (SEQ ID NO: 84262):SXGXH (SEQ ID NO: 84304), TVPKPXX (SEQ ID NO: 84432):VPTQL (SEQ ID NO: 84384):EPIS (SEQ ID NO: 84109):KFKYE (SEQ ID NO: 84211):NMAVS (SEQ ID NO: 84262):AXGXH (SEQ ID NO: 84147), AVPKAXX (SEQ ID NO: 84404):VPTKL (SEQ ID NO: 84381):EPIS (SEQ ID NO: 84109):KFKYE (SEQ ID NO: 84211):NMAVS (SEQ ID NO: 84262):AXGXH (SEQ ID NO: 84147), KVGKAXX (SEQ ID NO: 84425):VPTKL (SEQ ID NO: 84381):EPIS (SEQ ID NO: 84109):KFKYE (SEQ ID NO: 84211):EGMSAVS (SEQ ID NO: 84405):XGXR (SEQ ID NO: 84123), GSAGPXX (SEQ ID NO: 84420):VPTKM (SEQ ID NO: 84382):EPIS (SEQ ID NO: 84109):KFKYE (SEQ ID NO: 84211):GMAVS (SEQ ID NO: 84194):RXGXS (SEQ ID NO: 84291), AAPASXX (SEQ ID NO: 84401):VPTRL (SEQ ID NO: 84385):EPIS (SEQ ID NO: 84109):KFKYE (SEQ ID NO: 84211):DMAVS (SEQ ID NO: 84150):AXGXR (SEQ ID NO: 84148), STPPTXX (SEQ ID NO: 84431):VPTRL (SEQ ID NO: 84385):EPIS (SEQ ID NO: 84109):KFKYE (SEQ ID NO: 84211):DMAVS (SEQ ID NO: 84150):SXGXR (SEQ ID NO: 84305), HVPKPXX (SEQ ID NO: 84421):VPTKL (SEQ ID NO: 84381):EPIS (SEQ ID NO: 84109):KFKYE (SEQ ID NO: 84211):NMAVS (SEQ ID NO: 84262):SXGXH (SEQ ID NO: 84304), RVPSTXX (SEQ ID NO: 84428):VPTKT (SEQ ID NO: 84383):EPIS (SEQ ID NO: 84109):KFKYE (SEQ ID NO: 84211):MIAVS (SEQ ID NO: 84234):XGXL (SEQ ID NO: 84122), ASAAPXX (SEQ ID NO: 84402):VPTAL (SEQ ID NO: 84375):EPIS (SEQ ID NO: 84109):KFKYE (SEQ ID NO: 84211):MIAVS (SEQ ID NO: 84234):XKXS (SEQ ID NO: 84124), ASASPXX (SEQ ID NO: 84403):VPTDL (SEQ ID NO: 84376):EPIS (SEQ ID NO: 84109):KFKYE (SEQ ID NO: 84211):MIAVS (SEQ ID NO: 84234):XKXS (SEQ ID NO: 84124), ASASPXX (SEQ ID NO: 84403):VPTDL (SEQ ID NO: 84376):EPIS (SEQ ID NO: 84109):KFKYE (SEQ ID NO: 84211):MVAVS (SEQ ID NO: 84248):XKXS (SEQ ID NO: 84124), NDEGLEX (SEQ ID NO: 84426):VPTEE (SEQ ID NO: 84377):EPIS (SEQ ID NO: 84109):KFKYE (SEQ ID NO: 84211):FLAVS (SEQ ID NO: 84180):KXEXR (SEQ ID NO: 84213), NDEGLEX (SEQ ID NO: 84426):VPTGQ (SEQ ID NO: 84379):EPIS (SEQ ID NO: 84109):KFKYE (SEQ ID NO: 84211):LEAVS (SEQ ID NO: 84214):QXEXR (SEQ ID NO: 84276), SSVKXQP (SEQ ID NO: 84430):VPTHH (SEQ ID NO: 84380):EPIS (SEQ ID NO: 84109):KFKYE (SEQ ID NO: 84211):RLAVS (SEQ ID NO: 84277):LEXAXA (SEQ ID NO: 84400), RNVQXRP (SEQ ID NO: 84427):VPTQL (SEQ ID NO: 84384):EPIS (SEQ ID NO: 84109):KFKYE (SEQ ID NO: 84211):TLAVS (SEQ ID NO: 84306):LAXKXE (SEQ ID NO: 84399), KIPKAXX (SEQ ID NO: 84424):VPTEL (SEQ ID NO: 84378):EPIS (SEQ ID NO: 84109):KFKYE (SEQ ID NO: 84211):DMVVE (SEQ ID NO: 84161):GXGXR (SEQ ID NO: 84208), GIPEPXX (SEQ ID NO: 84419):VPEKM (SEQ ID NO: 84360):EPIS (SEQ ID NO: 84109):KFKYE (SEQ ID NO: 84211):NMTVE (SEQ ID NO: 84267):SXAXR (SEQ ID NO: 84303), SIPKAXX (SEQ ID NO: 84429):VPTEL (SEQ ID NO: 84378):EPIS (SEQ ID NO: 84109):KFKYE (SEQ ID NO: 84211):EMVVE (SEQ ID NO: 84175):GXGXR (SEQ ID NO: 84208), HVTKPTX (SEQ ID NO: 84422):APTKL (SEQ ID NO: 84131):EPIS (SEQ ID NO: 84109):KFKYE (SEQ ID NO: 84211):NMVVR (SEQ ID NO: 84275):SXGXH (SEQ ID NO: 84304), YVPKPXX (SEQ ID NO: 84433):APTKL (SEQ ID NO: 84131):EPIS (SEQ ID NO: 84109):KFKYE (SEQ ID NO: 84211):NMVVR (SEQ ID NO: 84275):SXGXH (SEQ ID NO: 84304), TVPKPXX (SEQ ID NO: 84432):APTQL (SEQ ID NO: 84134):EPIS (SEQ ID NO: 84109):KFKYE (SEQ ID NO: 84211):NMVVR (SEQ ID NO: 84275):AXGXH (SEQ ID NO: 84147), AVPKAXX (SEQ ID NO: 84404):APTKL (SEQ ID NO: 84131):EPIS (SEQ ID NO: 84109):KFKYE (SEQ ID NO: 84211):NMVVK (SEQ ID NO: 84274):AXGXH (SEQ ID NO: 84147), KVGKAXX (SEQ ID NO: 84425):VPTKL (SEQ ID NO: 84381):EPIS (SEQ ID NO: 84109):KFKYE (SEQ ID NO: 84211):EGMSVAE (SEQ ID NO: 84411):XGXR (SEQ ID NO: 84123), GSAGPXX (SEQ ID NO: 84420):TPTKM (SEQ ID NO: 84327):EPIS (SEQ ID NO: 84109):KFKYE (SEQ ID NO: 84211):GMVVD (SEQ ID NO: 84204):RXGXS (SEQ ID NO: 84291), AAPASXX (SEQ ID NO: 84401):VPARL (SEQ ID NO: 84352):EPIS (SEQ ID NO: 84109):KFKYE (SEQ ID NO: 84211):DMVVE (SEQ ID NO: 84161):AXGXR (SEQ ID NO: 84148), STPPTXX (SEQ ID NO: 84431):VPTRL (SEQ ID NO: 84385):EPIS (SEQ ID NO: 84109):KFKYE (SEQ ID NO: 84211):DMVVE (SEQ ID NO: 84161):SXGXR (SEQ ID NO: 84305), HVPKPXX (SEQ ID NO: 84421):APTKL (SEQ ID NO: 84131):EPIS (SEQ ID NO: 84109):KFKYE (SEQ ID NO: 84211):NMVVR (SEQ ID NO: 84275):SXGXH (SEQ ID NO: 84304), RVPSTXX (SEQ ID NO: 84428):APVKT (SEQ ID NO: 84144):EPIS (SEQ ID NO: 84109):KFKYE (SEQ ID NO: 84211):MIVEE (SEQ ID NO: 84241):XGXL (SEQ ID NO: 84122), ASAAPXX (SEQ ID NO: 84402):VPQAL (SEQ ID NO: 84364):EPIS (SEQ ID NO: 84109):KFKYE (SEQ ID NO: 84211):MIVRS (SEQ ID NO: 84243):XKXS (SEQ ID NO: 84124), ASASPXX (SEQ ID NO: 84403):VSQDL (SEQ ID NO: 84387):EPIS (SEQ ID NO: 84109):KFKYE (SEQ ID NO: 84211):MIVKS (SEQ ID NO: 84242):XKXS (SEQ ID NO: 84124), ASASPXX (SEQ ID NO: 84403):VPQDL (SEQ ID NO: 84365):EPIS (SEQ ID NO: 84109):KFKYE (SEQ ID NO: 84211):MVVKS (SEQ ID NO: 84256):XKXS (SEQ ID NO: 84124), NDEGLEX (SEQ ID NO: 84426):VPTEE (SEQ ID NO: 84377):EPIS (SEQ ID NO: 84109):KFKYE (SEQ ID NO: 84211):FLQHN (SEQ ID NO: 84184):KXEXR (SEQ ID NO: 84213), NDEGLEX (SEQ ID NO: 84426):VPTGQ (SEQ ID NO: 84379):EPIS (SEQ ID NO: 84109):KFKYE (SEQ ID NO: 84211):LEEHS (SEQ ID NO: 84217):QXEXR (SEQ ID NO: 84276), SSVKXQP (SEQ ID NO: 84430):SRVHH (SEQ ID NO: 84297):EPIS (SEQ ID NO: 84109):KFKYE (SEQ ID NO: 84211):RLEEH (SEQ ID NO: 84279):LEXAXA (SEQ ID NO: 84400), RNVQXRP (SEQ ID NO: 84427):TQVQL (SEQ ID NO: 84340):EPIS (SEQ ID NO: 84109):KFKYE (SEQ ID NO: 84211):TLEDH (SEQ ID NO: 84307):LAXKXE (SEQ ID NO: 84399), KIPKAXX (SEQ ID NO: 84424):TPTEL (SEQ ID NO: 84323):SPIN (SEQ ID NO: 84119):YGKIP (SEQ ID NO: 84397):DMVVD (SEQ ID NO: 84160):GXGXR (SEQ ID NO: 84208), GIPEPXX (SEQ ID NO: 84419):TPTKM (SEQ ID NO: 84327):SPIN (SEQ ID NO: 84119):YGKIP (SEQ ID NO: 84397):NMVVD (SEQ ID NO: 84272):SXAXR (SEQ ID NO: 84303), SIPKAXX (SEQ ID NO: 84429):TPTEL (SEQ ID NO: 84323):SPIN (SEQ ID NO: 84119):YGKIP (SEQ ID NO: 84397):EMVVD (SEQ ID NO: 84174):GXGXR (SEQ ID NO: 84208), HVTKPTX (SEQ ID NO: 84422):TPTKL (SEQ ID NO: 84326):SPIN (SEQ ID NO: 84119):YGKIP (SEQ ID NO: 84397):NMVVD (SEQ ID NO: 84272):SXGXH (SEQ ID NO: 84304), YVPKPXX (SEQ ID NO: 84433):TPTKL (SEQ ID NO: 84326):SPIN (SEQ ID NO: 84119):YGKIP (SEQ ID NO: 84397):NMVVD (SEQ ID NO: 84272):SXGXH (SEQ ID NO: 84304), TVPKPXX (SEQ ID NO: 84432):TPTQL (SEQ ID NO: 84329):SPIN (SEQ ID NO: 84119):YGKIP (SEQ ID NO: 84397):NMVVD (SEQ ID NO: 84272):AXGXH (SEQ ID NO: 84147), AVPKAXX (SEQ ID NO: 84404):TPTKL (SEQ ID NO: 84326):SPIN (SEQ ID NO: 84119):YGKIP (SEQ ID NO: 84397):NMVVD (SEQ ID NO: 84272):AXGXH (SEQ ID NO: 84147), KVGKAXX (SEQ ID NO: 84425):TPTKL (SEQ ID NO: 84326):SPIN (SEQ ID NO: 84119):YGKIP (SEQ ID NO: 84397):EGMSVVD (SEQ ID NO: 84415):XGXR (SEQ ID NO: 84123), KASKAXX (SEQ ID NO: 84423):TPTKL (SEQ ID NO: 84326):SPIN (SEQ ID NO: 84119):YGKIP (SEQ ID NO: 84397):GMVVD (SEQ ID NO: 84204):EXGXR (SEQ ID NO: 84179), AAPASXX (SEQ ID NO: 84401):TPTRL (SEQ ID NO: 84330):SPIN (SEQ ID NO: 84119):YGKIP (SEQ ID NO: 84397):DMVVD (SEQ ID NO: 84160):AXGXR (SEQ ID NO: 84148), STPPTXX (SEQ ID NO: 84431):TPTRL (SEQ ID NO: 84330):SPIN (SEQ ID NO: 84119):YGKIP (SEQ ID NO: 84397):DMVVD (SEQ ID NO: 84160):SXGXR (SEQ ID NO: 84305), HVPKPXX (SEQ ID NO: 84421):TPTKL (SEQ ID NO: 84326):SPIN (SEQ ID NO: 84119):YGKIP (SEQ ID NO: 84397):NMVVD (SEQ ID NO: 84272):SXGXH (SEQ ID NO: 84304), RVPSTXX (SEQ ID NO: 84428):TPTKT (SEQ ID NO: 84328):SPIN (SEQ ID NO: 84119):YGKIP (SEQ ID NO: 84397):MIVVD (SEQ ID NO: 84244):XGXL (SEQ ID NO: 84122), ASAAPXX (SEQ ID NO: 84402):TPTAL (SEQ ID NO: 84320):SPIN (SEQ ID NO: 84119):YGKIP (SEQ ID NO: 84397):MIVVD (SEQ ID NO: 84244):XKXS (SEQ ID NO: 84124), ASASPXX (SEQ ID NO: 84403):TPTDL (SEQ ID NO: 84321):SPIN (SEQ ID NO: 84119):YGKIP (SEQ ID NO: 84397):MIVVD (SEQ ID NO: 84244):XKXS (SEQ ID NO: 84124), ASASPXX (SEQ ID NO: 84403):TPTDL (SEQ ID NO: 84321):SPIN (SEQ ID NO: 84119):YGKIP (SEQ ID NO: 84397):MVVVD (SEQ ID NO: 84258):XKXS (SEQ ID NO: 84124), NDEGLEX (SEQ ID NO: 84426):TPTEE (SEQ ID NO: 84322):SPIN (SEQ ID NO: 84119):YGKIP (SEQ ID NO: 84397):FLVVD (SEQ ID NO: 84190):KXEXR (SEQ ID NO: 84213), NDEGLEX (SEQ ID NO: 84426):TPTGQ (SEQ ID NO: 84324):SPIN (SEQ ID NO: 84119):YGKIP (SEQ ID NO: 84397):LEVVD (SEQ ID NO: 84224):QXEXR (SEQ ID NO: 84276), SSVKXQP (SEQ ID NO: 84430):TPTHH (SEQ ID NO: 84325):SPIN (SEQ ID NO: 84119):YGKIP (SEQ ID NO: 84397):RLVVD (SEQ ID NO: 84287):LEXAXA (SEQ ID NO: 84400), RNVQXRP (SEQ ID NO: 84427):TPTQL (SEQ ID NO: 84329):SPIN (SEQ ID NO: 84119):YGKIP (SEQ ID NO: 84397):TLVVD (SEQ ID NO: 84316):LAXKXE (SEQ ID NO: 84399), KIPKAXX (SEQ ID NO: 84424):VPTEL (SEQ ID NO: 84378):SPIN (SEQ ID NO: 84119):YGKIP (SEQ ID NO: 84397):DMVVE (SEQ ID NO: 84161):GXGXR (SEQ ID NO: 84208), GIPEPXX (SEQ ID NO: 84419):VPEKM (SEQ ID NO: 84360):SPIN (SEQ ID NO: 84119):YGKIP (SEQ ID NO: 84397):NMTVE (SEQ ID NO: 84267):SXAXR (SEQ ID NO: 84303), SIPKAXX (SEQ ID NO: 84429):VPTEL (SEQ ID NO: 84378):SPIN (SEQ ID NO: 84119):YGKIP (SEQ ID NO: 84397):EMVVE (SEQ ID NO: 84175):GXGXR (SEQ ID NO: 84208), HVTKPTX (SEQ ID NO: 84422):APTKL (SEQ ID NO: 84131):SPIN (SEQ ID NO: 84119):YGKIP (SEQ ID NO: 84397):NMVVR (SEQ ID NO: 84275):SXGXH (SEQ ID NO: 84304), YVPKPXX (SEQ ID NO: 84433):APTKL (SEQ ID NO: 84131):SPIN (SEQ ID NO: 84119):YGKIP (SEQ ID NO: 84397):NMVVR (SEQ ID NO: 84275):SXGXH (SEQ ID NO: 84304), TVPKPXX (SEQ ID NO: 84432):APTQL (SEQ ID NO: 84134):SPIN (SEQ ID NO: 84119):YGKIP (SEQ ID NO: 84397):NMVVR (SEQ ID NO: 84275):AXGXH (SEQ ID NO: 84147), AVPKAXX (SEQ ID NO: 84404):APTKL (SEQ ID NO: 84131):SPIN (SEQ ID NO: 84119):YGKIP (SEQ ID NO: 84397):NMVVK (SEQ ID NO: 84274):AXGXH (SEQ ID NO: 84147), KVGKAXX (SEQ ID NO: 84425):VPTKL (SEQ ID NO: 84381):SPIN (SEQ ID NO: 84119):YGKIP (SEQ ID NO: 84397):EGMSVAE (SEQ ID NO: 84411):XGXR (SEQ ID NO: 84123), KASKAXX (SEQ ID NO: 84423):VPTKL (SEQ ID NO: 84381):SPIN (SEQ ID NO: 84119):YGKIP (SEQ ID NO: 84397):GMAVS (SEQ ID NO: 84194):EXGXR (SEQ ID NO: 84179), AAPASXX (SEQ ID NO: 84401):VPARL (SEQ ID NO: 84352):SPIN (SEQ ID NO: 84119):YGKIP (SEQ ID NO: 84397):DMVVE (SEQ ID NO: 84161):AXGXR (SEQ ID NO: 84148), STPPTXX (SEQ ID NO: 84431):VPTRL (SEQ ID NO: 84385):SPIN (SEQ ID NO: 84119):YGKIP (SEQ ID NO: 84397):DMVVE (SEQ ID NO: 84161):SXGXR (SEQ ID NO: 84305), HVPKPXX (SEQ ID NO: 84421):APTKL (SEQ ID NO: 84131):SPIN (SEQ ID NO: 84119):YGKIP (SEQ ID NO: 84397):NMVVR (SEQ ID NO: 84275):SXGXH (SEQ ID NO: 84304), RVPSTXX (SEQ ID NO: 84428):APVKT (SEQ ID NO: 84144):SPIN (SEQ ID NO: 84119):YGKIP (SEQ ID NO: 84397):MIVEE (SEQ ID NO: 84241):XGXL (SEQ ID NO: 84122), ASAAPXX (SEQ ID NO: 84402):VPQAL (SEQ ID NO: 84364):SPIN (SEQ ID NO: 84119):YGKIP (SEQ ID NO: 84397):MIVRS (SEQ ID NO: 84243):XKXS (SEQ ID NO: 84124), ASASPXX (SEQ ID NO: 84403):VSQDL (SEQ ID NO: 84387):SPIN (SEQ ID NO: 84119):YGKIP (SEQ ID NO: 84397):MIVKS (SEQ ID NO: 84242):XKXS (SEQ ID NO: 84124), ASASPXX (SEQ ID NO: 84403):VPQDL (SEQ ID NO: 84365):SPIN (SEQ ID NO: 84119):YGKIP (SEQ ID NO: 84397):MVVKS (SEQ ID NO: 84256):XKXS (SEQ ID NO: 84124), NDEGLEX (SEQ ID NO: 84426):VPTEE (SEQ ID NO: 84377):SPIN (SEQ ID NO: 84119):YGKIP (SEQ ID NO: 84397):FLQHN (SEQ ID NO: 84184):KXEXR (SEQ ID NO: 84213), NDEGLEX (SEQ ID NO: 84426):VPTGQ (SEQ ID NO: 84379):SPIN (SEQ ID NO: 84119):YGKIP (SEQ ID NO: 84397):LEEHS (SEQ ID NO: 84217):QXEXR (SEQ ID NO: 84276), SSVKXQP (SEQ ID NO: 84430):SRVHH (SEQ ID NO: 84297):SPIN (SEQ ID NO: 84119):YGKIP (SEQ ID NO: 84397):RLEEH (SEQ ID NO: 84279):LEXAXA (SEQ ID NO: 84400), RNVQXRP (SEQ ID NO: 84427):TQVQL (SEQ ID NO: 84340):SPIN (SEQ ID NO: 84119):YGKIP (SEQ ID NO: 84397):TLEDH (SEQ ID NO: 84307):LAXKXE (SEQ ID NO: 84399), KIPKAXX (SEQ ID NO: 84424):VPAEL (SEQ ID NO: 84345):SPIS (SEQ ID NO: 84120):YKQYE (SEQ ID NO: 84398):DMVVE (SEQ ID NO: 84161):GXGXR (SEQ ID NO: 84208), GIPEPXX (SEQ ID NO: 84419):VPAKM (SEQ ID NO: 84349):SPIS (SEQ ID NO: 84120):YKQYE (SEQ ID NO: 84398):NMVVE (SEQ ID NO: 84273):SXAXR (SEQ ID NO: 84303), SIPKAXX (SEQ ID NO: 84429):VPAEL (SEQ ID NO: 84345):SPIS (SEQ ID NO: 84120):YKQYE (SEQ ID NO: 84398):EMVVE (SEQ ID NO: 84175):GXGXR (SEQ ID NO: 84208), HVTKPTX (SEQ ID NO: 84422):VPAKL (SEQ ID NO: 84348):SPIS (SEQ ID NO: 84120):YKQYE (SEQ ID NO: 84398):NMVVE (SEQ ID NO: 84273):SXGXH (SEQ ID NO: 84304), YVPKPXX (SEQ ID NO: 84433):VPAKL (SEQ ID NO: 84348):SPIS (SEQ ID NO: 84120):YKQYE (SEQ ID NO: 84398):NMVVE (SEQ ID NO: 84273):SXGXH (SEQ ID NO: 84304), TVPKPXX (SEQ ID NO: 84432):VPAQL (SEQ ID NO: 84351):SPIS (SEQ ID NO: 84120):YKQYE (SEQ ID NO: 84398):NMVVE (SEQ ID NO: 84273):AXGXH (SEQ ID NO: 84147), AVPKAXX (SEQ ID NO: 84404):VPAKL (SEQ ID NO: 84348):SPIS (SEQ ID NO: 84120):YKQYE (SEQ ID NO: 84398):NMVVE (SEQ ID NO: 84273):AXGXH (SEQ ID NO: 84147), KVGKAXX (SEQ ID NO: 84425):VPAKL (SEQ ID NO: 84348):SPIS (SEQ ID NO: 84120):YKQYE (SEQ ID NO: 84398):EGMSVVE (SEQ ID NO: 84416):XGXR (SEQ ID NO: 84123), KASKAXX (SEQ ID NO: 84423):VPAKL (SEQ ID NO: 84348):SPIS (SEQ ID NO: 84120):YKQYE (SEQ ID NO: 84398):GMVVE (SEQ ID NO: 84205):EXGXR (SEQ ID NO: 84179), GSAGPXX (SEQ ID NO: 84420):VPAKM (SEQ ID NO: 84349):SPIS (SEQ ID NO: 84120):YKQYE (SEQ ID NO: 84398):GMVVE (SEQ ID NO: 84205):RXGXS (SEQ ID NO: 84291), STPPTXX (SEQ ID NO: 84431):VPARL (SEQ ID NO: 84352):SPIS (SEQ ID NO: 84120):YKQYE (SEQ ID NO: 84398):DMVVE (SEQ ID NO: 84161):SXGXR (SEQ ID NO: 84305), HVPKPXX (SEQ ID NO: 84421):VPAKL (SEQ ID NO: 84348):SPIS (SEQ ID NO: 84120):YKQYE (SEQ ID NO: 84398):NMVVE (SEQ ID NO: 84273):SXGXH (SEQ ID NO: 84304), RVPSTXX (SEQ ID NO: 84428):VPAKT (SEQ ID NO: 84350):SPIS (SEQ ID NO: 84120):YKQYE (SEQ ID NO: 84398):MIVVE (SEQ ID NO: 84245):XGXL (SEQ ID NO: 84122), ASAAPXX (SEQ ID NO: 84402):VPAAL (SEQ ID NO: 84342):SPIS (SEQ ID NO: 84120):YKQYE (SEQ ID NO: 84398):MIVVE (SEQ ID NO: 84245):XKXS (SEQ ID NO: 84124), ASASPXX (SEQ ID NO: 84403):VPADL (SEQ ID NO: 84343):SPIS (SEQ ID NO: 84120):YKQYE (SEQ ID NO: 84398):MIVVE (SEQ ID NO: 84245):XKXS (SEQ ID NO: 84124), ASASPXX (SEQ ID NO: 84403):VPADL (SEQ ID NO: 84343):SPIS (SEQ ID NO: 84120):YKQYE (SEQ ID NO: 84398):MVVVE (SEQ ID NO: 84259):XKXS (SEQ ID NO: 84124), NDEGLEX (SEQ ID NO: 84426):VPAEE (SEQ ID NO: 84344):SPIS (SEQ ID NO: 84120):YKQYE (SEQ ID NO: 84398):FLVVE (SEQ ID NO: 84191):KXEXR (SEQ ID NO: 84213), NDEGLEX (SEQ ID NO: 84426):VPAGQ (SEQ ID NO: 84346):SPIS (SEQ ID NO: 84120):YKQYE (SEQ ID NO: 84398):LEVVE (SEQ ID NO: 84225):QXEXR (SEQ ID NO: 84276), SSVKXQP (SEQ ID NO: 84430):VPAHH (SEQ ID NO: 84347):SPIS (SEQ ID NO: 84120):YKQYE (SEQ ID NO: 84398):RLVVE (SEQ ID NO: 84288):LEXAXA (SEQ ID NO: 84400), RNVQXRP (SEQ ID NO: 84427):VPAQL (SEQ ID NO: 84351):SPIS (SEQ ID NO: 84120):YKQYE (SEQ ID NO: 84398):TLVVE (SEQ ID NO: 84317):LAXKXE (SEQ ID NO: 84399), KIPKAXX (SEQ ID NO: 84424):VPTEL (SEQ ID NO: 84378):SPIS (SEQ ID NO: 84120):YKQYE (SEQ ID NO: 84398):DMVVE (SEQ ID NO: 84161):GXGXR (SEQ ID NO: 84208), GIPEPXX (SEQ ID NO: 84419):VPEKM (SEQ ID NO: 84360):SPIS (SEQ ID NO: 84120):YKQYE (SEQ ID NO: 84398):NMTVE (SEQ ID NO: 84267):SXAXR (SEQ ID NO: 84303), SIPKAXX (SEQ ID NO: 84429):VPTEL (SEQ ID NO: 84378):SPIS (SEQ ID NO: 84120):YKQYE (SEQ ID NO: 84398):EMVVE (SEQ ID NO: 84175):GXGXR (SEQ ID NO: 84208), HVTKPTX (SEQ ID NO: 84422):APTKL (SEQ ID NO: 84131):SPIS (SEQ ID NO: 84120):YKQYE (SEQ ID NO: 84398):NMVVR (SEQ ID NO: 84275):SXGXH (SEQ ID NO: 84304), YVPKPXX (SEQ ID NO: 84433):APTKL (SEQ ID NO: 84131):SPIS (SEQ ID NO: 84120):YKQYE (SEQ ID NO: 84398):NMVVR (SEQ ID NO: 84275):SXGXH (SEQ ID NO: 84304), TVPKPXX (SEQ ID NO: 84432):APTQL (SEQ ID NO: 84134):SPIS (SEQ ID NO: 84120):YKQYE (SEQ ID NO: 84398):NMVVR (SEQ ID NO: 84275):AXGXH (SEQ ID NO: 84147), AVPKAXX (SEQ ID NO: 84404):APTKL (SEQ ID NO: 84131):SPIS (SEQ ID NO: 84120):YKQYE (SEQ ID NO: 84398):NMVVK (SEQ ID NO: 84274):AXGXH (SEQ ID NO: 84147), KVGKAXX (SEQ ID NO: 84425):VPTKL (SEQ ID NO: 84381):SPIS (SEQ ID NO: 84120):YKQYE (SEQ ID NO: 84398):EGMSVAE (SEQ ID NO: 84411):XGXR (SEQ ID NO: 84123), KASKAXX (SEQ ID NO: 84423):VPTKL (SEQ ID NO: 84381):SPIS (SEQ ID NO: 84120):YKQYE (SEQ ID NO: 84398):GMAVS (SEQ ID NO: 84194):EXGXR (SEQ ID NO: 84179), GSAGPXX (SEQ ID NO: 84420):TPTKM (SEQ ID NO: 84327):SPIS (SEQ ID NO: 84120):YKQYE (SEQ ID NO: 84398):GMVVD (SEQ ID NO: 84204):RXGXS (SEQ ID NO: 84291), STPPTXX (SEQ ID NO: 84431):VPTRL (SEQ ID NO: 84385):SPIS (SEQ ID NO: 84120):YKQYE (SEQ ID NO: 84398):DMVVE (SEQ ID NO: 84161):SXGXR (SEQ ID NO: 84305), HVPKPXX (SEQ ID NO: 84421):APTKL (SEQ ID NO: 84131):SPIS (SEQ ID NO: 84120):YKQYE (SEQ ID NO: 84398):NMVVR (SEQ ID NO: 84275):SXGXH (SEQ ID NO: 84304), RVPSTXX (SEQ ID NO: 84428):APVKT (SEQ ID NO: 84144):SPIS (SEQ ID NO: 84120):YKQYE (SEQ ID NO: 84398):MIVEE (SEQ ID NO: 84241):XGXL (SEQ ID NO: 84122), ASAAPXX (SEQ ID NO: 84402):VPQAL (SEQ ID NO: 84364):SPIS (SEQ ID NO: 84120):YKQYE (SEQ ID NO: 84398):MIVRS (SEQ ID NO: 84243):XKXS (SEQ ID NO: 84124), ASASPXX (SEQ ID NO: 84403):VSQDL (SEQ ID NO: 84387):SPIS (SEQ ID NO: 84120):YKQYE (SEQ ID NO: 84398):MIVKS (SEQ ID NO: 84242):XKXS (SEQ ID NO: 84124), ASASPXX (SEQ ID NO: 84403):VPQDL (SEQ ID NO: 84365):SPIS (SEQ ID NO: 84120):YKQYE (SEQ ID NO: 84398):MVVKS (SEQ ID NO: 84256):XKXS (SEQ ID NO: 84124), NDEGLEX (SEQ ID NO: 84426):VPTEE (SEQ ID NO: 84377):SPIS (SEQ ID NO: 84120):YKQYE (SEQ ID NO: 84398):FLQHN (SEQ ID NO: 84184):KXEXR (SEQ ID NO: 84213), NDEGLEX (SEQ ID NO: 84426):VPTGQ (SEQ ID NO: 84379):SPIS (SEQ ID NO: 84120):YKQYE (SEQ ID NO: 84398):LEEHS (SEQ ID NO: 84217):QXEXR (SEQ ID NO: 84276), SSVKXQP (SEQ ID NO: 84430):SRVHH (SEQ ID NO: 84297):SPIS (SEQ ID NO: 84120):YKQYE (SEQ ID NO: 84398):RLEEH (SEQ ID NO: 84279):LEXAXA (SEQ ID NO: 84400), RNVQXRP (SEQ ID NO: 84427):TQVQL (SEQ ID NO: 84340):SPIS (SEQ ID NO: 84120):YKQYE (SEQ ID NO: 84398):TLEDH (SEQ ID NO: 84307):LAXKXE (SEQ ID NO: 84399), GIPEPXX (SEQ ID NO: 84419):VPTKM (SEQ ID NO: 84382):SPIS (SEQ ID NO: 84120):YKQYE (SEQ ID NO: 84398):NMVVE (SEQ ID NO: 84273):SXAXR (SEQ ID NO: 84303), HVTKPTX (SEQ ID NO: 84422):VPTKL (SEQ ID NO: 84381):SPIS (SEQ ID NO: 84120):YKQYE (SEQ ID NO: 84398):NMVVE (SEQ ID NO: 84273):SXGXH (SEQ ID NO: 84304), YVPKPXX (SEQ ID NO: 84433):VPTKL (SEQ ID NO: 84381):SPIS (SEQ ID NO: 84120):YKQYE (SEQ ID NO: 84398):NMVVE (SEQ ID NO: 84273):SXGXH (SEQ ID NO: 84304), TVPKPXX (SEQ ID NO: 84432):VPTQL (SEQ ID NO: 84384):SPIS (SEQ ID NO: 84120):YKQYE (SEQ ID NO: 84398):NMVVE (SEQ ID NO: 84273):AXGXH (SEQ ID NO: 84147), AVPKAXX (SEQ ID NO: 84404):VPTKL (SEQ ID NO: 84381):SPIS (SEQ ID NO: 84120):YKQYE (SEQ ID NO: 84398):NMVVE (SEQ ID NO: 84273):AXGXH (SEQ ID NO: 84147), KVGKAXX (SEQ ID NO: 84425):VPTKL (SEQ ID NO: 84381):SPIS (SEQ ID NO: 84120):YKQYE (SEQ ID NO: 84398):EGMSVVE (SEQ ID NO: 84416):XGXR (SEQ ID NO: 84123), KASKAXX (SEQ ID NO: 84423):VPTKL (SEQ ID NO: 84381):SPIS (SEQ ID NO: 84120):YKQYE (SEQ ID NO: 84398):GMVVE (SEQ ID NO: 84205):EXGXR (SEQ ID NO: 84179), GSAGPXX (SEQ ID NO: 84420):VPTKM (SEQ ID NO: 84382):SPIS (SEQ ID NO: 84120):YKQYE (SEQ ID NO: 84398):GMVVE (SEQ ID NO: 84205):RXGXS (SEQ ID NO: 84291), AAPASXX (SEQ ID NO: 84401):VPTRL (SEQ ID NO: 84385):SPIS (SEQ ID NO: 84120):YKQYE (SEQ ID NO: 84398):DMVVE (SEQ ID NO: 84161):AXGXR (SEQ ID NO: 84148), HVPKPXX (SEQ ID NO: 84421):VPTKL (SEQ ID NO: 84381):SPIS (SEQ ID NO: 84120):YKQYE (SEQ ID NO: 84398):NMVVE (SEQ ID NO: 84273):SXGXH (SEQ ID NO: 84304), RVPSTXX (SEQ ID NO: 84428):VPTKT (SEQ ID NO: 84383):SPIS (SEQ ID NO: 84120):YKQYE (SEQ ID NO: 84398):MIVVE (SEQ ID NO: 84245):XGXL (SEQ ID NO: 84122), ASAAPXX (SEQ ID NO: 84402):VPTAL (SEQ ID NO: 84375):SPIS (SEQ ID NO: 84120):YKQYE (SEQ ID NO: 84398):MIVVE (SEQ ID NO: 84245):XKXS (SEQ ID NO: 84124), ASASPXX (SEQ ID NO: 84403):VPTDL (SEQ ID NO: 84376):SPIS (SEQ ID NO: 84120):YKQYE (SEQ ID NO: 84398):MIVVE (SEQ ID NO: 84245):XKXS (SEQ ID NO: 84124), ASASPXX (SEQ ID NO: 84403):VPTDL (SEQ ID NO: 84376):SPIS (SEQ ID NO: 84120):YKQYE (SEQ ID NO: 84398):MVVVE (SEQ ID NO: 84259):XKXS (SEQ ID NO: 84124), NDEGLEX (SEQ ID NO: 84426):VPTEE (SEQ ID NO: 84377):SPIS (SEQ ID NO: 84120):YKQYE (SEQ ID NO: 84398):FLVVE (SEQ ID NO: 84191):KXEXR (SEQ ID NO: 84213), NDEGLEX (SEQ ID NO: 84426):VPTGQ (SEQ ID NO: 84379):SPIS (SEQ ID NO: 84120):YKQYE (SEQ ID NO: 84398):LEVVE (SEQ ID NO: 84225):QXEXR (SEQ ID NO: 84276), SSVKXQP (SEQ ID NO: 84430):VPTHH (SEQ ID NO: 84380):SPIS (SEQ ID NO: 84120):YKQYE (SEQ ID NO: 84398):RLVVE (SEQ ID NO: 84288):LEXAXA (SEQ ID NO: 84400), RNVQXRP (SEQ ID NO: 84427):VPTQL (SEQ ID NO: 84384):SPIS (SEQ ID NO: 84120):YKQYE (SEQ ID NO: 84398):TLVVE (SEQ ID NO: 84317):LAXKXE (SEQ ID NO: 84399), AAPASXX (SEQ ID NO: 84401):VPARL (SEQ ID NO: 84352):SPIS (SEQ ID NO: 84120):YKQYE (SEQ ID NO: 84398):DMVVE (SEQ ID NO: 84161):AXGXR (SEQ ID NO: 84148), KIPKAXX (SEQ ID NO: 84424):APVEL (SEQ ID NO: 84139):KPLS (SEQ ID NO: 84112):DHHKD (SEQ ID NO: 84149):DMVEE (SEQ ID NO: 84157):GXGXR (SEQ ID NO: 84208), GIPEPXX (SEQ ID NO: 84419):APVKM (SEQ ID NO: 84143):KPLS (SEQ ID NO: 84112):DHHKD (SEQ ID NO: 84149):NMVEE (SEQ ID NO: 84269):SXAXR (SEQ ID NO: 84303), SIPKAXX (SEQ ID NO: 84429):APVEL (SEQ ID NO: 84139):KPLS (SEQ ID NO: 84112):DHHKD (SEQ ID NO: 84149):EMVEE (SEQ ID NO: 84171):GXGXR (SEQ ID NO: 84208), HVTKPTX (SEQ ID NO: 84422):APVKL (SEQ ID NO: 84142):KPLS (SEQ ID NO: 84112):DHHKD (SEQ ID NO: 84149):NMVEE (SEQ ID NO: 84269):SXGXH (SEQ ID NO: 84304), YVPKPXX (SEQ ID NO: 84433):APVKL (SEQ ID NO: 84142):KPLS (SEQ ID NO: 84112):DHHKD (SEQ ID NO: 84149):NMVEE (SEQ ID NO: 84269):SXGXH (SEQ ID NO: 84304), TVPKPXX (SEQ ID NO: 84432):APVQL (SEQ ID NO: 84145):KPLS (SEQ ID NO: 84112):DHHKD (SEQ ID NO: 84149):NMVEE (SEQ ID NO: 84269):AXGXH (SEQ ID NO: 84147), AVPKAXX (SEQ ID NO: 84404):APVKL (SEQ ID NO: 84142):KPLS (SEQ ID NO: 84112):DHHKD (SEQ ID NO: 84149):NMVEE (SEQ ID NO: 84269):AXGXH (SEQ ID NO: 84147), KVGKAXX (SEQ ID NO: 84425):APVKL (SEQ ID NO: 84142):KPLS (SEQ ID NO: 84112):DHHKD (SEQ ID NO: 84149):EGMSVEE (SEQ ID NO: 84412):XGXR (SEQ ID NO: 84123), KASKAXX (SEQ ID NO: 84423):APVKL (SEQ ID NO: 84142):KPLS (SEQ ID NO: 84112):DHHKD (SEQ ID NO: 84149):GMVEE (SEQ ID NO: 84201):EXGXR (SEQ ID NO: 84179), GSAGPXX (SEQ ID NO: 84420):APVKM (SEQ ID NO: 84143):KPLS (SEQ ID NO: 84112):DHHKD (SEQ ID NO: 84149):GMVEE (SEQ ID NO: 84201):RXGXS (SEQ ID NO: 84291), AAPASXX (SEQ ID NO: 84401):APVRL (SEQ ID NO: 84146):KPLS (SEQ ID NO: 84112):DHHKD (SEQ ID NO: 84149):DMVEE (SEQ ID NO: 84157):AXGXR (SEQ ID NO: 84148), STPPTXX (SEQ ID NO: 84431):APVRL (SEQ ID NO: 84146):KPLS (SEQ ID NO: 84112):DHHKD (SEQ ID NO: 84149):DMVEE (SEQ ID NO: 84157):SXGXR (SEQ ID NO: 84305), HVPKPXX (SEQ ID NO: 84421):APVKL (SEQ ID NO: 84142):KPLS (SEQ ID NO: 84112):DHHKD (SEQ ID NO: 84149):NMVEE (SEQ ID NO: 84269):SXGXH (SEQ ID NO: 84304), ASAAPXX (SEQ ID NO: 84402):APVAL (SEQ ID NO: 84136):KPLS (SEQ ID NO: 84112):DHHKD (SEQ ID NO: 84149):MIVEE (SEQ ID NO: 84241):XKXS (SEQ ID NO: 84124), ASASPXX (SEQ ID NO: 84403):APVDL (SEQ ID NO: 84137):KPLS (SEQ ID NO: 84112):DHHKD (SEQ ID NO: 84149):MIVEE (SEQ ID NO: 84241):XKXS (SEQ ID NO: 84124), ASASPXX (SEQ ID NO: 84403):APVDL (SEQ ID NO: 84137):KPLS (SEQ ID NO: 84112):DHHKD (SEQ ID NO: 84149):MVVEE (SEQ ID NO: 84255):XKXS (SEQ ID NO: 84124), NDEGLEX (SEQ ID NO: 84426):APVEE (SEQ ID NO: 84138):KPLS (SEQ ID NO: 84112):DHHKD (SEQ ID NO: 84149):FLVEE (SEQ ID NO: 84187):KXEXR (SEQ ID NO: 84213), NDEGLEX (SEQ ID NO: 84426):APVGQ (SEQ ID NO: 84140):KPLS (SEQ ID NO: 84112):DHHKD (SEQ ID NO: 84149):LEVEE (SEQ ID NO: 84221):QXEXR (SEQ ID NO: 84276), SSVKXQP (SEQ ID NO: 84430):APVHH (SEQ ID NO: 84141):KPLS (SEQ ID NO: 84112):DHHKD (SEQ ID NO: 84149):RLVEE (SEQ ID NO: 84284):LEXAXA (SEQ ID NO: 84400), RNVQXRP (SEQ ID NO: 84427):APVQL (SEQ ID NO: 84145):KPLS (SEQ ID NO: 84112):DHHKD (SEQ ID NO: 84149):TLVEE (SEQ ID NO: 84313):LAXKXE (SEQ ID NO: 84399), KIPKAXX (SEQ ID NO: 84424):VPTEL (SEQ ID NO: 84378):KPLS (SEQ ID NO: 84112):DHHKD (SEQ ID NO: 84149):DMVVE (SEQ ID NO: 84161):GXGXR (SEQ ID NO: 84208), GIPEPXX (SEQ ID NO: 84419):VPEKM (SEQ ID NO: 84360):KPLS (SEQ ID NO: 84112):DHHKD (SEQ ID NO: 84149):NMTVE (SEQ ID NO: 84267):SXAXR (SEQ ID NO: 84303), SIPKAXX (SEQ ID NO: 84429):VPTEL (SEQ ID NO: 84378):KPLS (SEQ ID NO: 84112):DHHKD (SEQ ID NO: 84149):EMVVE (SEQ ID NO: 84175):GXGXR (SEQ ID NO: 84208), HVTKPTX (SEQ ID NO: 84422):APTKL (SEQ ID NO: 84131):KPLS (SEQ ID NO: 84112):DHHKD (SEQ ID NO: 84149):NMVVR (SEQ ID NO: 84275):SXGXH (SEQ ID NO: 84304), YVPKPXX (SEQ ID NO: 84433):APTKL (SEQ ID NO: 84131):KPLS (SEQ ID NO: 84112):DHHKD (SEQ ID NO: 84149):NMVVR (SEQ ID NO: 84275):SXGXH (SEQ ID NO: 84304), TVPKPXX (SEQ ID NO: 84432):APTQL (SEQ ID NO: 84134):KPLS (SEQ ID NO: 84112):DHHKD (SEQ ID NO: 84149):NMVVR (SEQ ID NO: 84275):AXGXH (SEQ ID NO: 84147), AVPKAXX (SEQ ID NO: 84404):APTKL (SEQ ID NO: 84131):KPLS (SEQ ID NO: 84112):DHHKD (SEQ ID NO: 84149):NMVVK (SEQ ID NO: 84274):AXGXH (SEQ ID NO: 84147), KVGKAXX (SEQ ID NO: 84425):VPTKL (SEQ ID NO: 84381):KPLS (SEQ ID NO: 84112):DHHKD (SEQ ID NO: 84149):EGMSVAE (SEQ ID NO: 84411):XGXR (SEQ ID NO: 84123), KASKAXX (SEQ ID NO: 84423):VPTKL (SEQ ID NO: 84381):KPLS (SEQ ID NO: 84112):DHHKD (SEQ ID NO: 84149):GMAVS (SEQ ID NO: 84194):EXGXR (SEQ ID NO: 84179), GSAGPXX (SEQ ID NO: 84420):TPTKM (SEQ ID NO: 84327):KPLS (SEQ ID NO: 84112):DHHKD (SEQ ID NO: 84149):GMVVD (SEQ ID NO: 84204):RXGXS (SEQ ID NO: 84291), AAPASXX (SEQ ID NO: 84401):VPARL (SEQ ID NO: 84352):KPLS (SEQ ID NO: 84112):DHHKD (SEQ ID NO: 84149):DMVVE (SEQ ID NO: 84161):AXGXR (SEQ ID NO: 84148), STPPTXX (SEQ ID NO: 84431):VPTRL (SEQ ID NO: 84385):KPLS (SEQ ID NO: 84112):DHHKD (SEQ ID NO: 84149):DMVVE (SEQ ID NO: 84161):SXGXR (SEQ ID NO: 84305), HVPKPXX (SEQ ID NO: 84421):APTKL (SEQ ID NO: 84131):KPLS (SEQ ID NO: 84112):DHHKD (SEQ ID NO: 84149):NMVVR (SEQ ID NO: 84275):SXGXH (SEQ ID NO: 84304), ASAAPXX (SEQ ID NO: 84402):VPQAL (SEQ ID NO: 84364):KPLS (SEQ ID NO: 84112):DHHKD (SEQ ID NO: 84149):MIVRS (SEQ ID NO: 84243):XKXS (SEQ ID NO: 84124), ASASPXX (SEQ ID NO: 84403):VSQDL (SEQ ID NO: 84387):KPLS (SEQ ID NO: 84112):DHHKD (SEQ ID NO: 84149):MIVKS (SEQ ID NO: 84242):XKXS (SEQ ID NO: 84124), ASASPXX (SEQ ID NO: 84403):VPQDL (SEQ ID NO: 84365):KPLS (SEQ ID NO: 84112):DHHKD (SEQ ID NO: 84149):MVVKS (SEQ ID NO: 84256):XKXS (SEQ ID NO: 84124), NDEGLEX (SEQ ID NO: 84426):VPTEE (SEQ ID NO: 84377):KPLS (SEQ ID NO: 84112):DHHKD (SEQ ID NO: 84149):FLQHN (SEQ ID NO: 84184):KXEXR (SEQ ID NO: 84213), NDEGLEX (SEQ ID NO: 84426):VPTGQ (SEQ ID NO: 84379):KPLS (SEQ ID NO: 84112):DHHKD (SEQ ID NO: 84149):LEEHS (SEQ ID NO: 84217):QXEXR (SEQ ID NO: 84276), SSVKXQP (SEQ ID NO: 84430):SRVHH (SEQ ID NO: 84297):KPLS (SEQ ID NO: 84112):DHHKD (SEQ ID NO: 84149):RLEEH (SEQ ID NO: 84279):LEXAXA (SEQ ID NO: 84400), RNVQXRP (SEQ ID NO: 84427):TQVQL (SEQ ID NO: 84340):KPLS (SEQ ID NO: 84112):DHHKD (SEQ ID NO: 84149):TLEDH (SEQ ID NO: 84307):LAXKXE (SEQ ID NO: 84399), KIPKAXX (SEQ ID NO: 84424):VPQEL (SEQ ID NO: 84367):EPLP (SEQ ID NO: 84110):EQLSN (SEQ ID NO: 84178):DMVRS (SEQ ID NO: 84159):GXGXR (SEQ ID NO: 84208), GIPEPXX (SEQ ID NO: 84419):VPQKM (SEQ ID NO: 84371):EPLP (SEQ ID NO: 84110):EQLSN (SEQ ID NO: 84178):NMVRS (SEQ ID NO: 84271):SXAXR (SEQ ID NO: 84303), SIPKAXX (SEQ ID NO: 84429):VPQEL (SEQ ID NO: 84367):EPLP (SEQ ID NO: 84110):EQLSN (SEQ ID NO: 84178):EMVRS (SEQ ID NO: 84173):GXGXR (SEQ ID NO: 84208), HVTKPTX (SEQ ID NO: 84422):VPQKL (SEQ ID NO: 84370):EPLP (SEQ ID NO: 84110):EQLSN (SEQ ID NO: 84178):NMVRS (SEQ ID NO: 84271):SXGXH (SEQ ID NO: 84304), YVPKPXX (SEQ ID NO: 84433):VPQKL (SEQ ID NO: 84370):EPLP (SEQ ID NO: 84110):EQLSN (SEQ ID NO: 84178):NMVRS (SEQ ID NO: 84271):SXGXH (SEQ ID NO: 84304), TVPKPXX (SEQ ID NO: 84432):VPQQL (SEQ ID NO: 84373):EPLP (SEQ ID NO: 84110):EQLSN (SEQ ID NO: 84178):NMVRS (SEQ ID NO: 84271):AXGXH (SEQ ID NO: 84147), AVPKAXX (SEQ ID NO: 84404):VPQKL (SEQ ID NO: 84370):EPLP (SEQ ID NO: 84110):EQLSN (SEQ ID NO: 84178):NMVRS (SEQ ID NO: 84271):AXGXH (SEQ ID NO: 84147), KVGKAXX (SEQ ID NO: 84425):VPQKL (SEQ ID NO: 84370):EPLP (SEQ ID NO: 84110):EQLSN (SEQ ID NO: 84178):EGMSVRS (SEQ ID NO: 84414):XGXR (SEQ ID NO: 84123), KASKAXX (SEQ ID NO: 84423):VPQKL (SEQ ID NO: 84370):EPLP (SEQ ID NO: 84110):EQLSN (SEQ ID NO: 84178):GMVRS (SEQ ID NO: 84203):EXGXR (SEQ ID NO: 84179), GSAGPXX (SEQ ID NO: 84420):VPQKM (SEQ ID NO: 84371):EPLP (SEQ ID NO: 84110):EQLSN (SEQ ID NO: 84178):GMVRS (SEQ ID NO: 84203):RXGXS (SEQ ID NO: 84291), AAPASXX (SEQ ID NO: 84401):VPQRL (SEQ ID NO: 84374):EPLP (SEQ ID NO: 84110):EQLSN (SEQ ID NO: 84178):DMVRS (SEQ ID NO: 84159):AXGXR (SEQ ID NO: 84148), STPPTXX (SEQ ID NO: 84431):VPQRL (SEQ ID NO: 84374):EPLP (SEQ ID NO: 84110):EQLSN (SEQ ID NO: 84178):DMVRS (SEQ ID NO: 84159):SXGXR (SEQ ID NO: 84305), HVPKPXX (SEQ ID NO: 84421):VPQKL (SEQ ID NO: 84370):EPLP (SEQ ID NO: 84110):EQLSN (SEQ ID NO: 84178):NMVRS (SEQ ID NO: 84271):SXGXH (SEQ ID NO: 84304), RVPSTXX (SEQ ID NO: 84428):VPQKT (SEQ ID NO: 84372):EPLP (SEQ ID NO: 84110):EQLSN (SEQ ID NO: 84178):MIVRS (SEQ ID NO: 84243):XGXL (SEQ ID NO: 84122), ASASPXX (SEQ ID NO: 84403):VPQDL (SEQ ID NO: 84365):EPLP (SEQ ID NO: 84110):EQLSN (SEQ ID NO: 84178):MIVRS (SEQ ID NO: 84243):XKXS (SEQ ID NO: 84124), ASASPXX (SEQ ID NO: 84403):VPQDL (SEQ ID NO: 84365):EPLP (SEQ ID NO: 84110):EQLSN (SEQ ID NO: 84178):MVVRS (SEQ ID NO: 84257):XKXS (SEQ ID NO: 84124), NDEGLEX (SEQ ID NO: 84426):VPQEE (SEQ ID NO: 84366):EPLP (SEQ ID NO: 84110):EQLSN (SEQ ID NO: 84178):FLVRS (SEQ ID NO: 84189):KXEXR (SEQ ID NO: 84213), NDEGLEX (SEQ ID NO: 84426):VPQGQ (SEQ ID NO: 84368):EPLP (SEQ ID NO: 84110):EQLSN (SEQ ID NO: 84178):LEVRS (SEQ ID NO: 84223):QXEXR (SEQ ID NO: 84276), SSVKXQP (SEQ ID NO: 84430):VPQHH (SEQ ID NO: 84369):EPLP (SEQ ID NO: 84110):EQLSN (SEQ ID NO: 84178):RLVRS (SEQ ID NO: 84286):LEXAXA (SEQ ID NO: 84400), RNVQXRP (SEQ ID NO: 84427):VPQQL (SEQ ID NO: 84373):EPLP (SEQ ID NO: 84110):EQLSN (SEQ ID NO: 84178):TLVRS (SEQ ID NO: 84315):LAXKXE (SEQ ID NO: 84399), KIPKAXX (SEQ ID NO: 84424):VPTEL (SEQ ID NO: 84378):EPLP (SEQ ID NO: 84110):EQLSN (SEQ ID NO: 84178):DMVVE (SEQ ID NO: 84161):GXGXR (SEQ ID NO: 84208), GIPEPXX (SEQ ID NO: 84419):VPEKM (SEQ ID NO: 84360):EPLP (SEQ ID NO: 84110):EQLSN (SEQ ID NO: 84178):NMTVE (SEQ ID NO: 84267):SXAXR (SEQ ID NO: 84303), SIPKAXX (SEQ ID NO: 84429):VPTEL (SEQ ID NO: 84378):EPLP (SEQ ID NO: 84110):EQLSN (SEQ ID NO: 84178):EMVVE (SEQ ID NO: 84175):GXGXR (SEQ ID NO: 84208), HVTKPTX (SEQ ID NO: 84422):APTKL (SEQ ID NO: 84131):EPLP (SEQ ID NO: 84110):EQLSN (SEQ ID NO: 84178):NMVVR (SEQ ID NO: 84275):SXGXH (SEQ ID NO: 84304), YVPKPXX (SEQ ID NO: 84433):APTKL (SEQ ID NO: 84131):EPLP (SEQ ID NO: 84110):EQLSN (SEQ ID NO: 84178):NMVVR (SEQ ID NO: 84275):SXGXH (SEQ ID NO: 84304), TVPKPXX (SEQ ID NO: 84432):APTQL (SEQ ID NO: 84134):EPLP (SEQ ID NO: 84110):EQLSN (SEQ ID NO: 84178):NMVVR (SEQ ID NO: 84275):AXGXH (SEQ ID NO: 84147), AVPKAXX (SEQ ID NO: 84404):APTKL (SEQ ID NO: 84131):EPLP (SEQ ID NO: 84110):EQLSN (SEQ ID NO: 84178):NMVVK (SEQ ID NO: 84274):AXGXH (SEQ ID NO: 84147), KVGKAXX (SEQ ID NO: 84425):VPTKL (SEQ ID NO: 84381):EPLP (SEQ ID NO: 84110):EQLSN (SEQ ID NO: 84178):EGMSVAE (SEQ ID NO: 84411):XGXR (SEQ ID NO: 84123), KASKAXX (SEQ ID NO: 84423):VPTKL (SEQ ID NO: 84381):EPLP (SEQ ID NO: 84110):EQLSN (SEQ ID NO: 84178):GMAVS (SEQ ID NO: 84194):EXGXR (SEQ ID NO: 84179), GSAGPXX (SEQ ID NO: 84420):TPTKM (SEQ ID NO: 84327):EPLP (SEQ ID NO: 84110):EQLSN (SEQ ID NO: 84178):GMVVD (SEQ ID NO: 84204):RXGXS (SEQ ID NO: 84291), AAPASXX (SEQ ID NO: 84401):VPARL (SEQ ID NO: 84352):EPLP (SEQ ID NO: 84110):EQLSN (SEQ ID NO: 84178):DMVVE (SEQ ID NO: 84161):AXGXR (SEQ ID NO: 84148), STPPTXX (SEQ ID NO: 84431):VPTRL (SEQ ID NO: 84385):EPLP (SEQ ID NO: 84110):EQLSN (SEQ ID NO: 84178):DMVVE (SEQ ID NO: 84161):SXGXR (SEQ ID NO: 84305), HVPKPXX (SEQ ID NO: 84421):APTKL (SEQ ID NO: 84131):EPLP (SEQ ID NO: 84110):EQLSN (SEQ ID NO: 84178):NMVVR (SEQ ID NO: 84275):SXGXH (SEQ ID NO: 84304), RVPSTXX (SEQ ID NO: 84428):APVKT (SEQ ID NO: 84144):EPLP (SEQ ID NO: 84110):EQLSN (SEQ ID NO: 84178):MIVEE (SEQ ID NO: 84241):XGXL (SEQ ID NO: 84122), ASASPXX (SEQ ID NO: 84403):VSQDL (SEQ ID NO: 84387):EPLP (SEQ ID NO: 84110):EQLSN (SEQ ID NO: 84178):MIVKS (SEQ ID NO: 84242):XKXS (SEQ ID NO: 84124), ASASPXX (SEQ ID NO: 84403):VPQDL (SEQ ID NO: 84365):EPLP (SEQ ID NO: 84110):EQLSN (SEQ ID NO: 84178):MVVKS (SEQ ID NO: 84256):XKXS (SEQ ID NO: 84124), NDEGLEX (SEQ ID NO: 84426):VPTEE (SEQ ID NO: 84377):EPLP (SEQ ID NO: 84110):EQLSN (SEQ ID NO: 84178):FLQHN (SEQ ID NO: 84184):KXEXR (SEQ ID NO: 84213), NDEGLEX (SEQ ID NO: 84426):VPTGQ (SEQ ID NO: 84379):EPLP (SEQ ID NO: 84110):EQLSN (SEQ ID NO: 84178):LEEHS (SEQ ID NO: 84217):QXEXR (SEQ ID NO: 84276), SSVKXQP (SEQ ID NO: 84430):SRVHH (SEQ ID NO: 84297):EPLP (SEQ ID NO: 84110):EQLSN (SEQ ID NO: 84178):RLEEH (SEQ ID NO: 84279):LEXAXA (SEQ ID NO: 84400), RNVQXRP (SEQ ID NO: 84427):TQVQL (SEQ ID NO: 84340):EPLP (SEQ ID NO: 84110):EQLSN (SEQ ID NO: 84178):TLEDH (SEQ ID NO: 84307):LAXKXE (SEQ ID NO: 84399), KIPKAXX (SEQ ID NO: 84424):VSQEL (SEQ ID NO: 84389):EPLT (SEQ ID NO: 84111):EQLSN (SEQ ID NO: 84178):DMVKS (SEQ ID NO: 84158):GXGXR (SEQ ID NO: 84208), GIPEPXX (SEQ ID NO: 84419):VSQKM (SEQ ID NO: 84393):EPLT (SEQ ID NO: 84111):EQLSN (SEQ ID NO: 84178):NMVKS (SEQ ID NO: 84270):SXAXR (SEQ ID NO: 84303), SIPKAXX (SEQ ID NO: 84429):VSQEL (SEQ ID NO: 84389):EPLT (SEQ ID NO: 84111):EQLSN (SEQ ID NO: 84178):EMVKS (SEQ ID NO: 84172):GXGXR (SEQ ID NO: 84208), HVTKPTX (SEQ ID NO: 84422):VSQKL (SEQ ID NO: 84392):EPLT (SEQ ID NO: 84111):EQLSN (SEQ ID NO: 84178):NMVKS (SEQ ID NO: 84270):SXGXH (SEQ ID NO: 84304), YVPKPXX (SEQ ID NO: 84433):VSQKL (SEQ ID NO: 84392):EPLT (SEQ ID NO: 84111):EQLSN (SEQ ID NO: 84178):NMVKS (SEQ ID NO: 84270):SXGXH (SEQ ID NO: 84304), TVPKPXX (SEQ ID NO: 84432):VSQQL (SEQ ID NO: 84395):EPLT (SEQ ID NO: 84111):EQLSN (SEQ ID NO: 84178):NMVKS (SEQ ID NO: 84270):AXGXH (SEQ ID NO: 84147), AVPKAXX (SEQ ID NO: 84404):VSQKL (SEQ ID NO: 84392):EPLT (SEQ ID NO: 84111):EQLSN (SEQ ID NO: 84178):NMVKS (SEQ ID NO: 84270):AXGXH (SEQ ID NO: 84147), KVGKAXX (SEQ ID NO: 84425):VSQKL (SEQ ID NO: 84392):EPLT (SEQ ID NO: 84111):EQLSN (SEQ ID NO: 84178):EGMSVKS (SEQ ID NO: 84413):XGXR (SEQ ID NO: 84123), KASKAXX (SEQ ID NO: 84423):VSQKL (SEQ ID NO: 84392):EPLT (SEQ ID NO: 84111):EQLSN (SEQ ID NO: 84178):GMVKS (SEQ ID NO: 84202):EXGXR (SEQ ID NO: 84179), GSAGPXX (SEQ ID NO: 84420):VSQKM (SEQ ID NO: 84393):EPLT (SEQ ID NO: 84111):EQLSN (SEQ ID NO: 84178):GMVKS (SEQ ID NO: 84202):RXGXS (SEQ ID NO: 84291), AAPASXX (SEQ ID NO: 84401):VSQRL (SEQ ID NO: 84396):EPLT (SEQ ID NO: 84111):EQLSN (SEQ ID NO: 84178):DMVKS (SEQ ID NO: 84158):AXGXR (SEQ ID NO: 84148), STPPTXX (SEQ ID NO: 84431):VSQRL (SEQ ID NO: 84396):EPLT (SEQ ID NO: 84111):EQLSN (SEQ ID NO: 84178):DMVKS (SEQ ID NO: 84158):SXGXR (SEQ ID NO: 84305), HVPKPXX (SEQ ID NO: 84421):VSQKL (SEQ ID NO: 84392):EPLT (SEQ ID NO: 84111):EQLSN (SEQ ID NO: 84178):NMVKS (SEQ ID NO: 84270):SXGXH (SEQ ID NO: 84304), RVPSTXX (SEQ ID NO: 84428):VSQKT (SEQ ID NO: 84394):EPLT (SEQ ID NO: 84111):EQLSN (SEQ ID NO: 84178):MIVKS (SEQ ID NO: 84242):XGXL (SEQ ID NO: 84122), ASAAPXX (SEQ ID NO: 84402):VSQAL (SEQ ID NO: 84386):EPLT (SEQ ID NO: 84111):EQLSN (SEQ ID NO: 84178):MIVKS (SEQ ID NO: 84242):XKXS (SEQ ID NO: 84124), ASASPXX (SEQ ID NO: 84403):VSQDL (SEQ ID NO: 84387):EPLT (SEQ ID NO: 84111):EQLSN (SEQ ID NO: 84178):MVVKS (SEQ ID NO: 84256):XKXS (SEQ ID NO: 84124), NDEGLEX (SEQ ID NO: 84426):VSQEE (SEQ ID NO: 84388):EPLT (SEQ ID NO: 84111):EQLSN (SEQ ID NO: 84178):FLVKS (SEQ ID NO: 84188):KXEXR (SEQ ID NO: 84213), NDEGLEX (SEQ ID NO: 84426):VSQGQ (SEQ ID NO: 84390):EPLT (SEQ ID NO: 84111):EQLSN (SEQ ID NO: 84178):LEVKS (SEQ ID NO: 84222):QXEXR (SEQ ID NO: 84276), SSVKXQP (SEQ ID NO: 84430):VSQHH (SEQ ID NO: 84391):EPLT (SEQ ID NO: 84111):EQLSN (SEQ ID NO: 84178):RLVKS (SEQ ID NO: 84285):LEXAXA (SEQ ID NO: 84400), RNVQXRP (SEQ ID NO: 84427):VSQQL (SEQ ID NO: 84395):EPLT (SEQ ID NO: 84111):EQLSN (SEQ ID NO: 84178):TLVKS (SEQ ID NO: 84314):LAXKXE (SEQ ID NO: 84399), KIPKAXX (SEQ ID NO: 84424):VPTEL (SEQ ID NO: 84378):EPLT (SEQ ID NO: 84111):EQLSN (SEQ ID NO: 84178):DMVVE (SEQ ID NO: 84161):GXGXR (SEQ ID NO: 84208), GIPEPXX (SEQ ID NO: 84419):VPEKM (SEQ ID NO: 84360):EPLT (SEQ ID NO: 84111):EQLSN (SEQ ID NO: 84178):NMTVE (SEQ ID NO: 84267):SXAXR (SEQ ID NO: 84303), SIPKAXX (SEQ ID NO: 84429):VPTEL (SEQ ID NO: 84378):EPLT (SEQ ID NO: 84111):EQLSN (SEQ ID NO: 84178):EMVVE (SEQ ID NO: 84175):GXGXR (SEQ ID NO: 84208), HVTKPTX (SEQ ID NO: 84422):APTKL (SEQ ID NO: 84131):EPLT (SEQ ID NO: 84111):EQLSN (SEQ ID NO: 84178):NMVVR (SEQ ID NO: 84275):SXGXH (SEQ ID NO: 84304), YVPKPXX (SEQ ID NO: 84433):APTKL (SEQ ID NO: 84131):EPLT (SEQ ID NO: 84111):EQLSN (SEQ ID NO: 84178):NMVVR (SEQ ID NO: 84275):SXGXH (SEQ ID NO: 84304), TVPKPXX (SEQ ID NO: 84432):APTQL (SEQ ID NO: 84134):EPLT (SEQ ID NO: 84111):EQLSN (SEQ ID NO: 84178):NMVVR (SEQ ID NO: 84275):AXGXH (SEQ ID NO: 84147), AVPKAXX (SEQ ID NO: 84404):APTKL (SEQ ID NO: 84131):EPLT (SEQ ID NO: 84111):EQLSN (SEQ ID NO: 84178):NMVVK (SEQ ID NO: 84274):AXGXH (SEQ ID NO: 84147), KVGKAXX (SEQ ID NO: 84425):VPTKL (SEQ ID NO: 84381):EPLT (SEQ ID NO: 84111):EQLSN (SEQ ID NO: 84178):EGMSVAE (SEQ ID NO: 84411):XGXR (SEQ ID NO: 84123), KASKAXX (SEQ ID NO: 84423):VPTKL (SEQ ID NO: 84381):EPLT (SEQ ID NO: 84111):EQLSN (SEQ ID NO: 84178):GMAVS (SEQ ID NO: 84194):EXGXR (SEQ ID NO: 84179), GSAGPXX (SEQ ID NO: 84420):TPTKM (SEQ ID NO: 84327):EPLT (SEQ ID NO: 84111):EQLSN (SEQ ID NO: 84178):GMVVD (SEQ ID NO: 84204):RXGXS (SEQ ID NO: 84291), AAPASXX (SEQ ID NO: 84401):VPARL (SEQ ID NO: 84352):EPLT (SEQ ID NO: 84111):EQLSN (SEQ ID NO: 84178):DMVVE (SEQ ID NO: 84161):AXGXR (SEQ ID NO: 84148), STPPTXX (SEQ ID NO: 84431):VPTRL (SEQ ID NO: 84385):EPLT (SEQ ID NO: 84111):EQLSN (SEQ ID NO: 84178):DMVVE (SEQ ID NO: 84161):SXGXR (SEQ ID NO: 84305), HVPKPXX (SEQ ID NO: 84421):APTKL (SEQ ID NO: 84131):EPLT (SEQ ID NO: 84111):EQLSN (SEQ ID NO: 84178):NMVVR (SEQ ID NO: 84275):SXGXH (SEQ ID NO: 84304), RVPSTXX (SEQ ID NO: 84428):APVKT (SEQ ID NO: 84144):EPLT (SEQ ID NO: 84111):EQLSN (SEQ ID NO: 84178):MIVEE (SEQ ID NO: 84241):XGXL (SEQ ID NO: 84122), ASAAPXX (SEQ ID NO: 84402):VPQAL (SEQ ID NO: 84364):EPLT (SEQ ID NO: 84111):EQLSN (SEQ ID NO: 84178):MIVRS (SEQ ID NO: 84243):XKXS (SEQ ID NO: 84124), ASASPXX (SEQ ID NO: 84403):VPQDL (SEQ ID NO: 84365):EPLT (SEQ ID NO: 84111):EQLSN (SEQ ID NO: 84178):MVVKS (SEQ ID NO: 84256):XKXS (SEQ ID NO: 84124), NDEGLEX (SEQ ID NO: 84426):VPTEE (SEQ ID NO: 84377):EPLT (SEQ ID NO: 84111):EQLSN (SEQ ID NO: 84178):FLQHN (SEQ ID NO: 84184):KXEXR (SEQ ID NO: 84213), NDEGLEX (SEQ ID NO: 84426):VPTGQ (SEQ ID NO: 84379):EPLT (SEQ ID NO: 84111):EQLSN (SEQ ID NO: 84178):LEEHS (SEQ ID NO: 84217):QXEXR (SEQ ID NO: 84276), SSVKXQP (SEQ ID NO: 84430):SRVHH (SEQ ID NO: 84297):EPLT (SEQ ID NO: 84111):EQLSN (SEQ ID NO: 84178):RLEEH (SEQ ID NO: 84279):LEXAXA (SEQ ID NO: 84400), RNVQXRP (SEQ ID NO: 84427):TQVQL (SEQ ID NO: 84340):EPLT (SEQ ID NO: 84111):EQLSN (SEQ ID NO: 84178):TLEDH (SEQ ID NO: 84307):LAXKXE (SEQ ID NO: 84399), KIPKAXX (SEQ ID NO: 84424):VPQEL (SEQ ID NO: 84367):EPLT (SEQ ID NO: 84111):EQLSN (SEQ ID NO: 84178):DMVKS (SEQ ID NO: 84158):GXGXR (SEQ ID NO: 84208), GIPEPXX (SEQ ID NO: 84419):VPQKM (SEQ ID NO: 84371):EPLT (SEQ ID NO: 84111):EQLSN (SEQ ID NO: 84178):NMVKS (SEQ ID NO: 84270):SXAXR (SEQ ID NO: 84303), SIPKAXX (SEQ ID NO: 84429):VPQEL (SEQ ID NO: 84367):EPLT (SEQ ID NO: 84111):EQLSN (SEQ ID NO: 84178):EMVKS (SEQ ID NO: 84172):GXGXR (SEQ ID NO: 84208), HVTKPTX (SEQ ID NO: 84422):VPQKL (SEQ ID NO: 84370):EPLT (SEQ ID NO: 84111):EQLSN (SEQ ID NO: 84178):NMVKS (SEQ ID NO: 84270):SXGXH (SEQ ID NO: 84304), YVPKPXX (SEQ ID NO: 84433):VPQKL (SEQ ID NO: 84370):EPLT (SEQ ID NO: 84111):EQLSN (SEQ ID NO: 84178):NMVKS (SEQ ID NO: 84270):SXGXH (SEQ ID NO: 84304), TVPKPXX (SEQ ID NO: 84432):VPQQL (SEQ ID NO: 84373):EPLT (SEQ ID NO: 84111):EQLSN (SEQ ID NO: 84178):NMVKS (SEQ ID NO: 84270):AXGXH (SEQ ID NO: 84147), AVPKAXX (SEQ ID NO: 84404):VPQKL (SEQ ID NO: 84370):EPLT (SEQ ID NO: 84111):EQLSN (SEQ ID NO: 84178):NMVKS (SEQ ID NO: 84270):AXGXH (SEQ ID NO: 84147), KVGKAXX (SEQ ID NO: 84425):VPQKL (SEQ ID NO: 84370):EPLT (SEQ ID NO: 84111):EQLSN (SEQ ID NO: 84178):EGMSVKS (SEQ ID NO: 84413):XGXR (SEQ ID NO: 84123), KASKAXX (SEQ ID NO: 84423):VPQKL (SEQ ID NO: 84370):EPLT (SEQ ID NO: 84111):EQLSN (SEQ ID NO: 84178):GMVKS (SEQ ID NO: 84202):EXGXR (SEQ ID NO: 84179), GSAGPXX (SEQ ID NO: 84420):VPQKM (SEQ ID NO: 84371):EPLT (SEQ ID NO: 84111):EQLSN (SEQ ID NO: 84178):GMVKS (SEQ ID NO: 84202):RXGXS (SEQ ID NO: 84291), AAPASXX (SEQ ID NO: 84401):VPQRL (SEQ ID NO: 84374):EPLT (SEQ ID NO: 84111):EQLSN (SEQ ID NO: 84178):DMVKS (SEQ ID NO: 84158):AXGXR (SEQ ID NO: 84148), STPPTXX (SEQ ID NO: 84431):VPQRL (SEQ ID NO: 84374):EPLT (SEQ ID NO: 84111):EQLSN (SEQ ID NO: 84178):DMVKS (SEQ ID NO: 84158):SXGXR (SEQ ID NO: 84305), HVPKPXX (SEQ ID NO: 84421):VPQKL (SEQ ID NO: 84370):EPLT (SEQ ID NO: 84111):EQLSN (SEQ ID NO: 84178):NMVKS (SEQ ID NO: 84270):SXGXH (SEQ ID NO: 84304), RVPSTXX (SEQ ID NO: 84428):VPQKT (SEQ ID NO: 84372):EPLT (SEQ ID NO: 84111):EQLSN (SEQ ID NO: 84178):MIVKS (SEQ ID NO: 84242):XGXL (SEQ ID NO: 84122), ASAAPXX (SEQ ID NO: 84402):VPQAL (SEQ ID NO: 84364):EPLT (SEQ ID NO: 84111):EQLSN (SEQ ID NO: 84178):MIVKS (SEQ ID NO: 84242):XKXS (SEQ ID NO: 84124), ASASPXX (SEQ ID NO: 84403):VPQDL (SEQ ID NO: 84365):EPLT (SEQ ID NO: 84111):EQLSN (SEQ ID NO: 84178):MIVKS (SEQ ID NO: 84242):XKXS (SEQ ID NO: 84124), NDEGLEX (SEQ ID NO: 84426):VPQEE (SEQ ID NO: 84366):EPLT (SEQ ID NO: 84111):EQLSN (SEQ ID NO: 84178):FLVKS (SEQ ID NO: 84188):KXEXR (SEQ ID NO: 84213), NDEGLEX (SEQ ID NO: 84426):VPQGQ (SEQ ID NO: 84368):EPLT (SEQ ID NO: 84111):EQLSN (SEQ ID NO: 84178):LEVKS (SEQ ID NO: 84222):QXEXR (SEQ ID NO: 84276), SSVKXQP (SEQ ID NO: 84430):VPQHH (SEQ ID NO: 84369):EPLT (SEQ ID NO: 84111):EQLSN (SEQ ID NO: 84178):RLVKS (SEQ ID NO: 84285):LEXAXA (SEQ ID NO: 84400), RNVQXRP (SEQ ID NO: 84427):VPQQL (SEQ ID NO: 84373):EPLT (SEQ ID NO: 84111):EQLSN (SEQ ID NO: 84178):TLVKS (SEQ ID NO: 84314):LAXKXE (SEQ ID NO: 84399), ASASPXX (SEQ ID NO: 84403):VSQDL (SEQ ID NO: 84387):EPLT (SEQ ID NO: 84111):EQLSN (SEQ ID NO: 84178):MIVKS (SEQ ID NO: 84242):XKXS (SEQ ID NO: 84124), KIPKAXX (SEQ ID NO: 84424):VPTEL (SEQ ID NO: 84378):SNIT (SEQ ID NO: 84118):IGEMS (SEQ ID NO: 84209):DMQHN (SEQ ID NO: 84154):GXGXR (SEQ ID NO: 84208), GIPEPXX (SEQ ID NO: 84419):VPTKM (SEQ ID NO: 84382):SNIT (SEQ ID NO: 84118):IGEMS (SEQ ID NO: 84209):NMQHN (SEQ ID NO: 84266):SXAXR (SEQ ID NO: 84303), SIPKAXX (SEQ ID NO: 84429):VPTEL (SEQ ID NO: 84378):SNIT (SEQ ID NO: 84118):IGEMS (SEQ ID NO: 84209):EMQHN (SEQ ID NO: 84168):GXGXR (SEQ ID NO: 84208), HVTKPTX (SEQ ID NO: 84422):VPTKL (SEQ ID NO: 84381):SNIT (SEQ ID NO: 84118):IGEMS (SEQ ID NO: 84209):NMQHN (SEQ ID NO: 84266):SXGXH (SEQ ID NO: 84304), YVPKPXX (SEQ ID NO: 84433):VPTKL (SEQ ID NO: 84381):SNIT (SEQ ID NO: 84118):IGEMS (SEQ ID NO: 84209):NMQHN (SEQ ID NO: 84266):SXGXH (SEQ ID NO: 84304), TVPKPXX (SEQ ID NO: 84432):VPTQL (SEQ ID NO: 84384):SNIT (SEQ ID NO: 84118):IGEMS (SEQ ID NO: 84209):NMQHN (SEQ ID NO: 84266):AXGXH (SEQ ID NO: 84147), AVPKAXX (SEQ ID NO: 84404):VPTKL (SEQ ID NO: 84381):SNIT (SEQ ID NO: 84118):IGEMS (SEQ ID NO: 84209):NMQHN (SEQ ID NO: 84266):AXGXH (SEQ ID NO: 84147), KVGKAXX (SEQ ID NO: 84425):VPTKL (SEQ ID NO: 84381):SNIT (SEQ ID NO: 84118):IGEMS (SEQ ID NO: 84209):EGMSQHN (SEQ ID NO: 84409):XGXR (SEQ ID NO: 84123), KASKAXX (SEQ ID NO: 84423):VPTKL (SEQ ID NO: 84381):SNIT (SEQ ID NO: 84118):IGEMS (SEQ ID NO: 84209):GMQHN (SEQ ID NO: 84198):EXGXR (SEQ ID NO: 84179), GSAGPXX (SEQ ID NO: 84420):VPTKM (SEQ ID NO: 84382):SNIT (SEQ ID NO: 84118):IGEMS (SEQ ID NO: 84209):GMQHN (SEQ ID NO: 84198):RXGXS (SEQ ID NO: 84291), AAPASXX (SEQ ID NO: 84401):VPTRL (SEQ ID NO: 84385):SNIT (SEQ ID NO: 84118):IGEMS (SEQ ID NO: 84209):DMQHN (SEQ ID NO: 84154):AXGXR (SEQ ID NO: 84148), STPPTXX (SEQ ID NO: 84431):VPTRL (SEQ ID NO: 84385):SNIT (SEQ ID NO: 84118):IGEMS (SEQ ID NO: 84209):DMQHN (SEQ ID NO: 84154):SXGXR (SEQ ID NO: 84305), HVPKPXX (SEQ ID NO: 84421):VPTKL (SEQ ID NO: 84381):SNIT (SEQ ID NO: 84118):IGEMS (SEQ ID NO: 84209):NMQHN (SEQ ID NO: 84266):SXGXH (SEQ ID NO: 84304), RVPSTXX (SEQ ID NO: 84428):VPTKT (SEQ ID NO: 84383):SNIT (SEQ ID NO: 84118):IGEMS (SEQ ID NO: 84209):MIQHN (SEQ ID NO: 84238):XGXL (SEQ ID NO: 84122), ASAAPXX (SEQ ID NO: 84402):VPTAL (SEQ ID NO: 84375):SNIT (SEQ ID NO: 84118):IGEMS (SEQ ID NO: 84209):MIQHN (SEQ ID NO: 84238):XKXS (SEQ ID NO: 84124), ASASPXX (SEQ ID NO: 84403):VPTDL (SEQ ID NO: 84376):SNIT (SEQ ID NO: 84118):IGEMS (SEQ ID NO: 84209):MIQHN (SEQ ID NO: 84238):XKXS (SEQ ID NO: 84124), ASASPXX (SEQ ID NO: 84403):VPTDL (SEQ ID NO: 84376):SNIT (SEQ ID NO: 84118):IGEMS (SEQ ID NO: 84209):MVQHN (SEQ ID NO: 84252):XKXS (SEQ ID NO: 84124), NDEGLEX (SEQ ID NO: 84426):VPTGQ (SEQ ID NO: 84379):SNIT (SEQ ID NO: 84118):IGEMS (SEQ ID NO: 84209):LEQHN (SEQ ID NO: 84218):QXEXR (SEQ ID NO: 84276), NDEGLEX (SEQ ID NO: 84426):VPTEE (SEQ ID NO: 84377):SNIT (SEQ ID NO: 84118):IGEMS (SEQ ID NO: 84209):FLQHN (SEQ ID NO: 84184):KXEXR (SEQ ID NO: 84213), SSVKXQP (SEQ ID NO: 84430):VPTHH (SEQ ID NO: 84380):SNIT (SEQ ID NO: 84118):IGEMS (SEQ ID NO: 84209):RLQHN (SEQ ID NO: 84281):LEXAXA (SEQ ID NO: 84400), RNVQXRP (SEQ ID NO: 84427):VPTQL (SEQ ID NO: 84384):SNIT (SEQ ID NO: 84118):IGEMS (SEQ ID NO: 84209):TLQHN (SEQ ID NO: 84310):LAXKXE (SEQ ID NO: 84399), KIPKAXX (SEQ ID NO: 84424):VPTEL (SEQ ID NO: 84378):SNIT (SEQ ID NO: 84118):IGEMS (SEQ ID NO: 84209):DMVVE (SEQ ID NO: 84161):GXGXR (SEQ ID NO: 84208), GIPEPXX (SEQ ID NO: 84419):VPEKM (SEQ ID NO: 84360):SNIT (SEQ ID NO: 84118):IGEMS (SEQ ID NO: 84209):NMTVE (SEQ ID NO: 84267):SXAXR (SEQ ID NO: 84303), SIPKAXX (SEQ ID NO: 84429):VPTEL (SEQ ID NO: 84378):SNIT (SEQ ID NO: 84118):IGEMS (SEQ ID NO: 84209):EMVVE (SEQ ID NO: 84175):GXGXR (SEQ ID NO: 84208), HVTKPTX (SEQ ID NO: 84422):APTKL (SEQ ID NO: 84131):SNIT (SEQ ID NO: 84118):IGEMS (SEQ ID NO: 84209):NMVVR (SEQ ID NO: 84275):SXGXH (SEQ ID NO: 84304), YVPKPXX (SEQ ID NO: 84433):APTKL (SEQ ID NO: 84131):SNIT (SEQ ID NO: 84118):IGEMS (SEQ ID NO: 84209):NMVVR (SEQ ID NO: 84275):SXGXH (SEQ ID NO: 84304), TVPKPXX (SEQ ID NO: 84432):APTQL (SEQ ID NO: 84134):SNIT (SEQ ID NO: 84118):IGEMS (SEQ ID NO: 84209):NMVVR (SEQ ID NO: 84275):AXGXH (SEQ ID NO: 84147), AVPKAXX (SEQ ID NO: 84404):APTKL (SEQ ID NO: 84131):SNIT (SEQ ID NO: 84118):IGEMS (SEQ ID NO: 84209):NMVVK (SEQ ID NO: 84274):AXGXH (SEQ ID NO: 84147), KVGKAXX (SEQ ID NO: 84425):VPTKL (SEQ ID NO: 84381):SNIT (SEQ ID NO: 84118):IGEMS (SEQ ID NO: 84209):EGMSVAE (SEQ ID NO: 84411):XGXR (SEQ ID NO: 84123), KASKAXX (SEQ ID NO: 84423):VPTKL (SEQ ID NO: 84381):SNIT (SEQ ID NO: 84118):IGEMS (SEQ ID NO: 84209):GMAVS (SEQ ID NO: 84194):EXGXR (SEQ ID NO: 84179), GSAGPXX (SEQ ID NO: 84420):TPTKM (SEQ ID NO: 84327):SNIT (SEQ ID NO: 84118):IGEMS (SEQ ID NO: 84209):GMVVD (SEQ ID NO: 84204):RXGXS (SEQ ID NO: 84291), AAPASXX (SEQ ID NO: 84401):VPARL (SEQ ID NO: 84352):SNIT (SEQ ID NO: 84118):IGEMS (SEQ ID NO: 84209):DMVVE (SEQ ID NO: 84161):AXGXR (SEQ ID NO: 84148), STPPTXX (SEQ ID NO: 84431):VPTRL (SEQ ID NO: 84385):SNIT (SEQ ID NO: 84118):IGEMS (SEQ ID NO: 84209):DMVVE (SEQ ID NO: 84161):SXGXR (SEQ ID NO: 84305), HVPKPXX (SEQ ID NO: 84421):APTKL (SEQ ID NO: 84131):SNIT (SEQ ID NO: 84118):IGEMS (SEQ ID NO: 84209):NMVVR (SEQ ID NO: 84275):SXGXH (SEQ ID NO: 84304), RVPSTXX (SEQ ID NO: 84428):APVKT (SEQ ID NO: 84144):SNIT (SEQ ID NO: 84118):IGEMS (SEQ ID NO: 84209):MIVEE (SEQ ID NO: 84241):XGXL (SEQ ID NO: 84122), ASAAPXX (SEQ ID NO: 84402):VPQAL (SEQ ID NO: 84364):SNIT (SEQ ID NO: 84118):IGEMS (SEQ ID NO: 84209):MIVRS (SEQ ID NO: 84243):XKXS (SEQ ID NO: 84124), ASASPXX (SEQ ID NO: 84403):VSQDL (SEQ ID NO: 84387):SNIT (SEQ ID NO: 84118):IGEMS (SEQ ID NO: 84209):MIVKS (SEQ ID NO: 84242):XKXS (SEQ ID NO: 84124), ASASPXX (SEQ ID NO: 84403):VPQDL (SEQ ID NO: 84365):SNIT (SEQ ID NO: 84118):IGEMS (SEQ ID NO: 84209):MVVKS (SEQ ID NO: 84256):XKXS (SEQ ID NO: 84124), NDEGLEX (SEQ ID NO: 84426):VPTGQ (SEQ ID NO: 84379):SNIT (SEQ ID NO: 84118):IGEMS (SEQ ID NO: 84209):LEEHS (SEQ ID NO: 84217):QXEXR (SEQ ID NO: 84276), SSVKXQP (SEQ ID NO: 84430):SRVHH (SEQ ID NO: 84297):SNIT (SEQ ID NO: 84118):IGEMS (SEQ ID NO: 84209):RLEEH (SEQ ID NO: 84279):LEXAXA (SEQ ID NO: 84400), RNVQXRP (SEQ ID NO: 84427):TQVQL (SEQ ID NO: 84340):SNIT (SEQ ID NO: 84118):IGEMS (SEQ ID NO: 84209):TLEDH (SEQ ID NO: 84307):LAXKXE (SEQ ID NO: 84399), KIPKAXX (SEQ ID NO: 84424):VPTEL (SEQ ID NO: 84378):SNIT (SEQ ID NO: 84118):LGEMS (SEQ ID NO: 84228):DMEHS (SEQ ID NO: 84153):GXGXR (SEQ ID NO: 84208), GIPEPXX (SEQ ID NO: 84419):VPTKM (SEQ ID NO: 84382):SNIT (SEQ ID NO: 84118):LGEMS (SEQ ID NO: 84228):NMEHS (SEQ ID NO: 84265):SXAXR (SEQ ID NO: 84303), SIPKAXX (SEQ ID NO: 84429):VPTEL (SEQ ID NO: 84378):SNIT (SEQ ID NO: 84118):LGEMS (SEQ ID NO: 84228):EMEHS (SEQ ID NO: 84167):GXGXR (SEQ ID NO: 84208), HVTKPTX (SEQ ID NO: 84422):VPTKL (SEQ ID NO: 84381):SNIT (SEQ ID NO: 84118):LGEMS (SEQ ID NO: 84228):NMEHS (SEQ ID NO: 84265):SXGXH (SEQ ID NO: 84304), YVPKPXX (SEQ ID NO: 84433):VPTKL (SEQ ID NO: 84381):SNIT (SEQ ID NO: 84118):LGEMS (SEQ ID NO: 84228):NMEHS (SEQ ID NO: 84265):SXGXH (SEQ ID NO: 84304), TVPKPXX (SEQ ID NO: 84432):VPTQL (SEQ ID NO: 84384):SNIT (SEQ ID NO: 84118):LGEMS (SEQ ID NO: 84228):NMEHS (SEQ ID NO: 84265):AXGXH (SEQ ID NO: 84147), AVPKAXX (SEQ ID NO: 84404):VPTKL (SEQ ID NO: 84381):SNIT (SEQ ID NO: 84118):LGEMS (SEQ ID NO: 84228):NMEHS (SEQ ID NO: 84265):AXGXH (SEQ ID NO: 84147), KVGKAXX (SEQ ID NO: 84425):VPTKL (SEQ ID NO: 84381):SNIT (SEQ ID NO: 84118):LGEMS (SEQ ID NO: 84228):EGMSEHS (SEQ ID NO: 84408):XGXR (SEQ ID NO: 84123), KASKAXX (SEQ ID NO: 84423):VPTKL (SEQ ID NO: 84381):SNIT (SEQ ID NO: 84118):LGEMS (SEQ ID NO: 84228):GMEHS (SEQ ID NO: 84197):EXGXR (SEQ ID NO: 84179), GSAGPXX (SEQ ID NO: 84420):VPTKM (SEQ ID NO: 84382):SNIT (SEQ ID NO: 84118):LGEMS (SEQ ID NO: 84228):GMEHS (SEQ ID NO: 84197):RXGXS (SEQ ID NO: 84291), AAPASXX (SEQ ID NO: 84401):VPTRL (SEQ ID NO: 84385):SNIT (SEQ ID NO: 84118):LGEMS (SEQ ID NO: 84228):DMEHS (SEQ ID NO: 84153):AXGXR (SEQ ID NO: 84148), STPPTXX (SEQ ID NO: 84431):VPTRL (SEQ ID NO: 84385):SNIT (SEQ ID NO: 84118):LGEMS (SEQ ID NO: 84228):DMEHS (SEQ ID NO: 84153):SXGXR (SEQ ID NO: 84305), HVPKPXX (SEQ ID NO: 84421):VPTKL (SEQ ID NO: 84381):SNIT (SEQ ID NO: 84118):LGEMS (SEQ ID NO: 84228):NMEHS (SEQ ID NO: 84265):SXGXH (SEQ ID NO: 84304), RVPSTXX (SEQ ID NO: 84428):VPTKT (SEQ ID NO: 84383):SNIT (SEQ ID NO: 84118):LGEMS (SEQ ID NO: 84228):MIEHS (SEQ ID NO: 84237):XGXL (SEQ ID NO: 84122), ASAAPXX (SEQ ID NO: 84402):VPTAL (SEQ ID NO: 84375):SNIT (SEQ ID NO: 84118):LGEMS (SEQ ID NO: 84228):MIEHS (SEQ ID NO: 84237):XKXS (SEQ ID NO: 84124), ASASPXX (SEQ ID NO: 84403):VPTDL (SEQ ID NO: 84376):SNIT (SEQ ID NO: 84118):LGEMS (SEQ ID NO: 84228):MIEHS (SEQ ID NO: 84237):XKXS (SEQ ID NO: 84124), ASASPXX (SEQ ID NO: 84403):VPTDL (SEQ ID NO: 84376):SNIT (SEQ ID NO: 84118):LGEMS (SEQ ID NO: 84228):MVEHS (SEQ ID NO: 84251):XKXS (SEQ ID NO: 84124), NDEGLEX (SEQ ID NO: 84426):VPTEE (SEQ ID NO: 84377):SNIT (SEQ ID NO: 84118):LGEMS (SEQ ID NO: 84228):FLEHS (SEQ ID NO: 84183):KXEXR (SEQ ID NO: 84213), SSVKXQP (SEQ ID NO: 84430):VPTHH (SEQ ID NO: 84380):SNIT (SEQ ID NO: 84118):LGEMS (SEQ ID NO: 84228):RLEHS (SEQ ID NO: 84280):LEXAXA (SEQ ID NO: 84400), RNVQXRP (SEQ ID NO: 84427):VPTQL (SEQ ID NO: 84384):SNIT (SEQ ID NO: 84118):LGEMS (SEQ ID NO: 84228):TLEHS (SEQ ID NO: 84309):LAXKXE (SEQ ID NO: 84399), KIPKAXX (SEQ ID NO: 84424):VPTEL (SEQ ID NO: 84378):SNIT (SEQ ID NO: 84118):LGEMS (SEQ ID NO: 84228):DMVVE (SEQ ID NO: 84161):GXGXR (SEQ ID NO: 84208), GIPEPXX (SEQ ID NO: 84419):VPEKM (SEQ ID NO: 84360):SNIT (SEQ ID NO: 84118):LGEMS (SEQ ID NO: 84228):NMTVE (SEQ ID NO: 84267):SXAXR (SEQ ID NO: 84303), SIPKAXX (SEQ ID NO: 84429):VPTEL (SEQ ID NO: 84378):SNIT (SEQ ID NO: 84118):LGEMS (SEQ ID NO: 84228):EMVVE (SEQ ID NO: 84175):GXGXR (SEQ ID NO: 84208), HVTKPTX (SEQ ID NO: 84422):APTKL (SEQ ID NO: 84131):SNIT (SEQ ID NO: 84118):LGEMS (SEQ ID NO: 84228):NMVVR (SEQ ID NO: 84275):SXGXH (SEQ ID NO: 84304), YVPKPXX (SEQ ID NO: 84433):APTKL (SEQ ID NO: 84131):SNIT (SEQ ID NO: 84118):LGEMS (SEQ ID NO: 84228):NMVVR (SEQ ID NO: 84275):SXGXH (SEQ ID NO: 84304), TVPKPXX (SEQ ID NO: 84432):APTQL (SEQ ID NO: 84134):SNIT (SEQ ID NO: 84118):LGEMS (SEQ ID NO: 84228):NMVVR (SEQ ID NO: 84275):AXGXH (SEQ ID NO: 84147), AVPKAXX (SEQ ID NO: 84404):APTKL (SEQ ID NO: 84131):SNIT (SEQ ID NO: 84118):LGEMS (SEQ ID NO: 84228):NMVVK (SEQ ID NO: 84274):AXGXH (SEQ ID NO: 84147), KVGKAXX (SEQ ID NO: 84425):VPTKL (SEQ ID NO: 84381):SNIT (SEQ ID NO: 84118):LGEMS (SEQ ID NO: 84228):EGMSVAE (SEQ ID NO: 84411):XGXR (SEQ ID NO: 84123), KASKAXX (SEQ ID NO: 84423):VPTKL (SEQ ID NO: 84381):SNIT (SEQ ID NO: 84118):LGEMS (SEQ ID NO: 84228):GMAVS (SEQ ID NO: 84194):EXGXR (SEQ ID NO: 84179), GSAGPXX (SEQ ID NO: 84420):TPTKM (SEQ ID NO: 84327):SNIT (SEQ ID NO: 84118):LGEMS (SEQ ID NO: 84228):GMVVD (SEQ ID NO: 84204):RXGXS (SEQ ID NO: 84291), AAPASXX (SEQ ID NO: 84401):VPARL (SEQ ID NO: 84352):SNIT (SEQ ID NO: 84118):LGEMS (SEQ ID NO: 84228):DMVVE (SEQ ID NO: 84161):AXGXR (SEQ ID NO: 84148), STPPTXX (SEQ ID NO: 84431):VPTRL (SEQ ID NO: 84385):SNIT (SEQ ID NO: 84118):LGEMS (SEQ ID NO: 84228):DMVVE (SEQ ID NO: 84161):SXGXR (SEQ ID NO: 84305), HVPKPXX (SEQ ID NO: 84421):APTKL (SEQ ID NO: 84131):SNIT (SEQ ID NO: 84118):LGEMS (SEQ ID NO: 84228):NMVVR (SEQ ID NO: 84275):SXGXH (SEQ ID NO: 84304), RVPSTXX (SEQ ID NO: 84428):APVKT (SEQ ID NO: 84144):SNIT (SEQ ID NO: 84118):LGEMS (SEQ ID NO: 84228):MIVEE (SEQ ID NO: 84241):XGXL (SEQ ID NO: 84122), ASAAPXX (SEQ ID NO: 84402):VPQAL (SEQ ID NO: 84364):SNIT (SEQ ID NO: 84118):LGEMS (SEQ ID NO: 84228):MIVRS (SEQ ID NO: 84243):XKXS (SEQ ID NO: 84124), ASASPXX (SEQ ID NO: 84403):VSQDL (SEQ ID NO: 84387):SNIT (SEQ ID NO: 84118):LGEMS (SEQ ID NO: 84228):MIVKS (SEQ ID NO: 84242):XKXS (SEQ ID NO: 84124), ASASPXX (SEQ ID NO: 84403):VPQDL (SEQ ID NO: 84365):SNIT (SEQ ID NO: 84118):LGEMS (SEQ ID NO: 84228):MVVKS (SEQ ID NO: 84256):XKXS (SEQ ID NO: 84124), NDEGLEX (SEQ ID NO: 84426):VPTEE (SEQ ID NO: 84377):SNIT (SEQ ID NO: 84118):LGEMS (SEQ ID NO: 84228):FLQHN (SEQ ID NO: 84184):KXEXR (SEQ ID NO: 84213), SSVKXQP (SEQ ID NO: 84430):SRVHH (SEQ ID NO: 84297):SNIT (SEQ ID NO: 84118):LGEMS (SEQ ID NO: 84228):RLEEH (SEQ ID NO: 84279):LEXAXA (SEQ ID NO: 84400), RNVQXRP (SEQ ID NO: 84427):TQVQL (SEQ ID NO: 84340):SNIT (SEQ ID NO: 84118):LGEMS (SEQ ID NO: 84228):TLEDH (SEQ ID NO: 84307):LAXKXE (SEQ ID NO: 84399), KIPKAXX (SEQ ID NO: 84424):SRVEL (SEQ ID NO: 84295):RSVK (SEQ ID NO: 84115):KEVQV (SEQ ID NO: 84210):DMEEH (SEQ ID NO: 84152):GXGXR (SEQ ID NO: 84208), GIPEPXX (SEQ ID NO: 84419):SRVKM (SEQ ID NO: 84299):RSVK (SEQ ID NO: 84115):KEVQV (SEQ ID NO: 84210):NMEEH (SEQ ID NO: 84264):SXAXR (SEQ ID NO: 84303), SIPKAXX (SEQ ID NO: 84429):SRVEL (SEQ ID NO: 84295):RSVK (SEQ ID NO: 84115):KEVQV (SEQ ID NO: 84210):EMEEH (SEQ ID NO: 84166):GXGXR (SEQ ID NO: 84208), HVTKPTX (SEQ ID NO: 84422):SRVKL (SEQ ID NO: 84298):RSVK (SEQ ID NO: 84115):KEVQV (SEQ ID NO: 84210):NMEEH (SEQ ID NO: 84264):SXGXH (SEQ ID NO: 84304), YVPKPXX (SEQ ID NO: 84433):SRVKL (SEQ ID NO: 84298):RSVK (SEQ ID NO: 84115):KEVQV (SEQ ID NO: 84210):NMEEH (SEQ ID NO: 84264):SXGXH (SEQ ID NO: 84304), TVPKPXX (SEQ ID NO: 84432):SRVQL (SEQ ID NO: 84301):RSVK (SEQ ID NO: 84115):KEVQV (SEQ ID NO: 84210):NMEEH (SEQ ID NO: 84264):AXGXH (SEQ ID NO: 84147), AVPKAXX (SEQ ID NO: 84404):SRVKL (SEQ ID NO: 84298):RSVK (SEQ ID NO: 84115):KEVQV (SEQ ID NO: 84210):NMEEH (SEQ ID NO: 84264):AXGXH (SEQ ID NO: 84147), KVGKAXX (SEQ ID NO: 84425):SRVKL (SEQ ID NO: 84298):RSVK (SEQ ID NO: 84115):KEVQV (SEQ ID NO: 84210):EGMSEEH (SEQ ID NO: 84407):XGXR (SEQ ID NO: 84123), KASKAXX (SEQ ID NO: 84423):SRVKL (SEQ ID NO: 84298):RSVK (SEQ ID NO: 84115):KEVQV (SEQ ID NO: 84210):GMEEH (SEQ ID NO: 84196):EXGXR (SEQ ID NO: 84179), GSAGPXX (SEQ ID NO: 84420):SRVKM (SEQ ID NO: 84299):RSVK (SEQ ID NO: 84115):KEVQV (SEQ ID NO: 84210):GMEEH (SEQ ID NO: 84196):RXGXS (SEQ ID NO: 84291), AAPASXX (SEQ ID NO: 84401):SRVRL (SEQ ID NO: 84302):RSVK (SEQ ID NO: 84115):KEVQV (SEQ ID NO: 84210):DMEEH (SEQ ID NO: 84152):AXGXR (SEQ ID NO: 84148), STPPTXX (SEQ ID NO: 84431):SRVRL (SEQ ID NO: 84302):RSVK (SEQ ID NO: 84115):KEVQV (SEQ ID NO: 84210):DMEEH (SEQ ID NO: 84152):SXGXR (SEQ ID NO: 84305), HVPKPXX (SEQ ID NO: 84421):SRVKL (SEQ ID NO: 84298):RSVK (SEQ ID NO: 84115):KEVQV (SEQ ID NO: 84210):NMEEH (SEQ ID NO: 84264):SXGXH (SEQ ID NO: 84304), RVPSTXX (SEQ ID NO: 84428):SRVKT (SEQ ID NO: 84300):RSVK (SEQ ID NO: 84115):KEVQV (SEQ ID NO: 84210):MIEEH (SEQ ID NO: 84236):XGXL (SEQ ID NO: 84122), ASAAPXX (SEQ ID NO: 84402):SRVAL (SEQ ID NO: 84292):RSVK (SEQ ID NO: 84115):KEVQV (SEQ ID NO: 84210):MIEEH (SEQ ID NO: 84236):XKXS (SEQ ID NO: 84124), ASASPXX (SEQ ID NO: 84403):SRVDL (SEQ ID NO: 84293):RSVK (SEQ ID NO: 84115):KEVQV (SEQ ID NO: 84210):MIEEH (SEQ ID NO: 84236):XKXS (SEQ ID NO: 84124), ASASPXX (SEQ ID NO: 84403):SRVDL (SEQ ID NO: 84293):RSVK (SEQ ID NO: 84115):KEVQV (SEQ ID NO: 84210):MVEEH (SEQ ID NO: 84250):XKXS (SEQ ID NO: 84124), NDEGLEX (SEQ ID NO: 84426):SRVEE (SEQ ID NO: 84294):RSVK (SEQ ID NO: 84115):KEVQV (SEQ ID NO: 84210):FLEEH (SEQ ID NO: 84182):KXEXR (SEQ ID NO: 84213), NDEGLEX (SEQ ID NO: 84426):SRVGQ (SEQ ID NO: 84296):RSVK (SEQ ID NO: 84115):KEVQV (SEQ ID NO: 84210):LEEEH (SEQ ID NO: 84216):QXEXR (SEQ ID NO: 84276), RNVQXRP (SEQ ID NO: 84427):SRVQL (SEQ ID NO: 84301):RSVK (SEQ ID NO: 84115):KEVQV (SEQ ID NO: 84210):TLEEH (SEQ ID NO: 84308):LAXKXE (SEQ ID NO: 84399), KIPKAXX (SEQ ID NO: 84424):VPTEL (SEQ ID NO: 84378):RSVK (SEQ ID NO: 84115):KEVQV (SEQ ID NO: 84210):DMVVE (SEQ ID NO: 84161):GXGXR (SEQ ID NO: 84208), GIPEPXX (SEQ ID NO: 84419):VPEKM (SEQ ID NO: 84360):RSVK (SEQ ID NO: 84115):KEVQV (SEQ ID NO: 84210):NMTVE (SEQ ID NO: 84267):SXAXR (SEQ ID NO: 84303), SIPKAXX (SEQ ID NO: 84429):VPTEL (SEQ ID NO: 84378):RSVK (SEQ ID NO: 84115):KEVQV (SEQ ID NO: 84210):EMVVE (SEQ ID NO: 84175):GXGXR (SEQ ID NO: 84208), HVTKPTX (SEQ ID NO: 84422):APTKL (SEQ ID NO: 84131):RSVK (SEQ ID NO: 84115):KEVQV (SEQ ID NO: 84210):NMVVR (SEQ ID NO: 84275):SXGXH (SEQ ID NO: 84304), YVPKPXX (SEQ ID NO: 84433):APTKL (SEQ ID NO: 84131):RSVK (SEQ ID NO: 84115):KEVQV (SEQ ID NO: 84210):NMVVR (SEQ ID NO: 84275):SXGXH (SEQ ID NO: 84304), TVPKPXX (SEQ ID NO: 84432):APTQL (SEQ ID NO: 84134):RSVK (SEQ ID NO: 84115):KEVQV (SEQ ID NO: 84210):NMVVR (SEQ ID NO: 84275):AXGXH (SEQ ID NO: 84147), AVPKAXX (SEQ ID NO: 84404):APTKL (SEQ ID NO: 84131):RSVK (SEQ ID NO: 84115):KEVQV (SEQ ID NO: 84210):NMVVK (SEQ ID NO: 84274):AXGXH (SEQ ID NO: 84147), KVGKAXX (SEQ ID NO: 84425):VPTKL (SEQ ID NO: 84381):RSVK (SEQ ID NO: 84115):KEVQV (SEQ ID NO: 84210):EGMSVAE (SEQ ID NO: 84411):XGXR (SEQ ID NO: 84123), KASKAXX (SEQ ID NO: 84423):VPTKL (SEQ ID NO: 84381):RSVK (SEQ ID NO: 84115):KEVQV (SEQ ID NO: 84210):GMAVS (SEQ ID NO: 84194):EXGXR (SEQ ID NO: 84179), GSAGPXX (SEQ ID NO: 84420):TPTKM (SEQ ID NO: 84327):RSVK (SEQ ID NO: 84115):KEVQV (SEQ ID NO: 84210):GMVVD (SEQ ID NO: 84204):RXGXS (SEQ ID NO: 84291), AAPASXX (SEQ ID NO: 84401):VPARL (SEQ ID NO: 84352):RSVK (SEQ ID NO: 84115):KEVQV (SEQ ID NO: 84210):DMVVE (SEQ ID NO: 84161):AXGXR (SEQ ID NO: 84148), STPPTXX (SEQ ID NO: 84431):VPTRL (SEQ ID NO: 84385):RSVK (SEQ ID NO: 84115):KEVQV (SEQ ID NO: 84210):DMVVE (SEQ ID NO: 84161):SXGXR (SEQ ID NO: 84305), HVPKPXX (SEQ ID NO: 84421):APTKL (SEQ ID NO: 84131):RSVK (SEQ ID NO: 84115):KEVQV (SEQ ID NO: 84210):NMVVR (SEQ ID NO: 84275):SXGXH (SEQ ID NO: 84304), RVPSTXX (SEQ ID NO: 84428):APVKT (SEQ ID NO: 84144):RSVK (SEQ ID NO: 84115):KEVQV (SEQ ID NO: 84210):MIVEE (SEQ ID NO: 84241):XGXL (SEQ ID NO: 84122), ASAAPXX (SEQ ID NO: 84402):VPQAL (SEQ ID NO: 84364):RSVK (SEQ ID NO: 84115):KEVQV (SEQ ID NO: 84210):MIVRS (SEQ ID NO: 84243):XKXS (SEQ ID NO: 84124), ASASPXX (SEQ ID NO: 84403):VSQDL (SEQ ID NO: 84387):RSVK (SEQ ID NO: 84115):KEVQV (SEQ ID NO: 84210):MIVKS (SEQ ID NO: 84242):XKXS (SEQ ID NO: 84124), ASASPXX (SEQ ID NO: 84403):VPQDL (SEQ ID NO: 84365):RSVK (SEQ ID NO: 84115):KEVQV (SEQ ID NO: 84210):MVVKS (SEQ ID NO: 84256):XKXS (SEQ ID NO: 84124), NDEGLEX (SEQ ID NO: 84426):VPTEE (SEQ ID NO: 84377):RSVK (SEQ ID NO: 84115):KEVQV (SEQ ID NO: 84210):FLQHN (SEQ ID NO: 84184):KXEXR (SEQ ID NO: 84213), NDEGLEX (SEQ ID NO: 84426):VPTGQ (SEQ ID NO: 84379):RSVK (SEQ ID NO: 84115):KEVQV (SEQ ID NO: 84210):LEEHS (SEQ ID NO: 84217):QXEXR (SEQ ID NO: 84276), RNVQXRP (SEQ ID NO: 84427):TQVQL (SEQ ID NO: 84340):RSVK (SEQ ID NO: 84115):KEVQV (SEQ ID NO: 84210):TLEDH (SEQ ID NO: 84307):LAXKXE (SEQ ID NO: 84399), KIPKAXX (SEQ ID NO: 84424):TQVEL (SEQ ID NO: 84334):RPVQ (SEQ ID NO: 84114):KKATV (SEQ ID NO: 84212):DMEDH (SEQ ID NO: 84151):GXGXR (SEQ ID NO: 84208), GIPEPXX (SEQ ID NO: 84419):TQVKM (SEQ ID NO: 84338):RPVQ (SEQ ID NO: 84114):KKATV (SEQ ID NO: 84212):NMEDH (SEQ ID NO: 84263):SXAXR (SEQ ID NO: 84303), SIPKAXX (SEQ ID NO: 84429):TQVEL (SEQ ID NO: 84334):RPVQ (SEQ ID NO: 84114):KKATV (SEQ ID NO: 84212):EMEDH (SEQ ID NO: 84165):GXGXR (SEQ ID NO: 84208), HVTKPTX (SEQ ID NO: 84422):TQVKL (SEQ ID NO: 84337):RPVQ (SEQ ID NO: 84114):KKATV (SEQ ID NO: 84212):NMEDH (SEQ ID NO: 84263):SXGXH (SEQ ID NO: 84304), YVPKPXX (SEQ ID NO: 84433):TQVKL (SEQ ID NO: 84337):RPVQ (SEQ ID NO: 84114):KKATV (SEQ ID NO: 84212):NMEDH (SEQ ID NO: 84263):SXGXH (SEQ ID NO: 84304), TVPKPXX (SEQ ID NO: 84432):TQVQL (SEQ ID NO: 84340):RPVQ (SEQ ID NO: 84114):KKATV (SEQ ID NO: 84212):NMEDH (SEQ ID NO: 84263):AXGXH (SEQ ID NO: 84147), AVPKAXX (SEQ ID NO: 84404):TQVKL (SEQ ID NO: 84337):RPVQ (SEQ ID NO: 84114):KKATV (SEQ ID NO: 84212):NMEDH (SEQ ID NO: 84263):AXGXH (SEQ ID NO: 84147), KVGKAXX (SEQ ID NO: 84425):TQVKL (SEQ ID NO: 84337):RPVQ (SEQ ID NO: 84114):KKATV (SEQ ID NO: 84212):EGMSEDH (SEQ ID NO: 84406):XGXR (SEQ ID NO: 84123), KASKAXX (SEQ ID NO: 84423):TQVKL (SEQ ID NO: 84337):RPVQ (SEQ ID NO: 84114):KKATV (SEQ ID NO: 84212):GMEDH (SEQ ID NO: 84195):EXGXR (SEQ ID NO: 84179), GSAGPXX (SEQ ID NO: 84420):TQVKM (SEQ ID NO: 84338):RPVQ (SEQ ID NO: 84114):KKATV (SEQ ID NO: 84212):GMEDH (SEQ ID NO: 84195):RXGXS (SEQ ID NO: 84291), AAPASXX (SEQ ID NO: 84401):TQVRL (SEQ ID NO: 84341):RPVQ (SEQ ID NO: 84114):KKATV (SEQ ID NO: 84212):DMEDH (SEQ ID NO: 84151):AXGXR (SEQ ID NO: 84148), STPPTXX (SEQ ID NO: 84431):TQVRL (SEQ ID NO: 84341):RPVQ (SEQ ID NO: 84114):KKATV (SEQ ID NO: 84212):DMEDH (SEQ ID NO: 84151):SXGXR (SEQ ID NO: 84305), HVPKPXX (SEQ ID NO: 84421):TQVKL (SEQ ID NO: 84337):RPVQ (SEQ ID NO: 84114):KKATV (SEQ ID NO: 84212):NMEDH (SEQ ID NO: 84263):SXGXH (SEQ ID NO: 84304), RVPSTXX (SEQ ID NO: 84428):TQVKT (SEQ ID NO: 84339):RPVQ (SEQ ID NO: 84114):KKATV (SEQ ID NO: 84212):MIEDH (SEQ ID NO: 84235):XGXL (SEQ ID NO: 84122), ASAAPXX (SEQ ID NO: 84402):TQVAL (SEQ ID NO: 84331):RPVQ (SEQ ID NO: 84114):KKATV (SEQ ID NO: 84212):MIEDH (SEQ ID NO: 84235):XKXS (SEQ ID NO: 84124), ASASPXX (SEQ ID NO: 84403):TQVDL (SEQ ID NO: 84332):RPVQ (SEQ ID NO: 84114):KKATV (SEQ ID NO: 84212):MIEDH (SEQ ID NO: 84235):XKXS (SEQ ID NO: 84124), ASASPXX (SEQ ID NO: 84403):TQVDL (SEQ ID NO: 84332):RPVQ (SEQ ID NO: 84114):KKATV (SEQ ID NO: 84212):MVEDH (SEQ ID NO: 84249):XKXS (SEQ ID NO: 84124), NDEGLEX (SEQ ID NO: 84426):TQVEE (SEQ ID NO: 84333):RPVQ (SEQ ID NO: 84114):KKATV (SEQ ID NO: 84212):FLEDH (SEQ ID NO: 84181):KXEXR (SEQ ID NO: 84213), NDEGLEX (SEQ ID NO: 84426):TQVGQ (SEQ ID NO: 84335):RPVQ (SEQ ID NO: 84114):KKATV (SEQ ID NO: 84212):LEEDH (SEQ ID NO: 84215):QXEXR (SEQ ID NO: 84276), SSVKXQP (SEQ ID NO: 84430):TQVHH (SEQ ID NO: 84336):RPVQ (SEQ ID NO: 84114):KKATV (SEQ ID NO: 84212):RLEDH (SEQ ID NO: 84278):LEXAXA (SEQ ID NO: 84400), KIPKAXX (SEQ ID NO: 84424):VPTEL (SEQ ID NO: 84378):RPVQ (SEQ ID NO: 84114):KKATV (SEQ ID NO: 84212):DMVVE (SEQ ID NO: 84161):GXGXR (SEQ ID NO: 84208), GIPEPXX (SEQ ID NO: 84419):VPEKM (SEQ ID NO: 84360):RPVQ (SEQ ID NO: 84114):KKATV (SEQ ID NO: 84212):NMTVE (SEQ ID NO: 84267):SXAXR (SEQ ID NO: 84303), SIPKAXX (SEQ ID NO: 84429):VPTEL (SEQ ID NO: 84378):RPVQ (SEQ ID NO: 84114):KKATV (SEQ ID NO: 84212):EMVVE (SEQ ID NO: 84175):GXGXR (SEQ ID NO: 84208), HVTKPTX (SEQ ID NO: 84422):APTKL (SEQ ID NO: 84131):RPVQ (SEQ ID NO: 84114):KKATV (SEQ ID NO: 84212):NMVVR (SEQ ID NO: 84275):SXGXH (SEQ ID NO: 84304), YVPKPXX (SEQ ID NO: 84433):APTKL (SEQ ID NO: 84131):RPVQ (SEQ ID NO: 84114):KKATV (SEQ ID NO: 84212):NMVVR (SEQ ID NO: 84275):SXGXH (SEQ ID NO: 84304), TVPKPXX (SEQ ID NO: 84432):APTQL (SEQ ID NO: 84134):RPVQ (SEQ ID NO: 84114):KKATV (SEQ ID NO: 84212):NMVVR (SEQ ID NO: 84275):AXGXH (SEQ ID NO: 84147), AVPKAXX (SEQ ID NO: 84404):APTKL (SEQ ID NO: 84131):RPVQ (SEQ ID NO: 84114):KKATV (SEQ ID NO: 84212):NMVVK (SEQ ID NO: 84274):AXGXH (SEQ ID NO: 84147), KVGKAXX (SEQ ID NO: 84425):VPTKL (SEQ ID NO: 84381):RPVQ (SEQ ID NO: 84114):KKATV (SEQ ID NO: 84212):EGMSVAE (SEQ ID NO: 84411):XGXR (SEQ ID NO: 84123), KASKAXX (SEQ ID NO: 84423):VPTKL (SEQ ID NO: 84381):RPVQ (SEQ ID NO: 84114):KKATV (SEQ ID NO: 84212):GMAVS (SEQ ID NO: 84194):EXGXR (SEQ ID NO: 84179), GSAGPXX (SEQ ID NO: 84420):TPTKM (SEQ ID NO: 84327):RPVQ (SEQ ID NO: 84114):KKATV (SEQ ID NO: 84212):GMVVD (SEQ ID NO: 84204):RXGXS (SEQ ID NO: 84291), AAPASXX (SEQ ID NO: 84401):VPARL (SEQ ID NO: 84352):RPVQ (SEQ ID NO: 84114):KKATV (SEQ ID NO: 84212):DMVVE (SEQ ID NO: 84161):AXGXR (SEQ ID NO: 84148), STPPTXX (SEQ ID NO: 84431):VPTRL (SEQ ID NO: 84385):RPVQ (SEQ ID NO: 84114):KKATV (SEQ ID NO: 84212):DMVVE (SEQ ID NO: 84161):SXGXR (SEQ ID NO: 84305), HVPKPXX (SEQ ID NO: 84421):APTKL (SEQ ID NO: 84131):RPVQ (SEQ ID NO: 84114):KKATV (SEQ ID NO: 84212):NMVVR (SEQ ID NO: 84275):SXGXH (SEQ ID NO: 84304), RVPSTXX (SEQ ID NO: 84428):APVKT (SEQ ID NO: 84144):RPVQ (SEQ ID NO: 84114):KKATV (SEQ ID NO: 84212):MIVEE (SEQ ID NO: 84241):XGXL (SEQ ID NO: 84122), ASAAPXX (SEQ ID NO: 84402):VPQAL (SEQ ID NO: 84364):RPVQ (SEQ ID NO: 84114):KKATV (SEQ ID NO: 84212):MIVRS (SEQ ID NO: 84243):XKXS (SEQ ID NO: 84124), ASASPXX (SEQ ID NO: 84403):VSQDL (SEQ ID NO: 84387):RPVQ (SEQ ID NO: 84114):KKATV (SEQ ID NO: 84212):MIVKS (SEQ ID NO: 84242):XKXS (SEQ ID NO: 84124), ASASPXX (SEQ ID NO: 84403):VPQDL (SEQ ID NO: 84365):RPVQ (SEQ ID NO: 84114):KKATV (SEQ ID NO: 84212):MVVKS (SEQ ID NO: 84256):XKXS (SEQ ID NO: 84124), NDEGLEX (SEQ ID NO: 84426):VPTEE (SEQ ID NO: 84377):RPVQ (SEQ ID NO: 84114):KKATV (SEQ ID NO: 84212):FLQHN (SEQ ID NO: 84184):KXEXR (SEQ ID NO: 84213), NDEGLEX (SEQ ID NO: 84426):VPTGQ (SEQ ID NO: 84379):RPVQ (SEQ ID NO: 84114):KKATV (SEQ ID NO: 84212):LEEHS (SEQ ID NO: 84217):QXEXR (SEQ ID NO: 84276) and SSVKXQP (SEQ ID NO: 84430):SRVHH (SEQ ID NO: 84297):RPVQ (SEQ ID NO: 84114):KKATV (SEQ ID NO: 84212):RLEEH (SEQ ID NO: 84279):LEXAXA (SEQ ID NO: 84400). More particularly, the hexaplet PEP7:PEP5:PEP1:PEP2:PEP6:PEP8 is selected from the group consisting of GIPEPXX (SEQ ID NO: 84419):VPTKM (SEQ ID NO: 84382):SAIS (SEQ ID NO: 84116):LKNYQ (SEQ ID NO: 84230):NMVVE (SEQ ID NO: 84273):SXAXR (SEQ ID NO: 84303), HVTKPTX (SEQ ID NO: 84422):VPTKL (SEQ ID NO: 84381):SAIS (SEQ ID NO: 84116):LKNYQ (SEQ ID NO: 84230):NMVVE (SEQ ID NO: 84273):SXGXH (SEQ ID NO: 84304), YVPKPXX (SEQ ID NO: 84433):VPTKL (SEQ ID NO: 84381):SAIS (SEQ ID NO: 84116):LKNYQ (SEQ ID NO: 84230):NMVVE (SEQ ID NO: 84273):SXGXH (SEQ ID NO: 84304), TVPKPXX (SEQ ID NO: 84432):VPTQL (SEQ ID NO: 84384):SAIS (SEQ ID NO: 84116):LKNYQ (SEQ ID NO: 84230):NMVVE (SEQ ID NO: 84273):AXGXH (SEQ ID NO: 84147), AVPKAXX (SEQ ID NO: 84404):VPTKL (SEQ ID NO: 84381):SAIS (SEQ ID NO: 84116):LKNYQ (SEQ ID NO: 84230):NMVVE (SEQ ID NO: 84273):AXGXH (SEQ ID NO: 84147), KVGKAXX (SEQ ID NO: 84425):VPTKL (SEQ ID NO: 84381):SAIS (SEQ ID NO: 84116):LKNYQ (SEQ ID NO: 84230):EGMSVVE (SEQ ID NO: 84416):XGXR (SEQ ID NO: 84123), KASKAXX (SEQ ID NO: 84423):VPTKL (SEQ ID NO: 84381):SAIS (SEQ ID NO: 84116):LKNYQ (SEQ ID NO: 84230):GMVVE (SEQ ID NO: 84205):EXGXR (SEQ ID NO: 84179), GSAGPXX (SEQ ID NO: 84420):VPTKM (SEQ ID NO: 84382):SAIS (SEQ ID NO: 84116):LKNYQ (SEQ ID NO: 84230):GMVVE (SEQ ID NO: 84205):RXGXS (SEQ ID NO: 84291), AAPASXX (SEQ ID NO: 84401):VPTRL (SEQ ID NO: 84385):SAIS (SEQ ID NO: 84116):LKNYQ (SEQ ID NO: 84230):DMVVE (SEQ ID NO: 84161):AXGXR (SEQ ID NO: 84148), STPPTXX (SEQ ID NO: 84431):VPTRL (SEQ ID NO: 84385):SAIS (SEQ ID NO: 84116):LKNYQ (SEQ ID NO: 84230):DMVVE (SEQ ID NO: 84161):SXGXR (SEQ ID NO: 84305), HVPKPXX (SEQ ID NO: 84421):VPTKL (SEQ ID NO: 84381):SAIS (SEQ ID NO: 84116):LKNYQ (SEQ ID NO: 84230):NMVVE (SEQ ID NO: 84273):SXGXH (SEQ ID NO: 84304), RVPSTXX (SEQ ID NO: 84428):VPTKT (SEQ ID NO: 84383):SAIS (SEQ ID NO: 84116):LKNYQ (SEQ ID NO: 84230):MIVVE (SEQ ID NO: 84245):XGXL (SEQ ID NO: 84122), ASAAPXX (SEQ ID NO: 84402):VPTAL (SEQ ID NO: 84375):SAIS (SEQ ID NO: 84116):LKNYQ (SEQ ID NO: 84230):MIVVE (SEQ ID NO: 84245):XKXS (SEQ ID NO: 84124), ASASPXX (SEQ ID NO: 84403):VPTDL (SEQ ID NO: 84376):SAIS (SEQ ID NO: 84116):LKNYQ (SEQ ID NO: 84230):MIVVE (SEQ ID NO: 84245):XKXS (SEQ ID NO: 84124), ASASPXX (SEQ ID NO: 84403):VPTDL (SEQ ID NO: 84376):SAIS (SEQ ID NO: 84116):LKNYQ (SEQ ID NO: 84230):MVVVE (SEQ ID NO: 84259):XKXS (SEQ ID NO: 84124), GIPEPXX (SEQ ID NO: 84419):VPEKM (SEQ ID NO: 84360):SAIS (SEQ ID NO: 84116):LKNYQ (SEQ ID NO: 84230):NMTVE (SEQ ID NO: 84267):SXAXR (SEQ ID NO: 84303), HVTKPTX (SEQ ID NO: 84422):APTKL (SEQ ID NO: 84131):SAIS (SEQ ID NO: 84116):LKNYQ (SEQ ID NO: 84230):NMVVR (SEQ ID NO: 84275):SXGXH (SEQ ID NO: 84304), YVPKPXX (SEQ ID NO: 84433):APTKL (SEQ ID NO: 84131):SAIS (SEQ ID NO: 84116):LKNYQ (SEQ ID NO: 84230):NMVVR (SEQ ID NO: 84275):SXGXH (SEQ ID NO: 84304), TVPKPXX (SEQ ID NO: 84432):APTQL (SEQ ID NO: 84134):SAIS (SEQ ID NO: 84116):LKNYQ (SEQ ID NO: 84230):NMVVR (SEQ ID NO: 84275):AXGXH (SEQ ID NO: 84147), AVPKAXX (SEQ ID NO: 84404):APTKL (SEQ ID NO: 84131):SAIS (SEQ ID NO: 84116):LKNYQ (SEQ ID NO: 84230):NMVVK (SEQ ID NO: 84274):AXGXH (SEQ ID NO: 84147), KVGKAXX (SEQ ID NO: 84425):VPTKL (SEQ ID NO: 84381):SAIS (SEQ ID NO: 84116):LKNYQ (SEQ ID NO: 84230):EGMSVAE (SEQ ID NO: 84411):XGXR (SEQ ID NO: 84123), KASKAXX (SEQ ID NO: 84423):VPTKL (SEQ ID NO: 84381):SAIS (SEQ ID NO: 84116):LKNYQ (SEQ ID NO: 84230):GMAVS (SEQ ID NO: 84194):EXGXR (SEQ ID NO: 84179), GSAGPXX (SEQ ID NO: 84420):TPTKM (SEQ ID NO: 84327):SAIS (SEQ ID NO: 84116):LKNYQ (SEQ ID NO: 84230):GMVVD (SEQ ID NO: 84204):RXGXS (SEQ ID NO: 84291), AAPASXX (SEQ ID NO: 84401):VPARL (SEQ ID NO: 84352):SAIS (SEQ ID NO: 84116):LKNYQ (SEQ ID NO: 84230):DMVVE (SEQ ID NO: 84161):AXGXR (SEQ ID NO: 84148), HVPKPXX (SEQ ID NO: 84421):APTKL (SEQ ID NO: 84131):SAIS (SEQ ID NO: 84116):LKNYQ (SEQ ID NO: 84230):NMVVR (SEQ ID NO: 84275):SXGXH (SEQ ID NO: 84304), RVPSTXX (SEQ ID NO: 84428):APVKT (SEQ ID NO: 84144):SAIS (SEQ ID NO: 84116):LKNYQ (SEQ ID NO: 84230):MIVEE (SEQ ID NO: 84241):XGXL (SEQ ID NO: 84122), ASAAPXX (SEQ ID NO: 84402):VPQAL (SEQ ID NO: 84364):SAIS (SEQ ID NO: 84116):LKNYQ (SEQ ID NO: 84230):MIVRS (SEQ ID NO: 84243):XKXS (SEQ ID NO: 84124), ASASPXX (SEQ ID NO: 84403):VSQDL (SEQ ID NO: 84387):SAIS (SEQ ID NO: 84116):LKNYQ (SEQ ID NO: 84230):MIVKS (SEQ ID NO: 84242):XKXS (SEQ ID NO: 84124), ASASPXX (SEQ ID NO: 84403):VPQDL (SEQ ID NO: 84365):SAIS (SEQ ID NO: 84116):LKNYQ (SEQ ID NO: 84230):MVVKS (SEQ ID NO: 84256):XKXS (SEQ ID NO: 84124), NDEGLEX (SEQ ID NO: 84426):VPTEE (SEQ ID NO: 84377):SAIS (SEQ ID NO: 84116):LKNYQ (SEQ ID NO: 84230):FLQHN (SEQ ID NO: 84184):KXEXR (SEQ ID NO: 84213), NDEGLEX (SEQ ID NO: 84426):VPTGQ (SEQ ID NO: 84379):SAIS (SEQ ID NO: 84116):LKNYQ (SEQ ID NO: 84230):LEEHS (SEQ ID NO: 84217):QXEXR (SEQ ID NO: 84276), SSVKXQP (SEQ ID NO: 84430):SRVHH (SEQ ID NO: 84297):SAIS (SEQ ID NO: 84116):LKNYQ (SEQ ID NO: 84230):RLEEH (SEQ ID NO: 84279):LEXAXA (SEQ ID NO: 84400), RNVQXRP (SEQ ID NO: 84427):TQVQL (SEQ ID NO: 84340):SAIS (SEQ ID NO: 84116):LKNYQ (SEQ ID NO: 84230):TLEDH (SEQ ID NO: 84307):LAXKXE (SEQ ID NO: 84399), KIPKAXX (SEQ ID NO: 84424):VPEEL (SEQ ID NO: 84356):SSLS (SEQ ID NO: 84121):LKVYP (SEQ ID NO: 84231):DMTVE (SEQ ID NO: 84155):GXGXR (SEQ ID NO: 84208), SIPKAXX (SEQ ID NO: 84429):VPEEL (SEQ ID NO: 84356):SSLS (SEQ ID NO: 84121):LKVYP (SEQ ID NO: 84231):EMTVE (SEQ ID NO: 84169):GXGXR (SEQ ID NO: 84208), HVTKPTX (SEQ ID NO: 84422):VPEKL (SEQ ID NO: 84359):SSLS (SEQ ID NO: 84121):LKVYP (SEQ ID NO: 84231):NMTVE (SEQ ID NO: 84267):SXGXH (SEQ ID NO: 84304), YVPKPXX (SEQ ID NO: 84433):VPEKL (SEQ ID NO: 84359):SSLS (SEQ ID NO: 84121):LKVYP (SEQ ID NO: 84231):NMTVE (SEQ ID NO: 84267):SXGXH (SEQ ID NO: 84304), TVPKPXX (SEQ ID NO: 84432):VPEQL (SEQ ID NO: 84362):SSLS (SEQ ID NO: 84121):LKVYP (SEQ ID NO: 84231):NMTVE (SEQ ID NO: 84267):AXGXH (SEQ ID NO: 84147), AVPKAXX (SEQ ID NO: 84404):VPEKL (SEQ ID NO: 84359):SSLS (SEQ ID NO: 84121):LKVYP (SEQ ID NO: 84231):NMTVE (SEQ ID NO: 84267):AXGXH (SEQ ID NO: 84147), KVGKAXX (SEQ ID NO: 84425):VPEKL (SEQ ID NO: 84359):SSLS (SEQ ID NO: 84121):LKVYP (SEQ ID NO: 84231):EGMSTVE (SEQ ID NO: 84410):XGXR (SEQ ID NO: 84123), KASKAXX (SEQ ID NO: 84423):VPEKL (SEQ ID NO: 84359):SSLS (SEQ ID NO: 84121):LKVYP (SEQ ID NO: 84231):GMTVE (SEQ ID NO: 84199):EXGXR (SEQ ID NO: 84179), GSAGPXX (SEQ ID NO: 84420):VPEKM (SEQ ID NO: 84360):SSLS (SEQ ID NO: 84121):LKVYP (SEQ ID NO: 84231):GMTVE (SEQ ID NO: 84199):RXGXS (SEQ ID NO: 84291), AAPASXX (SEQ ID NO: 84401):VPERL (SEQ ID NO: 84363):SSLS (SEQ ID NO: 84121):LKVYP (SEQ ID NO: 84231):DMTVE (SEQ ID NO: 84155):AXGXR (SEQ ID NO: 84148), STPPTXX (SEQ ID NO: 84431):VPERL (SEQ ID NO: 84363):SSLS (SEQ ID NO: 84121):LKVYP (SEQ ID NO: 84231):DMTVE (SEQ ID NO: 84155):SXGXR (SEQ ID NO: 84305), HVPKPXX (SEQ ID NO: 84421):VPEKL (SEQ ID NO: 84359):SSLS (SEQ ID NO: 84121):LKVYP (SEQ ID NO: 84231):NMTVE (SEQ ID NO: 84267):SXGXH (SEQ ID NO: 84304), RVPSTXX (SEQ ID NO: 84428):VPEKT (SEQ ID NO: 84361):SSLS (SEQ ID NO: 84121):LKVYP (SEQ ID NO: 84231):MITVE (SEQ ID NO: 84239):XGXL (SEQ ID NO: 84122), ASAAPXX (SEQ ID NO: 84402):VPEAL (SEQ ID NO: 84353):SSLS (SEQ ID NO: 84121):LKVYP (SEQ ID NO: 84231):MITVE (SEQ ID NO: 84239):XKXS (SEQ ID NO: 84124), ASASPXX (SEQ ID NO: 84403):VPEDL (SEQ ID NO: 84354):SSLS (SEQ ID NO: 84121):LKVYP (SEQ ID NO: 84231):MITVE (SEQ ID NO: 84239):XKXS (SEQ ID NO: 84124), ASASPXX (SEQ ID NO: 84403):VPEDL (SEQ ID NO: 84354):SSLS (SEQ ID NO: 84121):LKVYP (SEQ ID NO: 84231):MVTVE (SEQ ID NO: 84253):XKXS (SEQ ID NO: 84124), KIPKAXX (SEQ ID NO: 84424):VPTEL (SEQ ID NO: 84378):SSLS (SEQ ID NO: 84121):LKVYP (SEQ ID NO: 84231):DMVVE (SEQ ID NO: 84161):GXGXR (SEQ ID NO: 84208), SIPKAXX (SEQ ID NO: 84429):VPTEL (SEQ ID NO: 84378):SSLS (SEQ ID NO: 84121):LKVYP (SEQ ID NO: 84231):EMVVE (SEQ ID NO: 84175):GXGXR (SEQ ID NO: 84208), HVTKPTX (SEQ ID NO: 84422):APTKL (SEQ ID NO: 84131):SSLS (SEQ ID NO: 84121):LKVYP (SEQ ID NO: 84231):NMVVR (SEQ ID NO: 84275):SXGXH (SEQ ID NO: 84304), YVPKPXX (SEQ ID NO: 84433):APTKL (SEQ ID NO: 84131):SSLS (SEQ ID NO: 84121):LKVYP (SEQ ID NO: 84231):NMVVR (SEQ ID NO: 84275):SXGXH (SEQ ID NO: 84304), TVPKPXX (SEQ ID NO: 84432):APTQL (SEQ ID NO: 84134):SSLS (SEQ ID NO: 84121):LKVYP (SEQ ID NO: 84231):NMVVR (SEQ ID NO: 84275):AXGXH (SEQ ID NO: 84147), AVPKAXX (SEQ ID NO: 84404):APTKL (SEQ ID NO: 84131):SSLS (SEQ ID NO: 84121):LKVYP (SEQ ID NO: 84231):NMVVK (SEQ ID NO: 84274):AXGXH (SEQ ID NO: 84147), KVGKAXX (SEQ ID NO: 84425):VPTKL (SEQ ID NO: 84381):SSLS (SEQ ID NO: 84121):LKVYP (SEQ ID NO: 84231):EGMSVAE (SEQ ID NO: 84411):XGXR (SEQ ID NO: 84123), KASKAXX (SEQ ID NO: 84423):VPTKL (SEQ ID NO: 84381):SSLS (SEQ ID NO: 84121):LKVYP (SEQ ID NO: 84231):GMAVS (SEQ ID NO: 84194):EXGXR (SEQ ID NO: 84179), GSAGPXX (SEQ ID NO: 84420):TPTKM (SEQ ID NO: 84327):SSLS (SEQ ID NO: 84121):LKVYP (SEQ ID NO: 84231):GMVVD (SEQ ID NO: 84204):RXGXS (SEQ ID NO: 84291), AAPASXX (SEQ ID NO: 84401):VPARL (SEQ ID NO: 84352):SSLS (SEQ ID NO: 84121):LKVYP (SEQ ID NO: 84231):DMVVE (SEQ ID NO: 84161):AXGXR (SEQ ID NO: 84148), STPPTXX (SEQ ID NO: 84431):VPTRL (SEQ ID NO: 84385):SSLS (SEQ ID NO: 84121):LKVYP (SEQ ID NO: 84231):DMVVE (SEQ ID NO: 84161):SXGXR (SEQ ID NO: 84305), HVPKPXX (SEQ ID NO: 84421):APTKL (SEQ ID NO: 84131):SSLS (SEQ ID NO: 84121):LKVYP (SEQ ID NO: 84231):NMVVR (SEQ ID NO: 84275):SXGXH (SEQ ID NO: 84304), RVPSTXX (SEQ ID NO: 84428):APVKT (SEQ ID NO: 84144):SSLS (SEQ ID NO: 84121):LKVYP (SEQ ID NO: 84231):MIVEE (SEQ ID NO: 84241):XGXL (SEQ ID NO: 84122), ASAAPXX (SEQ ID NO: 84402):VPQAL (SEQ ID NO: 84364):SSLS (SEQ ID NO: 84121):LKVYP (SEQ ID NO: 84231):MIVRS (SEQ ID NO: 84243):XKXS (SEQ ID NO: 84124), ASASPXX (SEQ ID NO: 84403):VSQDL (SEQ ID NO: 84387):SSLS (SEQ ID NO: 84121):LKVYP (SEQ ID NO: 84231):MIVKS (SEQ ID NO: 84242):XKXS (SEQ ID NO: 84124), ASASPXX (SEQ ID NO: 84403):VPQDL (SEQ ID NO: 84365):SSLS (SEQ ID NO: 84121):LKVYP (SEQ ID NO: 84231):MVVKS (SEQ ID NO: 84256):XKXS (SEQ ID NO: 84124), NDEGLEX (SEQ ID NO: 84426):VPTEE (SEQ ID NO: 84377):SSLS (SEQ ID NO: 84121):LKVYP (SEQ ID NO: 84231):FLQHN (SEQ ID NO: 84184):KXEXR (SEQ ID NO: 84213), NDEGLEX (SEQ ID NO: 84426):VPTGQ (SEQ ID NO: 84379):SSLS (SEQ ID NO: 84121):LKVYP (SEQ ID NO: 84231):LEEHS (SEQ ID NO: 84217):QXEXR (SEQ ID NO: 84276), SSVKXQP (SEQ ID NO: 84430):SRVHH (SEQ ID NO: 84297):SSLS (SEQ ID NO: 84121):LKVYP (SEQ ID NO: 84231):RLEEH (SEQ ID NO: 84279):LEXAXA (SEQ ID NO: 84400), RNVQXRP (SEQ ID NO: 84427):TQVQL (SEQ ID NO: 84340):SSLS (SEQ ID NO: 84121):LKVYP (SEQ ID NO: 84231):TLEDH (SEQ ID NO: 84307):LAXKXE (SEQ ID NO: 84399), KIPKAXX (SEQ ID NO: 84424):APTEL (SEQ ID NO: 84128):NAIS (SEQ ID NO: 84113):LKKYR (SEQ ID NO: 84229):DMVVR (SEQ ID NO: 84163):GXGXR (SEQ ID NO: 84208), GIPEPXX (SEQ ID NO: 84419):APTKM (SEQ ID NO: 84132):NAIS (SEQ ID NO: 84113):LKKYR (SEQ ID NO: 84229):NMVVR (SEQ ID NO: 84275):SXAXR (SEQ ID NO: 84303), SIPKAXX (SEQ ID NO: 84429):APTEL (SEQ ID NO: 84128):NAIS (SEQ ID NO: 84113):LKKYR (SEQ ID NO: 84229):EMVVR (SEQ ID NO: 84177):GXGXR (SEQ ID NO: 84208), AVPKAXX (SEQ ID NO: 84404):APTKL (SEQ ID NO: 84131):NAIS (SEQ ID NO: 84113):LKKYR (SEQ ID NO: 84229):NMVVR (SEQ ID NO: 84275):AXGXH (SEQ ID NO: 84147), KVGKAXX (SEQ ID NO: 84425):APTKL (SEQ ID NO: 84131):NAIS (SEQ ID NO: 84113):LKKYR (SEQ ID NO: 84229):EGMSVVR (SEQ ID NO: 84418):XGXR (SEQ ID NO: 84123), KASKAXX (SEQ ID NO: 84423):APTKL (SEQ ID NO: 84131):NAIS (SEQ ID NO: 84113):LKKYR (SEQ ID NO: 84229):GMVVR (SEQ ID NO: 84207):EXGXR (SEQ ID NO: 84179), GSAGPXX (SEQ ID NO: 84420):APTKM (SEQ ID NO: 84132):NAIS (SEQ ID NO: 84113):LKKYR (SEQ ID NO: 84229):GMVVR (SEQ ID NO: 84207):RXGXS (SEQ ID NO: 84291), AAPASXX (SEQ ID NO: 84401):APTRL (SEQ ID NO: 84135):NAIS (SEQ ID NO: 84113):LKKYR (SEQ ID NO: 84229):DMVVR (SEQ ID NO: 84163):AXGXR (SEQ ID NO: 84148), STPPTXX (SEQ ID NO: 84431):APTRL (SEQ ID NO: 84135):NAIS (SEQ ID NO: 84113):LKKYR (SEQ ID NO: 84229):DMVVR (SEQ ID NO: 84163):SXGXR (SEQ ID NO: 84305), RVPSTXX (SEQ ID NO: 84428):APTKT (SEQ ID NO: 84133):NAIS (SEQ ID NO: 84113):LKKYR (SEQ ID NO: 84229):MIVVR (SEQ ID NO: 84247):XGXL (SEQ ID NO: 84122), ASAAPXX (SEQ ID NO: 84402):APTAL (SEQ ID NO: 84125):NAIS (SEQ ID NO: 84113):LKKYR (SEQ ID NO: 84229):MIVVR (SEQ ID NO: 84247):XKXS (SEQ ID NO: 84124), ASASPXX (SEQ ID NO: 84403):APTDL (SEQ ID NO: 84126):NAIS (SEQ ID NO: 84113):LKKYR (SEQ ID NO: 84229):MIVVR (SEQ ID NO: 84247):XKXS (SEQ ID NO: 84124), ASASPXX (SEQ ID NO: 84403):APTDL (SEQ ID NO: 84126):NAIS (SEQ ID NO: 84113):LKKYR (SEQ ID NO: 84229):MVVVR (SEQ ID NO: 84261):XKXS (SEQ ID NO: 84124), KIPKAXX (SEQ ID NO: 84424):VPTEL (SEQ ID NO: 84378):NAIS (SEQ ID NO: 84113):LKKYR (SEQ ID NO: 84229):DMVVE (SEQ ID NO: 84161):GXGXR (SEQ ID NO: 84208), GIPEPXX (SEQ ID NO: 84419):VPEKM (SEQ ID NO: 84360):NAIS (SEQ ID NO: 84113):LKKYR (SEQ ID NO: 84229):NMTVE (SEQ ID NO: 84267):SXAXR (SEQ ID NO: 84303), SIPKAXX (SEQ ID NO: 84429):VPTEL (SEQ ID NO: 84378):NAIS (SEQ ID NO: 84113):LKKYR (SEQ ID NO: 84229):EMVVE (SEQ ID NO: 84175):GXGXR (SEQ ID NO: 84208), AVPKAXX (SEQ ID NO: 84404):APTKL (SEQ ID NO: 84131):NAIS (SEQ ID NO: 84113):LKKYR (SEQ ID NO: 84229):NMVVK (SEQ ID NO: 84274):AXGXH (SEQ ID NO: 84147), KVGKAXX (SEQ ID NO: 84425):VPTKL (SEQ ID NO: 84381):NAIS (SEQ ID NO: 84113):LKKYR (SEQ ID NO: 84229):EGMSVAE (SEQ ID NO: 84411):XGXR (SEQ ID NO: 84123), KASKAXX (SEQ ID NO: 84423):VPTKL (SEQ ID NO: 84381):NAIS (SEQ ID NO: 84113):LKKYR (SEQ ID NO: 84229):GMAVS (SEQ ID NO: 84194):EXGXR (SEQ ID NO: 84179), GSAGPXX (SEQ ID NO: 84420):TPTKM (SEQ ID NO: 84327):NAIS (SEQ ID NO: 84113):LKKYR (SEQ ID NO: 84229):GMVVD (SEQ ID NO: 84204):RXGXS (SEQ ID NO: 84291), AAPASXX (SEQ ID NO: 84401):VPARL (SEQ ID NO: 84352):NAIS (SEQ ID NO: 84113):LKKYR (SEQ ID NO: 84229):DMVVE (SEQ ID NO: 84161):AXGXR (SEQ ID NO: 84148), STPPTXX (SEQ ID NO: 84431):VPTRL (SEQ ID NO: 84385):NAIS (SEQ ID NO: 84113):LKKYR (SEQ ID NO: 84229):DMVVE (SEQ ID NO: 84161):SXGXR (SEQ ID NO: 84305), RVPSTXX (SEQ ID NO: 84428):APVKT (SEQ ID NO: 84144):NAIS (SEQ ID NO: 84113):LKKYR (SEQ ID NO: 84229):MIVEE (SEQ ID NO: 84241):XGXL (SEQ ID NO: 84122), ASAAPXX (SEQ ID NO: 84402):VPQAL (SEQ ID NO: 84364):NAIS (SEQ ID NO: 84113):LKKYR (SEQ ID NO: 84229):MIVRS (SEQ ID NO: 84243):XKXS (SEQ ID NO: 84124), ASASPXX (SEQ ID NO: 84403):VSQDL (SEQ ID NO: 84387):NAIS (SEQ ID NO: 84113):LKKYR (SEQ ID NO: 84229):MIVKS (SEQ ID NO: 84242):XKXS (SEQ ID NO: 84124), ASASPXX (SEQ ID NO: 84403):VPQDL (SEQ ID NO: 84365):NAIS (SEQ ID NO: 84113):LKKYR (SEQ ID NO: 84229):MVVKS (SEQ ID NO: 84256):XKXS (SEQ ID NO: 84124), NDEGLEX (SEQ ID NO: 84426):VPTEE (SEQ ID NO: 84377):NAIS (SEQ ID NO: 84113):LKKYR (SEQ ID NO: 84229):FLQHN (SEQ ID NO: 84184):KXEXR (SEQ ID NO: 84213), NDEGLEX (SEQ ID NO: 84426):VPTGQ (SEQ ID NO: 84379):NAIS (SEQ ID NO: 84113):LKKYR (SEQ ID NO: 84229):LEEHS (SEQ ID NO: 84217):QXEXR (SEQ ID NO: 84276), SSVKXQP (SEQ ID NO: 84430):SRVHH (SEQ ID NO: 84297):NAIS (SEQ ID NO: 84113):LKKYR (SEQ ID NO: 84229):RLEEH (SEQ ID NO: 84279):LEXAXA (SEQ ID NO: 84400), RNVQXRP (SEQ ID NO: 84427):TQVQL (SEQ ID NO: 84340):NAIS (SEQ ID NO: 84113):LKKYR (SEQ ID NO: 84229):TLEDH (SEQ ID NO: 84307):LAXKXE (SEQ ID NO: 84399), KIPKAXX (SEQ ID NO: 84424):APTEL (SEQ ID NO: 84128):SATS (SEQ ID NO: 84117):LRKHR (SEQ ID NO: 84233):DMVVK (SEQ ID NO: 84162):GXGXR (SEQ ID NO: 84208), GIPEPXX (SEQ ID NO: 84419):APTKM (SEQ ID NO: 84132):SATS (SEQ ID NO: 84117):LRKHR (SEQ ID NO: 84233):NMVVK (SEQ ID NO: 84274):SXAXR (SEQ ID NO: 84303), SIPKAXX (SEQ ID NO: 84429):APTEL (SEQ ID NO: 84128):SATS (SEQ ID NO: 84117):LRKHR (SEQ ID NO: 84233):EMVVK (SEQ ID NO: 84176):GXGXR (SEQ ID NO: 84208), HVTKPTX (SEQ ID NO: 84422):APTKL (SEQ ID NO: 84131):SATS (SEQ ID NO: 84117):LRKHR (SEQ ID NO: 84233):NMVVK (SEQ ID NO: 84274):SXGXH (SEQ ID NO: 84304), YVPKPXX (SEQ ID NO: 84433):APTKL (SEQ ID NO: 84131):SATS (SEQ ID NO: 84117):LRKHR (SEQ ID NO: 84233):NMVVK (SEQ ID NO: 84274):SXGXH (SEQ ID NO: 84304), TVPKPXX (SEQ ID NO: 84432):APTQL (SEQ ID NO: 84134):SATS (SEQ ID NO: 84117):LRKHR (SEQ ID NO: 84233):NMVVK (SEQ ID NO: 84274):AXGXH (SEQ ID NO: 84147), KVGKAXX (SEQ ID NO: 84425):APTKL (SEQ ID NO: 84131):SATS (SEQ ID NO: 84117):LRKHR (SEQ ID NO: 84233):EGMSVVK (SEQ ID NO: 84417):XGXR (SEQ ID NO: 84123), KASKAXX (SEQ ID NO: 84423):APTKL (SEQ ID NO: 84131):SATS (SEQ ID NO: 84117):LRKHR (SEQ ID NO: 84233):GMVVK (SEQ ID NO: 84206):EXGXR (SEQ ID NO: 84179), GSAGPXX (SEQ ID NO: 84420):APTKM (SEQ ID NO: 84132):SATS (SEQ ID NO: 84117):LRKHR (SEQ ID NO: 84233):GMVVK (SEQ ID NO: 84206):RXGXS (SEQ ID NO: 84291), AAPASXX (SEQ ID NO: 84401):APTRL (SEQ ID NO: 84135):SATS (SEQ ID NO: 84117):LRKHR (SEQ ID NO: 84233):DMVVK (SEQ ID NO: 84162):AXGXR (SEQ ID NO: 84148), STPPTXX (SEQ ID NO: 84431):APTRL (SEQ ID NO: 84135):SATS (SEQ ID NO: 84117):LRKHR (SEQ ID NO: 84233):DMVVK (SEQ ID NO: 84162):SXGXR (SEQ ID NO: 84305), HVPKPXX (SEQ ID NO: 84421):APTKL (SEQ ID NO: 84131):SATS (SEQ ID NO: 84117):LRKHR (SEQ ID NO: 84233):NMVVK (SEQ ID NO: 84274):SXGXH (SEQ ID NO: 84304), RVPSTXX (SEQ ID NO: 84428):APTKT (SEQ ID NO: 84133):SATS (SEQ ID NO: 84117):LRKHR (SEQ ID NO: 84233):MIVVK (SEQ ID NO: 84246):XGXL (SEQ ID NO: 84122), ASAAPXX (SEQ ID NO: 84402):APTAL (SEQ ID NO: 84125):SATS (SEQ ID NO: 84117):LRKHR (SEQ ID NO: 84233):MIVVK (SEQ ID NO: 84246):XKXS (SEQ ID NO: 84124), ASASPXX (SEQ ID NO: 84403):APTDL (SEQ ID NO: 84126):SATS (SEQ ID NO: 84117):LRKHR (SEQ ID NO: 84233):MIVVK (SEQ ID NO: 84246):XKXS (SEQ ID NO: 84124), ASASPXX (SEQ ID NO: 84403):APTDL (SEQ ID NO: 84126):SATS (SEQ ID NO: 84117):LRKHR (SEQ ID NO: 84233):MVVVK (SEQ ID NO: 84260):XKXS (SEQ ID NO: 84124), KIPKAXX (SEQ ID NO: 84424):VPTEL (SEQ ID NO: 84378):SATS (SEQ ID NO: 84117):LRKHR (SEQ ID NO: 84233):DMVVE (SEQ ID NO: 84161):GXGXR (SEQ ID NO: 84208), GIPEPXX (SEQ ID NO: 84419):VPEKM (SEQ ID NO: 84360):SATS (SEQ ID NO: 84117):LRKHR (SEQ ID NO: 84233):NMTVE (SEQ ID NO: 84267):SXAXR (SEQ ID NO: 84303), SIPKAXX (SEQ ID NO: 84429):VPTEL (SEQ ID NO: 84378):SATS (SEQ ID NO: 84117):LRKHR (SEQ ID NO: 84233):EMVVE (SEQ ID NO: 84175):GXGXR (SEQ ID NO: 84208), HVTKPTX (SEQ ID NO: 84422):APTKL (SEQ ID NO: 84131):SATS (SEQ ID NO: 84117):LRKHR (SEQ ID NO: 84233):NMVVR (SEQ ID NO: 84275):SXGXH (SEQ ID NO: 84304), YVPKPXX (SEQ ID NO: 84433):APTKL (SEQ ID NO: 84131):SATS (SEQ ID NO: 84117):LRKHR (SEQ ID NO: 84233):NMVVR (SEQ ID NO: 84275):SXGXH (SEQ ID NO: 84304), TVPKPXX (SEQ ID NO: 84432):APTQL (SEQ ID NO: 84134):SATS (SEQ ID NO: 84117):LRKHR (SEQ ID NO: 84233):NMVVR (SEQ ID NO: 84275):AXGXH (SEQ ID NO: 84147), KVGKAXX (SEQ ID NO: 84425):VPTKL (SEQ ID NO: 84381):SATS (SEQ ID NO: 84117):LRKHR (SEQ ID NO: 84233):EGMSVAE (SEQ ID NO: 84411):XGXR (SEQ ID NO: 84123), KASKAXX (SEQ ID NO: 84423):VPTKL (SEQ ID NO: 84381):SATS (SEQ ID NO: 84117):LRKHR (SEQ ID NO: 84233):GMAVS (SEQ ID NO: 84194):EXGXR (SEQ ID NO: 84179), GSAGPXX (SEQ ID NO: 84420):TPTKM (SEQ ID NO: 84327):SATS (SEQ ID NO: 84117):LRKHR (SEQ ID NO: 84233):GMVVD (SEQ ID NO: 84204):RXGXS (SEQ ID NO: 84291), AAPASXX (SEQ ID NO: 84401):VPARL (SEQ ID NO: 84352):SATS (SEQ ID NO: 84117):LRKHR (SEQ ID NO: 84233):DMVVE (SEQ ID NO: 84161):AXGXR (SEQ ID NO: 84148), STPPTXX (SEQ ID NO: 84431):VPTRL (SEQ ID NO: 84385):SATS (SEQ ID NO: 84117):LRKHR (SEQ ID NO: 84233):DMVVE (SEQ ID NO: 84161):SXGXR (SEQ ID NO: 84305), HVPKPXX (SEQ ID NO: 84421):APTKL (SEQ ID NO: 84131):SATS (SEQ ID NO: 84117):LRKHR (SEQ ID NO: 84233):NMVVR (SEQ ID NO: 84275):SXGXH (SEQ ID NO: 84304), RVPSTXX (SEQ ID NO: 84428):APVKT (SEQ ID NO: 84144):SATS (SEQ ID NO: 84117):LRKHR (SEQ ID NO: 84233):MIVEE (SEQ ID NO: 84241):XGXL (SEQ ID NO: 84122), ASAAPXX (SEQ ID NO: 84402):VPQAL (SEQ ID NO: 84364):SATS (SEQ ID NO: 84117):LRKHR (SEQ ID NO: 84233):MIVRS (SEQ ID NO: 84243):XKXS (SEQ ID NO: 84124), ASASPXX (SEQ ID NO: 84403):VSQDL (SEQ ID NO: 84387):SATS (SEQ ID NO: 84117):LRKHR (SEQ ID NO: 84233):MIVKS (SEQ ID NO: 84242):XKXS (SEQ ID NO: 84124), ASASPXX (SEQ ID NO: 84403):VPQDL (SEQ ID NO: 84365):SATS (SEQ ID NO: 84117):LRKHR (SEQ ID NO: 84233):MVVKS (SEQ ID NO: 84256):XKXS (SEQ ID NO: 84124), NDEGLEX (SEQ ID NO: 84426):VPTEE (SEQ ID NO: 84377):SATS (SEQ ID NO: 84117):LRKHR (SEQ ID NO: 84233):FLQHN (SEQ ID NO: 84184):KXEXR (SEQ ID NO: 84213), NDEGLEX (SEQ ID NO: 84426):VPTGQ (SEQ ID NO: 84379):SATS (SEQ ID NO: 84117):LRKHR (SEQ ID NO: 84233):LEEHS (SEQ ID NO: 84217):QXEXR (SEQ ID NO: 84276), SSVKXQP (SEQ ID NO: 84430):SRVHH (SEQ ID NO: 84297):SATS (SEQ ID NO: 84117):LRKHR (SEQ ID NO: 84233):RLEEH (SEQ ID NO: 84279):LEXAXA (SEQ ID NO: 84400), RNVQXRP (SEQ ID NO: 84427):TQVQL (SEQ ID NO: 84340):SATS (SEQ ID NO: 84117):LRKHR (SEQ ID NO: 84233):TLEDH (SEQ ID NO: 84307):LAXKXE (SEQ ID NO: 84399), KIPKAXX (SEQ ID NO: 84424):VPTEL (SEQ ID NO: 84378):SPIS (SEQ ID NO: 84120):LKYHY (SEQ ID NO: 84232):DMVAE (SEQ ID NO: 84156):GXGXR (SEQ ID NO: 84208), GIPEPXX (SEQ ID NO: 84419):VPTKM (SEQ ID NO: 84382):SPIS (SEQ ID NO: 84120):LKYHY (SEQ ID NO: 84232):NMVAE (SEQ ID NO: 84268):SXAXR (SEQ ID NO: 84303), SIPKAXX (SEQ ID NO: 84429):VPTEL (SEQ ID NO: 84378):SPIS (SEQ ID NO: 84120):LKYHY (SEQ ID NO: 84232):EMVAE (SEQ ID NO: 84170):GXGXR (SEQ ID NO: 84208), HVTKPTX (SEQ ID NO: 84422):VPTKL (SEQ ID NO: 84381):SPIS (SEQ ID NO: 84120):LKYHY (SEQ ID NO: 84232):NMVAE (SEQ ID NO: 84268):SXGXH (SEQ ID NO: 84304), YVPKPXX (SEQ ID NO: 84433):VPTKL (SEQ ID NO: 84381):SPIS (SEQ ID NO: 84120):LKYHY (SEQ ID NO: 84232):NMVAE (SEQ ID NO: 84268):SXGXH (SEQ ID NO: 84304), TVPKPXX (SEQ ID NO: 84432):VPTQL (SEQ ID NO: 84384):SPIS (SEQ ID NO: 84120):LKYHY (SEQ ID NO: 84232):NMVAE (SEQ ID NO: 84268):AXGXH (SEQ ID NO: 84147), AVPKAXX (SEQ ID NO: 84404):VPTKL (SEQ ID NO: 84381):SPIS (SEQ ID NO: 84120):LKYHY (SEQ ID NO: 84232):NMVAE (SEQ ID NO: 84268):AXGXH (SEQ ID NO: 84147), KASKAXX (SEQ ID NO: 84423):VPTKL (SEQ ID NO: 84381):SPIS (SEQ ID NO: 84120):LKYHY (SEQ ID NO: 84232):GMVAE (SEQ ID NO: 84200):EXGXR (SEQ ID NO: 84179), GSAGPXX (SEQ ID NO: 84420):VPTKM (SEQ ID NO: 84382):SPIS (SEQ ID NO: 84120):LKYHY (SEQ ID NO: 84232):GMVAE (SEQ ID NO: 84200):RXGXS (SEQ ID NO: 84291), AAPASXX (SEQ ID NO: 84401):VPTRL (SEQ ID NO: 84385):SPIS (SEQ ID NO: 84120):LKYHY (SEQ ID NO: 84232):DMVAE (SEQ ID NO: 84156):AXGXR (SEQ ID NO: 84148), STPPTXX (SEQ ID NO: 84431):VPTRL (SEQ ID NO: 84385):SPIS (SEQ ID NO: 84120):LKYHY (SEQ ID NO: 84232):DMVAE (SEQ ID NO: 84156):SXGXR (SEQ ID NO: 84305), HVPKPXX (SEQ ID NO: 84421):VPTKL (SEQ ID NO: 84381):SPIS (SEQ ID NO: 84120):LKYHY (SEQ ID NO: 84232):NMVAE (SEQ ID NO: 84268):SXGXH (SEQ ID NO: 84304), RVPSTXX (SEQ ID NO: 84428):VPTKT (SEQ ID NO: 84383):SPIS (SEQ ID NO: 84120):LKYHY (SEQ ID NO: 84232):MIVAE (SEQ ID NO: 84240):XGXL (SEQ ID NO: 84122), ASAAPXX (SEQ ID NO: 84402):VPTAL (SEQ ID NO: 84375):SPIS (SEQ ID NO: 84120):LKYHY (SEQ ID NO: 84232):MIVAE (SEQ ID NO: 84240):XKXS (SEQ ID NO: 84124), ASASPXX (SEQ ID NO: 84403):VPTDL (SEQ ID NO: 84376):SPIS (SEQ ID NO: 84120):LKYHY (SEQ ID NO: 84232):MIVAE (SEQ ID NO: 84240):XKXS (SEQ ID NO: 84124), ASASPXX (SEQ ID NO: 84403):VPTDL (SEQ ID NO: 84376):SPIS (SEQ ID NO: 84120):LKYHY (SEQ ID NO: 84232):MVVAE (SEQ ID NO: 84254):XKXS (SEQ ID NO: 84124), KIPKAXX (SEQ ID NO: 84424):VPTEL (SEQ ID NO: 84378):SPIS (SEQ ID NO: 84120):LKYHY (SEQ ID NO: 84232):DMVVE (SEQ ID NO: 84161):GXGXR (SEQ ID NO: 84208), GIPEPXX (SEQ ID NO: 84419):VPEKM (SEQ ID NO: 84360):SPIS (SEQ ID NO: 84120):LKYHY (SEQ ID NO: 84232):NMTVE (SEQ ID NO: 84267):SXAXR (SEQ ID NO: 84303), SIPKAXX (SEQ ID NO: 84429):VPTEL (SEQ ID NO: 84378):SPIS (SEQ ID NO: 84120):LKYHY (SEQ ID NO: 84232):EMVVE (SEQ ID NO: 84175):GXGXR (SEQ ID NO: 84208), HVTKPTX (SEQ ID NO: 84422):APTKL (SEQ ID NO: 84131):SPIS (SEQ ID NO: 84120):LKYHY (SEQ ID NO: 84232):NMVVR (SEQ ID NO: 84275):SXGXH (SEQ ID NO: 84304), YVPKPXX (SEQ ID NO: 84433):APTKL (SEQ ID NO: 84131):SPIS (SEQ ID NO: 84120):LKYHY (SEQ ID NO: 84232):NMVVR (SEQ ID NO: 84275):SXGXH (SEQ ID NO: 84304), TVPKPXX (SEQ ID NO: 84432):APTQL (SEQ ID NO: 84134):SPIS (SEQ ID NO: 84120):LKYHY (SEQ ID NO: 84232):NMVVR (SEQ ID NO: 84275):AXGXH (SEQ ID NO: 84147), AVPKAXX (SEQ ID NO: 84404):APTKL (SEQ ID NO: 84131):SPIS (SEQ ID NO: 84120):LKYHY (SEQ ID NO: 84232):NMVVK (SEQ ID NO: 84274):AXGXH (SEQ ID NO: 84147), KASKAXX (SEQ ID NO: 84423):VPTKL (SEQ ID NO: 84381):SPIS (SEQ ID NO: 84120):LKYHY (SEQ ID NO: 84232):GMAVS (SEQ ID NO: 84194):EXGXR (SEQ ID NO: 84179), GSAGPXX (SEQ ID NO: 84420):TPTKM (SEQ ID NO: 84327):SPIS (SEQ ID NO: 84120):LKYHY (SEQ ID NO: 84232):GMVVD (SEQ ID NO: 84204):RXGXS (SEQ ID NO: 84291), AAPASXX (SEQ ID NO: 84401):VPARL (SEQ ID NO: 84352):SPIS (SEQ ID NO: 84120):LKYHY (SEQ ID NO: 84232):DMVVE (SEQ ID NO: 84161):AXGXR (SEQ ID NO: 84148), STPPTXX (SEQ ID NO: 84431):VPTRL (SEQ ID NO: 84385):SPIS (SEQ ID NO: 84120):LKYHY (SEQ ID NO: 84232):DMVVE (SEQ ID NO: 84161):SXGXR (SEQ ID NO: 84305), HVPKPXX (SEQ ID NO: 84421):APTKL (SEQ ID NO: 84131):SPIS (SEQ ID NO: 84120):LKYHY (SEQ ID NO: 84232):NMVVR (SEQ ID NO: 84275):SXGXH (SEQ ID NO: 84304), RVPSTXX (SEQ ID NO: 84428):APVKT (SEQ ID NO: 84144):SPIS (SEQ ID NO: 84120):LKYHY (SEQ ID NO: 84232):MIVEE (SEQ ID NO: 84241):XGXL (SEQ ID NO: 84122), ASAAPXX (SEQ ID NO: 84402):VPQAL (SEQ ID NO: 84364):SPIS (SEQ ID NO: 84120):LKYHY (SEQ ID NO: 84232):MIVRS (SEQ ID NO: 84243):XKXS (SEQ ID NO: 84124), ASASPXX (SEQ ID NO: 84403):VSQDL (SEQ ID NO: 84387):SPIS (SEQ ID NO: 84120):LKYHY (SEQ ID NO: 84232):MIVKS (SEQ ID NO: 84242):XKXS (SEQ ID NO: 84124), ASASPXX (SEQ ID NO: 84403):VPQDL (SEQ ID NO: 84365):SPIS (SEQ ID NO: 84120):LKYHY (SEQ ID NO: 84232):MVVKS (SEQ ID NO: 84256):XKXS (SEQ ID NO: 84124), NDEGLEX (SEQ ID NO: 84426):VPTEE (SEQ ID NO: 84377):SPIS (SEQ ID NO: 84120):LKYHY (SEQ ID NO: 84232):FLQHN (SEQ ID NO: 84184):KXEXR (SEQ ID NO: 84213), NDEGLEX (SEQ ID NO: 84426):VPTGQ (SEQ ID NO: 84379):SPIS (SEQ ID NO: 84120):LKYHY (SEQ ID NO: 84232):LEEHS (SEQ ID NO: 84217):QXEXR (SEQ ID NO: 84276), SSVKXQP (SEQ ID NO: 84430):SRVHH (SEQ ID NO: 84297):SPIS (SEQ ID NO: 84120):LKYHY (SEQ ID NO: 84232):RLEEH (SEQ ID NO: 84279):LEXAXA (SEQ ID NO: 84400), RNVQXRP (SEQ ID NO: 84427):TQVQL (SEQ ID NO: 84340):SPIS (SEQ ID NO: 84120):LKYHY (SEQ ID NO: 84232):TLEDH (SEQ ID NO: 84307):LAXKXE (SEQ ID NO: 84399), KIPKAXX (SEQ ID NO: 84424):VPTEL (SEQ ID NO: 84378):EPIS (SEQ ID NO: 84109):KFKYE (SEQ ID NO: 84211):DMAVS (SEQ ID NO: 84150):GXGXR (SEQ ID NO: 84208), GIPEPXX (SEQ ID NO: 84419):VPTKM (SEQ ID NO: 84382):EPIS (SEQ ID NO: 84109):KFKYE (SEQ ID NO: 84211):NMAVS (SEQ ID NO: 84262):SXAXR (SEQ ID NO: 84303), SIPKAXX (SEQ ID NO: 84429):VPTEL (SEQ ID NO: 84378):EPIS (SEQ ID NO: 84109):KFKYE (SEQ ID NO: 84211):EMAVS (SEQ ID NO: 84164):GXGXR (SEQ ID NO: 84208), HVTKPTX (SEQ ID NO: 84422):VPTKL (SEQ ID NO: 84381):EPIS (SEQ ID NO: 84109):KFKYE (SEQ ID NO: 84211):NMAVS (SEQ ID NO: 84262):SXGXH (SEQ ID NO: 84304), YVPKPXX (SEQ ID NO: 84433):VPTKL (SEQ ID NO: 84381):EPIS (SEQ ID NO: 84109):KFKYE (SEQ ID NO: 84211):NMAVS (SEQ ID NO: 84262):SXGXH (SEQ ID NO: 84304), TVPKPXX (SEQ ID NO: 84432):VPTQL (SEQ ID NO: 84384):EPIS (SEQ ID NO: 84109):KFKYE (SEQ ID NO: 84211):NMAVS (SEQ ID NO: 84262):AXGXH (SEQ ID NO: 84147), AVPKAXX (SEQ ID NO: 84404):VPTKL (SEQ ID NO: 84381):EPIS (SEQ ID NO: 84109):KFKYE (SEQ ID NO: 84211):NMAVS (SEQ ID NO: 84262):AXGXH (SEQ ID NO: 84147), KVGKAXX (SEQ ID NO: 84425):VPTKL (SEQ ID NO: 84381):EPIS (SEQ ID NO: 84109):KFKYE (SEQ ID NO: 84211):EGMSAVS (SEQ ID NO: 84405):XGXR (SEQ ID NO: 84123), GSAGPXX (SEQ ID NO: 84420):VPTKM (SEQ ID NO: 84382):EPIS (SEQ ID NO: 84109):KFKYE (SEQ ID NO: 84211):GMAVS (SEQ ID NO: 84194):RXGXS (SEQ ID NO: 84291), AAPASXX (SEQ ID NO: 84401):VPTRL (SEQ ID NO: 84385):EPIS (SEQ ID NO: 84109):KFKYE (SEQ ID NO: 84211):DMAVS (SEQ ID NO: 84150):AXGXR (SEQ ID NO: 84148), STPPTXX (SEQ ID NO: 84431):VPTRL (SEQ ID NO: 84385):EPIS (SEQ ID NO: 84109):KFKYE (SEQ ID NO: 84211):DMAVS (SEQ ID NO: 84150):SXGXR (SEQ ID NO: 84305), HVPKPXX (SEQ ID NO: 84421):VPTKL (SEQ ID NO: 84381):EPIS (SEQ ID NO: 84109):KFKYE (SEQ ID NO: 84211):NMAVS (SEQ ID NO: 84262):SXGXH (SEQ ID NO: 84304), RVPSTXX (SEQ ID NO: 84428):VPTKT (SEQ ID NO: 84383):EPIS (SEQ ID NO: 84109):KFKYE (SEQ ID NO: 84211):MIAVS (SEQ ID NO: 84234):XGXL (SEQ ID NO: 84122), ASAAPXX (SEQ ID NO: 84402):VPTAL (SEQ ID NO: 84375):EPIS (SEQ ID NO: 84109):KFKYE (SEQ ID NO: 84211):MIAVS (SEQ ID NO: 84234):XKXS (SEQ ID NO: 84124), ASASPXX (SEQ ID NO: 84403):VPTDL (SEQ ID NO: 84376):EPIS (SEQ ID NO: 84109):KFKYE (SEQ ID NO: 84211):MIAVS (SEQ ID NO: 84234):XKXS (SEQ ID NO: 84124), ASASPXX (SEQ ID NO: 84403):VPTDL (SEQ ID NO: 84376):EPIS (SEQ ID NO: 84109):KFKYE (SEQ ID NO: 84211):MVAVS (SEQ ID NO: 84248):XKXS (SEQ ID NO: 84124), KIPKAXX (SEQ ID NO: 84424):VPTEL (SEQ ID NO: 84378):EPIS (SEQ ID NO: 84109):KFKYE (SEQ ID NO: 84211):DMVVE (SEQ ID NO: 84161):GXGXR (SEQ ID NO: 84208), GIPEPXX (SEQ ID NO: 84419):VPEKM (SEQ ID NO: 84360):EPIS (SEQ ID NO: 84109):KFKYE (SEQ ID NO: 84211):NMTVE (SEQ ID NO: 84267):SXAXR (SEQ ID NO: 84303), SIPKAXX (SEQ ID NO: 84429):VPTEL (SEQ ID NO: 84378):EPIS (SEQ ID NO: 84109):KFKYE (SEQ ID NO: 84211):EMVVE (SEQ ID NO: 84175):GXGXR (SEQ ID NO: 84208), HVTKPTX (SEQ ID NO: 84422):APTKL (SEQ ID NO: 84131):EPIS (SEQ ID NO: 84109):KFKYE (SEQ ID NO: 84211):NMVVR (SEQ ID NO: 84275):SXGXH (SEQ ID NO: 84304), YVPKPXX (SEQ ID NO: 84433):APTKL (SEQ ID NO: 84131):EPIS (SEQ ID NO: 84109):KFKYE (SEQ ID NO: 84211):NMVVR (SEQ ID NO: 84275):SXGXH (SEQ ID NO: 84304), TVPKPXX (SEQ ID NO: 84432):APTQL (SEQ ID NO: 84134):EPIS (SEQ ID NO: 84109):KFKYE (SEQ ID NO: 84211):NMVVR (SEQ ID NO: 84275):AXGXH (SEQ ID NO: 84147), AVPKAXX (SEQ ID NO: 84404):APTKL (SEQ ID NO: 84131):EPIS (SEQ ID NO: 84109):KFKYE (SEQ ID NO: 84211):NMVVK (SEQ ID NO: 84274):AXGXH (SEQ ID NO: 84147), KVGKAXX (SEQ ID NO: 84425):VPTKL (SEQ ID NO: 84381):EPIS (SEQ ID NO: 84109):KFKYE (SEQ ID NO: 84211):EGMSVAE (SEQ ID NO: 84411):XGXR (SEQ ID NO: 84123), GSAGPXX (SEQ ID NO: 84420):TPTKM (SEQ ID NO: 84327):EPIS (SEQ ID NO: 84109):KFKYE (SEQ ID NO: 84211):GMVVD (SEQ ID NO: 84204):RXGXS (SEQ ID NO: 84291), AAPASXX (SEQ ID NO: 84401):VPARL (SEQ ID NO: 84352):EPIS (SEQ ID NO: 84109):KFKYE (SEQ ID NO: 84211):DMVVE (SEQ ID NO: 84161):AXGXR (SEQ ID NO: 84148), STPPTXX (SEQ ID NO: 84431):VPTRL (SEQ ID NO: 84385):EPIS (SEQ ID NO: 84109):KFKYE (SEQ ID NO: 84211):DMVVE (SEQ ID NO: 84161):SXGXR (SEQ ID NO: 84305), HVPKPXX (SEQ ID NO: 84421):APTKL (SEQ ID NO: 84131):EPIS (SEQ ID NO: 84109):KFKYE (SEQ ID NO: 84211):NMVVR (SEQ ID NO: 84275):SXGXH (SEQ ID NO: 84304), RVPSTXX (SEQ ID NO: 84428):APVKT (SEQ ID NO: 84144):EPIS (SEQ ID NO: 84109):KFKYE (SEQ ID NO: 84211):MIVEE (SEQ ID NO: 84241):XGXL (SEQ ID NO: 84122), ASAAPXX (SEQ ID NO: 84402):VPQAL (SEQ ID NO: 84364):EPIS (SEQ ID NO: 84109):KFKYE (SEQ ID NO: 84211):MIVRS (SEQ ID NO: 84243):XKXS (SEQ ID NO: 84124), ASASPXX (SEQ ID NO: 84403):VSQDL (SEQ ID NO: 84387):EPIS (SEQ ID NO: 84109):KFKYE (SEQ ID NO: 84211):MIVKS (SEQ ID NO: 84242):XKXS (SEQ ID NO: 84124), ASASPXX (SEQ ID NO: 84403):VPQDL (SEQ ID NO: 84365):EPIS (SEQ ID NO: 84109):KFKYE (SEQ ID NO: 84211):MVVKS (SEQ ID NO: 84256):XKXS (SEQ ID NO: 84124), NDEGLEX (SEQ ID NO: 84426):VPTEE (SEQ ID NO: 84377):EPIS (SEQ ID NO: 84109):KFKYE (SEQ ID NO: 84211):FLQHN (SEQ ID NO: 84184):KXEXR (SEQ ID NO: 84213), NDEGLEX (SEQ ID NO: 84426):VPTGQ (SEQ ID NO: 84379):EPIS (SEQ ID NO: 84109):KFKYE (SEQ ID NO: 84211):LEEHS (SEQ ID NO: 84217):QXEXR (SEQ ID NO: 84276), SSVKXQP (SEQ ID NO: 84430):SRVHH (SEQ ID NO: 84297):EPIS (SEQ ID NO: 84109):KFKYE (SEQ ID NO: 84211):RLEEH (SEQ ID NO: 84279):LEXAXA (SEQ ID NO: 84400), RNVQXRP (SEQ ID NO: 84427):TQVQL (SEQ ID NO: 84340):EPIS (SEQ ID NO: 84109):KFKYE (SEQ ID NO: 84211):TLEDH (SEQ ID NO: 84307):LAXKXE (SEQ ID NO: 84399), KIPKAXX (SEQ ID NO: 84424):TPTEL (SEQ ID NO: 84323):SPIN (SEQ ID NO: 84119):YGKIP (SEQ ID NO: 84397):DMVVD (SEQ ID NO: 84160):GXGXR (SEQ ID NO: 84208), GIPEPXX (SEQ ID NO: 84419):TPTKM (SEQ ID NO: 84327):SPIN (SEQ ID NO: 84119):YGKIP (SEQ ID NO: 84397):NMVVD (SEQ ID NO: 84272):SXAXR (SEQ ID NO: 84303), SIPKAXX (SEQ ID NO: 84429):TPTEL (SEQ ID NO: 84323):SPIN (SEQ ID NO: 84119):YGKIP (SEQ ID NO: 84397):EMVVD (SEQ ID NO: 84174):GXGXR (SEQ ID NO: 84208), HVTKPTX (SEQ ID NO: 84422):TPTKL (SEQ ID NO: 84326):SPIN (SEQ ID NO: 84119):YGKIP (SEQ ID NO: 84397):NMVVD (SEQ ID NO: 84272):SXGXH (SEQ ID NO: 84304), YVPKPXX (SEQ ID NO: 84433):TPTKL (SEQ ID NO: 84326):SPIN (SEQ ID NO: 84119):YGKIP (SEQ ID NO: 84397):NMVVD (SEQ ID NO: 84272):SXGXH (SEQ ID NO: 84304), TVPKPXX (SEQ ID NO: 84432):TPTQL (SEQ ID NO: 84329):SPIN (SEQ ID NO: 84119):YGKIP (SEQ ID NO: 84397):NMVVD (SEQ ID NO: 84272):AXGXH (SEQ ID NO: 84147), AVPKAXX (SEQ ID NO: 84404):TPTKL (SEQ ID NO: 84326):SPIN (SEQ ID NO: 84119):YGKIP (SEQ ID NO: 84397):NMVVD (SEQ ID NO: 84272):AXGXH (SEQ ID NO: 84147), KVGKAXX (SEQ ID NO: 84425):TPTKL (SEQ ID NO: 84326):SPIN (SEQ ID NO: 84119):YGKIP (SEQ ID NO: 84397):EGMSVVD (SEQ ID NO: 84415):XGXR (SEQ ID NO: 84123), KASKAXX (SEQ ID NO: 84423):TPTKL (SEQ ID NO: 84326):SPIN (SEQ ID NO: 84119):YGKIP (SEQ ID NO: 84397):GMVVD (SEQ ID NO: 84204):EXGXR (SEQ ID NO: 84179), AAPASXX (SEQ ID NO: 84401):TPTRL (SEQ ID NO: 84330):SPIN (SEQ ID NO: 84119):YGKIP (SEQ ID NO: 84397):DMVVD (SEQ ID NO: 84160):AXGXR (SEQ ID NO: 84148), STPPTXX (SEQ ID NO: 84431):TPTRL (SEQ ID NO: 84330):SPIN (SEQ ID NO: 84119):YGKIP (SEQ ID NO: 84397):DMVVD (SEQ ID NO: 84160):SXGXR (SEQ ID NO: 84305), HVPKPXX (SEQ ID NO: 84421):TPTKL (SEQ ID NO: 84326):SPIN (SEQ ID NO: 84119):YGKIP (SEQ ID NO: 84397):NMVVD (SEQ ID NO: 84272):SXGXH (SEQ ID NO: 84304), RVPSTXX (SEQ ID NO: 84428):TPTKT (SEQ ID NO: 84328):SPIN (SEQ ID NO: 84119):YGKIP (SEQ ID NO: 84397):MIVVD (SEQ ID NO: 84244):XGXL (SEQ ID NO: 84122), ASAAPXX (SEQ ID NO: 84402):TPTAL (SEQ ID NO: 84320):SPIN (SEQ ID NO: 84119):YGKIP (SEQ ID NO: 84397):MIVVD (SEQ ID NO: 84244):XKXS (SEQ ID NO: 84124), ASASPXX (SEQ ID NO: 84403):TPTDL (SEQ ID NO: 84321):SPIN (SEQ ID NO: 84119):YGKIP (SEQ ID NO: 84397):MIVVD (SEQ ID NO: 84244):XKXS (SEQ ID NO: 84124), ASASPXX (SEQ ID NO: 84403):TPTDL (SEQ ID NO: 84321):SPIN (SEQ ID NO: 84119):YGKIP (SEQ ID NO: 84397):MVVVD (SEQ ID NO: 84258):XKXS (SEQ ID NO: 84124), KIPKAXX (SEQ ID NO: 84424):VPTEL (SEQ ID NO: 84378):SPIN (SEQ ID NO: 84119):YGKIP (SEQ ID NO: 84397):DMVVE (SEQ ID NO: 84161):GXGXR (SEQ ID NO: 84208), GIPEPXX (SEQ ID NO: 84419):VPEKM (SEQ ID NO: 84360):SPIN (SEQ ID NO: 84119):YGKIP (SEQ ID NO: 84397):NMTVE (SEQ ID NO: 84267):SXAXR (SEQ ID NO: 84303), SIPKAXX (SEQ ID NO: 84429):VPTEL (SEQ ID NO: 84378):SPIN (SEQ ID NO: 84119):YGKIP (SEQ ID NO: 84397):EMVVE (SEQ ID NO: 84175):GXGXR (SEQ ID NO: 84208), HVTKPTX (SEQ ID NO: 84422):APTKL (SEQ ID NO: 84131):SPIN (SEQ ID NO: 84119):YGKIP (SEQ ID NO: 84397):NMVVR (SEQ ID NO: 84275):SXGXH (SEQ ID NO: 84304), YVPKPXX (SEQ ID NO: 84433):APTKL (SEQ ID NO: 84131):SPIN (SEQ ID NO: 84119):YGKIP (SEQ ID NO: 84397):NMVVR (SEQ ID NO: 84275):SXGXH (SEQ ID NO: 84304), TVPKPXX (SEQ ID NO: 84432):APTQL (SEQ ID NO: 84134):SPIN (SEQ ID NO: 84119):YGKIP (SEQ ID NO: 84397):NMVVR (SEQ ID NO: 84275):AXGXH (SEQ ID NO: 84147), AVPKAXX (SEQ ID NO: 84404):APTKL (SEQ ID NO: 84131):SPIN (SEQ ID NO: 84119):YGKIP (SEQ ID NO: 84397):NMVVK (SEQ ID NO: 84274):AXGXH (SEQ ID NO: 84147), KVGKAXX (SEQ ID NO: 84425):VPTKL (SEQ ID NO: 84381):SPIN (SEQ ID NO: 84119):YGKIP (SEQ ID NO: 84397):EGMSVAE (SEQ ID NO: 84411):XGXR (SEQ ID NO: 84123), KASKAXX (SEQ ID NO: 84423):VPTKL (SEQ ID NO: 84381):SPIN (SEQ ID NO: 84119):YGKIP (SEQ ID NO: 84397):GMAVS (SEQ ID NO: 84194):EXGXR (SEQ ID NO: 84179), AAPASXX (SEQ ID NO: 84401):VPARL (SEQ ID NO: 84352):SPIN (SEQ ID NO: 84119):YGKIP (SEQ ID NO: 84397):DMVVE (SEQ ID NO: 84161):AXGXR (SEQ ID NO: 84148), STPPTXX (SEQ ID NO: 84431):VPTRL (SEQ ID NO: 84385):SPIN (SEQ ID NO: 84119):YGKIP (SEQ ID NO: 84397):DMVVE (SEQ ID NO: 84161):SXGXR (SEQ ID NO: 84305), HVPKPXX (SEQ ID NO: 84421):APTKL (SEQ ID NO: 84131):SPIN (SEQ ID NO: 84119):YGKIP (SEQ ID NO: 84397):NMVVR (SEQ ID NO: 84275):SXGXH (SEQ ID NO: 84304), RVPSTXX (SEQ ID NO: 84428):APVKT (SEQ ID NO: 84144):SPIN (SEQ ID NO: 84119):YGKIP (SEQ ID NO: 84397):MIVEE (SEQ ID NO: 84241):XGXL (SEQ ID NO: 84122), ASAAPXX (SEQ ID NO: 84402):VPQAL (SEQ ID NO: 84364):SPIN (SEQ ID NO: 84119):YGKIP (SEQ ID NO: 84397):MIVRS (SEQ ID NO: 84243):XKXS (SEQ ID NO: 84124), ASASPXX (SEQ ID NO: 84403):VSQDL (SEQ ID NO: 84387):SPIN (SEQ ID NO: 84119):YGKIP (SEQ ID NO: 84397):MIVKS (SEQ ID NO: 84242):XKXS (SEQ ID NO: 84124), ASASPXX (SEQ ID NO: 84403):VPQDL (SEQ ID NO: 84365):SPIN (SEQ ID NO: 84119):YGKIP (SEQ ID NO: 84397):MVVKS (SEQ ID NO: 84256):XKXS (SEQ ID NO: 84124), NDEGLEX (SEQ ID NO: 84426):VPTEE (SEQ ID NO: 84377):SPIN (SEQ ID NO: 84119):YGKIP (SEQ ID NO: 84397):FLQHN (SEQ ID NO: 84184):KXEXR (SEQ ID NO: 84213), NDEGLEX (SEQ ID NO: 84426):VPTGQ (SEQ ID NO: 84379):SPIN (SEQ ID NO: 84119):YGKIP (SEQ ID NO: 84397):LEEHS (SEQ ID NO: 84217):QXEXR (SEQ ID NO: 84276), SSVKXQP (SEQ ID NO: 84430):SRVHH (SEQ ID NO: 84297):SPIN (SEQ ID NO: 84119):YGKIP (SEQ ID NO: 84397):RLEEH (SEQ ID NO: 84279):LEXAXA (SEQ ID NO: 84400), RNVQXRP (SEQ ID NO: 84427):TQVQL (SEQ ID NO: 84340):SPIN (SEQ ID NO: 84119):YGKIP (SEQ ID NO: 84397):TLEDH (SEQ ID NO: 84307):LAXKXE (SEQ ID NO: 84399), KIPKAXX (SEQ ID NO: 84424):VPAEL (SEQ ID NO: 84345):SPIS (SEQ ID NO: 84120):YKQYE (SEQ ID NO: 84398):DMVVE (SEQ ID NO: 84161):GXGXR (SEQ ID NO: 84208), GIPEPXX (SEQ ID NO: 84419):VPAKM (SEQ ID NO: 84349):SPIS (SEQ ID NO: 84120):YKQYE (SEQ ID NO: 84398):NMVVE (SEQ ID NO: 84273):SXAXR (SEQ ID NO: 84303), SIPKAXX (SEQ ID NO: 84429):VPAEL (SEQ ID NO: 84345):SPIS (SEQ ID NO: 84120):YKQYE (SEQ ID NO: 84398):EMVVE (SEQ ID NO: 84175):GXGXR (SEQ ID NO: 84208), HVTKPTX (SEQ ID NO: 84422):VPAKL (SEQ ID NO: 84348):SPIS (SEQ ID NO: 84120):YKQYE (SEQ ID NO: 84398):NMVVE (SEQ ID NO: 84273):SXGXH (SEQ ID NO: 84304), YVPKPXX (SEQ ID NO: 84433):VPAKL (SEQ ID NO: 84348):SPIS (SEQ ID NO: 84120):YKQYE (SEQ ID NO: 84398):NMVVE (SEQ ID NO: 84273):SXGXH (SEQ ID NO: 84304), TVPKPXX (SEQ ID NO: 84432):VPAQL (SEQ ID NO: 84351):SPIS (SEQ ID NO: 84120):YKQYE (SEQ ID NO: 84398):NMVVE (SEQ ID NO: 84273):AXGXH (SEQ ID NO: 84147), AVPKAXX (SEQ ID NO: 84404):VPAKL (SEQ ID NO: 84348):SPIS (SEQ ID NO: 84120):YKQYE (SEQ ID NO: 84398):NMVVE (SEQ ID NO: 84273):AXGXH (SEQ ID NO: 84147), KVGKAXX (SEQ ID NO: 84425):VPAKL (SEQ ID NO: 84348):SPIS (SEQ ID NO: 84120):YKQYE (SEQ ID NO: 84398):EGMSVVE (SEQ ID NO: 84416):XGXR (SEQ ID NO: 84123), KASKAXX (SEQ ID NO: 84423):VPAKL (SEQ ID NO: 84348):SPIS (SEQ ID NO: 84120):YKQYE (SEQ ID NO: 84398):GMVVE (SEQ ID NO: 84205):EXGXR (SEQ ID NO: 84179), GSAGPXX (SEQ ID NO: 84420):VPAKM (SEQ ID NO: 84349):SPIS (SEQ ID NO: 84120):YKQYE (SEQ ID NO: 84398):GMVVE (SEQ ID NO: 84205):RXGXS (SEQ ID NO: 84291), STPPTXX (SEQ ID NO: 84431):VPARL (SEQ ID NO: 84352):SPIS (SEQ ID NO: 84120):YKQYE (SEQ ID NO: 84398):DMVVE (SEQ ID NO: 84161):SXGXR (SEQ ID NO: 84305), HVPKPXX (SEQ ID NO: 84421):VPAKL (SEQ ID NO: 84348):SPIS (SEQ ID NO: 84120):YKQYE (SEQ ID NO: 84398):NMVVE (SEQ ID NO: 84273):SXGXH (SEQ ID NO: 84304), RVPSTXX (SEQ ID NO: 84428):VPAKT (SEQ ID NO: 84350):SPIS (SEQ ID NO: 84120):YKQYE (SEQ ID NO: 84398):MIVVE (SEQ ID NO: 84245):XGXL (SEQ ID NO: 84122), ASAAPXX (SEQ ID NO: 84402):VPAAL (SEQ ID NO: 84342):SPIS (SEQ ID NO: 84120):YKQYE (SEQ ID NO: 84398):MIVVE (SEQ ID NO: 84245):XKXS (SEQ ID NO: 84124), ASASPXX (SEQ ID NO: 84403):VPADL (SEQ ID NO: 84343):SPIS (SEQ ID NO: 84120):YKQYE (SEQ ID NO: 84398):MIVVE (SEQ ID NO: 84245):XKXS (SEQ ID NO: 84124), ASASPXX (SEQ ID NO: 84403):VPADL (SEQ ID NO: 84343):SPIS (SEQ ID NO: 84120):YKQYE (SEQ ID NO: 84398):MVVVE (SEQ ID NO: 84259):XKXS (SEQ ID NO: 84124), KIPKAXX (SEQ ID NO: 84424):VPTEL (SEQ ID NO: 84378):SPIS (SEQ ID NO: 84120):YKQYE (SEQ ID NO: 84398):DMVVE (SEQ ID NO: 84161):GXGXR (SEQ ID NO: 84208), GIPEPXX (SEQ ID NO: 84419):VPEKM (SEQ ID NO: 84360):SPIS (SEQ ID NO: 84120):YKQYE (SEQ ID NO: 84398):NMTVE (SEQ ID NO: 84267):SXAXR (SEQ ID NO: 84303), SIPKAXX (SEQ ID NO: 84429):VPTEL (SEQ ID NO: 84378):SPIS (SEQ ID NO: 84120):YKQYE (SEQ ID NO: 84398):EMVVE (SEQ ID NO: 84175):GXGXR (SEQ ID NO: 84208), HVTKPTX (SEQ ID NO: 84422):APTKL (SEQ ID NO: 84131):SPIS (SEQ ID NO: 84120):YKQYE (SEQ ID NO: 84398):NMVVR (SEQ ID NO: 84275):SXGXH (SEQ ID NO: 84304), YVPKPXX (SEQ ID NO: 84433):APTKL (SEQ ID NO: 84131):SPIS (SEQ ID NO: 84120):YKQYE (SEQ ID NO: 84398):NMVVR (SEQ ID NO: 84275):SXGXH (SEQ ID NO: 84304), TVPKPXX (SEQ ID NO: 84432):APTQL (SEQ ID NO: 84134):SPIS (SEQ ID NO: 84120):YKQYE (SEQ ID NO: 84398):NMVVR (SEQ ID NO: 84275):AXGXH (SEQ ID NO: 84147), AVPKAXX (SEQ ID NO: 84404):APTKL (SEQ ID NO: 84131):SPIS (SEQ ID NO: 84120):YKQYE (SEQ ID NO: 84398):NMVVK (SEQ ID NO: 84274):AXGXH (SEQ ID NO: 84147), KVGKAXX (SEQ ID NO: 84425):VPTKL (SEQ ID NO: 84381):SPIS (SEQ ID NO: 84120):YKQYE (SEQ ID NO: 84398):EGMSVAE (SEQ ID NO: 84411):XGXR (SEQ ID NO: 84123), KASKAXX (SEQ ID NO: 84423):VPTKL (SEQ ID NO: 84381):SPIS (SEQ ID NO: 84120):YKQYE (SEQ ID NO: 84398):GMAVS (SEQ ID NO: 84194):EXGXR (SEQ ID NO: 84179), GSAGPXX (SEQ ID NO: 84420):TPTKM (SEQ ID NO: 84327):SPIS (SEQ ID NO: 84120):YKQYE (SEQ ID NO: 84398):GMVVD (SEQ ID NO: 84204):RXGXS (SEQ ID NO: 84291), STPPTXX (SEQ ID NO: 84431):VPTRL (SEQ ID NO: 84385):SPIS (SEQ ID NO: 84120):YKQYE (SEQ ID NO: 84398):DMVVE (SEQ ID NO: 84161):SXGXR (SEQ ID NO: 84305), HVPKPXX (SEQ ID NO: 84421):APTKL (SEQ ID NO: 84131):SPIS (SEQ ID NO: 84120):YKQYE (SEQ ID NO: 84398):NMVVR (SEQ ID NO: 84275):SXGXH (SEQ ID NO: 84304), RVPSTXX (SEQ ID NO: 84428):APVKT (SEQ ID NO: 84144):SPIS (SEQ ID NO: 84120):YKQYE (SEQ ID NO: 84398):MIVEE (SEQ ID NO: 84241):XGXL (SEQ ID NO: 84122), ASAAPXX (SEQ ID NO: 84402):VPQAL (SEQ ID NO: 84364):SPIS (SEQ ID NO: 84120):YKQYE (SEQ ID NO: 84398):MIVRS (SEQ ID NO: 84243):XKXS (SEQ ID NO: 84124), ASASPXX (SEQ ID NO: 84403):VSQDL (SEQ ID NO: 84387):SPIS (SEQ ID NO: 84120):YKQYE (SEQ ID NO: 84398):MIVKS (SEQ ID NO: 84242):XKXS (SEQ ID NO: 84124), ASASPXX (SEQ ID NO: 84403):VPQDL (SEQ ID NO: 84365):SPIS (SEQ ID NO: 84120):YKQYE (SEQ ID NO: 84398):MVVKS (SEQ ID NO: 84256):XKXS (SEQ ID NO: 84124), NDEGLEX (SEQ ID NO: 84426):VPTEE (SEQ ID NO: 84377):SPIS (SEQ ID NO: 84120):YKQYE (SEQ ID NO: 84398):FLQHN (SEQ ID NO: 84184):KXEXR (SEQ ID NO: 84213), NDEGLEX (SEQ ID NO: 84426):VPTGQ (SEQ ID NO: 84379):SPIS (SEQ ID NO: 84120):YKQYE (SEQ ID NO: 84398):LEEHS (SEQ ID NO: 84217):QXEXR (SEQ ID NO: 84276), SSVKXQP (SEQ ID NO: 84430):SRVHH (SEQ ID NO: 84297):SPIS (SEQ ID NO: 84120):YKQYE (SEQ ID NO: 84398):RLEEH (SEQ ID NO: 84279):LEXAXA (SEQ ID NO: 84400), RNVQXRP (SEQ ID NO: 84427):TQVQL (SEQ ID NO: 84340):SPIS (SEQ ID NO: 84120):YKQYE (SEQ ID NO: 84398):TLEDH (SEQ ID NO: 84307):LAXKXE (SEQ ID NO: 84399), GIPEPXX (SEQ ID NO: 84419):VPTKM (SEQ ID NO: 84382):SPIS (SEQ ID NO: 84120):YKQYE (SEQ ID NO: 84398):NMVVE (SEQ ID NO: 84273):SXAXR (SEQ ID NO: 84303), HVTKPTX (SEQ ID NO: 84422):VPTKL (SEQ ID NO: 84381):SPIS (SEQ ID NO: 84120):YKQYE (SEQ ID NO: 84398):NMVVE (SEQ ID NO: 84273):SXGXH (SEQ ID NO: 84304), YVPKPXX (SEQ ID NO: 84433):VPTKL (SEQ ID NO: 84381):SPIS (SEQ ID NO: 84120):YKQYE (SEQ ID NO: 84398):NMVVE (SEQ ID NO: 84273):SXGXH (SEQ ID NO: 84304), TVPKPXX (SEQ ID NO: 84432):VPTQL (SEQ ID NO: 84384):SPIS (SEQ ID NO: 84120):YKQYE (SEQ ID NO: 84398):NMVVE (SEQ ID NO: 84273):AXGXH (SEQ ID NO: 84147), AVPKAXX (SEQ ID NO: 84404):VPTKL (SEQ ID NO: 84381):SPIS (SEQ ID NO: 84120):YKQYE (SEQ ID NO: 84398):NMVVE (SEQ ID NO: 84273):AXGXH (SEQ ID NO: 84147), KVGKAXX (SEQ ID NO: 84425):VPTKL (SEQ ID NO: 84381):SPIS (SEQ ID NO: 84120):YKQYE (SEQ ID NO: 84398):EGMSVVE (SEQ ID NO: 84416):XGXR (SEQ ID NO: 84123), KASKAXX (SEQ ID NO: 84423):VPTKL (SEQ ID NO: 84381):SPIS (SEQ ID NO: 84120):YKQYE (SEQ ID NO: 84398):GMVVE (SEQ ID NO: 84205):EXGXR (SEQ ID NO: 84179), GSAGPXX (SEQ ID NO: 84420):VPTKM (SEQ ID NO: 84382):SPIS (SEQ ID NO: 84120):YKQYE (SEQ ID NO: 84398):GMVVE (SEQ ID NO: 84205):RXGXS (SEQ ID NO: 84291), AAPASXX (SEQ ID NO: 84401):VPTRL (SEQ ID NO: 84385):SPIS (SEQ ID NO: 84120):YKQYE (SEQ ID NO: 84398):DMVVE (SEQ ID NO: 84161):AXGXR (SEQ ID NO: 84148), HVPKPXX (SEQ ID NO: 84421):VPTKL (SEQ ID NO: 84381):SPIS (SEQ ID NO: 84120):YKQYE (SEQ ID NO: 84398):NMVVE (SEQ ID NO: 84273):SXGXH (SEQ ID NO: 84304), RVPSTXX (SEQ ID NO: 84428):VPTKT (SEQ ID NO: 84383):SPIS (SEQ ID NO: 84120):YKQYE (SEQ ID NO: 84398):MIVVE (SEQ ID NO: 84245):XGXL (SEQ ID NO: 84122), ASAAPXX (SEQ ID NO: 84402):VPTAL (SEQ ID NO: 84375):SPIS (SEQ ID NO: 84120):YKQYE (SEQ ID NO: 84398):MIVVE (SEQ ID NO: 84245):XKXS (SEQ ID NO: 84124), ASASPXX (SEQ ID NO: 84403):VPTDL (SEQ ID NO: 84376):SPIS (SEQ ID NO: 84120):YKQYE (SEQ ID NO: 84398):MIVVE (SEQ ID NO: 84245):XKXS (SEQ ID NO: 84124), ASASPXX (SEQ ID NO: 84403):VPTDL (SEQ ID NO: 84376):SPIS (SEQ ID NO: 84120):YKQYE (SEQ ID NO: 84398):MVVVE (SEQ ID NO: 84259):XKXS (SEQ ID NO: 84124), AAPASXX (SEQ ID NO: 84401):VPARL (SEQ ID NO: 84352):SPIS (SEQ ID NO: 84120):YKQYE (SEQ ID NO: 84398):DMVVE (SEQ ID NO: 84161):AXGXR (SEQ ID NO: 84148), KIPKAXX (SEQ ID NO: 84424):APVEL (SEQ ID NO: 84139):KPLS (SEQ ID NO: 84112):DHHKD (SEQ ID NO: 84149):DMVEE (SEQ ID NO: 84157):GXGXR (SEQ ID NO: 84208), GIPEPXX (SEQ ID NO: 84419):APVKM (SEQ ID NO: 84143):KPLS (SEQ ID NO: 84112):DHHKD (SEQ ID NO: 84149):NMVEE (SEQ ID NO: 84269):SXAXR (SEQ ID NO: 84303), SIPKAXX (SEQ ID NO: 84429):APVEL (SEQ ID NO: 84139):KPLS (SEQ ID NO: 84112):DHHKD (SEQ ID NO: 84149):EMVEE (SEQ ID NO: 84171):GXGXR (SEQ ID NO: 84208), HVTKPTX (SEQ ID NO: 84422):APVKL (SEQ ID NO: 84142):KPLS (SEQ ID NO: 84112):DHHKD (SEQ ID NO: 84149):NMVEE (SEQ ID NO: 84269):SXGXH (SEQ ID NO: 84304), YVPKPXX (SEQ ID NO: 84433):APVKL (SEQ ID NO: 84142):KPLS (SEQ ID NO: 84112):DHHKD (SEQ ID NO: 84149):NMVEE (SEQ ID NO: 84269):SXGXH (SEQ ID NO: 84304), TVPKPXX (SEQ ID NO: 84432):APVQL (SEQ ID NO: 84145):KPLS (SEQ ID NO: 84112):DHHKD (SEQ ID NO: 84149):NMVEE (SEQ ID NO: 84269):AXGXH (SEQ ID NO: 84147), AVPKAXX (SEQ ID NO: 84404):APVKL (SEQ ID NO: 84142):KPLS (SEQ ID NO: 84112):DHHKD (SEQ ID NO: 84149):NMVEE (SEQ ID NO: 84269):AXGXH (SEQ ID NO: 84147), KVGKAXX (SEQ ID NO: 84425):APVKL (SEQ ID NO: 84142):KPLS (SEQ ID NO: 84112):DHHKD (SEQ ID NO: 84149):EGMSVEE (SEQ ID NO: 84412):XGXR (SEQ ID NO: 84123), KASKAXX (SEQ ID NO: 84423):APVKL (SEQ ID NO: 84142):KPLS (SEQ ID NO: 84112):DHHKD (SEQ ID NO: 84149):GMVEE (SEQ ID NO: 84201):EXGXR (SEQ ID NO: 84179), GSAGPXX (SEQ ID NO: 84420):APVKM (SEQ ID NO: 84143):KPLS (SEQ ID NO: 84112):DHHKD (SEQ ID NO: 84149):GMVEE (SEQ ID NO: 84201):RXGXS (SEQ ID NO: 84291), AAPASXX (SEQ ID NO: 84401):APVRL (SEQ ID NO: 84146):KPLS (SEQ ID NO: 84112):DHHKD (SEQ ID NO: 84149):DMVEE (SEQ ID NO: 84157):AXGXR (SEQ ID NO: 84148), STPPTXX (SEQ ID NO: 84431):APVRL (SEQ ID NO: 84146):KPLS (SEQ ID NO: 84112):DHHKD (SEQ ID NO: 84149):DMVEE (SEQ ID NO: 84157):SXGXR (SEQ ID NO: 84305), HVPKPXX (SEQ ID NO: 84421):APVKL (SEQ ID NO: 84142):KPLS (SEQ ID NO: 84112):DHHKD (SEQ ID NO: 84149):NMVEE (SEQ ID NO: 84269):SXGXH (SEQ ID NO: 84304), ASAAPXX (SEQ ID NO: 84402):APVAL (SEQ ID NO: 84136):KPLS (SEQ ID NO: 84112):DHHKD (SEQ ID NO: 84149):MIVEE (SEQ ID NO: 84241):XKXS (SEQ ID NO: 84124), ASASPXX (SEQ ID NO: 84403):APVDL (SEQ ID NO: 84137):KPLS (SEQ ID NO: 84112):DHHKD (SEQ ID NO: 84149):MIVEE (SEQ ID NO: 84241):XKXS (SEQ ID NO: 84124), ASASPXX (SEQ ID NO: 84403):APVDL (SEQ ID NO: 84137):KPLS (SEQ ID NO: 84112):DHHKD (SEQ ID NO: 84149):MVVEE (SEQ ID NO: 84255):XKXS (SEQ ID NO: 84124), KIPKAXX (SEQ ID NO: 84424):VPTEL (SEQ ID NO: 84378):KPLS (SEQ ID NO: 84112):DHHKD (SEQ ID NO: 84149):DMVVE (SEQ ID NO: 84161):GXGXR (SEQ ID NO: 84208), GIPEPXX (SEQ ID NO: 84419):VPEKM (SEQ ID NO: 84360):KPLS (SEQ ID NO: 84112):DHHKD (SEQ ID NO: 84149):NMTVE (SEQ ID NO: 84267):SXAXR (SEQ ID NO: 84303), SIPKAXX (SEQ ID NO: 84429):VPTEL (SEQ ID NO: 84378):KPLS (SEQ ID NO: 84112):DHHKD (SEQ ID NO: 84149):EMVVE (SEQ ID NO: 84175):GXGXR (SEQ ID NO: 84208), HVTKPTX (SEQ ID NO: 84422):APTKL (SEQ ID NO: 84131):KPLS (SEQ ID NO: 84112):DHHKD (SEQ ID NO: 84149):NMVVR (SEQ ID NO: 84275):SXGXH (SEQ ID NO: 84304), YVPKPXX (SEQ ID NO: 84433):APTKL (SEQ ID NO: 84131):KPLS (SEQ ID NO: 84112):DHHKD (SEQ ID NO: 84149):NMVVR (SEQ ID NO: 84275):SXGXH (SEQ ID NO: 84304), TVPKPXX (SEQ ID NO: 84432):APTQL (SEQ ID NO: 84134):KPLS (SEQ ID NO: 84112):DHHKD (SEQ ID NO: 84149):NMVVR (SEQ ID NO: 84275):AXGXH (SEQ ID NO: 84147), AVPKAXX (SEQ ID NO: 84404):APTKL (SEQ ID NO: 84131):KPLS (SEQ ID NO: 84112):DHHKD (SEQ ID NO: 84149):NMVVK (SEQ ID NO: 84274):AXGXH (SEQ ID NO: 84147), KVGKAXX (SEQ ID NO: 84425):VPTKL (SEQ ID NO: 84381):KPLS (SEQ ID NO: 84112):DHHKD (SEQ ID NO: 84149):EGMSVAE (SEQ ID NO: 84411):XGXR (SEQ ID NO: 84123), KASKAXX (SEQ ID NO: 84423):VPTKL (SEQ ID NO: 84381):KPLS (SEQ ID NO: 84112):DHHKD (SEQ ID NO: 84149):GMAVS (SEQ ID NO: 84194):EXGXR (SEQ ID NO: 84179), GSAGPXX (SEQ ID NO: 84420):TPTKM (SEQ ID NO: 84327):KPLS (SEQ ID NO: 84112):DHHKD (SEQ ID NO: 84149):GMVVD (SEQ ID NO: 84204):RXGXS (SEQ ID NO: 84291), AAPASXX (SEQ ID NO: 84401):VPARL (SEQ ID NO: 84352):KPLS (SEQ ID NO: 84112):DHHKD (SEQ ID NO: 84149):DMVVE (SEQ ID NO: 84161):AXGXR (SEQ ID NO: 84148), STPPTXX (SEQ ID NO: 84431):VPTRL (SEQ ID NO: 84385):KPLS (SEQ ID NO: 84112):DHHKD (SEQ ID NO: 84149):DMVVE (SEQ ID NO: 84161):SXGXR (SEQ ID NO: 84305), HVPKPXX (SEQ ID NO: 84421):APTKL (SEQ ID NO: 84131):KPLS (SEQ ID NO: 84112):DHHKD (SEQ ID NO: 84149):NMVVR (SEQ ID NO: 84275):SXGXH (SEQ ID NO: 84304), ASAAPXX (SEQ ID NO: 84402):VPQAL (SEQ ID NO: 84364):KPLS (SEQ ID NO: 84112):DHHKD (SEQ ID NO: 84149):MIVRS (SEQ ID NO: 84243):XKXS (SEQ ID NO: 84124), ASASPXX (SEQ ID NO: 84403):VSQDL (SEQ ID NO: 84387):KPLS (SEQ ID NO: 84112):DHHKD (SEQ ID NO: 84149):MIVKS (SEQ ID NO: 84242):XKXS (SEQ ID NO: 84124), ASASPXX (SEQ ID NO: 84403):VPQDL (SEQ ID NO: 84365):KPLS (SEQ ID NO: 84112):DHHKD (SEQ ID NO: 84149):MVVKS (SEQ ID NO: 84256):XKXS (SEQ ID NO: 84124), NDEGLEX (SEQ ID NO: 84426):VPTEE (SEQ ID NO: 84377):KPLS (SEQ ID NO: 84112):DHHKD (SEQ ID NO: 84149):FLQHN (SEQ ID NO: 84184):KXEXR (SEQ ID NO: 84213), NDEGLEX (SEQ ID NO: 84426):VPTGQ (SEQ ID NO: 84379):KPLS (SEQ ID NO: 84112):DHHKD (SEQ ID NO: 84149):LEEHS (SEQ ID NO: 84217):QXEXR (SEQ ID NO: 84276), SSVKXQP (SEQ ID NO: 84430):SRVHH (SEQ ID NO: 84297):KPLS (SEQ ID NO: 84112):DHHKD (SEQ ID NO: 84149):RLEEH (SEQ ID NO: 84279):LEXAXA (SEQ ID NO: 84400), RNVQXRP (SEQ ID NO: 84427):TQVQL (SEQ ID NO: 84340):KPLS (SEQ ID NO: 84112):DHHKD (SEQ ID NO: 84149):TLEDH (SEQ ID NO: 84307):LAXKXE (SEQ ID NO: 84399), KIPKAXX (SEQ ID NO: 84424):VPQEL (SEQ ID NO: 84367):EPLP (SEQ ID NO: 84110):EQLSN (SEQ ID NO: 84178):DMVRS (SEQ ID NO: 84159):GXGXR (SEQ ID NO: 84208), GIPEPXX (SEQ ID NO: 84419):VPQKM (SEQ ID NO: 84371):EPLP (SEQ ID NO: 84110):EQLSN (SEQ ID NO: 84178):NMVRS (SEQ ID NO: 84271):SXAXR (SEQ ID NO: 84303), SIPKAXX (SEQ ID NO: 84429):VPQEL (SEQ ID NO: 84367):EPLP (SEQ ID NO: 84110):EQLSN (SEQ ID NO: 84178):EMVRS (SEQ ID NO: 84173):GXGXR (SEQ ID NO: 84208), HVTKPTX (SEQ ID NO: 84422):VPQKL (SEQ ID NO: 84370):EPLP (SEQ ID NO: 84110):EQLSN (SEQ ID NO: 84178):NMVRS (SEQ ID NO: 84271):SXGXH (SEQ ID NO: 84304), YVPKPXX (SEQ ID NO: 84433):VPQKL (SEQ ID NO: 84370):EPLP (SEQ ID NO: 84110):EQLSN (SEQ ID NO: 84178):NMVRS (SEQ ID NO: 84271):SXGXH (SEQ ID NO: 84304), TVPKPXX (SEQ ID NO: 84432):VPQQL (SEQ ID NO: 84373):EPLP (SEQ ID NO: 84110):EQLSN (SEQ ID NO: 84178):NMVRS (SEQ ID NO: 84271):AXGXH (SEQ ID NO: 84147), AVPKAXX (SEQ ID NO: 84404):VPQKL (SEQ ID NO: 84370):EPLP (SEQ ID NO: 84110):EQLSN (SEQ ID NO: 84178):NMVRS (SEQ ID NO: 84271):AXGXH (SEQ ID NO: 84147), KVGKAXX (SEQ ID NO: 84425):VPQKL (SEQ ID NO: 84370):EPLP (SEQ ID NO: 84110):EQLSN (SEQ ID NO: 84178):EGMSVRS (SEQ ID NO: 84414):XGXR (SEQ ID NO: 84123), KASKAXX (SEQ ID NO: 84423):VPQKL (SEQ ID NO: 84370):EPLP (SEQ ID NO: 84110):EQLSN (SEQ ID NO: 84178):GMVRS (SEQ ID NO: 84203):EXGXR (SEQ ID NO: 84179), GSAGPXX (SEQ ID NO: 84420):VPQKM (SEQ ID NO: 84371):EPLP (SEQ ID NO: 84110):EQLSN (SEQ ID NO: 84178):GMVRS (SEQ ID NO: 84203):RXGXS (SEQ ID NO: 84291), AAPASXX (SEQ ID NO: 84401):VPQRL (SEQ ID NO: 84374):EPLP (SEQ ID NO: 84110):EQLSN (SEQ ID NO: 84178):DMVRS (SEQ ID NO: 84159):AXGXR (SEQ ID NO: 84148), STPPTXX (SEQ ID NO: 84431):VPQRL (SEQ ID NO: 84374):EPLP (SEQ ID NO: 84110):EQLSN (SEQ ID NO: 84178):DMVRS (SEQ ID NO: 84159):SXGXR (SEQ ID NO: 84305), HVPKPXX (SEQ ID NO: 84421):VPQKL (SEQ ID NO: 84370):EPLP (SEQ ID NO: 84110):EQLSN (SEQ ID NO: 84178):NMVRS (SEQ ID NO: 84271):SXGXH (SEQ ID NO: 84304), RVPSTXX (SEQ ID NO: 84428):VPQKT (SEQ ID NO: 84372):EPLP (SEQ ID NO: 84110):EQLSN (SEQ ID NO: 84178):MIVRS (SEQ ID NO: 84243):XGXL (SEQ ID NO: 84122), ASASPXX (SEQ ID NO: 84403):VPQDL (SEQ ID NO: 84365):EPLP (SEQ ID NO: 84110):EQLSN (SEQ ID NO: 84178):MIVRS (SEQ ID NO: 84243):XKXS (SEQ ID NO: 84124), ASASPXX (SEQ ID NO: 84403):VPQDL (SEQ ID NO: 84365):EPLP (SEQ ID NO: 84110):EQLSN (SEQ ID NO: 84178):MVVRS (SEQ ID NO: 84257):XKXS (SEQ ID NO: 84124), KIPKAXX (SEQ ID NO: 84424):VPTEL (SEQ ID NO: 84378):EPLP (SEQ ID NO: 84110):EQLSN (SEQ ID NO: 84178):DMVVE (SEQ ID NO: 84161):GXGXR (SEQ ID NO: 84208), GIPEPXX (SEQ ID NO: 84419):VPEKM (SEQ ID NO: 84360):EPLP (SEQ ID NO: 84110):EQLSN (SEQ ID NO: 84178):NMTVE (SEQ ID NO: 84267):SXAXR (SEQ ID NO: 84303), SIPKAXX (SEQ ID NO: 84429):VPTEL (SEQ ID NO: 84378):EPLP (SEQ ID NO: 84110):EQLSN (SEQ ID NO: 84178):EMVVE (SEQ ID NO: 84175):GXGXR (SEQ ID NO: 84208), HVTKPTX (SEQ ID NO: 84422):APTKL (SEQ ID NO: 84131):EPLP (SEQ ID NO: 84110):EQLSN (SEQ ID NO: 84178):NMVVR (SEQ ID NO: 84275):SXGXH (SEQ ID NO: 84304), YVPKPXX (SEQ ID NO: 84433):APTKL (SEQ ID NO: 84131):EPLP (SEQ ID NO: 84110):EQLSN (SEQ ID NO: 84178):NMVVR (SEQ ID NO: 84275):SXGXH (SEQ ID NO: 84304), TVPKPXX (SEQ ID NO: 84432):APTQL (SEQ ID NO: 84134):EPLP (SEQ ID NO: 84110):EQLSN (SEQ ID NO: 84178):NMVVR (SEQ ID NO: 84275):AXGXH (SEQ ID NO: 84147), AVPKAXX (SEQ ID NO: 84404):APTKL (SEQ ID NO: 84131):EPLP (SEQ ID NO: 84110):EQLSN (SEQ ID NO: 84178):NMVVK (SEQ ID NO: 84274):AXGXH (SEQ ID NO: 84147), KVGKAXX (SEQ ID NO: 84425):VPTKL (SEQ ID NO: 84381):EPLP (SEQ ID NO: 84110):EQLSN (SEQ ID NO: 84178):EGMSVAE (SEQ ID NO: 84411):XGXR (SEQ ID NO: 84123), KASKAXX (SEQ ID NO: 84423):VPTKL (SEQ ID NO: 84381):EPLP (SEQ ID NO: 84110):EQLSN (SEQ ID NO: 84178):GMAVS (SEQ ID NO: 84194):EXGXR (SEQ ID NO: 84179), GSAGPXX (SEQ ID NO: 84420):TPTKM (SEQ ID NO: 84327):EPLP (SEQ ID NO: 84110):EQLSN (SEQ ID NO: 84178):GMVVD (SEQ ID NO: 84204):RXGXS (SEQ ID NO: 84291), AAPASXX (SEQ ID NO: 84401):VPARL (SEQ ID NO: 84352):EPLP (SEQ ID NO: 84110):EQLSN (SEQ ID NO: 84178):DMVVE (SEQ ID NO: 84161):AXGXR (SEQ ID NO: 84148), STPPTXX (SEQ ID NO: 84431):VPTRL (SEQ ID NO: 84385):EPLP (SEQ ID NO: 84110):EQLSN (SEQ ID NO: 84178):DMVVE (SEQ ID NO: 84161):SXGXR (SEQ ID NO: 84305), HVPKPXX (SEQ ID NO: 84421):APTKL (SEQ ID NO: 84131):EPLP (SEQ ID NO: 84110):EQLSN (SEQ ID NO: 84178):NMVVR (SEQ ID NO: 84275):SXGXH (SEQ ID NO: 84304), RVPSTXX (SEQ ID NO: 84428):APVKT (SEQ ID NO: 84144):EPLP (SEQ ID NO: 84110):EQLSN (SEQ ID NO: 84178):MIVEE (SEQ ID NO: 84241):XGXL (SEQ ID NO: 84122), ASASPXX (SEQ ID NO: 84403):VSQDL (SEQ ID NO: 84387):EPLP (SEQ ID NO: 84110):EQLSN (SEQ ID NO: 84178):MIVKS (SEQ ID NO: 84242):XKXS (SEQ ID NO: 84124), ASASPXX (SEQ ID NO: 84403):VPQDL (SEQ ID NO: 84365):EPLP (SEQ ID NO: 84110):EQLSN (SEQ ID NO: 84178):MVVKS (SEQ ID NO: 84256):XKXS (SEQ ID NO: 84124), NDEGLEX (SEQ ID NO: 84426):VPTEE (SEQ ID NO: 84377):EPLP (SEQ ID NO: 84110):EQLSN (SEQ ID NO: 84178):FLQHN (SEQ ID NO: 84184):KXEXR (SEQ ID NO: 84213), NDEGLEX (SEQ ID NO: 84426):VPTGQ (SEQ ID NO: 84379):EPLP (SEQ ID NO: 84110):EQLSN (SEQ ID NO: 84178):LEEHS (SEQ ID NO: 84217):QXEXR (SEQ ID NO: 84276), SSVKXQP (SEQ ID NO: 84430):SRVHH (SEQ ID NO: 84297):EPLP (SEQ ID NO: 84110):EQLSN (SEQ ID NO: 84178):RLEEH (SEQ ID NO: 84279):LEXAXA (SEQ ID NO: 84400), RNVQXRP (SEQ ID NO: 84427):TQVQL (SEQ ID NO: 84340):EPLP (SEQ ID NO: 84110):EQLSN (SEQ ID NO: 84178):TLEDH (SEQ ID NO: 84307):LAXKXE (SEQ ID NO: 84399), KIPKAXX (SEQ ID NO: 84424):VSQEL (SEQ ID NO: 84389):EPLT (SEQ ID NO: 84111):EQLSN (SEQ ID NO: 84178):DMVKS (SEQ ID NO: 84158):GXGXR (SEQ ID NO: 84208), GIPEPXX (SEQ ID NO: 84419):VSQKM (SEQ ID NO: 84393):EPLT (SEQ ID NO: 84111):EQLSN (SEQ ID NO: 84178):NMVKS (SEQ ID NO: 84270):SXAXR (SEQ ID NO: 84303), SIPKAXX (SEQ ID NO: 84429):VSQEL (SEQ ID NO: 84389):EPLT (SEQ ID NO: 84111):EQLSN (SEQ ID NO: 84178):EMVKS (SEQ ID NO: 84172):GXGXR (SEQ ID NO: 84208), HVTKPTX (SEQ ID NO: 84422):VSQKL (SEQ ID NO: 84392):EPLT (SEQ ID NO: 84111):EQLSN (SEQ ID NO: 84178):NMVKS (SEQ ID NO: 84270):SXGXH (SEQ ID NO: 84304), YVPKPXX (SEQ ID NO: 84433):VSQKL (SEQ ID NO: 84392):EPLT (SEQ ID NO: 84111):EQLSN (SEQ ID NO: 84178):NMVKS (SEQ ID NO: 84270):SXGXH (SEQ ID NO: 84304), TVPKPXX (SEQ ID NO: 84432):VSQQL (SEQ ID NO: 84395):EPLT (SEQ ID NO: 84111):EQLSN (SEQ ID NO: 84178):NMVKS (SEQ ID NO: 84270):AXGXH (SEQ ID NO: 84147), AVPKAXX (SEQ ID NO: 84404):VSQKL (SEQ ID NO: 84392):EPLT (SEQ ID NO: 84111):EQLSN (SEQ ID NO: 84178):NMVKS (SEQ ID NO: 84270):AXGXH (SEQ ID NO: 84147), KVGKAXX (SEQ ID NO: 84425):VSQKL (SEQ ID NO: 84392):EPLT (SEQ ID NO: 84111):EQLSN (SEQ ID NO: 84178):EGMSVKS (SEQ ID NO: 84413):XGXR (SEQ ID NO: 84123), KASKAXX (SEQ ID NO: 84423):VSQKL (SEQ ID NO: 84392):EPLT (SEQ ID NO: 84111):EQLSN (SEQ ID NO: 84178):GMVKS (SEQ ID NO: 84202):EXGXR (SEQ ID NO: 84179), GSAGPXX (SEQ ID NO: 84420):VSQKM (SEQ ID NO: 84393):EPLT (SEQ ID NO: 84111):EQLSN (SEQ ID NO: 84178):GMVKS (SEQ ID NO: 84202):RXGXS (SEQ ID NO: 84291), AAPASXX (SEQ ID NO: 84401):VSQRL (SEQ ID NO: 84396):EPLT (SEQ ID NO: 84111):EQLSN (SEQ ID NO: 84178):DMVKS (SEQ ID NO: 84158):AXGXR (SEQ ID NO: 84148), STPPTXX (SEQ ID NO: 84431):VSQRL (SEQ ID NO: 84396):EPLT (SEQ ID NO: 84111):EQLSN (SEQ ID NO: 84178):DMVKS (SEQ ID NO: 84158):SXGXR (SEQ ID NO: 84305), HVPKPXX (SEQ ID NO: 84421):VSQKL (SEQ ID NO: 84392):EPLT (SEQ ID NO: 84111):EQLSN (SEQ ID NO: 84178):NMVKS (SEQ ID NO: 84270):SXGXH (SEQ ID NO: 84304), RVPSTXX (SEQ ID NO: 84428):VSQKT (SEQ ID NO: 84394):EPLT (SEQ ID NO: 84111):EQLSN (SEQ ID NO: 84178):MIVKS (SEQ ID NO: 84242):XGXL (SEQ ID NO: 84122), ASAAPXX (SEQ ID NO: 84402):VSQAL (SEQ ID NO: 84386):EPLT (SEQ ID NO: 84111):EQLSN (SEQ ID NO: 84178):MIVKS (SEQ ID NO: 84242):XKXS (SEQ ID NO: 84124), ASASPXX (SEQ ID NO: 84403):VSQDL (SEQ ID NO: 84387):EPLT (SEQ ID NO: 84111):EQLSN (SEQ ID NO: 84178):MVVKS (SEQ ID NO: 84256):XKXS (SEQ ID NO: 84124), KIPKAXX (SEQ ID NO: 84424):VPTEL (SEQ ID NO: 84378):EPLT (SEQ ID NO: 84111):EQLSN (SEQ ID NO: 84178):DMVVE (SEQ ID NO: 84161):GXGXR (SEQ ID NO: 84208), GIPEPXX (SEQ ID NO: 84419):VPEKM (SEQ ID NO: 84360):EPLT (SEQ ID NO: 84111):EQLSN (SEQ ID NO: 84178):NMTVE (SEQ ID NO: 84267):SXAXR (SEQ ID NO: 84303), SIPKAXX (SEQ ID NO: 84429):VPTEL (SEQ ID NO: 84378):EPLT (SEQ ID NO: 84111):EQLSN (SEQ ID NO: 84178):EMVVE (SEQ ID NO: 84175):GXGXR (SEQ ID NO: 84208), HVTKPTX (SEQ ID NO: 84422):APTKL (SEQ ID NO: 84131):EPLT (SEQ ID NO: 84111):EQLSN (SEQ ID NO: 84178):NMVVR (SEQ ID NO: 84275):SXGXH (SEQ ID NO: 84304), YVPKPXX (SEQ ID NO: 84433):APTKL (SEQ ID NO: 84131):EPLT (SEQ ID NO: 84111):EQLSN (SEQ ID NO: 84178):NMVVR (SEQ ID NO: 84275):SXGXH (SEQ ID NO: 84304), TVPKPXX (SEQ ID NO: 84432):APTQL (SEQ ID NO: 84134):EPLT (SEQ ID NO: 84111):EQLSN (SEQ ID NO: 84178):NMVVR (SEQ ID NO: 84275):AXGXH (SEQ ID NO: 84147), AVPKAXX (SEQ ID NO: 84404):APTKL (SEQ ID NO: 84131):EPLT (SEQ ID NO: 84111):EQLSN (SEQ ID NO: 84178):NMVVK (SEQ ID NO: 84274):AXGXH (SEQ ID NO: 84147), KVGKAXX (SEQ ID NO: 84425):VPTKL (SEQ ID NO: 84381):EPLT (SEQ ID NO: 84111):EQLSN (SEQ ID NO: 84178):EGMSVAE (SEQ ID NO: 84411):XGXR (SEQ ID NO: 84123), KASKAXX (SEQ ID NO: 84423):VPTKL (SEQ ID NO: 84381):EPLT (SEQ ID NO: 84111):EQLSN (SEQ ID NO: 84178):GMAVS (SEQ ID NO: 84194):EXGXR (SEQ ID NO: 84179), GSAGPXX (SEQ ID NO: 84420):TPTKM (SEQ ID NO: 84327):EPLT (SEQ ID NO: 84111):EQLSN (SEQ ID NO: 84178):GMVVD (SEQ ID NO: 84204):RXGXS (SEQ ID NO: 84291), AAPASXX (SEQ ID NO: 84401):VPARL (SEQ ID NO: 84352):EPLT (SEQ ID NO: 84111):EQLSN (SEQ ID NO: 84178):DMVVE (SEQ ID NO: 84161):AXGXR (SEQ ID NO: 84148), STPPTXX (SEQ ID NO: 84431):VPTRL (SEQ ID NO: 84385):EPLT (SEQ ID NO: 84111):EQLSN (SEQ ID NO: 84178):DMVVE (SEQ ID NO: 84161):SXGXR (SEQ ID NO: 84305), HVPKPXX (SEQ ID NO: 84421):APTKL (SEQ ID NO: 84131):EPLT (SEQ ID NO: 84111):EQLSN (SEQ ID NO: 84178):NMVVR (SEQ ID NO: 84275):SXGXH (SEQ ID NO: 84304), RVPSTXX (SEQ ID NO: 84428):APVKT (SEQ ID NO: 84144):EPLT (SEQ ID NO: 84111):EQLSN (SEQ ID NO: 84178):MIVEE (SEQ ID NO: 84241):XGXL (SEQ ID NO: 84122), ASAAPXX (SEQ ID NO: 84402):VPQAL (SEQ ID NO: 84364):EPLT (SEQ ID NO: 84111):EQLSN (SEQ ID NO: 84178):MIVRS (SEQ ID NO: 84243):XKXS (SEQ ID NO: 84124), NDEGLEX (SEQ ID NO: 84426):VPTEE (SEQ ID NO: 84377):EPLT (SEQ ID NO: 84111):EQLSN (SEQ ID NO: 84178):FLQHN (SEQ ID NO: 84184):KXEXR (SEQ ID NO: 84213), NDEGLEX (SEQ ID NO: 84426):VPTGQ (SEQ ID NO: 84379):EPLT (SEQ ID NO: 84111):EQLSN (SEQ ID NO: 84178):LEEHS (SEQ ID NO: 84217):QXEXR (SEQ ID NO: 84276), SSVKXQP (SEQ ID NO: 84430):SRVHH (SEQ ID NO: 84297):EPLT (SEQ ID NO: 84111):EQLSN (SEQ ID NO: 84178):RLEEH (SEQ ID NO: 84279):LEXAXA (SEQ ID NO: 84400), RNVQXRP (SEQ ID NO: 84427):TQVQL (SEQ ID NO: 84340):EPLT (SEQ ID NO: 84111):EQLSN (SEQ ID NO: 84178):TLEDH (SEQ ID NO: 84307):LAXKXE (SEQ ID NO: 84399), KIPKAXX (SEQ ID NO: 84424):VPQEL (SEQ ID NO: 84367):EPLT (SEQ ID NO: 84111):EQLSN (SEQ ID NO: 84178):DMVKS (SEQ ID NO: 84158):GXGXR (SEQ ID NO: 84208), GIPEPXX (SEQ ID NO: 84419):VPQKM (SEQ ID NO: 84371):EPLT (SEQ ID NO: 84111):EQLSN (SEQ ID NO: 84178):NMVKS (SEQ ID NO: 84270):SXAXR (SEQ ID NO: 84303), SIPKAXX (SEQ ID NO: 84429):VPQEL (SEQ ID NO: 84367):EPLT (SEQ ID NO: 84111):EQLSN (SEQ ID NO: 84178):EMVKS (SEQ ID NO: 84172):GXGXR (SEQ ID NO: 84208), HVTKPTX (SEQ ID NO: 84422):VPQKL (SEQ ID NO: 84370):EPLT (SEQ ID NO: 84111):EQLSN (SEQ ID NO: 84178):NMVKS (SEQ ID NO: 84270):SXGXH (SEQ ID NO: 84304), YVPKPXX (SEQ ID NO: 84433):VPQKL (SEQ ID NO: 84370):EPLT (SEQ ID NO: 84111):EQLSN (SEQ ID NO: 84178):NMVKS (SEQ ID NO: 84270):SXGXH (SEQ ID NO: 84304), TVPKPXX (SEQ ID NO: 84432):VPQQL (SEQ ID NO: 84373):EPLT (SEQ ID NO: 84111):EQLSN (SEQ ID NO: 84178):NMVKS (SEQ ID NO: 84270):AXGXH (SEQ ID NO: 84147), AVPKAXX (SEQ ID NO: 84404):VPQKL (SEQ ID NO: 84370):EPLT (SEQ ID NO: 84111):EQLSN (SEQ ID NO: 84178):NMVKS (SEQ ID NO: 84270):AXGXH (SEQ ID NO: 84147), KVGKAXX (SEQ ID NO: 84425):VPQKL (SEQ ID NO: 84370):EPLT (SEQ ID NO: 84111):EQLSN (SEQ ID NO: 84178):EGMSVKS (SEQ ID NO: 84413):XGXR (SEQ ID NO: 84123), KASKAXX (SEQ ID NO: 84423):VPQKL (SEQ ID NO: 84370):EPLT (SEQ ID NO: 84111):EQLSN (SEQ ID NO: 84178):GMVKS (SEQ ID NO: 84202):EXGXR (SEQ ID NO: 84179), GSAGPXX (SEQ ID NO: 84420):VPQKM (SEQ ID NO: 84371):EPLT (SEQ ID NO: 84111):EQLSN (SEQ ID NO: 84178):GMVKS (SEQ ID NO: 84202):RXGXS (SEQ ID NO: 84291), AAPASXX (SEQ ID NO: 84401):VPQRL (SEQ ID NO: 84374):EPLT (SEQ ID NO: 84111):EQLSN (SEQ ID NO: 84178):DMVKS (SEQ ID NO: 84158):AXGXR (SEQ ID NO: 84148), STPPTXX (SEQ ID NO: 84431):VPQRL (SEQ ID NO: 84374):EPLT (SEQ ID NO: 84111):EQLSN (SEQ ID NO: 84178):DMVKS (SEQ ID NO: 84158):SXGXR (SEQ ID NO: 84305), HVPKPXX (SEQ ID NO: 84421):VPQKL (SEQ ID NO: 84370):EPLT (SEQ ID NO: 84111):EQLSN (SEQ ID NO: 84178):NMVKS (SEQ ID NO: 84270):SXGXH (SEQ ID NO: 84304), RVPSTXX (SEQ ID NO: 84428):VPQKT (SEQ ID NO: 84372):EPLT (SEQ ID NO: 84111):EQLSN (SEQ ID NO: 84178):MIVKS (SEQ ID NO: 84242):XGXL (SEQ ID NO: 84122), ASAAPXX (SEQ ID NO: 84402):VPQAL (SEQ ID NO: 84364):EPLT (SEQ ID NO: 84111):EQLSN (SEQ ID NO: 84178):MIVKS (SEQ ID NO: 84242):XKXS (SEQ ID NO: 84124), ASASPXX (SEQ ID NO: 84403):VPQDL (SEQ ID NO: 84365):EPLT (SEQ ID NO: 84111):EQLSN (SEQ ID NO: 84178):MIVKS (SEQ ID NO: 84242):XKXS (SEQ ID NO: 84124), NDEGLEX (SEQ ID NO: 84426):VPTGQ (SEQ ID NO: 84379):SNIT (SEQ ID NO: 84118):IGEMS (SEQ ID NO: 84209):LEQHN (SEQ ID NO: 84218):QXEXR (SEQ ID NO: 84276), KIPKAXX (SEQ ID NO: 84424):VPTEL (SEQ ID NO: 84378):SNIT (SEQ ID NO: 84118):IGEMS (SEQ ID NO: 84209):DMVVE (SEQ ID NO: 84161):GXGXR (SEQ ID NO: 84208), GIPEPXX (SEQ ID NO: 84419):VPEKM (SEQ ID NO: 84360):SNIT (SEQ ID NO: 84118):IGEMS (SEQ ID NO: 84209):NMTVE (SEQ ID NO: 84267):SXAXR (SEQ ID NO: 84303), SIPKAXX (SEQ ID NO: 84429):VPTEL (SEQ ID NO: 84378):SNIT (SEQ ID NO: 84118):IGEMS (SEQ ID NO: 84209):EMVVE (SEQ ID NO: 84175):GXGXR (SEQ ID NO: 84208), HVTKPTX (SEQ ID NO: 84422):APTKL (SEQ ID NO: 84131):SNIT (SEQ ID NO: 84118):IGEMS (SEQ ID NO: 84209):NMVVR (SEQ ID NO: 84275):SXGXH (SEQ ID NO: 84304), YVPKPXX (SEQ ID NO: 84433):APTKL (SEQ ID NO: 84131):SNIT (SEQ ID NO: 84118):IGEMS (SEQ ID NO: 84209):NMVVR (SEQ ID NO: 84275):SXGXH (SEQ ID NO: 84304), TVPKPXX (SEQ ID NO: 84432):APTQL (SEQ ID NO: 84134):SNIT (SEQ ID NO: 84118):IGEMS (SEQ ID NO: 84209):NMVVR (SEQ ID NO: 84275):AXGXH (SEQ ID NO: 84147), AVPKAXX (SEQ ID NO: 84404):APTKL (SEQ ID NO: 84131):SNIT (SEQ ID NO: 84118):IGEMS (SEQ ID NO: 84209):NMVVK (SEQ ID NO: 84274):AXGXH (SEQ ID NO: 84147), KVGKAXX (SEQ ID NO: 84425):VPTKL (SEQ ID NO: 84381):SNIT (SEQ ID NO: 84118):IGEMS (SEQ ID NO: 84209):EGMSVAE (SEQ ID NO: 84411):XGXR (SEQ ID NO: 84123), KASKAXX (SEQ ID NO: 84423):VPTKL (SEQ ID NO: 84381):SNIT (SEQ ID NO: 84118):IGEMS (SEQ ID NO: 84209):GMAVS (SEQ ID NO: 84194):EXGXR (SEQ ID NO: 84179), GSAGPXX (SEQ ID NO: 84420):TPTKM (SEQ ID NO: 84327):SNIT (SEQ ID NO: 84118):IGEMS (SEQ ID NO: 84209):GMVVD (SEQ ID NO: 84204):RXGXS (SEQ ID NO: 84291), AAPASXX (SEQ ID NO: 84401):VPARL (SEQ ID NO: 84352):SNIT (SEQ ID NO: 84118):IGEMS (SEQ ID NO: 84209):DMVVE (SEQ ID NO: 84161):AXGXR (SEQ ID NO: 84148), STPPTXX (SEQ ID NO: 84431):VPTRL (SEQ ID NO: 84385):SNIT (SEQ ID NO: 84118):IGEMS (SEQ ID NO: 84209):DMVVE (SEQ ID NO: 84161):SXGXR (SEQ ID NO: 84305), HVPKPXX (SEQ ID NO: 84421):APTKL (SEQ ID NO: 84131):SNIT (SEQ ID NO: 84118):IGEMS (SEQ ID NO: 84209):NMVVR (SEQ ID NO: 84275):SXGXH (SEQ ID NO: 84304), RVPSTXX (SEQ ID NO: 84428):APVKT (SEQ ID NO: 84144):SNIT (SEQ ID NO: 84118):IGEMS (SEQ ID NO: 84209):MIVEE (SEQ ID NO: 84241):XGXL (SEQ ID NO: 84122), ASAAPXX (SEQ ID NO: 84402):VPQAL (SEQ ID NO: 84364):SNIT (SEQ ID NO: 84118):IGEMS (SEQ ID NO: 84209):MIVRS (SEQ ID NO: 84243):XKXS (SEQ ID NO: 84124), ASASPXX (SEQ ID NO: 84403):VSQDL (SEQ ID NO: 84387):SNIT (SEQ ID NO: 84118):IGEMS (SEQ ID NO: 84209):MIVKS (SEQ ID NO: 84242):XKXS (SEQ ID NO: 84124), ASASPXX (SEQ ID NO: 84403):VPQDL (SEQ ID NO: 84365):SNIT (SEQ ID NO: 84118):IGEMS (SEQ ID NO: 84209):MVVKS (SEQ ID NO: 84256):XKXS (SEQ ID NO: 84124), NDEGLEX (SEQ ID NO: 84426):VPTGQ (SEQ ID NO: 84379):SNIT (SEQ ID NO: 84118):IGEMS (SEQ ID NO: 84209):LEEHS (SEQ ID NO: 84217):QXEXR (SEQ ID NO: 84276), SSVKXQP (SEQ ID NO: 84430):SRVHH (SEQ ID NO: 84297):SNIT (SEQ ID NO: 84118):IGEMS (SEQ ID NO: 84209):RLEEH (SEQ ID NO: 84279):LEXAXA (SEQ ID NO: 84400), RNVQXRP (SEQ ID NO: 84427):TQVQL (SEQ ID NO: 84340):SNIT (SEQ ID NO: 84118):IGEMS (SEQ ID NO: 84209):TLEDH (SEQ ID NO: 84307):LAXKXE (SEQ ID NO: 84399), NDEGLEX (SEQ ID NO: 84426):VPTEE (SEQ ID NO: 84377):SNIT (SEQ ID NO: 84118):LGEMS (SEQ ID NO: 84228):FLEHS (SEQ ID NO: 84183):KXEXR (SEQ ID NO: 84213), KIPKAXX (SEQ ID NO: 84424):VPTEL (SEQ ID NO: 84378):SNIT (SEQ ID NO: 84118):LGEMS (SEQ ID NO: 84228):DMVVE (SEQ ID NO: 84161):GXGXR (SEQ ID NO: 84208), GIPEPXX (SEQ ID NO: 84419):VPEKM (SEQ ID NO: 84360):SNIT (SEQ ID NO: 84118):LGEMS (SEQ ID NO: 84228):NMTVE (SEQ ID NO: 84267):SXAXR (SEQ ID NO: 84303), SIPKAXX (SEQ ID NO: 84429):VPTEL (SEQ ID NO: 84378):SNIT (SEQ ID NO: 84118):LGEMS (SEQ ID NO: 84228):EMVVE (SEQ ID NO: 84175):GXGXR (SEQ ID NO: 84208), HVTKPTX (SEQ ID NO: 84422):APTKL (SEQ ID NO: 84131):SNIT (SEQ ID NO: 84118):LGEMS (SEQ ID NO: 84228):NMVVR (SEQ ID NO: 84275):SXGXH (SEQ ID NO: 84304), YVPKPXX (SEQ ID NO: 84433):APTKL (SEQ ID NO: 84131):SNIT (SEQ ID NO: 84118):LGEMS (SEQ ID NO: 84228):NMVVR (SEQ ID NO: 84275):SXGXH (SEQ ID NO: 84304), TVPKPXX (SEQ ID NO: 84432):APTQL (SEQ ID NO: 84134):SNIT (SEQ ID NO: 84118):LGEMS (SEQ ID NO: 84228):NMVVR (SEQ ID NO: 84275):AXGXH (SEQ ID NO: 84147), AVPKAXX (SEQ ID NO: 84404):APTKL (SEQ ID NO: 84131):SNIT (SEQ ID NO: 84118):LGEMS (SEQ ID NO: 84228):NMVVK (SEQ ID NO: 84274):AXGXH (SEQ ID NO: 84147), KVGKAXX (SEQ ID NO: 84425):VPTKL (SEQ ID NO: 84381):SNIT (SEQ ID NO: 84118):LGEMS (SEQ ID NO: 84228):EGMSVAE (SEQ ID NO: 84411):XGXR (SEQ ID NO: 84123), KASKAXX (SEQ ID NO: 84423):VPTKL (SEQ ID NO: 84381):SNIT (SEQ ID NO: 84118):LGEMS (SEQ ID NO: 84228):GMAVS (SEQ ID NO: 84194):EXGXR (SEQ ID NO: 84179), GSAGPXX (SEQ ID NO: 84420):TPTKM (SEQ ID NO: 84327):SNIT (SEQ ID NO: 84118):LGEMS (SEQ ID NO: 84228):GMVVD (SEQ ID NO: 84204):RXGXS (SEQ ID NO: 84291), AAPASXX (SEQ ID NO: 84401):VPARL (SEQ ID NO: 84352):SNIT (SEQ ID NO: 84118):LGEMS (SEQ ID NO: 84228):DMVVE (SEQ ID NO: 84161):AXGXR (SEQ ID NO: 84148), STPPTXX (SEQ ID NO: 84431):VPTRL (SEQ ID NO: 84385):SNIT (SEQ ID NO: 84118):LGEMS (SEQ ID NO: 84228):DMVVE (SEQ ID NO: 84161):SXGXR (SEQ ID NO: 84305), HVPKPXX (SEQ ID NO: 84421):APTKL (SEQ ID NO: 84131):SNIT (SEQ ID NO: 84118):LGEMS (SEQ ID NO: 84228):NMVVR (SEQ ID NO: 84275):SXGXH (SEQ ID NO: 84304), RVPSTXX (SEQ ID NO: 84428):APVKT (SEQ ID NO: 84144):SNIT (SEQ ID NO: 84118):LGEMS (SEQ ID NO: 84228):MIVEE (SEQ ID NO: 84241):XGXL (SEQ ID NO: 84122), ASAAPXX (SEQ ID NO: 84402):VPQAL (SEQ ID NO: 84364):SNIT (SEQ ID NO: 84118):LGEMS (SEQ ID NO: 84228):MIVRS (SEQ ID NO: 84243):XKXS (SEQ ID NO: 84124), ASASPXX (SEQ ID NO: 84403):VSQDL (SEQ ID NO: 84387):SNIT (SEQ ID NO: 84118):LGEMS (SEQ ID NO: 84228):MIVKS (SEQ ID NO: 84242):XKXS (SEQ ID NO: 84124), ASASPXX (SEQ ID NO: 84403):VPQDL (SEQ ID NO: 84365):SNIT (SEQ ID NO: 84118):LGEMS (SEQ ID NO: 84228):MVVKS (SEQ ID NO: 84256):XKXS (SEQ ID NO: 84124), NDEGLEX (SEQ ID NO: 84426):VPTEE (SEQ ID NO: 84377):SNIT (SEQ ID NO: 84118):LGEMS (SEQ ID NO: 84228):FLQHN (SEQ ID NO: 84184):KXEXR (SEQ ID NO: 84213), SSVKXQP (SEQ ID NO: 84430):SRVHH (SEQ ID NO: 84297):SNIT (SEQ ID NO: 84118):LGEMS (SEQ ID NO: 84228):RLEEH (SEQ ID NO: 84279):LEXAXA (SEQ ID NO: 84400), RNVQXRP (SEQ ID NO: 84427):TQVQL (SEQ ID NO: 84340):SNIT (SEQ ID NO: 84118):LGEMS (SEQ ID NO: 84228):TLEDH (SEQ ID NO: 84307):LAXKXE (SEQ ID NO: 84399), RNVQXRP (SEQ ID NO: 84427):SRVQL (SEQ ID NO: 84301):RSVK (SEQ ID NO: 84115):KEVQV (SEQ ID NO: 84210):TLEEH (SEQ ID NO: 84308):LAXKXE (SEQ ID NO: 84399), KIPKAXX (SEQ ID NO: 84424):VPTEL (SEQ ID NO: 84378):RSVK (SEQ ID NO: 84115):KEVQV (SEQ ID NO: 84210):DMVVE (SEQ ID NO: 84161):GXGXR (SEQ ID NO: 84208), GIPEPXX (SEQ ID NO: 84419):VPEKM (SEQ ID NO: 84360):RSVK (SEQ ID NO: 84115):KEVQV (SEQ ID NO: 84210):NMTVE (SEQ ID NO: 84267):SXAXR (SEQ ID NO: 84303), SIPKAXX (SEQ ID NO: 84429):VPTEL (SEQ ID NO: 84378):RSVK (SEQ ID NO: 84115):KEVQV (SEQ ID NO: 84210):EMVVE (SEQ ID NO: 84175):GXGXR (SEQ ID NO: 84208), HVTKPTX (SEQ ID NO: 84422):APTKL (SEQ ID NO: 84131):RSVK (SEQ ID NO: 84115):KEVQV (SEQ ID NO: 84210):NMVVR (SEQ ID NO: 84275):SXGXH (SEQ ID NO: 84304), YVPKPXX (SEQ ID NO: 84433):APTKL (SEQ ID NO: 84131):RSVK (SEQ ID NO: 84115):KEVQV (SEQ ID NO: 84210):NMVVR (SEQ ID NO: 84275):SXGXH (SEQ ID NO: 84304), TVPKPXX (SEQ ID NO: 84432):APTQL (SEQ ID NO: 84134):RSVK (SEQ ID NO: 84115):KEVQV (SEQ ID NO: 84210):NMVVR (SEQ ID NO: 84275):AXGXH (SEQ ID NO: 84147), AVPKAXX (SEQ ID NO: 84404):APTKL (SEQ ID NO: 84131):RSVK (SEQ ID NO: 84115):KEVQV (SEQ ID NO: 84210):NMVVK (SEQ ID NO: 84274):AXGXH (SEQ ID NO: 84147), KVGKAXX (SEQ ID NO: 84425):VPTKL (SEQ ID NO: 84381):RSVK (SEQ ID NO: 84115):KEVQV (SEQ ID NO: 84210):EGMSVAE (SEQ ID NO: 84411):XGXR (SEQ ID NO: 84123), KASKAXX (SEQ ID NO: 84423):VPTKL (SEQ ID NO: 84381):RSVK (SEQ ID NO: 84115):KEVQV (SEQ ID NO: 84210):GMAVS (SEQ ID NO: 84194):EXGXR (SEQ ID NO: 84179), GSAGPXX (SEQ ID NO: 84420):TPTKM (SEQ ID NO: 84327):RSVK (SEQ ID NO: 84115):KEVQV (SEQ ID NO: 84210):GMVVD (SEQ ID NO: 84204):RXGXS (SEQ ID NO: 84291), AAPASXX (SEQ ID NO: 84401):VPARL (SEQ ID NO: 84352):RSVK (SEQ ID NO: 84115):KEVQV (SEQ ID NO: 84210):DMVVE (SEQ ID NO: 84161):AXGXR (SEQ ID NO: 84148), STPPTXX (SEQ ID NO: 84431):VPTRL (SEQ ID NO: 84385):RSVK (SEQ ID NO: 84115):KEVQV (SEQ ID NO: 84210):DMVVE (SEQ ID NO: 84161):SXGXR (SEQ ID NO: 84305), HVPKPXX (SEQ ID NO: 84421):APTKL (SEQ ID NO: 84131):RSVK (SEQ ID NO: 84115):KEVQV (SEQ ID NO: 84210):NMVVR (SEQ ID NO: 84275):SXGXH (SEQ ID NO: 84304), RVPSTXX (SEQ ID NO: 84428):APVKT (SEQ ID NO: 84144):RSVK (SEQ ID NO: 84115):KEVQV (SEQ ID NO: 84210):MIVEE (SEQ ID NO: 84241):XGXL (SEQ ID NO: 84122), ASAAPXX (SEQ ID NO: 84402):VPQAL (SEQ ID NO: 84364):RSVK (SEQ ID NO: 84115):KEVQV (SEQ ID NO: 84210):MIVRS (SEQ ID NO: 84243):XKXS (SEQ ID NO: 84124), ASASPXX (SEQ ID NO: 84403):VSQDL (SEQ ID NO: 84387):RSVK (SEQ ID NO: 84115):KEVQV (SEQ ID NO: 84210):MIVKS (SEQ ID NO: 84242):XKXS (SEQ ID NO: 84124), ASASPXX (SEQ ID NO: 84403):VPQDL (SEQ ID NO: 84365):RSVK (SEQ ID NO: 84115):KEVQV (SEQ ID NO: 84210):MVVKS (SEQ ID NO: 84256):XKXS (SEQ ID NO: 84124), NDEGLEX (SEQ ID NO: 84426):VPTEE (SEQ ID NO: 84377):RSVK (SEQ ID NO: 84115):KEVQV (SEQ ID NO: 84210):FLQHN (SEQ ID NO: 84184):KXEXR (SEQ ID NO: 84213), NDEGLEX (SEQ ID NO: 84426):VPTGQ (SEQ ID NO: 84379):RSVK (SEQ ID NO: 84115):KEVQV (SEQ ID NO: 84210):LEEHS (SEQ ID NO: 84217):QXEXR (SEQ ID NO: 84276), RNVQXRP (SEQ ID NO: 84427):TQVQL (SEQ ID NO: 84340):RSVK (SEQ ID NO: 84115):KEVQV (SEQ ID NO: 84210):TLEDH (SEQ ID NO: 84307):LAXKXE (SEQ ID NO: 84399), SSVKXQP (SEQ ID NO: 84430):TQVHH (SEQ ID NO: 84336):RPVQ (SEQ ID NO: 84114):KKATV (SEQ ID NO: 84212):RLEDH (SEQ ID NO: 84278):LEXAXA (SEQ ID NO: 84400), KIPKAXX (SEQ ID NO: 84424):VPTEL (SEQ ID NO: 84378):RPVQ (SEQ ID NO: 84114):KKATV (SEQ ID NO: 84212):DMVVE (SEQ ID NO: 84161):GXGXR (SEQ ID NO: 84208), GIPEPXX (SEQ ID NO: 84419):VPEKM (SEQ ID NO: 84360):RPVQ (SEQ ID NO: 84114):KKATV (SEQ ID NO: 84212):NMTVE (SEQ ID NO: 84267):SXAXR (SEQ ID NO: 84303), SIPKAXX (SEQ ID NO: 84429):VPTEL (SEQ ID NO: 84378):RPVQ (SEQ ID NO: 84114):KKATV (SEQ ID NO: 84212):EMVVE (SEQ ID NO: 84175):GXGXR (SEQ ID NO: 84208), HVTKPTX (SEQ ID NO: 84422):APTKL (SEQ ID NO: 84131):RPVQ (SEQ ID NO: 84114):KKATV (SEQ ID NO: 84212):NMVVR (SEQ ID NO: 84275):SXGXH (SEQ ID NO: 84304), YVPKPXX (SEQ ID NO: 84433):APTKL (SEQ ID NO: 84131):RPVQ (SEQ ID NO: 84114):KKATV (SEQ ID NO: 84212):NMVVR (SEQ ID NO: 84275):SXGXH (SEQ ID NO: 84304), TVPKPXX (SEQ ID NO: 84432):APTQL (SEQ ID NO: 84134):RPVQ (SEQ ID NO: 84114):KKATV (SEQ ID NO: 84212):NMVVR (SEQ ID NO: 84275):AXGXH (SEQ ID NO: 84147), AVPKAXX (SEQ ID NO: 84404):APTKL (SEQ ID NO: 84131):RPVQ (SEQ ID NO: 84114):KKATV (SEQ ID NO: 84212):NMVVK (SEQ ID NO: 84274):AXGXH (SEQ ID NO: 84147), KVGKAXX (SEQ ID NO: 84425):VPTKL (SEQ ID NO: 84381):RPVQ (SEQ ID NO: 84114):KKATV (SEQ ID NO: 84212):EGMSVAE (SEQ ID NO: 84411):XGXR (SEQ ID NO: 84123), KASKAXX (SEQ ID NO: 84423):VPTKL (SEQ ID NO: 84381):RPVQ (SEQ ID NO: 84114):KKATV (SEQ ID NO: 84212):GMAVS (SEQ ID NO: 84194):EXGXR (SEQ ID NO: 84179), GSAGPXX (SEQ ID NO: 84420):TPTKM (SEQ ID NO: 84327):RPVQ (SEQ ID NO: 84114):KKATV (SEQ ID NO: 84212):GMVVD (SEQ ID NO: 84204):RXGXS (SEQ ID NO: 84291), AAPASXX (SEQ ID NO: 84401):VPARL (SEQ ID NO: 84352):RPVQ (SEQ ID NO: 84114):KKATV (SEQ ID NO: 84212):DMVVE (SEQ ID NO: 84161):AXGXR (SEQ ID NO: 84148), STPPTXX (SEQ ID NO: 84431):VPTRL (SEQ ID NO: 84385):RPVQ (SEQ ID NO: 84114):KKATV (SEQ ID NO: 84212):DMVVE (SEQ ID NO: 84161):SXGXR (SEQ ID NO: 84305), HVPKPXX (SEQ ID NO: 84421):APTKL (SEQ ID NO: 84131):RPVQ (SEQ ID NO: 84114):KKATV (SEQ ID NO: 84212):NMVVR (SEQ ID NO: 84275):SXGXH (SEQ ID NO: 84304), RVPSTXX (SEQ ID NO: 84428):APVKT (SEQ ID NO: 84144):RPVQ (SEQ ID NO: 84114):KKATV (SEQ ID NO: 84212):MIVEE (SEQ ID NO: 84241):XGXL (SEQ ID NO: 84122), ASAAPXX (SEQ ID NO: 84402):VPQAL (SEQ ID NO: 84364):RPVQ (SEQ ID NO: 84114):KKATV (SEQ ID NO: 84212):MIVRS (SEQ ID NO: 84243):XKXS (SEQ ID NO: 84124), ASASPXX (SEQ ID NO: 84403):VSQDL (SEQ ID NO: 84387):RPVQ (SEQ ID NO: 84114):KKATV (SEQ ID NO: 84212):MIVKS (SEQ ID NO: 84242):XKXS (SEQ ID NO: 84124), ASASPXX (SEQ ID NO: 84403):VPQDL (SEQ ID NO: 84365):RPVQ (SEQ ID NO: 84114):KKATV (SEQ ID NO: 84212):MVVKS (SEQ ID NO: 84256):XKXS (SEQ ID NO: 84124), NDEGLEX (SEQ ID NO: 84426):VPTEE (SEQ ID NO: 84377):RPVQ (SEQ ID NO: 84114):KKATV (SEQ ID NO: 84212):FLQHN (SEQ ID NO: 84184):KXEXR (SEQ ID NO: 84213), NDEGLEX (SEQ ID NO: 84426):VPTGQ (SEQ ID NO: 84379):RPVQ (SEQ ID NO: 84114):KKATV (SEQ ID NO: 84212):LEEHS (SEQ ID NO: 84217):QXEXR (SEQ ID NO: 84276) and SSVKXQP (SEQ ID NO: 84430):SRVHH (SEQ ID NO: 84297):RPVQ (SEQ ID NO: 84114):KKATV (SEQ ID NO: 84212):RLEEH (SEQ ID NO: 84279):LEXAXA (SEQ ID NO: 84400).

[0404] In particular, in certain embodiments, the hexaplet PEP7:PEP5:PEP12:PEP2:PEP6:PEP8 is selected from the group consisting of GIPEPXX (SEQ ID NO: 84419):VPTKM (SEQ ID NO: 84382):SAIS-AA¹⁷-LYL (SEQ ID NO: 84881):LKNYQ (SEQ ID NO: 84230):NMVVE (SEQ ID NO: 84273):SXAXR (SEQ ID NO: 84303), SIPKAXX (SEQ ID NO: 84429):VPTEL (SEQ ID NO: 84378):SAIS-AA¹⁷-LYL (SEQ ID NO: 84881):LKNYQ (SEQ ID NO: 84230):EMVVE (SEQ ID NO: 84175):GXGXR (SEQ ID NO: 84208), HVTKPTX (SEQ ID NO: 84422):VPTKL (SEQ ID NO: 84381):SAIS-AA¹⁷-LYL (SEQ ID NO: 84881):LKNYQ (SEQ ID NO: 84230):NMVVE (SEQ ID NO: 84273):SXGXH (SEQ ID NO: 84304), YVPKPXX (SEQ ID NO: 84433):VPTKL (SEQ ID NO: 84381):SAIS-AA¹⁷-LYL (SEQ ID NO: 84881):LKNYQ (SEQ ID NO: 84230):NMVVE (SEQ ID NO: 84273):SXGXH (SEQ ID NO: 84304), TVPKPXX (SEQ ID NO: 84432):VPTQL (SEQ ID NO: 84384):SAIS-AA¹⁷-LYL (SEQ ID NO: 84881):LKNYQ (SEQ ID NO: 84230):NMVVE (SEQ ID NO: 84273):AXGXH (SEQ ID NO: 84147), AVPKAXX (SEQ ID NO: 84404):VPTKL (SEQ ID NO: 84381):SAIS-AA¹⁷-LYL (SEQ ID NO: 84881):LKNYQ (SEQ ID NO: 84230):NMVVE (SEQ ID NO: 84273):AXGXH (SEQ ID NO: 84147), KVGKAXX (SEQ ID NO: 84425):VPTKL (SEQ ID NO: 84381):SAIS-AA¹⁷-LYL (SEQ ID NO: 84881):LKNYQ (SEQ ID NO: 84230):EGMSVVE (SEQ ID NO: 84416):XGXR (SEQ ID NO: 84123), KASKAXX (SEQ ID NO: 84423):VPTKL (SEQ ID NO: 84381):SAIS-AA¹⁷-LYL (SEQ ID NO: 84881):LKNYQ (SEQ ID NO: 84230):GMVVE (SEQ ID NO: 84205):EXGXR (SEQ ID NO: 84179), GSAGPXX (SEQ ID NO: 84420):VPTKM (SEQ ID NO: 84382):SAIS-AA¹⁷-LYL (SEQ ID NO: 84881):LKNYQ (SEQ ID NO: 84230):GMVVE (SEQ ID NO: 84205):RXGXS (SEQ ID NO: 84291), AAPASXX (SEQ ID NO: 84401):VPTRL (SEQ ID NO: 84385):SAIS-AA¹⁷-LYL (SEQ ID NO: 84881):LKNYQ (SEQ ID NO: 84230):DMVVE (SEQ ID NO: 84161):AXGXR (SEQ ID NO: 84148), STPPTXX (SEQ ID NO: 84431):VPTRL (SEQ ID NO: 84385):SAIS-AA¹⁷-LYL (SEQ ID NO: 84881):LKNYQ (SEQ ID NO: 84230):DMVVE (SEQ ID NO: 84161):SXGXR (SEQ ID NO: 84305), HVPKPXX (SEQ ID NO: 84421):VPTKL (SEQ ID NO: 84381):SAIS-AA¹⁷-LYL (SEQ ID NO: 84881):LKNYQ (SEQ ID NO: 84230):NMVVE (SEQ ID NO: 84273):SXGXH (SEQ ID NO: 84304), RVPSTXX (SEQ ID NO: 84428):VPTKT (SEQ ID NO: 84383):SAIS-AA¹⁷-LYL (SEQ ID NO: 84881):LKNYQ (SEQ ID NO: 84230):MIVVE (SEQ ID NO: 84245):XGXL (SEQ ID NO: 84122), ASAAPXX (SEQ ID NO: 84402):VPTAL (SEQ ID NO: 84375):SAIS-AA¹⁷-LYL (SEQ ID NO: 84881):LKNYQ (SEQ ID NO: 84230):MIVVE (SEQ ID NO: 84245):XKXS (SEQ ID NO: 84124), ASASPXX (SEQ ID NO: 84403):VPTDL (SEQ ID NO: 84376):SAIS-AA¹⁷-LYL (SEQ ID NO: 84881):LKNYQ (SEQ ID NO: 84230):MIVVE (SEQ ID NO: 84245):XKXS (SEQ ID NO: 84124), ASASPXX (SEQ ID NO: 84403):VPTDL (SEQ ID NO: 84376):SAIS-AA¹⁷-LYL (SEQ ID NO: 84881):LKNYQ (SEQ ID NO: 84230):MVVVE (SEQ ID NO: 84259):XKXS (SEQ ID NO: 84124), NDEGLEX (SEQ ID NO: 84426):VPTEE (SEQ ID NO: 84377):SAIS-AA¹⁷-LYL (SEQ ID NO: 84881):LKNYQ (SEQ ID NO: 84230):FLVVE (SEQ ID NO: 84191):KXEXR (SEQ ID NO: 84213), NDEGLEX (SEQ ID NO: 84426):VPTGQ (SEQ ID NO: 84379):SAIS-AA¹⁷-LYL (SEQ ID NO: 84881):LKNYQ (SEQ ID NO: 84230):LEVVE (SEQ ID NO: 84225):QXEXR (SEQ ID NO: 84276), SSVKXQP (SEQ ID NO: 84430):VPTHH (SEQ ID NO: 84380):SAIS-AA¹⁷-LYL (SEQ ID NO: 84881):LKNYQ (SEQ ID NO: 84230):RLVVE (SEQ ID NO: 84288):LEXAXA (SEQ ID NO: 84400), RNVQXRP (SEQ ID NO: 84427):VPTQL (SEQ ID NO: 84384):SAIS-AA¹⁷-LYL (SEQ ID NO: 84881):LKNYQ (SEQ ID NO: 84230):TLVVE (SEQ ID NO: 84317):LAXKXE (SEQ ID NO: 84399), GIPEPXX (SEQ ID NO: 84419):VPEKM (SEQ ID NO: 84360):SAIS-AA¹⁷-LYL (SEQ ID NO: 84881):LKNYQ (SEQ ID NO: 84230):NMTVE (SEQ ID NO: 84267):SXAXR (SEQ ID NO: 84303), HVTKPTX (SEQ ID NO: 84422):APTKL (SEQ ID NO: 84131):SAIS-AA¹⁷-LYL (SEQ ID NO: 84881):LKNYQ (SEQ ID NO: 84230):NMVVR (SEQ ID NO: 84275):SXGXH (SEQ ID NO: 84304), YVPKPXX (SEQ ID NO: 84433):APTKL (SEQ ID NO: 84131):SAIS-AA¹⁷-LYL (SEQ ID NO: 84881):LKNYQ (SEQ ID NO: 84230):NMVVR (SEQ ID NO: 84275):SXGXH (SEQ ID NO: 84304), TVPKPXX (SEQ ID NO: 84432):APTQL (SEQ ID NO: 84134):SAIS-AA¹⁷-LYL (SEQ ID NO: 84881):LKNYQ (SEQ ID NO: 84230):NMVVR (SEQ ID NO: 84275):AXGXH (SEQ ID NO: 84147), AVPKAXX (SEQ ID NO: 84404):APTKL (SEQ ID NO: 84131):SAIS-AA¹⁷-LYL (SEQ ID NO: 84881):LKNYQ (SEQ ID NO: 84230):NMVVK (SEQ ID NO: 84274):AXGXH (SEQ ID NO: 84147), KVGKAXX (SEQ ID NO: 84425):VPTKL (SEQ ID NO: 84381):SAIS-AA¹⁷-LYL (SEQ ID NO: 84881):LKNYQ (SEQ ID NO: 84230):EGMSVAE (SEQ ID NO: 84411):XGXR (SEQ ID NO: 84123), KASKAXX (SEQ ID NO: 84423):VPTKL (SEQ ID NO: 84381):SAIS-AA¹⁷-LYL (SEQ ID NO: 84881):LKNYQ (SEQ ID NO: 84230):GMAVS (SEQ ID NO: 84194):EXGXR (SEQ ID NO: 84179), GSAGPXX (SEQ ID NO: 84420):TPTKM (SEQ ID NO: 84327):SAIS-AA¹⁷-LYL (SEQ ID NO: 84881):LKNYQ (SEQ ID NO: 84230):GMVVD (SEQ ID NO: 84204):RXGXS (SEQ ID NO: 84291), AAPASXX (SEQ ID NO: 84401):VPARL (SEQ ID NO: 84352):SAIS-AA¹⁷-LYL (SEQ ID NO: 84881):LKNYQ (SEQ ID NO: 84230):DMVVE (SEQ ID NO: 84161):AXGXR (SEQ ID NO: 84148), HVPKPXX (SEQ ID NO: 84421):APTKL (SEQ ID NO: 84131):SAIS-AA¹⁷-LYL (SEQ ID NO: 84881):LKNYQ (SEQ ID NO: 84230):NMVVR (SEQ ID NO: 84275):SXGXH (SEQ ID NO: 84304), RVPSTXX (SEQ ID NO: 84428):APVKT (SEQ ID NO: 84144):SAIS-AA¹⁷-LYL (SEQ ID NO: 84881):LKNYQ (SEQ ID NO: 84230):MIVEE (SEQ ID NO: 84241):XGXL (SEQ ID NO: 84122), ASAAPXX (SEQ ID NO: 84402):VPQAL (SEQ ID NO: 84364):SAIS-AA¹⁷-LYL (SEQ ID NO: 84881):LKNYQ (SEQ ID NO: 84230):MIVRS (SEQ ID NO: 84243):XKXS (SEQ ID NO: 84124), ASASPXX (SEQ ID NO: 84403):VSQDL (SEQ ID NO: 84387):SAIS-AA¹⁷-LYL (SEQ ID NO: 84881):LKNYQ (SEQ ID NO: 84230):MIVKS (SEQ ID NO: 84242):XKXS (SEQ ID NO: 84124), ASASPXX (SEQ ID NO: 84403):VPQDL (SEQ ID NO: 84365):SAIS-AA¹⁷-LYL (SEQ ID NO: 84881):LKNYQ (SEQ ID NO: 84230):MVVKS (SEQ ID NO: 84256):XKXS (SEQ ID NO: 84124), NDEGLEX (SEQ ID NO: 84426):VPTEE (SEQ ID NO: 84377):SAIS-AA¹⁷-LYL (SEQ ID NO: 84881):LKNYQ (SEQ ID NO: 84230):FLQHN (SEQ ID NO: 84184):KXEXR (SEQ ID NO: 84213), NDEGLEX (SEQ ID NO: 84426):VPTGQ (SEQ ID NO: 84379):SAIS-AA¹⁷-LYL (SEQ ID NO: 84881):LKNYQ (SEQ ID NO: 84230):LEEHS (SEQ ID NO: 84217):QXEXR (SEQ ID NO: 84276), SSVKXQP (SEQ ID NO: 84430):SRVHH (SEQ ID NO: 84297):SAIS-AA¹⁷-LYL (SEQ ID NO: 84881):LKNYQ (SEQ ID NO: 84230):RLEEH (SEQ ID NO: 84279):LEXAXA (SEQ ID NO: 84400), RNVQXRP (SEQ ID NO: 84427):TQVQL (SEQ ID NO: 84340):SAIS-AA¹⁷-LYL (SEQ ID NO: 84881):LKNYQ (SEQ ID NO: 84230):TLEDH (SEQ ID NO: 84307):LAXKXE (SEQ ID NO: 84399), KIPKAXX (SEQ ID NO: 84424):VPEEL (SEQ ID NO: 84356):SSLS-AA¹⁷-LFF (SEQ ID NO: 84889):LKVYP (SEQ ID NO: 84231):DMTVE (SEQ ID NO: 84155):GXGXR (SEQ ID NO: 84208), SIPKAXX (SEQ ID NO: 84429):VPEEL (SEQ ID NO: 84356):SSLS-AA¹⁷-LFF (SEQ ID NO: 84889):LKVYP (SEQ ID NO: 84231):EMTVE (SEQ ID NO: 84169):GXGXR (SEQ ID NO: 84208), HVTKPTX (SEQ ID NO: 84422):VPEKL (SEQ ID NO: 84359):SSLS-AA¹⁷-LFF (SEQ ID NO: 84889):LKVYP (SEQ ID NO: 84231):NMTVE (SEQ ID NO: 84267):SXGXH (SEQ ID NO: 84304), YVPKPXX (SEQ ID NO: 84433):VPEKL (SEQ ID NO: 84359):SSLS-AA¹⁷-LFF (SEQ ID NO: 84889):LKVYP (SEQ ID NO: 84231):NMTVE (SEQ ID NO: 84267):SXGXH (SEQ ID NO: 84304), TVPKPXX (SEQ ID NO: 84432):VPEQL (SEQ ID NO: 84362):SSLS-AA¹⁷-LFF (SEQ ID NO: 84889):LKVYP (SEQ ID NO: 84231):NMTVE (SEQ ID NO: 84267):AXGXH (SEQ ID NO: 84147), AVPKAXX (SEQ ID NO: 84404):VPEKL (SEQ ID NO: 84359):SSLS-AA¹⁷-LFF (SEQ ID NO: 84889):LKVYP (SEQ ID NO: 84231):NMTVE (SEQ ID NO: 84267):AXGXH (SEQ ID NO: 84147), KVGKAXX (SEQ ID NO: 84425):VPEKL (SEQ ID NO: 84359):SSLS-AA¹⁷-LFF (SEQ ID NO: 84889):LKVYP (SEQ ID NO: 84231):EGMSTVE (SEQ ID NO: 84410):XGXR (SEQ ID NO: 84123), KASKAXX (SEQ ID NO: 84423):VPEKL (SEQ ID NO: 84359):SSLS-AA¹⁷-LFF (SEQ ID NO: 84889):LKVYP (SEQ ID NO: 84231):GMTVE (SEQ ID NO: 84199):EXGXR (SEQ ID NO: 84179), GSAGPXX (SEQ ID NO: 84420):VPEKM (SEQ ID NO: 84360):SSLS-AA¹⁷-LFF (SEQ ID NO: 84889):LKVYP (SEQ ID NO: 84231):GMTVE (SEQ ID NO: 84199):RXGXS (SEQ ID NO: 84291), AAPASXX (SEQ ID NO: 84401):VPERL (SEQ ID NO: 84363):SSLS-AA¹⁷-LFF (SEQ ID NO: 84889):LKVYP (SEQ ID NO: 84231):DMTVE (SEQ ID NO: 84155):AXGXR (SEQ ID NO: 84148), STPPTXX (SEQ ID NO: 84431):VPERL (SEQ ID NO: 84363):SSLS-AA¹⁷-LFF (SEQ ID NO: 84889):LKVYP (SEQ ID NO: 84231):DMTVE (SEQ ID NO: 84155):SXGXR (SEQ ID NO: 84305), HVPKPXX (SEQ ID NO: 84421):VPEKL (SEQ ID NO: 84359):SSLS-AA¹⁷-LFF (SEQ ID NO: 84889):LKVYP (SEQ ID NO: 84231):NMTVE (SEQ ID NO: 84267):SXGXH (SEQ ID NO: 84304), RVPSTXX (SEQ ID NO: 84428):VPEKT (SEQ ID NO: 84361):SSLS-AA¹⁷-LFF (SEQ ID NO: 84889):LKVYP (SEQ ID NO: 84231):MITVE (SEQ ID NO: 84239):XGXL (SEQ ID NO: 84122), ASAAPXX (SEQ ID NO: 84402):VPEAL (SEQ ID NO: 84353):SSLS-AA¹⁷-LFF (SEQ ID NO: 84889):LKVYP (SEQ ID NO: 84231):MITVE (SEQ ID NO: 84239):XKXS (SEQ ID NO: 84124), ASASPXX (SEQ ID NO: 84403):VPEDL (SEQ ID NO: 84354):SSLS-AA¹⁷-LFF (SEQ ID NO: 84889):LKVYP (SEQ ID NO: 84231):MITVE (SEQ ID NO: 84239):XKXS (SEQ ID NO: 84124), ASASPXX (SEQ ID NO: 84403):VPEDL (SEQ ID NO: 84354):SSLS-AA¹⁷-LFF (SEQ ID NO: 84889):LKVYP (SEQ ID NO: 84231):MVTVE (SEQ ID NO: 84253):XKXS (SEQ ID NO: 84124), NDEGLEX (SEQ ID NO: 84426):VPEEE (SEQ ID NO: 84355):SSLS-AA¹⁷-LFF (SEQ ID NO: 84889):LKVYP (SEQ ID NO: 84231):FLTVE (SEQ ID NO: 84185):KXEXR (SEQ ID NO: 84213), NDEGLEX (SEQ ID NO: 84426):VPEGQ (SEQ ID NO: 84357):SSLS-AA¹⁷-LFF (SEQ ID NO: 84889):LKVYP (SEQ ID NO: 84231):LETVE (SEQ ID NO: 84219):QXEXR (SEQ ID NO: 84276), SSVKXQP (SEQ ID NO: 84430):VPEHH (SEQ ID NO: 84358):SSLS-AA¹⁷-LFF (SEQ ID NO: 84889):LKVYP (SEQ ID NO: 84231):RLTVE (SEQ ID NO: 84282):LEXAXA (SEQ ID NO: 84400), RNVQXRP (SEQ ID NO: 84427):VPEQL (SEQ ID NO: 84362):SSLS-AA¹⁷-LFF (SEQ ID NO: 84889):LKVYP (SEQ ID NO: 84231):TLTVE (SEQ ID NO: 84311):LAXKXE (SEQ ID NO: 84399), KIPKAXX (SEQ ID NO: 84424):VPTEL (SEQ ID NO: 84378):SSLS-AA¹⁷-LFF (SEQ ID NO: 84889):LKVYP (SEQ ID NO: 84231):DMVVE (SEQ ID NO: 84161):GXGXR (SEQ ID NO: 84208), SIPKAXX (SEQ ID NO: 84429):VPTEL (SEQ ID NO: 84378):SSLS-AA¹⁷-LFF (SEQ ID NO: 84889):LKVYP (SEQ ID NO: 84231):EMVVE (SEQ ID NO: 84175):GXGXR (SEQ ID NO: 84208), HVTKPTX (SEQ ID NO: 84422):APTKL (SEQ ID NO: 84131):SSLS-AA¹⁷-LFF (SEQ ID NO: 84889):LKVYP (SEQ ID NO: 84231):NMVVR (SEQ ID NO: 84275):SXGXH (SEQ ID NO: 84304), YVPKPXX (SEQ ID NO: 84433):APTKL (SEQ ID NO: 84131):SSLS-AA¹⁷-LFF (SEQ ID NO: 84889):LKVYP (SEQ ID NO: 84231):NMVVR (SEQ ID NO: 84275):SXGXH (SEQ ID NO: 84304), TVPKPXX (SEQ ID NO: 84432):APTQL (SEQ ID NO: 84134):SSLS-AA¹⁷-LFF (SEQ ID NO: 84889):LKVYP (SEQ ID NO: 84231):NMVVR (SEQ ID NO: 84275):AXGXH (SEQ ID NO: 84147), AVPKAXX (SEQ ID NO: 84404):APTKL (SEQ ID NO: 84131):SSLS-AA¹⁷-LFF (SEQ ID NO: 84889):LKVYP (SEQ ID NO: 84231):NMVVK (SEQ ID NO: 84274):AXGXH (SEQ ID NO: 84147), KVGKAXX (SEQ ID NO: 84425):VPTKL (SEQ ID NO: 84381):SSLS-AA¹⁷-LFF (SEQ ID NO: 84889):LKVYP (SEQ ID NO: 84231):EGMSVAE (SEQ ID NO: 84411):XGXR (SEQ ID NO: 84123), KASKAXX (SEQ ID NO: 84423):VPTKL (SEQ ID NO: 84381):SSLS-AA¹⁷-LFF (SEQ ID NO: 84889):LKVYP (SEQ ID NO: 84231):GMAVS (SEQ ID NO: 84194):EXGXR (SEQ ID NO: 84179), GSAGPXX (SEQ ID NO: 84420):TPTKM (SEQ ID NO: 84327):SSLS-AA¹⁷-LFF (SEQ ID NO: 84889):LKVYP (SEQ ID NO: 84231):GMVVD (SEQ ID NO: 84204):RXGXS (SEQ ID NO: 84291), AAPASXX (SEQ ID NO: 84401):VPARL (SEQ ID NO: 84352):SSLS-AA¹⁷-LFF (SEQ ID NO: 84889):LKVYP (SEQ ID NO: 84231):DMVVE (SEQ ID NO: 84161):AXGXR (SEQ ID NO: 84148), STPPTXX (SEQ ID NO: 84431):VPTRL (SEQ ID NO: 84385):SSLS-AA¹⁷-LFF (SEQ ID NO: 84889):LKVYP (SEQ ID NO: 84231):DMVVE (SEQ ID NO: 84161):SXGXR (SEQ ID NO: 84305), HVPKPXX (SEQ ID NO: 84421):APTKL (SEQ ID NO: 84131):SSLS-AA¹⁷-LFF (SEQ ID NO: 84889):LKVYP (SEQ ID NO: 84231):NMVVR (SEQ ID NO: 84275):SXGXH (SEQ ID NO: 84304), RVPSTXX (SEQ ID NO: 84428):APVKT (SEQ ID NO: 84144):SSLS-AA¹⁷-LFF (SEQ ID NO: 84889):LKVYP (SEQ ID NO: 84231):MIVEE (SEQ ID NO: 84241):XGXL (SEQ ID NO: 84122), ASAAPXX (SEQ ID NO: 84402):VPQAL (SEQ ID NO: 84364):SSLS-AA¹⁷-LFF (SEQ ID NO: 84889):LKVYP (SEQ ID NO: 84231):MIVRS (SEQ ID NO: 84243):XKXS (SEQ ID NO: 84124), ASASPXX (SEQ ID NO: 84403):VSQDL (SEQ ID NO: 84387):SSLS-AA¹⁷-LFF (SEQ ID NO: 84889):LKVYP (SEQ ID NO: 84231):MIVKS (SEQ ID NO: 84242):XKXS (SEQ ID NO: 84124), ASASPXX (SEQ ID NO: 84403):VPQDL (SEQ ID NO: 84365):SSLS-AA¹⁷-LFF (SEQ ID NO: 84889):LKVYP (SEQ ID NO: 84231):MVVKS (SEQ ID NO: 84256):XKXS (SEQ ID NO: 84124), NDEGLEX (SEQ ID NO: 84426):VPTEE (SEQ ID NO: 84377):SSLS-AA¹⁷-LFF (SEQ ID NO: 84889):LKVYP (SEQ ID NO: 84231):FLQHN (SEQ ID NO: 84184):KXEXR (SEQ ID NO: 84213), NDEGLEX (SEQ ID NO: 84426):VPTGQ (SEQ ID NO: 84379):SSLS-AA¹⁷-LFF (SEQ ID NO: 84889):LKVYP (SEQ ID NO: 84231):LEEHS (SEQ ID NO: 84217):QXEXR (SEQ ID NO: 84276), SSVKXQP (SEQ ID NO: 84430):SRVHH (SEQ ID NO: 84297):SSLS-AA¹⁷-LFF (SEQ ID NO: 84889):LKVYP (SEQ ID NO: 84231):RLEEH (SEQ ID NO: 84279):LEXAXA (SEQ ID NO: 84400), RNVQXRP (SEQ ID NO: 84427):TQVQL (SEQ ID NO: 84340):SSLS-AA¹⁷-LFF (SEQ ID NO: 84889):LKVYP (SEQ ID NO: 84231):TLEDH (SEQ ID NO: 84307):LAXKXE (SEQ ID NO: 84399), KIPKAXX (SEQ ID NO: 84424):VPTEL (SEQ ID NO: 84378):SAIS-AA¹⁷-LYL (SEQ ID NO: 84881):LKNYQ (SEQ ID NO: 84230):DMVVE (SEQ ID NO: 84161):GXGXR (SEQ ID NO: 84208), KIPKAXX (SEQ ID NO: 84424):APTEL (SEQ ID NO: 84128):NAIS-AA¹⁷-LYF (SEQ ID NO: 84878):LKKYR (SEQ ID NO: 84229):DMVVR (SEQ ID NO: 84163):GXGXR (SEQ ID NO: 84208), GIPEPXX (SEQ ID NO: 84419):APTKM (SEQ ID NO: 84132):NAIS-AA¹⁷-LYF (SEQ ID NO: 84878):LKKYR (SEQ ID NO: 84229):NMVVR (SEQ ID NO: 84275):SXAXR (SEQ ID NO: 84303), SIPKAXX (SEQ ID NO: 84429):APTEL (SEQ ID NO: 84128):NAIS-AA¹⁷-LYF (SEQ ID NO: 84878):LKKYR (SEQ ID NO: 84229):EMVVR (SEQ ID NO: 84177):GXGXR (SEQ ID NO: 84208), YVPKPXX (SEQ ID NO: 84433):APTKL (SEQ ID NO: 84131):NAIS-AA¹⁷-LYF (SEQ ID NO: 84878):LKKYR (SEQ ID NO: 84229):NMVVR (SEQ ID NO: 84275):SXGXH (SEQ ID NO: 84304), TVPKPXX (SEQ ID NO: 84432):APTQL (SEQ ID NO: 84134):NAIS-AA¹⁷-LYF (SEQ ID NO: 84878):LKKYR (SEQ ID NO: 84229):NMVVR (SEQ ID NO: 84275):AXGXH (SEQ ID NO: 84147), AVPKAXX (SEQ ID NO: 84404):APTKL (SEQ ID NO: 84131):NAIS-AA¹⁷-LYF (SEQ ID NO: 84878):LKKYR (SEQ ID NO: 84229):NMVVR (SEQ ID NO: 84275):AXGXH (SEQ ID NO: 84147), KVGKAXX (SEQ ID NO: 84425):APTKL (SEQ ID NO: 84131):NAIS-AA¹⁷-LYF (SEQ ID NO: 84878):LKKYR (SEQ ID NO: 84229):EGMSVVR (SEQ ID NO: 84418):XGXR (SEQ ID NO: 84123), KASKAXX (SEQ ID NO: 84423):APTKL (SEQ ID NO: 84131):NAIS-AA¹⁷-LYF (SEQ ID NO: 84878):LKKYR (SEQ ID NO: 84229):GMVVR (SEQ ID NO: 84207):EXGXR (SEQ ID NO: 84179), GSAGPXX (SEQ ID NO: 84420):APTKM (SEQ ID NO: 84132):NAIS-AA¹⁷-LYF (SEQ ID NO: 84878):LKKYR (SEQ ID NO: 84229):GMVVR (SEQ ID NO: 84207):RXGXS (SEQ ID NO: 84291), AAPASXX (SEQ ID NO: 84401):APTRL (SEQ ID NO: 84135):NAIS-AA¹⁷-LYF (SEQ ID NO: 84878):LKKYR (SEQ ID NO: 84229):DMVVR (SEQ ID NO: 84163):AXGXR (SEQ ID NO: 84148), STPPTXX (SEQ ID NO: 84431):APTRL (SEQ ID NO: 84135):NAIS-AA¹⁷-LYF (SEQ ID NO: 84878):LKKYR (SEQ ID NO: 84229):DMVVR (SEQ ID NO: 84163):SXGXR (SEQ ID NO: 84305), HVPKPXX (SEQ ID NO: 84421):APTKL (SEQ ID NO: 84131):NAIS-AA¹⁷-LYF (SEQ ID NO: 84878):LKKYR (SEQ ID NO: 84229):NMVVR (SEQ ID NO: 84275):SXGXH (SEQ ID NO: 84304), RVPSTXX (SEQ ID NO: 84428):APTKT (SEQ ID NO: 84133):NAIS-AA¹⁷-LYF (SEQ ID NO: 84878):LKKYR (SEQ ID NO: 84229):MIVVR (SEQ ID NO: 84247):XGXL (SEQ ID NO: 84122), ASAAPXX (SEQ ID NO: 84402):APTAL (SEQ ID NO: 84125):NAIS-AA¹⁷-LYF (SEQ ID NO: 84878):LKKYR (SEQ ID NO: 84229):MIVVR (SEQ ID NO: 84247):XKXS (SEQ ID NO: 84124), ASASPXX (SEQ ID NO: 84403):APTDL (SEQ ID NO: 84126):NAIS-AA¹⁷-LYF (SEQ ID NO: 84878):LKKYR (SEQ ID NO: 84229):MIVVR (SEQ ID NO: 84247):XKXS (SEQ ID NO: 84124), ASASPXX (SEQ ID NO: 84403):APTDL (SEQ ID NO: 84126):NAIS-AA¹⁷-LYF (SEQ ID NO: 84878):LKKYR (SEQ ID NO: 84229):MVVVR (SEQ ID NO: 84261):XKXS (SEQ ID NO: 84124), NDEGLEX (SEQ ID NO: 84426):APTEE (SEQ ID NO: 84127):NAIS-AA¹⁷-LYF (SEQ ID NO: 84878):LKKYR (SEQ ID NO: 84229):FLVVR (SEQ ID NO: 84193):KXEXR (SEQ ID NO: 84213), NDEGLEX (SEQ ID NO: 84426):APTGQ (SEQ ID NO: 84129):NAIS-AA¹⁷-LYF (SEQ ID NO: 84878):LKKYR (SEQ ID NO: 84229):LEVVR (SEQ ID NO: 84227):QXEXR (SEQ ID NO: 84276), SSVKXQP (SEQ ID NO: 84430):APTHH (SEQ ID NO: 84130):NAIS-AA¹⁷-LYF (SEQ ID NO: 84878):LKKYR (SEQ ID NO: 84229):RLVVR (SEQ ID NO: 84290):LEXAXA (SEQ ID NO: 84400), RNVQXRP (SEQ ID NO: 84427):APTQL (SEQ ID NO: 84134):NAIS-AA¹⁷-LYF (SEQ ID NO: 84878):LKKYR (SEQ ID NO: 84229):TLVVR (SEQ ID NO: 84319):LAXKXE (SEQ ID NO: 84399), KIPKAXX (SEQ ID NO: 84424):VPTEL (SEQ ID NO: 84378):NAIS-AA¹⁷-LYF (SEQ ID NO: 84878):LKKYR (SEQ ID NO: 84229):DMVVE (SEQ ID NO: 84161):GXGXR (SEQ ID NO: 84208), GIPEPXX (SEQ ID NO: 84419):VPEKM (SEQ ID NO: 84360):NAIS-AA¹⁷-LYF (SEQ ID NO: 84878):LKKYR (SEQ ID NO: 84229):NMTVE (SEQ ID NO: 84267):SXAXR (SEQ ID NO: 84303), SIPKAXX (SEQ ID NO: 84429):VPTEL (SEQ ID NO: 84378):NAIS-AA¹⁷-LYF (SEQ ID NO: 84878):LKKYR (SEQ ID NO: 84229):EMVVE (SEQ ID NO: 84175):GXGXR (SEQ ID NO: 84208), AVPKAXX (SEQ ID NO: 84404):APTKL (SEQ ID NO: 84131):NAIS-AA¹⁷-LYF (SEQ ID NO: 84878):LKKYR (SEQ ID NO: 84229):NMVVK (SEQ ID NO: 84274):AXGXH (SEQ ID NO: 84147), KVGKAXX (SEQ ID NO: 84425):VPTKL (SEQ ID NO: 84381):NAIS-AA¹⁷-LYF (SEQ ID NO: 84878):LKKYR (SEQ ID NO: 84229):EGMSVAE (SEQ ID NO: 84411):XGXR (SEQ ID NO: 84123), KASKAXX (SEQ ID NO: 84423):VPTKL (SEQ ID NO: 84381):NAIS-AA¹⁷-LYF (SEQ ID NO: 84878):LKKYR (SEQ ID NO: 84229):GMAVS (SEQ ID NO: 84194):EXGXR (SEQ ID NO: 84179), GSAGPXX (SEQ ID NO: 84420):TPTKM (SEQ ID NO: 84327):NAIS-AA¹⁷-LYF (SEQ ID NO: 84878):LKKYR (SEQ ID NO: 84229):GMVVD (SEQ ID NO: 84204):RXGXS (SEQ ID NO: 84291), AAPASXX (SEQ ID NO: 84401):VPARL (SEQ ID NO: 84352):NAIS-AA¹⁷-LYF (SEQ ID NO: 84878):LKKYR (SEQ ID NO: 84229):DMVVE (SEQ ID NO: 84161):AXGXR (SEQ ID NO: 84148), STPPTXX (SEQ ID NO: 84431):VPTRL (SEQ ID NO: 84385):NAIS-AA¹⁷-LYF (SEQ ID NO: 84878):LKKYR (SEQ ID NO: 84229):DMVVE (SEQ ID NO: 84161):SXGXR (SEQ ID NO: 84305), RVPSTXX (SEQ ID NO: 84428):APVKT (SEQ ID NO: 84144):NAIS-AA¹⁷-LYF (SEQ ID NO: 84878):LKKYR (SEQ ID NO: 84229):MIVEE (SEQ ID NO: 84241):XGXL (SEQ ID NO: 84122), ASAAPXX (SEQ ID NO: 84402):VPQAL (SEQ ID NO: 84364):NAIS-AA¹⁷-LYF (SEQ ID NO: 84878):LKKYR (SEQ ID NO: 84229):MIVRS (SEQ ID NO: 84243):XKXS (SEQ ID NO: 84124), ASASPXX (SEQ ID NO: 84403):VSQDL (SEQ ID NO: 84387):NAIS-AA¹⁷-LYF (SEQ ID NO: 84878):LKKYR (SEQ ID NO: 84229):MIVKS (SEQ ID NO: 84242):XKXS (SEQ ID NO: 84124), ASASPXX (SEQ ID NO: 84403):VPQDL (SEQ ID NO: 84365):NAIS-AA¹⁷-LYF (SEQ ID NO: 84878):LKKYR (SEQ ID NO: 84229):MVVKS (SEQ ID NO: 84256):XKXS (SEQ ID NO: 84124), NDEGLEX (SEQ ID NO: 84426):VPTEE (SEQ ID NO: 84377):NAIS-AA¹⁷-LYF (SEQ ID NO: 84878):LKKYR (SEQ ID NO: 84229):FLQHN (SEQ ID NO: 84184):KXEXR (SEQ ID NO: 84213), NDEGLEX (SEQ ID NO: 84426):VPTGQ (SEQ ID NO: 84379):NAIS-AA¹⁷-LYF (SEQ ID NO: 84878):LKKYR (SEQ ID NO: 84229):LEEHS (SEQ ID NO: 84217):QXEXR (SEQ ID NO: 84276), SSVKXQP (SEQ ID NO: 84430):SRVHH (SEQ ID NO: 84297):NAIS-AA¹⁷-LYF (SEQ ID NO: 84878):LKKYR (SEQ ID NO: 84229):RLEEH (SEQ ID NO: 84279):LEXAXA (SEQ ID NO: 84400), RNVQXRP (SEQ ID NO: 84427):TQVQL (SEQ ID NO: 84340):NAIS-AA¹⁷-LYF (SEQ ID NO: 84878):LKKYR (SEQ ID NO: 84229):TLEDH (SEQ ID NO: 84307):LAXKXE (SEQ ID NO: 84399), HVTKPTX (SEQ ID NO: 84422):APTKL (SEQ ID NO: 84131):NAIS-AA¹⁷-LYF (SEQ ID NO: 84878):LKKYR (SEQ ID NO: 84229):NMVVR (SEQ ID NO: 84275):SXGXH (SEQ ID NO: 84304), KIPKAXX (SEQ ID NO: 84424):APTEL (SEQ ID NO: 84128):SATS-AA¹⁷-LYY (SEQ ID NO: 84882):LRKHR (SEQ ID NO: 84233):DMVVK (SEQ ID NO: 84162):GXGXR (SEQ ID NO: 84208), GIPEPXX (SEQ ID NO: 84419):APTKM (SEQ ID NO: 84132):SATS-AA¹⁷-LYY (SEQ ID NO: 84882):LRKHR (SEQ ID NO: 84233):NMVVK (SEQ ID NO: 84274):SXAXR (SEQ ID NO: 84303), SIPKAXX (SEQ ID NO: 84429):APTEL (SEQ ID NO: 84128):SATS-AA¹⁷-LYY (SEQ ID NO: 84882):LRKHR (SEQ ID NO: 84233):EMVVK (SEQ ID NO: 84176):GXGXR (SEQ ID NO: 84208), HVTKPTX (SEQ ID NO: 84422):APTKL (SEQ ID NO: 84131):SATS-AA¹⁷-LYY (SEQ ID NO: 84882):LRKHR (SEQ ID NO: 84233):NMVVK (SEQ ID NO: 84274):SXGXH (SEQ ID NO: 84304), YVPKPXX (SEQ ID NO: 84433):APTKL (SEQ ID NO: 84131):SATS-AA¹⁷-LYY (SEQ ID NO: 84882):LRKHR (SEQ ID NO: 84233):NMVVK (SEQ ID NO: 84274):SXGXH (SEQ ID NO: 84304), TVPKPXX (SEQ ID NO: 84432):APTQL (SEQ ID NO: 84134):SATS-AA¹⁷-LYY (SEQ ID NO: 84882):LRKHR (SEQ ID NO: 84233):NMVVK (SEQ ID NO: 84274):AXGXH (SEQ ID NO: 84147), KVGKAXX (SEQ ID NO: 84425):APTKL (SEQ ID NO: 84131):SATS-AA¹⁷-LYY (SEQ ID NO: 84882):LRKHR (SEQ ID NO: 84233):EGMSVVK (SEQ ID NO: 84417):XGXR (SEQ ID NO: 84123), KASKAXX (SEQ ID NO: 84423):APTKL (SEQ ID NO: 84131):SATS-AA¹⁷-LYY (SEQ ID NO: 84882):LRKHR (SEQ ID NO: 84233):GMVVK (SEQ ID NO: 84206):EXGXR (SEQ ID NO: 84179), GSAGPXX (SEQ ID NO: 84420):APTKM (SEQ ID NO: 84132):SATS-AA¹⁷-LYY (SEQ ID NO: 84882):LRKHR (SEQ ID NO: 84233):GMVVK (SEQ ID NO: 84206):RXGXS (SEQ ID NO: 84291), AAPASXX (SEQ ID NO: 84401):APTRL (SEQ ID NO: 84135):SATS-AA¹⁷-LYY (SEQ ID NO: 84882):LRKHR (SEQ ID NO: 84233):DMVVK (SEQ ID NO: 84162):AXGXR (SEQ ID NO: 84148), STPPTXX (SEQ ID NO: 84431):APTRL (SEQ ID NO: 84135):SATS-AA¹⁷-LYY (SEQ ID NO: 84882):LRKHR (SEQ ID NO: 84233):DMVVK (SEQ ID NO: 84162):SXGXR (SEQ ID NO: 84305), HVPKPXX (SEQ ID NO: 84421):APTKL (SEQ ID NO: 84131):SATS-AA¹⁷-LYY (SEQ ID NO: 84882):LRKHR (SEQ ID NO: 84233):NMVVK (SEQ ID NO: 84274):SXGXH (SEQ ID NO: 84304), RVPSTXX (SEQ ID NO: 84428):APTKT (SEQ ID NO: 84133):SATS-AA¹⁷-LYY (SEQ ID NO: 84882):LRKHR (SEQ ID NO: 84233):MIVVK (SEQ ID NO: 84246):XGXL (SEQ ID NO: 84122), ASAAPXX (SEQ ID NO: 84402):APTAL (SEQ ID NO: 84125):SATS-AA¹⁷-LYY (SEQ ID NO: 84882):LRKHR (SEQ ID NO: 84233):MIVVK (SEQ ID NO: 84246):XKXS (SEQ ID NO: 84124), ASASPXX (SEQ ID NO: 84403):APTDL (SEQ ID NO: 84126):SATS-AA¹⁷-LYY (SEQ ID NO: 84882):LRKHR (SEQ ID NO: 84233):MIVVK (SEQ ID NO: 84246):XKXS (SEQ ID NO: 84124), ASASPXX (SEQ ID NO: 84403):APTDL (SEQ ID NO: 84126):SATS-AA¹⁷-LYY (SEQ ID NO: 84882):LRKHR (SEQ ID NO: 84233):MVVVK (SEQ ID NO: 84260):XKXS (SEQ ID NO: 84124), NDEGLEX (SEQ ID NO: 84426):APTEE (SEQ ID NO: 84127):SATS-AA¹⁷-LYY (SEQ ID NO: 84882):LRKHR (SEQ ID NO: 84233):FLVVK (SEQ ID NO: 84192):KXEXR (SEQ ID NO: 84213), NDEGLEX (SEQ ID NO: 84426):APTGQ (SEQ ID NO: 84129):SATS-AA¹⁷-LYY (SEQ ID NO: 84882):LRKHR (SEQ ID NO: 84233):LEVVK (SEQ ID NO: 84226):QXEXR (SEQ ID NO: 84276), SSVKXQP (SEQ ID NO: 84430):APTHH (SEQ ID NO: 84130):SATS-AA¹⁷-LYY (SEQ ID NO: 84882):LRKHR (SEQ ID NO: 84233):RLVVK (SEQ ID NO: 84289):LEXAXA (SEQ ID NO: 84400), RNVQXRP (SEQ ID NO: 84427):APTQL (SEQ ID NO: 84134):SATS-AA¹⁷-LYY (SEQ ID NO: 84882):LRKHR (SEQ ID NO: 84233):TLVVK (SEQ ID NO: 84318):LAXKXE (SEQ ID NO: 84399), KIPKAXX (SEQ ID NO: 84424):VPTEL (SEQ ID NO: 84378):SATS-AA¹⁷-LYY (SEQ ID NO: 84882):LRKHR (SEQ ID NO: 84233):DMVVE (SEQ ID NO: 84161):GXGXR (SEQ ID NO: 84208), GIPEPXX (SEQ ID NO: 84419):VPEKM (SEQ ID NO: 84360):SATS-AA¹⁷-LYY (SEQ ID NO: 84882):LRKHR (SEQ ID NO: 84233):NMTVE (SEQ ID NO: 84267):SXAXR (SEQ ID NO: 84303), SIPKAXX (SEQ ID NO: 84429):VPTEL (SEQ ID NO: 84378):SATS-AA¹⁷-LYY (SEQ ID NO: 84882):LRKHR (SEQ ID NO: 84233):EMVVE (SEQ ID NO: 84175):GXGXR (SEQ ID NO: 84208), HVTKPTX (SEQ ID NO: 84422):APTKL (SEQ ID NO: 84131):SATS-AA¹⁷-LYY (SEQ ID NO: 84882):LRKHR (SEQ ID NO: 84233):NMVVR (SEQ ID NO: 84275):SXGXH (SEQ ID NO: 84304), YVPKPXX (SEQ ID NO: 84433):APTKL (SEQ ID NO: 84131):SATS-AA¹⁷-LYY (SEQ ID NO: 84882):LRKHR (SEQ ID NO: 84233):NMVVR (SEQ ID NO: 84275):SXGXH (SEQ ID NO: 84304), TVPKPXX (SEQ ID NO: 84432):APTQL (SEQ ID NO: 84134):SATS-AA¹⁷-LYY (SEQ ID NO: 84882):LRKHR (SEQ ID NO: 84233):NMVVR (SEQ ID NO: 84275):AXGXH (SEQ ID NO: 84147), KVGKAXX (SEQ ID NO: 84425):VPTKL (SEQ ID NO: 84381):SATS-AA¹⁷-LYY (SEQ ID NO: 84882):LRKHR (SEQ ID NO: 84233):EGMSVAE (SEQ ID NO: 84411):XGXR (SEQ ID NO: 84123), KASKAXX (SEQ ID NO: 84423):VPTKL (SEQ ID NO: 84381):SATS-AA¹⁷-LYY (SEQ ID NO: 84882):LRKHR (SEQ ID NO: 84233):GMAVS (SEQ ID NO: 84194):EXGXR (SEQ ID NO: 84179), GSAGPXX (SEQ ID NO: 84420):TPTKM (SEQ ID NO: 84327):SATS-AA¹⁷-LYY (SEQ ID NO: 84882):LRKHR (SEQ ID NO: 84233):GMVVD (SEQ ID NO: 84204):RXGXS (SEQ ID NO: 84291), AAPASXX (SEQ ID NO: 84401):VPARL (SEQ ID NO: 84352):SATS-AA¹⁷-LYY (SEQ ID NO: 84882):LRKHR (SEQ ID NO: 84233):DMVVE (SEQ ID NO: 84161):AXGXR (SEQ ID NO: 84148), STPPTXX (SEQ ID NO: 84431):VPTRL (SEQ ID NO: 84385):SATS-AA¹⁷-LYY (SEQ ID NO: 84882):LRKHR (SEQ ID NO: 84233):DMVVE (SEQ ID NO: 84161):SXGXR (SEQ ID NO: 84305), HVPKPXX (SEQ ID NO: 84421):APTKL (SEQ ID NO: 84131):SATS-AA¹⁷-LYY (SEQ ID NO: 84882):LRKHR (SEQ ID NO: 84233):NMVVR (SEQ ID NO: 84275):SXGXH (SEQ ID NO: 84304), RVPSTXX (SEQ ID NO: 84428):APVKT (SEQ ID NO: 84144):SATS-AA¹⁷-LYY (SEQ ID NO: 84882):LRKHR (SEQ ID NO: 84233):MIVEE (SEQ ID NO: 84241):XGXL (SEQ ID NO: 84122), ASAAPXX (SEQ ID NO: 84402):VPQAL (SEQ ID NO: 84364):SATS-AA¹⁷-LYY (SEQ ID NO: 84882):LRKHR (SEQ ID NO: 84233):MIVRS (SEQ ID NO: 84243):XKXS (SEQ ID NO: 84124), ASASPXX (SEQ ID NO: 84403):VSQDL (SEQ ID NO: 84387):SATS-AA¹⁷-LYY (SEQ ID NO: 84882):LRKHR (SEQ ID NO: 84233):MIVKS (SEQ ID NO: 84242):XKXS (SEQ ID NO: 84124), ASASPXX (SEQ ID NO: 84403):VPQDL (SEQ ID NO: 84365):SATS-AA¹⁷-LYY (SEQ ID NO: 84882):LRKHR (SEQ ID NO: 84233):MVVKS (SEQ ID NO: 84256):XKXS (SEQ ID NO: 84124), NDEGLEX (SEQ ID NO: 84426):VPTEE (SEQ ID NO: 84377):SATS-AA¹⁷-LYY (SEQ ID NO: 84882):LRKHR (SEQ ID NO: 84233):FLQHN (SEQ ID NO: 84184):KXEXR (SEQ ID NO: 84213), NDEGLEX (SEQ ID NO: 84426):VPTGQ (SEQ ID NO: 84379):SATS-AA¹⁷-LYY (SEQ ID NO: 84882):LRKHR (SEQ ID NO: 84233):LEEHS (SEQ ID NO: 84217):QXEXR (SEQ ID NO: 84276), SSVKXQP (SEQ ID NO: 84430):SRVHH (SEQ ID NO: 84297):SATS-AA¹⁷-LYY (SEQ ID NO: 84882):LRKHR (SEQ ID NO: 84233):RLEEH (SEQ ID NO: 84279):LEXAXA (SEQ ID NO: 84400), RNVQXRP (SEQ ID NO: 84427):TQVQL (SEQ ID NO: 84340):SATS-AA¹⁷-LYY (SEQ ID NO: 84882):LRKHR (SEQ ID NO: 84233):TLEDH (SEQ ID NO: 84307):LAXKXE (SEQ ID NO: 84399), KIPKAXX (SEQ ID NO: 84424):VPTEL (SEQ ID NO: 84378):SPIS-AA¹⁷-LYK (SEQ ID NO: 84887):LKYHY (SEQ ID NO: 84232):DMVAE (SEQ ID NO: 84156):GXGXR (SEQ ID NO: 84208), GIPEPXX (SEQ ID NO: 84419):VPTKM (SEQ ID NO: 84382):SPIS-AA¹⁷-LYK (SEQ ID NO: 84887):LKYHY (SEQ ID NO: 84232):NMVAE (SEQ ID NO: 84268):SXAXR (SEQ ID NO: 84303), SIPKAXX (SEQ ID NO: 84429):VPTEL (SEQ ID NO: 84378):SPIS-AA¹⁷-LYK (SEQ ID NO: 84887):LKYHY (SEQ ID NO: 84232):EMVAE (SEQ ID NO: 84170):GXGXR (SEQ ID NO: 84208), HVTKPTX (SEQ ID NO: 84422):VPTKL (SEQ ID NO: 84381):SPIS-AA¹⁷-LYK (SEQ ID NO: 84887):LKYHY (SEQ ID NO: 84232):NMVAE (SEQ ID NO: 84268):SXGXH (SEQ ID NO: 84304), YVPKPXX (SEQ ID NO: 84433):VPTKL (SEQ ID NO: 84381):SPIS-AA¹⁷-LYK (SEQ ID NO: 84887):LKYHY (SEQ ID NO: 84232):NMVAE (SEQ ID NO: 84268):SXGXH (SEQ ID NO: 84304), TVPKPXX (SEQ ID NO: 84432):VPTQL (SEQ ID NO: 84384):SPIS-AA¹⁷-LYK (SEQ ID NO: 84887):LKYHY (SEQ ID NO: 84232):NMVAE (SEQ ID NO: 84268):AXGXH (SEQ ID NO: 84147), AVPKAXX (SEQ ID NO: 84404):VPTKL (SEQ ID NO: 84381):SPIS-AA¹⁷-LYK (SEQ ID NO: 84887):LKYHY (SEQ ID NO: 84232):NMVAE (SEQ ID NO: 84268):AXGXH (SEQ ID NO: 84147), KASKAXX (SEQ ID NO: 84423):VPTKL (SEQ ID NO: 84381):SPIS-AA¹⁷-LYK (SEQ ID NO: 84887):LKYHY (SEQ ID NO: 84232):GMVAE (SEQ ID NO: 84200):EXGXR (SEQ ID NO: 84179), GSAGPXX (SEQ ID NO: 84420):VPTKM (SEQ ID NO: 84382):SPIS-AA¹⁷-LYK (SEQ ID NO: 84887):LKYHY (SEQ ID NO: 84232):GMVAE (SEQ ID NO: 84200):RXGXS (SEQ ID NO: 84291), AAPASXX (SEQ ID NO: 84401):VPTRL (SEQ ID NO: 84385):SPIS-AA¹⁷-LYK (SEQ ID NO: 84887):LKYHY (SEQ ID NO: 84232):DMVAE (SEQ ID NO: 84156):AXGXR (SEQ ID NO: 84148), STPPTXX (SEQ ID NO: 84431):VPTRL (SEQ ID NO: 84385):SPIS-AA¹⁷-LYK (SEQ ID NO: 84887):LKYHY (SEQ ID NO: 84232):DMVAE (SEQ ID NO: 84156):SXGXR (SEQ ID NO: 84305), HVPKPXX (SEQ ID NO: 84421):VPTKL (SEQ ID NO: 84381):SPIS-AA¹⁷-LYK (SEQ ID NO: 84887):LKYHY (SEQ ID NO: 84232):NMVAE (SEQ ID NO: 84268):SXGXH (SEQ ID NO: 84304), RVPSTXX (SEQ ID NO: 84428):VPTKT (SEQ ID NO: 84383):SPIS-AA¹⁷-LYK (SEQ ID NO: 84887):LKYHY (SEQ ID NO: 84232):MIVAE (SEQ ID NO: 84240):XGXL (SEQ ID NO: 84122), ASAAPXX (SEQ ID NO: 84402):VPTAL (SEQ ID NO: 84375):SPIS-AA¹⁷-LYK (SEQ ID NO: 84887):LKYHY (SEQ ID NO: 84232):MIVAE (SEQ ID NO: 84240):XKXS (SEQ ID NO: 84124), ASASPXX (SEQ ID NO: 84403):VPTDL (SEQ ID NO: 84376):SPIS-AA¹⁷-LYK (SEQ ID NO: 84887):LKYHY (SEQ ID NO: 84232):MIVAE (SEQ ID NO: 84240):XKXS (SEQ ID NO: 84124), ASASPXX (SEQ ID NO: 84403):VPTDL (SEQ ID NO: 84376):SPIS-AA¹⁷-LYK (SEQ ID NO: 84887):LKYHY (SEQ ID NO: 84232):MVVAE (SEQ ID NO: 84254):XKXS (SEQ ID NO: 84124), NDEGLEX (SEQ ID NO: 84426):VPTEE (SEQ ID NO: 84377):SPIS-AA¹⁷-LYK (SEQ ID NO: 84887):LKYHY (SEQ ID NO: 84232):FLVAE (SEQ ID NO: 84186):KXEXR (SEQ ID NO: 84213), NDEGLEX (SEQ ID NO: 84426):VPTGQ (SEQ ID NO: 84379):SPIS-AA¹⁷-LYK (SEQ ID NO: 84887):LKYHY (SEQ ID NO: 84232):LEVAE (SEQ ID NO: 84220):QXEXR (SEQ ID NO: 84276), SSVKXQP (SEQ ID NO: 84430):VPTHH (SEQ ID NO: 84380):SPIS-AA¹⁷-LYK (SEQ ID NO: 84887):LKYHY (SEQ ID NO: 84232):RLVAE (SEQ ID NO: 84283):LEXAXA (SEQ ID NO: 84400), RNVQXRP (SEQ ID NO: 84427):VPTQL (SEQ ID NO: 84384):SPIS-AA¹⁷-LYK (SEQ ID NO: 84887):LKYHY (SEQ ID NO: 84232):TLVAE (SEQ ID NO: 84312):LAXKXE (SEQ ID NO: 84399), KIPKAXX (SEQ ID NO: 84424):VPTEL (SEQ ID NO: 84378):SPIS-AA¹⁷-LYK (SEQ ID NO: 84887):LKYHY (SEQ ID NO: 84232):DMVVE (SEQ ID NO: 84161):GXGXR (SEQ ID NO: 84208), GIPEPXX (SEQ ID NO: 84419):VPEKM (SEQ ID NO: 84360):SPIS-AA¹⁷-LYK (SEQ ID NO: 84887):LKYHY (SEQ ID NO: 84232):NMTVE (SEQ ID NO: 84267):SXAXR (SEQ ID NO: 84303), SIPKAXX (SEQ ID NO: 84429):VPTEL (SEQ ID NO: 84378):SPIS-AA¹⁷-LYK (SEQ ID NO: 84887):LKYHY (SEQ ID NO: 84232):EMVVE (SEQ ID NO: 84175):GXGXR (SEQ ID NO: 84208), HVTKPTX (SEQ ID NO: 84422):APTKL (SEQ ID NO: 84131):SPIS-AA¹⁷-LYK (SEQ ID NO: 84887):LKYHY (SEQ ID NO: 84232):NMVVR (SEQ ID NO: 84275):SXGXH (SEQ ID NO: 84304), YVPKPXX (SEQ ID NO: 84433):APTKL (SEQ ID NO: 84131):SPIS-AA¹⁷-LYK (SEQ ID NO: 84887):LKYHY (SEQ ID NO: 84232):NMVVR (SEQ ID NO: 84275):SXGXH (SEQ ID NO: 84304), TVPKPXX (SEQ ID NO: 84432):APTQL (SEQ ID NO: 84134):SPIS-AA¹⁷-LYK (SEQ ID NO: 84887):LKYHY (SEQ ID NO: 84232):NMVVR (SEQ ID NO: 84275):AXGXH (SEQ ID NO: 84147), AVPKAXX (SEQ ID NO: 84404):APTKL (SEQ ID NO: 84131):SPIS-AA¹⁷-LYK (SEQ ID NO: 84887):LKYHY (SEQ ID NO: 84232):NMVVK (SEQ ID NO: 84274):AXGXH (SEQ ID NO: 84147), KASKAXX (SEQ ID NO: 84423):VPTKL (SEQ ID NO: 84381):SPIS-AA¹⁷-LYK (SEQ ID NO: 84887):LKYHY (SEQ ID NO: 84232):GMAVS (SEQ ID NO: 84194):EXGXR (SEQ ID NO: 84179), GSAGPXX (SEQ ID NO: 84420):TPTKM (SEQ ID NO: 84327):SPIS-AA¹⁷-LYK (SEQ ID NO: 84887):LKYHY (SEQ ID NO: 84232):GMVVD (SEQ ID NO: 84204):RXGXS (SEQ ID NO: 84291), AAPASXX (SEQ ID NO: 84401):VPARL (SEQ ID NO: 84352):SPIS-AA¹⁷-LYK (SEQ ID NO: 84887):LKYHY (SEQ ID NO: 84232):DMVVE (SEQ ID NO: 84161):AXGXR (SEQ ID NO: 84148), STPPTXX (SEQ ID NO: 84431):VPTRL (SEQ ID NO: 84385):SPIS-AA¹⁷-LYK (SEQ ID NO: 84887):LKYHY (SEQ ID NO: 84232):DMVVE (SEQ ID NO: 84161):SXGXR (SEQ ID NO: 84305), HVPKPXX (SEQ ID NO: 84421):APTKL (SEQ ID NO: 84131):SPIS-AA¹⁷-LYK (SEQ ID NO: 84887):LKYHY (SEQ ID NO: 84232):NMVVR (SEQ ID NO: 84275):SXGXH (SEQ ID NO: 84304), RVPSTXX (SEQ ID NO: 84428):APVKT (SEQ ID NO: 84144):SPIS-AA¹⁷-LYK (SEQ ID NO: 84887):LKYHY (SEQ ID NO: 84232):MIVEE (SEQ ID NO: 84241):XGXL (SEQ ID NO: 84122), ASAAPXX (SEQ ID NO: 84402):VPQAL (SEQ ID NO: 84364):SPIS-AA¹⁷-LYK (SEQ ID NO: 84887):LKYHY (SEQ ID NO: 84232):MIVRS (SEQ ID NO: 84243):XKXS (SEQ ID NO: 84124), ASASPXX (SEQ ID NO: 84403):VSQDL (SEQ ID NO: 84387):SPIS-AA¹⁷-LYK (SEQ ID NO: 84887):LKYHY (SEQ ID NO: 84232):MIVKS (SEQ ID NO: 84242):XKXS (SEQ ID NO: 84124), ASASPXX (SEQ ID NO: 84403):VPQDL (SEQ ID NO: 84365):SPIS-AA¹⁷-LYK (SEQ ID NO: 84887):LKYHY (SEQ ID NO: 84232):MVVKS (SEQ ID NO: 84256):XKXS (SEQ ID NO: 84124), NDEGLEX (SEQ ID NO: 84426):VPTEE (SEQ ID NO: 84377):SPIS-AA¹⁷-LYK (SEQ ID NO: 84887):LKYHY (SEQ ID NO: 84232):FLQHN (SEQ ID NO: 84184):KXEXR (SEQ ID NO: 84213), NDEGLEX (SEQ ID NO: 84426):VPTGQ (SEQ ID NO: 84379):SPIS-AA¹⁷-LYK (SEQ ID NO: 84887):LKYHY (SEQ ID NO: 84232):LEEHS (SEQ ID NO: 84217):QXEXR (SEQ ID NO: 84276), SSVKXQP (SEQ ID NO: 84430):SRVHH (SEQ ID NO: 84297):SPIS-AA¹⁷-LYK (SEQ ID NO: 84887):LKYHY (SEQ ID NO: 84232):RLEEH (SEQ ID NO: 84279):LEXAXA (SEQ ID NO: 84400), RNVQXRP (SEQ ID NO: 84427):TQVQL (SEQ ID NO: 84340):SPIS-AA¹⁷-LYK (SEQ ID NO: 84887):LKYHY (SEQ ID NO: 84232):TLEDH (SEQ ID NO: 84307):LAXKXE (SEQ ID NO: 84399), KIPKAXX (SEQ ID NO: 84424):VPTEL (SEQ ID NO: 84378):EPIS-AA¹⁷-LYL (SEQ ID NO: 84874):KFKYE (SEQ ID NO: 84211):DMAVS (SEQ ID NO: 84150):GXGXR (SEQ ID NO: 84208), GIPEPXX (SEQ ID NO: 84419):VPTKM (SEQ ID NO: 84382):EPIS-AA¹⁷-LYL (SEQ ID NO: 84874):KFKYE (SEQ ID NO: 84211):NMAVS (SEQ ID NO: 84262):SXAXR (SEQ ID NO: 84303), SIPKAXX (SEQ ID NO: 84429):VPTEL (SEQ ID NO: 84378):EPIS-AA¹⁷-LYL (SEQ ID NO: 84874):KFKYE (SEQ ID NO: 84211):EMAVS (SEQ ID NO: 84164):GXGXR (SEQ ID NO: 84208), HVTKPTX (SEQ ID NO: 84422):VPTKL (SEQ ID NO: 84381):EPIS-AA¹⁷-LYL (SEQ ID NO: 84874):KFKYE (SEQ ID NO: 84211):NMAVS (SEQ ID NO: 84262):SXGXH (SEQ ID NO: 84304), YVPKPXX (SEQ ID NO: 84433):VPTKL (SEQ ID NO: 84381):EPIS-AA¹⁷-LYL (SEQ ID NO: 84874):KFKYE (SEQ ID NO: 84211):NMAVS (SEQ ID NO: 84262):SXGXH (SEQ ID NO: 84304), TVPKPXX (SEQ ID NO: 84432):VPTQL (SEQ ID NO: 84384):EPIS-AA¹⁷-LYL (SEQ ID NO: 84874):KFKYE (SEQ ID NO: 84211):NMAVS (SEQ ID NO: 84262):AXGXH (SEQ ID NO: 84147), AVPKAXX (SEQ ID NO: 84404):VPTKL (SEQ ID NO: 84381):EPIS-AA¹⁷-LYL (SEQ ID NO: 84874):KFKYE (SEQ ID NO: 84211):NMAVS (SEQ ID NO: 84262):AXGXH (SEQ ID NO: 84147), KVGKAXX (SEQ ID NO: 84425):VPTKL (SEQ ID NO: 84381):EPIS-AA¹⁷-LYL (SEQ ID NO: 84874):KFKYE (SEQ ID NO: 84211):EGMSAVS (SEQ ID NO: 84405):XGXR (SEQ ID NO: 84123), GSAGPXX (SEQ ID NO: 84420):VPTKM (SEQ ID NO: 84382):EPIS-AA¹⁷-LYL (SEQ ID NO: 84874):KFKYE (SEQ ID NO: 84211):GMAVS (SEQ ID NO: 84194):RXGXS (SEQ ID NO: 84291), AAPASXX (SEQ ID NO: 84401):VPTRL (SEQ ID NO: 84385):EPIS-AA¹⁷-LYL (SEQ ID NO: 84874):KFKYE (SEQ ID NO: 84211):DMAVS (SEQ ID NO: 84150):AXGXR (SEQ ID NO: 84148), STPPTXX (SEQ ID NO: 84431):VPTRL (SEQ ID NO: 84385):EPIS-AA¹⁷-LYL (SEQ ID NO: 84874):KFKYE (SEQ ID NO: 84211):DMAVS (SEQ ID NO: 84150):SXGXR (SEQ ID NO: 84305), HVPKPXX (SEQ ID NO: 84421):VPTKL (SEQ ID NO: 84381):EPIS-AA¹⁷-LYL (SEQ ID NO: 84874):KFKYE (SEQ ID NO: 84211):NMAVS (SEQ ID NO: 84262):SXGXH (SEQ ID NO: 84304), RVPSTXX (SEQ ID NO: 84428):VPTKT (SEQ ID NO: 84383):EPIS-AA¹⁷-LYL (SEQ ID NO: 84874):KFKYE (SEQ ID NO: 84211):MIAVS (SEQ ID NO: 84234):XGXL (SEQ ID NO: 84122), ASAAPXX (SEQ ID NO: 84402):VPTAL (SEQ ID NO: 84375):EPIS-AA¹⁷-LYL (SEQ ID NO: 84874):KFKYE (SEQ ID NO: 84211):MIAVS (SEQ ID NO: 84234):XKXS (SEQ ID NO: 84124), ASASPXX (SEQ ID NO: 84403):VPTDL (SEQ ID NO: 84376):EPIS-AA¹⁷-LYL (SEQ ID NO: 84874):KFKYE (SEQ ID NO: 84211):MIAVS (SEQ ID NO: 84234):XKXS (SEQ ID NO: 84124), ASASPXX (SEQ ID NO: 84403):VPTDL (SEQ ID NO: 84376):EPIS-AA¹⁷-LYL (SEQ ID NO: 84874):KFKYE (SEQ ID NO: 84211):MVAVS (SEQ ID NO: 84248):XKXS (SEQ ID NO: 84124), NDEGLEX (SEQ ID NO: 84426):VPTEE (SEQ ID NO: 84377):EPIS-AA¹⁷-LYL (SEQ ID NO: 84874):KFKYE (SEQ ID NO: 84211):FLAVS (SEQ ID NO: 84180):KXEXR (SEQ ID NO: 84213), NDEGLEX (SEQ ID NO: 84426):VPTGQ (SEQ ID NO: 84379):EPIS-AA¹⁷-LYL (SEQ ID NO: 84874):KFKYE (SEQ ID NO: 84211):LEAVS (SEQ ID NO: 84214):QXEXR (SEQ ID NO: 84276), SSVKXQP (SEQ ID NO: 84430):VPTHH (SEQ ID NO: 84380):EPIS-AA¹⁷-LYL (SEQ ID NO: 84874):KFKYE (SEQ ID NO: 84211):RLAVS (SEQ ID NO: 84277):LEXAXA (SEQ ID NO: 84400), RNVQXRP (SEQ ID NO: 84427):VPTQL (SEQ ID NO: 84384):EPIS-AA¹⁷-LYL (SEQ ID NO: 84874):KFKYE (SEQ ID NO: 84211):TLAVS (SEQ ID NO: 84306):LAXKXE (SEQ ID NO: 84399), KIPKAXX (SEQ ID NO: 84424):VPTEL (SEQ ID NO: 84378):EPIS-AA¹⁷-LYL (SEQ ID NO: 84874):KFKYE (SEQ ID NO: 84211):DMVVE (SEQ ID NO: 84161):GXGXR (SEQ ID NO: 84208), GIPEPXX (SEQ ID NO: 84419):VPEKM (SEQ ID NO: 84360):EPIS-AA¹⁷-LYL (SEQ ID NO: 84874):KFKYE (SEQ ID NO: 84211):NMTVE (SEQ ID NO: 84267):SXAXR (SEQ ID NO: 84303), SIPKAXX (SEQ ID NO: 84429):VPTEL (SEQ ID NO: 84378):EPIS-AA¹⁷-LYL (SEQ ID NO: 84874):KFKYE (SEQ ID NO: 84211):EMVVE (SEQ ID NO: 84175):GXGXR (SEQ ID NO: 84208), HVTKPTX (SEQ ID NO: 84422):APTKL (SEQ ID NO: 84131):EPIS-AA¹⁷-LYL (SEQ ID NO: 84874):KFKYE (SEQ ID NO: 84211):NMVVR (SEQ ID NO: 84275):SXGXH (SEQ ID NO: 84304), YVPKPXX (SEQ ID NO: 84433):APTKL (SEQ ID NO: 84131):EPIS-AA¹⁷-LYL (SEQ ID NO: 84874):KFKYE (SEQ ID NO: 84211):NMVVR (SEQ ID NO: 84275):SXGXH (SEQ ID NO: 84304), TVPKPXX (SEQ ID NO: 84432):APTQL (SEQ ID NO: 84134):EPIS-AA¹⁷-LYL (SEQ ID NO: 84874):KFKYE (SEQ ID NO: 84211):NMVVR (SEQ ID NO: 84275):AXGXH (SEQ ID NO: 84147), AVPKAXX (SEQ ID NO: 84404):APTKL (SEQ ID NO: 84131):EPIS-AA¹⁷-LYL (SEQ ID NO: 84874):KFKYE (SEQ ID NO: 84211):NMVVK (SEQ ID NO: 84274):AXGXH (SEQ ID NO: 84147), KVGKAXX (SEQ ID NO: 84425):VPTKL (SEQ ID NO: 84381):EPIS-AA¹⁷-LYL (SEQ ID NO: 84874):KFKYE (SEQ ID NO: 84211):EGMSVAE (SEQ ID NO: 84411):XGXR (SEQ ID NO: 84123), GSAGPXX (SEQ ID NO: 84420):TPTKM (SEQ ID NO: 84327):EPIS-AA¹⁷-LYL (SEQ ID NO: 84874):KFKYE (SEQ ID NO: 84211):GMVVD (SEQ ID NO: 84204):RXGXS (SEQ ID NO: 84291), AAPASXX (SEQ ID NO: 84401):VPARL (SEQ ID NO: 84352):EPIS-AA¹⁷-LYL (SEQ ID NO: 84874):KFKYE (SEQ ID NO: 84211):DMVVE (SEQ ID NO: 84161):AXGXR (SEQ ID NO: 84148), STPPTXX (SEQ ID NO: 84431):VPTRL (SEQ ID NO: 84385):EPIS-AA¹⁷-LYL (SEQ ID NO: 84874):KFKYE (SEQ ID NO: 84211):DMVVE (SEQ ID NO: 84161):SXGXR (SEQ ID NO: 84305), HVPKPXX (SEQ ID NO: 84421):APTKL (SEQ ID NO: 84131):EPIS-AA¹⁷-LYL (SEQ ID NO: 84874):KFKYE (SEQ ID NO: 84211):NMVVR (SEQ ID NO: 84275):SXGXH (SEQ ID NO: 84304), RVPSTXX (SEQ ID NO: 84428):APVKT (SEQ ID NO: 84144):EPIS-AA¹⁷-LYL (SEQ ID NO: 84874):KFKYE (SEQ ID NO: 84211):MIVEE (SEQ ID NO: 84241):XGXL (SEQ ID NO: 84122), ASAAPXX (SEQ ID NO: 84402):VPQAL (SEQ ID NO: 84364):EPIS-AA¹⁷-LYL (SEQ ID NO: 84874):KFKYE (SEQ ID NO: 84211):MIVRS (SEQ ID NO: 84243):XKXS (SEQ ID NO: 84124), ASASPXX (SEQ ID NO: 84403):VSQDL (SEQ ID NO: 84387):EPIS-AA¹⁷-LYL (SEQ ID NO: 84874):KFKYE (SEQ ID NO: 84211):MIVKS (SEQ ID NO: 84242):XKXS (SEQ ID NO: 84124), ASASPXX (SEQ ID NO: 84403):VPQDL (SEQ ID NO: 84365):EPIS-AA¹⁷-LYL (SEQ ID NO: 84874):KFKYE (SEQ ID NO: 84211):MVVKS (SEQ ID NO: 84256):XKXS (SEQ ID NO: 84124), NDEGLEX (SEQ ID NO: 84426):VPTEE (SEQ ID NO: 84377):EPIS-AA¹⁷-LYL (SEQ ID NO: 84874):KFKYE (SEQ ID NO: 84211):FLQHN (SEQ ID NO: 84184):KXEXR (SEQ ID NO: 84213), NDEGLEX (SEQ ID NO: 84426):VPTGQ (SEQ ID NO: 84379):EPIS-AA¹⁷-LYL (SEQ ID NO: 84874):KFKYE (SEQ ID NO: 84211):LEEHS (SEQ ID NO: 84217):QXEXR (SEQ ID NO: 84276), SSVKXQP (SEQ ID NO: 84430):SRVHH (SEQ ID NO: 84297):EPIS-AA¹⁷-LYL (SEQ ID NO: 84874):KFKYE (SEQ ID NO: 84211):RLEEH (SEQ ID NO: 84279):LEXAXA (SEQ ID NO: 84400), RNVQXRP (SEQ ID NO: 84427):TQVQL (SEQ ID NO: 84340):EPIS-AA¹⁷-LYL (SEQ ID NO: 84874):KFKYE (SEQ ID NO: 84211):TLEDH (SEQ ID NO: 84307):LAXKXE (SEQ ID NO: 84399), KIPKAXX (SEQ ID NO: 84424):TPTEL (SEQ ID NO: 84323):SPIN-AA¹⁷-LYF (SEQ ID NO: 84884):YGKIP (SEQ ID NO: 84397):DMVVD (SEQ ID NO: 84160):GXGXR (SEQ ID NO: 84208), GIPEPXX (SEQ ID NO: 84419):TPTKM (SEQ ID NO: 84327):SPIN-AA¹⁷-LYF (SEQ ID NO: 84884):YGKIP (SEQ ID NO: 84397):NMVVD (SEQ ID NO: 84272):SXAXR (SEQ ID NO: 84303), SIPKAXX (SEQ ID NO: 84429):TPTEL (SEQ ID NO: 84323):SPIN-AA¹⁷-LYF (SEQ ID NO: 84884):YGKIP (SEQ ID NO: 84397):EMVVD (SEQ ID NO: 84174):GXGXR (SEQ ID NO: 84208), HVTKPTX (SEQ ID NO: 84422):TPTKL (SEQ ID NO: 84326):SPIN-AA¹⁷-LYF (SEQ ID NO: 84884):YGKIP (SEQ ID NO: 84397):NMVVD (SEQ ID NO: 84272):SXGXH (SEQ ID NO: 84304), YVPKPXX (SEQ ID NO: 84433):TPTKL (SEQ ID NO: 84326):SPIN-AA¹⁷-LYF (SEQ ID NO: 84884):YGKIP (SEQ ID NO: 84397):NMVVD (SEQ ID NO: 84272):SXGXH (SEQ ID NO: 84304), TVPKPXX (SEQ ID NO: 84432):TPTQL (SEQ ID NO: 84329):SPIN-AA¹⁷-LYF (SEQ ID NO: 84884):YGKIP (SEQ ID NO: 84397):NMVVD (SEQ ID NO: 84272):AXGXH (SEQ ID NO: 84147), AVPKAXX (SEQ ID NO: 84404):TPTKL (SEQ ID NO: 84326):SPIN-AA¹⁷-LYF (SEQ ID NO: 84884):YGKIP (SEQ ID NO: 84397):NMVVD (SEQ ID NO: 84272):AXGXH (SEQ ID NO: 84147), KVGKAXX (SEQ ID NO: 84425):TPTKL (SEQ ID NO: 84326):SPIN-AA¹⁷-LYF (SEQ ID NO: 84884):YGKIP (SEQ ID NO: 84397):EGMSVVD (SEQ ID NO: 84415):XGXR (SEQ ID NO: 84123), KASKAXX (SEQ ID NO: 84423):TPTKL (SEQ ID NO: 84326):SPIN-AA¹⁷-LYF (SEQ ID NO: 84884):YGKIP (SEQ ID NO: 84397):GMVVD (SEQ ID NO: 84204):EXGXR (SEQ ID NO: 84179), AAPASXX (SEQ ID NO: 84401):TPTRL (SEQ ID NO: 84330):SPIN-AA¹⁷-LYF (SEQ ID NO: 84884):YGKIP (SEQ ID NO: 84397):DMVVD (SEQ ID NO: 84160):AXGXR (SEQ ID NO: 84148), STPPTXX (SEQ ID NO: 84431):TPTRL (SEQ ID NO: 84330):SPIN-AA¹⁷-LYF (SEQ ID NO: 84884):YGKIP (SEQ ID NO: 84397):DMVVD (SEQ ID NO: 84160):SXGXR (SEQ ID NO: 84305), HVPKPXX (SEQ ID NO: 84421):TPTKL (SEQ ID NO: 84326):SPIN-AA¹⁷-LYF (SEQ ID NO: 84884):YGKIP (SEQ ID NO: 84397):NMVVD (SEQ ID NO: 84272):SXGXH (SEQ ID NO: 84304), RVPSTXX (SEQ ID NO: 84428):TPTKT (SEQ ID NO: 84328):SPIN-AA¹⁷-LYF (SEQ ID NO: 84884):YGKIP (SEQ ID NO: 84397):MIVVD (SEQ ID NO: 84244):XGXL (SEQ ID NO: 84122), ASAAPXX (SEQ ID NO: 84402):TPTAL (SEQ ID NO: 84320):SPIN-AA¹⁷-LYF (SEQ ID NO: 84884):YGKIP (SEQ ID NO: 84397):MIVVD (SEQ ID NO: 84244):XKXS (SEQ ID NO: 84124), ASASPXX (SEQ ID NO: 84403):TPTDL (SEQ ID NO: 84321):SPIN-AA¹⁷-LYF (SEQ ID NO: 84884):YGKIP (SEQ ID NO: 84397):MIVVD (SEQ ID NO: 84244):XKXS (SEQ ID NO: 84124), ASASPXX (SEQ ID NO: 84403):TPTDL (SEQ ID NO: 84321):SPIN-AA¹⁷-LYF (SEQ ID NO: 84884):YGKIP (SEQ ID NO: 84397):MVVVD (SEQ ID NO: 84258):XKXS (SEQ ID NO: 84124), NDEGLEX (SEQ ID NO: 84426):TPTEE (SEQ ID NO: 84322):SPIN-AA¹⁷-LYF (SEQ ID NO: 84884):YGKIP (SEQ ID NO: 84397):FLVVD (SEQ ID NO: 84190):KXEXR (SEQ ID NO: 84213), NDEGLEX (SEQ ID NO: 84426):TPTGQ (SEQ ID NO: 84324):SPIN-AA¹⁷-LYF (SEQ ID NO: 84884):YGKIP (SEQ ID NO: 84397):LEVVD (SEQ ID NO: 84224):QXEXR (SEQ ID NO: 84276), SSVKXQP (SEQ ID NO: 84430):TPTHH (SEQ ID NO: 84325):SPIN-AA¹⁷-LYF (SEQ ID NO: 84884):YGKIP (SEQ ID NO: 84397):RLVVD (SEQ ID NO: 84287):LEXAXA (SEQ ID NO: 84400), RNVQXRP (SEQ ID NO: 84427):TPTQL (SEQ ID NO: 84329):SPIN-AA¹⁷-LYF (SEQ ID NO: 84884):YGKIP (SEQ ID NO: 84397):TLVVD (SEQ ID NO: 84316):LAXKXE (SEQ ID NO: 84399), KIPKAXX (SEQ ID NO: 84424):VPTEL (SEQ ID NO: 84378):SPIN-AA¹⁷-LYF (SEQ ID NO: 84884):YGKIP (SEQ ID NO: 84397):DMVVE (SEQ ID NO: 84161):GXGXR (SEQ ID NO: 84208), GIPEPXX (SEQ ID NO: 84419):VPEKM (SEQ ID NO: 84360):SPIN-AA¹⁷-LYF (SEQ ID NO: 84884):YGKIP (SEQ ID NO: 84397):NMTVE (SEQ ID NO: 84267):SXAXR (SEQ ID NO: 84303), SIPKAXX (SEQ ID NO: 84429):VPTEL (SEQ ID NO: 84378):SPIN-AA¹⁷-LYF (SEQ ID NO: 84884):YGKIP (SEQ ID NO: 84397):EMVVE (SEQ ID NO: 84175):GXGXR (SEQ ID NO: 84208), HVTKPTX (SEQ ID NO: 84422):APTKL (SEQ ID NO: 84131):SPIN-AA¹⁷-LYF (SEQ ID NO: 84884):YGKIP (SEQ ID NO: 84397):NMVVR (SEQ ID NO: 84275):SXGXH (SEQ ID NO: 84304), YVPKPXX (SEQ ID NO: 84433):APTKL (SEQ ID NO: 84131):SPIN-AA¹⁷-LYF (SEQ ID NO: 84884):YGKIP (SEQ ID NO: 84397):NMVVR (SEQ ID NO: 84275):SXGXH (SEQ ID NO: 84304), TVPKPXX (SEQ ID NO: 84432):APTQL (SEQ ID NO: 84134):SPIN-AA¹⁷-LYF (SEQ ID NO: 84884):YGKIP (SEQ ID NO: 84397):NMVVR (SEQ ID NO: 84275):AXGXH (SEQ ID NO: 84147), AVPKAXX (SEQ ID NO: 84404):APTKL (SEQ ID NO: 84131):SPIN-AA¹⁷-LYF (SEQ ID NO: 84884):YGKIP (SEQ ID NO: 84397):NMVVK (SEQ ID NO: 84274):AXGXH (SEQ ID NO: 84147), KVGKAXX (SEQ ID NO: 84425):VPTKL (SEQ ID NO: 84381):SPIN-AA¹⁷-LYF (SEQ ID NO: 84884):YGKIP (SEQ ID NO: 84397):EGMSVAE (SEQ ID NO: 84411):XGXR (SEQ ID NO: 84123), KASKAXX (SEQ ID NO: 84423):VPTKL (SEQ ID NO: 84381):SPIN-AA¹⁷-LYF (SEQ ID NO: 84884):YGKIP (SEQ ID NO: 84397):GMAVS (SEQ ID NO: 84194):EXGXR (SEQ ID NO: 84179), AAPASXX (SEQ ID NO: 84401):VPARL (SEQ ID NO: 84352):SPIN-AA¹⁷-LYF (SEQ ID NO: 84884):YGKIP (SEQ ID NO: 84397):DMVVE (SEQ ID NO: 84161):AXGXR (SEQ ID NO: 84148), STPPTXX (SEQ ID NO: 84431):VPTRL (SEQ ID NO: 84385):SPIN-AA¹⁷-LYF (SEQ ID NO: 84884):YGKIP (SEQ ID NO: 84397):DMVVE (SEQ ID NO: 84161):SXGXR (SEQ ID NO: 84305), HVPKPXX (SEQ ID NO: 84421):APTKL (SEQ ID NO: 84131):SPIN-AA¹⁷-LYF (SEQ ID NO: 84884):YGKIP (SEQ ID NO: 84397):NMVVR (SEQ ID NO: 84275):SXGXH (SEQ ID NO: 84304), RVPSTXX (SEQ ID NO: 84428):APVKT (SEQ ID NO: 84144):SPIN-AA¹⁷-LYF (SEQ ID NO: 84884):YGKIP (SEQ ID NO: 84397):MIVEE (SEQ ID NO: 84241):XGXL (SEQ ID NO: 84122), ASAAPXX (SEQ ID NO: 84402):VPQAL (SEQ ID NO: 84364):SPIN-AA¹⁷-LYF (SEQ ID NO: 84884):YGKIP (SEQ ID NO: 84397):MIVRS (SEQ ID NO: 84243):XKXS (SEQ ID NO: 84124), ASASPXX (SEQ ID NO: 84403):VSQDL (SEQ ID NO: 84387):SPIN-AA¹⁷-LYF (SEQ ID NO: 84884):YGKIP (SEQ ID NO: 84397):MIVKS (SEQ ID NO: 84242):XKXS (SEQ ID NO: 84124), ASASPXX (SEQ ID NO: 84403):VPQDL (SEQ ID NO: 84365):SPIN-AA¹⁷-LYF (SEQ ID NO: 84884):YGKIP (SEQ ID NO: 84397):MVVKS (SEQ ID NO: 84256):XKXS (SEQ ID NO: 84124), NDEGLEX (SEQ ID NO: 84426):VPTEE (SEQ ID NO: 84377):SPIN-AA¹⁷-LYF (SEQ ID NO: 84884):YGKIP (SEQ ID NO: 84397):FLQHN (SEQ ID NO: 84184):KXEXR (SEQ ID NO: 84213), NDEGLEX (SEQ ID NO: 84426):VPTGQ (SEQ ID NO: 84379):SPIN-AA¹⁷-LYF (SEQ ID NO: 84884):YGKIP (SEQ ID NO: 84397):LEEHS (SEQ ID NO: 84217):QXEXR (SEQ ID NO: 84276), SSVKXQP (SEQ ID NO: 84430):SRVHH (SEQ ID NO: 84297):SPIN-AA¹⁷-LYF (SEQ ID NO: 84884):YGKIP (SEQ ID NO: 84397):RLEEH (SEQ ID NO: 84279):LEXAXA (SEQ ID NO: 84400), RNVQXRP (SEQ ID NO: 84427):TQVQL (SEQ ID NO: 84340):SPIN-AA¹⁷-LYF (SEQ ID NO: 84884):YGKIP (SEQ ID NO: 84397):TLEDH (SEQ ID NO: 84307):LAXKXE (SEQ ID NO: 84399), KIPKAXX (SEQ ID NO: 84424):VPAEL (SEQ ID NO: 84345):SPIS-AA¹⁷-LYI (SEQ ID NO: 84886):YKQYE (SEQ ID NO: 84398):DMVVE (SEQ ID NO: 84161):GXGXR (SEQ ID NO: 84208), GIPEPXX (SEQ ID NO: 84419):VPAKM (SEQ ID NO: 84349):SPIS-AA¹⁷-LYI (SEQ ID NO: 84886):YKQYE (SEQ ID NO: 84398):NMVVE (SEQ ID NO: 84273):SXAXR (SEQ ID NO: 84303), SIPKAXX (SEQ ID NO: 84429):VPAEL (SEQ ID NO: 84345):SPIS-AA¹⁷-LYI (SEQ ID NO: 84886):YKQYE (SEQ ID NO: 84398):EMVVE (SEQ ID NO: 84175):GXGXR (SEQ ID NO: 84208), HVTKPTX (SEQ ID NO: 84422):VPAKL (SEQ ID NO: 84348):SPIS-AA¹⁷-LYI (SEQ ID NO: 84886):YKQYE (SEQ ID NO: 84398):NMVVE (SEQ ID NO: 84273):SXGXH (SEQ ID NO: 84304), YVPKPXX (SEQ ID NO: 84433):VPAKL (SEQ ID NO: 84348):SPIS-AA¹⁷-LYI (SEQ ID NO: 84886):YKQYE (SEQ ID NO: 84398):NMVVE (SEQ ID NO: 84273):SXGXH (SEQ ID NO: 84304), TVPKPXX (SEQ ID NO: 84432):VPAQL (SEQ ID NO: 84351):SPIS-AA¹⁷-LYI (SEQ ID NO: 84886):YKQYE (SEQ ID NO: 84398):NMVVE (SEQ ID NO: 84273):AXGXH (SEQ ID NO: 84147), AVPKAXX (SEQ ID NO: 84404):VPAKL (SEQ ID NO: 84348):SPIS-AA¹⁷-LYI (SEQ ID NO: 84886):YKQYE (SEQ ID NO: 84398):NMVVE (SEQ ID NO: 84273):AXGXH (SEQ ID NO: 84147), KVGKAXX (SEQ ID NO: 84425):VPAKL (SEQ ID NO: 84348):SPIS-AA¹⁷-LYI (SEQ ID NO: 84886):YKQYE (SEQ ID NO: 84398):EGMSVVE (SEQ ID NO: 84416):XGXR (SEQ ID NO: 84123), KASKAXX (SEQ ID NO: 84423):VPAKL (SEQ ID NO: 84348):SPIS-AA¹⁷-LYI (SEQ ID NO: 84886):YKQYE (SEQ ID NO: 84398):GMVVE (SEQ ID NO: 84205):EXGXR (SEQ ID NO: 84179), GSAGPXX (SEQ ID NO: 84420):VPAKM (SEQ ID NO: 84349):SPIS-AA¹⁷-LYI (SEQ ID NO: 84886):YKQYE (SEQ ID NO: 84398):GMVVE (SEQ ID NO: 84205):RXGXS (SEQ ID NO: 84291), STPPTXX (SEQ ID NO: 84431):VPARL (SEQ ID NO: 84352):SPIS-AA¹⁷-LYI (SEQ ID NO: 84886):YKQYE (SEQ ID NO: 84398):DMVVE (SEQ ID NO: 84161):SXGXR (SEQ ID NO: 84305), HVPKPXX (SEQ ID NO: 84421):VPAKL (SEQ ID NO: 84348):SPIS-AA¹⁷-LYI (SEQ ID NO: 84886):YKQYE (SEQ ID NO: 84398):NMVVE (SEQ ID NO: 84273):SXGXH (SEQ ID NO: 84304), RVPSTXX (SEQ ID NO: 84428):VPAKT (SEQ ID NO: 84350):SPIS-AA¹⁷-LYI (SEQ ID NO: 84886):YKQYE (SEQ ID NO: 84398):MIVVE (SEQ ID NO: 84245):XGXL (SEQ ID NO: 84122), ASAAPXX (SEQ ID NO: 84402):VPAAL (SEQ ID NO: 84342):SPIS-AA¹⁷-LYI (SEQ ID NO: 84886):YKQYE (SEQ ID NO: 84398):MIVVE (SEQ ID NO: 84245):XKXS (SEQ ID NO: 84124), ASASPXX (SEQ ID NO: 84403):VPADL (SEQ ID NO: 84343):SPIS-AA¹⁷-LYI (SEQ ID NO: 84886):YKQYE (SEQ ID NO: 84398):MIVVE (SEQ ID NO: 84245):XKXS (SEQ ID NO: 84124), ASASPXX (SEQ ID NO: 84403):VPADL (SEQ ID NO: 84343):SPIS-AA¹⁷-LYI (SEQ ID NO: 84886):YKQYE (SEQ ID NO: 84398):MVVVE (SEQ ID NO: 84259):XKXS (SEQ ID NO: 84124), NDEGLEX (SEQ ID NO: 84426):VPAEE (SEQ ID NO: 84344):SPIS-AA¹⁷-LYI (SEQ ID NO: 84886):YKQYE (SEQ ID NO: 84398):FLVVE (SEQ ID NO: 84191):KXEXR (SEQ ID NO: 84213), NDEGLEX (SEQ ID NO: 84426):VPAGQ (SEQ ID NO: 84346):SPIS-AA¹⁷-LYI (SEQ ID NO: 84886):YKQYE (SEQ ID NO: 84398):LEVVE (SEQ ID NO: 84225):QXEXR (SEQ ID NO: 84276), SSVKXQP (SEQ ID NO: 84430):VPAHH (SEQ ID NO: 84347):SPIS-AA¹⁷-LYI (SEQ ID NO: 84886):YKQYE (SEQ ID NO: 84398):RLVVE (SEQ ID NO: 84288):LEXAXA (SEQ ID NO: 84400), RNVQXRP (SEQ ID NO: 84427):VPAQL (SEQ ID NO: 84351):SPIS-AA¹⁷-LYI (SEQ ID NO: 84886):YKQYE (SEQ ID NO: 84398):TLVVE (SEQ ID NO: 84317):LAXKXE (SEQ ID NO: 84399), KIPKAXX (SEQ ID NO: 84424):VPTEL (SEQ ID NO: 84378):SPIS-AA¹⁷-LYI (SEQ ID NO: 84886):YKQYE (SEQ ID NO: 84398):DMVVE (SEQ ID NO: 84161):GXGXR (SEQ ID NO: 84208), GIPEPXX (SEQ ID NO: 84419):VPEKM (SEQ ID NO: 84360):SPIS-AA¹⁷-LYI (SEQ ID NO: 84886):YKQYE (SEQ ID NO: 84398):NMTVE (SEQ ID NO: 84267):SXAXR (SEQ ID NO: 84303), SIPKAXX (SEQ ID NO: 84429):VPTEL (SEQ ID NO: 84378):SPIS-AA¹⁷-LYI (SEQ ID NO: 84886):YKQYE (SEQ ID NO: 84398):EMVVE (SEQ ID NO: 84175):GXGXR (SEQ ID NO: 84208), HVTKPTX (SEQ ID NO: 84422):APTKL (SEQ ID NO: 84131):SPIS-AA¹⁷-LYI (SEQ ID NO: 84886):YKQYE (SEQ ID NO: 84398):NMVVR (SEQ ID NO: 84275):SXGXH (SEQ ID NO: 84304), YVPKPXX (SEQ ID NO: 84433):APTKL (SEQ ID NO: 84131):SPIS-AA¹⁷-LYI (SEQ ID NO: 84886):YKQYE (SEQ ID NO: 84398):NMVVR (SEQ ID NO: 84275):SXGXH (SEQ ID NO: 84304), TVPKPXX (SEQ ID NO: 84432):APTQL (SEQ ID NO: 84134):SPIS-AA¹⁷-LYI (SEQ ID NO: 84886):YKQYE (SEQ ID NO: 84398):NMVVR (SEQ ID NO: 84275):AXGXH (SEQ ID NO: 84147), AVPKAXX (SEQ ID NO: 84404):APTKL (SEQ ID NO: 84131):SPIS-AA¹⁷-LYI (SEQ ID NO: 84886):YKQYE (SEQ ID NO: 84398):NMVVK (SEQ ID NO: 84274):AXGXH (SEQ ID NO: 84147), KVGKAXX (SEQ ID NO: 84425):VPTKL (SEQ ID NO: 84381):SPIS-AA¹⁷-LYI (SEQ ID NO: 84886):YKQYE (SEQ ID NO: 84398):EGMSVAE (SEQ ID NO: 84411):XGXR (SEQ ID NO: 84123), KASKAXX (SEQ ID NO: 84423):VPTKL (SEQ ID NO: 84381):SPIS-AA¹⁷-LYI (SEQ ID NO: 84886):YKQYE (SEQ ID NO: 84398):GMAVS (SEQ ID NO: 84194):EXGXR (SEQ ID NO: 84179), GSAGPXX (SEQ ID NO: 84420):TPTKM (SEQ ID NO: 84327):SPIS-AA¹⁷-LYI (SEQ ID NO: 84886):YKQYE (SEQ ID NO: 84398):GMVVD (SEQ ID NO: 84204):RXGXS (SEQ ID NO: 84291), STPPTXX (SEQ ID NO: 84431):VPTRL (SEQ ID NO: 84385):SPIS-AA¹⁷-LYI (SEQ ID NO: 84886):YKQYE (SEQ ID NO: 84398):DMVVE (SEQ ID NO: 84161):SXGXR (SEQ ID NO: 84305), HVPKPXX (SEQ ID NO: 84421):APTKL (SEQ ID NO: 84131):SPIS-AA¹⁷-LYI (SEQ ID NO: 84886):YKQYE (SEQ ID NO: 84398):NMVVR (SEQ ID NO: 84275):SXGXH (SEQ ID NO: 84304), RVPSTXX (SEQ ID NO: 84428):APVKT (SEQ ID NO: 84144):SPIS-AA¹⁷-LYI (SEQ ID NO: 84886):YKQYE (SEQ ID NO: 84398):MIVEE (SEQ ID NO: 84241):XGXL (SEQ ID NO: 84122), ASAAPXX (SEQ ID NO: 84402):VPQAL (SEQ ID NO: 84364):SPIS-AA¹⁷-LYI (SEQ ID NO: 84886):YKQYE (SEQ ID NO: 84398):MIVRS (SEQ ID NO: 84243):XKXS (SEQ ID NO: 84124), ASASPXX (SEQ ID NO: 84403):VSQDL (SEQ ID NO: 84387):SPIS-AA¹⁷-LYI (SEQ ID NO: 84886):YKQYE (SEQ ID NO: 84398):MIVKS (SEQ ID NO: 84242):XKXS (SEQ ID NO: 84124), ASASPXX (SEQ ID NO: 84403):VPQDL (SEQ ID NO: 84365):SPIS-AA¹⁷-LYI (SEQ ID NO: 84886):YKQYE (SEQ ID NO: 84398):MVVKS (SEQ ID NO: 84256):XKXS (SEQ ID NO: 84124), NDEGLEX (SEQ ID NO: 84426):VPTEE (SEQ ID NO: 84377):SPIS-AA¹⁷-LYI (SEQ ID NO: 84886):YKQYE (SEQ ID NO: 84398):FLQHN (SEQ ID NO: 84184):KXEXR (SEQ ID NO: 84213), NDEGLEX (SEQ ID NO: 84426):VPTGQ (SEQ ID NO: 84379):SPIS-AA¹⁷-LYI (SEQ ID NO: 84886):YKQYE (SEQ ID NO: 84398):LEEHS (SEQ ID NO: 84217):QXEXR (SEQ ID NO: 84276), SSVKXQP (SEQ ID NO: 84430):SRVHH (SEQ ID NO: 84297):SPIS-AA¹⁷-LYI (SEQ ID NO: 84886):YKQYE (SEQ ID NO: 84398):RLEEH (SEQ ID NO: 84279):LEXAXA (SEQ ID NO: 84400), RNVQXRP (SEQ ID NO: 84427):TQVQL (SEQ ID NO: 84340):SPIS-AA¹⁷-LYI (SEQ ID NO: 84886):YKQYE (SEQ ID NO: 84398):TLEDH (SEQ ID NO: 84307):LAXKXE (SEQ ID NO: 84399), KIPKAXX (SEQ ID NO: 84424):VPTEL (SEQ ID NO: 84378):SPIS-AA¹⁷-LFI (SEQ ID NO: 84885):YKQYE (SEQ ID NO: 84398):DMVVE (SEQ ID NO: 84161):GXGXR (SEQ ID NO: 84208), GIPEPXX (SEQ ID NO: 84419):VPTKM (SEQ ID NO: 84382):SPIS-AA¹⁷-LFI (SEQ ID NO: 84885):YKQYE (SEQ ID NO: 84398):NMVVE (SEQ ID NO: 84273):SXAXR (SEQ ID NO: 84303), SIPKAXX (SEQ ID NO: 84429):VPTEL (SEQ ID NO: 84378):SPIS-AA¹⁷-LFI (SEQ ID NO: 84885):YKQYE (SEQ ID NO: 84398):EMVVE (SEQ ID NO: 84175):GXGXR (SEQ ID NO: 84208), HVTKPTX (SEQ ID NO: 84422):VPTKL (SEQ ID NO: 84381):SPIS-AA¹⁷-LFI (SEQ ID NO: 84885):YKQYE (SEQ ID NO: 84398):NMVVE (SEQ ID NO: 84273):SXGXH (SEQ ID NO: 84304), YVPKPXX (SEQ ID NO: 84433):VPTKL (SEQ ID NO: 84381):SPIS-AA¹⁷-LFI (SEQ ID NO: 84885):YKQYE (SEQ ID NO: 84398):NMVVE (SEQ ID NO: 84273):SXGXH (SEQ ID NO: 84304), TVPKPXX (SEQ ID NO: 84432):VPTQL (SEQ ID NO: 84384):SPIS-AA¹⁷-LFI (SEQ ID NO: 84885):YKQYE (SEQ ID NO: 84398):NMVVE (SEQ ID NO: 84273):AXGXH (SEQ ID NO: 84147), AVPKAXX (SEQ ID NO: 84404):VPTKL (SEQ ID NO: 84381):SPIS-AA¹⁷-LFI (SEQ ID NO: 84885):YKQYE (SEQ ID NO: 84398):NMVVE (SEQ ID NO: 84273):AXGXH (SEQ ID NO: 84147), KVGKAXX (SEQ ID NO: 84425):VPTKL (SEQ ID NO: 84381):SPIS-AA¹⁷-LFI (SEQ ID NO: 84885):YKQYE (SEQ ID NO: 84398):EGMSVVE (SEQ ID NO: 84416):XGXR (SEQ ID NO: 84123), KASKAXX (SEQ ID NO: 84423):VPTKL (SEQ ID NO: 84381):SPIS-AA¹⁷-LFI (SEQ ID NO: 84885):YKQYE (SEQ ID NO: 84398):GMVVE (SEQ ID NO: 84205):EXGXR (SEQ ID NO: 84179), GSAGPXX (SEQ ID NO: 84420):VPTKM (SEQ ID NO: 84382):SPIS-AA¹⁷-LFI (SEQ ID NO: 84885):YKQYE (SEQ ID NO: 84398):GMVVE (SEQ ID NO: 84205):RXGXS (SEQ ID NO: 84291), AAPASXX (SEQ ID NO: 84401):VPTRL (SEQ ID NO: 84385):SPIS-AA¹⁷-LFI (SEQ ID NO: 84885):YKQYE (SEQ ID NO: 84398):DMVVE (SEQ ID NO: 84161):AXGXR (SEQ ID NO: 84148), HVPKPXX (SEQ ID NO: 84421):VPTKL (SEQ ID NO: 84381):SPIS-AA¹⁷-LFI (SEQ ID NO: 84885):YKQYE (SEQ ID NO: 84398):NMVVE (SEQ ID NO: 84273):SXGXH (SEQ ID NO: 84304), RVPSTXX (SEQ ID NO: 84428):VPTKT (SEQ ID NO: 84383):SPIS-AA¹⁷-LFI (SEQ ID NO: 84885):YKQYE (SEQ ID NO: 84398):MIVVE (SEQ ID NO: 84245):XGXL (SEQ ID NO: 84122), ASAAPXX (SEQ ID NO: 84402):VPTAL (SEQ ID NO: 84375):SPIS-AA¹⁷-LFI (SEQ ID NO: 84885):YKQYE (SEQ ID NO: 84398):MIVVE (SEQ ID NO: 84245):XKXS (SEQ ID NO: 84124), ASASPXX (SEQ ID NO: 84403):VPTDL (SEQ ID NO: 84376):SPIS-AA¹⁷-LFI (SEQ ID NO: 84885):YKQYE (SEQ ID NO: 84398):MIVVE (SEQ ID NO: 84245):XKXS (SEQ ID NO: 84124), ASASPXX (SEQ ID NO: 84403):VPTDL (SEQ ID NO: 84376):SPIS-AA¹⁷-LFI (SEQ ID NO: 84885):YKQYE (SEQ ID NO: 84398):MVVVE (SEQ ID NO: 84259):XKXS (SEQ ID NO: 84124), NDEGLEX (SEQ ID NO: 84426):VPTEE (SEQ ID NO: 84377):SPIS-AA¹⁷-LFI (SEQ ID NO: 84885):YKQYE (SEQ ID NO: 84398):FLVVE (SEQ ID NO: 84191):KXEXR (SEQ ID NO: 84213), NDEGLEX (SEQ ID NO: 84426):VPTGQ (SEQ ID NO: 84379):SPIS-AA¹⁷-LFI (SEQ ID NO: 84885):YKQYE (SEQ ID NO: 84398):LEVVE (SEQ ID NO: 84225):QXEXR (SEQ ID NO: 84276), SSVKXQP (SEQ ID NO: 84430):VPTHH (SEQ ID NO: 84380):SPIS-AA¹⁷-LFI (SEQ ID NO: 84885):YKQYE (SEQ ID NO: 84398):RLVVE (SEQ ID NO: 84288):LEXAXA (SEQ ID NO: 84400), RNVQXRP (SEQ ID NO: 84427):VPTQL (SEQ ID NO: 84384):SPIS-AA¹⁷-LFI (SEQ ID NO: 84885):YKQYE (SEQ ID NO: 84398):TLVVE (SEQ ID NO: 84317):LAXKXE (SEQ ID NO: 84399), GIPEPXX (SEQ ID NO: 84419):VPEKM (SEQ ID NO: 84360):SPIS-AA¹⁷-LFI (SEQ ID NO: 84885):YKQYE (SEQ ID NO: 84398):NMTVE (SEQ ID NO: 84267):SXAXR (SEQ ID NO: 84303), HVTKPTX (SEQ ID NO: 84422):APTKL (SEQ ID NO: 84131):SPIS-AA¹⁷-LFI (SEQ ID NO: 84885):YKQYE (SEQ ID NO: 84398):NMVVR (SEQ ID NO: 84275):SXGXH (SEQ ID NO: 84304), YVPKPXX (SEQ ID NO: 84433):APTKL (SEQ ID NO: 84131):SPIS-AA¹⁷-LFI (SEQ ID NO: 84885):YKQYE (SEQ ID NO: 84398):NMVVR (SEQ ID NO: 84275):SXGXH (SEQ ID NO: 84304), TVPKPXX (SEQ ID NO: 84432):APTQL (SEQ ID NO: 84134):SPIS-AA¹⁷-LFI (SEQ ID NO: 84885):YKQYE (SEQ ID NO: 84398):NMVVR (SEQ ID NO: 84275):AXGXH (SEQ ID NO: 84147), AVPKAXX (SEQ ID NO: 84404):APTKL (SEQ ID NO: 84131):SPIS-AA¹⁷-LFI (SEQ ID NO: 84885):YKQYE (SEQ ID NO: 84398):NMVVK (SEQ ID NO: 84274):AXGXH (SEQ ID NO: 84147), KVGKAXX (SEQ ID NO: 84425):VPTKL (SEQ ID NO: 84381):SPIS-AA¹⁷-LFI (SEQ ID NO: 84885):YKQYE (SEQ ID NO: 84398):EGMSVAE (SEQ ID NO: 84411):XGXR (SEQ ID NO: 84123), KASKAXX (SEQ ID NO: 84423):VPTKL (SEQ ID NO: 84381):SPIS-AA¹⁷-LFI (SEQ ID NO: 84885):YKQYE (SEQ ID NO: 84398):GMAVS (SEQ ID NO: 84194):EXGXR (SEQ ID NO: 84179), GSAGPXX (SEQ ID NO: 84420):TPTKM (SEQ ID NO: 84327):SPIS-AA¹⁷-LFI (SEQ ID NO: 84885):YKQYE (SEQ ID NO: 84398):GMVVD (SEQ ID NO: 84204):RXGXS (SEQ ID NO: 84291), AAPASXX (SEQ ID NO: 84401):VPARL (SEQ ID NO: 84352):SPIS-AA¹⁷-LFI (SEQ ID NO: 84885):YKQYE (SEQ ID NO: 84398):DMVVE (SEQ ID NO: 84161):AXGXR (SEQ ID NO: 84148), HVPKPXX (SEQ ID NO: 84421):APTKL (SEQ ID NO: 84131):SPIS-AA¹⁷-LFI (SEQ ID NO: 84885):YKQYE (SEQ ID NO: 84398):NMVVR (SEQ ID NO: 84275):SXGXH (SEQ ID NO: 84304), RVPSTXX (SEQ ID NO: 84428):APVKT (SEQ ID NO: 84144):SPIS-AA¹⁷-LFI (SEQ ID NO: 84885):YKQYE (SEQ ID NO: 84398):MIVEE (SEQ ID NO: 84241):XGXL (SEQ ID NO: 84122), ASAAPXX (SEQ ID NO: 84402):VPQAL (SEQ ID NO: 84364):SPIS-AA¹⁷-LFI (SEQ ID NO: 84885):YKQYE (SEQ ID NO: 84398):MIVRS (SEQ ID NO: 84243):XKXS (SEQ ID NO: 84124), ASASPXX (SEQ ID NO: 84403):VSQDL (SEQ ID NO: 84387):SPIS-AA¹⁷-LFI (SEQ ID NO: 84885):YKQYE (SEQ ID NO: 84398):MIVKS (SEQ ID NO: 84242):XKXS (SEQ ID NO: 84124), ASASPXX (SEQ ID NO: 84403):VPQDL (SEQ ID NO: 84365):SPIS-AA¹⁷-LFI (SEQ ID NO: 84885):YKQYE (SEQ ID NO: 84398):MVVKS (SEQ ID NO: 84256):XKXS (SEQ ID NO: 84124), NDEGLEX (SEQ ID NO: 84426):VPTEE (SEQ ID NO: 84377):SPIS-AA¹⁷-LFI (SEQ ID NO: 84885):YKQYE (SEQ ID NO: 84398):FLQHN (SEQ ID NO: 84184):KXEXR (SEQ ID NO: 84213), NDEGLEX (SEQ ID NO: 84426):VPTGQ (SEQ ID NO: 84379):SPIS-AA¹⁷-LFI (SEQ ID NO: 84885):YKQYE (SEQ ID NO: 84398):LEEHS (SEQ ID NO: 84217):QXEXR (SEQ ID NO: 84276), SSVKXQP (SEQ ID NO: 84430):SRVHH (SEQ ID NO: 84297):SPIS-AA¹⁷-LFI (SEQ ID NO: 84885):YKQYE (SEQ ID NO: 84398):RLEEH (SEQ ID NO: 84279):LEXAXA (SEQ ID NO: 84400), RNVQXRP (SEQ ID NO: 84427):TQVQL (SEQ ID NO: 84340):SPIS-AA¹⁷-LFI (SEQ ID NO: 84885):YKQYE (SEQ ID NO: 84398):TLEDH (SEQ ID NO: 84307):LAXKXE (SEQ ID NO: 84399), KIPKAXX (SEQ ID NO: 84424):APVEL (SEQ ID NO: 84139):KPLS-AA¹⁷-LYV (SEQ ID NO: 84877):DHHKD (SEQ ID NO: 84149):DMVEE (SEQ ID NO: 84157):GXGXR (SEQ ID NO: 84208), GIPEPXX (SEQ ID NO: 84419):APVKM (SEQ ID NO: 84143):KPLS-AA¹⁷-LYV (SEQ ID NO: 84877):DHHKD (SEQ ID NO: 84149):NMVEE (SEQ ID NO: 84269):SXAXR (SEQ ID NO: 84303), SIPKAXX (SEQ ID NO: 84429):APVEL (SEQ ID NO: 84139):KPLS-AA¹⁷-LYV (SEQ ID NO: 84877):DHHKD (SEQ ID NO: 84149):EMVEE (SEQ ID NO: 84171):GXGXR (SEQ ID NO: 84208), HVTKPTX (SEQ ID NO: 84422):APVKL (SEQ ID NO: 84142):KPLS-AA¹⁷-LYV (SEQ ID NO: 84877):DHHKD (SEQ ID NO: 84149):NMVEE (SEQ ID NO: 84269):SXGXH (SEQ ID NO: 84304), YVPKPXX (SEQ ID NO: 84433):APVKL (SEQ ID NO: 84142):KPLS-AA¹⁷-LYV (SEQ ID NO: 84877):DHHKD (SEQ ID NO: 84149):NMVEE (SEQ ID NO: 84269):SXGXH (SEQ ID NO: 84304), TVPKPXX (SEQ ID NO: 84432):APVQL (SEQ ID NO: 84145):KPLS-AA¹⁷-LYV (SEQ ID NO: 84877):DHHKD (SEQ ID NO: 84149):NMVEE (SEQ ID NO: 84269):AXGXH (SEQ ID NO: 84147), AVPKAXX (SEQ ID NO: 84404):APVKL (SEQ ID NO: 84142):KPLS-AA¹⁷-LYV (SEQ ID NO: 84877):DHHKD (SEQ ID NO: 84149):NMVEE (SEQ ID NO: 84269):AXGXH (SEQ ID NO: 84147), KVGKAXX (SEQ ID NO: 84425):APVKL (SEQ ID NO: 84142):KPLS-AA¹⁷-LYV (SEQ ID NO: 84877):DHHKD (SEQ ID NO: 84149):EGMSVEE (SEQ ID NO: 84412):XGXR (SEQ ID NO: 84123), KASKAXX (SEQ ID NO: 84423):APVKL (SEQ ID NO: 84142):KPLS-AA¹⁷-LYV (SEQ ID NO: 84877):DHHKD (SEQ ID NO: 84149):GMVEE (SEQ ID NO: 84201):EXGXR (SEQ ID NO: 84179), GSAGPXX (SEQ ID NO: 84420):APVKM (SEQ ID NO: 84143):KPLS-AA¹⁷-LYV (SEQ ID NO: 84877):DHHKD (SEQ ID NO: 84149):GMVEE (SEQ ID NO: 84201):RXGXS (SEQ ID NO: 84291), AAPASXX (SEQ ID NO: 84401):APVRL (SEQ ID NO: 84146):KPLS-AA¹⁷-LYV (SEQ ID NO: 84877):DHHKD (SEQ ID NO: 84149):DMVEE (SEQ ID NO: 84157):AXGXR (SEQ ID NO: 84148), STPPTXX (SEQ ID NO: 84431):APVRL (SEQ ID NO: 84146):KPLS-AA¹⁷-LYV (SEQ ID NO: 84877):DHHKD (SEQ ID NO: 84149):DMVEE (SEQ ID NO: 84157):SXGXR (SEQ ID NO: 84305), HVPKPXX (SEQ ID NO: 84421):APVKL (SEQ ID NO: 84142):KPLS-AA¹⁷-LYV (SEQ ID NO: 84877):DHHKD (SEQ ID NO: 84149):NMVEE (SEQ ID NO: 84269):SXGXH (SEQ ID NO: 84304), ASAAPXX (SEQ ID NO: 84402):APVAL (SEQ ID NO: 84136):KPLS-AA¹⁷-LYV (SEQ ID NO: 84877):DHHKD (SEQ ID NO: 84149):MIVEE (SEQ ID NO: 84241):XKXS (SEQ ID NO: 84124), ASASPXX (SEQ ID NO: 84403):APVDL (SEQ ID NO: 84137):KPLS-AA¹⁷-LYV (SEQ ID NO: 84877):DHHKD (SEQ ID NO: 84149):MIVEE (SEQ ID NO: 84241):XKXS (SEQ ID NO: 84124), ASASPXX (SEQ ID NO: 84403):APVDL (SEQ ID NO: 84137):KPLS-AA¹⁷-LYV (SEQ ID NO: 84877):DHHKD (SEQ ID NO: 84149):MVVEE (SEQ ID NO: 84255):XKXS (SEQ ID NO: 84124), NDEGLEX (SEQ ID NO: 84426):APVEE (SEQ ID NO: 84138):KPLS-AA¹⁷-LYV (SEQ ID NO: 84877):DHHKD (SEQ ID NO: 84149):FLVEE (SEQ ID NO: 84187):KXEXR (SEQ ID NO: 84213), NDEGLEX (SEQ ID NO: 84426):APVGQ (SEQ ID NO: 84140):KPLS-AA¹⁷-LYV (SEQ ID NO: 84877):DHHKD (SEQ ID NO: 84149):LEVEE (SEQ ID NO: 84221):QXEXR (SEQ ID NO: 84276), SSVKXQP (SEQ ID NO: 84430):APVHH (SEQ ID NO: 84141):KPLS-AA¹⁷-LYV (SEQ ID NO: 84877):DHHKD (SEQ ID NO: 84149):RLVEE (SEQ ID NO: 84284):LEXAXA (SEQ ID NO: 84400), RNVQXRP (SEQ ID NO: 84427):APVQL (SEQ ID NO: 84145):KPLS-AA¹⁷-LYV (SEQ ID NO: 84877):DHHKD (SEQ ID NO: 84149):TLVEE (SEQ ID NO: 84313):LAXKXE (SEQ ID NO: 84399), KIPKAXX (SEQ ID NO: 84424):VPTEL (SEQ ID NO: 84378):KPLS-AA¹⁷-LYV (SEQ ID NO: 84877):DHHKD (SEQ ID NO: 84149):DMVVE (SEQ ID NO: 84161):GXGXR (SEQ ID NO: 84208), GIPEPXX (SEQ ID NO: 84419):VPEKM (SEQ ID NO: 84360):KPLS-AA¹⁷-LYV (SEQ ID NO: 84877):DHHKD (SEQ ID NO: 84149):NMTVE (SEQ ID NO: 84267):SXAXR (SEQ ID NO: 84303), SIPKAXX (SEQ ID NO: 84429):VPTEL (SEQ ID NO: 84378):KPLS-AA¹⁷-LYV (SEQ ID NO: 84877):DHHKD (SEQ ID NO: 84149):EMVVE (SEQ ID NO: 84175):GXGXR (SEQ ID NO: 84208), HVTKPTX (SEQ ID NO: 84422):APTKL (SEQ ID NO: 84131):KPLS-AA¹⁷-LYV (SEQ ID NO: 84877):DHHKD (SEQ ID NO: 84149):NMVVR (SEQ ID NO: 84275):SXGXH (SEQ ID NO: 84304), YVPKPXX (SEQ ID NO: 84433):APTKL (SEQ ID NO: 84131):KPLS-AA¹⁷-LYV (SEQ ID NO: 84877):DHHKD (SEQ ID NO: 84149):NMVVR (SEQ ID NO: 84275):SXGXH (SEQ ID NO: 84304), TVPKPXX (SEQ ID NO: 84432):APTQL (SEQ ID NO: 84134):KPLS-AA¹⁷-LYV (SEQ ID NO: 84877):DHHKD (SEQ ID NO: 84149):NMVVR (SEQ ID NO: 84275):AXGXH (SEQ ID NO: 84147), AVPKAXX (SEQ ID NO: 84404):APTKL (SEQ ID NO: 84131):KPLS-AA¹⁷-LYV (SEQ ID NO: 84877):DHHKD (SEQ ID NO: 84149):NMVVK (SEQ ID NO: 84274):AXGXH (SEQ ID NO: 84147), KVGKAXX (SEQ ID NO: 84425):VPTKL (SEQ ID NO: 84381):KPLS-AA¹⁷-LYV (SEQ ID NO: 84877):DHHKD (SEQ ID NO: 84149):EGMSVAE (SEQ ID NO: 84411):XGXR (SEQ ID NO: 84123), KASKAXX (SEQ ID NO: 84423):VPTKL (SEQ ID NO: 84381):KPLS-AA¹⁷-LYV (SEQ ID NO: 84877):DHHKD (SEQ ID NO: 84149):GMAVS (SEQ ID NO: 84194):EXGXR (SEQ ID NO: 84179), GSAGPXX (SEQ ID NO: 84420):TPTKM (SEQ ID NO: 84327):KPLS-AA¹⁷-LYV (SEQ ID NO: 84877):DHHKD (SEQ ID NO: 84149):GMVVD (SEQ ID NO: 84204):RXGXS (SEQ ID NO: 84291), AAPASXX (SEQ ID NO: 84401):VPARL (SEQ ID NO: 84352):KPLS-AA¹⁷-LYV (SEQ ID NO: 84877):DHHKD (SEQ ID NO: 84149):DMVVE (SEQ ID NO: 84161):AXGXR (SEQ ID NO: 84148), STPPTXX (SEQ ID NO: 84431):VPTRL (SEQ ID NO: 84385):KPLS-AA¹⁷-LYV (SEQ ID NO: 84877):DHHKD (SEQ ID NO: 84149):DMVVE (SEQ ID NO: 84161):SXGXR (SEQ ID NO: 84305), HVPKPXX (SEQ ID NO: 84421):APTKL (SEQ ID NO: 84131):KPLS-AA¹⁷-LYV (SEQ ID NO: 84877):DHHKD (SEQ ID NO: 84149):NMVVR (SEQ ID NO: 84275):SXGXH (SEQ ID NO: 84304), ASAAPXX (SEQ ID NO: 84402):VPQAL (SEQ ID NO: 84364):KPLS-AA¹⁷-LYV (SEQ ID NO: 84877):DHHKD (SEQ ID NO: 84149):MIVRS (SEQ ID NO: 84243):XKXS (SEQ ID NO: 84124), ASASPXX (SEQ ID NO: 84403):VSQDL (SEQ ID NO: 84387):KPLS-AA¹⁷-LYV (SEQ ID NO: 84877):DHHKD (SEQ ID NO: 84149):MIVKS (SEQ ID NO: 84242):XKXS (SEQ ID NO: 84124), ASASPXX (SEQ ID NO: 84403):VPQDL (SEQ ID NO: 84365):KPLS-AA¹⁷-LYV (SEQ ID NO: 84877):DHHKD (SEQ ID NO: 84149):MVVKS (SEQ ID NO: 84256):XKXS (SEQ ID NO: 84124), NDEGLEX (SEQ ID NO: 84426):VPTEE (SEQ ID NO: 84377):KPLS-AA¹⁷-LYV (SEQ ID NO: 84877):DHHKD (SEQ ID NO: 84149):FLQHN (SEQ ID NO: 84184):KXEXR (SEQ ID NO: 84213), NDEGLEX (SEQ ID NO: 84426):VPTGQ (SEQ ID NO: 84379):KPLS-AA¹⁷-LYV (SEQ ID NO: 84877):DHHKD (SEQ ID NO: 84149):LEEHS (SEQ ID NO: 84217):QXEXR (SEQ ID NO: 84276), SSVKXQP (SEQ ID NO: 84430):SRVHH (SEQ ID NO: 84297):KPLS-AA¹⁷-LYV (SEQ ID NO: 84877):DHHKD (SEQ ID NO: 84149):RLEEH (SEQ ID NO: 84279):LEXAXA (SEQ ID NO: 84400), RNVQXRP (SEQ ID NO: 84427):TQVQL (SEQ ID NO: 84340):KPLS-AA¹⁷-LYV (SEQ ID NO: 84877):DHHKD (SEQ ID NO: 84149):TLEDH (SEQ ID NO: 84307):LAXKXE (SEQ ID NO: 84399), KIPKAXX (SEQ ID NO: 84424):VPQEL (SEQ ID NO: 84367):EPLP-AA¹⁷-VYY (SEQ ID NO: 84875):EQLSN (SEQ ID NO: 84178):DMVRS (SEQ ID NO: 84159):GXGXR (SEQ ID NO: 84208), GIPEPXX (SEQ ID NO: 84419):VPQKM (SEQ ID NO: 84371):EPLP-AA¹⁷-VYY (SEQ ID NO: 84875):EQLSN (SEQ ID NO: 84178):NMVRS (SEQ ID NO: 84271):SXAXR (SEQ ID NO: 84303), SIPKAXX (SEQ ID NO: 84429):VPQEL (SEQ ID NO: 84367):EPLP-AA¹⁷-VYY (SEQ ID NO: 84875):EQLSN (SEQ ID NO: 84178):EMVRS (SEQ ID NO: 84173):GXGXR (SEQ ID NO: 84208), HVTKPTX (SEQ ID NO: 84422):VPQKL (SEQ ID NO: 84370):EPLP-AA¹⁷-VYY (SEQ ID NO: 84875):EQLSN (SEQ ID NO: 84178):NMVRS (SEQ ID NO: 84271):SXGXH (SEQ ID NO: 84304), YVPKPXX (SEQ ID NO: 84433):VPQKL (SEQ ID NO: 84370):EPLP-AA¹⁷-VYY (SEQ ID NO: 84875):EQLSN (SEQ ID NO: 84178):NMVRS (SEQ ID NO: 84271):SXGXH (SEQ ID NO: 84304), TVPKPXX (SEQ ID NO: 84432):VPQQL (SEQ ID NO: 84373):EPLP-AA¹⁷-VYY (SEQ ID NO: 84875):EQLSN (SEQ ID NO: 84178):NMVRS (SEQ ID NO: 84271):AXGXH (SEQ ID NO: 84147), AVPKAXX (SEQ ID NO: 84404):VPQKL (SEQ ID NO: 84370):EPLP-AA¹⁷-VYY (SEQ ID NO: 84875):EQLSN (SEQ ID NO: 84178):NMVRS (SEQ ID NO: 84271):AXGXH (SEQ ID NO: 84147), KVGKAXX (SEQ ID NO: 84425):VPQKL (SEQ ID NO: 84370):EPLP-AA¹⁷-VYY (SEQ ID NO: 84875):EQLSN (SEQ ID NO: 84178):EGMSVRS (SEQ ID NO: 84414):XGXR (SEQ ID NO: 84123), KASKAXX (SEQ ID NO: 84423):VPQKL (SEQ ID NO: 84370):EPLP-AA¹⁷-VYY (SEQ ID NO: 84875):EQLSN (SEQ ID NO: 84178):GMVRS (SEQ ID NO: 84203):EXGXR (SEQ ID NO: 84179), GSAGPXX (SEQ ID NO: 84420):VPQKM (SEQ ID NO: 84371):EPLP-AA¹⁷-VYY (SEQ ID NO: 84875):EQLSN (SEQ ID NO: 84178):GMVRS (SEQ ID NO: 84203):RXGXS (SEQ ID NO: 84291), AAPASXX (SEQ ID NO: 84401):VPQRL (SEQ ID NO: 84374):EPLP-AA¹⁷-VYY (SEQ ID NO: 84875):EQLSN (SEQ ID NO: 84178):DMVRS (SEQ ID NO: 84159):AXGXR (SEQ ID NO: 84148), STPPTXX (SEQ ID NO: 84431):VPQRL (SEQ ID NO: 84374):EPLP-AA¹⁷-VYY (SEQ ID NO: 84875):EQLSN (SEQ ID NO: 84178):DMVRS (SEQ ID NO: 84159):SXGXR (SEQ ID NO: 84305), HVPKPXX (SEQ ID NO: 84421):VPQKL (SEQ ID NO: 84370):EPLP-AA¹⁷-VYY (SEQ ID NO: 84875):EQLSN (SEQ ID NO: 84178):NMVRS (SEQ ID NO: 84271):SXGXH (SEQ ID NO: 84304), RVPSTXX (SEQ ID NO: 84428):VPQKT (SEQ ID NO: 84372):EPLP-AA¹⁷-VYY (SEQ ID NO: 84875):EQLSN (SEQ ID NO: 84178):MIVRS (SEQ ID NO: 84243):XGXL (SEQ ID NO: 84122), ASASPXX (SEQ ID NO: 84403):VPQDL (SEQ ID NO: 84365):EPLP-AA¹⁷-VYY (SEQ ID NO: 84875):EQLSN (SEQ ID NO: 84178):MIVRS (SEQ ID NO: 84243):XKXS (SEQ ID NO: 84124), ASASPXX (SEQ ID NO: 84403):VPQDL (SEQ ID NO: 84365):EPLP-AA¹⁷-VYY (SEQ ID NO: 84875):EQLSN (SEQ ID NO: 84178):MVVRS (SEQ ID NO: 84257):XKXS (SEQ ID NO: 84124), NDEGLEX (SEQ ID NO: 84426):VPQEE (SEQ ID NO: 84366):EPLP-AA¹⁷-VYY (SEQ ID NO: 84875):EQLSN (SEQ ID NO: 84178):FLVRS (SEQ ID NO: 84189):KXEXR (SEQ ID NO: 84213), NDEGLEX (SEQ ID NO: 84426):VPQGQ (SEQ ID NO: 84368):EPLP-AA¹⁷-VYY (SEQ ID NO: 84875):EQLSN (SEQ ID NO: 84178):LEVRS (SEQ ID NO: 84223):QXEXR (SEQ ID NO: 84276), SSVKXQP (SEQ ID NO: 84430):VPQHH (SEQ ID NO: 84369):EPLP-AA¹⁷-VYY (SEQ ID NO: 84875):EQLSN (SEQ ID NO: 84178):RLVRS (SEQ ID NO: 84286):LEXAXA (SEQ ID NO: 84400), RNVQXRP (SEQ ID NO: 84427):VPQQL (SEQ ID NO: 84373):EPLP-AA¹⁷-VYY (SEQ ID NO: 84875):EQLSN (SEQ ID NO: 84178):TLVRS (SEQ ID NO: 84315):LAXKXE (SEQ ID NO: 84399), KIPKAXX (SEQ ID NO: 84424):VPTEL (SEQ ID NO: 84378):EPLP-AA¹⁷-VYY (SEQ ID NO: 84875):EQLSN (SEQ ID NO: 84178):DMVVE (SEQ ID NO: 84161):GXGXR (SEQ ID NO: 84208), GIPEPXX (SEQ ID NO: 84419):VPEKM (SEQ ID NO: 84360):EPLP-AA¹⁷-VYY (SEQ ID NO: 84875):EQLSN (SEQ ID NO: 84178):NMTVE (SEQ ID NO: 84267):SXAXR (SEQ ID NO: 84303), SIPKAXX (SEQ ID NO: 84429):VPTEL (SEQ ID NO: 84378):EPLP-AA¹⁷-VYY (SEQ ID NO: 84875):EQLSN (SEQ ID NO: 84178):EMVVE (SEQ ID NO: 84175):GXGXR (SEQ ID NO: 84208), HVTKPTX (SEQ ID NO: 84422):APTKL (SEQ ID NO: 84131):EPLP-AA¹⁷-VYY (SEQ ID NO: 84875):EQLSN (SEQ ID NO: 84178):NMVVR (SEQ ID NO: 84275):SXGXH (SEQ ID NO: 84304), YVPKPXX (SEQ ID NO: 84433):APTKL (SEQ ID NO: 84131):EPLP-AA¹⁷-VYY (SEQ ID NO: 84875):EQLSN (SEQ ID NO: 84178):NMVVR (SEQ ID NO: 84275):SXGXH (SEQ ID NO: 84304), TVPKPXX (SEQ ID NO: 84432):APTQL (SEQ ID NO: 84134):EPLP-AA¹⁷-VYY (SEQ ID NO: 84875):EQLSN (SEQ ID NO: 84178):NMVVR (SEQ ID NO: 84275):AXGXH (SEQ ID NO: 84147), AVPKAXX (SEQ ID NO: 84404):APTKL (SEQ ID NO: 84131):EPLP-AA¹⁷-VYY (SEQ ID NO: 84875):EQLSN (SEQ ID NO: 84178):NMVVK (SEQ ID NO: 84274):AXGXH (SEQ ID NO: 84147), KVGKAXX (SEQ ID NO: 84425):VPTKL (SEQ ID NO: 84381):EPLP-AA¹⁷-VYY (SEQ ID NO: 84875):EQLSN (SEQ ID NO: 84178):EGMSVAE (SEQ ID NO: 84411):XGXR (SEQ ID NO: 84123), KASKAXX (SEQ ID NO: 84423):VPTKL (SEQ ID NO: 84381):EPLP-AA¹⁷-VYY (SEQ ID NO: 84875):EQLSN (SEQ ID NO: 84178):GMAVS (SEQ ID NO: 84194):EXGXR (SEQ ID NO: 84179), GSAGPXX (SEQ ID NO: 84420):TPTKM (SEQ ID NO: 84327):EPLP-AA¹⁷-VYY (SEQ ID NO: 84875):EQLSN (SEQ ID NO: 84178):GMVVD (SEQ ID NO: 84204):RXGXS (SEQ ID NO: 84291), AAPASXX (SEQ ID NO: 84401):VPARL (SEQ ID NO: 84352):EPLP-AA¹⁷-VYY (SEQ ID NO: 84875):EQLSN (SEQ ID NO: 84178):DMVVE (SEQ ID NO: 84161):AXGXR (SEQ ID NO: 84148), STPPTXX (SEQ ID NO: 84431):VPTRL (SEQ ID NO: 84385):EPLP-AA¹⁷-VYY (SEQ ID NO: 84875):EQLSN (SEQ ID NO: 84178):DMVVE (SEQ ID NO: 84161):SXGXR (SEQ ID NO: 84305), HVPKPXX (SEQ ID NO: 84421):APTKL (SEQ ID NO: 84131):EPLP-AA¹⁷-VYY (SEQ ID NO: 84875):EQLSN (SEQ ID NO: 84178):NMVVR (SEQ ID NO: 84275):SXGXH (SEQ ID NO: 84304), RVPSTXX (SEQ ID NO: 84428):APVKT (SEQ ID NO: 84144):EPLP-AA¹⁷-VYY (SEQ ID NO: 84875):EQLSN (SEQ ID NO: 84178):MIVEE (SEQ ID NO: 84241):XGXL (SEQ ID NO: 84122), ASASPXX (SEQ ID NO: 84403):VSQDL (SEQ ID NO: 84387):EPLP-AA¹⁷-VYY (SEQ ID NO: 84875):EQLSN (SEQ ID NO: 84178):MIVKS (SEQ ID NO: 84242):XKXS (SEQ ID NO: 84124), ASASPXX (SEQ ID NO: 84403):VPQDL (SEQ ID NO: 84365):EPLP-AA¹⁷-VYY (SEQ ID NO: 84875):EQLSN (SEQ ID NO: 84178):MVVKS (SEQ ID NO: 84256):XKXS (SEQ ID NO: 84124), NDEGLEX (SEQ ID NO: 84426):VPTEE (SEQ ID NO: 84377):EPLP-AA¹⁷-VYY (SEQ ID NO: 84875):EQLSN (SEQ ID NO: 84178):FLQHN (SEQ ID NO: 84184):KXEXR (SEQ ID NO: 84213), NDEGLEX (SEQ ID NO: 84426):VPTGQ (SEQ ID NO: 84379):EPLP-AA¹⁷-VYY (SEQ ID NO: 84875):EQLSN (SEQ ID NO: 84178):LEEHS (SEQ ID NO: 84217):QXEXR (SEQ ID NO: 84276), SSVKXQP (SEQ ID NO: 84430):SRVHH (SEQ ID NO: 84297):EPLP-AA¹⁷-VYY (SEQ ID NO: 84875):EQLSN (SEQ ID NO: 84178):RLEEH (SEQ ID NO: 84279):LEXAXA (SEQ ID NO: 84400), RNVQXRP (SEQ ID NO: 84427):TQVQL (SEQ ID NO: 84340):EPLP-AA¹⁷-VYY (SEQ ID NO: 84875):EQLSN (SEQ ID NO: 84178):TLEDH (SEQ ID NO: 84307):LAXKXE (SEQ ID NO: 84399), KIPKAXX (SEQ ID NO: 84424):VSQEL (SEQ ID NO: 84389):EPLT-AA¹⁷-LYY (SEQ ID NO: 84876):EQLSN (SEQ ID NO: 84178):DMVKS (SEQ ID NO: 84158):GXGXR (SEQ ID NO: 84208), GIPEPXX (SEQ ID NO: 84419):VSQKM (SEQ ID NO: 84393):EPLT-AA¹⁷-LYY (SEQ ID NO: 84876):EQLSN (SEQ ID NO: 84178):NMVKS (SEQ ID NO: 84270):SXAXR (SEQ ID NO: 84303), SIPKAXX (SEQ ID NO: 84429):VSQEL (SEQ ID NO: 84389):EPLT-AA¹⁷-LYY (SEQ ID NO: 84876):EQLSN (SEQ ID NO: 84178):EMVKS (SEQ ID NO: 84172):GXGXR (SEQ ID NO: 84208), HVTKPTX (SEQ ID NO: 84422):VSQKL (SEQ ID NO: 84392):EPLT-AA¹⁷-LYY (SEQ ID NO: 84876):EQLSN (SEQ ID NO: 84178):NMVKS (SEQ ID NO: 84270):SXGXH (SEQ ID NO: 84304), YVPKPXX (SEQ ID NO: 84433):VSQKL (SEQ ID NO: 84392):EPLT-AA¹⁷-LYY (SEQ ID NO: 84876):EQLSN (SEQ ID NO: 84178):NMVKS (SEQ ID NO: 84270):SXGXH (SEQ ID NO: 84304), TVPKPXX (SEQ ID NO: 84432):VSQQL (SEQ ID NO: 84395):EPLT-AA¹⁷-LYY (SEQ ID NO: 84876):EQLSN (SEQ ID NO: 84178):NMVKS (SEQ ID NO: 84270):AXGXH (SEQ ID NO: 84147), AVPKAXX (SEQ ID NO: 84404):VSQKL (SEQ ID NO: 84392):EPLT-AA¹⁷-LYY (SEQ ID NO: 84876):EQLSN (SEQ ID NO: 84178):NMVKS (SEQ ID NO: 84270):AXGXH (SEQ ID NO: 84147), KVGKAXX (SEQ ID NO: 84425):VSQKL (SEQ ID NO: 84392):EPLT-AA¹⁷-LYY (SEQ ID NO: 84876):EQLSN (SEQ ID NO: 84178):EGMSVKS (SEQ ID NO: 84413):XGXR (SEQ ID NO: 84123), KASKAXX (SEQ ID NO: 84423):VSQKL (SEQ ID NO: 84392):EPLT-AA¹⁷-LYY (SEQ ID NO: 84876):EQLSN (SEQ ID NO: 84178):GMVKS (SEQ ID NO: 84202):EXGXR (SEQ ID NO: 84179), GSAGPXX (SEQ ID NO: 84420):VSQKM (SEQ ID NO: 84393):EPLT-AA¹⁷-LYY (SEQ ID NO: 84876):EQLSN (SEQ ID NO: 84178):GMVKS (SEQ ID NO: 84202):RXGXS (SEQ ID NO: 84291), AAPASXX (SEQ ID NO: 84401):VSQRL (SEQ ID NO: 84396):EPLT-AA¹⁷-LYY (SEQ ID NO: 84876):EQLSN (SEQ ID NO: 84178):DMVKS (SEQ ID NO: 84158):AXGXR (SEQ ID NO: 84148), STPPTXX (SEQ ID NO: 84431):VSQRL (SEQ ID NO: 84396):EPLT-AA¹⁷-LYY (SEQ ID NO: 84876):EQLSN (SEQ ID NO: 84178):DMVKS (SEQ ID NO: 84158):SXGXR (SEQ ID NO: 84305), HVPKPXX (SEQ ID NO: 84421):VSQKL (SEQ ID NO: 84392):EPLT-AA¹⁷-LYY (SEQ ID NO: 84876):EQLSN (SEQ ID NO: 84178):NMVKS (SEQ ID NO: 84270):SXGXH (SEQ ID NO: 84304), RVPSTXX (SEQ ID NO: 84428):VSQKT (SEQ ID NO: 84394):EPLT-AA¹⁷-LYY (SEQ ID NO: 84876):EQLSN (SEQ ID NO: 84178):MIVKS (SEQ ID NO: 84242):XGXL (SEQ ID NO: 84122), ASAAPXX (SEQ ID NO: 84402):VSQAL (SEQ ID NO: 84386):EPLT-AA¹⁷-LYY (SEQ ID NO: 84876):EQLSN (SEQ ID NO: 84178):MIVKS (SEQ ID NO: 84242):XKXS (SEQ ID NO: 84124), ASASPXX (SEQ ID NO: 84403):VSQDL (SEQ ID NO: 84387):EPLT-AA¹⁷-LYY (SEQ ID NO: 84876):EQLSN (SEQ ID NO: 84178):MVVKS (SEQ ID NO: 84256):XKXS (SEQ ID NO: 84124), NDEGLEX (SEQ ID NO: 84426):VSQEE (SEQ ID NO: 84388):EPLT-AA¹⁷-LYY (SEQ ID NO: 84876):EQLSN (SEQ ID NO: 84178):FLVKS (SEQ ID NO: 84188):KXEXR (SEQ ID NO: 84213), NDEGLEX (SEQ ID NO: 84426):VSQGQ (SEQ ID NO: 84390):EPLT-AA¹⁷-LYY (SEQ ID NO: 84876):EQLSN (SEQ ID NO: 84178):LEVKS (SEQ ID NO: 84222):QXEXR (SEQ ID NO: 84276), SSVKXQP (SEQ ID NO: 84430):VSQHH (SEQ ID NO: 84391):EPLT-AA¹⁷-LYY (SEQ ID NO: 84876):EQLSN (SEQ ID NO: 84178):RLVKS (SEQ ID NO: 84285):LEXAXA (SEQ ID NO: 84400), RNVQXRP (SEQ ID NO: 84427):VSQQL (SEQ ID NO: 84395):EPLT-AA¹⁷-LYY (SEQ ID NO: 84876):EQLSN (SEQ ID NO: 84178):TLVKS (SEQ ID NO: 84314):LAXKXE (SEQ ID NO: 84399), KIPKAXX (SEQ ID NO: 84424):VPTEL (SEQ ID NO: 84378):EPLT-AA¹⁷-LYY (SEQ ID NO: 84876):EQLSN (SEQ ID NO: 84178):DMVVE (SEQ ID NO: 84161):GXGXR (SEQ ID NO: 84208), GIPEPXX (SEQ ID NO: 84419):VPEKM (SEQ ID NO: 84360):EPLT-AA¹⁷-LYY (SEQ ID NO: 84876):EQLSN (SEQ ID NO: 84178):NMTVE (SEQ ID NO: 84267):SXAXR (SEQ ID NO: 84303), SIPKAXX (SEQ ID NO: 84429):VPTEL (SEQ ID NO: 84378):EPLT-AA¹⁷-LYY (SEQ ID NO: 84876):EQLSN (SEQ ID NO: 84178):EMVVE (SEQ ID NO: 84175):GXGXR (SEQ ID NO: 84208), HVTKPTX (SEQ ID NO: 84422):APTKL (SEQ ID NO: 84131):EPLT-AA¹⁷-LYY (SEQ ID NO: 84876):EQLSN (SEQ ID NO: 84178):NMVVR (SEQ ID NO: 84275):SXGXH (SEQ ID NO: 84304), YVPKPXX (SEQ ID NO: 84433):APTKL (SEQ ID NO: 84131):EPLT-AA¹⁷-LYY (SEQ ID NO: 84876):EQLSN (SEQ ID NO: 84178):NMVVR (SEQ ID NO: 84275):SXGXH (SEQ ID NO: 84304), TVPKPXX (SEQ ID NO: 84432):APTQL (SEQ ID NO: 84134):EPLT-AA¹⁷-LYY (SEQ ID NO: 84876):EQLSN (SEQ ID NO: 84178):NMVVR (SEQ ID NO: 84275):AXGXH (SEQ ID NO: 84147), AVPKAXX (SEQ ID NO: 84404):APTKL (SEQ ID NO: 84131):EPLT-AA¹⁷-LYY (SEQ ID NO: 84876):EQLSN (SEQ ID NO: 84178):NMVVK (SEQ ID NO: 84274):AXGXH (SEQ ID NO: 84147), KVGKAXX (SEQ ID NO: 84425):VPTKL (SEQ ID NO: 84381):EPLT-AA¹⁷-LYY (SEQ ID NO: 84876):EQLSN (SEQ ID NO: 84178):EGMSVAE (SEQ ID NO: 84411):XGXR (SEQ ID NO: 84123), KASKAXX (SEQ ID NO: 84423):VPTKL (SEQ ID NO: 84381):EPLT-AA¹⁷-LYY (SEQ ID NO: 84876):EQLSN (SEQ ID NO: 84178):GMAVS (SEQ ID NO: 84194):EXGXR (SEQ ID NO: 84179), GSAGPXX (SEQ ID NO: 84420):TPTKM (SEQ ID NO: 84327):EPLT-AA¹⁷-LYY (SEQ ID NO: 84876):EQLSN (SEQ ID NO: 84178):GMVVD (SEQ ID NO: 84204):RXGXS (SEQ ID NO: 84291), AAPASXX (SEQ ID NO: 84401):VPARL (SEQ ID NO: 84352):EPLT-AA¹⁷-LYY (SEQ ID NO: 84876):EQLSN (SEQ ID NO: 84178):DMVVE (SEQ ID NO: 84161):AXGXR (SEQ ID NO: 84148), STPPTXX (SEQ ID NO: 84431):VPTRL (SEQ ID NO: 84385):EPLT-AA¹⁷-LYY (SEQ ID NO: 84876):EQLSN (SEQ ID NO: 84178):DMVVE (SEQ ID NO: 84161):SXGXR (SEQ ID NO: 84305), HVPKPXX (SEQ ID NO: 84421):APTKL (SEQ ID NO: 84131):EPLT-AA¹⁷-LYY (SEQ ID NO: 84876):EQLSN (SEQ ID NO: 84178):NMVVR (SEQ ID NO: 84275):SXGXH (SEQ ID NO: 84304), RVPSTXX (SEQ ID NO: 84428):APVKT (SEQ ID NO: 84144):EPLT-AA¹⁷-LYY (SEQ ID NO: 84876):EQLSN (SEQ ID NO: 84178):MIVEE (SEQ ID NO: 84241):XGXL (SEQ ID NO: 84122), ASAAPXX (SEQ ID NO: 84402):VPQAL (SEQ ID NO: 84364):EPLT-AA¹⁷-LYY (SEQ ID NO: 84876):EQLSN (SEQ ID NO: 84178):MIVRS (SEQ ID NO: 84243):XKXS (SEQ ID NO: 84124), ASASPXX (SEQ ID NO: 84403):VPQDL (SEQ ID NO: 84365):EPLT-AA¹⁷-LYY (SEQ ID NO: 84876):EQLSN (SEQ ID NO: 84178):MVVKS (SEQ ID NO: 84256):XKXS (SEQ ID NO: 84124), NDEGLEX (SEQ ID NO: 84426):VPTEE (SEQ ID NO: 84377):EPLT-AA¹⁷-LYY (SEQ ID NO: 84876):EQLSN (SEQ ID NO: 84178):FLQHN (SEQ ID NO: 84184):KXEXR (SEQ ID NO: 84213), NDEGLEX (SEQ ID NO: 84426):VPTGQ (SEQ ID NO: 84379):EPLT-AA¹⁷-LYY (SEQ ID NO: 84876):EQLSN (SEQ ID NO: 84178):LEEHS (SEQ ID NO: 84217):QXEXR (SEQ ID NO: 84276), SSVKXQP (SEQ ID NO: 84430):SRVHH (SEQ ID NO: 84297):EPLT-AA¹⁷-LYY (SEQ ID NO: 84876):EQLSN (SEQ ID NO: 84178):RLEEH (SEQ ID NO: 84279):LEXAXA (SEQ ID NO: 84400), RNVQXRP (SEQ ID NO: 84427):TQVQL (SEQ ID NO: 84340):EPLT-AA¹⁷-LYY (SEQ ID NO: 84876):EQLSN (SEQ ID NO: 84178):TLEDH (SEQ ID NO: 84307):LAXKXE (SEQ ID NO: 84399), KIPKAXX (SEQ ID NO: 84424):VPQEL (SEQ ID NO: 84367):EPLT-AA¹⁷-LYY (SEQ ID NO: 84876):EQLSN (SEQ ID NO: 84178):DMVKS (SEQ ID NO: 84158):GXGXR (SEQ ID NO: 84208), GIPEPXX (SEQ ID NO: 84419):VPQKM (SEQ ID NO: 84371):EPLT-AA¹⁷-LYY (SEQ ID NO: 84876):EQLSN (SEQ ID NO: 84178):NMVKS (SEQ ID NO: 84270):SXAXR (SEQ ID NO: 84303), SIPKAXX (SEQ ID NO: 84429):VPQEL (SEQ ID NO: 84367):EPLT-AA¹⁷-LYY (SEQ ID NO: 84876):EQLSN (SEQ ID NO: 84178):EMVKS (SEQ ID NO: 84172):GXGXR (SEQ ID NO: 84208), HVTKPTX (SEQ ID NO: 84422):VPQKL (SEQ ID NO: 84370):EPLT-AA¹⁷-LYY (SEQ ID NO: 84876):EQLSN (SEQ ID NO: 84178):NMVKS (SEQ ID NO: 84270):SXGXH (SEQ ID NO: 84304), YVPKPXX (SEQ ID NO: 84433):VPQKL (SEQ ID NO: 84370):EPLT-AA¹⁷-LYY (SEQ ID NO: 84876):EQLSN (SEQ ID NO: 84178):NMVKS (SEQ ID NO: 84270):SXGXH (SEQ ID NO: 84304), TVPKPXX (SEQ ID NO: 84432):VPQQL (SEQ ID NO: 84373):EPLT-AA¹⁷-LYY (SEQ ID NO: 84876):EQLSN (SEQ ID NO: 84178):NMVKS (SEQ ID NO: 84270):AXGXH (SEQ ID NO: 84147), AVPKAXX (SEQ ID NO: 84404):VPQKL (SEQ ID NO: 84370):EPLT-AA¹⁷-LYY (SEQ ID NO: 84876):EQLSN (SEQ ID NO: 84178):NMVKS (SEQ ID NO: 84270):AXGXH (SEQ ID NO: 84147), KVGKAXX (SEQ ID NO: 84425):VPQKL (SEQ ID NO: 84370):EPLT-AA¹⁷-LYY (SEQ ID NO: 84876):EQLSN (SEQ ID NO: 84178):EGMSVKS (SEQ ID NO: 84413):XGXR (SEQ ID NO: 84123), KASKAXX (SEQ ID NO: 84423):VPQKL (SEQ ID NO: 84370):EPLT-AA¹⁷-LYY (SEQ ID NO: 84876):EQLSN (SEQ ID NO: 84178):GMVKS (SEQ ID NO: 84202):EXGXR (SEQ ID NO: 84179), GSAGPXX (SEQ ID NO: 84420):VPQKM (SEQ ID NO: 84371):EPLT-AA¹⁷-LYY (SEQ ID NO: 84876):EQLSN (SEQ ID NO: 84178):GMVKS (SEQ ID NO: 84202):RXGXS (SEQ ID NO: 84291), AAPASXX (SEQ ID NO: 84401):VPQRL (SEQ ID NO: 84374):EPLT-AA¹⁷-LYY (SEQ ID NO: 84876):EQLSN (SEQ ID NO: 84178):DMVKS (SEQ ID NO: 84158):AXGXR (SEQ ID NO: 84148), STPPTXX (SEQ ID NO: 84431):VPQRL (SEQ ID NO: 84374):EPLT-AA¹⁷-LYY (SEQ ID NO: 84876):EQLSN (SEQ ID NO: 84178):DMVKS (SEQ ID NO: 84158):SXGXR (SEQ ID NO: 84305), HVPKPXX (SEQ ID NO: 84421):VPQKL (SEQ ID NO: 84370):EPLT-AA¹⁷-LYY (SEQ ID NO: 84876):EQLSN (SEQ ID NO: 84178):NMVKS (SEQ ID NO: 84270):SXGXH (SEQ ID NO: 84304), RVPSTXX (SEQ ID NO: 84428):VPQKT (SEQ ID NO: 84372):EPLT-AA¹⁷-LYY (SEQ ID NO: 84876):EQLSN (SEQ ID NO: 84178):MIVKS (SEQ ID NO: 84242):XGXL (SEQ ID NO: 84122), ASAAPXX (SEQ ID NO: 84402):VPQAL (SEQ ID NO: 84364):EPLT-AA¹⁷-LYY (SEQ ID NO: 84876):EQLSN (SEQ ID NO: 84178):MIVKS (SEQ ID NO: 84242):XKXS (SEQ ID NO: 84124), ASASPXX (SEQ ID NO: 84403):VPQDL (SEQ ID NO: 84365):EPLT-AA¹⁷-LYY (SEQ ID NO: 84876):EQLSN (SEQ ID NO: 84178):MIVKS (SEQ ID NO: 84242):XKXS (SEQ ID NO: 84124), NDEGLEX (SEQ ID NO: 84426):VPQEE (SEQ ID NO: 84366):EPLT-AA¹⁷-LYY (SEQ ID NO: 84876):EQLSN (SEQ ID NO: 84178):FLVKS (SEQ ID NO: 84188):KXEXR (SEQ ID NO: 84213), NDEGLEX (SEQ ID NO: 84426):VPQGQ (SEQ ID NO: 84368):EPLT-AA¹⁷-LYY (SEQ ID NO: 84876):EQLSN (SEQ ID NO: 84178):LEVKS (SEQ ID NO: 84222):QXEXR (SEQ ID NO: 84276), SSVKXQP (SEQ ID NO: 84430):VPQHH (SEQ ID NO: 84369):EPLT-AA¹⁷-LYY (SEQ ID NO: 84876):EQLSN (SEQ ID NO: 84178):RLVKS (SEQ ID NO: 84285):LEXAXA (SEQ ID NO: 84400), RNVQXRP (SEQ ID NO: 84427):VPQQL (SEQ ID NO: 84373):EPLT-AA¹⁷-LYY (SEQ ID NO: 84876):EQLSN (SEQ ID NO: 84178):TLVKS (SEQ ID NO: 84314):LAXKXE (SEQ ID NO: 84399), ASASPXX (SEQ ID NO: 84403):VSQDL (SEQ ID NO: 84387):EPLT-AA¹⁷-LYY (SEQ ID NO: 84876):EQLSN (SEQ ID NO: 84178):MIVKS (SEQ ID NO: 84242):XKXS (SEQ ID NO: 84124), KIPKAXX (SEQ ID NO: 84424):VPTEL (SEQ ID NO: 84378):SNIT-AA¹⁷-QIM (SEQ ID NO: 84883):IGEMS (SEQ ID NO: 84209):DMQHN (SEQ ID NO: 84154):GXGXR (SEQ ID NO: 84208), GIPEPXX (SEQ ID NO: 84419):VPTKM (SEQ ID NO: 84382):SNIT-AA¹⁷-QIM (SEQ ID NO: 84883):IGEMS (SEQ ID NO: 84209):NMQHN (SEQ ID NO: 84266):SXAXR (SEQ ID NO: 84303), SIPKAXX (SEQ ID NO: 84429):VPTEL (SEQ ID NO: 84378):SNIT-AA¹⁷-QIM (SEQ ID NO: 84883):IGEMS (SEQ ID NO: 84209):EMQHN (SEQ ID NO: 84168):GXGXR (SEQ ID NO: 84208), HVTKPTX (SEQ ID NO: 84422):VPTKL (SEQ ID NO: 84381):SNIT-AA¹⁷-QIM (SEQ ID NO: 84883):IGEMS (SEQ ID NO: 84209):NMQHN (SEQ ID NO: 84266):SXGXH (SEQ ID NO: 84304), YVPKPXX (SEQ ID NO: 84433):VPTKL (SEQ ID NO: 84381):SNIT-AA¹⁷-QIM (SEQ ID NO: 84883):IGEMS (SEQ ID NO: 84209):NMQHN (SEQ ID NO: 84266):SXGXH (SEQ ID NO: 84304), TVPKPXX (SEQ ID NO: 84432):VPTQL (SEQ ID NO: 84384):SNIT-AA¹⁷-QIM (SEQ ID NO: 84883):IGEMS (SEQ ID NO: 84209):NMQHN (SEQ ID NO: 84266):AXGXH (SEQ ID NO: 84147), AVPKAXX (SEQ ID NO: 84404):VPTKL (SEQ ID NO: 84381):SNIT-AA¹⁷-QIM (SEQ ID NO: 84883):IGEMS (SEQ ID NO: 84209):NMQHN (SEQ ID NO: 84266):AXGXH (SEQ ID NO: 84147), KVGKAXX (SEQ ID NO: 84425):VPTKL (SEQ ID NO: 84381):SNIT-AA¹⁷-QIM (SEQ ID NO: 84883):IGEMS (SEQ ID NO: 84209):EGMSQHN (SEQ ID NO: 84409):XGXR (SEQ ID NO: 84123), KASKAXX (SEQ ID NO: 84423):VPTKL (SEQ ID NO: 84381):SNIT-AA¹⁷-QIM (SEQ ID NO: 84883):IGEMS (SEQ ID NO: 84209):GMQHN (SEQ ID NO: 84198):EXGXR (SEQ ID NO: 84179), GSAGPXX (SEQ ID NO: 84420):VPTKM (SEQ ID NO: 84382):SNIT-AA¹⁷-QIM (SEQ ID NO: 84883):IGEMS (SEQ ID NO: 84209):GMQHN (SEQ ID NO: 84198):RXGXS (SEQ ID NO: 84291), AAPASXX (SEQ ID NO: 84401):VPTRL (SEQ ID NO: 84385):SNIT-AA¹⁷-QIM (SEQ ID NO: 84883):IGEMS (SEQ ID NO: 84209):DMQHN (SEQ ID NO: 84154):AXGXR (SEQ ID NO: 84148), STPPTXX (SEQ ID NO: 84431):VPTRL (SEQ ID NO: 84385):SNIT-AA¹⁷-QIM (SEQ ID NO: 84883):IGEMS (SEQ ID NO: 84209):DMQHN (SEQ ID NO: 84154):SXGXR (SEQ ID NO: 84305), HVPKPXX (SEQ ID NO: 84421):VPTKL (SEQ ID NO: 84381):SNIT-AA¹⁷-QIM (SEQ ID NO: 84883):IGEMS (SEQ ID NO: 84209):NMQHN (SEQ ID NO: 84266):SXGXH (SEQ ID NO: 84304), RVPSTXX (SEQ ID NO: 84428):VPTKT (SEQ ID NO: 84383):SNIT-AA¹⁷-QIM (SEQ ID NO: 84883):IGEMS (SEQ ID NO: 84209):MIQHN (SEQ ID NO: 84238):XGXL (SEQ ID NO: 84122), ASAAPXX (SEQ ID NO: 84402):VPTAL (SEQ ID NO: 84375):SNIT-AA¹⁷-QIM (SEQ ID NO: 84883):IGEMS (SEQ ID NO: 84209):MIQHN (SEQ ID NO: 84238):XKXS (SEQ ID NO: 84124), ASASPXX (SEQ ID NO: 84403):VPTDL (SEQ ID NO: 84376):SNIT-AA¹⁷-QIM (SEQ ID NO: 84883):IGEMS (SEQ ID NO: 84209):MIQHN (SEQ ID NO: 84238):XKXS (SEQ ID NO: 84124), ASASPXX (SEQ ID NO: 84403):VPTDL (SEQ ID NO: 84376):SNIT-AA¹⁷-QIM (SEQ ID NO: 84883):IGEMS (SEQ ID NO: 84209):MVQHN (SEQ ID NO: 84252):XKXS (SEQ ID NO: 84124), NDEGLEX (SEQ ID NO: 84426):VPTGQ (SEQ ID NO: 84379):SNIT-AA¹⁷-QIM (SEQ ID NO: 84883):IGEMS (SEQ ID NO: 84209):LEQHN (SEQ ID NO: 84218):QXEXR (SEQ ID NO: 84276), NDEGLEX (SEQ ID NO: 84426):VPTEE (SEQ ID NO: 84377):SNIT-AA¹⁷-QIM (SEQ ID NO: 84883):IGEMS (SEQ ID NO: 84209):FLQHN (SEQ ID NO: 84184):KXEXR (SEQ ID NO: 84213), SSVKXQP (SEQ ID NO: 84430):VPTHH (SEQ ID NO: 84380):SNIT-AA¹⁷-QIM (SEQ ID NO: 84883):IGEMS (SEQ ID NO: 84209):RLQHN (SEQ ID NO: 84281):LEXAXA (SEQ ID NO: 84400), RNVQXRP (SEQ ID NO: 84427):VPTQL (SEQ ID NO: 84384):SNIT-AA¹⁷-QIM (SEQ ID NO: 84883):IGEMS (SEQ ID NO: 84209):TLQHN (SEQ ID NO: 84310):LAXKXE (SEQ ID NO: 84399), KIPKAXX (SEQ ID NO: 84424):VPTEL (SEQ ID NO: 84378):SNIT-AA¹⁷-QIM (SEQ ID NO: 84883):IGEMS (SEQ ID NO: 84209):DMVVE (SEQ ID NO: 84161):GXGXR (SEQ ID NO: 84208), GIPEPXX (SEQ ID NO: 84419):VPEKM (SEQ ID NO: 84360):SNIT-AA¹⁷-QIM (SEQ ID NO: 84883):IGEMS (SEQ ID NO: 84209):NMTVE (SEQ ID NO: 84267):SXAXR (SEQ ID NO: 84303), SIPKAXX (SEQ ID NO: 84429):VPTEL (SEQ ID NO: 84378):SNIT-AA¹⁷-QIM (SEQ ID NO: 84883):IGEMS (SEQ ID NO: 84209):EMVVE (SEQ ID NO: 84175):GXGXR (SEQ ID NO: 84208), HVTKPTX (SEQ ID NO: 84422):APTKL (SEQ ID NO: 84131):SNIT-AA¹⁷-QIM (SEQ ID NO: 84883):IGEMS (SEQ ID NO: 84209):NMVVR (SEQ ID NO: 84275):SXGXH (SEQ ID NO: 84304), YVPKPXX (SEQ ID NO: 84433):APTKL (SEQ ID NO: 84131):SNIT-AA¹⁷-QIM (SEQ ID NO: 84883):IGEMS (SEQ ID NO: 84209):NMVVR (SEQ ID NO: 84275):SXGXH (SEQ ID NO: 84304), TVPKPXX (SEQ ID NO: 84432):APTQL (SEQ ID NO: 84134):SNIT-AA¹⁷-QIM (SEQ ID NO: 84883):IGEMS (SEQ ID NO: 84209):NMVVR (SEQ ID NO: 84275):AXGXH (SEQ ID NO: 84147), AVPKAXX (SEQ ID NO: 84404):APTKL (SEQ ID NO: 84131):SNIT-AA¹⁷-QIM (SEQ ID NO: 84883):IGEMS (SEQ ID NO: 84209):NMVVK (SEQ ID NO: 84274):AXGXH (SEQ ID NO: 84147), KVGKAXX (SEQ ID NO: 84425):VPTKL (SEQ ID NO: 84381):SNIT-AA¹⁷-QIM (SEQ ID NO: 84883):IGEMS (SEQ ID NO: 84209):EGMSVAE (SEQ ID NO: 84411):XGXR (SEQ ID NO: 84123), KASKAXX (SEQ ID NO: 84423):VPTKL (SEQ ID NO: 84381):SNIT-AA¹⁷-QIM (SEQ ID NO: 84883):IGEMS (SEQ ID NO: 84209):GMAVS (SEQ ID NO: 84194):EXGXR (SEQ ID NO: 84179), GSAGPXX (SEQ ID NO: 84420):TPTKM (SEQ ID NO: 84327):SNIT-AA¹⁷-QIM (SEQ ID NO: 84883):IGEMS (SEQ ID NO: 84209):GMVVD (SEQ ID NO: 84204):RXGXS (SEQ ID NO: 84291), AAPASXX (SEQ ID NO: 84401):VPARL (SEQ ID NO: 84352):SNIT-AA¹⁷-QIM (SEQ ID NO: 84883):IGEMS (SEQ ID NO: 84209):DMVVE (SEQ ID NO: 84161):AXGXR (SEQ ID NO: 84148), STPPTXX (SEQ ID NO: 84431):VPTRL (SEQ ID NO: 84385):SNIT-AA¹⁷-QIM (SEQ ID NO: 84883):IGEMS (SEQ ID NO: 84209):DMVVE (SEQ ID NO: 84161):SXGXR (SEQ ID NO: 84305), HVPKPXX (SEQ ID NO: 84421):APTKL (SEQ ID NO: 84131):SNIT-AA¹⁷-QIM (SEQ ID NO: 84883):IGEMS (SEQ ID NO: 84209):NMVVR (SEQ ID NO: 84275):SXGXH (SEQ ID NO: 84304), RVPSTXX (SEQ ID NO: 84428):APVKT (SEQ ID NO: 84144):SNIT-AA¹⁷-QIM (SEQ ID NO: 84883):IGEMS (SEQ ID NO: 84209):MIVEE (SEQ ID NO: 84241):XGXL (SEQ ID NO: 84122), ASAAPXX (SEQ ID NO: 84402):VPQAL (SEQ ID NO: 84364):SNIT-AA¹⁷-QIM (SEQ ID NO: 84883):IGEMS (SEQ ID NO: 84209):MIVRS (SEQ ID NO: 84243):XKXS (SEQ ID NO: 84124), ASASPXX (SEQ ID NO: 84403):VSQDL (SEQ ID NO: 84387):SNIT-AA¹⁷-QIM (SEQ ID NO: 84883):IGEMS (SEQ ID NO: 84209):MIVKS (SEQ ID NO: 84242):XKXS (SEQ ID NO: 84124), ASASPXX (SEQ ID NO: 84403):VPQDL (SEQ ID NO: 84365):SNIT-AA¹⁷-QIM (SEQ ID NO: 84883):IGEMS (SEQ ID NO: 84209):MVVKS (SEQ ID NO: 84256):XKXS (SEQ ID NO: 84124), NDEGLEX (SEQ ID NO: 84426):VPTGQ (SEQ ID NO: 84379):SNIT-AA¹⁷-QIM (SEQ ID NO: 84883):IGEMS (SEQ ID NO: 84209):LEEHS (SEQ ID NO: 84217):QXEXR (SEQ ID NO: 84276), SSVKXQP (SEQ ID NO: 84430):SRVHH (SEQ ID NO: 84297):SNIT-AA¹⁷-QIM (SEQ ID NO: 84883):IGEMS (SEQ ID NO: 84209):RLEEH (SEQ ID NO: 84279):LEXAXA (SEQ ID NO: 84400), RNVQXRP (SEQ ID NO: 84427):TQVQL (SEQ ID NO: 84340):SNIT-AA¹⁷-QIM (SEQ ID NO: 84883):IGEMS (SEQ ID NO: 84209):TLEDH (SEQ ID NO: 84307):LAXKXE (SEQ ID NO: 84399), KIPKAXX (SEQ ID NO: 84424):VPTEL (SEQ ID NO: 84378):SNIT-AA¹⁷-QIM (SEQ ID NO: 84883):LGEMS (SEQ ID NO: 84228):DMEHS (SEQ ID NO: 84153):GXGXR (SEQ ID NO: 84208), GIPEPXX (SEQ ID NO: 84419):VPTKM (SEQ ID NO: 84382):SNIT-AA¹⁷-QIM (SEQ ID NO: 84883):LGEMS (SEQ ID NO: 84228):NMEHS (SEQ ID NO: 84265):SXAXR (SEQ ID NO: 84303), SIPKAXX (SEQ ID NO: 84429):VPTEL (SEQ ID NO: 84378):SNIT-AA¹⁷-QIM (SEQ ID NO: 84883):LGEMS (SEQ ID NO: 84228):EMEHS (SEQ ID NO: 84167):GXGXR (SEQ ID NO: 84208), HVTKPTX (SEQ ID NO: 84422):VPTKL (SEQ ID NO: 84381):SNIT-AA¹⁷-QIM (SEQ ID NO: 84883):LGEMS (SEQ ID NO: 84228):NMEHS (SEQ ID NO: 84265):SXGXH (SEQ ID NO: 84304), YVPKPXX (SEQ ID NO: 84433):VPTKL (SEQ ID NO: 84381):SNIT-AA¹⁷-QIM (SEQ ID NO: 84883):LGEMS (SEQ ID NO: 84228):NMEHS (SEQ ID NO: 84265):SXGXH (SEQ ID NO: 84304), TVPKPXX (SEQ ID NO: 84432):VPTQL (SEQ ID NO: 84384):SNIT-AA¹⁷-QIM (SEQ ID NO: 84883):LGEMS (SEQ ID NO: 84228):NMEHS (SEQ ID NO: 84265):AXGXH (SEQ ID NO: 84147), AVPKAXX (SEQ ID NO: 84404):VPTKL (SEQ ID NO: 84381):SNIT-AA¹⁷-QIM (SEQ ID NO: 84883):LGEMS (SEQ ID NO: 84228):NMEHS (SEQ ID NO: 84265):AXGXH (SEQ ID NO: 84147), KVGKAXX (SEQ ID NO: 84425):VPTKL (SEQ ID NO: 84381):SNIT-AA¹⁷-QIM (SEQ ID NO: 84883):LGEMS (SEQ ID NO: 84228):EGMSEHS (SEQ ID NO: 84408):XGXR (SEQ ID NO: 84123), KASKAXX (SEQ ID NO: 84423):VPTKL (SEQ ID NO: 84381):SNIT-AA¹⁷-QIM (SEQ ID NO: 84883):LGEMS (SEQ ID NO: 84228):GMEHS (SEQ ID NO: 84197):EXGXR (SEQ ID NO: 84179), GSAGPXX (SEQ ID NO: 84420):VPTKM (SEQ ID NO: 84382):SNIT-AA¹⁷-QIM (SEQ ID NO: 84883):LGEMS (SEQ ID NO: 84228):GMEHS (SEQ ID NO: 84197):RXGXS (SEQ ID NO: 84291), AAPASXX (SEQ ID NO: 84401):VPTRL (SEQ ID NO: 84385):SNIT-AA¹⁷-QIM (SEQ ID NO: 84883):LGEMS (SEQ ID NO: 84228):DMEHS (SEQ ID NO: 84153):AXGXR (SEQ ID NO: 84148), STPPTXX (SEQ ID NO: 84431):VPTRL (SEQ ID NO: 84385):SNIT-AA¹⁷-QIM (SEQ ID NO: 84883):LGEMS (SEQ ID NO: 84228):DMEHS (SEQ ID NO: 84153):SXGXR (SEQ ID NO: 84305), HVPKPXX (SEQ ID NO: 84421):VPTKL (SEQ ID NO: 84381):SNIT-AA¹⁷-QIM (SEQ ID NO: 84883):LGEMS (SEQ ID NO: 84228):NMEHS (SEQ ID NO: 84265):SXGXH (SEQ ID NO: 84304), RVPSTXX (SEQ ID NO: 84428):VPTKT (SEQ ID NO: 84383):SNIT-AA¹⁷-QIM (SEQ ID NO: 84883):LGEMS (SEQ ID NO: 84228):MIEHS (SEQ ID NO: 84237):XGXL (SEQ ID NO: 84122), ASAAPXX (SEQ ID NO: 84402):VPTAL (SEQ ID NO: 84375):SNIT-AA¹⁷-QIM (SEQ ID NO: 84883):LGEMS (SEQ ID NO: 84228):MIEHS (SEQ ID NO: 84237):XKXS (SEQ ID NO: 84124), ASASPXX (SEQ ID NO: 84403):VPTDL (SEQ ID NO: 84376):SNIT-AA¹⁷-QIM (SEQ ID NO: 84883):LGEMS (SEQ ID NO: 84228):MIEHS (SEQ ID NO: 84237):XKXS (SEQ ID NO: 84124), ASASPXX (SEQ ID NO: 84403):VPTDL (SEQ ID NO: 84376):SNIT-AA¹⁷-QIM (SEQ ID NO: 84883):LGEMS (SEQ ID NO: 84228):MVEHS (SEQ ID NO: 84251):XKXS (SEQ ID NO: 84124), NDEGLEX (SEQ ID NO: 84426):VPTEE (SEQ ID NO: 84377):SNIT-AA¹⁷-QIM (SEQ ID NO: 84883):LGEMS (SEQ ID NO: 84228):FLEHS (SEQ ID NO: 84183):KXEXR (SEQ ID NO: 84213), SSVKXQP (SEQ ID NO: 84430):VPTHH (SEQ ID NO: 84380):SNIT-AA¹⁷-QIM (SEQ ID NO: 84883):LGEMS (SEQ ID NO: 84228):RLEHS (SEQ ID NO: 84280):LEXAXA (SEQ ID NO: 84400), RNVQXRP (SEQ ID NO: 84427):VPTQL (SEQ ID NO: 84384):SNIT-AA¹⁷-QIM (SEQ ID NO: 84883):LGEMS (SEQ ID NO: 84228):TLEHS (SEQ ID NO: 84309):LAXKXE (SEQ ID NO: 84399), KIPKAXX (SEQ ID NO: 84424):VPTEL (SEQ ID NO: 84378):SNIT-AA¹⁷-QIM (SEQ ID NO: 84883):LGEMS (SEQ ID NO: 84228):DMVVE (SEQ ID NO: 84161):GXGXR (SEQ ID NO: 84208), GIPEPXX (SEQ ID NO: 84419):VPEKM (SEQ ID NO: 84360):SNIT-AA¹⁷-QIM (SEQ ID NO: 84883):LGEMS (SEQ ID NO: 84228):NMTVE (SEQ ID NO: 84267):SXAXR (SEQ ID NO: 84303), SIPKAXX (SEQ ID NO: 84429):VPTEL (SEQ ID NO: 84378):SNIT-AA¹⁷-QIM (SEQ ID NO: 84883):LGEMS (SEQ ID NO: 84228):EMVVE (SEQ ID NO: 84175):GXGXR (SEQ ID NO: 84208), HVTKPTX (SEQ ID NO: 84422):APTKL (SEQ ID NO: 84131):SNIT-AA¹⁷-QIM (SEQ ID NO: 84883):LGEMS (SEQ ID NO: 84228):NMVVR (SEQ ID NO: 84275):SXGXH (SEQ ID NO: 84304), YVPKPXX (SEQ ID NO: 84433):APTKL (SEQ ID NO: 84131):SNIT-AA¹⁷-QIM (SEQ ID NO: 84883):LGEMS (SEQ ID NO: 84228):NMVVR (SEQ ID NO: 84275):SXGXH (SEQ ID NO: 84304), TVPKPXX (SEQ ID NO: 84432):APTQL (SEQ ID NO: 84134):SNIT-AA¹⁷-QIM (SEQ ID NO: 84883):LGEMS (SEQ ID NO: 84228):NMVVR (SEQ ID NO: 84275):AXGXH (SEQ ID NO: 84147), AVPKAXX (SEQ ID NO: 84404):APTKL (SEQ ID NO: 84131):SNIT-AA¹⁷-QIM (SEQ ID NO: 84883):LGEMS (SEQ ID NO: 84228):NMVVK (SEQ ID NO: 84274):AXGXH (SEQ ID NO: 84147), KVGKAXX (SEQ ID NO: 84425):VPTKL (SEQ ID NO: 84381):SNIT-AA¹⁷-QIM (SEQ ID NO: 84883):LGEMS (SEQ ID NO: 84228):EGMSVAE (SEQ ID NO: 84411):XGXR (SEQ ID NO: 84123), KASKAXX (SEQ ID NO: 84423):VPTKL (SEQ ID NO: 84381):SNIT-AA¹⁷-QIM (SEQ ID NO: 84883):LGEMS (SEQ ID NO: 84228):GMAVS (SEQ ID NO: 84194):EXGXR (SEQ ID NO: 84179), GSAGPXX (SEQ ID NO: 84420):TPTKM (SEQ ID NO: 84327):SNIT-AA¹⁷-QIM (SEQ ID NO: 84883):LGEMS (SEQ ID NO: 84228):GMVVD (SEQ ID NO: 84204):RXGXS (SEQ ID NO: 84291), AAPASXX (SEQ ID NO: 84401):VPARL (SEQ ID NO: 84352):SNIT-AA¹⁷-QIM (SEQ ID NO: 84883):LGEMS (SEQ ID NO: 84228):DMVVE (SEQ ID NO: 84161):AXGXR (SEQ ID NO: 84148), STPPTXX (SEQ ID NO: 84431):VPTRL (SEQ ID NO: 84385):SNIT-AA¹⁷-QIM (SEQ ID NO: 84883):LGEMS (SEQ ID NO: 84228):DMVVE (SEQ ID NO: 84161):SXGXR (SEQ ID NO: 84305), HVPKPXX (SEQ ID NO: 84421):APTKL (SEQ ID NO: 84131):SNIT-AA¹⁷-QIM (SEQ ID NO: 84883):LGEMS (SEQ ID NO: 84228):NMVVR (SEQ ID NO: 84275):SXGXH (SEQ ID NO: 84304), RVPSTXX (SEQ ID NO: 84428):APVKT (SEQ ID NO: 84144):SNIT-AA¹⁷-QIM (SEQ ID NO: 84883):LGEMS (SEQ ID NO: 84228):MIVEE (SEQ ID NO: 84241):XGXL (SEQ ID NO: 84122), ASAAPXX (SEQ ID NO: 84402):VPQAL (SEQ ID NO: 84364):SNIT-AA¹⁷-QIM (SEQ ID NO: 84883):LGEMS (SEQ ID NO: 84228):MIVRS (SEQ ID NO: 84243):XKXS (SEQ ID NO: 84124), ASASPXX (SEQ ID NO: 84403):VSQDL (SEQ ID NO: 84387):SNIT-AA¹⁷-QIM (SEQ ID NO: 84883):LGEMS (SEQ ID NO: 84228):MIVKS (SEQ ID NO: 84242):XKXS (SEQ ID NO: 84124), ASASPXX (SEQ ID NO: 84403):VPQDL (SEQ ID NO: 84365):SNIT-AA¹⁷-QIM (SEQ ID NO: 84883):LGEMS (SEQ ID NO: 84228):MVVKS (SEQ ID NO: 84256):XKXS (SEQ ID NO: 84124), NDEGLEX (SEQ ID NO: 84426):VPTEE (SEQ ID NO: 84377):SNIT-AA¹⁷-QIM (SEQ ID NO: 84883):LGEMS (SEQ ID NO: 84228):FLQHN (SEQ ID NO: 84184):KXEXR (SEQ ID NO: 84213), SSVKXQP (SEQ ID NO: 84430):SRVHH (SEQ ID NO: 84297):SNIT-AA¹⁷-QIM (SEQ ID NO: 84883):LGEMS (SEQ ID NO: 84228):RLEEH (SEQ ID NO: 84279):LEXAXA (SEQ ID NO: 84400), RNVQXRP (SEQ ID NO: 84427):TQVQL (SEQ ID NO: 84340):SNIT-AA¹⁷-QIM (SEQ ID NO: 84883):LGEMS (SEQ ID NO: 84228):TLEDH (SEQ ID NO: 84307):LAXKXE (SEQ ID NO: 84399), KIPKAXX (SEQ ID NO: 84424):SRVEL (SEQ ID NO: 84295):RSVK-AA¹⁷-AKV (SEQ ID NO: 84880):KEVQV (SEQ ID NO: 84210):DMEEH (SEQ ID NO: 84152):GXGXR (SEQ ID NO: 84208), GIPEPXX (SEQ ID NO: 84419):SRVKM (SEQ ID NO: 84299):RSVK-AA¹⁷-AKV (SEQ ID NO: 84880):KEVQV (SEQ ID NO: 84210):NMEEH (SEQ ID NO: 84264):SXAXR (SEQ ID NO: 84303), SIPKAXX (SEQ ID NO: 84429):SRVEL (SEQ ID NO: 84295):RSVK-AA¹⁷-AKV (SEQ ID NO: 84880):KEVQV (SEQ ID NO: 84210):EMEEH (SEQ ID NO: 84166):GXGXR (SEQ ID NO: 84208), HVTKPTX (SEQ ID NO: 84422):SRVKL (SEQ ID NO: 84298):RSVK-AA¹⁷-AKV (SEQ ID NO: 84880):KEVQV (SEQ ID NO: 84210):NMEEH (SEQ ID NO: 84264):SXGXH (SEQ ID NO: 84304), YVPKPXX (SEQ ID NO: 84433):SRVKL (SEQ ID NO: 84298):RSVK-AA¹⁷-AKV (SEQ ID NO: 84880):KEVQV (SEQ ID NO: 84210):NMEEH (SEQ ID NO: 84264):SXGXH (SEQ ID NO: 84304), TVPKPXX (SEQ ID NO: 84432):SRVQL (SEQ ID NO: 84301):RSVK-AA¹⁷-AKV (SEQ ID NO: 84880):KEVQV (SEQ ID NO: 84210):NMEEH (SEQ ID NO: 84264):AXGXH (SEQ ID NO: 84147), AVPKAXX (SEQ ID NO: 84404):SRVKL (SEQ ID NO: 84298):RSVK-AA¹⁷-AKV (SEQ ID NO: 84880):KEVQV (SEQ ID NO: 84210):NMEEH (SEQ ID NO: 84264):AXGXH (SEQ ID NO: 84147), KVGKAXX (SEQ ID NO: 84425):SRVKL (SEQ ID NO: 84298):RSVK-AA¹⁷-AKV (SEQ ID NO: 84880):KEVQV (SEQ ID NO: 84210):EGMSEEH (SEQ ID NO: 84407):XGXR (SEQ ID NO: 84123), KASKAXX (SEQ ID NO: 84423):SRVKL (SEQ ID NO: 84298):RSVK-AA¹⁷-AKV (SEQ ID NO: 84880):KEVQV (SEQ ID NO: 84210):GMEEH (SEQ ID NO: 84196):EXGXR (SEQ ID NO: 84179), GSAGPXX (SEQ ID NO: 84420):SRVKM (SEQ ID NO: 84299):RSVK-AA¹⁷-AKV (SEQ ID NO: 84880):KEVQV (SEQ ID NO: 84210):GMEEH (SEQ ID NO: 84196):RXGXS (SEQ ID NO: 84291), AAPASXX (SEQ ID NO: 84401):SRVRL (SEQ ID NO: 84302):RSVK-AA¹⁷-AKV (SEQ ID NO: 84880):KEVQV (SEQ ID NO: 84210):DMEEH (SEQ ID NO: 84152):AXGXR (SEQ ID NO: 84148), STPPTXX (SEQ ID NO: 84431):SRVRL (SEQ ID NO: 84302):RSVK-AA¹⁷-AKV (SEQ ID NO: 84880):KEVQV (SEQ ID NO: 84210):DMEEH (SEQ ID NO: 84152):SXGXR (SEQ ID NO: 84305), HVPKPXX (SEQ ID NO: 84421):SRVKL (SEQ ID NO: 84298):RSVK-AA¹⁷-AKV (SEQ ID NO: 84880):KEVQV (SEQ ID NO: 84210):NMEEH (SEQ ID NO: 84264):SXGXH (SEQ ID NO: 84304), RVPSTXX (SEQ ID NO: 84428):SRVKT (SEQ ID NO: 84300):RSVK-AA¹⁷-AKV (SEQ ID NO: 84880):KEVQV (SEQ ID NO: 84210):MIEEH (SEQ ID NO: 84236):XGXL (SEQ ID NO: 84122), ASAAPXX (SEQ ID NO: 84402):SRVAL (SEQ ID NO: 84292):RSVK-AA¹⁷-AKV (SEQ ID NO: 84880):KEVQV (SEQ ID NO: 84210):MIEEH (SEQ ID NO: 84236):XKXS (SEQ ID NO: 84124), ASASPXX (SEQ ID NO: 84403):SRVDL (SEQ ID NO: 84293):RSVK-AA¹⁷-AKV (SEQ ID NO: 84880):KEVQV (SEQ ID NO: 84210):MIEEH (SEQ ID NO: 84236):XKXS (SEQ ID NO: 84124), ASASPXX (SEQ ID NO: 84403):SRVDL (SEQ ID NO: 84293):RSVK-AA¹⁷-AKV (SEQ ID NO: 84880):KEVQV (SEQ ID NO: 84210):MVEEH (SEQ ID NO: 84250):XKXS (SEQ ID NO: 84124), NDEGLEX (SEQ ID NO: 84426):SRVEE (SEQ ID NO: 84294):RSVK-AA¹⁷-AKV (SEQ ID NO: 84880):KEVQV (SEQ ID NO: 84210):FLEEH (SEQ ID NO: 84182):KXEXR (SEQ ID NO: 84213), NDEGLEX (SEQ ID NO: 84426):SRVGQ (SEQ ID NO: 84296):RSVK-AA¹⁷-AKV (SEQ ID NO: 84880):KEVQV (SEQ ID NO: 84210):LEEEH (SEQ ID NO: 84216):QXEXR (SEQ ID NO: 84276), RNVQXRP (SEQ ID NO: 84427):SRVQL (SEQ ID NO: 84301):RSVK-AA¹⁷-AKV (SEQ ID NO: 84880):KEVQV (SEQ ID NO: 84210):TLEEH (SEQ ID NO: 84308):LAXKXE (SEQ ID NO: 84399), KIPKAXX (SEQ ID NO: 84424):VPTEL (SEQ ID NO: 84378):RSVK-AA¹⁷-AKV (SEQ ID NO: 84880):KEVQV (SEQ ID NO: 84210):DMVVE (SEQ ID NO: 84161):GXGXR (SEQ ID NO: 84208), GIPEPXX (SEQ ID NO: 84419):VPEKM (SEQ ID NO: 84360):RSVK-AA¹⁷-AKV (SEQ ID NO: 84880):KEVQV (SEQ ID NO: 84210):NMTVE (SEQ ID NO: 84267):SXAXR (SEQ ID NO: 84303), SIPKAXX (SEQ ID NO: 84429):VPTEL (SEQ ID NO: 84378):RSVK-AA¹⁷-AKV (SEQ ID NO: 84880):KEVQV (SEQ ID NO: 84210):EMVVE (SEQ ID NO: 84175):GXGXR (SEQ ID NO: 84208), HVTKPTX (SEQ ID NO: 84422):APTKL (SEQ ID NO: 84131):RSVK-AA¹⁷-AKV (SEQ ID NO: 84880):KEVQV (SEQ ID NO: 84210):NMVVR (SEQ ID NO: 84275):SXGXH (SEQ ID NO: 84304), YVPKPXX (SEQ ID NO: 84433):APTKL (SEQ ID NO: 84131):RSVK-AA¹⁷-AKV (SEQ ID NO: 84880):KEVQV (SEQ ID NO: 84210):NMVVR (SEQ ID NO: 84275):SXGXH (SEQ ID NO: 84304), TVPKPXX (SEQ ID NO: 84432):APTQL (SEQ ID NO: 84134):RSVK-AA¹⁷-AKV (SEQ ID NO: 84880):KEVQV (SEQ ID NO: 84210):NMVVR (SEQ ID NO: 84275):AXGXH (SEQ ID NO: 84147), AVPKAXX (SEQ ID NO: 84404):APTKL (SEQ ID NO: 84131):RSVK-AA¹⁷-AKV (SEQ ID NO: 84880):KEVQV (SEQ ID NO: 84210):NMVVK (SEQ ID NO: 84274):AXGXH (SEQ ID NO: 84147), KVGKAXX (SEQ ID NO: 84425):VPTKL (SEQ ID NO: 84381):RSVK-AA¹⁷-AKV (SEQ ID NO: 84880):KEVQV (SEQ ID NO: 84210):EGMSVAE (SEQ ID NO: 84411):XGXR (SEQ ID NO: 84123), KASKAXX (SEQ ID NO: 84423):VPTKL (SEQ ID NO: 84381):RSVK-AA¹⁷-AKV (SEQ ID NO: 84880):KEVQV (SEQ ID NO: 84210):GMAVS (SEQ ID NO: 84194):EXGXR (SEQ ID NO: 84179), GSAGPXX (SEQ ID NO: 84420):TPTKM (SEQ ID NO: 84327):RSVK-AA¹⁷-AKV (SEQ ID NO: 84880):KEVQV (SEQ ID NO: 84210):GMVVD (SEQ ID NO: 84204):RXGXS (SEQ ID NO: 84291), AAPASXX (SEQ ID NO: 84401):VPARL (SEQ ID NO: 84352):RSVK-AA¹⁷-AKV (SEQ ID NO: 84880):KEVQV (SEQ ID NO: 84210):DMVVE (SEQ ID NO: 84161):AXGXR (SEQ ID NO: 84148), STPPTXX (SEQ ID NO: 84431):VPTRL (SEQ ID NO: 84385):RSVK-AA¹⁷-AKV (SEQ ID NO: 84880):KEVQV (SEQ ID NO: 84210):DMVVE (SEQ ID NO: 84161):SXGXR (SEQ ID NO: 84305), HVPKPXX (SEQ ID NO: 84421):APTKL (SEQ ID NO: 84131):RSVK-AA¹⁷-AKV (SEQ ID NO: 84880):KEVQV (SEQ ID NO: 84210):NMVVR (SEQ ID NO: 84275):SXGXH (SEQ ID NO: 84304), RVPSTXX (SEQ ID NO: 84428):APVKT (SEQ ID NO: 84144):RSVK-AA¹⁷-AKV (SEQ ID NO: 84880):KEVQV (SEQ ID NO: 84210):MIVEE (SEQ ID NO: 84241):XGXL (SEQ ID NO: 84122), ASAAPXX (SEQ ID NO: 84402):VPQAL (SEQ ID NO: 84364):RSVK-AA¹⁷-AKV (SEQ ID NO: 84880):KEVQV (SEQ ID NO: 84210):MIVRS (SEQ ID NO: 84243):XKXS (SEQ ID NO: 84124), ASASPXX (SEQ ID NO: 84403):VSQDL (SEQ ID NO: 84387):RSVK-AA¹⁷-AKV (SEQ ID NO: 84880):KEVQV (SEQ ID NO: 84210):MIVKS (SEQ ID NO: 84242):XKXS (SEQ ID NO: 84124), ASASPXX (SEQ ID NO: 84403):VPQDL (SEQ ID NO: 84365):RSVK-AA¹⁷-AKV (SEQ ID NO: 84880):KEVQV (SEQ ID NO: 84210):MVVKS (SEQ ID NO: 84256):XKXS (SEQ ID NO: 84124), NDEGLEX (SEQ ID NO: 84426):VPTEE (SEQ ID NO: 84377):RSVK-AA¹⁷-AKV (SEQ ID NO: 84880):KEVQV (SEQ ID NO: 84210):FLQHN (SEQ ID NO: 84184):KXEXR (SEQ ID NO: 84213), NDEGLEX (SEQ ID NO: 84426):VPTGQ (SEQ ID NO: 84379):RSVK-AA¹⁷-AKV (SEQ ID NO: 84880):KEVQV (SEQ ID NO: 84210):LEEHS (SEQ ID NO: 84217):QXEXR (SEQ ID NO: 84276), RNVQXRP (SEQ ID NO: 84427):TQVQL (SEQ ID NO: 84340):RSVK-AA¹⁷-AKV (SEQ ID NO: 84880):KEVQV (SEQ ID NO: 84210):TLEDH (SEQ ID NO: 84307):LAXKXE (SEQ ID NO: 84399), KIPKAXX (SEQ ID NO: 84424):TQVEL (SEQ ID NO: 84334):RPVQ-AA¹⁷-RKI (SEQ ID NO: 84879):KKATV (SEQ ID NO: 84212):DMEDH (SEQ ID NO: 84151):GXGXR (SEQ ID NO: 84208), GIPEPXX (SEQ ID NO: 84419):TQVKM (SEQ ID NO: 84338):RPVQ-AA¹⁷-RKI (SEQ ID NO: 84879):KKATV (SEQ ID NO: 84212):NMEDH (SEQ ID NO: 84263):SXAXR (SEQ ID NO: 84303), SIPKAXX (SEQ ID NO: 84429):TQVEL (SEQ ID NO: 84334):RPVQ-AA¹⁷-RKI (SEQ ID NO: 84879):KKATV (SEQ ID NO: 84212):EMEDH (SEQ ID NO: 84165):GXGXR (SEQ ID NO: 84208), HVTKPTX (SEQ ID NO: 84422):TQVKL (SEQ ID NO: 84337):RPVQ-AA¹⁷-RKI (SEQ ID NO: 84879):KKATV (SEQ ID NO: 84212):NMEDH (SEQ ID NO: 84263):SXGXH (SEQ ID NO: 84304), YVPKPXX (SEQ ID NO: 84433):TQVKL (SEQ ID NO: 84337):RPVQ-AA¹⁷-RKI (SEQ ID NO: 84879):KKATV (SEQ ID NO: 84212):NMEDH (SEQ ID NO: 84263):SXGXH (SEQ ID NO: 84304), TVPKPXX (SEQ ID NO: 84432):TQVQL (SEQ ID NO: 84340):RPVQ-AA¹⁷-RKI (SEQ ID NO: 84879):KKATV (SEQ ID NO: 84212):NMEDH (SEQ ID NO: 84263):AXGXH (SEQ ID NO: 84147), AVPKAXX (SEQ ID NO: 84404):TQVKL (SEQ ID NO: 84337):RPVQ-AA¹⁷-RKI (SEQ ID NO: 84879):KKATV (SEQ ID NO: 84212):NMEDH (SEQ ID NO: 84263):AXGXH (SEQ ID NO: 84147), KVGKAXX (SEQ ID NO: 84425):TQVKL (SEQ ID NO: 84337):RPVQ-AA¹⁷-RKI (SEQ ID NO: 84879):KKATV (SEQ ID NO: 84212):EGMSEDH (SEQ ID NO: 84406):XGXR (SEQ ID NO: 84123), KASKAXX (SEQ ID NO: 84423):TQVKL (SEQ ID NO: 84337):RPVQ-AA¹⁷-RKI (SEQ ID NO: 84879):KKATV (SEQ ID NO: 84212):GMEDH (SEQ ID NO: 84195):EXGXR (SEQ ID NO: 84179), GSAGPXX (SEQ ID NO: 84420):TQVKM (SEQ ID NO: 84338):RPVQ-AA¹⁷-RKI (SEQ ID NO: 84879):KKATV (SEQ ID NO: 84212):GMEDH (SEQ ID NO: 84195):RXGXS (SEQ ID NO: 84291), AAPASXX (SEQ ID NO: 84401):TQVRL (SEQ ID NO: 84341):RPVQ-AA¹⁷-RKI (SEQ ID NO: 84879):KKATV (SEQ ID NO: 84212):DMEDH (SEQ ID NO: 84151):AXGXR (SEQ ID NO: 84148), STPPTXX (SEQ ID NO: 84431):TQVRL (SEQ ID NO: 84341):RPVQ-AA¹⁷-RKI (SEQ ID NO: 84879):KKATV (SEQ ID NO: 84212):DMEDH (SEQ ID NO: 84151):SXGXR (SEQ ID NO: 84305), HVPKPXX (SEQ ID NO: 84421):TQVKL (SEQ ID NO: 84337):RPVQ-AA¹⁷-RKI (SEQ ID NO: 84879):KKATV (SEQ ID NO: 84212):NMEDH (SEQ ID NO: 84263):SXGXH (SEQ ID NO: 84304), RVPSTXX (SEQ ID NO: 84428):TQVKT (SEQ ID NO: 84339):RPVQ-AA¹⁷-RKI (SEQ ID NO: 84879):KKATV (SEQ ID NO: 84212):MIEDH (SEQ ID NO: 84235):XGXL (SEQ ID NO: 84122), ASAAPXX (SEQ ID NO: 84402):TQVAL (SEQ ID NO: 84331):RPVQ-AA¹⁷-RKI (SEQ ID NO: 84879):KKATV (SEQ ID NO: 84212):MIEDH (SEQ ID NO: 84235):XKXS (SEQ ID NO: 84124), ASASPXX (SEQ ID NO: 84403):TQVDL (SEQ ID NO: 84332):RPVQ-AA¹⁷-RKI (SEQ ID NO: 84879):KKATV (SEQ ID NO: 84212):MIEDH (SEQ ID NO: 84235):XKXS (SEQ ID NO: 84124), ASASPXX (SEQ ID NO: 84403):TQVDL (SEQ ID NO: 84332):RPVQ-AA¹⁷-RKI (SEQ ID NO: 84879):KKATV (SEQ ID NO: 84212):MVEDH (SEQ ID NO: 84249):XKXS (SEQ ID NO: 84124), NDEGLEX (SEQ ID NO: 84426):TQVEE (SEQ ID NO: 84333):RPVQ-AA¹⁷-RKI (SEQ ID NO: 84879):KKATV (SEQ ID NO: 84212):FLEDH (SEQ ID NO: 84181):KXEXR (SEQ ID NO: 84213), NDEGLEX (SEQ ID NO: 84426):TQVGQ (SEQ ID NO: 84335):RPVQ-AA¹⁷-RKI (SEQ ID NO: 84879):KKATV (SEQ ID NO: 84212):LEEDH (SEQ ID NO: 84215):QXEXR (SEQ ID NO: 84276), SSVKXQP (SEQ ID NO: 84430):TQVHH (SEQ ID NO: 84336):RPVQ-AA¹⁷-RKI (SEQ ID NO: 84879):KKATV (SEQ ID NO: 84212):RLEDH (SEQ ID NO: 84278):LEXAXA (SEQ ID NO: 84400), KIPKAXX (SEQ ID NO: 84424):VPTEL (SEQ ID NO: 84378):RPVQ-AA¹⁷-RKI (SEQ ID NO: 84879):KKATV (SEQ ID NO: 84212):DMVVE (SEQ ID NO: 84161):GXGXR (SEQ ID NO: 84208), GIPEPXX (SEQ ID NO: 84419):VPEKM (SEQ ID NO: 84360):RPVQ-AA¹⁷-RKI (SEQ ID NO: 84879):KKATV (SEQ ID NO: 84212):NMTVE (SEQ ID NO: 84267):SXAXR (SEQ ID NO: 84303), SIPKAXX (SEQ ID NO: 84429):VPTEL (SEQ ID NO: 84378):RPVQ-AA¹⁷-RKI (SEQ ID NO: 84879):KKATV (SEQ ID NO: 84212):EMVVE (SEQ ID NO: 84175):GXGXR (SEQ ID NO: 84208), HVTKPTX (SEQ ID NO: 84422):APTKL (SEQ ID NO: 84131):RPVQ-AA¹⁷-RKI (SEQ ID NO: 84879):KKATV (SEQ ID NO: 84212):NMVVR (SEQ ID NO: 84275):SXGXH (SEQ ID NO: 84304), YVPKPXX (SEQ ID NO: 84433):APTKL (SEQ ID NO: 84131):RPVQ-AA¹⁷-RKI (SEQ ID NO: 84879):KKATV (SEQ ID NO: 84212):NMVVR (SEQ ID NO: 84275):SXGXH (SEQ ID NO: 84304), TVPKPXX (SEQ ID NO: 84432):APTQL (SEQ ID NO: 84134):RPVQ-AA¹⁷-RKI (SEQ ID NO: 84879):KKATV (SEQ ID NO: 84212):NMVVR (SEQ ID NO: 84275):AXGXH (SEQ ID NO: 84147), AVPKAXX (SEQ ID NO: 84404):APTKL (SEQ ID NO: 84131):RPVQ-AA¹⁷-RKI (SEQ ID NO: 84879):KKATV (SEQ ID NO: 84212):NMVVK (SEQ ID NO: 84274):AXGXH (SEQ ID NO: 84147), KVGKAXX (SEQ ID NO: 84425):VPTKL (SEQ ID NO: 84381):RPVQ-AA¹⁷-RKI (SEQ ID NO: 84879):KKATV (SEQ ID NO: 84212):EGMSVAE (SEQ ID NO: 84411):XGXR (SEQ ID NO: 84123), KASKAXX (SEQ ID NO: 84423):VPTKL (SEQ ID NO: 84381):RPVQ-AA¹⁷-RKI (SEQ ID NO: 84879):KKATV (SEQ ID NO: 84212):GMAVS (SEQ ID NO: 84194):EXGXR (SEQ ID NO: 84179), GSAGPXX (SEQ ID NO: 84420):TPTKM (SEQ ID NO: 84327):RPVQ-AA¹⁷-RKI (SEQ ID NO: 84879):KKATV (SEQ ID NO: 84212):GMVVD (SEQ ID NO: 84204):RXGXS (SEQ ID NO: 84291), AAPASXX (SEQ ID NO: 84401):VPARL (SEQ ID NO: 84352):RPVQ-AA¹⁷-RKI (SEQ ID NO: 84879):KKATV (SEQ ID NO: 84212):DMVVE (SEQ ID NO: 84161):AXGXR (SEQ ID NO: 84148), STPPTXX (SEQ ID NO: 84431):VPTRL (SEQ ID NO: 84385):RPVQ-AA¹⁷-RKI (SEQ ID NO: 84879):KKATV (SEQ ID NO: 84212):DMVVE (SEQ ID NO: 84161):SXGXR (SEQ ID NO: 84305), HVPKPXX (SEQ ID NO: 84421):APTKL (SEQ ID NO: 84131):RPVQ-AA¹⁷-RKI (SEQ ID NO: 84879):KKATV (SEQ ID NO: 84212):NMVVR (SEQ ID NO: 84275):SXGXH (SEQ ID NO: 84304), RVPSTXX (SEQ ID NO: 84428):APVKT (SEQ ID NO: 84144):RPVQ-AA¹⁷-RKI (SEQ ID NO: 84879):KKATV (SEQ ID NO: 84212):MIVEE (SEQ ID NO: 84241):XGXL (SEQ ID NO: 84122), ASAAPXX (SEQ ID NO: 84402):VPQAL (SEQ ID NO: 84364):RPVQ-AA¹⁷-RKI (SEQ ID NO: 84879):KKATV (SEQ ID NO: 84212):MIVRS (SEQ ID NO: 84243):XKXS (SEQ ID NO: 84124), ASASPXX (SEQ ID NO: 84403):VSQDL (SEQ ID NO: 84387):RPVQ-AA¹⁷-RKI (SEQ ID NO: 84879):KKATV (SEQ ID NO: 84212):MIVKS (SEQ ID NO: 84242):XKXS (SEQ ID NO: 84124), ASASPXX (SEQ ID NO: 84403):VPQDL (SEQ ID NO: 84365):RPVQ-AA¹⁷-RKI (SEQ ID NO: 84879):KKATV (SEQ ID NO: 84212):MVVKS (SEQ ID NO: 84256):XKXS (SEQ ID NO: 84124), NDEGLEX (SEQ ID NO: 84426):VPTEE (SEQ ID NO: 84377):RPVQ-AA¹⁷-RKI (SEQ ID NO: 84879):KKATV (SEQ ID NO: 84212):FLQHN (SEQ ID NO: 84184):KXEXR (SEQ ID NO: 84213), NDEGLEX (SEQ ID NO: 84426):VPTGQ (SEQ ID NO: 84379):RPVQ-AA¹⁷-RKI (SEQ ID NO: 84879):KKATV (SEQ ID NO: 84212):LEEHS (SEQ ID NO: 84217):QXEXR (SEQ ID NO: 84276) and SSVKXQP (SEQ ID NO: 84430):SRVHH (SEQ ID NO: 84297):RPVQ-AA¹⁷-RKI (SEQ ID NO: 84879):KKATV (SEQ ID NO: 84212):RLEEH (SEQ ID NO: 84279):LEXAXA (SEQ ID NO: 84400); and wherein AA¹⁷ is selected from the group consisting of G, A, V, L, I, P, F, M, W, T and S (in particular is selected from the group consisting of M, I, L, V and T). More particularly, the hexaplet PEP7:PEP5:PEP12:PEP2:PEP6:PEP8 is selected from the group consisting of GIPEPXX (SEQ ID NO: 84419):VPTKM (SEQ ID NO: 84382):SAIS-AA17-LYL (SEQ ID NO: 84881):LKNYQ (SEQ ID NO: 84230):NMVVE (SEQ ID NO: 84273):SXAXR (SEQ ID NO: 84303), HVTKPTX (SEQ ID NO: 84422):VPTKL (SEQ ID NO: 84381):SAIS-AA17-LYL (SEQ ID NO: 84881):LKNYQ (SEQ ID NO: 84230):NMVVE (SEQ ID NO: 84273):SXGXH (SEQ ID NO: 84304), YVPKPXX (SEQ ID NO: 84433):VPTKL (SEQ ID NO: 84381):SAIS-AA17-LYL (SEQ ID NO: 84881):LKNYQ (SEQ ID NO: 84230):NMVVE (SEQ ID NO: 84273):SXGXH (SEQ ID NO: 84304), TVPKPXX (SEQ ID NO: 84432):VPTQL (SEQ ID NO: 84384):SAIS-AA17-LYL (SEQ ID NO: 84881):LKNYQ (SEQ ID NO: 84230):NMVVE (SEQ ID NO: 84273):AXGXH (SEQ ID NO: 84147), AVPKAXX (SEQ ID NO: 84404):VPTKL (SEQ ID NO: 84381):SAIS-AA17-LYL (SEQ ID NO: 84881):LKNYQ (SEQ ID NO: 84230):NMVVE (SEQ ID NO: 84273):AXGXH (SEQ ID NO: 84147), KVGKAXX (SEQ ID NO: 84425):VPTKL (SEQ ID NO: 84381):SAIS-AA17-LYL (SEQ ID NO: 84881):LKNYQ (SEQ ID NO: 84230):EGMSVVE (SEQ ID NO: 84416):XGXR (SEQ ID NO: 84123), KASKAXX (SEQ ID NO: 84423):VPTKL (SEQ ID NO: 84381):SAIS-AA17-LYL (SEQ ID NO: 84881):LKNYQ (SEQ ID NO: 84230):GMVVE (SEQ ID NO: 84205):EXGXR (SEQ ID NO: 84179), GSAGPXX (SEQ ID NO: 84420):VPTKM (SEQ ID NO: 84382):SAIS-AA17-LYL (SEQ ID NO: 84881):LKNYQ (SEQ ID NO: 84230):GMVVE (SEQ ID NO: 84205):RXGXS (SEQ ID NO: 84291), AAPASXX (SEQ ID NO: 84401):VPTRL (SEQ ID NO: 84385):SAIS-AA17-LYL (SEQ ID NO: 84881):LKNYQ (SEQ ID NO: 84230):DMVVE (SEQ ID NO: 84161):AXGXR (SEQ ID NO: 84148), STPPTXX (SEQ ID NO: 84431):VPTRL (SEQ ID NO: 84385):SAIS-AA17-LYL (SEQ ID NO: 84881):LKNYQ (SEQ ID NO: 84230):DMVVE (SEQ ID NO: 84161):SXGXR (SEQ ID NO: 84305), HVPKPXX (SEQ ID NO: 84421):VPTKL (SEQ ID NO: 84381):SAIS-AA17-LYL (SEQ ID NO: 84881):LKNYQ (SEQ ID NO: 84230):NMVVE (SEQ ID NO: 84273):SXGXH (SEQ ID NO: 84304), RVPSTXX (SEQ ID NO: 84428):VPTKT (SEQ ID NO: 84383):SAIS-AA17-LYL (SEQ ID NO: 84881):LKNYQ (SEQ ID NO: 84230):MIVVE (SEQ ID NO: 84245):XGXL (SEQ ID NO: 84122), ASAAPXX (SEQ ID NO: 84402):VPTAL (SEQ ID NO: 84375):SAIS-AA17-LYL (SEQ ID NO: 84881):LKNYQ (SEQ ID NO: 84230):MIVVE (SEQ ID NO: 84245):XKXS (SEQ ID NO: 84124), ASASPXX (SEQ ID NO: 84403):VPTDL (SEQ ID NO: 84376):SAIS-AA17-LYL (SEQ ID NO: 84881):LKNYQ (SEQ ID NO: 84230):MIVVE (SEQ ID NO: 84245):XKXS (SEQ ID NO: 84124), ASASPXX (SEQ ID NO: 84403):VPTDL (SEQ ID NO: 84376):SAIS-AA17-LYL (SEQ ID NO: 84881):LKNYQ (SEQ ID NO: 84230):MVVVE (SEQ ID NO: 84259):XKXS (SEQ ID NO: 84124), GIPEPXX (SEQ ID NO: 84419):VPEKM (SEQ ID NO: 84360):SAIS-AA17-LYL (SEQ ID NO: 84881):LKNYQ (SEQ ID NO: 84230):NMTVE (SEQ ID NO: 84267):SXAXR (SEQ ID NO: 84303), HVTKPTX (SEQ ID NO: 84422):APTKL (SEQ ID NO: 84131):SAIS-AA17-LYL (SEQ ID NO: 84881):LKNYQ (SEQ ID NO: 84230):NMVVR (SEQ ID NO: 84275):SXGXH (SEQ ID NO: 84304), YVPKPXX (SEQ ID NO: 84433):APTKL (SEQ ID NO: 84131):SAIS-AA17-LYL (SEQ ID NO: 84881):LKNYQ (SEQ ID NO: 84230):NMVVR (SEQ ID NO: 84275):SXGXH (SEQ ID NO: 84304), TVPKPXX (SEQ ID NO: 84432):APTQL (SEQ ID NO: 84134):SAIS-AA17-LYL (SEQ ID NO: 84881):LKNYQ (SEQ ID NO: 84230):NMVVR (SEQ ID NO: 84275):AXGXH (SEQ ID NO: 84147), AVPKAXX (SEQ ID NO: 84404):APTKL (SEQ ID NO: 84131):SAIS-AA17-LYL (SEQ ID NO: 84881):LKNYQ (SEQ ID NO: 84230):NMVVK (SEQ ID NO: 84274):AXGXH (SEQ ID NO: 84147), KVGKAXX (SEQ ID NO: 84425):VPTKL (SEQ ID NO: 84381):SAIS-AA17-LYL (SEQ ID NO: 84881):LKNYQ (SEQ ID NO: 84230):EGMSVAE (SEQ ID NO: 84411):XGXR (SEQ ID NO: 84123), KASKAXX (SEQ ID NO: 84423):VPTKL (SEQ ID NO: 84381):SAIS-AA17-LYL (SEQ ID NO: 84881):LKNYQ (SEQ ID NO: 84230):GMAVS (SEQ ID NO: 84194):EXGXR (SEQ ID NO: 84179), GSAGPXX (SEQ ID NO: 84420):TPTKM (SEQ ID NO: 84327):SAIS-AA17-LYL (SEQ ID NO: 84881):LKNYQ (SEQ ID NO: 84230):GMVVD (SEQ ID NO: 84204):RXGXS (SEQ ID NO: 84291), AAPASXX (SEQ ID NO: 84401):VPARL (SEQ ID NO: 84352):SAIS-AA17-LYL (SEQ ID NO: 84881):LKNYQ (SEQ ID NO: 84230):DMVVE (SEQ ID NO: 84161):AXGXR (SEQ ID NO: 84148), HVPKPXX (SEQ ID NO: 84421):APTKL (SEQ ID NO: 84131):SAIS-AA17-LYL (SEQ ID NO: 84881):LKNYQ (SEQ ID NO: 84230):NMVVR (SEQ ID NO: 84275):SXGXH (SEQ ID NO: 84304), RVPSTXX (SEQ ID NO: 84428):APVKT (SEQ ID NO: 84144):SAIS-AA17-LYL (SEQ ID NO: 84881):LKNYQ (SEQ ID NO: 84230):MIVEE (SEQ ID NO: 84241):XGXL (SEQ ID NO: 84122), ASAAPXX (SEQ ID NO: 84402):VPQAL (SEQ ID NO: 84364):SAIS-AA17-LYL (SEQ ID NO: 84881):LKNYQ (SEQ ID NO: 84230):MIVRS (SEQ ID NO: 84243):XKXS (SEQ ID NO: 84124), ASASPXX (SEQ ID NO: 84403):VSQDL (SEQ ID NO: 84387):SAIS-AA17-LYL (SEQ ID NO: 84881):LKNYQ (SEQ ID NO: 84230):MIVKS (SEQ ID NO: 84242):XKXS (SEQ ID NO: 84124), ASASPXX (SEQ ID NO: 84403):VPQDL (SEQ ID NO: 84365):SAIS-AA17-LYL (SEQ ID NO: 84881):LKNYQ (SEQ ID NO: 84230):MVVKS (SEQ ID NO: 84256):XKXS (SEQ ID NO: 84124), NDEGLEX (SEQ ID NO: 84426):VPTEE (SEQ ID NO: 84377):SAIS-AA17-LYL (SEQ ID NO: 84881):LKNYQ (SEQ ID NO: 84230):FLQHN (SEQ ID NO: 84184):KXEXR (SEQ ID NO: 84213), NDEGLEX (SEQ ID NO: 84426):VPTGQ (SEQ ID NO: 84379):SAIS-AA17-LYL (SEQ ID NO: 84881):LKNYQ (SEQ ID NO: 84230):LEEHS (SEQ ID NO: 84217):QXEXR (SEQ ID NO: 84276), SSVKXQP (SEQ ID NO: 84430):SRVHH (SEQ ID NO: 84297):SAIS-AA17-LYL (SEQ ID NO: 84881):LKNYQ (SEQ ID NO: 84230):RLEEH (SEQ ID NO: 84279):LEXAXA (SEQ ID NO: 84400), RNVQXRP (SEQ ID NO: 84427):TQVQL (SEQ ID NO: 84340):SAIS-AA17-LYL (SEQ ID NO: 84881):LKNYQ (SEQ ID NO: 84230):TLEDH (SEQ ID NO: 84307):LAXKXE (SEQ ID NO: 84399), KIPKAXX (SEQ ID NO: 84424):VPEEL (SEQ ID NO: 84356):SSLS-AA17-LFF (SEQ ID NO: 84889):LKVYP (SEQ ID NO: 84231):DMTVE (SEQ ID NO: 84155):GXGXR (SEQ ID NO: 84208), SIPKAXX (SEQ ID NO: 84429):VPEEL (SEQ ID NO: 84356):SSLS-AA17-LFF (SEQ ID NO: 84889):LKVYP (SEQ ID NO: 84231):EMTVE (SEQ ID NO: 84169):GXGXR (SEQ ID NO: 84208), HVTKPTX (SEQ ID NO: 84422):VPEKL (SEQ ID NO: 84359):SSLS-AA17-LFF (SEQ ID NO: 84889):LKVYP (SEQ ID NO: 84231):NMTVE (SEQ ID NO: 84267):SXGXH (SEQ ID NO: 84304), YVPKPXX (SEQ ID NO: 84433):VPEKL (SEQ ID NO: 84359):SSLS-AA17-LFF (SEQ ID NO: 84889):LKVYP (SEQ ID NO: 84231):NMTVE (SEQ ID NO: 84267):SXGXH (SEQ ID NO: 84304), TVPKPXX (SEQ ID NO: 84432):VPEQL (SEQ ID NO: 84362):SSLS-AA17-LFF (SEQ ID NO: 84889):LKVYP (SEQ ID NO: 84231):NMTVE (SEQ ID NO: 84267):AXGXH (SEQ ID NO: 84147), AVPKAXX (SEQ ID NO: 84404):VPEKL (SEQ ID NO: 84359):SSLS-AA17-LFF (SEQ ID NO: 84889):LKVYP (SEQ ID NO: 84231):NMTVE (SEQ ID NO: 84267):AXGXH (SEQ ID NO: 84147), KVGKAXX (SEQ ID NO: 84425):VPEKL (SEQ ID NO: 84359):SSLS-AA17-LFF (SEQ ID NO: 84889):LKVYP (SEQ ID NO: 84231):EGMSTVE (SEQ ID NO: 84410):XGXR (SEQ ID NO: 84123), KASKAXX (SEQ ID NO: 84423):VPEKL (SEQ ID NO: 84359):SSLS-AA17-LFF (SEQ ID NO: 84889):LKVYP (SEQ ID NO: 84231):GMTVE (SEQ ID NO: 84199):EXGXR (SEQ ID NO: 84179), GSAGPXX (SEQ ID NO: 84420):VPEKM (SEQ ID NO: 84360):SSLS-AA17-LFF (SEQ ID NO: 84889):LKVYP (SEQ ID NO: 84231):GMTVE (SEQ ID NO: 84199):RXGXS (SEQ ID NO: 84291), AAPASXX (SEQ ID NO: 84401):VPERL (SEQ ID NO: 84363):SSLS-AA17-LFF (SEQ ID NO: 84889):LKVYP (SEQ ID NO: 84231):DMTVE (SEQ ID NO: 84155):AXGXR (SEQ ID NO: 84148), STPPTXX (SEQ ID NO: 84431):VPERL (SEQ ID NO: 84363):SSLS-AA17-LFF (SEQ ID NO: 84889):LKVYP (SEQ ID NO: 84231):DMTVE (SEQ ID NO: 84155):SXGXR (SEQ ID NO: 84305), HVPKPXX (SEQ ID NO: 84421):VPEKL (SEQ ID NO: 84359):SSLS-AA17-LFF (SEQ ID NO: 84889):LKVYP (SEQ ID NO: 84231):NMTVE (SEQ ID NO: 84267):SXGXH (SEQ ID NO: 84304), RVPSTXX (SEQ ID NO: 84428):VPEKT (SEQ ID NO: 84361):SSLS-AA17-LFF (SEQ ID NO: 84889):LKVYP (SEQ ID NO: 84231):MITVE (SEQ ID NO: 84239):XGXL (SEQ ID NO: 84122), ASAAPXX (SEQ ID NO: 84402):VPEAL (SEQ ID NO: 84353):SSLS-AA17-LFF (SEQ ID NO: 84889):LKVYP (SEQ ID NO: 84231):MITVE (SEQ ID NO: 84239):XKXS (SEQ ID NO: 84124), ASASPXX (SEQ ID NO: 84403):VPEDL (SEQ ID NO: 84354):SSLS-AA17-LFF (SEQ ID NO: 84889):LKVYP (SEQ ID NO: 84231):MITVE (SEQ ID NO: 84239):XKXS (SEQ ID NO: 84124), ASASPXX (SEQ ID NO: 84403):VPEDL (SEQ ID NO: 84354):SSLS-AA17-LFF (SEQ ID NO: 84889):LKVYP (SEQ ID NO: 84231):MVTVE (SEQ ID NO: 84253):XKXS (SEQ ID NO: 84124), KIPKAXX (SEQ ID NO: 84424):VPTEL (SEQ ID NO: 84378):SSLS-AA17-LFF (SEQ ID NO: 84889):LKVYP (SEQ ID NO: 84231):DMVVE (SEQ ID NO: 84161):GXGXR (SEQ ID NO: 84208), SIPKAXX (SEQ ID NO: 84429):VPTEL (SEQ ID NO: 84378):SSLS-AA17-LFF (SEQ ID NO: 84889):LKVYP (SEQ ID NO: 84231):EMVVE (SEQ ID NO: 84175):GXGXR (SEQ ID NO: 84208), HVTKPTX (SEQ ID NO: 84422):APTKL (SEQ ID NO: 84131):SSLS-AA17-LFF (SEQ ID NO: 84889):LKVYP (SEQ ID NO: 84231):NMVVR (SEQ ID NO: 84275):SXGXH (SEQ ID NO: 84304), YVPKPXX (SEQ ID NO: 84433):APTKL (SEQ ID NO: 84131):SSLS-AA17-LFF (SEQ ID NO: 84889):LKVYP (SEQ ID NO: 84231):NMVVR (SEQ ID NO: 84275):SXGXH (SEQ ID NO: 84304), TVPKPXX (SEQ ID NO: 84432):APTQL (SEQ ID NO: 84134):SSLS-AA17-LFF (SEQ ID NO: 84889):LKVYP (SEQ ID NO: 84231):NMVVR (SEQ ID NO: 84275):AXGXH (SEQ ID NO: 84147), AVPKAXX (SEQ ID NO: 84404):APTKL (SEQ ID NO: 84131):SSLS-AA17-LFF (SEQ ID NO: 84889):LKVYP (SEQ ID NO: 84231):NMVVK (SEQ ID NO: 84274):AXGXH (SEQ ID NO: 84147), KVGKAXX (SEQ ID NO: 84425):VPTKL (SEQ ID NO: 84381):SSLS-AA17-LFF (SEQ ID NO: 84889):LKVYP (SEQ ID NO: 84231):EGMSVAE (SEQ ID NO: 84411):XGXR (SEQ ID NO: 84123), KASKAXX (SEQ ID NO: 84423):VPTKL (SEQ ID NO: 84381):SSLS-AA17-LFF (SEQ ID NO: 84889):LKVYP (SEQ ID NO: 84231):GMAVS (SEQ ID NO: 84194):EXGXR (SEQ ID NO: 84179), GSAGPXX (SEQ ID NO: 84420):TPTKM (SEQ ID NO: 84327):SSLS-AA17-LFF (SEQ ID NO: 84889):LKVYP (SEQ ID NO: 84231):GMVVD (SEQ ID NO: 84204):RXGXS (SEQ ID NO: 84291), AAPASXX (SEQ ID NO: 84401):VPARL (SEQ ID NO: 84352):SSLS-AA17-LFF (SEQ ID NO: 84889):LKVYP (SEQ ID NO: 84231):DMVVE (SEQ ID NO: 84161):AXGXR (SEQ ID NO: 84148), STPPTXX (SEQ ID NO: 84431):VPTRL (SEQ ID NO: 84385):SSLS-AA17-LFF (SEQ ID NO: 84889):LKVYP (SEQ ID NO: 84231):DMVVE (SEQ ID NO: 84161):SXGXR (SEQ ID NO: 84305), HVPKPXX (SEQ ID NO: 84421):APTKL (SEQ ID NO: 84131):SSLS-AA17-LFF (SEQ ID NO: 84889):LKVYP (SEQ ID NO: 84231):NMVVR (SEQ ID NO: 84275):SXGXH (SEQ ID NO: 84304), RVPSTXX (SEQ ID NO: 84428):APVKT (SEQ ID NO: 84144):SSLS-AA17-LFF (SEQ ID NO: 84889):LKVYP (SEQ ID NO: 84231):MIVEE (SEQ ID NO: 84241):XGXL (SEQ ID NO: 84122), ASAAPXX (SEQ ID NO: 84402):VPQAL (SEQ ID NO: 84364):SSLS-AA17-LFF (SEQ ID NO: 84889):LKVYP (SEQ ID NO: 84231):MIVRS (SEQ ID NO: 84243):XKXS (SEQ ID NO: 84124), ASASPXX (SEQ ID NO: 84403):VSQDL (SEQ ID NO: 84387):SSLS-AA17-LFF (SEQ ID NO: 84889):LKVYP (SEQ ID NO: 84231):MIVKS (SEQ ID NO: 84242):XKXS (SEQ ID NO: 84124), ASASPXX (SEQ ID NO: 84403):VPQDL (SEQ ID NO: 84365):SSLS-AA17-LFF (SEQ ID NO: 84889):LKVYP (SEQ ID NO: 84231):MVVKS (SEQ ID NO: 84256):XKXS (SEQ ID NO: 84124), NDEGLEX (SEQ ID NO: 84426):VPTEE (SEQ ID NO: 84377):SSLS-AA17-LFF (SEQ ID NO: 84889):LKVYP (SEQ ID NO: 84231):FLQHN (SEQ ID NO: 84184):KXEXR (SEQ ID NO: 84213), NDEGLEX (SEQ ID NO: 84426):VPTGQ (SEQ ID NO: 84379):SSLS-AA17-LFF (SEQ ID NO: 84889):LKVYP (SEQ ID NO: 84231):LEEHS (SEQ ID NO: 84217):QXEXR (SEQ ID NO: 84276), SSVKXQP (SEQ ID NO: 84430):SRVHH (SEQ ID NO: 84297):SSLS-AA17-LFF (SEQ ID NO: 84889):LKVYP (SEQ ID NO: 84231):RLEEH (SEQ ID NO: 84279):LEXAXA (SEQ ID NO: 84400), RNVQXRP (SEQ ID NO: 84427):TQVQL (SEQ ID NO: 84340):SSLS-AA17-LFF (SEQ ID NO: 84889):LKVYP (SEQ ID NO: 84231):TLEDH (SEQ ID NO: 84307):LAXKXE (SEQ ID NO: 84399), KIPKAXX (SEQ ID NO: 84424):APTEL (SEQ ID NO: 84128):NAIS-AA17-LYF (SEQ ID NO: 84878):LKKYR (SEQ ID NO: 84229):DMVVR (SEQ ID NO: 84163):GXGXR (SEQ ID NO: 84208), GIPEPXX (SEQ ID NO: 84419):APTKM (SEQ ID NO: 84132):NAIS-AA17-LYF (SEQ ID NO: 84878):LKKYR (SEQ ID NO: 84229):NMVVR (SEQ ID NO: 84275):SXAXR (SEQ ID NO: 84303), SIPKAXX (SEQ ID NO: 84429):APTEL (SEQ ID NO: 84128):NAIS-AA17-LYF (SEQ ID NO: 84878):LKKYR (SEQ ID NO: 84229):EMVVR (SEQ ID NO: 84177):GXGXR (SEQ ID NO: 84208), AVPKAXX (SEQ ID NO: 84404):APTKL (SEQ ID NO: 84131):NAIS-AA17-LYF (SEQ ID NO: 84878):LKKYR (SEQ ID NO: 84229):NMVVR (SEQ ID NO: 84275):AXGXH (SEQ ID NO: 84147), KVGKAXX (SEQ ID NO: 84425):APTKL (SEQ ID NO: 84131):NAIS-AA17-LYF (SEQ ID NO: 84878):LKKYR (SEQ ID NO: 84229):EGMSVVR (SEQ ID NO: 84418):XGXR (SEQ ID NO: 84123), KASKAXX (SEQ ID NO: 84423):APTKL (SEQ ID NO: 84131):NAIS-AA17-LYF (SEQ ID NO: 84878):LKKYR (SEQ ID NO: 84229):GMVVR (SEQ ID NO: 84207):EXGXR (SEQ ID NO: 84179), GSAGPXX (SEQ ID NO: 84420):APTKM (SEQ ID NO: 84132):NAIS-AA17-LYF (SEQ ID NO: 84878):LKKYR (SEQ ID NO: 84229):GMVVR (SEQ ID NO: 84207):RXGXS (SEQ ID NO: 84291), AAPASXX (SEQ ID NO: 84401):APTRL (SEQ ID NO: 84135):NAIS-AA17-LYF (SEQ ID NO: 84878):LKKYR (SEQ ID NO: 84229):DMVVR (SEQ ID NO: 84163):AXGXR (SEQ ID NO: 84148), STPPTXX (SEQ ID NO: 84431):APTRL (SEQ ID NO: 84135):NAIS-AA17-LYF (SEQ ID NO: 84878):LKKYR (SEQ ID NO: 84229):DMVVR (SEQ ID NO: 84163):SXGXR (SEQ ID NO: 84305), RVPSTXX (SEQ ID NO: 84428):APTKT (SEQ ID NO: 84133):NAIS-AA17-LYF (SEQ ID NO: 84878):LKKYR (SEQ ID NO: 84229):MIVVR (SEQ ID NO: 84247):XGXL (SEQ ID NO: 84122), ASAAPXX (SEQ ID NO: 84402):APTAL (SEQ ID NO: 84125):NAIS-AA17-LYF (SEQ ID NO: 84878):LKKYR (SEQ ID NO: 84229):MIVVR (SEQ ID NO: 84247):XKXS (SEQ ID NO: 84124), ASASPXX (SEQ ID NO: 84403):APTDL (SEQ ID NO: 84126):NAIS-AA17-LYF (SEQ ID NO: 84878):LKKYR (SEQ ID NO: 84229):MIVVR (SEQ ID NO: 84247):XKXS (SEQ ID NO: 84124), ASASPXX (SEQ ID NO: 84403):APTDL (SEQ ID NO: 84126):NAIS-AA17-LYF (SEQ ID NO: 84878):LKKYR (SEQ ID NO: 84229):MVVVR (SEQ ID NO: 84261):XKXS (SEQ ID NO: 84124), KIPKAXX (SEQ ID NO: 84424):VPTEL (SEQ ID NO: 84378):NAIS-AA17-LYF (SEQ ID NO: 84878):LKKYR (SEQ ID NO: 84229):DMVVE (SEQ ID NO: 84161):GXGXR (SEQ ID NO: 84208), GIPEPXX (SEQ ID NO: 84419):VPEKM (SEQ ID NO: 84360):NAIS-AA17-LYF (SEQ ID NO: 84878):LKKYR (SEQ ID NO: 84229):NMTVE (SEQ ID NO: 84267):SXAXR (SEQ ID NO: 84303), SIPKAXX (SEQ ID NO: 84429):VPTEL (SEQ ID NO: 84378):NAIS-AA17-LYF (SEQ ID NO: 84878):LKKYR (SEQ ID NO: 84229):EMVVE (SEQ ID NO: 84175):GXGXR (SEQ ID NO: 84208), AVPKAXX (SEQ ID NO: 84404):APTKL (SEQ ID NO: 84131):NAIS-AA17-LYF (SEQ ID NO: 84878):LKKYR (SEQ ID NO: 84229):NMVVK (SEQ ID NO: 84274):AXGXH (SEQ ID NO: 84147), KVGKAXX (SEQ ID NO: 84425):VPTKL (SEQ ID NO: 84381):NAIS-AA17-LYF (SEQ ID NO: 84878):LKKYR (SEQ ID NO: 84229):EGMSVAE (SEQ ID NO: 84411):XGXR (SEQ ID NO: 84123), KASKAXX (SEQ ID NO: 84423):VPTKL (SEQ ID NO: 84381):NAIS-AA17-LYF (SEQ ID NO: 84878):LKKYR (SEQ ID NO: 84229):GMAVS (SEQ ID NO: 84194):EXGXR (SEQ ID NO: 84179), GSAGPXX (SEQ ID NO: 84420):TPTKM (SEQ ID NO: 84327):NAIS-AA17-LYF (SEQ ID NO: 84878):LKKYR (SEQ ID NO: 84229):GMVVD (SEQ ID NO: 84204):RXGXS (SEQ ID NO: 84291), AAPASXX (SEQ ID NO: 84401):VPARL (SEQ ID NO: 84352):NAIS-AA17-LYF (SEQ ID NO: 84878):LKKYR (SEQ ID NO: 84229):DMVVE (SEQ ID NO: 84161):AXGXR (SEQ ID NO: 84148), STPPTXX (SEQ ID NO: 84431):VPTRL (SEQ ID NO: 84385):NAIS-AA17-LYF (SEQ ID NO: 84878):LKKYR (SEQ ID NO: 84229):DMVVE (SEQ ID NO: 84161):SXGXR (SEQ ID NO: 84305), RVPSTXX (SEQ ID NO: 84428):APVKT (SEQ ID NO: 84144):NAIS-AA17-LYF (SEQ ID NO: 84878):LKKYR (SEQ ID NO: 84229):MIVEE (SEQ ID NO: 84241):XGXL (SEQ ID NO: 84122), ASAAPXX (SEQ ID NO: 84402):VPQAL (SEQ ID NO: 84364):NAIS-AA17-LYF (SEQ ID NO: 84878):LKKYR (SEQ ID NO: 84229):MIVRS (SEQ ID NO: 84243):XKXS (SEQ ID NO: 84124), ASASPXX (SEQ ID NO: 84403):VSQDL (SEQ ID NO: 84387):NAIS-AA17-LYF (SEQ ID NO: 84878):LKKYR (SEQ ID NO: 84229):MIVKS (SEQ ID NO: 84242):XKXS (SEQ ID NO: 84124), ASASPXX (SEQ ID NO: 84403):VPQDL (SEQ ID NO: 84365):NAIS-AA17-LYF (SEQ ID NO: 84878):LKKYR (SEQ ID NO: 84229):MVVKS (SEQ ID NO: 84256):XKXS (SEQ ID NO: 84124), NDEGLEX (SEQ ID NO: 84426):VPTEE (SEQ ID NO: 84377):NAIS-AA17-LYF (SEQ ID NO: 84878):LKKYR (SEQ ID NO: 84229):FLQHN (SEQ ID NO: 84184):KXEXR (SEQ ID NO: 84213), NDEGLEX (SEQ ID NO: 84426):VPTGQ (SEQ ID NO: 84379):NAIS-AA17-LYF (SEQ ID NO: 84878):LKKYR (SEQ ID NO: 84229):LEEHS (SEQ ID NO: 84217):QXEXR (SEQ ID NO: 84276), SSVKXQP (SEQ ID NO: 84430):SRVHH (SEQ ID NO: 84297):NAIS-AA17-LYF (SEQ ID NO: 84878):LKKYR (SEQ ID NO: 84229):RLEEH (SEQ ID NO: 84279):LEXAXA (SEQ ID NO: 84400), RNVQXRP (SEQ ID NO: 84427):TQVQL (SEQ ID NO: 84340):NAIS-AA17-LYF (SEQ ID NO: 84878):LKKYR (SEQ ID NO: 84229):TLEDH (SEQ ID NO: 84307):LAXKXE (SEQ ID NO: 84399), KIPKAXX (SEQ ID NO: 84424):APTEL (SEQ ID NO: 84128):SATS-AA17-LYY (SEQ ID NO: 84882):LRKHR (SEQ ID NO: 84233):DMVVK (SEQ ID NO: 84162):GXGXR (SEQ ID NO: 84208), GIPEPXX (SEQ ID NO: 84419):APTKM (SEQ ID NO: 84132):SATS-AA17-LYY (SEQ ID NO: 84882):LRKHR (SEQ ID NO: 84233):NMVVK (SEQ ID NO: 84274):SXAXR (SEQ ID NO: 84303), SIPKAXX (SEQ ID NO: 84429):APTEL (SEQ ID NO: 84128):SATS-AA17-LYY (SEQ ID NO: 84882):LRKHR (SEQ ID NO: 84233):EMVVK (SEQ ID NO: 84176):GXGXR (SEQ ID NO: 84208), HVTKPTX (SEQ ID NO: 84422):APTKL (SEQ ID NO: 84131):SATS-AA17-LYY (SEQ ID NO: 84882):LRKHR (SEQ ID NO: 84233):NMVVK (SEQ ID NO: 84274):SXGXH (SEQ ID NO: 84304), YVPKPXX (SEQ ID NO: 84433):APTKL (SEQ ID NO: 84131):SATS-AA17-LYY (SEQ ID NO: 84882):LRKHR (SEQ ID NO: 84233):NMVVK (SEQ ID NO: 84274):SXGXH (SEQ ID NO: 84304), TVPKPXX (SEQ ID NO: 84432):APTQL (SEQ ID NO: 84134):SATS-AA17-LYY (SEQ ID NO: 84882):LRKHR (SEQ ID NO: 84233):NMVVK (SEQ ID NO: 84274):AXGXH (SEQ ID NO: 84147), KVGKAXX (SEQ ID NO: 84425):APTKL (SEQ ID NO: 84131):SATS-AA17-LYY (SEQ ID NO: 84882):LRKHR (SEQ ID NO: 84233):EGMSVVK (SEQ ID NO: 84417):XGXR (SEQ ID NO: 84123), KASKAXX (SEQ ID NO: 84423):APTKL (SEQ ID NO: 84131):SATS-AA17-LYY (SEQ ID NO: 84882):LRKHR (SEQ ID NO: 84233):GMVVK (SEQ ID NO: 84206):EXGXR (SEQ ID NO: 84179), GSAGPXX (SEQ ID NO: 84420):APTKM (SEQ ID NO: 84132):SATS-AA17-LYY (SEQ ID NO: 84882):LRKHR (SEQ ID NO: 84233):GMVVK (SEQ ID NO: 84206):RXGXS (SEQ ID NO: 84291), AAPASXX (SEQ ID NO: 84401):APTRL (SEQ ID NO: 84135):SATS-AA17-LYY (SEQ ID NO: 84882):LRKHR (SEQ ID NO: 84233):DMVVK (SEQ ID NO: 84162):AXGXR (SEQ ID NO: 84148), STPPTXX (SEQ ID NO: 84431):APTRL (SEQ ID NO: 84135):SATS-AA17-LYY (SEQ ID NO: 84882):LRKHR (SEQ ID NO: 84233):DMVVK (SEQ ID NO: 84162):SXGXR (SEQ ID NO: 84305), HVPKPXX (SEQ ID NO: 84421):APTKL (SEQ ID NO: 84131):SATS-AA17-LYY (SEQ ID NO: 84882):LRKHR (SEQ ID NO: 84233):NMVVK (SEQ ID NO: 84274):SXGXH (SEQ ID NO: 84304), RVPSTXX (SEQ ID NO: 84428):APTKT (SEQ ID NO: 84133):SATS-AA17-LYY (SEQ ID NO: 84882):LRKHR (SEQ ID NO: 84233):MIVVK (SEQ ID NO: 84246):XGXL (SEQ ID NO: 84122), ASAAPXX (SEQ ID NO: 84402):APTAL (SEQ ID NO: 84125):SATS-AA17-LYY (SEQ ID NO: 84882):LRKHR (SEQ ID NO: 84233):MIVVK (SEQ ID NO: 84246):XKXS (SEQ ID NO: 84124), ASASPXX (SEQ ID NO: 84403):APTDL (SEQ ID NO: 84126):SATS-AA17-LYY (SEQ ID NO: 84882):LRKHR (SEQ ID NO: 84233):MIVVK (SEQ ID NO: 84246):XKXS (SEQ ID NO: 84124), ASASPXX (SEQ ID NO: 84403):APTDL (SEQ ID NO: 84126):SATS-AA17-LYY (SEQ ID NO: 84882):LRKHR (SEQ ID NO: 84233):MVVVK (SEQ ID NO: 84260):XKXS (SEQ ID NO: 84124), KIPKAXX (SEQ ID NO: 84424):VPTEL (SEQ ID NO: 84378):SATS-AA17-LYY (SEQ ID NO: 84882):LRKHR (SEQ ID NO: 84233):DMVVE (SEQ ID NO: 84161):GXGXR (SEQ ID NO: 84208), GIPEPXX (SEQ ID NO: 84419):VPEKM (SEQ ID NO: 84360):SATS-AA17-LYY (SEQ ID NO: 84882):LRKHR (SEQ ID NO: 84233):NMTVE (SEQ ID NO: 84267):SXAXR (SEQ ID NO: 84303), SIPKAXX (SEQ ID NO: 84429):VPTEL (SEQ ID NO: 84378):SATS-AA17-LYY (SEQ ID NO: 84882):LRKHR (SEQ ID NO: 84233):EMVVE (SEQ ID NO: 84175):GXGXR (SEQ ID NO: 84208), HVTKPTX (SEQ ID NO: 84422):APTKL (SEQ ID NO: 84131):SATS-AA17-LYY (SEQ ID NO: 84882):LRKHR (SEQ ID NO: 84233):NMVVR (SEQ ID NO: 84275):SXGXH (SEQ ID NO: 84304), YVPKPXX (SEQ ID NO: 84433):APTKL (SEQ ID NO: 84131):SATS-AA17-LYY (SEQ ID NO: 84882):LRKHR (SEQ ID NO: 84233):NMVVR (SEQ ID NO: 84275):SXGXH (SEQ ID NO: 84304), TVPKPXX (SEQ ID NO: 84432):APTQL (SEQ ID NO: 84134):SATS-AA17-LYY (SEQ ID NO: 84882):LRKHR (SEQ ID NO: 84233):NMVVR (SEQ ID NO: 84275):AXGXH (SEQ ID NO: 84147), KVGKAXX (SEQ ID NO: 84425):VPTKL (SEQ ID NO: 84381):SATS-AA17-LYY (SEQ ID NO: 84882):LRKHR (SEQ ID NO: 84233):EGMSVAE (SEQ ID NO: 84411):XGXR (SEQ ID NO: 84123), KASKAXX (SEQ ID NO: 84423):VPTKL (SEQ ID NO: 84381):SATS-AA17-LYY (SEQ ID NO: 84882):LRKHR (SEQ ID NO: 84233):GMAVS (SEQ ID NO: 84194):EXGXR (SEQ ID NO: 84179), GSAGPXX (SEQ ID NO: 84420):TPTKM (SEQ ID NO: 84327):SATS-AA17-LYY (SEQ ID NO: 84882):LRKHR (SEQ ID NO: 84233):GMVVD (SEQ ID NO: 84204):RXGXS (SEQ ID NO: 84291), AAPASXX (SEQ ID NO: 84401):VPARL (SEQ ID NO: 84352):SATS-AA17-LYY (SEQ ID NO: 84882):LRKHR (SEQ ID NO: 84233):DMVVE (SEQ ID NO: 84161):AXGXR (SEQ ID NO: 84148), STPPTXX (SEQ ID NO: 84431):VPTRL (SEQ ID NO: 84385):SATS-AA17-LYY (SEQ ID NO: 84882):LRKHR (SEQ ID NO: 84233):DMVVE (SEQ ID NO: 84161):SXGXR (SEQ ID NO: 84305), HVPKPXX (SEQ ID NO: 84421):APTKL (SEQ ID NO: 84131):SATS-AA17-LYY (SEQ ID NO: 84882):LRKHR (SEQ ID NO: 84233):NMVVR (SEQ ID NO: 84275):SXGXH (SEQ ID NO: 84304), RVPSTXX (SEQ ID NO: 84428):APVKT (SEQ ID NO: 84144):SATS-AA17-LYY (SEQ ID NO: 84882):LRKHR (SEQ ID NO: 84233):MIVEE (SEQ ID NO: 84241):XGXL (SEQ ID NO: 84122), ASAAPXX (SEQ ID NO: 84402):VPQAL (SEQ ID NO: 84364):SATS-AA17-LYY (SEQ ID NO: 84882):LRKHR (SEQ ID NO: 84233):MIVRS (SEQ ID NO: 84243):XKXS (SEQ ID NO: 84124), ASASPXX (SEQ ID NO: 84403):VSQDL (SEQ ID NO: 84387):SATS-AA17-LYY (SEQ ID NO: 84882):LRKHR (SEQ ID NO: 84233):MIVKS (SEQ ID NO: 84242):XKXS (SEQ ID NO: 84124), ASASPXX (SEQ ID NO: 84403):VPQDL (SEQ ID NO: 84365):SATS-AA17-LYY (SEQ ID NO: 84882):LRKHR (SEQ ID NO: 84233):MVVKS (SEQ ID NO: 84256):XKXS (SEQ ID NO: 84124), NDEGLEX (SEQ ID NO: 84426):VPTEE (SEQ ID NO: 84377):SATS-AA17-LYY (SEQ ID NO: 84882):LRKHR (SEQ ID NO: 84233):FLQHN (SEQ ID NO: 84184):KXEXR (SEQ ID NO: 84213), NDEGLEX (SEQ ID NO: 84426):VPTGQ (SEQ ID NO: 84379):SATS-AA17-LYY (SEQ ID NO: 84882):LRKHR (SEQ ID NO: 84233):LEEHS (SEQ ID NO: 84217):QXEXR (SEQ ID NO: 84276), SSVKXQP (SEQ ID NO: 84430):SRVHH (SEQ ID NO: 84297):SATS-AA17-LYY (SEQ ID NO: 84882):LRKHR (SEQ ID NO: 84233):RLEEH (SEQ ID NO: 84279):LEXAXA (SEQ ID NO: 84400), RNVQXRP (SEQ ID NO: 84427):TQVQL (SEQ ID NO: 84340):SATS-AA17-LYY (SEQ ID NO: 84882):LRKHR (SEQ ID NO: 84233):TLEDH (SEQ ID NO: 84307):LAXKXE (SEQ ID NO: 84399), KIPKAXX (SEQ ID NO: 84424):VPTEL (SEQ ID NO: 84378):SPIS-AA17-LYK (SEQ ID NO: 84887):LKYHY (SEQ ID NO: 84232):DMVAE (SEQ ID NO: 84156):GXGXR (SEQ ID NO: 84208), GIPEPXX (SEQ ID NO: 84419):VPTKM (SEQ ID NO: 84382):SPIS-AA17-LYK (SEQ ID NO: 84887):LKYHY (SEQ ID NO: 84232):NMVAE (SEQ ID NO: 84268):SXAXR (SEQ ID NO: 84303), SIPKAXX (SEQ ID NO: 84429):VPTEL (SEQ ID NO: 84378):SPIS-AA17-LYK (SEQ ID NO: 84887):LKYHY (SEQ ID NO: 84232):EMVAE (SEQ ID NO: 84170):GXGXR (SEQ ID NO: 84208), HVTKPTX (SEQ ID NO: 84422):VPTKL (SEQ ID NO: 84381):SPIS-AA17-LYK (SEQ ID NO: 84887):LKYHY (SEQ ID NO: 84232):NMVAE (SEQ ID NO: 84268):SXGXH (SEQ ID NO: 84304), YVPKPXX (SEQ ID NO: 84433):VPTKL (SEQ ID NO: 84381):SPIS-AA17-LYK (SEQ ID NO: 84887):LKYHY (SEQ ID NO: 84232):NMVAE (SEQ ID NO: 84268):SXGXH (SEQ ID NO: 84304), TVPKPXX (SEQ ID NO: 84432):VPTQL (SEQ ID NO: 84384):SPIS-AA17-LYK (SEQ ID NO: 84887):LKYHY (SEQ ID NO: 84232):NMVAE (SEQ ID NO: 84268):AXGXH (SEQ ID NO: 84147), AVPKAXX (SEQ ID NO: 84404):VPTKL (SEQ ID NO: 84381):SPIS-AA17-LYK (SEQ ID NO: 84887):LKYHY (SEQ ID NO: 84232):NMVAE (SEQ ID NO: 84268):AXGXH (SEQ ID NO: 84147), KASKAXX (SEQ ID NO: 84423):VPTKL (SEQ ID NO: 84381):SPIS-AA17-LYK (SEQ ID NO: 84887):LKYHY (SEQ ID NO: 84232):GMVAE (SEQ ID NO: 84200):EXGXR (SEQ ID NO: 84179), GSAGPXX (SEQ ID NO: 84420):VPTKM (SEQ ID NO: 84382):SPIS-AA17-LYK (SEQ ID NO: 84887):LKYHY (SEQ ID NO: 84232):GMVAE (SEQ ID NO: 84200):RXGXS (SEQ ID NO: 84291), AAPASXX (SEQ ID NO: 84401):VPTRL (SEQ ID NO: 84385):SPIS-AA17-LYK (SEQ ID NO: 84887):LKYHY (SEQ ID NO: 84232):DMVAE (SEQ ID NO: 84156):AXGXR (SEQ ID NO: 84148), STPPTXX (SEQ ID NO: 84431):VPTRL (SEQ ID NO: 84385):SPIS-AA17-LYK (SEQ ID NO: 84887):LKYHY (SEQ ID NO: 84232):DMVAE (SEQ ID NO: 84156):SXGXR (SEQ ID NO: 84305), HVPKPXX (SEQ ID NO: 84421):VPTKL (SEQ ID NO: 84381):SPIS-AA17-LYK (SEQ ID NO: 84887):LKYHY (SEQ ID NO: 84232):NMVAE (SEQ ID NO: 84268):SXGXH (SEQ ID NO: 84304), RVPSTXX (SEQ ID NO: 84428):VPTKT (SEQ ID NO: 84383):SPIS-AA17-LYK (SEQ ID NO: 84887):LKYHY (SEQ ID NO: 84232):MIVAE (SEQ ID NO: 84240):XGXL (SEQ ID NO: 84122), ASAAPXX (SEQ ID NO: 84402):VPTAL (SEQ ID NO: 84375):SPIS-AA17-LYK (SEQ ID NO: 84887):LKYHY (SEQ ID NO: 84232):MIVAE (SEQ ID NO: 84240):XKXS (SEQ ID NO: 84124), ASASPXX (SEQ ID NO: 84403):VPTDL (SEQ ID NO: 84376):SPIS-AA17-LYK (SEQ ID NO: 84887):LKYHY (SEQ ID NO: 84232):MIVAE (SEQ ID NO: 84240):XKXS (SEQ ID NO: 84124), ASASPXX (SEQ ID NO: 84403):VPTDL (SEQ ID NO: 84376):SPIS-AA17-LYK (SEQ ID NO: 84887):LKYHY (SEQ ID NO: 84232):MVVAE (SEQ ID NO: 84254):XKXS (SEQ ID NO: 84124), KIPKAXX (SEQ ID NO: 84424):VPTEL (SEQ ID NO: 84378):SPIS-AA17-LYK (SEQ ID NO: 84887):LKYHY (SEQ ID NO: 84232):DMVVE (SEQ ID NO: 84161):GXGXR (SEQ ID NO: 84208), GIPEPXX (SEQ ID NO: 84419):VPEKM (SEQ ID NO: 84360):SPIS-AA17-LYK (SEQ ID NO: 84887):LKYHY (SEQ ID NO: 84232):NMTVE (SEQ ID NO: 84267):SXAXR (SEQ ID NO: 84303), SIPKAXX (SEQ ID NO: 84429):VPTEL (SEQ ID NO: 84378):SPIS-AA17-LYK (SEQ ID NO: 84887):LKYHY (SEQ ID NO: 84232):EMVVE (SEQ ID NO: 84175):GXGXR (SEQ ID NO: 84208), HVTKPTX (SEQ ID NO: 84422):APTKL (SEQ ID NO: 84131):SPIS-AA17-LYK (SEQ ID NO: 84887):LKYHY (SEQ ID NO: 84232):NMVVR (SEQ ID NO: 84275):SXGXH (SEQ ID NO: 84304), YVPKPXX (SEQ ID NO: 84433):APTKL (SEQ ID NO: 84131):SPIS-AA17-LYK (SEQ ID NO: 84887):LKYHY (SEQ ID NO: 84232):NMVVR (SEQ ID NO: 84275):SXGXH (SEQ ID NO: 84304), TVPKPXX (SEQ ID NO: 84432):APTQL (SEQ ID NO: 84134):SPIS-AA17-LYK (SEQ ID NO: 84887):LKYHY (SEQ ID NO: 84232):NMVVR (SEQ ID NO: 84275):AXGXH (SEQ ID NO: 84147), AVPKAXX (SEQ ID NO: 84404):APTKL (SEQ ID NO: 84131):SPIS-AA17-LYK (SEQ ID NO: 84887):LKYHY (SEQ ID NO: 84232):NMVVK (SEQ ID NO: 84274):AXGXH (SEQ ID NO: 84147), KASKAXX (SEQ ID NO: 84423):VPTKL (SEQ ID NO: 84381):SPIS-AA17-LYK (SEQ ID NO: 84887):LKYHY (SEQ ID NO: 84232):GMAVS (SEQ ID NO: 84194):EXGXR (SEQ ID NO: 84179), GSAGPXX (SEQ ID NO: 84420):TPTKM (SEQ ID NO: 84327):SPIS-AA17-LYK (SEQ ID NO: 84887):LKYHY (SEQ ID NO: 84232):GMVVD (SEQ ID NO: 84204):RXGXS (SEQ ID NO: 84291), AAPASXX (SEQ ID NO: 84401):VPARL (SEQ ID NO: 84352):SPIS-AA17-LYK (SEQ ID NO: 84887):LKYHY (SEQ ID NO: 84232):DMVVE (SEQ ID NO: 84161):AXGXR (SEQ ID NO: 84148), STPPTXX (SEQ ID NO: 84431):VPTRL (SEQ ID NO: 84385):SPIS-AA17-LYK (SEQ ID NO: 84887):LKYHY (SEQ ID NO: 84232):DMVVE (SEQ ID NO: 84161):SXGXR (SEQ ID NO: 84305), HVPKPXX (SEQ ID NO: 84421):APTKL (SEQ ID NO: 84131):SPIS-AA17-LYK (SEQ ID NO: 84887):LKYHY (SEQ ID NO: 84232):NMVVR (SEQ ID NO: 84275):SXGXH (SEQ ID NO: 84304), RVPSTXX (SEQ ID NO: 84428):APVKT (SEQ ID NO: 84144):SPIS-AA17-LYK (SEQ ID NO: 84887):LKYHY (SEQ ID NO: 84232):MIVEE (SEQ ID NO: 84241):XGXL (SEQ ID NO: 84122), ASAAPXX (SEQ ID NO: 84402):VPQAL (SEQ ID NO: 84364):SPIS-AA17-LYK (SEQ ID NO: 84887):LKYHY (SEQ ID NO: 84232):MIVRS (SEQ ID NO: 84243):XKXS (SEQ ID NO: 84124), ASASPXX (SEQ ID NO: 84403):VSQDL (SEQ ID NO: 84387):SPIS-AA17-LYK (SEQ ID NO: 84887):LKYHY (SEQ ID NO: 84232):MIVKS (SEQ ID NO: 84242):XKXS (SEQ ID NO: 84124), ASASPXX (SEQ ID NO: 84403):VPQDL (SEQ ID NO: 84365):SPIS-AA17-LYK (SEQ ID NO: 84887):LKYHY (SEQ ID NO: 84232):MVVKS (SEQ ID NO: 84256):XKXS (SEQ ID NO: 84124), NDEGLEX (SEQ ID NO: 84426):VPTEE (SEQ ID NO: 84377):SPIS-AA17-LYK (SEQ ID NO: 84887):LKYHY (SEQ ID NO: 84232):FLQHN (SEQ ID NO: 84184):KXEXR (SEQ ID NO: 84213), NDEGLEX (SEQ ID NO: 84426):VPTGQ (SEQ ID NO: 84379):SPIS-AA17-LYK (SEQ ID NO: 84887):LKYHY (SEQ ID NO: 84232):LEEHS (SEQ ID NO: 84217):QXEXR (SEQ ID NO: 84276), SSVKXQP (SEQ ID NO: 84430):SRVHH (SEQ ID NO: 84297):SPIS-AA17-LYK (SEQ ID NO: 84887):LKYHY (SEQ ID NO: 84232):RLEEH (SEQ ID NO: 84279):LEXAXA (SEQ ID NO: 84400), RNVQXRP (SEQ ID NO: 84427):TQVQL (SEQ ID NO: 84340):SPIS-AA17-LYK (SEQ ID NO: 84887):LKYHY (SEQ ID NO: 84232):TLEDH (SEQ ID NO: 84307):LAXKXE (SEQ ID NO: 84399), KIPKAXX (SEQ ID NO: 84424):VPTEL (SEQ ID NO: 84378):EPIS-AA17-LYL (SEQ ID NO: 84874):KFKYE (SEQ ID NO: 84211):DMAVS (SEQ ID NO: 84150):GXGXR (SEQ ID NO: 84208), GIPEPXX (SEQ ID NO: 84419):VPTKM (SEQ ID NO: 84382):EPIS-AA17-LYL (SEQ ID NO: 84874):KFKYE (SEQ ID NO: 84211):NMAVS (SEQ ID NO: 84262):SXAXR (SEQ ID NO: 84303), SIPKAXX (SEQ ID NO: 84429):VPTEL (SEQ ID NO: 84378):EPIS-AA17-LYL (SEQ ID NO: 84874):KFKYE (SEQ ID NO: 84211):EMAVS (SEQ ID NO: 84164):GXGXR (SEQ ID NO: 84208), HVTKPTX (SEQ ID NO: 84422):VPTKL (SEQ ID NO: 84381):EPIS-AA17-LYL (SEQ ID NO: 84874):KFKYE (SEQ ID NO: 84211):NMAVS (SEQ ID NO: 84262):SXGXH (SEQ ID NO: 84304), YVPKPXX (SEQ ID NO: 84433):VPTKL (SEQ ID NO: 84381):EPIS-AA17-LYL (SEQ ID NO: 84874):KFKYE (SEQ ID NO: 84211):NMAVS (SEQ ID NO: 84262):SXGXH (SEQ ID NO: 84304), TVPKPXX (SEQ ID NO: 84432):VPTQL (SEQ ID NO: 84384):EPIS-AA17-LYL (SEQ ID NO: 84874):KFKYE (SEQ ID NO: 84211):NMAVS (SEQ ID NO: 84262):AXGXH (SEQ ID NO: 84147), AVPKAXX (SEQ ID NO: 84404):VPTKL (SEQ ID NO: 84381):EPIS-AA17-LYL (SEQ ID NO: 84874):KFKYE (SEQ ID NO: 84211):NMAVS (SEQ ID NO: 84262):AXGXH (SEQ ID NO: 84147), KVGKAXX (SEQ ID NO: 84425):VPTKL (SEQ ID NO: 84381):EPIS-AA17-LYL (SEQ ID NO: 84874):KFKYE (SEQ ID NO: 84211):EGMSAVS (SEQ ID NO: 84405):XGXR (SEQ ID NO: 84123), GSAGPXX (SEQ ID NO: 84420):VPTKM (SEQ ID NO: 84382):EPIS-AA17-LYL (SEQ ID NO: 84874):KFKYE (SEQ ID NO: 84211):GMAVS (SEQ ID NO: 84194):RXGXS (SEQ ID NO: 84291), AAPASXX (SEQ ID NO: 84401):VPTRL (SEQ ID NO: 84385):EPIS-AA17-LYL (SEQ ID NO: 84874):KFKYE (SEQ ID NO: 84211):DMAVS (SEQ ID NO: 84150):AXGXR (SEQ ID NO: 84148), STPPTXX (SEQ ID NO: 84431):VPTRL (SEQ ID NO: 84385):EPIS-AA17-LYL (SEQ ID NO: 84874):KFKYE (SEQ ID NO: 84211):DMAVS (SEQ ID NO: 84150):SXGXR (SEQ ID NO: 84305), HVPKPXX (SEQ ID NO: 84421):VPTKL (SEQ ID NO: 84381):EPIS-AA17-LYL (SEQ ID NO: 84874):KFKYE (SEQ ID NO: 84211):NMAVS (SEQ ID NO: 84262):SXGXH (SEQ ID NO: 84304), RVPSTXX (SEQ ID NO: 84428):VPTKT (SEQ ID NO: 84383):EPIS-AA17-LYL (SEQ ID NO: 84874):KFKYE (SEQ ID NO: 84211):MIAVS (SEQ ID NO: 84234):XGXL (SEQ ID NO: 84122), ASAAPXX (SEQ ID NO: 84402):VPTAL (SEQ ID NO: 84375):EPIS-AA17-LYL (SEQ ID NO: 84874):KFKYE (SEQ ID NO: 84211):MIAVS (SEQ ID NO: 84234):XKXS (SEQ ID NO: 84124), ASASPXX (SEQ ID NO: 84403):VPTDL (SEQ ID NO: 84376):EPIS-AA17-LYL (SEQ ID NO: 84874):KFKYE (SEQ ID NO: 84211):MIAVS (SEQ ID NO: 84234):XKXS (SEQ ID NO: 84124), ASASPXX (SEQ ID NO: 84403):VPTDL (SEQ ID NO: 84376):EPIS-AA17-LYL (SEQ ID NO: 84874):KFKYE (SEQ ID NO: 84211):MVAVS (SEQ ID NO: 84248):XKXS (SEQ ID NO: 84124), KIPKAXX (SEQ ID NO: 84424):VPTEL (SEQ ID NO: 84378):EPIS-AA17-LYL (SEQ ID NO: 84874):KFKYE (SEQ ID NO: 84211):DMVVE (SEQ ID NO: 84161):GXGXR (SEQ ID NO: 84208), GIPEPXX (SEQ ID NO: 84419):VPEKM (SEQ ID NO: 84360):EPIS-AA17-LYL (SEQ ID NO: 84874):KFKYE (SEQ ID NO: 84211):NMTVE (SEQ ID NO: 84267):SXAXR (SEQ ID NO: 84303), SIPKAXX (SEQ ID NO: 84429):VPTEL (SEQ ID NO: 84378):EPIS-AA17-LYL (SEQ ID NO: 84874):KFKYE (SEQ ID NO: 84211):EMVVE (SEQ ID NO: 84175):GXGXR (SEQ ID NO: 84208), HVTKPTX (SEQ ID NO: 84422):APTKL (SEQ ID NO: 84131):EPIS-AA17-LYL (SEQ ID NO: 84874):KFKYE (SEQ ID NO: 84211):NMVVR (SEQ ID NO: 84275):SXGXH (SEQ ID NO: 84304), YVPKPXX (SEQ ID NO: 84433):APTKL (SEQ ID NO: 84131):EPIS-AA17-LYL (SEQ ID NO: 84874):KFKYE (SEQ ID NO: 84211):NMVVR (SEQ ID NO: 84275):SXGXH (SEQ ID NO: 84304), TVPKPXX (SEQ ID NO: 84432):APTQL (SEQ ID NO: 84134):EPIS-AA17-LYL (SEQ ID NO: 84874):KFKYE (SEQ ID NO: 84211):NMVVR (SEQ ID NO: 84275):AXGXH (SEQ ID NO: 84147), AVPKAXX (SEQ ID NO: 84404):APTKL (SEQ ID NO: 84131):EPIS-AA17-LYL (SEQ ID NO: 84874):KFKYE (SEQ ID NO: 84211):NMVVK (SEQ ID NO: 84274):AXGXH (SEQ ID NO: 84147), KVGKAXX (SEQ ID NO: 84425):VPTKL (SEQ ID NO: 84381):EPIS-AA17-LYL (SEQ ID NO: 84874):KFKYE (SEQ ID NO: 84211):EGMSVAE (SEQ ID NO: 84411):XGXR (SEQ ID NO: 84123), GSAGPXX (SEQ ID NO: 84420):TPTKM (SEQ ID NO: 84327):EPIS-AA17-LYL (SEQ ID NO: 84874):KFKYE (SEQ ID NO: 84211):GMVVD (SEQ ID NO: 84204):RXGXS (SEQ ID NO: 84291), AAPASXX (SEQ ID NO: 84401):VPARL (SEQ ID NO: 84352):EPIS-AA17-LYL (SEQ ID NO: 84874):KFKYE (SEQ ID NO: 84211):DMVVE (SEQ ID NO: 84161):AXGXR (SEQ ID NO: 84148), STPPTXX (SEQ ID NO: 84431):VPTRL (SEQ ID NO: 84385):EPIS-AA17-LYL (SEQ ID NO: 84874):KFKYE (SEQ ID NO: 84211):DMVVE (SEQ ID NO: 84161):SXGXR (SEQ ID NO: 84305), HVPKPXX (SEQ ID NO: 84421):APTKL (SEQ ID NO: 84131):EPIS-AA17-LYL (SEQ ID NO: 84874):KFKYE (SEQ ID NO: 84211):NMVVR (SEQ ID NO: 84275):SXGXH (SEQ ID NO: 84304), RVPSTXX (SEQ ID NO: 84428):APVKT (SEQ ID NO: 84144):EPIS-AA17-LYL (SEQ ID NO: 84874):KFKYE (SEQ ID NO: 84211):MIVEE (SEQ ID NO: 84241):XGXL (SEQ ID NO: 84122), ASAAPXX (SEQ ID NO: 84402):VPQAL (SEQ ID NO: 84364):EPIS-AA17-LYL (SEQ ID NO: 84874):KFKYE (SEQ ID NO: 84211):MIVRS (SEQ ID NO: 84243):XKXS (SEQ ID NO: 84124), ASASPXX (SEQ ID NO: 84403):VSQDL (SEQ ID NO: 84387):EPIS-AA17-LYL (SEQ ID NO: 84874):KFKYE (SEQ ID NO: 84211):MIVKS (SEQ ID NO: 84242):XKXS (SEQ ID NO: 84124), ASASPXX (SEQ ID NO: 84403):VPQDL (SEQ ID NO: 84365):EPIS-AA17-LYL (SEQ ID NO: 84874):KFKYE (SEQ ID NO: 84211):MVVKS (SEQ ID NO: 84256):XKXS (SEQ ID NO: 84124), NDEGLEX (SEQ ID NO: 84426):VPTEE (SEQ ID NO: 84377):EPIS-AA17-LYL (SEQ ID NO: 84874):KFKYE (SEQ ID NO: 84211):FLQHN (SEQ ID NO: 84184):KXEXR (SEQ ID NO: 84213), NDEGLEX (SEQ ID NO: 84426):VPTGQ (SEQ ID NO: 84379):EPIS-AA17-LYL (SEQ ID NO: 84874):KFKYE (SEQ ID NO: 84211):LEEHS (SEQ ID NO: 84217):QXEXR (SEQ ID NO: 84276), SSVKXQP (SEQ ID NO: 84430):SRVHH (SEQ ID NO: 84297):EPIS-AA17-LYL (SEQ ID NO: 84874):KFKYE (SEQ ID NO: 84211):RLEEH (SEQ ID NO: 84279):LEXAXA (SEQ ID NO: 84400), RNVQXRP (SEQ ID NO: 84427):TQVQL (SEQ ID NO: 84340):EPIS-AA17-LYL (SEQ ID NO: 84874):KFKYE (SEQ ID NO: 84211):TLEDH (SEQ ID NO: 84307):LAXKXE (SEQ ID NO: 84399), KIPKAXX (SEQ ID NO: 84424):TPTEL (SEQ ID NO: 84323):SPIN-AA17-LYF (SEQ ID NO: 84884):YGKIP (SEQ ID NO: 84397):DMVVD (SEQ ID NO: 84160):GXGXR (SEQ ID NO: 84208), GIPEPXX (SEQ ID NO: 84419):TPTKM (SEQ ID NO: 84327):SPIN-AA17-LYF (SEQ ID NO: 84884):YGKIP (SEQ ID NO: 84397):NMVVD (SEQ ID NO: 84272):SXAXR (SEQ ID NO: 84303), SIPKAXX (SEQ ID NO: 84429):TPTEL (SEQ ID NO: 84323):SPIN-AA17-LYF (SEQ ID NO: 84884):YGKIP (SEQ ID NO: 84397):EMVVD (SEQ ID NO: 84174):GXGXR (SEQ ID NO: 84208), HVTKPTX (SEQ ID NO: 84422):TPTKL (SEQ ID NO: 84326):SPIN-AA17-LYF (SEQ ID NO: 84884):YGKIP (SEQ ID NO: 84397):NMVVD (SEQ ID NO: 84272):SXGXH (SEQ ID NO: 84304), YVPKPXX (SEQ ID NO: 84433):TPTKL (SEQ ID NO: 84326):SPIN-AA17-LYF (SEQ ID NO: 84884):YGKIP (SEQ ID NO: 84397):NMVVD (SEQ ID NO: 84272):SXGXH (SEQ ID NO: 84304), TVPKPXX (SEQ ID NO: 84432):TPTQL (SEQ ID NO: 84329):SPIN-AA17-LYF (SEQ ID NO: 84884):YGKIP (SEQ ID NO: 84397):NMVVD (SEQ ID NO: 84272):AXGXH (SEQ ID NO: 84147), AVPKAXX (SEQ ID NO: 84404):TPTKL (SEQ ID NO: 84326):SPIN-AA17-LYF (SEQ ID NO: 84884):YGKIP (SEQ ID NO: 84397):NMVVD (SEQ ID NO: 84272):AXGXH (SEQ ID NO: 84147), KVGKAXX (SEQ ID NO: 84425):TPTKL (SEQ ID NO: 84326):SPIN-AA17-LYF (SEQ ID NO: 84884):YGKIP (SEQ ID NO: 84397):EGMSVVD (SEQ ID NO: 84415):XGXR (SEQ ID NO: 84123), KASKAXX (SEQ ID NO: 84423):TPTKL (SEQ ID NO: 84326):SPIN-AA17-LYF (SEQ ID NO: 84884):YGKIP (SEQ ID NO: 84397):GMVVD (SEQ ID NO: 84204):EXGXR (SEQ ID NO: 84179), AAPASXX (SEQ ID NO: 84401):TPTRL (SEQ ID NO: 84330):SPIN-AA17-LYF (SEQ ID NO: 84884):YGKIP (SEQ ID NO: 84397):DMVVD (SEQ ID NO: 84160):AXGXR (SEQ ID NO: 84148), STPPTXX (SEQ ID NO: 84431):TPTRL (SEQ ID NO: 84330):SPIN-AA17-LYF (SEQ ID NO: 84884):YGKIP (SEQ ID NO: 84397):DMVVD (SEQ ID NO: 84160):SXGXR (SEQ ID NO: 84305), HVPKPXX (SEQ ID NO: 84421):TPTKL (SEQ ID NO: 84326):SPIN-AA17-LYF (SEQ ID NO: 84884):YGKIP (SEQ ID NO: 84397):NMVVD (SEQ ID NO: 84272):SXGXH (SEQ ID NO: 84304), RVPSTXX (SEQ ID NO: 84428):TPTKT (SEQ ID NO: 84328):SPIN-AA17-LYF (SEQ ID NO: 84884):YGKIP (SEQ ID NO: 84397):MIVVD (SEQ ID NO: 84244):XGXL (SEQ ID NO: 84122), ASAAPXX (SEQ ID NO: 84402):TPTAL (SEQ ID NO: 84320):SPIN-AA17-LYF (SEQ ID NO: 84884):YGKIP (SEQ ID NO: 84397):MIVVD (SEQ ID NO: 84244):XKXS (SEQ ID NO: 84124), ASASPXX (SEQ ID NO: 84403):TPTDL (SEQ ID NO: 84321):SPIN-AA17-LYF (SEQ ID NO: 84884):YGKIP (SEQ ID NO: 84397):MIVVD (SEQ ID NO: 84244):XKXS (SEQ ID NO: 84124), ASASPXX (SEQ ID NO: 84403):TPTDL (SEQ ID NO: 84321):SPIN-AA17-LYF (SEQ ID NO: 84884):YGKIP (SEQ ID NO: 84397):MVVVD (SEQ ID NO: 84258):XKXS (SEQ ID NO: 84124), KIPKAXX (SEQ ID NO: 84424):VPTEL (SEQ ID NO: 84378):SPIN-AA17-LYF (SEQ ID NO: 84884):YGKIP (SEQ ID NO: 84397):DMVVE (SEQ ID NO: 84161):GXGXR (SEQ ID NO: 84208), GIPEPXX (SEQ ID NO: 84419):VPEKM (SEQ ID NO: 84360):SPIN-AA17-LYF (SEQ ID NO: 84884):YGKIP (SEQ ID NO: 84397):NMTVE (SEQ ID NO: 84267):SXAXR (SEQ ID NO: 84303), SIPKAXX (SEQ ID NO: 84429):VPTEL (SEQ ID NO: 84378):SPIN-AA17-LYF (SEQ ID NO: 84884):YGKIP (SEQ ID NO: 84397):EMVVE (SEQ ID NO: 84175):GXGXR (SEQ ID NO: 84208), HVTKPTX (SEQ ID NO: 84422):APTKL (SEQ ID NO: 84131):SPIN-AA17-LYF (SEQ ID NO: 84884):YGKIP (SEQ ID NO: 84397):NMVVR (SEQ ID NO: 84275):SXGXH (SEQ ID NO: 84304), YVPKPXX (SEQ ID NO: 84433):APTKL (SEQ ID NO: 84131):SPIN-AA17-LYF (SEQ ID NO: 84884):YGKIP (SEQ ID NO: 84397):NMVVR (SEQ ID NO: 84275):SXGXH (SEQ ID NO: 84304), TVPKPXX (SEQ ID NO: 84432):APTQL (SEQ ID NO: 84134):SPIN-AA17-LYF (SEQ ID NO: 84884):YGKIP (SEQ ID NO: 84397):NMVVR (SEQ ID NO: 84275):AXGXH (SEQ ID NO: 84147), AVPKAXX (SEQ ID NO: 84404):APTKL (SEQ ID NO: 84131):SPIN-AA17-LYF (SEQ ID NO: 84884):YGKIP (SEQ ID NO: 84397):NMVVK (SEQ ID NO: 84274):AXGXH (SEQ ID NO: 84147), KVGKAXX (SEQ ID NO: 84425):VPTKL (SEQ ID NO: 84381):SPIN-AA17-LYF (SEQ ID NO: 84884):YGKIP (SEQ ID NO: 84397):EGMSVAE (SEQ ID NO: 84411):XGXR (SEQ ID NO: 84123), KASKAXX (SEQ ID NO: 84423):VPTKL (SEQ ID NO: 84381):SPIN-AA17-LYF (SEQ ID NO: 84884):YGKIP (SEQ ID NO: 84397):GMAVS (SEQ ID NO: 84194):EXGXR (SEQ ID NO: 84179), AAPASXX (SEQ ID NO: 84401):VPARL (SEQ ID NO: 84352):SPIN-AA17-LYF (SEQ ID NO: 84884):YGKIP (SEQ ID NO: 84397):DMVVE (SEQ ID NO: 84161):AXGXR (SEQ ID NO: 84148), STPPTXX (SEQ ID NO: 84431):VPTRL (SEQ ID NO: 84385):SPIN-AA17-LYF (SEQ ID NO: 84884):YGKIP (SEQ ID NO: 84397):DMVVE (SEQ ID NO: 84161):SXGXR (SEQ ID NO: 84305), HVPKPXX (SEQ ID NO: 84421):APTKL (SEQ ID NO: 84131):SPIN-AA17-LYF (SEQ ID NO: 84884):YGKIP (SEQ ID NO: 84397):NMVVR (SEQ ID NO: 84275):SXGXH (SEQ ID NO: 84304), RVPSTXX (SEQ ID NO: 84428):APVKT (SEQ ID NO: 84144):SPIN-AA17-LYF (SEQ ID NO: 84884):YGKIP (SEQ ID NO: 84397):MIVEE (SEQ ID NO: 84241):XGXL (SEQ ID NO: 84122), ASAAPXX (SEQ ID NO: 84402):VPQAL (SEQ ID NO: 84364):SPIN-AA17-LYF (SEQ ID NO: 84884):YGKIP (SEQ ID NO: 84397):MIVRS (SEQ ID NO: 84243):XKXS (SEQ ID NO: 84124), ASASPXX (SEQ ID NO: 84403):VSQDL (SEQ ID NO: 84387):SPIN-AA17-LYF (SEQ ID NO: 84884):YGKIP (SEQ ID NO: 84397):MIVKS (SEQ ID NO: 84242):XKXS (SEQ ID NO: 84124), ASASPXX (SEQ ID NO: 84403):VPQDL (SEQ ID NO: 84365):SPIN-AA17-LYF (SEQ ID NO: 84884):YGKIP (SEQ ID NO: 84397):MVVKS (SEQ ID NO: 84256):XKXS (SEQ ID NO: 84124), NDEGLEX (SEQ ID NO: 84426):VPTEE (SEQ ID NO: 84377):SPIN-AA17-LYF (SEQ ID NO: 84884):YGKIP (SEQ ID NO: 84397):FLQHN (SEQ ID NO: 84184):KXEXR (SEQ ID NO: 84213), NDEGLEX (SEQ ID NO: 84426):VPTGQ (SEQ ID NO: 84379):SPIN-AA17-LYF (SEQ ID NO: 84884):YGKIP (SEQ ID NO: 84397):LEEHS (SEQ ID NO: 84217):QXEXR (SEQ ID NO: 84276), SSVKXQP (SEQ ID NO: 84430):SRVHH (SEQ ID NO: 84297):SPIN-AA17-LYF (SEQ ID NO: 84884):YGKIP (SEQ ID NO: 84397):RLEEH (SEQ ID NO: 84279):LEXAXA (SEQ ID NO: 84400), RNVQXRP (SEQ ID NO: 84427):TQVQL (SEQ ID NO: 84340):SPIN-AA17-LYF (SEQ ID NO: 84884):YGKIP (SEQ ID NO: 84397):TLEDH (SEQ ID NO: 84307):LAXKXE (SEQ ID NO: 84399), KIPKAXX (SEQ ID NO: 84424):VPAEL (SEQ ID NO: 84345):SPIS-AA17-LYI (SEQ ID NO: 84886):YKQYE (SEQ ID NO: 84398):DMVVE (SEQ ID NO: 84161):GXGXR (SEQ ID NO: 84208), GIPEPXX (SEQ ID NO: 84419):VPAKM (SEQ ID NO: 84349):SPIS-AA17-LYI (SEQ ID NO: 84886):YKQYE (SEQ ID NO: 84398):NMVVE (SEQ ID NO: 84273):SXAXR (SEQ ID NO: 84303), SIPKAXX (SEQ ID NO: 84429):VPAEL (SEQ ID NO: 84345):SPIS-AA17-LYI (SEQ ID NO: 84886):YKQYE (SEQ ID NO: 84398):EMVVE (SEQ ID NO: 84175):GXGXR (SEQ ID NO: 84208), HVTKPTX (SEQ ID NO: 84422):VPAKL (SEQ ID NO: 84348):SPIS-AA17-LYI (SEQ ID NO: 84886):YKQYE (SEQ ID NO: 84398):NMVVE (SEQ ID NO: 84273):SXGXH (SEQ ID NO: 84304), YVPKPXX (SEQ ID NO: 84433):VPAKL (SEQ ID NO: 84348):SPIS-AA17-LYI (SEQ ID NO: 84886):YKQYE (SEQ ID NO: 84398):NMVVE (SEQ ID NO: 84273):SXGXH (SEQ ID NO: 84304), TVPKPXX (SEQ ID NO: 84432):VPAQL (SEQ ID NO: 84351):SPIS-AA17-LYI (SEQ ID NO: 84886):YKQYE (SEQ ID NO: 84398):NMVVE (SEQ ID NO: 84273):AXGXH (SEQ ID NO: 84147), AVPKAXX (SEQ ID NO: 84404):VPAKL (SEQ ID NO: 84348):SPIS-AA17-LYI (SEQ ID NO: 84886):YKQYE (SEQ ID NO: 84398):NMVVE (SEQ ID NO: 84273):AXGXH (SEQ ID NO: 84147), KVGKAXX (SEQ ID NO: 84425):VPAKL (SEQ ID NO: 84348):SPIS-AA17-LYI (SEQ ID NO: 84886):YKQYE (SEQ ID NO: 84398):EGMSVVE (SEQ ID NO: 84416):XGXR (SEQ ID NO: 84123), KASKAXX (SEQ ID NO: 84423):VPAKL (SEQ ID NO: 84348):SPIS-AA17-LYI (SEQ ID NO: 84886):YKQYE (SEQ ID NO: 84398):GMVVE (SEQ ID NO: 84205):EXGXR (SEQ ID NO: 84179), GSAGPXX (SEQ ID NO: 84420):VPAKM (SEQ ID NO: 84349):SPIS-AA17-LYI (SEQ ID NO: 84886):YKQYE (SEQ ID NO: 84398):GMVVE (SEQ ID NO: 84205):RXGXS (SEQ ID NO: 84291), STPPTXX (SEQ ID NO: 84431):VPARL (SEQ ID NO: 84352):SPIS-AA17-LYI (SEQ ID NO: 84886):YKQYE (SEQ ID NO: 84398):DMVVE (SEQ ID NO: 84161):SXGXR (SEQ ID NO: 84305), HVPKPXX (SEQ ID NO: 84421):VPAKL (SEQ ID NO: 84348):SPIS-AA17-LYI (SEQ ID NO: 84886):YKQYE (SEQ ID NO: 84398):NMVVE (SEQ ID NO: 84273):SXGXH (SEQ ID NO: 84304), RVPSTXX (SEQ ID NO: 84428):VPAKT (SEQ ID NO: 84350):SPIS-AA17-LYI (SEQ ID NO: 84886):YKQYE (SEQ ID NO: 84398):MIVVE (SEQ ID NO: 84245):XGXL (SEQ ID NO: 84122), ASAAPXX (SEQ ID NO: 84402):VPAAL (SEQ ID NO: 84342):SPIS-AA17-LYI (SEQ ID NO: 84886):YKQYE (SEQ ID NO: 84398):MIVVE (SEQ ID NO: 84245):XKXS (SEQ ID NO: 84124), ASASPXX (SEQ ID NO: 84403):VPADL (SEQ ID NO: 84343):SPIS-AA17-LYI (SEQ ID NO: 84886):YKQYE (SEQ ID NO: 84398):MIVVE (SEQ ID NO: 84245):XKXS (SEQ ID NO: 84124), ASASPXX (SEQ ID NO: 84403):VPADL (SEQ ID NO: 84343):SPIS-AA17-LYI (SEQ ID NO: 84886):YKQYE (SEQ ID NO: 84398):MVVVE (SEQ ID NO: 84259):XKXS (SEQ ID NO: 84124), KIPKAXX (SEQ ID NO: 84424):VPTEL (SEQ ID NO: 84378):SPIS-AA17-LYI (SEQ ID NO: 84886):YKQYE (SEQ ID NO: 84398):DMVVE (SEQ ID NO: 84161):GXGXR (SEQ ID NO: 84208), GIPEPXX (SEQ ID NO: 84419):VPEKM (SEQ ID NO: 84360):SPIS-AA17-LYI (SEQ ID NO: 84886):YKQYE (SEQ ID NO: 84398):NMTVE (SEQ ID NO: 84267):SXAXR (SEQ ID NO: 84303), SIPKAXX (SEQ ID NO: 84429):VPTEL (SEQ ID NO: 84378):SPIS-AA17-LYI (SEQ ID NO: 84886):YKQYE (SEQ ID NO: 84398):EMVVE (SEQ ID NO: 84175):GXGXR (SEQ ID NO: 84208), HVTKPTX (SEQ ID NO: 84422):APTKL (SEQ ID NO: 84131):SPIS-AA17-LYI (SEQ ID NO: 84886):YKQYE (SEQ ID NO: 84398):NMVVR (SEQ ID NO: 84275):SXGXH (SEQ ID NO: 84304), YVPKPXX (SEQ ID NO: 84433):APTKL (SEQ ID NO: 84131):SPIS-AA17-LYI (SEQ ID NO: 84886):YKQYE (SEQ ID NO: 84398):NMVVR (SEQ ID NO: 84275):SXGXH (SEQ ID NO: 84304), TVPKPXX (SEQ ID NO: 84432):APTQL (SEQ ID NO: 84134):SPIS-AA17-LYI (SEQ ID NO: 84886):YKQYE (SEQ ID NO: 84398):NMVVR (SEQ ID NO: 84275):AXGXH (SEQ ID NO: 84147), AVPKAXX (SEQ ID NO: 84404):APTKL (SEQ ID NO: 84131):SPIS-AA17-LYI (SEQ ID NO: 84886):YKQYE (SEQ ID NO: 84398):NMVVK (SEQ ID NO: 84274):AXGXH (SEQ ID NO: 84147), KVGKAXX (SEQ ID NO: 84425):VPTKL (SEQ ID NO: 84381):SPIS-AA17-LYI (SEQ ID NO: 84886):YKQYE (SEQ ID NO: 84398):EGMSVAE (SEQ ID NO: 84411):XGXR (SEQ ID NO: 84123), KASKAXX (SEQ ID NO: 84423):VPTKL (SEQ ID NO: 84381):SPIS-AA17-LYI (SEQ ID NO: 84886):YKQYE (SEQ ID NO: 84398):GMAVS (SEQ ID NO: 84194):EXGXR (SEQ ID NO: 84179), GSAGPXX (SEQ ID NO: 84420):TPTKM (SEQ ID NO: 84327):SPIS-AA17-LYI (SEQ ID NO: 84886):YKQYE (SEQ ID NO: 84398):GMVVD (SEQ ID NO: 84204):RXGXS (SEQ ID NO: 84291), STPPTXX (SEQ ID NO: 84431):VPTRL (SEQ ID NO: 84385):SPIS-AA17-LYI (SEQ ID NO: 84886):YKQYE (SEQ ID NO: 84398):DMVVE (SEQ ID NO: 84161):SXGXR (SEQ ID NO: 84305), HVPKPXX (SEQ ID NO: 84421):APTKL (SEQ ID NO: 84131):SPIS-AA17-LYI (SEQ ID NO: 84886):YKQYE (SEQ ID NO: 84398):NMVVR (SEQ ID NO: 84275):SXGXH (SEQ ID NO: 84304), RVPSTXX (SEQ ID NO: 84428):APVKT (SEQ ID NO: 84144):SPIS-AA17-LYI (SEQ ID NO: 84886):YKQYE (SEQ ID NO: 84398):MIVEE (SEQ ID NO: 84241):XGXL (SEQ ID NO: 84122), ASAAPXX (SEQ ID NO: 84402):VPQAL (SEQ ID NO: 84364):SPIS-AA17-LYI (SEQ ID NO: 84886):YKQYE (SEQ ID NO: 84398):MIVRS (SEQ ID NO: 84243):XKXS (SEQ ID NO: 84124), ASASPXX (SEQ ID NO: 84403):VSQDL (SEQ ID NO: 84387):SPIS-AA17-LYI (SEQ ID NO: 84886):YKQYE (SEQ ID NO: 84398):MIVKS (SEQ ID NO: 84242):XKXS (SEQ ID NO: 84124), ASASPXX (SEQ ID NO: 84403):VPQDL (SEQ ID NO: 84365):SPIS-AA17-LYI (SEQ ID NO: 84886):YKQYE (SEQ ID NO: 84398):MVVKS (SEQ ID NO: 84256):XKXS (SEQ ID NO: 84124), NDEGLEX (SEQ ID NO: 84426):VPTEE (SEQ ID NO: 84377):SPIS-AA17-LYI (SEQ ID NO: 84886):YKQYE (SEQ ID NO: 84398):FLQHN (SEQ ID NO: 84184):KXEXR (SEQ ID NO: 84213), NDEGLEX (SEQ ID NO: 84426):VPTGQ (SEQ ID NO: 84379):SPIS-AA17-LYI (SEQ ID NO: 84886):YKQYE (SEQ ID NO: 84398):LEEHS (SEQ ID NO: 84217):QXEXR (SEQ ID NO: 84276), SSVKXQP (SEQ ID NO: 84430):SRVHH (SEQ ID NO: 84297):SPIS-AA17-LYI (SEQ ID NO: 84886):YKQYE (SEQ ID NO: 84398):RLEEH (SEQ ID NO: 84279):LEXAXA (SEQ ID NO: 84400), RNVQXRP (SEQ ID NO: 84427):TQVQL (SEQ ID NO: 84340):SPIS-AA17-LYI (SEQ ID NO: 84886):YKQYE (SEQ ID NO: 84398):TLEDH (SEQ ID NO: 84307):LAXKXE (SEQ ID NO: 84399), KIPKAXX (SEQ ID NO: 84424):VPTEL (SEQ ID NO: 84378):SPIS-AA17-LFI (SEQ ID NO: 84885):YKQYE (SEQ ID NO: 84398):DMVVE (SEQ ID NO: 84161):GXGXR (SEQ ID NO: 84208), GIPEPXX (SEQ ID NO: 84419):VPTKM (SEQ ID NO: 84382):SPIS-AA17-LFI (SEQ ID NO: 84885):YKQYE (SEQ ID NO: 84398):NMVVE (SEQ ID NO: 84273):SXAXR (SEQ ID NO: 84303), SIPKAXX (SEQ ID NO: 84429):VPTEL (SEQ ID NO: 84378):SPIS-AA17-LFI (SEQ ID NO: 84885):YKQYE (SEQ ID NO: 84398):EMVVE (SEQ ID NO: 84175):GXGXR (SEQ ID NO: 84208), HVTKPTX (SEQ ID NO: 84422):VPTKL (SEQ ID NO: 84381):SPIS-AA17-LFI (SEQ ID NO: 84885):YKQYE (SEQ ID NO: 84398):NMVVE (SEQ ID NO: 84273):SXGXH (SEQ ID NO: 84304), YVPKPXX (SEQ ID NO: 84433):VPTKL (SEQ ID NO: 84381):SPIS-AA17-LFI (SEQ ID NO: 84885):YKQYE (SEQ ID NO: 84398):NMVVE (SEQ ID NO: 84273):SXGXH (SEQ ID NO: 84304), TVPKPXX (SEQ ID NO: 84432):VPTQL (SEQ ID NO: 84384):SPIS-AA17-LFI (SEQ ID NO: 84885):YKQYE (SEQ ID NO: 84398):NMVVE (SEQ ID NO: 84273):AXGXH (SEQ ID NO: 84147), AVPKAXX (SEQ ID NO: 84404):VPTKL (SEQ ID NO: 84381):SPIS-AA17-LFI (SEQ ID NO: 84885):YKQYE (SEQ ID NO: 84398):NMVVE (SEQ ID NO: 84273):AXGXH (SEQ ID NO: 84147), KVGKAXX (SEQ ID NO: 84425):VPTKL (SEQ ID NO: 84381):SPIS-AA17-LFI (SEQ ID NO: 84885):YKQYE (SEQ ID NO: 84398):EGMSVVE (SEQ ID NO: 84416):XGXR (SEQ ID NO: 84123), KASKAXX (SEQ ID NO: 84423):VPTKL (SEQ ID NO: 84381):SPIS-AA17-LFI (SEQ ID NO: 84885):YKQYE (SEQ ID NO: 84398):GMVVE (SEQ ID NO: 84205):EXGXR (SEQ ID NO: 84179), GSAGPXX (SEQ ID NO: 84420):VPTKM (SEQ ID NO: 84382):SPIS-AA17-LFI (SEQ ID NO: 84885):YKQYE (SEQ ID NO: 84398):GMVVE (SEQ ID NO: 84205):RXGXS (SEQ ID NO: 84291), AAPASXX (SEQ ID NO: 84401):VPTRL (SEQ ID NO: 84385):SPIS-AA17-LFI (SEQ ID NO: 84885):YKQYE (SEQ ID NO: 84398):DMVVE (SEQ ID NO: 84161):AXGXR (SEQ ID NO: 84148), HVPKPXX (SEQ ID NO: 84421):VPTKL (SEQ ID NO: 84381):SPIS-AA17-LFI (SEQ ID NO: 84885):YKQYE (SEQ ID NO: 84398):NMVVE (SEQ ID NO: 84273):SXGXH (SEQ ID NO: 84304), RVPSTXX (SEQ ID NO: 84428):VPTKT (SEQ ID NO: 84383):SPIS-AA17-LFI (SEQ ID NO: 84885):YKQYE (SEQ ID NO: 84398):MIVVE (SEQ ID NO: 84245):XGXL (SEQ ID NO: 84122), ASAAPXX (SEQ ID NO: 84402):VPTAL (SEQ ID NO: 84375):SPIS-AA17-LFI (SEQ ID NO: 84885):YKQYE (SEQ ID NO: 84398):MIVVE (SEQ ID NO: 84245):XKXS (SEQ ID NO: 84124), ASASPXX (SEQ ID NO: 84403):VPTDL (SEQ ID NO: 84376):SPIS-AA17-LFI (SEQ ID NO: 84885):YKQYE (SEQ ID NO: 84398):MIVVE (SEQ ID NO: 84245):XKXS (SEQ ID NO: 84124), ASASPXX (SEQ ID NO: 84403):VPTDL (SEQ ID NO: 84376):SPIS-AA17-LFI (SEQ ID NO: 84885):YKQYE (SEQ ID NO: 84398):MVVVE (SEQ ID NO: 84259):XKXS (SEQ ID NO: 84124), GIPEPXX (SEQ ID NO: 84419):VPEKM (SEQ ID NO: 84360):SPIS-AA17-LFI (SEQ ID NO: 84885):YKQYE (SEQ ID NO: 84398):NMTVE (SEQ ID NO: 84267):SXAXR (SEQ ID NO: 84303), HVTKPTX (SEQ ID NO: 84422):APTKL (SEQ ID NO: 84131):SPIS-AA17-LFI (SEQ ID NO: 84885):YKQYE (SEQ ID NO: 84398):NMVVR (SEQ ID NO: 84275):SXGXH (SEQ ID NO: 84304), YVPKPXX (SEQ ID NO: 84433):APTKL (SEQ ID NO: 84131):SPIS-AA17-LFI (SEQ ID NO: 84885):YKQYE (SEQ ID NO: 84398):NMVVR (SEQ ID NO: 84275):SXGXH (SEQ ID NO: 84304), TVPKPXX (SEQ ID NO: 84432):APTQL (SEQ ID NO: 84134):SPIS-AA17-LFI (SEQ ID NO: 84885):YKQYE (SEQ ID NO: 84398):NMVVR (SEQ ID NO: 84275):AXGXH (SEQ ID NO: 84147), AVPKAXX (SEQ ID NO: 84404):APTKL (SEQ ID NO: 84131):SPIS-AA17-LFI (SEQ ID NO: 84885):YKQYE (SEQ ID NO: 84398):NMVVK (SEQ ID NO: 84274):AXGXH (SEQ ID NO: 84147), KVGKAXX (SEQ ID NO: 84425):VPTKL (SEQ ID NO: 84381):SPIS-AA17-LFI (SEQ ID NO: 84885):YKQYE (SEQ ID NO: 84398):EGMSVAE (SEQ ID NO: 84411):XGXR (SEQ ID NO: 84123), KASKAXX (SEQ ID NO: 84423):VPTKL (SEQ ID NO: 84381):SPIS-AA17-LFI (SEQ ID NO: 84885):YKQYE (SEQ ID NO: 84398):GMAVS (SEQ ID NO: 84194):EXGXR (SEQ ID NO: 84179), GSAGPXX (SEQ ID NO: 84420):TPTKM (SEQ ID NO: 84327):SPIS-AA17-LFI (SEQ ID NO: 84885):YKQYE (SEQ ID NO: 84398):GMVVD (SEQ ID NO: 84204):RXGXS (SEQ ID NO: 84291), AAPASXX (SEQ ID NO: 84401):VPARL (SEQ ID NO: 84352):SPIS-AA17-LFI (SEQ ID NO: 84885):YKQYE (SEQ ID NO: 84398):DMVVE (SEQ ID NO: 84161):AXGXR (SEQ ID NO: 84148), HVPKPXX (SEQ ID NO: 84421):APTKL (SEQ ID NO: 84131):SPIS-AA17-LFI (SEQ ID NO: 84885):YKQYE (SEQ ID NO: 84398):NMVVR (SEQ ID NO: 84275):SXGXH (SEQ ID NO: 84304), RVPSTXX (SEQ ID NO: 84428):APVKT (SEQ ID NO: 84144):SPIS-AA17-LFI (SEQ ID NO: 84885):YKQYE (SEQ ID NO: 84398):MIVEE (SEQ ID NO: 84241):XGXL (SEQ ID NO: 84122), ASAAPXX (SEQ ID NO: 84402):VPQAL (SEQ ID NO: 84364):SPIS-AA17-LFI (SEQ ID NO: 84885):YKQYE (SEQ ID NO: 84398):MIVRS (SEQ ID NO: 84243):XKXS (SEQ ID NO: 84124), ASASPXX (SEQ ID NO: 84403):VSQDL (SEQ ID NO: 84387):SPIS-AA17-LFI (SEQ ID NO: 84885):YKQYE (SEQ ID NO: 84398):MIVKS (SEQ ID NO: 84242):XKXS (SEQ ID NO: 84124), ASASPXX (SEQ ID NO: 84403):VPQDL (SEQ ID NO: 84365):SPIS-AA17-LFI (SEQ ID NO: 84885):YKQYE (SEQ ID NO: 84398):MVVKS (SEQ ID NO: 84256):XKXS (SEQ ID NO: 84124), NDEGLEX (SEQ ID NO: 84426):VPTEE (SEQ ID NO: 84377):SPIS-AA17-LFI (SEQ ID NO: 84885):YKQYE (SEQ ID NO: 84398):FLQHN (SEQ ID NO: 84184):KXEXR (SEQ ID NO: 84213), NDEGLEX (SEQ ID NO: 84426):VPTGQ (SEQ ID NO: 84379):SPIS-AA17-LFI (SEQ ID NO: 84885):YKQYE (SEQ ID NO: 84398):LEEHS (SEQ ID NO: 84217):QXEXR (SEQ ID NO: 84276), SSVKXQP (SEQ ID NO: 84430):SRVHH (SEQ ID NO: 84297):SPIS-AA17-LFI (SEQ ID NO: 84885):YKQYE (SEQ ID NO: 84398):RLEEH (SEQ ID NO: 84279):LEXAXA (SEQ ID NO: 84400), RNVQXRP (SEQ ID NO: 84427):TQVQL (SEQ ID NO: 84340):SPIS-AA17-LFI (SEQ ID NO: 84885):YKQYE (SEQ ID NO: 84398):TLEDH (SEQ ID NO: 84307):LAXKXE (SEQ ID NO: 84399), KIPKAXX (SEQ ID NO: 84424):APVEL (SEQ ID NO: 84139):KPLS-AA17-LYV (SEQ ID NO: 84877):DHHKD (SEQ ID NO: 84149):DMVEE (SEQ ID NO: 84157):GXGXR (SEQ ID NO: 84208), GIPEPXX (SEQ ID NO: 84419):APVKM (SEQ ID NO: 84143):KPLS-AA17-LYV (SEQ ID NO: 84877):DHHKD (SEQ ID NO: 84149):NMVEE (SEQ ID NO: 84269):SXAXR (SEQ ID NO: 84303), SIPKAXX (SEQ ID NO: 84429):APVEL (SEQ ID NO: 84139):KPLS-AA17-LYV (SEQ ID NO: 84877):DHHKD (SEQ ID NO: 84149):EMVEE (SEQ ID NO: 84171):GXGXR (SEQ ID NO: 84208), HVTKPTX (SEQ ID NO: 84422):APVKL (SEQ ID NO: 84142):KPLS-AA17-LYV (SEQ ID NO: 84877):DHHKD (SEQ ID NO: 84149):NMVEE (SEQ ID NO: 84269):SXGXH (SEQ ID NO: 84304), YVPKPXX (SEQ ID NO: 84433):APVKL (SEQ ID NO: 84142):KPLS-AA17-LYV (SEQ ID NO: 84877):DHHKD (SEQ ID NO: 84149):NMVEE (SEQ ID NO: 84269):SXGXH (SEQ ID NO: 84304), TVPKPXX (SEQ ID NO: 84432):APVQL (SEQ ID NO: 84145):KPLS-AA17-LYV (SEQ ID NO: 84877):DHHKD (SEQ ID NO: 84149):NMVEE (SEQ ID NO: 84269):AXGXH (SEQ ID NO: 84147), AVPKAXX (SEQ ID NO: 84404):APVKL (SEQ ID NO: 84142):KPLS-AA17-LYV (SEQ ID NO: 84877):DHHKD (SEQ ID NO: 84149):NMVEE (SEQ ID NO: 84269):AXGXH (SEQ ID NO: 84147), KVGKAXX (SEQ ID NO: 84425):APVKL (SEQ ID NO: 84142):KPLS-AA17-LYV (SEQ ID NO: 84877):DHHKD (SEQ ID NO: 84149):EGMSVEE (SEQ ID NO: 84412):XGXR (SEQ ID NO: 84123), KASKAXX (SEQ ID NO: 84423):APVKL (SEQ ID NO: 84142):KPLS-AA17-LYV (SEQ ID NO: 84877):DHHKD (SEQ ID NO: 84149):GMVEE (SEQ ID NO: 84201):EXGXR (SEQ ID NO: 84179), GSAGPXX (SEQ ID NO: 84420):APVKM (SEQ ID NO: 84143):KPLS-AA17-LYV (SEQ ID NO: 84877):DHHKD (SEQ ID NO: 84149):GMVEE (SEQ ID NO: 84201):RXGXS (SEQ ID NO: 84291), AAPASXX (SEQ ID NO: 84401):APVRL (SEQ ID NO: 84146):KPLS-AA17-LYV (SEQ ID NO: 84877):DHHKD (SEQ ID NO: 84149):DMVEE (SEQ ID NO: 84157):AXGXR (SEQ ID NO: 84148), STPPTXX (SEQ ID NO: 84431):APVRL (SEQ ID NO: 84146):KPLS-AA17-LYV (SEQ ID NO: 84877):DHHKD (SEQ ID NO: 84149):DMVEE (SEQ ID NO: 84157):SXGXR (SEQ ID NO: 84305), HVPKPXX (SEQ ID NO: 84421):APVKL (SEQ ID NO: 84142):KPLS-AA17-LYV (SEQ ID NO: 84877):DHHKD (SEQ ID NO: 84149):NMVEE (SEQ ID NO: 84269):SXGXH (SEQ ID NO: 84304), ASAAPXX (SEQ ID NO: 84402):APVAL (SEQ ID NO: 84136):KPLS-AA17-LYV (SEQ ID NO: 84877):DHHKD (SEQ ID NO: 84149):MIVEE (SEQ ID NO: 84241):XKXS (SEQ ID NO: 84124), ASASPXX (SEQ ID NO: 84403):APVDL (SEQ ID NO: 84137):KPLS-AA17-LYV (SEQ ID NO: 84877):DHHKD (SEQ ID NO: 84149):MIVEE (SEQ ID NO: 84241):XKXS (SEQ ID NO: 84124), ASASPXX (SEQ ID NO: 84403):APVDL (SEQ ID NO: 84137):KPLS-AA17-LYV (SEQ ID NO: 84877):DHHKD (SEQ ID NO: 84149):MVVEE (SEQ ID NO: 84255):XKXS (SEQ ID NO: 84124), KIPKAXX (SEQ ID NO: 84424):VPTEL (SEQ ID NO: 84378):KPLS-AA17-LYV (SEQ ID NO: 84877):DHHKD (SEQ ID NO: 84149):DMVVE (SEQ ID NO: 84161):GXGXR (SEQ ID NO: 84208), GIPEPXX (SEQ ID NO: 84419):VPEKM (SEQ ID NO: 84360):KPLS-AA17-LYV (SEQ ID NO: 84877):DHHKD (SEQ ID NO: 84149):NMTVE (SEQ ID NO: 84267):SXAXR (SEQ ID NO: 84303), SIPKAXX (SEQ ID NO: 84429):VPTEL (SEQ ID NO: 84378):KPLS-AA17-LYV (SEQ ID NO: 84877):DHHKD (SEQ ID NO: 84149):EMVVE (SEQ ID NO: 84175):GXGXR (SEQ ID NO: 84208), HVTKPTX (SEQ ID NO: 84422):APTKL (SEQ ID NO: 84131):KPLS-AA17-LYV (SEQ ID NO: 84877):DHHKD (SEQ ID NO: 84149):NMVVR (SEQ ID NO: 84275):SXGXH (SEQ ID NO: 84304), YVPKPXX (SEQ ID NO: 84433):APTKL (SEQ ID NO: 84131):KPLS-AA17-LYV (SEQ ID NO: 84877):DHHKD (SEQ ID NO: 84149):NMVVR (SEQ ID NO: 84275):SXGXH (SEQ ID NO: 84304), TVPKPXX (SEQ ID NO: 84432):APTQL (SEQ ID NO: 84134):KPLS-AA17-LYV (SEQ ID NO: 84877):DHHKD (SEQ ID NO: 84149):NMVVR (SEQ ID NO: 84275):AXGXH (SEQ ID NO: 84147), AVPKAXX (SEQ ID NO: 84404):APTKL (SEQ ID NO: 84131):KPLS-AA17-LYV (SEQ ID NO: 84877):DHHKD (SEQ ID NO: 84149):NMVVK (SEQ ID NO: 84274):AXGXH (SEQ ID NO: 84147), KVGKAXX (SEQ ID NO: 84425):VPTKL (SEQ ID NO: 84381):KPLS-AA17-LYV (SEQ ID NO: 84877):DHHKD (SEQ ID NO: 84149):EGMSVAE (SEQ ID NO: 84411):XGXR (SEQ ID NO: 84123), KASKAXX (SEQ ID NO: 84423):VPTKL (SEQ ID NO: 84381):KPLS-AA17-LYV (SEQ ID NO: 84877):DHHKD (SEQ ID NO: 84149):GMAVS (SEQ ID NO: 84194):EXGXR (SEQ ID NO: 84179), GSAGPXX (SEQ ID NO: 84420):TPTKM (SEQ ID NO: 84327):KPLS-AA17-LYV (SEQ ID NO: 84877):DHHKD (SEQ ID NO: 84149):GMVVD (SEQ ID NO: 84204):RXGXS (SEQ ID NO: 84291), AAPASXX (SEQ ID NO: 84401):VPARL (SEQ ID NO: 84352):KPLS-AA17-LYV (SEQ ID NO: 84877):DHHKD (SEQ ID NO: 84149):DMVVE (SEQ ID NO: 84161):AXGXR (SEQ ID NO: 84148), STPPTXX (SEQ ID NO: 84431):VPTRL (SEQ ID NO: 84385):KPLS-AA17-LYV (SEQ ID NO: 84877):DHHKD (SEQ ID NO: 84149):DMVVE (SEQ ID NO: 84161):SXGXR (SEQ ID NO: 84305), HVPKPXX (SEQ ID NO: 84421):APTKL (SEQ ID NO: 84131):KPLS-AA17-LYV (SEQ ID NO: 84877):DHHKD (SEQ ID NO: 84149):NMVVR (SEQ ID NO: 84275):SXGXH (SEQ ID NO: 84304), ASAAPXX (SEQ ID NO: 84402):VPQAL (SEQ ID NO: 84364):KPLS-AA17-LYV (SEQ ID NO: 84877):DHHKD (SEQ ID NO: 84149):MIVRS (SEQ ID NO: 84243):XKXS (SEQ ID NO: 84124), ASASPXX (SEQ ID NO: 84403):VSQDL (SEQ ID NO: 84387):KPLS-AA17-LYV (SEQ ID NO: 84877):DHHKD (SEQ ID NO: 84149):MIVKS (SEQ ID NO: 84242):XKXS (SEQ ID NO: 84124), ASASPXX (SEQ ID NO: 84403):VPQDL (SEQ ID NO: 84365):KPLS-AA17-LYV (SEQ ID NO: 84877):DHHKD (SEQ ID NO: 84149):MVVKS (SEQ ID NO: 84256):XKXS (SEQ ID NO: 84124), NDEGLEX (SEQ ID NO: 84426):VPTEE (SEQ ID NO: 84377):KPLS-AA17-LYV (SEQ ID NO: 84877):DHHKD (SEQ ID NO: 84149):FLQHN (SEQ ID NO: 84184):KXEXR (SEQ ID NO: 84213), NDEGLEX (SEQ ID NO: 84426):VPTGQ (SEQ ID NO: 84379):KPLS-AA17-LYV (SEQ ID NO: 84877):DHHKD (SEQ ID NO: 84149):LEEHS (SEQ ID NO: 84217):QXEXR (SEQ ID NO: 84276), SSVKXQP (SEQ ID NO: 84430):SRVHH (SEQ ID NO: 84297):KPLS-AA17-LYV (SEQ ID NO: 84877):DHHKD (SEQ ID NO: 84149):RLEEH (SEQ ID NO: 84279):LEXAXA (SEQ ID NO: 84400), RNVQXRP (SEQ ID NO: 84427):TQVQL (SEQ ID NO: 84340):KPLS-AA17-LYV (SEQ ID NO: 84877):DHHKD (SEQ ID NO: 84149):TLEDH (SEQ ID NO: 84307):LAXKXE (SEQ ID NO: 84399), KIPKAXX (SEQ ID NO: 84424):VPQEL (SEQ ID NO: 84367):EPLP-AA17-VYY (SEQ ID NO: 84875):EQLSN (SEQ ID NO: 84178):DMVRS (SEQ ID NO: 84159):GXGXR (SEQ ID NO: 84208), GIPEPXX (SEQ ID NO: 84419):VPQKM (SEQ ID NO: 84371):EPLP-AA17-VYY (SEQ ID NO: 84875):EQLSN (SEQ ID NO: 84178):NMVRS (SEQ ID NO: 84271):SXAXR (SEQ ID NO: 84303), SIPKAXX (SEQ ID NO: 84429):VPQEL (SEQ ID NO: 84367):EPLP-AA17-VYY (SEQ ID NO: 84875):EQLSN (SEQ ID NO: 84178):EMVRS (SEQ ID NO: 84173):GXGXR (SEQ ID NO: 84208), HVTKPTX (SEQ ID NO: 84422):VPQKL (SEQ ID NO: 84370):EPLP-AA17-VYY (SEQ ID NO: 84875):EQLSN (SEQ ID NO: 84178):NMVRS (SEQ ID NO: 84271):SXGXH (SEQ ID NO: 84304), YVPKPXX (SEQ ID NO: 84433):VPQKL (SEQ ID NO: 84370):EPLP-AA17-VYY (SEQ ID NO: 84875):EQLSN (SEQ ID NO: 84178):NMVRS (SEQ ID NO: 84271):SXGXH (SEQ ID NO: 84304), TVPKPXX (SEQ ID NO: 84432):VPQQL (SEQ ID NO: 84373):EPLP-AA17-VYY (SEQ ID NO: 84875):EQLSN (SEQ ID NO: 84178):NMVRS (SEQ ID NO: 84271):AXGXH (SEQ ID NO: 84147), AVPKAXX (SEQ ID NO: 84404):VPQKL (SEQ ID NO: 84370):EPLP-AA17-VYY (SEQ ID NO: 84875):EQLSN (SEQ ID NO: 84178):NMVRS (SEQ ID NO: 84271):AXGXH (SEQ ID NO: 84147), KVGKAXX (SEQ ID NO: 84425):VPQKL (SEQ ID NO: 84370):EPLP-AA17-VYY (SEQ ID NO: 84875):EQLSN (SEQ ID NO: 84178):EGMSVRS (SEQ ID NO: 84414):XGXR (SEQ ID NO: 84123), KASKAXX (SEQ ID NO: 84423):VPQKL (SEQ ID NO: 84370):EPLP-AA17-VYY (SEQ ID NO: 84875):EQLSN (SEQ ID NO: 84178):GMVRS (SEQ ID NO: 84203):EXGXR (SEQ ID NO: 84179), GSAGPXX (SEQ ID NO: 84420):VPQKM (SEQ ID NO: 84371):EPLP-AA17-VYY (SEQ ID NO: 84875):EQLSN (SEQ ID NO: 84178):GMVRS (SEQ ID NO: 84203):RXGXS (SEQ ID NO: 84291), AAPASXX (SEQ ID NO: 84401):VPQRL (SEQ ID NO: 84374):EPLP-AA17-VYY (SEQ ID NO: 84875):EQLSN (SEQ ID NO: 84178):DMVRS (SEQ ID NO: 84159):AXGXR (SEQ ID NO: 84148), STPPTXX (SEQ ID NO: 84431):VPQRL (SEQ ID NO: 84374):EPLP-AA17-VYY (SEQ ID NO: 84875):EQLSN (SEQ ID NO: 84178):DMVRS (SEQ ID NO: 84159):SXGXR (SEQ ID NO: 84305), HVPKPXX (SEQ ID NO: 84421):VPQKL (SEQ ID NO: 84370):EPLP-AA17-VYY (SEQ ID NO: 84875):EQLSN (SEQ ID NO: 84178):NMVRS (SEQ ID NO: 84271):SXGXH (SEQ ID NO: 84304), RVPSTXX (SEQ ID NO: 84428):VPQKT (SEQ ID NO: 84372):EPLP-AA17-VYY (SEQ ID NO: 84875):EQLSN (SEQ ID NO: 84178):MIVRS (SEQ ID NO: 84243):XGXL (SEQ ID NO: 84122), ASASPXX (SEQ ID NO: 84403):VPQDL (SEQ ID NO: 84365):EPLP-AA17-VYY (SEQ ID NO: 84875):EQLSN (SEQ ID NO: 84178):MIVRS (SEQ ID NO: 84243):XKXS (SEQ ID NO: 84124), ASASPXX (SEQ ID NO: 84403):VPQDL (SEQ ID NO: 84365):EPLP-AA17-VYY (SEQ ID NO: 84875):EQLSN (SEQ ID NO: 84178):MVVRS (SEQ ID NO: 84257):XKXS (SEQ ID NO: 84124), KIPKAXX (SEQ ID NO: 84424):VPTEL (SEQ ID NO: 84378):EPLP-AA17-VYY (SEQ ID NO: 84875):EQLSN (SEQ ID NO: 84178):DMVVE (SEQ ID NO: 84161):GXGXR (SEQ ID NO: 84208), GIPEPXX (SEQ ID NO: 84419):VPEKM (SEQ ID NO: 84360):EPLP-AA17-VYY (SEQ ID NO: 84875):EQLSN (SEQ ID NO: 84178):NMTVE (SEQ ID NO: 84267):SXAXR (SEQ ID NO: 84303), SIPKAXX (SEQ ID NO: 84429):VPTEL (SEQ ID NO: 84378):EPLP-AA17-VYY (SEQ ID NO: 84875):EQLSN (SEQ ID NO: 84178):EMVVE (SEQ ID NO: 84175):GXGXR (SEQ ID NO: 84208), HVTKPTX (SEQ ID NO: 84422):APTKL (SEQ ID NO: 84131):EPLP-AA17-VYY (SEQ ID NO: 84875):EQLSN (SEQ ID NO: 84178):NMVVR (SEQ ID NO: 84275):SXGXH (SEQ ID NO: 84304), YVPKPXX (SEQ ID NO: 84433):APTKL (SEQ ID NO: 84131):EPLP-AA17-VYY (SEQ ID NO: 84875):EQLSN (SEQ ID NO: 84178):NMVVR (SEQ ID NO: 84275):SXGXH (SEQ ID NO: 84304), TVPKPXX (SEQ ID NO: 84432):APTQL (SEQ ID NO: 84134):EPLP-AA17-VYY (SEQ ID NO: 84875):EQLSN (SEQ ID NO: 84178):NMVVR (SEQ ID NO: 84275):AXGXH (SEQ ID NO: 84147), AVPKAXX (SEQ ID NO: 84404):APTKL (SEQ ID NO: 84131):EPLP-AA17-VYY (SEQ ID NO: 84875):EQLSN (SEQ ID NO: 84178):NMVVK (SEQ ID NO: 84274):AXGXH (SEQ ID NO: 84147), KVGKAXX (SEQ ID NO: 84425):VPTKL (SEQ ID NO: 84381):EPLP-AA17-VYY (SEQ ID NO: 84875):EQLSN (SEQ ID NO: 84178):EGMSVAE (SEQ ID NO: 84411):XGXR (SEQ ID NO: 84123), KASKAXX (SEQ ID NO: 84423):VPTKL (SEQ ID NO: 84381):EPLP-AA17-VYY (SEQ ID NO: 84875):EQLSN (SEQ ID NO: 84178):GMAVS (SEQ ID NO: 84194):EXGXR (SEQ ID NO: 84179), GSAGPXX (SEQ ID NO: 84420):TPTKM (SEQ ID NO: 84327):EPLP-AA17-VYY (SEQ ID NO: 84875):EQLSN (SEQ ID NO: 84178):GMVVD (SEQ ID NO: 84204):RXGXS (SEQ ID NO: 84291), AAPASXX (SEQ ID NO: 84401):VPARL (SEQ ID NO: 84352):EPLP-AA17-VYY (SEQ ID NO: 84875):EQLSN (SEQ ID NO: 84178):DMVVE (SEQ ID NO: 84161):AXGXR (SEQ ID NO: 84148), STPPTXX (SEQ ID NO: 84431):VPTRL (SEQ ID NO: 84385):EPLP-AA17-VYY (SEQ ID NO: 84875):EQLSN (SEQ ID NO: 84178):DMVVE (SEQ ID NO: 84161):SXGXR (SEQ ID NO: 84305), HVPKPXX (SEQ ID NO: 84421):APTKL (SEQ ID NO: 84131):EPLP-AA17-VYY (SEQ ID NO: 84875):EQLSN (SEQ ID NO: 84178):NMVVR (SEQ ID NO: 84275):SXGXH (SEQ ID NO: 84304), RVPSTXX (SEQ ID NO: 84428):APVKT (SEQ ID NO: 84144):EPLP-AA17-VYY (SEQ ID NO: 84875):EQLSN (SEQ ID NO: 84178):MIVEE (SEQ ID NO: 84241):XGXL (SEQ ID NO: 84122), ASASPXX (SEQ ID NO: 84403):VSQDL (SEQ ID NO: 84387):EPLP-AA17-VYY (SEQ ID NO: 84875):EQLSN (SEQ ID NO: 84178):MIVKS (SEQ ID NO: 84242):XKXS (SEQ ID NO: 84124), ASASPXX (SEQ ID NO: 84403):VPQDL (SEQ ID NO: 84365):EPLP-AA17-VYY (SEQ ID NO: 84875):EQLSN (SEQ ID NO: 84178):MVVKS (SEQ ID NO: 84256):XKXS (SEQ ID NO: 84124), NDEGLEX (SEQ ID NO: 84426):VPTEE (SEQ ID NO: 84377):EPLP-AA17-VYY (SEQ ID NO: 84875):EQLSN (SEQ ID NO: 84178):FLQHN (SEQ ID NO: 84184):KXEXR (SEQ ID NO: 84213), NDEGLEX (SEQ ID NO: 84426):VPTGQ (SEQ ID NO: 84379):EPLP-AA17-VYY (SEQ ID NO: 84875):EQLSN (SEQ ID NO: 84178):LEEHS (SEQ ID NO: 84217):QXEXR (SEQ ID NO: 84276), SSVKXQP (SEQ ID NO: 84430):SRVHH (SEQ ID NO: 84297):EPLP-AA17-VYY (SEQ ID NO: 84875):EQLSN (SEQ ID NO: 84178):RLEEH (SEQ ID NO: 84279):LEXAXA (SEQ ID NO: 84400), RNVQXRP (SEQ ID NO: 84427):TQVQL (SEQ ID NO: 84340):EPLP-AA17-VYY (SEQ ID NO: 84875):EQLSN (SEQ ID NO: 84178):TLEDH (SEQ ID NO: 84307):LAXKXE (SEQ ID NO: 84399), KIPKAXX (SEQ ID NO: 84424):VSQEL (SEQ ID NO: 84389):EPLT-AA17-LYY (SEQ ID NO: 84876):EQLSN (SEQ ID NO: 84178):DMVKS (SEQ ID NO: 84158):GXGXR (SEQ ID NO: 84208), GIPEPXX (SEQ ID NO: 84419):VSQKM (SEQ ID NO: 84393):EPLT-AA17-LYY (SEQ ID NO: 84876):EQLSN (SEQ ID NO: 84178):NMVKS (SEQ ID NO: 84270):SXAXR (SEQ ID NO: 84303), SIPKAXX (SEQ ID NO: 84429):VSQEL (SEQ ID NO: 84389):EPLT-AA17-LYY (SEQ ID NO: 84876):EQLSN (SEQ ID NO: 84178):EMVKS (SEQ ID NO: 84172):GXGXR (SEQ ID NO: 84208), HVTKPTX (SEQ ID NO: 84422):VSQKL (SEQ ID NO: 84392):EPLT-AA17-LYY (SEQ ID NO: 84876):EQLSN (SEQ ID NO: 84178):NMVKS (SEQ ID NO: 84270):SXGXH (SEQ ID NO: 84304), YVPKPXX (SEQ ID NO: 84433):VSQKL (SEQ ID NO: 84392):EPLT-AA17-LYY (SEQ ID NO: 84876):EQLSN (SEQ ID NO: 84178):NMVKS (SEQ ID NO: 84270):SXGXH (SEQ ID NO: 84304), TVPKPXX (SEQ ID NO: 84432):VSQQL (SEQ ID NO: 84395):EPLT-AA17-LYY (SEQ ID NO: 84876):EQLSN (SEQ ID NO: 84178):NMVKS (SEQ ID NO: 84270):AXGXH (SEQ ID NO: 84147), AVPKAXX (SEQ ID NO: 84404):VSQKL (SEQ ID NO: 84392):EPLT-AA17-LYY (SEQ ID NO: 84876):EQLSN (SEQ ID NO: 84178):NMVKS (SEQ ID NO: 84270):AXGXH (SEQ ID NO: 84147), KVGKAXX (SEQ ID NO: 84425):VSQKL (SEQ ID NO: 84392):EPLT-AA17-LYY (SEQ ID NO: 84876):EQLSN (SEQ ID NO: 84178):EGMSVKS (SEQ ID NO: 84413):XGXR (SEQ ID NO: 84123), KASKAXX (SEQ ID NO: 84423):VSQKL (SEQ ID NO: 84392):EPLT-AA17-LYY (SEQ ID NO: 84876):EQLSN (SEQ ID NO: 84178):GMVKS (SEQ ID NO: 84202):EXGXR (SEQ ID NO: 84179), GSAGPXX (SEQ ID NO: 84420):VSQKM (SEQ ID NO: 84393):EPLT-AA17-LYY (SEQ ID NO: 84876):EQLSN (SEQ ID NO: 84178):GMVKS (SEQ ID NO: 84202):RXGXS (SEQ ID NO: 84291), AAPASXX (SEQ ID NO: 84401):VSQRL (SEQ ID NO: 84396):EPLT-AA17-LYY (SEQ ID NO: 84876):EQLSN (SEQ ID NO: 84178):DMVKS (SEQ ID NO: 84158):AXGXR (SEQ ID NO: 84148), STPPTXX (SEQ ID NO: 84431):VSQRL (SEQ ID NO: 84396):EPLT-AA17-LYY (SEQ ID NO: 84876):EQLSN (SEQ ID NO: 84178):DMVKS (SEQ ID NO: 84158):SXGXR (SEQ ID NO: 84305), HVPKPXX (SEQ ID NO: 84421):VSQKL (SEQ ID NO: 84392):EPLT-AA17-LYY (SEQ ID NO: 84876):EQLSN (SEQ ID NO: 84178):NMVKS (SEQ ID NO: 84270):SXGXH (SEQ ID NO: 84304), RVPSTXX (SEQ ID NO: 84428):VSQKT (SEQ ID NO: 84394):EPLT-AA17-LYY (SEQ ID NO: 84876):EQLSN (SEQ ID NO: 84178):MIVKS (SEQ ID NO: 84242):XGXL (SEQ ID NO: 84122), ASAAPXX (SEQ ID NO: 84402):VSQAL (SEQ ID NO: 84386):EPLT-AA17-LYY (SEQ ID NO: 84876):EQLSN (SEQ ID NO: 84178):MIVKS (SEQ ID NO: 84242):XKXS (SEQ ID NO: 84124), ASASPXX (SEQ ID NO: 84403):VSQDL (SEQ ID NO: 84387):EPLT-AA17-LYY (SEQ ID NO: 84876):EQLSN (SEQ ID NO: 84178):MVVKS (SEQ ID NO: 84256):XKXS (SEQ ID NO: 84124), KIPKAXX (SEQ ID NO: 84424):VPTEL (SEQ ID NO: 84378):EPLT-AA17-LYY (SEQ ID NO: 84876):EQLSN (SEQ ID NO: 84178):DMVVE (SEQ ID NO: 84161):GXGXR (SEQ ID NO: 84208), GIPEPXX (SEQ ID NO: 84419):VPEKM (SEQ ID NO: 84360):EPLT-AA17-LYY (SEQ ID NO: 84876):EQLSN (SEQ ID NO: 84178):NMTVE (SEQ ID NO: 84267):SXAXR (SEQ ID NO: 84303), SIPKAXX (SEQ ID NO: 84429):VPTEL (SEQ ID NO: 84378):EPLT-AA17-LYY (SEQ ID NO: 84876):EQLSN (SEQ ID NO: 84178):EMVVE (SEQ ID NO: 84175):GXGXR (SEQ ID NO: 84208), HVTKPTX (SEQ ID NO: 84422):APTKL (SEQ ID NO: 84131):EPLT-AA17-LYY (SEQ ID NO: 84876):EQLSN (SEQ ID NO: 84178):NMVVR (SEQ ID NO: 84275):SXGXH (SEQ ID NO: 84304), YVPKPXX (SEQ ID NO: 84433):APTKL (SEQ ID NO: 84131):EPLT-AA17-LYY (SEQ ID NO: 84876):EQLSN (SEQ ID NO: 84178):NMVVR (SEQ ID NO: 84275):SXGXH (SEQ ID NO: 84304), TVPKPXX (SEQ ID NO: 84432):APTQL (SEQ ID NO: 84134):EPLT-AA17-LYY (SEQ ID NO: 84876):EQLSN (SEQ ID NO: 84178):NMVVR (SEQ ID NO: 84275):AXGXH (SEQ ID NO: 84147), AVPKAXX (SEQ ID NO: 84404):APTKL (SEQ ID NO: 84131):EPLT-AA17-LYY (SEQ ID NO: 84876):EQLSN (SEQ ID NO: 84178):NMVVK (SEQ ID NO: 84274):AXGXH (SEQ ID NO: 84147), KVGKAXX (SEQ ID NO: 84425):VPTKL (SEQ ID NO: 84381):EPLT-AA17-LYY (SEQ ID NO: 84876):EQLSN (SEQ ID NO: 84178):EGMSVAE (SEQ ID NO: 84411):XGXR (SEQ ID NO: 84123), KASKAXX (SEQ ID NO: 84423):VPTKL (SEQ ID NO: 84381):EPLT-AA17-LYY (SEQ ID NO: 84876):EQLSN (SEQ ID NO: 84178):GMAVS (SEQ ID NO: 84194):EXGXR (SEQ ID NO: 84179), GSAGPXX (SEQ ID NO: 84420):TPTKM (SEQ ID NO: 84327):EPLT-AA17-LYY (SEQ ID NO: 84876):EQLSN (SEQ ID NO: 84178):GMVVD (SEQ ID NO: 84204):RXGXS (SEQ ID NO: 84291), AAPASXX (SEQ ID NO: 84401):VPARL (SEQ ID NO: 84352):EPLT-AA17-LYY (SEQ ID NO: 84876):EQLSN (SEQ ID NO: 84178):DMVVE (SEQ ID NO: 84161):AXGXR (SEQ ID NO: 84148), STPPTXX (SEQ ID NO: 84431):VPTRL (SEQ ID NO: 84385):EPLT-AA17-LYY (SEQ ID NO: 84876):EQLSN (SEQ ID NO: 84178):DMVVE (SEQ ID NO: 84161):SXGXR (SEQ ID NO: 84305), HVPKPXX (SEQ ID NO: 84421):APTKL (SEQ ID NO: 84131):EPLT-AA17-LYY (SEQ ID NO: 84876):EQLSN (SEQ ID NO: 84178):NMVVR (SEQ ID NO: 84275):SXGXH (SEQ ID NO: 84304), RVPSTXX (SEQ ID NO: 84428):APVKT (SEQ ID NO: 84144):EPLT-AA17-LYY (SEQ ID NO: 84876):EQLSN (SEQ ID NO: 84178):MIVEE (SEQ ID NO: 84241):XGXL (SEQ ID NO: 84122), ASAAPXX (SEQ ID NO: 84402):VPQAL (SEQ ID NO: 84364):EPLT-AA17-LYY (SEQ ID NO: 84876):EQLSN (SEQ ID NO: 84178):MIVRS (SEQ ID NO: 84243):XKXS (SEQ ID NO: 84124), NDEGLEX (SEQ ID NO: 84426):VPTEE (SEQ ID NO: 84377):EPLT-AA17-LYY (SEQ ID NO: 84876):EQLSN (SEQ ID NO: 84178):FLQHN (SEQ ID NO: 84184):KXEXR (SEQ ID NO: 84213), NDEGLEX (SEQ ID NO: 84426):VPTGQ (SEQ ID NO: 84379):EPLT-AA17-LYY (SEQ ID NO: 84876):EQLSN (SEQ ID NO: 84178):LEEHS (SEQ ID NO: 84217):QXEXR (SEQ ID NO: 84276), SSVKXQP (SEQ ID NO: 84430):SRVHH (SEQ ID NO: 84297):EPLT-AA17-LYY (SEQ ID NO: 84876):EQLSN (SEQ ID NO: 84178):RLEEH (SEQ ID NO: 84279):LEXAXA (SEQ ID NO: 84400), RNVQXRP (SEQ ID NO: 84427):TQVQL (SEQ ID NO: 84340):EPLT-AA17-LYY (SEQ ID NO: 84876):EQLSN (SEQ ID NO: 84178):TLEDH (SEQ ID NO: 84307):LAXKXE (SEQ ID NO: 84399), KIPKAXX (SEQ ID NO: 84424):VPQEL (SEQ ID NO: 84367):EPLT-AA17-LYY (SEQ ID NO: 84876):EQLSN (SEQ ID NO: 84178):DMVKS (SEQ ID NO: 84158):GXGXR (SEQ ID NO: 84208), GIPEPXX (SEQ ID NO: 84419):VPQKM (SEQ ID NO: 84371):EPLT-AA17-LYY (SEQ ID NO: 84876):EQLSN (SEQ ID NO: 84178):NMVKS (SEQ ID NO: 84270):SXAXR (SEQ ID NO: 84303), SIPKAXX (SEQ ID NO: 84429):VPQEL (SEQ ID NO: 84367):EPLT-AA17-LYY (SEQ ID NO: 84876):EQLSN (SEQ ID NO: 84178):EMVKS (SEQ ID NO: 84172):GXGXR (SEQ ID NO: 84208), HVTKPTX (SEQ ID NO: 84422):VPQKL (SEQ ID NO: 84370):EPLT-AA17-LYY (SEQ ID NO: 84876):EQLSN (SEQ ID NO: 84178):NMVKS (SEQ ID NO: 84270):SXGXH (SEQ ID NO: 84304), YVPKPXX (SEQ ID NO: 84433):VPQKL (SEQ ID NO: 84370):EPLT-AA17-LYY (SEQ ID NO: 84876):EQLSN (SEQ ID NO: 84178):NMVKS (SEQ ID NO: 84270):SXGXH (SEQ ID NO: 84304), TVPKPXX (SEQ ID NO: 84432):VPQQL (SEQ ID NO: 84373):EPLT-AA17-LYY (SEQ ID NO: 84876):EQLSN (SEQ ID NO: 84178):NMVKS (SEQ ID NO: 84270):AXGXH (SEQ ID NO: 84147), AVPKAXX (SEQ ID NO: 84404):VPQKL (SEQ ID NO: 84370):EPLT-AA17-LYY (SEQ ID NO: 84876):EQLSN (SEQ ID NO: 84178):NMVKS (SEQ ID NO: 84270):AXGXH (SEQ ID NO: 84147), KVGKAXX (SEQ ID NO: 84425):VPQKL (SEQ ID NO: 84370):EPLT-AA17-LYY (SEQ ID NO: 84876):EQLSN (SEQ ID NO: 84178):EGMSVKS (SEQ ID NO: 84413):XGXR (SEQ ID NO: 84123), KASKAXX (SEQ ID NO: 84423):VPQKL (SEQ ID NO: 84370):EPLT-AA17-LYY (SEQ ID NO: 84876):EQLSN (SEQ ID NO: 84178):GMVKS (SEQ ID NO: 84202):EXGXR (SEQ ID NO: 84179), GSAGPXX (SEQ ID NO: 84420):VPQKM (SEQ ID NO: 84371):EPLT-AA17-LYY (SEQ ID NO: 84876):EQLSN (SEQ ID NO: 84178):GMVKS (SEQ ID NO: 84202):RXGXS (SEQ ID NO: 84291), AAPASXX (SEQ ID NO: 84401):VPQRL (SEQ ID NO: 84374):EPLT-AA17-LYY (SEQ ID NO: 84876):EQLSN (SEQ ID NO: 84178):DMVKS (SEQ ID NO: 84158):AXGXR (SEQ ID NO: 84148), STPPTXX (SEQ ID NO: 84431):VPQRL (SEQ ID NO: 84374):EPLT-AA17-LYY (SEQ ID NO: 84876):EQLSN (SEQ ID NO: 84178):DMVKS (SEQ ID NO: 84158):SXGXR (SEQ ID NO: 84305), HVPKPXX (SEQ ID NO: 84421):VPQKL (SEQ ID NO: 84370):EPLT-AA17-LYY (SEQ ID NO: 84876):EQLSN (SEQ ID NO: 84178):NMVKS (SEQ ID NO: 84270):SXGXH (SEQ ID NO: 84304), RVPSTXX (SEQ ID NO: 84428):VPQKT (SEQ ID NO: 84372):EPLT-AA17-LYY (SEQ ID NO: 84876):EQLSN (SEQ ID NO: 84178):MIVKS (SEQ ID NO: 84242):XGXL (SEQ ID NO: 84122), ASAAPXX (SEQ ID NO: 84402):VPQAL (SEQ ID NO: 84364):EPLT-AA17-LYY (SEQ ID NO: 84876):EQLSN (SEQ ID NO: 84178):MIVKS (SEQ ID NO: 84242):XKXS (SEQ ID NO: 84124), ASASPXX (SEQ ID NO: 84403):VPQDL (SEQ ID NO: 84365):EPLT-AA17-LYY (SEQ ID NO: 84876):EQLSN (SEQ ID NO: 84178):MIVKS (SEQ ID NO: 84242):XKXS (SEQ ID NO: 84124), NDEGLEX (SEQ ID NO: 84426):VPTGQ (SEQ ID NO: 84379):SNIT-AA17-QIM (SEQ ID NO: 84883):IGEMS (SEQ ID NO: 84209):LEQHN (SEQ ID NO: 84218):QXEXR (SEQ ID NO: 84276), KIPKAXX (SEQ ID NO: 84424):VPTEL (SEQ ID NO: 84378):SNIT-AA17-QIM (SEQ ID NO: 84883):IGEMS (SEQ ID NO: 84209):DMVVE (SEQ ID NO: 84161):GXGXR (SEQ ID NO: 84208), GIPEPXX (SEQ ID NO: 84419):VPEKM (SEQ ID NO: 84360):SNIT-AA17-QIM (SEQ ID NO: 84883):IGEMS (SEQ ID NO: 84209):NMTVE (SEQ ID NO: 84267):SXAXR (SEQ ID NO: 84303), SIPKAXX (SEQ ID NO: 84429):VPTEL (SEQ ID NO: 84378):SNIT-AA17-QIM (SEQ ID NO: 84883):IGEMS (SEQ ID NO: 84209):EMVVE (SEQ ID NO: 84175):GXGXR (SEQ ID NO: 84208), HVTKPTX (SEQ ID NO: 84422):APTKL (SEQ ID NO: 84131):SNIT-AA17-QIM (SEQ ID NO: 84883):IGEMS (SEQ ID NO: 84209):NMVVR (SEQ ID NO: 84275):SXGXH (SEQ ID NO: 84304), YVPKPXX (SEQ ID NO: 84433):APTKL (SEQ ID NO: 84131):SNIT-AA17-QIM (SEQ ID NO: 84883):IGEMS (SEQ ID NO: 84209):NMVVR (SEQ ID NO: 84275):SXGXH (SEQ ID NO: 84304), TVPKPXX (SEQ ID NO: 84432):APTQL (SEQ ID NO: 84134):SNIT-AA17-QIM (SEQ ID NO: 84883):IGEMS (SEQ ID NO: 84209):NMVVR (SEQ ID NO: 84275):AXGXH (SEQ ID NO: 84147), AVPKAXX (SEQ ID NO: 84404):APTKL (SEQ ID NO: 84131):SNIT-AA17-QIM (SEQ ID NO: 84883):IGEMS (SEQ ID NO: 84209):NMVVK (SEQ ID NO: 84274):AXGXH (SEQ ID NO: 84147), KVGKAXX (SEQ ID NO: 84425):VPTKL (SEQ ID NO: 84381):SNIT-AA17-QIM (SEQ ID NO: 84883):IGEMS (SEQ ID NO: 84209):EGMSVAE (SEQ ID NO: 84411):XGXR (SEQ ID NO: 84123), KASKAXX (SEQ ID NO: 84423):VPTKL (SEQ ID NO: 84381):SNIT-AA17-QIM (SEQ ID NO: 84883):IGEMS (SEQ ID NO: 84209):GMAVS (SEQ ID NO: 84194):EXGXR (SEQ ID NO: 84179), GSAGPXX (SEQ ID NO: 84420):TPTKM (SEQ ID NO: 84327):SNIT-AA17-QIM (SEQ ID NO: 84883):IGEMS (SEQ ID NO: 84209):GMVVD (SEQ ID NO: 84204):RXGXS (SEQ ID NO: 84291), AAPASXX (SEQ ID NO: 84401):VPARL (SEQ ID NO: 84352):SNIT-AA17-QIM (SEQ ID NO: 84883):IGEMS (SEQ ID NO: 84209):DMVVE (SEQ ID NO: 84161):AXGXR (SEQ ID NO: 84148), STPPTXX (SEQ ID NO: 84431):VPTRL (SEQ ID NO: 84385):SNIT-AA17-QIM (SEQ ID NO: 84883):IGEMS (SEQ ID NO: 84209):DMVVE (SEQ ID NO: 84161):SXGXR (SEQ ID NO: 84305), HVPKPXX (SEQ ID NO: 84421):APTKL (SEQ ID NO: 84131):SNIT-AA17-QIM (SEQ ID NO: 84883):IGEMS (SEQ ID NO: 84209):NMVVR (SEQ ID NO: 84275):SXGXH (SEQ ID NO: 84304), RVPSTXX (SEQ ID NO: 84428):APVKT (SEQ ID NO: 84144):SNIT-AA17-QIM (SEQ ID NO: 84883):IGEMS (SEQ ID NO: 84209):MIVEE (SEQ ID NO: 84241):XGXL (SEQ ID NO: 84122), ASAAPXX (SEQ ID NO: 84402):VPQAL (SEQ ID NO: 84364):SNIT-AA17-QIM (SEQ ID NO: 84883):IGEMS (SEQ ID NO: 84209):MIVRS (SEQ ID NO: 84243):XKXS (SEQ ID NO: 84124), ASASPXX (SEQ ID NO: 84403):VSQDL (SEQ ID NO: 84387):SNIT-AA17-QIM (SEQ ID NO: 84883):IGEMS (SEQ ID NO: 84209):MIVKS (SEQ ID NO: 84242):XKXS (SEQ ID NO: 84124), ASASPXX (SEQ ID NO: 84403):VPQDL (SEQ ID NO: 84365):SNIT-AA17-QIM (SEQ ID NO: 84883):IGEMS (SEQ ID NO: 84209):MVVKS (SEQ ID NO: 84256):XKXS (SEQ ID NO: 84124), NDEGLEX (SEQ ID NO: 84426):VPTGQ (SEQ ID NO: 84379):SNIT-AA17-QIM (SEQ ID NO: 84883):IGEMS (SEQ ID NO: 84209):LEEHS (SEQ ID NO: 84217):QXEXR (SEQ ID NO: 84276), SSVKXQP (SEQ ID NO: 84430):SRVHH (SEQ ID NO: 84297):SNIT-AA17-QIM (SEQ ID NO: 84883):IGEMS (SEQ ID NO: 84209):RLEEH (SEQ ID NO: 84279):LEXAXA (SEQ ID NO: 84400), RNVQXRP (SEQ ID NO: 84427):TQVQL (SEQ ID NO: 84340):SNIT-AA17-QIM (SEQ ID NO: 84883):IGEMS (SEQ ID NO: 84209):TLEDH (SEQ ID NO: 84307):LAXKXE (SEQ ID NO: 84399), NDEGLEX (SEQ ID NO: 84426):VPTEE (SEQ ID NO: 84377):SNIT-AA17-QIM (SEQ ID NO: 84883):LGEMS (SEQ ID NO: 84228):FLEHS (SEQ ID NO: 84183):KXEXR (SEQ ID NO: 84213), KIPKAXX (SEQ ID NO: 84424):VPTEL (SEQ ID NO: 84378):SNIT-AA17-QIM (SEQ ID NO: 84883):LGEMS (SEQ ID NO: 84228):DMVVE (SEQ ID NO: 84161):GXGXR (SEQ ID NO: 84208), GIPEPXX (SEQ ID NO: 84419):VPEKM (SEQ ID NO: 84360):SNIT-AA17-QIM (SEQ ID NO: 84883):LGEMS (SEQ ID NO: 84228):NMTVE (SEQ ID NO: 84267):SXAXR (SEQ ID NO: 84303), SIPKAXX (SEQ ID NO: 84429):VPTEL (SEQ ID NO: 84378):SNIT-AA17-QIM (SEQ ID NO: 84883):LGEMS (SEQ ID NO: 84228):EMVVE (SEQ ID NO: 84175):GXGXR (SEQ ID NO: 84208), HVTKPTX (SEQ ID NO: 84422):APTKL (SEQ ID NO: 84131):SNIT-AA17-QIM (SEQ ID NO: 84883):LGEMS (SEQ ID NO: 84228):NMVVR (SEQ ID NO: 84275):SXGXH (SEQ ID NO: 84304), YVPKPXX (SEQ ID NO: 84433):APTKL (SEQ ID NO: 84131):SNIT-AA17-QIM (SEQ ID NO: 84883):LGEMS (SEQ ID NO: 84228):NMVVR (SEQ ID NO: 84275):SXGXH (SEQ ID NO: 84304), TVPKPXX (SEQ ID NO: 84432):APTQL (SEQ ID NO: 84134):SNIT-AA17-QIM (SEQ ID NO: 84883):LGEMS (SEQ ID NO: 84228):NMVVR (SEQ ID NO: 84275):AXGXH (SEQ ID NO: 84147), AVPKAXX (SEQ ID NO: 84404):APTKL (SEQ ID NO: 84131):SNIT-AA17-QIM (SEQ ID NO: 84883):LGEMS (SEQ ID NO: 84228):NMVVK (SEQ ID NO: 84274):AXGXH (SEQ ID NO: 84147), KVGKAXX (SEQ ID NO: 84425):VPTKL (SEQ ID NO: 84381):SNIT-AA17-QIM (SEQ ID NO: 84883):LGEMS (SEQ ID NO: 84228):EGMSVAE (SEQ ID NO: 84411):XGXR (SEQ ID NO: 84123), KASKAXX (SEQ ID NO: 84423):VPTKL (SEQ ID NO: 84381):SNIT-AA17-QIM (SEQ ID NO: 84883):LGEMS (SEQ ID NO: 84228):GMAVS (SEQ ID NO: 84194):EXGXR (SEQ ID NO: 84179), GSAGPXX (SEQ ID NO: 84420):TPTKM (SEQ ID NO: 84327):SNIT-AA17-QIM (SEQ ID NO: 84883):LGEMS (SEQ ID NO: 84228):GMVVD (SEQ ID NO: 84204):RXGXS (SEQ ID NO: 84291), AAPASXX (SEQ ID NO: 84401):VPARL (SEQ ID NO: 84352):SNIT-AA17-QIM (SEQ ID NO: 84883):LGEMS (SEQ ID NO: 84228):DMVVE (SEQ ID NO: 84161):AXGXR (SEQ ID NO: 84148), STPPTXX (SEQ ID NO: 84431):VPTRL (SEQ ID NO: 84385):SNIT-AA17-QIM (SEQ ID NO: 84883):LGEMS (SEQ ID NO: 84228):DMVVE (SEQ ID NO: 84161):SXGXR (SEQ ID NO: 84305), HVPKPXX (SEQ ID NO: 84421):APTKL (SEQ ID NO: 84131):SNIT-AA17-QIM (SEQ ID NO: 84883):LGEMS (SEQ ID NO: 84228):NMVVR (SEQ ID NO: 84275):SXGXH (SEQ ID NO: 84304), RVPSTXX (SEQ ID NO: 84428):APVKT (SEQ ID NO: 84144):SNIT-AA17-QIM (SEQ ID NO: 84883):LGEMS (SEQ ID NO: 84228):MIVEE (SEQ ID NO: 84241):XGXL (SEQ ID NO: 84122), ASAAPXX (SEQ ID NO: 84402):VPQAL (SEQ ID NO: 84364):SNIT-AA17-QIM (SEQ ID NO: 84883):LGEMS (SEQ ID NO: 84228):MIVRS (SEQ ID NO: 84243):XKXS (SEQ ID NO: 84124), ASASPXX (SEQ ID NO: 84403):VSQDL (SEQ ID NO: 84387):SNIT-AA17-QIM (SEQ ID NO: 84883):LGEMS (SEQ ID NO: 84228):MIVKS (SEQ ID NO: 84242):XKXS (SEQ ID NO: 84124), ASASPXX (SEQ ID NO: 84403):VPQDL (SEQ ID NO: 84365):SNIT-AA17-QIM (SEQ ID NO: 84883):LGEMS (SEQ ID NO: 84228):MVVKS (SEQ ID NO: 84256):XKXS (SEQ ID NO: 84124), NDEGLEX (SEQ ID NO: 84426):VPTEE (SEQ ID NO: 84377):SNIT-AA17-QIM (SEQ ID NO: 84883):LGEMS (SEQ ID NO: 84228):FLQHN (SEQ ID NO: 84184):KXEXR (SEQ ID NO: 84213), SSVKXQP (SEQ ID NO: 84430):SRVHH (SEQ ID NO: 84297):SNIT-AA17-QIM (SEQ ID NO: 84883):LGEMS (SEQ ID NO: 84228):RLEEH (SEQ ID NO: 84279):LEXAXA (SEQ ID NO: 84400), RNVQXRP (SEQ ID NO: 84427):TQVQL (SEQ ID NO: 84340):SNIT-AA17-QIM (SEQ ID NO: 84883):LGEMS (SEQ ID NO: 84228):TLEDH (SEQ ID NO: 84307):LAXKXE (SEQ ID NO: 84399), RNVQXRP (SEQ ID NO: 84427):SRVQL (SEQ ID NO: 84301):RSVK-AA17-AKV (SEQ ID NO: 84880):KEVQV (SEQ ID NO: 84210):TLEEH (SEQ ID NO: 84308):LAXKXE (SEQ ID NO: 84399), KIPKAXX (SEQ ID NO: 84424):VPTEL (SEQ ID NO: 84378):RSVK-AA17-AKV (SEQ ID NO: 84880):KEVQV (SEQ ID NO: 84210):DMVVE (SEQ ID NO: 84161):GXGXR (SEQ ID NO: 84208), GIPEPXX (SEQ ID NO: 84419):VPEKM (SEQ ID NO: 84360):RSVK-AA17-AKV (SEQ ID NO: 84880):KEVQV (SEQ ID NO: 84210):NMTVE (SEQ ID NO: 84267):SXAXR (SEQ ID NO: 84303), SIPKAXX (SEQ ID NO: 84429):VPTEL (SEQ ID NO: 84378):RSVK-AA17-AKV (SEQ ID NO: 84880):KEVQV (SEQ ID NO: 84210):EMVVE (SEQ ID NO: 84175):GXGXR (SEQ ID NO: 84208), HVTKPTX (SEQ ID NO: 84422):APTKL (SEQ ID NO: 84131):RSVK-AA17-AKV (SEQ ID NO: 84880):KEVQV (SEQ ID NO: 84210):NMVVR (SEQ ID NO: 84275):SXGXH (SEQ ID NO: 84304), YVPKPXX (SEQ ID NO: 84433):APTKL (SEQ ID NO: 84131):RSVK-AA17-AKV (SEQ ID NO: 84880):KEVQV (SEQ ID NO: 84210):NMVVR (SEQ ID NO: 84275):SXGXH (SEQ ID NO: 84304), TVPKPXX (SEQ ID NO: 84432):APTQL (SEQ ID NO: 84134):RSVK-AA17-AKV (SEQ ID NO: 84880):KEVQV (SEQ ID NO: 84210):NMVVR (SEQ ID NO: 84275):AXGXH (SEQ ID NO: 84147), AVPKAXX (SEQ ID NO: 84404):APTKL (SEQ ID NO: 84131):RSVK-AA17-AKV (SEQ ID NO: 84880):KEVQV (SEQ ID NO: 84210):NMVVK (SEQ ID NO: 84274):AXGXH (SEQ ID NO: 84147), KVGKAXX (SEQ ID NO: 84425):VPTKL (SEQ ID NO: 84381):RSVK-AA17-AKV (SEQ ID NO: 84880):KEVQV (SEQ ID NO: 84210):EGMSVAE (SEQ ID NO: 84411):XGXR (SEQ ID NO: 84123), KASKAXX (SEQ ID NO: 84423):VPTKL (SEQ ID NO: 84381):RSVK-AA17-AKV (SEQ ID NO: 84880):KEVQV (SEQ ID NO: 84210):GMAVS (SEQ ID NO: 84194):EXGXR (SEQ ID NO: 84179), GSAGPXX (SEQ ID NO: 84420):TPTKM (SEQ ID NO: 84327):RSVK-AA17-AKV (SEQ ID NO: 84880):KEVQV (SEQ ID NO: 84210):GMVVD (SEQ ID NO: 84204):RXGXS (SEQ ID NO: 84291), AAPASXX (SEQ ID NO: 84401):VPARL (SEQ ID NO: 84352):RSVK-AA17-AKV (SEQ ID NO: 84880):KEVQV (SEQ ID NO: 84210):DMVVE (SEQ ID NO: 84161):AXGXR (SEQ ID NO: 84148), STPPTXX (SEQ ID NO: 84431):VPTRL (SEQ ID NO: 84385):RSVK-AA17-AKV (SEQ ID NO: 84880):KEVQV (SEQ ID NO: 84210):DMVVE (SEQ ID NO: 84161):SXGXR (SEQ ID NO: 84305), HVPKPXX (SEQ ID NO: 84421):APTKL (SEQ ID NO: 84131):RSVK-AA17-AKV (SEQ ID NO: 84880):KEVQV (SEQ ID NO: 84210):NMVVR (SEQ ID NO: 84275):SXGXH (SEQ ID NO: 84304), RVPSTXX (SEQ ID NO: 84428):APVKT (SEQ ID NO: 84144):RSVK-AA17-AKV (SEQ ID NO: 84880):KEVQV (SEQ ID NO: 84210):MIVEE (SEQ ID NO: 84241):XGXL (SEQ ID NO: 84122), ASAAPXX (SEQ ID NO: 84402):VPQAL (SEQ ID NO: 84364):RSVK-AA17-AKV (SEQ ID NO: 84880):KEVQV (SEQ ID NO: 84210):MIVRS (SEQ ID NO: 84243):XKXS (SEQ ID NO: 84124), ASASPXX (SEQ ID NO: 84403):VSQDL (SEQ ID NO: 84387):RSVK-AA17-AKV (SEQ ID NO: 84880):KEVQV (SEQ ID NO: 84210):MIVKS (SEQ ID NO: 84242):XKXS (SEQ ID NO: 84124), ASASPXX (SEQ ID NO: 84403):VPQDL (SEQ ID NO: 84365):RSVK-AA17-AKV (SEQ ID NO: 84880):KEVQV (SEQ ID NO: 84210):MVVKS (SEQ ID NO: 84256):XKXS (SEQ ID NO: 84124), NDEGLEX (SEQ ID NO: 84426):VPTEE (SEQ ID NO: 84377):RSVK-AA17-AKV (SEQ ID NO: 84880):KEVQV (SEQ ID NO: 84210):FLQHN (SEQ ID NO: 84184):KXEXR (SEQ ID NO: 84213), NDEGLEX (SEQ ID NO: 84426):VPTGQ (SEQ ID NO: 84379):RSVK-AA17-AKV (SEQ ID NO: 84880):KEVQV (SEQ ID NO: 84210):LEEHS (SEQ ID NO: 84217):QXEXR (SEQ ID NO: 84276), RNVQXRP (SEQ ID NO: 84427):TQVQL (SEQ ID NO: 84340):RSVK-AA17-AKV (SEQ ID NO: 84880):KEVQV (SEQ ID NO: 84210):TLEDH (SEQ ID NO: 84307):LAXKXE (SEQ ID NO: 84399), SSVKXQP (SEQ ID NO: 84430):TQVHH (SEQ ID NO: 84336):RPVQ-AA17-RKI (SEQ ID NO: 84879):KKATV (SEQ ID NO: 84212):RLEDH (SEQ ID NO: 84278):LEXAXA (SEQ ID NO: 84400), KIPKAXX (SEQ ID NO: 84424):VPTEL (SEQ ID NO: 84378):RPVQ-AA17-RKI (SEQ ID NO: 84879):KKATV (SEQ ID NO: 84212):DMVVE (SEQ ID NO: 84161):GXGXR (SEQ ID NO: 84208), GIPEPXX (SEQ ID NO: 84419):VPEKM (SEQ ID NO: 84360):RPVQ-AA17-RKI (SEQ ID NO: 84879):KKATV (SEQ ID NO: 84212):NMTVE (SEQ ID NO: 84267):SXAXR (SEQ ID NO: 84303), SIPKAXX (SEQ ID NO: 84429):VPTEL (SEQ ID NO: 84378):RPVQ-AA17-RKI (SEQ ID NO: 84879):KKATV (SEQ ID NO: 84212):EMVVE (SEQ ID NO: 84175):GXGXR (SEQ ID NO: 84208), HVTKPTX (SEQ ID NO: 84422):APTKL (SEQ ID NO: 84131):RPVQ-AA17-RKI (SEQ ID NO: 84879):KKATV (SEQ ID NO: 84212):NMVVR (SEQ ID NO: 84275):SXGXH (SEQ ID NO: 84304), YVPKPXX (SEQ ID NO: 84433):APTKL (SEQ ID NO: 84131):RPVQ-AA17-RKI (SEQ ID NO: 84879):KKATV (SEQ ID NO: 84212):NMVVR (SEQ ID NO: 84275):SXGXH (SEQ ID NO: 84304), TVPKPXX (SEQ ID NO: 84432):APTQL (SEQ ID NO: 84134):RPVQ-AA17-RKI (SEQ ID NO: 84879):KKATV (SEQ ID NO: 84212):NMVVR (SEQ ID NO: 84275):AXGXH (SEQ ID NO: 84147), AVPKAXX (SEQ ID NO: 84404):APTKL (SEQ ID NO: 84131):RPVQ-AA17-RKI (SEQ ID NO: 84879):KKATV (SEQ ID NO: 84212):NMVVK (SEQ ID NO: 84274):AXGXH (SEQ ID NO: 84147), KVGKAXX (SEQ ID NO: 84425):VPTKL (SEQ ID NO: 84381):RPVQ-AA17-RKI (SEQ ID NO: 84879):KKATV (SEQ ID NO: 84212):EGMSVAE (SEQ ID NO: 84411):XGXR (SEQ ID NO: 84123), KASKAXX (SEQ ID NO: 84423):VPTKL (SEQ ID NO: 84381):RPVQ-AA17-RKI (SEQ ID NO: 84879):KKATV (SEQ ID NO: 84212):GMAVS (SEQ ID NO: 84194):EXGXR (SEQ ID NO: 84179), GSAGPXX (SEQ ID NO: 84420):TPTKM (SEQ ID NO: 84327):RPVQ-AA17-RKI (SEQ ID NO: 84879):KKATV (SEQ ID NO: 84212):GMVVD (SEQ ID NO: 84204):RXGXS (SEQ ID NO: 84291), AAPASXX (SEQ ID NO: 84401):VPARL (SEQ ID NO: 84352):RPVQ-AA17-RKI (SEQ ID NO: 84879):KKATV (SEQ ID NO: 84212):DMVVE (SEQ ID NO: 84161):AXGXR (SEQ ID NO: 84148), STPPTXX (SEQ ID NO: 84431):VPTRL (SEQ ID NO: 84385):RPVQ-AA17-RKI (SEQ ID NO: 84879):KKATV (SEQ ID NO: 84212):DMVVE (SEQ ID NO: 84161):SXGXR (SEQ ID NO: 84305), HVPKPXX (SEQ ID NO: 84421):APTKL (SEQ ID NO: 84131):RPVQ-AA17-RKI (SEQ ID NO: 84879):KKATV (SEQ ID NO: 84212):NMVVR (SEQ ID NO: 84275):SXGXH (SEQ ID NO: 84304), RVPSTXX (SEQ ID NO: 84428):APVKT (SEQ ID NO: 84144):RPVQ-AA17-RKI (SEQ ID NO: 84879):KKATV (SEQ ID NO: 84212):MIVEE (SEQ ID NO: 84241):XGXL (SEQ ID NO: 84122), ASAAPXX (SEQ ID NO: 84402):VPQAL (SEQ ID NO: 84364):RPVQ-AA17-RKI (SEQ ID NO: 84879):KKATV (SEQ ID NO: 84212):MIVRS (SEQ ID NO: 84243):XKXS (SEQ ID NO: 84124), ASASPXX (SEQ ID NO: 84403):VSQDL (SEQ ID NO: 84387):RPVQ-AA17-RKI (SEQ ID NO: 84879):KKATV (SEQ ID NO: 84212):MIVKS (SEQ ID NO: 84242):XKXS (SEQ ID NO: 84124), ASASPXX (SEQ ID NO: 84403):VPQDL (SEQ ID NO: 84365):RPVQ-AA17-RKI (SEQ ID NO: 84879):KKATV (SEQ ID NO: 84212):MVVKS (SEQ ID NO: 84256):XKXS (SEQ ID NO: 84124), NDEGLEX (SEQ ID NO: 84426):VPTEE (SEQ ID NO: 84377):RPVQ-AA17-RKI (SEQ ID NO: 84879):KKATV (SEQ ID NO: 84212):FLQHN (SEQ ID NO: 84184):KXEXR (SEQ ID NO: 84213), NDEGLEX (SEQ ID NO: 84426):VPTGQ (SEQ ID NO: 84379):RPVQ-AA17-RKI (SEQ ID NO: 84879):KKATV (SEQ ID NO: 84212):LEEHS (SEQ ID NO: 84217):QXEXR (SEQ ID NO: 84276) and SSVKXQP (SEQ ID NO: 84430):SRVHH (SEQ ID NO: 84297):RPVQ-AA17-RKI (SEQ ID NO: 84879):KKATV (SEQ ID NO: 84212):RLEEH (SEQ ID NO: 84279):LEXAXA (SEQ ID NO: 84400); and wherein AA¹⁷ is selected from the group consisting of G, A, V, L, I, P, F, M, W, T and S (in particular is selected from the group consisting of M, I, L, V and T).

[0405] In particular, in certain embodiments, the heptuplet PEP7:PEP3:PEP1:LINKER:PEP2:PEP4:PEP8 is selected from the group consisting of GIPEPXX (SEQ ID NO: 84419):VPT:SAIS (SEQ ID NO: 84116):DENKNVV (SEQ ID NO: 84967):LKNYQ (SEQ ID NO: 84230):VVE:SXAXR (SEQ ID NO: 84303), SIPKAXX (SEQ ID NO: 84429):VPT:SAIS (SEQ ID NO: 84116):DEYDKVV (SEQ ID NO: 84968):LKNYQ (SEQ ID NO: 84230):VVE:GXGXR (SEQ ID NO: 84208), HVTKPTX (SEQ ID NO: 84422):VPT:SAIS (SEQ ID NO: 84116):DDSSNVI (SEQ ID NO: 84965):LKNYQ (SEQ ID NO: 84230):VVE:SXGXH (SEQ ID NO: 84304), YVPKPXX (SEQ ID NO: 84433):VPT:SAIS (SEQ ID NO: 84116):DDSSNVI (SEQ ID NO: 84965):LKNYQ (SEQ ID NO: 84230):VVE:SXGXH (SEQ ID NO: 84304), TVPKPXX (SEQ ID NO: 84432):VPT:SAIS (SEQ ID NO: 84116):DDSSNVI (SEQ ID NO: 84965):LKNYQ (SEQ ID NO: 84230):VVE:AXGXH (SEQ ID NO: 84147), AVPKAXX (SEQ ID NO: 84404):VPT:SAIS (SEQ ID NO: 84116):DSSNNVI (SEQ ID NO: 84972):LKNYQ (SEQ ID NO: 84230):VVE:AXGXH (SEQ ID NO: 84147), KVGKAXX (SEQ ID NO: 84425):VPT:SAIS (SEQ ID NO: 84116):DDMGVPT (SEQ ID NO: 84964):LKNYQ (SEQ ID NO: 84230):VVE:XGXR (SEQ ID NO: 84123), KASKAXX (SEQ ID NO: 84423):VPT:SAIS (SEQ ID NO: 84116):DKGVVTY (SEQ ID NO: 84969):LKNYQ (SEQ ID NO: 84230):VVE:EXGXR (SEQ ID NO: 84179), GSAGPXX (SEQ ID NO: 84420):VPT:SAIS (SEQ ID NO: 84116):NDKQQII (SEQ ID NO: 84979):LKNYQ (SEQ ID NO: 84230):VVE:RXGXS (SEQ ID NO: 84291), AAPASXX (SEQ ID NO: 84401):VPT:SAIS (SEQ ID NO: 84116):DAANNVV (SEQ ID NO: 84963):LKNYQ (SEQ ID NO: 84230):VVE:AXGXR (SEQ ID NO: 84148), STPPTXX (SEQ ID NO: 84431):VPT:SAIS (SEQ ID NO: 84116):DSANNVV (SEQ ID NO: 84971):LKNYQ (SEQ ID NO: 84230):VVE:SXGXR (SEQ ID NO: 84305), HVPKPXX (SEQ ID NO: 84421):VPT:SAIS (SEQ ID NO: 84116):DDSSNVI (SEQ ID NO: 84965):LKNYQ (SEQ ID NO: 84230):VVE:SXGXH (SEQ ID NO: 84304), RVPSTXX (SEQ ID NO: 84428):VPT:SAIS (SEQ ID NO: 84116):DNGRVLL (SEQ ID NO: 84970):LKNYQ (SEQ ID NO: 84230):VVE:XGXL (SEQ ID NO: 84122), ASAAPXX (SEQ ID NO: 84402):VPT:SAIS (SEQ ID NO: 84116):VGRKPKV (SEQ ID NO: 84981):LKNYQ (SEQ ID NO: 84230):VVE:XKXS (SEQ ID NO: 84124), ASASPXX (SEQ ID NO: 84403):VPT:SAIS (SEQ ID NO: 84116):IGKTPKI (SEQ ID NO: 84978):LKNYQ (SEQ ID NO: 84230):VVE:XKXS (SEQ ID NO: 84124), ASASPXX (SEQ ID NO: 84403):VPT:SAIS (SEQ ID NO: 84116):VGRTPKV (SEQ ID NO: 84982):LKNYQ (SEQ ID NO: 84230):VVE:XKXS (SEQ ID NO: 84124), NDEGLEX (SEQ ID NO: 84426):VPT:SAIS (SEQ ID NO: 84116):RIKPHQGQH (SEQ ID NO: 84980):LKNYQ (SEQ ID NO: 84230):VVE:KXEXR (SEQ ID NO: 84213), NDEGLEX (SEQ ID NO: 84426):VPT:SAIS (SEQ ID NO: 84116):RIKPHQGQH (SEQ ID NO: 84980):LKNYQ (SEQ ID NO: 84230):VVE:QXEXR (SEQ ID NO: 84276), SSVKXQP (SEQ ID NO: 84430):VPT:SAIS (SEQ ID NO: 84116):EYVRKKPKL (SEQ ID NO: 84974):LKNYQ (SEQ ID NO: 84230):VVE:LEXAXA (SEQ ID NO: 84400), RNVQXRP (SEQ ID NO: 84427):VPT:SAIS (SEQ ID NO: 84116):EIVRKKPIF (SEQ ID NO: 84973):LKNYQ (SEQ ID NO: 84230):VVE:LAXKXE (SEQ ID NO: 84399), GIPEPXX (SEQ ID NO: 84419):VPE:SAIS (SEQ ID NO: 84116):DENKNVV (SEQ ID NO: 84967):LKNYQ (SEQ ID NO: 84230):TVE:SXAXR (SEQ ID NO: 84303), HVTKPTX (SEQ ID NO: 84422):APT:SAIS (SEQ ID NO: 84116):DDSSNVI (SEQ ID NO: 84965):LKNYQ (SEQ ID NO: 84230):VVR:SXGXH (SEQ ID NO: 84304), YVPKPXX (SEQ ID NO: 84433):APT:SAIS (SEQ ID NO: 84116):DDSSNVI (SEQ ID NO: 84965):LKNYQ (SEQ ID NO: 84230):VVR:SXGXH (SEQ ID NO: 84304), TVPKPXX (SEQ ID NO: 84432):APT:SAIS (SEQ ID NO: 84116):DDSSNVI (SEQ ID NO: 84965):LKNYQ (SEQ ID NO: 84230):VVR:AXGXH (SEQ ID NO: 84147), AVPKAXX (SEQ ID NO: 84404):APT:SAIS (SEQ ID NO: 84116):DSSNNVI (SEQ ID NO: 84972):LKNYQ (SEQ ID NO: 84230):VVK:AXGXH (SEQ ID NO: 84147), KVGKAXX (SEQ ID NO: 84425):VPT:SAIS (SEQ ID NO: 84116):DDMGVPT (SEQ ID NO: 84964):LKNYQ (SEQ ID NO: 84230):VAE:XGXR (SEQ ID NO: 84123), KASKAXX (SEQ ID NO: 84423):VPT:SAIS (SEQ ID NO: 84116):DKGVVTY (SEQ ID NO: 84969):LKNYQ (SEQ ID NO: 84230):AVS:EXGXR (SEQ ID NO: 84179), GSAGPXX (SEQ ID NO: 84420):TPT:SAIS (SEQ ID NO: 84116):NDKQQII (SEQ ID NO: 84979):LKNYQ (SEQ ID NO: 84230):VVD:RXGXS (SEQ ID NO: 84291), AAPASXX (SEQ ID NO: 84401):VPA:SAIS (SEQ ID NO: 84116):DAANNVV (SEQ ID NO: 84963):LKNYQ (SEQ ID NO: 84230):VVE:AXGXR (SEQ ID NO: 84148), HVPKPXX (SEQ ID NO: 84421):APT:SAIS (SEQ ID NO: 84116):DDSSNVI (SEQ ID NO: 84965):LKNYQ (SEQ ID NO: 84230):VVR:SXGXH (SEQ ID NO: 84304), RVPSTXX (SEQ ID NO: 84428):APV:SAIS (SEQ ID NO: 84116):DNGRVLL (SEQ ID NO: 84970):LKNYQ (SEQ ID NO: 84230):VEE:XGXL (SEQ ID NO: 84122), ASAAPXX (SEQ ID NO: 84402):VPQ:SAIS (SEQ ID NO: 84116):VGRKPKV (SEQ ID NO: 84981):LKNYQ (SEQ ID NO: 84230):VRS:XKXS (SEQ ID NO: 84124), ASASPXX (SEQ ID NO: 84403):VSQ:SAIS (SEQ ID NO: 84116):IGKTPKI (SEQ ID NO: 84978):LKNYQ (SEQ ID NO: 84230):VKS:XKXS (SEQ ID NO: 84124), ASASPXX (SEQ ID NO: 84403):VPQ:SAIS (SEQ ID NO: 84116):VGRTPKV (SEQ ID NO: 84982):LKNYQ (SEQ ID NO: 84230):VKS:XKXS (SEQ ID NO: 84124), NDEGLEX (SEQ ID NO: 84426):VPT:SAIS (SEQ ID NO: 84116):RIKPHQGQH (SEQ ID NO: 84980):LKNYQ (SEQ ID NO: 84230):QHN:KXEXR (SEQ ID NO: 84213), NDEGLEX (SEQ ID NO: 84426):VPT:SAIS (SEQ ID NO: 84116):RIKPHQGQH (SEQ ID NO: 84980):LKNYQ (SEQ ID NO: 84230):EHS:QXEXR (SEQ ID NO: 84276), SSVKXQP (SEQ ID NO: 84430):SRV:SAIS (SEQ ID NO: 84116):EYVRKKPKL (SEQ ID NO: 84974):LKNYQ (SEQ ID NO: 84230):EEH:LEXAXA (SEQ ID NO: 84400), RNVQXRP (SEQ ID NO: 84427):TQV:SAIS (SEQ ID NO: 84116):EIVRKKPIF (SEQ ID NO: 84973):LKNYQ (SEQ ID NO: 84230):EDH:LAXKXE (SEQ ID NO: 84399), KIPKAXX (SEQ ID NO: 84424):VPE:SSLS (SEQ ID NO: 84121):DENEKVV (SEQ ID NO: 84966):LKVYP (SEQ ID NO: 84231):TVE:GXGXR (SEQ ID NO: 84208), SIPKAXX (SEQ ID NO: 84429):VPE:SSLS (SEQ ID NO: 84121):DEYDKVV (SEQ ID NO: 84968):LKVYP (SEQ ID NO: 84231):TVE:GXGXR (SEQ ID NO: 84208), HVTKPTX (SEQ ID NO: 84422):VPE:SSLS (SEQ ID NO: 84121):DDSSNVI (SEQ ID NO: 84965):LKVYP (SEQ ID NO: 84231):TVE:SXGXH (SEQ ID NO: 84304), YVPKPXX (SEQ ID NO: 84433):VPE:SSLS (SEQ ID NO: 84121):DDSSNVI (SEQ ID NO: 84965):LKVYP (SEQ ID NO: 84231):TVE:SXGXH (SEQ ID NO: 84304), TVPKPXX (SEQ ID NO: 84432):VPE:SSLS (SEQ ID NO: 84121):DDSSNVI (SEQ ID NO: 84965):LKVYP (SEQ ID NO: 84231):TVE:AXGXH (SEQ ID NO: 84147), AVPKAXX (SEQ ID NO: 84404):VPE:SSLS (SEQ ID NO: 84121):DSSNNVI (SEQ ID NO: 84972):LKVYP (SEQ ID NO: 84231):TVE:AXGXH (SEQ ID NO: 84147), KVGKAXX (SEQ ID NO: 84425):VPE:SSLS (SEQ ID NO: 84121):DDMGVPT (SEQ ID NO: 84964):LKVYP (SEQ ID NO: 84231):TVE:XGXR (SEQ ID NO: 84123), KASKAXX (SEQ ID NO: 84423):VPE:SSLS (SEQ ID NO: 84121):DKGVVTY (SEQ ID NO: 84969):LKVYP (SEQ ID NO: 84231):TVE:EXGXR (SEQ ID NO: 84179), GSAGPXX (SEQ ID NO: 84420):VPE:SSLS (SEQ ID NO: 84121):NDKQQII (SEQ ID NO: 84979):LKVYP (SEQ ID NO: 84231):TVE:RXGXS (SEQ ID NO: 84291), AAPASXX (SEQ ID NO: 84401):VPE:SSLS (SEQ ID NO: 84121):DAANNVV (SEQ ID NO: 84963):LKVYP (SEQ ID NO: 84231):TVE:AXGXR (SEQ ID NO: 84148), STPPTXX (SEQ ID NO: 84431):VPE:SSLS (SEQ ID NO: 84121):DSANNVV (SEQ ID NO: 84971):LKVYP (SEQ ID NO: 84231):TVE:SXGXR (SEQ ID NO: 84305), HVPKPXX (SEQ ID NO: 84421):VPE:SSLS (SEQ ID NO: 84121):DDSSNVI (SEQ ID NO: 84965):LKVYP (SEQ ID NO: 84231):TVE:SXGXH (SEQ ID NO: 84304), RVPSTXX (SEQ ID NO: 84428):VPE:SSLS (SEQ ID NO: 84121):DNGRVLL (SEQ ID NO: 84970):LKVYP (SEQ ID NO: 84231):TVE:XGXL (SEQ ID NO: 84122), ASAAPXX (SEQ ID NO: 84402):VPE:SSLS (SEQ ID NO: 84121):VGRKPKV (SEQ ID NO: 84981):LKVYP (SEQ ID NO: 84231):TVE:XKXS (SEQ ID NO: 84124), ASASPXX (SEQ ID NO: 84403):VPE:SSLS (SEQ ID NO: 84121):IGKTPKI (SEQ ID NO: 84978):LKVYP (SEQ ID NO: 84231):TVE:XKXS (SEQ ID NO: 84124), ASASPXX (SEQ ID NO: 84403):VPE:SSLS (SEQ ID NO: 84121):VGRTPKV (SEQ ID NO: 84982):LKVYP (SEQ ID NO: 84231):TVE:XKXS (SEQ ID NO: 84124), NDEGLEX (SEQ ID NO: 84426):VPE:SSLS (SEQ ID NO: 84121):RIKPHQGQH (SEQ ID NO: 84980):LKVYP (SEQ ID NO: 84231):TVE:KXEXR (SEQ ID NO: 84213), NDEGLEX (SEQ ID NO: 84426):VPE:SSLS (SEQ ID NO: 84121):RIKPHQGQH (SEQ ID NO: 84980):LKVYP (SEQ ID NO: 84231):TVE:QXEXR (SEQ ID NO: 84276), SSVKXQP (SEQ ID NO: 84430):VPE:SSLS (SEQ ID NO: 84121):EYVRKKPKL (SEQ ID NO: 84974):LKVYP (SEQ ID NO: 84231):TVE:LEXAXA (SEQ ID NO: 84400), RNVQXRP (SEQ ID NO: 84427):VPE:SSLS (SEQ ID NO: 84121):EIVRKKPIF (SEQ ID NO: 84973):LKVYP (SEQ ID NO: 84231):TVE:LAXKXE (SEQ ID NO: 84399), KIPKAXX (SEQ ID NO: 84424):VPT:SSLS (SEQ ID NO: 84121):DENEKVV (SEQ ID NO: 84966):LKVYP (SEQ ID NO: 84231):VVE:GXGXR (SEQ ID NO: 84208), SIPKAXX (SEQ ID NO: 84429):VPT:SSLS (SEQ ID NO: 84121):DEYDKVV (SEQ ID NO: 84968):LKVYP (SEQ ID NO: 84231):VVE:GXGXR (SEQ ID NO: 84208), HVTKPTX (SEQ ID NO: 84422):APT:SSLS (SEQ ID NO: 84121):DDSSNVI (SEQ ID NO: 84965):LKVYP (SEQ ID NO: 84231):VVR:SXGXH (SEQ ID NO: 84304), YVPKPXX (SEQ ID NO: 84433):APT:SSLS (SEQ ID NO: 84121):DDSSNVI (SEQ ID NO: 84965):LKVYP (SEQ ID NO: 84231):VVR:SXGXH (SEQ ID NO: 84304), TVPKPXX (SEQ ID NO: 84432):APT:SSLS (SEQ ID NO: 84121):DDSSNVI (SEQ ID NO: 84965):LKVYP (SEQ ID NO: 84231):VVR:AXGXH (SEQ ID NO: 84147), AVPKAXX (SEQ ID NO: 84404):APT:SSLS (SEQ ID NO: 84121):DSSNNVI (SEQ ID NO: 84972):LKVYP (SEQ ID NO: 84231):VVK:AXGXH (SEQ ID NO: 84147), KVGKAXX (SEQ ID NO: 84425):VPT:SSLS (SEQ ID NO: 84121):DDMGVPT (SEQ ID NO: 84964):LKVYP (SEQ ID NO: 84231):VAE:XGXR (SEQ ID NO: 84123), KASKAXX (SEQ ID NO: 84423):VPT:SSLS (SEQ ID NO: 84121):DKGVVTY (SEQ ID NO: 84969):LKVYP (SEQ ID NO: 84231):AVS:EXGXR (SEQ ID NO: 84179), GSAGPXX (SEQ ID NO: 84420):TPT:SSLS (SEQ ID NO: 84121):NDKQQII (SEQ ID NO: 84979):LKVYP (SEQ ID NO: 84231):VVD:RXGXS (SEQ ID NO: 84291), AAPASXX (SEQ ID NO: 84401):VPA:SSLS (SEQ ID NO: 84121):DAANNVV (SEQ ID NO: 84963):LKVYP (SEQ ID NO: 84231):VVE:AXGXR (SEQ ID NO: 84148), STPPTXX (SEQ ID NO: 84431):VPT:SSLS (SEQ ID NO: 84121):DSANNVV (SEQ ID NO: 84971):LKVYP (SEQ ID NO: 84231):VVE:SXGXR (SEQ ID NO: 84305), HVPKPXX (SEQ ID NO: 84421):APT:SSLS (SEQ ID NO: 84121):DDSSNVI (SEQ ID NO: 84965):LKVYP (SEQ ID NO: 84231):VVR:SXGXH (SEQ ID NO: 84304), RVPSTXX (SEQ ID NO: 84428):APV:SSLS (SEQ ID NO: 84121):DNGRVLL (SEQ ID NO: 84970):LKVYP (SEQ ID NO: 84231):VEE:XGXL (SEQ ID NO: 84122), ASAAPXX (SEQ ID NO: 84402):VPQ:SSLS (SEQ ID NO: 84121):VGRKPKV (SEQ ID NO: 84981):LKVYP (SEQ ID NO: 84231):VRS:XKXS (SEQ ID NO: 84124), ASASPXX (SEQ ID NO: 84403):VSQ:SSLS (SEQ ID NO: 84121):IGKTPKI (SEQ ID NO: 84978):LKVYP (SEQ ID NO: 84231):VKS:XKXS (SEQ ID NO: 84124), ASASPXX (SEQ ID NO: 84403):VPQ:SSLS (SEQ ID NO: 84121):VGRTPKV (SEQ ID NO: 84982):LKVYP (SEQ ID NO: 84231):VKS:XKXS (SEQ ID NO: 84124), NDEGLEX (SEQ ID NO: 84426):VPT:SSLS (SEQ ID NO: 84121):RIKPHQGQH (SEQ ID NO: 84980):LKVYP (SEQ ID NO: 84231):QHN:KXEXR (SEQ ID NO: 84213), NDEGLEX (SEQ ID NO: 84426):VPT:SSLS (SEQ ID NO: 84121):RIKPHQGQH (SEQ ID NO: 84980):LKVYP (SEQ ID NO: 84231):EHS:QXEXR (SEQ ID NO: 84276), SSVKXQP (SEQ ID NO: 84430):SRV:SSLS (SEQ ID NO: 84121):EYVRKKPKL (SEQ ID NO: 84974):LKVYP (SEQ ID NO: 84231):EEH:LEXAXA (SEQ ID NO: 84400), RNVQXRP (SEQ ID NO: 84427):TQV:SSLS (SEQ ID NO: 84121):EIVRKKPIF (SEQ ID NO: 84973):LKVYP (SEQ ID NO: 84231):EDH:LAXKXE (SEQ ID NO: 84399), KIPKAXX (SEQ ID NO: 84424):VPT:SAIS (SEQ ID NO: 84116):DENEKVV (SEQ ID NO: 84966):LKNYQ (SEQ ID NO: 84230):VVE:GXGXR (SEQ ID NO: 84208), KIPKAXX (SEQ ID NO: 84424):APT:NAIS (SEQ ID NO: 84113):DENEKVV (SEQ ID NO: 84966):LKKYR (SEQ ID NO: 84229):VVR:GXGXR (SEQ ID NO: 84208), GIPEPXX (SEQ ID NO: 84419):APT:NAIS (SEQ ID NO: 84113):DENKNVV (SEQ ID NO: 84967):LKKYR (SEQ ID NO: 84229):VVR:SXAXR (SEQ ID NO: 84303), SIPKAXX (SEQ ID NO: 84429):APT:NAIS (SEQ ID NO: 84113):DEYDKVV (SEQ ID NO: 84968):LKKYR (SEQ ID NO: 84229):VVR:GXGXR (SEQ ID NO: 84208), YVPKPXX (SEQ ID NO: 84433):APT:NAIS (SEQ ID NO: 84113):DDSSNVI (SEQ ID NO: 84965):LKKYR (SEQ ID NO: 84229):VVR:SXGXH (SEQ ID NO: 84304), TVPKPXX (SEQ ID NO: 84432):APT:NAIS (SEQ ID NO: 84113):DDSSNVI (SEQ ID NO: 84965):LKKYR (SEQ ID NO: 84229):VVR:AXGXH (SEQ ID NO: 84147), AVPKAXX (SEQ ID NO: 84404):APT:NAIS (SEQ ID NO: 84113):DSSNNVI (SEQ ID NO: 84972):LKKYR (SEQ ID NO: 84229):VVR:AXGXH (SEQ ID NO: 84147), KVGKAXX (SEQ ID NO: 84425):APT:NAIS (SEQ ID NO: 84113):DDMGVPT (SEQ ID NO: 84964):LKKYR (SEQ ID NO: 84229):VVR:XGXR (SEQ ID NO: 84123), KASKAXX (SEQ ID NO: 84423):APT:NAIS (SEQ ID NO: 84113):DKGVVTY (SEQ ID NO: 84969):LKKYR (SEQ ID NO: 84229):VVR:EXGXR (SEQ ID NO: 84179), GSAGPXX (SEQ ID NO: 84420):APT:NAIS (SEQ ID NO: 84113):NDKQQII (SEQ ID NO: 84979):LKKYR (SEQ ID NO: 84229):VVR:RXGXS (SEQ ID NO: 84291), AAPASXX (SEQ ID NO: 84401):APT:NAIS (SEQ ID NO: 84113):DAANNVV (SEQ ID NO: 84963):LKKYR (SEQ ID NO: 84229):VVR:AXGXR (SEQ ID NO: 84148), STPPTXX (SEQ ID NO: 84431):APT:NAIS (SEQ ID NO: 84113):DSANNVV (SEQ ID NO: 84971):LKKYR (SEQ ID NO: 84229):VVR:SXGXR (SEQ ID NO: 84305), HVPKPXX (SEQ ID NO: 84421):APT:NAIS (SEQ ID NO: 84113):DDSSNVI (SEQ ID NO: 84965):LKKYR (SEQ ID NO: 84229):VVR:SXGXH (SEQ ID NO: 84304), RVPSTXX (SEQ ID NO: 84428):APT:NAIS (SEQ ID NO: 84113):DNGRVLL (SEQ ID NO: 84970):LKKYR (SEQ ID NO: 84229):VVR:XGXL (SEQ ID NO: 84122), ASAAPXX (SEQ ID NO: 84402):APT:NAIS (SEQ ID NO: 84113):VGRKPKV (SEQ ID NO: 84981):LKKYR (SEQ ID NO: 84229):VVR:XKXS (SEQ ID NO: 84124), ASASPXX (SEQ ID NO: 84403):APT:NAIS (SEQ ID NO: 84113):IGKTPKI (SEQ ID NO: 84978):LKKYR (SEQ ID NO: 84229):VVR:XKXS (SEQ ID NO: 84124), ASASPXX (SEQ ID NO: 84403):APT:NAIS (SEQ ID NO: 84113):VGRTPKV (SEQ ID NO: 84982):LKKYR (SEQ ID NO: 84229):VVR:XKXS (SEQ ID NO: 84124), NDEGLEX (SEQ ID NO: 84426):APT:NAIS (SEQ ID NO: 84113):RIKPHQGQH (SEQ ID NO: 84980):LKKYR (SEQ ID NO: 84229):VVR:KXEXR (SEQ ID NO: 84213), NDEGLEX (SEQ ID NO: 84426):APT:NAIS (SEQ ID NO: 84113):RIKPHQGQH (SEQ ID NO: 84980):LKKYR (SEQ ID NO: 84229):VVR:QXEXR (SEQ ID NO: 84276), SSVKXQP (SEQ ID NO: 84430):APT:NAIS (SEQ ID NO: 84113):EYVRKKPKL (SEQ ID NO: 84974):LKKYR (SEQ ID NO: 84229):VVR:LEXAXA (SEQ ID NO: 84400), RNVQXRP (SEQ ID NO: 84427):APT:NAIS (SEQ ID NO: 84113):EIVRKKPIF (SEQ ID NO: 84973):LKKYR (SEQ ID NO: 84229):VVR:LAXKXE (SEQ ID NO: 84399), KIPKAXX (SEQ ID NO: 84424):VPT:NAIS (SEQ ID NO: 84113):DENEKVV (SEQ ID NO: 84966):LKKYR (SEQ ID NO: 84229):VVE:GXGXR (SEQ ID NO: 84208), GIPEPXX (SEQ ID NO: 84419):VPE:NAIS (SEQ ID NO: 84113):DENKNVV (SEQ ID NO: 84967):LKKYR (SEQ ID NO: 84229):TVE:SXAXR (SEQ ID NO: 84303), SIPKAXX (SEQ ID NO: 84429):VPT:NAIS (SEQ ID NO: 84113):DEYDKVV (SEQ ID NO: 84968):LKKYR (SEQ ID NO: 84229):VVE:GXGXR (SEQ ID NO: 84208), AVPKAXX (SEQ ID NO: 84404):APT:NAIS (SEQ ID NO: 84113):DSSNNVI (SEQ ID NO: 84972):LKKYR (SEQ ID NO: 84229):VVK:AXGXH (SEQ ID NO: 84147), KVGKAXX (SEQ ID NO: 84425):VPT:NAIS (SEQ ID NO: 84113):DDMGVPT (SEQ ID NO: 84964):LKKYR (SEQ ID NO: 84229):VAE:XGXR (SEQ ID NO: 84123), KASKAXX (SEQ ID NO: 84423):VPT:NAIS (SEQ ID NO: 84113):DKGVVTY (SEQ ID NO: 84969):LKKYR (SEQ ID NO: 84229):AVS:EXGXR (SEQ ID NO: 84179), GSAGPXX (SEQ ID NO: 84420):TPT:NAIS (SEQ ID NO: 84113):NDKQQII (SEQ ID NO: 84979):LKKYR (SEQ ID NO: 84229):VVD:RXGXS (SEQ ID NO: 84291), AAPASXX (SEQ ID NO: 84401):VPA:NAIS (SEQ ID NO: 84113):DAANNVV (SEQ ID NO: 84963):LKKYR (SEQ ID NO: 84229):VVE:AXGXR (SEQ ID NO: 84148), STPPTXX (SEQ ID NO: 84431):VPT:NAIS (SEQ ID NO: 84113):DSANNVV (SEQ ID NO: 84971):LKKYR (SEQ ID NO: 84229):VVE:SXGXR (SEQ ID NO: 84305), RVPSTXX (SEQ ID NO: 84428):APV:NAIS (SEQ ID NO: 84113):DNGRVLL (SEQ ID NO: 84970):LKKYR (SEQ ID NO: 84229):VEE:XGXL (SEQ ID NO: 84122), ASAAPXX (SEQ ID NO: 84402):VPQ:NAIS (SEQ ID NO: 84113):VGRKPKV (SEQ ID NO: 84981):LKKYR (SEQ ID NO: 84229):VRS:XKXS (SEQ ID NO: 84124), ASASPXX (SEQ ID NO: 84403):VSQ:NAIS (SEQ ID NO: 84113):IGKTPKI (SEQ ID NO: 84978):LKKYR (SEQ ID NO: 84229):VKS:XKXS (SEQ ID NO: 84124), ASASPXX (SEQ ID NO: 84403):VPQ:NAIS (SEQ ID NO: 84113):VGRTPKV (SEQ ID NO: 84982):LKKYR (SEQ ID NO: 84229):VKS:XKXS (SEQ ID NO: 84124), NDEGLEX (SEQ ID NO: 84426):VPT:NAIS (SEQ ID NO: 84113):RIKPHQGQH (SEQ ID NO: 84980):LKKYR (SEQ ID NO: 84229):QHN:KXEXR (SEQ ID NO: 84213), NDEGLEX (SEQ ID NO: 84426):VPT:NAIS (SEQ ID NO: 84113):RIKPHQGQH (SEQ ID NO: 84980):LKKYR (SEQ ID NO: 84229):EHS:QXEXR (SEQ ID NO: 84276), SSVKXQP (SEQ ID NO: 84430):SRV:NAIS (SEQ ID NO: 84113):EYVRKKPKL (SEQ ID NO: 84974):LKKYR (SEQ ID NO: 84229):EEH:LEXAXA (SEQ ID NO: 84400), RNVQXRP (SEQ ID NO: 84427):TQV:NAIS (SEQ ID NO: 84113):EIVRKKPIF (SEQ ID NO: 84973):LKKYR (SEQ ID NO: 84229):EDH:LAXKXE (SEQ ID NO: 84399), HVTKPTX (SEQ ID NO: 84422):APT:NAIS (SEQ ID NO: 84113):DDSSNVI (SEQ ID NO: 84965):LKKYR (SEQ ID NO: 84229):VVR:SXGXH (SEQ ID NO: 84304), KIPKAXX (SEQ ID NO: 84424):APT:SATS (SEQ ID NO: 84117):DENEKVV (SEQ ID NO: 84966):LRKHR (SEQ ID NO: 84233):VVK:GXGXR (SEQ ID NO: 84208), GIPEPXX (SEQ ID NO: 84419):APT:SATS (SEQ ID NO: 84117):DENKNVV (SEQ ID NO: 84967):LRKHR (SEQ ID NO: 84233):VVK:SXAXR (SEQ ID NO: 84303), SIPKAXX (SEQ ID NO: 84429):APT:SATS (SEQ ID NO: 84117):DEYDKVV (SEQ ID NO: 84968):LRKHR (SEQ ID NO: 84233):VVK:GXGXR (SEQ ID NO: 84208), HVTKPTX (SEQ ID NO: 84422):APT:SATS (SEQ ID NO: 84117):DDSSNVI (SEQ ID NO: 84965):LRKHR (SEQ ID NO: 84233):VVK:SXGXH (SEQ ID NO: 84304), YVPKPXX (SEQ ID NO: 84433):APT:SATS (SEQ ID NO: 84117):DDSSNVI (SEQ ID NO: 84965):LRKHR (SEQ ID NO: 84233):VVK:SXGXH (SEQ ID NO: 84304), TVPKPXX (SEQ ID NO: 84432):APT:SATS (SEQ ID NO: 84117):DDSSNVI (SEQ ID NO: 84965):LRKHR (SEQ ID NO: 84233):VVK:AXGXH (SEQ ID NO: 84147), KVGKAXX (SEQ ID NO: 84425):APT:SATS (SEQ ID NO: 84117):DDMGVPT (SEQ ID NO: 84964):LRKHR (SEQ ID NO: 84233):VVK:XGXR (SEQ ID NO: 84123), KASKAXX (SEQ ID NO: 84423):APT:SATS (SEQ ID NO: 84117):DKGVVTY (SEQ ID NO: 84969):LRKHR (SEQ ID NO: 84233):VVK:EXGXR (SEQ ID NO: 84179), GSAGPXX (SEQ ID NO: 84420):APT:SATS (SEQ ID NO: 84117):NDKQQII (SEQ ID NO: 84979):LRKHR (SEQ ID NO: 84233):VVK:RXGXS (SEQ ID NO: 84291), AAPASXX (SEQ ID NO: 84401):APT:SATS (SEQ ID NO: 84117):DAANNVV (SEQ ID NO: 84963):LRKHR (SEQ ID NO: 84233):VVK:AXGXR (SEQ ID NO: 84148), STPPTXX (SEQ ID NO: 84431):APT:SATS (SEQ ID NO: 84117):DSANNVV (SEQ ID NO: 84971):LRKHR (SEQ ID NO: 84233):VVK:SXGXR (SEQ ID NO: 84305), HVPKPXX (SEQ ID NO: 84421):APT:SATS (SEQ ID NO: 84117):DDSSNVI (SEQ ID NO: 84965):LRKHR (SEQ ID NO: 84233):VVK:SXGXH (SEQ ID NO: 84304), RVPSTXX (SEQ ID NO: 84428):APT:SATS (SEQ ID NO: 84117):DNGRVLL (SEQ ID NO: 84970):LRKHR (SEQ ID NO: 84233):VVK:XGXL (SEQ ID NO: 84122), ASAAPXX (SEQ ID NO: 84402):APT:SATS (SEQ ID NO: 84117):VGRKPKV (SEQ ID NO: 84981):LRKHR (SEQ ID NO: 84233):VVK:XKXS (SEQ ID NO: 84124), ASASPXX (SEQ ID NO: 84403):APT:SATS (SEQ ID NO: 84117):IGKTPKI (SEQ ID NO: 84978):LRKHR (SEQ ID NO: 84233):VVK:XKXS (SEQ ID NO: 84124), ASASPXX (SEQ ID NO: 84403):APT:SATS (SEQ ID NO: 84117):VGRTPKV (SEQ ID NO: 84982):LRKHR (SEQ ID NO: 84233):VVK:XKXS (SEQ ID NO: 84124), NDEGLEX (SEQ ID NO: 84426):APT:SATS (SEQ ID NO: 84117):RIKPHQGQH (SEQ ID NO: 84980):LRKHR (SEQ ID NO: 84233):VVK:KXEXR (SEQ ID NO: 84213), NDEGLEX (SEQ ID NO: 84426):APT:SATS (SEQ ID NO: 84117):RIKPHQGQH (SEQ ID NO: 84980):LRKHR (SEQ ID NO: 84233):VVK:QXEXR (SEQ ID NO: 84276), SSVKXQP (SEQ ID NO: 84430):APT:SATS (SEQ ID NO: 84117):EYVRKKPKL (SEQ ID NO: 84974):LRKHR (SEQ ID NO: 84233):VVK:LEXAXA (SEQ ID NO: 84400), RNVQXRP (SEQ ID NO: 84427):APT:SATS (SEQ ID NO: 84117):EIVRKKPIF (SEQ ID NO: 84973):LRKHR (SEQ ID NO: 84233):VVK:LAXKXE (SEQ ID NO: 84399), KIPKAXX (SEQ ID NO: 84424):VPT:SATS (SEQ ID NO: 84117):DENEKVV (SEQ ID NO: 84966):LRKHR (SEQ ID NO: 84233):VVE:GXGXR (SEQ ID NO: 84208), GIPEPXX (SEQ ID NO: 84419):VPE:SATS (SEQ ID NO: 84117):DENKNVV (SEQ ID NO: 84967):LRKHR (SEQ ID NO: 84233):TVE:SXAXR (SEQ ID NO: 84303), SIPKAXX (SEQ ID NO: 84429):VPT:SATS (SEQ ID NO: 84117):DEYDKVV (SEQ ID NO: 84968):LRKHR (SEQ ID NO: 84233):VVE:GXGXR (SEQ ID NO: 84208), HVTKPTX (SEQ ID NO: 84422):APT:SATS (SEQ ID NO: 84117):DDSSNVI (SEQ ID NO: 84965):LRKHR (SEQ ID NO: 84233):VVR:SXGXH (SEQ ID NO: 84304), YVPKPXX (SEQ ID NO: 84433):APT:SATS (SEQ ID NO: 84117):DDSSNVI (SEQ ID NO: 84965):LRKHR (SEQ ID NO: 84233):VVR:SXGXH (SEQ ID NO: 84304), TVPKPXX (SEQ ID NO: 84432):APT:SATS (SEQ ID NO: 84117):DDSSNVI (SEQ ID NO: 84965):LRKHR (SEQ ID NO: 84233):VVR:AXGXH (SEQ ID NO: 84147), KVGKAXX (SEQ ID NO: 84425):VPT:SATS (SEQ ID NO: 84117):DDMGVPT (SEQ ID NO: 84964):LRKHR (SEQ ID NO: 84233):VAE:XGXR (SEQ ID NO: 84123), KASKAXX (SEQ ID NO: 84423):VPT:SATS (SEQ ID NO: 84117):DKGVVTY (SEQ ID NO: 84969):LRKHR (SEQ ID NO: 84233):AVS:EXGXR (SEQ ID NO: 84179), GSAGPXX (SEQ ID NO: 84420):TPT:SATS (SEQ ID NO: 84117):NDKQQII (SEQ ID NO: 84979):LRKHR (SEQ ID NO: 84233):VVD:RXGXS (SEQ ID NO: 84291), AAPASXX (SEQ ID NO: 84401):VPA:SATS (SEQ ID NO: 84117):DAANNVV (SEQ ID NO: 84963):LRKHR (SEQ ID NO: 84233):VVE:AXGXR (SEQ ID NO: 84148), STPPTXX (SEQ ID NO: 84431):VPT:SATS (SEQ ID NO: 84117):DSANNVV (SEQ ID NO: 84971):LRKHR (SEQ ID NO: 84233):VVE:SXGXR (SEQ ID NO: 84305), HVPKPXX (SEQ ID NO: 84421):APT:SATS (SEQ ID NO: 84117):DDSSNVI (SEQ ID NO: 84965):LRKHR (SEQ ID NO: 84233):VVR:SXGXH (SEQ ID NO: 84304), RVPSTXX (SEQ ID NO: 84428):APV:SATS (SEQ ID NO: 84117):DNGRVLL (SEQ ID NO: 84970):LRKHR (SEQ ID NO: 84233):VEE:XGXL (SEQ ID NO: 84122), ASAAPXX (SEQ ID NO: 84402):VPQ:SATS (SEQ ID NO: 84117):VGRKPKV (SEQ ID NO: 84981):LRKHR (SEQ ID NO: 84233):VRS:XKXS (SEQ ID NO: 84124), ASASPXX (SEQ ID NO: 84403):VSQ:SATS (SEQ ID NO: 84117):IGKTPKI (SEQ ID NO: 84978):LRKHR (SEQ ID NO: 84233):VKS:XKXS (SEQ ID NO: 84124), ASASPXX (SEQ ID NO: 84403):VPQ:SATS (SEQ ID NO: 84117):VGRTPKV (SEQ ID NO: 84982):LRKHR (SEQ ID NO: 84233):VKS:XKXS (SEQ ID NO: 84124), NDEGLEX (SEQ ID NO: 84426):VPT:SATS (SEQ ID NO: 84117):RIKPHQGQH (SEQ ID NO: 84980):LRKHR (SEQ ID NO: 84233):QHN:KXEXR (SEQ ID NO: 84213), NDEGLEX (SEQ ID NO: 84426):VPT:SATS (SEQ ID NO: 84117):RIKPHQGQH (SEQ ID NO: 84980):LRKHR (SEQ ID NO: 84233):EHS:QXEXR (SEQ ID NO: 84276), SSVKXQP (SEQ ID NO: 84430):SRV:SATS (SEQ ID NO: 84117):EYVRKKPKL (SEQ ID NO: 84974):LRKHR (SEQ ID NO: 84233):EEH:LEXAXA (SEQ ID NO: 84400), RNVQXRP (SEQ ID NO: 84427):TQV:SATS (SEQ ID NO: 84117):EIVRKKPIF (SEQ ID NO: 84973):LRKHR (SEQ ID NO: 84233):EDH:LAXKXE (SEQ ID NO: 84399), KIPKAXX (SEQ ID NO: 84424):VPT:SPIS (SEQ ID NO: 84120):DENEKVV (SEQ ID NO: 84966):LKYHY (SEQ ID NO: 84232):VAE:GXGXR (SEQ ID NO: 84208), GIPEPXX (SEQ ID NO: 84419):VPT:SPIS (SEQ ID NO: 84120):DENKNVV (SEQ ID NO: 84967):LKYHY (SEQ ID NO: 84232):VAE:SXAXR (SEQ ID NO: 84303), SIPKAXX (SEQ ID NO: 84429):VPT:SPIS (SEQ ID NO: 84120):DEYDKVV (SEQ ID NO: 84968):LKYHY (SEQ ID NO: 84232):VAE:GXGXR (SEQ ID NO: 84208), HVTKPTX (SEQ ID NO: 84422):VPT:SPIS (SEQ ID NO: 84120):DDSSNVI (SEQ ID NO: 84965):LKYHY (SEQ ID NO: 84232):VAE:SXGXH (SEQ ID NO: 84304), YVPKPXX (SEQ ID NO: 84433):VPT:SPIS (SEQ ID NO: 84120):DDSSNVI (SEQ ID NO: 84965):LKYHY (SEQ ID NO: 84232):VAE:SXGXH (SEQ ID NO: 84304), TVPKPXX (SEQ ID NO: 84432):VPT:SPIS (SEQ ID NO: 84120):DDSSNVI (SEQ ID NO: 84965):LKYHY (SEQ ID NO: 84232):VAE:AXGXH (SEQ ID NO: 84147), AVPKAXX (SEQ ID NO: 84404):VPT:SPIS (SEQ ID NO: 84120):DSSNNVI (SEQ ID NO: 84972):LKYHY (SEQ ID NO: 84232):VAE:AXGXH (SEQ ID NO: 84147), KASKAXX (SEQ ID NO: 84423):VPT:SPIS (SEQ ID NO: 84120):DKGVVTY (SEQ ID NO: 84969):LKYHY (SEQ ID NO: 84232):VAE:EXGXR (SEQ ID NO: 84179), GSAGPXX (SEQ ID NO: 84420):VPT:SPIS (SEQ ID NO: 84120):NDKQQII (SEQ ID NO: 84979):LKYHY (SEQ ID NO: 84232):VAE:RXGXS (SEQ ID NO: 84291), AAPASXX (SEQ ID NO: 84401):VPT:SPIS (SEQ ID NO: 84120):DAANNVV (SEQ ID NO: 84963):LKYHY (SEQ ID NO: 84232):VAE:AXGXR (SEQ ID NO: 84148), STPPTXX (SEQ ID NO: 84431):VPT:SPIS (SEQ ID NO: 84120):DSANNVV (SEQ ID NO: 84971):LKYHY (SEQ ID NO: 84232):VAE:SXGXR (SEQ ID NO: 84305), HVPKPXX (SEQ ID NO: 84421):VPT:SPIS (SEQ ID NO: 84120):DDSSNVI (SEQ ID NO: 84965):LKYHY (SEQ ID NO: 84232):VAE:SXGXH (SEQ ID NO: 84304), RVPSTXX (SEQ ID NO: 84428):VPT:SPIS (SEQ ID NO: 84120):DNGRVLL (SEQ ID NO: 84970):LKYHY (SEQ ID NO: 84232):VAE:XGXL (SEQ ID NO: 84122), ASAAPXX (SEQ ID NO: 84402):VPT:SPIS (SEQ ID NO: 84120):VGRKPKV (SEQ ID NO: 84981):LKYHY (SEQ ID NO: 84232):VAE:XKXS (SEQ ID NO: 84124), ASASPXX (SEQ ID NO: 84403):VPT:SPIS (SEQ ID NO: 84120):IGKTPKI (SEQ ID NO: 84978):LKYHY (SEQ ID NO: 84232):VAE:XKXS (SEQ ID NO: 84124), ASASPXX (SEQ ID NO: 84403):VPT:SPIS (SEQ ID NO: 84120):VGRTPKV (SEQ ID NO: 84982):LKYHY (SEQ ID NO: 84232):VAE:XKXS (SEQ ID NO: 84124), NDEGLEX (SEQ ID NO: 84426):VPT:SPIS (SEQ ID NO: 84120):RIKPHQGQH (SEQ ID NO: 84980):LKYHY (SEQ ID NO: 84232):VAE:KXEXR (SEQ ID NO: 84213), NDEGLEX (SEQ ID NO: 84426):VPT:SPIS (SEQ ID NO: 84120):RIKPHQGQH (SEQ ID NO: 84980):LKYHY (SEQ ID NO: 84232):VAE:QXEXR (SEQ ID NO: 84276), SSVKXQP (SEQ ID NO: 84430):VPT:SPIS (SEQ ID NO: 84120):EYVRKKPKL (SEQ ID NO: 84974):LKYHY (SEQ ID NO: 84232):VAE:LEXAXA (SEQ ID NO: 84400), RNVQXRP (SEQ ID NO: 84427):VPT:SPIS (SEQ ID NO: 84120):EIVRKKPIF (SEQ ID NO: 84973):LKYHY (SEQ ID NO: 84232):VAE:LAXKXE (SEQ ID NO: 84399), KIPKAXX (SEQ ID NO: 84424):VPT:SPIS (SEQ ID NO: 84120):DENEKVV (SEQ ID NO: 84966):LKYHY (SEQ ID NO: 84232):VVE:GXGXR (SEQ ID NO: 84208), GIPEPXX (SEQ ID NO: 84419):VPE:SPIS (SEQ ID NO: 84120):DENKNVV (SEQ ID NO: 84967):LKYHY (SEQ ID NO: 84232):TVE:SXAXR (SEQ ID NO: 84303), SIPKAXX (SEQ ID NO: 84429):VPT:SPIS (SEQ ID NO: 84120):DEYDKVV (SEQ ID NO: 84968):LKYHY (SEQ ID NO: 84232):VVE:GXGXR (SEQ ID NO: 84208), HVTKPTX (SEQ ID NO: 84422):APT:SPIS (SEQ ID NO: 84120):DDSSNVI (SEQ ID NO: 84965):LKYHY (SEQ ID NO: 84232):VVR:SXGXH (SEQ ID NO: 84304), YVPKPXX (SEQ ID NO: 84433):APT:SPIS (SEQ ID NO: 84120):DDSSNVI (SEQ ID NO: 84965):LKYHY (SEQ ID NO: 84232):VVR:SXGXH (SEQ ID NO: 84304), TVPKPXX (SEQ ID NO: 84432):APT:SPIS (SEQ ID NO: 84120):DDSSNVI (SEQ ID NO: 84965):LKYHY (SEQ ID NO: 84232):VVR:AXGXH (SEQ ID NO: 84147), AVPKAXX (SEQ ID NO: 84404):APT:SPIS (SEQ ID NO: 84120):DSSNNVI (SEQ ID NO: 84972):LKYHY (SEQ ID NO: 84232):VVK:AXGXH (SEQ ID NO: 84147), KASKAXX (SEQ ID NO: 84423):VPT:SPIS (SEQ ID NO: 84120):DKGVVTY (SEQ ID NO: 84969):LKYHY (SEQ ID NO: 84232):AVS:EXGXR (SEQ ID NO: 84179), GSAGPXX (SEQ ID NO: 84420):TPT:SPIS (SEQ ID NO: 84120):NDKQQII (SEQ ID NO: 84979):LKYHY (SEQ ID NO: 84232):VVD:RXGXS (SEQ ID NO: 84291), AAPASXX (SEQ ID NO: 84401):VPA:SPIS (SEQ ID NO: 84120):DAANNVV (SEQ ID NO: 84963):LKYHY (SEQ ID NO: 84232):VVE:AXGXR (SEQ ID NO: 84148), STPPTXX (SEQ ID NO: 84431):VPT:SPIS (SEQ ID NO: 84120):DSANNVV (SEQ ID NO: 84971):LKYHY (SEQ ID NO: 84232):VVE:SXGXR (SEQ ID NO: 84305), HVPKPXX (SEQ ID NO: 84421):APT:SPIS (SEQ ID NO: 84120):DDSSNVI (SEQ ID NO: 84965):LKYHY (SEQ ID NO: 84232):VVR:SXGXH (SEQ ID NO: 84304), RVPSTXX (SEQ ID NO: 84428):APV:SPIS (SEQ ID NO: 84120):DNGRVLL (SEQ ID NO: 84970):LKYHY (SEQ ID NO: 84232):VEE:XGXL (SEQ ID NO: 84122), ASAAPXX (SEQ ID NO: 84402):VPQ:SPIS (SEQ ID NO: 84120):VGRKPKV (SEQ ID NO: 84981):LKYHY (SEQ ID NO: 84232):VRS:XKXS (SEQ ID NO: 84124), ASASPXX (SEQ ID NO: 84403):VSQ:SPIS (SEQ ID NO: 84120):IGKTPKI (SEQ ID NO: 84978):LKYHY (SEQ ID NO: 84232):VKS:XKXS (SEQ ID NO: 84124), ASASPXX (SEQ ID NO: 84403):VPQ:SPIS (SEQ ID NO: 84120):VGRTPKV (SEQ ID NO: 84982):LKYHY (SEQ ID NO: 84232):VKS:XKXS (SEQ ID NO: 84124), NDEGLEX (SEQ ID NO: 84426):VPT:SPIS (SEQ ID NO: 84120):RIKPHQGQH (SEQ ID NO: 84980):LKYHY (SEQ ID NO: 84232):QHN:KXEXR (SEQ ID NO: 84213), NDEGLEX (SEQ ID NO: 84426):VPT:SPIS (SEQ ID NO: 84120):RIKPHQGQH (SEQ ID NO: 84980):LKYHY (SEQ ID NO: 84232):EHS:QXEXR (SEQ ID NO: 84276), SSVKXQP (SEQ ID NO: 84430):SRV:SPIS (SEQ ID NO: 84120):EYVRKKPKL (SEQ ID NO: 84974):LKYHY (SEQ ID NO: 84232):EEH:LEXAXA (SEQ ID NO: 84400), RNVQXRP (SEQ ID NO: 84427):TQV:SPIS (SEQ ID NO: 84120):EIVRKKPIF (SEQ ID NO: 84973):LKYHY (SEQ ID NO: 84232):EDH:LAXKXE (SEQ ID NO: 84399), KIPKAXX (SEQ ID NO: 84424):VPT:EPIS (SEQ ID NO: 84109):DENEKVV (SEQ ID NO: 84966):KFKYE (SEQ ID NO: 84211):AVS:GXGXR (SEQ ID NO: 84208), GIPEPXX (SEQ ID NO: 84419):VPT:EPIS (SEQ ID NO: 84109):DENKNVV (SEQ ID NO: 84967):KFKYE (SEQ ID NO: 84211):AVS:SXAXR (SEQ ID NO: 84303), SIPKAXX (SEQ ID NO: 84429):VPT:EPIS (SEQ ID NO: 84109):DEYDKVV (SEQ ID NO: 84968):KFKYE (SEQ ID NO: 84211):AVS:GXGXR (SEQ ID NO: 84208), HVTKPTX (SEQ ID NO: 84422):VPT:EPIS (SEQ ID NO: 84109):DDSSNVI (SEQ ID NO: 84965):KFKYE (SEQ ID NO: 84211):AVS:SXGXH (SEQ ID NO: 84304), YVPKPXX (SEQ ID NO: 84433):VPT:EPIS (SEQ ID NO: 84109):DDSSNVI (SEQ ID NO: 84965):KFKYE (SEQ ID NO: 84211):AVS:SXGXH (SEQ ID NO: 84304), TVPKPXX (SEQ ID NO: 84432):VPT:EPIS (SEQ ID NO: 84109):DDSSNVI (SEQ ID NO: 84965):KFKYE (SEQ ID NO: 84211):AVS:AXGXH (SEQ ID NO: 84147), AVPKAXX (SEQ ID NO: 84404):VPT:EPIS (SEQ ID NO: 84109):DSSNNVI (SEQ ID NO: 84972):KFKYE (SEQ ID NO: 84211):AVS:AXGXH (SEQ ID NO: 84147), KVGKAXX (SEQ ID NO: 84425):VPT:EPIS (SEQ ID NO: 84109):DDMGVPT (SEQ ID NO: 84964):KFKYE (SEQ ID NO: 84211):AVS:XGXR (SEQ ID NO: 84123), GSAGPXX (SEQ ID NO: 84420):VPT:EPIS (SEQ ID NO: 84109):NDKQQII (SEQ ID NO: 84979):KFKYE (SEQ ID NO: 84211):AVS:RXGXS (SEQ ID NO: 84291), AAPASXX (SEQ ID NO: 84401):VPT:EPIS (SEQ ID NO: 84109):DAANNVV (SEQ ID NO: 84963):KFKYE (SEQ ID NO: 84211):AVS:AXGXR (SEQ ID NO: 84148), STPPTXX (SEQ ID NO: 84431):VPT:EPIS (SEQ ID NO: 84109):DSANNVV (SEQ ID NO: 84971):KFKYE (SEQ ID NO: 84211):AVS:SXGXR (SEQ ID NO: 84305), HVPKPXX (SEQ ID NO: 84421):VPT:EPIS (SEQ ID NO: 84109):DDSSNVI (SEQ ID NO: 84965):KFKYE (SEQ ID NO: 84211):AVS:SXGXH (SEQ ID NO: 84304), RVPSTXX (SEQ ID NO: 84428):VPT:EPIS (SEQ ID NO: 84109):DNGRVLL (SEQ ID NO: 84970):KFKYE (SEQ ID NO: 84211):AVS:XGXL (SEQ ID NO: 84122), ASAAPXX (SEQ ID NO: 84402):VPT:EPIS (SEQ ID NO: 84109):VGRKPKV (SEQ ID NO: 84981):KFKYE (SEQ ID NO: 84211):AVS:XKXS (SEQ ID NO: 84124), ASASPXX (SEQ ID NO: 84403):VPT:EPIS (SEQ ID NO: 84109):IGKTPKI (SEQ ID NO: 84978):KFKYE (SEQ ID NO: 84211):AVS:XKXS (SEQ ID NO: 84124), ASASPXX (SEQ ID NO: 84403):VPT:EPIS (SEQ ID NO: 84109):VGRTPKV (SEQ ID NO: 84982):KFKYE (SEQ ID NO: 84211):AVS:XKXS (SEQ ID NO: 84124), NDEGLEX (SEQ ID NO: 84426):VPT:EPIS (SEQ ID NO: 84109):RIKPHQGQH (SEQ ID NO: 84980):KFKYE (SEQ ID NO: 84211):AVS:KXEXR (SEQ ID NO: 84213), NDEGLEX (SEQ ID NO: 84426):VPT:EPIS (SEQ ID NO: 84109):RIKPHQGQH (SEQ ID NO: 84980):KFKYE (SEQ ID NO: 84211):AVS:QXEXR (SEQ ID NO: 84276), SSVKXQP (SEQ ID NO: 84430):VPT:EPIS (SEQ ID NO: 84109):EYVRKKPKL (SEQ ID NO: 84974):KFKYE (SEQ ID NO: 84211):AVS:LEXAXA (SEQ ID NO: 84400), RNVQXRP (SEQ ID NO: 84427):VPT:EPIS (SEQ ID NO: 84109):EIVRKKPIF (SEQ ID NO: 84973):KFKYE (SEQ ID NO: 84211):AVS:LAXKXE (SEQ ID NO: 84399), KIPKAXX (SEQ ID NO: 84424):VPT:EPIS (SEQ ID NO: 84109):DENEKVV (SEQ ID NO: 84966):KFKYE (SEQ ID NO: 84211):VVE:GXGXR (SEQ ID NO: 84208), GIPEPXX (SEQ ID NO: 84419):VPE:EPIS (SEQ ID NO: 84109):DENKNVV (SEQ ID NO: 84967):KFKYE (SEQ ID NO: 84211):TVE:SXAXR (SEQ ID NO: 84303), SIPKAXX (SEQ ID NO: 84429):VPT:EPIS (SEQ ID NO: 84109):DEYDKVV (SEQ ID NO: 84968):KFKYE (SEQ ID NO: 84211):VVE:GXGXR (SEQ ID NO: 84208), HVTKPTX (SEQ ID NO: 84422):APT:EPIS (SEQ ID NO: 84109):DDSSNVI (SEQ ID NO: 84965):KFKYE (SEQ ID NO: 84211):VVR:SXGXH (SEQ ID NO: 84304), YVPKPXX (SEQ ID NO: 84433):APT:EPIS (SEQ ID NO: 84109):DDSSNVI (SEQ ID NO: 84965):KFKYE (SEQ ID NO: 84211):VVR:SXGXH (SEQ ID NO: 84304), TVPKPXX (SEQ ID NO: 84432):APT:EPIS (SEQ ID NO: 84109):DDSSNVI (SEQ ID NO: 84965):KFKYE (SEQ ID NO: 84211):VVR:AXGXH (SEQ ID NO: 84147), AVPKAXX (SEQ ID NO: 84404):APT:EPIS (SEQ ID NO: 84109):DSSNNVI (SEQ ID NO: 84972):KFKYE (SEQ ID NO: 84211):VVK:AXGXH (SEQ ID NO: 84147), KVGKAXX (SEQ ID NO: 84425):VPT:EPIS (SEQ ID NO: 84109):DDMGVPT (SEQ ID NO: 84964):KFKYE (SEQ ID NO: 84211):VAE:XGXR (SEQ ID NO: 84123), GSAGPXX (SEQ ID NO: 84420):TPT:EPIS (SEQ ID NO: 84109):NDKQQII (SEQ ID NO: 84979):KFKYE (SEQ ID NO: 84211):VVD:RXGXS (SEQ ID NO: 84291), AAPASXX (SEQ ID NO: 84401):VPA:EPIS (SEQ ID NO: 84109):DAANNVV (SEQ ID NO: 84963):KFKYE (SEQ ID NO: 84211):VVE:AXGXR (SEQ ID NO: 84148), STPPTXX (SEQ ID NO: 84431):VPT:EPIS (SEQ ID NO: 84109):DSANNVV (SEQ ID NO: 84971):KFKYE (SEQ ID NO: 84211):VVE:SXGXR (SEQ ID NO: 84305), HVPKPXX (SEQ ID NO: 84421):APT:EPIS (SEQ ID NO: 84109):DDSSNVI (SEQ ID NO: 84965):KFKYE (SEQ ID NO: 84211):VVR:SXGXH (SEQ ID NO: 84304), RVPSTXX (SEQ ID NO: 84428):APV:EPIS (SEQ ID NO: 84109):DNGRVLL (SEQ ID NO: 84970):KFKYE (SEQ ID NO: 84211):VEE:XGXL (SEQ ID NO: 84122), ASAAPXX (SEQ ID NO: 84402):VPQ:EPIS (SEQ ID NO: 84109):VGRKPKV (SEQ ID NO: 84981):KFKYE (SEQ ID NO: 84211):VRS:XKXS (SEQ ID NO: 84124), ASASPXX (SEQ ID NO: 84403):VSQ:EPIS (SEQ ID NO: 84109):IGKTPKI (SEQ ID NO: 84978):KFKYE (SEQ ID NO: 84211):VKS:XKXS (SEQ ID NO: 84124), ASASPXX (SEQ ID NO: 84403):VPQ:EPIS (SEQ ID NO: 84109):VGRTPKV (SEQ ID NO: 84982):KFKYE (SEQ ID NO: 84211):VKS:XKXS (SEQ ID NO: 84124), NDEGLEX (SEQ ID NO: 84426):VPT:EPIS (SEQ ID NO: 84109):RIKPHQGQH (SEQ ID NO: 84980):KFKYE (SEQ ID NO: 84211):QHN:KXEXR (SEQ ID NO: 84213), NDEGLEX (SEQ ID NO: 84426):VPT:EPIS (SEQ ID NO: 84109):RIKPHQGQH (SEQ ID NO: 84980):KFKYE (SEQ ID NO: 84211):EHS:QXEXR (SEQ ID NO: 84276), SSVKXQP (SEQ ID NO: 84430):SRV:EPIS (SEQ ID NO: 84109):EYVRKKPKL (SEQ ID NO: 84974):KFKYE (SEQ ID NO: 84211):EEH:LEXAXA (SEQ ID NO: 84400), RNVQXRP (SEQ ID NO: 84427):TQV:EPIS (SEQ ID NO: 84109):EIVRKKPIF (SEQ ID NO: 84973):KFKYE (SEQ ID NO: 84211):EDH:LAXKXE (SEQ ID NO: 84399), KIPKAXX (SEQ ID NO: 84424):TPT:SPIN (SEQ ID NO: 84119):DENEKVV (SEQ ID NO: 84966):YGKIP (SEQ ID NO: 84397):VVD:GXGXR (SEQ ID NO: 84208), GIPEPXX (SEQ ID NO: 84419):TPT:SPIN (SEQ ID NO: 84119):DENKNVV (SEQ ID NO: 84967):YGKIP (SEQ ID NO: 84397):VVD:SXAXR (SEQ ID NO: 84303), SIPKAXX (SEQ ID NO: 84429):TPT:SPIN (SEQ ID NO: 84119):DEYDKVV (SEQ ID NO: 84968):YGKIP (SEQ ID NO: 84397):VVD:GXGXR (SEQ ID NO: 84208), HVTKPTX (SEQ ID NO: 84422):TPT:SPIN (SEQ ID NO: 84119):DDSSNVI (SEQ ID NO: 84965):YGKIP (SEQ ID NO: 84397):VVD:SXGXH (SEQ ID NO: 84304), YVPKPXX (SEQ ID NO: 84433):TPT:SPIN (SEQ ID NO: 84119):DDSSNVI (SEQ ID NO: 84965):YGKIP (SEQ ID NO: 84397):VVD:SXGXH (SEQ ID NO: 84304), TVPKPXX (SEQ ID NO: 84432):TPT:SPIN (SEQ ID NO: 84119):DDSSNVI (SEQ ID NO: 84965):YGKIP (SEQ ID NO: 84397):VVD:AXGXH (SEQ ID NO: 84147), AVPKAXX (SEQ ID NO: 84404):TPT:SPIN (SEQ ID NO: 84119):DSSNNVI (SEQ ID NO: 84972):YGKIP (SEQ ID NO: 84397):VVD:AXGXH (SEQ ID NO: 84147), KVGKAXX (SEQ ID NO: 84425):TPT:SPIN (SEQ ID NO: 84119):DDMGVPT (SEQ ID NO: 84964):YGKIP (SEQ ID NO: 84397):VVD:XGXR (SEQ ID NO: 84123), KASKAXX (SEQ ID NO: 84423):TPT:SPIN (SEQ ID NO: 84119):DKGVVTY (SEQ ID NO: 84969):YGKIP (SEQ ID NO: 84397):VVD:EXGXR (SEQ ID NO: 84179), AAPASXX (SEQ ID NO: 84401):TPT:SPIN (SEQ ID NO: 84119):DAANNVV (SEQ ID NO: 84963):YGKIP (SEQ ID NO: 84397):VVD:AXGXR (SEQ ID NO: 84148), STPPTXX (SEQ ID NO: 84431):TPT:SPIN (SEQ ID NO: 84119):DSANNVV (SEQ ID NO: 84971):YGKIP (SEQ ID NO: 84397):VVD:SXGXR (SEQ ID NO: 84305), HVPKPXX (SEQ ID NO: 84421):TPT:SPIN (SEQ ID NO: 84119):DDSSNVI (SEQ ID NO: 84965):YGKIP (SEQ ID NO: 84397):VVD:SXGXH (SEQ ID NO: 84304), RVPSTXX (SEQ ID NO: 84428):TPT:SPIN (SEQ ID NO: 84119):DNGRVLL (SEQ ID NO: 84970):YGKIP (SEQ ID NO: 84397):VVD:XGXL (SEQ ID NO: 84122), ASAAPXX (SEQ ID NO: 84402):TPT:SPIN (SEQ ID NO: 84119):VGRKPKV (SEQ ID NO: 84981):YGKIP (SEQ ID NO: 84397):VVD:XKXS (SEQ ID NO: 84124), ASASPXX (SEQ ID NO: 84403):TPT:SPIN (SEQ ID NO: 84119):IGKTPKI (SEQ ID NO: 84978):YGKIP (SEQ ID NO: 84397):VVD:XKXS (SEQ ID NO: 84124), ASASPXX (SEQ ID NO: 84403):TPT:SPIN (SEQ ID NO: 84119):VGRTPKV (SEQ ID NO: 84982):YGKIP (SEQ ID NO: 84397):VVD:XKXS (SEQ ID NO: 84124), NDEGLEX (SEQ ID NO: 84426):TPT:SPIN (SEQ ID NO: 84119):RIKPHQGQH (SEQ ID NO: 84980):YGKIP (SEQ ID NO: 84397):VVD:KXEXR (SEQ ID NO: 84213), NDEGLEX (SEQ ID NO: 84426):TPT:SPIN (SEQ ID NO: 84119):RIKPHQGQH (SEQ ID NO: 84980):YGKIP (SEQ ID NO: 84397):VVD:QXEXR (SEQ ID NO: 84276), SSVKXQP (SEQ ID NO: 84430):TPT:SPIN (SEQ ID NO: 84119):EYVRKKPKL (SEQ ID NO: 84974):YGKIP (SEQ ID NO: 84397):VVD:LEXAXA (SEQ ID NO: 84400), RNVQXRP (SEQ ID NO: 84427):TPT:SPIN (SEQ ID NO: 84119):EIVRKKPIF (SEQ ID NO: 84973):YGKIP (SEQ ID NO: 84397):VVD:LAXKXE (SEQ ID NO: 84399), KIPKAXX (SEQ ID NO: 84424):VPT:SPIN (SEQ ID NO: 84119):DENEKVV (SEQ ID NO: 84966):YGKIP (SEQ ID NO: 84397):VVE:GXGXR (SEQ ID NO: 84208), GIPEPXX (SEQ ID NO: 84419):VPE:SPIN (SEQ ID NO: 84119):DENKNVV (SEQ ID NO: 84967):YGKIP (SEQ ID NO: 84397):TVE:SXAXR (SEQ ID NO: 84303), SIPKAXX (SEQ ID NO: 84429):VPT:SPIN (SEQ ID NO: 84119):DEYDKVV (SEQ ID NO: 84968):YGKIP (SEQ ID NO: 84397):VVE:GXGXR (SEQ ID NO: 84208), HVTKPTX (SEQ ID NO: 84422):APT:SPIN (SEQ ID NO: 84119):DDSSNVI (SEQ ID NO: 84965):YGKIP (SEQ ID NO: 84397):VVR:SXGXH (SEQ ID NO: 84304), YVPKPXX (SEQ ID NO: 84433):APT:SPIN (SEQ ID NO: 84119):DDSSNVI (SEQ ID NO: 84965):YGKIP (SEQ ID NO: 84397):VVR:SXGXH (SEQ ID NO: 84304), TVPKPXX (SEQ ID NO: 84432):APT:SPIN (SEQ ID NO: 84119):DDSSNVI (SEQ ID NO: 84965):YGKIP (SEQ ID NO: 84397):VVR:AXGXH (SEQ ID NO: 84147), AVPKAXX (SEQ ID NO: 84404):APT:SPIN (SEQ ID NO: 84119):DSSNNVI (SEQ ID NO: 84972):YGKIP (SEQ ID NO: 84397):VVK:AXGXH (SEQ ID NO: 84147), KVGKAXX (SEQ ID NO: 84425):VPT:SPIN (SEQ ID NO: 84119):DDMGVPT (SEQ ID NO: 84964):YGKIP (SEQ ID NO: 84397):VAE:XGXR (SEQ ID NO: 84123), KASKAXX (SEQ ID NO: 84423):VPT:SPIN (SEQ ID NO: 84119):DKGVVTY (SEQ ID NO: 84969):YGKIP (SEQ ID NO: 84397):AVS:EXGXR (SEQ ID NO: 84179), AAPASXX (SEQ ID NO: 84401):VPA:SPIN (SEQ ID NO: 84119):DAANNVV (SEQ ID NO: 84963):YGKIP (SEQ ID NO: 84397):VVE:AXGXR (SEQ ID NO: 84148), STPPTXX (SEQ ID NO: 84431):VPT:SPIN (SEQ ID NO: 84119):DSANNVV (SEQ ID NO: 84971):YGKIP (SEQ ID NO: 84397):VVE:SXGXR (SEQ ID NO: 84305), HVPKPXX (SEQ ID NO: 84421):APT:SPIN (SEQ ID NO: 84119):DDSSNVI (SEQ ID NO: 84965):YGKIP (SEQ ID NO: 84397):VVR:SXGXH (SEQ ID NO: 84304), RVPSTXX (SEQ ID NO: 84428):APV:SPIN (SEQ ID NO: 84119):DNGRVLL (SEQ ID NO: 84970):YGKIP (SEQ ID NO: 84397):VEE:XGXL (SEQ ID NO: 84122), ASAAPXX (SEQ ID NO: 84402):VPQ:SPIN (SEQ ID NO: 84119):VGRKPKV (SEQ ID NO: 84981):YGKIP (SEQ ID NO: 84397):VRS:XKXS (SEQ ID NO: 84124), ASASPXX (SEQ ID NO: 84403):VSQ:SPIN (SEQ ID NO: 84119):IGKTPKI (SEQ ID NO: 84978):YGKIP (SEQ ID NO: 84397):VKS:XKXS (SEQ ID NO: 84124), ASASPXX (SEQ ID NO: 84403):VPQ:SPIN (SEQ ID NO: 84119):VGRTPKV (SEQ ID NO: 84982):YGKIP (SEQ ID NO: 84397):VKS:XKXS (SEQ ID NO: 84124), NDEGLEX (SEQ ID NO: 84426):VPT:SPIN (SEQ ID NO: 84119):RIKPHQGQH (SEQ ID NO: 84980):YGKIP (SEQ ID NO: 84397):QHN:KXEXR (SEQ ID NO: 84213), NDEGLEX (SEQ ID NO: 84426):VPT:SPIN (SEQ ID NO: 84119):RIKPHQGQH (SEQ ID NO: 84980):YGKIP (SEQ ID NO: 84397):EHS:QXEXR (SEQ ID NO: 84276), SSVKXQP (SEQ ID NO: 84430):SRV:SPIN (SEQ ID NO: 84119):EYVRKKPKL (SEQ ID NO: 84974):YGKIP (SEQ ID NO: 84397):EEH:LEXAXA (SEQ ID NO: 84400), RNVQXRP (SEQ ID NO: 84427):TQV:SPIN (SEQ ID NO: 84119):EIVRKKPIF (SEQ ID NO: 84973):YGKIP (SEQ ID NO: 84397):EDH:LAXKXE (SEQ ID NO: 84399), KIPKAXX (SEQ ID NO: 84424):VPA:SPIS (SEQ ID NO: 84120):DENEKVV (SEQ ID NO: 84966):YKQYE (SEQ ID NO: 84398):VVE:GXGXR (SEQ ID NO: 84208), GIPEPXX (SEQ ID NO: 84419):VPA:SPIS (SEQ ID NO: 84120):DENKNVV (SEQ ID NO: 84967):YKQYE (SEQ ID NO: 84398):VVE:SXAXR (SEQ ID NO: 84303), SIPKAXX (SEQ ID NO: 84429):VPA:SPIS (SEQ ID NO: 84120):DEYDKVV (SEQ ID NO: 84968):YKQYE (SEQ ID NO: 84398):VVE:GXGXR (SEQ ID NO: 84208), HVTKPTX (SEQ ID NO: 84422):VPA:SPIS (SEQ ID NO: 84120):DDSSNVI (SEQ ID NO: 84965):YKQYE (SEQ ID NO: 84398):VVE:SXGXH (SEQ ID NO: 84304), YVPKPXX (SEQ ID NO: 84433):VPA:SPIS (SEQ ID NO: 84120):DDSSNVI (SEQ ID NO: 84965):YKQYE (SEQ ID NO: 84398):VVE:SXGXH (SEQ ID NO: 84304), TVPKPXX (SEQ ID NO: 84432):VPA:SPIS (SEQ ID NO: 84120):DDSSNVI (SEQ ID NO: 84965):YKQYE (SEQ ID NO: 84398):VVE:AXGXH (SEQ ID NO: 84147), AVPKAXX (SEQ ID NO: 84404):VPA:SPIS (SEQ ID NO: 84120):DSSNNVI (SEQ ID NO: 84972):YKQYE (SEQ ID NO: 84398):VVE:AXGXH (SEQ ID NO: 84147), KVGKAXX (SEQ ID NO: 84425):VPA:SPIS (SEQ ID NO: 84120):DDMGVPT (SEQ ID NO: 84964):YKQYE (SEQ ID NO: 84398):VVE:XGXR (SEQ ID NO: 84123), KASKAXX (SEQ ID NO: 84423):VPA:SPIS (SEQ ID NO: 84120):DKGVVTY (SEQ ID NO: 84969):YKQYE (SEQ ID NO: 84398):VVE:EXGXR (SEQ ID NO: 84179), GSAGPXX (SEQ ID NO: 84420):VPA:SPIS (SEQ ID NO: 84120):NDKQQII (SEQ ID NO: 84979):YKQYE (SEQ ID NO: 84398):VVE:RXGXS (SEQ ID NO: 84291), STPPTXX (SEQ ID NO: 84431):VPA:SPIS (SEQ ID NO: 84120):DSANNVV (SEQ ID NO: 84971):YKQYE (SEQ ID NO: 84398):VVE:SXGXR (SEQ ID NO: 84305), HVPKPXX (SEQ ID NO: 84421):VPA:SPIS (SEQ ID NO: 84120):DDSSNVI (SEQ ID NO: 84965):YKQYE (SEQ ID NO: 84398):VVE:SXGXH (SEQ ID NO: 84304), RVPSTXX (SEQ ID NO: 84428):VPA:SPIS (SEQ ID NO: 84120):DNGRVLL (SEQ ID NO: 84970):YKQYE (SEQ ID NO: 84398):VVE:XGXL (SEQ ID NO: 84122), ASAAPXX (SEQ ID NO: 84402):VPA:SPIS (SEQ ID NO: 84120):VGRKPKV (SEQ ID NO: 84981):YKQYE (SEQ ID NO: 84398):VVE:XKXS (SEQ ID NO: 84124), ASASPXX (SEQ ID NO: 84403):VPA:SPIS (SEQ ID NO: 84120):IGKTPKI (SEQ ID NO: 84978):YKQYE (SEQ ID NO: 84398):VVE:XKXS (SEQ ID NO: 84124), ASASPXX (SEQ ID NO: 84403):VPA:SPIS (SEQ ID NO: 84120):VGRTPKV (SEQ ID NO: 84982):YKQYE (SEQ ID NO: 84398):VVE:XKXS (SEQ ID NO: 84124), NDEGLEX (SEQ ID NO: 84426):VPA:SPIS (SEQ ID NO: 84120):RIKPHQGQH (SEQ ID NO: 84980):YKQYE (SEQ ID NO: 84398):VVE:KXEXR (SEQ ID NO: 84213), NDEGLEX (SEQ ID NO: 84426):VPA:SPIS (SEQ ID NO: 84120):RIKPHQGQH (SEQ ID NO: 84980):YKQYE (SEQ ID NO: 84398):VVE:QXEXR (SEQ ID NO: 84276), SSVKXQP (SEQ ID NO: 84430):VPA:SPIS (SEQ ID NO: 84120):EYVRKKPKL (SEQ ID NO: 84974):YKQYE (SEQ ID NO: 84398):VVE:LEXAXA (SEQ ID NO: 84400), RNVQXRP (SEQ ID NO: 84427):VPA:SPIS (SEQ ID NO: 84120):EIVRKKPIF (SEQ ID NO: 84973):YKQYE (SEQ ID NO: 84398):VVE:LAXKXE (SEQ ID NO: 84399), KIPKAXX (SEQ ID NO: 84424):VPT:SPIS (SEQ ID NO: 84120):DENEKVV (SEQ ID NO: 84966):YKQYE (SEQ ID NO: 84398):VVE:GXGXR (SEQ ID NO: 84208), GIPEPXX (SEQ ID NO: 84419):VPE:SPIS (SEQ ID NO: 84120):DENKNVV (SEQ ID NO: 84967):YKQYE (SEQ ID NO: 84398):TVE:SXAXR (SEQ ID NO: 84303), SIPKAXX (SEQ ID NO: 84429):VPT:SPIS (SEQ ID NO: 84120):DEYDKVV (SEQ ID NO: 84968):YKQYE (SEQ ID NO: 84398):VVE:GXGXR (SEQ ID NO: 84208), HVTKPTX (SEQ ID NO: 84422):APT:SPIS (SEQ ID NO: 84120):DDSSNVI (SEQ ID NO: 84965):YKQYE (SEQ ID NO: 84398):VVR:SXGXH (SEQ ID NO: 84304), YVPKPXX (SEQ ID NO: 84433):APT:SPIS (SEQ ID NO: 84120):DDSSNVI (SEQ ID NO: 84965):YKQYE (SEQ ID NO: 84398):VVR:SXGXH (SEQ ID NO: 84304), TVPKPXX (SEQ ID NO: 84432):APT:SPIS (SEQ ID NO: 84120):DDSSNVI (SEQ ID NO: 84965):YKQYE (SEQ ID NO: 84398):VVR:AXGXH (SEQ ID NO: 84147), AVPKAXX (SEQ ID NO: 84404):APT:SPIS (SEQ ID NO: 84120):DSSNNVI (SEQ ID NO: 84972):YKQYE (SEQ ID NO: 84398):VVK:AXGXH (SEQ ID NO: 84147), KVGKAXX (SEQ ID NO: 84425):VPT:SPIS (SEQ ID NO: 84120):DDMGVPT (SEQ ID NO: 84964):YKQYE (SEQ ID NO: 84398):VAE:XGXR (SEQ ID NO: 84123), KASKAXX (SEQ ID NO: 84423):VPT:SPIS (SEQ ID NO: 84120):DKGVVTY (SEQ ID NO: 84969):YKQYE (SEQ ID NO: 84398):AVS:EXGXR (SEQ ID NO: 84179), GSAGPXX (SEQ ID NO: 84420):TPT:SPIS (SEQ ID NO: 84120):NDKQQII (SEQ ID NO: 84979):YKQYE (SEQ ID NO: 84398):VVD:RXGXS (SEQ ID NO: 84291), STPPTXX (SEQ ID NO: 84431):VPT:SPIS (SEQ ID NO: 84120):DSANNVV (SEQ ID NO: 84971):YKQYE (SEQ ID NO: 84398):VVE:SXGXR (SEQ ID NO: 84305), HVPKPXX (SEQ ID NO: 84421):APT:SPIS (SEQ ID NO: 84120):DDSSNVI (SEQ ID NO: 84965):YKQYE (SEQ ID NO: 84398):VVR:SXGXH (SEQ ID NO: 84304), RVPSTXX (SEQ ID NO: 84428):APV:SPIS (SEQ ID NO: 84120):DNGRVLL (SEQ ID NO: 84970):YKQYE (SEQ ID NO: 84398):VEE:XGXL (SEQ ID NO: 84122), ASAAPXX (SEQ ID NO: 84402):VPQ:SPIS (SEQ ID NO: 84120):VGRKPKV (SEQ ID NO: 84981):YKQYE (SEQ ID NO: 84398):VRS:XKXS (SEQ ID NO: 84124), ASASPXX (SEQ ID NO: 84403):VSQ:SPIS (SEQ ID NO: 84120):IGKTPKI (SEQ ID NO: 84978):YKQYE (SEQ ID NO: 84398):VKS:XKXS (SEQ ID NO: 84124), ASASPXX (SEQ ID NO: 84403):VPQ:SPIS (SEQ ID NO: 84120):VGRTPKV (SEQ ID NO: 84982):YKQYE (SEQ ID NO: 84398):VKS:XKXS (SEQ ID NO: 84124), NDEGLEX (SEQ ID NO: 84426):VPT:SPIS (SEQ ID NO: 84120):RIKPHQGQH (SEQ ID NO: 84980):YKQYE (SEQ ID NO: 84398):QHN:KXEXR (SEQ ID NO: 84213), NDEGLEX (SEQ ID NO: 84426):VPT:SPIS (SEQ ID NO: 84120):RIKPHQGQH (SEQ ID NO: 84980):YKQYE (SEQ ID NO: 84398):EHS:QXEXR (SEQ ID NO: 84276), SSVKXQP (SEQ ID NO: 84430):SRV:SPIS (SEQ ID NO: 84120):EYVRKKPKL (SEQ ID NO: 84974):YKQYE (SEQ ID NO: 84398):EEH:LEXAXA (SEQ ID NO: 84400), RNVQXRP (SEQ ID NO: 84427):TQV:SPIS (SEQ ID NO: 84120):EIVRKKPIF (SEQ ID NO: 84973):YKQYE (SEQ ID NO: 84398):EDH:LAXKXE (SEQ ID NO: 84399), GIPEPXX (SEQ ID NO: 84419):VPT:SPIS (SEQ ID NO: 84120):DENKNVV (SEQ ID NO: 84967):YKQYE (SEQ ID NO: 84398):VVE:SXAXR (SEQ ID NO: 84303), HVTKPTX (SEQ ID NO: 84422):VPT:SPIS (SEQ ID NO: 84120):DDSSNVI (SEQ ID NO: 84965):YKQYE (SEQ ID NO: 84398):VVE:SXGXH (SEQ ID NO: 84304), YVPKPXX (SEQ ID NO: 84433):VPT:SPIS (SEQ ID NO: 84120):DDSSNVI (SEQ ID NO: 84965):YKQYE (SEQ ID NO: 84398):VVE:SXGXH (SEQ ID NO: 84304), TVPKPXX (SEQ ID NO: 84432):VPT:SPIS (SEQ ID NO: 84120):DDSSNVI (SEQ ID NO: 84965):YKQYE (SEQ ID NO: 84398):VVE:AXGXH (SEQ ID NO: 84147), AVPKAXX (SEQ ID NO: 84404):VPT:SPIS (SEQ ID NO: 84120):DSSNNVI (SEQ ID NO: 84972):YKQYE (SEQ ID NO: 84398):VVE:AXGXH (SEQ ID NO: 84147), KVGKAXX (SEQ ID NO: 84425):VPT:SPIS (SEQ ID NO: 84120):DDMGVPT (SEQ ID NO: 84964):YKQYE (SEQ ID NO: 84398):VVE:XGXR (SEQ ID NO: 84123), KASKAXX (SEQ ID NO: 84423):VPT:SPIS (SEQ ID NO: 84120):DKGVVTY (SEQ ID NO: 84969):YKQYE (SEQ ID NO: 84398):VVE:EXGXR (SEQ ID NO: 84179), GSAGPXX (SEQ ID NO: 84420):VPT:SPIS (SEQ ID NO: 84120):NDKQQII (SEQ ID NO: 84979):YKQYE (SEQ ID NO: 84398):VVE:RXGXS (SEQ ID NO: 84291), AAPASXX (SEQ ID NO: 84401):VPT:SPIS (SEQ ID NO: 84120):DAANNVV (SEQ ID NO: 84963):YKQYE (SEQ ID NO: 84398):VVE:AXGXR (SEQ ID NO: 84148), HVPKPXX (SEQ ID NO: 84421):VPT:SPIS (SEQ ID NO: 84120):DDSSNVI (SEQ ID NO: 84965):YKQYE (SEQ ID NO: 84398):VVE:SXGXH (SEQ ID NO: 84304), RVPSTXX (SEQ ID NO: 84428):VPT:SPIS (SEQ ID NO: 84120):DNGRVLL (SEQ ID NO: 84970):YKQYE (SEQ ID NO: 84398):VVE:XGXL (SEQ ID NO: 84122), ASAAPXX (SEQ ID NO: 84402):VPT:SPIS (SEQ ID NO: 84120):VGRKPKV (SEQ ID NO: 84981):YKQYE (SEQ ID NO: 84398):VVE:XKXS (SEQ ID NO: 84124), ASASPXX (SEQ ID NO: 84403):VPT:SPIS (SEQ ID NO: 84120):IGKTPKI (SEQ ID NO: 84978):YKQYE (SEQ ID NO: 84398):VVE:XKXS (SEQ ID NO: 84124), ASASPXX (SEQ ID NO: 84403):VPT:SPIS (SEQ ID NO: 84120):VGRTPKV (SEQ ID NO: 84982):YKQYE (SEQ ID NO: 84398):VVE:XKXS (SEQ ID NO: 84124), NDEGLEX (SEQ ID NO: 84426):VPT:SPIS (SEQ ID NO: 84120):RIKPHQGQH (SEQ ID NO: 84980):YKQYE (SEQ ID NO: 84398):VVE:KXEXR (SEQ ID NO: 84213), NDEGLEX (SEQ ID NO: 84426):VPT:SPIS (SEQ ID NO: 84120):RIKPHQGQH (SEQ ID NO: 84980):YKQYE (SEQ ID NO: 84398):VVE:QXEXR (SEQ ID NO: 84276), SSVKXQP (SEQ ID NO: 84430):VPT:SPIS (SEQ ID NO: 84120):EYVRKKPKL (SEQ ID NO: 84974):YKQYE (SEQ ID NO: 84398):VVE:LEXAXA (SEQ ID NO: 84400), RNVQXRP (SEQ ID NO: 84427):VPT:SPIS (SEQ ID NO: 84120):EIVRKKPIF (SEQ ID NO: 84973):YKQYE (SEQ ID NO: 84398):VVE:LAXKXE (SEQ ID NO: 84399), AAPASXX (SEQ ID NO: 84401):VPA:SPIS (SEQ ID NO: 84120):DAANNVV (SEQ ID NO: 84963):YKQYE (SEQ ID NO: 84398):VVE:AXGXR (SEQ ID NO: 84148), KIPKAXX (SEQ ID NO: 84424):APV:KPLS (SEQ ID NO: 84112):DENEKVV (SEQ ID NO: 84966):DHHKD (SEQ ID NO: 84149):VEE:GXGXR (SEQ ID NO: 84208), GIPEPXX (SEQ ID NO: 84419):APV:KPLS (SEQ ID NO: 84112):DENKNVV (SEQ ID NO: 84967):DHHKD (SEQ ID NO: 84149):VEE:SXAXR (SEQ ID NO: 84303), SIPKAXX (SEQ ID NO: 84429):APV:KPLS (SEQ ID NO: 84112):DEYDKVV (SEQ ID NO: 84968):DHHKD (SEQ ID NO: 84149):VEE:GXGXR (SEQ ID NO: 84208), HVTKPTX (SEQ ID NO: 84422):APV:KPLS (SEQ ID NO: 84112):DDSSNVI (SEQ ID NO: 84965):DHHKD (SEQ ID NO: 84149):VEE:SXGXH (SEQ ID NO: 84304), YVPKPXX (SEQ ID NO: 84433):APV:KPLS (SEQ ID NO: 84112):DDSSNVI (SEQ ID NO: 84965):DHHKD (SEQ ID NO: 84149):VEE:SXGXH (SEQ ID NO: 84304), TVPKPXX (SEQ ID NO: 84432):APV:KPLS (SEQ ID NO: 84112):DDSSNVI (SEQ ID NO: 84965):DHHKD (SEQ ID NO: 84149):VEE:AXGXH (SEQ ID NO: 84147), AVPKAXX (SEQ ID NO: 84404):APV:KPLS (SEQ ID NO: 84112):DSSNNVI (SEQ ID NO: 84972):DHHKD (SEQ ID NO: 84149):VEE:AXGXH (SEQ ID NO: 84147), KVGKAXX (SEQ ID NO: 84425):APV:KPLS (SEQ ID NO: 84112):DDMGVPT (SEQ ID NO: 84964):DHHKD (SEQ ID NO: 84149):VEE:XGXR (SEQ ID NO: 84123), KASKAXX (SEQ ID NO: 84423):APV:KPLS (SEQ ID NO: 84112):DKGVVTY (SEQ ID NO: 84969):DHHKD (SEQ ID NO: 84149):VEE:EXGXR (SEQ ID NO: 84179), GSAGPXX (SEQ ID NO: 84420):APV:KPLS (SEQ ID NO: 84112):NDKQQII (SEQ ID NO: 84979):DHHKD (SEQ ID NO: 84149):VEE:RXGXS (SEQ ID NO: 84291), AAPASXX (SEQ ID NO: 84401):APV:KPLS (SEQ ID NO: 84112):DAANNVV (SEQ ID NO: 84963):DHHKD (SEQ ID NO: 84149):VEE:AXGXR (SEQ ID NO: 84148), STPPTXX (SEQ ID NO: 84431):APV:KPLS (SEQ ID NO: 84112):DSANNVV (SEQ ID NO: 84971):DHHKD (SEQ ID NO: 84149):VEE:SXGXR (SEQ ID NO: 84305), HVPKPXX (SEQ ID NO: 84421):APV:KPLS (SEQ ID NO: 84112):DDSSNVI (SEQ ID NO: 84965):DHHKD (SEQ ID NO: 84149):VEE:SXGXH (SEQ ID NO: 84304), ASAAPXX (SEQ ID NO: 84402):APV:KPLS (SEQ ID NO: 84112):VGRKPKV (SEQ ID NO: 84981):DHHKD (SEQ ID NO: 84149):VEE:XKXS (SEQ ID NO: 84124), ASASPXX (SEQ ID NO: 84403):APV:KPLS (SEQ ID NO: 84112):IGKTPKI (SEQ ID NO: 84978):DHHKD (SEQ ID NO: 84149):VEE:XKXS (SEQ ID NO: 84124), ASASPXX (SEQ ID NO: 84403):APV:KPLS (SEQ ID NO: 84112):VGRTPKV (SEQ ID NO: 84982):DHHKD (SEQ ID NO: 84149):VEE:XKXS (SEQ ID NO: 84124), NDEGLEX (SEQ ID NO: 84426):APV:KPLS (SEQ ID NO: 84112):RIKPHQGQH (SEQ ID NO: 84980):DHHKD (SEQ ID NO: 84149):VEE:KXEXR (SEQ ID NO: 84213), NDEGLEX (SEQ ID NO: 84426):APV:KPLS (SEQ ID NO: 84112):RIKPHQGQH (SEQ ID NO: 84980):DHHKD (SEQ ID NO: 84149):VEE:QXEXR (SEQ ID NO: 84276), SSVKXQP (SEQ ID NO: 84430):APV:KPLS (SEQ ID NO: 84112):EYVRKKPKL (SEQ ID NO: 84974):DHHKD (SEQ ID NO: 84149):VEE:LEXAXA (SEQ ID NO: 84400), RNVQXRP (SEQ ID NO: 84427):APV:KPLS (SEQ ID NO: 84112):EIVRKKPIF (SEQ ID NO: 84973):DHHKD (SEQ ID NO: 84149):VEE:LAXKXE (SEQ ID NO: 84399), KIPKAXX (SEQ ID NO: 84424):VPT:KPLS (SEQ ID NO: 84112):DENEKVV (SEQ ID NO: 84966):DHHKD (SEQ ID NO: 84149):VVE:GXGXR (SEQ ID NO: 84208), GIPEPXX (SEQ ID NO: 84419):VPE:KPLS (SEQ ID NO: 84112):DENKNVV (SEQ ID NO: 84967):DHHKD (SEQ ID NO: 84149):TVE:SXAXR (SEQ ID NO: 84303), SIPKAXX (SEQ ID NO: 84429):VPT:KPLS (SEQ ID NO: 84112):DEYDKVV (SEQ ID NO: 84968):DHHKD (SEQ ID NO: 84149):VVE:GXGXR (SEQ ID NO: 84208), HVTKPTX (SEQ ID NO: 84422):APT:KPLS (SEQ ID NO: 84112):DDSSNVI (SEQ ID NO: 84965):DHHKD (SEQ ID NO: 84149):VVR:SXGXH (SEQ ID NO: 84304), YVPKPXX (SEQ ID NO: 84433):APT:KPLS (SEQ ID NO: 84112):DDSSNVI (SEQ ID NO: 84965):DHHKD (SEQ ID NO: 84149):VVR:SXGXH (SEQ ID NO: 84304), TVPKPXX (SEQ ID NO: 84432):APT:KPLS (SEQ ID NO: 84112):DDSSNVI (SEQ ID NO: 84965):DHHKD (SEQ ID NO: 84149):VVR:AXGXH (SEQ ID NO: 84147), AVPKAXX (SEQ ID NO: 84404):APT:KPLS (SEQ ID NO: 84112):DSSNNVI (SEQ ID NO: 84972):DHHKD (SEQ ID NO: 84149):VVK:AXGXH (SEQ ID NO: 84147), KVGKAXX (SEQ ID NO: 84425):VPT:KPLS (SEQ ID NO: 84112):DDMGVPT (SEQ ID NO: 84964):DHHKD (SEQ ID NO: 84149):VAE:XGXR (SEQ ID NO: 84123), KASKAXX (SEQ ID NO: 84423):VPT:KPLS (SEQ ID NO: 84112):DKGVVTY (SEQ ID NO: 84969):DHHKD (SEQ ID NO: 84149):AVS:EXGXR (SEQ ID NO: 84179), GSAGPXX (SEQ ID NO: 84420):TPT:KPLS (SEQ ID NO: 84112):NDKQQII (SEQ ID NO: 84979):DHHKD (SEQ ID NO: 84149):VVD:RXGXS (SEQ ID NO: 84291), AAPASXX (SEQ ID NO: 84401):VPA:KPLS (SEQ ID NO: 84112):DAANNVV (SEQ ID NO: 84963):DHHKD (SEQ ID NO: 84149):VVE:AXGXR (SEQ ID NO: 84148), STPPTXX (SEQ ID NO: 84431):VPT:KPLS (SEQ ID NO: 84112):DSANNVV (SEQ ID NO: 84971):DHHKD (SEQ ID NO: 84149):VVE:SXGXR (SEQ ID NO: 84305), HVPKPXX (SEQ ID NO: 84421):APT:KPLS (SEQ ID NO: 84112):DDSSNVI (SEQ ID NO: 84965):DHHKD (SEQ ID NO: 84149):VVR:SXGXH (SEQ ID NO: 84304), ASAAPXX (SEQ ID NO: 84402):VPQ:KPLS (SEQ ID NO: 84112):VGRKPKV (SEQ ID NO: 84981):DHHKD (SEQ ID NO: 84149):VRS:XKXS (SEQ ID NO: 84124), ASASPXX (SEQ ID NO: 84403):VSQ:KPLS (SEQ ID NO: 84112):IGKTPKI (SEQ ID NO: 84978):DHHKD (SEQ ID NO: 84149):VKS:XKXS (SEQ ID NO: 84124), ASASPXX (SEQ ID NO: 84403):VPQ:KPLS (SEQ ID NO: 84112):VGRTPKV (SEQ ID NO: 84982):DHHKD (SEQ ID NO: 84149):VKS:XKXS (SEQ ID NO: 84124), NDEGLEX (SEQ ID NO: 84426):VPT:KPLS (SEQ ID NO: 84112):RIKPHQGQH (SEQ ID NO: 84980):DHHKD (SEQ ID NO: 84149):QHN:KXEXR (SEQ ID NO: 84213), NDEGLEX (SEQ ID NO: 84426):VPT:KPLS (SEQ ID NO: 84112):RIKPHQGQH (SEQ ID NO: 84980):DHHKD (SEQ ID NO: 84149):EHS:QXEXR (SEQ ID NO: 84276), SSVKXQP (SEQ ID NO: 84430):SRV:KPLS (SEQ ID NO: 84112):EYVRKKPKL (SEQ ID NO: 84974):DHHKD (SEQ ID NO: 84149):EEH:LEXAXA (SEQ ID NO: 84400), RNVQXRP (SEQ ID NO: 84427):TQV:KPLS (SEQ ID NO: 84112):EIVRKKPIF (SEQ ID NO: 84973):DHHKD (SEQ ID NO: 84149):EDH:LAXKXE (SEQ ID NO: 84399), KIPKAXX (SEQ ID NO: 84424):VPQ:EPLP (SEQ ID NO: 84110):DENEKVV (SEQ ID NO: 84966):EQLSN (SEQ ID NO: 84178):VRS:GXGXR (SEQ ID NO: 84208), GIPEPXX (SEQ ID NO: 84419):VPQ:EPLP (SEQ ID NO: 84110):DENKNVV (SEQ ID NO: 84967):EQLSN (SEQ ID NO: 84178):VRS:SXAXR (SEQ ID NO: 84303), SIPKAXX (SEQ ID NO: 84429):VPQ:EPLP (SEQ ID NO: 84110):DEYDKVV (SEQ ID NO: 84968):EQLSN (SEQ ID NO: 84178):VRS:GXGXR (SEQ ID NO: 84208), HVTKPTX (SEQ ID NO: 84422):VPQ:EPLP (SEQ ID NO: 84110):DDSSNVI (SEQ ID NO: 84965):EQLSN (SEQ ID NO: 84178):VRS:SXGXH (SEQ ID NO: 84304), YVPKPXX (SEQ ID NO: 84433):VPQ:EPLP (SEQ ID NO: 84110):DDSSNVI (SEQ ID NO: 84965):EQLSN (SEQ ID NO: 84178):VRS:SXGXH (SEQ ID NO: 84304), TVPKPXX (SEQ ID NO: 84432):VPQ:EPLP (SEQ ID NO: 84110):DDSSNVI (SEQ ID NO: 84965):EQLSN (SEQ ID NO: 84178):VRS:AXGXH (SEQ ID NO: 84147), AVPKAXX (SEQ ID NO: 84404):VPQ:EPLP (SEQ ID NO: 84110):DSSNNVI (SEQ ID NO: 84972):EQLSN (SEQ ID NO: 84178):VRS:AXGXH (SEQ ID NO: 84147), KVGKAXX (SEQ ID NO: 84425):VPQ:EPLP (SEQ ID NO: 84110):DDMGVPT (SEQ ID NO: 84964):EQLSN (SEQ ID NO: 84178):VRS:XGXR (SEQ ID NO: 84123), KASKAXX (SEQ ID NO: 84423):VPQ:EPLP (SEQ ID NO: 84110):DKGVVTY (SEQ ID NO: 84969):EQLSN (SEQ ID NO: 84178):VRS:EXGXR (SEQ ID NO: 84179), GSAGPXX (SEQ ID NO: 84420):VPQ:EPLP (SEQ ID NO: 84110):NDKQQII (SEQ ID NO: 84979):EQLSN (SEQ ID NO: 84178):VRS:RXGXS (SEQ ID NO: 84291), AAPASXX (SEQ ID NO: 84401):VPQ:EPLP (SEQ ID NO: 84110):DAANNVV (SEQ ID NO: 84963):EQLSN (SEQ ID NO: 84178):VRS:AXGXR (SEQ ID NO: 84148), STPPTXX (SEQ ID NO: 84431):VPQ:EPLP (SEQ ID NO: 84110):DSANNVV (SEQ ID NO: 84971):EQLSN (SEQ ID NO: 84178):VRS:SXGXR (SEQ ID NO: 84305), HVPKPXX (SEQ ID NO: 84421):VPQ:EPLP (SEQ ID NO: 84110):DDSSNVI (SEQ ID NO: 84965):EQLSN (SEQ ID NO: 84178):VRS:SXGXH (SEQ ID NO: 84304), RVPSTXX (SEQ ID NO: 84428):VPQ:EPLP (SEQ ID NO: 84110):DNGRVLL (SEQ ID NO: 84970):EQLSN (SEQ ID NO: 84178):VRS:XGXL (SEQ ID NO: 84122), ASASPXX (SEQ ID NO: 84403):VPQ:EPLP (SEQ ID NO: 84110):IGKTPKI (SEQ ID NO: 84978):EQLSN (SEQ ID NO: 84178):VRS:XKXS (SEQ ID NO: 84124), ASASPXX (SEQ ID NO: 84403):VPQ:EPLP (SEQ ID NO: 84110):VGRTPKV (SEQ ID NO: 84982):EQLSN (SEQ ID NO: 84178):VRS:XKXS (SEQ ID NO: 84124), NDEGLEX (SEQ ID NO: 84426):VPQ:EPLP (SEQ ID NO: 84110):RIKPHQGQH (SEQ ID NO: 84980):EQLSN (SEQ ID NO: 84178):VRS:KXEXR (SEQ ID NO: 84213), NDEGLEX (SEQ ID NO: 84426):VPQ:EPLP (SEQ ID NO: 84110):RIKPHQGQH (SEQ ID NO: 84980):EQLSN (SEQ ID NO: 84178):VRS:QXEXR (SEQ ID NO: 84276), SSVKXQP (SEQ ID NO: 84430):VPQ:EPLP (SEQ ID NO: 84110):EYVRKKPKL (SEQ ID NO: 84974):EQLSN (SEQ ID NO: 84178):VRS:LEXAXA (SEQ ID NO: 84400), RNVQXRP (SEQ ID NO: 84427):VPQ:EPLP (SEQ ID NO: 84110):EIVRKKPIF (SEQ ID NO: 84973):EQLSN (SEQ ID NO: 84178):VRS:LAXKXE (SEQ ID NO: 84399), KIPKAXX (SEQ ID NO: 84424):VPT:EPLP (SEQ ID NO: 84110):DENEKVV (SEQ ID NO: 84966):EQLSN (SEQ ID NO: 84178):VVE:GXGXR (SEQ ID NO: 84208), GIPEPXX (SEQ ID NO: 84419):VPE:EPLP (SEQ ID NO: 84110):DENKNVV (SEQ ID NO: 84967):EQLSN (SEQ ID NO: 84178):TVE:SXAXR (SEQ ID NO: 84303), SIPKAXX (SEQ ID NO: 84429):VPT:EPLP (SEQ ID NO: 84110):DEYDKVV (SEQ ID NO: 84968):EQLSN (SEQ ID NO: 84178):VVE:GXGXR (SEQ ID NO: 84208), HVTKPTX (SEQ ID NO: 84422):APT:EPLP (SEQ ID NO: 84110):DDSSNVI (SEQ ID NO: 84965):EQLSN (SEQ ID NO: 84178):VVR:SXGXH (SEQ ID NO: 84304), YVPKPXX (SEQ ID NO: 84433):APT:EPLP (SEQ ID NO: 84110):DDSSNVI (SEQ ID NO: 84965):EQLSN (SEQ ID NO: 84178):VVR:SXGXH (SEQ ID NO: 84304), TVPKPXX (SEQ ID NO: 84432):APT:EPLP (SEQ ID NO: 84110):DDSSNVI (SEQ ID NO: 84965):EQLSN (SEQ ID NO: 84178):VVR:AXGXH (SEQ ID NO: 84147), AVPKAXX (SEQ ID NO: 84404):APT:EPLP (SEQ ID NO: 84110):DSSNNVI (SEQ ID NO: 84972):EQLSN (SEQ ID NO: 84178):VVK:AXGXH (SEQ ID NO: 84147), KVGKAXX (SEQ ID NO: 84425):VPT:EPLP (SEQ ID NO: 84110):DDMGVPT (SEQ ID NO: 84964):EQLSN (SEQ ID NO: 84178):VAE:XGXR (SEQ ID NO: 84123), KASKAXX (SEQ ID NO: 84423):VPT:EPLP (SEQ ID NO: 84110):DKGVVTY (SEQ ID NO: 84969):EQLSN (SEQ ID NO: 84178):AVS:EXGXR (SEQ ID NO: 84179), GSAGPXX (SEQ ID NO: 84420):TPT:EPLP (SEQ ID NO: 84110):NDKQQII (SEQ ID NO: 84979):EQLSN (SEQ ID NO: 84178):VVD:RXGXS (SEQ ID NO: 84291), AAPASXX (SEQ ID NO: 84401):VPA:EPLP (SEQ ID NO: 84110):DAANNVV (SEQ ID NO: 84963):EQLSN (SEQ ID NO: 84178):VVE:AXGXR (SEQ ID NO: 84148), STPPTXX (SEQ ID NO: 84431):VPT:EPLP (SEQ ID NO: 84110):DSANNVV (SEQ ID NO: 84971):EQLSN (SEQ ID NO: 84178):VVE:SXGXR (SEQ ID NO: 84305), HVPKPXX (SEQ ID NO: 84421):APT:EPLP (SEQ ID NO: 84110):DDSSNVI (SEQ ID NO: 84965):EQLSN (SEQ ID NO: 84178):VVR:SXGXH (SEQ ID NO: 84304), RVPSTXX (SEQ ID NO: 84428):APV:EPLP (SEQ ID NO: 84110):DNGRVLL (SEQ ID NO: 84970):EQLSN (SEQ ID NO: 84178):VEE:XGXL (SEQ ID NO: 84122), ASASPXX (SEQ ID NO: 84403):VSQ:EPLP (SEQ ID NO: 84110):IGKTPKI (SEQ ID NO: 84978):EQLSN (SEQ ID NO: 84178):VKS:XKXS (SEQ ID NO: 84124), ASASPXX (SEQ ID NO: 84403):VPQ:EPLP (SEQ ID NO: 84110):VGRTPKV (SEQ ID NO: 84982):EQLSN (SEQ ID NO: 84178):VKS:XKXS (SEQ ID NO: 84124), NDEGLEX (SEQ ID NO: 84426):VPT:EPLP (SEQ ID NO: 84110):RIKPHQGQH (SEQ ID NO: 84980):EQLSN (SEQ ID NO: 84178):QHN:KXEXR (SEQ ID NO: 84213), NDEGLEX (SEQ ID NO: 84426):VPT:EPLP (SEQ ID NO: 84110):RIKPHQGQH (SEQ ID NO: 84980):EQLSN (SEQ ID NO: 84178):EHS:QXEXR (SEQ ID NO: 84276), SSVKXQP (SEQ ID NO: 84430):SRV:EPLP (SEQ ID NO: 84110):EYVRKKPKL (SEQ ID NO: 84974):EQLSN (SEQ ID NO: 84178):EEH:LEXAXA (SEQ ID NO: 84400), RNVQXRP (SEQ ID NO: 84427):TQV:EPLP (SEQ ID NO: 84110):EIVRKKPIF (SEQ ID NO: 84973):EQLSN (SEQ ID NO: 84178):EDH:LAXKXE (SEQ ID NO: 84399), KIPKAXX (SEQ ID NO: 84424):VSQ:EPLT (SEQ ID NO: 84111):DENEKVV (SEQ ID NO: 84966):EQLSN (SEQ ID NO: 84178):VKS:GXGXR (SEQ ID NO: 84208), GIPEPXX (SEQ ID NO: 84419):VSQ:EPLT (SEQ ID NO: 84111):DENKNVV (SEQ ID NO: 84967):EQLSN (SEQ ID NO: 84178):VKS:SXAXR (SEQ ID NO: 84303), SIPKAXX (SEQ ID NO: 84429):VSQ:EPLT (SEQ ID NO: 84111):DEYDKVV (SEQ ID NO: 84968):EQLSN (SEQ ID NO: 84178):VKS:GXGXR (SEQ ID NO: 84208), HVTKPTX (SEQ ID NO: 84422):VSQ:EPLT (SEQ ID NO: 84111):DDSSNVI (SEQ ID NO: 84965):EQLSN (SEQ ID NO: 84178):VKS:SXGXH (SEQ ID NO: 84304), YVPKPXX (SEQ ID NO: 84433):VSQ:EPLT (SEQ ID NO: 84111):DDSSNVI (SEQ ID NO: 84965):EQLSN (SEQ ID NO: 84178):VKS:SXGXH (SEQ ID NO: 84304), TVPKPXX (SEQ ID NO: 84432):VSQ:EPLT (SEQ ID NO: 84111):DDSSNVI (SEQ ID NO: 84965):EQLSN (SEQ ID NO: 84178):VKS:AXGXH (SEQ ID NO: 84147), AVPKAXX (SEQ ID NO: 84404):VSQ:EPLT (SEQ ID NO: 84111):DSSNNVI (SEQ ID NO: 84972):EQLSN (SEQ ID NO: 84178):VKS:AXGXH (SEQ ID NO: 84147), KVGKAXX (SEQ ID NO: 84425):VSQ:EPLT (SEQ ID NO: 84111):DDMGVPT (SEQ ID NO: 84964):EQLSN (SEQ ID NO: 84178):VKS:XGXR (SEQ ID NO: 84123), KASKAXX (SEQ ID NO: 84423):VSQ:EPLT (SEQ ID NO: 84111):DKGVVTY (SEQ ID NO: 84969):EQLSN (SEQ ID NO: 84178):VKS:EXGXR (SEQ ID NO: 84179), GSAGPXX (SEQ ID NO: 84420):VSQ:EPLT (SEQ ID NO: 84111):NDKQQII (SEQ ID NO: 84979):EQLSN (SEQ ID NO: 84178):VKS:RXGXS (SEQ ID NO: 84291), AAPASXX (SEQ ID NO: 84401):VSQ:EPLT (SEQ ID NO: 84111):DAANNVV (SEQ ID NO: 84963):EQLSN (SEQ ID NO: 84178):VKS:AXGXR (SEQ ID NO: 84148), STPPTXX (SEQ ID NO: 84431):VSQ:EPLT (SEQ ID NO: 84111):DSANNVV (SEQ ID NO: 84971):EQLSN (SEQ ID NO: 84178):VKS:SXGXR (SEQ ID NO: 84305), HVPKPXX (SEQ ID NO: 84421):VSQ:EPLT (SEQ ID NO: 84111):DDSSNVI (SEQ ID NO: 84965):EQLSN (SEQ ID NO: 84178):VKS:SXGXH (SEQ ID NO: 84304), RVPSTXX (SEQ ID NO: 84428):VSQ:EPLT (SEQ ID NO: 84111):DNGRVLL (SEQ ID NO: 84970):EQLSN (SEQ ID NO: 84178):VKS:XGXL (SEQ ID NO: 84122), ASAAPXX (SEQ ID NO: 84402):VSQ:EPLT (SEQ ID NO: 84111):VGRKPKV (SEQ ID NO: 84981):EQLSN (SEQ ID NO: 84178):VKS:XKXS (SEQ ID NO: 84124), ASASPXX (SEQ ID NO: 84403):VSQ:EPLT (SEQ ID NO: 84111):VGRTPKV (SEQ ID NO: 84982):EQLSN (SEQ ID NO: 84178):VKS:XKXS (SEQ ID NO: 84124), NDEGLEX (SEQ ID NO: 84426):VSQ:EPLT (SEQ ID NO: 84111):RIKPHQGQH (SEQ ID NO: 84980):EQLSN (SEQ ID NO: 84178):VKS:KXEXR (SEQ ID NO: 84213), NDEGLEX (SEQ ID NO: 84426):VSQ:EPLT (SEQ ID NO: 84111):RIKPHQGQH (SEQ ID NO: 84980):EQLSN (SEQ ID NO: 84178):VKS:QXEXR (SEQ ID NO: 84276), SSVKXQP (SEQ ID NO: 84430):VSQ:EPLT (SEQ ID NO: 84111):EYVRKKPKL (SEQ ID NO: 84974):EQLSN (SEQ ID NO: 84178):VKS:LEXAXA (SEQ ID NO: 84400), RNVQXRP (SEQ ID NO: 84427):VSQ:EPLT (SEQ ID NO: 84111):EIVRKKPIF (SEQ ID NO: 84973):EQLSN (SEQ ID NO: 84178):VKS:LAXKXE (SEQ ID NO: 84399), KIPKAXX (SEQ ID NO: 84424):VPT:EPLT (SEQ ID NO: 84111):DENEKVV (SEQ ID NO: 84966):EQLSN (SEQ ID NO: 84178):VVE:GXGXR (SEQ ID NO: 84208), GIPEPXX (SEQ ID NO: 84419):VPE:EPLT (SEQ ID NO: 84111):DENKNVV (SEQ ID NO: 84967):EQLSN (SEQ ID NO: 84178):TVE:SXAXR (SEQ ID NO: 84303), SIPKAXX (SEQ ID NO: 84429):VPT:EPLT (SEQ ID NO: 84111):DEYDKVV (SEQ ID NO: 84968):EQLSN (SEQ ID NO: 84178):VVE:GXGXR (SEQ ID NO: 84208), HVTKPTX (SEQ ID NO: 84422):APT:EPLT (SEQ ID NO: 84111):DDSSNVI (SEQ ID NO: 84965):EQLSN (SEQ ID NO: 84178):VVR:SXGXH (SEQ ID NO: 84304), YVPKPXX (SEQ ID NO: 84433):APT:EPLT (SEQ ID NO: 84111):DDSSNVI (SEQ ID NO: 84965):EQLSN (SEQ ID NO: 84178):VVR:SXGXH (SEQ ID NO: 84304), TVPKPXX (SEQ ID NO: 84432):APT:EPLT (SEQ ID NO: 84111):DDSSNVI (SEQ ID NO: 84965):EQLSN (SEQ ID NO: 84178):VVR:AXGXH (SEQ ID NO: 84147), AVPKAXX (SEQ ID NO: 84404):APT:EPLT (SEQ ID NO: 84111):DSSNNVI (SEQ ID NO: 84972):EQLSN (SEQ ID NO: 84178):VVK:AXGXH (SEQ ID NO: 84147), KVGKAXX (SEQ ID NO: 84425):VPT:EPLT (SEQ ID NO: 84111):DDMGVPT (SEQ ID NO: 84964):EQLSN (SEQ ID NO: 84178):VAE:XGXR (SEQ ID NO: 84123), KASKAXX (SEQ ID NO: 84423):VPT:EPLT (SEQ ID NO: 84111):DKGVVTY (SEQ ID NO: 84969):EQLSN (SEQ ID NO: 84178):AVS:EXGXR (SEQ ID NO: 84179), GSAGPXX (SEQ ID NO: 84420):TPT:EPLT (SEQ ID NO: 84111):NDKQQII (SEQ ID NO: 84979):EQLSN (SEQ ID NO: 84178):VVD:RXGXS (SEQ ID NO: 84291), AAPASXX (SEQ ID NO: 84401):VPA:EPLT (SEQ ID NO: 84111):DAANNVV (SEQ ID NO: 84963):EQLSN (SEQ ID NO: 84178):VVE:AXGXR (SEQ ID NO: 84148), STPPTXX (SEQ ID NO: 84431):VPT:EPLT (SEQ ID NO: 84111):DSANNVV (SEQ ID NO: 84971):EQLSN (SEQ ID NO: 84178):VVE:SXGXR (SEQ ID NO: 84305), HVPKPXX (SEQ ID NO: 84421):APT:EPLT (SEQ ID NO: 84111):DDSSNVI (SEQ ID NO: 84965):EQLSN (SEQ ID NO: 84178):VVR:SXGXH (SEQ ID NO: 84304), RVPSTXX (SEQ ID NO: 84428):APV:EPLT (SEQ ID NO: 84111):DNGRVLL (SEQ ID NO: 84970):EQLSN (SEQ ID NO: 84178):VEE:XGXL (SEQ ID NO: 84122), ASAAPXX (SEQ ID NO: 84402):VPQ:EPLT (SEQ ID NO: 84111):VGRKPKV (SEQ ID NO: 84981):EQLSN (SEQ ID NO: 84178):VRS:XKXS (SEQ ID NO: 84124), ASASPXX (SEQ ID NO: 84403):VPQ:EPLT (SEQ ID NO: 84111):VGRTPKV (SEQ ID NO: 84982):EQLSN (SEQ ID NO: 84178):VKS:XKXS (SEQ ID NO: 84124), NDEGLEX (SEQ ID NO: 84426):VPT:EPLT (SEQ ID NO: 84111):RIKPHQGQH (SEQ ID NO: 84980):EQLSN (SEQ ID NO: 84178):QHN:KXEXR (SEQ ID NO: 84213), NDEGLEX (SEQ ID NO: 84426):VPT:EPLT (SEQ ID NO: 84111):RIKPHQGQH (SEQ ID NO: 84980):EQLSN (SEQ ID NO: 84178):EHS:QXEXR (SEQ ID NO: 84276), SSVKXQP (SEQ ID NO: 84430):SRV:EPLT (SEQ ID NO: 84111):EYVRKKPKL (SEQ ID NO: 84974):EQLSN (SEQ ID NO: 84178):EEH:LEXAXA (SEQ ID NO: 84400), RNVQXRP (SEQ ID NO: 84427):TQV:EPLT (SEQ ID NO: 84111):EIVRKKPIF (SEQ ID NO: 84973):EQLSN (SEQ ID NO: 84178):EDH:LAXKXE (SEQ ID NO: 84399), KIPKAXX (SEQ ID NO: 84424):VPQ:EPLT (SEQ ID NO: 84111):DENEKVV (SEQ ID NO: 84966):EQLSN (SEQ ID NO: 84178):VKS:GXGXR (SEQ ID NO: 84208), GIPEPXX (SEQ ID NO: 84419):VPQ:EPLT (SEQ ID NO: 84111):DENKNVV (SEQ ID NO: 84967):EQLSN (SEQ ID NO: 84178):VKS:SXAXR (SEQ ID NO: 84303), SIPKAXX (SEQ ID NO: 84429):VPQ:EPLT (SEQ ID NO: 84111):DEYDKVV (SEQ ID NO: 84968):EQLSN (SEQ ID NO: 84178):VKS:GXGXR (SEQ ID NO: 84208), HVTKPTX (SEQ ID NO: 84422):VPQ:EPLT (SEQ ID NO: 84111):DDSSNVI (SEQ ID NO: 84965):EQLSN (SEQ ID NO: 84178):VKS:SXGXH (SEQ ID NO: 84304), YVPKPXX (SEQ ID NO: 84433):VPQ:EPLT (SEQ ID NO: 84111):DDSSNVI (SEQ ID NO: 84965):EQLSN (SEQ ID NO: 84178):VKS:SXGXH (SEQ ID NO: 84304), TVPKPXX (SEQ ID NO: 84432):VPQ:EPLT (SEQ ID NO: 84111):DDSSNVI (SEQ ID NO: 84965):EQLSN (SEQ ID NO: 84178):VKS:AXGXH (SEQ ID NO: 84147), AVPKAXX (SEQ ID NO: 84404):VPQ:EPLT (SEQ ID NO: 84111):DSSNNVI (SEQ ID NO: 84972):EQLSN (SEQ ID NO: 84178):VKS:AXGXH (SEQ ID NO: 84147), KVGKAXX (SEQ ID NO: 84425):VPQ:EPLT (SEQ ID NO: 84111):DDMGVPT (SEQ ID NO: 84964):EQLSN (SEQ ID NO: 84178):VKS:XGXR (SEQ ID NO: 84123), KASKAXX (SEQ ID NO: 84423):VPQ:EPLT (SEQ ID NO: 84111):DKGVVTY (SEQ ID NO: 84969):EQLSN (SEQ ID NO: 84178):VKS:EXGXR (SEQ ID NO: 84179), GSAGPXX (SEQ ID NO: 84420):VPQ:EPLT (SEQ ID NO: 84111):NDKQQII (SEQ ID NO: 84979):EQLSN (SEQ ID NO: 84178):VKS:RXGXS (SEQ ID NO: 84291), AAPASXX (SEQ ID NO: 84401):VPQ:EPLT (SEQ ID NO: 84111):DAANNVV (SEQ ID NO: 84963):EQLSN (SEQ ID NO: 84178):VKS:AXGXR (SEQ ID NO: 84148), STPPTXX (SEQ ID NO: 84431):VPQ:EPLT (SEQ ID NO: 84111):DSANNVV (SEQ ID NO: 84971):EQLSN (SEQ ID NO: 84178):VKS:SXGXR (SEQ ID NO: 84305), HVPKPXX (SEQ ID NO: 84421):VPQ:EPLT (SEQ ID NO: 84111):DDSSNVI (SEQ ID NO: 84965):EQLSN (SEQ ID NO: 84178):VKS:SXGXH (SEQ ID NO: 84304), RVPSTXX (SEQ ID NO: 84428):VPQ:EPLT (SEQ ID NO: 84111):DNGRVLL (SEQ ID NO: 84970):EQLSN (SEQ ID NO: 84178):VKS:XGXL (SEQ ID NO: 84122), ASAAPXX (SEQ ID NO: 84402):VPQ:EPLT (SEQ ID NO: 84111):VGRKPKV (SEQ ID NO: 84981):EQLSN (SEQ ID NO: 84178):VKS:XKXS (SEQ ID NO: 84124), ASASPXX (SEQ ID NO: 84403):VPQ:EPLT (SEQ ID NO: 84111):IGKTPKI (SEQ ID NO: 84978):EQLSN (SEQ ID NO: 84178):VKS:XKXS (SEQ ID NO: 84124), NDEGLEX (SEQ ID NO: 84426):VPQ:EPLT (SEQ ID NO: 84111):RIKPHQGQH (SEQ ID NO: 84980):EQLSN (SEQ ID NO: 84178):VKS:KXEXR (SEQ ID NO: 84213), NDEGLEX (SEQ ID NO: 84426):VPQ:EPLT (SEQ ID NO: 84111):RIKPHQGQH (SEQ ID NO: 84980):EQLSN (SEQ ID NO: 84178):VKS:QXEXR (SEQ ID NO: 84276), SSVKXQP (SEQ ID NO: 84430):VPQ:EPLT (SEQ ID NO: 84111):EYVRKKPKL (SEQ ID NO: 84974):EQLSN (SEQ ID NO: 84178):VKS:LEXAXA (SEQ ID NO: 84400), RNVQXRP (SEQ ID NO: 84427):VPQ:EPLT (SEQ ID NO: 84111):EIVRKKPIF (SEQ ID NO: 84973):EQLSN (SEQ ID NO: 84178):VKS:LAXKXE (SEQ ID NO: 84399), ASASPXX (SEQ ID NO: 84403):VSQ:EPLT (SEQ ID NO: 84111):IGKTPKI (SEQ ID NO: 84978):EQLSN (SEQ ID NO: 84178):VKS:XKXS (SEQ ID NO: 84124), KIPKAXX (SEQ ID NO: 84424):VPT:SNIT (SEQ ID NO: 84118):DENEKVV (SEQ ID NO: 84966):IGEMS (SEQ ID NO: 84209):QHN:GXGXR (SEQ ID NO: 84208), GIPEPXX (SEQ ID NO: 84419):VPT:SNIT (SEQ ID NO: 84118):DENKNVV (SEQ ID NO: 84967):IGEMS (SEQ ID NO: 84209):QHN:SXAXR (SEQ ID NO: 84303), SIPKAXX (SEQ ID NO: 84429):VPT:SNIT (SEQ ID NO: 84118):DEYDKVV (SEQ ID NO: 84968):IGEMS (SEQ ID NO: 84209):QHN:GXGXR (SEQ ID NO: 84208), HVTKPTX (SEQ ID NO: 84422):VPT:SNIT (SEQ ID NO: 84118):DDSSNVI (SEQ ID NO: 84965):IGEMS (SEQ ID NO: 84209):QHN:SXGXH (SEQ ID NO: 84304), YVPKPXX (SEQ ID NO: 84433):VPT:SNIT (SEQ ID NO: 84118):DDSSNVI (SEQ ID NO: 84965):IGEMS (SEQ ID NO: 84209):QHN:SXGXH (SEQ ID NO: 84304), TVPKPXX (SEQ ID NO: 84432):VPT:SNIT (SEQ ID NO: 84118):DDSSNVI (SEQ ID NO: 84965):IGEMS (SEQ ID NO: 84209):QHN:AXGXH (SEQ ID NO: 84147), AVPKAXX (SEQ ID NO: 84404):VPT:SNIT (SEQ ID NO: 84118):DSSNNVI (SEQ ID NO: 84972):IGEMS (SEQ ID NO: 84209):QHN:AXGXH (SEQ ID NO: 84147), KVGKAXX (SEQ ID NO: 84425):VPT:SNIT (SEQ ID NO: 84118):DDMGVPT (SEQ ID NO: 84964):IGEMS (SEQ ID NO: 84209):QHN:XGXR (SEQ ID NO: 84123), KASKAXX (SEQ ID NO: 84423):VPT:SNIT (SEQ ID NO: 84118):DKGVVTY (SEQ ID NO: 84969):IGEMS (SEQ ID NO: 84209):QHN:EXGXR (SEQ ID NO: 84179), GSAGPXX (SEQ ID NO: 84420):VPT:SNIT (SEQ ID NO: 84118):NDKQQII (SEQ ID NO: 84979):IGEMS (SEQ ID NO: 84209):QHN:RXGXS (SEQ ID NO: 84291), AAPASXX (SEQ ID NO: 84401):VPT:SNIT (SEQ ID NO: 84118):DAANNVV (SEQ ID NO: 84963):IGEMS (SEQ ID NO: 84209):QHN:AXGXR (SEQ ID NO: 84148), STPPTXX (SEQ ID NO: 84431):VPT:SNIT (SEQ ID NO: 84118):DSANNVV (SEQ ID NO: 84971):IGEMS (SEQ ID NO: 84209):QHN:SXGXR (SEQ ID NO: 84305), HVPKPXX (SEQ ID NO: 84421):VPT:SNIT (SEQ ID NO: 84118):DDSSNVI (SEQ ID NO: 84965):IGEMS (SEQ ID NO: 84209):QHN:SXGXH (SEQ ID NO: 84304), RVPSTXX (SEQ ID NO: 84428):VPT:SNIT (SEQ ID NO: 84118):DNGRVLL (SEQ ID NO: 84970):IGEMS (SEQ ID NO: 84209):QHN:XGXL (SEQ ID NO: 84122), ASAAPXX (SEQ ID NO: 84402):VPT:SNIT (SEQ ID NO: 84118):VGRKPKV (SEQ ID NO: 84981):IGEMS (SEQ ID NO: 84209):QHN:XKXS (SEQ ID NO: 84124), ASASPXX (SEQ ID NO: 84403):VPT:SNIT (SEQ ID NO: 84118):IGKTPKI (SEQ ID NO: 84978):IGEMS (SEQ ID NO: 84209):QHN:XKXS (SEQ ID NO: 84124), ASASPXX (SEQ ID NO: 84403):VPT:SNIT (SEQ ID NO: 84118):VGRTPKV (SEQ ID NO: 84982):IGEMS (SEQ ID NO: 84209):QHN:XKXS (SEQ ID NO: 84124), NDEGLEX (SEQ ID NO: 84426):VPT:SNIT (SEQ ID NO: 84118):RIKPHQGQH (SEQ ID NO: 84980):IGEMS (SEQ ID NO: 84209):QHN:QXEXR (SEQ ID NO: 84276), NDEGLEX (SEQ ID NO: 84426):VPT:SNIT (SEQ ID NO: 84118):RIKPHQGQH (SEQ ID NO: 84980):IGEMS (SEQ ID NO: 84209):QHN:KXEXR (SEQ ID NO: 84213), SSVKXQP (SEQ ID NO: 84430):VPT:SNIT (SEQ ID NO: 84118):EYVRKKPKL (SEQ ID NO: 84974):IGEMS (SEQ ID NO: 84209):QHN:LEXAXA (SEQ ID NO: 84400), RNVQXRP (SEQ ID NO: 84427):VPT:SNIT (SEQ ID NO: 84118):EIVRKKPIF (SEQ ID NO: 84973):IGEMS (SEQ ID NO: 84209):QHN:LAXKXE (SEQ ID NO: 84399), KIPKAXX (SEQ ID NO: 84424):VPT:SNIT (SEQ ID NO: 84118):DENEKVV (SEQ ID NO: 84966):IGEMS (SEQ ID NO: 84209):VVE:GXGXR (SEQ ID NO: 84208), GIPEPXX (SEQ ID NO: 84419):VPE:SNIT (SEQ ID NO: 84118):DENKNVV (SEQ ID NO: 84967):IGEMS (SEQ ID NO: 84209):TVE:SXAXR (SEQ ID NO: 84303), SIPKAXX (SEQ ID NO: 84429):VPT:SNIT (SEQ ID NO: 84118):DEYDKVV (SEQ ID NO: 84968):IGEMS (SEQ ID NO: 84209):VVE:GXGXR (SEQ ID NO: 84208), HVTKPTX (SEQ ID NO: 84422):APT:SNIT (SEQ ID NO: 84118):DDSSNVI (SEQ ID NO: 84965):IGEMS (SEQ ID NO: 84209):VVR:SXGXH (SEQ ID NO: 84304), YVPKPXX (SEQ ID NO: 84433):APT:SNIT (SEQ ID NO: 84118):DDSSNVI (SEQ ID NO: 84965):IGEMS (SEQ ID NO: 84209):VVR:SXGXH (SEQ ID NO: 84304), TVPKPXX (SEQ ID NO: 84432):APT:SNIT (SEQ ID NO: 84118):DDSSNVI (SEQ ID NO: 84965):IGEMS (SEQ ID NO: 84209):VVR:AXGXH (SEQ ID NO: 84147), AVPKAXX (SEQ ID NO: 84404):APT:SNIT (SEQ ID NO: 84118):DSSNNVI (SEQ ID NO: 84972):IGEMS (SEQ ID NO: 84209):VVK:AXGXH (SEQ ID NO: 84147), KVGKAXX (SEQ ID NO: 84425):VPT:SNIT (SEQ ID NO: 84118):DDMGVPT (SEQ ID NO: 84964):IGEMS (SEQ ID NO: 84209):VAE:XGXR (SEQ ID NO: 84123), KASKAXX (SEQ ID NO: 84423):VPT:SNIT (SEQ ID NO: 84118):DKGVVTY (SEQ ID NO: 84969):IGEMS (SEQ ID NO: 84209):AVS:EXGXR (SEQ ID NO: 84179), GSAGPXX (SEQ ID NO: 84420):TPT:SNIT (SEQ ID NO: 84118):NDKQQII (SEQ ID NO: 84979):IGEMS (SEQ ID NO: 84209):VVD:RXGXS (SEQ ID NO: 84291), AAPASXX (SEQ ID NO: 84401):VPA:SNIT (SEQ ID NO: 84118):DAANNVV (SEQ ID NO: 84963):IGEMS (SEQ ID NO: 84209):VVE:AXGXR (SEQ ID NO: 84148), STPPTXX (SEQ ID NO: 84431):VPT:SNIT (SEQ ID NO: 84118):DSANNVV (SEQ ID NO: 84971):IGEMS (SEQ ID NO: 84209):VVE:SXGXR (SEQ ID NO: 84305), HVPKPXX (SEQ ID NO: 84421):APT:SNIT (SEQ ID NO: 84118):DDSSNVI (SEQ ID NO: 84965):IGEMS (SEQ ID NO: 84209):VVR:SXGXH (SEQ ID NO: 84304), RVPSTXX (SEQ ID NO: 84428):APV:SNIT (SEQ ID NO: 84118):DNGRVLL (SEQ ID NO: 84970):IGEMS (SEQ ID NO: 84209):VEE:XGXL (SEQ ID NO: 84122), ASAAPXX (SEQ ID NO: 84402):VPQ:SNIT (SEQ ID NO: 84118):VGRKPKV (SEQ ID NO: 84981):IGEMS (SEQ ID NO: 84209):VRS:XKXS (SEQ ID NO: 84124), ASASPXX (SEQ ID NO: 84403):VSQ:SNIT (SEQ ID NO: 84118):IGKTPKI (SEQ ID NO: 84978):IGEMS (SEQ ID NO: 84209):VKS:XKXS (SEQ ID NO: 84124), ASASPXX (SEQ ID NO: 84403):VPQ:SNIT (SEQ ID NO: 84118):VGRTPKV (SEQ ID NO: 84982):IGEMS (SEQ ID NO: 84209):VKS:XKXS (SEQ ID NO: 84124), NDEGLEX (SEQ ID NO: 84426):VPT:SNIT (SEQ ID NO: 84118):RIKPHQGQH (SEQ ID NO: 84980):IGEMS (SEQ ID NO: 84209):EHS:QXEXR (SEQ ID NO: 84276), SSVKXQP (SEQ ID NO: 84430):SRV:SNIT (SEQ ID NO: 84118):EYVRKKPKL (SEQ ID NO: 84974):IGEMS (SEQ ID NO: 84209):EEH:LEXAXA (SEQ ID NO: 84400), RNVQXRP (SEQ ID NO: 84427):TQV:SNIT (SEQ ID NO: 84118):EIVRKKPIF (SEQ ID NO: 84973):IGEMS (SEQ ID NO: 84209):EDH:LAXKXE (SEQ ID NO: 84399), KIPKAXX (SEQ ID NO: 84424):VPT:SNIT (SEQ ID NO: 84118):DENEKVV (SEQ ID NO: 84966):LGEMS (SEQ ID NO: 84228):EHS:GXGXR (SEQ ID NO: 84208), GIPEPXX (SEQ ID NO: 84419):VPT:SNIT (SEQ ID NO: 84118):DENKNVV (SEQ ID NO: 84967):LGEMS (SEQ ID NO: 84228):EHS:SXAXR (SEQ ID NO: 84303), SIPKAXX (SEQ ID NO: 84429):VPT:SNIT (SEQ ID NO: 84118):DEYDKVV (SEQ ID NO: 84968):LGEMS (SEQ ID NO: 84228):EHS:GXGXR (SEQ ID NO: 84208), HVTKPTX (SEQ ID NO: 84422):VPT:SNIT (SEQ ID NO: 84118):DDSSNVI (SEQ ID NO: 84965):LGEMS (SEQ ID NO: 84228):EHS:SXGXH (SEQ ID NO: 84304), YVPKPXX (SEQ ID NO: 84433):VPT:SNIT (SEQ ID NO: 84118):DDSSNVI (SEQ ID NO: 84965):LGEMS (SEQ ID NO: 84228):EHS:SXGXH (SEQ ID NO: 84304), TVPKPXX (SEQ ID NO: 84432):VPT:SNIT (SEQ ID NO: 84118):DDSSNVI (SEQ ID NO: 84965):LGEMS (SEQ ID NO: 84228):EHS:AXGXH (SEQ ID NO: 84147), AVPKAXX (SEQ ID NO: 84404):VPT:SNIT (SEQ ID NO: 84118):DSSNNVI (SEQ ID NO: 84972):LGEMS (SEQ ID NO: 84228):EHS:AXGXH (SEQ ID NO: 84147), KVGKAXX (SEQ ID NO: 84425):VPT:SNIT (SEQ ID NO: 84118):DDMGVPT (SEQ ID NO: 84964):LGEMS (SEQ ID NO: 84228):EHS:XGXR (SEQ ID NO: 84123), KASKAXX (SEQ ID NO: 84423):VPT:SNIT (SEQ ID NO: 84118):DKGVVTY (SEQ ID NO: 84969):LGEMS (SEQ ID NO: 84228):EHS:EXGXR (SEQ ID NO: 84179), GSAGPXX (SEQ ID NO: 84420):VPT:SNIT (SEQ ID NO: 84118):NDKQQII (SEQ ID NO: 84979):LGEMS (SEQ ID NO: 84228):EHS:RXGXS (SEQ ID NO: 84291), AAPASXX (SEQ ID NO: 84401):VPT:SNIT (SEQ ID NO: 84118):DAANNVV (SEQ ID NO: 84963):LGEMS (SEQ ID NO: 84228):EHS:AXGXR (SEQ ID NO: 84148), STPPTXX (SEQ ID NO: 84431):VPT:SNIT (SEQ ID NO: 84118):DSANNVV (SEQ ID NO: 84971):LGEMS (SEQ ID NO: 84228):EHS:SXGXR (SEQ ID NO: 84305), HVPKPXX (SEQ ID NO: 84421):VPT:SNIT (SEQ ID NO: 84118):DDSSNVI (SEQ ID NO: 84965):LGEMS (SEQ ID NO: 84228):EHS:SXGXH (SEQ ID NO: 84304), RVPSTXX (SEQ ID NO: 84428):VPT:SNIT (SEQ ID NO: 84118):DNGRVLL (SEQ ID NO: 84970):LGEMS (SEQ ID NO: 84228):EHS:XGXL (SEQ ID NO: 84122), ASAAPXX (SEQ ID NO: 84402):VPT:SNIT (SEQ ID NO: 84118):VGRKPKV (SEQ ID NO: 84981):LGEMS (SEQ ID NO: 84228):EHS:XKXS (SEQ ID NO: 84124), ASASPXX (SEQ ID NO: 84403):VPT:SNIT (SEQ ID NO: 84118):IGKTPKI (SEQ ID NO: 84978):LGEMS (SEQ ID NO: 84228):EHS:XKXS (SEQ ID NO: 84124), ASASPXX (SEQ ID NO: 84403):VPT:SNIT (SEQ ID NO: 84118):VGRTPKV (SEQ ID NO: 84982):LGEMS (SEQ ID NO: 84228):EHS:XKXS (SEQ ID NO: 84124), NDEGLEX (SEQ ID NO: 84426):VPT:SNIT (SEQ ID NO: 84118):RIKPHQGQH (SEQ ID NO: 84980):LGEMS (SEQ ID NO: 84228):EHS:KXEXR (SEQ ID NO: 84213), SSVKXQP (SEQ ID NO: 84430):VPT:SNIT (SEQ ID NO: 84118):EYVRKKPKL (SEQ ID NO: 84974):LGEMS (SEQ ID NO: 84228):EHS:LEXAXA (SEQ ID NO: 84400), RNVQXRP (SEQ ID NO: 84427):VPT:SNIT (SEQ ID NO: 84118):EIVRKKPIF (SEQ ID NO: 84973):LGEMS (SEQ ID NO: 84228):EHS:LAXKXE (SEQ ID NO: 84399), KIPKAXX (SEQ ID NO: 84424):VPT:SNIT (SEQ ID NO: 84118):DENEKVV (SEQ ID NO: 84966):LGEMS (SEQ ID NO: 84228):VVE:GXGXR (SEQ ID NO: 84208), GIPEPXX (SEQ ID NO: 84419):VPE:SNIT (SEQ ID NO: 84118):DENKNVV (SEQ ID NO: 84967):LGEMS (SEQ ID NO: 84228):TVE:SXAXR (SEQ ID NO: 84303), SIPKAXX (SEQ ID NO: 84429):VPT:SNIT (SEQ ID NO: 84118):DEYDKVV (SEQ ID NO: 84968):LGEMS (SEQ ID NO: 84228):VVE:GXGXR (SEQ ID NO: 84208), HVTKPTX (SEQ ID NO: 84422):APT:SNIT (SEQ ID NO: 84118):DDSSNVI (SEQ ID NO: 84965):LGEMS (SEQ ID NO: 84228):VVR:SXGXH (SEQ ID NO: 84304), YVPKPXX (SEQ ID NO: 84433):APT:SNIT (SEQ ID NO: 84118):DDSSNVI (SEQ ID NO: 84965):LGEMS (SEQ ID NO: 84228):VVR:SXGXH (SEQ ID NO: 84304), TVPKPXX (SEQ ID NO: 84432):APT:SNIT (SEQ ID NO: 84118):DDSSNVI (SEQ ID NO: 84965):LGEMS (SEQ ID NO: 84228):VVR:AXGXH (SEQ ID NO: 84147), AVPKAXX (SEQ ID NO: 84404):APT:SNIT (SEQ ID NO: 84118):DSSNNVI (SEQ ID NO: 84972):LGEMS (SEQ ID NO: 84228):VVK:AXGXH (SEQ ID NO: 84147), KVGKAXX (SEQ ID NO: 84425):VPT:SNIT (SEQ ID NO: 84118):DDMGVPT (SEQ ID NO: 84964):LGEMS (SEQ ID NO: 84228):VAE:XGXR (SEQ ID NO: 84123), KASKAXX (SEQ ID NO: 84423):VPT:SNIT (SEQ ID NO: 84118):DKGVVTY (SEQ ID NO: 84969):LGEMS (SEQ ID NO: 84228):AVS:EXGXR (SEQ ID NO: 84179), GSAGPXX (SEQ ID NO: 84420):TPT:SNIT (SEQ ID NO: 84118):NDKQQII (SEQ ID NO: 84979):LGEMS (SEQ ID NO: 84228):VVD:RXGXS (SEQ ID NO: 84291), AAPASXX (SEQ ID NO: 84401):VPA:SNIT (SEQ ID NO: 84118):DAANNVV (SEQ ID NO: 84963):LGEMS (SEQ ID NO: 84228):VVE:AXGXR (SEQ ID NO: 84148), STPPTXX (SEQ ID NO: 84431):VPT:SNIT (SEQ ID NO: 84118):DSANNVV (SEQ ID NO: 84971):LGEMS (SEQ ID NO: 84228):VVE:SXGXR (SEQ ID NO: 84305), HVPKPXX (SEQ ID NO: 84421):APT:SNIT (SEQ ID NO: 84118):DDSSNVI (SEQ ID NO: 84965):LGEMS (SEQ ID NO: 84228):VVR:SXGXH (SEQ ID NO: 84304), RVPSTXX (SEQ ID NO: 84428):APV:SNIT (SEQ ID NO: 84118):DNGRVLL (SEQ ID NO: 84970):LGEMS (SEQ ID NO: 84228):VEE:XGXL (SEQ ID NO: 84122), ASAAPXX (SEQ ID NO: 84402):VPQ:SNIT (SEQ ID NO: 84118):VGRKPKV (SEQ ID NO: 84981):LGEMS (SEQ ID NO: 84228):VRS:XKXS (SEQ ID NO: 84124), ASASPXX (SEQ ID NO: 84403):VSQ:SNIT (SEQ ID NO: 84118):IGKTPKI (SEQ ID NO: 84978):LGEMS (SEQ ID NO: 84228):VKS:XKXS (SEQ ID NO: 84124), ASASPXX (SEQ ID NO: 84403):VPQ:SNIT (SEQ ID NO: 84118):VGRTPKV (SEQ ID NO: 84982):LGEMS (SEQ ID NO: 84228):VKS:XKXS (SEQ ID NO: 84124), NDEGLEX (SEQ ID NO: 84426):VPT:SNIT (SEQ ID NO: 84118):RIKPHQGQH (SEQ ID NO: 84980):LGEMS (SEQ ID NO: 84228):QHN:KXEXR (SEQ ID NO: 84213), SSVKXQP (SEQ ID NO: 84430):SRV:SNIT (SEQ ID NO: 84118):EYVRKKPKL (SEQ ID NO: 84974):LGEMS (SEQ ID NO: 84228):EEH:LEXAXA (SEQ ID NO: 84400), RNVQXRP (SEQ ID NO: 84427):TQV:SNIT (SEQ ID NO: 84118):EIVRKKPIF (SEQ ID NO: 84973):LGEMS (SEQ ID NO: 84228):EDH:LAXKXE (SEQ ID NO: 84399), KIPKAXX (SEQ ID NO: 84424):SRV:RSVK (SEQ ID NO: 84115):DENEKVV (SEQ ID NO: 84966):KEVQV (SEQ ID NO: 84210):EEH:GXGXR (SEQ ID NO: 84208), GIPEPXX (SEQ ID NO: 84419):SRV:RSVK (SEQ ID NO: 84115):DENKNVV (SEQ ID NO: 84967):KEVQV (SEQ ID NO: 84210):EEH:SXAXR (SEQ ID NO: 84303), SIPKAXX (SEQ ID NO: 84429):SRV:RSVK (SEQ ID NO: 84115):DEYDKVV (SEQ ID NO: 84968):KEVQV (SEQ ID NO: 84210):EEH:GXGXR (SEQ ID NO: 84208), HVTKPTX (SEQ ID NO: 84422):SRV:RSVK (SEQ ID NO: 84115):DDSSNVI (SEQ ID NO: 84965):KEVQV (SEQ ID NO: 84210):EEH:SXGXH (SEQ ID NO: 84304), YVPKPXX (SEQ ID NO: 84433):SRV:RSVK (SEQ ID NO: 84115):DDSSNVI (SEQ ID NO: 84965):KEVQV (SEQ ID NO: 84210):EEH:SXGXH (SEQ ID NO: 84304), TVPKPXX (SEQ ID NO: 84432):SRV:RSVK (SEQ ID NO: 84115):DDSSNVI (SEQ ID NO: 84965):KEVQV (SEQ ID NO: 84210):EEH:AXGXH (SEQ ID NO: 84147), AVPKAXX (SEQ ID NO: 84404):SRV:RSVK (SEQ ID NO: 84115):DSSNNVI (SEQ ID NO: 84972):KEVQV (SEQ ID NO: 84210):EEH:AXGXH (SEQ ID NO: 84147), KVGKAXX (SEQ ID NO: 84425):SRV:RSVK (SEQ ID NO: 84115):DDMGVPT (SEQ ID NO: 84964):KEVQV (SEQ ID NO: 84210):EEH:XGXR (SEQ ID NO: 84123), KASKAXX (SEQ ID NO: 84423):SRV:RSVK (SEQ ID NO: 84115):DKGVVTY (SEQ ID NO: 84969):KEVQV (SEQ ID NO: 84210):EEH:EXGXR (SEQ ID NO: 84179), GSAGPXX (SEQ ID NO: 84420):SRV:RSVK (SEQ ID NO: 84115):NDKQQII (SEQ ID NO: 84979):KEVQV (SEQ ID NO: 84210):EEH:RXGXS (SEQ ID NO: 84291), AAPASXX (SEQ ID NO: 84401):SRV:RSVK (SEQ ID NO: 84115):DAANNVV (SEQ ID NO: 84963):KEVQV (SEQ ID NO: 84210):EEH:AXGXR (SEQ ID NO: 84148), STPPTXX (SEQ ID NO: 84431):SRV:RSVK (SEQ ID NO: 84115):DSANNVV (SEQ ID NO: 84971):KEVQV (SEQ ID NO: 84210):EEH:SXGXR (SEQ ID NO: 84305), HVPKPXX (SEQ ID NO: 84421):SRV:RSVK (SEQ ID NO: 84115):DDSSNVI (SEQ ID NO: 84965):KEVQV (SEQ ID NO: 84210):EEH:SXGXH (SEQ ID NO: 84304), RVPSTXX (SEQ ID NO: 84428):SRV:RSVK (SEQ ID NO: 84115):DNGRVLL (SEQ ID NO: 84970):KEVQV (SEQ ID NO: 84210):EEH:XGXL (SEQ ID NO: 84122), ASAAPXX (SEQ ID NO: 84402):SRV:RSVK (SEQ ID NO: 84115):VGRKPKV (SEQ ID NO: 84981):KEVQV (SEQ ID NO: 84210):EEH:XKXS (SEQ ID NO: 84124), ASASPXX (SEQ ID NO: 84403):SRV:RSVK (SEQ ID NO: 84115):IGKTPKI (SEQ ID NO: 84978):KEVQV (SEQ ID NO: 84210):EEH:XKXS (SEQ ID NO: 84124), ASASPXX (SEQ ID NO: 84403):SRV:RSVK (SEQ ID NO: 84115):VGRTPKV (SEQ ID NO: 84982):KEVQV (SEQ ID NO: 84210):EEH:XKXS (SEQ ID NO: 84124), NDEGLEX (SEQ ID NO: 84426):SRV:RSVK (SEQ ID NO: 84115):RIKPHQGQH (SEQ ID NO: 84980):KEVQV (SEQ ID NO: 84210):EEH:KXEXR (SEQ ID NO: 84213), NDEGLEX (SEQ ID NO: 84426):SRV:RSVK (SEQ ID NO: 84115):RIKPHQGQH (SEQ ID NO: 84980):KEVQV (SEQ ID NO: 84210):EEH:QXEXR (SEQ ID NO: 84276), RNVQXRP (SEQ ID NO: 84427):SRV:RSVK (SEQ ID NO: 84115):EIVRKKPIF (SEQ ID NO: 84973):KEVQV (SEQ ID NO: 84210):EEH:LAXKXE (SEQ ID NO: 84399), KIPKAXX (SEQ ID NO: 84424):VPT:RSVK (SEQ ID NO: 84115):DENEKVV (SEQ ID NO: 84966):KEVQV (SEQ ID NO: 84210):VVE:GXGXR (SEQ ID NO: 84208), GIPEPXX (SEQ ID NO: 84419):VPE:RSVK (SEQ ID NO: 84115):DENKNVV (SEQ ID NO: 84967):KEVQV (SEQ ID NO: 84210):TVE:SXAXR (SEQ ID NO: 84303), SIPKAXX (SEQ ID NO: 84429):VPT:RSVK (SEQ ID NO: 84115):DEYDKVV (SEQ ID NO: 84968):KEVQV (SEQ ID NO: 84210):VVE:GXGXR (SEQ ID NO: 84208), HVTKPTX (SEQ ID NO: 84422):APT:RSVK (SEQ ID NO: 84115):DDSSNVI (SEQ ID NO: 84965):KEVQV (SEQ ID NO: 84210):VVR:SXGXH (SEQ ID NO: 84304), YVPKPXX (SEQ ID NO: 84433):APT:RSVK (SEQ ID NO: 84115):DDSSNVI (SEQ ID NO: 84965):KEVQV (SEQ ID NO: 84210):VVR:SXGXH (SEQ ID NO: 84304), TVPKPXX (SEQ ID NO: 84432):APT:RSVK (SEQ ID NO: 84115):DDSSNVI (SEQ ID NO: 84965):KEVQV (SEQ ID NO: 84210):VVR:AXGXH (SEQ ID NO: 84147), AVPKAXX (SEQ ID NO: 84404):APT:RSVK (SEQ ID NO: 84115):DSSNNVI (SEQ ID NO: 84972):KEVQV (SEQ ID NO: 84210):VVK:AXGXH (SEQ ID NO: 84147), KVGKAXX (SEQ ID NO: 84425):VPT:RSVK (SEQ ID NO: 84115):DDMGVPT (SEQ ID NO: 84964):KEVQV (SEQ ID NO: 84210):VAE:XGXR (SEQ ID NO: 84123), KASKAXX (SEQ ID NO: 84423):VPT:RSVK (SEQ ID NO: 84115):DKGVVTY (SEQ ID NO: 84969):KEVQV (SEQ ID NO: 84210):AVS:EXGXR (SEQ ID NO: 84179), GSAGPXX (SEQ ID NO: 84420):TPT:RSVK (SEQ ID NO: 84115):NDKQQII (SEQ ID NO: 84979):KEVQV (SEQ ID NO: 84210):VVD:RXGXS (SEQ ID NO: 84291), AAPASXX (SEQ ID NO: 84401):VPA:RSVK (SEQ ID NO: 84115):DAANNVV (SEQ ID NO: 84963):KEVQV (SEQ ID NO: 84210):VVE:AXGXR (SEQ ID NO: 84148), STPPTXX (SEQ ID NO: 84431):VPT:RSVK (SEQ ID NO: 84115):DSANNVV (SEQ ID NO: 84971):KEVQV (SEQ ID NO: 84210):VVE:SXGXR (SEQ ID NO: 84305), HVPKPXX (SEQ ID NO: 84421):APT:RSVK (SEQ ID NO: 84115):DDSSNVI (SEQ ID NO: 84965):KEVQV (SEQ ID NO: 84210):VVR:SXGXH (SEQ ID NO: 84304), RVPSTXX (SEQ ID NO: 84428):APV:RSVK (SEQ ID NO: 84115):DNGRVLL (SEQ ID NO: 84970):KEVQV (SEQ ID NO: 84210):VEE:XGXL (SEQ ID NO: 84122), ASAAPXX (SEQ ID NO: 84402):VPQ:RSVK (SEQ ID NO: 84115):VGRKPKV (SEQ ID NO: 84981):KEVQV (SEQ ID NO: 84210):VRS:XKXS (SEQ ID NO: 84124), ASASPXX (SEQ ID NO: 84403):VSQ:RSVK (SEQ ID NO: 84115):IGKTPKI (SEQ ID NO: 84978):KEVQV (SEQ ID NO: 84210):VKS:XKXS (SEQ ID NO: 84124), ASASPXX (SEQ ID NO: 84403):VPQ:RSVK (SEQ ID NO: 84115):VGRTPKV (SEQ ID NO: 84982):KEVQV (SEQ ID NO: 84210):VKS:XKXS (SEQ ID NO: 84124), NDEGLEX (SEQ ID NO: 84426):VPT:RSVK (SEQ ID NO: 84115):RIKPHQGQH (SEQ ID NO: 84980):KEVQV (SEQ ID NO: 84210):QHN:KXEXR (SEQ ID NO: 84213), NDEGLEX (SEQ ID NO: 84426):VPT:RSVK (SEQ ID NO: 84115):RIKPHQGQH (SEQ ID NO: 84980):KEVQV (SEQ ID NO: 84210):EHS:QXEXR (SEQ ID NO: 84276), RNVQXRP (SEQ ID NO: 84427):TQV:RSVK (SEQ ID NO: 84115):EIVRKKPIF (SEQ ID NO: 84973):KEVQV (SEQ ID NO: 84210):EDH:LAXKXE (SEQ ID NO: 84399), KIPKAXX (SEQ ID NO: 84424):TQV:RPVQ (SEQ ID NO: 84114):DENEKVV (SEQ ID NO: 84966):KKATV (SEQ ID NO: 84212):EDH:GXGXR (SEQ ID NO: 84208), GIPEPXX (SEQ ID NO: 84419):TQV:RPVQ (SEQ ID NO: 84114):DENKNVV (SEQ ID NO: 84967):KKATV (SEQ ID NO: 84212):EDH:SXAXR (SEQ ID NO: 84303), SIPKAXX (SEQ ID NO: 84429):TQV:RPVQ (SEQ ID NO: 84114):DEYDKVV (SEQ ID NO: 84968):KKATV (SEQ ID NO: 84212):EDH:GXGXR (SEQ ID NO: 84208), HVTKPTX (SEQ ID NO: 84422):TQV:RPVQ (SEQ ID NO: 84114):DDSSNVI (SEQ ID NO: 84965):KKATV (SEQ ID NO: 84212):EDH:SXGXH (SEQ ID NO: 84304), YVPKPXX (SEQ ID NO: 84433):TQV:RPVQ (SEQ ID NO: 84114):DDSSNVI (SEQ ID NO: 84965):KKATV (SEQ ID NO: 84212):EDH:SXGXH (SEQ ID NO: 84304), TVPKPXX (SEQ ID NO: 84432):TQV:RPVQ (SEQ ID NO: 84114):DDSSNVI (SEQ ID NO: 84965):KKATV (SEQ ID NO: 84212):EDH:AXGXH (SEQ ID NO: 84147), AVPKAXX (SEQ ID NO: 84404):TQV:RPVQ (SEQ ID NO: 84114):DSSNNVI (SEQ ID NO: 84972):KKATV (SEQ ID NO: 84212):EDH:AXGXH (SEQ ID NO: 84147), KVGKAXX (SEQ ID NO: 84425):TQV:RPVQ (SEQ ID NO: 84114):DDMGVPT (SEQ ID NO: 84964):KKATV (SEQ ID NO: 84212):EDH:XGXR (SEQ ID NO: 84123), KASKAXX (SEQ ID NO: 84423):TQV:RPVQ (SEQ ID NO: 84114):DKGVVTY (SEQ ID NO: 84969):KKATV (SEQ ID NO: 84212):EDH:EXGXR (SEQ ID NO: 84179), GSAGPXX (SEQ ID NO: 84420):TQV:RPVQ (SEQ ID NO: 84114):NDKQQII (SEQ ID NO: 84979):KKATV (SEQ ID NO: 84212):EDH:RXGXS (SEQ ID NO: 84291), AAPASXX (SEQ ID NO: 84401):TQV:RPVQ (SEQ ID NO: 84114):DAANNVV (SEQ ID NO: 84963):KKATV (SEQ ID NO: 84212):EDH:AXGXR (SEQ ID NO: 84148), STPPTXX (SEQ ID NO: 84431):TQV:RPVQ (SEQ ID NO: 84114):DSANNVV (SEQ ID NO: 84971):KKATV (SEQ ID NO: 84212):EDH:SXGXR (SEQ ID NO: 84305), HVPKPXX (SEQ ID NO: 84421):TQV:RPVQ (SEQ ID NO: 84114):DDSSNVI (SEQ ID NO: 84965):KKATV (SEQ ID NO: 84212):EDH:SXGXH (SEQ ID NO: 84304), RVPSTXX (SEQ ID NO: 84428):TQV:RPVQ (SEQ ID NO: 84114):DNGRVLL (SEQ ID NO: 84970):KKATV (SEQ ID NO: 84212):EDH:XGXL (SEQ ID NO: 84122), ASAAPXX (SEQ ID NO: 84402):TQV:RPVQ (SEQ ID NO: 84114):VGRKPKV (SEQ ID NO: 84981):KKATV (SEQ ID NO: 84212):EDH:XKXS (SEQ ID NO: 84124), ASASPXX (SEQ ID NO: 84403):TQV:RPVQ (SEQ ID NO: 84114):IGKTPKI (SEQ ID NO: 84978):KKATV (SEQ ID NO: 84212):EDH:XKXS (SEQ ID NO: 84124), ASASPXX (SEQ ID NO: 84403):TQV:RPVQ (SEQ ID NO: 84114):VGRTPKV (SEQ ID NO: 84982):KKATV (SEQ ID NO: 84212):EDH:XKXS (SEQ ID NO: 84124), NDEGLEX (SEQ ID NO: 84426):TQV:RPVQ (SEQ ID NO: 84114):RIKPHQGQH (SEQ ID NO: 84980):KKATV (SEQ ID NO: 84212):EDH:KXEXR (SEQ ID NO: 84213), NDEGLEX (SEQ ID NO: 84426):TQV:RPVQ (SEQ ID NO: 84114):RIKPHQGQH (SEQ ID NO: 84980):KKATV (SEQ ID NO: 84212):EDH:QXEXR (SEQ ID NO: 84276), SSVKXQP (SEQ ID NO: 84430):TQV:RPVQ (SEQ ID NO: 84114):EYVRKKPKL (SEQ ID NO: 84974):KKATV (SEQ ID NO: 84212):EDH:LEXAXA (SEQ ID NO: 84400), KIPKAXX (SEQ ID NO: 84424):VPT:RPVQ (SEQ ID NO: 84114):DENEKVV (SEQ ID NO: 84966):KKATV (SEQ ID NO: 84212):VVE:GXGXR (SEQ ID NO: 84208), GIPEPXX (SEQ ID NO: 84419):VPE:RPVQ (SEQ ID NO: 84114):DENKNVV (SEQ ID NO: 84967):KKATV (SEQ ID NO: 84212):TVE:SXAXR (SEQ ID NO: 84303), SIPKAXX (SEQ ID NO: 84429):VPT:RPVQ (SEQ ID NO: 84114):DEYDKVV (SEQ ID NO: 84968):KKATV (SEQ ID NO: 84212):VVE:GXGXR (SEQ ID NO: 84208), HVTKPTX (SEQ ID NO: 84422):APT:RPVQ (SEQ ID NO: 84114):DDSSNVI (SEQ ID NO: 84965):KKATV (SEQ ID NO: 84212):VVR:SXGXH (SEQ ID NO: 84304), YVPKPXX (SEQ ID NO: 84433):APT:RPVQ (SEQ ID NO: 84114):DDSSNVI (SEQ ID NO: 84965):KKATV (SEQ ID NO: 84212):VVR:SXGXH (SEQ ID NO: 84304), TVPKPXX (SEQ ID NO: 84432):APT:RPVQ (SEQ ID NO: 84114):DDSSNVI (SEQ ID NO: 84965):KKATV (SEQ ID NO: 84212):VVR:AXGXH (SEQ ID NO: 84147), AVPKAXX (SEQ ID NO: 84404):APT:RPVQ (SEQ ID NO: 84114):DSSNNVI (SEQ ID NO: 84972):KKATV (SEQ ID NO: 84212):VVK:AXGXH (SEQ ID NO: 84147), KVGKAXX (SEQ ID NO: 84425):VPT:RPVQ (SEQ ID NO: 84114):DDMGVPT (SEQ ID NO: 84964):KKATV (SEQ ID NO: 84212):VAE:XGXR (SEQ ID NO: 84123), KASKAXX (SEQ ID NO: 84423):VPT:RPVQ (SEQ ID NO: 84114):DKGVVTY (SEQ ID NO: 84969):KKATV (SEQ ID NO: 84212):AVS:EXGXR (SEQ ID NO: 84179), GSAGPXX (SEQ ID NO: 84420):TPT:RPVQ (SEQ ID NO: 84114):NDKQQII (SEQ ID NO: 84979):KKATV (SEQ ID NO: 84212):VVD:RXGXS (SEQ ID NO: 84291), AAPASXX (SEQ ID NO: 84401):VPA:RPVQ (SEQ ID NO: 84114):DAANNVV (SEQ ID NO: 84963):KKATV (SEQ ID NO: 84212):VVE:AXGXR (SEQ ID NO: 84148), STPPTXX (SEQ ID NO: 84431):VPT:RPVQ (SEQ ID NO: 84114):DSANNVV (SEQ ID NO: 84971):KKATV (SEQ ID NO: 84212):VVE:SXGXR (SEQ ID NO: 84305), HVPKPXX (SEQ ID NO: 84421):APT:RPVQ (SEQ ID NO: 84114):DDSSNVI (SEQ ID NO: 84965):KKATV (SEQ ID NO: 84212):VVR:SXGXH (SEQ ID NO: 84304), RVPSTXX (SEQ ID NO: 84428):APV:RPVQ (SEQ ID NO: 84114):DNGRVLL (SEQ ID NO: 84970):KKATV (SEQ ID NO: 84212):VEE:XGXL (SEQ ID NO: 84122), ASAAPXX (SEQ ID NO: 84402):VPQ:RPVQ (SEQ ID NO: 84114):VGRKPKV (SEQ ID NO: 84981):KKATV (SEQ ID NO: 84212):VRS:XKXS (SEQ ID NO: 84124), ASASPXX (SEQ ID NO: 84403):VSQ:RPVQ (SEQ ID NO: 84114):IGKTPKI (SEQ ID NO: 84978):KKATV (SEQ ID NO: 84212):VKS:XKXS (SEQ ID NO: 84124), ASASPXX (SEQ ID NO: 84403):VPQ:RPVQ (SEQ ID NO: 84114):VGRTPKV (SEQ ID NO: 84982):KKATV (SEQ ID NO: 84212):VKS:XKXS (SEQ ID NO: 84124), NDEGLEX (SEQ ID NO: 84426):VPT:RPVQ (SEQ ID NO: 84114):RIKPHQGQH (SEQ ID NO: 84980):KKATV (SEQ ID NO: 84212):QHN:KXEXR (SEQ ID NO: 84213), NDEGLEX (SEQ ID NO: 84426):VPT:RPVQ (SEQ ID NO: 84114):RIKPHQGQH (SEQ ID NO: 84980):KKATV (SEQ ID NO: 84212):EHS:QXEXR (SEQ ID NO: 84276) and SSVKXQP (SEQ ID NO: 84430):SRV:RPVQ (SEQ ID NO: 84114):EYVRKKPKL (SEQ ID NO: 84974):KKATV (SEQ ID NO: 84212):EEH:LEXAXA (SEQ ID NO: 84400). More particularly, in certain embodiments, the heptuplet PEP7:PEP3:PEP1:LINKER:PEP2:PEP4:PEP8 is selected from the group consisting of GIPEPXX (SEQ ID NO: 84419):VPT:SAIS (SEQ ID NO: 84116):DENKNVV (SEQ ID NO: 84967):LKNYQ (SEQ ID NO: 84230):VVE:SXAXR (SEQ ID NO: 84303), HVTKPTX (SEQ ID NO: 84422):VPT:SAIS (SEQ ID NO: 84116):DDSSNVI (SEQ ID NO: 84965):LKNYQ (SEQ ID NO: 84230):VVE:SXGXH (SEQ ID NO: 84304), YVPKPXX (SEQ ID NO: 84433):VPT:SAIS (SEQ ID NO: 84116):DDSSNVI (SEQ ID NO: 84965):LKNYQ (SEQ ID NO: 84230):VVE:SXGXH (SEQ ID NO: 84304), TVPKPXX (SEQ ID NO: 84432):VPT:SAIS (SEQ ID NO: 84116):DDSSNVI (SEQ ID NO: 84965):LKNYQ (SEQ ID NO: 84230):VVE:AXGXH (SEQ ID NO: 84147), AVPKAXX (SEQ ID NO: 84404):VPT:SAIS (SEQ ID NO: 84116):DSSNNVI (SEQ ID NO: 84972):LKNYQ (SEQ ID NO: 84230):VVE:AXGXH (SEQ ID NO: 84147), KVGKAXX (SEQ ID NO: 84425):VPT:SAIS (SEQ ID NO: 84116):DDMGVPT (SEQ ID NO: 84964):LKNYQ (SEQ ID NO: 84230):VVE:XGXR (SEQ ID NO: 84123), KASKAXX (SEQ ID NO: 84423):VPT:SAIS (SEQ ID NO: 84116):DKGVVTY (SEQ ID NO: 84969):LKNYQ (SEQ ID NO: 84230):VVE:EXGXR (SEQ ID NO: 84179), GSAGPXX (SEQ ID NO: 84420):VPT:SAIS (SEQ ID NO: 84116):NDKQQII (SEQ ID NO: 84979):LKNYQ (SEQ ID NO: 84230):VVE:RXGXS (SEQ ID NO: 84291), AAPASXX (SEQ ID NO: 84401):VPT:SAIS (SEQ ID NO: 84116):DAANNVV (SEQ ID NO: 84963):LKNYQ (SEQ ID NO: 84230):VVE:AXGXR (SEQ ID NO: 84148), STPPTXX (SEQ ID NO: 84431):VPT:SAIS (SEQ ID NO: 84116):DSANNVV (SEQ ID NO: 84971):LKNYQ (SEQ ID NO: 84230):VVE:SXGXR (SEQ ID NO: 84305), HVPKPXX (SEQ ID NO: 84421):VPT:SAIS (SEQ ID NO: 84116):DDSSNVI (SEQ ID NO: 84965):LKNYQ (SEQ ID NO: 84230):VVE:SXGXH (SEQ ID NO: 84304), RVPSTXX (SEQ ID NO: 84428):VPT:SAIS (SEQ ID NO: 84116):DNGRVLL (SEQ ID NO: 84970):LKNYQ (SEQ ID NO: 84230):VVE:XGXL (SEQ ID NO: 84122), ASAAPXX (SEQ ID NO: 84402):VPT:SAIS (SEQ ID NO: 84116):VGRKPKV (SEQ ID NO: 84981):LKNYQ (SEQ ID NO: 84230):VVE:XKXS (SEQ ID NO: 84124), ASASPXX (SEQ ID NO: 84403):VPT:SAIS (SEQ ID NO: 84116):IGKTPKI (SEQ ID NO: 84978):LKNYQ (SEQ ID NO: 84230):VVE:XKXS (SEQ ID NO: 84124), ASASPXX (SEQ ID NO: 84403):VPT:SAIS (SEQ ID NO: 84116):VGRTPKV (SEQ ID NO: 84982):LKNYQ (SEQ ID NO: 84230):VVE:XKXS (SEQ ID NO: 84124), GIPEPXX (SEQ ID NO: 84419):VPE:SAIS (SEQ ID NO: 84116):DENKNVV (SEQ ID NO: 84967):LKNYQ (SEQ ID NO: 84230):TVE:SXAXR (SEQ ID NO: 84303), HVTKPTX (SEQ ID NO: 84422):APT:SAIS (SEQ ID NO: 84116):DDSSNVI (SEQ ID NO: 84965):LKNYQ (SEQ ID NO: 84230):VVR:SXGXH (SEQ ID NO: 84304), YVPKPXX (SEQ ID NO: 84433):APT:SAIS (SEQ ID NO: 84116):DDSSNVI (SEQ ID NO: 84965):LKNYQ (SEQ ID NO: 84230):VVR:SXGXH (SEQ ID NO: 84304), TVPKPXX (SEQ ID NO: 84432):APT:SAIS (SEQ ID NO: 84116):DDSSNVI (SEQ ID NO: 84965):LKNYQ (SEQ ID NO: 84230):VVR:AXGXH (SEQ ID NO: 84147), AVPKAXX (SEQ ID NO: 84404):APT:SAIS (SEQ ID NO: 84116):DSSNNVI (SEQ ID NO: 84972):LKNYQ (SEQ ID NO: 84230):VVK:AXGXH (SEQ ID NO: 84147), KVGKAXX (SEQ ID NO: 84425):VPT:SAIS (SEQ ID NO: 84116):DDMGVPT (SEQ ID NO: 84964):LKNYQ (SEQ ID NO: 84230):VAE:XGXR (SEQ ID NO: 84123), KASKAXX (SEQ ID NO: 84423):VPT:SAIS (SEQ ID NO: 84116):DKGVVTY (SEQ ID NO: 84969):LKNYQ (SEQ ID NO: 84230):AVS:EXGXR (SEQ ID NO: 84179), GSAGPXX (SEQ ID NO: 84420):TPT:SAIS (SEQ ID NO: 84116):NDKQQII (SEQ ID NO: 84979):LKNYQ (SEQ ID NO: 84230):VVD:RXGXS (SEQ ID NO: 84291), AAPASXX (SEQ ID NO: 84401):VPA:SAIS (SEQ ID NO: 84116):DAANNVV (SEQ ID NO: 84963):LKNYQ (SEQ ID NO: 84230):VVE:AXGXR (SEQ ID NO: 84148), HVPKPXX (SEQ ID NO: 84421):APT:SAIS (SEQ ID NO: 84116):DDSSNVI (SEQ ID NO: 84965):LKNYQ (SEQ ID NO: 84230):VVR:SXGXH (SEQ ID NO: 84304), RVPSTXX (SEQ ID NO: 84428):APV:SAIS (SEQ ID NO: 84116):DNGRVLL (SEQ ID NO: 84970):LKNYQ (SEQ ID NO: 84230):VEE:XGXL (SEQ ID NO: 84122), ASAAPXX (SEQ ID NO: 84402):VPQ:SAIS (SEQ ID NO: 84116):VGRKPKV (SEQ ID NO: 84981):LKNYQ (SEQ ID NO: 84230):VRS:XKXS (SEQ ID NO: 84124), ASASPXX (SEQ ID NO: 84403):VSQ:SAIS (SEQ ID NO: 84116):IGKTPKI (SEQ ID NO: 84978):LKNYQ (SEQ ID NO: 84230):VKS:XKXS (SEQ ID NO: 84124), ASASPXX (SEQ ID NO: 84403):VPQ:SAIS (SEQ ID NO: 84116):VGRTPKV (SEQ ID NO: 84982):LKNYQ (SEQ ID NO: 84230):VKS:XKXS (SEQ ID NO: 84124), NDEGLEX (SEQ ID NO: 84426):VPT:SAIS (SEQ ID NO: 84116):RIKPHQGQH (SEQ ID NO: 84980):LKNYQ (SEQ ID NO: 84230):QHN:KXEXR (SEQ ID NO: 84213), NDEGLEX (SEQ ID NO: 84426):VPT:SAIS (SEQ ID NO: 84116):RIKPHQGQH (SEQ ID NO: 84980):LKNYQ (SEQ ID NO: 84230):EHS:QXEXR (SEQ ID NO: 84276), SSVKXQP (SEQ ID NO: 84430):SRV:SAIS (SEQ ID NO: 84116):EYVRKKPKL (SEQ ID NO: 84974):LKNYQ (SEQ ID NO: 84230):EEH:LEXAXA (SEQ ID NO: 84400), RNVQXRP (SEQ ID NO: 84427):TQV:SAIS (SEQ ID NO: 84116):EIVRKKPIF (SEQ ID NO: 84973):LKNYQ (SEQ ID NO: 84230):EDH:LAXKXE (SEQ ID NO: 84399), KIPKAXX (SEQ ID NO: 84424):VPE:SSLS (SEQ ID NO: 84121):DENEKVV (SEQ ID NO: 84966):LKVYP (SEQ ID NO: 84231):TVE:GXGXR (SEQ ID NO: 84208), SIPKAXX (SEQ ID NO: 84429):VPE:SSLS (SEQ ID NO: 84121):DEYDKVV (SEQ ID NO: 84968):LKVYP (SEQ ID NO: 84231):TVE:GXGXR (SEQ ID NO: 84208), HVTKPTX (SEQ ID NO: 84422):VPE:SSLS (SEQ ID NO: 84121):DDSSNVI (SEQ ID NO: 84965):LKVYP (SEQ ID NO: 84231):TVE:SXGXH (SEQ ID NO: 84304), YVPKPXX (SEQ ID NO: 84433):VPE:SSLS (SEQ ID NO: 84121):DDSSNVI (SEQ ID NO: 84965):LKVYP (SEQ ID NO: 84231):TVE:SXGXH (SEQ ID NO: 84304), TVPKPXX (SEQ ID NO: 84432):VPE:SSLS (SEQ ID NO: 84121):DDSSNVI (SEQ ID NO: 84965):LKVYP (SEQ ID NO: 84231):TVE:AXGXH (SEQ ID NO: 84147), AVPKAXX (SEQ ID NO: 84404):VPE:SSLS (SEQ ID NO: 84121):DSSNNVI (SEQ ID NO: 84972):LKVYP (SEQ ID NO: 84231):TVE:AXGXH (SEQ ID NO: 84147), KVGKAXX (SEQ ID NO: 84425):VPE:SSLS (SEQ ID NO: 84121):DDMGVPT (SEQ ID NO: 84964):LKVYP (SEQ ID NO: 84231):TVE:XGXR (SEQ ID NO: 84123), KASKAXX (SEQ ID NO: 84423):VPE:SSLS (SEQ ID NO: 84121):DKGVVTY (SEQ ID NO: 84969):LKVYP (SEQ ID NO: 84231):TVE:EXGXR (SEQ ID NO: 84179), GSAGPXX (SEQ ID NO: 84420):VPE:SSLS (SEQ ID NO: 84121):NDKQQII (SEQ ID NO: 84979):LKVYP (SEQ ID NO: 84231):TVE:RXGXS (SEQ ID NO: 84291), AAPASXX (SEQ ID NO: 84401):VPE:SSLS (SEQ ID NO: 84121):DAANNVV (SEQ ID NO: 84963):LKVYP (SEQ ID NO: 84231):TVE:AXGXR (SEQ ID NO: 84148), STPPTXX (SEQ ID NO: 84431):VPE:SSLS (SEQ ID NO: 84121):DSANNVV (SEQ ID NO: 84971):LKVYP (SEQ ID NO: 84231):TVE:SXGXR (SEQ ID NO: 84305), HVPKPXX (SEQ ID NO: 84421):VPE:SSLS (SEQ ID NO: 84121):DDSSNVI (SEQ ID NO: 84965):LKVYP (SEQ ID NO: 84231):TVE:SXGXH (SEQ ID NO: 84304), RVPSTXX (SEQ ID NO: 84428):VPE:SSLS (SEQ ID NO: 84121):DNGRVLL (SEQ ID NO: 84970):LKVYP (SEQ ID NO: 84231):TVE:XGXL (SEQ ID NO: 84122), ASAAPXX (SEQ ID NO: 84402):VPE:SSLS (SEQ ID NO: 84121):VGRKPKV (SEQ ID NO: 84981):LKVYP (SEQ ID NO: 84231):TVE:XKXS (SEQ ID NO: 84124), ASASPXX (SEQ ID NO: 84403):VPE:SSLS (SEQ ID NO: 84121):IGKTPKI (SEQ ID NO: 84978):LKVYP (SEQ ID NO: 84231):TVE:XKXS (SEQ ID NO: 84124), ASASPXX (SEQ ID NO: 84403):VPE:SSLS (SEQ ID NO: 84121):VGRTPKV (SEQ ID NO: 84982):LKVYP (SEQ ID NO: 84231):TVE:XKXS (SEQ ID NO: 84124), KIPKAXX (SEQ ID NO: 84424):VPT:SSLS (SEQ ID NO: 84121):DENEKVV (SEQ ID NO: 84966):LKVYP (SEQ ID NO: 84231):VVE:GXGXR (SEQ ID NO: 84208), SIPKAXX (SEQ ID NO: 84429):VPT:SSLS (SEQ ID NO: 84121):DEYDKVV (SEQ ID NO: 84968):LKVYP (SEQ ID NO: 84231):VVE:GXGXR (SEQ ID NO: 84208), HVTKPTX (SEQ ID NO: 84422):APT:SSLS (SEQ ID NO: 84121):DDSSNVI (SEQ ID NO: 84965):LKVYP (SEQ ID NO: 84231):VVR:SXGXH (SEQ ID NO: 84304), YVPKPXX (SEQ ID NO: 84433):APT:SSLS (SEQ ID NO: 84121):DDSSNVI (SEQ ID NO: 84965):LKVYP (SEQ ID NO: 84231):VVR:SXGXH (SEQ ID NO: 84304), TVPKPXX (SEQ ID NO: 84432):APT:SSLS (SEQ ID NO: 84121):DDSSNVI (SEQ ID NO: 84965):LKVYP (SEQ ID NO: 84231):VVR:AXGXH (SEQ ID NO: 84147), AVPKAXX (SEQ ID NO: 84404):APT:SSLS (SEQ ID NO: 84121):DSSNNVI (SEQ ID NO: 84972):LKVYP (SEQ ID NO: 84231):VVK:AXGXH (SEQ ID NO: 84147), KVGKAXX (SEQ ID NO: 84425):VPT:SSLS (SEQ ID NO: 84121):DDMGVPT (SEQ ID NO: 84964):LKVYP (SEQ ID NO: 84231):VAE:XGXR (SEQ ID NO: 84123), KASKAXX (SEQ ID NO: 84423):VPT:SSLS (SEQ ID NO: 84121):DKGVVTY (SEQ ID NO: 84969):LKVYP (SEQ ID NO: 84231):AVS:EXGXR (SEQ ID NO: 84179), GSAGPXX (SEQ ID NO: 84420):TPT:SSLS (SEQ ID NO: 84121):NDKQQII (SEQ ID NO: 84979):LKVYP (SEQ ID NO: 84231):VVD:RXGXS (SEQ ID NO: 84291), AAPASXX (SEQ ID NO: 84401):VPA:SSLS (SEQ ID NO: 84121):DAANNVV (SEQ ID NO: 84963):LKVYP (SEQ ID NO: 84231):VVE:AXGXR (SEQ ID NO: 84148), STPPTXX (SEQ ID NO: 84431):VPT:SSLS (SEQ ID NO: 84121):DSANNVV (SEQ ID NO: 84971):LKVYP (SEQ ID NO: 84231):VVE:SXGXR (SEQ ID NO: 84305), HVPKPXX (SEQ ID NO: 84421):APT:SSLS (SEQ ID NO: 84121):DDSSNVI (SEQ ID NO: 84965):LKVYP (SEQ ID NO: 84231):VVR:SXGXH (SEQ ID NO: 84304), RVPSTXX (SEQ ID NO: 84428):APV:SSLS (SEQ ID NO: 84121):DNGRVLL (SEQ ID NO: 84970):LKVYP (SEQ ID NO: 84231):VEE:XGXL (SEQ ID NO: 84122), ASAAPXX (SEQ ID NO: 84402):VPQ:SSLS (SEQ ID NO: 84121):VGRKPKV (SEQ ID NO: 84981):LKVYP (SEQ ID NO: 84231):VRS:XKXS (SEQ ID NO: 84124), ASASPXX (SEQ ID NO: 84403):VSQ:SSLS (SEQ ID NO: 84121):IGKTPKI (SEQ ID NO: 84978):LKVYP (SEQ ID NO: 84231):VKS:XKXS (SEQ ID NO: 84124), ASASPXX (SEQ ID NO: 84403):VPQ:SSLS (SEQ ID NO: 84121):VGRTPKV (SEQ ID NO: 84982):LKVYP (SEQ ID NO: 84231):VKS:XKXS (SEQ ID NO: 84124), NDEGLEX (SEQ ID NO: 84426):VPT:SSLS (SEQ ID NO: 84121):RIKPHQGQH (SEQ ID NO: 84980):LKVYP (SEQ ID NO: 84231):QHN:KXEXR (SEQ ID NO: 84213), NDEGLEX (SEQ ID NO: 84426):VPT:SSLS (SEQ ID NO: 84121):RIKPHQGQH (SEQ ID NO: 84980):LKVYP (SEQ ID NO: 84231):EHS:QXEXR (SEQ ID NO: 84276), SSVKXQP (SEQ ID NO: 84430):SRV:SSLS (SEQ ID NO: 84121):EYVRKKPKL (SEQ ID NO: 84974):LKVYP (SEQ ID NO: 84231):EEH:LEXAXA (SEQ ID NO: 84400), RNVQXRP (SEQ ID NO: 84427):TQV:SSLS (SEQ ID NO: 84121):EIVRKKPIF (SEQ ID NO: 84973):LKVYP (SEQ ID NO: 84231):EDH:LAXKXE (SEQ ID NO: 84399), KIPKAXX (SEQ ID NO: 84424):APT:NAIS (SEQ ID NO: 84113):DENEKVV (SEQ ID NO: 84966):LKKYR (SEQ ID NO: 84229):VVR:GXGXR (SEQ ID NO: 84208), GIPEPXX (SEQ ID NO: 84419):APT:NAIS (SEQ ID NO: 84113):DENKNVV (SEQ ID NO: 84967):LKKYR (SEQ ID NO: 84229):VVR:SXAXR (SEQ ID NO: 84303), SIPKAXX (SEQ ID NO: 84429):APT:NAIS (SEQ ID NO: 84113):DEYDKVV (SEQ ID NO: 84968):LKKYR (SEQ ID NO: 84229):VVR:GXGXR (SEQ ID NO: 84208), AVPKAXX (SEQ ID NO: 84404):APT:NAIS (SEQ ID NO: 84113):DSSNNVI (SEQ ID NO: 84972):LKKYR (SEQ ID NO: 84229):VVR:AXGXH (SEQ ID NO: 84147), KVGKAXX (SEQ ID NO: 84425):APT:NAIS (SEQ ID NO: 84113):DDMGVPT (SEQ ID NO: 84964):LKKYR (SEQ ID NO: 84229):VVR:XGXR (SEQ ID NO: 84123), KASKAXX (SEQ ID NO: 84423):APT:NAIS (SEQ ID NO: 84113):DKGVVTY (SEQ ID NO: 84969):LKKYR (SEQ ID NO: 84229):VVR:EXGXR (SEQ ID NO: 84179), GSAGPXX (SEQ ID NO: 84420):APT:NAIS (SEQ ID NO: 84113):NDKQQII (SEQ ID NO: 84979):LKKYR (SEQ ID NO: 84229):VVR:RXGXS (SEQ ID NO: 84291), AAPASXX (SEQ ID NO: 84401):APT:NAIS (SEQ ID NO: 84113):DAANNVV (SEQ ID NO: 84963):LKKYR (SEQ ID NO: 84229):VVR:AXGXR (SEQ ID NO: 84148), STPPTXX (SEQ ID NO: 84431):APT:NAIS (SEQ ID NO: 84113):DSANNVV (SEQ ID NO: 84971):LKKYR (SEQ ID NO: 84229):VVR:SXGXR (SEQ ID NO: 84305), RVPSTXX (SEQ ID NO: 84428):APT:NAIS (SEQ ID NO: 84113):DNGRVLL (SEQ ID NO: 84970):LKKYR (SEQ ID NO: 84229):VVR:XGXL (SEQ ID NO: 84122), ASAAPXX (SEQ ID NO: 84402):APT:NAIS (SEQ ID NO: 84113):VGRKPKV (SEQ ID NO: 84981):LKKYR (SEQ ID NO: 84229):VVR:XKXS (SEQ ID NO: 84124), ASASPXX (SEQ ID NO: 84403):APT:NAIS (SEQ ID NO: 84113):IGKTPKI (SEQ ID NO: 84978):LKKYR (SEQ ID NO: 84229):VVR:XKXS (SEQ ID NO: 84124), ASASPXX (SEQ ID NO: 84403):APT:NAIS (SEQ ID NO: 84113):VGRTPKV (SEQ ID NO: 84982):LKKYR (SEQ ID NO: 84229):VVR:XKXS (SEQ ID NO: 84124), KIPKAXX (SEQ ID NO: 84424):VPT:NAIS (SEQ ID NO: 84113):DENEKVV (SEQ ID NO: 84966):LKKYR (SEQ ID NO: 84229):VVE:GXGXR (SEQ ID NO: 84208), GIPEPXX (SEQ ID NO: 84419):VPE:NAIS (SEQ ID NO: 84113):DENKNVV (SEQ ID NO: 84967):LKKYR (SEQ ID NO: 84229):TVE:SXAXR (SEQ ID NO: 84303), SIPKAXX (SEQ ID NO: 84429):VPT:NAIS (SEQ ID NO: 84113):DEYDKVV (SEQ ID NO: 84968):LKKYR (SEQ ID NO: 84229):VVE:GXGXR (SEQ ID NO: 84208), AVPKAXX (SEQ ID NO: 84404):APT:NAIS (SEQ ID NO: 84113):DSSNNVI (SEQ ID NO: 84972):LKKYR (SEQ ID NO: 84229):VVK:AXGXH (SEQ ID NO: 84147), KVGKAXX (SEQ ID NO: 84425):VPT:NAIS (SEQ ID NO: 84113):DDMGVPT (SEQ ID NO: 84964):LKKYR (SEQ ID NO: 84229):VAE:XGXR (SEQ ID NO: 84123), KASKAXX (SEQ ID NO: 84423):VPT:NAIS (SEQ ID NO: 84113):DKGVVTY (SEQ ID NO: 84969):LKKYR (SEQ ID NO: 84229):AVS:EXGXR (SEQ ID NO: 84179), GSAGPXX (SEQ ID NO: 84420):TPT:NAIS (SEQ ID NO: 84113):NDKQQII (SEQ ID NO: 84979):LKKYR (SEQ ID NO: 84229):VVD:RXGXS (SEQ ID NO: 84291), AAPASXX (SEQ ID NO: 84401):VPA:NAIS (SEQ ID NO: 84113):DAANNVV (SEQ ID NO: 84963):LKKYR (SEQ ID NO: 84229):VVE:AXGXR (SEQ ID NO: 84148), STPPTXX (SEQ ID NO: 84431):VPT:NAIS (SEQ ID NO: 84113):DSANNVV (SEQ ID NO: 84971):LKKYR (SEQ ID NO: 84229):VVE:SXGXR (SEQ ID NO: 84305), RVPSTXX (SEQ ID NO: 84428):APV:NAIS (SEQ ID NO: 84113):DNGRVLL (SEQ ID NO: 84970):LKKYR (SEQ ID NO: 84229):VEE:XGXL (SEQ ID NO: 84122), ASAAPXX (SEQ ID NO: 84402):VPQ:NAIS (SEQ ID NO: 84113):VGRKPKV (SEQ ID NO: 84981):LKKYR (SEQ ID NO: 84229):VRS:XKXS (SEQ ID NO: 84124), ASASPXX (SEQ ID NO: 84403):VSQ:NAIS (SEQ ID NO: 84113):IGKTPKI (SEQ ID NO: 84978):LKKYR (SEQ ID NO: 84229):VKS:XKXS (SEQ ID NO: 84124), ASASPXX (SEQ ID NO: 84403):VPQ:NAIS (SEQ ID NO: 84113):VGRTPKV (SEQ ID NO: 84982):LKKYR (SEQ ID NO: 84229):VKS:XKXS (SEQ ID NO: 84124), NDEGLEX (SEQ ID NO: 84426):VPT:NAIS (SEQ ID NO: 84113):RIKPHQGQH (SEQ ID NO: 84980):LKKYR (SEQ ID NO: 84229):QHN:KXEXR (SEQ ID NO: 84213), NDEGLEX (SEQ ID NO: 84426):VPT:NAIS (SEQ ID NO: 84113):RIKPHQGQH (SEQ ID NO: 84980):LKKYR (SEQ ID NO: 84229):EHS:QXEXR (SEQ ID NO: 84276), SSVKXQP (SEQ ID NO: 84430):SRV:NAIS (SEQ ID NO: 84113):EYVRKKPKL (SEQ ID NO: 84974):LKKYR (SEQ ID NO: 84229):EEH:LEXAXA (SEQ ID NO: 84400), RNVQXRP (SEQ ID NO: 84427):TQV:NAIS (SEQ ID NO: 84113):EIVRKKPIF (SEQ ID NO: 84973):LKKYR (SEQ ID NO: 84229):EDH:LAXKXE (SEQ ID NO: 84399), KIPKAXX (SEQ ID NO: 84424):APT:SATS (SEQ ID NO: 84117):DENEKVV (SEQ ID NO: 84966):LRKHR (SEQ ID NO: 84233):VVK:GXGXR (SEQ ID NO: 84208), GIPEPXX (SEQ ID NO: 84419):APT:SATS (SEQ ID NO: 84117):DENKNVV (SEQ ID NO: 84967):LRKHR (SEQ ID NO: 84233):VVK:SXAXR (SEQ ID NO: 84303), SIPKAXX (SEQ ID NO: 84429):APT:SATS (SEQ ID NO: 84117):DEYDKVV (SEQ ID NO: 84968):LRKHR (SEQ ID NO: 84233):VVK:GXGXR (SEQ ID NO: 84208), HVTKPTX (SEQ ID NO: 84422):APT:SATS (SEQ ID NO: 84117):DDSSNVI (SEQ ID NO: 84965):LRKHR (SEQ ID NO: 84233):VVK:SXGXH (SEQ ID NO: 84304), YVPKPXX (SEQ ID NO: 84433):APT:SATS (SEQ ID NO: 84117):DDSSNVI (SEQ ID NO: 84965):LRKHR (SEQ ID NO: 84233):VVK:SXGXH (SEQ ID NO: 84304), TVPKPXX (SEQ ID NO: 84432):APT:SATS (SEQ ID NO: 84117):DDSSNVI (SEQ ID NO: 84965):LRKHR (SEQ ID NO: 84233):VVK:AXGXH (SEQ ID NO: 84147), KVGKAXX (SEQ ID NO: 84425):APT:SATS (SEQ ID NO: 84117):DDMGVPT (SEQ ID NO: 84964):LRKHR (SEQ ID NO: 84233):VVK:XGXR (SEQ ID NO: 84123), KASKAXX (SEQ ID NO: 84423):APT:SATS (SEQ ID NO: 84117):DKGVVTY (SEQ ID NO: 84969):LRKHR (SEQ ID NO: 84233):VVK:EXGXR (SEQ ID NO: 84179), GSAGPXX (SEQ ID NO: 84420):APT:SATS (SEQ ID NO: 84117):NDKQQII (SEQ ID NO: 84979):LRKHR (SEQ ID NO: 84233):VVK:RXGXS (SEQ ID NO: 84291), AAPASXX (SEQ ID NO: 84401):APT:SATS (SEQ ID NO: 84117):DAANNVV (SEQ ID NO: 84963):LRKHR (SEQ ID NO: 84233):VVK:AXGXR (SEQ ID NO: 84148), STPPTXX (SEQ ID NO: 84431):APT:SATS (SEQ ID NO: 84117):DSANNVV (SEQ ID NO: 84971):LRKHR (SEQ ID NO: 84233):VVK:SXGXR (SEQ ID NO: 84305), HVPKPXX (SEQ ID NO: 84421):APT:SATS (SEQ ID NO: 84117):DDSSNVI (SEQ ID NO: 84965):LRKHR (SEQ ID NO: 84233):VVK:SXGXH (SEQ ID NO: 84304), RVPSTXX (SEQ ID NO: 84428):APT:SATS (SEQ ID NO: 84117):DNGRVLL (SEQ ID NO: 84970):LRKHR (SEQ ID NO: 84233):VVK:XGXL (SEQ ID NO: 84122), ASAAPXX (SEQ ID NO: 84402):APT:SATS (SEQ ID NO: 84117):VGRKPKV (SEQ ID NO: 84981):LRKHR (SEQ ID NO: 84233):VVK:XKXS (SEQ ID NO: 84124), ASASPXX (SEQ ID NO: 84403):APT:SATS (SEQ ID NO: 84117):IGKTPKI (SEQ ID NO: 84978):LRKHR (SEQ ID NO: 84233):VVK:XKXS (SEQ ID NO: 84124), ASASPXX (SEQ ID NO: 84403):APT:SATS (SEQ ID NO: 84117):VGRTPKV (SEQ ID NO: 84982):LRKHR (SEQ ID NO: 84233):VVK:XKXS (SEQ ID NO: 84124), KIPKAXX (SEQ ID NO: 84424):VPT:SATS (SEQ ID NO: 84117):DENEKVV (SEQ ID NO: 84966):LRKHR (SEQ ID NO: 84233):VVE:GXGXR (SEQ ID NO: 84208), GIPEPXX (SEQ ID NO: 84419):VPE:SATS (SEQ ID NO: 84117):DENKNVV (SEQ ID NO: 84967):LRKHR (SEQ ID NO: 84233):TVE:SXAXR (SEQ ID NO: 84303), SIPKAXX (SEQ ID NO: 84429):VPT:SATS (SEQ ID NO: 84117):DEYDKVV (SEQ ID NO: 84968):LRKHR (SEQ ID NO: 84233):VVE:GXGXR (SEQ ID NO: 84208), HVTKPTX (SEQ ID NO: 84422):APT:SATS (SEQ ID NO: 84117):DDSSNVI (SEQ ID NO: 84965):LRKHR (SEQ ID NO: 84233):VVR:SXGXH (SEQ ID NO: 84304), YVPKPXX (SEQ ID NO: 84433):APT:SATS (SEQ ID NO: 84117):DDSSNVI (SEQ ID NO: 84965):LRKHR (SEQ ID NO: 84233):VVR:SXGXH (SEQ ID NO: 84304), TVPKPXX (SEQ ID NO: 84432):APT:SATS (SEQ ID NO: 84117):DDSSNVI (SEQ ID NO: 84965):LRKHR (SEQ ID NO: 84233):VVR:AXGXH (SEQ ID NO: 84147), KVGKAXX (SEQ ID NO: 84425):VPT:SATS (SEQ ID NO: 84117):DDMGVPT (SEQ ID NO: 84964):LRKHR (SEQ ID NO: 84233):VAE:XGXR (SEQ ID NO: 84123), KASKAXX (SEQ ID NO: 84423):VPT:SATS (SEQ ID NO: 84117):DKGVVTY (SEQ ID NO: 84969):LRKHR (SEQ ID NO: 84233):AVS:EXGXR (SEQ ID NO: 84179), GSAGPXX (SEQ ID NO: 84420):TPT:SATS (SEQ ID NO: 84117):NDKQQII (SEQ ID NO: 84979):LRKHR (SEQ ID NO: 84233):VVD:RXGXS (SEQ ID NO: 84291), AAPASXX (SEQ ID NO: 84401):VPA:SATS (SEQ ID NO: 84117):DAANNVV (SEQ ID NO: 84963):LRKHR (SEQ ID NO: 84233):VVE:AXGXR (SEQ ID NO: 84148), STPPTXX (SEQ ID NO: 84431):VPT:SATS (SEQ ID NO: 84117):DSANNVV (SEQ ID NO: 84971):LRKHR (SEQ ID NO: 84233):VVE:SXGXR (SEQ ID NO: 84305), HVPKPXX (SEQ ID NO: 84421):APT:SATS (SEQ ID NO: 84117):DDSSNVI (SEQ ID NO: 84965):LRKHR (SEQ ID NO: 84233):VVR:SXGXH (SEQ ID NO: 84304), RVPSTXX (SEQ ID NO: 84428):APV:SATS (SEQ ID NO: 84117):DNGRVLL (SEQ ID NO: 84970):LRKHR (SEQ ID NO: 84233):VEE:XGXL (SEQ ID NO: 84122), ASAAPXX (SEQ ID NO: 84402):VPQ:SATS (SEQ ID NO: 84117):VGRKPKV (SEQ ID NO: 84981):LRKHR (SEQ ID NO: 84233):VRS:XKXS (SEQ ID NO: 84124), ASASPXX (SEQ ID NO: 84403):VSQ:SATS (SEQ ID NO: 84117):IGKTPKI (SEQ ID NO: 84978):LRKHR (SEQ ID NO: 84233):VKS:XKXS (SEQ ID NO: 84124), ASASPXX (SEQ ID NO: 84403):VPQ:SATS (SEQ ID NO: 84117):VGRTPKV (SEQ ID NO: 84982):LRKHR (SEQ ID NO: 84233):VKS:XKXS (SEQ ID NO: 84124), NDEGLEX (SEQ ID NO: 84426):VPT:SATS (SEQ ID NO: 84117):RIKPHQGQH (SEQ ID NO: 84980):LRKHR (SEQ ID NO: 84233):QHN:KXEXR (SEQ ID NO: 84213), NDEGLEX (SEQ ID NO: 84426):VPT:SATS (SEQ ID NO: 84117):RIKPHQGQH (SEQ ID NO: 84980):LRKHR (SEQ ID NO: 84233):EHS:QXEXR (SEQ ID NO: 84276), SSVKXQP (SEQ ID NO: 84430):SRV:SATS (SEQ ID NO: 84117):EYVRKKPKL (SEQ ID NO: 84974):LRKHR (SEQ ID NO: 84233):EEH:LEXAXA (SEQ ID NO: 84400), RNVQXRP (SEQ ID NO: 84427):TQV:SATS (SEQ ID NO: 84117):EIVRKKPIF (SEQ ID NO: 84973):LRKHR (SEQ ID NO: 84233):EDH:LAXKXE (SEQ ID NO: 84399), KIPKAXX (SEQ ID NO: 84424):VPT:SPIS (SEQ ID NO: 84120):DENEKVV (SEQ ID NO: 84966):LKYHY (SEQ ID NO: 84232):VAE:GXGXR (SEQ ID NO: 84208), GIPEPXX (SEQ ID NO: 84419):VPT:SPIS (SEQ ID NO: 84120):DENKNVV (SEQ ID NO: 84967):LKYHY (SEQ ID NO: 84232):VAE:SXAXR (SEQ ID NO: 84303), SIPKAXX (SEQ ID NO: 84429):VPT:SPIS (SEQ ID NO: 84120):DEYDKVV (SEQ ID NO: 84968):LKYHY (SEQ ID NO: 84232):VAE:GXGXR (SEQ ID NO: 84208), HVTKPTX (SEQ ID NO: 84422):VPT:SPIS (SEQ ID NO: 84120):DDSSNVI (SEQ ID NO: 84965):LKYHY (SEQ ID NO: 84232):VAE:SXGXH (SEQ ID NO: 84304), YVPKPXX (SEQ ID NO: 84433):VPT:SPIS (SEQ ID NO: 84120):DDSSNVI (SEQ ID NO: 84965):LKYHY (SEQ ID NO: 84232):VAE:SXGXH (SEQ ID NO: 84304), TVPKPXX (SEQ ID NO: 84432):VPT:SPIS (SEQ ID NO: 84120):DDSSNVI (SEQ ID NO: 84965):LKYHY (SEQ ID NO: 84232):VAE:AXGXH (SEQ ID NO: 84147), AVPKAXX (SEQ ID NO: 84404):VPT:SPIS (SEQ ID NO: 84120):DSSNNVI (SEQ ID NO: 84972):LKYHY (SEQ ID NO: 84232):VAE:AXGXH (SEQ ID NO: 84147), KASKAXX (SEQ ID NO: 84423):VPT:SPIS (SEQ ID NO: 84120):DKGVVTY (SEQ ID NO: 84969):LKYHY (SEQ ID NO: 84232):VAE:EXGXR (SEQ ID NO: 84179), GSAGPXX (SEQ ID NO: 84420):VPT:SPIS (SEQ ID NO: 84120):NDKQQII (SEQ ID NO: 84979):LKYHY (SEQ ID NO: 84232):VAE:RXGXS (SEQ ID NO: 84291), AAPASXX (SEQ ID NO: 84401):VPT:SPIS (SEQ ID NO: 84120):DAANNVV (SEQ ID NO: 84963):LKYHY (SEQ ID NO: 84232):VAE:AXGXR (SEQ ID NO: 84148), STPPTXX (SEQ ID NO: 84431):VPT:SPIS (SEQ ID NO: 84120):DSANNVV (SEQ ID NO: 84971):LKYHY (SEQ ID NO: 84232):VAE:SXGXR (SEQ ID NO: 84305), HVPKPXX (SEQ ID NO: 84421):VPT:SPIS (SEQ ID NO: 84120):DDSSNVI (SEQ ID NO: 84965):LKYHY (SEQ ID NO: 84232):VAE:SXGXH (SEQ ID NO: 84304), RVPSTXX (SEQ ID NO: 84428):VPT:SPIS (SEQ ID NO: 84120):DNGRVLL (SEQ ID NO: 84970):LKYHY (SEQ ID NO: 84232):VAE:XGXL (SEQ ID NO: 84122), ASAAPXX (SEQ ID NO: 84402):VPT:SPIS (SEQ ID NO: 84120):VGRKPKV (SEQ ID NO: 84981):LKYHY (SEQ ID NO: 84232):VAE:XKXS (SEQ ID NO: 84124), ASASPXX (SEQ ID NO: 84403):VPT:SPIS (SEQ ID NO: 84120):IGKTPKI (SEQ ID NO: 84978):LKYHY (SEQ ID NO: 84232):VAE:XKXS (SEQ ID NO: 84124), ASASPXX (SEQ ID NO: 84403):VPT:SPIS (SEQ ID NO: 84120):VGRTPKV (SEQ ID NO: 84982):LKYHY (SEQ ID NO: 84232):VAE:XKXS (SEQ ID NO: 84124), KIPKAXX (SEQ ID NO: 84424):VPT:SPIS (SEQ ID NO: 84120):DENEKVV (SEQ ID NO: 84966):LKYHY (SEQ ID NO: 84232):VVE:GXGXR (SEQ ID NO: 84208), GIPEPXX (SEQ ID NO: 84419):VPE:SPIS (SEQ ID NO: 84120):DENKNVV (SEQ ID NO: 84967):LKYHY (SEQ ID NO: 84232):TVE:SXAXR (SEQ ID NO: 84303), SIPKAXX (SEQ ID NO: 84429):VPT:SPIS (SEQ ID NO: 84120):DEYDKVV (SEQ ID NO: 84968):LKYHY (SEQ ID NO: 84232):VVE:GXGXR (SEQ ID NO: 84208), HVTKPTX (SEQ ID NO: 84422):APT:SPIS (SEQ ID NO: 84120):DDSSNVI (SEQ ID NO: 84965):LKYHY (SEQ ID NO: 84232):VVR:SXGXH (SEQ ID NO: 84304), YVPKPXX (SEQ ID NO: 84433):APT:SPIS (SEQ ID NO: 84120):DDSSNVI (SEQ ID NO: 84965):LKYHY (SEQ ID NO: 84232):VVR:SXGXH (SEQ ID NO: 84304), TVPKPXX (SEQ ID NO: 84432):APT:SPIS (SEQ ID NO: 84120):DDSSNVI (SEQ ID NO: 84965):LKYHY (SEQ ID NO: 84232):VVR:AXGXH (SEQ ID NO: 84147), AVPKAXX (SEQ ID NO: 84404):APT:SPIS (SEQ ID NO: 84120):DSSNNVI (SEQ ID NO: 84972):LKYHY (SEQ ID NO: 84232):VVK:AXGXH (SEQ ID NO: 84147), KASKAXX (SEQ ID NO: 84423):VPT:SPIS (SEQ ID NO: 84120):DKGVVTY (SEQ ID NO: 84969):LKYHY (SEQ ID NO: 84232):AVS:EXGXR (SEQ ID NO: 84179), GSAGPXX (SEQ ID NO: 84420):TPT:SPIS (SEQ ID NO: 84120):NDKQQII (SEQ ID NO: 84979):LKYHY (SEQ ID NO: 84232):VVD:RXGXS (SEQ ID NO: 84291), AAPASXX (SEQ ID NO: 84401):VPA:SPIS (SEQ ID NO: 84120):DAANNVV (SEQ ID NO: 84963):LKYHY (SEQ ID NO: 84232):VVE:AXGXR (SEQ ID NO: 84148), STPPTXX (SEQ ID NO: 84431):VPT:SPIS (SEQ ID NO: 84120):DSANNVV (SEQ ID NO: 84971):LKYHY (SEQ ID NO: 84232):VVE:SXGXR (SEQ ID NO: 84305), HVPKPXX (SEQ ID NO: 84421):APT:SPIS (SEQ ID NO: 84120):DDSSNVI (SEQ ID NO: 84965):LKYHY (SEQ ID NO: 84232):VVR:SXGXH (SEQ ID NO: 84304), RVPSTXX (SEQ ID NO: 84428):APV:SPIS (SEQ ID NO: 84120):DNGRVLL (SEQ ID NO: 84970):LKYHY (SEQ ID NO: 84232):VEE:XGXL (SEQ ID NO: 84122), ASAAPXX (SEQ ID NO: 84402):VPQ:SPIS (SEQ ID NO: 84120):VGRKPKV (SEQ ID NO: 84981):LKYHY (SEQ ID NO: 84232):VRS:XKXS (SEQ ID NO: 84124), ASASPXX (SEQ ID NO: 84403):VSQ:SPIS (SEQ ID NO: 84120):IGKTPKI (SEQ ID NO: 84978):LKYHY (SEQ ID NO: 84232):VKS:XKXS (SEQ ID NO: 84124), ASASPXX (SEQ ID NO: 84403):VPQ:SPIS (SEQ ID NO: 84120):VGRTPKV (SEQ ID NO: 84982):LKYHY (SEQ ID NO: 84232):VKS:XKXS (SEQ ID NO: 84124), NDEGLEX (SEQ ID NO: 84426):VPT:SPIS (SEQ ID NO: 84120):RIKPHQGQH (SEQ ID NO: 84980):LKYHY (SEQ ID NO: 84232):QHN:KXEXR (SEQ ID NO: 84213), NDEGLEX (SEQ ID NO: 84426):VPT:SPIS (SEQ ID NO: 84120):RIKPHQGQH (SEQ ID NO: 84980):LKYHY (SEQ ID NO: 84232):EHS:QXEXR (SEQ ID NO: 84276), SSVKXQP (SEQ ID NO: 84430):SRV:SPIS (SEQ ID NO: 84120):EYVRKKPKL (SEQ ID NO: 84974):LKYHY (SEQ ID NO: 84232):EEH:LEXAXA (SEQ ID NO: 84400), RNVQXRP (SEQ ID NO: 84427):TQV:SPIS (SEQ ID NO: 84120):EIVRKKPIF (SEQ ID NO: 84973):LKYHY (SEQ ID NO: 84232):EDH:LAXKXE (SEQ ID NO: 84399), KIPKAXX (SEQ ID NO: 84424):VPT:EPIS (SEQ ID NO: 84109):DENEKVV (SEQ ID NO: 84966):KFKYE (SEQ ID NO: 84211):AVS:GXGXR (SEQ ID NO: 84208), GIPEPXX (SEQ ID NO: 84419):VPT:EPIS (SEQ ID NO: 84109):DENKNVV (SEQ ID NO: 84967):KFKYE (SEQ ID NO: 84211):AVS:SXAXR (SEQ ID NO: 84303), SIPKAXX (SEQ ID NO: 84429):VPT:EPIS (SEQ ID NO: 84109):DEYDKVV (SEQ ID NO: 84968):KFKYE (SEQ ID NO: 84211):AVS:GXGXR (SEQ ID NO: 84208), HVTKPTX (SEQ ID NO: 84422):VPT:EPIS (SEQ ID NO: 84109):DDSSNVI (SEQ ID NO: 84965):KFKYE (SEQ ID NO: 84211):AVS:SXGXH (SEQ ID NO: 84304), YVPKPXX (SEQ ID NO: 84433):VPT:EPIS (SEQ ID NO: 84109):DDSSNVI (SEQ ID NO: 84965):KFKYE (SEQ ID NO: 84211):AVS:SXGXH (SEQ ID NO: 84304), TVPKPXX (SEQ ID NO: 84432):VPT:EPIS (SEQ ID NO: 84109):DDSSNVI (SEQ ID NO: 84965):KFKYE (SEQ ID NO: 84211):AVS:AXGXH (SEQ ID NO: 84147), AVPKAXX (SEQ ID NO: 84404):VPT:EPIS (SEQ ID NO: 84109):DSSNNVI (SEQ ID NO: 84972):KFKYE (SEQ ID NO: 84211):AVS:AXGXH (SEQ ID NO: 84147), KVGKAXX (SEQ ID NO: 84425):VPT:EPIS (SEQ ID NO: 84109):DDMGVPT (SEQ ID NO: 84964):KFKYE (SEQ ID NO: 84211):AVS:XGXR (SEQ ID NO: 84123), GSAGPXX (SEQ ID NO: 84420):VPT:EPIS (SEQ ID NO: 84109):NDKQQII (SEQ ID NO: 84979):KFKYE (SEQ ID NO: 84211):AVS:RXGXS (SEQ ID NO: 84291), AAPASXX (SEQ ID NO: 84401):VPT:EPIS (SEQ ID NO: 84109):DAANNVV (SEQ ID NO: 84963):KFKYE (SEQ ID NO: 84211):AVS:AXGXR (SEQ ID NO: 84148), STPPTXX (SEQ ID NO: 84431):VPT:EPIS (SEQ ID NO: 84109):DSANNVV (SEQ ID NO: 84971):KFKYE (SEQ ID NO: 84211):AVS:SXGXR (SEQ ID NO: 84305), HVPKPXX (SEQ ID NO: 84421):VPT:EPIS (SEQ ID NO: 84109):DDSSNVI (SEQ ID NO: 84965):KFKYE (SEQ ID NO: 84211):AVS:SXGXH (SEQ ID NO: 84304), RVPSTXX (SEQ ID NO: 84428):VPT:EPIS (SEQ ID NO: 84109):DNGRVLL (SEQ ID NO: 84970):KFKYE (SEQ ID NO: 84211):AVS:XGXL (SEQ ID NO: 84122), ASAAPXX (SEQ ID NO: 84402):VPT:EPIS (SEQ ID NO: 84109):VGRKPKV (SEQ ID NO: 84981):KFKYE (SEQ ID NO: 84211):AVS:XKXS (SEQ ID NO: 84124), ASASPXX (SEQ ID NO: 84403):VPT:EPIS (SEQ ID NO: 84109):IGKTPKI (SEQ ID NO: 84978):KFKYE (SEQ ID NO: 84211):AVS:XKXS (SEQ ID NO: 84124), ASASPXX (SEQ ID NO: 84403):VPT:EPIS (SEQ ID NO: 84109):VGRTPKV (SEQ ID NO: 84982):KFKYE (SEQ ID NO: 84211):AVS:XKXS (SEQ ID NO: 84124), KIPKAXX (SEQ ID NO: 84424):VPT:EPIS (SEQ ID NO: 84109):DENEKVV (SEQ ID NO: 84966):KFKYE (SEQ ID NO: 84211):VVE:GXGXR (SEQ ID NO: 84208), GIPEPXX (SEQ ID NO: 84419):VPE:EPIS (SEQ ID NO: 84109):DENKNVV (SEQ ID NO: 84967):KFKYE (SEQ ID NO: 84211):TVE:SXAXR (SEQ ID NO: 84303), SIPKAXX (SEQ ID NO: 84429):VPT:EPIS (SEQ ID NO: 84109):DEYDKVV (SEQ ID NO: 84968):KFKYE (SEQ ID NO: 84211):VVE:GXGXR (SEQ ID NO: 84208), HVTKPTX (SEQ ID NO: 84422):APT:EPIS (SEQ ID NO: 84109):DDSSNVI (SEQ ID NO: 84965):KFKYE (SEQ ID NO: 84211):VVR:SXGXH (SEQ ID NO: 84304), YVPKPXX (SEQ ID NO: 84433):APT:EPIS (SEQ ID NO: 84109):DDSSNVI (SEQ ID NO: 84965):KFKYE (SEQ ID NO: 84211):VVR:SXGXH (SEQ ID NO: 84304), TVPKPXX (SEQ ID NO: 84432):APT:EPIS (SEQ ID NO: 84109):DDSSNVI (SEQ ID NO: 84965):KFKYE (SEQ ID NO: 84211):VVR:AXGXH (SEQ ID NO: 84147), AVPKAXX (SEQ ID NO: 84404):APT:EPIS (SEQ ID NO: 84109):DSSNNVI (SEQ ID NO: 84972):KFKYE (SEQ ID NO: 84211):VVK:AXGXH (SEQ ID NO: 84147), KVGKAXX (SEQ ID NO: 84425):VPT:EPIS (SEQ ID NO: 84109):DDMGVPT (SEQ ID NO: 84964):KFKYE (SEQ ID NO: 84211):VAE:XGXR (SEQ ID NO: 84123), GSAGPXX (SEQ ID NO: 84420):TPT:EPIS (SEQ ID NO: 84109):NDKQQII (SEQ ID NO: 84979):KFKYE (SEQ ID NO: 84211):VVD:RXGXS (SEQ ID NO: 84291), AAPASXX (SEQ ID NO: 84401):VPA:EPIS (SEQ ID NO: 84109):DAANNVV (SEQ ID NO: 84963):KFKYE (SEQ ID NO: 84211):VVE:AXGXR (SEQ ID NO: 84148), STPPTXX (SEQ ID NO: 84431):VPT:EPIS (SEQ ID NO: 84109):DSANNVV (SEQ ID NO: 84971):KFKYE (SEQ ID NO: 84211):VVE:SXGXR (SEQ ID NO: 84305), HVPKPXX (SEQ ID NO: 84421):APT:EPIS (SEQ ID NO: 84109):DDSSNVI (SEQ ID NO: 84965):KFKYE (SEQ ID NO: 84211):VVR:SXGXH (SEQ ID NO: 84304), RVPSTXX (SEQ ID NO: 84428):APV:EPIS (SEQ ID NO: 84109):DNGRVLL (SEQ ID NO: 84970):KFKYE (SEQ ID NO: 84211):VEE:XGXL (SEQ ID NO: 84122), ASAAPXX (SEQ ID NO: 84402):VPQ:EPIS (SEQ ID NO: 84109):VGRKPKV (SEQ ID NO: 84981):KFKYE (SEQ ID NO: 84211):VRS:XKXS (SEQ ID NO: 84124), ASASPXX (SEQ ID NO: 84403):VSQ:EPIS (SEQ ID NO: 84109):IGKTPKI (SEQ ID NO: 84978):KFKYE (SEQ ID NO: 84211):VKS:XKXS (SEQ ID NO: 84124), ASASPXX (SEQ ID NO: 84403):VPQ:EPIS (SEQ ID NO: 84109):VGRTPKV (SEQ ID NO: 84982):KFKYE (SEQ ID NO: 84211):VKS:XKXS (SEQ ID NO: 84124), NDEGLEX (SEQ ID NO: 84426):VPT:EPIS (SEQ ID NO: 84109):RIKPHQGQH (SEQ ID NO: 84980):KFKYE (SEQ ID NO: 84211):QHN:KXEXR (SEQ ID NO: 84213), NDEGLEX (SEQ ID NO: 84426):VPT:EPIS (SEQ ID NO: 84109):RIKPHQGQH (SEQ ID NO: 84980):KFKYE (SEQ ID NO: 84211):EHS:QXEXR (SEQ ID NO: 84276), SSVKXQP (SEQ ID NO: 84430):SRV:EPIS (SEQ ID NO: 84109):EYVRKKPKL (SEQ ID NO: 84974):KFKYE (SEQ ID NO: 84211):EEH:LEXAXA (SEQ ID NO: 84400), RNVQXRP (SEQ ID NO: 84427):TQV:EPIS (SEQ ID NO: 84109):EIVRKKPIF (SEQ ID NO: 84973):KFKYE (SEQ ID NO: 84211):EDH:LAXKXE (SEQ ID NO: 84399), KIPKAXX (SEQ ID NO: 84424):TPT:SPIN (SEQ ID NO: 84119):DENEKVV (SEQ ID NO: 84966):YGKIP (SEQ ID NO: 84397):VVD:GXGXR (SEQ ID NO: 84208), GIPEPXX (SEQ ID NO: 84419):TPT:SPIN (SEQ ID NO: 84119):DENKNVV (SEQ ID NO: 84967):YGKIP (SEQ ID NO: 84397):VVD:SXAXR (SEQ ID NO: 84303), SIPKAXX (SEQ ID NO: 84429):TPT:SPIN (SEQ ID NO: 84119):DEYDKVV (SEQ ID NO: 84968):YGKIP (SEQ ID NO: 84397):VVD:GXGXR (SEQ ID NO: 84208), HVTKPTX (SEQ ID NO: 84422):TPT:SPIN (SEQ ID NO: 84119):DDSSNVI (SEQ ID NO: 84965):YGKIP (SEQ ID NO: 84397):VVD:SXGXH (SEQ ID NO: 84304), YVPKPXX (SEQ ID NO: 84433):TPT:SPIN (SEQ ID NO: 84119):DDSSNVI (SEQ ID NO: 84965):YGKIP (SEQ ID NO: 84397):VVD:SXGXH (SEQ ID NO: 84304), TVPKPXX (SEQ ID NO: 84432):TPT:SPIN (SEQ ID NO: 84119):DDSSNVI (SEQ ID NO: 84965):YGKIP (SEQ ID NO: 84397):VVD:AXGXH (SEQ ID NO: 84147), AVPKAXX (SEQ ID NO: 84404):TPT:SPIN (SEQ ID NO: 84119):DSSNNVI (SEQ ID NO: 84972):YGKIP (SEQ ID NO: 84397):VVD:AXGXH (SEQ ID NO: 84147), KVGKAXX (SEQ ID NO: 84425):TPT:SPIN (SEQ ID NO: 84119):DDMGVPT (SEQ ID NO: 84964):YGKIP (SEQ ID NO: 84397):VVD:XGXR (SEQ ID NO: 84123), KASKAXX (SEQ ID NO: 84423):TPT:SPIN (SEQ ID NO: 84119):DKGVVTY (SEQ ID NO: 84969):YGKIP (SEQ ID NO: 84397):VVD:EXGXR (SEQ ID NO: 84179), AAPASXX (SEQ ID NO: 84401):TPT:SPIN (SEQ ID NO: 84119):DAANNVV (SEQ ID NO: 84963):YGKIP (SEQ ID NO: 84397):VVD:AXGXR (SEQ ID NO: 84148), STPPTXX (SEQ ID NO: 84431):TPT:SPIN (SEQ ID NO: 84119):DSANNVV (SEQ ID NO: 84971):YGKIP (SEQ ID NO: 84397):VVD:SXGXR (SEQ ID NO: 84305), HVPKPXX (SEQ ID NO: 84421):TPT:SPIN (SEQ ID NO: 84119):DDSSNVI (SEQ ID NO: 84965):YGKIP (SEQ ID NO: 84397):VVD:SXGXH (SEQ ID NO: 84304), RVPSTXX (SEQ ID NO: 84428):TPT:SPIN (SEQ ID NO: 84119):DNGRVLL (SEQ ID NO: 84970):YGKIP (SEQ ID NO: 84397):VVD:XGXL (SEQ ID NO: 84122), ASAAPXX (SEQ ID NO: 84402):TPT:SPIN (SEQ ID NO: 84119):VGRKPKV (SEQ ID NO: 84981):YGKIP (SEQ ID NO: 84397):VVD:XKXS (SEQ ID NO: 84124), ASASPXX (SEQ ID NO: 84403):TPT:SPIN (SEQ ID NO: 84119):IGKTPKI (SEQ ID NO: 84978):YGKIP (SEQ ID NO: 84397):VVD:XKXS (SEQ ID NO: 84124), ASASPXX (SEQ ID NO: 84403):TPT:SPIN (SEQ ID NO: 84119):VGRTPKV (SEQ ID NO: 84982):YGKIP (SEQ ID NO: 84397):VVD:XKXS (SEQ ID NO: 84124), KIPKAXX (SEQ ID NO: 84424):VPT:SPIN (SEQ ID NO: 84119):DENEKVV (SEQ ID NO: 84966):YGKIP (SEQ ID NO: 84397):VVE:GXGXR (SEQ ID NO: 84208), GIPEPXX (SEQ ID NO: 84419):VPE:SPIN (SEQ ID NO: 84119):DENKNVV (SEQ ID NO: 84967):YGKIP (SEQ ID NO: 84397):TVE:SXAXR (SEQ ID NO: 84303), SIPKAXX (SEQ ID NO: 84429):VPT:SPIN (SEQ ID NO: 84119):DEYDKVV (SEQ ID NO: 84968):YGKIP (SEQ ID NO: 84397):VVE:GXGXR (SEQ ID NO: 84208), HVTKPTX (SEQ ID NO: 84422):APT:SPIN (SEQ ID NO: 84119):DDSSNVI (SEQ ID NO: 84965):YGKIP (SEQ ID NO: 84397):VVR:SXGXH (SEQ ID NO: 84304), YVPKPXX (SEQ ID NO: 84433):APT:SPIN (SEQ ID NO: 84119):DDSSNVI (SEQ ID NO: 84965):YGKIP (SEQ ID NO: 84397):VVR:SXGXH (SEQ ID NO: 84304), TVPKPXX (SEQ ID NO: 84432):APT:SPIN (SEQ ID NO: 84119):DDSSNVI (SEQ ID NO: 84965):YGKIP (SEQ ID NO: 84397):VVR:AXGXH (SEQ ID NO: 84147), AVPKAXX (SEQ ID NO: 84404):APT:SPIN (SEQ ID NO: 84119):DSSNNVI (SEQ ID NO: 84972):YGKIP (SEQ ID NO: 84397):VVK:AXGXH (SEQ ID NO: 84147), KVGKAXX (SEQ ID NO: 84425):VPT:SPIN (SEQ ID NO: 84119):DDMGVPT (SEQ ID NO: 84964):YGKIP (SEQ ID NO: 84397):VAE:XGXR (SEQ ID NO: 84123), KASKAXX (SEQ ID NO: 84423):VPT:SPIN (SEQ ID NO: 84119):DKGVVTY (SEQ ID NO: 84969):YGKIP (SEQ ID NO: 84397):AVS:EXGXR (SEQ ID NO: 84179), AAPASXX (SEQ ID NO: 84401):VPA:SPIN (SEQ ID NO: 84119):DAANNVV (SEQ ID NO: 84963):YGKIP (SEQ ID NO: 84397):VVE:AXGXR (SEQ ID NO: 84148), STPPTXX (SEQ ID NO: 84431):VPT:SPIN (SEQ ID NO: 84119):DSANNVV (SEQ ID NO: 84971):YGKIP (SEQ ID NO: 84397):VVE:SXGXR (SEQ ID NO: 84305), HVPKPXX (SEQ ID NO: 84421):APT:SPIN (SEQ ID NO: 84119):DDSSNVI (SEQ ID NO: 84965):YGKIP (SEQ ID NO: 84397):VVR:SXGXH (SEQ ID NO: 84304), RVPSTXX (SEQ ID NO: 84428):APV:SPIN (SEQ ID NO: 84119):DNGRVLL (SEQ ID NO: 84970):YGKIP (SEQ ID NO: 84397):VEE:XGXL (SEQ ID NO: 84122), ASAAPXX (SEQ ID NO: 84402):VPQ:SPIN (SEQ ID NO: 84119):VGRKPKV (SEQ ID NO: 84981):YGKIP (SEQ ID NO: 84397):VRS:XKXS (SEQ ID NO: 84124), ASASPXX (SEQ ID NO: 84403):VSQ:SPIN (SEQ ID NO: 84119):IGKTPKI (SEQ ID NO: 84978):YGKIP (SEQ ID NO: 84397):VKS:XKXS (SEQ ID NO: 84124), ASASPXX (SEQ ID NO: 84403):VPQ:SPIN (SEQ ID NO: 84119):VGRTPKV (SEQ ID NO: 84982):YGKIP (SEQ ID NO: 84397):VKS:XKXS (SEQ ID NO: 84124), NDEGLEX (SEQ ID NO: 84426):VPT:SPIN (SEQ ID NO: 84119):RIKPHQGQH (SEQ ID NO: 84980):YGKIP (SEQ ID NO: 84397):QHN:KXEXR (SEQ ID NO: 84213), NDEGLEX (SEQ ID NO: 84426):VPT:SPIN (SEQ ID NO: 84119):RIKPHQGQH (SEQ ID NO: 84980):YGKIP (SEQ ID NO: 84397):EHS:QXEXR (SEQ ID NO: 84276), SSVKXQP (SEQ ID NO: 84430):SRV:SPIN (SEQ ID NO: 84119):EYVRKKPKL (SEQ ID NO: 84974):YGKIP (SEQ ID NO: 84397):EEH:LEXAXA (SEQ ID NO: 84400), RNVQXRP (SEQ ID NO: 84427):TQV:SPIN (SEQ ID NO: 84119):EIVRKKPIF (SEQ ID NO: 84973):YGKIP (SEQ ID NO: 84397):EDH:LAXKXE (SEQ ID NO: 84399), KIPKAXX (SEQ ID NO: 84424):VPA:SPIS (SEQ ID NO: 84120):DENEKVV (SEQ ID NO: 84966):YKQYE (SEQ ID NO: 84398):VVE:GXGXR (SEQ ID NO: 84208), GIPEPXX (SEQ ID NO: 84419):VPA:SPIS (SEQ ID NO: 84120):DENKNVV (SEQ ID NO: 84967):YKQYE (SEQ ID NO: 84398):VVE:SXAXR (SEQ ID NO: 84303), SIPKAXX (SEQ ID NO: 84429):VPA:SPIS (SEQ ID NO: 84120):DEYDKVV (SEQ ID NO: 84968):YKQYE (SEQ ID NO: 84398):VVE:GXGXR (SEQ ID NO: 84208), HVTKPTX (SEQ ID NO: 84422):VPA:SPIS (SEQ ID NO: 84120):DDSSNVI (SEQ ID NO: 84965):YKQYE (SEQ ID NO: 84398):VVE:SXGXH (SEQ ID NO: 84304), YVPKPXX (SEQ ID NO: 84433):VPA:SPIS (SEQ ID NO: 84120):DDSSNVI (SEQ ID NO: 84965):YKQYE (SEQ ID NO: 84398):VVE:SXGXH (SEQ ID NO: 84304), TVPKPXX (SEQ ID NO: 84432):VPA:SPIS (SEQ ID NO: 84120):DDSSNVI (SEQ ID NO: 84965):YKQYE (SEQ ID NO: 84398):VVE:AXGXH (SEQ ID NO: 84147), AVPKAXX (SEQ ID NO: 84404):VPA:SPIS (SEQ ID NO: 84120):DSSNNVI (SEQ ID NO: 84972):YKQYE (SEQ ID NO: 84398):VVE:AXGXH (SEQ ID NO: 84147), KVGKAXX (SEQ ID NO: 84425):VPA:SPIS (SEQ ID NO: 84120):DDMGVPT (SEQ ID NO: 84964):YKQYE (SEQ ID NO: 84398):VVE:XGXR (SEQ ID NO: 84123), KASKAXX (SEQ ID NO: 84423):VPA:SPIS (SEQ ID NO: 84120):DKGVVTY (SEQ ID NO: 84969):YKQYE (SEQ ID NO: 84398):VVE:EXGXR (SEQ ID NO: 84179), GSAGPXX (SEQ ID NO: 84420):VPA:SPIS (SEQ ID NO: 84120):NDKQQII (SEQ ID NO: 84979):YKQYE (SEQ ID NO: 84398):VVE:RXGXS (SEQ ID NO: 84291), STPPTXX (SEQ ID NO: 84431):VPA:SPIS (SEQ ID NO: 84120):DSANNVV (SEQ ID NO: 84971):YKQYE (SEQ ID NO: 84398):VVE:SXGXR (SEQ ID NO: 84305), HVPKPXX (SEQ ID NO: 84421):VPA:SPIS (SEQ ID NO: 84120):DDSSNVI (SEQ ID NO: 84965):YKQYE (SEQ ID NO: 84398):VVE:SXGXH (SEQ ID NO: 84304), RVPSTXX (SEQ ID NO: 84428):VPA:SPIS (SEQ ID NO: 84120):DNGRVLL (SEQ ID NO: 84970):YKQYE (SEQ ID NO: 84398):VVE:XGXL (SEQ ID NO: 84122), ASAAPXX (SEQ ID NO: 84402):VPA:SPIS (SEQ ID NO: 84120):VGRKPKV (SEQ ID NO: 84981):YKQYE (SEQ ID NO: 84398):VVE:XKXS (SEQ ID NO: 84124), ASASPXX (SEQ ID NO: 84403):VPA:SPIS (SEQ ID NO: 84120):IGKTPKI (SEQ ID NO: 84978):YKQYE (SEQ ID NO: 84398):VVE:XKXS (SEQ ID NO: 84124), ASASPXX (SEQ ID NO: 84403):VPA:SPIS (SEQ ID NO: 84120):VGRTPKV (SEQ ID NO: 84982):YKQYE (SEQ ID NO: 84398):VVE:XKXS (SEQ ID NO: 84124), KIPKAXX (SEQ ID NO: 84424):VPT:SPIS (SEQ ID NO: 84120):DENEKVV (SEQ ID NO: 84966):YKQYE (SEQ ID NO: 84398):VVE:GXGXR (SEQ ID NO: 84208), GIPEPXX (SEQ ID NO: 84419):VPE:SPIS (SEQ ID NO: 84120):DENKNVV (SEQ ID NO: 84967):YKQYE (SEQ ID NO: 84398):TVE:SXAXR (SEQ ID NO: 84303), SIPKAXX (SEQ ID NO: 84429):VPT:SPIS (SEQ ID NO: 84120):DEYDKVV (SEQ ID NO: 84968):YKQYE (SEQ ID NO: 84398):VVE:GXGXR (SEQ ID NO: 84208), HVTKPTX (SEQ ID NO: 84422):APT:SPIS (SEQ ID NO: 84120):DDSSNVI (SEQ ID NO: 84965):YKQYE (SEQ ID NO: 84398):VVR:SXGXH (SEQ ID NO: 84304), YVPKPXX (SEQ ID NO: 84433):APT:SPIS (SEQ ID NO: 84120):DDSSNVI (SEQ ID NO: 84965):YKQYE (SEQ ID NO: 84398):VVR:SXGXH (SEQ ID NO: 84304), TVPKPXX (SEQ ID NO: 84432):APT:SPIS (SEQ ID NO: 84120):DDSSNVI (SEQ ID NO: 84965):YKQYE (SEQ ID NO: 84398):VVR:AXGXH (SEQ ID NO: 84147), AVPKAXX (SEQ ID NO: 84404):APT:SPIS (SEQ ID NO: 84120):DSSNNVI (SEQ ID NO: 84972):YKQYE (SEQ ID NO: 84398):VVK:AXGXH (SEQ ID NO: 84147), KVGKAXX (SEQ ID NO: 84425):VPT:SPIS (SEQ ID NO: 84120):DDMGVPT (SEQ ID NO: 84964):YKQYE (SEQ ID NO: 84398):VAE:XGXR (SEQ ID NO: 84123), KASKAXX (SEQ ID NO: 84423):VPT:SPIS (SEQ ID NO: 84120):DKGVVTY (SEQ ID NO: 84969):YKQYE (SEQ ID NO: 84398):AVS:EXGXR (SEQ ID NO: 84179), GSAGPXX (SEQ ID NO: 84420):TPT:SPIS (SEQ ID NO: 84120):NDKQQII (SEQ ID NO: 84979):YKQYE (SEQ ID NO: 84398):VVD:RXGXS (SEQ ID NO: 84291), STPPTXX (SEQ ID NO: 84431):VPT:SPIS (SEQ ID NO: 84120):DSANNVV (SEQ ID NO: 84971):YKQYE (SEQ ID NO: 84398):VVE:SXGXR (SEQ ID NO: 84305), HVPKPXX (SEQ ID NO: 84421):APT:SPIS (SEQ ID NO: 84120):DDSSNVI (SEQ ID NO: 84965):YKQYE (SEQ ID NO: 84398):VVR:SXGXH (SEQ ID NO: 84304), RVPSTXX (SEQ ID NO: 84428):APV:SPIS (SEQ ID NO: 84120):DNGRVLL (SEQ ID NO: 84970):YKQYE (SEQ ID NO: 84398):VEE:XGXL (SEQ ID NO: 84122), ASAAPXX (SEQ ID NO: 84402):VPQ:SPIS (SEQ ID NO: 84120):VGRKPKV (SEQ ID NO: 84981):YKQYE (SEQ ID NO: 84398):VRS:XKXS (SEQ ID NO: 84124), ASASPXX (SEQ ID NO: 84403):VSQ:SPIS (SEQ ID NO: 84120):IGKTPKI (SEQ ID NO: 84978):YKQYE (SEQ ID NO: 84398):VKS:XKXS (SEQ ID NO: 84124), ASASPXX (SEQ ID NO: 84403):VPQ:SPIS (SEQ ID NO: 84120):VGRTPKV (SEQ ID NO: 84982):YKQYE (SEQ ID NO: 84398):VKS:XKXS (SEQ ID NO: 84124), NDEGLEX (SEQ ID NO: 84426):VPT:SPIS (SEQ ID NO: 84120):RIKPHQGQH (SEQ ID NO: 84980):YKQYE (SEQ ID NO: 84398):QHN:KXEXR (SEQ ID NO: 84213), NDEGLEX (SEQ ID NO: 84426):VPT:SPIS (SEQ ID NO: 84120):RIKPHQGQH (SEQ ID NO: 84980):YKQYE (SEQ ID NO: 84398):EHS:QXEXR (SEQ ID NO: 84276), SSVKXQP (SEQ ID NO: 84430):SRV:SPIS (SEQ ID NO: 84120):EYVRKKPKL (SEQ ID NO: 84974):YKQYE (SEQ ID NO: 84398):EEH:LEXAXA (SEQ ID NO: 84400), RNVQXRP (SEQ ID NO: 84427):TQV:SPIS (SEQ ID NO: 84120):EIVRKKPIF (SEQ ID NO: 84973):YKQYE (SEQ ID NO: 84398):EDH:LAXKXE (SEQ ID NO: 84399), GIPEPXX (SEQ ID NO: 84419):VPT:SPIS (SEQ ID NO: 84120):DENKNVV (SEQ ID NO: 84967):YKQYE (SEQ ID NO: 84398):VVE:SXAXR (SEQ ID NO: 84303), HVTKPTX (SEQ ID NO: 84422):VPT:SPIS (SEQ ID NO: 84120):DDSSNVI (SEQ ID NO: 84965):YKQYE (SEQ ID NO: 84398):VVE:SXGXH (SEQ ID NO: 84304), YVPKPXX (SEQ ID NO: 84433):VPT:SPIS (SEQ ID NO: 84120):DDSSNVI (SEQ ID NO: 84965):YKQYE (SEQ ID NO: 84398):VVE:SXGXH (SEQ ID NO: 84304), TVPKPXX (SEQ ID NO: 84432):VPT:SPIS (SEQ ID NO: 84120):DDSSNVI (SEQ ID NO: 84965):YKQYE (SEQ ID NO: 84398):VVE:AXGXH (SEQ ID NO: 84147), AVPKAXX (SEQ ID NO: 84404):VPT:SPIS (SEQ ID NO: 84120):DSSNNVI (SEQ ID NO: 84972):YKQYE (SEQ ID NO: 84398):VVE:AXGXH (SEQ ID NO: 84147), KVGKAXX (SEQ ID NO: 84425):VPT:SPIS (SEQ ID NO: 84120):DDMGVPT (SEQ ID NO: 84964):YKQYE (SEQ ID NO: 84398):VVE:XGXR (SEQ ID NO: 84123), KASKAXX (SEQ ID NO: 84423):VPT:SPIS (SEQ ID NO: 84120):DKGVVTY (SEQ ID NO: 84969):YKQYE (SEQ ID NO: 84398):VVE:EXGXR (SEQ ID NO: 84179), GSAGPXX (SEQ ID NO: 84420):VPT:SPIS (SEQ ID NO: 84120):NDKQQII (SEQ ID NO: 84979):YKQYE (SEQ ID NO: 84398):VVE:RXGXS (SEQ ID NO: 84291), AAPASXX (SEQ ID NO: 84401):VPT:SPIS (SEQ ID NO: 84120):DAANNVV (SEQ ID NO: 84963):YKQYE (SEQ ID NO: 84398):VVE:AXGXR (SEQ ID NO: 84148), HVPKPXX (SEQ ID NO: 84421):VPT:SPIS (SEQ ID NO: 84120):DDSSNVI (SEQ ID NO: 84965):YKQYE (SEQ ID NO: 84398):VVE:SXGXH (SEQ ID NO: 84304), RVPSTXX (SEQ ID NO: 84428):VPT:SPIS (SEQ ID NO: 84120):DNGRVLL (SEQ ID NO: 84970):YKQYE (SEQ ID NO: 84398):VVE:XGXL (SEQ ID NO: 84122), ASAAPXX (SEQ ID NO: 84402):VPT:SPIS (SEQ ID NO: 84120):VGRKPKV (SEQ ID NO: 84981):YKQYE (SEQ ID NO: 84398):VVE:XKXS (SEQ ID NO: 84124), ASASPXX (SEQ ID NO: 84403):VPT:SPIS (SEQ ID NO: 84120):IGKTPKI (SEQ ID NO: 84978):YKQYE (SEQ ID NO: 84398):VVE:XKXS (SEQ ID NO: 84124), ASASPXX (SEQ ID NO: 84403):VPT:SPIS (SEQ ID NO: 84120):VGRTPKV (SEQ ID NO: 84982):YKQYE (SEQ ID NO: 84398):VVE:XKXS (SEQ ID NO: 84124), AAPASXX (SEQ ID NO: 84401):VPA:SPIS (SEQ ID NO: 84120):DAANNVV (SEQ ID NO: 84963):YKQYE (SEQ ID NO: 84398):VVE:AXGXR (SEQ ID NO: 84148), KIPKAXX (SEQ ID NO: 84424):APV:KPLS (SEQ ID NO: 84112):DENEKVV (SEQ ID NO: 84966):DHHKD (SEQ ID NO: 84149):VEE:GXGXR (SEQ ID NO: 84208), GIPEPXX (SEQ ID NO: 84419):APV:KPLS (SEQ ID NO: 84112):DENKNVV (SEQ ID NO: 84967):DHHKD (SEQ ID NO: 84149):VEE:SXAXR (SEQ ID NO: 84303), SIPKAXX (SEQ ID NO: 84429):APV:KPLS (SEQ ID NO: 84112):DEYDKVV (SEQ ID NO: 84968):DHHKD (SEQ ID NO: 84149):VEE:GXGXR (SEQ ID NO: 84208), HVTKPTX (SEQ ID NO: 84422):APV:KPLS (SEQ ID NO: 84112):DDSSNVI (SEQ ID NO: 84965):DHHKD (SEQ ID NO: 84149):VEE:SXGXH (SEQ ID NO: 84304), YVPKPXX (SEQ ID NO: 84433):APV:KPLS (SEQ ID NO: 84112):DDSSNVI (SEQ ID NO: 84965):DHHKD (SEQ ID NO: 84149):VEE:SXGXH (SEQ ID NO: 84304), TVPKPXX (SEQ ID NO: 84432):APV:KPLS (SEQ ID NO: 84112):DDSSNVI (SEQ ID NO: 84965):DHHKD (SEQ ID NO: 84149):VEE:AXGXH (SEQ ID NO: 84147), AVPKAXX (SEQ ID NO: 84404):APV:KPLS (SEQ ID NO: 84112):DSSNNVI (SEQ ID NO: 84972):DHHKD (SEQ ID NO: 84149):VEE:AXGXH (SEQ ID NO: 84147), KVGKAXX (SEQ ID NO: 84425):APV:KPLS (SEQ ID NO: 84112):DDMGVPT (SEQ ID NO: 84964):DHHKD (SEQ ID NO: 84149):VEE:XGXR (SEQ ID NO: 84123), KASKAXX (SEQ ID NO: 84423):APV:KPLS (SEQ ID NO: 84112):DKGVVTY (SEQ ID NO: 84969):DHHKD (SEQ ID NO: 84149):VEE:EXGXR (SEQ ID NO: 84179), GSAGPXX (SEQ ID NO: 84420):APV:KPLS (SEQ ID NO: 84112):NDKQQII (SEQ ID NO: 84979):DHHKD (SEQ ID NO: 84149):VEE:RXGXS (SEQ ID NO: 84291), AAPASXX (SEQ ID NO: 84401):APV:KPLS (SEQ ID NO: 84112):DAANNVV (SEQ ID NO: 84963):DHHKD (SEQ ID NO: 84149):VEE:AXGXR (SEQ ID NO: 84148), STPPTXX (SEQ ID NO: 84431):APV:KPLS (SEQ ID NO: 84112):DSANNVV (SEQ ID NO: 84971):DHHKD (SEQ ID NO: 84149):VEE:SXGXR (SEQ ID NO: 84305), HVPKPXX (SEQ ID NO: 84421):APV:KPLS (SEQ ID NO: 84112):DDSSNVI (SEQ ID NO: 84965):DHHKD (SEQ ID NO: 84149):VEE:SXGXH (SEQ ID NO: 84304), ASAAPXX (SEQ ID NO: 84402):APV:KPLS (SEQ ID NO: 84112):VGRKPKV (SEQ ID NO: 84981):DHHKD (SEQ ID NO: 84149):VEE:XKXS (SEQ ID NO: 84124), ASASPXX (SEQ ID NO: 84403):APV:KPLS (SEQ ID NO: 84112):IGKTPKI (SEQ ID NO: 84978):DHHKD (SEQ ID NO: 84149):VEE:XKXS (SEQ ID NO: 84124), ASASPXX (SEQ ID NO: 84403):APV:KPLS (SEQ ID NO: 84112):VGRTPKV (SEQ ID NO: 84982):DHHKD (SEQ ID NO: 84149):VEE:XKXS (SEQ ID NO: 84124), KIPKAXX (SEQ ID NO: 84424):VPT:KPLS (SEQ ID NO: 84112):DENEKVV (SEQ ID NO: 84966):DHHKD (SEQ ID NO: 84149):VVE:GXGXR (SEQ ID NO: 84208), GIPEPXX (SEQ ID NO: 84419):VPE:KPLS (SEQ ID NO: 84112):DENKNVV (SEQ ID NO: 84967):DHHKD (SEQ ID NO: 84149):TVE:SXAXR (SEQ ID NO: 84303), SIPKAXX (SEQ ID NO: 84429):VPT:KPLS (SEQ ID NO: 84112):DEYDKVV (SEQ ID NO: 84968):DHHKD (SEQ ID NO: 84149):VVE:GXGXR (SEQ ID NO: 84208), HVTKPTX (SEQ ID NO: 84422):APT:KPLS (SEQ ID NO: 84112):DDSSNVI (SEQ ID NO: 84965):DHHKD (SEQ ID NO: 84149):VVR:SXGXH (SEQ ID NO: 84304), YVPKPXX (SEQ ID NO: 84433):APT:KPLS (SEQ ID NO: 84112):DDSSNVI (SEQ ID NO: 84965):DHHKD (SEQ ID NO: 84149):VVR:SXGXH (SEQ ID NO: 84304), TVPKPXX (SEQ ID NO: 84432):APT:KPLS (SEQ ID NO: 84112):DDSSNVI (SEQ ID NO: 84965):DHHKD (SEQ ID NO: 84149):VVR:AXGXH (SEQ ID NO: 84147), AVPKAXX (SEQ ID NO: 84404):APT:KPLS (SEQ ID NO: 84112):DSSNNVI (SEQ ID NO: 84972):DHHKD (SEQ ID NO: 84149):VVK:AXGXH (SEQ ID NO: 84147), KVGKAXX (SEQ ID NO: 84425):VPT:KPLS (SEQ ID NO: 84112):DDMGVPT (SEQ ID NO: 84964):DHHKD (SEQ ID NO: 84149):VAE:XGXR (SEQ ID NO: 84123), KASKAXX (SEQ ID NO: 84423):VPT:KPLS (SEQ ID NO: 84112):DKGVVTY (SEQ ID NO: 84969):DHHKD (SEQ ID NO: 84149):AVS:EXGXR (SEQ ID NO: 84179), GSAGPXX (SEQ ID NO: 84420):TPT:KPLS (SEQ ID NO: 84112):NDKQQII (SEQ ID NO: 84979):DHHKD (SEQ ID NO: 84149):VVD:RXGXS (SEQ ID NO: 84291), AAPASXX (SEQ ID NO: 84401):VPA:KPLS (SEQ ID NO: 84112):DAANNVV (SEQ ID NO: 84963):DHHKD (SEQ ID NO: 84149):VVE:AXGXR (SEQ ID NO: 84148), STPPTXX (SEQ ID NO: 84431):VPT:KPLS (SEQ ID NO: 84112):DSANNVV (SEQ ID NO: 84971):DHHKD (SEQ ID NO: 84149):VVE:SXGXR (SEQ ID NO: 84305), HVPKPXX (SEQ ID NO: 84421):APT:KPLS (SEQ ID NO: 84112):DDSSNVI (SEQ ID NO: 84965):DHHKD (SEQ ID NO: 84149):VVR:SXGXH (SEQ ID NO: 84304), ASAAPXX (SEQ ID NO: 84402):VPQ:KPLS (SEQ ID NO: 84112):VGRKPKV (SEQ ID NO: 84981):DHHKD (SEQ ID NO: 84149):VRS:XKXS (SEQ ID NO: 84124), ASASPXX (SEQ ID NO: 84403):VSQ:KPLS (SEQ ID NO: 84112):IGKTPKI (SEQ ID NO: 84978):DHHKD (SEQ ID NO: 84149):VKS:XKXS (SEQ ID NO: 84124), ASASPXX (SEQ ID NO: 84403):VPQ:KPLS (SEQ ID NO: 84112):VGRTPKV (SEQ ID NO: 84982):DHHKD (SEQ ID NO: 84149):VKS:XKXS (SEQ ID NO: 84124), NDEGLEX (SEQ ID NO: 84426):VPT:KPLS (SEQ ID NO: 84112):RIKPHQGQH (SEQ ID NO: 84980):DHHKD (SEQ ID NO: 84149):QHN:KXEXR (SEQ ID NO: 84213), NDEGLEX (SEQ ID NO: 84426):VPT:KPLS (SEQ ID NO: 84112):RIKPHQGQH (SEQ ID NO: 84980):DHHKD (SEQ ID NO: 84149):EHS:QXEXR (SEQ ID NO: 84276), SSVKXQP (SEQ ID NO: 84430):SRV:KPLS (SEQ ID NO: 84112):EYVRKKPKL (SEQ ID NO: 84974):DHHKD (SEQ ID NO: 84149):EEH:LEXAXA (SEQ ID NO: 84400), RNVQXRP (SEQ ID NO: 84427):TQV:KPLS (SEQ ID NO: 84112):EIVRKKPIF (SEQ ID NO: 84973):DHHKD (SEQ ID NO: 84149):EDH:LAXKXE (SEQ ID NO: 84399), KIPKAXX (SEQ ID NO: 84424):VPQ:EPLP (SEQ ID NO: 84110):DENEKVV (SEQ ID NO: 84966):EQLSN (SEQ ID NO: 84178):VRS:GXGXR (SEQ ID NO: 84208), GIPEPXX (SEQ ID NO: 84419):VPQ:EPLP (SEQ ID NO: 84110):DENKNVV (SEQ ID NO: 84967):EQLSN (SEQ ID NO: 84178):VRS:SXAXR (SEQ ID NO: 84303), SIPKAXX (SEQ ID NO: 84429):VPQ:EPLP (SEQ ID NO: 84110):DEYDKVV (SEQ ID NO: 84968):EQLSN (SEQ ID NO: 84178):VRS:GXGXR (SEQ ID NO: 84208), HVTKPTX (SEQ ID NO: 84422):VPQ:EPLP (SEQ ID NO: 84110):DDSSNVI (SEQ ID NO: 84965):EQLSN (SEQ ID NO: 84178):VRS:SXGXH (SEQ ID NO: 84304), YVPKPXX (SEQ ID NO: 84433):VPQ:EPLP (SEQ ID NO: 84110):DDSSNVI (SEQ ID NO: 84965):EQLSN (SEQ ID NO: 84178):VRS:SXGXH (SEQ ID NO: 84304), TVPKPXX (SEQ ID NO: 84432):VPQ:EPLP (SEQ ID NO: 84110):DDSSNVI (SEQ ID NO: 84965):EQLSN (SEQ ID NO: 84178):VRS:AXGXH (SEQ ID NO: 84147), AVPKAXX (SEQ ID NO: 84404):VPQ:EPLP (SEQ ID NO: 84110):DSSNNVI (SEQ ID NO: 84972):EQLSN (SEQ ID NO: 84178):VRS:AXGXH (SEQ ID NO: 84147), KVGKAXX (SEQ ID NO: 84425):VPQ:EPLP (SEQ ID NO: 84110):DDMGVPT (SEQ ID NO: 84964):EQLSN (SEQ ID NO: 84178):VRS:XGXR (SEQ ID NO: 84123), KASKAXX (SEQ ID NO: 84423):VPQ:EPLP (SEQ ID NO: 84110):DKGVVTY (SEQ ID NO: 84969):EQLSN (SEQ ID NO: 84178):VRS:EXGXR (SEQ ID NO: 84179), GSAGPXX (SEQ ID NO: 84420):VPQ:EPLP (SEQ ID NO: 84110):NDKQQII (SEQ ID NO: 84979):EQLSN (SEQ ID NO: 84178):VRS:RXGXS (SEQ ID NO: 84291), AAPASXX (SEQ ID NO: 84401):VPQ:EPLP (SEQ ID NO: 84110):DAANNVV (SEQ ID NO: 84963):EQLSN (SEQ ID NO: 84178):VRS:AXGXR (SEQ ID NO: 84148), STPPTXX (SEQ ID NO: 84431):VPQ:EPLP (SEQ ID NO: 84110):DSANNVV (SEQ ID NO: 84971):EQLSN (SEQ ID NO: 84178):VRS:SXGXR (SEQ ID NO: 84305), HVPKPXX (SEQ ID NO: 84421):VPQ:EPLP (SEQ ID NO: 84110):DDSSNVI (SEQ ID NO: 84965):EQLSN (SEQ ID NO: 84178):VRS:SXGXH (SEQ ID NO: 84304), RVPSTXX (SEQ ID NO: 84428):VPQ:EPLP (SEQ ID NO: 84110):DNGRVLL (SEQ ID NO: 84970):EQLSN (SEQ ID NO: 84178):VRS:XGXL (SEQ ID NO: 84122), ASASPXX (SEQ ID NO: 84403):VPQ:EPLP (SEQ ID NO: 84110):IGKTPKI (SEQ ID NO: 84978):EQLSN (SEQ ID NO: 84178):VRS:XKXS (SEQ ID NO: 84124), ASASPXX (SEQ ID NO: 84403):VPQ:EPLP (SEQ ID NO: 84110):VGRTPKV (SEQ ID NO: 84982):EQLSN (SEQ ID NO: 84178):VRS:XKXS (SEQ ID NO: 84124), KIPKAXX (SEQ ID NO: 84424):VPT:EPLP (SEQ ID NO: 84110):DENEKVV (SEQ ID NO: 84966):EQLSN (SEQ ID NO: 84178):VVE:GXGXR (SEQ ID NO: 84208), GIPEPXX (SEQ ID NO: 84419):VPE:EPLP (SEQ ID NO: 84110):DENKNVV (SEQ ID NO: 84967):EQLSN (SEQ ID NO: 84178):TVE:SXAXR (SEQ ID NO: 84303), SIPKAXX (SEQ ID NO: 84429):VPT:EPLP (SEQ ID NO: 84110):DEYDKVV (SEQ ID NO: 84968):EQLSN (SEQ ID NO: 84178):VVE:GXGXR (SEQ ID NO: 84208), HVTKPTX (SEQ ID NO: 84422):APT:EPLP (SEQ ID NO: 84110):DDSSNVI (SEQ ID NO: 84965):EQLSN (SEQ ID NO: 84178):VVR:SXGXH (SEQ ID NO: 84304), YVPKPXX (SEQ ID NO: 84433):APT:EPLP (SEQ ID NO: 84110):DDSSNVI (SEQ ID NO: 84965):EQLSN (SEQ ID NO: 84178):VVR:SXGXH (SEQ ID NO: 84304), TVPKPXX (SEQ ID NO: 84432):APT:EPLP (SEQ ID NO: 84110):DDSSNVI (SEQ ID NO: 84965):EQLSN (SEQ ID NO: 84178):VVR:AXGXH (SEQ ID NO: 84147), AVPKAXX (SEQ ID NO: 84404):APT:EPLP (SEQ ID NO: 84110):DSSNNVI (SEQ ID NO: 84972):EQLSN (SEQ ID NO: 84178):VVK:AXGXH (SEQ ID NO: 84147), KVGKAXX (SEQ ID NO: 84425):VPT:EPLP (SEQ ID NO: 84110):DDMGVPT (SEQ ID NO: 84964):EQLSN (SEQ ID NO: 84178):VAE:XGXR (SEQ ID NO: 84123), KASKAXX (SEQ ID NO: 84423):VPT:EPLP (SEQ ID NO: 84110):DKGVVTY (SEQ ID NO: 84969):EQLSN (SEQ ID NO: 84178):AVS:EXGXR (SEQ ID NO: 84179), GSAGPXX (SEQ ID NO: 84420):TPT:EPLP (SEQ ID NO: 84110):NDKQQII (SEQ ID NO: 84979):EQLSN (SEQ ID NO: 84178):VVD:RXGXS (SEQ ID NO: 84291), AAPASXX (SEQ ID NO: 84401):VPA:EPLP (SEQ ID NO: 84110):DAANNVV (SEQ ID NO: 84963):EQLSN (SEQ ID NO: 84178):VVE:AXGXR (SEQ ID NO: 84148), STPPTXX (SEQ ID NO: 84431):VPT:EPLP (SEQ ID NO: 84110):DSANNVV (SEQ ID NO: 84971):EQLSN (SEQ ID NO: 84178):VVE:SXGXR (SEQ ID NO: 84305), HVPKPXX (SEQ ID NO: 84421):APT:EPLP (SEQ ID NO: 84110):DDSSNVI (SEQ ID NO: 84965):EQLSN (SEQ ID NO: 84178):VVR:SXGXH (SEQ ID NO: 84304), RVPSTXX (SEQ ID NO: 84428):APV:EPLP (SEQ ID NO: 84110):DNGRVLL (SEQ ID NO: 84970):EQLSN (SEQ ID NO: 84178):VEE:XGXL (SEQ ID NO: 84122), ASASPXX (SEQ ID NO: 84403):VSQ:EPLP (SEQ ID NO: 84110):IGKTPKI (SEQ ID NO: 84978):EQLSN (SEQ ID NO: 84178):VKS:XKXS (SEQ ID NO: 84124), ASASPXX (SEQ ID NO: 84403):VPQ:EPLP (SEQ ID NO: 84110):VGRTPKV (SEQ ID NO: 84982):EQLSN (SEQ ID NO: 84178):VKS:XKXS (SEQ ID NO: 84124), NDEGLEX (SEQ ID NO: 84426):VPT:EPLP (SEQ ID NO: 84110):RIKPHQGQH (SEQ ID NO: 84980):EQLSN (SEQ ID NO: 84178):QHN:KXEXR (SEQ ID NO: 84213), NDEGLEX (SEQ ID NO: 84426):VPT:EPLP (SEQ ID NO: 84110):RIKPHQGQH (SEQ ID NO: 84980):EQLSN (SEQ ID NO: 84178):EHS:QXEXR (SEQ ID NO: 84276), SSVKXQP (SEQ ID NO: 84430):SRV:EPLP (SEQ ID NO: 84110):EYVRKKPKL (SEQ ID NO: 84974):EQLSN (SEQ ID NO: 84178):EEH:LEXAXA (SEQ ID NO: 84400), RNVQXRP (SEQ ID NO: 84427):TQV:EPLP (SEQ ID NO: 84110):EIVRKKPIF (SEQ ID NO: 84973):EQLSN (SEQ ID NO: 84178):EDH:LAXKXE (SEQ ID NO: 84399), KIPKAXX (SEQ ID NO: 84424):VSQ:EPLT (SEQ ID NO: 84111):DENEKVV (SEQ ID NO: 84966):EQLSN (SEQ ID NO: 84178):VKS:GXGXR (SEQ ID NO: 84208), GIPEPXX (SEQ ID NO: 84419):VSQ:EPLT (SEQ ID NO: 84111):DENKNVV (SEQ ID NO: 84967):EQLSN (SEQ ID NO: 84178):VKS:SXAXR (SEQ ID NO: 84303), SIPKAXX (SEQ ID NO: 84429):VSQ:EPLT (SEQ ID NO: 84111):DEYDKVV (SEQ ID NO: 84968):EQLSN (SEQ ID NO: 84178):VKS:GXGXR (SEQ ID NO: 84208), HVTKPTX (SEQ ID NO: 84422):VSQ:EPLT (SEQ ID NO: 84111):DDSSNVI (SEQ ID NO: 84965):EQLSN (SEQ ID NO: 84178):VKS:SXGXH (SEQ ID NO: 84304), YVPKPXX (SEQ ID NO: 84433):VSQ:EPLT (SEQ ID NO: 84111):DDSSNVI (SEQ ID NO: 84965):EQLSN (SEQ ID NO: 84178):VKS:SXGXH (SEQ ID NO: 84304), TVPKPXX (SEQ ID NO: 84432):VSQ:EPLT (SEQ ID NO: 84111):DDSSNVI (SEQ ID NO: 84965):EQLSN (SEQ ID NO: 84178):VKS:AXGXH (SEQ ID NO: 84147), AVPKAXX (SEQ ID NO: 84404):VSQ:EPLT (SEQ ID NO: 84111):DSSNNVI (SEQ ID NO: 84972):EQLSN (SEQ ID NO: 84178):VKS:AXGXH (SEQ ID NO: 84147), KVGKAXX (SEQ ID NO: 84425):VSQ:EPLT (SEQ ID NO: 84111):DDMGVPT (SEQ ID NO: 84964):EQLSN (SEQ ID NO: 84178):VKS:XGXR (SEQ ID NO: 84123), KASKAXX (SEQ ID NO: 84423):VSQ:EPLT (SEQ ID NO: 84111):DKGVVTY (SEQ ID NO: 84969):EQLSN (SEQ ID NO: 84178):VKS:EXGXR (SEQ ID NO: 84179), GSAGPXX (SEQ ID NO: 84420):VSQ:EPLT (SEQ ID NO: 84111):NDKQQII (SEQ ID NO: 84979):EQLSN (SEQ ID NO: 84178):VKS:RXGXS (SEQ ID NO: 84291), AAPASXX (SEQ ID NO: 84401):VSQ:EPLT (SEQ ID NO: 84111):DAANNVV (SEQ ID NO: 84963):EQLSN (SEQ ID NO: 84178):VKS:AXGXR (SEQ ID NO: 84148), STPPTXX (SEQ ID NO: 84431):VSQ:EPLT (SEQ ID NO: 84111):DSANNVV (SEQ ID NO: 84971):EQLSN (SEQ ID NO: 84178):VKS:SXGXR (SEQ ID NO: 84305), HVPKPXX (SEQ ID NO: 84421):VSQ:EPLT (SEQ ID NO: 84111):DDSSNVI (SEQ ID NO: 84965):EQLSN (SEQ ID NO: 84178):VKS:SXGXH (SEQ ID NO: 84304), RVPSTXX (SEQ ID NO: 84428):VSQ:EPLT (SEQ ID NO: 84111):DNGRVLL (SEQ ID NO: 84970):EQLSN (SEQ ID NO: 84178):VKS:XGXL (SEQ ID NO: 84122), ASAAPXX (SEQ ID NO: 84402):VSQ:EPLT (SEQ ID NO: 84111):VGRKPKV (SEQ ID NO: 84981):EQLSN (SEQ ID NO: 84178):VKS:XKXS (SEQ ID NO: 84124), ASASPXX (SEQ ID NO: 84403):VSQ:EPLT (SEQ ID NO: 84111):VGRTPKV (SEQ ID NO: 84982):EQLSN (SEQ ID NO: 84178):VKS:XKXS (SEQ ID NO: 84124), KIPKAXX (SEQ ID NO: 84424):VPT:EPLT (SEQ ID NO: 84111):DENEKVV (SEQ ID NO: 84966):EQLSN (SEQ ID NO: 84178):VVE:GXGXR (SEQ ID NO: 84208), GIPEPXX (SEQ ID NO: 84419):VPE:EPLT (SEQ ID NO: 84111):DENKNVV (SEQ ID NO: 84967):EQLSN (SEQ ID NO: 84178):TVE:SXAXR (SEQ ID NO: 84303), SIPKAXX (SEQ ID NO: 84429):VPT:EPLT (SEQ ID NO: 84111):DEYDKVV (SEQ ID NO: 84968):EQLSN (SEQ ID NO: 84178):VVE:GXGXR (SEQ ID NO: 84208), HVTKPTX (SEQ ID NO: 84422):APT:EPLT (SEQ ID NO: 84111):DDSSNVI (SEQ ID NO: 84965):EQLSN (SEQ ID NO: 84178):VVR:SXGXH (SEQ ID NO: 84304), YVPKPXX (SEQ ID NO: 84433):APT:EPLT (SEQ ID NO: 84111):DDSSNVI (SEQ ID NO: 84965):EQLSN (SEQ ID NO: 84178):VVR:SXGXH (SEQ ID NO: 84304), TVPKPXX (SEQ ID NO: 84432):APT:EPLT (SEQ ID NO: 84111):DDSSNVI (SEQ ID NO: 84965):EQLSN (SEQ ID NO: 84178):VVR:AXGXH (SEQ ID NO: 84147), AVPKAXX (SEQ ID NO: 84404):APT:EPLT (SEQ ID NO: 84111):DSSNNVI (SEQ ID NO: 84972):EQLSN (SEQ ID NO: 84178):VVK:AXGXH (SEQ ID NO: 84147), KVGKAXX (SEQ ID NO: 84425):VPT:EPLT (SEQ ID NO: 84111):DDMGVPT (SEQ ID NO: 84964):EQLSN (SEQ ID NO: 84178):VAE:XGXR (SEQ ID NO: 84123), KASKAXX (SEQ ID NO: 84423):VPT:EPLT (SEQ ID NO: 84111):DKGVVTY (SEQ ID NO: 84969):EQLSN (SEQ ID NO: 84178):AVS:EXGXR (SEQ ID NO: 84179), GSAGPXX (SEQ ID NO: 84420):TPT:EPLT (SEQ ID NO: 84111):NDKQQII (SEQ ID NO: 84979):EQLSN (SEQ ID NO: 84178):VVD:RXGXS (SEQ ID NO: 84291), AAPASXX (SEQ ID NO: 84401):VPA:EPLT (SEQ ID NO: 84111):DAANNVV (SEQ ID NO: 84963):EQLSN (SEQ ID NO: 84178):VVE:AXGXR (SEQ ID NO: 84148), STPPTXX (SEQ ID NO: 84431):VPT:EPLT (SEQ ID NO: 84111):DSANNVV (SEQ ID NO: 84971):EQLSN (SEQ ID NO: 84178):VVE:SXGXR (SEQ ID NO: 84305), HVPKPXX (SEQ ID NO: 84421):APT:EPLT (SEQ ID NO: 84111):DDSSNVI (SEQ ID NO: 84965):EQLSN (SEQ ID NO: 84178):VVR:SXGXH (SEQ ID NO: 84304), RVPSTXX (SEQ ID NO: 84428):APV:EPLT (SEQ ID NO: 84111):DNGRVLL (SEQ ID NO: 84970):EQLSN (SEQ ID NO: 84178):VEE:XGXL (SEQ ID NO: 84122), ASAAPXX (SEQ ID NO: 84402):VPQ:EPLT (SEQ ID NO: 84111):VGRKPKV (SEQ ID NO: 84981):EQLSN (SEQ ID NO: 84178):VRS:XKXS (SEQ ID NO: 84124), NDEGLEX (SEQ ID NO: 84426):VPT:EPLT (SEQ ID NO: 84111):RIKPHQGQH (SEQ ID NO: 84980):EQLSN (SEQ ID NO: 84178):QHN:KXEXR (SEQ ID NO: 84213), NDEGLEX (SEQ ID NO: 84426):VPT:EPLT (SEQ ID NO: 84111):RIKPHQGQH (SEQ ID NO: 84980):EQLSN (SEQ ID NO: 84178):EHS:QXEXR (SEQ ID NO: 84276), SSVKXQP (SEQ ID NO: 84430):SRV:EPLT (SEQ ID NO: 84111):EYVRKKPKL (SEQ ID NO: 84974):EQLSN (SEQ ID NO: 84178):EEH:LEXAXA (SEQ ID NO: 84400), RNVQXRP (SEQ ID NO: 84427):TQV:EPLT (SEQ ID NO: 84111):EIVRKKPIF (SEQ ID NO: 84973):EQLSN (SEQ ID NO: 84178):EDH:LAXKXE (SEQ ID NO: 84399), KIPKAXX (SEQ ID NO: 84424):VPQ:EPLT (SEQ ID NO: 84111):DENEKVV (SEQ ID NO: 84966):EQLSN (SEQ ID NO: 84178):VKS:GXGXR (SEQ ID NO: 84208), GIPEPXX (SEQ ID NO: 84419):VPQ:EPLT (SEQ ID NO: 84111):DENKNVV (SEQ ID NO: 84967):EQLSN (SEQ ID NO: 84178):VKS:SXAXR (SEQ ID NO: 84303), SIPKAXX (SEQ ID NO: 84429):VPQ:EPLT (SEQ ID NO: 84111):DEYDKVV (SEQ ID NO: 84968):EQLSN (SEQ ID NO: 84178):VKS:GXGXR (SEQ ID NO: 84208), HVTKPTX (SEQ ID NO: 84422):VPQ:EPLT (SEQ ID NO: 84111):DDSSNVI (SEQ ID NO: 84965):EQLSN (SEQ ID NO: 84178):VKS:SXGXH (SEQ ID NO: 84304), YVPKPXX (SEQ ID NO: 84433):VPQ:EPLT (SEQ ID NO: 84111):DDSSNVI (SEQ ID NO: 84965):EQLSN (SEQ ID NO: 84178):VKS:SXGXH (SEQ ID NO: 84304), TVPKPXX (SEQ ID NO: 84432):VPQ:EPLT (SEQ ID NO: 84111):DDSSNVI (SEQ ID NO: 84965):EQLSN (SEQ ID NO: 84178):VKS:AXGXH (SEQ ID NO: 84147), AVPKAXX (SEQ ID NO: 84404):VPQ:EPLT (SEQ ID NO: 84111):DSSNNVI (SEQ ID NO: 84972):EQLSN (SEQ ID NO: 84178):VKS:AXGXH (SEQ ID NO: 84147), KVGKAXX (SEQ ID NO: 84425):VPQ:EPLT (SEQ ID NO: 84111):DDMGVPT (SEQ ID NO: 84964):EQLSN (SEQ ID NO: 84178):VKS:XGXR (SEQ ID NO: 84123), KASKAXX (SEQ ID NO: 84423):VPQ:EPLT (SEQ ID NO: 84111):DKGVVTY (SEQ ID NO: 84969):EQLSN (SEQ ID NO: 84178):VKS:EXGXR (SEQ ID NO: 84179), GSAGPXX (SEQ ID NO: 84420):VPQ:EPLT (SEQ ID NO: 84111):NDKQQII (SEQ ID NO: 84979):EQLSN (SEQ ID NO: 84178):VKS:RXGXS (SEQ ID NO: 84291), AAPASXX (SEQ ID NO: 84401):VPQ:EPLT (SEQ ID NO: 84111):DAANNVV (SEQ ID NO: 84963):EQLSN (SEQ ID NO: 84178):VKS:AXGXR (SEQ ID NO: 84148), STPPTXX (SEQ ID NO: 84431):VPQ:EPLT (SEQ ID NO: 84111):DSANNVV (SEQ ID NO: 84971):EQLSN (SEQ ID NO: 84178):VKS:SXGXR (SEQ ID NO: 84305), HVPKPXX (SEQ ID NO: 84421):VPQ:EPLT (SEQ ID NO: 84111):DDSSNVI (SEQ ID NO: 84965):EQLSN (SEQ ID NO: 84178):VKS:SXGXH (SEQ ID NO: 84304), RVPSTXX (SEQ ID NO: 84428):VPQ:EPLT (SEQ ID NO: 84111):DNGRVLL (SEQ ID NO: 84970):EQLSN (SEQ ID NO: 84178):VKS:XGXL (SEQ ID NO: 84122), ASAAPXX (SEQ ID NO: 84402):VPQ:EPLT (SEQ ID NO: 84111):VGRKPKV (SEQ ID NO: 84981):EQLSN (SEQ ID NO: 84178):VKS:XKXS (SEQ ID NO: 84124), ASASPXX (SEQ ID NO: 84403):VPQ:EPLT (SEQ ID NO: 84111):IGKTPKI (SEQ ID NO: 84978):EQLSN (SEQ ID NO: 84178):VKS:XKXS (SEQ ID NO: 84124), NDEGLEX (SEQ ID NO: 84426):VPT:SNIT (SEQ ID NO: 84118):RIKPHQGQH (SEQ ID NO: 84980):IGEMS (SEQ ID NO: 84209):QHN:QXEXR (SEQ ID NO: 84276), KIPKAXX (SEQ ID NO: 84424):VPT:SNIT (SEQ ID NO: 84118):DENEKVV (SEQ ID NO: 84966):IGEMS (SEQ ID NO: 84209):VVE:GXGXR (SEQ ID NO: 84208), GIPEPXX (SEQ ID NO: 84419):VPE:SNIT (SEQ ID NO: 84118):DENKNVV (SEQ ID NO: 84967):IGEMS (SEQ ID NO: 84209):TVE:SXAXR (SEQ ID NO: 84303), SIPKAXX (SEQ ID NO: 84429):VPT:SNIT (SEQ ID NO: 84118):DEYDKVV (SEQ ID NO: 84968):IGEMS (SEQ ID NO: 84209):VVE:GXGXR (SEQ ID NO: 84208), HVTKPTX (SEQ ID NO: 84422):APT:SNIT (SEQ ID NO: 84118):DDSSNVI (SEQ ID NO: 84965):IGEMS (SEQ ID NO: 84209):VVR:SXGXH (SEQ ID NO: 84304), YVPKPXX (SEQ ID NO: 84433):APT:SNIT (SEQ ID NO: 84118):DDSSNVI (SEQ ID NO: 84965):IGEMS (SEQ ID NO: 84209):VVR:SXGXH (SEQ ID NO: 84304), TVPKPXX (SEQ ID NO: 84432):APT:SNIT (SEQ ID NO: 84118):DDSSNVI (SEQ ID NO: 84965):IGEMS (SEQ ID NO: 84209):VVR:AXGXH (SEQ ID NO: 84147), AVPKAXX (SEQ ID NO: 84404):APT:SNIT (SEQ ID NO: 84118):DSSNNVI (SEQ ID NO: 84972):IGEMS (SEQ ID NO: 84209):VVK:AXGXH (SEQ ID NO: 84147), KVGKAXX (SEQ ID NO: 84425):VPT:SNIT (SEQ ID NO: 84118):DDMGVPT (SEQ ID NO: 84964):IGEMS (SEQ ID NO: 84209):VAE:XGXR (SEQ ID NO: 84123), KASKAXX (SEQ ID NO: 84423):VPT:SNIT (SEQ ID NO: 84118):DKGVVTY (SEQ ID NO: 84969):IGEMS (SEQ ID NO: 84209):AVS:EXGXR (SEQ ID NO: 84179), GSAGPXX (SEQ ID NO: 84420):TPT:SNIT (SEQ ID NO: 84118):NDKQQII (SEQ ID NO: 84979):IGEMS (SEQ ID NO: 84209):VVD:RXGXS (SEQ ID NO: 84291), AAPASXX (SEQ ID NO: 84401):VPA:SNIT (SEQ ID NO: 84118):DAANNVV (SEQ ID NO: 84963):IGEMS (SEQ ID NO: 84209):VVE:AXGXR (SEQ ID NO: 84148), STPPTXX (SEQ ID NO: 84431):VPT:SNIT (SEQ ID NO: 84118):DSANNVV (SEQ ID NO: 84971):IGEMS (SEQ ID NO: 84209):VVE:SXGXR (SEQ ID NO: 84305), HVPKPXX (SEQ ID NO: 84421):APT:SNIT (SEQ ID NO: 84118):DDSSNVI (SEQ ID NO: 84965):IGEMS (SEQ ID NO: 84209):VVR:SXGXH (SEQ ID NO: 84304), RVPSTXX (SEQ ID NO: 84428):APV:SNIT (SEQ ID NO: 84118):DNGRVLL (SEQ ID NO: 84970):IGEMS (SEQ ID NO: 84209):VEE:XGXL (SEQ ID NO: 84122), ASAAPXX (SEQ ID NO: 84402):VPQ:SNIT (SEQ ID NO: 84118):VGRKPKV (SEQ ID NO: 84981):IGEMS (SEQ ID NO: 84209):VRS:XKXS (SEQ ID NO: 84124), ASASPXX (SEQ ID NO: 84403):VSQ:SNIT (SEQ ID NO: 84118):IGKTPKI (SEQ ID NO: 84978):IGEMS (SEQ ID NO: 84209):VKS:XKXS (SEQ ID NO: 84124), ASASPXX (SEQ ID NO: 84403):VPQ:SNIT (SEQ ID NO: 84118):VGRTPKV (SEQ ID NO: 84982):IGEMS (SEQ ID NO: 84209):VKS:XKXS (SEQ ID NO: 84124), NDEGLEX (SEQ ID NO: 84426):VPT:SNIT (SEQ ID NO: 84118):RIKPHQGQH (SEQ ID NO: 84980):IGEMS (SEQ ID NO: 84209):EHS:QXEXR (SEQ ID NO: 84276), SSVKXQP (SEQ ID NO: 84430):SRV:SNIT (SEQ ID NO: 84118):EYVRKKPKL (SEQ ID NO: 84974):IGEMS (SEQ ID NO: 84209):EEH:LEXAXA (SEQ ID NO: 84400), RNVQXRP (SEQ ID NO: 84427):TQV:SNIT (SEQ ID NO: 84118):EIVRKKPIF (SEQ ID NO: 84973):IGEMS (SEQ ID NO: 84209):EDH:LAXKXE (SEQ ID NO: 84399), NDEGLEX (SEQ ID NO: 84426):VPT:SNIT (SEQ ID NO: 84118):RIKPHQGQH (SEQ ID NO: 84980):LGEMS (SEQ ID NO: 84228):EHS:KXEXR (SEQ ID NO: 84213), KIPKAXX (SEQ ID NO: 84424):VPT:SNIT (SEQ ID NO: 84118):DENEKVV (SEQ ID NO: 84966):LGEMS (SEQ ID NO: 84228):VVE:GXGXR (SEQ ID NO: 84208), GIPEPXX (SEQ ID NO: 84419):VPE:SNIT (SEQ ID NO: 84118):DENKNVV (SEQ ID NO: 84967):LGEMS (SEQ ID NO: 84228):TVE:SXAXR (SEQ ID NO: 84303), SIPKAXX (SEQ ID NO: 84429):VPT:SNIT (SEQ ID NO: 84118):DEYDKVV (SEQ ID NO: 84968):LGEMS (SEQ ID NO: 84228):VVE:GXGXR (SEQ ID NO: 84208), HVTKPTX (SEQ ID NO: 84422):APT:SNIT (SEQ ID NO: 84118):DDSSNVI (SEQ ID NO: 84965):LGEMS (SEQ ID NO: 84228):VVR:SXGXH (SEQ ID NO: 84304), YVPKPXX (SEQ ID NO: 84433):APT:SNIT (SEQ ID NO: 84118):DDSSNVI (SEQ ID NO: 84965):LGEMS (SEQ ID NO: 84228):VVR:SXGXH (SEQ ID NO: 84304), TVPKPXX (SEQ ID NO: 84432):APT:SNIT (SEQ ID NO: 84118):DDSSNVI (SEQ ID NO: 84965):LGEMS (SEQ ID NO: 84228):VVR:AXGXH (SEQ ID NO: 84147), AVPKAXX (SEQ ID NO: 84404):APT:SNIT (SEQ ID NO: 84118):DSSNNVI (SEQ ID NO: 84972):LGEMS (SEQ ID NO: 84228):VVK:AXGXH (SEQ ID NO: 84147), KVGKAXX (SEQ ID NO: 84425):VPT:SNIT (SEQ ID NO: 84118):DDMGVPT (SEQ ID NO: 84964):LGEMS (SEQ ID NO: 84228):VAE:XGXR (SEQ ID NO: 84123), KASKAXX (SEQ ID NO: 84423):VPT:SNIT (SEQ ID NO: 84118):DKGVVTY (SEQ ID NO: 84969):LGEMS (SEQ ID NO: 84228):AVS:EXGXR (SEQ ID NO: 84179), GSAGPXX (SEQ ID NO: 84420):TPT:SNIT (SEQ ID NO: 84118):NDKQQII (SEQ ID NO: 84979):LGEMS (SEQ ID NO: 84228):VVD:RXGXS (SEQ ID NO: 84291), AAPASXX (SEQ ID NO: 84401):VPA:SNIT (SEQ ID NO: 84118):DAANNVV (SEQ ID NO: 84963):LGEMS (SEQ ID NO: 84228):VVE:AXGXR (SEQ ID NO: 84148), STPPTXX (SEQ ID NO: 84431):VPT:SNIT (SEQ ID NO: 84118):DSANNVV (SEQ ID NO: 84971):LGEMS (SEQ ID NO: 84228):VVE:SXGXR (SEQ ID NO: 84305), HVPKPXX (SEQ ID NO: 84421):APT:SNIT (SEQ ID NO: 84118):DDSSNVI (SEQ ID NO: 84965):LGEMS (SEQ ID NO: 84228):VVR:SXGXH (SEQ ID NO: 84304), RVPSTXX (SEQ ID NO: 84428):APV:SNIT (SEQ ID NO: 84118):DNGRVLL (SEQ ID NO: 84970):LGEMS (SEQ ID NO: 84228):VEE:XGXL (SEQ ID NO: 84122), ASAAPXX (SEQ ID NO: 84402):VPQ:SNIT (SEQ ID NO: 84118):VGRKPKV (SEQ ID NO: 84981):LGEMS (SEQ ID NO: 84228):VRS:XKXS (SEQ ID NO: 84124), ASASPXX (SEQ ID NO: 84403):VSQ:SNIT (SEQ ID NO: 84118):IGKTPKI (SEQ ID NO: 84978):LGEMS (SEQ ID NO: 84228):VKS:XKXS (SEQ ID NO: 84124), ASASPXX (SEQ ID NO: 84403):VPQ:SNIT (SEQ ID NO: 84118):VGRTPKV (SEQ ID NO: 84982):LGEMS (SEQ ID NO: 84228):VKS:XKXS (SEQ ID NO: 84124), NDEGLEX (SEQ ID NO: 84426):VPT:SNIT (SEQ ID NO: 84118):RIKPHQGQH (SEQ ID NO: 84980):LGEMS (SEQ ID NO: 84228):QHN:KXEXR (SEQ ID NO: 84213), SSVKXQP (SEQ ID NO: 84430):SRV:SNIT (SEQ ID NO: 84118):EYVRKKPKL (SEQ ID NO: 84974):LGEMS (SEQ ID NO: 84228):EEH:LEXAXA (SEQ ID NO: 84400), RNVQXRP (SEQ ID NO: 84427):TQV:SNIT (SEQ ID NO: 84118):EIVRKKPIF (SEQ ID NO: 84973):LGEMS (SEQ ID NO: 84228):EDH:LAXKXE (SEQ ID NO: 84399), RNVQXRP (SEQ ID NO: 84427):SRV:RSVK (SEQ ID NO: 84115):EIVRKKPIF (SEQ ID NO: 84973):KEVQV (SEQ ID NO: 84210):EEH:LAXKXE (SEQ ID NO: 84399), KIPKAXX (SEQ ID NO: 84424):VPT:RSVK (SEQ ID NO: 84115):DENEKVV (SEQ ID NO: 84966):KEVQV (SEQ ID NO: 84210):VVE:GXGXR (SEQ ID NO: 84208), GIPEPXX (SEQ ID NO: 84419):VPE:RSVK (SEQ ID NO: 84115):DENKNVV (SEQ ID NO: 84967):KEVQV (SEQ ID NO: 84210):TVE:SXAXR (SEQ ID NO: 84303), SIPKAXX (SEQ ID NO: 84429):VPT:RSVK (SEQ ID NO: 84115):DEYDKVV (SEQ ID NO: 84968):KEVQV (SEQ ID NO: 84210):VVE:GXGXR (SEQ ID NO: 84208), HVTKPTX (SEQ ID NO: 84422):APT:RSVK (SEQ ID NO: 84115):DDSSNVI (SEQ ID NO: 84965):KEVQV (SEQ ID NO: 84210):VVR:SXGXH (SEQ ID NO: 84304), YVPKPXX (SEQ ID NO: 84433):APT:RSVK (SEQ ID NO: 84115):DDSSNVI (SEQ ID NO: 84965):KEVQV (SEQ ID NO: 84210):VVR:SXGXH (SEQ ID NO: 84304), TVPKPXX (SEQ ID NO: 84432):APT:RSVK (SEQ ID NO: 84115):DDSSNVI (SEQ ID NO: 84965):KEVQV (SEQ ID NO: 84210):VVR:AXGXH (SEQ ID NO: 84147), AVPKAXX (SEQ ID NO: 84404):APT:RSVK (SEQ ID NO: 84115):DSSNNVI (SEQ ID NO: 84972):KEVQV (SEQ ID NO: 84210):VVK:AXGXH (SEQ ID NO: 84147), KVGKAXX (SEQ ID NO: 84425):VPT:RSVK (SEQ ID NO: 84115):DDMGVPT (SEQ ID NO: 84964):KEVQV (SEQ ID NO: 84210):VAE:XGXR (SEQ ID NO: 84123), KASKAXX (SEQ ID NO: 84423):VPT:RSVK (SEQ ID NO: 84115):DKGVVTY (SEQ ID NO: 84969):KEVQV (SEQ ID NO: 84210):AVS:EXGXR (SEQ ID NO: 84179), GSAGPXX (SEQ ID NO: 84420):TPT:RSVK (SEQ ID NO: 84115):NDKQQII (SEQ ID NO: 84979):KEVQV (SEQ ID NO: 84210):VVD:RXGXS (SEQ ID NO: 84291), AAPASXX (SEQ ID NO: 84401):VPA:RSVK (SEQ ID NO: 84115):DAANNVV (SEQ ID NO: 84963):KEVQV (SEQ ID NO: 84210):VVE:AXGXR (SEQ ID NO: 84148), STPPTXX (SEQ ID NO: 84431):VPT:RSVK (SEQ ID NO: 84115):DSANNVV (SEQ ID NO: 84971):KEVQV (SEQ ID NO: 84210):VVE:SXGXR (SEQ ID NO: 84305), HVPKPXX (SEQ ID NO: 84421):APT:RSVK (SEQ ID NO: 84115):DDSSNVI (SEQ ID NO: 84965):KEVQV (SEQ ID NO: 84210):VVR:SXGXH (SEQ ID NO: 84304), RVPSTXX (SEQ ID NO: 84428):APV:RSVK (SEQ ID NO: 84115):DNGRVLL (SEQ ID NO: 84970):KEVQV (SEQ ID NO: 84210):VEE:XGXL (SEQ ID NO: 84122), ASAAPXX (SEQ ID NO: 84402):VPQ:RSVK (SEQ ID NO: 84115):VGRKPKV (SEQ ID NO: 84981):KEVQV (SEQ ID NO: 84210):VRS:XKXS (SEQ ID NO: 84124), ASASPXX (SEQ ID NO: 84403):VSQ:RSVK (SEQ ID NO: 84115):IGKTPKI (SEQ ID NO: 84978):KEVQV (SEQ ID NO: 84210):VKS:XKXS (SEQ ID NO: 84124), ASASPXX (SEQ ID NO: 84403):VPQ:RSVK (SEQ ID NO: 84115):VGRTPKV (SEQ ID NO: 84982):KEVQV (SEQ ID NO: 84210):VKS:XKXS (SEQ ID NO: 84124), NDEGLEX (SEQ ID NO: 84426):VPT:RSVK (SEQ ID NO: 84115):RIKPHQGQH (SEQ ID NO: 84980):KEVQV (SEQ ID NO: 84210):QHN:KXEXR (SEQ ID NO: 84213), NDEGLEX (SEQ ID NO: 84426):VPT:RSVK (SEQ ID NO: 84115):RIKPHQGQH (SEQ ID NO: 84980):KEVQV (SEQ ID NO: 84210):EHS:QXEXR (SEQ ID NO: 84276), RNVQXRP (SEQ ID NO: 84427):TQV:RSVK (SEQ ID NO: 84115):EIVRKKPIF (SEQ ID NO: 84973):KEVQV (SEQ ID NO: 84210):EDH:LAXKXE (SEQ ID NO: 84399), SSVKXQP (SEQ ID NO: 84430):TQV:RPVQ (SEQ ID NO: 84114):EYVRKKPKL (SEQ ID NO: 84974):KKATV (SEQ ID NO: 84212):EDH:LEXAXA (SEQ ID NO: 84400), KIPKAXX (SEQ ID NO: 84424):VPT:RPVQ (SEQ ID NO: 84114):DENEKVV (SEQ ID NO: 84966):KKATV (SEQ ID NO: 84212):VVE:GXGXR (SEQ ID NO: 84208), GIPEPXX (SEQ ID NO: 84419):VPE:RPVQ (SEQ ID NO: 84114):DENKNVV (SEQ ID NO: 84967):KKATV (SEQ ID NO: 84212):TVE:SXAXR (SEQ ID NO: 84303), SIPKAXX (SEQ ID NO: 84429):VPT:RPVQ (SEQ ID NO: 84114):DEYDKVV (SEQ ID NO: 84968):KKATV (SEQ ID NO: 84212):VVE:GXGXR (SEQ ID NO: 84208), HVTKPTX (SEQ ID NO: 84422):APT:RPVQ (SEQ ID NO: 84114):DDSSNVI (SEQ ID NO: 84965):KKATV (SEQ ID NO: 84212):VVR:SXGXH (SEQ ID NO: 84304), YVPKPXX (SEQ ID NO: 84433):APT:RPVQ (SEQ ID NO: 84114):DDSSNVI (SEQ ID NO: 84965):KKATV (SEQ ID NO: 84212):VVR:SXGXH (SEQ ID NO: 84304), TVPKPXX (SEQ ID NO: 84432):APT:RPVQ (SEQ ID NO: 84114):DDSSNVI (SEQ ID NO: 84965):KKATV (SEQ ID NO: 84212):VVR:AXGXH (SEQ ID NO: 84147), AVPKAXX (SEQ ID NO: 84404):APT:RPVQ (SEQ ID NO: 84114):DSSNNVI (SEQ ID NO: 84972):KKATV (SEQ ID NO: 84212):VVK:AXGXH (SEQ ID NO: 84147), KVGKAXX (SEQ ID NO: 84425):VPT:RPVQ (SEQ ID NO: 84114):DDMGVPT (SEQ ID NO: 84964):KKATV (SEQ ID NO: 84212):VAE:XGXR (SEQ ID NO: 84123), KASKAXX (SEQ ID NO: 84423):VPT:RPVQ (SEQ ID NO: 84114):DKGVVTY (SEQ ID NO: 84969):KKATV (SEQ ID NO: 84212):AVS:EXGXR (SEQ ID NO: 84179), GSAGPXX (SEQ ID NO: 84420):TPT:RPVQ (SEQ ID NO: 84114):NDKQQII (SEQ ID NO: 84979):KKATV (SEQ ID NO: 84212):VVD:RXGXS (SEQ ID NO: 84291), AAPASXX (SEQ ID NO: 84401):VPA:RPVQ (SEQ ID NO: 84114):DAANNVV (SEQ ID NO: 84963):KKATV (SEQ ID NO: 84212):VVE:AXGXR (SEQ ID NO: 84148), STPPTXX (SEQ ID NO: 84431):VPT:RPVQ (SEQ ID NO: 84114):DSANNVV (SEQ ID NO: 84971):KKATV (SEQ ID NO: 84212):VVE:SXGXR (SEQ ID NO: 84305), HVPKPXX (SEQ ID NO: 84421):APT:RPVQ (SEQ ID NO: 84114):DDSSNVI (SEQ ID NO: 84965):KKATV (SEQ ID NO: 84212):VVR:SXGXH (SEQ ID NO: 84304), RVPSTXX (SEQ ID NO: 84428):APV:RPVQ (SEQ ID NO: 84114):DNGRVLL (SEQ ID NO: 84970):KKATV (SEQ ID NO: 84212):VEE:XGXL (SEQ ID NO: 84122), ASAAPXX (SEQ ID NO: 84402):VPQ:RPVQ (SEQ ID NO: 84114):VGRKPKV (SEQ ID NO: 84981):KKATV (SEQ ID NO: 84212):VRS:XKXS (SEQ ID NO: 84124), ASASPXX (SEQ ID NO: 84403):VSQ:RPVQ (SEQ ID NO: 84114):IGKTPKI (SEQ ID NO: 84978):KKATV (SEQ ID NO: 84212):VKS:XKXS (SEQ ID NO: 84124), ASASPXX (SEQ ID NO: 84403):VPQ:RPVQ (SEQ ID NO: 84114):VGRTPKV (SEQ ID NO: 84982):KKATV (SEQ ID NO: 84212):VKS:XKXS (SEQ ID NO: 84124), NDEGLEX (SEQ ID NO: 84426):VPT:RPVQ (SEQ ID NO: 84114):RIKPHQGQH (SEQ ID NO: 84980):KKATV (SEQ ID NO: 84212):QHN:KXEXR (SEQ ID NO: 84213), NDEGLEX (SEQ ID NO: 84426):VPT:RPVQ (SEQ ID NO: 84114):RIKPHQGQH (SEQ ID NO: 84980):KKATV (SEQ ID NO: 84212):EHS:QXEXR (SEQ ID NO: 84276) and SSVKXQP (SEQ ID NO: 84430):SRV:RPVQ (SEQ ID NO: 84114):EYVRKKPKL (SEQ ID NO: 84974):KKATV (SEQ ID NO: 84212):EEH:LEXAXA (SEQ ID NO: 84400).

[0406] In particular, in certain embodiments, the heptuplet PEP7:PEP3:PEP12:LINKER:PEP2:PEP4:PEP8 is selected from the group consisting of GIPEPXX (SEQ ID NO: 84419):VPT:SAIS-AA¹⁷-LYL (SEQ ID NO: 84881):DENKNVV (SEQ ID NO: 84967):LKNYQ (SEQ ID NO: 84230):VVE:SXAXR (SEQ ID NO: 84303), SIPKAXX (SEQ ID NO: 84429):VPT:SAIS-AA¹⁷-LYL (SEQ ID NO: 84881):DEYDKVV (SEQ ID NO: 84968):LKNYQ (SEQ ID NO: 84230):VVE:GXGXR (SEQ ID NO: 84208), HVTKPTX (SEQ ID NO: 84422):VPT:SAIS-AA¹⁷-LYL (SEQ ID NO: 84881):DDSSNVI (SEQ ID NO: 84965):LKNYQ (SEQ ID NO: 84230):VVE:SXGXH (SEQ ID NO: 84304), YVPKPXX (SEQ ID NO: 84433):VPT:SAIS-AA¹⁷-LYL (SEQ ID NO: 84881):DDSSNVI (SEQ ID NO: 84965):LKNYQ (SEQ ID NO: 84230):VVE:SXGXH (SEQ ID NO: 84304), TVPKPXX (SEQ ID NO: 84432):VPT:SAIS-AA¹⁷-LYL (SEQ ID NO: 84881):DDSSNVI (SEQ ID NO: 84965):LKNYQ (SEQ ID NO: 84230):VVE:AXGXH (SEQ ID NO: 84147), AVPKAXX (SEQ ID NO: 84404):VPT:SAIS-AA¹⁷-LYL (SEQ ID NO: 84881):DSSNNVI (SEQ ID NO: 84972):LKNYQ (SEQ ID NO: 84230):VVE:AXGXH (SEQ ID NO: 84147), KVGKAXX (SEQ ID NO: 84425):VPT:SAIS-AA¹⁷-LYL (SEQ ID NO: 84881):DDMGVPT (SEQ ID NO: 84964):LKNYQ (SEQ ID NO: 84230):VVE:XGXR (SEQ ID NO: 84123), KASKAXX (SEQ ID NO: 84423):VPT:SAIS-AA¹⁷-LYL (SEQ ID NO: 84881):DKGVVTY (SEQ ID NO: 84969):LKNYQ (SEQ ID NO: 84230):VVE:EXGXR (SEQ ID NO: 84179), GSAGPXX (SEQ ID NO: 84420):VPT:SAIS-AA¹⁷-LYL (SEQ ID NO: 84881):NDKQQII (SEQ ID NO: 84979):LKNYQ (SEQ ID NO: 84230):VVE:RXGXS (SEQ ID NO: 84291), AAPASXX (SEQ ID NO: 84401):VPT:SAIS-AA¹⁷-LYL (SEQ ID NO: 84881):DAANNVV (SEQ ID NO: 84963):LKNYQ (SEQ ID NO: 84230):VVE:AXGXR (SEQ ID NO: 84148), STPPTXX (SEQ ID NO: 84431):VPT:SAIS-AA¹⁷-LYL (SEQ ID NO: 84881):DSANNVV (SEQ ID NO: 84971):LKNYQ (SEQ ID NO: 84230):VVE:SXGXR (SEQ ID NO: 84305), HVPKPXX (SEQ ID NO: 84421):VPT:SAIS-AA¹⁷-LYL (SEQ ID NO: 84881):DDSSNVI (SEQ ID NO: 84965):LKNYQ (SEQ ID NO: 84230):VVE:SXGXH (SEQ ID NO: 84304), RVPSTXX (SEQ ID NO: 84428):VPT:SAIS-AA¹⁷-LYL (SEQ ID NO: 84881):DNGRVLL (SEQ ID NO: 84970):LKNYQ (SEQ ID NO: 84230):VVE:XGXL (SEQ ID NO: 84122), ASAAPXX (SEQ ID NO: 84402):VPT:SAIS-AA¹⁷-LYL (SEQ ID NO: 84881):VGRKPKV (SEQ ID NO: 84981):LKNYQ (SEQ ID NO: 84230):VVE:XKXS (SEQ ID NO: 84124), ASASPXX (SEQ ID NO: 84403):VPT:SAIS-AA¹⁷-LYL (SEQ ID NO: 84881):IGKTPKI (SEQ ID NO: 84978):LKNYQ (SEQ ID NO: 84230):VVE:XKXS (SEQ ID NO: 84124), ASASPXX (SEQ ID NO: 84403):VPT:SAIS-AA¹⁷-LYL (SEQ ID NO: 84881):VGRTPKV (SEQ ID NO: 84982):LKNYQ (SEQ ID NO: 84230):VVE:XKXS (SEQ ID NO: 84124), NDEGLEX (SEQ ID NO: 84426):VPT:SAIS-AA¹⁷-LYL (SEQ ID NO: 84881):RIKPHQGQH (SEQ ID NO: 84980):LKNYQ (SEQ ID NO: 84230):VVE:KXEXR (SEQ ID NO: 84213), NDEGLEX (SEQ ID NO: 84426):VPT:SAIS-AA¹⁷-LYL (SEQ ID NO: 84881):RIKPHQGQH (SEQ ID NO: 84980):LKNYQ (SEQ ID NO: 84230):VVE:QXEXR (SEQ ID NO: 84276), SSVKXQP (SEQ ID NO: 84430):VPT:SAIS-AA¹⁷-LYL (SEQ ID NO: 84881):EYVRKKPKL (SEQ ID NO: 84974):LKNYQ (SEQ ID NO: 84230):VVE:LEXAXA (SEQ ID NO: 84400), RNVQXRP (SEQ ID NO: 84427):VPT:SAIS-AA¹⁷-LYL (SEQ ID NO: 84881):EIVRKKPIF (SEQ ID NO: 84973):LKNYQ (SEQ ID NO: 84230):VVE:LAXKXE (SEQ ID NO: 84399), GIPEPXX (SEQ ID NO: 84419):VPE:SAIS-AA¹⁷-LYL (SEQ ID NO: 84881):DENKNVV (SEQ ID NO: 84967):LKNYQ (SEQ ID NO: 84230):TVE:SXAXR (SEQ ID NO: 84303), HVTKPTX (SEQ ID NO: 84422):APT:SAIS-AA¹⁷-LYL (SEQ ID NO: 84881):DDSSNVI (SEQ ID NO: 84965):LKNYQ (SEQ ID NO: 84230):VVR:SXGXH (SEQ ID NO: 84304), YVPKPXX (SEQ ID NO: 84433):APT:SAIS-AA¹⁷-LYL (SEQ ID NO: 84881):DDSSNVI (SEQ ID NO: 84965):LKNYQ (SEQ ID NO: 84230):VVR:SXGXH (SEQ ID NO: 84304), TVPKPXX (SEQ ID NO: 84432):APT:SAIS-AA¹⁷-LYL (SEQ ID NO: 84881):DDSSNVI (SEQ ID NO: 84965):LKNYQ (SEQ ID NO: 84230):VVR:AXGXH (SEQ ID NO: 84147), AVPKAXX (SEQ ID NO: 84404):APT:SAIS-AA¹⁷-LYL (SEQ ID NO: 84881):DSSNNVI (SEQ ID NO: 84972):LKNYQ (SEQ ID NO: 84230):VVK:AXGXH (SEQ ID NO: 84147), KVGKAXX (SEQ ID NO: 84425):VPT:SAIS-AA¹⁷-LYL (SEQ ID NO: 84881):DDMGVPT (SEQ ID NO: 84964):LKNYQ (SEQ ID NO: 84230):VAE:XGXR (SEQ ID NO: 84123), KASKAXX (SEQ ID NO: 84423):VPT:SAIS-AA¹⁷-LYL (SEQ ID NO: 84881):DKGVVTY (SEQ ID NO: 84969):LKNYQ (SEQ ID NO: 84230):AVS:EXGXR (SEQ ID NO: 84179), GSAGPXX (SEQ ID NO: 84420):TPT:SAIS-AA¹⁷-LYL (SEQ ID NO: 84881):NDKQQII (SEQ ID NO: 84979):LKNYQ (SEQ ID NO: 84230):VVD:RXGXS (SEQ ID NO: 84291), AAPASXX (SEQ ID NO: 84401):VPA:SAIS-AA¹⁷-LYL (SEQ ID NO: 84881):DAANNVV (SEQ ID NO: 84963):LKNYQ (SEQ ID NO: 84230):VVE:AXGXR (SEQ ID NO: 84148), HVPKPXX (SEQ ID NO: 84421):APT:SAIS-AA¹⁷-LYL (SEQ ID NO: 84881):DDSSNVI (SEQ ID NO: 84965):LKNYQ (SEQ ID NO: 84230):VVR:SXGXH (SEQ ID NO: 84304), RVPSTXX (SEQ ID NO: 84428):APV:SAIS-AA¹⁷-LYL (SEQ ID NO: 84881):DNGRVLL (SEQ ID NO: 84970):LKNYQ (SEQ ID NO: 84230):VEE:XGXL (SEQ ID NO: 84122), ASAAPXX (SEQ ID NO: 84402):VPQ:SAIS-AA¹⁷-LYL (SEQ ID NO: 84881):VGRKPKV (SEQ ID NO: 84981):LKNYQ (SEQ ID NO: 84230):VRS:XKXS (SEQ ID NO: 84124), ASASPXX (SEQ ID NO: 84403):VSQ:SAIS-AA¹⁷-LYL (SEQ ID NO: 84881):IGKTPKI (SEQ ID NO: 84978):LKNYQ (SEQ ID NO: 84230):VKS:XKXS (SEQ ID NO: 84124), ASASPXX (SEQ ID NO: 84403):VPQ:SAIS-AA¹⁷-LYL (SEQ ID NO: 84881):VGRTPKV (SEQ ID NO: 84982):LKNYQ (SEQ ID NO: 84230):VKS:XKXS (SEQ ID NO: 84124), NDEGLEX (SEQ ID NO: 84426):VPT:SAIS-AA¹⁷-LYL (SEQ ID NO: 84881):RIKPHQGQH (SEQ ID NO: 84980):LKNYQ (SEQ ID NO: 84230):QHN:KXEXR (SEQ ID NO: 84213), NDEGLEX (SEQ ID NO: 84426):VPT:SAIS-AA¹⁷-LYL (SEQ ID NO: 84881):RIKPHQGQH (SEQ ID NO: 84980):LKNYQ (SEQ ID NO: 84230):EHS:QXEXR (SEQ ID NO: 84276), SSVKXQP (SEQ ID NO: 84430):SRV:SAIS-AA¹⁷-LYL (SEQ ID NO: 84881):EYVRKKPKL (SEQ ID NO: 84974):LKNYQ (SEQ ID NO: 84230):EEH:LEXAXA (SEQ ID NO: 84400), RNVQXRP (SEQ ID NO: 84427):TQV:SAIS-AA¹⁷-LYL (SEQ ID NO: 84881):EIVRKKPIF (SEQ ID NO: 84973):LKNYQ (SEQ ID NO: 84230):EDH:LAXKXE (SEQ ID NO: 84399), KIPKAXX (SEQ ID NO: 84424):VPE:SSLS-AA¹⁷-LFF (SEQ ID NO: 84889):DENEKVV (SEQ ID NO: 84966):LKVYP (SEQ ID NO: 84231):TVE:GXGXR (SEQ ID NO: 84208), SIPKAXX (SEQ ID NO: 84429):VPE:SSLS-AA¹⁷-LFF (SEQ ID NO: 84889):DEYDKVV (SEQ ID NO: 84968):LKVYP (SEQ ID NO: 84231):TVE:GXGXR (SEQ ID NO: 84208), HVTKPTX (SEQ ID NO: 84422):VPE:SSLS-AA¹⁷-LFF (SEQ ID NO: 84889):DDSSNVI (SEQ ID NO: 84965):LKVYP (SEQ ID NO: 84231):TVE:SXGXH (SEQ ID NO: 84304), YVPKPXX (SEQ ID NO: 84433):VPE:SSLS-AA¹⁷-LFF (SEQ ID NO: 84889):DDSSNVI (SEQ ID NO: 84965):LKVYP (SEQ ID NO: 84231):TVE:SXGXH (SEQ ID NO: 84304), TVPKPXX (SEQ ID NO: 84432):VPE:SSLS-AA¹⁷-LFF (SEQ ID NO: 84889):DDSSNVI (SEQ ID NO: 84965):LKVYP (SEQ ID NO: 84231):TVE:AXGXH (SEQ ID NO: 84147), AVPKAXX (SEQ ID NO: 84404):VPE:SSLS-AA¹⁷-LFF (SEQ ID NO: 84889):DSSNNVI (SEQ ID NO: 84972):LKVYP (SEQ ID NO: 84231):TVE:AXGXH (SEQ ID NO: 84147), KVGKAXX (SEQ ID NO: 84425):VPE:SSLS-AA¹⁷-LFF (SEQ ID NO: 84889):DDMGVPT (SEQ ID NO: 84964):LKVYP (SEQ ID NO: 84231):TVE:XGXR (SEQ ID NO: 84123), KASKAXX (SEQ ID NO: 84423):VPE:SSLS-AA¹⁷-LFF (SEQ ID NO: 84889):DKGVVTY (SEQ ID NO: 84969):LKVYP (SEQ ID NO: 84231):TVE:EXGXR (SEQ ID NO: 84179), GSAGPXX (SEQ ID NO: 84420):VPE:SSLS-AA¹⁷-LFF (SEQ ID NO: 84889):NDKQQII (SEQ ID NO: 84979):LKVYP (SEQ ID NO: 84231):TVE:RXGXS (SEQ ID NO: 84291), AAPASXX (SEQ ID NO: 84401):VPE:SSLS-AA¹⁷-LFF (SEQ ID NO: 84889):DAANNVV (SEQ ID NO: 84963):LKVYP (SEQ ID NO: 84231):TVE:AXGXR (SEQ ID NO: 84148), STPPTXX (SEQ ID NO: 84431):VPE:SSLS-AA¹⁷-LFF (SEQ ID NO: 84889):DSANNVV (SEQ ID NO: 84971):LKVYP (SEQ ID NO: 84231):TVE:SXGXR (SEQ ID NO: 84305), HVPKPXX (SEQ ID NO: 84421):VPE:SSLS-AA¹⁷-LFF (SEQ ID NO: 84889):DDSSNVI (SEQ ID NO: 84965):LKVYP (SEQ ID NO: 84231):TVE:SXGXH (SEQ ID NO: 84304), RVPSTXX (SEQ ID NO: 84428):VPE:SSLS-AA¹⁷-LFF (SEQ ID NO: 84889):DNGRVLL (SEQ ID NO: 84970):LKVYP (SEQ ID NO: 84231):TVE:XGXL (SEQ ID NO: 84122), ASAAPXX (SEQ ID NO: 84402):VPE:SSLS-AA¹⁷-LFF (SEQ ID NO: 84889):VGRKPKV (SEQ ID NO: 84981):LKVYP (SEQ ID NO: 84231):TVE:XKXS (SEQ ID NO: 84124), ASASPXX (SEQ ID NO: 84403):VPE:SSLS-AA¹⁷-LFF (SEQ ID NO: 84889):IGKTPKI (SEQ ID NO: 84978):LKVYP (SEQ ID NO: 84231):TVE:XKXS (SEQ ID NO: 84124), ASASPXX (SEQ ID NO: 84403):VPE:SSLS-AA¹⁷-LFF (SEQ ID NO: 84889):VGRTPKV (SEQ ID NO: 84982):LKVYP (SEQ ID NO: 84231):TVE:XKXS (SEQ ID NO: 84124), NDEGLEX (SEQ ID NO: 84426):VPE:SSLS-AA¹⁷-LFF (SEQ ID NO: 84889):RIKPHQGQH (SEQ ID NO: 84980):LKVYP (SEQ ID NO: 84231):TVE:KXEXR (SEQ ID NO: 84213), NDEGLEX (SEQ ID NO: 84426):VPE:SSLS-AA¹⁷-LFF (SEQ ID NO: 84889):RIKPHQGQH (SEQ ID NO: 84980):LKVYP (SEQ ID NO: 84231):TVE:QXEXR (SEQ ID NO: 84276), SSVKXQP (SEQ ID NO: 84430):VPE:SSLS-AA¹⁷-LFF (SEQ ID NO: 84889):EYVRKKPKL (SEQ ID NO: 84974):LKVYP (SEQ ID NO: 84231):TVE:LEXAXA (SEQ ID NO: 84400), RNVQXRP (SEQ ID NO: 84427):VPE:SSLS-AA¹⁷-LFF (SEQ ID NO: 84889):EIVRKKPIF (SEQ ID NO: 84973):LKVYP (SEQ ID NO: 84231):TVE:LAXKXE (SEQ ID NO: 84399), KIPKAXX (SEQ ID NO: 84424):VPT:SSLS-AA¹⁷-LFF (SEQ ID NO: 84889):DENEKVV (SEQ ID NO: 84966):LKVYP (SEQ ID NO: 84231):VVE:GXGXR (SEQ ID NO: 84208), SIPKAXX (SEQ ID NO: 84429):VPT:SSLS-AA¹⁷-LFF (SEQ ID NO: 84889):DEYDKVV (SEQ ID NO: 84968):LKVYP (SEQ ID NO: 84231):VVE:GXGXR (SEQ ID NO: 84208), HVTKPTX (SEQ ID NO: 84422):APT:SSLS-AA¹⁷-LFF (SEQ ID NO: 84889):DDSSNVI (SEQ ID NO: 84965):LKVYP (SEQ ID NO: 84231):VVR:SXGXH (SEQ ID NO: 84304), YVPKPXX (SEQ ID NO: 84433):APT:SSLS-AA¹⁷-LFF (SEQ ID NO: 84889):DDSSNVI (SEQ ID NO: 84965):LKVYP (SEQ ID NO: 84231):VVR:SXGXH (SEQ ID NO: 84304), TVPKPXX (SEQ ID NO: 84432):APT:SSLS-AA¹⁷-LFF (SEQ ID NO: 84889):DDSSNVI (SEQ ID NO: 84965):LKVYP (SEQ ID NO: 84231):VVR:AXGXH (SEQ ID NO: 84147), AVPKAXX (SEQ ID NO: 84404):APT:SSLS-AA¹⁷-LFF (SEQ ID NO: 84889):DSSNNVI (SEQ ID NO: 84972):LKVYP (SEQ ID NO: 84231):VVK:AXGXH (SEQ ID NO: 84147), KVGKAXX (SEQ ID NO: 84425):VPT:SSLS-AA¹⁷-LFF (SEQ ID NO: 84889):DDMGVPT (SEQ ID NO: 84964):LKVYP (SEQ ID NO: 84231):VAE:XGXR (SEQ ID NO: 84123), KASKAXX (SEQ ID NO: 84423):VPT:SSLS-AA¹⁷-LFF (SEQ ID NO: 84889):DKGVVTY (SEQ ID NO: 84969):LKVYP (SEQ ID NO: 84231):AVS:EXGXR (SEQ ID NO: 84179), GSAGPXX (SEQ ID NO: 84420):TPT:SSLS-AA¹⁷-LFF (SEQ ID NO: 84889):NDKQQII (SEQ ID NO: 84979):LKVYP (SEQ ID NO: 84231):VVD:RXGXS (SEQ ID NO: 84291), AAPASXX (SEQ ID NO: 84401):VPA:SSLS-AA¹⁷-LFF (SEQ ID NO: 84889):DAANNVV (SEQ ID NO: 84963):LKVYP (SEQ ID NO: 84231):VVE:AXGXR (SEQ ID NO: 84148), STPPTXX (SEQ ID NO: 84431):VPT:SSLS-AA¹⁷-LFF (SEQ ID NO: 84889):DSANNVV (SEQ ID NO: 84971):LKVYP (SEQ ID NO: 84231):VVE:SXGXR (SEQ ID NO: 84305), HVPKPXX (SEQ ID NO: 84421):APT:SSLS-AA¹⁷-LFF (SEQ ID NO: 84889):DDSSNVI (SEQ ID NO: 84965):LKVYP (SEQ ID NO: 84231):VVR:SXGXH (SEQ ID NO: 84304), RVPSTXX (SEQ ID NO: 84428):APV:SSLS-AA¹⁷-LFF (SEQ ID NO: 84889):DNGRVLL (SEQ ID NO: 84970):LKVYP (SEQ ID NO: 84231):VEE:XGXL (SEQ ID NO: 84122), ASAAPXX (SEQ ID NO: 84402):VPQ:SSLS-AA¹⁷-LFF (SEQ ID NO: 84889):VGRKPKV (SEQ ID NO: 84981):LKVYP (SEQ ID NO: 84231):VRS:XKXS (SEQ ID NO: 84124), ASASPXX (SEQ ID NO: 84403):VSQ:SSLS-AA¹⁷-LFF (SEQ ID NO: 84889):IGKTPKI (SEQ ID NO: 84978):LKVYP (SEQ ID NO: 84231):VKS:XKXS (SEQ ID NO: 84124), ASASPXX (SEQ ID NO: 84403):VPQ:SSLS-AA¹⁷-LFF (SEQ ID NO: 84889):VGRTPKV (SEQ ID NO: 84982):LKVYP (SEQ ID NO: 84231):VKS:XKXS (SEQ ID NO: 84124), NDEGLEX (SEQ ID NO: 84426):VPT:SSLS-AA¹⁷-LFF (SEQ ID NO: 84889):RIKPHQGQH (SEQ ID NO: 84980):LKVYP (SEQ ID NO: 84231):QHN:KXEXR (SEQ ID NO: 84213), NDEGLEX (SEQ ID NO: 84426):VPT:SSLS-AA¹⁷-LFF (SEQ ID NO: 84889):RIKPHQGQH (SEQ ID NO: 84980):LKVYP (SEQ ID NO: 84231):EHS:QXEXR (SEQ ID NO: 84276), SSVKXQP (SEQ ID NO: 84430):SRV:SSLS-AA¹⁷-LFF (SEQ ID NO: 84889):EYVRKKPKL (SEQ ID NO: 84974):LKVYP (SEQ ID NO: 84231):EEH:LEXAXA (SEQ ID NO: 84400), RNVQXRP (SEQ ID NO: 84427):TQV:SSLS-AA¹⁷-LFF (SEQ ID NO: 84889):EIVRKKPIF (SEQ ID NO: 84973):LKVYP (SEQ ID NO: 84231):EDH:LAXKXE (SEQ ID NO: 84399), KIPKAXX (SEQ ID NO: 84424):VPT:SAIS-AA¹⁷-LYL (SEQ ID NO: 84881):DENEKVV (SEQ ID NO: 84966):LKNYQ (SEQ ID NO: 84230):VVE:GXGXR (SEQ ID NO: 84208), KIPKAXX (SEQ ID NO: 84424):APT:NAIS-AA¹⁷-LYF (SEQ ID NO: 84878):DENEKVV (SEQ ID NO: 84966):LKKYR (SEQ ID NO: 84229):VVR:GXGXR (SEQ ID NO: 84208), GIPEPXX (SEQ ID NO: 84419):APT:NAIS-AA¹⁷-LYF (SEQ ID NO: 84878):DENKNVV (SEQ ID NO: 84967):LKKYR (SEQ ID NO: 84229):VVR:SXAXR (SEQ ID NO: 84303), SIPKAXX (SEQ ID NO: 84429):APT:NAIS-AA¹⁷-LYF (SEQ ID NO: 84878):DEYDKVV (SEQ ID NO: 84968):LKKYR (SEQ ID NO: 84229):VVR:GXGXR (SEQ ID NO: 84208), YVPKPXX (SEQ ID NO: 84433):APT:NAIS-AA¹⁷-LYF (SEQ ID NO: 84878):DDSSNVI (SEQ ID NO: 84965):LKKYR (SEQ ID NO: 84229):VVR:SXGXH (SEQ ID NO: 84304), TVPKPXX (SEQ ID NO: 84432):APT:NAIS-AA¹⁷-LYF (SEQ ID NO: 84878):DDSSNVI (SEQ ID NO: 84965):LKKYR (SEQ ID NO: 84229):VVR:AXGXH (SEQ ID NO: 84147), AVPKAXX (SEQ ID NO: 84404):APT:NAIS-AA¹⁷-LYF (SEQ ID NO: 84878):DSSNNVI (SEQ ID NO: 84972):LKKYR (SEQ ID NO: 84229):VVR:AXGXH (SEQ ID NO: 84147), KVGKAXX (SEQ ID NO: 84425):APT:NAIS-AA¹⁷-LYF (SEQ ID NO: 84878):DDMGVPT (SEQ ID NO: 84964):LKKYR (SEQ ID NO: 84229):VVR:XGXR (SEQ ID NO: 84123), KASKAXX (SEQ ID NO: 84423):APT:NAIS-AA¹⁷-LYF (SEQ ID NO: 84878):DKGVVTY (SEQ ID NO: 84969):LKKYR (SEQ ID NO: 84229):VVR:EXGXR (SEQ ID NO: 84179), GSAGPXX (SEQ ID NO: 84420):APT:NAIS-AA¹⁷-LYF (SEQ ID NO: 84878):NDKQQII (SEQ ID NO: 84979):LKKYR (SEQ ID NO: 84229):VVR:RXGXS (SEQ ID NO: 84291), AAPASXX (SEQ ID NO: 84401):APT:NAIS-AA¹⁷-LYF (SEQ ID NO: 84878):DAANNVV (SEQ ID NO: 84963):LKKYR (SEQ ID NO: 84229):VVR:AXGXR (SEQ ID NO: 84148), STPPTXX (SEQ ID NO: 84431):APT:NAIS-AA¹⁷-LYF (SEQ ID NO: 84878):DSANNVV (SEQ ID NO: 84971):LKKYR (SEQ ID NO: 84229):VVR:SXGXR (SEQ ID NO: 84305), HVPKPXX (SEQ ID NO: 84421):APT:NAIS-AA¹⁷-LYF (SEQ ID NO: 84878):DDSSNVI (SEQ ID NO: 84965):LKKYR (SEQ ID NO: 84229):VVR:SXGXH (SEQ ID NO: 84304), RVPSTXX (SEQ ID NO: 84428):APT:NAIS-AA¹⁷-LYF (SEQ ID NO: 84878):DNGRVLL (SEQ ID NO: 84970):LKKYR (SEQ ID NO: 84229):VVR:XGXL (SEQ ID NO: 84122), ASAAPXX (SEQ ID NO: 84402):APT:NAIS-AA¹⁷-LYF (SEQ ID NO: 84878):VGRKPKV (SEQ ID NO: 84981):LKKYR (SEQ ID NO: 84229):VVR:XKXS (SEQ ID NO: 84124), ASASPXX (SEQ ID NO: 84403):APT:NAIS-AA¹⁷-LYF (SEQ ID NO: 84878):IGKTPKI (SEQ ID NO: 84978):LKKYR (SEQ ID NO: 84229):VVR:XKXS (SEQ ID NO: 84124), ASASPXX (SEQ ID NO: 84403):APT:NAIS-AA¹⁷-LYF (SEQ ID NO: 84878):VGRTPKV (SEQ ID NO: 84982):LKKYR (SEQ ID NO: 84229):VVR:XKXS (SEQ ID NO: 84124), NDEGLEX (SEQ ID NO: 84426):APT:NAIS-AA¹⁷-LYF (SEQ ID NO: 84878):RIKPHQGQH (SEQ ID NO: 84980):LKKYR (SEQ ID NO: 84229):VVR:KXEXR (SEQ ID NO: 84213), NDEGLEX (SEQ ID NO: 84426):APT:NAIS-AA¹⁷-LYF (SEQ ID NO: 84878):RIKPHQGQH (SEQ ID NO: 84980):LKKYR (SEQ ID NO: 84229):VVR:QXEXR (SEQ ID NO: 84276), SSVKXQP (SEQ ID NO: 84430):APT:NAIS-AA¹⁷-LYF (SEQ ID NO: 84878):EYVRKKPKL (SEQ ID NO: 84974):LKKYR (SEQ ID NO: 84229):VVR:LEXAXA (SEQ ID NO: 84400), RNVQXRP (SEQ ID NO: 84427):APT:NAIS-AA¹⁷-LYF (SEQ ID NO: 84878):EIVRKKPIF (SEQ ID NO: 84973):LKKYR (SEQ ID NO: 84229):VVR:LAXKXE (SEQ ID NO: 84399), KIPKAXX (SEQ ID NO: 84424):VPT:NAIS-AA¹⁷-LYF (SEQ ID NO: 84878):DENEKVV (SEQ ID NO: 84966):LKKYR (SEQ ID NO: 84229):VVE:GXGXR (SEQ ID NO: 84208), GIPEPXX (SEQ ID NO: 84419):VPE:NAIS-AA¹⁷-LYF (SEQ ID NO: 84878):DENKNVV (SEQ ID NO: 84967):LKKYR (SEQ ID NO: 84229):TVE:SXAXR (SEQ ID NO: 84303), SIPKAXX (SEQ ID NO: 84429):VPT:NAIS-AA¹⁷-LYF (SEQ ID NO: 84878):DEYDKVV (SEQ ID NO: 84968):LKKYR (SEQ ID NO: 84229):VVE:GXGXR (SEQ ID NO: 84208), AVPKAXX (SEQ ID NO: 84404):APT:NAIS-AA¹⁷-LYF (SEQ ID NO: 84878):DSSNNVI (SEQ ID NO: 84972):LKKYR (SEQ ID NO: 84229):VVK:AXGXH (SEQ ID NO: 84147), KVGKAXX (SEQ ID NO: 84425):VPT:NAIS-AA¹⁷-LYF (SEQ ID NO: 84878):DDMGVPT (SEQ ID NO: 84964):LKKYR (SEQ ID NO: 84229):VAE:XGXR (SEQ ID NO: 84123), KASKAXX (SEQ ID NO: 84423):VPT:NAIS-AA¹⁷-LYF (SEQ ID NO: 84878):DKGVVTY (SEQ ID NO: 84969):LKKYR (SEQ ID NO: 84229):AVS:EXGXR (SEQ ID NO: 84179), GSAGPXX (SEQ ID NO: 84420):TPT:NAIS-AA¹⁷-LYF (SEQ ID NO: 84878):NDKQQII (SEQ ID NO: 84979):LKKYR (SEQ ID NO: 84229):VVD:RXGXS (SEQ ID NO: 84291), AAPASXX (SEQ ID NO: 84401):VPA:NAIS-AA¹⁷-LYF (SEQ ID NO: 84878):DAANNVV (SEQ ID NO: 84963):LKKYR (SEQ ID NO: 84229):VVE:AXGXR (SEQ ID NO: 84148), STPPTXX (SEQ ID NO: 84431):VPT:NAIS-AA¹⁷-LYF (SEQ ID NO: 84878):DSANNVV (SEQ ID NO: 84971):LKKYR (SEQ ID NO: 84229):VVE:SXGXR (SEQ ID NO: 84305), RVPSTXX (SEQ ID NO: 84428):APV:NAIS-AA¹⁷-LYF (SEQ ID NO: 84878):DNGRVLL (SEQ ID NO: 84970):LKKYR (SEQ ID NO: 84229):VEE:XGXL (SEQ ID NO: 84122), ASAAPXX (SEQ ID NO: 84402):VPQ:NAIS-AA¹⁷-LYF (SEQ ID NO: 84878):VGRKPKV (SEQ ID NO: 84981):LKKYR (SEQ ID NO: 84229):VRS:XKXS (SEQ ID NO: 84124), ASASPXX (SEQ ID NO: 84403):VSQ:NAIS-AA¹⁷-LYF (SEQ ID NO: 84878):IGKTPKI (SEQ ID NO: 84978):LKKYR (SEQ ID NO: 84229):VKS:XKXS (SEQ ID NO: 84124), ASASPXX (SEQ ID NO: 84403):VPQ:NAIS-AA¹⁷-LYF (SEQ ID NO: 84878):VGRTPKV (SEQ ID NO: 84982):LKKYR (SEQ ID NO: 84229):VKS:XKXS (SEQ ID NO: 84124), NDEGLEX (SEQ ID NO: 84426):VPT:NAIS-AA¹⁷-LYF (SEQ ID NO: 84878):RIKPHQGQH (SEQ ID NO: 84980):LKKYR (SEQ ID NO: 84229):QHN:KXEXR (SEQ ID NO: 84213), NDEGLEX (SEQ ID NO: 84426):VPT:NAIS-AA¹⁷-LYF (SEQ ID NO: 84878):RIKPHQGQH (SEQ ID NO: 84980):LKKYR (SEQ ID NO: 84229):EHS:QXEXR (SEQ ID NO: 84276), SSVKXQP (SEQ ID NO: 84430):SRV:NAIS-AA¹⁷-LYF (SEQ ID NO: 84878):EYVRKKPKL (SEQ ID NO: 84974):LKKYR (SEQ ID NO: 84229):EEH:LEXAXA (SEQ ID NO: 84400), RNVQXRP (SEQ ID NO: 84427):TQV:NAIS-AA¹⁷-LYF (SEQ ID NO: 84878):EIVRKKPIF (SEQ ID NO: 84973):LKKYR (SEQ ID NO: 84229):EDH:LAXKXE (SEQ ID NO: 84399), HVTKPTX (SEQ ID NO: 84422):APT:NAIS-AA¹⁷-LYF (SEQ ID NO: 84878):DDSSNVI (SEQ ID NO: 84965):LKKYR (SEQ ID NO: 84229):VVR:SXGXH (SEQ ID NO: 84304), KIPKAXX (SEQ ID NO: 84424):APT:SATS-AA¹⁷-LYY (SEQ ID NO: 84882):DENEKVV (SEQ ID NO: 84966):LRKHR (SEQ ID NO: 84233):VVK:GXGXR (SEQ ID NO: 84208), GIPEPXX (SEQ ID NO: 84419):APT:SATS-AA¹⁷-LYY (SEQ ID NO: 84882):DENKNVV (SEQ ID NO: 84967):LRKHR (SEQ ID NO: 84233):VVK:SXAXR (SEQ ID NO: 84303), SIPKAXX (SEQ ID NO: 84429):APT:SATS-AA¹⁷-LYY (SEQ ID NO: 84882):DEYDKVV (SEQ ID NO: 84968):LRKHR (SEQ ID NO: 84233):VVK:GXGXR (SEQ ID NO: 84208), HVTKPTX (SEQ ID NO: 84422):APT:SATS-AA¹⁷-LYY (SEQ ID NO: 84882):DDSSNVI (SEQ ID NO: 84965):LRKHR (SEQ ID NO: 84233):VVK:SXGXH (SEQ ID NO: 84304), YVPKPXX (SEQ ID NO: 84433):APT:SATS-AA¹⁷-LYY (SEQ ID NO: 84882):DDSSNVI (SEQ ID NO: 84965):LRKHR (SEQ ID NO: 84233):VVK:SXGXH (SEQ ID NO: 84304), TVPKPXX (SEQ ID NO: 84432):APT:SATS-AA¹⁷-LYY (SEQ ID NO: 84882):DDSSNVI (SEQ ID NO: 84965):LRKHR (SEQ ID NO: 84233):VVK:AXGXH (SEQ ID NO: 84147), KVGKAXX (SEQ ID NO: 84425):APT:SATS-AA¹⁷-LYY (SEQ ID NO: 84882):DDMGVPT (SEQ ID NO: 84964):LRKHR (SEQ ID NO: 84233):VVK:XGXR (SEQ ID NO: 84123), KASKAXX (SEQ ID NO: 84423):APT:SATS-AA¹⁷-LYY (SEQ ID NO: 84882):DKGVVTY (SEQ ID NO: 84969):LRKHR (SEQ ID NO: 84233):VVK:EXGXR (SEQ ID NO: 84179), GSAGPXX (SEQ ID NO: 84420):APT:SATS-AA¹⁷-LYY (SEQ ID NO: 84882):NDKQQII (SEQ ID NO: 84979):LRKHR (SEQ ID NO: 84233):VVK:RXGXS (SEQ ID NO: 84291), AAPASXX (SEQ ID NO: 84401):APT:SATS-AA¹⁷-LYY (SEQ ID NO: 84882):DAANNVV (SEQ ID NO: 84963):LRKHR (SEQ ID NO: 84233):VVK:AXGXR (SEQ ID NO: 84148), STPPTXX (SEQ ID NO: 84431):APT:SATS-AA¹⁷-LYY (SEQ ID NO: 84882):DSANNVV (SEQ ID NO: 84971):LRKHR (SEQ ID NO: 84233):VVK:SXGXR (SEQ ID NO: 84305), HVPKPXX (SEQ ID NO: 84421):APT:SATS-AA¹⁷-LYY (SEQ ID NO: 84882):DDSSNVI (SEQ ID NO: 84965):LRKHR (SEQ ID NO: 84233):VVK:SXGXH (SEQ ID NO: 84304), RVPSTXX (SEQ ID NO: 84428):APT:SATS-AA¹⁷-LYY (SEQ ID NO: 84882):DNGRVLL (SEQ ID NO: 84970):LRKHR (SEQ ID NO: 84233):VVK:XGXL (SEQ ID NO: 84122), ASAAPXX (SEQ ID NO: 84402):APT:SATS-AA¹⁷-LYY (SEQ ID NO: 84882):VGRKPKV (SEQ ID NO: 84981):LRKHR (SEQ ID NO: 84233):VVK:XKXS (SEQ ID NO: 84124), ASASPXX (SEQ ID NO: 84403):APT:SATS-AA¹⁷-LYY (SEQ ID NO: 84882):IGKTPKI (SEQ ID NO: 84978):LRKHR (SEQ ID NO: 84233):VVK:XKXS (SEQ ID NO: 84124), ASASPXX (SEQ ID NO: 84403):APT:SATS-AA¹⁷-LYY (SEQ ID NO: 84882):VGRTPKV (SEQ ID NO: 84982):LRKHR (SEQ ID NO: 84233):VVK:XKXS (SEQ ID NO: 84124), NDEGLEX (SEQ ID NO: 84426):APT:SATS-AA¹⁷-LYY (SEQ ID NO: 84882):RIKPHQGQH (SEQ ID NO: 84980):LRKHR (SEQ ID NO: 84233):VVK:KXEXR (SEQ ID NO: 84213), NDEGLEX (SEQ ID NO: 84426):APT:SATS-AA¹⁷-LYY (SEQ ID NO: 84882):RIKPHQGQH (SEQ ID NO: 84980):LRKHR (SEQ ID NO: 84233):VVK:QXEXR (SEQ ID NO: 84276), SSVKXQP (SEQ ID NO: 84430):APT:SATS-AA¹⁷-LYY (SEQ ID NO: 84882):EYVRKKPKL (SEQ ID NO: 84974):LRKHR (SEQ ID NO: 84233):VVK:LEXAXA (SEQ ID NO: 84400), RNVQXRP (SEQ ID NO: 84427):APT:SATS-AA¹⁷-LYY (SEQ ID NO: 84882):EIVRKKPIF (SEQ ID NO: 84973):LRKHR (SEQ ID NO: 84233):VVK:LAXKXE (SEQ ID NO: 84399), KIPKAXX (SEQ ID NO: 84424):VPT:SATS-AA¹⁷-LYY (SEQ ID NO: 84882):DENEKVV (SEQ ID NO: 84966):LRKHR (SEQ ID NO: 84233):VVE:GXGXR (SEQ ID NO: 84208), GIPEPXX (SEQ ID NO: 84419):VPE:SATS-AA¹⁷-LYY (SEQ ID NO: 84882):DENKNVV (SEQ ID NO: 84967):LRKHR (SEQ ID NO: 84233):TVE:SXAXR (SEQ ID NO: 84303), SIPKAXX (SEQ ID NO: 84429):VPT:SATS-AA¹⁷-LYY (SEQ ID NO: 84882):DEYDKVV (SEQ ID NO: 84968):LRKHR (SEQ ID NO: 84233):VVE:GXGXR (SEQ ID NO: 84208), HVTKPTX (SEQ ID NO: 84422):APT:SATS-AA¹⁷-LYY (SEQ ID NO: 84882):DDSSNVI (SEQ ID NO: 84965):LRKHR (SEQ ID NO: 84233):VVR:SXGXH (SEQ ID NO: 84304), YVPKPXX (SEQ ID NO: 84433):APT:SATS-AA¹⁷-LYY (SEQ ID NO: 84882):DDSSNVI (SEQ ID NO: 84965):LRKHR (SEQ ID NO: 84233):VVR:SXGXH (SEQ ID NO: 84304), TVPKPXX (SEQ ID NO: 84432):APT:SATS-AA¹⁷-LYY (SEQ ID NO: 84882):DDSSNVI (SEQ ID NO: 84965):LRKHR (SEQ ID NO: 84233):VVR:AXGXH (SEQ ID NO: 84147), KVGKAXX (SEQ ID NO: 84425):VPT:SATS-AA¹⁷-LYY (SEQ ID NO: 84882):DDMGVPT (SEQ ID NO: 84964):LRKHR (SEQ ID NO: 84233):VAE:XGXR (SEQ ID NO: 84123), KASKAXX (SEQ ID NO: 84423):VPT:SATS-AA¹⁷-LYY (SEQ ID NO: 84882):DKGVVTY (SEQ ID NO: 84969):LRKHR (SEQ ID NO: 84233):AVS:EXGXR (SEQ ID NO: 84179), GSAGPXX (SEQ ID NO: 84420):TPT:SATS-AA¹⁷-LYY (SEQ ID NO: 84882):NDKQQII (SEQ ID NO: 84979):LRKHR (SEQ ID NO: 84233):VVD:RXGXS (SEQ ID NO: 84291), AAPASXX (SEQ ID NO: 84401):VPA:SATS-AA¹⁷-LYY (SEQ ID NO: 84882):DAANNVV (SEQ ID NO: 84963):LRKHR (SEQ ID NO: 84233):VVE:AXGXR (SEQ ID NO: 84148), STPPTXX (SEQ ID NO: 84431):VPT:SATS-AA¹⁷-LYY (SEQ ID NO: 84882):DSANNVV (SEQ ID NO: 84971):LRKHR (SEQ ID NO: 84233):VVE:SXGXR (SEQ ID NO: 84305), HVPKPXX (SEQ ID NO: 84421):APT:SATS-AA¹⁷-LYY (SEQ ID NO: 84882):DDSSNVI (SEQ ID NO: 84965):LRKHR (SEQ ID NO: 84233):VVR:SXGXH (SEQ ID NO: 84304), RVPSTXX (SEQ ID NO: 84428):APV:SATS-AA¹⁷-LYY (SEQ ID NO: 84882):DNGRVLL (SEQ ID NO: 84970):LRKHR (SEQ ID NO: 84233):VEE:XGXL (SEQ ID NO: 84122), ASAAPXX (SEQ ID NO: 84402):VPQ:SATS-AA¹⁷-LYY (SEQ ID NO: 84882):VGRKPKV (SEQ ID NO: 84981):LRKHR (SEQ ID NO: 84233):VRS:XKXS (SEQ ID NO: 84124), ASASPXX (SEQ ID NO: 84403):VSQ:SATS-AA¹⁷-LYY (SEQ ID NO: 84882):IGKTPKI (SEQ ID NO: 84978):LRKHR (SEQ ID NO: 84233):VKS:XKXS (SEQ ID NO: 84124), ASASPXX (SEQ ID NO: 84403):VPQ:SATS-AA¹⁷-LYY (SEQ ID NO: 84882):VGRTPKV (SEQ ID NO: 84982):LRKHR (SEQ ID NO: 84233):VKS:XKXS (SEQ ID NO: 84124), NDEGLEX (SEQ ID NO: 84426):VPT:SATS-AA¹⁷-LYY (SEQ ID NO: 84882):RIKPHQGQH (SEQ ID NO: 84980):LRKHR (SEQ ID NO: 84233):QHN:KXEXR (SEQ ID NO: 84213), NDEGLEX (SEQ ID NO: 84426):VPT:SATS-AA¹⁷-LYY (SEQ ID NO: 84882):RIKPHQGQH (SEQ ID NO: 84980):LRKHR (SEQ ID NO: 84233):EHS:QXEXR (SEQ ID NO: 84276), SSVKXQP (SEQ ID NO: 84430):SRV:SATS-AA¹⁷-LYY (SEQ ID NO: 84882):EYVRKKPKL (SEQ ID NO: 84974):LRKHR (SEQ ID NO: 84233):EEH:LEXAXA (SEQ ID NO: 84400), RNVQXRP (SEQ ID NO: 84427):TQV:SATS-AA¹⁷-LYY (SEQ ID NO: 84882):EIVRKKPIF (SEQ ID NO: 84973):LRKHR (SEQ ID NO: 84233):EDH:LAXKXE (SEQ ID NO: 84399), KIPKAXX (SEQ ID NO: 84424):VPT:SPIS-AA¹⁷-LYK (SEQ ID NO: 84887):DENEKVV (SEQ ID NO: 84966):LKYHY (SEQ ID NO: 84232):VAE:GXGXR (SEQ ID NO: 84208), GIPEPXX (SEQ ID NO: 84419):VPT:SPIS-AA¹⁷-LYK (SEQ ID NO: 84887):DENKNVV (SEQ ID NO: 84967):LKYHY (SEQ ID NO: 84232):VAE:SXAXR (SEQ ID NO: 84303), SIPKAXX (SEQ ID NO: 84429):VPT:SPIS-AA¹⁷-LYK (SEQ ID NO: 84887):DEYDKVV (SEQ ID NO: 84968):LKYHY (SEQ ID NO: 84232):VAE:GXGXR (SEQ ID NO: 84208), HVTKPTX (SEQ ID NO: 84422):VPT:SPIS-AA¹⁷-LYK (SEQ ID NO: 84887):DDSSNVI (SEQ ID NO: 84965):LKYHY (SEQ ID NO: 84232):VAE:SXGXH (SEQ ID NO: 84304), YVPKPXX (SEQ ID NO: 84433):VPT:SPIS-AA¹⁷-LYK (SEQ ID NO: 84887):DDSSNVI (SEQ ID NO: 84965):LKYHY (SEQ ID NO: 84232):VAE:SXGXH (SEQ ID NO: 84304), TVPKPXX (SEQ ID NO: 84432):VPT:SPIS-AA¹⁷-LYK (SEQ ID NO: 84887):DDSSNVI (SEQ ID NO: 84965):LKYHY (SEQ ID NO: 84232):VAE:AXGXH (SEQ ID NO: 84147), AVPKAXX (SEQ ID NO: 84404):VPT:SPIS-AA¹⁷-LYK (SEQ ID NO: 84887):DSSNNVI (SEQ ID NO: 84972):LKYHY (SEQ ID NO: 84232):VAE:AXGXH (SEQ ID NO: 84147), KASKAXX (SEQ ID NO: 84423):VPT:SPIS-AA¹⁷-LYK (SEQ ID NO: 84887):DKGVVTY (SEQ ID NO: 84969):LKYHY (SEQ ID NO: 84232):VAE:EXGXR (SEQ ID NO: 84179), GSAGPXX (SEQ ID NO: 84420):VPT:SPIS-AA¹⁷-LYK (SEQ ID NO: 84887):NDKQQII (SEQ ID NO: 84979):LKYHY (SEQ ID NO: 84232):VAE:RXGXS (SEQ ID NO: 84291), AAPASXX (SEQ ID NO: 84401):VPT:SPIS-AA¹⁷-LYK (SEQ ID NO: 84887):DAANNVV (SEQ ID NO: 84963):LKYHY (SEQ ID NO: 84232):VAE:AXGXR (SEQ ID NO: 84148), STPPTXX (SEQ ID NO: 84431):VPT:SPIS-AA¹⁷-LYK (SEQ ID NO: 84887):DSANNVV (SEQ ID NO: 84971):LKYHY (SEQ ID NO: 84232):VAE:SXGXR (SEQ ID NO: 84305), HVPKPXX (SEQ ID NO: 84421):VPT:SPIS-AA¹⁷-LYK (SEQ ID NO: 84887):DDSSNVI (SEQ ID NO: 84965):LKYHY (SEQ ID NO: 84232):VAE:SXGXH (SEQ ID NO: 84304), RVPSTXX (SEQ ID NO: 84428):VPT:SPIS-AA¹⁷-LYK (SEQ ID NO: 84887):DNGRVLL (SEQ ID NO: 84970):LKYHY (SEQ ID NO: 84232):VAE:XGXL (SEQ ID NO: 84122), ASAAPXX (SEQ ID NO: 84402):VPT:SPIS-AA¹⁷-LYK (SEQ ID NO: 84887):VGRKPKV (SEQ ID NO: 84981):LKYHY (SEQ ID NO: 84232):VAE:XKXS (SEQ ID NO: 84124), ASASPXX (SEQ ID NO: 84403):VPT:SPIS-AA¹⁷-LYK (SEQ ID NO: 84887):IGKTPKI (SEQ ID NO: 84978):LKYHY (SEQ ID NO: 84232):VAE:XKXS (SEQ ID NO: 84124), ASASPXX (SEQ ID NO: 84403):VPT:SPIS-AA¹⁷-LYK (SEQ ID NO: 84887):VGRTPKV (SEQ ID NO: 84982):LKYHY (SEQ ID NO: 84232):VAE:XKXS (SEQ ID NO: 84124), NDEGLEX (SEQ ID NO: 84426):VPT:SPIS-AA¹⁷-LYK (SEQ ID NO: 84887):RIKPHQGQH (SEQ ID NO: 84980):LKYHY (SEQ ID NO: 84232):VAE:KXEXR (SEQ ID NO: 84213), NDEGLEX (SEQ ID NO: 84426):VPT:SPIS-AA¹⁷-LYK (SEQ ID NO: 84887):RIKPHQGQH (SEQ ID NO: 84980):LKYHY (SEQ ID NO: 84232):VAE:QXEXR (SEQ ID NO: 84276), SSVKXQP (SEQ ID NO: 84430):VPT:SPIS-AA¹⁷-LYK (SEQ ID NO: 84887):EYVRKKPKL (SEQ ID NO: 84974):LKYHY (SEQ ID NO: 84232):VAE:LEXAXA (SEQ ID NO: 84400), RNVQXRP (SEQ ID NO: 84427):VPT:SPIS-AA¹⁷-LYK (SEQ ID NO: 84887):EIVRKKPIF (SEQ ID NO: 84973):LKYHY (SEQ ID NO: 84232):VAE:LAXKXE (SEQ ID NO: 84399), KIPKAXX (SEQ ID NO: 84424):VPT:SPIS-AA¹⁷-LYK (SEQ ID NO: 84887):DENEKVV (SEQ ID NO: 84966):LKYHY (SEQ ID NO: 84232):VVE:GXGXR (SEQ ID NO: 84208), GIPEPXX (SEQ ID NO: 84419):VPE:SPIS-AA¹⁷-LYK (SEQ ID NO: 84887):DENKNVV (SEQ ID NO: 84967):LKYHY (SEQ ID NO: 84232):TVE:SXAXR (SEQ ID NO: 84303), SIPKAXX (SEQ ID NO: 84429):VPT:SPIS-AA¹⁷-LYK (SEQ ID NO: 84887):DEYDKVV (SEQ ID NO: 84968):LKYHY (SEQ ID NO: 84232):VVE:GXGXR (SEQ ID NO: 84208), HVTKPTX (SEQ ID NO: 84422):APT:SPIS-AA¹⁷-LYK (SEQ ID NO: 84887):DDSSNVI (SEQ ID NO: 84965):LKYHY (SEQ ID NO: 84232):VVR:SXGXH (SEQ ID NO: 84304), YVPKPXX (SEQ ID NO: 84433):APT:SPIS-AA¹⁷-LYK (SEQ ID NO: 84887):DDSSNVI (SEQ ID NO: 84965):LKYHY (SEQ ID NO: 84232):VVR:SXGXH (SEQ ID NO: 84304), TVPKPXX (SEQ ID NO: 84432):APT:SPIS-AA¹⁷-LYK (SEQ ID NO: 84887):DDSSNVI (SEQ ID NO: 84965):LKYHY (SEQ ID NO: 84232):VVR:AXGXH (SEQ ID NO: 84147), AVPKAXX (SEQ ID NO: 84404):APT:SPIS-AA¹⁷-LYK (SEQ ID NO: 84887):DSSNNVI (SEQ ID NO: 84972):LKYHY (SEQ ID NO: 84232):VVK:AXGXH (SEQ ID NO: 84147), KASKAXX (SEQ ID NO: 84423):VPT:SPIS-AA¹⁷-LYK (SEQ ID NO: 84887):DKGVVTY (SEQ ID NO: 84969):LKYHY (SEQ ID NO: 84232):AVS:EXGXR (SEQ ID NO: 84179), GSAGPXX (SEQ ID NO: 84420):TPT:SPIS-AA¹⁷-LYK (SEQ ID NO: 84887):NDKQQII (SEQ ID NO: 84979):LKYHY (SEQ ID NO: 84232):VVD:RXGXS (SEQ ID NO: 84291), AAPASXX (SEQ ID NO: 84401):VPA:SPIS-AA¹⁷-LYK (SEQ ID NO: 84887):DAANNVV (SEQ ID NO: 84963):LKYHY (SEQ ID NO: 84232):VVE:AXGXR (SEQ ID NO: 84148), STPPTXX (SEQ ID NO: 84431):VPT:SPIS-AA¹⁷-LYK (SEQ ID NO: 84887):DSANNVV (SEQ ID NO: 84971):LKYHY (SEQ ID NO: 84232):VVE:SXGXR (SEQ ID NO: 84305), HVPKPXX (SEQ ID NO: 84421):APT:SPIS-AA¹⁷-LYK (SEQ ID NO: 84887):DDSSNVI (SEQ ID NO: 84965):LKYHY (SEQ ID NO: 84232):VVR:SXGXH (SEQ ID NO: 84304), RVPSTXX (SEQ ID NO: 84428):APV:SPIS-AA¹⁷-LYK (SEQ ID NO: 84887):DNGRVLL (SEQ ID NO: 84970):LKYHY (SEQ ID NO: 84232):VEE:XGXL (SEQ ID NO: 84122), ASAAPXX (SEQ ID NO: 84402):VPQ:SPIS-AA¹⁷-LYK (SEQ ID NO: 84887):VGRKPKV (SEQ ID NO: 84981):LKYHY (SEQ ID NO: 84232):VRS:XKXS (SEQ ID NO: 84124), ASASPXX (SEQ ID NO: 84403):VSQ:SPIS-AA¹⁷-LYK (SEQ ID NO: 84887):IGKTPKI (SEQ ID NO: 84978):LKYHY (SEQ ID NO: 84232):VKS:XKXS (SEQ ID NO: 84124), ASASPXX (SEQ ID NO: 84403):VPQ:SPIS-AA¹⁷-LYK (SEQ ID NO: 84887):VGRTPKV (SEQ ID NO: 84982):LKYHY (SEQ ID NO: 84232):VKS:XKXS (SEQ ID NO: 84124), NDEGLEX (SEQ ID NO: 84426):VPT:SPIS-AA¹⁷-LYK (SEQ ID NO: 84887):RIKPHQGQH (SEQ ID NO: 84980):LKYHY (SEQ ID NO: 84232):QHN:KXEXR (SEQ ID NO: 84213), NDEGLEX (SEQ ID NO: 84426):VPT:SPIS-AA¹⁷-LYK (SEQ ID NO: 84887):RIKPHQGQH (SEQ ID NO: 84980):LKYHY (SEQ ID NO: 84232):EHS:QXEXR (SEQ ID NO: 84276), SSVKXQP (SEQ ID NO: 84430):SRV:SPIS-AA¹⁷-LYK (SEQ ID NO: 84887):EYVRKKPKL (SEQ ID NO: 84974):LKYHY (SEQ ID NO: 84232):EEH:LEXAXA (SEQ ID NO: 84400), RNVQXRP (SEQ ID NO: 84427):TQV:SPIS-AA¹⁷-LYK (SEQ ID NO: 84887):EIVRKKPIF (SEQ ID NO: 84973):LKYHY (SEQ ID NO: 84232):EDH:LAXKXE (SEQ ID NO: 84399), KIPKAXX (SEQ ID NO: 84424):VPT:EPIS-AA¹⁷-LYL (SEQ ID NO: 84874):DENEKVV (SEQ ID NO: 84966):KFKYE (SEQ ID NO: 84211):AVS:GXGXR (SEQ ID NO: 84208), GIPEPXX (SEQ ID NO: 84419):VPT:EPIS-AA¹⁷-LYL (SEQ ID NO: 84874):DENKNVV (SEQ ID NO: 84967):KFKYE (SEQ ID NO: 84211):AVS:SXAXR (SEQ ID NO: 84303), SIPKAXX (SEQ ID NO: 84429):VPT:EPIS-AA¹⁷-LYL (SEQ ID NO: 84874):DEYDKVV (SEQ ID NO: 84968):KFKYE (SEQ ID NO: 84211):AVS:GXGXR (SEQ ID NO: 84208), HVTKPTX (SEQ ID NO: 84422):VPT:EPIS-AA¹⁷-LYL (SEQ ID NO: 84874):DDSSNVI (SEQ ID NO: 84965):KFKYE (SEQ ID NO: 84211):AVS:SXGXH (SEQ ID NO: 84304), YVPKPXX (SEQ ID NO: 84433):VPT:EPIS-AA¹⁷-LYL (SEQ ID NO: 84874):DDSSNVI (SEQ ID NO: 84965):KFKYE (SEQ ID NO: 84211):AVS:SXGXH (SEQ ID NO: 84304), TVPKPXX (SEQ ID NO: 84432):VPT:EPIS-AA¹⁷-LYL (SEQ ID NO: 84874):DDSSNVI (SEQ ID NO: 84965):KFKYE (SEQ ID NO: 84211):AVS:AXGXH (SEQ ID NO: 84147), AVPKAXX (SEQ ID NO: 84404):VPT:EPIS-AA¹⁷-LYL (SEQ ID NO: 84874):DSSNNVI (SEQ ID NO: 84972):KFKYE (SEQ ID NO: 84211):AVS:AXGXH (SEQ ID NO: 84147), KVGKAXX (SEQ ID NO: 84425):VPT:EPIS-AA¹⁷-LYL (SEQ ID NO: 84874):DDMGVPT (SEQ ID NO: 84964):KFKYE (SEQ ID NO: 84211):AVS:XGXR (SEQ ID NO: 84123), GSAGPXX (SEQ ID NO: 84420):VPT:EPIS-AA¹⁷-LYL (SEQ ID NO: 84874):NDKQQII (SEQ ID NO: 84979):KFKYE (SEQ ID NO: 84211):AVS:RXGXS (SEQ ID NO: 84291), AAPASXX (SEQ ID NO: 84401):VPT:EPIS-AA¹⁷-LYL (SEQ ID NO: 84874):DAANNVV (SEQ ID NO: 84963):KFKYE (SEQ ID NO: 84211):AVS:AXGXR (SEQ ID NO: 84148), STPPTXX (SEQ ID NO: 84431):VPT:EPIS-AA¹⁷-LYL (SEQ ID NO: 84874):DSANNVV (SEQ ID NO: 84971):KFKYE (SEQ ID NO: 84211):AVS:SXGXR (SEQ ID NO: 84305), HVPKPXX (SEQ ID NO: 84421):VPT:EPIS-AA¹⁷-LYL (SEQ ID NO: 84874):DDSSNVI (SEQ ID NO: 84965):KFKYE (SEQ ID NO: 84211):AVS:SXGXH (SEQ ID NO: 84304), RVPSTXX (SEQ ID NO: 84428):VPT:EPIS-AA¹⁷-LYL (SEQ ID NO: 84874):DNGRVLL (SEQ ID NO: 84970):KFKYE (SEQ ID NO: 84211):AVS:XGXL (SEQ ID NO: 84122), ASAAPXX (SEQ ID NO: 84402):VPT:EPIS-AA¹⁷-LYL (SEQ ID NO: 84874):VGRKPKV (SEQ ID NO: 84981):KFKYE (SEQ ID NO: 84211):AVS:XKXS (SEQ ID NO: 84124), ASASPXX (SEQ ID NO: 84403):VPT:EPIS-AA¹⁷-LYL (SEQ ID NO: 84874):IGKTPKI (SEQ ID NO: 84978):KFKYE (SEQ ID NO: 84211):AVS:XKXS (SEQ ID NO: 84124), ASASPXX (SEQ ID NO: 84403):VPT:EPIS-AA¹⁷-LYL (SEQ ID NO: 84874):VGRTPKV (SEQ ID NO: 84982):KFKYE (SEQ ID NO: 84211):AVS:XKXS (SEQ ID NO: 84124), NDEGLEX (SEQ ID NO: 84426):VPT:EPIS-AA¹⁷-LYL (SEQ ID NO: 84874):RIKPHQGQH (SEQ ID NO: 84980):KFKYE (SEQ ID NO: 84211):AVS:KXEXR (SEQ ID NO: 84213), NDEGLEX (SEQ ID NO: 84426):VPT:EPIS-AA¹⁷-LYL (SEQ ID NO: 84874):RIKPHQGQH (SEQ ID NO: 84980):KFKYE (SEQ ID NO: 84211):AVS:QXEXR (SEQ ID NO: 84276), SSVKXQP (SEQ ID NO: 84430):VPT:EPIS-AA¹⁷-LYL (SEQ ID NO: 84874):EYVRKKPKL (SEQ ID NO: 84974):KFKYE (SEQ ID NO: 84211):AVS:LEXAXA (SEQ ID NO: 84400), RNVQXRP (SEQ ID NO: 84427):VPT:EPIS-AA¹⁷-LYL (SEQ ID NO: 84874):EIVRKKPIF (SEQ ID NO: 84973):KFKYE (SEQ ID NO: 84211):AVS:LAXKXE (SEQ ID NO: 84399), KIPKAXX (SEQ ID NO: 84424):VPT:EPIS-AA¹⁷-LYL (SEQ ID NO: 84874):DENEKVV (SEQ ID NO: 84966):KFKYE (SEQ ID NO: 84211):VVE:GXGXR (SEQ ID NO: 84208), GIPEPXX (SEQ ID NO: 84419):VPE:EPIS-AA¹⁷-LYL (SEQ ID NO: 84874):DENKNVV (SEQ ID NO: 84967):KFKYE (SEQ ID NO: 84211):TVE:SXAXR (SEQ ID NO: 84303), SIPKAXX (SEQ ID NO: 84429):VPT:EPIS-AA¹⁷-LYL (SEQ ID NO: 84874):DEYDKVV (SEQ ID NO: 84968):KFKYE (SEQ ID NO: 84211):VVE:GXGXR (SEQ ID NO: 84208), HVTKPTX (SEQ ID NO: 84422):APT:EPIS-AA¹⁷-LYL (SEQ ID NO: 84874):DDSSNVI (SEQ ID NO: 84965):KFKYE (SEQ ID NO: 84211):VVR:SXGXH (SEQ ID NO: 84304), YVPKPXX (SEQ ID NO: 84433):APT:EPIS-AA¹⁷-LYL (SEQ ID NO: 84874):DDSSNVI (SEQ ID NO: 84965):KFKYE (SEQ ID NO: 84211):VVR:SXGXH (SEQ ID NO: 84304), TVPKPXX (SEQ ID NO: 84432):APT:EPIS-AA¹⁷-LYL (SEQ ID NO: 84874):DDSSNVI (SEQ ID NO: 84965):KFKYE (SEQ ID NO: 84211):VVR:AXGXH (SEQ ID NO: 84147), AVPKAXX (SEQ ID NO: 84404):APT:EPIS-AA¹⁷-LYL (SEQ ID NO: 84874):DSSNNVI (SEQ ID NO: 84972):KFKYE (SEQ ID NO: 84211):VVK:AXGXH (SEQ ID NO: 84147), KVGKAXX (SEQ ID NO: 84425):VPT:EPIS-AA¹⁷-LYL (SEQ ID NO: 84874):DDMGVPT (SEQ ID NO: 84964):KFKYE (SEQ ID NO: 84211):VAE:XGXR (SEQ ID NO: 84123), GSAGPXX (SEQ ID NO: 84420):TPT:EPIS-AA¹⁷-LYL (SEQ ID NO: 84874):NDKQQII (SEQ ID NO: 84979):KFKYE (SEQ ID NO: 84211):VVD:RXGXS (SEQ ID NO: 84291), AAPASXX (SEQ ID NO: 84401):VPA:EPIS-AA¹⁷-LYL (SEQ ID NO: 84874):DAANNVV (SEQ ID NO: 84963):KFKYE (SEQ ID NO: 84211):VVE:AXGXR (SEQ ID NO: 84148), STPPTXX (SEQ ID NO: 84431):VPT:EPIS-AA¹⁷-LYL (SEQ ID NO: 84874):DSANNVV (SEQ ID NO: 84971):KFKYE (SEQ ID NO: 84211):VVE:SXGXR (SEQ ID NO: 84305), HVPKPXX (SEQ ID NO: 84421):APT:EPIS-AA¹⁷-LYL (SEQ ID NO: 84874):DDSSNVI (SEQ ID NO: 84965):KFKYE (SEQ ID NO: 84211):VVR:SXGXH (SEQ ID NO: 84304), RVPSTXX (SEQ ID NO: 84428):APV:EPIS-AA¹⁷-LYL (SEQ ID NO: 84874):DNGRVLL (SEQ ID NO: 84970):KFKYE (SEQ ID NO: 84211):VEE:XGXL (SEQ ID NO: 84122), ASAAPXX (SEQ ID NO: 84402):VPQ:EPIS-AA¹⁷-LYL (SEQ ID NO: 84874):VGRKPKV (SEQ ID NO: 84981):KFKYE (SEQ ID NO: 84211):VRS:XKXS (SEQ ID NO: 84124), ASASPXX (SEQ ID NO: 84403):VSQ:EPIS-AA¹⁷-LYL (SEQ ID NO: 84874):IGKTPKI (SEQ ID NO: 84978):KFKYE (SEQ ID NO: 84211):VKS:XKXS (SEQ ID NO: 84124), ASASPXX (SEQ ID NO: 84403):VPQ:EPIS-AA¹⁷-LYL (SEQ ID NO: 84874):VGRTPKV (SEQ ID NO: 84982):KFKYE (SEQ ID NO: 84211):VKS:XKXS (SEQ ID NO: 84124), NDEGLEX (SEQ ID NO: 84426):VPT:EPIS-AA¹⁷-LYL (SEQ ID NO: 84874):RIKPHQGQH (SEQ ID NO: 84980):KFKYE (SEQ ID NO: 84211):QHN:KXEXR (SEQ ID NO: 84213), NDEGLEX (SEQ ID NO: 84426):VPT:EPIS-AA¹⁷-LYL (SEQ ID NO: 84874):RIKPHQGQH (SEQ ID NO: 84980):KFKYE (SEQ ID NO: 84211):EHS:QXEXR (SEQ ID NO: 84276), SSVKXQP (SEQ ID NO: 84430):SRV:EPIS-AA¹⁷-LYL (SEQ ID NO: 84874):EYVRKKPKL (SEQ ID NO: 84974):KFKYE (SEQ ID NO: 84211):EEH:LEXAXA (SEQ ID NO: 84400), RNVQXRP (SEQ ID NO: 84427):TQV:EPIS-AA¹⁷-LYL (SEQ ID NO: 84874):EIVRKKPIF (SEQ ID NO: 84973):KFKYE (SEQ ID NO: 84211):EDH:LAXKXE (SEQ ID NO: 84399), KIPKAXX (SEQ ID NO: 84424):TPT:SPIN-AA¹⁷-LYF (SEQ ID NO: 84884):DENEKVV (SEQ ID NO: 84966):YGKIP (SEQ ID NO: 84397):VVD:GXGXR (SEQ ID NO: 84208), GIPEPXX (SEQ ID NO: 84419):TPT:SPIN-AA¹⁷-LYF (SEQ ID NO: 84884):DENKNVV (SEQ ID NO: 84967):YGKIP (SEQ ID NO: 84397):VVD:SXAXR (SEQ ID NO: 84303), SIPKAXX (SEQ ID NO: 84429):TPT:SPIN-AA¹⁷-LYF (SEQ ID NO: 84884):DEYDKVV (SEQ ID NO: 84968):YGKIP (SEQ ID NO: 84397):VVD:GXGXR (SEQ ID NO: 84208), HVTKPTX (SEQ ID NO: 84422):TPT:SPIN-AA¹⁷-LYF (SEQ ID NO: 84884):DDSSNVI (SEQ ID NO: 84965):YGKIP (SEQ ID NO: 84397):VVD:SXGXH (SEQ ID NO: 84304), YVPKPXX (SEQ ID NO: 84433):TPT:SPIN-AA¹⁷-LYF (SEQ ID NO: 84884):DDSSNVI (SEQ ID NO: 84965):YGKIP (SEQ ID NO: 84397):VVD:SXGXH (SEQ ID NO: 84304), TVPKPXX (SEQ ID NO: 84432):TPT:SPIN-AA¹⁷-LYF (SEQ ID NO: 84884):DDSSNVI (SEQ ID NO: 84965):YGKIP (SEQ ID NO: 84397):VVD:AXGXH (SEQ ID NO: 84147), AVPKAXX (SEQ ID NO: 84404):TPT:SPIN-AA¹⁷-LYF (SEQ ID NO: 84884):DSSNNVI (SEQ ID NO: 84972):YGKIP (SEQ ID NO: 84397):VVD:AXGXH (SEQ ID NO: 84147), KVGKAXX (SEQ ID NO: 84425):TPT:SPIN-AA¹⁷-LYF (SEQ ID NO: 84884):DDMGVPT (SEQ ID NO: 84964):YGKIP (SEQ ID NO: 84397):VVD:XGXR (SEQ ID NO: 84123), KASKAXX (SEQ ID NO: 84423):TPT:SPIN-AA¹⁷-LYF (SEQ ID NO: 84884):DKGVVTY (SEQ ID NO: 84969):YGKIP (SEQ ID NO: 84397):VVD:EXGXR (SEQ ID NO: 84179), AAPASXX (SEQ ID NO: 84401):TPT:SPIN-AA¹⁷-LYF (SEQ ID NO: 84884):DAANNVV (SEQ ID NO: 84963):YGKIP (SEQ ID NO: 84397):VVD:AXGXR (SEQ ID NO: 84148), STPPTXX (SEQ ID NO: 84431):TPT:SPIN-AA¹⁷-LYF (SEQ ID NO: 84884):DSANNVV (SEQ ID NO: 84971):YGKIP (SEQ ID NO: 84397):VVD:SXGXR (SEQ ID NO: 84305), HVPKPXX (SEQ ID NO: 84421):TPT:SPIN-AA¹⁷-LYF (SEQ ID NO: 84884):DDSSNVI (SEQ ID NO: 84965):YGKIP (SEQ ID NO: 84397):VVD:SXGXH (SEQ ID NO: 84304), RVPSTXX (SEQ ID NO: 84428):TPT:SPIN-AA¹⁷-LYF (SEQ ID NO: 84884):DNGRVLL (SEQ ID NO: 84970):YGKIP (SEQ ID NO: 84397):VVD:XGXL (SEQ ID NO: 84122), ASAAPXX (SEQ ID NO: 84402):TPT:SPIN-AA¹⁷-LYF (SEQ ID NO: 84884):VGRKPKV (SEQ ID NO: 84981):YGKIP (SEQ ID NO: 84397):VVD:XKXS (SEQ ID NO: 84124), ASASPXX (SEQ ID NO: 84403):TPT:SPIN-AA¹⁷-LYF (SEQ ID NO: 84884):IGKTPKI (SEQ ID NO: 84978):YGKIP (SEQ ID NO: 84397):VVD:XKXS (SEQ ID NO: 84124), ASASPXX (SEQ ID NO: 84403):TPT:SPIN-AA¹⁷-LYF (SEQ ID NO: 84884):VGRTPKV (SEQ ID NO: 84982):YGKIP (SEQ ID NO: 84397):VVD:XKXS (SEQ ID NO: 84124), NDEGLEX (SEQ ID NO: 84426):TPT:SPIN-AA¹⁷-LYF (SEQ ID NO: 84884):RIKPHQGQH (SEQ ID NO: 84980):YGKIP (SEQ ID NO: 84397):VVD:KXEXR (SEQ ID NO: 84213), NDEGLEX (SEQ ID NO: 84426):TPT:SPIN-AA¹⁷-LYF (SEQ ID NO: 84884):RIKPHQGQH (SEQ ID NO: 84980):YGKIP (SEQ ID NO: 84397):VVD:QXEXR (SEQ ID NO: 84276), SSVKXQP (SEQ ID NO: 84430):TPT:SPIN-AA¹⁷-LYF (SEQ ID NO: 84884):EYVRKKPKL (SEQ ID NO: 84974):YGKIP (SEQ ID NO: 84397):VVD:LEXAXA (SEQ ID NO: 84400), RNVQXRP (SEQ ID NO: 84427):TPT:SPIN-AA¹⁷-LYF (SEQ ID NO: 84884):EIVRKKPIF (SEQ ID NO: 84973):YGKIP (SEQ ID NO: 84397):VVD:LAXKXE (SEQ ID NO: 84399), KIPKAXX (SEQ ID NO: 84424):VPT:SPIN-AA¹⁷-LYF (SEQ ID NO: 84884):DENEKVV (SEQ ID NO: 84966):YGKIP (SEQ ID NO: 84397):VVE:GXGXR (SEQ ID NO: 84208), GIPEPXX (SEQ ID NO: 84419):VPE:SPIN-AA¹⁷-LYF (SEQ ID NO: 84884):DENKNVV (SEQ ID NO: 84967):YGKIP (SEQ ID NO: 84397):TVE:SXAXR (SEQ ID NO: 84303), SIPKAXX (SEQ ID NO: 84429):VPT:SPIN-AA¹⁷-LYF (SEQ ID NO: 84884):DEYDKVV (SEQ ID NO: 84968):YGKIP (SEQ ID NO: 84397):VVE:GXGXR (SEQ ID NO: 84208), HVTKPTX (SEQ ID NO: 84422):APT:SPIN-AA¹⁷-LYF (SEQ ID NO: 84884):DDSSNVI (SEQ ID NO: 84965):YGKIP (SEQ ID NO: 84397):VVR:SXGXH (SEQ ID NO: 84304), YVPKPXX (SEQ ID NO: 84433):APT:SPIN-AA¹⁷-LYF (SEQ ID NO: 84884):DDSSNVI (SEQ ID NO: 84965):YGKIP (SEQ ID NO: 84397):VVR:SXGXH (SEQ ID NO: 84304), TVPKPXX (SEQ ID NO: 84432):APT:SPIN-AA¹⁷-LYF (SEQ ID NO: 84884):DDSSNVI (SEQ ID NO: 84965):YGKIP (SEQ ID NO: 84397):VVR:AXGXH (SEQ ID NO: 84147), AVPKAXX (SEQ ID NO: 84404):APT:SPIN-AA¹⁷-LYF (SEQ ID NO: 84884):DSSNNVI (SEQ ID NO: 84972):YGKIP (SEQ ID NO: 84397):VVK:AXGXH (SEQ ID NO: 84147), KVGKAXX (SEQ ID NO: 84425):VPT:SPIN-AA¹⁷-LYF (SEQ ID NO: 84884):DDMGVPT (SEQ ID NO: 84964):YGKIP (SEQ ID NO: 84397):VAE:XGXR (SEQ ID NO: 84123), KASKAXX (SEQ ID NO: 84423):VPT:SPIN-AA¹⁷-LYF (SEQ ID NO: 84884):DKGVVTY (SEQ ID NO: 84969):YGKIP (SEQ ID NO: 84397):AVS:EXGXR (SEQ ID NO: 84179), AAPASXX (SEQ ID NO: 84401):VPA:SPIN-AA¹⁷-LYF (SEQ ID NO: 84884):DAANNVV (SEQ ID NO: 84963):YGKIP (SEQ ID NO: 84397):VVE:AXGXR (SEQ ID NO: 84148), STPPTXX (SEQ ID NO: 84431):VPT:SPIN-AA¹⁷-LYF (SEQ ID NO: 84884):DSANNVV (SEQ ID NO: 84971):YGKIP (SEQ ID NO: 84397):VVE:SXGXR (SEQ ID NO: 84305), HVPKPXX (SEQ ID NO: 84421):APT:SPIN-AA¹⁷-LYF (SEQ ID NO: 84884):DDSSNVI (SEQ ID NO: 84965):YGKIP (SEQ ID NO: 84397):VVR:SXGXH (SEQ ID NO: 84304), RVPSTXX (SEQ ID NO: 84428):APV:SPIN-AA¹⁷-LYF (SEQ ID NO: 84884):DNGRVLL (SEQ ID NO: 84970):YGKIP (SEQ ID NO: 84397):VEE:XGXL (SEQ ID NO: 84122), ASAAPXX (SEQ ID NO: 84402):VPQ:SPIN-AA¹⁷-LYF (SEQ ID NO: 84884):VGRKPKV (SEQ ID NO: 84981):YGKIP (SEQ ID NO: 84397):VRS:XKXS (SEQ ID NO: 84124), ASASPXX (SEQ ID NO: 84403):VSQ:SPIN-AA¹⁷-LYF (SEQ ID NO: 84884):IGKTPKI (SEQ ID NO: 84978):YGKIP (SEQ ID NO: 84397):VKS:XKXS (SEQ ID NO: 84124), ASASPXX (SEQ ID NO: 84403):VPQ:SPIN-AA¹⁷-LYF (SEQ ID NO: 84884):VGRTPKV (SEQ ID NO: 84982):YGKIP (SEQ ID NO: 84397):VKS:XKXS (SEQ ID NO: 84124), NDEGLEX (SEQ ID NO: 84426):VPT:SPIN-AA¹⁷-LYF (SEQ ID NO: 84884):RIKPHQGQH (SEQ ID NO: 84980):YGKIP (SEQ ID NO: 84397):QHN:KXEXR (SEQ ID NO: 84213), NDEGLEX (SEQ ID NO: 84426):VPT:SPIN-AA¹⁷-LYF (SEQ ID NO: 84884):RIKPHQGQH (SEQ ID NO: 84980):YGKIP (SEQ ID NO: 84397):EHS:QXEXR (SEQ ID NO: 84276), SSVKXQP (SEQ ID NO: 84430):SRV:SPIN-AA¹⁷-LYF (SEQ ID NO: 84884):EYVRKKPKL (SEQ ID NO: 84974):YGKIP (SEQ ID NO: 84397):EEH:LEXAXA (SEQ ID NO: 84400), RNVQXRP (SEQ ID NO: 84427):TQV:SPIN-AA¹⁷-LYF (SEQ ID NO: 84884):EIVRKKPIF (SEQ ID NO: 84973):YGKIP (SEQ ID NO: 84397):EDH:LAXKXE (SEQ ID NO: 84399), KIPKAXX (SEQ ID NO: 84424):VPA:SPIS-AA¹⁷-LYI (SEQ ID NO: 84886):DENEKVV (SEQ ID NO: 84966):YKQYE (SEQ ID NO: 84398):VVE:GXGXR (SEQ ID NO: 84208), GIPEPXX (SEQ ID NO: 84419):VPA:SPIS-AA¹⁷-LYI (SEQ ID NO: 84886):DENKNVV (SEQ ID NO: 84967):YKQYE (SEQ ID NO: 84398):VVE:SXAXR (SEQ ID NO: 84303), SIPKAXX (SEQ ID NO: 84429):VPA:SPIS-AA¹⁷-LYI (SEQ ID NO: 84886):DEYDKVV (SEQ ID NO: 84968):YKQYE (SEQ ID NO: 84398):VVE:GXGXR (SEQ ID NO: 84208), HVTKPTX (SEQ ID NO: 84422):VPA:SPIS-AA¹⁷-LYI (SEQ ID NO: 84886):DDSSNVI (SEQ ID NO: 84965):YKQYE (SEQ ID NO: 84398):VVE:SXGXH (SEQ ID NO: 84304), YVPKPXX (SEQ ID NO: 84433):VPA:SPIS-AA¹⁷-LYI (SEQ ID NO: 84886):DDSSNVI (SEQ ID NO: 84965):YKQYE (SEQ ID NO: 84398):VVE:SXGXH (SEQ ID NO: 84304), TVPKPXX (SEQ ID NO: 84432):VPA:SPIS-AA¹⁷-LYI (SEQ ID NO: 84886):DDSSNVI (SEQ ID NO: 84965):YKQYE (SEQ ID NO: 84398):VVE:AXGXH (SEQ ID NO: 84147), AVPKAXX (SEQ ID NO: 84404):VPA:SPIS-AA¹⁷-LYI (SEQ ID NO: 84886):DSSNNVI (SEQ ID NO: 84972):YKQYE (SEQ ID NO: 84398):VVE:AXGXH (SEQ ID NO: 84147), KVGKAXX (SEQ ID NO: 84425):VPA:SPIS-AA¹⁷-LYI (SEQ ID NO: 84886):DDMGVPT (SEQ ID NO: 84964):YKQYE (SEQ ID NO: 84398):VVE:XGXR (SEQ ID NO: 84123), KASKAXX (SEQ ID NO: 84423):VPA:SPIS-AA¹⁷-LYI (SEQ ID NO: 84886):DKGVVTY (SEQ ID NO: 84969):YKQYE (SEQ ID NO: 84398):VVE:EXGXR (SEQ ID NO: 84179), GSAGPXX (SEQ ID NO: 84420):VPA:SPIS-AA¹⁷-LYI (SEQ ID NO: 84886):NDKQQII (SEQ ID NO: 84979):YKQYE (SEQ ID NO: 84398):VVE:RXGXS (SEQ ID NO: 84291), STPPTXX (SEQ ID NO: 84431):VPA:SPIS-AA¹⁷-LYI (SEQ ID NO: 84886):DSANNVV (SEQ ID NO: 84971):YKQYE (SEQ ID NO: 84398):VVE:SXGXR (SEQ ID NO: 84305), HVPKPXX (SEQ ID NO: 84421):VPA:SPIS-AA¹⁷-LYI (SEQ ID NO: 84886):DDSSNVI (SEQ ID NO: 84965):YKQYE (SEQ ID NO: 84398):VVE:SXGXH (SEQ ID NO: 84304), RVPSTXX (SEQ ID NO: 84428):VPA:SPIS-AA¹⁷-LYI (SEQ ID NO: 84886):DNGRVLL (SEQ ID NO: 84970):YKQYE (SEQ ID NO: 84398):VVE:XGXL (SEQ ID NO: 84122), ASAAPXX (SEQ ID NO: 84402):VPA:SPIS-AA¹⁷-LYI (SEQ ID NO: 84886):VGRKPKV (SEQ ID NO: 84981):YKQYE (SEQ ID NO: 84398):VVE:XKXS (SEQ ID NO: 84124), ASASPXX (SEQ ID NO: 84403):VPA:SPIS-AA¹⁷-LYI (SEQ ID NO: 84886):IGKTPKI (SEQ ID NO: 84978):YKQYE (SEQ ID NO: 84398):VVE:XKXS (SEQ ID NO: 84124), ASASPXX (SEQ ID NO: 84403):VPA:SPIS-AA¹⁷-LYI (SEQ ID NO: 84886):VGRTPKV (SEQ ID NO: 84982):YKQYE (SEQ ID NO: 84398):VVE:XKXS (SEQ ID NO: 84124), NDEGLEX (SEQ ID NO: 84426):VPA:SPIS-AA¹⁷-LYI (SEQ ID NO: 84886):RIKPHQGQH (SEQ ID NO: 84980):YKQYE (SEQ ID NO: 84398):VVE:KXEXR (SEQ ID NO: 84213), NDEGLEX (SEQ ID NO: 84426):VPA:SPIS-AA¹⁷-LYI (SEQ ID NO: 84886):RIKPHQGQH (SEQ ID NO: 84980):YKQYE (SEQ ID NO: 84398):VVE:QXEXR (SEQ ID NO: 84276), SSVKXQP (SEQ ID NO: 84430):VPA:SPIS-AA¹⁷-LYI (SEQ ID NO: 84886):EYVRKKPKL (SEQ ID NO: 84974):YKQYE (SEQ ID NO: 84398):VVE:LEXAXA (SEQ ID NO: 84400), RNVQXRP (SEQ ID NO: 84427):VPA:SPIS-AA¹⁷-LYI (SEQ ID NO: 84886):EIVRKKPIF (SEQ ID NO: 84973):YKQYE (SEQ ID NO: 84398):VVE:LAXKXE (SEQ ID NO: 84399), KIPKAXX (SEQ ID NO: 84424):VPT:SPIS-AA¹⁷-LYI (SEQ ID NO: 84886):DENEKVV (SEQ ID NO: 84966):YKQYE (SEQ ID NO: 84398):VVE:GXGXR (SEQ ID NO: 84208), GIPEPXX (SEQ ID NO: 84419):VPE:SPIS-AA¹⁷-LYI (SEQ ID NO: 84886):DENKNVV (SEQ ID NO: 84967):YKQYE (SEQ ID NO: 84398):TVE:SXAXR (SEQ ID NO: 84303), SIPKAXX (SEQ ID NO: 84429):VPT:SPIS-AA¹⁷-LYI (SEQ ID NO: 84886):DEYDKVV (SEQ ID NO: 84968):YKQYE (SEQ ID NO: 84398):VVE:GXGXR (SEQ ID NO: 84208), HVTKPTX (SEQ ID NO: 84422):APT:SPIS-AA¹⁷-LYI (SEQ ID NO: 84886):DDSSNVI (SEQ ID NO: 84965):YKQYE (SEQ ID NO: 84398):VVR:SXGXH (SEQ ID NO: 84304), YVPKPXX (SEQ ID NO: 84433):APT:SPIS-AA¹⁷-LYI (SEQ ID NO: 84886):DDSSNVI (SEQ ID NO: 84965):YKQYE (SEQ ID NO: 84398):VVR:SXGXH (SEQ ID NO: 84304), TVPKPXX (SEQ ID NO: 84432):APT:SPIS-AA¹⁷-LYI (SEQ ID NO: 84886):DDSSNVI (SEQ ID NO: 84965):YKQYE (SEQ ID NO: 84398):VVR:AXGXH (SEQ ID NO: 84147), AVPKAXX (SEQ ID NO: 84404):APT:SPIS-AA¹⁷-LYI (SEQ ID NO: 84886):DSSNNVI (SEQ ID NO: 84972):YKQYE (SEQ ID NO: 84398):VVK:AXGXH (SEQ ID NO: 84147), KVGKAXX (SEQ ID NO: 84425):VPT:SPIS-AA¹⁷-LYI (SEQ ID NO: 84886):DDMGVPT (SEQ ID NO: 84964):YKQYE (SEQ ID NO: 84398):VAE:XGXR (SEQ ID NO: 84123), KASKAXX (SEQ ID NO: 84423):VPT:SPIS-AA¹⁷-LYI (SEQ ID NO: 84886):DKGVVTY (SEQ ID NO: 84969):YKQYE (SEQ ID NO: 84398):AVS:EXGXR (SEQ ID NO: 84179), GSAGPXX (SEQ ID NO: 84420):TPT:SPIS-AA¹⁷-LYI (SEQ ID NO: 84886):NDKQQII (SEQ ID NO: 84979):YKQYE (SEQ ID NO: 84398):VVD:RXGXS (SEQ ID NO: 84291), STPPTXX (SEQ ID NO: 84431):VPT:SPIS-AA¹⁷-LYI (SEQ ID NO: 84886):DSANNVV (SEQ ID NO: 84971):YKQYE (SEQ ID NO: 84398):VVE:SXGXR (SEQ ID NO: 84305), HVPKPXX (SEQ ID NO: 84421):APT:SPIS-AA¹⁷-LYI (SEQ ID NO: 84886):DDSSNVI (SEQ ID NO: 84965):YKQYE (SEQ ID NO: 84398):VVR:SXGXH (SEQ ID NO: 84304), RVPSTXX (SEQ ID NO: 84428):APV:SPIS-AA¹⁷-LYI (SEQ ID NO: 84886):DNGRVLL (SEQ ID NO: 84970):YKQYE (SEQ ID NO: 84398):VEE:XGXL (SEQ ID NO: 84122), ASAAPXX (SEQ ID NO: 84402):VPQ:SPIS-AA¹⁷-LYI (SEQ ID NO: 84886):VGRKPKV (SEQ ID NO: 84981):YKQYE (SEQ ID NO: 84398):VRS:XKXS (SEQ ID NO: 84124), ASASPXX (SEQ ID NO: 84403):VSQ:SPIS-AA¹⁷-LYI (SEQ ID NO: 84886):IGKTPKI (SEQ ID NO: 84978):YKQYE (SEQ ID NO: 84398):VKS:XKXS (SEQ ID NO: 84124), ASASPXX (SEQ ID NO: 84403):VPQ:SPIS-AA¹⁷-LYI (SEQ ID NO: 84886):VGRTPKV (SEQ ID NO: 84982):YKQYE (SEQ ID NO: 84398):VKS:XKXS (SEQ ID NO: 84124), NDEGLEX (SEQ ID NO: 84426):VPT:SPIS-AA¹⁷-LYI (SEQ ID NO: 84886):RIKPHQGQH (SEQ ID NO: 84980):YKQYE (SEQ ID NO: 84398):QHN:KXEXR (SEQ ID NO: 84213), NDEGLEX (SEQ ID NO: 84426):VPT:SPIS-AA¹⁷-LYI (SEQ ID NO: 84886):RIKPHQGQH (SEQ ID NO: 84980):YKQYE (SEQ ID NO: 84398):EHS:QXEXR (SEQ ID NO: 84276), SSVKXQP (SEQ ID NO: 84430):SRV:SPIS-AA¹⁷-LYI (SEQ ID NO: 84886):EYVRKKPKL (SEQ ID NO: 84974):YKQYE (SEQ ID NO: 84398):EEH:LEXAXA (SEQ ID NO: 84400), RNVQXRP (SEQ ID NO: 84427):TQV:SPIS-AA¹⁷-LYI (SEQ ID NO: 84886):EIVRKKPIF (SEQ ID NO: 84973):YKQYE (SEQ ID NO: 84398):EDH:LAXKXE (SEQ ID NO: 84399), KIPKAXX (SEQ ID NO: 84424):VPT:SPIS-AA¹⁷-LFI (SEQ ID NO: 84885):DENEKVV (SEQ ID NO: 84966):YKQYE (SEQ ID NO: 84398):VVE:GXGXR (SEQ ID NO: 84208), GIPEPXX (SEQ ID NO: 84419):VPT:SPIS-AA¹⁷-LFI (SEQ ID NO: 84885):DENKNVV (SEQ ID NO: 84967):YKQYE (SEQ ID NO: 84398):VVE:SXAXR (SEQ ID NO: 84303), SIPKAXX (SEQ ID NO: 84429):VPT:SPIS-AA¹⁷-LFI (SEQ ID NO: 84885):DEYDKVV (SEQ ID NO: 84968):YKQYE (SEQ ID NO: 84398):VVE:GXGXR (SEQ ID NO: 84208), HVTKPTX (SEQ ID NO: 84422):VPT:SPIS-AA¹⁷-LFI (SEQ ID NO: 84885):DDSSNVI (SEQ ID NO: 84965):YKQYE (SEQ ID NO: 84398):VVE:SXGXH (SEQ ID NO: 84304), YVPKPXX (SEQ ID NO: 84433):VPT:SPIS-AA¹⁷-LFI (SEQ ID NO: 84885):DDSSNVI (SEQ ID NO: 84965):YKQYE (SEQ ID NO: 84398):VVE:SXGXH (SEQ ID NO: 84304), TVPKPXX (SEQ ID NO: 84432):VPT:SPIS-AA¹⁷-LFI (SEQ ID NO: 84885):DDSSNVI (SEQ ID NO: 84965):YKQYE (SEQ ID NO: 84398):VVE:AXGXH (SEQ ID NO: 84147), AVPKAXX (SEQ ID NO: 84404):VPT:SPIS-AA¹⁷-LFI (SEQ ID NO: 84885):DSSNNVI (SEQ ID NO: 84972):YKQYE (SEQ ID NO: 84398):VVE:AXGXH (SEQ ID NO: 84147), KVGKAXX (SEQ ID NO: 84425):VPT:SPIS-AA¹⁷-LFI (SEQ ID NO: 84885):DDMGVPT (SEQ ID NO: 84964):YKQYE (SEQ ID NO: 84398):VVE:XGXR (SEQ ID NO: 84123), KASKAXX (SEQ ID NO: 84423):VPT:SPIS-AA¹⁷-LFI (SEQ ID NO: 84885):DKGVVTY (SEQ ID NO: 84969):YKQYE (SEQ ID NO: 84398):VVE:EXGXR (SEQ ID NO: 84179), GSAGPXX (SEQ ID NO: 84420):VPT:SPIS-AA¹⁷-LFI (SEQ ID NO: 84885):NDKQQII (SEQ ID NO: 84979):YKQYE (SEQ ID NO: 84398):VVE:RXGXS (SEQ ID NO: 84291), AAPASXX (SEQ ID NO: 84401):VPT:SPIS-AA¹⁷-LFI (SEQ ID NO: 84885):DAANNVV (SEQ ID NO: 84963):YKQYE (SEQ ID NO: 84398):VVE:AXGXR (SEQ ID NO: 84148), HVPKPXX (SEQ ID NO: 84421):VPT:SPIS-AA¹⁷-LFI (SEQ ID NO: 84885):DDSSNVI (SEQ ID NO: 84965):YKQYE (SEQ ID NO: 84398):VVE:SXGXH (SEQ ID NO: 84304), RVPSTXX (SEQ ID NO: 84428):VPT:SPIS-AA¹⁷-LFI (SEQ ID NO: 84885):DNGRVLL (SEQ ID NO: 84970):YKQYE (SEQ ID NO: 84398):VVE:XGXL (SEQ ID NO: 84122), ASAAPXX (SEQ ID NO: 84402):VPT:SPIS-AA¹⁷-LFI (SEQ ID NO: 84885):VGRKPKV (SEQ ID NO: 84981):YKQYE (SEQ ID NO: 84398):VVE:XKXS (SEQ ID NO: 84124), ASASPXX (SEQ ID NO: 84403):VPT:SPIS-AA¹⁷-LFI (SEQ ID NO: 84885):IGKTPKI (SEQ ID NO: 84978):YKQYE (SEQ ID NO: 84398):VVE:XKXS (SEQ ID NO: 84124), ASASPXX (SEQ ID NO: 84403):VPT:SPIS-AA¹⁷-LFI (SEQ ID NO: 84885):VGRTPKV (SEQ ID NO: 84982):YKQYE (SEQ ID NO: 84398):VVE:XKXS (SEQ ID NO: 84124), NDEGLEX (SEQ ID NO: 84426):VPT:SPIS-AA¹⁷-LFI (SEQ ID NO: 84885):RIKPHQGQH (SEQ ID NO: 84980):YKQYE (SEQ ID NO: 84398):VVE:KXEXR (SEQ ID NO: 84213), NDEGLEX (SEQ ID NO: 84426):VPT:SPIS-AA¹⁷-LFI (SEQ ID NO: 84885):RIKPHQGQH (SEQ ID NO: 84980):YKQYE (SEQ ID NO: 84398):VVE:QXEXR (SEQ ID NO: 84276), SSVKXQP (SEQ ID NO: 84430):VPT:SPIS-AA¹⁷-LFI (SEQ ID NO: 84885):EYVRKKPKL (SEQ ID NO: 84974):YKQYE (SEQ ID NO: 84398):VVE:LEXAXA (SEQ ID NO: 84400), RNVQXRP (SEQ ID NO: 84427):VPT:SPIS-AA¹⁷-LFI (SEQ ID NO: 84885):EIVRKKPIF (SEQ ID NO: 84973):YKQYE (SEQ ID NO: 84398):VVE:LAXKXE (SEQ ID NO: 84399), GIPEPXX (SEQ ID NO: 84419):VPE:SPIS-AA¹⁷-LFI (SEQ ID NO: 84885):DENKNVV (SEQ ID NO: 84967):YKQYE (SEQ ID NO: 84398):TVE:SXAXR (SEQ ID NO: 84303), HVTKPTX (SEQ ID NO: 84422):APT:SPIS-AA¹⁷-LFI (SEQ ID NO: 84885):DDSSNVI (SEQ ID NO: 84965):YKQYE (SEQ ID NO: 84398):VVR:SXGXH (SEQ ID NO: 84304), YVPKPXX (SEQ ID NO: 84433):APT:SPIS-AA¹⁷-LFI (SEQ ID NO: 84885):DDSSNVI (SEQ ID NO: 84965):YKQYE (SEQ ID NO: 84398):VVR:SXGXH (SEQ ID NO: 84304), TVPKPXX (SEQ ID NO: 84432):APT:SPIS-AA¹⁷-LFI (SEQ ID NO: 84885):DDSSNVI (SEQ ID NO: 84965):YKQYE (SEQ ID NO: 84398):VVR:AXGXH (SEQ ID NO: 84147), AVPKAXX (SEQ ID NO: 84404):APT:SPIS-AA¹⁷-LFI (SEQ ID NO: 84885):DSSNNVI (SEQ ID NO: 84972):YKQYE (SEQ ID NO: 84398):VVK:AXGXH (SEQ ID NO: 84147), KVGKAXX (SEQ ID NO: 84425):VPT:SPIS-AA¹⁷-LFI (SEQ ID NO: 84885):DDMGVPT (SEQ ID NO: 84964):YKQYE (SEQ ID NO: 84398):VAE:XGXR (SEQ ID NO: 84123), KASKAXX (SEQ ID NO: 84423):VPT:SPIS-AA¹⁷-LFI (SEQ ID NO: 84885):DKGVVTY (SEQ ID NO: 84969):YKQYE (SEQ ID NO: 84398):AVS:EXGXR (SEQ ID NO: 84179), GSAGPXX (SEQ ID NO: 84420):TPT:SPIS-AA¹⁷-LFI (SEQ ID NO: 84885):NDKQQII (SEQ ID NO: 84979):YKQYE (SEQ ID NO: 84398):VVD:RXGXS (SEQ ID NO: 84291), AAPASXX (SEQ ID NO: 84401):VPA:SPIS-AA¹⁷-LFI (SEQ ID NO: 84885):DAANNVV (SEQ ID NO: 84963):YKQYE (SEQ ID NO: 84398):VVE:AXGXR (SEQ ID NO: 84148), HVPKPXX (SEQ ID NO: 84421):APT:SPIS-AA¹⁷-LFI (SEQ ID NO: 84885):DDSSNVI (SEQ ID NO: 84965):YKQYE (SEQ ID NO: 84398):VVR:SXGXH (SEQ ID NO: 84304), RVPSTXX (SEQ ID NO: 84428):APV:SPIS-AA¹⁷-LFI (SEQ ID NO: 84885):DNGRVLL (SEQ ID NO: 84970):YKQYE (SEQ ID NO: 84398):VEE:XGXL (SEQ ID NO: 84122), ASAAPXX (SEQ ID NO: 84402):VPQ:SPIS-AA¹⁷-LFI (SEQ ID NO: 84885):VGRKPKV (SEQ ID NO: 84981):YKQYE (SEQ ID NO: 84398):VRS:XKXS (SEQ ID NO: 84124), ASASPXX (SEQ ID NO: 84403):VSQ:SPIS-AA¹⁷-LFI (SEQ ID NO: 84885):IGKTPKI (SEQ ID NO: 84978):YKQYE (SEQ ID NO: 84398):VKS:XKXS (SEQ ID NO: 84124), ASASPXX (SEQ ID NO: 84403):VPQ:SPIS-AA¹⁷-LFI (SEQ ID NO: 84885):VGRTPKV (SEQ ID NO: 84982):YKQYE (SEQ ID NO: 84398):VKS:XKXS (SEQ ID NO: 84124), NDEGLEX (SEQ ID NO: 84426):VPT:SPIS-AA¹⁷-LFI (SEQ ID NO: 84885):RIKPHQGQH (SEQ ID NO: 84980):YKQYE (SEQ ID NO: 84398):QHN:KXEXR (SEQ ID NO: 84213), NDEGLEX (SEQ ID NO: 84426):VPT:SPIS-AA¹⁷-LFI (SEQ ID NO: 84885):RIKPHQGQH (SEQ ID NO: 84980):YKQYE (SEQ ID NO: 84398):EHS:QXEXR (SEQ ID NO: 84276), SSVKXQP (SEQ ID NO: 84430):SRV:SPIS-AA¹⁷-LFI (SEQ ID NO: 84885):EYVRKKPKL (SEQ ID NO: 84974):YKQYE (SEQ ID NO: 84398):EEH:LEXAXA (SEQ ID NO: 84400), RNVQXRP (SEQ ID NO: 84427):TQV:SPIS-AA¹⁷-LFI (SEQ ID NO: 84885):EIVRKKPIF (SEQ ID NO: 84973):YKQYE (SEQ ID NO: 84398):EDH:LAXKXE (SEQ ID NO: 84399), KIPKAXX (SEQ ID NO: 84424):APV:KPLS-AA¹⁷-LYV (SEQ ID NO: 84877):DENEKVV (SEQ ID NO: 84966):DHHKD (SEQ ID NO: 84149):VEE:GXGXR (SEQ ID NO: 84208), GIPEPXX (SEQ ID NO: 84419):APV:KPLS-AA¹⁷-LYV (SEQ ID NO: 84877):DENKNVV (SEQ ID NO: 84967):DHHKD (SEQ ID NO: 84149):VEE:SXAXR (SEQ ID NO: 84303), SIPKAXX (SEQ ID NO: 84429):APV:KPLS-AA¹⁷-LYV (SEQ ID NO: 84877):DEYDKVV (SEQ ID NO: 84968):DHHKD (SEQ ID NO: 84149):VEE:GXGXR (SEQ ID NO: 84208), HVTKPTX (SEQ ID NO: 84422):APV:KPLS-AA¹⁷-LYV (SEQ ID NO: 84877):DDSSNVI (SEQ ID NO: 84965):DHHKD (SEQ ID NO: 84149):VEE:SXGXH (SEQ ID NO: 84304), YVPKPXX (SEQ ID NO: 84433):APV:KPLS-AA¹⁷-LYV (SEQ ID NO: 84877):DDSSNVI (SEQ ID NO: 84965):DHHKD (SEQ ID NO: 84149):VEE:SXGXH (SEQ ID NO: 84304), TVPKPXX (SEQ ID NO: 84432):APV:KPLS-AA¹⁷-LYV (SEQ ID NO: 84877):DDSSNVI (SEQ ID NO: 84965):DHHKD (SEQ ID NO: 84149):VEE:AXGXH (SEQ ID NO: 84147), AVPKAXX (SEQ ID NO: 84404):APV:KPLS-AA¹⁷-LYV (SEQ ID NO: 84877):DSSNNVI (SEQ ID NO: 84972):DHHKD (SEQ ID NO: 84149):VEE:AXGXH (SEQ ID NO: 84147), KVGKAXX (SEQ ID NO: 84425):APV:KPLS-AA¹⁷-LYV (SEQ ID NO: 84877):DDMGVPT (SEQ ID NO: 84964):DHHKD (SEQ ID NO: 84149):VEE:XGXR (SEQ ID NO: 84123), KASKAXX (SEQ ID NO: 84423):APV:KPLS-AA¹⁷-LYV (SEQ ID NO: 84877):DKGVVTY (SEQ ID NO: 84969):DHHKD (SEQ ID NO: 84149):VEE:EXGXR (SEQ ID NO: 84179), GSAGPXX (SEQ ID NO: 84420):APV:KPLS-AA¹⁷-LYV (SEQ ID NO: 84877):NDKQQII (SEQ ID NO: 84979):DHHKD (SEQ ID NO: 84149):VEE:RXGXS (SEQ ID NO: 84291), AAPASXX (SEQ ID NO: 84401):APV:KPLS-AA¹⁷-LYV (SEQ ID NO: 84877):DAANNVV (SEQ ID NO: 84963):DHHKD (SEQ ID NO: 84149):VEE:AXGXR (SEQ ID NO: 84148), STPPTXX (SEQ ID NO: 84431):APV:KPLS-AA¹⁷-LYV (SEQ ID NO: 84877):DSANNVV (SEQ ID NO: 84971):DHHKD (SEQ ID NO: 84149):VEE:SXGXR (SEQ ID NO: 84305), HVPKPXX (SEQ ID NO: 84421):APV:KPLS-AA¹⁷-LYV (SEQ ID NO: 84877):DDSSNVI (SEQ ID NO: 84965):DHHKD (SEQ ID NO: 84149):VEE:SXGXH (SEQ ID NO: 84304), ASAAPXX (SEQ ID NO: 84402):APV:KPLS-AA¹⁷-LYV (SEQ ID NO: 84877):VGRKPKV (SEQ ID NO: 84981):DHHKD (SEQ ID NO: 84149):VEE:XKXS (SEQ ID NO: 84124), ASASPXX (SEQ ID NO: 84403):APV:KPLS-AA¹⁷-LYV (SEQ ID NO: 84877):IGKTPKI (SEQ ID NO: 84978):DHHKD (SEQ ID NO: 84149):VEE:XKXS (SEQ ID NO: 84124), ASASPXX (SEQ ID NO: 84403):APV:KPLS-AA¹⁷-LYV (SEQ ID NO: 84877):VGRTPKV (SEQ ID NO: 84982):DHHKD (SEQ ID NO: 84149):VEE:XKXS (SEQ ID NO: 84124), NDEGLEX (SEQ ID NO: 84426):APV:KPLS-AA¹⁷-LYV (SEQ ID NO: 84877):RIKPHQGQH (SEQ ID NO: 84980):DHHKD (SEQ ID NO: 84149):VEE:KXEXR (SEQ ID NO: 84213), NDEGLEX (SEQ ID NO: 84426):APV:KPLS-AA¹⁷-LYV (SEQ ID NO: 84877):RIKPHQGQH (SEQ ID NO: 84980):DHHKD (SEQ ID NO: 84149):VEE:QXEXR (SEQ ID NO: 84276), SSVKXQP (SEQ ID NO: 84430):APV:KPLS-AA¹⁷-LYV (SEQ ID NO: 84877):EYVRKKPKL (SEQ ID NO: 84974):DHHKD (SEQ ID NO: 84149):VEE:LEXAXA (SEQ ID NO: 84400), RNVQXRP (SEQ ID NO: 84427):APV:KPLS-AA¹⁷-LYV (SEQ ID NO: 84877):EIVRKKPIF (SEQ ID NO: 84973):DHHKD (SEQ ID NO: 84149):VEE:LAXKXE (SEQ ID NO: 84399), KIPKAXX (SEQ ID NO: 84424):VPT:KPLS-AA¹⁷-LYV (SEQ ID NO: 84877):DENEKVV (SEQ ID NO: 84966):DHHKD (SEQ ID NO: 84149):VVE:GXGXR (SEQ ID NO: 84208), GIPEPXX (SEQ ID NO: 84419):VPE:KPLS-AA¹⁷-LYV (SEQ ID NO: 84877):DENKNVV (SEQ ID NO: 84967):DHHKD (SEQ ID NO: 84149):TVE:SXAXR (SEQ ID NO: 84303), SIPKAXX (SEQ ID NO: 84429):VPT:KPLS-AA¹⁷-LYV (SEQ ID NO: 84877):DEYDKVV (SEQ ID NO: 84968):DHHKD (SEQ ID NO: 84149):VVE:GXGXR (SEQ ID NO: 84208), HVTKPTX (SEQ ID NO: 84422):APT:KPLS-AA¹⁷-LYV (SEQ ID NO: 84877):DDSSNVI (SEQ ID NO: 84965):DHHKD (SEQ ID NO: 84149):VVR:SXGXH (SEQ ID NO: 84304), YVPKPXX (SEQ ID NO: 84433):APT:KPLS-AA¹⁷-LYV (SEQ ID NO: 84877):DDSSNVI (SEQ ID NO: 84965):DHHKD (SEQ ID NO: 84149):VVR:SXGXH (SEQ ID NO: 84304), TVPKPXX (SEQ ID NO: 84432):APT:KPLS-AA¹⁷-LYV (SEQ ID NO: 84877):DDSSNVI (SEQ ID NO: 84965):DHHKD (SEQ ID NO: 84149):VVR:AXGXH (SEQ ID NO: 84147), AVPKAXX (SEQ ID NO: 84404):APT:KPLS-AA¹⁷-LYV (SEQ ID NO: 84877):DSSNNVI (SEQ ID NO: 84972):DHHKD (SEQ ID NO: 84149):VVK:AXGXH (SEQ ID NO: 84147), KVGKAXX (SEQ ID NO: 84425):VPT:KPLS-AA¹⁷-LYV (SEQ ID NO: 84877):DDMGVPT (SEQ ID NO: 84964):DHHKD (SEQ ID NO: 84149):VAE:XGXR (SEQ ID NO: 84123), KASKAXX (SEQ ID NO: 84423):VPT:KPLS-AA¹⁷-LYV (SEQ ID NO: 84877):DKGVVTY (SEQ ID NO: 84969):DHHKD (SEQ ID NO: 84149):AVS:EXGXR (SEQ ID NO: 84179), GSAGPXX (SEQ ID NO: 84420):TPT:KPLS-AA¹⁷-LYV (SEQ ID NO: 84877):NDKQQII (SEQ ID NO: 84979):DHHKD (SEQ ID NO: 84149):VVD:RXGXS (SEQ ID NO: 84291), AAPASXX (SEQ ID NO: 84401):VPA:KPLS-AA¹⁷-LYV (SEQ ID NO: 84877):DAANNVV (SEQ ID NO: 84963):DHHKD (SEQ ID NO: 84149):VVE:AXGXR (SEQ ID NO: 84148), STPPTXX (SEQ ID NO: 84431):VPT:KPLS-AA¹⁷-LYV (SEQ ID NO: 84877):DSANNVV (SEQ ID NO: 84971):DHHKD (SEQ ID NO: 84149):VVE:SXGXR (SEQ ID NO: 84305), HVPKPXX (SEQ ID NO: 84421):APT:KPLS-AA¹⁷-LYV (SEQ ID NO: 84877):DDSSNVI (SEQ ID NO: 84965):DHHKD (SEQ ID NO: 84149):VVR:SXGXH (SEQ ID NO: 84304), ASAAPXX (SEQ ID NO: 84402):VPQ:KPLS-AA¹⁷-LYV (SEQ ID NO: 84877):VGRKPKV (SEQ ID NO: 84981):DHHKD (SEQ ID NO: 84149):VRS:XKXS (SEQ ID NO: 84124), ASASPXX (SEQ ID NO: 84403):VSQ:KPLS-AA¹⁷-LYV (SEQ ID NO: 84877):IGKTPKI (SEQ ID NO: 84978):DHHKD (SEQ ID NO: 84149):VKS:XKXS (SEQ ID NO: 84124), ASASPXX (SEQ ID NO: 84403):VPQ:KPLS-AA¹⁷-LYV (SEQ ID NO: 84877):VGRTPKV (SEQ ID NO: 84982):DHHKD (SEQ ID NO: 84149):VKS:XKXS (SEQ ID NO: 84124), NDEGLEX (SEQ ID NO: 84426):VPT:KPLS-AA¹⁷-LYV (SEQ ID NO: 84877):RIKPHQGQH (SEQ ID NO: 84980):DHHKD (SEQ ID NO: 84149):QHN:KXEXR (SEQ ID NO: 84213), NDEGLEX (SEQ ID NO: 84426):VPT:KPLS-AA¹⁷-LYV (SEQ ID NO: 84877):RIKPHQGQH (SEQ ID NO: 84980):DHHKD (SEQ ID NO: 84149):EHS:QXEXR (SEQ ID NO: 84276), SSVKXQP (SEQ ID NO: 84430):SRV:KPLS-AA¹⁷-LYV (SEQ ID NO: 84877):EYVRKKPKL (SEQ ID NO: 84974):DHHKD (SEQ ID NO: 84149):EEH:LEXAXA (SEQ ID NO: 84400), RNVQXRP (SEQ ID NO: 84427):TQV:KPLS-AA¹⁷-LYV (SEQ ID NO: 84877):EIVRKKPIF (SEQ ID NO: 84973):DHHKD (SEQ ID NO: 84149):EDH:LAXKXE (SEQ ID NO: 84399), KIPKAXX (SEQ ID NO: 84424):VPQ:EPLP-AA¹⁷-VYY (SEQ ID NO: 84875):DENEKVV (SEQ ID NO: 84966):EQLSN (SEQ ID NO: 84178):VRS:GXGXR (SEQ ID NO: 84208), GIPEPXX (SEQ ID NO: 84419):VPQ:EPLP-AA¹⁷-VYY (SEQ ID NO: 84875):DENKNVV (SEQ ID NO: 84967):EQLSN (SEQ ID NO: 84178):VRS:SXAXR (SEQ ID NO: 84303), SIPKAXX (SEQ ID NO: 84429):VPQ:EPLP-AA¹⁷-VYY (SEQ ID NO: 84875):DEYDKVV (SEQ ID NO: 84968):EQLSN (SEQ ID NO: 84178):VRS:GXGXR (SEQ ID NO: 84208), HVTKPTX (SEQ ID NO: 84422):VPQ:EPLP-AA¹⁷-VYY (SEQ ID NO: 84875):DDSSNVI (SEQ ID NO: 84965):EQLSN (SEQ ID NO: 84178):VRS:SXGXH (SEQ ID NO: 84304), YVPKPXX (SEQ ID NO: 84433):VPQ:EPLP-AA¹⁷-VYY (SEQ ID NO: 84875):DDSSNVI (SEQ ID NO: 84965):EQLSN (SEQ ID NO: 84178):VRS:SXGXH (SEQ ID NO: 84304), TVPKPXX (SEQ ID NO: 84432):VPQ:EPLP-AA¹⁷-VYY (SEQ ID NO: 84875):DDSSNVI (SEQ ID NO: 84965):EQLSN (SEQ ID NO: 84178):VRS:AXGXH (SEQ ID NO: 84147), AVPKAXX (SEQ ID NO: 84404):VPQ:EPLP-AA¹⁷-VYY (SEQ ID NO: 84875):DSSNNVI (SEQ ID NO: 84972):EQLSN (SEQ ID NO: 84178):VRS:AXGXH (SEQ ID NO: 84147), KVGKAXX (SEQ ID NO: 84425):VPQ:EPLP-AA¹⁷-VYY (SEQ ID NO: 84875):DDMGVPT (SEQ ID NO: 84964):EQLSN (SEQ ID NO: 84178):VRS:XGXR (SEQ ID NO: 84123), KASKAXX (SEQ ID NO: 84423):VPQ:EPLP-AA¹⁷-VYY (SEQ ID NO: 84875):DKGVVTY (SEQ ID NO: 84969):EQLSN (SEQ ID NO: 84178):VRS:EXGXR (SEQ ID NO: 84179), GSAGPXX (SEQ ID NO: 84420):VPQ:EPLP-AA¹⁷-VYY (SEQ ID NO: 84875):NDKQQII (SEQ ID NO: 84979):EQLSN (SEQ ID NO: 84178):VRS:RXGXS (SEQ ID NO: 84291), AAPASXX (SEQ ID NO: 84401):VPQ:EPLP-AA¹⁷-VYY (SEQ ID NO: 84875):DAANNVV (SEQ ID NO: 84963):EQLSN (SEQ ID NO: 84178):VRS:AXGXR (SEQ ID NO: 84148), STPPTXX (SEQ ID NO: 84431):VPQ:EPLP-AA¹⁷-VYY (SEQ ID NO: 84875):DSANNVV (SEQ ID NO: 84971):EQLSN (SEQ ID NO: 84178):VRS:SXGXR (SEQ ID NO: 84305), HVPKPXX (SEQ ID NO: 84421):VPQ:EPLP-AA¹⁷-VYY (SEQ ID NO: 84875):DDSSNVI (SEQ ID NO: 84965):EQLSN (SEQ ID NO: 84178):VRS:SXGXH (SEQ ID NO: 84304), RVPSTXX (SEQ ID NO: 84428):VPQ:EPLP-AA¹⁷-VYY (SEQ ID NO: 84875):DNGRVLL (SEQ ID NO: 84970):EQLSN (SEQ ID NO: 84178):VRS:XGXL (SEQ ID NO: 84122), ASASPXX (SEQ ID NO: 84403):VPQ:EPLP-AA¹⁷-VYY (SEQ ID NO: 84875):IGKTPKI (SEQ ID NO: 84978):EQLSN (SEQ ID NO: 84178):VRS:XKXS (SEQ ID NO: 84124), ASASPXX (SEQ ID NO: 84403):VPQ:EPLP-AA¹⁷-VYY (SEQ ID NO: 84875):VGRTPKV (SEQ ID NO: 84982):EQLSN (SEQ ID NO: 84178):VRS:XKXS (SEQ ID NO: 84124), NDEGLEX (SEQ ID NO: 84426):VPQ:EPLP-AA¹⁷-VYY (SEQ ID NO: 84875):RIKPHQGQH (SEQ ID NO: 84980):EQLSN (SEQ ID NO: 84178):VRS:KXEXR (SEQ ID NO: 84213), NDEGLEX (SEQ ID NO: 84426):VPQ:EPLP-AA¹⁷-VYY (SEQ ID NO: 84875):RIKPHQGQH (SEQ ID NO: 84980):EQLSN (SEQ ID NO: 84178):VRS:QXEXR (SEQ ID NO: 84276), SSVKXQP (SEQ ID NO: 84430):VPQ:EPLP-AA¹⁷-VYY (SEQ ID NO: 84875):EYVRKKPKL (SEQ ID NO: 84974):EQLSN (SEQ ID NO: 84178):VRS:LEXAXA (SEQ ID NO: 84400), RNVQXRP (SEQ ID NO: 84427):VPQ:EPLP-AA¹⁷-VYY (SEQ ID NO: 84875):EIVRKKPIF (SEQ ID NO: 84973):EQLSN (SEQ ID NO: 84178):VRS:LAXKXE (SEQ ID NO: 84399), KIPKAXX (SEQ ID NO: 84424):VPT:EPLP-AA¹⁷-VYY (SEQ ID NO: 84875):DENEKVV (SEQ ID NO: 84966):EQLSN (SEQ ID NO: 84178):VVE:GXGXR (SEQ ID NO: 84208), GIPEPXX (SEQ ID NO: 84419):VPE:EPLP-AA¹⁷-VYY (SEQ ID NO: 84875):DENKNVV (SEQ ID NO: 84967):EQLSN (SEQ ID NO: 84178):TVE:SXAXR (SEQ ID NO: 84303), SIPKAXX (SEQ ID NO: 84429):VPT:EPLP-AA¹⁷-VYY (SEQ ID NO: 84875):DEYDKVV (SEQ ID NO: 84968):EQLSN (SEQ ID NO: 84178):VVE:GXGXR (SEQ ID NO: 84208), HVTKPTX (SEQ ID NO: 84422):APT:EPLP-AA¹⁷-VYY (SEQ ID NO: 84875):DDSSNVI (SEQ ID NO: 84965):EQLSN (SEQ ID NO: 84178):VVR:SXGXH (SEQ ID NO: 84304), YVPKPXX (SEQ ID NO: 84433):APT:EPLP-AA¹⁷-VYY (SEQ ID NO: 84875):DDSSNVI (SEQ ID NO: 84965):EQLSN (SEQ ID NO: 84178):VVR:SXGXH (SEQ ID NO: 84304), TVPKPXX (SEQ ID NO: 84432):APT:EPLP-AA¹⁷-VYY (SEQ ID NO: 84875):DDSSNVI (SEQ ID NO: 84965):EQLSN (SEQ ID NO: 84178):VVR:AXGXH (SEQ ID NO: 84147), AVPKAXX (SEQ ID NO: 84404):APT:EPLP-AA¹⁷-VYY (SEQ ID NO: 84875):DSSNNVI (SEQ ID NO: 84972):EQLSN (SEQ ID NO: 84178):VVK:AXGXH (SEQ ID NO: 84147), KVGKAXX (SEQ ID NO: 84425):VPT:EPLP-AA¹⁷-VYY (SEQ ID NO: 84875):DDMGVPT (SEQ ID NO: 84964):EQLSN (SEQ ID NO: 84178):VAE:XGXR (SEQ ID NO: 84123), KASKAXX (SEQ ID NO: 84423):VPT:EPLP-AA¹⁷-VYY (SEQ ID NO: 84875):DKGVVTY (SEQ ID NO: 84969):EQLSN (SEQ ID NO: 84178):AVS:EXGXR (SEQ ID NO: 84179), GSAGPXX (SEQ ID NO: 84420):TPT:EPLP-AA¹⁷-VYY (SEQ ID NO: 84875):NDKQQII (SEQ ID NO: 84979):EQLSN (SEQ ID NO: 84178):VVD:RXGXS (SEQ ID NO: 84291), AAPASXX (SEQ ID NO: 84401):VPA:EPLP-AA¹⁷-VYY (SEQ ID NO: 84875):DAANNVV (SEQ ID NO: 84963):EQLSN (SEQ ID NO: 84178):VVE:AXGXR (SEQ ID NO: 84148), STPPTXX (SEQ ID NO: 84431):VPT:EPLP-AA¹⁷-VYY (SEQ ID NO: 84875):DSANNVV (SEQ ID NO: 84971):EQLSN (SEQ ID NO: 84178):VVE:SXGXR (SEQ ID NO: 84305), HVPKPXX (SEQ ID NO: 84421):APT:EPLP-AA¹⁷-VYY (SEQ ID NO: 84875):DDSSNVI (SEQ ID NO: 84965):EQLSN (SEQ ID NO: 84178):VVR:SXGXH (SEQ ID NO: 84304), RVPSTXX (SEQ ID NO: 84428):APV:EPLP-AA¹⁷-VYY (SEQ ID NO: 84875):DNGRVLL (SEQ ID NO: 84970):EQLSN (SEQ ID NO: 84178):VEE:XGXL (SEQ ID NO: 84122), ASASPXX (SEQ ID NO: 84403):VSQ:EPLP-AA¹⁷-VYY (SEQ ID NO: 84875):IGKTPKI (SEQ ID NO: 84978):EQLSN (SEQ ID NO: 84178):VKS:XKXS (SEQ ID NO: 84124), ASASPXX (SEQ ID NO: 84403):VPQ:EPLP-AA¹⁷-VYY (SEQ ID NO: 84875):VGRTPKV (SEQ ID NO: 84982):EQLSN (SEQ ID NO: 84178):VKS:XKXS (SEQ ID NO: 84124), NDEGLEX (SEQ ID NO: 84426):VPT:EPLP-AA¹⁷-VYY (SEQ ID NO: 84875):RIKPHQGQH (SEQ ID NO: 84980):EQLSN (SEQ ID NO: 84178):QHN:KXEXR (SEQ ID NO: 84213), NDEGLEX (SEQ ID NO: 84426):VPT:EPLP-AA¹⁷-VYY (SEQ ID NO: 84875):RIKPHQGQH (SEQ ID NO: 84980):EQLSN (SEQ ID NO: 84178):EHS:QXEXR (SEQ ID NO: 84276), SSVKXQP (SEQ ID NO: 84430):SRV:EPLP-AA¹⁷-VYY (SEQ ID NO: 84875):EYVRKKPKL (SEQ ID NO: 84974):EQLSN (SEQ ID NO: 84178):EEH:LEXAXA (SEQ ID NO: 84400), RNVQXRP (SEQ ID NO: 84427):TQV:EPLP-AA¹⁷-VYY (SEQ ID NO: 84875):EIVRKKPIF (SEQ ID NO: 84973):EQLSN (SEQ ID NO: 84178):EDH:LAXKXE (SEQ ID NO: 84399), KIPKAXX (SEQ ID NO: 84424):VSQ:EPLT-AA¹⁷-LYY (SEQ ID NO: 84876):DENEKVV (SEQ ID NO: 84966):EQLSN (SEQ ID NO: 84178):VKS:GXGXR (SEQ ID NO: 84208), GIPEPXX (SEQ ID NO: 84419):VSQ:EPLT-AA¹⁷-LYY (SEQ ID NO: 84876):DENKNVV (SEQ ID NO: 84967):EQLSN (SEQ ID NO: 84178):VKS:SXAXR (SEQ ID NO: 84303), SIPKAXX (SEQ ID NO: 84429):VSQ:EPLT-AA¹⁷-LYY (SEQ ID NO: 84876):DEYDKVV (SEQ ID NO: 84968):EQLSN (SEQ ID NO: 84178):VKS:GXGXR (SEQ ID NO: 84208), HVTKPTX (SEQ ID NO: 84422):VSQ:EPLT-AA¹⁷-LYY (SEQ ID NO: 84876):DDSSNVI (SEQ ID NO: 84965):EQLSN (SEQ ID NO: 84178):VKS:SXGXH (SEQ ID NO: 84304), YVPKPXX (SEQ ID NO: 84433):VSQ:EPLT-AA¹⁷-LYY (SEQ ID NO: 84876):DDSSNVI (SEQ ID NO: 84965):EQLSN (SEQ ID NO: 84178):VKS:SXGXH (SEQ ID NO: 84304), TVPKPXX (SEQ ID NO: 84432):VSQ:EPLT-AA¹⁷-LYY (SEQ ID NO: 84876):DDSSNVI (SEQ ID NO: 84965):EQLSN (SEQ ID NO: 84178):VKS:AXGXH (SEQ ID NO: 84147), AVPKAXX (SEQ ID NO: 84404):VSQ:EPLT-AA¹⁷-LYY (SEQ ID NO: 84876):DSSNNVI (SEQ ID NO: 84972):EQLSN (SEQ ID NO: 84178):VKS:AXGXH (SEQ ID NO: 84147), KVGKAXX (SEQ ID NO: 84425):VSQ:EPLT-AA¹⁷-LYY (SEQ ID NO: 84876):DDMGVPT (SEQ ID NO: 84964):EQLSN (SEQ ID NO: 84178):VKS:XGXR (SEQ ID NO: 84123), KASKAXX (SEQ ID NO: 84423):VSQ:EPLT-AA¹⁷-LYY (SEQ ID NO: 84876):DKGVVTY (SEQ ID NO: 84969):EQLSN (SEQ ID NO: 84178):VKS:EXGXR (SEQ ID NO: 84179), GSAGPXX (SEQ ID NO: 84420):VSQ:EPLT-AA¹⁷-LYY (SEQ ID NO: 84876):NDKQQII (SEQ ID NO: 84979):EQLSN (SEQ ID NO: 84178):VKS:RXGXS (SEQ ID NO: 84291), AAPASXX (SEQ ID NO: 84401):VSQ:EPLT-AA¹⁷-LYY (SEQ ID NO: 84876):DAANNVV (SEQ ID NO: 84963):EQLSN (SEQ ID NO: 84178):VKS:AXGXR (SEQ ID NO: 84148), STPPTXX (SEQ ID NO: 84431):VSQ:EPLT-AA¹⁷-LYY (SEQ ID NO: 84876):DSANNVV (SEQ ID NO: 84971):EQLSN (SEQ ID NO: 84178):VKS:SXGXR (SEQ ID NO: 84305), HVPKPXX (SEQ ID NO: 84421):VSQ:EPLT-AA¹⁷-LYY (SEQ ID NO: 84876):DDSSNVI (SEQ ID NO: 84965):EQLSN (SEQ ID NO: 84178):VKS:SXGXH (SEQ ID NO: 84304), RVPSTXX (SEQ ID NO: 84428):VSQ:EPLT-AA¹⁷-LYY (SEQ ID NO: 84876):DNGRVLL (SEQ ID NO: 84970):EQLSN (SEQ ID NO: 84178):VKS:XGXL (SEQ ID NO: 84122), ASAAPXX (SEQ ID NO: 84402):VSQ:EPLT-AA¹⁷-LYY (SEQ ID NO: 84876):VGRKPKV (SEQ ID NO: 84981):EQLSN (SEQ ID NO: 84178):VKS:XKXS (SEQ ID NO: 84124), ASASPXX (SEQ ID NO: 84403):VSQ:EPLT-AA¹⁷-LYY (SEQ ID NO: 84876):VGRTPKV (SEQ ID NO: 84982):EQLSN (SEQ ID NO: 84178):VKS:XKXS (SEQ ID NO: 84124), NDEGLEX (SEQ ID NO: 84426):VSQ:EPLT-AA¹⁷-LYY (SEQ ID NO: 84876):RIKPHQGQH (SEQ ID NO: 84980):EQLSN (SEQ ID NO: 84178):VKS:KXEXR (SEQ ID NO: 84213), NDEGLEX (SEQ ID NO: 84426):VSQ:EPLT-AA¹⁷-LYY (SEQ ID NO: 84876):RIKPHQGQH (SEQ ID NO: 84980):EQLSN (SEQ ID NO: 84178):VKS:QXEXR (SEQ ID NO: 84276), SSVKXQP (SEQ ID NO: 84430):VSQ:EPLT-AA¹⁷-LYY (SEQ ID NO: 84876):EYVRKKPKL (SEQ ID NO: 84974):EQLSN (SEQ ID NO: 84178):VKS:LEXAXA (SEQ ID NO: 84400), RNVQXRP (SEQ ID NO: 84427):VSQ:EPLT-AA¹⁷-LYY (SEQ ID NO: 84876):EIVRKKPIF (SEQ ID NO: 84973):EQLSN (SEQ ID NO: 84178):VKS:LAXKXE (SEQ ID NO: 84399), KIPKAXX (SEQ ID NO: 84424):VPT:EPLT-AA¹⁷-LYY (SEQ ID NO: 84876):DENEKVV (SEQ ID NO: 84966):EQLSN (SEQ ID NO: 84178):VVE:GXGXR (SEQ ID NO: 84208), GIPEPXX (SEQ ID NO: 84419):VPE:EPLT-AA¹⁷-LYY (SEQ ID NO: 84876):DENKNVV (SEQ ID NO: 84967):EQLSN (SEQ ID NO: 84178):TVE:SXAXR (SEQ ID NO: 84303), SIPKAXX (SEQ ID NO: 84429):VPT:EPLT-AA¹⁷-LYY (SEQ ID NO: 84876):DEYDKVV (SEQ ID NO: 84968):EQLSN (SEQ ID NO: 84178):VVE:GXGXR (SEQ ID NO: 84208), HVTKPTX (SEQ ID NO: 84422):APT:EPLT-AA¹⁷-LYY (SEQ ID NO: 84876):DDSSNVI (SEQ ID NO: 84965):EQLSN (SEQ ID NO: 84178):VVR:SXGXH (SEQ ID NO: 84304), YVPKPXX (SEQ ID NO: 84433):APT:EPLT-AA¹⁷-LYY (SEQ ID NO: 84876):DDSSNVI (SEQ ID NO: 84965):EQLSN (SEQ ID NO: 84178):VVR:SXGXH (SEQ ID NO: 84304), TVPKPXX (SEQ ID NO: 84432):APT:EPLT-AA¹⁷-LYY (SEQ ID NO: 84876):DDSSNVI (SEQ ID NO: 84965):EQLSN (SEQ ID NO: 84178):VVR:AXGXH (SEQ ID NO: 84147), AVPKAXX (SEQ ID NO: 84404):APT:EPLT-AA¹⁷-LYY (SEQ ID NO: 84876):DSSNNVI (SEQ ID NO: 84972):EQLSN (SEQ ID NO: 84178):VVK:AXGXH (SEQ ID NO: 84147), KVGKAXX (SEQ ID NO: 84425):VPT:EPLT-AA¹⁷-LYY (SEQ ID NO: 84876):DDMGVPT (SEQ ID NO: 84964):EQLSN (SEQ ID NO: 84178):VAE:XGXR (SEQ ID NO: 84123), KASKAXX (SEQ ID NO: 84423):VPT:EPLT-AA¹⁷-LYY (SEQ ID NO: 84876):DKGVVTY (SEQ ID NO: 84969):EQLSN (SEQ ID NO: 84178):AVS:EXGXR (SEQ ID NO: 84179), GSAGPXX (SEQ ID NO: 84420):TPT:EPLT-AA¹⁷-LYY (SEQ ID NO: 84876):NDKQQII (SEQ ID NO: 84979):EQLSN (SEQ ID NO: 84178):VVD:RXGXS (SEQ ID NO: 84291), AAPASXX (SEQ ID NO: 84401):VPA:EPLT-AA¹⁷-LYY (SEQ ID NO: 84876):DAANNVV (SEQ ID NO: 84963):EQLSN (SEQ ID NO: 84178):VVE:AXGXR (SEQ ID NO: 84148), STPPTXX (SEQ ID NO: 84431):VPT:EPLT-AA¹⁷-LYY (SEQ ID NO: 84876):DSANNVV (SEQ ID NO: 84971):EQLSN (SEQ ID NO: 84178):VVE:SXGXR (SEQ ID NO: 84305), HVPKPXX (SEQ ID NO: 84421):APT:EPLT-AA¹⁷-LYY (SEQ ID NO: 84876):DDSSNVI (SEQ ID NO: 84965):EQLSN (SEQ ID NO: 84178):VVR:SXGXH (SEQ ID NO: 84304), RVPSTXX (SEQ ID NO: 84428):APV:EPLT-AA¹⁷-LYY (SEQ ID NO: 84876):DNGRVLL (SEQ ID NO: 84970):EQLSN (SEQ ID NO: 84178):VEE:XGXL (SEQ ID NO: 84122), ASAAPXX (SEQ ID NO: 84402):VPQ:EPLT-AA¹⁷-LYY (SEQ ID NO: 84876):VGRKPKV (SEQ ID NO: 84981):EQLSN (SEQ ID NO: 84178):VRS:XKXS (SEQ ID NO: 84124), ASASPXX (SEQ ID NO: 84403):VPQ:EPLT-AA¹⁷-LYY (SEQ ID NO: 84876):VGRTPKV (SEQ ID NO: 84982):EQLSN (SEQ ID NO: 84178):VKS:XKXS (SEQ ID NO: 84124), NDEGLEX (SEQ ID NO: 84426):VPT:EPLT-AA¹⁷-LYY (SEQ ID NO: 84876):RIKPHQGQH (SEQ ID NO: 84980):EQLSN (SEQ ID NO: 84178):QHN:KXEXR (SEQ ID NO: 84213), NDEGLEX (SEQ ID NO: 84426):VPT:EPLT-AA¹⁷-LYY (SEQ ID NO: 84876):RIKPHQGQH (SEQ ID NO: 84980):EQLSN (SEQ ID NO: 84178):EHS:QXEXR (SEQ ID NO: 84276), SSVKXQP (SEQ ID NO: 84430):SRV:EPLT-AA¹⁷-LYY (SEQ ID NO: 84876):EYVRKKPKL (SEQ ID NO: 84974):EQLSN (SEQ ID NO: 84178):EEH:LEXAXA (SEQ ID NO: 84400), RNVQXRP (SEQ ID NO: 84427):TQV:EPLT-AA¹⁷-LYY (SEQ ID NO: 84876):EIVRKKPIF (SEQ ID NO: 84973):EQLSN (SEQ ID NO: 84178):EDH:LAXKXE (SEQ ID NO: 84399), KIPKAXX (SEQ ID NO: 84424):VPQ:EPLT-AA¹⁷-LYY (SEQ ID NO: 84876):DENEKVV (SEQ ID NO: 84966):EQLSN (SEQ ID NO: 84178):VKS:GXGXR (SEQ ID NO: 84208), GIPEPXX (SEQ ID NO: 84419):VPQ:EPLT-AA¹⁷-LYY (SEQ ID NO: 84876):DENKNVV (SEQ ID NO: 84967):EQLSN (SEQ ID NO: 84178):VKS:SXAXR (SEQ ID NO: 84303), SIPKAXX (SEQ ID NO: 84429):VPQ:EPLT-AA¹⁷-LYY (SEQ ID NO: 84876):DEYDKVV (SEQ ID NO: 84968):EQLSN (SEQ ID NO: 84178):VKS:GXGXR (SEQ ID NO: 84208), HVTKPTX (SEQ ID NO: 84422):VPQ:EPLT-AA¹⁷-LYY (SEQ ID NO: 84876):DDSSNVI (SEQ ID NO: 84965):EQLSN (SEQ ID NO: 84178):VKS:SXGXH (SEQ ID NO: 84304), YVPKPXX (SEQ ID NO: 84433):VPQ:EPLT-AA¹⁷-LYY (SEQ ID NO: 84876):DDSSNVI (SEQ ID NO: 84965):EQLSN (SEQ ID NO: 84178):VKS:SXGXH (SEQ ID NO: 84304), TVPKPXX (SEQ ID NO: 84432):VPQ:EPLT-AA¹⁷-LYY (SEQ ID NO: 84876):DDSSNVI (SEQ ID NO: 84965):EQLSN (SEQ ID NO: 84178):VKS:AXGXH (SEQ ID NO: 84147), AVPKAXX (SEQ ID NO: 84404):VPQ:EPLT-AA¹⁷-LYY (SEQ ID NO: 84876):DSSNNVI (SEQ ID NO: 84972):EQLSN (SEQ ID NO: 84178):VKS:AXGXH (SEQ ID NO: 84147), KVGKAXX (SEQ ID NO: 84425):VPQ:EPLT-AA¹⁷-LYY (SEQ ID NO: 84876):DDMGVPT (SEQ ID NO: 84964):EQLSN (SEQ ID NO: 84178):VKS:XGXR (SEQ ID NO: 84123), KASKAXX (SEQ ID NO: 84423):VPQ:EPLT-AA¹⁷-LYY (SEQ ID NO: 84876):DKGVVTY (SEQ ID NO: 84969):EQLSN (SEQ ID NO: 84178):VKS:EXGXR (SEQ ID NO: 84179), GSAGPXX (SEQ ID NO: 84420):VPQ:EPLT-AA¹⁷-LYY (SEQ ID NO: 84876):NDKQQII (SEQ ID NO: 84979):EQLSN (SEQ ID NO: 84178):VKS:RXGXS (SEQ ID NO: 84291), AAPASXX (SEQ ID NO: 84401):VPQ:EPLT-AA¹⁷-LYY (SEQ ID NO: 84876):DAANNVV (SEQ ID NO: 84963):EQLSN (SEQ ID NO: 84178):VKS:AXGXR (SEQ ID NO: 84148), STPPTXX (SEQ ID NO: 84431):VPQ:EPLT-AA¹⁷-LYY (SEQ ID NO: 84876):DSANNVV (SEQ ID NO: 84971):EQLSN (SEQ ID NO: 84178):VKS:SXGXR (SEQ ID NO: 84305), HVPKPXX (SEQ ID NO: 84421):VPQ:EPLT-AA¹⁷-LYY (SEQ ID NO: 84876):DDSSNVI (SEQ ID NO: 84965):EQLSN (SEQ ID NO: 84178):VKS:SXGXH (SEQ ID NO: 84304), RVPSTXX (SEQ ID NO: 84428):VPQ:EPLT-AA¹⁷-LYY (SEQ ID NO: 84876):DNGRVLL (SEQ ID NO: 84970):EQLSN (SEQ ID NO: 84178):VKS:XGXL (SEQ ID NO: 84122), ASAAPXX (SEQ ID NO: 84402):VPQ:EPLT-AA¹⁷-LYY (SEQ ID NO: 84876):VGRKPKV (SEQ ID NO: 84981):EQLSN (SEQ ID NO: 84178):VKS:XKXS (SEQ ID NO: 84124), ASASPXX (SEQ ID NO: 84403):VPQ:EPLT-AA¹⁷-LYY (SEQ ID NO: 84876):IGKTPKI (SEQ ID NO: 84978):EQLSN (SEQ ID NO: 84178):VKS:XKXS (SEQ ID NO: 84124), NDEGLEX (SEQ ID NO: 84426):VPQ:EPLT-AA¹⁷-LYY (SEQ ID NO: 84876):RIKPHQGQH (SEQ ID NO: 84980):EQLSN (SEQ ID NO: 84178):VKS:KXEXR (SEQ ID NO: 84213), NDEGLEX (SEQ ID NO: 84426):VPQ:EPLT-AA¹⁷-LYY (SEQ ID NO: 84876):RIKPHQGQH (SEQ ID NO: 84980):EQLSN (SEQ ID NO: 84178):VKS:QXEXR (SEQ ID NO: 84276), SSVKXQP (SEQ ID NO: 84430):VPQ:EPLT-AA¹⁷-LYY (SEQ ID NO: 84876):EYVRKKPKL (SEQ ID NO: 84974):EQLSN (SEQ ID NO: 84178):VKS:LEXAXA (SEQ ID NO: 84400), RNVQXRP (SEQ ID NO: 84427):VPQ:EPLT-AA¹⁷-LYY (SEQ ID NO: 84876):EIVRKKPIF (SEQ ID NO: 84973):EQLSN (SEQ ID NO: 84178):VKS:LAXKXE (SEQ ID NO: 84399), ASASPXX (SEQ ID NO: 84403):VSQ:EPLT-AA¹⁷-LYY (SEQ ID NO: 84876):IGKTPKI (SEQ ID NO: 84978):EQLSN (SEQ ID NO: 84178):VKS:XKXS (SEQ ID NO: 84124), KIPKAXX (SEQ ID NO: 84424):VPT:SNIT-AA¹⁷-QIM (SEQ ID NO: 84883):DENEKVV (SEQ ID NO: 84966):IGEMS (SEQ ID NO: 84209):QHN:GXGXR (SEQ ID NO: 84208), GIPEPXX (SEQ ID NO: 84419):VPT:SNIT-AA¹⁷-QIM (SEQ ID NO: 84883):DENKNVV (SEQ ID NO: 84967):IGEMS (SEQ ID NO: 84209):QHN:SXAXR (SEQ ID NO: 84303), SIPKAXX (SEQ ID NO: 84429):VPT:SNIT-AA¹⁷-QIM (SEQ ID NO: 84883):DEYDKVV (SEQ ID NO: 84968):IGEMS (SEQ ID NO: 84209):QHN:GXGXR (SEQ ID NO: 84208), HVTKPTX (SEQ ID NO: 84422):VPT:SNIT-AA¹⁷-QIM (SEQ ID NO: 84883):DDSSNVI (SEQ ID NO: 84965):IGEMS (SEQ ID NO: 84209):QHN:SXGXH (SEQ ID NO: 84304), YVPKPXX (SEQ ID NO: 84433):VPT:SNIT-AA¹⁷-QIM (SEQ ID NO: 84883):DDSSNVI (SEQ ID NO: 84965):IGEMS (SEQ ID NO: 84209):QHN:SXGXH (SEQ ID NO: 84304), TVPKPXX (SEQ ID NO: 84432):VPT:SNIT-AA¹⁷-QIM (SEQ ID NO: 84883):DDSSNVI (SEQ ID NO: 84965):IGEMS (SEQ ID NO: 84209):QHN:AXGXH (SEQ ID NO: 84147), AVPKAXX (SEQ ID NO: 84404):VPT:SNIT-AA¹⁷-QIM (SEQ ID NO: 84883):DSSNNVI (SEQ ID NO: 84972):IGEMS (SEQ ID NO: 84209):QHN:AXGXH (SEQ ID NO: 84147), KVGKAXX (SEQ ID NO: 84425):VPT:SNIT-AA¹⁷-QIM (SEQ ID NO: 84883):DDMGVPT (SEQ ID NO: 84964):IGEMS (SEQ ID NO: 84209):QHN:XGXR (SEQ ID NO: 84123), KASKAXX (SEQ ID NO: 84423):VPT:SNIT-AA¹⁷-QIM (SEQ ID NO: 84883):DKGVVTY (SEQ ID NO: 84969):IGEMS (SEQ ID NO: 84209):QHN:EXGXR (SEQ ID NO: 84179), GSAGPXX (SEQ ID NO: 84420):VPT:SNIT-AA¹⁷-QIM (SEQ ID NO: 84883):NDKQQII (SEQ ID NO: 84979):IGEMS (SEQ ID NO: 84209):QHN:RXGXS (SEQ ID NO: 84291), AAPASXX (SEQ ID NO: 84401):VPT:SNIT-AA¹⁷-QIM (SEQ ID NO: 84883):DAANNVV (SEQ ID NO: 84963):IGEMS (SEQ ID NO: 84209):QHN:AXGXR (SEQ ID NO: 84148), STPPTXX (SEQ ID NO: 84431):VPT:SNIT-AA¹⁷-QIM (SEQ ID NO: 84883):DSANNVV (SEQ ID NO: 84971):IGEMS (SEQ ID NO: 84209):QHN:SXGXR (SEQ ID NO: 84305), HVPKPXX (SEQ ID NO: 84421):VPT:SNIT-AA¹⁷-QIM (SEQ ID NO: 84883):DDSSNVI (SEQ ID NO: 84965):IGEMS (SEQ ID NO: 84209):QHN:SXGXH (SEQ ID NO: 84304), RVPSTXX (SEQ ID NO: 84428):VPT:SNIT-AA¹⁷-QIM (SEQ ID NO: 84883):DNGRVLL (SEQ ID NO: 84970):IGEMS (SEQ ID NO: 84209):QHN:XGXL (SEQ ID NO: 84122), ASAAPXX (SEQ ID NO: 84402):VPT:SNIT-AA¹⁷-QIM (SEQ ID NO: 84883):VGRKPKV (SEQ ID NO: 84981):IGEMS (SEQ ID NO: 84209):QHN:XKXS (SEQ ID NO: 84124), ASASPXX (SEQ ID NO: 84403):VPT:SNIT-AA¹⁷-QIM (SEQ ID NO: 84883):IGKTPKI (SEQ ID NO: 84978):IGEMS (SEQ ID NO: 84209):QHN:XKXS (SEQ ID NO: 84124), ASASPXX (SEQ ID NO: 84403):VPT:SNIT-AA¹⁷-QIM (SEQ ID NO: 84883):VGRTPKV (SEQ ID NO: 84982):IGEMS (SEQ ID NO: 84209):QHN:XKXS (SEQ ID NO: 84124), NDEGLEX (SEQ ID NO: 84426):VPT:SNIT-AA¹⁷-QIM (SEQ ID NO: 84883):RIKPHQGQH (SEQ ID NO: 84980):IGEMS (SEQ ID NO: 84209):QHN:QXEXR (SEQ ID NO: 84276), NDEGLEX (SEQ ID NO: 84426):VPT:SNIT-AA¹⁷-QIM (SEQ ID NO: 84883):RIKPHQGQH (SEQ ID NO: 84980):IGEMS (SEQ ID NO: 84209):QHN:KXEXR (SEQ ID NO: 84213), SSVKXQP (SEQ ID NO: 84430):VPT:SNIT-AA¹⁷-QIM (SEQ ID NO: 84883):EYVRKKPKL (SEQ ID NO: 84974):IGEMS (SEQ ID NO: 84209):QHN:LEXAXA (SEQ ID NO: 84400), RNVQXRP (SEQ ID NO: 84427):VPT:SNIT-AA¹⁷-QIM (SEQ ID NO: 84883):EIVRKKPIF (SEQ ID NO: 84973):IGEMS (SEQ ID NO: 84209):QHN:LAXKXE (SEQ ID NO: 84399), KIPKAXX (SEQ ID NO: 84424):VPT:SNIT-AA¹⁷-QIM (SEQ ID NO: 84883):DENEKVV (SEQ ID NO: 84966):IGEMS (SEQ ID NO: 84209):VVE:GXGXR (SEQ ID NO: 84208), GIPEPXX (SEQ ID NO: 84419):VPE:SNIT-AA¹⁷-QIM (SEQ ID NO: 84883):DENKNVV (SEQ ID NO: 84967):IGEMS (SEQ ID NO: 84209):TVE:SXAXR (SEQ ID NO: 84303), SIPKAXX (SEQ ID NO: 84429):VPT:SNIT-AA¹⁷-QIM (SEQ ID NO: 84883):DEYDKVV (SEQ ID NO: 84968):IGEMS (SEQ ID NO: 84209):VVE:GXGXR (SEQ ID NO: 84208), HVTKPTX (SEQ ID NO: 84422):APT:SNIT-AA¹⁷-QIM (SEQ ID NO: 84883):DDSSNVI (SEQ ID NO: 84965):IGEMS (SEQ ID NO: 84209):VVR:SXGXH (SEQ ID NO: 84304), YVPKPXX (SEQ ID NO: 84433):APT:SNIT-AA¹⁷-QIM (SEQ ID NO: 84883):DDSSNVI (SEQ ID NO: 84965):IGEMS (SEQ ID NO: 84209):VVR:SXGXH (SEQ ID NO: 84304), TVPKPXX (SEQ ID NO: 84432):APT:SNIT-AA¹⁷-QIM (SEQ ID NO: 84883):DDSSNVI (SEQ ID NO: 84965):IGEMS (SEQ ID NO: 84209):VVR:AXGXH (SEQ ID NO: 84147), AVPKAXX (SEQ ID NO: 84404):APT:SNIT-AA¹⁷-QIM (SEQ ID NO: 84883):DSSNNVI (SEQ ID NO: 84972):IGEMS (SEQ ID NO: 84209):VVK:AXGXH (SEQ ID NO: 84147), KVGKAXX (SEQ ID NO: 84425):VPT:SNIT-AA¹⁷-QIM (SEQ ID NO: 84883):DDMGVPT (SEQ ID NO: 84964):IGEMS (SEQ ID NO: 84209):VAE:XGXR (SEQ ID NO: 84123), KASKAXX (SEQ ID NO: 84423):VPT:SNIT-AA¹⁷-QIM (SEQ ID NO: 84883):DKGVVTY (SEQ ID NO: 84969):IGEMS (SEQ ID NO: 84209):AVS:EXGXR (SEQ ID NO: 84179), GSAGPXX (SEQ ID NO: 84420):TPT:SNIT-AA¹⁷-QIM (SEQ ID NO: 84883):NDKQQII (SEQ ID NO: 84979):IGEMS (SEQ ID NO: 84209):VVD:RXGXS (SEQ ID NO: 84291), AAPASXX (SEQ ID NO: 84401):VPA:SNIT-AA¹⁷-QIM (SEQ ID NO: 84883):DAANNVV (SEQ ID NO: 84963):IGEMS (SEQ ID NO: 84209):VVE:AXGXR (SEQ ID NO: 84148), STPPTXX (SEQ ID NO: 84431):VPT:SNIT-AA¹⁷-QIM (SEQ ID NO: 84883):DSANNVV (SEQ ID NO: 84971):IGEMS (SEQ ID NO: 84209):VVE:SXGXR (SEQ ID NO: 84305), HVPKPXX (SEQ ID NO: 84421):APT:SNIT-AA¹⁷-QIM (SEQ ID NO: 84883):DDSSNVI (SEQ ID NO: 84965):IGEMS (SEQ ID NO: 84209):VVR:SXGXH (SEQ ID NO: 84304), RVPSTXX (SEQ ID NO: 84428):APV:SNIT-AA¹⁷-QIM (SEQ ID NO: 84883):DNGRVLL (SEQ ID NO: 84970):IGEMS (SEQ ID NO: 84209):VEE:XGXL (SEQ ID NO: 84122), ASAAPXX (SEQ ID NO: 84402):VPQ:SNIT-AA¹⁷-QIM (SEQ ID NO: 84883):VGRKPKV (SEQ ID NO: 84981):IGEMS (SEQ ID NO: 84209):VRS:XKXS (SEQ ID NO: 84124), ASASPXX (SEQ ID NO: 84403):VSQ:SNIT-AA¹⁷-QIM (SEQ ID NO: 84883):IGKTPKI (SEQ ID NO: 84978):IGEMS (SEQ ID NO: 84209):VKS:XKXS (SEQ ID NO: 84124), ASASPXX (SEQ ID NO: 84403):VPQ:SNIT-AA¹⁷-QIM (SEQ ID NO: 84883):VGRTPKV (SEQ ID NO: 84982):IGEMS (SEQ ID NO: 84209):VKS:XKXS (SEQ ID NO: 84124), NDEGLEX (SEQ ID NO: 84426):VPT:SNIT-AA¹⁷-QIM (SEQ ID NO: 84883):RIKPHQGQH (SEQ ID NO: 84980):IGEMS (SEQ ID NO: 84209):EHS:QXEXR (SEQ ID NO: 84276), SSVKXQP (SEQ ID NO: 84430):SRV:SNIT-AA¹⁷-QIM (SEQ ID NO: 84883):EYVRKKPKL (SEQ ID NO: 84974):IGEMS (SEQ ID NO: 84209):EEH:LEXAXA (SEQ ID NO: 84400), RNVQXRP (SEQ ID NO: 84427):TQV:SNIT-AA¹⁷-QIM (SEQ ID NO: 84883):EIVRKKPIF (SEQ ID NO: 84973):IGEMS (SEQ ID NO: 84209):EDH:LAXKXE (SEQ ID NO: 84399), KIPKAXX (SEQ ID NO: 84424):VPT:SNIT-AA¹⁷-QIM (SEQ ID NO: 84883):DENEKVV (SEQ ID NO: 84966):LGEMS (SEQ ID NO: 84228):EHS:GXGXR (SEQ ID NO: 84208), GIPEPXX (SEQ ID NO: 84419):VPT:SNIT-AA¹⁷-QIM (SEQ ID NO: 84883):DENKNVV (SEQ ID NO: 84967):LGEMS (SEQ ID NO: 84228):EHS:SXAXR (SEQ ID NO: 84303), SIPKAXX (SEQ ID NO: 84429):VPT:SNIT-AA¹⁷-QIM (SEQ ID NO: 84883):DEYDKVV (SEQ ID NO: 84968):LGEMS (SEQ ID NO: 84228):EHS:GXGXR (SEQ ID NO: 84208), HVTKPTX (SEQ ID NO: 84422):VPT:SNIT-AA¹⁷-QIM (SEQ ID NO: 84883):DDSSNVI (SEQ ID NO: 84965):LGEMS (SEQ ID NO: 84228):EHS:SXGXH (SEQ ID NO: 84304), YVPKPXX (SEQ ID NO: 84433):VPT:SNIT-AA¹⁷-QIM (SEQ ID NO: 84883):DDSSNVI (SEQ ID NO: 84965):LGEMS (SEQ ID NO: 84228):EHS:SXGXH (SEQ ID NO: 84304), TVPKPXX (SEQ ID NO: 84432):VPT:SNIT-AA¹⁷-QIM (SEQ ID NO: 84883):DDSSNVI (SEQ ID NO: 84965):LGEMS (SEQ ID NO: 84228):EHS:AXGXH (SEQ ID NO: 84147), AVPKAXX (SEQ ID NO: 84404):VPT:SNIT-AA¹⁷-QIM (SEQ ID NO: 84883):DSSNNVI (SEQ ID NO: 84972):LGEMS (SEQ ID NO: 84228):EHS:AXGXH (SEQ ID NO: 84147), KVGKAXX (SEQ ID NO: 84425):VPT:SNIT-AA¹⁷-QIM (SEQ ID NO: 84883):DDMGVPT (SEQ ID NO: 84964):LGEMS (SEQ ID NO: 84228):EHS:XGXR (SEQ ID NO: 84123), KASKAXX (SEQ ID NO: 84423):VPT:SNIT-AA¹⁷-QIM (SEQ ID NO: 84883):DKGVVTY (SEQ ID NO: 84969):LGEMS (SEQ ID NO: 84228):EHS:EXGXR (SEQ ID NO: 84179), GSAGPXX (SEQ ID NO: 84420):VPT:SNIT-AA¹⁷-QIM (SEQ ID NO: 84883):NDKQQII (SEQ ID NO: 84979):LGEMS (SEQ ID NO: 84228):EHS:RXGXS (SEQ ID NO: 84291), AAPASXX (SEQ ID NO: 84401):VPT:SNIT-AA¹⁷-QIM (SEQ ID NO: 84883):DAANNVV (SEQ ID NO: 84963):LGEMS (SEQ ID NO: 84228):EHS:AXGXR (SEQ ID NO: 84148), STPPTXX (SEQ ID NO: 84431):VPT:SNIT-AA¹⁷-QIM (SEQ ID NO: 84883):DSANNVV (SEQ ID NO: 84971):LGEMS (SEQ ID NO: 84228):EHS:SXGXR (SEQ ID NO: 84305), HVPKPXX (SEQ ID NO: 84421):VPT:SNIT-AA¹⁷-QIM (SEQ ID NO: 84883):DDSSNVI (SEQ ID NO: 84965):LGEMS (SEQ ID NO: 84228):EHS:SXGXH (SEQ ID NO: 84304), RVPSTXX (SEQ ID NO: 84428):VPT:SNIT-AA¹⁷-QIM (SEQ ID NO: 84883):DNGRVLL (SEQ ID NO: 84970):LGEMS (SEQ ID NO: 84228):EHS:XGXL (SEQ ID NO: 84122), ASAAPXX (SEQ ID NO: 84402):VPT:SNIT-AA¹⁷-QIM (SEQ ID NO: 84883):VGRKPKV (SEQ ID NO: 84981):LGEMS (SEQ ID NO: 84228):EHS:XKXS (SEQ ID NO: 84124), ASASPXX (SEQ ID NO: 84403):VPT:SNIT-AA¹⁷-QIM (SEQ ID NO: 84883):IGKTPKI (SEQ ID NO: 84978):LGEMS (SEQ ID NO: 84228):EHS:XKXS (SEQ ID NO: 84124), ASASPXX (SEQ ID NO: 84403):VPT:SNIT-AA¹⁷-QIM (SEQ ID NO: 84883):VGRTPKV (SEQ ID NO: 84982):LGEMS (SEQ ID NO: 84228):EHS:XKXS (SEQ ID NO: 84124), NDEGLEX (SEQ ID NO: 84426):VPT:SNIT-AA¹⁷-QIM (SEQ ID NO: 84883):RIKPHQGQH (SEQ ID NO: 84980):LGEMS (SEQ ID NO: 84228):EHS:KXEXR (SEQ ID NO: 84213), SSVKXQP (SEQ ID NO: 84430):VPT:SNIT-AA¹⁷-QIM (SEQ ID NO: 84883):EYVRKKPKL (SEQ ID NO: 84974):LGEMS (SEQ ID NO: 84228):EHS:LEXAXA (SEQ ID NO: 84400), RNVQXRP (SEQ ID NO: 84427):VPT:SNIT-AA¹⁷-QIM (SEQ ID NO: 84883):EIVRKKPIF (SEQ ID NO: 84973):LGEMS (SEQ ID NO: 84228):EHS:LAXKXE (SEQ ID NO: 84399), KIPKAXX (SEQ ID NO: 84424):VPT:SNIT-AA¹⁷-QIM (SEQ ID NO: 84883):DENEKVV (SEQ ID NO: 84966):LGEMS (SEQ ID NO: 84228):VVE:GXGXR (SEQ ID NO: 84208), GIPEPXX (SEQ ID NO: 84419):VPE:SNIT-AA¹⁷-QIM (SEQ ID NO: 84883):DENKNVV (SEQ ID NO: 84967):LGEMS (SEQ ID NO: 84228):TVE:SXAXR (SEQ ID NO: 84303), SIPKAXX (SEQ ID NO: 84429):VPT:SNIT-AA¹⁷-QIM (SEQ ID NO: 84883):DEYDKVV (SEQ ID NO: 84968):LGEMS (SEQ ID NO: 84228):VVE:GXGXR (SEQ ID NO: 84208), HVTKPTX (SEQ ID NO: 84422):APT:SNIT-AA¹⁷-QIM (SEQ ID NO: 84883):DDSSNVI (SEQ ID NO: 84965):LGEMS (SEQ ID NO: 84228):VVR:SXGXH (SEQ ID NO: 84304), YVPKPXX (SEQ ID NO: 84433):APT:SNIT-AA¹⁷-QIM (SEQ ID NO: 84883):DDSSNVI (SEQ ID NO: 84965):LGEMS (SEQ ID NO: 84228):VVR:SXGXH (SEQ ID NO: 84304), TVPKPXX (SEQ ID NO: 84432):APT:SNIT-AA¹⁷-QIM (SEQ ID NO: 84883):DDSSNVI (SEQ ID NO: 84965):LGEMS (SEQ ID NO: 84228):VVR:AXGXH (SEQ ID NO: 84147), AVPKAXX (SEQ ID NO: 84404):APT:SNIT-AA¹⁷-QIM (SEQ ID NO: 84883):DSSNNVI (SEQ ID NO: 84972):LGEMS (SEQ ID NO: 84228):VVK:AXGXH (SEQ ID NO: 84147), KVGKAXX (SEQ ID NO: 84425):VPT:SNIT-AA¹⁷-QIM (SEQ ID NO: 84883):DDMGVPT (SEQ ID NO: 84964):LGEMS (SEQ ID NO: 84228):VAE:XGXR (SEQ ID NO: 84123), KASKAXX (SEQ ID NO: 84423):VPT:SNIT-AA¹⁷-QIM (SEQ ID NO: 84883):DKGVVTY (SEQ ID NO: 84969):LGEMS (SEQ ID NO: 84228):AVS:EXGXR (SEQ ID NO: 84179), GSAGPXX (SEQ ID NO: 84420):TPT:SNIT-AA¹⁷-QIM (SEQ ID NO: 84883):NDKQQII (SEQ ID NO: 84979):LGEMS (SEQ ID NO: 84228):VVD:RXGXS (SEQ ID NO: 84291), AAPASXX (SEQ ID NO: 84401):VPA:SNIT-AA¹⁷-QIM (SEQ ID NO: 84883):DAANNVV (SEQ ID NO: 84963):LGEMS (SEQ ID NO: 84228):VVE:AXGXR (SEQ ID NO: 84148), STPPTXX (SEQ ID NO: 84431):VPT:SNIT-AA¹⁷-QIM (SEQ ID NO: 84883):DSANNVV (SEQ ID NO: 84971):LGEMS (SEQ ID NO: 84228):VVE:SXGXR (SEQ ID NO: 84305), HVPKPXX (SEQ ID NO: 84421):APT:SNIT-AA¹⁷-QIM (SEQ ID NO: 84883):DDSSNVI (SEQ ID NO: 84965):LGEMS (SEQ ID NO: 84228):VVR:SXGXH (SEQ ID NO: 84304), RVPSTXX (SEQ ID NO: 84428):APV:SNIT-AA¹⁷-QIM (SEQ ID NO: 84883):DNGRVLL (SEQ ID NO: 84970):LGEMS (SEQ ID NO: 84228):VEE:XGXL (SEQ ID NO: 84122), ASAAPXX (SEQ ID NO: 84402):VPQ:SNIT-AA¹⁷-QIM (SEQ ID NO: 84883):VGRKPKV (SEQ ID NO: 84981):LGEMS (SEQ ID NO: 84228):VRS:XKXS (SEQ ID NO: 84124), ASASPXX (SEQ ID NO: 84403):VSQ:SNIT-AA¹⁷-QIM (SEQ ID NO: 84883):IGKTPKI (SEQ ID NO: 84978):LGEMS (SEQ ID NO: 84228):VKS:XKXS (SEQ ID NO: 84124), ASASPXX (SEQ ID NO: 84403):VPQ:SNIT-AA¹⁷-QIM (SEQ ID NO: 84883):VGRTPKV (SEQ ID NO: 84982):LGEMS (SEQ ID NO: 84228):VKS:XKXS (SEQ ID NO: 84124), NDEGLEX (SEQ ID NO: 84426):VPT:SNIT-AA¹⁷-QIM (SEQ ID NO: 84883):RIKPHQGQH (SEQ ID NO: 84980):LGEMS (SEQ ID NO: 84228):QHN:KXEXR (SEQ ID NO: 84213), SSVKXQP (SEQ ID NO: 84430):SRV:SNIT-AA¹⁷-QIM (SEQ ID NO: 84883):EYVRKKPKL (SEQ ID NO: 84974):LGEMS (SEQ ID NO: 84228):EEH:LEXAXA (SEQ ID NO: 84400), RNVQXRP (SEQ ID NO: 84427):TQV:SNIT-AA¹⁷-QIM (SEQ ID NO: 84883):EIVRKKPIF (SEQ ID NO: 84973):LGEMS (SEQ ID NO: 84228):EDH:LAXKXE (SEQ ID NO: 84399), KIPKAXX (SEQ ID NO: 84424):SRV:RSVK-AA¹⁷-AKV (SEQ ID NO: 84880):DENEKVV (SEQ ID NO: 84966):KEVQV (SEQ ID NO: 84210):EEH:GXGXR (SEQ ID NO: 84208), GIPEPXX (SEQ ID NO: 84419):SRV:RSVK-AA¹⁷-AKV (SEQ ID NO: 84880):DENKNVV (SEQ ID NO: 84967):KEVQV (SEQ ID NO: 84210):EEH:SXAXR (SEQ ID NO: 84303), SIPKAXX (SEQ ID NO: 84429):SRV:RSVK-AA¹⁷-AKV (SEQ ID NO: 84880):DEYDKVV (SEQ ID NO: 84968):KEVQV (SEQ ID NO: 84210):EEH:GXGXR (SEQ ID NO: 84208), HVTKPTX (SEQ ID NO: 84422):SRV:RSVK-AA¹⁷-AKV (SEQ ID NO: 84880):DDSSNVI (SEQ ID NO: 84965):KEVQV (SEQ ID NO: 84210):EEH:SXGXH (SEQ ID NO: 84304), YVPKPXX (SEQ ID NO: 84433):SRV:RSVK-AA¹⁷-AKV (SEQ ID NO: 84880):DDSSNVI (SEQ ID NO: 84965):KEVQV (SEQ ID NO: 84210):EEH:SXGXH (SEQ ID NO: 84304), TVPKPXX (SEQ ID NO: 84432):SRV:RSVK-AA¹⁷-AKV (SEQ ID NO: 84880):DDSSNVI (SEQ ID NO: 84965):KEVQV (SEQ ID NO: 84210):EEH:AXGXH (SEQ ID NO: 84147), AVPKAXX (SEQ ID NO: 84404):SRV:RSVK-AA¹⁷-AKV (SEQ ID NO: 84880):DSSNNVI (SEQ ID NO: 84972):KEVQV (SEQ ID NO: 84210):EEH:AXGXH (SEQ ID NO: 84147), KVGKAXX (SEQ ID NO: 84425):SRV:RSVK-AA¹⁷-AKV (SEQ ID NO: 84880):DDMGVPT (SEQ ID NO: 84964):KEVQV (SEQ ID NO: 84210):EEH:XGXR (SEQ ID NO: 84123), KASKAXX (SEQ ID NO: 84423):SRV:RSVK-AA¹⁷-AKV (SEQ ID NO: 84880):DKGVVTY (SEQ ID NO: 84969):KEVQV (SEQ ID NO: 84210):EEH:EXGXR (SEQ ID NO: 84179), GSAGPXX (SEQ ID NO: 84420):SRV:RSVK-AA¹⁷-AKV (SEQ ID NO: 84880):NDKQQII (SEQ ID NO: 84979):KEVQV (SEQ ID NO: 84210):EEH:RXGXS (SEQ ID NO: 84291), AAPASXX (SEQ ID NO: 84401):SRV:RSVK-AA¹⁷-AKV (SEQ ID NO: 84880):DAANNVV (SEQ ID NO: 84963):KEVQV (SEQ ID NO: 84210):EEH:AXGXR (SEQ ID NO: 84148), STPPTXX (SEQ ID NO: 84431):SRV:RSVK-AA¹⁷-AKV (SEQ ID NO: 84880):DSANNVV (SEQ ID NO: 84971):KEVQV (SEQ ID NO: 84210):EEH:SXGXR (SEQ ID NO: 84305), HVPKPXX (SEQ ID NO: 84421):SRV:RSVK-AA¹⁷-AKV (SEQ ID NO: 84880):DDSSNVI (SEQ ID NO: 84965):KEVQV (SEQ ID NO: 84210):EEH:SXGXH (SEQ ID NO: 84304), RVPSTXX (SEQ ID NO: 84428):SRV:RSVK-AA¹⁷-AKV (SEQ ID NO: 84880):DNGRVLL (SEQ ID NO: 84970):KEVQV (SEQ ID NO: 84210):EEH:XGXL (SEQ ID NO: 84122), ASAAPXX (SEQ ID NO: 84402):SRV:RSVK-AA¹⁷-AKV (SEQ ID NO: 84880):VGRKPKV (SEQ ID NO: 84981):KEVQV (SEQ ID NO: 84210):EEH:XKXS (SEQ ID NO: 84124), ASASPXX (SEQ ID NO: 84403):SRV:RSVK-AA¹⁷-AKV (SEQ ID NO: 84880):IGKTPKI (SEQ ID NO: 84978):KEVQV (SEQ ID NO: 84210):EEH:XKXS (SEQ ID NO: 84124), ASASPXX (SEQ ID NO: 84403):SRV:RSVK-AA¹⁷-AKV (SEQ ID NO: 84880):VGRTPKV (SEQ ID NO: 84982):KEVQV (SEQ ID NO: 84210):EEH:XKXS (SEQ ID NO: 84124), NDEGLEX (SEQ ID NO: 84426):SRV:RSVK-AA¹⁷-AKV (SEQ ID NO: 84880):RIKPHQGQH (SEQ ID NO: 84980):KEVQV (SEQ ID NO: 84210):EEH:KXEXR (SEQ ID NO: 84213), NDEGLEX (SEQ ID NO: 84426):SRV:RSVK-AA¹⁷-AKV (SEQ ID NO: 84880):RIKPHQGQH (SEQ ID NO: 84980):KEVQV (SEQ ID NO: 84210):EEH:QXEXR (SEQ ID NO: 84276), RNVQXRP (SEQ ID NO: 84427):SRV:RSVK-AA¹⁷-AKV (SEQ ID NO: 84880):EIVRKKPIF (SEQ ID NO: 84973):KEVQV (SEQ ID NO: 84210):EEH:LAXKXE (SEQ ID NO: 84399), KIPKAXX (SEQ ID NO: 84424):VPT:RSVK-AA¹⁷-AKV (SEQ ID NO: 84880):DENEKVV (SEQ ID NO: 84966):KEVQV (SEQ ID NO: 84210):VVE:GXGXR (SEQ ID NO: 84208), GIPEPXX (SEQ ID NO: 84419):VPE:RSVK-AA¹⁷-AKV (SEQ ID NO: 84880):DENKNVV (SEQ ID NO: 84967):KEVQV (SEQ ID NO: 84210):TVE:SXAXR (SEQ ID NO: 84303), SIPKAXX (SEQ ID NO: 84429):VPT:RSVK-AA¹⁷-AKV (SEQ ID NO: 84880):DEYDKVV (SEQ ID NO: 84968):KEVQV (SEQ ID NO: 84210):VVE:GXGXR (SEQ ID NO: 84208), HVTKPTX (SEQ ID NO: 84422):APT:RSVK-AA¹⁷-AKV (SEQ ID NO: 84880):DDSSNVI (SEQ ID NO: 84965):KEVQV (SEQ ID NO: 84210):VVR:SXGXH (SEQ ID NO: 84304), YVPKPXX (SEQ ID NO: 84433):APT:RSVK-AA¹⁷-AKV (SEQ ID NO: 84880):DDSSNVI (SEQ ID NO: 84965):KEVQV (SEQ ID NO: 84210):VVR:SXGXH (SEQ ID NO: 84304), TVPKPXX (SEQ ID NO: 84432):APT:RSVK-AA¹⁷-AKV (SEQ ID NO: 84880):DDSSNVI (SEQ ID NO: 84965):KEVQV (SEQ ID NO: 84210):VVR:AXGXH (SEQ ID NO: 84147), AVPKAXX (SEQ ID NO: 84404):APT:RSVK-AA¹⁷-AKV (SEQ ID NO: 84880):DSSNNVI (SEQ ID NO: 84972):KEVQV (SEQ ID NO: 84210):VVK:AXGXH (SEQ ID NO: 84147), KVGKAXX (SEQ ID NO: 84425):VPT:RSVK-AA¹⁷-AKV (SEQ ID NO: 84880):DDMGVPT (SEQ ID NO: 84964):KEVQV (SEQ ID NO: 84210):VAE:XGXR (SEQ ID NO: 84123), KASKAXX (SEQ ID NO: 84423):VPT:RSVK-AA¹⁷-AKV (SEQ ID NO: 84880):DKGVVTY (SEQ ID NO: 84969):KEVQV (SEQ ID NO: 84210):AVS:EXGXR (SEQ ID NO: 84179), GSAGPXX (SEQ ID NO: 84420):TPT:RSVK-AA¹⁷-AKV (SEQ ID NO: 84880):NDKQQII (SEQ ID NO: 84979):KEVQV (SEQ ID NO: 84210):VVD:RXGXS (SEQ ID NO: 84291), AAPASXX (SEQ ID NO: 84401):VPA:RSVK-AA¹⁷-AKV (SEQ ID NO: 84880):DAANNVV (SEQ ID NO: 84963):KEVQV (SEQ ID NO: 84210):VVE:AXGXR (SEQ ID NO: 84148), STPPTXX (SEQ ID NO: 84431):VPT:RSVK-AA¹⁷-AKV (SEQ ID NO: 84880):DSANNVV (SEQ ID NO: 84971):KEVQV (SEQ ID NO: 84210):VVE:SXGXR (SEQ ID NO: 84305), HVPKPXX (SEQ ID NO: 84421):APT:RSVK-AA¹⁷-AKV (SEQ ID NO: 84880):DDSSNVI (SEQ ID NO: 84965):KEVQV (SEQ ID NO: 84210):VVR:SXGXH (SEQ ID NO: 84304), RVPSTXX (SEQ ID NO: 84428):APV:RSVK-AA¹⁷-AKV (SEQ ID NO: 84880):DNGRVLL (SEQ ID NO: 84970):KEVQV (SEQ ID NO: 84210):VEE:XGXL (SEQ ID NO: 84122), ASAAPXX (SEQ ID NO: 84402):VPQ:RSVK-AA¹⁷-AKV (SEQ ID NO: 84880):VGRKPKV (SEQ ID NO: 84981):KEVQV (SEQ ID NO: 84210):VRS:XKXS (SEQ ID NO: 84124), ASASPXX (SEQ ID NO: 84403):VSQ:RSVK-AA¹⁷-AKV (SEQ ID NO: 84880):IGKTPKI (SEQ ID NO: 84978):KEVQV (SEQ ID NO: 84210):VKS:XKXS (SEQ ID NO: 84124), ASASPXX (SEQ ID NO: 84403):VPQ:RSVK-AA¹⁷-AKV (SEQ ID NO: 84880):VGRTPKV (SEQ ID NO: 84982):KEVQV (SEQ ID NO: 84210):VKS:XKXS (SEQ ID NO: 84124), NDEGLEX (SEQ ID NO: 84426):VPT:RSVK-AA¹⁷-AKV (SEQ ID NO: 84880):RIKPHQGQH (SEQ ID NO: 84980):KEVQV (SEQ ID NO: 84210):QHN:KXEXR (SEQ ID NO: 84213), NDEGLEX (SEQ ID NO: 84426):VPT:RSVK-AA¹⁷-AKV (SEQ ID NO: 84880):RIKPHQGQH (SEQ ID NO: 84980):KEVQV (SEQ ID NO: 84210):EHS:QXEXR (SEQ ID NO: 84276), RNVQXRP (SEQ ID NO: 84427):TQV:RSVK-AA¹⁷-AKV (SEQ ID NO: 84880):EIVRKKPIF (SEQ ID NO: 84973):KEVQV (SEQ ID NO: 84210):EDH:LAXKXE (SEQ ID NO: 84399), KIPKAXX (SEQ ID NO: 84424):TQV:RPVQ-AA¹⁷-RKI (SEQ ID NO: 84879):DENEKVV (SEQ ID NO: 84966):KKATV (SEQ ID NO: 84212):EDH:GXGXR (SEQ ID NO: 84208), GIPEPXX (SEQ ID NO: 84419):TQV:RPVQ-AA¹⁷-RKI (SEQ ID NO: 84879):DENKNVV (SEQ ID NO: 84967):KKATV (SEQ ID NO: 84212):EDH:SXAXR (SEQ ID NO: 84303), SIPKAXX (SEQ ID NO: 84429):TQV:RPVQ-AA¹⁷-RKI (SEQ ID NO: 84879):DEYDKVV (SEQ ID NO: 84968):KKATV (SEQ ID NO: 84212):EDH:GXGXR (SEQ ID NO: 84208), HVTKPTX (SEQ ID NO: 84422):TQV:RPVQ-AA¹⁷-RKI (SEQ ID NO: 84879):DDSSNVI (SEQ ID NO: 84965):KKATV (SEQ ID NO: 84212):EDH:SXGXH (SEQ ID NO: 84304), YVPKPXX (SEQ ID NO: 84433):TQV:RPVQ-AA¹⁷-RKI (SEQ ID NO: 84879):DDSSNVI (SEQ ID NO: 84965):KKATV (SEQ ID NO: 84212):EDH:SXGXH (SEQ ID NO: 84304), TVPKPXX (SEQ ID NO: 84432):TQV:RPVQ-AA¹⁷-RKI (SEQ ID NO: 84879):DDSSNVI (SEQ ID NO: 84965):KKATV (SEQ ID NO: 84212):EDH:AXGXH (SEQ ID NO: 84147), AVPKAXX (SEQ ID NO: 84404):TQV:RPVQ-AA¹⁷-RKI (SEQ ID NO: 84879):DSSNNVI (SEQ ID NO: 84972):KKATV (SEQ ID NO: 84212):EDH:AXGXH (SEQ ID NO: 84147), KVGKAXX (SEQ ID NO: 84425):TQV:RPVQ-AA¹⁷-RKI (SEQ ID NO: 84879):DDMGVPT (SEQ ID NO: 84964):KKATV (SEQ ID NO: 84212):EDH:XGXR (SEQ ID NO: 84123), KASKAXX (SEQ ID NO: 84423):TQV:RPVQ-AA¹⁷-RKI (SEQ ID NO: 84879):DKGVVTY (SEQ ID NO: 84969):KKATV (SEQ ID NO: 84212):EDH:EXGXR (SEQ ID NO: 84179), GSAGPXX (SEQ ID NO: 84420):TQV:RPVQ-AA¹⁷-RKI (SEQ ID NO: 84879):NDKQQII (SEQ ID NO: 84979):KKATV (SEQ ID NO: 84212):EDH:RXGXS (SEQ ID NO: 84291), AAPASXX (SEQ ID NO: 84401):TQV:RPVQ-AA¹⁷-RKI (SEQ ID NO: 84879):DAANNVV (SEQ ID NO: 84963):KKATV (SEQ ID NO: 84212):EDH:AXGXR (SEQ ID NO: 84148), STPPTXX (SEQ ID NO: 84431):TQV:RPVQ-AA¹⁷-RKI (SEQ ID NO: 84879):DSANNVV (SEQ ID NO: 84971):KKATV (SEQ ID NO: 84212):EDH:SXGXR (SEQ ID NO: 84305), HVPKPXX (SEQ ID NO: 84421):TQV:RPVQ-AA¹⁷-RKI (SEQ ID NO: 84879):DDSSNVI (SEQ ID NO: 84965):KKATV (SEQ ID NO: 84212):EDH:SXGXH (SEQ ID NO: 84304), RVPSTXX (SEQ ID NO: 84428):TQV:RPVQ-AA¹⁷-RKI (SEQ ID NO: 84879):DNGRVLL (SEQ ID NO: 84970):KKATV (SEQ ID NO: 84212):EDH:XGXL (SEQ ID NO: 84122), ASAAPXX (SEQ ID NO: 84402):TQV:RPVQ-AA¹⁷-RKI (SEQ ID NO: 84879):VGRKPKV (SEQ ID NO: 84981):KKATV (SEQ ID NO: 84212):EDH:XKXS (SEQ ID NO: 84124), ASASPXX (SEQ ID NO: 84403):TQV:RPVQ-AA¹⁷-RKI (SEQ ID NO: 84879):IGKTPKI (SEQ ID NO: 84978):KKATV (SEQ ID NO: 84212):EDH:XKXS (SEQ ID NO: 84124), ASASPXX (SEQ ID NO: 84403):TQV:RPVQ-AA¹⁷-RKI (SEQ ID NO: 84879):VGRTPKV (SEQ ID NO: 84982):KKATV (SEQ ID NO: 84212):EDH:XKXS (SEQ ID NO: 84124), NDEGLEX (SEQ ID NO: 84426):TQV:RPVQ-AA¹⁷-RKI (SEQ ID NO: 84879):RIKPHQGQH (SEQ ID NO: 84980):KKATV (SEQ ID NO: 84212):EDH:KXEXR (SEQ ID NO: 84213), NDEGLEX (SEQ ID NO: 84426):TQV:RPVQ-AA¹⁷-RKI (SEQ ID NO: 84879):RIKPHQGQH (SEQ ID NO: 84980):KKATV (SEQ ID NO: 84212):EDH:QXEXR (SEQ ID NO: 84276), SSVKXQP (SEQ ID NO: 84430):TQV:RPVQ-AA¹⁷-RKI (SEQ ID NO: 84879):EYVRKKPKL (SEQ ID NO: 84974):KKATV (SEQ ID NO: 84212):EDH:LEXAXA (SEQ ID NO: 84400), KIPKAXX (SEQ ID NO: 84424):VPT:RPVQ-AA¹⁷-RKI (SEQ ID NO: 84879):DENEKVV (SEQ ID NO: 84966):KKATV (SEQ ID NO: 84212):VVE:GXGXR (SEQ ID NO: 84208), GIPEPXX (SEQ ID NO: 84419):VPE:RPVQ-AA¹⁷-RKI (SEQ ID NO: 84879):DENKNVV (SEQ ID NO: 84967):KKATV (SEQ ID NO: 84212):TVE:SXAXR (SEQ ID NO: 84303), SIPKAXX (SEQ ID NO: 84429):VPT:RPVQ-AA¹⁷-RKI (SEQ ID NO: 84879):DEYDKVV (SEQ ID NO: 84968):KKATV (SEQ ID NO: 84212):VVE:GXGXR (SEQ ID NO: 84208), HVTKPTX (SEQ ID NO: 84422):APT:RPVQ-AA¹⁷-RKI (SEQ ID NO: 84879):DDSSNVI (SEQ ID NO: 84965):KKATV (SEQ ID NO: 84212):VVR:SXGXH (SEQ ID NO: 84304), YVPKPXX (SEQ ID NO: 84433):APT:RPVQ-AA¹⁷-RKI (SEQ ID NO: 84879):DDSSNVI (SEQ ID NO: 84965):KKATV (SEQ ID NO: 84212):VVR:SXGXH (SEQ ID NO: 84304), TVPKPXX (SEQ ID NO: 84432):APT:RPVQ-AA¹⁷-RKI (SEQ ID NO: 84879):DDSSNVI (SEQ ID NO: 84965):KKATV (SEQ ID NO: 84212):VVR:AXGXH (SEQ ID NO: 84147), AVPKAXX (SEQ ID NO: 84404):APT:RPVQ-AA¹⁷-RKI (SEQ ID NO: 84879):DSSNNVI (SEQ ID NO: 84972):KKATV (SEQ ID NO: 84212):VVK:AXGXH (SEQ ID NO: 84147), KVGKAXX (SEQ ID NO: 84425):VPT:RPVQ-AA¹⁷-RKI (SEQ ID NO: 84879):DDMGVPT (SEQ ID NO: 84964):KKATV (SEQ ID NO: 84212):VAE:XGXR (SEQ ID NO: 84123), KASKAXX (SEQ ID NO: 84423):VPT:RPVQ-AA¹⁷-RKI (SEQ ID NO: 84879):DKGVVTY (SEQ ID NO: 84969):KKATV (SEQ ID NO: 84212):AVS:EXGXR (SEQ ID NO: 84179), GSAGPXX (SEQ ID NO: 84420):TPT:RPVQ-AA¹⁷-RKI (SEQ ID NO: 84879):NDKQQII (SEQ ID NO: 84979):KKATV (SEQ ID NO: 84212):VVD:RXGXS (SEQ ID NO: 84291), AAPASXX (SEQ ID NO: 84401):VPA:RPVQ-AA¹⁷-RKI (SEQ ID NO: 84879):DAANNVV (SEQ ID NO: 84963):KKATV (SEQ ID NO: 84212):VVE:AXGXR (SEQ ID NO: 84148), STPPTXX (SEQ ID NO: 84431):VPT:RPVQ-AA¹⁷-RKI (SEQ ID NO: 84879):DSANNVV (SEQ ID NO: 84971):KKATV (SEQ ID NO: 84212):VVE:SXGXR (SEQ ID NO: 84305), HVPKPXX (SEQ ID NO: 84421):APT:RPVQ-AA¹⁷-RKI (SEQ ID NO: 84879):DDSSNVI (SEQ ID NO: 84965):KKATV (SEQ ID NO: 84212):VVR:SXGXH (SEQ ID NO: 84304), RVPSTXX (SEQ ID NO: 84428):APV:RPVQ-AA¹⁷-RKI (SEQ ID NO: 84879):DNGRVLL (SEQ ID NO: 84970):KKATV (SEQ ID NO: 84212):VEE:XGXL (SEQ ID NO: 84122), ASAAPXX (SEQ ID NO: 84402):VPQ:RPVQ-AA¹⁷-RKI (SEQ ID NO: 84879):VGRKPKV (SEQ ID NO: 84981):KKATV (SEQ ID NO: 84212):VRS:XKXS (SEQ ID NO: 84124), ASASPXX (SEQ ID NO: 84403):VSQ:RPVQ-AA¹⁷-RKI (SEQ ID NO: 84879):IGKTPKI (SEQ ID NO: 84978):KKATV (SEQ ID NO: 84212):VKS:XKXS (SEQ ID NO: 84124), ASASPXX (SEQ ID NO: 84403):VPQ:RPVQ-AA¹⁷-RKI (SEQ ID NO: 84879):VGRTPKV (SEQ ID NO: 84982):KKATV (SEQ ID NO: 84212):VKS:XKXS (SEQ ID NO: 84124), NDEGLEX (SEQ ID NO: 84426):VPT:RPVQ-AA¹⁷-RKI (SEQ ID NO: 84879):RIKPHQGQH (SEQ ID NO: 84980):KKATV (SEQ ID NO: 84212):QHN:KXEXR (SEQ ID NO: 84213), NDEGLEX (SEQ ID NO: 84426):VPT:RPVQ-AA¹⁷-RKI (SEQ ID NO: 84879):RIKPHQGQH (SEQ ID NO: 84980):KKATV (SEQ ID NO: 84212):EHS:QXEXR (SEQ ID NO: 84276) and SSVKXQP (SEQ ID NO: 84430):SRV:RPVQ-AA¹⁷-RKI (SEQ ID NO: 84879):EYVRKKPKL (SEQ ID NO: 84974):KKATV (SEQ ID NO: 84212):EEH:LEXAXA (SEQ ID NO: 84400); and wherein AA¹⁷ is selected from the group consisting of G, A, V, L, I, P, F, M, W, T and S (in particular is selected from the group consisting of M, I, L, V and T). More particularly, the heptuplet PEP7:PEP3:PEP12:LINKER:PEP2:PEP4:PEP8 is selected from the group consisting of GIPEPXX (SEQ ID NO: 84419):VPT:SAIS-AA¹⁷-LYL (SEQ ID NO: 84881):DENKNVV (SEQ ID NO: 84967):LKNYQ (SEQ ID NO: 84230):VVE:SXAXR (SEQ ID NO: 84303), HVTKPTX (SEQ ID NO: 84422):VPT:SAIS-AA¹⁷-LYL (SEQ ID NO: 84881):DDSSNVI (SEQ ID NO: 84965):LKNYQ (SEQ ID NO: 84230):VVE:SXGXH (SEQ ID NO: 84304), YVPKPXX (SEQ ID NO: 84433):VPT:SAIS-AA¹⁷-LYL (SEQ ID NO: 84881):DDSSNVI (SEQ ID NO: 84965):LKNYQ (SEQ ID NO: 84230):VVE:SXGXH (SEQ ID NO: 84304), TVPKPXX (SEQ ID NO: 84432):VPT:SAIS-AA¹⁷-LYL (SEQ ID NO: 84881):DDSSNVI (SEQ ID NO: 84965):LKNYQ (SEQ ID NO: 84230):VVE:AXGXH (SEQ ID NO: 84147), AVPKAXX (SEQ ID NO: 84404):VPT:SAIS-AA¹⁷-LYL (SEQ ID NO: 84881):DSSNNVI (SEQ ID NO: 84972):LKNYQ (SEQ ID NO: 84230):VVE:AXGXH (SEQ ID NO: 84147), KVGKAXX (SEQ ID NO: 84425):VPT:SAIS-AA¹⁷-LYL (SEQ ID NO: 84881):DDMGVPT (SEQ ID NO: 84964):LKNYQ (SEQ ID NO: 84230):VVE:XGXR (SEQ ID NO: 84123), KASKAXX (SEQ ID NO: 84423):VPT:SAIS-AA¹⁷-LYL (SEQ ID NO: 84881):DKGVVTY (SEQ ID NO: 84969):LKNYQ (SEQ ID NO: 84230):VVE:EXGXR (SEQ ID NO: 84179), GSAGPXX (SEQ ID NO: 84420):VPT:SAIS-AA¹⁷-LYL (SEQ ID NO: 84881):NDKQQII (SEQ ID NO: 84979):LKNYQ (SEQ ID NO: 84230):VVE:RXGXS (SEQ ID NO: 84291), AAPASXX (SEQ ID NO: 84401):VPT:SAIS-AA¹⁷-LYL (SEQ ID NO: 84881):DAANNVV (SEQ ID NO: 84963):LKNYQ (SEQ ID NO: 84230):VVE:AXGXR (SEQ ID NO: 84148), STPPTXX (SEQ ID NO: 84431):VPT:SAIS-AA¹⁷-LYL (SEQ ID NO: 84881):DSANNVV (SEQ ID NO: 84971):LKNYQ (SEQ ID NO: 84230):VVE:SXGXR (SEQ ID NO: 84305), HVPKPXX (SEQ ID NO: 84421):VPT:SAIS-AA¹⁷-LYL (SEQ ID NO: 84881):DDSSNVI (SEQ ID NO: 84965):LKNYQ (SEQ ID NO: 84230):VVE:SXGXH (SEQ ID NO: 84304), RVPSTXX (SEQ ID NO: 84428):VPT:SAIS-AA¹⁷-LYL (SEQ ID NO: 84881):DNGRVLL (SEQ ID NO: 84970):LKNYQ (SEQ ID NO: 84230):VVE:XGXL (SEQ ID NO: 84122), ASAAPXX (SEQ ID NO: 84402):VPT:SAIS-AA¹⁷-LYL (SEQ ID NO: 84881):VGRKPKV (SEQ ID NO: 84981):LKNYQ (SEQ ID NO: 84230):VVE:XKXS (SEQ ID NO: 84124), ASASPXX (SEQ ID NO: 84403):VPT:SAIS-AA¹⁷-LYL (SEQ ID NO: 84881):IGKTPKI (SEQ ID NO: 84978):LKNYQ (SEQ ID NO: 84230):VVE:XKXS (SEQ ID NO: 84124), ASASPXX (SEQ ID NO: 84403):VPT:SAIS-AA¹⁷-LYL (SEQ ID NO: 84881):VGRTPKV (SEQ ID NO: 84982):LKNYQ (SEQ ID NO: 84230):VVE:XKXS (SEQ ID NO: 84124), GIPEPXX (SEQ ID NO: 84419):VPE:SAIS-AA¹⁷-LYL (SEQ ID NO: 84881):DENKNVV (SEQ ID NO: 84967):LKNYQ (SEQ ID NO: 84230):TVE:SXAXR (SEQ ID NO: 84303), HVTKPTX (SEQ ID NO: 84422):APT:SAIS-AA¹⁷-LYL (SEQ ID NO: 84881):DDSSNVI (SEQ ID NO: 84965):LKNYQ (SEQ ID NO: 84230):VVR:SXGXH (SEQ ID NO: 84304), YVPKPXX (SEQ ID NO: 84433):APT:SAIS-AA¹⁷-LYL (SEQ ID NO: 84881):DDSSNVI (SEQ ID NO: 84965):LKNYQ (SEQ ID NO: 84230):VVR:SXGXH (SEQ ID NO: 84304), TVPKPXX (SEQ ID NO: 84432):APT:SAIS-AA¹⁷-LYL (SEQ ID NO: 84881):DDSSNVI (SEQ ID NO: 84965):LKNYQ (SEQ ID NO: 84230):VVR:AXGXH (SEQ ID NO: 84147), AVPKAXX (SEQ ID NO: 84404):APT:SAIS-AA¹⁷-LYL (SEQ ID NO: 84881):DSSNNVI (SEQ ID NO: 84972):LKNYQ (SEQ ID NO: 84230):VVK:AXGXH (SEQ ID NO: 84147), KVGKAXX (SEQ ID NO: 84425):VPT:SAIS-AA¹⁷-LYL (SEQ ID NO: 84881):DDMGVPT (SEQ ID NO: 84964):LKNYQ (SEQ ID NO: 84230):VAE:XGXR (SEQ ID NO: 84123), KASKAXX (SEQ ID NO: 84423):VPT:SAIS-AA¹⁷-LYL (SEQ ID NO: 84881):DKGVVTY (SEQ ID NO: 84969):LKNYQ (SEQ ID NO: 84230):AVS:EXGXR (SEQ ID NO: 84179), GSAGPXX (SEQ ID NO: 84420):TPT:SAIS-AA¹⁷-LYL (SEQ ID NO: 84881):NDKQQII (SEQ ID NO: 84979):LKNYQ (SEQ ID NO: 84230):VVD:RXGXS (SEQ ID NO: 84291), AAPASXX (SEQ ID NO: 84401):VPA:SAIS-AA¹⁷-LYL (SEQ ID NO: 84881):DAANNVV (SEQ ID NO: 84963):LKNYQ (SEQ ID NO: 84230):VVE:AXGXR (SEQ ID NO: 84148), HVPKPXX (SEQ ID NO: 84421):APT:SAIS-AA¹⁷-LYL (SEQ ID NO: 84881):DDSSNVI (SEQ ID NO: 84965):LKNYQ (SEQ ID NO: 84230):VVR:SXGXH (SEQ ID NO: 84304), RVPSTXX (SEQ ID NO: 84428):APV:SAIS-AA¹⁷-LYL (SEQ ID NO: 84881):DNGRVLL (SEQ ID NO: 84970):LKNYQ (SEQ ID NO: 84230):VEE:XGXL (SEQ ID NO: 84122), ASAAPXX (SEQ ID NO: 84402):VPQ:SAIS-AA¹⁷-LYL (SEQ ID NO: 84881):VGRKPKV (SEQ ID NO: 84981):LKNYQ (SEQ ID NO: 84230):VRS:XKXS (SEQ ID NO: 84124), ASASPXX (SEQ ID NO: 84403):VSQ:SAIS-AA¹⁷-LYL (SEQ ID NO: 84881):IGKTPKI (SEQ ID NO: 84978):LKNYQ (SEQ ID NO: 84230):VKS:XKXS (SEQ ID NO: 84124), ASASPXX (SEQ ID NO: 84403):VPQ:SAIS-AA¹⁷-LYL (SEQ ID NO: 84881):VGRTPKV (SEQ ID NO: 84982):LKNYQ (SEQ ID NO: 84230):VKS:XKXS (SEQ ID NO: 84124), NDEGLEX (SEQ ID NO: 84426):VPT:SAIS-AA¹⁷-LYL (SEQ ID NO: 84881):RIKPHQGQH (SEQ ID NO: 84980):LKNYQ (SEQ ID NO: 84230):QHN:KXEXR (SEQ ID NO: 84213), NDEGLEX (SEQ ID NO: 84426):VPT:SAIS-AA¹⁷-LYL (SEQ ID NO: 84881):RIKPHQGQH (SEQ ID NO: 84980):LKNYQ (SEQ ID NO: 84230):EHS:QXEXR (SEQ ID NO: 84276), SSVKXQP (SEQ ID NO: 84430):SRV:SAIS-AA¹⁷-LYL (SEQ ID NO: 84881):EYVRKKPKL (SEQ ID NO: 84974):LKNYQ (SEQ ID NO: 84230):EEH:LEXAXA (SEQ ID NO: 84400), RNVQXRP (SEQ ID NO: 84427):TQV:SAIS-AA¹⁷-LYL (SEQ ID NO: 84881):EIVRKKPIF (SEQ ID NO: 84973):LKNYQ (SEQ ID NO: 84230):EDH:LAXKXE (SEQ ID NO: 84399), KIPKAXX (SEQ ID NO: 84424):VPE:SSLS-AA¹⁷-LFF (SEQ ID NO: 84889):DENEKVV (SEQ ID NO: 84966):LKVYP (SEQ ID NO: 84231):TVE:GXGXR (SEQ ID NO: 84208), SIPKAXX (SEQ ID NO: 84429):VPE:SSLS-AA¹⁷-LFF (SEQ ID NO: 84889):DEYDKVV (SEQ ID NO: 84968):LKVYP (SEQ ID NO: 84231):TVE:GXGXR (SEQ ID NO: 84208), HVTKPTX (SEQ ID NO: 84422):VPE:SSLS-AA¹⁷-LFF (SEQ ID NO: 84889):DDSSNVI (SEQ ID NO: 84965):LKVYP (SEQ ID NO: 84231):TVE:SXGXH (SEQ ID NO: 84304), YVPKPXX (SEQ ID NO: 84433):VPE:SSLS-AA¹⁷-LFF (SEQ ID NO: 84889):DDSSNVI (SEQ ID NO: 84965):LKVYP (SEQ ID NO: 84231):TVE:SXGXH (SEQ ID NO: 84304), TVPKPXX (SEQ ID NO: 84432):VPE:SSLS-AA¹⁷-LFF (SEQ ID NO: 84889):DDSSNVI (SEQ ID NO: 84965):LKVYP (SEQ ID NO: 84231):TVE:AXGXH (SEQ ID NO: 84147), AVPKAXX (SEQ ID NO: 84404):VPE:SSLS-AA¹⁷-LFF (SEQ ID NO: 84889):DSSNNVI (SEQ ID NO: 84972):LKVYP (SEQ ID NO: 84231):TVE:AXGXH (SEQ ID NO: 84147), KVGKAXX (SEQ ID NO: 84425):VPE:SSLS-AA¹⁷-LFF (SEQ ID NO: 84889):DDMGVPT (SEQ ID NO: 84964):LKVYP (SEQ ID NO: 84231):TVE:XGXR (SEQ ID NO: 84123), KASKAXX (SEQ ID NO: 84423):VPE:SSLS-AA¹⁷-LFF (SEQ ID NO: 84889):DKGVVTY (SEQ ID NO: 84969):LKVYP (SEQ ID NO: 84231):TVE:EXGXR (SEQ ID NO: 84179), GSAGPXX (SEQ ID NO: 84420):VPE:SSLS-AA¹⁷-LFF (SEQ ID NO: 84889):NDKQQII (SEQ ID NO: 84979):LKVYP (SEQ ID NO: 84231):TVE:RXGXS (SEQ ID NO: 84291), AAPASXX (SEQ ID NO: 84401):VPE:SSLS-AA¹⁷-LFF (SEQ ID NO: 84889):DAANNVV (SEQ ID NO: 84963):LKVYP (SEQ ID NO: 84231):TVE:AXGXR (SEQ ID NO: 84148), STPPTXX (SEQ ID NO: 84431):VPE:SSLS-AA¹⁷-LFF (SEQ ID NO: 84889):DSANNVV (SEQ ID NO: 84971):LKVYP (SEQ ID NO: 84231):TVE:SXGXR (SEQ ID NO: 84305), HVPKPXX (SEQ ID NO: 84421):VPE:SSLS-AA¹⁷-LFF (SEQ ID NO: 84889):DDSSNVI (SEQ ID NO: 84965):LKVYP (SEQ ID NO: 84231):TVE:SXGXH (SEQ ID NO: 84304), RVPSTXX (SEQ ID NO: 84428):VPE:SSLS-AA¹⁷-LFF (SEQ ID NO: 84889):DNGRVLL (SEQ ID NO: 84970):LKVYP (SEQ ID NO: 84231):TVE:XGXL (SEQ ID NO: 84122), ASAAPXX (SEQ ID NO: 84402):VPE:SSLS-AA¹⁷-LFF (SEQ ID NO: 84889):VGRKPKV (SEQ ID NO: 84981):LKVYP (SEQ ID NO: 84231):TVE:XKXS (SEQ ID NO: 84124), ASASPXX (SEQ ID NO: 84403):VPE:SSLS-AA¹⁷-LFF (SEQ ID NO: 84889):IGKTPKI (SEQ ID NO: 84978):LKVYP (SEQ ID NO: 84231):TVE:XKXS (SEQ ID NO: 84124), ASASPXX (SEQ ID NO: 84403):VPE:SSLS-AA¹⁷-LFF (SEQ ID NO: 84889):VGRTPKV (SEQ ID NO: 84982):LKVYP (SEQ ID NO: 84231):TVE:XKXS (SEQ ID NO: 84124), KIPKAXX (SEQ ID NO: 84424):VPT:SSLS-AA¹⁷-LFF (SEQ ID NO: 84889):DENEKVV (SEQ ID NO: 84966):LKVYP (SEQ ID NO: 84231):VVE:GXGXR (SEQ ID NO: 84208), SIPKAXX (SEQ ID NO: 84429):VPT:SSLS-AA¹⁷-LFF (SEQ ID NO: 84889):DEYDKVV (SEQ ID NO: 84968):LKVYP (SEQ ID NO: 84231):VVE:GXGXR (SEQ ID NO: 84208), HVTKPTX (SEQ ID NO: 84422):APT:SSLS-AA¹⁷-LFF (SEQ ID NO: 84889):DDSSNVI (SEQ ID NO: 84965):LKVYP (SEQ ID NO: 84231):VVR:SXGXH (SEQ ID NO: 84304), YVPKPXX (SEQ ID NO: 84433):APT:SSLS-AA¹⁷-LFF (SEQ ID NO: 84889):DDSSNVI (SEQ ID NO: 84965):LKVYP (SEQ ID NO: 84231):VVR:SXGXH (SEQ ID NO: 84304), TVPKPXX (SEQ ID NO: 84432):APT:SSLS-AA¹⁷-LFF (SEQ ID NO: 84889):DDSSNVI (SEQ ID NO: 84965):LKVYP (SEQ ID NO: 84231):VVR:AXGXH (SEQ ID NO: 84147), AVPKAXX (SEQ ID NO: 84404):APT:SSLS-AA¹⁷-LFF (SEQ ID NO: 84889):DSSNNVI (SEQ ID NO: 84972):LKVYP (SEQ ID NO: 84231):VVK:AXGXH (SEQ ID NO: 84147), KVGKAXX (SEQ ID NO: 84425):VPT:SSLS-AA¹⁷-LFF (SEQ ID NO: 84889):DDMGVPT (SEQ ID NO: 84964):LKVYP (SEQ ID NO: 84231):VAE:XGXR (SEQ ID NO: 84123), KASKAXX (SEQ ID NO: 84423):VPT:SSLS-AA¹⁷-LFF (SEQ ID NO: 84889):DKGVVTY (SEQ ID NO: 84969):LKVYP (SEQ ID NO: 84231):AVS:EXGXR (SEQ ID NO: 84179), GSAGPXX (SEQ ID NO: 84420):TPT:SSLS-AA¹⁷-LFF (SEQ ID NO: 84889):NDKQQII (SEQ ID NO: 84979):LKVYP (SEQ ID NO: 84231):VVD:RXGXS (SEQ ID NO: 84291), AAPASXX (SEQ ID NO: 84401):VPA:SSLS-AA¹⁷-LFF (SEQ ID NO: 84889):DAANNVV (SEQ ID NO: 84963):LKVYP (SEQ ID NO: 84231):VVE:AXGXR (SEQ ID NO: 84148), STPPTXX (SEQ ID NO: 84431):VPT:SSLS-AA¹⁷-LFF (SEQ ID NO: 84889):DSANNVV (SEQ ID NO: 84971):LKVYP (SEQ ID NO: 84231):VVE:SXGXR (SEQ ID NO: 84305), HVPKPXX (SEQ ID NO: 84421):APT:SSLS-AA¹⁷-LFF (SEQ ID NO: 84889):DDSSNVI (SEQ ID NO: 84965):LKVYP (SEQ ID NO: 84231):VVR:SXGXH (SEQ ID NO: 84304), RVPSTXX (SEQ ID NO: 84428):APV:SSLS-AA¹⁷-LFF (SEQ ID NO: 84889):DNGRVLL (SEQ ID NO: 84970):LKVYP (SEQ ID NO: 84231):VEE:XGXL (SEQ ID NO: 84122), ASAAPXX (SEQ ID NO: 84402):VPQ:SSLS-AA¹⁷-LFF (SEQ ID NO: 84889):VGRKPKV (SEQ ID NO: 84981):LKVYP (SEQ ID NO: 84231):VRS:XKXS (SEQ ID NO: 84124), ASASPXX (SEQ ID NO: 84403):VSQ:SSLS-AA¹⁷-LFF (SEQ ID NO: 84889):IGKTPKI (SEQ ID NO: 84978):LKVYP (SEQ ID NO: 84231):VKS:XKXS (SEQ ID NO: 84124), ASASPXX (SEQ ID NO: 84403):VPQ:SSLS-AA¹⁷-LFF (SEQ ID NO: 84889):VGRTPKV (SEQ ID NO: 84982):LKVYP (SEQ ID NO: 84231):VKS:XKXS (SEQ ID NO: 84124), NDEGLEX (SEQ ID NO: 84426):VPT:SSLS-AA¹⁷-LFF (SEQ ID NO: 84889):RIKPHQGQH (SEQ ID NO: 84980):LKVYP (SEQ ID NO: 84231):QHN:KXEXR (SEQ ID NO: 84213), NDEGLEX (SEQ ID NO: 84426):VPT:SSLS-AA¹⁷-LFF (SEQ ID NO: 84889):RIKPHQGQH (SEQ ID NO: 84980):LKVYP (SEQ ID NO: 84231):EHS:QXEXR (SEQ ID NO: 84276), SSVKXQP (SEQ ID NO: 84430):SRV:SSLS-AA¹⁷-LFF (SEQ ID NO: 84889):EYVRKKPKL (SEQ ID NO: 84974):LKVYP (SEQ ID NO: 84231):EEH:LEXAXA (SEQ ID NO: 84400), RNVQXRP (SEQ ID NO: 84427):TQV:SSLS-AA¹⁷-LFF (SEQ ID NO: 84889):EIVRKKPIF (SEQ ID NO: 84973):LKVYP (SEQ ID NO: 84231):EDH:LAXKXE (SEQ ID NO: 84399), KIPKAXX (SEQ ID NO: 84424):APT:NAIS-AA¹⁷-LYF (SEQ ID NO: 84878):DENEKVV (SEQ ID NO: 84966):LKKYR (SEQ ID NO: 84229):VVR:GXGXR (SEQ ID NO: 84208), GIPEPXX (SEQ ID NO: 84419):APT:NAIS-AA¹⁷-LYF (SEQ ID NO: 84878):DENKNVV (SEQ ID NO: 84967):LKKYR (SEQ ID NO: 84229):VVR:SXAXR (SEQ ID NO: 84303), SIPKAXX (SEQ ID NO: 84429):APT:NAIS-AA¹⁷-LYF (SEQ ID NO: 84878):DEYDKVV (SEQ ID NO: 84968):LKKYR (SEQ ID NO: 84229):VVR:GXGXR (SEQ ID NO: 84208), AVPKAXX (SEQ ID NO: 84404):APT:NAIS-AA¹⁷-LYF (SEQ ID NO: 84878):DSSNNVI (SEQ ID NO: 84972):LKKYR (SEQ ID NO: 84229):VVR:AXGXH (SEQ ID NO: 84147), KVGKAXX (SEQ ID NO: 84425):APT:NAIS-AA¹⁷-LYF (SEQ ID NO: 84878):DDMGVPT (SEQ ID NO: 84964):LKKYR (SEQ ID NO: 84229):VVR:XGXR (SEQ ID NO: 84123), KASKAXX (SEQ ID NO: 84423):APT:NAIS-AA¹⁷-LYF (SEQ ID NO: 84878):DKGVVTY (SEQ ID NO: 84969):LKKYR (SEQ ID NO: 84229):VVR:EXGXR (SEQ ID NO: 84179), GSAGPXX (SEQ ID NO: 84420):APT:NAIS-AA¹⁷-LYF (SEQ ID NO: 84878):NDKQQII (SEQ ID NO: 84979):LKKYR (SEQ ID NO: 84229):VVR:RXGXS (SEQ ID NO: 84291), AAPASXX (SEQ ID NO: 84401):APT:NAIS-AA¹⁷-LYF (SEQ ID NO: 84878):DAANNVV (SEQ ID NO: 84963):LKKYR (SEQ ID NO: 84229):VVR:AXGXR (SEQ ID NO: 84148), STPPTXX (SEQ ID NO: 84431):APT:NAIS-AA¹⁷-LYF (SEQ ID NO: 84878):DSANNVV (SEQ ID NO: 84971):LKKYR (SEQ ID NO: 84229):VVR:SXGXR (SEQ ID NO: 84305), RVPSTXX (SEQ ID NO: 84428):APT:NAIS-AA¹⁷-LYF (SEQ ID NO: 84878):DNGRVLL (SEQ ID NO: 84970):LKKYR (SEQ ID NO: 84229):VVR:XGXL (SEQ ID NO: 84122), ASAAPXX (SEQ ID NO: 84402):APT:NAIS-AA¹⁷-LYF (SEQ ID NO: 84878):VGRKPKV (SEQ ID NO: 84981):LKKYR (SEQ ID NO: 84229):VVR:XKXS (SEQ ID NO: 84124), ASASPXX (SEQ ID NO: 84403):APT:NAIS-AA¹⁷-LYF (SEQ ID NO: 84878):IGKTPKI (SEQ ID NO: 84978):LKKYR (SEQ ID NO: 84229):VVR:XKXS (SEQ ID NO: 84124), ASASPXX (SEQ ID NO: 84403):APT:NAIS-AA¹⁷-LYF (SEQ ID NO: 84878):VGRTPKV (SEQ ID NO: 84982):LKKYR (SEQ ID NO: 84229):VVR:XKXS (SEQ ID NO: 84124), KIPKAXX (SEQ ID NO: 84424):VPT:NAIS-AA¹⁷-LYF (SEQ ID NO: 84878):DENEKVV (SEQ ID NO: 84966):LKKYR (SEQ ID NO: 84229):VVE:GXGXR (SEQ ID NO: 84208), GIPEPXX (SEQ ID NO: 84419):VPE:NAIS-AA¹⁷-LYF (SEQ ID NO: 84878):DENKNVV (SEQ ID NO: 84967):LKKYR (SEQ ID NO: 84229):TVE:SXAXR (SEQ ID NO: 84303), SIPKAXX (SEQ ID NO: 84429):VPT:NAIS-AA¹⁷-LYF (SEQ ID NO: 84878):DEYDKVV (SEQ ID NO: 84968):LKKYR (SEQ ID NO: 84229):VVE:GXGXR (SEQ ID NO: 84208), AVPKAXX (SEQ ID NO: 84404):APT:NAIS-AA¹⁷-LYF (SEQ ID NO: 84878):DSSNNVI (SEQ ID NO: 84972):LKKYR (SEQ ID NO: 84229):VVK:AXGXH (SEQ ID NO: 84147), KVGKAXX (SEQ ID NO: 84425):VPT:NAIS-AA¹⁷-LYF (SEQ ID NO: 84878):DDMGVPT (SEQ ID NO: 84964):LKKYR (SEQ ID NO: 84229):VAE:XGXR (SEQ ID NO: 84123), KASKAXX (SEQ ID NO: 84423):VPT:NAIS-AA¹⁷-LYF (SEQ ID NO: 84878):DKGVVTY (SEQ ID NO: 84969):LKKYR (SEQ ID NO: 84229):AVS:EXGXR (SEQ ID NO: 84179), GSAGPXX (SEQ ID NO: 84420):TPT:NAIS-AA¹⁷-LYF (SEQ ID NO: 84878):NDKQQII (SEQ ID NO: 84979):LKKYR (SEQ ID NO: 84229):VVD:RXGXS (SEQ ID NO: 84291), AAPASXX (SEQ ID NO: 84401):VPA:NAIS-AA¹⁷-LYF (SEQ ID NO: 84878):DAANNVV (SEQ ID NO: 84963):LKKYR (SEQ ID NO: 84229):VVE:AXGXR (SEQ ID NO: 84148), STPPTXX (SEQ ID NO: 84431):VPT:NAIS-AA¹⁷-LYF (SEQ ID NO: 84878):DSANNVV (SEQ ID NO: 84971):LKKYR (SEQ ID NO: 84229):VVE:SXGXR (SEQ ID NO: 84305), RVPSTXX (SEQ ID NO: 84428):APV:NAIS-AA¹⁷-LYF (SEQ ID NO: 84878):DNGRVLL (SEQ ID NO: 84970):LKKYR (SEQ ID NO: 84229):VEE:XGXL (SEQ ID NO: 84122), ASAAPXX (SEQ ID NO: 84402):VPQ:NAIS-AA¹⁷-LYF (SEQ ID NO: 84878):VGRKPKV (SEQ ID NO: 84981):LKKYR (SEQ ID NO: 84229):VRS:XKXS (SEQ ID NO: 84124), ASASPXX (SEQ ID NO: 84403):VSQ:NAIS-AA¹⁷-LYF (SEQ ID NO: 84878):IGKTPKI (SEQ ID NO: 84978):LKKYR (SEQ ID NO: 84229):VKS:XKXS (SEQ ID NO: 84124), ASASPXX (SEQ ID NO: 84403):VPQ:NAIS-AA¹⁷-LYF (SEQ ID NO: 84878):VGRTPKV (SEQ ID NO: 84982):LKKYR (SEQ ID NO: 84229):VKS:XKXS (SEQ ID NO: 84124), NDEGLEX (SEQ ID NO: 84426):VPT:NAIS-AA¹⁷-LYF (SEQ ID NO: 84878):RIKPHQGQH (SEQ ID NO: 84980):LKKYR (SEQ ID NO: 84229):QHN:KXEXR (SEQ ID NO: 84213), NDEGLEX (SEQ ID NO: 84426):VPT:NAIS-AA¹⁷-LYF (SEQ ID NO: 84878):RIKPHQGQH (SEQ ID NO: 84980):LKKYR (SEQ ID NO: 84229):EHS:QXEXR (SEQ ID NO: 84276), SSVKXQP (SEQ ID NO: 84430):SRV:NAIS-AA¹⁷-LYF (SEQ ID NO: 84878):EYVRKKPKL (SEQ ID NO: 84974):LKKYR (SEQ ID NO: 84229):EEH:LEXAXA (SEQ ID NO: 84400), RNVQXRP (SEQ ID NO: 84427):TQV:NAIS-AA¹⁷-LYF (SEQ ID NO: 84878):EIVRKKPIF (SEQ ID NO: 84973):LKKYR (SEQ ID NO: 84229):EDH:LAXKXE (SEQ ID NO: 84399), KIPKAXX (SEQ ID NO: 84424):APT:SATS-AA¹⁷-LYY (SEQ ID NO: 84882):DENEKVV (SEQ ID NO: 84966):LRKHR (SEQ ID NO: 84233):VVK:GXGXR (SEQ ID NO: 84208), GIPEPXX (SEQ ID NO: 84419):APT:SATS-AA¹⁷-LYY (SEQ ID NO: 84882):DENKNVV (SEQ ID NO: 84967):LRKHR (SEQ ID NO: 84233):VVK:SXAXR (SEQ ID NO: 84303), SIPKAXX (SEQ ID NO: 84429):APT:SATS-AA¹⁷-LYY (SEQ ID NO: 84882):DEYDKVV (SEQ ID NO: 84968):LRKHR (SEQ ID NO: 84233):VVK:GXGXR (SEQ ID NO: 84208), HVTKPTX (SEQ ID NO: 84422):APT:SATS-AA¹⁷-LYY (SEQ ID NO: 84882):DDSSNVI (SEQ ID NO: 84965):LRKHR (SEQ ID NO: 84233):VVK:SXGXH (SEQ ID NO: 84304), YVPKPXX (SEQ ID NO: 84433):APT:SATS-AA¹⁷-LYY (SEQ ID NO: 84882):DDSSNVI (SEQ ID NO: 84965):LRKHR (SEQ ID NO: 84233):VVK:SXGXH (SEQ ID NO: 84304), TVPKPXX (SEQ ID NO: 84432):APT:SATS-AA¹⁷-LYY (SEQ ID NO: 84882):DDSSNVI (SEQ ID NO: 84965):LRKHR (SEQ ID NO: 84233):VVK:AXGXH (SEQ ID NO: 84147), KVGKAXX (SEQ ID NO: 84425):APT:SATS-AA¹⁷-LYY (SEQ ID NO: 84882):DDMGVPT (SEQ ID NO: 84964):LRKHR (SEQ ID NO: 84233):VVK:XGXR (SEQ ID NO: 84123), KASKAXX (SEQ ID NO: 84423):APT:SATS-AA¹⁷-LYY (SEQ ID NO: 84882):DKGVVTY (SEQ ID NO: 84969):LRKHR (SEQ ID NO: 84233):VVK:EXGXR (SEQ ID NO: 84179), GSAGPXX (SEQ ID NO: 84420):APT:SATS-AA¹⁷-LYY (SEQ ID NO: 84882):NDKQQII (SEQ ID NO: 84979):LRKHR (SEQ ID NO: 84233):VVK:RXGXS (SEQ ID NO: 84291), AAPASXX (SEQ ID NO: 84401):APT:SATS-AA¹⁷-LYY (SEQ ID NO: 84882):DAANNVV (SEQ ID NO: 84963):LRKHR (SEQ ID NO: 84233):VVK:AXGXR (SEQ ID NO: 84148), STPPTXX (SEQ ID NO: 84431):APT:SATS-AA¹⁷-LYY (SEQ ID NO: 84882):DSANNVV (SEQ ID NO: 84971):LRKHR (SEQ ID NO: 84233):VVK:SXGXR (SEQ ID NO: 84305), HVPKPXX (SEQ ID NO: 84421):APT:SATS-AA¹⁷-LYY (SEQ ID NO: 84882):DDSSNVI (SEQ ID NO: 84965):LRKHR (SEQ ID NO: 84233):VVK:SXGXH (SEQ ID NO: 84304), RVPSTXX (SEQ ID NO: 84428):APT:SATS-AA¹⁷-LYY (SEQ ID NO: 84882):DNGRVLL (SEQ ID NO: 84970):LRKHR (SEQ ID NO: 84233):VVK:XGXL (SEQ ID NO: 84122), ASAAPXX (SEQ ID NO: 84402):APT:SATS-AA¹⁷-LYY (SEQ ID NO: 84882):VGRKPKV (SEQ ID NO: 84981):LRKHR (SEQ ID NO: 84233):VVK:XKXS (SEQ ID NO: 84124), ASASPXX (SEQ ID NO: 84403):APT:SATS-AA¹⁷-LYY (SEQ ID NO: 84882):IGKTPKI (SEQ ID NO: 84978):LRKHR (SEQ ID NO: 84233):VVK:XKXS (SEQ ID NO: 84124), ASASPXX (SEQ ID NO: 84403):APT:SATS-AA¹⁷-LYY (SEQ ID NO: 84882):VGRTPKV (SEQ ID NO: 84982):LRKHR (SEQ ID NO: 84233):VVK:XKXS (SEQ ID NO: 84124), KIPKAXX (SEQ ID NO: 84424):VPT:SATS-AA¹⁷-LYY (SEQ ID NO: 84882):DENEKVV (SEQ ID NO: 84966):LRKHR (SEQ ID NO: 84233):VVE:GXGXR (SEQ ID NO: 84208), GIPEPXX (SEQ ID NO: 84419):VPE:SATS-AA¹⁷-LYY (SEQ ID NO: 84882):DENKNVV (SEQ ID NO: 84967):LRKHR (SEQ ID NO: 84233):TVE:SXAXR (SEQ ID NO: 84303), SIPKAXX (SEQ ID NO: 84429):VPT:SATS-AA¹⁷-LYY (SEQ ID NO: 84882):DEYDKVV (SEQ ID NO: 84968):LRKHR (SEQ ID NO: 84233):VVE:GXGXR (SEQ ID NO: 84208), HVTKPTX (SEQ ID NO: 84422):APT:SATS-AA¹⁷-LYY (SEQ ID NO: 84882):DDSSNVI (SEQ ID NO: 84965):LRKHR (SEQ ID NO: 84233):VVR:SXGXH (SEQ ID NO: 84304), YVPKPXX (SEQ ID NO: 84433):APT:SATS-AA¹⁷-LYY (SEQ ID NO: 84882):DDSSNVI (SEQ ID NO: 84965):LRKHR (SEQ ID NO: 84233):VVR:SXGXH (SEQ ID NO: 84304), TVPKPXX (SEQ ID NO: 84432):APT:SATS-AA¹⁷-LYY (SEQ ID NO: 84882):DDSSNVI (SEQ ID NO: 84965):LRKHR (SEQ ID NO: 84233):VVR:AXGXH (SEQ ID NO: 84147), KVGKAXX (SEQ ID NO: 84425):VPT:SATS-AA¹⁷-LYY (SEQ ID NO: 84882):DDMGVPT (SEQ ID NO: 84964):LRKHR (SEQ ID NO: 84233):VAE:XGXR (SEQ ID NO: 84123), KASKAXX (SEQ ID NO: 84423):VPT:SATS-AA¹⁷-LYY (SEQ ID NO: 84882):DKGVVTY (SEQ ID NO: 84969):LRKHR (SEQ ID NO: 84233):AVS:EXGXR (SEQ ID NO: 84179), GSAGPXX (SEQ ID NO: 84420):TPT:SATS-AA¹⁷-LYY (SEQ ID NO: 84882):NDKQQII (SEQ ID NO: 84979):LRKHR (SEQ ID NO: 84233):VVD:RXGXS (SEQ ID NO: 84291), AAPASXX (SEQ ID NO: 84401):VPA:SATS-AA¹⁷-LYY (SEQ ID NO: 84882):DAANNVV (SEQ ID NO: 84963):LRKHR (SEQ ID NO: 84233):VVE:AXGXR (SEQ ID NO: 84148), STPPTXX (SEQ ID NO: 84431):VPT:SATS-AA¹⁷-LYY (SEQ ID NO: 84882):DSANNVV (SEQ ID NO: 84971):LRKHR (SEQ ID NO: 84233):VVE:SXGXR (SEQ ID NO: 84305), HVPKPXX (SEQ ID NO: 84421):APT:SATS-AA¹⁷-LYY (SEQ ID NO: 84882):DDSSNVI (SEQ ID NO: 84965):LRKHR (SEQ ID NO: 84233):VVR:SXGXH (SEQ ID NO: 84304), RVPSTXX (SEQ ID NO: 84428):APV:SATS-AA¹⁷-LYY (SEQ ID NO: 84882):DNGRVLL (SEQ ID NO: 84970):LRKHR (SEQ ID NO: 84233):VEE:XGXL (SEQ ID NO: 84122), ASAAPXX (SEQ ID NO: 84402):VPQ:SATS-AA¹⁷-LYY (SEQ ID NO: 84882):VGRKPKV (SEQ ID NO: 84981):LRKHR (SEQ ID NO: 84233):VRS:XKXS (SEQ ID NO: 84124), ASASPXX (SEQ ID NO: 84403):VSQ:SATS-AA¹⁷-LYY (SEQ ID NO: 84882):IGKTPKI (SEQ ID NO: 84978):LRKHR (SEQ ID NO: 84233):VKS:XKXS (SEQ ID NO: 84124), ASASPXX (SEQ ID NO: 84403):VPQ:SATS-AA¹⁷-LYY (SEQ ID NO: 84882):VGRTPKV (SEQ ID NO: 84982):LRKHR (SEQ ID NO: 84233):VKS:XKXS (SEQ ID NO: 84124), NDEGLEX (SEQ ID NO: 84426):VPT:SATS-AA¹⁷-LYY (SEQ ID NO: 84882):RIKPHQGQH (SEQ ID NO: 84980):LRKHR (SEQ ID NO: 84233):QHN:KXEXR (SEQ ID NO: 84213), NDEGLEX (SEQ ID NO: 84426):VPT:SATS-AA¹⁷-LYY (SEQ ID NO: 84882):RIKPHQGQH (SEQ ID NO: 84980):LRKHR (SEQ ID NO: 84233):EHS:QXEXR (SEQ ID NO: 84276), SSVKXQP (SEQ ID NO: 84430):SRV:SATS-AA¹⁷-LYY (SEQ ID NO: 84882):EYVRKKPKL (SEQ ID NO: 84974):LRKHR (SEQ ID NO: 84233):EEH:LEXAXA (SEQ ID NO: 84400), RNVQXRP (SEQ ID NO: 84427):TQV:SATS-AA¹⁷-LYY (SEQ ID NO: 84882):EIVRKKPIF (SEQ ID NO: 84973):LRKHR (SEQ ID NO: 84233):EDH:LAXKXE (SEQ ID NO: 84399), KIPKAXX (SEQ ID NO: 84424):VPT:SPIS-AA¹⁷-LYK (SEQ ID NO: 84887):DENEKVV (SEQ ID NO: 84966):LKYHY (SEQ ID NO: 84232):VAE:GXGXR (SEQ ID NO: 84208), GIPEPXX (SEQ ID NO: 84419):VPT:SPIS-AA¹⁷-LYK (SEQ ID NO: 84887):DENKNVV (SEQ ID NO: 84967):LKYHY (SEQ ID NO: 84232):VAE:SXAXR (SEQ ID NO: 84303), SIPKAXX (SEQ ID NO: 84429):VPT:SPIS-AA¹⁷-LYK (SEQ ID NO: 84887):DEYDKVV (SEQ ID NO: 84968):LKYHY (SEQ ID NO: 84232):VAE:GXGXR (SEQ ID NO: 84208), HVTKPTX (SEQ ID NO: 84422):VPT:SPIS-AA¹⁷-LYK (SEQ ID NO: 84887):DDSSNVI (SEQ ID NO: 84965):LKYHY (SEQ ID NO: 84232):VAE:SXGXH (SEQ ID NO: 84304), YVPKPXX (SEQ ID NO: 84433):VPT:SPIS-AA¹⁷-LYK (SEQ ID NO: 84887):DDSSNVI (SEQ ID NO: 84965):LKYHY (SEQ ID NO: 84232):VAE:SXGXH (SEQ ID NO: 84304), TVPKPXX (SEQ ID NO: 84432):VPT:SPIS-AA¹⁷-LYK (SEQ ID NO: 84887):DDSSNVI (SEQ ID NO: 84965):LKYHY (SEQ ID NO: 84232):VAE:AXGXH (SEQ ID NO: 84147), AVPKAXX (SEQ ID NO: 84404):VPT:SPIS-AA¹⁷-LYK (SEQ ID NO: 84887):DSSNNVI (SEQ ID NO: 84972):LKYHY (SEQ ID NO: 84232):VAE:AXGXH (SEQ ID NO: 84147), KASKAXX (SEQ ID NO: 84423):VPT:SPIS-AA¹⁷-LYK (SEQ ID NO: 84887):DKGVVTY (SEQ ID NO: 84969):LKYHY (SEQ ID NO: 84232):VAE:EXGXR (SEQ ID NO: 84179), GSAGPXX (SEQ ID NO: 84420):VPT:SPIS-AA¹⁷-LYK (SEQ ID NO: 84887):NDKQQII (SEQ ID NO: 84979):LKYHY (SEQ ID NO: 84232):VAE:RXGXS (SEQ ID NO: 84291), AAPASXX (SEQ ID NO: 84401):VPT:SPIS-AA¹⁷-LYK (SEQ ID NO: 84887):DAANNVV (SEQ ID NO: 84963):LKYHY (SEQ ID NO: 84232):VAE:AXGXR (SEQ ID NO: 84148), STPPTXX (SEQ ID NO: 84431):VPT:SPIS-AA¹⁷-LYK (SEQ ID NO: 84887):DSANNVV (SEQ ID NO: 84971):LKYHY (SEQ ID NO: 84232):VAE:SXGXR (SEQ ID NO: 84305), HVPKPXX (SEQ ID NO: 84421):VPT:SPIS-AA¹⁷-LYK (SEQ ID NO: 84887):DDSSNVI (SEQ ID NO: 84965):LKYHY (SEQ ID NO: 84232):VAE:SXGXH (SEQ ID NO: 84304), RVPSTXX (SEQ ID NO: 84428):VPT:SPIS-AA¹⁷-LYK (SEQ ID NO: 84887):DNGRVLL (SEQ ID NO: 84970):LKYHY (SEQ ID NO: 84232):VAE:XGXL (SEQ ID NO: 84122), ASAAPXX (SEQ ID NO: 84402):VPT:SPIS-AA¹⁷-LYK (SEQ ID NO: 84887):VGRKPKV (SEQ ID NO: 84981):LKYHY (SEQ ID NO: 84232):VAE:XKXS (SEQ ID NO: 84124), ASASPXX (SEQ ID NO: 84403):VPT:SPIS-AA¹⁷-LYK (SEQ ID NO: 84887):IGKTPKI (SEQ ID NO: 84978):LKYHY (SEQ ID NO: 84232):VAE:XKXS (SEQ ID NO: 84124), ASASPXX (SEQ ID NO: 84403):VPT:SPIS-AA¹⁷-LYK (SEQ ID NO: 84887):VGRTPKV (SEQ ID NO: 84982):LKYHY (SEQ ID NO: 84232):VAE:XKXS (SEQ ID NO: 84124), KIPKAXX (SEQ ID NO: 84424):VPT:SPIS-AA¹⁷-LYK (SEQ ID NO: 84887):DENEKVV (SEQ ID NO: 84966):LKYHY (SEQ ID NO: 84232):VVE:GXGXR (SEQ ID NO: 84208), GIPEPXX (SEQ ID NO: 84419):VPE:SPIS-AA¹⁷-LYK (SEQ ID NO: 84887):DENKNVV (SEQ ID NO: 84967):LKYHY (SEQ ID NO: 84232):TVE:SXAXR (SEQ ID NO: 84303), SIPKAXX (SEQ ID NO: 84429):VPT:SPIS-AA¹⁷-LYK (SEQ ID NO: 84887):DEYDKVV (SEQ ID NO: 84968):LKYHY (SEQ ID NO: 84232):VVE:GXGXR (SEQ ID NO: 84208), HVTKPTX (SEQ ID NO: 84422):APT:SPIS-AA¹⁷-LYK (SEQ ID NO: 84887):DDSSNVI (SEQ ID NO: 84965):LKYHY (SEQ ID NO: 84232):VVR:SXGXH (SEQ ID NO: 84304), YVPKPXX (SEQ ID NO: 84433):APT:SPIS-AA¹⁷-LYK (SEQ ID NO: 84887):DDSSNVI (SEQ ID NO: 84965):LKYHY (SEQ ID NO: 84232):VVR:SXGXH (SEQ ID NO: 84304), TVPKPXX (SEQ ID NO: 84432):APT:SPIS-AA¹⁷-LYK (SEQ ID NO: 84887):DDSSNVI (SEQ ID NO: 84965):LKYHY (SEQ ID NO: 84232):VVR:AXGXH (SEQ ID NO: 84147), AVPKAXX (SEQ ID NO: 84404):APT:SPIS-AA¹⁷-LYK (SEQ ID NO: 84887):DSSNNVI (SEQ ID NO: 84972):LKYHY (SEQ ID NO: 84232):VVK:AXGXH (SEQ ID NO: 84147), KASKAXX (SEQ ID NO: 84423):VPT:SPIS-AA¹⁷-LYK (SEQ ID NO: 84887):DKGVVTY (SEQ ID NO: 84969):LKYHY (SEQ ID NO: 84232):AVS:EXGXR (SEQ ID NO: 84179), GSAGPXX (SEQ ID NO: 84420):TPT:SPIS-AA¹⁷-LYK (SEQ ID NO: 84887):NDKQQII (SEQ ID NO: 84979):LKYHY (SEQ ID NO: 84232):VVD:RXGXS (SEQ ID NO: 84291), AAPASXX (SEQ ID NO: 84401):VPA:SPIS-AA¹⁷-LYK (SEQ ID NO: 84887):DAANNVV (SEQ ID NO: 84963):LKYHY (SEQ ID NO: 84232):VVE:AXGXR (SEQ ID NO: 84148), STPPTXX (SEQ ID NO: 84431):VPT:SPIS-AA¹⁷-LYK (SEQ ID NO: 84887):DSANNVV (SEQ ID NO: 84971):LKYHY (SEQ ID NO: 84232):VVE:SXGXR (SEQ ID NO: 84305), HVPKPXX (SEQ ID NO: 84421):APT:SPIS-AA¹⁷-LYK (SEQ ID NO: 84887):DDSSNVI (SEQ ID NO: 84965):LKYHY (SEQ ID NO: 84232):VVR:SXGXH (SEQ ID NO: 84304), RVPSTXX (SEQ ID NO: 84428):APV:SPIS-AA¹⁷-LYK (SEQ ID NO: 84887):DNGRVLL (SEQ ID NO: 84970):LKYHY (SEQ ID NO: 84232):VEE:XGXL (SEQ ID NO: 84122), ASAAPXX (SEQ ID NO: 84402):VPQ:SPIS-AA¹⁷-LYK (SEQ ID NO: 84887):VGRKPKV (SEQ ID NO: 84981):LKYHY (SEQ ID NO: 84232):VRS:XKXS (SEQ ID NO: 84124), ASASPXX (SEQ ID NO: 84403):VSQ:SPIS-AA¹⁷-LYK (SEQ ID NO: 84887):IGKTPKI (SEQ ID NO: 84978):LKYHY (SEQ ID NO: 84232):VKS:XKXS (SEQ ID NO: 84124), ASASPXX (SEQ ID NO: 84403):VPQ:SPIS-AA¹⁷-LYK (SEQ ID NO: 84887):VGRTPKV (SEQ ID NO: 84982):LKYHY (SEQ ID NO: 84232):VKS:XKXS (SEQ ID NO: 84124), NDEGLEX (SEQ ID NO: 84426):VPT:SPIS-AA¹⁷-LYK (SEQ ID NO: 84887):RIKPHQGQH (SEQ ID NO: 84980):LKYHY (SEQ ID NO: 84232):QHN:KXEXR (SEQ ID NO: 84213), NDEGLEX (SEQ ID NO: 84426):VPT:SPIS-AA¹⁷-LYK (SEQ ID NO: 84887):RIKPHQGQH (SEQ ID NO: 84980):LKYHY (SEQ ID NO: 84232):EHS:QXEXR (SEQ ID NO: 84276), SSVKXQP (SEQ ID NO: 84430):SRV:SPIS-AA¹⁷-LYK (SEQ ID NO: 84887):EYVRKKPKL (SEQ ID NO: 84974):LKYHY (SEQ ID NO: 84232):EEH:LEXAXA (SEQ ID NO: 84400), RNVQXRP (SEQ ID NO: 84427):TQV:SPIS-AA¹⁷-LYK (SEQ ID NO: 84887):EIVRKKPIF (SEQ ID NO: 84973):LKYHY (SEQ ID NO: 84232):EDH:LAXKXE (SEQ ID NO: 84399), KIPKAXX (SEQ ID NO: 84424):VPT:EPIS-AA¹⁷-LYL (SEQ ID NO: 84874):DENEKVV (SEQ ID NO: 84966):KFKYE (SEQ ID NO: 84211):AVS:GXGXR (SEQ ID NO: 84208), GIPEPXX (SEQ ID NO: 84419):VPT:EPIS-AA¹⁷-LYL (SEQ ID NO: 84874):DENKNVV (SEQ ID NO: 84967):KFKYE (SEQ ID NO: 84211):AVS:SXAXR (SEQ ID NO: 84303), SIPKAXX (SEQ ID NO: 84429):VPT:EPIS-AA¹⁷-LYL (SEQ ID NO: 84874):DEYDKVV (SEQ ID NO: 84968):KFKYE (SEQ ID NO: 84211):AVS:GXGXR (SEQ ID NO: 84208), HVTKPTX (SEQ ID NO: 84422):VPT:EPIS-AA¹⁷-LYL (SEQ ID NO: 84874):DDSSNVI (SEQ ID NO: 84965):KFKYE (SEQ ID NO: 84211):AVS:SXGXH (SEQ ID NO: 84304), YVPKPXX (SEQ ID NO: 84433):VPT:EPIS-AA¹⁷-LYL (SEQ ID NO: 84874):DDSSNVI (SEQ ID NO: 84965):KFKYE (SEQ ID NO: 84211):AVS:SXGXH (SEQ ID NO: 84304), TVPKPXX (SEQ ID NO: 84432):VPT:EPIS-AA¹⁷-LYL (SEQ ID NO: 84874):DDSSNVI (SEQ ID NO: 84965):KFKYE (SEQ ID NO: 84211):AVS:AXGXH (SEQ ID NO: 84147), AVPKAXX (SEQ ID NO: 84404):VPT:EPIS-AA¹⁷-LYL (SEQ ID NO: 84874):DSSNNVI (SEQ ID NO: 84972):KFKYE (SEQ ID NO: 84211):AVS:AXGXH (SEQ ID NO: 84147), KVGKAXX (SEQ ID NO: 84425):VPT:EPIS-AA¹⁷-LYL (SEQ ID NO: 84874):DDMGVPT (SEQ ID NO: 84964):KFKYE (SEQ ID NO: 84211):AVS:XGXR (SEQ ID NO: 84123), GSAGPXX (SEQ ID NO: 84420):VPT:EPIS-AA¹⁷-LYL (SEQ ID NO: 84874):NDKQQII (SEQ ID NO: 84979):KFKYE (SEQ ID NO: 84211):AVS:RXGXS (SEQ ID NO: 84291), AAPASXX (SEQ ID NO: 84401):VPT:EPIS-AA¹⁷-LYL (SEQ ID NO: 84874):DAANNVV (SEQ ID NO: 84963):KFKYE (SEQ ID NO: 84211):AVS:AXGXR (SEQ ID NO: 84148), STPPTXX (SEQ ID NO: 84431):VPT:EPIS-AA¹⁷-LYL (SEQ ID NO: 84874):DSANNVV (SEQ ID NO: 84971):KFKYE (SEQ ID NO: 84211):AVS:SXGXR (SEQ ID NO: 84305), HVPKPXX (SEQ ID NO: 84421):VPT:EPIS-AA¹⁷-LYL (SEQ ID NO: 84874):DDSSNVI (SEQ ID NO: 84965):KFKYE (SEQ ID NO: 84211):AVS:SXGXH (SEQ ID NO: 84304), RVPSTXX (SEQ ID NO: 84428):VPT:EPIS-AA¹⁷-LYL (SEQ ID NO: 84874):DNGRVLL (SEQ ID NO: 84970):KFKYE (SEQ ID NO: 84211):AVS:XGXL (SEQ ID NO: 84122), ASAAPXX (SEQ ID NO: 84402):VPT:EPIS-AA¹⁷-LYL (SEQ ID NO: 84874):VGRKPKV (SEQ ID NO: 84981):KFKYE (SEQ ID NO: 84211):AVS:XKXS (SEQ ID NO: 84124), ASASPXX (SEQ ID NO: 84403):VPT:EPIS-AA¹⁷-LYL (SEQ ID NO: 84874):IGKTPKI (SEQ ID NO: 84978):KFKYE (SEQ ID NO: 84211):AVS:XKXS (SEQ ID NO: 84124), ASASPXX (SEQ ID NO: 84403):VPT:EPIS-AA¹⁷-LYL (SEQ ID NO: 84874):VGRTPKV (SEQ ID NO: 84982):KFKYE (SEQ ID NO: 84211):AVS:XKXS (SEQ ID NO: 84124), KIPKAXX (SEQ ID NO: 84424):VPT:EPIS-AA¹⁷-LYL (SEQ ID NO: 84874):DENEKVV (SEQ ID NO: 84966):KFKYE (SEQ ID NO: 84211):VVE:GXGXR (SEQ ID NO: 84208), GIPEPXX (SEQ ID NO: 84419):VPE:EPIS-AA¹⁷-LYL (SEQ ID NO: 84874):DENKNVV (SEQ ID NO: 84967):KFKYE (SEQ ID NO: 84211):TVE:SXAXR (SEQ ID NO: 84303), SIPKAXX (SEQ ID NO: 84429):VPT:EPIS-AA¹⁷-LYL (SEQ ID NO: 84874):DEYDKVV (SEQ ID NO: 84968):KFKYE (SEQ ID NO: 84211):VVE:GXGXR (SEQ ID NO: 84208), HVTKPTX (SEQ ID NO: 84422):APT:EPIS-AA¹⁷-LYL (SEQ ID NO: 84874):DDSSNVI (SEQ ID NO: 84965):KFKYE (SEQ ID NO: 84211):VVR:SXGXH (SEQ ID NO: 84304), YVPKPXX (SEQ ID NO: 84433):APT:EPIS-AA¹⁷-LYL (SEQ ID NO: 84874):DDSSNVI (SEQ ID NO: 84965):KFKYE (SEQ ID NO: 84211):VVR:SXGXH (SEQ ID NO: 84304), TVPKPXX (SEQ ID NO: 84432):APT:EPIS-AA¹⁷-LYL (SEQ ID NO: 84874):DDSSNVI (SEQ ID NO: 84965):KFKYE (SEQ ID NO: 84211):VVR:AXGXH (SEQ ID NO: 84147), AVPKAXX (SEQ ID NO: 84404):APT:EPIS-AA¹⁷-LYL (SEQ ID NO: 84874):DSSNNVI (SEQ ID NO: 84972):KFKYE (SEQ ID NO: 84211):VVK:AXGXH (SEQ ID NO: 84147), KVGKAXX (SEQ ID NO: 84425):VPT:EPIS-AA¹⁷-LYL (SEQ ID NO: 84874):DDMGVPT (SEQ ID NO: 84964):KFKYE (SEQ ID NO: 84211):VAE:XGXR (SEQ ID NO: 84123), GSAGPXX (SEQ ID NO: 84420):TPT:EPIS-AA¹⁷-LYL (SEQ ID NO: 84874):NDKQQII (SEQ ID NO: 84979):KFKYE (SEQ ID NO: 84211):VVD:RXGXS (SEQ ID NO: 84291), AAPASXX (SEQ ID NO: 84401):VPA:EPIS-AA¹⁷-LYL (SEQ ID NO: 84874):DAANNVV (SEQ ID NO: 84963):KFKYE (SEQ ID NO: 84211):VVE:AXGXR (SEQ ID NO: 84148), STPPTXX (SEQ ID NO: 84431):VPT:EPIS-AA¹⁷-LYL (SEQ ID NO: 84874):DSANNVV (SEQ ID NO: 84971):KFKYE (SEQ ID NO: 84211):VVE:SXGXR (SEQ ID NO: 84305), HVPKPXX (SEQ ID NO: 84421):APT:EPIS-AA¹⁷-LYL (SEQ ID NO: 84874):DDSSNVI (SEQ ID NO: 84965):KFKYE (SEQ ID NO: 84211):VVR:SXGXH (SEQ ID NO: 84304), RVPSTXX (SEQ ID NO: 84428):APV:EPIS-AA¹⁷-LYL (SEQ ID NO: 84874):DNGRVLL (SEQ ID NO: 84970):KFKYE (SEQ ID NO: 84211):VEE:XGXL (SEQ ID NO: 84122), ASAAPXX (SEQ ID NO: 84402):VPQ:EPIS-AA¹⁷-LYL (SEQ ID NO: 84874):VGRKPKV (SEQ ID NO: 84981):KFKYE (SEQ ID NO: 84211):VRS:XKXS (SEQ ID NO: 84124), ASASPXX (SEQ ID NO: 84403):VSQ:EPIS-AA¹⁷-LYL (SEQ ID NO: 84874):IGKTPKI (SEQ ID NO: 84978):KFKYE (SEQ ID NO: 84211):VKS:XKXS (SEQ ID NO: 84124), ASASPXX (SEQ ID NO: 84403):VPQ:EPIS-AA¹⁷-LYL (SEQ ID NO: 84874):VGRTPKV (SEQ ID NO: 84982):KFKYE (SEQ ID NO: 84211):VKS:XKXS (SEQ ID NO: 84124), NDEGLEX (SEQ ID NO: 84426):VPT:EPIS-AA¹⁷-LYL (SEQ ID NO: 84874):RIKPHQGQH (SEQ ID NO: 84980):KFKYE (SEQ ID NO: 84211):QHN:KXEXR (SEQ ID NO: 84213), NDEGLEX (SEQ ID NO: 84426):VPT:EPIS-AA¹⁷-LYL (SEQ ID NO: 84874):RIKPHQGQH (SEQ ID NO: 84980):KFKYE (SEQ ID NO: 84211):EHS:QXEXR (SEQ ID NO: 84276), SSVKXQP (SEQ ID NO: 84430):SRV:EPIS-AA¹⁷-LYL (SEQ ID NO: 84874):EYVRKKPKL (SEQ ID NO: 84974):KFKYE (SEQ ID NO: 84211):EEH:LEXAXA (SEQ ID NO: 84400), RNVQXRP (SEQ ID NO: 84427):TQV:EPIS-AA¹⁷-LYL (SEQ ID NO: 84874):EIVRKKPIF (SEQ ID NO: 84973):KFKYE (SEQ ID NO: 84211):EDH:LAXKXE (SEQ ID NO: 84399), KIPKAXX (SEQ ID NO: 84424):TPT:SPIN-AA¹⁷-LYF (SEQ ID NO: 84884):DENEKVV (SEQ ID NO: 84966):YGKIP (SEQ ID NO: 84397):VVD:GXGXR (SEQ ID NO: 84208), GIPEPXX (SEQ ID NO: 84419):TPT:SPIN-AA¹⁷-LYF (SEQ ID NO: 84884):DENKNVV (SEQ ID NO: 84967):YGKIP (SEQ ID NO: 84397):VVD:SXAXR (SEQ ID NO: 84303), SIPKAXX (SEQ ID NO: 84429):TPT:SPIN-AA¹⁷-LYF (SEQ ID NO: 84884):DEYDKVV (SEQ ID NO: 84968):YGKIP (SEQ ID NO: 84397):VVD:GXGXR (SEQ ID NO: 84208), HVTKPTX (SEQ ID NO: 84422):TPT:SPIN-AA¹⁷-LYF (SEQ ID NO: 84884):DDSSNVI (SEQ ID NO: 84965):YGKIP (SEQ ID NO: 84397):VVD:SXGXH (SEQ ID NO: 84304), YVPKPXX (SEQ ID NO: 84433):TPT:SPIN-AA¹⁷-LYF (SEQ ID NO: 84884):DDSSNVI (SEQ ID NO: 84965):YGKIP (SEQ ID NO: 84397):VVD:SXGXH (SEQ ID NO: 84304), TVPKPXX (SEQ ID NO: 84432):TPT:SPIN-AA¹⁷-LYF (SEQ ID NO: 84884):DDSSNVI (SEQ ID NO: 84965):YGKIP (SEQ ID NO: 84397):VVD:AXGXH (SEQ ID NO: 84147), AVPKAXX (SEQ ID NO: 84404):TPT:SPIN-AA¹⁷-LYF (SEQ ID NO: 84884):DSSNNVI (SEQ ID NO: 84972):YGKIP (SEQ ID NO: 84397):VVD:AXGXH (SEQ ID NO: 84147), KVGKAXX (SEQ ID NO: 84425):TPT:SPIN-AA¹⁷-LYF (SEQ ID NO: 84884):DDMGVPT (SEQ ID NO: 84964):YGKIP (SEQ ID NO: 84397):VVD:XGXR (SEQ ID NO: 84123), KASKAXX (SEQ ID NO: 84423):TPT:SPIN-AA¹⁷-LYF (SEQ ID NO: 84884):DKGVVTY (SEQ ID NO: 84969):YGKIP (SEQ ID NO: 84397):VVD:EXGXR (SEQ ID NO: 84179), AAPASXX (SEQ ID NO: 84401):TPT:SPIN-AA¹⁷-LYF (SEQ ID NO: 84884):DAANNVV (SEQ ID NO: 84963):YGKIP (SEQ ID NO: 84397):VVD:AXGXR (SEQ ID NO: 84148), STPPTXX (SEQ ID NO: 84431):TPT:SPIN-AA¹⁷-LYF (SEQ ID NO: 84884):DSANNVV (SEQ ID NO: 84971):YGKIP (SEQ ID NO: 84397):VVD:SXGXR (SEQ ID NO: 84305), HVPKPXX (SEQ ID NO: 84421):TPT:SPIN-AA¹⁷-LYF (SEQ ID NO: 84884):DDSSNVI (SEQ ID NO: 84965):YGKIP (SEQ ID NO: 84397):VVD:SXGXH (SEQ ID NO: 84304), RVPSTXX (SEQ ID NO: 84428):TPT:SPIN-AA¹⁷-LYF (SEQ ID NO: 84884):DNGRVLL (SEQ ID NO: 84970):YGKIP (SEQ ID NO: 84397):VVD:XGXL (SEQ ID NO: 84122), ASAAPXX (SEQ ID NO: 84402):TPT:SPIN-AA¹⁷-LYF (SEQ ID NO: 84884):VGRKPKV (SEQ ID NO: 84981):YGKIP (SEQ ID NO: 84397):VVD:XKXS (SEQ ID NO: 84124), ASASPXX (SEQ ID NO: 84403):TPT:SPIN-AA¹⁷-LYF (SEQ ID NO: 84884):IGKTPKI (SEQ ID NO: 84978):YGKIP (SEQ ID NO: 84397):VVD:XKXS (SEQ ID NO: 84124), ASASPXX (SEQ ID NO: 84403):TPT:SPIN-AA¹⁷-LYF (SEQ ID NO: 84884):VGRTPKV (SEQ ID NO: 84982):YGKIP (SEQ ID NO: 84397):VVD:XKXS (SEQ ID NO: 84124), KIPKAXX (SEQ ID NO: 84424):VPT:SPIN-AA¹⁷-LYF (SEQ ID NO: 84884):DENEKVV (SEQ ID NO: 84966):YGKIP (SEQ ID NO: 84397):VVE:GXGXR (SEQ ID NO: 84208), GIPEPXX (SEQ ID NO: 84419):VPE:SPIN-AA¹⁷-LYF (SEQ ID NO: 84884):DENKNVV (SEQ ID NO: 84967):YGKIP (SEQ ID NO: 84397):TVE:SXAXR (SEQ ID NO: 84303), SIPKAXX (SEQ ID NO: 84429):VPT:SPIN-AA¹⁷-LYF (SEQ ID NO: 84884):DEYDKVV (SEQ ID NO: 84968):YGKIP (SEQ ID NO: 84397):VVE:GXGXR (SEQ ID NO: 84208), HVTKPTX (SEQ ID NO: 84422):APT:SPIN-AA¹⁷-LYF (SEQ ID NO: 84884):DDSSNVI (SEQ ID NO: 84965):YGKIP (SEQ ID NO: 84397):VVR:SXGXH (SEQ ID NO: 84304), YVPKPXX (SEQ ID NO: 84433):APT:SPIN-AA¹⁷-LYF (SEQ ID NO: 84884):DDSSNVI (SEQ ID NO: 84965):YGKIP (SEQ ID NO: 84397):VVR:SXGXH (SEQ ID NO: 84304), TVPKPXX (SEQ ID NO: 84432):APT:SPIN-AA¹⁷-LYF (SEQ ID NO: 84884):DDSSNVI (SEQ ID NO: 84965):YGKIP (SEQ ID NO: 84397):VVR:AXGXH (SEQ ID NO: 84147), AVPKAXX (SEQ ID NO: 84404):APT:SPIN-AA¹⁷-LYF (SEQ ID NO: 84884):DSSNNVI (SEQ ID NO: 84972):YGKIP (SEQ ID NO: 84397):VVK:AXGXH (SEQ ID NO: 84147), KVGKAXX (SEQ ID NO: 84425):VPT:SPIN-AA¹⁷-LYF (SEQ ID NO: 84884):DDMGVPT (SEQ ID NO: 84964):YGKIP (SEQ ID NO: 84397):VAE:XGXR (SEQ ID NO: 84123), KASKAXX (SEQ ID NO: 84423):VPT:SPIN-AA¹⁷-LYF (SEQ ID NO: 84884):DKGVVTY (SEQ ID NO: 84969):YGKIP (SEQ ID NO: 84397):AVS:EXGXR (SEQ ID NO: 84179), AAPASXX (SEQ ID NO: 84401):VPA:SPIN-AA¹⁷-LYF (SEQ ID NO: 84884):DAANNVV (SEQ ID NO: 84963):YGKIP (SEQ ID NO: 84397):VVE:AXGXR (SEQ ID NO: 84148), STPPTXX (SEQ ID NO: 84431):VPT:SPIN-AA¹⁷-LYF (SEQ ID NO: 84884):DSANNVV (SEQ ID NO: 84971):YGKIP (SEQ ID NO: 84397):VVE:SXGXR (SEQ ID NO: 84305), HVPKPXX (SEQ ID NO: 84421):APT:SPIN-AA¹⁷-LYF (SEQ ID NO: 84884):DDSSNVI (SEQ ID NO: 84965):YGKIP (SEQ ID NO: 84397):VVR:SXGXH (SEQ ID NO: 84304), RVPSTXX (SEQ ID NO: 84428):APV:SPIN-AA¹⁷-LYF (SEQ ID NO: 84884):DNGRVLL (SEQ ID NO: 84970):YGKIP (SEQ ID NO: 84397):VEE:XGXL (SEQ ID NO: 84122), ASAAPXX (SEQ ID NO: 84402):VPQ:SPIN-AA¹⁷-LYF (SEQ ID NO: 84884):VGRKPKV (SEQ ID NO: 84981):YGKIP (SEQ ID NO: 84397):VRS:XKXS (SEQ ID NO: 84124), ASASPXX (SEQ ID NO: 84403):VSQ:SPIN-AA¹⁷-LYF (SEQ ID NO: 84884):IGKTPKI (SEQ ID NO: 84978):YGKIP (SEQ ID NO: 84397):VKS:XKXS (SEQ ID NO: 84124), ASASPXX (SEQ ID NO: 84403):VPQ:SPIN-AA¹⁷-LYF (SEQ ID NO: 84884):VGRTPKV (SEQ ID NO: 84982):YGKIP (SEQ ID NO: 84397):VKS:XKXS (SEQ ID NO: 84124), NDEGLEX (SEQ ID NO: 84426):VPT:SPIN-AA¹⁷-LYF (SEQ ID NO: 84884):RIKPHQGQH (SEQ ID NO: 84980):YGKIP (SEQ ID NO: 84397):QHN:KXEXR (SEQ ID NO: 84213), NDEGLEX (SEQ ID NO: 84426):VPT:SPIN-AA¹⁷-LYF (SEQ ID NO: 84884):RIKPHQGQH (SEQ ID NO: 84980):YGKIP (SEQ ID NO: 84397):EHS:QXEXR (SEQ ID NO: 84276), SSVKXQP (SEQ ID NO: 84430):SRV:SPIN-AA¹⁷-LYF (SEQ ID NO: 84884):EYVRKKPKL (SEQ ID NO: 84974):YGKIP (SEQ ID NO: 84397):EEH:LEXAXA (SEQ ID NO: 84400), RNVQXRP (SEQ ID NO: 84427):TQV:SPIN-AA¹⁷-LYF (SEQ ID NO: 84884):EIVRKKPIF (SEQ ID NO: 84973):YGKIP (SEQ ID NO: 84397):EDH:LAXKXE (SEQ ID NO: 84399), KIPKAXX (SEQ ID NO: 84424):VPA:SPIS-AA¹⁷-LYI (SEQ ID NO: 84886):DENEKVV (SEQ ID NO: 84966):YKQYE (SEQ ID NO: 84398):VVE:GXGXR (SEQ ID NO: 84208), GIPEPXX (SEQ ID NO: 84419):VPA:SPIS-AA¹⁷-LYI (SEQ ID NO: 84886):DENKNVV (SEQ ID NO: 84967):YKQYE (SEQ ID NO: 84398):VVE:SXAXR (SEQ ID NO: 84303), SIPKAXX (SEQ ID NO: 84429):VPA:SPIS-AA¹⁷-LYI (SEQ ID NO: 84886):DEYDKVV (SEQ ID NO: 84968):YKQYE (SEQ ID NO: 84398):VVE:GXGXR (SEQ ID NO: 84208), HVTKPTX (SEQ ID NO: 84422):VPA:SPIS-AA¹⁷-LYI (SEQ ID NO: 84886):DDSSNVI (SEQ ID NO: 84965):YKQYE (SEQ ID NO: 84398):VVE:SXGXH (SEQ ID NO: 84304), YVPKPXX (SEQ ID NO: 84433):VPA:SPIS-AA¹⁷-LYI (SEQ ID NO: 84886):DDSSNVI (SEQ ID NO: 84965):YKQYE (SEQ ID NO: 84398):VVE:SXGXH (SEQ ID NO: 84304), TVPKPXX (SEQ ID NO: 84432):VPA:SPIS-AA¹⁷-LYI (SEQ ID NO: 84886):DDSSNVI (SEQ ID NO: 84965):YKQYE (SEQ ID NO: 84398):VVE:AXGXH (SEQ ID NO: 84147), AVPKAXX (SEQ ID NO: 84404):VPA:SPIS-AA¹⁷-LYI (SEQ ID NO: 84886):DSSNNVI (SEQ ID NO: 84972):YKQYE (SEQ ID NO: 84398):VVE:AXGXH (SEQ ID NO: 84147), KVGKAXX (SEQ ID NO: 84425):VPA:SPIS-AA¹⁷-LYI (SEQ ID NO: 84886):DDMGVPT (SEQ ID NO: 84964):YKQYE (SEQ ID NO: 84398):VVE:XGXR (SEQ ID NO: 84123), KASKAXX (SEQ ID NO: 84423):VPA:SPIS-AA¹⁷-LYI (SEQ ID NO: 84886):DKGVVTY (SEQ ID NO: 84969):YKQYE (SEQ ID NO: 84398):VVE:EXGXR (SEQ ID NO: 84179), GSAGPXX (SEQ ID NO: 84420):VPA:SPIS-AA¹⁷-LYI (SEQ ID NO: 84886):NDKQQII (SEQ ID NO: 84979):YKQYE (SEQ ID NO: 84398):VVE:RXGXS (SEQ ID NO: 84291), STPPTXX (SEQ ID NO: 84431):VPA:SPIS-AA¹⁷-LYI (SEQ ID NO: 84886):DSANNVV (SEQ ID NO: 84971):YKQYE (SEQ ID NO: 84398):VVE:SXGXR (SEQ ID NO: 84305), HVPKPXX (SEQ ID NO: 84421):VPA:SPIS-AA¹⁷-LYI (SEQ ID NO: 84886):DDSSNVI (SEQ ID NO: 84965):YKQYE (SEQ ID NO: 84398):VVE:SXGXH (SEQ ID NO: 84304), RVPSTXX (SEQ ID NO: 84428):VPA:SPIS-AA¹⁷-LYI (SEQ ID NO: 84886):DNGRVLL (SEQ ID NO: 84970):YKQYE (SEQ ID NO: 84398):VVE:XGXL (SEQ ID NO: 84122), ASAAPXX (SEQ ID NO: 84402):VPA:SPIS-AA¹⁷-LYI (SEQ ID NO: 84886):VGRKPKV (SEQ ID NO: 84981):YKQYE (SEQ ID NO: 84398):VVE:XKXS (SEQ ID NO: 84124), ASASPXX (SEQ ID NO: 84403):VPA:SPIS-AA¹⁷-LYI (SEQ ID NO: 84886):IGKTPKI (SEQ ID NO: 84978):YKQYE (SEQ ID NO: 84398):VVE:XKXS (SEQ ID NO: 84124), ASASPXX (SEQ ID NO: 84403):VPA:SPIS-AA¹⁷-LYI (SEQ ID NO: 84886):VGRTPKV (SEQ ID NO: 84982):YKQYE (SEQ ID NO: 84398):VVE:XKXS (SEQ ID NO: 84124), KIPKAXX (SEQ ID NO: 84424):VPT:SPIS-AA¹⁷-LYI (SEQ ID NO: 84886):DENEKVV (SEQ ID NO: 84966):YKQYE (SEQ ID NO: 84398):VVE:GXGXR (SEQ ID NO: 84208), GIPEPXX (SEQ ID NO: 84419):VPE:SPIS-AA¹⁷-LYI (SEQ ID NO: 84886):DENKNVV (SEQ ID NO: 84967):YKQYE (SEQ ID NO: 84398):TVE:SXAXR (SEQ ID NO: 84303), SIPKAXX (SEQ ID NO: 84429):VPT:SPIS-AA¹⁷-LYI (SEQ ID NO: 84886):DEYDKVV (SEQ ID NO: 84968):YKQYE (SEQ ID NO: 84398):VVE:GXGXR (SEQ ID NO: 84208), HVTKPTX (SEQ ID NO: 84422):APT:SPIS-AA¹⁷-LYI (SEQ ID NO: 84886):DDSSNVI (SEQ ID NO: 84965):YKQYE (SEQ ID NO: 84398):VVR:SXGXH (SEQ ID NO: 84304), YVPKPXX (SEQ ID NO: 84433):APT:SPIS-AA¹⁷-LYI (SEQ ID NO: 84886):DDSSNVI (SEQ ID NO: 84965):YKQYE (SEQ ID NO: 84398):VVR:SXGXH (SEQ ID NO: 84304), TVPKPXX (SEQ ID NO: 84432):APT:SPIS-AA¹⁷-LYI (SEQ ID NO: 84886):DDSSNVI (SEQ ID NO: 84965):YKQYE (SEQ ID NO: 84398):VVR:AXGXH (SEQ ID NO: 84147), AVPKAXX (SEQ ID NO: 84404):APT:SPIS-AA¹⁷-LYI (SEQ ID NO: 84886):DSSNNVI (SEQ ID NO: 84972):YKQYE (SEQ ID NO: 84398):VVK:AXGXH (SEQ ID NO: 84147), KVGKAXX (SEQ ID NO: 84425):VPT:SPIS-AA¹⁷-LYI (SEQ ID NO: 84886):DDMGVPT (SEQ ID NO: 84964):YKQYE (SEQ ID NO: 84398):VAE:XGXR (SEQ ID NO: 84123), KASKAXX (SEQ ID NO: 84423):VPT:SPIS-AA¹⁷-LYI (SEQ ID NO: 84886):DKGVVTY (SEQ ID NO: 84969):YKQYE (SEQ ID NO: 84398):AVS:EXGXR (SEQ ID NO: 84179), GSAGPXX (SEQ ID NO: 84420):TPT:SPIS-AA¹⁷-LYI (SEQ ID NO: 84886):NDKQQII (SEQ ID NO: 84979):YKQYE (SEQ ID NO: 84398):VVD:RXGXS (SEQ ID NO: 84291), STPPTXX (SEQ ID NO: 84431):VPT:SPIS-AA¹⁷-LYI (SEQ ID NO: 84886):DSANNVV (SEQ ID NO: 84971):YKQYE (SEQ ID NO: 84398):VVE:SXGXR (SEQ ID NO: 84305), HVPKPXX (SEQ ID NO: 84421):APT:SPIS-AA¹⁷-LYI (SEQ ID NO: 84886):DDSSNVI (SEQ ID NO: 84965):YKQYE (SEQ ID NO: 84398):VVR:SXGXH (SEQ ID NO: 84304), RVPSTXX (SEQ ID NO: 84428):APV:SPIS-AA¹⁷-LYI (SEQ ID NO: 84886):DNGRVLL (SEQ ID NO: 84970):YKQYE (SEQ ID NO: 84398):VEE:XGXL (SEQ ID NO: 84122), ASAAPXX (SEQ ID NO: 84402):VPQ:SPIS-AA¹⁷-LYI (SEQ ID NO: 84886):VGRKPKV (SEQ ID NO: 84981):YKQYE (SEQ ID NO: 84398):VRS:XKXS (SEQ ID NO: 84124), ASASPXX (SEQ ID NO: 84403):VSQ:SPIS-AA¹⁷-LYI (SEQ ID NO: 84886):IGKTPKI (SEQ ID NO: 84978):YKQYE (SEQ ID NO: 84398):VKS:XKXS (SEQ ID NO: 84124), ASASPXX (SEQ ID NO: 84403):VPQ:SPIS-AA¹⁷-LYI (SEQ ID NO: 84886):VGRTPKV (SEQ ID NO: 84982):YKQYE (SEQ ID NO: 84398):VKS:XKXS (SEQ ID NO: 84124), NDEGLEX (SEQ ID NO: 84426):VPT:SPIS-AA¹⁷-LYI (SEQ ID NO: 84886):RIKPHQGQH (SEQ ID NO: 84980):YKQYE (SEQ ID NO: 84398):QHN:KXEXR (SEQ ID NO: 84213), NDEGLEX (SEQ ID NO: 84426):VPT:SPIS-AA¹⁷-LYI (SEQ ID NO: 84886):RIKPHQGQH (SEQ ID NO: 84980):YKQYE (SEQ ID NO: 84398):EHS:QXEXR (SEQ ID NO: 84276), SSVKXQP (SEQ ID NO: 84430):SRV:SPIS-AA¹⁷-LYI (SEQ ID NO: 84886):EYVRKKPKL (SEQ ID NO: 84974):YKQYE (SEQ ID NO: 84398):EEH:LEXAXA (SEQ ID NO: 84400), RNVQXRP (SEQ ID NO: 84427):TQV:SPIS-AA¹⁷-LYI (SEQ ID NO: 84886):EIVRKKPIF (SEQ ID NO: 84973):YKQYE (SEQ ID NO: 84398):EDH:LAXKXE (SEQ ID NO: 84399), KIPKAXX (SEQ ID NO: 84424):VPT:SPIS-AA¹⁷-LFI (SEQ ID NO: 84885):DENEKVV (SEQ ID NO: 84966):YKQYE (SEQ ID NO: 84398):VVE:GXGXR (SEQ ID NO: 84208), GIPEPXX (SEQ ID NO: 84419):VPT:SPIS-AA¹⁷-LFI (SEQ ID NO: 84885):DENKNVV (SEQ ID NO: 84967):YKQYE (SEQ ID NO: 84398):VVE:SXAXR (SEQ ID NO: 84303), SIPKAXX (SEQ ID NO: 84429):VPT:SPIS-AA¹⁷-LFI (SEQ ID NO: 84885):DEYDKVV (SEQ ID NO: 84968):YKQYE (SEQ ID NO: 84398):VVE:GXGXR (SEQ ID NO: 84208), HVTKPTX (SEQ ID NO: 84422):VPT:SPIS-AA¹⁷-LFI (SEQ ID NO: 84885):DDSSNVI (SEQ ID NO: 84965):YKQYE (SEQ ID NO: 84398):VVE:SXGXH (SEQ ID NO: 84304), YVPKPXX (SEQ ID NO: 84433):VPT:SPIS-AA¹⁷-LFI (SEQ ID NO: 84885):DDSSNVI (SEQ ID NO: 84965):YKQYE (SEQ ID NO: 84398):VVE:SXGXH (SEQ ID NO: 84304), TVPKPXX (SEQ ID NO: 84432):VPT:SPIS-AA¹⁷-LFI (SEQ ID NO: 84885):DDSSNVI (SEQ ID NO: 84965):YKQYE (SEQ ID NO: 84398):VVE:AXGXH (SEQ ID NO: 84147), AVPKAXX (SEQ ID NO: 84404):VPT:SPIS-AA¹⁷-LFI (SEQ ID NO: 84885):DSSNNVI (SEQ ID NO: 84972):YKQYE (SEQ ID NO: 84398):VVE:AXGXH (SEQ ID NO: 84147), KVGKAXX (SEQ ID NO: 84425):VPT:SPIS-AA¹⁷-LFI (SEQ ID NO: 84885):DDMGVPT (SEQ ID NO: 84964):YKQYE (SEQ ID NO: 84398):VVE:XGXR (SEQ ID NO: 84123), KASKAXX (SEQ ID NO: 84423):VPT:SPIS-AA¹⁷-LFI (SEQ ID NO: 84885):DKGVVTY (SEQ ID NO: 84969):YKQYE (SEQ ID NO: 84398):VVE:EXGXR (SEQ ID NO: 84179), GSAGPXX (SEQ ID NO: 84420):VPT:SPIS-AA¹⁷-LFI (SEQ ID NO: 84885):NDKQQII (SEQ ID NO: 84979):YKQYE (SEQ ID NO: 84398):VVE:RXGXS (SEQ ID NO: 84291), AAPASXX (SEQ ID NO: 84401):VPT:SPIS-AA¹⁷-LFI (SEQ ID NO: 84885):DAANNVV (SEQ ID NO: 84963):YKQYE (SEQ ID NO: 84398):VVE:AXGXR (SEQ ID NO: 84148), HVPKPXX (SEQ ID NO: 84421):VPT:SPIS-AA¹⁷-LFI (SEQ ID NO: 84885):DDSSNVI (SEQ ID NO: 84965):YKQYE (SEQ ID NO: 84398):VVE:SXGXH (SEQ ID NO: 84304), RVPSTXX (SEQ ID NO: 84428):VPT:SPIS-AA¹⁷-LFI (SEQ ID NO: 84885):DNGRVLL (SEQ ID NO: 84970):YKQYE (SEQ ID NO: 84398):VVE:XGXL (SEQ ID NO: 84122), ASAAPXX (SEQ ID NO: 84402):VPT:SPIS-AA¹⁷-LFI (SEQ ID NO: 84885):VGRKPKV (SEQ ID NO: 84981):YKQYE (SEQ ID NO: 84398):VVE:XKXS (SEQ ID NO: 84124), ASASPXX (SEQ ID NO: 84403):VPT:SPIS-AA¹⁷-LFI (SEQ ID NO: 84885):IGKTPKI (SEQ ID NO: 84978):YKQYE (SEQ ID NO: 84398):VVE:XKXS (SEQ ID NO: 84124), ASASPXX (SEQ ID NO: 84403):VPT:SPIS-AA¹⁷-LFI (SEQ ID NO: 84885):VGRTPKV (SEQ ID NO: 84982):YKQYE (SEQ ID NO: 84398):VVE:XKXS (SEQ ID NO: 84124), GIPEPXX (SEQ ID NO: 84419):VPE:SPIS-AA¹⁷-LFI (SEQ ID NO: 84885):DENKNVV (SEQ ID NO: 84967):YKQYE (SEQ ID NO: 84398):TVE:SXAXR (SEQ ID NO: 84303), HVTKPTX (SEQ ID NO: 84422):APT:SPIS-AA¹⁷-LFI (SEQ ID NO: 84885):DDSSNVI (SEQ ID NO: 84965):YKQYE (SEQ ID NO: 84398):VVR:SXGXH (SEQ ID NO: 84304), YVPKPXX (SEQ ID NO: 84433):APT:SPIS-AA¹⁷-LFI (SEQ ID NO: 84885):DDSSNVI (SEQ ID NO: 84965):YKQYE (SEQ ID NO: 84398):VVR:SXGXH (SEQ ID NO: 84304), TVPKPXX (SEQ ID NO: 84432):APT:SPIS-AA¹⁷-LFI (SEQ ID NO: 84885):DDSSNVI (SEQ ID NO: 84965):YKQYE (SEQ ID NO: 84398):VVR:AXGXH (SEQ ID NO: 84147), AVPKAXX (SEQ ID NO: 84404):APT:SPIS-AA¹⁷-LFI (SEQ ID NO: 84885):DSSNNVI (SEQ ID NO: 84972):YKQYE (SEQ ID NO: 84398):VVK:AXGXH (SEQ ID NO: 84147), KVGKAXX (SEQ ID NO: 84425):VPT:SPIS-AA¹⁷-LFI (SEQ ID NO: 84885):DDMGVPT (SEQ ID NO: 84964):YKQYE (SEQ ID NO: 84398):VAE:XGXR (SEQ ID NO: 84123), KASKAXX (SEQ ID NO: 84423):VPT:SPIS-AA¹⁷-LFI (SEQ ID NO: 84885):DKGVVTY (SEQ ID NO: 84969):YKQYE (SEQ ID NO: 84398):AVS:EXGXR (SEQ ID NO: 84179), GSAGPXX (SEQ ID NO: 84420):TPT:SPIS-AA¹⁷-LFI (SEQ ID NO: 84885):NDKQQII (SEQ ID NO: 84979):YKQYE (SEQ ID NO: 84398):VVD:RXGXS (SEQ ID NO: 84291), AAPASXX (SEQ ID NO: 84401):VPA:SPIS-AA¹⁷-LFI (SEQ ID NO: 84885):DAANNVV (SEQ ID NO: 84963):YKQYE (SEQ ID NO: 84398):VVE:AXGXR (SEQ ID NO: 84148), HVPKPXX (SEQ ID NO: 84421):APT:SPIS-AA¹⁷-LFI (SEQ ID NO: 84885):DDSSNVI (SEQ ID NO: 84965):YKQYE (SEQ ID NO: 84398):VVR:SXGXH (SEQ ID NO: 84304), RVPSTXX (SEQ ID NO: 84428):APV:SPIS-AA¹⁷-LFI (SEQ ID NO: 84885):DNGRVLL (SEQ ID NO: 84970):YKQYE (SEQ ID NO: 84398):VEE:XGXL (SEQ ID NO: 84122), ASAAPXX (SEQ ID NO: 84402):VPQ:SPIS-AA¹⁷-LFI (SEQ ID NO: 84885):VGRKPKV (SEQ ID NO: 84981):YKQYE (SEQ ID NO: 84398):VRS:XKXS (SEQ ID NO: 84124), ASASPXX (SEQ ID NO: 84403):VSQ:SPIS-AA¹⁷-LFI (SEQ ID NO: 84885):IGKTPKI (SEQ ID NO: 84978):YKQYE (SEQ ID NO: 84398):VKS:XKXS (SEQ ID NO: 84124), ASASPXX (SEQ ID NO: 84403):VPQ:SPIS-AA¹⁷-LFI (SEQ ID NO: 84885):VGRTPKV (SEQ ID NO: 84982):YKQYE (SEQ ID NO: 84398):VKS:XKXS (SEQ ID NO: 84124), NDEGLEX (SEQ ID NO: 84426):VPT:SPIS-AA¹⁷-LFI (SEQ ID NO: 84885):RIKPHQGQH (SEQ ID NO: 84980):YKQYE (SEQ ID NO: 84398):QHN:KXEXR (SEQ ID NO: 84213), NDEGLEX (SEQ ID NO: 84426):VPT:SPIS-AA¹⁷-LFI (SEQ ID NO: 84885):RIKPHQGQH (SEQ ID NO: 84980):YKQYE (SEQ ID NO: 84398):EHS:QXEXR (SEQ ID NO: 84276), SSVKXQP (SEQ ID NO: 84430):SRV:SPIS-AA¹⁷-LFI (SEQ ID NO: 84885):EYVRKKPKL (SEQ ID NO: 84974):YKQYE (SEQ ID NO: 84398):EEH:LEXAXA (SEQ ID NO: 84400), RNVQXRP (SEQ ID NO: 84427):TQV:SPIS-AA¹⁷-LFI (SEQ ID NO: 84885):EIVRKKPIF (SEQ ID NO: 84973):YKQYE (SEQ ID NO: 84398):EDH:LAXKXE (SEQ ID NO: 84399), KIPKAXX (SEQ ID NO: 84424):APV:KPLS-AA¹⁷-LYV (SEQ ID NO: 84877):DENEKVV (SEQ ID NO: 84966):DHHKD (SEQ ID NO: 84149):VEE:GXGXR (SEQ ID NO: 84208), GIPEPXX (SEQ ID NO: 84419):APV:KPLS-AA¹⁷-LYV (SEQ ID NO: 84877):DENKNVV (SEQ ID NO: 84967):DHHKD (SEQ ID NO: 84149):VEE:SXAXR (SEQ ID NO: 84303), SIPKAXX (SEQ ID NO: 84429):APV:KPLS-AA¹⁷-LYV (SEQ ID NO: 84877):DEYDKVV (SEQ ID NO: 84968):DHHKD (SEQ ID NO: 84149):VEE:GXGXR (SEQ ID NO: 84208), HVTKPTX (SEQ ID NO: 84422):APV:KPLS-AA¹⁷-LYV (SEQ ID NO: 84877):DDSSNVI (SEQ ID NO: 84965):DHHKD (SEQ ID NO: 84149):VEE:SXGXH (SEQ ID NO: 84304), YVPKPXX (SEQ ID NO: 84433):APV:KPLS-AA¹⁷-LYV (SEQ ID NO: 84877):DDSSNVI (SEQ ID NO: 84965):DHHKD (SEQ ID NO: 84149):VEE:SXGXH (SEQ ID NO: 84304), TVPKPXX (SEQ ID NO: 84432):APV:KPLS-AA¹⁷-LYV (SEQ ID NO: 84877):DDSSNVI (SEQ ID NO: 84965):DHHKD (SEQ ID NO: 84149):VEE:AXGXH (SEQ ID NO: 84147), AVPKAXX (SEQ ID NO: 84404):APV:KPLS-AA¹⁷-LYV (SEQ ID NO: 84877):DSSNNVI (SEQ ID NO: 84972):DHHKD (SEQ ID NO: 84149):VEE:AXGXH (SEQ ID NO: 84147), KVGKAXX (SEQ ID NO: 84425):APV:KPLS-AA¹⁷-LYV (SEQ ID NO: 84877):DDMGVPT (SEQ ID NO: 84964):DHHKD (SEQ ID NO: 84149):VEE:XGXR (SEQ ID NO: 84123), KASKAXX (SEQ ID NO: 84423):APV:KPLS-AA¹⁷-LYV (SEQ ID NO: 84877):DKGVVTY (SEQ ID NO: 84969):DHHKD (SEQ ID NO: 84149):VEE:EXGXR (SEQ ID NO: 84179), GSAGPXX (SEQ ID NO: 84420):APV:KPLS-AA¹⁷-LYV (SEQ ID NO: 84877):NDKQQII (SEQ ID NO: 84979):DHHKD (SEQ ID NO: 84149):VEE:RXGXS (SEQ ID NO: 84291), AAPASXX (SEQ ID NO: 84401):APV:KPLS-AA¹⁷-LYV (SEQ ID NO: 84877):DAANNVV (SEQ ID NO: 84963):DHHKD (SEQ ID NO: 84149):VEE:AXGXR (SEQ ID NO: 84148), STPPTXX (SEQ ID NO: 84431):APV:KPLS-AA¹⁷-LYV (SEQ ID NO: 84877):DSANNVV (SEQ ID NO: 84971):DHHKD (SEQ ID NO: 84149):VEE:SXGXR (SEQ ID NO: 84305), HVPKPXX (SEQ ID NO: 84421):APV:KPLS-AA¹⁷-LYV (SEQ ID NO: 84877):DDSSNVI (SEQ ID NO: 84965):DHHKD (SEQ ID NO: 84149):VEE:SXGXH (SEQ ID NO: 84304), ASAAPXX (SEQ ID NO: 84402):APV:KPLS-AA¹⁷-LYV (SEQ ID NO: 84877):VGRKPKV (SEQ ID NO: 84981):DHHKD (SEQ ID NO: 84149):VEE:XKXS (SEQ ID NO: 84124), ASASPXX (SEQ ID NO: 84403):APV:KPLS-AA¹⁷-LYV (SEQ ID NO: 84877):IGKTPKI (SEQ ID NO: 84978):DHHKD (SEQ ID NO: 84149):VEE:XKXS (SEQ ID NO: 84124), ASASPXX (SEQ ID NO: 84403):APV:KPLS-AA¹⁷-LYV (SEQ ID NO: 84877):VGRTPKV (SEQ ID NO: 84982):DHHKD (SEQ ID NO: 84149):VEE:XKXS (SEQ ID NO: 84124), KIPKAXX (SEQ ID NO: 84424):VPT:KPLS-AA¹⁷-LYV (SEQ ID NO: 84877):DENEKVV (SEQ ID NO: 84966):DHHKD (SEQ ID NO: 84149):VVE:GXGXR (SEQ ID NO: 84208), GIPEPXX (SEQ ID NO: 84419):VPE:KPLS-AA¹⁷-LYV (SEQ ID NO: 84877):DENKNVV (SEQ ID NO: 84967):DHHKD (SEQ ID NO: 84149):TVE:SXAXR (SEQ ID NO: 84303), SIPKAXX (SEQ ID NO: 84429):VPT:KPLS-AA¹⁷-LYV (SEQ ID NO: 84877):DEYDKVV (SEQ ID NO: 84968):DHHKD (SEQ ID NO: 84149):VVE:GXGXR (SEQ ID NO: 84208), HVTKPTX (SEQ ID NO: 84422):APT:KPLS-AA¹⁷-LYV (SEQ ID NO: 84877):DDSSNVI (SEQ ID NO: 84965):DHHKD (SEQ ID NO: 84149):VVR:SXGXH (SEQ ID NO: 84304), YVPKPXX (SEQ ID NO: 84433):APT:KPLS-AA¹⁷-LYV (SEQ ID NO: 84877):DDSSNVI (SEQ ID NO: 84965):DHHKD (SEQ ID NO: 84149):VVR:SXGXH (SEQ ID NO: 84304), TVPKPXX (SEQ ID NO: 84432):APT:KPLS-AA¹⁷-LYV (SEQ ID NO: 84877):DDSSNVI (SEQ ID NO: 84965):DHHKD (SEQ ID NO: 84149):VVR:AXGXH (SEQ ID NO: 84147), AVPKAXX (SEQ ID NO: 84404):APT:KPLS-AA¹⁷-LYV (SEQ ID NO: 84877):DSSNNVI (SEQ ID NO: 84972):DHHKD (SEQ ID NO: 84149):VVK:AXGXH (SEQ ID NO: 84147), KVGKAXX (SEQ ID NO: 84425):VPT:KPLS-AA¹⁷-LYV (SEQ ID NO: 84877):DDMGVPT (SEQ ID NO: 84964):DHHKD (SEQ ID NO: 84149):VAE:XGXR (SEQ ID NO: 84123), KASKAXX (SEQ ID NO: 84423):VPT:KPLS-AA¹⁷-LYV (SEQ ID NO: 84877):DKGVVTY (SEQ ID NO: 84969):DHHKD (SEQ ID NO: 84149):AVS:EXGXR (SEQ ID NO: 84179), GSAGPXX (SEQ ID NO: 84420):TPT:KPLS-AA¹⁷-LYV (SEQ ID NO: 84877):NDKQQII (SEQ ID NO: 84979):DHHKD (SEQ ID NO: 84149):VVD:RXGXS (SEQ ID NO: 84291), AAPASXX (SEQ ID NO: 84401):VPA:KPLS-AA¹⁷-LYV (SEQ ID NO: 84877):DAANNVV (SEQ ID NO: 84963):DHHKD (SEQ ID NO: 84149):VVE:AXGXR (SEQ ID NO: 84148), STPPTXX (SEQ ID NO: 84431):VPT:KPLS-AA¹⁷-LYV (SEQ ID NO: 84877):DSANNVV (SEQ ID NO: 84971):DHHKD (SEQ ID NO: 84149):VVE:SXGXR (SEQ ID NO: 84305), HVPKPXX (SEQ ID NO: 84421):APT:KPLS-AA¹⁷-LYV (SEQ ID NO: 84877):DDSSNVI (SEQ ID NO: 84965):DHHKD (SEQ ID NO: 84149):VVR:SXGXH (SEQ ID NO: 84304), ASAAPXX (SEQ ID NO: 84402):VPQ:KPLS-AA¹⁷-LYV (SEQ ID NO: 84877):VGRKPKV (SEQ ID NO: 84981):DHHKD (SEQ ID NO: 84149):VRS:XKXS (SEQ ID NO: 84124), ASASPXX (SEQ ID NO: 84403):VSQ:KPLS-AA¹⁷-LYV (SEQ ID NO: 84877):IGKTPKI (SEQ ID NO: 84978):DHHKD (SEQ ID NO: 84149):VKS:XKXS (SEQ ID NO: 84124), ASASPXX (SEQ ID NO: 84403):VPQ:KPLS-AA¹⁷-LYV (SEQ ID NO: 84877):VGRTPKV (SEQ ID NO: 84982):DHHKD (SEQ ID NO: 84149):VKS:XKXS (SEQ ID NO: 84124), NDEGLEX (SEQ ID NO: 84426):VPT:KPLS-AA¹⁷-LYV (SEQ ID NO: 84877):RIKPHQGQH (SEQ ID NO: 84980):DHHKD (SEQ ID NO: 84149):QHN:KXEXR (SEQ ID NO: 84213), NDEGLEX (SEQ ID NO: 84426):VPT:KPLS-AA¹⁷-LYV (SEQ ID NO: 84877):RIKPHQGQH (SEQ ID NO: 84980):DHHKD (SEQ ID NO: 84149):EHS:QXEXR (SEQ ID NO: 84276), SSVKXQP (SEQ ID NO: 84430):SRV:KPLS-AA¹⁷-LYV (SEQ ID NO: 84877):EYVRKKPKL (SEQ ID NO: 84974):DHHKD (SEQ ID NO: 84149):EEH:LEXAXA (SEQ ID NO: 84400), RNVQXRP (SEQ ID NO: 84427):TQV:KPLS-AA¹⁷-LYV (SEQ ID NO: 84877):EIVRKKPIF (SEQ ID NO: 84973):DHHKD (SEQ ID NO: 84149):EDH:LAXKXE (SEQ ID NO: 84399), KIPKAXX (SEQ ID NO: 84424):VPQ:EPLP-AA¹⁷-VYY (SEQ ID NO: 84875):DENEKVV (SEQ ID NO: 84966):EQLSN (SEQ ID NO: 84178):VRS:GXGXR (SEQ ID NO: 84208), GIPEPXX (SEQ ID NO: 84419):VPQ:EPLP-AA¹⁷-VYY (SEQ ID NO: 84875):DENKNVV (SEQ ID NO: 84967):EQLSN (SEQ ID NO: 84178):VRS:SXAXR (SEQ ID NO: 84303), SIPKAXX (SEQ ID NO: 84429):VPQ:EPLP-AA¹⁷-VYY (SEQ ID NO: 84875):DEYDKVV (SEQ ID NO: 84968):EQLSN (SEQ ID NO: 84178):VRS:GXGXR (SEQ ID NO: 84208), HVTKPTX (SEQ ID NO: 84422):VPQ:EPLP-AA¹⁷-VYY (SEQ ID NO: 84875):DDSSNVI (SEQ ID NO: 84965):EQLSN (SEQ ID NO: 84178):VRS:SXGXH (SEQ ID NO: 84304), YVPKPXX (SEQ ID NO: 84433):VPQ:EPLP-AA¹⁷-VYY (SEQ ID NO: 84875):DDSSNVI (SEQ ID NO: 84965):EQLSN (SEQ ID NO: 84178):VRS:SXGXH (SEQ ID NO: 84304), TVPKPXX (SEQ ID NO: 84432):VPQ:EPLP-AA¹⁷-VYY (SEQ ID NO: 84875):DDSSNVI (SEQ ID NO: 84965):EQLSN (SEQ ID NO: 84178):VRS:AXGXH (SEQ ID NO: 84147), AVPKAXX (SEQ ID NO: 84404):VPQ:EPLP-AA¹⁷-VYY (SEQ ID NO: 84875):DSSNNVI (SEQ ID NO: 84972):EQLSN (SEQ ID NO: 84178):VRS:AXGXH (SEQ ID NO: 84147), KVGKAXX (SEQ ID NO: 84425):VPQ:EPLP-AA¹⁷-VYY (SEQ ID NO: 84875):DDMGVPT (SEQ ID NO: 84964):EQLSN (SEQ ID NO: 84178):VRS:XGXR (SEQ ID NO: 84123), KASKAXX (SEQ ID NO: 84423):VPQ:EPLP-AA¹⁷-VYY (SEQ ID NO: 84875):DKGVVTY (SEQ ID NO: 84969):EQLSN (SEQ ID NO: 84178):VRS:EXGXR (SEQ ID NO: 84179), GSAGPXX (SEQ ID NO: 84420):VPQ:EPLP-AA¹⁷-VYY (SEQ ID NO: 84875):NDKQQII (SEQ ID NO: 84979):EQLSN (SEQ ID NO: 84178):VRS:RXGXS (SEQ ID NO: 84291), AAPASXX (SEQ ID NO: 84401):VPQ:EPLP-AA¹⁷-VYY (SEQ ID NO: 84875):DAANNVV (SEQ ID NO: 84963):EQLSN (SEQ ID NO: 84178):VRS:AXGXR (SEQ ID NO: 84148), STPPTXX (SEQ ID NO: 84431):VPQ:EPLP-AA¹⁷-VYY (SEQ ID NO: 84875):DSANNVV (SEQ ID NO: 84971):EQLSN (SEQ ID NO: 84178):VRS:SXGXR (SEQ ID NO: 84305), HVPKPXX (SEQ ID NO: 84421):VPQ:EPLP-AA¹⁷-VYY (SEQ ID NO: 84875):DDSSNVI (SEQ ID NO: 84965):EQLSN (SEQ ID NO: 84178):VRS:SXGXH (SEQ ID NO: 84304), RVPSTXX (SEQ ID NO: 84428):VPQ:EPLP-AA¹⁷-VYY (SEQ ID NO: 84875):DNGRVLL (SEQ ID NO: 84970):EQLSN (SEQ ID NO: 84178):VRS:XGXL (SEQ ID NO: 84122), ASASPXX (SEQ ID NO: 84403):VPQ:EPLP-AA¹⁷-VYY (SEQ ID NO: 84875):IGKTPKI (SEQ ID NO: 84978):EQLSN (SEQ ID NO: 84178):VRS:XKXS (SEQ ID NO: 84124), ASASPXX (SEQ ID NO: 84403):VPQ:EPLP-AA¹⁷-VYY (SEQ ID NO: 84875):VGRTPKV (SEQ ID NO: 84982):EQLSN (SEQ ID NO: 84178):VRS:XKXS (SEQ ID NO: 84124), KIPKAXX (SEQ ID NO: 84424):VPT:EPLP-AA¹⁷-VYY (SEQ ID NO: 84875):DENEKVV (SEQ ID NO: 84966):EQLSN (SEQ ID NO: 84178):VVE:GXGXR (SEQ ID NO: 84208), GIPEPXX (SEQ ID NO: 84419):VPE:EPLP-AA¹⁷-VYY (SEQ ID NO: 84875):DENKNVV (SEQ ID NO: 84967):EQLSN (SEQ ID NO: 84178):TVE:SXAXR (SEQ ID NO: 84303), SIPKAXX (SEQ ID NO: 84429):VPT:EPLP-AA¹⁷-VYY (SEQ ID NO: 84875):DEYDKVV (SEQ ID NO: 84968):EQLSN (SEQ ID NO: 84178):VVE:GXGXR (SEQ ID NO: 84208), HVTKPTX (SEQ ID NO: 84422):APT:EPLP-AA¹⁷-VYY (SEQ ID NO: 84875):DDSSNVI (SEQ ID NO: 84965):EQLSN (SEQ ID NO: 84178):VVR:SXGXH (SEQ ID NO: 84304), YVPKPXX (SEQ ID NO: 84433):APT:EPLP-AA¹⁷-VYY (SEQ ID NO: 84875):DDSSNVI (SEQ ID NO: 84965):EQLSN (SEQ ID NO: 84178):VVR:SXGXH (SEQ ID NO: 84304), TVPKPXX (SEQ ID NO: 84432):APT:EPLP-AA¹⁷-VYY (SEQ ID NO: 84875):DDSSNVI (SEQ ID NO: 84965):EQLSN (SEQ ID NO: 84178):VVR:AXGXH (SEQ ID NO: 84147), AVPKAXX (SEQ ID NO: 84404):APT:EPLP-AA¹⁷-VYY (SEQ ID NO: 84875):DSSNNVI (SEQ ID NO: 84972):EQLSN (SEQ ID NO: 84178):VVK:AXGXH (SEQ ID NO: 84147), KVGKAXX (SEQ ID NO: 84425):VPT:EPLP-AA¹⁷-VYY (SEQ ID NO: 84875):DDMGVPT (SEQ ID NO: 84964):EQLSN (SEQ ID NO: 84178):VAE:XGXR (SEQ ID NO: 84123), KASKAXX (SEQ ID NO: 84423):VPT:EPLP-AA¹⁷-VYY (SEQ ID NO: 84875):DKGVVTY (SEQ ID NO: 84969):EQLSN (SEQ ID NO: 84178):AVS:EXGXR (SEQ ID NO: 84179), GSAGPXX (SEQ ID NO: 84420):TPT:EPLP-AA¹⁷-VYY (SEQ ID NO: 84875):NDKQQII (SEQ ID NO: 84979):EQLSN (SEQ ID NO: 84178):VVD:RXGXS (SEQ ID NO: 84291), AAPASXX (SEQ ID NO: 84401):VPA:EPLP-AA¹⁷-VYY (SEQ ID NO: 84875):DAANNVV (SEQ ID NO: 84963):EQLSN (SEQ ID NO: 84178):VVE:AXGXR (SEQ ID NO: 84148), STPPTXX (SEQ ID NO: 84431):VPT:EPLP-AA¹⁷-VYY (SEQ ID NO: 84875):DSANNVV (SEQ ID NO: 84971):EQLSN (SEQ ID NO: 84178):VVE:SXGXR (SEQ ID NO: 84305), HVPKPXX (SEQ ID NO: 84421):APT:EPLP-AA¹⁷-VYY (SEQ ID NO: 84875):DDSSNVI (SEQ ID NO: 84965):EQLSN (SEQ ID NO: 84178):VVR:SXGXH (SEQ ID NO: 84304), RVPSTXX (SEQ ID NO: 84428):APV:EPLP-AA¹⁷-VYY (SEQ ID NO: 84875):DNGRVLL (SEQ ID NO: 84970):EQLSN (SEQ ID NO: 84178):VEE:XGXL (SEQ ID NO: 84122), ASASPXX (SEQ ID NO: 84403):VSQ:EPLP-AA¹⁷-VYY (SEQ ID NO: 84875):IGKTPKI (SEQ ID NO: 84978):EQLSN (SEQ ID NO: 84178):VKS:XKXS (SEQ ID NO: 84124), ASASPXX (SEQ ID NO: 84403):VPQ:EPLP-AA¹⁷-VYY (SEQ ID NO: 84875):VGRTPKV (SEQ ID NO: 84982):EQLSN (SEQ ID NO: 84178):VKS:XKXS (SEQ ID NO: 84124), NDEGLEX (SEQ ID NO: 84426):VPT:EPLP-AA¹⁷-VYY (SEQ ID NO: 84875):RIKPHQGQH (SEQ ID NO: 84980):EQLSN (SEQ ID NO: 84178):QHN:KXEXR (SEQ ID NO: 84213), NDEGLEX (SEQ ID NO: 84426):VPT:EPLP-AA¹⁷-VYY (SEQ ID NO: 84875):RIKPHQGQH (SEQ ID NO: 84980):EQLSN (SEQ ID NO: 84178):EHS:QXEXR (SEQ ID NO: 84276), SSVKXQP (SEQ ID NO: 84430):SRV:EPLP-AA¹⁷-VYY (SEQ ID NO: 84875):EYVRKKPKL (SEQ ID NO: 84974):EQLSN (SEQ ID NO: 84178):EEH:LEXAXA (SEQ ID NO: 84400), RNVQXRP (SEQ ID NO: 84427):TQV:EPLP-AA¹⁷-VYY (SEQ ID NO: 84875):EIVRKKPIF (SEQ ID NO: 84973):EQLSN (SEQ ID NO: 84178):EDH:LAXKXE (SEQ ID NO: 84399), KIPKAXX (SEQ ID NO: 84424):VSQ:EPLT-AA¹⁷-LYY (SEQ ID NO: 84876):DENEKVV (SEQ ID NO: 84966):EQLSN (SEQ ID NO: 84178):VKS:GXGXR (SEQ ID NO: 84208), GIPEPXX (SEQ ID NO: 84419):VSQ:EPLT-AA¹⁷-LYY (SEQ ID NO: 84876):DENKNVV (SEQ ID NO: 84967):EQLSN (SEQ ID NO: 84178):VKS:SXAXR (SEQ ID NO: 84303), SIPKAXX (SEQ ID NO: 84429):VSQ:EPLT-AA¹⁷-LYY (SEQ ID NO: 84876):DEYDKVV (SEQ ID NO: 84968):EQLSN (SEQ ID NO: 84178):VKS:GXGXR (SEQ ID NO: 84208), HVTKPTX (SEQ ID NO: 84422):VSQ:EPLT-AA¹⁷-LYY (SEQ ID NO: 84876):DDSSNVI (SEQ ID NO: 84965):EQLSN (SEQ ID NO: 84178):VKS:SXGXH (SEQ ID NO: 84304), YVPKPXX (SEQ ID NO: 84433):VSQ:EPLT-AA¹⁷-LYY (SEQ ID NO: 84876):DDSSNVI (SEQ ID NO: 84965):EQLSN (SEQ ID NO: 84178):VKS:SXGXH (SEQ ID NO: 84304), TVPKPXX (SEQ ID NO: 84432):VSQ:EPLT-AA¹⁷-LYY (SEQ ID NO: 84876):DDSSNVI (SEQ ID NO: 84965):EQLSN (SEQ ID NO: 84178):VKS:AXGXH (SEQ ID NO: 84147), AVPKAXX (SEQ ID NO: 84404):VSQ:EPLT-AA¹⁷-LYY (SEQ ID NO: 84876):DSSNNVI (SEQ ID NO: 84972):EQLSN (SEQ ID NO: 84178):VKS:AXGXH (SEQ ID NO: 84147), KVGKAXX (SEQ ID NO: 84425):VSQ:EPLT-AA¹⁷-LYY (SEQ ID NO: 84876):DDMGVPT (SEQ ID NO: 84964):EQLSN (SEQ ID NO: 84178):VKS:XGXR (SEQ ID NO: 84123), KASKAXX (SEQ ID NO: 84423):VSQ:EPLT-AA¹⁷-LYY (SEQ ID NO: 84876):DKGVVTY (SEQ ID NO: 84969):EQLSN (SEQ ID NO: 84178):VKS:EXGXR (SEQ ID NO: 84179), GSAGPXX (SEQ ID NO: 84420):VSQ:EPLT-AA¹⁷-LYY (SEQ ID NO: 84876):NDKQQII (SEQ ID NO: 84979):EQLSN (SEQ ID NO: 84178):VKS:RXGXS (SEQ ID NO: 84291), AAPASXX (SEQ ID NO: 84401):VSQ:EPLT-AA¹⁷-LYY (SEQ ID NO: 84876):DAANNVV (SEQ ID NO: 84963):EQLSN (SEQ ID NO: 84178):VKS:AXGXR (SEQ ID NO: 84148), STPPTXX (SEQ ID NO: 84431):VSQ:EPLT-AA¹⁷-LYY (SEQ ID NO: 84876):DSANNVV (SEQ ID NO: 84971):EQLSN (SEQ ID NO: 84178):VKS:SXGXR (SEQ ID NO: 84305), HVPKPXX (SEQ ID NO: 84421):VSQ:EPLT-AA¹⁷-LYY (SEQ ID NO: 84876):DDSSNVI (SEQ ID NO: 84965):EQLSN (SEQ ID NO: 84178):VKS:SXGXH (SEQ ID NO: 84304), RVPSTXX (SEQ ID NO: 84428):VSQ:EPLT-AA¹⁷-LYY (SEQ ID NO: 84876):DNGRVLL (SEQ ID NO: 84970):EQLSN (SEQ ID NO: 84178):VKS:XGXL (SEQ ID NO: 84122), ASAAPXX (SEQ ID NO: 84402):VSQ:EPLT-AA¹⁷-LYY (SEQ ID NO: 84876):VGRKPKV (SEQ ID NO: 84981):EQLSN (SEQ ID NO: 84178):VKS:XKXS (SEQ ID NO: 84124), ASASPXX (SEQ ID NO: 84403):VSQ:EPLT-AA¹⁷-LYY (SEQ ID NO: 84876):VGRTPKV (SEQ ID NO: 84982):EQLSN (SEQ ID NO: 84178):VKS:XKXS (SEQ ID NO: 84124), KIPKAXX (SEQ ID NO: 84424):VPT:EPLT-AA¹⁷-LYY (SEQ ID NO: 84876):DENEKVV (SEQ ID NO: 84966):EQLSN (SEQ ID NO: 84178):VVE:GXGXR (SEQ ID NO: 84208), GIPEPXX (SEQ ID NO: 84419):VPE:EPLT-AA¹⁷-LYY (SEQ ID NO: 84876):DENKNVV (SEQ ID NO: 84967):EQLSN (SEQ ID NO: 84178):TVE:SXAXR (SEQ ID NO: 84303), SIPKAXX (SEQ ID NO: 84429):VPT:EPLT-AA¹⁷-LYY (SEQ ID NO: 84876):DEYDKVV (SEQ ID NO: 84968):EQLSN (SEQ ID NO: 84178):VVE:GXGXR (SEQ ID NO: 84208), HVTKPTX (SEQ ID NO: 84422):APT:EPLT-AA¹⁷-LYY (SEQ ID NO: 84876):DDSSNVI (SEQ ID NO: 84965):EQLSN (SEQ ID NO: 84178):VVR:SXGXH (SEQ ID NO: 84304), YVPKPXX (SEQ ID NO: 84433):APT:EPLT-AA¹⁷-LYY (SEQ ID NO: 84876):DDSSNVI (SEQ ID NO: 84965):EQLSN (SEQ ID NO: 84178):VVR:SXGXH (SEQ ID NO: 84304), TVPKPXX (SEQ ID NO: 84432):APT:EPLT-AA¹⁷-LYY (SEQ ID NO: 84876):DDSSNVI (SEQ ID NO: 84965):EQLSN (SEQ ID NO: 84178):VVR:AXGXH (SEQ ID NO: 84147), AVPKAXX (SEQ ID NO: 84404):APT:EPLT-AA¹⁷-LYY (SEQ ID NO: 84876):DSSNNVI (SEQ ID NO: 84972):EQLSN (SEQ ID NO: 84178):VVK:AXGXH (SEQ ID NO: 84147), KVGKAXX (SEQ ID NO: 84425):VPT:EPLT-AA¹⁷-LYY (SEQ ID NO: 84876):DDMGVPT (SEQ ID NO: 84964):EQLSN (SEQ ID NO: 84178):VAE:XGXR (SEQ ID NO: 84123), KASKAXX (SEQ ID NO: 84423):VPT:EPLT-AA¹⁷-LYY (SEQ ID NO: 84876):DKGVVTY (SEQ ID NO: 84969):EQLSN (SEQ ID NO: 84178):AVS:EXGXR (SEQ ID NO: 84179), GSAGPXX (SEQ ID NO: 84420):TPT:EPLT-AA¹⁷-LYY (SEQ ID NO: 84876):NDKQQII (SEQ ID NO: 84979):EQLSN (SEQ ID NO: 84178):VVD:RXGXS (SEQ ID NO: 84291), AAPASXX (SEQ ID NO: 84401):VPA:EPLT-AA¹⁷-LYY (SEQ ID NO: 84876):DAANNVV (SEQ ID NO: 84963):EQLSN (SEQ ID NO: 84178):VVE:AXGXR (SEQ ID NO: 84148), STPPTXX (SEQ ID NO: 84431):VPT:EPLT-AA¹⁷-LYY (SEQ ID NO: 84876):DSANNVV (SEQ ID NO: 84971):EQLSN (SEQ ID NO: 84178):VVE:SXGXR (SEQ ID NO: 84305), HVPKPXX (SEQ ID NO: 84421):APT:EPLT-AA¹⁷-LYY (SEQ ID NO: 84876):DDSSNVI (SEQ ID NO: 84965):EQLSN (SEQ ID NO: 84178):VVR:SXGXH (SEQ ID NO: 84304), RVPSTXX (SEQ ID NO: 84428):APV:EPLT-AA¹⁷-LYY (SEQ ID NO: 84876):DNGRVLL (SEQ ID NO: 84970):EQLSN (SEQ ID NO: 84178):VEE:XGXL (SEQ ID NO: 84122), ASAAPXX (SEQ ID NO: 84402):VPQ:EPLT-AA¹⁷-LYY (SEQ ID NO: 84876):VGRKPKV (SEQ ID NO: 84981):EQLSN (SEQ ID NO: 84178):VRS:XKXS (SEQ ID NO: 84124), NDEGLEX (SEQ ID NO: 84426):VPT:EPLT-AA¹⁷-LYY (SEQ ID NO: 84876):RIKPHQGQH (SEQ ID NO: 84980):EQLSN (SEQ ID NO: 84178):QHN:KXEXR (SEQ ID NO: 84213), NDEGLEX (SEQ ID NO: 84426):VPT:EPLT-AA¹⁷-LYY (SEQ ID NO: 84876):RIKPHQGQH (SEQ ID NO: 84980):EQLSN (SEQ ID NO: 84178):EHS:QXEXR (SEQ ID NO: 84276), SSVKXQP (SEQ ID NO: 84430):SRV:EPLT-AA¹⁷-LYY (SEQ ID NO: 84876):EYVRKKPKL (SEQ ID NO: 84974):EQLSN (SEQ ID NO: 84178):EEH:LEXAXA (SEQ ID NO: 84400), RNVQXRP (SEQ ID NO: 84427):TQV:EPLT-AA¹⁷-LYY (SEQ ID NO: 84876):EIVRKKPIF (SEQ ID NO: 84973):EQLSN (SEQ ID NO: 84178):EDH:LAXKXE (SEQ ID NO: 84399), KIPKAXX (SEQ ID NO: 84424):VPQ:EPLT-AA¹⁷-LYY (SEQ ID NO: 84876):DENEKVV (SEQ ID NO: 84966):EQLSN (SEQ ID NO: 84178):VKS:GXGXR (SEQ ID NO: 84208), GIPEPXX (SEQ ID NO: 84419):VPQ:EPLT-AA¹⁷-LYY (SEQ ID NO: 84876):DENKNVV (SEQ ID NO: 84967):EQLSN (SEQ ID NO: 84178):VKS:SXAXR (SEQ ID NO: 84303), SIPKAXX (SEQ ID NO: 84429):VPQ:EPLT-AA¹⁷-LYY (SEQ ID NO: 84876):DEYDKVV (SEQ ID NO: 84968):EQLSN (SEQ ID NO: 84178):VKS:GXGXR (SEQ ID NO: 84208), HVTKPTX (SEQ ID NO: 84422):VPQ:EPLT-AA¹⁷-LYY (SEQ ID NO: 84876):DDSSNVI (SEQ ID NO: 84965):EQLSN (SEQ ID NO: 84178):VKS:SXGXH (SEQ ID NO: 84304), YVPKPXX (SEQ ID NO: 84433):VPQ:EPLT-AA¹⁷-LYY (SEQ ID NO: 84876):DDSSNVI (SEQ ID NO: 84965):EQLSN (SEQ ID NO: 84178):VKS:SXGXH (SEQ ID NO: 84304), TVPKPXX (SEQ ID NO: 84432):VPQ:EPLT-AA¹⁷-LYY (SEQ ID NO: 84876):DDSSNVI (SEQ ID NO: 84965):EQLSN (SEQ ID NO: 84178):VKS:AXGXH (SEQ ID NO: 84147), AVPKAXX (SEQ ID NO: 84404):VPQ:EPLT-AA¹⁷-LYY (SEQ ID NO: 84876):DSSNNVI (SEQ ID NO: 84972):EQLSN (SEQ ID NO: 84178):VKS:AXGXH (SEQ ID NO: 84147), KVGKAXX (SEQ ID NO: 84425):VPQ:EPLT-AA¹⁷-LYY (SEQ ID NO: 84876):DDMGVPT (SEQ ID NO: 84964):EQLSN (SEQ ID NO: 84178):VKS:XGXR (SEQ ID NO: 84123), KASKAXX (SEQ ID NO: 84423):VPQ:EPLT-AA¹⁷-LYY (SEQ ID NO: 84876):DKGVVTY (SEQ ID NO: 84969):EQLSN (SEQ ID NO: 84178):VKS:EXGXR (SEQ ID NO: 84179), GSAGPXX (SEQ ID NO: 84420):VPQ:EPLT-AA¹⁷-LYY (SEQ ID NO: 84876):NDKQQII (SEQ ID NO: 84979):EQLSN (SEQ ID NO: 84178):VKS:RXGXS (SEQ ID NO: 84291), AAPASXX (SEQ ID NO: 84401):VPQ:EPLT-AA¹⁷-LYY (SEQ ID NO: 84876):DAANNVV (SEQ ID NO: 84963):EQLSN (SEQ ID NO: 84178):VKS:AXGXR (SEQ ID NO: 84148), STPPTXX (SEQ ID NO: 84431):VPQ:EPLT-AA¹⁷-LYY (SEQ ID NO: 84876):DSANNVV (SEQ ID NO: 84971):EQLSN (SEQ ID NO: 84178):VKS:SXGXR (SEQ ID NO: 84305), HVPKPXX (SEQ ID NO: 84421):VPQ:EPLT-AA¹⁷-LYY (SEQ ID NO: 84876):DDSSNVI (SEQ ID NO: 84965):EQLSN (SEQ ID NO: 84178):VKS:SXGXH (SEQ ID NO: 84304), RVPSTXX (SEQ ID NO: 84428):VPQ:EPLT-AA¹⁷-LYY (SEQ ID NO: 84876):DNGRVLL (SEQ ID NO: 84970):EQLSN (SEQ ID NO: 84178):VKS:XGXL (SEQ ID NO: 84122), ASAAPXX (SEQ ID NO: 84402):VPQ:EPLT-AA¹⁷-LYY (SEQ ID NO: 84876):VGRKPKV (SEQ ID NO: 84981):EQLSN (SEQ ID NO: 84178):VKS:XKXS (SEQ ID NO: 84124), ASASPXX (SEQ ID NO: 84403):VPQ:EPLT-AA¹⁷-LYY (SEQ ID NO: 84876):IGKTPKI (SEQ ID NO: 84978):EQLSN (SEQ ID NO: 84178):VKS:XKXS (SEQ ID NO: 84124), NDEGLEX (SEQ ID NO: 84426):VPT:SNIT-AA¹⁷-QIM (SEQ ID NO: 84883):RIKPHQGQH (SEQ ID NO: 84980):IGEMS (SEQ ID NO: 84209):QHN:QXEXR (SEQ ID NO: 84276), KIPKAXX (SEQ ID NO: 84424):VPT:SNIT-AA¹⁷-QIM (SEQ ID NO: 84883):DENEKVV (SEQ ID NO: 84966):IGEMS (SEQ ID NO: 84209):VVE:GXGXR (SEQ ID NO: 84208), GIPEPXX (SEQ ID NO: 84419):VPE:SNIT-AA¹⁷-QIM (SEQ ID NO: 84883):DENKNVV (SEQ ID NO: 84967):IGEMS (SEQ ID NO: 84209):TVE:SXAXR (SEQ ID NO: 84303), SIPKAXX (SEQ ID NO: 84429):VPT:SNIT-AA¹⁷-QIM (SEQ ID NO: 84883):DEYDKVV (SEQ ID NO: 84968):IGEMS (SEQ ID NO: 84209):VVE:GXGXR (SEQ ID NO: 84208), HVTKPTX (SEQ ID NO: 84422):APT:SNIT-AA¹⁷-QIM (SEQ ID NO: 84883):DDSSNVI (SEQ ID NO: 84965):IGEMS (SEQ ID NO: 84209):VVR:SXGXH (SEQ ID NO: 84304), YVPKPXX (SEQ ID NO: 84433):APT:SNIT-AA¹⁷-QIM (SEQ ID NO: 84883):DDSSNVI (SEQ ID NO: 84965):IGEMS (SEQ ID NO: 84209):VVR:SXGXH (SEQ ID NO: 84304), TVPKPXX (SEQ ID NO: 84432):APT:SNIT-AA¹⁷-QIM (SEQ ID NO: 84883):DDSSNVI (SEQ ID NO: 84965):IGEMS (SEQ ID NO: 84209):VVR:AXGXH (SEQ ID NO: 84147), AVPKAXX (SEQ ID NO: 84404):APT:SNIT-AA¹⁷-QIM (SEQ ID NO: 84883):DSSNNVI (SEQ ID NO: 84972):IGEMS (SEQ ID NO: 84209):VVK:AXGXH (SEQ ID NO: 84147), KVGKAXX (SEQ ID NO: 84425):VPT:SNIT-AA¹⁷-QIM (SEQ ID NO: 84883):DDMGVPT (SEQ ID NO: 84964):IGEMS (SEQ ID NO: 84209):VAE:XGXR (SEQ ID NO: 84123), KASKAXX (SEQ ID NO: 84423):VPT:SNIT-AA¹⁷-QIM (SEQ ID NO: 84883):DKGVVTY (SEQ ID NO: 84969):IGEMS (SEQ ID NO: 84209):AVS:EXGXR (SEQ ID NO: 84179), GSAGPXX (SEQ ID NO: 84420):TPT:SNIT-AA¹⁷-QIM (SEQ ID NO: 84883):NDKQQII (SEQ ID NO: 84979):IGEMS (SEQ ID NO: 84209):VVD:RXGXS (SEQ ID NO: 84291), AAPASXX (SEQ ID NO: 84401):VPA:SNIT-AA¹⁷-QIM (SEQ ID NO: 84883):DAANNVV (SEQ ID NO: 84963):IGEMS (SEQ ID NO: 84209):VVE:AXGXR (SEQ ID NO: 84148), STPPTXX (SEQ ID NO: 84431):VPT:SNIT-AA¹⁷-QIM (SEQ ID NO: 84883):DSANNVV (SEQ ID NO: 84971):IGEMS (SEQ ID NO: 84209):VVE:SXGXR (SEQ ID NO: 84305), HVPKPXX (SEQ ID NO: 84421):APT:SNIT-AA¹⁷-QIM (SEQ ID NO: 84883):DDSSNVI (SEQ ID NO: 84965):IGEMS (SEQ ID NO: 84209):VVR:SXGXH (SEQ ID NO: 84304), RVPSTXX (SEQ ID NO: 84428):APV:SNIT-AA¹⁷-QIM (SEQ ID NO: 84883):DNGRVLL (SEQ ID NO: 84970):IGEMS (SEQ ID NO: 84209):VEE:XGXL (SEQ ID NO: 84122), ASAAPXX (SEQ ID NO: 84402):VPQ:SNIT-AA¹⁷-QIM (SEQ ID NO: 84883):VGRKPKV (SEQ ID NO: 84981):IGEMS (SEQ ID NO: 84209):VRS:XKXS (SEQ ID NO: 84124), ASASPXX (SEQ ID NO: 84403):VSQ:SNIT-AA¹⁷-QIM (SEQ ID NO: 84883):IGKTPKI (SEQ ID NO: 84978):IGEMS (SEQ ID NO: 84209):VKS:XKXS (SEQ ID NO: 84124), ASASPXX (SEQ ID NO: 84403):VPQ:SNIT-AA¹⁷-QIM (SEQ ID NO: 84883):VGRTPKV (SEQ ID NO: 84982):IGEMS (SEQ ID NO: 84209):VKS:XKXS (SEQ ID NO: 84124), NDEGLEX (SEQ ID NO: 84426):VPT:SNIT-AA¹⁷-QIM (SEQ ID NO: 84883):RIKPHQGQH (SEQ ID NO: 84980):IGEMS (SEQ ID NO: 84209):EHS:QXEXR (SEQ ID NO: 84276), SSVKXQP (SEQ ID NO: 84430):SRV:SNIT-AA¹⁷-QIM (SEQ ID NO: 84883):EYVRKKPKL (SEQ ID NO: 84974):IGEMS (SEQ ID NO: 84209):EEH:LEXAXA (SEQ ID NO: 84400), RNVQXRP (SEQ ID NO: 84427):TQV:SNIT-AA¹⁷-QIM (SEQ ID NO: 84883):EIVRKKPIF (SEQ ID NO: 84973):IGEMS (SEQ ID NO: 84209):EDH:LAXKXE (SEQ ID NO: 84399), NDEGLEX (SEQ ID NO: 84426):VPT:SNIT-AA¹⁷-QIM (SEQ ID NO: 84883):RIKPHQGQH (SEQ ID NO: 84980):LGEMS (SEQ ID NO: 84228):EHS:KXEXR (SEQ ID NO: 84213), KIPKAXX (SEQ ID NO: 84424):VPT:SNIT-AA¹⁷-QIM (SEQ ID NO: 84883):DENEKVV (SEQ ID NO: 84966):LGEMS (SEQ ID NO: 84228):VVE:GXGXR (SEQ ID NO: 84208), GIPEPXX (SEQ ID NO: 84419):VPE:SNIT-AA¹⁷-QIM (SEQ ID NO: 84883):DENKNVV (SEQ ID NO: 84967):LGEMS (SEQ ID NO: 84228):TVE:SXAXR (SEQ ID NO: 84303), SIPKAXX (SEQ ID NO: 84429):VPT:SNIT-AA¹⁷-QIM (SEQ ID NO: 84883):DEYDKVV (SEQ ID NO: 84968):LGEMS (SEQ ID NO: 84228):VVE:GXGXR (SEQ ID NO: 84208), HVTKPTX (SEQ ID NO: 84422):APT:SNIT-AA¹⁷-QIM (SEQ ID NO: 84883):DDSSNVI (SEQ ID NO: 84965):LGEMS (SEQ ID NO: 84228):VVR:SXGXH (SEQ ID NO: 84304), YVPKPXX (SEQ ID NO: 84433):APT:SNIT-AA¹⁷-QIM (SEQ ID NO: 84883):DDSSNVI (SEQ ID NO: 84965):LGEMS (SEQ ID NO: 84228):VVR:SXGXH (SEQ ID NO: 84304), TVPKPXX (SEQ ID NO: 84432):APT:SNIT-AA¹⁷-QIM (SEQ ID NO: 84883):DDSSNVI (SEQ ID NO: 84965):LGEMS (SEQ ID NO: 84228):VVR:AXGXH (SEQ ID NO: 84147), AVPKAXX (SEQ ID NO: 84404):APT:SNIT-AA¹⁷-QIM (SEQ ID NO: 84883):DSSNNVI (SEQ ID NO: 84972):LGEMS (SEQ ID NO: 84228):VVK:AXGXH (SEQ ID NO: 84147), KVGKAXX (SEQ ID NO: 84425):VPT:SNIT-AA¹⁷-QIM (SEQ ID NO: 84883):DDMGVPT (SEQ ID NO: 84964):LGEMS (SEQ ID NO: 84228):VAE:XGXR (SEQ ID NO: 84123), KASKAXX (SEQ ID NO: 84423):VPT:SNIT-AA¹⁷-QIM (SEQ ID NO: 84883):DKGVVTY (SEQ ID NO: 84969):LGEMS (SEQ ID NO: 84228):AVS:EXGXR (SEQ ID NO: 84179), GSAGPXX (SEQ ID NO: 84420):TPT:SNIT-AA¹⁷-QIM (SEQ ID NO: 84883):NDKQQII (SEQ ID NO: 84979):LGEMS (SEQ ID NO: 84228):VVD:RXGXS (SEQ ID NO: 84291), AAPASXX (SEQ ID NO: 84401):VPA:SNIT-AA¹⁷-QIM (SEQ ID NO: 84883):DAANNVV (SEQ ID NO: 84963):LGEMS (SEQ ID NO: 84228):VVE:AXGXR (SEQ ID NO: 84148), STPPTXX (SEQ ID NO: 84431):VPT:SNIT-AA¹⁷-QIM (SEQ ID NO: 84883):DSANNVV (SEQ ID NO: 84971):LGEMS (SEQ ID NO: 84228):VVE:SXGXR (SEQ ID NO: 84305), HVPKPXX (SEQ ID NO: 84421):APT:SNIT-AA¹⁷-QIM (SEQ ID NO: 84883):DDSSNVI (SEQ ID NO: 84965):LGEMS (SEQ ID NO: 84228):VVR:SXGXH (SEQ ID NO: 84304), RVPSTXX (SEQ ID NO: 84428):APV:SNIT-AA¹⁷-QIM (SEQ ID NO: 84883):DNGRVLL (SEQ ID NO: 84970):LGEMS (SEQ ID NO: 84228):VEE:XGXL (SEQ ID NO: 84122), ASAAPXX (SEQ ID NO: 84402):VPQ:SNIT-AA¹⁷-QIM (SEQ ID NO: 84883):VGRKPKV (SEQ ID NO: 84981):LGEMS (SEQ ID NO: 84228):VRS:XKXS (SEQ ID NO: 84124), ASASPXX (SEQ ID NO: 84403):VSQ:SNIT-AA¹⁷-QIM (SEQ ID NO: 84883):IGKTPKI (SEQ ID NO: 84978):LGEMS (SEQ ID NO: 84228):VKS:XKXS (SEQ ID NO: 84124), ASASPXX (SEQ ID NO: 84403):VPQ:SNIT-AA¹⁷-QIM (SEQ ID NO: 84883):VGRTPKV (SEQ ID NO: 84982):LGEMS (SEQ ID NO: 84228):VKS:XKXS (SEQ ID NO: 84124), NDEGLEX (SEQ ID NO: 84426):VPT:SNIT-AA¹⁷-QIM (SEQ ID NO: 84883):RIKPHQGQH (SEQ ID NO: 84980):LGEMS (SEQ ID NO: 84228):QHN:KXEXR (SEQ ID NO: 84213), SSVKXQP (SEQ ID NO: 84430):SRV:SNIT-AA¹⁷-QIM (SEQ ID NO: 84883):EYVRKKPKL (SEQ ID NO: 84974):LGEMS (SEQ ID NO: 84228):EEH:LEXAXA (SEQ ID NO: 84400), RNVQXRP (SEQ ID NO: 84427):TQV:SNIT-AA¹⁷-QIM (SEQ ID NO: 84883):EIVRKKPIF (SEQ ID NO: 84973):LGEMS (SEQ ID NO: 84228):EDH:LAXKXE (SEQ ID NO: 84399), RNVQXRP (SEQ ID NO: 84427):SRV:RSVK-AA¹⁷-AKV (SEQ ID NO: 84880):EIVRKKPIF (SEQ ID NO: 84973):KEVQV (SEQ ID NO: 84210):EEH:LAXKXE (SEQ ID NO: 84399), KIPKAXX (SEQ ID NO: 84424):VPT:RSVK-AA¹⁷-AKV (SEQ ID NO: 84880):DENEKVV (SEQ ID NO: 84966):KEVQV (SEQ ID NO: 84210):VVE:GXGXR (SEQ ID NO: 84208), GIPEPXX (SEQ ID NO: 84419):VPE:RSVK-AA¹⁷-AKV (SEQ ID NO: 84880):DENKNVV (SEQ ID NO: 84967):KEVQV (SEQ ID NO: 84210):TVE:SXAXR (SEQ ID NO: 84303), SIPKAXX (SEQ ID NO: 84429):VPT:RSVK-AA¹⁷-AKV (SEQ ID NO: 84880):DEYDKVV (SEQ ID NO: 84968):KEVQV (SEQ ID NO: 84210):VVE:GXGXR (SEQ ID NO: 84208), HVTKPTX (SEQ ID NO: 84422):APT:RSVK-AA¹⁷-AKV (SEQ ID NO: 84880):DDSSNVI (SEQ ID NO: 84965):KEVQV (SEQ ID NO: 84210):VVR:SXGXH (SEQ ID NO: 84304), YVPKPXX (SEQ ID NO: 84433):APT:RSVK-AA¹⁷-AKV (SEQ ID NO: 84880):DDSSNVI (SEQ ID NO: 84965):KEVQV (SEQ ID NO: 84210):VVR:SXGXH (SEQ ID NO: 84304), TVPKPXX (SEQ ID NO: 84432):APT:RSVK-AA¹⁷-AKV (SEQ ID NO: 84880):DDSSNVI (SEQ ID NO: 84965):KEVQV (SEQ ID NO: 84210):VVR:AXGXH (SEQ ID NO: 84147), AVPKAXX (SEQ ID NO: 84404):APT:RSVK-AA¹⁷-AKV (SEQ ID NO: 84880):DSSNNVI (SEQ ID NO: 84972):KEVQV (SEQ ID NO: 84210):VVK:AXGXH (SEQ ID NO: 84147), KVGKAXX (SEQ ID NO: 84425):VPT:RSVK-AA¹⁷-AKV (SEQ ID NO: 84880):DDMGVPT (SEQ ID NO: 84964):KEVQV (SEQ ID NO: 84210):VAE:XGXR (SEQ ID NO: 84123), KASKAXX (SEQ ID NO: 84423):VPT:RSVK-AA¹⁷-AKV (SEQ ID NO: 84880):DKGVVTY (SEQ ID NO: 84969):KEVQV (SEQ ID NO: 84210):AVS:EXGXR (SEQ ID NO: 84179), GSAGPXX (SEQ ID NO: 84420):TPT:RSVK-AA¹⁷-AKV (SEQ ID NO: 84880):NDKQQII (SEQ ID NO: 84979):KEVQV (SEQ ID NO: 84210):VVD:RXGXS (SEQ ID NO: 84291), AAPASXX (SEQ ID NO: 84401):VPA:RSVK-AA¹⁷-AKV (SEQ ID NO: 84880):DAANNVV (SEQ ID NO: 84963):KEVQV (SEQ ID NO: 84210):VVE:AXGXR (SEQ ID NO: 84148), STPPTXX (SEQ ID NO: 84431):VPT:RSVK-AA¹⁷-AKV (SEQ ID NO: 84880):DSANNVV (SEQ ID NO: 84971):KEVQV (SEQ ID NO: 84210):VVE:SXGXR (SEQ ID NO: 84305), HVPKPXX (SEQ ID NO: 84421):APT:RSVK-AA¹⁷-AKV (SEQ ID NO: 84880):DDSSNVI (SEQ ID NO: 84965):KEVQV (SEQ ID NO: 84210):VVR:SXGXH (SEQ ID NO: 84304), RVPSTXX (SEQ ID NO: 84428):APV:RSVK-AA¹⁷-AKV (SEQ ID NO: 84880):DNGRVLL (SEQ ID NO: 84970):KEVQV (SEQ ID NO: 84210):VEE:XGXL (SEQ ID NO: 84122), ASAAPXX (SEQ ID NO: 84402):VPQ:RSVK-AA¹⁷-AKV (SEQ ID NO: 84880):VGRKPKV (SEQ ID NO: 84981):KEVQV (SEQ ID NO: 84210):VRS:XKXS (SEQ ID NO: 84124), ASASPXX (SEQ ID NO: 84403):VSQ:RSVK-AA¹⁷-AKV (SEQ ID NO: 84880):IGKTPKI (SEQ ID NO: 84978):KEVQV (SEQ ID NO: 84210):VKS:XKXS (SEQ ID NO: 84124), ASASPXX (SEQ ID NO: 84403):VPQ:RSVK-AA¹⁷-AKV (SEQ ID NO: 84880):VGRTPKV (SEQ ID NO: 84982):KEVQV (SEQ ID NO: 84210):VKS:XKXS (SEQ ID NO: 84124), NDEGLEX (SEQ ID NO: 84426):VPT:RSVK-AA¹⁷-AKV (SEQ ID NO: 84880):RIKPHQGQH (SEQ ID NO: 84980):KEVQV (SEQ ID NO: 84210):QHN:KXEXR (SEQ ID NO: 84213), NDEGLEX (SEQ ID NO: 84426):VPT:RSVK-AA¹⁷-AKV (SEQ ID NO: 84880):RIKPHQGQH (SEQ ID NO: 84980):KEVQV (SEQ ID NO: 84210):EHS:QXEXR (SEQ ID NO: 84276), RNVQXRP (SEQ ID NO: 84427):TQV:RSVK-AA¹⁷-AKV (SEQ ID NO: 84880):EIVRKKPIF (SEQ ID NO: 84973):KEVQV (SEQ ID NO: 84210):EDH:LAXKXE (SEQ ID NO: 84399), SSVKXQP (SEQ ID NO: 84430):TQV:RPVQ-AA¹⁷-RKI (SEQ ID NO: 84879):EYVRKKPKL (SEQ ID NO: 84974):KKATV (SEQ ID NO: 84212):EDH:LEXAXA (SEQ ID NO: 84400), KIPKAXX (SEQ ID NO: 84424):VPT:RPVQ-AA¹⁷-RKI (SEQ ID NO: 84879):DENEKVV (SEQ ID NO: 84966):KKATV (SEQ ID NO: 84212):VVE:GXGXR (SEQ ID NO: 84208), GIPEPXX (SEQ ID NO: 84419):VPE:RPVQ-AA¹⁷-RKI (SEQ ID NO: 84879):DENKNVV (SEQ ID NO: 84967):KKATV (SEQ ID NO: 84212):TVE:SXAXR (SEQ ID NO: 84303), SIPKAXX (SEQ ID NO: 84429):VPT:RPVQ-AA¹⁷-RKI (SEQ ID NO: 84879):DEYDKVV (SEQ ID NO: 84968):KKATV (SEQ ID NO: 84212):VVE:GXGXR (SEQ ID NO: 84208), HVTKPTX (SEQ ID NO: 84422):APT:RPVQ-AA¹⁷-RKI (SEQ ID NO: 84879):DDSSNVI (SEQ ID NO: 84965):KKATV (SEQ ID NO: 84212):VVR:SXGXH (SEQ ID NO: 84304), YVPKPXX (SEQ ID NO: 84433):APT:RPVQ-AA¹⁷-RKI (SEQ ID NO: 84879):DDSSNVI (SEQ ID NO: 84965):KKATV (SEQ ID NO: 84212):VVR:SXGXH (SEQ ID NO: 84304), TVPKPXX (SEQ ID NO: 84432):APT:RPVQ-AA¹⁷-RKI (SEQ ID NO: 84879):DDSSNVI (SEQ ID NO: 84965):KKATV (SEQ ID NO: 84212):VVR:AXGXH (SEQ ID NO: 84147), AVPKAXX (SEQ ID NO: 84404):APT:RPVQ-AA¹⁷-RKI (SEQ ID NO: 84879):DSSNNVI (SEQ ID NO: 84972):KKATV (SEQ ID NO: 84212):VVK:AXGXH (SEQ ID NO: 84147), KVGKAXX (SEQ ID NO: 84425):VPT:RPVQ-AA¹⁷-RKI (SEQ ID NO: 84879):DDMGVPT (SEQ ID NO: 84964):KKATV (SEQ ID NO: 84212):VAE:XGXR (SEQ ID NO: 84123), KASKAXX (SEQ ID NO: 84423):VPT:RPVQ-AA¹⁷-RKI (SEQ ID NO: 84879):DKGVVTY (SEQ ID NO: 84969):KKATV (SEQ ID NO: 84212):AVS:EXGXR (SEQ ID NO: 84179), GSAGPXX (SEQ ID NO: 84420):TPT:RPVQ-AA¹⁷-RKI (SEQ ID NO: 84879):NDKQQII (SEQ ID NO: 84979):KKATV (SEQ ID NO: 84212):VVD:RXGXS (SEQ ID NO: 84291), AAPASXX (SEQ ID NO: 84401):VPA:RPVQ-AA¹⁷-RKI (SEQ ID NO: 84879):DAANNVV (SEQ ID NO: 84963):KKATV (SEQ ID NO: 84212):VVE:AXGXR (SEQ ID NO: 84148), STPPTXX (SEQ ID NO: 84431):VPT:RPVQ-AA¹⁷-RKI (SEQ ID NO: 84879):DSANNVV (SEQ ID NO: 84971):KKATV (SEQ ID NO: 84212):VVE:SXGXR (SEQ ID NO: 84305), HVPKPXX (SEQ ID NO: 84421):APT:RPVQ-AA¹⁷-RKI (SEQ ID NO: 84879):DDSSNVI (SEQ ID NO: 84965):KKATV (SEQ ID NO: 84212):VVR:SXGXH (SEQ ID NO: 84304), RVPSTXX (SEQ ID NO: 84428):APV:RPVQ-AA¹⁷-RKI (SEQ ID NO: 84879):DNGRVLL (SEQ ID NO: 84970):KKATV (SEQ ID NO: 84212):VEE:XGXL (SEQ ID NO: 84122), ASAAPXX (SEQ ID NO: 84402):VPQ:RPVQ-AA¹⁷-RKI (SEQ ID NO: 84879):VGRKPKV (SEQ ID NO: 84981):KKATV (SEQ ID NO: 84212):VRS:XKXS (SEQ ID NO: 84124), ASASPXX (SEQ ID NO: 84403):VSQ:RPVQ-AA¹⁷-RKI (SEQ ID NO: 84879):IGKTPKI (SEQ ID NO: 84978):KKATV (SEQ ID NO: 84212):VKS:XKXS (SEQ ID NO: 84124), ASASPXX (SEQ ID NO: 84403):VPQ:RPVQ-AA¹⁷-RKI (SEQ ID NO: 84879):VGRTPKV (SEQ ID NO: 84982):KKATV (SEQ ID NO: 84212):VKS:XKXS (SEQ ID NO: 84124), NDEGLEX (SEQ ID NO: 84426):VPT:RPVQ-AA¹⁷-RKI (SEQ ID NO: 84879):RIKPHQGQH (SEQ ID NO: 84980):KKATV (SEQ ID NO: 84212):QHN:KXEXR (SEQ ID NO: 84213), NDEGLEX (SEQ ID NO: 84426):VPT:RPVQ-AA¹⁷-RKI (SEQ ID NO: 84879):RIKPHQGQH (SEQ ID NO: 84980):KKATV (SEQ ID NO: 84212):EHS:QXEXR (SEQ ID NO: 84276) and SSVKXQP (SEQ ID NO: 84430):SRV:RPVQ-AA¹⁷-RKI (SEQ ID NO: 84879):EYVRKKPKL (SEQ ID NO: 84974):KKATV (SEQ ID NO: 84212):EEH:LEXAXA (SEQ ID NO: 84400); and wherein AA¹⁷ is selected from the group consisting of G, A, V, L, I, P, F, M, W, T and S (in particular is selected from the group consisting of M, I, L, V and T).

[0407] In particular, in certain embodiments, the heptuplet PEP7:PEP5:PEP1:LINKER:PEP2:PEP6:PEP8 is selected from the group consisting of GIPEPXX (SEQ ID NO: 84419):VPTKM (SEQ ID NO: 84382):SAIS (SEQ ID NO: 84116):DENKNVV (SEQ ID NO: 84967):LKNYQ (SEQ ID NO: 84230):NMVVE (SEQ ID NO: 84273):SXAXR

[0408] (SEQ ID NO: 84303), SIPKAXX (SEQ ID NO: 84429):VPTEL (SEQ ID NO: 84378):SAIS (SEQ ID NO: 84116):DEYDKVV (SEQ ID NO: 84968):LKNYQ (SEQ ID NO: 84230):EMVVE (SEQ ID NO: 84175):GXGXR (SEQ ID NO: 84208), HVTKPTX (SEQ ID NO: 84422):VPTKL (SEQ ID NO: 84381):SAIS (SEQ ID NO: 84116):DDSSNVI (SEQ ID NO: 84965):LKNYQ (SEQ ID NO: 84230):NMVVE (SEQ ID NO: 84273):SXGXH (SEQ ID NO: 84304), YVPKPXX (SEQ ID NO: 84433):VPTKL (SEQ ID NO: 84381):SAIS (SEQ ID NO: 84116):DDSSNVI (SEQ ID NO: 84965):LKNYQ (SEQ ID NO: 84230):NMVVE (SEQ ID NO: 84273):SXGXH (SEQ ID NO: 84304), TVPKPXX (SEQ ID NO: 84432):VPTQL (SEQ ID NO: 84384):SAIS (SEQ ID NO: 84116):DDSSNVI (SEQ ID NO: 84965):LKNYQ (SEQ ID NO: 84230):NMVVE (SEQ ID NO: 84273):AXGXH (SEQ ID NO: 84147), AVPKAXX (SEQ ID NO: 84404):VPTKL (SEQ ID NO: 84381):SAIS (SEQ ID NO: 84116):DSSNNVI (SEQ ID NO: 84972):LKNYQ (SEQ ID NO: 84230):NMVVE (SEQ ID NO: 84273):AXGXH (SEQ ID NO: 84147), KVGKAXX (SEQ ID NO: 84425):VPTKL (SEQ ID NO: 84381):SAIS (SEQ ID NO: 84116):DDMGVPT (SEQ ID NO: 84964):LKNYQ (SEQ ID NO: 84230):EGMSVVE (SEQ ID NO: 84416):XGXR (SEQ ID NO: 84123), KASKAXX (SEQ ID NO: 84423):VPTKL (SEQ ID NO: 84381):SAIS (SEQ ID NO: 84116):DKGVVTY (SEQ ID NO: 84969):LKNYQ (SEQ ID NO: 84230):GMVVE (SEQ ID NO: 84205):EXGXR (SEQ ID NO: 84179), GSAGPXX (SEQ ID NO: 84420):VPTKM (SEQ ID NO: 84382):SAIS (SEQ ID NO: 84116):NDKQQII (SEQ ID NO: 84979):LKNYQ (SEQ ID NO: 84230):GMVVE (SEQ ID NO: 84205):RXGXS (SEQ ID NO: 84291), AAPASXX (SEQ ID NO: 84401):VPTRL (SEQ ID NO: 84385):SAIS (SEQ ID NO: 84116):DAANNVV (SEQ ID NO: 84963):LKNYQ (SEQ ID NO: 84230):DMVVE (SEQ ID NO: 84161):AXGXR (SEQ ID NO: 84148), STPPTXX (SEQ ID NO: 84431):VPTRL (SEQ ID NO: 84385):SAIS (SEQ ID NO: 84116):DSANNVV (SEQ ID NO: 84971):LKNYQ (SEQ ID NO: 84230):DMVVE (SEQ ID NO: 84161):SXGXR (SEQ ID NO: 84305), HVPKPXX (SEQ ID NO: 84421):VPTKL (SEQ ID NO: 84381):SAIS (SEQ ID NO: 84116):DDSSNVI (SEQ ID NO: 84965):LKNYQ (SEQ ID NO: 84230):NMVVE (SEQ ID NO: 84273):SXGXH (SEQ ID NO: 84304), RVPSTXX (SEQ ID NO: 84428):VPTKT (SEQ ID NO: 84383):SAIS (SEQ ID NO: 84116):DNGRVLL (SEQ ID NO: 84970):LKNYQ (SEQ ID NO: 84230):MIVVE (SEQ ID NO: 84245):XGXL (SEQ ID NO: 84122), ASAAPXX (SEQ ID NO: 84402):VPTAL (SEQ ID NO: 84375):SAIS (SEQ ID NO: 84116):VGRKPKV (SEQ ID NO: 84981):LKNYQ (SEQ ID NO: 84230):MIVVE (SEQ ID NO: 84245):XKXS (SEQ ID NO: 84124), ASASPXX (SEQ ID NO: 84403):VPTDL (SEQ ID NO: 84376):SAIS (SEQ ID NO: 84116):IGKTPKI (SEQ ID NO: 84978):LKNYQ (SEQ ID NO: 84230):MIVVE (SEQ ID NO: 84245):XKXS (SEQ ID NO: 84124), ASASPXX (SEQ ID NO: 84403):VPTDL (SEQ ID NO: 84376):SAIS (SEQ ID NO: 84116):VGRTPKV (SEQ ID NO: 84982):LKNYQ (SEQ ID NO: 84230):MVVVE (SEQ ID NO: 84259):XKXS (SEQ ID NO: 84124), NDEGLXS (SEQ ID NO: 85019):VPTEE (SEQ ID NO: 84377):SAIS (SEQ ID NO: 84116):RIKPHQGQH (SEQ ID NO: 84980):LKNYQ (SEQ ID NO: 84230):FLVVE (SEQ ID NO: 84191):KXEXR (SEQ ID NO: 84213), NDEGLXS (SEQ ID NO: 85019):VPTGQ (SEQ ID NO: 84379):SAIS (SEQ ID NO: 84116):RIKPHQGQH (SEQ ID NO: 84980):LKNYQ (SEQ ID NO: 84230):LEVVE (SEQ ID NO: 84225):QXEXR (SEQ ID NO: 84276), SSVKXQP (SEQ ID NO: 84430):VPTHH (SEQ ID NO: 84380):SAIS (SEQ ID NO: 84116):EYVRKKPKL (SEQ ID NO: 84974):LKNYQ (SEQ ID NO: 84230):RLVVE (SEQ ID NO: 84288):LEXAXA (SEQ ID NO: 84400), RNVQXRP (SEQ ID NO: 84427):VPTQL (SEQ ID NO: 84384):SAIS (SEQ ID NO: 84116):EIVRKKPIF (SEQ ID NO: 84973):LKNYQ (SEQ ID NO: 84230):TLVVE (SEQ ID NO: 84317):LAXKXE (SEQ ID NO: 84399), GIPEPXX (SEQ ID NO: 84419):VPEKM (SEQ ID NO: 84360):SAIS (SEQ ID NO: 84116):DENKNVV (SEQ ID NO: 84967):LKNYQ (SEQ ID NO: 84230):NMTVE (SEQ ID NO: 84267):SXAXR (SEQ ID NO: 84303), HVTKPTX (SEQ ID NO: 84422):APTKL (SEQ ID NO: 84131):SAIS (SEQ ID NO: 84116):DDSSNVI (SEQ ID NO: 84965):LKNYQ (SEQ ID NO: 84230):NMVVR (SEQ ID NO: 84275):SXGXH (SEQ ID NO: 84304), YVPKPXX (SEQ ID NO: 84433):APTKL (SEQ ID NO: 84131):SAIS (SEQ ID NO: 84116):DDSSNVI (SEQ ID NO: 84965):LKNYQ (SEQ ID NO: 84230):NMVVR (SEQ ID NO: 84275):SXGXH (SEQ ID NO: 84304), TVPKPXX (SEQ ID NO: 84432):APTQL (SEQ ID NO: 84134):SAIS (SEQ ID NO: 84116):DDSSNVI (SEQ ID NO: 84965):LKNYQ (SEQ ID NO: 84230):NMVVR (SEQ ID NO: 84275):AXGXH (SEQ ID NO: 84147), AVPKAXX (SEQ ID NO: 84404):APTKL (SEQ ID NO: 84131):SAIS (SEQ ID NO: 84116):DSSNNVI (SEQ ID NO: 84972):LKNYQ (SEQ ID NO: 84230):NMVVK (SEQ ID NO: 84274):AXGXH (SEQ ID NO: 84147), KVGKAXX (SEQ ID NO: 84425):VPTKL (SEQ ID NO: 84381):SAIS (SEQ ID NO: 84116):DDMGVPT (SEQ ID NO: 84964):LKNYQ (SEQ ID NO: 84230):EGMSVAE (SEQ ID NO: 84411):XGXR (SEQ ID NO: 84123), KASKAXX (SEQ ID NO: 84423):VPTKL (SEQ ID NO: 84381):SAIS (SEQ ID NO: 84116):DKGVVTY (SEQ ID NO: 84969):LKNYQ (SEQ ID NO: 84230):GMAVS (SEQ ID NO: 84194):EXGXR (SEQ ID NO: 84179), GSAGPXX (SEQ ID NO: 84420):TPTKM (SEQ ID NO: 84327):SAIS (SEQ ID NO: 84116):NDKQQII (SEQ ID NO: 84979):LKNYQ (SEQ ID NO: 84230):GMVVD (SEQ ID NO: 84204):RXGXS (SEQ ID NO: 84291), AAPASXX (SEQ ID NO: 84401):VPARL (SEQ ID NO: 84352):SAIS (SEQ ID NO: 84116):DAANNVV (SEQ ID NO: 84963):LKNYQ (SEQ ID NO: 84230):DMVVE (SEQ ID NO: 84161):AXGXR (SEQ ID NO: 84148), HVPKPXX (SEQ ID NO: 84421):APTKL (SEQ ID NO: 84131):SAIS (SEQ ID NO: 84116):DDSSNVI (SEQ ID NO: 84965):LKNYQ (SEQ ID NO: 84230):NMVVR (SEQ ID NO: 84275):SXGXH (SEQ ID NO: 84304), RVPSTXX (SEQ ID NO: 84428):APVKT (SEQ ID NO: 84144):SAIS (SEQ ID NO: 84116):DNGRVLL (SEQ ID NO: 84970):LKNYQ (SEQ ID NO: 84230):MIVEE (SEQ ID NO: 84241):XGXL (SEQ ID NO: 84122), ASAAPXX (SEQ ID NO: 84402):VPQAL (SEQ ID NO: 84364):SAIS (SEQ ID NO: 84116):VGRKPKV (SEQ ID NO: 84981):LKNYQ (SEQ ID NO: 84230):MIVRS (SEQ ID NO: 84243):XKXS (SEQ ID NO: 84124), ASASPXX (SEQ ID NO: 84403):VSQDL (SEQ ID NO: 84387):SAIS (SEQ ID NO: 84116):IGKTPKI (SEQ ID NO: 84978):LKNYQ (SEQ ID NO: 84230):MIVKS (SEQ ID NO: 84242):XKXS (SEQ ID NO: 84124), ASASPXX (SEQ ID NO: 84403):VPQDL (SEQ ID NO: 84365):SAIS (SEQ ID NO: 84116):VGRTPKV (SEQ ID NO: 84982):LKNYQ (SEQ ID NO: 84230):MVVKS (SEQ ID NO: 84256):XKXS (SEQ ID NO: 84124), NDEGLXS (SEQ ID NO: 85019):VPTEE (SEQ ID NO: 84377):SAIS (SEQ ID NO: 84116):RIKPHQGQH (SEQ ID NO: 84980):LKNYQ (SEQ ID NO: 84230):FLQHN (SEQ ID NO: 84184):KXEXR (SEQ ID NO: 84213), NDEGLXS (SEQ ID NO: 85019):VPTGQ (SEQ ID NO: 84379):SAIS (SEQ ID NO: 84116):RIKPHQGQH (SEQ ID NO: 84980):LKNYQ (SEQ ID NO: 84230):LEEHS (SEQ ID NO: 84217):QXEXR (SEQ ID NO: 84276), SSVKXQP (SEQ ID NO: 84430):SRVHH (SEQ ID NO: 84297):SAIS (SEQ ID NO: 84116):EYVRKKPKL (SEQ ID NO: 84974):LKNYQ (SEQ ID NO: 84230):RLEEH (SEQ ID NO: 84279):LEXAXA (SEQ ID NO: 84400), RNVQXRP (SEQ ID NO: 84427):TQVQL (SEQ ID NO: 84340):SAIS (SEQ ID NO: 84116):EIVRKKPIF (SEQ ID NO: 84973):LKNYQ (SEQ ID NO: 84230):TLEDH (SEQ ID NO: 84307):LAXKXE (SEQ ID NO: 84399), KIPKAXX (SEQ ID NO: 84424):VPEEL (SEQ ID NO: 84356):SSLS (SEQ ID NO: 84121):DENEKVV (SEQ ID NO: 84966):LKVYP (SEQ ID NO: 84231):DMTVE (SEQ ID NO: 84155):GXGXR (SEQ ID NO: 84208), SIPKAXX (SEQ ID NO: 84429):VPEEL (SEQ ID NO: 84356):SSLS (SEQ ID NO: 84121):DEYDKVV (SEQ ID NO: 84968):LKVYP (SEQ ID NO: 84231):EMTVE (SEQ ID NO: 84169):GXGXR (SEQ ID NO: 84208), HVTKPTX (SEQ ID NO: 84422):VPEKL (SEQ ID NO: 84359):SSLS (SEQ ID NO: 84121):DDSSNVI (SEQ ID NO: 84965):LKVYP (SEQ ID NO: 84231):NMTVE (SEQ ID NO: 84267):SXGXH (SEQ ID NO: 84304), YVPKPXX (SEQ ID NO: 84433):VPEKL (SEQ ID NO: 84359):SSLS (SEQ ID NO: 84121):DDSSNVI (SEQ ID NO: 84965):LKVYP (SEQ ID NO: 84231):NMTVE (SEQ ID NO: 84267):SXGXH (SEQ ID NO: 84304), TVPKPXX (SEQ ID NO: 84432):VPEQL (SEQ ID NO: 84362):SSLS (SEQ ID NO: 84121):DDSSNVI (SEQ ID NO: 84965):LKVYP (SEQ ID NO: 84231):NMTVE (SEQ ID NO: 84267):AXGXH (SEQ ID NO: 84147), AVPKAXX (SEQ ID NO: 84404):VPEKL (SEQ ID NO: 84359):SSLS (SEQ ID NO: 84121):DSSNNVI (SEQ ID NO: 84972):LKVYP (SEQ ID NO: 84231):NMTVE (SEQ ID NO: 84267):AXGXH (SEQ ID NO: 84147), KVGKAXX (SEQ ID NO: 84425):VPEKL (SEQ ID NO: 84359):SSLS (SEQ ID NO: 84121):DDMGVPT (SEQ ID NO: 84964):LKVYP (SEQ ID NO: 84231):EGMSTVE (SEQ ID NO: 84410):XGXR (SEQ ID NO: 84123), KASKAXX (SEQ ID NO: 84423):VPEKL (SEQ ID NO: 84359):SSLS (SEQ ID NO: 84121):DKGVVTY (SEQ ID NO: 84969):LKVYP (SEQ ID NO: 84231):GMTVE (SEQ ID NO: 84199):EXGXR (SEQ ID NO: 84179), GSAGPXX (SEQ ID NO: 84420):VPEKM (SEQ ID NO: 84360):SSLS (SEQ ID NO: 84121):NDKQQII (SEQ ID NO: 84979):LKVYP (SEQ ID NO: 84231):GMTVE (SEQ ID NO: 84199):RXGXS (SEQ ID NO: 84291), AAPASXX (SEQ ID NO: 84401):VPERL (SEQ ID NO: 84363):SSLS (SEQ ID NO: 84121):DAANNVV (SEQ ID NO: 84963):LKVYP (SEQ ID NO: 84231):DMTVE (SEQ ID NO: 84155):AXGXR (SEQ ID NO: 84148), STPPTXX (SEQ ID NO: 84431):VPERL (SEQ ID NO: 84363):SSLS (SEQ ID NO: 84121):DSANNVV (SEQ ID NO: 84971):LKVYP (SEQ ID NO: 84231):DMTVE (SEQ ID NO: 84155):SXGXR (SEQ ID NO: 84305), HVPKPXX (SEQ ID NO: 84421):VPEKL (SEQ ID NO: 84359):SSLS (SEQ ID NO: 84121):DDSSNVI (SEQ ID NO: 84965):LKVYP (SEQ ID NO: 84231):NMTVE (SEQ ID NO: 84267):SXGXH (SEQ ID NO: 84304), RVPSTXX (SEQ ID NO: 84428):VPEKT (SEQ ID NO: 84361):SSLS (SEQ ID NO: 84121):DNGRVLL (SEQ ID NO: 84970):LKVYP (SEQ ID NO: 84231):MITVE (SEQ ID NO: 84239):XGXL (SEQ ID NO: 84122), ASAAPXX (SEQ ID NO: 84402):VPEAL (SEQ ID NO: 84353):SSLS (SEQ ID NO: 84121):VGRKPKV (SEQ ID NO: 84981):LKVYP (SEQ ID NO: 84231):MITVE (SEQ ID NO: 84239):XKXS (SEQ ID NO: 84124), ASASPXX (SEQ ID NO: 84403):VPEDL (SEQ ID NO: 84354):SSLS (SEQ ID NO: 84121):IGKTPKI (SEQ ID NO: 84978):LKVYP (SEQ ID NO: 84231):MITVE (SEQ ID NO: 84239):XKXS (SEQ ID NO: 84124), ASASPXX (SEQ ID NO: 84403):VPEDL (SEQ ID NO: 84354):SSLS (SEQ ID NO: 84121):VGRTPKV (SEQ ID NO: 84982):LKVYP (SEQ ID NO: 84231):MVTVE (SEQ ID NO: 84253):XKXS (SEQ ID NO: 84124), NDEGLXS (SEQ ID NO: 85019):VPEEE (SEQ ID NO: 84355):SSLS (SEQ ID NO: 84121):RIKPHQGQH (SEQ ID NO: 84980):LKVYP (SEQ ID NO: 84231):FLTVE (SEQ ID NO: 84185):KXEXR (SEQ ID NO: 84213), NDEGLXS (SEQ ID NO: 85019):VPEGQ (SEQ ID NO: 84357):SSLS (SEQ ID NO: 84121):RIKPHQGQH (SEQ ID NO: 84980):LKVYP (SEQ ID NO: 84231):LETVE (SEQ ID NO: 84219):QXEXR (SEQ ID NO: 84276), SSVKXQP (SEQ ID NO: 84430):VPEHH (SEQ ID NO: 84358):SSLS (SEQ ID NO: 84121):EYVRKKPKL (SEQ ID NO: 84974):LKVYP (SEQ ID NO: 84231):RLTVE (SEQ ID NO: 84282):LEXAXA (SEQ ID NO: 84400), RNVQXRP (SEQ ID NO: 84427):VPEQL (SEQ ID NO: 84362):SSLS (SEQ ID NO: 84121):EIVRKKPIF (SEQ ID NO: 84973):LKVYP (SEQ ID NO: 84231):TLTVE (SEQ ID NO: 84311):LAXKXE (SEQ ID NO: 84399), KIPKAXX (SEQ ID NO: 84424):VPTEL (SEQ ID NO: 84378):SSLS (SEQ ID NO: 84121):DENEKVV (SEQ ID NO: 84966):LKVYP (SEQ ID NO: 84231):DMVVE (SEQ ID NO: 84161):GXGXR (SEQ ID NO: 84208), SIPKAXX (SEQ ID NO: 84429):VPTEL (SEQ ID NO: 84378):SSLS (SEQ ID NO: 84121):DEYDKVV (SEQ ID NO: 84968):LKVYP (SEQ ID NO: 84231):EMVVE (SEQ ID NO: 84175):GXGXR (SEQ ID NO: 84208), HVTKPTX (SEQ ID NO: 84422):APTKL (SEQ ID NO: 84131):SSLS (SEQ ID NO: 84121):DDSSNVI (SEQ ID NO: 84965):LKVYP (SEQ ID NO: 84231):NMVVR (SEQ ID NO: 84275):SXGXH (SEQ ID NO: 84304), YVPKPXX (SEQ ID NO: 84433):APTKL (SEQ ID NO: 84131):SSLS (SEQ ID NO: 84121):DDSSNVI (SEQ ID NO: 84965):LKVYP (SEQ ID NO: 84231):NMVVR (SEQ ID NO: 84275):SXGXH (SEQ ID NO: 84304), TVPKPXX (SEQ ID NO: 84432):APTQL (SEQ ID NO: 84134):SSLS (SEQ ID NO: 84121):DDSSNVI (SEQ ID NO: 84965):LKVYP (SEQ ID NO: 84231):NMVVR (SEQ ID NO: 84275):AXGXH (SEQ ID NO: 84147), AVPKAXX (SEQ ID NO: 84404):APTKL (SEQ ID NO: 84131):SSLS (SEQ ID NO: 84121):DSSNNVI (SEQ ID NO: 84972):LKVYP (SEQ ID NO: 84231):NMVVK (SEQ ID NO: 84274):AXGXH (SEQ ID NO: 84147), KVGKAXX (SEQ ID NO: 84425):VPTKL (SEQ ID NO: 84381):SSLS (SEQ ID NO: 84121):DDMGVPT (SEQ ID NO: 84964):LKVYP (SEQ ID NO: 84231):EGMSVAE (SEQ ID NO: 84411):XGXR (SEQ ID NO: 84123), KASKAXX (SEQ ID NO: 84423):VPTKL (SEQ ID NO: 84381):SSLS (SEQ ID NO: 84121):DKGVVTY (SEQ ID NO: 84969):LKVYP (SEQ ID NO: 84231):GMAVS (SEQ ID NO: 84194):EXGXR (SEQ ID NO: 84179), GSAGPXX (SEQ ID NO: 84420):TPTKM (SEQ ID NO: 84327):SSLS (SEQ ID NO: 84121):NDKQQII (SEQ ID NO: 84979):LKVYP (SEQ ID NO: 84231):GMVVD (SEQ ID NO: 84204):RXGXS (SEQ ID NO: 84291), AAPASXX (SEQ ID NO: 84401):VPARL (SEQ ID NO: 84352):SSLS (SEQ ID NO: 84121):DAANNVV (SEQ ID NO: 84963):LKVYP (SEQ ID NO: 84231):DMVVE (SEQ ID NO: 84161):AXGXR (SEQ ID NO: 84148), STPPTXX (SEQ ID NO: 84431):VPTRL (SEQ ID NO: 84385):SSLS (SEQ ID NO: 84121):DSANNVV (SEQ ID NO: 84971):LKVYP (SEQ ID NO: 84231):DMVVE (SEQ ID NO: 84161):SXGXR (SEQ ID NO: 84305), HVPKPXX (SEQ ID NO: 84421):APTKL (SEQ ID NO: 84131):SSLS (SEQ ID NO: 84121):DDSSNVI (SEQ ID NO: 84965):LKVYP (SEQ ID NO: 84231):NMVVR (SEQ ID NO: 84275):SXGXH (SEQ ID NO: 84304), RVPSTXX (SEQ ID NO: 84428):APVKT (SEQ ID NO: 84144):SSLS (SEQ ID NO: 84121):DNGRVLL (SEQ ID NO: 84970):LKVYP (SEQ ID NO: 84231):MIVEE (SEQ ID NO: 84241):XGXL (SEQ ID NO: 84122), ASAAPXX (SEQ ID NO: 84402):VPQAL (SEQ ID NO: 84364):SSLS (SEQ ID NO: 84121):VGRKPKV (SEQ ID NO: 84981):LKVYP (SEQ ID NO: 84231):MIVRS (SEQ ID NO: 84243):XKXS (SEQ ID NO: 84124), ASASPXX (SEQ ID NO: 84403):VSQDL (SEQ ID NO: 84387):SSLS (SEQ ID NO: 84121):IGKTPKI (SEQ ID NO: 84978):LKVYP (SEQ ID NO: 84231):MIVKS (SEQ ID NO: 84242):XKXS (SEQ ID NO: 84124), ASASPXX (SEQ ID NO: 84403):VPQDL (SEQ ID NO: 84365):SSLS (SEQ ID NO: 84121):VGRTPKV (SEQ ID NO: 84982):LKVYP (SEQ ID NO: 84231):MVVKS (SEQ ID NO: 84256):XKXS (SEQ ID NO: 84124), NDEGLXS (SEQ ID NO: 85019):VPTEE (SEQ ID NO: 84377):SSLS (SEQ ID NO: 84121):RIKPHQGQH (SEQ ID NO: 84980):LKVYP (SEQ ID NO: 84231):FLQHN (SEQ ID NO: 84184):KXEXR (SEQ ID NO: 84213), NDEGLXS (SEQ ID NO: 85019):VPTGQ (SEQ ID NO: 84379):SSLS (SEQ ID NO: 84121):RIKPHQGQH (SEQ ID NO: 84980):LKVYP (SEQ ID NO: 84231):LEEHS (SEQ ID NO: 84217):QXEXR (SEQ ID NO: 84276), SSVKXQP (SEQ ID NO: 84430):SRVHH (SEQ ID NO: 84297):SSLS (SEQ ID NO: 84121):EYVRKKPKL (SEQ ID NO: 84974):LKVYP (SEQ ID NO: 84231):RLEEH (SEQ ID NO: 84279):LEXAXA (SEQ ID NO: 84400), RNVQXRP (SEQ ID NO: 84427):TQVQL (SEQ ID NO: 84340):SSLS (SEQ ID NO: 84121):EIVRKKPIF (SEQ ID NO: 84973):LKVYP (SEQ ID NO: 84231):TLEDH (SEQ ID NO: 84307):LAXKXE (SEQ ID NO: 84399), KIPKAXX (SEQ ID NO: 84424):VPTEL (SEQ ID NO: 84378):SAIS (SEQ ID NO: 84116):DENEKVV (SEQ ID NO: 84966):LKNYQ (SEQ ID NO: 84230):DMVVE (SEQ ID NO: 84161):GXGXR (SEQ ID NO: 84208), KIPKAXX (SEQ ID NO: 84424):APTEL (SEQ ID NO: 84128):NAIS (SEQ ID NO: 84113):DENEKVV (SEQ ID NO: 84966):LKKYR (SEQ ID NO: 84229):DMVVR (SEQ ID NO: 84163):GXGXR (SEQ ID NO: 84208), GIPEPXX (SEQ ID NO: 84419):APTKM (SEQ ID NO: 84132):NAIS (SEQ ID NO: 84113):DENKNVV (SEQ ID NO: 84967):LKKYR (SEQ ID NO: 84229):NMVVR (SEQ ID NO: 84275):SXAXR (SEQ ID NO: 84303), SIPKAXX (SEQ ID NO: 84429):APTEL (SEQ ID NO: 84128):NAIS (SEQ ID NO: 84113):DEYDKVV (SEQ ID NO: 84968):LKKYR (SEQ ID NO: 84229):EMVVR (SEQ ID NO: 84177):GXGXR (SEQ ID NO: 84208), YVPKPXX (SEQ ID NO: 84433):APTKL (SEQ ID NO: 84131):NAIS (SEQ ID NO: 84113):DDSSNVI (SEQ ID NO: 84965):LKKYR (SEQ ID NO: 84229):NMVVR (SEQ ID NO: 84275):SXGXH (SEQ ID NO: 84304), TVPKPXX (SEQ ID NO: 84432):APTQL (SEQ ID NO: 84134):NAIS (SEQ ID NO: 84113):DDSSNVI (SEQ ID NO: 84965):LKKYR (SEQ ID NO: 84229):NMVVR (SEQ ID NO: 84275):AXGXH (SEQ ID NO: 84147), AVPKAXX (SEQ ID NO: 84404):APTKL (SEQ ID NO: 84131):NAIS (SEQ ID NO: 84113):DSSNNVI (SEQ ID NO: 84972):LKKYR (SEQ ID NO: 84229):NMVVR (SEQ ID NO: 84275):AXGXH (SEQ ID NO: 84147), KVGKAXX (SEQ ID NO: 84425):APTKL (SEQ ID NO: 84131):NAIS (SEQ ID NO: 84113):DDMGVPT (SEQ ID NO: 84964):LKKYR (SEQ ID NO: 84229):EGMSVVR (SEQ ID NO: 84418):XGXR (SEQ ID NO: 84123), KASKAXX (SEQ ID NO: 84423):APTKL (SEQ ID NO: 84131):NAIS (SEQ ID NO: 84113):DKGVVTY (SEQ ID NO: 84969):LKKYR (SEQ ID NO: 84229):GMVVR (SEQ ID NO: 84207):EXGXR (SEQ ID NO: 84179), GSAGPXX (SEQ ID NO: 84420):APTKM (SEQ ID NO: 84132):NAIS (SEQ ID NO: 84113):NDKQQII (SEQ ID NO: 84979):LKKYR (SEQ ID NO: 84229):GMVVR (SEQ ID NO: 84207):RXGXS (SEQ ID NO: 84291), AAPASXX (SEQ ID NO: 84401):APTRL (SEQ ID NO: 84135):NAIS (SEQ ID NO: 84113):DAANNVV (SEQ ID NO: 84963):LKKYR (SEQ ID NO: 84229):DMVVR (SEQ ID NO: 84163):AXGXR (SEQ ID NO: 84148), STPPTXX (SEQ ID NO: 84431):APTRL (SEQ ID NO: 84135):NAIS (SEQ ID NO: 84113):DSANNVV (SEQ ID NO: 84971):LKKYR (SEQ ID NO: 84229):DMVVR (SEQ ID NO: 84163):SXGXR (SEQ ID NO: 84305), HVPKPXX (SEQ ID NO: 84421):APTKL (SEQ ID NO: 84131):NAIS (SEQ ID NO: 84113):DDSSNVI (SEQ ID NO: 84965):LKKYR (SEQ ID NO: 84229):NMVVR (SEQ ID NO: 84275):SXGXH (SEQ ID NO: 84304), RVPSTXX (SEQ ID NO: 84428):APTKT (SEQ ID NO: 84133):NAIS (SEQ ID NO: 84113):DNGRVLL (SEQ ID NO: 84970):LKKYR (SEQ ID NO: 84229):MIVVR (SEQ ID NO: 84247):XGXL (SEQ ID NO: 84122), ASAAPXX (SEQ ID NO: 84402):APTAL (SEQ ID NO: 84125):NAIS (SEQ ID NO: 84113):VGRKPKV (SEQ ID NO: 84981):LKKYR (SEQ ID NO: 84229):MIVVR (SEQ ID NO: 84247):XKXS (SEQ ID NO: 84124), ASASPXX (SEQ ID NO: 84403):APTDL (SEQ ID NO: 84126):NAIS (SEQ ID NO: 84113):IGKTPKI (SEQ ID NO: 84978):LKKYR (SEQ ID NO: 84229):MIVVR (SEQ ID NO: 84247):XKXS (SEQ ID NO: 84124), ASASPXX (SEQ ID NO: 84403):APTDL (SEQ ID NO: 84126):NAIS (SEQ ID NO: 84113):VGRTPKV (SEQ ID NO: 84982):LKKYR (SEQ ID NO: 84229):MVVVR (SEQ ID NO: 84261):XKXS (SEQ ID NO: 84124), NDEGLXS (SEQ ID NO: 85019):APTEE (SEQ ID NO: 84127):NAIS (SEQ ID NO: 84113):RIKPHQGQH (SEQ ID NO: 84980):LKKYR (SEQ ID NO: 84229):FLVVR (SEQ ID NO: 84193):KXEXR (SEQ ID NO: 84213), NDEGLXS (SEQ ID NO: 85019):APTGQ (SEQ ID NO: 84129):NAIS (SEQ ID NO: 84113):RIKPHQGQH (SEQ ID NO: 84980):LKKYR (SEQ ID NO: 84229):LEVVR (SEQ ID NO: 84227):QXEXR (SEQ ID NO: 84276), SSVKXQP (SEQ ID NO: 84430):APTHH (SEQ ID NO: 84130):NAIS (SEQ ID NO: 84113):EYVRKKPKL (SEQ ID NO: 84974):LKKYR (SEQ ID NO: 84229):RLVVR (SEQ ID NO: 84290):LEXAXA (SEQ ID NO: 84400), RNVQXRP (SEQ ID NO: 84427):APTQL (SEQ ID NO: 84134):NAIS (SEQ ID NO: 84113):EIVRKKPIF (SEQ ID NO: 84973):LKKYR (SEQ ID NO: 84229):TLVVR (SEQ ID NO: 84319):LAXKXE (SEQ ID NO: 84399), KIPKAXX (SEQ ID NO: 84424):VPTEL (SEQ ID NO: 84378):NAIS (SEQ ID NO: 84113):DENEKVV (SEQ ID NO: 84966):LKKYR (SEQ ID NO: 84229):DMVVE (SEQ ID NO: 84161):GXGXR (SEQ ID NO: 84208), GIPEPXX (SEQ ID NO: 84419):VPEKM (SEQ ID NO: 84360):NAIS (SEQ ID NO: 84113):DENKNVV (SEQ ID NO: 84967):LKKYR (SEQ ID NO: 84229):NMTVE (SEQ ID NO: 84267):SXAXR (SEQ ID NO: 84303), SIPKAXX (SEQ ID NO: 84429):VPTEL (SEQ ID NO: 84378):NAIS (SEQ ID NO: 84113):DEYDKVV (SEQ ID NO: 84968):LKKYR (SEQ ID NO: 84229):EMVVE (SEQ ID NO: 84175):GXGXR (SEQ ID NO: 84208), AVPKAXX (SEQ ID NO: 84404):APTKL (SEQ ID NO: 84131):NAIS (SEQ ID NO: 84113):DSSNNVI (SEQ ID NO: 84972):LKKYR (SEQ ID NO: 84229):NMVVK (SEQ ID NO: 84274):AXGXH (SEQ ID NO: 84147), KVGKAXX (SEQ ID NO: 84425):VPTKL (SEQ ID NO: 84381):NAIS (SEQ ID NO: 84113):DDMGVPT (SEQ ID NO: 84964):LKKYR (SEQ ID NO: 84229):EGMSVAE (SEQ ID NO: 84411):XGXR (SEQ ID NO: 84123), KASKAXX (SEQ ID NO: 84423):VPTKL (SEQ ID NO: 84381):NAIS (SEQ ID NO: 84113):DKGVVTY (SEQ ID NO: 84969):LKKYR (SEQ ID NO: 84229):GMAVS (SEQ ID NO: 84194):EXGXR (SEQ ID NO: 84179), GSAGPXX (SEQ ID NO: 84420):TPTKM (SEQ ID NO: 84327):NAIS (SEQ ID NO: 84113):NDKQQII (SEQ ID NO: 84979):LKKYR (SEQ ID NO: 84229):GMVVD (SEQ ID NO: 84204):RXGXS (SEQ ID NO: 84291), AAPASXX (SEQ ID NO: 84401):VPARL (SEQ ID NO: 84352):NAIS (SEQ ID NO: 84113):DAANNVV (SEQ ID NO: 84963):LKKYR (SEQ ID NO: 84229):DMVVE (SEQ ID NO: 84161):AXGXR (SEQ ID NO: 84148), STPPTXX (SEQ ID NO: 84431):VPTRL (SEQ ID NO: 84385):NAIS (SEQ ID NO: 84113):DSANNVV (SEQ ID NO: 84971):LKKYR (SEQ ID NO: 84229):DMVVE (SEQ ID NO: 84161):SXGXR (SEQ ID NO: 84305), RVPSTXX (SEQ ID NO: 84428):APVKT (SEQ ID NO: 84144):NAIS (SEQ ID NO: 84113):DNGRVLL (SEQ ID NO: 84970):LKKYR (SEQ ID NO: 84229):MIVEE (SEQ ID NO: 84241):XGXL (SEQ ID NO: 84122), ASAAPXX (SEQ ID NO: 84402):VPQAL (SEQ ID NO: 84364):NAIS (SEQ ID NO: 84113):VGRKPKV (SEQ ID NO: 84981):LKKYR (SEQ ID NO: 84229):MIVRS (SEQ ID NO: 84243):XKXS (SEQ ID NO: 84124), ASASPXX (SEQ ID NO: 84403):VSQDL (SEQ ID NO: 84387):NAIS (SEQ ID NO: 84113):IGKTPKI (SEQ ID NO: 84978):LKKYR (SEQ ID NO: 84229):MIVKS (SEQ ID NO: 84242):XKXS (SEQ ID NO: 84124), ASASPXX (SEQ ID NO: 84403):VPQDL (SEQ ID NO: 84365):NAIS (SEQ ID NO: 84113):VGRTPKV (SEQ ID NO: 84982):LKKYR (SEQ ID NO: 84229):MVVKS (SEQ ID NO: 84256):XKXS (SEQ ID NO: 84124), NDEGLXS (SEQ ID NO: 85019):VPTEE (SEQ ID NO: 84377):NAIS (SEQ ID NO: 84113):RIKPHQGQH (SEQ ID NO: 84980):LKKYR (SEQ ID NO: 84229):FLQHN (SEQ ID NO: 84184):KXEXR (SEQ ID NO: 84213), NDEGLXS (SEQ ID NO: 85019):VPTGQ (SEQ ID NO: 84379):NAIS (SEQ ID NO: 84113):RIKPHQGQH (SEQ ID NO: 84980):LKKYR (SEQ ID NO: 84229):LEEHS (SEQ ID NO: 84217):QXEXR (SEQ ID NO: 84276), SSVKXQP (SEQ ID NO: 84430):SRVHH (SEQ ID NO: 84297):NAIS (SEQ ID NO: 84113):EYVRKKPKL (SEQ ID NO: 84974):LKKYR (SEQ ID NO: 84229):RLEEH (SEQ ID NO: 84279):LEXAXA (SEQ ID NO: 84400), RNVQXRP (SEQ ID NO: 84427):TQVQL (SEQ ID NO: 84340):NAIS (SEQ ID NO: 84113):EIVRKKPIF (SEQ ID NO: 84973):LKKYR (SEQ ID NO: 84229):TLEDH (SEQ ID NO: 84307):LAXKXE (SEQ ID NO: 84399), HVTKPTX (SEQ ID NO: 84422):APTKL (SEQ ID NO: 84131):NAIS (SEQ ID NO: 84113):DDSSNVI (SEQ ID NO: 84965):LKKYR (SEQ ID NO: 84229):NMVVR (SEQ ID NO: 84275):SXGXH (SEQ ID NO: 84304), KIPKAXX (SEQ ID NO: 84424):APTEL (SEQ ID NO: 84128):SATS (SEQ ID NO: 84117):DENEKVV (SEQ ID NO: 84966):LRKHR (SEQ ID NO: 84233):DMVVK (SEQ ID NO: 84162):GXGXR (SEQ ID NO: 84208), GIPEPXX (SEQ ID NO: 84419):APTKM (SEQ ID NO: 84132):SATS (SEQ ID NO: 84117):DENKNVV (SEQ ID NO: 84967):LRKHR (SEQ ID NO: 84233):NMVVK (SEQ ID NO: 84274):SXAXR (SEQ ID NO: 84303), SIPKAXX (SEQ ID NO: 84429):APTEL (SEQ ID NO: 84128):SATS (SEQ ID NO: 84117):DEYDKVV (SEQ ID NO: 84968):LRKHR (SEQ ID NO: 84233):EMVVK (SEQ ID NO: 84176):GXGXR (SEQ ID NO: 84208), HVTKPTX (SEQ ID NO: 84422):APTKL (SEQ ID NO: 84131):SATS (SEQ ID NO: 84117):DDSSNVI (SEQ ID NO: 84965):LRKHR (SEQ ID NO: 84233):NMVVK (SEQ ID NO: 84274):SXGXH (SEQ ID NO: 84304), YVPKPXX (SEQ ID NO: 84433):APTKL (SEQ ID NO: 84131):SATS (SEQ ID NO: 84117):DDSSNVI (SEQ ID NO: 84965):LRKHR (SEQ ID NO: 84233):NMVVK (SEQ ID NO: 84274):SXGXH (SEQ ID NO: 84304), TVPKPXX (SEQ ID NO: 84432):APTQL (SEQ ID NO: 84134):SATS (SEQ ID NO: 84117):DDSSNVI (SEQ ID NO: 84965):LRKHR (SEQ ID NO: 84233):NMVVK (SEQ ID NO: 84274):AXGXH (SEQ ID NO: 84147), KVGKAXX (SEQ ID NO: 84425):APTKL (SEQ ID NO: 84131):SATS (SEQ ID NO: 84117):DDMGVPT (SEQ ID NO: 84964):LRKHR (SEQ ID NO: 84233):EGMSVVK (SEQ ID NO: 84417):XGXR (SEQ ID NO: 84123), KASKAXX (SEQ ID NO: 84423):APTKL (SEQ ID NO: 84131):SATS (SEQ ID NO: 84117):DKGVVTY (SEQ ID NO: 84969):LRKHR (SEQ ID NO: 84233):GMVVK (SEQ ID NO: 84206):EXGXR (SEQ ID NO: 84179), GSAGPXX (SEQ ID NO: 84420):APTKM (SEQ ID NO: 84132):SATS (SEQ ID NO: 84117):NDKQQII (SEQ ID NO: 84979):LRKHR (SEQ ID NO: 84233):GMVVK (SEQ ID NO: 84206):RXGXS (SEQ ID NO: 84291), AAPASXX (SEQ ID NO: 84401):APTRL (SEQ ID NO: 84135):SATS (SEQ ID NO: 84117):DAANNVV (SEQ ID NO: 84963):LRKHR (SEQ ID NO: 84233):DMVVK (SEQ ID NO: 84162):AXGXR (SEQ ID NO: 84148), STPPTXX (SEQ ID NO: 84431):APTRL (SEQ ID NO: 84135):SATS (SEQ ID NO: 84117):DSANNVV (SEQ ID NO: 84971):LRKHR (SEQ ID NO: 84233):DMVVK (SEQ ID NO: 84162):SXGXR (SEQ ID NO: 84305), HVPKPXX (SEQ ID NO: 84421):APTKL (SEQ ID NO: 84131):SATS (SEQ ID NO: 84117):DDSSNVI (SEQ ID NO: 84965):LRKHR (SEQ ID NO: 84233):NMVVK (SEQ ID NO: 84274):SXGXH (SEQ ID NO: 84304), RVPSTXX (SEQ ID NO: 84428):APTKT (SEQ ID NO: 84133):SATS (SEQ ID NO: 84117):DNGRVLL (SEQ ID NO: 84970):LRKHR (SEQ ID NO: 84233):MIVVK (SEQ ID NO: 84246):XGXL (SEQ ID NO: 84122), ASAAPXX (SEQ ID NO: 84402):APTAL (SEQ ID NO: 84125):SATS (SEQ ID NO: 84117):VGRKPKV (SEQ ID NO: 84981):LRKHR (SEQ ID NO: 84233):MIVVK (SEQ ID NO: 84246):XKXS (SEQ ID NO: 84124), ASASPXX (SEQ ID NO: 84403):APTDL (SEQ ID NO: 84126):SATS (SEQ ID NO: 84117):IGKTPKI (SEQ ID NO: 84978):LRKHR (SEQ ID NO: 84233):MIVVK (SEQ ID NO: 84246):XKXS (SEQ ID NO: 84124), ASASPXX (SEQ ID NO: 84403):APTDL (SEQ ID NO: 84126):SATS (SEQ ID NO: 84117):VGRTPKV (SEQ ID NO: 84982):LRKHR (SEQ ID NO: 84233):MVVVK (SEQ ID NO: 84260):XKXS (SEQ ID NO: 84124), NDEGLXS (SEQ ID NO: 85019):APTEE (SEQ ID NO: 84127):SATS (SEQ ID NO: 84117):RIKPHQGQH (SEQ ID NO: 84980):LRKHR (SEQ ID NO: 84233):FLVVK (SEQ ID NO: 84192):KXEXR (SEQ ID NO: 84213), NDEGLXS (SEQ ID NO: 85019):APTGQ (SEQ ID NO: 84129):SATS (SEQ ID NO: 84117):RIKPHQGQH (SEQ ID NO: 84980):LRKHR (SEQ ID NO: 84233):LEVVK (SEQ ID NO: 84226):QXEXR (SEQ ID NO: 84276), SSVKXQP (SEQ ID NO: 84430):APTHH (SEQ ID NO: 84130):SATS (SEQ ID NO: 84117):EYVRKKPKL (SEQ ID NO: 84974):LRKHR (SEQ ID NO: 84233):RLVVK (SEQ ID NO: 84289):LEXAXA (SEQ ID NO: 84400), RNVQXRP (SEQ ID NO: 84427):APTQL (SEQ ID NO: 84134):SATS (SEQ ID NO: 84117):EIVRKKPIF (SEQ ID NO: 84973):LRKHR (SEQ ID NO: 84233):TLVVK (SEQ ID NO: 84318):LAXKXE (SEQ ID NO: 84399), KIPKAXX (SEQ ID NO: 84424):VPTEL (SEQ ID NO: 84378):SATS (SEQ ID NO: 84117):DENEKVV (SEQ ID NO: 84966):LRKHR (SEQ ID NO: 84233):DMVVE (SEQ ID NO: 84161):GXGXR (SEQ ID NO: 84208), GIPEPXX (SEQ ID NO: 84419):VPEKM (SEQ ID NO: 84360):SATS (SEQ ID NO: 84117):DENKNVV (SEQ ID NO: 84967):LRKHR (SEQ ID NO: 84233):NMTVE (SEQ ID NO: 84267):SXAXR (SEQ ID NO: 84303), SIPKAXX (SEQ ID NO: 84429):VPTEL (SEQ ID NO: 84378):SATS (SEQ ID NO: 84117):DEYDKVV (SEQ ID NO: 84968):LRKHR (SEQ ID NO: 84233):EMVVE (SEQ ID NO: 84175):GXGXR (SEQ ID NO: 84208), HVTKPTX (SEQ ID NO: 84422):APTKL (SEQ ID NO: 84131):SATS (SEQ ID NO: 84117):DDSSNVI (SEQ ID NO: 84965):LRKHR (SEQ ID NO: 84233):NMVVR (SEQ ID NO: 84275):SXGXH (SEQ ID NO: 84304), YVPKPXX (SEQ ID NO: 84433):APTKL (SEQ ID NO: 84131):SATS (SEQ ID NO: 84117):DDSSNVI (SEQ ID NO: 84965):LRKHR (SEQ ID NO: 84233):NMVVR (SEQ ID NO: 84275):SXGXH (SEQ ID NO: 84304), TVPKPXX (SEQ ID NO: 84432):APTQL (SEQ ID NO: 84134):SATS (SEQ ID NO: 84117):DDSSNVI (SEQ ID NO: 84965):LRKHR (SEQ ID NO: 84233):NMVVR (SEQ ID NO: 84275):AXGXH (SEQ ID NO: 84147), KVGKAXX (SEQ ID NO: 84425):VPTKL (SEQ ID NO: 84381):SATS (SEQ ID NO: 84117):DDMGVPT (SEQ ID NO: 84964):LRKHR (SEQ ID NO: 84233):EGMSVAE (SEQ ID NO: 84411):XGXR (SEQ ID NO: 84123), KASKAXX (SEQ ID NO: 84423):VPTKL (SEQ ID NO: 84381):SATS (SEQ ID NO: 84117):DKGVVTY (SEQ ID NO: 84969):LRKHR (SEQ ID NO: 84233):GMAVS (SEQ ID NO: 84194):EXGXR (SEQ ID NO: 84179), GSAGPXX (SEQ ID NO: 84420):TPTKM (SEQ ID NO: 84327):SATS (SEQ ID NO: 84117):NDKQQII (SEQ ID NO: 84979):LRKHR (SEQ ID NO: 84233):GMVVD (SEQ ID NO: 84204):RXGXS (SEQ ID NO: 84291), AAPASXX (SEQ ID NO: 84401):VPARL (SEQ ID NO: 84352):SATS (SEQ ID NO: 84117):DAANNVV (SEQ ID NO: 84963):LRKHR (SEQ ID NO: 84233):DMVVE (SEQ ID NO: 84161):AXGXR (SEQ ID NO: 84148), STPPTXX (SEQ ID NO: 84431):VPTRL (SEQ ID NO: 84385):SATS (SEQ ID NO: 84117):DSANNVV (SEQ ID NO: 84971):LRKHR (SEQ ID NO: 84233):DMVVE (SEQ ID NO: 84161):SXGXR (SEQ ID NO: 84305), HVPKPXX (SEQ ID NO: 84421):APTKL (SEQ ID NO: 84131):SATS (SEQ ID NO: 84117):DDSSNVI (SEQ ID NO: 84965):LRKHR (SEQ ID NO: 84233):NMVVR (SEQ ID NO: 84275):SXGXH (SEQ ID NO: 84304), RVPSTXX (SEQ ID NO: 84428):APVKT (SEQ ID NO: 84144):SATS (SEQ ID NO: 84117):DNGRVLL (SEQ ID NO: 84970):LRKHR (SEQ ID NO: 84233):MIVEE (SEQ ID NO: 84241):XGXL (SEQ ID NO: 84122), ASAAPXX (SEQ ID NO: 84402):VPQAL (SEQ ID NO: 84364):SATS (SEQ ID NO: 84117):VGRKPKV (SEQ ID NO: 84981):LRKHR (SEQ ID NO: 84233):MIVRS (SEQ ID NO: 84243):XKXS (SEQ ID NO: 84124), ASASPXX (SEQ ID NO: 84403):VSQDL (SEQ ID NO: 84387):SATS (SEQ ID NO: 84117):IGKTPKI (SEQ ID NO: 84978):LRKHR (SEQ ID NO: 84233):MIVKS (SEQ ID NO: 84242):XKXS (SEQ ID NO: 84124), ASASPXX (SEQ ID NO: 84403):VPQDL (SEQ ID NO: 84365):SATS (SEQ ID NO: 84117):VGRTPKV (SEQ ID NO: 84982):LRKHR (SEQ ID NO: 84233):MVVKS (SEQ ID NO: 84256):XKXS (SEQ ID NO: 84124), NDEGLXS (SEQ ID NO: 85019):VPTEE (SEQ ID NO: 84377):SATS (SEQ ID NO: 84117):RIKPHQGQH (SEQ ID NO: 84980):LRKHR (SEQ ID NO: 84233):FLQHN (SEQ ID NO: 84184):KXEXR (SEQ ID NO: 84213), NDEGLXS (SEQ ID NO: 85019):VPTGQ (SEQ ID NO: 84379):SATS (SEQ ID NO: 84117):RIKPHQGQH (SEQ ID NO: 84980):LRKHR (SEQ ID NO: 84233):LEEHS (SEQ ID NO: 84217):QXEXR (SEQ ID NO: 84276), SSVKXQP (SEQ ID NO: 84430):SRVHH (SEQ ID NO: 84297):SATS (SEQ ID NO: 84117):EYVRKKPKL (SEQ ID NO: 84974):LRKHR (SEQ ID NO: 84233):RLEEH (SEQ ID NO: 84279):LEXAXA (SEQ ID NO: 84400), RNVQXRP (SEQ ID NO: 84427):TQVQL (SEQ ID NO: 84340):SATS (SEQ ID NO: 84117):EIVRKKPIF (SEQ ID NO: 84973):LRKHR (SEQ ID NO: 84233):TLEDH (SEQ ID NO: 84307):LAXKXE (SEQ ID NO: 84399), KIPKAXX (SEQ ID NO: 84424):VPTEL (SEQ ID NO: 84378):SPIS (SEQ ID NO: 84120):DENEKVV (SEQ ID NO: 84966):LKYHY (SEQ ID NO: 84232):DMVAE (SEQ ID NO: 84156):GXGXR (SEQ ID NO: 84208), GIPEPXX (SEQ ID NO: 84419):VPTKM (SEQ ID NO: 84382):SPIS (SEQ ID NO: 84120):DENKNVV (SEQ ID NO: 84967):LKYHY (SEQ ID NO: 84232):NMVAE (SEQ ID NO: 84268):SXAXR (SEQ ID NO: 84303), SIPKAXX (SEQ ID NO: 84429):VPTEL (SEQ ID NO: 84378):SPIS (SEQ ID NO: 84120):DEYDKVV (SEQ ID NO: 84968):LKYHY (SEQ ID NO: 84232):EMVAE (SEQ ID NO: 84170):GXGXR (SEQ ID NO: 84208), HVTKPTX (SEQ ID NO: 84422):VPTKL (SEQ ID NO: 84381):SPIS (SEQ ID NO: 84120):DDSSNVI (SEQ ID NO: 84965):LKYHY (SEQ ID NO: 84232):NMVAE (SEQ ID NO: 84268):SXGXH (SEQ ID NO: 84304), YVPKPXX (SEQ ID NO: 84433):VPTKL (SEQ ID NO: 84381):SPIS (SEQ ID NO: 84120):DDSSNVI (SEQ ID NO: 84965):LKYHY (SEQ ID NO: 84232):NMVAE (SEQ ID NO: 84268):SXGXH (SEQ ID NO: 84304), TVPKPXX (SEQ ID NO: 84432):VPTQL (SEQ ID NO: 84384):SPIS (SEQ ID NO: 84120):DDSSNVI (SEQ ID NO: 84965):LKYHY (SEQ ID NO: 84232):NMVAE (SEQ ID NO: 84268):AXGXH (SEQ ID NO: 84147), AVPKAXX (SEQ ID NO: 84404):VPTKL (SEQ ID NO: 84381):SPIS (SEQ ID NO: 84120):DSSNNVI (SEQ ID NO: 84972):LKYHY (SEQ ID NO: 84232):NMVAE (SEQ ID NO: 84268):AXGXH (SEQ ID NO: 84147), KASKAXX (SEQ ID NO: 84423):VPTKL (SEQ ID NO: 84381):SPIS (SEQ ID NO: 84120):DKGVVTY (SEQ ID NO: 84969):LKYHY (SEQ ID NO: 84232):GMVAE (SEQ ID NO: 84200):EXGXR (SEQ ID NO: 84179), GSAGPXX (SEQ ID NO: 84420):VPTKM (SEQ ID NO: 84382):SPIS (SEQ ID NO: 84120):NDKQQII (SEQ ID NO: 84979):LKYHY (SEQ ID NO: 84232):GMVAE (SEQ ID NO: 84200):RXGXS (SEQ ID NO: 84291), AAPASXX (SEQ ID NO: 84401):VPTRL (SEQ ID NO: 84385):SPIS (SEQ ID NO: 84120):DAANNVV (SEQ ID NO: 84963):LKYHY (SEQ ID NO: 84232):DMVAE (SEQ ID NO: 84156):AXGXR (SEQ ID NO: 84148), STPPTXX (SEQ ID NO: 84431):VPTRL (SEQ ID NO: 84385):SPIS (SEQ ID NO: 84120):DSANNVV (SEQ ID NO: 84971):LKYHY (SEQ ID NO: 84232):DMVAE (SEQ ID NO: 84156):SXGXR (SEQ ID NO: 84305), HVPKPXX (SEQ ID NO: 84421):VPTKL (SEQ ID NO: 84381):SPIS (SEQ ID NO: 84120):DDSSNVI (SEQ ID NO: 84965):LKYHY (SEQ ID NO: 84232):NMVAE (SEQ ID NO: 84268):SXGXH (SEQ ID NO: 84304), RVPSTXX (SEQ ID NO: 84428):VPTKT (SEQ ID NO: 84383):SPIS (SEQ ID NO: 84120):DNGRVLL (SEQ ID NO: 84970):LKYHY (SEQ ID NO: 84232):MIVAE (SEQ ID NO: 84240):XGXL (SEQ ID NO: 84122), ASAAPXX (SEQ ID NO: 84402):VPTAL (SEQ ID NO: 84375):SPIS (SEQ ID NO: 84120):VGRKPKV (SEQ ID NO: 84981):LKYHY (SEQ ID NO: 84232):MIVAE (SEQ ID NO: 84240):XKXS (SEQ ID NO: 84124), ASASPXX (SEQ ID NO: 84403):VPTDL (SEQ ID NO: 84376):SPIS (SEQ ID NO: 84120):IGKTPKI (SEQ ID NO: 84978):LKYHY (SEQ ID NO: 84232):MIVAE (SEQ ID NO: 84240):XKXS (SEQ ID NO: 84124), ASASPXX (SEQ ID NO: 84403):VPTDL (SEQ ID NO: 84376):SPIS (SEQ ID NO: 84120):VGRTPKV (SEQ ID NO: 84982):LKYHY (SEQ ID NO: 84232):MVVAE (SEQ ID NO: 84254):XKXS (SEQ ID NO: 84124), NDEGLXS (SEQ ID NO: 85019):VPTEE (SEQ ID NO: 84377):SPIS (SEQ ID NO: 84120):RIKPHQGQH (SEQ ID NO: 84980):LKYHY (SEQ ID NO: 84232):FLVAE (SEQ ID NO: 84186):KXEXR (SEQ ID NO: 84213), NDEGLXS (SEQ ID NO: 85019):VPTGQ (SEQ ID NO: 84379):SPIS (SEQ ID NO: 84120):RIKPHQGQH (SEQ ID NO: 84980):LKYHY (SEQ ID NO: 84232):LEVAE (SEQ ID NO: 84220):QXEXR (SEQ ID NO: 84276), SSVKXQP (SEQ ID NO: 84430):VPTHH (SEQ ID NO: 84380):SPIS (SEQ ID NO: 84120):EYVRKKPKL (SEQ ID NO: 84974):LKYHY (SEQ ID NO: 84232):RLVAE (SEQ ID NO: 84283):LEXAXA (SEQ ID NO: 84400), RNVQXRP (SEQ ID NO: 84427):VPTQL (SEQ ID NO: 84384):SPIS (SEQ ID NO: 84120):EIVRKKPIF (SEQ ID NO: 84973):LKYHY (SEQ ID NO: 84232):TLVAE (SEQ ID NO: 84312):LAXKXE (SEQ ID NO: 84399), KIPKAXX (SEQ ID NO: 84424):VPTEL (SEQ ID NO: 84378):SPIS (SEQ ID NO: 84120):DENEKVV (SEQ ID NO: 84966):LKYHY (SEQ ID NO: 84232):DMVVE (SEQ ID NO: 84161):GXGXR (SEQ ID NO: 84208), GIPEPXX (SEQ ID NO: 84419):VPEKM (SEQ ID NO: 84360):SPIS (SEQ ID NO: 84120):DENKNVV (SEQ ID NO: 84967):LKYHY (SEQ ID NO: 84232):NMTVE (SEQ ID NO: 84267):SXAXR (SEQ ID NO: 84303), SIPKAXX (SEQ ID NO: 84429):VPTEL (SEQ ID NO: 84378):SPIS (SEQ ID NO: 84120):DEYDKVV (SEQ ID NO: 84968):LKYHY (SEQ ID NO: 84232):EMVVE (SEQ ID NO: 84175):GXGXR (SEQ ID NO: 84208), HVTKPTX (SEQ ID NO: 84422):APTKL (SEQ ID NO: 84131):SPIS (SEQ ID NO: 84120):DDSSNVI (SEQ ID NO: 84965):LKYHY (SEQ ID NO: 84232):NMVVR (SEQ ID NO: 84275):SXGXH (SEQ ID NO: 84304), YVPKPXX (SEQ ID NO: 84433):APTKL (SEQ ID NO: 84131):SPIS (SEQ ID NO: 84120):DDSSNVI (SEQ ID NO: 84965):LKYHY (SEQ ID NO: 84232):NMVVR (SEQ ID NO: 84275):SXGXH (SEQ ID NO: 84304), TVPKPXX (SEQ ID NO: 84432):APTQL (SEQ ID NO: 84134):SPIS (SEQ ID NO: 84120):DDSSNVI (SEQ ID NO: 84965):LKYHY (SEQ ID NO: 84232):NMVVR (SEQ ID NO: 84275):AXGXH (SEQ ID NO: 84147), AVPKAXX (SEQ ID NO: 84404):APTKL (SEQ ID NO: 84131):SPIS (SEQ ID NO: 84120):DSSNNVI (SEQ ID NO: 84972):LKYHY (SEQ ID NO: 84232):NMVVK (SEQ ID NO: 84274):AXGXH (SEQ ID NO: 84147), KASKAXX (SEQ ID NO: 84423):VPTKL (SEQ ID NO: 84381):SPIS (SEQ ID NO: 84120):DKGVVTY (SEQ ID NO: 84969):LKYHY (SEQ ID NO: 84232):GMAVS (SEQ ID NO: 84194):EXGXR (SEQ ID NO: 84179), GSAGPXX (SEQ ID NO: 84420):TPTKM (SEQ ID NO: 84327):SPIS (SEQ ID NO: 84120):NDKQQII (SEQ ID NO: 84979):LKYHY (SEQ ID NO: 84232):GMVVD (SEQ ID NO: 84204):RXGXS (SEQ ID NO: 84291), AAPASXX (SEQ ID NO: 84401):VPARL (SEQ ID NO: 84352):SPIS (SEQ ID NO: 84120):DAANNVV (SEQ ID NO: 84963):LKYHY (SEQ ID NO: 84232):DMVVE (SEQ ID NO: 84161):AXGXR (SEQ ID NO: 84148), STPPTXX (SEQ ID NO: 84431):VPTRL (SEQ ID NO: 84385):SPIS (SEQ ID NO: 84120):DSANNVV (SEQ ID NO: 84971):LKYHY (SEQ ID NO: 84232):DMVVE (SEQ ID NO: 84161):SXGXR (SEQ ID NO: 84305), HVPKPXX (SEQ ID NO: 84421):APTKL (SEQ ID NO: 84131):SPIS (SEQ ID NO: 84120):DDSSNVI (SEQ ID NO: 84965):LKYHY (SEQ ID NO: 84232):NMVVR (SEQ ID NO: 84275):SXGXH (SEQ ID NO: 84304), RVPSTXX (SEQ ID NO: 84428):APVKT (SEQ ID NO: 84144):SPIS (SEQ ID NO: 84120):DNGRVLL (SEQ ID NO: 84970):LKYHY (SEQ ID NO: 84232):MIVEE (SEQ ID NO: 84241):XGXL (SEQ ID NO: 84122), ASAAPXX (SEQ ID NO: 84402):VPQAL (SEQ ID NO: 84364):SPIS (SEQ ID NO: 84120):VGRKPKV (SEQ ID NO: 84981):LKYHY (SEQ ID NO: 84232):MIVRS (SEQ ID NO: 84243):XKXS (SEQ ID NO: 84124), ASASPXX (SEQ ID NO: 84403):VSQDL (SEQ ID NO: 84387):SPIS (SEQ ID NO: 84120):IGKTPKI (SEQ ID NO: 84978):LKYHY (SEQ ID NO: 84232):MIVKS (SEQ ID NO: 84242):XKXS (SEQ ID NO: 84124), ASASPXX (SEQ ID NO: 84403):VPQDL (SEQ ID NO: 84365):SPIS (SEQ ID NO: 84120):VGRTPKV (SEQ ID NO: 84982):LKYHY (SEQ ID NO: 84232):MVVKS (SEQ ID NO: 84256):XKXS (SEQ ID NO: 84124), NDEGLXS (SEQ ID NO: 85019):VPTEE (SEQ ID NO: 84377):SPIS (SEQ ID NO: 84120):RIKPHQGQH (SEQ ID NO: 84980):LKYHY (SEQ ID NO: 84232):FLQHN (SEQ ID NO: 84184):KXEXR (SEQ ID NO: 84213), NDEGLXS (SEQ ID NO: 85019):VPTGQ (SEQ ID NO: 84379):SPIS (SEQ ID NO: 84120):RIKPHQGQH (SEQ ID NO: 84980):LKYHY (SEQ ID NO: 84232):LEEHS (SEQ ID NO: 84217):QXEXR (SEQ ID NO: 84276), SSVKXQP (SEQ ID NO: 84430):SRVHH (SEQ ID NO: 84297):SPIS (SEQ ID NO: 84120):EYVRKKPKL (SEQ ID NO: 84974):LKYHY (SEQ ID NO: 84232):RLEEH (SEQ ID NO: 84279):LEXAXA (SEQ ID NO: 84400), RNVQXRP (SEQ ID NO: 84427):TQVQL (SEQ ID NO: 84340):SPIS (SEQ ID NO: 84120):EIVRKKPIF (SEQ ID NO: 84973):LKYHY (SEQ ID NO: 84232):TLEDH (SEQ ID NO: 84307):LAXKXE (SEQ ID NO: 84399), KIPKAXX (SEQ ID NO: 84424):VPTEL (SEQ ID NO: 84378):EPIS (SEQ ID NO: 84109):DENEKVV (SEQ ID NO: 84966):KFKYE (SEQ ID NO: 84211):DMAVS (SEQ ID NO: 84150):GXGXR (SEQ ID NO: 84208), GIPEPXX (SEQ ID NO: 84419):VPTKM (SEQ ID NO: 84382):EPIS (SEQ ID NO: 84109):DENKNVV (SEQ ID NO: 84967):KFKYE (SEQ ID NO: 84211):NMAVS (SEQ ID NO: 84262):SXAXR (SEQ ID NO: 84303), SIPKAXX (SEQ ID NO: 84429):VPTEL (SEQ ID NO: 84378):EPIS (SEQ ID NO: 84109):DEYDKVV (SEQ ID NO: 84968):KFKYE (SEQ ID NO: 84211):EMAVS (SEQ ID NO: 84164):GXGXR (SEQ ID NO: 84208), HVTKPTX (SEQ ID NO: 84422):VPTKL (SEQ ID NO: 84381):EPIS (SEQ ID NO: 84109):DDSSNVI (SEQ ID NO: 84965):KFKYE (SEQ ID NO: 84211):NMAVS (SEQ ID NO: 84262):SXGXH (SEQ ID NO: 84304), YVPKPXX (SEQ ID NO: 84433):VPTKL (SEQ ID NO: 84381):EPIS (SEQ ID NO: 84109):DDSSNVI (SEQ ID NO: 84965):KFKYE (SEQ ID NO: 84211):NMAVS (SEQ ID NO: 84262):SXGXH (SEQ ID NO: 84304), TVPKPXX (SEQ ID NO: 84432):VPTQL (SEQ ID NO: 84384):EPIS (SEQ ID NO: 84109):DDSSNVI (SEQ ID NO: 84965):KFKYE (SEQ ID NO: 84211):NMAVS (SEQ ID NO: 84262):AXGXH (SEQ ID NO: 84147), AVPKAXX (SEQ ID NO: 84404):VPTKL (SEQ ID NO: 84381):EPIS (SEQ ID NO: 84109):DSSNNVI (SEQ ID NO: 84972):KFKYE (SEQ ID NO: 84211):NMAVS (SEQ ID NO: 84262):AXGXH (SEQ ID NO: 84147), KVGKAXX (SEQ ID NO: 84425):VPTKL (SEQ ID NO: 84381):EPIS (SEQ ID NO: 84109):DDMGVPT (SEQ ID NO: 84964):KFKYE (SEQ ID NO: 84211):EGMSAVS (SEQ ID NO: 84405):XGXR (SEQ ID NO: 84123), GSAGPXX (SEQ ID NO: 84420):VPTKM (SEQ ID NO: 84382):EPIS (SEQ ID NO: 84109):NDKQQII (SEQ ID NO: 84979):KFKYE (SEQ ID NO: 84211):GMAVS (SEQ ID NO: 84194):RXGXS (SEQ ID NO: 84291), AAPASXX (SEQ ID NO: 84401):VPTRL (SEQ ID NO: 84385):EPIS (SEQ ID NO: 84109):DAANNVV (SEQ ID NO: 84963):KFKYE (SEQ ID NO: 84211):DMAVS (SEQ ID NO: 84150):AXGXR (SEQ ID NO: 84148), STPPTXX (SEQ ID NO: 84431):VPTRL (SEQ ID NO: 84385):EPIS (SEQ ID NO: 84109):DSANNVV (SEQ ID NO: 84971):KFKYE (SEQ ID NO: 84211):DMAVS (SEQ ID NO: 84150):SXGXR (SEQ ID NO: 84305), HVPKPXX (SEQ ID NO: 84421):VPTKL (SEQ ID NO: 84381):EPIS (SEQ ID NO: 84109):DDSSNVI (SEQ ID NO: 84965):KFKYE (SEQ ID NO: 84211):NMAVS (SEQ ID NO: 84262):SXGXH (SEQ ID NO: 84304), RVPSTXX (SEQ ID NO: 84428):VPTKT (SEQ ID NO: 84383):EPIS (SEQ ID NO: 84109):DNGRVLL (SEQ ID NO: 84970):KFKYE (SEQ ID NO: 84211):MIAVS (SEQ ID NO: 84234):XGXL (SEQ ID NO: 84122), ASAAPXX (SEQ ID NO: 84402):VPTAL (SEQ ID NO: 84375):EPIS (SEQ ID NO: 84109):VGRKPKV (SEQ ID NO: 84981):KFKYE (SEQ ID NO: 84211):MIAVS (SEQ ID NO: 84234):XKXS (SEQ ID NO: 84124), ASASPXX (SEQ ID NO: 84403):VPTDL (SEQ ID NO: 84376):EPIS (SEQ ID NO: 84109):IGKTPKI (SEQ ID NO: 84978):KFKYE (SEQ ID NO: 84211):MIAVS (SEQ ID NO: 84234):XKXS (SEQ ID NO: 84124), ASASPXX (SEQ ID NO: 84403):VPTDL (SEQ ID NO: 84376):EPIS (SEQ ID NO: 84109):VGRTPKV (SEQ ID NO: 84982):KFKYE (SEQ ID NO: 84211):MVAVS (SEQ ID NO: 84248):XKXS (SEQ ID NO: 84124), NDEGLXS (SEQ ID NO: 85019):VPTEE (SEQ ID NO: 84377):EPIS (SEQ ID NO: 84109):RIKPHQGQH (SEQ ID NO: 84980):KFKYE (SEQ ID NO: 84211):FLAVS (SEQ ID NO: 84180):KXEXR (SEQ ID NO: 84213), NDEGLXS (SEQ ID NO: 85019):VPTGQ (SEQ ID NO: 84379):EPIS (SEQ ID NO: 84109):RIKPHQGQH (SEQ ID NO: 84980):KFKYE (SEQ ID NO: 84211):LEAVS (SEQ ID NO: 84214):QXEXR (SEQ ID NO: 84276), SSVKXQP (SEQ ID NO: 84430):VPTHH (SEQ ID NO: 84380):EPIS (SEQ ID NO: 84109):EYVRKKPKL (SEQ ID NO: 84974):KFKYE (SEQ ID NO: 84211):RLAVS (SEQ ID NO: 84277):LEXAXA (SEQ ID NO: 84400), RNVQXRP (SEQ ID NO: 84427):VPTQL (SEQ ID NO: 84384):EPIS (SEQ ID NO: 84109):EIVRKKPIF (SEQ ID NO: 84973):KFKYE (SEQ ID NO: 84211):TLAVS (SEQ ID NO: 84306):LAXKXE (SEQ ID NO: 84399), KIPKAXX (SEQ ID NO: 84424):VPTEL (SEQ ID NO: 84378):EPIS (SEQ ID NO: 84109):DENEKVV (SEQ ID NO: 84966):KFKYE (SEQ ID NO: 84211):DMVVE (SEQ ID NO: 84161):GXGXR (SEQ ID NO: 84208), GIPEPXX (SEQ ID NO: 84419):VPEKM (SEQ ID NO: 84360):EPIS (SEQ ID NO: 84109):DENKNVV (SEQ ID NO: 84967):KFKYE (SEQ ID NO: 84211):NMTVE (SEQ ID NO: 84267):SXAXR (SEQ ID NO: 84303), SIPKAXX (SEQ ID NO: 84429):VPTEL (SEQ ID NO: 84378):EPIS (SEQ ID NO: 84109):DEYDKVV (SEQ ID NO: 84968):KFKYE (SEQ ID NO: 84211):EMVVE (SEQ ID NO: 84175):GXGXR (SEQ ID NO: 84208), HVTKPTX (SEQ ID NO: 84422):APTKL (SEQ ID NO: 84131):EPIS (SEQ ID NO: 84109):DDSSNVI (SEQ ID NO: 84965):KFKYE (SEQ ID NO: 84211):NMVVR (SEQ ID NO: 84275):SXGXH (SEQ ID NO: 84304), YVPKPXX (SEQ ID NO: 84433):APTKL (SEQ ID NO: 84131):EPIS (SEQ ID NO: 84109):DDSSNVI (SEQ ID NO: 84965):KFKYE (SEQ ID NO: 84211):NMVVR (SEQ ID NO: 84275):SXGXH (SEQ ID NO: 84304), TVPKPXX (SEQ ID NO: 84432):APTQL (SEQ ID NO: 84134):EPIS (SEQ ID NO: 84109):DDSSNVI (SEQ ID NO: 84965):KFKYE (SEQ ID NO: 84211):NMVVR (SEQ ID NO: 84275):AXGXH (SEQ ID NO: 84147), AVPKAXX (SEQ ID NO: 84404):APTKL (SEQ ID NO: 84131):EPIS (SEQ ID NO: 84109):DSSNNVI (SEQ ID NO: 84972):KFKYE (SEQ ID NO: 84211):NMVVK (SEQ ID NO: 84274):AXGXH (SEQ ID NO: 84147), KVGKAXX (SEQ ID NO: 84425):VPTKL (SEQ ID NO: 84381):EPIS (SEQ ID NO: 84109):DDMGVPT (SEQ ID NO: 84964):KFKYE (SEQ ID NO: 84211):EGMSVAE (SEQ ID NO: 84411):XGXR (SEQ ID NO: 84123), GSAGPXX (SEQ ID NO: 84420):TPTKM (SEQ ID NO: 84327):EPIS (SEQ ID NO: 84109):NDKQQII (SEQ ID NO: 84979):KFKYE (SEQ ID NO: 84211):GMVVD (SEQ ID NO: 84204):RXGXS (SEQ ID NO: 84291), AAPASXX (SEQ ID NO: 84401):VPARL (SEQ ID NO: 84352):EPIS (SEQ ID NO: 84109):DAANNVV (SEQ ID NO: 84963):KFKYE (SEQ ID NO: 84211):DMVVE (SEQ ID NO: 84161):AXGXR (SEQ ID NO: 84148), STPPTXX (SEQ ID NO: 84431):VPTRL (SEQ ID NO: 84385):EPIS (SEQ ID NO: 84109):DSANNVV (SEQ ID NO: 84971):KFKYE (SEQ ID NO: 84211):DMVVE (SEQ ID NO: 84161):SXGXR (SEQ ID NO: 84305), HVPKPXX (SEQ ID NO: 84421):APTKL (SEQ ID NO: 84131):EPIS (SEQ ID NO: 84109):DDSSNVI (SEQ ID NO: 84965):KFKYE (SEQ ID NO: 84211):NMVVR (SEQ ID NO: 84275):SXGXH (SEQ ID NO: 84304), RVPSTXX (SEQ ID NO: 84428):APVKT (SEQ ID NO: 84144):EPIS (SEQ ID NO: 84109):DNGRVLL (SEQ ID NO: 84970):KFKYE (SEQ ID NO: 84211):MIVEE (SEQ ID NO: 84241):XGXL (SEQ ID NO: 84122), ASAAPXX (SEQ ID NO: 84402):VPQAL (SEQ ID NO: 84364):EPIS (SEQ ID NO: 84109):VGRKPKV (SEQ ID NO: 84981):KFKYE (SEQ ID NO: 84211):MIVRS (SEQ ID NO: 84243):XKXS (SEQ ID NO: 84124), ASASPXX (SEQ ID NO: 84403):VSQDL (SEQ ID NO: 84387):EPIS (SEQ ID NO: 84109):IGKTPKI (SEQ ID NO: 84978):KFKYE (SEQ ID NO: 84211):MIVKS (SEQ ID NO: 84242):XKXS (SEQ ID NO: 84124), ASASPXX (SEQ ID NO: 84403):VPQDL (SEQ ID NO: 84365):EPIS (SEQ ID NO: 84109):VGRTPKV (SEQ ID NO: 84982):KFKYE (SEQ ID NO: 84211):MVVKS (SEQ ID NO: 84256):XKXS (SEQ ID NO: 84124), NDEGLXS (SEQ ID NO: 85019):VPTEE (SEQ ID NO: 84377):EPIS (SEQ ID NO: 84109):RIKPHQGQH (SEQ ID NO: 84980):KFKYE (SEQ ID NO: 84211):FLQHN (SEQ ID NO: 84184):KXEXR (SEQ ID NO: 84213), NDEGLXS (SEQ ID NO: 85019):VPTGQ (SEQ ID NO: 84379):EPIS (SEQ ID NO: 84109):RIKPHQGQH (SEQ ID NO: 84980):KFKYE (SEQ ID NO: 84211):LEEHS (SEQ ID NO: 84217):QXEXR (SEQ ID NO: 84276), SSVKXQP (SEQ ID NO: 84430):SRVHH (SEQ ID NO: 84297):EPIS (SEQ ID NO: 84109):EYVRKKPKL (SEQ ID NO: 84974):KFKYE (SEQ ID NO: 84211):RLEEH (SEQ ID NO: 84279):LEXAXA (SEQ ID NO: 84400), RNVQXRP (SEQ ID NO: 84427):TQVQL (SEQ ID NO: 84340):EPIS (SEQ ID NO: 84109):EIVRKKPIF (SEQ ID NO: 84973):KFKYE (SEQ ID NO: 84211):TLEDH (SEQ ID NO: 84307):LAXKXE (SEQ ID NO: 84399), KIPKAXX (SEQ ID NO: 84424):TPTEL (SEQ ID NO: 84323):SPIN (SEQ ID NO: 84119):DENEKVV (SEQ ID NO: 84966):YGKIP (SEQ ID NO: 84397):DMVVD (SEQ ID NO: 84160):GXGXR (SEQ ID NO: 84208), GIPEPXX (SEQ ID NO: 84419):TPTKM (SEQ ID NO: 84327):SPIN (SEQ ID NO: 84119):DENKNVV (SEQ ID NO: 84967):YGKIP (SEQ ID NO: 84397):NMVVD (SEQ ID NO: 84272):SXAXR (SEQ ID NO: 84303), SIPKAXX (SEQ ID NO: 84429):TPTEL (SEQ ID NO: 84323):SPIN (SEQ ID NO: 84119):DEYDKVV (SEQ ID NO: 84968):YGKIP (SEQ ID NO: 84397):EMVVD (SEQ ID NO: 84174):GXGXR (SEQ ID NO: 84208), HVTKPTX (SEQ ID NO: 84422):TPTKL (SEQ ID NO: 84326):SPIN (SEQ ID NO: 84119):DDSSNVI (SEQ ID NO: 84965):YGKIP (SEQ ID NO: 84397):NMVVD (SEQ ID NO: 84272):SXGXH (SEQ ID NO: 84304), YVPKPXX (SEQ ID NO: 84433):TPTKL (SEQ ID NO: 84326):SPIN (SEQ ID NO: 84119):DDSSNVI (SEQ ID NO: 84965):YGKIP (SEQ ID NO: 84397):NMVVD (SEQ ID NO: 84272):SXGXH (SEQ ID NO: 84304), TVPKPXX (SEQ ID NO: 84432):TPTQL (SEQ ID NO: 84329):SPIN (SEQ ID NO: 84119):DDSSNVI (SEQ ID NO: 84965):YGKIP (SEQ ID NO: 84397):NMVVD (SEQ ID NO: 84272):AXGXH (SEQ ID NO: 84147), AVPKAXX (SEQ ID NO: 84404):TPTKL (SEQ ID NO: 84326):SPIN (SEQ ID NO: 84119):DSSNNVI (SEQ ID NO: 84972):YGKIP (SEQ ID NO: 84397):NMVVD (SEQ ID NO: 84272):AXGXH (SEQ ID NO: 84147), KVGKAXX (SEQ ID NO: 84425):TPTKL (SEQ ID NO: 84326):SPIN (SEQ ID NO: 84119):DDMGVPT (SEQ ID NO: 84964):YGKIP (SEQ ID NO: 84397):EGMSVVD (SEQ ID NO: 84415):XGXR (SEQ ID NO: 84123), KASKAXX (SEQ ID NO: 84423):TPTKL (SEQ ID NO: 84326):SPIN (SEQ ID NO: 84119):DKGVVTY (SEQ ID NO: 84969):YGKIP (SEQ ID NO: 84397):GMVVD (SEQ ID NO: 84204):EXGXR (SEQ ID NO: 84179), AAPASXX (SEQ ID NO: 84401):TPTRL (SEQ ID NO: 84330):SPIN (SEQ ID NO: 84119):DAANNVV (SEQ ID NO: 84963):YGKIP (SEQ ID NO: 84397):DMVVD (SEQ ID NO: 84160):AXGXR (SEQ ID NO: 84148), STPPTXX (SEQ ID NO: 84431):TPTRL (SEQ ID NO: 84330):SPIN (SEQ ID NO: 84119):DSANNVV (SEQ ID NO: 84971):YGKIP (SEQ ID NO: 84397):DMVVD (SEQ ID NO: 84160):SXGXR (SEQ ID NO: 84305), HVPKPXX (SEQ ID NO: 84421):TPTKL (SEQ ID NO: 84326):SPIN (SEQ ID NO: 84119):DDSSNVI (SEQ ID NO: 84965):YGKIP (SEQ ID NO: 84397):NMVVD (SEQ ID NO: 84272):SXGXH (SEQ ID NO: 84304), RVPSTXX (SEQ ID NO: 84428):TPTKT (SEQ ID NO: 84328):SPIN (SEQ ID NO: 84119):DNGRVLL (SEQ ID NO: 84970):YGKIP (SEQ ID NO: 84397):MIVVD (SEQ ID NO: 84244):XGXL (SEQ ID NO: 84122), ASAAPXX (SEQ ID NO: 84402):TPTAL (SEQ ID NO: 84320):SPIN (SEQ ID NO: 84119):VGRKPKV (SEQ ID NO: 84981):YGKIP (SEQ ID NO: 84397):MIVVD (SEQ ID NO: 84244):XKXS (SEQ ID NO: 84124), ASASPXX (SEQ ID NO: 84403):TPTDL (SEQ ID NO: 84321):SPIN (SEQ ID NO: 84119):IGKTPKI (SEQ ID NO: 84978):YGKIP (SEQ ID NO: 84397):MIVVD (SEQ ID NO: 84244):XKXS (SEQ ID NO: 84124), ASASPXX (SEQ ID NO: 84403):TPTDL (SEQ ID NO: 84321):SPIN (SEQ ID NO: 84119):VGRTPKV (SEQ ID NO: 84982):YGKIP (SEQ ID NO: 84397):MVVVD (SEQ ID NO: 84258):XKXS (SEQ ID NO: 84124), NDEGLXS (SEQ ID NO: 85019):TPTEE (SEQ ID NO: 84322):SPIN (SEQ ID NO: 84119):RIKPHQGQH (SEQ ID NO: 84980):YGKIP (SEQ ID NO: 84397):FLVVD (SEQ ID NO: 84190):KXEXR (SEQ ID NO: 84213), NDEGLXS (SEQ ID NO: 85019):TPTGQ (SEQ ID NO: 84324):SPIN (SEQ ID NO: 84119):RIKPHQGQH (SEQ ID NO: 84980):YGKIP (SEQ ID NO: 84397):LEVVD (SEQ ID NO: 84224):QXEXR (SEQ ID NO: 84276), SSVKXQP (SEQ ID NO: 84430):TPTHH (SEQ ID NO: 84325):SPIN (SEQ ID NO: 84119):EYVRKKPKL (SEQ ID NO: 84974):YGKIP (SEQ ID NO: 84397):RLVVD (SEQ ID NO: 84287):LEXAXA (SEQ ID NO: 84400), RNVQXRP (SEQ ID NO: 84427):TPTQL (SEQ ID NO: 84329):SPIN (SEQ ID NO: 84119):EIVRKKPIF (SEQ ID NO: 84973):YGKIP (SEQ ID NO: 84397):TLVVD (SEQ ID NO: 84316):LAXKXE (SEQ ID NO: 84399), KIPKAXX (SEQ ID NO: 84424):VPTEL (SEQ ID NO: 84378):SPIN (SEQ ID NO: 84119):DENEKVV (SEQ ID NO: 84966):YGKIP (SEQ ID NO: 84397):DMVVE (SEQ ID NO: 84161):GXGXR (SEQ ID NO: 84208), GIPEPXX (SEQ ID NO: 84419):VPEKM (SEQ ID NO: 84360):SPIN (SEQ ID NO: 84119):DENKNVV (SEQ ID NO: 84967):YGKIP (SEQ ID NO: 84397):NMTVE (SEQ ID NO: 84267):SXAXR (SEQ ID NO: 84303), SIPKAXX (SEQ ID NO: 84429):VPTEL (SEQ ID NO: 84378):SPIN (SEQ ID NO: 84119):DEYDKVV (SEQ ID NO: 84968):YGKIP (SEQ ID NO: 84397):EMVVE (SEQ ID NO: 84175):GXGXR (SEQ ID NO: 84208), HVTKPTX (SEQ ID NO: 84422):APTKL (SEQ ID NO: 84131):SPIN (SEQ ID NO: 84119):DDSSNVI (SEQ ID NO: 84965):YGKIP (SEQ ID NO: 84397):NMVVR (SEQ ID NO: 84275):SXGXH (SEQ ID NO: 84304), YVPKPXX (SEQ ID NO: 84433):APTKL (SEQ ID NO: 84131):SPIN (SEQ ID NO: 84119):DDSSNVI (SEQ ID NO: 84965):YGKIP (SEQ ID NO: 84397):NMVVR (SEQ ID NO: 84275):SXGXH (SEQ ID NO: 84304), TVPKPXX (SEQ ID NO: 84432):APTQL (SEQ ID NO: 84134):SPIN (SEQ ID NO: 84119):DDSSNVI (SEQ ID NO: 84965):YGKIP (SEQ ID NO: 84397):NMVVR (SEQ ID NO: 84275):AXGXH (SEQ ID NO: 84147), AVPKAXX (SEQ ID NO: 84404):APTKL (SEQ ID NO: 84131):SPIN (SEQ ID NO: 84119):DSSNNVI (SEQ ID NO: 84972):YGKIP (SEQ ID NO: 84397):NMVVK (SEQ ID NO: 84274):AXGXH (SEQ ID NO: 84147), KVGKAXX (SEQ ID NO: 84425):VPTKL (SEQ ID NO: 84381):SPIN (SEQ ID NO: 84119):DDMGVPT (SEQ ID NO: 84964):YGKIP (SEQ ID NO: 84397):EGMSVAE (SEQ ID NO: 84411):XGXR (SEQ ID NO: 84123), KASKAXX (SEQ ID NO: 84423):VPTKL (SEQ ID NO: 84381):SPIN (SEQ ID NO: 84119):DKGVVTY (SEQ ID NO: 84969):YGKIP (SEQ ID NO: 84397):GMAVS (SEQ ID NO: 84194):EXGXR (SEQ ID NO: 84179), AAPASXX (SEQ ID NO: 84401):VPARL (SEQ ID NO: 84352):SPIN (SEQ ID NO: 84119):DAANNVV (SEQ ID NO: 84963):YGKIP (SEQ ID NO: 84397):DMVVE (SEQ ID NO: 84161):AXGXR (SEQ ID NO: 84148), STPPTXX (SEQ ID NO: 84431):VPTRL (SEQ ID NO: 84385):SPIN (SEQ ID NO: 84119):DSANNVV (SEQ ID NO: 84971):YGKIP (SEQ ID NO: 84397):DMVVE (SEQ ID NO: 84161):SXGXR (SEQ ID NO: 84305), HVPKPXX (SEQ ID NO: 84421):APTKL (SEQ ID NO: 84131):SPIN (SEQ ID NO: 84119):DDSSNVI (SEQ ID NO: 84965):YGKIP (SEQ ID NO: 84397):NMVVR (SEQ ID NO: 84275):SXGXH (SEQ ID NO: 84304), RVPSTXX (SEQ ID NO: 84428):APVKT (SEQ ID NO: 84144):SPIN (SEQ ID NO: 84119):DNGRVLL (SEQ ID NO: 84970):YGKIP (SEQ ID NO: 84397):MIVEE (SEQ ID NO: 84241):XGXL (SEQ ID NO: 84122), ASAAPXX (SEQ ID NO: 84402):VPQAL (SEQ ID NO: 84364):SPIN (SEQ ID NO: 84119):VGRKPKV (SEQ ID NO: 84981):YGKIP (SEQ ID NO: 84397):MIVRS (SEQ ID NO: 84243):XKXS (SEQ ID NO: 84124), ASASPXX (SEQ ID NO: 84403):VSQDL (SEQ ID NO: 84387):SPIN (SEQ ID NO: 84119):IGKTPKI (SEQ ID NO: 84978):YGKIP (SEQ ID NO: 84397):MIVKS (SEQ ID NO: 84242):XKXS (SEQ ID NO: 84124), ASASPXX (SEQ ID NO: 84403):VPQDL (SEQ ID NO: 84365):SPIN (SEQ ID NO: 84119):VGRTPKV (SEQ ID NO: 84982):YGKIP (SEQ ID NO: 84397):MVVKS (SEQ ID NO: 84256):XKXS (SEQ ID NO: 84124), NDEGLXS (SEQ ID NO: 85019):VPTEE (SEQ ID NO: 84377):SPIN (SEQ ID NO: 84119):RIKPHQGQH (SEQ ID NO: 84980):YGKIP (SEQ ID NO: 84397):FLQHN (SEQ ID NO: 84184):KXEXR (SEQ ID NO: 84213), NDEGLXS (SEQ ID NO: 85019):VPTGQ (SEQ ID NO: 84379):SPIN (SEQ ID NO: 84119):RIKPHQGQH (SEQ ID NO: 84980):YGKIP (SEQ ID NO: 84397):LEEHS (SEQ ID NO: 84217):QXEXR (SEQ ID NO: 84276), SSVKXQP (SEQ ID NO: 84430):SRVHH (SEQ ID NO: 84297):SPIN (SEQ ID NO: 84119):EYVRKKPKL (SEQ ID NO: 84974):YGKIP (SEQ ID NO: 84397):RLEEH (SEQ ID NO: 84279):LEXAXA (SEQ ID NO: 84400), RNVQXRP (SEQ ID NO: 84427):TQVQL (SEQ ID NO: 84340):SPIN (SEQ ID NO: 84119):EIVRKKPIF (SEQ ID NO: 84973):YGKIP (SEQ ID NO: 84397):TLEDH (SEQ ID NO: 84307):LAXKXE (SEQ ID NO: 84399), KIPKAXX (SEQ ID NO: 84424):VPAEL (SEQ ID NO: 84345):SPIS (SEQ ID NO: 84120):DENEKVV (SEQ ID NO: 84966):YKQYE (SEQ ID NO: 84398):DMVVE (SEQ ID NO: 84161):GXGXR (SEQ ID NO: 84208), GIPEPXX (SEQ ID NO: 84419):VPAKM (SEQ ID NO: 84349):SPIS (SEQ ID NO: 84120):DENKNVV (SEQ ID NO: 84967):YKQYE (SEQ ID NO: 84398):NMVVE (SEQ ID NO: 84273):SXAXR (SEQ ID NO: 84303), SIPKAXX (SEQ ID NO: 84429):VPAEL (SEQ ID NO: 84345):SPIS (SEQ ID NO: 84120):DEYDKVV (SEQ ID NO: 84968):YKQYE (SEQ ID NO: 84398):EMVVE (SEQ ID NO: 84175):GXGXR (SEQ ID NO: 84208), HVTKPTX (SEQ ID NO: 84422):VPAKL (SEQ ID NO: 84348):SPIS (SEQ ID NO: 84120):DDSSNVI (SEQ ID NO: 84965):YKQYE (SEQ ID NO: 84398):NMVVE (SEQ ID NO: 84273):SXGXH (SEQ ID NO: 84304), YVPKPXX (SEQ ID NO: 84433):VPAKL (SEQ ID NO: 84348):SPIS (SEQ ID NO: 84120):DDSSNVI (SEQ ID NO: 84965):YKQYE (SEQ ID NO: 84398):NMVVE (SEQ ID NO: 84273):SXGXH (SEQ ID NO: 84304), TVPKPXX (SEQ ID NO: 84432):VPAQL (SEQ ID NO: 84351):SPIS (SEQ ID NO: 84120):DDSSNVI (SEQ ID NO: 84965):YKQYE (SEQ ID NO: 84398):NMVVE (SEQ ID NO: 84273):AXGXH (SEQ ID NO: 84147), AVPKAXX (SEQ ID NO: 84404):VPAKL (SEQ ID NO: 84348):SPIS (SEQ ID NO: 84120):DSSNNVI (SEQ ID NO: 84972):YKQYE (SEQ ID NO: 84398):NMVVE (SEQ ID NO: 84273):AXGXH (SEQ ID NO: 84147), KVGKAXX (SEQ ID NO: 84425):VPAKL (SEQ ID NO: 84348):SPIS (SEQ ID NO: 84120):DDMGVPT (SEQ ID NO: 84964):YKQYE (SEQ ID NO: 84398):EGMSVVE (SEQ ID NO: 84416):XGXR (SEQ ID NO: 84123), KASKAXX (SEQ ID NO: 84423):VPAKL (SEQ ID NO: 84348):SPIS (SEQ ID NO: 84120):DKGVVTY (SEQ ID NO: 84969):YKQYE (SEQ ID NO: 84398):GMVVE (SEQ ID NO: 84205):EXGXR (SEQ ID NO: 84179), GSAGPXX (SEQ ID NO: 84420):VPAKM (SEQ ID NO: 84349):SPIS (SEQ ID NO: 84120):NDKQQII (SEQ ID NO: 84979):YKQYE (SEQ ID NO: 84398):GMVVE (SEQ ID NO: 84205):RXGXS (SEQ ID NO: 84291), STPPTXX (SEQ ID NO: 84431):VPARL (SEQ ID NO: 84352):SPIS (SEQ ID NO: 84120):DSANNVV (SEQ ID NO: 84971):YKQYE (SEQ ID NO: 84398):DMVVE (SEQ ID NO: 84161):SXGXR (SEQ ID NO: 84305), HVPKPXX (SEQ ID NO: 84421):VPAKL (SEQ ID NO: 84348):SPIS (SEQ ID NO: 84120):DDSSNVI (SEQ ID NO: 84965):YKQYE (SEQ ID NO: 84398):NMVVE (SEQ ID NO: 84273):SXGXH (SEQ ID NO: 84304), RVPSTXX (SEQ ID NO: 84428):VPAKT (SEQ ID NO: 84350):SPIS (SEQ ID NO: 84120):DNGRVLL (SEQ ID NO: 84970):YKQYE (SEQ ID NO: 84398):MIVVE (SEQ ID NO: 84245):XGXL (SEQ ID NO: 84122), ASAAPXX (SEQ ID NO: 84402):VPAAL (SEQ ID NO: 84342):SPIS (SEQ ID NO: 84120):VGRKPKV (SEQ ID NO: 84981):YKQYE (SEQ ID NO: 84398):MIVVE (SEQ ID NO: 84245):XKXS (SEQ ID NO: 84124), ASASPXX (SEQ ID NO: 84403):VPADL (SEQ ID NO: 84343):SPIS (SEQ ID NO: 84120):IGKTPKI (SEQ ID NO: 84978):YKQYE (SEQ ID NO: 84398):MIVVE (SEQ ID NO: 84245):XKXS (SEQ ID NO: 84124), ASASPXX (SEQ ID NO: 84403):VPADL (SEQ ID NO: 84343):SPIS (SEQ ID NO: 84120):VGRTPKV (SEQ ID NO: 84982):YKQYE (SEQ ID NO: 84398):MVVVE (SEQ ID NO: 84259):XKXS (SEQ ID NO: 84124), NDEGLXS (SEQ ID NO: 85019):VPAEE (SEQ ID NO: 84344):SPIS (SEQ ID NO: 84120):RIKPHQGQH (SEQ ID NO: 84980):YKQYE (SEQ ID NO: 84398):FLVVE (SEQ ID NO: 84191):KXEXR (SEQ ID NO: 84213), NDEGLXS (SEQ ID NO: 85019):VPAGQ (SEQ ID NO: 84346):SPIS (SEQ ID NO: 84120):RIKPHQGQH (SEQ ID NO: 84980):YKQYE (SEQ ID NO: 84398):LEVVE (SEQ ID NO: 84225):QXEXR (SEQ ID NO: 84276), SSVKXQP (SEQ ID NO: 84430):VPAHH (SEQ ID NO: 84347):SPIS (SEQ ID NO: 84120):EYVRKKPKL (SEQ ID NO: 84974):YKQYE (SEQ ID NO: 84398):RLVVE (SEQ ID NO: 84288):LEXAXA (SEQ ID NO: 84400), RNVQXRP (SEQ ID NO: 84427):VPAQL (SEQ ID NO: 84351):SPIS (SEQ ID NO: 84120):EIVRKKPIF (SEQ ID NO: 84973):YKQYE (SEQ ID NO: 84398):TLVVE (SEQ ID NO: 84317):LAXKXE (SEQ ID NO: 84399), KIPKAXX (SEQ ID NO: 84424):VPTEL (SEQ ID NO: 84378):SPIS (SEQ ID NO: 84120):DENEKVV (SEQ ID NO: 84966):YKQYE (SEQ ID NO: 84398):DMVVE (SEQ ID NO: 84161):GXGXR (SEQ ID NO: 84208), GIPEPXX (SEQ ID NO: 84419):VPEKM (SEQ ID NO: 84360):SPIS (SEQ ID NO: 84120):DENKNVV (SEQ ID NO: 84967):YKQYE (SEQ ID NO: 84398):NMTVE (SEQ ID NO: 84267):SXAXR (SEQ ID NO: 84303), SIPKAXX (SEQ ID NO: 84429):VPTEL (SEQ ID NO: 84378):SPIS (SEQ ID NO: 84120):DEYDKVV (SEQ ID NO: 84968):YKQYE (SEQ ID NO: 84398):EMVVE (SEQ ID NO: 84175):GXGXR (SEQ ID NO: 84208), HVTKPTX (SEQ ID NO: 84422):APTKL (SEQ ID NO: 84131):SPIS (SEQ ID NO: 84120):DDSSNVI (SEQ ID NO: 84965):YKQYE (SEQ ID NO: 84398):NMVVR (SEQ ID NO: 84275):SXGXH (SEQ ID NO: 84304), YVPKPXX (SEQ ID NO: 84433):APTKL (SEQ ID NO: 84131):SPIS (SEQ ID NO: 84120):DDSSNVI (SEQ ID NO: 84965):YKQYE (SEQ ID NO: 84398):NMVVR (SEQ ID NO: 84275):SXGXH (SEQ ID NO: 84304), TVPKPXX (SEQ ID NO: 84432):APTQL (SEQ ID NO: 84134):SPIS (SEQ ID NO: 84120):DDSSNVI (SEQ ID NO: 84965):YKQYE (SEQ ID NO: 84398):NMVVR (SEQ ID NO: 84275):AXGXH (SEQ ID NO: 84147), AVPKAXX (SEQ ID NO: 84404):APTKL (SEQ ID NO: 84131):SPIS (SEQ ID NO: 84120):DSSNNVI (SEQ ID NO: 84972):YKQYE (SEQ ID NO: 84398):NMVVK (SEQ ID NO: 84274):AXGXH (SEQ ID NO: 84147), KVGKAXX (SEQ ID NO: 84425):VPTKL (SEQ ID NO: 84381):SPIS (SEQ ID NO: 84120):DDMGVPT (SEQ ID NO: 84964):YKQYE (SEQ ID NO: 84398):EGMSVAE (SEQ ID NO: 84411):XGXR (SEQ ID NO: 84123), KASKAXX (SEQ ID NO: 84423):VPTKL (SEQ ID NO: 84381):SPIS (SEQ ID NO: 84120):DKGVVTY (SEQ ID NO: 84969):YKQYE (SEQ ID NO: 84398):GMAVS (SEQ ID NO: 84194):EXGXR (SEQ ID NO: 84179), GSAGPXX (SEQ ID NO: 84420):TPTKM (SEQ ID NO: 84327):SPIS (SEQ ID NO: 84120):NDKQQII (SEQ ID NO: 84979):YKQYE (SEQ ID NO: 84398):GMVVD (SEQ ID NO: 84204):RXGXS (SEQ ID NO: 84291), STPPTXX (SEQ ID NO: 84431):VPTRL (SEQ ID NO: 84385):SPIS (SEQ ID NO: 84120):DSANNVV (SEQ ID NO: 84971):YKQYE (SEQ ID NO: 84398):DMVVE (SEQ ID NO: 84161):SXGXR (SEQ ID NO: 84305), HVPKPXX (SEQ ID NO: 84421):APTKL (SEQ ID NO: 84131):SPIS (SEQ ID NO: 84120):DDSSNVI (SEQ ID NO: 84965):YKQYE (SEQ ID NO: 84398):NMVVR (SEQ ID NO: 84275):SXGXH (SEQ ID NO: 84304), RVPSTXX (SEQ ID NO: 84428):APVKT (SEQ ID NO: 84144):SPIS (SEQ ID NO: 84120):DNGRVLL (SEQ ID NO: 84970):YKQYE (SEQ ID NO: 84398):MIVEE (SEQ ID NO: 84241):XGXL (SEQ ID NO: 84122), ASAAPXX (SEQ ID NO: 84402):VPQAL (SEQ ID NO: 84364):SPIS (SEQ ID NO: 84120):VGRKPKV (SEQ ID NO: 84981):YKQYE (SEQ ID NO: 84398):MIVRS (SEQ ID NO: 84243):XKXS (SEQ ID NO: 84124), ASASPXX (SEQ ID NO: 84403):VSQDL (SEQ ID NO: 84387):SPIS (SEQ ID NO: 84120):IGKTPKI (SEQ ID NO: 84978):YKQYE (SEQ ID NO: 84398):MIVKS (SEQ ID NO: 84242):XKXS (SEQ ID NO: 84124), ASASPXX (SEQ ID NO: 84403):VPQDL (SEQ ID NO: 84365):SPIS (SEQ ID NO: 84120):VGRTPKV (SEQ ID NO: 84982):YKQYE (SEQ ID NO: 84398):MVVKS (SEQ ID NO: 84256):XKXS (SEQ ID NO: 84124), NDEGLXS (SEQ ID NO: 85019):VPTEE (SEQ ID NO: 84377):SPIS (SEQ ID NO: 84120):RIKPHQGQH (SEQ ID NO: 84980):YKQYE (SEQ ID NO: 84398):FLQHN (SEQ ID NO: 84184):KXEXR (SEQ ID NO: 84213), NDEGLXS (SEQ ID NO: 85019):VPTGQ (SEQ ID NO: 84379):SPIS (SEQ ID NO: 84120):RIKPHQGQH (SEQ ID NO: 84980):YKQYE (SEQ ID NO: 84398):LEEHS (SEQ ID NO: 84217):QXEXR (SEQ ID NO: 84276), SSVKXQP (SEQ ID NO: 84430):SRVHH (SEQ ID NO: 84297):SPIS (SEQ ID NO: 84120):EYVRKKPKL (SEQ ID NO: 84974):YKQYE (SEQ ID NO: 84398):RLEEH (SEQ ID NO: 84279):LEXAXA (SEQ ID NO: 84400), RNVQXRP (SEQ ID NO: 84427):TQVQL (SEQ ID NO: 84340):SPIS (SEQ ID NO: 84120):EIVRKKPIF (SEQ ID NO: 84973):YKQYE (SEQ ID NO: 84398):TLEDH (SEQ ID NO: 84307):LAXKXE (SEQ ID NO: 84399), GIPEPXX (SEQ ID NO: 84419):VPTKM (SEQ ID NO: 84382):SPIS (SEQ ID NO: 84120):DENKNVV (SEQ ID NO: 84967):YKQYE (SEQ ID NO: 84398):NMVVE (SEQ ID NO: 84273):SXAXR (SEQ ID NO: 84303), HVTKPTX (SEQ ID NO: 84422):VPTKL (SEQ ID NO: 84381):SPIS (SEQ ID NO: 84120):DDSSNVI (SEQ ID NO: 84965):YKQYE (SEQ ID NO: 84398):NMVVE (SEQ ID NO: 84273):SXGXH (SEQ ID NO: 84304), YVPKPXX (SEQ ID NO: 84433):VPTKL (SEQ ID NO: 84381):SPIS (SEQ ID NO: 84120):DDSSNVI (SEQ ID NO: 84965):YKQYE (SEQ ID NO: 84398):NMVVE (SEQ ID NO: 84273):SXGXH (SEQ ID NO: 84304), TVPKPXX (SEQ ID NO: 84432):VPTQL (SEQ ID NO: 84384):SPIS (SEQ ID NO: 84120):DDSSNVI (SEQ ID NO: 84965):YKQYE (SEQ ID NO: 84398):NMVVE (SEQ ID NO: 84273):AXGXH (SEQ ID NO: 84147), AVPKAXX (SEQ ID NO: 84404):VPTKL (SEQ ID NO: 84381):SPIS (SEQ ID NO: 84120):DSSNNVI (SEQ ID NO: 84972):YKQYE (SEQ ID NO: 84398):NMVVE (SEQ ID NO: 84273):AXGXH (SEQ ID NO: 84147), KVGKAXX (SEQ ID NO: 84425):VPTKL (SEQ ID NO: 84381):SPIS (SEQ ID NO: 84120):DDMGVPT (SEQ ID NO: 84964):YKQYE (SEQ ID NO: 84398):EGMSVVE (SEQ ID NO: 84416):XGXR (SEQ ID NO: 84123), KASKAXX (SEQ ID NO: 84423):VPTKL (SEQ ID NO: 84381):SPIS (SEQ ID NO: 84120):DKGVVTY (SEQ ID NO: 84969):YKQYE (SEQ ID NO: 84398):GMVVE (SEQ ID NO: 84205):EXGXR (SEQ ID NO: 84179), GSAGPXX (SEQ ID NO: 84420):VPTKM (SEQ ID NO: 84382):SPIS (SEQ ID NO: 84120):NDKQQII (SEQ ID NO: 84979):YKQYE (SEQ ID NO: 84398):GMVVE (SEQ ID NO: 84205):RXGXS (SEQ ID NO: 84291), AAPASXX (SEQ ID NO: 84401):VPTRL (SEQ ID NO: 84385):SPIS (SEQ ID NO: 84120):DAANNVV (SEQ ID NO: 84963):YKQYE (SEQ ID NO: 84398):DMVVE (SEQ ID NO: 84161):AXGXR (SEQ ID NO: 84148), HVPKPXX (SEQ ID NO: 84421):VPTKL (SEQ ID NO: 84381):SPIS (SEQ ID NO: 84120):DDSSNVI (SEQ ID NO: 84965):YKQYE (SEQ ID NO: 84398):NMVVE (SEQ ID NO: 84273):SXGXH (SEQ ID NO: 84304), RVPSTXX (SEQ ID NO: 84428):VPTKT (SEQ ID NO: 84383):SPIS (SEQ ID NO: 84120):DNGRVLL (SEQ ID NO: 84970):YKQYE (SEQ ID NO: 84398):MIVVE (SEQ ID NO: 84245):XGXL (SEQ ID NO: 84122), ASAAPXX (SEQ ID NO: 84402):VPTAL (SEQ ID NO: 84375):SPIS (SEQ ID NO: 84120):VGRKPKV (SEQ ID NO: 84981):YKQYE (SEQ ID NO: 84398):MIVVE (SEQ ID NO: 84245):XKXS (SEQ ID NO: 84124), ASASPXX (SEQ ID NO: 84403):VPTDL (SEQ ID NO: 84376):SPIS (SEQ ID NO: 84120):IGKTPKI (SEQ ID NO: 84978):YKQYE (SEQ ID NO: 84398):MIVVE (SEQ ID NO: 84245):XKXS (SEQ ID NO: 84124), ASASPXX (SEQ ID NO: 84403):VPTDL (SEQ ID NO: 84376):SPIS (SEQ ID NO: 84120):VGRTPKV (SEQ ID NO: 84982):YKQYE (SEQ ID NO: 84398):MVVVE (SEQ ID NO: 84259):XKXS (SEQ ID NO: 84124), NDEGLXS (SEQ ID NO: 85019):VPTEE (SEQ ID NO: 84377):SPIS (SEQ ID NO: 84120):RIKPHQGQH (SEQ ID NO: 84980):YKQYE (SEQ ID NO: 84398):FLVVE (SEQ ID NO: 84191):KXEXR (SEQ ID NO: 84213), NDEGLXS (SEQ ID NO: 85019):VPTGQ (SEQ ID NO: 84379):SPIS (SEQ ID NO: 84120):RIKPHQGQH (SEQ ID NO: 84980):YKQYE (SEQ ID NO: 84398):LEVVE (SEQ ID NO: 84225):QXEXR (SEQ ID NO: 84276), SSVKXQP (SEQ ID NO: 84430):VPTHH (SEQ ID NO: 84380):SPIS (SEQ ID NO: 84120):EYVRKKPKL (SEQ ID NO: 84974):YKQYE (SEQ ID NO: 84398):RLVVE (SEQ ID NO: 84288):LEXAXA (SEQ ID NO: 84400), RNVQXRP (SEQ ID NO: 84427):VPTQL (SEQ ID NO: 84384):SPIS (SEQ ID NO: 84120):EIVRKKPIF (SEQ ID NO: 84973):YKQYE (SEQ ID NO: 84398):TLVVE (SEQ ID NO: 84317):LAXKXE (SEQ ID NO: 84399), AAPASXX (SEQ ID NO: 84401):VPARL (SEQ ID NO: 84352):SPIS (SEQ ID NO: 84120):DAANNVV (SEQ ID NO: 84963):YKQYE (SEQ ID NO: 84398):DMVVE (SEQ ID NO: 84161):AXGXR (SEQ ID NO: 84148), KIPKAXX (SEQ ID NO: 84424):APVEL (SEQ ID NO: 84139):KPLS (SEQ ID NO: 84112):DENEKVV (SEQ ID NO: 84966):DHHKD (SEQ ID NO: 84149):DMVEE (SEQ ID NO: 84157):GXGXR (SEQ ID NO: 84208), GIPEPXX (SEQ ID NO: 84419):APVKM (SEQ ID NO: 84143):KPLS (SEQ ID NO: 84112):DENKNVV (SEQ ID NO: 84967):DHHKD (SEQ ID NO: 84149):NMVEE (SEQ ID NO: 84269):SXAXR (SEQ ID NO: 84303), SIPKAXX (SEQ ID NO: 84429):APVEL (SEQ ID NO: 84139):KPLS (SEQ ID NO: 84112):DEYDKVV (SEQ ID NO: 84968):DHHKD (SEQ ID NO: 84149):EMVEE (SEQ ID NO: 84171):GXGXR (SEQ ID NO: 84208), HVTKPTX (SEQ ID NO: 84422):APVKL (SEQ ID NO: 84142):KPLS (SEQ ID NO: 84112):DDSSNVI (SEQ ID NO: 84965):DHHKD (SEQ ID NO: 84149):NMVEE (SEQ ID NO: 84269):SXGXH (SEQ ID NO: 84304), YVPKPXX (SEQ ID NO: 84433):APVKL (SEQ ID NO: 84142):KPLS (SEQ ID NO: 84112):DDSSNVI (SEQ ID NO: 84965):DHHKD (SEQ ID NO: 84149):NMVEE (SEQ ID NO: 84269):SXGXH (SEQ ID NO: 84304), TVPKPXX (SEQ ID NO: 84432):APVQL (SEQ ID NO: 84145):KPLS (SEQ ID NO: 84112):DDSSNVI (SEQ ID NO: 84965):DHHKD (SEQ ID NO: 84149):NMVEE (SEQ ID NO: 84269):AXGXH (SEQ ID NO: 84147), AVPKAXX (SEQ ID NO: 84404):APVKL (SEQ ID NO: 84142):KPLS (SEQ ID NO: 84112):DSSNNVI (SEQ ID NO: 84972):DHHKD (SEQ ID NO: 84149):NMVEE (SEQ ID NO: 84269):AXGXH (SEQ ID NO: 84147), KVGKAXX (SEQ ID NO: 84425):APVKL (SEQ ID NO: 84142):KPLS (SEQ ID NO: 84112):DDMGVPT (SEQ ID NO: 84964):DHHKD (SEQ ID NO: 84149):EGMSVEE (SEQ ID NO: 84412):XGXR (SEQ ID NO: 84123), KASKAXX (SEQ ID NO: 84423):APVKL (SEQ ID NO: 84142):KPLS (SEQ ID NO: 84112):DKGVVTY (SEQ ID NO: 84969):DHHKD (SEQ ID NO: 84149):GMVEE (SEQ ID NO: 84201):EXGXR (SEQ ID NO: 84179), GSAGPXX (SEQ ID NO: 84420):APVKM (SEQ ID NO: 84143):KPLS (SEQ ID NO: 84112):NDKQQII (SEQ ID NO: 84979):DHHKD (SEQ ID NO: 84149):GMVEE (SEQ ID NO: 84201):RXGXS (SEQ ID NO: 84291), AAPASXX (SEQ ID NO: 84401):APVRL (SEQ ID NO: 84146):KPLS (SEQ ID NO: 84112):DAANNVV (SEQ ID NO: 84963):DHHKD (SEQ ID NO: 84149):DMVEE (SEQ ID NO: 84157):AXGXR (SEQ ID NO: 84148), STPPTXX (SEQ ID NO: 84431):APVRL (SEQ ID NO: 84146):KPLS (SEQ ID NO: 84112):DSANNVV (SEQ ID NO: 84971):DHHKD (SEQ ID NO: 84149):DMVEE (SEQ ID NO: 84157):SXGXR (SEQ ID NO: 84305), HVPKPXX (SEQ ID NO: 84421):APVKL (SEQ ID NO: 84142):KPLS (SEQ ID NO: 84112):DDSSNVI (SEQ ID NO: 84965):DHHKD (SEQ ID NO: 84149):NMVEE (SEQ ID NO: 84269):SXGXH (SEQ ID NO: 84304), ASAAPXX (SEQ ID NO: 84402):APVAL (SEQ ID NO: 84136):KPLS (SEQ ID NO: 84112):VGRKPKV (SEQ ID NO: 84981):DHHKD (SEQ ID NO: 84149):MIVEE (SEQ ID NO: 84241):XKXS (SEQ ID NO: 84124), ASASPXX (SEQ ID NO: 84403):APVDL (SEQ ID NO: 84137):KPLS (SEQ ID NO: 84112):IGKTPKI (SEQ ID NO: 84978):DHHKD (SEQ ID NO: 84149):MIVEE (SEQ ID NO: 84241):XKXS (SEQ ID NO: 84124), ASASPXX (SEQ ID NO: 84403):APVDL (SEQ ID NO: 84137):KPLS (SEQ ID NO: 84112):VGRTPKV (SEQ ID NO: 84982):DHHKD (SEQ ID NO: 84149):MVVEE (SEQ ID NO: 84255):XKXS (SEQ ID NO: 84124), NDEGLXS (SEQ ID NO: 85019):APVEE (SEQ ID NO: 84138):KPLS (SEQ ID NO: 84112):RIKPHQGQH (SEQ ID NO: 84980):DHHKD (SEQ ID NO: 84149):FLVEE (SEQ ID NO: 84187):KXEXR (SEQ ID NO: 84213), NDEGLXS (SEQ ID NO: 85019):APVGQ (SEQ ID NO: 84140):KPLS (SEQ ID NO: 84112):RIKPHQGQH (SEQ ID NO: 84980):DHHKD (SEQ ID NO: 84149):LEVEE (SEQ ID NO: 84221):QXEXR (SEQ ID NO: 84276), SSVKXQP (SEQ ID NO: 84430):APVHH (SEQ ID NO: 84141):KPLS (SEQ ID NO: 84112):EYVRKKPKL (SEQ ID NO: 84974):DHHKD (SEQ ID NO: 84149):RLVEE (SEQ ID NO: 84284):LEXAXA (SEQ ID NO: 84400), RNVQXRP (SEQ ID NO: 84427):APVQL (SEQ ID NO: 84145):KPLS (SEQ ID NO: 84112):EIVRKKPIF (SEQ ID NO: 84973):DHHKD (SEQ ID NO: 84149):TLVEE (SEQ ID NO: 84313):LAXKXE (SEQ ID NO: 84399), KIPKAXX (SEQ ID NO: 84424):VPTEL (SEQ ID NO: 84378):KPLS (SEQ ID NO: 84112):DENEKVV (SEQ ID NO: 84966):DHHKD (SEQ ID NO: 84149):DMVVE (SEQ ID NO: 84161):GXGXR (SEQ ID NO: 84208), GIPEPXX (SEQ ID NO: 84419):VPEKM (SEQ ID NO: 84360):KPLS (SEQ ID NO: 84112):DENKNVV (SEQ ID NO: 84967):DHHKD (SEQ ID NO: 84149):NMTVE (SEQ ID NO: 84267):SXAXR (SEQ ID NO: 84303), SIPKAXX (SEQ ID NO: 84429):VPTEL (SEQ ID NO: 84378):KPLS (SEQ ID NO: 84112):DEYDKVV (SEQ ID NO: 84968):DHHKD (SEQ ID NO: 84149):EMVVE (SEQ ID NO: 84175):GXGXR (SEQ ID NO: 84208), HVTKPTX (SEQ ID NO: 84422):APTKL (SEQ ID NO: 84131):KPLS (SEQ ID NO: 84112):DDSSNVI (SEQ ID NO: 84965):DHHKD (SEQ ID NO: 84149):NMVVR (SEQ ID NO: 84275):SXGXH (SEQ ID NO: 84304), YVPKPXX (SEQ ID NO: 84433):APTKL (SEQ ID NO: 84131):KPLS (SEQ ID NO: 84112):DDSSNVI (SEQ ID NO: 84965):DHHKD (SEQ ID NO: 84149):NMVVR (SEQ ID NO: 84275):SXGXH (SEQ ID NO: 84304), TVPKPXX (SEQ ID NO: 84432):APTQL (SEQ ID NO: 84134):KPLS (SEQ ID NO: 84112):DDSSNVI (SEQ ID NO: 84965):DHHKD (SEQ ID NO: 84149):NMVVR (SEQ ID NO: 84275):AXGXH (SEQ ID NO: 84147), AVPKAXX (SEQ ID NO: 84404):APTKL (SEQ ID NO: 84131):KPLS (SEQ ID NO: 84112):DSSNNVI (SEQ ID NO: 84972):DHHKD (SEQ ID NO: 84149):NMVVK (SEQ ID NO: 84274):AXGXH (SEQ ID NO: 84147), KVGKAXX (SEQ ID NO: 84425):VPTKL (SEQ ID NO: 84381):KPLS (SEQ ID NO: 84112):DDMGVPT (SEQ ID NO: 84964):DHHKD (SEQ ID NO: 84149):EGMSVAE (SEQ ID NO: 84411):XGXR (SEQ ID NO: 84123), KASKAXX (SEQ ID NO: 84423):VPTKL (SEQ ID NO: 84381):KPLS (SEQ ID NO: 84112):DKGVVTY (SEQ ID NO: 84969):DHHKD (SEQ ID NO: 84149):GMAVS (SEQ ID NO: 84194):EXGXR (SEQ ID NO: 84179), GSAGPXX (SEQ ID NO: 84420):TPTKM (SEQ ID NO: 84327):KPLS (SEQ ID NO: 84112):NDKQQII (SEQ ID NO: 84979):DHHKD (SEQ ID NO: 84149):GMVVD (SEQ ID NO: 84204):RXGXS (SEQ ID NO: 84291), AAPASXX (SEQ ID NO: 84401):VPARL (SEQ ID NO: 84352):KPLS (SEQ ID NO: 84112):DAANNVV (SEQ ID NO: 84963):DHHKD (SEQ ID NO: 84149):DMVVE (SEQ ID NO: 84161):AXGXR (SEQ ID NO: 84148), STPPTXX (SEQ ID NO: 84431):VPTRL (SEQ ID NO: 84385):KPLS (SEQ ID NO: 84112):DSANNVV (SEQ ID NO: 84971):DHHKD (SEQ ID NO: 84149):DMVVE (SEQ ID NO: 84161):SXGXR (SEQ ID NO: 84305), HVPKPXX (SEQ ID NO: 84421):APTKL (SEQ ID NO: 84131):KPLS (SEQ ID NO: 84112):DDSSNVI (SEQ ID NO: 84965):DHHKD (SEQ ID NO: 84149):NMVVR (SEQ ID NO: 84275):SXGXH (SEQ ID NO: 84304), ASAAPXX (SEQ ID NO: 84402):VPQAL (SEQ ID NO: 84364):KPLS (SEQ ID NO: 84112):VGRKPKV (SEQ ID NO: 84981):DHHKD (SEQ ID NO: 84149):MIVRS (SEQ ID NO: 84243):XKXS (SEQ ID NO: 84124), ASASPXX (SEQ ID NO: 84403):VSQDL (SEQ ID NO: 84387):KPLS (SEQ ID NO: 84112):IGKTPKI (SEQ ID NO: 84978):DHHKD (SEQ ID NO: 84149):MIVKS (SEQ ID NO: 84242):XKXS (SEQ ID NO: 84124), ASASPXX (SEQ ID NO: 84403):VPQDL (SEQ ID NO: 84365):KPLS (SEQ ID NO: 84112):VGRTPKV (SEQ ID NO: 84982):DHHKD (SEQ ID NO: 84149):MVVKS (SEQ ID NO: 84256):XKXS (SEQ ID NO: 84124), NDEGLXS (SEQ ID NO: 85019):VPTEE (SEQ ID NO: 84377):KPLS (SEQ ID NO: 84112):RIKPHQGQH (SEQ ID NO: 84980):DHHKD (SEQ ID NO: 84149):FLQHN (SEQ ID NO: 84184):KXEXR (SEQ ID NO: 84213), NDEGLXS (SEQ ID NO: 85019):VPTGQ (SEQ ID NO: 84379):KPLS (SEQ ID NO: 84112):RIKPHQGQH (SEQ ID NO: 84980):DHHKD (SEQ ID NO: 84149):LEEHS (SEQ ID NO: 84217):QXEXR (SEQ ID NO: 84276), SSVKXQP (SEQ ID NO: 84430):SRVHH (SEQ ID NO: 84297):KPLS (SEQ ID NO: 84112):EYVRKKPKL (SEQ ID NO: 84974):DHHKD (SEQ ID NO: 84149):RLEEH (SEQ ID NO: 84279):LEXAXA (SEQ ID NO: 84400), RNVQXRP (SEQ ID NO: 84427):TQVQL (SEQ ID NO: 84340):KPLS (SEQ ID NO: 84112):EIVRKKPIF (SEQ ID NO: 84973):DHHKD (SEQ ID NO: 84149):TLEDH (SEQ ID NO: 84307):LAXKXE (SEQ ID NO: 84399), KIPKAXX (SEQ ID NO: 84424):VPQEL (SEQ ID NO: 84367):EPLP (SEQ ID NO: 84110):DENEKVV (SEQ ID NO: 84966):EQLSN (SEQ ID NO: 84178):DMVRS (SEQ ID NO: 84159):GXGXR (SEQ ID NO: 84208), GIPEPXX (SEQ ID NO: 84419):VPQKM (SEQ ID NO: 84371):EPLP (SEQ ID NO: 84110):DENKNVV (SEQ ID NO: 84967):EQLSN (SEQ ID NO: 84178):NMVRS (SEQ ID NO: 84271):SXAXR (SEQ ID NO: 84303), SIPKAXX (SEQ ID NO: 84429):VPQEL (SEQ ID NO: 84367):EPLP (SEQ ID NO: 84110):DEYDKVV (SEQ ID NO: 84968):EQLSN (SEQ ID NO: 84178):EMVRS (SEQ ID NO: 84173):GXGXR (SEQ ID NO: 84208), HVTKPTX (SEQ ID NO: 84422):VPQKL (SEQ ID NO: 84370):EPLP (SEQ ID NO: 84110):DDSSNVI (SEQ ID NO: 84965):EQLSN (SEQ ID NO: 84178):NMVRS (SEQ ID NO: 84271):SXGXH (SEQ ID NO: 84304), YVPKPXX (SEQ ID NO: 84433):VPQKL (SEQ ID NO: 84370):EPLP (SEQ ID NO: 84110):DDSSNVI (SEQ ID NO: 84965):EQLSN (SEQ ID NO: 84178):NMVRS (SEQ ID NO: 84271):SXGXH (SEQ ID NO: 84304), TVPKPXX (SEQ ID NO: 84432):VPQQL (SEQ ID NO: 84373):EPLP (SEQ ID NO: 84110):DDSSNVI (SEQ ID NO: 84965):EQLSN (SEQ ID NO: 84178):NMVRS (SEQ ID NO: 84271):AXGXH (SEQ ID NO: 84147), AVPKAXX (SEQ ID NO: 84404):VPQKL (SEQ ID NO: 84370):EPLP (SEQ ID NO: 84110):DSSNNVI (SEQ ID NO: 84972):EQLSN (SEQ ID NO: 84178):NMVRS (SEQ ID NO: 84271):AXGXH (SEQ ID NO: 84147), KVGKAXX (SEQ ID NO: 84425):VPQKL (SEQ ID NO: 84370):EPLP (SEQ ID NO: 84110):DDMGVPT (SEQ ID NO: 84964):EQLSN (SEQ ID NO: 84178):EGMSVRS (SEQ ID NO: 84414):XGXR (SEQ ID NO: 84123), KASKAXX (SEQ ID NO: 84423):VPQKL (SEQ ID NO: 84370):EPLP (SEQ ID NO: 84110):DKGVVTY (SEQ ID NO: 84969):EQLSN (SEQ ID NO: 84178):GMVRS (SEQ ID NO: 84203):EXGXR (SEQ ID NO: 84179), GSAGPXX (SEQ ID NO: 84420):VPQKM (SEQ ID NO: 84371):EPLP (SEQ ID NO: 84110):NDKQQII (SEQ ID NO: 84979):EQLSN (SEQ ID NO: 84178):GMVRS (SEQ ID NO: 84203):RXGXS (SEQ ID NO: 84291), AAPASXX (SEQ ID NO: 84401):VPQRL (SEQ ID NO: 84374):EPLP (SEQ ID NO: 84110):DAANNVV (SEQ ID NO: 84963):EQLSN (SEQ ID NO: 84178):DMVRS (SEQ ID NO: 84159):AXGXR (SEQ ID NO: 84148), STPPTXX (SEQ ID NO: 84431):VPQRL (SEQ ID NO: 84374):EPLP (SEQ ID NO: 84110):DSANNVV (SEQ ID NO: 84971):EQLSN (SEQ ID NO: 84178):DMVRS (SEQ ID NO: 84159):SXGXR (SEQ ID NO: 84305), HVPKPXX (SEQ ID NO: 84421):VPQKL (SEQ ID NO: 84370):EPLP (SEQ ID NO: 84110):DDSSNVI (SEQ ID NO: 84965):EQLSN (SEQ ID NO: 84178):NMVRS (SEQ ID NO: 84271):SXGXH (SEQ ID NO: 84304), RVPSTXX (SEQ ID NO: 84428):VPQKT (SEQ ID NO: 84372):EPLP (SEQ ID NO: 84110):DNGRVLL (SEQ ID NO: 84970):EQLSN (SEQ ID NO: 84178):MIVRS (SEQ ID NO: 84243):XGXL (SEQ ID NO: 84122), ASASPXX (SEQ ID NO: 84403):VPQDL (SEQ ID NO: 84365):EPLP (SEQ ID NO: 84110):IGKTPKI (SEQ ID NO: 84978):EQLSN (SEQ ID NO: 84178):MIVRS (SEQ ID NO: 84243):XKXS (SEQ ID NO: 84124), ASASPXX (SEQ ID NO: 84403):VPQDL (SEQ ID NO: 84365):EPLP (SEQ ID NO: 84110):VGRTPKV (SEQ ID NO: 84982):EQLSN (SEQ ID NO: 84178):MVVRS (SEQ ID NO: 84257):XKXS (SEQ ID NO: 84124), NDEGLXS (SEQ ID NO: 85019):VPQEE (SEQ ID NO: 84366):EPLP (SEQ ID NO: 84110):RIKPHQGQH (SEQ ID NO: 84980):EQLSN (SEQ ID NO: 84178):FLVRS (SEQ ID NO: 84189):KXEXR (SEQ ID NO: 84213), NDEGLXS (SEQ ID NO: 85019):VPQGQ (SEQ ID NO: 84368):EPLP (SEQ ID NO: 84110):RIKPHQGQH (SEQ ID NO: 84980):EQLSN (SEQ ID NO: 84178):LEVRS (SEQ ID NO: 84223):QXEXR (SEQ ID NO: 84276), SSVKXQP (SEQ ID NO: 84430):VPQHH (SEQ ID NO: 84369):EPLP (SEQ ID NO: 84110):EYVRKKPKL (SEQ ID NO: 84974):EQLSN (SEQ ID NO: 84178):RLVRS (SEQ ID NO: 84286):LEXAXA (SEQ ID NO: 84400), RNVQXRP (SEQ ID NO: 84427):VPQQL (SEQ ID NO: 84373):EPLP (SEQ ID NO: 84110):EIVRKKPIF (SEQ ID NO: 84973):EQLSN (SEQ ID NO: 84178):TLVRS (SEQ ID NO: 84315):LAXKXE (SEQ ID NO: 84399), KIPKAXX (SEQ ID NO: 84424):VPTEL (SEQ ID NO: 84378):EPLP (SEQ ID NO: 84110):DENEKVV (SEQ ID NO: 84966):EQLSN (SEQ ID NO: 84178):DMVVE (SEQ ID NO: 84161):GXGXR (SEQ ID NO: 84208), GIPEPXX (SEQ ID NO: 84419):VPEKM (SEQ ID NO: 84360):EPLP (SEQ ID NO: 84110):DENKNVV (SEQ ID NO: 84967):EQLSN (SEQ ID NO: 84178):NMTVE (SEQ ID NO: 84267):SXAXR (SEQ ID NO: 84303), SIPKAXX (SEQ ID NO: 84429):VPTEL (SEQ ID NO: 84378):EPLP (SEQ ID NO: 84110):DEYDKVV (SEQ ID NO: 84968):EQLSN (SEQ ID NO: 84178):EMVVE (SEQ ID NO: 84175):GXGXR (SEQ ID NO: 84208), HVTKPTX (SEQ ID NO: 84422):APTKL (SEQ ID NO: 84131):EPLP (SEQ ID NO: 84110):DDSSNVI (SEQ ID NO: 84965):EQLSN (SEQ ID NO: 84178):NMVVR (SEQ ID NO: 84275):SXGXH (SEQ ID NO: 84304), YVPKPXX (SEQ ID NO: 84433):APTKL (SEQ ID NO: 84131):EPLP (SEQ ID NO: 84110):DDSSNVI (SEQ ID NO: 84965):EQLSN (SEQ ID NO: 84178):NMVVR (SEQ ID NO: 84275):SXGXH (SEQ ID NO: 84304), TVPKPXX (SEQ ID NO: 84432):APTQL (SEQ ID NO: 84134):EPLP (SEQ ID NO: 84110):DDSSNVI (SEQ ID NO: 84965):EQLSN (SEQ ID NO: 84178):NMVVR (SEQ ID NO: 84275):AXGXH (SEQ ID NO: 84147), AVPKAXX (SEQ ID NO: 84404):APTKL (SEQ ID NO: 84131):EPLP (SEQ ID NO: 84110):DSSNNVI (SEQ ID NO: 84972):EQLSN (SEQ ID NO: 84178):NMVVK (SEQ ID NO: 84274):AXGXH (SEQ ID NO: 84147), KVGKAXX (SEQ ID NO: 84425):VPTKL (SEQ ID NO: 84381):EPLP (SEQ ID NO: 84110):DDMGVPT (SEQ ID NO: 84964):EQLSN (SEQ ID NO: 84178):EGMSVAE (SEQ ID NO: 84411):XGXR (SEQ ID NO: 84123), KASKAXX (SEQ ID NO: 84423):VPTKL (SEQ ID NO: 84381):EPLP (SEQ ID NO: 84110):DKGVVTY (SEQ ID NO: 84969):EQLSN (SEQ ID NO: 84178):GMAVS (SEQ ID NO: 84194):EXGXR (SEQ ID NO: 84179), GSAGPXX (SEQ ID NO: 84420):TPTKM (SEQ ID NO: 84327):EPLP (SEQ ID NO: 84110):NDKQQII (SEQ ID NO: 84979):EQLSN (SEQ ID NO: 84178):GMVVD (SEQ ID NO: 84204):RXGXS (SEQ ID NO: 84291), AAPASXX (SEQ ID NO: 84401):VPARL (SEQ ID NO: 84352):EPLP (SEQ ID NO: 84110):DAANNVV (SEQ ID NO: 84963):EQLSN (SEQ ID NO: 84178):DMVVE (SEQ ID NO: 84161):AXGXR (SEQ ID NO: 84148), STPPTXX (SEQ ID NO: 84431):VPTRL (SEQ ID NO: 84385):EPLP (SEQ ID NO: 84110):DSANNVV (SEQ ID NO: 84971):EQLSN (SEQ ID NO: 84178):DMVVE (SEQ ID NO: 84161):SXGXR (SEQ ID NO: 84305), HVPKPXX (SEQ ID NO: 84421):APTKL (SEQ ID NO: 84131):EPLP (SEQ ID NO: 84110):DDSSNVI (SEQ ID NO: 84965):EQLSN (SEQ ID NO: 84178):NMVVR (SEQ ID NO: 84275):SXGXH (SEQ ID NO: 84304), RVPSTXX (SEQ ID NO: 84428):APVKT (SEQ ID NO: 84144):EPLP (SEQ ID NO: 84110):DNGRVLL (SEQ ID NO: 84970):EQLSN (SEQ ID NO: 84178):MIVEE (SEQ ID NO: 84241):XGXL (SEQ ID NO: 84122), ASASPXX (SEQ ID NO: 84403):VSQDL (SEQ ID NO: 84387):EPLP (SEQ ID NO: 84110):IGKTPKI (SEQ ID NO: 84978):EQLSN (SEQ ID NO: 84178):MIVKS (SEQ ID NO: 84242):XKXS (SEQ ID NO: 84124), ASASPXX (SEQ ID NO: 84403):VPQDL (SEQ ID NO: 84365):EPLP (SEQ ID NO: 84110):VGRTPKV (SEQ ID NO: 84982):EQLSN (SEQ ID NO: 84178):MVVKS (SEQ ID NO: 84256):XKXS (SEQ ID NO: 84124), NDEGLXS (SEQ ID NO: 85019):VPTEE (SEQ ID NO: 84377):EPLP (SEQ ID NO: 84110):RIKPHQGQH (SEQ ID NO: 84980):EQLSN (SEQ ID NO: 84178):FLQHN (SEQ ID NO: 84184):KXEXR (SEQ ID NO: 84213), NDEGLXS (SEQ ID NO: 85019):VPTGQ (SEQ ID NO: 84379):EPLP (SEQ ID NO: 84110):RIKPHQGQH (SEQ ID NO: 84980):EQLSN (SEQ ID NO: 84178):LEEHS (SEQ ID NO: 84217):QXEXR (SEQ ID NO: 84276), SSVKXQP (SEQ ID NO: 84430):SRVHH (SEQ ID NO: 84297):EPLP (SEQ ID NO: 84110):EYVRKKPKL (SEQ ID NO: 84974):EQLSN (SEQ ID NO: 84178):RLEEH (SEQ ID NO: 84279):LEXAXA (SEQ ID NO: 84400), RNVQXRP (SEQ ID NO: 84427):TQVQL (SEQ ID NO: 84340):EPLP (SEQ ID NO: 84110):EIVRKKPIF (SEQ ID NO: 84973):EQLSN (SEQ ID NO: 84178):TLEDH (SEQ ID NO: 84307):LAXKXE (SEQ ID NO: 84399), KIPKAXX (SEQ ID NO: 84424):VSQEL (SEQ ID NO: 84389):EPLT (SEQ ID NO: 84111):DENEKVV (SEQ ID NO: 84966):EQLSN (SEQ ID NO: 84178):DMVKS (SEQ ID NO: 84158):GXGXR (SEQ ID NO: 84208), GIPEPXX (SEQ ID NO: 84419):VSQKM (SEQ ID NO: 84393):EPLT (SEQ ID NO: 84111):DENKNVV (SEQ ID NO: 84967):EQLSN (SEQ ID NO: 84178):NMVKS (SEQ ID NO: 84270):SXAXR (SEQ ID NO: 84303), SIPKAXX (SEQ ID NO: 84429):VSQEL (SEQ ID NO: 84389):EPLT (SEQ ID NO: 84111):DEYDKVV (SEQ ID NO: 84968):EQLSN (SEQ ID NO: 84178):EMVKS (SEQ ID NO: 84172):GXGXR (SEQ ID NO: 84208), HVTKPTX (SEQ ID NO: 84422):VSQKL (SEQ ID NO: 84392):EPLT (SEQ ID NO: 84111):DDSSNVI (SEQ ID NO: 84965):EQLSN (SEQ ID NO: 84178):NMVKS (SEQ ID NO: 84270):SXGXH (SEQ ID NO: 84304), YVPKPXX (SEQ ID NO: 84433):VSQKL (SEQ ID NO: 84392):EPLT (SEQ ID NO: 84111):DDSSNVI (SEQ ID NO: 84965):EQLSN (SEQ ID NO: 84178):NMVKS (SEQ ID NO: 84270):SXGXH (SEQ ID NO: 84304), TVPKPXX (SEQ ID NO: 84432):VSQQL (SEQ ID NO: 84395):EPLT (SEQ ID NO: 84111):DDSSNVI (SEQ ID NO: 84965):EQLSN (SEQ ID NO: 84178):NMVKS (SEQ ID NO: 84270):AXGXH (SEQ ID NO: 84147), AVPKAXX (SEQ ID NO: 84404):VSQKL (SEQ ID NO: 84392):EPLT (SEQ ID NO: 84111):DSSNNVI (SEQ ID NO: 84972):EQLSN (SEQ ID NO: 84178):NMVKS (SEQ ID NO: 84270):AXGXH (SEQ ID NO: 84147), KVGKAXX (SEQ ID NO: 84425):VSQKL (SEQ ID NO: 84392):EPLT (SEQ ID NO: 84111):DDMGVPT (SEQ ID NO: 84964):EQLSN (SEQ ID NO: 84178):EGMSVKS (SEQ ID NO: 84413):XGXR (SEQ ID NO: 84123), KASKAXX (SEQ ID NO: 84423):VSQKL (SEQ ID NO: 84392):EPLT (SEQ ID NO: 84111):DKGVVTY (SEQ ID NO: 84969):EQLSN (SEQ ID NO: 84178):GMVKS (SEQ ID NO: 84202):EXGXR (SEQ ID NO: 84179), GSAGPXX (SEQ ID NO: 84420):VSQKM (SEQ ID NO: 84393):EPLT (SEQ ID NO: 84111):NDKQQII (SEQ ID NO: 84979):EQLSN (SEQ ID NO: 84178):GMVKS (SEQ ID NO: 84202):RXGXS (SEQ ID NO: 84291), AAPASXX (SEQ ID NO: 84401):VSQRL (SEQ ID NO: 84396):EPLT (SEQ ID NO: 84111):DAANNVV (SEQ ID NO: 84963):EQLSN (SEQ ID NO: 84178):DMVKS (SEQ ID NO: 84158):AXGXR (SEQ ID NO: 84148), STPPTXX (SEQ ID NO: 84431):VSQRL (SEQ ID NO: 84396):EPLT (SEQ ID NO: 84111):DSANNVV (SEQ ID NO: 84971):EQLSN (SEQ ID NO: 84178):DMVKS (SEQ ID NO: 84158):SXGXR (SEQ ID NO: 84305), HVPKPXX (SEQ ID NO: 84421):VSQKL (SEQ ID NO: 84392):EPLT (SEQ ID NO: 84111):DDSSNVI (SEQ ID NO: 84965):EQLSN (SEQ ID NO: 84178):NMVKS (SEQ ID NO: 84270):SXGXH (SEQ ID NO: 84304), RVPSTXX (SEQ ID NO: 84428):VSQKT (SEQ ID NO: 84394):EPLT (SEQ ID NO: 84111):DNGRVLL (SEQ ID NO: 84970):EQLSN (SEQ ID NO: 84178):MIVKS (SEQ ID NO: 84242):XGXL (SEQ ID NO: 84122), ASAAPXX (SEQ ID NO: 84402):VSQAL (SEQ ID NO: 84386):EPLT (SEQ ID NO: 84111):VGRKPKV (SEQ ID NO: 84981):EQLSN (SEQ ID NO: 84178):MIVKS (SEQ ID NO: 84242):XKXS (SEQ ID NO: 84124), ASASPXX (SEQ ID NO: 84403):VSQDL (SEQ ID NO: 84387):EPLT (SEQ ID NO: 84111):VGRTPKV (SEQ ID NO: 84982):EQLSN (SEQ ID NO: 84178):MVVKS (SEQ ID NO: 84256):XKXS (SEQ ID NO: 84124), NDEGLXS (SEQ ID NO: 85019):VSQEE (SEQ ID NO: 84388):EPLT (SEQ ID NO: 84111):RIKPHQGQH (SEQ ID NO: 84980):EQLSN (SEQ ID NO: 84178):FLVKS (SEQ ID NO: 84188):KXEXR (SEQ ID NO: 84213), NDEGLXS (SEQ ID NO: 85019):VSQGQ (SEQ ID NO: 84390):EPLT (SEQ ID NO: 84111):RIKPHQGQH (SEQ ID NO: 84980):EQLSN (SEQ ID NO: 84178):LEVKS (SEQ ID NO: 84222):QXEXR (SEQ ID NO: 84276), SSVKXQP (SEQ ID NO: 84430):VSQHH (SEQ ID NO: 84391):EPLT (SEQ ID NO: 84111):EYVRKKPKL (SEQ ID NO: 84974):EQLSN (SEQ ID NO: 84178):RLVKS (SEQ ID NO: 84285):LEXAXA (SEQ ID NO: 84400), RNVQXRP (SEQ ID NO: 84427):VSQQL (SEQ ID NO: 84395):EPLT (SEQ ID NO: 84111):EIVRKKPIF (SEQ ID NO: 84973):EQLSN (SEQ ID NO: 84178):TLVKS (SEQ ID NO: 84314):LAXKXE (SEQ ID NO: 84399), KIPKAXX (SEQ ID NO: 84424):VPTEL (SEQ ID NO: 84378):EPLT (SEQ ID NO: 84111):DENEKVV (SEQ ID NO: 84966):EQLSN (SEQ ID NO: 84178):DMVVE (SEQ ID NO: 84161):GXGXR (SEQ ID NO: 84208), GIPEPXX (SEQ ID NO: 84419):VPEKM (SEQ ID NO: 84360):EPLT (SEQ ID NO: 84111):DENKNVV (SEQ ID NO: 84967):EQLSN (SEQ ID NO: 84178):NMTVE (SEQ ID NO: 84267):SXAXR (SEQ ID NO: 84303), SIPKAXX (SEQ ID NO: 84429):VPTEL (SEQ ID NO: 84378):EPLT (SEQ ID NO: 84111):DEYDKVV (SEQ ID NO: 84968):EQLSN (SEQ ID NO: 84178):EMVVE (SEQ ID NO: 84175):GXGXR (SEQ ID NO: 84208), HVTKPTX (SEQ ID NO: 84422):APTKL (SEQ ID NO: 84131):EPLT (SEQ ID NO: 84111):DDSSNVI (SEQ ID NO: 84965):EQLSN (SEQ ID NO: 84178):NMVVR (SEQ ID NO: 84275):SXGXH (SEQ ID NO: 84304), YVPKPXX (SEQ ID NO: 84433):APTKL (SEQ ID NO: 84131):EPLT (SEQ ID NO: 84111):DDSSNVI (SEQ ID NO: 84965):EQLSN (SEQ ID NO: 84178):NMVVR (SEQ ID NO: 84275):SXGXH (SEQ ID NO: 84304), TVPKPXX (SEQ ID NO: 84432):APTQL (SEQ ID NO: 84134):EPLT (SEQ ID NO: 84111):DDSSNVI (SEQ ID NO: 84965):EQLSN (SEQ ID NO: 84178):NMVVR (SEQ ID NO: 84275):AXGXH (SEQ ID NO: 84147), AVPKAXX (SEQ ID NO: 84404):APTKL (SEQ ID NO: 84131):EPLT (SEQ ID NO: 84111):DSSNNVI (SEQ ID NO: 84972):EQLSN (SEQ ID NO: 84178):NMVVK (SEQ ID NO: 84274):AXGXH (SEQ ID NO: 84147), KVGKAXX (SEQ ID NO: 84425):VPTKL (SEQ ID NO: 84381):EPLT (SEQ ID NO: 84111):DDMGVPT (SEQ ID NO: 84964):EQLSN (SEQ ID NO: 84178):EGMSVAE (SEQ ID NO: 84411):XGXR (SEQ ID NO: 84123), KASKAXX (SEQ ID NO: 84423):VPTKL (SEQ ID NO: 84381):EPLT (SEQ ID NO: 84111):DKGVVTY (SEQ ID NO: 84969):EQLSN (SEQ ID NO: 84178):GMAVS (SEQ ID NO: 84194):EXGXR (SEQ ID NO: 84179), GSAGPXX (SEQ ID NO: 84420):TPTKM (SEQ ID NO: 84327):EPLT (SEQ ID NO: 84111):NDKQQII (SEQ ID NO: 84979):EQLSN (SEQ ID NO: 84178):GMVVD (SEQ ID NO: 84204):RXGXS (SEQ ID NO: 84291), AAPASXX (SEQ ID NO: 84401):VPARL (SEQ ID NO: 84352):EPLT (SEQ ID NO: 84111):DAANNVV (SEQ ID NO: 84963):EQLSN (SEQ ID NO: 84178):DMVVE (SEQ ID NO: 84161):AXGXR (SEQ ID NO: 84148), STPPTXX (SEQ ID NO: 84431):VPTRL (SEQ ID NO: 84385):EPLT (SEQ ID NO: 84111):DSANNVV (SEQ ID NO: 84971):EQLSN (SEQ ID NO: 84178):DMVVE (SEQ ID NO: 84161):SXGXR (SEQ ID NO: 84305), HVPKPXX (SEQ ID NO: 84421):APTKL (SEQ ID NO: 84131):EPLT (SEQ ID NO: 84111):DDSSNVI (SEQ ID NO: 84965):EQLSN (SEQ ID NO: 84178):NMVVR (SEQ ID NO: 84275):SXGXH (SEQ ID NO: 84304), RVPSTXX (SEQ ID NO: 84428):APVKT (SEQ ID NO: 84144):EPLT (SEQ ID NO: 84111):DNGRVLL (SEQ ID NO: 84970):EQLSN (SEQ ID NO: 84178):MIVEE (SEQ ID NO: 84241):XGXL (SEQ ID NO: 84122), ASAAPXX (SEQ ID NO: 84402):VPQAL (SEQ ID NO: 84364):EPLT (SEQ ID NO: 84111):VGRKPKV (SEQ ID NO: 84981):EQLSN (SEQ ID NO: 84178):MIVRS (SEQ ID NO: 84243):XKXS (SEQ ID NO: 84124), ASASPXX (SEQ ID NO: 84403):VPQDL (SEQ ID NO: 84365):EPLT (SEQ ID NO: 84111):VGRTPKV (SEQ ID NO: 84982):EQLSN (SEQ ID NO: 84178):MVVKS (SEQ ID NO: 84256):XKXS (SEQ ID NO: 84124), NDEGLXS (SEQ ID NO: 85019):VPTEE (SEQ ID NO: 84377):EPLT (SEQ ID NO: 84111):RIKPHQGQH (SEQ ID NO: 84980):EQLSN (SEQ ID NO: 84178):FLQHN (SEQ ID NO: 84184):KXEXR (SEQ ID NO: 84213), NDEGLXS (SEQ ID NO: 85019):VPTGQ (SEQ ID NO: 84379):EPLT (SEQ ID NO: 84111):RIKPHQGQH (SEQ ID NO: 84980):EQLSN (SEQ ID NO: 84178):LEEHS (SEQ ID NO: 84217):QXEXR (SEQ ID NO: 84276), SSVKXQP (SEQ ID NO: 84430):SRVHH (SEQ ID NO: 84297):EPLT (SEQ ID NO: 84111):EYVRKKPKL (SEQ ID NO: 84974):EQLSN (SEQ ID NO: 84178):RLEEH (SEQ ID NO: 84279):LEXAXA (SEQ ID NO: 84400), RNVQXRP (SEQ ID NO: 84427):TQVQL (SEQ ID NO: 84340):EPLT (SEQ ID NO: 84111):EIVRKKPIF (SEQ ID NO: 84973):EQLSN (SEQ ID NO: 84178):TLEDH (SEQ ID NO: 84307):LAXKXE (SEQ ID NO: 84399), KIPKAXX (SEQ ID NO: 84424):VPQEL (SEQ ID NO: 84367):EPLT (SEQ ID NO: 84111):DENEKVV (SEQ ID NO: 84966):EQLSN (SEQ ID NO: 84178):DMVKS (SEQ ID NO: 84158):GXGXR (SEQ ID NO: 84208), GIPEPXX (SEQ ID NO: 84419):VPQKM (SEQ ID NO: 84371):EPLT (SEQ ID NO: 84111):DENKNVV (SEQ ID NO: 84967):EQLSN (SEQ ID NO: 84178):NMVKS (SEQ ID NO: 84270):SXAXR (SEQ ID NO: 84303), SIPKAXX (SEQ ID NO: 84429):VPQEL (SEQ ID NO: 84367):EPLT (SEQ ID NO: 84111):DEYDKVV (SEQ ID NO: 84968):EQLSN (SEQ ID NO: 84178):EMVKS (SEQ ID NO: 84172):GXGXR (SEQ ID NO: 84208), HVTKPTX (SEQ ID NO: 84422):VPQKL (SEQ ID NO: 84370):EPLT (SEQ ID NO: 84111):DDSSNVI (SEQ ID NO: 84965):EQLSN (SEQ ID NO: 84178):NMVKS (SEQ ID NO: 84270):SXGXH (SEQ ID NO: 84304), YVPKPXX (SEQ ID NO: 84433):VPQKL (SEQ ID NO: 84370):EPLT (SEQ ID NO: 84111):DDSSNVI (SEQ ID NO: 84965):EQLSN (SEQ ID NO: 84178):NMVKS (SEQ ID NO: 84270):SXGXH (SEQ ID NO: 84304), TVPKPXX (SEQ ID NO: 84432):VPQQL (SEQ ID NO: 84373):EPLT (SEQ ID NO: 84111):DDSSNVI (SEQ ID NO: 84965):EQLSN (SEQ ID NO: 84178):NMVKS (SEQ ID NO: 84270):AXGXH (SEQ ID NO: 84147), AVPKAXX (SEQ ID NO: 84404):VPQKL (SEQ ID NO: 84370):EPLT (SEQ ID NO: 84111):DSSNNVI (SEQ ID NO: 84972):EQLSN (SEQ ID NO: 84178):NMVKS (SEQ ID NO: 84270):AXGXH (SEQ ID NO: 84147), KVGKAXX (SEQ ID NO: 84425):VPQKL (SEQ ID NO: 84370):EPLT (SEQ ID NO: 84111):DDMGVPT (SEQ ID NO: 84964):EQLSN (SEQ ID NO: 84178):EGMSVKS (SEQ ID NO: 84413):XGXR (SEQ ID NO: 84123), KASKAXX (SEQ ID NO: 84423):VPQKL (SEQ ID NO: 84370):EPLT (SEQ ID NO: 84111):DKGVVTY (SEQ ID NO: 84969):EQLSN (SEQ ID NO: 84178):GMVKS (SEQ ID NO: 84202):EXGXR (SEQ ID NO: 84179), GSAGPXX (SEQ ID NO: 84420):VPQKM (SEQ ID NO: 84371):EPLT (SEQ ID NO: 84111):NDKQQII (SEQ ID NO: 84979):EQLSN (SEQ ID NO: 84178):GMVKS (SEQ ID NO: 84202):RXGXS (SEQ ID NO: 84291), AAPASXX (SEQ ID NO: 84401):VPQRL (SEQ ID NO: 84374):EPLT (SEQ ID NO: 84111):DAANNVV (SEQ ID NO: 84963):EQLSN (SEQ ID NO: 84178):DMVKS (SEQ ID NO: 84158):AXGXR (SEQ ID NO: 84148), STPPTXX (SEQ ID NO: 84431):VPQRL (SEQ ID NO: 84374):EPLT (SEQ ID NO: 84111):DSANNVV (SEQ ID NO: 84971):EQLSN (SEQ ID NO: 84178):DMVKS (SEQ ID NO: 84158):SXGXR (SEQ ID NO: 84305), HVPKPXX (SEQ ID NO: 84421):VPQKL (SEQ ID NO: 84370):EPLT (SEQ ID NO: 84111):DDSSNVI (SEQ ID NO: 84965):EQLSN (SEQ ID NO: 84178):NMVKS (SEQ ID NO: 84270):SXGXH (SEQ ID NO: 84304), RVPSTXX (SEQ ID NO: 84428):VPQKT (SEQ ID NO: 84372):EPLT (SEQ ID NO: 84111):DNGRVLL (SEQ ID NO: 84970):EQLSN (SEQ ID NO: 84178):MIVKS (SEQ ID NO: 84242):XGXL (SEQ ID NO: 84122), ASAAPXX (SEQ ID NO: 84402):VPQAL (SEQ ID NO: 84364):EPLT (SEQ ID NO: 84111):VGRKPKV (SEQ ID NO: 84981):EQLSN (SEQ ID NO: 84178):MIVKS (SEQ ID NO: 84242):XKXS (SEQ ID NO: 84124), ASASPXX (SEQ ID NO: 84403):VPQDL (SEQ ID NO: 84365):EPLT (SEQ ID NO: 84111):IGKTPKI (SEQ ID NO: 84978):EQLSN (SEQ ID NO: 84178):MIVKS (SEQ ID NO: 84242):XKXS (SEQ ID NO: 84124), NDEGLXS (SEQ ID NO: 85019):VPQEE (SEQ ID NO: 84366):EPLT (SEQ ID NO: 84111):RIKPHQGQH (SEQ ID NO: 84980):EQLSN (SEQ ID NO: 84178):FLVKS (SEQ ID NO: 84188):KXEXR (SEQ ID NO: 84213), NDEGLXS (SEQ ID NO: 85019):VPQGQ (SEQ ID NO: 84368):EPLT (SEQ ID NO: 84111):RIKPHQGQH (SEQ ID NO: 84980):EQLSN (SEQ ID NO: 84178):LEVKS (SEQ ID NO: 84222):QXEXR (SEQ ID NO: 84276), SSVKXQP (SEQ ID NO: 84430):VPQHH (SEQ ID NO: 84369):EPLT (SEQ ID NO: 84111):EYVRKKPKL (SEQ ID NO: 84974):EQLSN (SEQ ID NO: 84178):RLVKS (SEQ ID NO: 84285):LEXAXA (SEQ ID NO: 84400), RNVQXRP (SEQ ID NO: 84427):VPQQL (SEQ ID NO: 84373):EPLT (SEQ ID NO: 84111):EIVRKKPIF (SEQ ID NO: 84973):EQLSN (SEQ ID NO: 84178):TLVKS (SEQ ID NO: 84314):LAXKXE (SEQ ID NO: 84399), ASASPXX (SEQ ID NO: 84403):VSQDL (SEQ ID NO: 84387):EPLT (SEQ ID NO: 84111):IGKTPKI (SEQ ID NO: 84978):EQLSN (SEQ ID NO: 84178):MIVKS (SEQ ID NO: 84242):XKXS (SEQ ID NO: 84124), KIPKAXX (SEQ ID NO: 84424):VPTEL (SEQ ID NO: 84378):SNIT (SEQ ID NO: 84118):DENEKVV (SEQ ID NO: 84966):IGEMS (SEQ ID NO: 84209):DMQHN (SEQ ID NO: 84154):GXGXR (SEQ ID NO: 84208), GIPEPXX (SEQ ID NO: 84419):VPTKM (SEQ ID NO: 84382):SNIT (SEQ ID NO: 84118):DENKNVV (SEQ ID NO: 84967):IGEMS (SEQ ID NO: 84209):NMQHN (SEQ ID NO: 84266):SXAXR (SEQ ID NO: 84303), SIPKAXX (SEQ ID NO: 84429):VPTEL (SEQ ID NO: 84378):SNIT (SEQ ID NO: 84118):DEYDKVV (SEQ ID NO: 84968):IGEMS (SEQ ID NO: 84209):EMQHN (SEQ ID NO: 84168):GXGXR (SEQ ID NO: 84208), HVTKPTX (SEQ ID NO: 84422):VPTKL (SEQ ID NO: 84381):SNIT (SEQ ID NO: 84118):DDSSNVI (SEQ ID NO: 84965):IGEMS (SEQ ID NO: 84209):NMQHN (SEQ ID NO: 84266):SXGXH (SEQ ID NO: 84304), YVPKPXX (SEQ ID NO: 84433):VPTKL (SEQ ID NO: 84381):SNIT (SEQ ID NO: 84118):DDSSNVI (SEQ ID NO: 84965):IGEMS (SEQ ID NO: 84209):NMQHN (SEQ ID NO: 84266):SXGXH (SEQ ID NO: 84304), TVPKPXX (SEQ ID NO: 84432):VPTQL (SEQ ID NO: 84384):SNIT (SEQ ID NO: 84118):DDSSNVI (SEQ ID NO: 84965):IGEMS (SEQ ID NO: 84209):NMQHN (SEQ ID NO: 84266):AXGXH (SEQ ID NO: 84147), AVPKAXX (SEQ ID NO: 84404):VPTKL (SEQ ID NO: 84381):SNIT (SEQ ID NO: 84118):DSSNNVI (SEQ ID NO: 84972):IGEMS (SEQ ID NO: 84209):NMQHN (SEQ ID NO: 84266):AXGXH (SEQ ID NO: 84147), KVGKAXX (SEQ ID NO: 84425):VPTKL (SEQ ID NO: 84381):SNIT (SEQ ID NO: 84118):DDMGVPT (SEQ ID NO: 84964):IGEMS (SEQ ID NO: 84209):EGMSQHN (SEQ ID NO: 84409):XGXR (SEQ ID NO: 84123), KASKAXX (SEQ ID NO: 84423):VPTKL (SEQ ID NO: 84381):SNIT (SEQ ID NO: 84118):DKGVVTY (SEQ ID NO: 84969):IGEMS (SEQ ID NO: 84209):GMQHN (SEQ ID NO: 84198):EXGXR (SEQ ID NO: 84179), GSAGPXX (SEQ ID NO: 84420):VPTKM (SEQ ID NO: 84382):SNIT (SEQ ID NO: 84118):NDKQQII (SEQ ID NO: 84979):IGEMS (SEQ ID NO: 84209):GMQHN (SEQ ID NO: 84198):RXGXS (SEQ ID NO: 84291), AAPASXX (SEQ ID NO: 84401):VPTRL (SEQ ID NO: 84385):SNIT (SEQ ID NO: 84118):DAANNVV (SEQ ID NO: 84963):IGEMS (SEQ ID NO: 84209):DMQHN (SEQ ID NO: 84154):AXGXR (SEQ ID NO: 84148), STPPTXX (SEQ ID NO: 84431):VPTRL (SEQ ID NO: 84385):SNIT (SEQ ID NO: 84118):DSANNVV (SEQ ID NO: 84971):IGEMS (SEQ ID NO: 84209):DMQHN (SEQ ID NO: 84154):SXGXR (SEQ ID NO: 84305), HVPKPXX (SEQ ID NO: 84421):VPTKL (SEQ ID NO: 84381):SNIT (SEQ ID NO: 84118):DDSSNVI (SEQ ID NO: 84965):IGEMS (SEQ ID NO: 84209):NMQHN (SEQ ID NO: 84266):SXGXH (SEQ ID NO: 84304), RVPSTXX (SEQ ID NO: 84428):VPTKT (SEQ ID NO: 84383):SNIT (SEQ ID NO: 84118):DNGRVLL (SEQ ID NO: 84970):IGEMS (SEQ ID NO: 84209):MIQHN (SEQ ID NO: 84238):XGXL (SEQ ID NO: 84122), ASAAPXX (SEQ ID NO: 84402):VPTAL (SEQ ID NO: 84375):SNIT (SEQ ID NO: 84118):VGRKPKV (SEQ ID NO: 84981):IGEMS (SEQ ID NO: 84209):MIQHN (SEQ ID NO: 84238):XKXS (SEQ ID NO: 84124), ASASPXX (SEQ ID NO: 84403):VPTDL (SEQ ID NO: 84376):SNIT (SEQ ID NO: 84118):IGKTPKI (SEQ ID NO: 84978):IGEMS (SEQ ID NO: 84209):MIQHN (SEQ ID NO: 84238):XKXS (SEQ ID NO: 84124), ASASPXX (SEQ ID NO: 84403):VPTDL (SEQ ID NO: 84376):SNIT (SEQ ID NO: 84118):VGRTPKV (SEQ ID NO: 84982):IGEMS (SEQ ID NO: 84209):MVQHN (SEQ ID NO: 84252):XKXS (SEQ ID NO: 84124), NDEGLXS (SEQ ID NO: 85019):VPTGQ (SEQ ID NO: 84379):SNIT (SEQ ID NO: 84118):RIKPHQGQH (SEQ ID NO: 84980):IGEMS (SEQ ID NO: 84209):LEQHN (SEQ ID NO: 84218):QXEXR (SEQ ID NO: 84276), NDEGLXS (SEQ ID NO: 85019):VPTEE (SEQ ID NO: 84377):SNIT (SEQ ID NO: 84118):RIKPHQGQH (SEQ ID NO: 84980):IGEMS (SEQ ID NO: 84209):FLQHN (SEQ ID NO: 84184):KXEXR (SEQ ID NO: 84213), SSVKXQP (SEQ ID NO: 84430):VPTHH (SEQ ID NO: 84380):SNIT (SEQ ID NO: 84118):EYVRKKPKL (SEQ ID NO: 84974):IGEMS (SEQ ID NO: 84209):RLQHN (SEQ ID NO: 84281):LEXAXA (SEQ ID NO: 84400), RNVQXRP (SEQ ID NO: 84427):VPTQL (SEQ ID NO: 84384):SNIT (SEQ ID NO: 84118):EIVRKKPIF (SEQ ID NO: 84973):IGEMS (SEQ ID NO: 84209):TLQHN (SEQ ID NO: 84310):LAXKXE (SEQ ID NO: 84399), KIPKAXX (SEQ ID NO: 84424):VPTEL (SEQ ID NO: 84378):SNIT (SEQ ID NO: 84118):DENEKVV (SEQ ID NO: 84966):IGEMS (SEQ ID NO: 84209):DMVVE (SEQ ID NO: 84161):GXGXR (SEQ ID NO: 84208), GIPEPXX (SEQ ID NO: 84419):VPEKM (SEQ ID NO: 84360):SNIT (SEQ ID NO: 84118):DENKNVV (SEQ ID NO: 84967):IGEMS (SEQ ID NO: 84209):NMTVE (SEQ ID NO: 84267):SXAXR (SEQ ID NO: 84303), SIPKAXX (SEQ ID NO: 84429):VPTEL (SEQ ID NO: 84378):SNIT (SEQ ID NO: 84118):DEYDKVV (SEQ ID NO: 84968):IGEMS (SEQ ID NO: 84209):EMVVE (SEQ ID NO: 84175):GXGXR (SEQ ID NO: 84208), HVTKPTX (SEQ ID NO: 84422):APTKL (SEQ ID NO: 84131):SNIT (SEQ ID NO: 84118):DDSSNVI (SEQ ID NO: 84965):IGEMS (SEQ ID NO: 84209):NMVVR (SEQ ID NO: 84275):SXGXH (SEQ ID NO: 84304), YVPKPXX (SEQ ID NO: 84433):APTKL (SEQ ID NO: 84131):SNIT (SEQ ID NO: 84118):DDSSNVI (SEQ ID NO: 84965):IGEMS (SEQ ID NO: 84209):NMVVR (SEQ ID NO: 84275):SXGXH (SEQ ID NO: 84304), TVPKPXX (SEQ ID NO: 84432):APTQL (SEQ ID NO: 84134):SNIT (SEQ ID NO: 84118):DDSSNVI (SEQ ID NO: 84965):IGEMS (SEQ ID NO: 84209):NMVVR (SEQ ID NO: 84275):AXGXH (SEQ ID NO: 84147), AVPKAXX (SEQ ID NO: 84404):APTKL (SEQ ID NO: 84131):SNIT (SEQ ID NO: 84118):DSSNNVI (SEQ ID NO: 84972):IGEMS (SEQ ID NO: 84209):NMVVK (SEQ ID NO: 84274):AXGXH (SEQ ID NO: 84147), KVGKAXX (SEQ ID NO: 84425):VPTKL (SEQ ID NO: 84381):SNIT (SEQ ID NO: 84118):DDMGVPT (SEQ ID NO: 84964):IGEMS (SEQ ID NO: 84209):EGMSVAE (SEQ ID NO: 84411):XGXR (SEQ ID NO: 84123), KASKAXX (SEQ ID NO: 84423):VPTKL (SEQ ID NO: 84381):SNIT (SEQ ID NO: 84118):DKGVVTY (SEQ ID NO: 84969):IGEMS (SEQ ID NO: 84209):GMAVS (SEQ ID NO: 84194):EXGXR (SEQ ID NO: 84179), GSAGPXX (SEQ ID NO: 84420):TPTKM (SEQ ID NO: 84327):SNIT (SEQ ID NO: 84118):NDKQQII (SEQ ID NO: 84979):IGEMS (SEQ ID NO: 84209):GMVVD (SEQ ID NO: 84204):RXGXS (SEQ ID NO: 84291), AAPASXX (SEQ ID NO: 84401):VPARL (SEQ ID NO: 84352):SNIT (SEQ ID NO: 84118):DAANNVV (SEQ ID NO: 84963):IGEMS (SEQ ID NO: 84209):DMVVE (SEQ ID NO: 84161):AXGXR (SEQ ID NO: 84148), STPPTXX (SEQ ID NO: 84431):VPTRL (SEQ ID NO: 84385):SNIT (SEQ ID NO: 84118):DSANNVV (SEQ ID NO: 84971):IGEMS (SEQ ID NO: 84209):DMVVE (SEQ ID NO: 84161):SXGXR (SEQ ID NO: 84305), HVPKPXX (SEQ ID NO: 84421):APTKL (SEQ ID NO: 84131):SNIT (SEQ ID NO: 84118):DDSSNVI (SEQ ID NO: 84965):IGEMS (SEQ ID NO: 84209):NMVVR (SEQ ID NO: 84275):SXGXH (SEQ ID NO: 84304), RVPSTXX (SEQ ID NO: 84428):APVKT (SEQ ID NO: 84144):SNIT (SEQ ID NO: 84118):DNGRVLL (SEQ ID NO: 84970):IGEMS (SEQ ID NO: 84209):MIVEE (SEQ ID NO: 84241):XGXL (SEQ ID NO: 84122), ASAAPXX (SEQ ID NO: 84402):VPQAL (SEQ ID NO: 84364):SNIT (SEQ ID NO: 84118):VGRKPKV (SEQ ID NO: 84981):IGEMS (SEQ ID NO: 84209):MIVRS (SEQ ID NO: 84243):XKXS (SEQ ID NO: 84124), ASASPXX (SEQ ID NO: 84403):VSQDL (SEQ ID NO: 84387):SNIT (SEQ ID NO: 84118):IGKTPKI (SEQ ID NO: 84978):IGEMS (SEQ ID NO: 84209):MIVKS (SEQ ID NO: 84242):XKXS (SEQ ID NO: 84124), ASASPXX (SEQ ID NO: 84403):VPQDL (SEQ ID NO: 84365):SNIT (SEQ ID NO: 84118):VGRTPKV (SEQ ID NO: 84982):IGEMS (SEQ ID NO: 84209):MVVKS (SEQ ID NO: 84256):XKXS (SEQ ID NO: 84124), NDEGLXS (SEQ ID NO: 85019):VPTGQ (SEQ ID NO: 84379):SNIT (SEQ ID NO: 84118):RIKPHQGQH (SEQ ID NO: 84980):IGEMS (SEQ ID NO: 84209):LEEHS (SEQ ID NO: 84217):QXEXR (SEQ ID NO: 84276), SSVKXQP (SEQ ID NO: 84430):SRVHH (SEQ ID NO: 84297):SNIT (SEQ ID NO: 84118):EYVRKKPKL (SEQ ID NO: 84974):IGEMS (SEQ ID NO: 84209):RLEEH (SEQ ID NO: 84279):LEXAXA (SEQ ID NO: 84400), RNVQXRP (SEQ ID NO: 84427):TQVQL (SEQ ID NO: 84340):SNIT (SEQ ID NO: 84118):EIVRKKPIF (SEQ ID NO: 84973):IGEMS (SEQ ID NO: 84209):TLEDH (SEQ ID NO: 84307):LAXKXE (SEQ ID NO: 84399), KIPKAXX (SEQ ID NO: 84424):VPTEL (SEQ ID NO: 84378):SNIT (SEQ ID NO: 84118):DENEKVV (SEQ ID NO: 84966):LGEMS (SEQ ID NO: 84228):DMEHS (SEQ ID NO: 84153):GXGXR (SEQ ID NO: 84208), GIPEPXX (SEQ ID NO: 84419):VPTKM (SEQ ID NO: 84382):SNIT (SEQ ID NO: 84118):DENKNVV (SEQ ID NO: 84967):LGEMS (SEQ ID NO: 84228):NMEHS (SEQ ID NO: 84265):SXAXR (SEQ ID NO: 84303), SIPKAXX (SEQ ID NO: 84429):VPTEL (SEQ ID NO: 84378):SNIT (SEQ ID NO: 84118):DEYDKVV (SEQ ID NO: 84968):LGEMS (SEQ ID NO: 84228):EMEHS (SEQ ID NO: 84167):GXGXR (SEQ ID NO: 84208), HVTKPTX (SEQ ID NO: 84422):VPTKL (SEQ ID NO: 84381):SNIT (SEQ ID NO: 84118):DDSSNVI (SEQ ID NO: 84965):LGEMS (SEQ ID NO: 84228):NMEHS (SEQ ID NO: 84265):SXGXH (SEQ ID NO: 84304), YVPKPXX (SEQ ID NO: 84433):VPTKL (SEQ ID NO: 84381):SNIT (SEQ ID NO: 84118):DDSSNVI (SEQ ID NO: 84965):LGEMS (SEQ ID NO: 84228):NMEHS (SEQ ID NO: 84265):SXGXH (SEQ ID NO: 84304), TVPKPXX (SEQ ID NO: 84432):VPTQL (SEQ ID NO: 84384):SNIT (SEQ ID NO: 84118):DDSSNVI (SEQ ID NO: 84965):LGEMS (SEQ ID NO: 84228):NMEHS (SEQ ID NO: 84265):AXGXH (SEQ ID NO: 84147), AVPKAXX (SEQ ID NO: 84404):VPTKL (SEQ ID NO: 84381):SNIT (SEQ ID NO: 84118):DSSNNVI (SEQ ID NO: 84972):LGEMS (SEQ ID NO: 84228):NMEHS (SEQ ID NO: 84265):AXGXH (SEQ ID NO: 84147), KVGKAXX (SEQ ID NO: 84425):VPTKL (SEQ ID NO: 84381):SNIT (SEQ ID NO: 84118):DDMGVPT (SEQ ID NO: 84964):LGEMS (SEQ ID NO: 84228):EGMSEHS (SEQ ID NO: 84408):XGXR (SEQ ID NO: 84123), KASKAXX (SEQ ID NO: 84423):VPTKL (SEQ ID NO: 84381):SNIT (SEQ ID NO: 84118):DKGVVTY (SEQ ID NO: 84969):LGEMS (SEQ ID NO: 84228):GMEHS (SEQ ID NO: 84197):EXGXR (SEQ ID NO: 84179), GSAGPXX (SEQ ID NO: 84420):VPTKM (SEQ ID NO: 84382):SNIT (SEQ ID NO: 84118):NDKQQII (SEQ ID NO: 84979):LGEMS (SEQ ID NO: 84228):GMEHS (SEQ ID NO: 84197):RXGXS (SEQ ID NO: 84291), AAPASXX (SEQ ID NO: 84401):VPTRL (SEQ ID NO: 84385):SNIT (SEQ ID NO: 84118):DAANNVV (SEQ ID NO: 84963):LGEMS (SEQ ID NO: 84228):DMEHS (SEQ ID NO: 84153):AXGXR (SEQ ID NO: 84148), STPPTXX (SEQ ID NO: 84431):VPTRL (SEQ ID NO: 84385):SNIT (SEQ ID NO: 84118):DSANNVV (SEQ ID NO: 84971):LGEMS (SEQ ID NO: 84228):DMEHS (SEQ ID NO: 84153):SXGXR (SEQ ID NO: 84305), HVPKPXX (SEQ ID NO: 84421):VPTKL (SEQ ID NO: 84381):SNIT (SEQ ID NO: 84118):DDSSNVI (SEQ ID NO: 84965):LGEMS (SEQ ID NO: 84228):NMEHS (SEQ ID NO: 84265):SXGXH (SEQ ID NO: 84304), RVPSTXX (SEQ ID NO: 84428):VPTKT (SEQ ID NO: 84383):SNIT (SEQ ID NO: 84118):DNGRVLL (SEQ ID NO: 84970):LGEMS (SEQ ID NO: 84228):MIEHS (SEQ ID NO: 84237):XGXL (SEQ ID NO: 84122), ASAAPXX (SEQ ID NO: 84402):VPTAL (SEQ ID NO: 84375):SNIT (SEQ ID NO: 84118):VGRKPKV (SEQ ID NO: 84981):LGEMS (SEQ ID NO: 84228):MIEHS (SEQ ID NO: 84237):XKXS (SEQ ID NO: 84124), ASASPXX (SEQ ID NO: 84403):VPTDL (SEQ ID NO: 84376):SNIT (SEQ ID NO: 84118):IGKTPKI (SEQ ID NO: 84978):LGEMS (SEQ ID NO: 84228):MIEHS (SEQ ID NO: 84237):XKXS (SEQ ID NO: 84124), ASASPXX (SEQ ID NO: 84403):VPTDL (SEQ ID NO: 84376):SNIT (SEQ ID NO: 84118):VGRTPKV (SEQ ID NO: 84982):LGEMS (SEQ ID NO: 84228):MVEHS (SEQ ID NO: 84251):XKXS (SEQ ID NO: 84124), NDEGLXS (SEQ ID NO: 85019):VPTEE (SEQ ID NO: 84377):SNIT (SEQ ID NO: 84118):RIKPHQGQH (SEQ ID NO: 84980):LGEMS (SEQ ID NO: 84228):FLEHS (SEQ ID NO: 84183):KXEXR (SEQ ID NO: 84213), SSVKXQP (SEQ ID NO: 84430):VPTHH (SEQ ID NO: 84380):SNIT (SEQ ID NO: 84118):EYVRKKPKL (SEQ ID NO: 84974):LGEMS (SEQ ID NO: 84228):RLEHS (SEQ ID NO: 84280):LEXAXA (SEQ ID NO: 84400), RNVQXRP (SEQ ID NO: 84427):VPTQL (SEQ ID NO: 84384):SNIT (SEQ ID NO: 84118):EIVRKKPIF (SEQ ID NO: 84973):LGEMS (SEQ ID NO: 84228):TLEHS (SEQ ID NO: 84309):LAXKXE (SEQ ID NO: 84399), KIPKAXX (SEQ ID NO: 84424):VPTEL (SEQ ID NO: 84378):SNIT (SEQ ID NO: 84118):DENEKVV (SEQ ID NO: 84966):LGEMS (SEQ ID NO: 84228):DMVVE (SEQ ID NO: 84161):GXGXR (SEQ ID NO: 84208), GIPEPXX (SEQ ID NO: 84419):VPEKM (SEQ ID NO: 84360):SNIT (SEQ ID NO: 84118):DENKNVV (SEQ ID NO: 84967):LGEMS (SEQ ID NO: 84228):NMTVE (SEQ ID NO: 84267):SXAXR (SEQ ID NO: 84303), SIPKAXX (SEQ ID NO: 84429):VPTEL (SEQ ID NO: 84378):SNIT (SEQ ID NO: 84118):DEYDKVV (SEQ ID NO: 84968):LGEMS (SEQ ID NO: 84228):EMVVE (SEQ ID NO: 84175):GXGXR (SEQ ID NO: 84208), HVTKPTX (SEQ ID NO: 84422):APTKL (SEQ ID NO: 84131):SNIT (SEQ ID NO: 84118):DDSSNVI (SEQ ID NO: 84965):LGEMS (SEQ ID NO: 84228):NMVVR (SEQ ID NO: 84275):SXGXH (SEQ ID NO: 84304), YVPKPXX (SEQ ID NO: 84433):APTKL (SEQ ID NO: 84131):SNIT (SEQ ID NO: 84118):DDSSNVI (SEQ ID NO: 84965):LGEMS (SEQ ID NO: 84228):NMVVR (SEQ ID NO: 84275):SXGXH (SEQ ID NO: 84304), TVPKPXX (SEQ ID NO: 84432):APTQL (SEQ ID NO: 84134):SNIT (SEQ ID NO: 84118):DDSSNVI (SEQ ID NO: 84965):LGEMS (SEQ ID NO: 84228):NMVVR (SEQ ID NO: 84275):AXGXH (SEQ ID NO: 84147), AVPKAXX (SEQ ID NO: 84404):APTKL (SEQ ID NO: 84131):SNIT (SEQ ID NO: 84118):DSSNNVI (SEQ ID NO: 84972):LGEMS (SEQ ID NO: 84228):NMVVK (SEQ ID NO: 84274):AXGXH (SEQ ID NO: 84147), KVGKAXX (SEQ ID NO: 84425):VPTKL (SEQ ID NO: 84381):SNIT (SEQ ID NO: 84118):DDMGVPT (SEQ ID NO: 84964):LGEMS (SEQ ID NO: 84228):EGMSVAE (SEQ ID NO: 84411):XGXR (SEQ ID NO: 84123), KASKAXX (SEQ ID NO: 84423):VPTKL (SEQ ID NO: 84381):SNIT (SEQ ID NO: 84118):DKGVVTY (SEQ ID NO: 84969):LGEMS (SEQ ID NO: 84228):GMAVS (SEQ ID NO: 84194):EXGXR (SEQ ID NO: 84179), GSAGPXX (SEQ ID NO: 84420):TPTKM (SEQ ID NO: 84327):SNIT (SEQ ID NO: 84118):NDKQQII (SEQ ID NO: 84979):LGEMS (SEQ ID NO: 84228):GMVVD (SEQ ID NO: 84204):RXGXS (SEQ ID NO: 84291), AAPASXX (SEQ ID NO: 84401):VPARL (SEQ ID NO: 84352):SNIT (SEQ ID NO: 84118):DAANNVV (SEQ ID NO: 84963):LGEMS (SEQ ID NO: 84228):DMVVE (SEQ ID NO: 84161):AXGXR (SEQ ID NO: 84148), STPPTXX (SEQ ID NO: 84431):VPTRL (SEQ ID NO: 84385):SNIT (SEQ ID NO: 84118):DSANNVV (SEQ ID NO: 84971):LGEMS (SEQ ID NO: 84228):DMVVE (SEQ ID NO: 84161):SXGXR (SEQ ID NO: 84305), HVPKPXX (SEQ ID NO: 84421):APTKL (SEQ ID NO: 84131):SNIT (SEQ ID NO: 84118):DDSSNVI (SEQ ID NO: 84965):LGEMS (SEQ ID NO: 84228):NMVVR (SEQ ID NO: 84275):SXGXH (SEQ ID NO: 84304), RVPSTXX (SEQ ID NO: 84428):APVKT (SEQ ID NO: 84144):SNIT (SEQ ID NO: 84118):DNGRVLL (SEQ ID NO: 84970):LGEMS (SEQ ID NO: 84228):MIVEE (SEQ ID NO: 84241):XGXL (SEQ ID NO: 84122), ASAAPXX (SEQ ID NO: 84402):VPQAL (SEQ ID NO: 84364):SNIT (SEQ ID NO: 84118):VGRKPKV (SEQ ID NO: 84981):LGEMS (SEQ ID NO: 84228):MIVRS (SEQ ID NO: 84243):XKXS (SEQ ID NO: 84124), ASASPXX (SEQ ID NO: 84403):VSQDL (SEQ ID NO: 84387):SNIT (SEQ ID NO: 84118):IGKTPKI (SEQ ID NO: 84978):LGEMS (SEQ ID NO: 84228):MIVKS (SEQ ID NO: 84242):XKXS (SEQ ID NO: 84124), ASASPXX (SEQ ID NO: 84403):VPQDL (SEQ ID NO: 84365):SNIT (SEQ ID NO: 84118):VGRTPKV (SEQ ID NO: 84982):LGEMS (SEQ ID NO: 84228):MVVKS (SEQ ID NO: 84256):XKXS (SEQ ID NO: 84124), NDEGLXS (SEQ ID NO: 85019):VPTEE (SEQ ID NO: 84377):SNIT (SEQ ID NO: 84118):RIKPHQGQH (SEQ ID NO: 84980):LGEMS (SEQ ID NO: 84228):FLQHN (SEQ ID NO: 84184):KXEXR (SEQ ID NO: 84213), SSVKXQP (SEQ ID NO: 84430):SRVHH (SEQ ID NO: 84297):SNIT (SEQ ID NO: 84118):EYVRKKPKL (SEQ ID NO: 84974):LGEMS (SEQ ID NO: 84228):RLEEH (SEQ ID NO: 84279):LEXAXA (SEQ ID NO: 84400), RNVQXRP (SEQ ID NO: 84427):TQVQL (SEQ ID NO: 84340):SNIT (SEQ ID NO: 84118):EIVRKKPIF (SEQ ID NO: 84973):LGEMS (SEQ ID NO: 84228):TLEDH (SEQ ID NO: 84307):LAXKXE (SEQ ID NO: 84399), KIPKAXX (SEQ ID NO: 84424):SRVEL (SEQ ID NO: 84295):RSVK (SEQ ID NO: 84115):DENEKVV (SEQ ID NO: 84966):KEVQV (SEQ ID NO: 84210):DMEEH (SEQ ID NO: 84152):GXGXR (SEQ ID NO: 84208), GIPEPXX (SEQ ID NO: 84419):SRVKM (SEQ ID NO: 84299):RSVK (SEQ ID NO: 84115):DENKNVV (SEQ ID NO: 84967):KEVQV (SEQ ID NO: 84210):NMEEH (SEQ ID NO: 84264):SXAXR (SEQ ID NO: 84303), SIPKAXX (SEQ ID NO: 84429):SRVEL (SEQ ID NO: 84295):RSVK (SEQ ID NO: 84115):DEYDKVV (SEQ ID NO: 84968):KEVQV (SEQ ID NO: 84210):EMEEH (SEQ ID NO: 84166):GXGXR (SEQ ID NO: 84208), HVTKPTX (SEQ ID NO: 84422):SRVKL (SEQ ID NO: 84298):RSVK (SEQ ID NO: 84115):DDSSNVI (SEQ ID NO: 84965):KEVQV (SEQ ID NO: 84210):NMEEH (SEQ ID NO: 84264):SXGXH (SEQ ID NO: 84304), YVPKPXX (SEQ ID NO: 84433):SRVKL (SEQ ID NO: 84298):RSVK (SEQ ID NO: 84115):DDSSNVI (SEQ ID NO: 84965):KEVQV (SEQ ID NO: 84210):NMEEH (SEQ ID NO: 84264):SXGXH (SEQ ID NO: 84304), TVPKPXX (SEQ ID NO: 84432):SRVQL (SEQ ID NO: 84301):RSVK (SEQ ID NO: 84115):DDSSNVI (SEQ ID NO: 84965):KEVQV (SEQ ID NO: 84210):NMEEH (SEQ ID NO: 84264):AXGXH (SEQ ID NO: 84147), AVPKAXX (SEQ ID NO: 84404):SRVKL (SEQ ID NO: 84298):RSVK (SEQ ID NO: 84115):DSSNNVI (SEQ ID NO: 84972):KEVQV (SEQ ID NO: 84210):NMEEH (SEQ ID NO: 84264):AXGXH (SEQ ID NO: 84147), KVGKAXX (SEQ ID NO: 84425):SRVKL (SEQ ID NO: 84298):RSVK (SEQ ID NO: 84115):DDMGVPT (SEQ ID NO: 84964):KEVQV (SEQ ID NO: 84210):EGMSEEH (SEQ ID NO: 84407):XGXR (SEQ ID NO: 84123), KASKAXX (SEQ ID NO: 84423):SRVKL (SEQ ID NO: 84298):RSVK (SEQ ID NO: 84115):DKGVVTY (SEQ ID NO: 84969):KEVQV (SEQ ID NO: 84210):GMEEH (SEQ ID NO: 84196):EXGXR (SEQ ID NO: 84179), GSAGPXX (SEQ ID NO: 84420):SRVKM (SEQ ID NO: 84299):RSVK (SEQ ID NO: 84115):NDKQQII (SEQ ID NO: 84979):KEVQV (SEQ ID NO: 84210):GMEEH (SEQ ID NO: 84196):RXGXS (SEQ ID NO: 84291), AAPASXX (SEQ ID NO: 84401):SRVRL (SEQ ID NO: 84302):RSVK (SEQ ID NO: 84115):DAANNVV (SEQ ID NO: 84963):KEVQV (SEQ ID NO: 84210):DMEEH (SEQ ID NO: 84152):AXGXR (SEQ ID NO: 84148), STPPTXX (SEQ ID NO: 84431):SRVRL (SEQ ID NO: 84302):RSVK (SEQ ID NO: 84115):DSANNVV (SEQ ID NO: 84971):KEVQV (SEQ ID NO: 84210):DMEEH (SEQ ID NO: 84152):SXGXR (SEQ ID NO: 84305), HVPKPXX (SEQ ID NO: 84421):SRVKL (SEQ ID NO: 84298):RSVK (SEQ ID NO: 84115):DDSSNVI (SEQ ID NO: 84965):KEVQV (SEQ ID NO: 84210):NMEEH (SEQ ID NO: 84264):SXGXH (SEQ ID NO: 84304), RVPSTXX (SEQ ID NO: 84428):SRVKT (SEQ ID NO: 84300):RSVK (SEQ ID NO: 84115):DNGRVLL (SEQ ID NO: 84970):KEVQV (SEQ ID NO: 84210):MIEEH (SEQ ID NO: 84236):XGXL (SEQ ID NO: 84122), ASAAPXX (SEQ ID NO: 84402):SRVAL (SEQ ID NO: 84292):RSVK (SEQ ID NO: 84115):VGRKPKV (SEQ ID NO: 84981):KEVQV (SEQ ID NO: 84210):MIEEH (SEQ ID NO: 84236):XKXS (SEQ ID NO: 84124), ASASPXX (SEQ ID NO: 84403):SRVDL (SEQ ID NO: 84293):RSVK (SEQ ID NO: 84115):IGKTPKI (SEQ ID NO: 84978):KEVQV (SEQ ID NO: 84210):MIEEH (SEQ ID NO: 84236):XKXS (SEQ ID NO: 84124), ASASPXX (SEQ ID NO: 84403):SRVDL (SEQ ID NO: 84293):RSVK (SEQ ID NO: 84115):VGRTPKV (SEQ ID NO: 84982):KEVQV (SEQ ID NO: 84210):MVEEH (SEQ ID NO: 84250):XKXS (SEQ ID NO: 84124), NDEGLXS (SEQ ID NO: 85019):SRVEE (SEQ ID NO: 84294):RSVK (SEQ ID NO: 84115):RIKPHQGQH (SEQ ID NO: 84980):KEVQV (SEQ ID NO: 84210):FLEEH (SEQ ID NO: 84182):KXEXR (SEQ ID NO: 84213), NDEGLXS (SEQ ID NO: 85019):SRVGQ (SEQ ID NO: 84296):RSVK (SEQ ID NO: 84115):RIKPHQGQH (SEQ ID NO: 84980):KEVQV (SEQ ID NO: 84210):LEEEH (SEQ ID NO: 84216):QXEXR (SEQ ID NO: 84276), RNVQXRP (SEQ ID NO: 84427):SRVQL (SEQ ID NO: 84301):RSVK (SEQ ID NO: 84115):EIVRKKPIF (SEQ ID NO: 84973):KEVQV (SEQ ID NO: 84210):TLEEH (SEQ ID NO: 84308):LAXKXE (SEQ ID NO: 84399), KIPKAXX (SEQ ID NO: 84424):VPTEL (SEQ ID NO: 84378):RSVK (SEQ ID NO: 84115):DENEKVV (SEQ ID NO: 84966):KEVQV (SEQ ID NO: 84210):DMVVE (SEQ ID NO: 84161):GXGXR (SEQ ID NO: 84208), GIPEPXX (SEQ ID NO: 84419):VPEKM (SEQ ID NO: 84360):RSVK (SEQ ID NO: 84115):DENKNVV (SEQ ID NO: 84967):KEVQV (SEQ ID NO: 84210):NMTVE (SEQ ID NO: 84267):SXAXR (SEQ ID NO: 84303), SIPKAXX (SEQ ID NO: 84429):VPTEL (SEQ ID NO: 84378):RSVK (SEQ ID NO: 84115):DEYDKVV (SEQ ID NO: 84968):KEVQV (SEQ ID NO: 84210):EMVVE (SEQ ID NO: 84175):GXGXR (SEQ ID NO: 84208), HVTKPTX (SEQ ID NO: 84422):APTKL (SEQ ID NO: 84131):RSVK (SEQ ID NO: 84115):DDSSNVI (SEQ ID NO: 84965):KEVQV (SEQ ID NO: 84210):NMVVR (SEQ ID NO: 84275):SXGXH (SEQ ID NO: 84304), YVPKPXX (SEQ ID NO: 84433):APTKL (SEQ ID NO: 84131):RSVK (SEQ ID NO: 84115):DDSSNVI (SEQ ID NO: 84965):KEVQV (SEQ ID NO: 84210):NMVVR (SEQ ID NO: 84275):SXGXH (SEQ ID NO: 84304), TVPKPXX (SEQ ID NO: 84432):APTQL (SEQ ID NO: 84134):RSVK (SEQ ID NO: 84115):DDSSNVI (SEQ ID NO: 84965):KEVQV (SEQ ID NO: 84210):NMVVR (SEQ ID NO: 84275):AXGXH (SEQ ID NO: 84147), AVPKAXX (SEQ ID NO: 84404):APTKL (SEQ ID NO: 84131):RSVK (SEQ ID NO: 84115):DSSNNVI (SEQ ID NO: 84972):KEVQV (SEQ ID NO: 84210):NMVVK (SEQ ID NO: 84274):AXGXH (SEQ ID NO: 84147), KVGKAXX (SEQ ID NO: 84425):VPTKL (SEQ ID NO: 84381):RSVK (SEQ ID NO: 84115):DDMGVPT (SEQ ID NO: 84964):KEVQV (SEQ ID NO: 84210):EGMSVAE (SEQ ID NO: 84411):XGXR (SEQ ID NO: 84123), KASKAXX (SEQ ID NO: 84423):VPTKL (SEQ ID NO: 84381):RSVK (SEQ ID NO: 84115):DKGVVTY (SEQ ID NO: 84969):KEVQV (SEQ ID NO: 84210):GMAVS (SEQ ID NO: 84194):EXGXR (SEQ ID NO: 84179), GSAGPXX (SEQ ID NO: 84420):TPTKM (SEQ ID NO: 84327):RSVK (SEQ ID NO: 84115):NDKQQII (SEQ ID NO: 84979):KEVQV (SEQ ID NO: 84210):GMVVD (SEQ ID NO: 84204):RXGXS (SEQ ID NO: 84291), AAPASXX (SEQ ID NO: 84401):VPARL (SEQ ID NO: 84352):RSVK (SEQ ID NO: 84115):DAANNVV (SEQ ID NO: 84963):KEVQV (SEQ ID NO: 84210):DMVVE (SEQ ID NO: 84161):AXGXR (SEQ ID NO: 84148), STPPTXX (SEQ ID NO: 84431):VPTRL (SEQ ID NO: 84385):RSVK (SEQ ID NO: 84115):DSANNVV (SEQ ID NO: 84971):KEVQV (SEQ ID NO: 84210):DMVVE (SEQ ID NO: 84161):SXGXR (SEQ ID NO: 84305), HVPKPXX (SEQ ID NO: 84421):APTKL (SEQ ID NO: 84131):RSVK (SEQ ID NO: 84115):DDSSNVI (SEQ ID NO: 84965):KEVQV (SEQ ID NO: 84210):NMVVR (SEQ ID NO: 84275):SXGXH (SEQ ID NO: 84304), RVPSTXX (SEQ ID NO: 84428):APVKT (SEQ ID NO: 84144):RSVK (SEQ ID NO: 84115):DNGRVLL (SEQ ID NO: 84970):KEVQV (SEQ ID NO: 84210):MIVEE (SEQ ID NO: 84241):XGXL (SEQ ID NO: 84122), ASAAPXX (SEQ ID NO: 84402):VPQAL (SEQ ID NO: 84364):RSVK (SEQ ID NO: 84115):VGRKPKV (SEQ ID NO: 84981):KEVQV (SEQ ID NO: 84210):MIVRS (SEQ ID NO: 84243):XKXS (SEQ ID NO: 84124), ASASPXX (SEQ ID NO: 84403):VSQDL (SEQ ID NO: 84387):RSVK (SEQ ID NO: 84115):IGKTPKI (SEQ ID NO: 84978):KEVQV (SEQ ID NO: 84210):MIVKS (SEQ ID NO: 84242):XKXS (SEQ ID NO: 84124), ASASPXX (SEQ ID NO: 84403):VPQDL (SEQ ID NO: 84365):RSVK (SEQ ID NO: 84115):VGRTPKV (SEQ ID NO: 84982):KEVQV (SEQ ID NO: 84210):MVVKS (SEQ ID NO: 84256):XKXS (SEQ ID NO: 84124), NDEGLXS (SEQ ID NO: 85019):VPTEE (SEQ ID NO: 84377):RSVK (SEQ ID NO: 84115):RIKPHQGQH (SEQ ID NO: 84980):KEVQV (SEQ ID NO: 84210):FLQHN (SEQ ID NO: 84184):KXEXR (SEQ ID NO: 84213), NDEGLXS (SEQ ID NO: 85019):VPTGQ (SEQ ID NO: 84379):RSVK (SEQ ID NO: 84115):RIKPHQGQH (SEQ ID NO: 84980):KEVQV (SEQ ID NO: 84210):LEEHS (SEQ ID NO: 84217):QXEXR (SEQ ID NO: 84276), RNVQXRP (SEQ ID NO: 84427):TQVQL (SEQ ID NO: 84340):RSVK (SEQ ID NO: 84115):EIVRKKPIF (SEQ ID NO: 84973):KEVQV (SEQ ID NO: 84210):TLEDH (SEQ ID NO: 84307):LAXKXE (SEQ ID NO: 84399), KIPKAXX (SEQ ID NO: 84424):TQVEL (SEQ ID NO: 84334):RPVQ (SEQ ID NO: 84114):DENEKVV (SEQ ID NO: 84966):KKATV (SEQ ID NO: 84212):DMEDH (SEQ ID NO: 84151):GXGXR (SEQ ID NO: 84208), GIPEPXX (SEQ ID NO: 84419):TQVKM (SEQ ID NO: 84338):RPVQ (SEQ ID NO: 84114):DENKNVV (SEQ ID NO: 84967):KKATV (SEQ ID NO: 84212):NMEDH (SEQ ID NO: 84263):SXAXR (SEQ ID NO: 84303), SIPKAXX (SEQ ID NO: 84429):TQVEL (SEQ ID NO: 84334):RPVQ (SEQ ID NO: 84114):DEYDKVV (SEQ ID NO: 84968):KKATV (SEQ ID NO: 84212):EMEDH (SEQ ID NO: 84165):GXGXR (SEQ ID NO: 84208), HVTKPTX (SEQ ID NO: 84422):TQVKL (SEQ ID NO: 84337):RPVQ (SEQ ID NO: 84114):DDSSNVI (SEQ ID NO: 84965):KKATV (SEQ ID NO: 84212):NMEDH (SEQ ID NO: 84263):SXGXH (SEQ ID NO: 84304), YVPKPXX (SEQ ID NO: 84433):TQVKL (SEQ ID NO: 84337):RPVQ (SEQ ID NO: 84114):DDSSNVI (SEQ ID NO: 84965):KKATV (SEQ ID NO: 84212):NMEDH (SEQ ID NO: 84263):SXGXH (SEQ ID NO: 84304), TVPKPXX (SEQ ID NO: 84432):TQVQL (SEQ ID NO: 84340):RPVQ (SEQ ID NO: 84114):DDSSNVI (SEQ ID NO: 84965):KKATV (SEQ ID NO: 84212):NMEDH (SEQ ID NO: 84263):AXGXH (SEQ ID NO: 84147), AVPKAXX (SEQ ID NO: 84404):TQVKL (SEQ ID NO: 84337):RPVQ (SEQ ID NO: 84114):DSSNNVI (SEQ ID NO: 84972):KKATV (SEQ ID NO: 84212):NMEDH (SEQ ID NO: 84263):AXGXH (SEQ ID NO: 84147), KVGKAXX (SEQ ID NO: 84425):TQVKL (SEQ ID NO: 84337):RPVQ (SEQ ID NO: 84114):DDMGVPT (SEQ ID NO: 84964):KKATV (SEQ ID NO: 84212):EGMSEDH (SEQ ID NO: 84406):XGXR (SEQ ID NO: 84123), KASKAXX (SEQ ID NO: 84423):TQVKL (SEQ ID NO: 84337):RPVQ (SEQ ID NO: 84114):DKGVVTY (SEQ ID NO: 84969):KKATV (SEQ ID NO: 84212):GMEDH (SEQ ID NO: 84195):EXGXR (SEQ ID NO: 84179), GSAGPXX (SEQ ID NO: 84420):TQVKM (SEQ ID NO: 84338):RPVQ (SEQ ID NO: 84114):NDKQQII (SEQ ID NO: 84979):KKATV (SEQ ID NO: 84212):GMEDH (SEQ ID NO: 84195):RXGXS (SEQ ID NO: 84291), AAPASXX (SEQ ID NO: 84401):TQVRL (SEQ ID NO: 84341):RPVQ (SEQ ID NO: 84114):DAANNVV (SEQ ID NO: 84963):KKATV (SEQ ID NO: 84212):DMEDH (SEQ ID NO: 84151):AXGXR (SEQ ID NO: 84148), STPPTXX (SEQ ID NO: 84431):TQVRL (SEQ ID NO: 84341):RPVQ (SEQ ID NO: 84114):DSANNVV (SEQ ID NO: 84971):KKATV (SEQ ID NO: 84212):DMEDH (SEQ ID NO: 84151):SXGXR (SEQ ID NO: 84305), HVPKPXX (SEQ ID NO: 84421):TQVKL (SEQ ID NO: 84337):RPVQ (SEQ ID NO: 84114):DDSSNVI (SEQ ID NO: 84965):KKATV (SEQ ID NO: 84212):NMEDH (SEQ ID NO: 84263):SXGXH (SEQ ID NO: 84304), RVPSTXX (SEQ ID NO: 84428):TQVKT (SEQ ID NO: 84339):RPVQ (SEQ ID NO: 84114):DNGRVLL (SEQ ID NO: 84970):KKATV (SEQ ID NO: 84212):MIEDH (SEQ ID NO: 84235):XGXL (SEQ ID NO: 84122), ASAAPXX (SEQ ID NO: 84402):TQVAL (SEQ ID NO: 84331):RPVQ (SEQ ID NO: 84114):VGRKPKV (SEQ ID NO: 84981):KKATV (SEQ ID NO: 84212):MIEDH (SEQ ID NO: 84235):XKXS (SEQ ID NO: 84124), ASASPXX (SEQ ID NO: 84403):TQVDL (SEQ ID NO: 84332):RPVQ (SEQ ID NO: 84114):IGKTPKI (SEQ ID NO: 84978):KKATV (SEQ ID NO: 84212):MIEDH (SEQ ID NO: 84235):XKXS (SEQ ID NO: 84124), ASASPXX (SEQ ID NO: 84403):TQVDL (SEQ ID NO: 84332):RPVQ (SEQ ID NO: 84114):VGRTPKV (SEQ ID NO: 84982):KKATV (SEQ ID NO: 84212):MVEDH (SEQ ID NO: 84249):XKXS (SEQ ID NO: 84124), NDEGLXS (SEQ ID NO: 85019):TQVEE (SEQ ID NO: 84333):RPVQ (SEQ ID NO: 84114):RIKPHQGQH (SEQ ID NO: 84980):KKATV (SEQ ID NO: 84212):FLEDH (SEQ ID NO: 84181):KXEXR (SEQ ID NO: 84213), NDEGLXS (SEQ ID NO: 85019):TQVGQ (SEQ ID NO: 84335):RPVQ (SEQ ID NO: 84114):RIKPHQGQH (SEQ ID NO: 84980):KKATV (SEQ ID NO: 84212):LEEDH (SEQ ID NO: 84215):QXEXR (SEQ ID NO: 84276), SSVKXQP (SEQ ID NO: 84430):TQVHH (SEQ ID NO: 84336):RPVQ (SEQ ID NO: 84114):EYVRKKPKL (SEQ ID NO: 84974):KKATV (SEQ ID NO: 84212):RLEDH (SEQ ID NO: 84278):LEXAXA (SEQ ID NO: 84400), KIPKAXX (SEQ ID NO: 84424):VPTEL (SEQ ID NO: 84378):RPVQ (SEQ ID NO: 84114):DENEKVV (SEQ ID NO: 84966):KKATV (SEQ ID NO: 84212):DMVVE (SEQ ID NO: 84161):GXGXR (SEQ ID NO: 84208), GIPEPXX (SEQ ID NO: 84419):VPEKM (SEQ ID NO: 84360):RPVQ (SEQ ID NO: 84114):DENKNVV (SEQ ID NO: 84967):KKATV (SEQ ID NO: 84212):NMTVE (SEQ ID NO: 84267):SXAXR (SEQ ID NO: 84303), SIPKAXX (SEQ ID NO: 84429):VPTEL (SEQ ID NO: 84378):RPVQ (SEQ ID NO: 84114):DEYDKVV (SEQ ID NO: 84968):KKATV (SEQ ID NO: 84212):EMVVE (SEQ ID NO: 84175):GXGXR (SEQ ID NO: 84208), HVTKPTX (SEQ ID NO: 84422):APTKL (SEQ ID NO: 84131):RPVQ (SEQ ID NO: 84114):DDSSNVI (SEQ ID NO: 84965):KKATV (SEQ ID NO: 84212):NMVVR (SEQ ID NO: 84275):SXGXH (SEQ ID NO: 84304), YVPKPXX (SEQ ID NO: 84433):APTKL (SEQ ID NO: 84131):RPVQ (SEQ ID NO: 84114):DDSSNVI (SEQ ID NO: 84965):KKATV (SEQ ID NO: 84212):NMVVR (SEQ ID NO: 84275):SXGXH (SEQ ID NO: 84304), TVPKPXX (SEQ ID NO: 84432):APTQL (SEQ ID NO: 84134):RPVQ (SEQ ID NO: 84114):DDSSNVI (SEQ ID NO: 84965):KKATV (SEQ ID NO: 84212):NMVVR (SEQ ID NO: 84275):AXGXH (SEQ ID NO: 84147), AVPKAXX (SEQ ID NO: 84404):APTKL (SEQ ID NO: 84131):RPVQ (SEQ ID NO: 84114):DSSNNVI (SEQ ID NO: 84972):KKATV (SEQ ID NO: 84212):NMVVK (SEQ ID NO: 84274):AXGXH (SEQ ID NO: 84147), KVGKAXX (SEQ ID NO: 84425):VPTKL (SEQ ID NO: 84381):RPVQ (SEQ ID NO: 84114):DDMGVPT (SEQ ID NO: 84964):KKATV (SEQ ID NO: 84212):EGMSVAE (SEQ ID NO: 84411):XGXR (SEQ ID NO: 84123), KASKAXX (SEQ ID NO: 84423):VPTKL (SEQ ID NO: 84381):RPVQ (SEQ ID NO: 84114):DKGVVTY (SEQ ID NO: 84969):KKATV (SEQ ID NO: 84212):GMAVS (SEQ ID NO: 84194):EXGXR (SEQ ID NO: 84179), GSAGPXX (SEQ ID NO: 84420):TPTKM (SEQ ID NO: 84327):RPVQ (SEQ ID NO: 84114):NDKQQII (SEQ ID NO: 84979):KKATV (SEQ ID NO: 84212):GMVVD (SEQ ID NO: 84204):RXGXS (SEQ ID NO: 84291), AAPASXX (SEQ ID NO: 84401):VPARL (SEQ ID NO: 84352):RPVQ (SEQ ID NO: 84114):DAANNVV (SEQ ID NO: 84963):KKATV (SEQ ID NO: 84212):DMVVE (SEQ ID NO: 84161):AXGXR (SEQ ID NO: 84148), STPPTXX (SEQ ID NO: 84431):VPTRL (SEQ ID NO: 84385):RPVQ (SEQ ID NO: 84114):DSANNVV (SEQ ID NO: 84971):KKATV (SEQ ID NO: 84212):DMVVE (SEQ ID NO: 84161):SXGXR (SEQ ID NO: 84305), HVPKPXX (SEQ ID NO: 84421):APTKL (SEQ ID NO: 84131):RPVQ (SEQ ID NO: 84114):DDSSNVI (SEQ ID NO: 84965):KKATV (SEQ ID NO: 84212):NMVVR (SEQ ID NO: 84275):SXGXH (SEQ ID NO: 84304), RVPSTXX (SEQ ID NO: 84428):APVKT (SEQ ID NO: 84144):RPVQ (SEQ ID NO: 84114):DNGRVLL (SEQ ID NO: 84970):KKATV (SEQ ID NO: 84212):MIVEE (SEQ ID NO: 84241):XGXL (SEQ ID NO: 84122), ASAAPXX (SEQ ID NO: 84402):VPQAL (SEQ ID NO: 84364):RPVQ (SEQ ID NO: 84114):VGRKPKV (SEQ ID NO: 84981):KKATV (SEQ ID NO: 84212):MIVRS (SEQ ID NO: 84243):XKXS (SEQ ID NO: 84124), ASASPXX (SEQ ID NO: 84403):VSQDL (SEQ ID NO: 84387):RPVQ (SEQ ID NO: 84114):IGKTPKI (SEQ ID NO: 84978):KKATV (SEQ ID NO: 84212):MIVKS (SEQ ID NO: 84242):XKXS (SEQ ID NO: 84124), ASASPXX (SEQ ID NO: 84403):VPQDL (SEQ ID NO: 84365):RPVQ (SEQ ID NO: 84114):VGRTPKV (SEQ ID NO: 84982):KKATV (SEQ ID NO: 84212):MVVKS (SEQ ID NO: 84256):XKXS (SEQ ID NO: 84124), NDEGLXS (SEQ ID NO: 85019):VPTEE (SEQ ID NO: 84377):RPVQ (SEQ ID NO: 84114):RIKPHQGQH (SEQ ID NO: 84980):KKATV (SEQ ID NO: 84212):FLQHN (SEQ ID NO: 84184):KXEXR (SEQ ID NO: 84213), NDEGLXS (SEQ ID NO: 85019):VPTGQ (SEQ ID NO: 84379):RPVQ (SEQ ID NO: 84114):RIKPHQGQH (SEQ ID NO: 84980):KKATV (SEQ ID NO: 84212):LEEHS (SEQ ID NO: 84217):QXEXR (SEQ ID NO: 84276), SSVKXQP (SEQ ID NO: 84430):SRVHH (SEQ ID NO: 84297):RPVQ (SEQ ID NO: 84114):EYVRKKPKL (SEQ ID NO: 84974):KKATV (SEQ ID NO: 84212):RLEEH (SEQ ID NO: 84279):LEXAXA (SEQ ID NO: 84400). More particularly, the heptuplet PEP7:PEP5:PEP1:LINKER:PEP2:PEP6:PEP8 is selected from the group consisting of GIPEPXX (SEQ ID NO: 84419):VPTKM (SEQ ID NO: 84382):SAIS (SEQ ID NO: 84116):DENKNVV (SEQ ID NO: 84967):LKNYQ (SEQ ID NO: 84230):NMVVE (SEQ ID NO: 84273):SXAXR (SEQ ID NO: 84303), HVTKPTX (SEQ ID NO: 84422):VPTKL (SEQ ID NO: 84381):SAIS (SEQ ID NO: 84116):DDSSNVI (SEQ ID NO: 84965):LKNYQ (SEQ ID NO: 84230):NMVVE (SEQ ID NO: 84273):SXGXH (SEQ ID NO: 84304), YVPKPXX (SEQ ID NO: 84433):VPTKL (SEQ ID NO: 84381):SAIS (SEQ ID NO: 84116):DDSSNVI (SEQ ID NO: 84965):LKNYQ (SEQ ID NO: 84230):NMVVE (SEQ ID NO: 84273):SXGXH (SEQ ID NO: 84304), TVPKPXX (SEQ ID NO: 84432):VPTQL (SEQ ID NO: 84384):SAIS (SEQ ID NO: 84116):DDSSNVI (SEQ ID NO: 84965):LKNYQ (SEQ ID NO: 84230):NMVVE (SEQ ID NO: 84273):AXGXH (SEQ ID NO: 84147), AVPKAXX (SEQ ID NO: 84404):VPTKL (SEQ ID NO: 84381):SAIS (SEQ ID NO: 84116):DSSNNVI (SEQ ID NO: 84972):LKNYQ (SEQ ID NO: 84230):NMVVE (SEQ ID NO: 84273):AXGXH (SEQ ID NO: 84147), KVGKAXX (SEQ ID NO: 84425):VPTKL (SEQ ID NO: 84381):SAIS (SEQ ID NO: 84116):DDMGVPT (SEQ ID NO: 84964):LKNYQ (SEQ ID NO: 84230):EGMSVVE (SEQ ID NO: 84416):XGXR (SEQ ID NO: 84123), KASKAXX (SEQ ID NO: 84423):VPTKL (SEQ ID NO: 84381):SAIS (SEQ ID NO: 84116):DKGVVTY (SEQ ID NO: 84969):LKNYQ (SEQ ID NO: 84230):GMVVE (SEQ ID NO: 84205):EXGXR (SEQ ID NO: 84179), GSAGPXX (SEQ ID NO: 84420):VPTKM (SEQ ID NO: 84382):SAIS (SEQ ID NO: 84116):NDKQQII (SEQ ID NO: 84979):LKNYQ (SEQ ID NO: 84230):GMVVE (SEQ ID NO: 84205):RXGXS (SEQ ID NO: 84291), AAPASXX (SEQ ID NO: 84401):VPTRL (SEQ ID NO: 84385):SAIS (SEQ ID NO: 84116):DAANNVV (SEQ ID NO: 84963):LKNYQ (SEQ ID NO: 84230):DMVVE (SEQ ID NO: 84161):AXGXR (SEQ ID NO: 84148), STPPTXX (SEQ ID NO: 84431):VPTRL (SEQ ID NO: 84385):SAIS (SEQ ID NO: 84116):DSANNVV (SEQ ID NO: 84971):LKNYQ (SEQ ID NO: 84230):DMVVE (SEQ ID NO: 84161):SXGXR (SEQ ID NO: 84305), HVPKPXX (SEQ ID NO: 84421):VPTKL (SEQ ID NO: 84381):SAIS (SEQ ID NO: 84116):DDSSNVI (SEQ ID NO: 84965):LKNYQ (SEQ ID NO: 84230):NMVVE (SEQ ID NO: 84273):SXGXH (SEQ ID NO: 84304), RVPSTXX (SEQ ID NO: 84428):VPTKT (SEQ ID NO: 84383):SAIS (SEQ ID NO: 84116):DNGRVLL (SEQ ID NO: 84970):LKNYQ (SEQ ID NO: 84230):MIVVE (SEQ ID NO: 84245):XGXL (SEQ ID NO: 84122), ASAAPXX (SEQ ID NO: 84402):VPTAL (SEQ ID NO: 84375):SAIS (SEQ ID NO: 84116):VGRKPKV (SEQ ID NO: 84981):LKNYQ (SEQ ID NO: 84230):MIVVE (SEQ ID NO: 84245):XKXS (SEQ ID NO: 84124), ASASPXX (SEQ ID NO: 84403):VPTDL (SEQ ID NO: 84376):SAIS (SEQ ID NO: 84116):IGKTPKI (SEQ ID NO: 84978):LKNYQ (SEQ ID NO: 84230):MIVVE (SEQ ID NO: 84245):XKXS (SEQ ID NO: 84124), ASASPXX (SEQ ID NO: 84403):VPTDL (SEQ ID NO: 84376):SAIS (SEQ ID NO: 84116):VGRTPKV (SEQ ID NO: 84982):LKNYQ (SEQ ID NO: 84230):MVVVE (SEQ ID NO: 84259):XKXS (SEQ ID NO: 84124), GIPEPXX (SEQ ID NO: 84419):VPEKM (SEQ ID NO: 84360):SAIS (SEQ ID NO: 84116):DENKNVV (SEQ ID NO: 84967):LKNYQ (SEQ ID NO: 84230):NMTVE (SEQ ID NO: 84267):SXAXR (SEQ ID NO: 84303), HVTKPTX (SEQ ID NO: 84422):APTKL (SEQ ID NO: 84131):SAIS (SEQ ID NO: 84116):DDSSNVI (SEQ ID NO: 84965):LKNYQ (SEQ ID NO: 84230):NMVVR (SEQ ID NO: 84275):SXGXH (SEQ ID NO: 84304), YVPKPXX (SEQ ID NO: 84433):APTKL (SEQ ID NO: 84131):SAIS (SEQ ID NO: 84116):DDSSNVI (SEQ ID NO: 84965):LKNYQ (SEQ ID NO: 84230):NMVVR (SEQ ID NO: 84275):SXGXH (SEQ ID NO: 84304), TVPKPXX (SEQ ID NO: 84432):APTQL (SEQ ID NO: 84134):SAIS (SEQ ID NO: 84116):DDSSNVI (SEQ ID NO: 84965):LKNYQ (SEQ ID NO: 84230):NMVVR (SEQ ID NO: 84275):AXGXH (SEQ ID NO: 84147), AVPKAXX (SEQ ID NO: 84404):APTKL (SEQ ID NO: 84131):SAIS (SEQ ID NO: 84116):DSSNNVI (SEQ ID NO: 84972):LKNYQ (SEQ ID NO: 84230):NMVVK (SEQ ID NO: 84274):AXGXH (SEQ ID NO: 84147), KVGKAXX (SEQ ID NO: 84425):VPTKL (SEQ ID NO: 84381):SAIS (SEQ ID NO: 84116):DDMGVPT (SEQ ID NO: 84964):LKNYQ (SEQ ID NO: 84230):EGMSVAE (SEQ ID NO: 84411):XGXR (SEQ ID NO: 84123), KASKAXX (SEQ ID NO: 84423):VPTKL (SEQ ID NO: 84381):SAIS (SEQ ID NO: 84116):DKGVVTY (SEQ ID NO: 84969):LKNYQ (SEQ ID NO: 84230):GMAVS (SEQ ID NO: 84194):EXGXR (SEQ ID NO: 84179), GSAGPXX (SEQ ID NO: 84420):TPTKM (SEQ ID NO: 84327):SAIS (SEQ ID NO: 84116):NDKQQII (SEQ ID NO: 84979):LKNYQ (SEQ ID NO: 84230):GMVVD (SEQ ID NO: 84204):RXGXS (SEQ ID NO: 84291), AAPASXX (SEQ ID NO: 84401):VPARL (SEQ ID NO: 84352):SAIS (SEQ ID NO: 84116):DAANNVV (SEQ ID NO: 84963):LKNYQ (SEQ ID NO: 84230):DMVVE (SEQ ID NO: 84161):AXGXR (SEQ ID NO: 84148), HVPKPXX (SEQ ID NO: 84421):APTKL (SEQ ID NO: 84131):SAIS (SEQ ID NO: 84116):DDSSNVI (SEQ ID NO: 84965):LKNYQ (SEQ ID NO: 84230):NMVVR (SEQ ID NO: 84275):SXGXH (SEQ ID NO: 84304), RVPSTXX (SEQ ID NO: 84428):APVKT (SEQ ID NO: 84144):SAIS (SEQ ID NO: 84116):DNGRVLL (SEQ ID NO: 84970):LKNYQ (SEQ ID NO: 84230):MIVEE (SEQ ID NO: 84241):XGXL (SEQ ID NO: 84122), ASAAPXX (SEQ ID NO: 84402):VPQAL (SEQ ID NO: 84364):SAIS (SEQ ID NO: 84116):VGRKPKV (SEQ ID NO: 84981):LKNYQ (SEQ ID NO: 84230):MIVRS (SEQ ID NO: 84243):XKXS (SEQ ID NO: 84124), ASASPXX (SEQ ID NO: 84403):VSQDL (SEQ ID NO: 84387):SAIS (SEQ ID NO: 84116):IGKTPKI (SEQ ID NO: 84978):LKNYQ (SEQ ID NO: 84230):MIVKS (SEQ ID NO: 84242):XKXS (SEQ ID NO: 84124), ASASPXX (SEQ ID NO: 84403):VPQDL (SEQ ID NO: 84365):SAIS (SEQ ID NO: 84116):VGRTPKV (SEQ ID NO: 84982):LKNYQ (SEQ ID NO: 84230):MVVKS (SEQ ID NO: 84256):XKXS (SEQ ID NO: 84124), NDEGLEX (SEQ ID NO: 84426):VPTEE (SEQ ID NO: 84377):SAIS (SEQ ID NO: 84116):RIKPHQGQH (SEQ ID NO: 84980):LKNYQ (SEQ ID NO: 84230):FLQHN (SEQ ID NO: 84184):KXEXR (SEQ ID NO: 84213), NDEGLEX (SEQ ID NO: 84426):VPTGQ (SEQ ID NO: 84379):SAIS (SEQ ID NO: 84116):RIKPHQGQH (SEQ ID NO: 84980):LKNYQ (SEQ ID NO: 84230):LEEHS (SEQ ID NO: 84217):QXEXR (SEQ ID NO: 84276), SSVKXQP (SEQ ID NO: 84430):SRVHH (SEQ ID NO: 84297):SAIS (SEQ ID NO: 84116):EYVRKKPKL (SEQ ID NO: 84974):LKNYQ (SEQ ID NO: 84230):RLEEH (SEQ ID NO: 84279):LEXAXA (SEQ ID NO: 84400), RNVQXRP (SEQ ID NO: 84427):TQVQL (SEQ ID NO: 84340):SAIS (SEQ ID NO: 84116):EIVRKKPIF (SEQ ID NO: 84973):LKNYQ (SEQ ID NO: 84230):TLEDH (SEQ ID NO: 84307):LAXKXE (SEQ ID NO: 84399), KIPKAXX (SEQ ID NO: 84424):VPEEL (SEQ ID NO: 84356):SSLS (SEQ ID NO: 84121):DENEKVV (SEQ ID NO: 84966):LKVYP (SEQ ID NO: 84231):DMTVE (SEQ ID NO: 84155):GXGXR (SEQ ID NO: 84208), SIPKAXX (SEQ ID NO: 84429):VPEEL (SEQ ID NO: 84356):SSLS (SEQ ID NO: 84121):DEYDKVV (SEQ ID NO: 84968):LKVYP (SEQ ID NO: 84231):EMTVE (SEQ ID NO: 84169):GXGXR (SEQ ID NO: 84208), HVTKPTX (SEQ ID NO: 84422):VPEKL (SEQ ID NO: 84359):SSLS (SEQ ID NO: 84121):DDSSNVI (SEQ ID NO: 84965):LKVYP (SEQ ID NO: 84231):NMTVE (SEQ ID NO: 84267):SXGXH (SEQ ID NO: 84304), YVPKPXX (SEQ ID NO: 84433):VPEKL (SEQ ID NO: 84359):SSLS (SEQ ID NO: 84121):DDSSNVI (SEQ ID NO: 84965):LKVYP (SEQ ID NO: 84231):NMTVE (SEQ ID NO: 84267):SXGXH (SEQ ID NO: 84304), TVPKPXX (SEQ ID NO: 84432):VPEQL (SEQ ID NO: 84362):SSLS (SEQ ID NO: 84121):DDSSNVI (SEQ ID NO: 84965):LKVYP (SEQ ID NO: 84231):NMTVE (SEQ ID NO: 84267):AXGXH (SEQ ID NO: 84147), AVPKAXX (SEQ ID NO: 84404):VPEKL (SEQ ID NO: 84359):SSLS (SEQ ID NO: 84121):DSSNNVI (SEQ ID NO: 84972):LKVYP (SEQ ID NO: 84231):NMTVE (SEQ ID NO: 84267):AXGXH (SEQ ID NO: 84147), KVGKAXX (SEQ ID NO: 84425):VPEKL (SEQ ID NO: 84359):SSLS (SEQ ID NO: 84121):DDMGVPT (SEQ ID NO: 84964):LKVYP (SEQ ID NO: 84231):EGMSTVE (SEQ ID NO: 84410):XGXR (SEQ ID NO: 84123), KASKAXX (SEQ ID NO: 84423):VPEKL (SEQ ID NO: 84359):SSLS (SEQ ID NO: 84121):DKGVVTY (SEQ ID NO: 84969):LKVYP (SEQ ID NO: 84231):GMTVE (SEQ ID NO: 84199):EXGXR (SEQ ID NO: 84179), GSAGPXX (SEQ ID NO: 84420):VPEKM (SEQ ID NO: 84360):SSLS (SEQ ID NO: 84121):NDKQQII (SEQ ID NO: 84979):LKVYP (SEQ ID NO: 84231):GMTVE (SEQ ID NO: 84199):RXGXS (SEQ ID NO: 84291), AAPASXX (SEQ ID NO: 84401):VPERL (SEQ ID NO: 84363):SSLS (SEQ ID NO: 84121):DAANNVV (SEQ ID NO: 84963):LKVYP (SEQ ID NO: 84231):DMTVE (SEQ ID NO: 84155):AXGXR (SEQ ID NO: 84148), STPPTXX (SEQ ID NO: 84431):VPERL (SEQ ID NO: 84363):SSLS (SEQ ID NO: 84121):DSANNVV (SEQ ID NO: 84971):LKVYP (SEQ ID NO: 84231):DMTVE (SEQ ID NO: 84155):SXGXR (SEQ ID NO: 84305), HVPKPXX (SEQ ID NO: 84421):VPEKL (SEQ ID NO: 84359):SSLS (SEQ ID NO: 84121):DDSSNVI (SEQ ID NO: 84965):LKVYP (SEQ ID NO: 84231):NMTVE (SEQ ID NO: 84267):SXGXH (SEQ ID NO: 84304), RVPSTXX (SEQ ID NO: 84428):VPEKT (SEQ ID NO: 84361):SSLS (SEQ ID NO: 84121):DNGRVLL (SEQ ID NO: 84970):LKVYP (SEQ ID NO: 84231):MITVE (SEQ ID NO: 84239):XGXL (SEQ ID NO: 84122), ASAAPXX (SEQ ID NO: 84402):VPEAL (SEQ ID NO: 84353):SSLS (SEQ ID NO: 84121):VGRKPKV (SEQ ID NO: 84981):LKVYP (SEQ ID NO: 84231):MITVE (SEQ ID NO: 84239):XKXS (SEQ ID NO: 84124), ASASPXX (SEQ ID NO: 84403):VPEDL (SEQ ID NO: 84354):SSLS (SEQ ID NO: 84121):IGKTPKI (SEQ ID NO: 84978):LKVYP (SEQ ID NO: 84231):MITVE (SEQ ID NO: 84239):XKXS (SEQ ID NO: 84124), ASASPXX (SEQ ID NO: 84403):VPEDL (SEQ ID NO: 84354):SSLS (SEQ ID NO: 84121):VGRTPKV (SEQ ID NO: 84982):LKVYP (SEQ ID NO: 84231):MVTVE (SEQ ID NO: 84253):XKXS (SEQ ID NO: 84124), KIPKAXX (SEQ ID NO: 84424):VPTEL (SEQ ID NO: 84378):SSLS (SEQ ID NO: 84121):DENEKVV (SEQ ID NO: 84966):LKVYP (SEQ ID NO: 84231):DMVVE (SEQ ID NO: 84161):GXGXR (SEQ ID NO: 84208), SIPKAXX (SEQ ID NO: 84429):VPTEL (SEQ ID NO: 84378):SSLS (SEQ ID NO: 84121):DEYDKVV (SEQ ID NO: 84968):LKVYP (SEQ ID NO: 84231):EMVVE (SEQ ID NO: 84175):GXGXR (SEQ ID NO: 84208), HVTKPTX (SEQ ID NO: 84422):APTKL (SEQ ID NO: 84131):SSLS (SEQ ID NO: 84121):DDSSNVI (SEQ ID NO: 84965):LKVYP (SEQ ID NO: 84231):NMVVR (SEQ ID NO: 84275):SXGXH (SEQ ID NO: 84304), YVPKPXX (SEQ ID NO: 84433):APTKL (SEQ ID NO: 84131):SSLS (SEQ ID NO: 84121):DDSSNVI (SEQ ID NO: 84965):LKVYP (SEQ ID NO: 84231):NMVVR (SEQ ID NO: 84275):SXGXH (SEQ ID NO: 84304), TVPKPXX (SEQ ID NO: 84432):APTQL (SEQ ID NO: 84134):SSLS (SEQ ID NO: 84121):DDSSNVI (SEQ ID NO: 84965):LKVYP (SEQ ID NO: 84231):NMVVR (SEQ ID NO: 84275):AXGXH (SEQ ID NO: 84147), AVPKAXX (SEQ ID NO: 84404):APTKL (SEQ ID NO: 84131):SSLS (SEQ ID NO: 84121):DSSNNVI (SEQ ID NO: 84972):LKVYP (SEQ ID NO: 84231):NMVVK (SEQ ID NO: 84274):AXGXH (SEQ ID NO: 84147), KVGKAXX (SEQ ID NO: 84425):VPTKL (SEQ ID NO: 84381):SSLS (SEQ ID NO: 84121):DDMGVPT (SEQ ID NO: 84964):LKVYP (SEQ ID NO: 84231):EGMSVAE (SEQ ID NO: 84411):XGXR (SEQ ID NO: 84123), KASKAXX (SEQ ID NO: 84423):VPTKL (SEQ ID NO: 84381):SSLS (SEQ ID NO: 84121):DKGVVTY (SEQ ID NO: 84969):LKVYP (SEQ ID NO: 84231):GMAVS (SEQ ID NO: 84194):EXGXR (SEQ ID NO: 84179), GSAGPXX (SEQ ID NO: 84420):TPTKM (SEQ ID NO: 84327):SSLS (SEQ ID NO: 84121):NDKQQII (SEQ ID NO: 84979):LKVYP (SEQ ID NO: 84231):GMVVD (SEQ ID NO: 84204):RXGXS (SEQ ID NO: 84291), AAPASXX (SEQ ID NO: 84401):VPARL (SEQ ID NO: 84352):SSLS (SEQ ID NO: 84121):DAANNVV (SEQ ID NO: 84963):LKVYP (SEQ ID NO: 84231):DMVVE (SEQ ID NO: 84161):AXGXR (SEQ ID NO: 84148), STPPTXX (SEQ ID NO: 84431):VPTRL (SEQ ID NO: 84385):SSLS (SEQ ID NO: 84121):DSANNVV (SEQ ID NO: 84971):LKVYP (SEQ ID NO: 84231):DMVVE (SEQ ID NO: 84161):SXGXR (SEQ ID NO: 84305), HVPKPXX (SEQ ID NO: 84421):APTKL (SEQ ID NO: 84131):SSLS (SEQ ID NO: 84121):DDSSNVI (SEQ ID NO: 84965):LKVYP (SEQ ID NO: 84231):NMVVR (SEQ ID NO: 84275):SXGXH (SEQ ID NO: 84304), RVPSTXX (SEQ ID NO: 84428):APVKT (SEQ ID NO: 84144):SSLS (SEQ ID NO: 84121):DNGRVLL (SEQ ID NO: 84970):LKVYP (SEQ ID NO: 84231):MIVEE (SEQ ID NO: 84241):XGXL (SEQ ID NO: 84122), ASAAPXX (SEQ ID NO: 84402):VPQAL (SEQ ID NO: 84364):SSLS (SEQ ID NO: 84121):VGRKPKV (SEQ ID NO: 84981):LKVYP (SEQ ID NO: 84231):MIVRS (SEQ ID NO: 84243):XKXS (SEQ ID NO: 84124), ASASPXX (SEQ ID NO: 84403):VSQDL (SEQ ID NO: 84387):SSLS (SEQ ID NO: 84121):IGKTPKI (SEQ ID NO: 84978):LKVYP (SEQ ID NO: 84231):MIVKS (SEQ ID NO: 84242):XKXS (SEQ ID NO: 84124), ASASPXX (SEQ ID NO: 84403):VPQDL (SEQ ID NO: 84365):SSLS (SEQ ID NO: 84121):VGRTPKV (SEQ ID NO: 84982):LKVYP (SEQ ID NO: 84231):MVVKS (SEQ ID NO: 84256):XKXS (SEQ ID NO: 84124), NDEGLEX (SEQ ID NO: 84426):VPTEE (SEQ ID NO: 84377):SSLS (SEQ ID NO: 84121):RIKPHQGQH (SEQ ID NO: 84980):LKVYP (SEQ ID NO: 84231):FLQHN (SEQ ID NO: 84184):KXEXR (SEQ ID NO: 84213), NDEGLEX (SEQ ID NO: 84426):VPTGQ (SEQ ID NO: 84379):SSLS (SEQ ID NO: 84121):RIKPHQGQH (SEQ ID NO: 84980):LKVYP (SEQ ID NO: 84231):LEEHS (SEQ ID NO: 84217):QXEXR (SEQ ID NO: 84276), SSVKXQP (SEQ ID NO: 84430):SRVHH (SEQ ID NO: 84297):SSLS (SEQ ID NO: 84121):EYVRKKPKL (SEQ ID NO: 84974):LKVYP (SEQ ID NO: 84231):RLEEH (SEQ ID NO: 84279):LEXAXA (SEQ ID NO: 84400), RNVQXRP (SEQ ID NO: 84427):TQVQL (SEQ ID NO: 84340):SSLS (SEQ ID NO: 84121):EIVRKKPIF (SEQ ID NO: 84973):LKVYP (SEQ ID NO: 84231):TLEDH (SEQ ID NO: 84307):LAXKXE (SEQ ID NO: 84399), KIPKAXX (SEQ ID NO: 84424):APTEL (SEQ ID NO: 84128):NAIS (SEQ ID NO: 84113):DENEKVV (SEQ ID NO: 84966):LKKYR (SEQ ID NO: 84229):DMVVR (SEQ ID NO: 84163):GXGXR (SEQ ID NO: 84208), GIPEPXX (SEQ ID NO: 84419):APTKM (SEQ ID NO: 84132):NAIS (SEQ ID NO: 84113):DENKNVV (SEQ ID NO: 84967):LKKYR (SEQ ID NO: 84229):NMVVR (SEQ ID NO: 84275):SXAXR (SEQ ID NO: 84303), SIPKAXX (SEQ ID NO: 84429):APTEL (SEQ ID NO: 84128):NAIS (SEQ ID NO: 84113):DEYDKVV (SEQ ID NO: 84968):LKKYR (SEQ ID NO: 84229):EMVVR (SEQ ID NO: 84177):GXGXR (SEQ ID NO: 84208), AVPKAXX (SEQ ID NO: 84404):APTKL (SEQ ID NO: 84131):NAIS (SEQ ID NO: 84113):DSSNNVI (SEQ ID NO: 84972):LKKYR (SEQ ID NO: 84229):NMVVR (SEQ ID NO: 84275):AXGXH (SEQ ID NO: 84147), KVGKAXX (SEQ ID NO: 84425):APTKL (SEQ ID NO: 84131):NAIS (SEQ ID NO: 84113):DDMGVPT (SEQ ID NO: 84964):LKKYR (SEQ ID NO: 84229):EGMSVVR (SEQ ID NO: 84418):XGXR (SEQ ID NO: 84123), KASKAXX (SEQ ID NO: 84423):APTKL (SEQ ID NO: 84131):NAIS (SEQ ID NO: 84113):DKGVVTY (SEQ ID NO: 84969):LKKYR (SEQ ID NO: 84229):GMVVR (SEQ ID NO: 84207):EXGXR (SEQ ID NO: 84179), GSAGPXX (SEQ ID NO: 84420):APTKM (SEQ ID NO: 84132):NAIS (SEQ ID NO: 84113):NDKQQII (SEQ ID NO: 84979):LKKYR (SEQ ID NO: 84229):GMVVR (SEQ ID NO: 84207):RXGXS (SEQ ID NO: 84291), AAPASXX (SEQ ID NO: 84401):APTRL (SEQ ID NO: 84135):NAIS (SEQ ID NO: 84113):DAANNVV (SEQ ID NO: 84963):LKKYR (SEQ ID NO: 84229):DMVVR (SEQ ID NO: 84163):AXGXR (SEQ ID NO: 84148), STPPTXX (SEQ ID NO: 84431):APTRL (SEQ ID NO: 84135):NAIS (SEQ ID NO: 84113):DSANNVV (SEQ ID NO: 84971):LKKYR (SEQ ID NO: 84229):DMVVR (SEQ ID NO: 84163):SXGXR (SEQ ID NO: 84305), RVPSTXX (SEQ ID NO: 84428):APTKT (SEQ ID NO: 84133):NAIS (SEQ ID NO: 84113):DNGRVLL (SEQ ID NO: 84970):LKKYR (SEQ ID NO: 84229):MIVVR (SEQ ID NO: 84247):XGXL (SEQ ID NO: 84122), ASAAPXX (SEQ ID NO: 84402):APTAL (SEQ ID NO: 84125):NAIS (SEQ ID NO: 84113):VGRKPKV (SEQ ID NO: 84981):LKKYR (SEQ ID NO: 84229):MIVVR (SEQ ID NO: 84247):XKXS (SEQ ID NO: 84124), ASASPXX (SEQ ID NO: 84403):APTDL (SEQ ID NO: 84126):NAIS (SEQ ID NO: 84113):IGKTPKI (SEQ ID NO: 84978):LKKYR (SEQ ID NO: 84229):MIVVR (SEQ ID NO: 84247):XKXS (SEQ ID NO: 84124), ASASPXX (SEQ ID NO: 84403):APTDL (SEQ ID NO: 84126):NAIS (SEQ ID NO: 84113):VGRTPKV (SEQ ID NO: 84982):LKKYR (SEQ ID NO: 84229):MVVVR (SEQ ID NO: 84261):XKXS (SEQ ID NO: 84124), KIPKAXX (SEQ ID NO: 84424):VPTEL (SEQ ID NO: 84378):NAIS (SEQ ID NO: 84113):DENEKVV (SEQ ID NO: 84966):LKKYR (SEQ ID NO: 84229):DMVVE (SEQ ID NO: 84161):GXGXR (SEQ ID NO: 84208), GIPEPXX (SEQ ID NO: 84419):VPEKM (SEQ ID NO: 84360):NAIS (SEQ ID NO: 84113):DENKNVV (SEQ ID NO: 84967):LKKYR (SEQ ID NO: 84229):NMTVE (SEQ ID NO: 84267):SXAXR (SEQ ID NO: 84303), SIPKAXX (SEQ ID NO: 84429):VPTEL (SEQ ID NO: 84378):NAIS (SEQ ID NO: 84113):DEYDKVV (SEQ ID NO: 84968):LKKYR (SEQ ID NO: 84229):EMVVE (SEQ ID NO: 84175):GXGXR (SEQ ID NO: 84208), AVPKAXX (SEQ ID NO: 84404):APTKL (SEQ ID NO: 84131):NAIS (SEQ ID NO: 84113):DSSNNVI (SEQ ID NO: 84972):LKKYR (SEQ ID NO: 84229):NMVVK (SEQ ID NO: 84274):AXGXH (SEQ ID NO: 84147), KVGKAXX (SEQ ID NO: 84425):VPTKL (SEQ ID NO: 84381):NAIS (SEQ ID NO: 84113):DDMGVPT (SEQ ID NO: 84964):LKKYR (SEQ ID NO: 84229):EGMSVAE (SEQ ID NO: 84411):XGXR (SEQ ID NO: 84123), KASKAXX (SEQ ID NO: 84423):VPTKL (SEQ ID NO: 84381):NAIS (SEQ ID NO: 84113):DKGVVTY (SEQ ID NO: 84969):LKKYR (SEQ ID NO: 84229):GMAVS (SEQ ID NO: 84194):EXGXR (SEQ ID NO: 84179), GSAGPXX (SEQ ID NO: 84420):TPTKM (SEQ ID NO: 84327):NAIS (SEQ ID NO: 84113):NDKQQII (SEQ ID NO: 84979):LKKYR (SEQ ID NO: 84229):GMVVD (SEQ ID NO: 84204):RXGXS (SEQ ID NO: 84291), AAPASXX (SEQ ID NO: 84401):VPARL (SEQ ID NO: 84352):NAIS (SEQ ID NO: 84113):DAANNVV (SEQ ID NO: 84963):LKKYR (SEQ ID NO: 84229):DMVVE (SEQ ID NO: 84161):AXGXR (SEQ ID NO: 84148), STPPTXX (SEQ ID NO: 84431):VPTRL (SEQ ID NO: 84385):NAIS (SEQ ID NO: 84113):DSANNVV (SEQ ID NO: 84971):LKKYR (SEQ ID NO: 84229):DMVVE (SEQ ID NO: 84161):SXGXR (SEQ ID NO: 84305), RVPSTXX (SEQ ID NO: 84428):APVKT (SEQ ID NO: 84144):NAIS (SEQ ID NO: 84113):DNGRVLL (SEQ ID NO: 84970):LKKYR (SEQ ID NO: 84229):MIVEE (SEQ ID NO: 84241):XGXL (SEQ ID NO: 84122), ASAAPXX (SEQ ID NO: 84402):VPQAL (SEQ ID NO: 84364):NAIS (SEQ ID NO: 84113):VGRKPKV (SEQ ID NO: 84981):LKKYR (SEQ ID NO: 84229):MIVRS (SEQ ID NO: 84243):XKXS (SEQ ID NO: 84124), ASASPXX (SEQ ID NO: 84403):VSQDL (SEQ ID NO: 84387):NAIS (SEQ ID NO: 84113):IGKTPKI (SEQ ID NO: 84978):LKKYR (SEQ ID NO: 84229):MIVKS (SEQ ID NO: 84242):XKXS (SEQ ID NO: 84124), ASASPXX (SEQ ID NO: 84403):VPQDL (SEQ ID NO: 84365):NAIS (SEQ ID NO: 84113):VGRTPKV (SEQ ID NO: 84982):LKKYR (SEQ ID NO: 84229):MVVKS (SEQ ID NO: 84256):XKXS (SEQ ID NO: 84124), NDEGLEX (SEQ ID NO: 84426):VPTEE (SEQ ID NO: 84377):NAIS (SEQ ID NO: 84113):RIKPHQGQH (SEQ ID NO: 84980):LKKYR (SEQ ID NO: 84229):FLQHN (SEQ ID NO: 84184):KXEXR (SEQ ID NO: 84213), NDEGLEX (SEQ ID NO: 84426):VPTGQ (SEQ ID NO: 84379):NAIS (SEQ ID NO: 84113):RIKPHQGQH (SEQ ID NO: 84980):LKKYR (SEQ ID NO: 84229):LEEHS (SEQ ID NO: 84217):QXEXR (SEQ ID NO: 84276), SSVKXQP (SEQ ID NO: 84430):SRVHH (SEQ ID NO: 84297):NAIS (SEQ ID NO: 84113):EYVRKKPKL (SEQ ID NO: 84974):LKKYR (SEQ ID NO: 84229):RLEEH (SEQ ID NO: 84279):LEXAXA (SEQ ID NO: 84400), RNVQXRP (SEQ ID NO: 84427):TQVQL (SEQ ID NO: 84340):NAIS (SEQ ID NO: 84113):EIVRKKPIF (SEQ ID NO: 84973):LKKYR (SEQ ID NO: 84229):TLEDH (SEQ ID NO: 84307):LAXKXE (SEQ ID NO: 84399), KIPKAXX (SEQ ID NO: 84424):APTEL (SEQ ID NO: 84128):SATS (SEQ ID NO: 84117):DENEKVV (SEQ ID NO: 84966):LRKHR (SEQ ID NO: 84233):DMVVK (SEQ ID NO: 84162):GXGXR (SEQ ID NO: 84208), GIPEPXX (SEQ ID NO: 84419):APTKM (SEQ ID NO: 84132):SATS (SEQ ID NO: 84117):DENKNVV (SEQ ID NO: 84967):LRKHR (SEQ ID NO: 84233):NMVVK (SEQ ID NO: 84274):SXAXR (SEQ ID NO: 84303), SIPKAXX (SEQ ID NO: 84429):APTEL (SEQ ID NO: 84128):SATS (SEQ ID NO: 84117):DEYDKVV (SEQ ID NO: 84968):LRKHR (SEQ ID NO: 84233):EMVVK (SEQ ID NO: 84176):GXGXR (SEQ ID NO: 84208), HVTKPTX (SEQ ID NO: 84422):APTKL (SEQ ID NO: 84131):SATS (SEQ ID NO: 84117):DDSSNVI (SEQ ID NO: 84965):LRKHR (SEQ ID NO: 84233):NMVVK (SEQ ID NO: 84274):SXGXH (SEQ ID NO: 84304), YVPKPXX (SEQ ID NO: 84433):APTKL (SEQ ID NO: 84131):SATS (SEQ ID NO: 84117):DDSSNVI (SEQ ID NO: 84965):LRKHR (SEQ ID NO: 84233):NMVVK (SEQ ID NO: 84274):SXGXH (SEQ ID NO: 84304), TVPKPXX (SEQ ID NO: 84432):APTQL (SEQ ID NO: 84134):SATS (SEQ ID NO: 84117):DDSSNVI (SEQ ID NO: 84965):LRKHR (SEQ ID NO: 84233):NMVVK (SEQ ID NO: 84274):AXGXH (SEQ ID NO: 84147), KVGKAXX (SEQ ID NO: 84425):APTKL (SEQ ID NO: 84131):SATS (SEQ ID NO: 84117):DDMGVPT (SEQ ID NO: 84964):LRKHR (SEQ ID NO: 84233):EGMSVVK (SEQ ID NO: 84417):XGXR (SEQ ID NO: 84123), KASKAXX (SEQ ID NO: 84423):APTKL (SEQ ID NO: 84131):SATS (SEQ ID NO: 84117):DKGVVTY (SEQ ID NO: 84969):LRKHR (SEQ ID NO: 84233):GMVVK (SEQ ID NO: 84206):EXGXR (SEQ ID NO: 84179), GSAGPXX (SEQ ID NO: 84420):APTKM (SEQ ID NO: 84132):SATS (SEQ ID NO: 84117):NDKQQII (SEQ ID NO: 84979):LRKHR (SEQ ID NO: 84233):GMVVK (SEQ ID NO: 84206):RXGXS (SEQ ID NO: 84291), AAPASXX (SEQ ID NO: 84401):APTRL (SEQ ID NO: 84135):SATS (SEQ ID NO: 84117):DAANNVV (SEQ ID NO: 84963):LRKHR (SEQ ID NO: 84233):DMVVK (SEQ ID NO: 84162):AXGXR (SEQ ID NO: 84148), STPPTXX (SEQ ID NO: 84431):APTRL (SEQ ID NO: 84135):SATS (SEQ ID NO: 84117):DSANNVV (SEQ ID NO: 84971):LRKHR (SEQ ID NO: 84233):DMVVK (SEQ ID NO: 84162):SXGXR (SEQ ID NO: 84305), HVPKPXX (SEQ ID NO: 84421):APTKL (SEQ ID NO: 84131):SATS (SEQ ID NO: 84117):DDSSNVI (SEQ ID NO: 84965):LRKHR (SEQ ID NO: 84233):NMVVK (SEQ ID NO: 84274):SXGXH (SEQ ID NO: 84304), RVPSTXX (SEQ ID NO: 84428):APTKT (SEQ ID NO: 84133):SATS (SEQ ID NO: 84117):DNGRVLL (SEQ ID NO: 84970):LRKHR (SEQ ID NO: 84233):MIVVK (SEQ ID NO: 84246):XGXL (SEQ ID NO: 84122), ASAAPXX (SEQ ID NO: 84402):APTAL (SEQ ID NO: 84125):SATS (SEQ ID NO: 84117):VGRKPKV (SEQ ID NO: 84981):LRKHR (SEQ ID NO: 84233):MIVVK (SEQ ID NO: 84246):XKXS (SEQ ID NO: 84124), ASASPXX (SEQ ID NO: 84403):APTDL (SEQ ID NO: 84126):SATS (SEQ ID NO: 84117):IGKTPKI (SEQ ID NO: 84978):LRKHR (SEQ ID NO: 84233):MIVVK (SEQ ID NO: 84246):XKXS (SEQ ID NO: 84124), ASASPXX (SEQ ID NO: 84403):APTDL (SEQ ID NO: 84126):SATS (SEQ ID NO: 84117):VGRTPKV (SEQ ID NO: 84982):LRKHR (SEQ ID NO: 84233):MVVVK (SEQ ID NO: 84260):XKXS (SEQ ID NO: 84124), KIPKAXX (SEQ ID NO: 84424):VPTEL (SEQ ID NO: 84378):SATS (SEQ ID NO: 84117):DENEKVV (SEQ ID NO: 84966):LRKHR (SEQ ID NO: 84233):DMVVE (SEQ ID NO: 84161):GXGXR (SEQ ID NO: 84208), GIPEPXX (SEQ ID NO: 84419):VPEKM (SEQ ID NO: 84360):SATS (SEQ ID NO: 84117):DENKNVV (SEQ ID NO: 84967):LRKHR (SEQ ID NO: 84233):NMTVE (SEQ ID NO: 84267):SXAXR (SEQ ID NO: 84303), SIPKAXX (SEQ ID NO: 84429):VPTEL (SEQ ID NO: 84378):SATS (SEQ ID NO: 84117):DEYDKVV (SEQ ID NO: 84968):LRKHR (SEQ ID NO: 84233):EMVVE (SEQ ID NO: 84175):GXGXR (SEQ ID NO: 84208), HVTKPTX (SEQ ID NO: 84422):APTKL (SEQ ID NO: 84131):SATS (SEQ ID NO: 84117):DDSSNVI (SEQ ID NO: 84965):LRKHR (SEQ ID NO: 84233):NMVVR (SEQ ID NO: 84275):SXGXH (SEQ ID NO: 84304), YVPKPXX (SEQ ID NO: 84433):APTKL (SEQ ID NO: 84131):SATS (SEQ ID NO: 84117):DDSSNVI (SEQ ID NO: 84965):LRKHR (SEQ ID NO: 84233):NMVVR (SEQ ID NO: 84275):SXGXH (SEQ ID NO: 84304), TVPKPXX (SEQ ID NO: 84432):APTQL (SEQ ID NO: 84134):SATS (SEQ ID NO: 84117):DDSSNVI (SEQ ID NO: 84965):LRKHR (SEQ ID NO: 84233):NMVVR (SEQ ID NO: 84275):AXGXH (SEQ ID NO: 84147), KVGKAXX (SEQ ID NO: 84425):VPTKL (SEQ ID NO: 84381):SATS (SEQ ID NO: 84117):DDMGVPT (SEQ ID NO: 84964):LRKHR (SEQ ID NO: 84233):EGMSVAE (SEQ ID NO: 84411):XGXR (SEQ ID NO: 84123), KASKAXX (SEQ ID NO: 84423):VPTKL (SEQ ID NO: 84381):SATS (SEQ ID NO: 84117):DKGVVTY (SEQ ID NO: 84969):LRKHR (SEQ ID NO: 84233):GMAVS (SEQ ID NO: 84194):EXGXR (SEQ ID NO: 84179), GSAGPXX (SEQ ID NO: 84420):TPTKM (SEQ ID NO: 84327):SATS (SEQ ID NO: 84117):NDKQQII (SEQ ID NO: 84979):LRKHR (SEQ ID NO: 84233):GMVVD (SEQ ID NO: 84204):RXGXS (SEQ ID NO: 84291), AAPASXX (SEQ ID NO: 84401):VPARL (SEQ ID NO: 84352):SATS (SEQ ID NO: 84117):DAANNVV (SEQ ID NO: 84963):LRKHR (SEQ ID NO: 84233):DMVVE (SEQ ID NO: 84161):AXGXR (SEQ ID NO: 84148), STPPTXX (SEQ ID NO: 84431):VPTRL (SEQ ID NO: 84385):SATS (SEQ ID NO: 84117):DSANNVV (SEQ ID NO: 84971):LRKHR (SEQ ID NO: 84233):DMVVE (SEQ ID NO: 84161):SXGXR (SEQ ID NO: 84305), HVPKPXX (SEQ ID NO: 84421):APTKL (SEQ ID NO: 84131):SATS (SEQ ID NO: 84117):DDSSNVI (SEQ ID NO: 84965):LRKHR (SEQ ID NO: 84233):NMVVR (SEQ ID NO: 84275):SXGXH (SEQ ID NO: 84304), RVPSTXX (SEQ ID NO: 84428):APVKT (SEQ ID NO: 84144):SATS (SEQ ID NO: 84117):DNGRVLL (SEQ ID NO: 84970):LRKHR (SEQ ID NO: 84233):MIVEE (SEQ ID NO: 84241):XGXL (SEQ ID NO: 84122), ASAAPXX (SEQ ID NO: 84402):VPQAL (SEQ ID NO: 84364):SATS (SEQ ID NO: 84117):VGRKPKV (SEQ ID NO: 84981):LRKHR (SEQ ID NO: 84233):MIVRS (SEQ ID NO: 84243):XKXS (SEQ ID NO: 84124), ASASPXX (SEQ ID NO: 84403):VSQDL (SEQ ID NO: 84387):SATS (SEQ ID NO: 84117):IGKTPKI (SEQ ID NO: 84978):LRKHR (SEQ ID NO: 84233):MIVKS (SEQ ID NO: 84242):XKXS (SEQ ID NO: 84124), ASASPXX (SEQ ID NO: 84403):VPQDL (SEQ ID NO: 84365):SATS (SEQ ID NO: 84117):VGRTPKV (SEQ ID NO: 84982):LRKHR (SEQ ID NO: 84233):MVVKS (SEQ ID NO: 84256):XKXS (SEQ ID NO: 84124), NDEGLEX (SEQ ID NO: 84426):VPTEE (SEQ ID NO: 84377):SATS (SEQ ID NO: 84117):RIKPHQGQH (SEQ ID NO: 84980):LRKHR (SEQ ID NO: 84233):FLQHN (SEQ ID NO: 84184):KXEXR (SEQ ID NO: 84213), NDEGLEX (SEQ ID NO: 84426):VPTGQ (SEQ ID NO: 84379):SATS (SEQ ID NO: 84117):RIKPHQGQH (SEQ ID NO: 84980):LRKHR (SEQ ID NO: 84233):LEEHS (SEQ ID NO: 84217):QXEXR (SEQ ID NO: 84276), SSVKXQP (SEQ ID NO: 84430):SRVHH (SEQ ID NO: 84297):SATS (SEQ ID NO: 84117):EYVRKKPKL (SEQ ID NO: 84974):LRKHR (SEQ ID NO: 84233):RLEEH (SEQ ID NO: 84279):LEXAXA (SEQ ID NO: 84400), RNVQXRP (SEQ ID NO: 84427):TQVQL (SEQ ID NO: 84340):SATS (SEQ ID NO: 84117):EIVRKKPIF (SEQ ID NO: 84973):LRKHR (SEQ ID NO: 84233):TLEDH (SEQ ID NO: 84307):LAXKXE (SEQ ID NO: 84399), KIPKAXX (SEQ ID NO: 84424):VPTEL (SEQ ID NO: 84378):SPIS (SEQ ID NO: 84120):DENEKVV (SEQ ID NO: 84966):LKYHY (SEQ ID NO: 84232):DMVAE (SEQ ID NO: 84156):GXGXR (SEQ ID NO: 84208), GIPEPXX (SEQ ID NO: 84419):VPTKM (SEQ ID NO: 84382):SPIS (SEQ ID NO: 84120):DENKNVV (SEQ ID NO: 84967):LKYHY (SEQ ID NO: 84232):NMVAE (SEQ ID NO: 84268):SXAXR (SEQ ID NO: 84303), SIPKAXX (SEQ ID NO: 84429):VPTEL (SEQ ID NO: 84378):SPIS (SEQ ID NO: 84120):DEYDKVV (SEQ ID NO: 84968):LKYHY (SEQ ID NO: 84232):EMVAE (SEQ ID NO: 84170):GXGXR (SEQ ID NO: 84208), HVTKPTX (SEQ ID NO: 84422):VPTKL (SEQ ID NO: 84381):SPIS (SEQ ID NO: 84120):DDSSNVI (SEQ ID NO: 84965):LKYHY (SEQ ID NO: 84232):NMVAE (SEQ ID NO: 84268):SXGXH (SEQ ID NO: 84304), YVPKPXX (SEQ ID NO: 84433):VPTKL (SEQ ID NO: 84381):SPIS (SEQ ID NO: 84120):DDSSNVI (SEQ ID NO: 84965):LKYHY (SEQ ID NO: 84232):NMVAE (SEQ ID NO: 84268):SXGXH (SEQ ID NO: 84304), TVPKPXX (SEQ ID NO: 84432):VPTQL (SEQ ID NO: 84384):SPIS (SEQ ID NO: 84120):DDSSNVI (SEQ ID NO: 84965):LKYHY (SEQ ID NO: 84232):NMVAE (SEQ ID NO: 84268):AXGXH (SEQ ID NO: 84147), AVPKAXX (SEQ ID NO: 84404):VPTKL (SEQ ID NO: 84381):SPIS (SEQ ID NO: 84120):DSSNNVI (SEQ ID NO: 84972):LKYHY (SEQ ID NO: 84232):NMVAE (SEQ ID NO: 84268):AXGXH (SEQ ID NO: 84147), KASKAXX (SEQ ID NO: 84423):VPTKL (SEQ ID NO: 84381):SPIS (SEQ ID NO: 84120):DKGVVTY (SEQ ID NO: 84969):LKYHY (SEQ ID NO: 84232):GMVAE (SEQ ID NO: 84200):EXGXR (SEQ ID NO: 84179), GSAGPXX (SEQ ID NO: 84420):VPTKM (SEQ ID NO: 84382):SPIS (SEQ ID NO: 84120):NDKQQII (SEQ ID NO: 84979):LKYHY (SEQ ID NO: 84232):GMVAE (SEQ ID NO: 84200):RXGXS (SEQ ID NO: 84291), AAPASXX (SEQ ID NO: 84401):VPTRL (SEQ ID NO: 84385):SPIS (SEQ ID NO: 84120):DAANNVV (SEQ ID NO: 84963):LKYHY (SEQ ID NO: 84232):DMVAE (SEQ ID NO: 84156):AXGXR (SEQ ID NO: 84148), STPPTXX (SEQ ID NO: 84431):VPTRL (SEQ ID NO: 84385):SPIS (SEQ ID NO: 84120):DSANNVV (SEQ ID NO: 84971):LKYHY (SEQ ID NO: 84232):DMVAE (SEQ ID NO: 84156):SXGXR (SEQ ID NO: 84305), HVPKPXX (SEQ ID NO: 84421):VPTKL (SEQ ID NO: 84381):SPIS (SEQ ID NO: 84120):DDSSNVI (SEQ ID NO: 84965):LKYHY (SEQ ID NO: 84232):NMVAE (SEQ ID NO: 84268):SXGXH (SEQ ID NO: 84304), RVPSTXX (SEQ ID NO: 84428):VPTKT (SEQ ID NO: 84383):SPIS (SEQ ID NO: 84120):DNGRVLL (SEQ ID NO: 84970):LKYHY (SEQ ID NO: 84232):MIVAE (SEQ ID NO: 84240):XGXL (SEQ ID NO: 84122), ASAAPXX (SEQ ID NO: 84402):VPTAL (SEQ ID NO: 84375):SPIS (SEQ ID NO: 84120):VGRKPKV (SEQ ID NO: 84981):LKYHY (SEQ ID NO: 84232):MIVAE (SEQ ID NO: 84240):XKXS (SEQ ID NO: 84124), ASASPXX (SEQ ID NO: 84403):VPTDL (SEQ ID NO: 84376):SPIS (SEQ ID NO: 84120):IGKTPKI (SEQ ID NO: 84978):LKYHY (SEQ ID NO: 84232):MIVAE (SEQ ID NO: 84240):XKXS (SEQ ID NO: 84124), ASASPXX (SEQ ID NO: 84403):VPTDL (SEQ ID NO: 84376):SPIS (SEQ ID NO: 84120):VGRTPKV (SEQ ID NO: 84982):LKYHY (SEQ ID NO: 84232):MVVAE (SEQ ID NO: 84254):XKXS (SEQ ID NO: 84124), KIPKAXX (SEQ ID NO: 84424):VPTEL (SEQ ID NO: 84378):SPIS (SEQ ID NO: 84120):DENEKVV (SEQ ID NO: 84966):LKYHY (SEQ ID NO: 84232):DMVVE (SEQ ID NO: 84161):GXGXR (SEQ ID NO: 84208), GIPEPXX (SEQ ID NO: 84419):VPEKM (SEQ ID NO: 84360):SPIS (SEQ ID NO: 84120):DENKNVV (SEQ ID NO: 84967):LKYHY (SEQ ID NO: 84232):NMTVE (SEQ ID NO: 84267):SXAXR (SEQ ID NO: 84303), SIPKAXX (SEQ ID NO: 84429):VPTEL (SEQ ID NO: 84378):SPIS (SEQ ID NO: 84120):DEYDKVV (SEQ ID NO: 84968):LKYHY (SEQ ID NO: 84232):EMVVE (SEQ ID NO: 84175):GXGXR (SEQ ID NO: 84208), HVTKPTX (SEQ ID NO: 84422):APTKL (SEQ ID NO: 84131):SPIS (SEQ ID NO: 84120):DDSSNVI (SEQ ID NO: 84965):LKYHY (SEQ ID NO: 84232):NMVVR (SEQ ID NO: 84275):SXGXH (SEQ ID NO: 84304), YVPKPXX (SEQ ID NO: 84433):APTKL (SEQ ID NO: 84131):SPIS (SEQ ID NO: 84120):DDSSNVI (SEQ ID NO: 84965):LKYHY (SEQ ID NO: 84232):NMVVR (SEQ ID NO: 84275):SXGXH (SEQ ID NO: 84304), TVPKPXX (SEQ ID NO: 84432):APTQL (SEQ ID NO: 84134):SPIS (SEQ ID NO: 84120):DDSSNVI (SEQ ID NO: 84965):LKYHY (SEQ ID NO: 84232):NMVVR (SEQ ID NO: 84275):AXGXH (SEQ ID NO: 84147), AVPKAXX (SEQ ID NO: 84404):APTKL (SEQ ID NO: 84131):SPIS (SEQ ID NO: 84120):DSSNNVI (SEQ ID NO: 84972):LKYHY (SEQ ID NO: 84232):NMVVK (SEQ ID NO: 84274):AXGXH (SEQ ID NO: 84147), KASKAXX (SEQ ID NO: 84423):VPTKL (SEQ ID NO: 84381):SPIS (SEQ ID NO: 84120):DKGVVTY (SEQ ID NO: 84969):LKYHY (SEQ ID NO: 84232):GMAVS (SEQ ID NO: 84194):EXGXR (SEQ ID NO: 84179), GSAGPXX (SEQ ID NO: 84420):TPTKM (SEQ ID NO: 84327):SPIS (SEQ ID NO: 84120):NDKQQII (SEQ ID NO: 84979):LKYHY (SEQ ID NO: 84232):GMVVD (SEQ ID NO: 84204):RXGXS (SEQ ID NO: 84291), AAPASXX (SEQ ID NO: 84401):VPARL (SEQ ID NO: 84352):SPIS (SEQ ID NO: 84120):DAANNVV (SEQ ID NO: 84963):LKYHY (SEQ ID NO: 84232):DMVVE (SEQ ID NO: 84161):AXGXR (SEQ ID NO: 84148), STPPTXX (SEQ ID NO: 84431):VPTRL (SEQ ID NO: 84385):SPIS (SEQ ID NO: 84120):DSANNVV (SEQ ID NO: 84971):LKYHY (SEQ ID NO: 84232):DMVVE (SEQ ID NO: 84161):SXGXR (SEQ ID NO: 84305), HVPKPXX (SEQ ID NO: 84421):APTKL (SEQ ID NO: 84131):SPIS (SEQ ID NO: 84120):DDSSNVI (SEQ ID NO: 84965):LKYHY (SEQ ID NO: 84232):NMVVR (SEQ ID NO: 84275):SXGXH (SEQ ID NO: 84304), RVPSTXX (SEQ ID NO: 84428):APVKT (SEQ ID NO: 84144):SPIS (SEQ ID NO: 84120):DNGRVLL (SEQ ID NO: 84970):LKYHY (SEQ ID NO: 84232):MIVEE (SEQ ID NO: 84241):XGXL (SEQ ID NO: 84122), ASAAPXX (SEQ ID NO: 84402):VPQAL (SEQ ID NO: 84364):SPIS (SEQ ID NO: 84120):VGRKPKV (SEQ ID NO: 84981):LKYHY (SEQ ID NO: 84232):MIVRS (SEQ ID NO: 84243):XKXS (SEQ ID NO: 84124), ASASPXX (SEQ ID NO: 84403):VSQDL (SEQ ID NO: 84387):SPIS (SEQ ID NO: 84120):IGKTPKI (SEQ ID NO: 84978):LKYHY (SEQ ID NO: 84232):MIVKS (SEQ ID NO: 84242):XKXS (SEQ ID NO: 84124), ASASPXX (SEQ ID NO: 84403):VPQDL (SEQ ID NO: 84365):SPIS (SEQ ID NO: 84120):VGRTPKV (SEQ ID NO: 84982):LKYHY (SEQ ID NO: 84232):MVVKS (SEQ ID NO: 84256):XKXS (SEQ ID NO: 84124), NDEGLEX (SEQ ID NO: 84426):VPTEE (SEQ ID NO: 84377):SPIS (SEQ ID NO: 84120):RIKPHQGQH (SEQ ID NO: 84980):LKYHY (SEQ ID NO: 84232):FLQHN (SEQ ID NO: 84184):KXEXR (SEQ ID NO: 84213), NDEGLEX (SEQ ID NO: 84426):VPTGQ (SEQ ID NO: 84379):SPIS (SEQ ID NO: 84120):RIKPHQGQH (SEQ ID NO: 84980):LKYHY (SEQ ID NO: 84232):LEEHS (SEQ ID NO: 84217):QXEXR (SEQ ID NO: 84276), SSVKXQP (SEQ ID NO: 84430):SRVHH (SEQ ID NO: 84297):SPIS (SEQ ID NO: 84120):EYVRKKPKL (SEQ ID NO: 84974):LKYHY (SEQ ID NO: 84232):RLEEH (SEQ ID NO: 84279):LEXAXA (SEQ ID NO: 84400), RNVQXRP (SEQ ID NO: 84427):TQVQL (SEQ ID NO: 84340):SPIS (SEQ ID NO: 84120):EIVRKKPIF (SEQ ID NO: 84973):LKYHY (SEQ ID NO: 84232):TLEDH (SEQ ID NO: 84307):LAXKXE (SEQ ID NO: 84399), KIPKAXX (SEQ ID NO: 84424):VPTEL (SEQ ID NO: 84378):EPIS (SEQ ID NO: 84109):DENEKVV (SEQ ID NO: 84966):KFKYE (SEQ ID NO: 84211):DMAVS (SEQ ID NO: 84150):GXGXR (SEQ ID NO: 84208), GIPEPXX (SEQ ID NO: 84419):VPTKM (SEQ ID NO: 84382):EPIS (SEQ ID NO: 84109):DENKNVV (SEQ ID NO: 84967):KFKYE (SEQ ID NO: 84211):NMAVS (SEQ ID NO: 84262):SXAXR (SEQ ID NO: 84303), SIPKAXX (SEQ ID NO: 84429):VPTEL (SEQ ID NO: 84378):EPIS (SEQ ID NO: 84109):DEYDKVV (SEQ ID NO: 84968):KFKYE (SEQ ID NO: 84211):EMAVS (SEQ ID NO: 84164):GXGXR (SEQ ID NO: 84208), HVTKPTX (SEQ ID NO: 84422):VPTKL (SEQ ID NO: 84381):EPIS (SEQ ID NO: 84109):DDSSNVI (SEQ ID NO: 84965):KFKYE (SEQ ID NO: 84211):NMAVS (SEQ ID NO: 84262):SXGXH (SEQ ID NO: 84304), YVPKPXX (SEQ ID NO: 84433):VPTKL (SEQ ID NO: 84381):EPIS (SEQ ID NO: 84109):DDSSNVI (SEQ ID NO: 84965):KFKYE (SEQ ID NO: 84211):NMAVS (SEQ ID NO: 84262):SXGXH (SEQ ID NO: 84304), TVPKPXX (SEQ ID NO: 84432):VPTQL (SEQ ID NO: 84384):EPIS (SEQ ID NO: 84109):DDSSNVI (SEQ ID NO: 84965):KFKYE (SEQ ID NO: 84211):NMAVS (SEQ ID NO: 84262):AXGXH (SEQ ID NO: 84147), AVPKAXX (SEQ ID NO: 84404):VPTKL (SEQ ID NO: 84381):EPIS (SEQ ID NO: 84109):DSSNNVI (SEQ ID NO: 84972):KFKYE (SEQ ID NO: 84211):NMAVS (SEQ ID NO: 84262):AXGXH (SEQ ID NO: 84147), KVGKAXX (SEQ ID NO: 84425):VPTKL (SEQ ID NO: 84381):EPIS (SEQ ID NO: 84109):DDMGVPT (SEQ ID NO: 84964):KFKYE (SEQ ID NO: 84211):EGMSAVS (SEQ ID NO: 84405):XGXR (SEQ ID NO: 84123), GSAGPXX (SEQ ID NO: 84420):VPTKM (SEQ ID NO: 84382):EPIS (SEQ ID NO: 84109):NDKQQII (SEQ ID NO: 84979):KFKYE (SEQ ID NO: 84211):GMAVS (SEQ ID NO: 84194):RXGXS (SEQ ID NO: 84291), AAPASXX (SEQ ID NO: 84401):VPTRL (SEQ ID NO: 84385):EPIS (SEQ ID NO: 84109):DAANNVV (SEQ ID NO: 84963):KFKYE (SEQ ID NO: 84211):DMAVS (SEQ ID NO: 84150):AXGXR (SEQ ID NO: 84148), STPPTXX (SEQ ID NO: 84431):VPTRL (SEQ ID NO: 84385):EPIS (SEQ ID NO: 84109):DSANNVV (SEQ ID NO: 84971):KFKYE (SEQ ID NO: 84211):DMAVS (SEQ ID NO: 84150):SXGXR (SEQ ID NO: 84305), HVPKPXX (SEQ ID NO: 84421):VPTKL (SEQ ID NO: 84381):EPIS (SEQ ID NO: 84109):DDSSNVI (SEQ ID NO: 84965):KFKYE (SEQ ID NO: 84211):NMAVS (SEQ ID NO: 84262):SXGXH (SEQ ID NO: 84304), RVPSTXX (SEQ ID NO: 84428):VPTKT (SEQ ID NO: 84383):EPIS (SEQ ID NO: 84109):DNGRVLL (SEQ ID NO: 84970):KFKYE (SEQ ID NO: 84211):MIAVS (SEQ ID NO: 84234):XGXL (SEQ ID NO: 84122), ASAAPXX (SEQ ID NO: 84402):VPTAL (SEQ ID NO: 84375):EPIS (SEQ ID NO: 84109):VGRKPKV (SEQ ID NO: 84981):KFKYE (SEQ ID NO: 84211):MIAVS (SEQ ID NO: 84234):XKXS (SEQ ID NO: 84124), ASASPXX (SEQ ID NO: 84403):VPTDL (SEQ ID NO: 84376):EPIS (SEQ ID NO: 84109):IGKTPKI (SEQ ID NO: 84978):KFKYE (SEQ ID NO: 84211):MIAVS (SEQ ID NO: 84234):XKXS (SEQ ID NO: 84124), ASASPXX (SEQ ID NO: 84403):VPTDL (SEQ ID NO: 84376):EPIS (SEQ ID NO: 84109):VGRTPKV (SEQ ID NO: 84982):KFKYE (SEQ ID NO: 84211):MVAVS (SEQ ID NO: 84248):XKXS (SEQ ID NO: 84124), KIPKAXX (SEQ ID NO: 84424):VPTEL (SEQ ID NO: 84378):EPIS (SEQ ID NO: 84109):DENEKVV (SEQ ID NO: 84966):KFKYE (SEQ ID NO: 84211):DMVVE (SEQ ID NO: 84161):GXGXR (SEQ ID NO: 84208), GIPEPXX (SEQ ID NO: 84419):VPEKM (SEQ ID NO: 84360):EPIS (SEQ ID NO: 84109):DENKNVV (SEQ ID NO: 84967):KFKYE (SEQ ID NO: 84211):NMTVE (SEQ ID NO: 84267):SXAXR (SEQ ID NO: 84303), SIPKAXX (SEQ ID NO: 84429):VPTEL (SEQ ID NO: 84378):EPIS (SEQ ID NO: 84109):DEYDKVV (SEQ ID NO: 84968):KFKYE (SEQ ID NO: 84211):EMVVE (SEQ ID NO: 84175):GXGXR (SEQ ID NO: 84208), HVTKPTX (SEQ ID NO: 84422):APTKL (SEQ ID NO: 84131):EPIS (SEQ ID NO: 84109):DDSSNVI (SEQ ID NO: 84965):KFKYE (SEQ ID NO: 84211):NMVVR (SEQ ID NO: 84275):SXGXH (SEQ ID NO: 84304), YVPKPXX (SEQ ID NO: 84433):APTKL (SEQ ID NO: 84131):EPIS (SEQ ID NO: 84109):DDSSNVI (SEQ ID NO: 84965):KFKYE (SEQ ID NO: 84211):NMVVR (SEQ ID NO: 84275):SXGXH (SEQ ID NO: 84304), TVPKPXX (SEQ ID NO: 84432):APTQL (SEQ ID NO: 84134):EPIS (SEQ ID NO: 84109):DDSSNVI (SEQ ID NO: 84965):KFKYE (SEQ ID NO: 84211):NMVVR (SEQ ID NO: 84275):AXGXH (SEQ ID NO: 84147), AVPKAXX (SEQ ID NO: 84404):APTKL (SEQ ID NO: 84131):EPIS (SEQ ID NO: 84109):DSSNNVI (SEQ ID NO: 84972):KFKYE (SEQ ID NO: 84211):NMVVK (SEQ ID NO: 84274):AXGXH (SEQ ID NO: 84147), KVGKAXX (SEQ ID NO: 84425):VPTKL (SEQ ID NO: 84381):EPIS (SEQ ID NO: 84109):DDMGVPT (SEQ ID NO: 84964):KFKYE (SEQ ID NO: 84211):EGMSVAE (SEQ ID NO: 84411):XGXR (SEQ ID NO: 84123), GSAGPXX (SEQ ID NO: 84420):TPTKM (SEQ ID NO: 84327):EPIS (SEQ ID NO: 84109):NDKQQII (SEQ ID NO: 84979):KFKYE (SEQ ID NO: 84211):GMVVD (SEQ ID NO: 84204):RXGXS (SEQ ID NO: 84291), AAPASXX (SEQ ID NO: 84401):VPARL (SEQ ID NO: 84352):EPIS (SEQ ID NO: 84109):DAANNVV (SEQ ID NO: 84963):KFKYE (SEQ ID NO: 84211):DMVVE (SEQ ID NO: 84161):AXGXR (SEQ ID NO: 84148), STPPTXX (SEQ ID NO: 84431):VPTRL (SEQ ID NO: 84385):EPIS (SEQ ID NO: 84109):DSANNVV (SEQ ID NO: 84971):KFKYE (SEQ ID NO: 84211):DMVVE (SEQ ID NO: 84161):SXGXR (SEQ ID NO: 84305), HVPKPXX (SEQ ID NO: 84421):APTKL (SEQ ID NO: 84131):EPIS (SEQ ID NO: 84109):DDSSNVI (SEQ ID NO: 84965):KFKYE (SEQ ID NO: 84211):NMVVR (SEQ ID NO: 84275):SXGXH (SEQ ID NO: 84304), RVPSTXX (SEQ ID NO: 84428):APVKT (SEQ ID NO: 84144):EPIS (SEQ ID NO: 84109):DNGRVLL (SEQ ID NO: 84970):KFKYE (SEQ ID NO: 84211):MIVEE (SEQ ID NO: 84241):XGXL (SEQ ID NO: 84122), ASAAPXX (SEQ ID NO: 84402):VPQAL (SEQ ID NO: 84364):EPIS (SEQ ID NO: 84109):VGRKPKV (SEQ ID NO: 84981):KFKYE (SEQ ID NO: 84211):MIVRS (SEQ ID NO: 84243):XKXS (SEQ ID NO: 84124), ASASPXX (SEQ ID NO: 84403):VSQDL (SEQ ID NO: 84387):EPIS (SEQ ID NO: 84109):IGKTPKI (SEQ ID NO: 84978):KFKYE (SEQ ID NO: 84211):MIVKS (SEQ ID NO: 84242):XKXS (SEQ ID NO: 84124), ASASPXX (SEQ ID NO: 84403):VPQDL (SEQ ID NO: 84365):EPIS (SEQ ID NO: 84109):VGRTPKV (SEQ ID NO: 84982):KFKYE (SEQ ID NO: 84211):MVVKS (SEQ ID NO: 84256):XKXS (SEQ ID NO: 84124), NDEGLEX (SEQ ID NO: 84426):VPTEE (SEQ ID NO: 84377):EPIS (SEQ ID NO: 84109):RIKPHQGQH (SEQ ID NO: 84980):KFKYE (SEQ ID NO: 84211):FLQHN (SEQ ID NO: 84184):KXEXR (SEQ ID NO: 84213), NDEGLEX (SEQ ID NO: 84426):VPTGQ (SEQ ID NO: 84379):EPIS (SEQ ID NO: 84109):RIKPHQGQH (SEQ ID NO: 84980):KFKYE (SEQ ID NO: 84211):LEEHS (SEQ ID NO: 84217):QXEXR (SEQ ID NO: 84276), SSVKXQP (SEQ ID NO: 84430):SRVHH (SEQ ID NO: 84297):EPIS (SEQ ID NO: 84109):EYVRKKPKL (SEQ ID NO: 84974):KFKYE (SEQ ID NO: 84211):RLEEH (SEQ ID NO: 84279):LEXAXA (SEQ ID NO: 84400), RNVQXRP (SEQ ID NO: 84427):TQVQL (SEQ ID NO: 84340):EPIS (SEQ ID NO: 84109):EIVRKKPIF (SEQ ID NO: 84973):KFKYE (SEQ ID NO: 84211):TLEDH (SEQ ID NO: 84307):LAXKXE (SEQ ID NO: 84399), KIPKAXX (SEQ ID NO: 84424):TPTEL (SEQ ID NO: 84323):SPIN (SEQ ID NO: 84119):DENEKVV (SEQ ID NO: 84966):YGKIP (SEQ ID NO: 84397):DMVVD (SEQ ID NO: 84160):GXGXR (SEQ ID NO: 84208), GIPEPXX (SEQ ID NO: 84419):TPTKM (SEQ ID NO: 84327):SPIN (SEQ ID NO: 84119):DENKNVV (SEQ ID NO: 84967):YGKIP (SEQ ID NO: 84397):NMVVD (SEQ ID NO: 84272):SXAXR (SEQ ID NO: 84303), SIPKAXX (SEQ ID NO: 84429):TPTEL (SEQ ID NO: 84323):SPIN (SEQ ID NO: 84119):DEYDKVV (SEQ ID NO: 84968):YGKIP (SEQ ID NO: 84397):EMVVD (SEQ ID NO: 84174):GXGXR (SEQ ID NO: 84208), HVTKPTX (SEQ ID NO: 84422):TPTKL (SEQ ID NO: 84326):SPIN (SEQ ID NO: 84119):DDSSNVI (SEQ ID NO: 84965):YGKIP (SEQ ID NO: 84397):NMVVD (SEQ ID NO: 84272):SXGXH (SEQ ID NO: 84304), YVPKPXX (SEQ ID NO: 84433):TPTKL (SEQ ID NO: 84326):SPIN (SEQ ID NO: 84119):DDSSNVI (SEQ ID NO: 84965):YGKIP (SEQ ID NO: 84397):NMVVD (SEQ ID NO: 84272):SXGXH (SEQ ID NO: 84304), TVPKPXX (SEQ ID NO: 84432):TPTQL (SEQ ID NO: 84329):SPIN (SEQ ID NO: 84119):DDSSNVI (SEQ ID NO: 84965):YGKIP (SEQ ID NO: 84397):NMVVD (SEQ ID NO: 84272):AXGXH (SEQ ID NO: 84147), AVPKAXX (SEQ ID NO: 84404):TPTKL (SEQ ID NO: 84326):SPIN (SEQ ID NO: 84119):DSSNNVI (SEQ ID NO: 84972):YGKIP (SEQ ID NO: 84397):NMVVD (SEQ ID NO: 84272):AXGXH (SEQ ID NO: 84147), KVGKAXX (SEQ ID NO: 84425):TPTKL (SEQ ID NO: 84326):SPIN (SEQ ID NO: 84119):DDMGVPT (SEQ ID NO: 84964):YGKIP (SEQ ID NO: 84397):EGMSVVD (SEQ ID NO: 84415):XGXR (SEQ ID NO: 84123), KASKAXX (SEQ ID NO: 84423):TPTKL (SEQ ID NO: 84326):SPIN (SEQ ID NO: 84119):DKGVVTY (SEQ ID NO: 84969):YGKIP (SEQ ID NO: 84397):GMVVD (SEQ ID NO: 84204):EXGXR (SEQ ID NO: 84179), AAPASXX (SEQ ID NO: 84401):TPTRL (SEQ ID NO: 84330):SPIN (SEQ ID NO: 84119):DAANNVV (SEQ ID NO: 84963):YGKIP (SEQ ID NO: 84397):DMVVD (SEQ ID NO: 84160):AXGXR (SEQ ID NO: 84148), STPPTXX (SEQ ID NO: 84431):TPTRL (SEQ ID NO: 84330):SPIN (SEQ ID NO: 84119):DSANNVV (SEQ ID NO: 84971):YGKIP (SEQ ID NO: 84397):DMVVD (SEQ ID NO: 84160):SXGXR (SEQ ID NO: 84305), HVPKPXX (SEQ ID NO: 84421):TPTKL (SEQ ID NO: 84326):SPIN (SEQ ID NO: 84119):DDSSNVI (SEQ ID NO: 84965):YGKIP (SEQ ID NO: 84397):NMVVD (SEQ ID NO: 84272):SXGXH (SEQ ID NO: 84304), RVPSTXX (SEQ ID NO: 84428):TPTKT (SEQ ID NO: 84328):SPIN (SEQ ID NO: 84119):DNGRVLL (SEQ ID NO: 84970):YGKIP (SEQ ID NO: 84397):MIVVD (SEQ ID NO: 84244):XGXL (SEQ ID NO: 84122), ASAAPXX (SEQ ID NO: 84402):TPTAL (SEQ ID NO: 84320):SPIN (SEQ ID NO: 84119):VGRKPKV (SEQ ID NO: 84981):YGKIP (SEQ ID NO: 84397):MIVVD (SEQ ID NO: 84244):XKXS (SEQ ID NO: 84124), ASASPXX (SEQ ID NO: 84403):TPTDL (SEQ ID NO: 84321):SPIN (SEQ ID NO: 84119):IGKTPKI (SEQ ID NO: 84978):YGKIP (SEQ ID NO: 84397):MIVVD (SEQ ID NO: 84244):XKXS (SEQ ID NO: 84124), ASASPXX (SEQ ID NO: 84403):TPTDL (SEQ ID NO: 84321):SPIN (SEQ ID NO: 84119):VGRTPKV (SEQ ID NO: 84982):YGKIP (SEQ ID NO: 84397):MVVVD (SEQ ID NO: 84258):XKXS (SEQ ID NO: 84124), KIPKAXX (SEQ ID NO: 84424):VPTEL (SEQ ID NO: 84378):SPIN (SEQ ID NO: 84119):DENEKVV (SEQ ID NO: 84966):YGKIP (SEQ ID NO: 84397):DMVVE (SEQ ID NO: 84161):GXGXR (SEQ ID NO: 84208), GIPEPXX (SEQ ID NO: 84419):VPEKM (SEQ ID NO: 84360):SPIN (SEQ ID NO: 84119):DENKNVV (SEQ ID NO: 84967):YGKIP (SEQ ID NO: 84397):NMTVE (SEQ ID NO: 84267):SXAXR (SEQ ID NO: 84303), SIPKAXX (SEQ ID NO: 84429):VPTEL (SEQ ID NO: 84378):SPIN (SEQ ID NO: 84119):DEYDKVV (SEQ ID NO: 84968):YGKIP (SEQ ID NO: 84397):EMVVE (SEQ ID NO: 84175):GXGXR (SEQ ID NO: 84208), HVTKPTX (SEQ ID NO: 84422):APTKL (SEQ ID NO: 84131):SPIN (SEQ ID NO: 84119):DDSSNVI (SEQ ID NO: 84965):YGKIP (SEQ ID NO: 84397):NMVVR (SEQ ID NO: 84275):SXGXH (SEQ ID NO: 84304), YVPKPXX (SEQ ID NO: 84433):APTKL (SEQ ID NO: 84131):SPIN (SEQ ID NO: 84119):DDSSNVI (SEQ ID NO: 84965):YGKIP (SEQ ID NO: 84397):NMVVR (SEQ ID NO: 84275):SXGXH (SEQ ID NO: 84304), TVPKPXX (SEQ ID NO: 84432):APTQL (SEQ ID NO: 84134):SPIN (SEQ ID NO: 84119):DDSSNVI (SEQ ID NO: 84965):YGKIP (SEQ ID NO: 84397):NMVVR (SEQ ID NO: 84275):AXGXH (SEQ ID NO: 84147), AVPKAXX (SEQ ID NO: 84404):APTKL (SEQ ID NO: 84131):SPIN (SEQ ID NO: 84119):DSSNNVI (SEQ ID NO: 84972):YGKIP (SEQ ID NO: 84397):NMVVK (SEQ ID NO: 84274):AXGXH (SEQ ID NO: 84147), KVGKAXX (SEQ ID NO: 84425):VPTKL (SEQ ID NO: 84381):SPIN (SEQ ID NO: 84119):DDMGVPT (SEQ ID NO: 84964):YGKIP (SEQ ID NO: 84397):EGMSVAE (SEQ ID NO: 84411):XGXR (SEQ ID NO: 84123), KASKAXX (SEQ ID NO: 84423):VPTKL (SEQ ID NO: 84381):SPIN (SEQ ID NO: 84119):DKGVVTY (SEQ ID NO: 84969):YGKIP (SEQ ID NO: 84397):GMAVS (SEQ ID NO: 84194):EXGXR (SEQ ID NO: 84179), AAPASXX (SEQ ID NO: 84401):VPARL (SEQ ID NO: 84352):SPIN (SEQ ID NO: 84119):DAANNVV (SEQ ID NO: 84963):YGKIP (SEQ ID NO: 84397):DMVVE (SEQ ID NO: 84161):AXGXR (SEQ ID NO: 84148), STPPTXX (SEQ ID NO: 84431):VPTRL (SEQ ID NO: 84385):SPIN (SEQ ID NO: 84119):DSANNVV (SEQ ID NO: 84971):YGKIP (SEQ ID NO: 84397):DMVVE (SEQ ID NO: 84161):SXGXR (SEQ ID NO: 84305), HVPKPXX (SEQ ID NO: 84421):APTKL (SEQ ID NO: 84131):SPIN (SEQ ID NO: 84119):DDSSNVI (SEQ ID NO: 84965):YGKIP (SEQ ID NO: 84397):NMVVR (SEQ ID NO: 84275):SXGXH (SEQ ID NO: 84304), RVPSTXX (SEQ ID NO: 84428):APVKT (SEQ ID NO: 84144):SPIN (SEQ ID NO: 84119):DNGRVLL (SEQ ID NO: 84970):YGKIP (SEQ ID NO: 84397):MIVEE (SEQ ID NO: 84241):XGXL (SEQ ID NO: 84122), ASAAPXX (SEQ ID NO: 84402):VPQAL (SEQ ID NO: 84364):SPIN (SEQ ID NO: 84119):VGRKPKV (SEQ ID NO: 84981):YGKIP (SEQ ID NO: 84397):MIVRS (SEQ ID NO: 84243):XKXS (SEQ ID NO: 84124), ASASPXX (SEQ ID NO: 84403):VSQDL (SEQ ID NO: 84387):SPIN (SEQ ID NO: 84119):IGKTPKI (SEQ ID NO: 84978):YGKIP (SEQ ID NO: 84397):MIVKS (SEQ ID NO: 84242):XKXS (SEQ ID NO: 84124), ASASPXX (SEQ ID NO: 84403):VPQDL (SEQ ID NO: 84365):SPIN (SEQ ID NO: 84119):VGRTPKV (SEQ ID NO: 84982):YGKIP (SEQ ID NO: 84397):MVVKS (SEQ ID NO: 84256):XKXS (SEQ ID NO: 84124), NDEGLEX (SEQ ID NO: 84426):VPTEE (SEQ ID NO: 84377):SPIN (SEQ ID NO: 84119):RIKPHQGQH (SEQ ID NO: 84980):YGKIP (SEQ ID NO: 84397):FLQHN (SEQ ID NO: 84184):KXEXR (SEQ ID NO: 84213), NDEGLEX (SEQ ID NO: 84426):VPTGQ (SEQ ID NO: 84379):SPIN (SEQ ID NO: 84119):RIKPHQGQH (SEQ ID NO: 84980):YGKIP (SEQ ID NO: 84397):LEEHS (SEQ ID NO: 84217):QXEXR (SEQ ID NO: 84276), SSVKXQP (SEQ ID NO: 84430):SRVHH (SEQ ID NO: 84297):SPIN (SEQ ID NO: 84119):EYVRKKPKL (SEQ ID NO: 84974):YGKIP (SEQ ID NO: 84397):RLEEH (SEQ ID NO: 84279):LEXAXA (SEQ ID NO: 84400), RNVQXRP (SEQ ID NO: 84427):TQVQL (SEQ ID NO: 84340):SPIN (SEQ ID NO: 84119):EIVRKKPIF (SEQ ID NO: 84973):YGKIP (SEQ ID NO: 84397):TLEDH (SEQ ID NO: 84307):LAXKXE (SEQ ID NO: 84399), KIPKAXX (SEQ ID NO: 84424):VPAEL (SEQ ID NO: 84345):SPIS (SEQ ID NO: 84120):DENEKVV (SEQ ID NO: 84966):YKQYE (SEQ ID NO: 84398):DMVVE (SEQ ID NO: 84161):GXGXR (SEQ ID NO: 84208), GIPEPXX (SEQ ID NO: 84419):VPAKM (SEQ ID NO: 84349):SPIS (SEQ ID NO: 84120):DENKNVV (SEQ ID NO: 84967):YKQYE (SEQ ID NO: 84398):NMVVE (SEQ ID NO: 84273):SXAXR (SEQ ID NO: 84303), SIPKAXX (SEQ ID NO: 84429):VPAEL (SEQ ID NO: 84345):SPIS (SEQ ID NO: 84120):DEYDKVV (SEQ ID NO: 84968):YKQYE (SEQ ID NO: 84398):EMVVE (SEQ ID NO: 84175):GXGXR (SEQ ID NO: 84208), HVTKPTX (SEQ ID NO: 84422):VPAKL (SEQ ID NO: 84348):SPIS (SEQ ID NO: 84120):DDSSNVI (SEQ ID NO: 84965):YKQYE (SEQ ID NO: 84398):NMVVE (SEQ ID NO: 84273):SXGXH (SEQ ID NO: 84304), YVPKPXX (SEQ ID NO: 84433):VPAKL (SEQ ID NO: 84348):SPIS (SEQ ID NO: 84120):DDSSNVI (SEQ ID NO: 84965):YKQYE (SEQ ID NO: 84398):NMVVE (SEQ ID NO: 84273):SXGXH (SEQ ID NO: 84304), TVPKPXX (SEQ ID NO: 84432):VPAQL (SEQ ID NO: 84351):SPIS (SEQ ID NO: 84120):DDSSNVI (SEQ ID NO: 84965):YKQYE (SEQ ID NO: 84398):NMVVE (SEQ ID NO: 84273):AXGXH (SEQ ID NO: 84147), AVPKAXX (SEQ ID NO: 84404):VPAKL (SEQ ID NO: 84348):SPIS (SEQ ID NO: 84120):DSSNNVI (SEQ ID NO: 84972):YKQYE (SEQ ID NO: 84398):NMVVE (SEQ ID NO: 84273):AXGXH (SEQ ID NO: 84147), KVGKAXX (SEQ ID NO: 84425):VPAKL (SEQ ID NO: 84348):SPIS (SEQ ID NO: 84120):DDMGVPT (SEQ ID NO: 84964):YKQYE (SEQ ID NO: 84398):EGMSVVE (SEQ ID NO: 84416):XGXR (SEQ ID NO: 84123), KASKAXX (SEQ ID NO: 84423):VPAKL (SEQ ID NO: 84348):SPIS (SEQ ID NO: 84120):DKGVVTY (SEQ ID NO: 84969):YKQYE (SEQ ID NO: 84398):GMVVE (SEQ ID NO: 84205):EXGXR (SEQ ID NO: 84179), GSAGPXX (SEQ ID NO: 84420):VPAKM (SEQ ID NO: 84349):SPIS (SEQ ID NO: 84120):NDKQQII (SEQ ID NO: 84979):YKQYE (SEQ ID NO: 84398):GMVVE (SEQ ID NO: 84205):RXGXS (SEQ ID NO: 84291), STPPTXX (SEQ ID NO: 84431):VPARL (SEQ ID NO: 84352):SPIS (SEQ ID NO: 84120):DSANNVV (SEQ ID NO: 84971):YKQYE (SEQ ID NO: 84398):DMVVE (SEQ ID NO: 84161):SXGXR (SEQ ID NO: 84305), HVPKPXX (SEQ ID NO: 84421):VPAKL (SEQ ID NO: 84348):SPIS (SEQ ID NO: 84120):DDSSNVI (SEQ ID NO: 84965):YKQYE (SEQ ID NO: 84398):NMVVE (SEQ ID NO: 84273):SXGXH (SEQ ID NO: 84304), RVPSTXX (SEQ ID NO: 84428):VPAKT (SEQ ID NO: 84350):SPIS (SEQ ID NO: 84120):DNGRVLL (SEQ ID NO: 84970):YKQYE (SEQ ID NO: 84398):MIVVE (SEQ ID NO: 84245):XGXL (SEQ ID NO: 84122), ASAAPXX (SEQ ID NO: 84402):VPAAL (SEQ ID NO: 84342):SPIS (SEQ ID NO: 84120):VGRKPKV (SEQ ID NO: 84981):YKQYE (SEQ ID NO: 84398):MIVVE (SEQ ID NO: 84245):XKXS (SEQ ID NO: 84124), ASASPXX (SEQ ID NO: 84403):VPADL (SEQ ID NO: 84343):SPIS (SEQ ID NO: 84120):IGKTPKI (SEQ ID NO: 84978):YKQYE (SEQ ID NO: 84398):MIVVE (SEQ ID NO: 84245):XKXS (SEQ ID NO: 84124), ASASPXX (SEQ ID NO: 84403):VPADL (SEQ ID NO: 84343):SPIS (SEQ ID NO: 84120):VGRTPKV (SEQ ID NO: 84982):YKQYE (SEQ ID NO: 84398):MVVVE (SEQ ID NO: 84259):XKXS (SEQ ID NO: 84124), KIPKAXX (SEQ ID NO: 84424):VPTEL (SEQ ID NO: 84378):SPIS (SEQ ID NO: 84120):DENEKVV (SEQ ID NO: 84966):YKQYE (SEQ ID NO: 84398):DMVVE (SEQ ID NO: 84161):GXGXR (SEQ ID NO: 84208), GIPEPXX (SEQ ID NO: 84419):VPEKM (SEQ ID NO: 84360):SPIS (SEQ ID NO: 84120):DENKNVV (SEQ ID NO: 84967):YKQYE (SEQ ID NO: 84398):NMTVE (SEQ ID NO: 84267):SXAXR (SEQ ID NO: 84303), SIPKAXX (SEQ ID NO: 84429):VPTEL (SEQ ID NO: 84378):SPIS (SEQ ID NO: 84120):DEYDKVV (SEQ ID NO: 84968):YKQYE (SEQ ID NO: 84398):EMVVE (SEQ ID NO: 84175):GXGXR (SEQ ID NO: 84208), HVTKPTX (SEQ ID NO: 84422):APTKL (SEQ ID NO: 84131):SPIS (SEQ ID NO: 84120):DDSSNVI (SEQ ID NO: 84965):YKQYE (SEQ ID NO: 84398):NMVVR (SEQ ID NO: 84275):SXGXH (SEQ ID NO: 84304), YVPKPXX (SEQ ID NO: 84433):APTKL (SEQ ID NO: 84131):SPIS (SEQ ID NO: 84120):DDSSNVI (SEQ ID NO: 84965):YKQYE (SEQ ID NO: 84398):NMVVR (SEQ ID NO: 84275):SXGXH (SEQ ID NO: 84304), TVPKPXX (SEQ ID NO: 84432):APTQL (SEQ ID NO: 84134):SPIS (SEQ ID NO: 84120):DDSSNVI (SEQ ID NO: 84965):YKQYE (SEQ ID NO: 84398):NMVVR (SEQ ID NO: 84275):AXGXH (SEQ ID NO: 84147), AVPKAXX (SEQ ID NO: 84404):APTKL (SEQ ID NO: 84131):SPIS (SEQ ID NO: 84120):DSSNNVI (SEQ ID NO: 84972):YKQYE (SEQ ID NO: 84398):NMVVK (SEQ ID NO: 84274):AXGXH (SEQ ID NO: 84147), KVGKAXX (SEQ ID NO: 84425):VPTKL (SEQ ID NO: 84381):SPIS (SEQ ID NO: 84120):DDMGVPT (SEQ ID NO: 84964):YKQYE (SEQ ID NO: 84398):EGMSVAE (SEQ ID NO: 84411):XGXR (SEQ ID NO: 84123), KASKAXX (SEQ ID NO: 84423):VPTKL (SEQ ID NO: 84381):SPIS (SEQ ID NO: 84120):DKGVVTY (SEQ ID NO: 84969):YKQYE (SEQ ID NO: 84398):GMAVS (SEQ ID NO: 84194):EXGXR (SEQ ID NO: 84179), GSAGPXX (SEQ ID NO: 84420):TPTKM (SEQ ID NO: 84327):SPIS (SEQ ID NO: 84120):NDKQQII (SEQ ID NO: 84979):YKQYE (SEQ ID NO: 84398):GMVVD (SEQ ID NO: 84204):RXGXS (SEQ ID NO: 84291), STPPTXX (SEQ ID NO: 84431):VPTRL (SEQ ID NO: 84385):SPIS (SEQ ID NO: 84120):DSANNVV (SEQ ID NO: 84971):YKQYE (SEQ ID NO: 84398):DMVVE (SEQ ID NO: 84161):SXGXR (SEQ ID NO: 84305), HVPKPXX (SEQ ID NO: 84421):APTKL (SEQ ID NO: 84131):SPIS (SEQ ID NO: 84120):DDSSNVI (SEQ ID NO: 84965):YKQYE (SEQ ID NO: 84398):NMVVR (SEQ ID NO: 84275):SXGXH (SEQ ID NO: 84304), RVPSTXX (SEQ ID NO: 84428):APVKT (SEQ ID NO: 84144):SPIS (SEQ ID NO: 84120):DNGRVLL (SEQ ID NO: 84970):YKQYE (SEQ ID NO: 84398):MIVEE (SEQ ID NO: 84241):XGXL (SEQ ID NO: 84122), ASAAPXX (SEQ ID NO: 84402):VPQAL (SEQ ID NO: 84364):SPIS (SEQ ID NO: 84120):VGRKPKV (SEQ ID NO: 84981):YKQYE (SEQ ID NO: 84398):MIVRS (SEQ ID NO: 84243):XKXS (SEQ ID NO: 84124), ASASPXX (SEQ ID NO: 84403):VSQDL (SEQ ID NO: 84387):SPIS (SEQ ID NO: 84120):IGKTPKI (SEQ ID NO: 84978):YKQYE (SEQ ID NO: 84398):MIVKS (SEQ ID NO: 84242):XKXS (SEQ ID NO: 84124), ASASPXX (SEQ ID NO: 84403):VPQDL (SEQ ID NO: 84365):SPIS (SEQ ID NO: 84120):VGRTPKV (SEQ ID NO: 84982):YKQYE (SEQ ID NO: 84398):MVVKS (SEQ ID NO: 84256):XKXS (SEQ ID NO: 84124), NDEGLEX (SEQ ID NO: 84426):VPTEE (SEQ ID NO: 84377):SPIS (SEQ ID NO: 84120):RIKPHQGQH (SEQ ID NO: 84980):YKQYE (SEQ ID NO: 84398):FLQHN (SEQ ID NO: 84184):KXEXR (SEQ ID NO: 84213), NDEGLEX (SEQ ID NO: 84426):VPTGQ (SEQ ID NO: 84379):SPIS (SEQ ID NO: 84120):RIKPHQGQH (SEQ ID NO: 84980):YKQYE (SEQ ID NO: 84398):LEEHS (SEQ ID NO: 84217):QXEXR (SEQ ID NO: 84276), SSVKXQP (SEQ ID NO: 84430):SRVHH (SEQ ID NO: 84297):SPIS (SEQ ID NO: 84120):EYVRKKPKL (SEQ ID NO: 84974):YKQYE (SEQ ID NO: 84398):RLEEH (SEQ ID NO: 84279):LEXAXA (SEQ ID NO: 84400), RNVQXRP (SEQ ID NO: 84427):TQVQL (SEQ ID NO: 84340):SPIS (SEQ ID NO: 84120):EIVRKKPIF (SEQ ID NO: 84973):YKQYE (SEQ ID NO: 84398):TLEDH (SEQ ID NO: 84307):LAXKXE (SEQ ID NO: 84399), GIPEPXX (SEQ ID NO: 84419):VPTKM (SEQ ID NO: 84382):SPIS (SEQ ID NO: 84120):DENKNVV (SEQ ID NO: 84967):YKQYE (SEQ ID NO: 84398):NMVVE (SEQ ID NO: 84273):SXAXR (SEQ ID NO: 84303), HVTKPTX (SEQ ID NO: 84422):VPTKL (SEQ ID NO: 84381):SPIS (SEQ ID NO: 84120):DDSSNVI (SEQ ID NO: 84965):YKQYE (SEQ ID NO: 84398):NMVVE (SEQ ID NO: 84273):SXGXH (SEQ ID NO: 84304), YVPKPXX (SEQ ID NO: 84433):VPTKL (SEQ ID NO: 84381):SPIS (SEQ ID NO: 84120):DDSSNVI (SEQ ID NO: 84965):YKQYE (SEQ ID NO: 84398):NMVVE (SEQ ID NO: 84273):SXGXH (SEQ ID NO: 84304), TVPKPXX (SEQ ID NO: 84432):VPTQL (SEQ ID NO: 84384):SPIS (SEQ ID NO: 84120):DDSSNVI (SEQ ID NO: 84965):YKQYE (SEQ ID NO: 84398):NMVVE (SEQ ID NO: 84273):AXGXH (SEQ ID NO: 84147), AVPKAXX (SEQ ID NO: 84404):VPTKL (SEQ ID NO: 84381):SPIS (SEQ ID NO: 84120):DSSNNVI (SEQ ID NO: 84972):YKQYE (SEQ ID NO: 84398):NMVVE (SEQ ID NO: 84273):AXGXH (SEQ ID NO: 84147), KVGKAXX (SEQ ID NO: 84425):VPTKL (SEQ ID NO: 84381):SPIS (SEQ ID NO: 84120):DDMGVPT (SEQ ID NO: 84964):YKQYE (SEQ ID NO: 84398):EGMSVVE (SEQ ID NO: 84416):XGXR (SEQ ID NO: 84123), KASKAXX (SEQ ID NO: 84423):VPTKL (SEQ ID NO: 84381):SPIS (SEQ ID NO: 84120):DKGVVTY (SEQ ID NO: 84969):YKQYE (SEQ ID NO: 84398):GMVVE (SEQ ID NO: 84205):EXGXR (SEQ ID NO: 84179), GSAGPXX (SEQ ID NO: 84420):VPTKM (SEQ ID NO: 84382):SPIS (SEQ ID NO: 84120):NDKQQII (SEQ ID NO: 84979):YKQYE (SEQ ID NO: 84398):GMVVE (SEQ ID NO: 84205):RXGXS (SEQ ID NO: 84291), AAPASXX (SEQ ID NO: 84401):VPTRL (SEQ ID NO: 84385):SPIS (SEQ ID NO: 84120):DAANNVV (SEQ ID NO: 84963):YKQYE (SEQ ID NO: 84398):DMVVE (SEQ ID NO: 84161):AXGXR (SEQ ID NO: 84148), HVPKPXX (SEQ ID NO: 84421):VPTKL (SEQ ID NO: 84381):SPIS (SEQ ID NO: 84120):DDSSNVI (SEQ ID NO: 84965):YKQYE (SEQ ID NO: 84398):NMVVE (SEQ ID NO: 84273):SXGXH (SEQ ID NO: 84304), RVPSTXX (SEQ ID NO: 84428):VPTKT (SEQ ID NO: 84383):SPIS (SEQ ID NO: 84120):DNGRVLL (SEQ ID NO: 84970):YKQYE (SEQ ID NO: 84398):MIVVE (SEQ ID NO: 84245):XGXL (SEQ ID NO: 84122), ASAAPXX (SEQ ID NO: 84402):VPTAL (SEQ ID NO: 84375):SPIS (SEQ ID NO: 84120):VGRKPKV (SEQ ID NO: 84981):YKQYE (SEQ ID NO: 84398):MIVVE (SEQ ID NO: 84245):XKXS (SEQ ID NO: 84124), ASASPXX (SEQ ID NO: 84403):VPTDL (SEQ ID NO: 84376):SPIS (SEQ ID NO: 84120):IGKTPKI (SEQ ID NO: 84978):YKQYE (SEQ ID NO: 84398):MIVVE (SEQ ID NO: 84245):XKXS (SEQ ID NO: 84124), ASASPXX (SEQ ID NO: 84403):VPTDL (SEQ ID NO: 84376):SPIS (SEQ ID NO: 84120):VGRTPKV (SEQ ID NO: 84982):YKQYE (SEQ ID NO: 84398):MVVVE (SEQ ID NO: 84259):XKXS (SEQ ID NO: 84124), AAPASXX (SEQ ID NO: 84401):VPARL (SEQ ID NO: 84352):SPIS (SEQ ID NO: 84120):DAANNVV (SEQ ID NO: 84963):YKQYE (SEQ ID NO: 84398):DMVVE (SEQ ID NO: 84161):AXGXR (SEQ ID NO: 84148), KIPKAXX (SEQ ID NO: 84424):APVEL (SEQ ID NO: 84139):KPLS (SEQ ID NO: 84112):DENEKVV (SEQ ID NO: 84966):DHHKD (SEQ ID NO: 84149):DMVEE (SEQ ID NO: 84157):GXGXR (SEQ ID NO: 84208), GIPEPXX (SEQ ID NO: 84419):APVKM (SEQ ID NO: 84143):KPLS (SEQ ID NO: 84112):DENKNVV (SEQ ID NO: 84967):DHHKD (SEQ ID NO: 84149):NMVEE (SEQ ID NO: 84269):SXAXR (SEQ ID NO: 84303), SIPKAXX (SEQ ID NO: 84429):APVEL (SEQ ID NO: 84139):KPLS (SEQ ID NO: 84112):DEYDKVV (SEQ ID NO: 84968):DHHKD (SEQ ID NO: 84149):EMVEE (SEQ ID NO: 84171):GXGXR (SEQ ID NO: 84208), HVTKPTX (SEQ ID NO: 84422):APVKL (SEQ ID NO: 84142):KPLS (SEQ ID NO: 84112):DDSSNVI (SEQ ID NO: 84965):DHHKD (SEQ ID NO: 84149):NMVEE (SEQ ID NO: 84269):SXGXH (SEQ ID NO: 84304), YVPKPXX (SEQ ID NO: 84433):APVKL (SEQ ID NO: 84142):KPLS (SEQ ID NO: 84112):DDSSNVI (SEQ ID NO: 84965):DHHKD (SEQ ID NO: 84149):NMVEE (SEQ ID NO: 84269):SXGXH (SEQ ID NO: 84304), TVPKPXX (SEQ ID NO: 84432):APVQL (SEQ ID NO: 84145):KPLS (SEQ ID NO: 84112):DDSSNVI (SEQ ID NO: 84965):DHHKD (SEQ ID NO: 84149):NMVEE (SEQ ID NO: 84269):AXGXH (SEQ ID NO: 84147), AVPKAXX (SEQ ID NO: 84404):APVKL (SEQ ID NO: 84142):KPLS (SEQ ID NO: 84112):DSSNNVI (SEQ ID NO: 84972):DHHKD (SEQ ID NO: 84149):NMVEE (SEQ ID NO: 84269):AXGXH (SEQ ID NO: 84147), KVGKAXX (SEQ ID NO: 84425):APVKL (SEQ ID NO: 84142):KPLS (SEQ ID NO: 84112):DDMGVPT (SEQ ID NO: 84964):DHHKD (SEQ ID NO: 84149):EGMSVEE (SEQ ID NO: 84412):XGXR (SEQ ID NO: 84123), KASKAXX (SEQ ID NO: 84423):APVKL (SEQ ID NO: 84142):KPLS (SEQ ID NO: 84112):DKGVVTY (SEQ ID NO: 84969):DHHKD (SEQ ID NO: 84149):GMVEE (SEQ ID NO: 84201):EXGXR (SEQ ID NO: 84179), GSAGPXX (SEQ ID NO: 84420):APVKM (SEQ ID NO: 84143):KPLS (SEQ ID NO: 84112):NDKQQII (SEQ ID NO: 84979):DHHKD (SEQ ID NO: 84149):GMVEE (SEQ ID NO: 84201):RXGXS (SEQ ID NO: 84291), AAPASXX (SEQ ID NO: 84401):APVRL (SEQ ID NO: 84146):KPLS (SEQ ID NO: 84112):DAANNVV (SEQ ID NO: 84963):DHHKD (SEQ ID NO: 84149):DMVEE (SEQ ID NO: 84157):AXGXR (SEQ ID NO: 84148), STPPTXX (SEQ ID NO: 84431):APVRL (SEQ ID NO: 84146):KPLS (SEQ ID NO: 84112):DSANNVV (SEQ ID NO: 84971):DHHKD (SEQ ID NO: 84149):DMVEE (SEQ ID NO: 84157):SXGXR (SEQ ID NO: 84305), HVPKPXX (SEQ ID NO: 84421):APVKL (SEQ ID NO: 84142):KPLS (SEQ ID NO: 84112):DDSSNVI (SEQ ID NO: 84965):DHHKD (SEQ ID NO: 84149):NMVEE (SEQ ID NO: 84269):SXGXH (SEQ ID NO: 84304), ASAAPXX (SEQ ID NO: 84402):APVAL (SEQ ID NO: 84136):KPLS (SEQ ID NO: 84112):VGRKPKV (SEQ ID NO: 84981):DHHKD (SEQ ID NO: 84149):MIVEE (SEQ ID NO: 84241):XKXS (SEQ ID NO: 84124), ASASPXX (SEQ ID NO: 84403):APVDL (SEQ ID NO: 84137):KPLS (SEQ ID NO: 84112):IGKTPKI (SEQ ID NO: 84978):DHHKD (SEQ ID NO: 84149):MIVEE (SEQ ID NO: 84241):XKXS (SEQ ID NO: 84124), ASASPXX (SEQ ID NO: 84403):APVDL (SEQ ID NO: 84137):KPLS (SEQ ID NO: 84112):VGRTPKV (SEQ ID NO: 84982):DHHKD (SEQ ID NO: 84149):MVVEE (SEQ ID NO: 84255):XKXS (SEQ ID NO: 84124), KIPKAXX (SEQ ID NO: 84424):VPTEL (SEQ ID NO: 84378):KPLS (SEQ ID NO: 84112):DENEKVV (SEQ ID NO: 84966):DHHKD (SEQ ID NO: 84149):DMVVE (SEQ ID NO: 84161):GXGXR (SEQ ID NO: 84208), GIPEPXX (SEQ ID NO: 84419):VPEKM (SEQ ID NO: 84360):KPLS (SEQ ID NO: 84112):DENKNVV (SEQ ID NO: 84967):DHHKD (SEQ ID NO: 84149):NMTVE (SEQ ID NO: 84267):SXAXR (SEQ ID NO: 84303), SIPKAXX (SEQ ID NO: 84429):VPTEL (SEQ ID NO: 84378):KPLS (SEQ ID NO: 84112):DEYDKVV (SEQ ID NO: 84968):DHHKD (SEQ ID NO: 84149):EMVVE (SEQ ID NO: 84175):GXGXR (SEQ ID NO: 84208), HVTKPTX (SEQ ID NO: 84422):APTKL (SEQ ID NO: 84131):KPLS (SEQ ID NO: 84112):DDSSNVI (SEQ ID NO: 84965):DHHKD (SEQ ID NO: 84149):NMVVR (SEQ ID NO: 84275):SXGXH (SEQ ID NO: 84304), YVPKPXX (SEQ ID NO: 84433):APTKL (SEQ ID NO: 84131):KPLS (SEQ ID NO: 84112):DDSSNVI (SEQ ID NO: 84965):DHHKD (SEQ ID NO: 84149):NMVVR (SEQ ID NO: 84275):SXGXH (SEQ ID NO: 84304), TVPKPXX (SEQ ID NO: 84432):APTQL (SEQ ID NO: 84134):KPLS (SEQ ID NO: 84112):DDSSNVI (SEQ ID NO: 84965):DHHKD (SEQ ID NO: 84149):NMVVR (SEQ ID NO: 84275):AXGXH (SEQ ID NO: 84147), AVPKAXX (SEQ ID NO: 84404):APTKL (SEQ ID NO: 84131):KPLS (SEQ ID NO: 84112):DSSNNVI (SEQ ID NO: 84972):DHHKD (SEQ ID NO: 84149):NMVVK (SEQ ID NO: 84274):AXGXH (SEQ ID NO: 84147), KVGKAXX (SEQ ID NO: 84425):VPTKL (SEQ ID NO: 84381):KPLS (SEQ ID NO: 84112):DDMGVPT (SEQ ID NO: 84964):DHHKD (SEQ ID NO: 84149):EGMSVAE (SEQ ID NO: 84411):XGXR (SEQ ID NO: 84123), KASKAXX (SEQ ID NO: 84423):VPTKL (SEQ ID NO: 84381):KPLS (SEQ ID NO: 84112):DKGVVTY (SEQ ID NO: 84969):DHHKD (SEQ ID NO: 84149):GMAVS (SEQ ID NO: 84194):EXGXR (SEQ ID NO: 84179), GSAGPXX (SEQ ID NO: 84420):TPTKM (SEQ ID NO: 84327):KPLS (SEQ ID NO: 84112):NDKQQII (SEQ ID NO: 84979):DHHKD (SEQ ID NO: 84149):GMVVD (SEQ ID NO: 84204):RXGXS (SEQ ID NO: 84291), AAPASXX (SEQ ID NO: 84401):VPARL (SEQ ID NO: 84352):KPLS (SEQ ID NO: 84112):DAANNVV (SEQ ID NO: 84963):DHHKD (SEQ ID NO: 84149):DMVVE (SEQ ID NO: 84161):AXGXR (SEQ ID NO: 84148), STPPTXX (SEQ ID NO: 84431):VPTRL (SEQ ID NO: 84385):KPLS (SEQ ID NO: 84112):DSANNVV (SEQ ID NO: 84971):DHHKD (SEQ ID NO: 84149):DMVVE (SEQ ID NO: 84161):SXGXR (SEQ ID NO: 84305), HVPKPXX (SEQ ID NO: 84421):APTKL (SEQ ID NO: 84131):KPLS (SEQ ID NO: 84112):DDSSNVI (SEQ ID NO: 84965):DHHKD (SEQ ID NO: 84149):NMVVR (SEQ ID NO: 84275):SXGXH (SEQ ID NO: 84304), ASAAPXX (SEQ ID NO: 84402):VPQAL (SEQ ID NO: 84364):KPLS (SEQ ID NO: 84112):VGRKPKV (SEQ ID NO: 84981):DHHKD (SEQ ID NO: 84149):MIVRS (SEQ ID NO: 84243):XKXS (SEQ ID NO: 84124), ASASPXX (SEQ ID NO: 84403):VSQDL (SEQ ID NO: 84387):KPLS (SEQ ID NO: 84112):IGKTPKI (SEQ ID NO: 84978):DHHKD (SEQ ID NO: 84149):MIVKS (SEQ ID NO: 84242):XKXS (SEQ ID NO: 84124), ASASPXX (SEQ ID NO: 84403):VPQDL (SEQ ID NO: 84365):KPLS (SEQ ID NO: 84112):VGRTPKV (SEQ ID NO: 84982):DHHKD (SEQ ID NO: 84149):MVVKS (SEQ ID NO: 84256):XKXS (SEQ ID NO: 84124), NDEGLEX (SEQ ID NO: 84426):VPTEE (SEQ ID NO: 84377):KPLS (SEQ ID NO: 84112):RIKPHQGQH (SEQ ID NO: 84980):DHHKD (SEQ ID NO: 84149):FLQHN (SEQ ID NO: 84184):KXEXR (SEQ ID NO: 84213), NDEGLEX (SEQ ID NO: 84426):VPTGQ (SEQ ID NO: 84379):KPLS (SEQ ID NO: 84112):RIKPHQGQH (SEQ ID NO: 84980):DHHKD (SEQ ID NO: 84149):LEEHS (SEQ ID NO: 84217):QXEXR (SEQ ID NO: 84276), SSVKXQP (SEQ ID NO: 84430):SRVHH (SEQ ID NO: 84297):KPLS (SEQ ID NO: 84112):EYVRKKPKL (SEQ ID NO: 84974):DHHKD (SEQ ID NO: 84149):RLEEH (SEQ ID NO: 84279):LEXAXA (SEQ ID NO: 84400), RNVQXRP (SEQ ID NO: 84427):TQVQL (SEQ ID NO: 84340):KPLS (SEQ ID NO: 84112):EIVRKKPIF (SEQ ID NO: 84973):DHHKD (SEQ ID NO: 84149):TLEDH (SEQ ID NO: 84307):LAXKXE (SEQ ID NO: 84399), KIPKAXX (SEQ ID NO: 84424):VPQEL (SEQ ID NO: 84367):EPLP (SEQ ID NO: 84110):DENEKVV (SEQ ID NO: 84966):EQLSN (SEQ ID NO: 84178):DMVRS (SEQ ID NO: 84159):GXGXR (SEQ ID NO: 84208), GIPEPXX (SEQ ID NO: 84419):VPQKM (SEQ ID NO: 84371):EPLP (SEQ ID NO: 84110):DENKNVV (SEQ ID NO: 84967):EQLSN (SEQ ID NO: 84178):NMVRS (SEQ ID NO: 84271):SXAXR (SEQ ID NO: 84303), SIPKAXX (SEQ ID NO: 84429):VPQEL (SEQ ID NO: 84367):EPLP (SEQ ID NO: 84110):DEYDKVV (SEQ ID NO: 84968):EQLSN (SEQ ID NO: 84178):EMVRS (SEQ ID NO: 84173):GXGXR (SEQ ID NO: 84208), HVTKPTX (SEQ ID NO: 84422):VPQKL (SEQ ID NO: 84370):EPLP (SEQ ID NO: 84110):DDSSNVI (SEQ ID NO: 84965):EQLSN (SEQ ID NO: 84178):NMVRS (SEQ ID NO: 84271):SXGXH (SEQ ID NO: 84304), YVPKPXX (SEQ ID NO: 84433):VPQKL (SEQ ID NO: 84370):EPLP (SEQ ID NO: 84110):DDSSNVI (SEQ ID NO: 84965):EQLSN (SEQ ID NO: 84178):NMVRS (SEQ ID NO: 84271):SXGXH (SEQ ID NO: 84304), TVPKPXX (SEQ ID NO: 84432):VPQQL (SEQ ID NO: 84373):EPLP (SEQ ID NO: 84110):DDSSNVI (SEQ ID NO: 84965):EQLSN (SEQ ID NO: 84178):NMVRS (SEQ ID NO: 84271):AXGXH (SEQ ID NO: 84147), AVPKAXX (SEQ ID NO: 84404):VPQKL (SEQ ID NO: 84370):EPLP (SEQ ID NO: 84110):DSSNNVI (SEQ ID NO: 84972):EQLSN (SEQ ID NO: 84178):NMVRS (SEQ ID NO: 84271):AXGXH (SEQ ID NO: 84147), KVGKAXX (SEQ ID NO: 84425):VPQKL (SEQ ID NO: 84370):EPLP (SEQ ID NO: 84110):DDMGVPT (SEQ ID NO: 84964):EQLSN (SEQ ID NO: 84178):EGMSVRS (SEQ ID NO: 84414):XGXR (SEQ ID NO: 84123), KASKAXX (SEQ ID NO: 84423):VPQKL (SEQ ID NO: 84370):EPLP (SEQ ID NO: 84110):DKGVVTY (SEQ ID NO: 84969):EQLSN (SEQ ID NO: 84178):GMVRS (SEQ ID NO: 84203):EXGXR (SEQ ID NO: 84179), GSAGPXX (SEQ ID NO: 84420):VPQKM (SEQ ID NO: 84371):EPLP (SEQ ID NO: 84110):NDKQQII (SEQ ID NO: 84979):EQLSN (SEQ ID NO: 84178):GMVRS (SEQ ID NO: 84203):RXGXS (SEQ ID NO: 84291), AAPASXX (SEQ ID NO: 84401):VPQRL (SEQ ID NO: 84374):EPLP (SEQ ID NO: 84110):DAANNVV (SEQ ID NO: 84963):EQLSN (SEQ ID NO: 84178):DMVRS (SEQ ID NO: 84159):AXGXR (SEQ ID NO: 84148), STPPTXX (SEQ ID NO: 84431):VPQRL (SEQ ID NO: 84374):EPLP (SEQ ID NO: 84110):DSANNVV (SEQ ID NO: 84971):EQLSN (SEQ ID NO: 84178):DMVRS (SEQ ID NO: 84159):SXGXR (SEQ ID NO: 84305), HVPKPXX (SEQ ID NO: 84421):VPQKL (SEQ ID NO: 84370):EPLP (SEQ ID NO: 84110):DDSSNVI (SEQ ID NO: 84965):EQLSN (SEQ ID NO: 84178):NMVRS (SEQ ID NO: 84271):SXGXH (SEQ ID NO: 84304), RVPSTXX (SEQ ID NO: 84428):VPQKT (SEQ ID NO: 84372):EPLP (SEQ ID NO: 84110):DNGRVLL (SEQ ID NO: 84970):EQLSN (SEQ ID NO: 84178):MIVRS (SEQ ID NO: 84243):XGXL (SEQ ID NO: 84122), ASASPXX (SEQ ID NO: 84403):VPQDL (SEQ ID NO: 84365):EPLP (SEQ ID NO: 84110):IGKTPKI (SEQ ID NO: 84978):EQLSN (SEQ ID NO: 84178):MIVRS (SEQ ID NO: 84243):XKXS (SEQ ID NO: 84124), ASASPXX (SEQ ID NO: 84403):VPQDL (SEQ ID NO: 84365):EPLP (SEQ ID NO: 84110):VGRTPKV (SEQ ID NO: 84982):EQLSN (SEQ ID NO: 84178):MVVRS (SEQ ID NO: 84257):XKXS (SEQ ID NO: 84124), KIPKAXX (SEQ ID NO: 84424):VPTEL (SEQ ID NO: 84378):EPLP (SEQ ID NO: 84110):DENEKVV (SEQ ID NO: 84966):EQLSN (SEQ ID NO: 84178):DMVVE (SEQ ID NO: 84161):GXGXR (SEQ ID NO: 84208), GIPEPXX (SEQ ID NO: 84419):VPEKM (SEQ ID NO: 84360):EPLP (SEQ ID NO: 84110):DENKNVV (SEQ ID NO: 84967):EQLSN (SEQ ID NO: 84178):NMTVE (SEQ ID NO: 84267):SXAXR (SEQ ID NO: 84303), SIPKAXX (SEQ ID NO: 84429):VPTEL (SEQ ID NO: 84378):EPLP (SEQ ID NO: 84110):DEYDKVV (SEQ ID NO: 84968):EQLSN (SEQ ID NO: 84178):EMVVE (SEQ ID NO: 84175):GXGXR (SEQ ID NO: 84208), HVTKPTX (SEQ ID NO: 84422):APTKL (SEQ ID NO: 84131):EPLP (SEQ ID NO: 84110):DDSSNVI (SEQ ID NO: 84965):EQLSN (SEQ ID NO: 84178):NMVVR (SEQ ID NO: 84275):SXGXH (SEQ ID NO: 84304), YVPKPXX (SEQ ID NO: 84433):APTKL (SEQ ID NO: 84131):EPLP (SEQ ID NO: 84110):DDSSNVI (SEQ ID NO: 84965):EQLSN (SEQ ID NO: 84178):NMVVR (SEQ ID NO: 84275):SXGXH (SEQ ID NO: 84304), TVPKPXX (SEQ ID NO: 84432):APTQL (SEQ ID NO: 84134):EPLP (SEQ ID NO: 84110):DDSSNVI (SEQ ID NO: 84965):EQLSN (SEQ ID NO: 84178):NMVVR (SEQ ID NO: 84275):AXGXH (SEQ ID NO: 84147), AVPKAXX (SEQ ID NO: 84404):APTKL (SEQ ID NO: 84131):EPLP (SEQ ID NO: 84110):DSSNNVI (SEQ ID NO: 84972):EQLSN (SEQ ID NO: 84178):NMVVK (SEQ ID NO: 84274):AXGXH (SEQ ID NO: 84147), KVGKAXX (SEQ ID NO: 84425):VPTKL (SEQ ID NO: 84381):EPLP (SEQ ID NO: 84110):DDMGVPT (SEQ ID NO: 84964):EQLSN (SEQ ID NO: 84178):EGMSVAE (SEQ ID NO: 84411):XGXR (SEQ ID NO: 84123), KASKAXX (SEQ ID NO: 84423):VPTKL (SEQ ID NO: 84381):EPLP (SEQ ID NO: 84110):DKGVVTY (SEQ ID NO: 84969):EQLSN (SEQ ID NO: 84178):GMAVS (SEQ ID NO: 84194):EXGXR (SEQ ID NO: 84179), GSAGPXX (SEQ ID NO: 84420):TPTKM (SEQ ID NO: 84327):EPLP (SEQ ID NO: 84110):NDKQQII (SEQ ID NO: 84979):EQLSN (SEQ ID NO: 84178):GMVVD (SEQ ID NO: 84204):RXGXS (SEQ ID NO: 84291), AAPASXX (SEQ ID NO: 84401):VPARL (SEQ ID NO: 84352):EPLP (SEQ ID NO: 84110):DAANNVV (SEQ ID NO: 84963):EQLSN (SEQ ID NO: 84178):DMVVE (SEQ ID NO: 84161):AXGXR (SEQ ID NO: 84148), STPPTXX (SEQ ID NO: 84431):VPTRL (SEQ ID NO: 84385):EPLP (SEQ ID NO: 84110):DSANNVV (SEQ ID NO: 84971):EQLSN (SEQ ID NO: 84178):DMVVE (SEQ ID NO: 84161):SXGXR (SEQ ID NO: 84305), HVPKPXX (SEQ ID NO: 84421):APTKL (SEQ ID NO: 84131):EPLP (SEQ ID NO: 84110):DDSSNVI (SEQ ID NO: 84965):EQLSN (SEQ ID NO: 84178):NMVVR (SEQ ID NO: 84275):SXGXH (SEQ ID NO: 84304), RVPSTXX (SEQ ID NO: 84428):APVKT (SEQ ID NO: 84144):EPLP (SEQ ID NO: 84110):DNGRVLL (SEQ ID NO: 84970):EQLSN (SEQ ID NO: 84178):MIVEE (SEQ ID NO: 84241):XGXL (SEQ ID NO: 84122), ASASPXX (SEQ ID NO: 84403):VSQDL (SEQ ID NO: 84387):EPLP (SEQ ID NO: 84110):IGKTPKI (SEQ ID NO: 84978):EQLSN (SEQ ID NO: 84178):MIVKS (SEQ ID NO: 84242):XKXS (SEQ ID NO: 84124), ASASPXX (SEQ ID NO: 84403):VPQDL (SEQ ID NO: 84365):EPLP (SEQ ID NO: 84110):VGRTPKV (SEQ ID NO: 84982):EQLSN (SEQ ID NO: 84178):MVVKS (SEQ ID NO: 84256):XKXS (SEQ ID NO: 84124), NDEGLEX (SEQ ID NO: 84426):VPTEE (SEQ ID NO: 84377):EPLP (SEQ ID NO: 84110):RIKPHQGQH (SEQ ID NO: 84980):EQLSN (SEQ ID NO: 84178):FLQHN (SEQ ID NO: 84184):KXEXR (SEQ ID NO: 84213), NDEGLEX (SEQ ID NO: 84426):VPTGQ (SEQ ID NO: 84379):EPLP (SEQ ID NO: 84110):RIKPHQGQH (SEQ ID NO: 84980):EQLSN (SEQ ID NO: 84178):LEEHS (SEQ ID NO: 84217):QXEXR (SEQ ID NO: 84276), SSVKXQP (SEQ ID NO: 84430):SRVHH (SEQ ID NO: 84297):EPLP (SEQ ID NO: 84110):EYVRKKPKL (SEQ ID NO: 84974):EQLSN (SEQ ID NO: 84178):RLEEH (SEQ ID NO: 84279):LEXAXA (SEQ ID NO: 84400), RNVQXRP (SEQ ID NO: 84427):TQVQL (SEQ ID NO: 84340):EPLP (SEQ ID NO: 84110):EIVRKKPIF (SEQ ID NO: 84973):EQLSN (SEQ ID NO: 84178):TLEDH (SEQ ID NO: 84307):LAXKXE (SEQ ID NO: 84399), KIPKAXX (SEQ ID NO: 84424):VSQEL (SEQ ID NO: 84389):EPLT (SEQ ID NO: 84111):DENEKVV (SEQ ID NO: 84966):EQLSN (SEQ ID NO: 84178):DMVKS (SEQ ID NO: 84158):GXGXR (SEQ ID NO: 84208), GIPEPXX (SEQ ID NO: 84419):VSQKM (SEQ ID NO: 84393):EPLT (SEQ ID NO: 84111):DENKNVV (SEQ ID NO: 84967):EQLSN (SEQ ID NO: 84178):NMVKS (SEQ ID NO: 84270):SXAXR (SEQ ID NO: 84303), SIPKAXX (SEQ ID NO: 84429):VSQEL (SEQ ID NO: 84389):EPLT (SEQ ID NO: 84111):DEYDKVV (SEQ ID NO: 84968):EQLSN (SEQ ID NO: 84178):EMVKS (SEQ ID NO: 84172):GXGXR (SEQ ID NO: 84208), HVTKPTX (SEQ ID NO: 84422):VSQKL (SEQ ID NO: 84392):EPLT (SEQ ID NO: 84111):DDSSNVI (SEQ ID NO: 84965):EQLSN (SEQ ID NO: 84178):NMVKS (SEQ ID NO: 84270):SXGXH (SEQ ID NO: 84304), YVPKPXX (SEQ ID NO: 84433):VSQKL (SEQ ID NO: 84392):EPLT (SEQ ID NO: 84111):DDSSNVI (SEQ ID NO: 84965):EQLSN (SEQ ID NO: 84178):NMVKS (SEQ ID NO: 84270):SXGXH (SEQ ID NO: 84304), TVPKPXX (SEQ ID NO: 84432):VSQQL (SEQ ID NO: 84395):EPLT (SEQ ID NO: 84111):DDSSNVI (SEQ ID NO: 84965):EQLSN (SEQ ID NO: 84178):NMVKS (SEQ ID NO: 84270):AXGXH (SEQ ID NO: 84147), AVPKAXX (SEQ ID NO: 84404):VSQKL (SEQ ID NO: 84392):EPLT (SEQ ID NO: 84111):DSSNNVI (SEQ ID NO: 84972):EQLSN (SEQ ID NO: 84178):NMVKS (SEQ ID NO: 84270):AXGXH (SEQ ID NO: 84147), KVGKAXX (SEQ ID NO: 84425):VSQKL (SEQ ID NO: 84392):EPLT (SEQ ID NO: 84111):DDMGVPT (SEQ ID NO: 84964):EQLSN (SEQ ID NO: 84178):EGMSVKS (SEQ ID NO: 84413):XGXR (SEQ ID NO: 84123), KASKAXX (SEQ ID NO: 84423):VSQKL (SEQ ID NO: 84392):EPLT (SEQ ID NO: 84111):DKGVVTY (SEQ ID NO: 84969):EQLSN (SEQ ID NO: 84178):GMVKS (SEQ ID NO: 84202):EXGXR (SEQ ID NO: 84179), GSAGPXX (SEQ ID NO: 84420):VSQKM (SEQ ID NO: 84393):EPLT (SEQ ID NO: 84111):NDKQQII (SEQ ID NO: 84979):EQLSN (SEQ ID NO: 84178):GMVKS (SEQ ID NO: 84202):RXGXS (SEQ ID NO: 84291), AAPASXX (SEQ ID NO: 84401):VSQRL (SEQ ID NO: 84396):EPLT (SEQ ID NO: 84111):DAANNVV (SEQ ID NO: 84963):EQLSN (SEQ ID NO: 84178):DMVKS (SEQ ID NO: 84158):AXGXR (SEQ ID NO: 84148), STPPTXX (SEQ ID NO: 84431):VSQRL (SEQ ID NO: 84396):EPLT (SEQ ID NO: 84111):DSANNVV (SEQ ID NO: 84971):EQLSN (SEQ ID NO: 84178):DMVKS (SEQ ID NO: 84158):SXGXR (SEQ ID NO: 84305), HVPKPXX (SEQ ID NO: 84421):VSQKL (SEQ ID NO: 84392):EPLT (SEQ ID NO: 84111):DDSSNVI (SEQ ID NO: 84965):EQLSN (SEQ ID NO: 84178):NMVKS (SEQ ID NO: 84270):SXGXH (SEQ ID NO: 84304), RVPSTXX (SEQ ID NO: 84428):VSQKT (SEQ ID NO: 84394):EPLT (SEQ ID NO: 84111):DNGRVLL (SEQ ID NO: 84970):EQLSN (SEQ ID NO: 84178):MIVKS (SEQ ID NO: 84242):XGXL (SEQ ID NO: 84122), ASAAPXX (SEQ ID NO: 84402):VSQAL (SEQ ID NO: 84386):EPLT (SEQ ID NO: 84111):VGRKPKV (SEQ ID NO: 84981):EQLSN (SEQ ID NO: 84178):MIVKS (SEQ ID NO: 84242):XKXS (SEQ ID NO: 84124), ASASPXX (SEQ ID NO: 84403):VSQDL (SEQ ID NO: 84387):EPLT (SEQ ID NO: 84111):VGRTPKV (SEQ ID NO: 84982):EQLSN (SEQ ID NO: 84178):MVVKS (SEQ ID NO: 84256):XKXS (SEQ ID NO: 84124), KIPKAXX (SEQ ID NO: 84424):VPTEL (SEQ ID NO: 84378):EPLT (SEQ ID NO: 84111):DENEKVV (SEQ ID NO: 84966):EQLSN (SEQ ID NO: 84178):DMVVE (SEQ ID NO: 84161):GXGXR (SEQ ID NO: 84208), GIPEPXX (SEQ ID NO: 84419):VPEKM (SEQ ID NO: 84360):EPLT (SEQ ID NO: 84111):DENKNVV (SEQ ID NO: 84967):EQLSN (SEQ ID NO: 84178):NMTVE (SEQ ID NO: 84267):SXAXR (SEQ ID NO: 84303), SIPKAXX (SEQ ID NO: 84429):VPTEL (SEQ ID NO: 84378):EPLT (SEQ ID NO: 84111):DEYDKVV (SEQ ID NO: 84968):EQLSN (SEQ ID NO: 84178):EMVVE (SEQ ID NO: 84175):GXGXR (SEQ ID NO: 84208), HVTKPTX (SEQ ID NO: 84422):APTKL (SEQ ID NO: 84131):EPLT (SEQ ID NO: 84111):DDSSNVI (SEQ ID NO: 84965):EQLSN (SEQ ID NO: 84178):NMVVR (SEQ ID NO: 84275):SXGXH (SEQ ID NO: 84304), YVPKPXX (SEQ ID NO: 84433):APTKL (SEQ ID NO: 84131):EPLT (SEQ ID NO: 84111):DDSSNVI (SEQ ID NO: 84965):EQLSN (SEQ ID NO: 84178):NMVVR (SEQ ID NO: 84275):SXGXH (SEQ ID NO: 84304), TVPKPXX (SEQ ID NO: 84432):APTQL (SEQ ID NO: 84134):EPLT (SEQ ID NO: 84111):DDSSNVI (SEQ ID NO: 84965):EQLSN (SEQ ID NO: 84178):NMVVR (SEQ ID NO: 84275):AXGXH (SEQ ID NO: 84147), AVPKAXX (SEQ ID NO: 84404):APTKL (SEQ ID NO: 84131):EPLT (SEQ ID NO: 84111):DSSNNVI (SEQ ID NO: 84972):EQLSN (SEQ ID NO: 84178):NMVVK (SEQ ID NO: 84274):AXGXH (SEQ ID NO: 84147), KVGKAXX (SEQ ID NO: 84425):VPTKL (SEQ ID NO: 84381):EPLT (SEQ ID NO: 84111):DDMGVPT (SEQ ID NO: 84964):EQLSN (SEQ ID NO: 84178):EGMSVAE (SEQ ID NO: 84411):XGXR (SEQ ID NO: 84123), KASKAXX (SEQ ID NO: 84423):VPTKL (SEQ ID NO: 84381):EPLT (SEQ ID NO: 84111):DKGVVTY (SEQ ID NO: 84969):EQLSN (SEQ ID NO: 84178):GMAVS (SEQ ID NO: 84194):EXGXR (SEQ ID NO: 84179), GSAGPXX (SEQ ID NO: 84420):TPTKM (SEQ ID NO: 84327):EPLT (SEQ ID NO: 84111):NDKQQII (SEQ ID NO: 84979):EQLSN (SEQ ID NO: 84178):GMVVD (SEQ ID NO: 84204):RXGXS (SEQ ID NO: 84291), AAPASXX (SEQ ID NO: 84401):VPARL (SEQ ID NO: 84352):EPLT (SEQ ID NO: 84111):DAANNVV (SEQ ID NO: 84963):EQLSN (SEQ ID NO: 84178):DMVVE (SEQ ID NO: 84161):AXGXR (SEQ ID NO: 84148), STPPTXX (SEQ ID NO: 84431):VPTRL (SEQ ID NO: 84385):EPLT (SEQ ID NO: 84111):DSANNVV (SEQ ID NO: 84971):EQLSN (SEQ ID NO: 84178):DMVVE (SEQ ID NO: 84161):SXGXR (SEQ ID NO: 84305), HVPKPXX (SEQ ID NO: 84421):APTKL (SEQ ID NO: 84131):EPLT (SEQ ID NO: 84111):DDSSNVI (SEQ ID NO: 84965):EQLSN (SEQ ID NO: 84178):NMVVR (SEQ ID NO: 84275):SXGXH (SEQ ID NO: 84304), RVPSTXX (SEQ ID NO: 84428):APVKT (SEQ ID NO: 84144):EPLT (SEQ ID NO: 84111):DNGRVLL (SEQ ID NO: 84970):EQLSN (SEQ ID NO: 84178):MIVEE (SEQ ID NO: 84241):XGXL (SEQ ID NO: 84122), ASAAPXX (SEQ ID NO: 84402):VPQAL (SEQ ID NO: 84364):EPLT (SEQ ID NO: 84111):VGRKPKV (SEQ ID NO: 84981):EQLSN (SEQ ID NO: 84178):MIVRS (SEQ ID NO: 84243):XKXS (SEQ ID NO: 84124), NDEGLEX (SEQ ID NO: 84426):VPTEE (SEQ ID NO: 84377):EPLT (SEQ ID NO: 84111):RIKPHQGQH (SEQ ID NO: 84980):EQLSN (SEQ ID NO: 84178):FLQHN (SEQ ID NO: 84184):KXEXR (SEQ ID NO: 84213), NDEGLEX (SEQ ID NO: 84426):VPTGQ (SEQ ID NO: 84379):EPLT (SEQ ID NO: 84111):RIKPHQGQH (SEQ ID NO: 84980):EQLSN (SEQ ID NO: 84178):LEEHS (SEQ ID NO: 84217):QXEXR (SEQ ID NO: 84276), SSVKXQP (SEQ ID NO: 84430):SRVHH (SEQ ID NO: 84297):EPLT (SEQ ID NO: 84111):EYVRKKPKL (SEQ ID NO: 84974):EQLSN (SEQ ID NO: 84178):RLEEH (SEQ ID NO: 84279):LEXAXA (SEQ ID NO: 84400), RNVQXRP (SEQ ID NO: 84427):TQVQL (SEQ ID NO: 84340):EPLT (SEQ ID NO: 84111):EIVRKKPIF (SEQ ID NO: 84973):EQLSN (SEQ ID NO: 84178):TLEDH (SEQ ID NO: 84307):LAXKXE (SEQ ID NO: 84399), KIPKAXX (SEQ ID NO: 84424):VPQEL (SEQ ID NO: 84367):EPLT (SEQ ID NO: 84111):DENEKVV (SEQ ID NO: 84966):EQLSN (SEQ ID NO: 84178):DMVKS (SEQ ID NO: 84158):GXGXR (SEQ ID NO: 84208), GIPEPXX (SEQ ID NO: 84419):VPQKM (SEQ ID NO: 84371):EPLT (SEQ ID NO: 84111):DENKNVV (SEQ ID NO: 84967):EQLSN (SEQ ID NO: 84178):NMVKS (SEQ ID NO: 84270):SXAXR (SEQ ID NO: 84303), SIPKAXX (SEQ ID NO: 84429):VPQEL (SEQ ID NO: 84367):EPLT (SEQ ID NO: 84111):DEYDKVV (SEQ ID NO: 84968):EQLSN (SEQ ID NO: 84178):EMVKS (SEQ ID NO: 84172):GXGXR (SEQ ID NO: 84208), HVTKPTX (SEQ ID NO: 84422):VPQKL (SEQ ID NO: 84370):EPLT (SEQ ID NO: 84111):DDSSNVI (SEQ ID NO: 84965):EQLSN (SEQ ID NO: 84178):NMVKS (SEQ ID NO: 84270):SXGXH (SEQ ID NO: 84304), YVPKPXX (SEQ ID NO: 84433):VPQKL (SEQ ID NO: 84370):EPLT (SEQ ID NO: 84111):DDSSNVI (SEQ ID NO: 84965):EQLSN (SEQ ID NO: 84178):NMVKS (SEQ ID NO: 84270):SXGXH (SEQ ID NO: 84304), TVPKPXX (SEQ ID NO: 84432):VPQQL (SEQ ID NO: 84373):EPLT (SEQ ID NO: 84111):DDSSNVI (SEQ ID NO: 84965):EQLSN (SEQ ID NO: 84178):NMVKS (SEQ ID NO: 84270):AXGXH (SEQ ID NO: 84147), AVPKAXX (SEQ ID NO: 84404):VPQKL (SEQ ID NO: 84370):EPLT (SEQ ID NO: 84111):DSSNNVI (SEQ ID NO: 84972):EQLSN (SEQ ID NO: 84178):NMVKS (SEQ ID NO: 84270):AXGXH (SEQ ID NO: 84147), KVGKAXX (SEQ ID NO: 84425):VPQKL (SEQ ID NO: 84370):EPLT (SEQ ID NO: 84111):DDMGVPT (SEQ ID NO: 84964):EQLSN (SEQ ID NO: 84178):EGMSVKS (SEQ ID NO: 84413):XGXR (SEQ ID NO: 84123), KASKAXX (SEQ ID NO: 84423):VPQKL (SEQ ID NO: 84370):EPLT (SEQ ID NO: 84111):DKGVVTY (SEQ ID NO: 84969):EQLSN (SEQ ID NO: 84178):GMVKS (SEQ ID NO: 84202):EXGXR (SEQ ID NO: 84179), GSAGPXX (SEQ ID NO: 84420):VPQKM (SEQ ID NO: 84371):EPLT (SEQ ID NO: 84111):NDKQQII (SEQ ID NO: 84979):EQLSN (SEQ ID NO: 84178):GMVKS (SEQ ID NO: 84202):RXGXS (SEQ ID NO: 84291), AAPASXX (SEQ ID NO: 84401):VPQRL (SEQ ID NO: 84374):EPLT (SEQ ID NO: 84111):DAANNVV (SEQ ID NO: 84963):EQLSN (SEQ ID NO: 84178):DMVKS (SEQ ID NO: 84158):AXGXR (SEQ ID NO: 84148), STPPTXX (SEQ ID NO: 84431):VPQRL (SEQ ID NO: 84374):EPLT (SEQ ID NO: 84111):DSANNVV (SEQ ID NO: 84971):EQLSN (SEQ ID NO: 84178):DMVKS (SEQ ID NO: 84158):SXGXR (SEQ ID NO: 84305), HVPKPXX (SEQ ID NO: 84421):VPQKL (SEQ ID NO: 84370):EPLT (SEQ ID NO: 84111):DDSSNVI (SEQ ID NO: 84965):EQLSN (SEQ ID NO: 84178):NMVKS (SEQ ID NO: 84270):SXGXH (SEQ ID NO: 84304), RVPSTXX (SEQ ID NO: 84428):VPQKT (SEQ ID NO: 84372):EPLT (SEQ ID NO: 84111):DNGRVLL (SEQ ID NO: 84970):EQLSN (SEQ ID NO: 84178):MIVKS (SEQ ID NO: 84242):XGXL (SEQ ID NO: 84122), ASAAPXX (SEQ ID NO: 84402):VPQAL (SEQ ID NO: 84364):EPLT (SEQ ID NO: 84111):VGRKPKV (SEQ ID NO: 84981):EQLSN (SEQ ID NO: 84178):MIVKS (SEQ ID NO: 84242):XKXS (SEQ ID NO: 84124), ASASPXX (SEQ ID NO: 84403):VPQDL (SEQ ID NO: 84365):EPLT (SEQ ID NO: 84111):IGKTPKI (SEQ ID NO: 84978):EQLSN (SEQ ID NO: 84178):MIVKS (SEQ ID NO: 84242):XKXS (SEQ ID NO: 84124), NDEGLEX (SEQ ID NO: 84426):VPTGQ (SEQ ID NO: 84379):SNIT (SEQ ID NO: 84118):RIKPHQGQH (SEQ ID NO: 84980):IGEMS (SEQ ID NO: 84209):LEQHN (SEQ ID NO: 84218):QXEXR (SEQ ID NO: 84276), KIPKAXX (SEQ ID NO: 84424):VPTEL (SEQ ID NO: 84378):SNIT (SEQ ID NO: 84118):DENEKVV (SEQ ID NO: 84966):IGEMS (SEQ ID NO: 84209):DMVVE (SEQ ID NO: 84161):GXGXR (SEQ ID NO: 84208), GIPEPXX (SEQ ID NO: 84419):VPEKM (SEQ ID NO: 84360):SNIT (SEQ ID NO: 84118):DENKNVV (SEQ ID NO: 84967):IGEMS (SEQ ID NO: 84209):NMTVE (SEQ ID NO: 84267):SXAXR (SEQ ID NO: 84303), SIPKAXX (SEQ ID NO: 84429):VPTEL (SEQ ID NO: 84378):SNIT (SEQ ID NO: 84118):DEYDKVV (SEQ ID NO: 84968):IGEMS (SEQ ID NO: 84209):EMVVE (SEQ ID NO: 84175):GXGXR (SEQ ID NO: 84208), HVTKPTX (SEQ ID NO: 84422):APTKL (SEQ ID NO: 84131):SNIT (SEQ ID NO: 84118):DDSSNVI (SEQ ID NO: 84965):IGEMS (SEQ ID NO: 84209):NMVVR (SEQ ID NO: 84275):SXGXH (SEQ ID NO: 84304), YVPKPXX (SEQ ID NO: 84433):APTKL (SEQ ID NO: 84131):SNIT (SEQ ID NO: 84118):DDSSNVI (SEQ ID NO: 84965):IGEMS (SEQ ID NO: 84209):NMVVR (SEQ ID NO: 84275):SXGXH (SEQ ID NO: 84304), TVPKPXX (SEQ ID NO: 84432):APTQL (SEQ ID NO: 84134):SNIT (SEQ ID NO: 84118):DDSSNVI (SEQ ID NO: 84965):IGEMS (SEQ ID NO: 84209):NMVVR (SEQ ID NO: 84275):AXGXH (SEQ ID NO: 84147), AVPKAXX (SEQ ID NO: 84404):APTKL (SEQ ID NO: 84131):SNIT (SEQ ID NO: 84118):DSSNNVI (SEQ ID NO: 84972):IGEMS (SEQ ID NO: 84209):NMVVK (SEQ ID NO: 84274):AXGXH (SEQ ID NO: 84147), KVGKAXX (SEQ ID NO: 84425):VPTKL (SEQ ID NO: 84381):SNIT (SEQ ID NO: 84118):DDMGVPT (SEQ ID NO: 84964):IGEMS (SEQ ID NO: 84209):EGMSVAE (SEQ ID NO: 84411):XGXR (SEQ ID NO: 84123), KASKAXX (SEQ ID NO: 84423):VPTKL (SEQ ID NO: 84381):SNIT (SEQ ID NO: 84118):DKGVVTY (SEQ ID NO: 84969):IGEMS (SEQ ID NO: 84209):GMAVS (SEQ ID NO: 84194):EXGXR (SEQ ID NO: 84179), GSAGPXX (SEQ ID NO: 84420):TPTKM (SEQ ID NO: 84327):SNIT (SEQ ID NO: 84118):NDKQQII (SEQ ID NO: 84979):IGEMS (SEQ ID NO: 84209):GMVVD (SEQ ID NO: 84204):RXGXS (SEQ ID NO: 84291), AAPASXX (SEQ ID NO: 84401):VPARL (SEQ ID NO: 84352):SNIT (SEQ ID NO: 84118):DAANNVV (SEQ ID NO: 84963):IGEMS (SEQ ID NO: 84209):DMVVE (SEQ ID NO: 84161):AXGXR (SEQ ID NO: 84148), STPPTXX (SEQ ID NO: 84431):VPTRL (SEQ ID NO: 84385):SNIT (SEQ ID NO: 84118):DSANNVV (SEQ ID NO: 84971):IGEMS (SEQ ID NO: 84209):DMVVE (SEQ ID NO: 84161):SXGXR (SEQ ID NO: 84305), HVPKPXX (SEQ ID NO: 84421):APTKL (SEQ ID NO: 84131):SNIT (SEQ ID NO: 84118):DDSSNVI (SEQ ID NO: 84965):IGEMS (SEQ ID NO: 84209):NMVVR (SEQ ID NO: 84275):SXGXH (SEQ ID NO: 84304), RVPSTXX (SEQ ID NO: 84428):APVKT (SEQ ID NO: 84144):SNIT (SEQ ID NO: 84118):DNGRVLL (SEQ ID NO: 84970):IGEMS (SEQ ID NO: 84209):MIVEE (SEQ ID NO: 84241):XGXL (SEQ ID NO: 84122), ASAAPXX (SEQ ID NO: 84402):VPQAL (SEQ ID NO: 84364):SNIT (SEQ ID NO: 84118):VGRKPKV (SEQ ID NO: 84981):IGEMS (SEQ ID NO: 84209):MIVRS (SEQ ID NO: 84243):XKXS (SEQ ID NO: 84124), ASASPXX (SEQ ID NO: 84403):VSQDL (SEQ ID NO: 84387):SNIT (SEQ ID NO: 84118):IGKTPKI (SEQ ID NO: 84978):IGEMS (SEQ ID NO: 84209):MIVKS (SEQ ID NO: 84242):XKXS (SEQ ID NO: 84124), ASASPXX (SEQ ID NO: 84403):VPQDL (SEQ ID NO: 84365):SNIT (SEQ ID NO: 84118):VGRTPKV (SEQ ID NO: 84982):IGEMS (SEQ ID NO: 84209):MVVKS (SEQ ID NO: 84256):XKXS (SEQ ID NO: 84124), NDEGLEX (SEQ ID NO: 84426):VPTGQ (SEQ ID NO: 84379):SNIT (SEQ ID NO: 84118):RIKPHQGQH (SEQ ID NO: 84980):IGEMS (SEQ ID NO: 84209):LEEHS (SEQ ID NO: 84217):QXEXR (SEQ ID NO: 84276), SSVKXQP (SEQ ID NO: 84430):SRVHH (SEQ ID NO: 84297):SNIT (SEQ ID NO: 84118):EYVRKKPKL (SEQ ID NO: 84974):IGEMS (SEQ ID NO: 84209):RLEEH (SEQ ID NO: 84279):LEXAXA (SEQ ID NO: 84400), RNVQXRP (SEQ ID NO: 84427):TQVQL (SEQ ID NO: 84340):SNIT (SEQ ID NO: 84118):EIVRKKPIF (SEQ ID NO: 84973):IGEMS (SEQ ID NO: 84209):TLEDH (SEQ ID NO: 84307):LAXKXE (SEQ ID NO: 84399), NDEGLEX (SEQ ID NO: 84426):VPTEE (SEQ ID NO: 84377):SNIT (SEQ ID NO: 84118):RIKPHQGQH (SEQ ID NO: 84980):LGEMS (SEQ ID NO: 84228):FLEHS (SEQ ID NO: 84183):KXEXR (SEQ ID NO: 84213), KIPKAXX (SEQ ID NO: 84424):VPTEL (SEQ ID NO: 84378):SNIT (SEQ ID NO: 84118):DENEKVV (SEQ ID NO: 84966):LGEMS (SEQ ID NO: 84228):DMVVE (SEQ ID NO: 84161):GXGXR (SEQ ID NO: 84208), GIPEPXX (SEQ ID NO: 84419):VPEKM (SEQ ID NO: 84360):SNIT (SEQ ID NO: 84118):DENKNVV (SEQ ID NO: 84967):LGEMS (SEQ ID NO: 84228):NMTVE (SEQ ID NO: 84267):SXAXR (SEQ ID NO: 84303), SIPKAXX (SEQ ID NO: 84429):VPTEL (SEQ ID NO: 84378):SNIT (SEQ ID NO: 84118):DEYDKVV (SEQ ID NO: 84968):LGEMS (SEQ ID NO: 84228):EMVVE (SEQ ID NO: 84175):GXGXR (SEQ ID NO: 84208), HVTKPTX (SEQ ID NO: 84422):APTKL (SEQ ID NO: 84131):SNIT (SEQ ID NO: 84118):DDSSNVI (SEQ ID NO: 84965):LGEMS (SEQ ID NO: 84228):NMVVR (SEQ ID NO: 84275):SXGXH (SEQ ID NO: 84304), YVPKPXX (SEQ ID NO: 84433):APTKL (SEQ ID NO: 84131):SNIT (SEQ ID NO: 84118):DDSSNVI (SEQ ID NO: 84965):LGEMS (SEQ ID NO: 84228):NMVVR (SEQ ID NO: 84275):SXGXH (SEQ ID NO: 84304), TVPKPXX (SEQ ID NO: 84432):APTQL (SEQ ID NO: 84134):SNIT (SEQ ID NO: 84118):DDSSNVI (SEQ ID NO: 84965):LGEMS (SEQ ID NO: 84228):NMVVR (SEQ ID NO: 84275):AXGXH (SEQ ID NO: 84147), AVPKAXX (SEQ ID NO: 84404):APTKL (SEQ ID NO: 84131):SNIT (SEQ ID NO: 84118):DSSNNVI (SEQ ID NO: 84972):LGEMS (SEQ ID NO: 84228):NMVVK (SEQ ID NO: 84274):AXGXH (SEQ ID NO: 84147), KVGKAXX (SEQ ID NO: 84425):VPTKL (SEQ ID NO: 84381):SNIT (SEQ ID NO: 84118):DDMGVPT (SEQ ID NO: 84964):LGEMS (SEQ ID NO: 84228):EGMSVAE (SEQ ID NO: 84411):XGXR (SEQ ID NO: 84123), KASKAXX (SEQ ID NO: 84423):VPTKL (SEQ ID NO: 84381):SNIT (SEQ ID NO: 84118):DKGVVTY (SEQ ID NO: 84969):LGEMS (SEQ ID NO: 84228):GMAVS (SEQ ID NO: 84194):EXGXR (SEQ ID NO: 84179), GSAGPXX (SEQ ID NO: 84420):TPTKM (SEQ ID NO: 84327):SNIT (SEQ ID NO: 84118):NDKQQII (SEQ ID NO: 84979):LGEMS (SEQ ID NO: 84228):GMVVD (SEQ ID NO: 84204):RXGXS (SEQ ID NO: 84291), AAPASXX (SEQ ID NO: 84401):VPARL (SEQ ID NO: 84352):SNIT (SEQ ID NO: 84118):DAANNVV (SEQ ID NO: 84963):LGEMS (SEQ ID NO: 84228):DMVVE (SEQ ID NO: 84161):AXGXR (SEQ ID NO: 84148), STPPTXX (SEQ ID NO: 84431):VPTRL (SEQ ID NO: 84385):SNIT (SEQ ID NO: 84118):DSANNVV (SEQ ID NO: 84971):LGEMS (SEQ ID NO: 84228):DMVVE (SEQ ID NO: 84161):SXGXR (SEQ ID NO: 84305), HVPKPXX (SEQ ID NO: 84421):APTKL (SEQ ID NO: 84131):SNIT (SEQ ID NO: 84118):DDSSNVI (SEQ ID NO: 84965):LGEMS (SEQ ID NO: 84228):NMVVR (SEQ ID NO: 84275):SXGXH (SEQ ID NO: 84304), RVPSTXX (SEQ ID NO: 84428):APVKT (SEQ ID NO: 84144):SNIT (SEQ ID NO: 84118):DNGRVLL (SEQ ID NO: 84970):LGEMS (SEQ ID NO: 84228):MIVEE (SEQ ID NO: 84241):XGXL (SEQ ID NO: 84122), ASAAPXX (SEQ ID NO: 84402):VPQAL (SEQ ID NO: 84364):SNIT (SEQ ID NO: 84118):VGRKPKV (SEQ ID NO: 84981):LGEMS (SEQ ID NO: 84228):MIVRS (SEQ ID NO: 84243):XKXS (SEQ ID NO: 84124), ASASPXX (SEQ ID NO: 84403):VSQDL (SEQ ID NO: 84387):SNIT (SEQ ID NO: 84118):IGKTPKI (SEQ ID NO: 84978):LGEMS (SEQ ID NO: 84228):MIVKS (SEQ ID NO: 84242):XKXS (SEQ ID NO: 84124), ASASPXX (SEQ ID NO: 84403):VPQDL (SEQ ID NO: 84365):SNIT (SEQ ID NO: 84118):VGRTPKV (SEQ ID NO: 84982):LGEMS (SEQ ID NO: 84228):MVVKS (SEQ ID NO: 84256):XKXS (SEQ ID NO: 84124), NDEGLEX (SEQ ID NO: 84426):VPTEE (SEQ ID NO: 84377):SNIT (SEQ ID NO: 84118):RIKPHQGQH (SEQ ID NO: 84980):LGEMS (SEQ ID NO: 84228):FLQHN (SEQ ID NO: 84184):KXEXR (SEQ ID NO: 84213), SSVKXQP (SEQ ID NO: 84430):SRVHH (SEQ ID NO: 84297):SNIT (SEQ ID NO: 84118):EYVRKKPKL (SEQ ID NO: 84974):LGEMS (SEQ ID NO: 84228):RLEEH (SEQ ID NO: 84279):LEXAXA (SEQ ID NO: 84400), RNVQXRP (SEQ ID NO: 84427):TQVQL (SEQ ID NO: 84340):SNIT (SEQ ID NO: 84118):EIVRKKPIF (SEQ ID NO: 84973):LGEMS (SEQ ID NO: 84228):TLEDH (SEQ ID NO: 84307):LAXKXE (SEQ ID NO: 84399), RNVQXRP (SEQ ID NO: 84427):SRVQL (SEQ ID NO: 84301):RSVK (SEQ ID NO: 84115):EIVRKKPIF (SEQ ID NO: 84973):KEVQV (SEQ ID NO: 84210):TLEEH (SEQ ID NO: 84308):LAXKXE (SEQ ID NO: 84399), KIPKAXX (SEQ ID NO: 84424):VPTEL (SEQ ID NO: 84378):RSVK (SEQ ID NO: 84115):DENEKVV (SEQ ID NO: 84966):KEVQV (SEQ ID NO: 84210):DMVVE (SEQ ID NO: 84161):GXGXR (SEQ ID NO: 84208), GIPEPXX (SEQ ID NO: 84419):VPEKM (SEQ ID NO: 84360):RSVK (SEQ ID NO: 84115):DENKNVV (SEQ ID NO: 84967):KEVQV (SEQ ID NO: 84210):NMTVE (SEQ ID NO: 84267):SXAXR (SEQ ID NO: 84303), SIPKAXX (SEQ ID NO: 84429):VPTEL (SEQ ID NO: 84378):RSVK (SEQ ID NO: 84115):DEYDKVV (SEQ ID NO: 84968):KEVQV (SEQ ID NO: 84210):EMVVE (SEQ ID NO: 84175):GXGXR (SEQ ID NO: 84208), HVTKPTX (SEQ ID NO: 84422):APTKL (SEQ ID NO: 84131):RSVK (SEQ ID NO: 84115):DDSSNVI (SEQ ID NO: 84965):KEVQV (SEQ ID NO: 84210):NMVVR (SEQ ID NO: 84275):SXGXH (SEQ ID NO: 84304), YVPKPXX (SEQ ID NO: 84433):APTKL (SEQ ID NO: 84131):RSVK (SEQ ID NO: 84115):DDSSNVI (SEQ ID NO: 84965):KEVQV (SEQ ID NO: 84210):NMVVR (SEQ ID NO: 84275):SXGXH (SEQ ID NO: 84304), TVPKPXX (SEQ ID NO: 84432):APTQL (SEQ ID NO: 84134):RSVK (SEQ ID NO: 84115):DDSSNVI (SEQ ID NO: 84965):KEVQV (SEQ ID NO: 84210):NMVVR (SEQ ID NO: 84275):AXGXH (SEQ ID NO: 84147), AVPKAXX (SEQ ID NO: 84404):APTKL (SEQ ID NO: 84131):RSVK (SEQ ID NO: 84115):DSSNNVI (SEQ ID NO: 84972):KEVQV (SEQ ID NO: 84210):NMVVK (SEQ ID NO: 84274):AXGXH (SEQ ID NO: 84147), KVGKAXX (SEQ ID NO: 84425):VPTKL (SEQ ID NO: 84381):RSVK (SEQ ID NO: 84115):DDMGVPT (SEQ ID NO: 84964):KEVQV (SEQ ID NO: 84210):EGMSVAE (SEQ ID NO: 84411):XGXR (SEQ ID NO: 84123), KASKAXX (SEQ ID NO: 84423):VPTKL (SEQ ID NO: 84381):RSVK (SEQ ID NO: 84115):DKGVVTY (SEQ ID NO: 84969):KEVQV (SEQ ID NO: 84210):GMAVS (SEQ ID NO: 84194):EXGXR (SEQ ID NO: 84179), GSAGPXX (SEQ ID NO: 84420):TPTKM (SEQ ID NO: 84327):RSVK (SEQ ID NO: 84115):NDKQQII (SEQ ID NO: 84979):KEVQV (SEQ ID NO: 84210):GMVVD (SEQ ID NO: 84204):RXGXS (SEQ ID NO: 84291), AAPASXX (SEQ ID NO: 84401):VPARL (SEQ ID NO: 84352):RSVK (SEQ ID NO: 84115):DAANNVV (SEQ ID NO: 84963):KEVQV (SEQ ID NO: 84210):DMVVE (SEQ ID NO: 84161):AXGXR (SEQ ID NO: 84148), STPPTXX (SEQ ID NO: 84431):VPTRL (SEQ ID NO: 84385):RSVK (SEQ ID NO: 84115):DSANNVV (SEQ ID NO: 84971):KEVQV (SEQ ID NO: 84210):DMVVE (SEQ ID NO: 84161):SXGXR (SEQ ID NO: 84305), HVPKPXX (SEQ ID NO: 84421):APTKL (SEQ ID NO: 84131):RSVK (SEQ ID NO: 84115):DDSSNVI (SEQ ID NO: 84965):KEVQV (SEQ ID NO: 84210):NMVVR (SEQ ID NO: 84275):SXGXH (SEQ ID NO: 84304), RVPSTXX (SEQ ID NO: 84428):APVKT (SEQ ID NO: 84144):RSVK (SEQ ID NO: 84115):DNGRVLL (SEQ ID NO: 84970):KEVQV (SEQ ID NO: 84210):MIVEE (SEQ ID NO: 84241):XGXL (SEQ ID NO: 84122), ASAAPXX (SEQ ID NO: 84402):VPQAL (SEQ ID NO: 84364):RSVK (SEQ ID NO: 84115):VGRKPKV (SEQ ID NO: 84981):KEVQV (SEQ ID NO: 84210):MIVRS (SEQ ID NO: 84243):XKXS (SEQ ID NO: 84124), ASASPXX (SEQ ID NO: 84403):VSQDL (SEQ ID NO: 84387):RSVK (SEQ ID NO: 84115):IGKTPKI (SEQ ID NO: 84978):KEVQV (SEQ ID NO: 84210):MIVKS (SEQ ID NO: 84242):XKXS (SEQ ID NO: 84124), ASASPXX (SEQ ID NO: 84403):VPQDL (SEQ ID NO: 84365):RSVK (SEQ ID NO: 84115):VGRTPKV (SEQ ID NO: 84982):KEVQV (SEQ ID NO: 84210):MVVKS (SEQ ID NO: 84256):XKXS (SEQ ID NO: 84124), NDEGLEX (SEQ ID NO: 84426):VPTEE (SEQ ID NO: 84377):RSVK (SEQ ID NO: 84115):RIKPHQGQH (SEQ ID NO: 84980):KEVQV (SEQ ID NO: 84210):FLQHN (SEQ ID NO: 84184):KXEXR (SEQ ID NO: 84213), NDEGLEX (SEQ ID NO: 84426):VPTGQ (SEQ ID NO: 84379):RSVK (SEQ ID NO: 84115):RIKPHQGQH (SEQ ID NO: 84980):KEVQV (SEQ ID NO: 84210):LEEHS (SEQ ID NO: 84217):QXEXR (SEQ ID NO: 84276), RNVQXRP (SEQ ID NO: 84427):TQVQL (SEQ ID NO: 84340):RSVK (SEQ ID NO: 84115):EIVRKKPIF (SEQ ID NO: 84973):KEVQV (SEQ ID NO: 84210):TLEDH (SEQ ID NO: 84307):LAXKXE (SEQ ID NO: 84399), SSVKXQP (SEQ ID NO: 84430):TQVHH (SEQ ID NO: 84336):RPVQ (SEQ ID NO: 84114):EYVRKKPKL (SEQ ID NO: 84974):KKATV (SEQ ID NO: 84212):RLEDH (SEQ ID NO: 84278):LEXAXA (SEQ ID NO: 84400), KIPKAXX (SEQ ID NO: 84424):VPTEL (SEQ ID NO: 84378):RPVQ (SEQ ID NO: 84114):DENEKVV (SEQ ID NO: 84966):KKATV (SEQ ID NO: 84212):DMVVE (SEQ ID NO: 84161):GXGXR (SEQ ID NO: 84208), GIPEPXX (SEQ ID NO: 84419):VPEKM (SEQ ID NO: 84360):RPVQ (SEQ ID NO: 84114):DENKNVV (SEQ ID NO: 84967):KKATV (SEQ ID NO: 84212):NMTVE (SEQ ID NO: 84267):SXAXR (SEQ ID NO: 84303), SIPKAXX (SEQ ID NO: 84429):VPTEL (SEQ ID NO: 84378):RPVQ (SEQ ID NO: 84114):DEYDKVV (SEQ ID NO: 84968):KKATV (SEQ ID NO: 84212):EMVVE (SEQ ID NO: 84175):GXGXR (SEQ ID NO: 84208), HVTKPTX (SEQ ID NO: 84422):APTKL (SEQ ID NO: 84131):RPVQ (SEQ ID NO: 84114):DDSSNVI (SEQ ID NO: 84965):KKATV (SEQ ID NO: 84212):NMVVR (SEQ ID NO: 84275):SXGXH (SEQ ID NO: 84304), YVPKPXX (SEQ ID NO: 84433):APTKL (SEQ ID NO: 84131):RPVQ (SEQ ID NO: 84114):DDSSNVI (SEQ ID NO: 84965):KKATV (SEQ ID NO: 84212):NMVVR (SEQ ID NO: 84275):SXGXH (SEQ ID NO: 84304), TVPKPXX (SEQ ID NO: 84432):APTQL (SEQ ID NO: 84134):RPVQ (SEQ ID NO: 84114):DDSSNVI (SEQ ID NO: 84965):KKATV (SEQ ID NO: 84212):NMVVR (SEQ ID NO: 84275):AXGXH (SEQ ID NO: 84147), AVPKAXX (SEQ ID NO: 84404):APTKL (SEQ ID NO: 84131):RPVQ (SEQ ID NO: 84114):DSSNNVI (SEQ ID NO: 84972):KKATV (SEQ ID NO: 84212):NMVVK (SEQ ID NO: 84274):AXGXH (SEQ ID NO: 84147), KVGKAXX (SEQ ID NO: 84425):VPTKL (SEQ ID NO: 84381):RPVQ (SEQ ID NO: 84114):DDMGVPT (SEQ ID NO: 84964):KKATV (SEQ ID NO: 84212):EGMSVAE (SEQ ID NO: 84411):XGXR (SEQ ID NO: 84123), KASKAXX (SEQ ID NO: 84423):VPTKL (SEQ ID NO: 84381):RPVQ (SEQ ID NO: 84114):DKGVVTY (SEQ ID NO: 84969):KKATV (SEQ ID NO: 84212):GMAVS (SEQ ID NO: 84194):EXGXR (SEQ ID NO: 84179), GSAGPXX (SEQ ID NO: 84420):TPTKM (SEQ ID NO: 84327):RPVQ (SEQ ID NO: 84114):NDKQQII (SEQ ID NO: 84979):KKATV (SEQ ID NO: 84212):GMVVD (SEQ ID NO: 84204):RXGXS (SEQ ID NO: 84291), AAPASXX (SEQ ID NO: 84401):VPARL (SEQ ID NO: 84352):RPVQ (SEQ ID NO: 84114):DAANNVV (SEQ ID NO: 84963):KKATV (SEQ ID NO: 84212):DMVVE (SEQ ID NO: 84161):AXGXR (SEQ ID NO: 84148), STPPTXX (SEQ ID NO: 84431):VPTRL (SEQ ID NO: 84385):RPVQ (SEQ ID NO: 84114):DSANNVV (SEQ ID NO: 84971):KKATV (SEQ ID NO: 84212):DMVVE (SEQ ID NO: 84161):SXGXR (SEQ ID NO: 84305), HVPKPXX (SEQ ID NO: 84421):APTKL (SEQ ID NO: 84131):RPVQ (SEQ ID NO: 84114):DDSSNVI (SEQ ID NO: 84965):KKATV (SEQ ID NO: 84212):NMVVR (SEQ ID NO: 84275):SXGXH (SEQ ID NO: 84304), RVPSTXX (SEQ ID NO: 84428):APVKT (SEQ ID NO: 84144):RPVQ (SEQ ID NO: 84114):DNGRVLL (SEQ ID NO: 84970):KKATV (SEQ ID NO: 84212):MIVEE (SEQ ID NO: 84241):XGXL (SEQ ID NO: 84122), ASAAPXX (SEQ ID NO: 84402):VPQAL (SEQ ID NO: 84364):RPVQ (SEQ ID NO: 84114):VGRKPKV (SEQ ID NO: 84981):KKATV (SEQ ID NO: 84212):MIVRS (SEQ ID NO: 84243):XKXS (SEQ ID NO: 84124), ASASPXX (SEQ ID NO: 84403):VSQDL (SEQ ID NO: 84387):RPVQ (SEQ ID NO: 84114):IGKTPKI (SEQ ID NO: 84978):KKATV (SEQ ID NO: 84212):MIVKS (SEQ ID NO: 84242):XKXS (SEQ ID NO: 84124), ASASPXX (SEQ ID NO: 84403):VPQDL (SEQ ID NO: 84365):RPVQ (SEQ ID NO: 84114):VGRTPKV (SEQ ID NO: 84982):KKATV (SEQ ID NO: 84212):MVVKS (SEQ ID NO: 84256):XKXS (SEQ ID NO: 84124), NDEGLEX (SEQ ID NO: 84426):VPTEE (SEQ ID NO: 84377):RPVQ (SEQ ID NO: 84114):RIKPHQGQH (SEQ ID NO: 84980):KKATV (SEQ ID NO: 84212):FLQHN (SEQ ID NO: 84184):KXEXR (SEQ ID NO: 84213), NDEGLEX (SEQ ID NO: 84426):VPTGQ (SEQ ID NO: 84379):RPVQ (SEQ ID NO: 84114):RIKPHQGQH (SEQ ID NO: 84980):KKATV (SEQ ID NO: 84212):LEEHS (SEQ ID NO: 84217):QXEXR (SEQ ID NO: 84276) and SSVKXQP (SEQ ID NO: 84430):SRVHH (SEQ ID NO: 84297):RPVQ (SEQ ID NO: 84114):EYVRKKPKL (SEQ ID NO: 84974):KKATV (SEQ ID NO: 84212):RLEEH (SEQ ID NO: 84279):LEXAXA (SEQ ID NO: 84400). In particular, in certain embodiments, the heptuplet PEP7:PEP5:PEP12:LINKER:PEP2:PEP6:PEP8 is selected from the group consisting of GIPEPXX (SEQ ID NO: 84419):VPTKM (SEQ ID NO: 84382):SAIS-AA¹⁷-LYL (SEQ ID NO: 84881):DENKNVV (SEQ ID NO: 84967):LKNYQ (SEQ ID NO: 84230):NMVVE (SEQ ID NO: 84273):SXAXR (SEQ ID NO: 84303), SIPKAXX (SEQ ID NO: 84429):VPTEL (SEQ ID NO: 84378):SAIS-AA¹⁷-LYL (SEQ ID NO: 84881):DEYDKVV (SEQ ID NO: 84968):LKNYQ (SEQ ID NO: 84230):EMVVE (SEQ ID NO: 84175):GXGXR (SEQ ID NO: 84208), HVTKPTX (SEQ ID NO: 84422):VPTKL (SEQ ID NO: 84381):SAIS-AA¹⁷-LYL (SEQ ID NO: 84881):DDSSNVI (SEQ ID NO: 84965):LKNYQ (SEQ ID NO: 84230):NMVVE (SEQ ID NO: 84273):SXGXH (SEQ ID NO: 84304), YVPKPXX (SEQ ID NO: 84433):VPTKL (SEQ ID NO: 84381):SAIS-AA¹⁷-LYL (SEQ ID NO: 84881):DDSSNVI (SEQ ID NO: 84965):LKNYQ (SEQ ID NO: 84230):NMVVE (SEQ ID NO: 84273):SXGXH (SEQ ID NO: 84304), TVPKPXX (SEQ ID NO: 84432):VPTQL (SEQ ID NO: 84384):SAIS-AA¹⁷-LYL (SEQ ID NO: 84881):DDSSNVI (SEQ ID NO: 84965):LKNYQ (SEQ ID NO: 84230):NMVVE (SEQ ID NO: 84273):AXGXH (SEQ ID NO: 84147), AVPKAXX (SEQ ID NO: 84404):VPTKL (SEQ ID NO: 84381):SAIS-AA¹⁷-LYL (SEQ ID NO: 84881):DSSNNVI (SEQ ID NO: 84972):LKNYQ (SEQ ID NO: 84230):NMVVE (SEQ ID NO: 84273):AXGXH (SEQ ID NO: 84147), KVGKAXX (SEQ ID NO: 84425):VPTKL (SEQ ID NO: 84381):SAIS-AA¹⁷-LYL (SEQ ID NO: 84881):DDMGVPT (SEQ ID NO: 84964):LKNYQ (SEQ ID NO: 84230):EGMSVVE (SEQ ID NO: 84416):XGXR (SEQ ID NO: 84123), KASKAXX (SEQ ID NO: 84423):VPTKL (SEQ ID NO: 84381):SAIS-AA¹⁷-LYL (SEQ ID NO: 84881):DKGVVTY (SEQ ID NO: 84969):LKNYQ (SEQ ID NO: 84230):GMVVE (SEQ ID NO: 84205):EXGXR (SEQ ID NO: 84179), GSAGPXX (SEQ ID NO: 84420):VPTKM (SEQ ID NO: 84382):SAIS-AA¹⁷-LYL (SEQ ID NO: 84881):NDKQQII (SEQ ID NO: 84979):LKNYQ (SEQ ID NO: 84230):GMVVE (SEQ ID NO: 84205):RXGXS (SEQ ID NO: 84291), AAPASXX (SEQ ID NO: 84401):VPTRL (SEQ ID NO: 84385):SAIS-AA¹⁷-LYL (SEQ ID NO: 84881):DAANNVV (SEQ ID NO: 84963):LKNYQ (SEQ ID NO: 84230):DMVVE (SEQ ID NO: 84161):AXGXR (SEQ ID NO: 84148), STPPTXX (SEQ ID NO: 84431):VPTRL (SEQ ID NO: 84385):SAIS-AA¹⁷-LYL (SEQ ID NO: 84881):DSANNVV (SEQ ID NO: 84971):LKNYQ (SEQ ID NO: 84230):DMVVE (SEQ ID NO: 84161):SXGXR (SEQ ID NO: 84305), HVPKPXX (SEQ ID NO: 84421):VPTKL (SEQ ID NO: 84381):SAIS-AA¹⁷-LYL (SEQ ID NO: 84881):DDSSNVI (SEQ ID NO: 84965):LKNYQ (SEQ ID NO: 84230):NMVVE (SEQ ID NO: 84273):SXGXH (SEQ ID NO: 84304), RVPSTXX (SEQ ID NO: 84428):VPTKT (SEQ ID NO: 84383):SAIS-AA¹⁷-LYL (SEQ ID NO: 84881):DNGRVLL (SEQ ID NO: 84970):LKNYQ (SEQ ID NO: 84230):MIVVE (SEQ ID NO: 84245):XGXL (SEQ ID NO: 84122), ASAAPXX (SEQ ID NO: 84402):VPTAL (SEQ ID NO: 84375):SAIS-AA¹⁷-LYL (SEQ ID NO: 84881):VGRKPKV (SEQ ID NO: 84981):LKNYQ (SEQ ID NO: 84230):MIVVE (SEQ ID NO: 84245):XKXS (SEQ ID NO: 84124), ASASPXX (SEQ ID NO: 84403):VPTDL (SEQ ID NO: 84376):SAIS-AA¹⁷-LYL (SEQ ID NO: 84881):IGKTPKI (SEQ ID NO: 84978):LKNYQ (SEQ ID NO: 84230):MIVVE (SEQ ID NO: 84245):XKXS (SEQ ID NO: 84124), ASASPXX (SEQ ID NO: 84403):VPTDL (SEQ ID NO: 84376):SAIS-AA¹⁷-LYL (SEQ ID NO: 84881):VGRTPKV (SEQ ID NO: 84982):LKNYQ (SEQ ID NO: 84230):MVVVE (SEQ ID NO: 84259):XKXS (SEQ ID NO: 84124), NDEGLEX (SEQ ID NO: 84426):VPTEE (SEQ ID NO: 84377):SAIS-AA¹⁷-LYL (SEQ ID NO: 84881):RIKPHQGQH (SEQ ID NO: 84980):LKNYQ (SEQ ID NO: 84230):FLVVE (SEQ ID NO: 84191):KXEXR (SEQ ID NO: 84213), NDEGLEX (SEQ ID NO: 84426):VPTGQ (SEQ ID NO: 84379):SAIS-AA¹⁷-LYL (SEQ ID NO: 84881):RIKPHQGQH (SEQ ID NO: 84980):LKNYQ (SEQ ID NO: 84230):LEVVE (SEQ ID NO: 84225):QXEXR (SEQ ID NO: 84276), SSVKXQP (SEQ ID NO: 84430):VPTHH (SEQ ID NO: 84380):SAIS-AA¹⁷-LYL (SEQ ID NO: 84881):EYVRKKPKL (SEQ ID NO: 84974):LKNYQ (SEQ ID NO: 84230):RLVVE (SEQ ID NO: 84288):LEXAXA (SEQ ID NO: 84400), RNVQXRP (SEQ ID NO: 84427):VPTQL (SEQ ID NO: 84384):SAIS-AA¹⁷-LYL (SEQ ID NO: 84881):EIVRKKPIF (SEQ ID NO: 84973):LKNYQ (SEQ ID NO: 84230):TLVVE (SEQ ID NO: 84317):LAXKXE (SEQ ID NO: 84399), GIPEPXX (SEQ ID NO: 84419):VPEKM (SEQ ID NO: 84360):SAIS-AA¹⁷-LYL (SEQ ID NO: 84881):DENKNVV (SEQ ID NO: 84967):LKNYQ (SEQ ID NO: 84230):NMTVE (SEQ ID NO: 84267):SXAXR (SEQ ID NO: 84303), HVTKPTX (SEQ ID NO: 84422):APTKL (SEQ ID NO: 84131):SAIS-AA¹⁷-LYL (SEQ ID NO: 84881):DDSSNVI (SEQ ID NO: 84965):LKNYQ (SEQ ID NO: 84230):NMVVR (SEQ ID NO: 84275):SXGXH (SEQ ID NO: 84304), YVPKPXX (SEQ ID NO: 84433):APTKL (SEQ ID NO: 84131):SAIS-AA¹⁷-LYL (SEQ ID NO: 84881):DDSSNVI (SEQ ID NO: 84965):LKNYQ (SEQ ID NO: 84230):NMVVR (SEQ ID NO: 84275):SXGXH (SEQ ID NO: 84304), TVPKPXX (SEQ ID NO: 84432):APTQL (SEQ ID NO: 84134):SAIS-AA¹⁷-LYL (SEQ ID NO: 84881):DDSSNVI (SEQ ID NO: 84965):LKNYQ (SEQ ID NO: 84230):NMVVR (SEQ ID NO: 84275):AXGXH (SEQ ID NO: 84147), AVPKAXX (SEQ ID NO: 84404):APTKL (SEQ ID NO: 84131):SAIS-AA¹⁷-LYL (SEQ ID NO: 84881):DSSNNVI (SEQ ID NO: 84972):LKNYQ (SEQ ID NO: 84230):NMVVK (SEQ ID NO: 84274):AXGXH (SEQ ID NO: 84147), KVGKAXX (SEQ ID NO: 84425):VPTKL (SEQ ID NO: 84381):SAIS-AA¹⁷-LYL (SEQ ID NO: 84881):DDMGVPT (SEQ ID NO: 84964):LKNYQ (SEQ ID NO: 84230):EGMSVAE (SEQ ID NO: 84411):XGXR (SEQ ID NO: 84123), KASKAXX (SEQ ID NO: 84423):VPTKL (SEQ ID NO: 84381):SAIS-AA¹⁷-LYL (SEQ ID NO: 84881):DKGVVTY (SEQ ID NO: 84969):LKNYQ (SEQ ID NO: 84230):GMAVS (SEQ ID NO: 84194):EXGXR (SEQ ID NO: 84179), GSAGPXX (SEQ ID NO: 84420):TPTKM (SEQ ID NO: 84327):SAIS-AA¹⁷-LYL (SEQ ID NO: 84881):NDKQQII (SEQ ID NO: 84979):LKNYQ (SEQ ID NO: 84230):GMVVD (SEQ ID NO: 84204):RXGXS (SEQ ID NO: 84291), AAPASXX (SEQ ID NO: 84401):VPARL (SEQ ID NO: 84352):SAIS-AA¹⁷-LYL (SEQ ID NO: 84881):DAANNVV (SEQ ID NO: 84963):LKNYQ (SEQ ID NO: 84230):DMVVE (SEQ ID NO: 84161):AXGXR (SEQ ID NO: 84148), HVPKPXX (SEQ ID NO: 84421):APTKL (SEQ ID NO: 84131):SAIS-AA¹⁷-LYL (SEQ ID NO: 84881):DDSSNVI (SEQ ID NO: 84965):LKNYQ (SEQ ID NO: 84230):NMVVR (SEQ ID NO: 84275):SXGXH (SEQ ID NO: 84304), RVPSTXX (SEQ ID NO: 84428):APVKT (SEQ ID NO: 84144):SAIS-AA¹⁷-LYL (SEQ ID NO: 84881):DNGRVLL (SEQ ID NO: 84970):LKNYQ (SEQ ID NO: 84230):MIVEE (SEQ ID NO: 84241):XGXL (SEQ ID NO: 84122), ASAAPXX (SEQ ID NO: 84402):VPQAL (SEQ ID NO: 84364):SAIS-AA¹⁷-LYL (SEQ ID NO: 84881):VGRKPKV (SEQ ID NO: 84981):LKNYQ (SEQ ID NO: 84230):MIVRS (SEQ ID NO: 84243):XKXS (SEQ ID NO: 84124), ASASPXX (SEQ ID NO: 84403):VSQDL (SEQ ID NO: 84387):SAIS-AA¹⁷-LYL (SEQ ID NO: 84881):IGKTPKI (SEQ ID NO: 84978):LKNYQ (SEQ ID NO: 84230):MIVKS (SEQ ID NO: 84242):XKXS (SEQ ID NO: 84124), ASASPXX (SEQ ID NO: 84403):VPQDL (SEQ ID NO: 84365):SAIS-AA¹⁷-LYL (SEQ ID NO: 84881):VGRTPKV (SEQ ID NO: 84982):LKNYQ (SEQ ID NO: 84230):MVVKS (SEQ ID NO: 84256):XKXS (SEQ ID NO: 84124), NDEGLEX (SEQ ID NO: 84426):VPTEE (SEQ ID NO: 84377):SAIS-AA¹⁷-LYL (SEQ ID NO: 84881):RIKPHQGQH (SEQ ID NO: 84980):LKNYQ (SEQ ID NO: 84230):FLQHN (SEQ ID NO: 84184):KXEXR (SEQ ID NO: 84213), NDEGLEX (SEQ ID NO: 84426):VPTGQ (SEQ ID NO: 84379):SAIS-AA¹⁷-LYL (SEQ ID NO: 84881):RIKPHQGQH (SEQ ID NO: 84980):LKNYQ (SEQ ID NO: 84230):LEEHS (SEQ ID NO: 84217):QXEXR (SEQ ID NO: 84276), SSVKXQP (SEQ ID NO: 84430):SRVHH (SEQ ID NO: 84297):SAIS-AA¹⁷-LYL (SEQ ID NO: 84881):EYVRKKPKL (SEQ ID NO: 84974):LKNYQ (SEQ ID NO: 84230):RLEEH (SEQ ID NO: 84279):LEXAXA (SEQ ID NO: 84400), RNVQXRP (SEQ ID NO: 84427):TQVQL (SEQ ID NO: 84340):SAIS-AA¹⁷-LYL (SEQ ID NO: 84881):EIVRKKPIF (SEQ ID NO: 84973):LKNYQ (SEQ ID NO: 84230):TLEDH (SEQ ID NO: 84307):LAXKXE (SEQ ID NO: 84399), KIPKAXX (SEQ ID NO: 84424):VPEEL (SEQ ID NO: 84356):SSLS-AA¹⁷-LFF (SEQ ID NO: 84889):DENEKVV (SEQ ID NO: 84966):LKVYP (SEQ ID NO: 84231):DMTVE (SEQ ID NO: 84155):GXGXR (SEQ ID NO: 84208), SIPKAXX (SEQ ID NO: 84429):VPEEL (SEQ ID NO: 84356):SSLS-AA¹⁷-LFF (SEQ ID NO: 84889):DEYDKVV (SEQ ID NO: 84968):LKVYP (SEQ ID NO: 84231):EMTVE (SEQ ID NO: 84169):GXGXR (SEQ ID NO: 84208), HVTKPTX (SEQ ID NO: 84422):VPEKL (SEQ ID NO: 84359):SSLS-AA¹⁷-LFF (SEQ ID NO: 84889):DDSSNVI (SEQ ID NO: 84965):LKVYP (SEQ ID NO: 84231):NMTVE (SEQ ID NO: 84267):SXGXH (SEQ ID NO: 84304), YVPKPXX (SEQ ID NO: 84433):VPEKL (SEQ ID NO: 84359):SSLS-AA¹⁷-LFF (SEQ ID NO: 84889):DDSSNVI (SEQ ID NO: 84965):LKVYP (SEQ ID NO: 84231):NMTVE (SEQ ID NO: 84267):SXGXH (SEQ ID NO: 84304), TVPKPXX (SEQ ID NO: 84432):VPEQL (SEQ ID NO: 84362):SSLS-AA¹⁷-LFF (SEQ ID NO: 84889):DDSSNVI (SEQ ID NO: 84965):LKVYP (SEQ ID NO: 84231):NMTVE (SEQ ID NO: 84267):AXGXH (SEQ ID NO: 84147), AVPKAXX (SEQ ID NO: 84404):VPEKL (SEQ ID NO: 84359):SSLS-AA¹⁷-LFF (SEQ ID NO: 84889):DSSNNVI (SEQ ID NO: 84972):LKVYP (SEQ ID NO: 84231):NMTVE (SEQ ID NO: 84267):AXGXH (SEQ ID NO: 84147), KVGKAXX (SEQ ID NO: 84425):VPEKL (SEQ ID NO: 84359):SSLS-AA¹⁷-LFF (SEQ ID NO: 84889):DDMGVPT (SEQ ID NO: 84964):LKVYP (SEQ ID NO: 84231):EGMSTVE (SEQ ID NO: 84410):XGXR (SEQ ID NO: 84123), KASKAXX (SEQ ID NO: 84423):VPEKL (SEQ ID NO: 84359):SSLS-AA¹⁷-LFF (SEQ ID NO: 84889):DKGVVTY (SEQ ID NO: 84969):LKVYP (SEQ ID NO: 84231):GMTVE (SEQ ID NO: 84199):EXGXR (SEQ ID NO: 84179), GSAGPXX (SEQ ID NO: 84420):VPEKM (SEQ ID NO: 84360):SSLS-AA¹⁷-LFF (SEQ ID NO: 84889):NDKQQII (SEQ ID NO: 84979):LKVYP (SEQ ID NO: 84231):GMTVE (SEQ ID NO: 84199):RXGXS (SEQ ID NO: 84291), AAPASXX (SEQ ID NO: 84401):VPERL (SEQ ID NO: 84363):SSLS-AA¹⁷-LFF (SEQ ID NO: 84889):DAANNVV (SEQ ID NO: 84963):LKVYP (SEQ ID NO: 84231):DMTVE (SEQ ID NO: 84155):AXGXR (SEQ ID NO: 84148), STPPTXX (SEQ ID NO: 84431):VPERL (SEQ ID NO: 84363):SSLS-AA¹⁷-LFF (SEQ ID NO: 84889):DSANNVV (SEQ ID NO: 84971):LKVYP (SEQ ID NO: 84231):DMTVE (SEQ ID NO: 84155):SXGXR (SEQ ID NO: 84305), HVPKPXX (SEQ ID NO: 84421):VPEKL (SEQ ID NO: 84359):SSLS-AA¹⁷-LFF (SEQ ID NO: 84889):DDSSNVI (SEQ ID NO: 84965):LKVYP (SEQ ID NO: 84231):NMTVE (SEQ ID NO: 84267):SXGXH (SEQ ID NO: 84304), RVPSTXX (SEQ ID NO: 84428):VPEKT (SEQ ID NO: 84361):SSLS-AA¹⁷-LFF (SEQ ID NO: 84889):DNGRVLL (SEQ ID NO: 84970):LKVYP (SEQ ID NO: 84231):MITVE (SEQ ID NO: 84239):XGXL (SEQ ID NO: 84122), ASAAPXX (SEQ ID NO: 84402):VPEAL (SEQ ID NO: 84353):SSLS-AA¹⁷-LFF (SEQ ID NO: 84889):VGRKPKV (SEQ ID NO: 84981):LKVYP (SEQ ID NO: 84231):MITVE (SEQ ID NO: 84239):XKXS (SEQ ID NO: 84124), ASASPXX (SEQ ID NO: 84403):VPEDL (SEQ ID NO: 84354):SSLS-AA¹⁷-LFF (SEQ ID NO: 84889):IGKTPKI (SEQ ID NO: 84978):LKVYP (SEQ ID NO: 84231):MITVE (SEQ ID NO: 84239):XKXS (SEQ ID NO: 84124), ASASPXX (SEQ ID NO: 84403):VPEDL (SEQ ID NO: 84354):SSLS-AA¹⁷-LFF (SEQ ID NO: 84889):VGRTPKV (SEQ ID NO: 84982):LKVYP (SEQ ID NO: 84231):MVTVE (SEQ ID NO: 84253):XKXS (SEQ ID NO: 84124), NDEGLEX (SEQ ID NO: 84426):VPEEE (SEQ ID NO: 84355):SSLS-AA¹⁷-LFF (SEQ ID NO: 84889):RIKPHQGQH (SEQ ID NO: 84980):LKVYP (SEQ ID NO: 84231):FLTVE (SEQ ID NO: 84185):KXEXR (SEQ ID NO: 84213), NDEGLEX (SEQ ID NO: 84426):VPEGQ (SEQ ID NO: 84357):SSLS-AA¹⁷-LFF (SEQ ID NO: 84889):RIKPHQGQH (SEQ ID NO: 84980):LKVYP (SEQ ID NO: 84231):LETVE (SEQ ID NO: 84219):QXEXR (SEQ ID NO: 84276), SSVKXQP (SEQ ID NO: 84430):VPEHH (SEQ ID NO: 84358):SSLS-AA¹⁷-LFF (SEQ ID NO: 84889):EYVRKKPKL (SEQ ID NO: 84974):LKVYP (SEQ ID NO: 84231):RLTVE (SEQ ID NO: 84282):LEXAXA (SEQ ID NO: 84400), RNVQXRP (SEQ ID NO: 84427):VPEQL (SEQ ID NO: 84362):SSLS-AA¹⁷-LFF (SEQ ID NO: 84889):EIVRKKPIF (SEQ ID NO: 84973):LKVYP (SEQ ID NO: 84231):TLTVE (SEQ ID NO: 84311):LAXKXE (SEQ ID NO: 84399), KIPKAXX (SEQ ID NO: 84424):VPTEL (SEQ ID NO: 84378):SSLS-AA¹⁷-LFF (SEQ ID NO: 84889):DENEKVV (SEQ ID NO: 84966):LKVYP (SEQ ID NO: 84231):DMVVE (SEQ ID NO: 84161):GXGXR (SEQ ID NO: 84208), SIPKAXX (SEQ ID NO: 84429):VPTEL (SEQ ID NO: 84378):SSLS-AA¹⁷-LFF (SEQ ID NO: 84889):DEYDKVV (SEQ ID NO: 84968):LKVYP (SEQ ID NO: 84231):EMVVE (SEQ ID NO: 84175):GXGXR (SEQ ID NO: 84208), HVTKPTX (SEQ ID NO: 84422):APTKL (SEQ ID NO: 84131):SSLS-AA¹⁷-LFF (SEQ ID NO: 84889):DDSSNVI (SEQ ID NO: 84965):LKVYP (SEQ ID NO: 84231):NMVVR (SEQ ID NO: 84275):SXGXH (SEQ ID NO: 84304), YVPKPXX (SEQ ID NO: 84433):APTKL (SEQ ID NO: 84131):SSLS-AA¹⁷-LFF (SEQ ID NO: 84889):DDSSNVI (SEQ ID NO: 84965):LKVYP (SEQ ID NO: 84231):NMVVR (SEQ ID NO: 84275):SXGXH (SEQ ID NO: 84304), TVPKPXX (SEQ ID NO: 84432):APTQL (SEQ ID NO: 84134):SSLS-AA¹⁷-LFF (SEQ ID NO: 84889):DDSSNVI (SEQ ID NO: 84965):LKVYP (SEQ ID NO: 84231):NMVVR (SEQ ID NO: 84275):AXGXH (SEQ ID NO: 84147), AVPKAXX (SEQ ID NO: 84404):APTKL (SEQ ID NO: 84131):SSLS-AA¹⁷-LFF (SEQ ID NO: 84889):DSSNNVI (SEQ ID NO: 84972):LKVYP (SEQ ID NO: 84231):NMVVK (SEQ ID NO: 84274):AXGXH (SEQ ID NO: 84147), KVGKAXX (SEQ ID NO: 84425):VPTKL (SEQ ID NO: 84381):SSLS-AA¹⁷-LFF (SEQ ID NO: 84889):DDMGVPT (SEQ ID NO: 84964):LKVYP (SEQ ID NO: 84231):EGMSVAE (SEQ ID NO: 84411):XGXR (SEQ ID NO: 84123), KASKAXX (SEQ ID NO: 84423):VPTKL (SEQ ID NO: 84381):SSLS-AA¹⁷-LFF (SEQ ID NO: 84889):DKGVVTY (SEQ ID NO: 84969):LKVYP (SEQ ID NO: 84231):GMAVS (SEQ ID NO: 84194):EXGXR (SEQ ID NO: 84179), GSAGPXX (SEQ ID NO: 84420):TPTKM (SEQ ID NO: 84327):SSLS-AA¹⁷-LFF (SEQ ID NO: 84889):NDKQQII (SEQ ID NO: 84979):LKVYP (SEQ ID NO: 84231):GMVVD (SEQ ID NO: 84204):RXGXS (SEQ ID NO: 84291), AAPASXX (SEQ ID NO: 84401):VPARL (SEQ ID NO: 84352):SSLS-AA¹⁷-LFF (SEQ ID NO: 84889):DAANNVV (SEQ ID NO: 84963):LKVYP (SEQ ID NO: 84231):DMVVE (SEQ ID NO: 84161):AXGXR (SEQ ID NO: 84148), STPPTXX (SEQ ID NO: 84431):VPTRL (SEQ ID NO: 84385):SSLS-AA¹⁷-LFF (SEQ ID NO: 84889):DSANNVV (SEQ ID NO: 84971):LKVYP (SEQ ID NO: 84231):DMVVE (SEQ ID NO: 84161):SXGXR (SEQ ID NO: 84305), HVPKPXX (SEQ ID NO: 84421):APTKL (SEQ ID NO: 84131):SSLS-AA¹⁷-LFF (SEQ ID NO: 84889):DDSSNVI (SEQ ID NO: 84965):LKVYP (SEQ ID NO: 84231):NMVVR (SEQ ID NO: 84275):SXGXH (SEQ ID NO: 84304), RVPSTXX (SEQ ID NO: 84428):APVKT (SEQ ID NO: 84144):SSLS-AA¹⁷-LFF (SEQ ID NO: 84889):DNGRVLL (SEQ ID NO: 84970):LKVYP (SEQ ID NO: 84231):MIVEE (SEQ ID NO: 84241):XGXL (SEQ ID NO: 84122), ASAAPXX (SEQ ID NO: 84402):VPQAL (SEQ ID NO: 84364):SSLS-AA¹⁷-LFF (SEQ ID NO: 84889):VGRKPKV (SEQ ID NO: 84981):LKVYP (SEQ ID NO: 84231):MIVRS (SEQ ID NO: 84243):XKXS (SEQ ID NO: 84124), ASASPXX (SEQ ID NO: 84403):VSQDL (SEQ ID NO: 84387):SSLS-AA¹⁷-LFF (SEQ ID NO: 84889):IGKTPKI (SEQ ID NO: 84978):LKVYP (SEQ ID NO: 84231):MIVKS (SEQ ID NO: 84242):XKXS (SEQ ID NO: 84124), ASASPXX (SEQ ID NO: 84403):VPQDL (SEQ ID NO: 84365):SSLS-AA¹⁷-LFF (SEQ ID NO: 84889):VGRTPKV (SEQ ID NO: 84982):LKVYP (SEQ ID NO: 84231):MVVKS (SEQ ID NO: 84256):XKXS (SEQ ID NO: 84124), NDEGLEX (SEQ ID NO: 84426):VPTEE (SEQ ID NO: 84377):SSLS-AA¹⁷-LFF (SEQ ID NO: 84889):RIKPHQGQH (SEQ ID NO: 84980):LKVYP (SEQ ID NO: 84231):FLQHN (SEQ ID NO: 84184):KXEXR (SEQ ID NO: 84213), NDEGLEX (SEQ ID NO: 84426):VPTGQ (SEQ ID NO: 84379):SSLS-AA¹⁷-LFF (SEQ ID NO: 84889):RIKPHQGQH (SEQ ID NO: 84980):LKVYP (SEQ ID NO: 84231):LEEHS (SEQ ID NO: 84217):QXEXR (SEQ ID NO: 84276), SSVKXQP (SEQ ID NO: 84430):SRVHH (SEQ ID NO: 84297):SSLS-AA¹⁷-LFF (SEQ ID NO: 84889):EYVRKKPKL (SEQ ID NO: 84974):LKVYP (SEQ ID NO: 84231):RLEEH (SEQ ID NO: 84279):LEXAXA (SEQ ID NO: 84400), RNVQXRP (SEQ ID NO: 84427):TQVQL (SEQ ID NO: 84340):SSLS-AA¹⁷-LFF (SEQ ID NO: 84889):EIVRKKPIF (SEQ ID NO: 84973):LKVYP (SEQ ID NO: 84231):TLEDH (SEQ ID NO: 84307):LAXKXE (SEQ ID NO: 84399), KIPKAXX (SEQ ID NO: 84424):VPTEL (SEQ ID NO: 84378):SAIS-AA¹⁷-LYL (SEQ ID NO: 84881):DENEKVV (SEQ ID NO: 84966):LKNYQ (SEQ ID NO: 84230):DMVVE (SEQ ID NO: 84161):GXGXR (SEQ ID NO: 84208), KIPKAXX (SEQ ID NO: 84424):APTEL (SEQ ID NO: 84128):NAIS-AA¹⁷-LYF (SEQ ID NO: 84878):DENEKVV (SEQ ID NO: 84966):LKKYR (SEQ ID NO: 84229):DMVVR (SEQ ID NO: 84163):GXGXR (SEQ ID NO: 84208), GIPEPXX (SEQ ID NO: 84419):APTKM (SEQ ID NO: 84132):NAIS-AA¹⁷-LYF (SEQ ID NO: 84878):DENKNVV (SEQ ID NO: 84967):LKKYR (SEQ ID NO: 84229):NMVVR (SEQ ID NO: 84275):SXAXR (SEQ ID NO: 84303), SIPKAXX (SEQ ID NO: 84429):APTEL (SEQ ID NO: 84128):NAIS-AA¹⁷-LYF (SEQ ID NO: 84878):DEYDKVV (SEQ ID NO: 84968):LKKYR (SEQ ID NO: 84229):EMVVR (SEQ ID NO: 84177):GXGXR (SEQ ID NO: 84208), YVPKPXX (SEQ ID NO: 84433):APTKL (SEQ ID NO: 84131):NAIS-AA¹⁷-LYF (SEQ ID NO: 84878):DDSSNVI (SEQ ID NO: 84965):LKKYR (SEQ ID NO: 84229):NMVVR (SEQ ID NO: 84275):SXGXH (SEQ ID NO: 84304), TVPKPXX (SEQ ID NO: 84432):APTQL (SEQ ID NO: 84134):NAIS-AA¹⁷-LYF (SEQ ID NO: 84878):DDSSNVI (SEQ ID NO: 84965):LKKYR (SEQ ID NO: 84229):NMVVR (SEQ ID NO: 84275):AXGXH (SEQ ID NO: 84147), AVPKAXX (SEQ ID NO: 84404):APTKL (SEQ ID NO: 84131):NAIS-AA¹⁷-LYF (SEQ ID NO: 84878):DSSNNVI (SEQ ID NO: 84972):LKKYR (SEQ ID NO: 84229):NMVVR (SEQ ID NO: 84275):AXGXH (SEQ ID NO: 84147), KVGKAXX (SEQ ID NO: 84425):APTKL (SEQ ID NO: 84131):NAIS-AA¹⁷-LYF (SEQ ID NO: 84878):DDMGVPT (SEQ ID NO: 84964):LKKYR (SEQ ID NO: 84229):EGMSVVR (SEQ ID NO: 84418):XGXR (SEQ ID NO: 84123), KASKAXX (SEQ ID NO: 84423):APTKL (SEQ ID NO: 84131):NAIS-AA¹⁷-LYF (SEQ ID NO: 84878):DKGVVTY (SEQ ID NO: 84969):LKKYR (SEQ ID NO: 84229):GMVVR (SEQ ID NO: 84207):EXGXR (SEQ ID NO: 84179), GSAGPXX (SEQ ID NO: 84420):APTKM (SEQ ID NO: 84132):NAIS-AA¹⁷-LYF (SEQ ID NO: 84878):NDKQQII (SEQ ID NO: 84979):LKKYR (SEQ ID NO: 84229):GMVVR (SEQ ID NO: 84207):RXGXS (SEQ ID NO: 84291), AAPASXX (SEQ ID NO: 84401):APTRL (SEQ ID NO: 84135):NAIS-AA¹⁷-LYF (SEQ ID NO: 84878):DAANNVV (SEQ ID NO: 84963):LKKYR (SEQ ID NO: 84229):DMVVR (SEQ ID NO: 84163):AXGXR (SEQ ID NO: 84148), STPPTXX (SEQ ID NO: 84431):APTRL (SEQ ID NO: 84135):NAIS-AA¹⁷-LYF (SEQ ID NO: 84878):DSANNVV (SEQ ID NO: 84971):LKKYR (SEQ ID NO: 84229):DMVVR (SEQ ID NO: 84163):SXGXR (SEQ ID NO: 84305), HVPKPXX (SEQ ID NO: 84421):APTKL (SEQ ID NO: 84131):NAIS-AA¹⁷-LYF (SEQ ID NO: 84878):DDSSNVI (SEQ ID NO: 84965):LKKYR (SEQ ID NO: 84229):NMVVR (SEQ ID NO: 84275):SXGXH (SEQ ID NO: 84304), RVPSTXX (SEQ ID NO: 84428):APTKT (SEQ ID NO: 84133):NAIS-AA¹⁷-LYF (SEQ ID NO: 84878):DNGRVLL (SEQ ID NO: 84970):LKKYR (SEQ ID NO: 84229):MIVVR (SEQ ID NO: 84247):XGXL (SEQ ID NO: 84122), ASAAPXX (SEQ ID NO: 84402):APTAL (SEQ ID NO: 84125):NAIS-AA¹⁷-LYF (SEQ ID NO: 84878):VGRKPKV (SEQ ID NO: 84981):LKKYR (SEQ ID NO: 84229):MIVVR (SEQ ID NO: 84247):XKXS (SEQ ID NO: 84124), ASASPXX (SEQ ID NO: 84403):APTDL (SEQ ID NO: 84126):NAIS-AA¹⁷-LYF (SEQ ID NO: 84878):IGKTPKI (SEQ ID NO: 84978):LKKYR (SEQ ID NO: 84229):MIVVR (SEQ ID NO: 84247):XKXS (SEQ ID NO: 84124), ASASPXX (SEQ ID NO: 84403):APTDL (SEQ ID NO: 84126):NAIS-AA¹⁷-LYF (SEQ ID NO: 84878):VGRTPKV (SEQ ID NO: 84982):LKKYR (SEQ ID NO: 84229):MVVVR (SEQ ID NO: 84261):XKXS (SEQ ID NO: 84124), NDEGLEX (SEQ ID NO: 84426):APTEE (SEQ ID NO: 84127):NAIS-AA¹⁷-LYF (SEQ ID NO: 84878):RIKPHQGQH (SEQ ID NO: 84980):LKKYR (SEQ ID NO: 84229):FLVVR (SEQ ID NO: 84193):KXEXR (SEQ ID NO: 84213), NDEGLEX (SEQ ID NO: 84426):APTGQ (SEQ ID NO: 84129):NAIS-AA¹⁷-LYF (SEQ ID NO: 84878):RIKPHQGQH (SEQ ID NO: 84980):LKKYR (SEQ ID NO: 84229):LEVVR (SEQ ID NO: 84227):QXEXR (SEQ ID NO: 84276), SSVKXQP (SEQ ID NO: 84430):APTHH (SEQ ID NO: 84130):NAIS-AA¹⁷-LYF (SEQ ID NO: 84878):EYVRKKPKL (SEQ ID NO: 84974):LKKYR (SEQ ID NO: 84229):RLVVR (SEQ ID NO: 84290):LEXAXA (SEQ ID NO: 84400), RNVQXRP (SEQ ID NO: 84427):APTQL (SEQ ID NO: 84134):NAIS-AA¹⁷-LYF (SEQ ID NO: 84878):EIVRKKPIF (SEQ ID NO: 84973):LKKYR (SEQ ID NO: 84229):TLVVR (SEQ ID NO: 84319):LAXKXE (SEQ ID NO: 84399), KIPKAXX (SEQ ID NO: 84424):VPTEL (SEQ ID NO: 84378):NAIS-AA¹⁷-LYF (SEQ ID NO: 84878):DENEKVV (SEQ ID NO: 84966):LKKYR (SEQ ID NO: 84229):DMVVE (SEQ ID NO: 84161):GXGXR (SEQ ID NO: 84208), GIPEPXX (SEQ ID NO: 84419):VPEKM (SEQ ID NO: 84360):NAIS-AA¹⁷-LYF (SEQ ID NO: 84878):DENKNVV (SEQ ID NO: 84967):LKKYR (SEQ ID NO: 84229):NMTVE (SEQ ID NO: 84267):SXAXR (SEQ ID NO: 84303), SIPKAXX (SEQ ID NO: 84429):VPTEL (SEQ ID NO: 84378):NAIS-AA¹⁷-LYF (SEQ ID NO: 84878):DEYDKVV (SEQ ID NO: 84968):LKKYR (SEQ ID NO: 84229):EMVVE (SEQ ID NO: 84175):GXGXR (SEQ ID NO: 84208), AVPKAXX (SEQ ID NO: 84404):APTKL (SEQ ID NO: 84131):NAIS-AA¹⁷-LYF (SEQ ID NO: 84878):DSSNNVI (SEQ ID NO: 84972):LKKYR (SEQ ID NO: 84229):NMVVK (SEQ ID NO: 84274):AXGXH (SEQ ID NO: 84147), KVGKAXX (SEQ ID NO: 84425):VPTKL (SEQ ID NO: 84381):NAIS-AA¹⁷-LYF (SEQ ID NO: 84878):DDMGVPT (SEQ ID NO: 84964):LKKYR (SEQ ID NO: 84229):EGMSVAE (SEQ ID NO: 84411):XGXR (SEQ ID NO: 84123), KASKAXX (SEQ ID NO: 84423):VPTKL (SEQ ID NO: 84381):NAIS-AA¹⁷-LYF (SEQ ID NO: 84878):DKGVVTY (SEQ ID NO: 84969):LKKYR (SEQ ID NO: 84229):GMAVS (SEQ ID NO: 84194):EXGXR (SEQ ID NO: 84179), GSAGPXX (SEQ ID NO: 84420):TPTKM (SEQ ID NO: 84327):NAIS-AA¹⁷-LYF (SEQ ID NO: 84878):NDKQQII (SEQ ID NO: 84979):LKKYR (SEQ ID NO: 84229):GMVVD (SEQ ID NO: 84204):RXGXS (SEQ ID NO: 84291), AAPASXX (SEQ ID NO: 84401):VPARL (SEQ ID NO: 84352):NAIS-AA¹⁷-LYF (SEQ ID NO: 84878):DAANNVV (SEQ ID NO: 84963):LKKYR (SEQ ID NO: 84229):DMVVE (SEQ ID NO: 84161):AXGXR (SEQ ID NO: 84148), STPPTXX (SEQ ID NO: 84431):VPTRL (SEQ ID NO: 84385):NAIS-AA¹⁷-LYF (SEQ ID NO: 84878):DSANNVV (SEQ ID NO: 84971):LKKYR (SEQ ID NO: 84229):DMVVE (SEQ ID NO: 84161):SXGXR (SEQ ID NO: 84305), RVPSTXX (SEQ ID NO: 84428):APVKT (SEQ ID NO: 84144):NAIS-AA¹⁷-LYF (SEQ ID NO: 84878):DNGRVLL (SEQ ID NO: 84970):LKKYR (SEQ ID NO: 84229):MIVEE (SEQ ID NO: 84241):XGXL (SEQ ID NO: 84122), ASAAPXX (SEQ ID NO: 84402):VPQAL (SEQ ID NO: 84364):NAIS-AA¹⁷-LYF (SEQ ID NO: 84878):VGRKPKV (SEQ ID NO: 84981):LKKYR (SEQ ID NO: 84229):MIVRS (SEQ ID NO: 84243):XKXS (SEQ ID NO: 84124), ASASPXX (SEQ ID NO: 84403):VSQDL (SEQ ID NO: 84387):NAIS-AA¹⁷-LYF (SEQ ID NO: 84878):IGKTPKI (SEQ ID NO: 84978):LKKYR (SEQ ID NO: 84229):MIVKS (SEQ ID NO: 84242):XKXS (SEQ ID NO: 84124), ASASPXX (SEQ ID NO: 84403):VPQDL (SEQ ID NO: 84365):NAIS-AA¹⁷-LYF (SEQ ID NO: 84878):VGRTPKV (SEQ ID NO: 84982):LKKYR (SEQ ID NO: 84229):MVVKS (SEQ ID NO: 84256):XKXS (SEQ ID NO: 84124), NDEGLEX (SEQ ID NO: 84426):VPTEE (SEQ ID NO: 84377):NAIS-AA¹⁷-LYF (SEQ ID NO: 84878):RIKPHQGQH (SEQ ID NO: 84980):LKKYR (SEQ ID NO: 84229):FLQHN (SEQ ID NO: 84184):KXEXR (SEQ ID NO: 84213), NDEGLEX (SEQ ID NO: 84426):VPTGQ (SEQ ID NO: 84379):NAIS-AA¹⁷-LYF (SEQ ID NO: 84878):RIKPHQGQH (SEQ ID NO: 84980):LKKYR (SEQ ID NO: 84229):LEEHS (SEQ ID NO: 84217):QXEXR (SEQ ID NO: 84276), SSVKXQP (SEQ ID NO: 84430):SRVHH (SEQ ID NO: 84297):NAIS-AA¹⁷-LYF (SEQ ID NO: 84878):EYVRKKPKL (SEQ ID NO: 84974):LKKYR (SEQ ID NO: 84229):RLEEH (SEQ ID NO: 84279):LEXAXA (SEQ ID NO: 84400), RNVQXRP (SEQ ID NO: 84427):TQVQL (SEQ ID NO: 84340):NAIS-AA¹⁷-LYF (SEQ ID NO: 84878):EIVRKKPIF (SEQ ID NO: 84973):LKKYR (SEQ ID NO: 84229):TLEDH (SEQ ID NO: 84307):LAXKXE (SEQ ID NO: 84399), HVTKPTX (SEQ ID NO: 84422):APTKL (SEQ ID NO: 84131):NAIS-AA¹⁷-LYF (SEQ ID NO: 84878):DDSSNVI (SEQ ID NO: 84965):LKKYR (SEQ ID NO: 84229):NMVVR (SEQ ID NO: 84275):SXGXH (SEQ ID NO: 84304), KIPKAXX (SEQ ID NO: 84424):APTEL (SEQ ID NO: 84128):SATS-AA¹⁷-LYY (SEQ ID NO: 84882):DENEKVV (SEQ ID NO: 84966):LRKHR (SEQ ID NO: 84233):DMVVK (SEQ ID NO: 84162):GXGXR (SEQ ID NO: 84208), GIPEPXX (SEQ ID NO: 84419):APTKM (SEQ ID NO: 84132):SATS-AA¹⁷-LYY (SEQ ID NO: 84882):DENKNVV (SEQ ID NO: 84967):LRKHR (SEQ ID NO: 84233):NMVVK (SEQ ID NO: 84274):SXAXR (SEQ ID NO: 84303), SIPKAXX (SEQ ID NO: 84429):APTEL (SEQ ID NO: 84128):SATS-AA¹⁷-LYY (SEQ ID NO: 84882):DEYDKVV (SEQ ID NO: 84968):LRKHR (SEQ ID NO: 84233):EMVVK (SEQ ID NO: 84176):GXGXR (SEQ ID NO: 84208), HVTKPTX (SEQ ID NO: 84422):APTKL (SEQ ID NO: 84131):SATS-AA¹⁷-LYY (SEQ ID NO: 84882):DDSSNVI (SEQ ID NO: 84965):LRKHR (SEQ ID NO: 84233):NMVVK (SEQ ID NO: 84274):SXGXH (SEQ ID NO: 84304), YVPKPXX (SEQ ID NO: 84433):APTKL (SEQ ID NO: 84131):SATS-AA¹⁷-LYY (SEQ ID NO: 84882):DDSSNVI (SEQ ID NO: 84965):LRKHR (SEQ ID NO: 84233):NMVVK (SEQ ID NO: 84274):SXGXH (SEQ ID NO: 84304), TVPKPXX (SEQ ID NO: 84432):APTQL (SEQ ID NO: 84134):SATS-AA¹⁷-LYY (SEQ ID NO: 84882):DDSSNVI (SEQ ID NO: 84965):LRKHR (SEQ ID NO: 84233):NMVVK (SEQ ID NO: 84274):AXGXH (SEQ ID NO: 84147), KVGKAXX (SEQ ID NO: 84425):APTKL (SEQ ID NO: 84131):SATS-AA¹⁷-LYY (SEQ ID NO: 84882):DDMGVPT (SEQ ID NO: 84964):LRKHR (SEQ ID NO: 84233):EGMSVVK (SEQ ID NO: 84417):XGXR (SEQ ID NO: 84123), KASKAXX (SEQ ID NO: 84423):APTKL (SEQ ID NO: 84131):SATS-AA¹⁷-LYY (SEQ ID NO: 84882):DKGVVTY (SEQ ID NO: 84969):LRKHR (SEQ ID NO: 84233):GMVVK (SEQ ID NO: 84206):EXGXR (SEQ ID NO: 84179), GSAGPXX (SEQ ID NO: 84420):APTKM (SEQ ID NO: 84132):SATS-AA¹⁷-LYY (SEQ ID NO: 84882):NDKQQII (SEQ ID NO: 84979):LRKHR (SEQ ID NO: 84233):GMVVK (SEQ ID NO: 84206):RXGXS (SEQ ID NO: 84291), AAPASXX (SEQ ID NO: 84401):APTRL (SEQ ID NO: 84135):SATS-AA¹⁷-LYY (SEQ ID NO: 84882):DAANNVV (SEQ ID NO: 84963):LRKHR (SEQ ID NO: 84233):DMVVK (SEQ ID NO: 84162):AXGXR (SEQ ID NO: 84148), STPPTXX (SEQ ID NO: 84431):APTRL (SEQ ID NO: 84135):SATS-AA¹⁷-LYY (SEQ ID NO: 84882):DSANNVV (SEQ ID NO: 84971):LRKHR (SEQ ID NO: 84233):DMVVK (SEQ ID NO: 84162):SXGXR (SEQ ID NO: 84305), HVPKPXX (SEQ ID NO: 84421):APTKL (SEQ ID NO: 84131):SATS-AA¹⁷-LYY (SEQ ID NO: 84882):DDSSNVI (SEQ ID NO: 84965):LRKHR (SEQ ID NO: 84233):NMVVK (SEQ ID NO: 84274):SXGXH (SEQ ID NO: 84304), RVPSTXX (SEQ ID NO: 84428):APTKT (SEQ ID NO: 84133):SATS-AA¹⁷-LYY (SEQ ID NO: 84882):DNGRVLL (SEQ ID NO: 84970):LRKHR (SEQ ID NO: 84233):MIVVK (SEQ ID NO: 84246):XGXL (SEQ ID NO: 84122), ASAAPXX (SEQ ID NO: 84402):APTAL (SEQ ID NO: 84125):SATS-AA¹⁷-LYY (SEQ ID NO: 84882):VGRKPKV (SEQ ID NO: 84981):LRKHR (SEQ ID NO: 84233):MIVVK (SEQ ID NO: 84246):XKXS (SEQ ID NO: 84124), ASASPXX (SEQ ID NO: 84403):APTDL (SEQ ID NO: 84126):SATS-AA¹⁷-LYY (SEQ ID NO: 84882):IGKTPKI (SEQ ID NO: 84978):LRKHR (SEQ ID NO: 84233):MIVVK (SEQ ID NO: 84246):XKXS (SEQ ID NO: 84124), ASASPXX (SEQ ID NO: 84403):APTDL (SEQ ID NO: 84126):SATS-AA¹⁷-LYY (SEQ ID NO: 84882):VGRTPKV (SEQ ID NO: 84982):LRKHR (SEQ ID NO: 84233):MVVVK (SEQ ID NO: 84260):XKXS (SEQ ID NO: 84124), NDEGLEX (SEQ ID NO: 84426):APTEE (SEQ ID NO: 84127):SATS-AA¹⁷-LYY (SEQ ID NO: 84882):RIKPHQGQH (SEQ ID NO: 84980):LRKHR (SEQ ID NO: 84233):FLVVK (SEQ ID NO: 84192):KXEXR (SEQ ID NO: 84213), NDEGLEX (SEQ ID NO: 84426):APTGQ (SEQ ID NO: 84129):SATS-AA¹⁷-LYY (SEQ ID NO: 84882):RIKPHQGQH (SEQ ID NO: 84980):LRKHR (SEQ ID NO: 84233):LEVVK (SEQ ID NO: 84226):QXEXR (SEQ ID NO: 84276), SSVKXQP (SEQ ID NO: 84430):APTHH (SEQ ID NO: 84130):SATS-AA¹⁷-LYY (SEQ ID NO: 84882):EYVRKKPKL (SEQ ID NO: 84974):LRKHR (SEQ ID NO: 84233):RLVVK (SEQ ID NO: 84289):LEXAXA (SEQ ID NO: 84400), RNVQXRP (SEQ ID NO: 84427):APTQL (SEQ ID NO: 84134):SATS-AA¹⁷-LYY (SEQ ID NO: 84882):EIVRKKPIF (SEQ ID NO: 84973):LRKHR (SEQ ID NO: 84233):TLVVK (SEQ ID NO: 84318):LAXKXE (SEQ ID NO: 84399), KIPKAXX (SEQ ID NO: 84424):VPTEL (SEQ ID NO: 84378):SATS-AA¹⁷-LYY (SEQ ID NO: 84882):DENEKVV (SEQ ID NO: 84966):LRKHR (SEQ ID NO: 84233):DMVVE (SEQ ID NO: 84161):GXGXR (SEQ ID NO: 84208), GIPEPXX (SEQ ID NO: 84419):VPEKM (SEQ ID NO: 84360):SATS-AA¹⁷-LYY (SEQ ID NO: 84882):DENKNVV (SEQ ID NO: 84967):LRKHR (SEQ ID NO: 84233):NMTVE (SEQ ID NO: 84267):SXAXR (SEQ ID NO: 84303), SIPKAXX (SEQ ID NO: 84429):VPTEL (SEQ ID NO: 84378):SATS-AA¹⁷-LYY (SEQ ID NO: 84882):DEYDKVV (SEQ ID NO: 84968):LRKHR (SEQ ID NO: 84233):EMVVE (SEQ ID NO: 84175):GXGXR (SEQ ID NO: 84208), HVTKPTX (SEQ ID NO: 84422):APTKL (SEQ ID NO: 84131):SATS-AA¹⁷-LYY (SEQ ID NO: 84882):DDSSNVI (SEQ ID NO: 84965):LRKHR (SEQ ID NO: 84233):NMVVR (SEQ ID NO: 84275):SXGXH (SEQ ID NO: 84304), YVPKPXX (SEQ ID NO: 84433):APTKL (SEQ ID NO: 84131):SATS-AA¹⁷-LYY (SEQ ID NO: 84882):DDSSNVI (SEQ ID NO: 84965):LRKHR (SEQ ID NO: 84233):NMVVR (SEQ ID NO: 84275):SXGXH (SEQ ID NO: 84304), TVPKPXX (SEQ ID NO: 84432):APTQL (SEQ ID NO: 84134):SATS-AA¹⁷-LYY (SEQ ID NO: 84882):DDSSNVI (SEQ ID NO: 84965):LRKHR (SEQ ID NO: 84233):NMVVR (SEQ ID NO: 84275):AXGXH (SEQ ID NO: 84147), KVGKAXX (SEQ ID NO: 84425):VPTKL (SEQ ID NO: 84381):SATS-AA¹⁷-LYY (SEQ ID NO: 84882):DDMGVPT (SEQ ID NO: 84964):LRKHR (SEQ ID NO: 84233):EGMSVAE (SEQ ID NO: 84411):XGXR (SEQ ID NO: 84123), KASKAXX (SEQ ID NO: 84423):VPTKL (SEQ ID NO: 84381):SATS-AA¹⁷-LYY (SEQ ID NO: 84882):DKGVVTY (SEQ ID NO: 84969):LRKHR (SEQ ID NO: 84233):GMAVS (SEQ ID NO: 84194):EXGXR (SEQ ID NO: 84179), GSAGPXX (SEQ ID NO: 84420):TPTKM (SEQ ID NO: 84327):SATS-AA¹⁷-LYY (SEQ ID NO: 84882):NDKQQII (SEQ ID NO: 84979):LRKHR (SEQ ID NO: 84233):GMVVD (SEQ ID NO: 84204):RXGXS (SEQ ID NO: 84291), AAPASXX (SEQ ID NO: 84401):VPARL (SEQ ID NO: 84352):SATS-AA¹⁷-LYY (SEQ ID NO: 84882):DAANNVV (SEQ ID NO: 84963):LRKHR (SEQ ID NO: 84233):DMVVE (SEQ ID NO: 84161):AXGXR (SEQ ID NO: 84148), STPPTXX (SEQ ID NO: 84431):VPTRL (SEQ ID NO: 84385):SATS-AA¹⁷-LYY (SEQ ID NO: 84882):DSANNVV (SEQ ID NO: 84971):LRKHR (SEQ ID NO: 84233):DMVVE (SEQ ID NO: 84161):SXGXR (SEQ ID NO: 84305), HVPKPXX (SEQ ID NO: 84421):APTKL (SEQ ID NO: 84131):SATS-AA¹⁷-LYY (SEQ ID NO: 84882):DDSSNVI (SEQ ID NO: 84965):LRKHR (SEQ ID NO: 84233):NMVVR (SEQ ID NO: 84275):SXGXH (SEQ ID NO: 84304), RVPSTXX (SEQ ID NO: 84428):APVKT (SEQ ID NO: 84144):SATS-AA¹⁷-LYY (SEQ ID NO: 84882):DNGRVLL (SEQ ID NO: 84970):LRKHR (SEQ ID NO: 84233):MIVEE (SEQ ID NO: 84241):XGXL (SEQ ID NO: 84122), ASAAPXX (SEQ ID NO: 84402):VPQAL (SEQ ID NO: 84364):SATS-AA¹⁷-LYY (SEQ ID NO: 84882):VGRKPKV (SEQ ID NO: 84981):LRKHR (SEQ ID NO: 84233):MIVRS (SEQ ID NO: 84243):XKXS (SEQ ID NO: 84124), ASASPXX (SEQ ID NO: 84403):VSQDL (SEQ ID NO: 84387):SATS-AA¹⁷-LYY (SEQ ID NO: 84882):IGKTPKI (SEQ ID NO: 84978):LRKHR (SEQ ID NO: 84233):MIVKS (SEQ ID NO: 84242):XKXS (SEQ ID NO: 84124), ASASPXX (SEQ ID NO: 84403):VPQDL (SEQ ID NO: 84365):SATS-AA¹⁷-LYY (SEQ ID NO: 84882):VGRTPKV (SEQ ID NO: 84982):LRKHR (SEQ ID NO: 84233):MVVKS (SEQ ID NO: 84256):XKXS (SEQ ID NO: 84124), NDEGLEX (SEQ ID NO: 84426):VPTEE (SEQ ID NO: 84377):SATS-AA¹⁷-LYY (SEQ ID NO: 84882):RIKPHQGQH (SEQ ID NO: 84980):LRKHR (SEQ ID NO: 84233):FLQHN (SEQ ID NO: 84184):KXEXR (SEQ ID NO: 84213), NDEGLEX (SEQ ID NO: 84426):VPTGQ (SEQ ID NO: 84379):SATS-AA¹⁷-LYY (SEQ ID NO: 84882):RIKPHQGQH (SEQ ID NO: 84980):LRKHR (SEQ ID NO: 84233):LEEHS (SEQ ID NO: 84217):QXEXR (SEQ ID NO: 84276), SSVKXQP (SEQ ID NO: 84430):SRVHH (SEQ ID NO: 84297):SATS-AA¹⁷-LYY (SEQ ID NO: 84882):EYVRKKPKL (SEQ ID NO: 84974):LRKHR (SEQ ID NO: 84233):RLEEH (SEQ ID NO: 84279):LEXAXA (SEQ ID NO: 84400), RNVQXRP (SEQ ID NO: 84427):TQVQL (SEQ ID NO: 84340):SATS-AA¹⁷-LYY (SEQ ID NO: 84882):EIVRKKPIF (SEQ ID NO: 84973):LRKHR (SEQ ID NO: 84233):TLEDH (SEQ ID NO: 84307):LAXKXE (SEQ ID NO: 84399), KIPKAXX (SEQ ID NO: 84424):VPTEL (SEQ ID NO: 84378):SPIS-AA¹⁷-LYK (SEQ ID NO: 84887):DENEKVV (SEQ ID NO: 84966):LKYHY (SEQ ID NO: 84232):DMVAE (SEQ ID NO: 84156):GXGXR (SEQ ID NO: 84208), GIPEPXX (SEQ ID NO: 84419):VPTKM (SEQ ID NO: 84382):SPIS-AA¹⁷-LYK (SEQ ID NO: 84887):DENKNVV (SEQ ID NO: 84967):LKYHY (SEQ ID NO: 84232):NMVAE (SEQ ID NO: 84268):SXAXR (SEQ ID NO: 84303), SIPKAXX (SEQ ID NO: 84429):VPTEL (SEQ ID NO: 84378):SPIS-AA¹⁷-LYK (SEQ ID NO: 84887):DEYDKVV (SEQ ID NO: 84968):LKYHY (SEQ ID NO: 84232):EMVAE (SEQ ID NO: 84170):GXGXR (SEQ ID NO: 84208), HVTKPTX (SEQ ID NO: 84422):VPTKL (SEQ ID NO: 84381):SPIS-AA¹⁷-LYK (SEQ ID NO: 84887):DDSSNVI (SEQ ID NO: 84965):LKYHY (SEQ ID NO: 84232):NMVAE (SEQ ID NO: 84268):SXGXH (SEQ ID NO: 84304), YVPKPXX (SEQ ID NO: 84433):VPTKL (SEQ ID NO: 84381):SPIS-AA¹⁷-LYK (SEQ ID NO: 84887):DDSSNVI (SEQ ID NO: 84965):LKYHY (SEQ ID NO: 84232):NMVAE (SEQ ID NO: 84268):SXGXH (SEQ ID NO: 84304), TVPKPXX (SEQ ID NO: 84432):VPTQL (SEQ ID NO: 84384):SPIS-AA¹⁷-LYK (SEQ ID NO: 84887):DDSSNVI (SEQ ID NO: 84965):LKYHY (SEQ ID NO: 84232):NMVAE (SEQ ID NO: 84268):AXGXH (SEQ ID NO: 84147), AVPKAXX (SEQ ID NO: 84404):VPTKL (SEQ ID NO: 84381):SPIS-AA¹⁷-LYK (SEQ ID NO: 84887):DSSNNVI (SEQ ID NO: 84972):LKYHY (SEQ ID NO: 84232):NMVAE (SEQ ID NO: 84268):AXGXH (SEQ ID NO: 84147), KASKAXX (SEQ ID NO: 84423):VPTKL (SEQ ID NO: 84381):SPIS-AA¹⁷-LYK (SEQ ID NO: 84887):DKGVVTY (SEQ ID NO: 84969):LKYHY (SEQ ID NO: 84232):GMVAE (SEQ ID NO: 84200):EXGXR (SEQ ID NO: 84179), GSAGPXX (SEQ ID NO: 84420):VPTKM (SEQ ID NO: 84382):SPIS-AA¹⁷-LYK (SEQ ID NO: 84887):NDKQQII (SEQ ID NO: 84979):LKYHY (SEQ ID NO: 84232):GMVAE (SEQ ID NO: 84200):RXGXS (SEQ ID NO: 84291), AAPASXX (SEQ ID NO: 84401):VPTRL (SEQ ID NO: 84385):SPIS-AA¹⁷-LYK (SEQ ID NO: 84887):DAANNVV (SEQ ID NO: 84963):LKYHY (SEQ ID NO: 84232):DMVAE (SEQ ID NO: 84156):AXGXR (SEQ ID NO: 84148), STPPTXX (SEQ ID NO: 84431):VPTRL (SEQ ID NO: 84385):SPIS-AA¹⁷-LYK (SEQ ID NO: 84887):DSANNVV (SEQ ID NO: 84971):LKYHY (SEQ ID NO: 84232):DMVAE (SEQ ID NO: 84156):SXGXR (SEQ ID NO: 84305), HVPKPXX (SEQ ID NO: 84421):VPTKL (SEQ ID NO: 84381):SPIS-AA¹⁷-LYK (SEQ ID NO: 84887):DDSSNVI (SEQ ID NO: 84965):LKYHY (SEQ ID NO: 84232):NMVAE (SEQ ID NO: 84268):SXGXH (SEQ ID NO: 84304), RVPSTXX (SEQ ID NO: 84428):VPTKT (SEQ ID NO: 84383):SPIS-AA¹⁷-LYK (SEQ ID NO: 84887):DNGRVLL (SEQ ID NO: 84970):LKYHY (SEQ ID NO: 84232):MIVAE (SEQ ID NO: 84240):XGXL (SEQ ID NO: 84122), ASAAPXX (SEQ ID NO: 84402):VPTAL (SEQ ID NO: 84375):SPIS-AA¹⁷-LYK (SEQ ID NO: 84887):VGRKPKV (SEQ ID NO: 84981):LKYHY (SEQ ID NO: 84232):MIVAE (SEQ ID NO: 84240):XKXS (SEQ ID NO: 84124), ASASPXX (SEQ ID NO: 84403):VPTDL (SEQ ID NO: 84376):SPIS-AA¹⁷-LYK (SEQ ID NO: 84887):IGKTPKI (SEQ ID NO: 84978):LKYHY (SEQ ID NO: 84232):MIVAE (SEQ ID NO: 84240):XKXS (SEQ ID NO: 84124), ASASPXX (SEQ ID NO: 84403):VPTDL (SEQ ID NO: 84376):SPIS-AA¹⁷-LYK (SEQ ID NO: 84887):VGRTPKV (SEQ ID NO: 84982):LKYHY (SEQ ID NO: 84232):MVVAE (SEQ ID NO: 84254):XKXS (SEQ ID NO: 84124), NDEGLEX (SEQ ID NO: 84426):VPTEE (SEQ ID NO: 84377):SPIS-AA¹⁷-LYK (SEQ ID NO: 84887):RIKPHQGQH (SEQ ID NO: 84980):LKYHY (SEQ ID NO: 84232):FLVAE (SEQ ID NO: 84186):KXEXR (SEQ ID NO: 84213), NDEGLEX (SEQ ID NO: 84426):VPTGQ (SEQ ID NO: 84379):SPIS-AA¹⁷-LYK (SEQ ID NO: 84887):RIKPHQGQH (SEQ ID NO: 84980):LKYHY (SEQ ID NO: 84232):LEVAE (SEQ ID NO: 84220):QXEXR (SEQ ID NO: 84276), SSVKXQP (SEQ ID NO: 84430):VPTHH (SEQ ID NO: 84380):SPIS-AA¹⁷-LYK (SEQ ID NO: 84887):EYVRKKPKL (SEQ ID NO: 84974):LKYHY (SEQ ID NO: 84232):RLVAE (SEQ ID NO: 84283):LEXAXA (SEQ ID NO: 84400), RNVQXRP (SEQ ID NO: 84427):VPTQL (SEQ ID NO: 84384):SPIS-AA¹⁷-LYK (SEQ ID NO: 84887):EIVRKKPIF (SEQ ID NO: 84973):LKYHY (SEQ ID NO: 84232):TLVAE (SEQ ID NO: 84312):LAXKXE (SEQ ID NO: 84399), KIPKAXX (SEQ ID NO: 84424):VPTEL (SEQ ID NO: 84378):SPIS-AA¹⁷-LYK (SEQ ID NO: 84887):DENEKVV (SEQ ID NO: 84966):LKYHY (SEQ ID NO: 84232):DMVVE (SEQ ID NO: 84161):GXGXR (SEQ ID NO: 84208), GIPEPXX (SEQ ID NO: 84419):VPEKM (SEQ ID NO: 84360):SPIS-AA¹⁷-LYK (SEQ ID NO: 84887):DENKNVV (SEQ ID NO: 84967):LKYHY (SEQ ID NO: 84232):NMTVE (SEQ ID NO: 84267):SXAXR (SEQ ID NO: 84303), SIPKAXX (SEQ ID NO: 84429):VPTEL (SEQ ID NO: 84378):SPIS-AA¹⁷-LYK (SEQ ID NO: 84887):DEYDKVV (SEQ ID NO: 84968):LKYHY (SEQ ID NO: 84232):EMVVE (SEQ ID NO: 84175):GXGXR (SEQ ID NO: 84208), HVTKPTX (SEQ ID NO: 84422):APTKL (SEQ ID NO: 84131):SPIS-AA¹⁷-LYK (SEQ ID NO: 84887):DDSSNVI (SEQ ID NO: 84965):LKYHY (SEQ ID NO: 84232):NMVVR (SEQ ID NO: 84275):SXGXH (SEQ ID NO: 84304), YVPKPXX (SEQ ID NO: 84433):APTKL (SEQ ID NO: 84131):SPIS-AA¹⁷-LYK (SEQ ID NO: 84887):DDSSNVI (SEQ ID NO: 84965):LKYHY (SEQ ID NO: 84232):NMVVR (SEQ ID NO: 84275):SXGXH (SEQ ID NO: 84304), TVPKPXX (SEQ ID NO: 84432):APTQL (SEQ ID NO: 84134):SPIS-AA¹⁷-LYK (SEQ ID NO: 84887):DDSSNVI (SEQ ID NO: 84965):LKYHY (SEQ ID NO: 84232):NMVVR (SEQ ID NO: 84275):AXGXH (SEQ ID NO: 84147), AVPKAXX (SEQ ID NO: 84404):APTKL (SEQ ID NO: 84131):SPIS-AA¹⁷-LYK (SEQ ID NO: 84887):DSSNNVI (SEQ ID NO: 84972):LKYHY (SEQ ID NO: 84232):NMVVK (SEQ ID NO: 84274):AXGXH (SEQ ID NO: 84147), KASKAXX (SEQ ID NO: 84423):VPTKL (SEQ ID NO: 84381):SPIS-AA¹⁷-LYK (SEQ ID NO: 84887):DKGVVTY (SEQ ID NO: 84969):LKYHY (SEQ ID NO: 84232):GMAVS (SEQ ID NO: 84194):EXGXR (SEQ ID NO: 84179), GSAGPXX (SEQ ID NO: 84420):TPTKM (SEQ ID NO: 84327):SPIS-AA¹⁷-LYK (SEQ ID NO: 84887):NDKQQII (SEQ ID NO: 84979):LKYHY (SEQ ID NO: 84232):GMVVD (SEQ ID NO: 84204):RXGXS (SEQ ID NO: 84291), AAPASXX (SEQ ID NO: 84401):VPARL (SEQ ID NO: 84352):SPIS-AA¹⁷-LYK (SEQ ID NO: 84887):DAANNVV (SEQ ID NO: 84963):LKYHY (SEQ ID NO: 84232):DMVVE (SEQ ID NO: 84161):AXGXR (SEQ ID NO: 84148), STPPTXX (SEQ ID NO: 84431):VPTRL (SEQ ID NO: 84385):SPIS-AA¹⁷-LYK (SEQ ID NO: 84887):DSANNVV (SEQ ID NO: 84971):LKYHY (SEQ ID NO: 84232):DMVVE (SEQ ID NO: 84161):SXGXR (SEQ ID NO: 84305), HVPKPXX (SEQ ID NO: 84421):APTKL (SEQ ID NO: 84131):SPIS-AA¹⁷-LYK (SEQ ID NO: 84887):DDSSNVI (SEQ ID NO: 84965):LKYHY (SEQ ID NO: 84232):NMVVR (SEQ ID NO: 84275):SXGXH (SEQ ID NO: 84304), RVPSTXX (SEQ ID NO: 84428):APVKT (SEQ ID NO: 84144):SPIS-AA¹⁷-LYK (SEQ ID NO: 84887):DNGRVLL (SEQ ID NO: 84970):LKYHY (SEQ ID NO: 84232):MIVEE (SEQ ID NO: 84241):XGXL (SEQ ID NO: 84122), ASAAPXX (SEQ ID NO: 84402):VPQAL (SEQ ID NO: 84364):SPIS-AA¹⁷-LYK (SEQ ID NO: 84887):VGRKPKV (SEQ ID NO: 84981):LKYHY (SEQ ID NO: 84232):MIVRS (SEQ ID NO: 84243):XKXS (SEQ ID NO: 84124), ASASPXX (SEQ ID NO: 84403):VSQDL (SEQ ID NO: 84387):SPIS-AA¹⁷-LYK (SEQ ID NO: 84887):IGKTPKI (SEQ ID NO: 84978):LKYHY (SEQ ID NO: 84232):MIVKS (SEQ ID NO: 84242):XKXS (SEQ ID NO: 84124), ASASPXX (SEQ ID NO: 84403):VPQDL (SEQ ID NO: 84365):SPIS-AA¹⁷-LYK (SEQ ID NO: 84887):VGRTPKV (SEQ ID NO: 84982):LKYHY (SEQ ID NO: 84232):MVVKS (SEQ ID NO: 84256):XKXS (SEQ ID NO: 84124), NDEGLEX (SEQ ID NO: 84426):VPTEE (SEQ ID NO: 84377):SPIS-AA¹⁷-LYK (SEQ ID NO: 84887):RIKPHQGQH (SEQ ID NO: 84980):LKYHY (SEQ ID NO: 84232):FLQHN (SEQ ID NO: 84184):KXEXR (SEQ ID NO: 84213), NDEGLEX (SEQ ID NO: 84426):VPTGQ (SEQ ID NO: 84379):SPIS-AA¹⁷-LYK (SEQ ID NO: 84887):RIKPHQGQH (SEQ ID NO: 84980):LKYHY (SEQ ID NO: 84232):LEEHS (SEQ ID NO: 84217):QXEXR (SEQ ID NO: 84276), SSVKXQP (SEQ ID NO: 84430):SRVHH (SEQ ID NO: 84297):SPIS-AA¹⁷-LYK (SEQ ID NO: 84887):EYVRKKPKL (SEQ ID NO: 84974):LKYHY (SEQ ID NO: 84232):RLEEH (SEQ ID NO: 84279):LEXAXA (SEQ ID NO: 84400), RNVQXRP (SEQ ID NO: 84427):TQVQL (SEQ ID NO: 84340):SPIS-AA¹⁷-LYK (SEQ ID NO: 84887):EIVRKKPIF (SEQ ID NO: 84973):LKYHY (SEQ ID NO: 84232):TLEDH (SEQ ID NO: 84307):LAXKXE (SEQ ID NO: 84399), KIPKAXX (SEQ ID NO: 84424):VPTEL (SEQ ID NO: 84378):EPIS-AA¹⁷-LYL (SEQ ID NO: 84874):DENEKVV (SEQ ID NO: 84966):KFKYE (SEQ ID NO: 84211):DMAVS (SEQ ID NO: 84150):GXGXR (SEQ ID NO: 84208), GIPEPXX (SEQ ID NO: 84419):VPTKM (SEQ ID NO: 84382):EPIS-AA¹⁷-LYL (SEQ ID NO: 84874):DENKNVV (SEQ ID NO: 84967):KFKYE (SEQ ID NO: 84211):NMAVS (SEQ ID NO: 84262):SXAXR (SEQ ID NO: 84303), SIPKAXX (SEQ ID NO: 84429):VPTEL (SEQ ID NO: 84378):EPIS-AA¹⁷-LYL (SEQ ID NO: 84874):DEYDKVV (SEQ ID NO: 84968):KFKYE (SEQ ID NO: 84211):EMAVS (SEQ ID NO: 84164):GXGXR (SEQ ID NO: 84208), HVTKPTX (SEQ ID NO: 84422):VPTKL (SEQ ID NO: 84381):EPIS-AA¹⁷-LYL (SEQ ID NO: 84874):DDSSNVI (SEQ ID NO: 84965):KFKYE (SEQ ID NO: 84211):NMAVS (SEQ ID NO: 84262):SXGXH (SEQ ID NO: 84304), YVPKPXX (SEQ ID NO: 84433):VPTKL (SEQ ID NO: 84381):EPIS-AA¹⁷-LYL (SEQ ID NO: 84874):DDSSNVI (SEQ ID NO: 84965):KFKYE (SEQ ID NO: 84211):NMAVS (SEQ ID NO: 84262):SXGXH (SEQ ID NO: 84304), TVPKPXX (SEQ ID NO: 84432):VPTQL (SEQ ID NO: 84384):EPIS-AA¹⁷-LYL (SEQ ID NO: 84874):DDSSNVI (SEQ ID NO: 84965):KFKYE (SEQ ID NO: 84211):NMAVS (SEQ ID NO: 84262):AXGXH (SEQ ID NO: 84147), AVPKAXX (SEQ ID NO: 84404):VPTKL (SEQ ID NO: 84381):EPIS-AA¹⁷-LYL (SEQ ID NO: 84874):DSSNNVI (SEQ ID NO: 84972):KFKYE (SEQ ID NO: 84211):NMAVS (SEQ ID NO: 84262):AXGXH (SEQ ID NO: 84147), KVGKAXX (SEQ ID NO: 84425):VPTKL (SEQ ID NO: 84381):EPIS-AA¹⁷-LYL (SEQ ID NO: 84874):DDMGVPT (SEQ ID NO: 84964):KFKYE (SEQ ID NO: 84211):EGMSAVS (SEQ ID NO: 84405):XGXR (SEQ ID NO: 84123), GSAGPXX (SEQ ID NO: 84420):VPTKM (SEQ ID NO: 84382):EPIS-AA¹⁷-LYL (SEQ ID NO: 84874):NDKQQII (SEQ ID NO: 84979):KFKYE (SEQ ID NO: 84211):GMAVS (SEQ ID NO: 84194):RXGXS (SEQ ID NO: 84291), AAPASXX (SEQ ID NO: 84401):VPTRL (SEQ ID NO: 84385):EPIS-AA¹⁷-LYL (SEQ ID NO: 84874):DAANNVV (SEQ ID NO: 84963):KFKYE (SEQ ID NO: 84211):DMAVS (SEQ ID NO: 84150):AXGXR (SEQ ID NO: 84148), STPPTXX (SEQ ID NO: 84431):VPTRL (SEQ ID NO: 84385):EPIS-AA¹⁷-LYL (SEQ ID NO: 84874):DSANNVV (SEQ ID NO: 84971):KFKYE (SEQ ID NO: 84211):DMAVS (SEQ ID NO: 84150):SXGXR (SEQ ID NO: 84305), HVPKPXX (SEQ ID NO: 84421):VPTKL (SEQ ID NO: 84381):EPIS-AA¹⁷-LYL (SEQ ID NO: 84874):DDSSNVI (SEQ ID NO: 84965):KFKYE (SEQ ID NO: 84211):NMAVS (SEQ ID NO: 84262):SXGXH (SEQ ID NO: 84304), RVPSTXX (SEQ ID NO: 84428):VPTKT (SEQ ID NO: 84383):EPIS-AA¹⁷-LYL (SEQ ID NO: 84874):DNGRVLL (SEQ ID NO: 84970):KFKYE (SEQ ID NO: 84211):MIAVS (SEQ ID NO: 84234):XGXL (SEQ ID NO: 84122), ASAAPXX (SEQ ID NO: 84402):VPTAL (SEQ ID NO: 84375):EPIS-AA¹⁷-LYL (SEQ ID NO: 84874):VGRKPKV (SEQ ID NO: 84981):KFKYE (SEQ ID NO: 84211):MIAVS (SEQ ID NO: 84234):XKXS (SEQ ID NO: 84124), ASASPXX (SEQ ID NO: 84403):VPTDL (SEQ ID NO: 84376):EPIS-AA¹⁷-LYL (SEQ ID NO: 84874):IGKTPKI (SEQ ID NO: 84978):KFKYE (SEQ ID NO: 84211):MIAVS (SEQ ID NO: 84234):XKXS (SEQ ID NO: 84124), ASASPXX (SEQ ID NO: 84403):VPTDL (SEQ ID NO: 84376):EPIS-AA¹⁷-LYL (SEQ ID NO: 84874):VGRTPKV (SEQ ID NO: 84982):KFKYE (SEQ ID NO: 84211):MVAVS (SEQ ID NO: 84248):XKXS (SEQ ID NO: 84124), NDEGLEX (SEQ ID NO: 84426):VPTEE (SEQ ID NO: 84377):EPIS-AA¹⁷-LYL (SEQ ID NO: 84874):RIKPHQGQH (SEQ ID NO: 84980):KFKYE (SEQ ID NO: 84211):FLAVS (SEQ ID NO: 84180):KXEXR (SEQ ID NO: 84213), NDEGLEX (SEQ ID NO: 84426):VPTGQ (SEQ ID NO: 84379):EPIS-AA¹⁷-LYL (SEQ ID NO: 84874):RIKPHQGQH (SEQ ID NO: 84980):KFKYE (SEQ ID NO: 84211):LEAVS (SEQ ID NO: 84214):QXEXR (SEQ ID NO: 84276), SSVKXQP (SEQ ID NO: 84430):VPTHH (SEQ ID NO: 84380):EPIS-AA¹⁷-LYL (SEQ ID NO: 84874):EYVRKKPKL (SEQ ID NO: 84974):KFKYE (SEQ ID NO: 84211):RLAVS (SEQ ID NO: 84277):LEXAXA (SEQ ID NO: 84400), RNVQXRP (SEQ ID NO: 84427):VPTQL (SEQ ID NO: 84384):EPIS-AA¹⁷-LYL (SEQ ID NO: 84874):EIVRKKPIF (SEQ ID NO: 84973):KFKYE (SEQ ID NO: 84211):TLAVS (SEQ ID NO: 84306):LAXKXE (SEQ ID NO: 84399), KIPKAXX (SEQ ID NO: 84424):VPTEL (SEQ ID NO: 84378):EPIS-AA¹⁷-LYL (SEQ ID NO: 84874):DENEKVV (SEQ ID NO: 84966):KFKYE (SEQ ID NO: 84211):DMVVE (SEQ ID NO: 84161):GXGXR (SEQ ID NO: 84208), GIPEPXX (SEQ ID NO: 84419):VPEKM (SEQ ID NO: 84360):EPIS-AA¹⁷-LYL (SEQ ID NO: 84874):DENKNVV (SEQ ID NO: 84967):KFKYE (SEQ ID NO: 84211):NMTVE (SEQ ID NO: 84267):SXAXR (SEQ ID NO: 84303), SIPKAXX (SEQ ID NO: 84429):VPTEL (SEQ ID NO: 84378):EPIS-AA¹⁷-LYL (SEQ ID NO: 84874):DEYDKVV (SEQ ID NO: 84968):KFKYE (SEQ ID NO: 84211):EMVVE (SEQ ID NO: 84175):GXGXR (SEQ ID NO: 84208), HVTKPTX (SEQ ID NO: 84422):APTKL (SEQ ID NO: 84131):EPIS-AA¹⁷-LYL (SEQ ID NO: 84874):DDSSNVI (SEQ ID NO: 84965):KFKYE (SEQ ID NO: 84211):NMVVR (SEQ ID NO: 84275):SXGXH (SEQ ID NO: 84304), YVPKPXX (SEQ ID NO: 84433):APTKL (SEQ ID NO: 84131):EPIS-AA¹⁷-LYL (SEQ ID NO: 84874):DDSSNVI (SEQ ID NO: 84965):KFKYE (SEQ ID NO: 84211):NMVVR (SEQ ID NO: 84275):SXGXH (SEQ ID NO: 84304), TVPKPXX (SEQ ID NO: 84432):APTQL (SEQ ID NO: 84134):EPIS-AA¹⁷-LYL (SEQ ID NO: 84874):DDSSNVI (SEQ ID NO: 84965):KFKYE (SEQ ID NO: 84211):NMVVR (SEQ ID NO: 84275):AXGXH (SEQ ID NO: 84147), AVPKAXX (SEQ ID NO: 84404):APTKL (SEQ ID NO: 84131):EPIS-AA¹⁷-LYL (SEQ ID NO: 84874):DSSNNVI (SEQ ID NO: 84972):KFKYE (SEQ ID NO: 84211):NMVVK (SEQ ID NO: 84274):AXGXH (SEQ ID NO: 84147), KVGKAXX (SEQ ID NO: 84425):VPTKL (SEQ ID NO: 84381):EPIS-AA¹⁷-LYL (SEQ ID NO: 84874):DDMGVPT (SEQ ID NO: 84964):KFKYE (SEQ ID NO: 84211):EGMSVAE (SEQ ID NO: 84411):XGXR (SEQ ID NO: 84123), GSAGPXX (SEQ ID NO: 84420):TPTKM (SEQ ID NO: 84327):EPIS-AA¹⁷-LYL (SEQ ID NO: 84874):NDKQQII (SEQ ID NO: 84979):KFKYE (SEQ ID NO: 84211):GMVVD (SEQ ID NO: 84204):RXGXS (SEQ ID NO: 84291), AAPASXX (SEQ ID NO: 84401):VPARL (SEQ ID NO: 84352):EPIS-AA¹⁷-LYL (SEQ ID NO: 84874):DAANNVV (SEQ ID NO: 84963):KFKYE (SEQ ID NO: 84211):DMVVE (SEQ ID NO: 84161):AXGXR (SEQ ID NO: 84148), STPPTXX (SEQ ID NO: 84431):VPTRL (SEQ ID NO: 84385):EPIS-AA¹⁷-LYL (SEQ ID NO: 84874):DSANNVV (SEQ ID NO: 84971):KFKYE (SEQ ID NO: 84211):DMVVE (SEQ ID NO: 84161):SXGXR (SEQ ID NO: 84305), HVPKPXX (SEQ ID NO: 84421):APTKL (SEQ ID NO: 84131):EPIS-AA¹⁷-LYL (SEQ ID NO: 84874):DDSSNVI (SEQ ID NO: 84965):KFKYE (SEQ ID NO: 84211):NMVVR (SEQ ID NO: 84275):SXGXH (SEQ ID NO: 84304), RVPSTXX (SEQ ID NO: 84428):APVKT (SEQ ID NO: 84144):EPIS-AA¹⁷-LYL (SEQ ID NO: 84874):DNGRVLL (SEQ ID NO: 84970):KFKYE (SEQ ID NO: 84211):MIVEE (SEQ ID NO: 84241):XGXL (SEQ ID NO: 84122), ASAAPXX (SEQ ID NO: 84402):VPQAL (SEQ ID NO: 84364):EPIS-AA¹⁷-LYL (SEQ ID NO: 84874):VGRKPKV (SEQ ID NO: 84981):KFKYE (SEQ ID NO: 84211):MIVRS (SEQ ID NO: 84243):XKXS (SEQ ID NO: 84124), ASASPXX (SEQ ID NO: 84403):VSQDL (SEQ ID NO: 84387):EPIS-AA¹⁷-LYL (SEQ ID NO: 84874):IGKTPKI (SEQ ID NO: 84978):KFKYE (SEQ ID NO: 84211):MIVKS (SEQ ID NO: 84242):XKXS (SEQ ID NO: 84124), ASASPXX (SEQ ID NO: 84403):VPQDL (SEQ ID NO: 84365):EPIS-AA¹⁷-LYL (SEQ ID NO: 84874):VGRTPKV (SEQ ID NO: 84982):KFKYE (SEQ ID NO: 84211):MVVKS (SEQ ID NO: 84256):XKXS (SEQ ID NO: 84124), NDEGLEX (SEQ ID NO: 84426):VPTEE (SEQ ID NO: 84377):EPIS-AA¹⁷-LYL (SEQ ID NO: 84874):RIKPHQGQH (SEQ ID NO: 84980):KFKYE (SEQ ID NO: 84211):FLQHN (SEQ ID NO: 84184):KXEXR (SEQ ID NO: 84213), NDEGLEX (SEQ ID NO: 84426):VPTGQ (SEQ ID NO: 84379):EPIS-AA¹⁷-LYL (SEQ ID NO: 84874):RIKPHQGQH (SEQ ID NO: 84980):KFKYE (SEQ ID NO: 84211):LEEHS (SEQ ID NO: 84217):QXEXR (SEQ ID NO: 84276), SSVKXQP (SEQ ID NO: 84430):SRVHH (SEQ ID NO: 84297):EPIS-AA¹⁷-LYL (SEQ ID NO: 84874):EYVRKKPKL (SEQ ID NO: 84974):KFKYE (SEQ ID NO: 84211):RLEEH (SEQ ID NO: 84279):LEXAXA (SEQ ID NO: 84400), RNVQXRP (SEQ ID NO: 84427):TQVQL (SEQ ID NO: 84340):EPIS-AA¹⁷-LYL (SEQ ID NO: 84874):EIVRKKPIF (SEQ ID NO: 84973):KFKYE (SEQ ID NO: 84211):TLEDH (SEQ ID NO: 84307):LAXKXE (SEQ ID NO: 84399), KIPKAXX (SEQ ID NO: 84424):TPTEL (SEQ ID NO: 84323):SPIN-AA¹⁷-LYF (SEQ ID NO: 84884):DENEKVV (SEQ ID NO: 84966):YGKIP (SEQ ID NO: 84397):DMVVD (SEQ ID NO: 84160):GXGXR (SEQ ID NO: 84208), GIPEPXX (SEQ ID NO: 84419):TPTKM (SEQ ID NO: 84327):SPIN-AA¹⁷-LYF (SEQ ID NO: 84884):DENKNVV (SEQ ID NO: 84967):YGKIP (SEQ ID NO: 84397):NMVVD (SEQ ID NO: 84272):SXAXR (SEQ ID NO: 84303), SIPKAXX (SEQ ID NO: 84429):TPTEL (SEQ ID NO: 84323):SPIN-AA¹⁷-LYF (SEQ ID NO: 84884):DEYDKVV (SEQ ID NO: 84968):YGKIP (SEQ ID NO: 84397):EMVVD (SEQ ID NO: 84174):GXGXR (SEQ ID NO: 84208), HVTKPTX (SEQ ID NO: 84422):TPTKL (SEQ ID NO: 84326):SPIN-AA¹⁷-LYF (SEQ ID NO: 84884):DDSSNVI (SEQ ID NO: 84965):YGKIP (SEQ ID NO: 84397):NMVVD (SEQ ID NO: 84272):SXGXH (SEQ ID NO: 84304), YVPKPXX (SEQ ID NO: 84433):TPTKL (SEQ ID NO: 84326):SPIN-AA¹⁷-LYF (SEQ ID NO: 84884):DDSSNVI (SEQ ID NO: 84965):YGKIP (SEQ ID NO: 84397):NMVVD (SEQ ID NO: 84272):SXGXH (SEQ ID NO: 84304), TVPKPXX (SEQ ID NO: 84432):TPTQL (SEQ ID NO: 84329):SPIN-AA¹⁷-LYF (SEQ ID NO: 84884):DDSSNVI (SEQ ID NO: 84965):YGKIP (SEQ ID NO: 84397):NMVVD (SEQ ID NO: 84272):AXGXH (SEQ ID NO: 84147), AVPKAXX (SEQ ID NO: 84404):TPTKL (SEQ ID NO: 84326):SPIN-AA¹⁷-LYF (SEQ ID NO: 84884):DSSNNVI (SEQ ID NO: 84972):YGKIP (SEQ ID NO: 84397):NMVVD (SEQ ID NO: 84272):AXGXH (SEQ ID NO: 84147), KVGKAXX (SEQ ID NO: 84425):TPTKL (SEQ ID NO: 84326):SPIN-AA¹⁷-LYF (SEQ ID NO: 84884):DDMGVPT (SEQ ID NO: 84964):YGKIP (SEQ ID NO: 84397):EGMSVVD (SEQ ID NO: 84415):XGXR (SEQ ID NO: 84123), KASKAXX (SEQ ID NO: 84423):TPTKL (SEQ ID NO: 84326):SPIN-AA¹⁷-LYF (SEQ ID NO: 84884):DKGVVTY (SEQ ID NO: 84969):YGKIP (SEQ ID NO: 84397):GMVVD (SEQ ID NO: 84204):EXGXR (SEQ ID NO: 84179), AAPASXX (SEQ ID NO: 84401):TPTRL (SEQ ID NO: 84330):SPIN-AA¹⁷-LYF (SEQ ID NO: 84884):DAANNVV (SEQ ID NO: 84963):YGKIP (SEQ ID NO: 84397):DMVVD (SEQ ID NO: 84160):AXGXR (SEQ ID NO: 84148), STPPTXX (SEQ ID NO: 84431):TPTRL (SEQ ID NO: 84330):SPIN-AA¹⁷-LYF (SEQ ID NO: 84884):DSANNVV (SEQ ID NO: 84971):YGKIP (SEQ ID NO: 84397):DMVVD (SEQ ID NO: 84160):SXGXR (SEQ ID NO: 84305), HVPKPXX (SEQ ID NO: 84421):TPTKL (SEQ ID NO: 84326):SPIN-AA¹⁷-LYF (SEQ ID NO: 84884):DDSSNVI (SEQ ID NO: 84965):YGKIP (SEQ ID NO: 84397):NMVVD (SEQ ID NO: 84272):SXGXH (SEQ ID NO: 84304), RVPSTXX (SEQ ID NO: 84428):TPTKT (SEQ ID NO: 84328):SPIN-AA¹⁷-LYF (SEQ ID NO: 84884):DNGRVLL (SEQ ID NO: 84970):YGKIP (SEQ ID NO: 84397):MIVVD (SEQ ID NO: 84244):XGXL (SEQ ID NO: 84122), ASAAPXX (SEQ ID NO: 84402):TPTAL (SEQ ID NO: 84320):SPIN-AA¹⁷-LYF (SEQ ID NO: 84884):VGRKPKV (SEQ ID NO: 84981):YGKIP (SEQ ID NO: 84397):MIVVD (SEQ ID NO: 84244):XKXS (SEQ ID NO: 84124), ASASPXX (SEQ ID NO: 84403):TPTDL (SEQ ID NO: 84321):SPIN-AA¹⁷-LYF (SEQ ID NO: 84884):IGKTPKI (SEQ ID NO: 84978):YGKIP (SEQ ID NO: 84397):MIVVD (SEQ ID NO: 84244):XKXS (SEQ ID NO: 84124), ASASPXX (SEQ ID NO: 84403):TPTDL (SEQ ID NO: 84321):SPIN-AA¹⁷-LYF (SEQ ID NO: 84884):VGRTPKV (SEQ ID NO: 84982):YGKIP (SEQ ID NO: 84397):MVVVD (SEQ ID NO: 84258):XKXS (SEQ ID NO: 84124), NDEGLEX (SEQ ID NO: 84426):TPTEE (SEQ ID NO: 84322):SPIN-AA¹⁷-LYF (SEQ ID NO: 84884):RIKPHQGQH (SEQ ID NO: 84980):YGKIP (SEQ ID NO: 84397):FLVVD (SEQ ID NO: 84190):KXEXR (SEQ ID NO: 84213), NDEGLEX (SEQ ID NO: 84426):TPTGQ (SEQ ID NO: 84324):SPIN-AA¹⁷-LYF (SEQ ID NO: 84884):RIKPHQGQH (SEQ ID NO: 84980):YGKIP (SEQ ID NO: 84397):LEVVD (SEQ ID NO: 84224):QXEXR (SEQ ID NO: 84276), SSVKXQP (SEQ ID NO: 84430):TPTHH (SEQ ID NO: 84325):SPIN-AA¹⁷-LYF (SEQ ID NO: 84884):EYVRKKPKL (SEQ ID NO: 84974):YGKIP (SEQ ID NO: 84397):RLVVD (SEQ ID NO: 84287):LEXAXA (SEQ ID NO: 84400), RNVQXRP (SEQ ID NO: 84427):TPTQL (SEQ ID NO: 84329):SPIN-AA¹⁷-LYF (SEQ ID NO: 84884):EIVRKKPIF (SEQ ID NO: 84973):YGKIP (SEQ ID NO: 84397):TLVVD (SEQ ID NO: 84316):LAXKXE (SEQ ID NO: 84399), KIPKAXX (SEQ ID NO: 84424):VPTEL (SEQ ID NO: 84378):SPIN-AA¹⁷-LYF (SEQ ID NO: 84884):DENEKVV (SEQ ID NO: 84966):YGKIP (SEQ ID NO: 84397):DMVVE (SEQ ID NO: 84161):GXGXR (SEQ ID NO: 84208), GIPEPXX (SEQ ID NO: 84419):VPEKM (SEQ ID NO: 84360):SPIN-AA¹⁷-LYF (SEQ ID NO: 84884):DENKNVV (SEQ ID NO: 84967):YGKIP (SEQ ID NO: 84397):NMTVE (SEQ ID NO: 84267):SXAXR (SEQ ID NO: 84303), SIPKAXX (SEQ ID NO: 84429):VPTEL (SEQ ID NO: 84378):SPIN-AA¹⁷-LYF (SEQ ID NO: 84884):DEYDKVV (SEQ ID NO: 84968):YGKIP (SEQ ID NO: 84397):EMVVE (SEQ ID NO: 84175):GXGXR (SEQ ID NO: 84208), HVTKPTX (SEQ ID NO: 84422):APTKL (SEQ ID NO: 84131):SPIN-AA¹⁷-LYF (SEQ ID NO: 84884):DDSSNVI (SEQ ID NO: 84965):YGKIP (SEQ ID NO: 84397):NMVVR (SEQ ID NO: 84275):SXGXH (SEQ ID NO: 84304), YVPKPXX (SEQ ID NO: 84433):APTKL (SEQ ID NO: 84131):SPIN-AA¹⁷-LYF (SEQ ID NO: 84884):DDSSNVI (SEQ ID NO: 84965):YGKIP (SEQ ID NO: 84397):NMVVR (SEQ ID NO: 84275):SXGXH (SEQ ID NO: 84304), TVPKPXX (SEQ ID NO: 84432):APTQL (SEQ ID NO: 84134):SPIN-AA¹⁷-LYF (SEQ ID NO: 84884):DDSSNVI (SEQ ID NO: 84965):YGKIP (SEQ ID NO: 84397):NMVVR (SEQ ID NO: 84275):AXGXH (SEQ ID NO: 84147), AVPKAXX (SEQ ID NO: 84404):APTKL (SEQ ID NO: 84131):SPIN-AA¹⁷-LYF (SEQ ID NO: 84884):DSSNNVI (SEQ ID NO: 84972):YGKIP (SEQ ID NO: 84397):NMVVK (SEQ ID NO: 84274):AXGXH (SEQ ID NO: 84147), KVGKAXX (SEQ ID NO: 84425):VPTKL (SEQ ID NO: 84381):SPIN-AA¹⁷-LYF (SEQ ID NO: 84884):DDMGVPT (SEQ ID NO: 84964):YGKIP (SEQ ID NO: 84397):EGMSVAE (SEQ ID NO: 84411):XGXR (SEQ ID NO: 84123), KASKAXX (SEQ ID NO: 84423):VPTKL (SEQ ID NO: 84381):SPIN-AA¹⁷-LYF (SEQ ID NO: 84884):DKGVVTY (SEQ ID NO: 84969):YGKIP (SEQ ID NO: 84397):GMAVS (SEQ ID NO: 84194):EXGXR (SEQ ID NO: 84179), AAPASXX (SEQ ID NO: 84401):VPARL (SEQ ID NO: 84352):SPIN-AA¹⁷-LYF (SEQ ID NO: 84884):DAANNVV (SEQ ID NO: 84963):YGKIP (SEQ ID NO: 84397):DMVVE (SEQ ID NO: 84161):AXGXR (SEQ ID NO: 84148), STPPTXX (SEQ ID NO: 84431):VPTRL (SEQ ID NO: 84385):SPIN-AA¹⁷-LYF (SEQ ID NO: 84884):DSANNVV (SEQ ID NO: 84971):YGKIP (SEQ ID NO: 84397):DMVVE (SEQ ID NO: 84161):SXGXR (SEQ ID NO: 84305), HVPKPXX (SEQ ID NO: 84421):APTKL (SEQ ID NO: 84131):SPIN-AA¹⁷-LYF (SEQ ID NO: 84884):DDSSNVI (SEQ ID NO: 84965):YGKIP (SEQ ID NO: 84397):NMVVR (SEQ ID NO: 84275):SXGXH (SEQ ID NO: 84304), RVPSTXX (SEQ ID NO: 84428):APVKT (SEQ ID NO: 84144):SPIN-AA¹⁷-LYF (SEQ ID NO: 84884):DNGRVLL (SEQ ID NO: 84970):YGKIP (SEQ ID NO: 84397):MIVEE (SEQ ID NO: 84241):XGXL (SEQ ID NO: 84122), ASAAPXX (SEQ ID NO: 84402):VPQAL (SEQ ID NO: 84364):SPIN-AA¹⁷-LYF (SEQ ID NO: 84884):VGRKPKV (SEQ ID NO: 84981):YGKIP (SEQ ID NO: 84397):MIVRS (SEQ ID NO: 84243):XKXS (SEQ ID NO: 84124), ASASPXX (SEQ ID NO: 84403):VSQDL (SEQ ID NO: 84387):SPIN-AA¹⁷-LYF (SEQ ID NO: 84884):IGKTPKI (SEQ ID NO: 84978):YGKIP (SEQ ID NO: 84397):MIVKS (SEQ ID NO: 84242):XKXS (SEQ ID NO: 84124), ASASPXX (SEQ ID NO: 84403):VPQDL (SEQ ID NO: 84365):SPIN-AA¹⁷-LYF (SEQ ID NO: 84884):VGRTPKV (SEQ ID NO: 84982):YGKIP (SEQ ID NO: 84397):MVVKS (SEQ ID NO: 84256):XKXS (SEQ ID NO: 84124), NDEGLEX (SEQ ID NO: 84426):VPTEE (SEQ ID NO: 84377):SPIN-AA¹⁷-LYF (SEQ ID NO: 84884):RIKPHQGQH (SEQ ID NO: 84980):YGKIP (SEQ ID NO: 84397):FLQHN (SEQ ID NO: 84184):KXEXR (SEQ ID NO: 84213), NDEGLEX (SEQ ID NO: 84426):VPTGQ (SEQ ID NO: 84379):SPIN-AA¹⁷-LYF (SEQ ID NO: 84884):RIKPHQGQH (SEQ ID NO: 84980):YGKIP (SEQ ID NO: 84397):LEEHS (SEQ ID NO: 84217):QXEXR (SEQ ID NO: 84276), SSVKXQP (SEQ ID NO: 84430):SRVHH (SEQ ID NO: 84297):SPIN-AA¹⁷-LYF (SEQ ID NO: 84884):EYVRKKPKL (SEQ ID NO: 84974):YGKIP (SEQ ID NO: 84397):RLEEH (SEQ ID NO: 84279):LEXAXA (SEQ ID NO: 84400), RNVQXRP (SEQ ID NO: 84427):TQVQL (SEQ ID NO: 84340):SPIN-AA¹⁷-LYF (SEQ ID NO: 84884):EIVRKKPIF (SEQ ID NO: 84973):YGKIP (SEQ ID NO: 84397):TLEDH (SEQ ID NO: 84307):LAXKXE (SEQ ID NO: 84399), KIPKAXX (SEQ ID NO: 84424):VPAEL (SEQ ID NO: 84345):SPIS-AA¹⁷-LYI (SEQ ID NO: 84886):DENEKVV (SEQ ID NO: 84966):YKQYE (SEQ ID NO: 84398):DMVVE (SEQ ID NO: 84161):GXGXR (SEQ ID NO: 84208), GIPEPXX (SEQ ID NO: 84419):VPAKM (SEQ ID NO: 84349):SPIS-AA¹⁷-LYI (SEQ ID NO: 84886):DENKNVV (SEQ ID NO: 84967):YKQYE (SEQ ID NO: 84398):NMVVE (SEQ ID NO: 84273):SXAXR (SEQ ID NO: 84303), SIPKAXX (SEQ ID NO: 84429):VPAEL (SEQ ID NO: 84345):SPIS-AA¹⁷-LYI (SEQ ID NO: 84886):DEYDKVV (SEQ ID NO: 84968):YKQYE (SEQ ID NO: 84398):EMVVE (SEQ ID NO: 84175):GXGXR (SEQ ID NO: 84208), HVTKPTX (SEQ ID NO: 84422):VPAKL (SEQ ID NO: 84348):SPIS-AA¹⁷-LYI (SEQ ID NO: 84886):DDSSNVI (SEQ ID NO: 84965):YKQYE (SEQ ID NO: 84398):NMVVE (SEQ ID NO: 84273):SXGXH (SEQ ID NO: 84304), YVPKPXX (SEQ ID NO: 84433):VPAKL (SEQ ID NO: 84348):SPIS-AA¹⁷-LYI (SEQ ID NO: 84886):DDSSNVI (SEQ ID NO: 84965):YKQYE (SEQ ID NO: 84398):NMVVE (SEQ ID NO: 84273):SXGXH (SEQ ID NO: 84304), TVPKPXX (SEQ ID NO: 84432):VPAQL (SEQ ID NO: 84351):SPIS-AA¹⁷-LYI (SEQ ID NO: 84886):DDSSNVI (SEQ ID NO: 84965):YKQYE (SEQ ID NO: 84398):NMVVE (SEQ ID NO: 84273):AXGXH (SEQ ID NO: 84147), AVPKAXX (SEQ ID NO: 84404):VPAKL (SEQ ID NO: 84348):SPIS-AA¹⁷-LYI (SEQ ID NO: 84886):DSSNNVI (SEQ ID NO: 84972):YKQYE (SEQ ID NO: 84398):NMVVE (SEQ ID NO: 84273):AXGXH (SEQ ID NO: 84147), KVGKAXX (SEQ ID NO: 84425):VPAKL (SEQ ID NO: 84348):SPIS-AA¹⁷-LYI (SEQ ID NO: 84886):DDMGVPT (SEQ ID NO: 84964):YKQYE (SEQ ID NO: 84398):EGMSVVE (SEQ ID NO: 84416):XGXR (SEQ ID NO: 84123), KASKAXX (SEQ ID NO: 84423):VPAKL (SEQ ID NO: 84348):SPIS-AA¹⁷-LYI (SEQ ID NO: 84886):DKGVVTY (SEQ ID NO: 84969):YKQYE (SEQ ID NO: 84398):GMVVE (SEQ ID NO: 84205):EXGXR (SEQ ID NO: 84179), GSAGPXX (SEQ ID NO: 84420):VPAKM (SEQ ID NO: 84349):SPIS-AA¹⁷-LYI (SEQ ID NO: 84886):NDKQQII (SEQ ID NO: 84979):YKQYE (SEQ ID NO: 84398):GMVVE (SEQ ID NO: 84205):RXGXS (SEQ ID NO: 84291), STPPTXX (SEQ ID NO: 84431):VPARL (SEQ ID NO: 84352):SPIS-AA¹⁷-LYI (SEQ ID NO: 84886):DSANNVV (SEQ ID NO: 84971):YKQYE (SEQ ID NO: 84398):DMVVE (SEQ ID NO: 84161):SXGXR (SEQ ID NO: 84305), HVPKPXX (SEQ ID NO: 84421):VPAKL (SEQ ID NO: 84348):SPIS-AA¹⁷-LYI (SEQ ID NO: 84886):DDSSNVI (SEQ ID NO: 84965):YKQYE (SEQ ID NO: 84398):NMVVE (SEQ ID NO: 84273):SXGXH (SEQ ID NO: 84304), RVPSTXX (SEQ ID NO: 84428):VPAKT (SEQ ID NO: 84350):SPIS-AA¹⁷-LYI (SEQ ID NO: 84886):DNGRVLL (SEQ ID NO: 84970):YKQYE (SEQ ID NO: 84398):MIVVE (SEQ ID NO: 84245):XGXL (SEQ ID NO: 84122), ASAAPXX (SEQ ID NO: 84402):VPAAL (SEQ ID NO: 84342):SPIS-AA¹⁷-LYI (SEQ ID NO: 84886):VGRKPKV (SEQ ID NO: 84981):YKQYE (SEQ ID NO: 84398):MIVVE (SEQ ID NO: 84245):XKXS (SEQ ID NO: 84124), ASASPXX (SEQ ID NO: 84403):VPADL (SEQ ID NO: 84343):SPIS-AA¹⁷-LYI (SEQ ID NO: 84886):IGKTPKI (SEQ ID NO: 84978):YKQYE (SEQ ID NO: 84398):MIVVE (SEQ ID NO: 84245):XKXS (SEQ ID NO: 84124), ASASPXX (SEQ ID NO: 84403):VPADL (SEQ ID NO: 84343):SPIS-AA¹⁷-LYI (SEQ ID NO: 84886):VGRTPKV (SEQ ID NO: 84982):YKQYE (SEQ ID NO: 84398):MVVVE (SEQ ID NO: 84259):XKXS (SEQ ID NO: 84124), NDEGLEX (SEQ ID NO: 84426):VPAEE (SEQ ID NO: 84344):SPIS-AA¹⁷-LYI (SEQ ID NO: 84886):RIKPHQGQH (SEQ ID NO: 84980):YKQYE (SEQ ID NO: 84398):FLVVE (SEQ ID NO: 84191):KXEXR (SEQ ID NO: 84213), NDEGLEX (SEQ ID NO: 84426):VPAGQ (SEQ ID NO: 84346):SPIS-AA¹⁷-LYI (SEQ ID NO: 84886):RIKPHQGQH (SEQ ID NO: 84980):YKQYE (SEQ ID NO: 84398):LEVVE (SEQ ID NO: 84225):QXEXR (SEQ ID NO: 84276), SSVKXQP (SEQ ID NO: 84430):VPAHH (SEQ ID NO: 84347):SPIS-AA¹⁷-LYI (SEQ ID NO: 84886):EYVRKKPKL (SEQ ID NO: 84974):YKQYE (SEQ ID NO: 84398):RLVVE (SEQ ID NO: 84288):LEXAXA (SEQ ID NO: 84400), RNVQXRP (SEQ ID NO: 84427):VPAQL (SEQ ID NO: 84351):SPIS-AA¹⁷-LYI (SEQ ID NO: 84886):EIVRKKPIF (SEQ ID NO: 84973):YKQYE (SEQ ID NO: 84398):TLVVE (SEQ ID NO: 84317):LAXKXE (SEQ ID NO: 84399), KIPKAXX (SEQ ID NO: 84424):VPTEL (SEQ ID NO: 84378):SPIS-AA¹⁷-LYI (SEQ ID NO: 84886):DENEKVV (SEQ ID NO: 84966):YKQYE (SEQ ID NO: 84398):DMVVE (SEQ ID NO: 84161):GXGXR (SEQ ID NO: 84208), GIPEPXX (SEQ ID NO: 84419):VPEKM (SEQ ID NO: 84360):SPIS-AA¹⁷-LYI (SEQ ID NO: 84886):DENKNVV (SEQ ID NO: 84967):YKQYE (SEQ ID NO: 84398):NMTVE (SEQ ID NO: 84267):SXAXR (SEQ ID NO: 84303), SIPKAXX (SEQ ID NO: 84429):VPTEL (SEQ ID NO: 84378):SPIS-AA¹⁷-LYI (SEQ ID NO: 84886):DEYDKVV (SEQ ID NO: 84968):YKQYE (SEQ ID NO: 84398):EMVVE (SEQ ID NO: 84175):GXGXR (SEQ ID NO: 84208), HVTKPTX (SEQ ID NO: 84422):APTKL (SEQ ID NO: 84131):SPIS-AA¹⁷-LYI (SEQ ID NO: 84886):DDSSNVI (SEQ ID NO: 84965):YKQYE (SEQ ID NO: 84398):NMVVR (SEQ ID NO: 84275):SXGXH (SEQ ID NO: 84304), YVPKPXX (SEQ ID NO: 84433):APTKL (SEQ ID NO: 84131):SPIS-AA¹⁷-LYI (SEQ ID NO: 84886):DDSSNVI (SEQ ID NO: 84965):YKQYE (SEQ ID NO: 84398):NMVVR (SEQ ID NO: 84275):SXGXH (SEQ ID NO: 84304), TVPKPXX (SEQ ID NO: 84432):APTQL (SEQ ID NO: 84134):SPIS-AA¹⁷-LYI (SEQ ID NO: 84886):DDSSNVI (SEQ ID NO: 84965):YKQYE (SEQ ID NO: 84398):NMVVR (SEQ ID NO: 84275):AXGXH (SEQ ID NO: 84147), AVPKAXX (SEQ ID NO: 84404):APTKL (SEQ ID NO: 84131):SPIS-AA¹⁷-LYI (SEQ ID NO: 84886):DSSNNVI (SEQ ID NO: 84972):YKQYE (SEQ ID NO: 84398):NMVVK (SEQ ID NO: 84274):AXGXH (SEQ ID NO: 84147), KVGKAXX (SEQ ID NO: 84425):VPTKL (SEQ ID NO: 84381):SPIS-AA¹⁷-LYI (SEQ ID NO: 84886):DDMGVPT (SEQ ID NO: 84964):YKQYE (SEQ ID NO: 84398):EGMSVAE (SEQ ID NO: 84411):XGXR (SEQ ID NO: 84123), KASKAXX (SEQ ID NO: 84423):VPTKL (SEQ ID NO: 84381):SPIS-AA¹⁷-LYI (SEQ ID NO: 84886):DKGVVTY (SEQ ID NO: 84969):YKQYE (SEQ ID NO: 84398):GMAVS (SEQ ID NO: 84194):EXGXR (SEQ ID NO: 84179), GSAGPXX (SEQ ID NO: 84420):TPTKM (SEQ ID NO: 84327):SPIS-AA¹⁷-LYI (SEQ ID NO: 84886):NDKQQII (SEQ ID NO: 84979):YKQYE (SEQ ID NO: 84398):GMVVD (SEQ ID NO: 84204):RXGXS (SEQ ID NO: 84291), STPPTXX (SEQ ID NO: 84431):VPTRL (SEQ ID NO: 84385):SPIS-AA¹⁷-LYI (SEQ ID NO: 84886):DSANNVV (SEQ ID NO: 84971):YKQYE (SEQ ID NO: 84398):DMVVE (SEQ ID NO: 84161):SXGXR (SEQ ID NO: 84305), HVPKPXX (SEQ ID NO: 84421):APTKL (SEQ ID NO: 84131):SPIS-AA¹⁷-LYI (SEQ ID NO: 84886):DDSSNVI (SEQ ID NO: 84965):YKQYE (SEQ ID NO: 84398):NMVVR (SEQ ID NO: 84275):SXGXH (SEQ ID NO: 84304), RVPSTXX (SEQ ID NO: 84428):APVKT (SEQ ID NO: 84144):SPIS-AA¹⁷-LYI (SEQ ID NO: 84886):DNGRVLL (SEQ ID NO: 84970):YKQYE (SEQ ID NO: 84398):MIVEE (SEQ ID NO: 84241):XGXL (SEQ ID NO: 84122), ASAAPXX (SEQ ID NO: 84402):VPQAL (SEQ ID NO: 84364):SPIS-AA¹⁷-LYI (SEQ ID NO: 84886):VGRKPKV (SEQ ID NO: 84981):YKQYE (SEQ ID NO: 84398):MIVRS (SEQ ID NO: 84243):XKXS (SEQ ID NO: 84124), ASASPXX (SEQ ID NO: 84403):VSQDL (SEQ ID NO: 84387):SPIS-AA¹⁷-LYI (SEQ ID NO: 84886):IGKTPKI (SEQ ID NO: 84978):YKQYE (SEQ ID NO: 84398):MIVKS (SEQ ID NO: 84242):XKXS (SEQ ID NO: 84124), ASASPXX (SEQ ID NO: 84403):VPQDL (SEQ ID NO: 84365):SPIS-AA¹⁷-LYI (SEQ ID NO: 84886):VGRTPKV (SEQ ID NO: 84982):YKQYE (SEQ ID NO: 84398):MVVKS (SEQ ID NO: 84256):XKXS (SEQ ID NO: 84124), NDEGLEX (SEQ ID NO: 84426):VPTEE (SEQ ID NO: 84377):SPIS-AA¹⁷-LYI (SEQ ID NO: 84886):RIKPHQGQH (SEQ ID NO: 84980):YKQYE (SEQ ID NO: 84398):FLQHN (SEQ ID NO: 84184):KXEXR (SEQ ID NO: 84213), NDEGLEX (SEQ ID NO: 84426):VPTGQ (SEQ ID NO: 84379):SPIS-AA¹⁷-LYI (SEQ ID NO: 84886):RIKPHQGQH (SEQ ID NO: 84980):YKQYE (SEQ ID NO: 84398):LEEHS (SEQ ID NO: 84217):QXEXR (SEQ ID NO: 84276), SSVKXQP (SEQ ID NO: 84430):SRVHH (SEQ ID NO: 84297):SPIS-AA¹⁷-LYI (SEQ ID NO: 84886):EYVRKKPKL (SEQ ID NO: 84974):YKQYE (SEQ ID NO: 84398):RLEEH (SEQ ID NO: 84279):LEXAXA (SEQ ID NO: 84400), RNVQXRP (SEQ ID NO: 84427):TQVQL (SEQ ID NO: 84340):SPIS-AA¹⁷-LYI (SEQ ID NO: 84886):EIVRKKPIF (SEQ ID NO: 84973):YKQYE (SEQ ID NO: 84398):TLEDH (SEQ ID NO: 84307):LAXKXE (SEQ ID NO: 84399), KIPKAXX (SEQ ID NO: 84424):VPTEL (SEQ ID NO: 84378):SPIS-AA¹⁷-LFI (SEQ ID NO: 84885):DENEKVV (SEQ ID NO: 84966):YKQYE (SEQ ID NO: 84398):DMVVE (SEQ ID NO: 84161):GXGXR (SEQ ID NO: 84208), GIPEPXX (SEQ ID NO: 84419):VPTKM (SEQ ID NO: 84382):SPIS-AA¹⁷-LFI (SEQ ID NO: 84885):DENKNVV (SEQ ID NO: 84967):YKQYE (SEQ ID NO: 84398):NMVVE (SEQ ID NO: 84273):SXAXR (SEQ ID NO: 84303), SIPKAXX (SEQ ID NO: 84429):VPTEL (SEQ ID NO: 84378):SPIS-AA¹⁷-LFI (SEQ ID NO: 84885):DEYDKVV (SEQ ID NO: 84968):YKQYE (SEQ ID NO: 84398):EMVVE (SEQ ID NO: 84175):GXGXR (SEQ ID NO: 84208), HVTKPTX (SEQ ID NO: 84422):VPTKL (SEQ ID NO: 84381):SPIS-AA¹⁷-LFI (SEQ ID NO: 84885):DDSSNVI (SEQ ID NO: 84965):YKQYE (SEQ ID NO: 84398):NMVVE (SEQ ID NO: 84273):SXGXH (SEQ ID NO: 84304), YVPKPXX (SEQ ID NO: 84433):VPTKL (SEQ ID NO: 84381):SPIS-AA¹⁷-LFI (SEQ ID NO: 84885):DDSSNVI (SEQ ID NO: 84965):YKQYE (SEQ ID NO: 84398):NMVVE (SEQ ID NO: 84273):SXGXH (SEQ ID NO: 84304), TVPKPXX (SEQ ID NO: 84432):VPTQL (SEQ ID NO: 84384):SPIS-AA¹⁷-LFI (SEQ ID NO: 84885):DDSSNVI (SEQ ID NO: 84965):YKQYE (SEQ ID NO: 84398):NMVVE (SEQ ID NO: 84273):AXGXH (SEQ ID NO: 84147), AVPKAXX (SEQ ID NO: 84404):VPTKL (SEQ ID NO: 84381):SPIS-AA¹⁷-LFI (SEQ ID NO: 84885):DSSNNVI (SEQ ID NO: 84972):YKQYE (SEQ ID NO: 84398):NMVVE (SEQ ID NO: 84273):AXGXH (SEQ ID NO: 84147), KVGKAXX (SEQ ID NO: 84425):VPTKL (SEQ ID NO: 84381):SPIS-AA¹⁷-LFI (SEQ ID NO: 84885):DDMGVPT (SEQ ID NO: 84964):YKQYE (SEQ ID NO: 84398):EGMSVVE (SEQ ID NO: 84416):XGXR (SEQ ID NO: 84123), KASKAXX (SEQ ID NO: 84423):VPTKL (SEQ ID NO: 84381):SPIS-AA¹⁷-LFI (SEQ ID NO: 84885):DKGVVTY (SEQ ID NO: 84969):YKQYE (SEQ ID NO: 84398):GMVVE (SEQ ID NO: 84205):EXGXR (SEQ ID NO: 84179), GSAGPXX (SEQ ID NO: 84420):VPTKM (SEQ ID NO: 84382):SPIS-AA¹⁷-LFI (SEQ ID NO: 84885):NDKQQII (SEQ ID NO: 84979):YKQYE (SEQ ID NO: 84398):GMVVE (SEQ ID NO: 84205):RXGXS (SEQ ID NO: 84291), AAPASXX (SEQ ID NO: 84401):VPTRL (SEQ ID NO: 84385):SPIS-AA¹⁷-LFI (SEQ ID NO: 84885):DAANNVV (SEQ ID NO: 84963):YKQYE (SEQ ID NO: 84398):DMVVE (SEQ ID NO: 84161):AXGXR (SEQ ID NO: 84148), HVPKPXX (SEQ ID NO: 84421):VPTKL (SEQ ID NO: 84381):SPIS-AA¹⁷-LFI (SEQ ID NO: 84885):DDSSNVI (SEQ ID NO: 84965):YKQYE (SEQ ID NO: 84398):NMVVE (SEQ ID NO: 84273):SXGXH (SEQ ID NO: 84304), RVPSTXX (SEQ ID NO: 84428):VPTKT (SEQ ID NO: 84383):SPIS-AA¹⁷-LFI (SEQ ID NO: 84885):DNGRVLL (SEQ ID NO: 84970):YKQYE (SEQ ID NO: 84398):MIVVE (SEQ ID NO: 84245):XGXL (SEQ ID NO: 84122), ASAAPXX (SEQ ID NO: 84402):VPTAL (SEQ ID NO: 84375):SPIS-AA¹⁷-LFI (SEQ ID NO: 84885):VGRKPKV (SEQ ID NO: 84981):YKQYE (SEQ ID NO: 84398):MIVVE (SEQ ID NO: 84245):XKXS (SEQ ID NO: 84124), ASASPXX (SEQ ID NO: 84403):VPTDL (SEQ ID NO: 84376):SPIS-AA¹⁷-LFI (SEQ ID NO: 84885):IGKTPKI (SEQ ID NO: 84978):YKQYE (SEQ ID NO: 84398):MIVVE (SEQ ID NO: 84245):XKXS (SEQ ID NO: 84124), ASASPXX (SEQ ID NO: 84403):VPTDL (SEQ ID NO: 84376):SPIS-AA¹⁷-LFI (SEQ ID NO: 84885):VGRTPKV (SEQ ID NO: 84982):YKQYE (SEQ ID NO: 84398):MVVVE (SEQ ID NO: 84259):XKXS (SEQ ID NO: 84124), NDEGLEX (SEQ ID NO: 84426):VPTEE (SEQ ID NO: 84377):SPIS-AA¹⁷-LFI (SEQ ID NO: 84885):RIKPHQGQH (SEQ ID NO: 84980):YKQYE (SEQ ID NO: 84398):FLVVE (SEQ ID NO: 84191):KXEXR (SEQ ID NO: 84213), NDEGLEX (SEQ ID NO: 84426):VPTGQ (SEQ ID NO: 84379):SPIS-AA¹⁷-LFI (SEQ ID NO: 84885):RIKPHQGQH (SEQ ID NO: 84980):YKQYE (SEQ ID NO: 84398):LEVVE (SEQ ID NO: 84225):QXEXR (SEQ ID NO: 84276), SSVKXQP (SEQ ID NO: 84430):VPTHH (SEQ ID NO: 84380):SPIS-AA¹⁷-LFI (SEQ ID NO: 84885):EYVRKKPKL (SEQ ID NO: 84974):YKQYE (SEQ ID NO: 84398):RLVVE (SEQ ID NO: 84288):LEXAXA (SEQ ID NO: 84400), RNVQXRP (SEQ ID NO: 84427):VPTQL (SEQ ID NO: 84384):SPIS-AA¹⁷-LFI (SEQ ID NO: 84885):EIVRKKPIF (SEQ ID NO: 84973):YKQYE (SEQ ID NO: 84398):TLVVE (SEQ ID NO: 84317):LAXKXE (SEQ ID NO: 84399), GIPEPXX (SEQ ID NO: 84419):VPEKM (SEQ ID NO: 84360):SPIS-AA¹⁷-LFI (SEQ ID NO: 84885):DENKNVV (SEQ ID NO: 84967):YKQYE (SEQ ID NO: 84398):NMTVE (SEQ ID NO: 84267):SXAXR (SEQ ID NO: 84303), HVTKPTX (SEQ ID NO: 84422):APTKL (SEQ ID NO: 84131):SPIS-AA¹⁷-LFI (SEQ ID NO: 84885):DDSSNVI (SEQ ID NO: 84965):YKQYE (SEQ ID NO: 84398):NMVVR (SEQ ID NO: 84275):SXGXH (SEQ ID NO: 84304), YVPKPXX (SEQ ID NO: 84433):APTKL (SEQ ID NO: 84131):SPIS-AA¹⁷-LFI (SEQ ID NO: 84885):DDSSNVI (SEQ ID NO: 84965):YKQYE (SEQ ID NO: 84398):NMVVR (SEQ ID NO: 84275):SXGXH (SEQ ID NO: 84304), TVPKPXX (SEQ ID NO: 84432):APTQL (SEQ ID NO: 84134):SPIS-AA¹⁷-LFI (SEQ ID NO: 84885):DDSSNVI (SEQ ID NO: 84965):YKQYE (SEQ ID NO: 84398):NMVVR (SEQ ID NO: 84275):AXGXH (SEQ ID NO: 84147), AVPKAXX (SEQ ID NO: 84404):APTKL (SEQ ID NO: 84131):SPIS-AA¹⁷-LFI (SEQ ID NO: 84885):DSSNNVI (SEQ ID NO: 84972):YKQYE (SEQ ID NO: 84398):NMVVK (SEQ ID NO: 84274):AXGXH (SEQ ID NO: 84147), KVGKAXX (SEQ ID NO: 84425):VPTKL (SEQ ID NO: 84381):SPIS-AA¹⁷-LFI (SEQ ID NO: 84885):DDMGVPT (SEQ ID NO: 84964):YKQYE (SEQ ID NO: 84398):EGMSVAE (SEQ ID NO: 84411):XGXR (SEQ ID NO: 84123), KASKAXX (SEQ ID NO: 84423):VPTKL (SEQ ID NO: 84381):SPIS-AA¹⁷-LFI (SEQ ID NO: 84885):DKGVVTY (SEQ ID NO: 84969):YKQYE (SEQ ID NO: 84398):GMAVS (SEQ ID NO: 84194):EXGXR (SEQ ID NO: 84179), GSAGPXX (SEQ ID NO: 84420):TPTKM (SEQ ID NO: 84327):SPIS-AA¹⁷-LFI (SEQ ID NO: 84885):NDKQQII (SEQ ID NO: 84979):YKQYE (SEQ ID NO: 84398):GMVVD (SEQ ID NO: 84204):RXGXS (SEQ ID NO: 84291), AAPASXX (SEQ ID NO: 84401):VPARL (SEQ ID NO: 84352):SPIS-AA¹⁷-LFI (SEQ ID NO: 84885):DAANNVV (SEQ ID NO: 84963):YKQYE (SEQ ID NO: 84398):DMVVE (SEQ ID NO: 84161):AXGXR (SEQ ID NO: 84148), HVPKPXX (SEQ ID NO: 84421):APTKL (SEQ ID NO: 84131):SPIS-AA¹⁷-LFI (SEQ ID NO: 84885):DDSSNVI (SEQ ID NO: 84965):YKQYE (SEQ ID NO: 84398):NMVVR (SEQ ID NO: 84275):SXGXH (SEQ ID NO: 84304), RVPSTXX (SEQ ID NO: 84428):APVKT (SEQ ID NO: 84144):SPIS-AA¹⁷-LFI (SEQ ID NO: 84885):DNGRVLL (SEQ ID NO: 84970):YKQYE (SEQ ID NO: 84398):MIVEE (SEQ ID NO: 84241):XGXL (SEQ ID NO: 84122), ASAAPXX (SEQ ID NO: 84402):VPQAL (SEQ ID NO: 84364):SPIS-AA¹⁷-LFI (SEQ ID NO: 84885):VGRKPKV (SEQ ID NO: 84981):YKQYE (SEQ ID NO: 84398):MIVRS (SEQ ID NO: 84243):XKXS (SEQ ID NO: 84124), ASASPXX (SEQ ID NO: 84403):VSQDL (SEQ ID NO: 84387):SPIS-AA¹⁷-LFI (SEQ ID NO: 84885):IGKTPKI (SEQ ID NO: 84978):YKQYE (SEQ ID NO: 84398):MIVKS (SEQ ID NO: 84242):XKXS (SEQ ID NO: 84124), ASASPXX (SEQ ID NO: 84403):VPQDL (SEQ ID NO: 84365):SPIS-AA¹⁷-LFI (SEQ ID NO: 84885):VGRTPKV (SEQ ID NO: 84982):YKQYE (SEQ ID NO: 84398):MVVKS (SEQ ID NO: 84256):XKXS (SEQ ID NO: 84124), NDEGLEX (SEQ ID NO: 84426):VPTEE (SEQ ID NO: 84377):SPIS-AA¹⁷-LFI (SEQ ID NO: 84885):RIKPHQGQH (SEQ ID NO: 84980):YKQYE (SEQ ID NO: 84398):FLQHN (SEQ ID NO: 84184):KXEXR (SEQ ID NO: 84213), NDEGLEX (SEQ ID NO: 84426):VPTGQ (SEQ ID NO: 84379):SPIS-AA¹⁷-LFI (SEQ ID NO: 84885):RIKPHQGQH (SEQ ID NO: 84980):YKQYE (SEQ ID NO: 84398):LEEHS (SEQ ID NO: 84217):QXEXR (SEQ ID NO: 84276), SSVKXQP (SEQ ID NO: 84430):SRVHH (SEQ ID NO: 84297):SPIS-AA¹⁷-LFI (SEQ ID NO: 84885):EYVRKKPKL (SEQ ID NO: 84974):YKQYE (SEQ ID NO: 84398):RLEEH (SEQ ID NO: 84279):LEXAXA (SEQ ID NO: 84400), RNVQXRP (SEQ ID NO: 84427):TQVQL (SEQ ID NO: 84340):SPIS-AA¹⁷-LFI (SEQ ID NO: 84885):EIVRKKPIF (SEQ ID NO: 84973):YKQYE (SEQ ID NO: 84398):TLEDH (SEQ ID NO: 84307):LAXKXE (SEQ ID NO: 84399), KIPKAXX (SEQ ID NO: 84424):APVEL (SEQ ID NO: 84139):KPLS-AA¹⁷-LYV (SEQ ID NO: 84877):DENEKVV (SEQ ID NO: 84966):DHHKD (SEQ ID NO: 84149):DMVEE (SEQ ID NO: 84157):GXGXR (SEQ ID NO: 84208), GIPEPXX (SEQ ID NO: 84419):APVKM (SEQ ID NO: 84143):KPLS-AA¹⁷-LYV (SEQ ID NO: 84877):DENKNVV (SEQ ID NO: 84967):DHHKD (SEQ ID NO: 84149):NMVEE (SEQ ID NO: 84269):SXAXR (SEQ ID NO: 84303), SIPKAXX (SEQ ID NO: 84429):APVEL (SEQ ID NO: 84139):KPLS-AA¹⁷-LYV (SEQ ID NO: 84877):DEYDKVV (SEQ ID NO: 84968):DHHKD (SEQ ID NO: 84149):EMVEE (SEQ ID NO: 84171):GXGXR (SEQ ID NO: 84208), HVTKPTX (SEQ ID NO: 84422):APVKL (SEQ ID NO: 84142):KPLS-AA¹⁷-LYV (SEQ ID NO: 84877):DDSSNVI (SEQ ID NO: 84965):DHHKD (SEQ ID NO: 84149):NMVEE (SEQ ID NO: 84269):SXGXH (SEQ ID NO: 84304), YVPKPXX (SEQ ID NO: 84433):APVKL (SEQ ID NO: 84142):KPLS-AA¹⁷-LYV (SEQ ID NO: 84877):DDSSNVI (SEQ ID NO: 84965):DHHKD (SEQ ID NO: 84149):NMVEE (SEQ ID NO: 84269):SXGXH (SEQ ID NO: 84304), TVPKPXX (SEQ ID NO: 84432):APVQL (SEQ ID NO: 84145):KPLS-AA¹⁷-LYV (SEQ ID NO: 84877):DDSSNVI (SEQ ID NO: 84965):DHHKD (SEQ ID NO: 84149):NMVEE (SEQ ID NO: 84269):AXGXH (SEQ ID NO: 84147), AVPKAXX (SEQ ID NO: 84404):APVKL (SEQ ID NO: 84142):KPLS-AA¹⁷-LYV (SEQ ID NO: 84877):DSSNNVI (SEQ ID NO: 84972):DHHKD (SEQ ID NO: 84149):NMVEE (SEQ ID NO: 84269):AXGXH (SEQ ID NO: 84147), KVGKAXX (SEQ ID NO: 84425):APVKL (SEQ ID NO: 84142):KPLS-AA¹⁷-LYV (SEQ ID NO: 84877):DDMGVPT (SEQ ID NO: 84964):DHHKD (SEQ ID NO: 84149):EGMSVEE (SEQ ID NO: 84412):XGXR (SEQ ID NO: 84123), KASKAXX (SEQ ID NO: 84423):APVKL (SEQ ID NO: 84142):KPLS-AA¹⁷-LYV (SEQ ID NO: 84877):DKGVVTY (SEQ ID NO: 84969):DHHKD (SEQ ID NO: 84149):GMVEE (SEQ ID NO: 84201):EXGXR (SEQ ID NO: 84179), GSAGPXX (SEQ ID NO: 84420):APVKM (SEQ ID NO: 84143):KPLS-AA¹⁷-LYV (SEQ ID NO: 84877):NDKQQII (SEQ ID NO: 84979):DHHKD (SEQ ID NO: 84149):GMVEE (SEQ ID NO: 84201):RXGXS (SEQ ID NO: 84291), AAPASXX (SEQ ID NO: 84401):APVRL (SEQ ID NO: 84146):KPLS-AA¹⁷-LYV (SEQ ID NO: 84877):DAANNVV (SEQ ID NO: 84963):DHHKD (SEQ ID NO: 84149):DMVEE (SEQ ID NO: 84157):AXGXR (SEQ ID NO: 84148), STPPTXX (SEQ ID NO: 84431):APVRL (SEQ ID NO: 84146):KPLS-AA¹⁷-LYV (SEQ ID NO: 84877):DSANNVV (SEQ ID NO: 84971):DHHKD (SEQ ID NO: 84149):DMVEE (SEQ ID NO: 84157):SXGXR (SEQ ID NO: 84305), HVPKPXX (SEQ ID NO: 84421):APVKL (SEQ ID NO: 84142):KPLS-AA¹⁷-LYV (SEQ ID NO: 84877):DDSSNVI (SEQ ID NO: 84965):DHHKD (SEQ ID NO: 84149):NMVEE (SEQ ID NO: 84269):SXGXH (SEQ ID NO: 84304), ASAAPXX (SEQ ID NO: 84402):APVAL (SEQ ID NO: 84136):KPLS-AA¹⁷-LYV (SEQ ID NO: 84877):VGRKPKV (SEQ ID NO: 84981):DHHKD (SEQ ID NO: 84149):MIVEE (SEQ ID NO: 84241):XKXS (SEQ ID NO: 84124), ASASPXX (SEQ ID NO: 84403):APVDL (SEQ ID NO: 84137):KPLS-AA¹⁷-LYV (SEQ ID NO: 84877):IGKTPKI (SEQ ID NO: 84978):DHHKD (SEQ ID NO: 84149):MIVEE (SEQ ID NO: 84241):XKXS (SEQ ID NO: 84124), ASASPXX (SEQ ID NO: 84403):APVDL (SEQ ID NO: 84137):KPLS-AA¹⁷-LYV (SEQ ID NO: 84877):VGRTPKV (SEQ ID NO: 84982):DHHKD (SEQ ID NO: 84149):MVVEE (SEQ ID NO: 84255):XKXS (SEQ ID NO: 84124), NDEGLEX (SEQ ID NO: 84426):APVEE (SEQ ID NO: 84138):KPLS-AA¹⁷-LYV (SEQ ID NO: 84877):RIKPHQGQH (SEQ ID NO: 84980):DHHKD (SEQ ID NO: 84149):FLVEE (SEQ ID NO: 84187):KXEXR (SEQ ID NO: 84213), NDEGLEX (SEQ ID NO: 84426):APVGQ (SEQ ID NO: 84140):KPLS-AA¹⁷-LYV (SEQ ID NO: 84877):RIKPHQGQH (SEQ ID NO: 84980):DHHKD (SEQ ID NO: 84149):LEVEE (SEQ ID NO: 84221):QXEXR (SEQ ID NO: 84276), SSVKXQP (SEQ ID NO: 84430):APVHH (SEQ ID NO: 84141):KPLS-AA¹⁷-LYV (SEQ ID NO: 84877):EYVRKKPKL (SEQ ID NO: 84974):DHHKD (SEQ ID NO: 84149):RLVEE (SEQ ID NO: 84284):LEXAXA (SEQ ID NO: 84400), RNVQXRP (SEQ ID NO: 84427):APVQL (SEQ ID NO: 84145):KPLS-AA¹⁷-LYV (SEQ ID NO: 84877):EIVRKKPIF (SEQ ID NO: 84973):DHHKD (SEQ ID NO: 84149):TLVEE (SEQ ID NO: 84313):LAXKXE (SEQ ID NO: 84399), KIPKAXX (SEQ ID NO: 84424):VPTEL (SEQ ID NO: 84378):KPLS-AA¹⁷-LYV (SEQ ID NO: 84877):DENEKVV (SEQ ID NO: 84966):DHHKD (SEQ ID NO: 84149):DMVVE (SEQ ID NO: 84161):GXGXR (SEQ ID NO: 84208), GIPEPXX (SEQ ID NO: 84419):VPEKM (SEQ ID NO: 84360):KPLS-AA¹⁷-LYV (SEQ ID NO: 84877):DENKNVV (SEQ ID NO: 84967):DHHKD (SEQ ID NO: 84149):NMTVE (SEQ ID NO: 84267):SXAXR (SEQ ID NO: 84303), SIPKAXX (SEQ ID NO: 84429):VPTEL (SEQ ID NO: 84378):KPLS-AA¹⁷-LYV (SEQ ID NO: 84877):DEYDKVV (SEQ ID NO: 84968):DHHKD (SEQ ID NO: 84149):EMVVE (SEQ ID NO: 84175):GXGXR (SEQ ID NO: 84208), HVTKPTX (SEQ ID NO: 84422):APTKL (SEQ ID NO: 84131):KPLS-AA¹⁷-LYV (SEQ ID NO: 84877):DDSSNVI (SEQ ID NO: 84965):DHHKD (SEQ ID NO: 84149):NMVVR (SEQ ID NO: 84275):SXGXH (SEQ ID NO: 84304), YVPKPXX (SEQ ID NO: 84433):APTKL (SEQ ID NO: 84131):KPLS-AA¹⁷-LYV (SEQ ID NO: 84877):DDSSNVI (SEQ ID NO: 84965):DHHKD (SEQ ID NO: 84149):NMVVR (SEQ ID NO: 84275):SXGXH (SEQ ID NO: 84304), TVPKPXX (SEQ ID NO: 84432):APTQL (SEQ ID NO: 84134):KPLS-AA¹⁷-LYV (SEQ ID NO: 84877):DDSSNVI (SEQ ID NO: 84965):DHHKD (SEQ ID NO: 84149):NMVVR (SEQ ID NO: 84275):AXGXH (SEQ ID NO: 84147), AVPKAXX (SEQ ID NO: 84404):APTKL (SEQ ID NO: 84131):KPLS-AA¹⁷-LYV (SEQ ID NO: 84877):DSSNNVI (SEQ ID NO: 84972):DHHKD (SEQ ID NO: 84149):NMVVK (SEQ ID NO: 84274):AXGXH (SEQ ID NO: 84147), KVGKAXX (SEQ ID NO: 84425):VPTKL (SEQ ID NO: 84381):KPLS-AA¹⁷-LYV (SEQ ID NO: 84877):DDMGVPT (SEQ ID NO: 84964):DHHKD (SEQ ID NO: 84149):EGMSVAE (SEQ ID NO: 84411):XGXR (SEQ ID NO: 84123), KASKAXX (SEQ ID NO: 84423):VPTKL (SEQ ID NO: 84381):KPLS-AA¹⁷-LYV (SEQ ID NO: 84877):DKGVVTY (SEQ ID NO: 84969):DHHKD (SEQ ID NO: 84149):GMAVS (SEQ ID NO: 84194):EXGXR (SEQ ID NO: 84179), GSAGPXX (SEQ ID NO: 84420):TPTKM (SEQ ID NO: 84327):KPLS-AA¹⁷-LYV (SEQ ID NO: 84877):NDKQQII (SEQ ID NO: 84979):DHHKD (SEQ ID NO: 84149):GMVVD (SEQ ID NO: 84204):RXGXS (SEQ ID NO: 84291), AAPASXX (SEQ ID NO: 84401):VPARL (SEQ ID NO: 84352):KPLS-AA¹⁷-LYV (SEQ ID NO: 84877):DAANNVV (SEQ ID NO: 84963):DHHKD (SEQ ID NO: 84149):DMVVE (SEQ ID NO: 84161):AXGXR (SEQ ID NO: 84148), STPPTXX (SEQ ID NO: 84431):VPTRL (SEQ ID NO: 84385):KPLS-AA¹⁷-LYV (SEQ ID NO: 84877):DSANNVV (SEQ ID NO: 84971):DHHKD (SEQ ID NO: 84149):DMVVE (SEQ ID NO: 84161):SXGXR (SEQ ID NO: 84305), HVPKPXX (SEQ ID NO: 84421):APTKL (SEQ ID NO: 84131):KPLS-AA¹⁷-LYV (SEQ ID NO: 84877):DDSSNVI (SEQ ID NO: 84965):DHHKD (SEQ ID NO: 84149):NMVVR (SEQ ID NO: 84275):SXGXH (SEQ ID NO: 84304), ASAAPXX (SEQ ID NO: 84402):VPQAL (SEQ ID NO: 84364):KPLS-AA¹⁷-LYV (SEQ ID NO: 84877):VGRKPKV (SEQ ID NO: 84981):DHHKD (SEQ ID NO: 84149):MIVRS (SEQ ID NO: 84243):XKXS (SEQ ID NO: 84124), ASASPXX (SEQ ID NO: 84403):VSQDL (SEQ ID NO: 84387):KPLS-AA¹⁷-LYV (SEQ ID NO: 84877):IGKTPKI (SEQ ID NO: 84978):DHHKD (SEQ ID NO: 84149):MIVKS (SEQ ID NO: 84242):XKXS (SEQ ID NO: 84124), ASASPXX (SEQ ID NO: 84403):VPQDL (SEQ ID NO: 84365):KPLS-AA¹⁷-LYV (SEQ ID NO: 84877):VGRTPKV (SEQ ID NO: 84982):DHHKD (SEQ ID NO: 84149):MVVKS (SEQ ID NO: 84256):XKXS (SEQ ID NO: 84124), NDEGLEX (SEQ ID NO: 84426):VPTEE (SEQ ID NO: 84377):KPLS-AA¹⁷-LYV (SEQ ID NO: 84877):RIKPHQGQH (SEQ ID NO: 84980):DHHKD (SEQ ID NO: 84149):FLQHN (SEQ ID NO: 84184):KXEXR (SEQ ID NO: 84213), NDEGLEX (SEQ ID NO: 84426):VPTGQ (SEQ ID NO: 84379):KPLS-AA¹⁷-LYV (SEQ ID NO: 84877):RIKPHQGQH (SEQ ID NO: 84980):DHHKD (SEQ ID NO: 84149):LEEHS (SEQ ID NO: 84217):QXEXR (SEQ ID NO: 84276), SSVKXQP (SEQ ID NO: 84430):SRVHH (SEQ ID NO: 84297):KPLS-AA¹⁷-LYV (SEQ ID NO: 84877):EYVRKKPKL (SEQ ID NO: 84974):DHHKD (SEQ ID NO: 84149):RLEEH (SEQ ID NO: 84279):LEXAXA (SEQ ID NO: 84400), RNVQXRP (SEQ ID NO: 84427):TQVQL (SEQ ID NO: 84340):KPLS-AA¹⁷-LYV (SEQ ID NO: 84877):EIVRKKPIF (SEQ ID NO: 84973):DHHKD (SEQ ID NO: 84149):TLEDH (SEQ ID NO: 84307):LAXKXE (SEQ ID NO: 84399), KIPKAXX (SEQ ID NO: 84424):VPQEL (SEQ ID NO: 84367):EPLP-AA¹⁷-VYY (SEQ ID NO: 84875):DENEKVV (SEQ ID NO: 84966):EQLSN (SEQ ID NO: 84178):DMVRS (SEQ ID NO: 84159):GXGXR (SEQ ID NO: 84208), GIPEPXX (SEQ ID NO: 84419):VPQKM (SEQ ID NO: 84371):EPLP-AA¹⁷-VYY (SEQ ID NO: 84875):DENKNVV (SEQ ID NO: 84967):EQLSN (SEQ ID NO: 84178):NMVRS (SEQ ID NO: 84271):SXAXR (SEQ ID NO: 84303), SIPKAXX (SEQ ID NO: 84429):VPQEL (SEQ ID NO: 84367):EPLP-AA¹⁷-VYY (SEQ ID NO: 84875):DEYDKVV (SEQ ID NO: 84968):EQLSN (SEQ ID NO: 84178):EMVRS (SEQ ID NO: 84173):GXGXR (SEQ ID NO: 84208), HVTKPTX (SEQ ID NO: 84422):VPQKL (SEQ ID NO: 84370):EPLP-AA¹⁷-VYY (SEQ ID NO: 84875):DDSSNVI (SEQ ID NO: 84965):EQLSN (SEQ ID NO: 84178):NMVRS (SEQ ID NO: 84271):SXGXH (SEQ ID NO: 84304), YVPKPXX (SEQ ID NO: 84433):VPQKL (SEQ ID NO: 84370):EPLP-AA¹⁷-VYY (SEQ ID NO: 84875):DDSSNVI (SEQ ID NO: 84965):EQLSN (SEQ ID NO: 84178):NMVRS (SEQ ID NO: 84271):SXGXH (SEQ ID NO: 84304), TVPKPXX (SEQ ID NO: 84432):VPQQL (SEQ ID NO: 84373):EPLP-AA¹⁷-VYY (SEQ ID NO: 84875):DDSSNVI (SEQ ID NO: 84965):EQLSN (SEQ ID NO: 84178):NMVRS (SEQ ID NO: 84271):AXGXH (SEQ ID NO: 84147), AVPKAXX (SEQ ID NO: 84404):VPQKL (SEQ ID NO: 84370):EPLP-AA¹⁷-VYY (SEQ ID NO: 84875):DSSNNVI (SEQ ID NO: 84972):EQLSN (SEQ ID NO: 84178):NMVRS (SEQ ID NO: 84271):AXGXH (SEQ ID NO: 84147), KVGKAXX (SEQ ID NO: 84425):VPQKL (SEQ ID NO: 84370):EPLP-AA¹⁷-VYY (SEQ ID NO: 84875):DDMGVPT (SEQ ID NO: 84964):EQLSN (SEQ ID NO: 84178):EGMSVRS (SEQ ID NO: 84414):XGXR (SEQ ID NO: 84123), KASKAXX (SEQ ID NO: 84423):VPQKL (SEQ ID NO: 84370):EPLP-AA¹⁷-VYY (SEQ ID NO: 84875):DKGVVTY (SEQ ID NO: 84969):EQLSN (SEQ ID NO: 84178):GMVRS (SEQ ID NO: 84203):EXGXR (SEQ ID NO: 84179), GSAGPXX (SEQ ID NO: 84420):VPQKM (SEQ ID NO: 84371):EPLP-AA¹⁷-VYY (SEQ ID NO: 84875):NDKQQII (SEQ ID NO: 84979):EQLSN (SEQ ID NO: 84178):GMVRS (SEQ ID NO: 84203):RXGXS (SEQ ID NO: 84291), AAPASXX (SEQ ID NO: 84401):VPQRL (SEQ ID NO: 84374):EPLP-AA¹⁷-VYY (SEQ ID NO: 84875):DAANNVV (SEQ ID NO: 84963):EQLSN (SEQ ID NO: 84178):DMVRS (SEQ ID NO: 84159):AXGXR (SEQ ID NO: 84148), STPPTXX (SEQ ID NO: 84431):VPQRL (SEQ ID NO: 84374):EPLP-AA¹⁷-VYY (SEQ ID NO: 84875):DSANNVV (SEQ ID NO: 84971):EQLSN (SEQ ID NO: 84178):DMVRS (SEQ ID NO: 84159):SXGXR (SEQ ID NO: 84305), HVPKPXX (SEQ ID NO: 84421):VPQKL (SEQ ID NO: 84370):EPLP-AA¹⁷-VYY (SEQ ID NO: 84875):DDSSNVI (SEQ ID NO: 84965):EQLSN (SEQ ID NO: 84178):NMVRS (SEQ ID NO: 84271):SXGXH (SEQ ID NO: 84304), RVPSTXX (SEQ ID NO: 84428):VPQKT (SEQ ID NO: 84372):EPLP-AA¹⁷-VYY (SEQ ID NO: 84875):DNGRVLL (SEQ ID NO: 84970):EQLSN (SEQ ID NO: 84178):MIVRS (SEQ ID NO: 84243):XGXL (SEQ ID NO: 84122), ASASPXX (SEQ ID NO: 84403):VPQDL (SEQ ID NO: 84365):EPLP-AA¹⁷-VYY (SEQ ID NO: 84875):IGKTPKI (SEQ ID NO: 84978):EQLSN (SEQ ID NO: 84178):MIVRS (SEQ ID NO: 84243):XKXS (SEQ ID NO: 84124), ASASPXX (SEQ ID NO: 84403):VPQDL (SEQ ID NO: 84365):EPLP-AA¹⁷-VYY (SEQ ID NO: 84875):VGRTPKV (SEQ ID NO: 84982):EQLSN (SEQ ID NO: 84178):MVVRS (SEQ ID NO: 84257):XKXS (SEQ ID NO: 84124), NDEGLEX (SEQ ID NO: 84426):VPQEE (SEQ ID NO: 84366):EPLP-AA¹⁷-VYY (SEQ ID NO: 84875):RIKPHQGQH (SEQ ID NO: 84980):EQLSN (SEQ ID NO: 84178):FLVRS (SEQ ID NO: 84189):KXEXR (SEQ ID NO: 84213), NDEGLEX (SEQ ID NO: 84426):VPQGQ (SEQ ID NO: 84368):EPLP-AA¹⁷-VYY (SEQ ID NO: 84875):RIKPHQGQH (SEQ ID NO: 84980):EQLSN (SEQ ID NO: 84178):LEVRS (SEQ ID NO: 84223):QXEXR (SEQ ID NO: 84276), SSVKXQP (SEQ ID NO: 84430):VPQHH (SEQ ID NO: 84369):EPLP-AA¹⁷-VYY (SEQ ID NO: 84875):EYVRKKPKL (SEQ ID NO: 84974):EQLSN (SEQ ID NO: 84178):RLVRS (SEQ ID NO: 84286):LEXAXA (SEQ ID NO: 84400), RNVQXRP (SEQ ID NO: 84427):VPQQL (SEQ ID NO: 84373):EPLP-AA¹⁷-VYY (SEQ ID NO: 84875):EIVRKKPIF (SEQ ID NO: 84973):EQLSN (SEQ ID NO: 84178):TLVRS (SEQ ID NO: 84315):LAXKXE (SEQ ID NO: 84399), KIPKAXX (SEQ ID NO: 84424):VPTEL (SEQ ID NO: 84378):EPLP-AA¹⁷-VYY (SEQ ID NO: 84875):DENEKVV (SEQ ID NO: 84966):EQLSN (SEQ ID NO: 84178):DMVVE (SEQ ID NO: 84161):GXGXR (SEQ ID NO: 84208), GIPEPXX (SEQ ID NO: 84419):VPEKM (SEQ ID NO: 84360):EPLP-AA¹⁷-VYY (SEQ ID NO: 84875):DENKNVV (SEQ ID NO: 84967):EQLSN (SEQ ID NO: 84178):NMTVE (SEQ ID NO: 84267):SXAXR (SEQ ID NO: 84303), SIPKAXX (SEQ ID NO: 84429):VPTEL (SEQ ID NO: 84378):EPLP-AA¹⁷-VYY (SEQ ID NO: 84875):DEYDKVV (SEQ ID NO: 84968):EQLSN (SEQ ID NO: 84178):EMVVE (SEQ ID NO: 84175):GXGXR (SEQ ID NO: 84208), HVTKPTX (SEQ ID NO: 84422):APTKL (SEQ ID NO: 84131):EPLP-AA¹⁷-VYY (SEQ ID NO: 84875):DDSSNVI (SEQ ID NO: 84965):EQLSN (SEQ ID NO: 84178):NMVVR (SEQ ID NO: 84275):SXGXH (SEQ ID NO: 84304), YVPKPXX (SEQ ID NO: 84433):APTKL (SEQ ID NO: 84131):EPLP-AA¹⁷-VYY (SEQ ID NO: 84875):DDSSNVI (SEQ ID NO: 84965):EQLSN (SEQ ID NO: 84178):NMVVR (SEQ ID NO: 84275):SXGXH (SEQ ID NO: 84304), TVPKPXX (SEQ ID NO: 84432):APTQL (SEQ ID NO: 84134):EPLP-AA¹⁷-VYY (SEQ ID NO: 84875):DDSSNVI (SEQ ID NO: 84965):EQLSN (SEQ ID NO: 84178):NMVVR (SEQ ID NO: 84275):AXGXH (SEQ ID NO: 84147), AVPKAXX (SEQ ID NO: 84404):APTKL (SEQ ID NO: 84131):EPLP-AA¹⁷-VYY (SEQ ID NO: 84875):DSSNNVI (SEQ ID NO: 84972):EQLSN (SEQ ID NO: 84178):NMVVK (SEQ ID NO: 84274):AXGXH (SEQ ID NO: 84147), KVGKAXX (SEQ ID NO: 84425):VPTKL (SEQ ID NO: 84381):EPLP-AA¹⁷-VYY (SEQ ID NO: 84875):DDMGVPT (SEQ ID NO: 84964):EQLSN (SEQ ID NO: 84178):EGMSVAE (SEQ ID NO: 84411):XGXR (SEQ ID NO: 84123), KASKAXX (SEQ ID NO: 84423):VPTKL (SEQ ID NO: 84381):EPLP-AA¹⁷-VYY (SEQ ID NO: 84875):DKGVVTY (SEQ ID NO: 84969):EQLSN (SEQ ID NO: 84178):GMAVS (SEQ ID NO: 84194):EXGXR (SEQ ID NO: 84179), GSAGPXX (SEQ ID NO: 84420):TPTKM (SEQ ID NO: 84327):EPLP-AA¹⁷-VYY (SEQ ID NO: 84875):NDKQQII (SEQ ID NO: 84979):EQLSN (SEQ ID NO: 84178):GMVVD (SEQ ID NO: 84204):RXGXS (SEQ ID NO: 84291), AAPASXX (SEQ ID NO: 84401):VPARL (SEQ ID NO: 84352):EPLP-AA¹⁷-VYY (SEQ ID NO: 84875):DAANNVV (SEQ ID NO: 84963):EQLSN (SEQ ID NO: 84178):DMVVE (SEQ ID NO: 84161):AXGXR (SEQ ID NO: 84148), STPPTXX (SEQ ID NO: 84431):VPTRL (SEQ ID NO: 84385):EPLP-AA¹⁷-VYY (SEQ ID NO: 84875):DSANNVV (SEQ ID NO: 84971):EQLSN (SEQ ID NO: 84178):DMVVE (SEQ ID NO: 84161):SXGXR (SEQ ID NO: 84305), HVPKPXX (SEQ ID NO: 84421):APTKL (SEQ ID NO: 84131):EPLP-AA¹⁷-VYY (SEQ ID NO: 84875):DDSSNVI (SEQ ID NO: 84965):EQLSN (SEQ ID NO: 84178):NMVVR (SEQ ID NO: 84275):SXGXH (SEQ ID NO: 84304), RVPSTXX (SEQ ID NO: 84428):APVKT (SEQ ID NO: 84144):EPLP-AA¹⁷-VYY (SEQ ID NO: 84875):DNGRVLL (SEQ ID NO: 84970):EQLSN (SEQ ID NO: 84178):MIVEE (SEQ ID NO: 84241):XGXL (SEQ ID NO: 84122), ASASPXX (SEQ ID NO: 84403):VSQDL (SEQ ID NO: 84387):EPLP-AA¹⁷-VYY (SEQ ID NO: 84875):IGKTPKI (SEQ ID NO: 84978):EQLSN (SEQ ID NO: 84178):MIVKS (SEQ ID NO: 84242):XKXS (SEQ ID NO: 84124), ASASPXX (SEQ ID NO: 84403):VPQDL (SEQ ID NO: 84365):EPLP-AA¹⁷-VYY (SEQ ID NO: 84875):VGRTPKV (SEQ ID NO: 84982):EQLSN (SEQ ID NO: 84178):MVVKS (SEQ ID NO: 84256):XKXS (SEQ ID NO: 84124), NDEGLEX (SEQ ID NO: 84426):VPTEE (SEQ ID NO: 84377):EPLP-AA¹⁷-VYY (SEQ ID NO: 84875):RIKPHQGQH (SEQ ID NO: 84980):EQLSN (SEQ ID NO: 84178):FLQHN (SEQ ID NO: 84184):KXEXR (SEQ ID NO: 84213), NDEGLEX (SEQ ID NO: 84426):VPTGQ (SEQ ID NO: 84379):EPLP-AA¹⁷-VYY (SEQ ID NO: 84875):RIKPHQGQH (SEQ ID NO: 84980):EQLSN (SEQ ID NO: 84178):LEEHS (SEQ ID NO: 84217):QXEXR (SEQ ID NO: 84276), SSVKXQP (SEQ ID NO: 84430):SRVHH (SEQ ID NO: 84297):EPLP-AA¹⁷-VYY (SEQ ID NO: 84875):EYVRKKPKL (SEQ ID NO: 84974):EQLSN (SEQ ID NO: 84178):RLEEH (SEQ ID NO: 84279):LEXAXA (SEQ ID NO: 84400), RNVQXRP (SEQ ID NO: 84427):TQVQL (SEQ ID NO: 84340):EPLP-AA¹⁷-VYY (SEQ ID NO: 84875):EIVRKKPIF (SEQ ID NO: 84973):EQLSN (SEQ ID NO: 84178):TLEDH (SEQ ID NO: 84307):LAXKXE (SEQ ID NO: 84399), KIPKAXX (SEQ ID NO: 84424):VSQEL (SEQ ID NO: 84389):EPLT-AA¹⁷-LYY (SEQ ID NO: 84876):DENEKVV (SEQ ID NO: 84966):EQLSN (SEQ ID NO: 84178):DMVKS (SEQ ID NO: 84158):GXGXR (SEQ ID NO: 84208), GIPEPXX (SEQ ID NO: 84419):VSQKM (SEQ ID NO: 84393):EPLT-AA¹⁷-LYY (SEQ ID NO: 84876):DENKNVV (SEQ ID NO: 84967):EQLSN (SEQ ID NO: 84178):NMVKS (SEQ ID NO: 84270):SXAXR (SEQ ID NO: 84303), SIPKAXX (SEQ ID NO: 84429):VSQEL (SEQ ID NO: 84389):EPLT-AA¹⁷-LYY (SEQ ID NO: 84876):DEYDKVV (SEQ ID NO: 84968):EQLSN (SEQ ID NO: 84178):EMVKS (SEQ ID NO: 84172):GXGXR (SEQ ID NO: 84208), HVTKPTX (SEQ ID NO: 84422):VSQKL (SEQ ID NO: 84392):EPLT-AA¹⁷-LYY (SEQ ID NO: 84876):DDSSNVI (SEQ ID NO: 84965):EQLSN (SEQ ID NO: 84178):NMVKS (SEQ ID NO: 84270):SXGXH (SEQ ID NO: 84304), YVPKPXX (SEQ ID NO: 84433):VSQKL (SEQ ID NO: 84392):EPLT-AA¹⁷-LYY (SEQ ID NO: 84876):DDSSNVI (SEQ ID NO: 84965):EQLSN (SEQ ID NO: 84178):NMVKS (SEQ ID NO: 84270):SXGXH (SEQ ID NO: 84304), TVPKPXX (SEQ ID NO: 84432):VSQQL (SEQ ID NO: 84395):EPLT-AA¹⁷-LYY (SEQ ID NO: 84876):DDSSNVI (SEQ ID NO: 84965):EQLSN (SEQ ID NO: 84178):NMVKS (SEQ ID NO: 84270):AXGXH (SEQ ID NO: 84147), AVPKAXX (SEQ ID NO: 84404):VSQKL (SEQ ID NO: 84392):EPLT-AA¹⁷-LYY (SEQ ID NO: 84876):DSSNNVI (SEQ ID NO: 84972):EQLSN (SEQ ID NO: 84178):NMVKS (SEQ ID NO: 84270):AXGXH (SEQ ID NO: 84147), KVGKAXX (SEQ ID NO: 84425):VSQKL (SEQ ID NO: 84392):EPLT-AA¹⁷-LYY (SEQ ID NO: 84876):DDMGVPT (SEQ ID NO: 84964):EQLSN (SEQ ID NO: 84178):EGMSVKS (SEQ ID NO: 84413):XGXR (SEQ ID NO: 84123), KASKAXX (SEQ ID NO: 84423):VSQKL (SEQ ID NO: 84392):EPLT-AA¹⁷-LYY (SEQ ID NO: 84876):DKGVVTY (SEQ ID NO: 84969):EQLSN (SEQ ID NO: 84178):GMVKS (SEQ ID NO: 84202):EXGXR (SEQ ID NO: 84179), GSAGPXX (SEQ ID NO: 84420):VSQKM (SEQ ID NO: 84393):EPLT-AA¹⁷-LYY (SEQ ID NO: 84876):NDKQQII (SEQ ID NO: 84979):EQLSN (SEQ ID NO: 84178):GMVKS (SEQ ID NO: 84202):RXGXS (SEQ ID NO: 84291), AAPASXX (SEQ ID NO: 84401):VSQRL (SEQ ID NO: 84396):EPLT-AA¹⁷-LYY (SEQ ID NO: 84876):DAANNVV (SEQ ID NO: 84963):EQLSN (SEQ ID NO: 84178):DMVKS (SEQ ID NO: 84158):AXGXR (SEQ ID NO: 84148), STPPTXX (SEQ ID NO: 84431):VSQRL (SEQ ID NO: 84396):EPLT-AA¹⁷-LYY (SEQ ID NO: 84876):DSANNVV (SEQ ID NO: 84971):EQLSN (SEQ ID NO: 84178):DMVKS (SEQ ID NO: 84158):SXGXR (SEQ ID NO: 84305), HVPKPXX (SEQ ID NO: 84421):VSQKL (SEQ ID NO: 84392):EPLT-AA¹⁷-LYY (SEQ ID NO: 84876):DDSSNVI (SEQ ID NO: 84965):EQLSN (SEQ ID NO: 84178):NMVKS (SEQ ID NO: 84270):SXGXH (SEQ ID NO: 84304), RVPSTXX (SEQ ID NO: 84428):VSQKT (SEQ ID NO: 84394):EPLT-AA¹⁷-LYY (SEQ ID NO: 84876):DNGRVLL (SEQ ID NO: 84970):EQLSN (SEQ ID NO: 84178):MIVKS (SEQ ID NO: 84242):XGXL (SEQ ID NO: 84122), ASAAPXX (SEQ ID NO: 84402):VSQAL (SEQ ID NO: 84386):EPLT-AA¹⁷-LYY (SEQ ID NO: 84876):VGRKPKV (SEQ ID NO: 84981):EQLSN (SEQ ID NO: 84178):MIVKS (SEQ ID NO: 84242):XKXS (SEQ ID NO: 84124), ASASPXX (SEQ ID NO: 84403):VSQDL (SEQ ID NO: 84387):EPLT-AA¹⁷-LYY (SEQ ID NO: 84876):VGRTPKV (SEQ ID NO: 84982):EQLSN (SEQ ID NO: 84178):MVVKS (SEQ ID NO: 84256):XKXS (SEQ ID NO: 84124), NDEGLEX (SEQ ID NO: 84426):VSQEE (SEQ ID NO: 84388):EPLT-AA¹⁷-LYY (SEQ ID NO: 84876):RIKPHQGQH (SEQ ID NO: 84980):EQLSN (SEQ ID NO: 84178):FLVKS (SEQ ID NO: 84188):KXEXR (SEQ ID NO: 84213), NDEGLEX (SEQ ID NO: 84426):VSQGQ (SEQ ID NO: 84390):EPLT-AA¹⁷-LYY (SEQ ID NO: 84876):RIKPHQGQH (SEQ ID NO: 84980):EQLSN (SEQ ID NO: 84178):LEVKS (SEQ ID NO: 84222):QXEXR (SEQ ID NO: 84276), SSVKXQP (SEQ ID NO: 84430):VSQHH (SEQ ID NO: 84391):EPLT-AA¹⁷-LYY (SEQ ID NO: 84876):EYVRKKPKL (SEQ ID NO: 84974):EQLSN (SEQ ID NO: 84178):RLVKS (SEQ ID NO: 84285):LEXAXA (SEQ ID NO: 84400), RNVQXRP (SEQ ID NO: 84427):VSQQL (SEQ ID NO: 84395):EPLT-AA¹⁷-LYY (SEQ ID NO: 84876):EIVRKKPIF (SEQ ID NO: 84973):EQLSN (SEQ ID NO: 84178):TLVKS (SEQ ID NO: 84314):LAXKXE (SEQ ID NO: 84399), KIPKAXX (SEQ ID NO: 84424):VPTEL (SEQ ID NO: 84378):EPLT-AA¹⁷-LYY (SEQ ID NO: 84876):DENEKVV (SEQ ID NO: 84966):EQLSN (SEQ ID NO: 84178):DMVVE (SEQ ID NO: 84161):GXGXR (SEQ ID NO: 84208), GIPEPXX (SEQ ID NO: 84419):VPEKM (SEQ ID NO: 84360):EPLT-AA¹⁷-LYY (SEQ ID NO: 84876):DENKNVV (SEQ ID NO: 84967):EQLSN (SEQ ID NO: 84178):NMTVE (SEQ ID NO: 84267):SXAXR (SEQ ID NO: 84303), SIPKAXX (SEQ ID NO: 84429):VPTEL (SEQ ID NO: 84378):EPLT-AA¹⁷-LYY (SEQ ID NO: 84876):DEYDKVV (SEQ ID NO: 84968):EQLSN (SEQ ID NO: 84178):EMVVE (SEQ ID NO: 84175):GXGXR (SEQ ID NO: 84208), HVTKPTX (SEQ ID NO: 84422):APTKL (SEQ ID NO: 84131):EPLT-AA¹⁷-LYY (SEQ ID NO: 84876):DDSSNVI (SEQ ID NO: 84965):EQLSN (SEQ ID NO: 84178):NMVVR (SEQ ID NO: 84275):SXGXH (SEQ ID NO: 84304), YVPKPXX (SEQ ID NO: 84433):APTKL (SEQ ID NO: 84131):EPLT-AA¹⁷-LYY (SEQ ID NO: 84876):DDSSNVI (SEQ ID NO: 84965):EQLSN (SEQ ID NO: 84178):NMVVR (SEQ ID NO: 84275):SXGXH (SEQ ID NO: 84304), TVPKPXX (SEQ ID NO: 84432):APTQL (SEQ ID NO: 84134):EPLT-AA¹⁷-LYY (SEQ ID NO: 84876):DDSSNVI (SEQ ID NO: 84965):EQLSN (SEQ ID NO: 84178):NMVVR (SEQ ID NO: 84275):AXGXH (SEQ ID NO: 84147), AVPKAXX (SEQ ID NO: 84404):APTKL (SEQ ID NO: 84131):EPLT-AA¹⁷-LYY (SEQ ID NO: 84876):DSSNNVI (SEQ ID NO: 84972):EQLSN (SEQ ID NO: 84178):NMVVK (SEQ ID NO: 84274):AXGXH (SEQ ID NO: 84147), KVGKAXX (SEQ ID NO: 84425):VPTKL (SEQ ID NO: 84381):EPLT-AA¹⁷-LYY (SEQ ID NO: 84876):DDMGVPT (SEQ ID NO: 84964):EQLSN (SEQ ID NO: 84178):EGMSVAE (SEQ ID NO: 84411):XGXR (SEQ ID NO: 84123), KASKAXX (SEQ ID NO: 84423):VPTKL (SEQ ID NO: 84381):EPLT-AA¹⁷-LYY (SEQ ID NO: 84876):DKGVVTY (SEQ ID NO: 84969):EQLSN (SEQ ID NO: 84178):GMAVS (SEQ ID NO: 84194):EXGXR (SEQ ID NO: 84179), GSAGPXX (SEQ ID NO: 84420):TPTKM (SEQ ID NO: 84327):EPLT-AA¹⁷-LYY (SEQ ID NO: 84876):NDKQQII (SEQ ID NO: 84979):EQLSN (SEQ ID NO: 84178):GMVVD (SEQ ID NO: 84204):RXGXS (SEQ ID NO: 84291), AAPASXX (SEQ ID NO: 84401):VPARL (SEQ ID NO: 84352):EPLT-AA¹⁷-LYY (SEQ ID NO: 84876):DAANNVV (SEQ ID NO: 84963):EQLSN (SEQ ID NO: 84178):DMVVE (SEQ ID NO: 84161):AXGXR (SEQ ID NO: 84148), STPPTXX (SEQ ID NO: 84431):VPTRL (SEQ ID NO: 84385):EPLT-AA¹⁷-LYY (SEQ ID NO: 84876):DSANNVV (SEQ ID NO: 84971):EQLSN (SEQ ID NO: 84178):DMVVE (SEQ ID NO: 84161):SXGXR (SEQ ID NO: 84305), HVPKPXX (SEQ ID NO: 84421):APTKL (SEQ ID NO: 84131):EPLT-AA¹⁷-LYY (SEQ ID NO: 84876):DDSSNVI (SEQ ID NO: 84965):EQLSN (SEQ ID NO: 84178):NMVVR (SEQ ID NO: 84275):SXGXH (SEQ ID NO: 84304), RVPSTXX (SEQ ID NO: 84428):APVKT (SEQ ID NO: 84144):EPLT-AA¹⁷-LYY (SEQ ID NO: 84876):DNGRVLL (SEQ ID NO: 84970):EQLSN (SEQ ID NO: 84178):MIVEE (SEQ ID NO: 84241):XGXL (SEQ ID NO: 84122), ASAAPXX (SEQ ID NO: 84402):VPQAL (SEQ ID NO: 84364):EPLT-AA¹⁷-LYY (SEQ ID NO: 84876):VGRKPKV (SEQ ID NO: 84981):EQLSN (SEQ ID NO: 84178):MIVRS (SEQ ID NO: 84243):XKXS (SEQ ID NO: 84124), ASASPXX (SEQ ID NO: 84403):VPQDL (SEQ ID NO: 84365):EPLT-AA¹⁷-LYY (SEQ ID NO: 84876):VGRTPKV (SEQ ID NO: 84982):EQLSN (SEQ ID NO: 84178):MVVKS (SEQ ID NO: 84256):XKXS (SEQ ID NO: 84124), NDEGLEX (SEQ ID NO: 84426):VPTEE (SEQ ID NO: 84377):EPLT-AA¹⁷-LYY (SEQ ID NO: 84876):RIKPHQGQH (SEQ ID NO: 84980):EQLSN (SEQ ID NO: 84178):FLQHN (SEQ ID NO: 84184):KXEXR (SEQ ID NO: 84213), NDEGLEX (SEQ ID NO: 84426):VPTGQ (SEQ ID NO: 84379):EPLT-AA¹⁷-LYY (SEQ ID NO: 84876):RIKPHQGQH (SEQ ID NO: 84980):EQLSN (SEQ ID NO: 84178):LEEHS (SEQ ID NO: 84217):QXEXR (SEQ ID NO: 84276), SSVKXQP (SEQ ID NO: 84430):SRVHH (SEQ ID NO: 84297):EPLT-AA¹⁷-LYY (SEQ ID NO: 84876):EYVRKKPKL (SEQ ID NO: 84974):EQLSN (SEQ ID NO: 84178):RLEEH (SEQ ID NO: 84279):LEXAXA (SEQ ID NO: 84400), RNVQXRP (SEQ ID NO: 84427):TQVQL (SEQ ID NO: 84340):EPLT-AA¹⁷-LYY (SEQ ID NO: 84876):EIVRKKPIF (SEQ ID NO: 84973):EQLSN (SEQ ID NO: 84178):TLEDH (SEQ ID NO: 84307):LAXKXE (SEQ ID NO: 84399), KIPKAXX (SEQ ID NO: 84424):VPQEL (SEQ ID NO: 84367):EPLT-AA¹⁷-LYY (SEQ ID NO: 84876):DENEKVV (SEQ ID NO: 84966):EQLSN (SEQ ID NO: 84178):DMVKS (SEQ ID NO: 84158):GXGXR (SEQ ID NO: 84208), GIPEPXX (SEQ ID NO: 84419):VPQKM (SEQ ID NO: 84371):EPLT-AA¹⁷-LYY (SEQ ID NO: 84876):DENKNVV (SEQ ID NO: 84967):EQLSN (SEQ ID NO: 84178):NMVKS (SEQ ID NO: 84270):SXAXR (SEQ ID NO: 84303), SIPKAXX (SEQ ID NO: 84429):VPQEL (SEQ ID NO: 84367):EPLT-AA¹⁷-LYY (SEQ ID NO: 84876):DEYDKVV (SEQ ID NO: 84968):EQLSN (SEQ ID NO: 84178):EMVKS (SEQ ID NO: 84172):GXGXR (SEQ ID NO: 84208), HVTKPTX (SEQ ID NO: 84422):VPQKL (SEQ ID NO: 84370):EPLT-AA¹⁷-LYY (SEQ ID NO: 84876):DDSSNVI (SEQ ID NO: 84965):EQLSN (SEQ ID NO: 84178):NMVKS (SEQ ID NO: 84270):SXGXH (SEQ ID NO: 84304), YVPKPXX (SEQ ID NO: 84433):VPQKL (SEQ ID NO: 84370):EPLT-AA¹⁷-LYY (SEQ ID NO: 84876):DDSSNVI (SEQ ID NO: 84965):EQLSN (SEQ ID NO: 84178):NMVKS (SEQ ID NO: 84270):SXGXH (SEQ ID NO: 84304), TVPKPXX (SEQ ID NO: 84432):VPQQL (SEQ ID NO: 84373):EPLT-AA¹⁷-LYY (SEQ ID NO: 84876):DDSSNVI (SEQ ID NO: 84965):EQLSN (SEQ ID NO: 84178):NMVKS (SEQ ID NO: 84270):AXGXH (SEQ ID NO: 84147), AVPKAXX (SEQ ID NO: 84404):VPQKL (SEQ ID NO: 84370):EPLT-AA¹⁷-LYY (SEQ ID NO: 84876):DSSNNVI (SEQ ID NO: 84972):EQLSN (SEQ ID NO: 84178):NMVKS (SEQ ID NO: 84270):AXGXH (SEQ ID NO: 84147), KVGKAXX (SEQ ID NO: 84425):VPQKL (SEQ ID NO: 84370):EPLT-AA¹⁷-LYY (SEQ ID NO: 84876):DDMGVPT (SEQ ID NO: 84964):EQLSN (SEQ ID NO: 84178):EGMSVKS (SEQ ID NO: 84413):XGXR (SEQ ID NO: 84123), KASKAXX (SEQ ID NO: 84423):VPQKL (SEQ ID NO: 84370):EPLT-AA¹⁷-LYY (SEQ ID NO: 84876):DKGVVTY (SEQ ID NO: 84969):EQLSN (SEQ ID NO: 84178):GMVKS (SEQ ID NO: 84202):EXGXR (SEQ ID NO: 84179), GSAGPXX (SEQ ID NO: 84420):VPQKM (SEQ ID NO: 84371):EPLT-AA¹⁷-LYY (SEQ ID NO: 84876):NDKQQII (SEQ ID NO: 84979):EQLSN (SEQ ID NO: 84178):GMVKS (SEQ ID NO: 84202):RXGXS (SEQ ID NO: 84291), AAPASXX (SEQ ID NO: 84401):VPQRL (SEQ ID NO: 84374):EPLT-AA¹⁷-LYY (SEQ ID NO: 84876):DAANNVV (SEQ ID NO: 84963):EQLSN (SEQ ID NO: 84178):DMVKS (SEQ ID NO: 84158):AXGXR (SEQ ID NO: 84148), STPPTXX (SEQ ID NO: 84431):VPQRL (SEQ ID NO: 84374):EPLT-AA¹⁷-LYY (SEQ ID NO: 84876):DSANNVV (SEQ ID NO: 84971):EQLSN (SEQ ID NO: 84178):DMVKS (SEQ ID NO: 84158):SXGXR (SEQ ID NO: 84305), HVPKPXX (SEQ ID NO: 84421):VPQKL (SEQ ID NO: 84370):EPLT-AA¹⁷-LYY (SEQ ID NO: 84876):DDSSNVI (SEQ ID NO: 84965):EQLSN (SEQ ID NO: 84178):NMVKS (SEQ ID NO: 84270):SXGXH (SEQ ID NO: 84304), RVPSTXX (SEQ ID NO: 84428):VPQKT (SEQ ID NO: 84372):EPLT-AA¹⁷-LYY (SEQ ID NO: 84876):DNGRVLL (SEQ ID NO: 84970):EQLSN (SEQ ID NO: 84178):MIVKS (SEQ ID NO: 84242):XGXL (SEQ ID NO: 84122), ASAAPXX (SEQ ID NO: 84402):VPQAL (SEQ ID NO: 84364):EPLT-AA¹⁷-LYY (SEQ ID NO: 84876):VGRKPKV (SEQ ID NO: 84981):EQLSN (SEQ ID NO: 84178):MIVKS (SEQ ID NO: 84242):XKXS (SEQ ID NO: 84124), ASASPXX (SEQ ID NO: 84403):VPQDL (SEQ ID NO: 84365):EPLT-AA¹⁷-LYY (SEQ ID NO: 84876):IGKTPKI (SEQ ID NO: 84978):EQLSN (SEQ ID NO: 84178):MIVKS (SEQ ID NO: 84242):XKXS (SEQ ID NO: 84124), NDEGLEX (SEQ ID NO: 84426):VPQEE (SEQ ID NO: 84366):EPLT-AA¹⁷-LYY (SEQ ID NO: 84876):RIKPHQGQH (SEQ ID NO: 84980):EQLSN (SEQ ID NO: 84178):FLVKS (SEQ ID NO: 84188):KXEXR (SEQ ID NO: 84213), NDEGLEX (SEQ ID NO: 84426):VPQGQ (SEQ ID NO: 84368):EPLT-AA¹⁷-LYY (SEQ ID NO: 84876):RIKPHQGQH (SEQ ID NO: 84980):EQLSN (SEQ ID NO: 84178):LEVKS (SEQ ID NO: 84222):QXEXR (SEQ ID NO: 84276), SSVKXQP (SEQ ID NO: 84430):VPQHH (SEQ ID NO: 84369):EPLT-AA¹⁷-LYY (SEQ ID NO: 84876):EYVRKKPKL (SEQ ID NO: 84974):EQLSN (SEQ ID NO: 84178):RLVKS (SEQ ID NO: 84285):LEXAXA (SEQ ID NO: 84400), RNVQXRP (SEQ ID NO: 84427):VPQQL (SEQ ID NO: 84373):EPLT-AA¹⁷-LYY (SEQ ID NO: 84876):EIVRKKPIF (SEQ ID NO: 84973):EQLSN (SEQ ID NO: 84178):TLVKS (SEQ ID NO: 84314):LAXKXE (SEQ ID NO: 84399), ASASPXX (SEQ ID NO: 84403):VSQDL (SEQ ID NO: 84387):EPLT-AA¹⁷-LYY (SEQ ID NO: 84876):IGKTPKI (SEQ ID NO: 84978):EQLSN (SEQ ID NO: 84178):MIVKS (SEQ ID NO: 84242):XKXS (SEQ ID NO: 84124), KIPKAXX (SEQ ID NO: 84424):VPTEL (SEQ ID NO: 84378):SNIT-AA¹⁷-QIM (SEQ ID NO: 84883):DENEKVV (SEQ ID NO: 84966):IGEMS (SEQ ID NO: 84209):DMQHN (SEQ ID NO: 84154):GXGXR (SEQ ID NO: 84208), GIPEPXX (SEQ ID NO: 84419):VPTKM (SEQ ID NO: 84382):SNIT-AA¹⁷-QIM (SEQ ID NO: 84883):DENKNVV (SEQ ID NO: 84967):IGEMS (SEQ ID NO: 84209):NMQHN (SEQ ID NO: 84266):SXAXR (SEQ ID NO: 84303), SIPKAXX (SEQ ID NO: 84429):VPTEL (SEQ ID NO: 84378):SNIT-AA¹⁷-QIM (SEQ ID NO: 84883):DEYDKVV (SEQ ID NO: 84968):IGEMS (SEQ ID NO: 84209):EMQHN (SEQ ID NO: 84168):GXGXR (SEQ ID NO: 84208), HVTKPTX (SEQ ID NO: 84422):VPTKL (SEQ ID NO: 84381):SNIT-AA¹⁷-QIM (SEQ ID NO: 84883):DDSSNVI (SEQ ID NO: 84965):IGEMS (SEQ ID NO: 84209):NMQHN (SEQ ID NO: 84266):SXGXH (SEQ ID NO: 84304), YVPKPXX (SEQ ID NO: 84433):VPTKL (SEQ ID NO: 84381):SNIT-AA¹⁷-QIM (SEQ ID NO: 84883):DDSSNVI (SEQ ID NO: 84965):IGEMS (SEQ ID NO: 84209):NMQHN (SEQ ID NO: 84266):SXGXH (SEQ ID NO: 84304), TVPKPXX (SEQ ID NO: 84432):VPTQL (SEQ ID NO: 84384):SNIT-AA¹⁷-QIM (SEQ ID NO: 84883):DDSSNVI (SEQ ID NO: 84965):IGEMS (SEQ ID NO: 84209):NMQHN (SEQ ID NO: 84266):AXGXH (SEQ ID NO: 84147), AVPKAXX (SEQ ID NO: 84404):VPTKL (SEQ ID NO: 84381):SNIT-AA¹⁷-QIM (SEQ ID NO: 84883):DSSNNVI (SEQ ID NO: 84972):IGEMS (SEQ ID NO: 84209):NMQHN (SEQ ID NO: 84266):AXGXH (SEQ ID NO: 84147), KVGKAXX (SEQ ID NO: 84425):VPTKL (SEQ ID NO: 84381):SNIT-AA¹⁷-QIM (SEQ ID NO: 84883):DDMGVPT (SEQ ID NO: 84964):IGEMS (SEQ ID NO: 84209):EGMSQHN (SEQ ID NO: 84409):XGXR (SEQ ID NO: 84123), KASKAXX (SEQ ID NO: 84423):VPTKL (SEQ ID NO: 84381):SNIT-AA¹⁷-QIM (SEQ ID NO: 84883):DKGVVTY (SEQ ID NO: 84969):IGEMS (SEQ ID NO: 84209):GMQHN (SEQ ID NO: 84198):EXGXR (SEQ ID NO: 84179), GSAGPXX (SEQ ID NO: 84420):VPTKM (SEQ ID NO: 84382):SNIT-AA¹⁷-QIM (SEQ ID NO: 84883):NDKQQII (SEQ ID NO: 84979):IGEMS (SEQ ID NO: 84209):GMQHN (SEQ ID NO: 84198):RXGXS (SEQ ID NO: 84291), AAPASXX (SEQ ID NO: 84401):VPTRL (SEQ ID NO: 84385):SNIT-AA¹⁷-QIM (SEQ ID NO: 84883):DAANNVV (SEQ ID NO: 84963):IGEMS (SEQ ID NO: 84209):DMQHN (SEQ ID NO: 84154):AXGXR (SEQ ID NO: 84148), STPPTXX (SEQ ID NO: 84431):VPTRL (SEQ ID NO: 84385):SNIT-AA¹⁷-QIM (SEQ ID NO: 84883):DSANNVV (SEQ ID NO: 84971):IGEMS (SEQ ID NO: 84209):DMQHN (SEQ ID NO: 84154):SXGXR (SEQ ID NO: 84305), HVPKPXX (SEQ ID NO: 84421):VPTKL (SEQ ID NO: 84381):SNIT-AA¹⁷-QIM (SEQ ID NO: 84883):DDSSNVI (SEQ ID NO: 84965):IGEMS (SEQ ID NO: 84209):NMQHN (SEQ ID NO: 84266):SXGXH (SEQ ID NO: 84304), RVPSTXX (SEQ ID NO: 84428):VPTKT (SEQ ID NO: 84383):SNIT-AA¹⁷-QIM (SEQ ID NO: 84883):DNGRVLL (SEQ ID NO: 84970):IGEMS (SEQ ID NO: 84209):MIQHN (SEQ ID NO: 84238):XGXL (SEQ ID NO: 84122), ASAAPXX (SEQ ID NO: 84402):VPTAL (SEQ ID NO: 84375):SNIT-AA¹⁷-QIM (SEQ ID NO: 84883):VGRKPKV (SEQ ID NO: 84981):IGEMS (SEQ ID NO: 84209):MIQHN (SEQ ID NO: 84238):XKXS (SEQ ID NO: 84124), ASASPXX (SEQ ID NO: 84403):VPTDL (SEQ ID NO: 84376):SNIT-AA¹⁷-QIM (SEQ ID NO: 84883):IGKTPKI (SEQ ID NO: 84978):IGEMS (SEQ ID NO: 84209):MIQHN (SEQ ID NO: 84238):XKXS (SEQ ID NO: 84124), ASASPXX (SEQ ID NO: 84403):VPTDL (SEQ ID NO: 84376):SNIT-AA¹⁷-QIM (SEQ ID NO: 84883):VGRTPKV (SEQ ID NO: 84982):IGEMS (SEQ ID NO: 84209):MVQHN (SEQ ID NO: 84252):XKXS (SEQ ID NO: 84124), NDEGLEX (SEQ ID NO: 84426):VPTGQ (SEQ ID NO: 84379):SNIT-AA¹⁷-QIM (SEQ ID NO: 84883):RIKPHQGQH (SEQ ID NO: 84980):IGEMS (SEQ ID NO: 84209):LEQHN (SEQ ID NO: 84218):QXEXR (SEQ ID NO: 84276), NDEGLEX (SEQ ID NO: 84426):VPTEE (SEQ ID NO: 84377):SNIT-AA¹⁷-QIM (SEQ ID NO: 84883):RIKPHQGQH (SEQ ID NO: 84980):IGEMS (SEQ ID NO: 84209):FLQHN (SEQ ID NO: 84184):KXEXR (SEQ ID NO: 84213), SSVKXQP (SEQ ID NO: 84430):VPTHH (SEQ ID NO: 84380):SNIT-AA¹⁷-QIM (SEQ ID NO: 84883):EYVRKKPKL (SEQ ID NO: 84974):IGEMS (SEQ ID NO: 84209):RLQHN (SEQ ID NO: 84281):LEXAXA (SEQ ID NO: 84400), RNVQXRP (SEQ ID NO: 84427):VPTQL (SEQ ID NO: 84384):SNIT-AA¹⁷-QIM (SEQ ID NO: 84883):EIVRKKPIF (SEQ ID NO: 84973):IGEMS (SEQ ID NO: 84209):TLQHN (SEQ ID NO: 84310):LAXKXE (SEQ ID NO: 84399), KIPKAXX (SEQ ID NO: 84424):VPTEL (SEQ ID NO: 84378):SNIT-AA¹⁷-QIM (SEQ ID NO: 84883):DENEKVV (SEQ ID NO: 84966):IGEMS (SEQ ID NO: 84209):DMVVE (SEQ ID NO: 84161):GXGXR (SEQ ID NO: 84208), GIPEPXX (SEQ ID NO: 84419):VPEKM (SEQ ID NO: 84360):SNIT-AA¹⁷-QIM (SEQ ID NO: 84883):DENKNVV (SEQ ID NO: 84967):IGEMS (SEQ ID NO: 84209):NMTVE (SEQ ID NO: 84267):SXAXR (SEQ ID NO: 84303), SIPKAXX (SEQ ID NO: 84429):VPTEL (SEQ ID NO: 84378):SNIT-AA¹⁷-QIM (SEQ ID NO: 84883):DEYDKVV (SEQ ID NO: 84968):IGEMS (SEQ ID NO: 84209):EMVVE (SEQ ID NO: 84175):GXGXR (SEQ ID NO: 84208), HVTKPTX (SEQ ID NO: 84422):APTKL (SEQ ID NO: 84131):SNIT-AA¹⁷-QIM (SEQ ID NO: 84883):DDSSNVI (SEQ ID NO: 84965):IGEMS (SEQ ID NO: 84209):NMVVR (SEQ ID NO: 84275):SXGXH (SEQ ID NO: 84304), YVPKPXX (SEQ ID NO: 84433):APTKL (SEQ ID NO: 84131):SNIT-AA¹⁷-QIM (SEQ ID NO: 84883):DDSSNVI (SEQ ID NO: 84965):IGEMS (SEQ ID NO: 84209):NMVVR (SEQ ID NO: 84275):SXGXH (SEQ ID NO: 84304), TVPKPXX (SEQ ID NO: 84432):APTQL (SEQ ID NO: 84134):SNIT-AA¹⁷-QIM (SEQ ID NO: 84883):DDSSNVI (SEQ ID NO: 84965):IGEMS (SEQ ID NO: 84209):NMVVR (SEQ ID NO: 84275):AXGXH (SEQ ID NO: 84147), AVPKAXX (SEQ ID NO: 84404):APTKL (SEQ ID NO: 84131):SNIT-AA¹⁷-QIM (SEQ ID NO: 84883):DSSNNVI (SEQ ID NO: 84972):IGEMS (SEQ ID NO: 84209):NMVVK (SEQ ID NO: 84274):AXGXH (SEQ ID NO: 84147), KVGKAXX (SEQ ID NO: 84425):VPTKL (SEQ ID NO: 84381):SNIT-AA¹⁷-QIM (SEQ ID NO: 84883):DDMGVPT (SEQ ID NO: 84964):IGEMS (SEQ ID NO: 84209):EGMSVAE (SEQ ID NO: 84411):XGXR (SEQ ID NO: 84123), KASKAXX (SEQ ID NO: 84423):VPTKL (SEQ ID NO: 84381):SNIT-AA¹⁷-QIM (SEQ ID NO: 84883):DKGVVTY (SEQ ID NO: 84969):IGEMS (SEQ ID NO: 84209):GMAVS (SEQ ID NO: 84194):EXGXR (SEQ ID NO: 84179), GSAGPXX (SEQ ID NO: 84420):TPTKM (SEQ ID NO: 84327):SNIT-AA¹⁷-QIM (SEQ ID NO: 84883):NDKQQII (SEQ ID NO: 84979):IGEMS (SEQ ID NO: 84209):GMVVD (SEQ ID NO: 84204):RXGXS (SEQ ID NO: 84291), AAPASXX (SEQ ID NO: 84401):VPARL (SEQ ID NO: 84352):SNIT-AA¹⁷-QIM (SEQ ID NO: 84883):DAANNVV (SEQ ID NO: 84963):IGEMS (SEQ ID NO: 84209):DMVVE (SEQ ID NO: 84161):AXGXR (SEQ ID NO: 84148), STPPTXX (SEQ ID NO: 84431):VPTRL (SEQ ID NO: 84385):SNIT-AA¹⁷-QIM (SEQ ID NO: 84883):DSANNVV (SEQ ID NO: 84971):IGEMS (SEQ ID NO: 84209):DMVVE (SEQ ID NO: 84161):SXGXR (SEQ ID NO: 84305), HVPKPXX (SEQ ID NO: 84421):APTKL (SEQ ID NO: 84131):SNIT-AA¹⁷-QIM (SEQ ID NO: 84883):DDSSNVI (SEQ ID NO: 84965):IGEMS (SEQ ID NO: 84209):NMVVR (SEQ ID NO: 84275):SXGXH (SEQ ID NO: 84304), RVPSTXX (SEQ ID NO: 84428):APVKT (SEQ ID NO: 84144):SNIT-AA¹⁷-QIM (SEQ ID NO: 84883):DNGRVLL (SEQ ID NO: 84970):IGEMS (SEQ ID NO: 84209):MIVEE (SEQ ID NO: 84241):XGXL (SEQ ID NO: 84122), ASAAPXX (SEQ ID NO: 84402):VPQAL (SEQ ID NO: 84364):SNIT-AA¹⁷-QIM (SEQ ID NO: 84883):VGRKPKV (SEQ ID NO: 84981):IGEMS (SEQ ID NO: 84209):MIVRS (SEQ ID NO: 84243):XKXS (SEQ ID NO: 84124), ASASPXX (SEQ ID NO: 84403):VSQDL (SEQ ID NO: 84387):SNIT-AA¹⁷-QIM (SEQ ID NO: 84883):IGKTPKI (SEQ ID NO: 84978):IGEMS (SEQ ID NO: 84209):MIVKS (SEQ ID NO: 84242):XKXS (SEQ ID NO: 84124), ASASPXX (SEQ ID NO: 84403):VPQDL (SEQ ID NO: 84365):SNIT-AA¹⁷-QIM (SEQ ID NO: 84883):VGRTPKV (SEQ ID NO: 84982):IGEMS (SEQ ID NO: 84209):MVVKS (SEQ ID NO: 84256):XKXS (SEQ ID NO: 84124), NDEGLEX (SEQ ID NO: 84426):VPTGQ (SEQ ID NO: 84379):SNIT-AA¹⁷-QIM (SEQ ID NO: 84883):RIKPHQGQH (SEQ ID NO: 84980):IGEMS (SEQ ID NO: 84209):LEEHS (SEQ ID NO: 84217):QXEXR (SEQ ID NO: 84276), SSVKXQP (SEQ ID NO: 84430):SRVHH (SEQ ID NO: 84297):SNIT-AA¹⁷-QIM (SEQ ID NO: 84883):EYVRKKPKL (SEQ ID NO: 84974):IGEMS (SEQ ID NO: 84209):RLEEH (SEQ ID NO: 84279):LEXAXA (SEQ ID NO: 84400), RNVQXRP (SEQ ID NO: 84427):TQVQL (SEQ ID NO: 84340):SNIT-AA¹⁷-QIM (SEQ ID NO: 84883):EIVRKKPIF (SEQ ID NO: 84973):IGEMS (SEQ ID NO: 84209):TLEDH (SEQ ID NO: 84307):LAXKXE (SEQ ID NO: 84399), KIPKAXX (SEQ ID NO: 84424):VPTEL (SEQ ID NO: 84378):SNIT-AA¹⁷-QIM (SEQ ID NO: 84883):DENEKVV (SEQ ID NO: 84966):LGEMS (SEQ ID NO: 84228):DMEHS (SEQ ID NO: 84153):GXGXR (SEQ ID NO: 84208), GIPEPXX (SEQ ID NO: 84419):VPTKM (SEQ ID NO: 84382):SNIT-AA¹⁷-QIM (SEQ ID NO: 84883):DENKNVV (SEQ ID NO: 84967):LGEMS (SEQ ID NO: 84228):NMEHS (SEQ ID NO: 84265):SXAXR (SEQ ID NO: 84303), SIPKAXX (SEQ ID NO: 84429):VPTEL (SEQ ID NO: 84378):SNIT-AA¹⁷-QIM (SEQ ID NO: 84883):DEYDKVV (SEQ ID NO: 84968):LGEMS (SEQ ID NO: 84228):EMEHS (SEQ ID NO: 84167):GXGXR (SEQ ID NO: 84208), HVTKPTX (SEQ ID NO: 84422):VPTKL (SEQ ID NO: 84381):SNIT-AA¹⁷-QIM (SEQ ID NO: 84883):DDSSNVI (SEQ ID NO: 84965):LGEMS (SEQ ID NO: 84228):NMEHS (SEQ ID NO: 84265):SXGXH (SEQ ID NO: 84304), YVPKPXX (SEQ ID NO: 84433):VPTKL (SEQ ID NO: 84381):SNIT-AA¹⁷-QIM (SEQ ID NO: 84883):DDSSNVI (SEQ ID NO: 84965):LGEMS (SEQ ID NO: 84228):NMEHS (SEQ ID NO: 84265):SXGXH (SEQ ID NO: 84304), TVPKPXX (SEQ ID NO: 84432):VPTQL (SEQ ID NO: 84384):SNIT-AA¹⁷-QIM (SEQ ID NO: 84883):DDSSNVI (SEQ ID NO: 84965):LGEMS (SEQ ID NO: 84228):NMEHS (SEQ ID NO: 84265):AXGXH (SEQ ID NO: 84147), AVPKAXX (SEQ ID NO: 84404):VPTKL (SEQ ID NO: 84381):SNIT-AA¹⁷-QIM (SEQ ID NO: 84883):DSSNNVI (SEQ ID NO: 84972):LGEMS (SEQ ID NO: 84228):NMEHS (SEQ ID NO: 84265):AXGXH (SEQ ID NO: 84147), KVGKAXX (SEQ ID NO: 84425):VPTKL (SEQ ID NO: 84381):SNIT-AA¹⁷-QIM (SEQ ID NO: 84883):DDMGVPT (SEQ ID NO: 84964):LGEMS (SEQ ID NO: 84228):EGMSEHS (SEQ ID NO: 84408):XGXR (SEQ ID NO: 84123), KASKAXX (SEQ ID NO: 84423):VPTKL (SEQ ID NO: 84381):SNIT-AA¹⁷-QIM (SEQ ID NO: 84883):DKGVVTY (SEQ ID NO: 84969):LGEMS (SEQ ID NO: 84228):GMEHS (SEQ ID NO: 84197):EXGXR (SEQ ID NO: 84179), GSAGPXX (SEQ ID NO: 84420):VPTKM (SEQ ID NO: 84382):SNIT-AA¹⁷-QIM (SEQ ID NO: 84883):NDKQQII (SEQ ID NO: 84979):LGEMS (SEQ ID NO: 84228):GMEHS (SEQ ID NO: 84197):RXGXS (SEQ ID NO: 84291), AAPASXX (SEQ ID NO: 84401):VPTRL (SEQ ID NO: 84385):SNIT-AA¹⁷-QIM (SEQ ID NO: 84883):DAANNVV (SEQ ID NO: 84963):LGEMS (SEQ ID NO: 84228):DMEHS (SEQ ID NO: 84153):AXGXR (SEQ ID NO: 84148), STPPTXX (SEQ ID NO: 84431):VPTRL (SEQ ID NO: 84385):SNIT-AA¹⁷-QIM (SEQ ID NO: 84883):DSANNVV (SEQ ID NO: 84971):LGEMS (SEQ ID NO: 84228):DMEHS (SEQ ID NO: 84153):SXGXR (SEQ ID NO: 84305), HVPKPXX (SEQ ID NO: 84421):VPTKL (SEQ ID NO: 84381):SNIT-AA¹⁷-QIM (SEQ ID NO: 84883):DDSSNVI (SEQ ID NO: 84965):LGEMS (SEQ ID NO: 84228):NMEHS (SEQ ID NO: 84265):SXGXH (SEQ ID NO: 84304), RVPSTXX (SEQ ID NO: 84428):VPTKT (SEQ ID NO: 84383):SNIT-AA¹⁷-QIM (SEQ ID NO: 84883):DNGRVLL (SEQ ID NO: 84970):LGEMS (SEQ ID NO: 84228):MIEHS (SEQ ID NO: 84237):XGXL (SEQ ID NO: 84122), ASAAPXX (SEQ ID NO: 84402):VPTAL (SEQ ID NO: 84375):SNIT-AA¹⁷-QIM (SEQ ID NO: 84883):VGRKPKV (SEQ ID NO: 84981):LGEMS (SEQ ID NO: 84228):MIEHS (SEQ ID NO: 84237):XKXS (SEQ ID NO: 84124), ASASPXX (SEQ ID NO: 84403):VPTDL (SEQ ID NO: 84376):SNIT-AA¹⁷-QIM (SEQ ID NO: 84883):IGKTPKI (SEQ ID NO: 84978):LGEMS (SEQ ID NO: 84228):MIEHS (SEQ ID NO: 84237):XKXS (SEQ ID NO: 84124), ASASPXX (SEQ ID NO: 84403):VPTDL (SEQ ID NO: 84376):SNIT-AA¹⁷-QIM (SEQ ID NO: 84883):VGRTPKV (SEQ ID NO: 84982):LGEMS (SEQ ID NO: 84228):MVEHS (SEQ ID NO: 84251):XKXS (SEQ ID NO: 84124), NDEGLEX (SEQ ID NO: 84426):VPTEE (SEQ ID NO: 84377):SNIT-AA¹⁷-QIM (SEQ ID NO: 84883):RIKPHQGQH (SEQ ID NO: 84980):LGEMS (SEQ ID NO: 84228):FLEHS (SEQ ID NO: 84183):KXEXR (SEQ ID NO: 84213), SSVKXQP (SEQ ID NO: 84430):VPTHH (SEQ ID NO: 84380):SNIT-AA¹⁷-QIM (SEQ ID NO: 84883):EYVRKKPKL (SEQ ID NO: 84974):LGEMS (SEQ ID NO: 84228):RLEHS (SEQ ID NO: 84280):LEXAXA (SEQ ID NO: 84400), RNVQXRP (SEQ ID NO: 84427):VPTQL (SEQ ID NO: 84384):SNIT-AA¹⁷-QIM (SEQ ID NO: 84883):EIVRKKPIF (SEQ ID NO: 84973):LGEMS (SEQ ID NO: 84228):TLEHS (SEQ ID NO: 84309):LAXKXE (SEQ ID NO: 84399), KIPKAXX (SEQ ID NO: 84424):VPTEL (SEQ ID NO: 84378):SNIT-AA¹⁷-QIM (SEQ ID NO: 84883):DENEKVV (SEQ ID NO: 84966):LGEMS (SEQ ID NO: 84228):DMVVE (SEQ ID NO: 84161):GXGXR (SEQ ID NO: 84208), GIPEPXX (SEQ ID NO: 84419):VPEKM (SEQ ID NO: 84360):SNIT-AA¹⁷-QIM (SEQ ID NO: 84883):DENKNVV (SEQ ID NO: 84967):LGEMS (SEQ ID NO: 84228):NMTVE (SEQ ID NO: 84267):SXAXR (SEQ ID NO: 84303), SIPKAXX (SEQ ID NO: 84429):VPTEL (SEQ ID NO: 84378):SNIT-AA¹⁷-QIM (SEQ ID NO: 84883):DEYDKVV (SEQ ID NO: 84968):LGEMS (SEQ ID NO: 84228):EMVVE (SEQ ID NO: 84175):GXGXR (SEQ ID NO: 84208), HVTKPTX (SEQ ID NO: 84422):APTKL (SEQ ID NO: 84131):SNIT-AA¹⁷-QIM (SEQ ID NO: 84883):DDSSNVI (SEQ ID NO: 84965):LGEMS (SEQ ID NO: 84228):NMVVR (SEQ ID NO: 84275):SXGXH (SEQ ID NO: 84304), YVPKPXX (SEQ ID NO: 84433):APTKL (SEQ ID NO: 84131):SNIT-AA¹⁷-QIM (SEQ ID NO: 84883):DDSSNVI (SEQ ID NO: 84965):LGEMS (SEQ ID NO: 84228):NMVVR (SEQ ID NO: 84275):SXGXH (SEQ ID NO: 84304), TVPKPXX (SEQ ID NO: 84432):APTQL (SEQ ID NO: 84134):SNIT-AA¹⁷-QIM (SEQ ID NO: 84883):DDSSNVI (SEQ ID NO: 84965):LGEMS (SEQ ID NO: 84228):NMVVR (SEQ ID NO: 84275):AXGXH (SEQ ID NO: 84147), AVPKAXX (SEQ ID NO: 84404):APTKL (SEQ ID NO: 84131):SNIT-AA¹⁷-QIM (SEQ ID NO: 84883):DSSNNVI (SEQ ID NO: 84972):LGEMS (SEQ ID NO: 84228):NMVVK (SEQ ID NO: 84274):AXGXH (SEQ ID NO: 84147), KVGKAXX (SEQ ID NO: 84425):VPTKL (SEQ ID NO: 84381):SNIT-AA¹⁷-QIM (SEQ ID NO: 84883):DDMGVPT (SEQ ID NO: 84964):LGEMS (SEQ ID NO: 84228):EGMSVAE (SEQ ID NO: 84411):XGXR (SEQ ID NO: 84123), KASKAXX (SEQ ID NO: 84423):VPTKL (SEQ ID NO: 84381):SNIT-AA¹⁷-QIM (SEQ ID NO: 84883):DKGVVTY (SEQ ID NO: 84969):LGEMS (SEQ ID NO: 84228):GMAVS (SEQ ID NO: 84194):EXGXR (SEQ ID NO: 84179), GSAGPXX (SEQ ID NO: 84420):TPTKM (SEQ ID NO: 84327):SNIT-AA¹⁷-QIM (SEQ ID NO: 84883):NDKQQII (SEQ ID NO: 84979):LGEMS (SEQ ID NO: 84228):GMVVD (SEQ ID NO: 84204):RXGXS (SEQ ID NO: 84291), AAPASXX (SEQ ID NO: 84401):VPARL (SEQ ID NO: 84352):SNIT-AA¹⁷-QIM (SEQ ID NO: 84883):DAANNVV (SEQ ID NO: 84963):LGEMS (SEQ ID NO: 84228):DMVVE (SEQ ID NO: 84161):AXGXR (SEQ ID NO: 84148), STPPTXX (SEQ ID NO: 84431):VPTRL (SEQ ID NO: 84385):SNIT-AA¹⁷-QIM (SEQ ID NO: 84883):DSANNVV (SEQ ID NO: 84971):LGEMS (SEQ ID NO: 84228):DMVVE (SEQ ID NO: 84161):SXGXR (SEQ ID NO: 84305), HVPKPXX (SEQ ID NO: 84421):APTKL (SEQ ID NO: 84131):SNIT-AA¹⁷-QIM (SEQ ID NO: 84883):DDSSNVI (SEQ ID NO: 84965):LGEMS (SEQ ID NO: 84228):NMVVR (SEQ ID NO: 84275):SXGXH (SEQ ID NO: 84304), RVPSTXX (SEQ ID NO: 84428):APVKT (SEQ ID NO: 84144):SNIT-AA¹⁷-QIM (SEQ ID NO: 84883):DNGRVLL (SEQ ID NO: 84970):LGEMS (SEQ ID NO: 84228):MIVEE (SEQ ID NO: 84241):XGXL (SEQ ID NO: 84122), ASAAPXX (SEQ ID NO: 84402):VPQAL (SEQ ID NO: 84364):SNIT-AA¹⁷-QIM (SEQ ID NO: 84883):VGRKPKV (SEQ ID NO: 84981):LGEMS (SEQ ID NO: 84228):MIVRS (SEQ ID NO: 84243):XKXS (SEQ ID NO: 84124), ASASPXX (SEQ ID NO: 84403):VSQDL (SEQ ID NO: 84387):SNIT-AA¹⁷-QIM (SEQ ID NO: 84883):IGKTPKI (SEQ ID NO: 84978):LGEMS (SEQ ID NO: 84228):MIVKS (SEQ ID NO: 84242):XKXS (SEQ ID NO: 84124), ASASPXX (SEQ ID NO: 84403):VPQDL (SEQ ID NO: 84365):SNIT-AA¹⁷-QIM (SEQ ID NO: 84883):VGRTPKV (SEQ ID NO: 84982):LGEMS (SEQ ID NO: 84228):MVVKS (SEQ ID NO: 84256):XKXS (SEQ ID NO: 84124), NDEGLEX (SEQ ID NO: 84426):VPTEE (SEQ ID NO: 84377):SNIT-AA¹⁷-QIM (SEQ ID NO: 84883):RIKPHQGQH (SEQ ID NO: 84980):LGEMS (SEQ ID NO: 84228):FLQHN (SEQ ID NO: 84184):KXEXR (SEQ ID NO: 84213), SSVKXQP (SEQ ID NO: 84430):SRVHH (SEQ ID NO: 84297):SNIT-AA¹⁷-QIM (SEQ ID NO: 84883):EYVRKKPKL (SEQ ID NO: 84974):LGEMS (SEQ ID NO: 84228):RLEEH (SEQ ID NO: 84279):LEXAXA (SEQ ID NO: 84400), RNVQXRP (SEQ ID NO: 84427):TQVQL (SEQ ID NO: 84340):SNIT-AA¹⁷-QIM (SEQ ID NO: 84883):EIVRKKPIF (SEQ ID NO: 84973):LGEMS (SEQ ID NO: 84228):TLEDH (SEQ ID NO: 84307):LAXKXE (SEQ ID NO: 84399), KIPKAXX (SEQ ID NO: 84424):SRVEL (SEQ ID NO: 84295):RSVK-AA¹⁷-AKV (SEQ ID NO: 84880):DENEKVV (SEQ ID NO: 84966):KEVQV (SEQ ID NO: 84210):DMEEH (SEQ ID NO: 84152):GXGXR (SEQ ID NO: 84208), GIPEPXX (SEQ ID NO: 84419):SRVKM (SEQ ID NO: 84299):RSVK-AA¹⁷-AKV (SEQ ID NO: 84880):DENKNVV (SEQ ID NO: 84967):KEVQV (SEQ ID NO: 84210):NMEEH (SEQ ID NO: 84264):SXAXR (SEQ ID NO: 84303), SIPKAXX (SEQ ID NO: 84429):SRVEL (SEQ ID NO: 84295):RSVK-AA¹⁷-AKV (SEQ ID NO: 84880):DEYDKVV (SEQ ID NO: 84968):KEVQV (SEQ ID NO: 84210):EMEEH (SEQ ID NO: 84166):GXGXR (SEQ ID NO: 84208), HVTKPTX (SEQ ID NO: 84422):SRVKL (SEQ ID NO: 84298):RSVK-AA¹⁷-AKV (SEQ ID NO: 84880):DDSSNVI (SEQ ID NO: 84965):KEVQV (SEQ ID NO: 84210):NMEEH (SEQ ID NO: 84264):SXGXH (SEQ ID NO: 84304), YVPKPXX (SEQ ID NO: 84433):SRVKL (SEQ ID NO: 84298):RSVK-AA¹⁷-AKV (SEQ ID NO: 84880):DDSSNVI (SEQ ID NO: 84965):KEVQV (SEQ ID NO: 84210):NMEEH (SEQ ID NO: 84264):SXGXH (SEQ ID NO: 84304), TVPKPXX (SEQ ID NO: 84432):SRVQL (SEQ ID NO: 84301):RSVK-AA¹⁷-AKV (SEQ ID NO: 84880):DDSSNVI (SEQ ID NO: 84965):KEVQV (SEQ ID NO: 84210):NMEEH (SEQ ID NO: 84264):AXGXH (SEQ ID NO: 84147), AVPKAXX (SEQ ID NO: 84404):SRVKL (SEQ ID NO: 84298):RSVK-AA¹⁷-AKV (SEQ ID NO: 84880):DSSNNVI (SEQ ID NO: 84972):KEVQV (SEQ ID NO: 84210):NMEEH (SEQ ID NO: 84264):AXGXH (SEQ ID NO: 84147), KVGKAXX (SEQ ID NO: 84425):SRVKL (SEQ ID NO: 84298):RSVK-AA¹⁷-AKV (SEQ ID NO: 84880):DDMGVPT (SEQ ID NO: 84964):KEVQV (SEQ ID NO: 84210):EGMSEEH (SEQ ID NO: 84407):XGXR (SEQ ID NO: 84123), KASKAXX (SEQ ID NO: 84423):SRVKL (SEQ ID NO: 84298):RSVK-AA¹⁷-AKV (SEQ ID NO: 84880):DKGVVTY (SEQ ID NO: 84969):KEVQV (SEQ ID NO: 84210):GMEEH (SEQ ID NO: 84196):EXGXR (SEQ ID NO: 84179), GSAGPXX (SEQ ID NO: 84420):SRVKM (SEQ ID NO: 84299):RSVK-AA¹⁷-AKV (SEQ ID NO: 84880):NDKQQII (SEQ ID NO: 84979):KEVQV (SEQ ID NO: 84210):GMEEH (SEQ ID NO: 84196):RXGXS (SEQ ID NO: 84291), AAPASXX (SEQ ID NO: 84401):SRVRL (SEQ ID NO: 84302):RSVK-AA¹⁷-AKV (SEQ ID NO: 84880):DAANNVV (SEQ ID NO: 84963):KEVQV (SEQ ID NO: 84210):DMEEH (SEQ ID NO: 84152):AXGXR (SEQ ID NO: 84148), STPPTXX (SEQ ID NO: 84431):SRVRL (SEQ ID NO: 84302):RSVK-AA¹⁷-AKV (SEQ ID NO: 84880):DSANNVV (SEQ ID NO: 84971):KEVQV (SEQ ID NO: 84210):DMEEH (SEQ ID NO: 84152):SXGXR (SEQ ID NO: 84305), HVPKPXX (SEQ ID NO: 84421):SRVKL (SEQ ID NO: 84298):RSVK-AA¹⁷-AKV (SEQ ID NO: 84880):DDSSNVI (SEQ ID NO: 84965):KEVQV (SEQ ID NO: 84210):NMEEH (SEQ ID NO: 84264):SXGXH (SEQ ID NO: 84304), RVPSTXX (SEQ ID NO: 84428):SRVKT (SEQ ID NO: 84300):RSVK-AA¹⁷-AKV (SEQ ID NO: 84880):DNGRVLL (SEQ ID NO: 84970):KEVQV (SEQ ID NO: 84210):MIEEH (SEQ ID NO: 84236):XGXL (SEQ ID NO: 84122), ASAAPXX (SEQ ID NO: 84402):SRVAL (SEQ ID NO: 84292):RSVK-AA¹⁷-AKV (SEQ ID NO: 84880):VGRKPKV (SEQ ID NO: 84981):KEVQV (SEQ ID NO: 84210):MIEEH (SEQ ID NO: 84236):XKXS (SEQ ID NO: 84124), ASASPXX (SEQ ID NO: 84403):SRVDL (SEQ ID NO: 84293):RSVK-AA¹⁷-AKV (SEQ ID NO: 84880):IGKTPKI (SEQ ID NO: 84978):KEVQV (SEQ ID NO: 84210):MIEEH (SEQ ID NO: 84236):XKXS (SEQ ID NO: 84124), ASASPXX (SEQ ID NO: 84403):SRVDL (SEQ ID NO: 84293):RSVK-AA¹⁷-AKV (SEQ ID NO: 84880):VGRTPKV (SEQ ID NO: 84982):KEVQV (SEQ ID NO: 84210):MVEEH (SEQ ID NO: 84250):XKXS (SEQ ID NO: 84124), NDEGLEX (SEQ ID NO: 84426):SRVEE (SEQ ID NO: 84294):RSVK-AA¹⁷-AKV (SEQ ID NO: 84880):RIKPHQGQH (SEQ ID NO: 84980):KEVQV (SEQ ID NO: 84210):FLEEH (SEQ ID NO: 84182):KXEXR (SEQ ID NO: 84213), NDEGLEX (SEQ ID NO: 84426):SRVGQ (SEQ ID NO: 84296):RSVK-AA¹⁷-AKV (SEQ ID NO: 84880):RIKPHQGQH (SEQ ID NO: 84980):KEVQV (SEQ ID NO: 84210):LEEEH (SEQ ID NO: 84216):QXEXR (SEQ ID NO: 84276), RNVQXRP (SEQ ID NO: 84427):SRVQL (SEQ ID NO: 84301):RSVK-AA¹⁷-AKV (SEQ ID NO: 84880):EIVRKKPIF (SEQ ID NO: 84973):KEVQV (SEQ ID NO: 84210):TLEEH (SEQ ID NO: 84308):LAXKXE (SEQ ID NO: 84399), KIPKAXX (SEQ ID NO: 84424):VPTEL (SEQ ID NO: 84378):RSVK-AA¹⁷-AKV (SEQ ID NO: 84880):DENEKVV (SEQ ID NO: 84966):KEVQV (SEQ ID NO: 84210):DMVVE (SEQ ID NO: 84161):GXGXR (SEQ ID NO: 84208), GIPEPXX (SEQ ID NO: 84419):VPEKM (SEQ ID NO: 84360):RSVK-AA¹⁷-AKV (SEQ ID NO: 84880):DENKNVV (SEQ ID NO: 84967):KEVQV (SEQ ID NO: 84210):NMTVE (SEQ ID NO: 84267):SXAXR (SEQ ID NO: 84303), SIPKAXX (SEQ ID NO: 84429):VPTEL (SEQ ID NO: 84378):RSVK-AA¹⁷-AKV (SEQ ID NO: 84880):DEYDKVV (SEQ ID NO: 84968):KEVQV (SEQ ID NO: 84210):EMVVE (SEQ ID NO: 84175):GXGXR (SEQ ID NO: 84208), HVTKPTX (SEQ ID NO: 84422):APTKL (SEQ ID NO: 84131):RSVK-AA¹⁷-AKV (SEQ ID NO: 84880):DDSSNVI (SEQ ID NO: 84965):KEVQV (SEQ ID NO: 84210):NMVVR (SEQ ID NO: 84275):SXGXH (SEQ ID NO: 84304), YVPKPXX (SEQ ID NO: 84433):APTKL (SEQ ID NO: 84131):RSVK-AA¹⁷-AKV (SEQ ID NO: 84880):DDSSNVI (SEQ ID NO: 84965):KEVQV (SEQ ID NO: 84210):NMVVR (SEQ ID NO: 84275):SXGXH (SEQ ID NO: 84304), TVPKPXX (SEQ ID NO: 84432):APTQL (SEQ ID NO: 84134):RSVK-AA¹⁷-AKV (SEQ ID NO: 84880):DDSSNVI (SEQ ID NO: 84965):KEVQV (SEQ ID NO: 84210):NMVVR (SEQ ID NO: 84275):AXGXH (SEQ ID NO: 84147), AVPKAXX (SEQ ID NO: 84404):APTKL (SEQ ID NO: 84131):RSVK-AA¹⁷-AKV (SEQ ID NO: 84880):DSSNNVI (SEQ ID NO: 84972):KEVQV (SEQ ID NO: 84210):NMVVK (SEQ ID NO: 84274):AXGXH (SEQ ID NO: 84147), KVGKAXX (SEQ ID NO: 84425):VPTKL (SEQ ID NO: 84381):RSVK-AA¹⁷-AKV (SEQ ID NO: 84880):DDMGVPT (SEQ ID NO: 84964):KEVQV (SEQ ID NO: 84210):EGMSVAE (SEQ ID NO: 84411):XGXR (SEQ ID NO: 84123), KASKAXX (SEQ ID NO: 84423):VPTKL (SEQ ID NO: 84381):RSVK-AA¹⁷-AKV (SEQ ID NO: 84880):DKGVVTY (SEQ ID NO: 84969):KEVQV (SEQ ID NO: 84210):GMAVS (SEQ ID NO: 84194):EXGXR (SEQ ID NO: 84179), GSAGPXX (SEQ ID NO: 84420):TPTKM (SEQ ID NO: 84327):RSVK-AA¹⁷-AKV (SEQ ID NO: 84880):NDKQQII (SEQ ID NO: 84979):KEVQV (SEQ ID NO: 84210):GMVVD (SEQ ID NO: 84204):RXGXS (SEQ ID NO: 84291), AAPASXX (SEQ ID NO: 84401):VPARL (SEQ ID NO: 84352):RSVK-AA¹⁷-AKV (SEQ ID NO: 84880):DAANNVV (SEQ ID NO: 84963):KEVQV (SEQ ID NO: 84210):DMVVE (SEQ ID NO: 84161):AXGXR (SEQ ID NO: 84148), STPPTXX (SEQ ID NO: 84431):VPTRL (SEQ ID NO: 84385):RSVK-AA¹⁷-AKV (SEQ ID NO: 84880):DSANNVV (SEQ ID NO: 84971):KEVQV (SEQ ID NO: 84210):DMVVE (SEQ ID NO: 84161):SXGXR (SEQ ID NO: 84305), HVPKPXX (SEQ ID NO: 84421):APTKL (SEQ ID NO: 84131):RSVK-AA¹⁷-AKV (SEQ ID NO: 84880):DDSSNVI (SEQ ID NO: 84965):KEVQV (SEQ ID NO: 84210):NMVVR (SEQ ID NO: 84275):SXGXH (SEQ ID NO: 84304), RVPSTXX (SEQ ID NO: 84428):APVKT (SEQ ID NO: 84144):RSVK-AA¹⁷-AKV (SEQ ID NO: 84880):DNGRVLL (SEQ ID NO: 84970):KEVQV (SEQ ID NO: 84210):MIVEE (SEQ ID NO: 84241):XGXL (SEQ ID NO: 84122), ASAAPXX (SEQ ID NO: 84402):VPQAL (SEQ ID NO: 84364):RSVK-AA¹⁷-AKV (SEQ ID NO: 84880):VGRKPKV (SEQ ID NO: 84981):KEVQV (SEQ ID NO: 84210):MIVRS (SEQ ID NO: 84243):XKXS (SEQ ID NO: 84124), ASASPXX (SEQ ID NO: 84403):VSQDL (SEQ ID NO: 84387):RSVK-AA¹⁷-AKV (SEQ ID NO: 84880):IGKTPKI (SEQ ID NO: 84978):KEVQV (SEQ ID NO: 84210):MIVKS (SEQ ID NO: 84242):XKXS (SEQ ID NO: 84124), ASASPXX (SEQ ID NO: 84403):VPQDL (SEQ ID NO: 84365):RSVK-AA¹⁷-AKV (SEQ ID NO: 84880):VGRTPKV (SEQ ID NO: 84982):KEVQV (SEQ ID NO: 84210):MVVKS (SEQ ID NO: 84256):XKXS (SEQ ID NO: 84124), NDEGLEX (SEQ ID NO: 84426):VPTEE (SEQ ID NO: 84377):RSVK-AA¹⁷-AKV (SEQ ID NO: 84880):RIKPHQGQH (SEQ ID NO: 84980):KEVQV (SEQ ID NO: 84210):FLQHN (SEQ ID NO: 84184):KXEXR (SEQ ID NO: 84213), NDEGLEX (SEQ ID NO: 84426):VPTGQ (SEQ ID NO: 84379):RSVK-AA¹⁷-AKV (SEQ ID NO: 84880):RIKPHQGQH (SEQ ID NO: 84980):KEVQV (SEQ ID NO: 84210):LEEHS (SEQ ID NO: 84217):QXEXR (SEQ ID NO: 84276), RNVQXRP (SEQ ID NO: 84427):TQVQL (SEQ ID NO: 84340):RSVK-AA¹⁷-AKV (SEQ ID NO: 84880):EIVRKKPIF (SEQ ID NO: 84973):KEVQV (SEQ ID NO: 84210):TLEDH (SEQ ID NO: 84307):LAXKXE (SEQ ID NO: 84399), KIPKAXX (SEQ ID NO: 84424):TQVEL (SEQ ID NO: 84334):RPVQ-AA¹⁷-RKI (SEQ ID NO: 84879):DENEKVV (SEQ ID NO: 84966):KKATV (SEQ ID NO: 84212):DMEDH (SEQ ID NO: 84151):GXGXR (SEQ ID NO: 84208), GIPEPXX (SEQ ID NO: 84419):TQVKM (SEQ ID NO: 84338):RPVQ-AA¹⁷-RKI (SEQ ID NO: 84879):DENKNVV (SEQ ID NO: 84967):KKATV (SEQ ID NO: 84212):NMEDH (SEQ ID NO: 84263):SXAXR (SEQ ID NO: 84303), SIPKAXX (SEQ ID NO: 84429):TQVEL (SEQ ID NO: 84334):RPVQ-AA¹⁷-RKI (SEQ ID NO: 84879):DEYDKVV (SEQ ID NO: 84968):KKATV (SEQ ID NO: 84212):EMEDH (SEQ ID NO: 84165):GXGXR (SEQ ID NO: 84208), HVTKPTX (SEQ ID NO: 84422):TQVKL (SEQ ID NO: 84337):RPVQ-AA¹⁷-RKI (SEQ ID NO: 84879):DDSSNVI (SEQ ID NO: 84965):KKATV (SEQ ID NO: 84212):NMEDH (SEQ ID NO: 84263):SXGXH (SEQ ID NO: 84304), YVPKPXX (SEQ ID NO: 84433):TQVKL (SEQ ID NO: 84337):RPVQ-AA¹⁷-RKI (SEQ ID NO: 84879):DDSSNVI (SEQ ID NO: 84965):KKATV (SEQ ID NO: 84212):NMEDH (SEQ ID NO: 84263):SXGXH (SEQ ID NO: 84304), TVPKPXX (SEQ ID NO: 84432):TQVQL (SEQ ID NO: 84340):RPVQ-AA¹⁷-RKI (SEQ ID NO: 84879):DDSSNVI (SEQ ID NO: 84965):KKATV (SEQ ID NO: 84212):NMEDH (SEQ ID NO: 84263):AXGXH (SEQ ID NO: 84147), AVPKAXX (SEQ ID NO: 84404):TQVKL (SEQ ID NO: 84337):RPVQ-AA¹⁷-RKI (SEQ ID NO: 84879):DSSNNVI (SEQ ID NO: 84972):KKATV (SEQ ID NO: 84212):NMEDH (SEQ ID NO: 84263):AXGXH (SEQ ID NO: 84147), KVGKAXX (SEQ ID NO: 84425):TQVKL (SEQ ID NO: 84337):RPVQ-AA¹⁷-RKI (SEQ ID NO: 84879):DDMGVPT (SEQ ID NO: 84964):KKATV (SEQ ID NO: 84212):EGMSEDH (SEQ ID NO: 84406):XGXR (SEQ ID NO: 84123), KASKAXX (SEQ ID NO: 84423):TQVKL (SEQ ID NO: 84337):RPVQ-AA¹⁷-RKI (SEQ ID NO: 84879):DKGVVTY (SEQ ID NO: 84969):KKATV (SEQ ID NO: 84212):GMEDH (SEQ ID NO: 84195):EXGXR (SEQ ID NO: 84179), GSAGPXX (SEQ ID NO: 84420):TQVKM (SEQ ID NO: 84338):RPVQ-AA¹⁷-RKI (SEQ ID NO: 84879):NDKQQII (SEQ ID NO: 84979):KKATV (SEQ ID NO: 84212):GMEDH (SEQ ID NO: 84195):RXGXS (SEQ ID NO: 84291), AAPASXX (SEQ ID NO: 84401):TQVRL (SEQ ID NO: 84341):RPVQ-AA¹⁷-RKI (SEQ ID NO: 84879):DAANNVV (SEQ ID NO: 84963):KKATV (SEQ ID NO: 84212):DMEDH (SEQ ID NO: 84151):AXGXR (SEQ ID NO: 84148), STPPTXX (SEQ ID NO: 84431):TQVRL (SEQ ID NO: 84341):RPVQ-AA¹⁷-RKI (SEQ ID NO: 84879):DSANNVV (SEQ ID NO: 84971):KKATV (SEQ ID NO: 84212):DMEDH (SEQ ID NO: 84151):SXGXR (SEQ ID NO: 84305), HVPKPXX (SEQ ID NO: 84421):TQVKL (SEQ ID NO: 84337):RPVQ-AA¹⁷-RKI (SEQ ID NO: 84879):DDSSNVI (SEQ ID NO: 84965):KKATV (SEQ ID NO: 84212):NMEDH (SEQ ID NO: 84263):SXGXH (SEQ ID NO: 84304), RVPSTXX (SEQ ID NO: 84428):TQVKT (SEQ ID NO: 84339):RPVQ-AA¹⁷-RKI (SEQ ID NO: 84879):DNGRVLL (SEQ ID NO: 84970):KKATV (SEQ ID NO: 84212):MIEDH (SEQ ID NO: 84235):XGXL (SEQ ID NO: 84122), ASAAPXX (SEQ ID NO: 84402):TQVAL (SEQ ID NO: 84331):RPVQ-AA¹⁷-RKI (SEQ ID NO: 84879):VGRKPKV (SEQ ID NO: 84981):KKATV (SEQ ID NO: 84212):MIEDH (SEQ ID NO: 84235):XKXS (SEQ ID NO: 84124), ASASPXX (SEQ ID NO: 84403):TQVDL (SEQ ID NO: 84332):RPVQ-AA¹⁷-RKI (SEQ ID NO: 84879):IGKTPKI (SEQ ID NO: 84978):KKATV (SEQ ID NO: 84212):MIEDH (SEQ ID NO: 84235):XKXS (SEQ ID NO: 84124), ASASPXX (SEQ ID NO: 84403):TQVDL (SEQ ID NO: 84332):RPVQ-AA¹⁷-RKI (SEQ ID NO: 84879):VGRTPKV (SEQ ID NO: 84982):KKATV (SEQ ID NO: 84212):MVEDH (SEQ ID NO: 84249):XKXS (SEQ ID NO: 84124), NDEGLEX (SEQ ID NO: 84426):TQVEE (SEQ ID NO: 84333):RPVQ-AA¹⁷-RKI (SEQ ID NO: 84879):RIKPHQGQH (SEQ ID NO: 84980):KKATV (SEQ ID NO: 84212):FLEDH (SEQ ID NO: 84181):KXEXR (SEQ ID NO: 84213), NDEGLEX (SEQ ID NO: 84426):TQVGQ (SEQ ID NO: 84335):RPVQ-AA¹⁷-RKI (SEQ ID NO: 84879):RIKPHQGQH (SEQ ID NO: 84980):KKATV (SEQ ID NO: 84212):LEEDH (SEQ ID NO: 84215):QXEXR (SEQ ID NO: 84276), SSVKXQP (SEQ ID NO: 84430):TQVHH (SEQ ID NO: 84336):RPVQ-AA¹⁷-RKI (SEQ ID NO: 84879):EYVRKKPKL (SEQ ID NO: 84974):KKATV (SEQ ID NO: 84212):RLEDH (SEQ ID NO: 84278):LEXAXA (SEQ ID NO: 84400), KIPKAXX (SEQ ID NO: 84424):VPTEL (SEQ ID NO: 84378):RPVQ-AA¹⁷-RKI (SEQ ID NO: 84879):DENEKVV (SEQ ID NO: 84966):KKATV (SEQ ID NO: 84212):DMVVE (SEQ ID NO: 84161):GXGXR (SEQ ID NO: 84208), GIPEPXX (SEQ ID NO: 84419):VPEKM (SEQ ID NO: 84360):RPVQ-AA¹⁷-RKI (SEQ ID NO: 84879):DENKNVV (SEQ ID NO: 84967):KKATV (SEQ ID NO: 84212):NMTVE (SEQ ID NO: 84267):SXAXR (SEQ ID NO: 84303), SIPKAXX (SEQ ID NO: 84429):VPTEL (SEQ ID NO: 84378):RPVQ-AA¹⁷-RKI (SEQ ID NO: 84879):DEYDKVV (SEQ ID NO: 84968):KKATV (SEQ ID NO: 84212):EMVVE (SEQ ID NO: 84175):GXGXR (SEQ ID NO: 84208), HVTKPTX (SEQ ID NO: 84422):APTKL (SEQ ID NO: 84131):RPVQ-AA¹⁷-RKI (SEQ ID NO: 84879):DDSSNVI (SEQ ID NO: 84965):KKATV (SEQ ID NO: 84212):NMVVR (SEQ ID NO: 84275):SXGXH (SEQ ID NO: 84304), YVPKPXX (SEQ ID NO: 84433):APTKL (SEQ ID NO: 84131):RPVQ-AA¹⁷-RKI (SEQ ID NO: 84879):DDSSNVI (SEQ ID NO: 84965):KKATV (SEQ ID NO: 84212):NMVVR (SEQ ID NO: 84275):SXGXH (SEQ ID NO: 84304), TVPKPXX (SEQ ID NO: 84432):APTQL (SEQ ID NO: 84134):RPVQ-AA¹⁷-RKI (SEQ ID NO: 84879):DDSSNVI (SEQ ID NO: 84965):KKATV (SEQ ID NO: 84212):NMVVR (SEQ ID NO: 84275):AXGXH (SEQ ID NO: 84147), AVPKAXX (SEQ ID NO: 84404):APTKL (SEQ ID NO: 84131):RPVQ-AA¹⁷-RKI (SEQ ID NO: 84879):DSSNNVI (SEQ ID NO: 84972):KKATV (SEQ ID NO: 84212):NMVVK (SEQ ID NO: 84274):AXGXH (SEQ ID NO: 84147), KVGKAXX (SEQ ID NO: 84425):VPTKL (SEQ ID NO: 84381):RPVQ-AA¹⁷-RKI (SEQ ID NO: 84879):DDMGVPT (SEQ ID NO: 84964):KKATV (SEQ ID NO: 84212):EGMSVAE (SEQ ID NO: 84411):XGXR (SEQ ID NO: 84123), KASKAXX (SEQ ID NO: 84423):VPTKL (SEQ ID NO: 84381):RPVQ-AA¹⁷-RKI (SEQ ID NO: 84879):DKGVVTY (SEQ ID NO: 84969):KKATV (SEQ ID NO: 84212):GMAVS (SEQ ID NO: 84194):EXGXR (SEQ ID NO: 84179), GSAGPXX (SEQ ID NO: 84420):TPTKM (SEQ ID NO: 84327):RPVQ-AA¹⁷-RKI (SEQ ID NO: 84879):NDKQQII (SEQ ID NO: 84979):KKATV (SEQ ID NO: 84212):GMVVD (SEQ ID NO: 84204):RXGXS (SEQ ID NO: 84291), AAPASXX (SEQ ID NO: 84401):VPARL (SEQ ID NO: 84352):RPVQ-AA¹⁷-RKI (SEQ ID NO: 84879):DAANNVV (SEQ ID NO: 84963):KKATV (SEQ ID NO: 84212):DMVVE (SEQ ID NO: 84161):AXGXR (SEQ ID NO: 84148), STPPTXX (SEQ ID NO: 84431):VPTRL (SEQ ID NO: 84385):RPVQ-AA¹⁷-RKI (SEQ ID NO: 84879):DSANNVV (SEQ ID NO: 84971):KKATV (SEQ ID NO: 84212):DMVVE (SEQ ID NO: 84161):SXGXR (SEQ ID NO: 84305), HVPKPXX (SEQ ID NO: 84421):APTKL (SEQ ID NO: 84131):RPVQ-AA¹⁷-RKI (SEQ ID NO: 84879):DDSSNVI (SEQ ID NO: 84965):KKATV (SEQ ID NO: 84212):NMVVR (SEQ ID NO: 84275):SXGXH (SEQ ID NO: 84304), RVPSTXX (SEQ ID NO: 84428):APVKT (SEQ ID NO: 84144):RPVQ-AA¹⁷-RKI (SEQ ID NO: 84879):DNGRVLL (SEQ ID NO: 84970):KKATV (SEQ ID NO: 84212):MIVEE (SEQ ID NO: 84241):XGXL (SEQ ID NO: 84122), ASAAPXX (SEQ ID NO: 84402):VPQAL (SEQ ID NO: 84364):RPVQ-AA¹⁷-RKI (SEQ ID NO: 84879):VGRKPKV (SEQ ID NO: 84981):KKATV (SEQ ID NO: 84212):MIVRS (SEQ ID NO: 84243):XKXS (SEQ ID NO: 84124), ASASPXX (SEQ ID NO: 84403):VSQDL (SEQ ID NO: 84387):RPVQ-AA¹⁷-RKI (SEQ ID NO: 84879):IGKTPKI (SEQ ID NO: 84978):KKATV (SEQ ID NO: 84212):MIVKS (SEQ ID NO: 84242):XKXS (SEQ ID NO: 84124), ASASPXX (SEQ ID NO: 84403):VPQDL (SEQ ID NO: 84365):RPVQ-AA¹⁷-RKI (SEQ ID NO: 84879):VGRTPKV (SEQ ID NO: 84982):KKATV (SEQ ID NO: 84212):MVVKS (SEQ ID NO: 84256):XKXS (SEQ ID NO: 84124), NDEGLEX (SEQ ID NO: 84426):VPTEE (SEQ ID NO: 84377):RPVQ-AA¹⁷-RKI (SEQ ID NO: 84879):RIKPHQGQH (SEQ ID NO: 84980):KKATV (SEQ ID NO: 84212):FLQHN (SEQ ID NO: 84184):KXEXR (SEQ ID NO: 84213), NDEGLEX (SEQ ID NO: 84426):VPTGQ (SEQ ID NO: 84379):RPVQ-AA¹⁷-RKI (SEQ ID NO: 84879):RIKPHQGQH (SEQ ID NO: 84980):KKATV (SEQ ID NO: 84212):LEEHS (SEQ ID NO: 84217):QXEXR (SEQ ID NO: 84276) and SSVKXQP (SEQ ID NO: 84430):SRVHH (SEQ ID NO: 84297):RPVQ-AA¹⁷-RKI (SEQ ID NO: 84879):EYVRKKPKL (SEQ ID NO: 84974):KKATV (SEQ ID NO: 84212):RLEEH (SEQ ID NO: 84279):LEXAXA (SEQ ID NO: 84400); and wherein AA¹⁷ is selected from the group consisting of G, A, V, L, I, P, F, M, W, T and S (in particular is selected from the group consisting of M, I, L, V and T). More particularly, the heptuplet PEP7:PEP5:PEP12:LINKER:PEP2:PEP6:PEP8 is selected from the group consisting of GIPEPXX (SEQ ID NO: 84419):VPTKM (SEQ ID NO: 84382):SAIS-AA¹⁷-LYL (SEQ ID NO: 84881):DENKNVV (SEQ ID NO: 84967):LKNYQ (SEQ ID NO: 84230):NMVVE (SEQ ID NO: 84273):SXAXR (SEQ ID NO: 84303), HVTKPTX (SEQ ID NO: 84422):VPTKL (SEQ ID NO: 84381):SAIS-AA¹⁷-LYL (SEQ ID NO: 84881):DDSSNVI (SEQ ID NO: 84965):LKNYQ (SEQ ID NO: 84230):NMVVE (SEQ ID NO: 84273):SXGXH (SEQ ID NO: 84304), YVPKPXX (SEQ ID NO: 84433):VPTKL (SEQ ID NO: 84381):SAIS-AA¹⁷-LYL (SEQ ID NO: 84881):DDSSNVI (SEQ ID NO: 84965):LKNYQ (SEQ ID NO: 84230):NMVVE (SEQ ID NO: 84273):SXGXH (SEQ ID NO: 84304), TVPKPXX (SEQ ID NO: 84432):VPTQL (SEQ ID NO: 84384):SAIS-AA¹⁷-LYL (SEQ ID NO: 84881):DDSSNVI (SEQ ID NO: 84965):LKNYQ (SEQ ID NO: 84230):NMVVE (SEQ ID NO: 84273):AXGXH (SEQ ID NO: 84147), AVPKAXX (SEQ ID NO: 84404):VPTKL (SEQ ID NO: 84381):SAIS-AA¹⁷-LYL (SEQ ID NO: 84881):DSSNNVI (SEQ ID NO: 84972):LKNYQ (SEQ ID NO: 84230):NMVVE (SEQ ID NO: 84273):AXGXH (SEQ ID NO: 84147), KVGKAXX (SEQ ID NO: 84425):VPTKL (SEQ ID NO: 84381):SAIS-AA¹⁷-LYL (SEQ ID NO: 84881):DDMGVPT (SEQ ID NO: 84964):LKNYQ (SEQ ID NO: 84230):EGMSVVE (SEQ ID NO: 84416):XGXR (SEQ ID NO: 84123), KASKAXX (SEQ ID NO: 84423):VPTKL (SEQ ID NO: 84381):SAIS-AA¹⁷-LYL (SEQ ID NO: 84881):DKGVVTY (SEQ ID NO: 84969):LKNYQ (SEQ ID NO: 84230):GMVVE (SEQ ID NO: 84205):EXGXR (SEQ ID NO: 84179), GSAGPXX (SEQ ID NO: 84420):VPTKM (SEQ ID NO: 84382):SAIS-AA¹⁷-LYL (SEQ ID NO: 84881):NDKQQII (SEQ ID NO: 84979):LKNYQ (SEQ ID NO: 84230):GMVVE (SEQ ID NO: 84205):RXGXS (SEQ ID NO: 84291), AAPASXX (SEQ ID NO: 84401):VPTRL (SEQ ID NO: 84385):SAIS-AA¹⁷-LYL (SEQ ID NO: 84881):DAANNVV (SEQ ID NO: 84963):LKNYQ (SEQ ID NO: 84230):DMVVE (SEQ ID NO: 84161):AXGXR (SEQ ID NO: 84148), STPPTXX (SEQ ID NO: 84431):VPTRL (SEQ ID NO: 84385):SAIS-AA¹⁷-LYL (SEQ ID NO: 84881):DSANNVV (SEQ ID NO: 84971):LKNYQ (SEQ ID NO: 84230):DMVVE (SEQ ID NO: 84161):SXGXR (SEQ ID NO: 84305), HVPKPXX (SEQ ID NO: 84421):VPTKL (SEQ ID NO: 84381):SAIS-AA¹⁷-LYL (SEQ ID NO: 84881):DDSSNVI (SEQ ID NO: 84965):LKNYQ (SEQ ID NO: 84230):NMVVE (SEQ ID NO: 84273):SXGXH (SEQ ID NO: 84304), RVPSTXX (SEQ ID NO: 84428):VPTKT (SEQ ID NO: 84383):SAIS-AA¹⁷-LYL (SEQ ID NO: 84881):DNGRVLL (SEQ ID NO: 84970):LKNYQ (SEQ ID NO: 84230):MIVVE (SEQ ID NO: 84245):XGXL (SEQ ID NO: 84122), ASAAPXX (SEQ ID NO: 84402):VPTAL (SEQ ID NO: 84375):SAIS-AA¹⁷-LYL (SEQ ID NO: 84881):VGRKPKV (SEQ ID NO: 84981):LKNYQ (SEQ ID NO: 84230):MIVVE (SEQ ID NO: 84245):XKXS (SEQ ID NO: 84124), ASASPXX (SEQ ID NO: 84403):VPTDL (SEQ ID NO: 84376):SAIS-AA¹⁷-LYL (SEQ ID NO: 84881):IGKTPKI (SEQ ID NO: 84978):LKNYQ (SEQ ID NO: 84230):MIVVE (SEQ ID NO: 84245):XKXS (SEQ ID NO: 84124), ASASPXX (SEQ ID NO: 84403):VPTDL (SEQ ID NO: 84376):SAIS-AA¹⁷-LYL (SEQ ID NO: 84881):VGRTPKV (SEQ ID NO: 84982):LKNYQ (SEQ ID NO: 84230):MVVVE (SEQ ID NO: 84259):XKXS (SEQ ID NO: 84124), GIPEPXX (SEQ ID NO: 84419):VPEKM (SEQ ID NO: 84360):SAIS-AA¹⁷-LYL (SEQ ID NO: 84881):DENKNVV (SEQ ID NO: 84967):LKNYQ (SEQ ID NO: 84230):NMTVE (SEQ ID NO: 84267):SXAXR (SEQ ID NO: 84303), HVTKPTX (SEQ ID NO: 84422):APTKL (SEQ ID NO: 84131):SAIS-AA¹⁷-LYL (SEQ ID NO: 84881):DDSSNVI (SEQ ID NO: 84965):LKNYQ (SEQ ID NO: 84230):NMVVR (SEQ ID NO: 84275):SXGXH (SEQ ID NO: 84304), YVPKPXX (SEQ ID NO: 84433):APTKL (SEQ ID NO: 84131):SAIS-AA¹⁷-LYL (SEQ ID NO: 84881):DDSSNVI (SEQ ID NO: 84965):LKNYQ (SEQ ID NO: 84230):NMVVR (SEQ ID NO: 84275):SXGXH (SEQ ID NO: 84304), TVPKPXX (SEQ ID NO: 84432):APTQL (SEQ ID NO: 84134):SAIS-AA¹⁷-LYL (SEQ ID NO: 84881):DDSSNVI (SEQ ID NO: 84965):LKNYQ (SEQ ID NO: 84230):NMVVR (SEQ ID NO: 84275):AXGXH (SEQ ID NO: 84147), AVPKAXX (SEQ ID NO: 84404):APTKL (SEQ ID NO: 84131):SAIS-AA¹⁷-LYL (SEQ ID NO: 84881):DSSNNVI (SEQ ID NO: 84972):LKNYQ (SEQ ID NO: 84230):NMVVK (SEQ ID NO: 84274):AXGXH (SEQ ID NO: 84147), KVGKAXX (SEQ ID NO: 84425):VPTKL (SEQ ID NO: 84381):SAIS-AA¹⁷-LYL (SEQ ID NO: 84881):DDMGVPT (SEQ ID NO: 84964):LKNYQ (SEQ ID NO: 84230):EGMSVAE (SEQ ID NO: 84411):XGXR (SEQ ID NO: 84123), KASKAXX (SEQ ID NO: 84423):VPTKL (SEQ ID NO: 84381):SAIS-AA¹⁷-LYL (SEQ ID NO: 84881):DKGVVTY (SEQ ID NO: 84969):LKNYQ (SEQ ID NO: 84230):GMAVS (SEQ ID NO: 84194):EXGXR (SEQ ID NO: 84179), GSAGPXX (SEQ ID NO: 84420):TPTKM (SEQ ID NO: 84327):SAIS-AA¹⁷-LYL (SEQ ID NO: 84881):NDKQQII (SEQ ID NO: 84979):LKNYQ (SEQ ID NO: 84230):GMVVD (SEQ ID NO: 84204):RXGXS (SEQ ID NO: 84291), AAPASXX (SEQ ID NO: 84401):VPARL (SEQ ID NO: 84352):SAIS-AA¹⁷-LYL (SEQ ID NO: 84881):DAANNVV (SEQ ID NO: 84963):LKNYQ (SEQ ID NO: 84230):DMVVE (SEQ ID NO: 84161):AXGXR (SEQ ID NO: 84148), HVPKPXX (SEQ ID NO: 84421):APTKL (SEQ ID NO: 84131):SAIS-AA¹⁷-LYL (SEQ ID NO: 84881):DDSSNVI (SEQ ID NO: 84965):LKNYQ (SEQ ID NO: 84230):NMVVR (SEQ ID NO: 84275):SXGXH (SEQ ID NO: 84304), RVPSTXX (SEQ ID NO: 84428):APVKT (SEQ ID NO: 84144):SAIS-AA¹⁷-LYL (SEQ ID NO: 84881):DNGRVLL (SEQ ID NO: 84970):LKNYQ (SEQ ID NO: 84230):MIVEE (SEQ ID NO: 84241):XGXL (SEQ ID NO: 84122), ASAAPXX (SEQ ID NO: 84402):VPQAL (SEQ ID NO: 84364):SAIS-AA¹⁷-LYL (SEQ ID NO: 84881):VGRKPKV (SEQ ID NO: 84981):LKNYQ (SEQ ID NO: 84230):MIVRS (SEQ ID NO: 84243):XKXS (SEQ ID NO: 84124), ASASPXX (SEQ ID NO: 84403):VSQDL (SEQ ID NO: 84387):SAIS-AA¹⁷-LYL (SEQ ID NO: 84881):IGKTPKI (SEQ ID NO: 84978):LKNYQ (SEQ ID NO: 84230):MIVKS (SEQ ID NO: 84242):XKXS (SEQ ID NO: 84124), ASASPXX (SEQ ID NO: 84403):VPQDL (SEQ ID NO: 84365):SAIS-AA¹⁷-LYL (SEQ ID NO: 84881):VGRTPKV (SEQ ID NO: 84982):LKNYQ (SEQ ID NO: 84230):MVVKS (SEQ ID NO: 84256):XKXS (SEQ ID NO: 84124), NDEGLEX (SEQ ID NO: 84426):VPTEE (SEQ ID NO: 84377):SAIS-AA¹⁷-LYL (SEQ ID NO: 84881):RIKPHQGQH (SEQ ID NO: 84980):LKNYQ (SEQ ID NO: 84230):FLQHN (SEQ ID NO: 84184):KXEXR (SEQ ID NO: 84213), NDEGLEX (SEQ ID NO: 84426):VPTGQ (SEQ ID NO: 84379):SAIS-AA¹⁷-LYL (SEQ ID NO: 84881):RIKPHQGQH (SEQ ID NO: 84980):LKNYQ (SEQ ID NO: 84230):LEEHS (SEQ ID NO: 84217):QXEXR (SEQ ID NO: 84276), SSVKXQP (SEQ ID NO: 84430):SRVHH (SEQ ID NO: 84297):SAIS-AA¹⁷-LYL (SEQ ID NO: 84881):EYVRKKPKL (SEQ ID NO: 84974):LKNYQ (SEQ ID NO: 84230):RLEEH (SEQ ID NO: 84279):LEXAXA (SEQ ID NO: 84400), RNVQXRP (SEQ ID NO: 84427):TQVQL (SEQ ID NO: 84340):SAIS-AA¹⁷-LYL (SEQ ID NO: 84881):EIVRKKPIF (SEQ ID NO: 84973):LKNYQ (SEQ ID NO: 84230):TLEDH (SEQ ID NO: 84307):LAXKXE (SEQ ID NO: 84399), KIPKAXX (SEQ ID NO: 84424):VPEEL (SEQ ID NO: 84356):SSLS-AA¹⁷-LFF (SEQ ID NO: 84889):DENEKVV (SEQ ID NO: 84966):LKVYP (SEQ ID NO: 84231):DMTVE (SEQ ID NO: 84155):GXGXR (SEQ ID NO: 84208), SIPKAXX (SEQ ID NO: 84429):VPEEL (SEQ ID NO: 84356):SSLS-AA¹⁷-LFF (SEQ ID NO: 84889):DEYDKVV (SEQ ID NO: 84968):LKVYP (SEQ ID NO: 84231):EMTVE (SEQ ID NO: 84169):GXGXR (SEQ ID NO: 84208), HVTKPTX (SEQ ID NO: 84422):VPEKL (SEQ ID NO: 84359):SSLS-AA¹⁷-LFF (SEQ ID NO: 84889):DDSSNVI (SEQ ID NO: 84965):LKVYP (SEQ ID NO: 84231):NMTVE (SEQ ID NO: 84267):SXGXH (SEQ ID NO: 84304), YVPKPXX (SEQ ID NO: 84433):VPEKL (SEQ ID NO: 84359):SSLS-AA¹⁷-LFF (SEQ ID NO: 84889):DDSSNVI (SEQ ID NO: 84965):LKVYP (SEQ ID NO: 84231):NMTVE (SEQ ID NO: 84267):SXGXH (SEQ ID NO: 84304), TVPKPXX (SEQ ID NO: 84432):VPEQL (SEQ ID NO: 84362):SSLS-AA¹⁷-LFF (SEQ ID NO: 84889):DDSSNVI (SEQ ID NO: 84965):LKVYP (SEQ ID NO: 84231):NMTVE (SEQ ID NO: 84267):AXGXH (SEQ ID NO: 84147), AVPKAXX (SEQ ID NO: 84404):VPEKL (SEQ ID NO: 84359):SSLS-AA¹⁷-LFF (SEQ ID NO: 84889):DSSNNVI (SEQ ID NO: 84972):LKVYP (SEQ ID NO: 84231):NMTVE (SEQ ID NO: 84267):AXGXH (SEQ ID NO: 84147), KVGKAXX (SEQ ID NO: 84425):VPEKL (SEQ ID NO: 84359):SSLS-AA¹⁷-LFF (SEQ ID NO: 84889):DDMGVPT (SEQ ID NO: 84964):LKVYP (SEQ ID NO: 84231):EGMSTVE (SEQ ID NO: 84410):XGXR (SEQ ID NO: 84123), KASKAXX (SEQ ID NO: 84423):VPEKL (SEQ ID NO: 84359):SSLS-AA¹⁷-LFF (SEQ ID NO: 84889):DKGVVTY (SEQ ID NO: 84969):LKVYP (SEQ ID NO: 84231):GMTVE (SEQ ID NO: 84199):EXGXR (SEQ ID NO: 84179), GSAGPXX (SEQ ID NO: 84420):VPEKM (SEQ ID NO: 84360):SSLS-AA¹⁷-LFF (SEQ ID NO: 84889):NDKQQII (SEQ ID NO: 84979):LKVYP (SEQ ID NO: 84231):GMTVE (SEQ ID NO: 84199):RXGXS (SEQ ID NO: 84291), AAPASXX (SEQ ID NO: 84401):VPERL (SEQ ID NO: 84363):SSLS-AA¹⁷-LFF (SEQ ID NO: 84889):DAANNVV (SEQ ID NO: 84963):LKVYP (SEQ ID NO: 84231):DMTVE (SEQ ID NO: 84155):AXGXR (SEQ ID NO: 84148), STPPTXX (SEQ ID NO: 84431):VPERL (SEQ ID NO: 84363):SSLS-AA¹⁷-LFF (SEQ ID NO: 84889):DSANNVV (SEQ ID NO: 84971):LKVYP (SEQ ID NO: 84231):DMTVE (SEQ ID NO: 84155):SXGXR (SEQ ID NO: 84305), HVPKPXX (SEQ ID NO: 84421):VPEKL (SEQ ID NO: 84359):SSLS-AA¹⁷-LFF (SEQ ID NO: 84889):DDSSNVI (SEQ ID NO: 84965):LKVYP (SEQ ID NO: 84231):NMTVE (SEQ ID NO: 84267):SXGXH (SEQ ID NO: 84304), RVPSTXX (SEQ ID NO: 84428):VPEKT (SEQ ID NO: 84361):SSLS-AA¹⁷-LFF (SEQ ID NO: 84889):DNGRVLL (SEQ ID NO: 84970):LKVYP (SEQ ID NO: 84231):MITVE (SEQ ID NO: 84239):XGXL (SEQ ID NO: 84122), ASAAPXX (SEQ ID NO: 84402):VPEAL (SEQ ID NO: 84353):SSLS-AA¹⁷-LFF (SEQ ID NO: 84889):VGRKPKV (SEQ ID NO: 84981):LKVYP (SEQ ID NO: 84231):MITVE (SEQ ID NO: 84239):XKXS (SEQ ID NO: 84124), ASASPXX (SEQ ID NO: 84403):VPEDL (SEQ ID NO: 84354):SSLS-AA¹⁷-LFF (SEQ ID NO: 84889):IGKTPKI (SEQ ID NO: 84978):LKVYP (SEQ ID NO: 84231):MITVE (SEQ ID NO: 84239):XKXS (SEQ ID NO: 84124), ASASPXX (SEQ ID NO: 84403):VPEDL (SEQ ID NO: 84354):SSLS-AA¹⁷-LFF (SEQ ID NO: 84889):VGRTPKV (SEQ ID NO: 84982):LKVYP (SEQ ID NO: 84231):MVTVE (SEQ ID NO: 84253):XKXS (SEQ ID NO: 84124), KIPKAXX (SEQ ID NO: 84424):VPTEL (SEQ ID NO: 84378):SSLS-AA¹⁷-LFF (SEQ ID NO: 84889):DENEKVV (SEQ ID NO: 84966):LKVYP (SEQ ID NO: 84231):DMVVE (SEQ ID NO: 84161):GXGXR (SEQ ID NO: 84208), SIPKAXX (SEQ ID NO: 84429):VPTEL (SEQ ID NO: 84378):SSLS-AA¹⁷-LFF (SEQ ID NO: 84889):DEYDKVV (SEQ ID NO: 84968):LKVYP (SEQ ID NO: 84231):EMVVE (SEQ ID NO: 84175):GXGXR (SEQ ID NO: 84208), HVTKPTX (SEQ ID NO: 84422):APTKL (SEQ ID NO: 84131):SSLS-AA¹⁷-LFF (SEQ ID NO: 84889):DDSSNVI (SEQ ID NO: 84965):LKVYP (SEQ ID NO: 84231):NMVVR (SEQ ID NO: 84275):SXGXH (SEQ ID NO: 84304), YVPKPXX (SEQ ID NO: 84433):APTKL (SEQ ID NO: 84131):SSLS-AA¹⁷-LFF (SEQ ID NO: 84889):DDSSNVI (SEQ ID NO: 84965):LKVYP (SEQ ID NO: 84231):NMVVR (SEQ ID NO: 84275):SXGXH (SEQ ID NO: 84304), TVPKPXX (SEQ ID NO: 84432):APTQL (SEQ ID NO: 84134):SSLS-AA¹⁷-LFF (SEQ ID NO: 84889):DDSSNVI (SEQ ID NO: 84965):LKVYP (SEQ ID NO: 84231):NMVVR (SEQ ID NO: 84275):AXGXH (SEQ ID NO: 84147), AVPKAXX (SEQ ID NO: 84404):APTKL (SEQ ID NO: 84131):SSLS-AA¹⁷-LFF (SEQ ID NO: 84889):DSSNNVI (SEQ ID NO: 84972):LKVYP (SEQ ID NO: 84231):NMVVK (SEQ ID NO: 84274):AXGXH (SEQ ID NO: 84147), KVGKAXX (SEQ ID NO: 84425):VPTKL (SEQ ID NO: 84381):SSLS-AA¹⁷-LFF (SEQ ID NO: 84889):DDMGVPT (SEQ ID NO: 84964):LKVYP (SEQ ID NO: 84231):EGMSVAE (SEQ ID NO: 84411):XGXR (SEQ ID NO: 84123), KASKAXX (SEQ ID NO: 84423):VPTKL (SEQ ID NO: 84381):SSLS-AA¹⁷-LFF (SEQ ID NO: 84889):DKGVVTY (SEQ ID NO: 84969):LKVYP (SEQ ID NO: 84231):GMAVS (SEQ ID NO: 84194):EXGXR (SEQ ID NO: 84179), GSAGPXX (SEQ ID NO: 84420):TPTKM (SEQ ID NO: 84327):SSLS-AA¹⁷-LFF (SEQ ID NO: 84889):NDKQQII (SEQ ID NO: 84979):LKVYP (SEQ ID NO: 84231):GMVVD (SEQ ID NO: 84204):RXGXS (SEQ ID NO: 84291), AAPASXX (SEQ ID NO: 84401):VPARL (SEQ ID NO: 84352):SSLS-AA¹⁷-LFF (SEQ ID NO: 84889):DAANNVV (SEQ ID NO: 84963):LKVYP (SEQ ID NO: 84231):DMVVE (SEQ ID NO: 84161):AXGXR (SEQ ID NO: 84148), STPPTXX (SEQ ID NO: 84431):VPTRL (SEQ ID NO: 84385):SSLS-AA¹⁷-LFF (SEQ ID NO: 84889):DSANNVV (SEQ ID NO: 84971):LKVYP (SEQ ID NO: 84231):DMVVE (SEQ ID NO: 84161):SXGXR (SEQ ID NO: 84305), HVPKPXX (SEQ ID NO: 84421):APTKL (SEQ ID NO: 84131):SSLS-AA¹⁷-LFF (SEQ ID NO: 84889):DDSSNVI (SEQ ID NO: 84965):LKVYP (SEQ ID NO: 84231):NMVVR (SEQ ID NO: 84275):SXGXH (SEQ ID NO: 84304), RVPSTXX (SEQ ID NO: 84428):APVKT (SEQ ID NO: 84144):SSLS-AA¹⁷-LFF (SEQ ID NO: 84889):DNGRVLL (SEQ ID NO: 84970):LKVYP (SEQ ID NO: 84231):MIVEE (SEQ ID NO: 84241):XGXL (SEQ ID NO: 84122), ASAAPXX (SEQ ID NO: 84402):VPQAL (SEQ ID NO: 84364):SSLS-AA¹⁷-LFF (SEQ ID NO: 84889):VGRKPKV (SEQ ID NO: 84981):LKVYP (SEQ ID NO: 84231):MIVRS (SEQ ID NO: 84243):XKXS (SEQ ID NO: 84124), ASASPXX (SEQ ID NO: 84403):VSQDL (SEQ ID NO: 84387):SSLS-AA¹⁷-LFF (SEQ ID NO: 84889):IGKTPKI (SEQ ID NO: 84978):LKVYP (SEQ ID NO: 84231):MIVKS (SEQ ID NO: 84242):XKXS (SEQ ID NO: 84124), ASASPXX (SEQ ID NO: 84403):VPQDL (SEQ ID NO: 84365):SSLS-AA¹⁷-LFF (SEQ ID NO: 84889):VGRTPKV (SEQ ID NO: 84982):LKVYP (SEQ ID NO: 84231):MVVKS (SEQ ID NO: 84256):XKXS (SEQ ID NO: 84124), NDEGLEX (SEQ ID NO: 84426):VPTEE (SEQ ID NO: 84377):SSLS-AA¹⁷-LFF (SEQ ID NO: 84889):RIKPHQGQH (SEQ ID NO: 84980):LKVYP (SEQ ID NO: 84231):FLQHN (SEQ ID NO: 84184):KXEXR (SEQ ID NO: 84213), NDEGLEX (SEQ ID NO: 84426):VPTGQ (SEQ ID NO: 84379):SSLS-AA¹⁷-LFF (SEQ ID NO: 84889):RIKPHQGQH (SEQ ID NO: 84980):LKVYP (SEQ ID NO: 84231):LEEHS (SEQ ID NO: 84217):QXEXR (SEQ ID NO: 84276), SSVKXQP (SEQ ID NO: 84430):SRVHH (SEQ ID NO: 84297):SSLS-AA¹⁷-LFF (SEQ ID NO: 84889):EYVRKKPKL (SEQ ID NO: 84974):LKVYP (SEQ ID NO: 84231):RLEEH (SEQ ID NO: 84279):LEXAXA (SEQ ID NO: 84400), RNVQXRP (SEQ ID NO: 84427):TQVQL (SEQ ID NO: 84340):SSLS-AA¹⁷-LFF (SEQ ID NO: 84889):EIVRKKPIF (SEQ ID NO: 84973):LKVYP (SEQ ID NO: 84231):TLEDH (SEQ ID NO: 84307):LAXKXE (SEQ ID NO: 84399), KIPKAXX (SEQ ID NO: 84424):APTEL (SEQ ID NO: 84128):NAIS-AA¹⁷-LYF (SEQ ID NO: 84878):DENEKVV (SEQ ID NO: 84966):LKKYR (SEQ ID NO: 84229):DMVVR (SEQ ID NO: 84163):GXGXR (SEQ ID NO: 84208), GIPEPXX (SEQ ID NO: 84419):APTKM (SEQ ID NO: 84132):NAIS-AA¹⁷-LYF (SEQ ID NO: 84878):DENKNVV (SEQ ID NO: 84967):LKKYR (SEQ ID NO: 84229):NMVVR (SEQ ID NO: 84275):SXAXR (SEQ ID NO: 84303), SIPKAXX (SEQ ID NO: 84429):APTEL (SEQ ID NO: 84128):NAIS-AA¹⁷-LYF (SEQ ID NO: 84878):DEYDKVV (SEQ ID NO: 84968):LKKYR (SEQ ID NO: 84229):EMVVR (SEQ ID NO: 84177):GXGXR (SEQ ID NO: 84208), AVPKAXX (SEQ ID NO: 84404):APTKL (SEQ ID NO: 84131):NAIS-AA¹⁷-LYF (SEQ ID NO: 84878):DSSNNVI (SEQ ID NO: 84972):LKKYR (SEQ ID NO: 84229):NMVVR (SEQ ID NO: 84275):AXGXH (SEQ ID NO: 84147), KVGKAXX (SEQ ID NO: 84425):APTKL (SEQ ID NO: 84131):NAIS-AA¹⁷-LYF (SEQ ID NO: 84878):DDMGVPT (SEQ ID NO: 84964):LKKYR (SEQ ID NO: 84229):EGMSVVR (SEQ ID NO: 84418):XGXR (SEQ ID NO: 84123), KASKAXX (SEQ ID NO: 84423):APTKL (SEQ ID NO: 84131):NAIS-AA¹⁷-LYF (SEQ ID NO: 84878):DKGVVTY (SEQ ID NO: 84969):LKKYR (SEQ ID NO: 84229):GMVVR (SEQ ID NO: 84207):EXGXR (SEQ ID NO: 84179), GSAGPXX (SEQ ID NO: 84420):APTKM (SEQ ID NO: 84132):NAIS-AA¹⁷-LYF (SEQ ID NO: 84878):NDKQQII (SEQ ID NO: 84979):LKKYR (SEQ ID NO: 84229):GMVVR (SEQ ID NO: 84207):RXGXS (SEQ ID NO: 84291), AAPASXX (SEQ ID NO: 84401):APTRL (SEQ ID NO: 84135):NAIS-AA¹⁷-LYF (SEQ ID NO: 84878):DAANNVV (SEQ ID NO: 84963):LKKYR (SEQ ID NO: 84229):DMVVR (SEQ ID NO: 84163):AXGXR (SEQ ID NO: 84148), STPPTXX (SEQ ID NO: 84431):APTRL (SEQ ID NO: 84135):NAIS-AA¹⁷-LYF (SEQ ID NO: 84878):DSANNVV (SEQ ID NO: 84971):LKKYR (SEQ ID NO: 84229):DMVVR (SEQ ID NO: 84163):SXGXR (SEQ ID NO: 84305), RVPSTXX (SEQ ID NO: 84428):APTKT (SEQ ID NO: 84133):NAIS-AA¹⁷-LYF (SEQ ID NO: 84878):DNGRVLL (SEQ ID NO: 84970):LKKYR (SEQ ID NO: 84229):MIVVR (SEQ ID NO: 84247):XGXL (SEQ ID NO: 84122), ASAAPXX (SEQ ID NO: 84402):APTAL (SEQ ID NO: 84125):NAIS-AA¹⁷-LYF (SEQ ID NO: 84878):VGRKPKV (SEQ ID NO: 84981):LKKYR (SEQ ID NO: 84229):MIVVR (SEQ ID NO: 84247):XKXS (SEQ ID NO: 84124), ASASPXX (SEQ ID NO: 84403):APTDL (SEQ ID NO: 84126):NAIS-AA¹⁷-LYF (SEQ ID NO: 84878):IGKTPKI (SEQ ID NO: 84978):LKKYR (SEQ ID NO: 84229):MIVVR (SEQ ID NO: 84247):XKXS (SEQ ID NO: 84124), ASASPXX (SEQ ID NO: 84403):APTDL (SEQ ID NO: 84126):NAIS-AA¹⁷-LYF (SEQ ID NO: 84878):VGRTPKV (SEQ ID NO: 84982):LKKYR (SEQ ID NO: 84229):MVVVR (SEQ ID NO: 84261):XKXS (SEQ ID NO: 84124), KIPKAXX (SEQ ID NO: 84424):VPTEL (SEQ ID NO: 84378):NAIS-AA¹⁷-LYF (SEQ ID NO: 84878):DENEKVV (SEQ ID NO: 84966):LKKYR (SEQ ID NO: 84229):DMVVE (SEQ ID NO: 84161):GXGXR (SEQ ID NO: 84208), GIPEPXX (SEQ ID NO: 84419):VPEKM (SEQ ID NO: 84360):NAIS-AA¹⁷-LYF (SEQ ID NO: 84878):DENKNVV (SEQ ID NO: 84967):LKKYR (SEQ ID NO: 84229):NMTVE (SEQ ID NO: 84267):SXAXR (SEQ ID NO: 84303), SIPKAXX (SEQ ID NO: 84429):VPTEL (SEQ ID NO: 84378):NAIS-AA¹⁷-LYF (SEQ ID NO: 84878):DEYDKVV (SEQ ID NO: 84968):LKKYR (SEQ ID NO: 84229):EMVVE (SEQ ID NO: 84175):GXGXR (SEQ ID NO: 84208), AVPKAXX (SEQ ID NO: 84404):APTKL (SEQ ID NO: 84131):NAIS-AA¹⁷-LYF (SEQ ID NO: 84878):DSSNNVI (SEQ ID NO: 84972):LKKYR (SEQ ID NO: 84229):NMVVK (SEQ ID NO: 84274):AXGXH (SEQ ID NO: 84147), KVGKAXX (SEQ ID NO: 84425):VPTKL (SEQ ID NO: 84381):NAIS-AA¹⁷-LYF (SEQ ID NO: 84878):DDMGVPT (SEQ ID NO: 84964):LKKYR (SEQ ID NO: 84229):EGMSVAE (SEQ ID NO: 84411):XGXR (SEQ ID NO: 84123), KASKAXX (SEQ ID NO: 84423):VPTKL (SEQ ID NO: 84381):NAIS-AA¹⁷-LYF (SEQ ID NO: 84878):DKGVVTY (SEQ ID NO: 84969):LKKYR (SEQ ID NO: 84229):GMAVS (SEQ ID NO: 84194):EXGXR (SEQ ID NO: 84179), GSAGPXX (SEQ ID NO: 84420):TPTKM (SEQ ID NO: 84327):NAIS-AA¹⁷-LYF (SEQ ID NO: 84878):NDKQQII (SEQ ID NO: 84979):LKKYR (SEQ ID NO: 84229):GMVVD (SEQ ID NO: 84204):RXGXS (SEQ ID NO: 84291), AAPASXX (SEQ ID NO: 84401):VPARL (SEQ ID NO: 84352):NAIS-AA¹⁷-LYF (SEQ ID NO: 84878):DAANNVV (SEQ ID NO: 84963):LKKYR (SEQ ID NO: 84229):DMVVE (SEQ ID NO: 84161):AXGXR (SEQ ID NO: 84148), STPPTXX (SEQ ID NO: 84431):VPTRL (SEQ ID NO: 84385):NAIS-AA¹⁷-LYF (SEQ ID NO: 84878):DSANNVV (SEQ ID NO: 84971):LKKYR (SEQ ID NO: 84229):DMVVE (SEQ ID NO: 84161):SXGXR (SEQ ID NO: 84305), RVPSTXX (SEQ ID NO: 84428):APVKT (SEQ ID NO: 84144):NAIS-AA¹⁷-LYF (SEQ ID NO: 84878):DNGRVLL (SEQ ID NO: 84970):LKKYR (SEQ ID NO: 84229):MIVEE (SEQ ID NO: 84241):XGXL (SEQ ID NO: 84122), ASAAPXX (SEQ ID NO: 84402):VPQAL (SEQ ID NO: 84364):NAIS-AA¹⁷-LYF (SEQ ID NO: 84878):VGRKPKV (SEQ ID NO: 84981):LKKYR (SEQ ID NO: 84229):MIVRS (SEQ ID NO: 84243):XKXS (SEQ ID NO: 84124), ASASPXX (SEQ ID NO: 84403):VSQDL (SEQ ID NO: 84387):NAIS-AA¹⁷-LYF (SEQ ID NO: 84878):IGKTPKI (SEQ ID NO: 84978):LKKYR (SEQ ID NO: 84229):MIVKS (SEQ ID NO: 84242):XKXS (SEQ ID NO: 84124), ASASPXX (SEQ ID NO: 84403):VPQDL (SEQ ID NO: 84365):NAIS-AA¹⁷-LYF (SEQ ID NO: 84878):VGRTPKV (SEQ ID NO: 84982):LKKYR (SEQ ID NO: 84229):MVVKS (SEQ ID NO: 84256):XKXS (SEQ ID NO: 84124), NDEGLEX (SEQ ID NO: 84426):VPTEE (SEQ ID NO: 84377):NAIS-AA¹⁷-LYF (SEQ ID NO: 84878):RIKPHQGQH (SEQ ID NO: 84980):LKKYR (SEQ ID NO: 84229):FLQHN (SEQ ID NO: 84184):KXEXR (SEQ ID NO: 84213), NDEGLEX (SEQ ID NO: 84426):VPTGQ (SEQ ID NO: 84379):NAIS-AA¹⁷-LYF (SEQ ID NO: 84878):RIKPHQGQH (SEQ ID NO: 84980):LKKYR (SEQ ID NO: 84229):LEEHS (SEQ ID NO: 84217):QXEXR (SEQ ID NO: 84276), SSVKXQP (SEQ ID NO: 84430):SRVHH (SEQ ID NO: 84297):NAIS-AA¹⁷-LYF (SEQ ID NO: 84878):EYVRKKPKL (SEQ ID NO: 84974):LKKYR (SEQ ID NO: 84229):RLEEH (SEQ ID NO: 84279):LEXAXA (SEQ ID NO: 84400), RNVQXRP (SEQ ID NO: 84427):TQVQL (SEQ ID NO: 84340):NAIS-AA¹⁷-LYF (SEQ ID NO: 84878):EIVRKKPIF (SEQ ID NO: 84973):LKKYR (SEQ ID NO: 84229):TLEDH (SEQ ID NO: 84307):LAXKXE (SEQ ID NO: 84399), KIPKAXX (SEQ ID NO: 84424):APTEL (SEQ ID NO: 84128):SATS-AA¹⁷-LYY (SEQ ID NO: 84882):DENEKVV (SEQ ID NO: 84966):LRKHR (SEQ ID NO: 84233):DMVVK (SEQ ID NO: 84162):GXGXR (SEQ ID NO: 84208), GIPEPXX (SEQ ID NO: 84419):APTKM (SEQ ID NO: 84132):SATS-AA¹⁷-LYY (SEQ ID NO: 84882):DENKNVV (SEQ ID NO: 84967):LRKHR (SEQ ID NO: 84233):NMVVK (SEQ ID NO: 84274):SXAXR (SEQ ID NO: 84303), SIPKAXX (SEQ ID NO: 84429):APTEL (SEQ ID NO: 84128):SATS-AA¹⁷-LYY (SEQ ID NO: 84882):DEYDKVV (SEQ ID NO: 84968):LRKHR (SEQ ID NO: 84233):EMVVK (SEQ ID NO: 84176):GXGXR (SEQ ID NO: 84208), HVTKPTX (SEQ ID NO: 84422):APTKL (SEQ ID NO: 84131):SATS-AA¹⁷-LYY (SEQ ID NO: 84882):DDSSNVI (SEQ ID NO: 84965):LRKHR (SEQ ID NO: 84233):NMVVK (SEQ ID NO: 84274):SXGXH (SEQ ID NO: 84304), YVPKPXX (SEQ ID NO: 84433):APTKL (SEQ ID NO: 84131):SATS-AA¹⁷-LYY (SEQ ID NO: 84882):DDSSNVI (SEQ ID NO: 84965):LRKHR (SEQ ID NO: 84233):NMVVK (SEQ ID NO: 84274):SXGXH (SEQ ID NO: 84304), TVPKPXX (SEQ ID NO: 84432):APTQL (SEQ ID NO: 84134):SATS-AA¹⁷-LYY (SEQ ID NO: 84882):DDSSNVI (SEQ ID NO: 84965):LRKHR (SEQ ID NO: 84233):NMVVK (SEQ ID NO: 84274):AXGXH (SEQ ID NO: 84147), KVGKAXX (SEQ ID NO: 84425):APTKL (SEQ ID NO: 84131):SATS-AA¹⁷-LYY (SEQ ID NO: 84882):DDMGVPT (SEQ ID NO: 84964):LRKHR (SEQ ID NO: 84233):EGMSVVK (SEQ ID NO: 84417):XGXR (SEQ ID NO: 84123), KASKAXX (SEQ ID NO: 84423):APTKL (SEQ ID NO: 84131):SATS-AA¹⁷-LYY (SEQ ID NO: 84882):DKGVVTY (SEQ ID NO: 84969):LRKHR (SEQ ID NO: 84233):GMVVK (SEQ ID NO: 84206):EXGXR (SEQ ID NO: 84179), GSAGPXX (SEQ ID NO: 84420):APTKM (SEQ ID NO: 84132):SATS-AA¹⁷-LYY (SEQ ID NO: 84882):NDKQQII (SEQ ID NO: 84979):LRKHR (SEQ ID NO: 84233):GMVVK (SEQ ID NO: 84206):RXGXS (SEQ ID NO: 84291), AAPASXX (SEQ ID NO: 84401):APTRL (SEQ ID NO: 84135):SATS-AA¹⁷-LYY (SEQ ID NO: 84882):DAANNVV (SEQ ID NO: 84963):LRKHR (SEQ ID NO: 84233):DMVVK (SEQ ID NO: 84162):AXGXR (SEQ ID NO: 84148), STPPTXX (SEQ ID NO: 84431):APTRL (SEQ ID NO: 84135):SATS-AA¹⁷-LYY (SEQ ID NO: 84882):DSANNVV (SEQ ID NO: 84971):LRKHR (SEQ ID NO: 84233):DMVVK (SEQ ID NO: 84162):SXGXR (SEQ ID NO: 84305), HVPKPXX (SEQ ID NO: 84421):APTKL (SEQ ID NO: 84131):SATS-AA¹⁷-LYY (SEQ ID NO: 84882):DDSSNVI (SEQ ID NO: 84965):LRKHR (SEQ ID NO: 84233):NMVVK (SEQ ID NO: 84274):SXGXH (SEQ ID NO: 84304), RVPSTXX (SEQ ID NO: 84428):APTKT (SEQ ID NO: 84133):SATS-AA¹⁷-LYY (SEQ ID NO: 84882):DNGRVLL (SEQ ID NO: 84970):LRKHR (SEQ ID NO: 84233):MIVVK (SEQ ID NO: 84246):XGXL (SEQ ID NO: 84122), ASAAPXX (SEQ ID NO: 84402):APTAL (SEQ ID NO: 84125):SATS-AA¹⁷-LYY (SEQ ID NO: 84882):VGRKPKV (SEQ ID NO: 84981):LRKHR (SEQ ID NO: 84233):MIVVK (SEQ ID NO: 84246):XKXS (SEQ ID NO: 84124), ASASPXX (SEQ ID NO: 84403):APTDL (SEQ ID NO: 84126):SATS-AA¹⁷-LYY (SEQ ID NO: 84882):IGKTPKI (SEQ ID NO: 84978):LRKHR (SEQ ID NO: 84233):MIVVK (SEQ ID NO: 84246):XKXS (SEQ ID NO: 84124), ASASPXX (SEQ ID NO: 84403):APTDL (SEQ ID NO: 84126):SATS-AA¹⁷-LYY (SEQ ID NO: 84882):VGRTPKV (SEQ ID NO: 84982):LRKHR (SEQ ID NO: 84233):MVVVK (SEQ ID NO: 84260):XKXS (SEQ ID NO: 84124), KIPKAXX (SEQ ID NO: 84424):VPTEL (SEQ ID NO: 84378):SATS-AA¹⁷-LYY (SEQ ID NO: 84882):DENEKVV (SEQ ID NO: 84966):LRKHR (SEQ ID NO: 84233):DMVVE (SEQ ID NO: 84161):GXGXR (SEQ ID NO: 84208), GIPEPXX (SEQ ID NO: 84419):VPEKM (SEQ ID NO: 84360):SATS-AA¹⁷-LYY (SEQ ID NO: 84882):DENKNVV (SEQ ID NO: 84967):LRKHR (SEQ ID NO: 84233):NMTVE (SEQ ID NO: 84267):SXAXR (SEQ ID NO: 84303), SIPKAXX (SEQ ID NO: 84429):VPTEL (SEQ ID NO: 84378):SATS-AA¹⁷-LYY (SEQ ID NO: 84882):DEYDKVV (SEQ ID NO: 84968):LRKHR (SEQ ID NO: 84233):EMVVE (SEQ ID NO: 84175):GXGXR (SEQ ID NO: 84208), HVTKPTX (SEQ ID NO: 84422):APTKL (SEQ ID NO: 84131):SATS-AA¹⁷-LYY (SEQ ID NO: 84882):DDSSNVI (SEQ ID NO: 84965):LRKHR (SEQ ID NO: 84233):NMVVR (SEQ ID NO: 84275):SXGXH (SEQ ID NO: 84304), YVPKPXX (SEQ ID NO: 84433):APTKL (SEQ ID NO: 84131):SATS-AA¹⁷-LYY (SEQ ID NO: 84882):DDSSNVI (SEQ ID NO: 84965):LRKHR (SEQ ID NO: 84233):NMVVR (SEQ ID NO: 84275):SXGXH (SEQ ID NO: 84304), TVPKPXX (SEQ ID NO: 84432):APTQL (SEQ ID NO: 84134):SATS-AA¹⁷-LYY (SEQ ID NO: 84882):DDSSNVI (SEQ ID NO: 84965):LRKHR (SEQ ID NO: 84233):NMVVR (SEQ ID NO: 84275):AXGXH (SEQ ID NO: 84147), KVGKAXX (SEQ ID NO: 84425):VPTKL (SEQ ID NO: 84381):SATS-AA¹⁷-LYY (SEQ ID NO: 84882):DDMGVPT (SEQ ID NO: 84964):LRKHR (SEQ ID NO: 84233):EGMSVAE (SEQ ID NO: 84411):XGXR (SEQ ID NO: 84123), KASKAXX (SEQ ID NO: 84423):VPTKL (SEQ ID NO: 84381):SATS-AA¹⁷-LYY (SEQ ID NO: 84882):DKGVVTY (SEQ ID NO: 84969):LRKHR (SEQ ID NO: 84233):GMAVS (SEQ ID NO: 84194):EXGXR (SEQ ID NO: 84179), GSAGPXX (SEQ ID NO: 84420):TPTKM (SEQ ID NO: 84327):SATS-AA¹⁷-LYY (SEQ ID NO: 84882):NDKQQII (SEQ ID NO: 84979):LRKHR (SEQ ID NO: 84233):GMVVD (SEQ ID NO: 84204):RXGXS (SEQ ID NO: 84291), AAPASXX (SEQ ID NO: 84401):VPARL (SEQ ID NO: 84352):SATS-AA¹⁷-LYY (SEQ ID NO: 84882):DAANNVV (SEQ ID NO: 84963):LRKHR (SEQ ID NO: 84233):DMVVE (SEQ ID NO: 84161):AXGXR (SEQ ID NO: 84148), STPPTXX (SEQ ID NO: 84431):VPTRL (SEQ ID NO: 84385):SATS-AA¹⁷-LYY (SEQ ID NO: 84882):DSANNVV (SEQ ID NO: 84971):LRKHR (SEQ ID NO: 84233):DMVVE (SEQ ID NO: 84161):SXGXR (SEQ ID NO: 84305), HVPKPXX (SEQ ID NO: 84421):APTKL (SEQ ID NO: 84131):SATS-AA¹⁷-LYY (SEQ ID NO: 84882):DDSSNVI (SEQ ID NO: 84965):LRKHR (SEQ ID NO: 84233):NMVVR (SEQ ID NO: 84275):SXGXH (SEQ ID NO: 84304), RVPSTXX (SEQ ID NO: 84428):APVKT (SEQ ID NO: 84144):SATS-AA¹⁷-LYY (SEQ ID NO: 84882):DNGRVLL (SEQ ID NO: 84970):LRKHR (SEQ ID NO: 84233):MIVEE (SEQ ID NO: 84241):XGXL (SEQ ID NO: 84122), ASAAPXX (SEQ ID NO: 84402):VPQAL (SEQ ID NO: 84364):SATS-AA¹⁷-LYY (SEQ ID NO: 84882):VGRKPKV (SEQ ID NO: 84981):LRKHR (SEQ ID NO: 84233):MIVRS (SEQ ID NO: 84243):XKXS (SEQ ID NO: 84124), ASASPXX (SEQ ID NO: 84403):VSQDL (SEQ ID NO: 84387):SATS-AA¹⁷-LYY (SEQ ID NO: 84882):IGKTPKI (SEQ ID NO: 84978):LRKHR (SEQ ID NO: 84233):MIVKS (SEQ ID NO: 84242):XKXS (SEQ ID NO: 84124), ASASPXX (SEQ ID NO: 84403):VPQDL (SEQ ID NO: 84365):SATS-AA¹⁷-LYY (SEQ ID NO: 84882):VGRTPKV (SEQ ID NO: 84982):LRKHR (SEQ ID NO: 84233):MVVKS (SEQ ID NO: 84256):XKXS (SEQ ID NO: 84124), NDEGLEX (SEQ ID NO: 84426):VPTEE (SEQ ID NO: 84377):SATS-AA¹⁷-LYY (SEQ ID NO: 84882):RIKPHQGQH (SEQ ID NO: 84980):LRKHR (SEQ ID NO: 84233):FLQHN (SEQ ID NO: 84184):KXEXR (SEQ ID NO: 84213), NDEGLEX (SEQ ID NO: 84426):VPTGQ (SEQ ID NO: 84379):SATS-AA¹⁷-LYY (SEQ ID NO: 84882):RIKPHQGQH (SEQ ID NO: 84980):LRKHR (SEQ ID NO: 84233):LEEHS (SEQ ID NO: 84217):QXEXR (SEQ ID NO: 84276), SSVKXQP (SEQ ID NO: 84430):SRVHH (SEQ ID NO: 84297):SATS-AA¹⁷-LYY (SEQ ID NO: 84882):EYVRKKPKL (SEQ ID NO: 84974):LRKHR (SEQ ID NO: 84233):RLEEH (SEQ ID NO: 84279):LEXAXA (SEQ ID NO: 84400), RNVQXRP (SEQ ID NO: 84427):TQVQL (SEQ ID NO: 84340):SATS-AA¹⁷-LYY (SEQ ID NO: 84882):EIVRKKPIF (SEQ ID NO: 84973):LRKHR (SEQ ID NO: 84233):TLEDH (SEQ ID NO: 84307):LAXKXE (SEQ ID NO: 84399), KIPKAXX (SEQ ID NO: 84424):VPTEL (SEQ ID NO: 84378):SPIS-AA¹⁷-LYK (SEQ ID NO: 84887):DENEKVV (SEQ ID NO: 84966):LKYHY (SEQ ID NO: 84232):DMVAE (SEQ ID NO: 84156):GXGXR (SEQ ID NO: 84208), GIPEPXX (SEQ ID NO: 84419):VPTKM (SEQ ID NO: 84382):SPIS-AA¹⁷-LYK (SEQ ID NO: 84887):DENKNVV (SEQ ID NO: 84967):LKYHY (SEQ ID NO: 84232):NMVAE (SEQ ID NO: 84268):SXAXR (SEQ ID NO: 84303), SIPKAXX (SEQ ID NO: 84429):VPTEL (SEQ ID NO: 84378):SPIS-AA¹⁷-LYK (SEQ ID NO: 84887):DEYDKVV (SEQ ID NO: 84968):LKYHY (SEQ ID NO: 84232):EMVAE (SEQ ID NO: 84170):GXGXR (SEQ ID NO: 84208), HVTKPTX (SEQ ID NO: 84422):VPTKL (SEQ ID NO: 84381):SPIS-AA¹⁷-LYK (SEQ ID NO: 84887):DDSSNVI (SEQ ID NO: 84965):LKYHY (SEQ ID NO: 84232):NMVAE (SEQ ID NO: 84268):SXGXH (SEQ ID NO: 84304), YVPKPXX (SEQ ID NO: 84433):VPTKL (SEQ ID NO: 84381):SPIS-AA¹⁷-LYK (SEQ ID NO: 84887):DDSSNVI (SEQ ID NO: 84965):LKYHY (SEQ ID NO: 84232):NMVAE (SEQ ID NO: 84268):SXGXH (SEQ ID NO: 84304), TVPKPXX (SEQ ID NO: 84432):VPTQL (SEQ ID NO: 84384):SPIS-AA¹⁷-LYK (SEQ ID NO: 84887):DDSSNVI (SEQ ID NO: 84965):LKYHY (SEQ ID NO: 84232):NMVAE (SEQ ID NO: 84268):AXGXH (SEQ ID NO: 84147), AVPKAXX (SEQ ID NO: 84404):VPTKL (SEQ ID NO: 84381):SPIS-AA¹⁷-LYK (SEQ ID NO: 84887):DSSNNVI (SEQ ID NO: 84972):LKYHY (SEQ ID NO: 84232):NMVAE (SEQ ID NO: 84268):AXGXH (SEQ ID NO: 84147), KASKAXX (SEQ ID NO: 84423):VPTKL (SEQ ID NO: 84381):SPIS-AA¹⁷-LYK (SEQ ID NO: 84887):DKGVVTY (SEQ ID NO: 84969):LKYHY (SEQ ID NO: 84232):GMVAE (SEQ ID NO: 84200):EXGXR (SEQ ID NO: 84179), GSAGPXX (SEQ ID NO: 84420):VPTKM (SEQ ID NO: 84382):SPIS-AA¹⁷-LYK (SEQ ID NO: 84887):NDKQQII (SEQ ID NO: 84979):LKYHY (SEQ ID NO: 84232):GMVAE (SEQ ID NO: 84200):RXGXS (SEQ ID NO: 84291), AAPASXX (SEQ ID NO: 84401):VPTRL (SEQ ID NO: 84385):SPIS-AA¹⁷-LYK (SEQ ID NO: 84887):DAANNVV (SEQ ID NO: 84963):LKYHY (SEQ ID NO: 84232):DMVAE (SEQ ID NO: 84156):AXGXR (SEQ ID NO: 84148), STPPTXX (SEQ ID NO: 84431):VPTRL (SEQ ID NO: 84385):SPIS-AA¹⁷-LYK (SEQ ID NO: 84887):DSANNVV (SEQ ID NO: 84971):LKYHY (SEQ ID NO: 84232):DMVAE (SEQ ID NO: 84156):SXGXR (SEQ ID NO: 84305), HVPKPXX (SEQ ID NO: 84421):VPTKL (SEQ ID NO: 84381):SPIS-AA¹⁷-LYK (SEQ ID NO: 84887):DDSSNVI (SEQ ID NO: 84965):LKYHY (SEQ ID NO: 84232):NMVAE (SEQ ID NO: 84268):SXGXH (SEQ ID NO: 84304), RVPSTXX (SEQ ID NO: 84428):VPTKT (SEQ ID NO: 84383):SPIS-AA¹⁷-LYK (SEQ ID NO: 84887):DNGRVLL (SEQ ID NO: 84970):LKYHY (SEQ ID NO: 84232):MIVAE (SEQ ID NO: 84240):XGXL (SEQ ID NO: 84122), ASAAPXX (SEQ ID NO: 84402):VPTAL (SEQ ID NO: 84375):SPIS-AA¹⁷-LYK (SEQ ID NO: 84887):VGRKPKV (SEQ ID NO: 84981):LKYHY (SEQ ID NO: 84232):MIVAE (SEQ ID NO: 84240):XKXS (SEQ ID NO: 84124), ASASPXX (SEQ ID NO: 84403):VPTDL (SEQ ID NO: 84376):SPIS-AA¹⁷-LYK (SEQ ID NO: 84887):IGKTPKI (SEQ ID NO: 84978):LKYHY (SEQ ID NO: 84232):MIVAE (SEQ ID NO: 84240):XKXS (SEQ ID NO: 84124), ASASPXX (SEQ ID NO: 84403):VPTDL (SEQ ID NO: 84376):SPIS-AA¹⁷-LYK (SEQ ID NO: 84887):VGRTPKV (SEQ ID NO: 84982):LKYHY (SEQ ID NO: 84232):MVVAE (SEQ ID NO: 84254):XKXS (SEQ ID NO: 84124), KIPKAXX (SEQ ID NO: 84424):VPTEL (SEQ ID NO: 84378):SPIS-AA¹⁷-LYK (SEQ ID NO: 84887):DENEKVV (SEQ ID NO: 84966):LKYHY (SEQ ID NO: 84232):DMVVE (SEQ ID NO: 84161):GXGXR (SEQ ID NO: 84208), GIPEPXX (SEQ ID NO: 84419):VPEKM (SEQ ID NO: 84360):SPIS-AA¹⁷-LYK (SEQ ID NO: 84887):DENKNVV (SEQ ID NO: 84967):LKYHY (SEQ ID NO: 84232):NMTVE (SEQ ID NO: 84267):SXAXR (SEQ ID NO: 84303), SIPKAXX (SEQ ID NO: 84429):VPTEL (SEQ ID NO: 84378):SPIS-AA¹⁷-LYK (SEQ ID NO: 84887):DEYDKVV (SEQ ID NO: 84968):LKYHY (SEQ ID NO: 84232):EMVVE (SEQ ID NO: 84175):GXGXR (SEQ ID NO: 84208), HVTKPTX (SEQ ID NO: 84422):APTKL (SEQ ID NO: 84131):SPIS-AA¹⁷-LYK (SEQ ID NO: 84887):DDSSNVI (SEQ ID NO: 84965):LKYHY (SEQ ID NO: 84232):NMVVR (SEQ ID NO: 84275):SXGXH (SEQ ID NO: 84304), YVPKPXX (SEQ ID NO: 84433):APTKL (SEQ ID NO: 84131):SPIS-AA¹⁷-LYK (SEQ ID NO: 84887):DDSSNVI (SEQ ID NO: 84965):LKYHY (SEQ ID NO: 84232):NMVVR (SEQ ID NO: 84275):SXGXH (SEQ ID NO: 84304), TVPKPXX (SEQ ID NO: 84432):APTQL (SEQ ID NO: 84134):SPIS-AA¹⁷-LYK (SEQ ID NO: 84887):DDSSNVI (SEQ ID NO: 84965):LKYHY (SEQ ID NO: 84232):NMVVR (SEQ ID NO: 84275):AXGXH (SEQ ID NO: 84147), AVPKAXX (SEQ ID NO: 84404):APTKL (SEQ ID NO: 84131):SPIS-AA¹⁷-LYK (SEQ ID NO: 84887):DSSNNVI (SEQ ID NO: 84972):LKYHY (SEQ ID NO: 84232):NMVVK (SEQ ID NO: 84274):AXGXH (SEQ ID NO: 84147), KASKAXX (SEQ ID NO: 84423):VPTKL (SEQ ID NO: 84381):SPIS-AA¹⁷-LYK (SEQ ID NO: 84887):DKGVVTY (SEQ ID NO: 84969):LKYHY (SEQ ID NO: 84232):GMAVS (SEQ ID NO: 84194):EXGXR (SEQ ID NO: 84179), GSAGPXX (SEQ ID NO: 84420):TPTKM (SEQ ID NO: 84327):SPIS-AA¹⁷-LYK (SEQ ID NO: 84887):NDKQQII (SEQ ID NO: 84979):LKYHY (SEQ ID NO: 84232):GMVVD (SEQ ID NO: 84204):RXGXS (SEQ ID NO: 84291), AAPASXX (SEQ ID NO: 84401):VPARL (SEQ ID NO: 84352):SPIS-AA¹⁷-LYK (SEQ ID NO: 84887):DAANNVV (SEQ ID NO: 84963):LKYHY (SEQ ID NO: 84232):DMVVE (SEQ ID NO: 84161):AXGXR (SEQ ID NO: 84148), STPPTXX (SEQ ID NO: 84431):VPTRL (SEQ ID NO: 84385):SPIS-AA¹⁷-LYK (SEQ ID NO: 84887):DSANNVV (SEQ ID NO: 84971):LKYHY (SEQ ID NO: 84232):DMVVE (SEQ ID NO: 84161):SXGXR (SEQ ID NO: 84305), HVPKPXX (SEQ ID NO: 84421):APTKL (SEQ ID NO: 84131):SPIS-AA¹⁷-LYK (SEQ ID NO: 84887):DDSSNVI (SEQ ID NO: 84965):LKYHY (SEQ ID NO: 84232):NMVVR (SEQ ID NO: 84275):SXGXH (SEQ ID NO: 84304), RVPSTXX (SEQ ID NO: 84428):APVKT (SEQ ID NO: 84144):SPIS-AA¹⁷-LYK (SEQ ID NO: 84887):DNGRVLL (SEQ ID NO: 84970):LKYHY (SEQ ID NO: 84232):MIVEE (SEQ ID NO: 84241):XGXL (SEQ ID NO: 84122), ASAAPXX (SEQ ID NO: 84402):VPQAL (SEQ ID NO: 84364):SPIS-AA¹⁷-LYK (SEQ ID NO: 84887):VGRKPKV (SEQ ID NO: 84981):LKYHY (SEQ ID NO: 84232):MIVRS (SEQ ID NO: 84243):XKXS (SEQ ID NO: 84124), ASASPXX (SEQ ID NO: 84403):VSQDL (SEQ ID NO: 84387):SPIS-AA¹⁷-LYK (SEQ ID NO: 84887):IGKTPKI (SEQ ID NO: 84978):LKYHY (SEQ ID NO: 84232):MIVKS (SEQ ID NO: 84242):XKXS (SEQ ID NO: 84124), ASASPXX (SEQ ID NO: 84403):VPQDL (SEQ ID NO: 84365):SPIS-AA¹⁷-LYK (SEQ ID NO: 84887):VGRTPKV (SEQ ID NO: 84982):LKYHY (SEQ ID NO: 84232):MVVKS (SEQ ID NO: 84256):XKXS (SEQ ID NO: 84124), NDEGLEX (SEQ ID NO: 84426):VPTEE (SEQ ID NO: 84377):SPIS-AA¹⁷-LYK (SEQ ID NO: 84887):RIKPHQGQH (SEQ ID NO: 84980):LKYHY (SEQ ID NO: 84232):FLQHN (SEQ ID NO: 84184):KXEXR (SEQ ID NO: 84213), NDEGLEX (SEQ ID NO: 84426):VPTGQ (SEQ ID NO: 84379):SPIS-AA¹⁷-LYK (SEQ ID NO: 84887):RIKPHQGQH (SEQ ID NO: 84980):LKYHY (SEQ ID NO: 84232):LEEHS (SEQ ID NO: 84217):QXEXR (SEQ ID NO: 84276), SSVKXQP (SEQ ID NO: 84430):SRVHH (SEQ ID NO: 84297):SPIS-AA¹⁷-LYK (SEQ ID NO: 84887):EYVRKKPKL (SEQ ID NO: 84974):LKYHY (SEQ ID NO: 84232):RLEEH (SEQ ID NO: 84279):LEXAXA (SEQ ID NO: 84400), RNVQXRP (SEQ ID NO: 84427):TQVQL (SEQ ID NO: 84340):SPIS-AA¹⁷-LYK (SEQ ID NO: 84887):EIVRKKPIF (SEQ ID NO: 84973):LKYHY (SEQ ID NO: 84232):TLEDH (SEQ ID NO: 84307):LAXKXE (SEQ ID NO: 84399), KIPKAXX (SEQ ID NO: 84424):VPTEL (SEQ ID NO: 84378):EPIS-AA¹⁷-LYL (SEQ ID NO: 84874):DENEKVV (SEQ ID NO: 84966):KFKYE (SEQ ID NO: 84211):DMAVS (SEQ ID NO: 84150):GXGXR (SEQ ID NO: 84208), GIPEPXX (SEQ ID NO: 84419):VPTKM (SEQ ID NO: 84382):EPIS-AA¹⁷-LYL (SEQ ID NO: 84874):DENKNVV (SEQ ID NO: 84967):KFKYE (SEQ ID NO: 84211):NMAVS (SEQ ID NO: 84262):SXAXR (SEQ ID NO: 84303), SIPKAXX (SEQ ID NO: 84429):VPTEL (SEQ ID NO: 84378):EPIS-AA¹⁷-LYL (SEQ ID NO: 84874):DEYDKVV (SEQ ID NO: 84968):KFKYE (SEQ ID NO: 84211):EMAVS (SEQ ID NO: 84164):GXGXR (SEQ ID NO: 84208), HVTKPTX (SEQ ID NO: 84422):VPTKL (SEQ ID NO: 84381):EPIS-AA¹⁷-LYL (SEQ ID NO: 84874):DDSSNVI (SEQ ID NO: 84965):KFKYE (SEQ ID NO: 84211):NMAVS (SEQ ID NO: 84262):SXGXH (SEQ ID NO: 84304), YVPKPXX (SEQ ID NO: 84433):VPTKL (SEQ ID NO: 84381):EPIS-AA¹⁷-LYL (SEQ ID NO: 84874):DDSSNVI (SEQ ID NO: 84965):KFKYE (SEQ ID NO: 84211):NMAVS (SEQ ID NO: 84262):SXGXH (SEQ ID NO: 84304), TVPKPXX (SEQ ID NO: 84432):VPTQL (SEQ ID NO: 84384):EPIS-AA¹⁷-LYL (SEQ ID NO: 84874):DDSSNVI (SEQ ID NO: 84965):KFKYE (SEQ ID NO: 84211):NMAVS (SEQ ID NO: 84262):AXGXH (SEQ ID NO: 84147), AVPKAXX (SEQ ID NO: 84404):VPTKL (SEQ ID NO: 84381):EPIS-AA¹⁷-LYL (SEQ ID NO: 84874):DSSNNVI (SEQ ID NO: 84972):KFKYE (SEQ ID NO: 84211):NMAVS (SEQ ID NO: 84262):AXGXH (SEQ ID NO: 84147), KVGKAXX (SEQ ID NO: 84425):VPTKL (SEQ ID NO: 84381):EPIS-AA¹⁷-LYL (SEQ ID NO: 84874):DDMGVPT (SEQ ID NO: 84964):KFKYE (SEQ ID NO: 84211):EGMSAVS (SEQ ID NO: 84405):XGXR (SEQ ID NO: 84123), GSAGPXX (SEQ ID NO: 84420):VPTKM (SEQ ID NO: 84382):EPIS-AA¹⁷-LYL (SEQ ID NO: 84874):NDKQQII (SEQ ID NO: 84979):KFKYE (SEQ ID NO: 84211):GMAVS (SEQ ID NO: 84194):RXGXS (SEQ ID NO: 84291), AAPASXX (SEQ ID NO: 84401):VPTRL (SEQ ID NO: 84385):EPIS-AA¹⁷-LYL (SEQ ID NO: 84874):DAANNVV (SEQ ID NO: 84963):KFKYE (SEQ ID NO: 84211):DMAVS (SEQ ID NO: 84150):AXGXR (SEQ ID NO: 84148), STPPTXX (SEQ ID NO: 84431):VPTRL (SEQ ID NO: 84385):EPIS-AA¹⁷-LYL (SEQ ID NO: 84874):DSANNVV (SEQ ID NO: 84971):KFKYE (SEQ ID NO: 84211):DMAVS (SEQ ID NO: 84150):SXGXR (SEQ ID NO: 84305), HVPKPXX (SEQ ID NO: 84421):VPTKL (SEQ ID NO: 84381):EPIS-AA¹⁷-LYL (SEQ ID NO: 84874):DDSSNVI (SEQ ID NO: 84965):KFKYE (SEQ ID NO: 84211):NMAVS (SEQ ID NO: 84262):SXGXH (SEQ ID NO: 84304), RVPSTXX (SEQ ID NO: 84428):VPTKT (SEQ ID NO: 84383):EPIS-AA¹⁷-LYL (SEQ ID NO: 84874):DNGRVLL (SEQ ID NO: 84970):KFKYE (SEQ ID NO: 84211):MIAVS (SEQ ID NO: 84234):XGXL (SEQ ID NO: 84122), ASAAPXX (SEQ ID NO: 84402):VPTAL (SEQ ID NO: 84375):EPIS-AA¹⁷-LYL (SEQ ID NO: 84874):VGRKPKV (SEQ ID NO: 84981):KFKYE (SEQ ID NO: 84211):MIAVS (SEQ ID NO: 84234):XKXS (SEQ ID NO: 84124), ASASPXX (SEQ ID NO: 84403):VPTDL (SEQ ID NO: 84376):EPIS-AA¹⁷-LYL (SEQ ID NO: 84874):IGKTPKI (SEQ ID NO: 84978):KFKYE (SEQ ID NO: 84211):MIAVS (SEQ ID NO: 84234):XKXS (SEQ ID NO: 84124), ASASPXX (SEQ ID NO: 84403):VPTDL (SEQ ID NO: 84376):EPIS-AA¹⁷-LYL (SEQ ID NO: 84874):VGRTPKV (SEQ ID NO: 84982):KFKYE (SEQ ID NO: 84211):MVAVS (SEQ ID NO: 84248):XKXS (SEQ ID NO: 84124), KIPKAXX (SEQ ID NO: 84424):VPTEL (SEQ ID NO: 84378):EPIS-AA¹⁷-LYL (SEQ ID NO: 84874):DENEKVV (SEQ ID NO: 84966):KFKYE (SEQ ID NO: 84211):DMVVE (SEQ ID NO: 84161):GXGXR (SEQ ID NO: 84208), GIPEPXX (SEQ ID NO: 84419):VPEKM (SEQ ID NO: 84360):EPIS-AA¹⁷-LYL (SEQ ID NO: 84874):DENKNVV (SEQ ID NO: 84967):KFKYE (SEQ ID NO: 84211):NMTVE (SEQ ID NO: 84267):SXAXR (SEQ ID NO: 84303), SIPKAXX (SEQ ID NO: 84429):VPTEL (SEQ ID NO: 84378):EPIS-AA¹⁷-LYL (SEQ ID NO: 84874):DEYDKVV (SEQ ID NO: 84968):KFKYE (SEQ ID NO: 84211):EMVVE (SEQ ID NO: 84175):GXGXR (SEQ ID NO: 84208), HVTKPTX (SEQ ID NO: 84422):APTKL (SEQ ID NO: 84131):EPIS-AA¹⁷-LYL (SEQ ID NO: 84874):DDSSNVI (SEQ ID NO: 84965):KFKYE (SEQ ID NO: 84211):NMVVR (SEQ ID NO: 84275):SXGXH (SEQ ID NO: 84304), YVPKPXX (SEQ ID NO: 84433):APTKL (SEQ ID NO: 84131):EPIS-AA¹⁷-LYL (SEQ ID NO: 84874):DDSSNVI (SEQ ID NO: 84965):KFKYE (SEQ ID NO: 84211):NMVVR (SEQ ID NO: 84275):SXGXH (SEQ ID NO: 84304), TVPKPXX (SEQ ID NO: 84432):APTQL (SEQ ID NO: 84134):EPIS-AA¹⁷-LYL (SEQ ID NO: 84874):DDSSNVI (SEQ ID NO: 84965):KFKYE (SEQ ID NO: 84211):NMVVR (SEQ ID NO: 84275):AXGXH (SEQ ID NO: 84147), AVPKAXX (SEQ ID NO: 84404):APTKL (SEQ ID NO: 84131):EPIS-AA¹⁷-LYL (SEQ ID NO: 84874):DSSNNVI (SEQ ID NO: 84972):KFKYE (SEQ ID NO: 84211):NMVVK (SEQ ID NO: 84274):AXGXH (SEQ ID NO: 84147), KVGKAXX (SEQ ID NO: 84425):VPTKL (SEQ ID NO: 84381):EPIS-AA¹⁷-LYL (SEQ ID NO: 84874):DDMGVPT (SEQ ID NO: 84964):KFKYE (SEQ ID NO: 84211):EGMSVAE (SEQ ID NO: 84411):XGXR (SEQ ID NO: 84123), GSAGPXX (SEQ ID NO: 84420):TPTKM (SEQ ID NO: 84327):EPIS-AA¹⁷-LYL (SEQ ID NO: 84874):NDKQQII (SEQ ID NO: 84979):KFKYE (SEQ ID NO: 84211):GMVVD (SEQ ID NO: 84204):RXGXS (SEQ ID NO: 84291), AAPASXX (SEQ ID NO: 84401):VPARL (SEQ ID NO: 84352):EPIS-AA¹⁷-LYL (SEQ ID NO: 84874):DAANNVV (SEQ ID NO: 84963):KFKYE (SEQ ID NO: 84211):DMVVE (SEQ ID NO: 84161):AXGXR (SEQ ID NO: 84148), STPPTXX (SEQ ID NO: 84431):VPTRL (SEQ ID NO: 84385):EPIS-AA¹⁷-LYL (SEQ ID NO: 84874):DSANNVV (SEQ ID NO: 84971):KFKYE (SEQ ID NO: 84211):DMVVE (SEQ ID NO: 84161):SXGXR (SEQ ID NO: 84305), HVPKPXX (SEQ ID NO: 84421):APTKL (SEQ ID NO: 84131):EPIS-AA¹⁷-LYL (SEQ ID NO: 84874):DDSSNVI (SEQ ID NO: 84965):KFKYE (SEQ ID NO: 84211):NMVVR (SEQ ID NO: 84275):SXGXH (SEQ ID NO: 84304), RVPSTXX (SEQ ID NO: 84428):APVKT (SEQ ID NO: 84144):EPIS-AA¹⁷-LYL (SEQ ID NO: 84874):DNGRVLL (SEQ ID NO: 84970):KFKYE (SEQ ID NO: 84211):MIVEE (SEQ ID NO: 84241):XGXL (SEQ ID NO: 84122), ASAAPXX (SEQ ID NO: 84402):VPQAL (SEQ ID NO: 84364):EPIS-AA¹⁷-LYL (SEQ ID NO: 84874):VGRKPKV (SEQ ID NO: 84981):KFKYE (SEQ ID NO: 84211):MIVRS (SEQ ID NO: 84243):XKXS (SEQ ID NO: 84124), ASASPXX (SEQ ID NO: 84403):VSQDL (SEQ ID NO: 84387):EPIS-AA¹⁷-LYL (SEQ ID NO: 84874):IGKTPKI (SEQ ID NO: 84978):KFKYE (SEQ ID NO: 84211):MIVKS (SEQ ID NO: 84242):XKXS (SEQ ID NO: 84124), ASASPXX (SEQ ID NO: 84403):VPQDL (SEQ ID NO: 84365):EPIS-AA¹⁷-LYL (SEQ ID NO: 84874):VGRTPKV (SEQ ID NO: 84982):KFKYE (SEQ ID NO: 84211):MVVKS (SEQ ID NO: 84256):XKXS (SEQ ID NO: 84124), NDEGLEX (SEQ ID NO: 84426):VPTEE (SEQ ID NO: 84377):EPIS-AA¹⁷-LYL (SEQ ID NO: 84874):RIKPHQGQH (SEQ ID NO: 84980):KFKYE (SEQ ID NO: 84211):FLQHN (SEQ ID NO: 84184):KXEXR (SEQ ID NO: 84213), NDEGLEX (SEQ ID NO: 84426):VPTGQ (SEQ ID NO: 84379):EPIS-AA¹⁷-LYL (SEQ ID NO: 84874):RIKPHQGQH (SEQ ID NO: 84980):KFKYE (SEQ ID NO: 84211):LEEHS (SEQ ID NO: 84217):QXEXR (SEQ ID NO: 84276), SSVKXQP (SEQ ID NO: 84430):SRVHH (SEQ ID NO: 84297):EPIS-AA¹⁷-LYL (SEQ ID NO: 84874):EYVRKKPKL (SEQ ID NO: 84974):KFKYE (SEQ ID NO: 84211):RLEEH (SEQ ID NO: 84279):LEXAXA (SEQ ID NO: 84400), RNVQXRP (SEQ ID NO: 84427):TQVQL (SEQ ID NO: 84340):EPIS-AA¹⁷-LYL (SEQ ID NO: 84874):EIVRKKPIF (SEQ ID NO: 84973):KFKYE (SEQ ID NO: 84211):TLEDH (SEQ ID NO: 84307):LAXKXE (SEQ ID NO: 84399), KIPKAXX (SEQ ID NO: 84424):TPTEL (SEQ ID NO: 84323):SPIN-AA¹⁷-LYF (SEQ ID NO: 84884):DENEKVV (SEQ ID NO: 84966):YGKIP (SEQ ID NO: 84397):DMVVD (SEQ ID NO: 84160):GXGXR (SEQ ID NO: 84208), GIPEPXX (SEQ ID NO: 84419):TPTKM (SEQ ID NO: 84327):SPIN-AA¹⁷-LYF (SEQ ID NO: 84884):DENKNVV (SEQ ID NO: 84967):YGKIP (SEQ ID NO: 84397):NMVVD (SEQ ID NO: 84272):SXAXR (SEQ ID NO: 84303), SIPKAXX (SEQ ID NO: 84429):TPTEL (SEQ ID NO: 84323):SPIN-AA¹⁷-LYF (SEQ ID NO: 84884):DEYDKVV (SEQ ID NO: 84968):YGKIP (SEQ ID NO: 84397):EMVVD (SEQ ID NO: 84174):GXGXR (SEQ ID NO: 84208), HVTKPTX (SEQ ID NO: 84422):TPTKL (SEQ ID NO: 84326):SPIN-AA¹⁷-LYF (SEQ ID NO: 84884):DDSSNVI (SEQ ID NO: 84965):YGKIP (SEQ ID NO: 84397):NMVVD (SEQ ID NO: 84272):SXGXH (SEQ ID NO: 84304), YVPKPXX (SEQ ID NO: 84433):TPTKL (SEQ ID NO: 84326):SPIN-AA¹⁷-LYF (SEQ ID NO: 84884):DDSSNVI (SEQ ID NO: 84965):YGKIP (SEQ ID NO: 84397):NMVVD (SEQ ID NO: 84272):SXGXH (SEQ ID NO: 84304), TVPKPXX (SEQ ID NO: 84432):TPTQL (SEQ ID NO: 84329):SPIN-AA¹⁷-LYF (SEQ ID NO: 84884):DDSSNVI (SEQ ID NO: 84965):YGKIP (SEQ ID NO: 84397):NMVVD (SEQ ID NO: 84272):AXGXH (SEQ ID NO: 84147), AVPKAXX (SEQ ID NO: 84404):TPTKL (SEQ ID NO: 84326):SPIN-AA¹⁷-LYF (SEQ ID NO: 84884):DSSNNVI (SEQ ID NO: 84972):YGKIP (SEQ ID NO: 84397):NMVVD (SEQ ID NO: 84272):AXGXH (SEQ ID NO: 84147), KVGKAXX (SEQ ID NO: 84425):TPTKL (SEQ ID NO: 84326):SPIN-AA¹⁷-LYF (SEQ ID NO: 84884):DDMGVPT (SEQ ID NO: 84964):YGKIP (SEQ ID NO: 84397):EGMSVVD (SEQ ID NO: 84415):XGXR (SEQ ID NO: 84123), KASKAXX (SEQ ID NO: 84423):TPTKL (SEQ ID NO: 84326):SPIN-AA¹⁷-LYF (SEQ ID NO: 84884):DKGVVTY (SEQ ID NO: 84969):YGKIP (SEQ ID NO: 84397):GMVVD (SEQ ID NO: 84204):EXGXR (SEQ ID NO: 84179), AAPASXX (SEQ ID NO: 84401):TPTRL (SEQ ID NO: 84330):SPIN-AA¹⁷-LYF (SEQ ID NO: 84884):DAANNVV (SEQ ID NO: 84963):YGKIP (SEQ ID NO: 84397):DMVVD (SEQ ID NO: 84160):AXGXR (SEQ ID NO: 84148), STPPTXX (SEQ ID NO: 84431):TPTRL (SEQ ID NO: 84330):SPIN-AA¹⁷-LYF (SEQ ID NO: 84884):DSANNVV (SEQ ID NO: 84971):YGKIP (SEQ ID NO: 84397):DMVVD (SEQ ID NO: 84160):SXGXR (SEQ ID NO: 84305), HVPKPXX (SEQ ID NO: 84421):TPTKL (SEQ ID NO: 84326):SPIN-AA¹⁷-LYF (SEQ ID NO: 84884):DDSSNVI (SEQ ID NO: 84965):YGKIP (SEQ ID NO: 84397):NMVVD (SEQ ID NO: 84272):SXGXH (SEQ ID NO: 84304), RVPSTXX (SEQ ID NO: 84428):TPTKT (SEQ ID NO: 84328):SPIN-AA¹⁷-LYF (SEQ ID NO: 84884):DNGRVLL (SEQ ID NO: 84970):YGKIP (SEQ ID NO: 84397):MIVVD (SEQ ID NO: 84244):XGXL (SEQ ID NO: 84122), ASAAPXX (SEQ ID NO: 84402):TPTAL (SEQ ID NO: 84320):SPIN-AA¹⁷-LYF (SEQ ID NO: 84884):VGRKPKV (SEQ ID NO: 84981):YGKIP (SEQ ID NO: 84397):MIVVD (SEQ ID NO: 84244):XKXS (SEQ ID NO: 84124), ASASPXX (SEQ ID NO: 84403):TPTDL (SEQ ID NO: 84321):SPIN-AA¹⁷-LYF (SEQ ID NO: 84884):IGKTPKI (SEQ ID NO: 84978):YGKIP (SEQ ID NO: 84397):MIVVD (SEQ ID NO: 84244):XKXS (SEQ ID NO: 84124), ASASPXX (SEQ ID NO: 84403):TPTDL (SEQ ID NO: 84321):SPIN-AA¹⁷-LYF (SEQ ID NO: 84884):VGRTPKV (SEQ ID NO: 84982):YGKIP (SEQ ID NO: 84397):MVVVD (SEQ ID NO: 84258):XKXS (SEQ ID NO: 84124), KIPKAXX (SEQ ID NO: 84424):VPTEL (SEQ ID NO: 84378):SPIN-AA¹⁷-LYF (SEQ ID NO: 84884):DENEKVV (SEQ ID NO: 84966):YGKIP (SEQ ID NO: 84397):DMVVE (SEQ ID NO: 84161):GXGXR (SEQ ID NO: 84208), GIPEPXX (SEQ ID NO: 84419):VPEKM (SEQ ID NO: 84360):SPIN-AA¹⁷-LYF (SEQ ID NO: 84884):DENKNVV (SEQ ID NO: 84967):YGKIP (SEQ ID NO: 84397):NMTVE (SEQ ID NO: 84267):SXAXR (SEQ ID NO: 84303), SIPKAXX (SEQ ID NO: 84429):VPTEL (SEQ ID NO: 84378):SPIN-AA¹⁷-LYF (SEQ ID NO: 84884):DEYDKVV (SEQ ID NO: 84968):YGKIP (SEQ ID NO: 84397):EMVVE (SEQ ID NO: 84175):GXGXR (SEQ ID NO: 84208), HVTKPTX (SEQ ID NO: 84422):APTKL (SEQ ID NO: 84131):SPIN-AA¹⁷-LYF (SEQ ID NO: 84884):DDSSNVI (SEQ ID NO: 84965):YGKIP (SEQ ID NO: 84397):NMVVR (SEQ ID NO: 84275):SXGXH (SEQ ID NO: 84304), YVPKPXX (SEQ ID NO: 84433):APTKL (SEQ ID NO: 84131):SPIN-AA¹⁷-LYF (SEQ ID NO: 84884):DDSSNVI (SEQ ID NO: 84965):YGKIP (SEQ ID NO: 84397):NMVVR (SEQ ID NO: 84275):SXGXH (SEQ ID NO: 84304), TVPKPXX (SEQ ID NO: 84432):APTQL (SEQ ID NO: 84134):SPIN-AA¹⁷-LYF (SEQ ID NO: 84884):DDSSNVI (SEQ ID NO: 84965):YGKIP (SEQ ID NO: 84397):NMVVR (SEQ ID NO: 84275):AXGXH (SEQ ID NO: 84147), AVPKAXX (SEQ ID NO: 84404):APTKL (SEQ ID NO: 84131):SPIN-AA¹⁷-LYF (SEQ ID NO: 84884):DSSNNVI (SEQ ID NO: 84972):YGKIP (SEQ ID NO: 84397):NMVVK (SEQ ID NO: 84274):AXGXH (SEQ ID NO: 84147), KVGKAXX (SEQ ID NO: 84425):VPTKL (SEQ ID NO: 84381):SPIN-AA¹⁷-LYF (SEQ ID NO: 84884):DDMGVPT (SEQ ID NO: 84964):YGKIP (SEQ ID NO: 84397):EGMSVAE (SEQ ID NO: 84411):XGXR (SEQ ID NO: 84123), KASKAXX (SEQ ID NO: 84423):VPTKL (SEQ ID NO: 84381):SPIN-AA¹⁷-LYF (SEQ ID NO: 84884):DKGVVTY (SEQ ID NO: 84969):YGKIP (SEQ ID NO: 84397):GMAVS (SEQ ID NO: 84194):EXGXR (SEQ ID NO: 84179), AAPASXX (SEQ ID NO: 84401):VPARL (SEQ ID NO: 84352):SPIN-AA¹⁷-LYF (SEQ ID NO: 84884):DAANNVV (SEQ ID NO: 84963):YGKIP (SEQ ID NO: 84397):DMVVE (SEQ ID NO: 84161):AXGXR (SEQ ID NO: 84148), STPPTXX (SEQ ID NO: 84431):VPTRL (SEQ ID NO: 84385):SPIN-AA¹⁷-LYF (SEQ ID NO: 84884):DSANNVV (SEQ ID NO: 84971):YGKIP (SEQ ID NO: 84397):DMVVE (SEQ ID NO: 84161):SXGXR (SEQ ID NO: 84305), HVPKPXX (SEQ ID NO: 84421):APTKL (SEQ ID NO: 84131):SPIN-AA¹⁷-LYF (SEQ ID NO: 84884):DDSSNVI (SEQ ID NO: 84965):YGKIP (SEQ ID NO: 84397):NMVVR (SEQ ID NO: 84275):SXGXH (SEQ ID NO: 84304), RVPSTXX (SEQ ID NO: 84428):APVKT (SEQ ID NO: 84144):SPIN-AA¹⁷-LYF (SEQ ID NO: 84884):DNGRVLL (SEQ ID NO: 84970):YGKIP (SEQ ID NO: 84397):MIVEE (SEQ ID NO: 84241):XGXL (SEQ ID NO: 84122), ASAAPXX (SEQ ID NO: 84402):VPQAL (SEQ ID NO: 84364):SPIN-AA¹⁷-LYF (SEQ ID NO: 84884):VGRKPKV (SEQ ID NO: 84981):YGKIP (SEQ ID NO: 84397):MIVRS (SEQ ID NO: 84243):XKXS (SEQ ID NO: 84124), ASASPXX (SEQ ID NO: 84403):VSQDL (SEQ ID NO: 84387):SPIN-AA¹⁷-LYF (SEQ ID NO: 84884):IGKTPKI (SEQ ID NO: 84978):YGKIP (SEQ ID NO: 84397):MIVKS (SEQ ID NO: 84242):XKXS (SEQ ID NO: 84124), ASASPXX (SEQ ID NO: 84403):VPQDL (SEQ ID NO: 84365):SPIN-AA¹⁷-LYF (SEQ ID NO: 84884):VGRTPKV (SEQ ID NO: 84982):YGKIP (SEQ ID NO: 84397):MVVKS (SEQ ID NO: 84256):XKXS (SEQ ID NO: 84124), NDEGLEX (SEQ ID NO: 84426):VPTEE (SEQ ID NO: 84377):SPIN-AA¹⁷-LYF (SEQ ID NO: 84884):RIKPHQGQH (SEQ ID NO: 84980):YGKIP (SEQ ID NO: 84397):FLQHN (SEQ ID NO: 84184):KXEXR (SEQ ID NO: 84213), NDEGLEX (SEQ ID NO: 84426):VPTGQ (SEQ ID NO: 84379):SPIN-AA¹⁷-LYF (SEQ ID NO: 84884):RIKPHQGQH (SEQ ID NO: 84980):YGKIP (SEQ ID NO: 84397):LEEHS (SEQ ID NO: 84217):QXEXR (SEQ ID NO: 84276), SSVKXQP (SEQ ID NO: 84430):SRVHH (SEQ ID NO: 84297):SPIN-AA¹⁷-LYF (SEQ ID NO: 84884):EYVRKKPKL (SEQ ID NO: 84974):YGKIP (SEQ ID NO: 84397):RLEEH (SEQ ID NO: 84279):LEXAXA (SEQ ID NO: 84400), RNVQXRP (SEQ ID NO: 84427):TQVQL (SEQ ID NO: 84340):SPIN-AA¹⁷-LYF (SEQ ID NO: 84884):EIVRKKPIF (SEQ ID NO: 84973):YGKIP (SEQ ID NO: 84397):TLEDH (SEQ ID NO: 84307):LAXKXE (SEQ ID NO: 84399), KIPKAXX (SEQ ID NO: 84424):VPAEL (SEQ ID NO: 84345):SPIS-AA¹⁷-LYI (SEQ ID NO: 84886):DENEKVV (SEQ ID NO: 84966):YKQYE (SEQ ID NO: 84398):DMVVE (SEQ ID NO: 84161):GXGXR (SEQ ID NO: 84208), GIPEPXX (SEQ ID NO: 84419):VPAKM (SEQ ID NO: 84349):SPIS-AA¹⁷-LYI (SEQ ID NO: 84886):DENKNVV (SEQ ID NO: 84967):YKQYE (SEQ ID NO: 84398):NMVVE (SEQ ID NO: 84273):SXAXR (SEQ ID NO: 84303), SIPKAXX (SEQ ID NO: 84429):VPAEL (SEQ ID NO: 84345):SPIS-AA¹⁷-LYI (SEQ ID NO: 84886):DEYDKVV (SEQ ID NO: 84968):YKQYE (SEQ ID NO: 84398):EMVVE (SEQ ID NO: 84175):GXGXR (SEQ ID NO: 84208), HVTKPTX (SEQ ID NO: 84422):VPAKL (SEQ ID NO: 84348):SPIS-AA¹⁷-LYI (SEQ ID NO: 84886):DDSSNVI (SEQ ID NO: 84965):YKQYE (SEQ ID NO: 84398):NMVVE (SEQ ID NO: 84273):SXGXH (SEQ ID NO: 84304), YVPKPXX (SEQ ID NO: 84433):VPAKL (SEQ ID NO: 84348):SPIS-AA¹⁷-LYI (SEQ ID NO: 84886):DDSSNVI (SEQ ID NO: 84965):YKQYE (SEQ ID NO: 84398):NMVVE (SEQ ID NO: 84273):SXGXH (SEQ ID NO: 84304), TVPKPXX (SEQ ID NO: 84432):VPAQL (SEQ ID NO: 84351):SPIS-AA¹⁷-LYI (SEQ ID NO: 84886):DDSSNVI (SEQ ID NO: 84965):YKQYE (SEQ ID NO: 84398):NMVVE (SEQ ID NO: 84273):AXGXH (SEQ ID NO: 84147), AVPKAXX (SEQ ID NO: 84404):VPAKL (SEQ ID NO: 84348):SPIS-AA¹⁷-LYI (SEQ ID NO: 84886):DSSNNVI (SEQ ID NO: 84972):YKQYE (SEQ ID NO: 84398):NMVVE (SEQ ID NO: 84273):AXGXH (SEQ ID NO: 84147), KVGKAXX (SEQ ID NO: 84425):VPAKL (SEQ ID NO: 84348):SPIS-AA¹⁷-LYI (SEQ ID NO: 84886):DDMGVPT (SEQ ID NO: 84964):YKQYE (SEQ ID NO: 84398):EGMSVVE (SEQ ID NO: 84416):XGXR (SEQ ID NO: 84123), KASKAXX (SEQ ID NO: 84423):VPAKL (SEQ ID NO: 84348):SPIS-AA¹⁷-LYI (SEQ ID NO: 84886):DKGVVTY (SEQ ID NO: 84969):YKQYE (SEQ ID NO: 84398):GMVVE (SEQ ID NO: 84205):EXGXR (SEQ ID NO: 84179), GSAGPXX (SEQ ID NO: 84420):VPAKM (SEQ ID NO: 84349):SPIS-AA¹⁷-LYI (SEQ ID NO: 84886):NDKQQII (SEQ ID NO: 84979):YKQYE (SEQ ID NO: 84398):GMVVE (SEQ ID NO: 84205):RXGXS (SEQ ID NO: 84291), STPPTXX (SEQ ID NO: 84431):VPARL (SEQ ID NO: 84352):SPIS-AA¹⁷-LYI (SEQ ID NO: 84886):DSANNVV (SEQ ID NO: 84971):YKQYE (SEQ ID NO: 84398):DMVVE (SEQ ID NO: 84161):SXGXR (SEQ ID NO: 84305), HVPKPXX (SEQ ID NO: 84421):VPAKL (SEQ ID NO: 84348):SPIS-AA¹⁷-LYI (SEQ ID NO: 84886):DDSSNVI (SEQ ID NO: 84965):YKQYE (SEQ ID NO: 84398):NMVVE (SEQ ID NO: 84273):SXGXH (SEQ ID NO: 84304), RVPSTXX (SEQ ID NO: 84428):VPAKT (SEQ ID NO: 84350):SPIS-AA¹⁷-LYI (SEQ ID NO: 84886):DNGRVLL (SEQ ID NO: 84970):YKQYE (SEQ ID NO: 84398):MIVVE (SEQ ID NO: 84245):XGXL (SEQ ID NO: 84122), ASAAPXX (SEQ ID NO: 84402):VPAAL (SEQ ID NO: 84342):SPIS-AA¹⁷-LYI (SEQ ID NO: 84886):VGRKPKV (SEQ ID NO: 84981):YKQYE (SEQ ID NO: 84398):MIVVE (SEQ ID NO: 84245):XKXS (SEQ ID NO: 84124), ASASPXX (SEQ ID NO: 84403):VPADL (SEQ ID NO: 84343):SPIS-AA¹⁷-LYI (SEQ ID NO: 84886):IGKTPKI (SEQ ID NO: 84978):YKQYE (SEQ ID NO: 84398):MIVVE (SEQ ID NO: 84245):XKXS (SEQ ID NO: 84124), ASASPXX (SEQ ID NO: 84403):VPADL (SEQ ID NO: 84343):SPIS-AA¹⁷-LYI (SEQ ID NO: 84886):VGRTPKV (SEQ ID NO: 84982):YKQYE (SEQ ID NO: 84398):MVVVE (SEQ ID NO: 84259):XKXS (SEQ ID NO: 84124), KIPKAXX (SEQ ID NO: 84424):VPTEL (SEQ ID NO: 84378):SPIS-AA¹⁷-LYI (SEQ ID NO: 84886):DENEKVV (SEQ ID NO: 84966):YKQYE (SEQ ID NO: 84398):DMVVE (SEQ ID NO: 84161):GXGXR (SEQ ID NO: 84208), GIPEPXX (SEQ ID NO: 84419):VPEKM (SEQ ID NO: 84360):SPIS-AA¹⁷-LYI (SEQ ID NO: 84886):DENKNVV (SEQ ID NO: 84967):YKQYE (SEQ ID NO: 84398):NMTVE (SEQ ID NO: 84267):SXAXR (SEQ ID NO: 84303), SIPKAXX (SEQ ID NO: 84429):VPTEL (SEQ ID NO: 84378):SPIS-AA¹⁷-LYI (SEQ ID NO: 84886):DEYDKVV (SEQ ID NO: 84968):YKQYE (SEQ ID NO: 84398):EMVVE (SEQ ID NO: 84175):GXGXR (SEQ ID NO: 84208), HVTKPTX (SEQ ID NO: 84422):APTKL (SEQ ID NO: 84131):SPIS-AA¹⁷-LYI (SEQ ID NO: 84886):DDSSNVI (SEQ ID NO: 84965):YKQYE (SEQ ID NO: 84398):NMVVR (SEQ ID NO: 84275):SXGXH (SEQ ID NO: 84304), YVPKPXX (SEQ ID NO: 84433):APTKL (SEQ ID NO: 84131):SPIS-AA¹⁷-LYI (SEQ ID NO: 84886):DDSSNVI (SEQ ID NO: 84965):YKQYE (SEQ ID NO: 84398):NMVVR (SEQ ID NO: 84275):SXGXH (SEQ ID NO: 84304), TVPKPXX (SEQ ID NO: 84432):APTQL (SEQ ID NO: 84134):SPIS-AA¹⁷-LYI (SEQ ID NO: 84886):DDSSNVI (SEQ ID NO: 84965):YKQYE (SEQ ID NO: 84398):NMVVR (SEQ ID NO: 84275):AXGXH (SEQ ID NO: 84147), AVPKAXX (SEQ ID NO: 84404):APTKL (SEQ ID NO: 84131):SPIS-AA¹⁷-LYI (SEQ ID NO: 84886):DSSNNVI (SEQ ID NO: 84972):YKQYE (SEQ ID NO: 84398):NMVVK (SEQ ID NO: 84274):AXGXH (SEQ ID NO: 84147), KVGKAXX (SEQ ID NO: 84425):VPTKL (SEQ ID NO: 84381):SPIS-AA¹⁷-LYI (SEQ ID NO: 84886):DDMGVPT (SEQ ID NO: 84964):YKQYE (SEQ ID NO: 84398):EGMSVAE (SEQ ID NO: 84411):XGXR (SEQ ID NO: 84123), KASKAXX (SEQ ID NO: 84423):VPTKL (SEQ ID NO: 84381):SPIS-AA¹⁷-LYI (SEQ ID NO: 84886):DKGVVTY (SEQ ID NO: 84969):YKQYE (SEQ ID NO: 84398):GMAVS (SEQ ID NO: 84194):EXGXR (SEQ ID NO: 84179), GSAGPXX (SEQ ID NO: 84420):TPTKM (SEQ ID NO: 84327):SPIS-AA¹⁷-LYI (SEQ ID NO: 84886):NDKQQII (SEQ ID NO: 84979):YKQYE (SEQ ID NO: 84398):GMVVD (SEQ ID NO: 84204):RXGXS (SEQ ID NO: 84291), STPPTXX (SEQ ID NO: 84431):VPTRL (SEQ ID NO: 84385):SPIS-AA¹⁷-LYI (SEQ ID NO: 84886):DSANNVV (SEQ ID NO: 84971):YKQYE (SEQ ID NO: 84398):DMVVE (SEQ ID NO: 84161):SXGXR (SEQ ID NO: 84305), HVPKPXX (SEQ ID NO: 84421):APTKL (SEQ ID NO: 84131):SPIS-AA¹⁷-LYI (SEQ ID NO: 84886):DDSSNVI (SEQ ID NO: 84965):YKQYE (SEQ ID NO: 84398):NMVVR (SEQ ID NO: 84275):SXGXH (SEQ ID NO: 84304), RVPSTXX (SEQ ID NO: 84428):APVKT (SEQ ID NO: 84144):SPIS-AA¹⁷-LYI (SEQ ID NO: 84886):DNGRVLL (SEQ ID NO: 84970):YKQYE (SEQ ID NO: 84398):MIVEE (SEQ ID NO: 84241):XGXL (SEQ ID NO: 84122), ASAAPXX (SEQ ID NO: 84402):VPQAL (SEQ ID NO: 84364):SPIS-AA¹⁷-LYI (SEQ ID NO: 84886):VGRKPKV (SEQ ID NO: 84981):YKQYE (SEQ ID NO: 84398):MIVRS (SEQ ID NO: 84243):XKXS (SEQ ID NO: 84124), ASASPXX (SEQ ID NO: 84403):VSQDL (SEQ ID NO: 84387):SPIS-AA¹⁷-LYI (SEQ ID NO: 84886):IGKTPKI (SEQ ID NO: 84978):YKQYE (SEQ ID NO: 84398):MIVKS (SEQ ID NO: 84242):XKXS (SEQ ID NO: 84124), ASASPXX (SEQ ID NO: 84403):VPQDL (SEQ ID NO: 84365):SPIS-AA¹⁷-LYI (SEQ ID NO: 84886):VGRTPKV (SEQ ID NO: 84982):YKQYE (SEQ ID NO: 84398):MVVKS (SEQ ID NO: 84256):XKXS (SEQ ID NO: 84124), NDEGLEX (SEQ ID NO: 84426):VPTEE (SEQ ID NO: 84377):SPIS-AA¹⁷-LYI (SEQ ID NO: 84886):RIKPHQGQH (SEQ ID NO: 84980):YKQYE (SEQ ID NO: 84398):FLQHN (SEQ ID NO: 84184):KXEXR (SEQ ID NO: 84213), NDEGLEX (SEQ ID NO: 84426):VPTGQ (SEQ ID NO: 84379):SPIS-AA¹⁷-LYI (SEQ ID NO: 84886):RIKPHQGQH (SEQ ID NO: 84980):YKQYE (SEQ ID NO: 84398):LEEHS (SEQ ID NO: 84217):QXEXR (SEQ ID NO: 84276), SSVKXQP (SEQ ID NO: 84430):SRVHH (SEQ ID NO: 84297):SPIS-AA¹⁷-LYI (SEQ ID NO: 84886):EYVRKKPKL (SEQ ID NO: 84974):YKQYE (SEQ ID NO: 84398):RLEEH (SEQ ID NO: 84279):LEXAXA (SEQ ID NO: 84400), RNVQXRP (SEQ ID NO: 84427):TQVQL (SEQ ID NO: 84340):SPIS-AA¹⁷-LYI (SEQ ID NO: 84886):EIVRKKPIF (SEQ ID NO: 84973):YKQYE (SEQ ID NO: 84398):TLEDH (SEQ ID NO: 84307):LAXKXE (SEQ ID NO: 84399), KIPKAXX (SEQ ID NO: 84424):VPTEL (SEQ ID NO: 84378):SPIS-AA¹⁷-LFI (SEQ ID NO: 84885):DENEKVV (SEQ ID NO: 84966):YKQYE (SEQ ID NO: 84398):DMVVE (SEQ ID NO: 84161):GXGXR (SEQ ID NO: 84208), GIPEPXX (SEQ ID NO: 84419):VPTKM (SEQ ID NO: 84382):SPIS-AA¹⁷-LFI (SEQ ID NO: 84885):DENKNVV (SEQ ID NO: 84967):YKQYE (SEQ ID NO: 84398):NMVVE (SEQ ID NO: 84273):SXAXR (SEQ ID NO: 84303), SIPKAXX (SEQ ID NO: 84429):VPTEL (SEQ ID NO: 84378):SPIS-AA¹⁷-LFI (SEQ ID NO: 84885):DEYDKVV (SEQ ID NO: 84968):YKQYE (SEQ ID NO: 84398):EMVVE (SEQ ID NO: 84175):GXGXR (SEQ ID NO: 84208), HVTKPTX (SEQ ID NO: 84422):VPTKL (SEQ ID NO: 84381):SPIS-AA¹⁷-LFI (SEQ ID NO: 84885):DDSSNVI (SEQ ID NO: 84965):YKQYE (SEQ ID NO: 84398):NMVVE (SEQ ID NO: 84273):SXGXH (SEQ ID NO: 84304), YVPKPXX (SEQ ID NO: 84433):VPTKL (SEQ ID NO: 84381):SPIS-AA¹⁷-LFI (SEQ ID NO: 84885):DDSSNVI (SEQ ID NO: 84965):YKQYE (SEQ ID NO: 84398):NMVVE (SEQ ID NO: 84273):SXGXH (SEQ ID NO: 84304), TVPKPXX (SEQ ID NO: 84432):VPTQL (SEQ ID NO: 84384):SPIS-AA¹⁷-LFI (SEQ ID NO: 84885):DDSSNVI (SEQ ID NO: 84965):YKQYE (SEQ ID NO: 84398):NMVVE (SEQ ID NO: 84273):AXGXH (SEQ ID NO: 84147), AVPKAXX (SEQ ID NO: 84404):VPTKL (SEQ ID NO: 84381):SPIS-AA¹⁷-LFI (SEQ ID NO: 84885):DSSNNVI (SEQ ID NO: 84972):YKQYE (SEQ ID NO: 84398):NMVVE (SEQ ID NO: 84273):AXGXH (SEQ ID NO: 84147), KVGKAXX (SEQ ID NO: 84425):VPTKL (SEQ ID NO: 84381):SPIS-AA¹⁷-LFI (SEQ ID NO: 84885):DDMGVPT (SEQ ID NO: 84964):YKQYE (SEQ ID NO: 84398):EGMSVVE (SEQ ID NO: 84416):XGXR (SEQ ID NO: 84123), KASKAXX (SEQ ID NO: 84423):VPTKL (SEQ ID NO: 84381):SPIS-AA¹⁷-LFI (SEQ ID NO: 84885):DKGVVTY (SEQ ID NO: 84969):YKQYE (SEQ ID NO: 84398):GMVVE (SEQ ID NO: 84205):EXGXR (SEQ ID NO: 84179), GSAGPXX (SEQ ID NO: 84420):VPTKM (SEQ ID NO: 84382):SPIS-AA¹⁷-LFI (SEQ ID NO: 84885):NDKQQII (SEQ ID NO: 84979):YKQYE (SEQ ID NO: 84398):GMVVE (SEQ ID NO: 84205):RXGXS (SEQ ID NO: 84291), AAPASXX (SEQ ID NO: 84401):VPTRL (SEQ ID NO: 84385):SPIS-AA¹⁷-LFI (SEQ ID NO: 84885):DAANNVV (SEQ ID NO: 84963):YKQYE (SEQ ID NO: 84398):DMVVE (SEQ ID NO: 84161):AXGXR (SEQ ID NO: 84148), HVPKPXX (SEQ ID NO: 84421):VPTKL (SEQ ID NO: 84381):SPIS-AA¹⁷-LFI (SEQ ID NO: 84885):DDSSNVI (SEQ ID NO: 84965):YKQYE (SEQ ID NO: 84398):NMVVE (SEQ ID NO: 84273):SXGXH (SEQ ID NO: 84304), RVPSTXX (SEQ ID NO: 84428):VPTKT (SEQ ID NO: 84383):SPIS-AA¹⁷-LFI (SEQ ID NO: 84885):DNGRVLL (SEQ ID NO: 84970):YKQYE (SEQ ID NO: 84398):MIVVE (SEQ ID NO: 84245):XGXL (SEQ ID NO: 84122), ASAAPXX (SEQ ID NO: 84402):VPTAL (SEQ ID NO: 84375):SPIS-AA¹⁷-LFI (SEQ ID NO: 84885):VGRKPKV (SEQ ID NO: 84981):YKQYE (SEQ ID NO: 84398):MIVVE (SEQ ID NO: 84245):XKXS (SEQ ID NO: 84124), ASASPXX (SEQ ID NO: 84403):VPTDL (SEQ ID NO: 84376):SPIS-AA¹⁷-LFI (SEQ ID NO: 84885):IGKTPKI (SEQ ID NO: 84978):YKQYE (SEQ ID NO: 84398):MIVVE (SEQ ID NO: 84245):XKXS (SEQ ID NO: 84124), ASASPXX (SEQ ID NO: 84403):VPTDL (SEQ ID NO: 84376):SPIS-AA¹⁷-LFI (SEQ ID NO: 84885):VGRTPKV (SEQ ID NO: 84982):YKQYE (SEQ ID NO: 84398):MVVVE (SEQ ID NO: 84259):XKXS (SEQ ID NO: 84124), GIPEPXX (SEQ ID NO: 84419):VPEKM (SEQ ID NO: 84360):SPIS-AA¹⁷-LFI (SEQ ID NO: 84885):DENKNVV (SEQ ID NO: 84967):YKQYE (SEQ ID NO: 84398):NMTVE (SEQ ID NO: 84267):SXAXR (SEQ ID NO: 84303), HVTKPTX (SEQ ID NO: 84422):APTKL (SEQ ID NO: 84131):SPIS-AA¹⁷-LFI (SEQ ID NO: 84885):DDSSNVI (SEQ ID NO: 84965):YKQYE (SEQ ID NO: 84398):NMVVR (SEQ ID NO: 84275):SXGXH (SEQ ID NO: 84304), YVPKPXX (SEQ ID NO: 84433):APTKL (SEQ ID NO: 84131):SPIS-AA¹⁷-LFI (SEQ ID NO: 84885):DDSSNVI (SEQ ID NO: 84965):YKQYE (SEQ ID NO: 84398):NMVVR (SEQ ID NO: 84275):SXGXH (SEQ ID NO: 84304), TVPKPXX (SEQ ID NO: 84432):APTQL (SEQ ID NO: 84134):SPIS-AA¹⁷-LFI (SEQ ID NO: 84885):DDSSNVI (SEQ ID NO: 84965):YKQYE (SEQ ID NO: 84398):NMVVR (SEQ ID NO: 84275):AXGXH (SEQ ID NO: 84147), AVPKAXX (SEQ ID NO: 84404):APTKL (SEQ ID NO: 84131):SPIS-AA¹⁷-LFI (SEQ ID NO: 84885):DSSNNVI (SEQ ID NO: 84972):YKQYE (SEQ ID NO: 84398):NMVVK (SEQ ID NO: 84274):AXGXH (SEQ ID NO: 84147), KVGKAXX (SEQ ID NO: 84425):VPTKL (SEQ ID NO: 84381):SPIS-AA¹⁷-LFI (SEQ ID NO: 84885):DDMGVPT (SEQ ID NO: 84964):YKQYE (SEQ ID NO: 84398):EGMSVAE (SEQ ID NO: 84411):XGXR (SEQ ID NO: 84123), KASKAXX (SEQ ID NO: 84423):VPTKL (SEQ ID NO: 84381):SPIS-AA¹⁷-LFI (SEQ ID NO: 84885):DKGVVTY (SEQ ID NO: 84969):YKQYE (SEQ ID NO: 84398):GMAVS (SEQ ID NO: 84194):EXGXR (SEQ ID NO: 84179), GSAGPXX (SEQ ID NO: 84420):TPTKM (SEQ ID NO: 84327):SPIS-AA¹⁷-LFI (SEQ ID NO: 84885):NDKQQII (SEQ ID NO: 84979):YKQYE (SEQ ID NO: 84398):GMVVD (SEQ ID NO: 84204):RXGXS (SEQ ID NO: 84291), AAPASXX (SEQ ID NO: 84401):VPARL (SEQ ID NO: 84352):SPIS-AA¹⁷-LFI (SEQ ID NO: 84885):DAANNVV (SEQ ID NO: 84963):YKQYE (SEQ ID NO: 84398):DMVVE (SEQ ID NO: 84161):AXGXR (SEQ ID NO: 84148), HVPKPXX (SEQ ID NO: 84421):APTKL (SEQ ID NO: 84131):SPIS-AA¹⁷-LFI (SEQ ID NO: 84885):DDSSNVI (SEQ ID NO: 84965):YKQYE (SEQ ID NO: 84398):NMVVR (SEQ ID NO: 84275):SXGXH (SEQ ID NO: 84304), RVPSTXX (SEQ ID NO: 84428):APVKT (SEQ ID NO: 84144):SPIS-AA¹⁷-LFI (SEQ ID NO: 84885):DNGRVLL (SEQ ID NO: 84970):YKQYE (SEQ ID NO: 84398):MIVEE (SEQ ID NO: 84241):XGXL (SEQ ID NO: 84122), ASAAPXX (SEQ ID NO: 84402):VPQAL (SEQ ID NO: 84364):SPIS-AA¹⁷-LFI (SEQ ID NO: 84885):VGRKPKV (SEQ ID NO: 84981):YKQYE (SEQ ID NO: 84398):MIVRS (SEQ ID NO: 84243):XKXS (SEQ ID NO: 84124), ASASPXX (SEQ ID NO: 84403):VSQDL (SEQ ID NO: 84387):SPIS-AA¹⁷-LFI (SEQ ID NO: 84885):IGKTPKI (SEQ ID NO: 84978):YKQYE (SEQ ID NO: 84398):MIVKS (SEQ ID NO: 84242):XKXS (SEQ ID NO: 84124), ASASPXX (SEQ ID NO: 84403):VPQDL (SEQ ID NO: 84365):SPIS-AA¹⁷-LFI (SEQ ID NO: 84885):VGRTPKV (SEQ ID NO: 84982):YKQYE (SEQ ID NO: 84398):MVVKS (SEQ ID NO: 84256):XKXS (SEQ ID NO: 84124), NDEGLEX (SEQ ID NO: 84426):VPTEE (SEQ ID NO: 84377):SPIS-AA¹⁷-LFI (SEQ ID NO: 84885):RIKPHQGQH (SEQ ID NO: 84980):YKQYE (SEQ ID NO: 84398):FLQHN (SEQ ID NO: 84184):KXEXR (SEQ ID NO: 84213), NDEGLEX (SEQ ID NO: 84426):VPTGQ (SEQ ID NO: 84379):SPIS-AA¹⁷-LFI (SEQ ID NO: 84885):RIKPHQGQH (SEQ ID NO: 84980):YKQYE (SEQ ID NO: 84398):LEEHS (SEQ ID NO: 84217):QXEXR (SEQ ID NO: 84276), SSVKXQP (SEQ ID NO: 84430):SRVHH (SEQ ID NO: 84297):SPIS-AA¹⁷-LFI (SEQ ID NO: 84885):EYVRKKPKL (SEQ ID NO: 84974):YKQYE (SEQ ID NO: 84398):RLEEH (SEQ ID NO: 84279):LEXAXA (SEQ ID NO: 84400), RNVQXRP (SEQ ID NO: 84427):TQVQL (SEQ ID NO: 84340):SPIS-AA¹⁷-LFI (SEQ ID NO: 84885):EIVRKKPIF (SEQ ID NO: 84973):YKQYE (SEQ ID NO: 84398):TLEDH (SEQ ID NO: 84307):LAXKXE (SEQ ID NO: 84399), KIPKAXX (SEQ ID NO: 84424):APVEL (SEQ ID NO: 84139):KPLS-AA¹⁷-LYV (SEQ ID NO: 84877):DENEKVV (SEQ ID NO: 84966):DHHKD (SEQ ID NO: 84149):DMVEE (SEQ ID NO: 84157):GXGXR (SEQ ID NO: 84208), GIPEPXX (SEQ ID NO: 84419):APVKM (SEQ ID NO: 84143):KPLS-AA¹⁷-LYV (SEQ ID NO: 84877):DENKNVV (SEQ ID NO: 84967):DHHKD (SEQ ID NO: 84149):NMVEE (SEQ ID NO: 84269):SXAXR (SEQ ID NO: 84303), SIPKAXX (SEQ ID NO: 84429):APVEL (SEQ ID NO: 84139):KPLS-AA¹⁷-LYV (SEQ ID NO: 84877):DEYDKVV (SEQ ID NO: 84968):DHHKD (SEQ ID NO: 84149):EMVEE (SEQ ID NO: 84171):GXGXR (SEQ ID NO: 84208), HVTKPTX (SEQ ID NO: 84422):APVKL (SEQ ID NO: 84142):KPLS-AA¹⁷-LYV (SEQ ID NO: 84877):DDSSNVI (SEQ ID NO: 84965):DHHKD (SEQ ID NO: 84149):NMVEE (SEQ ID NO: 84269):SXGXH (SEQ ID NO: 84304), YVPKPXX (SEQ ID NO: 84433):APVKL (SEQ ID NO: 84142):KPLS-AA¹⁷-LYV (SEQ ID NO: 84877):DDSSNVI (SEQ ID NO: 84965):DHHKD (SEQ ID NO: 84149):NMVEE (SEQ ID NO: 84269):SXGXH (SEQ ID NO: 84304), TVPKPXX (SEQ ID NO: 84432):APVQL (SEQ ID NO: 84145):KPLS-AA¹⁷-LYV (SEQ ID NO: 84877):DDSSNVI (SEQ ID NO: 84965):DHHKD (SEQ ID NO: 84149):NMVEE (SEQ ID NO: 84269):AXGXH (SEQ ID NO: 84147), AVPKAXX (SEQ ID NO: 84404):APVKL (SEQ ID NO: 84142):KPLS-AA¹⁷-LYV (SEQ ID NO: 84877):DSSNNVI (SEQ ID NO: 84972):DHHKD (SEQ ID NO: 84149):NMVEE (SEQ ID NO: 84269):AXGXH (SEQ ID NO: 84147), KVGKAXX (SEQ ID NO: 84425):APVKL (SEQ ID NO: 84142):KPLS-AA¹⁷-LYV (SEQ ID NO: 84877):DDMGVPT (SEQ ID NO: 84964):DHHKD (SEQ ID NO: 84149):EGMSVEE (SEQ ID NO: 84412):XGXR (SEQ ID NO: 84123), KASKAXX (SEQ ID NO: 84423):APVKL (SEQ ID NO: 84142):KPLS-AA¹⁷-LYV (SEQ ID NO: 84877):DKGVVTY (SEQ ID NO: 84969):DHHKD (SEQ ID NO: 84149):GMVEE (SEQ ID NO: 84201):EXGXR (SEQ ID NO: 84179), GSAGPXX (SEQ ID NO: 84420):APVKM (SEQ ID NO: 84143):KPLS-AA¹⁷-LYV (SEQ ID NO: 84877):NDKQQII (SEQ ID NO: 84979):DHHKD (SEQ ID NO: 84149):GMVEE (SEQ ID NO: 84201):RXGXS (SEQ ID NO: 84291), AAPASXX (SEQ ID NO: 84401):APVRL (SEQ ID NO: 84146):KPLS-AA¹⁷-LYV (SEQ ID NO: 84877):DAANNVV (SEQ ID NO: 84963):DHHKD (SEQ ID NO: 84149):DMVEE (SEQ ID NO: 84157):AXGXR (SEQ ID NO: 84148), STPPTXX (SEQ ID NO: 84431):APVRL (SEQ ID NO: 84146):KPLS-AA¹⁷-LYV (SEQ ID NO: 84877):DSANNVV (SEQ ID NO: 84971):DHHKD (SEQ ID NO: 84149):DMVEE (SEQ ID NO: 84157):SXGXR (SEQ ID NO: 84305), HVPKPXX (SEQ ID NO: 84421):APVKL (SEQ ID NO: 84142):KPLS-AA¹⁷-LYV (SEQ ID NO: 84877):DDSSNVI (SEQ ID NO: 84965):DHHKD (SEQ ID NO: 84149):NMVEE (SEQ ID NO: 84269):SXGXH (SEQ ID NO: 84304), ASAAPXX (SEQ ID NO: 84402):APVAL (SEQ ID NO: 84136):KPLS-AA¹⁷-LYV (SEQ ID NO: 84877):VGRKPKV (SEQ ID NO: 84981):DHHKD (SEQ ID NO: 84149):MIVEE (SEQ ID NO: 84241):XKXS (SEQ ID NO: 84124), ASASPXX (SEQ ID NO: 84403):APVDL (SEQ ID NO: 84137):KPLS-AA¹⁷-LYV (SEQ ID NO: 84877):IGKTPKI (SEQ ID NO: 84978):DHHKD (SEQ ID NO: 84149):MIVEE (SEQ ID NO: 84241):XKXS (SEQ ID NO: 84124), ASASPXX (SEQ ID NO: 84403):APVDL (SEQ ID NO: 84137):KPLS-AA¹⁷-LYV (SEQ ID NO: 84877):VGRTPKV (SEQ ID NO: 84982):DHHKD (SEQ ID NO: 84149):MVVEE (SEQ ID NO: 84255):XKXS (SEQ ID NO: 84124), KIPKAXX (SEQ ID NO: 84424):VPTEL (SEQ ID NO: 84378):KPLS-AA¹⁷-LYV (SEQ ID NO: 84877):DENEKVV (SEQ ID NO: 84966):DHHKD (SEQ ID NO: 84149):DMVVE (SEQ ID NO: 84161):GXGXR (SEQ ID NO: 84208), GIPEPXX (SEQ ID NO: 84419):VPEKM (SEQ ID NO: 84360):KPLS-AA¹⁷-LYV (SEQ ID NO: 84877):DENKNVV (SEQ ID NO: 84967):DHHKD (SEQ ID NO: 84149):NMTVE (SEQ ID NO: 84267):SXAXR (SEQ ID NO: 84303), SIPKAXX (SEQ ID NO: 84429):VPTEL (SEQ ID NO: 84378):KPLS-AA¹⁷-LYV (SEQ ID NO: 84877):DEYDKVV (SEQ ID NO: 84968):DHHKD (SEQ ID NO: 84149):EMVVE (SEQ ID NO: 84175):GXGXR (SEQ ID NO: 84208), HVTKPTX (SEQ ID NO: 84422):APTKL (SEQ ID NO: 84131):KPLS-AA¹⁷-LYV (SEQ ID NO: 84877):DDSSNVI (SEQ ID NO: 84965):DHHKD (SEQ ID NO: 84149):NMVVR (SEQ ID NO: 84275):SXGXH (SEQ ID NO: 84304), YVPKPXX (SEQ ID NO: 84433):APTKL (SEQ ID NO: 84131):KPLS-AA¹⁷-LYV (SEQ ID NO: 84877):DDSSNVI (SEQ ID NO: 84965):DHHKD (SEQ ID NO: 84149):NMVVR (SEQ ID NO: 84275):SXGXH (SEQ ID NO: 84304), TVPKPXX (SEQ ID NO: 84432):APTQL (SEQ ID NO: 84134):KPLS-AA¹⁷-LYV (SEQ ID NO: 84877):DDSSNVI (SEQ ID NO: 84965):DHHKD (SEQ ID NO: 84149):NMVVR (SEQ ID NO: 84275):AXGXH (SEQ ID NO: 84147), AVPKAXX (SEQ ID NO: 84404):APTKL (SEQ ID NO: 84131):KPLS-AA¹⁷-LYV (SEQ ID NO: 84877):DSSNNVI (SEQ ID NO: 84972):DHHKD (SEQ ID NO: 84149):NMVVK (SEQ ID NO: 84274):AXGXH (SEQ ID NO: 84147), KVGKAXX (SEQ ID NO: 84425):VPTKL (SEQ ID NO: 84381):KPLS-AA¹⁷-LYV (SEQ ID NO: 84877):DDMGVPT (SEQ ID NO: 84964):DHHKD (SEQ ID NO: 84149):EGMSVAE (SEQ ID NO: 84411):XGXR (SEQ ID NO: 84123), KASKAXX (SEQ ID NO: 84423):VPTKL (SEQ ID NO: 84381):KPLS-AA¹⁷-LYV (SEQ ID NO: 84877):DKGVVTY (SEQ ID NO: 84969):DHHKD (SEQ ID NO: 84149):GMAVS (SEQ ID NO: 84194):EXGXR (SEQ ID NO: 84179), GSAGPXX (SEQ ID NO: 84420):TPTKM (SEQ ID NO: 84327):KPLS-AA¹⁷-LYV (SEQ ID NO: 84877):NDKQQII (SEQ ID NO: 84979):DHHKD (SEQ ID NO: 84149):GMVVD (SEQ ID NO: 84204):RXGXS (SEQ ID NO: 84291), AAPASXX (SEQ ID NO: 84401):VPARL (SEQ ID NO: 84352):KPLS-AA¹⁷-LYV (SEQ ID NO: 84877):DAANNVV (SEQ ID NO: 84963):DHHKD (SEQ ID NO: 84149):DMVVE (SEQ ID NO: 84161):AXGXR (SEQ ID NO: 84148), STPPTXX (SEQ ID NO: 84431):VPTRL (SEQ ID NO: 84385):KPLS-AA¹⁷-LYV (SEQ ID NO: 84877):DSANNVV (SEQ ID NO: 84971):DHHKD (SEQ ID NO: 84149):DMVVE (SEQ ID NO: 84161):SXGXR (SEQ ID NO: 84305), HVPKPXX (SEQ ID NO: 84421):APTKL (SEQ ID NO: 84131):KPLS-AA¹⁷-LYV (SEQ ID NO: 84877):DDSSNVI (SEQ ID NO: 84965):DHHKD (SEQ ID NO: 84149):NMVVR (SEQ ID NO: 84275):SXGXH (SEQ ID NO: 84304), ASAAPXX (SEQ ID NO: 84402):VPQAL (SEQ ID NO: 84364):KPLS-AA¹⁷-LYV (SEQ ID NO: 84877):VGRKPKV (SEQ ID NO: 84981):DHHKD (SEQ ID NO: 84149):MIVRS (SEQ ID NO: 84243):XKXS (SEQ ID NO: 84124), ASASPXX (SEQ ID NO: 84403):VSQDL (SEQ ID NO: 84387):KPLS-AA¹⁷-LYV (SEQ ID NO: 84877):IGKTPKI (SEQ ID NO: 84978):DHHKD (SEQ ID NO: 84149):MIVKS (SEQ ID NO: 84242):XKXS (SEQ ID NO: 84124), ASASPXX (SEQ ID NO: 84403):VPQDL (SEQ ID NO: 84365):KPLS-AA¹⁷-LYV (SEQ ID NO: 84877):VGRTPKV (SEQ ID NO: 84982):DHHKD (SEQ ID NO: 84149):MVVKS (SEQ ID NO: 84256):XKXS (SEQ ID NO: 84124), NDEGLEX (SEQ ID NO: 84426):VPTEE (SEQ ID NO: 84377):KPLS-AA¹⁷-LYV (SEQ ID NO: 84877):RIKPHQGQH (SEQ ID NO: 84980):DHHKD (SEQ ID NO: 84149):FLQHN (SEQ ID NO: 84184):KXEXR (SEQ ID NO: 84213), NDEGLEX (SEQ ID NO: 84426):VPTGQ (SEQ ID NO: 84379):KPLS-AA¹⁷-LYV (SEQ ID NO: 84877):RIKPHQGQH (SEQ ID NO: 84980):DHHKD (SEQ ID NO: 84149):LEEHS (SEQ ID NO: 84217):QXEXR (SEQ ID NO: 84276), SSVKXQP (SEQ ID NO: 84430):SRVHH (SEQ ID NO: 84297):KPLS-AA¹⁷-LYV (SEQ ID NO: 84877):EYVRKKPKL (SEQ ID NO: 84974):DHHKD (SEQ ID NO: 84149):RLEEH (SEQ ID NO: 84279):LEXAXA (SEQ ID NO: 84400), RNVQXRP (SEQ ID NO: 84427):TQVQL (SEQ ID NO: 84340):KPLS-AA¹⁷-LYV (SEQ ID NO: 84877):EIVRKKPIF (SEQ ID NO: 84973):DHHKD (SEQ ID NO: 84149):TLEDH (SEQ ID NO: 84307):LAXKXE (SEQ ID NO: 84399), KIPKAXX (SEQ ID NO: 84424):VPQEL (SEQ ID NO: 84367):EPLP-AA¹⁷-VYY (SEQ ID NO: 84875):DENEKVV (SEQ ID NO: 84966):EQLSN (SEQ ID NO: 84178):DMVRS (SEQ ID NO: 84159):GXGXR (SEQ ID NO: 84208), GIPEPXX (SEQ ID NO: 84419):VPQKM (SEQ ID NO: 84371):EPLP-AA¹⁷-VYY (SEQ ID NO: 84875):DENKNVV (SEQ ID NO: 84967):EQLSN (SEQ ID NO: 84178):NMVRS (SEQ ID NO: 84271):SXAXR (SEQ ID NO: 84303), SIPKAXX (SEQ ID NO: 84429):VPQEL (SEQ ID NO: 84367):EPLP-AA¹⁷-VYY (SEQ ID NO: 84875):DEYDKVV (SEQ ID NO: 84968):EQLSN (SEQ ID NO: 84178):EMVRS (SEQ ID NO: 84173):GXGXR (SEQ ID NO: 84208), HVTKPTX (SEQ ID NO: 84422):VPQKL (SEQ ID NO: 84370):EPLP-AA¹⁷-VYY (SEQ ID NO: 84875):DDSSNVI (SEQ ID NO: 84965):EQLSN (SEQ ID NO: 84178):NMVRS (SEQ ID NO: 84271):SXGXH (SEQ ID NO: 84304), YVPKPXX (SEQ ID NO: 84433):VPQKL (SEQ ID NO: 84370):EPLP-AA¹⁷-VYY (SEQ ID NO: 84875):DDSSNVI (SEQ ID NO: 84965):EQLSN (SEQ ID NO: 84178):NMVRS (SEQ ID NO: 84271):SXGXH (SEQ ID NO: 84304), TVPKPXX (SEQ ID NO: 84432):VPQQL (SEQ ID NO: 84373):EPLP-AA¹⁷-VYY (SEQ ID NO: 84875):DDSSNVI (SEQ ID NO: 84965):EQLSN (SEQ ID NO: 84178):NMVRS (SEQ ID NO: 84271):AXGXH (SEQ ID NO: 84147), AVPKAXX (SEQ ID NO: 84404):VPQKL (SEQ ID NO: 84370):EPLP-AA¹⁷-VYY (SEQ ID NO: 84875):DSSNNVI (SEQ ID NO: 84972):EQLSN (SEQ ID NO: 84178):NMVRS (SEQ ID NO: 84271):AXGXH (SEQ ID NO: 84147), KVGKAXX (SEQ ID NO: 84425):VPQKL (SEQ ID NO: 84370):EPLP-AA¹⁷-VYY (SEQ ID NO: 84875):DDMGVPT (SEQ ID NO: 84964):EQLSN (SEQ ID NO: 84178):EGMSVRS (SEQ ID NO: 84414):XGXR (SEQ ID NO: 84123), KASKAXX (SEQ ID NO: 84423):VPQKL (SEQ ID NO: 84370):EPLP-AA¹⁷-VYY (SEQ ID NO: 84875):DKGVVTY (SEQ ID NO: 84969):EQLSN (SEQ ID NO: 84178):GMVRS (SEQ ID NO: 84203):EXGXR (SEQ ID NO: 84179), GSAGPXX (SEQ ID NO: 84420):VPQKM (SEQ ID NO: 84371):EPLP-AA¹⁷-VYY (SEQ ID NO: 84875):NDKQQII (SEQ ID NO: 84979):EQLSN (SEQ ID NO: 84178):GMVRS (SEQ ID NO: 84203):RXGXS (SEQ ID NO: 84291), AAPASXX (SEQ ID NO: 84401):VPQRL (SEQ ID NO: 84374):EPLP-AA¹⁷-VYY (SEQ ID NO: 84875):DAANNVV (SEQ ID NO: 84963):EQLSN (SEQ ID NO: 84178):DMVRS (SEQ ID NO: 84159):AXGXR (SEQ ID NO: 84148), STPPTXX (SEQ ID NO: 84431):VPQRL (SEQ ID NO: 84374):EPLP-AA¹⁷-VYY (SEQ ID NO: 84875):DSANNVV (SEQ ID NO: 84971):EQLSN (SEQ ID NO: 84178):DMVRS (SEQ ID NO: 84159):SXGXR (SEQ ID NO: 84305), HVPKPXX (SEQ ID NO: 84421):VPQKL (SEQ ID NO: 84370):EPLP-AA¹⁷-VYY (SEQ ID NO: 84875):DDSSNVI (SEQ ID NO: 84965):EQLSN (SEQ ID NO: 84178):NMVRS (SEQ ID NO: 84271):SXGXH (SEQ ID NO: 84304), RVPSTXX (SEQ ID NO: 84428):VPQKT (SEQ ID NO: 84372):EPLP-AA¹⁷-VYY (SEQ ID NO: 84875):DNGRVLL (SEQ ID NO: 84970):EQLSN (SEQ ID NO: 84178):MIVRS (SEQ ID NO: 84243):XGXL (SEQ ID NO: 84122), ASASPXX (SEQ ID NO: 84403):VPQDL (SEQ ID NO: 84365):EPLP-AA¹⁷-VYY (SEQ ID NO: 84875):IGKTPKI (SEQ ID NO: 84978):EQLSN (SEQ ID NO: 84178):MIVRS (SEQ ID NO: 84243):XKXS (SEQ ID NO: 84124), ASASPXX (SEQ ID NO: 84403):VPQDL (SEQ ID NO: 84365):EPLP-AA¹⁷-VYY (SEQ ID NO: 84875):VGRTPKV (SEQ ID NO: 84982):EQLSN (SEQ ID NO: 84178):MVVRS (SEQ ID NO: 84257):XKXS (SEQ ID NO: 84124), KIPKAXX (SEQ ID NO: 84424):VPTEL (SEQ ID NO: 84378):EPLP-AA¹⁷-VYY (SEQ ID NO: 84875):DENEKVV (SEQ ID NO: 84966):EQLSN (SEQ ID NO: 84178):DMVVE (SEQ ID NO: 84161):GXGXR (SEQ ID NO: 84208), GIPEPXX (SEQ ID NO: 84419):VPEKM (SEQ ID NO: 84360):EPLP-AA¹⁷-VYY (SEQ ID NO: 84875):DENKNVV (SEQ ID NO: 84967):EQLSN (SEQ ID NO: 84178):NMTVE (SEQ ID NO: 84267):SXAXR (SEQ ID NO: 84303), SIPKAXX (SEQ ID NO: 84429):VPTEL (SEQ ID NO: 84378):EPLP-AA¹⁷-VYY (SEQ ID NO: 84875):DEYDKVV (SEQ ID NO: 84968):EQLSN (SEQ ID NO: 84178):EMVVE (SEQ ID NO: 84175):GXGXR (SEQ ID NO: 84208), HVTKPTX (SEQ ID NO: 84422):APTKL (SEQ ID NO: 84131):EPLP-AA¹⁷-VYY (SEQ ID NO: 84875):DDSSNVI (SEQ ID NO: 84965):EQLSN (SEQ ID NO: 84178):NMVVR (SEQ ID NO: 84275):SXGXH (SEQ ID NO: 84304), YVPKPXX (SEQ ID NO: 84433):APTKL (SEQ ID NO: 84131):EPLP-AA¹⁷-VYY (SEQ ID NO: 84875):DDSSNVI (SEQ ID NO: 84965):EQLSN (SEQ ID NO: 84178):NMVVR (SEQ ID NO: 84275):SXGXH (SEQ ID NO: 84304), TVPKPXX (SEQ ID NO: 84432):APTQL (SEQ ID NO: 84134):EPLP-AA¹⁷-VYY (SEQ ID NO: 84875):DDSSNVI (SEQ ID NO: 84965):EQLSN (SEQ ID NO: 84178):NMVVR (SEQ ID NO: 84275):AXGXH (SEQ ID NO: 84147), AVPKAXX (SEQ ID NO: 84404):APTKL (SEQ ID NO: 84131):EPLP-AA¹⁷-VYY (SEQ ID NO: 84875):DSSNNVI (SEQ ID NO: 84972):EQLSN (SEQ ID NO: 84178):NMVVK (SEQ ID NO: 84274):AXGXH (SEQ ID NO: 84147), KVGKAXX (SEQ ID NO: 84425):VPTKL (SEQ ID NO: 84381):EPLP-AA¹⁷-VYY (SEQ ID NO: 84875):DDMGVPT (SEQ ID NO: 84964):EQLSN (SEQ ID NO: 84178):EGMSVAE (SEQ ID NO: 84411):XGXR (SEQ ID NO: 84123), KASKAXX (SEQ ID NO: 84423):VPTKL (SEQ ID NO: 84381):EPLP-AA¹⁷-VYY (SEQ ID NO: 84875):DKGVVTY (SEQ ID NO: 84969):EQLSN (SEQ ID NO: 84178):GMAVS (SEQ ID NO: 84194):EXGXR (SEQ ID NO: 84179), GSAGPXX (SEQ ID NO: 84420):TPTKM (SEQ ID NO: 84327):EPLP-AA¹⁷-VYY (SEQ ID NO: 84875):NDKQQII (SEQ ID NO: 84979):EQLSN (SEQ ID NO: 84178):GMVVD (SEQ ID NO: 84204):RXGXS (SEQ ID NO: 84291), AAPASXX (SEQ ID NO: 84401):VPARL (SEQ ID NO: 84352):EPLP-AA¹⁷-VYY (SEQ ID NO: 84875):DAANNVV (SEQ ID NO: 84963):EQLSN (SEQ ID NO: 84178):DMVVE (SEQ ID NO: 84161):AXGXR (SEQ ID NO: 84148), STPPTXX (SEQ ID NO: 84431):VPTRL (SEQ ID NO: 84385):EPLP-AA¹⁷-VYY (SEQ ID NO: 84875):DSANNVV (SEQ ID NO: 84971):EQLSN (SEQ ID NO: 84178):DMVVE (SEQ ID NO: 84161):SXGXR (SEQ ID NO: 84305), HVPKPXX (SEQ ID NO: 84421):APTKL (SEQ ID NO: 84131):EPLP-AA¹⁷-VYY (SEQ ID NO: 84875):DDSSNVI (SEQ ID NO: 84965):EQLSN (SEQ ID NO: 84178):NMVVR (SEQ ID NO: 84275):SXGXH (SEQ ID NO: 84304), RVPSTXX (SEQ ID NO: 84428):APVKT (SEQ ID NO: 84144):EPLP-AA¹⁷-VYY (SEQ ID NO: 84875):DNGRVLL (SEQ ID NO: 84970):EQLSN (SEQ ID NO: 84178):MIVEE (SEQ ID NO: 84241):XGXL (SEQ ID NO: 84122), ASASPXX (SEQ ID NO: 84403):VSQDL (SEQ ID NO: 84387):EPLP-AA¹⁷-VYY (SEQ ID NO: 84875):IGKTPKI (SEQ ID NO: 84978):EQLSN (SEQ ID NO: 84178):MIVKS (SEQ ID NO: 84242):XKXS (SEQ ID NO: 84124), ASASPXX (SEQ ID NO: 84403):VPQDL (SEQ ID NO: 84365):EPLP-AA¹⁷-VYY (SEQ ID NO: 84875):VGRTPKV (SEQ ID NO: 84982):EQLSN (SEQ ID NO: 84178):MVVKS (SEQ ID NO: 84256):XKXS (SEQ ID NO: 84124), NDEGLEX (SEQ ID NO: 84426):VPTEE (SEQ ID NO: 84377):EPLP-AA¹⁷-VYY (SEQ ID NO: 84875):RIKPHQGQH (SEQ ID NO: 84980):EQLSN (SEQ ID NO: 84178):FLQHN (SEQ ID NO: 84184):KXEXR (SEQ ID NO: 84213), NDEGLEX (SEQ ID NO: 84426):VPTGQ (SEQ ID NO: 84379):EPLP-AA¹⁷-VYY (SEQ ID NO: 84875):RIKPHQGQH (SEQ ID NO: 84980):EQLSN (SEQ ID NO: 84178):LEEHS (SEQ ID NO: 84217):QXEXR (SEQ ID NO: 84276), SSVKXQP (SEQ ID NO: 84430):SRVHH (SEQ ID NO: 84297):EPLP-AA¹⁷-VYY (SEQ ID NO: 84875):EYVRKKPKL (SEQ ID NO: 84974):EQLSN (SEQ ID NO: 84178):RLEEH (SEQ ID NO: 84279):LEXAXA (SEQ ID NO: 84400), RNVQXRP (SEQ ID NO: 84427):TQVQL (SEQ ID NO: 84340):EPLP-AA¹⁷-VYY (SEQ ID NO: 84875):EIVRKKPIF (SEQ ID NO: 84973):EQLSN (SEQ ID NO: 84178):TLEDH (SEQ ID NO: 84307):LAXKXE (SEQ ID NO: 84399), KIPKAXX (SEQ ID NO: 84424):VSQEL (SEQ ID NO: 84389):EPLT-AA¹⁷-LYY (SEQ ID NO: 84876):DENEKVV (SEQ ID NO: 84966):EQLSN (SEQ ID NO: 84178):DMVKS (SEQ ID NO: 84158):GXGXR (SEQ ID NO: 84208), GIPEPXX (SEQ ID NO: 84419):VSQKM (SEQ ID NO: 84393):EPLT-AA¹⁷-LYY (SEQ ID NO: 84876):DENKNVV (SEQ ID NO: 84967):EQLSN (SEQ ID NO: 84178):NMVKS (SEQ ID NO: 84270):SXAXR (SEQ ID NO: 84303), SIPKAXX (SEQ ID NO: 84429):VSQEL (SEQ ID NO: 84389):EPLT-AA¹⁷-LYY (SEQ ID NO: 84876):DEYDKVV (SEQ ID NO: 84968):EQLSN (SEQ ID NO: 84178):EMVKS (SEQ ID NO: 84172):GXGXR (SEQ ID NO: 84208), HVTKPTX (SEQ ID NO: 84422):VSQKL (SEQ ID NO: 84392):EPLT-AA¹⁷-LYY (SEQ ID NO: 84876):DDSSNVI (SEQ ID NO: 84965):EQLSN (SEQ ID NO: 84178):NMVKS (SEQ ID NO: 84270):SXGXH (SEQ ID NO: 84304), YVPKPXX (SEQ ID NO: 84433):VSQKL (SEQ ID NO: 84392):EPLT-AA¹⁷-LYY (SEQ ID NO: 84876):DDSSNVI (SEQ ID NO: 84965):EQLSN (SEQ ID NO: 84178):NMVKS (SEQ ID NO: 84270):SXGXH (SEQ ID NO: 84304), TVPKPXX (SEQ ID NO: 84432):VSQQL (SEQ ID NO: 84395):EPLT-AA¹⁷-LYY (SEQ ID NO: 84876):DDSSNVI (SEQ ID NO: 84965):EQLSN (SEQ ID NO: 84178):NMVKS (SEQ ID NO: 84270):AXGXH (SEQ ID NO: 84147), AVPKAXX (SEQ ID NO: 84404):VSQKL (SEQ ID NO: 84392):EPLT-AA¹⁷-LYY (SEQ ID NO: 84876):DSSNNVI (SEQ ID NO: 84972):EQLSN (SEQ ID NO: 84178):NMVKS (SEQ ID NO: 84270):AXGXH (SEQ ID NO: 84147), KVGKAXX (SEQ ID NO: 84425):VSQKL (SEQ ID NO: 84392):EPLT-AA¹⁷-LYY (SEQ ID NO: 84876):DDMGVPT (SEQ ID NO: 84964):EQLSN (SEQ ID NO: 84178):EGMSVKS (SEQ ID NO: 84413):XGXR (SEQ ID NO: 84123), KASKAXX (SEQ ID NO: 84423):VSQKL (SEQ ID NO: 84392):EPLT-AA¹⁷-LYY (SEQ ID NO: 84876):DKGVVTY (SEQ ID NO: 84969):EQLSN (SEQ ID NO: 84178):GMVKS (SEQ ID NO: 84202):EXGXR (SEQ ID NO: 84179), GSAGPXX (SEQ ID NO: 84420):VSQKM (SEQ ID NO: 84393):EPLT-AA¹⁷-LYY (SEQ ID NO: 84876):NDKQQII (SEQ ID NO: 84979):EQLSN (SEQ ID NO: 84178):GMVKS (SEQ ID NO: 84202):RXGXS (SEQ ID NO: 84291), AAPASXX (SEQ ID NO: 84401):VSQRL (SEQ ID NO: 84396):EPLT-AA¹⁷-LYY (SEQ ID NO: 84876):DAANNVV (SEQ ID NO: 84963):EQLSN (SEQ ID NO: 84178):DMVKS (SEQ ID NO: 84158):AXGXR (SEQ ID NO: 84148), STPPTXX (SEQ ID NO: 84431):VSQRL (SEQ ID NO: 84396):EPLT-AA¹⁷-LYY (SEQ ID NO: 84876):DSANNVV (SEQ ID NO: 84971):EQLSN (SEQ ID NO: 84178):DMVKS (SEQ ID NO: 84158):SXGXR (SEQ ID NO: 84305), HVPKPXX (SEQ ID NO: 84421):VSQKL (SEQ ID NO: 84392):EPLT-AA¹⁷-LYY (SEQ ID NO: 84876):DDSSNVI (SEQ ID NO: 84965):EQLSN (SEQ ID NO: 84178):NMVKS (SEQ ID NO: 84270):SXGXH (SEQ ID NO: 84304), RVPSTXX (SEQ ID NO: 84428):VSQKT (SEQ ID NO: 84394):EPLT-AA¹⁷-LYY (SEQ ID NO: 84876):DNGRVLL (SEQ ID NO: 84970):EQLSN (SEQ ID NO: 84178):MIVKS (SEQ ID NO: 84242):XGXL (SEQ ID NO: 84122), ASAAPXX (SEQ ID NO: 84402):VSQAL (SEQ ID NO: 84386):EPLT-AA¹⁷-LYY (SEQ ID NO: 84876):VGRKPKV (SEQ ID NO: 84981):EQLSN (SEQ ID NO: 84178):MIVKS (SEQ ID NO: 84242):XKXS (SEQ ID NO: 84124), ASASPXX (SEQ ID NO: 84403):VSQDL (SEQ ID NO: 84387):EPLT-AA¹⁷-LYY (SEQ ID NO: 84876):VGRTPKV (SEQ ID NO: 84982):EQLSN (SEQ ID NO: 84178):MVVKS (SEQ ID NO: 84256):XKXS (SEQ ID NO: 84124), KIPKAXX (SEQ ID NO: 84424):VPTEL (SEQ ID NO: 84378):EPLT-AA¹⁷-LYY (SEQ ID NO: 84876):DENEKVV (SEQ ID NO: 84966):EQLSN (SEQ ID NO: 84178):DMVVE (SEQ ID NO: 84161):GXGXR (SEQ ID NO: 84208), GIPEPXX (SEQ ID NO: 84419):VPEKM (SEQ ID NO: 84360):EPLT-AA¹⁷-LYY (SEQ ID NO: 84876):DENKNVV (SEQ ID NO: 84967):EQLSN (SEQ ID NO: 84178):NMTVE (SEQ ID NO: 84267):SXAXR (SEQ ID NO: 84303), SIPKAXX (SEQ ID NO: 84429):VPTEL (SEQ ID NO: 84378):EPLT-AA¹⁷-LYY (SEQ ID NO: 84876):DEYDKVV (SEQ ID NO: 84968):EQLSN (SEQ ID NO: 84178):EMVVE (SEQ ID NO: 84175):GXGXR (SEQ ID NO: 84208), HVTKPTX (SEQ ID NO: 84422):APTKL (SEQ ID NO: 84131):EPLT-AA¹⁷-LYY (SEQ ID NO: 84876):DDSSNVI (SEQ ID NO: 84965):EQLSN (SEQ ID NO: 84178):NMVVR (SEQ ID NO: 84275):SXGXH (SEQ ID NO: 84304), YVPKPXX (SEQ ID NO: 84433):APTKL (SEQ ID NO: 84131):EPLT-AA¹⁷-LYY (SEQ ID NO: 84876):DDSSNVI (SEQ ID NO: 84965):EQLSN (SEQ ID NO: 84178):NMVVR (SEQ ID NO: 84275):SXGXH (SEQ ID NO: 84304), TVPKPXX (SEQ ID NO: 84432):APTQL (SEQ ID NO: 84134):EPLT-AA¹⁷-LYY (SEQ ID NO: 84876):DDSSNVI (SEQ ID NO: 84965):EQLSN (SEQ ID NO: 84178):NMVVR (SEQ ID NO: 84275):AXGXH (SEQ ID NO: 84147), AVPKAXX (SEQ ID NO: 84404):APTKL (SEQ ID NO: 84131):EPLT-AA¹⁷-LYY (SEQ ID NO: 84876):DSSNNVI (SEQ ID NO: 84972):EQLSN (SEQ ID NO: 84178):NMVVK (SEQ ID NO: 84274):AXGXH (SEQ ID NO: 84147), KVGKAXX (SEQ ID NO: 84425):VPTKL (SEQ ID NO: 84381):EPLT-AA¹⁷-LYY (SEQ ID NO: 84876):DDMGVPT (SEQ ID NO: 84964):EQLSN (SEQ ID NO: 84178):EGMSVAE (SEQ ID NO: 84411):XGXR (SEQ ID NO: 84123), KASKAXX (SEQ ID NO: 84423):VPTKL (SEQ ID NO: 84381):EPLT-AA¹⁷-LYY (SEQ ID NO: 84876):DKGVVTY (SEQ ID NO: 84969):EQLSN (SEQ ID NO: 84178):GMAVS (SEQ ID NO: 84194):EXGXR (SEQ ID NO: 84179), GSAGPXX (SEQ ID NO: 84420):TPTKM (SEQ ID NO: 84327):EPLT-AA¹⁷-LYY (SEQ ID NO: 84876):NDKQQII (SEQ ID NO: 84979):EQLSN (SEQ ID NO: 84178):GMVVD (SEQ ID NO: 84204):RXGXS (SEQ ID NO: 84291), AAPASXX (SEQ ID NO: 84401):VPARL (SEQ ID NO: 84352):EPLT-AA¹⁷-LYY (SEQ ID NO: 84876):DAANNVV (SEQ ID NO: 84963):EQLSN (SEQ ID NO: 84178):DMVVE (SEQ ID NO: 84161):AXGXR (SEQ ID NO: 84148), STPPTXX (SEQ ID NO: 84431):VPTRL (SEQ ID NO: 84385):EPLT-AA¹⁷-LYY (SEQ ID NO: 84876):DSANNVV (SEQ ID NO: 84971):EQLSN (SEQ ID NO: 84178):DMVVE (SEQ ID NO: 84161):SXGXR (SEQ ID NO: 84305), HVPKPXX (SEQ ID NO: 84421):APTKL (SEQ ID NO: 84131):EPLT-AA¹⁷-LYY (SEQ ID NO: 84876):DDSSNVI (SEQ ID NO: 84965):EQLSN (SEQ ID NO: 84178):NMVVR (SEQ ID NO: 84275):SXGXH (SEQ ID NO: 84304), RVPSTXX (SEQ ID NO: 84428):APVKT (SEQ ID NO: 84144):EPLT-AA¹⁷-LYY (SEQ ID NO: 84876):DNGRVLL (SEQ ID NO: 84970):EQLSN (SEQ ID NO: 84178):MIVEE (SEQ ID NO: 84241):XGXL (SEQ ID NO: 84122), ASAAPXX (SEQ ID NO: 84402):VPQAL (SEQ ID NO: 84364):EPLT-AA¹⁷-LYY (SEQ ID NO: 84876):VGRKPKV (SEQ ID NO: 84981):EQLSN (SEQ ID NO: 84178):MIVRS (SEQ ID NO: 84243):XKXS (SEQ ID NO: 84124), NDEGLEX (SEQ ID NO: 84426):VPTEE (SEQ ID NO: 84377):EPLT-AA¹⁷-LYY (SEQ ID NO: 84876):RIKPHQGQH (SEQ ID NO: 84980):EQLSN (SEQ ID NO: 84178):FLQHN (SEQ ID NO: 84184):KXEXR (SEQ ID NO: 84213), NDEGLEX (SEQ ID NO: 84426):VPTGQ (SEQ ID NO: 84379):EPLT-AA¹⁷-LYY (SEQ ID NO: 84876):RIKPHQGQH (SEQ ID NO: 84980):EQLSN (SEQ ID NO: 84178):LEEHS (SEQ ID NO: 84217):QXEXR (SEQ ID NO: 84276), SSVKXQP (SEQ ID NO: 84430):SRVHH (SEQ ID NO: 84297):EPLT-AA¹⁷-LYY (SEQ ID NO: 84876):EYVRKKPKL (SEQ ID NO: 84974):EQLSN (SEQ ID NO: 84178):RLEEH (SEQ ID NO: 84279):LEXAXA (SEQ ID NO: 84400), RNVQXRP (SEQ ID NO: 84427):TQVQL (SEQ ID NO: 84340):EPLT-AA¹⁷-LYY (SEQ ID NO: 84876):EIVRKKPIF (SEQ ID NO: 84973):EQLSN (SEQ ID NO: 84178):TLEDH (SEQ ID NO: 84307):LAXKXE (SEQ ID NO: 84399), KIPKAXX (SEQ ID NO: 84424):VPQEL (SEQ ID NO: 84367):EPLT-AA¹⁷-LYY (SEQ ID NO: 84876):DENEKVV (SEQ ID NO: 84966):EQLSN (SEQ ID NO: 84178):DMVKS (SEQ ID NO: 84158):GXGXR (SEQ ID NO: 84208), GIPEPXX (SEQ ID NO: 84419):VPQKM (SEQ ID NO: 84371):EPLT-AA¹⁷-LYY (SEQ ID NO: 84876):DENKNVV (SEQ ID NO: 84967):EQLSN (SEQ ID NO: 84178):NMVKS (SEQ ID NO: 84270):SXAXR (SEQ ID NO: 84303), SIPKAXX (SEQ ID NO: 84429):VPQEL (SEQ ID NO: 84367):EPLT-AA¹⁷-LYY (SEQ ID NO: 84876):DEYDKVV (SEQ ID NO: 84968):EQLSN (SEQ ID NO: 84178):EMVKS (SEQ ID NO: 84172):GXGXR (SEQ ID NO: 84208), HVTKPTX (SEQ ID NO: 84422):VPQKL (SEQ ID NO: 84370):EPLT-AA¹⁷-LYY (SEQ ID NO: 84876):DDSSNVI (SEQ ID NO: 84965):EQLSN (SEQ ID NO: 84178):NMVKS (SEQ ID NO: 84270):SXGXH (SEQ ID NO: 84304), YVPKPXX (SEQ ID NO: 84433):VPQKL (SEQ ID NO: 84370):EPLT-AA¹⁷-LYY (SEQ ID NO: 84876):DDSSNVI (SEQ ID NO: 84965):EQLSN (SEQ ID NO: 84178):NMVKS (SEQ ID NO: 84270):SXGXH (SEQ ID NO: 84304), TVPKPXX (SEQ ID NO: 84432):VPQQL (SEQ ID NO: 84373):EPLT-AA¹⁷-LYY (SEQ ID NO: 84876):DDSSNVI (SEQ ID NO: 84965):EQLSN (SEQ ID NO: 84178):NMVKS (SEQ ID NO: 84270):AXGXH (SEQ ID NO: 84147), AVPKAXX (SEQ ID NO: 84404):VPQKL (SEQ ID NO: 84370):EPLT-AA¹⁷-LYY (SEQ ID NO: 84876):DSSNNVI (SEQ ID NO: 84972):EQLSN (SEQ ID NO: 84178):NMVKS (SEQ ID NO: 84270):AXGXH (SEQ ID NO: 84147), KVGKAXX (SEQ ID NO: 84425):VPQKL (SEQ ID NO: 84370):EPLT-AA¹⁷-LYY (SEQ ID NO: 84876):DDMGVPT (SEQ ID NO: 84964):EQLSN (SEQ ID NO: 84178):EGMSVKS (SEQ ID NO: 84413):XGXR (SEQ ID NO: 84123), KASKAXX (SEQ ID NO: 84423):VPQKL (SEQ ID NO: 84370):EPLT-AA¹⁷-LYY (SEQ ID NO: 84876):DKGVVTY (SEQ ID NO: 84969):EQLSN (SEQ ID NO: 84178):GMVKS (SEQ ID NO: 84202):EXGXR (SEQ ID NO: 84179), GSAGPXX (SEQ ID NO: 84420):VPQKM (SEQ ID NO: 84371):EPLT-AA¹⁷-LYY (SEQ ID NO: 84876):NDKQQII (SEQ ID NO: 84979):EQLSN (SEQ ID NO: 84178):GMVKS (SEQ ID NO: 84202):RXGXS (SEQ ID NO: 84291), AAPASXX (SEQ ID NO: 84401):VPQRL (SEQ ID NO: 84374):EPLT-AA¹⁷-LYY (SEQ ID NO: 84876):DAANNVV (SEQ ID NO: 84963):EQLSN (SEQ ID NO: 84178):DMVKS (SEQ ID NO: 84158):AXGXR (SEQ ID NO: 84148), STPPTXX (SEQ ID NO: 84431):VPQRL (SEQ ID NO: 84374):EPLT-AA¹⁷-LYY (SEQ ID NO: 84876):DSANNVV (SEQ ID NO: 84971):EQLSN (SEQ ID NO: 84178):DMVKS (SEQ ID NO: 84158):SXGXR (SEQ ID NO: 84305), HVPKPXX (SEQ ID NO: 84421):VPQKL (SEQ ID NO: 84370):EPLT-AA¹⁷-LYY (SEQ ID NO: 84876):DDSSNVI (SEQ ID NO: 84965):EQLSN (SEQ ID NO: 84178):NMVKS (SEQ ID NO: 84270):SXGXH (SEQ ID NO: 84304), RVPSTXX (SEQ ID NO: 84428):VPQKT (SEQ ID NO: 84372):EPLT-AA¹⁷-LYY (SEQ ID NO: 84876):DNGRVLL (SEQ ID NO: 84970):EQLSN (SEQ ID NO: 84178):MIVKS (SEQ ID NO: 84242):XGXL (SEQ ID NO: 84122), ASAAPXX (SEQ ID NO: 84402):VPQAL (SEQ ID NO: 84364):EPLT-AA¹⁷-LYY (SEQ ID NO: 84876):VGRKPKV (SEQ ID NO: 84981):EQLSN (SEQ ID NO: 84178):MIVKS (SEQ ID NO: 84242):XKXS (SEQ ID NO: 84124), ASASPXX (SEQ ID NO: 84403):VPQDL (SEQ ID NO: 84365):EPLT-AA¹⁷-LYY (SEQ ID NO: 84876):IGKTPKI (SEQ ID NO: 84978):EQLSN (SEQ ID NO: 84178):MIVKS (SEQ ID NO: 84242):XKXS (SEQ ID NO: 84124), NDEGLEX (SEQ ID NO: 84426):VPTGQ (SEQ ID NO: 84379):SNIT-AA¹⁷-QIM (SEQ ID NO: 84883):RIKPHQGQH (SEQ ID NO: 84980):IGEMS (SEQ ID NO: 84209):LEQHN (SEQ ID NO: 84218):QXEXR (SEQ ID NO: 84276), KIPKAXX (SEQ ID NO: 84424):VPTEL (SEQ ID NO: 84378):SNIT-AA¹⁷-QIM (SEQ ID NO: 84883):DENEKVV (SEQ ID NO: 84966):IGEMS (SEQ ID NO: 84209):DMVVE (SEQ ID NO: 84161):GXGXR (SEQ ID NO: 84208), GIPEPXX (SEQ ID NO: 84419):VPEKM (SEQ ID NO: 84360):SNIT-AA¹⁷-QIM (SEQ ID NO: 84883):DENKNVV (SEQ ID NO: 84967):IGEMS (SEQ ID NO: 84209):NMTVE (SEQ ID NO: 84267):SXAXR (SEQ ID NO: 84303), SIPKAXX (SEQ ID NO: 84429):VPTEL (SEQ ID NO: 84378):SNIT-AA¹⁷-QIM (SEQ ID NO: 84883):DEYDKVV (SEQ ID NO: 84968):IGEMS (SEQ ID NO: 84209):EMVVE (SEQ ID NO: 84175):GXGXR (SEQ ID NO: 84208), HVTKPTX (SEQ ID NO: 84422):APTKL (SEQ ID NO: 84131):SNIT-AA¹⁷-QIM (SEQ ID NO: 84883):DDSSNVI (SEQ ID NO: 84965):IGEMS (SEQ ID NO: 84209):NMVVR (SEQ ID NO: 84275):SXGXH (SEQ ID NO: 84304), YVPKPXX (SEQ ID NO: 84433):APTKL (SEQ ID NO: 84131):SNIT-AA¹⁷-QIM (SEQ ID NO: 84883):DDSSNVI (SEQ ID NO: 84965):IGEMS (SEQ ID NO: 84209):NMVVR (SEQ ID NO: 84275):SXGXH (SEQ ID NO: 84304), TVPKPXX (SEQ ID NO: 84432):APTQL (SEQ ID NO: 84134):SNIT-AA¹⁷-QIM (SEQ ID NO: 84883):DDSSNVI (SEQ ID NO: 84965):IGEMS (SEQ ID NO: 84209):NMVVR (SEQ ID NO: 84275):AXGXH (SEQ ID NO: 84147), AVPKAXX (SEQ ID NO: 84404):APTKL (SEQ ID NO: 84131):SNIT-AA¹⁷-QIM (SEQ ID NO: 84883):DSSNNVI (SEQ ID NO: 84972):IGEMS (SEQ ID NO: 84209):NMVVK (SEQ ID NO: 84274):AXGXH (SEQ ID NO: 84147), KVGKAXX (SEQ ID NO: 84425):VPTKL (SEQ ID NO: 84381):SNIT-AA¹⁷-QIM (SEQ ID NO: 84883):DDMGVPT (SEQ ID NO: 84964):IGEMS (SEQ ID NO: 84209):EGMSVAE (SEQ ID NO: 84411):XGXR (SEQ ID NO: 84123), KASKAXX (SEQ ID NO: 84423):VPTKL (SEQ ID NO: 84381):SNIT-AA¹⁷-QIM (SEQ ID NO: 84883):DKGVVTY (SEQ ID NO: 84969):IGEMS (SEQ ID NO: 84209):GMAVS (SEQ ID NO: 84194):EXGXR (SEQ ID NO: 84179), GSAGPXX (SEQ ID NO: 84420):TPTKM (SEQ ID NO: 84327):SNIT-AA¹⁷-QIM (SEQ ID NO: 84883):NDKQQII (SEQ ID NO: 84979):IGEMS (SEQ ID NO: 84209):GMVVD (SEQ ID NO: 84204):RXGXS (SEQ ID NO: 84291), AAPASXX (SEQ ID NO: 84401):VPARL (SEQ ID NO: 84352):SNIT-AA¹⁷-QIM (SEQ ID NO: 84883):DAANNVV (SEQ ID NO: 84963):IGEMS (SEQ ID NO: 84209):DMVVE (SEQ ID NO: 84161):AXGXR (SEQ ID NO: 84148), STPPTXX (SEQ ID NO: 84431):VPTRL (SEQ ID NO: 84385):SNIT-AA¹⁷-QIM (SEQ ID NO: 84883):DSANNVV (SEQ ID NO: 84971):IGEMS (SEQ ID NO: 84209):DMVVE (SEQ ID NO: 84161):SXGXR (SEQ ID NO: 84305), HVPKPXX (SEQ ID NO: 84421):APTKL (SEQ ID NO: 84131):SNIT-AA¹⁷-QIM (SEQ ID NO: 84883):DDSSNVI (SEQ ID NO: 84965):IGEMS (SEQ ID NO: 84209):NMVVR (SEQ ID NO: 84275):SXGXH (SEQ ID NO: 84304), RVPSTXX (SEQ ID NO: 84428):APVKT (SEQ ID NO: 84144):SNIT-AA¹⁷-QIM (SEQ ID NO: 84883):DNGRVLL (SEQ ID NO: 84970):IGEMS (SEQ ID NO: 84209):MIVEE (SEQ ID NO: 84241):XGXL (SEQ ID NO: 84122), ASAAPXX (SEQ ID NO: 84402):VPQAL (SEQ ID NO: 84364):SNIT-AA¹⁷-QIM (SEQ ID NO: 84883):VGRKPKV (SEQ ID NO: 84981):IGEMS (SEQ ID NO: 84209):MIVRS (SEQ ID NO: 84243):XKXS (SEQ ID NO: 84124), ASASPXX (SEQ ID NO: 84403):VSQDL (SEQ ID NO: 84387):SNIT-AA¹⁷-QIM (SEQ ID NO: 84883):IGKTPKI (SEQ ID NO: 84978):IGEMS (SEQ ID NO: 84209):MIVKS (SEQ ID NO: 84242):XKXS (SEQ ID NO: 84124), ASASPXX (SEQ ID NO: 84403):VPQDL (SEQ ID NO: 84365):SNIT-AA¹⁷-QIM (SEQ ID NO: 84883):VGRTPKV (SEQ ID NO: 84982):IGEMS (SEQ ID NO: 84209):MVVKS (SEQ ID NO: 84256):XKXS (SEQ ID NO: 84124), NDEGLEX (SEQ ID NO: 84426):VPTGQ (SEQ ID NO: 84379):SNIT-AA¹⁷-QIM (SEQ ID NO: 84883):RIKPHQGQH (SEQ ID NO: 84980):IGEMS (SEQ ID NO: 84209):LEEHS (SEQ ID NO: 84217):QXEXR (SEQ ID NO: 84276), SSVKXQP (SEQ ID NO: 84430):SRVHH (SEQ ID NO: 84297):SNIT-AA¹⁷-QIM (SEQ ID NO: 84883):EYVRKKPKL (SEQ ID NO: 84974):IGEMS (SEQ ID NO: 84209):RLEEH (SEQ ID NO: 84279):LEXAXA (SEQ ID NO: 84400), RNVQXRP (SEQ ID NO: 84427):TQVQL (SEQ ID NO: 84340):SNIT-AA¹⁷-QIM (SEQ ID NO: 84883):EIVRKKPIF (SEQ ID NO: 84973):IGEMS (SEQ ID NO: 84209):TLEDH (SEQ ID NO: 84307):LAXKXE (SEQ ID NO: 84399), NDEGLEX (SEQ ID NO: 84426):VPTEE (SEQ ID NO: 84377):SNIT-AA¹⁷-QIM (SEQ ID NO: 84883):RIKPHQGQH (SEQ ID NO: 84980):LGEMS (SEQ ID NO: 84228):FLEHS (SEQ ID NO: 84183):KXEXR (SEQ ID NO: 84213), KIPKAXX (SEQ ID NO: 84424):VPTEL (SEQ ID NO: 84378):SNIT-AA¹⁷-QIM (SEQ ID NO: 84883):DENEKVV (SEQ ID NO: 84966):LGEMS (SEQ ID NO: 84228):DMVVE (SEQ ID NO: 84161):GXGXR (SEQ ID NO: 84208), GIPEPXX (SEQ ID NO: 84419):VPEKM (SEQ ID NO: 84360):SNIT-AA¹⁷-QIM (SEQ ID NO: 84883):DENKNVV (SEQ ID NO: 84967):LGEMS (SEQ ID NO: 84228):NMTVE (SEQ ID NO: 84267):SXAXR (SEQ ID NO: 84303), SIPKAXX (SEQ ID NO: 84429):VPTEL (SEQ ID NO: 84378):SNIT-AA¹⁷-QIM (SEQ ID NO: 84883):DEYDKVV (SEQ ID NO: 84968):LGEMS (SEQ ID NO: 84228):EMVVE (SEQ ID NO: 84175):GXGXR (SEQ ID NO: 84208), HVTKPTX (SEQ ID NO: 84422):APTKL (SEQ ID NO: 84131):SNIT-AA¹⁷-QIM (SEQ ID NO: 84883):DDSSNVI (SEQ ID NO: 84965):LGEMS (SEQ ID NO: 84228):NMVVR (SEQ ID NO: 84275):SXGXH (SEQ ID NO: 84304), YVPKPXX (SEQ ID NO: 84433):APTKL (SEQ ID NO: 84131):SNIT-AA¹⁷-QIM (SEQ ID NO: 84883):DDSSNVI (SEQ ID NO: 84965):LGEMS (SEQ ID NO: 84228):NMVVR (SEQ ID NO: 84275):SXGXH (SEQ ID NO: 84304), TVPKPXX (SEQ ID NO: 84432):APTQL (SEQ ID NO: 84134):SNIT-AA¹⁷-QIM (SEQ ID NO: 84883):DDSSNVI (SEQ ID NO: 84965):LGEMS (SEQ ID NO: 84228):NMVVR (SEQ ID NO: 84275):AXGXH (SEQ ID NO: 84147), AVPKAXX (SEQ ID NO: 84404):APTKL (SEQ ID NO: 84131):SNIT-AA¹⁷-QIM (SEQ ID NO: 84883):DSSNNVI (SEQ ID NO: 84972):LGEMS (SEQ ID NO: 84228):NMVVK (SEQ ID NO: 84274):AXGXH (SEQ ID NO: 84147), KVGKAXX (SEQ ID NO: 84425):VPTKL (SEQ ID NO: 84381):SNIT-AA¹⁷-QIM (SEQ ID NO: 84883):DDMGVPT (SEQ ID NO: 84964):LGEMS (SEQ ID NO: 84228):EGMSVAE (SEQ ID NO: 84411):XGXR (SEQ ID NO: 84123), KASKAXX (SEQ ID NO: 84423):VPTKL (SEQ ID NO: 84381):SNIT-AA¹⁷-QIM (SEQ ID NO: 84883):DKGVVTY (SEQ ID NO: 84969):LGEMS (SEQ ID NO: 84228):GMAVS (SEQ ID NO: 84194):EXGXR (SEQ ID NO: 84179), GSAGPXX (SEQ ID NO: 84420):TPTKM (SEQ ID NO: 84327):SNIT-AA¹⁷-QIM (SEQ ID NO: 84883):NDKQQII (SEQ ID NO: 84979):LGEMS (SEQ ID NO: 84228):GMVVD (SEQ ID NO: 84204):RXGXS (SEQ ID NO: 84291), AAPASXX (SEQ ID NO: 84401):VPARL (SEQ ID NO: 84352):SNIT-AA¹⁷-QIM (SEQ ID NO: 84883):DAANNVV (SEQ ID NO: 84963):LGEMS (SEQ ID NO: 84228):DMVVE (SEQ ID NO: 84161):AXGXR (SEQ ID NO: 84148), STPPTXX (SEQ ID NO: 84431):VPTRL (SEQ ID NO: 84385):SNIT-AA¹⁷-QIM (SEQ ID NO: 84883):DSANNVV (SEQ ID NO: 84971):LGEMS (SEQ ID NO: 84228):DMVVE (SEQ ID NO: 84161):SXGXR (SEQ ID NO: 84305), HVPKPXX (SEQ ID NO: 84421):APTKL (SEQ ID NO: 84131):SNIT-AA¹⁷-QIM (SEQ ID NO: 84883):DDSSNVI (SEQ ID NO: 84965):LGEMS (SEQ ID NO: 84228):NMVVR (SEQ ID NO: 84275):SXGXH (SEQ ID NO: 84304), RVPSTXX (SEQ ID NO: 84428):APVKT (SEQ ID NO: 84144):SNIT-AA¹⁷-QIM (SEQ ID NO: 84883):DNGRVLL (SEQ ID NO: 84970):LGEMS (SEQ ID NO: 84228):MIVEE (SEQ ID NO: 84241):XGXL (SEQ ID NO: 84122), ASAAPXX (SEQ ID NO: 84402):VPQAL (SEQ ID NO: 84364):SNIT-AA¹⁷-QIM (SEQ ID NO: 84883):VGRKPKV (SEQ ID NO: 84981):LGEMS (SEQ ID NO: 84228):MIVRS (SEQ ID NO: 84243):XKXS (SEQ ID NO: 84124), ASASPXX (SEQ ID NO: 84403):VSQDL (SEQ ID NO: 84387):SNIT-AA¹⁷-QIM (SEQ ID NO: 84883):IGKTPKI (SEQ ID NO: 84978):LGEMS (SEQ ID NO: 84228):MIVKS (SEQ ID NO: 84242):XKXS (SEQ ID NO: 84124), ASASPXX (SEQ ID NO: 84403):VPQDL (SEQ ID NO: 84365):SNIT-AA¹⁷-QIM (SEQ ID NO: 84883):VGRTPKV (SEQ ID NO: 84982):LGEMS (SEQ ID NO: 84228):MVVKS (SEQ ID NO: 84256):XKXS (SEQ ID NO: 84124), NDEGLEX (SEQ ID NO: 84426):VPTEE (SEQ ID NO: 84377):SNIT-AA¹⁷-QIM (SEQ ID NO: 84883):RIKPHQGQH (SEQ ID NO: 84980):LGEMS (SEQ ID NO: 84228):FLQHN (SEQ ID NO: 84184):KXEXR (SEQ ID NO: 84213), SSVKXQP (SEQ ID NO: 84430):SRVHH (SEQ ID NO: 84297):SNIT-AA¹⁷-QIM (SEQ ID NO: 84883):EYVRKKPKL (SEQ ID NO: 84974):LGEMS (SEQ ID NO: 84228):RLEEH (SEQ ID NO: 84279):LEXAXA (SEQ ID NO: 84400), RNVQXRP (SEQ ID NO: 84427):TQVQL (SEQ ID NO: 84340):SNIT-AA¹⁷-QIM (SEQ ID NO: 84883):EIVRKKPIF (SEQ ID NO: 84973):LGEMS (SEQ ID NO: 84228):TLEDH (SEQ ID NO: 84307):LAXKXE (SEQ ID NO: 84399), RNVQXRP (SEQ ID NO: 84427):SRVQL (SEQ ID NO: 84301):RSVK-AA¹⁷-AKV (SEQ ID NO: 84880):EIVRKKPIF (SEQ ID NO: 84973):KEVQV (SEQ ID NO: 84210):TLEEH (SEQ ID NO: 84308):LAXKXE (SEQ ID NO: 84399), KIPKAXX (SEQ ID NO: 84424):VPTEL (SEQ ID NO: 84378):RSVK-AA¹⁷-AKV (SEQ ID NO: 84880):DENEKVV (SEQ ID NO: 84966):KEVQV (SEQ ID NO: 84210):DMVVE (SEQ ID NO: 84161):GXGXR (SEQ ID NO: 84208), GIPEPXX (SEQ ID NO: 84419):VPEKM (SEQ ID NO: 84360):RSVK-AA¹⁷-AKV (SEQ ID NO: 84880):DENKNVV (SEQ ID NO: 84967):KEVQV (SEQ ID NO: 84210):NMTVE (SEQ ID NO: 84267):SXAXR (SEQ ID NO: 84303), SIPKAXX (SEQ ID NO: 84429):VPTEL (SEQ ID NO: 84378):RSVK-AA¹⁷-AKV (SEQ ID NO: 84880):DEYDKVV (SEQ ID NO: 84968):KEVQV (SEQ ID NO: 84210):EMVVE (SEQ ID NO: 84175):GXGXR (SEQ ID NO: 84208), HVTKPTX (SEQ ID NO: 84422):APTKL (SEQ ID NO: 84131):RSVK-AA¹⁷-AKV (SEQ ID NO: 84880):DDSSNVI (SEQ ID NO: 84965):KEVQV (SEQ ID NO: 84210):NMVVR (SEQ ID NO: 84275):SXGXH (SEQ ID NO: 84304), YVPKPXX (SEQ ID NO: 84433):APTKL (SEQ ID NO: 84131):RSVK-AA¹⁷-AKV (SEQ ID NO: 84880):DDSSNVI (SEQ ID NO: 84965):KEVQV (SEQ ID NO: 84210):NMVVR (SEQ ID NO: 84275):SXGXH (SEQ ID NO: 84304), TVPKPXX (SEQ ID NO: 84432):APTQL (SEQ ID NO: 84134):RSVK-AA¹⁷-AKV (SEQ ID NO: 84880):DDSSNVI (SEQ ID NO: 84965):KEVQV (SEQ ID NO: 84210):NMVVR (SEQ ID NO: 84275):AXGXH (SEQ ID NO: 84147), AVPKAXX (SEQ ID NO: 84404):APTKL (SEQ ID NO: 84131):RSVK-AA¹⁷-AKV (SEQ ID NO: 84880):DSSNNVI (SEQ ID NO: 84972):KEVQV (SEQ ID NO: 84210):NMVVK (SEQ ID NO: 84274):AXGXH (SEQ ID NO: 84147), KVGKAXX (SEQ ID NO: 84425):VPTKL (SEQ ID NO: 84381):RSVK-AA¹⁷-AKV (SEQ ID NO: 84880):DDMGVPT (SEQ ID NO: 84964):KEVQV (SEQ ID NO: 84210):EGMSVAE (SEQ ID NO: 84411):XGXR (SEQ ID NO: 84123), KASKAXX (SEQ ID NO: 84423):VPTKL (SEQ ID NO: 84381):RSVK-AA¹⁷-AKV (SEQ ID NO: 84880):DKGVVTY (SEQ ID NO: 84969):KEVQV (SEQ ID NO: 84210):GMAVS (SEQ ID NO: 84194):EXGXR (SEQ ID NO: 84179), GSAGPXX (SEQ ID NO: 84420):TPTKM (SEQ ID NO: 84327):RSVK-AA¹⁷-AKV (SEQ ID NO: 84880):NDKQQII (SEQ ID NO: 84979):KEVQV (SEQ ID NO: 84210):GMVVD (SEQ ID NO: 84204):RXGXS (SEQ ID NO: 84291), AAPASXX (SEQ ID NO: 84401):VPARL (SEQ ID NO: 84352):RSVK-AA¹⁷-AKV (SEQ ID NO: 84880):DAANNVV (SEQ ID NO: 84963):KEVQV (SEQ ID NO: 84210):DMVVE (SEQ ID NO: 84161):AXGXR (SEQ ID NO: 84148), STPPTXX (SEQ ID NO: 84431):VPTRL (SEQ ID NO: 84385):RSVK-AA¹⁷-AKV (SEQ ID NO: 84880):DSANNVV (SEQ ID NO: 84971):KEVQV (SEQ ID NO: 84210):DMVVE (SEQ ID NO: 84161):SXGXR (SEQ ID NO: 84305), HVPKPXX (SEQ ID NO: 84421):APTKL (SEQ ID NO: 84131):RSVK-AA¹⁷-AKV (SEQ ID NO: 84880):DDSSNVI (SEQ ID NO: 84965):KEVQV (SEQ ID NO: 84210):NMVVR (SEQ ID NO: 84275):SXGXH (SEQ ID NO: 84304), RVPSTXX (SEQ ID NO: 84428):APVKT (SEQ ID NO: 84144):RSVK-AA¹⁷-AKV (SEQ ID NO: 84880):DNGRVLL (SEQ ID NO: 84970):KEVQV (SEQ ID NO: 84210):MIVEE (SEQ ID NO: 84241):XGXL (SEQ ID NO: 84122), ASAAPXX (SEQ ID NO: 84402):VPQAL (SEQ ID NO: 84364):RSVK-AA¹⁷-AKV (SEQ ID NO: 84880):VGRKPKV (SEQ ID NO: 84981):KEVQV (SEQ ID NO: 84210):MIVRS (SEQ ID NO: 84243):XKXS (SEQ ID NO: 84124), ASASPXX (SEQ ID NO: 84403):VSQDL (SEQ ID NO: 84387):RSVK-AA¹⁷-AKV (SEQ ID NO: 84880):IGKTPKI (SEQ ID NO: 84978):KEVQV (SEQ ID NO: 84210):MIVKS (SEQ ID NO: 84242):XKXS (SEQ ID NO: 84124), ASASPXX (SEQ ID NO: 84403):VPQDL (SEQ ID NO: 84365):RSVK-AA¹⁷-AKV (SEQ ID NO: 84880):VGRTPKV (SEQ ID NO: 84982):KEVQV (SEQ ID NO: 84210):MVVKS (SEQ ID NO: 84256):XKXS (SEQ ID NO: 84124), NDEGLEX (SEQ ID NO: 84426):VPTEE (SEQ ID NO: 84377):RSVK-AA¹⁷-AKV (SEQ ID NO: 84880):RIKPHQGQH (SEQ ID NO: 84980):KEVQV (SEQ ID NO: 84210):FLQHN (SEQ ID NO: 84184):KXEXR (SEQ ID NO: 84213), NDEGLEX (SEQ ID NO: 84426):VPTGQ (SEQ ID NO: 84379):RSVK-AA¹⁷-AKV (SEQ ID NO: 84880):RIKPHQGQH (SEQ ID NO: 84980):KEVQV (SEQ ID NO: 84210):LEEHS (SEQ ID NO: 84217):QXEXR (SEQ ID NO: 84276), RNVQXRP (SEQ ID NO: 84427):TQVQL (SEQ ID NO: 84340):RSVK-AA¹⁷-AKV (SEQ ID NO: 84880):EIVRKKPIF (SEQ ID NO: 84973):KEVQV (SEQ ID NO: 84210):TLEDH (SEQ ID NO: 84307):LAXKXE (SEQ ID NO: 84399), SSVKXQP (SEQ ID NO: 84430):TQVHH (SEQ ID NO: 84336):RPVQ-AA¹⁷-RKI (SEQ ID NO: 84879):EYVRKKPKL (SEQ ID NO: 84974):KKATV (SEQ ID NO: 84212):RLEDH (SEQ ID NO: 84278):LEXAXA (SEQ ID NO: 84400), KIPKAXX (SEQ ID NO: 84424):VPTEL (SEQ ID NO: 84378):RPVQ-AA¹⁷-RKI (SEQ ID NO: 84879):DENEKVV (SEQ ID NO: 84966):KKATV (SEQ ID NO: 84212):DMVVE (SEQ ID NO: 84161):GXGXR (SEQ ID NO: 84208), GIPEPXX (SEQ ID NO: 84419):VPEKM (SEQ ID NO: 84360):RPVQ-AA¹⁷-RKI (SEQ ID NO: 84879):DENKNVV (SEQ ID NO: 84967):KKATV (SEQ ID NO: 84212):NMTVE (SEQ ID NO: 84267):SXAXR (SEQ ID NO: 84303), SIPKAXX (SEQ ID NO: 84429):VPTEL (SEQ ID NO: 84378):RPVQ-AA¹⁷-RKI (SEQ ID NO: 84879):DEYDKVV (SEQ ID NO: 84968):KKATV (SEQ ID NO: 84212):EMVVE (SEQ ID NO: 84175):GXGXR (SEQ ID NO: 84208), HVTKPTX (SEQ ID NO: 84422):APTKL (SEQ ID NO: 84131):RPVQ-AA¹⁷-RKI (SEQ ID NO: 84879):DDSSNVI (SEQ ID NO: 84965):KKATV (SEQ ID NO: 84212):NMVVR (SEQ ID NO: 84275):SXGXH (SEQ ID NO: 84304), YVPKPXX (SEQ ID NO: 84433):APTKL (SEQ ID NO: 84131):RPVQ-AA¹⁷-RKI (SEQ ID NO: 84879):DDSSNVI (SEQ ID NO: 84965):KKATV (SEQ ID NO: 84212):NMVVR (SEQ ID NO: 84275):SXGXH (SEQ ID NO: 84304), TVPKPXX (SEQ ID NO: 84432):APTQL (SEQ ID NO: 84134):RPVQ-AA¹⁷-RKI (SEQ ID NO: 84879):DDSSNVI (SEQ ID NO: 84965):KKATV (SEQ ID NO: 84212):NMVVR (SEQ ID NO: 84275):AXGXH (SEQ ID NO: 84147), AVPKAXX (SEQ ID NO: 84404):APTKL (SEQ ID NO: 84131):RPVQ-AA¹⁷-RKI (SEQ ID NO: 84879):DSSNNVI (SEQ ID NO: 84972):KKATV (SEQ ID NO: 84212):NMVVK (SEQ ID NO: 84274):AXGXH (SEQ ID NO: 84147), KVGKAXX (SEQ ID NO: 84425):VPTKL (SEQ ID NO: 84381):RPVQ-AA¹⁷-RKI (SEQ ID NO: 84879):DDMGVPT (SEQ ID NO: 84964):KKATV (SEQ ID NO: 84212):EGMSVAE (SEQ ID NO: 84411):XGXR (SEQ ID NO: 84123), KASKAXX (SEQ ID NO: 84423):VPTKL (SEQ ID NO: 84381):RPVQ-AA¹⁷-RKI (SEQ ID NO: 84879):DKGVVTY (SEQ ID NO: 84969):KKATV (SEQ ID NO: 84212):GMAVS (SEQ ID NO: 84194):EXGXR (SEQ ID NO: 84179), GSAGPXX (SEQ ID NO: 84420):TPTKM (SEQ ID NO: 84327):RPVQ-AA¹⁷-RKI (SEQ ID NO: 84879):NDKQQII (SEQ ID NO: 84979):KKATV (SEQ ID NO: 84212):GMVVD (SEQ ID NO: 84204):RXGXS (SEQ ID NO: 84291), AAPASXX (SEQ ID NO: 84401):VPARL (SEQ ID NO: 84352):RPVQ-AA¹⁷-RKI (SEQ ID NO: 84879):DAANNVV (SEQ ID NO: 84963):KKATV (SEQ ID NO: 84212):DMVVE (SEQ ID NO: 84161):AXGXR (SEQ ID NO: 84148), STPPTXX (SEQ ID NO: 84431):VPTRL (SEQ ID NO: 84385):RPVQ-AA¹⁷-RKI (SEQ ID NO: 84879):DSANNVV (SEQ ID NO: 84971):KKATV (SEQ ID NO: 84212):DMVVE (SEQ ID NO: 84161):SXGXR (SEQ ID NO: 84305), HVPKPXX (SEQ ID NO: 84421):APTKL (SEQ ID NO: 84131):RPVQ-AA¹⁷-RKI (SEQ ID NO: 84879):DDSSNVI (SEQ ID NO: 84965):KKATV (SEQ ID NO: 84212):NMVVR (SEQ ID NO: 84275):SXGXH (SEQ ID NO: 84304), RVPSTXX (SEQ ID NO: 84428):APVKT (SEQ ID NO: 84144):RPVQ-AA¹⁷-RKI (SEQ ID NO: 84879):DNGRVLL (SEQ ID NO: 84970):KKATV (SEQ ID NO: 84212):MIVEE (SEQ ID NO: 84241):XGXL (SEQ ID NO: 84122), ASAAPXX (SEQ ID NO: 84402):VPQAL (SEQ ID NO: 84364):RPVQ-AA¹⁷-RKI (SEQ ID NO: 84879):VGRKPKV (SEQ ID NO: 84981):KKATV (SEQ ID NO: 84212):MIVRS (SEQ ID NO: 84243):XKXS (SEQ ID NO: 84124), ASASPXX (SEQ ID NO: 84403):VSQDL (SEQ ID NO: 84387):RPVQ-AA¹⁷-RKI (SEQ ID NO: 84879):IGKTPKI (SEQ ID NO: 84978):KKATV (SEQ ID NO: 84212):MIVKS (SEQ ID NO: 84242):XKXS (SEQ ID NO: 84124), ASASPXX (SEQ ID NO: 84403):VPQDL (SEQ ID NO: 84365):RPVQ-AA¹⁷-RKI (SEQ ID NO: 84879):VGRTPKV (SEQ ID NO: 84982):KKATV (SEQ ID NO: 84212):MVVKS (SEQ ID NO: 84256):XKXS (SEQ ID NO: 84124), NDEGLEX (SEQ ID NO: 84426):VPTEE (SEQ ID NO: 84377):RPVQ-AA¹⁷-RKI (SEQ ID NO: 84879):RIKPHQGQH (SEQ ID NO: 84980):KKATV (SEQ ID NO: 84212):FLQHN (SEQ ID NO: 84184):KXEXR (SEQ ID NO: 84213), NDEGLEX (SEQ ID NO: 84426):VPTGQ (SEQ ID NO: 84379):RPVQ-AA¹⁷-RKI (SEQ ID NO: 84879):RIKPHQGQH (SEQ ID NO: 84980):KKATV (SEQ ID NO: 84212):LEEHS (SEQ ID NO: 84217):QXEXR (SEQ ID NO: 84276) and SSVKXQP (SEQ ID NO: 84430):SRVHH (SEQ ID NO: 84297):RPVQ-AA¹⁷-RKI (SEQ ID NO: 84879):EYVRKKPKL (SEQ ID NO: 84974):KKATV (SEQ ID NO: 84212):RLEEH (SEQ ID NO: 84279):LEXAXA (SEQ ID NO: 84400); and wherein AA¹⁷ is selected from the group consisting of G, A, V, L, I, P, F, M, W, T and S (in particular is selected from the group consisting of M, I, L, V and T).

[0409] In one example, said GFR-binding compound is a synthetic molecule as defined herein in the definition section.

[0410] In one particular example, said GFR-binding compound is a synthetic peptide, or a variant or analog thereof, or a peptidomimetic.

[0411] In one most particular example, said GFR-binding compound is a synthetic peptide.

[0412] In one example, a length of said GFR-binding compound, in solution, such as in a physiologically acceptable solvent such as water or PBS, is comprised between about 6 and about 20 nm, preferably between about 6 and about 16 nm, as determined using the standard «3D» procedure described above.

[0413] In one particular example, said GFR-binding compounds may be any one or a plurality of peptides of SEQ ID NO: 1 to 2157 and 2242 to 84108.

### Linker

[0414] In one particular example, said LINKER has a Mw comprised between about 28 and about 2,000 Da. In one particular example, said LINKER has a Mw comprised between about 75 and about 2,000 Da. In one particular example, said LINKER has a Mw comprised between about 150 and about 2,000 Da. In one particular example, said LINKER has a Mw comprised between about 150 and about 1,500 Da. In one most particular example, said LINKER has a Mw comprised between about 300 and about 1,000 Da.

[0415] The chemical nature of said LINKER is not meant to be particularly limited and may be any organic molecule capable of covalently connecting two peptide fragments such as PEP(A) and PEP(B) or PEP(C)-PEP12 and PEP2-PEP(D) so long as LINKER provides sufficient spacing between the two elements connected therethrough for these two connected elements to provide or conserve the required tissue regeneration activity. LINKER may thus be a peptide, or variant, analog or peptidomimetic thereof, a polysaccharide, a polynucleotide, a saturated or unsaturated hydrocarbon chain, or a mixture thereof.

[0416] For example, in certain embodiments, LINKER is a peptide with 2 to 16 amino acids. In one particular example, LINKER is a peptide with 2 to 10 amino acids. In one particular example, LINKER is a peptide with 2 to 9 amino acids. In one most particular example, LINKER is a peptide with 5 to 9 amino acids.

[0417] Thus, in one particular example, said GFR-binding compound is a peptide, a variant or analog thereof as defined herein, with between 20 and 60 (in particular between 20 and 50, and more particularly, between 20 and 45) amino acids, of general formula (I); wherein one end of LINKER interacts covalently with one end of PEP(A); wherein another end of LINKER interacts covalently with one end of PEP(B); wherein PEP(A) comprises PEP1 or PEP12; wherein PEP(B) comprises PEP2; wherein LINKER is a peptide comprising 2 to 16 amino acids (in particular 2 to 10, 2 to 9, or 5 to 9 amino acids); and wherein the RMSD is 2.45 Å or less.

[0418] Thus, in one particular example, said GFR-binding compound is a peptide, a variant or analog thereof as defined herein, with (exclusively consisting of, or constituted of) between 25 and 60 (in particular between 25 and 50, and more particularly, between 25 and 45) amino acids, of general formula (II); wherein LINKER is a peptide comprising 2 to 16 amino acids (in particular 2 to 10, 2 to 9, or 5 to 9 amino acids); wherein PEP12 is a peptide with 8 amino acids of formula PEP1-AA¹⁷-PEP11 as already defined herein; wherein PEP1, PEP2, PEP11, PEP(C) and PEP(D) are as already defined herein; wherein AA¹³ and AA²¹ may be both N-terminal amino acids or both C-terminal amino acids; wherein AA²⁵ and AA²⁰ may be both N-terminal amino acids or both C-terminal amino acids; wherein one end of LINKER interacts covalently with one end of PEP12 via AA²⁰; wherein another end of LINKER interacts covalently with PEP2 via AA²¹; wherein one end of PEP(C) interacts covalently with PEP12 via AA¹³; wherein one end of PEP(D) interacts covalently with PEP2 via AA²⁵; and wherein the RMSD is 2.45 Å or less.

[0419] In certain embodiments, said GFR-binding compound is a peptidomimetic as defined herein, with (exclusively consisting of, or constituted of) between 25 and 60 (in particular between 25 and 50, and more particularly, between 25 and 45) amino acids, of general formula (II); wherein LINKER is not a peptide but may comprise amino acids or peptides in covalent or non-covalent (preferably covalent) association with other groups or residues other than amino acids or peptides.

[0420] In one particular example, LINKER comprises (or is) a peptide of general formula (V):

*AA²⁰¹_AA²⁰²_AA²⁰³_AA²⁰⁴_AA²⁰⁵_AA²⁰⁶_AA²⁰⁷_AA²⁰⁸_AA²⁰⁹** (V)

wherein said peptide of formula (III) may be selected from the group consisting of *AA^{III}-AA^{I}-AA¹-AA^{II}-AA^{VII}-AA^{XII}-AA^{XII}-AA^{XII}-AA^{XIII} (SEQ ID NO: 84955)**, *AA^{III}-AA^{I}-AA^{VI}-AA^{II}-AA^{VII}_AA^{XII}-AA^{XII}-AA^{XIII}-AA^{XIII} (SEQ ID NO: 84958)**, *AA^{III}-AA^{I}-AA^{I}-AA^{II}-AA^{II}-AA^{XII}-AA^{XII}-AA^{XIII}-AA^{XIII} (SEQ ID NO: 84954)**, *AA^{III}-AA^{I}-AA^{II}-AA^{II}-AA^{VII}-AA^{XII}-AA^{XII}-AA^{XII}-AA^{XIII} (SEQ ID NO: 84956)**, *AA^{III}-AA^{I}-AA^{II}-AA^{IV}-AA^{IV}-AA^{XII}-AA^{XII}-AA^{XIII}-AA^{XIII} (SEQ ID NO: 84957)**,*AA^{II}-AA^{I}-AA^{II}-AA^{II}-AA^{II}-AA^{XII}-AA^{XII}-AA^{XIII}-AA^{XIII} (SEQ ID NO: 84953)**, *AA^{III}-AA^{III}-AA^{II}-AA^{VII}-AA^{II}-AA^{XII}-AA^{XII}-AA^{XIII}-AA^{XIII} (SEQ ID NO: 84959)**, *AA^{III}-AA^{I}-AA^{I}-AA^{II}-AA^{II}-AA^{XII}-AA^{XII}-AA^{XIII}-AA^{XIII} (SEQ ID NO: 84954)**, *AA^{V}-AA^{V}-AA^{VII}-AA^{VII}-AA^{XII}-AA^{XII}-AA^{XIII}-AA^{XIII} (SEQ ID NO: 84961)**, *AA^{VIII}-AA^{V}-AA^{VII}-AA^{II}-AA^{XII}-AA^{XII}-AA^{XIII}-AA^{XIII} (SEQ ID NO: 84962)** and *AA^{V}-AA^{V}-AA^{VII}-AA^{II}-AA^{XII}-AA^{XII}-AA^{XIII}-AA^{XIII} (SEQ ID NO: 84960)**; wherein AA^{I} is any amino acid as defined herein, AA^{II} is any polar amino acid as defined herein, AA^{III} is any acidic amino acid as defined herein, AA^{IV} is any aliphatic amino acid as defined herein, AA^{V} is any apolar amino acid as defined herein, AA^{VI} is any aromatic amino acid as defined herein, AA^{VII} is any basic amino acid as defined herein, AA^{VIII} is L or I as defined herein, AA^{XII} is an amino acid selected from the group consisting of G, A, V, L, I, P, M, K, R, H, Y and E, wherein AA^{XIII} is absent, AA^{II} or AA^{VII}, preferably absent; and wherein any one of the fragment AA²⁰¹, AA²⁰¹-AA²⁰², AA²⁰¹-AA²⁰²-AA²⁰³, AA²⁰¹-AA²⁰²-AA²⁰³-AA²⁰⁴, AA²⁰¹-AA²⁰²-AA²⁰³-AA²⁰⁴-AA²⁰⁵, AA²⁰¹-AA²⁰²-AA²⁰³-AA²⁰⁴-AA²⁰⁵-AA²⁰⁶, AA²⁰¹-AA²⁰²-AA²⁰³-AA²⁰⁴-AA²⁰⁵-AA²⁰⁶-AA²⁰⁷, AA²⁰³-AA²⁰⁴-AA²⁰⁵-AA²⁰⁶-AA²⁰⁷-AA²⁰⁸-AA²⁰⁹, AA²⁰⁴-AA²⁰⁵-AA²⁰⁶-AA²⁰⁷-AA²⁰⁸-AA²⁰⁹, AA²⁰⁵-AA²⁰⁶-AA²⁰⁷-AA²⁰⁸-AA²⁰⁹, AA²⁰⁶-AA²⁰⁷-AA²⁰⁸-AA²⁰⁹, AA²⁰⁷-AA²⁰⁸-AA²⁰⁹, AA²⁰⁸-AA²⁰⁹ or AA²⁰⁹, may be absent. In the peptides of formula (III), any one of the amino acid labelled “*” or the amino acid labelled “**” is an N-terminal amino acid and the other is a C-terminal amino acid.

[0421] For instance, in the peptide of formula *AA^{III}-AA^{I}-AA^{I}-AA^{II}-AA^{VII}-AA^{XII}-AA^{XII}-AA^{XIII}-AA^{XIII} (SEQ ID NO: 84955)** (V-1), AA^{III} occupies position AA²⁰¹, *AA^{I} occupies position AA²⁰², AA^{I} occupies position AA²⁰³, AA^{II} occupies position AA²⁰⁴, AA^{VII} occupies position AA²⁰⁵, AA^{XII} occupies position AA²⁰⁶, AA^{XII} occupies position AA²⁰⁷, AA^{XIII} occupies position AA²⁰⁸ and AA^{XIII}** occupies position AA²⁰⁹.

[0422] Likewise, in the peptide of formula*AA^{V}-AA^{V}-AA^{VII}-AA^{II}-AA^{XII}-AA^{XII}-AA^{XIII}-AA^{XIII} (SEQ ID NO: 84960)** (V-1) AA^{V} occupies position AA²⁰¹, AA^{V} occupies position AA²⁰², AA^{VII} occupies position AA²⁰³, AA^{II} occupies position AA²⁰⁴, AA^{XII} occupies position AA²⁰⁵, AA^{XII} occupies position AA²⁰⁸, AA^{XIII} occupies position AA²⁰⁷, AA^{XIII} occupies position AA²⁰⁸ and position AA²⁰⁹ is vacant, thus AA²⁰⁸ would be the amino acid which interacts, in certain embodiments, with PEP2 via AA²¹.

[0423] In one example, LINKER may thus be any one of the following peptides:

[0424] *AA²⁰¹-AA²⁰²-AA²⁰³-AA²⁰⁴-AA²⁰⁵-AA²⁰⁶-AA²⁰⁷-AA²⁰⁸** (V-1); *AA²⁰¹-AA²⁰²-AA²⁰³-AA²⁰⁴-AA²⁰⁵-AA²⁰⁶-AA²⁰⁷** (V-2); *AA²⁰¹-AA²⁰²-AA²⁰³-AA²⁰⁴-AA²⁰⁵-AA²⁰⁶** (V-3); *AA²⁰¹-AA²⁰²-AA²⁰³-AA²⁰⁴-AA²⁰⁵** (V-4); *AA²⁰¹-AA²⁰²-AA²⁰³-AA²⁰⁴** (V-5); *AA²⁰¹-AA²⁰²-AA²⁰³** (V-6); *AA²⁰¹-AA²⁰²** (V-7); *AA²⁰²-AA²⁰³-AA²⁰⁴-AA²⁰⁵-AA²⁰⁶-AA²⁰⁷-AA²⁰⁸-AA²⁰⁹** (V-8); *AA²⁰³-AA²⁰⁴-AA²⁰⁵-AA²⁰⁶-AA²⁰⁷-AA²⁰⁸-AA²⁰⁹** (V-9); *AA²⁰⁴-AA²⁰⁵-AA²⁰⁶-AA²⁰⁷-AA²⁰⁸-AA²⁰⁹** (V-10); *AA²⁰⁵-AA²⁰⁶-AA²⁰⁷-AA²⁰⁸-AA²⁰⁹** (V-11); *AA²⁰⁶-AA²⁰⁷-AA²⁰⁸-AA²⁰⁹** (V-12); *AA²⁰⁷-AA²⁰⁸-AA²⁰⁹** (V-13); *AA²⁰⁸-AA²⁰⁹** (V-14); wherein, for instance, said peptide of formulae (V-1) may thus be selected from the group consisting of *AA^{III}-AA^{I}-AA^{I}-AA^{II}-AA^{VII}-AA^{XII}-AA^{XII}-AA^{XIII}**, *AA^{III}-AA^{I}-AA^{VI}-AA^{II}-AA^{VII}-AA^{XII}-AA^{XII}-AA^{XIII}**, *AA^{III}-AA^{I}-AA^{I}-AA^{II}-AA^{II}-AA^{XII}-AA^{XII}-AA^{XIII}**, *AA^{III}-AA^{I}-AA^{II}-AA^{II}-AA^{VII}-AA^{XII}-AA^{XII}-AA^{XIII}**, *AA^{III}-AA^{I}-AA^{II}-AA^{IV}-AA^{IV}-AA^{XII}-AA^{XII}-AA^{XIII}**, *AA^{II}-AA^{I}-AA^{II}-AA^{II}-AA^{II}-AA^{XII}-AA^{XII}-AA^{XIII}**, *AA^{III}-AA^{III}-AA^{II}-AA^{VII}-AA^{II}-AA^{XII}-AA^{XII}-AA^{XIII}**, *AA^{III}-AA^{I}-AA^{I}-AA^{II}-AA^{II}-AA^{XII}-AA^{XII}-AA^{XIII}**, *AA^{V}-AA^{V}-AA^{VII}-AA^{VII}-AA^{XII}-AA^{XII}-AA^{XIII}**, *AA^{VIII}-AA^{V}-AA^{VII}-AA^{II}-AA^{XII}-AA^{XII}-AA^{XIII}** and *AA^{V}-AA^{V}-AA^{VII}-AA^{II}-AA^{XII}-AA^{XII}-AA^{XIII}**.

[0425] In one particular example, LINKER comprises a peptide of formula (V), (V-2) or (V-4).

[0426] In one example, LINKER comprises (or is) a poly-(aliphatic amino acid) peptide such as poly-alanine peptide (A)ₙ, or a poly-glycine (G)ₙ, n being an integer comprised between 2 and 16, preferably between 2 to 9, such as A-A-A-A-A-A-A-A-A (SEQ ID NO: 84952), A-A-A-A-A-A-A (SEQ ID NO: 84951), A-A-A-A-A (SEQ ID NO: 84950), G-G-G-G-G-G-G-G-G (SEQ ID NO: 84977), G-G-G-G-G-G-G (SEQ ID NO: 84976) or G-G-G-G-G (SEQ ID NO: 84975).

[0427] In one particular example, LINKER comprises (or is) a peptide of general formulae (V) to (V-14), more particularly (V), (V-2) or (V-4), or a poly-(aliphatic amino acid)ₙ peptide as defined herein.

[0428] For example, in certain embodiments, LINKER is a polysaccharide comprising 2 to 16 saccharides. In one particular example, LINKER is a polysaccharide comprising 2 to 10 saccharides. In one particular example, LINKER is a polysaccharide comprising 2 to 9 saccharides. In one most particular example, LINKER is a polysaccharide comprising 5 to 9 saccharides. Suitable monosaccharides include, but are not limited to, glucose (dextrose), fructose (levulose) and galactose. Monosaccharides are the building blocks of disaccharides (such as sucrose) and polysaccharides (such as celluloses, chitosans, ulvanes and starches). Further, each carbon atom that supports a hydroxyl group (except for the first and last) is chiral, giving rise to a number of isomeric forms all with the same chemical formula. A large number of biologically important modified monosaccharides exists e.g. amino sugars such as Galactosamine, Glucosamine, Sialic acid, N-Acetylglucosamine, and sulfosugars such as Sulfoquinovose. All of these monosaccharide and polysaccharide derivatives may be used as LINKER in the present invention.

[0429] Thus, in one particular example, said GFR-binding compound is a hydride peptide/polysaccharide peptidomimetic of between 2,000 and 8,000 Da and of general formula (I) defined herein; wherein one end of LINKER interacts covalently with one end of PEP(A); wherein another end of LINKER interacts covalently with one end of PEP(B); wherein PEP(A) comprises PEP1 or PEP12; wherein PEP(B) comprises PEP2; wherein LINKER is a polysaccharide comprising 2 to 16 saccharides (in particular 2 to 10, 2 to 9, or 5 to 9 saccharides); and wherein the RMSD is 2.45 Å or less.

[0430] Thus, in one particular example, said GFR-binding compound is a hydride peptide/polysaccharide peptidomimetic of between 2,000 and 8,000 Da and of general formula (II); wherein LINKER is a polysaccharide comprising 2 to 16 saccharides (in particular 2 to 10, 2 to 9, or 5 to 9 saccharides); wherein PEP12 is a peptide with 8 amino acids of formula PEP1-AA¹⁷-PEP11 as already defined herein; wherein PEP1, PEP2, PEP11, PEP(C) and PEP(D) are as already defined herein; wherein AA¹³ and AA²¹ may be both N-terminal amino acids or both C-terminal amino acids; wherein AA²⁵ and AA²⁰ may be both N-terminal amino acids or both C-terminal amino acids; wherein one end of LINKER interacts covalently with one end of PEP12 via AA²⁰; wherein another end of LINKER interacts covalently with PEP2 via AA²¹; wherein one end of PEP(C) interacts covalently with PEP12 via AA¹³; wherein one end of PEP(D) interacts covalently with PEP2 via AA²⁵; and wherein the RMSD is 2.45 Å or less.

[0431] For example, in certain embodiments, LINKER is a polynucleotide comprising 2 to 16 nucleotides. In one particular example, LINKER is a polynucleotide comprising 2 to 10 nucleotides. In one particular example, LINKER is a polynucleotide comprising 2 to 9 nucleotides. In one most particular example, LINKER is a polynucleotide comprising 5 to 9 nucleotides. Suitable nucleotides include adenine (A), guanine (G), thymine (T), cytosine (C), uracil (U) and derivatives, analogues and/or mimetic thereof.

[0432] Thus, in one particular example, said GFR-binding compound is a hydride peptide/polynucleotide peptidomimetic of between 2,000 and 8,000 Da and of general formula (I) defined herein; wherein one end of LINKER interacts covalently with one end of PEP(A); wherein another end of LINKER interacts covalently with one end of PEP(B); wherein PEP(A) comprises PEP1 or PEP12; wherein PEP(B) comprises PEP2; wherein LINKER is a polynucleotide comprising 2 to 16 nucleotides (in particular 2 to 10, 2 to 9, or 5 to 9 nucleotides); and wherein the RMSD is 2.45 Å or less.

[0433] Thus, in one particular example, said GFR-binding compound is a hydride peptide/polynucleotide peptidomimetic of between 2,000 and 8,000 Da and of general formula (II); wherein LINKER is a polynucleotide comprising 2 to 16 nucleotides (in particular 2 to 10, 2 to 9, or 5 to 9 nucleotides); wherein PEP12 is a peptide with 8 amino acids of formula PEP1-AA¹⁷-PEP11 as already defined herein; wherein PEP1, PEP2, PEP11, PEP(C) and PEP(D) are as already defined herein; wherein AA¹³ and AA²¹ may be both N-terminal amino acids or both C-terminal amino acids; wherein AA²⁵ and AA²⁰ may be both N-terminal amino acids or both C-terminal amino acids; wherein one end of LINKER interacts covalently with one end of PEP12 via AA²⁰; wherein another end of LINKER interacts covalently with PEP2 via AA²¹; wherein one end of PEP(C) interacts covalently with PEP12 via AA¹³; wherein one end of PEP(D) interacts covalently with PEP2 via AA²⁵; and wherein the RMSD is 2.45 Å or less.

[0434] For example, in certain embodiments, LINKER is a saturated or unsaturated hydrocarbon chain comprising between 1 and 22, between 1 and 16, between 1 and 12, between 1 and 8 or between 1 and 6 carbon atoms, wherein said hydrocarbon chain is optionally interrupted by one or more non-carbon atom, preferably between 1 and 16, between 1 and 12 or between 1 and 8 non-carbon atoms as appropriate, wherein said non-carbon atom is selected from the group consisting of —O—, —S—, —C(═O), —SO₂—, —N(Ri)(C═O)—, and —N(Ri)-, wherein Ri is selected from the group consisting of a hydrogen atom, a C1-C6 alkyl group and an aryl group, and wherein said hydrocarbon chain is non-substituted or substituted by at least one radical selected from the group consisting of a halogen, a monosaccharide, a poly(1-6)saccharide, a nucleotide, a poly(1-6)nucleotide, a C1-C10 alkyl group and an aryl group.

[0435] Thus, in one particular example, said GFR-binding compound is a hydride peptide/hydrocarbon chain peptidomimetic of between 2,000 and 8,000 Da and of general formula (I) defined herein; wherein one end of LINKER interacts covalently with one end of PEP(A); wherein another end of LINKER interacts covalently with one end of PEP(B); wherein PEP(A) comprises PEP1 or PEP12; wherein PEP(B) comprises PEP2; wherein LINKER is a saturated or unsaturated hydrocarbon chain comprising between 1 and 22 as defined herein; and wherein the RMSD is 2.45 Å or less.

[0436] Thus, in one particular example, said GFR-binding compound is a hydride peptide/hydrocarbon chain peptidomimetic of between 2,000 and 8,000 Da and of general formula (II); wherein LINKER is a saturated or unsaturated hydrocarbon chain comprising between 1 and 22 as defined herein; wherein PEP12 is a peptide with 8 amino acids of formula PEP1-AA¹⁷-PEP11 as already defined herein; wherein PEP1, PEP2, PEP11, PEP(C) and PEP(D) are as already defined herein; wherein AA¹³ and AA²¹ may be both N-terminal amino acids or both C-terminal amino acids; wherein AA²⁵ and AA²⁰ may be both N-terminal amino acids or both C-terminal amino acids; wherein one end of LINKER interacts covalently with one end of PEP12 via AA²⁰; wherein another end of LINKER interacts covalently with PEP2 via AA²¹; wherein one end of PEP(C) interacts covalently with PEP12 via AA¹³; wherein one end of PEP(D) interacts covalently with PEP2 via AA²⁵; and wherein the RMSD is 2.45 Å or less.

[0437] In one example, LINKER is a saturated or unsaturated hydrocarbon chain of at most 10 nanometres (nm) in length, preferably at most 8 nm, 6 nm, 4 nm or 2 nm as determined using the standard «2D» procedure described above.

[0438] In one example, such saturated or unsaturated hydrocarbon chains include polyethylene glycol (PEG) or any one of its derivatives.

[0439] More particularly, LINKER is a pentapeptide (five amino acids). More particularly, LINKER is a hexapeptide (six amino acids). More particularly, LINKER is a heptapeptide (seven amino acids). More particularly, LINKER is an octapeptide (eight amino acids). More particularly, LINKER is a nonapeptide (nine amino acids).

[0440] In one particular example, LINKER is a peptide selected from the group consisting of DENEKVV (SEQ ID NO: 84966), DENKNVV (SEQ ID NO: 84967), DEYDKVV (SEQ ID NO: 84968), DDSSNVI (SEQ ID NO: 84965), DSSNNVI (SEQ ID NO: 84972), DDMGVPT (SEQ ID NO: 84964), DKGVVTY (SEQ ID NO: 84969), NDKQQII (SEQ ID NO: 84979), DAANNVV (SEQ ID NO: 84963), DSANNVV (SEQ ID NO: 84971), DDSSNVI (SEQ ID NO: 84965), DNGRVLL (SEQ ID NO: 84970), VGRKPKV (SEQ ID NO: 84981), IGKTPKI (SEQ ID NO: 84978), VGRTPKV (SEQ ID NO: 84982), RIKPHQGQH (SEQ ID NO: 84980), EYVRKKPKL (SEQ ID NO: 84974), EIVRKKPIF (SEQ ID NO: 84973), EYVRKKP, EIVRKKP, polyalanine (A₁₋₉) and polyglycine (G₁₋₉).

[0441] For example, in certain embodiments, the covalent interaction between an end (i.e. one end or the other end) of LINKER or PEP(A) or PEP12 and an N-terminal amino acid, such as AA¹³ or AA²¹, may be created through the chemical reaction between the free amine moiety of the N-terminal amino acid (—NH₂ or —NH₃X, X generally being a halide anion selected from the group consisting of F⁻, Cl⁻ and Br⁻), typically acting as a nucleophile, and an electrophile moiety of LINKER. Such an electrophile moiety includes, but is not limited to, alkyl halides (—CR₂—X), alcohols (—CR₂—OH), acid chlorides (—C(═O)X), esters, (—C(═O)OR), phosphate (—OP(OR)₃), phosphinate (—OP(OR)R₂), phosphonates (—OP(OR)₂R), phosphonite (—P(OR)₂R) or sulfonic esters (—SO₂OR). More particularly, this covalent interaction is an amide bond (in particular a peptide bond) formed through conventional peptide synthesis using conventional coupling reagents as already defined herein.

[0442] For example, in certain embodiments, the covalent interaction between an end (i.e. one end or the other end) of LINKER or PEP(B) or PEP2 and a C-terminal amino acid such as AA²⁵ or AA²⁰, may be created through the chemical reaction between the free carboxylic acid moiety of the C-terminal amino acid (—CO₂H or —CO₂X, X generally being an inorganic cation such as alkaline cations (e.g. Li⁺, Na⁺ or K⁺) or an organic cation such as ammonium cations, typically acting as an electrophile, and a nucleophile moiety of LINKER. Such a nucleophile moiety includes, but is not limited to, alcohols (—OH), amines (—NH₂), phosphines (—PR₃), thiols (—SH). More particularly, this covalent interaction is a peptide bond formed through conventional peptide synthesis using conventional coupling reagents as already defined herein.

### Bone

[0443] Certain embodiments of the invention are particularly useful for inducing differentiation of mensenchymal or progenitor stem cells from the bone cell lineage, regenerating bone tissues, repairing bone and protecting from osteoporosis.

[0444] In certain embodiments useful for inducing differentiation of mensenchymal or progenitor stem cells from the bone cell lineage, regenerating bone tissues, repairing bone and protecting from osteoporosis, PEP1 is selected from the group consisting of SAIS (SEQ ID NO: 84116), NAIS (SEQ ID NO: 84113), SATS (SEQ ID NO: 84117) and SPIS (SEQ ID NO: 84120).

[0445] In certain embodiments useful for inducing differentiation of mensenchymal or progenitor stem cells from the bone cell lineage, regenerating bone tissues, repairing bone and protecting from osteoporosis, PEP2 is selected from the group consisting of LKNYQ (SEQ ID NO: 84230), LKKYR (SEQ ID NO: 84229), LRKHR (SEQ ID NO: 84233) and LKYHY (SEQ ID NO: 84232).

[0446] In certain embodiments useful for inducing differentiation of mensenchymal or progenitor stem cells from the bone cell lineage, regenerating bone tissues, repairing bone and protecting from osteoporosis, PEP3 is selected from the group consisting of VPT, APT, VPQ, VSQ and TQV.

[0447] In certain embodiments useful for inducing differentiation of mensenchymal or progenitor stem cells from the bone cell lineage, regenerating bone tissues, repairing bone and protecting from osteoporosis, PEP4 is selected from the group consisting of VVE, VVR, VVK, VAE, VRS, VKS and EDH.

[0448] In certain embodiments useful for inducing differentiation of mensenchymal or progenitor stem cells from the bone cell lineage, regenerating bone tissues, repairing bone and protecting from osteoporosis, PEP5 is a peptide of general formula PEP3-AA¹¹-AA¹²; wherein PEP3 is selected from the group consisting of VPT, APT, VPQ, VSQ and TQV; wherein AA¹¹ is selected from the group consisting of E, K, Q, R, A, D, G and H, in particular E, K, Q, A and D; wherein AA¹² is selected from the group consisting of L, M, T, E, Q and H, in particular L. In one particular example, PEP5 is selected from the group consisting of VPTEL (SEQ ID NO: 84378), APTKL (SEQ ID NO: 84131), APTQL (SEQ ID NO: 84134), VPTKL (SEQ ID NO: 84381), VPQAL (SEQ ID NO: 84364), VSQDL (SEQ ID NO: 84387), VPQDL (SEQ ID NO: 84365) and TQVQL (SEQ ID NO: 84340).

[0449] In certain embodiments useful for inducing differentiation of mensenchymal or progenitor stem cells from the bone cell lineage, regenerating bone tissues, repairing bone and protecting from osteoporosis, PEP6 is a peptide of general formula AA²⁶-AA²⁷-AA²⁸-AA²⁹-PEP4; wherein PEP4 is selected from the group consisting of VVE, VVR, VVK, VAE, VRS, VKS and EDH; wherein AA²⁶ is absent or selected from the group consisting of AA^{III} amino acids, preferably is absent or E; wherein AA²⁷ and AA²⁸ are independently selected from the group consisting of AA^{III} and AA^{V} amino acids, preferably AA²⁷ is selected from the group consisting of D, E, N, G, M and T, preferably AA²⁸ is selected from the group consisting of M, I, V and L; wherein AA²⁹ is absent or selected from the group consisting of AA^{II} amino acids, preferably absent or S. In one particular example, PEP6 is selected from the group consisting of DMVVE (SEQ ID NO: 84161), EMVVE (SEQ ID NO: 84175), NMVVR (SEQ ID NO: 84275), NMVVK (SEQ ID NO: 84274), EGMSVAE (SEQ ID NO: 84411), MIVRS (SEQ ID NO: 84243), MIVKS (SEQ ID NO: 84242), MVVKS (SEQ ID NO: 84256) and TLEDH (SEQ ID NO: 84307).

[0450] In certain embodiments useful for inducing differentiation of mensenchymal or progenitor stem cells from the bone cell lineage, regenerating bone tissues, repairing bone and protecting from osteoporosis, PEP7 is an amino acid or a peptide with between two and seven amino acids of general formula AA¹-AA²-AA³-AA⁴-AA⁵-AA⁶-AA⁷ (SEQ ID NO: 84948); wherein AA¹, AA², AA³, AA⁴, and AA⁵ are independently absent or AA^{I} as defined herein; wherein AA⁶ is absent or selected from the group consisting of S, T, C, E, Q, P and R, preferably C, S, T or R; wherein AA⁷ is absent or is selected from the group consisting of S, T, C, E, Q, P and R, preferably is selected from the group consisting of C, S and P; and wherein at least one of AA¹, AA², AA³, AA⁴, AA⁵, AA⁶ or AA⁷ is not absent. In one particular example, PEP7 is selected from the group consisting of KIPKAXX (SEQ ID NO: 84424), SIPKAXX (SEQ ID NO: 84429), HVTKPTX (SEQ ID NO: 84422), YVPKPXX (SEQ ID NO: 84433), TVPKPXX (SEQ ID NO: 84432), AVPKAXX (SEQ ID NO: 84404), KVGKAXX (SEQ ID NO: 84425), ASAAPXX (SEQ ID NO: 84402), ASASPXX (SEQ ID NO: 84403) and RNVQXRP (SEQ ID NO: 84427).

[0451] In certain embodiments useful for inducing differentiation of mensenchymal or progenitor stem cells from the bone cell lineage, regenerating bone tissues, repairing bone and protecting from osteoporosis, PEP8 is an amino acid or a peptide with between two and six amino acids of general formula AA³³-AA³⁴-AA³⁵-AA³⁶-AA³⁷-AA³⁸ (SEQ ID NO: 84949); wherein AA³³ is absent or is selected from the group consisting of AA^{I} amino acids at the exception of AA^{VI} amino acids; AA³⁴ is absent or is selected from the group consisting of AA^{III} and AA^{IV} amino acids; wherein AA³⁵ is absent or is selected from the group consisting of AA^{II} amino acids, preferably is S or C; wherein AA³⁶ is absent or is selected from the group consisting of AA^{III} and AA^{IV} amino acids; wherein AA³⁷ is absent or is selected from the group consisting of AA^{II} amino acids, preferably is S or C; wherein AA³⁸ is absent or is selected from the group consisting of AA^{I}; and wherein at least one of AA³³, AA³⁴, AA³⁵, AA³⁶, AA³⁷ or AA³⁸ is not absent. In one particular example, PEP8 is selected from the group consisting of GXGXR (SEQ ID NO: 84208), SXGXH (SEQ ID NO: 84304), AXGXH (SEQ ID NO: 84147), XGXR (SEQ ID NO: 84123), XKXS (SEQ ID NO: 84124) and LAXKXE (SEQ ID NO: 84399).

[0452] In certain embodiments useful for inducing differentiation of mensenchymal or progenitor stem cells from the bone cell lineage, regenerating bone tissues, repairing bone and protecting from osteoporosis, PEP9 is a peptide of general formula AA¹-AA²-AA³-AA⁴-AA⁵-AA⁶-AA⁷-PEP5; wherein PEP5 is a peptide of formula PEP3-AA¹¹-AA¹²; wherein PEP3 is selected from the group consisting of VPT, APT, VPQ, VSQ and TQV; wherein AA¹¹ is selected from the group consisting of E, K, Q, R, A, D, G and H, in particular E, K, Q, A and D; wherein AA¹² is selected from the group consisting of L, M, T, E, Q and H, in particular L; wherein AA¹, AA², AA³, AA⁴, and AA⁵ are independently absent or AA^{I} as defined herein; wherein AA⁶ is absent or selected from the group consisting of S, T, C, E, Q, P and R, preferably C, S, T or R; wherein AA⁷ is selected from the group consisting of S, T, C, E, Q, P and R, preferably is selected from the group consisting of C, S and P. In one particular example, PEP9 is selected from the group consisting of KIPKAXXVPTEL (SEQ ID NO: 84770), SIPKAXXVPTEL (SEQ ID NO: 84830), HVTKPTXAPTKL (SEQ ID NO: 84742), YVPKPXXAPTKL (SEQ ID NO: 84864), TVPKPXXAPTQL (SEQ ID NO: 84854), AVPKAXXAPTKL (SEQ ID NO: 84704), KVGKAXXVPTKL (SEQ ID NO: 84780), ASAAPXXVPQAL (SEQ ID NO: 84689), ASASPXXVSQDL (SEQ ID NO: 84701), ASASPXXVPQDL (SEQ ID NO: 84699) and RNVQXRPTQVQL (SEQ ID NO: 84806).

[0453] In certain embodiments useful for inducing differentiation of mensenchymal or progenitor stem cells from the bone cell lineage, regenerating bone tissues, repairing bone and protecting from osteoporosis, PEP10 is a peptide of general formula PEP6-AA³³-AA³⁴-AA³⁵-AA³⁶-AA³⁷-AA³⁸; wherein PEP6 is a peptide of formula AA²⁶-AA²⁷-AA²⁸-AA²⁹-PEP4; wherein PEP4 is selected from the group consisting of VVE, VVR, VVK, VAE, VRS, VKS and EDH; wherein AA²⁶ is absent or selected from the group consisting of AA^{III} amino acids, preferably E; wherein AA²⁷ and AA²⁸ are independently selected from the group consisting of AA^{III} and AA^{V} amino acids, preferably AA²⁷ is selected from the group consisting of D, E, N, G, M and T, preferably AA²⁸ is selected from the group consisting of M, I, V and L; wherein AA²⁹ is absent or selected from the group consisting of AA^{II} amino acids, preferably absent or S; wherein AA³³ is absent or is selected from the group consisting of AA^{I} amino acids at the exception of AA^{VI} amino acids; AA³⁴ is absent or is selected from the group consisting of AA^{III} and AA^{IV} amino acids; wherein AA³⁵ is absent or is selected from the group consisting of AA^{II} amino acids, preferably is S or C; wherein AA³⁶ is absent or is selected from the group consisting of AA^{III} and AA^{IV} amino acids; wherein AA³⁷ is absent or is selected from the group consisting of AA^{II} amino acids, preferably is S or C; wherein AA³⁸ is absent or is selected from the group consisting of AA^{I}. In one particular example, PEP10 is selected from the group consisting of DMVVEGXGXR (SEQ ID NO: 84510), EMVVEGXGXR (SEQ ID NO: 84529), NMVVRSXGXH (SEQ ID NO: 84629), NMVVRAXGXH (SEQ ID NO: 84627), NMVVKAXGXH (SEQ ID NO: 84624), EGMSVAEXGXR (SEQ ID NO: 84636), MIVRSXKXS (SEQ ID NO: 84453), MIVKSXKXS (SEQ ID NO: 84451), MVVKSXKXS (SEQ ID NO: 84470) and TLEDHLAXKXE (SEQ ID NO: 84659).

[0454] In certain embodiments useful for inducing differentiation of mensenchymal or progenitor stem cells from the bone cell lineage, regenerating bone tissues, repairing bone and protecting from osteoporosis, PEP12 is a peptide of general formula PEP1-AA¹⁷-PEP11; wherein AA¹⁷ is selected from the group consisting of G, A, V, L, I, P, F, M, W, T and S (in particular is selected from the group consisting of M, I, L, V and T); wherein PEP1 is selected from the group consisting of SAIS (SEQ ID NO: 84116), NAIS (SEQ ID NO: 84113), SATS (SEQ ID NO: 84117) and SPIS (SEQ ID NO: 84120).

[0455] In certain embodiments useful for inducing differentiation of mensenchymal or progenitor stem cells from the bone cell lineage, regenerating bone tissues, repairing bone and protecting from osteoporosis, PEP11 is a peptide with 3 amino acids of general formula AA¹⁸-AA¹⁹-AA²⁰; wherein AA¹⁸ is selected from the group consisting of L, V, Q, A and R, in particular is L; wherein AA¹⁹ is selected from the group consisting of F, W, H and Y (in particular is an aromatic, polar amino acid such as Y); wherein AA²⁰ is selected from the group consisting of L, F, Y, K, I, V and M, in particular is selected from the group consisting of L, F, Y, and K. In one particular example, PEP11 is selected from the group consisting of LYL, LYF, LYY and LYK.

[0456] The definitions of “PEP” pairs, quadruplets, hexaplets and heptuplet e.g. PEP1:PEP2, PEP12:PEP2, or PEP7:PEP5:PEP12:LINKER:PEP2:PEP6:PEP8, most particularly useful for inducing differentiation of mensenchymal or progenitor stem cells from the bone cell lineage, regenerating bone tissues, repairing bone and protecting from osteoporosis, are as already defined herein to the extent that PEP1 to PEP12 are particularly useful for these applications as defined in the present bone section. For instances:

[0457] In certain embodiments, useful for inducing differentiation of mensenchymal or progenitor stem cells from the bone cell lineage, regenerating bone tissues, repairing bone and protecting from osteoporosis, the pair PEP1:PEP2 is selected from the group consisting of SAIS (SEQ ID NO: 84116):LKNYQ (SEQ ID NO: 84230), NAIS (SEQ ID NO: 84113):LKKYR (SEQ ID NO: 84229), SATS (SEQ ID NO: 84117):LRKHR (SEQ ID NO: 84233) and SPIS (SEQ ID NO: 84120):LKYHY (SEQ ID NO: 84232).

[0458] In certain embodiments, useful for inducing differentiation of mensenchymal or progenitor stem cells from the bone cell lineage, regenerating bone tissues, repairing bone and protecting from osteoporosis, the pair PEP12:PEP2 is selected from the group consisting of SAIS-AA¹⁷-LYL (SEQ ID NO: 84881):LKNYQ (SEQ ID NO: 84230), NAIS-AA¹⁷-LYF (SEQ ID NO: 84878):LKKYR (SEQ ID NO: 84229), SATS-AA¹⁷-LYY (SEQ ID NO: 84882):LRKHR (SEQ ID NO: 84233) and SPIS-AA¹⁷-LYK (SEQ ID NO: 84887):LKYHY (SEQ ID NO: 84232); wherein AA¹⁷ is selected from the group consisting of G, A, V, L, I, P, F, M, W, T and S (in particular is selected from the group consisting of M, V and T).

[0459] In certain embodiments useful for inducing differentiation of mensenchymal or progenitor stem cells from the bone cell lineage, regenerating bone tissues, repairing bone and protecting from osteoporosis, PEP3 is selected from the group consisting of VPT, APT, VPQ, VSQ and TQV; PEP4 is selected from the group consisting of VVE, VVR, VVK, VAE, VRS, VKS and EDH; and wherein the pair PEP3:PEP4 is selected from the group consisting of VPT:VVE, APT:VVR, APT:VVK, VPT:VAE, VPQ:VRS, VSQ:VKS, VPQ:VKS and TQV:EDH.

[0460] In certain embodiments useful for inducing differentiation of mensenchymal or progenitor stem cells from the bone cell lineage, regenerating bone tissues, repairing bone and protecting from osteoporosis, PEP5 is selected from the group consisting of VPTEL (SEQ ID NO: 84378), APTKL (SEQ ID NO: 84131), APTQL (SEQ ID NO: 84134), VPTKL (SEQ ID NO: 84381), VPQAL (SEQ ID NO: 84364), VSQDL (SEQ ID NO: 84387), VPQDL (SEQ ID NO: 84365) and TQVQL (SEQ ID NO: 84340); PEP6 is selected from the group consisting of DMVVE (SEQ ID NO: 84161), EMVVE (SEQ ID NO: 84175), NMVVR (SEQ ID NO: 84275), NMVVK (SEQ ID NO: 84274), EGMSVAE (SEQ ID NO: 84411), MIVRS (SEQ ID NO: 84243), MIVKS (SEQ ID NO: 84242), MVVKS (SEQ ID NO: 84256) and TLEDH (SEQ ID NO: 84307); and wherein the pair PEP5:PEP6 is selected from the group consisting of VPTEL (SEQ ID NO: 84378):DMVVE (SEQ ID NO: 84161), VPTEL (SEQ ID NO: 84378):EMVVE (SEQ ID NO: 84175), APTKL (SEQ ID NO: 84131):NMVVR (SEQ ID NO: 84275), APTQL (SEQ ID NO: 84134):NMVVR (SEQ ID NO: 84275), APTKL (SEQ ID NO: 84131):NMVVK (SEQ ID NO: 84274), VPTKL (SEQ ID NO: 84381):EGMSVAE (SEQ ID NO: 84411), VPQAL (SEQ ID NO: 84364):MIVRS (SEQ ID NO: 84243), VSQDL (SEQ ID NO: 84387):MIVKS (SEQ ID NO: 84242), VPQDL (SEQ ID NO: 84365):MVVKS (SEQ ID NO: 84256) and TQVQL (SEQ ID NO: 84340):TLEDH (SEQ ID NO: 84307).

[0461] In certain embodiments useful for inducing differentiation of mensenchymal or progenitor stem cells from the bone cell lineage, regenerating bone tissues, repairing bone and protecting from osteoporosis, PEP7 is selected from the group consisting of KIPKAXX (SEQ ID NO: 84424), SIPKAXX (SEQ ID NO: 84429), HVTKPTX (SEQ ID NO: 84422), YVPKPXX (SEQ ID NO: 84433), TVPKPXX (SEQ ID NO: 84432), AVPKAXX (SEQ ID NO: 84404), KVGKAXX (SEQ ID NO: 84425), ASAAPXX (SEQ ID NO: 84402), ASASPXX (SEQ ID NO: 84403) and RNVQXRP (SEQ ID NO: 84427); wherein PEP8 is selected from the group consisting of GXGXR (SEQ ID NO: 84208), SXGXH (SEQ ID NO: 84304), AXGXH (SEQ ID NO: 84147), XGXR (SEQ ID NO: 84123), XKXS (SEQ ID NO: 84124) and LAXKXE (SEQ ID NO: 84399); and wherein the pair PEP7:PEP8 is selected from the group consisting of KIPKAXX (SEQ ID NO: 84424):GXGXR (SEQ ID NO: 84208), SIPKAXX (SEQ ID NO: 84429):GXGXR (SEQ ID NO: 84208), HVTKPTX (SEQ ID NO: 84422):SXGXH (SEQ ID NO: 84304), YVPKPXX (SEQ ID NO: 84433):SXGXH (SEQ ID NO: 84304), KVGKAXX (SEQ ID NO: 84425):XGXR (SEQ ID NO: 84123), ASAAPXX (SEQ ID NO: 84402):XKXS (SEQ ID NO: 84124), ASASPXX (SEQ ID NO: 84403):XKXS (SEQ ID NO: 84124) and RNVQXRP (SEQ ID NO: 84427):LAXKXE (SEQ ID NO: 84399).

[0462] In certain embodiments useful for inducing differentiation of mensenchymal or progenitor stem cells from the bone cell lineage, regenerating bone tissues, repairing bone and protecting from osteoporosis, PEP9 is selected from the group consisting of KIPKAXXVPTEL (SEQ ID NO: 84770), SIPKAXXVPTEL (SEQ ID NO: 84830), HVTKPTXAPTKL (SEQ ID NO: 84742), YVPKPXXAPTKL (SEQ ID NO: 84864), TVPKPXXAPTQL (SEQ ID NO: 84854), AVPKAXXAPTKL (SEQ ID NO: 84704), KVGKAXXVPTKL (SEQ ID NO: 84780), ASAAPXXVPQAL (SEQ ID NO: 84689), ASASPXXVSQDL (SEQ ID NO: 84701), ASASPXXVPQDL (SEQ ID NO: 84699) and RNVQXRPTQVQL (SEQ ID NO: 84806); PEP10 is selected from the group consisting of DMVVEGXGXR (SEQ ID NO: 84510), EMVVEGXGXR (SEQ ID NO: 84529), NMVVRSXGXH (SEQ ID NO: 84629), NMVVRAXGXH (SEQ ID NO: 84627), NMVVKAXGXH (SEQ ID NO: 84624), EGMSVAEXGXR (SEQ ID NO: 84636), MIVRSXKXS (SEQ ID NO: 84453), MIVKSXKXS (SEQ ID NO: 84451), MVVKSXKXS (SEQ ID NO: 84470) and TLEDHLAXKXE (SEQ ID NO: 84659); and wherein the pair PEP9:PEP10 is selected from the group consisting of KIPKAXXVPTEL (SEQ ID NO: 84770):DMVVEGXGXR (SEQ ID NO: 84510), SIPKAXXVPTEL (SEQ ID NO: 84830):EMVVEGXGXR (SEQ ID NO: 84529), HVTKPTXAPTKL (SEQ ID NO: 84742):NMVVRSXGXH (SEQ ID NO: 84629), YVPKPXXAPTKL (SEQ ID NO: 84864):NMVVRSXGXH (SEQ ID NO: 84629), KVGKAXXVPTKL (SEQ ID NO: 84780):EGMSVAEXGXR (SEQ ID NO: 84636), ASAAPXXVPQAL (SEQ ID NO: 84689):MIVRSXKXS (SEQ ID NO: 84453), ASASPXXVSQDL (SEQ ID NO: 84701):MIVKSXKXS (SEQ ID NO: 84451), ASASPXXVPQDL (SEQ ID NO: 84699):MVVKSXKXS (SEQ ID NO: 84470) and RNVQXRPTQVQL (SEQ ID NO: 84806):TLEDHLAXKXE (SEQ ID NO: 84659).

[0463] In certain embodiments useful for inducing differentiation of mensenchymal or progenitor stem cells from the bone cell lineage, regenerating bone tissues, repairing bone and protecting from osteoporosis, PEP5 is selected from the group consisting of VPTEL (SEQ ID NO: 84378), APTKL (SEQ ID NO: 84131), APTQL (SEQ ID NO: 84134), VPTKL (SEQ ID NO: 84381), VPQAL (SEQ ID NO: 84364), VSQDL (SEQ ID NO: 84387), VPQDL (SEQ ID NO: 84365) and TQVQL (SEQ ID NO: 84340); PEP6 is selected from the group consisting of DMVVE (SEQ ID NO: 84161), EMVVE (SEQ ID NO: 84175), NMVVR (SEQ ID NO: 84275), NMVVK (SEQ ID NO: 84274), EGMSVAE (SEQ ID NO: 84411), MIVRS (SEQ ID NO: 84243), MIVKS (SEQ ID NO: 84242), MVVKS (SEQ ID NO: 84256) and TLEDH (SEQ ID NO: 84307); and wherein the pair PEP5:PEP6 is selected from the group consisting of VPTEL (SEQ ID NO: 84378):DMVVE (SEQ ID NO: 84161), VPTEL (SEQ ID NO: 84378):EMVVE (SEQ ID NO: 84175), APTKL (SEQ ID NO: 84131):NMVVR (SEQ ID NO: 84275), APTQL (SEQ ID NO: 84134):NMVVR (SEQ ID NO: 84275), APTKL (SEQ ID NO: 84131):NMVVK (SEQ ID NO: 84274), VPTKL (SEQ ID NO: 84381):EGMSVAE (SEQ ID NO: 84411), VPQAL (SEQ ID NO: 84364):MIVRS (SEQ ID NO: 84243), VSQDL (SEQ ID NO: 84387):MIVKS (SEQ ID NO: 84242), VPQDL (SEQ ID NO: 84365):MVVKS (SEQ ID NO: 84256) and TQVQL (SEQ ID NO: 84340):TLEDH (SEQ ID NO: 84307); and wherein the pair PEP5:PEP6 is not VPTEL (SEQ ID NO: 84378):DMVVE (SEQ ID NO: 84161) when PEP1 is SAIS (SEQ ID NO: 84116) and PEP2 is LKNYQ (SEQ ID NO: 84230); wherein the pair PEP5:PEP6 is not VPTEL (SEQ ID NO: 84378):EMVVE (SEQ ID NO: 84175) when PEP1 is SAIS (SEQ ID NO: 84116) and PEP2 is LKNYQ (SEQ ID NO: 84230); wherein the pair PEP5:PEP6 is not APTKL (SEQ ID NO: 84131):NMVVR (SEQ ID NO: 84275) when PEP1 is NAIS (SEQ ID NO: 84113) and PEP2 is LKKYR (SEQ ID NO: 84229); wherein the pair PEP5:PEP6 is not APTQL (SEQ ID NO: 84134):NMVVR (SEQ ID NO: 84275) when PEP1 is NAIS (SEQ ID NO: 84113) and PEP2 is LKKYR (SEQ ID NO: 84229); wherein the pair PEP5:PEP6 is not APTKL (SEQ ID NO: 84131):NMVVK (SEQ ID NO: 84274) when PEP1 is SATS (SEQ ID NO: 84117) and PEP2 is LRKHR (SEQ ID NO: 84233); wherein the pair PEP5:PEP6 is not VPTKL (SEQ ID NO: 84381):EGMSVAE (SEQ ID NO: 84411) when PEP1 is SPIS (SEQ ID NO: 84120) and PEP2 is LKYHY (SEQ ID NO: 84232).

[0464] In certain embodiments useful for inducing differentiation of mensenchymal or progenitor stem cells from the bone cell lineage, regenerating bone tissues, repairing bone and protecting from osteoporosis, PEP9 is selected from the group consisting of KIPKAXXVPTEL (SEQ ID NO: 84770), SIPKAXXVPTEL (SEQ ID NO: 84830), HVTKPTXAPTKL (SEQ ID NO: 84742), YVPKPXXAPTKL (SEQ ID NO: 84864), TVPKPXXAPTQL (SEQ ID NO: 84854), AVPKAXXAPTKL (SEQ ID NO: 84704), KVGKAXXVPTKL (SEQ ID NO: 84780), ASAAPXXVPQAL (SEQ ID NO: 84689), ASASPXXVSQDL (SEQ ID NO: 84701), ASASPXXVPQDL (SEQ ID NO: 84699) and RNVQXRPTQVQL (SEQ ID NO: 84806); PEP10 is selected from the group consisting of DMVVEGXGXR (SEQ ID NO: 84510), EMVVEGXGXR (SEQ ID NO: 84529), NMVVRSXGXH (SEQ ID NO: 84629), NMVVRAXGXH (SEQ ID NO: 84627), NMVVKAXGXH (SEQ ID NO: 84624), EGMSVAEXGXR (SEQ ID NO: 84636), MIVRSXKXS (SEQ ID NO: 84453), MIVKSXKXS (SEQ ID NO: 84451), MVVKSXKXS (SEQ ID NO: 84470) and TLEDHLAXKXE (SEQ ID NO: 84659); and wherein the pair PEP9:PEP10 is selected from the group consisting of KIPKAXXVPTEL (SEQ ID NO: 84770):DMVVEGXGXR (SEQ ID NO: 84510), SIPKAXXVPTEL (SEQ ID NO: 84830):EMVVEGXGXR (SEQ ID NO: 84529), HVTKPTXAPTKL (SEQ ID NO: 84742):NMVVRSXGXH (SEQ ID NO: 84629), YVPKPXXAPTKL (SEQ ID NO: 84864):NMVVRSXGXH (SEQ ID NO: 84629), KVGKAXXVPTKL (SEQ ID NO: 84780):EGMSVAEXGXR (SEQ ID NO: 84636), ASAAPXXVPQAL (SEQ ID NO: 84689):MIVRSXKXS (SEQ ID NO: 84453), ASASPXXVSQDL (SEQ ID NO: 84701):MIVKSXKXS (SEQ ID NO: 84451), ASASPXXVPQDL (SEQ ID NO: 84699):MVVKSXKXS (SEQ ID NO: 84470) and RNVQXRPTQVQL (SEQ ID NO: 84806):TLEDHLAXKXE (SEQ ID NO: 84659); and wherein PEP9:PEP10 is not KIPKAXXVPTEL (SEQ ID NO: 84770):DMVVEGXGXR (SEQ ID NO: 84510) when PEP1 is SAIS (SEQ ID NO: 84116) and PEP2 is LKNYQ (SEQ ID NO: 84230); wherein PEP9:PEP10 is not SIPKAXXVPTEL (SEQ ID NO: 84830):EMVVEGXGXR (SEQ ID NO: 84529) when PEP1 is SAIS (SEQ ID NO: 84116) and PEP2 is LKNYQ (SEQ ID NO: 84230); wherein PEP9:PEP10 is not HVTKPTXAPTKL (SEQ ID NO: 84742):NMVVRSXGXH (SEQ ID NO: 84629) when PEP1 is NAIS (SEQ ID NO: 84113) and PEP2 is LKKYR (SEQ ID NO: 84229); wherein PEP9:PEP10 is not YVPKPXXAPTKL (SEQ ID NO: 84864):NMVVRSXGXH (SEQ ID NO: 84629) when PEP1 is NAIS (SEQ ID NO: 84113) and PEP2 is LKKYR (SEQ ID NO: 84229); wherein PEP9:PEP10 is not TVPKPXXAPTQL (SEQ ID NO: 84854):NMVVRAXGXH (SEQ ID NO: 84627) when PEP1 is NAIS (SEQ ID NO: 84113) and PEP2 is LKKYR (SEQ ID NO: 84229); wherein PEP9:PEP10 is not AVPKAXXAPTKL (SEQ ID NO: 84704):NMVVKAXGXH (SEQ ID NO: 84624) when PEP1 is SATS (SEQ ID NO: 84117) and PEP2 is LRKHR (SEQ ID NO: 84233); wherein PEP9:PEP10 is not KVGKAXXVPTKL (SEQ ID NO: 84780):EGMSVAEXGXR (SEQ ID NO: 84636) when PEP1 is SPIS (SEQ ID NO: 84120) and PEP2 is LKYHY (SEQ ID NO: 84232).

[0465] In certain embodiments useful for inducing differentiation of mensenchymal or progenitor stem cells from the bone cell lineage, regenerating bone tissues, repairing bone and protecting from osteoporosis, PEP1 is selected from the group consisting of SAIS (SEQ ID NO: 84116), NAIS (SEQ ID NO: 84113), SATS (SEQ ID NO: 84117) and SPIS (SEQ ID NO: 84120); PEP11 is selected from the group consisting of LYL, LFF, LYF, LYY, LYK, LYI, LFI, LYV, VYY, QIM, AKV and RKI; and the pair PEP1:PEP11 is selected from the group consisting of SAIS (SEQ ID NO: 84116):LYL, NAIS (SEQ ID NO: 84113):LYF, SATS (SEQ ID NO: 84117):LYY and SPIS (SEQ ID NO: 84120):LYK.

[0466] In one aspect, the present disclosure provides a GFR-binding compound, wherein said GFR-binding compound is a peptide, a variant or analog thereof, or a peptidomimetic as defined herein, with between 20 and 60 (in particular between 20 and 50, and more particularly, between 20 and 45) amino acids, comprising a peptide with four amino acids (PEP1) or a peptide with eight amino acids (PEP12), a peptide with five amino acids (PEP2), and optionally a pair of peptides selected form the group consisting of PEP3:PEP4, PEP3:PEP6, PEP3:PEP10, PEP5:PEP4, PEP9:PEP4, PEP5:PEP6, PEP5:PEP10, PEP9:PEP6 and PEP9:PEP10; wherein said GFR-binding compound does not comprise the pair of peptides VPTEL (SEQ ID NO: 84378):DMVVE (SEQ ID NO: 84161) when PEP1 is SAIS (SEQ ID NO: 84116) and PEP2 is LKNYQ (SEQ ID NO: 84230); wherein said GFR-binding compound does not comprise the pair of peptides VPTEL (SEQ ID NO: 84378):EMVVE (SEQ ID NO: 84175) when PEP1 is SAIS (SEQ ID NO: 84116) and PEP2 is LKNYQ (SEQ ID NO: 84230); wherein said GFR-binding compound does not comprise the pair of peptides APTKL (SEQ ID NO: 84131):NMVVR (SEQ ID NO: 84275) when PEP1 is NAIS (SEQ ID NO: 84113) and PEP2 is LKKYR (SEQ ID NO: 84229); wherein said GFR-binding compound does not comprise the pair of peptides APTQL (SEQ ID NO: 84134):NMVVR (SEQ ID NO: 84275) when PEP1 is NAIS (SEQ ID NO: 84113) and PEP2 is LKKYR (SEQ ID NO: 84229); wherein said GFR-binding compound does not comprise the pair of peptides APTKL (SEQ ID NO: 84131):NMVVK (SEQ ID NO: 84274) when PEP1 is SATS (SEQ ID NO: 84117) and PEP2 is LRKHR (SEQ ID NO: 84233); wherein said GFR-binding compound does not comprise the pair of peptides VPTKL (SEQ ID NO: 84381):EGMSVAE (SEQ ID NO: 84411) when PEP1 is SPIS (SEQ ID NO: 84120) and PEP2 is LKYHY (SEQ ID NO: 84232); and wherein the RMSD is 2.45 Å or less.

[0467] In one aspect, the present disclosure provides a GFR-binding compound, wherein said GFR-binding compound is a peptide, a variant or analog thereof, or a peptidomimetic as defined herein, with between 20 and 60 (in particular between 20 and 50, and more particularly, between 20 and 45) amino acids, comprising a peptide with four amino acids (PEP1) or a peptide with eight amino acids (PEP12), a peptide with five amino acids (PEP2), and optionally a pair of peptides selected form the group consisting of PEP3:PEP4, PEP3:PEP6, PEP3:PEP10, PEP5:PEP4, PEP9:PEP4, PEP5:PEP6, PEP5:PEP10, PEP9:PEP6 and PEP9:PEP10; wherein said GFR-binding compound does not comprise the pair of peptides KIPKAXXVPTEL (SEQ ID NO: 84770):DMVVEGXGXR (SEQ ID NO: 84510) when PEP1 is SAIS (SEQ ID NO: 84116) and PEP2 is LKNYQ (SEQ ID NO: 84230); wherein said GFR-binding compound does not comprise the pair of peptides SIPKAXXVPTEL (SEQ ID NO: 84830):EMVVEGXGXR (SEQ ID NO: 84529) when PEP1 is SAIS (SEQ ID NO: 84116) and PEP2 is LKNYQ (SEQ ID NO: 84230); wherein said GFR-binding compound does not comprise the pair of peptides HVTKPTXAPTKL (SEQ ID NO: 84742):NMVVRSXGXH (SEQ ID NO: 84629) when PEP1 is NAIS (SEQ ID NO: 84113) and PEP2 is LKKYR (SEQ ID NO: 84229); wherein said GFR-binding compound does not comprise the pair of peptides YVPKPXXAPTKL (SEQ ID NO: 84864):NMVVRSXGXH (SEQ ID NO: 84629) when PEP1 is NAIS (SEQ ID NO: 84113) and PEP2 is LKKYR (SEQ ID NO: 84229); wherein said GFR-binding compound does not comprise the pair of peptides TVPKPXXAPTQL (SEQ ID NO: 84854):NMVVRAXGXH (SEQ ID NO: 84627) when PEP1 is NAIS (SEQ ID NO: 84113) and PEP2 is LKKYR (SEQ ID NO: 84229); wherein said GFR-binding compound does not comprise the pair of peptides AVPKAXXAPTKL (SEQ ID NO: 84704):NMVVKAXGXH (SEQ ID NO: 84624) when PEP1 is SATS (SEQ ID NO: 84117) and PEP2 is LRKHR (SEQ ID NO: 84233); wherein said GFR-binding compound does not comprise the pair of peptides KVGKAXXVPTKL (SEQ ID NO: 84780):EGMSVAEXGXR (SEQ ID NO: 84636) when PEP1 is SPIS (SEQ ID NO: 84120) and PEP2 is LKYHY (SEQ ID NO: 84232); and wherein the RMSD is 2.45 Å or less.

[0468] In certain embodiments useful for inducing differentiation of mensenchymal or progenitor stem cells from the bone cell lineage, regenerating bone tissues, repairing bone and protecting from osteoporosis, said GFR-binding compound is a synthetic molecule as defined herein in the definition section.

[0469] In certain embodiments useful for inducing differentiation of mensenchymal or progenitor stem cells from the bone cell lineage, regenerating bone tissues, repairing bone and protecting from osteoporosis, said GFR-binding compound is a synthetic peptide, or a variant or analog thereof, or a peptidomimetic.

### Cartilage

[0470] Certain embodiments of the invention are particularly useful for inducing differentiation of mensenchymal or progenitor stem cells from the cartilage cell lineage, regenerating cartilage tissues, repairing cartilage and protecting from, for instance, osteoarthritis, costochondritis, Herniation, achondroplasia or relapsing polychondritis.

[0471] In certain embodiments useful for inducing differentiation of mensenchymal or progenitor stem cells from the cartilage cell lineage, regenerating cartilage tissues, repairing cartilage and protecting from, for instance, osteoarthritis, costochondritis, Herniation, achondroplasia or relapsing polychondritis, PEP1 is selected from the group consisting of SAIS (SEQ ID NO: 84116), NAIS (SEQ ID NO: 84113), SPIS (SEQ ID NO: 84120), EPLP (SEQ ID NO: 84110) and EPLT (SEQ ID NO: 84111).

[0472] In certain embodiments useful for inducing differentiation of mensenchymal or progenitor stem cells from the cartilage cell lineage, regenerating cartilage tissues, repairing cartilage and protecting from, for instance, osteoarthritis, costochondritis, Herniation, achondroplasia or relapsing polychondritis, PEP2 is selected from the group consisting of LKNYQ (SEQ ID NO: 84230), LKKYR (SEQ ID NO: 84229), YKQYE (SEQ ID NO: 84398) and EQLSN (SEQ ID NO: 84178).

[0473] In certain embodiments useful for inducing differentiation of mensenchymal or progenitor stem cells from the cartilage cell lineage, regenerating cartilage tissues, repairing cartilage and protecting from, for instance, osteoarthritis, costochondritis, Herniation, achondroplasia or relapsing polychondritis, PEP3 is selected from the group consisting of VPT, APT, VPQ and VSQ.

[0474] In certain embodiments useful for inducing differentiation of mensenchymal or progenitor stem cells from the cartilage cell lineage, regenerating cartilage tissues, repairing cartilage and protecting from, for instance, osteoarthritis, costochondritis, Herniation, achondroplasia or relapsing polychondritis, PEP4 is selected from the group consisting of VVE, VVR, VRS and VKS.

[0475] In certain embodiments useful for inducing differentiation of mensenchymal or progenitor stem cells from the cartilage cell lineage, regenerating cartilage tissues, repairing cartilage and protecting from, for instance, osteoarthritis, costochondritis, Herniation, achondroplasia or relapsing polychondritis, PEP5 is a peptide of general formula PEP3-AA¹¹-AA¹²; wherein PEP3 is selected from the group consisting of VPT, APT, VPQ and VSQ; wherein AA¹¹ is selected from the group consisting of E, K, Q, R, A, D, G and H, in particular E, K, Q, R, A and D; wherein AA¹² is selected from the group consisting of L, M, T, E, Q and H, in particular is L. In one particular example, PEP5 is selected from the group consisting of VPTEL (SEQ ID NO: 84378), APTKL (SEQ ID NO: 84131), APTQL (SEQ ID NO: 84134), VPTRL (SEQ ID NO: 84385), VPQAL (SEQ ID NO: 84364), VSQDL (SEQ ID NO: 84387) and VPQDL (SEQ ID NO: 84365).

[0476] In certain embodiments useful for inducing differentiation of mensenchymal or progenitor stem cells from the cartilage cell lineage, regenerating cartilage tissues, repairing cartilage and protecting from, for instance, osteoarthritis, costochondritis, Herniation, achondroplasia or relapsing polychondritis, PEP6 is a peptide of general formula AA²⁶-AA²⁷-AA²⁸-AA²⁹-PEP4; wherein PEP4 is selected from the group consisting of VVE, VVR, VRS and VKS; wherein AA²⁶ is absent or selected from the group consisting of AA^{III} amino acids, preferably is absent; wherein AA²⁷ and AA²⁸ are independently selected from the group consisting of AA^{III} and AA^{V} amino acids, preferably AA²⁷ is selected from the group consisting of D, E, N and M, preferably AA²⁸ is selected from the group consisting of M, I and V; wherein AA²⁹ is absent or selected from the group consisting of AA^{II} amino acids, preferably absent. In one particular example, PEP6 is selected from the group consisting of DMVVE (SEQ ID NO: 84161), EMVVE (SEQ ID NO: 84175), NMVVR (SEQ ID NO: 84275), DMVVE (SEQ ID NO: 84161), MIVRS (SEQ ID NO: 84243), MIVKS (SEQ ID NO: 84242) and MVVKS (SEQ ID NO: 84256).

[0477] In certain embodiments useful for inducing differentiation of mensenchymal or progenitor stem cells from the cartilage cell lineage, regenerating cartilage tissues, repairing cartilage and protecting from, for instance, osteoarthritis, costochondritis, Herniation, achondroplasia or relapsing polychondritis, PEP7 is an amino acid or a peptide with between two and seven amino acids of general formula AA¹-AA²-AA³-AA⁴-AA⁵-AA⁶-AA⁷ (SEQ ID NO: 84948); wherein AA¹, AA², AA³, AA⁴, and AA⁵ are independently absent or AA^{I} as defined herein; wherein AA⁶ is absent or selected from the group consisting of S, T, C, E, Q, P and R, preferably is S, C or T; wherein AA⁷ is absent or is selected from the group consisting of S, T, C, E, Q, P and R, preferably is S or C; and wherein at least one of AA¹, AA², AA³, AA⁴, AA⁵, AA⁶ or AA⁷ is not absent. In one particular example, PEP7 is selected from the group consisting of KIPKAXX (SEQ ID NO: 84424), SIPKAXX (SEQ ID NO: 84429), HVTKPTX (SEQ ID NO: 84422), YVPKPXX (SEQ ID NO: 84433), TVPKPXX (SEQ ID NO: 84432), STPPTXX (SEQ ID NO: 84431), ASAAPXX (SEQ ID NO: 84402) and ASASPXX (SEQ ID NO: 84403).

[0478] In certain embodiments useful for inducing differentiation of mensenchymal or progenitor stem cells from the cartilage cell lineage, regenerating cartilage tissues, repairing cartilage and protecting from, for instance, osteoarthritis, costochondritis, Herniation, achondroplasia or relapsing polychondritis, PEP8 is an amino acid or a peptide with between two and six amino acids of general formula AA³³-AA³⁴-AA³⁵-AA³⁶-AA³⁷-AA³⁸ (SEQ ID NO: 84949); wherein AA³³ is absent or is selected from the group consisting of AA^{I} amino acids at the exception of AA^{VI} amino acids, preferably absent, G, S or A; AA³⁴ is absent or is selected from the group consisting of AA^{III} and AA^{IV} amino acids, preferably absent; wherein AA³⁵ is absent or is selected from the group consisting of AA^{II} amino acids, preferably is S or C; wherein AA³⁶ is absent or is selected from the group consisting of AA^{III} and AA^{IV} amino acids, preferably is G or K; wherein AA³⁷ is absent or is selected from the group consisting of AA^{II} amino acids, preferably is S or C; wherein AA³⁸ is absent or is selected from the group consisting of AA^{I}; and wherein at least one of AA³³, AA³⁴, AA³⁵, AA³⁶, AA³⁷ or AA³⁸ is not absent. In one particular example, PEP8 is selected from the group consisting of GXGXR (SEQ ID NO: 84208), SXGXH (SEQ ID NO: 84304), AXGXH (SEQ ID NO: 84147), SXGXR (SEQ ID NO: 84305) and XKXS (SEQ ID NO: 84124).

[0479] In certain embodiments useful for inducing differentiation of mensenchymal or progenitor stem cells from the cartilage cell lineage, regenerating cartilage tissues, repairing cartilage and protecting from, for instance, osteoarthritis, costochondritis, Herniation, achondroplasia or relapsing polychondritis, PEP9 is a peptide of general formula AA¹-AA²-AA³-AA⁴-AA⁵-AA⁶-AA⁷-PEP5; wherein PEP5 is a peptide of formula PEP3-AA¹¹-AA¹²; wherein PEP3 is selected from the group consisting of VPT, APT, VPQ and VSQ; wherein AA¹¹ is selected from the group consisting of E, K, Q, R, A, D, G and H, in particular E, K, Q, R, A and D; wherein AA¹² is selected from the group consisting of L, M, T, E, Q and H, in particular is L; wherein AA¹, AA², AA³, AA⁴, and AA⁵ are independently absent or AA^{I} as defined herein; wherein AA⁶ is absent or selected from the group consisting of S, T, C, E, Q, P and R, preferably is S, C or T; wherein AA⁷ is selected from the group consisting of S, T, C, E, Q, P and R, preferably is S or C. In one particular example, PEP9 is selected from the group consisting of KIPKAXXVPTEL (SEQ ID NO: 84770), SIPKAXXVPTEL (SEQ ID NO: 84830), HVTKPTXAPTKL (SEQ ID NO: 84742), YVPKPXXAPTKL (SEQ ID NO: 84864), TVPKPXXAPTQL (SEQ ID NO: 84854), STPPTXXVPTRL (SEQ ID NO: 84850), ASAAPXXVPQAL (SEQ ID NO: 84689), ASASPXXVSQDL (SEQ ID NO: 84701) and ASASPXXVPQDL (SEQ ID NO: 84699).

[0480] In certain embodiments useful for inducing differentiation of mensenchymal or progenitor stem cells from the cartilage cell lineage, regenerating cartilage tissues, repairing cartilage and protecting from, for instance, osteoarthritis, costochondritis, Herniation, achondroplasia or relapsing polychondritis, PEP10 is a peptide of general formula PEP6-AA³³-AA³⁴-AA³⁵-AA³⁶-AA³⁷-AA³⁸; wherein PEP6 is a peptide of formula AA²⁶-AA²⁷-AA²⁸-AA²⁹-PEP4; wherein PEP4 is selected from the group consisting of VVE, VVR, VRS and VKS; wherein AA²⁶ is absent or selected from the group consisting of AA^{III} amino acids, preferably absent; wherein AA²⁷ and AA²⁸ are independently selected from the group consisting of AA^{III} and AA^{V} amino acids, preferably AA²⁷ is selected from the group consisting of D, E, N and M, preferably AA²⁸ is selected from the group consisting of M, I and V; wherein AA²⁹ is absent or selected from the group consisting of AA^{II} amino acids, preferably absent; wherein AA³³ is absent or is selected from the group consisting of AA^{I} amino acids at the exception of AA^{VI} amino acids, preferably absent, G, S or A; AA³⁴ is absent or is selected from the group consisting of AA^{III} and AA^{IV} amino acids, preferably absent; wherein AA³⁵ is absent or is selected from the group consisting of AA^{II} amino acids, preferably is S or C; wherein AA³⁶ is absent or is selected from the group consisting of AA^{III} and AA^{IV} amino acids, preferably is G or K; wherein AA³⁷ is absent or is selected from the group consisting of AA^{II} amino acids, preferably is S or C; wherein AA³⁸ is absent or is selected from the group consisting of AA^{I}. In one particular example, PEP10 is selected from the group consisting of DMVVEGXGXR (SEQ ID NO: 84510), EMVVEGXGXR (SEQ ID NO: 84529), NMVVRSXGXH (SEQ ID NO: 84629), NMVVRAXGXH (SEQ ID NO: 84627), DMVVESXGXR (SEQ ID NO: 84511), MIVRSXKXS (SEQ ID NO: 84453), MIVKSXKXS (SEQ ID NO: 84451) and MVVKSXKXS (SEQ ID NO: 84470).

[0481] In certain embodiments useful for inducing differentiation of mensenchymal or progenitor stem cells from the cartilage cell lineage, regenerating cartilage tissues, repairing cartilage and protecting from, for instance, osteoarthritis, costochondritis, Herniation, achondroplasia or relapsing polychondritis, PEP12 is a peptide of general formula PEP1-AA¹⁷-PEP11; wherein AA¹⁷ is selected from the group consisting of G, A, V, L, I, P, F, M, W, T and S (in particular is selected from the group consisting of M, I, L, V and T); wherein PEP1 is selected from the group consisting of SAIS (SEQ ID NO: 84116), NAIS (SEQ ID NO: 84113), SPIS (SEQ ID NO: 84120), EPLP (SEQ ID NO: 84110) and EPLT (SEQ ID NO: 84111).

[0482] In certain embodiments useful for inducing differentiation of mensenchymal or progenitor stem cells from the cartilage cell lineage, regenerating cartilage tissues, repairing cartilage and protecting from, for instance, osteoarthritis, costochondritis, Herniation, achondroplasia or relapsing polychondritis, PEP11 is a peptide with 3 amino acids of general formula AA¹⁸-AA¹⁹-AA²⁰; wherein AA¹⁸ is selected from the group consisting of L, V, Q, A and R, in particular is L or V; wherein AA¹⁹ is selected from the group consisting of F, W, H and Y, in particular is Y or F; wherein AA²⁰ is selected from the group consisting of L, F, Y and I. In one particular example, PEP11 is selected from the group consisting of LYL, LYF, LFI, VYY and LYY.

[0483] The definitions of “PEP” pairs, quadruplets, hexaplets and heptuplet e.g. PEP1:PEP2, PEP12:PEP2, or PEP7:PEP5:PEP12:LINKER:PEP2:PEP6:PEP8, most particularly useful for inducing differentiation of mensenchymal or progenitor stem cells from the cartilage cell lineage, regenerating cartilage tissues, repairing cartilage and protecting from, for instance, osteoarthritis, costochondritis, Herniation, achondroplasia or relapsing polychondritis, are as already defined herein to the extent that PEP1 to PEP12 are particularly useful for these applications. For instances:

[0484] In certain embodiments useful for inducing differentiation of mensenchymal or progenitor stem cells from the cartilage cell lineage, regenerating cartilage tissues, repairing cartilage and protecting from, for instance, osteoarthritis, costochondritis, Herniation, achondroplasia or relapsing polychondritis, the pair PEP1:PEP2 is selected from the group consisting of SAIS (SEQ ID NO: 84116):LKNYQ (SEQ ID NO: 84230), NAIS (SEQ ID NO: 84113):LKKYR (SEQ ID NO: 84229), SPIS (SEQ ID NO: 84120):YKQYE (SEQ ID NO: 84398), EPLP (SEQ ID NO: 84110):EQLSN (SEQ ID NO: 84178) and EPLT (SEQ ID NO: 84111):EQLSN (SEQ ID NO: 84178).

[0485] In certain embodiments useful for inducing differentiation of mensenchymal or progenitor stem cells from the cartilage cell lineage, regenerating cartilage tissues, repairing cartilage and protecting from, for instance, osteoarthritis, costochondritis, Herniation, achondroplasia or relapsing polychondritis, the pair PEP12:PEP2 is selected from the group consisting of SAIS-AA¹⁷-LYL (SEQ ID NO: 84881):LKNYQ (SEQ ID NO: 84230), NAIS-AA¹⁷-LYF (SEQ ID NO: 84878):LKKYR (SEQ ID NO: 84229), SPIS-AA¹⁷-LFI (SEQ ID NO: 84885):YKQYE (SEQ ID NO: 84398), EPLP-AA¹⁷-VYY (SEQ ID NO: 84875):EQLSN (SEQ ID NO: 84178) and EPLT-AA¹⁷-LYY (SEQ ID NO: 84876):EQLSN (SEQ ID NO: 84178); wherein AA¹⁷ is selected from the group consisting of G, A, V, L, I, P, F, M, W, T and S (in particular is selected from the group consisting of M, I, V and T).

[0486] In certain embodiments useful for inducing differentiation of mensenchymal or progenitor stem cells from the cartilage cell lineage, regenerating cartilage tissues, repairing cartilage and protecting from, for instance, osteoarthritis, costochondritis, Herniation, achondroplasia or relapsing polychondritis, PEP3 is selected from the group consisting of VPT, APT, VPQ and VSQ; PEP4 is selected from the group consisting of VVE, VVR, VRS and VKS; and wherein the pair PEP3:PEP4 is selected from the group consisting of VPT:VVE, APT:VVR, VPQ:VRS, VSQ:VKS and VPQ:VKS.

[0487] In certain embodiments useful for inducing differentiation of mensenchymal or progenitor stem cells from the cartilage cell lineage, regenerating cartilage tissues, repairing cartilage and protecting from, for instance, osteoarthritis, costochondritis, Herniation, achondroplasia or relapsing polychondritis, PEP5 is selected from the group consisting of VPTEL (SEQ ID NO: 84378), APTKL (SEQ ID NO: 84131), APTQL (SEQ ID NO: 84134), VPTRL (SEQ ID NO: 84385), VPQAL (SEQ ID NO: 84364), VSQDL (SEQ ID NO: 84387) and VPQDL (SEQ ID NO: 84365); PEP6 is selected from the group consisting of DMVVE (SEQ ID NO: 84161), EMVVE (SEQ ID NO: 84175), NMVVR (SEQ ID NO: 84275), DMVVE (SEQ ID NO: 84161), MIVRS (SEQ ID NO: 84243), MIVKS (SEQ ID NO: 84242) and MVVKS (SEQ ID NO: 84256); and wherein the pair PEP5:PEP6 is selected from the group consisting of VPTEL (SEQ ID NO: 84378):DMVVE (SEQ ID NO: 84161), VPTEL (SEQ ID NO: 84378):EMVVE (SEQ ID NO: 84175), APTKL (SEQ ID NO: 84131):NMVVR (SEQ ID NO: 84275), APTQL (SEQ ID NO: 84134):NMVVR (SEQ ID NO: 84275), VPTRL (SEQ ID NO: 84385):DMVVE (SEQ ID NO: 84161), VPQAL (SEQ ID NO: 84364):MIVRS (SEQ ID NO: 84243), VSQDL (SEQ ID NO: 84387):MIVKS (SEQ ID NO: 84242) and VPQDL (SEQ ID NO: 84365):MVVKS (SEQ ID NO: 84256).

[0488] In certain embodiments useful for inducing differentiation of mensenchymal or progenitor stem cells from the cartilage cell lineage, regenerating cartilage tissues, repairing cartilage and protecting from, for instance, osteoarthritis, costochondritis, Herniation, achondroplasia or relapsing polychondritis, PEP7 is selected from the group consisting of KIPKAXX (SEQ ID NO: 84424), SIPKAXX (SEQ ID NO: 84429), HVTKPTX (SEQ ID NO: 84422), YVPKPXX (SEQ ID NO: 84433), TVPKPXX (SEQ ID NO: 84432), STPPTXX (SEQ ID NO: 84431), ASAAPXX (SEQ ID NO: 84402) and ASASPXX (SEQ ID NO: 84403); wherein PEP8 is selected from the group consisting of GXGXR (SEQ ID NO: 84208), SXGXH (SEQ ID NO: 84304), AXGXH (SEQ ID NO: 84147), SXGXR (SEQ ID NO: 84305) and XKXS (SEQ ID NO: 84124); and wherein the pair PEP7:PEP8 is selected from the group consisting of KIPKAXX (SEQ ID NO: 84424): GXGXR (SEQ ID NO: 84208), SIPKAXX (SEQ ID NO: 84429):GXGXR (SEQ ID NO: 84208), HVTKPTX (SEQ ID NO: 84422):SXGXH (SEQ ID NO: 84304), YVPKPXX (SEQ ID NO: 84433):SXGXH (SEQ ID NO: 84304), TVPKPXX (SEQ ID NO: 84432):AXGXH (SEQ ID NO: 84147), STPPTXX (SEQ ID NO: 84431):SXGSR, ASAAPXX (SEQ ID NO: 84402):XKXS (SEQ ID NO: 84124) and ASASPXX (SEQ ID NO: 84403):XKXS (SEQ ID NO: 84124).

[0489] In certain embodiments useful for inducing differentiation of mensenchymal or progenitor stem cells from the cartilage cell lineage, regenerating cartilage tissues, repairing cartilage and protecting from, for instance, osteoarthritis, costochondritis, Herniation, achondroplasia or relapsing polychondritis, PEP9 is selected from the group consisting of KIPKAXXVPTEL (SEQ ID NO: 84770), SIPKAXXVPTEL (SEQ ID NO: 84830), HVTKPTXAPTKL (SEQ ID NO: 84742), YVPKPXXAPTKL (SEQ ID NO: 84864), TVPKPXXAPTQL (SEQ ID NO: 84854), STPPTXXVPTRL (SEQ ID NO: 84850), ASAAPXXVPQAL (SEQ ID NO: 84689), ASASPXXVSQDL (SEQ ID NO: 84701) and ASASPXXVPQDL (SEQ ID NO: 84699); PEP10 is selected from the group consisting of DMVVEGXGXR (SEQ ID NO: 84510), EMVVEGXGXR (SEQ ID NO: 84529), NMVVRSXGXH (SEQ ID NO: 84629), NMVVRAXGXH (SEQ ID NO: 84627), DMVVESXGXR (SEQ ID NO: 84511), MIVRSXKXS (SEQ ID NO: 84453), MIVKSXKXS (SEQ ID NO: 84451) and MVVKSXKXS (SEQ ID NO: 84470); and wherein the pair PEP9:PEP10 is selected from the group consisting of KIPKAXXVPTEL (SEQ ID NO: 84770):DMVVEGXGXR (SEQ ID NO: 84510), SIPKAXXVPTEL (SEQ ID NO: 84830):EMVVEGXGXR (SEQ ID NO: 84529), HVTKPTXAPTKL (SEQ ID NO: 84742):NMVVRSXGXH (SEQ ID NO: 84629), YVPKPXXAPTKL (SEQ ID NO: 84864):NMVVRSXGXH (SEQ ID NO: 84629), TVPKPXXAPTQL (SEQ ID NO: 84854):NMVVRAXGXH (SEQ ID NO: 84627), STPPTXXVPTRL (SEQ ID NO: 84850):DMVVESXGSR, ASAAPXXVPQAL (SEQ ID NO: 84689):MIVRSXKXS (SEQ ID NO: 84453), ASASPXXVSQDL (SEQ ID NO: 84701):MIVKSXKXS (SEQ ID NO: 84451) and ASASPXXVPQDL (SEQ ID NO: 84699):MVVKSXKXS (SEQ ID NO: 84470).

[0490] In certain embodiments useful for inducing differentiation of mensenchymal or progenitor stem cells from the cartilage cell lineage, regenerating cartilage tissues, repairing cartilage and protecting from, for instance, osteoarthritis, costochondritis, Herniation, achondroplasia or relapsing polychondritis, PEP5 is selected from the group consisting of VPTEL (SEQ ID NO: 84378), APTKL (SEQ ID NO: 84131), APTQL (SEQ ID NO: 84134), VPTRL (SEQ ID NO: 84385), VPQAL (SEQ ID NO: 84364), VSQDL (SEQ ID NO: 84387) and VPQDL (SEQ ID NO: 84365); PEP6 is selected from the group consisting of DMVVE (SEQ ID NO: 84161), EMVVE (SEQ ID NO: 84175), NMVVR (SEQ ID NO: 84275), DMVVE (SEQ ID NO: 84161), MIVRS (SEQ ID NO: 84243), MIVKS (SEQ ID NO: 84242) and MVVKS (SEQ ID NO: 84256); and wherein the pair PEP5:PEP6 is selected from the group consisting of VPTEL (SEQ ID NO: 84378):DMVVE (SEQ ID NO: 84161), VPTEL (SEQ ID NO: 84378):EMVVE (SEQ ID NO: 84175), APTKL (SEQ ID NO: 84131):NMVVR (SEQ ID NO: 84275), APTQL (SEQ ID NO: 84134):NMVVR (SEQ ID NO: 84275), VPTRL (SEQ ID NO: 84385):DMVVE (SEQ ID NO: 84161), VPQAL (SEQ ID NO: 84364):MIVRS (SEQ ID NO: 84243), VSQDL (SEQ ID NO: 84387):MIVKS (SEQ ID NO: 84242) and VPQDL (SEQ ID NO: 84365):MVVKS (SEQ ID NO: 84256); wherein the pair PEP5:PEP6 is not VPTEL (SEQ ID NO: 84378):DMVVE (SEQ ID NO: 84161) when PEP1 is SAIS (SEQ ID NO: 84116) and PEP2 is LKNYQ (SEQ ID NO: 84230); wherein the pair PEP5:PEP6 is not VPTEL (SEQ ID NO: 84378):EMVVE (SEQ ID NO: 84175) when PEP1 is SAIS (SEQ ID NO: 84116) and PEP2 is LKNYQ (SEQ ID NO: 84230); wherein the pair PEP5:PEP6 is not APTKL (SEQ ID NO: 84131):NMVVR (SEQ ID NO: 84275) when PEP1 is NAIS (SEQ ID NO: 84113) and PEP2 is LKKYR (SEQ ID NO: 84229); wherein the pair PEP5:PEP6 is not APTQL (SEQ ID NO: 84134):NMVVR (SEQ ID NO: 84275) when PEP1 is NAIS (SEQ ID NO: 84113) and PEP2 is LKKYR (SEQ ID NO: 84229); wherein the pair PEP5:PEP6 is not VPTRL (SEQ ID NO: 84385):DMVVE (SEQ ID NO: 84161) when PEP1 is SPIS (SEQ ID NO: 84120) and PEP2 is YKQYE (SEQ ID NO: 84398); wherein the pair PEP5:PEP6 is not VPQAL (SEQ ID NO: 84364):MIVRS (SEQ ID NO: 84243) when PEP1 is EPLP (SEQ ID NO: 84110) and PEP2 is EQLSN (SEQ ID NO: 84178); wherein the pair PEP5:PEP6 is not VSQDL (SEQ ID NO: 84387):MIVKS (SEQ ID NO: 84242) when PEP1 is EPLT (SEQ ID NO: 84111) and PEP2 is EQLSN (SEQ ID NO: 84178); wherein the pair PEP5:PEP6 is not VPQDL (SEQ ID NO: 84365):MVVKS (SEQ ID NO: 84256) when PEP1 is EPLT (SEQ ID NO: 84111) and PEP2 is EQLSN (SEQ ID NO: 84178).

[0491] In certain embodiments useful for inducing differentiation of mensenchymal or progenitor stem cells from the cartilage cell lineage, regenerating cartilage tissues, repairing cartilage and protecting from, for instance, osteoarthritis, costochondritis, Herniation, achondroplasia or relapsing polychondritis, PEP9 is selected from the group consisting of KIPKAXXVPTEL (SEQ ID NO: 84770), SIPKAXXVPTEL (SEQ ID NO: 84830), HVTKPTXAPTKL (SEQ ID NO: 84742), YVPKPXXAPTKL (SEQ ID NO: 84864), TVPKPXXAPTQL (SEQ ID NO: 84854), STPPTXXVPTRL (SEQ ID NO: 84850), ASAAPXXVPQAL (SEQ ID NO: 84689), ASASPXXVSQDL (SEQ ID NO: 84701) and ASASPXXVPQDL (SEQ ID NO: 84699); PEP10 is selected from the group consisting of DMVVEGXGXR (SEQ ID NO: 84510), EMVVEGXGXR (SEQ ID NO: 84529), NMVVRSXGXH (SEQ ID NO: 84629), NMVVRAXGXH (SEQ ID NO: 84627), DMVVESXGXR (SEQ ID NO: 84511), MIVRSXKXS (SEQ ID NO: 84453), MIVKSXKXS (SEQ ID NO: 84451) and MVVKSXKXS (SEQ ID NO: 84470); and wherein the pair PEP9:PEP10 is selected from the group consisting of KIPKAXXVPTEL (SEQ ID NO: 84770):DMVVEGXGXR (SEQ ID NO: 84510), SIPKAXXVPTEL (SEQ ID NO: 84830):EMVVEGXGXR (SEQ ID NO: 84529), HVTKPTXAPTKL (SEQ ID NO: 84742):NMVVRSXGXH (SEQ ID NO: 84629), YVPKPXXAPTKL (SEQ ID NO: 84864):NMVVRSXGXH (SEQ ID NO: 84629), TVPKPXXAPTQL (SEQ ID NO: 84854):NMVVRAXGXH (SEQ ID NO: 84627), STPPTXXVPTRL (SEQ ID NO: 84850):DMVVESXGSR, ASAAPXXVPQAL (SEQ ID NO: 84689):MIVRSXKXS (SEQ ID NO: 84453), ASASPXXVSQDL (SEQ ID NO: 84701):MIVKSXKXS (SEQ ID NO: 84451) and ASASPXXVPQDL (SEQ ID NO: 84699):MVVKSXKXS (SEQ ID NO: 84470); wherein PEP9:PEP10 is not KIPKAXXVPTEL (SEQ ID NO: 84770):DMVVEGXGXR (SEQ ID NO: 84510) when PEP1 is SAIS (SEQ ID NO: 84116) and PEP2 is LKNYQ (SEQ ID NO: 84230); wherein PEP9:PEP10 is not SIPKAXXVPTEL (SEQ ID NO: 84830):EMVVEGXGXR (SEQ ID NO: 84529) when PEP1 is SAIS (SEQ ID NO: 84116) and PEP2 is LKNYQ (SEQ ID NO: 84230); wherein PEP9:PEP10 is not HVTKPTXAPTKL (SEQ ID NO: 84742):NMVVRSXGXH (SEQ ID NO: 84629) when PEP1 is NAIS (SEQ ID NO: 84113) and PEP2 is LKKYR (SEQ ID NO: 84229); wherein PEP9:PEP10 is not YVPKPXXAPTKL (SEQ ID NO: 84864):NMVVRSXGXH (SEQ ID NO: 84629) when PEP1 is NAIS (SEQ ID NO: 84113) and PEP2 is LKKYR (SEQ ID NO: 84229); wherein PEP9:PEP10 is not TVPKPXXAPTQL (SEQ ID NO: 84854):NMVVRAXGXH (SEQ ID NO: 84627) when PEP1 is NAIS (SEQ ID NO: 84113) and PEP2 is LKKYR (SEQ ID NO: 84229); wherein PEP9:PEP10 is not STPPTXXVPTRL (SEQ ID NO: 84850):DMVVESXGSR when PEP1 is SPIS (SEQ ID NO: 84120); wherein PEP9:PEP10 is not ASAAPXXVPQAL (SEQ ID NO: 84689):MIVRSXKXS (SEQ ID NO: 84453) when PEP1 is EPLP (SEQ ID NO: 84110) and PEP2 is EQLSN (SEQ ID NO: 84178); wherein PEP9:PEP10 is not ASASPXXVSQDL (SEQ ID NO: 84701):MIVKSXKXS (SEQ ID NO: 84451) when PEP1 is EPLT (SEQ ID NO: 84111) and PEP2 is EQLSN (SEQ ID NO: 84178); wherein PEP9:PEP10 is not ASASPXXVPQDL (SEQ ID NO: 84699):MVVKSXKXS (SEQ ID NO: 84470) when PEP1 is EPLT (SEQ ID NO: 84111) and PEP2 is EQLSN (SEQ ID NO: 84178).

[0492] In certain embodiments useful for inducing differentiation of mensenchymal or progenitor stem cells from the cartilage cell lineage, regenerating cartilage tissues, repairing cartilage and protecting from, for instance, osteoarthritis, costochondritis, Herniation, achondroplasia or relapsing polychondritis, PEP1 is selected from the group consisting of SAIS (SEQ ID NO: 84116), NAIS (SEQ ID NO: 84113), SPIS (SEQ ID NO: 84120), EPLP (SEQ ID NO: 84110) and EPLT (SEQ ID NO: 84111); PEP11 is selected from the group consisting of LYL, LYF, LFI, VYY and LYY; and the pair PEP1:PEP11 is selected from the group consisting of SAIS (SEQ ID NO: 84116):LYL, NAIS (SEQ ID NO: 84113):LYF, SPIS (SEQ ID NO: 84120):LFI, EPLP (SEQ ID NO: 84110):VYY and EPLT (SEQ ID NO: 84111):LYY.

[0493] In one aspect, the present disclosure provides a GFR-binding compound, wherein said GFR-binding compound is a peptide, a variant or analog thereof, or a peptidomimetic as defined herein, with between 20 and 60 (in particular between 20 and 50, and more particularly, between 20 and 45) amino acids, comprising a peptide with four amino acids (PEP1) or a peptide with eight amino acids (PEP12), a peptide with five amino acids (PEP2), and optionally a pair of peptides selected form the group consisting of PEP3:PEP4, PEP3:PEP6, PEP3:PEP10, PEP5:PEP4, PEP9:PEP4, PEP5:PEP6, PEP5:PEP10, PEP9:PEP6 and PEP9:PEP10; wherein said GFR-binding compound does not comprise the pair of peptides VPTEL (SEQ ID NO: 84378):DMVVE (SEQ ID NO: 84161) when PEP1 is SAIS (SEQ ID NO: 84116) and PEP2 is LKNYQ (SEQ ID NO: 84230); wherein said GFR-binding compound does not comprise the pair of peptides VPTEL (SEQ ID NO: 84378):EMVVE (SEQ ID NO: 84175) when PEP1 is SAIS (SEQ ID NO: 84116) and PEP2 is LKNYQ (SEQ ID NO: 84230); wherein said GFR-binding compound does not comprise the pair of peptides APTKL (SEQ ID NO: 84131):NMVVR (SEQ ID NO: 84275) when PEP1 is NAIS (SEQ ID NO: 84113) and PEP2 is LKKYR (SEQ ID NO: 84229); wherein said GFR-binding compound does not comprise the pair of peptides APTQL (SEQ ID NO: 84134):NMVVR (SEQ ID NO: 84275) when PEP1 is NAIS (SEQ ID NO: 84113) and PEP2 is LKKYR (SEQ ID NO: 84229); wherein said GFR-binding compound does not comprise the pair of peptides VPTRL (SEQ ID NO: 84385):DMVVE (SEQ ID NO: 84161) when PEP1 is SPIS (SEQ ID NO: 84120) and PEP2 is YKQYE (SEQ ID NO: 84398); wherein said GFR-binding compound does not comprise the pair of peptides VPQAL (SEQ ID NO: 84364):MIVRS (SEQ ID NO: 84243) when PEP1 is EPLP (SEQ ID NO: 84110) and PEP2 is EQLSN (SEQ ID NO: 84178); wherein said GFR-binding compound does not comprise the pair of peptides VSQDL (SEQ ID NO: 84387):MIVKS (SEQ ID NO: 84242) when PEP1 is EPLT (SEQ ID NO: 84111) and PEP2 is EQLSN (SEQ ID NO: 84178); wherein said GFR-binding compound does not comprise the pair of peptides VPQDL (SEQ ID NO: 84365):MVVKS (SEQ ID NO: 84256) when PEP1 is EPLT (SEQ ID NO: 84111) and PEP2 is EQLSN (SEQ ID NO: 84178); and wherein the RMSD is 2.45 Å or less.

[0494] In one aspect, the present disclosure provides a GFR-binding compound, wherein said GFR-binding compound is a peptide, a variant or analog thereof, or a peptidomimetic as defined herein, with between 20 and 60 (in particular between 20 and 50, and more particularly, between 20 and 45) amino acids, comprising a peptide with four amino acids (PEP1) or a peptide with eight amino acids (PEP12), a peptide with five amino acids (PEP2), and optionally a pair of peptides selected form the group consisting of PEP3:PEP4, PEP3:PEP6, PEP3:PEP10, PEP5:PEP4, PEP9:PEP4, PEP5:PEP6, PEP5:PEP10, PEP9:PEP6 and PEP9:PEP10; wherein said GFR-binding compound does not comprise the pair of peptides KIPKAXXVPTEL (SEQ ID NO: 84770):DMVVEGXGXR (SEQ ID NO: 84510) when PEP1 is SAIS (SEQ ID NO: 84116) and PEP2 is LKNYQ (SEQ ID NO: 84230); wherein said GFR-binding compound does not comprise the pair of peptides SIPKAXXVPTEL (SEQ ID NO: 84830):EMVVEGXGXR (SEQ ID NO: 84529) when PEP1 is SAIS (SEQ ID NO: 84116) and PEP2 is LKNYQ (SEQ ID NO: 84230); wherein said GFR-binding compound does not comprise the pair of peptides HVTKPTXAPTKL (SEQ ID NO: 84742):NMVVRSXGXH (SEQ ID NO: 84629) when PEP1 is NAIS (SEQ ID NO: 84113) and PEP2 is LKKYR (SEQ ID NO: 84229); wherein said GFR-binding compound does not comprise the pair of peptides YVPKPXXAPTKL (SEQ ID NO: 84864):NMVVRSXGXH (SEQ ID NO: 84629) when PEP1 is NAIS (SEQ ID NO: 84113) and PEP2 is LKKYR (SEQ ID NO: 84229); wherein said GFR-binding compound does not comprise the pair of peptides TVPKPXXAPTQL (SEQ ID NO: 84854):NMVVRAXGXH (SEQ ID NO: 84627) when PEP1 is NAIS (SEQ ID NO: 84113) and PEP2 is LKKYR (SEQ ID NO: 84229); wherein said GFR-binding compound does not comprise the pair of peptides STPPTXXVPTRL (SEQ ID NO: 84850):DMVVESXGSR when PEP1 is SPIS (SEQ ID NO: 84120); wherein said GFR-binding compound does not comprise the pair of peptides ASAAPXXVPQAL (SEQ ID NO: 84689):MIVRSXKXS (SEQ ID NO: 84453) when PEP1 is EPLP (SEQ ID NO: 84110) and PEP2 is EQLSN (SEQ ID NO: 84178); wherein said GFR-binding compound does not comprise the pair of peptides ASASPXXVSQDL (SEQ ID NO: 84701):MIVKSXKXS (SEQ ID NO: 84451) when PEP1 is EPLT (SEQ ID NO: 84111) and PEP2 is EQLSN (SEQ ID NO: 84178); wherein said GFR-binding compound does not comprise the pair of peptides ASASPXXVPQDL (SEQ ID NO: 84699):MVVKSXKXS (SEQ ID NO: 84470) when PEP1 is EPLT (SEQ ID NO: 84111) and PEP2 is EQLSN (SEQ ID NO: 84178); and wherein the RMSD is 2.45 Å or less.

[0495] In certain embodiments useful for inducing differentiation of mensenchymal or progenitor stem cells from the cartilage cell lineage, regenerating cartilage tissues, repairing cartilage and protecting from, for instance, osteoarthritis, costochondritis, Herniation, achondroplasia or relapsing polychondritis, said GFR-binding compound is a synthetic molecule as defined herein in the definition section.

[0496] In certain embodiments useful for inducing differentiation of mensenchymal or progenitor stem cells from the cartilage cell lineage, regenerating cartilage tissues, repairing cartilage and protecting from, for instance, osteoarthritis, costochondritis, Herniation, achondroplasia or relapsing polychondritis, said GFR-binding compound is a synthetic peptide, or a variant or analog thereof, or a peptidomimetic.

### Vascular Tissues

[0497] Certain embodiments of the invention are particularly useful for inducing differentiation of mensenchymal or progenitor stem cells from the vascular cell lineage, enhancing of endothelization, vascularization/angiogenesis, protecting a subject from heart tissue degeneration-related diseases, disorders, conditions or pathologies.

[0498] In other embodiments also useful for inducing differentiation of mensenchymal or progenitor stem cells from the vascular cell lineage, enhancing of endothelization, vascularization/angiogenesis, protecting a subject from heart tissue degeneration-related diseases, disorders, conditions or pathologies, PEP1 is selected from the group consisting of SNIT (SEQ ID NO: 84118), RPVQ (SEQ ID NO: 84114) and RSVK (SEQ ID NO: 84115).

[0499] In other embodiments also useful for inducing differentiation of mensenchymal or progenitor stem cells from the vascular cell lineage, enhancing of endothelization, vascularization/angiogenesis, protecting a subject from heart tissue degeneration-related diseases, disorders, conditions or pathologies, PEP2 is selected from the group consisting of IGEMS (SEQ ID NO: 84209), LGEMS (SEQ ID NO: 84228), KEVQV (SEQ ID NO: 84210) and KKATV (SEQ ID NO: 84212).

[0500] In other embodiments also useful for inducing differentiation of mensenchymal or progenitor stem cells from the vascular cell lineage, enhancing of endothelization, vascularization/angiogenesis, protecting a subject from heart tissue degeneration-related diseases, disorders, conditions or pathologies, PEP3 is selected from the group consisting of VPT, SRV and TQV.

[0501] In other embodiments also useful for inducing differentiation of mensenchymal or progenitor stem cells from the vascular cell lineage, enhancing of endothelization, vascularization/angiogenesis, protecting a subject from heart tissue degeneration-related diseases, disorders, conditions or pathologies, PEP4 is selected from the group consisting of QHN, EHS, EEH and EDH.

[0502] In other embodiments also useful for inducing differentiation of mensenchymal or progenitor stem cells from the vascular cell lineage, enhancing of endothelization, vascularization/angiogenesis, protecting a subject from heart tissue degeneration-related diseases, disorders, conditions or pathologies, PEP5 is a peptide of general formula PEP3-AA¹¹-AA¹²; wherein PEP3 is selected from the group consisting of VPT, SRV and TQV; wherein AA¹¹ is selected from the group consisting of E, K, Q, R, A, D, G and H, in particular is E, G, H and Q; wherein AA¹² is selected from the group consisting of L, M, T, E, Q and H, in particular is selected from the group consisting of E, Q, H and L. In one particular example, PEP5 is selected from the group consisting of VPTGQ (SEQ ID NO: 84379), VPTEE (SEQ ID NO: 84377), SRVHH (SEQ ID NO: 84297) and TQVQL (SEQ ID NO: 84340).

[0503] In other embodiments also useful for inducing differentiation of mensenchymal or progenitor stem cells from the vascular cell lineage, enhancing of endothelization, vascularization/angiogenesis, protecting a subject from heart tissue degeneration-related diseases, disorders, conditions or pathologies, PEP6 is a peptide of general formula AA²⁶-AA²⁷-AA²⁸-AA²⁹-PEP4; wherein PEP4 is selected from the group consisting of QHN, EHS, EEH and EDH; wherein AA²⁶ is absent or selected from the group consisting of AA^{III} amino acids, preferably is absent; wherein AA²⁷ and AA²⁸ are independently selected from the group consisting of AA^{III} and AA^{V} amino acids, preferably AA²⁷ is selected from the group consisting of F, L, R and T, preferably AA²⁸ is L or E; wherein AA²⁹ is absent or selected from the group consisting of AA^{II} amino acids, preferably is absent. In one particular example, PEP6 is selected from the group consisting of LEEHS (SEQ ID NO: 84217), FLQHN (SEQ ID NO: 84184), RLEEH (SEQ ID NO: 84279) and TLEDH (SEQ ID NO: 84307).

[0504] In other embodiments also useful for inducing differentiation of mensenchymal or progenitor stem cells from the vascular cell lineage, enhancing of endothelization, vascularization/angiogenesis, protecting a subject from heart tissue degeneration-related diseases, disorders, conditions or pathologies, PEP7 is an amino acid or a peptide with between two and seven amino acids of general formula AA¹-AA²-AA³-AA⁴-AA⁵-AA⁶-AA⁷ (SEQ ID NO: 84948); wherein AA¹, AA², AA³, AA⁴, and AA⁵ are independently absent or AA^{I} as defined herein; wherein AA⁶ is absent or selected from the group consisting of S, T, C, E, Q, P and R, preferably is selected from the group consisting of E, Q and R; wherein AA⁷ is absent or is selected from the group consisting of S, T, C, E, Q, P and R, preferably is selected from the group consisting of S, C and P; and wherein at least one of AA¹, AA², AA³, AA⁴, AA⁵, AA⁶ or AA⁷ is not absent. In one particular example, PEP7 is selected from the group consisting of NDEGLEX (SEQ ID NO: 84426), SSVKXQP (SEQ ID NO: 84430) and RNVQXRP (SEQ ID NO: 84427).

[0505] In other embodiments also useful for inducing differentiation of mensenchymal or progenitor stem cells from the vascular cell lineage, enhancing of endothelization, vascularization/angiogenesis, protecting a subject from heart tissue degeneration-related diseases, disorders, conditions or pathologies, PEP8 is an amino acid or a peptide with between two and six amino acids of general formula AA³³-AA³⁴-AA³⁵-AA³⁶-AA³⁷-AA³⁸ (SEQ ID NO: 84949); wherein AA³³ is absent or is selected from the group consisting of AA^{I} amino acids at the exception of AA^{VI} amino acids, in particular is selected from the group consisting of K, Q and L; AA³⁴ is absent or is selected from the group consisting of AA^{III} and AA^{IV} amino acids, in particular is absent, E or A; wherein AA³⁵ is absent or is selected from the group consisting of AA^{II} amino acids, preferably is S or C; wherein AA³⁶ is absent or is selected from the group consisting of AA^{III} and AA^{IV} amino acids, in particular is selected from the group consisting of E, A and K; wherein AA³⁷ is absent or is selected from the group consisting of AA^{II} amino acids, preferably is S or C; wherein AA³⁸ is absent or is selected from the group consisting of AA^{I}, in particular is selected from the group consisting of R, A and E; and wherein at least one of AA³³, AA³⁴, AA³⁵, AA³⁶, AA³⁷ or AA³⁸ is not absent. In one particular example, PEP8 is selected from the group consisting of KXEXR (SEQ ID NO: 84213), QXEXR (SEQ ID NO: 84276), LEXAXA (SEQ ID NO: 84400) and LAXKXE (SEQ ID NO: 84399).

[0506] In other embodiments also useful for inducing differentiation of mensenchymal or progenitor stem cells from the vascular cell lineage, enhancing of endothelization, vascularization/angiogenesis, protecting a subject from heart tissue degeneration-related diseases, disorders, conditions or pathologies, PEP9 is a peptide of general formula AA¹-AA²-AA³-AA⁴-AA⁵-AA⁶-AA⁷-PEP5; wherein PEP5 is a peptide of formula PEP3-AA¹¹-AA¹²; wherein PEP3 is selected from the group consisting of VPT, SRV and TQV; wherein AA¹¹ is selected from the group consisting of E, K, Q, R, A, D, G and H, in particular is E, G, H and Q; wherein AA¹² is selected from the group consisting of L, M, T, E, Q and H, in particular is selected from the group consisting of E, Q, H and L; wherein AA¹, AA², AA³, AA⁴, and AA⁵ are independently absent or AA^{I} as defined herein; wherein AA⁶ is absent or selected from the group consisting of S, T, C, E, Q, P and R, preferably is selected from the group consisting of E, Q and R; wherein AA⁷ is selected from the group consisting of S, T, C, E, Q, P and R, preferably is selected from the group consisting of S, C and P. In one particular example, PEP9 is selected from the group consisting of NDEGLEXVPTEE (SEQ ID NO: 84798), NDEGLEXVPTGQ (SEQ ID NO: 84799), SSVKXQPSRVHH (SEQ ID NO: 84834) and RNVQXRPTQVQL (SEQ ID NO: 84806).

[0507] In other embodiments also useful for inducing differentiation of mensenchymal or progenitor stem cells from the vascular cell lineage, enhancing of endothelization, vascularization/angiogenesis, protecting a subject from heart tissue degeneration-related diseases, disorders, conditions or pathologies, PEP10 is a peptide of general formula PEP6-AA³³-AA³⁴-AA³⁵-AA³⁶-AA³⁷-AA³⁸; wherein PEP6 is a peptide of formula AA²⁶-AA²⁷-AA²⁸-AA²⁹-PEP4; wherein PEP4 is selected from the group consisting of QHN, EHS, EEH and EDH; wherein AA²⁶ is absent or selected from the group consisting of AA^{III} amino acids, preferably is absent; wherein AA²⁷ and AA²⁸ are independently selected from the group consisting of AA^{III} and AA^{V} amino acids, preferably AA²⁷ is selected from the group consisting of F, L, R and T, preferably AA²⁸ is L or E; wherein AA²⁹ is absent or selected from the group consisting of AA^{II} amino acids, preferably is absent; wherein AA³³ is absent or is selected from the group consisting of AA^{I} amino acids at the exception of AA^{VI} amino acids, in particular is selected from the group consisting of K, Q and L; AA³⁴ is absent or is selected from the group consisting of AA^{III} and AA^{IV} amino acids, in particular is absent, E or A; wherein AA³⁵ is absent or is selected from the group consisting of AA^{II} amino acids, preferably is S or C; wherein AA³⁶ is absent or is selected from the group consisting of AA^{III} and AA^{IV} amino acids, in particular is selected from the group consisting of E, A and K; wherein AA³⁷ is absent or is selected from the group consisting of AA^{II} amino acids, preferably is S or C; wherein AA³⁸ is absent or is selected from the group consisting of AA^{I}, in particular is selected from the group consisting of R, A and E. In one particular example, PEP10 is selected from the group consisting of FLQHNKXEXR (SEQ ID NO: 84536), LEEHSQXEXR (SEQ ID NO: 84577), RLEEHLEXAXA (SEQ ID NO: 84646) and TLEDHLAXKXE (SEQ ID NO: 84659).

[0508] In other embodiments also useful for inducing differentiation of mensenchymal or progenitor stem cells from the vascular cell lineage, enhancing of endothelization, vascularization/angiogenesis, protecting a subject from heart tissue degeneration-related diseases, disorders, conditions or pathologies, PEP12 is a peptide of general formula PEP1-AA¹⁷-PEP11; wherein AA¹⁷ is selected from the group consisting of G, A, V, L, I, P, F, M, W, T and S (in particular is selected from the group consisting of M, I, L, V and T); wherein PEP1 is selected from the group consisting of SNIT (SEQ ID NO: 84118), RPVQ (SEQ ID NO: 84114) and RSVK (SEQ ID NO: 84115).

[0509] In other embodiments also useful for inducing differentiation of mensenchymal or progenitor stem cells from the vascular cell lineage, enhancing of endothelization, vascularization/angiogenesis, protecting a subject from heart tissue degeneration-related diseases, disorders, conditions or pathologies, PEP11 is a peptide with 3 amino acids of general formula AA¹⁸-AA¹⁹-AA²⁰; wherein AA¹⁸ is selected from the group consisting of L, V, Q, A and R, in particular is selected from the group consisting of Q, A and R; wherein AA¹⁹ is selected from the group consisting of F, W, H, Y, I and K, in particular is I or K; wherein AA²⁰ is selected from the group consisting of L, F, Y, K, I, V and M, in particular is selected from the group consisting of M, V and I. In one particular example, PEP11 is selected from the group consisting of QIM, AKV and RKI.

[0510] The definitions of “PEP” pairs, quadruplets, hexaplets and heptuplet e.g. PEP1:PEP2, PEP12:PEP2, or PEP7:PEP5:PEP12:LINKER:PEP2:PEP6:PEP8, most particularly useful for inducing differentiation of mensenchymal or progenitor stem cells from the vascular cell lineage, enhancing of endothelization, vascularization/angiogenesis, protecting a subject from heart tissue degeneration-related diseases, disorders, conditions or pathologies, are as already defined herein to the extent that PEP1 to PEP12 are particularly useful for these applications. For instances:

[0511] In other embodiments also useful for inducing differentiation of mensenchymal or progenitor stem cells from the vascular cell lineage, enhancing of endothelization, vascularization/angiogenesis, protecting a subject from heart tissue degeneration-related diseases, disorders, conditions or pathologies, the pair PEP1:PEP2 is selected from the group consisting of SNIT (SEQ ID NO: 84118):IGEMS (SEQ ID NO: 84209), SNIT (SEQ ID NO: 84118):LGEMS (SEQ ID NO: 84228), RSVK (SEQ ID NO: 84115):KEVQV (SEQ ID NO: 84210) and RPVQ (SEQ ID NO: 84114):KKATV (SEQ ID NO: 84212).

[0512] In other embodiments also useful for inducing differentiation of mensenchymal or progenitor stem cells from the vascular cell lineage, enhancing of endothelization, vascularization/angiogenesis, protecting a subject from heart tissue degeneration-related diseases, disorders, conditions or pathologies, the pair PEP12:PEP2 is selected from the group consisting of SNIT-AA¹⁷-QIM (SEQ ID NO: 84883):IGEMS (SEQ ID NO: 84209), SNIT-AA¹⁷-QIM (SEQ ID NO: 84883):LGEMS (SEQ ID NO: 84228), RSVK-AA¹⁷-AKV (SEQ ID NO: 84880):KEVQV (SEQ ID NO: 84210) and RPVQ-AA¹⁷-RKI (SEQ ID NO: 84879):KKATV (SEQ ID NO: 84212); wherein AA¹⁷ is selected from the group consisting of G, A, V, L, I, P, F, M, W, T and S (in particular is selected from the group consisting of M, V and T).

[0513] In other embodiments also useful for inducing differentiation of mensenchymal or progenitor stem cells from the vascular cell lineage, enhancing of endothelization, vascularization/angiogenesis, protecting a subject from heart tissue degeneration-related diseases, disorders, conditions or pathologies, PEP3 is selected from the group consisting of VPT, SRV and TQV; PEP4 is selected from the group consisting of QHN, EHS, EEH and EDH; and wherein the pair PEP3:PEP4 is selected from the group consisting of VPT:QHN, VPT:EHS, SRV:EEH and TQV:EDH.

[0514] In other embodiments also useful for inducing differentiation of mensenchymal or progenitor stem cells from the vascular cell lineage, enhancing of endothelization, vascularization/angiogenesis, protecting a subject from heart tissue degeneration-related diseases, disorders, conditions or pathologies, PEP5 is selected from the group consisting of VPTGQ (SEQ ID NO: 84379), VPTEE (SEQ ID NO: 84377), SRVHH (SEQ ID NO: 84297) and TQVQL (SEQ ID NO: 84340); PEP6 is selected from the group consisting of LEEHS (SEQ ID NO: 84217), FLQHN (SEQ ID NO: 84184), RLEEH (SEQ ID NO: 84279) and TLEDH (SEQ ID NO: 84307); and wherein the pair PEP5:PEP6 is selected from the group consisting of VPTGQ (SEQ ID NO: 84379):LEEHS (SEQ ID NO: 84217), VPTEE (SEQ ID NO: 84377):FLQHN (SEQ ID NO: 84184), SRVHH (SEQ ID NO: 84297):RLEEH (SEQ ID NO: 84279) and TQVQL (SEQ ID NO: 84340):TLEDH (SEQ ID NO: 84307).

[0515] In other embodiments also useful for inducing differentiation of mensenchymal or progenitor stem cells from the vascular cell lineage, enhancing of endothelization, vascularization/angiogenesis, protecting a subject from heart tissue degeneration-related diseases, disorders, conditions or pathologies, PEP7 is selected from the group consisting of NDEGLEX (SEQ ID NO: 84426), SSVKXQP (SEQ ID NO: 84430) and RNVQXRP (SEQ ID NO: 84427); wherein PEP8 is selected from the group consisting of KXEXR (SEQ ID NO: 84213), QXEXR (SEQ ID NO: 84276), LEXAXA (SEQ ID NO: 84400) and LAXKXE (SEQ ID NO: 84399); and wherein the pair PEP7:PEP8 is selected from the group consisting of NDEGLEX (SEQ ID NO: 84426):KXEXR (SEQ ID NO: 84213), NDEGLEX (SEQ ID NO: 84426):QXEXR (SEQ ID NO: 84276), SSVKXQP (SEQ ID NO: 84430):LEXAXA (SEQ ID NO: 84400) and RNVQXRP (SEQ ID NO: 84427):LAXKXE (SEQ ID NO: 84399).

[0516] In other embodiments also useful for inducing differentiation of mensenchymal or progenitor stem cells from the vascular cell lineage, enhancing of endothelization, vascularization/angiogenesis, protecting a subject from heart tissue degeneration-related diseases, disorders, conditions or pathologies, PEP9 is selected from the group consisting of NDEGLEXVPTEE (SEQ ID NO: 84798), NDEGLEXVPTGQ (SEQ ID NO: 84799), SSVKXQPSRVHH (SEQ ID NO: 84834) and RNVQXRPTQVQL (SEQ ID NO: 84806); PEP10 is selected from the group consisting of FLQHNKXEXR (SEQ ID NO: 84536), LEEHSQXEXR (SEQ ID NO: 84577), RLEEHLEXAXA (SEQ ID NO: 84646) and TLEDHLAXKXE (SEQ ID NO: 84659); and wherein the pair PEP9:PEP10 is selected from the group consisting of NDEGLEXVPTEE (SEQ ID NO: 84798):FLQHNKXEXR (SEQ ID NO: 84536), NDEGLEXVPTGQ (SEQ ID NO: 84799):LEEHSQXEXR (SEQ ID NO: 84577), SSVKXQPSRVHH (SEQ ID NO: 84834):RLEEHLEXAXA (SEQ ID NO: 84646) and RNVQXRPTQVQL (SEQ ID NO: 84806):TLEDHLAXKXE (SEQ ID NO: 84659).

[0517] In other embodiments also useful for inducing differentiation of mensenchymal or progenitor stem cells from the vascular cell lineage, enhancing of endothelization, vascularization/angiogenesis, protecting a subject from heart tissue degeneration-related diseases, disorders, conditions or pathologies, PEP5 is selected from the group consisting of VPTGQ (SEQ ID NO: 84379), VPTEE (SEQ ID NO: 84377), SRVHH (SEQ ID NO: 84297) and TQVQL (SEQ ID NO: 84340); PEP6 is selected from the group consisting of LEEHS (SEQ ID NO: 84217), FLQHN (SEQ ID NO: 84184), RLEEH (SEQ ID NO: 84279) and TLEDH (SEQ ID NO: 84307); and wherein the pair PEP5:PEP6 is selected from the group consisting of VPTGQ (SEQ ID NO: 84379):LEEHS (SEQ ID NO: 84217), VPTEE (SEQ ID NO: 84377):FLQHN (SEQ ID NO: 84184), SRVHH (SEQ ID NO: 84297):RLEEH (SEQ ID NO: 84279) and TQVQL (SEQ ID NO: 84340):TLEDH (SEQ ID NO: 84307); wherein the pair PEP5:PEP6 is not VPTEE (SEQ ID NO: 84377):FLQHN (SEQ ID NO: 84184) when PEP1 is SNIT (SEQ ID NO: 84118) and PEP2 is IGEMS (SEQ ID NO: 84209); wherein the pair PEP5:PEP6 is not VPTGQ (SEQ ID NO: 84379):LEEHS (SEQ ID NO: 84217) when PEP1 is SNIT (SEQ ID NO: 84118) and PEP2 is LGEMS (SEQ ID NO: 84228); wherein the pair PEP5:PEP6 is not SRVHH (SEQ ID NO: 84297):RLEEH (SEQ ID NO: 84279) when PEP1 is RSVK (SEQ ID NO: 84115) and PEP2 is KEVQV (SEQ ID NO: 84210); and wherein the pair PEP5:PEP6 is not TQVQL (SEQ ID NO: 84340):TLEDH (SEQ ID NO: 84307) when PEP1 is RPVQ (SEQ ID NO: 84114) and PEP2 is KKATV (SEQ ID NO: 84212).

[0518] In other embodiments also useful for inducing differentiation of mensenchymal or progenitor stem cells from the vascular cell lineage, enhancing of endothelization, vascularization/angiogenesis, protecting a subject from heart tissue degeneration-related diseases, disorders, conditions or pathologies, PEP9 is selected from the group consisting of NDEGLEXVPTEE (SEQ ID NO: 84798), NDEGLEXVPTGQ (SEQ ID NO: 84799), SSVKXQPSRVHH (SEQ ID NO: 84834) and RNVQXRPTQVQL (SEQ ID NO: 84806); PEP10 is selected from the group consisting of FLQHNKXEXR (SEQ ID NO: 84536), LEEHSQXEXR (SEQ ID NO: 84577), RLEEHLEXAXA (SEQ ID NO: 84646) and TLEDHLAXKXE (SEQ ID NO: 84659); and wherein the pair PEP9:PEP10 is selected from the group consisting of NDEGLEXVPTEE (SEQ ID NO: 84798):FLQHNKXEXR (SEQ ID NO: 84536), NDEGLEXVPTGQ (SEQ ID NO: 84799):LEEHSQXEXR (SEQ ID NO: 84577), SSVKXQPSRVHH (SEQ ID NO: 84834):RLEEHLEXAXA (SEQ ID NO: 84646) and RNVQXRPTQVQL (SEQ ID NO: 84806):TLEDHLAXKXE (SEQ ID NO: 84659); wherein the pair PEP9:PEP10 is not NDEGLEXVPTEE (SEQ ID NO: 84798):FLQHNKXEXR (SEQ ID NO: 84536) when PEP1 is SNIT (SEQ ID NO: 84118) and PEP2 is IGEMS (SEQ ID NO: 84209); wherein the pair PEP9:PEP10 is not NDEGLEXVPTGQ (SEQ ID NO: 84799):LEEHSQXEXR (SEQ ID NO: 84577) when PEP1 is SNIT (SEQ ID NO: 84118) and PEP2 is LGEMS (SEQ ID NO: 84228); wherein the pair PEP9:PEP10 is not SSVKXQPSRVHH (SEQ ID NO: 84834):RLEEHLEXAXA (SEQ ID NO: 84646) when PEP1 is RSVK (SEQ ID NO: 84115) and PEP2 is KEVQV (SEQ ID NO: 84210); and wherein the pair PEP9:PEP10 is not RNVQXRPTQVQL (SEQ ID NO: 84806):TLEDHLAXKXE (SEQ ID NO: 84659) when PEP1 is RPVQ (SEQ ID NO: 84114) and PEP2 is KKATV (SEQ ID NO: 84212).

[0519] In other embodiments also useful for inducing differentiation of mensenchymal or progenitor stem cells from the vascular cell lineage, enhancing of endothelization, vascularization/angiogenesis, protecting a subject from heart tissue degeneration-related diseases, disorders, conditions or pathologies, PEP1 is selected from the group consisting of SNIT (SEQ ID NO: 84118), RPVQ (SEQ ID NO: 84114) and RSVK (SEQ ID NO: 84115); PEP11 is selected from the group consisting of QIM, AKV and RKI; and the pair PEP1:PEP11 is selected from the group consisting of SNIT (SEQ ID NO: 84118):QIM, RSVK (SEQ ID NO: 84115):KEVQV (SEQ ID NO: 84210) and RPVQ (SEQ ID NO: 84114):KKATV (SEQ ID NO: 84212).

[0520] In one aspect, the present disclosure provides a GFR-binding compound, wherein said GFR-binding compound is a peptide, a variant or analog thereof, or a peptidomimetic as defined herein, with between 20 and 60 (in particular between 20 and 50, and more particularly, between 20 and 45) amino acids, comprising a peptide with four amino acids (PEP1) or a peptide with eight amino acids (PEP12), a peptide with five amino acids (PEP2), and optionally a pair of peptides selected form the group consisting of PEP3:PEP4, PEP3:PEP6, PEP3:PEP10, PEP5:PEP4, PEP9:PEP4, PEP5:PEP6, PEP5:PEP10, PEP9:PEP6 and PEP9:PEP10; wherein said GFR-binding compound does not comprise the pair of peptides VPTEE (SEQ ID NO: 84377):FLQHN (SEQ ID NO: 84184) when PEP1 is SNIT (SEQ ID NO: 84118) and PEP2 is IGEMS (SEQ ID NO: 84209); wherein said GFR-binding compound does not comprise the pair of peptides VPTGQ (SEQ ID NO: 84379):LEEHS (SEQ ID NO: 84217) when PEP1 is SNIT (SEQ ID NO: 84118) and PEP2 is LGEMS (SEQ ID NO: 84228); wherein said GFR-binding compound does not comprise the pair of peptides SRVHH (SEQ ID NO: 84297):RLEEH (SEQ ID NO: 84279) when PEP1 is RSVK (SEQ ID NO: 84115) and PEP2 is KEVQV (SEQ ID NO: 84210); and wherein said GFR-binding compound does not comprise the pair of peptides TQVQL (SEQ ID NO: 84340):TLEDH (SEQ ID NO: 84307) when PEP1 is RPVQ (SEQ ID NO: 84114) and PEP2 is KKATV (SEQ ID NO: 84212); and wherein the RMSD is 2.45 Å or less.

[0521] In one aspect, the present disclosure provides a GFR-binding compound, wherein said GFR-binding compound is a peptide, a variant or analog thereof, or a peptidomimetic as defined herein, with between 20 and 60 (in particular between 20 and 50, and more particularly, between 20 and 45) amino acids, comprising a peptide with four amino acids (PEP1) or a peptide with eight amino acids (PEP12), a peptide with five amino acids (PEP2), and optionally a pair of peptides selected form the group consisting of PEP3:PEP4, PEP3:PEP6, PEP3:PEP10, PEP5:PEP4, PEP9:PEP4, PEP5:PEP6, PEP5:PEP10, PEP9:PEP6 and PEP9:PEP10; wherein said GFR-binding compound does not comprise the pair of peptides NDEGLEXVPTEE (SEQ ID NO: 84798):FLQHNKXEXR (SEQ ID NO: 84536) when PEP1 is SNIT (SEQ ID NO: 84118) and PEP2 is IGEMS (SEQ ID NO: 84209); wherein said GFR-binding compound does not comprise the pair of peptides NDEGLEXVPTGQ (SEQ ID NO: 84799):LEEHSQXEXR (SEQ ID NO: 84577) when PEP1 is SNIT (SEQ ID NO: 84118) and PEP2 is LGEMS (SEQ ID NO: 84228); wherein said GFR-binding compound does not comprise the pair of peptides SSVKXQPSRVHH (SEQ ID NO: 84834):RLEEHLEXAXA (SEQ ID NO: 84646) when PEP1 is RSVK (SEQ ID NO: 84115) and PEP2 is KEVQV (SEQ ID NO: 84210); and wherein said GFR-binding compound does not comprise the pair of peptides RNVQXRPTQVQL (SEQ ID NO: 84806):TLEDHLAXKXE (SEQ ID NO: 84659) when PEP1 is RPVQ (SEQ ID NO: 84114) and PEP2 is KKATV (SEQ ID NO: 84212); and wherein the RMSD is 2.45 Å or less.

[0522] In other embodiments also useful for inducing differentiation of mensenchymal or progenitor stem cells from the vascular cell lineage, enhancing of endothelization, vascularization/angiogenesis, protecting a subject from heart tissue degeneration-related diseases, disorders, conditions or pathologies, said GFR-binding compound is a synthetic molecule as defined herein in the definition section.

[0523] In other embodiments also useful for inducing differentiation of mensenchymal or progenitor stem cells from the vascular cell lineage, enhancing of endothelization, vascularization/angiogenesis, protecting a subject from heart tissue degeneration-related diseases, disorders, conditions or pathologies, said GFR-binding compound is a synthetic peptide, or a variant or analog thereof, or a peptidomimetic.

### Neuroregeneration

[0524] Certain embodiments of the invention are particularly useful for inducing differentiation of mensenchymal or progenitor stem cells from the neuronal cell lineage, promoting neuron-regeneration, and protecting from neuron degeneration-related conditions and diseases.

[0525] In certain embodiments useful for inducing differentiation of mensenchymal or progenitor stem cells from the neuronal cell lineage, promoting neuron-regeneration, and protecting from neuron degeneration-related conditions and diseases, PEP1 is selected from the group consisting of NAIS (SEQ ID NO: 84113), SPIS (SEQ ID NO: 84120) and EPIS (SEQ ID NO: 84109).

[0526] In certain embodiments useful for inducing differentiation of mensenchymal or progenitor stem cells from the neuronal cell lineage, promoting neuron-regeneration, and protecting from neuron degeneration-related conditions and diseases, PEP2 is selected from the group consisting of LKKYR (SEQ ID NO: 84229), LKYHY (SEQ ID NO: 84232), YKQYE (SEQ ID NO: 84398) and KFKYE (SEQ ID NO: 84211).

[0527] In certain embodiments useful for inducing differentiation of mensenchymal or progenitor stem cells from the neuronal cell lineage, promoting neuron-regeneration, and protecting from neuron degeneration-related conditions and diseases, PEP3 is selected from the group consisting of VPT, APT, VPA, VPQ and VSQ.

[0528] In certain embodiments useful for inducing differentiation of mensenchymal or progenitor stem cells from the neuronal cell lineage, promoting neuron-regeneration, and protecting from neuron degeneration-related conditions and diseases, PEP4 is selected from the group consisting of VVE, VVR, VVK, VAE, AVS, VRS and VKS.

[0529] In certain embodiments useful for inducing differentiation of mensenchymal or progenitor stem cells from the neuronal cell lineage, promoting neuron-regeneration, and protecting from neuron degeneration-related conditions and diseases, PEP5 is a peptide of general formula PEP3-AA¹¹-AA¹²; wherein PEP3 is selected from the group consisting of VPT, APT, VPA, VPQ and VSQ; wherein AA¹¹ is selected from the group consisting of E, K, Q, R, A, D, G and H, in particular E, K, Q, R, A and D; wherein AA¹² is selected from the group consisting of L, M, T, E, Q and H, in particular L. In one particular example, PEP5 is selected from the group consisting of VPTEL (SEQ ID NO: 84378), APTKL (SEQ ID NO: 84131), APTQL (SEQ ID NO: 84134), VPTKL (SEQ ID NO: 84381), VPARL (SEQ ID NO: 84352), VPQAL (SEQ ID NO: 84364), VSQDL (SEQ ID NO: 84387) and VPQDL (SEQ ID NO: 84365).

[0530] In certain embodiments useful for inducing differentiation of mensenchymal or progenitor stem cells from the neuronal cell lineage, promoting neuron-regeneration, and protecting from neuron degeneration-related conditions and diseases, PEP6 is a peptide of general formula AA²⁶-AA²⁷-AA²⁸-AA²⁹-PEP4; wherein PEP4 is selected from the group consisting of VVE, VVR, VVK, VAE, AVS, VRS and VKS; wherein AA²⁶ is absent or selected from the group consisting of AA^{III} amino acids, preferably absent or E; wherein AA²⁷ and AA²⁸ are independently selected from the group consisting of AA^{III} and AA^{V} amino acids, preferably AA²⁷ is selected from the group consisting of D, E, N, G and M, preferably AA²⁸ is selected from the group consisting of M, I and V; wherein AA²⁹ is absent or selected from the group consisting of AA^{II} amino acids, preferably absent or S. In one particular example, PEP6 is selected from the group consisting of DMVVE (SEQ ID NO: 84161), EMVVE (SEQ ID NO: 84175), NMVVR (SEQ ID NO: 84275), NMVVK (SEQ ID NO: 84274), EGMSVAE (SEQ ID NO: 84411), GMAVS (SEQ ID NO: 84194), DMVVE (SEQ ID NO: 84161), MIVRS (SEQ ID NO: 84243), MIVKS (SEQ ID NO: 84242) and MVVKS (SEQ ID NO: 84256).

[0531] In certain embodiments useful for inducing differentiation of mensenchymal or progenitor stem cells from the neuronal cell lineage, promoting neuron-regeneration, and protecting from neuron degeneration-related conditions and diseases, PEP7 is an amino acid or a peptide with between two and seven amino acids of general formula AA¹-AA²-AA³-AA⁴-AA⁵-AA⁶-AA⁷ (SEQ ID NO: 84948); wherein AA¹, AA², AA³, AA⁴, and AA⁵ are independently absent or AA^{I} as defined herein; wherein AA⁶ is absent or selected from the group consisting of S, T, C, E, Q, P and R, preferably S or C; wherein AA⁷ is absent or is selected from the group consisting of S, T, C, E, Q, P and R, preferably is S or C; and wherein at least one of AA¹, AA², AA³, AA⁴, AA⁵, AA⁶ or AA⁷ is not absent. In one particular example, PEP7 is selected from the group consisting of KIPKAXX (SEQ ID NO: 84424), SIPKAXX (SEQ ID NO: 84429), HVTKPTX (SEQ ID NO: 84422), YVPKPXX (SEQ ID NO: 84433), TVPKPXX (SEQ ID NO: 84432), AVPKAXX (SEQ ID NO: 84404), KVGKAXX (SEQ ID NO: 84425), ASAAPXX (SEQ ID NO: 84402), ASASPXX (SEQ ID NO: 84403) and RNVQXRP (SEQ ID NO: 84427).

[0532] In certain embodiments useful for inducing differentiation of mensenchymal or progenitor stem cells from the neuronal cell lineage, promoting neuron-regeneration, and protecting from neuron degeneration-related conditions and diseases, PEP8 is an amino acid or a peptide with between two and six amino acids of general formula AA³³-AA³⁴-AA³⁵-AA³⁶-AA³⁷-AA³⁸ (SEQ ID NO: 84949); wherein AA³³ is absent or is selected from the group consisting of AA^{I} amino acids at the exception of AA^{VI} amino acids, in particular is absent or is selected from the group consisting of G, S, A and E; AA³⁴ is absent or is selected from the group consisting of AA^{III} and AA^{IV} amino acids, in particular is absent; wherein AA³⁵ is absent or is selected from the group consisting of AA^{II} amino acids, preferably is S or C; wherein AA³⁶ is absent or is selected from the group consisting of AA^{III} and AA^{IV} amino acids, in particular is G or K; wherein AA³⁷ is absent or is selected from the group consisting of AA^{II} amino acids, preferably is S or C; wherein AA³⁸ is absent or is selected from the group consisting of AA^{I}, in particular is selected from the group consisting of R, H and S; and wherein at least one of AA³³, AA³⁴, AA³⁵, AA³⁶, AA³⁷ or AA³⁸ is not absent. In one particular example, PEP8 is selected from the group consisting of GXGXR (SEQ ID NO: 84208), SXGXH (SEQ ID NO: 84304), AXGXH (SEQ ID NO: 84147), XGXR (SEQ ID NO: 84123), XKXS (SEQ ID NO: 84124) and LAXKXE (SEQ ID NO: 84399).

[0533] In certain embodiments useful for inducing differentiation of mensenchymal or progenitor stem cells from the neuronal cell lineage, promoting neuron-regeneration, and protecting from neuron degeneration-related conditions and diseases, PEP9 is a peptide of general formula AA¹-AA²-AA³-AA⁴-AA⁵-AA⁶-AA⁷-PEP5; wherein PEP5 is a peptide of formula PEP3-AA¹¹-AA¹²; wherein PEP3 is selected from the group consisting of VPT, APT, VPA, VPQ and VSQ; wherein AA¹¹ is selected from the group consisting of E, K, Q, R, A, D, G and H, in particular E, K, Q, R, A and D; wherein AA¹² is selected from the group consisting of L, M, T, E, Q and H, in particular L; wherein AA¹, AA², AA³, AA⁴, and AA⁵ are independently absent or AA^{I} as defined herein; wherein AA⁶ is absent or selected from the group consisting of S, T, C, E, Q, P and R, preferably S or C; wherein AA⁷ is selected from the group consisting of S, T, C, E, Q, P and R, preferably is S or C. In one particular example, PEP9 is selected from the group consisting of KIPKAXXVPTEL (SEQ ID NO: 84770), SIPKAXXVPTEL (SEQ ID NO: 84830), HVTKPTXAPTKL (SEQ ID NO: 84742), YVPKPXXAPTKL (SEQ ID NO: 84864), TVPKPXXAPTQL (SEQ ID NO: 84854), AVPKAXXAPTKL (SEQ ID NO: 84704), KVGKAXXVPTKL (SEQ ID NO: 84780), ASAAPXXVPQAL (SEQ ID NO: 84689), ASASPXXVSQDL (SEQ ID NO: 84701), ASASPXXVPQDL (SEQ ID NO: 84699) and RNVQXRPTQVQL (SEQ ID NO: 84806).

[0534] In certain embodiments useful for inducing differentiation of mensenchymal or progenitor stem cells from the neuronal cell lineage, promoting neuron-regeneration, and protecting from neuron degeneration-related conditions and diseases, PEP10 is a peptide of general formula PEP6-AA³³-AA³⁴-AA³⁵-AA³⁶-AA³⁷-AA³⁸; wherein PEP6 is a peptide of formula AA²⁶-AA²⁷-AA²⁸-AA²⁹-PEP4; wherein PEP4 is selected from the group consisting of VVE, VVR, VVK, VAE, AVS, VRS and VKS; wherein AA²⁶ is absent or selected from the group consisting of AA^{III} amino acids, preferably absent or E; wherein AA²⁷ and AA²⁸ are independently selected from the group consisting of AA^{III} and AA^{V} amino acids, preferably AA²⁷ is selected from the group consisting of D, E, N, G and M, preferably AA²⁸ is selected from the group consisting of M, I and V; wherein AA²⁹ is absent or selected from the group consisting of AA^{II} amino acids, preferably absent or S; wherein AA³³ is absent or is selected from the group consisting of AA^{I} amino acids at the exception of AA^{VI} amino acids, in particular is absent or is selected from the group consisting of G, S, A and E; AA³⁴ is absent or is selected from the group consisting of AA^{III} and AA^{IV} amino acids, in particular is absent; wherein AA³⁵ is absent or is selected from the group consisting of AA^{II} amino acids, preferably is S or C; wherein AA³⁶ is absent or is selected from the group consisting of AA^{III} and AA^{IV} amino acids, in particular is G or K; wherein AA³⁷ is absent or is selected from the group consisting of AA^{II} amino acids, preferably is S or C; wherein AA³⁸ is absent or is selected from the group consisting of AA^{I}, in particular is selected from the group consisting of R, H and S. In one particular example, PEP10 is selected from the group consisting of DMVVEGXGXR (SEQ ID NO: 84510), EMVVEGXGXR (SEQ ID NO: 84529), NMVVRSXGXH (SEQ ID NO: 84629), NMVVRAXGXH (SEQ ID NO: 84627), NMVVKAXGXH (SEQ ID NO: 84624), EGMSVAEXGXR (SEQ ID NO: 84636), MIVRSXKXS (SEQ ID NO: 84453), MIVKSXKXS (SEQ ID NO: 84451), MVVKSXKXS (SEQ ID NO: 84470) and TLEDHLAXKXE (SEQ ID NO: 84659).

[0535] In certain embodiments useful for inducing differentiation of mensenchymal or progenitor stem cells from the neuronal cell lineage, promoting neuron-regeneration, and protecting from neuron degeneration-related conditions and diseases, PEP12 is a peptide of general formula PEP1-AA¹⁷-PEP11; wherein AA¹⁷ is selected from the group consisting of G, A, V, L, I, P, F, M, W, T and S (in particular is selected from the group consisting of M, I, L, V and T); wherein PEP1 is selected from the group consisting of NAIS (SEQ ID NO: 84113), SPIS (SEQ ID NO: 84120) and EPIS (SEQ ID NO: 84109).

[0536] In certain embodiments useful for inducing differentiation of mensenchymal or progenitor stem cells from the neuronal cell lineage, promoting neuron-regeneration, and protecting from neuron degeneration-related conditions and diseases, PEP11 is a peptide with 3 amino acids of general formula AA¹⁸-AA¹⁹-AA²⁰; wherein AA¹⁸ is selected from the group consisting of L, V, Q, A and R, in particular is L; wherein AA¹⁹ is selected from the group consisting of F, W, H and Y (in particular is an aromatic, polar amino acid such as Y); wherein AA²⁰ is selected from the group consisting of L, F, Y, K, I, V and M, in particular is selected from the group consisting of L, F, I, and K. In one particular example, PEP11 is selected from the group consisting of LYL, LYF, LYI and LYK.

[0537] The definitions of “PEP” pairs, quadruplets, hexaplets and heptuplet e.g. PEP1:PEP2, PEP12:PEP2, or PEP7:PEP5:PEP12:LINKER:PEP2:PEP6:PEP8, most particularly useful for inducing differentiation of mensenchymal or progenitor stem cells from the neuronal cell lineage, promoting neuron-regeneration, and protecting from neuron degeneration-related conditions and diseases, are as already defined herein to the extent that PEP1 to PEP12 are particularly useful for these applications. For instances:

[0538] In certain embodiments useful for inducing differentiation of mensenchymal or progenitor stem cells from the neuronal cell lineage, promoting neuron-regeneration, and protecting from neuron degeneration-related conditions and diseases, the pair PEP1:PEP2 is selected from the group consisting of NAIS (SEQ ID NO: 84113):LKKYR (SEQ ID NO: 84229), SPIS (SEQ ID NO: 84120):LKYHY (SEQ ID NO: 84232), EPIS (SEQ ID NO: 84109):KFKYE (SEQ ID NO: 84211) and SPIS (SEQ ID NO: 84120):YKQYE (SEQ ID NO: 84398).

[0539] In certain embodiments useful for inducing differentiation of mensenchymal or progenitor stem cells from the neuronal cell lineage, promoting neuron-regeneration, and protecting from neuron degeneration-related conditions and diseases, the pair PEP12:PEP2 is selected from the group consisting of NAIS-AA¹⁷-LYF (SEQ ID NO: 84878):LKKYR (SEQ ID NO: 84229), SPIS-AA¹⁷-LYK (SEQ ID NO: 84887):LKYHY (SEQ ID NO: 84232), EPIS-AA¹⁷-LYL (SEQ ID NO: 84874):KFKYE (SEQ ID NO: 84211) and SPIS-AA¹⁷-LYI (SEQ ID NO: 84886):YKQYE (SEQ ID NO: 84398); wherein AA¹⁷ is selected from the group consisting of G, A, V, L, I, P, F, M, W, T and S (in particular is selected from the group consisting of V, I and T).

[0540] In certain embodiments useful for inducing differentiation of mensenchymal or progenitor stem cells from the neuronal cell lineage, promoting neuron-regeneration, and protecting from neuron degeneration-related conditions and diseases, PEP3 is selected from the group consisting of VPT, APT, VPA, VPQ and VSQ; PEP4 is selected from the group consisting of VVE, VVR, VVK, VAE, AVS, VRS and VKS; and wherein the pair PEP3:PEP4 is selected from the group consisting of VPT:VVE, APT:VVR, APT:VVK, VPT:VAE, VPT:AVS, VPA:VVE, VPQ:VRS, VSQ:VKS and VPQ:VKS.

[0541] In certain embodiments useful for inducing differentiation of mensenchymal or progenitor stem cells from the neuronal cell lineage, promoting neuron-regeneration, and protecting from neuron degeneration-related conditions and diseases, PEP5 is selected from the group consisting of VPTEL (SEQ ID NO: 84378), APTKL (SEQ ID NO: 84131), APTQL (SEQ ID NO: 84134), VPTKL (SEQ ID NO: 84381), VPARL (SEQ ID NO: 84352), VPQAL (SEQ ID NO: 84364), VSQDL (SEQ ID NO: 84387) and VPQDL (SEQ ID NO: 84365); PEP6 is selected from the group consisting of DMVVE (SEQ ID NO: 84161), EMVVE (SEQ ID NO: 84175), NMVVR (SEQ ID NO: 84275), NMVVK (SEQ ID NO: 84274), EGMSVAE (SEQ ID NO: 84411), GMAVS (SEQ ID NO: 84194), DMVVE (SEQ ID NO: 84161), MIVRS (SEQ ID NO: 84243), MIVKS (SEQ ID NO: 84242) and MVVKS (SEQ ID NO: 84256); and wherein the pair PEP5:PEP6 is selected from the group consisting of VPTEL (SEQ ID NO: 84378):DMVVE (SEQ ID NO: 84161), VPTEL (SEQ ID NO: 84378):EMVVE (SEQ ID NO: 84175), APTKL (SEQ ID NO: 84131):NMVVR (SEQ ID NO: 84275), APTQL (SEQ ID NO: 84134):NMVV, APTKL (SEQ ID NO: 84131):NMVVK (SEQ ID NO: 84274), VPTKL (SEQ ID NO: 84381):EGMSVAE (SEQ ID NO: 84411), VPTKL (SEQ ID NO: 84381):EGMAVS, VPARL (SEQ ID NO: 84352):DMVVE (SEQ ID NO: 84161), VPQAL (SEQ ID NO: 84364):MIVRS (SEQ ID NO: 84243), VSQDL (SEQ ID NO: 84387):MIVKS (SEQ ID NO: 84242) and VPQDL (SEQ ID NO: 84365):MVVKS (SEQ ID NO: 84256).

[0542] In certain embodiments useful for inducing differentiation of mensenchymal or progenitor stem cells from the neuronal cell lineage, promoting neuron-regeneration, and protecting from neuron degeneration-related conditions and diseases, PEP7 is selected from the group consisting of KIPKAXX (SEQ ID NO: 84424), SIPKAXX (SEQ ID NO: 84429), HVTKPTX (SEQ ID NO: 84422), YVPKPXX (SEQ ID NO: 84433), TVPKPXX (SEQ ID NO: 84432), AVPKAXX (SEQ ID NO: 84404), KVGKAXX (SEQ ID NO: 84425), ASAAPXX (SEQ ID NO: 84402), ASASPXX (SEQ ID NO: 84403) and RNVQXRP (SEQ ID NO: 84427); wherein PEP8 is selected from the group consisting of GXGXR (SEQ ID NO: 84208), SXGXH (SEQ ID NO: 84304), AXGXH (SEQ ID NO: 84147), XGXR (SEQ ID NO: 84123), XKXS (SEQ ID NO: 84124) and LAXKXE (SEQ ID NO: 84399); and wherein the pair PEP7:PEP8 is selected from the group consisting of KIPKAXX (SEQ ID NO: 84424):GXGXR (SEQ ID NO: 84208), SIPKAXX (SEQ ID NO: 84429):GXGXR (SEQ ID NO: 84208), HVTKPTX (SEQ ID NO: 84422):SXGXH (SEQ ID NO: 84304), YVPKPXX (SEQ ID NO: 84433):SXGXH (SEQ ID NO: 84304), TVPKPXX (SEQ ID NO: 84432):AXGXH (SEQ ID NO: 84147), AVPKAXX (SEQ ID NO: 84404):AXGXH (SEQ ID NO: 84147), KVGKAXX (SEQ ID NO: 84425):XGXR (SEQ ID NO: 84123), KASKAXX (SEQ ID NO: 84423):EXGXR (SEQ ID NO: 84179), AAPASXX (SEQ ID NO: 84401):AXGXR (SEQ ID NO: 84148), ASAAPXX (SEQ ID NO: 84402):XKXS (SEQ ID NO: 84124), ASASPXX (SEQ ID NO: 84403):XKXS (SEQ ID NO: 84124) and ASASPXX (SEQ ID NO: 84403):XKXS (SEQ ID NO: 84124).

[0543] In certain embodiments useful for inducing differentiation of mensenchymal or progenitor stem cells from the neuronal cell lineage, promoting neuron-regeneration, and protecting from neuron degeneration-related conditions and diseases, PEP9 is selected from the group consisting of KIPKAXXVPTEL (SEQ ID NO: 84770), SIPKAXXVPTEL (SEQ ID NO: 84830), HVTKPTXAPTKL (SEQ ID NO: 84742), YVPKPXXAPTKL (SEQ ID NO: 84864), TVPKPXXAPTQL (SEQ ID NO: 84854), AVPKAXXAPTKL (SEQ ID NO: 84704), KVGKAXXVPTKL (SEQ ID NO: 84780), ASAAPXXVPQAL (SEQ ID NO: 84689), ASASPXXVSQDL (SEQ ID NO: 84701), ASASPXXVPQDL (SEQ ID NO: 84699) and RNVQXRPTQVQL (SEQ ID NO: 84806); PEP10 is selected from the group consisting of DMVVEGXGXR (SEQ ID NO: 84510), EMVVEGXGXR (SEQ ID NO: 84529), NMVVRSXGXH (SEQ ID NO: 84629), NMVVRAXGXH (SEQ ID NO: 84627), NMVVKAXGXH (SEQ ID NO: 84624), EGMSVAEXGXR (SEQ ID NO: 84636), MIVRSXKXS (SEQ ID NO: 84453), MIVKSXKXS (SEQ ID NO: 84451), MVVKSXKXS (SEQ ID NO: 84470) and TLEDHLAXKXE (SEQ ID NO: 84659); and wherein the pair PEP9:PEP10 is selected from the group consisting of KIPKAXXVPTEL (SEQ ID NO: 84770):DMVVEGXGXR (SEQ ID NO: 84510), SIPKAXXVPTEL (SEQ ID NO: 84830):EMVVEGXGXR (SEQ ID NO: 84529), HVTKPTXAPTKL (SEQ ID NO: 84742):NMVVRSXGXH (SEQ ID NO: 84629), YVPKPXXAPTKL (SEQ ID NO: 84864):NMVVRSXGXH (SEQ ID NO: 84629), TVPKPXXAPTQL (SEQ ID NO: 84854):NMVVRAXGXH (SEQ ID NO: 84627), AVPKAXXAPTKL (SEQ ID NO: 84704):NMVVKAXGXH (SEQ ID NO: 84624), KVGKAXXVPTKL (SEQ ID NO: 84780):EGMSVAEXGXR (SEQ ID NO: 84636), KASKAXXVPTKL (SEQ ID NO: 84760):GMAVSEXGXR (SEQ ID NO: 84546), AAPASXXVPARL (SEQ ID NO: 84677):DMVVEAXGXR (SEQ ID NO: 84509), ASAAPXXVPQAL (SEQ ID NO: 84689):MIVRSXKXS (SEQ ID NO: 84453), ASASPXXVSQDL (SEQ ID NO: 84701):MIVKSXKXS (SEQ ID NO: 84451) and ASASPXXVPQDL (SEQ ID NO: 84699):MVVKSXKXS (SEQ ID NO: 84470).

[0544] In certain embodiments useful for inducing differentiation of mensenchymal or progenitor stem cells from the neuronal cell lineage, promoting neuron-regeneration, and protecting from neuron degeneration-related conditions and diseases, PEP5 is selected from the group consisting of VPTEL (SEQ ID NO: 84378), APTKL (SEQ ID NO: 84131), APTQL (SEQ ID NO: 84134), VPTKL (SEQ ID NO: 84381), VPARL (SEQ ID NO: 84352), VPQAL (SEQ ID NO: 84364), VSQDL (SEQ ID NO: 84387) and VPQDL (SEQ ID NO: 84365); PEP6 is selected from the group consisting of DMVVE (SEQ ID NO: 84161), EMVVE (SEQ ID NO: 84175), NMVVR (SEQ ID NO: 84275), NMVVK (SEQ ID NO: 84274), EGMSVAE (SEQ ID NO: 84411), GMAVS (SEQ ID NO: 84194), DMVVE (SEQ ID NO: 84161), MIVRS (SEQ ID NO: 84243), MIVKS (SEQ ID NO: 84242) and MVVKS (SEQ ID NO: 84256); and wherein the pair PEP5:PEP6 is selected from the group consisting of VPTEL (SEQ ID NO: 84378):DMVVE (SEQ ID NO: 84161), VPTEL (SEQ ID NO: 84378):EMVVE (SEQ ID NO: 84175), APTKL (SEQ ID NO: 84131):NMVVR (SEQ ID NO: 84275), APTQL (SEQ ID NO: 84134):NMVV, APTKL (SEQ ID NO: 84131):NMVVK (SEQ ID NO: 84274), VPTKL (SEQ ID NO: 84381):EGMSVAE (SEQ ID NO: 84411), VPTKL (SEQ ID NO: 84381):EGMAVS, VPARL (SEQ ID NO: 84352):DMVVE (SEQ ID NO: 84161), VPQAL (SEQ ID NO: 84364):MIVRS (SEQ ID NO: 84243), VSQDL (SEQ ID NO: 84387):MIVKS (SEQ ID NO: 84242) and VPQDL (SEQ ID NO: 84365):MVVKS (SEQ ID NO: 84256); wherein the pair PEP5:PEP6 is not APTQL (SEQ ID NO: 84134):NMVVR (SEQ ID NO: 84275) when PEP1 is NAIS (SEQ ID NO: 84113) and PEP2 is LKKYR (SEQ ID NO: 84229); wherein the pair PEP5:PEP6 is not VPTKL (SEQ ID NO: 84381):EGMSVAE (SEQ ID NO: 84411) when PEP1 is SPIS (SEQ ID NO: 84120) and PEP2 is LKYHY (SEQ ID NO: 84232); wherein the pair PEP5:PEP6 is not VPTKL (SEQ ID NO: 84381):GMAVS (SEQ ID NO: 84194) when PEP1 is EPIS (SEQ ID NO: 84109) and PEP2 is KFKYE (SEQ ID NO: 84211); and wherein the pair PEP5:PEP6 is not VPARL (SEQ ID NO: 84352):DMVVE (SEQ ID NO: 84161) when PEP1 is SPIS (SEQ ID NO: 84120) and PEP2 is YKQYE (SEQ ID NO: 84398).

[0545] In certain embodiments useful for inducing differentiation of mensenchymal or progenitor stem cells from the neuronal cell lineage, promoting neuron-regeneration, and protecting from neuron degeneration-related conditions and diseases, PEP9 is selected from the group consisting of KIPKAXXVPTEL (SEQ ID NO: 84770), SIPKAXXVPTEL (SEQ ID NO: 84830), HVTKPTXAPTKL (SEQ ID NO: 84742), YVPKPXXAPTKL (SEQ ID NO: 84864), TVPKPXXAPTQL (SEQ ID NO: 84854), AVPKAXXAPTKL (SEQ ID NO: 84704), KVGKAXXVPTKL (SEQ ID NO: 84780), ASAAPXXVPQAL (SEQ ID NO: 84689), ASASPXXVSQDL (SEQ ID NO: 84701), ASASPXXVPQDL (SEQ ID NO: 84699) and RNVQXRPTQVQL (SEQ ID NO: 84806); PEP10 is selected from the group consisting of DMVVEGXGXR (SEQ ID NO: 84510), EMVVEGXGXR (SEQ ID NO: 84529), NMVVRSXGXH (SEQ ID NO: 84629), NMVVRAXGXH (SEQ ID NO: 84627), NMVVKAXGXH (SEQ ID NO: 84624), EGMSVAEXGXR (SEQ ID NO: 84636), MIVRSXKXS (SEQ ID NO: 84453), MIVKSXKXS (SEQ ID NO: 84451), MVVKSXKXS (SEQ ID NO: 84470) and TLEDHLAXKXE (SEQ ID NO: 84659); and wherein the pair PEP9:PEP10 is selected from the group consisting of KIPKAXXVPTEL (SEQ ID NO: 84770):DMVVEGXGXR (SEQ ID NO: 84510), SIPKAXXVPTEL (SEQ ID NO: 84830):EMVVEGXGXR (SEQ ID NO: 84529), HVTKPTXAPTKL (SEQ ID NO: 84742):NMVVRSXGXH (SEQ ID NO: 84629), YVPKPXXAPTKL (SEQ ID NO: 84864):NMVVRSXGXH (SEQ ID NO: 84629), TVPKPXXAPTQL (SEQ ID NO: 84854):NMVVRAXGXH (SEQ ID NO: 84627), AVPKAXXAPTKL (SEQ ID NO: 84704):NMVVKAXGXH (SEQ ID NO: 84624), KVGKAXXVPTKL (SEQ ID NO: 84780):EGMSVAEXGXR (SEQ ID NO: 84636), KASKAXXVPTKL (SEQ ID NO: 84760):GMAVSEXGXR (SEQ ID NO: 84546), AAPASXXVPARL (SEQ ID NO: 84677):DMVVEAXGXR (SEQ ID NO: 84509), ASAAPXXVPQAL (SEQ ID NO: 84689):MIVRSXKXS (SEQ ID NO: 84453), ASASPXXVSQDL (SEQ ID NO: 84701):MIVKSXKXS (SEQ ID NO: 84451) and ASASPXXVPQDL (SEQ ID NO: 84699):MVVKSXKXS (SEQ ID NO: 84470); wherein PEP9:PEP10 is not TVPKPXXAPTQL (SEQ ID NO: 84854):NMVVRAXGXH (SEQ ID NO: 84627) when PEP1 is NAIS (SEQ ID NO: 84113) and PEP2 is LKKYR (SEQ ID NO: 84229); wherein PEP9:PEP10 is not KVGKAXXVPTKL (SEQ ID NO: 84780):EGMSVAEXGXR (SEQ ID NO: 84636) when PEP1 is SPIS (SEQ ID NO: 84120) and PEP2 is LKYHY (SEQ ID NO: 84232); wherein PEP9:PEP10 is not KASKAXXVPTKL (SEQ ID NO: 84760):GMAVSEXGXR (SEQ ID NO: 84546) when PEP1 is EPIS (SEQ ID NO: 84109) and PEP2 is KFKYE (SEQ ID NO: 84211); wherein PEP9:PEP10 is not AAPASXXVPARL (SEQ ID NO: 84677):DMVVEAXGXR (SEQ ID NO: 84509) when PEP1 is SPIS (SEQ ID NO: 84120).

[0546] In certain embodiments useful for inducing differentiation of mensenchymal or progenitor stem cells from the neuronal cell lineage, promoting neuron-regeneration, and protecting from neuron degeneration-related conditions and diseases, PEP1 is selected from the group consisting of NAIS (SEQ ID NO: 84113), SPIS (SEQ ID NO: 84120) and EPIS (SEQ ID NO: 84109); PEP11 is selected from the group consisting of LYF, LYK, LYL and LYI; and the pair PEP1:PEP11 is selected from the group consisting of NAIS (SEQ ID NO: 84113):LYF, SPIS (SEQ ID NO: 84120):LYK, EPIS (SEQ ID NO: 84109):LYL and SPIS (SEQ ID NO: 84120):LYI.

[0547] In one aspect, the present disclosure provides a GFR-binding compound, wherein said GFR-binding compound is a peptide, a variant or analog thereof, or a peptidomimetic as defined herein, with between 20 and 60 (in particular between 20 and 50, and more particularly, between 20 and 45) amino acids, comprising a peptide with four amino acids (PEP1) or a peptide with eight amino acids (PEP12), a peptide with five amino acids (PEP2), and optionally a pair of peptides selected form the group consisting of PEP3:PEP4, PEP3:PEP6, PEP3:PEP10, PEP5:PEP4, PEP9:PEP4, PEP5:PEP6, PEP5:PEP10, PEP9:PEP6 and PEP9:PEP10; wherein said GFR-binding compound does not comprise the pair of peptides APTQL (SEQ ID NO: 84134):NMVVR (SEQ ID NO: 84275) when PEP1 is NAIS (SEQ ID NO: 84113) and PEP2 is LKKYR (SEQ ID NO: 84229); wherein said GFR-binding compound does not comprise the pair of peptides VPTKL (SEQ ID NO: 84381):EGMSVAE (SEQ ID NO: 84411) when PEP1 is SPIS (SEQ ID NO: 84120) and PEP2 is LKYHY (SEQ ID NO: 84232); wherein said GFR-binding compound does not comprise the pair of peptides VPTKL (SEQ ID NO: 84381):GMAVS (SEQ ID NO: 84194) when PEP1 is EPIS (SEQ ID NO: 84109) and PEP2 is KFKYE (SEQ ID NO: 84211); and wherein said GFR-binding compound does not comprise the pair of peptides VPARL (SEQ ID NO: 84352):DMVVE (SEQ ID NO: 84161) when PEP1 is SPIS (SEQ ID NO: 84120) and PEP2 is YKQYE (SEQ ID NO: 84398); and wherein the RMSD is 2.45 Å or less.

[0548] In one aspect, the present disclosure provides a GFR-binding compound, wherein said GFR-binding compound is a peptide, a variant or analog thereof, or a peptidomimetic as defined herein, with between 20 and 60 (in particular between 20 and 50, and more particularly, between 20 and 45) amino acids, comprising a peptide with four amino acids (PEP1) or a peptide with eight amino acids (PEP12), a peptide with five amino acids (PEP2), and optionally a pair of peptides selected form the group consisting of PEP3:PEP4, PEP3:PEP6, PEP3:PEP10, PEP5:PEP4, PEP9:PEP4, PEP5:PEP6, PEP5:PEP10, PEP9:PEP6 and PEP9:PEP10; wherein said GFR-binding compound does not comprise the pair of peptides TVPKPXXAPTQL (SEQ ID NO: 84854):NMVVRAXGXH (SEQ ID NO: 84627) when PEP1 is NAIS (SEQ ID NO: 84113) and PEP2 is LKKYR (SEQ ID NO: 84229), wherein said GFR-binding compound does not comprise the pair of peptides KVGKAXXVPTKL (SEQ ID NO: 84780):EGMSVAEXGXR (SEQ ID NO: 84636) when PEP1 is SPIS (SEQ ID NO: 84120) and PEP2 is LKYHY (SEQ ID NO: 84232); wherein said GFR-binding compound does not comprise the pair of peptides KASKAXXVPTKL (SEQ ID NO: 84760):GMAVSEXGXR (SEQ ID NO: 84546) when PEP1 is EPIS (SEQ ID NO: 84109) and PEP2 is KFKYE (SEQ ID NO: 84211); wherein said GFR-binding compound does not comprise the pair of peptides AAPASXXVPARL (SEQ ID NO: 84677):DMVVEAXGXR (SEQ ID NO: 84509) when PEP1 is SPIS (SEQ ID NO: 84120); and wherein the RMSD is 2.45 Å or less.

[0549] In certain embodiments useful for inducing differentiation of mensenchymal or progenitor stem cells from the neuronal cell lineage, promoting neuron-regeneration, and protecting from neuron degeneration-related conditions and diseases, said GFR-binding compound is a synthetic molecule as defined herein in the definition section.

[0550] In certain embodiments useful for inducing differentiation of mensenchymal or progenitor stem cells from the neuronal cell lineage, promoting neuron-regeneration, and protecting from neuron degeneration-related conditions and diseases, said GFR-binding compound is a synthetic peptide, or a variant or analog thereof, or a peptidomimetic.

### Eye Retina

[0551] Certain embodiments of the invention are particularly useful for inducing differentiation of mensenchymal or progenitor stem cells from the retinal cell lineage, promoting eye retina cell regeneration and protecting from eye retina cell degeneration-related conditions or diseases such as macular degeneration.

[0552] In certain embodiments useful for inducing differentiation of mensenchymal or progenitor stem cells from the retinal cell lineage, promoting eye retina cell regeneration and protecting from eye retina cell degeneration-related conditions or diseases, PEP1 is SPIN (SEQ ID NO: 84119).

[0553] In certain embodiments useful for inducing differentiation of mensenchymal or progenitor stem cells from the retinal cell lineage, promoting eye retina cell regeneration and protecting from eye retina cell degeneration-related conditions or diseases, PEP2 is YGKIP (SEQ ID NO: 84397).

[0554] In certain embodiments useful for inducing differentiation of mensenchymal or progenitor stem cells from the retinal cell lineage, promoting eye retina cell regeneration and protecting from eye retina cell degeneration-related conditions or diseases, PEP3 is selected from the group consisting of VPT, APT, TPT, VPA and APV.

[0555] In certain embodiments useful for inducing differentiation of mensenchymal or progenitor stem cells from the retinal cell lineage, promoting eye retina cell regeneration and protecting from eye retina cell degeneration-related conditions or diseases, PEP4 is selected from the group consisting of VVE, VVR, VVK, VAE, AVS, VVD and VEE.

[0556] In certain embodiments useful for inducing differentiation of mensenchymal or progenitor stem cells from the retinal cell lineage, promoting eye retina cell regeneration and protecting from eye retina cell degeneration-related conditions or diseases, PEP5 is a peptide of general formula PEP3-AA¹¹-AA¹²; wherein PEP3 is selected from the group consisting of VPT, APT, TPT, VPA and APV; wherein AA¹¹ is selected from the group consisting of E, K, Q, R, A, D, G and H, in particular is E, K, Q and R; wherein AA¹² is selected from the group consisting of L, M, T, E, Q and H, in particular is L, M or T. In one particular example, PEP5 is selected from the group consisting of VPTEL (SEQ ID NO: 84378), APTKL (SEQ ID NO: 84131), APTQL (SEQ ID NO: 84134), VPTKL (SEQ ID NO: 84381), TPTKM (SEQ ID NO: 84327), VPARL (SEQ ID NO: 84352), VPTRL (SEQ ID NO: 84385) and APVKT (SEQ ID NO: 84144).

[0557] In certain embodiments useful for inducing differentiation of mensenchymal or progenitor stem cells from the retinal cell lineage, promoting eye retina cell regeneration and protecting from eye retina cell degeneration-related conditions or diseases, PEP6 is a peptide of general formula AA²⁶-AA²⁷-AA²⁸-AA²⁹-PEP4; wherein PEP4 is selected from the group consisting of VVE, VVR, VVK, VAE, AVS, VVD and VEE; wherein AA²⁶ is absent or selected from the group consisting of AA^{III} amino acids, preferably absent or E; wherein AA²⁷ and AA²⁸ are independently selected from the group consisting of AA^{III} and AA^{V} amino acids, preferably AA²⁷ is selected from the group consisting of D, E, N, G and M, preferably AA²⁸ is M or I; wherein AA²⁹ is absent or selected from the group consisting of AA^{II} amino acids, preferably absent or S. In one particular example, PEP6 is selected from the group consisting of DMVVE (SEQ ID NO: 84161), EMVVE (SEQ ID NO: 84175), NMVVR (SEQ ID NO: 84275), NMVVK (SEQ ID NO: 84274), EGMSVAE (SEQ ID NO: 84411), EGMAVS, GMVVD (SEQ ID NO: 84204) and DMIVEE.

[0558] In certain embodiments useful for inducing differentiation of mensenchymal or progenitor stem cells from the retinal cell lineage, promoting eye retina cell regeneration and protecting from eye retina cell degeneration-related conditions or diseases, PEP7 is an amino acid or a peptide with between two and seven amino acids of general formula AA¹-AA²-AA³-AA⁴-AA⁶-AA⁶-AA⁷ (SEQ ID NO: 84948); wherein AA¹, AA², AA³, AA⁴, and AA⁵ are independently absent or AA^{I} as defined herein; wherein AA⁶ is absent or selected from the group consisting of S, T, C, E, Q, P and R, preferably is S or C; wherein AA⁷ is absent or is selected from the group consisting of S, T, C, E, Q, P and R, preferably is S or C; and wherein at least one of AA¹, AA², AA³, AA⁴, AA⁶, AA⁶ or AA⁷ is not absent. In one particular example, PEP7 is selected from the group consisting of KIPKAXX (SEQ ID NO: 84424), SIPKAXX (SEQ ID NO: 84429), HVTKPTX (SEQ ID NO: 84422), YVPKPXX (SEQ ID NO: 84433), TVPKPXX (SEQ ID NO: 84432), AVPKAXX (SEQ ID NO: 84404), KVGKAXX (SEQ ID NO: 84425), KASKAXX (SEQ ID NO: 84423), GSAGPXX (SEQ ID NO: 84420), AAPAXXS, STPPTXX (SEQ ID NO: 84431), HVPKPXX (SEQ ID NO: 84421) and RVPSTXX (SEQ ID NO: 84428).

[0559] In certain embodiments useful for inducing differentiation of mensenchymal or progenitor stem cells from the retinal cell lineage, promoting eye retina cell regeneration and protecting from eye retina cell degeneration-related conditions or diseases, PEP8 is an amino acid or a peptide with between two and six amino acids of general formula AA³³-AA³⁴-AA³⁵-AA³⁶-AA³⁷-AA³⁸ (SEQ ID NO: 84949); wherein AA³³ is absent or is selected from the group consisting of AA^{I} amino acids at the exception of AA^{VI} amino acids, in particular is absent or is selected from the group consisting of G, S, A, E and R; AA³⁴ is absent or is selected from the group consisting of AA^{III} and AA^{IV} amino acids, in particular is absent; wherein AA³⁵ is absent or is selected from the group consisting of AA^{II} amino acids, preferably is S or C; wherein AA³⁶ is absent or is selected from the group consisting of AA^{III} and AA^{IV} amino acids; wherein AA³⁷ is absent or is selected from the group consisting of AA^{II} amino acids, preferably is S or C; wherein AA³⁸ is absent or is selected from the group consisting of AA^{I}, in particular is selected from the group consisting of R, H, S and L; and wherein at least one of AA³³, AA³⁴, AA³⁵, AA³⁶, AA³⁷ or AA³⁸ is not absent. In one particular example, PEP8 is selected from the group consisting of GXGXR (SEQ ID NO: 84208), SXGXH (SEQ ID NO: 84304), AXGXH (SEQ ID NO: 84147), XGXR (SEQ ID NO: 84123), EXGXR (SEQ ID NO: 84179), RXGXS (SEQ ID NO: 84291), AXGXR (SEQ ID NO: 84148), SXGXR (SEQ ID NO: 84305) and XGXL (SEQ ID NO: 84122).

[0560] In certain embodiments useful for inducing differentiation of mensenchymal or progenitor stem cells from the retinal cell lineage, promoting eye retina cell regeneration and protecting from eye retina cell degeneration-related conditions or diseases, PEP9 is a peptide of general formula AA¹-AA²-AA³-AA⁴-AA⁵-AA⁶-AA⁷-PEP5; wherein PEP5 is a peptide of formula PEP3-AA¹¹-AA¹²; wherein PEP3 is selected from the group consisting of VPT, APT, TPT, VPA and APV; wherein AA¹¹ is selected from the group consisting of E, K, Q, R, A, D, G and H, in particular is E, K, Q and R; wherein AA¹² is selected from the group consisting of L, M, T, E, Q and H, in particular is L, M or T; wherein AA¹, AA², AA³, AA⁴, and AA⁵ are independently absent or AA^{I} as defined herein; wherein AA⁶ is absent or selected from the group consisting of S, T, C, E, Q, P and R, preferably is S or C; wherein AA⁷ is selected from the group consisting of S, T, C, E, Q, P and R, preferably is S or C. In one particular example, PEP9 is selected from the group consisting of KIPKAXXVPTEL (SEQ ID NO: 84770), SIPKAXXVPTEL (SEQ ID NO: 84830), HVTKPTXAPTKL (SEQ ID NO: 84742), YVPKPXXAPTKL (SEQ ID NO: 84864), TVPKPXXAPTQL (SEQ ID NO: 84854), AVPKAXXAPTKL (SEQ ID NO: 84704), KVGKAXXVPTKL (SEQ ID NO: 84780), KASKAXXVPTKL (SEQ ID NO: 84760), GSAGPXXTPTKL, AAPASXXVPARL (SEQ ID NO: 84677), STPPTXXVPTRL (SEQ ID NO: 84850), HVPKPXXAPTKL (SEQ ID NO: 84734) and RVPSTXXAPVKT (SEQ ID NO: 84815).

[0561] In certain embodiments useful for inducing differentiation of mensenchymal or progenitor stem cells from the retinal cell lineage, promoting eye retina cell regeneration and protecting from eye retina cell degeneration-related conditions or diseases, PEP10 is a peptide of general formula PEP6-AA³³-AA³⁴_AA³⁵_AA³⁶_AA³⁷_AA³⁸; wherein PEP6 is a peptide of formula AA²⁶-AA²⁷-AA²⁸-AA²⁹-PEP4; wherein PEP4 is selected from the group consisting of VVE, VVR, VVK, VAE, AVS, VVD and VEE; wherein AA²⁶ is absent or selected from the group consisting of AA^{III} amino acids, preferably absent or E; wherein AA²⁷ and AA²⁸ are independently selected from the group consisting of AA^{III} and AA^{V} amino acids, preferably AA²⁷ is selected from the group consisting of D, E, N, G and M, preferably AA²⁸ is M or I; wherein AA²⁹ is absent or selected from the group consisting of AA^{II} amino acids, preferably absent or S; wherein AA³³ is absent or is selected from the group consisting of AA^{I} amino acids at the exception of AA^{VI} amino acids, in particular is absent or is selected from the group consisting of G, S, A, E and R; AA³⁴ is absent or is selected from the group consisting of AA^{III} and AA^{VI} amino acids, in particular is absent; wherein AA³⁵ is absent or is selected from the group consisting of AA^{II} amino acids, preferably is S or C; wherein AA³⁶ is absent or is selected from the group consisting of AA^{III} and AA^{IV} amino acids; wherein AA³⁷ is absent or is selected from the group consisting of AA^{II} amino acids, preferably is S or C; wherein AA³⁸ is absent or is selected from the group consisting of AA^{I}, in particular is selected from the group consisting of R, H, S and L. In one particular example, PEP10 is selected from the group consisting of DMVVEGXGXR (SEQ ID NO: 84510), EMVVEGXGXR (SEQ ID NO: 84529), NMVVRSXGXH (SEQ ID NO: 84629), NMVVRAXGXH (SEQ ID NO: 84627), NMVVKAXGXH (SEQ ID NO: 84624), EGMSVAEXGXR (SEQ ID NO: 84636), GMAVSEXGXR (SEQ ID NO: 84546), GMVVDRXGXS (SEQ ID NO: 84567), DMVVEAXGXR (SEQ ID NO: 84509), DMVVESXGXR (SEQ ID NO: 84511), NMVVRSXGXH (SEQ ID NO: 84629) and MIVEEXGXL (SEQ ID NO: 84448).

[0562] In certain embodiments useful for inducing differentiation of mensenchymal or progenitor stem cells from the retinal cell lineage, promoting eye retina cell regeneration and protecting from eye retina cell degeneration-related conditions or diseases, PEP12 is a peptide of general formula PEP1-AA¹⁷-PEP11; wherein AA¹⁷ is selected from the group consisting of G, A, V, L, I, P, F, M, W, T and S (in particular is selected from the group consisting of M, I, L, V and T); wherein PEP1 is SPIN (SEQ ID NO: 84119).

[0563] In certain embodiments useful for inducing differentiation of mensenchymal or progenitor stem cells from the retinal cell lineage, promoting eye retina cell regeneration and protecting from eye retina cell degeneration-related conditions or diseases, PEP11 is a peptide with 3 amino acids of general formula AA¹⁸-AA¹⁹-AA²⁰; wherein AA¹⁸ is selected from the group consisting of L, V, Q, A and R, in particular is L; wherein AA¹⁹ is selected from the group consisting of F, W, H and Y, in particular is Y or F; wherein AA²⁰ is selected from the group consisting of L, F, Y, K, I, V and M, in particular is selected from the group consisting of L, F, Y, K, I and V. In one particular example, PEP11 is LYF.

[0564] The definitions of “PEP” pairs, quadruplets, hexaplets and heptuplet e.g. PEP1:PEP2, PEP12:PEP2, or PEP7:PEP5:PEP12:LINKER:PEP2:PEP6:PEP8, most particularly useful for inducing differentiation of mensenchymal or progenitor stem cells from the retinal cell lineage, promoting eye retina cell regeneration and protecting from eye retina cell degeneration-related conditions or diseases, are as already defined herein to the extent that PEP1 to PEP12 are particularly useful for these applications. For instances:

[0565] In certain embodiments useful for inducing differentiation of mensenchymal or progenitor stem cells from the retinal cell lineage, promoting eye retina cell regeneration and protecting from eye retina cell degeneration-related conditions or diseases, PEP3 is selected from the group consisting of VPT, APT, TPT, VPA and APV; PEP4 is selected from the group consisting of VVE, VVR, VVK, VAE, AVS, VVD and VEE; and wherein the pair PEP3:PEP4 is selected from the group consisting of VPT:VVE, APT:VVR, APT:VVK, VPT:VAE, VPT:AVS, TPT:VVD, VPA:VVE and APV:VEE.

[0566] In certain embodiments useful for inducing differentiation of mensenchymal or progenitor stem cells from the retinal cell lineage, promoting eye retina cell regeneration and protecting from eye retina cell degeneration-related conditions or diseases, PEP5 is selected from the group consisting of VPTEL (SEQ ID NO: 84378), APTKL (SEQ ID NO: 84131), APTQL (SEQ ID NO: 84134), VPTKL (SEQ ID NO: 84381), TPTKM (SEQ ID NO: 84327), VPARL (SEQ ID NO: 84352), VPTRL (SEQ ID NO: 84385) and APVKT (SEQ ID NO: 84144); PEP6 is selected from the group consisting of DMVVE (SEQ ID NO: 84161), EMVVE (SEQ ID NO: 84175), NMVVR (SEQ ID NO: 84275), NMVVK (SEQ ID NO: 84274), EGMSVAE (SEQ ID NO: 84411), EGMAVS, GMVVD (SEQ ID NO: 84204) and DMIVEE; and wherein the pair PEP5:PEP6 is selected from the group consisting of VPTEL (SEQ ID NO: 84378):DMVVE (SEQ ID NO: 84161), VPTEL (SEQ ID NO: 84378):EMVVE (SEQ ID NO: 84175), APTKL (SEQ ID NO: 84131):NMVVR (SEQ ID NO: 84275), APTQL (SEQ ID NO: 84134):NMVVR (SEQ ID NO: 84275), APTKL (SEQ ID NO: 84131):NMVVK (SEQ ID NO: 84274), VPTKL (SEQ ID NO: 84381):EGMSVAE (SEQ ID NO: 84411), VPTKL (SEQ ID NO: 84381):EGMAVS, TPTKM (SEQ ID NO: 84327):GMVVD (SEQ ID NO: 84204), VPARL (SEQ ID NO: 84352):DMVVE (SEQ ID NO: 84161), VPTRL (SEQ ID NO: 84385):DMVVE (SEQ ID NO: 84161), APTKL (SEQ ID NO: 84131):NMVVR (SEQ ID NO: 84275) and APVKT (SEQ ID NO: 84144):DMIVEE.

[0567] In certain embodiments useful for inducing differentiation of mensenchymal or progenitor stem cells from the retinal cell lineage, promoting eye retina cell regeneration and protecting from eye retina cell degeneration-related conditions or diseases, PEP7 is selected from the group consisting of KIPKAXX (SEQ ID NO: 84424), SIPKAXX (SEQ ID NO: 84429), HVTKPTX (SEQ ID NO: 84422), YVPKPXX (SEQ ID NO: 84433), TVPKPXX (SEQ ID NO: 84432), AVPKAXX (SEQ ID NO: 84404), KVGKAXX (SEQ ID NO: 84425), KASKAXX (SEQ ID NO: 84423), GSAGPXX (SEQ ID NO: 84420), AAPAXXS, STPPTXX (SEQ ID NO: 84431), HVPKPXX (SEQ ID NO: 84421) and RVPSTXX (SEQ ID NO: 84428); wherein PEP8 is selected from the group consisting of GXGXR (SEQ ID NO: 84208), SXGXH (SEQ ID NO: 84304), AXGXH (SEQ ID NO: 84147), XGXR (SEQ ID NO: 84123), EXGXR (SEQ ID NO: 84179), RXGXS (SEQ ID NO: 84291), AXGXR (SEQ ID NO: 84148), SXGXR (SEQ ID NO: 84305) and XGXL (SEQ ID NO: 84122); and wherein the pair PEP7:PEP8 is selected from the group consisting of KIPKAXX (SEQ ID NO: 84424):GXGXR (SEQ ID NO: 84208), SIPKAXX (SEQ ID NO: 84429):GXGXR (SEQ ID NO: 84208), HVTKPTX (SEQ ID NO: 84422):SXGXH (SEQ ID NO: 84304), YVPKPXX (SEQ ID NO: 84433):SXGSH, TVPKPXX (SEQ ID NO: 84432):AXGXH (SEQ ID NO: 84147), AVPKAXX (SEQ ID NO: 84404):AXGXH (SEQ ID NO: 84147), KVGKAXX (SEQ ID NO: 84425):XGXR (SEQ ID NO: 84123), KASKAXX (SEQ ID NO: 84423):EXGXR (SEQ ID NO: 84179), GSAGPXX (SEQ ID NO: 84420):RXGXS (SEQ ID NO: 84291), AAPASXX (SEQ ID NO: 84401):AXGXR (SEQ ID NO: 84148), STPPTXX (SEQ ID NO: 84431):SXGXR (SEQ ID NO: 84305), HVPKPXX (SEQ ID NO: 84421):SXGXH (SEQ ID NO: 84304) and RVPSTXX (SEQ ID NO: 84428):XGXL (SEQ ID NO: 84122).

[0568] In certain embodiments useful for inducing differentiation of mensenchymal or progenitor stem cells from the retinal cell lineage, promoting eye retina cell regeneration and protecting from eye retina cell degeneration-related conditions or diseases, PEP9 is selected from the group consisting of KIPKAXXVPTEL (SEQ ID NO: 84770), SIPKAXXVPTEL (SEQ ID NO: 84830), HVTKPTXAPTKL (SEQ ID NO: 84742), YVPKPXXAPTKL (SEQ ID NO: 84864), TVPKPXXAPTQL (SEQ ID NO: 84854), AVPKAXXAPTKL (SEQ ID NO: 84704), KVGKAXXVPTKL (SEQ ID NO: 84780), KASKAXXVPTKL (SEQ ID NO: 84760), GSAGPXXTPTKL, AAPASXXVPARL (SEQ ID NO: 84677), STPPTXXVPTRL (SEQ ID NO: 84850), HVPKPXXAPTKL (SEQ ID NO: 84734) and RVPSTXXAPVKT (SEQ ID NO: 84815); PEP10 is selected from the group consisting of DMVVEGXGXR (SEQ ID NO: 84510), EMVVEGXGXR (SEQ ID NO: 84529), NMVVRSXGXH (SEQ ID NO: 84629), NMVVRAXGXH (SEQ ID NO: 84627), NMVVKAXGXH (SEQ ID NO: 84624), EGMSVAEXGXR (SEQ ID NO: 84636), GMAVSEXGXR (SEQ ID NO: 84546), GMVVDRXGXS (SEQ ID NO: 84567), DMVVEAXGXR (SEQ ID NO: 84509), DMVVESXGXR (SEQ ID NO: 84511), NMVVRSXGXH (SEQ ID NO: 84629) and MIVEEXGXL (SEQ ID NO: 84448); and wherein the pair PEP9:PEP10 is selected from the group consisting of KIPKAXXVPTEL (SEQ ID NO: 84770):DMVVEGXGXR (SEQ ID NO: 84510), SIPKAXXVPTEL (SEQ ID NO: 84830):EMVVEGXGXR (SEQ ID NO: 84529), HVTKPTXAPTKL (SEQ ID NO: 84742):NMVVRSXGXH (SEQ ID NO: 84629), YVPKPXXAPTKL (SEQ ID NO: 84864):NMVVRSXGXH (SEQ ID NO: 84629), TVPKPXXAPTQL (SEQ ID NO: 84854):NMVVRAXGXH (SEQ ID NO: 84627), AVPKAXXAPTKL (SEQ ID NO: 84704):NMVVKAXGXH (SEQ ID NO: 84624), KVGKAXXVPTKL (SEQ ID NO: 84780):EGMSVAEXGXR (SEQ ID NO: 84636), KASKAXXVPTKL (SEQ ID NO: 84760):GMAVSEXGXR (SEQ ID NO: 84546), GSAGPXXTPTKM (SEQ ID NO: 84726):GMVVDRXGXS (SEQ ID NO: 84567), AAPASXXVPARL (SEQ ID NO: 84677):DMVVEAXGXR (SEQ ID NO: 84509), STPPTXXVPTRL (SEQ ID NO: 84850):DMVVESXGXR (SEQ ID NO: 84511), HVPKPXXAPTKL (SEQ ID NO: 84734):NMVVRSXGXH (SEQ ID NO: 84629) and RVPSTXXAPVKT (SEQ ID NO: 84815):MIVEEXGXL (SEQ ID NO: 84448).

[0569] In certain embodiments useful for inducing differentiation of mensenchymal or progenitor stem cells from the retinal cell lineage, promoting eye retina cell regeneration and protecting from eye retina cell degeneration-related conditions or diseases, PEP5 is selected from the group consisting of VPTEL (SEQ ID NO: 84378), APTKL (SEQ ID NO: 84131), APTQL (SEQ ID NO: 84134), VPTKL (SEQ ID NO: 84381), VPARL (SEQ ID NO: 84352), VPQAL (SEQ ID NO: 84364), VSQDL (SEQ ID NO: 84387) and VPQDL (SEQ ID NO: 84365); PEP6 is selected from the group consisting of DMVVE (SEQ ID NO: 84161), EMVVE (SEQ ID NO: 84175), NMVVR (SEQ ID NO: 84275), NMVVK (SEQ ID NO: 84274), EGMSVAE (SEQ ID NO: 84411), GMAVS (SEQ ID NO: 84194), DMVVE (SEQ ID NO: 84161), MIVRS (SEQ ID NO: 84243), MIVKS (SEQ ID NO: 84242) and MVVKS (SEQ ID NO: 84256); and wherein the pair PEP5:PEP6 is selected from the group consisting of VPTEL (SEQ ID NO: 84378):DMVVE (SEQ ID NO: 84161), VPTEL (SEQ ID NO: 84378):EMVVE (SEQ ID NO: 84175), APTKL (SEQ ID NO: 84131):NMVVR (SEQ ID NO: 84275), APTQL (SEQ ID NO: 84134):NMVVR (SEQ ID NO: 84275), APTKL (SEQ ID NO: 84131):NMVVK (SEQ ID NO: 84274), VPTKL (SEQ ID NO: 84381):EGMSVAE (SEQ ID NO: 84411), VPTKL (SEQ ID NO: 84381):EGMAVS, TPTKM (SEQ ID NO: 84327):GMVVD (SEQ ID NO: 84204), VPARL (SEQ ID NO: 84352):DMVVE (SEQ ID NO: 84161), VPTRL (SEQ ID NO: 84385):DMVVE (SEQ ID NO: 84161), APTKL (SEQ ID NO: 84131):NMVVR (SEQ ID NO: 84275) and APVKT (SEQ ID NO: 84144):DMIVEE; and wherein the pair PEP5:PEP6 is not TPTKM (SEQ ID NO: 84327):GMVVD (SEQ ID NO: 84204) when PEP1 is SPIN (SEQ ID NO: 84119) and PEP2 is YGKIP (SEQ ID NO: 84397).

[0570] In certain embodiments useful for inducing differentiation of mensenchymal or progenitor stem cells from the retinal cell lineage, promoting eye retina cell regeneration and protecting from eye retina cell degeneration-related conditions or diseases, PEP9 is selected from the group consisting of KIPKAXXVPTEL (SEQ ID NO: 84770), SIPKAXXVPTEL (SEQ ID NO: 84830), HVTKPTXAPTKL (SEQ ID NO: 84742), YVPKPXXAPTKL (SEQ ID NO: 84864), TVPKPXXAPTQL (SEQ ID NO: 84854), AVPKAXXAPTKL (SEQ ID NO: 84704), KVGKAXXVPTKL (SEQ ID NO: 84780), KASKAXXVPTKL (SEQ ID NO: 84760), GSAGPXXTPTKL, AAPASXXVPARL (SEQ ID NO: 84677), STPPTXXVPTRL (SEQ ID NO: 84850), HVPKPXXAPTKL (SEQ ID NO: 84734) and RVPSTXXAPVKT (SEQ ID NO: 84815); PEP10 is selected from the group consisting of DMVVEGXGXR (SEQ ID NO: 84510), EMVVEGXGXR (SEQ ID NO: 84529), NMVVRSXGXH (SEQ ID NO: 84629), NMVVRAXGXH (SEQ ID NO: 84627), NMVVKAXGXH (SEQ ID NO: 84624), EGMSVAEXGXR (SEQ ID NO: 84636), GMAVSEXGXR (SEQ ID NO: 84546), GMVVDRXGXS (SEQ ID NO: 84567), DMVVEAXGXR (SEQ ID NO: 84509), DMVVESXGXR (SEQ ID NO: 84511), NMVVRSXGXH (SEQ ID NO: 84629) and MIVEEXGXL (SEQ ID NO: 84448); and wherein the pair PEP9:PEP10 is selected from the group consisting of KIPKAXXVPTEL (SEQ ID NO: 84770):DMVVEGXGXR (SEQ ID NO: 84510), SIPKAXXVPTEL (SEQ ID NO: 84830):EMVVEGXGXR (SEQ ID NO: 84529), HVTKPTXAPTKL (SEQ ID NO: 84742):NMVVRSXGXH (SEQ ID NO: 84629), YVPKPXXAPTKL (SEQ ID NO: 84864):NMVVRSXGXH (SEQ ID NO: 84629), TVPKPXXAPTQL (SEQ ID NO: 84854):NMVVRAXGXH (SEQ ID NO: 84627), AVPKAXXAPTKL (SEQ ID NO: 84704):NMVVKAXGXH (SEQ ID NO: 84624), KVGKAXXVPTKL (SEQ ID NO: 84780):EGMSVAEXGXR (SEQ ID NO: 84636), KASKAXXVPTKL (SEQ ID NO: 84760):GMAVSEXGXR (SEQ ID NO: 84546), GSAGPXXTPTKM (SEQ ID NO: 84726):GMVVDRXGXS (SEQ ID NO: 84567), AAPASXXVPARL (SEQ ID NO: 84677):DMVVEAXGXR (SEQ ID NO: 84509), STPPTXXVPTRL (SEQ ID NO: 84850):DMVVESXGXR (SEQ ID NO: 84511), HVPKPXXAPTKL (SEQ ID NO: 84734):NMVVRSXGXH (SEQ ID NO: 84629) and RVPSTXXAPVKT (SEQ ID NO: 84815):MIVEEXGXL (SEQ ID NO: 84448); and wherein PEP9:PEP10 is not GSAGPXXTPTKM (SEQ ID NO: 84726):GMVVDRXGXS (SEQ ID NO: 84567) when PEP1 is SPIN (SEQ ID NO: 84119) and PEP2 is YGKIP (SEQ ID NO: 84397).

[0571] In certain embodiments useful for inducing differentiation of mensenchymal or progenitor stem cells from the retinal cell lineage, promoting eye retina cell regeneration and protecting from eye retina cell degeneration-related conditions or diseases, PEP1 is SPIN (SEQ ID NO: 84119) and PEP11 is LYF.

[0572] In one aspect, the present disclosure provides a GFR-binding compound, wherein said GFR-binding compound is a peptide, a variant or analog thereof, or a peptidomimetic as defined herein, with between 20 and 60 (in particular between 20 and 50, and more particularly, between 20 and 45) amino acids, comprising a peptide with four amino acids (PEP1) or a peptide with eight amino acids (PEP12), a peptide with five amino acids (PEP2), and optionally a pair of peptides selected form the group consisting of PEP3:PEP4, PEP3:PEP6, PEP3:PEP10, PEP5:PEP4, PEP9:PEP4, PEP5:PEP6, PEP5:PEP10, PEP9:PEP6 and PEP9:PEP10; wherein said GFR-binding compound does not comprise the pair of peptides TPTKM (SEQ ID NO: 84327):GMVVD (SEQ ID NO: 84204) when PEP1 is SPIN (SEQ ID NO: 84119) and PEP2 is YGKIP (SEQ ID NO: 84397); and wherein the RMSD is 2.45 Å or less.

[0573] In one aspect, the present disclosure provides a GFR-binding compound, wherein said GFR-binding compound is a peptide, a variant or analog thereof, or a peptidomimetic as defined herein, with between 20 and 60 (in particular between 20 and 50, and more particularly, between 20 and 45) amino acids, comprising a peptide with four amino acids (PEP1) or a peptide with eight amino acids (PEP12), a peptide with five amino acids (PEP2), and optionally a pair of peptides selected form the group consisting of PEP3:PEP4, PEP3:PEP6, PEP3:PEP10, PEP5:PEP4, PEP9:PEP4, PEP5:PEP6, PEP5:PEP10, PEP9:PEP6 and PEP9:PEP10; wherein said GFR-binding compound does not comprise the pair of peptides GSAGPXXTPTKM (SEQ ID NO: 84726):GMVVDRXGXS (SEQ ID NO: 84567) when PEP1 is SPIN (SEQ ID NO: 84119) and PEP2 is YGKIP (SEQ ID NO: 84397); and wherein the RMSD is 2.45 Å or less.

[0574] In certain embodiments useful for inducing differentiation of mensenchymal or progenitor stem cells from the retinal cell lineage, promoting eye retina cell regeneration and protecting from eye retina cell degeneration-related conditions or diseases, said GFR-binding compound is a synthetic molecule as defined herein in the definition section.

[0575] In certain embodiments useful for inducing differentiation of mensenchymal or progenitor stem cells from the retinal cell lineage, promoting eye retina cell regeneration and protecting from eye retina cell degeneration-related conditions or diseases, said GFR-binding compound is a synthetic peptide, or a variant or analog thereof, or a peptidomimetic.

### Renal Tissues

[0576] Certain embodiments of the invention are particularly useful for inducing differentiation of mensenchymal or progenitor stem cells from the renal cell lineage, promoting renal cell regeneration and/or renal functions and protecting from renal cell degeneration-related conditions or diseases such as chronic kidney disease or renal fibrosis.

[0577] In certain embodiments useful for inducing differentiation of mensenchymal or progenitor stem cells from the renal cell lineage, promoting renal cell regeneration and/or renal functions and protecting from renal cell degeneration-related conditions or diseases, PEP1 is SPIN (SEQ ID NO: 84119).

[0578] In certain embodiments useful for inducing differentiation of mensenchymal or progenitor stem cells from the renal cell lineage, promoting renal cell regeneration and/or renal functions and protecting from renal cell degeneration-related conditions or diseases, PEP2 is YGKIP (SEQ ID NO: 84397).

[0579] In certain embodiments useful for inducing differentiation of mensenchymal or progenitor stem cells from the renal cell lineage, promoting renal cell regeneration and/or renal functions and protecting from renal cell degeneration-related conditions or diseases, PEP3 is selected from the group consisting of VPT, APT, TPT, VPA and APV.

[0580] In certain embodiments useful for inducing differentiation of mensenchymal or progenitor stem cells from the renal cell lineage, promoting renal cell regeneration and/or renal functions and protecting from renal cell degeneration-related conditions or diseases, PEP4 is selected from the group consisting of VVE, VVR, VVK, VAE, AVS, VVD and VEE.

[0581] In certain embodiments useful for inducing differentiation of mensenchymal or progenitor stem cells from the renal cell lineage, promoting renal cell regeneration and/or renal functions and protecting from renal cell degeneration-related conditions or diseases, PEP5 is a peptide of general formula PEP3-AA¹¹-AA¹²; wherein PEP3 is selected from the group consisting of VPT, APT, TPT, VPA and APV; wherein AA¹¹ is selected from the group consisting of E, K, Q, R, A, D, G and H, in particular is E, K, Q and R; wherein AA¹² is selected from the group consisting of L, M, T, E, Q and H, in particular is L, M or T. In one particular example, PEP5 is selected from the group consisting of VPTEL (SEQ ID NO: 84378), APTKL (SEQ ID NO: 84131), APTQL (SEQ ID NO: 84134), VPTKL (SEQ ID NO: 84381), TPTKM (SEQ ID NO: 84327), VPARL (SEQ ID NO: 84352), VPTRL (SEQ ID NO: 84385) and APVKT (SEQ ID NO: 84144).

[0582] In certain embodiments useful for inducing differentiation of mensenchymal or progenitor stem cells from the renal cell lineage, promoting renal cell regeneration and/or renal functions and protecting from renal cell degeneration-related conditions or diseases, PEP6 is a peptide of general formula AA²⁶-AA²⁷-AA²⁸-AA²⁹-PEP4; wherein PEP4 is selected from the group consisting of VVE, VVR, VVK, VAE, AVS, VVD and VEE; wherein AA²⁶ is absent or selected from the group consisting of AA^{III} amino acids, preferably absent or E; wherein AA²⁷ and AA²⁸ are independently selected from the group consisting of AA^{III} and AA^{V} amino acids, preferably AA²⁷ is selected from the group consisting of D, E, N, G and M, preferably AA²⁸ is M or I; wherein AA²⁹ is absent or selected from the group consisting of AA^{II} amino acids, preferably absent or S. In one particular example, PEP6 is selected from the group consisting of DMVVE (SEQ ID NO: 84161), EMVVE (SEQ ID NO: 84175), NMVVR (SEQ ID NO: 84275), NMVVK (SEQ ID NO: 84274), EGMSVAE (SEQ ID NO: 84411), EGMAVS, GMVVD (SEQ ID NO: 84204) and DMIVEE.

[0583] In certain embodiments useful for inducing differentiation of mensenchymal or progenitor stem cells from the renal cell lineage, promoting renal cell regeneration and/or renal functions and protecting from renal cell degeneration-related conditions or diseases, PEP7 is an amino acid or a peptide with between two and seven amino acids of general formula AA¹-AA²-AA³-AA⁴-AA⁵-AA⁶-AA⁷ (SEQ ID NO: 84948); wherein AA¹, AA², AA³, AA⁴, and AA⁵ are independently absent or AA^{I} as defined herein; wherein AA⁶ is absent or selected from the group consisting of S, T, C, E, Q, P and R, preferably is S or C; wherein AA⁷ is absent or is selected from the group consisting of S, T, C, E, Q, P and R, preferably is S or C; and wherein at least one of AA¹, AA², AA³, AA⁴, AA⁵, AA⁶ or AA⁷ is not absent. In one particular example, PEP7 is selected from the group consisting of KIPKAXX (SEQ ID NO: 84424), SIPKAXX (SEQ ID NO: 84429), HVTKPTX (SEQ ID NO: 84422), YVPKPXX (SEQ ID NO: 84433), TVPKPXX (SEQ ID NO: 84432), AVPKAXX (SEQ ID NO: 84404), KVGKAXX (SEQ ID NO: 84425), KASKAXX (SEQ ID NO: 84423), GSAGPXX (SEQ ID NO: 84420), AAPAXXS, STPPTXX (SEQ ID NO: 84431), HVPKPXX (SEQ ID NO: 84421) and RVPSTXX (SEQ ID NO: 84428).

[0584] In certain embodiments useful for inducing differentiation of mensenchymal or progenitor stem cells from the renal cell lineage, promoting renal cell regeneration and/or renal functions and protecting from renal cell degeneration-related conditions or diseases, PEP8 is an amino acid or a peptide with between two and six amino acids of general formula AA³³-AA³⁴-AA³⁵-AA³⁶-AA³⁷-AA³⁸ (SEQ ID NO: 84949); wherein AA³³ is absent or is selected from the group consisting of AA^{I} amino acids at the exception of AA^{VI} amino acids, in particular is absent or is selected from the group consisting of G, S, A, E and R; AA³⁴ is absent or is selected from the group consisting of AA^{III} and AA^{IV} amino acids, in particular is absent; wherein AA³⁵ is absent or is selected from the group consisting of AA^{II} amino acids, preferably is S or C; wherein AA³⁶ is absent or is selected from the group consisting of AA^{III} and AA^{IV} amino acids; wherein AA³⁷ is absent or is selected from the group consisting of AA^{II} amino acids, preferably is S or C; wherein AA³⁸ is absent or is selected from the group consisting of AA^{I}, in particular is selected from the group consisting of R, H, S and L; and wherein at least one of AA³³, AA³⁴, AA³⁵, AA³⁶, AA³⁷ or AA³⁸ is not absent. In one particular example, PEP8 is selected from the group consisting of GXGXR (SEQ ID NO: 84208), SXGXH (SEQ ID NO: 84304), AXGXH (SEQ ID NO: 84147), XGXR (SEQ ID NO: 84123), EXGXR (SEQ ID NO: 84179), RXGXS (SEQ ID NO: 84291), AXGXR (SEQ ID NO: 84148), SXGXR (SEQ ID NO: 84305) and XGXL (SEQ ID NO: 84122).

[0585] In certain embodiments useful for inducing differentiation of mensenchymal or progenitor stem cells from the renal cell lineage, promoting renal cell regeneration and/or renal functions and protecting from renal cell degeneration-related conditions or diseases, PEP9 is a peptide of general formula AA¹-AA²-AA³-AA⁴-AA⁵-AA⁶-AA⁷-PEP5; wherein PEP5 is a peptide of formula PEP3-AA¹¹-AA¹²; wherein PEP3 is selected from the group consisting of VPT, APT, TPT, VPA and APV; wherein AA¹¹ is selected from the group consisting of E, K, Q, R, A, D, G and H, in particular is E, K, Q and R; wherein AA¹² is selected from the group consisting of L, M, T, E, Q and H, in particular is L, M or T; wherein AA¹, AA², AA³, AA⁴, and AA⁵ are independently absent or AA^{I} as defined herein; wherein AA⁶ is absent or selected from the group consisting of S, T, C, E, Q, P and R, preferably is S or C; wherein AA⁷ is selected from the group consisting of S, T, C, E, Q, P and R, preferably is S or C. In one particular example, PEP9 is selected from the group consisting of KIPKAXXVPTEL (SEQ ID NO: 84770), SIPKAXXVPTEL (SEQ ID NO: 84830), HVTKPTXAPTKL (SEQ ID NO: 84742), YVPKPXXAPTKL (SEQ ID NO: 84864), TVPKPXXAPTQL (SEQ ID NO: 84854), AVPKAXXAPTKL (SEQ ID NO: 84704), KVGKAXXVPTKL (SEQ ID NO: 84780), KASKAXXVPTKL (SEQ ID NO: 84760), GSAGPXXTPTKL, AAPASXXVPARL (SEQ ID NO: 84677), STPPTXXVPTRL (SEQ ID NO: 84850), HVPKPXXAPTKL (SEQ ID NO: 84734) and RVPSTXXAPVKT (SEQ ID NO: 84815).

[0586] In certain embodiments useful for inducing differentiation of mensenchymal or progenitor stem cells from the renal cell lineage, promoting renal cell regeneration and/or renal functions and protecting from renal cell degeneration-related conditions or diseases, PEP10 is a peptide of general formula PEP6-AA³³-AA³⁴-AA³⁵-AA³⁶-AA³⁷-AA³⁸; wherein PEP6 is a peptide of formula AA²⁶-AA²⁷-AA²⁸-AA²⁹-PEP4; wherein PEP4 is selected from the group consisting of VVE, VVR, VVK, VAE, AVS, VVD and VEE; wherein AA²⁶ is absent or selected from the group consisting of AA^{III} amino acids, preferably absent or E; wherein AA²⁷ and AA²⁸ are independently selected from the group consisting of AA^{III} and AA^{V} amino acids, preferably AA²⁷ is selected from the group consisting of D, E, N, G and M, preferably AA²⁸ is M or I; wherein AA²⁹ is absent or selected from the group consisting of AA^{II} amino acids, preferably absent or S; wherein AA³³ is absent or is selected from the group consisting of AA^{I} amino acids at the exception of AA^{VI} amino acids, in particular is absent or is selected from the group consisting of G, S, A, E and R; AA³⁴ is absent or is selected from the group consisting of AA^{III} and AA^{IV} amino acids, in particular is absent; wherein AA³⁵ is absent or is selected from the group consisting of AA^{II} amino acids, preferably is S or C; wherein AA³⁶ is absent or is selected from the group consisting of AA^{III} and AA^{IV} amino acids; wherein AA³⁷ is absent or is selected from the group consisting of AA^{II} amino acids, preferably is S or C; wherein AA³⁸ is absent or is selected from the group consisting of AA^{I}, in particular is selected from the group consisting of R, H, S and L. In one particular example, PEP10 is selected from the group consisting of DMVVEGXGXR (SEQ ID NO: 84510), EMVVEGXGXR (SEQ ID NO: 84529), NMVVRSXGXH (SEQ ID NO: 84629), NMVVRAXGXH (SEQ ID NO: 84627), NMVVKAXGXH (SEQ ID NO: 84624), EGMSVAEXGXR (SEQ ID NO: 84636), GMAVSEXGXR (SEQ ID NO: 84546), GMVVDRXGXS (SEQ ID NO: 84567), DMVVEAXGXR (SEQ ID NO: 84509), DMVVESXGXR (SEQ ID NO: 84511), NMVVRSXGXH (SEQ ID NO: 84629) and MIVEEXGXL (SEQ ID NO: 84448).

[0587] In certain embodiments useful for inducing differentiation of mensenchymal or progenitor stem cells from the renal cell lineage, promoting renal cell regeneration and/or renal functions and protecting from renal cell degeneration-related conditions or diseases, PEP12 is a peptide of general formula PEP1-AA¹⁷-PEP11; wherein AA¹⁷ is selected from the group consisting of G, A, V, L, I, P, F, M, W, T and S (in particular is selected from the group consisting of M, I, L, V and T); wherein PEP1 is SPIN (SEQ ID NO: 84119).

[0588] In certain embodiments useful for inducing differentiation of mensenchymal or progenitor stem cells from the renal cell lineage, promoting renal cell regeneration and/or renal functions and protecting from renal cell degeneration-related conditions or diseases, PEP11 is a peptide with 3 amino acids of general formula AA¹⁸-AA¹⁹-AA²⁰; wherein AA¹⁸ is selected from the group consisting of L, V, Q, A and R, in particular is L; wherein AA¹⁹ is selected from the group consisting of F, W, H and Y, in particular is Y or F; wherein AA²⁰ is selected from the group consisting of L, F, Y, K, I, V and M, in particular is selected from the group consisting of L, F, Y, K, I and V. In one particular example, PEP11 is LYF.

[0589] The definitions of “PEP” pairs, quadruplets, hexaplets and heptuplet e.g. PEP1:PEP2, PEP12:PEP2, or PEP7:PEP5:PEP12:LINKER:PEP2:PEP6:PEP8, most particularly useful for inducing differentiation of mensenchymal or progenitor stem cells from the renal cell lineage, promoting renal cell regeneration and/or renal functions and protecting from renal cell degeneration-related conditions or diseases, are as already defined herein to the extent that PEP1 to PEP12 are particularly useful for these applications. For instances:

[0590] In certain embodiments useful for inducing differentiation of mensenchymal or progenitor stem cells from the renal cell lineage, promoting renal cell regeneration and/or renal functions and protecting from renal cell degeneration-related conditions or diseases, PEP3 is selected from the group consisting of VPT, APT, TPT, VPA and APV; PEP4 is selected from the group consisting of VVE, VVR, VVK, VAE, AVS, VVD and VEE; and wherein the pair PEP3:PEP4 is selected from the group consisting of VPT:VVE, APT:VVR, APT:VVK, VPT:VAE, VPT:AVS, TPT:VVD, VPA:VVE and APV:VEE.

[0591] In certain embodiments useful for inducing differentiation of mensenchymal or progenitor stem cells from the renal cell lineage, promoting renal cell regeneration and/or renal functions and protecting from renal cell degeneration-related conditions or diseases, PEP5 is selected from the group consisting of VPTEL (SEQ ID NO: 84378), APTKL (SEQ ID NO: 84131), APTQL (SEQ ID NO: 84134), VPTKL (SEQ ID NO: 84381), TPTKM (SEQ ID NO: 84327), VPARL (SEQ ID NO: 84352), VPTRL (SEQ ID NO: 84385) and APVKT (SEQ ID NO: 84144); PEP6 is selected from the group consisting of DMVVE (SEQ ID NO: 84161), EMVVE (SEQ ID NO: 84175), NMVVR (SEQ ID NO: 84275), NMVVK (SEQ ID NO: 84274), EGMSVAE (SEQ ID NO: 84411), EGMAVS, GMVVD (SEQ ID NO: 84204) and DMIVEE; and wherein the pair PEP5:PEP6 is selected from the group consisting of VPTEL (SEQ ID NO: 84378):DMVVE (SEQ ID NO: 84161), VPTEL (SEQ ID NO: 84378):EMVVE (SEQ ID NO: 84175), APTKL (SEQ ID NO: 84131):NMVVR (SEQ ID NO: 84275), APTQL (SEQ ID NO: 84134):NMVVR (SEQ ID NO: 84275), APTKL (SEQ ID NO: 84131):NMVVK (SEQ ID NO: 84274), VPTKL (SEQ ID NO: 84381):EGMSVAE (SEQ ID NO: 84411), VPTKL (SEQ ID NO: 84381):EGMAVS, TPTKM (SEQ ID NO: 84327):GMVVD (SEQ ID NO: 84204), VPARL (SEQ ID NO: 84352):DMVVE (SEQ ID NO: 84161), VPTRL (SEQ ID NO: 84385):DMVVE (SEQ ID NO: 84161), APTKL (SEQ ID NO: 84131):NMVVR (SEQ ID NO: 84275) and APVKT (SEQ ID NO: 84144):DMIVEE.

[0592] In certain embodiments useful for inducing differentiation of mensenchymal or progenitor stem cells from the renal cell lineage, promoting renal cell regeneration and/or renal functions and protecting from renal cell degeneration-related conditions or diseases, PEP7 is selected from the group consisting of KIPKAXX (SEQ ID NO: 84424), SIPKAXX (SEQ ID NO: 84429), HVTKPTX (SEQ ID NO: 84422), YVPKPXX (SEQ ID NO: 84433), TVPKPXX (SEQ ID NO: 84432), AVPKAXX (SEQ ID NO: 84404), KVGKAXX (SEQ ID NO: 84425), KASKAXX (SEQ ID NO: 84423), GSAGPXX (SEQ ID NO: 84420), AAPAXXS, STPPTXX (SEQ ID NO: 84431), HVPKPXX (SEQ ID NO: 84421) and RVPSTXX (SEQ ID NO: 84428); wherein PEP8 is selected from the group consisting of GXGXR (SEQ ID NO: 84208), SXGXH (SEQ ID NO: 84304), AXGXH (SEQ ID NO: 84147), XGXR (SEQ ID NO: 84123), EXGXR (SEQ ID NO: 84179), RXGXS (SEQ ID NO: 84291), AXGXR (SEQ ID NO: 84148), SXGXR (SEQ ID NO: 84305) and XGXL (SEQ ID NO: 84122); and wherein the pair PEP7:PEP8 is selected from the group consisting of KIPKAXX (SEQ ID NO: 84424):GXGXR (SEQ ID NO: 84208), SIPKAXX (SEQ ID NO: 84429):GXGXR (SEQ ID NO: 84208), HVTKPTX (SEQ ID NO: 84422):SXGXH (SEQ ID NO: 84304), YVPKPXX (SEQ ID NO: 84433):SXGXH (SEQ ID NO: 84304), TVPKPXX (SEQ ID NO: 84432):AXGXH (SEQ ID NO: 84147), AVPKAXX (SEQ ID NO: 84404):AXGXH (SEQ ID NO: 84147), KVGKAXX (SEQ ID NO: 84425):XGXR (SEQ ID NO: 84123), KASKAXX (SEQ ID NO: 84423):EXGXR (SEQ ID NO: 84179), GSAGPXX (SEQ ID NO: 84420):RXGXS (SEQ ID NO: 84291), AAPASXX (SEQ ID NO: 84401):AXGXR (SEQ ID NO: 84148), STPPTXX (SEQ ID NO: 84431):SXGXR (SEQ ID NO: 84305), HVPKPXX (SEQ ID NO: 84421):SXGXH (SEQ ID NO: 84304) and RVPSTXX (SEQ ID NO: 84428):XGXL (SEQ ID NO: 84122).

[0593] In certain embodiments useful for inducing differentiation of mensenchymal or progenitor stem cells from the renal cell lineage, promoting renal cell regeneration and/or renal functions and protecting from renal cell degeneration-related conditions or diseases, PEP9 is selected from the group consisting of KIPKAXXVPTEL (SEQ ID NO: 84770), SIPKAXXVPTEL (SEQ ID NO: 84830), HVTKPTXAPTKL (SEQ ID NO: 84742), YVPKPXXAPTKL (SEQ ID NO: 84864), TVPKPXXAPTQL (SEQ ID NO: 84854), AVPKAXXAPTKL (SEQ ID NO: 84704), KVGKAXXVPTKL (SEQ ID NO: 84780), KASKAXXVPTKL (SEQ ID NO: 84760), GSAGPXXTPTKL, AAPASXXVPARL (SEQ ID NO: 84677), STPPTXXVPTRL (SEQ ID NO: 84850), HVPKPXXAPTKL (SEQ ID NO: 84734) and RVPSTXXAPVKT (SEQ ID NO: 84815); PEP10 is selected from the group consisting of DMVVEGXGXR (SEQ ID NO: 84510), EMVVEGXGXR (SEQ ID NO: 84529), NMVVRSXGXH (SEQ ID NO: 84629), NMVVRAXGXH (SEQ ID NO: 84627), NMVVKAXGXH (SEQ ID NO: 84624), EGMSVAEXGXR (SEQ ID NO: 84636), GMAVSEXGXR (SEQ ID NO: 84546), GMVVDRXGXS (SEQ ID NO: 84567), DMVVEAXGXR (SEQ ID NO: 84509), DMVVESXGXR (SEQ ID NO: 84511), NMVVRSXGXH (SEQ ID NO: 84629) and MIVEEXGXL (SEQ ID NO: 84448); and wherein the pair PEP9:PEP10 is selected from the group consisting of KIPKAXXVPTEL (SEQ ID NO: 84770):DMVVEGXGXR (SEQ ID NO: 84510), SIPKAXXVPTEL (SEQ ID NO: 84830):EMVVEGXGXR (SEQ ID NO: 84529), HVTKPTXAPTKL (SEQ ID NO: 84742):NMVVRSXGXH (SEQ ID NO: 84629), YVPKPXXAPTKL (SEQ ID NO: 84864):NMVVRSXGXH (SEQ ID NO: 84629), TVPKPXXAPTQL (SEQ ID NO: 84854):NMVVRAXGXH (SEQ ID NO: 84627), AVPKAXXAPTKL (SEQ ID NO: 84704):NMVVKAXGXH (SEQ ID NO: 84624), KVGKAXXVPTKL (SEQ ID NO: 84780):EGMSVAEXGXR (SEQ ID NO: 84636), KASKAXXVPTKL (SEQ ID NO: 84760):GMAVSEXGXR (SEQ ID NO: 84546), GSAGPXXTPTKM (SEQ ID NO: 84726):GMVVDRXGXS (SEQ ID NO: 84567), AAPASXXVPARL (SEQ ID NO: 84677):DMVVEAXGXR (SEQ ID NO: 84509), STPPTXXVPTRL (SEQ ID NO: 84850):DMVVESXGXR (SEQ ID NO: 84511), HVPKPXXAPTKL (SEQ ID NO: 84734):NMVVRSXGXH (SEQ ID NO: 84629) and RVPSTXXAPVKT (SEQ ID NO: 84815):MIVEEXGXL (SEQ ID NO: 84448).

[0594] In certain embodiments useful for inducing differentiation of mensenchymal or progenitor stem cells from the renal cell lineage, promoting renal cell regeneration and/or renal functions and protecting from renal cell degeneration-related conditions or diseases, PEP5 is selected from the group consisting of VPTEL (SEQ ID NO: 84378), APTKL (SEQ ID NO: 84131), APTQL (SEQ ID NO: 84134), VPTKL (SEQ ID NO: 84381), VPARL (SEQ ID NO: 84352), VPQAL (SEQ ID NO: 84364), VSQDL (SEQ ID NO: 84387) and VPQDL (SEQ ID NO: 84365); PEP6 is selected from the group consisting of DMVVE (SEQ ID NO: 84161), EMVVE (SEQ ID NO: 84175), NMVVR (SEQ ID NO: 84275), NMVVK (SEQ ID NO: 84274), EGMSVAE (SEQ ID NO: 84411), GMAVS (SEQ ID NO: 84194), DMVVE (SEQ ID NO: 84161), MIVRS (SEQ ID NO: 84243), MIVKS (SEQ ID NO: 84242) and MVVKS (SEQ ID NO: 84256); and wherein the pair PEP5:PEP6 is selected from the group consisting of VPTEL (SEQ ID NO: 84378):DMVVE (SEQ ID NO: 84161), VPTEL (SEQ ID NO: 84378):EMVVE (SEQ ID NO: 84175), APTKL (SEQ ID NO: 84131):NMVVR (SEQ ID NO: 84275), APTQL (SEQ ID NO: 84134):NMVVR (SEQ ID NO: 84275), APTKL (SEQ ID NO: 84131):NMVVK (SEQ ID NO: 84274), VPTKL (SEQ ID NO: 84381):EGMSVAE (SEQ ID NO: 84411), VPTKL (SEQ ID NO: 84381):EGMAVS, TPTKM (SEQ ID NO: 84327):GMVVD (SEQ ID NO: 84204), VPARL (SEQ ID NO: 84352):DMVVE (SEQ ID NO: 84161), VPTRL (SEQ ID NO: 84385):DMVVE (SEQ ID NO: 84161), APTKL (SEQ ID NO: 84131):NMVVR (SEQ ID NO: 84275) and APVKT (SEQ ID NO: 84144):DMIVEE; and wherein the pair PEP5:PEP6 is not TPTKM (SEQ ID NO: 84327):GMVVD (SEQ ID NO: 84204) when PEP1 is SPIN (SEQ ID NO: 84119) and PEP2 is YGKIP (SEQ ID NO: 84397).

[0595] In certain embodiments useful for inducing differentiation of mensenchymal or progenitor stem cells from the renal cell lineage, promoting renal cell regeneration and/or renal functions and protecting from renal cell degeneration-related conditions or diseases, PEP9 is selected from the group consisting of KIPKAXXVPTEL (SEQ ID NO: 84770), SIPKAXXVPTEL (SEQ ID NO: 84830), HVTKPTXAPTKL (SEQ ID NO: 84742), YVPKPXXAPTKL (SEQ ID NO: 84864), TVPKPXXAPTQL (SEQ ID NO: 84854), AVPKAXXAPTKL (SEQ ID NO: 84704), KVGKAXXVPTKL (SEQ ID NO: 84780), KASKAXXVPTKL (SEQ ID NO: 84760), GSAGPXXTPTKL, AAPASXXVPARL (SEQ ID NO: 84677), STPPTXXVPTRL (SEQ ID NO: 84850), HVPKPXXAPTKL (SEQ ID NO: 84734) and RVPSTXXAPVKT (SEQ ID NO: 84815); PEP10 is selected from the group consisting of DMVVEGXGXR (SEQ ID NO: 84510), EMVVEGXGXR (SEQ ID NO: 84529), NMVVRSXGXH (SEQ ID NO: 84629), NMVVRAXGXH (SEQ ID NO: 84627), NMVVKAXGXH (SEQ ID NO: 84624), EGMSVAEXGXR (SEQ ID NO: 84636), GMAVSEXGXR (SEQ ID NO: 84546), GMVVDRXGXS (SEQ ID NO: 84567), DMVVEAXGXR (SEQ ID NO: 84509), DMVVESXGXR (SEQ ID NO: 84511), NMVVRSXGXH (SEQ ID NO: 84629) and MIVEEXGXL (SEQ ID NO: 84448); and wherein the pair PEP9:PEP10 is selected from the group consisting of KIPKAXXVPTEL (SEQ ID NO: 84770):DMVVEGXGXR (SEQ ID NO: 84510), SIPKAXXVPTEL (SEQ ID NO: 84830):EMVVEGXGXR (SEQ ID NO: 84529), HVTKPTXAPTKL (SEQ ID NO: 84742):NMVVRSXGXH (SEQ ID NO: 84629), YVPKPXXAPTKL (SEQ ID NO: 84864):NMVVRSXGXH (SEQ ID NO: 84629), TVPKPXXAPTQL (SEQ ID NO: 84854):NMVVRAXGXH (SEQ ID NO: 84627), AVPKAXXAPTKL (SEQ ID NO: 84704):NMVVKAXGXH (SEQ ID NO: 84624), KVGKAXXVPTKL (SEQ ID NO: 84780):EGMSVAEXGXR (SEQ ID NO: 84636), KASKAXXVPTKL (SEQ ID NO: 84760):GMAVSEXGXR (SEQ ID NO: 84546), GSAGPXXTPTKM (SEQ ID NO: 84726):GMVVDRXGXS (SEQ ID NO: 84567), AAPASXXVPARL (SEQ ID NO: 84677):DMVVEAXGXR (SEQ ID NO: 84509), STPPTXXVPTRL (SEQ ID NO: 84850):DMVVESXGXR (SEQ ID NO: 84511), HVPKPXXAPTKL (SEQ ID NO: 84734):NMVVRSXGXH (SEQ ID NO: 84629) and RVPSTXXAPVKT (SEQ ID NO: 84815):MIVEEXGXL (SEQ ID NO: 84448); and wherein PEP9:PEP10 is not GSAGPXXTPTKM (SEQ ID NO: 84726):GMVVDRXGXS (SEQ ID NO: 84567) when PEP1 is SPIN (SEQ ID NO: 84119) and PEP2 is YGKIP (SEQ ID NO: 84397).

[0596] In certain embodiments useful for inducing differentiation of mensenchymal or progenitor stem cells from the renal cell lineage, promoting renal cell regeneration and/or renal functions and protecting from renal cell degeneration-related conditions or diseases, PEP1 is SPIN (SEQ ID NO: 84119) and PEP11 is LYF.

[0597] In one aspect, the present disclosure provides a GFR-binding compound, wherein said GFR-binding compound is a peptide, a variant or analog thereof, or a peptidomimetic as defined herein, with between 20 and 60 (in particular between 20 and 50, and more particularly, between 20 and 45) amino acids, comprising a peptide with four amino acids (PEP1) or a peptide with eight amino acids (PEP12), a peptide with five amino acids (PEP2), and optionally a pair of peptides selected form the group consisting of PEP3:PEP4, PEP3:PEP6, PEP3:PEP10, PEP5:PEP4, PEP9:PEP4, PEP5:PEP6, PEP5:PEP10, PEP9:PEP6 and PEP9:PEP10; wherein said GFR-binding compound does not comprise the pair of peptides TPTKM (SEQ ID NO: 84327):GMVVD (SEQ ID NO: 84204) when PEP1 is SPIN (SEQ ID NO: 84119) and PEP2 is YGKIP (SEQ ID NO: 84397); and wherein the RMSD is 2.45 Å or less.

[0598] In one aspect, the present disclosure provides a GFR-binding compound, wherein said GFR-binding compound is a peptide, a variant or analog thereof, or a peptidomimetic as defined herein, with between 20 and 60 (in particular between 20 and 50, and more particularly, between 20 and 45) amino acids, comprising a peptide with four amino acids (PEP1) or a peptide with eight amino acids (PEP12), a peptide with five amino acids (PEP2), and optionally a pair of peptides selected form the group consisting of PEP3:PEP4, PEP3:PEP6, PEP3:PEP10, PEP5:PEP4, PEP9:PEP4, PEP5:PEP6, PEP5:PEP10, PEP9:PEP6 and PEP9:PEP10; wherein said GFR-binding compound does not comprise the pair of peptides GSAGPXXTPTKM (SEQ ID NO: 84726):GMVVDRXGXS (SEQ ID NO: 84567) when PEP1 is SPIN (SEQ ID NO: 84119) and PEP2 is YGKIP (SEQ ID NO: 84397); and wherein the RMSD is 2.45 Å or less.

[0599] In certain embodiments useful for inducing differentiation of mensenchymal or progenitor stem cells from the renal cell lineage, promoting renal cell regeneration and/or renal functions and protecting from renal cell degeneration-related conditions or diseases, said GFR-binding compound is a synthetic molecule as defined herein in the definition section.

[0600] In certain embodiments useful for inducing differentiation of mensenchymal or progenitor stem cells from the renal cell lineage, promoting renal cell regeneration and/or renal functions and protecting from renal cell degeneration-related conditions or diseases, said GFR-binding compound is a synthetic peptide, or a variant or analog thereof, or a peptidomimetic.

### Ligaments and Tendons

[0601] Certain embodiments of the invention are particularly useful for inducing differentiation of mensenchymal or progenitor stem cells from the ligament and tendon (L/T) cell lineage, promoting fibrous tissue formation and T/L regeneration and protecting from L/T cell degeneration and L/T cell degeneration-related diseases, conditions, disorders or pathologies.

[0602] In certain embodiments useful for inducing differentiation of mensenchymal or progenitor stem cells from the ligament and tendon (L/T) cell lineage, promoting fibrous tissue formation and T/L regeneration and protecting from L/T cell degeneration and L/T cell degeneration-related diseases, conditions, disorders or pathologies, PEP1 is selected from the group consisting of NAIS (SEQ ID NO: 84113), SPIS (SEQ ID NO: 84120), EPLP (SEQ ID NO: 84110) and EPLT (SEQ ID NO: 84111).

[0603] In certain embodiments useful for inducing differentiation of mensenchymal or progenitor stem cells from the ligament and tendon (L/T) cell lineage, promoting fibrous tissue formation and T/L regeneration and protecting from L/T cell degeneration and L/T cell degeneration-related diseases, conditions, disorders or pathologies, PEP2 is selected from the group consisting of LKKYR (SEQ ID NO: 84229), YKQYE (SEQ ID NO: 84398) and EQLSN (SEQ ID NO: 84178).

[0604] In certain embodiments useful for inducing differentiation of mensenchymal or progenitor stem cells from the ligament and tendon (L/T) cell lineage, promoting fibrous tissue formation and T/L regeneration and protecting from L/T cell degeneration and L/T cell degeneration-related diseases, conditions, disorders or pathologies, PEP3 is selected from the group consisting of VPT, APT, VPQ and VSQ.

[0605] In certain embodiments useful for inducing differentiation of mensenchymal or progenitor stem cells from the ligament and tendon (L/T) cell lineage, promoting fibrous tissue formation and T/L regeneration and protecting from L/T cell degeneration and L/T cell degeneration-related diseases, conditions, disorders or pathologies, PEP4 is selected from the group consisting of VVE, VVR, VRS, VKS and VVK.

[0606] In certain embodiments useful for inducing differentiation of mensenchymal or progenitor stem cells from the ligament and tendon (L/T) cell lineage, promoting fibrous tissue formation and T/L regeneration and protecting from L/T cell degeneration and L/T cell degeneration-related diseases, conditions, disorders or pathologies, PEP5 is a peptide of general formula PEP3-AA¹¹-AA¹²; wherein PEP3 is selected from the group consisting of VPT, APT, VPQ and VSQ; wherein AA¹¹ is selected from the group consisting of E, K, Q, R, A, D, G and H, in particular is E, K, Q, R, A and D; wherein AA¹² is selected from the group consisting of L, M, T, E, Q and H, in particular is L. In one particular example, PEP5 is selected from the group consisting of VPTEL (SEQ ID NO: 84378), APTKL (SEQ ID NO: 84131), APTQL (SEQ ID NO: 84134), VPTRL (SEQ ID NO: 84385), VPQAL (SEQ ID NO: 84364), VSQDL (SEQ ID NO: 84387) and VPQDL (SEQ ID NO: 84365).

[0607] In certain embodiments useful for inducing differentiation of mensenchymal or progenitor stem cells from the ligament and tendon (LIT) cell lineage, promoting fibrous tissue formation and T/L regeneration and protecting from LIT cell degeneration and LIT cell degeneration-related diseases, conditions, disorders or pathologies, PEP6 is a peptide of general formula AA²⁶-AA²⁷-AA²⁸-AA²⁹-PEP4; wherein PEP4 is selected from the group consisting of VVE, VVR, VRS, VKS and VVK; wherein AA²⁶ is absent or selected from the group consisting of AA^{III} amino acids, preferably is absent; wherein AA²⁷ and AA²⁸ are independently selected from the group consisting of AA^{III} and AA^{V} amino acids, preferably AA²⁷ is selected from the group consisting of D, E, N and M, preferably AA²⁸ is selected from the group consisting of M, I and V; wherein AA²⁹ is absent or selected from the group consisting of AA^{II} amino acids, preferably is absent. In one particular example, PEP6 is selected from the group consisting of DMVVE (SEQ ID NO: 84161), EMVVE (SEQ ID NO: 84175), NMVVR (SEQ ID NO: 84275), DMVVE (SEQ ID NO: 84161), MIVRS (SEQ ID NO: 84243), MIVKS (SEQ ID NO: 84242) and NMVVK (SEQ ID NO: 84274).

[0608] In certain embodiments useful for inducing differentiation of mensenchymal or progenitor stem cells from the ligament and tendon (L/T) cell lineage, promoting fibrous tissue formation and T/L regeneration and protecting from L/T cell degeneration and L/T cell degeneration-related diseases, conditions, disorders or pathologies, PEP7 is an amino acid or a peptide with between two and seven amino acids of general formula AA¹-AA²-AA³-AA⁴-AA⁵-AA⁶-AA⁷ (SEQ ID NO: 84948); wherein AA¹, AA², AA³, AA⁴, and AA⁵ are independently absent or AA^{I} as defined herein; wherein AA⁶ is absent or selected from the group consisting of S, T, C, E, Q, P and R, preferably is selected from the group consisting of T, S and C; wherein AA⁷ is absent or is selected from the group consisting of S, T, C, E, Q, P and R, preferably S or C; and wherein at least one of AA¹, AA², AA³, AA⁴, AA⁵, AA⁶ or AA⁷ is not absent. In one particular example, PEP7 is selected from the group consisting of KIPKAXX (SEQ ID NO: 84424), SIPKAXX (SEQ ID NO: 84429), HVTKPTX (SEQ ID NO: 84422), YVPKPXX (SEQ ID NO: 84433), TVPKPXX (SEQ ID NO: 84432), STPPTXX (SEQ ID NO: 84431), ASAAPXX (SEQ ID NO: 84402) and ASASPXX (SEQ ID NO: 84403).

[0609] In certain embodiments useful for inducing differentiation of mensenchymal or progenitor stem cells from the ligament and tendon (L/T) cell lineage, promoting fibrous tissue formation and T/L regeneration and protecting from L/T cell degeneration and L/T cell degeneration-related diseases, conditions, disorders or pathologies, PEP8 is an amino acid or a peptide with between two and six amino acids of general formula AA³³-AA³⁴-AA³⁵-AA³⁶-AA³⁷-AA³⁸ (SEQ ID NO: 84949); wherein AA³³ is absent or is selected from the group consisting of AA^{I} amino acids at the exception of AA^{VI} amino acids, in particular is absent or is selected from the group consisting of G, S and A; AA³⁴ is absent or is selected from the group consisting of AA^{III} and AA^{IV} amino acids, in particular is absent; wherein AA³⁵ is absent or is selected from the group consisting of AA^{II} amino acids, preferably is S or C; wherein AA³⁶ is absent or is selected from the group consisting of AA^{III} and AA^{IV} amino acids, in particular is G or K; wherein AA³⁷ is absent or is selected from the group consisting of AA^{II} amino acids, preferably is S or C; wherein AA³⁸ is absent or is selected from the group consisting of AA^{I}, in particular is selected from the group consisting of R, H and S; and wherein at least one of AA³³, AA³⁴, AA³⁵, AA³⁶, AA³⁷ or AA³⁸ is not absent. In one particular example, PEP8 is selected from the group consisting of GXGXR (SEQ ID NO: 84208), SXGXH (SEQ ID NO: 84304), AXGXH (SEQ ID NO: 84147), SXGXR (SEQ ID NO: 84305), XKXS (SEQ ID NO: 84124) and SXKXS.

[0610] In certain embodiments useful for inducing differentiation of mensenchymal or progenitor stem cells from the ligament and tendon (L/T) cell lineage, promoting fibrous tissue formation and T/L regeneration and protecting from L/T cell degeneration and L/T cell degeneration-related diseases, conditions, disorders or pathologies, PEP9 is a peptide of general formula AA¹-AA²-AA³-AA⁴-AA⁵-AA⁶-AA⁷-PEP5; wherein PEP5 is a peptide of formula PEP3-AA¹¹-AA¹²; wherein PEP3 is selected from the group consisting of VPT, APT, VPQ and VSQ; wherein AA¹¹ is selected from the group consisting of E, K, Q, R, A, D, G and H, in particular is E, K, Q, R, A and D; wherein AA¹² is selected from the group consisting of L, M, T, E, Q and H, in particular is L; wherein AA¹, AA², AA³, AA⁴, and AA⁵ are independently absent or AA^{I} as defined herein; wherein AA⁶ is absent or selected from the group consisting of S, T, C, E, Q, P and R, preferably is selected from the group consisting of T, S and C; wherein AA⁷ is selected from the group consisting of S, T, C, E, Q, P and R, preferably S or C. In one particular example, PEP9 is selected from the group consisting of KIPKAXXVPTEL (SEQ ID NO: 84770), SIPKAXXVPTEL (SEQ ID NO: 84830), HVTKPTXAPTKL (SEQ ID NO: 84742), YVPKPXXAPTKL (SEQ ID NO: 84864), TVPKPXXAPTQL (SEQ ID NO: 84854), STPPTXXVPTRL (SEQ ID NO: 84850), ASAAPXXVPQAL (SEQ ID NO: 84689), ASASPXXVSQDL (SEQ ID NO: 84701) and ASASPXXVPQDL (SEQ ID NO: 84699).

[0611] In certain embodiments useful for inducing differentiation of mensenchymal or progenitor stem cells from the ligament and tendon (L/T) cell lineage, promoting fibrous tissue formation and T/L regeneration and protecting from L/T cell degeneration and L/T cell degeneration-related diseases, conditions, disorders or pathologies, PEP10 is a peptide of general formula PEP6-AA³³-AA³⁴-AA³⁵-AA³⁶-AA³⁷-AA³⁸; wherein PEP6 is a peptide of formula AA²⁶-AA²⁷-AA²⁸-AA²⁹-PEP4; wherein PEP4 is selected from the group consisting of VVE, VVR, VRS, VKS and VVK; wherein AA²⁶ is absent or selected from the group consisting of AA^{III} amino acids, preferably is absent; wherein AA²⁷ and AA²⁸ are independently selected from the group consisting of AA^{III} and AA^{V} amino acids, preferably AA²⁷ is selected from the group consisting of D, E, N and M, preferably AA²⁸ is selected from the group consisting of M, I and V; wherein AA²⁹ is absent or selected from the group consisting of AA^{II} amino acids, preferably is absent; wherein AA³³ is absent or is selected from the group consisting of AA^{I} amino acids at the exception of AA^{VI} amino acids, in particular is absent or is selected from the group consisting of G, S and A; AA³⁴ is absent or is selected from the group consisting of AA^{III} and AA^{IV} amino acids, in particular is absent; wherein AA³⁵ is absent or is selected from the group consisting of AA^{II} amino acids, preferably is S or C; wherein AA³⁶ is absent or is selected from the group consisting of AA^{III} and AA^{IV} amino acids, in particular is G or K; wherein AA³⁷ is absent or is selected from the group consisting of AA^{II} amino acids, preferably is S or C; wherein AA³⁸ is absent or is selected from the group consisting of AA^{I}, in particular is selected from the group consisting of R, H and S. In one particular example, PEP10 is selected from the group consisting of DMVVEGXGXR (SEQ ID NO: 84510), EMVVEGXGXR (SEQ ID NO: 84529), NMVVRSXGXH (SEQ ID NO: 84629), NMVVRAXGXH (SEQ ID NO: 84627), DMVVESXGXR (SEQ ID NO: 84511), MIVRSXKXS (SEQ ID NO: 84453), MIVKSXKXS (SEQ ID NO: 84451) and MVVKSXKXS (SEQ ID NO: 84470).

[0612] In certain embodiments useful for inducing differentiation of mensenchymal or progenitor stem cells from the ligament and tendon (L/T) cell lineage, promoting fibrous tissue formation and T/L regeneration and protecting from L/T cell degeneration and L/T cell degeneration-related diseases, conditions, disorders or pathologies, PEP12 is a peptide of general formula PEP1-AA¹⁷-PEP11; wherein AA¹⁷ is selected from the group consisting of G, A, V, L, I, P, F, M, W, T and S (in particular is selected from the group consisting of M, I, L, V and T); wherein PEP1 is selected from the group consisting of NAIS (SEQ ID NO: 84113), SPIS (SEQ ID NO: 84120), EPLP (SEQ ID NO: 84110) and EPLT (SEQ ID NO: 84111).

[0613] In certain embodiments useful for inducing differentiation of mensenchymal or progenitor stem cells from the ligament and tendon (L/T) cell lineage, promoting fibrous tissue formation and T/L regeneration and protecting from L/T cell degeneration and L/T cell degeneration-related diseases, conditions, disorders or pathologies, PEP11 is a peptide with 3 amino acids of general formula AA¹⁸-AA¹⁹-AA²⁰; wherein AA¹⁸ is selected from the group consisting of L, V, Q, A and R, in particular is L or V; wherein AA¹⁹ is selected from the group consisting of F, W, H and Y, in particular is Y or F; wherein AA²⁰ is selected from the group consisting of L, F, Y, K, I, V and M, in particular is selected from the group consisting of F, I and Y. In one particular example, PEP11 is selected from the group consisting of LYF, LFI, VYY and LYY.

[0614] The definitions of “PEP” pairs, quadruplets, hexaplets and heptuplet e.g. PEP1:PEP2, PEP12:PEP2, or PEP7:PEP5:PEP12:LINKER:PEP2:PEP6:PEP8, most particularly useful for inducing differentiation of mensenchymal or progenitor stem cells from the ligament and tendon (L/T) cell lineage, promoting fibrous tissue formation and T/L regeneration and protecting from L/T cell degeneration and L/T cell degeneration-related diseases, conditions, disorders or pathologies, are as already defined herein to the extent that PEP1 to PEP12 are particularly useful for these applications. For instances:

[0615] In certain embodiments useful for inducing differentiation of mensenchymal or progenitor stem cells from the ligament and tendon (L/T) cell lineage, promoting fibrous tissue formation and T/L regeneration and protecting from L/T cell degeneration and L/T cell degeneration-related diseases, conditions, disorders or pathologies, the pair PEP1:PEP2 is selected from the group consisting of NAIS (SEQ ID NO: 84113):LKKYR (SEQ ID NO: 84229), SPIS (SEQ ID NO: 84120):YKQYE (SEQ ID NO: 84398), EPLP (SEQ ID NO: 84110):EQLSN (SEQ ID NO: 84178) and EPLT (SEQ ID NO: 84111):EQLSN (SEQ ID NO: 84178).

[0616] In certain embodiments useful for inducing differentiation of mensenchymal or progenitor stem cells from the ligament and tendon (L/T) cell lineage, promoting fibrous tissue formation and T/L regeneration and protecting from L/T cell degeneration and L/T cell degeneration-related diseases, conditions, disorders or pathologies, the pair PEP12:PEP2 is selected from the group consisting of NAIS-AA¹⁷-LYF (SEQ ID NO: 84878):LKKYR (SEQ ID NO: 84229), SPIS-AA¹⁷-LFI (SEQ ID NO: 84885):YKQYE (SEQ ID NO: 84398), EPLP-AA¹⁷-VYY (SEQ ID NO: 84875):EQLSN (SEQ ID NO: 84178) and EPLT-AA¹⁷-LYY (SEQ ID NO: 84876):EQLSN (SEQ ID NO: 84178); wherein AA¹⁷ is selected from the group consisting of G, A, V, L, I, P, F, M, W, T and S (in particular is selected from the group consisting of V, I and T).

[0617] In certain embodiments useful for inducing differentiation of mensenchymal or progenitor stem cells from the ligament and tendon (L/T) cell lineage, promoting fibrous tissue formation and T/L regeneration and protecting from L/T cell degeneration and L/T cell degeneration-related diseases, conditions, disorders or pathologies, PEP3 is selected from the group consisting of VPT, APT, VPQ and VSQ; PEP4 is selected from the group consisting of VVE, VVR, VRS, VKS and VVK; and wherein the pair PEP3:PEP4 is selected from the group consisting of VPT:VVE, APT:VVR, VPT:VVE, VPQ:VRS, VSQ:VKS and VPQ:VVK.

[0618] In certain embodiments useful for inducing differentiation of mensenchymal or progenitor stem cells from the ligament and tendon (L/T) cell lineage, promoting fibrous tissue formation and T/L regeneration and protecting from L/T cell degeneration and L/T cell degeneration-related diseases, conditions, disorders or pathologies, PEP5 is selected from the group consisting of VPTEL (SEQ ID NO: 84378), APTKL (SEQ ID NO: 84131), APTQL (SEQ ID NO: 84134), VPTRL (SEQ ID NO: 84385), VPQAL (SEQ ID NO: 84364), VSQDL (SEQ ID NO: 84387) and VPQDL (SEQ ID NO: 84365); PEP6 is selected from the group consisting of DMVVE (SEQ ID NO: 84161), EMVVE (SEQ ID NO: 84175), NMVVR (SEQ ID NO: 84275), DMVVE (SEQ ID NO: 84161), MIVRS (SEQ ID NO: 84243), MIVKS (SEQ ID NO: 84242) and NMVVK (SEQ ID NO: 84274); and wherein the pair PEP5:PEP6 is selected from the group consisting of VPTEL (SEQ ID NO: 84378):DMVVE (SEQ ID NO: 84161), VPTEL (SEQ ID NO: 84378):EMVVE (SEQ ID NO: 84175), APTKL (SEQ ID NO: 84131):NMVVR (SEQ ID NO: 84275), APTQL (SEQ ID NO: 84134):NMVVR (SEQ ID NO: 84275), VPTRL (SEQ ID NO: 84385):DMVVE (SEQ ID NO: 84161), VPQAL (SEQ ID NO: 84364):MIVRS (SEQ ID NO: 84243), VSQDL (SEQ ID NO: 84387):MIVKS (SEQ ID NO: 84242) and VPQDL (SEQ ID NO: 84365):NMVVK (SEQ ID NO: 84274).

[0619] In certain embodiments useful for inducing differentiation of mensenchymal or progenitor stem cells from the ligament and tendon (L/T) cell lineage, promoting fibrous tissue formation and T/L regeneration and protecting from L/T cell degeneration and L/T cell degeneration-related diseases, conditions, disorders or pathologies, PEP7 is selected from the group consisting of KIPKAXX (SEQ ID NO: 84424), SIPKAXX (SEQ ID NO: 84429), HVTKPTX (SEQ ID NO: 84422), YVPKPXX (SEQ ID NO: 84433), TVPKPXX (SEQ ID NO: 84432), STPPTXX (SEQ ID NO: 84431), ASAAPXX (SEQ ID NO: 84402) and ASASPXX (SEQ ID NO: 84403); wherein PEP8 is selected from the group consisting of GXGXR (SEQ ID NO: 84208), SXGXH (SEQ ID NO: 84304), AXGXH (SEQ ID NO: 84147), SXGXR (SEQ ID NO: 84305), XKXS (SEQ ID NO: 84124) and SXKXS; and wherein the pair PEP7:PEP8 is selected from the group consisting of KIPKAXX (SEQ ID NO: 84424):GXGXR (SEQ ID NO: 84208), SIPKAXX (SEQ ID NO: 84429):GXGXR (SEQ ID NO: 84208), HVTKPTX (SEQ ID NO: 84422):SXGXH (SEQ ID NO: 84304), YVPKPXX (SEQ ID NO: 84433):SXGXH (SEQ ID NO: 84304), TVPKPXX (SEQ ID NO: 84432):AXGXH (SEQ ID NO: 84147), STPPTXX (SEQ ID NO: 84431):SXGXR (SEQ ID NO: 84305), ASAAPXX (SEQ ID NO: 84402):XKXS (SEQ ID NO: 84124) and ASASPXX (SEQ ID NO: 84403):XKXS (SEQ ID NO: 84124).

[0620] In certain embodiments useful for inducing differentiation of mensenchymal or progenitor stem cells from the ligament and tendon (L/T) cell lineage, promoting fibrous tissue formation and T/L regeneration and protecting from L/T cell degeneration and L/T cell degeneration-related diseases, conditions, disorders or pathologies, PEP9 is selected from the group consisting of KIPKAXXVPTEL (SEQ ID NO: 84770), SIPKAXXVPTEL (SEQ ID NO: 84830), HVTKPTXAPTKL (SEQ ID NO: 84742), YVPKPXXAPTKL (SEQ ID NO: 84864), TVPKPXXAPTQL (SEQ ID NO: 84854), STPPTXXVPTRL (SEQ ID NO: 84850), ASAAPXXVPQAL (SEQ ID NO: 84689), ASASPXXVSQDL (SEQ ID NO: 84701) and ASASPXXVPQDL (SEQ ID NO: 84699); PEP10 is selected from the group consisting of DMVVEGXGXR (SEQ ID NO: 84510), EMVVEGXGXR (SEQ ID NO: 84529), NMVVRSXGXH (SEQ ID NO: 84629), NMVVRAXGXH (SEQ ID NO: 84627), DMVVESXGXR (SEQ ID NO: 84511), MIVRSXKXS (SEQ ID NO: 84453), MIVKSXKXS (SEQ ID NO: 84451) and MVVKSXKXS (SEQ ID NO: 84470); and wherein the pair PEP9:PEP10 is selected from the group consisting of KIPKAXXVPTEL (SEQ ID NO: 84770):DMVVEGXGXR (SEQ ID NO: 84510), SIPKAXXVPTEL (SEQ ID NO: 84830):EMVVEGXGXR (SEQ ID NO: 84529), HVTKPTXAPTKL (SEQ ID NO: 84742):NMVVRSXGXH (SEQ ID NO: 84629), YVPKPXXAPTKL (SEQ ID NO: 84864):NMVVRSXGXH (SEQ ID NO: 84629), TVPKPXXAPTQL (SEQ ID NO: 84854):NMVVRAXGXH (SEQ ID NO: 84627), STPPTXXVPTRL (SEQ ID NO: 84850):DMVVESXGXR (SEQ ID NO: 84511), ASAAPXXVPQAL (SEQ ID NO: 84689):MIVRSXKXS (SEQ ID NO: 84453), ASASPXXVSQDL (SEQ ID NO: 84701):MIVKSXKXS (SEQ ID NO: 84451) and ASASPXXVPQDL (SEQ ID NO: 84699):MVVKSXKXS (SEQ ID NO: 84470).

[0621] In certain embodiments useful for inducing differentiation of mensenchymal or progenitor stem cells from the ligament and tendon (L/T) cell lineage, promoting fibrous tissue formation and T/L regeneration and protecting from L/T cell degeneration and L/T cell degeneration-related diseases, conditions, disorders or pathologies, PEP5 is selected from the group consisting of VPTEL (SEQ ID NO: 84378), APTKL (SEQ ID NO: 84131), APTQL (SEQ ID NO: 84134), VPTRL (SEQ ID NO: 84385), VPQAL (SEQ ID NO: 84364), VSQDL (SEQ ID NO: 84387) and VPQDL (SEQ ID NO: 84365); PEP6 is selected from the group consisting of DMVVE (SEQ ID NO: 84161), EMVVE (SEQ ID NO: 84175), NMVVR (SEQ ID NO: 84275), DMVVE (SEQ ID NO: 84161), MIVRS (SEQ ID NO: 84243), MIVKS (SEQ ID NO: 84242) and NMVVK (SEQ ID NO: 84274); and wherein the pair PEP5:PEP6 is selected from the group consisting of VPTEL (SEQ ID NO: 84378):DMVVE (SEQ ID NO: 84161), VPTEL (SEQ ID NO: 84378):EMVVE (SEQ ID NO: 84175), APTKL (SEQ ID NO: 84131):NMVVR (SEQ ID NO: 84275), APTQL (SEQ ID NO: 84134):NMVVR (SEQ ID NO: 84275), VPTRL (SEQ ID NO: 84385):DMVVE (SEQ ID NO: 84161), VPQAL (SEQ ID NO: 84364):MIVRS (SEQ ID NO: 84243), VSQDL (SEQ ID NO: 84387):MIVKS (SEQ ID NO: 84242) and VPQDL (SEQ ID NO: 84365):NMVVK (SEQ ID NO: 84274); wherein the pair PEP5:PEP6 is not APTQL (SEQ ID NO: 84134):NMVVR (SEQ ID NO: 84275) when PEP1 is NAIS (SEQ ID NO: 84113) and PEP2 is LKKYR (SEQ ID NO: 84229); wherein the pair PEP5:PEP6 is not VPTRL (SEQ ID NO: 84385):DMVVE (SEQ ID NO: 84161) when PEP1 is SPIS (SEQ ID NO: 84120) and PEP2 is YKQYE (SEQ ID NO: 84398); wherein the pair PEP5:PEP6 is not VPQAL (SEQ ID NO: 84364):MIVRS (SEQ ID NO: 84243) when PEP1 is EPLP (SEQ ID NO: 84110) and PEP2 is EQLSN (SEQ ID NO: 84178); wherein the pair PEP5:PEP6 is not VSQDL (SEQ ID NO: 84387):MIVKS (SEQ ID NO: 84242) when PEP1 is EPLT (SEQ ID NO: 84111) and PEP2 is EQLSN (SEQ ID NO: 84178); and wherein the pair PEP5:PEP6 is not VPQDL (SEQ ID NO: 84365):NMVVK (SEQ ID NO: 84274) when PEP1 is EPLT (SEQ ID NO: 84111) and PEP2 is EQLSN (SEQ ID NO: 84178).

[0622] In certain embodiments useful for inducing differentiation of mensenchymal or progenitor stem cells from the ligament and tendon (L/T) cell lineage, promoting fibrous tissue formation and T/L regeneration and protecting from L/T cell degeneration and L/T cell degeneration-related diseases, conditions, disorders or pathologies, PEP9 is selected from the group consisting of KIPKAXXVPTEL (SEQ ID NO: 84770), SIPKAXXVPTEL (SEQ ID NO: 84830), HVTKPTXAPTKL (SEQ ID NO: 84742), YVPKPXXAPTKL (SEQ ID NO: 84864), TVPKPXXAPTQL (SEQ ID NO: 84854), STPPTXXVPTRL (SEQ ID NO: 84850), ASAAPXXVPQAL (SEQ ID NO: 84689), ASASPXXVSQDL (SEQ ID NO: 84701) and ASASPXXVPQDL (SEQ ID NO: 84699); PEP10 is selected from the group consisting of DMVVEGXGXR (SEQ ID NO: 84510), EMVVEGXGXR (SEQ ID NO: 84529), NMVVRSXGXH (SEQ ID NO: 84629), NMVVRAXGXH (SEQ ID NO: 84627), DMVVESXGXR (SEQ ID NO: 84511), MIVRSXKXS (SEQ ID NO: 84453), MIVKSXKXS (SEQ ID NO: 84451) and MVVKSXKXS (SEQ ID NO: 84470); and wherein the pair PEP9:PEP10 is selected from the group consisting of KIPKAXXVPTEL (SEQ ID NO: 84770):DMVVEGXGXR (SEQ ID NO: 84510), SIPKAXXVPTEL (SEQ ID NO: 84830):EMVVEGXGXR (SEQ ID NO: 84529), HVTKPTXAPTKL (SEQ ID NO: 84742):NMVVRSXGXH (SEQ ID NO: 84629), YVPKPXXAPTKL (SEQ ID NO: 84864):NMVVRSXGXH (SEQ ID NO: 84629), TVPKPXXAPTQL (SEQ ID NO: 84854):NMVVRAXGXH (SEQ ID NO: 84627), STPPTXXVPTRL (SEQ ID NO: 84850):DMVVESXGXR (SEQ ID NO: 84511), ASAAPXXVPQAL (SEQ ID NO: 84689):MIVRSXKXS (SEQ ID NO: 84453), ASASPXXVSQDL (SEQ ID NO: 84701):MIVKSXKXS (SEQ ID NO: 84451) and ASASPXXVPQDL (SEQ ID NO: 84699):MVVKSXKXS (SEQ ID NO: 84470);

wherein the pair PEP9:PEP10 is not TVPKPXXAPTQL (SEQ ID NO: 84854):NMVVRAXGXH (SEQ ID NO: 84627) when PEP1 is NAIS (SEQ ID NO: 84113) and PEP2 is LKKYR (SEQ ID NO: 84229); wherein the pair PEP9:PEP10 is not STPPTXXVPTRL (SEQ ID NO: 84850):DMVVESXGXR (SEQ ID NO: 84511) when PEP1 is SPIS (SEQ ID NO: 84120) and PEP2 is YKQYE (SEQ ID NO: 84398); wherein the pair PEP9:PEP10 is not ASAAPXXVPQAL (SEQ ID NO: 84689):MIVRSXKXS (SEQ ID NO: 84453) when PEP1 is EPLP (SEQ ID NO: 84110) and PEP2 is EQLSN (SEQ ID NO: 84178); wherein the pair PEP9:PEP10 is not ASASPXXVSQDL (SEQ ID NO: 84701):MIVKSXKXS (SEQ ID NO: 84451) when PEP1 is EPLT (SEQ ID NO: 84111) and PEP2 is EQLSN (SEQ ID NO: 84178); and wherein the pair PEP9:PEP10 is not ASASPXXVPQDL (SEQ ID NO: 84699):MVVKSXKXS (SEQ ID NO: 84470) when PEP1 is EPLT (SEQ ID NO: 84111) and PEP2 is EQLSN (SEQ ID NO: 84178).

[0623] In certain embodiments useful for inducing differentiation of mensenchymal or progenitor stem cells from the ligament and tendon (L/T) cell lineage, promoting fibrous tissue formation and T/L regeneration and protecting from L/T cell degeneration and L/T cell degeneration-related diseases, conditions, disorders or pathologies, PEP1 is selected from the group consisting of NAIS (SEQ ID NO: 84113), SPIS (SEQ ID NO: 84120), EPLP (SEQ ID NO: 84110) and EPLT (SEQ ID NO: 84111); PEP11 is selected from the group consisting of LYF, LFI, VYY and LYY; and the pair PEP1:PEP11 is selected from the group consisting of NAIS (SEQ ID NO: 84113):LYF, SPIS (SEQ ID NO: 84120):LFI, EPLP (SEQ ID NO: 84110):VYY and EPLT (SEQ ID NO: 84111):LYY.

[0624] In one aspect, the present disclosure provides a GFR-binding compound, wherein said GFR-binding compound is a peptide, a variant or analog thereof, or a peptidomimetic as defined herein, with between 20 and 60 (in particular between 20 and 50, and more particularly, between 20 and 45) amino acids, comprising a peptide with four amino acids (PEP1) or a peptide with eight amino acids (PEP12), a peptide with five amino acids (PEP2), and optionally a pair of peptides selected form the group consisting of PEP3:PEP4, PEP3:PEP6, PEP3:PEP10, PEP5:PEP4, PEP9:PEP4, PEP5:PEP6, PEP5:PEP10, PEP9:PEP6 and PEP9:PEP10; wherein said GFR-binding compound does not comprise the pair of peptides APTQL (SEQ ID NO: 84134):NMVVR (SEQ ID NO: 84275) when PEP1 is NAIS (SEQ ID NO: 84113) and PEP2 is LKKYR (SEQ ID NO: 84229); wherein said GFR-binding compound does not comprise the pair of peptides VPTRL (SEQ ID NO: 84385):DMVVE (SEQ ID NO: 84161) when PEP1 is SPIS (SEQ ID NO: 84120) and PEP2 is YKQYE (SEQ ID NO: 84398); wherein said GFR-binding compound does not comprise the pair of peptides VPQAL (SEQ ID NO: 84364):MIVRS (SEQ ID NO: 84243) when PEP1 is EPLP (SEQ ID NO: 84110) and PEP2 is EQLSN (SEQ ID NO: 84178); wherein said GFR-binding compound does not comprise the pair of peptides VSQDL (SEQ ID NO: 84387):MIVKS (SEQ ID NO: 84242) when PEP1 is EPLT (SEQ ID NO: 84111) and PEP2 is EQLSN (SEQ ID NO: 84178); and wherein said GFR-binding compound does not comprise the pair of peptides VPQDL (SEQ ID NO: 84365):NMVVK (SEQ ID NO: 84274) when PEP1 is EPLT (SEQ ID NO: 84111) and PEP2 is EQLSN (SEQ ID NO: 84178); and wherein the RMSD is 2.45 Å or less.

[0625] In one aspect, the present disclosure provides a GFR-binding compound, wherein said GFR-binding compound is a peptide, a variant or analog thereof, or a peptidomimetic as defined herein, with between 20 and 60 (in particular between 20 and 50, and more particularly, between 20 and 45) amino acids, comprising a peptide with four amino acids (PEP1) or a peptide with eight amino acids (PEP12), a peptide with five amino acids (PEP2), and optionally a pair of peptides selected form the group consisting of PEP3:PEP4, PEP3:PEP6, PEP3:PEP10, PEP5:PEP4, PEP9:PEP4, PEP5:PEP6, PEP5:PEP10, PEP9:PEP6 and PEP9:PEP10; wherein said GFR-binding compound does not comprise the pair of peptides TVPKPXXAPTQL (SEQ ID NO: 84854):NMVVRAXGXH (SEQ ID NO: 84627) when PEP1 is NAIS (SEQ ID NO: 84113) and PEP2 is LKKYR (SEQ ID NO: 84229); wherein said GFR-binding compound does not comprise the pair of peptides STPPTXXVPTRL (SEQ ID NO: 84850):DMVVESXGXR (SEQ ID NO: 84511) when PEP1 is SPIS (SEQ ID NO: 84120) and PEP2 is YKQYE (SEQ ID NO: 84398); wherein said GFR-binding compound does not comprise the pair of peptides ASAAPXXVPQAL (SEQ ID NO: 84689):MIVRSXKXS (SEQ ID NO: 84453) when PEP1 is EPLP (SEQ ID NO: 84110) and PEP2 is EQLSN (SEQ ID NO: 84178); wherein said GFR-binding compound does not comprise the pair of peptides ASASPXXVSQDL (SEQ ID NO: 84701):MIVKSXKXS (SEQ ID NO: 84451) when PEP1 is EPLT (SEQ ID NO: 84111) and PEP2 is EQLSN (SEQ ID NO: 84178); and wherein said GFR-binding compound does not comprise the pair of peptides ASASPXXVPQDL (SEQ ID NO: 84699):MVVKSXKXS (SEQ ID NO: 84470) when PEP1 is EPLT (SEQ ID NO: 84111) and PEP2 is EQLSN (SEQ ID NO: 84178); and wherein the RMSD is 2.45 Å or less.

[0626] In certain embodiments useful for inducing differentiation of mensenchymal or progenitor stem cells from the ligament and tendon (L/T) cell lineage, promoting fibrous tissue formation and T/L regeneration and protecting from L/T cell degeneration and LIT cell degeneration-related diseases, conditions, disorders or pathologies, said GFR-binding compound is a synthetic molecule as defined herein in the definition section.

[0627] In certain embodiments useful for inducing differentiation of mensenchymal or progenitor stem cells from the ligament and tendon (L/T) cell lineage, promoting fibrous tissue formation and T/L regeneration and protecting from L/T cell degeneration and LIT cell degeneration-related diseases, conditions, disorders or pathologies, said GFR-binding compound is a synthetic peptide, or a variant or analog thereof, or a peptidomimetic.

[0628] In other embodiments also useful for inducing differentiation of mensenchymal or progenitor stem cells from the ligament and tendon (L/T) cell lineage, promoting fibrous tissue formation and T/L regeneration and protecting from L/T cell degeneration and L/T cell degeneration-related diseases, conditions, disorders or pathologies, PEP1 is SPIS (SEQ ID NO: 84120).

[0629] In other embodiments also useful for inducing differentiation of mensenchymal or progenitor stem cells from the ligament and tendon (L/T) cell lineage, promoting fibrous tissue formation and T/L regeneration and protecting from L/T cell degeneration and L/T cell degeneration-related diseases, conditions, disorders or pathologies, PEP2 is YKQYE (SEQ ID NO: 84398).

[0630] In other embodiments also useful for inducing differentiation of mensenchymal or progenitor stem cells from the ligament and tendon (L/T) cell lineage, promoting fibrous tissue formation and T/L regeneration and protecting from L/T cell degeneration and L/T cell degeneration-related diseases, conditions, disorders or pathologies, PEP3 is selected from the group consisting of VPT, APT, TPT, VPA and APV.

[0631] In other embodiments also useful for inducing differentiation of mensenchymal or progenitor stem cells from the ligament and tendon (L/T) cell lineage, promoting fibrous tissue formation and T/L regeneration and protecting from L/T cell degeneration and L/T cell degeneration-related diseases, conditions, disorders or pathologies, PEP4 is selected from the group consisting of VVE, VVR, VVK, VAE, AVS, VVD and VEE.

[0632] In other embodiments also useful for inducing differentiation of mensenchymal or progenitor stem cells from the ligament and tendon (L/T) cell lineage, promoting fibrous tissue formation and T/L regeneration and protecting from L/T cell degeneration and L/T cell degeneration-related diseases, conditions, disorders or pathologies, PEP5 is a peptide of general formula PEP3-AA¹¹-AA¹²; wherein PEP3 is selected from the group consisting of VPT, APT, TPT, VPA and APV; wherein AA¹¹ is selected from the group consisting of E, K, Q, R, A, D, G and H, in particular is selected from the group consisting of E, K, Q and R; wherein AA¹² is selected from the group consisting of L, M, T, E, Q and H, in particular is selected from the group consisting of L, M and T. In one particular example, PEP5 is selected from the group consisting of VPTEL (SEQ ID NO: 84378), APTKL (SEQ ID NO: 84131), APTQL (SEQ ID NO: 84134), VPTKL (SEQ ID NO: 84381), TPTKM (SEQ ID NO: 84327), VPARL (SEQ ID NO: 84352), VPTRL (SEQ ID NO: 84385) and APVKT (SEQ ID NO: 84144).

[0633] In other embodiments also useful for inducing differentiation of mensenchymal or progenitor stem cells from the ligament and tendon (L/T) cell lineage, promoting fibrous tissue formation and T/L regeneration and protecting from L/T cell degeneration and L/T cell degeneration-related diseases, conditions, disorders or pathologies, PEP6 is a peptide of general formula AA²⁶-AA²⁷-AA²⁸-AA²⁹-PEP4; wherein PEP4 is selected from the group consisting of VVE, VVR, VVK, VAE, AVS, VVD and VEE; wherein AA²⁶ is absent or selected from the group consisting of AA^{III} amino acids, preferably absent or E; wherein AA²⁷ and AA²⁸ are independently selected from the group consisting of AA^{III} and AA^{V} amino acids, preferably AA²⁷ is selected from the group consisting of D, E, N, G and M, preferably AA²⁸ is M or I; wherein AA²⁹ is absent or selected from the group consisting of AA^{II} amino acids, preferably absent or S. In one particular example, PEP6 is selected from the group consisting of DMVVE (SEQ ID NO: 84161), EMVVE (SEQ ID NO: 84175), NMVVR (SEQ ID NO: 84275), NMVVK (SEQ ID NO: 84274), EGMSVAE (SEQ ID NO: 84411), EGMAVS, GMVVD (SEQ ID NO: 84204) and DMIVEE.

[0634] In other embodiments also useful for inducing differentiation of mensenchymal or progenitor stem cells from the ligament and tendon (LIT) cell lineage, promoting fibrous tissue formation and T/L regeneration and protecting from LIT cell degeneration and LIT cell degeneration-related diseases, conditions, disorders or pathologies, PEP7 is an amino acid or a peptide with between two and seven amino acids of general formula AA¹-AA²-AA³-AA⁴-AA⁵-AA⁶-AA⁷ (SEQ ID NO: 84948); wherein AA¹, AA², AA³, AA⁴, and AA⁵ are independently absent or AA^{I} as defined herein; wherein AA⁶ is absent or selected from the group consisting of S, T, C, E, Q, P and R, preferably is S or C; wherein AA⁷ is absent or is selected from the group consisting of S, T, C, E, Q, P and R, preferably is S or C; and wherein at least one of AA¹, AA², AA³, AA⁴, AA⁵, AA⁶ or AA⁷ is not absent. In one particular example, PEP7 is selected from the group consisting of KIPKAXX (SEQ ID NO: 84424), SIPKAXX (SEQ ID NO: 84429), HVTKPTX (SEQ ID NO: 84422), YVPKPXX (SEQ ID NO: 84433), TVPKPXX (SEQ ID NO: 84432), AVPKAXX (SEQ ID NO: 84404), KVGKAXX (SEQ ID NO: 84425), KASKAXX (SEQ ID NO: 84423), GSAGPXX (SEQ ID NO: 84420), AAPAXXS, STPPTXX (SEQ ID NO: 84431), HVPKPXX (SEQ ID NO: 84421) and RVPSTXX (SEQ ID NO: 84428).

[0635] In other embodiments also useful for inducing differentiation of mensenchymal or progenitor stem cells from the ligament and tendon (L/T) cell lineage, promoting fibrous tissue formation and T/L regeneration and protecting from L/T cell degeneration and L/T cell degeneration-related diseases, conditions, disorders or pathologies, PEP8 is an amino acid or a peptide with between two and six amino acids of general formula AA³³-AA³⁴-AA³⁵-AA³⁶-AA³⁷-AA³⁸ (SEQ ID NO: 84949); wherein AA³³ is absent or is selected from the group consisting of AA^{I} amino acids at the exception of AA^{VI} amino acids, in particular is absent or is selected from the group consisting of G, S, A, E and R; AA³⁴ is absent or is selected from the group consisting of AA^{III} and AA^{IV} amino acids, in particular is absent; wherein AA³⁵ is absent or is selected from the group consisting of AA^{II} amino acids, preferably is S or C; wherein AA³⁶ is absent or is selected from the group consisting of AA^{III} and AA^{IV} amino acids; wherein AA³⁷ is absent or is selected from the group consisting of AA^{II} amino acids, preferably is S or C; wherein AA³⁸ is absent or is selected from the group consisting of AA^{I}, in particular is selected from the group consisting of R, H, S and L; and wherein at least one of AA³³, AA³⁴, AA³⁵, AA³⁶, AA³⁷ or AA³⁸ is not absent. In one particular example, PEP8 is selected from the group consisting of GXGXR (SEQ ID NO: 84208), SXGXH (SEQ ID NO: 84304), AXGXH (SEQ ID NO: 84147), XGXR (SEQ ID NO: 84123), EXGXR (SEQ ID NO: 84179), RXGXS (SEQ ID NO: 84291), AXGXR (SEQ ID NO: 84148), SXGXR (SEQ ID NO: 84305) and XGXL (SEQ ID NO: 84122).

[0636] In other embodiments also useful for inducing differentiation of mensenchymal or progenitor stem cells from the ligament and tendon (L/T) cell lineage, promoting fibrous tissue formation and T/L regeneration and protecting from L/T cell degeneration and L/T cell degeneration-related diseases, conditions, disorders or pathologies, PEP9 is a peptide of general formula AA¹-AA²-AA³-AA⁴-AA⁵-AA⁶-AA⁷-PEP5; wherein PEP5 is a peptide of formula PEP3-AA¹¹-AA¹²; wherein PEP3 is selected from the group consisting of VPT, APT, TPT, VPA and APV; wherein AA¹¹ is selected from the group consisting of E, K, Q, R, A, D, G and H, in particular is E, K, Q and R; wherein AA¹² is selected from the group consisting of L, M, T, E, Q and H, in particular is L, M or T; wherein AA¹, AA², AA³, AA⁴, and AA⁵ are independently absent or AA^{I} as defined herein; wherein AA⁶ is absent or selected from the group consisting of S, T, C, E, Q, P and R, preferably is S or C; wherein AA⁷ is selected from the group consisting of S, T, C, E, Q, P and R, preferably is S or C. In one particular example, PEP9 is selected from the group consisting of KIPKAXXVPTEL (SEQ ID NO: 84770), SIPKAXXVPTEL (SEQ ID NO: 84830), HVTKPTXAPTKL (SEQ ID NO: 84742), YVPKPXXAPTKL (SEQ ID NO: 84864), TVPKPXXAPTQL (SEQ ID NO: 84854), AVPKAXXAPTKL (SEQ ID NO: 84704), KVGKAXXVPTKL (SEQ ID NO: 84780), KASKAXXVPTKL (SEQ ID NO: 84760), GSAGPXXTPTKL, AAPASXXVPARL (SEQ ID NO: 84677), STPPTXXVPTRL (SEQ ID NO: 84850), HVPKPXXAPTKL (SEQ ID NO: 84734) and RVPSTXXAPVKT (SEQ ID NO: 84815).

[0637] In other embodiments also useful for inducing differentiation of mensenchymal or progenitor stem cells from the ligament and tendon (L/T) cell lineage, promoting fibrous tissue formation and T/L regeneration and protecting from L/T cell degeneration and L/T cell degeneration-related diseases, conditions, disorders or pathologies, PEP10 is a peptide of general formula PEP6-AA³³-AA³⁴-AA³⁵-AA³⁶-AA³⁷-AA³⁸; wherein PEP6 is a peptide of formula AA²⁶-AA²⁷-AA²⁸-AA²⁹-PEP4; wherein PEP4 is selected from the group consisting of VVE, VVR, VVK, VAE, AVS, VVD and VEE; wherein AA²⁶ is absent or selected from the group consisting of AA^{III} amino acids, preferably absent or E; wherein AA²⁷ and AA²⁸ are independently selected from the group consisting of AA^{III} and AA^{V} amino acids, preferably AA²⁷ is selected from the group consisting of D, E, N, G and M, preferably AA²⁸ is M or I; wherein AA²⁹ is absent or selected from the group consisting of AA^{II} amino acids, preferably absent or S; wherein AA³³ is absent or is selected from the group consisting of AA^{I} amino acids at the exception of AA^{VI} amino acids, in particular is absent or is selected from the group consisting of G, S, A, E and R; AA³⁴ is absent or is selected from the group consisting of AA^{III} and AA^{IV} amino acids, in particular is absent; wherein AA³⁵ is absent or is selected from the group consisting of AA^{II} amino acids, preferably is S or C; wherein AA³⁶ is absent or is selected from the group consisting of AA^{III} and AA^{IV} amino acids; wherein AA³⁷ is absent or is selected from the group consisting of AA^{II} amino acids, preferably is S or C; wherein AA³⁸ is absent or is selected from the group consisting of AA^{I}, in particular is selected from the group consisting of R, H, S and L. In one particular example, PEP10 is selected from the group consisting of DMVVEGXGXR (SEQ ID NO: 84510), EMVVEGXGXR (SEQ ID NO: 84529), NMVVRSXGXH (SEQ ID NO: 84629), NMVVRAXGXH (SEQ ID NO: 84627), NMVVKAXGXH (SEQ ID NO: 84624), EGMSVAEXGXR (SEQ ID NO: 84636), GMAVSEXGXR (SEQ ID NO: 84546), GMVVDRXGXS (SEQ ID NO: 84567), DMVVEAXGXR (SEQ ID NO: 84509), DMVVESXGXR (SEQ ID NO: 84511), NMVVRSXGXH (SEQ ID NO: 84629) and MIVEEXGXL (SEQ ID NO: 84448).

[0638] In other embodiments also useful for inducing differentiation of mensenchymal or progenitor stem cells from the ligament and tendon (L/T) cell lineage, promoting fibrous tissue formation and T/L regeneration and protecting from L/T cell degeneration and L/T cell degeneration-related diseases, conditions, disorders or pathologies, PEP12 is a peptide of general formula PEP1-AA¹⁷-PEP11; wherein AA¹⁷ is selected from the group consisting of G, A, V, L, I, P, F, M, W, T and S (in particular is selected from the group consisting of M, I, L, V and T); wherein PEP1 is SPIS (SEQ ID NO: 84120).

[0639] In other embodiments also useful for inducing differentiation of mensenchymal or progenitor stem cells from the ligament and tendon (L/T) cell lineage, promoting fibrous tissue formation and T/L regeneration and protecting from L/T cell degeneration and L/T cell degeneration-related diseases, conditions, disorders or pathologies, PEP11 is a peptide with 3 amino acids of general formula AA¹⁸-AA¹⁹-AA²⁰; wherein AA¹⁸ is selected from the group consisting of L, V, Q, A and R, in particular is L; wherein AA¹⁹ is selected from the group consisting of F, W, H and Y, in particular is a polar aromatic amino acid such as Y; wherein AA²⁰ is selected from the group consisting of L, F, Y, K, I, V and M, in particular is I. In one particular example, PEP11 is LYI.

[0640] The definitions of “PEP” pairs, quadruplets, hexaplets and heptuplet e.g. PEP1:PEP2, PEP12:PEP2, or PEP7:PEP5:PEP12:LINKER:PEP2:PEP6:PEP8, also useful for inducing differentiation of mensenchymal or progenitor stem cells from the ligament and tendon (L/T) cell lineage, promoting fibrous tissue formation and T/L regeneration and protecting from L/T cell degeneration and L/T cell degeneration-related diseases, conditions, disorders or pathologies, are as already defined herein to the extent that PEP1 to PEP12 are particularly useful for these applications. For instances:

[0641] In other embodiments also useful for inducing differentiation of mensenchymal or progenitor stem cells from the ligament and tendon (L/T) cell lineage, promoting fibrous tissue formation and T/L regeneration and protecting from L/T cell degeneration and L/T cell degeneration-related diseases, conditions, disorders or pathologies, PEP3 is selected from the group consisting of VPT, APT, TPT, VPA and APV; PEP4 is selected from the group consisting of VVE, VVR, VVK, VAE, AVS, VVD and VEE; and wherein the pair PEP3:PEP4 is selected from the group consisting of VPT:VVE, APT:VVR, APT:VVK, VPT:VAE, VPT:AVS, TPT:VVD, VPA:VVE and APV:VEE.

[0642] In other embodiments also useful for inducing differentiation of mensenchymal or progenitor stem cells from the ligament and tendon (L/T) cell lineage, promoting fibrous tissue formation and T/L regeneration and protecting from L/T cell degeneration and L/T cell degeneration-related diseases, conditions, disorders or pathologies, PEP5 is selected from the group consisting of VPTEL (SEQ ID NO: 84378), APTKL (SEQ ID NO: 84131), APTQL (SEQ ID NO: 84134), VPTKL (SEQ ID NO: 84381), TPTKM (SEQ ID NO: 84327), VPARL (SEQ ID NO: 84352), VPTRL (SEQ ID NO: 84385) and APVKT (SEQ ID NO: 84144); PEP6 is selected from the group consisting of DMVVE (SEQ ID NO: 84161), EMVVE (SEQ ID NO: 84175), NMVVR (SEQ ID NO: 84275), NMVVK (SEQ ID NO: 84274), EGMSVAE (SEQ ID NO: 84411), EGMAVS, GMVVD (SEQ ID NO: 84204) and DMIVEE; and wherein the pair PEP5:PEP6 is selected from the group consisting of VPTEL (SEQ ID NO: 84378):DMVVE (SEQ ID NO: 84161), VPTEL (SEQ ID NO: 84378):EMVVE (SEQ ID NO: 84175), APTKL (SEQ ID NO: 84131):NMVVR (SEQ ID NO: 84275), APTQL (SEQ ID NO: 84134):NMVVR (SEQ ID NO: 84275), APTKL (SEQ ID NO: 84131):NMVVK (SEQ ID NO: 84274), VPTKL (SEQ ID NO: 84381):EGMSVAE (SEQ ID NO: 84411), VPTKL (SEQ ID NO: 84381):EGMAVS, TPTKM (SEQ ID NO: 84327):GMVVD (SEQ ID NO: 84204), VPARL (SEQ ID NO: 84352):DMVVE (SEQ ID NO: 84161), VPTRL (SEQ ID NO: 84385):DMVVE (SEQ ID NO: 84161), APTKL (SEQ ID NO: 84131):NMVVR (SEQ ID NO: 84275) and APVKT (SEQ ID NO: 84144):DMIVEE.

[0643] In other embodiments also useful for inducing differentiation of mensenchymal or progenitor stem cells from the ligament and tendon (L/T) cell lineage, promoting fibrous tissue formation and T/L regeneration and protecting from L/T cell degeneration and L/T cell degeneration-related diseases, conditions, disorders or pathologies, PEP7 is selected from the group consisting of KIPKAXX (SEQ ID NO: 84424), SIPKAXX (SEQ ID NO: 84429), HVTKPTX (SEQ ID NO: 84422), YVPKPXX (SEQ ID NO: 84433), TVPKPXX (SEQ ID NO: 84432), AVPKAXX (SEQ ID NO: 84404), KVGKAXX (SEQ ID NO: 84425), KASKAXX (SEQ ID NO: 84423), GSAGPXX (SEQ ID NO: 84420), AAPAXXS, STPPTXX (SEQ ID NO: 84431), HVPKPXX (SEQ ID NO: 84421) and RVPSTXX (SEQ ID NO: 84428); wherein PEP8 is selected from the group consisting of GXGXR (SEQ ID NO: 84208), SXGXH (SEQ ID NO: 84304), AXGXH (SEQ ID NO: 84147), XGXR (SEQ ID NO: 84123), EXGXR (SEQ ID NO: 84179), RXGXS (SEQ ID NO: 84291), AXGXR (SEQ ID NO: 84148), SXGXR (SEQ ID NO: 84305) and XGXL (SEQ ID NO: 84122); and wherein the pair PEP7:PEP8 is selected from the group consisting of KIPKAXX (SEQ ID NO: 84424):GXGXR (SEQ ID NO: 84208), SIPKAXX (SEQ ID NO: 84429):GXGXR (SEQ ID NO: 84208), HVTKPTX (SEQ ID NO: 84422):SXGXH (SEQ ID NO: 84304), YVPKPXX (SEQ ID NO: 84433):SXGXH (SEQ ID NO: 84304), TVPKPXX (SEQ ID NO: 84432):AXGXH (SEQ ID NO: 84147), AVPKAXX (SEQ ID NO: 84404):AXGXH (SEQ ID NO: 84147), KVGKAXX (SEQ ID NO: 84425):XGXR (SEQ ID NO: 84123), KASKAXX (SEQ ID NO: 84423):EXGXR (SEQ ID NO: 84179), GSAGPXX (SEQ ID NO: 84420):RXGXS (SEQ ID NO: 84291), AAPASXX (SEQ ID NO: 84401):AXGXR (SEQ ID NO: 84148), STPPTXX (SEQ ID NO: 84431):SXGXR (SEQ ID NO: 84305), HVPKPXX (SEQ ID NO: 84421):SXGXH (SEQ ID NO: 84304) and RVPSTXX (SEQ ID NO: 84428):XGXL (SEQ ID NO: 84122).

[0644] In other embodiments also useful for inducing differentiation of mensenchymal or progenitor stem cells from the ligament and tendon (L/T) cell lineage, promoting fibrous tissue formation and T/L regeneration and protecting from L/T cell degeneration and L/T cell degeneration-related diseases, conditions, disorders or pathologies, PEP9 is selected from the group consisting of KIPKAXXVPTEL (SEQ ID NO: 84770), SIPKAXXVPTEL (SEQ ID NO: 84830), HVTKPTXAPTKL (SEQ ID NO: 84742), YVPKPXXAPTKL (SEQ ID NO: 84864), TVPKPXXAPTQL (SEQ ID NO: 84854), AVPKAXXAPTKL (SEQ ID NO: 84704), KVGKAXXVPTKL (SEQ ID NO: 84780), KASKAXXVPTKL (SEQ ID NO: 84760), GSAGPXXTPTKL, AAPASXXVPARL (SEQ ID NO: 84677), STPPTXXVPTRL (SEQ ID NO: 84850), HVPKPXXAPTKL (SEQ ID NO: 84734) and RVPSTXXAPVKT (SEQ ID NO: 84815); PEP10 is selected from the group consisting of DMVVEGXGXR (SEQ ID NO: 84510), EMVVEGXGXR (SEQ ID NO: 84529), NMVVRSXGXH (SEQ ID NO: 84629), NMVVRAXGXH (SEQ ID NO: 84627), NMVVKAXGXH (SEQ ID NO: 84624), EGMSVAEXGXR (SEQ ID NO: 84636), GMAVSEXGXR (SEQ ID NO: 84546), GMVVDRXGXS (SEQ ID NO: 84567), DMVVEAXGXR (SEQ ID NO: 84509), DMVVESXGXR (SEQ ID NO: 84511), NMVVRSXGXH (SEQ ID NO: 84629) and MIVEEXGXL (SEQ ID NO: 84448); and wherein the pair PEP9:PEP10 is selected from the group consisting of KIPKAXXVPTEL (SEQ ID NO: 84770):DMVVEGXGXR (SEQ ID NO: 84510), SIPKAXXVPTEL (SEQ ID NO: 84830):EMVVEGXGXR (SEQ ID NO: 84529), HVTKPTXAPTKL (SEQ ID NO: 84742):NMVVRSXGXH (SEQ ID NO: 84629), YVPKPXXAPTKL (SEQ ID NO: 84864):NMVVRSXGXH (SEQ ID NO: 84629), TVPKPXXAPTQL (SEQ ID NO: 84854):NMVVRAXGXH (SEQ ID NO: 84627), AVPKAXXAPTKL (SEQ ID NO: 84704):NMVVKAXGXH (SEQ ID NO: 84624), KVGKAXXVPTKL (SEQ ID NO: 84780):EGMSVAEXGXR (SEQ ID NO: 84636), KASKAXXVPTKL (SEQ ID NO: 84760):GMAVSEXGXR (SEQ ID NO: 84546), GSAGPXXTPTKM (SEQ ID NO: 84726):GMVVDRXGXS (SEQ ID NO: 84567), AAPASXXVPARL (SEQ ID NO: 84677):DMVVEAXGXR (SEQ ID NO: 84509), STPPTXXVPTRL (SEQ ID NO: 84850):DMVVESXGXR (SEQ ID NO: 84511), HVPKPXXAPTKL (SEQ ID NO: 84734):NMVVRSXGXH (SEQ ID NO: 84629) and RVPSTXXAPVKT (SEQ ID NO: 84815):MIVEEXGXL (SEQ ID NO: 84448).

[0645] In other embodiments also useful for inducing differentiation of mensenchymal or progenitor stem cells from the ligament and tendon (L/T) cell lineage, promoting fibrous tissue formation and T/L regeneration and protecting from L/T cell degeneration and L/T cell degeneration-related diseases, conditions, disorders or pathologies, PEP5 is selected from the group consisting of VPTEL (SEQ ID NO: 84378), APTKL (SEQ ID NO: 84131), APTQL (SEQ ID NO: 84134), VPTKL (SEQ ID NO: 84381), VPARL (SEQ ID NO: 84352), VPQAL (SEQ ID NO: 84364), VSQDL (SEQ ID NO: 84387) and VPQDL (SEQ ID NO: 84365); PEP6 is selected from the group consisting of DMVVE (SEQ ID NO: 84161), EMVVE (SEQ ID NO: 84175), NMVVR (SEQ ID NO: 84275), NMVVK (SEQ ID NO: 84274), EGMSVAE (SEQ ID NO: 84411), GMAVS (SEQ ID NO: 84194), DMVVE (SEQ ID NO: 84161), MIVRS (SEQ ID NO: 84243), MIVKS (SEQ ID NO: 84242) and MVVKS (SEQ ID NO: 84256); and wherein the pair PEP5:PEP6 is selected from the group consisting of VPTEL (SEQ ID NO: 84378):DMVVE (SEQ ID NO: 84161), VPTEL (SEQ ID NO: 84378):EMVVE (SEQ ID NO: 84175), APTKL (SEQ ID NO: 84131):NMVVR (SEQ ID NO: 84275), APTQL (SEQ ID NO: 84134):NMVVR (SEQ ID NO: 84275), APTKL (SEQ ID NO: 84131):NMVVK (SEQ ID NO: 84274), VPTKL (SEQ ID NO: 84381):EGMSVAE (SEQ ID NO: 84411), VPTKL (SEQ ID NO: 84381):EGMAVS, TPTKM (SEQ ID NO: 84327):GMVVD (SEQ ID NO: 84204), VPARL (SEQ ID NO: 84352):DMVVE (SEQ ID NO: 84161), VPTRL (SEQ ID NO: 84385):DMVVE (SEQ ID NO: 84161), APTKL (SEQ ID NO: 84131):NMVVR (SEQ ID NO: 84275) and APVKT (SEQ ID NO: 84144):DMIVEE; and wherein the pair PEP5:PEP6 is not VPARL (SEQ ID NO: 84352):DMVVE (SEQ ID NO: 84161) when PEP1 is SPIS (SEQ ID NO: 84120) and PEP2 is YKQYE (SEQ ID NO: 84398).

[0646] In other embodiments also useful for inducing differentiation of mensenchymal or progenitor stem cells from the ligament and tendon (L/T) cell lineage, promoting fibrous tissue formation and T/L regeneration and protecting from L/T cell degeneration and L/T cell degeneration-related diseases, conditions, disorders or pathologies, PEP9 is selected from the group consisting of KIPKAXXVPTEL (SEQ ID NO: 84770), SIPKAXXVPTEL (SEQ ID NO: 84830), HVTKPTXAPTKL (SEQ ID NO: 84742), YVPKPXXAPTKL (SEQ ID NO: 84864), TVPKPXXAPTQL (SEQ ID NO: 84854), AVPKAXXAPTKL (SEQ ID NO: 84704), KVGKAXXVPTKL (SEQ ID NO: 84780), KASKAXXVPTKL (SEQ ID NO: 84760), GSAGPXXTPTKL, AAPASXXVPARL (SEQ ID NO: 84677), STPPTXXVPTRL (SEQ ID NO: 84850), HVPKPXXAPTKL (SEQ ID NO: 84734) and RVPSTXXAPVKT (SEQ ID NO: 84815); PEP10 is selected from the group consisting of DMVVEGXGXR (SEQ ID NO: 84510), EMVVEGXGXR (SEQ ID NO: 84529), NMVVRSXGXH (SEQ ID NO: 84629), NMVVRAXGXH (SEQ ID NO: 84627), NMVVKAXGXH (SEQ ID NO: 84624), EGMSVAEXGXR (SEQ ID NO: 84636), GMAVSEXGXR (SEQ ID NO: 84546), GMVVDRXGXS (SEQ ID NO: 84567), DMVVEAXGXR (SEQ ID NO: 84509), DMVVESXGXR (SEQ ID NO: 84511), NMVVRSXGXH (SEQ ID NO: 84629) and MIVEEXGXL (SEQ ID NO: 84448); and wherein the pair PEP9:PEP10 is selected from the group consisting of KIPKAXXVPTEL (SEQ ID NO: 84770):DMVVEGXGXR (SEQ ID NO: 84510), SIPKAXXVPTEL (SEQ ID NO: 84830):EMVVEGXGXR (SEQ ID NO: 84529), HVTKPTXAPTKL (SEQ ID NO: 84742):NMVVRSXGXH (SEQ ID NO: 84629), YVPKPXXAPTKL (SEQ ID NO: 84864):NMVVRSXGXH (SEQ ID NO: 84629), TVPKPXXAPTQL (SEQ ID NO: 84854):NMVVRAXGXH (SEQ ID NO: 84627), AVPKAXXAPTKL (SEQ ID NO: 84704):NMVVKAXGXH (SEQ ID NO: 84624), KVGKAXXVPTKL (SEQ ID NO: 84780):EGMSVAEXGXR (SEQ ID NO: 84636), KASKAXXVPTKL (SEQ ID NO: 84760):GMAVSEXGXR (SEQ ID NO: 84546), GSAGPXXTPTKM (SEQ ID NO: 84726):GMVVDRXGXS (SEQ ID NO: 84567), AAPASXXVPARL (SEQ ID NO: 84677):DMVVEAXGXR (SEQ ID NO: 84509), STPPTXXVPTRL (SEQ ID NO: 84850):DMVVESXGXR (SEQ ID NO: 84511), HVPKPXXAPTKL (SEQ ID NO: 84734):NMVVRSXGXH (SEQ ID NO: 84629) and RVPSTXXAPVKT (SEQ ID NO: 84815):MIVEEXGXL (SEQ ID NO: 84448); and wherein PEP9:PEP10 is not AAPASXXVPARL (SEQ ID NO: 84677):DMVVEAXGXR (SEQ ID NO: 84509) when PEP1 is SPIS (SEQ ID NO: 84120) and PEP2 is YKQYE (SEQ ID NO: 84398).

[0647] In other embodiments also useful for inducing differentiation of mensenchymal or progenitor stem cells from the ligament and tendon (L/T) cell lineage, promoting fibrous tissue formation and T/L regeneration and protecting from L/T cell degeneration and L/T cell degeneration-related diseases, conditions, disorders or pathologies, PEP1 is SPIS (SEQ ID NO: 84120) and PEP11 is LYI.

[0648] In one aspect, the present disclosure provides a GFR-binding compound, wherein said GFR-binding compound is a peptide, a variant or analog thereof, or a peptidomimetic as defined herein, with between 20 and 60 (in particular between 20 and 50, and more particularly, between 20 and 45) amino acids, comprising a peptide with four amino acids (PEP1) or a peptide with eight amino acids (PEP12), a peptide with five amino acids (PEP2), and optionally a pair of peptides selected form the group consisting of PEP3:PEP4, PEP3:PEP6, PEP3:PEP10, PEP5:PEP4, PEP9:PEP4, PEP5:PEP6, PEP5:PEP10, PEP9:PEP6 and PEP9:PEP10; wherein said GFR-binding compound does not comprise the pair of peptides VPARL (SEQ ID NO: 84352):DMVVE (SEQ ID NO: 84161) when PEP1 is SPIS (SEQ ID NO: 84120) and PEP2 is YKQYE (SEQ ID NO: 84398); and wherein the RMSD is 2.45 Å or less.

[0649] In one aspect, the present disclosure provides a GFR-binding compound, wherein said GFR-binding compound is a peptide, a variant or analog thereof, or a peptidomimetic as defined herein, with between 20 and 60 (in particular between 20 and 50, and more particularly, between 20 and 45) amino acids, comprising a peptide with four amino acids (PEP1) or a peptide with eight amino acids (PEP12), a peptide with five amino acids (PEP2), and optionally a pair of peptides selected form the group consisting of PEP3:PEP4, PEP3:PEP6, PEP3:PEP10, PEP5:PEP4, PEP9:PEP4, PEP5:PEP6, PEP5:PEP10, PEP9:PEP6 and PEP9:PEP10; wherein said GFR-binding compound does not comprise the pair of peptides AAPASXXVPARL (SEQ ID NO: 84677):DMVVEAXGXR (SEQ ID NO: 84509) when PEP1 is SPIS (SEQ ID NO: 84120) and PEP2 is YKQYE (SEQ ID NO: 84398); and wherein the RMSD is 2.45 Å or less.

[0650] In other embodiments also useful for inducing differentiation of mensenchymal or progenitor stem cells from the ligament and tendon (L/T) cell lineage, promoting fibrous tissue formation and T/L regeneration and protecting from L/T cell degeneration and L/T cell degeneration-related diseases, conditions, disorders or pathologies, said GFR-binding compound is a synthetic molecule as defined herein in the definition section.

[0651] In other embodiments also useful for inducing differentiation of mensenchymal or progenitor stem cells from the ligament and tendon (L/T) cell lineage, promoting fibrous tissue formation and T/L regeneration and protecting from L/T cell degeneration and L/T cell degeneration-related diseases, conditions, disorders or pathologies, said GFR-binding compound is a synthetic peptide, or a variant or analog thereof, or a peptidomimetic.

### Wound Healing

[0652] Certain embodiments of the invention are particularly useful for inducing differentiation of mensenchymal or progenitor stem cells involved in the process of wound healing as defined herein, promoting wound healing, skin repair and cellular migration.

[0653] In certain embodiments useful for inducing differentiation of mensenchymal or progenitor stem cells involved in the process of wound healing as defined herein, promoting wound healing, skin repair and cellular migration, PEP1 is selected from the group consisting of SNIT (SEQ ID NO: 84118), RPVQ (SEQ ID NO: 84114) and RSVK (SEQ ID NO: 84115).

[0654] In certain embodiments useful for inducing differentiation of mensenchymal or progenitor stem cells involved in the process of wound healing as defined herein, promoting wound healing, skin repair and cellular migration, PEP2 is selected from the group consisting of IGEMS (SEQ ID NO: 84209), LGEMS (SEQ ID NO: 84228), KEVQV (SEQ ID NO: 84210) and KKATV (SEQ ID NO: 84212).

[0655] In certain embodiments useful for inducing differentiation of mensenchymal or progenitor stem cells involved in the process of wound healing as defined herein, promoting wound healing, skin repair and cellular migration, PEP3 is selected from the group consisting of VPT, SRV and TQV.

[0656] In certain embodiments useful for inducing differentiation of mensenchymal or progenitor stem cells involved in the process of wound healing as defined herein, promoting wound healing, skin repair and cellular migration, PEP4 is selected from the group consisting of QHN, EHS, EEH and EDH.

[0657] In certain embodiments useful for inducing differentiation of mensenchymal or progenitor stem cells involved in the process of wound healing as defined herein, promoting wound healing, skin repair and cellular migration, PEP5 is a peptide of general formula PEP3-AA¹¹-AA¹²; wherein PEP3 is selected from the group consisting of VPT, SRV and TQV; wherein AA¹¹ is selected from the group consisting of E, K, Q, R, A, D, G and H, in particular is selected from the group consisting of E, G, H and Q; wherein AA¹² is selected from the group consisting of L, M, T, E, Q and H, in particular is selected from the group consisting of E, Q, H and L. In one particular example, PEP5 is selected from the group consisting of VPTGQ (SEQ ID NO: 84379), VPTEE (SEQ ID NO: 84377), SRVHH (SEQ ID NO: 84297) and TQVQL (SEQ ID NO: 84340).

[0658] In certain embodiments useful for inducing differentiation of mensenchymal or progenitor stem cells involved in the process of wound healing as defined herein, promoting wound healing, skin repair and cellular migration, PEP6 is a peptide of general formula AA²⁶-AA²⁷-AA²⁸-AA²⁹-PEP4; wherein PEP4 is selected from the group consisting of QHN, EHS, EEH and EDH; wherein AA²⁶ is absent or selected from the group consisting of AA^{III} amino acids, preferably is absent; wherein AA²⁷ and AA²⁸ are independently selected from the group consisting of AA^{III} and AA^{V} amino acids, preferably AA²⁷ is selected from the group consisting of F, L, R and T, preferably AA²⁸ is L or E; wherein AA²⁹ is absent or selected from the group consisting of AA^{II} amino acids, preferably is absent. In one particular example, PEP6 is selected from the group consisting of LEEHS (SEQ ID NO: 84217), FLQHN (SEQ ID NO: 84184), RLEEH (SEQ ID NO: 84279) and TLEDH (SEQ ID NO: 84307).

[0659] In certain embodiments useful for inducing differentiation of mensenchymal or progenitor stem cells involved in the process of wound healing as defined herein, promoting wound healing, skin repair and cellular migration, PEP7 is an amino acid or a peptide with between two and seven amino acids of general formula AA¹-AA²-AA³-AA⁴-AA⁵-AA⁶-AA⁷ (SEQ ID NO: 84948); wherein AA¹, AA², AA³, AA⁴, and AA⁵ are independently absent or AA^{I} as defined herein; wherein AA⁶ is absent or selected from the group consisting of S, T, C, E, Q, P and R, preferably is selected from the group consisting of E, Q and R; wherein AA⁷ is absent or is selected from the group consisting of S, T, C, E, Q, P and R, preferably is selected from the group consisting of S, C and P; and wherein at least one of AA¹, AA², AA³, AA⁴, AA⁵, AA⁶ or AA⁷ is not absent. In one particular example, PEP7 is selected from the group consisting of NDEGLEX (SEQ ID NO: 84426), SSVKXQP (SEQ ID NO: 84430) and RNVQXRP (SEQ ID NO: 84427).

[0660] In certain embodiments useful for inducing differentiation of mensenchymal or progenitor stem cells involved in the process of wound healing as defined herein, promoting wound healing, skin repair and cellular migration, PEP8 is an amino acid or a peptide with between two and six amino acids of general formula AA³³-AA³⁴-AA³⁵-AA³⁶-AA³⁷-AA³⁸ (SEQ ID NO: 84949); wherein AA³³ is absent or is selected from the group consisting of AA^{I} amino acids at the exception of AA^{VI} amino acids, in particular is selected from the group consisting of K, Q and L; AA³⁴ is absent or is selected from the group consisting of AA^{III} and AA^{IV} amino acids, in particular is absent, E or A; wherein AA³⁵ is absent or is selected from the group consisting of AA^{II} amino acids, preferably is S or C; wherein AA³⁶ is absent or is selected from the group consisting of AA^{III} and AA^{IV} amino acids, in particular is selected from the group consisting of E, A and K; wherein AA³⁷ is absent or is selected from the group consisting of AA^{II} amino acids, preferably is S or C; wherein AA³⁸ is absent or is selected from the group consisting of AA^{I}, in particular is selected from the group consisting of R, A and E; and wherein at least one of AA³³, AA³⁴, AA³⁵, AA³⁶, AA³⁷ or AA³⁸ is not absent. In one particular example, PEP8 is selected from the group consisting of KXEXR (SEQ ID NO: 84213), QXEXR (SEQ ID NO: 84276), LEXAXA (SEQ ID NO: 84400) and LAXKXE (SEQ ID NO: 84399).

[0661] In certain embodiments useful for inducing differentiation of mensenchymal or progenitor stem cells involved in the process of wound healing as defined herein, promoting wound healing, skin repair and cellular migration, PEP9 is a peptide of general formula AA¹-AA²-AA³-AA⁴-AA⁵-AA⁶-AA⁷-PEP5; wherein PEP5 is a peptide of formula PEP3-AA¹¹-AA¹²; wherein PEP3 is selected from the group consisting of VPT, SRV and TQV; wherein AA¹¹ is selected from the group consisting of E, K, Q, R, A, D, G and H, in particular is E, G, H and Q; wherein AA¹² is selected from the group consisting of L, M, T, E, Q and H, in particular is selected from the group consisting of E, Q, H and L; wherein AA¹, AA², AA³, AA⁴, and AA⁵ are independently absent or AA^{I} as defined herein; wherein AA⁶ is absent or selected from the group consisting of S, T, C, E, Q, P and R, preferably is selected from the group consisting of E, Q and R; wherein AA⁷ is selected from the group consisting of S, T, C, E, Q, P and R, preferably is selected from the group consisting of S, C and P. In one particular example, PEP9 is selected from the group consisting of NDEGLEXVPTEE (SEQ ID NO: 84798), NDEGLEXVPTGQ (SEQ ID NO: 84799), SSVKXQPSRVHH (SEQ ID NO: 84834) and RNVQXRPTQVQL (SEQ ID NO: 84806).

[0662] In certain embodiments useful for inducing differentiation of mensenchymal or progenitor stem cells involved in the process of wound healing as defined herein, promoting wound healing, skin repair and cellular migration, PEP10 is a peptide of general formula PEP6-AA³³-AA³⁴-AA³⁵-AA³⁶-AA³⁷-AA³⁸; wherein PEP6 is a peptide of formula AA²⁶-AA²⁷-AA²⁸-AA²⁹-PEP4; wherein PEP4 is selected from the group consisting of QHN, EHS, EEH and EDH; wherein AA²⁶ is absent or selected from the group consisting of AA^{III} amino acids, preferably is absent; wherein AA²⁷ and AA²⁸ are independently selected from the group consisting of AA^{III} and AA^{V} amino acids, preferably AA²⁷ is selected from the group consisting of F, L, R and T, preferably AA²⁸ is L or E; wherein AA²⁹ is absent or selected from the group consisting of AA^{II} amino acids, preferably is absent; wherein AA³³ is absent or is selected from the group consisting of AA^{I} amino acids at the exception of AA^{VI} amino acids, in particular is selected from the group consisting of K, Q and L; AA³⁴ is absent or is selected from the group consisting of AA^{III} and AA^{IV} amino acids, in particular is absent, E or A; wherein AA³⁵ is absent or is selected from the group consisting of AA^{II} amino acids, preferably is S or C; wherein AA³⁶ is absent or is selected from the group consisting of AA^{III} and AA^{IV} amino acids, in particular is selected from the group consisting of E, A and K; wherein AA³⁷ is absent or is selected from the group consisting of AA^{II} amino acids, preferably is S or C; wherein AA³⁸ is absent or is selected from the group consisting of AA^{I}, in particular is selected from the group consisting of R, A and E. In one particular example, PEP10 is selected from the group consisting of FLQHNKXEXR (SEQ ID NO: 84536), LEEHSQXEXR (SEQ ID NO: 84577), RLEEHLEXAXA (SEQ ID NO: 84646) and TLEDHLAXKXE (SEQ ID NO: 84659).

[0663] In certain embodiments useful for inducing differentiation of mensenchymal or progenitor stem cells involved in the process of wound healing as defined herein, promoting wound healing, skin repair and cellular migration, PEP12 is a peptide of general formula PEP1-AA¹⁷-PEP11; wherein AA¹⁷ is selected from the group consisting of G, A, V, L, I, P, F, M, W, T and S (in particular is selected from the group consisting of M, I, L, V and T); wherein PEP1 is selected from the group consisting of SNIT (SEQ ID NO: 84118), RPVQ (SEQ ID NO: 84114) and RSVK (SEQ ID NO: 84115).

[0664] In certain embodiments useful for inducing differentiation of mensenchymal or progenitor stem cells involved in the process of wound healing as defined herein, promoting wound healing, skin repair and cellular migration, PEP11 is a peptide with 3 amino acids of general formula AA¹⁸-AA¹⁹-AA²⁰; wherein AA¹⁸ is selected from the group consisting of L, V, Q, A and R, in particular is selected from the group consisting of Q, A and R; wherein AA¹⁹ is selected from the group consisting of F, W, H, Y, I and K, in particular is I or K; wherein AA²⁰ is selected from the group consisting of L, F, Y, K, I, V and M, in particular is selected from the group consisting of M, V and I. In one particular example, PEP11 is selected from the group consisting of QIM, AKV and RKI.

[0665] The definitions of “PEP” pairs, quadruplets, hexaplets and heptuplet e.g. PEP1:PEP2, PEP12:PEP2, or PEP7:PEP5:PEP12:LINKER:PEP2:PEP6:PEP8, useful for inducing differentiation of mensenchymal or progenitor stem cells involved in the process of wound healing as defined herein, promoting wound healing, skin repair and cellular migration, are as already defined herein to the extent that PEP1 to PEP12 are particularly useful for these applications. For instances:

[0666] In other embodiments also useful for inducing differentiation of mensenchymal or progenitor stem cells from the vascular cell lineage, enhancing of endothelization, vascularization/angiogenesis, protecting from heart diseases, the pair PEP1:PEP2 is selected from the group consisting of SNIT (SEQ ID NO: 84118):IGEMS (SEQ ID NO: 84209), SNIT (SEQ ID NO: 84118):LGEMS (SEQ ID NO: 84228), RSVK (SEQ ID NO: 84115):KEVQV (SEQ ID NO: 84210) and RPVQ (SEQ ID NO: 84114):KKATV (SEQ ID NO: 84212).

[0667] In other embodiments also useful for inducing differentiation of mensenchymal or progenitor stem cells from the vascular cell lineage, enhancing of endothelization, vascularization/angiogenesis, protecting from heart diseases, the pair PEP12:PEP2 is selected from the group consisting of SNIT-AA¹⁷-QIM (SEQ ID NO: 84883):IGEMS (SEQ ID NO: 84209), SNIT-AA¹⁷-QIM (SEQ ID NO: 84883):LGEMS (SEQ ID NO: 84228), RSVK-AA¹⁷-AKV (SEQ ID NO: 84880):KEVQV (SEQ ID NO: 84210) and RPVQ-AA¹⁷-RKI (SEQ ID NO: 84879):KKATV (SEQ ID NO: 84212); wherein AA¹⁷ is selected from the group consisting of G, A, V, L, I, P, F, M, W, T and S (in particular is selected from the group consisting of M, V and T).

[0668] In certain embodiments useful for inducing differentiation of mensenchymal or progenitor stem cells involved in the process of wound healing as defined herein, promoting wound healing, skin repair and cellular migration, PEP3 is selected from the group consisting of VPT, SRV and TQV; PEP4 is selected from the group consisting of QHN, EHS, EEH and EDH; and wherein the pair PEP3:PEP4 is selected from the group consisting of VPT:QHN, VPT:EHS, SRV:EEH and TQV:EDH.

[0669] In certain embodiments useful for inducing differentiation of mensenchymal or progenitor stem cells involved in the process of wound healing as defined herein, promoting wound healing, skin repair and cellular migration, PEP5 is selected from the group consisting of VPTGQ (SEQ ID NO: 84379), VPTEE (SEQ ID NO: 84377), SRVHH (SEQ ID NO: 84297) and TQVQL (SEQ ID NO: 84340); PEP6 is selected from the group consisting of LEEHS (SEQ ID NO: 84217), FLQHN (SEQ ID NO: 84184), RLEEH (SEQ ID NO: 84279) and TLEDH (SEQ ID NO: 84307); and wherein the pair PEP5:PEP6 is selected from the group consisting of VPTGQ (SEQ ID NO: 84379):LEEHS (SEQ ID NO: 84217), VPTEE (SEQ ID NO: 84377):FLQHN (SEQ ID NO: 84184), SRVHH (SEQ ID NO: 84297):RLEEH (SEQ ID NO: 84279) and TQVQL (SEQ ID NO: 84340):TLEDH (SEQ ID NO: 84307).

[0670] In certain embodiments useful for inducing differentiation of mensenchymal or progenitor stem cells involved in the process of wound healing as defined herein, promoting wound healing, skin repair and cellular migration, PEP7 is selected from the group consisting of NDEGLEX (SEQ ID NO: 84426), SSVKXQP (SEQ ID NO: 84430) and RNVQXRP (SEQ ID NO: 84427); wherein PEP8 is selected from the group consisting of KXEXR (SEQ ID NO: 84213), QXEXR (SEQ ID NO: 84276), LEXAXA (SEQ ID NO: 84400) and LAXKXE (SEQ ID NO: 84399); and wherein the pair PEP7:PEP8 is selected from the group consisting of NDEGLEX (SEQ ID NO: 84426):KXEXR (SEQ ID NO: 84213), NDEGLEX (SEQ ID NO: 84426):QXEXR (SEQ ID NO: 84276), SSVKXQP (SEQ ID NO: 84430):LEXAXA (SEQ ID NO: 84400) and RNVQXRP (SEQ ID NO: 84427):LAXKXE (SEQ ID NO: 84399).

[0671] In certain embodiments useful for inducing differentiation of mensenchymal or progenitor stem cells involved in the process of wound healing as defined herein, promoting wound healing, skin repair and cellular migration, PEP9 is selected from the group consisting of NDEGLEXVPTEE (SEQ ID NO: 84798), NDEGLEXVPTGQ (SEQ ID NO: 84799), SSVKXQPSRVHH (SEQ ID NO: 84834) and RNVQXRPTQVQL (SEQ ID NO: 84806); PEP10 is selected from the group consisting of FLQHNKXEXR (SEQ ID NO: 84536), LEEHSQXEXR (SEQ ID NO: 84577), RLEEHLEXAXA (SEQ ID NO: 84646) and TLEDHLAXKXE (SEQ ID NO: 84659); and wherein the pair PEP9:PEP10 is selected from the group consisting of NDEGLEXVPTEE (SEQ ID NO: 84798):FLQHNKXEXR (SEQ ID NO: 84536), NDEGLEXVPTGQ (SEQ ID NO: 84799):LEEHSQXEXR (SEQ ID NO: 84577), SSVKXQPSRVHH (SEQ ID NO: 84834):RLEEHLEXAXA (SEQ ID NO: 84646) and RNVQXRPTQVQL (SEQ ID NO: 84806):TLEDHLAXKXE (SEQ ID NO: 84659).

[0672] In certain embodiments useful for inducing differentiation of mensenchymal or progenitor stem cells involved in the process of wound healing as defined herein, promoting wound healing, skin repair and cellular migration, PEP5 is selected from the group consisting of VPTGQ (SEQ ID NO: 84379), VPTEE (SEQ ID NO: 84377), SRVHH (SEQ ID NO: 84297) and TQVQL (SEQ ID NO: 84340); PEP6 is selected from the group consisting of LEEHS (SEQ ID NO: 84217), FLQHN (SEQ ID NO: 84184), RLEEH (SEQ ID NO: 84279) and TLEDH (SEQ ID NO: 84307); and wherein the pair PEP5:PEP6 is selected from the group consisting of VPTGQ (SEQ ID NO: 84379):LEEHS (SEQ ID NO: 84217), VPTEE (SEQ ID NO: 84377):FLQHN (SEQ ID NO: 84184), SRVHH (SEQ ID NO: 84297):RLEEH (SEQ ID NO: 84279) and TQVQL (SEQ ID NO: 84340):TLEDH (SEQ ID NO: 84307); wherein the pair PEP5:PEP6 is not VPTEE (SEQ ID NO: 84377):FLQHN (SEQ ID NO: 84184) when PEP1 is SNIT (SEQ ID NO: 84118) and PEP2 is IGEMS (SEQ ID NO: 84209); wherein the pair PEP5:PEP6 is not VPTGQ (SEQ ID NO: 84379):LEEHS (SEQ ID NO: 84217) when PEP1 is SNIT (SEQ ID NO: 84118) and PEP2 is LGEMS (SEQ ID NO: 84228); wherein the pair PEP5:PEP6 is not SRVHH (SEQ ID NO: 84297):RLEEH (SEQ ID NO: 84279) when PEP1 is RSVK (SEQ ID NO: 84115) and PEP2 is KEVQV (SEQ ID NO: 84210); and wherein the pair PEP5:PEP6 is not TQVQL (SEQ ID NO: 84340):TLEDH (SEQ ID NO: 84307) when PEP1 is RPVQ (SEQ ID NO: 84114) and PEP2 is KKATV (SEQ ID NO: 84212).

[0673] In certain embodiments useful for inducing differentiation of mensenchymal or progenitor stem cells involved in the process of wound healing as defined herein, promoting wound healing, skin repair and cellular migration, PEP9 is selected from the group consisting of NDEGLEXVPTEE (SEQ ID NO: 84798), NDEGLEXVPTGQ (SEQ ID NO: 84799), SSVKXQPSRVHH (SEQ ID NO: 84834) and RNVQXRPTQVQL (SEQ ID NO: 84806); PEP10 is selected from the group consisting of FLQHNKXEXR (SEQ ID NO: 84536), LEEHSQXEXR (SEQ ID NO: 84577), RLEEHLEXAXA (SEQ ID NO: 84646) and TLEDHLAXKXE (SEQ ID NO: 84659); and wherein the pair PEP9:PEP10 is selected from the group consisting of NDEGLEXVPTEE (SEQ ID NO: 84798):FLQHNKXEXR (SEQ ID NO: 84536), NDEGLEXVPTGQ (SEQ ID NO: 84799):LEEHSQXEXR (SEQ ID NO: 84577), SSVKXQPSRVHH (SEQ ID NO: 84834):RLEEHLEXAXA (SEQ ID NO: 84646) and RNVQXRPTQVQL (SEQ ID NO: 84806):TLEDHLAXKXE (SEQ ID NO: 84659); wherein the pair PEP9:PEP10 is not NDEGLEXVPTEE (SEQ ID NO: 84798):FLQHNKXEXR (SEQ ID NO: 84536) when PEP1 is SNIT (SEQ ID NO: 84118) and PEP2 is IGEMS (SEQ ID NO: 84209); wherein the pair PEP9:PEP10 is not NDEGLEXVPTGQ (SEQ ID NO: 84799):LEEHSQXEXR (SEQ ID NO: 84577) when PEP1 is SNIT (SEQ ID NO: 84118) and PEP2 is LGEMS (SEQ ID NO: 84228); wherein the pair PEP9:PEP10 is not SSVKXQPSRVHH (SEQ ID NO: 84834):RLEEHLEXAXA (SEQ ID NO: 84646) when PEP1 is RSVK (SEQ ID NO: 84115) and PEP2 is KEVQV (SEQ ID NO: 84210); and wherein the pair PEP9:PEP10 is not RNVQXRPTQVQL (SEQ ID NO: 84806):TLEDHLAXKXE (SEQ ID NO: 84659) when PEP1 is RPVQ (SEQ ID NO: 84114) and PEP2 is KKATV (SEQ ID NO: 84212).

[0674] In certain embodiments useful for inducing differentiation of mensenchymal or progenitor stem cells involved in the process of wound healing as defined herein, promoting wound healing, skin repair and cellular migration, PEP1 is selected from the group consisting of SNIT (SEQ ID NO: 84118), RPVQ (SEQ ID NO: 84114) and RSVK (SEQ ID NO: 84115); PEP11 is selected from the group consisting of QIM, AKV and RKI; and the pair PEP1:PEP11 is selected from the group consisting of SNIT (SEQ ID NO: 84118):QIM, RSVK (SEQ ID NO: 84115):KEVQV (SEQ ID NO: 84210) and RPVQ (SEQ ID NO: 84114):KKATV (SEQ ID NO: 84212).

[0675] In one aspect, the present disclosure provides a GFR-binding compound, wherein said GFR-binding compound is a peptide, a variant or analog thereof, or a peptidomimetic as defined herein, with between 20 and 60 (in particular between 20 and 50, and more particularly, between 20 and 45) amino acids, comprising a peptide with four amino acids (PEP1) or a peptide with eight amino acids (PEP12), a peptide with five amino acids (PEP2), and optionally a pair of peptides selected form the group consisting of PEP3:PEP4, PEP3:PEP6, PEP3:PEP10, PEP5:PEP4, PEP9:PEP4, PEP5:PEP6, PEP5:PEP10, PEP9:PEP6 and PEP9:PEP10; wherein said GFR-binding compound does not comprise the pair of peptides VPTEE (SEQ ID NO: 84377):FLQHN (SEQ ID NO: 84184) when PEP1 is SNIT (SEQ ID NO: 84118) and PEP2 is IGEMS (SEQ ID NO: 84209); wherein said GFR-binding compound does not comprise the pair of peptides VPTGQ (SEQ ID NO: 84379):LEEHS (SEQ ID NO: 84217) when PEP1 is SNIT (SEQ ID NO: 84118) and PEP2 is LGEMS (SEQ ID NO: 84228); wherein said GFR-binding compound does not comprise the pair of peptides SRVHH (SEQ ID NO: 84297):RLEEH (SEQ ID NO: 84279) when PEP1 is RSVK (SEQ ID NO: 84115) and PEP2 is KEVQV (SEQ ID NO: 84210); and wherein said GFR-binding compound does not comprise the pair of peptides TQVQL (SEQ ID NO: 84340):TLEDH (SEQ ID NO: 84307) when PEP1 is RPVQ (SEQ ID NO: 84114) and PEP2 is KKATV (SEQ ID NO: 84212); and wherein the RMSD is 2.45 Å or less.

[0676] In one aspect, the present disclosure provides a GFR-binding compound, wherein said GFR-binding compound is a peptide, a variant or analog thereof, or a peptidomimetic as defined herein, with between 20 and 60 (in particular between 20 and 50, and more particularly, between 20 and 45) amino acids, comprising a peptide with four amino acids (PEP1) or a peptide with eight amino acids (PEP12), a peptide with five amino acids (PEP2), and optionally a pair of peptides selected form the group consisting of PEP3:PEP4, PEP3:PEP6, PEP3:PEP10, PEP5:PEP4, PEP9:PEP4, PEP5:PEP6, PEP5:PEP10, PEP9:PEP6 and PEP9:PEP10; wherein said GFR-binding compound does not comprise the pair of peptides NDEGLEXVPTEE (SEQ ID NO: 84798):FLQHNKXEXR (SEQ ID NO: 84536) when PEP1 is SNIT (SEQ ID NO: 84118) and PEP2 is IGEMS (SEQ ID NO: 84209); wherein said GFR-binding compound does not comprise the pair of peptides NDEGLEXVPTGQ (SEQ ID NO: 84799):LEEHSQXEXR (SEQ ID NO: 84577) when PEP1 is SNIT (SEQ ID NO: 84118) and PEP2 is LGEMS (SEQ ID NO: 84228); wherein said GFR-binding compound does not comprise the pair of peptides SSVKXQPSRVHH (SEQ ID NO: 84834):RLEEHLEXAXA (SEQ ID NO: 84646) when PEP1 is RSVK (SEQ ID NO: 84115) and PEP2 is KEVQV (SEQ ID NO: 84210); and wherein said GFR-binding compound does not comprise the pair of peptides RNVQXRPTQVQL (SEQ ID NO: 84806):TLEDHLAXKXE (SEQ ID NO: 84659) when PEP1 is RPVQ (SEQ ID NO: 84114) and PEP2 is KKATV (SEQ ID NO: 84212); and wherein the RMSD is 2.45 Å or less.

[0677] In certain embodiments useful for inducing differentiation of mensenchymal or progenitor stem cells involved in the process of wound healing as defined herein, promoting wound healing, skin repair and cellular migration, said GFR-binding compound is a synthetic molecule as defined herein in the definition section.

[0678] In certain embodiments useful for inducing differentiation of mensenchymal or progenitor stem cells involved in the process of wound healing as defined herein, promoting wound healing, skin repair and cellular migration, said GFR-binding compound is a synthetic peptide, or a variant or analog thereof, or a peptidomimetic.

### Skin Regeneration and Anti-Aging

[0679] Certain embodiments of the invention are particularly useful for inducing differentiation of mensenchymal or progenitor stem cells from the fibroblast lineage, inducing skin tissue regeneration and tubular formation, preventing, attenuating, masking or removing wrinkles, firming the skin, preventing, decreasing or suppressing skin pigmentation, and protecting patients from skin tissue degeneration-related diseases, disorders, conditions or pathologies.

[0680] In certain embodiments useful for inducing differentiation of mensenchymal or progenitor stem cells from the fibroblast lineage, inducing skin tissue regeneration and tubular formation, preventing, attenuating, masking or removing wrinkles, firming the skin, preventing, decreasing or suppressing skin pigmentation, and protecting patients from skin tissue degeneration-related diseases, disorders, conditions or pathologies, PEP1 is selected from the group consisting of EPLP (SEQ ID NO: 84110), EPLT (SEQ ID NO: 84111), SNIT (SEQ ID NO: 84118), RSVK (SEQ ID NO: 84115) and RPVQ (SEQ ID NO: 84114).

[0681] In certain embodiments useful for inducing differentiation of mensenchymal or progenitor stem cells from the fibroblast lineage, inducing skin tissue regeneration and tubular formation, preventing, attenuating, masking or removing wrinkles, firming the skin, preventing, decreasing or suppressing skin pigmentation, and protecting patients from skin tissue degeneration-related diseases, disorders, conditions or pathologies, PEP2 is selected from the group consisting of EQLSN (SEQ ID NO: 84178), IGEMS (SEQ ID NO: 84209), KEVQV (SEQ ID NO: 84210) and KKATV (SEQ ID NO: 84212).

[0682] In certain embodiments useful for inducing differentiation of mensenchymal or progenitor stem cells from the fibroblast lineage, inducing skin tissue regeneration and tubular formation, preventing, attenuating, masking or removing wrinkles, firming the skin, preventing, decreasing or suppressing skin pigmentation, and protecting patients from skin tissue degeneration-related diseases, disorders, conditions or pathologies, PEP3 is selected from the group consisting of VPT, APT, VPQ, VSQ, SRV and TQV.

[0683] In certain embodiments useful for inducing differentiation of mensenchymal or progenitor stem cells from the fibroblast lineage, inducing skin tissue regeneration and tubular formation, preventing, attenuating, masking or removing wrinkles, firming the skin, preventing, decreasing or suppressing skin pigmentation, and protecting patients from skin tissue degeneration-related diseases, disorders, conditions or pathologies, PEP4 is selected from the group consisting of VVE, VVR, VRS, VKS, VVK, QHN, EEH and EDH.

[0684] In certain embodiments useful for inducing differentiation of mensenchymal or progenitor stem cells from the fibroblast lineage, inducing skin tissue regeneration and tubular formation, preventing, attenuating, masking or removing wrinkles, firming the skin, preventing, decreasing or suppressing skin pigmentation, and protecting patients from skin tissue degeneration-related diseases, disorders, conditions or pathologies, PEP5 is a peptide of general formula PEP3-AA¹¹-AA¹²; wherein PEP3 is selected from the group consisting of VPT, APT, VPQ, VSQ, SRV and TQV; wherein AA¹¹ is selected from the group consisting of E, K, Q, R, A, D, G and H, in particular is selected from the group consisting of E, K, Q, A, D and H; wherein AA¹² is selected from the group consisting of L, M, T, E, Q and H, in particular is selected from the group consisting of L, E and H. In one particular example, PEP5 is selected from the group consisting of VPTEL (SEQ ID NO: 84378), APTKL (SEQ ID NO: 84131), APTQL (SEQ ID NO: 84134), VPQAL (SEQ ID NO: 84364), VSQDL (SEQ ID NO: 84387), VPQDL (SEQ ID NO: 84365), VPTEE (SEQ ID NO: 84377), SRVHH (SEQ ID NO: 84297) and TQVQL (SEQ ID NO: 84340).

[0685] In certain embodiments useful for inducing differentiation of mensenchymal or progenitor stem cells from the fibroblast lineage, inducing skin tissue regeneration and tubular formation, preventing, attenuating, masking or removing wrinkles, firming the skin, preventing, decreasing or suppressing skin pigmentation, and protecting patients from skin tissue degeneration-related diseases, disorders, conditions or pathologies, PEP6 is a peptide of general formula AA²⁶-AA²⁷-AA²⁸-AA²⁹-PEP4; wherein PEP4 is selected from the group consisting of VVE, VVR, VRS, VKS, VVK, QHN, EEH and EDH; wherein AA²⁶ is absent or selected from the group consisting of AA^{III} amino acids, preferably is absent; wherein AA²⁷ and AA²⁸ are independently selected from the group consisting of AA^{III} and AA^{V} amino acids, preferably AA²⁷ is selected from the group consisting of D, N, E, M, F, T and R, preferably AA²⁸ is selected from the group consisting of M, I, V and L; wherein AA²⁹ is absent or selected from the group consisting of AA^{II} amino acids, preferably is absent. In one particular example, PEP6 is selected from the group consisting of DMVVE (SEQ ID NO: 84161), EMVVE (SEQ ID NO: 84175), NMVVR (SEQ ID NO: 84275), MIVRS (SEQ ID NO: 84243), MIVKS (SEQ ID NO: 84242), NMVVK (SEQ ID NO: 84274), FLQHN (SEQ ID NO: 84184), RLEEH (SEQ ID NO: 84279) and TLEDH (SEQ ID NO: 84307).

[0686] In certain embodiments useful for inducing differentiation of mensenchymal or progenitor stem cells from the fibroblast lineage, inducing skin tissue regeneration and tubular formation, preventing, attenuating, masking or removing wrinkles, firming the skin, preventing, decreasing or suppressing skin pigmentation, and protecting patients from skin tissue degeneration-related diseases, disorders, conditions or pathologies, PEP7 is an amino acid or a peptide with between two and seven amino acids of general formula AA¹-AA²-AA³-AA⁴-AA⁵-AA⁶-AA⁷ (SEQ ID NO: 84948); wherein AA¹, AA², AA³, AA⁴, and AA⁵ are independently absent or AA^{I} as defined herein; wherein AA⁶ is absent or selected from the group consisting of S, T, C, E, Q, P and R, preferably is selected from the group consisting of C, S, T, E, R and Q; wherein AA⁷ is absent or is selected from the group consisting of S, T, C, E, Q, P and R, preferably is selected from the group consisting of S, C and P; and wherein at least one of AA¹, AA², AA³, AA⁴, AA⁵, AA⁶ or AA⁷ is not absent. In one particular example, PEP7 is selected from the group consisting of KIPKAXX (SEQ ID NO: 84424), SIPKAXX (SEQ ID NO: 84429), HVTKPTX (SEQ ID NO: 84422), YVPKPXX (SEQ ID NO: 84433), TVPKPXX (SEQ ID NO: 84432), ASAAPXX (SEQ ID NO: 84402), ASASPXX (SEQ ID NO: 84403), NDEGLEX (SEQ ID NO: 84426), SSVKXQP (SEQ ID NO: 84430) and RNVQXRP (SEQ ID NO: 84427).

[0687] In certain embodiments useful for inducing differentiation of mensenchymal or progenitor stem cells from the fibroblast lineage, inducing skin tissue regeneration and tubular formation, preventing, attenuating, masking or removing wrinkles, firming the skin, preventing, decreasing or suppressing skin pigmentation, and protecting patients from skin tissue degeneration-related diseases, disorders, conditions or pathologies, PEP8 is an amino acid or a peptide with between two and six amino acids of general formula AA³³-AA³⁴-AA³⁵-AA³⁶-AA³⁷-AA³⁸ (SEQ ID NO: 84949); wherein AA³³ is absent or is selected from the group consisting of AA^{I} amino acids at the exception of AA^{VI} amino acids, in particular is absent or is selected from the group consisting of G, S, A, K and L; AA³⁴ is absent or is selected from the group consisting of AA^{III} and AA^{IV} amino acids, in particular is absent, A or E; wherein AA³⁵ is absent or is selected from the group consisting of AA^{II} amino acids, preferably is S or C; wherein AA³⁶ is absent or is selected from the group consisting of AA^{III} and AA^{IV} amino acids, in particular is selected from the group consisting of G, A, K and E; wherein AA³⁷ is absent or is selected from the group consisting of AA^{II} amino acids, preferably is S or C; wherein AA³⁸ is absent or is selected from the group consisting of AA^{I}, in particular is selected from the group consisting of R, H, S, E and A; and wherein at least one of AA³³, AA³⁴, AA³⁵, AA³⁶, AA³⁷ or AA³⁸ is not absent. In one particular example, PEP8 is selected from the group consisting of GXGXR (SEQ ID NO: 84208), SXGXH (SEQ ID NO: 84304), AXGXH (SEQ ID NO: 84147), XKXS (SEQ ID NO: 84124), KXEXR (SEQ ID NO: 84213), LEXAXA (SEQ ID NO: 84400) and LAXKXE (SEQ ID NO: 84399).

[0688] In certain embodiments useful for inducing differentiation of mensenchymal or progenitor stem cells from the fibroblast lineage, inducing skin tissue regeneration and tubular formation, preventing, attenuating, masking or removing wrinkles, firming the skin, preventing, decreasing or suppressing skin pigmentation, and protecting patients from skin tissue degeneration-related diseases, disorders, conditions or pathologies, PEP9 is a peptide of general formula AA¹-AA²-AA³-AA⁴-AA⁵-AA⁶-AA⁷-PEP5; wherein PEP5 is a peptide of formula PEP3-AA¹¹-AA¹²; wherein PEP3 is selected from the group consisting of VPT, APT, VPQ, VSQ, SRV and TQV; wherein AA¹¹ is selected from the group consisting of E, K, Q, R, A, D, G and H, in particular is selected from the group consisting of E, K, Q, A, D and H; wherein AA¹² is selected from the group consisting of L, M, T, E, Q and H, in particular is selected from the group consisting of L, E and H; wherein AA¹, AA², AA³, AA⁴, and AA⁵ are independently absent or AA^{I} as defined herein; wherein AA⁶ is absent or selected from the group consisting of S, T, C, E, Q, P and R, preferably is selected from the group consisting of C, S, T, E, R and Q; wherein AA⁷ is selected from the group consisting of S, T, C, E, Q, P and R, preferably is selected from the group consisting of S, C and P. In one particular example, PEP9 is selected from the group consisting of KIPKAXXVPTEL (SEQ ID NO: 84770), SIPKAXXVPTEL (SEQ ID NO: 84830), HVTKPTXAPTKL (SEQ ID NO: 84742), YVPKPXXAPTKL (SEQ ID NO: 84864), TVPKPXXAPTQL (SEQ ID NO: 84854), ASAAPXXVPQAL (SEQ ID NO: 84689), ASASPXXVSQDL (SEQ ID NO: 84701), ASASPXXVPQDL (SEQ ID NO: 84699), NDEGLEXVPTEE (SEQ ID NO: 84798), SSVKXQPSRVHH (SEQ ID NO: 84834) and RNVQXRPTQVQL (SEQ ID NO: 84806).

[0689] In certain embodiments useful for inducing differentiation of mensenchymal or progenitor stem cells from the fibroblast lineage, inducing skin tissue regeneration and tubular formation, preventing, attenuating, masking or removing wrinkles, firming the skin, preventing, decreasing or suppressing skin pigmentation, and protecting patients from skin tissue degeneration-related diseases, disorders, conditions or pathologies, PEP10 is a peptide of general formula PEP6-AA³³-AA³⁴-AA³⁵-AA³⁶-AA³⁷-AA³⁸; wherein PEP6 is a peptide of formula AA²⁶-AA²⁷-AA²⁸-AA²⁹-PEP4; wherein PEP4 is selected from the group consisting of VVE, VVR, VRS, VKS, VVK, QHN, EEH and EDH; wherein AA²⁶ is absent or selected from the group consisting of AA^{III} amino acids, preferably is absent; wherein AA²⁷ and AA²⁸ are independently selected from the group consisting of AA^{III} and AA^{V} amino acids, preferably AA²⁷ is selected from the group consisting of D, N, E, M, F, T and R, preferably AA²⁸ is selected from the group consisting of M, I, V and L; wherein AA²⁹ is absent or selected from the group consisting of AA^{II} amino acids, preferably is absent; wherein AA³³ is absent or is selected from the group consisting of AA^{I} amino acids at the exception of AA^{VI} amino acids, in particular is absent or is selected from the group consisting of G, S, A, K and L; AA³⁴ is absent or is selected from the group consisting of AA^{III} and AA^{IV} amino acids, in particular is absent, A or E; wherein AA³⁵ is absent or is selected from the group consisting of AA^{II} amino acids, preferably is S or C; wherein AA³⁶ is absent or is selected from the group consisting of AA^{III} and AA^{IV} amino acids, in particular is selected from the group consisting of G, A, K and E; wherein AA³⁷ is absent or is selected from the group consisting of AA^{II} amino acids, preferably is S or C; wherein AA³⁸ is absent or is selected from the group consisting of AA^{I}, in particular is selected from the group consisting of R, H, S, E and A. In one particular example, PEP10 is selected from the group consisting of DMVVEGXGXR (SEQ ID NO: 84510), EMVVEGXGXR (SEQ ID NO: 84529), NMVVRSXGXH (SEQ ID NO: 84629), NMVVRAXGXH (SEQ ID NO: 84627), MIVRSXKXS (SEQ ID NO: 84453), MIVKSXKXS (SEQ ID NO: 84451), MVVKSXKXS (SEQ ID NO: 84470), FLQHNKXEXR (SEQ ID NO: 84536), RLEEHLEXAXA (SEQ ID NO: 84646) and TLEDHLAXKXE (SEQ ID NO: 84659).

[0690] In certain embodiments useful for inducing differentiation of mensenchymal or progenitor stem cells from the fibroblast lineage, inducing skin tissue regeneration and tubular formation, preventing, attenuating, masking or removing wrinkles, firming the skin, preventing, decreasing or suppressing skin pigmentation, and protecting patients from skin tissue degeneration-related diseases, disorders, conditions or pathologies, PEP12 is a peptide of general formula PEP1-AA¹⁷-PEP11; wherein AA¹⁷ is selected from the group consisting of G, A, V, L, I, P, F, M, W, T and S (in particular is selected from the group consisting of M, I, L, V and T); wherein PEP1 is selected from the group consisting of EPLP (SEQ ID NO: 84110), EPLT (SEQ ID NO: 84111), SNIT (SEQ ID NO: 84118), RSVK (SEQ ID NO: 84115) and RPVQ (SEQ ID NO: 84114).

[0691] In certain embodiments useful for inducing differentiation of mensenchymal or progenitor stem cells from the fibroblast lineage, inducing skin tissue regeneration and tubular formation, preventing, attenuating, masking or removing wrinkles, firming the skin, preventing, decreasing or suppressing skin pigmentation, and protecting patients from skin tissue degeneration-related diseases, disorders, conditions or pathologies, PEP11 is a peptide with 3 amino acids of general formula AA¹⁸-AA¹⁹-AA²⁰; wherein AA¹⁸ is selected from the group consisting of L, V, Q, A and R; wherein AA¹⁹ is selected from the group consisting of F, W, H, Y, I and K, in particular is selected from the group consisting of Y, I and K; wherein AA²⁰ is selected from the group consisting of L, F, Y, K, I, V and M, in particular is selected from the group consisting of Y, M, V and I. In one particular example, PEP11 is selected from the group consisting of VYY, LYY, QIM, AKV and RKI.

[0692] The definitions of “PEP” pairs, quadruplets, hexaplets and heptuplet e.g. PEP1:PEP2, PEP12:PEP2, or PEP7:PEP5:PEP12:LINKER:PEP2:PEP6:PEP8, useful for inducing differentiation of mensenchymal or progenitor stem cells from the fibroblast lineage, inducing skin tissue regeneration and tubular formation, preventing, attenuating, masking or removing wrinkles, firming the skin, preventing, decreasing or suppressing skin pigmentation, and protecting patients from skin tissue degeneration-related diseases, disorders, conditions or pathologies, are as already defined herein to the extent that PEP1 to PEP12 are particularly useful for these applications. For instances:

[0693] In certain embodiments useful for inducing differentiation of mensenchymal or progenitor stem cells from the fibroblast lineage, inducing skin tissue regeneration and tubular formation, preventing, attenuating, masking or removing wrinkles, firming the skin, preventing, decreasing or suppressing skin pigmentation, and protecting patients from skin tissue degeneration-related diseases, disorders, conditions or pathologies, the pair PEP1:PEP2 is selected from the group consisting of EPLP (SEQ ID NO: 84110):EQLSN (SEQ ID NO: 84178), EPLT (SEQ ID NO: 84111):EQLSN (SEQ ID NO: 84178) and SNIT (SEQ ID NO: 84118):IGEMS (SEQ ID NO: 84209).

[0694] In certain embodiments useful for inducing differentiation of mensenchymal or progenitor stem cells from the fibroblast lineage, inducing skin tissue regeneration and tubular formation, preventing, attenuating, masking or removing wrinkles, firming the skin, preventing, decreasing or suppressing skin pigmentation, and protecting patients from skin tissue degeneration-related diseases, disorders, conditions or pathologies, the pair PEP12:PEP2 is selected from the group consisting of EPLP-AA¹⁷-VYY (SEQ ID NO: 84875):EQLSN (SEQ ID NO: 84178), EPLT-AA¹⁷-LYY (SEQ ID NO: 84876):EQLSN (SEQ ID NO: 84178) and SNIT-AA¹⁷-QIM (SEQ ID NO: 84883):IGEMS (SEQ ID NO: 84209); wherein AA¹⁷ is selected from the group consisting of G, A, V, L, I, P, F, M, W, T and S (in particular is selected from the group consisting of M, I, V and T).

[0695] In certain embodiments useful for inducing differentiation of mensenchymal or progenitor stem cells from the fibroblast lineage, inducing skin tissue regeneration and tubular formation, preventing, attenuating, masking or removing wrinkles, firming the skin, preventing, decreasing or suppressing skin pigmentation, and protecting patients from skin tissue degeneration-related diseases, disorders, conditions or pathologies, PEP3 is selected from the group consisting of VPT, APT, VPQ, VSQ, SRV and TQV; PEP4 is selected from the group consisting of VVE, VVR, VRS, VKS, VVK, QHN, EEH and EDH; and wherein the pair PEP3:PEP4 is selected from the group consisting of VPT:VVE, APT:VVR, VPQ:VRS, VSQ:VKS, VPQ:VVK, VPT:QHN, SRV:EEH and TQV:EDH.

[0696] In certain embodiments useful for inducing differentiation of mensenchymal or progenitor stem cells from the fibroblast lineage, inducing skin tissue regeneration and tubular formation, preventing, attenuating, masking or removing wrinkles, firming the skin, preventing, decreasing or suppressing skin pigmentation, and protecting patients from skin tissue degeneration-related diseases, disorders, conditions or pathologies, PEP5 is selected from the group consisting of VPTEL (SEQ ID NO: 84378), APTKL (SEQ ID NO: 84131), APTQL (SEQ ID NO: 84134), VPQAL (SEQ ID NO: 84364), VSQDL (SEQ ID NO: 84387), VPQDL (SEQ ID NO: 84365), VPTEE (SEQ ID NO: 84377), SRVHH (SEQ ID NO: 84297) and TQVQL (SEQ ID NO: 84340); PEP6 is selected from the group consisting of DMVVE (SEQ ID NO: 84161), EMVVE (SEQ ID NO: 84175), NMVVR (SEQ ID NO: 84275), MIVRS (SEQ ID NO: 84243), MIVKS (SEQ ID NO: 84242), NMVVK (SEQ ID NO: 84274), FLQHN (SEQ ID NO: 84184), RLEEH (SEQ ID NO: 84279) and TLEDH (SEQ ID NO: 84307); and wherein the pair PEP5:PEP6 is selected from the group consisting of VPTEL (SEQ ID NO: 84378):DMVVE (SEQ ID NO: 84161), VPTEL (SEQ ID NO: 84378):EMVVE (SEQ ID NO: 84175), APTKL (SEQ ID NO: 84131):NMVVR (SEQ ID NO: 84275), APTQL (SEQ ID NO: 84134):NMVVR (SEQ ID NO: 84275), VPQAL (SEQ ID NO: 84364):MIVRS (SEQ ID NO: 84243), VSQDL (SEQ ID NO: 84387):MIVKS (SEQ ID NO: 84242), VPQDL (SEQ ID NO: 84365):NMVVK (SEQ ID NO: 84274), VPTEE (SEQ ID NO: 84377):FLQHN (SEQ ID NO: 84184), SRVHH (SEQ ID NO: 84297):RLEEH (SEQ ID NO: 84279) and TQVQL (SEQ ID NO: 84340):TLEDH (SEQ ID NO: 84307).

[0697] In certain embodiments useful for inducing differentiation of mensenchymal or progenitor stem cells from the fibroblast lineage, inducing skin tissue regeneration and tubular formation, preventing, attenuating, masking or removing wrinkles, firming the skin, preventing, decreasing or suppressing skin pigmentation, and protecting patients from skin tissue degeneration-related diseases, disorders, conditions or pathologies, PEP7 is selected from the group consisting of KIPKAXX (SEQ ID NO: 84424), SIPKAXX (SEQ ID NO: 84429), HVTKPTX (SEQ ID NO: 84422), YVPKPXX (SEQ ID NO: 84433), TVPKPXX (SEQ ID NO: 84432), ASAAPXX (SEQ ID NO: 84402), ASASPXX (SEQ ID NO: 84403), NDEGLEX (SEQ ID NO: 84426), SSVKXQP (SEQ ID NO: 84430) and RNVQXRP (SEQ ID NO: 84427); wherein PEP8 is selected from the group consisting of GXGXR (SEQ ID NO: 84208), SXGXH (SEQ ID NO: 84304), AXGXH (SEQ ID NO: 84147), XKXS (SEQ ID NO: 84124), KXEXR (SEQ ID NO: 84213), LEXAXA (SEQ ID NO: 84400) and LAXKXE (SEQ ID NO: 84399); and wherein the pair PEP7:PEP8 is selected from the group consisting of KIPKAXX (SEQ ID NO: 84424):GXGXR (SEQ ID NO: 84208), SIPKAXX (SEQ ID NO: 84429):GXGXR (SEQ ID NO: 84208), HVTKPTX (SEQ ID NO: 84422):SXGXH (SEQ ID NO: 84304), YVPKPXX (SEQ ID NO: 84433):SXGXH (SEQ ID NO: 84304), TVPKPXX (SEQ ID NO: 84432):AXGXH (SEQ ID NO: 84147), ASAAPXX (SEQ ID NO: 84402):XKXS (SEQ ID NO: 84124), ASASPXX (SEQ ID NO: 84403):XKXS (SEQ ID NO: 84124), NDEGLEX (SEQ ID NO: 84426):KXEXR (SEQ ID NO: 84213), SSVKXQP (SEQ ID NO: 84430):LEXAXA (SEQ ID NO: 84400) and RNVQXRP (SEQ ID NO: 84427):LAXKXE (SEQ ID NO: 84399).

[0698] In certain embodiments useful for inducing differentiation of mensenchymal or progenitor stem cells from the fibroblast lineage, inducing skin tissue regeneration and tubular formation, preventing, attenuating, masking or removing wrinkles, firming the skin, preventing, decreasing or suppressing skin pigmentation, and protecting patients from skin tissue degeneration-related diseases, disorders, conditions or pathologies, PEP9 is selected from the group consisting of KIPKAXXVPTEL (SEQ ID NO: 84770), SIPKAXXVPTEL (SEQ ID NO: 84830), HVTKPTXAPTKL (SEQ ID NO: 84742), YVPKPXXAPTKL (SEQ ID NO: 84864), TVPKPXXAPTQL (SEQ ID NO: 84854), ASAAPXXVPQAL (SEQ ID NO: 84689), ASASPXXVSQDL (SEQ ID NO: 84701), ASASPXXVPQDL (SEQ ID NO: 84699), NDEGLEXVPTEE (SEQ ID NO: 84798), SSVKXQPSRVHH (SEQ ID NO: 84834) and RNVQXRPTQVQL (SEQ ID NO: 84806); PEP10 is selected from the group consisting of DMVVEGXGXR (SEQ ID NO: 84510), EMVVEGXGXR (SEQ ID NO: 84529), NMVVRSXGXH (SEQ ID NO: 84629), NMVVRAXGXH (SEQ ID NO: 84627), MIVRSXKXS (SEQ ID NO: 84453), MIVKSXKXS (SEQ ID NO: 84451), MVVKSXKXS (SEQ ID NO: 84470), FLQHNKXEXR (SEQ ID NO: 84536), RLEEHLEXAXA (SEQ ID NO: 84646) and TLEDHLAXKXE (SEQ ID NO: 84659); and wherein the pair PEP9:PEP10 is selected from the group consisting of KIPKAXXVPTEL (SEQ ID NO: 84770):DMVVEGXGXR (SEQ ID NO: 84510), SIPKAXXVPTEL (SEQ ID NO: 84830):EMVVEGXGXR (SEQ ID NO: 84529), HVTKPTXAPTKL (SEQ ID NO: 84742):NMVVRSXGXH (SEQ ID NO: 84629), YVPKPXXAPTKL (SEQ ID NO: 84864):NMVVRSXGXH (SEQ ID NO: 84629), TVPKPXXAPTQL (SEQ ID NO: 84854):NMVVRAXGXH (SEQ ID NO: 84627), ASAAPXXVPQAL (SEQ ID NO: 84689):MIVRSXKXS (SEQ ID NO: 84453), ASASPXXVSQDL (SEQ ID NO: 84701):MIVKSXKXS (SEQ ID NO: 84451), ASASPXXVPQDL (SEQ ID NO: 84699):MVVKSXKXS (SEQ ID NO: 84470), NDEGLEXVPTEE (SEQ ID NO: 84798):FLQHNKXEXR (SEQ ID NO: 84536), SSVKXQPSRVHH (SEQ ID NO: 84834):RLEEHLEXAXA (SEQ ID NO: 84646) and RNVQXRPTQVQL (SEQ ID NO: 84806):TLEDHLAXKXE (SEQ ID NO: 84659).

[0699] In certain embodiments useful for inducing differentiation of mensenchymal or progenitor stem cells from the fibroblast lineage, inducing skin tissue regeneration and tubular formation, preventing, attenuating, masking or removing wrinkles, firming the skin, preventing, decreasing or suppressing skin pigmentation, and protecting patients from skin tissue degeneration-related diseases, disorders, conditions or pathologies, PEP5 is selected from the group consisting of VPTEL (SEQ ID NO: 84378), APTKL (SEQ ID NO: 84131), APTQL (SEQ ID NO: 84134), VPQAL (SEQ ID NO: 84364), VSQDL (SEQ ID NO: 84387), VPQDL (SEQ ID NO: 84365), VPTEE (SEQ ID NO: 84377), SRVHH (SEQ ID NO: 84297) and TQVQL (SEQ ID NO: 84340); PEP6 is selected from the group consisting of DMVVE (SEQ ID NO: 84161), EMVVE (SEQ ID NO: 84175), NMVVR (SEQ ID NO: 84275), MIVRS (SEQ ID NO: 84243), MIVKS (SEQ ID NO: 84242), NMVVK (SEQ ID NO: 84274), FLQHN (SEQ ID NO: 84184), RLEEH (SEQ ID NO: 84279) and TLEDH (SEQ ID NO: 84307); and wherein the pair PEP5:PEP6 is selected from the group consisting of VPTEL (SEQ ID NO: 84378):DMVVE (SEQ ID NO: 84161), VPTEL (SEQ ID NO: 84378):EMVVE (SEQ ID NO: 84175), APTKL (SEQ ID NO: 84131):NMVVR (SEQ ID NO: 84275), APTQL (SEQ ID NO: 84134):NMVVR (SEQ ID NO: 84275), VPQAL (SEQ ID NO: 84364):MIVRS (SEQ ID NO: 84243), VSQDL (SEQ ID NO: 84387):MIVKS (SEQ ID NO: 84242), VPQDL (SEQ ID NO: 84365):NMVVK (SEQ ID NO: 84274), VPTEE (SEQ ID NO: 84377):FLQHN (SEQ ID NO: 84184), SRVHH (SEQ ID NO: 84297):RLEEH (SEQ ID NO: 84279) and TQVQL (SEQ ID NO: 84340):TLEDH (SEQ ID NO: 84307); wherein the pair PEP5:PEP6 is not VPQAL (SEQ ID NO: 84364):MIVRS (SEQ ID NO: 84243) when PEP1 is EPLP (SEQ ID NO: 84110) and PEP2 is EQLSN (SEQ ID NO: 84178); wherein the pair PEP5:PEP6 is not VSQDL (SEQ ID NO: 84387):MIVKS (SEQ ID NO: 84242) when PEP1 is EPLT (SEQ ID NO: 84111) and PEP2 is EQLSN (SEQ ID NO: 84178); wherein the pair PEP5:PEP6 is not VPQDL (SEQ ID NO: 84365):MVVVK (SEQ ID NO: 84260) when PEP1 is EPLT (SEQ ID NO: 84111) and PEP2 is EQLSN (SEQ ID NO: 84178); wherein the pair PEP5:PEP6 is not VPTEE (SEQ ID NO: 84377):FLQHN (SEQ ID NO: 84184) when PEP1 is SNIT (SEQ ID NO: 84118) and PEP2 is IGEMS (SEQ ID NO: 84209); wherein the pair PEP5:PEP6 is not SRVHH (SEQ ID NO: 84297):RLEEH (SEQ ID NO: 84279) when PEP1 is RSVK (SEQ ID NO: 84115) and PEP2 is KEVQV (SEQ ID NO: 84210); and wherein the pair PEP5:PEP6 is not TQVQL (SEQ ID NO: 84340):TLEDH (SEQ ID NO: 84307) when PEP1 is RPVQ (SEQ ID NO: 84114) and PEP2 is KKATV (SEQ ID NO: 84212).

[0700] In certain embodiments useful for inducing differentiation of mensenchymal or progenitor stem cells from the fibroblast lineage, inducing skin tissue regeneration and tubular formation, preventing, attenuating, masking or removing wrinkles, firming the skin, preventing, decreasing or suppressing skin pigmentation, and protecting patients from skin tissue degeneration-related diseases, disorders, conditions or pathologies, PEP9 is selected from the group consisting of KIPKAXXVPTEL (SEQ ID NO: 84770), SIPKAXXVPTEL (SEQ ID NO: 84830), HVTKPTXAPTKL (SEQ ID NO: 84742), YVPKPXXAPTKL (SEQ ID NO: 84864), TVPKPXXAPTQL (SEQ ID NO: 84854), ASAAPXXVPQAL (SEQ ID NO: 84689), ASASPXXVSQDL (SEQ ID NO: 84701), ASASPXXVPQDL (SEQ ID NO: 84699), NDEGLEXVPTEE (SEQ ID NO: 84798), SSVKXQPSRVHH (SEQ ID NO: 84834) and RNVQXRPTQVQL (SEQ ID NO: 84806); PEP10 is selected from the group consisting of DMVVEGXGXR (SEQ ID NO: 84510), EMVVEGXGXR (SEQ ID NO: 84529), NMVVRSXGXH (SEQ ID NO: 84629), NMVVRAXGXH (SEQ ID NO: 84627), MIVRSXKXS (SEQ ID NO: 84453), MIVKSXKXS (SEQ ID NO: 84451), MVVKSXKXS (SEQ ID NO: 84470), FLQHNKXEXR (SEQ ID NO: 84536), RLEEHLEXAXA (SEQ ID NO: 84646) and TLEDHLAXKXE (SEQ ID NO: 84659); and wherein the pair PEP9:PEP10 is selected from the group consisting of KIPKAXXVPTEL (SEQ ID NO: 84770):DMVVEGXGXR (SEQ ID NO: 84510), SIPKAXXVPTEL (SEQ ID NO: 84830):EMVVEGXGXR (SEQ ID NO: 84529), HVTKPTXAPTKL (SEQ ID NO: 84742):NMVVRSXGXH (SEQ ID NO: 84629), YVPKPXXAPTKL (SEQ ID NO: 84864):NMVVRSXGXH (SEQ ID NO: 84629), TVPKPXXAPTQL (SEQ ID NO: 84854):NMVVRAXGXH (SEQ ID NO: 84627), ASAAPXXVPQAL (SEQ ID NO: 84689):MIVRSXKXS (SEQ ID NO: 84453), ASASPXXVSQDL (SEQ ID NO: 84701):MIVKSXKXS (SEQ ID NO: 84451), ASASPXXVPQDL (SEQ ID NO: 84699):MVVKSXKXS (SEQ ID NO: 84470), NDEGLEXVPTEE (SEQ ID NO: 84798):FLQHNKXEXR (SEQ ID NO: 84536), SSVKXQPSRVHH (SEQ ID NO: 84834):RLEEHLEXAXA (SEQ ID NO: 84646) and RNVQXRPTQVQL (SEQ ID NO: 84806):TLEDHLAXKXE (SEQ ID NO: 84659); wherein the pair PEP9:PEP10 is not ASAAPXXVPQAL (SEQ ID NO: 84689):MIVRSXKXS (SEQ ID NO: 84453) when PEP1 is EPLP (SEQ ID NO: 84110) and PEP2 is EQLSN (SEQ ID NO: 84178); wherein the pair PEP9:PEP10 is not ASASPXXVSQDL (SEQ ID NO: 84701):MIVKSXKXS (SEQ ID NO: 84451) when PEP1 is EPLT (SEQ ID NO: 84111) and PEP2 is EQLSN (SEQ ID NO: 84178); wherein the pair PEP9:PEP10 is not ASASPXXVPQDL (SEQ ID NO: 84699):MVVKSXKXS (SEQ ID NO: 84470) when PEP1 is EPLT (SEQ ID NO: 84111) and PEP2 is EQLSN (SEQ ID NO: 84178); wherein the pair PEP9:PEP10 is not NDEGLEXVPTEE (SEQ ID NO: 84798):FLQHNKXEXR (SEQ ID NO: 84536) when PEP1 is SNIT (SEQ ID NO: 84118) and PEP2 is IGEMS (SEQ ID NO: 84209); wherein the pair PEP9:PEP10 is not SSVKXQPSRVHH (SEQ ID NO: 84834):RLEEHLEXAXA (SEQ ID NO: 84646) when PEP1 is RSVK (SEQ ID NO: 84115) and PEP2 is KEVQV (SEQ ID NO: 84210); and wherein the pair PEP9:PEP10 is not RNVQXRPTQVQL (SEQ ID NO: 84806):TLEDHLAXKXE (SEQ ID NO: 84659) when PEP1 is RPVQ (SEQ ID NO: 84114) and PEP2 is KKATV (SEQ ID NO: 84212).

[0701] In certain embodiments useful for inducing differentiation of mensenchymal or progenitor stem cells from the fibroblast lineage, inducing skin tissue regeneration and tubular formation, preventing, attenuating, masking or removing wrinkles, firming the skin, preventing, decreasing or suppressing skin pigmentation, and protecting patients from skin tissue degeneration-related diseases, disorders, conditions or pathologies, PEP1 is selected from the group consisting of EPLP (SEQ ID NO: 84110), EPLT (SEQ ID NO: 84111), SNIT (SEQ ID NO: 84118), RSVK (SEQ ID NO: 84115) and RPVQ (SEQ ID NO: 84114); PEP11 is selected from the group consisting of VYY, LYY, QIM, AKV and RKI; and the pair PEP1:PEP11 is selected from the group consisting of EPLP (SEQ ID NO: 84110):VYY, EPLT (SEQ ID NO: 84111):LYY, SNIT (SEQ ID NO: 84118):QIM, RSVK (SEQ ID NO: 84115):KEVQV (SEQ ID NO: 84210) and RPVQ (SEQ ID NO: 84114):KKATV (SEQ ID NO: 84212).

[0702] In one aspect, the present disclosure provides a GFR-binding compound, wherein said GFR-binding compound is a peptide, a variant or analog thereof, or a peptidomimetic as defined herein, with between 20 and 60 (in particular between 20 and 50, and more particularly, between 20 and 45) amino acids, comprising a peptide with four amino acids (PEP1) or a peptide with eight amino acids (PEP12), a peptide with five amino acids (PEP2), and optionally a pair of peptides selected form the group consisting of PEP3:PEP4, PEP3:PEP6, PEP3:PEP10, PEP5:PEP4, PEP9:PEP4, PEP5:PEP6, PEP5:PEP10, PEP9:PEP6 and PEP9:PEP10; wherein said GFR-binding compound does not comprise the pair of peptides VPQAL (SEQ ID NO: 84364):MIVRS (SEQ ID NO: 84243) when PEP1 is EPLP (SEQ ID NO: 84110) and PEP2 is EQLSN (SEQ ID NO: 84178); wherein said GFR-binding compound does not comprise the pair of peptides VSQDL (SEQ ID NO: 84387):MIVKS (SEQ ID NO: 84242) when PEP1 is EPLT (SEQ ID NO: 84111) and PEP2 is EQLSN (SEQ ID NO: 84178); wherein said GFR-binding compound does not comprise the pair of peptides VPQDL (SEQ ID NO: 84365):MVVVK (SEQ ID NO: 84260) when PEP1 is EPLT (SEQ ID NO: 84111) and PEP2 is EQLSN (SEQ ID NO: 84178); wherein said GFR-binding compound does not comprise the pair of peptides VPTEE (SEQ ID NO: 84377):FLQHN (SEQ ID NO: 84184) when PEP1 is SNIT (SEQ ID NO: 84118) and PEP2 is IGEMS (SEQ ID NO: 84209); wherein said GFR-binding compound does not comprise the pair of peptides SRVHH (SEQ ID NO: 84297):RLEEH (SEQ ID NO: 84279) when PEP1 is RSVK (SEQ ID NO: 84115) and PEP2 is KEVQV (SEQ ID NO: 84210); and wherein said GFR-binding compound does not comprise the pair of peptides TQVQL (SEQ ID NO: 84340):TLEDH (SEQ ID NO: 84307) when PEP1 is RPVQ (SEQ ID NO: 84114) and PEP2 is KKATV (SEQ ID NO: 84212); and wherein the RMSD is 2.45 Å or less.

[0703] In one aspect, the present disclosure provides a GFR-binding compound, wherein said GFR-binding compound is a peptide, a variant or analog thereof, or a peptidomimetic as defined herein, with between 20 and 60 (in particular between 20 and 50, and more particularly, between 20 and 45) amino acids, comprising a peptide with four amino acids (PEP1) or a peptide with eight amino acids (PEP12), a peptide with five amino acids (PEP2), and optionally a pair of peptides selected form the group consisting of PEP3:PEP4, PEP3:PEP6, PEP3:PEP10, PEP5:PEP4, PEP9:PEP4, PEP5:PEP6, PEP5:PEP10, PEP9:PEP6 and PEP9:PEP10; wherein said GFR-binding compound does not comprise the pair of peptides ASAAPXXVPQAL (SEQ ID NO: 84689):MIVRSXKXS (SEQ ID NO: 84453) when PEP1 is EPLP (SEQ ID NO: 84110) and PEP2 is EQLSN (SEQ ID NO: 84178); wherein said GFR-binding compound does not comprise the pair of peptides ASASPXXVSQDL (SEQ ID NO: 84701):MIVKSXKXS (SEQ ID NO: 84451) when PEP1 is EPLT (SEQ ID NO: 84111) and PEP2 is EQLSN (SEQ ID NO: 84178); wherein said GFR-binding compound does not comprise the pair of peptides ASASPXXVPQDL (SEQ ID NO: 84699):MVVKSXKXS (SEQ ID NO: 84470) when PEP1 is EPLT (SEQ ID NO: 84111) and PEP2 is EQLSN (SEQ ID NO: 84178); wherein said GFR-binding compound does not comprise the pair of peptides NDEGLEXVPTEE (SEQ ID NO: 84798):FLQHNKXEXR (SEQ ID NO: 84536) when PEP1 is SNIT (SEQ ID NO: 84118) and PEP2 is IGEMS (SEQ ID NO: 84209); wherein said GFR-binding compound does not comprise the pair of peptides SSVKXQPSRVHH (SEQ ID NO: 84834):RLEEHLEXAXA (SEQ ID NO: 84646) when PEP1 is RSVK (SEQ ID NO: 84115) and PEP2 is KEVQV (SEQ ID NO: 84210); and wherein said GFR-binding compound does not comprise the pair of peptides RNVQXRPTQVQL (SEQ ID NO: 84806):TLEDHLAXKXE (SEQ ID NO: 84659) when PEP1 is RPVQ (SEQ ID NO: 84114) and PEP2 is KKATV (SEQ ID NO: 84212); and wherein the RMSD is 2.45 Å or less.

[0704] In certain embodiments useful for inducing differentiation of mensenchymal or progenitor stem cells from the fibroblast lineage, inducing skin tissue regeneration and tubular formation, preventing, attenuating, masking or removing wrinkles, firming the skin, preventing, decreasing or suppressing skin pigmentation, and protecting patients from skin tissue degeneration-related diseases, disorders, conditions or pathologies, said GFR-binding compound is a synthetic molecule as defined herein in the definition section.

[0705] In certain embodiments useful for inducing differentiation of mensenchymal or progenitor stem cells from the fibroblast lineage, inducing skin tissue regeneration and tubular formation, preventing, attenuating, masking or removing wrinkles, firming the skin, preventing, decreasing or suppressing skin pigmentation, and protecting patients from skin tissue degeneration-related diseases, disorders, conditions or pathologies, said GFR-binding compound is a synthetic peptide, or a variant or analog thereof, or a peptidomimetic.

### Hair

[0706] Certain embodiments of the invention are particularly useful for inducing differentiation of mensenchymal or progenitor stem cells from the hair follicle cell lineage, hair follicle tissue regeneration and formation (hair growth), and for protecting from hair follicle-related diseases, disorders, conditions or pathologies.

[0707] In certain embodiments useful for inducing differentiation of mensenchymal or progenitor stem cells from the hair follicle cell lineage, hair follicle tissue regeneration and formation (hair growth), and for protecting from hair follicle-related diseases, disorders, conditions or pathologies, PEP1 is SSLS (SEQ ID NO: 84121).

[0708] In certain embodiments useful for inducing differentiation of mensenchymal or progenitor stem cells from the hair follicle cell lineage, hair follicle tissue regeneration and formation (hair growth), and for protecting from hair follicle-related diseases, disorders, conditions or pathologies, PEP2 is LKVYP (SEQ ID NO: 84231).

[0709] In certain embodiments useful for inducing differentiation of mensenchymal or progenitor stem cells from the hair follicle cell lineage, hair follicle tissue regeneration and formation (hair growth), and for protecting from hair follicle-related diseases, disorders, conditions or pathologies, PEP3 is selected from the group consisting of VPT, VPE, APT, TPT, VPA, APV, VPQ, VSQ and SRV.

[0710] In certain embodiments useful for inducing differentiation of mensenchymal or progenitor stem cells from the hair follicle cell lineage, hair follicle tissue regeneration and formation (hair growth), and for protecting from hair follicle-related diseases, disorders, conditions or pathologies, PEP4 is selected from the group consisting of VVE, TVE, VVR, VVK, VAE, AVS, VVD, VEE, VRS, VKS, QHN and EEH.

[0711] In certain embodiments useful for inducing differentiation of mensenchymal or progenitor stem cells from the hair follicle cell lineage, hair follicle tissue regeneration and formation (hair growth), and for protecting from hair follicle-related diseases, disorders, conditions or pathologies, PEP5 is a peptide of general formula PEP3-AA¹¹-AA¹²; wherein PEP3 is selected from the group consisting of VPT, VPE, APT, TPT, VPA, APV, VPQ, VSQ and SRV; wherein AA¹¹ is selected from the group consisting of E, K, Q, R, A, D, G and H, in particular is selected from the group consisting of E, K, Q, R, A, D and H; wherein AA¹² is selected from the group consisting of L, M, T, E, Q and H, in particular is selected from the group consisting of L, M, T, E and H. In one particular example, PEP5 is selected from the group consisting of VPTEL (SEQ ID NO: 84378), VPEKM (SEQ ID NO: 84360), APTKL (SEQ ID NO: 84131), APTQL (SEQ ID NO: 84134), VPTKL (SEQ ID NO: 84381), TPTKM (SEQ ID NO: 84327), VPARL (SEQ ID NO: 84352), VPTRL (SEQ ID NO: 84385), APVKT (SEQ ID NO: 84144), VPQAL (SEQ ID NO: 84364), VSQDL (SEQ ID NO: 84387), VPQDL (SEQ ID NO: 84365), VPTEE (SEQ ID NO: 84377) and SRVHH (SEQ ID NO: 84297).

[0712] In certain embodiments useful for inducing differentiation of mensenchymal or progenitor stem cells from the hair follicle cell lineage, hair follicle tissue regeneration and formation (hair growth), and for protecting from hair follicle-related diseases, disorders, conditions or pathologies, PEP6 is a peptide of general formula AA²⁶-AA²⁷-AA²⁸-AA²⁹-PEP4; wherein PEP4 is selected from the group consisting of VVE, TVE, VVR, VVK, VAE, AVS, VVD, VEE, VRS, VKS, QHN and EEH; wherein AA²⁶ is absent or selected from the group consisting of AA^{III} amino acids, preferably is absent or is E; wherein AA²⁷ and AA²⁸ are independently selected from the group consisting of AA^{III} and AA^{V} amino acids, preferably AA²⁷ is selected from the group consisting of D, N, E, G, M, F and R, preferably AA²⁸ is selected from the group consisting of M, I, V and L; wherein AA²⁹ is absent or selected from the group consisting of AA^{II} amino acids, preferably is absent or is S. In one particular example, PEP6 is selected from the group consisting of DMVVE (SEQ ID NO: 84161), NMTVE (SEQ ID NO: 84267), EMVVE (SEQ ID NO: 84175), NMVVR (SEQ ID NO: 84275), NMVVK (SEQ ID NO: 84274), EGMSVAE (SEQ ID NO: 84411), GMAVS (SEQ ID NO: 84194), GMVVD (SEQ ID NO: 84204), MIVEE (SEQ ID NO: 84241), MIVRS (SEQ ID NO: 84243), MIVKS (SEQ ID NO: 84242), MVVKS (SEQ ID NO: 84256), FLQHN (SEQ ID NO: 84184) and RLEEH (SEQ ID NO: 84279).

[0713] In certain embodiments useful for inducing differentiation of mensenchymal or progenitor stem cells from the hair follicle cell lineage, hair follicle tissue regeneration and formation (hair growth), and for protecting from hair follicle-related diseases, disorders, conditions or pathologies, PEP7 is an amino acid or a peptide with between two and seven amino acids of general formula AA¹-AA²-AA³-AA⁴-AA⁵-AA⁶-AA⁷ (SEQ ID NO: 84948); wherein AA¹, AA², AA³, AA⁴, and AA⁵ are independently absent or AA^{I} as defined herein; wherein AA⁶ is absent or selected from the group consisting of S, T, C, E, Q, P and R, preferably is selected from the group consisting of C, S, T, E and Q; wherein AA⁷ is absent or is selected from the group consisting of S, T, C, E, Q, P and R, preferably is selected from the group consisting of S, C and P; and wherein at least one of AA¹, AA², AA³, AA⁴, AA⁵, AA⁶ or AA⁷ is not absent. In one particular example, PEP7 is selected from the group consisting of KIPKAXX (SEQ ID NO: 84424), GIPEPXX (SEQ ID NO: 84419), SIPKAXX (SEQ ID NO: 84429), HVTKPTX (SEQ ID NO: 84422), YVPKPXX (SEQ ID NO: 84433), TVPKPXX (SEQ ID NO: 84432), AVPKAXX (SEQ ID NO: 84404), KVGKAXX (SEQ ID NO: 84425), KASKAXX (SEQ ID NO: 84423), GSAGPXX (SEQ ID NO: 84420), AAPASXX (SEQ ID NO: 84401), STPPTXX (SEQ ID NO: 84431), HVPKPXX (SEQ ID NO: 84421), RVPSTXX (SEQ ID NO: 84428), ASAAPXX (SEQ ID NO: 84402), ASASPXX (SEQ ID NO: 84403), NDEGLEX (SEQ ID NO: 84426) and SSVKXQP (SEQ ID NO: 84430).

[0714] In certain embodiments useful for inducing differentiation of mensenchymal or progenitor stem cells from the hair follicle cell lineage, hair follicle tissue regeneration and formation (hair growth), and for protecting from hair follicle-related diseases, disorders, conditions or pathologies, PEP8 is an amino acid or a peptide with between two and six amino acids of general formula AA³³-AA³⁴-AA³⁵-AA³⁶-AA³⁷-AA³⁸ (SEQ ID NO: 84949); wherein AA³³ is absent or is selected from the group consisting of AA^{I} amino acids at the exception of AA^{VI} amino acids, in particular is absent or is selected from the group consisting of G, S, A, E, R, K and L; AA³⁴ is absent or is selected from the group consisting of AA^{III} and AA^{IV} amino acids, in particular is absent or E; wherein AA³⁵ is absent or is selected from the group consisting of AA^{II} amino acids, preferably is S or C; wherein AA³⁶ is absent or is selected from the group consisting of AA^{III} and AA^{IV} amino acids, in particular is selected from the group consisting of G, A, K and E; wherein AA³⁷ is absent or is selected from the group consisting of AA^{II} amino acids, preferably is S or C; wherein AA³⁸ is absent or is selected from the group consisting of AA^{I}, in particular is selected from the group consisting of R, H, S, L and A; and wherein at least one of AA³³, AA³⁴, AA³⁵, AA³⁶, AA³⁷ or AA³⁸ is not absent. In one particular example, PEP8 is selected from the group consisting of GXGXR (SEQ ID NO: 84208), SXASR, SXGXH (SEQ ID NO: 84304), AXGXH (SEQ ID NO: 84147), XGXR (SEQ ID NO: 84123), EXGXR (SEQ ID NO: 84179), RXGXS (SEQ ID NO: 84291), AXGXR (SEQ ID NO: 84148), SXGXR (SEQ ID NO: 84305), XGXL (SEQ ID NO: 84122), XKXS (SEQ ID NO: 84124), KXEXR (SEQ ID NO: 84213) and LEXAXA (SEQ ID NO: 84400).

[0715] In certain embodiments useful for inducing differentiation of mensenchymal or progenitor stem cells from the hair follicle cell lineage, hair follicle tissue regeneration and formation (hair growth), and for protecting from hair follicle-related diseases, disorders, conditions or pathologies, PEP9 is a peptide of general formula AA¹-AA²-AA³-AA⁴-AA⁵-AA⁶-AA⁷-PEP5; wherein PEP5 is a peptide of formula PEP3-AA¹¹-AA¹²; wherein PEP3 is selected from the group consisting of VPT, VPE, APT, TPT, VPA, APV, VPQ, VSQ and SRV; wherein AA¹¹ is selected from the group consisting of E, K, Q, R, A, D, G and H, in particular is selected from the group consisting of E, K, Q, R, A, D and H; wherein AA¹² is selected from the group consisting of L, M, T, E, Q and H, in particular is selected from the group consisting of L, M, T, E and H; wherein AA¹, AA², AA³, AA⁴, and AA⁵ are independently absent or AA^{I} as defined herein; wherein AA⁶ is absent or selected from the group consisting of S, T, C, E, Q, P and R, preferably is selected from the group consisting of C, S, T, E and Q; wherein AA⁷ is selected from the group consisting of S, T, C, E, Q, P and R, preferably is selected from the group consisting of S, C and P. In one particular example, PEP9 is selected from the group consisting of KIPKAXXVPTEL (SEQ ID NO: 84770), GIPEPXXVPEKM (SEQ ID NO: 84718), SIPKAXXVPTEL (SEQ ID NO: 84830), HVTKPTXAPTKL (SEQ ID NO: 84742), YVPKPXXAPTKL (SEQ ID NO: 84864), TVPKPXXAPTQL (SEQ ID NO: 84854), AVPKAXXAPTKL (SEQ ID NO: 84704), KVGKAXXVPTKL (SEQ ID NO: 84780), KASKAXXVPTKL (SEQ ID NO: 84760), GSAGPXXTPTKM (SEQ ID NO: 84726), AAPASXXVPARL (SEQ ID NO: 84677), STPPTXXVPTRL (SEQ ID NO: 84850), HVPKPXXAPTKL (SEQ ID NO: 84734), RVPSTXXAPVKT (SEQ ID NO: 84815), ASAAPXXVPQAL (SEQ ID NO: 84689), ASASPXXVSQDL (SEQ ID NO: 84701), ASASPXXVPQDL (SEQ ID NO: 84699), NDEGLEXVPTEE (SEQ ID NO: 84798) and SSVKXQPSRVHH (SEQ ID NO: 84834).

[0716] In certain embodiments useful for inducing differentiation of mensenchymal or progenitor stem cells from the hair follicle cell lineage, hair follicle tissue regeneration and formation (hair growth), and for protecting from hair follicle-related diseases, disorders, conditions or pathologies, PEP10 is a peptide of general formula PEP6-AA³³-AA³⁴-AA³⁵-AA³⁶_AA³⁷-AA³⁸; wherein PEP6 is a peptide of formula AA²⁶-AA²⁷-AA²⁸-AA²⁹-PEP4; wherein PEP4 is selected from the group consisting of VVE, TVE, VVR, VVK, VAE, AVS, VVD, VEE, VRS, VKS, QHN and EEH; wherein AA²⁶ is absent or selected from the group consisting of AA^{III} amino acids, preferably is absent or is E; wherein AA²⁷ and AA²⁸ are independently selected from the group consisting of AA^{III} and AA^{V} amino acids, preferably AA²⁷ is selected from the group consisting of D, N, E, G, M, F and R, preferably AA²⁸ is selected from the group consisting of M, I, V and L; wherein AA²⁹ is absent or selected from the group consisting of AA^{II} amino acids, preferably is absent or is S; wherein AA³³ is absent or is selected from the group consisting of AA^{I} amino acids at the exception of AA^{VI} amino acids, in particular is absent or is selected from the group consisting of G, S, A, E, R, K and L; AA³⁴ is absent or is selected from the group consisting of AA^{III} and AA^{IV} amino acids, in particular is absent or E; wherein AA³⁵ is absent or is selected from the group consisting of AA^{II} amino acids, preferably is S or C; wherein AA³⁶ is absent or is selected from the group consisting of AA^{III} and AA^{IV} amino acids, in particular is selected from the group consisting of G, A, K and E; wherein AA³⁷ is absent or is selected from the group consisting of AA^{II} amino acids, preferably is S or C; wherein AA³⁸ is absent or is selected from the group consisting of AA^{I}, in particular is selected from the group consisting of R, H, S, L and A. In one particular example, PEP10 is selected from the group consisting of DMVVEGXGXR (SEQ ID NO: 84510), NMTVESXASR, EMVVEGXGXR (SEQ ID NO: 84529), NMVVRSXGXH (SEQ ID NO: 84629), NMVVRAXGXH (SEQ ID NO: 84627), NMVVKAXGXH (SEQ ID NO: 84624), EGMSVAEXGXR (SEQ ID NO: 84636), GMAVSEXGXR (SEQ ID NO: 84546), GMVVDRXGXS (SEQ ID NO: 84567), DMVVEAXGXR (SEQ ID NO: 84509), DMVVESXGXR (SEQ ID NO: 84511), MIVEEXGXL (SEQ ID NO: 84448), MIVRSXKXS (SEQ ID NO: 84453), MIVKSXKXS (SEQ ID NO: 84451), MVVKSXKXS (SEQ ID NO: 84470), FLQHNKXEXR (SEQ ID NO: 84536) and RLEEHLEXAXA (SEQ ID NO: 84646).

[0717] In certain embodiments useful for inducing differentiation of mensenchymal or progenitor stem cells from the hair follicle cell lineage, hair follicle tissue regeneration and formation (hair growth), and for protecting from hair follicle-related diseases, disorders, conditions or pathologies, PEP12 is a peptide of general formula PEP1-AA¹⁷-PEP11; wherein AA¹⁷ is selected from the group consisting of G, A, V, L, I, P, F, M, W, T and S (in particular is selected from the group consisting of M, I, L, V and T); wherein PEP1 is SSLS (SEQ ID NO: 84121).

[0718] In certain embodiments useful for inducing differentiation of mensenchymal or progenitor stem cells from the hair follicle cell lineage, hair follicle tissue regeneration and formation (hair growth), and for protecting from hair follicle-related diseases, disorders, conditions or pathologies, PEP11 is a peptide with 3 amino acids of general formula AA¹⁸-AA¹⁹-AA²⁰; wherein AA¹⁸ is selected from the group consisting of L, V, Q, A and R, in particular is L; wherein AA¹⁹ is selected from the group consisting of F, W, H, Y, I and K, in particular is F; wherein AA²⁰ is selected from the group consisting of L, F, Y, K, I, V and M, in particular is F. In one particular example, PEP11 is LFF.

[0719] The definitions of “PEP” pairs, quadruplets, hexaplets and heptuplet e.g. PEP1:PEP2, PEP12:PEP2, or PEP7:PEP5:PEP12:LINKER:PEP2:PEP6:PEP8, useful for inducing differentiation of mensenchymal or progenitor stem cells from the hair follicle cell lineage, hair follicle tissue regeneration and formation (hair growth), and for protecting from hair follicle-related diseases, disorders, conditions or pathologies, are as already defined herein to the extent that PEP1 to PEP12 are particularly useful for these applications. For instances:

[0720] In certain embodiments useful for inducing differentiation of mensenchymal or progenitor stem cells from the hair follicle cell lineage, hair follicle tissue regeneration and formation (hair growth), and for protecting from hair follicle-related diseases, disorders, conditions or pathologies, PEP3 is selected from the group consisting of VPT, VPE, APT, TPT, VPA, APV, VPQ, VSQ and SRV; PEP4 is selected from the group consisting of VVE, TVE, VVR, VVK, VAE, AVS, VVD, VEE, VRS, VKS, QHN and EEH; and wherein the pair PEP3:PEP4 is selected from the group consisting of VPT:VVE, VPE:TVE, APT:VVR, APT:VVK, VPT:VAE, VPT:AVS, TPT:VVD, VPA:VVE, APV:VEE, VPQ:VRS, VSQ:VKS, VPQ:VKS, VPT:QHN and SRV:EEH.

[0721] In certain embodiments useful for inducing differentiation of mensenchymal or progenitor stem cells from the hair follicle cell lineage, hair follicle tissue regeneration and formation (hair growth), and for protecting from hair follicle-related diseases, disorders, conditions or pathologies, PEP5 is selected from the group consisting of VPTEL (SEQ ID NO: 84378), VPEKM (SEQ ID NO: 84360), APTKL (SEQ ID NO: 84131), APTQL (SEQ ID NO: 84134), VPTKL (SEQ ID NO: 84381), TPTKM (SEQ ID NO: 84327), VPARL (SEQ ID NO: 84352), VPTRL (SEQ ID NO: 84385), APVKT (SEQ ID NO: 84144), VPQAL (SEQ ID NO: 84364), VSQDL (SEQ ID NO: 84387), VPQDL (SEQ ID NO: 84365), VPTEE (SEQ ID NO: 84377) and SRVHH (SEQ ID NO: 84297); PEP6 is selected from the group consisting of DMVVE (SEQ ID NO: 84161), NMTVE (SEQ ID NO: 84267), EMVVE (SEQ ID NO: 84175), NMVVR (SEQ ID NO: 84275), NMVVK (SEQ ID NO: 84274), EGMSVAE (SEQ ID NO: 84411), GMAVS (SEQ ID NO: 84194), GMVVD (SEQ ID NO: 84204), MIVEE (SEQ ID NO: 84241), MIVRS (SEQ ID NO: 84243), MIVKS (SEQ ID NO: 84242), MVVKS (SEQ ID NO: 84256), FLQHN (SEQ ID NO: 84184) and RLEEH (SEQ ID NO: 84279); and wherein the pair PEP5:PEP6 is selected from the group consisting of VPTEL (SEQ ID NO: 84378):DMVVE (SEQ ID NO: 84161), VPEKM (SEQ ID NO: 84360):NMTVE (SEQ ID NO: 84267), VPTEL (SEQ ID NO: 84378):EMVVE (SEQ ID NO: 84175), APTKL (SEQ ID NO: 84131):NMVVR (SEQ ID NO: 84275), APTQL (SEQ ID NO: 84134):NMVVR (SEQ ID NO: 84275), APTKL (SEQ ID NO: 84131):NMVVK (SEQ ID NO: 84274), VPTKL (SEQ ID NO: 84381):EGMSVAE (SEQ ID NO: 84411), VPTKL (SEQ ID NO: 84381):GMAVS (SEQ ID NO: 84194), TPTKM (SEQ ID NO: 84327):GMVVD (SEQ ID NO: 84204), VPARL (SEQ ID NO: 84352):DMVVE (SEQ ID NO: 84161), VPTRL (SEQ ID NO: 84385):DMVVE (SEQ ID NO: 84161), APVKT (SEQ ID NO: 84144):MIVEE (SEQ ID NO: 84241), VPQAL (SEQ ID NO: 84364):MIVRS (SEQ ID NO: 84243), VSQDL (SEQ ID NO: 84387):MIVKS (SEQ ID NO: 84242), VPQDL (SEQ ID NO: 84365):NMVVK (SEQ ID NO: 84274), VPTEE (SEQ ID NO: 84377):FLQHN (SEQ ID NO: 84184) and SRVHH (SEQ ID NO: 84297):RLEEH (SEQ ID NO: 84279).

[0722] In certain embodiments useful for inducing differentiation of mensenchymal or progenitor stem cells from the hair follicle cell lineage, hair follicle tissue regeneration and formation (hair growth), and for protecting from hair follicle-related diseases, disorders, conditions or pathologies, PEP7 is selected from the group consisting of KIPKAXX (SEQ ID NO: 84424), GIPEPXX (SEQ ID NO: 84419), SIPKAXX (SEQ ID NO: 84429), HVTKPTX (SEQ ID NO: 84422), YVPKPXX (SEQ ID NO: 84433), TVPKPXX (SEQ ID NO: 84432), AVPKAXX (SEQ ID NO: 84404), KVGKAXX (SEQ ID NO: 84425), KASKAXX (SEQ ID NO: 84423), GSAGPXX (SEQ ID NO: 84420), AAPASXX (SEQ ID NO: 84401), STPPTXX (SEQ ID NO: 84431), HVPKPXX (SEQ ID NO: 84421), RVPSTXX (SEQ ID NO: 84428), ASAAPXX (SEQ ID NO: 84402), ASASPXX (SEQ ID NO: 84403), NDEGLEX (SEQ ID NO: 84426) and SSVKXQP (SEQ ID NO: 84430); wherein PEP8 is selected from the group consisting of GXGXR (SEQ ID NO: 84208), SXASR, SXGXH (SEQ ID NO: 84304), AXGXH (SEQ ID NO: 84147), XGXR (SEQ ID NO: 84123), EXGXR (SEQ ID NO: 84179), RXGXS (SEQ ID NO: 84291), AXGXR (SEQ ID NO: 84148), SXGXR (SEQ ID NO: 84305), XGXL (SEQ ID NO: 84122), XKXS (SEQ ID NO: 84124), KXEXR (SEQ ID NO: 84213) and LEXAXA (SEQ ID NO: 84400); and wherein the pair PEP7:PEP8 is selected from the group consisting of KIPKAXX (SEQ ID NO: 84424):GXGXR (SEQ ID NO: 84208), GIPEPXX (SEQ ID NO: 84419):SXASR, SIPKAXX (SEQ ID NO: 84429):GXGXR (SEQ ID NO: 84208), HVTKPTX (SEQ ID NO: 84422):SXGXH (SEQ ID NO: 84304), YVPKPXX (SEQ ID NO: 84433):SXGXH (SEQ ID NO: 84304), TVPKPXX (SEQ ID NO: 84432):AXGXH (SEQ ID NO: 84147), AVPKAXX (SEQ ID NO: 84404):AXGXH (SEQ ID NO: 84147), KVGKAXX (SEQ ID NO: 84425):XGXR (SEQ ID NO: 84123), KASKAXX (SEQ ID NO: 84423):EXGXR (SEQ ID NO: 84179), GSAGPXX (SEQ ID NO: 84420):RXGXS (SEQ ID NO: 84291), AAPASXX (SEQ ID NO: 84401):AXGXR (SEQ ID NO: 84148), STPPTXX (SEQ ID NO: 84431):SXGXR (SEQ ID NO: 84305), HVPKPXX (SEQ ID NO: 84421):SXGXH (SEQ ID NO: 84304), RVPSTXX (SEQ ID NO: 84428):XGXL (SEQ ID NO: 84122), ASAAPXX (SEQ ID NO: 84402):XKXS (SEQ ID NO: 84124), ASASPXX (SEQ ID NO: 84403):XKXS (SEQ ID NO: 84124), NDEGLEX (SEQ ID NO: 84426):KXEXR (SEQ ID NO: 84213) and SSVKXQP (SEQ ID NO: 84430):LEXAXA (SEQ ID NO: 84400).

[0723] In certain embodiments useful for inducing differentiation of mensenchymal or progenitor stem cells from the hair follicle cell lineage, hair follicle tissue regeneration and formation (hair growth), and for protecting from hair follicle-related diseases, disorders, conditions or pathologies, PEP9 is selected from the group consisting of KIPKAXXVPTEL (SEQ ID NO: 84770), GIPEPXXVPEKM (SEQ ID NO: 84718), SIPKAXXVPTEL (SEQ ID NO: 84830), HVTKPTXAPTKL (SEQ ID NO: 84742), YVPKPXXAPTKL (SEQ ID NO: 84864), TVPKPXXAPTQL (SEQ ID NO: 84854), AVPKAXXAPTKL (SEQ ID NO: 84704), KVGKAXXVPTKL (SEQ ID NO: 84780), KASKAXXVPTKL (SEQ ID NO: 84760), GSAGPXXTPTKM (SEQ ID NO: 84726), AAPASXXVPARL (SEQ ID NO: 84677), STPPTXXVPTRL (SEQ ID NO: 84850), HVPKPXXAPTKL (SEQ ID NO: 84734), RVPSTXXAPVKT (SEQ ID NO: 84815), ASAAPXXVPQAL (SEQ ID NO: 84689), ASASPXXVSQDL (SEQ ID NO: 84701), ASASPXXVPQDL (SEQ ID NO: 84699), NDEGLEXVPTEE (SEQ ID NO: 84798) and SSVKXQPSRVHH (SEQ ID NO: 84834); PEP10 is selected from the group consisting of DMVVEGXGXR (SEQ ID NO: 84510), NMTVESXASR, EMVVEGXGXR (SEQ ID NO: 84529), NMVVRSXGXH (SEQ ID NO: 84629), NMVVRAXGXH (SEQ ID NO: 84627), NMVVKAXGXH (SEQ ID NO: 84624), EGMSVAEXGXR (SEQ ID NO: 84636), GMAVSEXGXR (SEQ ID NO: 84546), GMVVDRXGXS (SEQ ID NO: 84567), DMVVEAXGXR (SEQ ID NO: 84509), DMVVESXGXR (SEQ ID NO: 84511), MIVEEXGXL (SEQ ID NO: 84448), MIVRSXKXS (SEQ ID NO: 84453), MIVKSXKXS (SEQ ID NO: 84451), MVVKSXKXS (SEQ ID NO: 84470), FLQHNKXEXR (SEQ ID NO: 84536) and RLEEHLEXAXA (SEQ ID NO: 84646); and wherein the pair PEP9:PEP10 is selected from the group consisting of KIPKAXXVPTEL (SEQ ID NO: 84770):DMVVEGXGXR (SEQ ID NO: 84510), GIPEPXXVPEKM (SEQ ID NO: 84718):NMTVESXASR, SIPKAXXVPTEL (SEQ ID NO: 84830):EMVVEGXGXR (SEQ ID NO: 84529), HVTKPTXAPTKL (SEQ ID NO: 84742):NMVVRSXGXH (SEQ ID NO: 84629), YVPKPXXAPTKL (SEQ ID NO: 84864):NMVVRSXGXH (SEQ ID NO: 84629), TVPKPXXAPTQL (SEQ ID NO: 84854):NMVVRAXGXH (SEQ ID NO: 84627), AVPKAXXAPTKL (SEQ ID NO: 84704):NMVVKAXGXH (SEQ ID NO: 84624), KVGKAXXVPTKL (SEQ ID NO: 84780):EGMSVAEXGXR (SEQ ID NO: 84636), KASKAXXVPTKL (SEQ ID NO: 84760):GMAVSEXGXR (SEQ ID NO: 84546), GSAGPXXTPTKM (SEQ ID NO: 84726):GMVVDRXGXS (SEQ ID NO: 84567), AAPASXXVPARL (SEQ ID NO: 84677):DMVVEAXGXR (SEQ ID NO: 84509), STPPTXXVPTRL (SEQ ID NO: 84850):DMVVESXGXR (SEQ ID NO: 84511), HVPKPXXAPTKL (SEQ ID NO: 84734):NMVVRSXGXH (SEQ ID NO: 84629), RVPSTXXAPVKT (SEQ ID NO: 84815):MIVEEXGXL (SEQ ID NO: 84448), ASAAPXXVPQAL (SEQ ID NO: 84689):MIVRSXKXS (SEQ ID NO: 84453), ASASPXXVSQDL (SEQ ID NO: 84701):MIVKSXKXS (SEQ ID NO: 84451), ASASPXXVPQDL (SEQ ID NO: 84699):MVVKSXKXS (SEQ ID NO: 84470), NDEGLEXVPTEE (SEQ ID NO: 84798):FLQHNKXEXR (SEQ ID NO: 84536) and SSVKXQPSRVHH (SEQ ID NO: 84834):RLEEHLEXAXA (SEQ ID NO: 84646).

[0724] In certain embodiments useful for inducing differentiation of mensenchymal or progenitor stem cells from the hair follicle cell lineage, hair follicle tissue regeneration and formation (hair growth), and for protecting from hair follicle-related diseases, disorders, conditions or pathologies, PEP5 is selected from the group consisting of VPTEL (SEQ ID NO: 84378), VPEKM (SEQ ID NO: 84360), APTKL (SEQ ID NO: 84131), APTQL (SEQ ID NO: 84134), VPTKL (SEQ ID NO: 84381), TPTKM (SEQ ID NO: 84327), VPARL (SEQ ID NO: 84352), VPTRL (SEQ ID NO: 84385), APVKT (SEQ ID NO: 84144), VPQAL (SEQ ID NO: 84364), VSQDL (SEQ ID NO: 84387), VPQDL (SEQ ID NO: 84365), VPTEE (SEQ ID NO: 84377) and SRVHH (SEQ ID NO: 84297); PEP6 is selected from the group consisting of DMVVE (SEQ ID NO: 84161), NMTVE (SEQ ID NO: 84267), EMVVE (SEQ ID NO: 84175), NMVVR (SEQ ID NO: 84275), NMVVK (SEQ ID NO: 84274), EGMSVAE (SEQ ID NO: 84411), GMAVS (SEQ ID NO: 84194), GMVVD (SEQ ID NO: 84204), MIVEE (SEQ ID NO: 84241), MIVRS (SEQ ID NO: 84243), MIVKS (SEQ ID NO: 84242), MVVKS (SEQ ID NO: 84256), FLQHN (SEQ ID NO: 84184) and RLEEH (SEQ ID NO: 84279); and wherein the pair PEP5:PEP6 is selected from the group consisting of VPTEL (SEQ ID NO: 84378):DMVVE (SEQ ID NO: 84161), VPEKM (SEQ ID NO: 84360):NMTVE (SEQ ID NO: 84267), VPTEL (SEQ ID NO: 84378):EMVVE (SEQ ID NO: 84175), APTKL (SEQ ID NO: 84131):NMVVR (SEQ ID NO: 84275), APTQL (SEQ ID NO: 84134):NMVVR (SEQ ID NO: 84275), APTKL (SEQ ID NO: 84131):NMVVK (SEQ ID NO: 84274), VPTKL (SEQ ID NO: 84381):EGMSVAE (SEQ ID NO: 84411), VPTKL (SEQ ID NO: 84381):GMAVS (SEQ ID NO: 84194), TPTKM (SEQ ID NO: 84327):GMVVD (SEQ ID NO: 84204), VPARL (SEQ ID NO: 84352):DMVVE (SEQ ID NO: 84161), VPTRL (SEQ ID NO: 84385):DMVVE (SEQ ID NO: 84161), APVKT (SEQ ID NO: 84144):MIVEE (SEQ ID NO: 84241), VPQAL (SEQ ID NO: 84364):MIVRS (SEQ ID NO: 84243), VSQDL (SEQ ID NO: 84387):MIVKS (SEQ ID NO: 84242), VPQDL (SEQ ID NO: 84365):NMVVK (SEQ ID NO: 84274), VPTEE (SEQ ID NO: 84377):FLQHN (SEQ ID NO: 84184) and SRVHH (SEQ ID NO: 84297):RLEEH (SEQ ID NO: 84279); and wherein the pair PEP5:PEP6 is not VPEKM (SEQ ID NO: 84360):NMTVE (SEQ ID NO: 84267) when PEP1 is SSLS (SEQ ID NO: 84121) and PEP2 is LKVYP (SEQ ID NO: 84231).

[0725] In certain embodiments useful for inducing differentiation of mensenchymal or progenitor stem cells from the hair follicle cell lineage, hair follicle tissue regeneration and formation (hair growth), and for protecting from hair follicle-related diseases, disorders, conditions or pathologies, PEP9 is selected from the group consisting of KIPKAXXVPTEL (SEQ ID NO: 84770), GIPEPXXVPEKM (SEQ ID NO: 84718), SIPKAXXVPTEL (SEQ ID NO: 84830), HVTKPTXAPTKL (SEQ ID NO: 84742), YVPKPXXAPTKL (SEQ ID NO: 84864), TVPKPXXAPTQL (SEQ ID NO: 84854), AVPKAXXAPTKL (SEQ ID NO: 84704), KVGKAXXVPTKL (SEQ ID NO: 84780), KASKAXXVPTKL (SEQ ID NO: 84760), GSAGPXXTPTKM (SEQ ID NO: 84726), AAPASXXVPARL (SEQ ID NO: 84677), STPPTXXVPTRL (SEQ ID NO: 84850), HVPKPXXAPTKL (SEQ ID NO: 84734), RVPSTXXAPVKT (SEQ ID NO: 84815), ASAAPXXVPQAL (SEQ ID NO: 84689), ASASPXXVSQDL (SEQ ID NO: 84701), ASASPXXVPQDL (SEQ ID NO: 84699), NDEGLEXVPTEE (SEQ ID NO: 84798) and SSVKXQPSRVHH (SEQ ID NO: 84834); PEP10 is selected from the group consisting of DMVVEGXGXR (SEQ ID NO: 84510), NMTVESXASR, EMVVEGXGXR (SEQ ID NO: 84529), NMVVRSXGXH (SEQ ID NO: 84629), NMVVRAXGXH (SEQ ID NO: 84627), NMVVKAXGXH (SEQ ID NO: 84624), EGMSVAEXGXR (SEQ ID NO: 84636), GMAVSEXGXR (SEQ ID NO: 84546), GMVVDRXGXS (SEQ ID NO: 84567), DMVVEAXGXR (SEQ ID NO: 84509), DMVVESXGXR (SEQ ID NO: 84511), MIVEEXGXL (SEQ ID NO: 84448), MIVRSXKXS (SEQ ID NO: 84453), MIVKSXKXS (SEQ ID NO: 84451), MVVKSXKXS (SEQ ID NO: 84470), FLQHNKXEXR (SEQ ID NO: 84536) and RLEEHLEXAXA (SEQ ID NO: 84646); and wherein the pair PEP9:PEP10 is selected from the group consisting of KIPKAXXVPTEL (SEQ ID NO: 84770):DMVVEGXGXR (SEQ ID NO: 84510), GIPEPXXVPEKM (SEQ ID NO: 84718):NMTVESXASR, SIPKAXXVPTEL (SEQ ID NO: 84830):EMVVEGXGXR (SEQ ID NO: 84529), HVTKPTXAPTKL (SEQ ID NO: 84742):NMVVRSXGXH (SEQ ID NO: 84629), YVPKPXXAPTKL (SEQ ID NO: 84864):NMVVRSXGXH (SEQ ID NO: 84629), TVPKPXXAPTQL (SEQ ID NO: 84854):NMVVRAXGXH (SEQ ID NO: 84627), AVPKAXXAPTKL (SEQ ID NO: 84704):NMVVKAXGXH (SEQ ID NO: 84624), KVGKAXXVPTKL (SEQ ID NO: 84780):EGMSVAEXGXR (SEQ ID NO: 84636), KASKAXXVPTKL (SEQ ID NO: 84760):GMAVSEXGXR (SEQ ID NO: 84546), GSAGPXXTPTKM (SEQ ID NO: 84726):GMVVDRXGXS (SEQ ID NO: 84567), AAPASXXVPARL (SEQ ID NO: 84677):DMVVEAXGXR (SEQ ID NO: 84509), STPPTXXVPTRL (SEQ ID NO: 84850):DMVVESXGXR (SEQ ID NO: 84511), HVPKPXXAPTKL (SEQ ID NO: 84734):NMVVRSXGXH (SEQ ID NO: 84629), RVPSTXXAPVKT (SEQ ID NO: 84815):MIVEEXGXL (SEQ ID NO: 84448), ASAAPXXVPQAL (SEQ ID NO: 84689):MIVRSXKXS (SEQ ID NO: 84453), ASASPXXVSQDL (SEQ ID NO: 84701):MIVKSXKXS (SEQ ID NO: 84451), ASASPXXVPQDL (SEQ ID NO: 84699):MVVKSXKXS (SEQ ID NO: 84470), NDEGLEXVPTEE (SEQ ID NO: 84798):FLQHNKXEXR (SEQ ID NO: 84536) and SSVKXQPSRVHH (SEQ ID NO: 84834):RLEEHLEXAXA (SEQ ID NO: 84646); and wherein the pair PEP9:PEP10 is not GIPEPXXVPEKM (SEQ ID NO: 84718):NMTVESXASR when PEP1 is SSLS (SEQ ID NO: 84121) and PEP2 is LKVYP (SEQ ID NO: 84231).

[0726] In certain embodiments useful for inducing differentiation of mensenchymal or progenitor stem cells from the hair follicle cell lineage, hair follicle tissue regeneration and formation (hair growth), and for protecting from hair follicle-related diseases, disorders, conditions or pathologies, PEP1 is SSLS (SEQ ID NO: 84121) and PEP11 is LFF.

[0727] In one aspect, the present disclosure provides a GFR-binding compound, wherein said GFR-binding compound is a peptide, a variant or analog thereof, or a peptidomimetic as defined herein, with between 20 and 60 (in particular between 20 and 50, and more particularly, between 20 and 45) amino acids, comprising a peptide with four amino acids (PEP1) or a peptide with eight amino acids (PEP12), a peptide with five amino acids (PEP2), and optionally a pair of peptides selected form the group consisting of PEP3:PEP4, PEP3:PEP6, PEP3:PEP10, PEP5:PEP4, PEP9:PEP4, PEP5:PEP6, PEP5:PEP10, PEP9:PEP6 and PEP9:PEP10; wherein said GFR-binding compound does not comprise the pair of peptides VPEKM (SEQ ID NO: 84360):NMTVE (SEQ ID NO: 84267) when PEP1 is SSLS (SEQ ID NO: 84121) and PEP2 is LKVYP (SEQ ID NO: 84231); and wherein the RMSD is 2.45 Å or less.

[0728] In one aspect, the present disclosure provides a GFR-binding compound, wherein said GFR-binding compound is a peptide, a variant or analog thereof, or a peptidomimetic as defined herein, with between 20 and 60 (in particular between 20 and 50, and more particularly, between 20 and 45) amino acids, comprising a peptide with four amino acids (PEP1) or a peptide with eight amino acids (PEP12), a peptide with five amino acids (PEP2), and optionally a pair of peptides selected form the group consisting of PEP3:PEP4, PEP3:PEP6, PEP3:PEP10, PEP5:PEP4, PEP9:PEP4, PEP5:PEP6, PEP5:PEP10, PEP9:PEP6 and PEP9:PEP10; wherein said GFR-binding compound does not comprise the pair of peptides GIPEPXXVPEKM (SEQ ID NO: 84718):NMTVESXASR when PEP1 is SSLS (SEQ ID NO: 84121) and PEP2 is LKVYP (SEQ ID NO: 84231); and wherein the RMSD is 2.45 Å or less.

[0729] In certain embodiments useful for inducing differentiation of mensenchymal or progenitor stem cells from the hair follicle cell lineage, hair follicle tissue regeneration and formation (hair growth), and for protecting from hair follicle-related diseases, disorders, conditions or pathologies, said GFR-binding compound is a synthetic molecule as defined herein in the definition section.

[0730] In certain embodiments useful for inducing differentiation of mensenchymal or progenitor stem cells from the hair follicle cell lineage, hair follicle tissue regeneration and formation (hair growth), and for protecting from hair follicle-related diseases, disorders, conditions or pathologies, said GFR-binding compound is a synthetic peptide, or a variant or analog thereof, or a peptidomimetic.

### Fertility and Reproduction

[0731] Certain embodiments of the invention are particularly useful for inducing differentiation of mensenchymal or progenitor stem cells from the reproduction system lineage, enhancing female fertility, treating, preventing, decreasing or suppressing female infertility or any diseases, conditions, disorders or pathologies related thereof.

[0732] In certain embodiments useful for inducing differentiation of mensenchymal or progenitor stem cells from the reproduction system lineage, enhancing female fertility, treating, preventing, decreasing or suppressing female infertility or any diseases, conditions, disorders or pathologies related thereof, PEP1 is NAIS (SEQ ID NO: 84113).

[0733] In certain embodiments useful for inducing differentiation of mensenchymal or progenitor stem cells from the reproduction system lineage, enhancing female fertility, treating, preventing, decreasing or suppressing female infertility or any diseases, conditions, disorders or pathologies related thereof, PEP2 is LKKYR (SEQ ID NO: 84229).

[0734] In certain embodiments useful for inducing differentiation of mensenchymal or progenitor stem cells from the reproduction system lineage, enhancing female fertility, treating, preventing, decreasing or suppressing female infertility or any diseases, conditions, disorders or pathologies related thereof, PEP3 is selected from the group consisting of VPT, APT, TPT, VPA and APV.

[0735] In certain embodiments useful for inducing differentiation of mensenchymal or progenitor stem cells from the reproduction system lineage, enhancing female fertility, treating, preventing, decreasing or suppressing female infertility or any diseases, conditions, disorders or pathologies related thereof, PEP4 is selected from the group consisting of VVE, VVR, VVK, VAE, AVS, VVD and VEE.

[0736] In certain embodiments useful for inducing differentiation of mensenchymal or progenitor stem cells from the reproduction system lineage, enhancing female fertility, treating, preventing, decreasing or suppressing female infertility or any diseases, conditions, disorders or pathologies related thereof, PEP5 is a peptide of general formula PEP3-AA¹¹-AA¹²; wherein PEP3 is selected from the group consisting of VPT, APT, TPT, VPA and APV; wherein AA¹¹ is selected from the group consisting of E, K, Q, R, A, D, G and H, in particular is selected from the group consisting of E, K, Q and R; wherein AA¹² is selected from the group consisting of L, M, T, E, Q and H, in particular is selected from the group consisting of L, M and T. In one particular example, PEP5 is selected from the group consisting of VPTEL (SEQ ID NO: 84378), APTKL (SEQ ID NO: 84131), APTQL (SEQ ID NO: 84134), VPTKL (SEQ ID NO: 84381), TPTKM (SEQ ID NO: 84327), VPARL (SEQ ID NO: 84352), VPTRL (SEQ ID NO: 84385) and APVKT (SEQ ID NO: 84144).

[0737] In certain embodiments useful for inducing differentiation of mensenchymal or progenitor stem cells from the reproduction system lineage, enhancing female fertility, treating, preventing, decreasing or suppressing female infertility or any diseases, conditions, disorders or pathologies related thereof, PEP6 is a peptide of general formula AA²⁶-AA²⁷-AA²⁸-AA²⁹-PEP4; wherein PEP4 is selected from the group consisting of VVE, VVR, VRS, VKS, VVK, QHN, EEH and EDH; wherein AA²⁶ is absent or selected from the group consisting of AA^{III} amino acids, preferably is absent or E; wherein AA²⁷ and AA²⁸ are independently selected from the group consisting of AA^{III} and AA^{V} amino acids, preferably AA²⁷ is selected from the group consisting of D, N, E, M and G, preferably AA²⁸ is M or I; wherein AA²⁹ is absent or selected from the group consisting of AA^{II} amino acids, preferably is absent or S. In one particular example, PEP6 is selected from the group consisting of DMVVE (SEQ ID NO: 84161), EMVVE (SEQ ID NO: 84175), NMVVR (SEQ ID NO: 84275), NMVVK (SEQ ID NO: 84274), EGMSVAE (SEQ ID NO: 84411), GMAVS (SEQ ID NO: 84194), GMVVD (SEQ ID NO: 84204) and MIVEE (SEQ ID NO: 84241).

[0738] In certain embodiments useful for inducing differentiation of mensenchymal or progenitor stem cells from the reproduction system lineage, enhancing female fertility, treating, preventing, decreasing or suppressing female infertility or any diseases, conditions, disorders or pathologies related thereof, PEP7 is an amino acid or a peptide with between two and seven amino acids of general formula AA¹-AA²-AA³-AA⁴-AA⁵-AA⁶-AA⁷ (SEQ ID NO: 84948); wherein AA¹, AA², AA³, AA⁴, and AA⁵ are independently absent or AA^{I} as defined herein; wherein AA⁶ is absent or selected from the group consisting of S, T, C, E, Q, P and R, preferably is selected from the group consisting of C, S and T; wherein AA⁷ is absent or is selected from the group consisting of S, T, C, E, Q, P and R, preferably is selected from the group consisting of S and C; and wherein at least one of AA¹, AA², AA³, AA⁴, AA⁵, AA⁶ or AA⁷ is not absent. In one particular example, PEP7 is selected from the group consisting of KIPKAXX (SEQ ID NO: 84424), SIPKAXX (SEQ ID NO: 84429), HVTKPTX (SEQ ID NO: 84422), YVPKPXX (SEQ ID NO: 84433), TVPKPXX (SEQ ID NO: 84432), AVPKAXX (SEQ ID NO: 84404), KVGKAXX (SEQ ID NO: 84425), KASKAXX (SEQ ID NO: 84423), GSAGPXX (SEQ ID NO: 84420), AAPASXX (SEQ ID NO: 84401), STPPTXX (SEQ ID NO: 84431), HVPKPXX (SEQ ID NO: 84421) and RVPSTXX (SEQ ID NO: 84428).

[0739] In certain embodiments useful for inducing differentiation of mensenchymal or progenitor stem cells from the reproduction system lineage, enhancing female fertility, treating, preventing, decreasing or suppressing female infertility or any diseases, conditions, disorders or pathologies related thereof, PEP8 is an amino acid or a peptide with between two and six amino acids of general formula AA³³-AA³⁴-AA³⁵-AA³⁶-AA³⁷-AA³⁸ (SEQ ID NO: 84949); wherein AA³³ is absent or is selected from the group consisting of AA^{I} amino acids at the exception of AA^{VI} amino acids, in particular is absent or is selected from the group consisting of G, S, A, E and R; AA³⁴ is absent or is selected from the group consisting of AA^{III} and AA^{IV} amino acids, in particular is absent; wherein AA³⁵ is absent or is selected from the group consisting of AA^{II} amino acids, preferably is S or C; wherein AA³⁶ is absent or is selected from the group consisting of AA^{III} and AA^{IV} amino acids, in particular is G; wherein AA³⁷ is absent or is selected from the group consisting of AA^{II} amino acids, preferably is S or C; wherein AA³⁸ is absent or is selected from the group consisting of AA^{I}, in particular is selected from the group consisting of R, H, S and L; and wherein at least one of AA³³, AA³⁴, AA³⁵, AA³⁶, AA³⁷ or AA³⁸ is not absent. In one particular example, PEP8 is selected from the group consisting of GXGXR (SEQ ID NO: 84208), SXGXH (SEQ ID NO: 84304), AXGXH (SEQ ID NO: 84147), XGXR (SEQ ID NO: 84123), EXGXR (SEQ ID NO: 84179), RXGXS (SEQ ID NO: 84291), AXGXR (SEQ ID NO: 84148), SXGXR (SEQ ID NO: 84305) and XGXL (SEQ ID NO: 84122).

[0740] In certain embodiments useful for inducing differentiation of mensenchymal or progenitor stem cells from the reproduction system lineage, enhancing female fertility, treating, preventing, decreasing or suppressing female infertility or any diseases, conditions, disorders or pathologies related thereof, PEP9 is a peptide of general formula AA¹-AA²-AA³-AA⁴-AA⁵-AA⁶-AA⁷-PEP5; wherein PEP5 is a peptide of formula PEP3-AA¹¹-AA¹²; wherein PEP3 is selected from the group consisting of VPT, APT, TPT, VPA and APV; wherein AA¹¹ is selected from the group consisting of E, K, Q, R, A, D, G and H, in particular is selected from the group consisting of E, K, Q and R; wherein AA¹² is selected from the group consisting of L, M, T, E, Q and H, in particular is selected from the group consisting of L, M and T; wherein AA¹, AA², AA³, AA⁴, and AA⁵ are independently absent or AA^{I} as defined herein; wherein AA⁶ is absent or selected from the group consisting of S, T, C, E, Q, P and R, preferably is selected from the group consisting of C, S and T; wherein AA⁷ is selected from the group consisting of S, T, C, E, Q, P and R, preferably is selected from the group consisting of S and C. In one particular example, PEP9 is selected from the group consisting of KIPKAXXVPTEL (SEQ ID NO: 84770), SIPKAXXVPTEL (SEQ ID NO: 84830), HVTKPTXAPTKL (SEQ ID NO: 84742), YVPKPXXAPTKL (SEQ ID NO: 84864), TVPKPXXAPTQL (SEQ ID NO: 84854), AVPKAXXAPTKL (SEQ ID NO: 84704), KVGKAXXVPTKL (SEQ ID NO: 84780), KASKAXXVPTKL (SEQ ID NO: 84760), GSAGPXXTPTKM (SEQ ID NO: 84726), AAPASXXVPARL (SEQ ID NO: 84677), STPPTXXVPTRL (SEQ ID NO: 84850), HVPKPXXAPTKL (SEQ ID NO: 84734) and RVPSTXXAPVKT (SEQ ID NO: 84815).

[0741] In certain embodiments useful for inducing differentiation of mensenchymal or progenitor stem cells from the reproduction system lineage, enhancing female fertility, treating, preventing, decreasing or suppressing female infertility or any diseases, conditions, disorders or pathologies related thereof, PEP10 is a peptide of general formula PEP6-AA³³-AA³⁴-AA³⁵-AA³⁶-AA³⁷-AA³⁸; wherein PEP6 is a peptide of formula AA²⁶-AA²⁷-AA²⁸-AA²⁹-PEP4; wherein PEP4 is selected from the group consisting of VVE, VVR, VVK, VAE, AVS, VVD and VEE; wherein AA²⁶ is absent or selected from the group consisting of AA^{III} amino acids, preferably is absent or E; wherein AA²⁷ and AA²⁸ are independently selected from the group consisting of AA^{III} and AA^{V} amino acids, preferably AA²⁷ is selected from the group consisting of D, N, E, M and G, preferably AA²⁸ is M or I; wherein AA²⁹ is absent or selected from the group consisting of AA^{II} amino acids, preferably is absent or is S; wherein AA³³ is absent or is selected from the group consisting of AA^{I} amino acids at the exception of AA^{VI} amino acids, in particular is absent or is selected from the group consisting of G, S, A, E and R; AA³⁴ is absent or is selected from the group consisting of AA^{III} and AA^{IV} amino acids, in particular is absent; wherein AA³⁵ is absent or is selected from the group consisting of AA^{II} amino acids, preferably is S or C; wherein AA³⁶ is absent or is selected from the group consisting of AA^{III} and AA^{IV} amino acids, in particular is G; wherein AA³⁷ is absent or is selected from the group consisting of AA^{II} amino acids, preferably is S or C; wherein AA³⁸ is absent or is selected from the group consisting of AA^{I}, in particular is selected from the group consisting of R, H, S and L. In one particular example, PEP10 is selected from the group consisting of DMVVEGXGXR (SEQ ID NO: 84510), EMVVEGXGXR (SEQ ID NO: 84529), NMVVRSXGXH (SEQ ID NO: 84629), NMVVRSXGXH (SEQ ID NO: 84629), NMVVRAXGXH (SEQ ID NO: 84627), NMVVKAXGXH (SEQ ID NO: 84624), EGMSVAEXGXR (SEQ ID NO: 84636), GMAVSEXGXR (SEQ ID NO: 84546), GMVVDRXGXS (SEQ ID NO: 84567), DMVVEAXGXR (SEQ ID NO: 84509), DMVVESXGXR (SEQ ID NO: 84511), NMVVRSXGXH (SEQ ID NO: 84629) and MIVEEXGXL (SEQ ID NO: 84448).

[0742] In certain embodiments useful for inducing differentiation of mensenchymal or progenitor stem cells from the reproduction system lineage, enhancing female fertility, treating, preventing, decreasing or suppressing female infertility or any diseases, conditions, disorders or pathologies related thereof, PEP12 is a peptide of general formula PEP1-AA¹⁷-PEP11; wherein AA¹⁷ is selected from the group consisting of G, A, V, L, I, P, F, M, W, T and S (in particular is selected from the group consisting of M, I, L, V and T); wherein PEP1 is NAIS (SEQ ID NO: 84113).

[0743] In certain embodiments useful for inducing differentiation of mensenchymal or progenitor stem cells from the reproduction system lineage, enhancing female fertility, treating, preventing, decreasing or suppressing female infertility or any diseases, conditions, disorders or pathologies related thereof, PEP11 is a peptide with 3 amino acids of general formula AA¹⁸-AA¹⁹-AA²⁰; wherein AA¹⁸ is selected from the group consisting of L, V, Q, A and R, in particular is L; wherein AA¹⁹ is selected from the group consisting of F, W, H, Y, I and K, in particular is Y; wherein AA²⁰ is selected from the group consisting of L, F, Y, K, I, V and M, in particular is F. In one particular example, PEP11 is LYF.

[0744] The definitions of “PEP” pairs, quadruplets, hexaplets and heptuplet e.g. PEP1:PEP2, PEP12:PEP2, or PEP7:PEP5:PEP12:LINKER:PEP2:PEP6:PEP8, useful for inducing differentiation of mensenchymal or progenitor stem cells from the reproduction system lineage, enhancing female fertility, treating, preventing, decreasing or suppressing female infertility or any diseases, conditions, disorders or pathologies related thereof, are as already defined herein to the extent that PEP1 to PEP12 are particularly useful for these applications. For instances:

[0745] In certain embodiments useful for inducing differentiation of mensenchymal or progenitor stem cells from the reproduction system lineage, enhancing female fertility, treating, preventing, decreasing or suppressing female infertility or any diseases, conditions, disorders or pathologies related thereof, PEP3 is selected from the group consisting of VPT, APT, TPT, VPA and APV; PEP4 is selected from the group consisting of VVE, VVR, VVK, VAE, AVS, VVD and VEE; and wherein the pair PEP3:PEP4 is selected from the group consisting of VPT:VVE, APT:VVR, APT:VVK, VPT:VAE, VPT:AVS, TPT:VVD, VPA:VVE and APV:VEE.

[0746] In certain embodiments useful for inducing differentiation of mensenchymal or progenitor stem cells from the reproduction system lineage, enhancing female fertility, treating, preventing, decreasing or suppressing female infertility or any diseases, conditions, disorders or pathologies related thereof, PEP3 is selected from the group consisting of VPTEL (SEQ ID NO: 84378), APTKL (SEQ ID NO: 84131), APTQL (SEQ ID NO: 84134), VPTKL (SEQ ID NO: 84381), TPTKM (SEQ ID NO: 84327), VPARL (SEQ ID NO: 84352), VPTRL (SEQ ID NO: 84385) and APVKT (SEQ ID NO: 84144); PEP6 is selected from the group consisting of DMVVE (SEQ ID NO: 84161), EMVVE (SEQ ID NO: 84175), NMVVR (SEQ ID NO: 84275), NMVVK (SEQ ID NO: 84274), EGMSVAE (SEQ ID NO: 84411), GMAVS (SEQ ID NO: 84194), GMVVD (SEQ ID NO: 84204) and MIVEE (SEQ ID NO: 84241); and wherein the pair PEP5:PEP6 is selected from the group consisting of VPTEL (SEQ ID NO: 84378):DMVVE (SEQ ID NO: 84161), VPTEL (SEQ ID NO: 84378):EMVVE (SEQ ID NO: 84175), APTKL (SEQ ID NO: 84131):NMVVR (SEQ ID NO: 84275), APTQL (SEQ ID NO: 84134):NMVVR (SEQ ID NO: 84275), APTKL (SEQ ID NO: 84131):NMVVK (SEQ ID NO: 84274), VPTKL (SEQ ID NO: 84381):EGMSVAE (SEQ ID NO: 84411), VPTKL (SEQ ID NO: 84381):GMAVS (SEQ ID NO: 84194), TPTKM (SEQ ID NO: 84327):GMVVD (SEQ ID NO: 84204), VPARL (SEQ ID NO: 84352):DMVVE (SEQ ID NO: 84161), VPTRL (SEQ ID NO: 84385):DMVVE (SEQ ID NO: 84161) and APVKT (SEQ ID NO: 84144):MIVEE (SEQ ID NO: 84241).

[0747] In certain embodiments useful for inducing differentiation of mensenchymal or progenitor stem cells from the reproduction system lineage, enhancing female fertility, treating, preventing, decreasing or suppressing female infertility or any diseases, conditions, disorders or pathologies related thereof, PEP7 is selected from the group consisting of KIPKAXX (SEQ ID NO: 84424), SIPKAXX (SEQ ID NO: 84429), HVTKPTX (SEQ ID NO: 84422), YVPKPXX (SEQ ID NO: 84433), TVPKPXX (SEQ ID NO: 84432), AVPKAXX (SEQ ID NO: 84404), KVGKAXX (SEQ ID NO: 84425), KASKAXX (SEQ ID NO: 84423), GSAGPXX (SEQ ID NO: 84420), AAPASXX (SEQ ID NO: 84401), STPPTXX (SEQ ID NO: 84431), HVPKPXX (SEQ ID NO: 84421) and RVPSTXX (SEQ ID NO: 84428); wherein PEP8 is selected from the group consisting of GXGXR (SEQ ID NO: 84208), SXGXH (SEQ ID NO: 84304), AXGXH (SEQ ID NO: 84147), XGXR (SEQ ID NO: 84123), EXGXR (SEQ ID NO: 84179), RXGXS (SEQ ID NO: 84291), AXGXR (SEQ ID NO: 84148), SXGXR (SEQ ID NO: 84305) and XGXL (SEQ ID NO: 84122); and wherein the pair PEP7:PEP8 is selected from the group consisting of KIPKAXX (SEQ ID NO: 84424):GXGXR (SEQ ID NO: 84208), SIPKAXX (SEQ ID NO: 84429):GXGXR (SEQ ID NO: 84208), HVTKPTX (SEQ ID NO: 84422):SXGXH (SEQ ID NO: 84304), YVPKPXX (SEQ ID NO: 84433):SXGXH (SEQ ID NO: 84304), TVPKPXX (SEQ ID NO: 84432):AXGXH (SEQ ID NO: 84147), AVPKAXX (SEQ ID NO: 84404):AXGXH (SEQ ID NO: 84147), KVGKAXX (SEQ ID NO: 84425):XGXR (SEQ ID NO: 84123), KASKAXX (SEQ ID NO: 84423):EXGXR (SEQ ID NO: 84179), GSAGPXX (SEQ ID NO: 84420):RXGXS (SEQ ID NO: 84291), AAPASXX (SEQ ID NO: 84401):AXGXR (SEQ ID NO: 84148), STPPTXX (SEQ ID NO: 84431):SXGXR (SEQ ID NO: 84305), HVPKPXX (SEQ ID NO: 84421):SXGXH (SEQ ID NO: 84304) and RVPSTXX (SEQ ID NO: 84428):XGXL (SEQ ID NO: 84122).

[0748] In certain embodiments useful for inducing differentiation of mensenchymal or progenitor stem cells from the reproduction system lineage, enhancing female fertility, treating, preventing, decreasing or suppressing female infertility or any diseases, conditions, disorders or pathologies related thereof, PEP9 is selected from the group consisting of KIPKAXXVPTEL (SEQ ID NO: 84770), SIPKAXXVPTEL (SEQ ID NO: 84830), HVTKPTXAPTKL (SEQ ID NO: 84742), YVPKPXXAPTKL (SEQ ID NO: 84864), TVPKPXXAPTQL (SEQ ID NO: 84854), AVPKAXXAPTKL (SEQ ID NO: 84704), KVGKAXXVPTKL (SEQ ID NO: 84780), KASKAXXVPTKL (SEQ ID NO: 84760), GSAGPXXTPTKM (SEQ ID NO: 84726), AAPASXXVPARL (SEQ ID NO: 84677), STPPTXXVPTRL (SEQ ID NO: 84850), HVPKPXXAPTKL (SEQ ID NO: 84734) and RVPSTXXAPVKT (SEQ ID NO: 84815); PEP10 is selected from the group consisting of DMVVEGXGXR (SEQ ID NO: 84510), EMVVEGXGXR (SEQ ID NO: 84529), NMVVRSXGXH (SEQ ID NO: 84629), NMVVRSXGXH (SEQ ID NO: 84629), NMVVRAXGXH (SEQ ID NO: 84627), NMVVKAXGXH (SEQ ID NO: 84624), EGMSVAEXGXR (SEQ ID NO: 84636), GMAVSEXGXR (SEQ ID NO: 84546), GMVVDRXGXS (SEQ ID NO: 84567), DMVVEAXGXR (SEQ ID NO: 84509), DMVVESXGXR (SEQ ID NO: 84511), NMVVRSXGXH (SEQ ID NO: 84629) and MIVEEXGXL (SEQ ID NO: 84448); and wherein the pair PEP9:PEP10 is selected from the group consisting of KIPKAXXVPTEL (SEQ ID NO: 84770):DMVVEGXGXR (SEQ ID NO: 84510), SIPKAXXVPTEL (SEQ ID NO: 84830):EMVVEGXGXR (SEQ ID NO: 84529), HVTKPTXAPTKL (SEQ ID NO: 84742):NMVVRSXGXH (SEQ ID NO: 84629), YVPKPXXAPTKL (SEQ ID NO: 84864):NMVVRSXGXH (SEQ ID NO: 84629), TVPKPXXAPTQL (SEQ ID NO: 84854):NMVVRAXGXH (SEQ ID NO: 84627), AVPKAXXAPTKL (SEQ ID NO: 84704):NMVVKAXGXH (SEQ ID NO: 84624), KVGKAXXVPTKL (SEQ ID NO: 84780):EGMSVAEXGXR (SEQ ID NO: 84636), KASKAXXVPTKL (SEQ ID NO: 84760):GMAVSEXGXR (SEQ ID NO: 84546), GSAGPXXTPTKM (SEQ ID NO: 84726):GMVVDRXGXS (SEQ ID NO: 84567), AAPASXXVPARL (SEQ ID NO: 84677):DMVVEAXGXR (SEQ ID NO: 84509), STPPTXXVPTRL (SEQ ID NO: 84850):DMVVESXGXR (SEQ ID NO: 84511), HVPKPXXAPTKL (SEQ ID NO: 84734):NMVVRSXGXH (SEQ ID NO: 84629) and RVPSTXXAPVKT (SEQ ID NO: 84815):MIVEEXGXL (SEQ ID NO: 84448).

[0749] In certain embodiments useful for inducing differentiation of mensenchymal or progenitor stem cells from the reproduction system lineage, enhancing female fertility, treating, preventing, decreasing or suppressing female infertility or any diseases, conditions, disorders or pathologies related thereof, PEP5 is selected from the group consisting of VPTEL (SEQ ID NO: 84378), APTKL (SEQ ID NO: 84131), APTQL (SEQ ID NO: 84134), VPTKL (SEQ ID NO: 84381), TPTKM (SEQ ID NO: 84327), VPARL (SEQ ID NO: 84352), VPTRL (SEQ ID NO: 84385) and APVKT (SEQ ID NO: 84144); PEP6 is selected from the group consisting of DMVVE (SEQ ID NO: 84161), EMVVE (SEQ ID NO: 84175), NMVVR (SEQ ID NO: 84275), NMVVK (SEQ ID NO: 84274), EGMSVAE (SEQ ID NO: 84411), GMAVS (SEQ ID NO: 84194), GMVVD (SEQ ID NO: 84204) and MIVEE (SEQ ID NO: 84241); and wherein the pair PEP5:PEP6 is selected from the group consisting of VPTEL (SEQ ID NO: 84378):DMVVE (SEQ ID NO: 84161), VPTEL (SEQ ID NO: 84378):EMVVE (SEQ ID NO: 84175), APTKL (SEQ ID NO: 84131):NMVVR (SEQ ID NO: 84275), APTQL (SEQ ID NO: 84134):NMVVR (SEQ ID NO: 84275), APTKL (SEQ ID NO: 84131):NMVVK (SEQ ID NO: 84274), VPTKL (SEQ ID NO: 84381):EGMSVAE (SEQ ID NO: 84411), VPTKL (SEQ ID NO: 84381):GMAVS (SEQ ID NO: 84194), TPTKM (SEQ ID NO: 84327):GMVVD (SEQ ID NO: 84204), VPARL (SEQ ID NO: 84352):DMVVE (SEQ ID NO: 84161), VPTRL (SEQ ID NO: 84385):DMVVE (SEQ ID NO: 84161) and APVKT (SEQ ID NO: 84144):MIVEE (SEQ ID NO: 84241); and wherein the pair PEP5:PEP6 is not APTKL (SEQ ID NO: 84131):NMVVR (SEQ ID NO: 84275) when PEP1 is NAIS (SEQ ID NO: 84113) and PEP2 is LKKYR (SEQ ID NO: 84229).

[0750] In certain embodiments useful for inducing differentiation of mensenchymal or progenitor stem cells from the reproduction system lineage, enhancing female fertility, treating, preventing, decreasing or suppressing female infertility or any diseases, conditions, disorders or pathologies related thereof, PEP9 is selected from the group consisting of KIPKAXXVPTEL (SEQ ID NO: 84770), SIPKAXXVPTEL (SEQ ID NO: 84830), HVTKPTXAPTKL (SEQ ID NO: 84742), YVPKPXXAPTKL (SEQ ID NO: 84864), TVPKPXXAPTQL (SEQ ID NO: 84854), AVPKAXXAPTKL (SEQ ID NO: 84704), KVGKAXXVPTKL (SEQ ID NO: 84780), KASKAXXVPTKL (SEQ ID NO: 84760), GSAGPXXTPTKM (SEQ ID NO: 84726), AAPASXXVPARL (SEQ ID NO: 84677), STPPTXXVPTRL (SEQ ID NO: 84850), HVPKPXXAPTKL (SEQ ID NO: 84734) and RVPSTXXAPVKT (SEQ ID NO: 84815); PEP10 is selected from the group consisting of DMVVEGXGXR (SEQ ID NO: 84510), EMVVEGXGXR (SEQ ID NO: 84529), NMVVRSXGXH (SEQ ID NO: 84629), NMVVRSXGXH (SEQ ID NO: 84629), NMVVRAXGXH (SEQ ID NO: 84627), NMVVKAXGXH (SEQ ID NO: 84624), EGMSVAEXGXR (SEQ ID NO: 84636), GMAVSEXGXR (SEQ ID NO: 84546), GMVVDRXGXS (SEQ ID NO: 84567), DMVVEAXGXR (SEQ ID NO: 84509), DMVVESXGXR (SEQ ID NO: 84511), NMVVRSXGXH (SEQ ID NO: 84629) and MIVEEXGXL (SEQ ID NO: 84448); and wherein the pair PEP9:PEP10 is selected from the group consisting of KIPKAXXVPTEL (SEQ ID NO: 84770):DMVVEGXGXR (SEQ ID NO: 84510), SIPKAXXVPTEL (SEQ ID NO: 84830):EMVVEGXGXR (SEQ ID NO: 84529), HVTKPTXAPTKL (SEQ ID NO: 84742):NMVVRSXGXH (SEQ ID NO: 84629), YVPKPXXAPTKL (SEQ ID NO: 84864):NMVVRSXGXH (SEQ ID NO: 84629), TVPKPXXAPTQL (SEQ ID NO: 84854):NMVVRAXGXH (SEQ ID NO: 84627), AVPKAXXAPTKL (SEQ ID NO: 84704):NMVVKAXGXH (SEQ ID NO: 84624), KVGKAXXVPTKL (SEQ ID NO: 84780):EGMSVAEXGXR (SEQ ID NO: 84636), KASKAXXVPTKL (SEQ ID NO: 84760):GMAVSEXGXR (SEQ ID NO: 84546), GSAGPXXTPTKM (SEQ ID NO: 84726):GMVVDRXGXS (SEQ ID NO: 84567), AAPASXXVPARL (SEQ ID NO: 84677):DMVVEAXGXR (SEQ ID NO: 84509), STPPTXXVPTRL (SEQ ID NO: 84850):DMVVESXGXR (SEQ ID NO: 84511), HVPKPXXAPTKL (SEQ ID NO: 84734):NMVVRSXGXH (SEQ ID NO: 84629) and RVPSTXXAPVKT (SEQ ID NO: 84815):MIVEEXGXL (SEQ ID NO: 84448); and wherein the pair PEP9:PEP10 is not HVPKPXXAPTKL (SEQ ID NO: 84734):NMVVRSXGXH (SEQ ID NO: 84629) when PEP1 is NAIS (SEQ ID NO: 84113) and PEP2 is LKKYR (SEQ ID NO: 84229).

[0751] In certain embodiments useful for inducing differentiation of mensenchymal or progenitor stem cells from the reproduction system lineage, enhancing female fertility, treating, preventing, decreasing or suppressing female infertility or any diseases, conditions, disorders or pathologies related thereof, PEP1 is NAIS (SEQ ID NO: 84113) and PEP11 is LYF.

[0752] In one aspect, the present disclosure provides a GFR-binding compound, wherein said GFR-binding compound is a peptide, a variant or analog thereof, or a peptidomimetic as defined herein, with between 20 and 60 (in particular between 20 and 50, and more particularly, between 20 and 45) amino acids, comprising a peptide with four amino acids (PEP1) or a peptide with eight amino acids (PEP12), a peptide with five amino acids (PEP2), and optionally a pair of peptides selected form the group consisting of PEP3:PEP4, PEP3:PEP6, PEP3:PEP10, PEP5:PEP4, PEP9:PEP4, PEP5:PEP6, PEP5:PEP10, PEP9:PEP6 and PEP9:PEP10; wherein said GFR-binding compound does not comprise the pair of peptides APTKL (SEQ ID NO: 84131):NMVVR (SEQ ID NO: 84275) when PEP1 is NAIS (SEQ ID NO: 84113) and PEP2 is LKKYR (SEQ ID NO: 84229); and wherein the RMSD is 2.45 Å or less.

[0753] In one aspect, the present disclosure provides a GFR-binding compound, wherein said GFR-binding compound is a peptide, a variant or analog thereof, or a peptidomimetic as defined herein, with between 20 and 60 (in particular between 20 and 50, and more particularly, between 20 and 45) amino acids, comprising a peptide with four amino acids (PEP1) or a peptide with eight amino acids (PEP12), a peptide with five amino acids (PEP2), and optionally a pair of peptides selected form the group consisting of PEP3:PEP4, PEP3:PEP6, PEP3:PEP10, PEP5:PEP4, PEP9:PEP4, PEP5:PEP6, PEP5:PEP10, PEP9:PEP6 and PEP9:PEP10; wherein said GFR-binding compound does not comprise the pair of peptides HVPKPXXAPTKL (SEQ ID NO: 84734):NMVVRSXGXH (SEQ ID NO: 84629) when PEP1 is NAIS (SEQ ID NO: 84113) and PEP2 is LKKYR (SEQ ID NO: 84229); and wherein the RMSD is 2.45 Å or less.

[0754] In certain embodiments useful for inducing differentiation of mensenchymal or progenitor stem cells from the reproduction system lineage, enhancing female fertility, treating, preventing, decreasing or suppressing female infertility or any diseases, conditions, disorders or pathologies related thereof, said GFR-binding compound is a synthetic molecule as defined herein in the definition section.

[0755] In certain embodiments useful for inducing differentiation of mensenchymal or progenitor stem cells from the reproduction system lineage, enhancing female fertility, treating, preventing, decreasing or suppressing female infertility or any diseases, conditions, disorders or pathologies related thereof, said GFR-binding compound is a synthetic peptide, or a variant or analog thereof, or a peptidomimetic.

### Lung

[0756] Certain embodiments of the invention are particularly useful for inducing differentiation of mensenchymal or progenitor stem cells from the lung cell lineage, regenerating lung tissues, and protecting patients from lung tissue degeneration-related diseases, conditions, disorders or pathologies.

[0757] In certain embodiments useful for inducing differentiation of mensenchymal or progenitor stem cells from the lung cell lineage, regenerating lung tissues, and protecting patients from lung tissue degeneration-related diseases, conditions, disorders or pathologies, PEP1 is selected from the group consisting of NAIS (SEQ ID NO: 84113), SATS (SEQ ID NO: 84117), SPIS (SEQ ID NO: 84120), EPIS (SEQ ID NO: 84109) and SPIN (SEQ ID NO: 84119).

[0758] In certain embodiments useful for inducing differentiation of mensenchymal or progenitor stem cells from the lung cell lineage, regenerating lung tissues, and protecting patients from lung tissue degeneration-related diseases, conditions, disorders or pathologies, PEP2 is selected from the group consisting of LKKYR (SEQ ID NO: 84229), LRKHR (SEQ ID NO: 84233), LKYHY (SEQ ID NO: 84232), KFKYE (SEQ ID NO: 84211) and YGKIP (SEQ ID NO: 84397).

[0759] In certain embodiments useful for inducing differentiation of mensenchymal or progenitor stem cells from the lung cell lineage, regenerating lung tissues, and protecting patients from lung tissue degeneration-related diseases, conditions, disorders or pathologies, PEP3 is selected from the group consisting of VPT, VPE, APT, TPT, VPA, APV, VPQ and VSQ.

[0760] In certain embodiments useful for inducing differentiation of mensenchymal or progenitor stem cells from the lung cell lineage, regenerating lung tissues, and protecting patients from lung tissue degeneration-related diseases, conditions, disorders or pathologies, PEP4 is selected from the group consisting of VVE, TVE, VVR, VVK, VAE, AVS, VVD, VEE, VRS and VKS.

[0761] In certain embodiments useful for inducing differentiation of mensenchymal or progenitor stem cells from the lung cell lineage, regenerating lung tissues, and protecting patients from lung tissue degeneration-related diseases, conditions, disorders or pathologies, PEP5 is a peptide of general formula PEP3-AA¹¹-AA¹²; wherein PEP3 is selected from the group consisting of VPT, VPE, APT, TPT, VPA, APV, VPQ and VSQ; wherein AA¹¹ is selected from the group consisting of E, K, Q, R, A, D, G and H, in particular is selected from the group consisting of E, K, Q, R, A and D; wherein AA¹² is selected from the group consisting of L, M, T, E, Q and H, in particular selected from the group consisting of L, M and T. In one particular example, PEP5 is selected from the group consisting of VPTEL (SEQ ID NO: 84378), VPEKM (SEQ ID NO: 84360), APTKL (SEQ ID NO: 84131), APTQL (SEQ ID NO: 84134), VPTKL (SEQ ID NO: 84381), TPTKM (SEQ ID NO: 84327), VPARL (SEQ ID NO: 84352), VPTRL (SEQ ID NO: 84385), APVKT (SEQ ID NO: 84144), VPQAL (SEQ ID NO: 84364), VSQDL (SEQ ID NO: 84387) and VPQDL (SEQ ID NO: 84365).

[0762] In certain embodiments useful for inducing differentiation of mensenchymal or progenitor stem cells from the lung cell lineage, regenerating lung tissues, and protecting patients from lung tissue degeneration-related diseases, conditions, disorders or pathologies, PEP6 is a peptide of general formula AA²⁶-AA²⁷-AA²⁸-AA²⁹-PEP4; wherein PEP4 is selected from the group consisting of VVE, TVE, VVR, VVK, VAE, AVS, VVD, VEE, VRS and VKS; wherein AA²⁶ is absent or selected from the group consisting of AA^{III} amino acids, preferably is absent or E; wherein AA²⁷ and AA²⁸ are independently selected from the group consisting of AA^{III} and AA^{V} amino acids, preferably AA²⁷ is selected from the group consisting of D, E, N, G and M, preferably AA²⁸ is selected from the group consisting of M, I and V; wherein AA²⁹ is absent or selected from the group consisting of AA^{II} amino acids, preferably absent or S. In one particular example, PEP6 is selected from the group consisting of DMVVE (SEQ ID NO: 84161), NMTVE (SEQ ID NO: 84267), EMVVE (SEQ ID NO: 84175), NMVVR (SEQ ID NO: 84275), NMVVK (SEQ ID NO: 84274), EGMSVAE (SEQ ID NO: 84411), GMAVS (SEQ ID NO: 84194), GMVVD (SEQ ID NO: 84204), DMVVE (SEQ ID NO: 84161), MIVEE (SEQ ID NO: 84241), MIVRS (SEQ ID NO: 84243), MIVKS (SEQ ID NO: 84242) and MVVKS (SEQ ID NO: 84256).

[0763] In certain embodiments useful for inducing differentiation of mensenchymal or progenitor stem cells from the lung cell lineage, regenerating lung tissues, and protecting patients from lung tissue degeneration-related diseases, conditions, disorders or pathologies, PEP7 is an amino acid or a peptide with between two and seven amino acids of general formula AA¹-AA²-AA³-AA⁴-AA⁵-AA⁶-AA⁷ (SEQ ID NO: 84948); wherein AA¹, AA², AA³, AA⁴, and AA⁵ are independently absent or AA^{I} as defined herein; wherein AA⁶ is absent or selected from the group consisting of S, T, C, E, Q, P and R, preferably is selected from the group consisting of C, S and T; wherein AA⁷ is absent or is selected from the group consisting of S, T, C, E, Q, P and R, preferably is C or S; and wherein at least one of AA¹, AA², AA³, AA⁴, AA⁵, AA⁶ or AA⁷ is not absent. In one particular example, PEP7 is selected from the group consisting of KIPKAXX (SEQ ID NO: 84424), GIPEPXX (SEQ ID NO: 84419), SIPKAXX (SEQ ID NO: 84429), HVTKPTX (SEQ ID NO: 84422), YVPKPXX (SEQ ID NO: 84433), TVPKPXX (SEQ ID NO: 84432), AVPKAXX (SEQ ID NO: 84404), KVGKAXX (SEQ ID NO: 84425), KASKAXX (SEQ ID NO: 84423), GSAGPXX (SEQ ID NO: 84420), AAPASXX (SEQ ID NO: 84401), STPPTXX (SEQ ID NO: 84431), HVPKPXX (SEQ ID NO: 84421), RVPSTXX (SEQ ID NO: 84428), ASAAPXX (SEQ ID NO: 84402) and ASASPXX (SEQ ID NO: 84403).

[0764] In certain embodiments useful for inducing differentiation of mensenchymal or progenitor stem cells from the lung cell lineage, regenerating lung tissues, and protecting patients from lung tissue degeneration-related diseases, conditions, disorders or pathologies, PEP8 is an amino acid or a peptide with between two and six amino acids of general formula AA³³-AA³⁴-AA³⁵-AA³⁶-AA³⁷-AA³⁸ (SEQ ID NO: 84949); wherein AA³³ is absent or is selected from the group consisting of AA^{I} amino acids at the exception of AA^{VI} amino acids; AA³⁴ is absent or is selected from the group consisting of AA^{III} and AA^{IV} amino acids; wherein AA³⁵ is absent or is selected from the group consisting of AA^{II} amino acids, preferably is S or C; wherein AA³⁶ is absent or is selected from the group consisting of AA^{III} and AA^{IV} amino acids; wherein AA³⁷ is absent or is selected from the group consisting of AA^{II} amino acids, preferably is S or C; wherein AA³⁸ is absent or is selected from the group consisting of AA^{I}; and wherein at least one of AA³³, AA³⁴, AA³⁵, AA³⁶, AA³⁷ or AA³⁸ is not absent. In one particular example, PEP8 is selected from the group consisting of GXGXR (SEQ ID NO: 84208), SXAXR (SEQ ID NO: 84303), SXGXH (SEQ ID NO: 84304), AXGXH (SEQ ID NO: 84147), XGXR (SEQ ID NO: 84123), EXGXR (SEQ ID NO: 84179), RXGXS (SEQ ID NO: 84291), AXGXR (SEQ ID NO: 84148), SXGXR (SEQ ID NO: 84305), XGXL (SEQ ID NO: 84122) and XKXS (SEQ ID NO: 84124).

[0765] In certain embodiments useful for inducing differentiation of mensenchymal or progenitor stem cells from the lung cell lineage, regenerating lung tissues, and protecting patients from lung tissue degeneration-related diseases, conditions, disorders or pathologies, PEP9 is a peptide of general formula AA¹-AA²-AA³-AA⁴-AA⁵-AA⁶-AA⁷-PEP5; wherein PEP5 is a peptide of formula PEP3-AA¹¹-AA¹²; wherein PEP3 is selected from the group consisting of VPT, VPE, APT, TPT, VPA, APV, VPQ and VSQ; wherein AA¹¹ is selected from the group consisting of E, K, Q, R, A, D, G and H, in particular E, K, Q, R, A and D; wherein AA¹² is selected from the group consisting of L, M, T, E, Q and H, in particular selected from the group consisting of L, M and T; wherein AA¹, AA², AA³, AA⁴, and AA⁵ are independently absent or AA^{I} as defined herein; wherein AA⁶ is absent or selected from the group consisting of S, T, C, E, Q, P and R, preferably is selected from the group consisting of C, S and T; wherein AA⁷ is selected from the group consisting of S, T, C, E, Q, P and R, preferably is C or S. In one particular example, PEP9 is selected from the group consisting of KIPKAXXVPTEL (SEQ ID NO: 84770), GIPEPXXVPEKM (SEQ ID NO: 84718), SIPKAXXVPTEL (SEQ ID NO: 84830), HVTKPTXAPTKL (SEQ ID NO: 84742), YVPKPXXAPTKL (SEQ ID NO: 84864), TVPKPXXAPTQL (SEQ ID NO: 84854), AVPKAXXAPTKL (SEQ ID NO: 84704), KVGKAXXVPTKL (SEQ ID NO: 84780), KASKAXXVPTKL (SEQ ID NO: 84760), GSAGPXXTPTKM (SEQ ID NO: 84726), AAPASXXVPARL (SEQ ID NO: 84677), STPPTXXVPTRL (SEQ ID NO: 84850), HVPKPXXAPTKL (SEQ ID NO: 84734), RVPSTXXAPVKT (SEQ ID NO: 84815), ASAAPXXVPQAL (SEQ ID NO: 84689), ASASPXXVSQDL (SEQ ID NO: 84701) and ASASPXXVPQDL (SEQ ID NO: 84699).

[0766] In certain embodiments useful for inducing differentiation of mensenchymal or progenitor stem cells from the lung cell lineage, regenerating lung tissues, and protecting patients from lung tissue degeneration-related diseases, conditions, disorders or pathologies, PEP10 is a peptide of general formula PEP6-AA³³-AA³⁴-AA³⁵-AA³⁶-AA³⁷-AA³⁸; wherein PEP6 is a peptide of formula AA²⁶-AA²⁷-AA²⁸-AA²⁹-PEP4; wherein PEP4 is selected from the group consisting of VVE, TVE, VVR, VVK, VAE, AVS, VVD, VEE, VRS and VKS; wherein AA²⁶ is absent or selected from the group consisting of AA^{III} amino acids, preferably is absent or E; wherein AA²⁷ and AA²⁸ are independently selected from the group consisting of AA^{III} and AA^{V} amino acids, preferably AA²⁷ is selected from the group consisting of D, E, N, G and M, preferably AA²⁸ is selected from the group consisting of M, I and V; wherein AA²⁹ is absent or selected from the group consisting of AA^{II} amino acids, preferably absent or S; wherein AA³³ is absent or is selected from the group consisting of AA^{I} amino acids at the exception of AA^{VI} amino acids; AA³⁴ is absent or is selected from the group consisting of AA^{III} and AA^{IV} amino acids; wherein AA³⁵ is absent or is selected from the group consisting of AA^{II} amino acids, preferably is S or C; wherein AA³⁶ is absent or is selected from the group consisting of AA^{III} and AA^{IV} amino acids; wherein AA³⁷ is absent or is selected from the group consisting of AA^{II} amino acids, preferably is S or C; wherein AA³⁸ is absent or is selected from the group consisting of AA^{I}. In one particular example, PEP10 is selected from the group consisting of DMVVEGXGXR (SEQ ID NO: 84510), NMTVESXAXR (SEQ ID NO: 84604), EMVVEGXGXR (SEQ ID NO: 84529), NMVVRSXGXH (SEQ ID NO: 84629), NMVVRSXGXH (SEQ ID NO: 84629), NMVVRAXGXH (SEQ ID NO: 84627), NMVVKAXGXH (SEQ ID NO: 84624), EGMSVAEXGXR (SEQ ID NO: 84636), GMAVSEXGXR (SEQ ID NO: 84546), GMVVDRXGXS (SEQ ID NO: 84567), DMVVEAXGXR (SEQ ID NO: 84509), DMVVESXGXR (SEQ ID NO: 84511), NMVVRSXGXH (SEQ ID NO: 84629), MIVEEXGXL (SEQ ID NO: 84448), MIVRSXKXS (SEQ ID NO: 84453), MIVKSXKXS (SEQ ID NO: 84451) and MVVKSXKXS (SEQ ID NO: 84470).

[0767] In certain embodiments useful for inducing differentiation of mensenchymal or progenitor stem cells from the lung cell lineage, regenerating lung tissues, and protecting patients from lung tissue degeneration-related diseases, conditions, disorders or pathologies, PEP12 is a peptide of general formula PEP1-AA¹⁷-PEP11; wherein AA¹⁷ is selected from the group consisting of G, A, V, L, I, P, F, M, W, T and S (in particular is selected from the group consisting of M, I, L, V and T); wherein PEP1 is selected from the group consisting of NAIS (SEQ ID NO: 84113), SATS (SEQ ID NO: 84117), SPIS (SEQ ID NO: 84120), EPIS (SEQ ID NO: 84109) and SPIN (SEQ ID NO: 84119).

[0768] In certain embodiments useful for inducing differentiation of mensenchymal or progenitor stem cells from the lung cell lineage, regenerating lung tissues, and protecting patients from lung tissue degeneration-related diseases, conditions, disorders or pathologies, PEP11 is a peptide with 3 amino acids of general formula AA¹⁸-AA¹⁹-AA²⁰; wherein AA¹⁸ is selected from the group consisting of L, V, Q, A and R, in particular is L; wherein AA¹⁹ is selected from the group consisting of F, W, H and Y (in particular is a polar aromatic amino acid such as Y); wherein AA²⁰ is selected from the group consisting of L, F, Y, K, I, V and M, in particular is selected from the group consisting of L, F, Y, and K. In one particular example, PEP11 is selected from the group consisting of LYF, LYY, LYK and LYL.

[0769] The definitions of “PEP” pairs, quadruplets, hexaplets and heptuplet e.g. PEP1:PEP2, PEP12:PEP2, or PEP7:PEP5:PEP12:LINKER:PEP2:PEP6:PEP8, useful for inducing differentiation of mensenchymal or progenitor stem cells from the lung cell lineage, regenerating lung tissues, and protecting patients from lung tissue degeneration-related diseases, conditions, disorders or pathologies, are as already defined herein to the extent that PEP1 to PEP12 are particularly useful for these applications. For instances:

[0770] In certain embodiments useful for inducing differentiation of mensenchymal or progenitor stem cells from the lung cell lineage, regenerating lung tissues, and protecting patients from lung tissue degeneration-related diseases, conditions, disorders or pathologies, the pair PEP1:PEP2 is selected from the group consisting of NAIS (SEQ ID NO: 84113):LKKYR (SEQ ID NO: 84229), SATS (SEQ ID NO: 84117):LRKHR (SEQ ID NO: 84233), SPIS (SEQ ID NO: 84120):LKYHY (SEQ ID NO: 84232), EPIS (SEQ ID NO: 84109):KFKYE (SEQ ID NO: 84211) and SPIN (SEQ ID NO: 84119):YGKIP (SEQ ID NO: 84397).

[0771] In certain embodiments useful for inducing differentiation of mensenchymal or progenitor stem cells from the lung cell lineage, regenerating lung tissues, and protecting patients from lung tissue degeneration-related diseases, conditions, disorders or pathologies, the pair PEP12:PEP2 is selected from the group consisting of NAIS-AA¹⁷-LYF (SEQ ID NO: 84878):LKKYR (SEQ ID NO: 84229), SATS-AA¹⁷-LYY (SEQ ID NO: 84882):LRKHR (SEQ ID NO: 84233), SPIS-AA¹⁷-LYK (SEQ ID NO: 84887):LKYHY (SEQ ID NO: 84232), EPIS-AA¹⁷-LYL (SEQ ID NO: 84874):KFKYE (SEQ ID NO: 84211) and SPIN-AA¹⁷-LYF (SEQ ID NO: 84884):YGKIP (SEQ ID NO: 84397); wherein AA¹⁷ is selected from the group consisting of G, A, V, L, I, P, F, M, W, T and S (in particular is selected from the group consisting of M, I, V and T).

[0772] In certain embodiments useful for inducing differentiation of mensenchymal or progenitor stem cells from the lung cell lineage, regenerating lung tissues, and protecting patients from lung tissue degeneration-related diseases, conditions, disorders or pathologies, PEP3 is selected from the group consisting of VPT, VPE, APT, TPT, VPA, APV, VPQ and VSQ; PEP4 is selected from the group consisting of VVE, TVE, VVR, VVK, VAE, AVS, VVD, VEE, VRS and VKS; and wherein the pair PEP3:PEP4 is selected from the group consisting of VPT:VVE, VPE:TVE, APT:VVR, APT:VVK, VPT:VAE, VPT:AVS, TPT:VVD, VPA:VVE, APV:VEE, VPQ:VRS, VSQ:VKS and VPQ:VKS.

[0773] In certain embodiments useful for inducing differentiation of mensenchymal or progenitor stem cells from the lung cell lineage, regenerating lung tissues, and protecting patients from lung tissue degeneration-related diseases, conditions, disorders or pathologies, PEP5 is selected from the group consisting of VPTEL (SEQ ID NO: 84378), VPEKM (SEQ ID NO: 84360), APTKL (SEQ ID NO: 84131), APTQL (SEQ ID NO: 84134), VPTKL (SEQ ID NO: 84381), TPTKM (SEQ ID NO: 84327), VPARL (SEQ ID NO: 84352), VPTRL (SEQ ID NO: 84385), APVKT (SEQ ID NO: 84144), VPQAL (SEQ ID NO: 84364), VSQDL (SEQ ID NO: 84387) and VPQDL (SEQ ID NO: 84365); PEP6 is selected from the group consisting of DMVVE (SEQ ID NO: 84161), NMTVE (SEQ ID NO: 84267), EMVVE (SEQ ID NO: 84175), NMVVR (SEQ ID NO: 84275), NMVVK (SEQ ID NO: 84274), EGMSVAE (SEQ ID NO: 84411), GMAVS (SEQ ID NO: 84194), GMVVD (SEQ ID NO: 84204), DMVVE (SEQ ID NO: 84161), MIVEE (SEQ ID NO: 84241), MIVRS (SEQ ID NO: 84243), MIVKS (SEQ ID NO: 84242) and MVVKS (SEQ ID NO: 84256); and wherein the pair PEP5:PEP6 is selected from the group consisting of VPTEL (SEQ ID NO: 84378):DMVVE (SEQ ID NO: 84161), VPEKM (SEQ ID NO: 84360):NMTVE (SEQ ID NO: 84267), VPTEL (SEQ ID NO: 84378):EMVVE (SEQ ID NO: 84175), APTKL (SEQ ID NO: 84131):NMVVR (SEQ ID NO: 84275), APTQL (SEQ ID NO: 84134):NMVVR (SEQ ID NO: 84275), APTKL (SEQ ID NO: 84131):NMVVK (SEQ ID NO: 84274), VPTKL (SEQ ID NO: 84381):EGMSVAE (SEQ ID NO: 84411), VPTKL (SEQ ID NO: 84381):GMAVS (SEQ ID NO: 84194), TPTKM (SEQ ID NO: 84327):GMVVD (SEQ ID NO: 84204), VPARL (SEQ ID NO: 84352):DMVVE (SEQ ID NO: 84161), VPTRL (SEQ ID NO: 84385):DMVVE (SEQ ID NO: 84161), APVKT (SEQ ID NO: 84144):MIVEE (SEQ ID NO: 84241), VPQAL (SEQ ID NO: 84364):MIVRS (SEQ ID NO: 84243), VSQDL (SEQ ID NO: 84387):MIVKS (SEQ ID NO: 84242) and VPQDL (SEQ ID NO: 84365):MVVKS (SEQ ID NO: 84256).

[0774] In certain embodiments useful for inducing differentiation of mensenchymal or progenitor stem cells from the lung cell lineage, regenerating lung tissues, and protecting patients from lung tissue degeneration-related diseases, conditions, disorders or pathologies, PEP7 is selected from the group consisting of KIPKAXX (SEQ ID NO: 84424), GIPEPXX (SEQ ID NO: 84419), SIPKAXX (SEQ ID NO: 84429), HVTKPTX (SEQ ID NO: 84422), YVPKPXX (SEQ ID NO: 84433), TVPKPXX (SEQ ID NO: 84432), AVPKAXX (SEQ ID NO: 84404), KVGKAXX (SEQ ID NO: 84425), KASKAXX (SEQ ID NO: 84423), GSAGPXX (SEQ ID NO: 84420), AAPASXX (SEQ ID NO: 84401), STPPTXX (SEQ ID NO: 84431), HVPKPXX (SEQ ID NO: 84421), RVPSTXX (SEQ ID NO: 84428), ASAAPXX (SEQ ID NO: 84402) and ASASPXX (SEQ ID NO: 84403); wherein PEP8 is selected from the group consisting of GXGXR (SEQ ID NO: 84208), SXAXR (SEQ ID NO: 84303), SXGXH (SEQ ID NO: 84304), AXGXH (SEQ ID NO: 84147), XGXR (SEQ ID NO: 84123), EXGXR (SEQ ID NO: 84179), RXGXS (SEQ ID NO: 84291), AXGXR (SEQ ID NO: 84148), SXGXR (SEQ ID NO: 84305), XGXL (SEQ ID NO: 84122) and XKXS (SEQ ID NO: 84124); and wherein the pair PEP7:PEP8 is selected from the group consisting of KIPKAXX (SEQ ID NO: 84424):GXGXR (SEQ ID NO: 84208), GIPEPXX (SEQ ID NO: 84419):SXAXR (SEQ ID NO: 84303), SIPKAXX (SEQ ID NO: 84429):GXGXR (SEQ ID NO: 84208), HVTKPTX (SEQ ID NO: 84422):SXGXH (SEQ ID NO: 84304), YVPKPXX (SEQ ID NO: 84433):SXGXH (SEQ ID NO: 84304), TVPKPXX (SEQ ID NO: 84432):AXGXH (SEQ ID NO: 84147), AVPKAXX (SEQ ID NO: 84404):AXGXH (SEQ ID NO: 84147), KVGKAXX (SEQ ID NO: 84425):XGXR (SEQ ID NO: 84123), KASKAXX (SEQ ID NO: 84423):EXGXR (SEQ ID NO: 84179), GSAGPXX (SEQ ID NO: 84420):RXGXS (SEQ ID NO: 84291), AAPASXX (SEQ ID NO: 84401):AXGXR (SEQ ID NO: 84148), STPPTXX (SEQ ID NO: 84431):SXGXR (SEQ ID NO: 84305), HVPKPXX (SEQ ID NO: 84421):SXGXH (SEQ ID NO: 84304), RVPSTXX (SEQ ID NO: 84428):XGXL (SEQ ID NO: 84122), ASAAPXX (SEQ ID NO: 84402):XKXS (SEQ ID NO: 84124) and ASASPXX (SEQ ID NO: 84403):XKXS (SEQ ID NO: 84124).

[0775] In certain embodiments useful for inducing differentiation of mensenchymal or progenitor stem cells from the lung cell lineage, regenerating lung tissues, and protecting patients from lung tissue degeneration-related diseases, conditions, disorders or pathologies, PEP9 is selected from the group consisting of KIPKAXXVPTEL (SEQ ID NO: 84770), GIPEPXXVPEKM (SEQ ID NO: 84718), SIPKAXXVPTEL (SEQ ID NO: 84830), HVTKPTXAPTKL (SEQ ID NO: 84742), YVPKPXXAPTKL (SEQ ID NO: 84864), TVPKPXXAPTQL (SEQ ID NO: 84854), AVPKAXXAPTKL (SEQ ID NO: 84704), KVGKAXXVPTKL (SEQ ID NO: 84780), KASKAXXVPTKL (SEQ ID NO: 84760), GSAGPXXTPTKM (SEQ ID NO: 84726), AAPASXXVPARL (SEQ ID NO: 84677), STPPTXXVPTRL (SEQ ID NO: 84850), HVPKPXXAPTKL (SEQ ID NO: 84734), RVPSTXXAPVKT (SEQ ID NO: 84815), ASAAPXXVPQAL (SEQ ID NO: 84689), ASASPXXVSQDL (SEQ ID NO: 84701) and ASASPXXVPQDL (SEQ ID NO: 84699); PEP10 is selected from the group consisting of DMVVEGXGXR (SEQ ID NO: 84510), NMTVESXAXR (SEQ ID NO: 84604), EMVVEGXGXR (SEQ ID NO: 84529), NMVVRSXGXH (SEQ ID NO: 84629), NMVVRSXGXH (SEQ ID NO: 84629), NMVVRAXGXH (SEQ ID NO: 84627), NMVVKAXGXH (SEQ ID NO: 84624), EGMSVAEXGXR (SEQ ID NO: 84636), GMAVSEXGXR (SEQ ID NO: 84546), GMVVDRXGXS (SEQ ID NO: 84567), DMVVEAXGXR (SEQ ID NO: 84509), DMVVESXGXR (SEQ ID NO: 84511), NMVVRSXGXH (SEQ ID NO: 84629), MIVEEXGXL (SEQ ID NO: 84448), MIVRSXKXS (SEQ ID NO: 84453), MIVKSXKXS (SEQ ID NO: 84451) and MVVKSXKXS (SEQ ID NO: 84470); and wherein the pair PEP9:PEP10 is selected from the group consisting of KIPKAXXVPTEL (SEQ ID NO: 84770):DMVVEGXGXR (SEQ ID NO: 84510), GIPEPXXVPEKM (SEQ ID NO: 84718):NMTVESXAXR (SEQ ID NO: 84604), SIPKAXXVPTEL (SEQ ID NO: 84830):EMVVEGXGXR (SEQ ID NO: 84529), HVTKPTXAPTKL (SEQ ID NO: 84742):NMVVRSXGXH (SEQ ID NO: 84629), YVPKPXXAPTKL (SEQ ID NO: 84864):NMVVRSXGXH (SEQ ID NO: 84629), TVPKPXXAPTQL (SEQ ID NO: 84854):NMVVRAXGXH (SEQ ID NO: 84627), AVPKAXXAPTKL (SEQ ID NO: 84704):NMVVKAXGXH (SEQ ID NO: 84624), KVGKAXXVPTKL (SEQ ID NO: 84780):EGMSVAEXGXR (SEQ ID NO: 84636), KASKAXXVPTKL (SEQ ID NO: 84760):GMAVSEXGXR (SEQ ID NO: 84546), GSAGPXXTPTKM (SEQ ID NO: 84726):GMVVDRXGXS (SEQ ID NO: 84567), AAPASXXVPARL (SEQ ID NO: 84677):DMVVEAXGXR (SEQ ID NO: 84509), STPPTXXVPTRL (SEQ ID NO: 84850):DMVVESXGXR (SEQ ID NO: 84511), HVPKPXXAPTKL (SEQ ID NO: 84734):NMVVRSXGXH (SEQ ID NO: 84629), RVPSTXXAPVKT (SEQ ID NO: 84815):MIVEEXGXL (SEQ ID NO: 84448), ASAAPXXVPQAL (SEQ ID NO: 84689):MIVRSXKXS (SEQ ID NO: 84453), ASASPXXVSQDL (SEQ ID NO: 84701):MIVKSXKXS (SEQ ID NO: 84451) and ASASPXXVPQDL (SEQ ID NO: 84699):MVVKSXKXS (SEQ ID NO: 84470).

[0776] In certain embodiments useful for inducing differentiation of mensenchymal or progenitor stem cells from the lung cell lineage, regenerating lung tissues, and protecting patients from lung tissue degeneration-related diseases, conditions, disorders or pathologies, PEP5 is selected from the group consisting of VPTEL (SEQ ID NO: 84378), VPEKM (SEQ ID NO: 84360), APTKL (SEQ ID NO: 84131), APTQL (SEQ ID NO: 84134), VPTKL (SEQ ID NO: 84381), TPTKM (SEQ ID NO: 84327), VPARL (SEQ ID NO: 84352), VPTRL (SEQ ID NO: 84385), APVKT (SEQ ID NO: 84144), VPQAL (SEQ ID NO: 84364), VSQDL (SEQ ID NO: 84387) and VPQDL (SEQ ID NO: 84365); PEP6 is selected from the group consisting of DMVVE (SEQ ID NO: 84161), NMTVE (SEQ ID NO: 84267), EMVVE (SEQ ID NO: 84175), NMVVR (SEQ ID NO: 84275), NMVVK (SEQ ID NO: 84274), EGMSVAE (SEQ ID NO: 84411), GMAVS (SEQ ID NO: 84194), GMVVD (SEQ ID NO: 84204), DMVVE (SEQ ID NO: 84161), MIVEE (SEQ ID NO: 84241), MIVRS (SEQ ID NO: 84243), MIVKS (SEQ ID NO: 84242) and MVVKS (SEQ ID NO: 84256); and wherein the pair PEP5:PEP6 is selected from the group consisting of VPTEL (SEQ ID NO: 84378):DMVVE (SEQ ID NO: 84161), VPEKM (SEQ ID NO: 84360):NMTVE (SEQ ID NO: 84267), VPTEL (SEQ ID NO: 84378):EMVVE (SEQ ID NO: 84175), APTKL (SEQ ID NO: 84131):NMVVR (SEQ ID NO: 84275), APTQL (SEQ ID NO: 84134):NMVVR (SEQ ID NO: 84275), APTKL (SEQ ID NO: 84131):NMVVK (SEQ ID NO: 84274), VPTKL (SEQ ID NO: 84381):EGMSVAE (SEQ ID NO: 84411), VPTKL (SEQ ID NO: 84381):GMAVS (SEQ ID NO: 84194), TPTKM (SEQ ID NO: 84327):GMVVD (SEQ ID NO: 84204), VPARL (SEQ ID NO: 84352):DMVVE (SEQ ID NO: 84161), VPTRL (SEQ ID NO: 84385):DMVVE (SEQ ID NO: 84161), APVKT (SEQ ID NO: 84144):MIVEE (SEQ ID NO: 84241), VPQAL (SEQ ID NO: 84364):MIVRS (SEQ ID NO: 84243), VSQDL (SEQ ID NO: 84387):MIVKS (SEQ ID NO: 84242) and VPQDL (SEQ ID NO: 84365):MVVKS (SEQ ID NO: 84256); wherein the pair PEP5:PEP6 is not APTKL (SEQ ID NO: 84131):NMVVR (SEQ ID NO: 84275) when PEP1 is NAIS (SEQ ID NO: 84113) and PEP2 is LKKYR (SEQ ID NO: 84229); wherein the pair PEP5:PEP6 is not APTQL (SEQ ID NO: 84134):NMVVR (SEQ ID NO: 84275) when PEP1 is NAIS (SEQ ID NO: 84113) and PEP2 is LKKYR (SEQ ID NO: 84229); wherein the pair PEP5:PEP6 is not APTKL (SEQ ID NO: 84131):NMVVK (SEQ ID NO: 84274) when PEP1 is SATS (SEQ ID NO: 84117) and PEP2 is LRKHR (SEQ ID NO: 84233); wherein the pair PEP5:PEP6 is not VPTKL (SEQ ID NO: 84381):EGMSVAE (SEQ ID NO: 84411) when PEP1 is SPIS (SEQ ID NO: 84120) and PEP2 is LKYHY (SEQ ID NO: 84232); wherein the pair PEP5:PEP6 is not VPTKL (SEQ ID NO: 84381):GMAVS (SEQ ID NO: 84194) when PEP1 is EPIS (SEQ ID NO: 84109) and PEP2 is KFKYE (SEQ ID NO: 84211); and wherein the pair PEP5:PEP6 is not TPTKM (SEQ ID NO: 84327):GMVVD (SEQ ID NO: 84204) when PEP1 is SPIN (SEQ ID NO: 84119) and PEP2 is YGKIP (SEQ ID NO: 84397).

[0777] In certain embodiments useful for inducing differentiation of mensenchymal or progenitor stem cells from the lung cell lineage, regenerating lung tissues, and protecting patients from lung tissue degeneration-related diseases, conditions, disorders or pathologies, PEP9 is selected from the group consisting of KIPKAXXVPTEL (SEQ ID NO: 84770), GIPEPXXVPEKM (SEQ ID NO: 84718), SIPKAXXVPTEL (SEQ ID NO: 84830), HVTKPTXAPTKL (SEQ ID NO: 84742), YVPKPXXAPTKL (SEQ ID NO: 84864), TVPKPXXAPTQL (SEQ ID NO: 84854), AVPKAXXAPTKL (SEQ ID NO: 84704), KVGKAXXVPTKL (SEQ ID NO: 84780), KASKAXXVPTKL (SEQ ID NO: 84760), GSAGPXXTPTKM (SEQ ID NO: 84726), AAPASXXVPARL (SEQ ID NO: 84677), STPPTXXVPTRL (SEQ ID NO: 84850), HVPKPXXAPTKL (SEQ ID NO: 84734), RVPSTXXAPVKT (SEQ ID NO: 84815), ASAAPXXVPQAL (SEQ ID NO: 84689), ASASPXXVSQDL (SEQ ID NO: 84701) and ASASPXXVPQDL (SEQ ID NO: 84699); PEP10 is selected from the group consisting of DMVVEGXGXR (SEQ ID NO: 84510), NMTVESXAXR (SEQ ID NO: 84604), EMVVEGXGXR (SEQ ID NO: 84529), NMVVRSXGXH (SEQ ID NO: 84629), NMVVRSXGXH (SEQ ID NO: 84629), NMVVRAXGXH (SEQ ID NO: 84627), NMVVKAXGXH (SEQ ID NO: 84624), EGMSVAEXGXR (SEQ ID NO: 84636), GMAVSEXGXR (SEQ ID NO: 84546), GMVVDRXGXS (SEQ ID NO: 84567), DMVVEAXGXR (SEQ ID NO: 84509), DMVVESXGXR (SEQ ID NO: 84511), NMVVRSXGXH (SEQ ID NO: 84629), MIVEEXGXL (SEQ ID NO: 84448), MIVRSXKXS (SEQ ID NO: 84453), MIVKSXKXS (SEQ ID NO: 84451) and MVVKSXKXS (SEQ ID NO: 84470); and wherein the pair PEP9:PEP10 is selected from the group consisting of KIPKAXXVPTEL (SEQ ID NO: 84770):DMVVEGXGXR (SEQ ID NO: 84510), GIPEPXXVPEKM (SEQ ID NO: 84718):NMTVESXAXR (SEQ ID NO: 84604), SIPKAXXVPTEL (SEQ ID NO: 84830):EMVVEGXGXR (SEQ ID NO: 84529), HVTKPTXAPTKL (SEQ ID NO: 84742):NMVVRSXGXH (SEQ ID NO: 84629), YVPKPXXAPTKL (SEQ ID NO: 84864):NMVVRSXGXH (SEQ ID NO: 84629), TVPKPXXAPTQL (SEQ ID NO: 84854):NMVVRAXGXH (SEQ ID NO: 84627), AVPKAXXAPTKL (SEQ ID NO: 84704):NMVVKAXGXH (SEQ ID NO: 84624), KVGKAXXVPTKL (SEQ ID NO: 84780):EGMSVAEXGXR (SEQ ID NO: 84636), KASKAXXVPTKL (SEQ ID NO: 84760):GMAVSEXGXR (SEQ ID NO: 84546), GSAGPXXTPTKM (SEQ ID NO: 84726):GMVVDRXGXS (SEQ ID NO: 84567), AAPASXXVPARL (SEQ ID NO: 84677):DMVVEAXGXR (SEQ ID NO: 84509), STPPTXXVPTRL (SEQ ID NO: 84850):DMVVESXGXR (SEQ ID NO: 84511), HVPKPXXAPTKL (SEQ ID NO: 84734):NMVVRSXGXH (SEQ ID NO: 84629), RVPSTXXAPVKT (SEQ ID NO: 84815):MIVEEXGXL (SEQ ID NO: 84448), ASAAPXXVPQAL (SEQ ID NO: 84689):MIVRSXKXS (SEQ ID NO: 84453), ASASPXXVSQDL (SEQ ID NO: 84701):MIVKSXKXS (SEQ ID NO: 84451) and ASASPXXVPQDL (SEQ ID NO: 84699):MVVKSXKXS (SEQ ID NO: 84470); wherein the pair PEP9:PEP10 is not YVPKPXXAPTKL (SEQ ID NO: 84864):NMVVRSXGXH (SEQ ID NO: 84629) when PEP1 is NAIS (SEQ ID NO: 84113) and PEP2 is LKKYR (SEQ ID NO: 84229); wherein the pair PEP9:PEP10 is not TVPKPXXAPTQL (SEQ ID NO: 84854):NMVVRAXGXH (SEQ ID NO: 84627) when PEP1 is NAIS (SEQ ID NO: 84113) and PEP2 is LKKYR (SEQ ID NO: 84229); wherein the pair PEP9:PEP10 is not AVPKAXXAPTKL (SEQ ID NO: 84704):NMVVKAXGXH (SEQ ID NO: 84624) when PEP1 is SATS (SEQ ID NO: 84117) and PEP2 is LRKHR (SEQ ID NO: 84233); wherein the pair PEP9:PEP10 is not KVGKAXXVPTKL (SEQ ID NO: 84780):EGMSVAEXGXR (SEQ ID NO: 84636) when PEP1 is SPIS (SEQ ID NO: 84120) and PEP2 is LKYHY (SEQ ID NO: 84232); wherein the pair PEP9:PEP10 is not KASKAXXVPTKL (SEQ ID NO: 84760):GMAVSEXGXR (SEQ ID NO: 84546) when PEP1 is EPIS (SEQ ID NO: 84109) and PEP2 is KFKYE (SEQ ID NO: 84211); and wherein the pair PEP9:PEP10 is not GSAGPXXTPTKM (SEQ ID NO: 84726):GMVVDRXGXS (SEQ ID NO: 84567) when PEP1 is SPIN (SEQ ID NO: 84119) and PEP2 is YGKIP (SEQ ID NO: 84397).

[0778] In certain embodiments useful for inducing differentiation of mensenchymal or progenitor stem cells from the lung cell lineage, regenerating lung tissues, and protecting patients from lung tissue degeneration-related diseases, conditions, disorders or pathologies, PEP1 is selected from the group consisting of NAIS (SEQ ID NO: 84113), SATS (SEQ ID NO: 84117), SPIS (SEQ ID NO: 84120), EPIS (SEQ ID NO: 84109) and SPIN (SEQ ID NO: 84119); PEP11 is selected from the group consisting of LYF, LYY, LYK and LYL; and the pair PEP1:PEP11 is selected from the group consisting of NAIS (SEQ ID NO: 84113):LYF, SATS (SEQ ID NO: 84117):LYY, SPIS (SEQ ID NO: 84120):LYK, EPIS (SEQ ID NO: 84109):LYL and SPIN (SEQ ID NO: 84119):LYF.

[0779] In one aspect, the present disclosure provides a GFR-binding compound, wherein said GFR-binding compound is a peptide, a variant or analog thereof, or a peptidomimetic as defined herein, with between 20 and 60 (in particular between 20 and 50, and more particularly, between 20 and 45) amino acids, comprising a peptide with four amino acids (PEP1) or a peptide with eight amino acids (PEP12), a peptide with five amino acids (PEP2), and optionally a pair of peptides selected form the group consisting of PEP3:PEP4, PEP3:PEP6, PEP3:PEP10, PEP5:PEP4, PEP9:PEP4, PEP5:PEP6, PEP5:PEP10, PEP9:PEP6 and PEP9:PEP10; wherein said GFR-binding compound does not comprise the pair of peptides APTKL (SEQ ID NO: 84131):NMVVR (SEQ ID NO: 84275) when PEP1 is NAIS (SEQ ID NO: 84113) and PEP2 is LKKYR (SEQ ID NO: 84229); wherein said GFR-binding compound does not comprise the pair of peptides APTQL (SEQ ID NO: 84134):NMVVR (SEQ ID NO: 84275) when PEP1 is NAIS (SEQ ID NO: 84113) and PEP2 is LKKYR (SEQ ID NO: 84229); wherein said GFR-binding compound does not comprise the pair of peptides APTKL (SEQ ID NO: 84131):NMVVK (SEQ ID NO: 84274) when PEP1 is SATS (SEQ ID NO: 84117) and PEP2 is LRKHR (SEQ ID NO: 84233); wherein said GFR-binding compound does not comprise the pair of peptides VPTKL (SEQ ID NO: 84381):EGMSVAE (SEQ ID NO: 84411) when PEP1 is SPIS (SEQ ID NO: 84120) and PEP2 is LKYHY (SEQ ID NO: 84232); wherein said GFR-binding compound does not comprise the pair of peptides VPTKL (SEQ ID NO: 84381):GMAVS (SEQ ID NO: 84194) when PEP1 is EPIS (SEQ ID NO: 84109) and PEP2 is KFKYE (SEQ ID NO: 84211); and wherein said GFR-binding compound does not comprise the pair of peptides TPTKM (SEQ ID NO: 84327):GMVVD (SEQ ID NO: 84204) when PEP1 is SPIN (SEQ ID NO: 84119) and PEP2 is YGKIP (SEQ ID NO: 84397); and wherein the RMSD is 2.45 Å or less.

[0780] In one aspect, the present disclosure provides a GFR-binding compound, wherein said GFR-binding compound is a peptide, a variant or analog thereof, or a peptidomimetic as defined herein, with between 20 and 60 (in particular between 20 and 50, and more particularly, between 20 and 45) amino acids, comprising a peptide with four amino acids (PEP1) or a peptide with eight amino acids (PEP12), a peptide with five amino acids (PEP2), and optionally a pair of peptides selected form the group consisting of PEP3:PEP4, PEP3:PEP6, PEP3:PEP10, PEP5:PEP4, PEP9:PEP4, PEP5:PEP6, PEP5:PEP10, PEP9:PEP6 and PEP9:PEP10; wherein said GFR-binding compound does not comprise the pair of peptides YVPKPXXAPTKL (SEQ ID NO: 84864):NMVVRSXGXH (SEQ ID NO: 84629) when PEP1 is NAIS (SEQ ID NO: 84113) and PEP2 is LKKYR (SEQ ID NO: 84229); wherein said GFR-binding compound does not comprise the pair of peptides TVPKPXXAPTQL (SEQ ID NO: 84854):NMVVRAXGXH (SEQ ID NO: 84627) when PEP1 is NAIS (SEQ ID NO: 84113) and PEP2 is LKKYR (SEQ ID NO: 84229); wherein said GFR-binding compound does not comprise the pair of peptides AVPKAXXAPTKL (SEQ ID NO: 84704):NMVVKAXGXH (SEQ ID NO: 84624) when PEP1 is SATS (SEQ ID NO: 84117) and PEP2 is LRKHR (SEQ ID NO: 84233); wherein said GFR-binding compound does not comprise the pair of peptides KVGKAXXVPTKL (SEQ ID NO: 84780):EGMSVAEXGXR (SEQ ID NO: 84636) when PEP1 is SPIS (SEQ ID NO: 84120) and PEP2 is LKYHY (SEQ ID NO: 84232); wherein said GFR-binding compound does not comprise the pair of peptides KASKAXXVPTKL (SEQ ID NO: 84760):GMAVSEXGXR (SEQ ID NO: 84546) when PEP1 is EPIS (SEQ ID NO: 84109) and PEP2 is KFKYE (SEQ ID NO: 84211); and wherein said GFR-binding compound does not comprise the pair of peptides GSAGPXXTPTKM (SEQ ID NO: 84726):GMVVDRXGXS (SEQ ID NO: 84567) when PEP1 is SPIN (SEQ ID NO: 84119) and PEP2 is YGKIP (SEQ ID NO: 84397); and wherein the RMSD is 2.45 Å or less.

[0781] In certain embodiments useful for inducing differentiation of mensenchymal or progenitor stem cells from the lung cell lineage, regenerating lung tissues, and protecting patients from lung tissue degeneration-related diseases, conditions, disorders or pathologies, said GFR-binding compound is a synthetic molecule as defined herein in the definition section.

[0782] In certain embodiments useful for inducing differentiation of mensenchymal or progenitor stem cells from the lung cell lineage, regenerating lung tissues, and protecting patients from lung tissue degeneration-related diseases, conditions, disorders or pathologies, said GFR-binding compound is a synthetic peptide, or a variant or analog thereof, or a peptidomimetic.

### Muscle

[0783] Certain embodiments of the invention are particularly useful for inducing differentiation of mensenchymal or progenitor stem cells from the muscle cell lineage, regenerating muscle tissues, enhancing of myogenesis, reinforcing muscle tissues, repairing damaged muscles, and protecting a subject from one or more muscle tissue degeneration-related diseases, disorders, conditions or pathologies.

[0784] In certain embodiments useful for inducing differentiation of mensenchymal or progenitor stem cells from the muscle cell lineage, regenerating muscle tissues, enhancing of myogenesis, reinforcing muscle tissues, repairing damaged muscles, and protecting a subject from one or more muscle tissue degeneration-related diseases, disorders, conditions or pathologies, PEP1 is RSVK (SEQ ID NO: 84115) or RPVQ (SEQ ID NO: 84114).

[0785] In certain embodiments useful for inducing differentiation of mensenchymal or progenitor stem cells from the muscle cell lineage, regenerating muscle tissues, enhancing of myogenesis, reinforcing muscle tissues, repairing damaged muscles, and protecting a subject from one or more muscle tissue degeneration-related diseases, disorders, conditions or pathologies, PEP2 is KEVQV (SEQ ID NO: 84210) or KKATV (SEQ ID NO: 84212).

[0786] In certain embodiments useful for inducing differentiation of mensenchymal or progenitor stem cells from the muscle cell lineage, regenerating muscle tissues, enhancing of myogenesis, reinforcing muscle tissues, repairing damaged muscles, and protecting a subject from one or more muscle tissue degeneration-related diseases, disorders, conditions or pathologies, PEP3 is selected from the group consisting of VPQ, VSQ and VPT.

[0787] In certain embodiments useful for inducing differentiation of mensenchymal or progenitor stem cells from the muscle cell lineage, regenerating muscle tissues, enhancing of myogenesis, reinforcing muscle tissues, repairing damaged muscles, and protecting a subject from one or more muscle tissue degeneration-related diseases, disorders, conditions or pathologies, PEP4 is selected from the group consisting of VRS, VKS, QHN and EHS.

[0788] In certain embodiments useful for inducing differentiation of mensenchymal or progenitor stem cells from the muscle cell lineage, regenerating muscle tissues, enhancing of myogenesis, reinforcing muscle tissues, repairing damaged muscles, and protecting a subject from one or more muscle tissue degeneration-related diseases, disorders, conditions or pathologies, PEP5 is a peptide of general formula PEP3-AA¹¹-AA¹²; wherein PEP3 is selected from the group consisting of VPQ, VSQ and VPT; wherein AA¹¹ is selected from the group consisting of E, K, Q, R, A, D, G and H, in particular A, D, E and G; wherein AA¹² is selected from the group consisting of L, M, T, E, Q and H, in particular L, E and Q. In one particular example, PEP5 is selected from the group consisting of VPQAL (SEQ ID NO: 84364), VSQDL (SEQ ID NO: 84387), VPQDL (SEQ ID NO: 84365), VPTEE (SEQ ID NO: 84377) and VPTGQ (SEQ ID NO: 84379).

[0789] In certain embodiments useful for inducing differentiation of mensenchymal or progenitor stem cells from the muscle cell lineage, regenerating muscle tissues, enhancing of myogenesis, reinforcing muscle tissues, repairing damaged muscles, and protecting a subject from one or more muscle tissue degeneration-related diseases, disorders, conditions or pathologies, PEP6 is a peptide of general formula AA²⁶-AA²⁷-AA²⁸-AA²⁹-PEP4; wherein PEP4 is selected from the group consisting of VRS, VKS, QHN and EHS; wherein AA²⁶ is absent or selected from the group consisting of AA^{III} amino acids, preferably is absent; wherein AA²⁷ and AA²⁸ are independently selected from the group consisting of AA^{III} and AA^{V} amino acids, preferably AA²⁷ is selected from the group consisting of M, F and L, preferably AA²⁸ is selected from the group consisting of I, V, L and E; wherein AA²⁹ is absent or selected from the group consisting of AA^{II} amino acids, preferably absent. In one particular example, PEP6 is selected from the group consisting of MIVRS (SEQ ID NO: 84243), MIVKS (SEQ ID NO: 84242), MVVKS (SEQ ID NO: 84256), FLQHN (SEQ ID NO: 84184) and LEEHS (SEQ ID NO: 84217).

[0790] In certain embodiments useful for inducing differentiation of mensenchymal or progenitor stem cells from the muscle cell lineage, regenerating muscle tissues, enhancing of myogenesis, reinforcing muscle tissues, repairing damaged muscles, and protecting a subject from one or more muscle tissue degeneration-related diseases, disorders, conditions or pathologies, PEP7 is an amino acid or a peptide with between two and seven amino acids of general formula AA¹-AA²-AA³-AA⁴-AA⁵-AA⁶-AA⁷ (SEQ ID NO: 84948); wherein AA¹, AA², AA³, AA⁴, and AA⁵ are independently absent or AA^{I} as defined herein; wherein AA⁶ is absent or selected from the group consisting of S, T, C, E, Q, P and R, preferably C, S, or E; wherein AA⁷ is absent or is selected from the group consisting of S, T, C, E, Q, P and R, preferably is S or C; and wherein at least one of AA¹, AA², AA³, AA⁴, AA⁵, AA⁶ or AA⁷ is not absent. In one particular example, PEP7 is selected from the group consisting of ASAAPXX (SEQ ID NO: 84402), ASASPXX (SEQ ID NO: 84403) and NDEGLEX (SEQ ID NO: 84426).

[0791] In certain embodiments useful for inducing differentiation of mensenchymal or progenitor stem cells from the muscle cell lineage, regenerating muscle tissues, enhancing of myogenesis, reinforcing muscle tissues, repairing damaged muscles, and protecting a subject from one or more muscle tissue degeneration-related diseases, disorders, conditions or pathologies, PEP8 is an amino acid or a peptide with between two and six amino acids of general formula AA³³-AA³⁴-AA³⁵-AA³⁶-AA³⁷-AA³⁸ (SEQ ID NO: 84949); wherein AA³³ is absent or is selected from the group consisting of AA^{I} amino acids at the exception of AA^{VI} amino acids; AA³⁴ is absent or is selected from the group consisting of AA^{III} and AA^{IV} amino acids; wherein AA³⁵ is absent or is selected from the group consisting of AA^{II} amino acids, preferably is S or C; wherein AA³⁶ is absent or is selected from the group consisting of AA^{III} and AA^{IV} amino acids; wherein AA³⁷ is absent or is selected from the group consisting of AA^{II} amino acids, preferably is S or C; wherein AA³⁸ is absent or is selected from the group consisting of AA^{I}; and wherein at least one of AA³³, AA³⁴, AA³⁵, AA³⁶, AA³⁷ or AA³⁸ is not absent. In one particular example, PEP8 is selected from the group consisting of XKXS (SEQ ID NO: 84124), KXEXR (SEQ ID NO: 84213) and QXEXR (SEQ ID NO: 84276).

[0792] In certain embodiments useful for inducing differentiation of mensenchymal or progenitor stem cells from the muscle cell lineage, regenerating muscle tissues, enhancing of myogenesis, reinforcing muscle tissues, repairing damaged muscles, and protecting a subject from one or more muscle tissue degeneration-related diseases, disorders, conditions or pathologies, PEP9 is a peptide of general formula AA¹-AA²-AA³-AA⁴-AA⁵-AA⁶-AA⁷-PEP5; wherein PEP5 is a peptide of formula PEP3-AA¹¹-AA¹²; wherein PEP3 is selected from the group consisting of VPQ, VSQ and VPT; wherein AA¹¹ is selected from the group consisting of E, K, Q, R, A, D, G and H, in particular A, D, E and G; wherein AA¹² is selected from the group consisting of L, M, T, E, Q and H, in particular L, E and Q; wherein AA¹, AA², AA³, AA⁴, and AA⁵ are independently absent or AA^{I} as defined herein; wherein AA⁶ is absent or selected from the group consisting of S, T, C, E, Q, P and R, preferably C, S, or E; wherein AA⁷ is selected from the group consisting of S, T, C, E, Q, P and R, preferably is S or C. In one particular example, PEP9 is selected from the group consisting of ASAAPXXVPQAL (SEQ ID NO: 84689), ASASPXXVSQDL (SEQ ID NO: 84701), ASASPXXVPQDL (SEQ ID NO: 84699), NDEGLEXVPTEE (SEQ ID NO: 84798) and NDEGLEXVPTGQ (SEQ ID NO: 84799).

[0793] In certain embodiments useful for inducing differentiation of mensenchymal or progenitor stem cells from the muscle cell lineage, regenerating muscle tissues, enhancing of myogenesis, reinforcing muscle tissues, repairing damaged muscles, and protecting a subject from one or more muscle tissue degeneration-related diseases, disorders, conditions or pathologies, PEP10 is a peptide of general formula PEP6-AA³³-AA³⁴-AA³⁵-AA³⁶-AA³⁷-AA³⁸; wherein PEP6 is a peptide of formula AA²⁶-AA²⁷-AA²⁸-AA²⁹-PEP4; wherein PEP4 is selected from the group consisting of VRS, VKS, QHN and EHS; wherein AA²⁶ is absent or selected from the group consisting of AA^{III} amino acids, preferably is absent; wherein AA²⁷ and AA²⁸ are independently selected from the group consisting of AA^{III} and AA^{V} amino acids, preferably AA²⁷ is selected from the group consisting of M, F and L, preferably AA²⁸ is selected from the group consisting of I, V, L and E; wherein AA²⁹ is absent or selected from the group consisting of AA^{II} amino acids, preferably absent; wherein AA³³ is absent or is selected from the group consisting of AA^{I} amino acids at the exception of AA^{VI} amino acids; AA³⁴ is absent or is selected from the group consisting of AA^{III} and AA^{IV} amino acids; wherein AA³⁵ is absent or is selected from the group consisting of AA^{II} amino acids, preferably is S or C; wherein AA³⁶ is absent or is selected from the group consisting of AA^{III} and AA^{IV} amino acids; wherein AA³⁷ is absent or is selected from the group consisting of AA^{II} amino acids, preferably is S or C; wherein AA³⁸ is absent or is selected from the group consisting of AA^{I}. In one particular example, PEP10 is selected from the group consisting of MIVRSXKXS (SEQ ID NO: 84453), MIVKSXKXS (SEQ ID NO: 84451), MVVKSXKXS (SEQ ID NO: 84470), FLQHNKXEXR (SEQ ID NO: 84536) and LEEHSQXEXR (SEQ ID NO: 84577).

[0794] In certain embodiments useful for inducing differentiation of mensenchymal or progenitor stem cells from the muscle cell lineage, regenerating muscle tissues, enhancing of myogenesis, reinforcing muscle tissues, repairing damaged muscles, and protecting a subject from one or more muscle tissue degeneration-related diseases, disorders, conditions or pathologies, PEP12 is a peptide of general formula PEP1-AA¹⁷-PEP11; wherein AA¹⁷ is selected from the group consisting of G, A, V, L, I, P, F, M, W, T and S (in particular is I or M); wherein PEP1 is RSVK (SEQ ID NO: 84115) or RPVQ (SEQ ID NO: 84114).

[0795] In certain embodiments useful for inducing differentiation of mensenchymal or progenitor stem cells from the muscle cell lineage, regenerating muscle tissues, enhancing of myogenesis, reinforcing muscle tissues, repairing damaged muscles, and protecting a subject from one or more muscle tissue degeneration-related diseases, disorders, conditions or pathologies, PEP11 is a peptide with 3 amino acids of general formula AA¹⁸-AA¹⁹-AA²⁰; wherein AA¹⁸ is selected from the group consisting of L, V, Q, A and R, in particular is A or R; wherein AA¹⁹ is selected from the group consisting of AA^{VII} amino acids (in particular is K); wherein AA²⁰ is selected from the group consisting of L, F, Y, K, I, V and M, in particular is V or I. In one particular example, PEP11 is AKV or RKI.

[0796] The definitions of “PEP” pairs, quadruplets, hexaplets and heptuplet e.g. PEP1:PEP2, PEP12:PEP2, or PEP7:PEP5:PEP12:LINKER:PEP2:PEP6:PEP8, useful for inducing differentiation of mensenchymal or progenitor stem cells from the muscle cell lineage, regenerating muscle tissues, enhancing of myogenesis, reinforcing muscle tissues, repairing damaged muscles, and protecting a subject from one or more muscle tissue degeneration-related diseases, disorders, conditions or pathologies, are as already defined herein to the extent that PEP1 to PEP12 are particularly useful for these applications. For instances:

[0797] In certain embodiments useful for inducing differentiation of mensenchymal or progenitor stem cells from the muscle cell lineage, regenerating muscle tissues, enhancing of myogenesis, reinforcing muscle tissues, repairing damaged muscles, and protecting a subject from one or more muscle tissue degeneration-related diseases, disorders, conditions or pathologies, the pair PEP1:PEP2 is RSVK (SEQ ID NO: 84115):KEVQV (SEQ ID NO: 84210) or RPVQ (SEQ ID NO: 84114):KKATV (SEQ ID NO: 84212).

[0798] In certain embodiments, useful for inducing differentiation of mensenchymal or progenitor stem cells from the muscle cell lineage, regenerating muscle tissues, enhancing of myogenesis, reinforcing muscle tissues, repairing damaged muscles, and protecting a subject from one or more muscle tissue degeneration-related diseases, disorders, conditions or pathologies, the pair PEP12:PEP2 is RSVK-AA¹⁷-AKV (SEQ ID NO: 84880):KEVQV (SEQ ID NO: 84210) or RPVQ-AA¹⁷-RKI (SEQ ID NO: 84879):KKATV (SEQ ID NO: 84212); wherein AA¹⁷ is selected from the group consisting of G, A, V, L, I, P, F, M, W, T and S (in particular is I or M).

[0799] In certain embodiments useful for inducing differentiation of mensenchymal or progenitor stem cells from the muscle cell lineage, regenerating muscle tissues, enhancing of myogenesis, reinforcing muscle tissues, repairing damaged muscles, and protecting a subject from one or more muscle tissue degeneration-related diseases, disorders, conditions or pathologies, PEP3 is selected from the group consisting of VPQ, VSQ and VPT; PEP4 is selected from the group consisting of VRS, VKS, QHN and EHS; and wherein the pair PEP3:PEP4 is selected from the group consisting of VPQ:VRS, VSQ:VKS, VPQ:VKS, VPT:QHN and VPT:EHS.

[0800] In certain embodiments useful for inducing differentiation of mensenchymal or progenitor stem cells from the muscle cell lineage, regenerating muscle tissues, enhancing of myogenesis, reinforcing muscle tissues, repairing damaged muscles, and protecting a subject from one or more muscle tissue degeneration-related diseases, disorders, conditions or pathologies, PEP5 is selected from the group consisting of VPQAL (SEQ ID NO: 84364), VSQDL (SEQ ID NO: 84387), VPQDL (SEQ ID NO: 84365), VPTEE (SEQ ID NO: 84377) and VPTGQ (SEQ ID NO: 84379); PEP6 is selected from the group consisting of MIVRS (SEQ ID NO: 84243), MIVKS (SEQ ID NO: 84242), MVVKS (SEQ ID NO: 84256), FLQHN (SEQ ID NO: 84184) and LEEHS (SEQ ID NO: 84217); and wherein the pair PEP5:PEP6 is selected from the group consisting of VPQAL (SEQ ID NO: 84364):MIVRS (SEQ ID NO: 84243), VSQDL (SEQ ID NO: 84387):MIVKS (SEQ ID NO: 84242), VPQDL (SEQ ID NO: 84365):MVVKS (SEQ ID NO: 84256), VPTEE (SEQ ID NO: 84377):FLQHN (SEQ ID NO: 84184) and VPTGQ (SEQ ID NO: 84379):LEEHS (SEQ ID NO: 84217).

[0801] In certain embodiments useful for inducing differentiation of mensenchymal or progenitor stem cells from the muscle cell lineage, regenerating muscle tissues, enhancing of myogenesis, reinforcing muscle tissues, repairing damaged muscles, and protecting a subject from one or more muscle tissue degeneration-related diseases, disorders, conditions or pathologies, PEP7 is selected from the group consisting of ASAAPXX (SEQ ID NO: 84402), ASASPXX (SEQ ID NO: 84403) and NDEGLEX (SEQ ID NO: 84426); wherein PEP8 is selected from the group consisting of XKXS (SEQ ID NO: 84124), KXEXR (SEQ ID NO: 84213) and QXEXR (SEQ ID NO: 84276); and wherein the pair PEP7:PEP8 is selected from the group consisting of ASAAPXX (SEQ ID NO: 84402):XKXS (SEQ ID NO: 84124), ASASPXX (SEQ ID NO: 84403):XKXS (SEQ ID NO: 84124), NDEGLEX (SEQ ID NO: 84426):KXEXR (SEQ ID NO: 84213) and NDEGLEX (SEQ ID NO: 84426):QXEXR (SEQ ID NO: 84276).

[0802] In certain embodiments useful for inducing differentiation of mensenchymal or progenitor stem cells from the muscle cell lineage, regenerating muscle tissues, enhancing of myogenesis, reinforcing muscle tissues, repairing damaged muscles, and protecting a subject from one or more muscle tissue degeneration-related diseases, disorders, conditions or pathologies, PEP9 is selected from the group consisting of ASAAPXXVPQAL (SEQ ID NO: 84689), ASASPXXVSQDL (SEQ ID NO: 84701), ASASPXXVPQDL (SEQ ID NO: 84699), NDEGLEXVPTEE (SEQ ID NO: 84798) and NDEGLEXVPTGQ (SEQ ID NO: 84799); PEP10 is selected from the group consisting of MIVRSXKXS (SEQ ID NO: 84453), MIVKSXKXS (SEQ ID NO: 84451), MVVKSXKXS (SEQ ID NO: 84470), FLQHNKXEXR (SEQ ID NO: 84536) and LEEHSQXEXR (SEQ ID NO: 84577); and wherein the pair PEP9:PEP10 is selected from the group consisting of ASAAPXXVPQAL (SEQ ID NO: 84689):MIVRSXKXS (SEQ ID NO: 84453), ASASPXXVSQDL (SEQ ID NO: 84701):MIVKSXKXS (SEQ ID NO: 84451), ASASPXXVPQDL (SEQ ID NO: 84699):MVVKSXKXS (SEQ ID NO: 84470), NDEGLEXVPTEE (SEQ ID NO: 84798):FLQHNKXEXR (SEQ ID NO: 84536) and NDEGLEXVPTGQ (SEQ ID NO: 84799):LEEHSQXEXR (SEQ ID NO: 84577).

[0803] In certain embodiments useful for inducing differentiation of mensenchymal or progenitor stem cells from the muscle cell lineage, regenerating muscle tissues, enhancing of myogenesis, reinforcing muscle tissues, repairing damaged muscles, and protecting a subject from one or more muscle tissue degeneration-related diseases, disorders, conditions or pathologies, PEP1 is RSVK (SEQ ID NO: 84115) or RPVQ (SEQ ID NO: 84114); PEP11 is AKV or RKI; and the pair PEP1:PEP11 is RSVK (SEQ ID NO: 84115):AKV or RPVQ (SEQ ID NO: 84114):RKI.

[0804] In certain embodiments useful for inducing differentiation of mensenchymal or progenitor stem cells from the muscle cell lineage, regenerating muscle tissues, enhancing of myogenesis, reinforcing muscle tissues, repairing damaged muscles, and protecting a subject from one or more muscle tissue degeneration-related diseases, disorders, conditions or pathologies, said GFR-binding compound is a synthetic molecule as defined herein in the definition section.

[0805] In certain embodiments useful for inducing differentiation of mensenchymal or progenitor stem cells from the muscle cell lineage, regenerating muscle tissues, enhancing of myogenesis, reinforcing muscle tissues, repairing damaged muscles, and protecting a subject from one or more muscle tissue degeneration-related diseases, disorders, conditions or pathologies, said GFR-binding compound is a synthetic peptide, or a variant or analog thereof, or a peptidomimetic.

### Blood

[0806] Certain embodiments of the invention are particularly useful for inducing differentiation of mensenchymal or progenitor stem cells from the blood cell lineage, regenerating blood tissues, and protecting patients from blood cell degeneration-related disease, conditions, disorders or pathologies.

[0807] In certain embodiments useful for inducing differentiation of mensenchymal or progenitor stem cells from the blood cell lineage, regenerating blood tissues, and protecting patients from blood cell degeneration-related disease, conditions, disorders or pathologies, PEP1 is SNIT (SEQ ID NO: 84118).

[0808] In certain embodiments useful for inducing differentiation of mensenchymal or progenitor stem cells from the blood cell lineage, regenerating blood tissues, and protecting patients from blood cell degeneration-related disease, conditions, disorders or pathologies, PEP2 is IGEMS (SEQ ID NO: 84209) or LGEMS (SEQ ID NO: 84228).

[0809] In certain embodiments useful for inducing differentiation of mensenchymal or progenitor stem cells from the blood cell lineage, regenerating blood tissues, and protecting patients from blood cell degeneration-related disease, conditions, disorders or pathologies, PEP3 is selected from the group consisting of TPT, VPA, VPT, APT, APV, VPQ, VSQ, SRV and TQV.

[0810] In certain embodiments useful for inducing differentiation of mensenchymal or progenitor stem cells from the blood cell lineage, regenerating blood tissues, and protecting patients from blood cell degeneration-related disease, conditions, disorders or pathologies, PEP4 is selected from the group consisting of VVD, VVE, VVR, VEE, VRS, VKS, EEH and EDH.

[0811] In certain embodiments useful for inducing differentiation of mensenchymal or progenitor stem cells from the blood cell lineage, regenerating blood tissues, and protecting patients from blood cell degeneration-related disease, conditions, disorders or pathologies, PEP5 is a peptide of general formula PEP3-AA¹¹-AA¹²; wherein PEP3 is selected from the group consisting of TPT, VPA, VPT, APT, APV, VPQ, VSQ, SRV and TQV; wherein AA¹¹ is selected from the group consisting of E, K, Q, R, A, D, G and H, in particular is selected from the group consisting of K, R, A, D, H and Q; wherein AA¹² is selected from the group consisting of L, M, T, E, Q and H, in particular is selected from the group consisting of M, L, T and H. In one particular example, PEP5 is selected from the group consisting of TPTKM (SEQ ID NO: 84327), VPARL (SEQ ID NO: 84352), VPTRL (SEQ ID NO: 84385), APTKL (SEQ ID NO: 84131), APVKT (SEQ ID NO: 84144), VPQAL (SEQ ID NO: 84364), VSQDL (SEQ ID NO: 84387), VPQDL (SEQ ID NO: 84365), SRVHH (SEQ ID NO: 84297) and TQVQL (SEQ ID NO: 84340).

[0812] In certain embodiments useful for inducing differentiation of mensenchymal or progenitor stem cells from the blood cell lineage, regenerating blood tissues, and protecting patients from blood cell degeneration-related disease, conditions, disorders or pathologies, PEP6 is a peptide of general formula AA²⁶-AA²⁷-AA²⁸-AA²⁹-PEP4; wherein PEP4 is selected from the group consisting of VVD, VVE, VVR, VEE, VRS, VKS, EEH and EDH; wherein AA²⁶ is absent or selected from the group consisting of AA^{III} amino acids, preferably is absent; wherein AA²⁷ and AA²⁸ are independently selected from the group consisting of AA^{III} and AA^{V} amino acids, preferably AA²⁷ is selected from the group consisting of G, D, N, M, R and T, preferably AA²⁸ is selected from the group consisting of M, I, V and L; wherein AA²⁹ is absent or selected from the group consisting of AA^{II} amino acids, preferably is absent. In one particular example, PEP6 is selected from the group consisting of GMVVD (SEQ ID NO: 84204), DMVVE (SEQ ID NO: 84161), NMVVR (SEQ ID NO: 84275), MIVEE (SEQ ID NO: 84241), MIVRS (SEQ ID NO: 84243), MIVKS (SEQ ID NO: 84242), MVVKS (SEQ ID NO: 84256), RLEEH (SEQ ID NO: 84279) and TLEDH (SEQ ID NO: 84307).

[0813] In certain embodiments useful for inducing differentiation of mensenchymal or progenitor stem cells from the blood cell lineage, regenerating blood tissues, and protecting patients from blood cell degeneration-related disease, conditions, disorders or pathologies, PEP7 is an amino acid or a peptide with between two and seven amino acids of general formula AA¹-AA²-AA³-AA⁴-AA⁵-AA⁶-AA⁷ (SEQ ID NO: 84948); wherein AA¹, AA², AA³, AA⁴, and AA⁵ are independently absent or AA^{I} as defined herein; wherein AA⁶ is absent or selected from the group consisting of S, T, C, E, Q, P and R, preferably is selected from the group consisting of S, C, Q and R; wherein AA⁷ is absent or is selected from the group consisting of S, T, C, E, Q, P and R, preferably is selected from the group consisting of C, S and P; and wherein at least one of AA¹, AA², AA³, AA⁴, AA⁵, AA⁶ or AA⁷ is not absent. In one particular example, PEP7 is selected from the group consisting of GSAGPXX (SEQ ID NO: 84420), AAPASXX (SEQ ID NO: 84401), STPPTXX (SEQ ID NO: 84431), HVPKPXX (SEQ ID NO: 84421), RVPSTXX (SEQ ID NO: 84428), ASAAPXX (SEQ ID NO: 84402), ASASPXX (SEQ ID NO: 84403), SSVKXQP (SEQ ID NO: 84430) and RNVQXRP (SEQ ID NO: 84427).

[0814] In certain embodiments useful for inducing differentiation of mensenchymal or progenitor stem cells from the blood cell lineage, regenerating blood tissues, and protecting patients from blood cell degeneration-related disease, conditions, disorders or pathologies, PEP8 is an amino acid or a peptide with between two and six amino acids of general formula AA³³-AA³⁴-AA³⁵-AA³⁶-AA³⁷-AA³⁸ (SEQ ID NO: 84949); wherein AA³³ is absent or is selected from the group consisting of AA^{I} amino acids at the exception of AA^{VI} amino acids; AA³⁴ is absent or is selected from the group consisting of AA^{III} and AA^{IV} amino acids; wherein AA³⁵ is absent or is selected from the group consisting of AA^{II} amino acids, preferably is S or C; wherein AA³⁶ is absent or is selected from the group consisting of AA^{III} and AA^{IV} amino acids; wherein AA³⁷ is absent or is selected from the group consisting of AA^{II} amino acids, preferably is S or C; wherein AA³⁸ is absent or is selected from the group consisting of AA^{I}; and wherein at least one of AA³³, AA³⁴, AA³⁵, AA³⁶, AA³⁷ or AA³⁸ is not absent. In one particular example, PEP8 is selected from the group consisting of RXGXS (SEQ ID NO: 84291), AXGXR (SEQ ID NO: 84148), SXGXR (SEQ ID NO: 84305), SXGXH (SEQ ID NO: 84304), XGXL (SEQ ID NO: 84122), XKXS (SEQ ID NO: 84124), LEXAXA (SEQ ID NO: 84400) and LAXKXE (SEQ ID NO: 84399).

[0815] In certain embodiments useful for inducing differentiation of mensenchymal or progenitor stem cells from the blood cell lineage, regenerating blood tissues, and protecting patients from blood cell degeneration-related disease, conditions, disorders or pathologies, PEP9 is a peptide of general formula AA¹-AA²-AA³-AA⁴-AA⁵-AA⁶-AA⁷-PEP5; wherein PEP5 is a peptide of formula PEP3-AA¹¹-AA¹²; wherein PEP3 is selected from the group consisting of TPT, VPA, VPT, APT, APV, VPQ, VSQ, SRV and TQV; wherein AA¹¹ is selected from the group consisting of E, K, Q, R, A, D, G and H, in particular is selected from the group consisting of K, R, A, D, H and Q; wherein AA¹² is selected from the group consisting of L, M, T, E, Q and H, in particular is selected from the group consisting of M, L, T and H; wherein AA¹, AA², AA³, AA⁴, and AA⁵ are independently absent or AA^{I} as defined herein; wherein AA⁶ is absent or selected from the group consisting of S, T, C, E, Q, P and R, preferably is selected from the group consisting of S, C, Q and R; wherein AA⁷ is selected from the group consisting of S, T, C, E, Q, P and R, preferably is selected from the group consisting of C, S and P. In one particular example, PEP9 is selected from the group consisting of GSAGPXXTPTKM (SEQ ID NO: 84726), AAPASXXVPARL (SEQ ID NO: 84677), STPPTXXVPTRL (SEQ ID NO: 84850), HVPKPXXAPTKL (SEQ ID NO: 84734), RVPSTXXAPVKT (SEQ ID NO: 84815), ASAAPXXVPQAL (SEQ ID NO: 84689), ASASPXXVSQDL (SEQ ID NO: 84701), ASASPXXVPQDL (SEQ ID NO: 84699), SSVKXQPSRVHH (SEQ ID NO: 84834) and RNVQXRPTQVQL (SEQ ID NO: 84806).

[0816] In certain embodiments useful for inducing differentiation of mensenchymal or progenitor stem cells from the blood cell lineage, regenerating blood tissues, and protecting patients from blood cell degeneration-related disease, conditions, disorders or pathologies, PEP10 is a peptide of general formula PEP6-AA³³-AA³⁴-AA³⁵-AA³⁶-AA³⁷-AA³⁸; wherein PEP6 is a peptide of formula AA²⁶-AA²⁷-AA²⁸-AA²⁹-PEP4; wherein PEP4 is selected from the group consisting of VVD, VVE, VVR, VEE, VRS, VKS, EEH and EDH; wherein AA²⁶ is absent or selected from the group consisting of AA^{III} amino acids, preferably is absent; wherein AA²⁷ and AA²⁸ are independently selected from the group consisting of AA^{III} and AA^{V} amino acids, preferably AA²⁷ is selected from the group consisting of G, D, N, M, R and T, preferably AA²⁸ is selected from the group consisting of M, I, V and L; wherein AA²⁹ is absent or selected from the group consisting of AA^{II} amino acids, preferably is absent; wherein AA³³ is absent or is selected from the group consisting of AA^{I} amino acids at the exception of AA^{VI} amino acids; AA³⁴ is absent or is selected from the group consisting of AA^{III} and AA^{IV} amino acids; wherein AA³⁵ is absent or is selected from the group consisting of AA^{II} amino acids, preferably is S or C; wherein AA³⁶ is absent or is selected from the group consisting of AA^{III} and AA^{IV} amino acids; wherein AA³⁷ is absent or is selected from the group consisting of AA^{II} amino acids, preferably is S or C; wherein AA³⁸ is absent or is selected from the group consisting of AA^{I}. In one particular example, PEP10 is selected from the group consisting of GMVVDRXGXS (SEQ ID NO: 84567), DMVVEAXGXR (SEQ ID NO: 84509), DMVVESXGXR (SEQ ID NO: 84511), NMVVRSXGXH (SEQ ID NO: 84629), MIVEEXGXL (SEQ ID NO: 84448), MIVRSXKXS (SEQ ID NO: 84453), MIVKSXKXS (SEQ ID NO: 84451), MVVKSXKXS (SEQ ID NO: 84470), RLEEHLEXAXA (SEQ ID NO: 84646) and TLEDHLAXKXE (SEQ ID NO: 84659).

[0817] In certain embodiments useful for inducing differentiation of mensenchymal or progenitor stem cells from the blood cell lineage, regenerating blood tissues, and protecting patients from blood cell degeneration-related disease, conditions, disorders or pathologies, PEP12 is a peptide of general formula PEP1-AA¹⁷-PEP11; wherein AA¹⁷ is selected from the group consisting of G, A, V, L, I, P, F, M, W, T and S (in particular is selected from the group consisting of M, I, V and T); wherein PEP1 is SNIT (SEQ ID NO: 84118).

[0818] In certain embodiments useful for inducing differentiation of mensenchymal or progenitor stem cells from the blood cell lineage, regenerating blood tissues, and protecting patients from blood cell degeneration-related disease, conditions, disorders or pathologies, PEP11 is a peptide with 3 amino acids of general formula AA¹⁸-AA¹⁹-AA²⁰; wherein AA¹⁸ is selected from the group consisting of L, V, Q, A and R, in particular is Q; wherein AA¹⁹ is selected from the group consisting of F, W, H, I and Y (in particular is I); wherein AA²⁰ is selected from the group consisting of L, F, Y, K, I, V and M, in particular is M. In one particular example, PEP11 is QIM.

[0819] In certain embodiments useful for inducing differentiation of mensenchymal or progenitor stem cells from the blood cell lineage, regenerating blood tissues, and protecting patients from blood cell degeneration-related disease, conditions, disorders or pathologies, the pair PEP1:PEP2 is SNIT (SEQ ID NO: 84118):IGEMS (SEQ ID NO: 84209) or SNIT (SEQ ID NO: 84118):LGEMS (SEQ ID NO: 84228).

[0820] In certain embodiments useful for inducing differentiation of mensenchymal or progenitor stem cells from the blood cell lineage, regenerating blood tissues, and protecting patients from blood cell degeneration-related disease, conditions, disorders or pathologies, the pair PEP12:PEP2 is SNIT-AA¹⁷-QIM (SEQ ID NO: 84883):IGEMS (SEQ ID NO: 84209) or SNIT-AA¹⁷-QIM (SEQ ID NO: 84883):LGEMS (SEQ ID NO: 84228); wherein AA¹⁷ is selected from the group consisting of G, A, V, L, I, P, F, M, W, T and S (in particular is selected from the group consisting of M, I, V and T).

[0821] The definitions of “PEP” pairs, quadruplets, hexaplets and heptuplet e.g. PEP1:PEP2, PEP12:PEP2, or PEP7:PEP5:PEP12:LINKER:PEP2:PEP6:PEP8, useful for inducing differentiation of mensenchymal or progenitor stem cells from the blood cell lineage, regenerating blood tissues, and protecting patients from blood cell degeneration-related disease, conditions, disorders or pathologies, are as already defined herein to the extent that PEP1 to PEP12 are particularly useful for these applications. For instances:

[0822] In certain embodiments useful for inducing differentiation of mensenchymal or progenitor stem cells from the blood cell lineage, regenerating blood tissues, and protecting patients from blood cell degeneration-related disease, conditions, disorders or pathologies, PEP3 is selected from the group consisting of TPT, VPA, VPT, APT, APV, VPQ, VSQ, SRV and TQV; PEP4 is selected from the group consisting of VVD, VVE, VVR, VEE, VRS, VKS, EEH and EDH; and wherein the pair PEP3:PEP4 is selected from the consisting of TPT:VVD, VPA:VVE, VPT:VVE, APT:VVR, APV:VEE, VPQ:VRS, VSQ:VKS, VPQ:VKS, SRV:EEH and TQV:EDH.

[0823] In certain embodiments useful for inducing differentiation of mensenchymal or progenitor stem cells from the blood cell lineage, regenerating blood tissues, and protecting patients from blood cell degeneration-related disease, conditions, disorders or pathologies, PEP5 is selected from the group consisting of TPTKM (SEQ ID NO: 84327), VPARL (SEQ ID NO: 84352), VPTRL (SEQ ID NO: 84385), APTKL (SEQ ID NO: 84131), APVKT (SEQ ID NO: 84144), VPQAL (SEQ ID NO: 84364), VSQDL (SEQ ID NO: 84387), VPQDL (SEQ ID NO: 84365), SRVHH (SEQ ID NO: 84297) and TQVQL (SEQ ID NO: 84340); PEP6 is selected from the group consisting of GMVVD (SEQ ID NO: 84204), DMVVE (SEQ ID NO: 84161), NMVVR (SEQ ID NO: 84275), MIVEE (SEQ ID NO: 84241), MIVRS (SEQ ID NO: 84243), MIVKS (SEQ ID NO: 84242), MVVKS (SEQ ID NO: 84256), RLEEH (SEQ ID NO: 84279) and TLEDH (SEQ ID NO: 84307); and wherein the pair PEP5:PEP6 is selected from the group consisting of TPTKM (SEQ ID NO: 84327):GMVVD (SEQ ID NO: 84204), VPARL (SEQ ID NO: 84352):DMVVE (SEQ ID NO: 84161), VPTRL (SEQ ID NO: 84385):DMVVE (SEQ ID NO: 84161), APTKL (SEQ ID NO: 84131):NMVVR (SEQ ID NO: 84275), APVKT (SEQ ID NO: 84144):MIVEE (SEQ ID NO: 84241), VPQAL (SEQ ID NO: 84364):MIVRS (SEQ ID NO: 84243), VSQDL (SEQ ID NO: 84387):MIVKS (SEQ ID NO: 84242), VPQDL (SEQ ID NO: 84365):MVVKS (SEQ ID NO: 84256), SRVHH (SEQ ID NO: 84297):RLEEH (SEQ ID NO: 84279) and TQVQL (SEQ ID NO: 84340):TLEDH (SEQ ID NO: 84307).

[0824] In certain embodiments useful for inducing differentiation of mensenchymal or progenitor stem cells from the blood cell lineage, regenerating blood tissues, and protecting patients from blood cell degeneration-related disease, conditions, disorders or pathologies, PEP7 is selected from the group consisting of GSAGPXX (SEQ ID NO: 84420), AAPASXX (SEQ ID NO: 84401), STPPTXX (SEQ ID NO: 84431), HVPKPXX (SEQ ID NO: 84421), RVPSTXX (SEQ ID NO: 84428), ASAAPXX (SEQ ID NO: 84402), ASASPXX (SEQ ID NO: 84403), SSVKXQP (SEQ ID NO: 84430) and RNVQXRP (SEQ ID NO: 84427); wherein PEP8 is selected from the group consisting of RXGXS (SEQ ID NO: 84291), AXGXR (SEQ ID NO: 84148), SXGXR (SEQ ID NO: 84305), SXGXH (SEQ ID NO: 84304), XGXL (SEQ ID NO: 84122), XKXS (SEQ ID NO: 84124), LEXAXA (SEQ ID NO: 84400) and LAXKXE (SEQ ID NO: 84399); and wherein the pair PEP7:PEP8 is selected from the group consisting of GSAGPXX (SEQ ID NO: 84420):RXGXS (SEQ ID NO: 84291), AAPASXX (SEQ ID NO: 84401):AXGXR (SEQ ID NO: 84148), STPPTXX (SEQ ID NO: 84431):SXGXR (SEQ ID NO: 84305), HVPKPXX (SEQ ID NO: 84421):SXGXH (SEQ ID NO: 84304), RVPSTXX (SEQ ID NO: 84428):XGXL (SEQ ID NO: 84122), ASAAPXX (SEQ ID NO: 84402):XKXS (SEQ ID NO: 84124), ASASPXX (SEQ ID NO: 84403):XKXS (SEQ ID NO: 84124), SSVKXQP (SEQ ID NO: 84430):LEXAXA (SEQ ID NO: 84400) and RNVQXRP (SEQ ID NO: 84427):LAXKXE (SEQ ID NO: 84399).

[0825] In certain embodiments useful for inducing differentiation of mensenchymal or progenitor stem cells from the blood cell lineage, regenerating blood tissues, and protecting patients from blood cell degeneration-related disease, conditions, disorders or pathologies, PEP9 is selected from the group consisting of GSAGPXXTPTKM (SEQ ID NO: 84726), AAPASXXVPARL (SEQ ID NO: 84677), STPPTXXVPTRL (SEQ ID NO: 84850), HVPKPXXAPTKL (SEQ ID NO: 84734), RVPSTXXAPVKT (SEQ ID NO: 84815), ASAAPXXVPQAL (SEQ ID NO: 84689), ASASPXXVSQDL (SEQ ID NO: 84701), ASASPXXVPQDL (SEQ ID NO: 84699), SSVKXQPSRVHH (SEQ ID NO: 84834) and RNVQXRPTQVQL (SEQ ID NO: 84806); PEP10 is selected from the group consisting of GMVVDRXGXS (SEQ ID NO: 84567), DMVVEAXGXR (SEQ ID NO: 84509), DMVVESXGXR (SEQ ID NO: 84511), NMVVRSXGXH (SEQ ID NO: 84629), MIVEEXGXL (SEQ ID NO: 84448), MIVRSXKXS (SEQ ID NO: 84453), MIVKSXKXS (SEQ ID NO: 84451), MVVKSXKXS (SEQ ID NO: 84470), RLEEHLEXAXA (SEQ ID NO: 84646) and TLEDHLAXKXE (SEQ ID NO: 84659); and wherein the pair PEP9:PEP10 is selected from the group consisting of GSAGPXXTPTKM (SEQ ID NO: 84726):GMVVDRXGXS (SEQ ID NO: 84567), AAPASXXVPARL (SEQ ID NO: 84677):DMVVEAXGXR (SEQ ID NO: 84509), STPPTXXVPTRL (SEQ ID NO: 84850):DMVVESXGXR (SEQ ID NO: 84511), HVPKPXXAPTKL (SEQ ID NO: 84734):NMVVRSXGXH (SEQ ID NO: 84629), RVPSTXXAPVKT (SEQ ID NO: 84815):MIVEEXGXL (SEQ ID NO: 84448), ASAAPXXVPQAL (SEQ ID NO: 84689):MIVRSXKXS (SEQ ID NO: 84453), ASASPXXVSQDL (SEQ ID NO: 84701):MIVKSXKXS (SEQ ID NO: 84451), ASASPXXVPQDL (SEQ ID NO: 84699):MVVKSXKXS (SEQ ID NO: 84470), SSVKXQPSRVHH (SEQ ID NO: 84834):RLEEHLEXAXA (SEQ ID NO: 84646) and RNVQXRPTQVQL (SEQ ID NO: 84806):TLEDHLAXKXE (SEQ ID NO: 84659).

[0826] In certain embodiments useful for inducing differentiation of mensenchymal or progenitor stem cells from the blood cell lineage, regenerating blood tissues, and protecting patients from blood cell degeneration-related disease, conditions, disorders or pathologies, PEP1 is SNIT (SEQ ID NO: 84118) and PEP11 is QIM.

[0827] In one aspect, the present disclosure provides a GFR-binding compound, wherein said GFR-binding compound is a peptide, a variant or analog thereof, or a peptidomimetic as defined herein, with between 20 and 60 (in particular between 20 and 50, and more particularly, between 20 and 45) amino acids, comprising a peptide with four amino acids (PEP1) or a peptide with eight amino acids (PEP12), a peptide with five amino acids (PEP2), and optionally a pair of peptides selected form the group consisting of PEP3:PEP4, PEP3:PEP6, PEP3:PEP10, PEP5:PEP4, PEP9:PEP4, PEP5:PEP6, PEP5:PEP10, PEP9:PEP6 and PEP9:PEP10; and wherein the RMSD is 2.45 Å or less.

[0828] In certain embodiments useful for inducing differentiation of mensenchymal or progenitor stem cells from the blood cell lineage, regenerating blood tissues, and protecting patients from blood cell degeneration-related disease, conditions, disorders or pathologies, said GFR-binding compound is a synthetic molecule as defined herein in the definition section.

[0829] In certain embodiments useful for inducing differentiation of mensenchymal or progenitor stem cells from the blood cell lineage, regenerating blood tissues, and protecting patients from blood cell degeneration-related disease, conditions, disorders or pathologies, said GFR-binding compound is a synthetic peptide, or a variant or analog thereof, or a peptidomimetic.

### Adipose Tissues

[0830] Certain embodiments of the invention are particularly useful for inducing differentiation of mensenchymal or progenitor stem cells from the adipocyte lineage, regenerating adipose tissues and protecting patients from adipose tissue degeneration-related diseases, conditions, disorders or pathologies.

[0831] In certain embodiments useful for inducing differentiation of mensenchymal or progenitor stem cells from the adipocyte lineage, regenerating adipose tissues and protecting patients from adipose tissue degeneration-related diseases, conditions, disorders or pathologies, PEP1 is SAIS (SEQ ID NO: 84116) or NAIS (SEQ ID NO: 84113).

[0832] In certain embodiments useful for inducing differentiation of mensenchymal or progenitor stem cells from the adipocyte lineage, regenerating adipose tissues and protecting patients from adipose tissue degeneration-related diseases, conditions, disorders or pathologies, PEP2 is LKNYQ (SEQ ID NO: 84230) or LKKYR (SEQ ID NO: 84229).

[0833] In certain embodiments useful for inducing differentiation of mensenchymal or progenitor stem cells from the adipocyte lineage, regenerating adipose tissues and protecting patients from adipose tissue degeneration-related diseases, conditions, disorders or pathologies, PEP3 is selected from the group consisting of VPT, VPE, APT, TPT, VPA, APV, VPQ and VSQ.

[0834] In certain embodiments useful for inducing differentiation of mensenchymal or progenitor stem cells from the adipocyte lineage, regenerating adipose tissues and protecting patients from adipose tissue degeneration-related diseases, conditions, disorders or pathologies, PEP4 is selected from the group consisting of VVE, TVE, VVR, VVK, VAE, AVS, VVD, VEE, VRS and VKS.

[0835] In certain embodiments useful for inducing differentiation of mensenchymal or progenitor stem cells from the adipocyte lineage, regenerating adipose tissues and protecting patients from adipose tissue degeneration-related diseases, conditions, disorders or pathologies, PEP5 is a peptide of general formula PEP3-AA¹¹-AA¹²; wherein PEP3 is selected from the group consisting of VPT, VPE, APT, TPT, VPA, APV, VPQ and VSQ; wherein AA¹¹ is selected from the group consisting of E, K, Q, R, A, D, G and H, in particular is selected from the group consisting of E, K, Q, R, A and D; wherein AA¹² is selected from the group consisting of L, M, T, E, Q and H, in particular selected from the group consisting of L, M and T. In one particular example, PEP5 is selected from the group consisting of VPTEL (SEQ ID NO: 84378), VPEKM (SEQ ID NO: 84360), APTKL (SEQ ID NO: 84131), APTQL (SEQ ID NO: 84134), VPTKL (SEQ ID NO: 84381), TPTKM (SEQ ID NO: 84327), VPARL (SEQ ID NO: 84352), VPTRL (SEQ ID NO: 84385), APVKT (SEQ ID NO: 84144), VPQAL (SEQ ID NO: 84364), VSQDL (SEQ ID NO: 84387) and VPQDL (SEQ ID NO: 84365).

[0836] In certain embodiments useful for inducing differentiation of mensenchymal or progenitor stem cells from the adipocyte lineage, regenerating adipose tissues and protecting patients from adipose tissue degeneration-related diseases, conditions, disorders or pathologies, PEP6 is a peptide of general formula AA²⁶-AA²⁷-AA²⁸-AA²⁹-PEP4; wherein PEP4 is selected from the group consisting of VVE, TVE, VVR, VVK, VAE, AVS, VVD, VEE, VRS and VKS; wherein AA²⁶ is absent or selected from the group consisting of AA^{III} amino acids, preferably is absent or E; wherein AA²⁷ and AA²⁸ are independently selected from the group consisting of AA^{III} and AA^{V} amino acids, preferably AA²⁷ is selected from the group consisting of D, E, N, G and M, preferably AA²⁸ is selected from the group consisting of M, I and V; wherein AA²⁹ is absent or selected from the group consisting of AA^{II} amino acids, preferably absent or S. In one particular example, PEP6 is selected from the group consisting of DMVVE (SEQ ID NO: 84161), NMTVE (SEQ ID NO: 84267), EMVVE (SEQ ID NO: 84175), NMVVR (SEQ ID NO: 84275), NMVVK (SEQ ID NO: 84274), EGMSVAE (SEQ ID NO: 84411), GMAVS (SEQ ID NO: 84194), GMVVD (SEQ ID NO: 84204), DMVVE (SEQ ID NO: 84161), MIVEE (SEQ ID NO: 84241), MIVRS (SEQ ID NO: 84243), MIVKS (SEQ ID NO: 84242) and MVVKS (SEQ ID NO: 84256).

[0837] In certain embodiments useful for inducing differentiation of mensenchymal or progenitor stem cells from the adipocyte lineage, regenerating adipose tissues and protecting patients from adipose tissue degeneration-related diseases, conditions, disorders or pathologies, PEP7 is an amino acid or a peptide with between two and seven amino acids of general formula AA¹-AA²-AA³-AA⁴-AA⁵-AA⁶-AA⁷ (SEQ ID NO: 84948); wherein AA¹, AA², AA³, AA⁴, and AA⁵ are independently absent or AA^{I} as defined herein; wherein AA⁶ is absent or selected from the group consisting of S, T, C, E, Q, P and R, preferably is selected from the group consisting of C, S and T; wherein AA⁷ is absent or is selected from the group consisting of S, T, C, E, Q, P and R, preferably is C or S; and wherein at least one of AA¹, AA², AA³, AA⁴, AA⁵, AA⁶ or AA⁷ is not absent. In one particular example, PEP7 is selected from the group consisting of KIPKAXX (SEQ ID NO: 84424), GIPEPXX (SEQ ID NO: 84419), SIPKAXX (SEQ ID NO: 84429), HVTKPTX (SEQ ID NO: 84422), YVPKPXX (SEQ ID NO: 84433), TVPKPXX (SEQ ID NO: 84432), AVPKAXX (SEQ ID NO: 84404), KVGKAXX (SEQ ID NO: 84425), KASKAXX (SEQ ID NO: 84423), GSAGPXX (SEQ ID NO: 84420), AAPASXX (SEQ ID NO: 84401), STPPTXX (SEQ ID NO: 84431), HVPKPXX (SEQ ID NO: 84421), RVPSTXX (SEQ ID NO: 84428), ASAAPXX (SEQ ID NO: 84402) and ASASPXX (SEQ ID NO: 84403).

[0838] In certain embodiments useful for inducing differentiation of mensenchymal or progenitor stem cells from the adipocyte lineage, regenerating adipose tissues and protecting patients from adipose tissue degeneration-related diseases, conditions, disorders or pathologies, PEP8 is an amino acid or a peptide with between two and six amino acids of general formula AA³³-AA³⁴-AA³⁵-AA³⁶-AA³⁷-AA³⁸ (SEQ ID NO: 84949); wherein AA³³ is absent or is selected from the group consisting of AA^{I} amino acids at the exception of AA^{VI} amino acids; AA³⁴ is absent or is selected from the group consisting of AA^{III} and AA^{IV} amino acids; wherein AA³⁵ is absent or is selected from the group consisting of AA^{II} amino acids, preferably is S or C; wherein AA³⁶ is absent or is selected from the group consisting of AA^{III} and AA^{IV} amino acids; wherein AA³⁷ is absent or is selected from the group consisting of AA^{II} amino acids, preferably is S or C; wherein AA³⁸ is absent or is selected from the group consisting of AA^{I}; and wherein at least one of AA³³, AA³⁴, AA³⁵, AA³⁶, AA³⁷ or AA³⁸ is not absent. In one particular example, PEP8 is selected from the group consisting of GXGXR (SEQ ID NO: 84208), SXAXR (SEQ ID NO: 84303), SXGXH (SEQ ID NO: 84304), AXGXH (SEQ ID NO: 84147), XGXR (SEQ ID NO: 84123), EXGXR (SEQ ID NO: 84179), RXGXS (SEQ ID NO: 84291), AXGXR (SEQ ID NO: 84148), SXGXR (SEQ ID NO: 84305), XGXL (SEQ ID NO: 84122) and XKXS (SEQ ID NO: 84124).

[0839] In certain embodiments useful for inducing differentiation of mensenchymal or progenitor stem cells from the adipocyte lineage, regenerating adipose tissues and protecting patients from adipose tissue degeneration-related diseases, conditions, disorders or pathologies, PEP9 is a peptide of general formula AA¹-AA²-AA³-AA⁴-AA⁵-AA⁶-AA⁷-PEP5; wherein PEP5 is a peptide of formula PEP3-AA¹¹-AA¹²; wherein PEP3 is selected from the group consisting of VPT, VPE, APT, TPT, VPA, APV, VPQ and VSQ; wherein AA¹¹ is selected from the group consisting of E, K, Q, R, A, D, G and H, in particular E, K, Q, R, A and D; wherein AA¹² is selected from the group consisting of L, M, T, E, Q and H, in particular selected from the group consisting of L, M and T; wherein AA¹, AA², AA³, AA⁴, and AA⁵ are independently absent or AA^{I} as defined herein; wherein AA⁶ is absent or selected from the group consisting of S, T, C, E, Q, P and R, preferably is selected from the group consisting of C, S and T; wherein AA⁷ is selected from the group consisting of S, T, C, E, Q, P and R, preferably is C or S. In one particular example, PEP9 is selected from the group consisting of KIPKAXXVPTEL (SEQ ID NO: 84770), GIPEPXXVPEKM (SEQ ID NO: 84718), SIPKAXXVPTEL (SEQ ID NO: 84830), HVTKPTXAPTKL (SEQ ID NO: 84742), YVPKPXXAPTKL (SEQ ID NO: 84864), TVPKPXXAPTQL (SEQ ID NO: 84854), AVPKAXXAPTKL (SEQ ID NO: 84704), KVGKAXXVPTKL (SEQ ID NO: 84780), KASKAXXVPTKL (SEQ ID NO: 84760), GSAGPXXTPTKM (SEQ ID NO: 84726), AAPASXXVPARL (SEQ ID NO: 84677), STPPTXXVPTRL (SEQ ID NO: 84850), HVPKPXXAPTKL (SEQ ID NO: 84734), RVPSTXXAPVKT (SEQ ID NO: 84815), ASAAPXXVPQAL (SEQ ID NO: 84689), ASASPXXVSQDL (SEQ ID NO: 84701) and ASASPXXVPQDL (SEQ ID NO: 84699).

[0840] In certain embodiments useful for inducing differentiation of mensenchymal or progenitor stem cells from the adipocyte lineage, regenerating adipose tissues and protecting patients from adipose tissue degeneration-related diseases, conditions, disorders or pathologies, PEP10 is a peptide of general formula PEP6-AA³³-AA³⁴-AA³⁵-AA³⁶-AA³⁷-AA³⁸; wherein PEP6 is a peptide of formula AA²⁶-AA²⁷-AA²⁸-AA²⁹-PEP4; wherein PEP4 is selected from the group consisting of VVE, TVE, VVR, VVK, VAE, AVS, VVD, VEE, VRS and VKS; wherein AA²⁶ is absent or selected from the group consisting of AA^{III} amino acids, preferably is absent or E; wherein AA²⁷ and AA²⁸ are independently selected from the group consisting of AA^{III} and AA^{V} amino acids, preferably AA²⁷ is selected from the group consisting of D, E, N, G and M, preferably AA²⁸ is selected from the group consisting of M, I and V; wherein AA²⁹ is absent or selected from the group consisting of AA^{II} amino acids, preferably absent or S; wherein AA³³ is absent or is selected from the group consisting of AA^{I} amino acids at the exception of AA^{VI} amino acids; AA³⁴ is absent or is selected from the group consisting of AA^{III} and AA^{IV} amino acids; wherein AA³⁵ is absent or is selected from the group consisting of AA^{II} amino acids, preferably is S or C; wherein AA³⁶ is absent or is selected from the group consisting of AA^{III} and AA^{IV} amino acids; wherein AA³⁷ is absent or is selected from the group consisting of AA^{II} amino acids, preferably is S or C; wherein AA³⁸ is absent or is selected from the group consisting of AA^{I}. In one particular example, PEP10 is selected from the group consisting of DMVVEGXGXR (SEQ ID NO: 84510), NMTVESXAXR (SEQ ID NO: 84604), EMVVEGXGXR (SEQ ID NO: 84529), NMVVRSXGXH (SEQ ID NO: 84629), NMVVRSXGXH (SEQ ID NO: 84629), NMVVRAXGXH (SEQ ID NO: 84627), NMVVKAXGXH (SEQ ID NO: 84624), EGMSVAEXGXR (SEQ ID NO: 84636), GMAVSEXGXR (SEQ ID NO: 84546), GMVVDRXGXS (SEQ ID NO: 84567), DMVVEAXGXR (SEQ ID NO: 84509), DMVVESXGXR (SEQ ID NO: 84511), NMVVRSXGXH (SEQ ID NO: 84629), MIVEEXGXL (SEQ ID NO: 84448), MIVRSXKXS (SEQ ID NO: 84453), MIVKSXKXS (SEQ ID NO: 84451) and MVVKSXKXS (SEQ ID NO: 84470).

[0841] In certain embodiments useful for inducing differentiation of mensenchymal or progenitor stem cells from the adipocyte lineage, regenerating adipose tissues and protecting patients from adipose tissue degeneration-related diseases, conditions, disorders or pathologies, PEP12 is a peptide of general formula PEP1-AA¹⁷-PEP11; wherein AA¹⁷ is selected from the group consisting of G, A, V, L, I, P, F, M, W, T and S (in particular is selected from the group consisting of M, V and T); wherein PEP1 is SAIS (SEQ ID NO: 84116) or NAIS (SEQ ID NO: 84113).

[0842] In certain embodiments useful for inducing differentiation of mensenchymal or progenitor stem cells from the adipocyte lineage, regenerating adipose tissues and protecting patients from adipose tissue degeneration-related diseases, conditions, disorders or pathologies, PEP11 is a peptide with 3 amino acids of general formula AA¹⁸-AA¹⁹-AA²⁰; wherein AA¹⁸ is selected from the group consisting of L, V, Q, A and R, in particular is L; wherein AA¹⁹ is selected from the group consisting of F, W, H and Y (in particular is a polar aromatic amino acid such as Y); wherein AA²⁰ is selected from the group consisting of L, F, Y, K, I, V and M, in particular is L or F. In one particular example, PEP11 is LYL or LYF.

[0843] The definitions of “PEP” pairs, quadruplets, hexaplets and heptuplet e.g. PEP1:PEP2, PEP12:PEP2, or PEP7:PEP5:PEP12:LINKER:PEP2:PEP6:PEP8, useful for inducing differentiation of mensenchymal or progenitor stem cells from the adipocyte lineage, regenerating adipose tissues and protecting patients from adipose tissue degeneration-related diseases, conditions, disorders or pathologies, are as already defined herein to the extent that PEP1 to PEP12 are particularly useful for these applications. For instances:

[0844] In certain embodiments useful for inducing differentiation of mensenchymal or progenitor stem cells from the adipocyte lineage, regenerating adipose tissues and protecting patients from adipose tissue degeneration-related diseases, conditions, disorders or pathologies, the pair PEP1:PEP2 is SAIS (SEQ ID NO: 84116):LKNYQ (SEQ ID NO: 84230) or NAIS (SEQ ID NO: 84113):LKKYR (SEQ ID NO: 84229).

[0845] In certain embodiments useful for inducing differentiation of mensenchymal or progenitor stem cells from the adipocyte lineage, regenerating adipose tissues and protecting patients from adipose tissue degeneration-related diseases, conditions, disorders or pathologies, the pair PEP12:PEP2 is SAIS-AA¹⁷-LYL (SEQ ID NO: 84881):LKNYQ (SEQ ID NO: 84230) or NAIS-AA¹⁷-LYF (SEQ ID NO: 84878):LKKYR (SEQ ID NO: 84229); wherein AA¹⁷ is selected from the group consisting of G, A, V, L, I, P, F, M, W, T and S (in particular is selected from the group consisting of M, V and T).

[0846] In certain embodiments useful for inducing differentiation of mensenchymal or progenitor stem cells from the adipocyte lineage, regenerating adipose tissues and protecting patients from adipose tissue degeneration-related diseases, conditions, disorders or pathologies, PEP3 is selected from the group consisting of VPT, VPE, APT, TPT, VPA, APV, VPQ and VSQ; PEP4 is selected from the group consisting of VVE, TVE, VVR, VVK, VAE, AVS, VVD, VEE, VRS and VKS; and wherein the pair PEP3:PEP4 is selected from the group consisting of VPT:VVE, VPE:TVE, APT:VVR, APT:VVK, VPT:VAE, VPT:AVS, TPT:VVD, VPA:VVE, APV:VEE, VPQ:VRS, VSQ:VKS and VPQ:VKS.

[0847] In certain embodiments useful for inducing differentiation of mensenchymal or progenitor stem cells from the adipocyte lineage, regenerating adipose tissues and protecting patients from adipose tissue degeneration-related diseases, conditions, disorders or pathologies, PEP5 is selected from the group consisting of VPTEL (SEQ ID NO: 84378), VPEKM (SEQ ID NO: 84360), APTKL (SEQ ID NO: 84131), APTQL (SEQ ID NO: 84134), VPTKL (SEQ ID NO: 84381), TPTKM (SEQ ID NO: 84327), VPARL (SEQ ID NO: 84352), VPTRL (SEQ ID NO: 84385), APVKT (SEQ ID NO: 84144), VPQAL (SEQ ID NO: 84364), VSQDL (SEQ ID NO: 84387) and VPQDL (SEQ ID NO: 84365); PEP6 is selected from the group consisting of DMVVE (SEQ ID NO: 84161), NMTVE (SEQ ID NO: 84267), EMVVE (SEQ ID NO: 84175), NMVVR (SEQ ID NO: 84275), NMVVK (SEQ ID NO: 84274), EGMSVAE (SEQ ID NO: 84411), GMAVS (SEQ ID NO: 84194), GMVVD (SEQ ID NO: 84204), DMVVE (SEQ ID NO: 84161), MIVEE (SEQ ID NO: 84241), MIVRS (SEQ ID NO: 84243), MIVKS (SEQ ID NO: 84242) and MVVKS (SEQ ID NO: 84256); and wherein the pair PEP5:PEP6 is selected from the group consisting of VPTEL (SEQ ID NO: 84378):DMVVE (SEQ ID NO: 84161), VPEKM (SEQ ID NO: 84360):NMTVE (SEQ ID NO: 84267), VPTEL (SEQ ID NO: 84378):EMVVE (SEQ ID NO: 84175), APTKL (SEQ ID NO: 84131):NMVVR (SEQ ID NO: 84275), APTQL (SEQ ID NO: 84134):NMVVR (SEQ ID NO: 84275), APTKL (SEQ ID NO: 84131):NMVVK (SEQ ID NO: 84274), VPTKL (SEQ ID NO: 84381):EGMSVAE (SEQ ID NO: 84411), VPTKL (SEQ ID NO: 84381):GMAVS (SEQ ID NO: 84194), TPTKM (SEQ ID NO: 84327):GMVVD (SEQ ID NO: 84204), VPARL (SEQ ID NO: 84352):DMVVE (SEQ ID NO: 84161), VPTRL (SEQ ID NO: 84385):DMVVE (SEQ ID NO: 84161), APVKT (SEQ ID NO: 84144):MIVEE (SEQ ID NO: 84241), VPQAL (SEQ ID NO: 84364):MIVRS (SEQ ID NO: 84243), VSQDL (SEQ ID NO: 84387):MIVKS (SEQ ID NO: 84242) and VPQDL (SEQ ID NO: 84365):MVVKS (SEQ ID NO: 84256).

[0848] In certain embodiments useful for inducing differentiation of mensenchymal or progenitor stem cells from the adipocyte lineage, regenerating adipose tissues and protecting patients from adipose tissue degeneration-related diseases, conditions, disorders or pathologies, PEP7 is selected from the group consisting of KIPKAXX (SEQ ID NO: 84424), GIPEPXX (SEQ ID NO: 84419), SIPKAXX (SEQ ID NO: 84429), HVTKPTX (SEQ ID NO: 84422), YVPKPXX (SEQ ID NO: 84433), TVPKPXX (SEQ ID NO: 84432), AVPKAXX (SEQ ID NO: 84404), KVGKAXX (SEQ ID NO: 84425), KASKAXX (SEQ ID NO: 84423), GSAGPXX (SEQ ID NO: 84420), AAPASXX (SEQ ID NO: 84401), STPPTXX (SEQ ID NO: 84431), HVPKPXX (SEQ ID NO: 84421), RVPSTXX (SEQ ID NO: 84428), ASAAPXX (SEQ ID NO: 84402) and ASASPXX (SEQ ID NO: 84403); wherein PEP8 is selected from the group consisting of GXGXR (SEQ ID NO: 84208), SXAXR (SEQ ID NO: 84303), SXGXH (SEQ ID NO: 84304), AXGXH (SEQ ID NO: 84147), XGXR (SEQ ID NO: 84123), EXGXR (SEQ ID NO: 84179), RXGXS (SEQ ID NO: 84291), AXGXR (SEQ ID NO: 84148), SXGXR (SEQ ID NO: 84305), XGXL (SEQ ID NO: 84122) and XKXS (SEQ ID NO: 84124); and wherein the pair PEP7:PEP8 is selected from the group consisting of KIPKAXX (SEQ ID NO: 84424):GXGXR (SEQ ID NO: 84208), GIPEPXX (SEQ ID NO: 84419):SXAXR (SEQ ID NO: 84303), SIPKAXX (SEQ ID NO: 84429):GXGXR (SEQ ID NO: 84208), HVTKPTX (SEQ ID NO: 84422):SXGXH (SEQ ID NO: 84304), YVPKPXX (SEQ ID NO: 84433):SXGXH (SEQ ID NO: 84304), TVPKPXX (SEQ ID NO: 84432):AXGXH (SEQ ID NO: 84147), AVPKAXX (SEQ ID NO: 84404):AXGXH (SEQ ID NO: 84147), KVGKAXX (SEQ ID NO: 84425):XGXR (SEQ ID NO: 84123), KASKAXX (SEQ ID NO: 84423):EXGXR (SEQ ID NO: 84179), GSAGPXX (SEQ ID NO: 84420):RXGXS (SEQ ID NO: 84291), AAPASXX (SEQ ID NO: 84401):AXGXR (SEQ ID NO: 84148), STPPTXX (SEQ ID NO: 84431):SXGXR (SEQ ID NO: 84305), HVPKPXX (SEQ ID NO: 84421):SXGXH (SEQ ID NO: 84304), RVPSTXX (SEQ ID NO: 84428):XGXL (SEQ ID NO: 84122), ASAAPXX (SEQ ID NO: 84402):XKXS (SEQ ID NO: 84124) and ASASPXX (SEQ ID NO: 84403):XKXS (SEQ ID NO: 84124).

[0849] In certain embodiments useful for inducing differentiation of mensenchymal or progenitor stem cells from the adipocyte lineage, regenerating adipose tissues and protecting patients from adipose tissue degeneration-related diseases, conditions, disorders or pathologies, PEP9 is selected from the group consisting of KIPKAXXVPTEL (SEQ ID NO: 84770), GIPEPXXVPEKM (SEQ ID NO: 84718), SIPKAXXVPTEL (SEQ ID NO: 84830), HVTKPTXAPTKL (SEQ ID NO: 84742), YVPKPXXAPTKL (SEQ ID NO: 84864), TVPKPXXAPTQL (SEQ ID NO: 84854), AVPKAXXAPTKL (SEQ ID NO: 84704), KVGKAXXVPTKL (SEQ ID NO: 84780), KASKAXXVPTKL (SEQ ID NO: 84760), GSAGPXXTPTKM (SEQ ID NO: 84726), AAPASXXVPARL (SEQ ID NO: 84677), STPPTXXVPTRL (SEQ ID NO: 84850), HVPKPXXAPTKL (SEQ ID NO: 84734), RVPSTXXAPVKT (SEQ ID NO: 84815), ASAAPXXVPQAL (SEQ ID NO: 84689), ASASPXXVSQDL (SEQ ID NO: 84701) and ASASPXXVPQDL (SEQ ID NO: 84699); PEP10 is selected from the group consisting of DMVVEGXGXR (SEQ ID NO: 84510), NMTVESXAXR (SEQ ID NO: 84604), EMVVEGXGXR (SEQ ID NO: 84529), NMVVRSXGXH (SEQ ID NO: 84629), NMVVRSXGXH (SEQ ID NO: 84629), NMVVRAXGXH (SEQ ID NO: 84627), NMVVKAXGXH (SEQ ID NO: 84624), EGMSVAEXGXR (SEQ ID NO: 84636), GMAVSEXGXR (SEQ ID NO: 84546), GMVVDRXGXS (SEQ ID NO: 84567), DMVVEAXGXR (SEQ ID NO: 84509), DMVVESXGXR (SEQ ID NO: 84511), NMVVRSXGXH (SEQ ID NO: 84629), MIVEEXGXL (SEQ ID NO: 84448), MIVRSXKXS (SEQ ID NO: 84453), MIVKSXKXS (SEQ ID NO: 84451) and MVVKSXKXS (SEQ ID NO: 84470); and wherein the pair PEP9:PEP10 is selected from the group consisting of KIPKAXXVPTEL (SEQ ID NO: 84770):DMVVEGXGXR (SEQ ID NO: 84510), GIPEPXXVPEKM (SEQ ID NO: 84718):NMTVESXAXR (SEQ ID NO: 84604), SIPKAXXVPTEL (SEQ ID NO: 84830):EMVVEGXGXR (SEQ ID NO: 84529), HVTKPTXAPTKL (SEQ ID NO: 84742):NMVVRSXGXH (SEQ ID NO: 84629), YVPKPXXAPTKL (SEQ ID NO: 84864):NMVVRSXGXH (SEQ ID NO: 84629), TVPKPXXAPTQL (SEQ ID NO: 84854):NMVVRAXGXH (SEQ ID NO: 84627), AVPKAXXAPTKL (SEQ ID NO: 84704):NMVVKAXGXH (SEQ ID NO: 84624), KVGKAXXVPTKL (SEQ ID NO: 84780):EGMSVAEXGXR (SEQ ID NO: 84636), KASKAXXVPTKL (SEQ ID NO: 84760):GMAVSEXGXR (SEQ ID NO: 84546), GSAGPXXTPTKM (SEQ ID NO: 84726):GMVVDRXGXS (SEQ ID NO: 84567), AAPASXXVPARL (SEQ ID NO: 84677):DMVVEAXGXR (SEQ ID NO: 84509), STPPTXXVPTRL (SEQ ID NO: 84850):DMVVESXGXR (SEQ ID NO: 84511), HVPKPXXAPTKL (SEQ ID NO: 84734):NMVVRSXGXH (SEQ ID NO: 84629), RVPSTXXAPVKT (SEQ ID NO: 84815):MIVEEXGXL (SEQ ID NO: 84448), ASAAPXXVPQAL (SEQ ID NO: 84689):MIVRSXKXS (SEQ ID NO: 84453), ASASPXXVSQDL (SEQ ID NO: 84701):MIVKSXKXS (SEQ ID NO: 84451) and ASASPXXVPQDL (SEQ ID NO: 84699):MVVKSXKXS (SEQ ID NO: 84470).

[0850] In certain embodiments useful for inducing differentiation of mensenchymal or progenitor stem cells from the adipocyte lineage, regenerating adipose tissues and protecting patients from adipose tissue degeneration-related diseases, conditions, disorders or pathologies, PEP5 is selected from the group consisting of VPTEL (SEQ ID NO: 84378), VPEKM (SEQ ID NO: 84360), APTKL (SEQ ID NO: 84131), APTQL (SEQ ID NO: 84134), VPTKL (SEQ ID NO: 84381), TPTKM (SEQ ID NO: 84327), VPARL (SEQ ID NO: 84352), VPTRL (SEQ ID NO: 84385), APVKT (SEQ ID NO: 84144), VPQAL (SEQ ID NO: 84364), VSQDL (SEQ ID NO: 84387) and VPQDL (SEQ ID NO: 84365); PEP6 is selected from the group consisting of DMVVE (SEQ ID NO: 84161), NMTVE (SEQ ID NO: 84267), EMVVE (SEQ ID NO: 84175), NMVVR (SEQ ID NO: 84275), NMVVK (SEQ ID NO: 84274), EGMSVAE (SEQ ID NO: 84411), GMAVS (SEQ ID NO: 84194), GMVVD (SEQ ID NO: 84204), DMVVE (SEQ ID NO: 84161), MIVEE (SEQ ID NO: 84241), MIVRS (SEQ ID NO: 84243), MIVKS (SEQ ID NO: 84242) and MVVKS (SEQ ID NO: 84256); and wherein the pair PEP5:PEP6 is selected from the group consisting of VPTEL (SEQ ID NO: 84378):DMVVE (SEQ ID NO: 84161), VPEKM (SEQ ID NO: 84360):NMTVE (SEQ ID NO: 84267), VPTEL (SEQ ID NO: 84378):EMVVE (SEQ ID NO: 84175), APTKL (SEQ ID NO: 84131):NMVVR (SEQ ID NO: 84275), APTQL (SEQ ID NO: 84134):NMVVR (SEQ ID NO: 84275), APTKL (SEQ ID NO: 84131):NMVVK (SEQ ID NO: 84274), VPTKL (SEQ ID NO: 84381):EGMSVAE (SEQ ID NO: 84411), VPTKL (SEQ ID NO: 84381):GMAVS (SEQ ID NO: 84194), TPTKM (SEQ ID NO: 84327):GMVVD (SEQ ID NO: 84204), VPARL (SEQ ID NO: 84352):DMVVE (SEQ ID NO: 84161), VPTRL (SEQ ID NO: 84385):DMVVE (SEQ ID NO: 84161), APVKT (SEQ ID NO: 84144):MIVEE (SEQ ID NO: 84241), VPQAL (SEQ ID NO: 84364):MIVRS (SEQ ID NO: 84243), VSQDL (SEQ ID NO: 84387):MIVKS (SEQ ID NO: 84242) and VPQDL (SEQ ID NO: 84365):MVVKS (SEQ ID NO: 84256); wherein the pair PEP5:PEP6 is not VPTEL (SEQ ID NO: 84378):DMVVE (SEQ ID NO: 84161) when PEP1 is SAIS (SEQ ID NO: 84116) and PEP2 is LKNYQ (SEQ ID NO: 84230); wherein the pair PEP5:PEP6 is not VPTEL (SEQ ID NO: 84378):EMVVE (SEQ ID NO: 84175) when PEP1 is SAIS (SEQ ID NO: 84116) and PEP2 is LKNYQ (SEQ ID NO: 84230); wherein the pair PEP5:PEP6 is not APTQL (SEQ ID NO: 84134):NMVVR (SEQ ID NO: 84275) when PEP1 is NAIS (SEQ ID NO: 84113) and PEP2 is LKKYR (SEQ ID NO: 84229); and wherein the pair PEP5:PEP6 is not APTKL (SEQ ID NO: 84131):NMVVR (SEQ ID NO: 84275) when PEP1 is NAIS (SEQ ID NO: 84113) and PEP2 is LKKYR (SEQ ID NO: 84229).

[0851] In certain embodiments useful for inducing differentiation of mensenchymal or progenitor stem cells from the adipocyte lineage, regenerating adipose tissues and protecting patients from adipose tissue degeneration-related diseases, conditions, disorders or pathologies, PEP9 is selected from the group consisting of KIPKAXXVPTEL (SEQ ID NO: 84770), GIPEPXXVPEKM (SEQ ID NO: 84718), SIPKAXXVPTEL (SEQ ID NO: 84830), HVTKPTXAPTKL (SEQ ID NO: 84742), YVPKPXXAPTKL (SEQ ID NO: 84864), TVPKPXXAPTQL (SEQ ID NO: 84854), AVPKAXXAPTKL (SEQ ID NO: 84704), KVGKAXXVPTKL (SEQ ID NO: 84780), KASKAXXVPTKL (SEQ ID NO: 84760), GSAGPXXTPTKM (SEQ ID NO: 84726), AAPASXXVPARL (SEQ ID NO: 84677), STPPTXXVPTRL (SEQ ID NO: 84850), HVPKPXXAPTKL (SEQ ID NO: 84734), RVPSTXXAPVKT (SEQ ID NO: 84815), ASAAPXXVPQAL (SEQ ID NO: 84689), ASASPXXVSQDL (SEQ ID NO: 84701) and ASASPXXVPQDL (SEQ ID NO: 84699); PEP10 is selected from the group consisting of DMVVEGXGXR (SEQ ID NO: 84510), NMTVESXAXR (SEQ ID NO: 84604), EMVVEGXGXR (SEQ ID NO: 84529), NMVVRSXGXH (SEQ ID NO: 84629), NMVVRSXGXH (SEQ ID NO: 84629), NMVVRAXGXH (SEQ ID NO: 84627), NMVVKAXGXH (SEQ ID NO: 84624), EGMSVAEXGXR (SEQ ID NO: 84636), GMAVSEXGXR (SEQ ID NO: 84546), GMVVDRXGXS (SEQ ID NO: 84567), DMVVEAXGXR (SEQ ID NO: 84509), DMVVESXGXR (SEQ ID NO: 84511), NMVVRSXGXH (SEQ ID NO: 84629), MIVEEXGXL (SEQ ID NO: 84448), MIVRSXKXS (SEQ ID NO: 84453), MIVKSXKXS (SEQ ID NO: 84451) and MVVKSXKXS (SEQ ID NO: 84470); and wherein the pair PEP9:PEP10 is selected from the group consisting of KIPKAXXVPTEL (SEQ ID NO: 84770):DMVVEGXGXR (SEQ ID NO: 84510), GIPEPXXVPEKM (SEQ ID NO: 84718):NMTVESXAXR (SEQ ID NO: 84604), SIPKAXXVPTEL (SEQ ID NO: 84830):EMVVEGXGXR (SEQ ID NO: 84529), HVTKPTXAPTKL (SEQ ID NO: 84742):NMVVRSXGXH (SEQ ID NO: 84629), YVPKPXXAPTKL (SEQ ID NO: 84864):NMVVRSXGXH (SEQ ID NO: 84629), TVPKPXXAPTQL (SEQ ID NO: 84854):NMVVRAXGXH (SEQ ID NO: 84627), AVPKAXXAPTKL (SEQ ID NO: 84704):NMVVKAXGXH (SEQ ID NO: 84624), KVGKAXXVPTKL (SEQ ID NO: 84780):EGMSVAEXGXR (SEQ ID NO: 84636), KASKAXXVPTKL (SEQ ID NO: 84760):GMAVSEXGXR (SEQ ID NO: 84546), GSAGPXXTPTKM (SEQ ID NO: 84726):GMVVDRXGXS (SEQ ID NO: 84567), AAPASXXVPARL (SEQ ID NO: 84677):DMVVEAXGXR (SEQ ID NO: 84509), STPPTXXVPTRL (SEQ ID NO: 84850):DMVVESXGXR (SEQ ID NO: 84511), HVPKPXXAPTKL (SEQ ID NO: 84734):NMVVRSXGXH (SEQ ID NO: 84629), RVPSTXXAPVKT (SEQ ID NO: 84815):MIVEEXGXL (SEQ ID NO: 84448), ASAAPXXVPQAL (SEQ ID NO: 84689):MIVRSXKXS (SEQ ID NO: 84453), ASASPXXVSQDL (SEQ ID NO: 84701):MIVKSXKXS (SEQ ID NO: 84451) and ASASPXXVPQDL (SEQ ID NO: 84699):MVVKSXKXS (SEQ ID NO: 84470); wherein the pair PEP9:PEP10 is not KIPKAXXVPTEL (SEQ ID NO: 84770):DMVVEGXGXR (SEQ ID NO: 84510) when PEP1 is SAIS (SEQ ID NO: 84116) and PEP2 is LKNYQ (SEQ ID NO: 84230); wherein the pair PEP9:PEP10 is not SIPKAXXVPTEL (SEQ ID NO: 84830):EMVVEGXGXR (SEQ ID NO: 84529) when PEP1 is SAIS (SEQ ID NO: 84116) and PEP2 is LKNYQ (SEQ ID NO: 84230); wherein the pair PEP9:PEP10 is not HVTKPTXAPTKL (SEQ ID NO: 84742):NMVVRSXGXH (SEQ ID NO: 84629) when PEP1 is NAIS (SEQ ID NO: 84113) and PEP2 is LKKYR (SEQ ID NO: 84229); wherein the pair PEP9:PEP10 is not YVPKPXXAPTKL (SEQ ID NO: 84864):NMVVRSXGXH (SEQ ID NO: 84629) when PEP1 is NAIS (SEQ ID NO: 84113) and PEP2 is LKKYR (SEQ ID NO: 84229); wherein the pair PEP9:PEP10 is not TVPKPXXAPTQL (SEQ ID NO: 84854):NMVVRAXGXH (SEQ ID NO: 84627) when PEP1 is NAIS (SEQ ID NO: 84113) and PEP2 is LKKYR (SEQ ID NO: 84229); and wherein the pair PEP9:PEP10 is not HVPKPXXAPTKL (SEQ ID NO: 84734):NMVVRSXGXH (SEQ ID NO: 84629) when PEP1 is NAIS (SEQ ID NO: 84113) and PEP2 is LKKYR (SEQ ID NO: 84229).

[0852] In certain embodiments useful for inducing differentiation of mensenchymal or progenitor stem cells from the adipocyte lineage, regenerating adipose tissues and protecting patients from adipose tissue degeneration-related diseases, conditions, disorders or pathologies, PEP1 is SAIS (SEQ ID NO: 84116) or NAIS (SEQ ID NO: 84113); PEP11 is LYL or LYF; and the pair PEP1:PEP11 is SAIS (SEQ ID NO: 84116):LYL or N AIS (SEQ ID NO: 84113):LYF.

[0853] In one aspect, the present disclosure provides a GFR-binding compound, wherein said GFR-binding compound is a peptide, a variant or analog thereof, or a peptidomimetic as defined herein, with between 20 and 60 (in particular between 20 and 50, and more particularly, between 20 and 45) amino acids, comprising a peptide with four amino acids (PEP1) or a peptide with eight amino acids (PEP12), a peptide with five amino acids (PEP2), and optionally a pair of peptides selected form the group consisting of PEP3:PEP4, PEP3:PEP6, PEP3:PEP10, PEP5:PEP4, PEP9:PEP4, PEP5:PEP6, PEP5:PEP10, PEP9:PEP6 and PEP9:PEP10; wherein said GFR-binding compound does not comprise the pair of peptides VPTEL (SEQ ID NO: 84378):DMVVE (SEQ ID NO: 84161) when PEP1 is SAIS (SEQ ID NO: 84116) and PEP2 is LKNYQ (SEQ ID NO: 84230); wherein said GFR-binding compound does not comprise the pair of peptides VPTEL (SEQ ID NO: 84378):EMVVE (SEQ ID NO: 84175) when PEP1 is SAIS (SEQ ID NO: 84116) and PEP2 is LKNYQ (SEQ ID NO: 84230); wherein said GFR-binding compound does not comprise the pair of peptides APTQL (SEQ ID NO: 84134):NMVVR (SEQ ID NO: 84275) when PEP1 is NAIS (SEQ ID NO: 84113) and PEP2 is LKKYR (SEQ ID NO: 84229); and wherein said GFR-binding compound does not comprise the pair of peptides APTKL (SEQ ID NO: 84131):NMVVR (SEQ ID NO: 84275) when PEP1 is NAIS (SEQ ID NO: 84113) and PEP2 is LKKYR (SEQ ID NO: 84229); and wherein the RMSD is 2.45 Å or less.

[0854] In one aspect, the present disclosure provides a GFR-binding compound, wherein said GFR-binding compound is a peptide, a variant or analog thereof, or a peptidomimetic as defined herein, with between 20 and 60 (in particular between 20 and 50, and more particularly, between 20 and 45) amino acids, comprising a peptide with four amino acids (PEP1) or a peptide with eight amino acids (PEP12), a peptide with five amino acids (PEP2), and optionally a pair of peptides selected form the group consisting of PEP3:PEP4, PEP3:PEP6, PEP3:PEP10, PEP5:PEP4, PEP9:PEP4, PEP5:PEP6, PEP5:PEP10, PEP9:PEP6 and PEP9:PEP10; wherein said GFR-binding compound does not comprise the pair of peptides KIPKAXXVPTEL (SEQ ID NO: 84770):DMVVEGXGXR (SEQ ID NO: 84510) when PEP1 is SAIS (SEQ ID NO: 84116) and PEP2 is LKNYQ (SEQ ID NO: 84230); wherein said GFR-binding compound does not comprise the pair of peptides SIPKAXXVPTEL (SEQ ID NO: 84830):EMVVEGXGXR (SEQ ID NO: 84529) when PEP1 is SAIS (SEQ ID NO: 84116) and PEP2 is LKNYQ (SEQ ID NO: 84230); wherein said GFR-binding compound does not comprise the pair of peptides HVTKPTXAPTKL (SEQ ID NO: 84742):NMVVRSXGXH (SEQ ID NO: 84629) when PEP1 is NAIS (SEQ ID NO: 84113) and PEP2 is LKKYR (SEQ ID NO: 84229); wherein said GFR-binding compound does not comprise the pair of peptides YVPKPXXAPTKL (SEQ ID NO: 84864):NMVVRSXGXH (SEQ ID NO: 84629) when PEP1 is NAIS (SEQ ID NO: 84113) and PEP2 is LKKYR (SEQ ID NO: 84229); wherein said GFR-binding compound does not comprise the pair of peptides TVPKPXXAPTQL (SEQ ID NO: 84854):NMVVRAXGXH (SEQ ID NO: 84627) when PEP1 is NAIS (SEQ ID NO: 84113) and PEP2 is LKKYR (SEQ ID NO: 84229); and wherein said GFR-binding compound does not comprise the pair of peptides HVPKPXXAPTKL (SEQ ID NO: 84734):NMVVRSXGXH (SEQ ID NO: 84629) when PEP1 is NAIS (SEQ ID NO: 84113) and PEP2 is LKKYR (SEQ ID NO: 84229); and wherein the RMSD is 2.45 Å or less.

[0855] In certain embodiments useful for inducing differentiation of mensenchymal or progenitor stem cells from the adipocyte lineage, regenerating adipose tissues and protecting patients from adipose tissue degeneration-related diseases, conditions, disorders or pathologies, said GFR-binding compound is a synthetic molecule as defined herein in the definition section.

[0856] In certain embodiments useful for inducing differentiation of mensenchymal or progenitor stem cells from the adipocyte lineage, regenerating adipose tissues and protecting patients from adipose tissue degeneration-related diseases, conditions, disorders or pathologies, said GFR-binding compound is a synthetic peptide, or a variant or analog thereof, or a peptidomimetic.

### Tissue Closure

[0857] In certain embodiments useful for promoting tissue closure, the choice of PEP1, PEP2, PEP3, PEP4, PEP5, PEP6, PEP7, PEP8, PEP9, PEP10, PEP12, PEP11 and AA¹⁷ will depend on the type of specific tissue closure to be performed and may include any of the suitable amino acids, peptides, analog or variant thereof, or peptidomimetic, already disclosed herein with respect to the bone, cartilage, vascular, wound healing, neuronal, eye-retinal, kidneys, liver, L/T and skin applications. For instance, in certain embodiments, during bone repair surgery, different layers of tissue such as skin, muscle and blood vessel are incised in order to reach the damaged bone part. Thus, suitable PEP1, PEP2, PEP3, PEP4, PEP5, PEP6, PEP7, PEP8, PEP9, PEP10, PEP12, PEP11 and AA¹⁷ for implementing embodiments of the invention in this specific situation may include such amino acids, peptides, analog or variant thereof, or peptidomimetic, already described herein with respect to skin, muscle, vascular and bone tissue regeneration/formation and cell migration. Likewise, for example, in certain embodiments, during heart surgery, different layers of tissue such as skin, muscle and blood vessel, are incised in order to reach the patient's heart. Thus, suitable PEP1, PEP2, PEP3, PEP4, PEP5, PEP6, PEP7, PEP8, PEP9, PEP10, PEP12, PEP11 and AA¹⁷ for implementing embodiments of the invention in this specific situation include such amino acids, peptides, analog or variant thereof, or peptidomimetic, already described herein with respect to the skin, muscle and blood vessel tissue regeneration/formation and cell migration.

### Interactions

[0858] GFR-binding compounds may form at least one intramolecular non-covalent interaction. Such interactions may be one of electrostatic interactions, π-interactions, van der Waals forces, hydrophobic interactions or any combinations thereof. Such interactions may be formed between 2 or more amino acids' side chains, between 2 or more amino acids' backbones or between amino acids' side chains and backbones. Such interactions may increase the stability of the GFR-binding compounds in vitro and/or in vivo thus reducing or preventing physiological degradation. In one example, GFR-binding compounds may form at least one, preferably more than one, of the following intramolecular non-covalent interactions: AA²⁰///AA²⁰⁶, AA¹⁹///AA²⁰⁷, AA¹⁸///AA²¹, AA¹⁷///AA²², AA¹⁶///AA²³, AA¹⁵///AA²⁴, AA¹⁵///AA²⁵, wherein /// represents a non-covalent interaction.

### III. Bioactive Carriers

[0859] The present invention may achieve its intended therapeutic and/or cosmetic action(s) e.g. through efficient tissue induction, by functional combination (or association) with a bioactive carrier.

[0860] In one example, said GFR-binding compound and said bioactive carrier are thus operably associated, combined, linked or connected as defined herein and thus may form a pharmaceutical, dermatological, prophylactic, diagnostic, imaging or cosmetic association or combination for uses and methods as defined herein.

[0861] As may be used herein, the term “bioactive carrier”, “biocompatible carrier”, “bioactive material”, “biocompatible material”, “bioactive substance”, “bio-substance”, “biocompatible substance”, are used interchangeably.

[0862] A suitable bioactive carrier is compatible with living cells, tissues, organs or systems posing little to no risk of injury, toxicity or rejection by the immune system. Bioactive carriers suitable for implementing embodiments of the present invention include, but are not limited to, (a) a biopolymer such as (a1) collagen, (a2) fibrin; (b) a synthetic polymer such as (b1) ultra-high molecular weight polyethylene (UHMWPE), (b2) polyurethane (PE), (b3) polyurethane (PU), (b4) polytetrafluoroethylene (PTFE), (b5) polyacetal (PA), (b6) polymethylmethacrylate (PMMA), (b7) polyethylene terephtalate (PET), (b8) silicone rubber (SR), (b9) polyetheretherketone (PEEK), (b10) poly(lactic acid) (PLA), (b11) polysulfone (PS), (b12) PLLA, (b13) PLGA or (b14) PLDA; (c) metals and metal oxides such as (c1) gold and gold alloys, (c2) silver and silver alloys, (c3) platinum and platinum alloys, (c4) tantalum, (c5) Ti6Al4V, (c6) 316L stainless steel, (c7) Co—Cr Alloys, (c8) titanium alloys such as such as □-type, β-type, □+□-type Ti alloy, Ti—Nb alloys such as Ti29Nb13Ta4.6Zr or Ti35Nb4Sn); (d) metallic glasses; (e) amorphous alloys such as Zr-based alloys; (f) porous metals such as the ones reported in Ryan et al., 2006, Biomaterials, 27, 2651; Lopez-Heredia et al. 2008, Biomaterials, 29, 2608; Ryan et al., 2008, Biomaterials, 29, 3625; Li et al., 2007, Biomaterials, 28, 2810; or Hollander et al., 2006, Biomaterials, 27, 955; all being incorporated herein in their entirety; (g) gel or solid ceramics such as (g1) alumina, (g2) zirconia, (g3) carbon, (g4) titania, (g5) bioglass, or (g6) hydroxyapatite (HA); (h) composites such as (h1) silica/SR, (h2) CF/UHMWPE, (h3) CF/PTFE, (h4) HA/PE, (h5) CF/epoxy, (h6) CF/PEEK, (h7) CF/C or (h8) Al₂O₃/PTFE; (i) hydrogels such as (i1) polyisocyanopeptide hydrogels such as oligo(ethylene)glycol polyisocyanopeptides as described, for instance, in Van Buul, et al.; Chem. Sci. 4, 2357-2363 (2013), incorporated herein by reference in its entirety, (i2) polysaccharides such as alginates, chitosans, chitins, guar gums, pectins, gellan gums, heparins, carrageenans, hyaluronans, starches, agars, xanthan gums, methylcellulose, carboxymethylcellulose, hydroxypropyl methyl cellulose, (i3) polyglycols such as polyethyleneglycol or polypropyleneglycol, (i4) polyvinylpyrrolidone, (i5) poly(vinylalcohol), (i6) polyacrylic acids, (i7) glycerophosphates, (i8) 2-acrylamido-2-methylpropanesulfonic acid, (i9) polyphosphazenes; (j) other suitable materials such as demineralized bone matrix; and any combinations thereof.

[0863] Suitable sources of bioactive carriers for implementing embodiments of the present invention include, but are not limited to, autographs, allographs, xenographs, plants, solutions, excipients, ceramics, metals, metal alloys, organic and inorganic polymers, bioglasses, carbon-containing structures, or combination thereof.

[0864] Particularly suitable as bioactive carriers for implementing embodiments of the present invention include bioactive carriers comprising at least one naturally occurring hydroxyl group on at least one surface thereof and bioactive carriers which do not naturally comprise at least one hydroxyl group on a surface thereof but which have been modified using conventional surface treatment techniques such that at least one hydroxyl group is present on a surface of the bioactive carrier. In one example, said hydroxyl group is an available hydroxyl group i.e. it is not prevented from interacting and/or reacting with a compound of the present disclosure. Suitable as bioactive carriers naturally containing hydroxyl groups on a surface thereof for implementing embodiments of the invention specifically include metal oxides such as titanium oxides and non-metal oxides such ceramics. Also suitable as bioactive carriers for implementing embodiments of the invention include bioactive carriers comprising at least one naturally occurring carboxylate group (—COOH) or amine group (—NH₂) on at least one of a surface thereof and bioactive carriers which do not naturally comprise at least one carboxylate group (—COOH) or amine group (—NH₂) onto a surface thereof but which have been modified using conventional surface treatment techniques such that at least one carboxylate group (—COOH) or amine group (—NH₂) is present on a surface of the bioactive carrier.

[0865] In one example, said bioactive carrier includes a biomaterial. Suitable biomaterials for implementing certain embodiments of the present disclosure may be derived from nature or synthesized in the laboratory using a variety of chemical approaches utilizing metallic components, polymers, ceramics or composite materials. They are often used and/or adapted for a medical application, and thus comprise whole or part of a living structure or biomedical device. Suitable biomaterials for implementing certain embodiments of the present disclosure are commonly used in joint replacements, bone plates, bone cement, artificial ligaments and tendons, dental implants for tooth fixation, blood vessel prostheses, heart valves, skin repair devices (artificial tissue), cochlear replacements, contact lenses, breast implants, drug delivery mechanisms, sustainable materials, vascular grafts, stents, nerve conduits. Particularly suitable biomaterials for implementing certain embodiments of the present disclosure such as metals and alloys (pages 94-95), ceramics (pages 95-97), polymeric biomaterials (pages 97-98) and biocomposite materials (pages 98-99) are described in Nitesh et al., International Journal of Emerging Technology and Advanced Engineering, ISSN 2250-2459, Volume 2, Issue 4, 2012, which is herein incorporated by reference in its entirety.

[0866] In one particular example, said bioactive carrier is a biomaterial.

[0867] In certain embodiments, particularly suitable bioactive carriers are selected from the group consisting of bioinert biomaterials, bioactive biomaterials and bioresorbable biomaterials.

[0868] The nature of the biomaterial is an important parameter. Particularly good results have been obtained using bioactive carriers composed mostly with the main material component of the tissue to be regenerated and/or repaired. This generally allows for a better integration of the bioactive carrier, a better resorption from the surrounding cells already present and therefore a better regeneration or repair of the targeted tissue to be achieved. For example, it was discovered that particularly good results may be obtained when a solid ceramic component (granulated ceramic powder or ceramic scaffolds) or a gel ceramic component is used in combination of a GFR-binding peptide of the present disclosure to regenerate bone and protect from osteoporosis. For example, it was also discovered that particularly good results may be obtained when collagen, in particular collagen types I, II, III and XI, is used in combination of a GFR-binding peptide of the present disclosure to regenerate cartilage. For example, it was also discovered that particularly good results may be obtained when collagen, in particular collagen types I and III, or a biodegradable hydrogel is used in combination of a GFR-binding peptide of the present disclosure to regenerate muscle, skin, tendons and ligaments. For example, it was also discovered that particularly good results may be obtained when a collagen or a biodegradable hydrogel is used in combination of a GFR-binding peptide of the present disclosure to regenerate tissues and/or functions of vascular, neuron, eye retina, renal, wound healing, hair, fertility and reproduction, lung, and adipose tissues.

[0869] Bioinert biomaterials: As used herein, unless indicated otherwise or contradictory in context, the term “bioinert biomaterials” refers to any material that once placed in the human body has minimal interaction with its surrounding tissue. Examples of these are stainless steel, titanium, alumina, partially stabilised zirconia, and ultra-high molecular weight polyethylene. Generally a fibrous capsule might form around bioinert implants hence its biofunctionality relies on tissue integration through the implant.

[0870] Bioactive biomaterial: As used herein, unless indicated otherwise or contradictory in context, the term “bioactive biomaterial” refers to a material which, upon being placed within the human body, interacts with the surrounding bone and in some cases, even soft tissue. This occurs through a time-dependent kinetic modification of the surface, triggered by their implantation within the living bone. An ion-exchange reaction between the bioactive implant and surrounding body fluids, results in the formation of a biologically active carbonate apatite (CHAp) layer on the implant that is chemically and crystallographically equivalent to the mineral phase in bone. Examples of these materials are synthetic hydroxyapatite [Ca₁₀(PO₄)₆(OH)₂], glass ceramic A-W and Bioglass®.

[0871] Bioresorbable Biomaterials: As used herein, unless indicated otherwise or contradictory in context, the term “bioresorbable biomaterials” refers to a material which, upon placement within the human body, starts to dissolve (resorbed) and slowly replaced by advancing tissue (such as bone). Examples of bioresorbable materials include, but are not limited to, tricalcium phosphate [Ca₃(PO₄)₂], polylactic-polyglycolic acid copolymers, calcium oxide, calcium carbonate and gypsum.

[0872] Therefore, no particular limitation should be ascribed to the substance, material or molecule suitable as being bioactive carriers for implementing embodiments of the present invention insofar as said substance, material or molecule is (a) biocompatible as defined herein and (b) combinable or associable with a GFR-binding compound as defined herein. In one preferred example, said bioactive carrier has a stiffness of at least 5 kPa, more preferably at least 35 kPa and preferably not more than 3 or 5 GPa as measured using conventional Dynamic Mechanical Analysis such as described in details in Gong J P et al., Double-network hydrogels with extremely high mechanical strength, Adv Mater 2003, 15(14), 1155e8, which is incorporated herein by reference.

[0873] In one particular example, a biomaterial as defined herein for use in neuron-related applications has a stiffness comprised between about 0.01 kPa and about 3 kPa, preferably between about 0.01 kPa and about 1 kPa. In one particular example, a biomaterial as defined herein for use in muscle, cartilage and tendon/ligament-related applications has a stiffness comprised between about 3 kPa and about 200 kPa, preferably between about 10 kPa and about 30 kPa. In one particular example, a biomaterial as defined herein for use in bone-related applications has a stiffness comprised between about 30 kPa and about 3 GPa, preferably between about 70 kPa and about 200 kPa for instance in applications such as the treatment or prevention of osteoporosis and bone tissue regeneration. In one particular example, a biomaterial as defined herein for use in hair-related applications has a stiffness comprised between about 0.01 kPa and about 200 kPa, preferably between about 3 kPa and about 70 kPa. In one particular example, a biomaterial as defined herein for use in endothelization-related applications has a stiffness comprised between about 500 kPa and about 2.5 GPa. In one particular example, a biomaterial as defined herein for use in angiogenesis-related applications has a stiffness comprised between about 0.01 kPa and about 100 kPa. In one particular example, a biomaterial as defined herein for use in wound healing and skin-related applications has a stiffness comprised between about 0.01 kPa and about 70 kPa.

[0874] Available hydroxyl groups: As used herein, unless indicated otherwise or contradictory in context, the term “free hydroxyl” or “available hydroxyl” means an hydroxyl group, which may be —OH or a radical (—O⁻) or an anion (—O⁻) fully or partially ionised, which is able to/free to act as a nucleophile in a reaction with an electrophile such as compound (A) or compound (B) defined below.

[0875] Available hydroxyl-containing surface: As used herein, unless indicated otherwise or contradictory in context, the term “available hydroxyl-containing surface” or “free hydroxyl-containing surface” means a surface containing at least one free or available hydroxyl group as defined herein.

[0876] Ceramics: As used herein, unless indicated otherwise or contradictory in context, the term “ceramic” refers to an inorganic material with a high melting point, above 1000° C. Most typically, materials referred to as “ceramics” are obtained by a process in which raw material solid particles are heated in order to sinter them. Materials referred to as “ceramics” may broadly be split into two groups, these being “oxide ceramics” and “non-oxide ceramics”. “Oxide ceramics” include, but are not limited to, alkaline earth oxides such as MgO and BaO, Al₂O₃ and aluminates, TiO₂ and titanates, ZrO₂ and zirconates, silicates such as clays and clay-derived materials. Since the term “ceramics” may encompass crystalline, partially amorphous and fully amorphous materials, the term “oxide ceramics” may also be interpreted as covering fully amorphous silicate glasses. “Non-oxide ceramics” include, but are not limited to, carbides and nitrides, and also borides and silicides, for example silicon carbide and silicon nitride, and also metal carbides and nitrides. In one particular example, solid ceramics e.g. in granulated powder or as a scaffold, is used as a bioactive carrier in the meaning of the present disclosure in bone-related applications. In one particular example, gel ceramics is used as a bioactive carrier in the meaning of the present disclosure in bone-related applications.

[0877] Metal oxides: As used herein, unless indicated otherwise or contradictory in context, the term “metal oxide” means a chemical compound that contains at least one oxygen atom and one other element in its chemical formula. Metal oxides typically contain an anion of oxygen in the oxidation state of −2. They can be obtained by hydrolysis or air/oxygen oxidation. Examples of such metal oxides are titanium oxides (e.g. TiO, Ti₂O₃, TiO₂), silicon oxide (SiO₂), aluminum oxide (Al₂O₃), iron (II, III) oxides such as Fe₂O₃, and zinc oxide (ZnO).

[0878] Biopolymer: As used herein, unless indicated otherwise or contradictory in context, the term “biopolymer” refers to a polymer produced by living organisms and includes, but is not limited to, polypeptides and proteins (such as collagen and fibrin), polysaccharides (such as cellulose, starch, chitin and chitosan), nucleic acids (such as DNA and RNA), and hydrides thereof.

[0879] Hydrogel: As used herein, unless indicated otherwise or contradictory in context, the term “hydrogel” refers to “Hydrogel” refers to a class of polymeric materials which are swollen in an aqueous medium, but which do not dissolve in water. Hydrogels are highly absorbent (they can contain over 99% water) natural or synthetic polymers. Hydrogels also possess a degree of flexibility very similar to natural tissue, due to their significant water content. U.S. Pat. No. 6,475,516, for example, provides hydrogels being covalently bound to the surface of an in-dwelling medical device such as an implant, which may be functionalized with a GFR-binding compound of the present disclosure using, for instance, a process as described herein. In one particular example, biodegradable hydrogels are used as bioactive carriers in the meaning of the present disclosure.

[0880] Collagen: As used herein, unless indicated otherwise or contradictory in context, the term “collagen” refers to the main structural protein of the various connective tissues in animals which is mostly found in fibrous tissues such as tendons, ligaments and skin, and is also abundant in corneas, cartilage, bones, blood vessels, the gut, and intervertebral discs. Collagen is typically composed of a triple helix and generally contains high hydroxyproline content. The most common motifs in its amino acid sequence glycine-proline-X and glycine-X-hydroxyproline, where X is any amino acid other than glycine, proline or hydroxyproline. 28 types of collagen have been identified and described in the literature, which are all presently contemplated to be suitable for implementing embodiments of the invention. The five most common types are: Collagen I which may be found in skin, tendon, vascular ligature, organs, bone (main component of the organic part of bone); Collagen II which may be found in cartilage (main component of cartilage); Collagen III which may be found in reticulate (main component of reticular fibers); Collagen IV which may be found in the basal lamina, the epithelium-secreted layer of the basement membrane; Collagen V which may be found on cell surfaces, hair and placenta. For example, in certain embodiments, suitable collagens for implementing embodiments of the present invention particularly include collagen type-I and type-IV. In one particular example, collagen, in particular collagen types I, II, III and XI, is used as a bioactive carrier in the meaning of the present disclosure in cartilage-related applications. In one particular example, collagen, in particular collagen types I and III, is used as a bioactive carrier in the meaning of the present disclosure in muscle-related applications, skin-related applications, and T/L-related applications. In one particular example, any type of collagen is used as a bioactive carrier in the meaning of the present disclosure in vascular, neuron, eye retina, renal, wound healing, hair, fertility and reproduction, lung, adipose-related applications.

[0881] In certain embodiments, said association, combination, linkage or connection between said GFR-binding compound and a bioactive carrier may occur via a bioactive carrier-affinity-containing group as defined herein.

### IV. Bioactive Carrier-Affinity-Containing Group

[0882] In one aspect, the present disclosure provides a GFR-binding compound as already defined herein modified or functionalised with at least one bioactive carrier-affinity-containing group. Said at least one bioactive carrier-affinity-containing group provides said GFR-binding compound with the ability to, covalently or non-covalently, interact with, or be connected to, a bioactive carrier as defined herein (in particular, a biomaterial as defined herein).

[0883] In such embodiments where affinity is required via covalent interaction or binding, said bioactive carrier-affinity-containing group may be a thiol (SH)-containing group or a cysteine-containing group, in particular, a thiol (SH)-containing peptide or a cysteine-containing peptide. In such embodiments where affinity is required via covalent interaction or binding, said bioactive carrier-affinity-containing group may particularly be a cysteine.

[0884] In such embodiments where affinity is required via non-covalent interaction or binding, said bioactive carrier-affinity-containing group may comprise (or be) a peptide group such as any one of the peptide groups disclosed in US patent application No. 2008/0268015 A1, which is hereby incorporated by reference in its entirety. In particular, peptides containing amino acid sequences rich in large aromatic amino acid residues (aromatic amino acid-containing peptides or peptidomimetics) that include one or more of Phe, Trp, Tyr such as sequences no: 1 to 45 described in US 2008/0268015 A1 are suitable as a biomaterial-affinity-containing fragment for implementing embodiments of the present invention. Said fragment may also be a peptide fragment such as any one of the peptide fragments disclosed in U.S. Pat. No. 6,818,620 B2, which is hereby incorporated by reference in its entirety. In particular, peptides of sequences no: 1 to 7 described in U.S. Pat. No. 6,818,620 B2 are suitable as a biomaterial-affinity-containing fragment for implementing embodiments of the present invention.

[0885] In one particular example, said bioactive carrier-affinity-containing group is a bioactive carrier high-affinity-containing group such as a biomaterial high-affinity-containing group.

[0886] In certain embodiments, said bioactive carrier-affinity-containing group has some affinity (preferably high affinity) with a given bioactive carrier (in particular, a biomaterial) such as collagen, apatite, titanium or any of those listed in e.g. US patent application No. 2008/0268015 A1, which is incorporated herein by reference. For instance, a group having some affinity with a biomaterial is any group capable to non-covalently interact/bind to a biomaterial with an affinity/specificity selected from at least 10%, at least 20%, at least 30%, at least 40%, at least 50%, at least 60%, at least 70%, at least 80%, at least 90%, at least 100%, at least 200%, at least 300%, at least 400%, at least 500%, or a higher percentage, with respect to an affinity where said group binds to an appropriate control such as, for example, a different material or surface, or a protein typically used for such comparisons such as bovine serum albumin. In one example, a biomaterial-affinity-containing group has a binding specificity that is characterized by a relative binding affinity as measured by an EC50 of 10 □M or less, and in certain embodiments, less than 1 □M. In certain embodiments, a relative affinity comprised between 1 pM and 100 □M, between 1 pM and 10 □M, or between 1 pM and 1 □M is particularly suitable. The EC50 is determined using any number of methods known in the art. In this case, the EC50 represents the concentration of fragment producing 50% of the maximal binding observed for that fragment in the assay.

[0887] In one particular example, said bioactive carrier-affinity-containing group is selected from the group consisting of GTPGP (SEQ ID NO: 84983), which may preferably non-covalently interact with a bioactive carrier such as an apatite, and WWFWG (SEQ ID NO: 84984), which may preferably non-covalently interact with a bioactive carrier such as a collagen.

[0888] In one particular example, said bioactive carrier-affinity-containing group is covalently or non-covalently (in particular, covalently) attached at an end (or extremity) of said GFR-binding compound.

### V. Modified GFR-Binding Compound

[0889] Thus, in one aspect, the present disclosure provides a modified GFR-binding compound comprising a GFR-binding compound as defined in the present disclosure and a bioactive carrier-affinity-containing group; and wherein the RMSD of the GFR-binding compound is 2.45 Å or less.

[0890] For example, in certain embodiments, the present disclosure provides a modified GFR-binding compound comprising a GFR-binding compound as defined in the present disclosure and a bioactive carrier-affinity-containing group; wherein said bioactive carrier-affinity-containing group is selected from the group consisting of a thiol-containing group (in particular, a thiol-containing peptide), a cysteine-containing group (in particular, a cysteine-containing peptide and more particularly, a cysteine), and an aromatic amino acid-containing peptide or peptidomimetic; and wherein the RMSD of the GFR-binding compound is 2.45 Å or less.

[0891] For example, in certain embodiments, the present disclosure provides a modified GFR-binding compound comprising a GFR-binding compound and a bioactive carrier-affinity-containing group; wherein said GFR-binding compound is a peptide, a variant or analog thereof, or a peptidomimetic as defined herein, with (comprising, or exclusively consisting of, or constituted of) between 20 and 60 (in particular between 20 and 50, and more particularly, between 20 and 45) amino acids, comprising a peptide with four amino acids (PEP1) selected from the group consisting of SAIS (SEQ ID NO: 84116), SSLS (SEQ ID NO: 84121), NAIS (SEQ ID NO: 84113), SATS (SEQ ID NO: 84117), SPIS (SEQ ID NO: 84120), EPIS (SEQ ID NO: 84109), SPIN (SEQ ID NO: 84119), KPLS (SEQ ID NO: 84112), EPLP (SEQ ID NO: 84110), EPLT (SEQ ID NO: 84111), SNIT (SEQ ID NO: 84118), RSVK (SEQ ID NO: 84115) and RPVQ (SEQ ID NO: 84114); and a peptide with five amino acids (PEP2) selected from the group consisting of LKNYQ (SEQ ID NO: 84230), LKVYP (SEQ ID NO: 84231), LKKYR (SEQ ID NO: 84229), LRKHR (SEQ ID NO: 84233), LKYHY (SEQ ID NO: 84232), KFKYE (SEQ ID NO: 84211), YGKIP (SEQ ID NO: 84397), YKQYE (SEQ ID NO: 84398), DHHKD (SEQ ID NO: 84149), EQLSN (SEQ ID NO: 84178), IGEMS (SEQ ID NO: 84209), LGEMS (SEQ ID NO: 84228), KEVQV (SEQ ID NO: 84210) and KKATV (SEQ ID NO: 84212); wherein said bioactive carrier-affinity-containing group is selected from the group consisting of a thiol-containing group (in particular, a thiol-containing peptide), a cysteine-containing group (in particular, a cysteine-containing peptide and more particularly, a cysteine), and an aromatic amino acid-containing peptide or peptidomimetic; and wherein the RMSD of the GFR-binding compound is 2.45 Å or less.

[0892] For example, in certain embodiments, the present disclosure provides a modified GFR-binding compound comprising a GFR-binding compound and a bioactive carrier-affinity-containing group; wherein said GFR-binding compound is a peptide, a variant or analog thereof, or a peptidomimetic as defined herein, with (comprising, or exclusively consisting of, or constituted of) between 20 and 60 (in particular between 20 and 50, and more particularly, between 20 and 45) amino acids, comprising a peptide with height amino acids of general formula (PEP12): PEP1-AA¹⁷-PEP11, and a peptide with five amino acids (PEP2) selected from the group consisting of LKNYQ (SEQ ID NO: 84230), LKVYP (SEQ ID NO: 84231), LKKYR (SEQ ID NO: 84229), LRKHR (SEQ ID NO: 84233), LKYHY (SEQ ID NO: 84232), KFKYE (SEQ ID NO: 84211), YGKIP (SEQ ID NO: 84397), YKQYE (SEQ ID NO: 84398), DHHKD (SEQ ID NO: 84149), EQLSN (SEQ ID NO: 84178), IGEMS (SEQ ID NO: 84209), LGEMS (SEQ ID NO: 84228), KEVQV (SEQ ID NO: 84210) and KKATV (SEQ ID NO: 84212); wherein PEP1 is a peptide with four amino acids selected from the group consisting of SAIS (SEQ ID NO: 84116), SSLS (SEQ ID NO: 84121), NAIS (SEQ ID NO: 84113), SATS (SEQ ID NO: 84117), SPIS (SEQ ID NO: 84120), EPIS (SEQ ID NO: 84109), SPIN (SEQ ID NO: 84119), KPLS (SEQ ID NO: 84112), EPLP (SEQ ID NO: 84110), EPLT (SEQ ID NO: 84111), SNIT (SEQ ID NO: 84118), RSVK (SEQ ID NO: 84115) and RPVQ (SEQ ID NO: 84114); wherein PEP11 is a peptide with 3 amino acids of formula AA¹⁸-AA¹⁹-AA²⁰; wherein AA¹⁷ is selected from the group consisting of G, A, V, L, I, P, F, M, W, T and S (in particular is selected from the group consisting of M, I, L, V and T); wherein AA¹⁸ is selected from the group consisting of L, V, Q, A and R; wherein AA¹⁹ is selected from the group consisting of F, W, H and Y (in particular is an aromatic, polar amino acid such as Y); wherein AA²⁰ is selected from the group consisting of L, F, Y, K, I, V and M; wherein said bioactive carrier-affinity-containing group is selected from the group consisting of a thiol-containing group (in particular, a thiol-containing peptide), a cysteine-containing group (in particular, a cysteine-containing peptide and more particularly, a cysteine), and an aromatic amino acid-containing peptide or peptidomimetic; and wherein the RMSD of the GFR-binding compound is 2.45 Å or less.

[0893] For example, in certain embodiments, the present disclosure provides a modified GFR-binding compound comprising a GFR-binding compound and a bioactive carrier-affinity-containing group; wherein said GFR-binding compound is a peptide, a variant or analog thereof, or a peptidomimetic as defined herein, with (comprising, or exclusively consisting of, or constituted of) between 20 and 60 (in particular between 20 and 50, and more particularly, between 20 and 45) amino acids, having the following general formula (I) (hereinafter may also be referred to as compound (I) or peptide (I)):

PEP(A)-LINKER-PEP(B) (I)

wherein one end of LINKER interacts covalently with one end of PEP(A); wherein another end of LINKER interacts covalently with one end of PEP(B); wherein PEP(A) comprises PEP1 or PEP12; wherein PEP(B) comprises PEP2; wherein LINKER is a linear or branched organic divalent radical, moiety or compound having a molecular weight (Mw) comprised between about 28 and about 2,000 Da, in particular, between about 300 and about 1000 Da; wherein said bioactive carrier-affinity-containing group is covalently or non-covalently attached to PEP(A) or PEP(B); wherein said bioactive carrier-affinity-containing group is selected from the group consisting of a thiol-containing group (in particular, a thiol-containing peptide), a cysteine-containing group (in particular, a cysteine-containing peptide and more particularly, a cysteine), and an aromatic amino acid-containing peptide or peptidomimetic; and wherein the RMSD of the GFR-binding compound is 2.45 Å or less.

[0894] For example, in certain embodiments, the present disclosure provides a modified GFR-binding compound comprising a GFR-binding compound and a bioactive carrier-affinity-containing group; wherein said GFR-binding compound is a peptide, a variant or analog thereof, or a peptidomimetic as defined herein, with (comprising, or exclusively consisting of, or constituted of) between 20 and 60 (in particular between 20 and 50, and more particularly, between 20 and 45) amino acids, having the following general formula (II) (hereinafter may also be referred to as compound (II) or peptide (II)):

PEP(C)-PEP12-LINKER-PEP2-PEP(D) (II)

wherein LINKER is a linear or branched organic divalent radical, moiety or compound having a molecular weight (Mw) comprised between about 28 and about 2,000 Da, in particular, between about 300 and about 1000 Da; wherein PEP12 is a peptide with 8 amino acids of formula PEP1-AA¹⁷-PEP11; wherein AA¹⁷, PEP1, PEP2, PEP12 and PEP11 are as already defined herein; wherein one end of PEP(C) interacts covalently with PEP12 via AA¹³; wherein one end of PEP(D) interacts covalently with PEP2 via AA²⁵; wherein one end of LINKER interacts covalently with one end of PEP12 via AA²⁰ wherein another end of LINKER interacts covalently with PEP2 via AA²¹; wherein AA¹³ and AA²¹ may be both N-terminal amino acids or both C-terminal amino acids; wherein AA²⁵ and AA²⁰ may be both N-terminal amino acids or both C-terminal amino acids; wherein PEP(C) is a peptide with at least 5 amino acids, in particular a peptide with between 5 and 12 amino acids; wherein PEP(D) is a peptide with at least 5 amino acids, in particular a peptide with between 5 and 12 amino acids; wherein said bioactive carrier-affinity-containing group is covalently or non-covalently attached to PEP(C) or PEP(D), in particular is covalently or non-covalently attached to PEP3 through APO, PEP4 through AA³², PEP5 through APO, PEP⁶ through AA³², PEP9 through AA¹, AA², AA³, AA⁴, AA⁵ or AA⁶, or PEP10 through AA³³, AA³⁴, AA³⁵, AA³⁶, AA³⁷ or AA³⁸; wherein said bioactive carrier-affinity-containing group is selected from the group consisting of a thiol-containing group (in particular, a thiol-containing peptide), a cysteine-containing group (in particular, a cysteine-containing peptide and more particularly, a cysteine), and an aromatic amino acid-containing peptide or peptidomimetic; and wherein the RMSD of the GFR-binding compound is 2.45 Å or less.

### VI. Functionalised Bioactive Carriers

[0895] In one aspect, the present disclosure provides a functionalised bioactive carrier, which may be used for inducing, in-vitro, ex-vivo or in-vivo, tissue regeneration, comprising at least one GFR-binding compound (in particular, at least one modified GFR-binding compound) as defined in the present disclosure. In one example, said (modified) GFR-binding compound and bioactive carrier are both active principles/ingredients. In certain embodiments, said functionalised bioactive carrier is a modified, functionalised, coated or grafted biomaterial as defined herein, in particular, a modified, functionalised, coated or grafted tissue regeneration compatible-biomaterial.

[0896] In one example, said functionalised bioactive carrier comprises one (modified) GFR-binding compound. In one example, said functionalised bioactive carrier comprises two or more distinct (modified) GFR-binding compounds. In one example, said functionalised bioactive carrier comprises three or more distinct (modified) GFR-binding compounds. In one example, said functionalised bioactive carrier comprises four or more distinct (modified) GFR-binding compounds.

[0897] Active or bioactive principles or ingredients: In the present description and unless otherwise indicated or contradictory in context, the term “(bio)active principle” or “(bio)active ingredient” generally refers to a molecule, compound or substance which is responsible for providing the desired biological effect. Without said active ingredient, the formulation or composition containing it, would not provide the desired biological effect. For example, in certain embodiments, formulation excipients are not considered as active ingredients in the pharmaceutical composition as defined herein.

[0898] In one example, said functionalised bioactive carrier is formed using a method comprising, or exclusively consisting of, contacting a bioactive carrier as defined herein and a (modified) GFR-binding compound under reacting conditions thereby functionalizing at least one part (or at least one part of a surface) of said bioactive carrier and thus forming a functional association, interaction or bond between said bioactive carrier and said (modified) GFR-binding compound.

[0899] In the present description and unless otherwise indicated or contradictory in context, the terms “functionally associated”, “functionally combined”, “functionalized”, “immobilized”, “deposited”, “coated”, or “grafted” all refer to the action of associating or functionalising at least one part of a bioactive carrier with a (modified) GFR-binding compound so that the desired biological, therapeutic and/or cosmetic effect e.g. inducing tissue formation, is obtained. The association or combination may be covalent and form, between said (modified) GFR-binding compound and said bioactive carrier, a covalent interaction as already defined herein, or, the association or combination may be non-covalent and form, between said (modified) GFR-binding compound and said bioactive carrier, a non-covalent interaction as already defined herein.

[0900] For example, in certain embodiments, a (modified) GFR-binding compound interacts covalently (makes at least one functional covalent interaction) with said bioactive carrier.

[0901] In one aspect, the present disclosure thus provides a functionalised bioactive carrier comprising a (modified) GFR-binding compound, wherein said GFR-binding compound (before any modifications) is a peptide, or a variant or analog thereof, having growth factor receptor-binding capability or capabilities, exclusively consisting of (or constituted of) between 25-60 amino acids, in particular between 25-50 amino acids, and more particularly between 25-45 amino acids; and wherein the RMSD is 2.45 Å or less.

[0902] In one aspect, the present disclosure provides a functionalised bioactive carrier comprising a (modified) GFR-binding compound, wherein said GFR-binding compound (before any modifications) is a peptidomimetic as defined herein, having growth factor receptor-binding capability or capabilities, comprising between 20-60 amino acids, in particular between 20-50 or 20-45 amino acids, and more particularly, between 23-60, 23-50 or 23-45 amino acids; wherein said GFR-binding compound has a molecular weight comprised between 2,000 and 8,000 Daltons; and wherein the RMSD is 2.45 Å or less.

[0903] In one aspect, the present disclosure provides a functionalised bioactive carrier comprising a (modified) GFR-binding compound, wherein said GFR-binding compound (before any modifications) is a peptide, a variant or analog thereof, or a peptidomimetic as defined herein, having growth factor receptor-binding capability or capabilities, with between 20 and 60 (in particular between 20 and 50, and more particularly, between 20 and 45) amino acids, comprising a peptide with four amino acids (PEP1) and a peptide with five amino acids (PEP2); and wherein the RMSD is 2.45 Å or less.

[0904] In one aspect, the present disclosure provides a functionalised bioactive carrier comprising a (modified) GFR-binding compound, wherein said GFR-binding compound (before any modifications) is a peptide, a variant or analog thereof, or a peptidomimetic as defined herein, with between 20 and 60 (in particular between 20 and 50, and more particularly, between 20 and 45) amino acids, comprising a peptide with eight amino acids (PEP12) and a peptide with five amino acids (PEP2); and wherein the RMSD is 2.45 Å or less.

[0905] In one aspect, the present disclosure provides a functionalised bioactive carrier comprising a (modified) GFR-binding compound, wherein said GFR-binding compound (before any modifications) is a peptide, a variant or analog thereof, or a peptidomimetic as defined herein, with between 20 and 60 (in particular between 20 and 50, and more particularly, between 20 and 45) amino acids, comprising a peptide with four amino acids (PEP1) and a peptide with five amino acids (PEP2); wherein said GFR-binding compound further comprises a peptide with three amino acids (PEP3) and a peptide with three amino acids (PEP4); and wherein the RMSD is 2.45 Å or less.

[0906] In one aspect, the present disclosure provides a functionalised bioactive carrier comprising a (modified) GFR-binding compound, wherein said GFR-binding compound (before any modifications) is a peptide, a variant or analog thereof, or a peptidomimetic as defined herein, with between 20 and 60 (in particular between 20 and 50, and more particularly, between 20 and 45) amino acids, comprising a peptide with eight amino acids (PEP12) and a peptide with five amino acids (PEP2); wherein said GFR-binding compound further comprises a peptide with three amino acids (PEP3) and a peptide with three amino acids (PEP4); and wherein the RMSD is 2.45 Å or less.

[0907] In one aspect, the present disclosure provides a functionalised bioactive carrier comprising a (modified) GFR-binding compound, wherein said GFR-binding compound (before any modifications) is a peptide, a variant or analog thereof, or a peptidomimetic as defined herein, with between 20 and 60 (in particular between 20 and 50, and more particularly, between 20 and 45) amino acids, comprising a peptide with four amino acids (PEP1) and a peptide with five amino acids (PEP2); wherein said GFR-binding compound further comprises a peptide with five amino acids (PEP5) and a peptide with between five and seven amino acids (PEP6); and wherein the RMSD is 2.45 Å or less.

[0908] In one aspect, the present disclosure provides a functionalised bioactive carrier comprising a (modified) GFR-binding compound, wherein said GFR-binding compound (before any modifications) is a peptide, a variant or analog thereof, or a peptidomimetic as defined herein, with between 20 and 60 (in particular between 20 and 50, and more particularly, between 20 and 45) amino acids, comprising a peptide with eight amino acids (PEP12) and a peptide with five amino acids (PEP2); wherein said GFR-binding compound further comprises a peptide with five amino acids (PEP5) and a peptide with between five and seven amino acids (PEP6); and wherein the RMSD is 2.45 Å or less.

[0909] In one aspect, the present disclosure provides a functionalised bioactive carrier comprising a (modified) GFR-binding compound, wherein said GFR-binding compound (before any modifications) is a peptide, a variant or analog thereof, or a peptidomimetic as defined herein, with between 20 and 60 (in particular between 20 and 50, and more particularly, between 20 and 45) amino acids, comprising a peptide with four amino acids (PEP1) and a peptide with five amino acids (PEP2); wherein said GFR-binding compound further comprises a peptide with between six and twelve amino acids (PEP9) and a peptide with between six and eleven amino acids (PEP10); and wherein the RMSD is 2.45 Å or less.

[0910] In one aspect, the present disclosure provides a functionalised bioactive carrier comprising a (modified) GFR-binding compound, wherein said GFR-binding compound (before any modifications) is a peptide, a variant or analog thereof, or a peptidomimetic as defined herein, with between 20 and 60 (in particular between 20 and 50, and more particularly, between 20 and 45) amino acids, comprising a peptide with eight amino acids (PEP12) and a peptide with five amino acids (PEP2); wherein said GFR-binding compound further comprises a peptide with between six and twelve amino acids (PEP9) and a peptide with between six and eleven amino acids (PEP10); and wherein the RMSD is 2.45 Å or less.

[0911] In one aspect, the present disclosure provides a functionalised bioactive carrier comprising a (modified) GFR-binding compound, wherein said GFR-binding compound (before any modifications) is a peptide, a variant or analog thereof, or a peptidomimetic as defined herein, with between 20 and 60 (in particular between 20 and 50, and more particularly, between 20 and 45) amino acids, comprising a peptide with four amino acids (PEP1) and a peptide with five amino acids (PEP2); wherein said GFR-binding compound further comprises a peptide with three amino acids (PEP3) and a peptide with between five and seven amino acids (PEP6); and wherein the RMSD is 2.45 Å or less.

[0912] In one aspect, the present disclosure provides a functionalised bioactive carrier comprising a (modified) GFR-binding compound, wherein said GFR-binding compound (before any modifications) is a peptide, a variant or analog thereof, or a peptidomimetic as defined herein, with between 20 and 60 (in particular between 20 and 50, and more particularly, between 20 and 45) amino acids, comprising a peptide with eight amino acids (PEP12) and a peptide with five amino acids (PEP2); wherein said GFR-binding compound further comprises a peptide with three amino acids (PEP3) and a peptide with between five and seven amino acids (PEP6); and wherein the RMSD is 2.45 Å or less.

[0913] In one aspect, the present disclosure provides a functionalised bioactive carrier comprising a (modified) GFR-binding compound, wherein said GFR-binding compound (before any modifications) is a peptide, a variant or analog thereof, or a peptidomimetic as defined herein, with between 20 and 60 (in particular between 20 and 50, and more particularly, between 20 and 45) amino acids, comprising a peptide with four amino acids (PEP1) and a peptide with five amino acids (PEP2); wherein said GFR-binding compound further comprises a peptide with three amino acids (PEP3) and a peptide with between six and eleven amino acids (PEP10); and wherein the RMSD is 2.45 Å or less.

[0914] In one aspect, the present disclosure provides a functionalised bioactive carrier comprising a (modified) GFR-binding compound, wherein said GFR-binding compound (before any modifications) is a peptide, a variant or analog thereof, or a peptidomimetic as defined herein, with between 20 and 60 (in particular between 20 and 50, and more particularly, between 20 and 45) amino acids, comprising a peptide with eight amino acids (PEP12) and a peptide with five amino acids (PEP2); wherein said GFR-binding compound further comprises a peptide with three amino acids (PEP3) and a peptide with between six and eleven amino acids (PEP10); and wherein the RMSD is 2.45 Å or less.

[0915] In one aspect, the present disclosure provides a functionalised bioactive carrier comprising a (modified) GFR-binding compound, wherein said GFR-binding compound (before any modifications) is a peptide, a variant or analog thereof, or a peptidomimetic as defined herein, with between 20 and 60 (in particular between 20 and 50, and more particularly, between 20 and 45) amino acids, comprising a peptide with four amino acids (PEP1) and a peptide with five amino acids (PEP2); wherein said GFR-binding compound further comprises a peptide with five amino acids (PEP5) and a peptide with three amino acids (PEP4); and wherein the RMSD is 2.45 Å or less.

[0916] In one aspect, the present disclosure provides a functionalised bioactive carrier comprising a (modified) GFR-binding compound, wherein said GFR-binding compound (before any modifications) is a peptide, a variant or analog thereof, or a peptidomimetic as defined herein, with between 20 and 60 (in particular between 20 and 50, and more particularly, between 20 and 45) amino acids, comprising a peptide with four amino acids (PEP12) and a peptide with five amino acids (PEP2); wherein said GFR-binding compound further comprises a peptide with five amino acids (PEP5) and a peptide with three amino acids (PEP4); and wherein the RMSD is 2.45 Å or less.

[0917] In one aspect, the present disclosure provides a functionalised bioactive carrier comprising a (modified) GFR-binding compound, wherein said GFR-binding compound (before any modifications) is a peptide, a variant or analog thereof, or a peptidomimetic as defined herein, with between 20 and 60 (in particular between 20 and 50, and more particularly, between 20 and 45) amino acids, comprising a peptide with four amino acids (PEP1) and a peptide with five amino acids (PEP2); wherein said GFR-binding compound further comprises a peptide with between six and twelve amino acids (PEP9) and a peptide with three amino acids (PEP4); and wherein the RMSD is 2.45 Å or less.

[0918] In one aspect, the present disclosure provides a functionalised bioactive carrier comprising a (modified) GFR-binding compound, wherein said GFR-binding compound (before any modifications) is a peptide, a variant or analog thereof, or a peptidomimetic as defined herein, with between 20 and 60 (in particular between 20 and 50, and more particularly, between 20 and 45) amino acids, comprising a peptide with four amino acids (PEP12) and a peptide with five amino acids (PEP2); wherein said GFR-binding compound further comprises a peptide with between six and twelve amino acids (PEP9) and a peptide with three amino acids (PEP4); and wherein the RMSD is 2.45 Å or less.

[0919] In one aspect, the present disclosure provides a functionalised bioactive carrier comprising a (modified) GFR-binding compound, wherein said GFR-binding compound (before any modifications) is a peptide, a variant or analog thereof, or a peptidomimetic as defined herein, with between 20 and 60 (in particular between 20 and 50, and more particularly, between 20 and 45) amino acids, comprising a peptide with four amino acids (PEP1) and a peptide with five amino acids (PEP2); wherein said GFR-binding compound further comprises a peptide with five amino acids (PEP5) and a peptide with three amino acids (PEP4); and wherein the RMSD is 2.45 Å or less.

[0920] In one aspect, the present disclosure provides a functionalised bioactive carrier comprising a (modified) GFR-binding compound, wherein said GFR-binding compound (before any modifications) is a peptide, a variant or analog thereof, or a peptidomimetic as defined herein, with between 20 and 60 (in particular between 20 and 50, and more particularly, between 20 and 45) amino acids, comprising a peptide with four amino acids (PEP12) and a peptide with five amino acids (PEP2); wherein said GFR-binding compound further comprises a peptide with five amino acids (PEP5) and a peptide with three amino acids (PEP4); and wherein the RMSD is 2.45 Å or less.

[0921] In one aspect, the present disclosure provides a functionalised bioactive carrier comprising a (modified) GFR-binding compound, wherein said GFR-binding compound (before any modifications) is a peptide, a variant or analog thereof, or a peptidomimetic as defined herein, with between 20 and 60 (in particular between 20 and 50, and more particularly, between 20 and 45) amino acids, comprising a peptide with four amino acids (PEP1) and a peptide with five amino acids (PEP2); wherein said GFR-binding compound further comprises a peptide with five amino acids (PEP5) and a peptide with between six and eleven amino acids (PEP10); and wherein the RMSD is 2.45 Å or less.

[0922] In one aspect, the present disclosure provides a functionalised bioactive carrier comprising a (modified) GFR-binding compound, wherein said GFR-binding compound (before any modifications) is a peptide, a variant or analog thereof, or a peptidomimetic as defined herein, with between 20 and 60 (in particular between 20 and 50, and more particularly, between 20 and 45) amino acids, comprising a peptide with four amino acids (PEP12) and a peptide with five amino acids (PEP2); wherein said GFR-binding compound further comprises a peptide with five amino acids (PEP5) and a peptide with between six and eleven amino acids (PEP10); and wherein the RMSD is 2.45 Å or less.

[0923] In one aspect, the present disclosure provides a functionalised bioactive carrier comprising a (modified) GFR-binding compound, wherein said GFR-binding compound (before any modifications) is a peptide, a variant or analog thereof, or a peptidomimetic as defined herein, with between 20 and 60 (in particular between 20 and 50, and more particularly, between 20 and 45) amino acids, comprising a peptide with four amino acids (PEP1) and a peptide with five amino acids (PEP2); wherein said GFR-binding compound further comprises a peptide with between six and twelve amino acids (PEP9) and a peptide with between five and seven amino acids (PEP6); and wherein the RMSD is 2.45 Å or less.

[0924] In one aspect, the present disclosure provides a functionalised bioactive carrier comprising a (modified) GFR-binding compound, wherein said GFR-binding compound (before any modifications) is a peptide, a variant or analog thereof, or a peptidomimetic as defined herein, with between 20 and 60 (in particular between 20 and 50, and more particularly, between 20 and 45) amino acids, comprising a peptide with four amino acids (PEP12) and a peptide with five amino acids (PEP2); wherein said GFR-binding compound further comprises a peptide with between six and twelve amino acids (PEP9) and a peptide with between five and seven amino acids (PEP6); and wherein the RMSD is 2.45 Å or less.

[0925] In one aspect, the present disclosure provides a functionalised bioactive carrier comprising a (modified) GFR-binding compound, wherein said GFR-binding compound (before any modifications) is a peptide, a variant or analog thereof, or a peptidomimetic as defined herein, with between 20 and 60 (in particular between 20 and 50, and more particularly, between 20 and 45) amino acids, having the following general formula (I) (hereinafter may also be referred to as compound (I) or peptide (I)):

PEP(A)-LINKER-PEP(B) (I)

wherein one end of LINKER interacts covalently with one end of PEP(A); wherein another end of LINKER interacts covalently with one end of PEP(B); wherein PEP(A) comprises PEP1; wherein PEP(B) comprises PEP2; wherein LINKER is a linear or branched organic divalent radical, moiety or compound having a molecular weight (Mw) comprised between about 28 and about 2,000 Da, in particular, between about 300 and about 1000 Da; and wherein the RMSD is 2.45 Å or less.

[0926] In one aspect, the present disclosure provides a functionalised bioactive carrier comprising a (modified) GFR-binding compound, wherein said GFR-binding compound (before any modifications) is a peptide, a variant or analog thereof, or a peptidomimetic as defined herein, with between 20 and 60 (in particular between 20 and 50, and more particularly, between 20 and 45) amino acids, having the following general formula (II) (hereinafter may also be referred to as compound (II) or peptide (II)):

PEP(C)-PEP12-LINKER-PEP2-PEP(D) (II)

wherein LINKER is a linear or branched organic divalent radical, moiety or compound having a molecular weight (Mw) comprised between about 28 and about 2,000 Da, in particular, between about 300 and about 1000 Da; wherein PEP12 is a peptide with 8 amino acids of formula PEP1-AA¹⁷-PEP11 as defined herein; wherein PEP2 is a peptide with five amino acids as already defined herein; wherein one end of PEP(C) interacts covalently with PEP12 via one end of PEP1; wherein one end of PEP(D) interacts covalently with PEP2; wherein one end of LINKER interacts covalently with one end of PEP12 via one end of PEP11; wherein another end of LINKER interacts covalently with PEP2; wherein PEP(C) is a peptide with at least 5 amino acids, in particular a peptide with between 5 and 12 amino acids; wherein PEP(D) is a peptide with at least 5 amino acids, in particular a peptide with between 5 and 11 amino acids; and wherein the RMSD is 2.45 Å or less.

[0927] In one aspect, the present disclosure provides a GFR-binding compound, wherein said GFR-binding compound is a peptide, a variant or analog thereof, or a peptidomimetic as defined herein, with between 20 and 60 (in particular between 20 and 50, and more particularly, between 20 and 45) amino acids, having the following general formula (III) (hereinafter may also be referred to as compound (III) or peptide (III)):

PEP7-PEP5-PEP12-LINKER-PEP2-PEP6-PEP8 (III)

wherein LINKER is a linear or branched organic divalent radical, moiety or compound having a molecular weight (Mw) comprised between about 28 and about 2,000 Da, in particular, between about 300 and about 1000 Da; wherein PEP12 is a peptide with 8 amino acids of formula PEP1-AA¹⁷-PEP11 as defined herein; wherein PEP2 is a peptide with five amino acids as already defined herein; wherein PEP5 is a peptide with five amino acids as already defined herein; wherein PEP6 is a peptide with between five and seven amino acids as already defined herein; wherein PEP7 an amino acid or a peptide with between two and seven amino acids as already defined herein; wherein PEP8 an amino acid or a peptide with between two and six amino acids as already defined herein; wherein one end of LINKER interacts covalently with one end of PEP12 via AA²⁰; wherein another end of LINKER interacts covalently with one end of PEP2 via AA²¹; wherein one end of PEP5 interacts covalently with another end of PEP12 via AA¹²; wherein another end of PEP5 interacts covalently with one end of PEP7 via AA⁸; wherein one end of PEP6 interacts covalently with another end of PEP2 via AA²⁶; wherein another end of PEP6 interacts covalently with one end of PEP8 via AA³²; and wherein the RMSD is 2.45 Å or less.

[0928] In one aspect, the present disclosure provides a GFR-binding compound, wherein said GFR-binding compound is a peptide, a variant or analog thereof, or a peptidomimetic as defined herein, with between 20 and 60 (in particular between 20 and 50, and more particularly, between 20 and 45) amino acids, having the following general formula (IV) (hereinafter may also be referred to as compound (IV) or peptide (IV)):

(IV)
AA¹-AA²-AA³-AA⁴-AA⁵-AA⁶-AA⁷-AA⁸-AA⁹-AA¹⁰-AA¹¹-AA¹²-AA¹³-
AA¹⁴-AA¹⁵-AA¹⁶-AA¹⁷-AA¹⁸-AA¹⁹-AA²⁰-LINKER-AA²¹-AA²²-AA²³-
AA²⁴-AA²⁵-AA²⁶-AA²⁷-AA²⁸-AA²⁹-AA³⁰-AA³¹-AA³²-AA³³-AA³⁴-
AA³⁵-AA³⁶-AA³⁷-AA³⁸

wherein LINKER is a linear or branched organic divalent radical, moiety or compound having a molecular weight (Mw) comprised between about 28 and about 2,000 Da, in particular, between about 300 and about 1000 Da; wherein AA¹-AA²-AA³-AA⁴-AA⁵-AA⁶-AA⁷ (SEQ ID NO: 84948) is PEP7 as defined herein; wherein AA¹³-AA¹⁴-AA¹⁵-AA¹⁶-AA¹⁷-AA¹⁸-AA¹⁹-AA²⁰ is PEP12 as defined herein; wherein AA²¹-AA²²-AA²³-AA²⁴-AA²⁵ is PEP2 as already defined herein; wherein AA⁸-AA⁹-AA¹⁰ is PEP3 as defined herein; wherein AA³⁰-AA³¹-AA³² is PEP4 as defined herein; wherein AA³³-AA³⁴-AA³⁵-AA³⁶-AA³⁷-AA³⁸ (SEQ ID NO: 84949) is PEP8 as defined herein; wherein AA¹¹, AA¹², AA²⁶, AA²⁷, AA²⁸, and AA²⁹ are as defined herein; wherein one end of LINKER interacts covalently with AA²⁰; wherein another end of LINKER interacts covalently with AA²¹; wherein AA¹ and AA²¹ may be both N-terminal amino acids or both C-terminal amino acids; wherein AA³⁸ and AA²⁰ may be both N-terminal amino acids or both C-terminal amino acids; and wherein the RMSD is 2.45 Å or less.

[0929] In one aspect, the present disclosure provides a functionalised bioactive carrier comprising a (modified) GFR-binding compound, wherein said GFR-binding compounds may be any one of or a plurality of peptides of SEQ ID NO: 1 to 2157 and 2242 to 84108.

[0930] The present disclosure provides a functionalised bioactive carrier comprising a (modified) GFR-binding compound, wherein all of PEP1, PEP2, PEP3, PEP4, PEP5, PEP6, PEP9, PEP10, PEP12, PEP11 and AA¹⁷, pairs, quadruplets, hexaplets and heptuplets thereof, disclaimers and provisos, are as already defined herein.

[0931] Suitable covalent association or functionalization techniques for implementing embodiments of the present invention include, but are not limited to, reductive amination coupling or photo-grafting such as described in H. Freichel et al., Macromol. Rapid Commun. 2011, 32, 616-621 and V. Pourcelle et al., Biomacromol. 2009, 10, 966-974, the content of which is hereby incorporated by reference in its entirety.

[0932] In one aspect, the present disclosure provides a production method or process useful for producing a functionalised bioactive carrier according to the present disclosure wherein said bioactive carrier is a biomaterial such as a ceramic or a titanium, comprising, or exclusively consisting of, the contacting of a compound of formula (C-I) and a bioactive carrier as defined herein under suitable covalent-bond formation conditions thereby forming at least one covalent bond between said compound (C-I) and said bioactive carrier thus forming a functionalised bioactive carrier according to the present disclosure:

[chemical structure]

[0933] wherein X is Si; wherein Y is a divalent organic linker; wherein A is a (modified) GFR-binding compound according to the present disclosure, wherein R¹ and R² are both independently an organic spacing-compound other than a leaving group as defined herein, and wherein R³ is a leaving group as defined herein;

[0934] In one particular example, a process or method which may be used to functionally associate or combine a (modified) GFR-binding compound with a bioactive carrier such as a ceramic or a titanium is shown in Scheme 1.

[chemical structure]

[0935] Such syntheses involve the formation of a covalent interaction (or association) between a (modified) GFR-binding compound (represented as (A)-SH in Scheme 1) and a bioactive carrier as defined herein.

[0936] In one particular example, a process or method which may be used to functionally associate or combine a (modified) GFR-binding compound with a bioactive carrier is a method for covalent functionalization or depositing of a (modified) GFR-binding compound onto a polyetheretherketone polymer (PEEK) surface wherein (i) the polymer is treated with ethylene diamine (NH₂═NH₂) to create NH₂ functions on a PEEK surface from ketone (═O) functions and (ii) the hereby modified PEEK-NH₂ polymer is immersed in a solution of a chosen hetero-bifunctional cross-linker such as 3-succinimidyl-3-maleimidopropionate thereby reacting the maleimide group with a (modified) GFR-binding compound through e.g. a thiol group thereof.

[0937] In one particular example, a process or method which may be used to functionally associate or combine a (modified) GFR-binding compound with a bioactive carrier is a method for covalent functionalization or depositing of a (modified) GFR-binding compound onto a polylactic acid (PLLA) polymer wherein (i) the polymer is immersed in a solution containing, for instance, (dimethylaminopropyl)-3-ethylcarbodiimide hydrochloride+N-hydroxysuccinimide in (2-(N-morpholino)-ethanesulfonic acid and then (ii) rinsed using e.g. MilliQ water.

[0938] Leaving groups: As used herein, unless indicated otherwise or contradictory in context, the term “leaving group” means a molecular fragment which possesses the ability to depart with a pair of electrons in a heterolytic bond cleavage. Leaving groups are anions or neutral molecules and possess the ability to stabilize the additional electron density that results from bond heterolysis. Common anionic leaving groups are halogen atoms such as chlorine (Cl), bromine (Br), and iodine (I), which leaves as a chloride ion (Cl⁻), a bromide ion (Br⁻) and an iodide ion (I⁻), respectively. Other leaving groups include sulfonate esters, such as tosylate (TsO⁻). Conventional neutral molecule leaving groups are water and ammonia. Suitable as leaving groups for implementing embodiments of the invention preferably include the group consisting of a halogen, a substituted or unsubstituted alkoxy group (—OR), a substituted or unsubstituted aryloxy or heteroaryloxy group (—OAr), a substituted or unsubstituted alkylcarbonyloxy group (—O₂CR), a substituted or unsubstituted arylcarbonyloxy or heteroarylcarbonyloxy group (—O₂CAr), a substituted or unsubstituted alkylsulfonyloxy group (—O₃SR), a substituted or unsubstituted arylsulfonyloxy or heteroarylsulfonyloxy group (—O₃SAr). Substituents of leaving groups include halogens, alkyl (preferably C1 to C5-alkyl) groups and alkoxy (preferably C1 to C5-alkoxy) groups.

### Y Group

[0939] In the present disclosure, the Y group is not aimed at being particularly limited and any moiety comprising at least one atom and having the ability to covalently or non-covalently, preferably covalently, link or interact with the X and A groups as defined herein thereby providing a stable connection between an active substance A and the X group as defined herein, is, unless contradictory or non-adapted in context, suitable for implementing embodiments of the present disclosure and is comprised within the scope of the invention.

[0940] Thus, in the present description and unless otherwise indicated, the term “linker”, when used in relation to a Y group, means any organic moiety comprising at least one atom and having the ability to interact covalently or non-covalently with an active substance A and covalently interact with an X group as defined herein.

[0941] In one example, Y groups include divalent organic radicals selected from the group consisting of a saturated or unsaturated, preferably saturated, hydrocarbon chain comprising between 1 and 30 carbon atoms, wherein said hydrocarbon chain is optionally interrupted by one or more non-carbon atom, preferably between 1 and 16, between 1 and 12 or between 1 and 8 non-carbon atoms as appropriate, wherein said non-carbon atom is selected, for instance, from the group consisting of —O—, —S—, —C(═O), —SO₂—, —N(Ri)(C═O)—, —N(Ri)-, and the following radical:

[chemical structure]

[0942] wherein Ri is selected from the group consisting of a hydrogen atom, a C1-C6 alkyl group and a aryl group, and wherein said hydrocarbon chain is non-substituted or substituted, by at least one radical selected from the group consisting of a halogen, a hydroxyl group, a C1-C20 alkyl group and a aryl group.

[0943] Suitable as Y groups for implementing embodiments of the invention include saturated or unsaturated hydrocarbon chains comprising between 1 and 20 carbon atoms, saturated or unsaturated hydrocarbon chains comprising between 1 and 10 carbon atoms, saturated or unsaturated hydrocarbon chains comprising between 1 and 5 carbon atoms, saturated or unsaturated hydrocarbon chains comprising 1, 2 or 3 carbon atoms, all of which being specifically and individually preferred.

[0944] Also suitable as Y groups for implementing embodiments of the invention include saturated or unsaturated hydrocarbon chains comprising between 1 and 20 carbon atoms, saturated or unsaturated hydrocarbon chains comprising between 1 and 10 carbon atoms, saturated or unsaturated hydrocarbon chains comprising between 1 and 5 carbon atoms, saturated or unsaturated hydrocarbon chains comprising 1, 2 or 3 carbon atoms, and in which said hydrocarbon chain is optionally interrupted by one or more, preferably between 1 and 16, between 1 and 12 or between 1 and 8, non-carbon atom, selected from the group consisting of an oxygen atom, a nitrogen atom, a carbonyl group and/or the following radical:

[chemical structure]

all of which being specifically preferred and individually contemplated.

[0945] Also suitable as Y groups for implementing embodiments of the invention is:

[chemical structure]

wherein n is comprised between 1 and 29, in particular between 1 and 5; and wherein m is comprised between 1 and 29, in particular between 1 and 5.

[0946] Suitable covalent-bond formation conditions: As used herein, unless indicated otherwise or contradictory in context, the term “suitable covalent-bond formation conditions” means reaction conditions such as pressure, temperature, reagent quantities, solvent's type and quantity, or stirring, under which starting materials may contact and provide at least one further material resulting from the formation of at least one covalent bond between said starting materials. Suitable as covalent-bond formation conditions for implementing embodiments of the present invention preferably include substantially atmospheric conditions.

[0947] Organic spacing-compound: In the present description and unless otherwise indicated, the term “organic spacing compound” means an organic chemical radical (preferably monofunctional radical) having the ability to create a steric effect/hindrance and/or electronic effect/hindrance in a direct vicinity of a (modified) GFR-binding compound of the present disclosure. Suitable organic spacing compounds include, but are not limited to, monovalent organic radicals independently selected from the group consisting of a saturated or unsaturated hydrocarbon chain of at most 20 nanometres (nm) in length, preferably at most 10 nm, 5 nm, 1 nm, 0.5 nm, 0.1 nm, 0.05 nm or 0.01 nm, wherein said hydrocarbon chain is optionally interrupted by one or more, preferably between 1 and 16, between 1 and 12 or between 1 and 8 non-carbon atoms as appropriate, wherein said non-carbon atom is selected from the group consisting of —O—, —S—, —C(═O), —SO₂—, —N(Rⁱ)(C═O)—, and —N(Rⁱ)—, wherein Rⁱ is selected from the group consisting of a hydrogen atom, a C1-C6 alkyl group and an aryl group, and wherein said hydrocarbon chain is non-substituted or substituted by at least one radical selected from the group consisting of a halogen, a hydroxyl group, a C1-C20 alkyl group and an aryl group. In particular, organic spacing compounds include saturated or unsaturated hydrocarbon chains comprising between 1 and 80 carbon atoms, saturated or unsaturated hydrocarbon chains comprising between 1 and 60 carbon atoms, saturated or unsaturated hydrocarbon chains comprising between 1 and 40 carbon atoms, saturated or unsaturated hydrocarbon chains comprising between 1 and 20 carbon atoms, saturated or unsaturated hydrocarbon chains comprising between 1 and 10 carbon atoms, saturated hydrocarbon chains comprising 1, 2, 3, 4, 5 or 6 carbon atoms, all of which being specifically and individually preferred. In one example, the saturated hydrocarbon chain may be methyl, ethyl, propyl, butyl or pentyl. In one example, said unsaturated hydrocarbon chain may be ethylene, propene, 1- or 2-butene, 1-, 2- or 3-pentene, acetylene, propyne, 1- or 2-butyne, 1-, 2- or 3-pentyne.

[0948] Saturated hydrocarbon chain: In the present description and unless otherwise indicated, the terms “saturated hydrocarbon chain” means a chain of carbon atoms linked together by single bonds and has hydrogen atoms filling all of the other bonding orbitals of the carbon atoms.

[0949] Unsaturated hydrocarbon chain: In the present description and unless otherwise indicated, the terms “unsaturated hydrocarbon chain” means a chain of carbon that contains carbon-carbon double bonds or triple bonds, such as those found in alkenes or alkynes, respectively.

[0950] Atmospheric conditions: As used herein, unless indicated otherwise or contradictory in context, the term “atmospheric conditions” or “ambient conditions”, which are interchangeably used, refers to conditions which may be found naturally at an experimentation location. For example, in certain embodiments, typical atmospheric conditions in a chemistry/biology laboratory are a temperature of between about 15° C. and about 35° C. and a pressure of about 1 atm.

[0951] Solution: As used herein, unless indicated otherwise or contradictory in context, the term “solution” means a homogeneous mixture composed of only one phase, which is stable, which does not allow beam of light to scatter, in which the particles of solute cannot be seen by naked eye and from which a solute cannot be separated by filtration.

[0952] Suspension: As used herein, unless indicated otherwise or contradictory in context, the term “suspension” means a heterogeneous mixture containing solid particles that are sufficiently large for sedimentation. Typically, said solid particles are larger than one micrometer. In general, the internal phase (solid) is dispersed throughout the external phase (fluid) through mechanical agitation, with the use of certain excipients or suspending agents.

[0953] Suitable non-covalent association or functionalization techniques for implementing embodiments of the present invention include, but are not limited to, association(s) between a bioactive carrier-affinity containing group as already defined herein and at least part of a bioactive carrier. Such association(s) involves the formation of at least one non-covalent interaction (or attachment) between a (modified) GFR-binding compound and a bioactive carrier as defined herein.

[0954] In one example, said functionalised bioactive carrier is functionally associated with at least two, at least three, at least four, at least five, at least six, at least seven, at least eight, at least nine or at least ten (modified) GFR-binding compounds, each possessing a different and distinct chemical structure.

[0955] In one example, said functionalised bioactive carrier does not comprise a layer of polysiloxane.

[0956] For example, in certain embodiments, a functionalised bioactive carrier as defined herein comprises at least one (modified) GFR-binding compound, and at least one bioactive carrier, wherein said bioactive carrier:
[0957] has a porosity (or average pore diameter) comprised between 1 nm and 1000 μm, as measured by scanning electronic microscopy for pore sizes within the supra-nanometre range and by atomic force microscopy for pore sizes within the nanometre range, and/or
[0958] comprises a stiffness of at least 5 kPa, preferably at least 35 kPa, as measured by Dynamic Mechanical Analysis, and/or
[0959] is selected from the group consisting of biopolymers (collagen, fibrin, . . . etc), synthetic polymers (PEEK, PET, . . . etc), solid materials (Titanium, Metals . . . etc) and ceramics (Hydroxyapatite, Beta-tricalcium Phosphate, Biphasic Calcium Phosphate . . . etc), and/or
[0960] comprises a density or concentration of associated compound (I) comprised between 0.05×10⁻¹² mol/mm² and 50×10⁻¹² mol/mm², as measured by conventional fluorescence microscopy or calculated theoretically on the basis of the peptide size, and/or
[0961] does not comprise a layer of polysiloxane.

[0962] Porosity: As used herein, unless indicated otherwise or contradictory in context, the term “porosity” refers to the measure of the void spaces in a substance or material, and is a fraction of the volume of voids over the total volume, between 0 and 1, or as a percentage between 0 and 100%. There are many ways to test and measure the porosity of a substance or material, but for the purpose of the present disclosure, and for the avoidance of any doubts, porosity values are provided in manometers (nm) as obtained using atomic force microscopy for small pore diameters (up to 100 nm) and scanning electron microscopy for larger pore sizes.

[0963] Stiffness: As used herein, unless indicated otherwise or contradictory in context, the term “stiffness” refers to the rigidity of a substance or material i.e. the extent to which it resists deformation in response to an applied force. There are many ways to test and measure the stiffness of a substance or material, but for the purpose of the present disclosure, and for the avoidance of any doubts, stiffness values are provided in Pascal (Pa) as obtained using Dynamic Mechanical Analysis (DMA). Particularly preferred stiffness values are comprised between 1 kPa and 100 kPa and not more than 5 GPa depending on the tissue to be regenerated or repaired.

[0964] As already stated, the nature of the biomaterial is an important parameter. Particularly good results have been obtained using bioactive carriers composed mostly with the main material component of the tissue to be regenerated and/or repaired. This generally allows for a better integration of the bioactive carrier, a better resorption from the surrounding cells already present and therefore a better regeneration or repair of the targeted tissue to be achieved.

[0965] In one example, said bioactive carrier for use in neuroregeneration-related applications has a stiffness comprised between about 0.01 kPa and about 3 kPa, preferably between about 0.01 kPa and about 1 kPa. In one example, said bioactive carrier for use in muscle, cartilage and T/L-related applications has a stiffness comprised between about 3 kPa and about 200 kPa, preferably between about 10 kPa and about 30 kPa. In one example, said bioactive carrier for use in bone-related applications has a stiffness comprised between about 30 kPa and about 3 GPa, preferably between about 70 kPa and about 200 kPa for instance in applications such as the treatment or prevention of osteoporosis and bone tissue regeneration. In one example, said bioactive carrier for use in hair-related applications has a stiffness comprised between about 0.01 kPa and about 200 kPa, preferably between about 3 kPa and about 70 kPa. In one example, said bioactive carrier for use in endothelization-related applications has a stiffness comprised between about 500 kPa and about 2.5 GPa. In one example, said bioactive carrier for use in angiogenesis-related applications has a stiffness comprised between about 0.01 kPa and about 100 kPa. In one example, said bioactive carrier for use in wound healing and skin-related applications has a stiffness comprised between about 0.01 kPa and about 70 kPa. For example, in certain embodiments, a pharmaceutical, dermatological or cosmetic association or combination of the present invention may be in the form of a dry, sterile powder.

[0966] In one particular example, the concentration or density (as defined herein) of a (modified) GFR-binding compound in, or on the surface of, a bioactive carrier as defined herein is comprised between 0.05 and 50 pmol/mm², in particular comprised between 0.1 and 30 pmol/mm², comprised between 0.1 and 10 pmol/mm², comprised between 0.1 and 5 pmol/mm², or comprised between 0.1 and 2 pmol/mm², each range being preferred and specifically contemplated to be combined with any other numerical or non-numerical ranges as described herein. Most particularly, the density is comprised between 0.2 and 2 pmol/mm².

### VII. Medical Devices

[0967] For in-vivo administration, GFR-binding compounds, modified GFR-binding compounds or functionalised bioactive carriers of the present invention may be injected e.g. using an appropriate syringe, to a specific target site so that they may be delivered directly to the interior of e.g. a body articulation or under the skin in close proximity with the cells to be treated via, for instance, a PTD or cell-permeable peptide. Alternately, a medical device or implant (or implantable medical device) comprising such GFR-binding compounds, modified GFR-binding compounds or functionalised bioactive carriers may be used. Implants may contain reservoirs in which to place the GFR-binding compound, modified GFR-binding compound or functionalised bioactive carrier of the invention for release into the surrounding tissue, or may comprise a porous composition which may be soaked in a solution containing one or more GFR-binding compounds or modified GFR-binding compounds of the present disclosure prior to implantation.

[0968] Hydrogels, time-release capsules or spheres, liposomes, microspheres, nanospheres, biodegradable polymers, or other such drug delivery systems may also be employed to deliver GFR-binding compounds of the present invention to target cells and tissues. U.S. Pat. No. 6,475,516, for example, provides hydrogels being covalently bound to the surface of an in-dwelling medical device such as an implant, which may be used with GFR-binding compounds of the present disclosure.

[0969] In one aspect, the present disclosure provides a medical device comprising at least one GFR-compound, modified GFR-binding compound or functionalised bioactive carrier as defined herein. In one particular example, the medical device of the invention may be, partly or entirely, made of a functionalised bioactive carrier as defined herein or contain, for example, in certain embodiments, within a cavity thereof, said functionalised bioactive carrier.

[0970] In one example, said medical device may comprise between 1 wt % and 100 wt % of a functionalised bioactive carrier of the invention with respect to the total weight of the medical device. In one example, said medical device comprises between about 50 wt % and 100 wt %, between about 60 wt % and 100 wt %, between about 70 wt % and 100 wt %, between about 80 wt % and 100 wt %, between about 90 wt % and 100 wt % of a functionalised bioactive carrier of the invention with respect to the total weight of the medical device, all of which being specifically and individually preferred.

[0971] In an example, at least one part of a surface of said medical device comprises a GFR-binding compound, a modified GFR-binding compound or a functionalised bioactive carrier of the invention. For example, in certain embodiments, said medical device is preferably an implantable medical device.

[0972] Also suitable as medical devices for implementing embodiments of the present invention include stents, stiches, powders, granules, sponges, putties, injectable and non-injectable liquids, curable compositions, moldable compositions, membranes, glues, sprays, pills, filaments, prosthesis, or combinations thereof.

[0973] In one aspect, the present disclosure provides a bone graft material comprising a GFR-binding compound or a modified GFR-binding compound of the invention and a collagen as defined herein. In the present description and unless otherwise indicated, the term “bone graft material” means a material suitable for bone grafting.

### VIII. Antibody:GFR-Binding Compound Complex

[0974] In one aspect, the present disclosure provides an antibody:GFR-binding compound complex comprising at least one (modified) GFR-binding compound and at least one antibody or any functional fragment thereof; wherein said (modified) GFR-binding compound is as defined herein.

[0975] Antibody: As used herein, unless indicated otherwise or contradictory in context, the terms “antibody” or “antibodies” refer to a light chain and heavy chain protein of an antibody that are encoded by a gene or genes that are either a naturally occurring gene or a codon-optimized gene. The antibody light chain and heavy chain genes may be human antibody light chain and heavy chain genes. Antibodies, or immunoglobulins, are proteins produced by cells of the immune system to identify and neutralize foreign substances, such as bacteria, viruses, or improperly proliferating native cells. Immunoglobulins are one class of desired globulin molecules and include, but are not limited to, IgG, IgM, IgA, IgD, IgE, IgY, lambda chains, kappa chains and fragments thereof; bi-specific antibodies, and fragments thereof; scFv fragments, Fc fragments, and Fab fragments as well as dimeric, trimeric and oligomeric forms of antibody fragments. Suitable antibodies include, but are not limited to, naturally occurring antibodies, animal-specific antibodies, human antibodies, humanized antibodies, autoantibodies and hybrid antibodies. Suitable antibodies also include antibodies with the ability to bind specific ligands. Suitable antibodies also include, but are not limited to, primary antibodies, secondary antibodies, designer antibodies, anti-protein antibodies, anti-peptide antibodies, anti-DNA antibodies, anti-RNA antibodies, anti-hormone antibodies, anti-hypophysiotropic peptides, antibodies against non-natural antigens, anti-anterior pituitary hormone antibodies, anti-posterior pituitary hormone antibodies, anti-venom antibodies, anti-tumor marker antibodies, antibodies directed against epitopes associated with infectious disease, including, anti-viral, anti-bacterial, anti-protozoal, anti-fungal, anti-parasitic, anti-receptor, anti-lipid, anti-phospholipid, anti-growth factor, anti-cytokine, anti-monokine, anti idiotype, and anti-accessory (presentation) protein antibodies. Suitable antibodies also include, but are not limited to, 3F8, 8H9, Abagovomab, Abciximab, Abituzumab, Abrilumab, Actoxumab, Adalimumab, Adecatumumab, Aducanumab, Afelimomab, Afutuzumab, Alacizumab pegol, ALD518, Alemtuzumab, Alirocumab, Altumomab pentetate, Amatuximab, Anatumomab mafenatox, Anetumab ravtansine, Anifrolumab, Anrukinzumab, Apolizumab, Arcitumomab, Ascrinvacumab, Aselizumab, Atezolizumab, Atinumab, Atlizumab, Atorolimumab, Bapineuzumab, Basiliximab, Bavituximab, Bectumomab, Begelomab, Belimumab, Benralizumab, Bertilimumab, Besilesomab, Bevacizumab, Bezlotoxumab, Biciromab, Bimagrumab, Bimekizumab, Bivatuzumab mertansine, Blinatumomab, Blosozumab, Bococizumab, Brentuximab vedotin, Briakinumab, Brodalumab, Brolucizumab, Brontictuzumab, Canakinumab, Cantuzumab mertansine, Cantuzumab ravtansine, Caplacizumab, Capromab pendetide, Carlumab, Catumaxomab, cBR96-doxorubicin immunoconjugate, CC49, Cedelizumab, Certolizumab pegol, Cetuximab, Ch.14.18, Citatuzumab bogatox, Cixutumumab, Clazakizumab, Clenoliximab, Clivatuzumab tetraxetan, Codrituzumab, Coltuximab ravtansine, Conatumumab, Concizumab, CR6261, Crenezumab, Dacetuzumab, Daclizumab, Dalotuzumab, Dapirolizumab pegol, Daratumumab, Dectrekumab, Demcizumab, Denintuzumab mafodotin, Denosumab, Derlotuximab biotin, Detumomab, Dinutuximab, Diridavumab, Dorlimomab aritox, Drozitumab, Duligotumab, Dupilumab, Durvalumab, Dusigitumab, Ecromeximab, Eculizumab, Edobacomab, Edrecolomab, Efalizumab, Efungumab, Eldelumab, Elgemtumab, Elotuzumab, Elsilimomab, Emactuzumab, Emibetuzumab, Enavatuzumab, Enfortumab vedotin, Enlimomab pegol, Enoblituzumab, Enokizumab, Enoticumab, Ensituximab, Epitumomab cituxetan, Epratuzumab, Erlizumab, Ertumaxomab, Etaracizumab, Etrolizumab, Evinacumab, Evolocumab, Exbivirumab, Fanolesomab, Faralimomab, Farletuzumab, Fasinumab, FBTA05, Felvizumab, Fezakinumab, Ficlatuzumab, Figitumumab, Firivumab, Flanvotumab, Fletikumab, Fontolizumab, Foralumab, Foravirumab, Fresolimumab, Fulranumab, Futuximab, Galiximab, Ganitumab, Gantenerumab, Gavilimomab, Gemtuzumab ozogamicin, Gevokizumab, Girentuximab, Glembatumumab vedotin, Golimumab, Gomiliximab, Guselkumab, Ibalizumab, Ibritumomab tiuxetan, Icrucumab, Idarucizumab, Igovomab, IMAB362, Imalumab, Imciromab, Imgatuzumab, Inclacumab, Indatuximab ravtansine, Indusatumab vedotin, Infliximab, Inolimomab, Inotuzumab ozogamicin, Intetumumab, Ipilimumab, Iratumumab, Isatuximab, Itolizumab, Ixekizumab, Keliximab, Labetuzumab, Lambrolizumab, Lampalizumab, Lebrikizumab, Lemalesomab, Lenzilumab, Lerdelimumab, Lexatumumab, Libivirumab, Lifastuzumab vedotin, Ligelizumab, Lilotomab satetraxetan, Lintuzumab, Lirilumab, Lodelcizumab, Lokivetmab, Lorvotuzumab mertansine, Lucatumumab, Lulizumab pegol, Lumiliximab, Lumretuzumab, Mapatumumab, Margetuximab, Maslimomab, Matuzumab, Mavrilimumab, Mepolizumab, Metelimumab, Milatuzumab, Minretumomab, Mirvetuximab soravtansine, Mitumomab, Mogamulizumab, Morolimumab, Motavizumab, Moxetumomab pasudotox, Muromonab-CD3, Nacolomab tafenatox, Namilumab, Naptumomab estafenatox, Narnatumab, Natalizumab, Nebacumab, Necitumumab, Nemolizumab, Nerelimomab, Nesvacumab, Nimotuzumab, Nivolumab, Nofetumomab merpentan, Obiltoxaximab, Ocaratuzumab, Ocrelizumab, Odulimomab, Ofatumumab, Olaratumab, Olokizumab, Omalizumab, Onartuzumab, Ontuxizumab, Opicinumab, Oportuzumab monatox, Oregovomab, Orticumab, Otelixizumab, Otlertuzumab, Oxelumab, Ozanezumab, Ozoralizumab, Pagibaximab, Palivizumab, Panitumumab, Pankomab, Panobacumab, Parsatuzumab, Pascolizumab, Pasotuxizumab, Pateclizumab, Patritumab, Pembrolizumab, Pemtumomab, Perakizumab, Pertuzumab, Pexelizumab, Pidilizumab, Pinatuzumab vedotin, Pintumomab, Placulumab, Polatuzumab vedotin, Ponezumab, Priliximab, Pritoxaximab, Pritumumab, PRO 140, Quilizumab, Racotumomab, Radretumab, Rafivirumab, Ralpancizumab, Ramucirumab, Ranibizumab, Raxibacumab, Refanezumab, Regavirumab, Reslizumab, Rilotumumab, Rinucumab, Rituximab, Robatumumab, Roledumab, Romosozumab, Rontalizumab, Rovelizumab, Ruplizumab, Sacituzumab govitecan, Samalizumab, Sarilumab, Satumomab pendetide, Secukinumab, Seribantumab, Setoxaximab, Sevirumab, SGN-CD19A, SGN-CD33A, Sibrotuzumab, Sifalimumab, Siltuximab, Simtuzumab, Siplizumab, Sirukumab, Sofituzumab vedotin, Solanezumab, Solitomab, Sonepcizumab, Sontuzumab, Stamulumab, Sulesomab, Suvizumab, Tabalumab, Tacatuzumab tetraxetan, Tadocizumab, Talizumab, Tanezumab, Taplitumomab paptox, Tarextumab, Tefibazumab, Telimomab aritox, Tenatumomab, Teneliximab, Teplizumab, Teprotumumab, Tesidolumab, TGN1412, Ticilimumab, Tigatuzumab, Tildrakizumab, TNX-650, Tocilizumab, Toralizumab, Tosatoxumab, Tositumomab, Tovetumab, Tralokinumab, Trastuzumab, TRBS07, Tregalizumab, Tremelimumab, Trevogrumab, Tucotuzumab celmoleukin, Tuvirumab, Ublituximab, Ulocuplumab, Urelumab, Urtoxazumab, Ustekinumab, Vandortuzumab vedotin, Vantictumab, Vanucizumab, Vapaliximab, Varlilumab, Vatelizumab, Vedolizumab, Veltuzumab, Vepalimomab, Vesencumab, Visilizumab, Volociximab, Vorsetuzumab mafodotin, Votumumab, Zalutumumab, Zanolimumab, Zatuximab, Ziralimumab, or Zolimomab aritox.

[0976] In certain embodiments, said antibody:GFR-binding compound complex is a covalent complex. In certain embodiments, said antibody:GFR-binding compound complex is a non-covalent complex.

### IX. Dendrimer:GFR-Binding Compound Complex

[0977] In one aspect, the present disclosure provides a dendrimer:GFR-binding compound complex comprising at least one (modified) GFR-binding compound and at least one dendrimer or any functional fragment thereof; wherein said (modified) GFR-binding compound is as defined herein; and wherein said dendrimer is as already defined herein.

[0978] In certain embodiments, said dendrimer:GFR-binding compound complex is a covalent complex. In certain embodiments, said dendrimer:GFR-binding compound complex is a non-covalent complex.

### X. Polynucleotides

[0979] The extracellular biological action of the GFR-binding peptides may also be conveyed via expression, by a cell, of the appropriate polynucleotide sequence engineered to encode a particular GFR-binding peptide of interest. One may thus inject or administer, to a mammal subject, a GFR-binding-peptide-encoding polynucleotide (such as a messenger RNA), wherein said polynucleotide would enable the intracellular production of the encoded GFR-binding peptide, which may, once released outside the host cell, exert its extracellular action on the host cell and/or on neighbouring cells and/or distant cells. In other words, GFR-binding peptides may be produced ex-vivo (e.g. using a peptide synthesizer) or in-vivo (e.g. via cell expression of a GFR-binding-peptide-encoding polynucleotide), and in all cases have an extracellular biological action of activation of growth factor receptors to induce cell differentiation and/or tissue regeneration.

[0980] Thus, in one aspect, the present disclosure provides a polynucleotide encoding at least one peptide as disclosed herein. In one particular example, said polynucleotide is a messenger RNA or a primary construct thereof. Said messenger RNA may additionally have a 5′ cap structure chosen from the group consisting of m⁷G(5′)ppp (5′)A,G(5′)ppp(5′)A and G(5′)ppp(5′)G. In one example, the messenger RNA additionally has a poly-A tail of from about 10 to 200 adenosine nucleotides. In one example, the messenger RNA additionally has a poly-C tail of from about 10 to 200 cytosine nucleotides. In one example, the messenger RNA additionally codes a tag for purification chosen from the group consisting of a hexahistidine tag (HIS tag, polyhistidine tag), a streptavidin tag (Strep tag), an SBP tag (streptavidin-binding tag) or a GST (glutathione S-transferase) tag, or codes for a tag for purification via an antibody epitope chosen from the group consisting of antibody-binding tags, a Myc tag, a Swal 1 epitope, a FLAG tag or an HA tag. In one example, the messenger RNA additionally codes a signal peptide and/or a localization sequence, in particular a secretion sequence. In one example, said polynucleotide is a complementary DNA of said messenger RNA or a primary construct thereof.

[0981] In one aspect, the present disclosure also provides a vector comprising a polynucleotide as defined in the present disclosure.

[0982] In one aspect, the present disclosure also provides a cultured cell comprising a vector as defined in the present disclosure.

[0983] In one aspect, the present disclosure also provides a method of expressing a peptide of interest, variant or analog thereof, in a mammalian cell, said method comprising: (i) providing an mRNA as defined in the present disclosure; and (ii) introducing said mRNA to a mammalian cell under conditions that permit the expression of the peptide of interest by the mammalian cell.

[0984] In one aspect, the present disclosure also provides a mRNA as disclosed herein for use in a medical treatment or prophylactic method. In one example, said medical treatment method is a therapeutic, surgical, or diagnostic method. In one particular example, said method is a method for treating or preventing cell-degeneration-associated diseases, disorders, conditions, or pathologies as defined in the present disclosure. In one particular example, said method is a method for regenerating mammalian tissues as disclosed herein.

[0985] In one aspect, the present disclosure also provides a use of a RNA or mRNA as defined in the present disclosure for the preparation of a pharmaceutical composition for the treatment or prevention of cell-degeneration-associated diseases, disorders, conditions, or pathologies as disclosed herein.

[0986] In one aspect, the present disclosure also provides a medical composition comprising a polynucleotide, a vector, or a transfected cell, all as defined in the present disclosure, and a medically acceptable excipient or carrier.

[0987] Expression: As used herein, “expression” of a nucleic acid sequence refers to one or more of the following events: (1) production of an RNA template from a DNA sequence (e.g., by transcription); (2) processing of an RNA transcript (e.g., by splicing, editing, 5′ cap formation, and/or 3′ end processing); (3) translation of an RNA into a polypeptide or protein; and (4) post-translational modification of a polypeptide or protein.

[0988] mRNA: As used herein, the term “mRNA” refers to messenger RNA. Traditionally, the basic components of an mRNA molecule include at least a coding region, a 5′UTR, a 3′UTR, a 5′cap and a poly-A tail. Whereas the 5′UTR, 3′UTR, 5′cap and the poly-A tail are usually required to improve e.g. stability, translation and/or recognition by the ribosome, it is the coding region which comprises the sequence encoding the protein(s), polypeptide(s), or peptide(s) of (therapeutic) interest. Therefore, when the mRNA molecule as disclosed herein is conventionally described with reference to its coding region, any mRNA molecule also comprising at least one of a 5′UTR, a 3′UTR, a 5′cap or a poly-A tail forms an integral part of the present disclosure.

[0989] Coding region: As used herein, the term “coding region” or “coding sequence” refers to a portion of a polynucleotide that codes for a peptide or peptides of interest.

[0990] Primary RNA construct or transcript: As used herein, unless indicated otherwise or contradictory in context, the term “Primary RNA construct” or “Primary RNA transcript” refers to any precursor RNA molecule from a mature and functional (i.e. translatable) RNA molecule may be obtained. For instance, a precursor messenger RNA (pre-mRNA) is a type of primary transcript that becomes a messenger RNA (mRNA) after processing. Newly synthesized primary transcripts are modified in several ways to yield their mature form before they can be translated into a protein of interest. Such modifications include, but are not limited to, excision of introns, splicing of exons, addition of 5′cap and poly-A tail. Therefore, when reference is made to an RNA molecule, it shall be understood that it aims to cover all RNA molecules including, but not limited to, primary RNA transcripts or constructs at any stage of the modification process leading to a mature and functional RNA molecule e.g. with or without introns, exons, 5′cap, poly-A tail and/or any other conventional modifications, insofar as the RNA molecule contains a coding region or a precursor thereof allowing for a peptide of interest encoded by said coding region or precursor thereof to be expressed.

[0991] 5′ Capping: As used herein, unless indicated otherwise or contradictory in context, the term “5′ Capping” or “5′ Cap” refers to a 5′ cap structure of an mRNA that is involved in nuclear export, increasing mRNA stability and binds the mRNA Cap Binding Protein (CBP), which is responsible for mRNA stability in the cell and translation competency through the association of CBP with poly(A) binding protein to form the mature cyclic mRNA species. The cap further assists the removal of 5′ proximal introns removal during mRNA splicing. Endogenous mRNA molecules may be 5′-end capped generating a 5′-ppp-5′-triphosphate linkage between a terminal guanosine cap residue and the 5′-terminal transcribed sense nucleotide of the mRNA molecule. This 5′-guanylate cap may then be methylated to generate an N7-methyl-guanylate residue.

[0992] Poly-A tails: During RNA processing, a long chain of adenine nucleotides (poly-A tail) may be added to a polynucleotide such as an mRNA molecules in order to increase stability. Immediately after transcription, the 3′ end of the transcript may be cleaved to free a 3′ hydroxyl. Then poly-A polymerase adds a chain of adenine nucleotides to the RNA. The process, called polyadenylation, adds a poly-A tail that can be between, for example, approximately 100 and 250 residues long.

[0993] Untranslated regions: As used herein, the term “Untranslated regions” or UTRs of a gene refers to regions that are transcribed but not translated. The 5′UTR starts at the transcription start site and continues to the start codon but does not include the start codon; whereas, the 3′UTR starts immediately following the stop codon and continues until the transcriptional termination signal. The regulatory features of a UTR can be incorporated into the polynucleotides, primary constructs and/or mRNA of the present disclosure to enhance the stability of the molecule.

[0994] 3′UTR: As used herein, unless indicated otherwise or contradictory in context, the term “3′UTR” or “three prime untranslated region” refers to the section of messenger RNA that immediately follows the translation termination codon. The 3′-UTR often contains regulatory regions that post-transcriptionally influence gene expression.

[0995] 5′UTR: As used herein, unless indicated otherwise or contradictory in context, the term “5′UTR” or “five prime untranslated region” refers to the section of mRNA that starts at the transcription start site and continues to the start codon but does not include the start codon. There is growing body of evidence about the regulatory roles played by the UTRs in terms of stability of the nucleic acid molecule and translation. Natural 5′UTRs bear features which play roles in for translation initiation. 5′UTR also have been known to form secondary structures which are involved in elongation factor binding.

[0996] Complementary DNA: As used herein, the term “complementary DNA” or “cDNA” refers to a DNA molecule containing an eukaryote gene which has been tailored or engineered to be expressed in a prokaryote host cell. cDNA is also called “intron-free” DNA as it lacks the gene regions encoding introns, its transcription yielding an intron-free mRNA molecule.

[0997] In one aspect, the present disclosure provides a vector comprising a polynucleotide encoding at least one peptide, variant or analog thereof, having growth factor receptor-binding capability or capabilities, as defined herein.

[0998] Vector: As used herein, unless indicated otherwise or contradictory in context, the term “vector” is used in its most general meaning and refers to any intermediary vehicle for a nucleic acid which enables said nucleic acid, for example, to be introduced into prokaryotic and/or eukaryotic cells and, where appropriate, to be integrated into a genome. Vectors of this kind are preferably replicated and/or expressed in the cells. Vectors may comprise plasmids, phagemids, bacteriophages or viral genomes.

[0999] Plasmid: As used herein, unless indicated otherwise or contradictory in context, the term “plasmid” refers to a double-stranded (which may be circular) DNA sequence that is capable of automatically replicating in a host cell.

[1000] In one aspect, the present disclosure provides a cultured cell (or transfected cell) comprising a polynucleotide encoding at least one peptide, variant or analog thereof, having growth factor receptor-binding capability or capabilities, as defined herein.

[1001] In one aspect, the present disclosure provides a medical composition comprising at least one of a polynucleotide encoding at least one peptide, variant or analog thereof, having growth factor receptor-binding capability or capabilities, as defined herein, a vector comprising such a polynucleotide, or a transfected cell comprising such a vector, and a medically acceptable carrier.

[1002] In one aspect, the present disclosure provides methods and uses for inducing cell differentiation, regenerating tissues and protecting a patient from cell-degeneration-related diseases, conditions, disorders or pathologies, using at least one of a polynucleotide encoding at least one peptide, variant or analog thereof, having growth factor receptor-binding capability or capabilities, as defined herein, a vector comprising such a polynucleotide, a transfected cell comprising such a vector, or a medical composition comprising them.

### XI. Pharmaceutical Compositions

[1003] The present disclosure provides GFR-binding compounds, modified GFR-binding compounds and functionalised bioactive carrier, which may be used for inducing stem cell differentiation and tissue regeneration.

[1004] In one aspect, the present disclosure provides a composition such as a pharmaceutical, prophylactic, surgical, diagnostic, or imaging composition (hereinafter shorten as pharmaceutical or medical composition) comprising at least one (modified) GFR-binding compound or a functionalised bioactive carrier as defined herein and further comprising at least one pharmaceutically acceptable excipient carriers and/or vehicles.

[1005] Formulations of the pharmaceutical compositions described herein may be prepared by any method known or hereafter developed in the art of pharmacology. Generally, such methods of preparation include the step of bringing the active ingredient(s) into association with an excipient and/or one or more other accessory ingredients, and then, if necessary and/or desirable, shaping and/or packaging the product into a desired single- or multi-dose unit.

[1006] For example, in certain embodiments, a pharmaceutical composition as defined herein may contain between 0.01% and 100% by weight (over the total weight of the pharmaceutical composition) of a (modified) GFR-binding compound or a functionalised bioactive carrier, both as defined herein, as a pharmaceutically effective amount. The pharmaceutical composition particularly comprises between 0.01% and 95%, between 0.01% and 90%, between 0.01% and 85%, between 0.01% and 80%, between 0.01% and 75%, between 0.01% and 70%, between 0.01% and 65%, between 0.01% and 60%, between 0.01% and 55%, between 0.01% and 50%, between 0.01% and 45%, between 0.01% and 40%, between 0.01% and 35%, between 0.01% and 30%, between 0.01% and 25%, between 0.01% and 20%, between 0.01% and 15%, between 0.01% and 10%, between 0.01% and 5%, between 0.1% and 100%, between 0.1% and 95%, between 0.1% and 90%, between 0.1% and 85%, between 0.1% and 80%, between 0.1% and 75%, between 0.1% and 70%, between 0.1% and 65%, between 0.1% and 60%, between 0.1% and 55%, between 0.1% and 50%, between 0.1% and 45%, between 0.1% and 40%, between 0.1% and 35%, between 0.1% and 30%, between 0.1% and 25%, between 0.1% and 20%, between 0.1% and 15%, between 0.1% and 10%, and between 0.1% and 5% by weight (over the total weight of the pharmaceutical composition) of any one of a (modified) GFR-binding compound or a functionalised bioactive carrier as defined herein.

[1007] Generally, the (modified) GFR-binding compounds or functionalised bioactive carriers as defined herein may thus be administered as such or as part of a formulation in association with one or more pharmaceutically acceptable excipients, carriers and/or vehicles so as to form what is generally referred to as a pharmaceutical composition or pharmaceutical formulation.

[1008] Pharmaceutical effective amount: As used herein, unless indicated otherwise or contradictory in context, the term “pharmaceutical effective amount” or “therapeutically effective amount” refers to an amount of an agent to be delivered (e.g., nucleic acid, protein, peptide, drug, therapeutic agent, diagnostic agent, prophylactic agent, etc.) that is sufficient, when administered to a subject suffering from or susceptible to an infection, disease, disorder, condition and/or pathology, to produce/provide a therapeutically effective outcome. Thus, a “pharmaceutical effective amount” depends upon the context in which it is being applied. A pharmaceutical effective amount of a composition is provided based, at least in part, on the target tissue, target cell type, means of administration, physical characteristics of the pharmaceutical association or composition (e.g., size, 3D shape, etc.), and other determinants. For example, in certain embodiments, in the context of providing an agent that induces tissue regeneration, a pharmaceutical effective amount of an agent is, for example, in certain embodiments, an amount sufficient to achieve tissue regeneration, as compared to the response obtained without provision of the agent. For example, in certain embodiments, a therapeutically effective amount as used herein is any of the herein disclosed weight or molar amounts, ratios or ranges of the (modified) GFR-binding compound or functionalised bioactive carrier.

[1009] Therapeutically effective outcome: As used herein, unless indicated otherwise or contradictory in context, the term “therapeutically effective outcome” refers to an outcome that is sufficient in a subject suffering from or susceptible to an infection, disease, disorder, condition and/or pathology, to treat, improve symptoms of, diagnose, prevent, and/or delay the onset of the infection, disease, disorder, condition and/or pathology.

[1010] Therapeutic Agent: As used herein, unless indicated otherwise or contradictory in context, the term “therapeutic agent” refers to any agent that, when administered to a subject/patient/individual, has a therapeutic, diagnostic, and/or prophylactic effect and/or elicits a desired biological and/or pharmacological effect.

[1011] Pharmaceutically acceptable: As used herein, unless indicated otherwise or contradictory in context, the term “pharmaceutically acceptable” refers to those compounds, materials, compositions, and/or dosage forms which are, within the ambit of sound medical judgment, suitable for use in contact with the tissues of human beings and animals without excessive toxicity, irritation, allergic response, or other problem or complication, commensurate with a reasonable benefit/risk ratio.

[1012] Pharmaceutically acceptable excipients: As used herein, unless indicated otherwise or contradictory in context, the term “pharmaceutically acceptable excipient” refers to any ingredient other than the compounds described herein (i.e. GFR-binding compounds, bioactive carriers as defined herein or any further active principles) and satisfying to the herein defined definition of pharmaceutically acceptable for a patient. Excipients may include, for example: inert diluents, dispersing and/or granulating agents, surface active agents and/or emulsifiers, disintegrating agents, binding agents, preservatives, buffering agents, lubricating agents, oils, printing inks, sweeteners, and/or waters of hydration. The choice of excipient(s) will largely depend on factors such as the particular mode of administration, the effect of the excipient(s) on solubility and stability, and the nature of the dosage form. In one embodiment, the pharmaceutically acceptable excipient is not a naturally occurring excipient.

[1013] Diluents: As used herein, unless indicated otherwise or contradictory in context, diluents include, but are not limited to, calcium carbonate, sodium carbonate, calcium phosphate, dicalcium phosphate, calcium sulfate, calcium hydrogen phosphate, sodium phosphate lactose, sucrose, cellulose, microcrystalline cellulose, kaolin, mannitol, sorbitol, inositol, sodium chloride, dry starch, powdered sugar and/or any combinations thereof.

[1014] Buffering agents: As used herein, unless indicated otherwise or contradictory in context, buffering agents include, but are not limited to, citrate buffer solutions, acetate buffer solutions, phosphate buffer solutions, ammonium chloride, potassium acetate, potassium chloride, monobasic potassium phosphate, calcium carbonate, calcium chloride, calcium citrate, calcium gluconate, calcium lactate, propanoic acid, calcium levulinate, pentanoic acid, phosphoric acid, calcium hydroxide phosphate, sodium acetate, sodium bicarbonate, sodium chloride, sodium citrate, sodium lactate, magnesium hydroxide, aluminum hydroxide, alginic acid, pyrogen-free water, isotonic saline, Ringer's solution, ethyl alcohol and any combinations thereof.

[1015] Granulating and/or dispersing agents: As used herein, unless indicated otherwise or contradictory in context, granulating and/or dispersing agents include, but are not limited to, potato starch, corn starch, tapioca starch, sodium starch glycolate, clays, alginic acid, guar gum, citrus pulp, agar, bentonite, cellulose and wood products, natural sponge, cation-exchange resins, calcium carbonate, silicates, sodium carbonate, cross-linked poly(vinyl-pyrrolidone), sodium carboxymethyl starch, carboxymethyl cellulose, cross-linked sodium carboxymethyl cellulose, methylcellulose, pregelatinized starch, microcrystalline starch, water insoluble starch, calcium carboxymethyl cellulose, magnesium aluminum silicate, sodium lauryl sulfate, quaternary ammonium compounds and/or any combinations thereof.

[1016] Surface active agents and/or emulsifiers: As used herein, unless indicated otherwise or contradictory in context, surface active agents and/or emulsifiers include, but are not limited to, colloidal clays (such as aluminum silicates and magnesium aluminum silicates), natural emulsifiers (such as acacia, agar, sodium alginate, cholesterol, xanthan, pectin, gelatin, egg yolk, casein, cholesterol, wax, and lecithin), long chain amino acid derivatives, high molecular weight alcohols (such as stearyl, cetyl and oleyl alcohols, triacetin monostearate, ethylene glycol distearate and glyceryl monostearate), carbomers (such as carboxy polymethylene, polyacrylic acid, acrylic acid polymer, and carboxyvinyl polymer), diethylene glycol monolaurate, triethanolamine oleate, sodium oleate, potassium oleate, ethyl oleate, oleic acid, ethyl laurate, sodium lauryl sulfate, cetrimonium bromide, cetylpyridinium chloride, benzalkonium chloride, docusate sodium, carrageenan, cellulosic derivatives (such as carboxymethylcellulose sodium, hydroxymethyl cellulose, hydroxypropyl methylcellulose and methylcellulose), sorbitan fatty acid esters (such as polyoxyethylene sorbitan monolaurate, polyoxyethylene sorbitan, polyoxyethylene sorbitan monooleate, sorbitan monopalmitate and glyceryl monooleate), polyoxyethylene esters, sucrose fatty acid esters, polyethylene glycol fatty acid esters, polyoxyethylene ethers, poly(vinyl-pyrrolidone), and any combinations thereof.

[1017] Binding agents: As used herein, unless indicated otherwise or contradictory in context, binding agents include, but are not limited to, natural and synthetic gums (such as acacia, sodium alginate, carboxymethylcellulose, methylcellulose, ethylcellulose, hydroxyethylcellulose, hydroxypropyl cellulose, hydroxypropyl methylcellulose, microcrystalline cellulose, cellulose acetate and poly(vinyl-pyrrolidone), gelatin, starch, sugars (such as sucrose, dextrose, glucose, dextrin, lactose, and mannitol), alignates, magnesium aluminum silicates, polyethylene glycol, polyethylene oxide, inorganic calcium salts, water, alcohol, silicic acid, waxes, and any combinations thereof.

[1018] Preservatives: As used herein, unless indicated otherwise or contradictory in context, preservatives include, but are not limited to, antioxidants, chelating agents, antifungal preservatives, antimicrobial preservatives, acidic preservatives, and alcohol preservatives.

[1019] Antioxidants: As used herein, unless indicated otherwise or contradictory in context, antioxidants include, but are not limited to, alpha tocopherol, ascorbic acid, ascorbyl palmitate, butylated hydroxyanisole, propionic acid, potassium metabisulfite, propyl gallate, sodium metabisulfite, sodium ascorbate, and sodium sulfite.

[1020] Chelating agents: As used herein, unless indicated otherwise or contradictory in context, chelating agents include ethylenediaminetetraacetic acid (EDTA), fumaric acid, malic acid, phosphoric acid, citric acid monohydrate and tartaric acid.

[1021] Antimicrobial preservatives: As used herein, unless indicated otherwise or contradictory in context, antimicrobial preservatives include, but are not limited to, benzalkonium chloride, benzethonium chloride, chlorhexidine, chlorobutanol, chlorocresol, chloroxylenol, benzyl alcohol, bronopol, cetylpyridinium chloride, cresol, ethyl alcohol, glycerin, hexetidine, imidurea, phenoxyethanol, phenylmercuric nitrate, phenylethyl alcohol, phenol, and propylene glycol.

[1022] Antifungal preservatives: As used herein, unless indicated otherwise or contradictory in context, antifungal preservatives include, but are not limited to, benzoic acid, hydroxybenzoic acid, butyl paraben, methyl paraben, ethyl paraben, propyl paraben, potassium benzoate, sodium propionate, potassium sorbate, and/or sorbic acid.

[1023] Alcohol preservatives: As used herein, unless indicated otherwise or contradictory in context, alcohol preservatives include, but are not limited to, phenol, phenolic compounds, bisphenol, ethanol, polyethylene glycol, chlorobutanol and hydroxybenzoate.

[1024] Acidic preservatives: As used herein, unless indicated otherwise or contradictory in context, acidic preservatives include, but are not limited to, vitamin A, vitamin C, vitamin E, beta-carotene, acetic acid, citric acid, dehydroacetic acid, and sorbic acid.

[1025] Lubricating agents: As used herein, unless indicated otherwise or contradictory in context, lubricating agents include, but are not limited to, magnesium stearate, calcium stearate, stearic acid, sodium benzoate, sodium acetate, sodium chloride, silica, talc, malt, glyceryl behenate, hydrogenated vegetable oils, polyethylene glycol, magnesium lauryl sulphate and any combinations thereof.

[1026] Sweeteners: As used herein, unless indicated otherwise or contradictory in context, sweeteners include, but are not limited to, any natural or synthetic sugar substitutes. Natural sugar substitutes include, but are not limited to, brazzein, curculin, erythritol, glycyrrhizin, glycerol, hydrogenated starch hydrolysates, inulin, isomalt, lactitol, mogroside mix, mabinlin, maltitol, malto-oligosaccharide, mannitol, miraculin, monatin, monellin, osladin, pentadin, sorbitol, stevia, tagatose, thaumatin, and xylitol. Synthetic sugar substitutes include, but are not limited to, acesulfame potassium, advantame, alitame, aspartame, salt of aspartame-acesulfame, sodium cyclamate, dulcin, glucin, neohesperidin dihydrochalcone, neotame, P-4000, saccharin, Sucralose.

[1027] Exemplary excipients include, but are not limited to: butylated hydroxytoluene (BHT), calcium carbonate, calcium phosphate (dibasic), calcium stearate, croscarmellose, crosslinked polyvinyl pyrrolidone, citric acid, crospovidone, cysteine, ethylcellulose, gelatin, hydroxypropyl cellulose, hydroxypropyl methylcellulose, lactose, magnesium stearate, maltitol, mannitol, methionine, methylcellulose, methyl paraben, microcrystalline cellulose, polyethylene glycol, polyvinyl pyrrolidone, povidone, pregelatinized starch, propyl paraben, retinyl palmitate, shellac, silicon dioxide, sodium carboxymethyl cellulose, sodium citrate, sodium starch glycolate, sorbitol, starch, stearic acid, sucrose, talc, titanium dioxide, vitamin A, vitamin E, vitamin C, and xylitol. Suitable excipients for use in the present invention also include, but are not limited to, water, phosphate buffered saline (PBS), Ringer's solution, dextrose solution, serum-containing solutions, Hank's solution, other aqueous physiologically balanced solutions, oils, esters and glycols. Aqueous excipients can contain suitable auxiliary substances required to approximate the physiological conditions of the recipient, for example, in certain embodiments, by enhancing chemical stability and isotonicity.

[1028] Pharmaceutically/medically acceptable carriers: As used herein, unless indicated otherwise or contradictory in context, the term “pharmaceutically acceptable carriers”, “medically acceptable carrier” or “carriers” refers to pharmaceutically acceptable excipients and/or delivery vehicles suitable for delivering a pharmaceutical or therapeutic composition useful in a therapeutic method and uses of the present invention to a suitable in-vivo or ex-vivo site. Preferred pharmaceutically acceptable carriers are capable of maintaining a composition containing an active combination or association of a (modified) GFR-binding compound and a bioactive carrier as defined herein, in a form that, upon arrival of the combination to a target cell, site or tissue, the active combination is capable of performing one or more biological functions thereof the protein at the cell or tissue site. One type of pharmaceutically acceptable carrier includes a controlled release formulation that is capable of slowly releasing a composition or combination into an animal. In one example, a controlled release formulation comprises an active combination or association as defined herein in a controlled release vehicle. Suitable controlled release vehicles include, but are not limited to, microparticles, biocompatible polymers, other polymeric matrices, capsules, microcapsules, osmotic pumps, bolus preparations, diffusion devices, liposomes, lipospheres, and transdermal delivery systems. Such suitable controlled release vehicle may be combined with at least one targeting moiety. In one embodiment, the pharmaceutically acceptable carrier is not a naturally occurring carrier.

[1029] Targeting Moieties: In one example, the functionalised bioactive carrier disclosed herein includes at least one binding partner which functions to target the cell to a specific tissue space or to interact with a specific moiety, either in-vivo, ex-vivo or in-vitro. Suitable binding partners include antibodies and functional fragments thereof, scaffold proteins, or peptides.

[1030] In one example, said excipients, carriers or vehicles are compatible with the (modified) GFR-binding compounds or functionalised bioactive carriers defined herein so that they do not disrupt, tamper, modify, de-organise, de-combine or de-associate said the (modified) GFR-binding compounds or functionalised bioactive carriers. In contrast, said excipients, carriers or vehicles preserves, maintains or reinforces the stability of the (modified) GFR-binding compounds or functionalised bioactive carriers so as to preserve their biological activity.

[1031] In one example, the present pharmaceutical compositions also include pharmaceutically acceptable salts and/or solvates and/or prodrugs and/or isotopically-labelled derivatives of the substances and compounds described herein such as the (modified) GFR-binding compounds or any other active principles.

[1032] Pharmaceutically acceptable salts: As used herein, unless indicated otherwise or contradictory in context, the term “pharmaceutically acceptable salts” refers to derivatives of the disclosed substances and compounds wherein the parent substance or compound is modified by converting an existing acid or base moiety to its salt form (e.g., by reacting the free base group with a suitable organic acid). The degree of ionization in the salt may vary from completely ionized to almost non-ionized. Examples of pharmaceutically acceptable salts include, but are not limited to, mineral or organic acid salts of basic residues such as amines; alkali or organic salts of acidic residues such as carboxylic acids; and the like. Representative acid addition salts include acetate, adipate, alginate, ascorbate, aspartate, benzenesulfonate, benzoate, bisulfate, borate, butyrate, camphorate, camphorsulfonate, citrate, cyclopentanepropionate, digluconate, dodecylsulfate, ethanesulfonate, fumarate, glucoheptonate, glycerophosphate, hemisulfate, heptonate, hexanoate, hydrobromide, hydrochloride, hydroiodide, 2-hydroxy-ethanesulfonate, lactobionate, lactate, laurate, lauryl sulfate, malate, maleate, malonate, methanesulfonate, 2-naphthalenesulfonate, nicotinate, nitrate, oleate, oxalate, palmitate, pamoate, pectinate, persulfate, 3-phenylpropionate, phosphate, picrate, pivalate, propionate, stearate, succinate, sulfate, tartrate, thiocyanate, toluenesulfonate, undecanoate, valerate salts, and the like. Representative alkali or alkaline earth metal salts include sodium, lithium, potassium, calcium, magnesium, and the like, as well as nontoxic ammonium, quaternary ammonium, and amine cations, including, but not limited to ammonium, tetramethylammonium, tetraethylammonium, methylamine, dimethylamine, trimethylamine, triethylamine, ethylamine, and the like. The pharmaceutically acceptable salts of the present disclosure include the conventional non-toxic salts of the parent compound formed, for example, in certain embodiments, from non-toxic inorganic or organic acids. The pharmaceutically acceptable salts of the present disclosure can be synthesized from the parent compound which contains a basic or acidic moiety by conventional chemical methods. Generally, such salts can be prepared by reacting the free acid or base forms of these compounds with a stoichiometric amount of the appropriate base or acid in water or in an organic solvent, or in a mixture of the two; generally, non-aqueous media like ether, ethyl acetate, ethanol, isopropanol, or acetonitrile are preferred. Lists of suitable salts are generally found in Remington's Pharmaceutical Sciences, 17th ed., Mack Publishing Company, Easton, Pa., 1985, p. 1418 and in Pharmaceutical Salts: Properties, Selection, and Use, P. H. Stahl and C. G. Wermuth (eds.), Wiley-VCH, 2008, each of which being incorporated herein by reference in its entirety. In one embodiment, the pharmaceutically acceptable salt is not a naturally occurring salt.

[1033] Pharmaceutically acceptable solvate: As used herein, unless indicated otherwise or contradictory in context, the term “pharmaceutically acceptable solvate,” refers to a compound, substance, association or combination wherein molecules of a suitable solvent are incorporated in the crystal lattice. A suitable solvent is physiologically tolerable at the dosage administered. For example, in certain embodiments, solvates may be prepared by crystallization, recrystallization, or precipitation from a solution that includes organic solvents, water, or a mixture thereof. Examples of suitable solvents are ethanol, water (For example, in certain embodiments, mono-, di-, and tri-hydrates), N-methylpyrrolidinone (NMP), dimethyl sulfoxide (DMSO), dimethylformamide (DMF), [Nu],[Nu]′-dimethylacetamide (DMAC), 1,3-dimethyl-2-imidazolidinone (DMEU), 1,3-dimethyl-3,4,5,6-tetrahydro-2-(1H)-pyrimidinone (DMPU), acetonitrile (ACN), propylene glycol, ethyl acetate, benzyl alcohol, 2-pyrrolidone, benzyl benzoate, and the like. When water is the solvent, the solvate is referred to as a “hydrate”. In one embodiment, the pharmaceutically acceptable solvate is not a naturally occurring solvate.

[1034] Pharmaceutically acceptable isotopically-labelled compounds: In one example, the present invention also includes all pharmaceutically acceptable isotopically-labelled derivatives, which are identical to the compounds, substances, combinations or associations described herein but wherein one or more atoms are replaced by atoms having an atomic mass or mass number different from the atomic mass or mass number usually found in nature. Examples of isotopes that may be incorporated into GFR-binding compound(s) as defined herein include isotopes of hydrogen, carbon, chlorine, fluorine, iodine, nitrogen, oxygen, and sulfur, such as ²H, ³H, ¹¹C, ¹³C, ¹⁴C, ³⁶Cl, ¹⁸F, ¹²³I, ¹³N, ¹⁵N, ¹⁷O, ¹⁸O, and ³⁵S, respectively. It should be understood that compounds, substances, combinations, associations, prodrugs, and pharmaceutical acceptable salts thereof described herein which contain the aforementioned isotopes and/or other isotopes of other atoms are within the scope of the invention.

[1035] Certain isotopically labeled of the compounds, substances, combinations, associations, prodrugs, and salts thereof such as, for example, in certain embodiments, those incorporating a radioactive isotope such as ³H and ¹⁴C, are useful in drug and/or substrate tissue distribution studies. Tritium, i.e. ³H, and carbon-14, i.e. ¹⁴C, are particularly preferred due to their ease of preparation and detection. Further, substitution with heavier isotopes such as deuterium, i.e. ²H, can afford certain therapeutic advantages resulting from greater metabolic stability, for example, in certain embodiments, increased in vivo half-life or reduced dosage requirements, and hence may be preferred in some circumstances. Isotopically labeled compounds, substances, combinations, associations, prodrugs, and salts thereof can generally be prepared by carrying out the procedures disclosed in the Schemes and/or in the Examples by substituting a readily available non-isotopically labeled reagent for an isotopically labeled reagent.

[1036] Prodrugs: As used herein, unless indicated otherwise or contradictory in context, the term “prodrug” refers to a compound, substance, combination or association that is transformed in vivo to yield a compound, substance, combination or association as defined herein or a pharmaceutically acceptable salt or solvate thereof. The transformation may occur by various mechanisms, such as via hydrolysis in blood. A prodrug of a compound, substance, combination or association defined herein may be formed in a conventional manner with one or more functional groups in the compound, such as an amino, hydroxyl or carboxyl group. For example, in certain embodiments, if a compound defined herein contains a carboxylic acid functional group, a prodrug can comprise: (1) an ester formed by the replacement of a hydrogen of the acid group with a group such as (C1-C6)alkyl or (C6-C10) aryl; (2) an activated ester formed by the replacement of the hydrogen of the acid group with groups such as —(CR²)COOR′, where CR² is a spacer and R can be groups such as H or methyl and R′ can be groups such as (C1-C6)alkyl or (C6-C10) aryl; and/or (3) a carbonate formed by the replacement of the hydrogen of the acid with groups such as CHROCOOR′ where R can be groups such as H or methyl and R′ can be groups such as (C1-C6)alkyl or (C6-C10)aryl. Similarly, if a compound defined herein contains an alcohol functional group, a prodrug can be formed via the replacement of the hydrogen of the alcohol with groups such as (C1-C6)alkanoyloxymethyl or (C1-C6)alkanoyloxyaryl or by forming an ester via condensation with, for example, in certain embodiments, an amino acid. Where a compound defined herein contains a primary or secondary amino group, a prodrug may comprise, for example, in certain embodiments, an amide formed by the replacement of one or both of the hydrogen atoms of the amino group with (C1-C10)alkanoyl or (C6-C10)aroyl. Other prodrugs of amines are well known to those skilled in the art. Alternatively, certain compounds defined herein may themselves act as prodrugs of other compounds defined herein. Discussions regarding prodrugs and their use can be found in, for example, in certain embodiments, “Prodrugs as Novel Delivery Systems,” T. Higuchi and W. Stella, Vol. 14 of the ACS Symposium Series, and Bioreversible Carriers in Drug Design, Pergamon Press, 1987 (ed. E B Roche, American Pharmaceutical Association). Examples of other prodrug types may be found in the aforementioned reference which is hereby incorporated by reference.

### XII. Administration Routes and Procedures

[1037] (Modified) GFR-binding compounds, substances, functionalised bioactive carrier to be delivered and/or pharmaceutical, dermatological, prophylactic, diagnostic, or imaging compositions or formulations thereof in accordance with the present disclosure may be administered by any route of administration effective for preventing, treating, diagnosing, or imaging a disease, disorder, or condition and/or treating or alleviating at least one symptoms thereof and/or inducing tissue formation/regeneration and/or reducing or preventing tissue degeneration.

[1038] Suitable administration protocols include any in-vitro, in-vivo or ex-vivo administration protocol. The preferred types and routes of administration will be apparent to those of skill in the art, depending on the type of condition or disease to be prevented or treated or the nature of tissue to regenerate; whether the composition is nucleic acid based, protein based, cell based or combinations or mixtures thereof; and/or the target cell/tissue.

[1039] Ex-vivo and in-vitro administration: As used herein, unless indicated otherwise or contradictory in context, the term “ex-vivo administration” refers to performing the regulatory step outside of the subject/patient, such as administering a (modified) GFR-binding compounds, functionalised bioactive carrier or medical compositions as defined herein to a population of cells (e.g., mesenchymal stem cells) removed from a subject/patient for e.g. diagnostic, analysis and/or academic purposes.

[1040] Cells, tissues or organs can be contacted ex vivo or in vitro with a (modified) GFR-binding compound or a functionalised bioactive carrier by any suitable method, including mixing or the use of a delivery vehicle. Effective in vitro or ex vivo culture conditions include, but are not limited to, effective media, bioreactor, temperature, pH and oxygen conditions that permit cell culture. An effective medium refers to any medium in which a given host cell or tissue is typically cultured. Such medium typically comprises an aqueous medium having assimilable carbon, nitrogen and phosphate sources, and appropriate salts, minerals, metals and other nutrients, such as vitamins. Cells can be cultured in conventional fermentation bioreactors, shake flasks, test tubes, microtiter dishes, and petri plates. Culturing can be carried out at a temperature, pH and oxygen content appropriate for a cell or tissue. Such culturing conditions are within the expertise of one of ordinary skill in the art.

[1041] In one aspect, the present disclosure thus also provides a method for inducing tissue formation, in-vitro or ex-vivo, said method comprising the administration to a cell (e.g. a non-fully differentiated cell) of an effective amount of a GFR-binding compound, a functionalised bioactive carrier or a composition thereof as defined herein.

[1042] In-vivo administration: In one example, (modified) GFR-binding compounds, functionalised bioactive carriers or pharmaceutical, prophylactic, diagnostic, or imaging compositions are administered by one or more of a variety of routes, including oral, intravenous, intramuscular, intra-arterial, intramedullary, rectal, intravaginal, intrathecal, subcutaneous, intraventricular, transdermal, intradermal, intraperitoneal, topical (e.g. by ointments, creams, powders, lotions, gels, and/or drops), buccal, enteral, mucosal, nasal, vitreal, sublingual, by intra-tracheal instillation, bronchial instillation, and/or inhalation, as an oral spray, nasal spray, and/or aerosol, and/or through a portal vein catheter. In one example, (modified) GFR-binding compounds, functionalised bioactive carrier or pharmaceutical, prophylactic, diagnostic, or imaging compositions are administered by systemic intravenous injection. In one example, (modified) GFR-binding compounds, functionalised bioactive carrier or pharmaceutical, prophylactic, diagnostic, or imaging compositions may be administered in a way which allows them to cross the blood-brain barrier, vascular barrier, or other epithelial barrier.

[1043] Delivery: As used herein, unless indicated otherwise or contradictory in context, the term “delivery” refers to the act or manner of delivering a compound, substance, composition, entity, moiety, cargo or payload.

[1044] Delivery Agent: As used herein, unless indicated otherwise or contradictory in context, the term “delivery agent” refers to any substance which facilitates, at least in part, the in vivo delivery of a (modified) GFR-binding compounds, functionalised bioactive carriers or pharmaceutical, prophylactic, diagnostic, or imaging compositions defined herein to targeted cells.

[1045] Forms suitable for oral administration: A (modified) GFR-binding compound, functionalised bioactive carrier or pharmaceutical, prophylactic, diagnostic, or imaging compositions of the invention, for example, in certain embodiments, includes forms suitable for oral administration as a tablet, capsule, pill, powder, sustained release formulations, solution, suspension, or for parenteral injection as a sterile solution, suspension or emulsion. Pharmaceutical compositions suitable for the delivery of (modified) GFR-binding compounds, functionalised bioactive carrier or pharmaceutical, prophylactic, diagnostic, or imaging compositions defined herein and methods for their preparation will be readily apparent to those skilled in the art. Such compositions and methods for their preparation may be found, for example, in certain embodiments, in ‘Remington's Pharmaceutical Sciences’, 19th Edition (Mack Publishing Company, 1995), which is hereby incorporated by reference in its entirety. Oral administration may involve swallowing, so that the compounds or associations enters the gastrointestinal tract, or buccal or sublingual administration may be employed by which the compound enters the blood stream directly from the mouth. Formulations suitable for oral administration include solid formulations, such as tablets, capsules containing particulates, liquids, or powders; lozenges (including liquid-filled), chews; multi- and nano-particulates; gels, solid solution, liposome, films (including muco-adhesive), ovules, sprays and liquid formulations. Liquid formulations include suspensions, solutions, syrups and elixirs. Such formulations may be employed as fillers in soft or hard capsules and typically comprise a carrier, for example, in certain embodiments, water, ethanol, polyethylene glycol, propylene glycol, methylcellulose, or a suitable oil, and one or more emulsifying agents and/or suspending agents. Liquid formulations may also be prepared by the reconstitution of a solid, for example, in certain embodiments, from a sachet. The pharmaceutical associations or compositions defined herein may also be used in fast-dissolving, fast-disintegrating dosage forms such as those described in the art.

[1046] Forms suitable for parenteral administration: In one example, (modified) GFR-binding compounds, functionalised bioactive carriers or pharmaceutical, prophylactic, diagnostic, or imaging compositions of the invention may be administered by parenteral injection. Exemplary parenteral administration forms include sterile solutions, suspensions or emulsions of the pharmaceutical association defined herein in sterile aqueous media, for example, in certain embodiments, aqueous propylene glycol or dextrose. In another embodiment, the parenteral administration form is a solution. Such parenteral dosage forms can be suitably buffered, if desired. Preferred sterile solutions include sodium chloride, 0.9%, UPS solution. Injectable formulations can be sterilized, for example, in certain embodiments, by filtration through a bacterial-retaining filter, and/or by incorporating sterilizing agents in the form of sterile solid compositions which can be dissolved or dispersed in sterile water or other sterile injectable medium prior to use.

[1047] Forms suitable for rectal and vaginal administration: Compositions for rectal or vaginal administration are typically suppositories which can be prepared by mixing compositions with suitable non-irritating excipients such as cocoa butter, polyethylene glycol or a suppository wax which are solid at ambient temperature but liquid at body temperature and therefore melt in the rectum or vaginal cavity and release the active ingredient.

[1048] Forms suitable for topical and/or transdermal administration: Dosage forms for topical and/or transdermal administration of a composition may include ointments, pastes, creams, lotions, gels, powders, solutions, sprays, inhalants and/or patches. Generally, an active ingredient is admixed under sterile conditions with a pharmaceutically acceptable excipient and/or any needed preservatives and/or buffers as may be required.

[1049] Forms suitable for pulmonary administration: Dosage forms for pulmonary administration via the buccal cavity may comprise dry particles which comprise the active ingredient (e.g. the pharmaceutical association defined herein) and which have a diameter in the range from about 0.5 nm to about 7 nm. Such compositions are conveniently in the form of dry powders for administration using a device comprising a dry powder reservoir to which a stream of propellant may be directed to disperse the powder and/or using a self-propelling solvent/powder dispensing container such as a device comprising the active ingredient dissolved and/or suspended in a low-boiling propellant in a sealed container. Pharmaceutical compositions formulated for pulmonary delivery may provide an active ingredient in the form of droplets of a solution and/or suspension. Such formulations may be prepared, packaged, and/or sold as aqueous and/or dilute alcoholic solutions and/or suspensions, optionally sterile, comprising active ingredient, and may conveniently be administered using any nebulization and/or atomization device. Such formulations may further comprise one or more additional ingredients including, but not limited to, a flavoring agent such as saccharin sodium, a volatile oil, a buffering agent, a surface active agent, and/or a preservative such as methylhydroxybenzoate.

[1050] Forms suitable for nasal administration: Formulations described herein as being useful for pulmonary delivery are also useful for intranasal delivery of a pharmaceutical composition. Formulations suitable for nasal administration may, for example, in certain embodiments, comprise from about as little as 0.1% (w/w) and as much as 100% (w/w) of active ingredient (e.g. the pharmaceutical association defined herein), and may comprise one or more of the additional ingredients described herein. A pharmaceutical composition may be prepared, packaged, and/or sold in a formulation suitable for buccal administration. Such formulations may, for example, in certain embodiments, be in the form of tablets and/or lozenges made using conventional methods, and may, for example, in certain embodiments, 0.1% to 20% (w/w) active ingredient, the balance comprising an orally dissolvable and/or degradable composition and, optionally, one or more of the additional ingredients described herein. Alternately, formulations suitable for buccal administration may comprise a powder and/or an aerosolized and/or atomized solution and/or suspension comprising active ingredient. Such powdered, aerosolized, and/or aerosolized formulations, when dispersed, may have an average particle and/or droplet size in the range from about 0.1 nm to about 200 nm, and may further comprise one or more of any additional ingredients described herein.

[1051] Forms suitable for ophthalmic administration: Dosage forms for ophthalmic administration include, for example, in certain embodiments, eye drops including, for example, in certain embodiments, a 0.1/1.0% (w/w) solution and/or suspension of the active ingredient (e.g. the pharmaceutical association defined herein) in an aqueous or oily liquid excipient. Such drops may further comprise buffering agents, salts, and/or one or more other of any additional ingredients described herein. Other ophthalmically-administrable formulations which are useful include those which comprise the active ingredient in microcrystalline form and/or in a liposomal preparation. Ear drops and/or eye drops are contemplated as being within the scope of this present disclosure.

[1052] Direct injection: One preferred administration method for delivering (modified) GFR-binding compounds, functionalised bioactive carriers or pharmaceutical, prophylactic, diagnostic, or imaging compositions as defined herein is by local administration, in particular, by direct injection. Direct injection techniques are particularly useful for administering a composition to a cell or tissue that is accessible by surgery, and particularly, on or near the surface of the body. Administration of a composition locally within the area of a target cell refers to injecting the composition centimeters and preferably, millimeters from the target cell or tissue.

[1053] Dosage regimens: The dosage regimen of the (modified) GFR-binding compounds, functionalised bioactive carriers or pharmaceutical, prophylactic, diagnostic, or imaging compositions as defined herein may be adjusted to provide the optimum desired response. For example, in certain embodiments, a single bolus may be administered, several divided doses may be administered over time or the dose may be proportionally reduced or increased as indicated by the exigencies of the therapeutic situation. The appropriate dosing regimen, the amount of each dose administered and/or the intervals between doses will depend upon the pharmaceutical association being used, the type of pharmaceutical composition, the characteristics of the subject in need of treatment and the severity of the condition being treated. Thus, the skilled artisan would appreciate, based upon the disclosure provided herein, that the dose and dosing regimen is adjusted in accordance with methods well-known in the therapeutic arts. That is, the maximum tolerable dose can be readily established, and the effective amount providing a detectable therapeutic benefit to a patient may also be determined, as can the temporal requirements for administering each agent to provide a detectable therapeutic benefit to the patient. Accordingly, while certain dose and administration regimens are exemplified herein, these examples in no way limit the dose and administration regimen that may be provided to a patient in practicing the present invention. In general, pharmaceutical compositions in accordance with the present disclosure may be administered at dosage levels sufficient to deliver from about 0.0001 mg/kg to about 100 mg/kg, from about 0.01 mg/kg to about 50 mg/kg, from about 0.1 mg/kg to about 40 mg/kg, from about 0.5 mg/kg to about 30 mg/kg, from about 0.01 mg/kg to about 10 mg/kg, from about 0.1 mg/kg to about 10 mg/kg, or from about 1 mg/kg to about 25 mg/kg, of subject body weight per day, one or more times a day, to obtain the desired therapeutic, diagnostic, prophylactic, or imaging effect. The desired dosage may be delivered three times a day, two times a day, once a day, every other day, every third day, every week, every two weeks, every three weeks, or every four weeks. In certain embodiments, the desired dosage may be delivered using multiple administrations (e.g., two, three, four, five, six, seven, eight, nine, ten, eleven, twelve, thirteen, fourteen, or more administrations). It is to be further understood that for any particular subject, specific dosage regimens should be adjusted over time according to the individual need and the professional judgment of the person administering or supervising the administration of the compositions, and that dosage ranges set forth herein are exemplary only and are not intended to limit the scope or practice of the present invention. For example, in certain embodiments, doses may be adjusted based on pharmacokinetic or pharmacodynamic parameters, which may include clinical effects such as toxic effects and/or laboratory values. Thus, the present invention encompasses intra-patient dose-escalation as determined by the skilled artisan. Determining appropriate dosages and regiments for administration of the chemotherapeutic agent are well-known in the relevant art and would be understood to be encompassed by the skilled artisan once provided the teachings disclosed herein.

[1054] Effective dose parameters: The dosage regimen of the (modified) GFR-binding compounds or functionalised bioactive carriers and/or pharmaceutical compositions as defined herein may be adjusted to obtain effective dose parameters. Effective dose parameters can be determined using methods standard in the art for a particular disease or condition. In particular, the effectiveness of dose parameters of a therapeutic composition as defined herein can be determined by assessing response rates. Such response rates refer to the percentage of treated patients in a population of patients that respond with either partial or complete remission.

[1055] A pharmaceutical composition as defined herein may be prepared, packaged, or sold in bulk, as a single unit dose, or as a plurality of single unit doses.

[1056] Unit dose: As used herein, unless indicated otherwise or contradictory in context, the term “unit dose” refers to a discrete amount of the pharmaceutical composition comprising a predetermined amount of the active ingredient. The amount of the active ingredient is generally equal to the dosage of the active ingredient which would be administered to a subject or a convenient fraction of such a dosage such as, for example, in certain embodiments, one-half or one-third of such a dosage.

[1057] Single unit dose: As used herein, unless indicated otherwise or contradictory in context, the term “single unit dose” refers to a dose of any therapeutic association or composition administered in one dose/at one time/single route/single point of contact, i.e., single administration event.

[1058] Split dose: As used herein, unless indicated otherwise or contradictory in context, the term “split dose” refers to the division of single unit dose or total daily dose into two or more doses.

[1059] Total daily dose: As used herein, unless indicated otherwise or contradictory in context, the term “total daily dose” refers to an amount given or prescribed in 24 hr period. It may be administered as a single unit dose.

[1060] The relative amounts of the active ingredient(s), the pharmaceutically acceptable excipients, carriers or vehicles, and any additional ingredients in a pharmaceutical composition defined herein will vary, depending upon the identity, size, and condition of the subject treated and further depending upon the route by which the composition is to be administered. In addition to the active ingredient, a pharmaceutical composition of the invention may further comprise one or more additional pharmaceutically active agents.

[1061] Combination therapy: Compounds, associations, compositions or formulations defined herein may be used in combination with one or more other therapeutic, prophylactic, diagnostic, or imaging agents. As used herein, the term “in combination with” is not intended to imply that the agents must be administered at the same time and/or formulated for delivery together, although these methods of delivery are within the scope of the present disclosure. Compositions can be administered concurrently with, prior to, or subsequent to, one or more other desired therapeutics or medical procedures. In some embodiments, they are administered within about 90, 60, 30, 15, 10, 5, or 1 minute of one another. In some embodiments, the administrations of the agents are spaced sufficiently closely together such that a combinatorial (e.g., a synergistic) effect is achieved. In general, each agent will be administered at a dose and/or on a time schedule determined for that agent. In one example, the present disclosure encompasses the delivery of pharmaceutical, prophylactic, diagnostic, or imaging compositions in combination with agents that improve their bioavailability, reduce and/or modify their metabolism, inhibit their excretion, and/or modify their distribution within the body. It will further be appreciated that therapeutically, prophylactically, diagnostically, or imaging active agents used in combination may be administered together in a single composition or administered separately in different compositions. In general, it is expected that agents used in combination with be used at levels that do not exceed the levels at which they are used individually. In one example, the levels used in combination will be lower than those utilized individually. The particular combination of therapies to employ in a combination regimen will take into account compatibility of the desired therapeutics and/or procedures and the desired therapeutic effect to be achieved. It will also be appreciated that the therapies employed may achieve a desired effect for the same disorder, or they may achieve different effects (e.g., control of any adverse effects).

[1062] Although the descriptions of pharmaceutical compositions provided herein are principally directed to pharmaceutical compositions which are suitable for administration to mammals, in particular humans, it will be understood by the skilled artisan that such compositions are generally suitable for administration to animals of all sorts, in particular to any member of the Vertebrate class. Modification of pharmaceutical compositions suitable for administration to humans in order to render the compositions suitable for administration to various animals is well understood, and the ordinarily skilled veterinary pharmacologist can design and/or perform such modification with merely ordinary, if any, experimentation. Subjects to which administration of the pharmaceutical compositions is contemplated include, but are not limited to, humans and/or other primates; mammals, including commercially relevant mammals such as cattle, pigs, horses, sheep, cats, dogs, mice, and/or rats; and/or birds, including commercially relevant birds such as chickens, ducks, geese, and/or turkeys.

### XIII. Dermatological Applications

[1063] When the cell or tissue to be regenerated, repaired or treated is a skin cell or tissue (mainly from the fibroblast lineage), the pharmaceutical composition defined herein may be a dermatological composition comprising at least one (modified) GFR-binding compound or at least one functionalised bioactive carrier, as all defined herein, and at least one dermatologically acceptable excipient.

[1064] For example, in certain embodiments, a dermatological composition for the uses of the invention may contain between 0.01% and 100% by weight (over the total weight of the dermatological composition) of a GFR-binding compound or functionalised bioactive carrier, both as defined herein, as a dermatological effective amount. The dermatological composition particularly comprises between 0.01% and 95%, between 0.01% and 90%, between 0.01% and 85%, between 0.01% and 80%, between 0.01% and 75%, between 0.01% and 70%, between 0.01% and 65%, between 0.01% and 60%, between 0.01% and 55%, between 0.01% and 50%, between 0.01% and 45%, between 0.01% and 40%, between 0.01% and 35%, between 0.01% and 30%, between 0.01% and 25%, between 0.01% and 20%, between 0.01% and 15%, between 0.01% and 10%, between 0.01% and 5%, between 0.1% and 100%, between 0.1% and 95%, between 0.1% and 90%, between 0.1% and 85%, between 0.1% and 80%, between 0.1% and 75%, between 0.1% and 70%, between 0.1% and 65%, between 0.1% and 60%, between 0.1% and 55%, between 0.1% and 50%, between 0.1% and 45%, between 0.1% and 40%, between 0.1% and 35%, between 0.1% and 30%, between 0.1% and 25%, between 0.1% and 20%, between 0.1% and 15%, between 0.1% and 10%, and between 0.1% and 5% by weight (over the total weight of the dermatological composition) of any one of a GFR-binding compound or a functionalised bioactive carrier.

[1065] Dermatologically acceptable: As used herein, unless indicated otherwise or contradictory in context, the term “dermatologically acceptable” means that the compound(s) or pharmaceutical association(s) used are adapted for use in contact with human skin without undue toxicity, incompatibility, instability, allergic response, or their equivalents.

[1066] Dermatological formulations: Suitable formulation for implementing dermatological embodiments of the invention include an aqueous or oil-based solution, a water-based cream or gel or an oily gel, usually in a jar or a tube, particularly a shower gel, shampoo, milk, emulsion, microemulsion or nanoemulsion, particularly oil-in-water or water-in-oil or multiple of silicone-based; a lotion, particularly in a glass or plastic bottle of a spray or aerosol bottle, a blister-pack, liquid soap, a dermatological bar of soap, a pomade, mousse, an anhydrous product, preferably liquid, cream or solid, for example in the form of a stick, particularly in the form of lipstick, a cataplasm or a patch.

[1067] Preferred administration routes include, but are not limited to, oral, topical or intradermal as already defined herein.

[1068] Dermatologically acceptable excipients: Suitable dermatologically acceptable excipients for implementing embodiments of the invention include, but are not limited to, preservatives, emollients, emulsifiers, surfactants, moisturizers, thickeners, conditioners, mattifying agents, stabilizers, antioxidants, texturizing agents, shine agents, filmogenic agents, solubilizers, pigments, colorants, perfumes, and solar filters. These excipients are preferably chosen from among the group consisting of amino acids and their derivatives, polyglycerols, esters, polymers and cellulose derivatives, lanoline derivatives, phospholipids, lactoferrins, lactoperoxidases, sucrose-based stabilizers, vitamin E and its derivatives, natural and synthetic waxes, vegetable oils, triglycerides, insaponifiables, phytosterols, plant esters, silicones and their derivatives, protein hydrolysates, jojoba oil and its derivatives, lipo/hydrosoluble esters, betaines, aminoxides, saccharose ester plant extracts, titanium dioxides, glycines, parabens, and even more preferably from among the group consisting of butylene glycol, glycol-15 stearyl ether, cetearyl alcohol, phenoxyethanol, methylparaben, propylparaben, butylparaben, butylenes glycol, natural tocopherols, glycerine, dihydroxycetyl sodium phosphate, isopropyl hydroxycetyl ether, le glycol stearate, triisononanoin, octyl cocoate, polyacrylamide, isoparaffin, laureth-7, carbomer, propylene glycol, glycerol, bisabolol, dimethicone, sodium hydroxide, PEG 30-dipolyhydroxysterate, capric/caprylic triglycerides, cetearyl octanoate, dibutyl adipate, grapeseed oil, jojoba oil, magnesium sulfate, EDTA, cyclomethicone, xanthan gum, citric acid, sodium lauryl sulfate, mineral waxes and oils, isostearyl isostearate, dipelargonate of propylene glycol, isostearate of propylene glycol, PEG 8, beeswax, glyceride of hydrogenated palm kernel oil, lanolin oil, sesame oil, cetyl lactate, lanolin alcohol, titanium dioxide, lactose, saccharose, low-density polyethylene, and isotonic salt solution.

[1069] In one example, the dermatological composition as defined herein may contain at least one other active agents and/or excipients and/or additives of pharmaceutical, especially dermatological, interest such as agents with the following properties:
[1070] wound-healing properties; such as panthenol and derivatives thereof, for example ethyl panthenol, aloe vera, pantothenic acid and derivatives thereof, allantoin, bisabolol, and dipotassium glycyrrhizinate;
[1071] anti-inflammatory properties: such as steroidal and non-steroidal antiinflammatories, in particular Inhibitors of the production of cytokines and chemokines, of cyclooxygenase, of nitric oxide (NO) and nitric oxide synthase (NOS). As an example of anti-inflammatory products, mention may be made of extracts of Ginkgo biloba, trilactone terpenes such as ginkgolides, especially ginkgolide B and bilobalide known for their platelet-activating factor (PAF) antagonist properties.

[1072] The CTFA Cosmetic Ingredient Handbook, Second Edition (1992), which is hereby incorporated by reference in its entirety, describes different cosmetic and pharmaceutical ingredients currently used in the cosmetic and pharmaceutical industry that are particularly adapted to topical use and which may be used in a dermatological composition of the invention. Examples of these types of ingredients include but are not limited to the following compounds: abrasives, absorbent compounds, compounds with aesthetic purposes such as perfumes, pigments, colorants, essential oils, astringents, etc. (for example: clove oil, menthol, camphor, eucalyptus oil, eugenol, menthyl lactate, and hamelis distillate), anti-acne agents, anti-flocculant agents, anti-foaming agents, anti-microbial agents (for example iodopropyl butylcarbamate), les antioxidants, bonding agents, biological additives, tampon agents, swelling agents, chelants, additives, biocidal agents, denaturants, external analgesics, film-forming materials, polymers, opacifying agents, pH adjusters, reducing agents, depigmenting or lightening agents (for example: hydroquinone, kojic acid, ascorbic acid, magnesium ascorbyl phosphate, ascorbyl glucosamine), conditioning agents (for example: humectants), calming agents for the skin and/or scarring agents (for example: panthenol and its derivatives, for example ethyl panthenol), aloe vera, pantothenic acid and its derivatives, allantoin, bisabolol and dipotassium glycyrrhizinate), thickeners, vitamins, and the derivatives or equivalents of these.

[1073] In one aspect, the present disclosure provides a (modified) GFR-binding compound, a functionalised bioactive carrier, or a dermatological composition, all as defined herein, for use in preventing and/or treating scars and/or inflammations such as gingivitis.

[1074] In one particular example, the dermatological composition is intended for treating skin in which the dermis is at least partially damaged, especially in subjects who have undergone a surgical operation, or who have been burned and/or injured. This treatment makes it possible to stimulate the proliferation and/or the activity of fibroblasts, in order to stimulate tissue repair and/or dermal reconstruction.

[1075] In one aspect, the present disclosure provides a (modified) GFR-binding compound, a functionalised bioactive carrier, or a dermatological composition, all as defined herein, for use in preventing and/or treating at least one of acne, alopecia areata, bowen's disease, congenital erythropoietic porphyria, contact dermatitis, darier's disease, eczema (atopic eczema), epidermolysis bullosa simplex, erythropoietic protoporphyria, fungal infections of nails, hailey-hailey disease, herpes simplex, hidradenitis suppurativa, hirsutism, hyperhidrosis, ichthyosis, impetigo, keloids, keratosis pilaris, lichen planus, lichen sclerosus, melasma, pemphigus vulgaris, plantar warts (verrucas), Pityriasis lichenoides, polymorphic light eruption, psoriasis, pyoderma gangrenosum, rosacea, scabies, shingles and vitiligo.

[1076] In one aspect, the present disclosure also provides a dermatological care or treatment method for a subject having need thereof, said method comprising the topical application, intradermal injection or oral administration, preferably the topical application or the intradermal injection, of a (suitable amount of) at least one (modified) GFR-binding compound, functionalised bioactive carrier, or dermatological composition, all as defined herein.

[1077] Such a dermatological care or treatment method includes the applications cited herein.

[1078] Suitable as amounts of (modified) GFR-binding compounds or functionalised bioactive carrier for implementing embodiments of the invention in the dermatological field include the group consisting of between about 0.0001 μg/day to about 5000 mg/day, between about 0.0001 μg/day to about 1000 mg/day, between about 0.0001 μg/day to about 10 mg/day, between about 0.0001 μg/day to about 1 mg/day, or between about 0.0001 μg/day to about 100 μg/day, all being preferred for implementing embodiments of the invention.

[1079] Advantageously, the subject who has need thereof is a subject chosen from a population having an average age of more than 30 years old or who has had sunlight over-exposure, has a family history of skin conditions.

### XIV. Ophthalmic Applications

[1080] Preferable dosage forms for the (modified) GFR-binding compound functionalised bioactive carrier or pharmaceutical composition, all as defined herein, for treating eye retina diseases, disorders or conditions include, for example, in certain embodiments, eye drops and eye ointments. These can be prepared using conventional techniques. For instance, eye drops may be prepared, using isotonic agents such as sodium chloride, buffers such as sodium phosphate, and preservatives such as benzalkonium chloride. A suitable pH is within an ophthalmologically acceptable range. Preferred pH is within pH 4 to 8.

[1081] Particularly preferred administration routes include vitreal and intraocular.

[1082] A suitable dose of (modified) GFR-binding compound, functionalised bioactive carrier, or pharmaceutical composition for treating eye disorders is appropriately selected, depending on the symptoms, age of patients, dosage form and the like. For eye drops, suitable concentration may be 0.0001 to 10 w/v %, preferably 0.0001 to 0.01 w/v % for administration into eyes once or several times a day.

### XV. Surgical Treatments

[1083] The (modified) GFR-binding compounds, functionalised bioactive carriers, and pharmaceutical compositions, all as defined herein, may be used in surgical methods suitable for protecting (e.g. treating or preventing) a patient or subject from a disease, condition, disorder or pathology to whom a surgical intervention would be beneficial.

[1084] For example, in certain embodiments, said surgical method may be selected from the group consisting of bone-repair surgery, cartilage-repair surgery, heart surgery, kidneys or lung surgery, eye surgery, muscle-repair surgery, and tendon/ligament-repair surgery.

[1085] In one aspect, the present invention thus discloses a surgical method for surgical treatment comprising the contacting of at least one (modified) GFR-binding compound, at least one functionalised bioactive carrier, a pharmaceutical, prophylactic, diagnostic or imaging composition thereof, or medical device, all as defined herein, with a body part of a patient to be treated, wherein said contacting induces stem cell differentiation and tissue formation.

[1086] In one example, said surgical method comprises the placement or implantation of an implantable medical device comprising a (modified) GFR-binding compound, a functionalised bioactive carrier, or a pharmaceutical, prophylactic, diagnostic or imaging composition thereof, all as defined herein, inside a patient or subject in need of such a surgical treatment.

[1087] For example, in certain embodiments, the surgical treatment of the invention may include the use of a placement, insertion or depositing device for contacting said GFR-binding compound, said functionalised bioactive carrier, or a pharmaceutical, prophylactic, diagnostic or imaging composition thereof with a body part of a patient or subject in need of such a treatment. In one example, said placement, insertion or depositing device comprises an injection device such as a syringe.

[1088] In certain embodiments, said surgical method comprises the positioning of a GFR-binding compound, a functionalised bioactive carrier, or a pharmaceutical, prophylactic, diagnostic or imaging composition thereof, all as defined herein, inside said injection device for injection into a patient or into a body part of a patient.

[1089] In one example, said medical device comprises titanium and/or PEEK and/or PET and/or hydrogel and/or ceramic. In one particular example, said medical device replaces part of or all of a body part of a patient or subject. In one example, said body part is a malfunctioning or damaged body part such as, for instance, a bone, the skin, the hair scalp, an eye, etc.

### XVI. Pharmaceutical Applications, Uses and Methods

[1090] Some growth factors interact with type I and II growth factor receptors belonging to the serine threonine kinase family. Conventionally, to mediate signaling pathways, growth factors interact with these receptors by forming specific dimeric or oligomeric structures. The type-II receptor, which is constitutively active, phosphorylates the type-I receptor, which then activates the transduction pathway Smad1/5/8. Receptors of both types are thus conventionally needed to form a functional complex in order to initiate further signaling events. Phosphorylated Smads then dissociate from the receptors and bind Smad4, a common mediator, leading to nuclear translocation, regulation of specific genes, and eventually may induce tissue regeneration.

[1091] Prior in-vitro and in-vivo scientific studies have reported that influencing the natural/conventional biology of human mesenchymal stem cells using exogenous entity or molecules such as recombinant growth factor proteins or peptide fragments thereof, may have an effect on cell differentiation and tissue regeneration. A (modified) GFR-binding compound or a functionalised bioactive carrier of the present disclosure may be one such exogenous entity or molecule.

[1092] For example, in certain embodiments, medical treatments may demonstrate the effect of the influence of an exogenous entity or molecule on human mesenchymal stem cells using a medical device onto or into which such an exogenous entity or molecule has been reversibly or irreversibly incorporated or deposited, both being equally preferred, and placed into a patient in need thereof.

[1093] In one example, medical treatments may provide the effect of the influence of an exogenous entity or molecule on human mesenchymal stem cells using a pharmaceutical composition containing such an exogenous entity or molecule and a pharmaceutically acceptable excipient or carrier, administered, for instance, orally, enterically, intravenously, peritoneally, subcutaneously, transdermally, parenterally, or rectally, to a patient in need of such a treatment.

[1094] As already stated herein, for in-vivo administration, compounds or compositions of the present invention may be injected at a target site so that they can be delivered in close proximity to the cells to be treated via, e.g. a PTD or cell-permeable peptide. Alternately, an implant (or medical device or implantable medical device) comprising a PTD/GFR-binding compound complex may be used.

[1095] The present invention generally provides for uses and methods of inducing mesenchymal stem cell or progenitor cell (at any stage of differentiation) differentiation and/or inducing, promoting, enhancing, controlling or regulating tissue regeneration/formation in-vitro, ex-vivo and in-vivo.

[1096] Conveniently, such a tissue formation process is generally achieved within less than 7 days. In particular, such a tissue formation process is generally achieved within less than 6 days. In particular, such a tissue formation process is generally achieved within less than 5 days. In particular, such a tissue formation process is generally achieved within less than 4 days. In particular, such a tissue formation process is generally achieved within less than 3 days. In particular, such a tissue formation process is generally achieved within less than 2 days. In particular, such a tissue formation process is generally achieved within less than 24 hours. In particular, such a tissue formation process is generally achieved within less than 18 hours.

[1097] In one aspect, the present disclosure provides a pharmaceutical (therapeutic, dermatologic, ophthalmologic, diagnostic, etc.) composition as defined herein for use in a method of non-mutagenically inducing tissue formation i.e. without modifying or altering the genome of the treated cells, in-vitro, ex-vivo or in-vivo. Also provided is a method of inducing tissue formation i.e. without modifying or altering the genome of the treated cells, comprising the in-vitro, ex-vivo or in-vivo administration of an effective amount of a (modified) GFR-binding compound, a functionalised bioactive carrier, or a pharmaceutical (therapeutic, dermatologic, ophthalmologic, diagnostic, etc.) composition as defined herein.

[1098] In one aspect, the present disclosure provides a pharmaceutical (therapeutic, dermatologic, ophthalmologic, diagnostic, etc.) composition as defined herein for use in a method of extracellular induction of tissue formation. Also provided is a method of extracellular tissue formation induction, comprising the in-vitro, ex-vivo or in-vivo administration of an effective amount of a (modified) GFR-binding compound, a functionalised bioactive carrier, or a pharmaceutical (therapeutic, dermatologic, ophthalmologic, diagnostic, etc.) composition as defined herein.

[1099] An extracellular treatment as used herein implies a biological action/effect to be provided or to occur outside the cell to be treated (i.e. a mesenchymal stem cell). In other words, the biologically active agent (e.g. the GFR-binding compound or the pharmaceutical composition as defined herein) delivers/provides its biological/pharmaceutical effect to the outside of the cell (e.g. on the cell's surface) without the need to penetrate through the cell membrane, inside the cell to be treated. Once the extracellular action/effect has been administered/delivered to the cell to be treated, said active agent may be, for instance, excreted from the host organism with or without being metabolised, and/or tagged to be destroyed through apoptotic routes, and/or internalised by nearby cells, etc. . . . .

[1100] In one aspect, the present disclosure provides a method of producing a physiologically functional and healthy cell, comprising the administration in-vitro, ex-vivo or in-vivo to a mesenchymal stem cell or progenitor cell (at any stage of differentiation) of an effective amount of a (modified) GFR-binding compound, a functionalised bioactive carrier, or a pharmaceutical (therapeutic, dermatologic, ophthalmologic, diagnostic, etc.) composition as defined herein and wherein said physiologically functional and healthy cell is selected from the group consisting of an osteoblast, osteocyte, chondroblast, chondrocyte, neuroblast, neurocyte, Sertoli cells, Leydig cell, Germ cell, Myoblast, Myocyte, keratinocyte, endothelial cells, angioblast, fibroblast, fibrocyte, podocyte, areolar connective cells, adipocytes, pre-adipocytes/lipoblasts, epithelial cells, erythrocytes, alveolar cells, hematopoietic stem cells (HSC), myeloid progenitors, lymphoid progenitors, mast cells, myeloblasts, monocytes, macrophages, neutrophils, basophils, eosinophils, erythrocytes, megakaryocytes, thrombocytes, dendritic cells, small lymphocytes, T-lymphocytes (T-cells), B-lymphocytes (B-cells), and natural killer (NK)-cells.

[1101] In one aspect, the present disclosure provides methods to activate a growth factor receptor present on the surface of a mesenchymal stem cell or progenitor cell (at any stage of differentiation), said method comprising administering to said mesenchymal stem cell or progenitor cell (at any stage of differentiation) an effective amount of a (modified) GFR-binding compound, a functionalised bioactive carrier, or a pharmaceutical (therapeutic, dermatologic, ophthalmologic, diagnostic, etc.) composition as defined herein, wherein administering said GFR-binding compound, a functionalised bioactive carrier, or a pharmaceutical (therapeutic, dermatologic, ophthalmologic, diagnostic, etc.) composition as defined herein activates the growth factor receptor present on the surface of the mesenchymal stem cell or progenitor cell (at any stage of differentiation).

[1102] In one aspect, the present disclosure provides methods of delivering a (modified) GFR-binding compound, a functionalised bioactive carrier, or a pharmaceutical (therapeutic, dermatologic, ophthalmologic, diagnostic, etc.) composition, all as defined herein, in-vitro, ex-vivo or in-vivo to a mesenchymal stem cell or progenitor cell (at any stage of differentiation), comprising the contacting of said mesenchymal stem cell or progenitor cell (at any stage of differentiation) with said (modified) GFR-binding compound, a functionalised bioactive carrier, or a pharmaceutical (therapeutic, dermatologic, ophthalmologic, diagnostic, etc.) composition.

[1103] In one aspect, the present disclosure provides methods of administering a (modified) GFR-binding compound, a functionalised bioactive carrier, or a pharmaceutical (therapeutic, dermatologic, ophthalmologic, diagnostic, etc.) composition, all as defined herein, to a patient or subject comprising the contacting of at least one body part of said patient or subject with said (modified) GFR-binding compound, a functionalised bioactive carrier, or a pharmaceutical (therapeutic, dermatologic, ophthalmologic, diagnostic, etc.) composition.

[1104] In one example, the (modified) GFR-binding compound, functionalised bioactive carrier, or pharmaceutical (therapeutic, dermatologic, ophthalmologic, diagnostic, etc.) composition, all as defined herein, may be a mammal (preferably a human) tissue-inductive compound, bioactive carrier or composition, which has demonstrated the ability to induce tissue formation in vitro and/or in vivo.

[1105] In one aspect, the present disclosure provides an effective amount of at least one (modified) GFR-binding compound, at least one functionalised bioactive carrier, or at least one pharmaceutical (therapeutic, dermatologic, ophthalmologic, diagnostic, etc.) composition, all as defined herein, for use in a medical method such as in therapy, surgery or in diagnostic methods.

[1106] In one aspect, the present disclosure provides a method of inducing or promoting or enhancing mesenchymal stem cell or progenitor cell (at any stage of differentiation) differentiation, the method comprising administering to the cell an effective amount of at least one (modified) GFR-binding compound, at least one functionalised bioactive carrier, or at least one pharmaceutical (therapeutic, dermatologic, ophthalmologic, diagnostic, etc.) composition, all as defined herein. In one aspect, the present invention discloses an effective amount of at least one (modified) GFR-binding compound, at least one functionalised bioactive carrier, or at least one pharmaceutical (therapeutic, dermatologic, ophthalmologic, diagnostic, etc.) composition, all as defined herein, for use in a method of inducing or promoting or enhancing mesenchymal stem cell or progenitor cell (at any stage of differentiation) differentiation

[1107] In one aspect, the present disclosure provides a method of inducing or promoting or enhancing or controlling or regulating tissue regeneration/formation, the method comprising administering to a mesenchymal stem cell or to a progenitor cell at any stage of differentiation or to a mature cell an effective amount of at least one (modified) GFR-binding compound, at least one functionalised bioactive carrier, or at least one pharmaceutical (therapeutic, dermatologic, ophthalmologic, diagnostic, etc.) composition, all as defined herein. In one aspect, the present invention discloses an effective amount of at least one (modified) GFR-binding compound, at least one functionalised bioactive carrier, or at least one pharmaceutical (therapeutic, dermatologic, ophthalmologic, diagnostic, etc.) composition, all as defined herein, for use in a method of inducing or promoting or enhancing or controlling or regulating tissue regeneration/formation.

[1108] In one aspect, the present disclosure provides a method of inducing and/or promoting and/or enhancing cell motility or single/collective cell migration, the method comprising administering to a mesenchymal stem cell or to a progenitor cell at any stage of differentiation or to a mature cell an effective amount of at least one (modified) GFR-binding compound, at least one functionalised bioactive carrier, or at least one pharmaceutical (therapeutic, dermatologic, ophthalmologic, diagnostic, etc.) composition, all as defined herein. In one aspect, the present invention discloses an effective amount of at least one (modified) GFR-binding compound, at least one functionalised bioactive carrier, or at least one pharmaceutical (therapeutic, dermatologic, ophthalmologic, diagnostic, etc.) composition, all as defined herein, for use in a method of inducing and/or promoting and/or enhancing cell motility or single/collective cell migration.

[1109] In one aspect, the present invention discloses a method of inducing and/or promoting and/or enhancing cell maturation, the method comprising administering to a differentiated cell or to a mature cell an effective amount of at least one (modified) GFR-binding compound, at least one functionalised bioactive carrier, or at least one pharmaceutical (therapeutic, dermatologic, ophthalmologic, diagnostic, etc.) composition, all as defined herein. In one aspect, the present invention discloses an effective amount of at least one (modified) GFR-binding compound, at least one functionalised bioactive carrier, or at least one pharmaceutical (therapeutic, dermatologic, ophthalmologic, diagnostic, etc.) composition, all as defined herein, for use in a method of inducing and/or promoting and/or enhancing cell maturation.

[1110] In one example, the (modified) GFR-binding compound, functionalised bioactive carrier, or pharmaceutical (therapeutic, dermatologic, ophthalmologic, diagnostic, etc.) composition, all as defined herein, may be combined/mixed with adult stem cells and/or multipotent progenitor cells prior to be administered or implanted into a mammal (preferably a human) to promote tissue regeneration.

[1111] In one example, the (modified) GFR-binding compound, functionalised bioactive carrier, or pharmaceutical (therapeutic, dermatologic, ophthalmologic, diagnostic, etc.) composition, all as defined herein, may be administered as such and may be combined/mixed with adult stem cells and/or multipotent progenitor cells prior to administration to a mammal (preferably a human) to promote tissue regeneration.

[1112] In particular, medical applications which may result from the mediation of type I and II growth factor receptors by a (modified) GFR-binding compound, functionalised bioactive carrier, or pharmaceutical (therapeutic, dermatologic, ophthalmologic, diagnostic, etc.) composition, all as defined herein, include, but are not limited to, enhancing of osteogenesis, inducing bone formation, inducing osteocyte maturation, and/or treating and/or preventing osteoporosis.

[1113] In one example, a (modified) GFR-binding compound, functionalised bioactive carrier, or pharmaceutical (therapeutic, dermatologic, ophthalmologic, diagnostic, etc.) composition, all as defined herein, may thus be an osteoinductive compound, bioactive carrier or composition which has demonstrated an ability to induce bone formation in vitro and/or ex-vivo and/or in vivo.

[1114] In one aspect, the present disclosure thus provides:
[1115] a method of inducing or promoting or enhancing mesenchymal stem cell, progenitor osteoblast (at any stage of differentiation of the Osteoblast cell lineage) differentiation, the method comprising administering to the cell an effective amount of at least one (modified) GFR-binding compound, at least one functionalised bioactive carrier, or at least one pharmaceutical composition, all as defined herein;
[1116] a method of inducing or promoting or enhancing or controlling or regulating bone tissue regeneration/formation, the method comprising administering to a mesenchymal stem cell or to a progenitor osteoblast at any stage of differentiation of the osteoblast cell lineage or to a mature osteoblast, an effective amount of at least one (modified) GFR-binding compound, at least one functionalised bioactive carrier, or at least one pharmaceutical composition, all as defined herein;
[1117] a method of inducing and/or promoting and/or enhancing osteocyte maturation, the method comprising administering to a differentiated osteoblast or to a mature osteoblast (e.g. an osteocyte) an effective amount of at least one (modified) GFR-binding compound, at least one functionalised bioactive carrier, or at least one pharmaceutical composition, all as defined herein;
[1118] an effective amount of at least one (modified) GFR-binding compound, at least one functionalised bioactive carrier, or at least one pharmaceutical composition, all as defined herein for use in a method of inducing or promoting or enhancing mesenchymal stem cell or progenitor osteoblast (at any stage of differentiation of the osteoblast cell lineage) differentiation;
[1119] an effective amount of at least one (modified) GFR-binding compound, at least one functionalised bioactive carrier, or at least one pharmaceutical composition, all as defined herein for use in a method of inducing or promoting or enhancing or controlling or regulating bone tissue regeneration/formation;
[1120] an effective amount of at least one (modified) GFR-binding compound, at least one functionalised bioactive carrier, or at least one pharmaceutical composition, all as defined herein for use in a method of inducing and/or promoting and/or enhancing osteoblast maturation.

[1121] In particular, medical applications which may result from the mediation of type I and II growth factor receptors by a (modified) GFR-binding compound, functionalised bioactive carrier, or pharmaceutical (therapeutic, dermatologic, ophthalmologic, diagnostic, etc.) composition, all as defined herein, include, but are not limited to, enhancing of chondrogenesis and/or inducing cartilage formation, and/or inducing chondrocyte maturation and/or treating and/or preventing at least one of osteoarthritis, costochondritis, Herniation, achondroplasia or relapsing polychondritis.

[1122] In one example, a (modified) GFR-binding compound, functionalised bioactive carrier, or pharmaceutical (therapeutic, dermatologic, ophthalmologic, diagnostic, etc.) composition, all as defined herein, may be a chondroinductive compound, bioactive carrier or composition which has demonstrated the ability to induce cartilage formation in vitro and/or ex-vivo and/or in vivo.

[1123] In one aspect, the present disclosure thus provides:
[1124] a method of inducing or promoting or enhancing mesenchymal stem cell, progenitor chondroblast (at any stage of differentiation of the chondrocytic cell lineage) differentiation, the method comprising administering to the cell an effective amount of at least one (modified) GFR-binding compound, at least one functionalised bioactive carrier, or at least one pharmaceutical composition, all as defined herein;
[1125] a method of inducing or promoting or enhancing or controlling or regulating cartilage tissue regeneration/formation, the method comprising administering to a mesenchymal stem cell or to a progenitor chondroblast (at any stage of differentiation of the chondrocytic cell lineage) or to a mature chondroblast, an effective amount of at least one (modified) GFR-binding compound, at least one functionalised bioactive carrier, or at least one pharmaceutical composition, all as defined herein;
[1126] a method of inducing and/or promoting and/or enhancing chondrocyte maturation, the method comprising administering to a differentiated chondroblast or to a mature osteoblast (e.g. a chondrocyte) an effective amount of at least one GFR-binding compound, at least one functionalised bioactive carrier, or at least one pharmaceutical composition, all as defined herein;
[1127] an effective amount of at least one (modified) GFR-binding compound, at least one functionalised bioactive carrier, or at least one pharmaceutical composition, all as defined herein for use in a method of inducing or promoting or enhancing mesenchymal stem cell or progenitor chondroblast (at any stage of differentiation of the chondrocytic cell lineage) differentiation;
[1128] an effective amount of at least one (modified) GFR-binding compound, at least one functionalised bioactive carrier, or at least one pharmaceutical composition, all as defined herein for use in a method of inducing or promoting or enhancing or controlling or regulating cartilage tissue regeneration/formation;
[1129] an effective amount of at least one (modified) GFR-binding compound, at least one functionalised bioactive carrier, or at least one pharmaceutical composition, all as defined herein for use in a method of inducing and/or promoting and/or enhancing chondroblast maturation.

[1130] In particular, medical applications which may result from the mediation of type I and II growth factor receptors by a GFR-binding compound, functionalised bioactive carrier, or pharmaceutical (therapeutic, dermatologic, ophthalmologic, diagnostic, etc.) composition, all as defined herein, include, but are not limited to, enhancing of endothelization and/or vascularization/angiogenesis and/or treating and/or preventing at least one of coronary artery disease (also known as coronary heart disease and ischemic heart disease), cardiomyopathy, hypertensive heart disease, heart failure, cor pulmonale, cardiac dysrhythmias, inflammatory heart disease, endocarditis, inflammatory cardiomegaly, myocarditis, valvular heart disease, cerebrovascular disease, peripheral arterial disease, congenital heart disease, or rheumatic heart disease.

[1131] In one example, a GFR-binding compound, functionalised bioactive carrier, or pharmaceutical (therapeutic, dermatologic, ophthalmologic, diagnostic, etc.) composition, all as defined herein, may be an endothelization/vascularization/angiogenesis-promoting compound, bioactive carrier or composition which has demonstrated the ability to induce vascular tissue formation in vitro and/or ex-vivo and/or in vivo.

[1132] In one aspect, the present disclosure thus provides:
[1133] a method of inducing or promoting or enhancing mesenchymal stem cell, progenitor endothelial cell (at any stage of differentiation of the vascular cell lineage) differentiation, the method comprising administering to the cell an effective amount of at least one (modified) GFR-binding compound, at least one functionalised bioactive carrier, or at least one pharmaceutical composition, all as defined herein;
[1134] a method of inducing or promoting or enhancing or controlling or regulating vascular tissue regeneration/formation and/or tubular formation, the method comprising administering to a mesenchymal stem cell or to a progenitor endothelial cell at any stage of differentiation of the vascular cell lineage or to a mature endothelial cell, an effective amount of at least one (modified) GFR-binding compound, at least one functionalised bioactive carrier, or at least one pharmaceutical composition, all as defined herein;
[1135] a method of inducing and/or promoting and/or enhancing cell motility or single/collective endothelial cell migration and/or angiogenesis, the method comprising administering to a mesenchymal stem cell or to a progenitor endothelial cell at any stage of differentiation of the vascular cell lineage or to a mature endothelial cell an effective amount of at least one (modified) GFR-binding compound, at least one functionalised bioactive carrier, or at least one pharmaceutical composition, all as defined herein.
[1136] a method of inducing and/or promoting and/or enhancing endothelial cell maturation, the method comprising administering to a differentiated endothelial cell or to a mature endothelial cell an effective amount of at least one (modified) GFR-binding compound, at least one functionalised bioactive carrier, or at least one pharmaceutical composition, all as defined herein;
[1137] an effective amount of at least one (modified) GFR-binding compound, at least one functionalised bioactive carrier, or at least one pharmaceutical composition, all as defined herein for use in a method of inducing or promoting or enhancing mesenchymal stem cell, progenitor endothelial cell (at any stage of differentiation of the vascular cell lineage) differentiation;
[1138] an effective amount of at least one (modified) GFR-binding compound, at least one functionalised bioactive carrier, or at least one pharmaceutical composition, all as defined herein for use in a method of inducing or promoting or enhancing or controlling or regulating vascular tissue regeneration/formation and/or tubular formation;
[1139] an effective amount of at least one (modified) GFR-binding compound, at least one functionalised bioactive carrier, or at least one pharmaceutical composition, all as defined herein for use in a method of inducing and/or promoting and/or enhancing cell motility or single/collective endothelial cell migration and/or angiogenesis,
[1140] an effective amount of at least one (modified) GFR-binding compound, at least one functionalised bioactive carrier, or at least one pharmaceutical composition, all as defined herein for use in a method of inducing and/or promoting and/or enhancing endothelial cell maturation.

[1141] In particular, medical applications which may result from the mediation of type I and II growth factor receptors by a GFR-binding compound, functionalised bioactive carrier, or pharmaceutical (therapeutic, dermatologic, ophthalmologic, diagnostic, etc.) composition, all as defined herein, include, but are not limited to, enhancing axonal dendritic neuron growth thus promoting neuron-regeneration and/or treating and/or preventing and/or decreasing or suppressing neuron degeneration-related conditions and diseases.

[1142] In the present description and unless otherwise indicated, the term “neuron-regeneration” or “neuroregeneration” means the regrowth or repair of nervous tissues, cells or cell products involving the participation of stem cells. Such mechanisms may include generation of new neurons, glia, axons, myelin, or synapses. Neurological disorders in which the present invention may thus be useful include, but are not limited to, ALS, Agraphia Alzheimer's disease, Amyotrophic lateral sclerosis, Angle man syndrome, Aphasia Apraxia, Arachnoiditis, Ataxia Telangiectasia, Attention deficit hyperactivity disorder, Auditory processing disorder, Autism, Alcoholism, asperger's syndrome, Bipolar disorder, Bell's palsy, Brachial plexus injury, Brain damage, Brain injury, Canavan disease, Capgras delusion, Causalgia, Central pain syndrome, Central pontine myelinolysis, Centronuclear myopathy, Cephalic disorder, Cerebral aneurysm, Cerebral arteriosclerosis, Cerebral atrophy, Cerebral gigantism, Cerebral palsy, Cerebral vasculitis, Cervical spinal stenosis, Charcot-Marie-Tooth disease, Chiari malformation, Chorea, Chronic fatigue syndrome, Chronic inflammatory demyelinating polyneuropathy (CIDP), Chronic pain, Coffin-Lowry syndrome, Coma, Complex regional pain syndrome, Compression neuropathy, Congenital facial diplegia, Corticobasal degeneration, Cranial arteritis, Craniosynostosis, Creutzfeldt-Jakob disease, Cumulative trauma disorders, Cushing's syndrome, Cytomegalic inclusion body disease (CIBD), Cytomegalovirus Infection, Dandy-Walker syndrome, Dawson disease, De Morsier's syndrome, Dejerine-Klumpke palsy, Dejerine-Sottas disease, Delayed sleep phase syndrome, Dementia, Dermatomyositis, Developmental coordination disorder, Diabetic neuropathy, Diffuse sclerosis, Downs syndrome, Dravet syndrome, Dysautonomia, Dyscalculia, Dysgraphia, Dyslexia, Dystonia, Empty sella syndrome, Encephalitis, Encephalocele, Encephalotrigeminal angiomatosis, Encopresis, Epilepsy, Erb's palsy, Erythromelalgia, Essential tremor, Fabry's disease, Fahr's syndrome, Fainting, Familial spastic paralysis, Febrile seizures, Fisher syndrome, Friedreich's ataxia, Fibromyalgia, Foville's syndrome, Fetal alcohol syndrome, Fragile X Tremor Ataxia Syndrome, Gaucher's disease, Gerstmann's syndrome, Giant cell arteritis, Giant cell inclusion disease, Globoid Cell Leukodystrophy, Gray matter heterotopia, Guillain-Barré syndrome, HTLV-1 associated myelopathy, Hallervorden-Spatz disease, Head injury, Headache, Hemifacial Spasm, Hereditary Spastic Paraplegia, Heredopathia atactica polyneuritiformis, Herpes zoster oticus, Herpes zoster, Hirayama syndrome, Holoprosencephaly, Huntington's disease, Hydranencephaly, Hydrocephalus, Hypercortisolism, Hypoxia, Immune-Mediated encephalomyelitis, Inclusion body myositis, Incontinentia pigmenti, Infantile Refsum disease, Infantile spasms, Inflammatory myopathy, Intracranial cyst, Intracranial hypertension, Joubert syndrome, Karak syndrome, Kearns-Sayre syndrome, Kennedy disease, Kinsbourne syndrome, Kleine-Levin Syndrome, Klippel Feil syndrome, Krabbe disease, Kugelberg-Welander disease, Lafora disease, Lambert-Eaton myasthenic syndrome, Landau-Kleffner syndrome, Lateral medullary (Wallenberg) syndrome, Learning disabilities, Leigh's disease, Lennox-Gastaut syndrome, Lesch-Nyhan syndrome, Leukodystrophy, Lewy body dementia, Lissencephaly, Locked-In syndrome, Lou Gehrig's disease (See amyotrophic lateral sclerosis), Lumbar disc disease, Lumbar spinal stenosis, Lyme disease—Neurological Sequelae, Machado-Joseph disease (Spinocerebellar ataxia type 3), Macrencephaly, Macropsia, Megalencephaly, Melkersson-Rosenthal syndrome, Menieres disease, Meningitis, Menkes disease, Metachromatic leukodystrophy, Microcephaly, Micropsia, Migraine, Miller Fisher syndrome, Mini-stroke (transient ischemic attack), Misophonia, Mitochondrial myopathy, Mobius syndrome, Monomelic amyotrophy, Motor Neurone Disease—see amyotrophic lateral sclerosis, Motor skills disorder, Moyamoya disease, Mucopolysaccharidoses, Multi-infarct dementia, Multifocal motor neuropathy, Multiple sclerosis, Multiple system atrophy, Muscular dystrophy, Myalgic encephalomyelitis, Myasthenia gravis, Myelinoclastic diffuse sclerosis, Myoclonic Encephalopathy of infants, Myoclonus, Myopathy, Myotubular myopathy, Myotonia congenital, Narcolepsy, Neuro-Behcet's disease, Neurofibromatosis, Neuroleptic malignant syndrome, Neurological manifestations of AIDS, Neurological sequelae of lupus, Neuromyotonia, Neuronal ceroid lipofuscinosis, Neuronal migration disorders, Neuropathy, Neurosis, Niemann-Pick disease, Non-24-hour sleep-wake disorder, Nonverbal learning disorder, O'Sullivan-McLeod syndrome, Occipital Neuralgia, Occult Spinal Dysraphism Sequence, Ohtahara syndrome, Olivopontocerebellar atrophy, Opsoclonus myoclonus syndrome, Optic neuritis, Orthostatic Hypotension, Otosclerosis, Overuse syndrome, Palinopsia, Paresthesia, Parkinson's disease, Paramyotonia Congenita, Paroxysmal attacks, Parry-Romberg syndrome, Pelizaeus-Merzbacher disease, Periodic Paralyses, Peripheral neuropathy, Pervasive developmental disorders, Photic sneeze reflex, Phytanic acid storage disease, Pick's disease, Pinched nerve, PMG, Polyneuropathy, Polio, Polymicrogyria, Polymyositis, Porencephaly, Post-Polio syndrome, Postherpetic Neuralgia (PHN), Postural Hypotension, Prader-Willi syndrome, Primary Lateral Sclerosis, Prion diseases, Progressive hemifacial atrophy, Progressive multifocal leukoencephalopathy, Progressive Supranuclear Palsy, Quadriplegia, Rabies, Ramsay Hunt syndrome type I, Ramsay Hunt syndrome type II, Ramsay Hunt syndrome type III, Rasmussen's encephalitis, Reflex neurovascular dystrophy, Refsum disease, Repetitive stress injury, Restless legs syndrome, Retrovirus-associated myelopathy, Rett syndrome, Reye's syndrome, Rhythmic Movement Disorder, Romberg syndrome, Saint Vitus dance, Sandhoff disease, Schizencephaly, Sensory processing disorder, Septo-optic dysplasia, Shaken baby syndrome, Shingles, Shy-Drager syndrome, Sjögren's syndrome, Sleep apnea, Sleeping sickness, Snatiation, Sotos syndrome, Spasticity, Spina bifida, Spinal cord injury, Spinal muscular atrophy, Spinocerebellar ataxia, Split-brain, Steele-Richardson-Olszewski syndrome, Stiff-person syndrome, Stroke, Sturge-Weber syndrome, Subacute sclerosing panencephalitis, Subcortical arteriosclerotic encephalopathy, Superficial siderosis, Sydenham's chorea, Syncope, Synesthesia, Syringomyelia, Tarsal tunnel syndrome, Tardive dyskinesia, Tardive dysphrenia, Tarlov cyst, Tay-Sachs disease, Temporal arteritis, Tetanus, Tethered spinal cord syndrome, Thomsen disease, Thoracic outlet syndrome, Tic Douloureux, Todd's paralysis, Tourette syndrome, Toxic encephalopathy, Transient ischemic attack, Transmissible spongiform encephalopathies, Transverse myelitis, Traumatic brain injury, Tremor, Trigeminal neuralgia, Tropical spastic paraparesis, Trypanosomiasis, Tuberous sclerosis, Ubisiosis, Von Hippel-Lindau disease (VHL), Viliuisk Encephalomyelitis (VE), Wallenberg's syndrome, Werdnig-Hoffman disease, West syndrome, Whiplash, Williams syndrome, Wilson's disease and Zellweger syndrome.

[1143] In one example, a GFR-binding compound, functionalised bioactive carrier, or pharmaceutical (therapeutic, dermatologic, ophthalmologic, diagnostic, etc.) composition, all as defined herein, may be a neuroregenerative or neurodegeneration regulator/modulator/inhibitor compound, bioactive carrier or composition which has demonstrated the ability to induce neuroregeneration and/or prevention, decrease or suppression of neuron degeneration in vitro and/or ex-vivo and/or in vivo.

[1144] In one aspect, the present disclosure thus provides:
[1145] a method of inducing or promoting or enhancing mesenchymal stem cell, progenitor neuronal cell (at any stage of differentiation of the neuronal cell lineage) differentiation, the method comprising administering to the cell an effective amount of at least one (modified) GFR-binding compound, at least one functionalised bioactive carrier, or at least one pharmaceutical composition, all as defined herein;
[1146] a method of inducing or promoting or enhancing or controlling or regulating neuron regeneration/formation, the method comprising administering to a mesenchymal stem cell or to a progenitor neuronal cell at any stage of differentiation of the neuronal cell lineage or to a mature neuron, an effective amount of at least one (modified) GFR-binding compound, at least one functionalised bioactive carrier, or at least one pharmaceutical composition, all as defined herein;
[1147] a method of inducing and/or promoting and/or enhancing neuronal cell maturation, the method comprising administering to a differentiated neuronal cell or to a mature neuronal cell an effective amount of at least one (modified) GFR-binding compound, at least one functionalised bioactive carrier, or at least one pharmaceutical composition, all as defined herein;
[1148] an effective amount of at least one (modified) GFR-binding compound, at least one functionalised bioactive carrier, or at least one pharmaceutical composition, all as defined herein for use in a method of inducing or promoting or enhancing mesenchymal stem cell or progenitor neuronal cell (at any stage of differentiation of the neuronal cell lineage) differentiation;
[1149] an effective amount of at least one (modified) GFR-binding compound, at least one functionalised bioactive carrier, or at least one pharmaceutical composition, all as defined herein for use in a method of inducing or promoting or enhancing or controlling or regulating neuron regeneration/formation;
[1150] an effective amount of at least one (modified) GFR-binding compound, at least one functionalised bioactive carrier, or at least one pharmaceutical composition, all as defined herein for use in a method of inducing and/or promoting and/or enhancing neuronal cell maturation.

[1151] In particular, medical applications which may result from the mediation of type I and II growth factor receptors by a GFR-binding compound, functionalised bioactive carrier, or pharmaceutical (therapeutic, dermatologic, ophthalmologic, diagnostic, etc.) composition, all as defined herein, include, but are not limited to, enhancing/promoting eye retina cell regeneration and/or treating and/or preventing and/or decreasing or suppressing eye retina cell degeneration-related conditions or diseases.

[1152] Eye-related diseases or disorders in which the present invention may thus be useful include, but are not limited to, Focal chorioretinal inflammation Focal such chorioretinitis, choroiditis, retinitis and retinochoroiditis, Disseminated chorioretinal inflammation, Posterior cyclitis, Harada's disease, Chorioretinal scars such as Macula scars of posterior pole and Solar retinopathy, Choroidal degeneration such as Atrophy and Sclerosis, Hereditary choroidal dystrophy such as Choroideremia, Gyrate atrophy, Choroidal haemorrhage, Choroidal detachment, Chorioretinitis, Retinal detachment, Retinoschisis, Retinal vascular occlusions, Hypertensive retinopathy, Diabetic retinopathy, Retinopathy, Retinopathy of prematurity, Age-related macular degeneration, Macular degeneration, Epiretinal membrane, Peripheral retinal degeneration, Hereditary retinal dystrophy, Retinitis pigmentosa, Retinal haemorrhage, Central serous retinopathy, Retinal detachment and Macular edema.

[1153] In one example, a GFR-binding compound, functionalised bioactive carrier, or pharmaceutical (therapeutic, dermatologic, ophthalmologic, diagnostic, etc.) composition, all as defined herein, may be an eye tissue-regenerative or eye tissue-degeneration regulator/modulator/inhibitor compound, bioactive carrier or composition which has demonstrated the ability to induce eye retina cell regeneration and/or prevent and/or decrease or suppress eye retina cell degeneration in vitro and/or ex-vivo and/or in vivo.

[1154] In one aspect, the present disclosure thus provides:
[1155] a method of inducing or promoting or enhancing mesenchymal stem cell, progenitor eye retina cell (at any stage of differentiation of the retinal cell lineage) differentiation, the method comprising administering to the cell an effective amount of at least one (modified) GFR-binding compound, at least one functionalised bioactive carrier, or at least one pharmaceutical composition, all as defined herein;
[1156] a method of inducing or promoting or enhancing or controlling or regulating eye retina cell regeneration/formation, the method comprising administering to a mesenchymal stem cell or to a progenitor eye retina cell at any stage of differentiation of the retinal cell lineage or to a mature eye retina cell, an effective amount of at least one (modified) GFR-binding compound, at least one functionalised bioactive carrier, or at least one pharmaceutical composition, all as defined herein;
[1157] a method of inducing and/or promoting and/or enhancing eye retina cell maturation, the method comprising administering to a differentiated eye retina cell or to a mature eye retina cell an effective amount of at least one (modified) GFR-binding compound, at least one functionalised bioactive carrier, or at least one pharmaceutical composition, all as defined herein;
[1158] an effective amount of at least one (modified) GFR-binding compound, at least one functionalised bioactive carrier, or at least one pharmaceutical composition, all as defined herein for use in a method of inducing or promoting or enhancing mesenchymal stem cell or progenitor eye retina cell (at any stage of differentiation of the retinal cell lineage) differentiation;
[1159] an effective amount of at least one (modified) GFR-binding compound, at least one functionalised bioactive carrier, or at least one pharmaceutical composition, all as defined herein for use in a method of inducing or promoting or enhancing or controlling or regulating eye retina cell regeneration/formation;
[1160] an effective amount of at least one (modified) GFR-binding compound, at least one functionalised bioactive carrier, or at least one pharmaceutical composition, all as defined herein for use in a method of inducing and/or promoting and/or enhancing eye retina cell maturation.

[1161] In particular, medical applications which may result from the mediation of type I and II growth factor receptors by a GFR-binding compound, functionalised bioactive carrier, or pharmaceutical (therapeutic, dermatologic, ophthalmologic, diagnostic, etc.) composition, all as defined herein, include, but are not limited to, enhancing/promoting renal functions such as enhancing/improving waste removal, body's fluid balance control and electrolytes balance control and/or preventing/treating kidneys failure and/or chronic kidney disease (CKD) and/or renal fibrosis.

[1162] In one example, a GFR-binding compound, functionalised bioactive carrier, or pharmaceutical (therapeutic, dermatologic, ophthalmologic, diagnostic, etc.) composition, all as defined herein, may be a kidneys-function enhancing compound, bioactive carrier or composition which has demonstrated the ability to promote/improve kidneys functions and/or preventing/treating kidneys failure and/or chronic kidney disease (CKD) and/or renal fibrosis in vitro and/or ex-vivo and/or in vivo.

[1163] In one aspect, the present disclosure thus provides:
[1164] a method of inducing or promoting or enhancing mesenchymal stem cell, progenitor renal cell (at any stage of differentiation of the renal cell lineage) differentiation, the method comprising administering to the cell an effective amount of at least one (modified) GFR-binding compound, at least one functionalised bioactive carrier, or at least one pharmaceutical composition, all as defined herein;
[1165] a method of inducing or promoting or enhancing or controlling or regulating renal cell regeneration/formation, the method comprising administering to a mesenchymal stem cell or to a progenitor renal cell at any stage of differentiation of the renal cell lineage or to a mature renal cell, an effective amount of at least one (modified) GFR-binding compound, at least one functionalised bioactive carrier, or at least one pharmaceutical composition, all as defined herein;
[1166] a method of inducing and/or promoting and/or enhancing renal cell maturation, the method comprising administering to a differentiated renal cell or to a mature renal cell an effective amount of at least one (modified) GFR-binding compound, at least one functionalised bioactive carrier, or at least one pharmaceutical composition, all as defined herein;
[1167] an effective amount of at least one (modified) GFR-binding compound, at least one functionalised bioactive carrier, or at least one pharmaceutical composition, all as defined herein for use in a method of inducing or promoting or enhancing mesenchymal stem cell or progenitor renal cell (at any stage of differentiation of the renal cell lineage) differentiation;
[1168] an effective amount of at least one (modified) GFR-binding compound, at least one functionalised bioactive carrier, or at least one pharmaceutical composition, all as defined herein for use in a method of inducing or promoting or enhancing or controlling or regulating renal cell regeneration/formation;
[1169] an effective amount of at least one (modified) GFR-binding compound, at least one functionalised bioactive carrier, or at least one pharmaceutical composition, all as defined herein for use in a method of inducing and/or promoting and/or enhancing renal cell maturation.

[1170] In particular, medical applications which may result from the mediation of type I and II growth factor receptors by a GFR-binding compound, functionalised bioactive carrier, or pharmaceutical (therapeutic, dermatologic, ophthalmologic, diagnostic, etc.) composition, all as defined herein, include, but are not limited to, enhancing/promoting fibrous tissue formation and tendon and ligament regeneration and/or preventing and/or decreasing or suppressing tendon/ligament cell degeneration.

[1171] In one example, a GFR-binding compound, functionalised bioactive carrier, or pharmaceutical (therapeutic, dermatologic, ophthalmologic, diagnostic, etc.) composition, all as defined herein, may be a fibrous tissue formation promoting compound, bioactive carrier or composition which has demonstrated the ability to induce fibrous tissue formation in vitro and/or ex-vivo and/or in vivo.

[1172] In one aspect, the present disclosure thus provides:
[1173] a method of inducing or promoting or enhancing mesenchymal stem cell, progenitor tendon/ligament cell (at any stage of differentiation of the T/L cell lineage) differentiation, the method comprising administering to the cell an effective amount of at least one (modified) GFR-binding compound, at least one functionalised bioactive carrier, or at least one pharmaceutical composition, all as defined herein;
[1174] a method of inducing or promoting or enhancing or controlling or regulating tendon/ligament cell regeneration/formation, the method comprising administering to a mesenchymal stem cell or to a progenitor tendon/ligament cell at any stage of differentiation of the T/L cell lineage or to a mature tendon/ligament cell, an effective amount of at least one (modified) GFR-binding compound, at least one functionalised bioactive carrier, or at least one pharmaceutical composition, all as defined herein;
[1175] a method of inducing and/or promoting and/or enhancing tendon/ligament cell maturation, the method comprising administering to a differentiated tendon/ligament cell or to a mature tendon/ligament cell an effective amount of at least one (modified) GFR-binding compound, at least one functionalised bioactive carrier, or at least one pharmaceutical composition, all as defined herein;
[1176] an effective amount of at least one (modified) GFR-binding compound, at least one functionalised bioactive carrier, or at least one pharmaceutical composition, all as defined herein for use in a method of inducing or promoting or enhancing mesenchymal stem cell or progenitor tendon/ligament cell (at any stage of differentiation of the T/L cell lineage) differentiation;
[1177] an effective amount of at least one (modified) GFR-binding compound, at least one functionalised bioactive carrier, or at least one pharmaceutical composition, all as defined herein for use in a method of inducing or promoting or enhancing or controlling or regulating tendon/ligament cell regeneration/formation;
[1178] an effective amount of at least one (modified) GFR-binding compound, at least one functionalised bioactive carrier, or at least one pharmaceutical composition, all as defined herein for use in a method of inducing and/or promoting and/or enhancing tendon/ligament cell maturation.

[1179] In particular, medical applications which may result from the mediation of type I and II growth factor receptors by a GFR-binding compound, functionalised bioactive carrier, or pharmaceutical (therapeutic, dermatologic, ophthalmologic, diagnostic, etc.) composition, all as defined herein, include, but are not limited to, hair follicle tissue regeneration and formation (hair growth), hair follicle stem cell activation (loss of quiescence state) and/or preventing/treating alopecia areata, alopecia totalis, alopecia universalis, androgenic alopecia (male pattern baldness), telogen effluvium, anagen effluvium or chemotherapy-induced alopecia.

[1180] In one example, a GFR-binding compound, functionalised bioactive carrier, or pharmaceutical (therapeutic, dermatologic, ophthalmologic, diagnostic, etc.) composition, all as defined herein, may be a hair follicle growth activation promoting compound, bioactive carrier or composition which has demonstrated the ability to induce hair follicle formation and/or hair follicle stem cell activation in vitro and/or ex-vivo and/or in vivo.

[1181] In one aspect, the present disclosure thus provides:
[1182] a method of inducing or promoting or enhancing mesenchymal stem cell, progenitor hair follicle cell (at any stage of differentiation of the hair follicle cell lineage) differentiation, the method comprising administering to the cell an effective amount of at least one (modified) GFR-binding compound, at least one functionalised bioactive carrier, or at least one pharmaceutical composition, all as defined herein;
[1183] a method of inducing or promoting or enhancing or controlling or regulating hair follicle cell regeneration/formation, the method comprising administering to a mesenchymal stem cell or to a progenitor hair follicle cell at any stage of differentiation of the hair follicle cell lineage or to a mature hair follicle cell, an effective amount of at least one (modified) GFR-binding compound, at least one functionalised bioactive carrier, or at least one pharmaceutical composition, all as defined herein;
[1184] a method of inducing and/or promoting and/or enhancing hair follicle cell maturation, the method comprising administering to a differentiated hair follicle cell or to a mature hair follicle cell an effective amount of at least one (modified) GFR-binding compound, at least one functionalised bioactive carrier, or at least one pharmaceutical composition, all as defined herein;
[1185] a method of activating hair follicle stem cells, the method comprising administering to a quiescent hair follicle stem cell an effective amount of at least one (modified) GFR-binding compound, at least one functionalised bioactive carrier, or at least one pharmaceutical composition, all as defined herein;
[1186] an effective amount of at least one (modified) GFR-binding compound, at least one functionalised bioactive carrier, or at least one pharmaceutical composition, all as defined herein for use in a method of inducing or promoting or enhancing mesenchymal stem cell or progenitor hair follicle cell (at any stage of differentiation of the hair follicle cell lineage) differentiation;
[1187] an effective amount of at least one (modified) GFR-binding compound, at least one functionalised bioactive carrier, or at least one pharmaceutical composition, all as defined herein for use in a method of inducing or promoting or enhancing or controlling or regulating hair follicle cell regeneration/formation;
[1188] an effective amount of at least one (modified) GFR-binding compound, at least one functionalised bioactive carrier, or at least one pharmaceutical composition, all as defined herein for use in a method of inducing and/or promoting and/or enhancing tendon/ligament cell maturation;
[1189] an effective amount of at least one (modified) GFR-binding compound, at least one functionalised bioactive carrier, or at least one pharmaceutical composition, all as defined herein for use in a method of activating hair follicle stem cells.

[1190] In particular, medical applications which may result from the mediation of type I and II growth factor receptors by a GFR-binding compound, functionalised bioactive carrier, or pharmaceutical (therapeutic, dermatologic, ophthalmologic, diagnostic, etc.) composition, all as defined herein, include, but are not limited to, enhancing tissue closure.

[1191] In one example, a GFR-binding compound, functionalised bioactive carrier, or pharmaceutical (therapeutic, dermatologic, ophthalmologic, diagnostic, etc.) composition, all as defined herein, may be a tissue-closure-promoting compound or biomaterial which has demonstrated the ability to induce tissue closure in vitro and/or ex-vivo and/or in vivo.

[1192] In one aspect, the present disclosure thus provides:
[1193] a method of inducing or promoting or enhancing tissue closure, the method comprising administering to an incised/opened tissue an effective amount of at least one (modified) GFR-binding compound, at least one functionalised bioactive carrier, or at least one pharmaceutical composition, all as defined herein;
[1194] an effective amount of at least one (modified) GFR-binding compound, at least one functionalised bioactive carrier, or at least one pharmaceutical composition, all as defined herein for use in a method of inducing or promoting or enhancing tissue closure.

[1195] In particular, medical applications which may result from the mediation of type I and II growth factor receptors by a GFR-binding compound, functionalised bioactive carrier, or pharmaceutical (therapeutic, dermatologic, ophthalmologic, diagnostic, etc.) composition, all as defined herein, include, but are not limited to, enhancing/promoting female fertility and/or preventing and/or decreasing or suppressing female infertility.

[1196] In one example, a GFR-binding compound, functionalised bioactive carrier, or pharmaceutical (therapeutic, dermatologic, ophthalmologic, diagnostic, etc.) composition, all as defined herein, may be a female fertility enhancing or a female infertility regulator/modulator/inhibitor compound, bioactive carrier or composition which has demonstrated the ability to enhance/promote female fertility and/or prevent and/or decrease or suppress female infertility in vitro and/or ex-vivo and/or in vivo.

[1197] In one aspect, the present disclosure thus provides:
[1198] a method of inducing or promoting or enhancing mesenchymal stem cell, progenitor ovarian cell (at any stage of differentiation of the reproduction system lineage) differentiation, the method comprising administering to the cell an effective amount of at least one (modified) GFR-binding compound, at least one functionalised bioactive carrier, or at least one pharmaceutical composition, all as defined herein;
[1199] a method of inducing or promoting or enhancing or controlling or regulating ovarian cell regeneration/formation, the method comprising administering to a mesenchymal stem cell or to a progenitor ovarian cell at any stage of differentiation of the reproduction system lineage or to a mature ovarian cell, an effective amount of at least one (modified) GFR-binding compound, at least one functionalised bioactive carrier, or at least one pharmaceutical composition, all as defined herein;
[1200] a method of inducing and/or promoting and/or enhancing ovarian cell maturation, the method comprising administering to a differentiated ovarian cell or to a mature ovarian cell an effective amount of at least one (modified) GFR-binding compound, at least one functionalised bioactive carrier, or at least one pharmaceutical composition, all as defined herein;
[1201] an effective amount of at least one (modified) GFR-binding compound, at least one functionalised bioactive carrier, or at least one pharmaceutical composition, all as defined herein for use in a method of inducing or promoting or enhancing mesenchymal stem cell or progenitor ovarian cell (at any stage of differentiation of the reproduction system lineage) differentiation;
[1202] an effective amount of at least one (modified) GFR-binding compound, at least one functionalised bioactive carrier, or at least one pharmaceutical composition, all as defined herein for use in a method of inducing or promoting or enhancing or controlling or regulating ovarian cell regeneration/formation;
[1203] an effective amount of at least one (modified) GFR-binding compound, at least one functionalised bioactive carrier, or at least one pharmaceutical composition, all as defined herein for use in a method of inducing and/or promoting and/or enhancing ovarian cell maturation.

[1204] In particular, medical applications which may result from the mediation of type I and II growth factor receptors by a (modified) GFR-binding compound, functionalised bioactive carrier, or pharmaceutical (therapeutic, dermatologic, ophthalmologic, diagnostic, etc.) composition, all as defined herein, include, but are not limited to, enhancing of myogenesis, inducing muscle tissue formation, reinforcing muscle tissues, inducing myocyte maturation, repairing damaged muscles, preventing muscle tissue degeneration or damages, and/or protecting a subject from one or more muscle tissue degenerative-related diseases, disorders, conditions or pathologies such as myopathies, muscular atrophy, disuse atrophy, denervation atrophy, muscular dystrophies such as the Duchenne muscular dystrophy (DMD), and the Becker muscular dystrophy (BMD), fibrosis, fibrositis, muscle weakness, fatigue, cramps, fibromyalgia, or chronic muscle pain syndrome.

[1205] In one example, a (modified) GFR-binding compound, functionalised bioactive carrier, or pharmaceutical (therapeutic, dermatologic, ophthalmologic, diagnostic, etc.) composition, all as defined herein, may thus be an myoinductive compound, bioactive carrier or composition which has demonstrated an ability to induce muscle tissue formation in vitro and/or ex-vivo and/or in vivo.

[1206] In one aspect, the present disclosure thus provides:
[1207] a method of inducing or promoting or enhancing mesenchymal stem cell, progenitor myoblast (at any stage of differentiation of the muscle cell lineage) differentiation, the method comprising administering to the cell an effective amount of at least one (modified) GFR-binding compound, at least one functionalised bioactive carrier, or at least one pharmaceutical composition, all as defined herein;
[1208] a method of inducing or promoting or enhancing or controlling or regulating muscle tissue regeneration/formation, the method comprising administering to a mesenchymal stem cell or to a progenitor myoblast at any stage of differentiation of the muscle cell lineage or to a mature myoblast, an effective amount of at least one (modified) GFR-binding compound, at least one functionalised bioactive carrier, or at least one pharmaceutical composition, all as defined herein;
[1209] a method of inducing and/or promoting and/or enhancing myocyte maturation, the method comprising administering to a differentiated myoblast or to a mature myoblast (e.g. an myocyte) an effective amount of at least one (modified) GFR-binding compound, at least one functionalised bioactive carrier, or at least one pharmaceutical composition, all as defined herein;
[1210] an effective amount of at least one (modified) GFR-binding compound, at least one functionalised bioactive carrier, or at least one pharmaceutical composition, all as defined herein for use in a method of inducing or promoting or enhancing mesenchymal stem cell or progenitor myoblast (at any stage of differentiation of the muscle cell lineage) differentiation;
[1211] an effective amount of at least one (modified) GFR-binding compound, at least one functionalised bioactive carrier, or at least one pharmaceutical composition, all as defined herein for use in a method of inducing or promoting or enhancing or controlling or regulating muscle tissue regeneration/formation;
[1212] an effective amount of at least one (modified) GFR-binding compound, at least one functionalised bioactive carrier, or at least one pharmaceutical composition, all as defined herein for use in a method of inducing and/or promoting and/or enhancing myoblast maturation.

[1213] In particular, medical applications which may result from the mediation of type I and II growth factor receptors by a (modified) GFR-binding compound, functionalised bioactive carrier, or pharmaceutical (therapeutic, dermatologic, ophthalmologic, diagnostic, etc.) composition, all as defined herein, include, but are not limited to, enhancing blood tissue regeneration, inducing blood cell differentiation, or protecting a patient from a blood cell degeneration-related disease, condition, disorder, or pathology.

[1214] In one example, a (modified) GFR-binding compound, functionalised bioactive carrier, or pharmaceutical (therapeutic, dermatologic, ophthalmologic, diagnostic, etc.) composition, all as defined herein, may thus be a blood cell degeneration inhibitor, bioactive carrier or composition which has demonstrated an ability to induce blood cell formation in vitro and/or ex-vivo and/or in vivo.

[1215] In one aspect, the present disclosure thus provides:
[1216] a method of inducing or promoting or enhancing mesenchymal stem cell, progenitor blood cell (at any stage of differentiation of the Osteoblast cell lineage) differentiation, the method comprising administering to the cell an effective amount of at least one (modified) GFR-binding compound, at least one functionalised bioactive carrier, or at least one pharmaceutical composition, all as defined herein;
[1217] a method of inducing or promoting or enhancing or controlling or regulating blood cell regeneration/formation, the method comprising administering to a mesenchymal stem cell or to a progenitor blood cell at any stage of differentiation of the blood cell lineage or to a mature blood cell, an effective amount of at least one (modified) GFR-binding compound, at least one functionalised bioactive carrier, or at least one pharmaceutical composition, all as defined herein;
[1218] a method of inducing and/or promoting and/or enhancing blood cell maturation, the method comprising administering to a differentiated blood cell or to a mature blood cell (e.g. a mature red blood cell) an effective amount of at least one (modified) GFR-binding compound, at least one functionalised bioactive carrier, or at least one pharmaceutical composition, all as defined herein;
[1219] an effective amount of at least one (modified) GFR-binding compound, at least one functionalised bioactive carrier, or at least one pharmaceutical composition, all as defined herein for use in a method of inducing or promoting or enhancing mesenchymal stem cell or progenitor blood cell (at any stage of differentiation of the blood cell lineage) differentiation;
[1220] an effective amount of at least one (modified) GFR-binding compound, at least one functionalised bioactive carrier, or at least one pharmaceutical composition, all as defined herein for use in a method of inducing or promoting or enhancing or controlling or regulating blood cell regeneration/formation;
[1221] an effective amount of at least one (modified) GFR-binding compound, at least one functionalised bioactive carrier, or at least one pharmaceutical composition, all as defined herein for use in a method of inducing and/or promoting and/or enhancing blood cell maturation.

[1222] In particular, medical applications which may result from the mediation of type I and II growth factor receptors by a (modified) GFR-binding compound, functionalised bioactive carrier, or pharmaceutical (therapeutic, dermatologic, ophthalmologic, diagnostic, etc.) composition, all as defined herein, include, but are not limited to, enhancing of lung tissue regeneration, inducing lung cell differentiation, or protecting a patient from a lung cell degeneration-related disease, condition, disorder, or pathology.

[1223] In one example, a (modified) GFR-binding compound, functionalised bioactive carrier, or pharmaceutical (therapeutic, dermatologic, ophthalmologic, diagnostic, etc.) composition, all as defined herein, may thus be a lung cell degeneration inhibitor, bioactive carrier or composition which has demonstrated an ability to induce lung cell formation in vitro and/or ex-vivo and/or in vivo.

[1224] In one aspect, the present disclosure thus provides:
[1225] a method of inducing or promoting or enhancing mesenchymal stem cell, progenitor lung cell (at any stage of differentiation of the Osteoblast cell lineage) differentiation, the method comprising administering to the cell an effective amount of at least one (modified) GFR-binding compound, at least one functionalised bioactive carrier, or at least one pharmaceutical composition, all as defined herein;
[1226] a method of inducing or promoting or enhancing or controlling or regulating lung cell regeneration/formation, the method comprising administering to a mesenchymal stem cell or to a progenitor lung cell at any stage of differentiation of the lung cell lineage or to a mature lung cell, an effective amount of at least one (modified) GFR-binding compound, at least one functionalised bioactive carrier, or at least one pharmaceutical composition, all as defined herein;
[1227] a method of inducing and/or promoting and/or enhancing lung cell maturation, the method comprising administering to a differentiated lung cell or to a mature lung cell an effective amount of at least one (modified) GFR-binding compound, at least one functionalised bioactive carrier, or at least one pharmaceutical composition, all as defined herein;
[1228] an effective amount of at least one (modified) GFR-binding compound, at least one functionalised bioactive carrier, or at least one pharmaceutical composition, all as defined herein for use in a method of inducing or promoting or enhancing mesenchymal stem cell or progenitor lung cell (at any stage of differentiation of the lung cell lineage) differentiation;
[1229] an effective amount of at least one (modified) GFR-binding compound, at least one functionalised bioactive carrier, or at least one pharmaceutical composition, all as defined herein for use in a method of inducing or promoting or enhancing or controlling or regulating lung cell regeneration/formation;
[1230] an effective amount of at least one (modified) GFR-binding compound, at least one functionalised bioactive carrier, or at least one pharmaceutical composition, all as defined herein for use in a method of inducing and/or promoting and/or enhancing lung cell maturation.

[1231] In particular, medical applications which may result from the mediation of type I and II growth factor receptors by a (modified) GFR-binding compound, functionalised bioactive carrier, or pharmaceutical (therapeutic, dermatologic, ophthalmologic, diagnostic, etc.) composition, all as defined herein, include, but are not limited to, enhancing adipose tissue regeneration, inducing adipocyte differentiation, or protecting a patient from a adipose tissue degeneration-related disease, condition, disorder, or pathology.

[1232] In one example, a (modified) GFR-binding compound, functionalised bioactive carrier, or pharmaceutical (therapeutic, dermatologic, ophthalmologic, diagnostic, etc.) composition, all as defined herein, may thus be an adipose tissue degeneration inhibitor, bioactive carrier or composition which has demonstrated an ability to induce adipose tissue formation in vitro and/or ex-vivo and/or in vivo.

[1233] In one aspect, the present disclosure thus provides:
[1234] a method of inducing or promoting or enhancing mesenchymal stem cell, progenitor adipocyte (at any stage of differentiation of the Osteoblast cell lineage) differentiation, the method comprising administering to the cell an effective amount of at least one (modified) GFR-binding compound, at least one functionalised bioactive carrier, or at least one pharmaceutical composition, all as defined herein;
[1235] a method of inducing or promoting or enhancing or controlling or regulating adipose tissue regeneration/formation, the method comprising administering to a mesenchymal stem cell or to a progenitor adipocyte at any stage of differentiation of the adipocyte lineage or to a mature adipocyte, an effective amount of at least one (modified) GFR-binding compound, at least one functionalised bioactive carrier, or at least one pharmaceutical composition, all as defined herein;
[1236] a method of inducing and/or promoting and/or enhancing adipocyte maturation, the method comprising administering to a differentiated adipocyte or to a mature adipocyte an effective amount of at least one (modified) GFR-binding compound, at least one functionalised bioactive carrier, or at least one pharmaceutical composition, all as defined herein;
[1237] an effective amount of at least one (modified) GFR-binding compound, at least one functionalised bioactive carrier, or at least one pharmaceutical composition, all as defined herein for use in a method of inducing or promoting or enhancing mesenchymal stem cell or progenitor adipocyte (at any stage of differentiation of the adipocyte lineage) differentiation;
[1238] an effective amount of at least one (modified) GFR-binding compound, at least one functionalised bioactive carrier, or at least one pharmaceutical composition, all as defined herein for use in a method of inducing or promoting or enhancing or controlling or regulating adipose tissue regeneration/formation;
[1239] an effective amount of at least one (modified) GFR-binding compound, at least one functionalised bioactive carrier, or at least one pharmaceutical composition, all as defined herein for use in a method of inducing and/or promoting and/or enhancing adipocyte maturation.

[1240] Protected from a disease, condition, disorder or pathology refers to the treatment of the underlying cause of the disease, condition, disorder or pathology as well as reducing the symptoms of the disease, condition, disorder or pathology; and/or reducing the occurrence of the disease, condition, disorder or pathology; and/or reducing the severity of the disease, condition, disorder or pathology. Protecting a patient can refer to the ability of a therapeutic composition of the present invention, when administered to a patient, to prevent a disease, condition, disorder or pathology from occurring and/or to cure or to alleviate disease, condition, disorder or pathology symptoms, signs or causes. As such, to protect a patient from a disease, condition, disorder or pathology includes both preventing disease, condition, disorder or pathology occurrence (prophylactic treatment) and treating a patient that has a disease, condition, disorder or pathology or that is experiencing initial symptoms or later stage symptoms of a disease, condition, disorder or pathology (therapeutic treatment).

[1241] Treating: As used herein, unless indicated otherwise or contradictory in context, the term “treating” or “treatment” refers to partially or completely alleviating, ameliorating, improving, relieving, delaying onset of, inhibiting progression of, reducing severity of, and/or reducing incidence of one or more symptoms or features of a particular disease, disorder, pathology and/or condition. Treatment may be administered to a subject who does not exhibit signs of a disease, disorder, and/or condition and/or to a subject who exhibits only early signs of a disease, disorder, pathology and/or condition for the purpose of decreasing the risk of developing pathology associated with the disease, disorder, and/or condition.

[1242] Preventing: As used herein, unless indicated otherwise or contradictory in context, the term “preventing” refers to partially or completely delaying onset of an infection, disease, disorder and/or condition; partially or completely delaying onset of one or more symptoms, features, or clinical manifestations of a particular infection, disease, disorder, and/or condition; partially or completely delaying onset of one or more symptoms, features, or manifestations of a particular infection, disease, disorder, and/or condition; partially or completely delaying progression from an infection, a particular disease, disorder and/or condition; and/or decreasing the risk of developing pathology associated with the infection, the disease, disorder, and/or condition.

[1243] Disease: As used herein, unless indicated otherwise or contradictory in context, the term “disease” refers to any deviation from the normal health of a patient and includes a state when disease symptoms are present, as well as conditions in which a deviation has occurred, but symptoms are not yet manifested. The same applies to “condition”, “disorder” and “pathology”.

[1244] In one aspect, the present disclosure provides methods of determining the effectiveness of a (modified) GFR-binding compound, a functionalised bioactive carrier or a pharmaceutical composition as defined herein for inducing cell differentiation, or inducing, promoting, enhancing, controlling or regulating tissue regeneration/formation in-vitro, ex-vivo and in-vivo comprising the administration of said (modified) GFR-binding compound, a functionalised bioactive carrier or a pharmaceutical composition to a cell; the measurement of the expression of specific differentiation markers as defined herein in the cell; the comparison of the expression of said specific differentiation markers in the cell to the expression of said specific differentiation markers in a cell treated with a reference (or control) functionalised bioactive carrier, compound or solvent; and determining the effectiveness of the (modified) GFR-binding compound, a functionalised bioactive carrier or a pharmaceutical composition relative to the reference pharmaceutical association or compound.

[1245] In one aspect, the present disclosure provides methods to activate, promote, support, improve, or increase the activity of a growth factor receptor present in, on the surface of a mesenchymal stem cell or progenitor cell (at any stage of differentiation thereof) such that said cell may undergo efficient cell differentiation.

[1246] In one aspect, the present disclosure provides methods of identifying, diagnosing, and optionally classifying subjects on these bases, which may include clinical diagnosis, biomarker levels, and other methods known in the art.

### XVII. Wound Healing Applications

[1247] Specific applications of the invention in dermatology relate to wound healing and skin repair.

[1248] Thus, dermatological applications which may result from the mediation of type I and II growth factor receptors by a compound, functionalised bioactive carrier, or composition of the invention include, but are not limited to, enhancing wound healing, skin repair and cellular migration.

[1249] Skin repair: In the present description and unless otherwise indicated, the term “skin repair” means dermal and epidermal cells regeneration, collagen and other skin protein synthesis by epithelial cells.

[1250] Cellular migration: In the present description and unless otherwise indicated, the term “cellular migration” means a central process in the development and maintenance of multicellular organisms. Tissue formation during embryonic development, wound healing and immune responses all require the orchestrated movement of cells in particular directions to specific locations. The cells involved in cellular migration include the cells of the epithelial and dermal cell lineages forming the connective tissue i.e. the fibroblasts, fibrocytes, myofibroblasts, adipocytes, synoviocytes, macrophages, histiocytes, granulocytes, plasmocytes and mastocytes.

[1251] In one example, a (modified) GFR-binding compound, functionalised bioactive carrier, or pharmaceutical (therapeutic, dermatologic, ophthalmologic, diagnostic, etc.) composition, all as defined herein, may be a wound-healing-promoting compound, bioactive carrier, or composition which has demonstrated the ability to induce wound healing, skin repair and/or cellular migration in vitro, ex-vivo and/or in vivo.

[1252] In one aspect, the present disclosure thus provides:
[1253] a method of inducing or promoting or enhancing mesenchymal stem cell, progenitor epithelial cell (at any stage of differentiation of the epithelial and dermal cell lineage) differentiation, the method comprising administering to the cell an effective amount of at least one (modified) GFR-binding compound, at least one functionalised bioactive carrier, or at least one pharmaceutical composition of the invention;
[1254] a method of inducing or promoting or enhancing or controlling or regulating skin tissue regeneration/formation and/or tubular formation, the method comprising administering to a mesenchymal stem cell or to a progenitor epithelial cell at any stage of differentiation of the epithelial and dermal cell lineage or to a mature epithelial cell, an effective amount of at least one (modified) GFR-binding compound, at least one functionalised bioactive carrier, or at least one pharmaceutical composition of the invention;
[1255] a method of inducing and/or promoting and/or enhancing cell motility or single/collective epithelial cell migration, the method comprising administering to a mesenchymal stem cell or to a progenitor epithelial cell at any stage of differentiation of the epithelial and dermal cell lineage or to a mature epithelial cell an effective amount of at least one (modified) GFR-binding compound, at least one functionalised bioactive carrier, or at least one pharmaceutical composition of the invention;
[1256] a method of inducing and/or promoting and/or enhancing epithelial cell maturation, the method comprising administering to a differentiated epithelial cell or to a mature epithelial cell an effective amount of at least one (modified) GFR-binding compound, at least one functionalised bioactive carrier, or at least one pharmaceutical composition of the invention;
[1257] an effective amount of at least one (modified) GFR-binding compound, at least one functionalised bioactive carrier, or at least one pharmaceutical composition of the invention for use in a method of inducing or promoting or enhancing mesenchymal stem cell, progenitor epithelial cell (at any stage of differentiation of the epithelial and dermal cell lineage) differentiation;
[1258] an effective amount of at least one (modified) GFR-binding compound, at least one functionalised bioactive carrier, or at least one pharmaceutical composition of the invention for use in a method of inducing or promoting or enhancing or controlling or regulating skin tissue regeneration/formation;
[1259] an effective amount of at least one (modified) GFR-binding compound, at least one functionalised bioactive carrier, or at least one pharmaceutical composition of the invention for use in a method of inducing and/or promoting and/or enhancing cell motility or single/collective epithelial cell migration,
[1260] an effective amount of at least one (modified) GFR-binding compound, at least one functionalised bioactive carrier, or at least one pharmaceutical composition of the invention for use in a method of inducing and/or promoting and/or enhancing epithelial cell maturation.

### XVIII. Cosmetic Applications

[1261] Skin ageing is typically associated with a deregulation of the metabolism of cutaneous cells characterized by a diminishing of the proliferation of keratinocytes, a deregulation of the differentiation of keratinocytes, an accumulation of dead cells, and a diminishing of the innervation of the skin.

[1262] Cosmetic, non-therapeutic, applications which may result from the mediation of type I and II growth factor receptors by a GFR-binding compound, functionalised bioactive carrier, or compositions thereof, all as defined herein, include, but are not limited to, enhancing/promoting skin regeneration, preventing and/or attenuating and/or masking and/or removing wrinkles, firming the skin, preventing and/or decreasing or suppressing skin pigmentation.

[1263] In one example, a GFR-binding compound, functionalised bioactive carrier, or compositions thereof, all as defined herein, may be an anti-wrinkle/ageing and/or skin-firming and/or skin regeneration-promoting compound, bioactive carrier or composition which has demonstrated the ability to enhance/promote skin cosmetic regeneration, prevent and/or attenuate and/or mask and/or remove wrinkles, firm the skin, prevent and/or decrease or suppress skin pigmentation in vitro and/or in vivo.

[1264] In one aspect, the present disclosure provides a cosmetic or functional food composition comprising at least one GFR-binding compound or at least one functionalised bioactive carrier, all as defined herein, in combination with at least one suitable cosmetic carrier, preferably suitable for topical application.

[1265] Suitable cosmetic carrier: The terms “suitable cosmetic carrier” used here, mean that the composition or the components of the latter are suitable for use in contact with human skin without undue toxicity, incompatibility, instability, allergic response or their equivalents.

[1266] In one aspect, the present disclosure provides a use of a GFR-binding compound, or functionalised bioactive carrier, all as defined herein, in cosmetics or as a functional food.

[1267] In one aspect, the present disclosure provides a use of a GFR-binding compound, functionalised bioactive carrier, or composition thereof, all as defined herein, or a cosmetic or functional food composition as defined herein as an anti-wrinkle/ageing agent. For example, in certain embodiments, the GFR-binding compound, functionalised bioactive carrier, or composition thereof, all as defined herein, is used as active ingredient to prevent or treat skin-ageing in a cosmetic composition or a functional food composition.

[1268] In one aspect, the present disclosure provides a use of a GFR-binding compound or functionalised bioactive carrier, all as defined herein, or a cosmetic composition thereof as defined herein in a method of cosmetic care, wherein said method of cosmetic care comprises the administration or the application of between about 0.0001 μg/day to about 5000 mg/day, between about 0.0001 μg/day to about 1000 mg/day, between about 0.0001 μg/day to about 10 mg/day, between about 0.0001 μg/day to about 1 mg/day, or between about 0.0001 μg/day to about 100 μg/day of said compound, bioactive carrier or composition, all being preferred and specifically contemplated for implementing embodiments of the invention.

[1269] In one example, the administration comprises the oral administration of a tablet, capsule, pill, powder, sustained release formulations, solution or suspension containing said GFR-binding compound or functionalised bioactive carrier, all as defined herein, or cosmetic or functional food compositions thereof as defined herein.

[1270] In one preferred example, said use comprises the topical application of a GFR-binding compound or functionalised bioactive carrier, all as defined herein, or cosmetic composition thereof as defined herein.

[1271] Suitable formulations for use in cosmetic care treatment include, for instance, the ones described in U.S. Pat. No. 8,497,241 B2, which is hereby incorporated by reference.

[1272] In one example, said cosmetic use of the invention is a non-therapeutic cosmetic use.

[1273] In one aspect, the present disclosure provides a cosmetic care or treatment method in which the GFR-binding compound, the functionalised bioactive carrier, or the cosmetic composition, all as defined herein, is used via topical application to stimulate the proliferation and/or activity of the fibroblasts.

[1274] For example, in certain embodiments, said cosmetic care method of the invention include treatment of skin ageing, especially unaesthetic and/or uncomfortable manifestations of skin ageing, such as slackness of the tissues, loss of firmness of the tissues, the appearance of wrinkles, fine lines, and grooves, and/or for the cosmetic treatment and/or care of stretch marks and/or scars.

[1275] In one example, the cosmetic care method of the invention is preferably for protecting the skin against skin ageing.

[1276] Topical application: In the present description and unless otherwise indicated, the term “topical application” means to apply or spray the composition of the present invention onto the surface of the skin.

[1277] Cosmetic compositions of the invention may comprise other active agents of cosmetic interest especially the conventional agents for anti-ageing compositions especially those chosen from hyaluronic acid, ascorbic acid, retinol, alpha-hydroxy acids (AHAs) and/or ursolic acid.

[1278] In one example, the cosmetic composition of the invention may contain at least one of the following agents:
[1279] an agent that stimulates the flbronectin synthesis, in particular a maize extract;
[1280] an agent that stimulates the laminin synthesis, in particular an extract of malt;
[1281] an agent that stimulates the expression and/or the activity of hyaluronan synthase 2 (HAS2);
[1282] an agent that stimulates the synthesis of lysyl oxidase-like (LOXL);
[1283] an agent that stimulates the synthesis of intracellular ATP;
[1284] an agent that protects the degradation of FGF2.

[1285] GFR-binding compounds, or functionalised bioactive carrier in their cosmetic applications, optionally in the form of cosmetic compositions, are particularly suitable for protecting the skin against skin ageing that is natural and/or caused by climatic and environmental factors, especially the wind, pollution, UV rays, cigarette smoke and/or physiological factors, especially stress.

[1286] In one aspect, the present disclosure provides a cosmetic care or treatment method, for a subject having need thereof, said method comprising the application, preferably topical application, or administration of a cosmetic composition as defined herein.

[1287] In one example, the subject who has need of the cosmetic care of the invention is a subject chosen from a population having an average age of more than 30 years old, preferably of more than 40 years old, more preferably of more than 50 years old.

### XIX. Hair Treatment Applications

[1288] Hair is subjected to a wide variety of severe stress, for example as a result of environmental influences, such as UV irradiation or weathering, mechanical stresses, such as combing, or various hair treatments, such as washing, drying with hot air, bleaching, coloring, perming, etc., which can lead to hair damage. Said damage includes e.g. dryness, reduced elasticity, brittleness, split ends, dullness, matt appearance, reduced fullness, rough surface and reduced mechanical strength. This leads to impaired combability, reduced shine, increased electrostatic charging, tendency to break and may go as far as hair loss in some cases. The hair wearer feels uneasy. Hair loss may be due to aging as through time, hair naturally tends to gradually thin. Other causes of hair loss include hormonal factors, medical conditions and medications. The most common cause of hair loss is a hereditary condition called male-pattern baldness or female-pattern baldness. In genetically susceptible people, certain sex hormones trigger a particular pattern of permanent hair loss. Most common in men, this type of hair thinning can begin as early as puberty. Hormonal changes and imbalances can also cause temporary hair loss. This could be due to pregnancy, childbirth, discontinuation of birth control pills or the onset of menopause. A variety of medical conditions may also cause hair loss, including, but not limited to, thyroid problems, alopecia areata, and scalp infections. Hair loss may further be caused by drugs used to treat Arthritis, depression, heart problems, high blood pressure, etc.

[1289] Medical or cosmetic applications which may result from the mediation of type I and II growth factor receptors by a (modified) GFR-binding compound, functionalised bioactive carrier or composition of the invention also include enhancing/promoting hair growth and/or preventing and/or decreasing or suppressing hair loss. Without wishing to be bound to any specific theories, this effect is thought to be achieved through activation of dormant (or quiescent) hair follicle stem cells by displacement of natural binding ligands such as BMP-6, strongly bound to their growth factor receptors.

[1290] In one example, a (modified) GFR-binding compound, or functionalised bioactive carrier as defined herein may be a hair growth-promoting or a hair loss-regulator/modulator/inhibitor compound or functionalised bioactive carrier which has demonstrated the ability to enhance/promote hair growth and/or prevent and/or decrease or suppress hair loss in vitro, ex-vivo and/or in vivo.

[1291] In one aspect, the present disclosure provides a hair cosmetic or functional food composition comprising at least one (modified) GFR-binding compound, or at least one functionalised bioactive carrier, all as defined herein, in combination with at least one suitable hair-cosmetic carrier, preferably suitable for topical application.

[1292] Topical applications may be performed by any end-user by, for instance, applying and optionally rubbing the hair scalp with a hair cosmetic composition of the invention e.g. formulated as a shampoo or conditioner.

[1293] In one aspect, the present disclosure provides a hair medical (pharmaceutical, prophylactic, diagnostic, imaging, etc.) composition comprising at least one (modified) GFR-binding compound, or at least one functionalised bioactive carrier, all as defined herein, in combination with at least one suitable hair-medical carrier, preferably suitable for scalp injection application.

[1294] Scalp injection applications may preferably be performed by experienced end-users such as dermatologists and/or surgeons, preferably in clinical/medical settings in clean or sterile environment. Several subcutaneous injections may be carried out under the scalp where needed and renewed every few weeks, preferably months if required.

[1295] In one aspect, the present invention discloses a use of a (modified) GFR-binding compound, or a functionalised bioactive carrier as defined herein, in hair cosmetics or as a functional food. In one aspect, the present invention discloses a (modified) GFR-binding compound, or a functionalised bioactive carrier as defined herein, for use in a hair medical method.

[1296] In one aspect, the present disclosure provides a use of a (modified) GFR-binding compound, a functionalised bioactive carrier, or a hair cosmetic or functional food composition, all as defined herein, as a hair growth-promoting agent or hair-loss-preventing agent. For example, in certain embodiments, the (modified) GFR-binding compound, or functionalised bioactive carrier as defined herein, is used as active ingredient to promote (enhance, regulate, modulate, improve) hair growth and/or prevent or treat hair-loss and/or embellish hair in a hair cosmetic composition or a functional food composition. In one aspect, the present disclosure provides a (modified) GFR-binding compound, a functionalised bioactive carrier, or a hair medical composition, all as defined herein, as a hair growth-promoting agent or hair-loss-preventing agent. For example, in certain embodiments, the (modified) GFR-binding compound, or functionalised bioactive carrier as defined herein, is used as active ingredient to promote (enhance, regulate, modulate, improve) hair growth and/or prevent or treat hair-loss and/or embellish hair in a hair medical composition.

[1297] In one aspect, the present disclosure provides a use of a (modified) GFR-binding compound, a functionalised bioactive carrier, or a hair cosmetic composition, all as defined herein, in a method of hair cosmetic care, wherein said method of hair cosmetic care comprises the administration or the application of between about 0.0001 to about 100 μg per day, more specifically between about 0.001 to about 10 μg per day or between about 0.0001 to about 100 μg per day of said compound, bioactive carrier or composition.

[1298] In one example, a (modified) GFR-binding compound, functionalised bioactive carrier, or hair-cosmetic composition, all as defined herein, may be combined/mixed with mesenchymal stem cells and/or follicle progenitor cells prior to be administered to, contacted with, or implanted into a mammal (preferably a human) to promote hair growth and/or prevent and/or decrease or suppress hair-loss.

[1299] In one example, the administration comprises the oral administration of a tablet, capsule, pill, powder, sustained release formulations, solution or suspension containing said (modified) GFR-binding compound, functionalised bioactive carrier, or hair-cosmetic composition, all as defined herein.

[1300] Suitable as forms of hair cosmetic compositions for implementing embodiments of the invention include hair rinse, hair mask, shampoo, conditioner, hair spray, hair foam, hair mousse, hair gel, hair tonic, hair setting composition, end fluid, neutralizer for permanent waves, hair colorant and bleach or hot-oil treatment.

[1301] Suitable formulations for use in hair treatment include, for instance, the ones described in US patent application No. 2011/0312884 A1, which is hereby incorporated by reference.

[1302] In one example, said hair cosmetic use of the invention is a non-therapeutic hair cosmetic use.

[1303] Hair cosmetic compositions of the invention may comprise at least one other active agent of hair cosmetic interest especially the conventional agents for hair treatment compositions especially at least one of the following agents:
[1304] anionic surfactants such as soaps, alkylsulfonates, alkylbenzenesulfonates, olefinsulfonates, alkyl ether sulfonates, glycerol ether sulfonates, methyl ester sulfonates, sulfo fatty acids, alkyl sulfates, fatty alcohol ether sulfates, glycerol ether sulfates, fatty acid ether sulfates, hydroxyl mixed ether sulfates, monoglyceride (ether) sulfates, fatty acid amide (ether) sulfates, mono- and dialkyl sulfosuccinates, mono- and dialkyl sulfosuccinamates, sulfotriglycerides, amide soaps, ethercarboxylic acids and salts thereof, fatty acid isethionates, fatty acid sarcosinates, fatty acid taurides, N-acylaminoacids, such as, for example, acyl lactylates, acyl tartrates, acyl glutamates and acyl aspartates, alkyl oligoglucosidesulfat. Suitable soaps are e.g. alkali metal, alkaline earth metal and ammonium salts of fatty acids, such as potassium stearate. Suitable olefinsulfonates may be present as alkali metal, alkaline earth metal, ammonium, alkylammonium, alkanolammonium or glucammonium salts. Preferably, the olefinsulfonates are present as sodium salts. The hydrolyzed alpha-olefinsulfonation product, i.e. the alpha-olefinsulfonates, are composed of ca. 60% by weight of alkanesulfonates and ca. 40% by weight of hydroxyalkanesulfonates; of these, about 80 to 85% by weight are monosulfonates and 15 to 20% by weight are disulfonates. Preferred methyl ester sulfonates (MES) are obtained by sulfonation of the fatty acid methyl esters of plant or animal fats or oils. Preference is given to methyl ester sulfonates from plant fats and oils, e.g. from rapeseed oil, sunflower oil, soya oil, palm oil, coconut fat, etc. Preferred sarcosinates are sodium lauroyl sarcosinate or sodium stearoyl sarcosinate. Preferred protein fatty acid condensates are plant products based on wheat. Preferred alkyl phosphates are mono- and diphosphoric acid alkyl esters.
[1305] Fatty alcohols having preferably 8 to 30 carbon atoms, particularly preferably 10 to 22 carbon atoms, in particular 12 to 20 carbon atoms. The hydrocarbon radical of the fatty alcohols can in principle be linear or branched, saturated or unsaturated. Typical examples of fatty alcohols are caproic alcohol, caprylic alcohol, 2-ethylhexyl alcohol, capric alcohol, lauryl alcohol, isotridecyl alcohol, myristyl alcohol, cetyl alcohol, palmoleyl alcohol, stearyl alcohol, isostearyl alcohol, oleyl alcohol, elaidyl alcohol, petroselinyl alcohol, linolyl alcohol, linolenyl alcohol, elaeostearyl alcohol and mixtures thereof. Preferred mixtures of the fatty alcohols are based on technical-grade alcohol mixtures which are produced e.g. during the high-pressure hydrogenation of technical-grade methyl esters based on fats and oils or during the hydrogenation of aldehydes from the oxo synthesis or during the dimerization of unsaturated fatty alcohols.
[1306] phospholipids, nonionic surfactants, amphoteric surfactants, cationic surfactants and mixtures thereof. Phospholipids are phosphorus-containing amphiphilic lipids such as phosphatidylserines, sphingomyelins and plasmalogens. Also suitable are the so-called lysophospholipids in which a fatty acid radical has been separated off from the phospholipid molecule to give an OH group, e.g. with the help of a phospholipase. The nonionic surfactants include, for example: fatty alcohol polyoxyalkylene esters, for example lauryl alcohol polyoxyethylene acetate, alkyl polyoxyalkylene ethers which are derived from low molecular weight C1-C6-alcohols or from C7-C30-fatty alcohols. Here, the ether component can be derived from ethylene oxide units, propylene oxide units, 1,2-butylene oxide units, 1,4-butylene oxide units and random copolymers and block copolymers thereof. These include specifically fatty alcohol alkoxylates and oxo alcohol alkoxylates such as isotridecyl alcohol and oleyl alcohol polyoxyethylene ethers, alkylaryl alcohol polyoxyethylene ethers, e.g. octylphenol polyoxyethylene ethers, alkoxylated animal and/or plant fats and/or oils, for example corn oil ethoxylates, castor oil ethoxylates, tallow fat ethoxylates, glycerol esters, such as, for example, glycerol monostearate, alkylphenol alkoxylates, such as, for example, ethoxylated isooctyl-, octyl- or nonylphenol, tributylphenol polyoxyethylene ether, fatty amine alkoxylates, fatty acid amide and fatty acid diethanolamide alkoxylates, in particular ethoxylates thereof, sugar surfactants, sorbitol esters, such as, for example, sorbitan fatty acid esters (sorbitan monooleate, sorbitan tristearate), polyoxyethylene sorbitan fatty acid esters, alkyl polyglycosides, N-alkylgluconamides, alkyl methyl sulfoxides, alkyl dimethyl phosphine oxides, such as, for example, tetradecyl dimethyl phosphine oxide. Suitable amphoteric surfactants are e.g. alkylbetaines, alkylamidopropylbetaines, alkylsulfobetaines, alkyl glycinates, alkyl carboxyglycinates, alkyl amphoacetates or propionates, alkyl amphodiacetates or dipropionates. For example, it is possible to use cocodimethylsulfopropylbetaine, laurylbetaine, cocamidopropylbetaine, sodium cocamphopropionate or tetradecyldimethylamine oxide. The cationic surfactants include, for example, quaternized ammonium compounds, in particular alkyltrimethylammonium and dialkyldimethylammonium halides and alkyl sulfates, and pyridine and imidazoline derivatives, in particular alkylpyridinium halides. For example, behenyl or cetyltrimethylammonium chloride may suitably be used.
[1307] an antidandruff active ingredient. Suitable antidandruff active ingredients are piroctone olamine (1-hydroxy-4-methyl-6-(2,4,4-trimethylpentyl)-2-(1H)-pyridinonemonoethanolamine salt), crinipan AD (climbazole), ketoconazole, elubiol, selenium disulfide, sulfur colloidal, sulfur polyethylene glycol sorbitan monooleate, sulfur ricinol polyethoxylate, sulfur tar distillates, salicylic acid (or in combination with hexachlorophene), undecylenic acid monoethanolamide sulfosuccinate Na salt, lamepon UD (protein-undecylenic acid condensate), zinc pyrithione, aluminum pyrithione and magnesium pyrithione/dipyrithione magnesium sulfate.
[1308] proteins and protein derivatives, cosmetically active polymers, hair pigmentation agents, bleaches, keratin-hardening substances, antimicrobial active ingredients, light filter active ingredients, repellent active ingredients, hyperemic substances, antiphlogistics, keratinizing substances, antioxidative active ingredient and/or free radical active ingredients, sebostatic active ingredients, plant extracts, antierythematous or antiallergic active ingredients and mixtures thereof.
[1309] a cosmetically acceptable auxiliary such as oil bodies, fats, waxes, pearlescent waxes, propellants, consistency regulators, thickeners, superfatting agents, stabilizers, polymers, silicone compounds, UV stabilizers, antioxidants, film formers, swelling agents, hydrotropes, solubilizers, preservatives, perfume oils, dyes, etc. and mixtures thereof.

[1310] In one aspect, the invention discloses a hair cosmetic care or treatment method, for a subject having need thereof, said method comprising the application, preferably topical or scalp injection applications, or administration of a hair cosmetic composition according to the present invention.

[1311] In one aspect, the present invention discloses a hair cosmetic care or treatment method in which the (modified) GFR-binding compound, functionalised bioactive carrier, or hair cosmetic composition, all as defined herein, is used to stimulate/activate hair follicle stem cells.

[1312] In one example, the subject who has need of the hair cosmetic care of the invention is a subject chosen from a population having an average age of more than 30 years old, preferably of more than 40 years old, more preferably of more than 50 years old.

### XX. Diagnostic Methods

[1313] In one aspect, the present disclosure provides a (modified) GFR-binding compound, a functionalised bioactive carrier or a medical or cosmetic composition as defined herein for use in a diagnostic method of a disease or condition which may require mesenchymal stem cells or progenitor cells (at any stage of differentiation thereof) to be differentiated.

[1314] In one aspect, the present disclosure provides a diagnostic method for diagnosing of a disease or condition which may require mesenchymal stem cells or progenitor cells (at any stage of differentiation thereof) to be differentiated comprising the provision of a (modified) GFR-binding compound or a pharmaceutical association, combination or composition as defined herein, and the contacting or administration of said GFR-binding compound or pharmaceutical association, combination or composition with a body part of a subject to be diagnosed.

[1315] A method for the diagnosis of a disease or condition which may require mesenchymal stem cells or progenitor cells (at any stage of differentiation thereof) to be differentiated in a patient, comprising obtaining a biological sample from a patient and apply fluorescent and/or radiolabeled (modified) GFR binding compounds, wherein high localisation of these compounds indicates a disease or condition which may require mesenchymal stem cells or progenitor cells (at any stage of differentiation thereof) to be differentiated in the patient.

### XXI. Screening Methods

[1316] In one aspect, the present disclosure provides a screening method for selecting a peptide or a peptidomimetic having the ability to induce tissue regeneration and cell differentiation.

[1317] In one aspect, the present disclosure provides a screening method for selecting a peptide or peptidomimetic having the ability to induce tissue regeneration and cell differentiation, the method comprising the steps of (a) providing a molecular model of the following 3D structure coordinates of PEPREF and (b) identifying a candidate analog having a RMSD value of 2.45 Å or less. In particular example, step (b) is performed using the method of RMSD calculation as already defined herein

[1318] In certain embodiments, the method can be performed using a computer (i.e., in silico). In some embodiments, the method can include providing the three-dimensional models of a plurality of peptides or peptidomimetics (i.e., a library or database of peptides or peptidomimetics) and screening each compound individually. Thus, in one aspect, the method of screening peptides or peptidomimetics generally includes computationally evaluating the potential of a selected peptide(s) or peptidomimetic(s) to structurally match with the computational model of the three-dimensional structure of PEPREF. For example, this method can include the steps of (a) employing a computational approach to perform a fitting operation between the selected peptide(s) or peptidomimetic(s) and the three-dimensional structure of PEPREF; and (b) analysing the results of the fitting operation to quantify the three-dimensional structural similarities between the peptide(s) or peptidomimetic(s) and PEPREF using the RMSD procedure as defined herein.

[1319] In one aspect, the present disclosure provides a method of producing a peptide or peptidomimetic having the ability to induce tissue regeneration and cell differentiation, the method comprising the steps of (a) providing a molecular model of the following 3D structure coordinates of PEPREF; b) identifying a candidate analog having a RMSD as defined herein of 2.45 Å or less (in particular 2, more particularly 1.79); and (c) producing the candidate analog identified in step (b). In one particular example, said method further comprising the step of determining whether the compound produced in step (c) has a cell differentiation and tissue regeneration activity. In one particular example, steps (a) and (b) are performed by means of an electronic processor. In certain embodiments, step (a) comprises storing a representation of the atomic co-ordinates of PEPREF in a computer memory.

[1320] In one aspect, the present disclosure provides a method of producing a peptide or peptidomimetic having the ability to induce tissue regeneration and cell differentiation, the method comprising the steps of: (a) providing in a computer memory atomic X-ray crystallographic co-ordinates of PEPREF; (b) generating with a processor a molecular model having a three-dimensional shape of PEPREF; (c) identifying a candidate analog having a RMSD of 2.45 Å or less (in particular 2, more particularly 1.79); (d) producing the candidate analog identified in step (c); and (e) determining whether the candidate analog produced in step (d) induces tissue regeneration and cell differentiation. In one particular example, said method comprises the additional step of producing the peptide or peptidomimetic in a commercially useful quantity.

[1321] In one aspect, the present disclosure provides a computer system comprising: (a) a memory comprising atomic X-ray crystallographic coordinates of PEPREF; and (b) a processor in electrical communication with the memory; wherein the processor generates a molecular model having a three dimensional shape representative of PEPREF. In one particular example, said coordinates are stored on a computer readable diskette.

### XXII. Kits

[1322] The present disclosure provides a variety of kits for conveniently and/or effectively carrying out methods and uses of the present invention. Typically, kits will comprise sufficient amounts and/or numbers of components to allow a user to perform multiple treatments of a subject(s) and/or to perform multiple experiments.

[1323] In one aspect, the present disclosure provides kits for pharmaceutical, dermatological, prophylactic, diagnostic, imaging or cosmetic functional association, combination or composition production, comprising at least one (modified) GFR-binding compound as defined herein, at least one bioactive carrier (such as a biomaterial or medical device) as defined herein, optionally a pharmaceutically, dermatologically, prophylactically, diagnostically, imaging or cosmetically acceptable excipient, carrier, vehicle or solvent, each and every one of them provided in an amount effective to produce a pharmaceutical, dermatological, prophylactic, diagnostic, imaging or cosmetic association to induce cell differentiation, promote tissue regeneration or protect a subject from a disease, disorder or condition as defined herein, when administered in-vitro, ex-vivo or in-vivo to a mesenchymal stem cell, progenitor cell (at any stage of differentiation thereof) or to a subject carrying such a cell, and packaging and instructions.

[1324] Suitable as solvents for use in kits of the invention include physiologically acceptable solvents, PBS, filtered and deionised water such as Milli-Q® water, alpha-MEM, DMEM and/or IMDM. All physiologically acceptable solvents suitable for implementing embodiments of the present invention are preferably deoxygenated before use.

[1325] In one example, said kit further comprises an administration device. In one example, said administration device is a dispensing device such as a syringe.

[1326] In one example, said kit comprises a first container containing a (modified) GFR-binding compound as defined herein and a second container containing a bioactive carrier such as a biomaterial or a medical device and a third container containing stem cells, preferably MSCs.

[1327] In one preferred example, a kit of the invention comprises (i) a first, preferably suitable, sterile, individual, container containing a (modified) GFR-binding compound as defined herein preferably in lyophilised form, (ii) a second, preferably suitable, sterile, individual, container containing a physiologically acceptable, sterile liquid (e.g. a solvent), (iii) a third, preferably suitable, sterile, individual, container containing a conventional biomaterial/medical device such as an orthopaedic or dental implant and, (iv) optionally, a fourth, preferably suitable, sterile, individual, container containing suitable stem cells, in particular adult stem cells or mesenchymal stem cells. In practice, said kit may be provided to an end-user (e.g. a surgeon). Said end-user may firstly pour the content of the second container into the first container, optionally provide a form of agitation to solubilise or suspend the (modified) GFR-binding compound of the invention in the physiologically acceptable, sterile liquid, then pour (or immerse) the resulting solution or suspension in the third container containing the conventional biomaterial/medical device (optionally with prior activation of said biomaterial/medical device if required), optionally followed by the contacting of the resulting functionalised biomaterial/medical device with the content of the fourth container containing the stem cells prior to placement onto or into a patient's body, preferably at a defect site.

[1328] Alternatively, a kit of the invention may comprise a first, preferably suitable, sterile, individual, container containing an already functionalised biomaterial/medical device e.g. a biomaterial/medical device functioanlised with a (modified) GFR-binding compound as defined herein, optionally in a physiologically acceptable liquid, and a second, preferably suitable, sterile, individual, container containing suitable stem cells, in particular adult stem cells or mesenchymal stem cells. In practice, an end-user such as a surgeon may apply the stem cells onto the coated biomaterial by pouring the content of the second container into the first containing (and optionally apply a form of agitation) prior to placement onto or into a patient's body, preferably at a defect site.

[1329] In one particular example, said kits of the invention may suitably be provided in the form of a sterile packaging.

[1330] For example, in certain embodiments, said kits of the invention comprises more than 2, between 2 and 25, between 2 and 15, or between 2 and 10 of (modified) GFR-binding compound as defined herein, and more than 2, between 2 and 25, between 2 and 15, or between 2 and 10 (modified) GFR-binding compound as defined herein.

[1331] In one example, each (modified) GFR-binding compound and each conventional or functionalised bioactive carrier is conditioned in distinct and separated compartments, in lyophilised form, in solution or in suspension in a pharmaceutically dermatologically, prophylactically, diagnostically, imaging or cosmetically acceptable excipient, carrier or vehicle.

[1332] In one aspect, the invention discloses kit-of-parts comprising a bioactive carrier and a (modified) GFR-binding compound both as defined herein for uses and methods as defined herein.

### XXIII. Sequence Listing

[1333] Examples of (modified) GFR-binding compounds as defined herein are listed in the appended sequence listing which forms an integral part of the present application.

[1334] (Modified) GFR-binding compounds, functionalised bioactive carriers and compositions, all as defined in the present disclosure, has been found to lead to multiple and distinct advantages in terms of cell differentiation induction and tissue regeneration.

[1335] As supported by the examples of the present application, (modified) GFR-binding compounds, functionalised bioactive carriers or compositions thereof, all as defined herein, display advantages over (modified) GFR-binding compounds, functionalised bioactive carrier or compositions that do not contain it, such as:
[1336] Enhanced and/or more practical and/or more efficient and/or more cost-effective and/or more adapted to the end-user needs and/or tissue regeneration in mammals, preferably humans;
[1337] Modifying and/or enhancing and/or modulating and/or promoting and/or activating bone and/or cartilage and/or vascular and/or muscle and/or neuronal and/or blood and/or retinal and/or organs such as kidneys and lung and/or ligament/tendon and/or hair follicle and/or skin and/or adipose, tissue regeneration;
[1338] Modifying and/or enhancing and/or modulating and/or promoting and/or activating embryonic patterning;
[1339] Modifying and/or enhancing and/or modulating and/or promoting and/or activating cellular migration and wound healing;
[1340] Modifying and/or enhancing and/or modulating and/or promoting and/or activating the closure of any type of living tissue;
[1341] Modifying and/or enhancing and/or modulating and/or promoting and/or activating female fertility;
[1342] Preventing and/or suppressing or avoiding or reducing tissue degeneration in mammals, preferably humans;
[1343] Preventing and/or suppressing or avoiding or reducing bone and/or cartilage and/or vascular and/or muscle and/or neuronal and/or blood and/or retinal and/or organs such as kidneys or lungs and/or ligament/tendon and/or hair follicle and/or skin and/or adipose, tissue degeneration;
[1344] Preventing and/or suppressing or avoiding or reducing embryonic mispatterning;
[1345] Preventing and/or suppressing or avoiding or reducing cellular immobilisation and wound formation and/or progression;
[1346] Preventing and/or suppressing or avoiding or reducing the misclosure of any type of living tissue;
[1347] Preventing and/or suppressing or avoiding or reducing female infertility;
[1348] Preventing and/or suppressing or avoiding or reducing hair-loss;
[1349] Preventing/treating alopecia areata, alopecia totalis, alopecia universalis, androgenic alopecia (male pattern baldness), telogen effluvium, anagen effluvium or chemotherapy-induced alopecia;
[1350] Modifying and/or enhancing and/or modulating and/or promoting and/or activating the osteogenicity, and/or the chondrogenecity, and/or the myogenecity, and/or the endothelization and vascularization ability, and/or hair growth ability, and/or the wound healing ability, and/or the skin repair ability, and/or the tissue defect closure ability, and/or lung tissue regeneration ability, and/or renal tissue regeneration ability, and/or the neuroregeneration ability, and/or the ligament/tendon regeneration ability, and/or the female fertility ability, of a biomaterial which may be useful in the manufacturing of medical devices;
[1351] Modifying and/or enhancing and/or activating anti-ageing/anti-wrinkle effects/properties in cosmetic products;
[1352] Modifying and/or enhancing and/or activating hair growth effects/properties in pharmaceutical or cosmetic products;
[1353] Modifying and/or enhancing and/or modulating and/or promoting and/or inducing and/or activating stem cells, preferably adult stem cells, more preferably mesenchymal stem cells, commitment and/or differentiation in a specific lineage of cells;
[1354] Modifying and/or enhancing and/or modulating and/or promoting and/or inducing and/or activating progenitor cells differentiation and/or maturation.
[1355] Obtaining/producing functional differentiated cells;
[1356] Obtaining/producing differentiated cells with modified and/or improved functionality and/or physiological activity;
[1357] Increasing amount of osteoblast cells whilst (highly) reducing bone resorption activity;
[1358] Increasing bone mineralization speed, rate and surface;
[1359] Having the ability to decouple bone resorption from bone formation;
[1360] Achieving efficient bone strengthening in osteoporosis patients;
[1361] Reduced or low or substantially inexistent organ toxicity, in particular in the liver.

[1362] For example, in certain embodiments, (modified) GFR-binding compounds, functionalised bioactive carriers, or compositions according to the present disclosure in which PEP1 is a peptide selected from the group consisting of SAIS (SEQ ID NO: 84116), NAIS (SEQ ID NO: 84113), SATS (SEQ ID NO: 84117) and SPIS (SEQ ID NO: 84120), in which PEP2 is a peptide selected from the group consisting of LKNYQ (SEQ ID NO: 84230), LKKYR (SEQ ID NO: 84229), LRKHR (SEQ ID NO: 84233) and LKYHY (SEQ ID NO: 84232), and in which the RMSD is 2.45 Å or less, have been found to lead to unexpectedly fast and qualitatively and quantitatively important osteoinduction, producing highly functional differentiated cells.

[1363] For example, in certain embodiments, (modified) GFR-binding compounds, functionalised bioactive carriers, or compositions according to the present disclosure in which PEP1 is a peptide selected from the group consisting of SAIS (SEQ ID NO: 84116), NAIS (SEQ ID NO: 84113), SPIS (SEQ ID NO: 84120), EPLP (SEQ ID NO: 84110), and EPLT (SEQ ID NO: 84111), in which PEP2 is a peptide selected from the group consisting of LKNYQ (SEQ ID NO: 84230), LKKYR (SEQ ID NO: 84229), YKQYE (SEQ ID NO: 84398) and EQLSN (SEQ ID NO: 84178), and in which the RMSD is 2.45 Å or less, have been found to lead to unexpectedly fast and qualitatively and quantitatively important chondroinduction, producing highly functional differentiated cells.

[1364] For example, in certain embodiments, (modified) GFR-binding compounds, functionalised bioactive carriers, or compositions according to the present disclosure in which PEP1 is a peptide selected from the group consisting of SNIT (SEQ ID NO: 84118), RPVQ (SEQ ID NO: 84114) and RSVK (SEQ ID NO: 84115), in which PEP2 is a peptide selected from the group consisting of IGEMS (SEQ ID NO: 84209), LGEMS (SEQ ID NO: 84228), KEVQV (SEQ ID NO: 84210) and KKATV (SEQ ID NO: 84212), and in which the RMSD is 2.45 Å or less, have been found to lead to unexpectedly fast and qualitatively and quantitatively important vascular tissue induction, producing highly functional differentiated cells.

[1365] For example, in certain embodiments, (modified) GFR-binding compounds, functionalised bioactive carriers, or compositions according to the present disclosure in which PEP1 is selected from the group consisting of NAIS (SEQ ID NO: 84113), SPIS (SEQ ID NO: 84120) and EPIS (SEQ ID NO: 84109), wherein PEP2 is selected from the group consisting of LKKYR (SEQ ID NO: 84229), LKYHY (SEQ ID NO: 84232), YKQYE (SEQ ID NO: 84398) and KFKYE (SEQ ID NO: 84211), and in which the RMSD is 2.45 Å or less, have been found to lead to unexpectedly fast and qualitatively and quantitatively important neuronal induction, producing highly functional differentiated cells.

[1366] For example, in certain embodiments, (modified) GFR-binding compounds, functionalised bioactive carriers, or compositions according to the present disclosure in which PEP1 is SPIN (SEQ ID NO: 84119), in which PEP2 is YGKIP (SEQ ID NO: 84397), and in which the RMSD is 2.45 Å or less, have been found to lead to unexpectedly fast and qualitatively and quantitatively important eye-retina cells induction, producing highly functional differentiated cells.

[1367] For example, in certain embodiments, (modified) GFR-binding compounds, functionalised bioactive carriers, or compositions according to the present disclosure in which PEP1 is SPIN (SEQ ID NO: 84119), and in which PEP2 is selected from the group consisting of is YGKIP (SEQ ID NO: 84397), and in which the RMSD is 2.45 Å or less, have been found to lead to unexpectedly fast and qualitatively and quantitatively important renal cells induction, producing highly functional differentiated cells.

[1368] For example, in certain embodiments, (modified) GFR-binding compounds, functionalised bioactive carriers, or compositions according to the present disclosure in which PEP1 is a peptide selected from the group consisting of NAIS (SEQ ID NO: 84113), SPIS (SEQ ID NO: 84120), EPLP (SEQ ID NO: 84110) and EPLT (SEQ ID NO: 84111), in which PEP2 is selected from the group consisting of LKKYR (SEQ ID NO: 84229), YKQYE (SEQ ID NO: 84398) and EQLSN (SEQ ID NO: 84178), and in which the RMSD is 2.45 Å or less, have been found to lead to unexpectedly fast and qualitatively and quantitatively important tenocytes and/or fibrous cells induction, producing highly functional differentiated cells.

[1369] For example, in certain embodiments, (modified) GFR-binding compounds, functionalised bioactive carriers, or compositions according to the present disclosure in which PEP1 is selected from the group consisting of SNIT (SEQ ID NO: 84118), RPVQ (SEQ ID NO: 84114) and RSVK (SEQ ID NO: 84115), wherein PEP2 is selected from the group consisting of IGEMS (SEQ ID NO: 84209), LGEMS (SEQ ID NO: 84228), KEVQV (SEQ ID NO: 84210) and KKATV (SEQ ID NO: 84212), and in which the RMSD is 2.45 Å or less, have been found to lead to unexpectedly fast and qualitatively and quantitatively important wound healing induction, producing highly functional differentiated cells.

[1370] For example, in certain embodiments, (modified) GFR-binding compounds, functionalised bioactive carriers, or compositions according to the present disclosure in which PEP1 is a peptide selected from the group consisting of EPLP (SEQ ID NO: 84110), EPLT (SEQ ID NO: 84111), RSVK (SEQ ID NO: 84115) and RPVQ (SEQ ID NO: 84114), in which PEP2 is a peptide selected from the group consisting of EQLSN (SEQ ID NO: 84178), IGEMS (SEQ ID NO: 84209), KEVQV (SEQ ID NO: 84210) and KKATV (SEQ ID NO: 84212), and in which the RMSD is 2.45 Å or less, have been found to lead to unexpectedly fast and qualitatively and quantitatively important skin cells induction, producing highly functional differentiated cells.

[1371] For example, in certain embodiments, (modified) GFR-binding compounds, functionalised bioactive carriers, or compositions according to the present disclosure in which PEP1 is SSLS (SEQ ID NO: 84121), in which PEP2 is LKVYP (SEQ ID NO: 84231), and in which the RMSD is 2.45 Å or less, have been found to lead to unexpectedly fast and qualitatively and quantitatively important hair follicle cells induction, producing highly functional differentiated cells.

[1372] For example, in certain embodiments, (modified) GFR-binding compounds, functionalised bioactive carriers, or compositions according to the present disclosure in which PEP1 is NAIS (SEQ ID NO: 84113), in which PEP2 is LKKYR (SEQ ID NO: 84229), and in which the RMSD is 2.45 Å or less, have been found to lead to unexpectedly fast and qualitatively and quantitatively important ovarian cells induction, producing highly functional differentiated cells.

[1373] For example, in certain embodiments, (modified) GFR-binding compounds, functionalised bioactive carriers, or compositions according to the present disclosure in which PEP1 is selected from the group consisting of NAIS (SEQ ID NO: 84113), SATS (SEQ ID NO: 84117), SPIS (SEQ ID NO: 84120), EPIS (SEQ ID NO: 84109) and SPIN (SEQ ID NO: 84119), in which PEP2 is selected from the group consisting of LKKYR (SEQ ID NO: 84229), LRKHR (SEQ ID NO: 84233), LKYHY (SEQ ID NO: 84232), KFKYE (SEQ ID NO: 84211) and YGKIP (SEQ ID NO: 84397), and in which the RMSD is 2.45 Å or less, have been found to lead to unexpectedly fast and qualitatively and quantitatively important lung cells induction, producing highly functional differentiated cells.

[1374] For example, in certain embodiments, (modified) GFR-binding compounds, functionalised bioactive carriers, or compositions according to the present disclosure in which PEP1 is selected from the group consisting of RSVK (SEQ ID NO: 84115) or RPVQ (SEQ ID NO: 84114), in which PEP2 is selected from the group consisting of KEVQV (SEQ ID NO: 84210) or KKATV (SEQ ID NO: 84212), and in which the RMSD is 2.45 Å or less, have been found to lead to unexpectedly fast and qualitatively and quantitatively important muscle cells induction, producing highly functional differentiated cells.

[1375] For example, in certain embodiments, (modified) GFR-binding compounds, functionalised bioactive carriers, or compositions according to the present disclosure in which PEP1 is SNIT (SEQ ID NO: 84118), in which PEP2 is IGEMS (SEQ ID NO: 84209) or LGEMS (SEQ ID NO: 84228), and in which the RMSD is 2.45 Å or less, have been found to lead to unexpectedly fast and qualitatively and quantitatively important blood cells induction, producing highly functional differentiated cells.

[1376] For example, in certain embodiments, (modified) GFR-binding compounds, functionalised bioactive carriers, or compositions according to the present disclosure in which PEP1 is SAIS (SEQ ID NO: 84116) or NAIS (SEQ ID NO: 84113), in which PEP2 is LKNYQ (SEQ ID NO: 84230) or LKKYR (SEQ ID NO: 84229), and in which the RMSD is 2.45 Å or less, have been found to lead to unexpectedly fast and qualitatively and quantitatively important adipocytes induction, producing highly functional differentiated cells.

[1377] For example, in certain embodiments, microenvironments comprising a plurality of structurally distinct/different (modified) GFR-binding compounds, functionalised bioactive carriers, or compositions according to the present disclosure in which each PEP1 is a peptide which may be selected from the group consisting of SAIS (SEQ ID NO: 84116), SSLS (SEQ ID NO: 84121), NAIS (SEQ ID NO: 84113), SATS (SEQ ID NO: 84117), SPIS (SEQ ID NO: 84120), EPIS (SEQ ID NO: 84109), SPIN (SEQ ID NO: 84119), KPLS (SEQ ID NO: 84112), EPLP (SEQ ID NO: 84110), EPLT (SEQ ID NO: 84111), SNIT (SEQ ID NO: 84118), RSVK (SEQ ID NO: 84115) and RPVQ (SEQ ID NO: 84114), and wherein PEP2 is a peptide selected from the group consisting of LKNYQ (SEQ ID NO: 84230), LKVYP (SEQ ID NO: 84231), LKKYR (SEQ ID NO: 84229), LRKHR (SEQ ID NO: 84233), LKYHY (SEQ ID NO: 84232), KFKYE (SEQ ID NO: 84211), YGKIP (SEQ ID NO: 84397), YKQYE (SEQ ID NO: 84398), DHHKD (SEQ ID NO: 84149), EQLSN (SEQ ID NO: 84178), IGEMS (SEQ ID NO: 84209), LGEMS (SEQ ID NO: 84228), KEVQV (SEQ ID NO: 84210) and KKATV (SEQ ID NO: 84212), and in which the RMSD is 2.45 Å or less, have been found to lead to unexpectedly fast and qualitatively and quantitatively important tissue closure induction, producing highly functional differentiated cells.

[1378] Accordingly, it is possible to achieve tissue (bone, cartilage, vascular, endothelial, blood, neuronal, eye-retina, kidneys, lung, adipose, ligament, tendon, hair follicle, skin, ovary, etc.) regeneration using e.g. orthopedic, dental implants, matrix injections or administrable compositions, efficiently and rapidly thus reducing the costs associated with such treatments, improving and accelerating tissue healing and patient recovery.

[1379] In addition, it has been found that using the compounds, bioactive carrier and compositions of the present disclosure also permits a quasi-complete or complete control over the final chemical structure of the compounds, bioactive carrier and compositions of the present disclosure, thereby avoiding any unwanted (e.g. post-translational) modifications and unpredicted short half-life and quick metabolization.

[1380] Remarkably, it has also been found that using the compounds, bioactive carrier and compositions of the present disclosure allows for reduction (in most cases, important reduction) of the administered doses to provide a beneficial treatment to a patient in comparison with known technologies, thus decreasing or eliminating the risks of immune responses and reduce or eliminate drug/treatment toxicity.

[1381] It is another aspect of the present invention to solve the technical problem of providing a tissue regeneration environment/system being completely or at least partially devoid of one or more, preferably a plurality of the disadvantages of known treatments.

[1382] All combinations of any of the above-mentioned features described in all above part of the present description are specifically contemplated by the Applicant to be within the scope of the present invention unless contradictory in context. Examples of such combinations are detailed throughout the present description.

[1383] Further embodiments and advantages will become apparent to a skilled reader in light of the examples provided below.

### EXAMPLES

[1384] Disclosed and described, it is to be understood that this invention is not limited to the particular examples, process steps, and materials disclosed herein as such process steps and materials may vary somewhat. It is also to be understood that the terminology used herein is used for the purpose of describing particular embodiments only and not intended to be limiting since the scope of the present invention will be limited only by the appended claims and equivalents thereof.

[1385] The following Examples are representative of techniques employed by the inventor in carrying out aspects of the present invention. It should be appreciated that while these techniques are exemplary of preferred embodiments for the practice of the invention, those of skill in the art, in light of the present disclosure, will recognize that numerous modifications can be made without departing from the spirit and intended scope of the invention.

[1386] The following starting materials and reagents were used:
[1387] Apatite ceramics (also called apatite or ceramic in the present invention) were synthetized as described in Mater Res. 2004; 7(4): 625-630.
[1388] Titanium was obtained from Goodfellow®.
[1389] Hydrogel (poly(acrylamide-co-acrylic acid) gel) was synthetized as described in Langmuir 2011; 27(22):13635-42.
[1390] PEEK was obtained from Goodfellow®.
[1391] PET (Poly(ethylene terephthalate) was obtained from Goodfellow®.
[1392] Type-I collagen sponge was obtained from Sigma®.
[1393] Hexane was obtained from Sigma®.
[1394] 3-succinimidyl-3-maleimidopropionate (SMP) was obtained from Sigma®.
[1395] DMF was obtained from Sigma®.
[1396] PBS 1× was obtained from Gibco®.
[1397] 3-(ethoxydimethylsilyl)propylamine was obtained from Sigma®.
[1398] Ammonium persulfate was obtained from Biorad®.
[1399] N,N,N′,N′-tetramethylethylenediamine was obtained from Aldrich®.
[1400] Acrylamid was obtained from Merck®.
[1401] Acrylic acid was obtained from Merck®.
[1402] N,N-methylene-bis-acrylamide was obtained from Merck®.
[1403] NaOH was obtained from Aldrich®.
[1404] N,N,N′,N′-tetramethylethylenediamine was obtained from Aldrich®.
[1405] Dimethylaminopropyl-3-ethylcarbodiimide hydrochloride was obtained from Aldrich®.
[1406] N-hydroxysuccinimide was obtained from Aldrich®.
[1407] 2-(N-morpholino)-ethane sulfonic acid was obtained from Aldrich®.
[1408] MilliQ water: is water characterised in terms of resistivity (typically 18.2 MΩ·cm at 25° C.).
[1409] Low glucose Dulbecco's Modified Eagle Medium (DMEM) was obtained from Invitrogen®
[1410] Minimum Essential Medium Eagle without ascorbic acid (αMEM) was obtained from Invitrogen®.
[1411] All of the cell culture experiments were carried out without any serum in the medium for the first 8 hours of culture.
[1412] Osteoblast progenitors or precursor osteoblasts: MC3T3-E1 cells were obtained from ATCC®. These cells were cultured in Alpha-MEM medium supplemented with 10% fetal calf serum (FCS) and 1% penicillin/streptomycin. All cells were used at a low passage number (passage 7), were subconfluently cultured and were seeded at 10⁴ cells/cm² for the purpose of the experiments.
[1413] Human bone marrow Mesenchymal Stem Cells (hMSCs) were obtained from Lonza®. These cells were cultured in Alpha-MEM supplemented with 10% (v/v) FBS and 1% penicillin/streptomycin and incubated in a humidified atmosphere containing 5% (v/v) CO₂ at 37° C. All cells were used at a low passage number (passage 2 to 4), were subconfluently cultured and were seeded at 10⁴ cells/cm² for the purpose of the experiments.
[1414] Human adipose Mesenchymal Stem Cells (haMSCs) were obtained from Lonza®. These cells were cultured in Alpha-MEM supplemented with 10% (v/v) FBS and 1% penicillin/streptomycin and incubated in a humidified atmosphere containing 5% (v/v) CO₂ at 37° C. All cells were used at a low passage number (passage 3 to 4), were subconfluently cultured and were seeded at 10⁴ cells/cm² for the purpose of the experiments.
[1415] Mouse Hair Follicle Stem Cells were isolated and cultured as described in Methods Mol Biol. 2010; 585:401-20.
[1416] Neuron cells are Neuronal Schwann Cells obtained from ATCC®. These cells were cultured in Dulbecco's Modified Eagle's Medium supplemented with 10% (v/v) FBS and 1% penicillin/streptomycin and incubated in a humidified atmosphere containing 5% (v/v) CO₂ at 37° C. All cells were used at a low passage number (passage 6-8), were subconfluently cultured and were seeded at 10⁴ cells/cm² for the purpose of the experiments.
[1417] Human umbilical-vein endothelial cells (HUVECs) were purchased from Promocell®. HUVECs were isolated and grown on gelatin coated culture flasks in a complete HUVEC culture medium (IMDM (Invitrogen, France) supplemented with 20% (v/v) fetal bovine serum (FBS) (PAA, France) and 0.4% (v/v) EC growth supplement/heparin kit (Promocell, France)). Cells were subcultured by using trypsin/EDTA (Invitrogen, France) and maintained in a humidified atmosphere containing 5% CO₂ at 37° C. These cells were used at a passage number 3 to 5 for the purpose of the experiments. HUVECs were seeded on each surface at a density of 50 000 cells/cm².
[1418] Human Mammary Epithelial Cells (HMEC) were obtained from Lonza®. These cells were cultured in Clonetics™ MEGM™ Mammary Epithelial Cell Growth Medium.
[1419] Hematopoietic stem (Bone marrow CD-34+ cells, Lonza). These cells were cultured on HPGM™ Hematopoietic Growth Medium in serum-free culturing.
[1420] CMFDA is a Cell Tracker Green obtained from Invitrogen®.
[1421] DAPI was obtained from Sigma®.
[1422] Fetal bovine serum (FBS) was obtained from Gibco®.
[1423] Penicillin/streptomycin was obtained from Invitrogen®.
[1424] The AlamarBlue® assay was obtained from Molecular Probes®.
[1425] Runx2 antibody was obtained from Abcam®.
[1426] Osterix antibody was obtained from Santa Cruz Biotechnology®.
[1427] Osteopontin antibody was obtained from Abcam®,
[1428] Stro-1 antibody was obtained from Abcam®,
[1429] Sox2 antibody was obtained from Santa Cruz Biotechnology®.
[1430] Sox9 antibody was obtained from Santa Cruz Biotechnology®.
[1431] BMP-6 antibody was obtained from Abcam®,
[1432] CD31 (PECAM-1) antibody was obtained from Invitrogen®,
[1433] Primers for GAP 43: 5′-AAGCTACCACTGATAACTCGCC-3′ (Forward) (SEQ ID NO: 85021) and 5′-CTTCTTTACCCTCATCCTGTCG-3′ (Reverse) (SEQ ID NO: 85022) were obtained from Invitrogen®.
[1434] Primers for Aggrecan: 5′-CACTGTTACCGCCACTTCCC-3′ (Forward) (SEQ ID NO: 85023) and 5′-ACCAGCGGAAGTCCCCTTCG-3′ (Reverse) (SEQ ID NO: 85024) were obtained from Invitrogen®.
[1435] Primers for COMP: 5′-GCTCTGTGGCATACAGGAGA-3′ (Forward) (SEQ ID NO: 85025) and 5′-CATAGAATCGCACCCTGATG-3′ (SEQ ID NO: 85026) were obtained from Invitrogen®.
[1436] Primers for Runx2: 5′-GACGTGCCCAGGCGTATTTC-3′ (Forward) (SEQ ID NO: 85027) and 5′-AAGTCTGGGGTCCGTCAAGG-3′ (Reverse) (SEQ ID NO: 85028) were obtained from Invitrogen®.
[1437] Primers for HPRT: 5′-GCAGTACAGCCCCAAAATGG-3′ (Forward) (SEQ ID NO: 85029) and 5′-ACAAAGTCCGGCCTGTATCCAA-3′ (Reverse) (SEQ ID NO: 85030) were obtained from Invitrogen®.
[1438] All peptides were synthetized using conventional solution and/or solid phase peptide synthesis methods.
[1439] All experiments were carried out with a concentration of compounds of the invention of 400 ng/mL. When cell culture duration extended beyond 24 h, a further 400 ng/mL solution of compounds of the invention was added every 24 h.
[1440] In all the following exemplified peptide sequences, X1 (or Xaa) is a serine (Ser, S).

[1441] The following general methods were used:

[1442] X-Ray Photoelectron Spectroscopy:

[1443] For X-ray photoelectron spectroscopy, AVG Scientific ESCALAB photoelectron spectrometer was used for the surface analysis with a non-monochromatized MgK 1253.6 eV source of 100 W. The area of the analytical X-ray spot on the sample surface was about 200 μm². A 45° insert angle that corresponds to about 5 nm of analyzed depth was used. A flood gun was used for charge compensation. Acquisition of high resolution spectra was performed at constant pass energy of 20 eV.

[1444] Optical Profilometry Probing:

[1445] The surface profiler system is a non-contact optical profiler that measures a wide range of surface heights. The vertical scanning interferometry mode allows for the measurement of rough surfaces and steps of up to several micrometers. This mode was used in order to measure the thickness of the extracellular matrix produced by the cells. First, after 24 h of culture, the cells were fixed with paraformaldehyde in PBS (4%) for 30 minutes at 4° C. and the samples were dehydrated in increasing concentrations of ethanol (30, 70, 80, 90, 95 and 100%) and critical-point dried. To evaluate the extent of the newly synthesized extracellular matrix, a spatula was used to scratch the surface of the materials. The samples were then metallized for 10 sec with gold or titanium before being analyzed. This procedure did not affect the cell shape and dimensions.

[1446] Immunostaining:

[1447] The cells were first fixed for 20 min with 4% paraformaldehyde/PBS at 4° C. After fixation, the cells were permeabilized in PBS containing 1% Triton X-100 for 15 min. Runx2, Osterix, Stro-1, Vinculin, Phalloidin, Osteopontin, Sox2, Sox9 antibodies were visualized by treating the cells with 1% (v/v) specific monoclonal antibodies for 1 hour at 37° C. Then the samples were incubated with Alexa Fluor® 568 or 647 (F(ab′)2 fragment of IgG(H+L)) during 30 min at room temperature. The cell nuclei were counterstained in 20 ng/mL DAPI for 10 min at room temperature.

[1448] Quantification of Positive Contact Numbers and Areas:

[1449] For this type of quantification the freeware image analysis ImageJ® software was used. The raw image was first converted to an 8-bit file, and then the unsharp mask feature was used (settings 1:0.2) to remove the image background (rolling ball radius 10). After smoothing, the resulting image, which appears similar to the original photomicrograph but with minimal background, was then converted to a binary image by setting a threshold. Threshold values were determined empirically by selecting a setting, which gave the most accurate binary image for a subset of randomly selected photomicrographs. The cell area was determined by manual delineation on raw fluorescent images. Total contact area and mean contact area per cell were calculated by “analyse particules” in ImageJ®. A minimum of 30 cells per condition were analyzed. Stro-1, CD-34+, and CD-105 expressions were determined using this procedure.

[1450] Quantitative Real Time Polymerase Chain Reaction (Q-PCR):

[1451] Total RNA was extracted by using the RNeasy total RNA kit (Qiagen®) according to the manufacturer's instructions. Purified total RNA was used as a template in order to make cDNA by a reverse transcription reaction (Gibco Brl®) with random primers (Invitrogen®). The cDNA was then used as a template for a real-time PCR amplification in the presence of SYBR green reagents (Bio-Rad®) by using a thermocycler (iCycler, Biorad®). Data were analyzed with the iCycler IQ™® software and compared by the ΔΔCt method. Briefly, the mean Ct value of the target gene was normalized to its averaged Ct values of the housekeeping gene (HPRT) to give a ΔCt value, which was then normalized to a control sample to obtain a ΔΔCt value. The results were obtained from two series of experiments performed in a triplicate.

[1452] Semi-Quantitative RT-PCR:

[1453] Total RNA was extracted by using the RNeasy Mini Kit (Qiagen) and 1 mg RNA was used for cDNA synthesis with AMV kit (Invitrogen®) according to the manufacturer' instructions. Semi-quantitative reverse transcriptase-polymerase chain reaction (RT-PCR) was performed with Taq DNA Polymerase (Invitrogen®) in a thermocycler (Bio-Rad®). The cDNA input was normalized to glyceraldehyde-3-phosphate dehydrogenase (HPRT). The PCR products were analyzed on 2% agarose gels. For the Aggrecan gene, the PCR bands were densitometrically quantified by using the BioCapt software (Vilber). Values were normalized to HPRT, and results were reported as relative gene expression.
[1454] General procedure used for the covalent depositing of the GFR-binding compounds as described herein onto biomaterials

### Method 1: Hydrogel Surface Preparation and Covalent Grafting (Such as PLLA)

[1455] The preparation of poly(acrylamide-co-acrylic acid) gel substrates was shown as an example in order to illustrate the effect of the GFR-binding compounds as described herein. The synthesis of hydrogels is based on acrylamide and acrylic acid by polymerization in the presence of N,N′-methylene-bis-acrylamide as a cross-linker in an aqueous medium. Practically, 0.3 g of acrylamide (AM, Merck) has been dissolved in 5 mL of PBS 1× (Invitrogen). 30 μL of acrylic acid (AA, Merck), then ×g (function as the stiffness) of N,N-methylene-bis-acrylamide was added under stirring. Then, a NaOH solution (1M, Aldrich) was added dropwise to reach a pH 8. The formation of hydrogel proceeded via free radical polymerization. The starting solution was degassed during 10 min by bubbling nitrogen in order to remove the oxygen which acts as an inhibitor for the free radical polymerization process. Nitrogen atmosphere was maintained above the solution and 50 μL (corresponding to 1/100 of the total volume) of Ammonium persulfate 10% (Biorad), (free radical initiator) and then 5 μL (corresponding to 1/1000 of total volume) of N,N,N′,N′-tetramethylethylenediamine (catalyst, Aldrich) were added. The polymerizing solution was vortexed gently. Promptly, 0.5 mL of this gel solution was placed before polymerization on a glass slide and another slide was placed on the top of this structure. Reactivity ratios calculated by the Finemann-Ross and Kelen-Tudos methods showed that the copolymers were random with a reactivity ratio of rAM=3.76 and rAA=0.28. The materials obtained here have various stiffnesses ranging from 0.1 to 600 kPa.

[1456] Chemical functionalization with GFR-binding compounds as described herein of poly(acrylamide-co-acrylic acid) gel substrates was performed via the —COON (carboxyl) functions of their surface. Hydrogels were immersed in a solution of dimethylaminopropyl-3-ethylcarbodiimide hydrochloride (EDC, 0.2M)+N-hydroxysuccinimide (NHS, 0.1 M) in 2-(N-morpholino)-ethane sulfonic acid (MES buffer, 0.1 M in MilliQ water) overnight at room temperature without stirring and then rinsed in MilliQ water (50 mL during 30 min). The immobilization of the GFR-binding compounds as described herein was achieved in a solution of peptides/PBS 1× (C=10⁻³ M) for 18 hours at room temperature by using an orbital shaker. After grafting, the modified hydrogels were rinsed with PBS 1× for one week.

### Method 2: Solid Material Covalent Modification (Such as Ceramics or Titaniums)

[1457] The material modifications were performed in a controlled Atmosphere (Ar Atmosphere, Glove Box). The strategy for covalent modification of GFR-binding compounds as described herein involved (1) grafting of (3-aminopropyl)-triethoxysilane (concentration of 1×10⁻²M, 4 hours) onto the surface of the biopolymer, (2) substitution of the terminal amine by a hetero-bifunctional cross-linker, a 3-succinimidyl-3-maleimidopropionate (concentration of 1×10⁻³M, 4 hours) in order to (3) reacting of the “outer” maleimide group with the GFR-binding compounds as described herein (concentration of 1×10⁻³M, 18 hours) via a thiol group present in the terminal cysteine. After grafting, the modified materials were rinsed with PBS 1× buffer for 5 days.

### Method 3: Polymer Grafted by Peptides (Such as PET or PEEK)

[1458] The polymer used in this study is poly(ethylene terephthalate) (PET). The polymers were first treated in order to create —COOH (carboxyl) functions on the PET surfaces from —OH (hydroxyl) functions. Next, the PET-COOH samples were immersed in a solution of dimethylaminopropyl-3-ethylcarbodiimide hydrochloride (EDC, 0.2 M)+N-hydroxysuccinimide (NHS, 0.1 M) in 2-(N-morpholino)-ethanesulfonic acid (MES) buffer (0.1 M in MilliQ water) and the samples were rinsed in MilliQ water (50 mL for 30 min). The same protocol was used for all the polymers containing —OH (hydroxyl) functions on their extreme surface. Finally, the covalent immobilization of the peptides was achieved by using a solution of peptides/1×PBS (C=10⁻³ M) incubated for 18 hours at room temperature. After grafting, the materials were rinsed in MilliQ water (100 ml) for 1 week.

### Example 1: Covalent Depositing of GFR-Binding Compounds as Described Herein onto Conventional Titanium

[1459] The material modifications were performed in a controlled atmosphere (Ar Atmosphere, Glove Box). The strategy for the covalent peptide immobilization involved (1) the grafting of (3-aminopropyl)-triethoxysilane (concentration of 1×10⁻²M, 4 hours) onto the surface of the implant, (2) substitution of the terminal amine by a hetero-bifunctional cross-linker: a 3-succinimidyl-3-maleimidopropionate (concentration of 1×10⁻³M, 4 hours) in order to (3) react the “outer” maleimide group with an osteogenic peptide (concentration of 1×10⁻³M, 24 hours) via a thiol group present in the terminal cysteine. After covalent immobilization, the modified materials were rinsed with Phosphate Buffered Saline (PBS 1×) buffer for 5 days. PBS is a buffer solution commonly used in the biological research. It is a water-based salt solution containing sodium phosphate, sodium chloride and, in some formulations, potassium chloride and potassium phosphate. The osmolarity and ion concentrations of the solutions match those of the human body (isotonic) and are thus physiological and non-toxic to the cells.

[1460] The following peptides were covalently deposited via the thiol group present in the terminal cysteine that was added to the GFR-binding compounds to allow covalent bonding to the surface of the biomaterial:

SEQ ID NO: 1
CKVPKPSSAPTQLSAISTLYLDEYDKVVLKNYQNMVVRA
SEQ ID NO: 2
CKVGKASSVPTKLSAISTLYLDDMGVPTLKNYQNMVVRASGSH
SEQ ID NO: 3
CASASPSSVSQDLSAISTLYLIGKTPKILKNYQMIVKSSKSS
SEQ ID NO: 4
CKIPKASSVPTELNAISVLYFDENEKVILKKYRDMVVEGSG
SEQ ID NO: 5
CASASPSSVSQDLNAISVLYFIGKTPKILKKYRMIVKSSKSS
SEQ ID NO: 6
CAVPKASSAPTKLSATSVLYYDSSNNVVLRKHRNMVVK
SEQ ID NO: 7
CTVPKPSSAPTQLSPISVLYKDDSSNVILKYHYNMVVRASGSH
SEQ ID NO: 8
CAPTQLSPISVLYKDDSSNVILKYHYTLEDH
SEQ ID NO: 9
CRNVQCRPTQVQLSAISTLYLEIVRKKPLKNYQTLEDH
SEQ ID NO: 10
CPSSAPTQLSATSVLYYDDSSNVILRKHRQHNK
SEQ ID NO: 11
CPKPSSAPTQLNAISMLYFGGGGGGGLKKYRNMVVRA
SEQ ID NO: 12
CKVPKASSVPTELSAISTLYLAAAALKNYQEM
SEQ ID NO: 13
CSIPKASSVPTELSATSVLYYDEYDEKVVLRKHEMVVEG
SEQ ID NO: 14
CAPTKLSAISMLYLDSSNNVILKNYQ
SEQ ID NO: 15
CASSAVSQELSAISMLYLGGGLKNYQDM
SEQ ID NO: 16
CKASSVPTELSPISTLYKDENEKVVLKYHYDMVVEGSGSR
SEQ ID NO: 17
CASAAPSSVPQKLNAISMLYFVGRKPKVLKKYRMIVRS
SEQ ID NO: 18
CKVGKASSVPTKLNAISTLYLDENEKVVLKKYREGMS
SEQ ID NO: 19
CPKPSSAPTQLSAISTLYLDDSSNVILKNYQMIVVRA
SEQ ID NO: 20
CKVGKASSVPTKLNAISTLYLDDSSNVILKNYQ
SEQ ID NO: 21
CGGGSSVPTELSAISTLYLDDYDKVILKKYRNM
SEQ ID NO: 36
CKIPKASSVPTELEPLPIVYYVGRKPKVEQLSNMIVRS
SEQ ID NO: 37
CASAAPSSVPQALEPLPIVYYVGRTPKVEQLSNMIVRSSK
SEQ ID NO: 38
CVPTEERSVKVAKVRIKPHQGQHKEVQV
SEQ ID NO: 39
CVPTEESNITMQIMRIKPHQGQHIGEMSFL
SEQ ID NO: 40
CRNVQCRPTQVQLRPVQVRKIEYVRKKPKLKKATVRLEDHLA
SEQ ID NO: 41
CGIPEPSSVPEKMSSLSILFFDENKNVVLKVYPNM
SEQ ID NO: 42
CGIPEPSSVPEKTSSLSLLFFDENKNVVLKVYPNM
SEQ ID NO: 43
CAAPASSSVPARLSPISILYIDAANNVVYKQYEDMVVEASG
SEQ ID NO: 44
CAAPASSSVPARLSPISILYIDAANNVVYKQYEDMVVE
SEQ ID NO: 45
CAAPASSSVPARLSPISLLYIDAANNVVYKQYEDM
SEQ ID NO: 46
CPARLSPISLLYIDAANNVVYKQYEDM
SEQ ID NO: 47
CAAAPASSSVPARLSPISILYIAAAYKQYEDM
SEQ ID NO: 48
CVPQRLSPISILYIDAANNVVYKQYE
SEQ ID NO: 49
CTVPKPSSAPTQLSPISILYIDAANNVVYKQYEDMVVRA

[1461] The biomaterial surface was characterized by covalently immobilizing fluorescent peptides (Herein SEQ ID NO: 1 coupled to fluorescein isothiocyanate (FITC), FIG. 1) and X-ray photoelectron spectroscopy (Table 1). The X-ray photoelectron spectroscopy was performed as described above.

[1462] The results presented in Table 1 were obtained for a titanium alloy material (Ti6Al4V metal alloy pellets) covalently modified with SEQ ID NO: 2 to 6.

TABLE 1

| Name | At. % C1s | At. % N1s |
|---|---|---|
| Titanium | 29.07 | no detection |
| Titanium grafted covalently with SEQ ID NO: 2 | 43.65 | 5.87 |
| Titanium grafted covalently with SEQ ID NO: 3 | 42.02 | 5.47 |
| Titanium grafted covalently with SEQ ID NO: 4 | 39.95 | 5.11 |
| Titanium grafted covalently with SEQ ID NO: 5 | 40.58 | 5.2 |
| Titanium grafted covalently with SEQ ID NO: 6 | 44.01 | 4.89 |

### Example 2: Covalent Depositing of GFR-Binding Compounds as Described Herein onto Conventional PEEK Material

[1463] A polyetheretherketone (PEEK) was treated with ethylene diamine (NH₂═NH₂) to create —NH₂ (amine) functions on the PEEK surfaces from ketone (═O) functions. Next, the PEEK-NH₂ samples were immersed in a solution of a hetero-bifunctional cross-linker: a 3-succinimidyl-3-maleimidopropionate (concentration of 1×10⁻³M, 4 hours) in order to react the “outer” maleimide group with the GFR-binding compounds as described herein (concentration of 1×10⁻³M, 24 hours) via a thiol group present in the terminal cysteine. After grafting, the modified materials were rinsed with PBS 1× for 5 days.

[1464] The surfaces were characterized by grafting fluorescent peptides and by other methods such as X-ray photoelectron spectroscopy (Table 2). The X-ray photoelectron spectroscopy was performed as described above.

[1465] The results presented in Table 2 were obtained by using a PEEK covalently modified with SEQ ID NO: 7.

TABLE 2

| Name | At. % C1s | At. % N1s |
|---|---|---|
| PEEK | 86.56 | no detection |
| PEEK grafted covalently with | 71.61 | 4.98 |
| peptides (SEQ ID NO: 7) | | |

### Example 3: Covalent Depositing of GFR-Binding Compounds as Described Herein onto PLLA

[1466] PLLA (Polylactic acid) was immersed in a solution of dimethylaminopropyl)-3-ethylcarbodiimide hydrochloride (EDC, 0.2 M)+N-hydroxysuccinimide (NHS, 0.1 M) in (2-(N-morpholino)-ethanesulfonic acid (MES buffer, 0.1 M in MilliQ water) and then rinsed in MilliQ water (during 30 min). The covalent immobilization was performed in a solution of GFR-binding compounds as described herein SEQ ID NO: 8 (concentration of 1×10⁻³M, 18 hours, room temperature). After the covalent immobilization, the modified materials were rinsed with PBS 1× for 5 days. The surfaces were characterized by using fluorescent peptides and by using other methods such as X-ray photoelectron spectroscopy (Table 3). The X-ray photoelectron spectroscopy was performed as described above.

[1467] The results presented in Table 3 were obtained by using a PLLA covalently modified with SEQ ID NO: 8.

TABLE 3

| Name | At. % C1s | At. % N1s |
|---|---|---|
| PLLA | 69.02 | no detection |
| PLLA grafted covalently with | 72.31 | 5.07 |
| peptides (SEQ ID NO: 8) | | |

### Example 4: Proliferation of Progenitor Bone Cells

[1468] The effect of the GFR-binding compounds as described herein (SEQ ID NO: 9 to 14) of the invention on the proliferation of osteoblast progenitors (MC3T3-E1 cells, ATCC®) was investigated. The stimulatory effect of apatite ceramics, covalently modified with at least one inducing peptide of the invention, on osteoblast progenitor cells was compared with the effect of non-modified apatite ceramics, which are conventionally used to manufacture bone implants suitable for humans and animals. The AlamarBlue® assay was used to compare the extent of cell proliferation on the different biomaterials based on detection of metabolic activity. Analysis of these data showed that the proliferation was increased significantly on apatite ceramics covalently modified with GFR-binding compounds as described herein of the invention in comparison with conventional non-modified ceramics (FIG. 2).

### Example 5: Osteogenic Differentiation of Human Mesenchymal Stem Cells

[1469] In this example, the biomaterial used was titanium Ti6Al4V metal alloy pellets. Human Mesenchymal Stem Cells (hMSCs) were obtained from Lonza®, Inc. Cells were then cultured in low glucose Dulbecco's Modified Eagle Medium (DMEM, Invitrogen®) supplemented with 10% (v/v) fetal bovine serum (FBS), 1% penicillin/streptomycin and incubated in a humidified atmosphere containing 5% (v/v) CO₂ at 37° C. All the cells were used at a low passage number passage 3), were subconfluently cultured and were seeded at 10 000 cells/cm² for the purpose of the experiments. Stem cell phenotype was analyzed after 62 hours of cell culture on titanium covalently modified with GFR-binding compounds as described herein of the invention (SEQ: ID NO: 15 to 20).

[1470] To probe this lineage specification, immunostaining for Runx2 and Osterix was performed after cell fixation as described in the Methods section. The quantification of Runx2 and Osterix positive contact numbers and areas was performed as described in the Methods section.

[1471] As shown in FIG. 3, when cultured on covalently modified titanium of the invention, the vast majority of the human bone marrow mesenchymal stem cells adheres, spreads, and differentiates into osteoblast-like cells, which was confirmed by increase in the Runx2 and Osterix protein expression (FIG. 3).

### Example 6: Osteogenic Differentiation of Osteoblast Progenitors

[1472] In this example, a conventional PEEK carrier was covalently modified with the GFR-binding compounds as described herein (SEQ ID NO: 21) to produce biomaterials of the invention, and mouse mesenchymal pre-osteoblastic cells (MC3T3-E1, from ATCC®) were cultured thereon. MC3T3-E1 cells were cultured in Alpha-MEM medium supplemented with 10% fetal calf serum (FCS) and 1% penicillin/streptomycin. All the cells were used at a low passage number (passage 4) and were subconfluently cultured. The cells were plated at 10 000 cells/cm² for the purpose of these experiments. The extracellular matrix production was compared between cells cultured on conventional PEEK biomaterials and cells cultured on PEEK biomaterials covalently modified with the GFR-binding compounds as described herein of the invention (SEQ ID NO: 21) after 24 h of cell culture. This was performed by using optical profilometry system probing as described in the Methods section.

[1473] As shown in FIG. 4, the PEEK biomaterials of the invention i.e. conventional PEEK biomaterials covalently modified with at least one type of GFR-binding compounds as described herein of the invention, allow for the differentiation of mouse mesenchymal pre-osteoblastic cells into mature osteoblasts after 24 hours of culture as shown by the synthesis of extracellular matrix.

[1474] Finally, it was verified that the osteoblast progenitors were transformed into mature osteoblasts when cultured on the covalently modified PEEK biomaterials by analyzing the expression of the osteogenic biomarker Runx2, also called Cbfa-1. An increase in the Runx2 gene expression after 24 hours of culture (FIG. 5) was observed in comparison to non-modified conventional PEEK biomaterials by using Quantitative Real Time Polymerase Chain Reaction as described in the Methods section.

### Example 7: Non-Covalent Depositing of GFR-Binding Compounds as Described Herein

[1475] Non-covalent modifications of the materials were performed in air atmosphere at room temperature. The non-covalent coating strategy consisted in using a mixture of inducing peptide (SEQ ID NO: 23; concentration of 1×10⁻³M) with an apatite ceramics implant or a mixture of inducing peptide (SEQ ID NO: 22; concentration of 1×10⁻³M) with a type-I collagen sponge. The non-covalently coated conventional materials were characterized by using fluorescent peptides (Here SEQ ID NO: 22 and 23 covalently bound to fluorescein isothiocyanate (FITC), FIG. 6). The results shown here in FIG. 6 were obtained from experiments performed with apatite ceramics and a type-I collagen sponge. It can be seen that the interaction between these peptides and the apatite ceramics or the type-I collagen is stable as no significant release of peptides was observed over time. Indeed, after 3, 7 or 10 days, the osteogenic peptides were still coupled to the ceramics or the type-I collagen (FIGS. 7a and b).

[1476] Peptides that were non-covalently deposited through specific peptide fragments (such as WWFWG (SEQ ID NO: 84984) or GTPGP (SEQ ID NO: 84983)) added to GFR-binding compounds of the invention are as follows:

SEQ ID NO: 22
WWFWGKVPKPSSAPTQLSAISTLYLDEYDKVVLKNYQNMVVR
SEQ ID NO: 23
GTPGPKVPKPSSAPTQLSAISTLYLDEYDKVVLKNYQNMAVR
SEQ ID NO: 24
GTPGPPSSAPTQLSATSVLYYDDSSNVILRKHRMIVKS
SEQ ID NO: 25
GTPGPAPTQLSPISVLYKDDSSNVILKYHY
SEQ ID NO: 26
GTPGPASSAVSQELSAISMLYLGGGLKNYQDM
SEQ ID NO: 27
GTPGPAPTKLSAISMLYLDSSNNVILRKHR
SEQ ID NO: 28
GTPGPAPTKLSAISMLYLDSSNNVILKKYR
SEQ ID NO: 29
GTPGPKASSVPTELSPISTLYKDENEKVVLKYHYDMVVEGSGSR
SEQ ID NO: 30
GTPGPKASSVPTELSPISTLYKDENEKVVLKYHYDM
SEQ ID NO: 31
GTPGPPKPSSAPTQLNAISMLYFGGGGGLKKYRDMQHN
SEQ ID NO: 32
WWFWGKASSVPTELSPISTLYKDENEKVVLKYHYDMVVEGSGSR
SEQ ID NO: 33
WWFWGASSAVSQELSAISMLYLGGGLKNYQDMQHN
SEQ ID NO: 34
GTPGPRNVQCRPTQVQLSAISTLYLEIVRKKPLKNYQTLEDH
SEQ ID NO: 35
GTPGPRNVQCRPTQVQLSAISTLYLAAALKNYQTLE

### Example 8: Proliferation of Progenitor Bone Cells

[1477] The effect of the GFR-binding compounds as described herein (SEQ ID NO: 24 to 27) of the present invention on the proliferation of osteoblast progenitors was investigated. MC3T3-E1 cells were cultured in Alpha-MEM medium supplemented with 10% fetal calf serum (FCS) and 1% penicillin/streptomycin. All the cells were used at a low passage number (passage 4), were subconfluently cultured and were plated at 10 000 cells/cm² for the purpose of the experiments. The stimulatory effect of the osteogenic peptides, coupled to apatite ceramics or to type-I collagen on osteoblast progenitor cells, was compared to the effect of native apatite ceramics or of native type-I collagen sponge, which are already being used as bone graft/LT-Cage® lumbar tapered fusion devices designed to aid in the treatment of the degenerative disc disease (DDD) in humans. The AlamarBlue® assay was used to compare cell proliferation on the different biomaterials based on detection of metabolic activity. Analysis of these data showed that the cell proliferation proceeded more significantly on apatite ceramics and type-I collagen sponge when coupled to osteogenic peptides as compared to native apatite ceramics and native type-I collagen sponge (FIG. 8).

### Example 9: Osteogenic Differentiation of Human Mesenchymal Stem Cells

[1478] GFR-binding compounds as described herein were non-covalently deposited on apatite ceramics or type-I collagen onto apatite ceramics or onto type-I collagen sponge. Human Mesenchymal Stem Cells (hMSCs) were obtained from Lonza®, Inc. Cells were then cultured in low glucose Dulbecco's Modified Eagle Medium (DMEM, Invitrogen®) supplemented with 10% (v/v) fetal bovine serum (FBS), 1% penicillin/streptomycin and incubated in a humidified atmosphere containing 5% (v/v) CO₂ at 37° C. All cell culture experiments were carried out without any serum in the medium for the first 8 hours of culture. All cells were used at a low passage number passage 3), were subconfluently cultured and were seeded at 10 000 cells/cm² for the purpose of the experiments. The cell phenotype was analyzed after 96 hours of cell culture on apatite ceramics coupled with osteogenic peptides or on a type-I collagen sponge coupled with osteogenic peptides (SEQ: ID NO: 28 to 31). On GFR-binding compounds as described herein-coupled apatite ceramics and type-I collagen sponge, the vast majority of the human bone marrow mesenchymal stem cells adhere, spread, and differentiate into osteoblast-like cells as confirmed by analysis of Runx2 and Osterix expression (FIG. 9a). To probe this lineage specification, immunostaining for Runx2 and Osterix was performed after cell fixation as described in the Methods section. The quantification of Runx2 and Osterix positive contact numbers and areas was performed as described in the Methods section.

[1479] Finally, it was verified that the hMSCs were differentiated into mature osteoblasts by analyzing the activity of the osteogenic biomarker ALP (Alkaline Phosphatase Activity). We observed an increase in the ALP activity after 1 week of culture on type-I collagen sponge coupled with GFR-binding compounds as described herein (SEQ ID NO: 32) (FIG. 9b).

### Example 10: Osteogenic Differentiation of Osteoblast Progenitors

[1480] Mature osteoblasts are the cells responsible for bone formation and are derived from precursor osteoblasts. Mature osteoblasts were obtained and characterized by the expression of osteoblastic markers such as Runx2 and the synthesis of extracellular matrix proteins.

[1481] The effect of the GFR-binding compounds as described herein (SEQ ID NO: 33) on the differentiation of osteoblast progenitors was evaluated. These osteoblast progenitors were seeded onto the apatite ceramics or on type-I collagen sponge that were both coupled with osteogenic peptides. The cells were differentiated into mature osteoblasts after 48 hours of culture on these non-covalently coated materials. The differentiated osteoblast progenitors produced extensive amounts of extracellular matrix proteins such as Osteopontin (OPN) as compared to the osteoblast precursors cultured on a native type-I collagen sponge. This was seen from Osteopentin immunofluorescence staining after cell fixation as described in the Methods section (FIG. 10).

[1482] Finally, it was verified that the osteoblast progenitors were differentiated into mature osteoblasts by analyzing the expression of the osteogenic biomarker Runx2. An increase in the Runx2 gene expression after 24 hours of culture (FIG. 11) was observed by using Quantitative Real Time Polymerase Chain Reaction as described in the Methods section.

### Example 11: Cartilage Regeneration

[1483] hMSCs were cultured on native hydrogels ((poly(acrylamide-co-acrylic acid)) having a stiffness of 14 kPa and on hydrogels (also at a stiffness of 14 kPa) covalently modified with GFR-binding compounds as described herein (SEQ ID NO: 36 and 37). The expression of the Sox9 protein was observed after 96 hours of culture suggesting that hMSCs have committed towards chondrocyte like cell differentiation (FIG. 12a).

[1484] It was then verified that these hMSCs cultured on the covalently modified hydrogels were differentiated into chondrocyte cells by analyzing the expression of the chondrocyte gene biomarker: Aggrecan. The increased expression of this gene was observed after 96 hours of culture (FIG. 12b). For that a semi-quantitative RT-PCR was performed as described in the Methods section for the Aggrecan gene and a Quantitative Real Time PCR for Sox9.

### Example 12: Endothelialization

[1485] Human umbilical-vein endothelial cells were cultured on a native polymer (PET) and on a polymer (PET) covalently modified with endothelialization GFR-binding compounds as described herein (SEQ ID NO: 38). An increase in the area of the adherent junctions (CD31) was observed after 36 hours of culture on the covalently modified PET (FIG. 13). The results observed showed that the GFR-binding compounds as described herein have the ability to rapidly induce stent endothelialization.

### Example 13: Angiogenesis

[1486] Human umbilical-vein endothelial cells were cultured on a native polymer (PET) and on a polymer (PET) covalently modified with vascular peptides (SEQ ID NO: 39). The formation of tube-like structures was observed after 18 hours of culture on the covalently modified PET (FIG. 14). The results observed showed that the GFR-binding compounds as described herein have the ability to rapidly induce angiogenesis.

### Example 14: Wound Healing and Increase of Collective Cell Migration

[1487] Human epithelial cells were cultured on a native polymer (PET) and on a polymer (PET) covalently modified with tissue-closure peptides (SEQ ID NO: 40). A usual scratch test was applied (Nat Protoc 2: 329-333) on a monolayer of these epithelial cells in culture (FIG. 15a). An increase in the cell migration velocity for cells cultured on PET covalently modified with peptides was observed after 18 hours of culture. The cells migrated collectively and the communication between cells was maintained (FIG. 15b). In fact, the injury has been closed rapidly for the cells cultured on polymers covalently modified with GFR-binding compounds as described herein. The results observed showed that the GFR-binding compounds as described herein have the ability to rapidly induce tissue closure such as in wound healing.

### Example 15: Loss of Quiescence and Activation of Hair Follicle Stem Cells

[1488] Isolated Hair Follicle Stem Cells were cultured on native hydrogels ((poly(acrylamide-co-acrylic acid)) having a stiffness of 73 kPa and hydrogels (also at a stiffness of 73 kPa) covalently modified with hair follicle stem cells GFR-binding compounds as described herein (SEQ ID NO: 41 and 42). An increase in the Sox2 protein expression was observed indicating the activation of these stem cells (FIG. 16a). In parallel, a decrease in the BMP-6 release in the cell culture medium was observed (FIG. 16b). In these conditions, the decrease in the BMP-6 release indicated that the hair follicle stem cells were activated and that the hair growth process was induced.

### Example 16: Muscle Differentiation of Human Mesenchymal Stem Cells

[1489] hMSCs were cultured on native hydrogels ((poly(acrylamide-co-acrylic acid)) having a stiffness of 28 kPa and on hydrogels (having the same stiffness of 28 kPa) covalently modified with musculogenic peptides (SEQ ID NO: 43 to 48). We observed an increase in the cell area of the cells cultured on the covalently modified hydrogels after 62 hours of culture suggesting that hMSCs have committed towards muscle differentiation (FIG. 17a). It was then verified that these hMSCs cultured on the covalently modified hydrogels were differentiated into muscle cells by analyzing the expression of the musculogenic biomarker COMP (Cartilage Oligomeric Matrix Protein). An increased expression of this gene was observed after 96 hours of culture (FIG. 17b). For that a Quantitative Real Time PCR was performed as described in the Methods section.

### Example 17: Neuron Growth

[1490] Neurons were cultured on native titanium (control) and on titanium covalently modified with neurogenic peptides (SEQ ID NO: 49). A rapid establishment of cell-cell contacts via dendrite growth was observed after 6 hours of culture on the covalently modified titanium (FIG. 18a). To further confirm this the expression of the Growth Associated Protein 43 (GAP43) gene was verified for neuron cells cultured on materials covalently modified with neurogenic peptides (SEQ ID NO: 49). A high level of expression of this gene was observed after 48 hours of culture on the covalently modified titanium by using Quantitative Real Time Polymerase Chain Reaction as described in the Methods section (FIG. 18b).

### Example 18: Loss of Stemness

[1491] hMSCs were cultured on conventional cell culture plastic plates with or without the presence in the cell culture media of different GFR-binding compounds as described herein (SEQ ID NO: 50 to 88) in solution. A rapid (48 hours) loss of the stemness marker STRO-1 was observed for the cells cultured in the presence of GFR-binding compounds as described herein in the cell media solution (FIG. 19). This was probed by Stro-1 immunostaining after cell fixation as described in the Methods section. The quantification of Stro-1 positive contact numbers and areas was performed as described in the Methods section. A minimum of 30 cells per condition were analyzed. Stro-1 positive marrow cells are multipotential and capable of differentiating into multiple mesenchymal lineages including stromal cells with a phenotype resembling vascular smooth muscle cells that can support hematopoiesis, adipocytes, osteoblasts, and chondrocytes. All the sequences have a RMSD of 2.45 Å or less as defined herein and as shown in table 4.

TABLE 4

| SEQ | | RMSD |
|---|---|---|
| ID NO: | Sequence | (Å) |
| 50 | NDEGLECVPTEERPVQVRKIRIKPHQGQKKAT | 1.23 |
| | VFLQHNK | |
| 51 | ASASPSSVPQDLEPLTILYYVGRTPKVEQLSN | 1.51 |
| | MV | |
| 52 | RNVQCRPTQLEPLPIVYYEIVRKKPEQLSNTL | 1.7 |
| | EDHLA | |
| 53 | VPTKLSPISILYIDDMGVPTYKQYEEGMSVAE | 1.62 |
| 54 | VPQALSPISILYIDDMGVPTYKQYEEGMSVAE | 1.53 |
| 55 | VPTEESNITTQIMRIKPHQGQHIGEMSFLQH | 1.1 |
| 56 | VPTELSPISILFIRIKPHQGHLGEMSAAVVE | 0.82 |
| 57 | TQVQLEPLTLLYYDENEKVIEQLSNDMVVE | 0.79 |
| 58 | VQLRLEPLTILYYDSANNVVEQLSNDMVVR | 0.78 |
| 59 | APTKLEPLEIVYYDDSSNVIEQLSNNMVVR | 0.92 |
| 60 | VPQALSPISILFIVGRKPKVYKQYEMIVERS | 0.97 |
| 61 | APTQLSPISILFIVGRKPKVYKQYERLEEH | 0.81 |
| 62 | VPQALNAISTLYFDDSSNVILKKYRNMAVS | 0.92 |
| 63 | VPEKMSSLSILFFDENKNVVLKVYPNMAVS | 0.92 |
| 64 | VPARLSPISILYIDAANNVVYKQYEDM | 0.81 |
| 65 | VPQALSPINMLYFNEKNQIIYGKIPFLQHNK | 0.86 |
| 66 | TPTKMSPINMLYFNEKNNIIYGKIPGMVVD | 0.92 |
| 67 | APTQLSAISTLYLEIVRKKPLKNYQFLQHNK | 0.79 |
| 68 | APTQLSAISTLYLEIVRKKPLKNYQEMEDH | 0.92 |
| 69 | NDEGLECVPTEERPVQVRKIRIKPHQGQKKAT | 1.1 |
| | VFLQHNK | |
| 70 | ASASPSSVPQDLEPLTILYYVGRTPKVEQLSN | 1.62 |
| | MVEDH | |
| 71 | RNVQCRPTQLEPLPIVYYEIVRKKPEQLSNTL | 1.1 |
| | EDHLA | |
| 72 | VPTKLSPISILYIDKMGVPTYKQYEEGMSVAE | 1.1 |
| 73 | VPARLSPISILYIDEMGVPTYKQYEEGMSVAE | 1.2 |
| 74 | VPTEESNITTQIMRIKPHQGQHIGEMSFLQH | 1.31 |
| 75 | VPQALSPISILFIRLKPHQGHLGEMSNMVVR | 1.23 |
| 76 | VPQALEPLTLLYYDENEKVIEQLSNDMVVE | 1.24 |
| 77 | VPTELEPLTILYYDSANNAVEQLSNDMVKS | 1.01 |
| 78 | APTKLEPLTIVYYDDSSNVIEQLSNNMVVR | 0.91 |
| 79 | VPQALSPISILFIVGRKPKVYKQYEMIVERS | 0.72 |
| 80 | VPTELSPISILFIVGGKPKVYKQYENMVVE | 0.77 |
| 81 | SRVHHNAISTLYFDESSNVILKKYRGMSVVE | 0.88 |
| 82 | VPEKMSSLSILFFDENKNAALKVYPNMTVE | 0.77 |
| 83 | VPARLSPISILYIDAANNVVYKQYEDMVKS | 0.76 |
| 84 | VPTEESPINMLYFNEKNQIIYGKIPMIVVE | 0.8 |
| 85 | TPTKMSPINMLYFNEKNNIIYGKIPGMVVD | 0.89 |
| 86 | VPTHHSAISTLYLELAGEKPLKNYQFLQHNK | 0.91 |
| 87 | APTKLSAISTLYLEIVREEPLKNYQEMVVD | 0.81 |
| 88 | VSQDLSAISTLYLKIVRKEPLKNYQEMVEE | 0.79 |

### Example 19: Differentiation of Human Hematopoeitic Stem Cells

[1492] hMSCs were cultured on conventional cell culture plastic plates with or without the presence in the cell culture media of different GFR-binding peptides as described herein (SEQ ID NO: 2147 to 2157) in solution. A rapid (48 hours) loss of the stemness marker CD34+ was observed for the cells cultured in the presence of GFR-binding peptides as described herein in the cell media solution. This was probed by CD-34+ immunostaining after cell fixation as described in the Methods section. The quantification of CD-34+ positive contact numbers and areas was performed as described in the Methods section. A minimum of 30 cells per condition were analyzed. CD-34+ positive marrow cells are multipotential and capable of differentiating into all the various blood cell types. All the sequences have a RMSD of 2.45 Å or less as defined herein and as shown in table 5.

TABLE 5

| SEQ | | | CD34+ |
|---|---|---|---|
| ID | | RMSD | Expression |
| NO: | Sequences | (Å) | (%) |
| 2147 | IPKASSAPVGQRPVQMRKIDK | 0.93 | 27 |
| | GVVTYKKATVSSVEESGSL | | |
| 2148 | KASSVPQEERPVQMRKIGGGG | 2.03 | 32 |
| | GGGKKATVMIVRSSKSS | | |
| 2149 | VSQAARPVQTRKIDDMGVPTK | 1.04 | 28 |
| | KATVAAVKS | | |
| 2150 | PTSSAPTDLRSVKMAKVEIVR | 1.31 | 26 |
| | KKPIFKEVQVDMVVKASGSH | | |
| 2151 | PTSSVPTGGRSVKMAKVDKGV | 1.45 | 24 |
| | VTYKEVQVMVVAESKSS | | |
| 2152 | IPKASSVPOSSSNITMQIMGG | 2.14 | 30 |
| | GGGGGIGEMSSSVKSSGSL | | |
| 2153 | KASSSRVKMSNITVQIMRIKP | 1.44 | 22 |
| | HQGQHIGEMSVVEEHASGSH | | |
| 2154 | VPTAAEPLTMLYYEIVRKKPI | 1.67 | 21 |
| | FEQLSNMVEHS | | |
| 2155 | EPSSSRVRLEPLTTLYYGGGG | 2.05 | 29 |
| | GGGEQLSNVVEEHSKSS | | |
| 2156 | APVKMEPLPTVYYDDMGVPTE | 1.18 | 25 |
| | QLSNDMVEESGSL | | |
| 2157 | EPSSVSQAAEPLPIVYYRIKP | 1.31 | 23 |
| | HQGQHEQLSNMIVKSSKSS | | |

### Example 20: RMSD Measurement and Biological Activity

[1493] RMSD values are always calculated for a GFR-binding peptide sequence exempt from any possible bioactive-carrier-affinity-containing group as defined herein. When needed i.e. when attachment to a bioactive carrier is contemplated, the bioactive-carrier-affinity-containing group is then present in the GFR-binding compound when it is biologically tested.

[1494] Using the method detailed in the description, the RMSD of 57 previously reported peptide sequences have been determined (Table 6) and correlated with the expression of STRO-1 in solution. These data show that a calculated value of RMSD of more than 2.45 Å, in particular more than 2 Å, more particularly more than 1.79 Å, always correlates with no significant hMSCs commitment and/or differentiation of the treated cells. One should note that it is commonly admitted that the expression of STRO-1 in a cell is indicative of a cell that is in a substantially non-differentiated state and the decrease of its expression of at least about 20% is indicative of a cell that has started a process of differentiation but which may not result in the differentiation of the cell. A decrease of more than 50% would be indicative of the presence of a significant shift towards a differentiated state. A decrease of more than 70% would be indicative of the presence of a very important shift towards a differentiated state. A sustained decrease (e.g. for at least 96 h) of more than 50% or 70% would be indicative of the presence of an even more important shift towards a differentiated state.

TABLE 6

| SEQ | | | STRO-1 |
|---|---|---|---|
| ID | | RMSD | expression |
| NO: | Sequences | (Å) | (%) |
| 2158 | VEQLSNMVVK | 5.2 | 98 |
| 2159 | PIIYYVGRNVRVEQLSNMVVRA | 5.7 | 92 |
| 2160 | PIIYYVGRNVRVEQLSNMVVRRA | 6.1 | 98 |
| 2161 | DPLPIIYYVGRNVRVEQLSNMVV | 4.9 | 97 |
| | RACKCS | | |
| 2162 | ENVNLKKYRNMIVKSCGCH | 7.3 | 97 |
| 2163 | TPTYSRPVQKAELTR | 6.3 | 97 |
| 2164 | HIRSTTSSYVSLKSNITNRTIQT | 8.1 | 98 |
| | PTYSYT | | |
| 2165 | LMDLARMPSCLRGERAVPQDTTG | 8.6 | 92 |
| | YFTWSSNITPLNFIF | | |
| 2166 | NEVLRFCGIQVPEGDEPLT | 6.7 | 98 |
| 2167 | LNEVLRFCGIQVPEGDEPLTY | 6.8 | 99 |
| 2168 | MSRVLFEPLTFLQTGSGLPDEKT | 5.9 | 94 |
| | LG | | |
| 2169 | IKSPARHSAPTHQEPLP | 4.5 | 98 |
| 2170 | NPGASASPCCVSQDLEPLPIL | 5.3 | 86 |
| 2171 | SHQSAGDSIKSPARHSAPTHQEP | 6.4 | 91 |
| | LPD | | |
| 2172 | PNYSVPAGNKPLSERE | 6.8 | 95 |
| 2173 | TKPLSSLLFPNWNTTTTPTPPRP | 7.1 | 91 |
| 2174 | CVTKPLSSLLFPNWNTTTTPTPP | 7 | 92 |
| 2175 | VGAAWWLREQGSPINTLAVPA | 5.9 | 88 |
| 2176 | MQCRELVTQVTEEPISQTEDGEE | 4.3 | 85 |
| | QESTTTPRLKGQKKE | | |
| 2177 | VPTKLEPISVLYKDDMGVPTLKY | 4.2 | 81 |
| | HYEGMAVSECGCR | | |
| 2178 | SPISILVVPELDASLPEKRPSLD | 5.5 | 82 |
| | GFEALLVYNAPKA | | |
| 2179 | TLXPIVSSXNPSPISFRXIKILL | 4.8 | 84 |
| | HDLEVVPFPKSRVR | | |
| 2180 | VPTKLSPISILYLDKGVVTYKFK | 4.1 | 80 |
| | YEGMSVAECGCR | | |
| 2181 | VPTKLSPISILYKDDMGVPTYKF | 4 | 82 |
| | KYEGMSVAECGCR | | |
| 2182 | VPTELSPISLLYLDEFEKVTLKN | 3.7 | 87 |
| | YQDMVVDG | | |
| 2183 | TPTVVSATSL | 3.6 | 98 |
| 2184 | SATSRLALSDVPAELAA | 5.2 | 98 |
| 2185 | LGIAAIIFLQQVPAAFSATSPPG | 5.7 | 97 |
| 2186 | SVPAVCSATSATGPYSSVTVTSW | 4.5 | 92 |
| | PSIVATGGTT | | |
| 2187 | SVPAVCSATSATGPYSTATNTVW | 5.2 | 92 |
| | PSIVATGGTT | | |
| 2188 | SSVPAVCSATSATGPYSSGSVEV | 5.1 | 92 |
| | TFDVYATTVY | | |
| 2189 | SSVPAVCSATSATGPYSTATNTV | 4.7 | 91 |
| | WFDVYATTVY | | |
| 2190 | VHLLKPHAVPKACCAPTKLSATS | 3.8 | 88 |
| | VLYYDSSNNVILRKHRNMVVRAC | | |
| | GCH | | |
| 2191 | ANINKDRDNVPAATSSLSKAYNP | 6.2 | 92 |
| 2192 | SFRTARANAPTGRSSLSGEKEQQ | 5.4 | 91 |
| | EASTHS | | |
| 2193 | DKPEESSSTPTHAQCICSSLSEA | 4.8 | 87 |
| | IVSSVLSTRLVLSQISLTRAKRA | | |
| | FE | | |
| 2194 | KGSEYEKLVVSGITQVYQSSLSW | 4.1 | 88 |
| | HGCKSCCEVQVXNLXILIRLYDV | | |
| | HYYN | | |
| 2195 | MALPQPRGSSLSKAPVVVAPCMA | 4.7 | 82 |
| | LKRVNIRSIVFEVLKTMNQNCIH | | |
| | ETPN | | |
| 2196 | MAAQDEWRDAITLTMGRDLKKVP | 7 | 83 |
| | QHLNAISVIDPVT | | |
| 2197 | LSLLAPPEPVWNHETSYGSDCHV | 4.3 | 93 |
| | PTNVNAISKMIDKSNHQTG | | |
| 2198 | APTKLNAISVLYFDDSSNVILKK | 5.8 | 84 |
| | YRNMIVKS | | |
| 2199 | APTQLSAISVL | 2.9 | 93 |
| 2200 | FDSRVLKSAISFKENIIF | 2.8 | 89 |
| 2201 | KIPKPSSAPTELSAISMC | 3.3 | 78 |
| 2202 | CPKPSSAPTELSAISMLL | 3.6 | 79 |
| 2203 | TCCVPELSAISMLYLDEN | 4.7 | 84 |
| 2204 | KIPKPSSAPTELSAISMLC | 3.6 | 82 |
| 2205 | KIPKPSSAPTELSAISMLYC | 3.6 | 80 |
| 2206 | CIPKPSSAPTELSAISMLYL | 3.6 | 83 |
| 2207 | CKIPKPSSAPTELSAISMLYL | 3.5 | 78 |
| 2208 | AETLHTLGLSAPVIESAISDAI | 4.6 | 93 |
| 2209 | MRTESTPTTASAISYECLWSPPS | 6.1 | 94 |
| | NEAAKLHFDS | | |
| 2210 | SRVLPIVVQGYVPVQDTKFLGIY | 4.7 | 84 |
| | YVIGPIIARVILSSSSAISSLNKS | | |
| 2211 | CCAPTELSAISVLYFDDSSNVIL | 3.4 | 81 |
| | KKYRNMVVRACGCR | | |
| 2212 | CCAPTQLSAISVLYFDDSSNVIL | 3.2 | 82 |
| | KKYRNMVVRACGCR | | |
| 2213 | KPCCAPTQLSAISVLYFDDSSNV | 3.6 | 80 |
| | ILKKYRNMVVRACGCR | | |
| 2214 | KPCCAPTELSAISVLYFDDSSNV | 3.3 | 83 |
| | ILKKYRNMVVRACGCR | | |

[1495] Likewise, using the method detailed in the description, the RMSD of another 27 previously reported peptide sequences have been determined (Table 7) and correlated with the expressions of STRO-1 and CD-105 in solution. These data show that a calculated value of RMSD of more than 2.45 Å, in particular more than 2 Å, more particularly more than 1.79 Å, always correlates with no significant hMSCs commitment and/or differentiation of the treated cells. Data were obtained with peptides in solution (i.e. not combined with a bioactive carrier).

TABLE 7

| SEQ | | | STRO-1 | CD-105 |
|---|---|---|---|---|
| ID | | RMSD | expres- | expres- |
| NO: | Sequences | (Å) | sion (%) | sion (%) |
| 2215 | VPQTLDPLPIIYYVGR | 2.79 | 71 | 68 |
| | NVRVEQLSNMVVRA | | | |
| 2216 | VPQTLDPLPIIYYVGR | 2.94 | | |
| | NVRVEQLSNMVVRACK | | | |
| | CS | | | |
| 2217 | CCVPQTLDPLPIIYYV | 3.04 | | |
| | GRNVRVEQLSNMVVRA | | | |
| | CKCS | | | |
| 2218 | APTRLGALPVLYHLND | 2.93 | | |
| | ENVNLKKYRNMIVKS | | | |
| 2219 | APTRLGALPVLYHLND | 3.12 | | |
| | ENVNLKKYRNMIVKSC | | | |
| | GCH | | | |
| 2220 | CCAPTRLGALPVLYHL | 3.07 | | |
| | NDENVNLKKYRNMIVK | | | |
| | SCGCH | | | |
| 2221 | VPTTLDAISMLFMNEH | 2.92 | | |
| | SKVVLKNYQDMVVDG | | | |
| 2222 | VPTTLEAISMLFMNEH | 2.93 | | |
| | SKVVLKNYQDMVVDG | | | |
| 2223 | MAFKDTGKAPVEPEVA | 3.41 | | |
| | IHRIRITLTSRSVKSL | | | |
| | EK | | | |
| 2224 | LSTQVSQKPLSDKNQN | 2.95 | | |
| | LK | | | |
| 2225 | EYAKAWFKLLHRDMGP | 4.03 | | |
| | VQRYLGPLVPTQTWLW | | | |
| | QDIVPAGKPLSDADVA | | | |
| 2226 | APTELSPISVLYFDQD | 2.67 | | |
| | NNVVLKKYNKMVVKA | | | |
| 2227 | APTKLSPISMLYYDNN | 2.94 | | |
| | DNVVLRHYEDMVVDE | | | |
| 2228 | VPERLSPISVLFFDNS | 2.96 | | |
| | DNVVLRHYEDMVVDE | | | |
| 2229 | VPERLSPISVLFFDNE | 2.77 | | |
| | DNVVLRHYEDMVVDEC | | | |
| | GCR | | | |
| 2230 | CCVPERLSPISVLFFD | 2.69 | 81 | 78 |
| | NEDNVVLRHYEDMVVD | | | |
| | ECGCR | | | |
| 2231 | VPTELSSLSLLYTDEH | 2.88 | | |
| | GTVVLKVYQDMVVEG | | | |
| 2232 | VPTELSSLSLLYTDEH | 2.88 | | |
| | GAVVLKVYQDMVVEG | | | |
| 2233 | CCVPTELNAISVLYFD | 3.3 | | |
| | DSSNVILKKYEDMVVE | | | |
| | ACGCR | | | |
| 2234 | NSCCVPTELNAISVLY | 3.01 | | |
| | FDDSSNVILKKYEDMV | | | |
| | VEACGCR | | | |
| 2235 | APTALSAISMLYFDES | 2.81 | 77 | 63 |
| | GNVVLRQYEDMVVEG | | | |
| 2236 | APTKLSAISMLYFDND | 2.8 | | |
| | ENVVLRQYEDMVVEA | | | |
| 2237 | CCAPTQLSAISVLYFD | 2.69 | | |
| | DSSNVILKKYEDMVVE | | | |
| | ACGCR | | | |
| 2238 | CCAPTELSAISVLYFD | 2.69 | 76 | 72 |
| | DSSNVILKKYEDMVVE | | | |
| | ACGCR | | | |
| 2239 | KPCCAPTQLSAISVLY | 2.58 | | |
| | FDDSSNVILKKYEDMV | | | |
| | VEACGCR | | | |
| 2240 | KPCCAPTELSAISVLY | 2.6 | 73 | 69 |
| | FDDSSNVILKKYEDMV | | | |
| | VEACGCR | | | |
| 2241 | VPTEEFNVTMQIMRIK | 3.04 | | |
| | PHQGQHIGEMSFLQHN | | | |
| | K | | | |

[1496] Likewise, using the method detailed in the description, the RMSD of 75 GFR-binding peptide sequence representatives of the invention have been determined (Table 8) and correlated with the expression of STRO-1. SEQ ID NO: 1 to 49 were tested in combination with a bioactive carrier as defined above in the Examples Section (i.e. titanium, ceramics, collagen, etc. . . . ), whereas SEQ ID NO: 2242 to 2267 were tested in solution. These data show that a calculated value of RMSD of 2.45 Å or less, in particular 2 Å or less, more particularly 1.79 Å or less, always correlates with a significant hMSCs commitment and/or differentiation of the treated cells.

TABLE 8

| SEQ | | | STRO-1 |
|---|---|---|---|
| ID | | RMSD | expres- |
| NO: | Sequences | (Å) | sion (%) |
| 1 | CKVPKPSSAPTQLSAISTLYLDEYD | 1.23 | 26 |
| | KVVLKNYQNMVVRA | | |
| 2 | CKVGKASSVPTKLSAISTLYLDDMG | 1.33 | 21 |
| | VPTLKNYQNMVVRASGSH | | |
| 3 | CASASPSSVSQDLSAISTLYLIGKT | 0.98 | 18 |
| | PKILKNYQMIVKSSKSS | | |
| 4 | CKIPKASSVPTELNAISVLYFDENE | 1.09 | 27 |
| | KVILKKYRDMVVEGSG | | |
| 5 | CASASPSSVSQDLNAISVLYFIGKT | 1.34 | 26 |
| | PKILKKYRMIVKSSKSS | | |
| 6 | CAVPKASSAPTKLSATSVLYYDSSN | 1.33 | 26 |
| | NVVLRKHRNMVVK | | |
| 7 | CTVPKPSSAPTQLSPISVLYKDDSS | 0.88 | 18 |
| | NVILKYHYNMVVRASGSH | | |
| 8 | CAPTQLSPISVLYKDDSSNVILKYH | 1.93 | 19 |
| | YTLEDH | | |
| 9 | CRNVQCRPTQVQLSAISTLYLEIVR | 1.12 | 19 |
| | KKPLKNYQTLEDH | | |
| 10 | CPSSAPTQLSATSVLYYDDSSNVIL | 1.33 | 19 |
| | RKHRQHNK | | |
| 11 | CPKPSSAPTQLNAISMLYFGGGGGG | 2.16 | 31 |
| | GLKKYRNMVVRA | | |
| 12 | CKVPKASSVPTELSAISTLYLAAAA | 2.21 | 28 |
| | LKNYQEM | | |
| 13 | CSIPKASSVPTELSATSVLYYDEYD | 1.43 | 23 |
| | EKVVLRKHEMVVEG | | |
| 14 | CAPTKLSAISMLYLDSSNNVILKNY | 0.56 | 16 |
| | Q | | |
| 15 | CASSAVSQELSAISMLYLGGGLKNY | 2.01 | 21 |
| | QDM | | |
| 16 | CKASSVPTELSPISTLYKDENEKVV | 1.03 | 18 |
| | LKYHYDMVVEGSGSR | | |
| 17 | CASAAPSSVPQKLNAISMLYFVGRK | 1.04 | 21 |
| | PKVLKKYRMIVRS | | |
| 18 | CKVGKASSVPTKLNAISTLYLDENE | 1.03 | 19 |
| | KVVLKKYREGMS | | |
| 19 | CPKPSSAPTQLSAISTLYLDDSSNV | 1.41 | 20 |
| | ILKNYQMIVVRA | | |
| 20 | CKVGKASSVPTKLNAISTLYLDDSS | 0.94 | 18 |
| | NVILKNYQ | | |
| 21 | CGGGSSVPTELSAISTLYLDDYDKV | 2.11 | 14 |
| | ILKKYRNM | | |
| 22 | WWFWGKVPKPSSAPTQLSAISTLYL | 0.87 | 17 |
| | DEYDKVVLKNYQNMVVR | | |
| 23 | GTPGPKVPKPSSAPTQLSAISTLYL | 0.89 | 17 |
| | DEYDKVVLKNYQNMAVR | | |
| 24 | GTPGPPSSAPTQLSATSVLYYDDSS | 1.33 | 21 |
| | NVILRKHRMIVKS | | |
| 25 | GTPGPAPTQLSPISVLYKDDSSNVI | 1.82 | 23 |
| | LKYHY | | |
| 26 | GTPGPASSAVSQELSAISMLYLGGG | 2.3 | 22 |
| | LKNYQDM | | |
| 27 | GTPGPAPTKLSAISMLYLDSSNNVI | 1.44 | 19 |
| | LRKHR | | |
| 28 | GTPGPAPTKLSAISMLYLDSSNNVI | 1.67 | 19 |
| | LKKYR | | |
| 29 | GTPGPKASSVPTELSPISTLYKDEN | 1.17 | 21 |
| | EKVVLKYHYDMVVEGSGSR | | |
| 30 | GTPGPKASSVPTELSPISTLYKDEN | 1.65 | 18 |
| | EKVVLKYHYDM | | |
| 31 | GTPGPPKPSSAPTQLNAISMLYFGG | 2.36 | 31 |
| | GGGLKKYRDMQHN | | |
| 32 | WWFWGKASSVPTELSPISTLYKDEN | 1.18 | 21 |
| | EKVVLKYHYDMVVEGSGSR | | |
| 33 | WWFWGASSAVSQELSAISMLYLGGG | 1.97 | 28 |
| | LKNYQDMQHN | | |
| 34 | GTPGPRNVQCRPTQVQLSAISTLYL | 1.27 | 18 |
| | EIVRKKPLKNYQTLEDH | | |
| 35 | GTPGPRNVQCRPTQVQLSAISTLYL | 2.06 | 28 |
| | AAALKNYQTLE | | |
| 36 | CKIPKASSVPTELEPLPIVYYVGRK | 1.84 | 19 |
| | PKVEQLSNMIVRS | | |
| 37 | CASAAPSSVPQALEPLPIVYYVGRT | 1.54 | 21 |
| | PKVEQLSNMIVRSSK | | |
| 38 | CVPTEERSVKVAKVRIKPHQGQHKE | 1.8 | 23 |
| | VQV | | |
| 39 | CVPTEESNITMQIMRIKPHQGQHIG | 0.79 | 16 |
| | EMSFL | | |
| 40 | CRNVQCRPTQVQLRPVQVRKIEYVR | 0.88 | 18 |
| | KKPKLKKATVRLEDHLA | | |
| 41 | CGIPEPSSVPEKMSSLSILFFDENK | 1.08 | 22 |
| | NVVLKVYPNM | | |
| 42 | CGIPEPSSVPEKTSSLSLLFFDENK | 1.04 | 28 |
| | NVVLKVYPNM | | |
| 43 | CAAPASSSVPARLSPISILYIDAAN | 1.11 | 27 |
| | NVVYKQYEDMVVEASG | | |
| 44 | CAAPASSSVPARLSPISILYIDAAN | 1.47 | 27 |
| | NVVYKQYEDMVVE | | |
| 45 | CAAPASSSVPARLSPISLLYIDAAN | 1.45 | 24 |
| | NVVYKQYEDM | | |
| 46 | CPARLSPISLLYIDAANNVVYKQYE | 1.82 | 19 |
| | DM | | |
| 47 | CAAAPASSSVPARLSPISILYIAAA | 1.77 | 18 |
| | YKQYEDM | | |
| 48 | CVPQRLSPISILYIDAANNVVYKQY | 0.95 | 18 |
| | E | | |
| 49 | CTVPKPSSAPTQLSPISILYIDAAN | 0.74 | 18 |
| | NVVYKQYEDMVVRA | | |
| 2242 | VPTAASAISILYLDAANNVVLKNYQ | 1.02 | 17 |
| | AAVVE | | |
| 2243 | VPEAASSLSMLFFEIVRKKPIFLKV | 1.32 | 19 |
| | YPAATVE | | |
| 2244 | VPTVVSAISTLYLRIKPHQGQHLKN | 1.56 | 21 |
| | YQVVVVE | | |
| 2245 | APTLLNAISMLYFNDKQQIILKKYR | 0.97 | 22 |
| | LLVVR | | |
| 2246 | APTGGSATSMLYYDKGVVTYLRKHR | 1.12 | 23 |
| | GGVVK | | |
| 2247 | VPTSSSPISTLYIDKGVVTYLKYHY | 1.52 | 20 |
| | SSVAE | | |
| 2248 | VPTAAEPISMLYLDEYDKVVKFKYE | 1.61 | 26 |
| | AAAVS | | |
| 2249 | TPTSSSPINTLYFDDMGVPTYGKIP | 1.31 | 25 |
| | SSVVD | | |
| 2250 | VPTVVSPISMLYIDDMGVPTYKQYE | 1.41 | 26 |
| | VVVVE | | |
| 2251 | APVAAKPLSMLYVDKGVVTYDHHKD | 0.98 | 22 |
| | AAVEE | | |
| 2252 | VPQAAEPLPMLYYDKGVVTYEQLSN | 0.95 | 19 |
| | AAVRS | | |
| 2253 | VPQQQEPLTTLYYDEYDKVVEQLSN | 1.16 | 18 |
| | QQVKS | | |
| 2254 | VPTMMSNITTQIMRIKPHQGQHIGE | 1.56 | 19 |
| | MSMMQHN | | |
| 2255 | SRVAARSVKMAKVGGGGGGGKEVQV | 2.08 | 31 |
| | AAEEH | | |
| 2256 | VPTDDSATSTLYYDKGVVTYLRKHR | 1.73 | 27 |
| | DDEHS | | |
| 2257 | VPTGGEPLTTLYYNDKQQIIEQLSN | 1.92 | 26 |
| | GGEHS | | |
| 2258 | SRVLLRPVQMRKIDKGVVTYKKATV | 1.85 | 21 |
| | LLEEH | | |
| 2259 | TQVAARPVQTRKIDDMGVPTKKATV | 1.93 | 23 |
| | AAEDH | | |
| 2260 | VPQRLEPLTILYYDAANNVVEQLSN | 0.83 | 23 |
| | DMVKS | | |
| 2261 | NDEGLESVPTGQSPISILYIRIKPH | 1.22 | 17 |
| | QGQHYKQYELEEHSQSESR | | |
| 2262 | HVTKPTSVPTKLSPISILFIDDSSN | 1.34 | 18 |
| | VIYKQYENMVVESSGSH | | |
| 2263 | ASASPSSAPVDLKPLSMLYVIGKTP | 1.41 | 16 |
| | KIDHHKDMIVEESKSS | | |
| 2264 | KIPKASSVPQELEPLPIVYYDENEK | 1.45 | 24 |
| | VVEQLSNDMVRSGSGSR | | |
| 2265 | AVPKASSVPQKLEPLTILYYDSSNN | 1.28 | 21 |
| | VIEQLSNNMVKSASGSH | | |
| 2266 | RVPSTSSAPVKTSNITMQIMDNGRV | 1.33 | 22 |
| | LLLGEMSMIVEESGSL | | |
| 2267 | ASASPSSVSQDLRSVKVAKVIGKTP | 0.97 | 34 |
| | KIKEVQVMIVKSSKSS | | |

### Example 21: Application in the Treatment of Osteoporosis the Following Study Aims at Validating the

[1497] osteoinduction, osteoconduction and osteoclast inhibition activity properties of the GFR-binding compounds in a critical size fracture induced defect in an osteoporosis rat model. The goal is to induce the process of bone regeneration in a physiological way resulting in osteogenesis without bone formation anomalies like ectopic growth or osteopetrosis.

### A. Osteoporosis Rat Model

[1498] Given that the acceleration of bone turnover caused by oestrogen deficiency at menopause is the most common cause of osteoporosis, animal models that lose bone in response to oestrogen deficiency are preferred in the preclinical examination of therapeutic agents. This bone loss is characterized by an increased turnover rate, decreased bone mass as measured by densitometry and decreased bone volume. The ovariectomy-induced osteoporosis (OVX) rat model is most commonly used in research on osteoporosis and in preclinical animal studies. After ovariectomy, bone resorption exceeds bone formation, causing a rapid and reproducible bone loss in response to oestrogen deficiency.

### B. Experimental Protocol

[1499] An overview of the experimental protocol is schematically represented in FIG. 21.

### B.1. Surgical Procedure

[1500] After 1 week of adaptation period, 3-month-old female rats (Sprague Dawley® strain) were subjected to bilateral ovariectomy (OVX) dorsal surgery. This procedure involves pain and therefore an analgesic administration was performed 30 minutes before surgery and 6 hours after surgery. Significant bone loss in the femoral condyle due to induced estrogen deficiency is typically obtained 8 weeks after the surgery with this animal model. One week before compound administration the OVX rats were randomly assigned to three different groups.

### B.2. Compound Administration

[1501] Eight weeks after the surgery, a critical size defect of 3 mm was drilled in the femoral condyle of the OVX rats at J0 and a mixture of GFR-binding compounds (SEQ ID NOs: 609 and 2268) were site administrated. This critical size defect would not heal alone through complete bone formation without external intervention at the experimental endpoints of the present study: 3 weeks and 12 weeks. The control conditions include a “No implantation” condition for which no implantations were performed in the defect as well as one ceramic (70% TCP30% HA) implant: a ceramic scaffold (Control 1). A mixture of SEQ ID NOs: 609 and 2268 was included in a specific capsule that enables its progressive release at the defect site as a solution. Hereinafter the various experimental conditions, the results for which are detailed below:

| Experimental | | Type of | Reference or |
|---|---|---|---|
| conditions | Code | product | test product |
| No implantation | No | None | Reference |
| (empty defect) | implantation | | |
| Ceramic Scaffold | Control 1 | Solid | Reference |
| SEQ ID NOs: 609 | HTD-PCL- | Solution | Test |
| and 2268 in solution | M06 | | |

[1502] Two experimental endpoints were tested in the present study: 3 weeks and 12 weeks after compound administration. The first endpoint of 3 weeks allows the detection of an early osteogenesis process involving stem cells and progenitor cells differentiation towards the osteoblast lineage. The second endpoint of 12 weeks allows the detection of osteoporosis defect healing and the assessment of stably and efficiently induced osteogenesis. The experimenters were blinded to group assignment until the completion of the procedure, and again at the time of the results assessment analysis performed with various techniques.

### B.3. Histopathological Analysis

[1503] For all the experimental conditions, the femoral defect sites were removed and resin embedded without prior demineralization, after which successive coronal sections were produced. A thorough histopathological analysis has been then performed on these sections in order to assess tissue and cellular structure and therefore the osteogenesis, osteoinduction, osteoconduction and bone resorption processes with the following stainings:
[1504] Hematoxylin-Eosin (HE) staining to qualitatively analyze tissue morphology as well as: presence or not of the administrated compounds, bone remodeling (bone formation and bone resorption) at the defect sites, the presence of osteoblast cells. A semi-quantitative analysis of osteoblast cell detection was performed, as the presence of osteoblasts in the defect site area is an indicator of osteoinduction and new bone formation.
[1505] Tartrate-resistant acid phosphatase (TRAP) staining: to highlight active osteoclasts (in red) that produce the TRAP-isoenzyme but also the osteoclast fraction at the defect sites and its surroundings. Osteoclast activity is an indicator of bone resorption.
[1506] Von Kossa Van Gieson (VKVG) staining: to highlight mineralized tissue (in black) including newly formed bone tissue, native bone, and the calcified compounds as well as the non mineralized osteoid tissue (dark pink). The fibrous tissue is stained in light pink and the bone marrow in light orange. The VKVG staining allows assessing the percentage of mineralized and osteoid tissue in and around the defect site as well as the amount of remaining compounds at the defect site area 3 and 12 weeks after administration.

[1507] In addition, the tolerance rate of the various administrated compounds can be evaluated by examining tissue integrity at the defect site, presence and amount of necrotic tissue and presence of inflammatory cell infiltration such as immune cells and macrophages.

### C. Results

[1508] Regarding the “No implantation” condition, 3 weeks after inducing a critical size defect, a thickening of the periosteum (fibrous tissue) can be observed at the defect entry for all the stainings (FIG. 22, left). This indicates that a closing of the defect site entry has been initiated and completed after 12 weeks (FIG. 22, right). In addition, no inflammatory cells could be detected in the periosteum suggesting a complete lack of surgery related inflammatory process at 3 weeks. Osteoclast activity is present at the defect entry at 3 weeks but no active osteoclasts could be detected after 12 weeks (FIG. 22, TRAP staining). Finally, mineralized bone tissue is observed at the defect site entry at 3 weeks with very little osteoid tissue (FIG. 22, VKVG staining) and the defect entry is closed after 12 weeks with mineralized tissue. However, no osteoid tissue could be detected in contact with the mineralized tissue at the defect entry at 12 weeks suggesting the absence of any bone formation activity. In addition, no bone tissue structures or bone trabeculae could be detected inside the defect, indicating that osteogenic activity did not occur in that area during 12 weeks. Thus, 12 weeks after inducing a critical size defect in the “No implantation” condition, the entry of the defect site was closed with mineralized bone tissue and periosteum thickening. No osteoid tissue could be detected at the entry site and no bone tissue structures or osteoid could be observed inside the defect area indicating a complete lack of bone formation and osteogenic activity.

[1509] The tested mixture is administrated at the defect site as a solution included in a capsule, progressively releasing it in the defect area. A periosteum fibrous tissue closing can be observed at the defect entry 12 weeks after HTD-PCL-M06 administration (FIG. 23). No inflammatory infiltration could be detected suggesting that the compounds were very well tolerated. In addition, the capsule releasing HTD-PCL-M06 is still present at the defect site 3 and 12 weeks after administration. Osteoblast cells were detected around the HTD-PCL-M06, indicating the induction of bone formation activity as compared to Control 1 where no osteoblast cells were present (FIG. 23, HE staining). The observed osteoinduction is further confirmed by the increased amount of osteoid tissue and mineralized bone tissue in contact with HTD-PCL-M06 3 weeks after administration (FIG. 23, VKVG staining). A further increase in mineralized and osteoid tissue is observed 12 weeks after administration indicating that the bone formation activity detected at 3 weeks is also continuing at 12 weeks. This is not the case for the Control 1 condition where no increase in mineralized and osteoid bone tissue could be detected at 12 weeks. Finally, no osteoclast cells could be detected at the defect site 3 and 12 weeks after HTD-PCL-M06 administration, suggesting an important reduction in bone resorption activity. In conclusion, HTD-PCL-M06 is well tolerated and efficiently inducing osteogenesis at a critical defect site as revealed by in increased osteoid and mineralized bone tissue formation 3 and 12 weeks after administration. This increased osteogenic activity is associated with the presence of osteoblast cells confirming the triggering of osteoinduction. In addition no active osteoclast cells could be detected indicating a highly reduced bone resorption activity. HTD-PCL-M06 is therefore very well suited for efficient bone reconstruction of osteoporosis related fractures and osteoporosis treatment and prevention, potentially via a systemic administration or a local administration as a solution. The superiority of HTD-PCL-M06 is further confirmed as compared to the ceramic scaffold of Control 1, which is a product already present on the market for bone reconstruction.

### D. Conclusions

[1510] The present CRO-conducted blind randomized preclinical pilot trial has validated the efficiency of representative GFR-binding compounds as disclosed herein in solution, for the treatment and prevention of osteoporosis and osteoporosis related fractures in an osteoporosis animal model. Osteoinductive activity was observed through bone tissue regeneration of critical size induced defects. The representative GFR-binding compounds were well tolerated and have efficiently induced bone formation as revealed by an increased osteoid and mineralized bone tissue formation at the defect area, 3 and 12 weeks after administration.

[1511] It was shown that HTD-PCL-M06 increased osteoinduction activity, increased the amount of osteoblast cells and highly reduced bone resorption activity. In addition, HTD-PCL-M06 induced an increase in bone mineralization speed, rate and surface. HTD-PCL-M06 is therefore very well suited for efficient bone reconstruction of osteoporosis related fractures, osteoporosis treatment and prevention, potentially via a systemic administration or a local administration as a solution.

[1512] At 3 weeks, the compounds have induced the early osteogenesis process involving stem cells and progenitor cells differentiation towards the osteoblast lineage. At 12 weeks the compound was proven efficient in inducing stable osteogenesis and inducing efficient osteoporosis defect healing. These results obtained after 12 weeks are of utmost importance for patients having osteoporotic related fractures, who usually remain significantly impaired for much longer periods of time or permanently.

[1513] Thus, GFR-binding compounds of the present disclosure represent new therapeutic solutions for osteoporosis with the unique ability to decouple bone resorption from bone formation by increasing bone formation and concomitantly decreasing bone resorption, which is required to achieve efficient bone strengthening in osteoporosis patients as compared to the existing treatments.

[1514] Advantageously, the animals used in the experiments did not present any deleterious side effects regardless of the experimental condition. In addition, the animal body weight was monitored twice a week during the course of the experiment, and a very slight weight loss was observed just after the ovariectomy surgery due to the anesthesia related decrease in food intake for all the animals, which is classically observed for this animal model. No compound administration related weight loss could be detected. Combined with the complete absence of deleterious side effects, this indicates that the administrated compounds did not negatively interfere with the normal animal metabolism and physiology. Moreover, no animals were euthanized during the course of the experiment due to advanced state of morbidity or signs of pain. The animals were euthanized at the experimental endpoints 3 or 12 weeks after compound administration and a macroscopic post-mortem analysis was performed on the entire animal and specifically at the administration sites. The analysis has revealed no visible signs of inflammation or necrosis at the administration sites for all the animals. This indicates that the compounds were well tolerated by the animals, which was also confirmed microscopically by the very small amount of immune cells at the administration sites. Finally, no animals with indications of the osteopetrosis disorder were detected.

The application's sequence listing, which the Patent Office published only in electronic form, follows.

SEQUENCE LISTING (85030 sequences)

SEQ ID NO: 1 - protein, 39 aa, Artificial Sequence
  GFR-binding peptide
  MOD_RES (7), (8): Xaa is C or S
CKVPKPXXAPTQLSAISTLYLDEYDKVVLKNYQNMVVRA

SEQ ID NO: 2 - protein, 43 aa, Artificial Sequence
  GFR-binding peptide
  MOD_RES (7), (8), (40), (42): Xaa is C or S
CKVGKAXXVPTKLSAISTLYLDDMGVPTLKNYQNMVVRAXGXH

SEQ ID NO: 3 - protein, 42 aa, Artificial Sequence
  GFR-binding peptide
  MOD_RES (7), (8), (39), (41): Xaa is C or S
CASASPXXVSQDLSAISTLYLIGKTPKILKNYQMIVKSXKXS

SEQ ID NO: 4 - protein, 42 aa, Artificial Sequence
  GFR-binding peptide
  MOD_RES (7), (8), (41): Xaa is C or S
CKIPKAXXVPTELNAISVLYFDENEKVILKKYRDMVVEGSXG

SEQ ID NO: 5 - protein, 42 aa, Artificial Sequence
  GFR-binding peptide
  MOD_RES (7), (8), (39), (41): Xaa is C or S
CASASPXXVSQDLNAISVLYFIGKTPKILKKYRMIVKSXKXS

SEQ ID NO: 6 - protein, 38 aa, Artificial Sequence
  GFR-binding peptide
  MOD_RES (7), (8): Xaa is C or S
CAVPKAXXAPTKLSATSVLYYDSSNNVVLRKHRNMVVK

SEQ ID NO: 7 - protein, 43 aa, Artificial Sequence
  GFR-binding peptide
  MOD_RES (7), (8), (40), (42): Xaa is C or S
CTVPKPXXAPTQLSPISVLYKDDSSNVILKYHYNMVVRAXGXH

SEQ ID NO: 8 - protein, 31 aa, Artificial Sequence
  GFR-binding peptide
CAPTQLSPISVLYKDDSSNVILKYHYTLEDH

SEQ ID NO: 9 - protein, 38 aa, Artificial Sequence
  GFR-binding peptide
CRNVQCRPTQVQLSAISTLYLEIVRKKPLKNYQTLEDH

SEQ ID NO: 10 - protein, 33 aa, Artificial Sequence
  GFR-binding peptide
CPSSAPTQLSATSVLYYDDSSNVILRKHRQHNK

SEQ ID NO: 11 - protein, 37 aa, Artificial Sequence
  GFR-binding peptide
CPKPSSAPTQLNAISMLYFGGGGGGGLKKYRNMVVRA

SEQ ID NO: 12 - protein, 32 aa, Artificial Sequence
  GFR-binding peptide
CKVPKASSVPTELSAISTLYLAAAALKNYQEM

SEQ ID NO: 13 - protein, 39 aa, Artificial Sequence
  GFR-binding peptide
  MOD_RES (7), (8): Xaa is C or S
CSIPKAXXVPTELSATSVLYYDEYDEKVVLRKHEMVVEG

SEQ ID NO: 14 - protein, 26 aa, Artificial Sequence
  GFR-binding peptide
CAPTKLSAISMLYLDSSNNVILKNYQ

SEQ ID NO: 15 - protein, 28 aa, Artificial Sequence
  GFR-binding peptide
CASSAVSQELSAISMLYLGGGLKNYQDM

SEQ ID NO: 16 - protein, 40 aa, Artificial Sequence
  GFR-binding peptide
  MOD_RES (37), (39): Xaa is C or S
CKASSVPTELSPISTLYKDENEKVVLKYHYDMVVEGXGXR

SEQ ID NO: 17 - protein, 38 aa, Artificial Sequence
  GFR-binding peptide
  MOD_RES (7), (8): Xaa is C or S
CASAAPXXVPQKLNAISMLYFVGRKPKVLKKYRMIVRS

SEQ ID NO: 18 - protein, 37 aa, Artificial Sequence
  GFR-binding peptide
  MOD_RES (7), (8): Xaa is C or S
CKVGKAXXVPTKLNAISTLYLDENEKVVLKKYREGMS

SEQ ID NO: 19 - protein, 37 aa, Artificial Sequence
  GFR-binding peptide
CPKPSSAPTQLSAISTLYLDDSSNVILKNYQMIVVRA

SEQ ID NO: 20 - protein, 33 aa, Artificial Sequence
  GFR-binding peptide
  MOD_RES (7), (8): Xaa is C or S
CKVGKAXXVPTKLNAISTLYLDDSSNVILKNYQ

SEQ ID NO: 21 - protein, 33 aa, Artificial Sequence
  GFR-binding peptide
CGGGSSVPTELSAISTLYLDDYDKVILKKYRNM

SEQ ID NO: 22 - protein, 42 aa, Artificial Sequence
  GFR-binding peptide
  MOD_RES (11), (12): Xaa is C or S
WWFWGKVPKPXXAPTQLSAISTLYLDEYDKVVLKNYQNMVVR

SEQ ID NO: 23 - protein, 42 aa, Artificial Sequence
  GFR-binding peptide
  MOD_RES (11), (12): Xaa is C or S
GTPGPKVPKPXXAPTQLSAISTLYLDEYDKVVLKNYQNMAVR

SEQ ID NO: 24 - protein, 38 aa, Artificial Sequence
  GFR-binding peptide
GTPGPPSSAPTQLSATSVLYYDDSSNVILRKHRMIVKS

SEQ ID NO: 25 - protein, 30 aa, Artificial Sequence
  GFR-binding peptide
GTPGPAPTQLSPISVLYKDDSSNVILKYHY

SEQ ID NO: 26 - protein, 32 aa, Artificial Sequence
  GFR-binding peptide
GTPGPASSAVSQELSAISMLYLGGGLKNYQDM

SEQ ID NO: 27 - protein, 30 aa, Artificial Sequence
  GFR-binding peptide
GTPGPAPTKLSAISMLYLDSSNNVILRKHR

SEQ ID NO: 28 - protein, 30 aa, Artificial Sequence
  GFR-binding peptide
GTPGPAPTKLSAISMLYLDSSNNVILKKYR

SEQ ID NO: 29 - protein, 44 aa, Artificial Sequence
  GFR-binding peptide
  MOD_RES (41), (43): Xaa is C or S
GTPGPKASSVPTELSPISTLYKDENEKVVLKYHYDMVVEGXGXR

SEQ ID NO: 30 - protein, 36 aa, Artificial Sequence
  GFR-binding peptide
GTPGPKASSVPTELSPISTLYKDENEKVVLKYHYDM

SEQ ID NO: 31 - protein, 38 aa, Artificial Sequence
  GFR-binding peptide
GTPGPPKPSSAPTQLNAISMLYFGGGGGLKKYRDMQHN

SEQ ID NO: 32 - protein, 44 aa, Artificial Sequence
  GFR-binding peptide
  MOD_RES (41), (43): Xaa is C or S
WWFWGKASSVPTELSPISTLYKDENEKVVLKYHYDMVVEGXGXR

SEQ ID NO: 33 - protein, 35 aa, Artificial Sequence
  GFR-binding peptide
WWFWGASSAVSQELSAISMLYLGGGLKNYQDMQHN

SEQ ID NO: 34 - protein, 42 aa, Artificial Sequence
  GFR-binding peptide
GTPGPRNVQCRPTQVQLSAISTLYLEIVRKKPLKNYQTLEDH

SEQ ID NO: 35 - protein, 36 aa, Artificial Sequence
  GFR-binding peptide
GTPGPRNVQCRPTQVQLSAISTLYLAAALKNYQTLE

SEQ ID NO: 36 - protein, 38 aa, Artificial Sequence
  GFR-binding peptide
  MOD_RES (7), (8): Xaa is C or S
CKIPKAXXVPTELEPLPIVYYVGRKPKVEQLSNMIVRS

SEQ ID NO: 37 - protein, 40 aa, Artificial Sequence
  GFR-binding peptide
  MOD_RES (7), (8): Xaa is C or S
CASAAPXXVPQALEPLPIVYYVGRTPKVEQLSNMIVRSSK

SEQ ID NO: 38 - protein, 28 aa, Artificial Sequence
  GFR-binding peptide
CVPTEERSVKVAKVRIKPHQGQHKEVQV

SEQ ID NO: 39 - protein, 30 aa, Artificial Sequence
  GFR-binding peptide
CVPTEESNITMQIMRIKPHQGQHIGEMSFL

SEQ ID NO: 40 - protein, 42 aa, Artificial Sequence
  GFR-binding peptide
CRNVQCRPTQVQLRPVQVRKIEYVRKKPKLKKATVRLEDHLA

SEQ ID NO: 41 - protein, 35 aa, Artificial Sequence
  GFR-binding peptide
  MOD_RES (7), (8): Xaa is C or S
CGIPEPXXVPEKMSSLSILFFDENKNVVLKVYPNM

SEQ ID NO: 42 - protein, 35 aa, Artificial Sequence
  GFR-binding peptide
  MOD_RES (7), (8): Xaa is C or S
CGIPEPXXVPEKTSSLSLLFFDENKNVVLKVYPNM

SEQ ID NO: 43 - protein, 41 aa, Artificial Sequence
  GFR-binding peptide
  MOD_RES (7), (8): Xaa is C or S
CAAPASXXVPARLSPISILYIDAANNVVYKQYEDMVVEASG

SEQ ID NO: 44 - protein, 38 aa, Artificial Sequence
  GFR-binding peptide
  MOD_RES (7), (8): Xaa is C or S
CAAPASXXVPARLSPISILYIDAANNVVYKQYEDMVVE

SEQ ID NO: 45 - protein, 35 aa, Artificial Sequence
  GFR-binding peptide
  MOD_RES (7), (8): Xaa is C or S
CAAPASXXVPARLSPISLLYIDAANNVVYKQYEDM

SEQ ID NO: 46 - protein, 27 aa, Artificial Sequence
  GFR-binding peptide
CPARLSPISLLYIDAANNVVYKQYEDM

SEQ ID NO: 47 - protein, 32 aa, Artificial Sequence
  GFR-binding peptide
  MOD_RES (8), (9): Xaa is C or S
CAAAPASXXVPARLSPISILYIAAAYKQYEDM

SEQ ID NO: 48 - protein, 26 aa, Artificial Sequence
  GFR-binding peptide
CVPQRLSPISILYIDAANNVVYKQYE

SEQ ID NO: 49 - protein, 39 aa, Artificial Sequence
  GFR-binding peptide
  MOD_RES (7), (8): Xaa is C or S
CTVPKPXXAPTQLSPISILYIDAANNVVYKQYEDMVVRA

SEQ ID NO: 50 - protein, 39 aa, Artificial Sequence
  GFR-binding peptide
NDEGLECVPTEERPVQVRKIRIKPHQGQKKATVFLQHNK

SEQ ID NO: 51 - protein, 34 aa, Artificial Sequence
  GFR-binding peptide
  MOD_RES (6), (7): Xaa is C or S
ASASPXXVPQDLEPLTILYYVGRTPKVEQLSNMV

SEQ ID NO: 52 - protein, 37 aa, Artificial Sequence
  GFR-binding peptide
RNVQCRPTQLEPLPIVYYEIVRKKPEQLSNTLEDHLA

SEQ ID NO: 53 - protein, 32 aa, Artificial Sequence
  GFR-binding peptide
VPTKLSPISILYIDDMGVPTYKQYEEGMSVAE

SEQ ID NO: 54 - protein, 32 aa, Artificial Sequence
  GFR-binding peptide
VPQALSPISILYIDDMGVPTYKQYEEGMSVAE

SEQ ID NO: 55 - protein, 31 aa, Artificial Sequence
  GFR-binding peptide
VPTEESNITTQIMRIKPHQGQHIGEMSFLQH

SEQ ID NO: 56 - protein, 31 aa, Artificial Sequence
  GFR-binding peptide
VPTELSPISILFIRIKPHQGHLGEMSAAVVE

SEQ ID NO: 57 - protein, 30 aa, Artificial Sequence
  GFR-binding peptide
TQVQLEPLTLLYYDENEKVIEQLSNDMVVE

SEQ ID NO: 58 - protein, 30 aa, Artificial Sequence
  GFR-binding peptide
VQLRLEPLTILYYDSANNVVEQLSNDMVVR

SEQ ID NO: 59 - protein, 30 aa, Artificial Sequence
  GFR-binding peptide
APTKLEPLEIVYYDDSSNVIEQLSNNMVVR

SEQ ID NO: 60 - protein, 31 aa, Artificial Sequence
  GFR-binding peptide
VPQALSPISILFIVGRKPKVYKQYEMIVERS

SEQ ID NO: 61 - protein, 30 aa, Artificial Sequence
  GFR-binding peptide
APTQLSPISILFIVGRKPKVYKQYERLEEH

SEQ ID NO: 62 - protein, 30 aa, Artificial Sequence
  GFR-binding peptide
VPQALNAISTLYFDDSSNVILKKYRNMAVS

SEQ ID NO: 63 - protein, 30 aa, Artificial Sequence
  GFR-binding peptide
VPEKMSSLSILFFDENKNVVLKVYPNMAVS

SEQ ID NO: 64 - protein, 27 aa, Artificial Sequence
  GFR-binding peptide
VPARLSPISILYIDAANNVVYKQYEDM

SEQ ID NO: 65 - protein, 31 aa, Artificial Sequence
  GFR-binding peptide
VPQALSPINMLYFNEKNQIIYGKIPFLQHNK

SEQ ID NO: 66 - protein, 30 aa, Artificial Sequence
  GFR-binding peptide
TPTKMSPINMLYFNEKNNIIYGKIPGMVVD

SEQ ID NO: 67 - protein, 31 aa, Artificial Sequence
  GFR-binding peptide
APTQLSAISTLYLEIVRKKPLKNYQFLQHNK

SEQ ID NO: 68 - protein, 30 aa, Artificial Sequence
  GFR-binding peptide
APTQLSAISTLYLEIVRKKPLKNYQEMEDH

SEQ ID NO: 69 - protein, 39 aa, Artificial Sequence; identical to SEQ ID NO: 50
  GFR-binding peptide

SEQ ID NO: 70 - protein, 37 aa, Artificial Sequence
  GFR-binding peptide
  MOD_RES (6), (7): Xaa is C or S
ASASPXXVPQDLEPLTILYYVGRTPKVEQLSNMVEDH

SEQ ID NO: 71 - protein, 37 aa, Artificial Sequence; identical to SEQ ID NO: 52
  GFR-binding peptide

SEQ ID NO: 72 - protein, 32 aa, Artificial Sequence
  GFR-binding peptide
VPTKLSPISILYIDKMGVPTYKQYEEGMSVAE

SEQ ID NO: 73 - protein, 32 aa, Artificial Sequence
  GFR-binding peptide
VPARLSPISILYIDEMGVPTYKQYEEGMSVAE

SEQ ID NO: 74 - protein, 31 aa, Artificial Sequence; identical to SEQ ID NO: 55
  GFR-binding peptide

SEQ ID NO: 75 - protein, 31 aa, Artificial Sequence
  GFR-binding peptide
VPQALSPISILFIRLKPHQGHLGEMSNMVVR

SEQ ID NO: 76 - protein, 30 aa, Artificial Sequence
  GFR-binding peptide
VPQALEPLTLLYYDENEKVIEQLSNDMVVE

SEQ ID NO: 77 - protein, 30 aa, Artificial Sequence
  GFR-binding peptide
VPTELEPLTILYYDSANNAVEQLSNDMVKS

SEQ ID NO: 78 - protein, 30 aa, Artificial Sequence
  GFR-binding peptide
APTKLEPLTIVYYDDSSNVIEQLSNNMVVR

SEQ ID NO: 79 - protein, 31 aa, Artificial Sequence; identical to SEQ ID NO: 60
  GFR-binding peptide

SEQ ID NO: 80 - protein, 30 aa, Artificial Sequence
  GFR-binding peptide
VPTELSPISILFIVGGKPKVYKQYENMVVE

SEQ ID NO: 81 - protein, 31 aa, Artificial Sequence
  GFR-binding peptide
SRVHHNAISTLYFDESSNVILKKYRGMSVVE

SEQ ID NO: 82 - protein, 30 aa, Artificial Sequence
  GFR-binding peptide
VPEKMSSLSILFFDENKNAALKVYPNMTVE

SEQ ID NO: 83 - protein, 30 aa, Artificial Sequence
  GFR-binding peptide
VPARLSPISILYIDAANNVVYKQYEDMVKS

SEQ ID NO: 84 - protein, 30 aa, Artificial Sequence
  GFR-binding peptide
VPTEESPINMLYFNEKNQIIYGKIPMIVVE

SEQ ID NO: 85 - protein, 30 aa, Artificial Sequence; identical to SEQ ID NO: 66
  GFR-binding peptide

SEQ ID NO: 86 - protein, 31 aa, Artificial Sequence
  GFR-binding peptide
VPTHHSAISTLYLELAGEKPLKNYQFLQHNK

SEQ ID NO: 87 - protein, 30 aa, Artificial Sequence
  GFR-binding peptide
APTKLSAISTLYLEIVREEPLKNYQEMVVD

SEQ ID NO: 88 - protein, 30 aa, Artificial Sequence
  GFR-binding peptide
VSQDLSAISTLYLKIVRKEPLKNYQEMVEE

SEQ ID NO: 89 - protein, 42 aa, Artificial Sequence
  GFR-binding peptide
  MOD_RES (6), (7), (39), (41): Xaa is C or S
GIPEPXXVPTKMSAISMLYLDENKNVVLKNYQNMVVESXAXR

SEQ ID NO: 90 - protein, 42 aa, Artificial Sequence
  GFR-binding peptide
  MOD_RES (7), (39), (41): Xaa is C or S
HVTKPTXVPTKLSAISMLYLDDSSNVILKNYQNMVVESXGXH

SEQ ID NO: 91 - protein, 42 aa, Artificial Sequence
  GFR-binding peptide
  MOD_RES (6), (7), (39), (41): Xaa is C or S
YVPKPXXVPTKLSAISMLYLDDSSNVILKNYQNMVVESXGXH

SEQ ID NO: 92 - protein, 42 aa, Artificial Sequence
  GFR-binding peptide
  MOD_RES (6), (7), (39), (41): Xaa is C or S
TVPKPXXVPTQLSAISMLYLDDSSNVILKNYQNMVVEAXGXH

SEQ ID NO: 93 - protein, 42 aa, Artificial Sequence
  GFR-binding peptide
  MOD_RES (6), (7), (39), (41): Xaa is C or S
AVPKAXXVPTKLSAISMLYLDSSNNVILKNYQNMVVEAXGXH

SEQ ID NO: 94 - protein, 43 aa, Artificial Sequence
  GFR-binding peptide
  MOD_RES (6), (7), (40), (42): Xaa is C or S
KVGKAXXVPTKLSAISMLYLDDMGVPTLKNYQEGMSVVEXGXR

SEQ ID NO: 95 - protein, 42 aa, Artificial Sequence
  GFR-binding peptide
  MOD_RES (6), (7), (39), (41): Xaa is C or S
KASKAXXVPTKLSAISMLYLDKGVVTYLKNYQGMVVEEXGXR

SEQ ID NO: 96 - protein, 42 aa, Artificial Sequence
  GFR-binding peptide
  MOD_RES (6), (7), (39), (41): Xaa is C or S
GSAGPXXVPTKMSAISMLYLNDKQQIILKNYQGMVVERXGXS

SEQ ID NO: 97 - protein, 42 aa, Artificial Sequence
  GFR-binding peptide
  MOD_RES (6), (7), (39), (41): Xaa is C or S
AAPASXXVPTRLSAISMLYLDAANNVVLKNYQDMVVEAXGXR

SEQ ID NO: 98 - protein, 42 aa, Artificial Sequence
  GFR-binding peptide
  MOD_RES (6), (7), (39), (41): Xaa is C or S
STPPTXXVPTRLSAISMLYLDSANNVVLKNYQDMVVESXGXR

SEQ ID NO: 99 - protein, 42 aa, Artificial Sequence
  GFR-binding peptide
  MOD_RES (6), (7), (39), (41): Xaa is C or S
HVPKPXXVPTKLSAISMLYLDDSSNVILKNYQNMVVESXGXH

SEQ ID NO: 100 - protein, 41 aa, Artificial Sequence
  GFR-binding peptide
  MOD_RES (6), (7), (38), (40): Xaa is C or S
RVPSTXXVPTKTSAISMLYLDNGRVLLLKNYQMIVVEXGXL

SEQ ID NO: 101 - protein, 41 aa, Artificial Sequence
  GFR-binding peptide
  MOD_RES (6), (7), (38), (40): Xaa is C or S
ASAAPXXVPTALSAISMLYLVGRKPKVLKNYQMIVVEXKXS

SEQ ID NO: 102 - protein, 41 aa, Artificial Sequence
  GFR-binding peptide
  MOD_RES (6), (7), (38), (40): Xaa is C or S
ASASPXXVPTDLSAISMLYLIGKTPKILKNYQMIVVEXKXS

SEQ ID NO: 103 - protein, 41 aa, Artificial Sequence
  GFR-binding peptide
  MOD_RES (6), (7), (38), (40): Xaa is C or S
ASASPXXVPTDLSAISMLYLVGRTPKVLKNYQMVVVEXKXS

SEQ ID NO: 104 - protein, 42 aa, Artificial Sequence
  GFR-binding peptide
  MOD_RES (6), (7), (39), (41): Xaa is C or S
GIPEPXXVPEKMSAISMLYLDENKNVVLKNYQNMTVESXAXR

SEQ ID NO: 105 - protein, 42 aa, Artificial Sequence
  GFR-binding peptide
  MOD_RES (7), (39), (41): Xaa is C or S
HVTKPTXAPTKLSAISMLYLDDSSNVILKNYQNMVVRSXGXH

SEQ ID NO: 106 - protein, 42 aa, Artificial Sequence
  GFR-binding peptide
  MOD_RES (6), (7), (39), (41): Xaa is C or S
YVPKPXXAPTKLSAISMLYLDDSSNVILKNYQNMVVRSXGXH

SEQ ID NO: 107 - protein, 42 aa, Artificial Sequence
  GFR-binding peptide
  MOD_RES (6), (7), (39), (41): Xaa is C or S
TVPKPXXAPTQLSAISMLYLDDSSNVILKNYQNMVVRAXGXH

SEQ ID NO: 108 - protein, 42 aa, Artificial Sequence
  GFR-binding peptide
  MOD_RES (6), (7), (39), (41): Xaa is C or S
AVPKAXXAPTKLSAISMLYLDSSNNVILKNYQNMVVKAXGXH

SEQ ID NO: 109 - protein, 43 aa, Artificial Sequence
  GFR-binding peptide
  MOD_RES (6), (7), (40), (42): Xaa is C or S
KVGKAXXVPTKLSAISMLYLDDMGVPTLKNYQEGMSVAEXGXR

SEQ ID NO: 110 - protein, 42 aa, Artificial Sequence
  GFR-binding peptide
  MOD_RES (6), (7), (39), (41): Xaa is C or S
KASKAXXVPTKLSAISMLYLDKGVVTYLKNYQGMAVSEXGXR

SEQ ID NO: 111 - protein, 42 aa, Artificial Sequence
  GFR-binding peptide
  MOD_RES (6), (7), (39), (41): Xaa is C or S
GSAGPXXTPTKMSAISMLYLNDKQQIILKNYQGMVVDRXGXS

SEQ ID NO: 112 - protein, 42 aa, Artificial Sequence
  GFR-binding peptide
  MOD_RES (6), (7), (39), (41): Xaa is C or S
AAPASXXVPARLSAISMLYLDAANNVVLKNYQDMVVEAXGXR

SEQ ID NO: 113 - protein, 42 aa, Artificial Sequence
  GFR-binding peptide
  MOD_RES (6), (7), (39), (41): Xaa is C or S
HVPKPXXAPTKLSAISMLYLDDSSNVILKNYQNMVVRSXGXH

SEQ ID NO: 114 - protein, 41 aa, Artificial Sequence
  GFR-binding peptide
  MOD_RES (6), (7), (38), (40): Xaa is C or S
RVPSTXXAPVKTSAISMLYLDNGRVLLLKNYQMIVEEXGXL

SEQ ID NO: 115 - protein, 41 aa, Artificial Sequence
  GFR-binding peptide
  MOD_RES (6), (7), (38), (40): Xaa is C or S
ASAAPXXVPQALSAISMLYLVGRKPKVLKNYQMIVRSXKXS

SEQ ID NO: 116 - protein, 41 aa, Artificial Sequence
  GFR-binding peptide
  MOD_RES (6), (7), (38), (40): Xaa is C or S
ASASPXXVSQDLSAISMLYLIGKTPKILKNYQMIVKSXKXS

SEQ ID NO: 117 - protein, 41 aa, Artificial Sequence
  GFR-binding peptide
  MOD_RES (6), (7), (38), (40): Xaa is C or S
ASASPXXVPQDLSAISMLYLVGRTPKVLKNYQMVVKSXKXS

SEQ ID NO: 118 - protein, 44 aa, Artificial Sequence
  GFR-binding peptide
  MOD_RES (7), (41), (43): Xaa is C or S
NDEGLEXVPTEESAISMLYLRIKPHQGQHLKNYQFLQHNKXEXR

SEQ ID NO: 119 - protein, 44 aa, Artificial Sequence
  GFR-binding peptide
  MOD_RES (7), (41), (43): Xaa is C or S
NDEGLEXVPTGQSAISMLYLRIKPHQGQHLKNYQLEEHSQXEXR

SEQ ID NO: 120 - protein, 45 aa, Artificial Sequence
  GFR-binding peptide
  MOD_RES (5), (42), (44): Xaa is C or S
SSVKXQPSRVHHSAISMLYLEYVRKKPKLLKNYQRLEEHLEXAXA

SEQ ID NO: 121 - protein, 45 aa, Artificial Sequence
  GFR-binding peptide
  MOD_RES (5), (42), (44): Xaa is C or S
RNVQXRPTQVQLSAISMLYLEIVRKKPIFLKNYQTLEDHLAXKXE

SEQ ID NO: 122 - protein, 42 aa, Artificial Sequence
  GFR-binding peptide
  MOD_RES (6), (7), (39), (41): Xaa is C or S
KIPKAXXVPEELSSLSILFFDENEKVVLKVYPDMTVEGXGXR

SEQ ID NO: 123 - protein, 42 aa, Artificial Sequence
  GFR-binding peptide
  MOD_RES (6), (7), (39), (41): Xaa is C or S
SIPKAXXVPEELSSLSILFFDEYDKVVLKVYPEMTVEGXGXR

SEQ ID NO: 124 - protein, 42 aa, Artificial Sequence
  GFR-binding peptide
  MOD_RES (7), (39), (41): Xaa is C or S
HVTKPTXVPEKLSSLSILFFDDSSNVILKVYPNMTVESXGXH

SEQ ID NO: 125 - protein, 42 aa, Artificial Sequence
  GFR-binding peptide
  MOD_RES (6), (7), (39), (41): Xaa is C or S
YVPKPXXVPEKLSSLSILFFDDSSNVILKVYPNMTVESXGXH

SEQ ID NO: 126 - protein, 42 aa, Artificial Sequence
  GFR-binding peptide
  MOD_RES (6), (7), (39), (41): Xaa is C or S
TVPKPXXVPEQLSSLSILFFDDSSNVILKVYPNMTVEAXGXH

SEQ ID NO: 127 - protein, 42 aa, Artificial Sequence
  GFR-binding peptide
  MOD_RES (6), (7), (39), (41): Xaa is C or S
AVPKAXXVPEKLSSLSILFFDSSNNVILKVYPNMTVEAXGXH

SEQ ID NO: 128 - protein, 43 aa, Artificial Sequence
  GFR-binding peptide
  MOD_RES (6), (7), (40), (42): Xaa is C or S
KVGKAXXVPEKLSSLSILFFDDMGVPTLKVYPEGMSTVEXGXR

SEQ ID NO: 129 - protein, 42 aa, Artificial Sequence
  GFR-binding peptide
  MOD_RES (6), (7), (39), (41): Xaa is C or S
KASKAXXVPEKLSSLSILFFDKGVVTYLKVYPGMTVEEXGXR

SEQ ID NO: 130 - protein, 42 aa, Artificial Sequence
  GFR-binding peptide
  MOD_RES (6), (7), (39), (41): Xaa is C or S
GSAGPXXVPEKMSSLSILFFNDKQQIILKVYPGMTVERXGXS

SEQ ID NO: 131 - protein, 42 aa, Artificial Sequence
  GFR-binding peptide
  MOD_RES (6), (7), (39), (41): Xaa is C or S
AAPASXXVPERLSSLSILFFDAANNVVLKVYPDMTVEAXGXR

SEQ ID NO: 132 - protein, 42 aa, Artificial Sequence
  GFR-binding peptide
  MOD_RES (6), (7), (39), (41): Xaa is C or S
STPPTXXVPERLSSLSILFFDSANNVVLKVYPDMTVESXGXR

SEQ ID NO: 133 - protein, 42 aa, Artificial Sequence
  GFR-binding peptide
  MOD_RES (6), (7), (39), (41): Xaa is C or S
HVPKPXXVPEKLSSLSILFFDDSSNVILKVYPNMTVESXGXH

SEQ ID NO: 134 - protein, 41 aa, Artificial Sequence
  GFR-binding peptide
  MOD_RES (6), (7), (38), (40): Xaa is C or S
RVPSTXXVPEKTSSLSILFFDNGRVLLLKVYPMITVEXGXL

SEQ ID NO: 135 - protein, 41 aa, Artificial Sequence
  GFR-binding peptide
  MOD_RES (6), (7), (38), (40): Xaa is C or S
ASAAPXXVPEALSSLSILFFVGRKPKVLKVYPMITVEXKXS

SEQ ID NO: 136 - protein, 41 aa, Artificial Sequence
  GFR-binding peptide
  MOD_RES (6), (7), (38), (40): Xaa is C or S
ASASPXXVPEDLSSLSILFFIGKTPKILKVYPMITVEXKXS

SEQ ID NO: 137 - protein, 41 aa, Artificial Sequence
  GFR-binding peptide
  MOD_RES (6), (7), (38), (40): Xaa is C or S
ASASPXXVPEDLSSLSILFFVGRTPKVLKVYPMVTVEXKXS

SEQ ID NO: 138 - protein, 42 aa, Artificial Sequence
  GFR-binding peptide
  MOD_RES (6), (7), (39), (41): Xaa is C or S
KIPKAXXVPTELSSLSILFFDENEKVVLKVYPDMVVEGXGXR

SEQ ID NO: 139 - protein, 42 aa, Artificial Sequence
  GFR-binding peptide
  MOD_RES (6), (7), (39), (41): Xaa is C or S
SIPKAXXVPTELSSLSILFFDEYDKVVLKVYPEMVVEGXGXR

SEQ ID NO: 140 - protein, 42 aa, Artificial Sequence
  GFR-binding peptide
  MOD_RES (7), (39), (41): Xaa is C or S
HVTKPTXAPTKLSSLSILFFDDSSNVILKVYPNMVVRSXGXH

SEQ ID NO: 141 - protein, 42 aa, Artificial Sequence
  GFR-binding peptide
  MOD_RES (6), (7), (39), (41): Xaa is C or S
YVPKPXXAPTKLSSLSILFFDDSSNVILKVYPNMVVRSXGXH

SEQ ID NO: 142 - protein, 42 aa, Artificial Sequence
  GFR-binding peptide
  MOD_RES (6), (7), (39), (41): Xaa is C or S
TVPKPXXAPTQLSSLSILFFDDSSNVILKVYPNMVVRAXGXH

SEQ ID NO: 143 - protein, 42 aa, Artificial Sequence
  GFR-binding peptide
  MOD_RES (6), (7), (39), (41): Xaa is C or S
AVPKAXXAPTKLSSLSILFFDSSNNVILKVYPNMVVKAXGXH

SEQ ID NO: 144 - protein, 43 aa, Artificial Sequence
  GFR-binding peptide
  MOD_RES (6), (7), (40), (42): Xaa is C or S
KVGKAXXVPTKLSSLSILFFDDMGVPTLKVYPEGMSVAEXGXR

SEQ ID NO: 145 - protein, 42 aa, Artificial Sequence
  GFR-binding peptide
  MOD_RES (6), (7), (39), (41): Xaa is C or S
KASKAXXVPTKLSSLSILFFDKGVVTYLKVYPGMAVSEXGXR

SEQ ID NO: 146 - protein, 42 aa, Artificial Sequence
  GFR-binding peptide
  MOD_RES (6), (7), (39), (41): Xaa is C or S
GSAGPXXTPTKMSSLSILFFNDKQQIILKVYPGMVVDRXGXS

SEQ ID NO: 147 - protein, 42 aa, Artificial Sequence
  GFR-binding peptide
  MOD_RES (6), (7), (39), (41): Xaa is C or S
AAPASXXVPARLSSLSILFFDAANNVVLKVYPDMVVEAXGXR

SEQ ID NO: 148 - protein, 42 aa, Artificial Sequence
  GFR-binding peptide
  MOD_RES (6), (7), (39), (41): Xaa is C or S
STPPTXXVPTRLSSLSILFFDSANNVVLKVYPDMVVESXGXR

SEQ ID NO: 149 - protein, 42 aa, Artificial Sequence
  GFR-binding peptide
  MOD_RES (6), (7), (39), (41): Xaa is C or S
HVPKPXXAPTKLSSLSILFFDDSSNVILKVYPNMVVRSXGXH

SEQ ID NO: 150 - protein, 41 aa, Artificial Sequence
  GFR-binding peptide
  MOD_RES (6), (7), (38), (40): Xaa is C or S
RVPSTXXAPVKTSSLSILFFDNGRVLLLKVYPMIVEEXGXL

SEQ ID NO: 151 - protein, 41 aa, Artificial Sequence
  GFR-binding peptide
  MOD_RES (6), (7), (38), (40): Xaa is C or S
ASAAPXXVPQALSSLSILFFVGRKPKVLKVYPMIVRSXKXS

SEQ ID NO: 152 - protein, 41 aa, Artificial Sequence
  GFR-binding peptide
  MOD_RES (6), (7), (38), (40): Xaa is C or S
ASASPXXVSQDLSSLSILFFIGKTPKILKVYPMIVKSXKXS

SEQ ID NO: 153 - protein, 41 aa, Artificial Sequence
  GFR-binding peptide
  MOD_RES (6), (7), (38), (40): Xaa is C or S
ASASPXXVPQDLSSLSILFFVGRTPKVLKVYPMVVKSXKXS

SEQ ID NO: 154 - protein, 44 aa, Artificial Sequence
  GFR-binding peptide
  MOD_RES (7), (41), (43): Xaa is C or S
NDEGLEXVPTEESSLSILFFRIKPHQGQHLKVYPFLQHNKXEXR

SEQ ID NO: 155 - protein, 44 aa, Artificial Sequence
  GFR-binding peptide
  MOD_RES (7), (41), (43): Xaa is C or S
NDEGLEXVPTGQSSLSILFFRIKPHQGQHLKVYPLEEHSQXEXR

SEQ ID NO: 156 - protein, 45 aa, Artificial Sequence
  GFR-binding peptide
  MOD_RES (5), (42), (44): Xaa is C or S
SSVKXQPSRVHHSSLSILFFEYVRKKPKLLKVYPRLEEHLEXAXA

SEQ ID NO: 157 - protein, 45 aa, Artificial Sequence
  GFR-binding peptide
  MOD_RES (5), (42), (44): Xaa is C or S
RNVQXRPTQVQLSSLSILFFEIVRKKPIFLKVYPTLEDHLAXKXE

SEQ ID NO: 158 - protein, 42 aa, Artificial Sequence
  GFR-binding peptide
  MOD_RES (6), (7), (39), (41): Xaa is C or S
KIPKAXXAPTELNAISVLYFDENEKVVLKKYRDMVVRGXGXR

SEQ ID NO: 159 - protein, 42 aa, Artificial Sequence
  GFR-binding peptide
  MOD_RES (6), (7), (39), (41): Xaa is C or S
GIPEPXXAPTKMNAISVLYFDENKNVVLKKYRNMVVRSXAXR

SEQ ID NO: 160 - protein, 42 aa, Artificial Sequence
  GFR-binding peptide
  MOD_RES (6), (7), (39), (41): Xaa is C or S
SIPKAXXAPTELNAISVLYFDEYDKVVLKKYREMVVRGXGXR

SEQ ID NO: 161 - protein, 42 aa, Artificial Sequence
  GFR-binding peptide
  MOD_RES (6), (7), (39), (41): Xaa is C or S
AVPKAXXAPTKLNAISVLYFDSSNNVILKKYRNMVVRAXGXH

SEQ ID NO: 162 - protein, 43 aa, Artificial Sequence
  GFR-binding peptide
  MOD_RES (6), (7), (40), (42): Xaa is C or S
KVGKAXXAPTKLNAISVLYFDDMGVPTLKKYREGMSVVRXGXR

SEQ ID NO: 163 - protein, 42 aa, Artificial Sequence
  GFR-binding peptide
  MOD_RES (6), (7), (39), (41): Xaa is C or S
KASKAXXAPTKLNAISVLYFDKGVVTYLKKYRGMVVREXGXR

SEQ ID NO: 164 - protein, 42 aa, Artificial Sequence
  GFR-binding peptide
  MOD_RES (6), (7), (39), (41): Xaa is C or S
GSAGPXXAPTKMNAISVLYFNDKQQIILKKYRGMVVRRXGXS

SEQ ID NO: 165 - protein, 42 aa, Artificial Sequence
  GFR-binding peptide
  MOD_RES (6), (7), (39), (41): Xaa is C or S
AAPASXXAPTRLNAISVLYFDAANNVVLKKYRDMVVRAXGXR

SEQ ID NO: 166 - protein, 42 aa, Artificial Sequence
  GFR-binding peptide
  MOD_RES (6), (7), (39), (41): Xaa is C or S
STPPTXXAPTRLNAISVLYFDSANNVVLKKYRDMVVRSXGXR

SEQ ID NO: 167 - protein, 41 aa, Artificial Sequence
  GFR-binding peptide
  MOD_RES (6), (7), (38), (40): Xaa is C or S
RVPSTXXAPTKTNAISVLYFDNGRVLLLKKYRMIVVRXGXL

SEQ ID NO: 168 - protein, 41 aa, Artificial Sequence
  GFR-binding peptide
  MOD_RES (6), (7), (38), (40): Xaa is C or S
ASAAPXXAPTALNAISVLYFVGRKPKVLKKYRMIVVRXKXS

SEQ ID NO: 169 - protein, 41 aa, Artificial Sequence
  GFR-binding peptide
  MOD_RES (6), (7), (38), (40): Xaa is C or S
ASASPXXAPTDLNAISVLYFIGKTPKILKKYRMIVVRXKXS

SEQ ID NO: 170 - protein, 41 aa, Artificial Sequence
  GFR-binding peptide
  MOD_RES (6), (7), (38), (40): Xaa is C or S
ASASPXXAPTDLNAISVLYFVGRTPKVLKKYRMVVVRXKXS

SEQ ID NO: 171 - protein, 42 aa, Artificial Sequence
  GFR-binding peptide
  MOD_RES (6), (7), (39), (41): Xaa is C or S
KIPKAXXVPTELNAISVLYFDENEKVVLKKYRDMVVEGXGXR

SEQ ID NO: 172 - protein, 42 aa, Artificial Sequence
  GFR-binding peptide
  MOD_RES (6), (7), (39), (41): Xaa is C or S
GIPEPXXVPEKMNAISVLYFDENKNVVLKKYRNMTVESXAXR

SEQ ID NO: 173 - protein, 42 aa, Artificial Sequence
  GFR-binding peptide
  MOD_RES (6), (7), (39), (41): Xaa is C or S
SIPKAXXVPTELNAISVLYFDEYDKVVLKKYREMVVEGXGXR

SEQ ID NO: 174 - protein, 42 aa, Artificial Sequence
  GFR-binding peptide
  MOD_RES (6), (7), (39), (41): Xaa is C or S
AVPKAXXAPTKLNAISVLYFDSSNNVILKKYRNMVVKAXGXH

SEQ ID NO: 175 - protein, 43 aa, Artificial Sequence
  GFR-binding peptide
  MOD_RES (6), (7), (40), (42): Xaa is C or S
KVGKAXXVPTKLNAISVLYFDDMGVPTLKKYREGMSVAEXGXR

SEQ ID NO: 176 - protein, 42 aa, Artificial Sequence
  GFR-binding peptide
  MOD_RES (6), (7), (39), (41): Xaa is C or S
KASKAXXVPTKLNAISVLYFDKGVVTYLKKYRGMAVSEXGXR

SEQ ID NO: 177 - protein, 42 aa, Artificial Sequence
  GFR-binding peptide
  MOD_RES (6), (7), (39), (41): Xaa is C or S
GSAGPXXTPTKMNAISVLYFNDKQQIILKKYRGMVVDRXGXS

SEQ ID NO: 178 - protein, 42 aa, Artificial Sequence
  GFR-binding peptide
  MOD_RES (6), (7), (39), (41): Xaa is C or S
AAPASXXVPARLNAISVLYFDAANNVVLKKYRDMVVEAXGXR

SEQ ID NO: 179 - protein, 42 aa, Artificial Sequence
  GFR-binding peptide
  MOD_RES (6), (7), (39), (41): Xaa is C or S
STPPTXXVPTRLNAISVLYFDSANNVVLKKYRDMVVESXGXR

SEQ ID NO: 180 - protein, 41 aa, Artificial Sequence
  GFR-binding peptide
  MOD_RES (6), (7), (38), (40): Xaa is C or S
RVPSTXXAPVKTNAISVLYFDNGRVLLLKKYRMIVEEXGXL

SEQ ID NO: 181 - protein, 41 aa, Artificial Sequence
  GFR-binding peptide
  MOD_RES (6), (7), (38), (40): Xaa is C or S
ASAAPXXVPQALNAISVLYFVGRKPKVLKKYRMIVRSXKXS

SEQ ID NO: 182 - protein, 41 aa, Artificial Sequence
  GFR-binding peptide
  MOD_RES (6), (7), (38), (40): Xaa is C or S
ASASPXXVSQDLNAISVLYFIGKTPKILKKYRMIVKSXKXS

SEQ ID NO: 183 - protein, 41 aa, Artificial Sequence
  GFR-binding peptide
  MOD_RES (6), (7), (38), (40): Xaa is C or S
ASASPXXVPQDLNAISVLYFVGRTPKVLKKYRMVVKSXKXS

SEQ ID NO: 184 - protein, 44 aa, Artificial Sequence
  GFR-binding peptide
  MOD_RES (7), (41), (43): Xaa is C or S
NDEGLEXVPTEENAISVLYFRIKPHQGQHLKKYRFLQHNKXEXR

SEQ ID NO: 185 - protein, 44 aa, Artificial Sequence
  GFR-binding peptide
  MOD_RES (7), (41), (43): Xaa is C or S
NDEGLEXVPTGQNAISVLYFRIKPHQGQHLKKYRLEEHSQXEXR

SEQ ID NO: 186 - protein, 45 aa, Artificial Sequence
  GFR-binding peptide
  MOD_RES (5), (42), (44): Xaa is C or S
SSVKXQPSRVHHNAISVLYFEYVRKKPKLLKKYRRLEEHLEXAXA

SEQ ID NO: 187 - protein, 45 aa, Artificial Sequence
  GFR-binding peptide
  MOD_RES (5), (42), (44): Xaa is C or S
RNVQXRPTQVQLNAISVLYFEIVRKKPIFLKKYRTLEDHLAXKXE

SEQ ID NO: 188 - protein, 42 aa, Artificial Sequence
  GFR-binding peptide
  MOD_RES (6), (7), (39), (41): Xaa is C or S
KIPKAXXAPTELSATSVLYYDENEKVVLRKHRDMVVKGXGXR

SEQ ID NO: 189 - protein, 42 aa, Artificial Sequence
  GFR-binding peptide
  MOD_RES (6), (7), (39), (41): Xaa is C or S
GIPEPXXAPTKMSATSVLYYDENKNVVLRKHRNMVVKSXAXR

SEQ ID NO: 190 - protein, 42 aa, Artificial Sequence
  GFR-binding peptide
  MOD_RES (6), (7), (39), (41): Xaa is C or S
SIPKAXXAPTELSATSVLYYDEYDKVVLRKHREMVVKGXGXR

SEQ ID NO: 191 - protein, 42 aa, Artificial Sequence
  GFR-binding peptide
  MOD_RES (7), (39), (41): Xaa is C or S
HVTKPTXAPTKLSATSVLYYDDSSNVILRKHRNMVVKSXGXH

SEQ ID NO: 192 - protein, 42 aa, Artificial Sequence
  GFR-binding peptide
  MOD_RES (6), (7), (39), (41): Xaa is C or S
YVPKPXXAPTKLSATSVLYYDDSSNVILRKHRNMVVKSXGXH

SEQ ID NO: 193 - protein, 42 aa, Artificial Sequence
  GFR-binding peptide
  MOD_RES (6), (7), (39), (41): Xaa is C or S
TVPKPXXAPTQLSATSVLYYDDSSNVILRKHRNMVVKAXGXH

SEQ ID NO: 194 - protein, 43 aa, Artificial Sequence
  GFR-binding peptide
  MOD_RES (6), (7), (40), (42): Xaa is C or S
KVGKAXXAPTKLSATSVLYYDDMGVPTLRKHREGMSVVKXGXR

SEQ ID NO: 195 - protein, 42 aa, Artificial Sequence
  GFR-binding peptide
  MOD_RES (6), (7), (39), (41): Xaa is C or S
KASKAXXAPTKLSATSVLYYDKGVVTYLRKHRGMVVKEXGXR

SEQ ID NO: 196 - protein, 42 aa, Artificial Sequence
  GFR-binding peptide
  MOD_RES (6), (7), (39), (41): Xaa is C or S
GSAGPXXAPTKMSATSVLYYNDKQQIILRKHRGMVVKRXGXS

SEQ ID NO: 197 - protein, 42 aa, Artificial Sequence
  GFR-binding peptide
  MOD_RES (6), (7), (39), (41): Xaa is C or S
AAPASXXAPTRLSATSVLYYDAANNVVLRKHRDMVVKAXGXR

SEQ ID NO: 198 - protein, 42 aa, Artificial Sequence
  GFR-binding peptide
  MOD_RES (6), (7), (39), (41): Xaa is C or S
STPPTXXAPTRLSATSVLYYDSANNVVLRKHRDMVVKSXGXR

SEQ ID NO: 199 - protein, 42 aa, Artificial Sequence
  GFR-binding peptide
  MOD_RES (6), (7), (39), (41): Xaa is C or S
HVPKPXXAPTKLSATSVLYYDDSSNVILRKHRNMVVKSXGXH

SEQ ID NO: 200 - protein, 41 aa, Artificial Sequence
  GFR-binding peptide
  MOD_RES (6), (7), (38), (40): Xaa is C or S
RVPSTXXAPTKTSATSVLYYDNGRVLLLRKHRMIVVKXGXL

SEQ ID NO: 201 - protein, 41 aa, Artificial Sequence
  GFR-binding peptide
  MOD_RES (6), (7), (38), (40): Xaa is C or S
ASAAPXXAPTALSATSVLYYVGRKPKVLRKHRMIVVKXKXS

SEQ ID NO: 202 - protein, 41 aa, Artificial Sequence
  GFR-binding peptide
  MOD_RES (6), (7), (38), (40): Xaa is C or S
ASASPXXAPTDLSATSVLYYIGKTPKILRKHRMIVVKXKXS

SEQ ID NO: 203 - protein, 41 aa, Artificial Sequence
  GFR-binding peptide
  MOD_RES (6), (7), (38), (40): Xaa is C or S
ASASPXXAPTDLSATSVLYYVGRTPKVLRKHRMVVVKXKXS

SEQ ID NO: 204 - protein, 42 aa, Artificial Sequence
  GFR-binding peptide
  MOD_RES (6), (7), (39), (41): Xaa is C or S
KIPKAXXVPTELSATSVLYYDENEKVVLRKHRDMVVEGXGXR

SEQ ID NO: 205 - protein, 42 aa, Artificial Sequence
  GFR-binding peptide
  MOD_RES (6), (7), (39), (41): Xaa is C or S
GIPEPXXVPEKMSATSVLYYDENKNVVLRKHRNMTVESXAXR

SEQ ID NO: 206 - protein, 42 aa, Artificial Sequence
  GFR-binding peptide
  MOD_RES (6), (7), (39), (41): Xaa is C or S
SIPKAXXVPTELSATSVLYYDEYDKVVLRKHREMVVEGXGXR

SEQ ID NO: 207 - protein, 42 aa, Artificial Sequence
  GFR-binding peptide
  MOD_RES (7), (39), (41): Xaa is C or S
HVTKPTXAPTKLSATSVLYYDDSSNVILRKHRNMVVRSXGXH

SEQ ID NO: 208 - protein, 42 aa, Artificial Sequence
  GFR-binding peptide
  MOD_RES (6), (7), (39), (41): Xaa is C or S
YVPKPXXAPTKLSATSVLYYDDSSNVILRKHRNMVVRSXGXH

SEQ ID NO: 209 - protein, 42 aa, Artificial Sequence
  GFR-binding peptide
  MOD_RES (6), (7), (39), (41): Xaa is C or S
TVPKPXXAPTQLSATSVLYYDDSSNVILRKHRNMVVRAXGXH

SEQ ID NO: 210 - protein, 43 aa, Artificial Sequence
  GFR-binding peptide
  MOD_RES (6), (7), (40), (42): Xaa is C or S
KVGKAXXVPTKLSATSVLYYDDMGVPTLRKHREGMSVAEXGXR

SEQ ID NO: 211 - protein, 42 aa, Artificial Sequence
  GFR-binding peptide
  MOD_RES (6), (7), (39), (41): Xaa is C or S
KASKAXXVPTKLSATSVLYYDKGVVTYLRKHRGMAVSEXGXR

SEQ ID NO: 212 - protein, 42 aa, Artificial Sequence
  GFR-binding peptide
  MOD_RES (6), (7), (39), (41): Xaa is C or S
GSAGPXXTPTKMSATSVLYYNDKQQIILRKHRGMVVDRXGXS

SEQ ID NO: 213 - protein, 42 aa, Artificial Sequence
  GFR-binding peptide
  MOD_RES (6), (7), (39), (41): Xaa is C or S
AAPASXXVPARLSATSVLYYDAANNVVLRKHRDMVVEAXGXR

SEQ ID NO: 214 - protein, 42 aa, Artificial Sequence
  GFR-binding peptide
  MOD_RES (6), (7), (39), (41): Xaa is C or S
STPPTXXVPTRLSATSVLYYDSANNVVLRKHRDMVVESXGXR

SEQ ID NO: 215 - protein, 42 aa, Artificial Sequence
  GFR-binding peptide
  MOD_RES (6), (7), (39), (41): Xaa is C or S
HVPKPXXAPTKLSATSVLYYDDSSNVILRKHRNMVVRSXGXH

SEQ ID NO: 216 - protein, 41 aa, Artificial Sequence
  GFR-binding peptide
  MOD_RES (6), (7), (38), (40): Xaa is C or S
RVPSTXXAPVKTSATSVLYYDNGRVLLLRKHRMIVEEXGXL

SEQ ID NO: 217 - protein, 41 aa, Artificial Sequence
  GFR-binding peptide
  MOD_RES (6), (7), (38), (40): Xaa is C or S
ASAAPXXVPQALSATSVLYYVGRKPKVLRKHRMIVRSXKXS

SEQ ID NO: 218 - protein, 41 aa, Artificial Sequence
  GFR-binding peptide
  MOD_RES (6), (7), (38), (40): Xaa is C or S
ASASPXXVSQDLSATSVLYYIGKTPKILRKHRMIVKSXKXS

SEQ ID NO: 219 - protein, 41 aa, Artificial Sequence
  GFR-binding peptide
  MOD_RES (6), (7), (38), (40): Xaa is C or S
ASASPXXVPQDLSATSVLYYVGRTPKVLRKHRMVVKSXKXS

SEQ ID NO: 220 - protein, 44 aa, Artificial Sequence
  GFR-binding peptide
  MOD_RES (7), (41), (43): Xaa is C or S
NDEGLEXVPTEESATSVLYYRIKPHQGQHLRKHRFLQHNKXEXR

SEQ ID NO: 221 - protein, 44 aa, Artificial Sequence
  GFR-binding peptide
  MOD_RES (7), (41), (43): Xaa is C or S
NDEGLEXVPTGQSATSVLYYRIKPHQGQHLRKHRLEEHSQXEXR

SEQ ID NO: 222 - protein, 45 aa, Artificial Sequence
  GFR-binding peptide
  MOD_RES (5), (42), (44): Xaa is C or S
SSVKXQPSRVHHSATSVLYYEYVRKKPKLLRKHRRLEEHLEXAXA

SEQ ID NO: 223 - protein, 45 aa, Artificial Sequence
  GFR-binding peptide
  MOD_RES (5), (42), (44): Xaa is C or S
RNVQXRPTQVQLSATSVLYYEIVRKKPIFLRKHRTLEDHLAXKXE

SEQ ID NO: 224 - protein, 42 aa, Artificial Sequence
  GFR-binding peptide
  MOD_RES (6), (7), (39), (41): Xaa is C or S
KIPKAXXVPTELSPISVLYKDENEKVVLKYHYDMVAEGXGXR

SEQ ID NO: 225 - protein, 42 aa, Artificial Sequence
  GFR-binding peptide
  MOD_RES (6), (7), (39), (41): Xaa is C or S
GIPEPXXVPTKMSPISVLYKDENKNVVLKYHYNMVAESXAXR

SEQ ID NO: 226 - protein, 42 aa, Artificial Sequence
  GFR-binding peptide
  MOD_RES (6), (7), (39), (41): Xaa is C or S
SIPKAXXVPTELSPISVLYKDEYDKVVLKYHYEMVAEGXGXR

SEQ ID NO: 227 - protein, 42 aa, Artificial Sequence
  GFR-binding peptide
  MOD_RES (7), (39), (41): Xaa is C or S
HVTKPTXVPTKLSPISVLYKDDSSNVILKYHYNMVAESXGXH

SEQ ID NO: 228 - protein, 42 aa, Artificial Sequence
  GFR-binding peptide
  MOD_RES (6), (7), (39), (41): Xaa is C or S
YVPKPXXVPTKLSPISVLYKDDSSNVILKYHYNMVAESXGXH

SEQ ID NO: 229 - protein, 42 aa, Artificial Sequence
  GFR-binding peptide
  MOD_RES (6), (7), (39), (41): Xaa is C or S
TVPKPXXVPTQLSPISVLYKDDSSNVILKYHYNMVAEAXGXH

SEQ ID NO: 230 - protein, 42 aa, Artificial Sequence
  GFR-binding peptide
  MOD_RES (6), (7), (39), (41): Xaa is C or S
AVPKAXXVPTKLSPISVLYKDSSNNVILKYHYNMVAEAXGXH

SEQ ID NO: 231 - protein, 42 aa, Artificial Sequence
  GFR-binding peptide
  MOD_RES (6), (7), (39), (41): Xaa is C or S
KASKAXXVPTKLSPISVLYKDKGVVTYLKYHYGMVAEEXGXR

SEQ ID NO: 232 - protein, 42 aa, Artificial Sequence
  GFR-binding peptide
  MOD_RES (6), (7), (39), (41): Xaa is C or S
GSAGPXXVPTKMSPISVLYKNDKQQIILKYHYGMVAERXGXS

SEQ ID NO: 233 - protein, 42 aa, Artificial Sequence
  GFR-binding peptide
  MOD_RES (6), (7), (39), (41): Xaa is C or S
AAPASXXVPTRLSPISVLYKDAANNVVLKYHYDMVAEAXGXR

SEQ ID NO: 234 - protein, 42 aa, Artificial Sequence
  GFR-binding peptide
  MOD_RES (6), (7), (39), (41): Xaa is C or S
STPPTXXVPTRLSPISVLYKDSANNVVLKYHYDMVAESXGXR

SEQ ID NO: 235 - protein, 42 aa, Artificial Sequence
  GFR-binding peptide
  MOD_RES (6), (7), (39), (41): Xaa is C or S
HVPKPXXVPTKLSPISVLYKDDSSNVILKYHYNMVAESXGXH

SEQ ID NO: 236 - protein, 41 aa, Artificial Sequence
  GFR-binding peptide
  MOD_RES (6), (7), (38), (40): Xaa is C or S
RVPSTXXVPTKTSPISVLYKDNGRVLLLKYHYMIVAEXGXL

SEQ ID NO: 237 - protein, 41 aa, Artificial Sequence
  GFR-binding peptide
  MOD_RES (6), (7), (38), (40): Xaa is C or S
ASAAPXXVPTALSPISVLYKVGRKPKVLKYHYMIVAEXKXS

SEQ ID NO: 238 - protein, 41 aa, Artificial Sequence
  GFR-binding peptide
  MOD_RES (6), (7), (38), (40): Xaa is C or S
ASASPXXVPTDLSPISVLYKIGKTPKILKYHYMIVAEXKXS

SEQ ID NO: 239 - protein, 41 aa, Artificial Sequence
  GFR-binding peptide
  MOD_RES (6), (7), (38), (40): Xaa is C or S
ASASPXXVPTDLSPISVLYKVGRTPKVLKYHYMVVAEXKXS

SEQ ID NO: 240 - protein, 42 aa, Artificial Sequence
  GFR-binding peptide
  MOD_RES (6), (7), (39), (41): Xaa is C or S
KIPKAXXVPTELSPISVLYKDENEKVVLKYHYDMVVEGXGXR

SEQ ID NO: 241 - protein, 42 aa, Artificial Sequence
  GFR-binding peptide
  MOD_RES (6), (7), (39), (41): Xaa is C or S
GIPEPXXVPEKMSPISVLYKDENKNVVLKYHYNMTVESXAXR

SEQ ID NO: 242 - protein, 42 aa, Artificial Sequence
  GFR-binding peptide
  MOD_RES (6), (7), (39), (41): Xaa is C or S
SIPKAXXVPTELSPISVLYKDEYDKVVLKYHYEMVVEGXGXR

SEQ ID NO: 243 - protein, 42 aa, Artificial Sequence
  GFR-binding peptide
  MOD_RES (7), (39), (41): Xaa is C or S
HVTKPTXAPTKLSPISVLYKDDSSNVILKYHYNMVVRSXGXH

SEQ ID NO: 244 - protein, 42 aa, Artificial Sequence
  GFR-binding peptide
  MOD_RES (6), (7), (39), (41): Xaa is C or S
YVPKPXXAPTKLSPISVLYKDDSSNVILKYHYNMVVRSXGXH

SEQ ID NO: 245 - protein, 42 aa, Artificial Sequence
  GFR-binding peptide
  MOD_RES (6), (7), (39), (41): Xaa is C or S
TVPKPXXAPTQLSPISVLYKDDSSNVILKYHYNMVVRAXGXH

SEQ ID NO: 246 - protein, 42 aa, Artificial Sequence
  GFR-binding peptide
  MOD_RES (6), (7), (39), (41): Xaa is C or S
AVPKAXXAPTKLSPISVLYKDSSNNVILKYHYNMVVKAXGXH

SEQ ID NO: 247 - protein, 42 aa, Artificial Sequence
  GFR-binding peptide
  MOD_RES (6), (7), (39), (41): Xaa is C or S
KASKAXXVPTKLSPISVLYKDKGVVTYLKYHYGMAVSEXGXR

SEQ ID NO: 248 - protein, 42 aa, Artificial Sequence
  GFR-binding peptide
  MOD_RES (6), (7), (39), (41): Xaa is C or S
GSAGPXXTPTKMSPISVLYKNDKQQIILKYHYGMVVDRXGXS

SEQ ID NO: 249 - protein, 42 aa, Artificial Sequence
  GFR-binding peptide
  MOD_RES (6), (7), (39), (41): Xaa is C or S
AAPASXXVPARLSPISVLYKDAANNVVLKYHYDMVVEAXGXR

SEQ ID NO: 250 - protein, 42 aa, Artificial Sequence
  GFR-binding peptide
  MOD_RES (6), (7), (39), (41): Xaa is C or S
STPPTXXVPTRLSPISVLYKDSANNVVLKYHYDMVVESXGXR

SEQ ID NO: 251 - protein, 42 aa, Artificial Sequence
  GFR-binding peptide
  MOD_RES (6), (7), (39), (41): Xaa is C or S
HVPKPXXAPTKLSPISVLYKDDSSNVILKYHYNMVVRSXGXH

SEQ ID NO: 252 - protein, 41 aa, Artificial Sequence
  GFR-binding peptide
  MOD_RES (6), (7), (38), (40): Xaa is C or S
RVPSTXXAPVKTSPISVLYKDNGRVLLLKYHYMIVEEXGXL

SEQ ID NO: 253 - protein, 41 aa, Artificial Sequence
  GFR-binding peptide
  MOD_RES (6), (7), (38), (40): Xaa is C or S
ASAAPXXVPQALSPISVLYKVGRKPKVLKYHYMIVRSXKXS

SEQ ID NO: 254 - protein, 41 aa, Artificial Sequence
  GFR-binding peptide
  MOD_RES (6), (7), (38), (40): Xaa is C or S
ASASPXXVSQDLSPISVLYKIGKTPKILKYHYMIVKSXKXS

SEQ ID NO: 255 - protein, 41 aa, Artificial Sequence
  GFR-binding peptide
  MOD_RES (6), (7), (38), (40): Xaa is C or S
ASASPXXVPQDLSPISVLYKVGRTPKVLKYHYMVVKSXKXS

SEQ ID NO: 256 - protein, 44 aa, Artificial Sequence
  GFR-binding peptide
  MOD_RES (7), (41), (43): Xaa is C or S
NDEGLEXVPTEESPISVLYKRIKPHQGQHLKYHYFLQHNKXEXR

SEQ ID NO: 257 - protein, 44 aa, Artificial Sequence
  GFR-binding peptide
  MOD_RES (7), (41), (43): Xaa is C or S
NDEGLEXVPTGQSPISVLYKRIKPHQGQHLKYHYLEEHSQXEXR

SEQ ID NO: 258 - protein, 45 aa, Artificial Sequence
  GFR-binding peptide
  MOD_RES (5), (42), (44): Xaa is C or S
SSVKXQPSRVHHSPISVLYKEYVRKKPKLLKYHYRLEEHLEXAXA

SEQ ID NO: 259 - protein, 45 aa, Artificial Sequence
  GFR-binding peptide
  MOD_RES (5), (42), (44): Xaa is C or S
RNVQXRPTQVQLSPISVLYKEIVRKKPIFLKYHYTLEDHLAXKXE

SEQ ID NO: 260 - protein, 42 aa, Artificial Sequence
  GFR-binding peptide
  MOD_RES (6), (7), (39), (41): Xaa is C or S
KIPKAXXVPTELEPISILYLDENEKVVKFKYEDMAVSGXGXR

SEQ ID NO: 261 - protein, 42 aa, Artificial Sequence
  GFR-binding peptide
  MOD_RES (6), (7), (39), (41): Xaa is C or S
GIPEPXXVPTKMEPISILYLDENKNVVKFKYENMAVSSXAXR

SEQ ID NO: 262 - protein, 42 aa, Artificial Sequence
  GFR-binding peptide
  MOD_RES (6), (7), (39), (41): Xaa is C or S
SIPKAXXVPTELEPISILYLDEYDKVVKFKYEEMAVSGXGXR

SEQ ID NO: 263 - protein, 42 aa, Artificial Sequence
  GFR-binding peptide
  MOD_RES (7), (39), (41): Xaa is C or S
HVTKPTXVPTKLEPISILYLDDSSNVIKFKYENMAVSSXGXH

SEQ ID NO: 264 - protein, 42 aa, Artificial Sequence
  GFR-binding peptide
  MOD_RES (6), (7), (39), (41): Xaa is C or S
YVPKPXXVPTKLEPISILYLDDSSNVIKFKYENMAVSSXGXH

SEQ ID NO: 265 - protein, 42 aa, Artificial Sequence
  GFR-binding peptide
  MOD_RES (6), (7), (39), (41): Xaa is C or S
TVPKPXXVPTQLEPISILYLDDSSNVIKFKYENMAVSAXGXH

SEQ ID NO: 266 - protein, 42 aa, Artificial Sequence
  GFR-binding peptide
  MOD_RES (6), (7), (39), (41): Xaa is C or S
AVPKAXXVPTKLEPISILYLDSSNNVIKFKYENMAVSAXGXH

SEQ ID NO: 267 - protein, 43 aa, Artificial Sequence
  GFR-binding peptide
  MOD_RES (6), (7), (40), (42): Xaa is C or S
KVGKAXXVPTKLEPISILYLDDMGVPTKFKYEEGMSAVSXGXR

SEQ ID NO: 268 - protein, 42 aa, Artificial Sequence
  GFR-binding peptide
  MOD_RES (6), (7), (39), (41): Xaa is C or S
GSAGPXXVPTKMEPISILYLNDKQQIIKFKYEGMAVSRXGXS

SEQ ID NO: 269 - protein, 42 aa, Artificial Sequence
  GFR-binding peptide
  MOD_RES (6), (7), (39), (41): Xaa is C or S
AAPASXXVPTRLEPISILYLDAANNVVKFKYEDMAVSAXGXR

SEQ ID NO: 270 - protein, 42 aa, Artificial Sequence
  GFR-binding peptide
  MOD_RES (6), (7), (39), (41): Xaa is C or S
STPPTXXVPTRLEPISILYLDSANNVVKFKYEDMAVSSXGXR

SEQ ID NO: 271 - protein, 42 aa, Artificial Sequence
  GFR-binding peptide
  MOD_RES (6), (7), (39), (41): Xaa is C or S
HVPKPXXVPTKLEPISILYLDDSSNVIKFKYENMAVSSXGXH

SEQ ID NO: 272 - protein, 41 aa, Artificial Sequence
  GFR-binding peptide
  MOD_RES (6), (7), (38), (40): Xaa is C or S
RVPSTXXVPTKTEPISILYLDNGRVLLKFKYEMIAVSXGXL

SEQ ID NO: 273 - protein, 41 aa, Artificial Sequence
  GFR-binding peptide
  MOD_RES (6), (7), (38), (40): Xaa is C or S
ASAAPXXVPTALEPISILYLVGRKPKVKFKYEMIAVSXKXS

SEQ ID NO: 274 - protein, 41 aa, Artificial Sequence
  GFR-binding peptide
  MOD_RES (6), (7), (38), (40): Xaa is C or S
ASASPXXVPTDLEPISILYLIGKTPKIKFKYEMIAVSXKXS

SEQ ID NO: 275 - protein, 41 aa, Artificial Sequence
  GFR-binding peptide
  MOD_RES (6), (7), (38), (40): Xaa is C or S
ASASPXXVPTDLEPISILYLVGRTPKVKFKYEMVAVSXKXS

SEQ ID NO: 276 - protein, 42 aa, Artificial Sequence
  GFR-binding peptide
  MOD_RES (6), (7), (39), (41): Xaa is C or S
KIPKAXXVPTELEPISILYLDENEKVVKFKYEDMVVEGXGXR

SEQ ID NO: 277 - protein, 42 aa, Artificial Sequence
  GFR-binding peptide
  MOD_RES (6), (7), (39), (41): Xaa is C or S
GIPEPXXVPEKMEPISILYLDENKNVVKFKYENMTVESXAXR

SEQ ID NO: 278 - protein, 42 aa, Artificial Sequence
  GFR-binding peptide
  MOD_RES (6), (7), (39), (41): Xaa is C or S
SIPKAXXVPTELEPISILYLDEYDKVVKFKYEEMVVEGXGXR

SEQ ID NO: 279 - protein, 42 aa, Artificial Sequence
  GFR-binding peptide
  MOD_RES (7), (39), (41): Xaa is C or S
HVTKPTXAPTKLEPISILYLDDSSNVIKFKYENMVVRSXGXH

SEQ ID NO: 280 - protein, 42 aa, Artificial Sequence
  GFR-binding peptide
  MOD_RES (6), (7), (39), (41): Xaa is C or S
YVPKPXXAPTKLEPISILYLDDSSNVIKFKYENMVVRSXGXH

SEQ ID NO: 281 - protein, 42 aa, Artificial Sequence
  GFR-binding peptide
  MOD_RES (6), (7), (39), (41): Xaa is C or S
TVPKPXXAPTQLEPISILYLDDSSNVIKFKYENMVVRAXGXH

SEQ ID NO: 282 - protein, 42 aa, Artificial Sequence
  GFR-binding peptide
  MOD_RES (6), (7), (39), (41): Xaa is C or S
AVPKAXXAPTKLEPISILYLDSSNNVIKFKYENMVVKAXGXH

SEQ ID NO: 283 - protein, 43 aa, Artificial Sequence
  GFR-binding peptide
  MOD_RES (6), (7), (40), (42): Xaa is C or S
KVGKAXXVPTKLEPISILYLDDMGVPTKFKYEEGMSVAEXGXR

SEQ ID NO: 284 - protein, 42 aa, Artificial Sequence
  GFR-binding peptide
  MOD_RES (6), (7), (39), (41): Xaa is C or S
GSAGPXXTPTKMEPISILYLNDKQQIIKFKYEGMVVDRXGXS

SEQ ID NO: 285 - protein, 42 aa, Artificial Sequence
  GFR-binding peptide
  MOD_RES (6), (7), (39), (41): Xaa is C or S
AAPASXXVPARLEPISILYLDAANNVVKFKYEDMVVEAXGXR

SEQ ID NO: 286 - protein, 42 aa, Artificial Sequence
  GFR-binding peptide
  MOD_RES (6), (7), (39), (41): Xaa is C or S
STPPTXXVPTRLEPISILYLDSANNVVKFKYEDMVVESXGXR

SEQ ID NO: 287 - protein, 42 aa, Artificial Sequence
  GFR-binding peptide
  MOD_RES (6), (7), (39), (41): Xaa is C or S
HVPKPXXAPTKLEPISILYLDDSSNVIKFKYENMVVRSXGXH

SEQ ID NO: 288 - protein, 41 aa, Artificial Sequence
  GFR-binding peptide
  MOD_RES (6), (7), (38), (40): Xaa is C or S
RVPSTXXAPVKTEPISILYLDNGRVLLKFKYEMIVEEXGXL

SEQ ID NO: 289 - protein, 41 aa, Artificial Sequence
  GFR-binding peptide
  MOD_RES (6), (7), (38), (40): Xaa is C or S
ASAAPXXVPQALEPISILYLVGRKPKVKFKYEMIVRSXKXS

SEQ ID NO: 290 - protein, 41 aa, Artificial Sequence
  GFR-binding peptide
  MOD_RES (6), (7), (38), (40): Xaa is C or S
ASASPXXVSQDLEPISILYLIGKTPKIKFKYEMIVKSXKXS

SEQ ID NO: 291 - protein, 41 aa, Artificial Sequence
  GFR-binding peptide
  MOD_RES (6), (7), (38), (40): Xaa is C or S
ASASPXXVPQDLEPISILYLVGRTPKVKFKYEMVVKSXKXS

SEQ ID NO: 292 - protein, 44 aa, Artificial Sequence
  GFR-binding peptide
  MOD_RES (7), (41), (43): Xaa is C or S
NDEGLEXVPTEEEPISILYLRIKPHQGQHKFKYEFLQHNKXEXR

SEQ ID NO: 293 - protein, 44 aa, Artificial Sequence
  GFR-binding peptide
  MOD_RES (7), (41), (43): Xaa is C or S
NDEGLEXVPTGQEPISILYLRIKPHQGQHKFKYELEEHSQXEXR

SEQ ID NO: 294 - protein, 45 aa, Artificial Sequence
  GFR-binding peptide
  MOD_RES (5), (42), (44): Xaa is C or S
SSVKXQPSRVHHEPISILYLEYVRKKPKLKFKYERLEEHLEXAXA

SEQ ID NO: 295 - protein, 45 aa, Artificial Sequence
  GFR-binding peptide
  MOD_RES (5), (42), (44): Xaa is C or S
RNVQXRPTQVQLEPISILYLEIVRKKPIFKFKYETLEDHLAXKXE

SEQ ID NO: 296 - protein, 42 aa, Artificial Sequence
  GFR-binding peptide
  MOD_RES (6), (7), (39), (41): Xaa is C or S
KIPKAXXTPTELSPINMLYFDENEKVVYGKIPDMVVDGXGXR

SEQ ID NO: 297 - protein, 42 aa, Artificial Sequence
  GFR-binding peptide
  MOD_RES (6), (7), (39), (41): Xaa is C or S
GIPEPXXTPTKMSPINMLYFDENKNVVYGKIPNMVVDSXAXR

SEQ ID NO: 298 - protein, 42 aa, Artificial Sequence
  GFR-binding peptide
  MOD_RES (6), (7), (39), (41): Xaa is C or S
SIPKAXXTPTELSPINMLYFDEYDKVVYGKIPEMVVDGXGXR

SEQ ID NO: 299 - protein, 42 aa, Artificial Sequence
  GFR-binding peptide
  MOD_RES (7), (39), (41): Xaa is C or S
HVTKPTXTPTKLSPINMLYFDDSSNVIYGKIPNMVVDSXGXH

SEQ ID NO: 300 - protein, 42 aa, Artificial Sequence
  GFR-binding peptide
  MOD_RES (6), (7), (39), (41): Xaa is C or S
YVPKPXXTPTKLSPINMLYFDDSSNVIYGKIPNMVVDSXGXH

SEQ ID NO: 301 - protein, 42 aa, Artificial Sequence
  GFR-binding peptide
  MOD_RES (6), (7), (39), (41): Xaa is C or S
TVPKPXXTPTQLSPINMLYFDDSSNVIYGKIPNMVVDAXGXH

SEQ ID NO: 302 - protein, 42 aa, Artificial Sequence
  GFR-binding peptide
  MOD_RES (6), (7), (39), (41): Xaa is C or S
AVPKAXXTPTKLSPINMLYFDSSNNVIYGKIPNMVVDAXGXH

SEQ ID NO: 303 - protein, 43 aa, Artificial Sequence
  GFR-binding peptide
  MOD_RES (6), (7), (40), (42): Xaa is C or S
KVGKAXXTPTKLSPINMLYFDDMGVPTYGKIPEGMSVVDXGXR

SEQ ID NO: 304 - protein, 42 aa, Artificial Sequence
  GFR-binding peptide
  MOD_RES (6), (7), (39), (41): Xaa is C or S
KASKAXXTPTKLSPINMLYFDKGVVTYYGKIPGMVVDEXGXR

SEQ ID NO: 305 - protein, 42 aa, Artificial Sequence
  GFR-binding peptide
  MOD_RES (6), (7), (39), (41): Xaa is C or S
AAPASXXTPTRLSPINMLYFDAANNVVYGKIPDMVVDAXGXR

SEQ ID NO: 306 - protein, 42 aa, Artificial Sequence
  GFR-binding peptide
  MOD_RES (6), (7), (39), (41): Xaa is C or S
STPPTXXTPTRLSPINMLYFDSANNVVYGKIPDMVVDSXGXR

SEQ ID NO: 307 - protein, 42 aa, Artificial Sequence
  GFR-binding peptide
  MOD_RES (6), (7), (39), (41): Xaa is C or S
HVPKPXXTPTKLSPINMLYFDDSSNVIYGKIPNMVVDSXGXH

SEQ ID NO: 308 - protein, 41 aa, Artificial Sequence
  GFR-binding peptide
  MOD_RES (6), (7), (38), (40): Xaa is C or S
RVPSTXXTPTKTSPINMLYFDNGRVLLYGKIPMIVVDXGXL

SEQ ID NO: 309 - protein, 41 aa, Artificial Sequence
  GFR-binding peptide
  MOD_RES (6), (7), (38), (40): Xaa is C or S
ASAAPXXTPTALSPINMLYFVGRKPKVYGKIPMIVVDXKXS

SEQ ID NO: 310 - protein, 41 aa, Artificial Sequence
  GFR-binding peptide
  MOD_RES (6), (7), (38), (40): Xaa is C or S
ASASPXXTPTDLSPINMLYFIGKTPKIYGKIPMIVVDXKXS

SEQ ID NO: 311 - protein, 41 aa, Artificial Sequence
  GFR-binding peptide
  MOD_RES (6), (7), (38), (40): Xaa is C or S
ASASPXXTPTDLSPINMLYFVGRTPKVYGKIPMVVVDXKXS

SEQ ID NO: 312 - protein, 42 aa, Artificial Sequence
  GFR-binding peptide
  MOD_RES (6), (7), (39), (41): Xaa is C or S
KIPKAXXVPTELSPINMLYFDENEKVVYGKIPDMVVEGXGXR

SEQ ID NO: 313 - protein, 42 aa, Artificial Sequence
  GFR-binding peptide
  MOD_RES (6), (7), (39), (41): Xaa is C or S
GIPEPXXVPEKMSPINMLYFDENKNVVYGKIPNMTVESXAXR

SEQ ID NO: 314 - protein, 42 aa, Artificial Sequence
  GFR-binding peptide
  MOD_RES (6), (7), (39), (41): Xaa is C or S
SIPKAXXVPTELSPINMLYFDEYDKVVYGKIPEMVVEGXGXR

SEQ ID NO: 315 - protein, 42 aa, Artificial Sequence
  GFR-binding peptide
  MOD_RES (7), (39), (41): Xaa is C or S
HVTKPTXAPTKLSPINMLYFDDSSNVIYGKIPNMVVRSXGXH

SEQ ID NO: 316 - protein, 42 aa, Artificial Sequence
  GFR-binding peptide
  MOD_RES (6), (7), (39), (41): Xaa is C or S
YVPKPXXAPTKLSPINMLYFDDSSNVIYGKIPNMVVRSXGXH

SEQ ID NO: 317 - protein, 42 aa, Artificial Sequence
  GFR-binding peptide
  MOD_RES (6), (7), (39), (41): Xaa is C or S
TVPKPXXAPTQLSPINMLYFDDSSNVIYGKIPNMVVRAXGXH

SEQ ID NO: 318 - protein, 42 aa, Artificial Sequence
  GFR-binding peptide
  MOD_RES (6), (7), (39), (41): Xaa is C or S
AVPKAXXAPTKLSPINMLYFDSSNNVIYGKIPNMVVKAXGXH

SEQ ID NO: 319 - protein, 43 aa, Artificial Sequence
  GFR-binding peptide
  MOD_RES (6), (7), (40), (42): Xaa is C or S
KVGKAXXVPTKLSPINMLYFDDMGVPTYGKIPEGMSVAEXGXR

SEQ ID NO: 320 - protein, 42 aa, Artificial Sequence
  GFR-binding peptide
  MOD_RES (6), (7), (39), (41): Xaa is C or S
KASKAXXVPTKLSPINMLYFDKGVVTYYGKIPGMAVSEXGXR

SEQ ID NO: 321 - protein, 42 aa, Artificial Sequence
  GFR-binding peptide
  MOD_RES (6), (7), (39), (41): Xaa is C or S
AAPASXXVPARLSPINMLYFDAANNVVYGKIPDMVVEAXGXR

SEQ ID NO: 322 - protein, 42 aa, Artificial Sequence
  GFR-binding peptide
  MOD_RES (6), (7), (39), (41): Xaa is C or S
STPPTXXVPTRLSPINMLYFDSANNVVYGKIPDMVVESXGXR

SEQ ID NO: 323 - protein, 42 aa, Artificial Sequence
  GFR-binding peptide
  MOD_RES (6), (7), (39), (41): Xaa is C or S
HVPKPXXAPTKLSPINMLYFDDSSNVIYGKIPNMVVRSXGXH

SEQ ID NO: 324 - protein, 41 aa, Artificial Sequence
  GFR-binding peptide
  MOD_RES (6), (7), (38), (40): Xaa is C or S
RVPSTXXAPVKTSPINMLYFDNGRVLLYGKIPMIVEEXGXL

SEQ ID NO: 325 - protein, 41 aa, Artificial Sequence
  GFR-binding peptide
  MOD_RES (6), (7), (38), (40): Xaa is C or S
ASAAPXXVPQALSPINMLYFVGRKPKVYGKIPMIVRSXKXS

SEQ ID NO: 326 - protein, 41 aa, Artificial Sequence
  GFR-binding peptide
  MOD_RES (6), (7), (38), (40): Xaa is C or S
ASASPXXVSQDLSPINMLYFIGKTPKIYGKIPMIVKSXKXS

SEQ ID NO: 327 - protein, 41 aa, Artificial Sequence
  GFR-binding peptide
  MOD_RES (6), (7), (38), (40): Xaa is C or S
ASASPXXVPQDLSPINMLYFVGRTPKVYGKIPMVVKSXKXS

SEQ ID NO: 328 - protein, 44 aa, Artificial Sequence
  GFR-binding peptide
  MOD_RES (7), (41), (43): Xaa is C or S
NDEGLEXVPTEESPINMLYFRIKPHQGQHYGKIPFLQHNKXEXR

SEQ ID NO: 329 - protein, 44 aa, Artificial Sequence
  GFR-binding peptide
  MOD_RES (7), (41), (43): Xaa is C or S
NDEGLEXVPTGQSPINMLYFRIKPHQGQHYGKIPLEEHSQXEXR

SEQ ID NO: 330 - protein, 45 aa, Artificial Sequence
  GFR-binding peptide
  MOD_RES (5), (42), (44): Xaa is C or S
SSVKXQPSRVHHSPINMLYFEYVRKKPKLYGKIPRLEEHLEXAXA

SEQ ID NO: 331 - protein, 45 aa, Artificial Sequence
  GFR-binding peptide
  MOD_RES (5), (42), (44): Xaa is C or S
RNVQXRPTQVQLSPINMLYFEIVRKKPIFYGKIPTLEDHLAXKXE

SEQ ID NO: 332 - protein, 42 aa, Artificial Sequence
  GFR-binding peptide
  MOD_RES (6), (7), (39), (41): Xaa is C or S
KIPKAXXVPAELSPISILYIDENEKVVYKQYEDMVVEGXGXR

SEQ ID NO: 333 - protein, 42 aa, Artificial Sequence
  GFR-binding peptide
  MOD_RES (6), (7), (39), (41): Xaa is C or S
GIPEPXXVPAKMSPISILYIDENKNVVYKQYENMVVESXAXR

SEQ ID NO: 334 - protein, 42 aa, Artificial Sequence
  GFR-binding peptide
  MOD_RES (6), (7), (39), (41): Xaa is C or S
SIPKAXXVPAELSPISILYIDEYDKVVYKQYEEMVVEGXGXR

SEQ ID NO: 335 - protein, 42 aa, Artificial Sequence
  GFR-binding peptide
  MOD_RES (7), (39), (41): Xaa is C or S
HVTKPTXVPAKLSPISILYIDDSSNVIYKQYENMVVESXGXH

SEQ ID NO: 336 - protein, 42 aa, Artificial Sequence
  GFR-binding peptide
  MOD_RES (6), (7), (39), (41): Xaa is C or S
YVPKPXXVPAKLSPISILYIDDSSNVIYKQYENMVVESXGXH

SEQ ID NO: 337 - protein, 42 aa, Artificial Sequence
  GFR-binding peptide
  MOD_RES (6), (7), (39), (41): Xaa is C or S
TVPKPXXVPAQLSPISILYIDDSSNVIYKQYENMVVEAXGXH

SEQ ID NO: 338 - protein, 42 aa, Artificial Sequence
  GFR-binding peptide
  MOD_RES (6), (7), (39), (41): Xaa is C or S
AVPKAXXVPAKLSPISILYIDSSNNVIYKQYENMVVEAXGXH

SEQ ID NO: 339 - protein, 43 aa, Artificial Sequence
  GFR-binding peptide
  MOD_RES (6), (7), (40), (42): Xaa is C or S
KVGKAXXVPAKLSPISILYIDDMGVPTYKQYEEGMSVVEXGXR

SEQ ID NO: 340 - protein, 42 aa, Artificial Sequence
  GFR-binding peptide
  MOD_RES (6), (7), (39), (41): Xaa is C or S
KASKAXXVPAKLSPISILYIDKGVVTYYKQYEGMVVEEXGXR

SEQ ID NO: 341 - protein, 42 aa, Artificial Sequence
  GFR-binding peptide
  MOD_RES (6), (7), (39), (41): Xaa is C or S
GSAGPXXVPAKMSPISILYINDKQQIIYKQYEGMVVERXGXS

SEQ ID NO: 342 - protein, 42 aa, Artificial Sequence
  GFR-binding peptide
  MOD_RES (6), (7), (39), (41): Xaa is C or S
STPPTXXVPARLSPISILYIDSANNVVYKQYEDMVVESXGXR

SEQ ID NO: 343 - protein, 42 aa, Artificial Sequence
  GFR-binding peptide
  MOD_RES (6), (7), (39), (41): Xaa is C or S
HVPKPXXVPAKLSPISILYIDDSSNVIYKQYENMVVESXGXH

SEQ ID NO: 344 - protein, 41 aa, Artificial Sequence
  GFR-binding peptide
  MOD_RES (6), (7), (38), (40): Xaa is C or S
RVPSTXXVPAKTSPISILYIDNGRVLLYKQYEMIVVEXGXL

SEQ ID NO: 345 - protein, 41 aa, Artificial Sequence
  GFR-binding peptide
  MOD_RES (6), (7), (38), (40): Xaa is C or S
ASAAPXXVPAALSPISILYIVGRKPKVYKQYEMIVVEXKXS

SEQ ID NO: 346 - protein, 41 aa, Artificial Sequence
  GFR-binding peptide
  MOD_RES (6), (7), (38), (40): Xaa is C or S
ASASPXXVPADLSPISILYIIGKTPKIYKQYEMIVVEXKXS

SEQ ID NO: 347 - protein, 41 aa, Artificial Sequence
  GFR-binding peptide
  MOD_RES (6), (7), (38), (40): Xaa is C or S
ASASPXXVPADLSPISILYIVGRTPKVYKQYEMVVVEXKXS

SEQ ID NO: 348 - protein, 42 aa, Artificial Sequence
  GFR-binding peptide
  MOD_RES (6), (7), (39), (41): Xaa is C or S
KIPKAXXVPTELSPISILYIDENEKVVYKQYEDMVVEGXGXR

SEQ ID NO: 349 - protein, 42 aa, Artificial Sequence
  GFR-binding peptide
  MOD_RES (6), (7), (39), (41): Xaa is C or S
GIPEPXXVPEKMSPISILYIDENKNVVYKQYENMTVESXAXR

SEQ ID NO: 350 - protein, 42 aa, Artificial Sequence
  GFR-binding peptide
  MOD_RES (6), (7), (39), (41): Xaa is C or S
SIPKAXXVPTELSPISILYIDEYDKVVYKQYEEMVVEGXGXR

SEQ ID NO: 351 - protein, 42 aa, Artificial Sequence
  GFR-binding peptide
  MOD_RES (7), (39), (41): Xaa is C or S
HVTKPTXAPTKLSPISILYIDDSSNVIYKQYENMVVRSXGXH

SEQ ID NO: 352 - protein, 42 aa, Artificial Sequence
  GFR-binding peptide
  MOD_RES (6), (7), (39), (41): Xaa is C or S
YVPKPXXAPTKLSPISILYIDDSSNVIYKQYENMVVRSXGXH

SEQ ID NO: 353 - protein, 42 aa, Artificial Sequence
  GFR-binding peptide
  MOD_RES (6), (7), (39), (41): Xaa is C or S
TVPKPXXAPTQLSPISILYIDDSSNVIYKQYENMVVRAXGXH

SEQ ID NO: 354 - protein, 42 aa, Artificial Sequence
  GFR-binding peptide
  MOD_RES (6), (7), (39), (41): Xaa is C or S
AVPKAXXAPTKLSPISILYIDSSNNVIYKQYENMVVKAXGXH

SEQ ID NO: 355 - protein, 43 aa, Artificial Sequence
  GFR-binding peptide
  MOD_RES (6), (7), (40), (42): Xaa is C or S
KVGKAXXVPTKLSPISILYIDDMGVPTYKQYEEGMSVAEXGXR

SEQ ID NO: 356 - protein, 42 aa, Artificial Sequence
  GFR-binding peptide
  MOD_RES (6), (7), (39), (41): Xaa is C or S
KASKAXXVPTKLSPISILYIDKGVVTYYKQYEGMAVSEXGXR

SEQ ID NO: 357 - protein, 42 aa, Artificial Sequence
  GFR-binding peptide
  MOD_RES (6), (7), (39), (41): Xaa is C or S
GSAGPXXTPTKMSPISILYINDKQQIIYKQYEGMVVDRXGXS

SEQ ID NO: 358 - protein, 42 aa, Artificial Sequence
  GFR-binding peptide
  MOD_RES (6), (7), (39), (41): Xaa is C or S
STPPTXXVPTRLSPISILYIDSANNVVYKQYEDMVVESXGXR

SEQ ID NO: 359 - protein, 42 aa, Artificial Sequence
  GFR-binding peptide
  MOD_RES (6), (7), (39), (41): Xaa is C or S
HVPKPXXAPTKLSPISILYIDDSSNVIYKQYENMVVRSXGXH

SEQ ID NO: 360 - protein, 41 aa, Artificial Sequence
  GFR-binding peptide
  MOD_RES (6), (7), (38), (40): Xaa is C or S
RVPSTXXAPVKTSPISILYIDNGRVLLYKQYEMIVEEXGXL

SEQ ID NO: 361 - protein, 41 aa, Artificial Sequence
  GFR-binding peptide
  MOD_RES (6), (7), (38), (40): Xaa is C or S
ASAAPXXVPQALSPISILYIVGRKPKVYKQYEMIVRSXKXS

SEQ ID NO: 362 - protein, 41 aa, Artificial Sequence
  GFR-binding peptide
  MOD_RES (6), (7), (38), (40): Xaa is C or S
ASASPXXVSQDLSPISILYIIGKTPKIYKQYEMIVKSXKXS

SEQ ID NO: 363 - protein, 41 aa, Artificial Sequence
  GFR-binding peptide
  MOD_RES (6), (7), (38), (40): Xaa is C or S
ASASPXXVPQDLSPISILYIVGRTPKVYKQYEMVVKSXKXS

SEQ ID NO: 364 - protein, 44 aa, Artificial Sequence
  GFR-binding peptide
  MOD_RES (7), (41), (43): Xaa is C or S
NDEGLEXVPTEESPISILYIRIKPHQGQHYKQYEFLQHNKXEXR

SEQ ID NO: 365 - protein, 44 aa, Artificial Sequence
  GFR-binding peptide
  MOD_RES (7), (41), (43): Xaa is C or S
NDEGLEXVPTGQSPISILYIRIKPHQGQHYKQYELEEHSQXEXR

SEQ ID NO: 366 - protein, 45 aa, Artificial Sequence
  GFR-binding peptide
  MOD_RES (5), (42), (44): Xaa is C or S
SSVKXQPSRVHHSPISILYIEYVRKKPKLYKQYERLEEHLEXAXA

SEQ ID NO: 367 - protein, 45 aa, Artificial Sequence
  GFR-binding peptide
  MOD_RES (5), (42), (44): Xaa is C or S
RNVQXRPTQVQLSPISILYIEIVRKKPIFYKQYETLEDHLAXKXE

SEQ ID NO: 368 - protein, 42 aa, Artificial Sequence
  GFR-binding peptide
  MOD_RES (6), (7), (39), (41): Xaa is C or S
KIPKAXXVPTELSPISILFIDENEKVVYKQYEDMVVEGXGXR

SEQ ID NO: 369 - protein, 42 aa, Artificial Sequence
  GFR-binding peptide
  MOD_RES (6), (7), (39), (41): Xaa is C or S
GIPEPXXVPTKMSPISILFIDENKNVVYKQYENMVVESXAXR

SEQ ID NO: 370 - protein, 42 aa, Artificial Sequence
  GFR-binding peptide
  MOD_RES (6), (7), (39), (41): Xaa is C or S
SIPKAXXVPTELSPISILFIDEYDKVVYKQYEEMVVEGXGXR

SEQ ID NO: 371 - protein, 42 aa, Artificial Sequence
  GFR-binding peptide
  MOD_RES (7), (39), (41): Xaa is C or S
HVTKPTXVPTKLSPISILFIDDSSNVIYKQYENMVVESXGXH

SEQ ID NO: 372 - protein, 42 aa, Artificial Sequence
  GFR-binding peptide
  MOD_RES (6), (7), (39), (41): Xaa is C or S
YVPKPXXVPTKLSPISILFIDDSSNVIYKQYENMVVESXGXH

SEQ ID NO: 373 - protein, 42 aa, Artificial Sequence
  GFR-binding peptide
  MOD_RES (6), (7), (39), (41): Xaa is C or S
TVPKPXXVPTQLSPISILFIDDSSNVIYKQYENMVVEAXGXH

SEQ ID NO: 374 - protein, 42 aa, Artificial Sequence
  GFR-binding peptide
  MOD_RES (6), (7), (39), (41): Xaa is C or S
AVPKAXXVPTKLSPISILFIDSSNNVIYKQYENMVVEAXGXH

SEQ ID NO: 375 - protein, 43 aa, Artificial Sequence
  GFR-binding peptide
  MOD_RES (6), (7), (40), (42): Xaa is C or S
KVGKAXXVPTKLSPISILFIDDMGVPTYKQYEEGMSVVEXGXR

SEQ ID NO: 376 - protein, 42 aa, Artificial Sequence
  GFR-binding peptide
  MOD_RES (6), (7), (39), (41): Xaa is C or S
KASKAXXVPTKLSPISILFIDKGVVTYYKQYEGMVVEEXGXR

SEQ ID NO: 377 - protein, 42 aa, Artificial Sequence
  GFR-binding peptide
  MOD_RES (6), (7), (39), (41): Xaa is C or S
GSAGPXXVPTKMSPISILFINDKQQIIYKQYEGMVVERXGXS

SEQ ID NO: 378 - protein, 42 aa, Artificial Sequence
  GFR-binding peptide
  MOD_RES (6), (7), (39), (41): Xaa is C or S
AAPASXXVPTRLSPISILFIDAANNVVYKQYEDMVVEAXGXR

SEQ ID NO: 379 - protein, 42 aa, Artificial Sequence
  GFR-binding peptide
  MOD_RES (6), (7), (39), (41): Xaa is C or S
HVPKPXXVPTKLSPISILFIDDSSNVIYKQYENMVVESXGXH

SEQ ID NO: 380 - protein, 41 aa, Artificial Sequence
  GFR-binding peptide
  MOD_RES (6), (7), (38), (40): Xaa is C or S
RVPSTXXVPTKTSPISILFIDNGRVLLYKQYEMIVVEXGXL

SEQ ID NO: 381 - protein, 41 aa, Artificial Sequence
  GFR-binding peptide
  MOD_RES (6), (7), (38), (40): Xaa is C or S
ASAAPXXVPTALSPISILFIVGRKPKVYKQYEMIVVEXKXS

SEQ ID NO: 382 - protein, 41 aa, Artificial Sequence
  GFR-binding peptide
  MOD_RES (6), (7), (38), (40): Xaa is C or S
ASASPXXVPTDLSPISILFIIGKTPKIYKQYEMIVVEXKXS

SEQ ID NO: 383 - protein, 41 aa, Artificial Sequence
  GFR-binding peptide
  MOD_RES (6), (7), (38), (40): Xaa is C or S
ASASPXXVPTDLSPISILFIVGRTPKVYKQYEMVVVEXKXS

SEQ ID NO: 384 - protein, 42 aa, Artificial Sequence
  GFR-binding peptide
  MOD_RES (6), (7), (39), (41): Xaa is C or S
GIPEPXXVPEKMSPISILFIDENKNVVYKQYENMTVESXAXR

SEQ ID NO: 385 - protein, 42 aa, Artificial Sequence
  GFR-binding peptide
  MOD_RES (7), (39), (41): Xaa is C or S
HVTKPTXAPTKLSPISILFIDDSSNVIYKQYENMVVRSXGXH

SEQ ID NO: 386 - protein, 42 aa, Artificial Sequence
  GFR-binding peptide
  MOD_RES (6), (7), (39), (41): Xaa is C or S
YVPKPXXAPTKLSPISILFIDDSSNVIYKQYENMVVRSXGXH

SEQ ID NO: 387 - protein, 42 aa, Artificial Sequence
  GFR-binding peptide
  MOD_RES (6), (7), (39), (41): Xaa is C or S
TVPKPXXAPTQLSPISILFIDDSSNVIYKQYENMVVRAXGXH

SEQ ID NO: 388 - protein, 42 aa, Artificial Sequence
  GFR-binding peptide
  MOD_RES (6), (7), (39), (41): Xaa is C or S
AVPKAXXAPTKLSPISILFIDSSNNVIYKQYENMVVKAXGXH

SEQ ID NO: 389 - protein, 43 aa, Artificial Sequence
  GFR-binding peptide
  MOD_RES (6), (7), (40), (42): Xaa is C or S
KVGKAXXVPTKLSPISILFIDDMGVPTYKQYEEGMSVAEXGXR

SEQ ID NO: 390 - protein, 42 aa, Artificial Sequence
  GFR-binding peptide
  MOD_RES (6), (7), (39), (41): Xaa is C or S
KASKAXXVPTKLSPISILFIDKGVVTYYKQYEGMAVSEXGXR

SEQ ID NO: 391 - protein, 42 aa, Artificial Sequence
  GFR-binding peptide
  MOD_RES (6), (7), (39), (41): Xaa is C or S
GSAGPXXTPTKMSPISILFINDKQQIIYKQYEGMVVDRXGXS

SEQ ID NO: 392 - protein, 42 aa, Artificial Sequence
  GFR-binding peptide
  MOD_RES (6), (7), (39), (41): Xaa is C or S
AAPASXXVPARLSPISILFIDAANNVVYKQYEDMVVEAXGXR

SEQ ID NO: 393 - protein, 42 aa, Artificial Sequence
  GFR-binding peptide
  MOD_RES (6), (7), (39), (41): Xaa is C or S
HVPKPXXAPTKLSPISILFIDDSSNVIYKQYENMVVRSXGXH

SEQ ID NO: 394 - protein, 41 aa, Artificial Sequence
  GFR-binding peptide
  MOD_RES (6), (7), (38), (40): Xaa is C or S
RVPSTXXAPVKTSPISILFIDNGRVLLYKQYEMIVEEXGXL

SEQ ID NO: 395 - protein, 41 aa, Artificial Sequence
  GFR-binding peptide
  MOD_RES (6), (7), (38), (40): Xaa is C or S
ASAAPXXVPQALSPISILFIVGRKPKVYKQYEMIVRSXKXS

SEQ ID NO: 396 - protein, 41 aa, Artificial Sequence
  GFR-binding peptide
  MOD_RES (6), (7), (38), (40): Xaa is C or S
ASASPXXVSQDLSPISILFIIGKTPKIYKQYEMIVKSXKXS

SEQ ID NO: 397 - protein, 41 aa, Artificial Sequence
  GFR-binding peptide
  MOD_RES (6), (7), (38), (40): Xaa is C or S
ASASPXXVPQDLSPISILFIVGRTPKVYKQYEMVVKSXKXS

SEQ ID NO: 398 - protein, 44 aa, Artificial Sequence
  GFR-binding peptide
  MOD_RES (7), (41), (43): Xaa is C or S
NDEGLEXVPTEESPISILFIRIKPHQGQHYKQYEFLQHNKXEXR

SEQ ID NO: 399 - protein, 44 aa, Artificial Sequence
  GFR-binding peptide
  MOD_RES (7), (41), (43): Xaa is C or S
NDEGLEXVPTGQSPISILFIRIKPHQGQHYKQYELEEHSQXEXR

SEQ ID NO: 400 - protein, 45 aa, Artificial Sequence
  GFR-binding peptide
  MOD_RES (5), (42), (44): Xaa is C or S
SSVKXQPSRVHHSPISILFIEYVRKKPKLYKQYERLEEHLEXAXA

SEQ ID NO: 401 - protein, 45 aa, Artificial Sequence
  GFR-binding peptide
  MOD_RES (5), (42), (44): Xaa is C or S
RNVQXRPTQVQLSPISILFIEIVRKKPIFYKQYETLEDHLAXKXE

SEQ ID NO: 402 - protein, 42 aa, Artificial Sequence
  GFR-binding peptide
  MOD_RES (6), (7), (39), (41): Xaa is C or S
KIPKAXXAPVELKPLSMLYVDENEKVVDHHKDDMVEEGXGXR

SEQ ID NO: 403 - protein, 42 aa, Artificial Sequence
  GFR-binding peptide
  MOD_RES (6), (7), (39), (41): Xaa is C or S
GIPEPXXAPVKMKPLSMLYVDENKNVVDHHKDNMVEESXAXR

SEQ ID NO: 404 - protein, 42 aa, Artificial Sequence
  GFR-binding peptide
  MOD_RES (6), (7), (39), (41): Xaa is C or S
SIPKAXXAPVELKPLSMLYVDEYDKVVDHHKDEMVEEGXGXR

SEQ ID NO: 405 - protein, 42 aa, Artificial Sequence
  GFR-binding peptide
  MOD_RES (7), (39), (41): Xaa is C or S
HVTKPTXAPVKLKPLSMLYVDDSSNVIDHHKDNMVEESXGXH

SEQ ID NO: 406 - protein, 42 aa, Artificial Sequence
  GFR-binding peptide
  MOD_RES (6), (7), (39), (41): Xaa is C or S
YVPKPXXAPVKLKPLSMLYVDDSSNVIDHHKDNMVEESXGXH

SEQ ID NO: 407 - protein, 42 aa, Artificial Sequence
  GFR-binding peptide
  MOD_RES (6), (7), (39), (41): Xaa is C or S
TVPKPXXAPVQLKPLSMLYVDDSSNVIDHHKDNMVEEAXGXH

SEQ ID NO: 408 - protein, 42 aa, Artificial Sequence
  GFR-binding peptide
  MOD_RES (6), (7), (39), (41): Xaa is C or S
AVPKAXXAPVKLKPLSMLYVDSSNNVIDHHKDNMVEEAXGXH

SEQ ID NO: 409 - protein, 43 aa, Artificial Sequence
  GFR-binding peptide
  MOD_RES (6), (7), (40), (42): Xaa is C or S
KVGKAXXAPVKLKPLSMLYVDDMGVPTDHHKDEGMSVEEXGXR

SEQ ID NO: 410 - protein, 42 aa, Artificial Sequence
  GFR-binding peptide
  MOD_RES (6), (7), (39), (41): Xaa is C or S
KASKAXXAPVKLKPLSMLYVDKGVVTYDHHKDGMVEEEXGXR

SEQ ID NO: 411 - protein, 42 aa, Artificial Sequence
  GFR-binding peptide
  MOD_RES (6), (7), (39), (41): Xaa is C or S
GSAGPXXAPVKMKPLSMLYVNDKQQIIDHHKDGMVEERXGXS

SEQ ID NO: 412 - protein, 42 aa, Artificial Sequence
  GFR-binding peptide
  MOD_RES (6), (7), (39), (41): Xaa is C or S
AAPASXXAPVRLKPLSMLYVDAANNVVDHHKDDMVEEAXGXR

SEQ ID NO: 413 - protein, 42 aa, Artificial Sequence
  GFR-binding peptide
  MOD_RES (6), (7), (39), (41): Xaa is C or S
STPPTXXAPVRLKPLSMLYVDSANNVVDHHKDDMVEESXGXR

SEQ ID NO: 414 - protein, 42 aa, Artificial Sequence
  GFR-binding peptide
  MOD_RES (6), (7), (39), (41): Xaa is C or S
HVPKPXXAPVKLKPLSMLYVDDSSNVIDHHKDNMVEESXGXH

SEQ ID NO: 415 - protein, 41 aa, Artificial Sequence
  GFR-binding peptide
  MOD_RES (6), (7), (38), (40): Xaa is C or S
ASAAPXXAPVALKPLSMLYVVGRKPKVDHHKDMIVEEXKXS

SEQ ID NO: 416 - protein, 41 aa, Artificial Sequence
  GFR-binding peptide
  MOD_RES (6), (7), (38), (40): Xaa is C or S
ASASPXXAPVDLKPLSMLYVIGKTPKIDHHKDMIVEEXKXS

SEQ ID NO: 417 - protein, 41 aa, Artificial Sequence
  GFR-binding peptide
  MOD_RES (6), (7), (38), (40): Xaa is C or S
ASASPXXAPVDLKPLSMLYVVGRTPKVDHHKDMVVEEXKXS

SEQ ID NO: 418 - protein, 42 aa, Artificial Sequence
  GFR-binding peptide
  MOD_RES (6), (7), (39), (41): Xaa is C or S
KIPKAXXVPTELKPLSMLYVDENEKVVDHHKDDMVVEGXGXR

SEQ ID NO: 419 - protein, 42 aa, Artificial Sequence
  GFR-binding peptide
  MOD_RES (6), (7), (39), (41): Xaa is C or S
GIPEPXXVPEKMKPLSMLYVDENKNVVDHHKDNMTVESXAXR

SEQ ID NO: 420 - protein, 42 aa, Artificial Sequence
  GFR-binding peptide
  MOD_RES (6), (7), (39), (41): Xaa is C or S
SIPKAXXVPTELKPLSMLYVDEYDKVVDHHKDEMVVEGXGXR

SEQ ID NO: 421 - protein, 42 aa, Artificial Sequence
  GFR-binding peptide
  MOD_RES (7), (39), (41): Xaa is C or S
HVTKPTXAPTKLKPLSMLYVDDSSNVIDHHKDNMVVRSXGXH

SEQ ID NO: 422 - protein, 42 aa, Artificial Sequence
  GFR-binding peptide
  MOD_RES (6), (7), (39), (41): Xaa is C or S
YVPKPXXAPTKLKPLSMLYVDDSSNVIDHHKDNMVVRSXGXH

SEQ ID NO: 423 - protein, 42 aa, Artificial Sequence
  GFR-binding peptide
  MOD_RES (6), (7), (39), (41): Xaa is C or S
TVPKPXXAPTQLKPLSMLYVDDSSNVIDHHKDNMVVRAXGXH

SEQ ID NO: 424 - protein, 42 aa, Artificial Sequence
  GFR-binding peptide
  MOD_RES (6), (7), (39), (41): Xaa is C or S
AVPKAXXAPTKLKPLSMLYVDSSNNVIDHHKDNMVVKAXGXH

SEQ ID NO: 425 - protein, 43 aa, Artificial Sequence
  GFR-binding peptide
  MOD_RES (6), (7), (40), (42): Xaa is C or S
KVGKAXXVPTKLKPLSMLYVDDMGVPTDHHKDEGMSVAEXGXR

SEQ ID NO: 426 - protein, 42 aa, Artificial Sequence
  GFR-binding peptide
  MOD_RES (6), (7), (39), (41): Xaa is C or S
KASKAXXVPTKLKPLSMLYVDKGVVTYDHHKDGMAVSEXGXR

SEQ ID NO: 427 - protein, 42 aa, Artificial Sequence
  GFR-binding peptide
  MOD_RES (6), (7), (39), (41): Xaa is C or S
GSAGPXXTPTKMKPLSMLYVNDKQQIIDHHKDGMVVDRXGXS

SEQ ID NO: 428 - protein, 42 aa, Artificial Sequence
  GFR-binding peptide
  MOD_RES (6), (7), (39), (41): Xaa is C or S
AAPASXXVPARLKPLSMLYVDAANNVVDHHKDDMVVEAXGXR

SEQ ID NO: 429 - protein, 42 aa, Artificial Sequence
  GFR-binding peptide
  MOD_RES (6), (7), (39), (41): Xaa is C or S
STPPTXXVPTRLKPLSMLYVDSANNVVDHHKDDMVVESXGXR

SEQ ID NO: 430 - protein, 42 aa, Artificial Sequence
  GFR-binding peptide
  MOD_RES (6), (7), (39), (41): Xaa is C or S
HVPKPXXAPTKLKPLSMLYVDDSSNVIDHHKDNMVVRSXGXH

SEQ ID NO: 431 - protein, 41 aa, Artificial Sequence
  GFR-binding peptide
  MOD_RES (6), (7), (38), (40): Xaa is C or S
ASAAPXXVPQALKPLSMLYVVGRKPKVDHHKDMIVRSXKXS

SEQ ID NO: 432 - protein, 41 aa, Artificial Sequence
  GFR-binding peptide
  MOD_RES (6), (7), (38), (40): Xaa is C or S
ASASPXXVSQDLKPLSMLYVIGKTPKIDHHKDMIVKSXKXS

SEQ ID NO: 433 - protein, 41 aa, Artificial Sequence
  GFR-binding peptide
  MOD_RES (6), (7), (38), (40): Xaa is C or S
ASASPXXVPQDLKPLSMLYVVGRTPKVDHHKDMVVKSXKXS

SEQ ID NO: 434 - protein, 44 aa, Artificial Sequence
  GFR-binding peptide
  MOD_RES (7), (41), (43): Xaa is C or S
NDEGLEXVPTEEKPLSMLYVRIKPHQGQHDHHKDFLQHNKXEXR

SEQ ID NO: 435 - protein, 44 aa, Artificial Sequence
  GFR-binding peptide
  MOD_RES (7), (41), (43): Xaa is C or S
NDEGLEXVPTGQKPLSMLYVRIKPHQGQHDHHKDLEEHSQXEXR

SEQ ID NO: 436 - protein, 45 aa, Artificial Sequence
  GFR-binding peptide
  MOD_RES (5), (42), (44): Xaa is C or S
SSVKXQPSRVHHKPLSMLYVEYVRKKPKLDHHKDRLEEHLEXAXA

SEQ ID NO: 437 - protein, 45 aa, Artificial Sequence
  GFR-binding peptide
  MOD_RES (5), (42), (44): Xaa is C or S
RNVQXRPTQVQLKPLSMLYVEIVRKKPIFDHHKDTLEDHLAXKXE

SEQ ID NO: 438 - protein, 42 aa, Artificial Sequence
  GFR-binding peptide
  MOD_RES (6), (7), (39), (41): Xaa is C or S
KIPKAXXVPQELEPLPIVYYDENEKVVEQLSNDMVRSGXGXR

SEQ ID NO: 439 - protein, 42 aa, Artificial Sequence
  GFR-binding peptide
  MOD_RES (6), (7), (39), (41): Xaa is C or S
GIPEPXXVPQKMEPLPIVYYDENKNVVEQLSNNMVRSSXAXR

SEQ ID NO: 440 - protein, 42 aa, Artificial Sequence
  GFR-binding peptide
  MOD_RES (6), (7), (39), (41): Xaa is C or S
SIPKAXXVPQELEPLPIVYYDEYDKVVEQLSNEMVRSGXGXR

SEQ ID NO: 441 - protein, 42 aa, Artificial Sequence
  GFR-binding peptide
  MOD_RES (7), (39), (41): Xaa is C or S
HVTKPTXVPQKLEPLPIVYYDDSSNVIEQLSNNMVRSSXGXH

SEQ ID NO: 442 - protein, 42 aa, Artificial Sequence
  GFR-binding peptide
  MOD_RES (6), (7), (39), (41): Xaa is C or S
YVPKPXXVPQKLEPLPIVYYDDSSNVIEQLSNNMVRSSXGXH

SEQ ID NO: 443 - protein, 42 aa, Artificial Sequence
  GFR-binding peptide
  MOD_RES (6), (7), (39), (41): Xaa is C or S
TVPKPXXVPQQLEPLPIVYYDDSSNVIEQLSNNMVRSAXGXH

SEQ ID NO: 444 - protein, 42 aa, Artificial Sequence
  GFR-binding peptide
  MOD_RES (6), (7), (39), (41): Xaa is C or S
AVPKAXXVPQKLEPLPIVYYDSSNNVIEQLSNNMVRSAXGXH

SEQ ID NO: 445 - protein, 43 aa, Artificial Sequence
  GFR-binding peptide
  MOD_RES (6), (7), (40), (42): Xaa is C or S
KVGKAXXVPQKLEPLPIVYYDDMGVPTEQLSNEGMSVRSXGXR

SEQ ID NO: 446 - protein, 42 aa, Artificial Sequence
  GFR-binding peptide
  MOD_RES (6), (7), (39), (41): Xaa is C or S
KASKAXXVPQKLEPLPIVYYDKGVVTYEQLSNGMVRSEXGXR

SEQ ID NO: 447 - protein, 42 aa, Artificial Sequence
  GFR-binding peptide
  MOD_RES (6), (7), (39), (41): Xaa is C or S
GSAGPXXVPQKMEPLPIVYYNDKQQIIEQLSNGMVRSRXGXS

SEQ ID NO: 448 - protein, 42 aa, Artificial Sequence
  GFR-binding peptide
  MOD_RES (6), (7), (39), (41): Xaa is C or S
AAPASXXVPQRLEPLPIVYYDAANNVVEQLSNDMVRSAXGXR

SEQ ID NO: 449 - protein, 42 aa, Artificial Sequence
  GFR-binding peptide
  MOD_RES (6), (7), (39), (41): Xaa is C or S
STPPTXXVPQRLEPLPIVYYDSANNVVEQLSNDMVRSSXGXR

SEQ ID NO: 450 - protein, 42 aa, Artificial Sequence
  GFR-binding peptide
  MOD_RES (6), (7), (39), (41): Xaa is C or S
HVPKPXXVPQKLEPLPIVYYDDSSNVIEQLSNNMVRSSXGXH

SEQ ID NO: 451 - protein, 41 aa, Artificial Sequence
  GFR-binding peptide
  MOD_RES (6), (7), (38), (40): Xaa is C or S
RVPSTXXVPQKTEPLPIVYYDNGRVLLEQLSNMIVRSXGXL

SEQ ID NO: 452 - protein, 41 aa, Artificial Sequence
  GFR-binding peptide
  MOD_RES (6), (7), (38), (40): Xaa is C or S
ASASPXXVPQDLEPLPIVYYIGKTPKIEQLSNMIVRSXKXS

SEQ ID NO: 453 - protein, 41 aa, Artificial Sequence
  GFR-binding peptide
  MOD_RES (6), (7), (38), (40): Xaa is C or S
ASASPXXVPQDLEPLPIVYYVGRTPKVEQLSNMVVRSXKXS

SEQ ID NO: 454 - protein, 42 aa, Artificial Sequence
  GFR-binding peptide
  MOD_RES (6), (7), (39), (41): Xaa is C or S
KIPKAXXVPTELEPLPIVYYDENEKVVEQLSNDMVVEGXGXR

SEQ ID NO: 455 - protein, 42 aa, Artificial Sequence
  GFR-binding peptide
  MOD_RES (6), (7), (39), (41): Xaa is C or S
GIPEPXXVPEKMEPLPIVYYDENKNVVEQLSNNMTVESXAXR

SEQ ID NO: 456 - protein, 42 aa, Artificial Sequence
  GFR-binding peptide
  MOD_RES (6), (7), (39), (41): Xaa is C or S
SIPKAXXVPTELEPLPIVYYDEYDKVVEQLSNEMVVEGXGXR

SEQ ID NO: 457 - protein, 42 aa, Artificial Sequence
  GFR-binding peptide
  MOD_RES (7), (39), (41): Xaa is C or S
HVTKPTXAPTKLEPLPIVYYDDSSNVIEQLSNNMVVRSXGXH

SEQ ID NO: 458 - protein, 42 aa, Artificial Sequence
  GFR-binding peptide
  MOD_RES (6), (7), (39), (41): Xaa is C or S
YVPKPXXAPTKLEPLPIVYYDDSSNVIEQLSNNMVVRSXGXH

SEQ ID NO: 459 - protein, 42 aa, Artificial Sequence
  GFR-binding peptide
  MOD_RES (6), (7), (39), (41): Xaa is C or S
TVPKPXXAPTQLEPLPIVYYDDSSNVIEQLSNNMVVRAXGXH

SEQ ID NO: 460 - protein, 42 aa, Artificial Sequence
  GFR-binding peptide
  MOD_RES (6), (7), (39), (41): Xaa is C or S
AVPKAXXAPTKLEPLPIVYYDSSNNVIEQLSNNMVVKAXGXH

SEQ ID NO: 461 - protein, 43 aa, Artificial Sequence
  GFR-binding peptide
  MOD_RES (6), (7), (40), (42): Xaa is C or S
KVGKAXXVPTKLEPLPIVYYDDMGVPTEQLSNEGMSVAEXGXR

SEQ ID NO: 462 - protein, 42 aa, Artificial Sequence
  GFR-binding peptide
  MOD_RES (6), (7), (39), (41): Xaa is C or S
KASKAXXVPTKLEPLPIVYYDKGVVTYEQLSNGMAVSEXGXR

SEQ ID NO: 463 - protein, 42 aa, Artificial Sequence
  GFR-binding peptide
  MOD_RES (6), (7), (39), (41): Xaa is C or S
GSAGPXXTPTKMEPLPIVYYNDKQQIIEQLSNGMVVDRXGXS

SEQ ID NO: 464 - protein, 42 aa, Artificial Sequence
  GFR-binding peptide
  MOD_RES (6), (7), (39), (41): Xaa is C or S
AAPASXXVPARLEPLPIVYYDAANNVVEQLSNDMVVEAXGXR

SEQ ID NO: 465 - protein, 42 aa, Artificial Sequence
  GFR-binding peptide
  MOD_RES (6), (7), (39), (41): Xaa is C or S
STPPTXXVPTRLEPLPIVYYDSANNVVEQLSNDMVVESXGXR

SEQ ID NO: 466 - protein, 42 aa, Artificial Sequence
  GFR-binding peptide
  MOD_RES (6), (7), (39), (41): Xaa is C or S
HVPKPXXAPTKLEPLPIVYYDDSSNVIEQLSNNMVVRSXGXH

SEQ ID NO: 467 - protein, 41 aa, Artificial Sequence
  GFR-binding peptide
  MOD_RES (6), (7), (38), (40): Xaa is C or S
RVPSTXXAPVKTEPLPIVYYDNGRVLLEQLSNMIVEEXGXL

SEQ ID NO: 468 - protein, 41 aa, Artificial Sequence
  GFR-binding peptide
  MOD_RES (6), (7), (38), (40): Xaa is C or S
ASASPXXVSQDLEPLPIVYYIGKTPKIEQLSNMIVKSXKXS

SEQ ID NO: 469 - protein, 41 aa, Artificial Sequence
  GFR-binding peptide
  MOD_RES (6), (7), (38), (40): Xaa is C or S
ASASPXXVPQDLEPLPIVYYVGRTPKVEQLSNMVVKSXKXS

SEQ ID NO: 470 - protein, 44 aa, Artificial Sequence
  GFR-binding peptide
  MOD_RES (7), (41), (43): Xaa is C or S
NDEGLEXVPTEEEPLPIVYYRIKPHQGQHEQLSNFLQHNKXEXR

SEQ ID NO: 471 - protein, 44 aa, Artificial Sequence
  GFR-binding peptide
  MOD_RES (7), (41), (43): Xaa is C or S
NDEGLEXVPTGQEPLPIVYYRIKPHQGQHEQLSNLEEHSQXEXR

SEQ ID NO: 472 - protein, 45 aa, Artificial Sequence
  GFR-binding peptide
  MOD_RES (5), (42), (44): Xaa is C or S
SSVKXQPSRVHHEPLPIVYYEYVRKKPKLEQLSNRLEEHLEXAXA

SEQ ID NO: 473 - protein, 45 aa, Artificial Sequence
  GFR-binding peptide
  MOD_RES (5), (42), (44): Xaa is C or S
RNVQXRPTQVQLEPLPIVYYEIVRKKPIFEQLSNTLEDHLAXKXE

SEQ ID NO: 474 - protein, 42 aa, Artificial Sequence
  GFR-binding peptide
  MOD_RES (6), (7), (39), (41): Xaa is C or S
KIPKAXXVSQELEPLTILYYDENEKVVEQLSNDMVKSGXGXR

SEQ ID NO: 475 - protein, 42 aa, Artificial Sequence
  GFR-binding peptide
  MOD_RES (6), (7), (39), (41): Xaa is C or S
GIPEPXXVSQKMEPLTILYYDENKNVVEQLSNNMVKSSXAXR

SEQ ID NO: 476 - protein, 42 aa, Artificial Sequence
  GFR-binding peptide
  MOD_RES (6), (7), (39), (41): Xaa is C or S
SIPKAXXVSQELEPLTILYYDEYDKVVEQLSNEMVKSGXGXR

SEQ ID NO: 477 - protein, 42 aa, Artificial Sequence
  GFR-binding peptide
  MOD_RES (7), (39), (41): Xaa is C or S
HVTKPTXVSQKLEPLTILYYDDSSNVIEQLSNNMVKSSXGXH

SEQ ID NO: 478 - protein, 42 aa, Artificial Sequence
  GFR-binding peptide
  MOD_RES (6), (7), (39), (41): Xaa is C or S
YVPKPXXVSQKLEPLTILYYDDSSNVIEQLSNNMVKSSXGXH

SEQ ID NO: 479 - protein, 42 aa, Artificial Sequence
  GFR-binding peptide
  MOD_RES (6), (7), (39), (41): Xaa is C or S
TVPKPXXVSQQLEPLTILYYDDSSNVIEQLSNNMVKSAXGXH

SEQ ID NO: 480 - protein, 42 aa, Artificial Sequence
  GFR-binding peptide
  MOD_RES (6), (7), (39), (41): Xaa is C or S
AVPKAXXVSQKLEPLTILYYDSSNNVIEQLSNNMVKSAXGXH

SEQ ID NO: 481 - protein, 43 aa, Artificial Sequence
  GFR-binding peptide
  MOD_RES (6), (7), (40), (42): Xaa is C or S
KVGKAXXVSQKLEPLTILYYDDMGVPTEQLSNEGMSVKSXGXR

SEQ ID NO: 482 - protein, 42 aa, Artificial Sequence
  GFR-binding peptide
  MOD_RES (6), (7), (39), (41): Xaa is C or S
KASKAXXVSQKLEPLTILYYDKGVVTYEQLSNGMVKSEXGXR

SEQ ID NO: 483 - protein, 42 aa, Artificial Sequence
  GFR-binding peptide
  MOD_RES (6), (7), (39), (41): Xaa is C or S
GSAGPXXVSQKMEPLTILYYNDKQQIIEQLSNGMVKSRXGXS

SEQ ID NO: 484 - protein, 42 aa, Artificial Sequence
  GFR-binding peptide
  MOD_RES (6), (7), (39), (41): Xaa is C or S
AAPASXXVSQRLEPLTILYYDAANNVVEQLSNDMVKSAXGXR

SEQ ID NO: 485 - protein, 42 aa, Artificial Sequence
  GFR-binding peptide
  MOD_RES (6), (7), (39), (41): Xaa is C or S
STPPTXXVSQRLEPLTILYYDSANNVVEQLSNDMVKSSXGXR

SEQ ID NO: 486 - protein, 42 aa, Artificial Sequence
  GFR-binding peptide
  MOD_RES (6), (7), (39), (41): Xaa is C or S
HVPKPXXVSQKLEPLTILYYDDSSNVIEQLSNNMVKSSXGXH

SEQ ID NO: 487 - protein, 41 aa, Artificial Sequence
  GFR-binding peptide
  MOD_RES (6), (7), (38), (40): Xaa is C or S
RVPSTXXVSQKTEPLTILYYDNGRVLLEQLSNMIVKSXGXL

SEQ ID NO: 488 - protein, 41 aa, Artificial Sequence
  GFR-binding peptide
  MOD_RES (6), (7), (38), (40): Xaa is C or S
ASAAPXXVSQALEPLTILYYVGRKPKVEQLSNMIVKSXKXS

SEQ ID NO: 489 - protein, 41 aa, Artificial Sequence
  GFR-binding peptide
  MOD_RES (6), (7), (38), (40): Xaa is C or S
ASASPXXVSQDLEPLTILYYVGRTPKVEQLSNMVVKSXKXS

SEQ ID NO: 490 - protein, 42 aa, Artificial Sequence
  GFR-binding peptide
  MOD_RES (6), (7), (39), (41): Xaa is C or S
KIPKAXXVPTELEPLTILYYDENEKVVEQLSNDMVVEGXGXR

SEQ ID NO: 491 - protein, 42 aa, Artificial Sequence
  GFR-binding peptide
  MOD_RES (6), (7), (39), (41): Xaa is C or S
GIPEPXXVPEKMEPLTILYYDENKNVVEQLSNNMTVESXAXR

SEQ ID NO: 492 - protein, 42 aa, Artificial Sequence
  GFR-binding peptide
  MOD_RES (6), (7), (39), (41): Xaa is C or S
SIPKAXXVPTELEPLTILYYDEYDKVVEQLSNEMVVEGXGXR

SEQ ID NO: 493 - protein, 42 aa, Artificial Sequence
  GFR-binding peptide
  MOD_RES (7), (39), (41): Xaa is C or S
HVTKPTXAPTKLEPLTILYYDDSSNVIEQLSNNMVVRSXGXH

SEQ ID NO: 494 - protein, 42 aa, Artificial Sequence
  GFR-binding peptide
  MOD_RES (6), (7), (39), (41): Xaa is C or S
YVPKPXXAPTKLEPLTILYYDDSSNVIEQLSNNMVVRSXGXH

SEQ ID NO: 495 - protein, 42 aa, Artificial Sequence
  GFR-binding peptide
  MOD_RES (6), (7), (39), (41): Xaa is C or S
TVPKPXXAPTQLEPLTILYYDDSSNVIEQLSNNMVVRAXGXH

SEQ ID NO: 496 - protein, 42 aa, Artificial Sequence
  GFR-binding peptide
  MOD_RES (6), (7), (39), (41): Xaa is C or S
AVPKAXXAPTKLEPLTILYYDSSNNVIEQLSNNMVVKAXGXH

SEQ ID NO: 497 - protein, 43 aa, Artificial Sequence
  GFR-binding peptide
  MOD_RES (6), (7), (40), (42): Xaa is C or S
KVGKAXXVPTKLEPLTILYYDDMGVPTEQLSNEGMSVAEXGXR

SEQ ID NO: 498 - protein, 42 aa, Artificial Sequence
  GFR-binding peptide
  MOD_RES (6), (7), (39), (41): Xaa is C or S
KASKAXXVPTKLEPLTILYYDKGVVTYEQLSNGMAVSEXGXR

SEQ ID NO: 499 - protein, 42 aa, Artificial Sequence
  GFR-binding peptide
  MOD_RES (6), (7), (39), (41): Xaa is C or S
GSAGPXXTPTKMEPLTILYYNDKQQIIEQLSNGMVVDRXGXS

SEQ ID NO: 500 - protein, 42 aa, Artificial Sequence
  GFR-binding peptide
  MOD_RES (6), (7), (39), (41): Xaa is C or S
AAPASXXVPARLEPLTILYYDAANNVVEQLSNDMVVEAXGXR

SEQ ID NO: 501 - protein, 42 aa, Artificial Sequence
  GFR-binding peptide
  MOD_RES (6), (7), (39), (41): Xaa is C or S
STPPTXXVPTRLEPLTILYYDSANNVVEQLSNDMVVESXGXR

SEQ ID NO: 502 - protein, 42 aa, Artificial Sequence
  GFR-binding peptide
  MOD_RES (6), (7), (39), (41): Xaa is C or S
HVPKPXXAPTKLEPLTILYYDDSSNVIEQLSNNMVVRSXGXH

SEQ ID NO: 503 - protein, 41 aa, Artificial Sequence
  GFR-binding peptide
  MOD_RES (6), (7), (38), (40): Xaa is C or S
RVPSTXXAPVKTEPLTILYYDNGRVLLEQLSNMIVEEXGXL

SEQ ID NO: 504 - protein, 41 aa, Artificial Sequence
  GFR-binding peptide
  MOD_RES (6), (7), (38), (40): Xaa is C or S
ASAAPXXVPQALEPLTILYYVGRKPKVEQLSNMIVRSXKXS

SEQ ID NO: 505 - protein, 44 aa, Artificial Sequence
  GFR-binding peptide
  MOD_RES (7), (41), (43): Xaa is C or S
NDEGLEXVPTEEEPLTILYYRIKPHQGQHEQLSNFLQHNKXEXR

SEQ ID NO: 506 - protein, 44 aa, Artificial Sequence
  GFR-binding peptide
  MOD_RES (7), (41), (43): Xaa is C or S
NDEGLEXVPTGQEPLTILYYRIKPHQGQHEQLSNLEEHSQXEXR

SEQ ID NO: 507 - protein, 45 aa, Artificial Sequence
  GFR-binding peptide
  MOD_RES (5), (42), (44): Xaa is C or S
SSVKXQPSRVHHEPLTILYYEYVRKKPKLEQLSNRLEEHLEXAXA

SEQ ID NO: 508 - protein, 45 aa, Artificial Sequence
  GFR-binding peptide
  MOD_RES (5), (42), (44): Xaa is C or S
RNVQXRPTQVQLEPLTILYYEIVRKKPIFEQLSNTLEDHLAXKXE

SEQ ID NO: 509 - protein, 42 aa, Artificial Sequence
  GFR-binding peptide
  MOD_RES (6), (7), (39), (41): Xaa is C or S
KIPKAXXVPQELEPLTILYYDENEKVVEQLSNDMVKSGXGXR

SEQ ID NO: 510 - protein, 42 aa, Artificial Sequence
  GFR-binding peptide
  MOD_RES (6), (7), (39), (41): Xaa is C or S
GIPEPXXVPQKMEPLTILYYDENKNVVEQLSNNMVKSSXAXR

SEQ ID NO: 511 - protein, 42 aa, Artificial Sequence
  GFR-binding peptide
  MOD_RES (6), (7), (39), (41): Xaa is C or S
SIPKAXXVPQELEPLTILYYDEYDKVVEQLSNEMVKSGXGXR

SEQ ID NO: 512 - protein, 42 aa, Artificial Sequence
  GFR-binding peptide
  MOD_RES (7), (39), (41): Xaa is C or S
HVTKPTXVPQKLEPLTILYYDDSSNVIEQLSNNMVKSSXGXH

SEQ ID NO: 513 - protein, 42 aa, Artificial Sequence
  GFR-binding peptide
  MOD_RES (6), (7), (39), (41): Xaa is C or S
YVPKPXXVPQKLEPLTILYYDDSSNVIEQLSNNMVKSSXGXH

SEQ ID NO: 514 - protein, 42 aa, Artificial Sequence
  GFR-binding peptide
  MOD_RES (6), (7), (39), (41): Xaa is C or S
TVPKPXXVPQQLEPLTILYYDDSSNVIEQLSNNMVKSAXGXH

SEQ ID NO: 515 - protein, 42 aa, Artificial Sequence
  GFR-binding peptide
  MOD_RES (6), (7), (39), (41): Xaa is C or S
AVPKAXXVPQKLEPLTILYYDSSNNVIEQLSNNMVKSAXGXH

SEQ ID NO: 516 - protein, 43 aa, Artificial Sequence
  GFR-binding peptide
  MOD_RES (6), (7), (40), (42): Xaa is C or S
KVGKAXXVPQKLEPLTILYYDDMGVPTEQLSNEGMSVKSXGXR

SEQ ID NO: 517 - protein, 42 aa, Artificial Sequence
  GFR-binding peptide
  MOD_RES (6), (7), (39), (41): Xaa is C or S
KASKAXXVPQKLEPLTILYYDKGVVTYEQLSNGMVKSEXGXR

SEQ ID NO: 518 - protein, 42 aa, Artificial Sequence
  GFR-binding peptide
  MOD_RES (6), (7), (39), (41): Xaa is C or S
GSAGPXXVPQKMEPLTILYYNDKQQIIEQLSNGMVKSRXGXS

SEQ ID NO: 519 - protein, 42 aa, Artificial Sequence
  GFR-binding peptide
  MOD_RES (6), (7), (39), (41): Xaa is C or S
AAPASXXVPQRLEPLTILYYDAANNVVEQLSNDMVKSAXGXR

SEQ ID NO: 520 - protein, 42 aa, Artificial Sequence
  GFR-binding peptide
  MOD_RES (6), (7), (39), (41): Xaa is C or S
STPPTXXVPQRLEPLTILYYDSANNVVEQLSNDMVKSSXGXR

SEQ ID NO: 521 - protein, 42 aa, Artificial Sequence
  GFR-binding peptide
  MOD_RES (6), (7), (39), (41): Xaa is C or S
HVPKPXXVPQKLEPLTILYYDDSSNVIEQLSNNMVKSSXGXH

SEQ ID NO: 522 - protein, 41 aa, Artificial Sequence
  GFR-binding peptide
  MOD_RES (6), (7), (38), (40): Xaa is C or S
RVPSTXXVPQKTEPLTILYYDNGRVLLEQLSNMIVKSXGXL

SEQ ID NO: 523 - protein, 41 aa, Artificial Sequence
  GFR-binding peptide
  MOD_RES (6), (7), (38), (40): Xaa is C or S
ASAAPXXVPQALEPLTILYYVGRKPKVEQLSNMIVKSXKXS

SEQ ID NO: 524 - protein, 41 aa, Artificial Sequence
  GFR-binding peptide
  MOD_RES (6), (7), (38), (40): Xaa is C or S
ASASPXXVPQDLEPLTILYYIGKTPKIEQLSNMIVKSXKXS

SEQ ID NO: 525 - protein, 44 aa, Artificial Sequence
  GFR-binding peptide
  MOD_RES (7), (41), (43): Xaa is C or S
NDEGLEXVPTGQSNITMQIMRIKPHQGQHIGEMSLEQHNQXEXR

SEQ ID NO: 526 - protein, 42 aa, Artificial Sequence
  GFR-binding peptide
  MOD_RES (6), (7), (39), (41): Xaa is C or S
KIPKAXXVPTELSNITMQIMDENEKVVIGEMSDMVVEGXGXR

SEQ ID NO: 527 - protein, 42 aa, Artificial Sequence
  GFR-binding peptide
  MOD_RES (6), (7), (39), (41): Xaa is C or S
GIPEPXXVPEKMSNITMQIMDENKNVVIGEMSNMTVESXAXR

SEQ ID NO: 528 - protein, 42 aa, Artificial Sequence
  GFR-binding peptide
  MOD_RES (6), (7), (39), (41): Xaa is C or S
SIPKAXXVPTELSNITMQIMDEYDKVVIGEMSEMVVEGXGXR

SEQ ID NO: 529 - protein, 42 aa, Artificial Sequence
  GFR-binding peptide
  MOD_RES (7), (39), (41): Xaa is C or S
HVTKPTXAPTKLSNITMQIMDDSSNVIIGEMSNMVVRSXGXH

SEQ ID NO: 530 - protein, 42 aa, Artificial Sequence
  GFR-binding peptide
  MOD_RES (6), (7), (39), (41): Xaa is C or S
YVPKPXXAPTKLSNITMQIMDDSSNVIIGEMSNMVVRSXGXH

SEQ ID NO: 531 - protein, 42 aa, Artificial Sequence
  GFR-binding peptide
  MOD_RES (6), (7), (39), (41): Xaa is C or S
TVPKPXXAPTQLSNITMQIMDDSSNVIIGEMSNMVVRAXGXH

SEQ ID NO: 532 - protein, 42 aa, Artificial Sequence
  GFR-binding peptide
  MOD_RES (6), (7), (39), (41): Xaa is C or S
AVPKAXXAPTKLSNITMQIMDSSNNVIIGEMSNMVVKAXGXH

SEQ ID NO: 533 - protein, 43 aa, Artificial Sequence
  GFR-binding peptide
  MOD_RES (6), (7), (40), (42): Xaa is C or S
KVGKAXXVPTKLSNITMQIMDDMGVPTIGEMSEGMSVAEXGXR

SEQ ID NO: 534 - protein, 42 aa, Artificial Sequence
  GFR-binding peptide
  MOD_RES (6), (7), (39), (41): Xaa is C or S
KASKAXXVPTKLSNITMQIMDKGVVTYIGEMSGMAVSEXGXR

SEQ ID NO: 535 - protein, 42 aa, Artificial Sequence
  GFR-binding peptide
  MOD_RES (6), (7), (39), (41): Xaa is C or S
GSAGPXXTPTKMSNITMQIMNDKQQIIIGEMSGMVVDRXGXS

SEQ ID NO: 536 - protein, 42 aa, Artificial Sequence
  GFR-binding peptide
  MOD_RES (6), (7), (39), (41): Xaa is C or S
AAPASXXVPARLSNITMQIMDAANNVVIGEMSDMVVEAXGXR

SEQ ID NO: 537 - protein, 42 aa, Artificial Sequence
  GFR-binding peptide
  MOD_RES (6), (7), (39), (41): Xaa is C or S
STPPTXXVPTRLSNITMQIMDSANNVVIGEMSDMVVESXGXR

SEQ ID NO: 538 - protein, 42 aa, Artificial Sequence
  GFR-binding peptide
  MOD_RES (6), (7), (39), (41): Xaa is C or S
HVPKPXXAPTKLSNITMQIMDDSSNVIIGEMSNMVVRSXGXH

SEQ ID NO: 539 - protein, 41 aa, Artificial Sequence
  GFR-binding peptide
  MOD_RES (6), (7), (38), (40): Xaa is C or S
RVPSTXXAPVKTSNITMQIMDNGRVLLIGEMSMIVEEXGXL

SEQ ID NO: 540 - protein, 41 aa, Artificial Sequence
  GFR-binding peptide
  MOD_RES (6), (7), (38), (40): Xaa is C or S
ASAAPXXVPQALSNITMQIMVGRKPKVIGEMSMIVRSXKXS

SEQ ID NO: 541 - protein, 41 aa, Artificial Sequence
  GFR-binding peptide
  MOD_RES (6), (7), (38), (40): Xaa is C or S
ASASPXXVSQDLSNITMQIMIGKTPKIIGEMSMIVKSXKXS

SEQ ID NO: 542 - protein, 41 aa, Artificial Sequence
  GFR-binding peptide
  MOD_RES (6), (7), (38), (40): Xaa is C or S
ASASPXXVPQDLSNITMQIMVGRTPKVIGEMSMVVKSXKXS

SEQ ID NO: 543 - protein, 44 aa, Artificial Sequence
  GFR-binding peptide
  MOD_RES (7), (41), (43): Xaa is C or S
NDEGLEXVPTGQSNITMQIMRIKPHQGQHIGEMSLEEHSQXEXR

SEQ ID NO: 544 - protein, 45 aa, Artificial Sequence
  GFR-binding peptide
  MOD_RES (5), (42), (44): Xaa is C or S
SSVKXQPSRVHHSNITMQIMEYVRKKPKLIGEMSRLEEHLEXAXA

SEQ ID NO: 545 - protein, 45 aa, Artificial Sequence
  GFR-binding peptide
  MOD_RES (5), (42), (44): Xaa is C or S
RNVQXRPTQVQLSNITMQIMEIVRKKPIFIGEMSTLEDHLAXKXE

SEQ ID NO: 546 - protein, 44 aa, Artificial Sequence
  GFR-binding peptide
  MOD_RES (7), (41), (43): Xaa is C or S
NDEGLEXVPTEESNITMQIMRIKPHQGQHLGEMSFLEHSKXEXR

SEQ ID NO: 547 - protein, 42 aa, Artificial Sequence
  GFR-binding peptide
  MOD_RES (6), (7), (39), (41): Xaa is C or S
KIPKAXXVPTELSNITMQIMDENEKVVLGEMSDMVVEGXGXR

SEQ ID NO: 548 - protein, 42 aa, Artificial Sequence
  GFR-binding peptide
  MOD_RES (6), (7), (39), (41): Xaa is C or S
GIPEPXXVPEKMSNITMQIMDENKNVVLGEMSNMTVESXAXR

SEQ ID NO: 549 - protein, 42 aa, Artificial Sequence
  GFR-binding peptide
  MOD_RES (6), (7), (39), (41): Xaa is C or S
SIPKAXXVPTELSNITMQIMDEYDKVVLGEMSEMVVEGXGXR

SEQ ID NO: 550 - protein, 42 aa, Artificial Sequence
  GFR-binding peptide
  MOD_RES (7), (39), (41): Xaa is C or S
HVTKPTXAPTKLSNITMQIMDDSSNVILGEMSNMVVRSXGXH

SEQ ID NO: 551 - protein, 42 aa, Artificial Sequence
  GFR-binding peptide
  MOD_RES (6), (7), (39), (41): Xaa is C or S
YVPKPXXAPTKLSNITMQIMDDSSNVILGEMSNMVVRSXGXH

SEQ ID NO: 552 - protein, 42 aa, Artificial Sequence
  GFR-binding peptide
  MOD_RES (6), (7), (39), (41): Xaa is C or S
TVPKPXXAPTQLSNITMQIMDDSSNVILGEMSNMVVRAXGXH

SEQ ID NO: 553 - protein, 42 aa, Artificial Sequence
  GFR-binding peptide
  MOD_RES (6), (7), (39), (41): Xaa is C or S
AVPKAXXAPTKLSNITMQIMDSSNNVILGEMSNMVVKAXGXH

SEQ ID NO: 554 - protein, 43 aa, Artificial Sequence
  GFR-binding peptide
  MOD_RES (6), (7), (40), (42): Xaa is C or S
KVGKAXXVPTKLSNITMQIMDDMGVPTLGEMSEGMSVAEXGXR

SEQ ID NO: 555 - protein, 42 aa, Artificial Sequence
  GFR-binding peptide
  MOD_RES (6), (7), (39), (41): Xaa is C or S
KASKAXXVPTKLSNITMQIMDKGVVTYLGEMSGMAVSEXGXR

SEQ ID NO: 556 - protein, 42 aa, Artificial Sequence
  GFR-binding peptide
  MOD_RES (6), (7), (39), (41): Xaa is C or S
GSAGPXXTPTKMSNITMQIMNDKQQIILGEMSGMVVDRXGXS

SEQ ID NO: 557 - protein, 42 aa, Artificial Sequence
  GFR-binding peptide
  MOD_RES (6), (7), (39), (41): Xaa is C or S
AAPASXXVPARLSNITMQIMDAANNVVLGEMSDMVVEAXGXR

SEQ ID NO: 558 - protein, 42 aa, Artificial Sequence
  GFR-binding peptide
  MOD_RES (6), (7), (39), (41): Xaa is C or S
STPPTXXVPTRLSNITMQIMDSANNVVLGEMSDMVVESXGXR

SEQ ID NO: 559 - protein, 42 aa, Artificial Sequence
  GFR-binding peptide
  MOD_RES (6), (7), (39), (41): Xaa is C or S
HVPKPXXAPTKLSNITMQIMDDSSNVILGEMSNMVVRSXGXH

SEQ ID NO: 560 - protein, 41 aa, Artificial Sequence
  GFR-binding peptide
  MOD_RES (6), (7), (38), (40): Xaa is C or S
RVPSTXXAPVKTSNITMQIMDNGRVLLLGEMSMIVEEXGXL

SEQ ID NO: 561 - protein, 41 aa, Artificial Sequence
  GFR-binding peptide
  MOD_RES (6), (7), (38), (40): Xaa is C or S
ASAAPXXVPQALSNITMQIMVGRKPKVLGEMSMIVRSXKXS

SEQ ID NO: 562 - protein, 41 aa, Artificial Sequence
  GFR-binding peptide
  MOD_RES (6), (7), (38), (40): Xaa is C or S
ASASPXXVSQDLSNITMQIMIGKTPKILGEMSMIVKSXKXS

SEQ ID NO: 563 - protein, 41 aa, Artificial Sequence
  GFR-binding peptide
  MOD_RES (6), (7), (38), (40): Xaa is C or S
ASASPXXVPQDLSNITMQIMVGRTPKVLGEMSMVVKSXKXS

SEQ ID NO: 564 - protein, 44 aa, Artificial Sequence
  GFR-binding peptide
  MOD_RES (7), (41), (43): Xaa is C or S
NDEGLEXVPTEESNITMQIMRIKPHQGQHLGEMSFLQHNKXEXR

SEQ ID NO: 565 - protein, 45 aa, Artificial Sequence
  GFR-binding peptide
  MOD_RES (5), (42), (44): Xaa is C or S
SSVKXQPSRVHHSNITMQIMEYVRKKPKLLGEMSRLEEHLEXAXA

SEQ ID NO: 566 - protein, 45 aa, Artificial Sequence
  GFR-binding peptide
  MOD_RES (5), (42), (44): Xaa is C or S
RNVQXRPTQVQLSNITMQIMEIVRKKPIFLGEMSTLEDHLAXKXE

SEQ ID NO: 567 - protein, 45 aa, Artificial Sequence
  GFR-binding peptide
  MOD_RES (5), (42), (44): Xaa is C or S
RNVQXRPSRVQLRSVKVAKVEIVRKKPIFKEVQVTLEEHLAXKXE

SEQ ID NO: 568 - protein, 42 aa, Artificial Sequence
  GFR-binding peptide
  MOD_RES (6), (7), (39), (41): Xaa is C or S
KIPKAXXVPTELRSVKVAKVDENEKVVKEVQVDMVVEGXGXR

SEQ ID NO: 569 - protein, 42 aa, Artificial Sequence
  GFR-binding peptide
  MOD_RES (6), (7), (39), (41): Xaa is C or S
GIPEPXXVPEKMRSVKVAKVDENKNVVKEVQVNMTVESXAXR

SEQ ID NO: 570 - protein, 42 aa, Artificial Sequence
  GFR-binding peptide
  MOD_RES (6), (7), (39), (41): Xaa is C or S
SIPKAXXVPTELRSVKVAKVDEYDKVVKEVQVEMVVEGXGXR

SEQ ID NO: 571 - protein, 42 aa, Artificial Sequence
  GFR-binding peptide
  MOD_RES (7), (39), (41): Xaa is C or S
HVTKPTXAPTKLRSVKVAKVDDSSNVIKEVQVNMVVRSXGXH

SEQ ID NO: 572 - protein, 42 aa, Artificial Sequence
  GFR-binding peptide
  MOD_RES (6), (7), (39), (41): Xaa is C or S
YVPKPXXAPTKLRSVKVAKVDDSSNVIKEVQVNMVVRSXGXH

SEQ ID NO: 573 - protein, 42 aa, Artificial Sequence
  GFR-binding peptide
  MOD_RES (6), (7), (39), (41): Xaa is C or S
TVPKPXXAPTQLRSVKVAKVDDSSNVIKEVQVNMVVRAXGXH

SEQ ID NO: 574 - protein, 42 aa, Artificial Sequence
  GFR-binding peptide
  MOD_RES (6), (7), (39), (41): Xaa is C or S
AVPKAXXAPTKLRSVKVAKVDSSNNVIKEVQVNMVVKAXGXH

SEQ ID NO: 575 - protein, 43 aa, Artificial Sequence
  GFR-binding peptide
  MOD_RES (6), (7), (40), (42): Xaa is C or S
KVGKAXXVPTKLRSVKVAKVDDMGVPTKEVQVEGMSVAEXGXR

SEQ ID NO: 576 - protein, 42 aa, Artificial Sequence
  GFR-binding peptide
  MOD_RES (6), (7), (39), (41): Xaa is C or S
KASKAXXVPTKLRSVKVAKVDKGVVTYKEVQVGMAVSEXGXR

SEQ ID NO: 577 - protein, 42 aa, Artificial Sequence
  GFR-binding peptide
  MOD_RES (6), (7), (39), (41): Xaa is C or S
GSAGPXXTPTKMRSVKVAKVNDKQQIIKEVQVGMVVDRXGXS

SEQ ID NO: 578 - protein, 42 aa, Artificial Sequence
  GFR-binding peptide
  MOD_RES (6), (7), (39), (41): Xaa is C or S
AAPASXXVPARLRSVKVAKVDAANNVVKEVQVDMVVEAXGXR

SEQ ID NO: 579 - protein, 42 aa, Artificial Sequence
  GFR-binding peptide
  MOD_RES (6), (7), (39), (41): Xaa is C or S
STPPTXXVPTRLRSVKVAKVDSANNVVKEVQVDMVVESXGXR

SEQ ID NO: 580 - protein, 42 aa, Artificial Sequence
  GFR-binding peptide
  MOD_RES (6), (7), (39), (41): Xaa is C or S
HVPKPXXAPTKLRSVKVAKVDDSSNVIKEVQVNMVVRSXGXH

SEQ ID NO: 581 - protein, 41 aa, Artificial Sequence
  GFR-binding peptide
  MOD_RES (6), (7), (38), (40): Xaa is C or S
RVPSTXXAPVKTRSVKVAKVDNGRVLLKEVQVMIVEEXGXL

SEQ ID NO: 582 - protein, 41 aa, Artificial Sequence
  GFR-binding peptide
  MOD_RES (6), (7), (38), (40): Xaa is C or S
ASAAPXXVPQALRSVKVAKVVGRKPKVKEVQVMIVRSXKXS

SEQ ID NO: 583 - protein, 41 aa, Artificial Sequence
  GFR-binding peptide
  MOD_RES (6), (7), (38), (40): Xaa is C or S
ASASPXXVSQDLRSVKVAKVIGKTPKIKEVQVMIVKSXKXS

SEQ ID NO: 584 - protein, 41 aa, Artificial Sequence
  GFR-binding peptide
  MOD_RES (6), (7), (38), (40): Xaa is C or S
ASASPXXVPQDLRSVKVAKVVGRTPKVKEVQVMVVKSXKXS

SEQ ID NO: 585 - protein, 44 aa, Artificial Sequence
  GFR-binding peptide
  MOD_RES (7), (41), (43): Xaa is C or S
NDEGLEXVPTEERSVKVAKVRIKPHQGQHKEVQVFLQHNKXEXR

SEQ ID NO: 586 - protein, 44 aa, Artificial Sequence
  GFR-binding peptide
  MOD_RES (7), (41), (43): Xaa is C or S
NDEGLEXVPTGQRSVKVAKVRIKPHQGQHKEVQVLEEHSQXEXR

SEQ ID NO: 587 - protein, 45 aa, Artificial Sequence
  GFR-binding peptide
  MOD_RES (5), (42), (44): Xaa is C or S
RNVQXRPTQVQLRSVKVAKVEIVRKKPIFKEVQVTLEDHLAXKXE

SEQ ID NO: 588 - protein, 45 aa, Artificial Sequence
  GFR-binding peptide
  MOD_RES (5), (42), (44): Xaa is C or S
SSVKXQPTQVHHRPVQVRKIEYVRKKPKLKKATVRLEDHLEXAXA

SEQ ID NO: 589 - protein, 42 aa, Artificial Sequence
  GFR-binding peptide
  MOD_RES (6), (7), (39), (41): Xaa is C or S
KIPKAXXVPTELRPVQVRKIDENEKVVKKATVDMVVEGXGXR

SEQ ID NO: 590 - protein, 42 aa, Artificial Sequence
  GFR-binding peptide
  MOD_RES (6), (7), (39), (41): Xaa is C or S
GIPEPXXVPEKMRPVQVRKIDENKNVVKKATVNMTVESXAXR

SEQ ID NO: 591 - protein, 42 aa, Artificial Sequence
  GFR-binding peptide
  MOD_RES (6), (7), (39), (41): Xaa is C or S
SIPKAXXVPTELRPVQVRKIDEYDKVVKKATVEMVVEGXGXR

SEQ ID NO: 592 - protein, 42 aa, Artificial Sequence
  GFR-binding peptide
  MOD_RES (7), (39), (41): Xaa is C or S
HVTKPTXAPTKLRPVQVRKIDDSSNVIKKATVNMVVRSXGXH

SEQ ID NO: 593 - protein, 42 aa, Artificial Sequence
  GFR-binding peptide
  MOD_RES (6), (7), (39), (41): Xaa is C or S
YVPKPXXAPTKLRPVQVRKIDDSSNVIKKATVNMVVRSXGXH

SEQ ID NO: 594 - protein, 42 aa, Artificial Sequence
  GFR-binding peptide
  MOD_RES (6), (7), (39), (41): Xaa is C or S
TVPKPXXAPTQLRPVQVRKIDDSSNVIKKATVNMVVRAXGXH

SEQ ID NO: 595 - protein, 42 aa, Artificial Sequence
  GFR-binding peptide
  MOD_RES (6), (7), (39), (41): Xaa is C or S
AVPKAXXAPTKLRPVQVRKIDSSNNVIKKATVNMVVKAXGXH

SEQ ID NO: 596 - protein, 43 aa, Artificial Sequence
  GFR-binding peptide
  MOD_RES (6), (7), (40), (42): Xaa is C or S
KVGKAXXVPTKLRPVQVRKIDDMGVPTKKATVEGMSVAEXGXR

SEQ ID NO: 597 - protein, 42 aa, Artificial Sequence
  GFR-binding peptide
  MOD_RES (6), (7), (39), (41): Xaa is C or S
KASKAXXVPTKLRPVQVRKIDKGVVTYKKATVGMAVSEXGXR

SEQ ID NO: 598 - protein, 42 aa, Artificial Sequence
  GFR-binding peptide
  MOD_RES (6), (7), (39), (41): Xaa is C or S
GSAGPXXTPTKMRPVQVRKINDKQQIIKKATVGMVVDRXGXS

SEQ ID NO: 599 - protein, 42 aa, Artificial Sequence
  GFR-binding peptide
  MOD_RES (6), (7), (39), (41): Xaa is C or S
AAPASXXVPARLRPVQVRKIDAANNVVKKATVDMVVEAXGXR

SEQ ID NO: 600 - protein, 42 aa, Artificial Sequence
  GFR-binding peptide
  MOD_RES (6), (7), (39), (41): Xaa is C or S
STPPTXXVPTRLRPVQVRKIDSANNVVKKATVDMVVESXGXR

SEQ ID NO: 601 - protein, 42 aa, Artificial Sequence
  GFR-binding peptide
  MOD_RES (6), (7), (39), (41): Xaa is C or S
HVPKPXXAPTKLRPVQVRKIDDSSNVIKKATVNMVVRSXGXH

SEQ ID NO: 602 - protein, 41 aa, Artificial Sequence
  GFR-binding peptide
  MOD_RES (6), (7), (38), (40): Xaa is C or S
RVPSTXXAPVKTRPVQVRKIDNGRVLLKKATVMIVEEXGXL

SEQ ID NO: 603 - protein, 41 aa, Artificial Sequence
  GFR-binding peptide
  MOD_RES (6), (7), (38), (40): Xaa is C or S
ASAAPXXVPQALRPVQVRKIVGRKPKVKKATVMIVRSXKXS

SEQ ID NO: 604 - protein, 41 aa, Artificial Sequence
  GFR-binding peptide
  MOD_RES (6), (7), (38), (40): Xaa is C or S
ASASPXXVSQDLRPVQVRKIIGKTPKIKKATVMIVKSXKXS

SEQ ID NO: 605 - protein, 41 aa, Artificial Sequence
  GFR-binding peptide
  MOD_RES (6), (7), (38), (40): Xaa is C or S
ASASPXXVPQDLRPVQVRKIVGRTPKVKKATVMVVKSXKXS

SEQ ID NO: 606 - protein, 44 aa, Artificial Sequence
  GFR-binding peptide
  MOD_RES (7), (41), (43): Xaa is C or S
NDEGLEXVPTEERPVQVRKIRIKPHQGQHKKATVFLQHNKXEXR

SEQ ID NO: 607 - protein, 44 aa, Artificial Sequence
  GFR-binding peptide
  MOD_RES (7), (41), (43): Xaa is C or S
NDEGLEXVPTGQRPVQVRKIRIKPHQGQHKKATVLEEHSQXEXR

SEQ ID NO: 608 - protein, 45 aa, Artificial Sequence
  GFR-binding peptide
  MOD_RES (5), (42), (44): Xaa is C or S
SSVKXQPSRVHHRPVQVRKIEYVRKKPKLKKATVRLEEHLEXAXA

SEQ ID NO: 609 - protein, 30 aa, Artificial Sequence
  GFR-binding peptide
VPTKMSAISMLYLDENKNVVLKNYQNMVVE

SEQ ID NO: 610 - protein, 30 aa, Artificial Sequence
  GFR-binding peptide
VPTKLSAISMLYLDDSSNVILKNYQNMVVE

SEQ ID NO: 611 - protein, 30 aa, Artificial Sequence
  GFR-binding peptide
VPTQLSAISMLYLDDSSNVILKNYQNMVVE

SEQ ID NO: 612 - protein, 30 aa, Artificial Sequence
  GFR-binding peptide
VPTKLSAISMLYLDSSNNVILKNYQNMVVE

SEQ ID NO: 613 - protein, 32 aa, Artificial Sequence
  GFR-binding peptide
VPTKLSAISMLYLDDMGVPTLKNYQEGMSVVE

SEQ ID NO: 614 - protein, 30 aa, Artificial Sequence
  GFR-binding peptide
VPTKLSAISMLYLDKGVVTYLKNYQGMVVE

SEQ ID NO: 615 - protein, 30 aa, Artificial Sequence
  GFR-binding peptide
VPTKMSAISMLYLNDKQQIILKNYQGMVVE

SEQ ID NO: 616 - protein, 30 aa, Artificial Sequence
  GFR-binding peptide
VPTRLSAISMLYLDAANNVVLKNYQDMVVE

SEQ ID NO: 617 - protein, 30 aa, Artificial Sequence
  GFR-binding peptide
VPTRLSAISMLYLDSANNVVLKNYQDMVVE

SEQ ID NO: 618 - protein, 30 aa, Artificial Sequence
  GFR-binding peptide
VPTKTSAISMLYLDNGRVLLLKNYQMIVVE

SEQ ID NO: 619 - protein, 30 aa, Artificial Sequence
  GFR-binding peptide
VPTALSAISMLYLVGRKPKVLKNYQMIVVE

SEQ ID NO: 620 - protein, 30 aa, Artificial Sequence
  GFR-binding peptide
VPTDLSAISMLYLIGKTPKILKNYQMIVVE

SEQ ID NO: 621 - protein, 30 aa, Artificial Sequence
  GFR-binding peptide
VPTDLSAISMLYLVGRTPKVLKNYQMVVVE

SEQ ID NO: 622 - protein, 30 aa, Artificial Sequence
  GFR-binding peptide
VPEKMSAISMLYLDENKNVVLKNYQNMTVE

SEQ ID NO: 623 - protein, 30 aa, Artificial Sequence
  GFR-binding peptide
APTKLSAISMLYLDDSSNVILKNYQNMVVR

SEQ ID NO: 624 - protein, 30 aa, Artificial Sequence
  GFR-binding peptide
APTQLSAISMLYLDDSSNVILKNYQNMVVR

SEQ ID NO: 625 - protein, 30 aa, Artificial Sequence
  GFR-binding peptide
APTKLSAISMLYLDSSNNVILKNYQNMVVK

SEQ ID NO: 626 - protein, 32 aa, Artificial Sequence
  GFR-binding peptide
VPTKLSAISMLYLDDMGVPTLKNYQEGMSVAE

SEQ ID NO: 627 - protein, 30 aa, Artificial Sequence
  GFR-binding peptide
VPTKLSAISMLYLDKGVVTYLKNYQGMAVS

SEQ ID NO: 628 - protein, 30 aa, Artificial Sequence
  GFR-binding peptide
TPTKMSAISMLYLNDKQQIILKNYQGMVVD

SEQ ID NO: 629 - protein, 30 aa, Artificial Sequence
  GFR-binding peptide
VPARLSAISMLYLDAANNVVLKNYQDMVVE

SEQ ID NO: 630 - protein, 30 aa, Artificial Sequence
  GFR-binding peptide
APVKTSAISMLYLDNGRVLLLKNYQMIVEE

SEQ ID NO: 631 - protein, 30 aa, Artificial Sequence
  GFR-binding peptide
VPQALSAISMLYLVGRKPKVLKNYQMIVRS

SEQ ID NO: 632 - protein, 30 aa, Artificial Sequence
  GFR-binding peptide
VSQDLSAISMLYLIGKTPKILKNYQMIVKS

SEQ ID NO: 633 - protein, 30 aa, Artificial Sequence
  GFR-binding peptide
VPQDLSAISMLYLVGRTPKVLKNYQMVVKS

SEQ ID NO: 634 - protein, 32 aa, Artificial Sequence
  GFR-binding peptide
VPTEESAISMLYLRIKPHQGQHLKNYQFLQHN

SEQ ID NO: 635 - protein, 32 aa, Artificial Sequence
  GFR-binding peptide
VPTGQSAISMLYLRIKPHQGQHLKNYQLEEHS

SEQ ID NO: 636 - protein, 32 aa, Artificial Sequence
  GFR-binding peptide
SRVHHSAISMLYLEYVRKKPKLLKNYQRLEEH

SEQ ID NO: 637 - protein, 32 aa, Artificial Sequence
  GFR-binding peptide
TQVQLSAISMLYLEIVRKKPIFLKNYQTLEDH

SEQ ID NO: 638 - protein, 30 aa, Artificial Sequence
  GFR-binding peptide
VPEELSSLSILFFDENEKVVLKVYPDMTVE

SEQ ID NO: 639 - protein, 30 aa, Artificial Sequence
  GFR-binding peptide
VPEELSSLSILFFDEYDKVVLKVYPEMTVE

SEQ ID NO: 640 - protein, 30 aa, Artificial Sequence
  GFR-binding peptide
VPEKLSSLSILFFDDSSNVILKVYPNMTVE

SEQ ID NO: 641 - protein, 30 aa, Artificial Sequence
  GFR-binding peptide
VPEQLSSLSILFFDDSSNVILKVYPNMTVE

SEQ ID NO: 642 - protein, 30 aa, Artificial Sequence
  GFR-binding peptide
VPEKLSSLSILFFDSSNNVILKVYPNMTVE

SEQ ID NO: 643 - protein, 32 aa, Artificial Sequence
  GFR-binding peptide
VPEKLSSLSILFFDDMGVPTLKVYPEGMSTVE

SEQ ID NO: 644 - protein, 30 aa, Artificial Sequence
  GFR-binding peptide
VPEKLSSLSILFFDKGVVTYLKVYPGMTVE

SEQ ID NO: 645 - protein, 30 aa, Artificial Sequence
  GFR-binding peptide
VPEKMSSLSILFFNDKQQIILKVYPGMTVE

SEQ ID NO: 646 - protein, 30 aa, Artificial Sequence
  GFR-binding peptide
VPERLSSLSILFFDAANNVVLKVYPDMTVE

SEQ ID NO: 647 - protein, 30 aa, Artificial Sequence
  GFR-binding peptide
VPERLSSLSILFFDSANNVVLKVYPDMTVE

SEQ ID NO: 648 - protein, 30 aa, Artificial Sequence
  GFR-binding peptide
VPEKTSSLSILFFDNGRVLLLKVYPMITVE

SEQ ID NO: 649 - protein, 30 aa, Artificial Sequence
  GFR-binding peptide
VPEALSSLSILFFVGRKPKVLKVYPMITVE

SEQ ID NO: 650 - protein, 30 aa, Artificial Sequence
  GFR-binding peptide
VPEDLSSLSILFFIGKTPKILKVYPMITVE

SEQ ID NO: 651 - protein, 30 aa, Artificial Sequence
  GFR-binding peptide
VPEDLSSLSILFFVGRTPKVLKVYPMVTVE

SEQ ID NO: 652 - protein, 30 aa, Artificial Sequence
  GFR-binding peptide
VPTELSSLSILFFDENEKVVLKVYPDMVVE

SEQ ID NO: 653 - protein, 30 aa, Artificial Sequence
  GFR-binding peptide
VPTELSSLSILFFDEYDKVVLKVYPEMVVE

SEQ ID NO: 654 - protein, 30 aa, Artificial Sequence
  GFR-binding peptide
APTKLSSLSILFFDDSSNVILKVYPNMVVR

SEQ ID NO: 655 - protein, 30 aa, Artificial Sequence
  GFR-binding peptide
APTQLSSLSILFFDDSSNVILKVYPNMVVR

SEQ ID NO: 656 - protein, 30 aa, Artificial Sequence
  GFR-binding peptide
APTKLSSLSILFFDSSNNVILKVYPNMVVK

SEQ ID NO: 657 - protein, 32 aa, Artificial Sequence
  GFR-binding peptide
VPTKLSSLSILFFDDMGVPTLKVYPEGMSVAE

SEQ ID NO: 658 - protein, 30 aa, Artificial Sequence
  GFR-binding peptide
VPTKLSSLSILFFDKGVVTYLKVYPGMAVS

SEQ ID NO: 659 - protein, 30 aa, Artificial Sequence
  GFR-binding peptide
TPTKMSSLSILFFNDKQQIILKVYPGMVVD

SEQ ID NO: 660 - protein, 30 aa, Artificial Sequence
  GFR-binding peptide
VPARLSSLSILFFDAANNVVLKVYPDMVVE

SEQ ID NO: 661 - protein, 30 aa, Artificial Sequence
  GFR-binding peptide
VPTRLSSLSILFFDSANNVVLKVYPDMVVE

SEQ ID NO: 662 - protein, 30 aa, Artificial Sequence
  GFR-binding peptide
APVKTSSLSILFFDNGRVLLLKVYPMIVEE

SEQ ID NO: 663 - protein, 30 aa, Artificial Sequence
  GFR-binding peptide
VPQALSSLSILFFVGRKPKVLKVYPMIVRS

SEQ ID NO: 664 - protein, 30 aa, Artificial Sequence
  GFR-binding peptide
VSQDLSSLSILFFIGKTPKILKVYPMIVKS

SEQ ID NO: 665 - protein, 30 aa, Artificial Sequence
  GFR-binding peptide
VPQDLSSLSILFFVGRTPKVLKVYPMVVKS

SEQ ID NO: 666 - protein, 32 aa, Artificial Sequence
  GFR-binding peptide
VPTEESSLSILFFRIKPHQGQHLKVYPFLQHN

SEQ ID NO: 667 - protein, 32 aa, Artificial Sequence
  GFR-binding peptide
VPTGQSSLSILFFRIKPHQGQHLKVYPLEEHS

SEQ ID NO: 668 - protein, 32 aa, Artificial Sequence
  GFR-binding peptide
SRVHHSSLSILFFEYVRKKPKLLKVYPRLEEH

SEQ ID NO: 669 - protein, 32 aa, Artificial Sequence
  GFR-binding peptide
TQVQLSSLSILFFEIVRKKPIFLKVYPTLEDH

SEQ ID NO: 670 - protein, 30 aa, Artificial Sequence
  GFR-binding peptide
APTELNAISVLYFDENEKVVLKKYRDMVVR

SEQ ID NO: 671 - protein, 30 aa, Artificial Sequence
  GFR-binding peptide
APTKMNAISVLYFDENKNVVLKKYRNMVVR

SEQ ID NO: 672 - protein, 30 aa, Artificial Sequence
  GFR-binding peptide
APTELNAISVLYFDEYDKVVLKKYREMVVR

SEQ ID NO: 673 - protein, 30 aa, Artificial Sequence
  GFR-binding peptide
APTKLNAISVLYFDSSNNVILKKYRNMVVR

SEQ ID NO: 674 - protein, 32 aa, Artificial Sequence
  GFR-binding peptide
APTKLNAISVLYFDDMGVPTLKKYREGMSVVR

SEQ ID NO: 675 - protein, 30 aa, Artificial Sequence
  GFR-binding peptide
APTKLNAISVLYFDKGVVTYLKKYRGMVVR

SEQ ID NO: 676 - protein, 30 aa, Artificial Sequence
  GFR-binding peptide
APTKMNAISVLYFNDKQQIILKKYRGMVVR

SEQ ID NO: 677 - protein, 30 aa, Artificial Sequence
  GFR-binding peptide
APTRLNAISVLYFDAANNVVLKKYRDMVVR

SEQ ID NO: 678 - protein, 30 aa, Artificial Sequence
  GFR-binding peptide
APTRLNAISVLYFDSANNVVLKKYRDMVVR

SEQ ID NO: 679 - protein, 30 aa, Artificial Sequence
  GFR-binding peptide
APTKTNAISVLYFDNGRVLLLKKYRMIVVR

SEQ ID NO: 680 - protein, 30 aa, Artificial Sequence
  GFR-binding peptide
APTALNAISVLYFVGRKPKVLKKYRMIVVR

SEQ ID NO: 681 - protein, 30 aa, Artificial Sequence
  GFR-binding peptide
APTDLNAISVLYFIGKTPKILKKYRMIVVR

SEQ ID NO: 682 - protein, 30 aa, Artificial Sequence
  GFR-binding peptide
APTDLNAISVLYFVGRTPKVLKKYRMVVVR

SEQ ID NO: 683 - protein, 30 aa, Artificial Sequence
  GFR-binding peptide
VPTELNAISVLYFDENEKVVLKKYRDMVVE

SEQ ID NO: 684 - protein, 30 aa, Artificial Sequence
  GFR-binding peptide
VPEKMNAISVLYFDENKNVVLKKYRNMTVE

SEQ ID NO: 685 - protein, 30 aa, Artificial Sequence
  GFR-binding peptide
VPTELNAISVLYFDEYDKVVLKKYREMVVE

SEQ ID NO: 686 - protein, 30 aa, Artificial Sequence
  GFR-binding peptide
APTKLNAISVLYFDSSNNVILKKYRNMVVK

SEQ ID NO: 687 - protein, 32 aa, Artificial Sequence
  GFR-binding peptide
VPTKLNAISVLYFDDMGVPTLKKYREGMSVAE

SEQ ID NO: 688 - protein, 30 aa, Artificial Sequence
  GFR-binding peptide
VPTKLNAISVLYFDKGVVTYLKKYRGMAVS

SEQ ID NO: 689 - protein, 30 aa, Artificial Sequence
  GFR-binding peptide
TPTKMNAISVLYFNDKQQIILKKYRGMVVD

SEQ ID NO: 690 - protein, 30 aa, Artificial Sequence
  GFR-binding peptide
VPARLNAISVLYFDAANNVVLKKYRDMVVE

SEQ ID NO: 691 - protein, 30 aa, Artificial Sequence
  GFR-binding peptide
VPTRLNAISVLYFDSANNVVLKKYRDMVVE

SEQ ID NO: 692 - protein, 30 aa, Artificial Sequence
  GFR-binding peptide
APVKTNAISVLYFDNGRVLLLKKYRMIVEE

SEQ ID NO: 693 - protein, 30 aa, Artificial Sequence
  GFR-binding peptide
VPQALNAISVLYFVGRKPKVLKKYRMIVRS

SEQ ID NO: 694 - protein, 30 aa, Artificial Sequence
  GFR-binding peptide
VSQDLNAISVLYFIGKTPKILKKYRMIVKS

SEQ ID NO: 695 - protein, 30 aa, Artificial Sequence
  GFR-binding peptide
VPQDLNAISVLYFVGRTPKVLKKYRMVVKS

SEQ ID NO: 696 - protein, 32 aa, Artificial Sequence
  GFR-binding peptide
VPTEENAISVLYFRIKPHQGQHLKKYRFLQHN

SEQ ID NO: 697 - protein, 32 aa, Artificial Sequence
  GFR-binding peptide
VPTGQNAISVLYFRIKPHQGQHLKKYRLEEHS

SEQ ID NO: 698 - protein, 32 aa, Artificial Sequence
  GFR-binding peptide
SRVHHNAISVLYFEYVRKKPKLLKKYRRLEEH

SEQ ID NO: 699 - protein, 32 aa, Artificial Sequence
  GFR-binding peptide
TQVQLNAISVLYFEIVRKKPIFLKKYRTLEDH

SEQ ID NO: 700 - protein, 30 aa, Artificial Sequence
  GFR-binding peptide
APTELSATSVLYYDENEKVVLRKHRDMVVK

SEQ ID NO: 701 - protein, 30 aa, Artificial Sequence
  GFR-binding peptide
APTKMSATSVLYYDENKNVVLRKHRNMVVK

SEQ ID NO: 702 - protein, 30 aa, Artificial Sequence
  GFR-binding peptide
APTELSATSVLYYDEYDKVVLRKHREMVVK

SEQ ID NO: 703 - protein, 30 aa, Artificial Sequence
  GFR-binding peptide
APTKLSATSVLYYDDSSNVILRKHRNMVVK

SEQ ID NO: 704 - protein, 30 aa, Artificial Sequence
  GFR-binding peptide
APTQLSATSVLYYDDSSNVILRKHRNMVVK

SEQ ID NO: 705 - protein, 32 aa, Artificial Sequence
  GFR-binding peptide
APTKLSATSVLYYDDMGVPTLRKHREGMSVVK

SEQ ID NO: 706 - protein, 30 aa, Artificial Sequence
  GFR-binding peptide
APTKLSATSVLYYDKGVVTYLRKHRGMVVK

SEQ ID NO: 707 - protein, 30 aa, Artificial Sequence
  GFR-binding peptide
APTKMSATSVLYYNDKQQIILRKHRGMVVK

SEQ ID NO: 708 - protein, 30 aa, Artificial Sequence
  GFR-binding peptide
APTRLSATSVLYYDAANNVVLRKHRDMVVK

SEQ ID NO: 709 - protein, 30 aa, Artificial Sequence
  GFR-binding peptide
APTRLSATSVLYYDSANNVVLRKHRDMVVK

SEQ ID NO: 710 - protein, 30 aa, Artificial Sequence
  GFR-binding peptide
APTKTSATSVLYYDNGRVLLLRKHRMIVVK

SEQ ID NO: 711 - protein, 30 aa, Artificial Sequence
  GFR-binding peptide
APTALSATSVLYYVGRKPKVLRKHRMIVVK

SEQ ID NO: 712 - protein, 30 aa, Artificial Sequence
  GFR-binding peptide
APTDLSATSVLYYIGKTPKILRKHRMIVVK

SEQ ID NO: 713 - protein, 30 aa, Artificial Sequence
  GFR-binding peptide
APTDLSATSVLYYVGRTPKVLRKHRMVVVK

SEQ ID NO: 714 - protein, 30 aa, Artificial Sequence
  GFR-binding peptide
VPTELSATSVLYYDENEKVVLRKHRDMVVE

SEQ ID NO: 715 - protein, 30 aa, Artificial Sequence
  GFR-binding peptide
VPEKMSATSVLYYDENKNVVLRKHRNMTVE

SEQ ID NO: 716 - protein, 30 aa, Artificial Sequence
  GFR-binding peptide
VPTELSATSVLYYDEYDKVVLRKHREMVVE

SEQ ID NO: 717 - protein, 30 aa, Artificial Sequence
  GFR-binding peptide
APTKLSATSVLYYDDSSNVILRKHRNMVVR

SEQ ID NO: 718 - protein, 30 aa, Artificial Sequence
  GFR-binding peptide
APTQLSATSVLYYDDSSNVILRKHRNMVVR

SEQ ID NO: 719 - protein, 32 aa, Artificial Sequence
  GFR-binding peptide
VPTKLSATSVLYYDDMGVPTLRKHREGMSVAE

SEQ ID NO: 720 - protein, 30 aa, Artificial Sequence
  GFR-binding peptide
VPTKLSATSVLYYDKGVVTYLRKHRGMAVS

SEQ ID NO: 721 - protein, 30 aa, Artificial Sequence
  GFR-binding peptide
TPTKMSATSVLYYNDKQQIILRKHRGMVVD

SEQ ID NO: 722 - protein, 30 aa, Artificial Sequence
  GFR-binding peptide
VPARLSATSVLYYDAANNVVLRKHRDMVVE

SEQ ID NO: 723 - protein, 30 aa, Artificial Sequence
  GFR-binding peptide
VPTRLSATSVLYYDSANNVVLRKHRDMVVE

SEQ ID NO: 724 - protein, 30 aa, Artificial Sequence
  GFR-binding peptide
APVKTSATSVLYYDNGRVLLLRKHRMIVEE

SEQ ID NO: 725 - protein, 30 aa, Artificial Sequence
  GFR-binding peptide
VPQALSATSVLYYVGRKPKVLRKHRMIVRS

SEQ ID NO: 726 - protein, 30 aa, Artificial Sequence
  GFR-binding peptide
VSQDLSATSVLYYIGKTPKILRKHRMIVKS

SEQ ID NO: 727 - protein, 30 aa, Artificial Sequence
  GFR-binding peptide
VPQDLSATSVLYYVGRTPKVLRKHRMVVKS

SEQ ID NO: 728 - protein, 32 aa, Artificial Sequence
  GFR-binding peptide
VPTEESATSVLYYRIKPHQGQHLRKHRFLQHN

SEQ ID NO: 729 - protein, 32 aa, Artificial Sequence
  GFR-binding peptide
VPTGQSATSVLYYRIKPHQGQHLRKHRLEEHS

SEQ ID NO: 730 - protein, 32 aa, Artificial Sequence
  GFR-binding peptide
SRVHHSATSVLYYEYVRKKPKLLRKHRRLEEH

SEQ ID NO: 731 - protein, 32 aa, Artificial Sequence
  GFR-binding peptide
TQVQLSATSVLYYEIVRKKPIFLRKHRTLEDH

SEQ ID NO: 732 - protein, 30 aa, Artificial Sequence
  GFR-binding peptide
VPTELSPISVLYKDENEKVVLKYHYDMVAE

SEQ ID NO: 733 - protein, 30 aa, Artificial Sequence
  GFR-binding peptide
VPTKMSPISVLYKDENKNVVLKYHYNMVAE

SEQ ID NO: 734 - protein, 30 aa, Artificial Sequence
  GFR-binding peptide
VPTELSPISVLYKDEYDKVVLKYHYEMVAE

SEQ ID NO: 735 - protein, 30 aa, Artificial Sequence
  GFR-binding peptide
VPTKLSPISVLYKDDSSNVILKYHYNMVAE

SEQ ID NO: 736 - protein, 30 aa, Artificial Sequence
  GFR-binding peptide
VPTQLSPISVLYKDDSSNVILKYHYNMVAE

SEQ ID NO: 737 - protein, 30 aa, Artificial Sequence
  GFR-binding peptide
VPTKLSPISVLYKDSSNNVILKYHYNMVAE

SEQ ID NO: 738 - protein, 30 aa, Artificial Sequence
  GFR-binding peptide
VPTKLSPISVLYKDKGVVTYLKYHYGMVAE

SEQ ID NO: 739 - protein, 30 aa, Artificial Sequence
  GFR-binding peptide
VPTKMSPISVLYKNDKQQIILKYHYGMVAE

SEQ ID NO: 740 - protein, 30 aa, Artificial Sequence
  GFR-binding peptide
VPTRLSPISVLYKDAANNVVLKYHYDMVAE

SEQ ID NO: 741 - protein, 30 aa, Artificial Sequence
  GFR-binding peptide
VPTRLSPISVLYKDSANNVVLKYHYDMVAE

SEQ ID NO: 742 - protein, 30 aa, Artificial Sequence
  GFR-binding peptide
VPTKTSPISVLYKDNGRVLLLKYHYMIVAE

SEQ ID NO: 743 - protein, 30 aa, Artificial Sequence
  GFR-binding peptide
VPTALSPISVLYKVGRKPKVLKYHYMIVAE

SEQ ID NO: 744 - protein, 30 aa, Artificial Sequence
  GFR-binding peptide
VPTDLSPISVLYKIGKTPKILKYHYMIVAE

SEQ ID NO: 745 - protein, 30 aa, Artificial Sequence
  GFR-binding peptide
VPTDLSPISVLYKVGRTPKVLKYHYMVVAE

SEQ ID NO: 746 - protein, 30 aa, Artificial Sequence
  GFR-binding peptide
VPTELSPISVLYKDENEKVVLKYHYDMVVE

SEQ ID NO: 747 - protein, 30 aa, Artificial Sequence
  GFR-binding peptide
VPEKMSPISVLYKDENKNVVLKYHYNMTVE

SEQ ID NO: 748 - protein, 30 aa, Artificial Sequence
  GFR-binding peptide
VPTELSPISVLYKDEYDKVVLKYHYEMVVE

SEQ ID NO: 749 - protein, 30 aa, Artificial Sequence
  GFR-binding peptide
APTKLSPISVLYKDDSSNVILKYHYNMVVR

SEQ ID NO: 750 - protein, 30 aa, Artificial Sequence
  GFR-binding peptide
APTQLSPISVLYKDDSSNVILKYHYNMVVR

SEQ ID NO: 751 - protein, 30 aa, Artificial Sequence
  GFR-binding peptide
APTKLSPISVLYKDSSNNVILKYHYNMVVK

SEQ ID NO: 752 - protein, 30 aa, Artificial Sequence
  GFR-binding peptide
VPTKLSPISVLYKDKGVVTYLKYHYGMAVS

SEQ ID NO: 753 - protein, 30 aa, Artificial Sequence
  GFR-binding peptide
TPTKMSPISVLYKNDKQQIILKYHYGMVVD

SEQ ID NO: 754 - protein, 30 aa, Artificial Sequence
  GFR-binding peptide
VPARLSPISVLYKDAANNVVLKYHYDMVVE

SEQ ID NO: 755 - protein, 30 aa, Artificial Sequence
  GFR-binding peptide
VPTRLSPISVLYKDSANNVVLKYHYDMVVE

SEQ ID NO: 756 - protein, 30 aa, Artificial Sequence
  GFR-binding peptide
APVKTSPISVLYKDNGRVLLLKYHYMIVEE

SEQ ID NO: 757 - protein, 30 aa, Artificial Sequence
  GFR-binding peptide
VPQALSPISVLYKVGRKPKVLKYHYMIVRS

SEQ ID NO: 758 - protein, 30 aa, Artificial Sequence
  GFR-binding peptide
VSQDLSPISVLYKIGKTPKILKYHYMIVKS

SEQ ID NO: 759 - protein, 30 aa, Artificial Sequence
  GFR-binding peptide
VPQDLSPISVLYKVGRTPKVLKYHYMVVKS

SEQ ID NO: 760 - protein, 32 aa, Artificial Sequence
  GFR-binding peptide
VPTEESPISVLYKRIKPHQGQHLKYHYFLQHN

SEQ ID NO: 761 - protein, 32 aa, Artificial Sequence
  GFR-binding peptide
VPTGQSPISVLYKRIKPHQGQHLKYHYLEEHS

SEQ ID NO: 762 - protein, 32 aa, Artificial Sequence
  GFR-binding peptide
SRVHHSPISVLYKEYVRKKPKLLKYHYRLEEH

SEQ ID NO: 763 - protein, 32 aa, Artificial Sequence
  GFR-binding peptide
TQVQLSPISVLYKEIVRKKPIFLKYHYTLEDH

SEQ ID NO: 764 - protein, 30 aa, Artificial Sequence
  GFR-binding peptide
VPTELEPISILYLDENEKVVKFKYEDMAVS

SEQ ID NO: 765 - protein, 30 aa, Artificial Sequence
  GFR-binding peptide
VPTKMEPISILYLDENKNVVKFKYENMAVS

SEQ ID NO: 766 - protein, 30 aa, Artificial Sequence
  GFR-binding peptide
VPTELEPISILYLDEYDKVVKFKYEEMAVS

SEQ ID NO: 767 - protein, 30 aa, Artificial Sequence
  GFR-binding peptide
VPTKLEPISILYLDDSSNVIKFKYENMAVS

SEQ ID NO: 768 - protein, 30 aa, Artificial Sequence
  GFR-binding peptide
VPTQLEPISILYLDDSSNVIKFKYENMAVS

SEQ ID NO: 769 - protein, 30 aa, Artificial Sequence
  GFR-binding peptide
VPTKLEPISILYLDSSNNVIKFKYENMAVS

SEQ ID NO: 770 - protein, 32 aa, Artificial Sequence
  GFR-binding peptide
VPTKLEPISILYLDDMGVPTKFKYEEGMSAVS

SEQ ID NO: 771 - protein, 30 aa, Artificial Sequence
  GFR-binding peptide
VPTKMEPISILYLNDKQQIIKFKYEGMAVS

SEQ ID NO: 772 - protein, 30 aa, Artificial Sequence
  GFR-binding peptide
VPTRLEPISILYLDAANNVVKFKYEDMAVS

SEQ ID NO: 773 - protein, 30 aa, Artificial Sequence
  GFR-binding peptide
VPTRLEPISILYLDSANNVVKFKYEDMAVS

SEQ ID NO: 774 - protein, 30 aa, Artificial Sequence
  GFR-binding peptide
VPTKTEPISILYLDNGRVLLKFKYEMIAVS

SEQ ID NO: 775 - protein, 30 aa, Artificial Sequence
  GFR-binding peptide
VPTALEPISILYLVGRKPKVKFKYEMIAVS

SEQ ID NO: 776 - protein, 30 aa, Artificial Sequence
  GFR-binding peptide
VPTDLEPISILYLIGKTPKIKFKYEMIAVS

SEQ ID NO: 777 - protein, 30 aa, Artificial Sequence
  GFR-binding peptide
VPTDLEPISILYLVGRTPKVKFKYEMVAVS

SEQ ID NO: 778 - protein, 30 aa, Artificial Sequence
  GFR-binding peptide
VPTELEPISILYLDENEKVVKFKYEDMVVE

SEQ ID NO: 779 - protein, 30 aa, Artificial Sequence
  GFR-binding peptide
VPEKMEPISILYLDENKNVVKFKYENMTVE

SEQ ID NO: 780 - protein, 30 aa, Artificial Sequence
  GFR-binding peptide
VPTELEPISILYLDEYDKVVKFKYEEMVVE

SEQ ID NO: 781 - protein, 30 aa, Artificial Sequence
  GFR-binding peptide
APTKLEPISILYLDDSSNVIKFKYENMVVR

SEQ ID NO: 782 - protein, 30 aa, Artificial Sequence
  GFR-binding peptide
APTQLEPISILYLDDSSNVIKFKYENMVVR

SEQ ID NO: 783 - protein, 30 aa, Artificial Sequence
  GFR-binding peptide
APTKLEPISILYLDSSNNVIKFKYENMVVK

SEQ ID NO: 784 - protein, 32 aa, Artificial Sequence
  GFR-binding peptide
VPTKLEPISILYLDDMGVPTKFKYEEGMSVAE

SEQ ID NO: 785 - protein, 30 aa, Artificial Sequence
  GFR-binding peptide
TPTKMEPISILYLNDKQQIIKFKYEGMVVD

SEQ ID NO: 786 - protein, 30 aa, Artificial Sequence
  GFR-binding peptide
VPARLEPISILYLDAANNVVKFKYEDMVVE

SEQ ID NO: 787 - protein, 30 aa, Artificial Sequence
  GFR-binding peptide
VPTRLEPISILYLDSANNVVKFKYEDMVVE

SEQ ID NO: 788 - protein, 30 aa, Artificial Sequence
  GFR-binding peptide
APVKTEPISILYLDNGRVLLKFKYEMIVEE

SEQ ID NO: 789 - protein, 30 aa, Artificial Sequence
  GFR-binding peptide
VPQALEPISILYLVGRKPKVKFKYEMIVRS

SEQ ID NO: 790 - protein, 30 aa, Artificial Sequence
  GFR-binding peptide
VSQDLEPISILYLIGKTPKIKFKYEMIVKS

SEQ ID NO: 791 - protein, 30 aa, Artificial Sequence
  GFR-binding peptide
VPQDLEPISILYLVGRTPKVKFKYEMVVKS

SEQ ID NO: 792 - protein, 32 aa, Artificial Sequence
  GFR-binding peptide
VPTEEEPISILYLRIKPHQGQHKFKYEFLQHN

SEQ ID NO: 793 - protein, 32 aa, Artificial Sequence
  GFR-binding peptide
VPTGQEPISILYLRIKPHQGQHKFKYELEEHS

SEQ ID NO: 794 - protein, 32 aa, Artificial Sequence
  GFR-binding peptide
SRVHHEPISILYLEYVRKKPKLKFKYERLEEH

SEQ ID NO: 795 - protein, 32 aa, Artificial Sequence
  GFR-binding peptide
TQVQLEPISILYLEIVRKKPIFKFKYETLEDH

SEQ ID NO: 796 - protein, 30 aa, Artificial Sequence
  GFR-binding peptide
TPTELSPINMLYFDENEKVVYGKIPDMVVD

SEQ ID NO: 797 - protein, 30 aa, Artificial Sequence
  GFR-binding peptide
TPTKMSPINMLYFDENKNVVYGKIPNMVVD

SEQ ID NO: 798 - protein, 30 aa, Artificial Sequence
  GFR-binding peptide
TPTELSPINMLYFDEYDKVVYGKIPEMVVD

SEQ ID NO: 799 - protein, 30 aa, Artificial Sequence
  GFR-binding peptide
TPTKLSPINMLYFDDSSNVIYGKIPNMVVD

SEQ ID NO: 800 - protein, 30 aa, Artificial Sequence
  GFR-binding peptide
TPTQLSPINMLYFDDSSNVIYGKIPNMVVD

SEQ ID NO: 801 - protein, 30 aa, Artificial Sequence
  GFR-binding peptide
TPTKLSPINMLYFDSSNNVIYGKIPNMVVD

SEQ ID NO: 802 - protein, 32 aa, Artificial Sequence
  GFR-binding peptide
TPTKLSPINMLYFDDMGVPTYGKIPEGMSVVD

SEQ ID NO: 803 - protein, 30 aa, Artificial Sequence
  GFR-binding peptide
TPTKLSPINMLYFDKGVVTYYGKIPGMVVD

SEQ ID NO: 804 - protein, 30 aa, Artificial Sequence
  GFR-binding peptide
TPTRLSPINMLYFDAANNVVYGKIPDMVVD

SEQ ID NO: 805 - protein, 30 aa, Artificial Sequence
  GFR-binding peptide
TPTRLSPINMLYFDSANNVVYGKIPDMVVD

SEQ ID NO: 806 - protein, 30 aa, Artificial Sequence
  GFR-binding peptide
TPTKTSPINMLYFDNGRVLLYGKIPMIVVD

SEQ ID NO: 807 - protein, 30 aa, Artificial Sequence
  GFR-binding peptide
TPTALSPINMLYFVGRKPKVYGKIPMIVVD

SEQ ID NO: 808 - protein, 30 aa, Artificial Sequence
  GFR-binding peptide
TPTDLSPINMLYFIGKTPKIYGKIPMIVVD

SEQ ID NO: 809 - protein, 30 aa, Artificial Sequence
  GFR-binding peptide
TPTDLSPINMLYFVGRTPKVYGKIPMVVVD

SEQ ID NO: 810 - protein, 30 aa, Artificial Sequence
  GFR-binding peptide
VPTELSPINMLYFDENEKVVYGKIPDMVVE

SEQ ID NO: 811 - protein, 30 aa, Artificial Sequence
  GFR-binding peptide
VPEKMSPINMLYFDENKNVVYGKIPNMTVE

SEQ ID NO: 812 - protein, 30 aa, Artificial Sequence
  GFR-binding peptide
VPTELSPINMLYFDEYDKVVYGKIPEMVVE

SEQ ID NO: 813 - protein, 30 aa, Artificial Sequence
  GFR-binding peptide
APTKLSPINMLYFDDSSNVIYGKIPNMVVR

SEQ ID NO: 814 - protein, 30 aa, Artificial Sequence
  GFR-binding peptide
APTQLSPINMLYFDDSSNVIYGKIPNMVVR

SEQ ID NO: 815 - protein, 30 aa, Artificial Sequence
  GFR-binding peptide
APTKLSPINMLYFDSSNNVIYGKIPNMVVK

SEQ ID NO: 816 - protein, 32 aa, Artificial Sequence
  GFR-binding peptide
VPTKLSPINMLYFDDMGVPTYGKIPEGMSVAE

SEQ ID NO: 817 - protein, 30 aa, Artificial Sequence
  GFR-binding peptide
VPTKLSPINMLYFDKGVVTYYGKIPGMAVS

SEQ ID NO: 818 - protein, 30 aa, Artificial Sequence
  GFR-binding peptide
VPARLSPINMLYFDAANNVVYGKIPDMVVE

SEQ ID NO: 819 - protein, 30 aa, Artificial Sequence
  GFR-binding peptide
VPTRLSPINMLYFDSANNVVYGKIPDMVVE

SEQ ID NO: 820 - protein, 30 aa, Artificial Sequence
  GFR-binding peptide
APVKTSPINMLYFDNGRVLLYGKIPMIVEE

SEQ ID NO: 821 - protein, 30 aa, Artificial Sequence
  GFR-binding peptide
VPQALSPINMLYFVGRKPKVYGKIPMIVRS

SEQ ID NO: 822 - protein, 30 aa, Artificial Sequence
  GFR-binding peptide
VSQDLSPINMLYFIGKTPKIYGKIPMIVKS

SEQ ID NO: 823 - protein, 30 aa, Artificial Sequence
  GFR-binding peptide
VPQDLSPINMLYFVGRTPKVYGKIPMVVKS

SEQ ID NO: 824 - protein, 32 aa, Artificial Sequence
  GFR-binding peptide
VPTEESPINMLYFRIKPHQGQHYGKIPFLQHN

SEQ ID NO: 825 - protein, 32 aa, Artificial Sequence
  GFR-binding peptide
VPTGQSPINMLYFRIKPHQGQHYGKIPLEEHS

SEQ ID NO: 826 - protein, 32 aa, Artificial Sequence
  GFR-binding peptide
SRVHHSPINMLYFEYVRKKPKLYGKIPRLEEH

SEQ ID NO: 827 - protein, 32 aa, Artificial Sequence
  GFR-binding peptide
TQVQLSPINMLYFEIVRKKPIFYGKIPTLEDH

SEQ ID NO: 828 - protein, 30 aa, Artificial Sequence
  GFR-binding peptide
VPAELSPISILYIDENEKVVYKQYEDMVVE

SEQ ID NO: 829 - protein, 30 aa, Artificial Sequence
  GFR-binding peptide
VPAKMSPISILYIDENKNVVYKQYENMVVE

SEQ ID NO: 830 - protein, 30 aa, Artificial Sequence
  GFR-binding peptide
VPAELSPISILYIDEYDKVVYKQYEEMVVE

SEQ ID NO: 831 - protein, 30 aa, Artificial Sequence
  GFR-binding peptide
VPAKLSPISILYIDDSSNVIYKQYENMVVE

SEQ ID NO: 832 - protein, 30 aa, Artificial Sequence
  GFR-binding peptide
VPAQLSPISILYIDDSSNVIYKQYENMVVE

SEQ ID NO: 833 - protein, 30 aa, Artificial Sequence
  GFR-binding peptide
VPAKLSPISILYIDSSNNVIYKQYENMVVE

SEQ ID NO: 834 - protein, 32 aa, Artificial Sequence
  GFR-binding peptide
VPAKLSPISILYIDDMGVPTYKQYEEGMSVVE

SEQ ID NO: 835 - protein, 30 aa, Artificial Sequence
  GFR-binding peptide
VPAKLSPISILYIDKGVVTYYKQYEGMVVE

SEQ ID NO: 836 - protein, 30 aa, Artificial Sequence
  GFR-binding peptide
VPAKMSPISILYINDKQQIIYKQYEGMVVE

SEQ ID NO: 837 - protein, 30 aa, Artificial Sequence
  GFR-binding peptide
VPARLSPISILYIDSANNVVYKQYEDMVVE

SEQ ID NO: 838 - protein, 30 aa, Artificial Sequence
  GFR-binding peptide
VPAKTSPISILYIDNGRVLLYKQYEMIVVE

SEQ ID NO: 839 - protein, 30 aa, Artificial Sequence
  GFR-binding peptide
VPAALSPISILYIVGRKPKVYKQYEMIVVE

SEQ ID NO: 840 - protein, 30 aa, Artificial Sequence
  GFR-binding peptide
VPADLSPISILYIIGKTPKIYKQYEMIVVE

SEQ ID NO: 841 - protein, 30 aa, Artificial Sequence
  GFR-binding peptide
VPADLSPISILYIVGRTPKVYKQYEMVVVE

SEQ ID NO: 842 - protein, 30 aa, Artificial Sequence
  GFR-binding peptide
VPTELSPISILYIDENEKVVYKQYEDMVVE

SEQ ID NO: 843 - protein, 30 aa, Artificial Sequence
  GFR-binding peptide
VPEKMSPISILYIDENKNVVYKQYENMTVE

SEQ ID NO: 844 - protein, 30 aa, Artificial Sequence
  GFR-binding peptide
VPTELSPISILYIDEYDKVVYKQYEEMVVE

SEQ ID NO: 845 - protein, 30 aa, Artificial Sequence
  GFR-binding peptide
APTKLSPISILYIDDSSNVIYKQYENMVVR

SEQ ID NO: 846 - protein, 30 aa, Artificial Sequence
  GFR-binding peptide
APTQLSPISILYIDDSSNVIYKQYENMVVR

SEQ ID NO: 847 - protein, 30 aa, Artificial Sequence
  GFR-binding peptide
APTKLSPISILYIDSSNNVIYKQYENMVVK

SEQ ID NO: 848 - protein, 30 aa, Artificial Sequence
  GFR-binding peptide
VPTKLSPISILYIDKGVVTYYKQYEGMAVS

SEQ ID NO: 849 - protein, 30 aa, Artificial Sequence
  GFR-binding peptide
TPTKMSPISILYINDKQQIIYKQYEGMVVD

SEQ ID NO: 850 - protein, 30 aa, Artificial Sequence
  GFR-binding peptide
VPTRLSPISILYIDSANNVVYKQYEDMVVE

SEQ ID NO: 851 - protein, 30 aa, Artificial Sequence
  GFR-binding peptide
APVKTSPISILYIDNGRVLLYKQYEMIVEE

SEQ ID NO: 852 - protein, 30 aa, Artificial Sequence
  GFR-binding peptide
VPQALSPISILYIVGRKPKVYKQYEMIVRS

SEQ ID NO: 853 - protein, 30 aa, Artificial Sequence
  GFR-binding peptide
VSQDLSPISILYIIGKTPKIYKQYEMIVKS

SEQ ID NO: 854 - protein, 30 aa, Artificial Sequence
  GFR-binding peptide
VPQDLSPISILYIVGRTPKVYKQYEMVVKS

SEQ ID NO: 855 - protein, 32 aa, Artificial Sequence
  GFR-binding peptide
VPTEESPISILYIRIKPHQGQHYKQYEFLQHN

SEQ ID NO: 856 - protein, 32 aa, Artificial Sequence
  GFR-binding peptide
VPTGQSPISILYIRIKPHQGQHYKQYELEEHS

SEQ ID NO: 857 - protein, 32 aa, Artificial Sequence
  GFR-binding peptide
SRVHHSPISILYIEYVRKKPKLYKQYERLEEH

SEQ ID NO: 858 - protein, 32 aa, Artificial Sequence
  GFR-binding peptide
TQVQLSPISILYIEIVRKKPIFYKQYETLEDH

SEQ ID NO: 859 - protein, 30 aa, Artificial Sequence
  GFR-binding peptide
VPTELSPISILFIDENEKVVYKQYEDMVVE

SEQ ID NO: 860 - protein, 30 aa, Artificial Sequence
  GFR-binding peptide
VPTKMSPISILFIDENKNVVYKQYENMVVE

SEQ ID NO: 861 - protein, 30 aa, Artificial Sequence
  GFR-binding peptide
VPTELSPISILFIDEYDKVVYKQYEEMVVE

SEQ ID NO: 862 - protein, 30 aa, Artificial Sequence
  GFR-binding peptide
VPTKLSPISILFIDDSSNVIYKQYENMVVE

SEQ ID NO: 863 - protein, 30 aa, Artificial Sequence
  GFR-binding peptide
VPTQLSPISILFIDDSSNVIYKQYENMVVE

SEQ ID NO: 864 - protein, 30 aa, Artificial Sequence
  GFR-binding peptide
VPTKLSPISILFIDSSNNVIYKQYENMVVE

SEQ ID NO: 865 - protein, 32 aa, Artificial Sequence
  GFR-binding peptide
VPTKLSPISILFIDDMGVPTYKQYEEGMSVVE

SEQ ID NO: 866 - protein, 30 aa, Artificial Sequence
  GFR-binding peptide
VPTKLSPISILFIDKGVVTYYKQYEGMVVE

SEQ ID NO: 867 - protein, 30 aa, Artificial Sequence
  GFR-binding peptide
VPTKMSPISILFINDKQQIIYKQYEGMVVE

SEQ ID NO: 868 - protein, 30 aa, Artificial Sequence
  GFR-binding peptide
VPTRLSPISILFIDAANNVVYKQYEDMVVE

SEQ ID NO: 869 - protein, 30 aa, Artificial Sequence
  GFR-binding peptide
VPTKTSPISILFIDNGRVLLYKQYEMIVVE

SEQ ID NO: 870 - protein, 30 aa, Artificial Sequence
  GFR-binding peptide
VPTALSPISILFIVGRKPKVYKQYEMIVVE

SEQ ID NO: 871 - protein, 30 aa, Artificial Sequence
  GFR-binding peptide
VPTDLSPISILFIIGKTPKIYKQYEMIVVE

SEQ ID NO: 872 - protein, 30 aa, Artificial Sequence
  GFR-binding peptide
VPTDLSPISILFIVGRTPKVYKQYEMVVVE

SEQ ID NO: 873 - protein, 30 aa, Artificial Sequence
  GFR-binding peptide
VPEKMSPISILFIDENKNVVYKQYENMTVE

SEQ ID NO: 874 - protein, 30 aa, Artificial Sequence
  GFR-binding peptide
APTKLSPISILFIDDSSNVIYKQYENMVVR

SEQ ID NO: 875 - protein, 30 aa, Artificial Sequence
  GFR-binding peptide
APTQLSPISILFIDDSSNVIYKQYENMVVR

SEQ ID NO: 876 - protein, 30 aa, Artificial Sequence
  GFR-binding peptide
APTKLSPISILFIDSSNNVIYKQYENMVVK

SEQ ID NO: 877 - protein, 32 aa, Artificial Sequence
  GFR-binding peptide
VPTKLSPISILFIDDMGVPTYKQYEEGMSVAE

SEQ ID NO: 878 - protein, 30 aa, Artificial Sequence
  GFR-binding peptide
VPTKLSPISILFIDKGVVTYYKQYEGMAVS

SEQ ID NO: 879 - protein, 30 aa, Artificial Sequence
  GFR-binding peptide
TPTKMSPISILFINDKQQIIYKQYEGMVVD

SEQ ID NO: 880 - protein, 30 aa, Artificial Sequence
  GFR-binding peptide
VPARLSPISILFIDAANNVVYKQYEDMVVE

SEQ ID NO: 881 - protein, 30 aa, Artificial Sequence
  GFR-binding peptide
APVKTSPISILFIDNGRVLLYKQYEMIVEE

SEQ ID NO: 882 - protein, 30 aa, Artificial Sequence
  GFR-binding peptide
VPQALSPISILFIVGRKPKVYKQYEMIVRS

SEQ ID NO: 883 - protein, 30 aa, Artificial Sequence
  GFR-binding peptide
VSQDLSPISILFIIGKTPKIYKQYEMIVKS

SEQ ID NO: 884 - protein, 30 aa, Artificial Sequence
  GFR-binding peptide
VPQDLSPISILFIVGRTPKVYKQYEMVVKS

SEQ ID NO: 885 - protein, 32 aa, Artificial Sequence
  GFR-binding peptide
VPTEESPISILFIRIKPHQGQHYKQYEFLQHN

SEQ ID NO: 886 - protein, 32 aa, Artificial Sequence
  GFR-binding peptide
VPTGQSPISILFIRIKPHQGQHYKQYELEEHS

SEQ ID NO: 887 - protein, 32 aa, Artificial Sequence
  GFR-binding peptide
SRVHHSPISILFIEYVRKKPKLYKQYERLEEH

SEQ ID NO: 888 - protein, 32 aa, Artificial Sequence
  GFR-binding peptide
TQVQLSPISILFIEIVRKKPIFYKQYETLEDH

SEQ ID NO: 889 - protein, 30 aa, Artificial Sequence
  GFR-binding peptide
APVELKPLSMLYVDENEKVVDHHKDDMVEE

SEQ ID NO: 890 - protein, 30 aa, Artificial Sequence
  GFR-binding peptide
APVKMKPLSMLYVDENKNVVDHHKDNMVEE

SEQ ID NO: 891 - protein, 30 aa, Artificial Sequence
  GFR-binding peptide
APVELKPLSMLYVDEYDKVVDHHKDEMVEE

SEQ ID NO: 892 - protein, 30 aa, Artificial Sequence
  GFR-binding peptide
APVKLKPLSMLYVDDSSNVIDHHKDNMVEE

SEQ ID NO: 893 - protein, 30 aa, Artificial Sequence
  GFR-binding peptide
APVQLKPLSMLYVDDSSNVIDHHKDNMVEE

SEQ ID NO: 894 - protein, 30 aa, Artificial Sequence
  GFR-binding peptide
APVKLKPLSMLYVDSSNNVIDHHKDNMVEE

SEQ ID NO: 895 - protein, 32 aa, Artificial Sequence
  GFR-binding peptide
APVKLKPLSMLYVDDMGVPTDHHKDEGMSVEE

SEQ ID NO: 896 - protein, 30 aa, Artificial Sequence
  GFR-binding peptide
APVKLKPLSMLYVDKGVVTYDHHKDGMVEE

SEQ ID NO: 897 - protein, 30 aa, Artificial Sequence
  GFR-binding peptide
APVKMKPLSMLYVNDKQQIIDHHKDGMVEE

SEQ ID NO: 898 - protein, 30 aa, Artificial Sequence
  GFR-binding peptide
APVRLKPLSMLYVDAANNVVDHHKDDMVEE

SEQ ID NO: 899 - protein, 30 aa, Artificial Sequence
  GFR-binding peptide
APVRLKPLSMLYVDSANNVVDHHKDDMVEE

SEQ ID NO: 900 - protein, 30 aa, Artificial Sequence
  GFR-binding peptide
APVALKPLSMLYVVGRKPKVDHHKDMIVEE

SEQ ID NO: 901 - protein, 30 aa, Artificial Sequence
  GFR-binding peptide
APVDLKPLSMLYVIGKTPKIDHHKDMIVEE

SEQ ID NO: 902 - protein, 30 aa, Artificial Sequence
  GFR-binding peptide
APVDLKPLSMLYVVGRTPKVDHHKDMVVEE

SEQ ID NO: 903 - protein, 30 aa, Artificial Sequence
  GFR-binding peptide
VPTELKPLSMLYVDENEKVVDHHKDDMVVE

SEQ ID NO: 904 - protein, 30 aa, Artificial Sequence
  GFR-binding peptide
VPEKMKPLSMLYVDENKNVVDHHKDNMTVE

SEQ ID NO: 905 - protein, 30 aa, Artificial Sequence
  GFR-binding peptide
VPTELKPLSMLYVDEYDKVVDHHKDEMVVE

SEQ ID NO: 906 - protein, 30 aa, Artificial Sequence
  GFR-binding peptide
APTKLKPLSMLYVDDSSNVIDHHKDNMVVR

SEQ ID NO: 907 - protein, 30 aa, Artificial Sequence
  GFR-binding peptide
APTQLKPLSMLYVDDSSNVIDHHKDNMVVR

SEQ ID NO: 908 - protein, 30 aa, Artificial Sequence
  GFR-binding peptide
APTKLKPLSMLYVDSSNNVIDHHKDNMVVK

SEQ ID NO: 909 - protein, 32 aa, Artificial Sequence
  GFR-binding peptide
VPTKLKPLSMLYVDDMGVPTDHHKDEGMSVAE

SEQ ID NO: 910 - protein, 30 aa, Artificial Sequence
  GFR-binding peptide
VPTKLKPLSMLYVDKGVVTYDHHKDGMAVS

SEQ ID NO: 911 - protein, 30 aa, Artificial Sequence
  GFR-binding peptide
TPTKMKPLSMLYVNDKQQIIDHHKDGMVVD

SEQ ID NO: 912 - protein, 30 aa, Artificial Sequence
  GFR-binding peptide
VPARLKPLSMLYVDAANNVVDHHKDDMVVE

SEQ ID NO: 913 - protein, 30 aa, Artificial Sequence
  GFR-binding peptide
VPTRLKPLSMLYVDSANNVVDHHKDDMVVE

SEQ ID NO: 914 - protein, 30 aa, Artificial Sequence
  GFR-binding peptide
VPQALKPLSMLYVVGRKPKVDHHKDMIVRS

SEQ ID NO: 915 - protein, 30 aa, Artificial Sequence
  GFR-binding peptide
VSQDLKPLSMLYVIGKTPKIDHHKDMIVKS

SEQ ID NO: 916 - protein, 30 aa, Artificial Sequence
  GFR-binding peptide
VPQDLKPLSMLYVVGRTPKVDHHKDMVVKS

SEQ ID NO: 917 - protein, 32 aa, Artificial Sequence
  GFR-binding peptide
VPTEEKPLSMLYVRIKPHQGQHDHHKDFLQHN

SEQ ID NO: 918 - protein, 32 aa, Artificial Sequence
  GFR-binding peptide
VPTGQKPLSMLYVRIKPHQGQHDHHKDLEEHS

SEQ ID NO: 919 - protein, 32 aa, Artificial Sequence
  GFR-binding peptide
SRVHHKPLSMLYVEYVRKKPKLDHHKDRLEEH

SEQ ID NO: 920 - protein, 32 aa, Artificial Sequence
  GFR-binding peptide
TQVQLKPLSMLYVEIVRKKPIFDHHKDTLEDH

SEQ ID NO: 921 - protein, 30 aa, Artificial Sequence
  GFR-binding peptide
VPQELEPLPIVYYDENEKVVEQLSNDMVRS

SEQ ID NO: 922 - protein, 30 aa, Artificial Sequence
  GFR-binding peptide
VPQKMEPLPIVYYDENKNVVEQLSNNMVRS

SEQ ID NO: 923 - protein, 30 aa, Artificial Sequence
  GFR-binding peptide
VPQELEPLPIVYYDEYDKVVEQLSNEMVRS

SEQ ID NO: 924 - protein, 30 aa, Artificial Sequence
  GFR-binding peptide
VPQKLEPLPIVYYDDSSNVIEQLSNNMVRS

SEQ ID NO: 925 - protein, 30 aa, Artificial Sequence
  GFR-binding peptide
VPQQLEPLPIVYYDDSSNVIEQLSNNMVRS

SEQ ID NO: 926 - protein, 30 aa, Artificial Sequence
  GFR-binding peptide
VPQKLEPLPIVYYDSSNNVIEQLSNNMVRS

SEQ ID NO: 927 - protein, 32 aa, Artificial Sequence
  GFR-binding peptide
VPQKLEPLPIVYYDDMGVPTEQLSNEGMSVRS

SEQ ID NO: 928 - protein, 30 aa, Artificial Sequence
  GFR-binding peptide
VPQKLEPLPIVYYDKGVVTYEQLSNGMVRS

SEQ ID NO: 929 - protein, 30 aa, Artificial Sequence
  GFR-binding peptide
VPQKMEPLPIVYYNDKQQIIEQLSNGMVRS

SEQ ID NO: 930 - protein, 30 aa, Artificial Sequence
  GFR-binding peptide
VPQRLEPLPIVYYDAANNVVEQLSNDMVRS

SEQ ID NO: 931 - protein, 30 aa, Artificial Sequence
  GFR-binding peptide
VPQRLEPLPIVYYDSANNVVEQLSNDMVRS

SEQ ID NO: 932 - protein, 30 aa, Artificial Sequence
  GFR-binding peptide
VPQKTEPLPIVYYDNGRVLLEQLSNMIVRS

SEQ ID NO: 933 - protein, 30 aa, Artificial Sequence
  GFR-binding peptide
VPQDLEPLPIVYYIGKTPKIEQLSNMIVRS

SEQ ID NO: 934 - protein, 30 aa, Artificial Sequence
  GFR-binding peptide
VPQDLEPLPIVYYVGRTPKVEQLSNMVVRS

SEQ ID NO: 935 - protein, 30 aa, Artificial Sequence
  GFR-binding peptide
VPTELEPLPIVYYDENEKVVEQLSNDMVVE

SEQ ID NO: 936 - protein, 30 aa, Artificial Sequence
  GFR-binding peptide
VPEKMEPLPIVYYDENKNVVEQLSNNMTVE

SEQ ID NO: 937 - protein, 30 aa, Artificial Sequence
  GFR-binding peptide
VPTELEPLPIVYYDEYDKVVEQLSNEMVVE

SEQ ID NO: 938 - protein, 30 aa, Artificial Sequence
  GFR-binding peptide
APTKLEPLPIVYYDDSSNVIEQLSNNMVVR

SEQ ID NO: 939 - protein, 30 aa, Artificial Sequence
  GFR-binding peptide
APTQLEPLPIVYYDDSSNVIEQLSNNMVVR

SEQ ID NO: 940 - protein, 30 aa, Artificial Sequence
  GFR-binding peptide
APTKLEPLPIVYYDSSNNVIEQLSNNMVVK

SEQ ID NO: 941 - protein, 32 aa, Artificial Sequence
  GFR-binding peptide
VPTKLEPLPIVYYDDMGVPTEQLSNEGMSVAE

SEQ ID NO: 942 - protein, 30 aa, Artificial Sequence
  GFR-binding peptide
VPTKLEPLPIVYYDKGVVTYEQLSNGMAVS

SEQ ID NO: 943 - protein, 30 aa, Artificial Sequence
  GFR-binding peptide
TPTKMEPLPIVYYNDKQQIIEQLSNGMVVD

SEQ ID NO: 944 - protein, 30 aa, Artificial Sequence
  GFR-binding peptide
VPARLEPLPIVYYDAANNVVEQLSNDMVVE

SEQ ID NO: 945 - protein, 30 aa, Artificial Sequence
  GFR-binding peptide
VPTRLEPLPIVYYDSANNVVEQLSNDMVVE

SEQ ID NO: 946 - protein, 30 aa, Artificial Sequence
  GFR-binding peptide
APVKTEPLPIVYYDNGRVLLEQLSNMIVEE

SEQ ID NO: 947 - protein, 30 aa, Artificial Sequence
  GFR-binding peptide
VSQDLEPLPIVYYIGKTPKIEQLSNMIVKS

SEQ ID NO: 948 - protein, 30 aa, Artificial Sequence
  GFR-binding peptide
VPQDLEPLPIVYYVGRTPKVEQLSNMVVKS

SEQ ID NO: 949 - protein, 32 aa, Artificial Sequence
  GFR-binding peptide
VPTEEEPLPIVYYRIKPHQGQHEQLSNFLQHN

SEQ ID NO: 950 - protein, 32 aa, Artificial Sequence
  GFR-binding peptide
VPTGQEPLPIVYYRIKPHQGQHEQLSNLEEHS

SEQ ID NO: 951 - protein, 32 aa, Artificial Sequence
  GFR-binding peptide
SRVHHEPLPIVYYEYVRKKPKLEQLSNRLEEH

SEQ ID NO: 952 - protein, 32 aa, Artificial Sequence
  GFR-binding peptide
TQVQLEPLPIVYYEIVRKKPIFEQLSNTLEDH

SEQ ID NO: 953 - protein, 30 aa, Artificial Sequence
  GFR-binding peptide
VSQELEPLTILYYDENEKVVEQLSNDMVKS

SEQ ID NO: 954 - protein, 30 aa, Artificial Sequence
  GFR-binding peptide
VSQKMEPLTILYYDENKNVVEQLSNNMVKS

SEQ ID NO: 955 - protein, 30 aa, Artificial Sequence
  GFR-binding peptide
VSQELEPLTILYYDEYDKVVEQLSNEMVKS

SEQ ID NO: 956 - protein, 30 aa, Artificial Sequence
  GFR-binding peptide
VSQKLEPLTILYYDDSSNVIEQLSNNMVKS

SEQ ID NO: 957 - protein, 30 aa, Artificial Sequence
  GFR-binding peptide
VSQQLEPLTILYYDDSSNVIEQLSNNMVKS

SEQ ID NO: 958 - protein, 30 aa, Artificial Sequence
  GFR-binding peptide
VSQKLEPLTILYYDSSNNVIEQLSNNMVKS

SEQ ID NO: 959 - protein, 32 aa, Artificial Sequence
  GFR-binding peptide
VSQKLEPLTILYYDDMGVPTEQLSNEGMSVKS

SEQ ID NO: 960 - protein, 30 aa, Artificial Sequence
  GFR-binding peptide
VSQKLEPLTILYYDKGVVTYEQLSNGMVKS

SEQ ID NO: 961 - protein, 30 aa, Artificial Sequence
  GFR-binding peptide
VSQKMEPLTILYYNDKQQIIEQLSNGMVKS

SEQ ID NO: 962 - protein, 30 aa, Artificial Sequence
  GFR-binding peptide
VSQRLEPLTILYYDAANNVVEQLSNDMVKS

SEQ ID NO: 963 - protein, 30 aa, Artificial Sequence
  GFR-binding peptide
VSQRLEPLTILYYDSANNVVEQLSNDMVKS

SEQ ID NO: 964 - protein, 30 aa, Artificial Sequence
  GFR-binding peptide
VSQKTEPLTILYYDNGRVLLEQLSNMIVKS

SEQ ID NO: 965 - protein, 30 aa, Artificial Sequence
  GFR-binding peptide
VSQALEPLTILYYVGRKPKVEQLSNMIVKS

SEQ ID NO: 966 - protein, 30 aa, Artificial Sequence
  GFR-binding peptide
VSQDLEPLTILYYVGRTPKVEQLSNMVVKS

SEQ ID NO: 967 - protein, 30 aa, Artificial Sequence
  GFR-binding peptide
VPTELEPLTILYYDENEKVVEQLSNDMVVE

SEQ ID NO: 968 - protein, 30 aa, Artificial Sequence
  GFR-binding peptide
VPEKMEPLTILYYDENKNVVEQLSNNMTVE

SEQ ID NO: 969 - protein, 30 aa, Artificial Sequence
  GFR-binding peptide
VPTELEPLTILYYDEYDKVVEQLSNEMVVE

SEQ ID NO: 970 - protein, 30 aa, Artificial Sequence
  GFR-binding peptide
APTKLEPLTILYYDDSSNVIEQLSNNMVVR

SEQ ID NO: 971 - protein, 30 aa, Artificial Sequence
  GFR-binding peptide
APTQLEPLTILYYDDSSNVIEQLSNNMVVR

SEQ ID NO: 972 - protein, 30 aa, Artificial Sequence
  GFR-binding peptide
APTKLEPLTILYYDSSNNVIEQLSNNMVVK

SEQ ID NO: 973 - protein, 32 aa, Artificial Sequence
  GFR-binding peptide
VPTKLEPLTILYYDDMGVPTEQLSNEGMSVAE

SEQ ID NO: 974 - protein, 30 aa, Artificial Sequence
  GFR-binding peptide
VPTKLEPLTILYYDKGVVTYEQLSNGMAVS

SEQ ID NO: 975 - protein, 30 aa, Artificial Sequence
  GFR-binding peptide
TPTKMEPLTILYYNDKQQIIEQLSNGMVVD

SEQ ID NO: 976 - protein, 30 aa, Artificial Sequence
  GFR-binding peptide
VPARLEPLTILYYDAANNVVEQLSNDMVVE

SEQ ID NO: 977 - protein, 30 aa, Artificial Sequence
  GFR-binding peptide
VPTRLEPLTILYYDSANNVVEQLSNDMVVE

SEQ ID NO: 978 - protein, 30 aa, Artificial Sequence
  GFR-binding peptide
APVKTEPLTILYYDNGRVLLEQLSNMIVEE

SEQ ID NO: 979 - protein, 30 aa, Artificial Sequence
  GFR-binding peptide
VPQALEPLTILYYVGRKPKVEQLSNMIVRS

SEQ ID NO: 980 - protein, 32 aa, Artificial Sequence
  GFR-binding peptide
VPTEEEPLTILYYRIKPHQGQHEQLSNFLQHN

SEQ ID NO: 981 - protein, 32 aa, Artificial Sequence
  GFR-binding peptide
VPTGQEPLTILYYRIKPHQGQHEQLSNLEEHS

SEQ ID NO: 982 - protein, 32 aa, Artificial Sequence
  GFR-binding peptide
SRVHHEPLTILYYEYVRKKPKLEQLSNRLEEH

SEQ ID NO: 983 - protein, 32 aa, Artificial Sequence
  GFR-binding peptide
TQVQLEPLTILYYEIVRKKPIFEQLSNTLEDH

SEQ ID NO: 984 - protein, 30 aa, Artificial Sequence
  GFR-binding peptide
VPQELEPLTILYYDENEKVVEQLSNDMVKS

SEQ ID NO: 985 - protein, 30 aa, Artificial Sequence
  GFR-binding peptide
VPQKMEPLTILYYDENKNVVEQLSNNMVKS

SEQ ID NO: 986 - protein, 30 aa, Artificial Sequence
  GFR-binding peptide
VPQELEPLTILYYDEYDKVVEQLSNEMVKS

SEQ ID NO: 987 - protein, 30 aa, Artificial Sequence
  GFR-binding peptide
VPQKLEPLTILYYDDSSNVIEQLSNNMVKS

SEQ ID NO: 988 - protein, 30 aa, Artificial Sequence
  GFR-binding peptide
VPQQLEPLTILYYDDSSNVIEQLSNNMVKS

SEQ ID NO: 989 - protein, 30 aa, Artificial Sequence
  GFR-binding peptide
VPQKLEPLTILYYDSSNNVIEQLSNNMVKS

SEQ ID NO: 990 - protein, 32 aa, Artificial Sequence
  GFR-binding peptide
VPQKLEPLTILYYDDMGVPTEQLSNEGMSVKS

SEQ ID NO: 991 - protein, 30 aa, Artificial Sequence
  GFR-binding peptide
VPQKLEPLTILYYDKGVVTYEQLSNGMVKS

SEQ ID NO: 992 - protein, 30 aa, Artificial Sequence
  GFR-binding peptide
VPQKMEPLTILYYNDKQQIIEQLSNGMVKS

SEQ ID NO: 993 - protein, 30 aa, Artificial Sequence
  GFR-binding peptide
VPQRLEPLTILYYDAANNVVEQLSNDMVKS

SEQ ID NO: 994 - protein, 30 aa, Artificial Sequence
  GFR-binding peptide
VPQRLEPLTILYYDSANNVVEQLSNDMVKS

SEQ ID NO: 995 - protein, 30 aa, Artificial Sequence
  GFR-binding peptide
VPQKTEPLTILYYDNGRVLLEQLSNMIVKS

SEQ ID NO: 996 - protein, 30 aa, Artificial Sequence
  GFR-binding peptide
VPQALEPLTILYYVGRKPKVEQLSNMIVKS

SEQ ID NO: 997 - protein, 30 aa, Artificial Sequence
  GFR-binding peptide
VPQDLEPLTILYYIGKTPKIEQLSNMIVKS

SEQ ID NO: 998 - protein, 32 aa, Artificial Sequence
  GFR-binding peptide
VPTGQSNITMQIMRIKPHQGQHIGEMSLEQHN

SEQ ID NO: 999 - protein, 30 aa, Artificial Sequence
  GFR-binding peptide
VPTELSNITMQIMDENEKVVIGEMSDMVVE

SEQ ID NO: 1000 - protein, 30 aa, Artificial Sequence
  GFR-binding peptide
VPEKMSNITMQIMDENKNVVIGEMSNMTVE

SEQ ID NO: 1001 - protein, 30 aa, Artificial Sequence
  GFR-binding peptide
VPTELSNITMQIMDEYDKVVIGEMSEMVVE

SEQ ID NO: 1002 - protein, 30 aa, Artificial Sequence
  GFR-binding peptide
APTKLSNITMQIMDDSSNVIIGEMSNMVVR

SEQ ID NO: 1003 - protein, 30 aa, Artificial Sequence
  GFR-binding peptide
APTQLSNITMQIMDDSSNVIIGEMSNMVVR

SEQ ID NO: 1004 - protein, 30 aa, Artificial Sequence
  GFR-binding peptide
APTKLSNITMQIMDSSNNVIIGEMSNMVVK

SEQ ID NO: 1005 - protein, 32 aa, Artificial Sequence
  GFR-binding peptide
VPTKLSNITMQIMDDMGVPTIGEMSEGMSVAE

SEQ ID NO: 1006 - protein, 30 aa, Artificial Sequence
  GFR-binding peptide
VPTKLSNITMQIMDKGVVTYIGEMSGMAVS

SEQ ID NO: 1007 - protein, 30 aa, Artificial Sequence
  GFR-binding peptide
TPTKMSNITMQIMNDKQQIIIGEMSGMVVD

SEQ ID NO: 1008 - protein, 30 aa, Artificial Sequence
  GFR-binding peptide
VPARLSNITMQIMDAANNVVIGEMSDMVVE

SEQ ID NO: 1009 - protein, 30 aa, Artificial Sequence
  GFR-binding peptide
VPTRLSNITMQIMDSANNVVIGEMSDMVVE

SEQ ID NO: 1010 - protein, 30 aa, Artificial Sequence
  GFR-binding peptide
APVKTSNITMQIMDNGRVLLIGEMSMIVEE

SEQ ID NO: 1011 - protein, 30 aa, Artificial Sequence
  GFR-binding peptide
VPQALSNITMQIMVGRKPKVIGEMSMIVRS

SEQ ID NO: 1012 - protein, 30 aa, Artificial Sequence
  GFR-binding peptide
VSQDLSNITMQIMIGKTPKIIGEMSMIVKS

SEQ ID NO: 1013 - protein, 30 aa, Artificial Sequence
  GFR-binding peptide
VPQDLSNITMQIMVGRTPKVIGEMSMVVKS

SEQ ID NO: 1014 - protein, 32 aa, Artificial Sequence
  GFR-binding peptide
VPTGQSNITMQIMRIKPHQGQHIGEMSLEEHS

SEQ ID NO: 1015 - protein, 32 aa, Artificial Sequence
  GFR-binding peptide
SRVHHSNITMQIMEYVRKKPKLIGEMSRLEEH

SEQ ID NO: 1016 - protein, 32 aa, Artificial Sequence
  GFR-binding peptide
TQVQLSNITMQIMEIVRKKPIFIGEMSTLEDH

SEQ ID NO: 1017 - protein, 32 aa, Artificial Sequence
  GFR-binding peptide
VPTEESNITMQIMRIKPHQGQHLGEMSFLEHS

SEQ ID NO: 1018 - protein, 30 aa, Artificial Sequence
  GFR-binding peptide
VPTELSNITMQIMDENEKVVLGEMSDMVVE

SEQ ID NO: 1019 - protein, 30 aa, Artificial Sequence
  GFR-binding peptide
VPEKMSNITMQIMDENKNVVLGEMSNMTVE

SEQ ID NO: 1020 - protein, 30 aa, Artificial Sequence
  GFR-binding peptide
VPTELSNITMQIMDEYDKVVLGEMSEMVVE

SEQ ID NO: 1021 - protein, 30 aa, Artificial Sequence
  GFR-binding peptide
APTKLSNITMQIMDDSSNVILGEMSNMVVR

SEQ ID NO: 1022 - protein, 30 aa, Artificial Sequence
  GFR-binding peptide
APTQLSNITMQIMDDSSNVILGEMSNMVVR

SEQ ID NO: 1023 - protein, 30 aa, Artificial Sequence
  GFR-binding peptide
APTKLSNITMQIMDSSNNVILGEMSNMVVK

SEQ ID NO: 1024 - protein, 32 aa, Artificial Sequence
  GFR-binding peptide
VPTKLSNITMQIMDDMGVPTLGEMSEGMSVAE

SEQ ID NO: 1025 - protein, 30 aa, Artificial Sequence
  GFR-binding peptide
VPTKLSNITMQIMDKGVVTYLGEMSGMAVS

SEQ ID NO: 1026 - protein, 30 aa, Artificial Sequence
  GFR-binding peptide
TPTKMSNITMQIMNDKQQIILGEMSGMVVD

SEQ ID NO: 1027 - protein, 30 aa, Artificial Sequence
  GFR-binding peptide
VPARLSNITMQIMDAANNVVLGEMSDMVVE

SEQ ID NO: 1028 - protein, 30 aa, Artificial Sequence
  GFR-binding peptide
VPTRLSNITMQIMDSANNVVLGEMSDMVVE

SEQ ID NO: 1029 - protein, 30 aa, Artificial Sequence
  GFR-binding peptide
APVKTSNITMQIMDNGRVLLLGEMSMIVEE

SEQ ID NO: 1030 - protein, 30 aa, Artificial Sequence
  GFR-binding peptide
VPQALSNITMQIMVGRKPKVLGEMSMIVRS

SEQ ID NO: 1031 - protein, 30 aa, Artificial Sequence
  GFR-binding peptide
VSQDLSNITMQIMIGKTPKILGEMSMIVKS

SEQ ID NO: 1032 - protein, 30 aa, Artificial Sequence
  GFR-binding peptide
VPQDLSNITMQIMVGRTPKVLGEMSMVVKS

SEQ ID NO: 1033 - protein, 32 aa, Artificial Sequence
  GFR-binding peptide
VPTEESNITMQIMRIKPHQGQHLGEMSFLQHN

SEQ ID NO: 1034 - protein, 32 aa, Artificial Sequence
  GFR-binding peptide
SRVHHSNITMQIMEYVRKKPKLLGEMSRLEEH

SEQ ID NO: 1035 - protein, 32 aa, Artificial Sequence
  GFR-binding peptide
TQVQLSNITMQIMEIVRKKPIFLGEMSTLEDH

SEQ ID NO: 1036 - protein, 32 aa, Artificial Sequence
  GFR-binding peptide
SRVQLRSVKVAKVEIVRKKPIFKEVQVTLEEH

SEQ ID NO: 1037 - protein, 30 aa, Artificial Sequence
  GFR-binding peptide
VPTELRSVKVAKVDENEKVVKEVQVDMVVE

SEQ ID NO: 1038 - protein, 30 aa, Artificial Sequence
  GFR-binding peptide
VPEKMRSVKVAKVDENKNVVKEVQVNMTVE

SEQ ID NO: 1039 - protein, 30 aa, Artificial Sequence
  GFR-binding peptide
VPTELRSVKVAKVDEYDKVVKEVQVEMVVE

SEQ ID NO: 1040 - protein, 30 aa, Artificial Sequence
  GFR-binding peptide
APTKLRSVKVAKVDDSSNVIKEVQVNMVVR

SEQ ID NO: 1041 - protein, 30 aa, Artificial Sequence
  GFR-binding peptide
APTQLRSVKVAKVDDSSNVIKEVQVNMVVR

SEQ ID NO: 1042 - protein, 30 aa, Artificial Sequence
  GFR-binding peptide
APTKLRSVKVAKVDSSNNVIKEVQVNMVVK

SEQ ID NO: 1043 - protein, 32 aa, Artificial Sequence
  GFR-binding peptide
VPTKLRSVKVAKVDDMGVPTKEVQVEGMSVAE

SEQ ID NO: 1044 - protein, 30 aa, Artificial Sequence
  GFR-binding peptide
VPTKLRSVKVAKVDKGVVTYKEVQVGMAVS

SEQ ID NO: 1045 - protein, 30 aa, Artificial Sequence
  GFR-binding peptide
TPTKMRSVKVAKVNDKQQIIKEVQVGMVVD

SEQ ID NO: 1046 - protein, 30 aa, Artificial Sequence
  GFR-binding peptide
VPARLRSVKVAKVDAANNVVKEVQVDMVVE

SEQ ID NO: 1047 - protein, 30 aa, Artificial Sequence
  GFR-binding peptide
VPTRLRSVKVAKVDSANNVVKEVQVDMVVE

SEQ ID NO: 1048 - protein, 30 aa, Artificial Sequence
  GFR-binding peptide
APVKTRSVKVAKVDNGRVLLKEVQVMIVEE

SEQ ID NO: 1049 - protein, 30 aa, Artificial Sequence
  GFR-binding peptide
VPQALRSVKVAKVVGRKPKVKEVQVMIVRS

SEQ ID NO: 1050 - protein, 30 aa, Artificial Sequence
  GFR-binding peptide
VSQDLRSVKVAKVIGKTPKIKEVQVMIVKS

SEQ ID NO: 1051 - protein, 30 aa, Artificial Sequence
  GFR-binding peptide
VPQDLRSVKVAKVVGRTPKVKEVQVMVVKS

SEQ ID NO: 1052 - protein, 32 aa, Artificial Sequence
  GFR-binding peptide
VPTEERSVKVAKVRIKPHQGQHKEVQVFLQHN

SEQ ID NO: 1053 - protein, 32 aa, Artificial Sequence
  GFR-binding peptide
VPTGQRSVKVAKVRIKPHQGQHKEVQVLEEHS

SEQ ID NO: 1054 - protein, 32 aa, Artificial Sequence
  GFR-binding peptide
TQVQLRSVKVAKVEIVRKKPIFKEVQVTLEDH

SEQ ID NO: 1055 - protein, 32 aa, Artificial Sequence
  GFR-binding peptide
TQVHHRPVQVRKIEYVRKKPKLKKATVRLEDH

SEQ ID NO: 1056 - protein, 30 aa, Artificial Sequence
  GFR-binding peptide
VPTELRPVQVRKIDENEKVVKKATVDMVVE

SEQ ID NO: 1057 - protein, 30 aa, Artificial Sequence
  GFR-binding peptide
VPEKMRPVQVRKIDENKNVVKKATVNMTVE

SEQ ID NO: 1058 - protein, 30 aa, Artificial Sequence
  GFR-binding peptide
VPTELRPVQVRKIDEYDKVVKKATVEMVVE

SEQ ID NO: 1059 - protein, 30 aa, Artificial Sequence
  GFR-binding peptide
APTKLRPVQVRKIDDSSNVIKKATVNMVVR

SEQ ID NO: 1060 - protein, 30 aa, Artificial Sequence
  GFR-binding peptide
APTQLRPVQVRKIDDSSNVIKKATVNMVVR

SEQ ID NO: 1061 - protein, 30 aa, Artificial Sequence
  GFR-binding peptide
APTKLRPVQVRKIDSSNNVIKKATVNMVVK

SEQ ID NO: 1062 - protein, 32 aa, Artificial Sequence
  GFR-binding peptide
VPTKLRPVQVRKIDDMGVPTKKATVEGMSVAE

SEQ ID NO: 1063 - protein, 30 aa, Artificial Sequence
  GFR-binding peptide
VPTKLRPVQVRKIDKGVVTYKKATVGMAVS

SEQ ID NO: 1064 - protein, 30 aa, Artificial Sequence
  GFR-binding peptide
TPTKMRPVQVRKINDKQQIIKKATVGMVVD

SEQ ID NO: 1065 - protein, 30 aa, Artificial Sequence
  GFR-binding peptide
VPARLRPVQVRKIDAANNVVKKATVDMVVE

SEQ ID NO: 1066 - protein, 30 aa, Artificial Sequence
  GFR-binding peptide
VPTRLRPVQVRKIDSANNVVKKATVDMVVE

SEQ ID NO: 1067 - protein, 30 aa, Artificial Sequence
  GFR-binding peptide
APVKTRPVQVRKIDNGRVLLKKATVMIVEE

SEQ ID NO: 1068 - protein, 30 aa, Artificial Sequence
  GFR-binding peptide
VPQALRPVQVRKIVGRKPKVKKATVMIVRS

SEQ ID NO: 1069 - protein, 30 aa, Artificial Sequence
  GFR-binding peptide
VSQDLRPVQVRKIIGKTPKIKKATVMIVKS

SEQ ID NO: 1070 - protein, 30 aa, Artificial Sequence
  GFR-binding peptide
VPQDLRPVQVRKIVGRTPKVKKATVMVVKS

SEQ ID NO: 1071 - protein, 32 aa, Artificial Sequence
  GFR-binding peptide
VPTEERPVQVRKIRIKPHQGQHKKATVFLQHN

SEQ ID NO: 1072 - protein, 32 aa, Artificial Sequence
  GFR-binding peptide
VPTGQRPVQVRKIRIKPHQGQHKKATVLEEHS

SEQ ID NO: 1073 - protein, 32 aa, Artificial Sequence
  GFR-binding peptide
SRVHHRPVQVRKIEYVRKKPKLKKATVRLEEH

SEQ ID NO: 1074 - protein, 39 aa, Artificial Sequence
  GFR-binding peptide
  MOD_RES (32), (33): Xaa is C or S
ARVVMNQYNKLVVKDYEDLYLTSIASLQTPAXXPKPVKC

SEQ ID NO: 1075 - protein, 43 aa, Artificial Sequence
  GFR-binding peptide
  MOD_RES (2), (4), (36), (37): Xaa is C or S
HXGXARVVMNQYNKLTPVGMDDLYLTSIASLKTPVXXAKGVKC

SEQ ID NO: 1076 - protein, 42 aa, Artificial Sequence
  GFR-binding peptide
  MOD_RES (2), (4), (35), (36): Xaa is C or S
SXKXSKVIMQYNKLIKPTKGILYLTSIASLDQSVXXPSASAC

SEQ ID NO: 1077 - protein, 41 aa, Artificial Sequence
  GFR-binding peptide
  MOD_RES (34), (35): Xaa is C or S
GSGEVVMDRYKKLIVKENEDFYLVSIANLETPVXXAKPIKC

SEQ ID NO: 1078 - protein, 42 aa, Artificial Sequence
  GFR-binding peptide
  MOD_RES (2), (4), (35), (36): Xaa is C or S
SXKXSKVIMRYKKLIKPTKGIFYLVSIANLDQSVXXPSASAC

SEQ ID NO: 1079 - protein, 38 aa, Artificial Sequence
  GFR-binding peptide
  MOD_RES (31), (32): Xaa is C or S
KVVMNRHKRLVVNNSSDYYLVSTASLKTPAXXAKPVAC

SEQ ID NO: 1080 - protein, 43 aa, Artificial Sequence
  GFR-binding peptide
  MOD_RES (2), (4), (36), (37): Xaa is C or S
HXGXARVVMNYHYKLIVNSSDDKYLVSIPSLQTPAXXPKPVTC

SEQ ID NO: 1081 - protein, 31 aa, Artificial Sequence
  GFR-binding peptide
HDELTYHYKLIVNSSDDKYLVSIPSLQTPAC

SEQ ID NO: 1082 - protein, 38 aa, Artificial Sequence
  GFR-binding peptide
HDELTQYNKLPKKRVIELYLTSIASLQVQTPRCQVNRC

SEQ ID NO: 1083 - protein, 33 aa, Artificial Sequence
  GFR-binding peptide
KNHQRHKRLIVNSSDDYYLVSTASLQTPASSPC

SEQ ID NO: 1084 - protein, 37 aa, Artificial Sequence
  GFR-binding peptide
ARVVMNRYKKLGGGGGGGFYLMSIANLQTPASSPKPC

SEQ ID NO: 1085 - protein, 32 aa, Artificial Sequence
  GFR-binding peptide
MEQYNKLAAAALYLTSIASLETPVSSAKPVKC

SEQ ID NO: 1086 - protein, 39 aa, Artificial Sequence
  GFR-binding peptide
  MOD_RES (32), (33): Xaa is C or S
GEVVMEHKRLVVKEDYEDYYLVSTASLETPVXXAKPISC

SEQ ID NO: 1087 - protein, 26 aa, Artificial Sequence
  GFR-binding peptide
QYNKLIVNNSSDLYLMSIASLKTPAC

SEQ ID NO: 1088 - protein, 28 aa, Artificial Sequence
  GFR-binding peptide
MDQYNKLGGGLYLMSIASLEQSVASSAC

SEQ ID NO: 1089 - protein, 40 aa, Artificial Sequence
  GFR-binding peptide
  MOD_RES (2), (4): Xaa is C or S
RXGXGEVVMDYHYKLVVKENEDKYLTSIPSLETPVSSAKC

SEQ ID NO: 1090 - protein, 38 aa, Artificial Sequence
  GFR-binding peptide
  MOD_RES (31), (32): Xaa is C or S
SRVIMRYKKLVKPKRGVFYLMSIANLKQPVXXPAASAC

SEQ ID NO: 1091 - protein, 37 aa, Artificial Sequence
  GFR-binding peptide
  MOD_RES (30), (31): Xaa is C or S
SMGERYKKLVVKENEDLYLTSIANLKTPVXXAKGVKC

SEQ ID NO: 1092 - protein, 37 aa, Artificial Sequence
  GFR-binding peptide
ARVVIMQYNKLIVNSSDDLYLTSIASLQTPASSPKPC

SEQ ID NO: 1093 - protein, 33 aa, Artificial Sequence
  GFR-binding peptide
  MOD_RES (26), (27): Xaa is C or S
QYNKLIVNSSDDLYLTSIANLKTPVXXAKGVKC

SEQ ID NO: 1094 - protein, 33 aa, Artificial Sequence
  GFR-binding peptide
MNRYKKLIVKDYDDLYLTSIASLETPVSSGGGC

SEQ ID NO: 1095 - protein, 42 aa, Artificial Sequence
  GFR-binding peptide
  MOD_RES (31), (32): Xaa is C or S
RVVMNQYNKLVVKDYEDLYLTSIASLQTPAXXPKPVKGWFWW

SEQ ID NO: 1096 - protein, 42 aa, Artificial Sequence
  GFR-binding peptide
  MOD_RES (31), (32): Xaa is C or S
RVAMNQYNKLVVKDYEDLYLTSIASLQTPAXXPKPVKPGPTG

SEQ ID NO: 1097 - protein, 38 aa, Artificial Sequence
  GFR-binding peptide
SKVIMRHKRLIVNSSDDYYLVSTASLQTPASSPPGPTG

SEQ ID NO: 1098 - protein, 30 aa, Artificial Sequence
  GFR-binding peptide
YHYKLIVNSSDDKYLVSIPSLQTPAPGPTG

SEQ ID NO: 1099 - protein, 32 aa, Artificial Sequence
  GFR-binding peptide
MDQYNKLGGGLYLMSIASLEQSVASSAPGPTG

SEQ ID NO: 1100 - protein, 30 aa, Artificial Sequence
  GFR-binding peptide
RHKRLIVNNSSDLYLMSIASLKTPAPGPTG

SEQ ID NO: 1101 - protein, 30 aa, Artificial Sequence
  GFR-binding peptide
RYKKLIVNNSSDLYLMSIASLKTPAPGPTG

SEQ ID NO: 1102 - protein, 44 aa, Artificial Sequence
  GFR-binding peptide
  MOD_RES (2), (4): Xaa is C or S
RXGXGEVVMDYHYKLVVKENEDKYLTSIPSLETPVSSAKPGPTG

SEQ ID NO: 1103 - protein, 36 aa, Artificial Sequence
  GFR-binding peptide
MDYHYKLVVKENEDKYLTSIPSLETPVSSAKPGPTG

SEQ ID NO: 1104 - protein, 38 aa, Artificial Sequence
  GFR-binding peptide
NHQMDRYKKLGGGGGFYLMSIANLQTPASSPKPPGPTG

SEQ ID NO: 1105 - protein, 44 aa, Artificial Sequence
  GFR-binding peptide
  MOD_RES (2), (4): Xaa is C or S
RXGXGEVVMDYHYKLVVKENEDKYLTSIPSLETPVSSAKGWFWW

SEQ ID NO: 1106 - protein, 35 aa, Artificial Sequence
  GFR-binding peptide
NHQMDQYNKLGGGLYLMSIASLEQSVASSAGWFWW

SEQ ID NO: 1107 - protein, 42 aa, Artificial Sequence
  GFR-binding peptide
HDELTQYNKLPKKRVIELYLTSIASLQVQTPRCQVNRPGPTG

SEQ ID NO: 1108 - protein, 36 aa, Artificial Sequence
  GFR-binding peptide
ELTQYNKLAAALYLTSIASLQVQTPRCQVNRPGPTG

SEQ ID NO: 1109 - protein, 38 aa, Artificial Sequence
  GFR-binding peptide
  MOD_RES (31), (32): Xaa is C or S
SRVIMNSLQEVKPKRGVYYVIPLPELETPVXXAKPIKC

SEQ ID NO: 1110 - protein, 40 aa, Artificial Sequence
  GFR-binding peptide
  MOD_RES (33), (34): Xaa is C or S
KSSRVIMNSLQEVKPTRGVYYVIPLPELAQPVXXPAASAC

SEQ ID NO: 1111 - protein, 28 aa, Artificial Sequence
  GFR-binding peptide
VQVEKHQGQHPKIRVKAVKVSREETPVC

SEQ ID NO: 1112 - protein, 30 aa, Artificial Sequence
  GFR-binding peptide
LFSMEGIHQGQHPKIRMIQMTINSEETPVC

SEQ ID NO: 1113 - protein, 42 aa, Artificial Sequence
  GFR-binding peptide
ALHDELRVTAKKLKPKKRVYEIKRVQVPRLQVQTPRCQVNRC

SEQ ID NO: 1114 - protein, 35 aa, Artificial Sequence
  GFR-binding peptide
  MOD_RES (28), (29): Xaa is C or S
MNPYVKLVVNKNEDFFLISLSSMKEPVXXPEPIGC

SEQ ID NO: 1115 - protein, 35 aa, Artificial Sequence
  GFR-binding peptide
  MOD_RES (28), (29): Xaa is C or S
MNPYVKLVVNKNEDFFLLSLSSTKEPVXXPEPIGC

SEQ ID NO: 1116 - protein, 41 aa, Artificial Sequence
  GFR-binding peptide
  MOD_RES (34), (35): Xaa is C or S
GSAEVVMDEYQKYVVNNAADIYLISIPSLRAPVXXSAPAAC

SEQ ID NO: 1117 - protein, 38 aa, Artificial Sequence
  GFR-binding peptide
  MOD_RES (31), (32): Xaa is C or S
EVVMDEYQKYVVNNAADIYLISIPSLRAPVXXSAPAAC

SEQ ID NO: 1118 - protein, 35 aa, Artificial Sequence
  GFR-binding peptide
  MOD_RES (28), (29): Xaa is C or S
MDEYQKYVVNNAADIYLLSIPSLRAPVXXSAPAAC

SEQ ID NO: 1119 - protein, 27 aa, Artificial Sequence
  GFR-binding peptide
MDEYQKYVVNNAADIYLLSIPSLRAPC

SEQ ID NO: 1120 - protein, 32 aa, Artificial Sequence
  GFR-binding peptide
  MOD_RES (24), (25): Xaa is C or S
MDEYQKYAAAIYLISIPSLRAPVXXSAPAAAC

SEQ ID NO: 1121 - protein, 26 aa, Artificial Sequence
  GFR-binding peptide
EYQKYVVNNAADIYLISIPSLRQPVC

SEQ ID NO: 1122 - protein, 39 aa, Artificial Sequence
  GFR-binding peptide
  MOD_RES (32), (33): Xaa is C or S
ARVVMDEYQKYVVNNAADIYLISIPSLQTPAXXPKPVTC

SEQ ID NO: 1123 - protein, 39 aa, Artificial Sequence
  GFR-binding peptide
KNHQLFVTAKKQGQHPKIRIKRVQVPREETPVCELGEDN

SEQ ID NO: 1124 - protein, 34 aa, Artificial Sequence
  GFR-binding peptide
  MOD_RES (28), (29): Xaa is C or S
VMNSLQEVKPTRGVYYLITLPELDQPVXXPSASA

SEQ ID NO: 1125 - protein, 37 aa, Artificial Sequence
  GFR-binding peptide
ALHDELTNSLQEPKKRVIEYYVIPLPELQTPRCQVNR

SEQ ID NO: 1126 - protein, 32 aa, Artificial Sequence
  GFR-binding peptide
EAVSMGEEYQKYTPVGMDDIYLISIPSLKTPV

SEQ ID NO: 1127 - protein, 32 aa, Artificial Sequence
  GFR-binding peptide
EAVSMGEEYQKYTPVGMDDIYLISIPSLAQPV

SEQ ID NO: 1128 - protein, 31 aa, Artificial Sequence
  GFR-binding peptide
HQLFSMEGIHQGQHPKIRMIQTTINSEETPV

SEQ ID NO: 1129 - protein, 31 aa, Artificial Sequence
  GFR-binding peptide
EVVAASMEGLHGQHPKIRIFLISIPSLETPV

SEQ ID NO: 1130 - protein, 30 aa, Artificial Sequence
  GFR-binding peptide
EVVMDNSLQEIVKENEDYYLLTLPELQVQT

SEQ ID NO: 1131 - protein, 30 aa, Artificial Sequence
  GFR-binding peptide
RVVMDNSLQEVVNNASDYYLITLPELRLQV

SEQ ID NO: 1132 - protein, 30 aa, Artificial Sequence
  GFR-binding peptide
RVVMNNSLQEIVNSSDDYYVIELPELKTPA

SEQ ID NO: 1133 - protein, 31 aa, Artificial Sequence
  GFR-binding peptide
SREVIMEYQKYVKPKRGVIFLISIPSLAQPV

SEQ ID NO: 1134 - protein, 30 aa, Artificial Sequence
  GFR-binding peptide
HEELREYQKYVKPKRGVIFLISIPSLQTPA

SEQ ID NO: 1135 - protein, 30 aa, Artificial Sequence
  GFR-binding peptide
SVAMNRYKKLIVNSSDDFYLTSIANLAQPV

SEQ ID NO: 1136 - protein, 30 aa, Artificial Sequence
  GFR-binding peptide
SVAMNPYVKLVVNKNEDFFLISLSSMKEPV

SEQ ID NO: 1137 - protein, 27 aa, Artificial Sequence
  GFR-binding peptide
MDEYQKYVVNNAADIYLISIPSLRAPV

SEQ ID NO: 1138 - protein, 31 aa, Artificial Sequence
  GFR-binding peptide
KNHQLFPIKGYIIQNKENFYLMNIPSLAQPV

SEQ ID NO: 1139 - protein, 30 aa, Artificial Sequence
  GFR-binding peptide
DVVMGPIKGYIINNKENFYLMNIPSMKTPT

SEQ ID NO: 1140 - protein, 31 aa, Artificial Sequence
  GFR-binding peptide
KNHQLFQYNKLPKKRVIELYLTSIASLQTPA

SEQ ID NO: 1141 - protein, 30 aa, Artificial Sequence
  GFR-binding peptide
HDEMEQYNKLPKKRVIELYLTSIASLQTPA

SEQ ID NO: 1142 - protein, 39 aa, Artificial Sequence; identical to SEQ ID NO: 1123
  GFR-binding peptide

SEQ ID NO: 1143 - protein, 37 aa, Artificial Sequence
  GFR-binding peptide
  MOD_RES (31), (32): Xaa is C or S
HDEVMNSLQEVKPTRGVYYLITLPELDQPVXXPSASA

SEQ ID NO: 1144 - protein, 37 aa, Artificial Sequence; identical to SEQ ID NO: 1125
  GFR-binding peptide

SEQ ID NO: 1145 - protein, 32 aa, Artificial Sequence
  GFR-binding peptide
EAVSMGEEYQKYTPVGMKDIYLISIPSLKTPV

SEQ ID NO: 1146 - protein, 32 aa, Artificial Sequence
  GFR-binding peptide
EAVSMGEEYQKYTPVGMEDIYLISIPSLRAPV

SEQ ID NO: 1147 - protein, 31 aa, Artificial Sequence; identical to SEQ ID NO: 1128
  GFR-binding peptide

SEQ ID NO: 1148 - protein, 31 aa, Artificial Sequence
  GFR-binding peptide
RVVMNSMEGLHGQHPKLRIFLISIPSLAQPV

SEQ ID NO: 1149 - protein, 30 aa, Artificial Sequence
  GFR-binding peptide
EVVMDNSLQEIVKENEDYYLLTLPELAQPV

SEQ ID NO: 1150 - protein, 30 aa, Artificial Sequence
  GFR-binding peptide
SKVMDNSLQEVANNASDYYLITLPELETPV

SEQ ID NO: 1151 - protein, 30 aa, Artificial Sequence
  GFR-binding peptide
RVVMNNSLQEIVNSSDDYYVITLPELKTPA

SEQ ID NO: 1152 - protein, 31 aa, Artificial Sequence; identical to SEQ ID NO: 1133
  GFR-binding peptide

SEQ ID NO: 1153 - protein, 30 aa, Artificial Sequence
  GFR-binding peptide
EVVMNEYQKYVKPKGGVIFLISIPSLETPV

SEQ ID NO: 1154 - protein, 31 aa, Artificial Sequence
  GFR-binding peptide
EVVSMGRYKKLIVNSSEDFYLTSIANHHVRS

SEQ ID NO: 1155 - protein, 30 aa, Artificial Sequence
  GFR-binding peptide
EVTMNPYVKLAANKNEDFFLISLSSMKEPV

SEQ ID NO: 1156 - protein, 30 aa, Artificial Sequence
  GFR-binding peptide
SKVMDEYQKYVVNNAADIYLISIPSLRAPV

SEQ ID NO: 1157 - protein, 30 aa, Artificial Sequence
  GFR-binding peptide
EVVIMPIKGYIIQNKENFYLMNIPSEETPV

SEQ ID NO: 1158 - protein, 30 aa, Artificial Sequence; identical to SEQ ID NO: 1139
  GFR-binding peptide

SEQ ID NO: 1159 - protein, 31 aa, Artificial Sequence
  GFR-binding peptide
KNHQLFQYNKLPKEGALELYLTSIASHHTPV

SEQ ID NO: 1160 - protein, 30 aa, Artificial Sequence
  GFR-binding peptide
DVVMEQYNKLPEERVIELYLTSIASLKTPA

SEQ ID NO: 1161 - protein, 30 aa, Artificial Sequence
  GFR-binding peptide
EEVMEQYNKLPEKRVIKLYLTSIASLDQSV

SEQ ID NO: 1162 - protein, 42 aa, Artificial Sequence
  GFR-binding peptide
  MOD_RES (2), (4), (36), (37): Xaa is C or S
RXAXSEVVMNQYNKLVVNKNEDLYLMSIASMKTPVXXPEPIG

SEQ ID NO: 1163 - protein, 42 aa, Artificial Sequence
  GFR-binding peptide
  MOD_RES (2), (4), (36): Xaa is C or S
HXGXSEVVMNQYNKLIVNSSDDLYLMSIASLKTPVXTPKTVH

SEQ ID NO: 1164 - protein, 42 aa, Artificial Sequence
  GFR-binding peptide
  MOD_RES (2), (4), (36), (37): Xaa is C or S
HXGXSEVVMNQYNKLIVNSSDDLYLMSIASLKTPVXXPKPVY

SEQ ID NO: 1165 - protein, 42 aa, Artificial Sequence
  GFR-binding peptide
  MOD_RES (2), (4), (36), (37): Xaa is C or S
HXGXAEVVMNQYNKLIVNSSDDLYLMSIASLQTPVXXPKPVT

SEQ ID NO: 1166 - protein, 42 aa, Artificial Sequence
  GFR-binding peptide
  MOD_RES (2), (4), (36), (37): Xaa is C or S
HXGXAEVVMNQYNKLIVNNSSDLYLMSIASLKTPVXXAKPVA

SEQ ID NO: 1167 - protein, 43 aa, Artificial Sequence
  GFR-binding peptide
  MOD_RES (2), (4), (37), (38): Xaa is C or S
RXGXEVVSMGEQYNKLTPVGMDDLYLMSIASLKTPVXXAKGVK

SEQ ID NO: 1168 - protein, 42 aa, Artificial Sequence
  GFR-binding peptide
  MOD_RES (2), (4), (36), (37): Xaa is C or S
RXGXEEVVMGQYNKLYTVVGKDLYLMSIASLKTPVXXAKSAK

SEQ ID NO: 1169 - protein, 42 aa, Artificial Sequence
  GFR-binding peptide
  MOD_RES (2), (4), (36), (37): Xaa is C or S
SXGXREVVMGQYNKLIIQQKDNLYLMSIASMKTPVXXPGASG

SEQ ID NO: 1170 - protein, 42 aa, Artificial Sequence
  GFR-binding peptide
  MOD_RES (2), (4), (36), (37): Xaa is C or S
RXGXAEVVMDQYNKLVVNNAADLYLMSIASLRTPVXXSAPAA

SEQ ID NO: 1171 - protein, 42 aa, Artificial Sequence
  GFR-binding peptide
  MOD_RES (2), (4), (36), (37): Xaa is C or S
RXGXSEVVMDQYNKLVVNNASDLYLMSIASLRTPVXXTPPTS

SEQ ID NO: 1172 - protein, 42 aa, Artificial Sequence
  GFR-binding peptide
  MOD_RES (2), (4), (36), (37): Xaa is C or S
HXGXSEVVMNQYNKLIVNSSDDLYLMSIASLKTPVXXPKPVH

SEQ ID NO: 1173 - protein, 41 aa, Artificial Sequence
  GFR-binding peptide
  MOD_RES (2), (4), (35), (36): Xaa is C or S
LXGXEVVIMQYNKLLLVRGNDLYLMSIASTKTPVXXTSPVR

SEQ ID NO: 1174 - protein, 41 aa, Artificial Sequence
  GFR-binding peptide
  MOD_RES (2), (4), (35), (36): Xaa is C or S
SXKXEVVIMQYNKLVKPKRGVLYLMSIASLATPVXXPAASA

SEQ ID NO: 1175 - protein, 41 aa, Artificial Sequence
  GFR-binding peptide
  MOD_RES (2), (4), (35), (36): Xaa is C or S
SXKXEVVIMQYNKLIKPTKGILYLMSIASLDTPVXXPSASA

SEQ ID NO: 1176 - protein, 41 aa, Artificial Sequence
  GFR-binding peptide
  MOD_RES (2), (4), (35), (36): Xaa is C or S
SXKXEVVVMQYNKLVKPTRGVLYLMSIASLDTPVXXPSASA

SEQ ID NO: 1177 - protein, 42 aa, Artificial Sequence
  GFR-binding peptide
  MOD_RES (2), (4), (36), (37): Xaa is C or S
RXAXSEVTMNQYNKLVVNKNEDLYLMSIASMKEPVXXPEPIG

SEQ ID NO: 1178 - protein, 42 aa, Artificial Sequence
  GFR-binding peptide
  MOD_RES (2), (4), (36): Xaa is C or S
HXGXSRVVMNQYNKLIVNSSDDLYLMSIASLKTPAXTPKTVH

SEQ ID NO: 1179 - protein, 42 aa, Artificial Sequence
  GFR-binding peptide
  MOD_RES (2), (4), (36), (37): Xaa is C or S
HXGXSRVVMNQYNKLIVNSSDDLYLMSIASLKTPAXXPKPVY

SEQ ID NO: 1180 - protein, 42 aa, Artificial Sequence
  GFR-binding peptide
  MOD_RES (2), (4), (36), (37): Xaa is C or S
HXGXARVVMNQYNKLIVNSSDDLYLMSIASLQTPAXXPKPVT

SEQ ID NO: 1181 - protein, 42 aa, Artificial Sequence
  GFR-binding peptide
  MOD_RES (2), (4), (36), (37): Xaa is C or S
HXGXAKVVMNQYNKLIVNNSSDLYLMSIASLKTPAXXAKPVA

SEQ ID NO: 1182 - protein, 43 aa, Artificial Sequence
  GFR-binding peptide
  MOD_RES (2), (4), (37), (38): Xaa is C or S
RXGXEAVSMGEQYNKLTPVGMDDLYLMSIASLKTPVXXAKGVK

SEQ ID NO: 1183 - protein, 42 aa, Artificial Sequence
  GFR-binding peptide
  MOD_RES (2), (4), (36), (37): Xaa is C or S
RXGXESVAMGQYNKLYTVVGKDLYLMSIASLKTPVXXAKSAK

SEQ ID NO: 1184 - protein, 42 aa, Artificial Sequence
  GFR-binding peptide
  MOD_RES (2), (4), (36), (37): Xaa is C or S
SXGXRDVVMGQYNKLIIQQKDNLYLMSIASMKTPTXXPGASG

SEQ ID NO: 1185 - protein, 42 aa, Artificial Sequence
  GFR-binding peptide
  MOD_RES (2), (4), (36), (37): Xaa is C or S
RXGXAEVVMDQYNKLVVNNAADLYLMSIASLRAPVXXSAPAA

SEQ ID NO: 1186 - protein, 42 aa, Artificial Sequence
  GFR-binding peptide
  MOD_RES (2), (4), (36), (37): Xaa is C or S
HXGXSRVVMNQYNKLIVNSSDDLYLMSIASLKTPAXXPKPVH

SEQ ID NO: 1187 - protein, 41 aa, Artificial Sequence
  GFR-binding peptide
  MOD_RES (2), (4), (35), (36): Xaa is C or S
LXGXEEVIMQYNKLLLVRGNDLYLMSIASTKVPAXXTSPVR

SEQ ID NO: 1188 - protein, 41 aa, Artificial Sequence
  GFR-binding peptide
  MOD_RES (2), (4), (35), (36): Xaa is C or S
SXKXSRVIMQYNKLVKPKRGVLYLMSIASLAQPVXXPAASA

SEQ ID NO: 1189 - protein, 41 aa, Artificial Sequence
  GFR-binding peptide
  MOD_RES (2), (4), (35), (36): Xaa is C or S
SXKXSKVIMQYNKLIKPTKGILYLMSIASLDQSVXXPSASA

SEQ ID NO: 1190 - protein, 41 aa, Artificial Sequence
  GFR-binding peptide
  MOD_RES (2), (4), (35), (36): Xaa is C or S
SXKXSKVVMQYNKLVKPTRGVLYLMSIASLDQPVXXPSASA

SEQ ID NO: 1191 - protein, 44 aa, Artificial Sequence
  GFR-binding peptide
  MOD_RES (2), (4), (38): Xaa is C or S
RXEXKNHQLFQYNKLHQGQHPKIRLYLMSIASEETPVXELGEDN

SEQ ID NO: 1192 - protein, 44 aa, Artificial Sequence
  GFR-binding peptide
  MOD_RES (2), (4), (38): Xaa is C or S
RXEXQSHEELQYNKLHQGQHPKIRLYLMSIASQGTPVXELGEDN

SEQ ID NO: 1193 - protein, 45 aa, Artificial Sequence
  GFR-binding peptide
  MOD_RES (2), (4), (41): Xaa is C or S
AXAXELHEELRQYNKLLKPKKRVYELYLMSIASHHVRSPQXKVSS

SEQ ID NO: 1194 - protein, 45 aa, Artificial Sequence
  GFR-binding peptide
  MOD_RES (2), (4), (41): Xaa is C or S
EXKXALHDELTQYNKLFIPKKRVIELYLMSIASLQVQTPRXQVNR

SEQ ID NO: 1195 - protein, 42 aa, Artificial Sequence
  GFR-binding peptide
  MOD_RES (2), (4), (36), (37): Xaa is C or S
RXGXGEVTMDPYVKLVVKENEDFFLISLSSLEEPVXXAKPIK

SEQ ID NO: 1196 - protein, 42 aa, Artificial Sequence
  GFR-binding peptide
  MOD_RES (2), (4), (36), (37): Xaa is C or S
RXGXGEVTMEPYVKLVVKDYEDFFLISLSSLEEPVXXAKPIS

SEQ ID NO: 1197 - protein, 42 aa, Artificial Sequence
  GFR-binding peptide
  MOD_RES (2), (4), (36): Xaa is C or S
HXGXSEVTMNPYVKLIVNSSDDFFLISLSSLKEPVXTPKTVH

SEQ ID NO: 1198 - protein, 42 aa, Artificial Sequence
  GFR-binding peptide
  MOD_RES (2), (4), (36), (37): Xaa is C or S
HXGXSEVTMNPYVKLIVNSSDDFFLISLSSLKEPVXXPKPVY

SEQ ID NO: 1199 - protein, 42 aa, Artificial Sequence
  GFR-binding peptide
  MOD_RES (2), (4), (36), (37): Xaa is C or S
HXGXAEVTMNPYVKLIVNSSDDFFLISLSSLQEPVXXPKPVT

SEQ ID NO: 1200 - protein, 42 aa, Artificial Sequence
  GFR-binding peptide
  MOD_RES (2), (4), (36), (37): Xaa is C or S
HXGXAEVTMNPYVKLIVNNSSDFFLISLSSLKEPVXXAKPVA

SEQ ID NO: 1201 - protein, 43 aa, Artificial Sequence
  GFR-binding peptide
  MOD_RES (2), (4), (37), (38): Xaa is C or S
RXGXEVTSMGEPYVKLTPVGMDDFFLISLSSLKEPVXXAKGVK

SEQ ID NO: 1202 - protein, 42 aa, Artificial Sequence
  GFR-binding peptide
  MOD_RES (2), (4), (36), (37): Xaa is C or S
RXGXEEVTMGPYVKLYTVVGKDFFLISLSSLKEPVXXAKSAK

SEQ ID NO: 1203 - protein, 42 aa, Artificial Sequence
  GFR-binding peptide
  MOD_RES (2), (4), (36), (37): Xaa is C or S
SXGXREVTMGPYVKLIIQQKDNFFLISLSSMKEPVXXPGASG

SEQ ID NO: 1204 - protein, 42 aa, Artificial Sequence
  GFR-binding peptide
  MOD_RES (2), (4), (36), (37): Xaa is C or S
RXGXAEVTMDPYVKLVVNNAADFFLISLSSLREPVXXSAPAA

SEQ ID NO: 1205 - protein, 42 aa, Artificial Sequence
  GFR-binding peptide
  MOD_RES (2), (4), (36), (37): Xaa is C or S
RXGXSEVTMDPYVKLVVNNASDFFLISLSSLREPVXXTPPTS

SEQ ID NO: 1206 - protein, 42 aa, Artificial Sequence
  GFR-binding peptide
  MOD_RES (2), (4), (36), (37): Xaa is C or S
HXGXSEVTMNPYVKLIVNSSDDFFLISLSSLKEPVXXPKPVH

SEQ ID NO: 1207 - protein, 41 aa, Artificial Sequence
  GFR-binding peptide
  MOD_RES (2), (4), (35), (36): Xaa is C or S
LXGXEVTIMPYVKLLLVRGNDFFLISLSSTKEPVXXTSPVR

SEQ ID NO: 1208 - protein, 41 aa, Artificial Sequence
  GFR-binding peptide
  MOD_RES (2), (4), (35), (36): Xaa is C or S
SXKXEVTIMPYVKLVKPKRGVFFLISLSSLAEPVXXPAASA

SEQ ID NO: 1209 - protein, 41 aa, Artificial Sequence
  GFR-binding peptide
  MOD_RES (2), (4), (35), (36): Xaa is C or S
SXKXEVTIMPYVKLIKPTKGIFFLISLSSLDEPVXXPSASA

SEQ ID NO: 1210 - protein, 41 aa, Artificial Sequence
  GFR-binding peptide
  MOD_RES (2), (4), (35), (36): Xaa is C or S
SXKXEVTVMPYVKLVKPTRGVFFLISLSSLDEPVXXPSASA

SEQ ID NO: 1211 - protein, 42 aa, Artificial Sequence
  GFR-binding peptide
  MOD_RES (2), (4), (36), (37): Xaa is C or S
RXGXGEVVMDPYVKLVVKENEDFFLISLSSLETPVXXAKPIK

SEQ ID NO: 1212 - protein, 42 aa, Artificial Sequence
  GFR-binding peptide
  MOD_RES (2), (4), (36), (37): Xaa is C or S
RXGXGEVVMEPYVKLVVKDYEDFFLISLSSLETPVXXAKPIS

SEQ ID NO: 1213 - protein, 42 aa, Artificial Sequence
  GFR-binding peptide
  MOD_RES (2), (4), (36): Xaa is C or S
HXGXSRVVMNPYVKLIVNSSDDFFLISLSSLKTPAXTPKTVH

SEQ ID NO: 1214 - protein, 42 aa, Artificial Sequence
  GFR-binding peptide
  MOD_RES (2), (4), (36), (37): Xaa is C or S
HXGXSRVVMNPYVKLIVNSSDDFFLISLSSLKTPAXXPKPVY

SEQ ID NO: 1215 - protein, 42 aa, Artificial Sequence
  GFR-binding peptide
  MOD_RES (2), (4), (36), (37): Xaa is C or S
HXGXARVVMNPYVKLIVNSSDDFFLISLSSLQTPAXXPKPVT

SEQ ID NO: 1216 - protein, 42 aa, Artificial Sequence
  GFR-binding peptide
  MOD_RES (2), (4), (36), (37): Xaa is C or S
HXGXAKVVMNPYVKLIVNNSSDFFLISLSSLKTPAXXAKPVA

SEQ ID NO: 1217 - protein, 43 aa, Artificial Sequence
  GFR-binding peptide
  MOD_RES (2), (4), (37), (38): Xaa is C or S
RXGXEAVSMGEPYVKLTPVGMDDFFLISLSSLKTPVXXAKGVK

SEQ ID NO: 1218 - protein, 42 aa, Artificial Sequence
  GFR-binding peptide
  MOD_RES (2), (4), (36), (37): Xaa is C or S
RXGXESVAMGPYVKLYTVVGKDFFLISLSSLKTPVXXAKSAK

SEQ ID NO: 1219 - protein, 42 aa, Artificial Sequence
  GFR-binding peptide
  MOD_RES (2), (4), (36), (37): Xaa is C or S
SXGXRDVVMGPYVKLIIQQKDNFFLISLSSMKTPTXXPGASG

SEQ ID NO: 1220 - protein, 42 aa, Artificial Sequence
  GFR-binding peptide
  MOD_RES (2), (4), (36), (37): Xaa is C or S
RXGXAEVVMDPYVKLVVNNAADFFLISLSSLRAPVXXSAPAA

SEQ ID NO: 1221 - protein, 42 aa, Artificial Sequence
  GFR-binding peptide
  MOD_RES (2), (4), (36), (37): Xaa is C or S
RXGXSEVVMDPYVKLVVNNASDFFLISLSSLRTPVXXTPPTS

SEQ ID NO: 1222 - protein, 42 aa, Artificial Sequence
  GFR-binding peptide
  MOD_RES (2), (4), (36), (37): Xaa is C or S
HXGXSRVVMNPYVKLIVNSSDDFFLISLSSLKTPAXXPKPVH

SEQ ID NO: 1223 - protein, 41 aa, Artificial Sequence
  GFR-binding peptide
  MOD_RES (2), (4), (35), (36): Xaa is C or S
LXGXEEVIMPYVKLLLVRGNDFFLISLSSTKVPAXXTSPVR

SEQ ID NO: 1224 - protein, 41 aa, Artificial Sequence
  GFR-binding peptide
  MOD_RES (2), (4), (35), (36): Xaa is C or S
SXKXSRVIMPYVKLVKPKRGVFFLISLSSLAQPVXXPAASA

SEQ ID NO: 1225 - protein, 41 aa, Artificial Sequence
  GFR-binding peptide
  MOD_RES (2), (4), (35), (36): Xaa is C or S
SXKXSKVIMPYVKLIKPTKGIFFLISLSSLDQSVXXPSASA

SEQ ID NO: 1226 - protein, 41 aa, Artificial Sequence
  GFR-binding peptide
  MOD_RES (2), (4), (35), (36): Xaa is C or S
SXKXSKVVMPYVKLVKPTRGVFFLISLSSLDQPVXXPSASA

SEQ ID NO: 1227 - protein, 44 aa, Artificial Sequence
  GFR-binding peptide
  MOD_RES (2), (4), (38): Xaa is C or S
RXEXKNHQLFPYVKLHQGQHPKIRFFLISLSSEETPVXELGEDN

SEQ ID NO: 1228 - protein, 44 aa, Artificial Sequence
  GFR-binding peptide
  MOD_RES (2), (4), (38): Xaa is C or S
RXEXQSHEELPYVKLHQGQHPKIRFFLISLSSQGTPVXELGEDN

SEQ ID NO: 1229 - protein, 45 aa, Artificial Sequence
  GFR-binding peptide
  MOD_RES (2), (4), (41): Xaa is C or S
AXAXELHEELRPYVKLLKPKKRVYEFFLISLSSHHVRSPQXKVSS

SEQ ID NO: 1230 - protein, 45 aa, Artificial Sequence
  GFR-binding peptide
  MOD_RES (2), (4), (41): Xaa is C or S
EXKXALHDELTPYVKLFIPKKRVIEFFLISLSSLQVQTPRXQVNR

SEQ ID NO: 1231 - protein, 42 aa, Artificial Sequence
  GFR-binding peptide
  MOD_RES (2), (4), (36), (37): Xaa is C or S
RXGXGRVVMDRYKKLVVKENEDFYLVSIANLETPAXXAKPIK

SEQ ID NO: 1232 - protein, 42 aa, Artificial Sequence
  GFR-binding peptide
  MOD_RES (2), (4), (36), (37): Xaa is C or S
RXAXSRVVMNRYKKLVVNKNEDFYLVSIANMKTPAXXPEPIG

SEQ ID NO: 1233 - protein, 42 aa, Artificial Sequence
  GFR-binding peptide
  MOD_RES (2), (4), (36), (37): Xaa is C or S
RXGXGRVVMERYKKLVVKDYEDFYLVSIANLETPAXXAKPIS

SEQ ID NO: 1234 - protein, 42 aa, Artificial Sequence
  GFR-binding peptide
  MOD_RES (2), (4), (36), (37): Xaa is C or S
HXGXARVVMNRYKKLIVNNSSDFYLVSIANLKTPAXXAKPVA

SEQ ID NO: 1235 - protein, 43 aa, Artificial Sequence
  GFR-binding peptide
  MOD_RES (2), (4), (37), (38): Xaa is C or S
RXGXRVVSMGERYKKLTPVGMDDFYLVSIANLKTPAXXAKGVK

SEQ ID NO: 1236 - protein, 42 aa, Artificial Sequence
  GFR-binding peptide
  MOD_RES (2), (4), (36), (37): Xaa is C or S
RXGXERVVMGRYKKLYTVVGKDFYLVSIANLKTPAXXAKSAK

SEQ ID NO: 1237 - protein, 42 aa, Artificial Sequence
  GFR-binding peptide
  MOD_RES (2), (4), (36), (37): Xaa is C or S
SXGXRRVVMGRYKKLIIQQKDNFYLVSIANMKTPAXXPGASG

SEQ ID NO: 1238 - protein, 42 aa, Artificial Sequence
  GFR-binding peptide
  MOD_RES (2), (4), (36), (37): Xaa is C or S
RXGXARVVMDRYKKLVVNNAADFYLVSIANLRTPAXXSAPAA

SEQ ID NO: 1239 - protein, 42 aa, Artificial Sequence
  GFR-binding peptide
  MOD_RES (2), (4), (36), (37): Xaa is C or S
RXGXSRVVMDRYKKLVVNNASDFYLVSIANLRTPAXXTPPTS

SEQ ID NO: 1240 - protein, 41 aa, Artificial Sequence
  GFR-binding peptide
  MOD_RES (2), (4), (35), (36): Xaa is C or S
LXGXRVVIMRYKKLLLVRGNDFYLVSIANTKTPAXXTSPVR

SEQ ID NO: 1241 - protein, 41 aa, Artificial Sequence
  GFR-binding peptide
  MOD_RES (2), (4), (35), (36): Xaa is C or S
SXKXRVVIMRYKKLVKPKRGVFYLVSIANLATPAXXPAASA

SEQ ID NO: 1242 - protein, 41 aa, Artificial Sequence
  GFR-binding peptide
  MOD_RES (2), (4), (35), (36): Xaa is C or S
SXKXRVVIMRYKKLIKPTKGIFYLVSIANLDTPAXXPSASA

SEQ ID NO: 1243 - protein, 41 aa, Artificial Sequence
  GFR-binding peptide
  MOD_RES (2), (4), (35), (36): Xaa is C or S
SXKXRVVVMRYKKLVKPTRGVFYLVSIANLDTPAXXPSASA

SEQ ID NO: 1244 - protein, 42 aa, Artificial Sequence
  GFR-binding peptide
  MOD_RES (2), (4), (36), (37): Xaa is C or S
RXGXGEVVMDRYKKLVVKENEDFYLVSIANLETPVXXAKPIK

SEQ ID NO: 1245 - protein, 42 aa, Artificial Sequence
  GFR-binding peptide
  MOD_RES (2), (4), (36), (37): Xaa is C or S
RXAXSEVTMNRYKKLVVNKNEDFYLVSIANMKEPVXXPEPIG

SEQ ID NO: 1246 - protein, 42 aa, Artificial Sequence
  GFR-binding peptide
  MOD_RES (2), (4), (36), (37): Xaa is C or S
RXGXGEVVMERYKKLVVKDYEDFYLVSIANLETPVXXAKPIS

SEQ ID NO: 1247 - protein, 42 aa, Artificial Sequence
  GFR-binding peptide
  MOD_RES (2), (4), (36), (37): Xaa is C or S
HXGXAKVVMNRYKKLIVNNSSDFYLVSIANLKTPAXXAKPVA

SEQ ID NO: 1248 - protein, 43 aa, Artificial Sequence
  GFR-binding peptide
  MOD_RES (2), (4), (37), (38): Xaa is C or S
RXGXEAVSMGERYKKLTPVGMDDFYLVSIANLKTPVXXAKGVK

SEQ ID NO: 1249 - protein, 42 aa, Artificial Sequence
  GFR-binding peptide
  MOD_RES (2), (4), (36), (37): Xaa is C or S
RXGXESVAMGRYKKLYTVVGKDFYLVSIANLKTPVXXAKSAK

SEQ ID NO: 1250 - protein, 42 aa, Artificial Sequence
  GFR-binding peptide
  MOD_RES (2), (4), (36), (37): Xaa is C or S
SXGXRDVVMGRYKKLIIQQKDNFYLVSIANMKTPTXXPGASG

SEQ ID NO: 1251 - protein, 42 aa, Artificial Sequence
  GFR-binding peptide
  MOD_RES (2), (4), (36), (37): Xaa is C or S
RXGXAEVVMDRYKKLVVNNAADFYLVSIANLRAPVXXSAPAA

SEQ ID NO: 1252 - protein, 42 aa, Artificial Sequence
  GFR-binding peptide
  MOD_RES (2), (4), (36), (37): Xaa is C or S
RXGXSEVVMDRYKKLVVNNASDFYLVSIANLRTPVXXTPPTS

SEQ ID NO: 1253 - protein, 41 aa, Artificial Sequence
  GFR-binding peptide
  MOD_RES (2), (4), (35), (36): Xaa is C or S
LXGXEEVIMRYKKLLLVRGNDFYLVSIANTKVPAXXTSPVR

SEQ ID NO: 1254 - protein, 41 aa, Artificial Sequence
  GFR-binding peptide
  MOD_RES (2), (4), (35), (36): Xaa is C or S
SXKXSRVIMRYKKLVKPKRGVFYLVSIANLAQPVXXPAASA

SEQ ID NO: 1255 - protein, 41 aa, Artificial Sequence
  GFR-binding peptide
  MOD_RES (2), (4), (35), (36): Xaa is C or S
SXKXSKVIMRYKKLIKPTKGIFYLVSIANLDQSVXXPSASA

SEQ ID NO: 1256 - protein, 41 aa, Artificial Sequence
  GFR-binding peptide
  MOD_RES (2), (4), (35), (36): Xaa is C or S
SXKXSKVVMRYKKLVKPTRGVFYLVSIANLDQPVXXPSASA

SEQ ID NO: 1257 - protein, 44 aa, Artificial Sequence
  GFR-binding peptide
  MOD_RES (2), (4), (38): Xaa is C or S
RXEXKNHQLFRYKKLHQGQHPKIRFYLVSIANEETPVXELGEDN

SEQ ID NO: 1258 - protein, 44 aa, Artificial Sequence
  GFR-binding peptide
  MOD_RES (2), (4), (38): Xaa is C or S
RXEXQSHEELRYKKLHQGQHPKIRFYLVSIANQGTPVXELGEDN

SEQ ID NO: 1259 - protein, 45 aa, Artificial Sequence
  GFR-binding peptide
  MOD_RES (2), (4), (41): Xaa is C or S
AXAXELHEELRRYKKLLKPKKRVYEFYLVSIANHHVRSPQXKVSS

SEQ ID NO: 1260 - protein, 45 aa, Artificial Sequence
  GFR-binding peptide
  MOD_RES (2), (4), (41): Xaa is C or S
EXKXALHDELTRYKKLFIPKKRVIEFYLVSIANLQVQTPRXQVNR

SEQ ID NO: 1261 - protein, 42 aa, Artificial Sequence
  GFR-binding peptide
  MOD_RES (2), (4), (36), (37): Xaa is C or S
RXGXGKVVMDRHKRLVVKENEDYYLVSTASLETPAXXAKPIK

SEQ ID NO: 1262 - protein, 42 aa, Artificial Sequence
  GFR-binding peptide
  MOD_RES (2), (4), (36), (37): Xaa is C or S
RXAXSKVVMNRHKRLVVNKNEDYYLVSTASMKTPAXXPEPIG

SEQ ID NO: 1263 - protein, 42 aa, Artificial Sequence
  GFR-binding peptide
  MOD_RES (2), (4), (36), (37): Xaa is C or S
RXGXGKVVMERHKRLVVKDYEDYYLVSTASLETPAXXAKPIS

SEQ ID NO: 1264 - protein, 42 aa, Artificial Sequence
  GFR-binding peptide
  MOD_RES (2), (4), (36): Xaa is C or S
HXGXSKVVMNRHKRLIVNSSDDYYLVSTASLKTPAXTPKTVH

SEQ ID NO: 1265 - protein, 42 aa, Artificial Sequence
  GFR-binding peptide
  MOD_RES (2), (4), (36), (37): Xaa is C or S
HXGXSKVVMNRHKRLIVNSSDDYYLVSTASLKTPAXXPKPVY

SEQ ID NO: 1266 - protein, 42 aa, Artificial Sequence
  GFR-binding peptide
  MOD_RES (2), (4), (36), (37): Xaa is C or S
HXGXAKVVMNRHKRLIVNSSDDYYLVSTASLQTPAXXPKPVT

SEQ ID NO: 1267 - protein, 43 aa, Artificial Sequence
  GFR-binding peptide
  MOD_RES (2), (4), (37), (38): Xaa is C or S
RXGXKVVSMGERHKRLTPVGMDDYYLVSTASLKTPAXXAKGVK

SEQ ID NO: 1268 - protein, 42 aa, Artificial Sequence
  GFR-binding peptide
  MOD_RES (2), (4), (36), (37): Xaa is C or S
RXGXEKVVMGRHKRLYTVVGKDYYLVSTASLKTPAXXAKSAK

SEQ ID NO: 1269 - protein, 42 aa, Artificial Sequence
  GFR-binding peptide
  MOD_RES (2), (4), (36), (37): Xaa is C or S
SXGXRKVVMGRHKRLIIQQKDNYYLVSTASMKTPAXXPGASG

SEQ ID NO: 1270 - protein, 42 aa, Artificial Sequence
  GFR-binding peptide
  MOD_RES (2), (4), (36), (37): Xaa is C or S
RXGXAKVVMDRHKRLVVNNAADYYLVSTASLRTPAXXSAPAA

SEQ ID NO: 1271 - protein, 42 aa, Artificial Sequence
  GFR-binding peptide
  MOD_RES (2), (4), (36), (37): Xaa is C or S
RXGXSKVVMDRHKRLVVNNASDYYLVSTASLRTPAXXTPPTS

SEQ ID NO: 1272 - protein, 42 aa, Artificial Sequence
  GFR-binding peptide
  MOD_RES (2), (4), (36), (37): Xaa is C or S
HXGXSKVVMNRHKRLIVNSSDDYYLVSTASLKTPAXXPKPVH

SEQ ID NO: 1273 - protein, 41 aa, Artificial Sequence
  GFR-binding peptide
  MOD_RES (2), (4), (35), (36): Xaa is C or S
LXGXKVVIMRHKRLLLVRGNDYYLVSTASTKTPAXXTSPVR

SEQ ID NO: 1274 - protein, 41 aa, Artificial Sequence
  GFR-binding peptide
  MOD_RES (2), (4), (35), (36): Xaa is C or S
SXKXKVVIMRHKRLVKPKRGVYYLVSTASLATPAXXPAASA

SEQ ID NO: 1275 - protein, 41 aa, Artificial Sequence
  GFR-binding peptide
  MOD_RES (2), (4), (35), (36): Xaa is C or S
SXKXKVVIMRHKRLIKPTKGIYYLVSTASLDTPAXXPSASA

SEQ ID NO: 1276 - protein, 41 aa, Artificial Sequence
  GFR-binding peptide
  MOD_RES (2), (4), (35), (36): Xaa is C or S
SXKXKVVVMRHKRLVKPTRGVYYLVSTASLDTPAXXPSASA

SEQ ID NO: 1277 - protein, 42 aa, Artificial Sequence
  GFR-binding peptide
  MOD_RES (2), (4), (36), (37): Xaa is C or S
RXGXGEVVMDRHKRLVVKENEDYYLVSTASLETPVXXAKPIK

SEQ ID NO: 1278 - protein, 42 aa, Artificial Sequence
  GFR-binding peptide
  MOD_RES (2), (4), (36), (37): Xaa is C or S
RXAXSEVTMNRHKRLVVNKNEDYYLVSTASMKEPVXXPEPIG

SEQ ID NO: 1279 - protein, 42 aa, Artificial Sequence
  GFR-binding peptide
  MOD_RES (2), (4), (36), (37): Xaa is C or S
RXGXGEVVMERHKRLVVKDYEDYYLVSTASLETPVXXAKPIS

SEQ ID NO: 1280 - protein, 42 aa, Artificial Sequence
  GFR-binding peptide
  MOD_RES (2), (4), (36): Xaa is C or S
HXGXSRVVMNRHKRLIVNSSDDYYLVSTASLKTPAXTPKTVH

SEQ ID NO: 1281 - protein, 42 aa, Artificial Sequence
  GFR-binding peptide
  MOD_RES (2), (4), (36), (37): Xaa is C or S
HXGXSRVVMNRHKRLIVNSSDDYYLVSTASLKTPAXXPKPVY

SEQ ID NO: 1282 - protein, 42 aa, Artificial Sequence
  GFR-binding peptide
  MOD_RES (2), (4), (36), (37): Xaa is C or S
HXGXARVVMNRHKRLIVNSSDDYYLVSTASLQTPAXXPKPVT

SEQ ID NO: 1283 - protein, 43 aa, Artificial Sequence
  GFR-binding peptide
  MOD_RES (2), (4), (37), (38): Xaa is C or S
RXGXEAVSMGERHKRLTPVGMDDYYLVSTASLKTPVXXAKGVK

SEQ ID NO: 1284 - protein, 42 aa, Artificial Sequence
  GFR-binding peptide
  MOD_RES (2), (4), (36), (37): Xaa is C or S
RXGXESVAMGRHKRLYTVVGKDYYLVSTASLKTPVXXAKSAK

SEQ ID NO: 1285 - protein, 42 aa, Artificial Sequence
  GFR-binding peptide
  MOD_RES (2), (4), (36), (37): Xaa is C or S
SXGXRDVVMGRHKRLIIQQKDNYYLVSTASMKTPTXXPGASG

SEQ ID NO: 1286 - protein, 42 aa, Artificial Sequence
  GFR-binding peptide
  MOD_RES (2), (4), (36), (37): Xaa is C or S
RXGXAEVVMDRHKRLVVNNAADYYLVSTASLRAPVXXSAPAA

SEQ ID NO: 1287 - protein, 42 aa, Artificial Sequence
  GFR-binding peptide
  MOD_RES (2), (4), (36), (37): Xaa is C or S
RXGXSEVVMDRHKRLVVNNASDYYLVSTASLRTPVXXTPPTS

SEQ ID NO: 1288 - protein, 42 aa, Artificial Sequence
  GFR-binding peptide
  MOD_RES (2), (4), (36), (37): Xaa is C or S
HXGXSRVVMNRHKRLIVNSSDDYYLVSTASLKTPAXXPKPVH

SEQ ID NO: 1289 - protein, 41 aa, Artificial Sequence
  GFR-binding peptide
  MOD_RES (2), (4), (35), (36): Xaa is C or S
LXGXEEVIMRHKRLLLVRGNDYYLVSTASTKVPAXXTSPVR

SEQ ID NO: 1290 - protein, 41 aa, Artificial Sequence
  GFR-binding peptide
  MOD_RES (2), (4), (35), (36): Xaa is C or S
SXKXSRVIMRHKRLVKPKRGVYYLVSTASLAQPVXXPAASA

SEQ ID NO: 1291 - protein, 41 aa, Artificial Sequence
  GFR-binding peptide
  MOD_RES (2), (4), (35), (36): Xaa is C or S
SXKXSKVIMRHKRLIKPTKGIYYLVSTASLDQSVXXPSASA

SEQ ID NO: 1292 - protein, 41 aa, Artificial Sequence
  GFR-binding peptide
  MOD_RES (2), (4), (35), (36): Xaa is C or S
SXKXSKVVMRHKRLVKPTRGVYYLVSTASLDQPVXXPSASA

SEQ ID NO: 1293 - protein, 44 aa, Artificial Sequence
  GFR-binding peptide
  MOD_RES (2), (4), (38): Xaa is C or S
RXEXKNHQLFRHKRLHQGQHPKIRYYLVSTASEETPVXELGEDN

SEQ ID NO: 1294 - protein, 44 aa, Artificial Sequence
  GFR-binding peptide
  MOD_RES (2), (4), (38): Xaa is C or S
RXEXQSHEELRHKRLHQGQHPKIRYYLVSTASQGTPVXELGEDN

SEQ ID NO: 1295 - protein, 45 aa, Artificial Sequence
  GFR-binding peptide
  MOD_RES (2), (4), (41): Xaa is C or S
AXAXELHEELRRHKRLLKPKKRVYEYYLVSTASHHVRSPQXKVSS

SEQ ID NO: 1296 - protein, 45 aa, Artificial Sequence
  GFR-binding peptide
  MOD_RES (2), (4), (41): Xaa is C or S
EXKXALHDELTRHKRLFIPKKRVIEYYLVSTASLQVQTPRXQVNR

SEQ ID NO: 1297 - protein, 42 aa, Artificial Sequence
  GFR-binding peptide
  MOD_RES (2), (4), (36), (37): Xaa is C or S
RXGXGEAVMDYHYKLVVKENEDKYLVSIPSLETPVXXAKPIK

SEQ ID NO: 1298 - protein, 42 aa, Artificial Sequence
  GFR-binding peptide
  MOD_RES (2), (4), (36), (37): Xaa is C or S
RXAXSEAVMNYHYKLVVNKNEDKYLVSIPSMKTPVXXPEPIG

SEQ ID NO: 1299 - protein, 42 aa, Artificial Sequence
  GFR-binding peptide
  MOD_RES (2), (4), (36), (37): Xaa is C or S
RXGXGEAVMEYHYKLVVKDYEDKYLVSIPSLETPVXXAKPIS

SEQ ID NO: 1300 - protein, 42 aa, Artificial Sequence
  GFR-binding peptide
  MOD_RES (2), (4), (36): Xaa is C or S
HXGXSEAVMNYHYKLIVNSSDDKYLVSIPSLKTPVXTPKTVH

SEQ ID NO: 1301 - protein, 42 aa, Artificial Sequence
  GFR-binding peptide
  MOD_RES (2), (4), (36), (37): Xaa is C or S
HXGXSEAVMNYHYKLIVNSSDDKYLVSIPSLKTPVXXPKPVY

SEQ ID NO: 1302 - protein, 42 aa, Artificial Sequence
  GFR-binding peptide
  MOD_RES (2), (4), (36), (37): Xaa is C or S
HXGXAEAVMNYHYKLIVNSSDDKYLVSIPSLQTPVXXPKPVT

SEQ ID NO: 1303 - protein, 42 aa, Artificial Sequence
  GFR-binding peptide
  MOD_RES (2), (4), (36), (37): Xaa is C or S
HXGXAEAVMNYHYKLIVNNSSDKYLVSIPSLKTPVXXAKPVA

SEQ ID NO: 1304 - protein, 42 aa, Artificial Sequence
  GFR-binding peptide
  MOD_RES (2), (4), (36), (37): Xaa is C or S
RXGXEEAVMGYHYKLYTVVGKDKYLVSIPSLKTPVXXAKSAK

SEQ ID NO: 1305 - protein, 42 aa, Artificial Sequence
  GFR-binding peptide
  MOD_RES (2), (4), (36), (37): Xaa is C or S
SXGXREAVMGYHYKLIIQQKDNKYLVSIPSMKTPVXXPGASG

SEQ ID NO: 1306 - protein, 42 aa, Artificial Sequence
  GFR-binding peptide
  MOD_RES (2), (4), (36), (37): Xaa is C or S
RXGXAEAVMDYHYKLVVNNAADKYLVSIPSLRTPVXXSAPAA

SEQ ID NO: 1307 - protein, 42 aa, Artificial Sequence
  GFR-binding peptide
  MOD_RES (2), (4), (36), (37): Xaa is C or S
RXGXSEAVMDYHYKLVVNNASDKYLVSIPSLRTPVXXTPPTS

SEQ ID NO: 1308 - protein, 42 aa, Artificial Sequence
  GFR-binding peptide
  MOD_RES (2), (4), (36), (37): Xaa is C or S
HXGXSEAVMNYHYKLIVNSSDDKYLVSIPSLKTPVXXPKPVH

SEQ ID NO: 1309 - protein, 41 aa, Artificial Sequence
  GFR-binding peptide
  MOD_RES (2), (4), (35), (36): Xaa is C or S
LXGXEAVIMYHYKLLLVRGNDKYLVSIPSTKTPVXXTSPVR

SEQ ID NO: 1310 - protein, 41 aa, Artificial Sequence
  GFR-binding peptide
  MOD_RES (2), (4), (35), (36): Xaa is C or S
SXKXEAVIMYHYKLVKPKRGVKYLVSIPSLATPVXXPAASA

SEQ ID NO: 1311 - protein, 41 aa, Artificial Sequence
  GFR-binding peptide
  MOD_RES (2), (4), (35), (36): Xaa is C or S
SXKXEAVIMYHYKLIKPTKGIKYLVSIPSLDTPVXXPSASA

SEQ ID NO: 1312 - protein, 41 aa, Artificial Sequence
  GFR-binding peptide
  MOD_RES (2), (4), (35), (36): Xaa is C or S
SXKXEAVVMYHYKLVKPTRGVKYLVSIPSLDTPVXXPSASA

SEQ ID NO: 1313 - protein, 42 aa, Artificial Sequence
  GFR-binding peptide
  MOD_RES (2), (4), (36), (37): Xaa is C or S
RXGXGEVVMDYHYKLVVKENEDKYLVSIPSLETPVXXAKPIK

SEQ ID NO: 1314 - protein, 42 aa, Artificial Sequence
  GFR-binding peptide
  MOD_RES (2), (4), (36), (37): Xaa is C or S
RXAXSEVTMNYHYKLVVNKNEDKYLVSIPSMKEPVXXPEPIG

SEQ ID NO: 1315 - protein, 42 aa, Artificial Sequence
  GFR-binding peptide
  MOD_RES (2), (4), (36), (37): Xaa is C or S
RXGXGEVVMEYHYKLVVKDYEDKYLVSIPSLETPVXXAKPIS

SEQ ID NO: 1316 - protein, 42 aa, Artificial Sequence
  GFR-binding peptide
  MOD_RES (2), (4), (36): Xaa is C or S
HXGXSRVVMNYHYKLIVNSSDDKYLVSIPSLKTPAXTPKTVH

SEQ ID NO: 1317 - protein, 42 aa, Artificial Sequence
  GFR-binding peptide
  MOD_RES (2), (4), (36), (37): Xaa is C or S
HXGXSRVVMNYHYKLIVNSSDDKYLVSIPSLKTPAXXPKPVY

SEQ ID NO: 1318 - protein, 42 aa, Artificial Sequence
  GFR-binding peptide
  MOD_RES (2), (4), (36), (37): Xaa is C or S
HXGXARVVMNYHYKLIVNSSDDKYLVSIPSLQTPAXXPKPVT

SEQ ID NO: 1319 - protein, 42 aa, Artificial Sequence
  GFR-binding peptide
  MOD_RES (2), (4), (36), (37): Xaa is C or S
HXGXAKVVMNYHYKLIVNNSSDKYLVSIPSLKTPAXXAKPVA

SEQ ID NO: 1320 - protein, 42 aa, Artificial Sequence
  GFR-binding peptide
  MOD_RES (2), (4), (36), (37): Xaa is C or S
RXGXESVAMGYHYKLYTVVGKDKYLVSIPSLKTPVXXAKSAK

SEQ ID NO: 1321 - protein, 42 aa, Artificial Sequence
  GFR-binding peptide
  MOD_RES (2), (4), (36), (37): Xaa is C or S
SXGXRDVVMGYHYKLIIQQKDNKYLVSIPSMKTPTXXPGASG

SEQ ID NO: 1322 - protein, 42 aa, Artificial Sequence
  GFR-binding peptide
  MOD_RES (2), (4), (36), (37): Xaa is C or S
RXGXAEVVMDYHYKLVVNNAADKYLVSIPSLRAPVXXSAPAA

SEQ ID NO: 1323 - protein, 42 aa, Artificial Sequence
  GFR-binding peptide
  MOD_RES (2), (4), (36), (37): Xaa is C or S
RXGXSEVVMDYHYKLVVNNASDKYLVSIPSLRTPVXXTPPTS

SEQ ID NO: 1324 - protein, 42 aa, Artificial Sequence
  GFR-binding peptide
  MOD_RES (2), (4), (36), (37): Xaa is C or S
HXGXSRVVMNYHYKLIVNSSDDKYLVSIPSLKTPAXXPKPVH

SEQ ID NO: 1325 - protein, 41 aa, Artificial Sequence
  GFR-binding peptide
  MOD_RES (2), (4), (35), (36): Xaa is C or S
LXGXEEVIMYHYKLLLVRGNDKYLVSIPSTKVPAXXTSPVR

SEQ ID NO: 1326 - protein, 41 aa, Artificial Sequence
  GFR-binding peptide
  MOD_RES (2), (4), (35), (36): Xaa is C or S
SXKXSRVIMYHYKLVKPKRGVKYLVSIPSLAQPVXXPAASA

SEQ ID NO: 1327 - protein, 41 aa, Artificial Sequence
  GFR-binding peptide
  MOD_RES (2), (4), (35), (36): Xaa is C or S
SXKXSKVIMYHYKLIKPTKGIKYLVSIPSLDQSVXXPSASA

SEQ ID NO: 1328 - protein, 41 aa, Artificial Sequence
  GFR-binding peptide
  MOD_RES (2), (4), (35), (36): Xaa is C or S
SXKXSKVVMYHYKLVKPTRGVKYLVSIPSLDQPVXXPSASA

SEQ ID NO: 1329 - protein, 44 aa, Artificial Sequence
  GFR-binding peptide
  MOD_RES (2), (4), (38): Xaa is C or S
RXEXKNHQLFYHYKLHQGQHPKIRKYLVSIPSEETPVXELGEDN

SEQ ID NO: 1330 - protein, 44 aa, Artificial Sequence
  GFR-binding peptide
  MOD_RES (2), (4), (38): Xaa is C or S
RXEXQSHEELYHYKLHQGQHPKIRKYLVSIPSQGTPVXELGEDN

SEQ ID NO: 1331 - protein, 45 aa, Artificial Sequence
  GFR-binding peptide
  MOD_RES (2), (4), (41): Xaa is C or S
AXAXELHEELRYHYKLLKPKKRVYEKYLVSIPSHHVRSPQXKVSS

SEQ ID NO: 1332 - protein, 45 aa, Artificial Sequence
  GFR-binding peptide
  MOD_RES (2), (4), (41): Xaa is C or S
EXKXALHDELTYHYKLFIPKKRVIEKYLVSIPSLQVQTPRXQVNR

SEQ ID NO: 1333 - protein, 42 aa, Artificial Sequence
  GFR-binding peptide
  MOD_RES (2), (4), (36), (37): Xaa is C or S
RXGXGSVAMDEYKFKVVKENEDLYLISIPELETPVXXAKPIK

SEQ ID NO: 1334 - protein, 42 aa, Artificial Sequence
  GFR-binding peptide
  MOD_RES (2), (4), (36), (37): Xaa is C or S
RXAXSSVAMNEYKFKVVNKNEDLYLISIPEMKTPVXXPEPIG

SEQ ID NO: 1335 - protein, 42 aa, Artificial Sequence
  GFR-binding peptide
  MOD_RES (2), (4), (36), (37): Xaa is C or S
RXGXGSVAMEEYKFKVVKDYEDLYLISIPELETPVXXAKPIS

SEQ ID NO: 1336 - protein, 42 aa, Artificial Sequence
  GFR-binding peptide
  MOD_RES (2), (4), (36): Xaa is C or S
HXGXSSVAMNEYKFKIVNSSDDLYLISIPELKTPVXTPKTVH

SEQ ID NO: 1337 - protein, 42 aa, Artificial Sequence
  GFR-binding peptide
  MOD_RES (2), (4), (36), (37): Xaa is C or S
HXGXSSVAMNEYKFKIVNSSDDLYLISIPELKTPVXXPKPVY

SEQ ID NO: 1338 - protein, 42 aa, Artificial Sequence
  GFR-binding peptide
  MOD_RES (2), (4), (36), (37): Xaa is C or S
HXGXASVAMNEYKFKIVNSSDDLYLISIPELQTPVXXPKPVT

SEQ ID NO: 1339 - protein, 42 aa, Artificial Sequence
  GFR-binding peptide
  MOD_RES (2), (4), (36), (37): Xaa is C or S
HXGXASVAMNEYKFKIVNNSSDLYLISIPELKTPVXXAKPVA

SEQ ID NO: 1340 - protein, 43 aa, Artificial Sequence
  GFR-binding peptide
  MOD_RES (2), (4), (37), (38): Xaa is C or S
RXGXSVASMGEEYKFKTPVGMDDLYLISIPELKTPVXXAKGVK

SEQ ID NO: 1341 - protein, 42 aa, Artificial Sequence
  GFR-binding peptide
  MOD_RES (2), (4), (36), (37): Xaa is C or S
SXGXRSVAMGEYKFKIIQQKDNLYLISIPEMKTPVXXPGASG

SEQ ID NO: 1342 - protein, 42 aa, Artificial Sequence
  GFR-binding peptide
  MOD_RES (2), (4), (36), (37): Xaa is C or S
RXGXASVAMDEYKFKVVNNAADLYLISIPELRTPVXXSAPAA

SEQ ID NO: 1343 - protein, 42 aa, Artificial Sequence
  GFR-binding peptide
  MOD_RES (2), (4), (36), (37): Xaa is C or S
RXGXSSVAMDEYKFKVVNNASDLYLISIPELRTPVXXTPPTS

SEQ ID NO: 1344 - protein, 42 aa, Artificial Sequence
  GFR-binding peptide
  MOD_RES (2), (4), (36), (37): Xaa is C or S
HXGXSSVAMNEYKFKIVNSSDDLYLISIPELKTPVXXPKPVH

SEQ ID NO: 1345 - protein, 41 aa, Artificial Sequence
  GFR-binding peptide
  MOD_RES (2), (4), (35), (36): Xaa is C or S
LXGXSVAIMEYKFKLLVRGNDLYLISIPETKTPVXXTSPVR

SEQ ID NO: 1346 - protein, 41 aa, Artificial Sequence
  GFR-binding peptide
  MOD_RES (2), (4), (35), (36): Xaa is C or S
SXKXSVAIMEYKFKVKPKRGVLYLISIPELATPVXXPAASA

SEQ ID NO: 1347 - protein, 41 aa, Artificial Sequence
  GFR-binding peptide
  MOD_RES (2), (4), (35), (36): Xaa is C or S
SXKXSVAIMEYKFKIKPTKGILYLISIPELDTPVXXPSASA

SEQ ID NO: 1348 - protein, 41 aa, Artificial Sequence
  GFR-binding peptide
  MOD_RES (2), (4), (35), (36): Xaa is C or S
SXKXSVAVMEYKFKVKPTRGVLYLISIPELDTPVXXPSASA

SEQ ID NO: 1349 - protein, 42 aa, Artificial Sequence
  GFR-binding peptide
  MOD_RES (2), (4), (36), (37): Xaa is C or S
RXGXGEVVMDEYKFKVVKENEDLYLISIPELETPVXXAKPIK

SEQ ID NO: 1350 - protein, 42 aa, Artificial Sequence
  GFR-binding peptide
  MOD_RES (2), (4), (36), (37): Xaa is C or S
RXAXSEVTMNEYKFKVVNKNEDLYLISIPEMKEPVXXPEPIG

SEQ ID NO: 1351 - protein, 42 aa, Artificial Sequence
  GFR-binding peptide
  MOD_RES (2), (4), (36), (37): Xaa is C or S
RXGXGEVVMEEYKFKVVKDYEDLYLISIPELETPVXXAKPIS

SEQ ID NO: 1352 - protein, 42 aa, Artificial Sequence
  GFR-binding peptide
  MOD_RES (2), (4), (36): Xaa is C or S
HXGXSRVVMNEYKFKIVNSSDDLYLISIPELKTPAXTPKTVH

SEQ ID NO: 1353 - protein, 42 aa, Artificial Sequence
  GFR-binding peptide
  MOD_RES (2), (4), (36), (37): Xaa is C or S
HXGXSRVVMNEYKFKIVNSSDDLYLISIPELKTPAXXPKPVY

SEQ ID NO: 1354 - protein, 42 aa, Artificial Sequence
  GFR-binding peptide
  MOD_RES (2), (4), (36), (37): Xaa is C or S
HXGXARVVMNEYKFKIVNSSDDLYLISIPELQTPAXXPKPVT

SEQ ID NO: 1355 - protein, 42 aa, Artificial Sequence
  GFR-binding peptide
  MOD_RES (2), (4), (36), (37): Xaa is C or S
HXGXAKVVMNEYKFKIVNNSSDLYLISIPELKTPAXXAKPVA

SEQ ID NO: 1356 - protein, 43 aa, Artificial Sequence
  GFR-binding peptide
  MOD_RES (2), (4), (37), (38): Xaa is C or S
RXGXEAVSMGEEYKFKTPVGMDDLYLISIPELKTPVXXAKGVK

SEQ ID NO: 1357 - protein, 42 aa, Artificial Sequence
  GFR-binding peptide
  MOD_RES (2), (4), (36), (37): Xaa is C or S
SXGXRDVVMGEYKFKIIQQKDNLYLISIPEMKTPTXXPGASG

SEQ ID NO: 1358 - protein, 42 aa, Artificial Sequence
  GFR-binding peptide
  MOD_RES (2), (4), (36), (37): Xaa is C or S
RXGXAEVVMDEYKFKVVNNAADLYLISIPELRAPVXXSAPAA

SEQ ID NO: 1359 - protein, 42 aa, Artificial Sequence
  GFR-binding peptide
  MOD_RES (2), (4), (36), (37): Xaa is C or S
RXGXSEVVMDEYKFKVVNNASDLYLISIPELRTPVXXTPPTS

SEQ ID NO: 1360 - protein, 42 aa, Artificial Sequence
  GFR-binding peptide
  MOD_RES (2), (4), (36), (37): Xaa is C or S
HXGXSRVVMNEYKFKIVNSSDDLYLISIPELKTPAXXPKPVH

SEQ ID NO: 1361 - protein, 41 aa, Artificial Sequence
  GFR-binding peptide
  MOD_RES (2), (4), (35), (36): Xaa is C or S
LXGXEEVIMEYKFKLLVRGNDLYLISIPETKVPAXXTSPVR

SEQ ID NO: 1362 - protein, 41 aa, Artificial Sequence
  GFR-binding peptide
  MOD_RES (2), (4), (35), (36): Xaa is C or S
SXKXSRVIMEYKFKVKPKRGVLYLISIPELAQPVXXPAASA

SEQ ID NO: 1363 - protein, 41 aa, Artificial Sequence
  GFR-binding peptide
  MOD_RES (2), (4), (35), (36): Xaa is C or S
SXKXSKVIMEYKFKIKPTKGILYLISIPELDQSVXXPSASA

SEQ ID NO: 1364 - protein, 41 aa, Artificial Sequence
  GFR-binding peptide
  MOD_RES (2), (4), (35), (36): Xaa is C or S
SXKXSKVVMEYKFKVKPTRGVLYLISIPELDQPVXXPSASA

SEQ ID NO: 1365 - protein, 44 aa, Artificial Sequence
  GFR-binding peptide
  MOD_RES (2), (4), (38): Xaa is C or S
RXEXKNHQLFEYKFKHQGQHPKIRLYLISIPEEETPVXELGEDN

SEQ ID NO: 1366 - protein, 44 aa, Artificial Sequence
  GFR-binding peptide
  MOD_RES (2), (4), (38): Xaa is C or S
RXEXQSHEELEYKFKHQGQHPKIRLYLISIPEQGTPVXELGEDN

SEQ ID NO: 1367 - protein, 45 aa, Artificial Sequence
  GFR-binding peptide
  MOD_RES (2), (4), (41): Xaa is C or S
AXAXELHEELREYKFKLKPKKRVYELYLISIPEHHVRSPQXKVSS

SEQ ID NO: 1368 - protein, 45 aa, Artificial Sequence
  GFR-binding peptide
  MOD_RES (2), (4), (41): Xaa is C or S
EXKXALHDELTEYKFKFIPKKRVIELYLISIPELQVQTPRXQVNR

SEQ ID NO: 1369 - protein, 42 aa, Artificial Sequence
  GFR-binding peptide
  MOD_RES (2), (4), (36), (37): Xaa is C or S
RXGXGDVVMDPIKGYVVKENEDFYLMNIPSLETPTXXAKPIK

SEQ ID NO: 1370 - protein, 42 aa, Artificial Sequence
  GFR-binding peptide
  MOD_RES (2), (4), (36), (37): Xaa is C or S
RXAXSDVVMNPIKGYVVNKNEDFYLMNIPSMKTPTXXPEPIG

SEQ ID NO: 1371 - protein, 42 aa, Artificial Sequence
  GFR-binding peptide
  MOD_RES (2), (4), (36), (37): Xaa is C or S
RXGXGDVVMEPIKGYVVKDYEDFYLMNIPSLETPTXXAKPIS

SEQ ID NO: 1372 - protein, 42 aa, Artificial Sequence
  GFR-binding peptide
  MOD_RES (2), (4), (36): Xaa is C or S
HXGXSDVVMNPIKGYIVNSSDDFYLMNIPSLKTPTXTPKTVH

SEQ ID NO: 1373 - protein, 42 aa, Artificial Sequence
  GFR-binding peptide
  MOD_RES (2), (4), (36), (37): Xaa is C or S
HXGXSDVVMNPIKGYIVNSSDDFYLMNIPSLKTPTXXPKPVY

SEQ ID NO: 1374 - protein, 42 aa, Artificial Sequence
  GFR-binding peptide
  MOD_RES (2), (4), (36), (37): Xaa is C or S
HXGXADVVMNPIKGYIVNSSDDFYLMNIPSLQTPTXXPKPVT

SEQ ID NO: 1375 - protein, 42 aa, Artificial Sequence
  GFR-binding peptide
  MOD_RES (2), (4), (36), (37): Xaa is C or S
HXGXADVVMNPIKGYIVNNSSDFYLMNIPSLKTPTXXAKPVA

SEQ ID NO: 1376 - protein, 43 aa, Artificial Sequence
  GFR-binding peptide
  MOD_RES (2), (4), (37), (38): Xaa is C or S
RXGXDVVSMGEPIKGYTPVGMDDFYLMNIPSLKTPTXXAKGVK

SEQ ID NO: 1377 - protein, 42 aa, Artificial Sequence
  GFR-binding peptide
  MOD_RES (2), (4), (36), (37): Xaa is C or S
RXGXEDVVMGPIKGYYTVVGKDFYLMNIPSLKTPTXXAKSAK

SEQ ID NO: 1378 - protein, 42 aa, Artificial Sequence
  GFR-binding peptide
  MOD_RES (2), (4), (36), (37): Xaa is C or S
RXGXADVVMDPIKGYVVNNAADFYLMNIPSLRTPTXXSAPAA

SEQ ID NO: 1379 - protein, 42 aa, Artificial Sequence
  GFR-binding peptide
  MOD_RES (2), (4), (36), (37): Xaa is C or S
RXGXSDVVMDPIKGYVVNNASDFYLMNIPSLRTPTXXTPPTS

SEQ ID NO: 1380 - protein, 42 aa, Artificial Sequence
  GFR-binding peptide
  MOD_RES (2), (4), (36), (37): Xaa is C or S
HXGXSDVVMNPIKGYIVNSSDDFYLMNIPSLKTPTXXPKPVH

SEQ ID NO: 1381 - protein, 41 aa, Artificial Sequence
  GFR-binding peptide
  MOD_RES (2), (4), (35), (36): Xaa is C or S
LXGXDVVIMPIKGYLLVRGNDFYLMNIPSTKTPTXXTSPVR

SEQ ID NO: 1382 - protein, 41 aa, Artificial Sequence
  GFR-binding peptide
  MOD_RES (2), (4), (35), (36): Xaa is C or S
SXKXDVVIMPIKGYVKPKRGVFYLMNIPSLATPTXXPAASA

SEQ ID NO: 1383 - protein, 41 aa, Artificial Sequence
  GFR-binding peptide
  MOD_RES (2), (4), (35), (36): Xaa is C or S
SXKXDVVIMPIKGYIKPTKGIFYLMNIPSLDTPTXXPSASA

SEQ ID NO: 1384 - protein, 41 aa, Artificial Sequence
  GFR-binding peptide
  MOD_RES (2), (4), (35), (36): Xaa is C or S
SXKXDVVVMPIKGYVKPTRGVFYLMNIPSLDTPTXXPSASA

SEQ ID NO: 1385 - protein, 42 aa, Artificial Sequence
  GFR-binding peptide
  MOD_RES (2), (4), (36), (37): Xaa is C or S
RXGXGEVVMDPIKGYVVKENEDFYLMNIPSLETPVXXAKPIK

SEQ ID NO: 1386 - protein, 42 aa, Artificial Sequence
  GFR-binding peptide
  MOD_RES (2), (4), (36), (37): Xaa is C or S
RXAXSEVTMNPIKGYVVNKNEDFYLMNIPSMKEPVXXPEPIG

SEQ ID NO: 1387 - protein, 42 aa, Artificial Sequence
  GFR-binding peptide
  MOD_RES (2), (4), (36), (37): Xaa is C or S
RXGXGEVVMEPIKGYVVKDYEDFYLMNIPSLETPVXXAKPIS

SEQ ID NO: 1388 - protein, 42 aa, Artificial Sequence
  GFR-binding peptide
  MOD_RES (2), (4), (36): Xaa is C or S
HXGXSRVVMNPIKGYIVNSSDDFYLMNIPSLKTPAXTPKTVH

SEQ ID NO: 1389 - protein, 42 aa, Artificial Sequence
  GFR-binding peptide
  MOD_RES (2), (4), (36), (37): Xaa is C or S
HXGXSRVVMNPIKGYIVNSSDDFYLMNIPSLKTPAXXPKPVY

SEQ ID NO: 1390 - protein, 42 aa, Artificial Sequence
  GFR-binding peptide
  MOD_RES (2), (4), (36), (37): Xaa is C or S
HXGXARVVMNPIKGYIVNSSDDFYLMNIPSLQTPAXXPKPVT

SEQ ID NO: 1391 - protein, 42 aa, Artificial Sequence
  GFR-binding peptide
  MOD_RES (2), (4), (36), (37): Xaa is C or S
HXGXAKVVMNPIKGYIVNNSSDFYLMNIPSLKTPAXXAKPVA

SEQ ID NO: 1392 - protein, 43 aa, Artificial Sequence
  GFR-binding peptide
  MOD_RES (2), (4), (37), (38): Xaa is C or S
RXGXEAVSMGEPIKGYTPVGMDDFYLMNIPSLKTPVXXAKGVK

SEQ ID NO: 1393 - protein, 42 aa, Artificial Sequence
  GFR-binding peptide
  MOD_RES (2), (4), (36), (37): Xaa is C or S
RXGXESVAMGPIKGYYTVVGKDFYLMNIPSLKTPVXXAKSAK

SEQ ID NO: 1394 - protein, 42 aa, Artificial Sequence
  GFR-binding peptide
  MOD_RES (2), (4), (36), (37): Xaa is C or S
RXGXAEVVMDPIKGYVVNNAADFYLMNIPSLRAPVXXSAPAA

SEQ ID NO: 1395 - protein, 42 aa, Artificial Sequence
  GFR-binding peptide
  MOD_RES (2), (4), (36), (37): Xaa is C or S
RXGXSEVVMDPIKGYVVNNASDFYLMNIPSLRTPVXXTPPTS

SEQ ID NO: 1396 - protein, 42 aa, Artificial Sequence
  GFR-binding peptide
  MOD_RES (2), (4), (36), (37): Xaa is C or S
HXGXSRVVMNPIKGYIVNSSDDFYLMNIPSLKTPAXXPKPVH

SEQ ID NO: 1397 - protein, 41 aa, Artificial Sequence
  GFR-binding peptide
  MOD_RES (2), (4), (35), (36): Xaa is C or S
LXGXEEVIMPIKGYLLVRGNDFYLMNIPSTKVPAXXTSPVR

SEQ ID NO: 1398 - protein, 41 aa, Artificial Sequence
  GFR-binding peptide
  MOD_RES (2), (4), (35), (36): Xaa is C or S
SXKXSRVIMPIKGYVKPKRGVFYLMNIPSLAQPVXXPAASA

SEQ ID NO: 1399 - protein, 41 aa, Artificial Sequence
  GFR-binding peptide
  MOD_RES (2), (4), (35), (36): Xaa is C or S
SXKXSKVIMPIKGYIKPTKGIFYLMNIPSLDQSVXXPSASA

SEQ ID NO: 1400 - protein, 41 aa, Artificial Sequence
  GFR-binding peptide
  MOD_RES (2), (4), (35), (36): Xaa is C or S
SXKXSKVVMPIKGYVKPTRGVFYLMNIPSLDQPVXXPSASA

SEQ ID NO: 1401 - protein, 44 aa, Artificial Sequence
  GFR-binding peptide
  MOD_RES (2), (4), (38): Xaa is C or S
RXEXKNHQLFPIKGYHQGQHPKIRFYLMNIPSEETPVXELGEDN

SEQ ID NO: 1402 - protein, 44 aa, Artificial Sequence
  GFR-binding peptide
  MOD_RES (2), (4), (38): Xaa is C or S
RXEXQSHEELPIKGYHQGQHPKIRFYLMNIPSQGTPVXELGEDN

SEQ ID NO: 1403 - protein, 45 aa, Artificial Sequence
  GFR-binding peptide
  MOD_RES (2), (4), (41): Xaa is C or S
AXAXELHEELRPIKGYLKPKKRVYEFYLMNIPSHHVRSPQXKVSS

SEQ ID NO: 1404 - protein, 45 aa, Artificial Sequence
  GFR-binding peptide
  MOD_RES (2), (4), (41): Xaa is C or S
EXKXALHDELTPIKGYFIPKKRVIEFYLMNIPSLQVQTPRXQVNR

SEQ ID NO: 1405 - protein, 42 aa, Artificial Sequence
  GFR-binding peptide
  MOD_RES (2), (4), (36), (37): Xaa is C or S
RXGXGEVVMDEYQKYVVKENEDIYLISIPSLEAPVXXAKPIK

SEQ ID NO: 1406 - protein, 42 aa, Artificial Sequence
  GFR-binding peptide
  MOD_RES (2), (4), (36), (37): Xaa is C or S
RXAXSEVVMNEYQKYVVNKNEDIYLISIPSMKAPVXXPEPIG

SEQ ID NO: 1407 - protein, 42 aa, Artificial Sequence
  GFR-binding peptide
  MOD_RES (2), (4), (36), (37): Xaa is C or S
RXGXGEVVMEEYQKYVVKDYEDIYLISIPSLEAPVXXAKPIS

SEQ ID NO: 1408 - protein, 42 aa, Artificial Sequence
  GFR-binding peptide
  MOD_RES (2), (4), (36): Xaa is C or S
HXGXSEVVMNEYQKYIVNSSDDIYLISIPSLKAPVXTPKTVH

SEQ ID NO: 1409 - protein, 42 aa, Artificial Sequence
  GFR-binding peptide
  MOD_RES (2), (4), (36), (37): Xaa is C or S
HXGXSEVVMNEYQKYIVNSSDDIYLISIPSLKAPVXXPKPVY

SEQ ID NO: 1410 - protein, 42 aa, Artificial Sequence
  GFR-binding peptide
  MOD_RES (2), (4), (36), (37): Xaa is C or S
HXGXAEVVMNEYQKYIVNSSDDIYLISIPSLQAPVXXPKPVT

SEQ ID NO: 1411 - protein, 42 aa, Artificial Sequence
  GFR-binding peptide
  MOD_RES (2), (4), (36), (37): Xaa is C or S
HXGXAEVVMNEYQKYIVNNSSDIYLISIPSLKAPVXXAKPVA

SEQ ID NO: 1412 - protein, 43 aa, Artificial Sequence
  GFR-binding peptide
  MOD_RES (2), (4), (37), (38): Xaa is C or S
RXGXEVVSMGEEYQKYTPVGMDDIYLISIPSLKAPVXXAKGVK

SEQ ID NO: 1413 - protein, 42 aa, Artificial Sequence
  GFR-binding peptide
  MOD_RES (2), (4), (36), (37): Xaa is C or S
RXGXEEVVMGEYQKYYTVVGKDIYLISIPSLKAPVXXAKSAK

SEQ ID NO: 1414 - protein, 42 aa, Artificial Sequence
  GFR-binding peptide
  MOD_RES (2), (4), (36), (37): Xaa is C or S
SXGXREVVMGEYQKYIIQQKDNIYLISIPSMKAPVXXPGASG

SEQ ID NO: 1415 - protein, 42 aa, Artificial Sequence
  GFR-binding peptide
  MOD_RES (2), (4), (36), (37): Xaa is C or S
RXGXSEVVMDEYQKYVVNNASDIYLISIPSLRAPVXXTPPTS

SEQ ID NO: 1416 - protein, 42 aa, Artificial Sequence
  GFR-binding peptide
  MOD_RES (2), (4), (36), (37): Xaa is C or S
HXGXSEVVMNEYQKYIVNSSDDIYLISIPSLKAPVXXPKPVH

SEQ ID NO: 1417 - protein, 41 aa, Artificial Sequence
  GFR-binding peptide
  MOD_RES (2), (4), (35), (36): Xaa is C or S
LXGXEVVIMEYQKYLLVRGNDIYLISIPSTKAPVXXTSPVR

SEQ ID NO: 1418 - protein, 41 aa, Artificial Sequence
  GFR-binding peptide
  MOD_RES (2), (4), (35), (36): Xaa is C or S
SXKXEVVIMEYQKYVKPKRGVIYLISIPSLAAPVXXPAASA

SEQ ID NO: 1419 - protein, 41 aa, Artificial Sequence
  GFR-binding peptide
  MOD_RES (2), (4), (35), (36): Xaa is C or S
SXKXEVVIMEYQKYIKPTKGIIYLISIPSLDAPVXXPSASA

SEQ ID NO: 1420 - protein, 41 aa, Artificial Sequence
  GFR-binding peptide
  MOD_RES (2), (4), (35), (36): Xaa is C or S
SXKXEVVVMEYQKYVKPTRGVIYLISIPSLDAPVXXPSASA

SEQ ID NO: 1421 - protein, 42 aa, Artificial Sequence
  GFR-binding peptide
  MOD_RES (2), (4), (36), (37): Xaa is C or S
RXGXGEVVMDEYQKYVVKENEDIYLISIPSLETPVXXAKPIK

SEQ ID NO: 1422 - protein, 42 aa, Artificial Sequence
  GFR-binding peptide
  MOD_RES (2), (4), (36), (37): Xaa is C or S
RXAXSEVTMNEYQKYVVNKNEDIYLISIPSMKEPVXXPEPIG

SEQ ID NO: 1423 - protein, 42 aa, Artificial Sequence
  GFR-binding peptide
  MOD_RES (2), (4), (36), (37): Xaa is C or S
RXGXGEVVMEEYQKYVVKDYEDIYLISIPSLETPVXXAKPIS

SEQ ID NO: 1424 - protein, 42 aa, Artificial Sequence
  GFR-binding peptide
  MOD_RES (2), (4), (36): Xaa is C or S
HXGXSRVVMNEYQKYIVNSSDDIYLISIPSLKTPAXTPKTVH

SEQ ID NO: 1425 - protein, 42 aa, Artificial Sequence
  GFR-binding peptide
  MOD_RES (2), (4), (36), (37): Xaa is C or S
HXGXSRVVMNEYQKYIVNSSDDIYLISIPSLKTPAXXPKPVY

SEQ ID NO: 1426 - protein, 42 aa, Artificial Sequence
  GFR-binding peptide
  MOD_RES (2), (4), (36), (37): Xaa is C or S
HXGXARVVMNEYQKYIVNSSDDIYLISIPSLQTPAXXPKPVT

SEQ ID NO: 1427 - protein, 42 aa, Artificial Sequence
  GFR-binding peptide
  MOD_RES (2), (4), (36), (37): Xaa is C or S
HXGXAKVVMNEYQKYIVNNSSDIYLISIPSLKTPAXXAKPVA

SEQ ID NO: 1428 - protein, 43 aa, Artificial Sequence
  GFR-binding peptide
  MOD_RES (2), (4), (37), (38): Xaa is C or S
RXGXEAVSMGEEYQKYTPVGMDDIYLISIPSLKTPVXXAKGVK

SEQ ID NO: 1429 - protein, 42 aa, Artificial Sequence
  GFR-binding peptide
  MOD_RES (2), (4), (36), (37): Xaa is C or S
RXGXESVAMGEYQKYYTVVGKDIYLISIPSLKTPVXXAKSAK

SEQ ID NO: 1430 - protein, 42 aa, Artificial Sequence
  GFR-binding peptide
  MOD_RES (2), (4), (36), (37): Xaa is C or S
SXGXRDVVMGEYQKYIIQQKDNIYLISIPSMKTPTXXPGASG

SEQ ID NO: 1431 - protein, 42 aa, Artificial Sequence
  GFR-binding peptide
  MOD_RES (2), (4), (36), (37): Xaa is C or S
RXGXSEVVMDEYQKYVVNNASDIYLISIPSLRTPVXXTPPTS

SEQ ID NO: 1432 - protein, 42 aa, Artificial Sequence
  GFR-binding peptide
  MOD_RES (2), (4), (36), (37): Xaa is C or S
HXGXSRVVMNEYQKYIVNSSDDIYLISIPSLKTPAXXPKPVH

SEQ ID NO: 1433 - protein, 41 aa, Artificial Sequence
  GFR-binding peptide
  MOD_RES (2), (4), (35), (36): Xaa is C or S
LXGXEEVIMEYQKYLLVRGNDIYLISIPSTKVPAXXTSPVR

SEQ ID NO: 1434 - protein, 41 aa, Artificial Sequence
  GFR-binding peptide
  MOD_RES (2), (4), (35), (36): Xaa is C or S
SXKXSRVIMEYQKYVKPKRGVIYLISIPSLAQPVXXPAASA

SEQ ID NO: 1435 - protein, 41 aa, Artificial Sequence
  GFR-binding peptide
  MOD_RES (2), (4), (35), (36): Xaa is C or S
SXKXSKVIMEYQKYIKPTKGIIYLISIPSLDQSVXXPSASA

SEQ ID NO: 1436 - protein, 41 aa, Artificial Sequence
  GFR-binding peptide
  MOD_RES (2), (4), (35), (36): Xaa is C or S
SXKXSKVVMEYQKYVKPTRGVIYLISIPSLDQPVXXPSASA

SEQ ID NO: 1437 - protein, 44 aa, Artificial Sequence
  GFR-binding peptide
  MOD_RES (2), (4), (38): Xaa is C or S
RXEXKNHQLFEYQKYHQGQHPKIRIYLISIPSEETPVXELGEDN

SEQ ID NO: 1438 - protein, 44 aa, Artificial Sequence
  GFR-binding peptide
  MOD_RES (2), (4), (38): Xaa is C or S
RXEXQSHEELEYQKYHQGQHPKIRIYLISIPSQGTPVXELGEDN

SEQ ID NO: 1439 - protein, 45 aa, Artificial Sequence
  GFR-binding peptide
  MOD_RES (2), (4), (41): Xaa is C or S
AXAXELHEELREYQKYLKPKKRVYEIYLISIPSHHVRSPQXKVSS

SEQ ID NO: 1440 - protein, 45 aa, Artificial Sequence
  GFR-binding peptide
  MOD_RES (2), (4), (41): Xaa is C or S
EXKXALHDELTEYQKYFIPKKRVIEIYLISIPSLQVQTPRXQVNR

SEQ ID NO: 1441 - protein, 42 aa, Artificial Sequence
  GFR-binding peptide
  MOD_RES (2), (4), (36), (37): Xaa is C or S
RXGXGEVVMDEYQKYVVKENEDIFLISIPSLETPVXXAKPIK

SEQ ID NO: 1442 - protein, 42 aa, Artificial Sequence
  GFR-binding peptide
  MOD_RES (2), (4), (36), (37): Xaa is C or S
RXAXSEVVMNEYQKYVVNKNEDIFLISIPSMKTPVXXPEPIG

SEQ ID NO: 1443 - protein, 42 aa, Artificial Sequence
  GFR-binding peptide
  MOD_RES (2), (4), (36), (37): Xaa is C or S
RXGXGEVVMEEYQKYVVKDYEDIFLISIPSLETPVXXAKPIS

SEQ ID NO: 1444 - protein, 42 aa, Artificial Sequence
  GFR-binding peptide
  MOD_RES (2), (4), (36): Xaa is C or S
HXGXSEVVMNEYQKYIVNSSDDIFLISIPSLKTPVXTPKTVH

SEQ ID NO: 1445 - protein, 42 aa, Artificial Sequence
  GFR-binding peptide
  MOD_RES (2), (4), (36), (37): Xaa is C or S
HXGXSEVVMNEYQKYIVNSSDDIFLISIPSLKTPVXXPKPVY

SEQ ID NO: 1446 - protein, 42 aa, Artificial Sequence
  GFR-binding peptide
  MOD_RES (2), (4), (36), (37): Xaa is C or S
HXGXAEVVMNEYQKYIVNSSDDIFLISIPSLQTPVXXPKPVT

SEQ ID NO: 1447 - protein, 42 aa, Artificial Sequence
  GFR-binding peptide
  MOD_RES (2), (4), (36), (37): Xaa is C or S
HXGXAEVVMNEYQKYIVNNSSDIFLISIPSLKTPVXXAKPVA

SEQ ID NO: 1448 - protein, 43 aa, Artificial Sequence
  GFR-binding peptide
  MOD_RES (2), (4), (37), (38): Xaa is C or S
RXGXEVVSMGEEYQKYTPVGMDDIFLISIPSLKTPVXXAKGVK

SEQ ID NO: 1449 - protein, 42 aa, Artificial Sequence
  GFR-binding peptide
  MOD_RES (2), (4), (36), (37): Xaa is C or S
RXGXEEVVMGEYQKYYTVVGKDIFLISIPSLKTPVXXAKSAK

SEQ ID NO: 1450 - protein, 42 aa, Artificial Sequence
  GFR-binding peptide
  MOD_RES (2), (4), (36), (37): Xaa is C or S
SXGXREVVMGEYQKYIIQQKDNIFLISIPSMKTPVXXPGASG

SEQ ID NO: 1451 - protein, 42 aa, Artificial Sequence
  GFR-binding peptide
  MOD_RES (2), (4), (36), (37): Xaa is C or S
RXGXAEVVMDEYQKYVVNNAADIFLISIPSLRTPVXXSAPAA

SEQ ID NO: 1452 - protein, 42 aa, Artificial Sequence
  GFR-binding peptide
  MOD_RES (2), (4), (36), (37): Xaa is C or S
HXGXSEVVMNEYQKYIVNSSDDIFLISIPSLKTPVXXPKPVH

SEQ ID NO: 1453 - protein, 41 aa, Artificial Sequence
  GFR-binding peptide
  MOD_RES (2), (4), (35), (36): Xaa is C or S
LXGXEVVIMEYQKYLLVRGNDIFLISIPSTKTPVXXTSPVR

SEQ ID NO: 1454 - protein, 41 aa, Artificial Sequence
  GFR-binding peptide
  MOD_RES (2), (4), (35), (36): Xaa is C or S
SXKXEVVIMEYQKYVKPKRGVIFLISIPSLATPVXXPAASA

SEQ ID NO: 1455 - protein, 41 aa, Artificial Sequence
  GFR-binding peptide
  MOD_RES (2), (4), (35), (36): Xaa is C or S
SXKXEVVIMEYQKYIKPTKGIIFLISIPSLDTPVXXPSASA

SEQ ID NO: 1456 - protein, 41 aa, Artificial Sequence
  GFR-binding peptide
  MOD_RES (2), (4), (35), (36): Xaa is C or S
SXKXEVVVMEYQKYVKPTRGVIFLISIPSLDTPVXXPSASA

SEQ ID NO: 1457 - protein, 42 aa, Artificial Sequence
  GFR-binding peptide
  MOD_RES (2), (4), (36), (37): Xaa is C or S
RXAXSEVTMNEYQKYVVNKNEDIFLISIPSMKEPVXXPEPIG

SEQ ID NO: 1458 - protein, 42 aa, Artificial Sequence
  GFR-binding peptide
  MOD_RES (2), (4), (36): Xaa is C or S
HXGXSRVVMNEYQKYIVNSSDDIFLISIPSLKTPAXTPKTVH

SEQ ID NO: 1459 - protein, 42 aa, Artificial Sequence
  GFR-binding peptide
  MOD_RES (2), (4), (36), (37): Xaa is C or S
HXGXSRVVMNEYQKYIVNSSDDIFLISIPSLKTPAXXPKPVY

SEQ ID NO: 1460 - protein, 42 aa, Artificial Sequence
  GFR-binding peptide
  MOD_RES (2), (4), (36), (37): Xaa is C or S
HXGXARVVMNEYQKYIVNSSDDIFLISIPSLQTPAXXPKPVT

SEQ ID NO: 1461 - protein, 42 aa, Artificial Sequence
  GFR-binding peptide
  MOD_RES (2), (4), (36), (37): Xaa is C or S
HXGXAKVVMNEYQKYIVNNSSDIFLISIPSLKTPAXXAKPVA

SEQ ID NO: 1462 - protein, 43 aa, Artificial Sequence
  GFR-binding peptide
  MOD_RES (2), (4), (37), (38): Xaa is C or S
RXGXEAVSMGEEYQKYTPVGMDDIFLISIPSLKTPVXXAKGVK

SEQ ID NO: 1463 - protein, 42 aa, Artificial Sequence
  GFR-binding peptide
  MOD_RES (2), (4), (36), (37): Xaa is C or S
RXGXESVAMGEYQKYYTVVGKDIFLISIPSLKTPVXXAKSAK

SEQ ID NO: 1464 - protein, 42 aa, Artificial Sequence
  GFR-binding peptide
  MOD_RES (2), (4), (36), (37): Xaa is C or S
SXGXRDVVMGEYQKYIIQQKDNIFLISIPSMKTPTXXPGASG

SEQ ID NO: 1465 - protein, 42 aa, Artificial Sequence
  GFR-binding peptide
  MOD_RES (2), (4), (36), (37): Xaa is C or S
RXGXAEVVMDEYQKYVVNNAADIFLISIPSLRAPVXXSAPAA

SEQ ID NO: 1466 - protein, 42 aa, Artificial Sequence
  GFR-binding peptide
  MOD_RES (2), (4), (36), (37): Xaa is C or S
HXGXSRVVMNEYQKYIVNSSDDIFLISIPSLKTPAXXPKPVH

SEQ ID NO: 1467 - protein, 41 aa, Artificial Sequence
  GFR-binding peptide
  MOD_RES (2), (4), (35), (36): Xaa is C or S
LXGXEEVIMEYQKYLLVRGNDIFLISIPSTKVPAXXTSPVR

SEQ ID NO: 1468 - protein, 41 aa, Artificial Sequence
  GFR-binding peptide
  MOD_RES (2), (4), (35), (36): Xaa is C or S
SXKXSRVIMEYQKYVKPKRGVIFLISIPSLAQPVXXPAASA

SEQ ID NO: 1469 - protein, 41 aa, Artificial Sequence
  GFR-binding peptide
  MOD_RES (2), (4), (35), (36): Xaa is C or S
SXKXSKVIMEYQKYIKPTKGIIFLISIPSLDQSVXXPSASA

SEQ ID NO: 1470 - protein, 41 aa, Artificial Sequence
  GFR-binding peptide
  MOD_RES (2), (4), (35), (36): Xaa is C or S
SXKXSKVVMEYQKYVKPTRGVIFLISIPSLDQPVXXPSASA

SEQ ID NO: 1471 - protein, 44 aa, Artificial Sequence
  GFR-binding peptide
  MOD_RES (2), (4), (38): Xaa is C or S
RXEXKNHQLFEYQKYHQGQHPKIRIFLISIPSEETPVXELGEDN

SEQ ID NO: 1472 - protein, 44 aa, Artificial Sequence
  GFR-binding peptide
  MOD_RES (2), (4), (38): Xaa is C or S
RXEXQSHEELEYQKYHQGQHPKIRIFLISIPSQGTPVXELGEDN

SEQ ID NO: 1473 - protein, 45 aa, Artificial Sequence
  GFR-binding peptide
  MOD_RES (2), (4), (41): Xaa is C or S
AXAXELHEELREYQKYLKPKKRVYEIFLISIPSHHVRSPQXKVSS

SEQ ID NO: 1474 - protein, 45 aa, Artificial Sequence
  GFR-binding peptide
  MOD_RES (2), (4), (41): Xaa is C or S
EXKXALHDELTEYQKYFIPKKRVIEIFLISIPSLQVQTPRXQVNR

SEQ ID NO: 1475 - protein, 42 aa, Artificial Sequence
  GFR-binding peptide
  MOD_RES (2), (4), (36), (37): Xaa is C or S
RXGXGEEVMDDKHHDVVKENEDVYLMSLPKLEVPAXXAKPIK

SEQ ID NO: 1476 - protein, 42 aa, Artificial Sequence
  GFR-binding peptide
  MOD_RES (2), (4), (36), (37): Xaa is C or S
RXAXSEEVMNDKHHDVVNKNEDVYLMSLPKMKVPAXXPEPIG

SEQ ID NO: 1477 - protein, 42 aa, Artificial Sequence
  GFR-binding peptide
  MOD_RES (2), (4), (36), (37): Xaa is C or S
RXGXGEEVMEDKHHDVVKDYEDVYLMSLPKLEVPAXXAKPIS

SEQ ID NO: 1478 - protein, 42 aa, Artificial Sequence
  GFR-binding peptide
  MOD_RES (2), (4), (36): Xaa is C or S
HXGXSEEVMNDKHHDIVNSSDDVYLMSLPKLKVPAXTPKTVH

SEQ ID NO: 1479 - protein, 42 aa, Artificial Sequence
  GFR-binding peptide
  MOD_RES (2), (4), (36), (37): Xaa is C or S
HXGXSEEVMNDKHHDIVNSSDDVYLMSLPKLKVPAXXPKPVY

SEQ ID NO: 1480 - protein, 42 aa, Artificial Sequence
  GFR-binding peptide
  MOD_RES (2), (4), (36), (37): Xaa is C or S
HXGXAEEVMNDKHHDIVNSSDDVYLMSLPKLQVPAXXPKPVT

SEQ ID NO: 1481 - protein, 42 aa, Artificial Sequence
  GFR-binding peptide
  MOD_RES (2), (4), (36), (37): Xaa is C or S
HXGXAEEVMNDKHHDIVNNSSDVYLMSLPKLKVPAXXAKPVA

SEQ ID NO: 1482 - protein, 43 aa, Artificial Sequence
  GFR-binding peptide
  MOD_RES (2), (4), (37), (38): Xaa is C or S
RXGXEEVSMGEDKHHDTPVGMDDVYLMSLPKLKVPAXXAKGVK

SEQ ID NO: 1483 - protein, 42 aa, Artificial Sequence
  GFR-binding peptide
  MOD_RES (2), (4), (36), (37): Xaa is C or S
RXGXEEEVMGDKHHDYTVVGKDVYLMSLPKLKVPAXXAKSAK

SEQ ID NO: 1484 - protein, 42 aa, Artificial Sequence
  GFR-binding peptide
  MOD_RES (2), (4), (36), (37): Xaa is C or S
SXGXREEVMGDKHHDIIQQKDNVYLMSLPKMKVPAXXPGASG

SEQ ID NO: 1485 - protein, 42 aa, Artificial Sequence
  GFR-binding peptide
  MOD_RES (2), (4), (36), (37): Xaa is C or S
RXGXAEEVMDDKHHDVVNNAADVYLMSLPKLRVPAXXSAPAA

SEQ ID NO: 1486 - protein, 42 aa, Artificial Sequence
  GFR-binding peptide
  MOD_RES (2), (4), (36), (37): Xaa is C or S
RXGXSEEVMDDKHHDVVNNASDVYLMSLPKLRVPAXXTPPTS

SEQ ID NO: 1487 - protein, 42 aa, Artificial Sequence
  GFR-binding peptide
  MOD_RES (2), (4), (36), (37): Xaa is C or S
HXGXSEEVMNDKHHDIVNSSDDVYLMSLPKLKVPAXXPKPVH

SEQ ID NO: 1488 - protein, 41 aa, Artificial Sequence
  GFR-binding peptide
  MOD_RES (2), (4), (35), (36): Xaa is C or S
SXKXEEVIMDKHHDVKPKRGVVYLMSLPKLAVPAXXPAASA

SEQ ID NO: 1489 - protein, 41 aa, Artificial Sequence
  GFR-binding peptide
  MOD_RES (2), (4), (35), (36): Xaa is C or S
SXKXEEVIMDKHHDIKPTKGIVYLMSLPKLDVPAXXPSASA

SEQ ID NO: 1490 - protein, 41 aa, Artificial Sequence
  GFR-binding peptide
  MOD_RES (2), (4), (35), (36): Xaa is C or S
SXKXEEVVMDKHHDVKPTRGVVYLMSLPKLDVPAXXPSASA

SEQ ID NO: 1491 - protein, 42 aa, Artificial Sequence
  GFR-binding peptide
  MOD_RES (2), (4), (36), (37): Xaa is C or S
RXGXGEVVMDDKHHDVVKENEDVYLMSLPKLETPVXXAKPIK

SEQ ID NO: 1492 - protein, 42 aa, Artificial Sequence
  GFR-binding peptide
  MOD_RES (2), (4), (36), (37): Xaa is C or S
RXAXSEVTMNDKHHDVVNKNEDVYLMSLPKMKEPVXXPEPIG

SEQ ID NO: 1493 - protein, 42 aa, Artificial Sequence
  GFR-binding peptide
  MOD_RES (2), (4), (36), (37): Xaa is C or S
RXGXGEVVMEDKHHDVVKDYEDVYLMSLPKLETPVXXAKPIS

SEQ ID NO: 1494 - protein, 42 aa, Artificial Sequence
  GFR-binding peptide
  MOD_RES (2), (4), (36): Xaa is C or S
HXGXSRVVMNDKHHDIVNSSDDVYLMSLPKLKTPAXTPKTVH

SEQ ID NO: 1495 - protein, 42 aa, Artificial Sequence
  GFR-binding peptide
  MOD_RES (2), (4), (36), (37): Xaa is C or S
HXGXSRVVMNDKHHDIVNSSDDVYLMSLPKLKTPAXXPKPVY

SEQ ID NO: 1496 - protein, 42 aa, Artificial Sequence
  GFR-binding peptide
  MOD_RES (2), (4), (36), (37): Xaa is C or S
HXGXARVVMNDKHHDIVNSSDDVYLMSLPKLQTPAXXPKPVT

SEQ ID NO: 1497 - protein, 42 aa, Artificial Sequence
  GFR-binding peptide
  MOD_RES (2), (4), (36), (37): Xaa is C or S
HXGXAKVVMNDKHHDIVNNSSDVYLMSLPKLKTPAXXAKPVA

SEQ ID NO: 1498 - protein, 43 aa, Artificial Sequence
  GFR-binding peptide
  MOD_RES (2), (4), (37), (38): Xaa is C or S
RXGXEAVSMGEDKHHDTPVGMDDVYLMSLPKLKTPVXXAKGVK

SEQ ID NO: 1499 - protein, 42 aa, Artificial Sequence
  GFR-binding peptide
  MOD_RES (2), (4), (36), (37): Xaa is C or S
RXGXESVAMGDKHHDYTVVGKDVYLMSLPKLKTPVXXAKSAK

SEQ ID NO: 1500 - protein, 42 aa, Artificial Sequence
  GFR-binding peptide
  MOD_RES (2), (4), (36), (37): Xaa is C or S
SXGXRDVVMGDKHHDIIQQKDNVYLMSLPKMKTPTXXPGASG

SEQ ID NO: 1501 - protein, 42 aa, Artificial Sequence
  GFR-binding peptide
  MOD_RES (2), (4), (36), (37): Xaa is C or S
RXGXAEVVMDDKHHDVVNNAADVYLMSLPKLRAPVXXSAPAA

SEQ ID NO: 1502 - protein, 42 aa, Artificial Sequence
  GFR-binding peptide
  MOD_RES (2), (4), (36), (37): Xaa is C or S
RXGXSEVVMDDKHHDVVNNASDVYLMSLPKLRTPVXXTPPTS

SEQ ID NO: 1503 - protein, 42 aa, Artificial Sequence
  GFR-binding peptide
  MOD_RES (2), (4), (36), (37): Xaa is C or S
HXGXSRVVMNDKHHDIVNSSDDVYLMSLPKLKTPAXXPKPVH

SEQ ID NO: 1504 - protein, 41 aa, Artificial Sequence
  GFR-binding peptide
  MOD_RES (2), (4), (35), (36): Xaa is C or S
SXKXSRVIMDKHHDVKPKRGVVYLMSLPKLAQPVXXPAASA

SEQ ID NO: 1505 - protein, 41 aa, Artificial Sequence
  GFR-binding peptide
  MOD_RES (2), (4), (35), (36): Xaa is C or S
SXKXSKVIMDKHHDIKPTKGIVYLMSLPKLDQSVXXPSASA

SEQ ID NO: 1506 - protein, 41 aa, Artificial Sequence
  GFR-binding peptide
  MOD_RES (2), (4), (35), (36): Xaa is C or S
SXKXSKVVMDKHHDVKPTRGVVYLMSLPKLDQPVXXPSASA

SEQ ID NO: 1507 - protein, 44 aa, Artificial Sequence
  GFR-binding peptide
  MOD_RES (2), (4), (38): Xaa is C or S
RXEXKNHQLFDKHHDHQGQHPKIRVYLMSLPKEETPVXELGEDN

SEQ ID NO: 1508 - protein, 44 aa, Artificial Sequence
  GFR-binding peptide
  MOD_RES (2), (4), (38): Xaa is C or S
RXEXQSHEELDKHHDHQGQHPKIRVYLMSLPKQGTPVXELGEDN

SEQ ID NO: 1509 - protein, 45 aa, Artificial Sequence
  GFR-binding peptide
  MOD_RES (2), (4), (41): Xaa is C or S
AXAXELHEELRDKHHDLKPKKRVYEVYLMSLPKHHVRSPQXKVSS

SEQ ID NO: 1510 - protein, 45 aa, Artificial Sequence
  GFR-binding peptide
  MOD_RES (2), (4), (41): Xaa is C or S
EXKXALHDELTDKHHDFIPKKRVIEVYLMSLPKLQVQTPRXQVNR

SEQ ID NO: 1511 - protein, 42 aa, Artificial Sequence
  GFR-binding peptide
  MOD_RES (4), (6), (36), (37): Xaa is C or S
RSGXGXRVMDNSLQEVVKENEDYYVIPLPELEQPVXXAKPIK

SEQ ID NO: 1512 - protein, 42 aa, Artificial Sequence
  GFR-binding peptide
  MOD_RES (2), (4), (36), (37): Xaa is C or S
RXAXSSRVMNNSLQEVVNKNEDYYVIPLPEMKQPVXXPEPIG

SEQ ID NO: 1513 - protein, 42 aa, Artificial Sequence
  GFR-binding peptide
  MOD_RES (4), (6), (36), (37): Xaa is C or S
RSGXGXRVMENSLQEVVKDYEDYYVIPLPELEQPVXXAKPIS

SEQ ID NO: 1514 - protein, 42 aa, Artificial Sequence
  GFR-binding peptide
  MOD_RES (2), (4), (36): Xaa is C or S
HXGXSSRVMNNSLQEIVNSSDDYYVIPLPELKQPVXTPKTVH

SEQ ID NO: 1515 - protein, 42 aa, Artificial Sequence
  GFR-binding peptide
  MOD_RES (2), (4), (36), (37): Xaa is C or S
HXGXSSRVMNNSLQEIVNSSDDYYVIPLPELKQPVXXPKPVY

SEQ ID NO: 1516 - protein, 42 aa, Artificial Sequence
  GFR-binding peptide
  MOD_RES (2), (4), (36), (37): Xaa is C or S
HXGXASRVMNNSLQEIVNSSDDYYVIPLPELQQPVXXPKPVT

SEQ ID NO: 1517 - protein, 42 aa, Artificial Sequence
  GFR-binding peptide
  MOD_RES (2), (4), (36), (37): Xaa is C or S
HXGXASRVMNNSLQEIVNNSSDYYVIPLPELKQPVXXAKPVA

SEQ ID NO: 1518 - protein, 43 aa, Artificial Sequence
  GFR-binding peptide
  MOD_RES (2), (4), (37), (38): Xaa is C or S
RXGXSRVSMGENSLQETPVGMDDYYVIPLPELKQPVXXAKGVK

SEQ ID NO: 1519 - protein, 42 aa, Artificial Sequence
  GFR-binding peptide
  MOD_RES (2), (4), (36), (37): Xaa is C or S
RXGXESRVMGNSLQEYTVVGKDYYVIPLPELKQPVXXAKSAK

SEQ ID NO: 1520 - protein, 42 aa, Artificial Sequence
  GFR-binding peptide
  MOD_RES (2), (4), (36), (37): Xaa is C or S
SXGXRSRVMGNSLQEIIQQKDNYYVIPLPEMKQPVXXPGASG

SEQ ID NO: 1521 - protein, 42 aa, Artificial Sequence
  GFR-binding peptide
  MOD_RES (2), (4), (36), (37): Xaa is C or S
RXGXASRVMDNSLQEVVNNAADYYVIPLPELRQPVXXSAPAA

SEQ ID NO: 1522 - protein, 42 aa, Artificial Sequence
  GFR-binding peptide
  MOD_RES (2), (4), (36), (37): Xaa is C or S
RXGXSSRVMDNSLQEVVNNASDYYVIPLPELRQPVXXTPPTS

SEQ ID NO: 1523 - protein, 42 aa, Artificial Sequence
  GFR-binding peptide
  MOD_RES (2), (4), (36), (37): Xaa is C or S
HXGXSSRVMNNSLQEIVNSSDDYYVIPLPELKQPVXXPKPVH

SEQ ID NO: 1524 - protein, 41 aa, Artificial Sequence
  GFR-binding peptide
  MOD_RES (2), (4), (35), (36): Xaa is C or S
LXGXSRVIMNSLQELLVRGNDYYVIPLPETKQPVXXTSPVR

SEQ ID NO: 1525 - protein, 41 aa, Artificial Sequence
  GFR-binding peptide
  MOD_RES (2), (4), (35), (36): Xaa is C or S
SXKXSRVIMNSLQEIKPTKGIYYVIPLPELDQPVXXPSASA

SEQ ID NO: 1526 - protein, 41 aa, Artificial Sequence
  GFR-binding peptide
  MOD_RES (2), (4), (35), (36): Xaa is C or S
SXKXSRVVMNSLQEVKPTRGVYYVIPLPELDQPVXXPSASA

SEQ ID NO: 1527 - protein, 42 aa, Artificial Sequence
  GFR-binding peptide
  MOD_RES (2), (4), (36), (37): Xaa is C or S
RXGXGEVVMDNSLQEVVKENEDYYVIPLPELETPVXXAKPIK

SEQ ID NO: 1528 - protein, 42 aa, Artificial Sequence
  GFR-binding peptide
  MOD_RES (2), (4), (36), (37): Xaa is C or S
RXAXSEVTMNNSLQEVVNKNEDYYVIPLPEMKEPVXXPEPIG

SEQ ID NO: 1529 - protein, 42 aa, Artificial Sequence
  GFR-binding peptide
  MOD_RES (2), (4), (36), (37): Xaa is C or S
RXGXGEVVMENSLQEVVKDYEDYYVIPLPELETPVXXAKPIS

SEQ ID NO: 1530 - protein, 42 aa, Artificial Sequence
  GFR-binding peptide
  MOD_RES (2), (4), (36): Xaa is C or S
HXGXSRVVMNNSLQEIVNSSDDYYVIPLPELKTPAXTPKTVH

SEQ ID NO: 1531 - protein, 42 aa, Artificial Sequence
  GFR-binding peptide
  MOD_RES (2), (4), (36), (37): Xaa is C or S
HXGXSRVVMNNSLQEIVNSSDDYYVIPLPELKTPAXXPKPVY

SEQ ID NO: 1532 - protein, 42 aa, Artificial Sequence
  GFR-binding peptide
  MOD_RES (2), (4), (36), (37): Xaa is C or S
HXGXARVVMNNSLQEIVNSSDDYYVIPLPELQTPAXXPKPVT

SEQ ID NO: 1533 - protein, 42 aa, Artificial Sequence
  GFR-binding peptide
  MOD_RES (2), (4), (36), (37): Xaa is C or S
HXGXAKVVMNNSLQEIVNNSSDYYVIPLPELKTPAXXAKPVA

SEQ ID NO: 1534 - protein, 43 aa, Artificial Sequence
  GFR-binding peptide
  MOD_RES (2), (4), (37), (38): Xaa is C or S
RXGXEAVSMGENSLQETPVGMDDYYVIPLPELKTPVXXAKGVK

SEQ ID NO: 1535 - protein, 42 aa, Artificial Sequence
  GFR-binding peptide
  MOD_RES (2), (4), (36), (37): Xaa is C or S
RXGXESVAMGNSLQEYTVVGKDYYVIPLPELKTPVXXAKSAK

SEQ ID NO: 1536 - protein, 42 aa, Artificial Sequence
  GFR-binding peptide
  MOD_RES (2), (4), (36), (37): Xaa is C or S
SXGXRDVVMGNSLQEIIQQKDNYYVIPLPEMKTPTXXPGASG

SEQ ID NO: 1537 - protein, 42 aa, Artificial Sequence
  GFR-binding peptide
  MOD_RES (2), (4), (36), (37): Xaa is C or S
RXGXAEVVMDNSLQEVVNNAADYYVIPLPELRAPVXXSAPAA

SEQ ID NO: 1538 - protein, 42 aa, Artificial Sequence
  GFR-binding peptide
  MOD_RES (2), (4), (36), (37): Xaa is C or S
RXGXSEVVMDNSLQEVVNNASDYYVIPLPELRTPVXXTPPTS

SEQ ID NO: 1539 - protein, 42 aa, Artificial Sequence
  GFR-binding peptide
  MOD_RES (2), (4), (36), (37): Xaa is C or S
HXGXSRVVMNNSLQEIVNSSDDYYVIPLPELKTPAXXPKPVH

SEQ ID NO: 1540 - protein, 41 aa, Artificial Sequence
  GFR-binding peptide
  MOD_RES (2), (4), (35), (36): Xaa is C or S
LXGXEEVIMNSLQELLVRGNDYYVIPLPETKVPAXXTSPVR

SEQ ID NO: 1541 - protein, 41 aa, Artificial Sequence
  GFR-binding peptide
  MOD_RES (2), (4), (35), (36): Xaa is C or S
SXKXSKVIMNSLQEIKPTKGIYYVIPLPELDQSVXXPSASA

SEQ ID NO: 1542 - protein, 41 aa, Artificial Sequence
  GFR-binding peptide
  MOD_RES (2), (4), (35), (36): Xaa is C or S
SXKXSKVVMNSLQEVKPTRGVYYVIPLPELDQPVXXPSASA

SEQ ID NO: 1543 - protein, 44 aa, Artificial Sequence
  GFR-binding peptide
  MOD_RES (2), (4), (38): Xaa is C or S
RXEXKNHQLFNSLQEHQGQHPKIRYYVIPLPEEETPVXELGEDN

SEQ ID NO: 1544 - protein, 44 aa, Artificial Sequence
  GFR-binding peptide
  MOD_RES (2), (4), (38): Xaa is C or S
RXEXQSHEELNSLQEHQGQHPKIRYYVIPLPEQGTPVXELGEDN

SEQ ID NO: 1545 - protein, 45 aa, Artificial Sequence
  GFR-binding peptide
  MOD_RES (2), (4), (41): Xaa is C or S
AXAXELHEELRNSLQELKPKKRVYEYYVIPLPEHHVRSPQXKVSS

SEQ ID NO: 1546 - protein, 45 aa, Artificial Sequence
  GFR-binding peptide
  MOD_RES (2), (4), (41): Xaa is C or S
EXKXALHDELTNSLQEFIPKKRVIEYYVIPLPELQVQTPRXQVNR

SEQ ID NO: 1547 - protein, 42 aa, Artificial Sequence
  GFR-binding peptide
  MOD_RES (2), (4), (36), (37): Xaa is C or S
RXGXGSKVMDNSLQEVVKENEDYYLITLPELEQSVXXAKPIK

SEQ ID NO: 1548 - protein, 42 aa, Artificial Sequence
  GFR-binding peptide
  MOD_RES (2), (4), (36), (37): Xaa is C or S
RXAXSSKVMNNSLQEVVNKNEDYYLITLPEMKQSVXXPEPIG

SEQ ID NO: 1549 - protein, 42 aa, Artificial Sequence
  GFR-binding peptide
  MOD_RES (2), (4), (36), (37): Xaa is C or S
RXGXGSKVMENSLQEVVKDYEDYYLITLPELEQSVXXAKPIS

SEQ ID NO: 1550 - protein, 42 aa, Artificial Sequence
  GFR-binding peptide
  MOD_RES (2), (4), (36): Xaa is C or S
HXGXSSKVMNNSLQEIVNSSDDYYLITLPELKQSVXTPKTVH

SEQ ID NO: 1551 - protein, 42 aa, Artificial Sequence
  GFR-binding peptide
  MOD_RES (2), (4), (36), (37): Xaa is C or S
HXGXSSKVMNNSLQEIVNSSDDYYLITLPELKQSVXXPKPVY

SEQ ID NO: 1552 - protein, 42 aa, Artificial Sequence
  GFR-binding peptide
  MOD_RES (2), (4), (36), (37): Xaa is C or S
HXGXASKVMNNSLQEIVNSSDDYYLITLPELQQSVXXPKPVT

SEQ ID NO: 1553 - protein, 42 aa, Artificial Sequence
  GFR-binding peptide
  MOD_RES (2), (4), (36), (37): Xaa is C or S
HXGXASKVMNNSLQEIVNNSSDYYLITLPELKQSVXXAKPVA

SEQ ID NO: 1554 - protein, 43 aa, Artificial Sequence
  GFR-binding peptide
  MOD_RES (2), (4), (37), (38): Xaa is C or S
RXGXSKVSMGENSLQETPVGMDDYYLITLPELKQSVXXAKGVK

SEQ ID NO: 1555 - protein, 42 aa, Artificial Sequence
  GFR-binding peptide
  MOD_RES (2), (4), (36), (37): Xaa is C or S
RXGXESKVMGNSLQEYTVVGKDYYLITLPELKQSVXXAKSAK

SEQ ID NO: 1556 - protein, 42 aa, Artificial Sequence
  GFR-binding peptide
  MOD_RES (2), (4), (36), (37): Xaa is C or S
SXGXRSKVMGNSLQEIIQQKDNYYLITLPEMKQSVXXPGASG

SEQ ID NO: 1557 - protein, 42 aa, Artificial Sequence
  GFR-binding peptide
  MOD_RES (2), (4), (36), (37): Xaa is C or S
RXGXASKVMDNSLQEVVNNAADYYLITLPELRQSVXXSAPAA

SEQ ID NO: 1558 - protein, 42 aa, Artificial Sequence
  GFR-binding peptide
  MOD_RES (2), (4), (36), (37): Xaa is C or S
RXGXSSKVMDNSLQEVVNNASDYYLITLPELRQSVXXTPPTS

SEQ ID NO: 1559 - protein, 42 aa, Artificial Sequence
  GFR-binding peptide
  MOD_RES (2), (4), (36), (37): Xaa is C or S
HXGXSSKVMNNSLQEIVNSSDDYYLITLPELKQSVXXPKPVH

SEQ ID NO: 1560 - protein, 41 aa, Artificial Sequence
  GFR-binding peptide
  MOD_RES (2), (4), (35), (36): Xaa is C or S
LXGXSKVIMNSLQELLVRGNDYYLITLPETKQSVXXTSPVR

SEQ ID NO: 1561 - protein, 41 aa, Artificial Sequence
  GFR-binding peptide
  MOD_RES (2), (4), (35), (36): Xaa is C or S
SXKXSKVIMNSLQEVKPKRGVYYLITLPELAQSVXXPAASA

SEQ ID NO: 1562 - protein, 41 aa, Artificial Sequence
  GFR-binding peptide
  MOD_RES (2), (4), (35), (36): Xaa is C or S
SXKXSKVVMNSLQEVKPTRGVYYLITLPELDQSVXXPSASA

SEQ ID NO: 1563 - protein, 42 aa, Artificial Sequence
  GFR-binding peptide
  MOD_RES (2), (4), (36), (37): Xaa is C or S
RXGXGEVVMDNSLQEVVKENEDYYLITLPELETPVXXAKPIK

SEQ ID NO: 1564 - protein, 42 aa, Artificial Sequence
  GFR-binding peptide
  MOD_RES (2), (4), (36), (37): Xaa is C or S
RXAXSEVTMNNSLQEVVNKNEDYYLITLPEMKEPVXXPEPIG

SEQ ID NO: 1565 - protein, 42 aa, Artificial Sequence
  GFR-binding peptide
  MOD_RES (2), (4), (36), (37): Xaa is C or S
RXGXGEVVMENSLQEVVKDYEDYYLITLPELETPVXXAKPIS

SEQ ID NO: 1566 - protein, 42 aa, Artificial Sequence
  GFR-binding peptide
  MOD_RES (2), (4), (36): Xaa is C or S
HXGXSRVVMNNSLQEIVNSSDDYYLITLPELKTPAXTPKTVH

SEQ ID NO: 1567 - protein, 42 aa, Artificial Sequence
  GFR-binding peptide
  MOD_RES (2), (4), (36), (37): Xaa is C or S
HXGXSRVVMNNSLQEIVNSSDDYYLITLPELKTPAXXPKPVY

SEQ ID NO: 1568 - protein, 42 aa, Artificial Sequence
  GFR-binding peptide
  MOD_RES (2), (4), (36), (37): Xaa is C or S
HXGXARVVMNNSLQEIVNSSDDYYLITLPELQTPAXXPKPVT

SEQ ID NO: 1569 - protein, 42 aa, Artificial Sequence
  GFR-binding peptide
  MOD_RES (2), (4), (36), (37): Xaa is C or S
HXGXAKVVMNNSLQEIVNNSSDYYLITLPELKTPAXXAKPVA

SEQ ID NO: 1570 - protein, 43 aa, Artificial Sequence
  GFR-binding peptide
  MOD_RES (2), (4), (37), (38): Xaa is C or S
RXGXEAVSMGENSLQETPVGMDDYYLITLPELKTPVXXAKGVK

SEQ ID NO: 1571 - protein, 42 aa, Artificial Sequence
  GFR-binding peptide
  MOD_RES (2), (4), (36), (37): Xaa is C or S
RXGXESVAMGNSLQEYTVVGKDYYLITLPELKTPVXXAKSAK

SEQ ID NO: 1572 - protein, 42 aa, Artificial Sequence
  GFR-binding peptide
  MOD_RES (2), (4), (36), (37): Xaa is C or S
SXGXRDVVMGNSLQEIIQQKDNYYLITLPEMKTPTXXPGASG

SEQ ID NO: 1573 - protein, 42 aa, Artificial Sequence
  GFR-binding peptide
  MOD_RES (2), (4), (36), (37): Xaa is C or S
RXGXAEVVMDNSLQEVVNNAADYYLITLPELRAPVXXSAPAA

SEQ ID NO: 1574 - protein, 42 aa, Artificial Sequence
  GFR-binding peptide
  MOD_RES (2), (4), (36), (37): Xaa is C or S
RXGXSEVVMDNSLQEVVNNASDYYLITLPELRTPVXXTPPTS

SEQ ID NO: 1575 - protein, 42 aa, Artificial Sequence
  GFR-binding peptide
  MOD_RES (2), (4), (36), (37): Xaa is C or S
HXGXSRVVMNNSLQEIVNSSDDYYLITLPELKTPAXXPKPVH

SEQ ID NO: 1576 - protein, 41 aa, Artificial Sequence
  GFR-binding peptide
  MOD_RES (2), (4), (35), (36): Xaa is C or S
LXGXEEVIMNSLQELLVRGNDYYLITLPETKVPAXXTSPVR

SEQ ID NO: 1577 - protein, 41 aa, Artificial Sequence
  GFR-binding peptide
  MOD_RES (2), (4), (35), (36): Xaa is C or S
SXKXSRVIMNSLQEVKPKRGVYYLITLPELAQPVXXPAASA

SEQ ID NO: 1578 - protein, 44 aa, Artificial Sequence
  GFR-binding peptide
  MOD_RES (2), (4), (38): Xaa is C or S
RXEXKNHQLFNSLQEHQGQHPKIRYYLITLPEEETPVXELGEDN

SEQ ID NO: 1579 - protein, 44 aa, Artificial Sequence
  GFR-binding peptide
  MOD_RES (2), (4), (38): Xaa is C or S
RXEXQSHEELNSLQEHQGQHPKIRYYLITLPEQGTPVXELGEDN

SEQ ID NO: 1580 - protein, 45 aa, Artificial Sequence
  GFR-binding peptide
  MOD_RES (2), (4), (41): Xaa is C or S
AXAXELHEELRNSLQELKPKKRVYEYYLITLPEHHVRSPQXKVSS

SEQ ID NO: 1581 - protein, 45 aa, Artificial Sequence
  GFR-binding peptide
  MOD_RES (2), (4), (41): Xaa is C or S
EXKXALHDELTNSLQEFIPKKRVIEYYLITLPELQVQTPRXQVNR

SEQ ID NO: 1582 - protein, 42 aa, Artificial Sequence
  GFR-binding peptide
  MOD_RES (2), (4), (36), (37): Xaa is C or S
RXGXGSKVMDNSLQEVVKENEDYYLITLPELEQPVXXAKPIK

SEQ ID NO: 1583 - protein, 42 aa, Artificial Sequence
  GFR-binding peptide
  MOD_RES (2), (4), (36), (37): Xaa is C or S
RXAXSSKVMNNSLQEVVNKNEDYYLITLPEMKQPVXXPEPIG

SEQ ID NO: 1584 - protein, 42 aa, Artificial Sequence
  GFR-binding peptide
  MOD_RES (2), (4), (36), (37): Xaa is C or S
RXGXGSKVMENSLQEVVKDYEDYYLITLPELEQPVXXAKPIS

SEQ ID NO: 1585 - protein, 42 aa, Artificial Sequence
  GFR-binding peptide
  MOD_RES (2), (4), (36): Xaa is C or S
HXGXSSKVMNNSLQEIVNSSDDYYLITLPELKQPVXTPKTVH

SEQ ID NO: 1586 - protein, 42 aa, Artificial Sequence
  GFR-binding peptide
  MOD_RES (2), (4), (36), (37): Xaa is C or S
HXGXSSKVMNNSLQEIVNSSDDYYLITLPELKQPVXXPKPVY

SEQ ID NO: 1587 - protein, 42 aa, Artificial Sequence
  GFR-binding peptide
  MOD_RES (2), (4), (36), (37): Xaa is C or S
HXGXASKVMNNSLQEIVNSSDDYYLITLPELQQPVXXPKPVT

SEQ ID NO: 1588 - protein, 42 aa, Artificial Sequence
  GFR-binding peptide
  MOD_RES (2), (4), (36), (37): Xaa is C or S
HXGXASKVMNNSLQEIVNNSSDYYLITLPELKQPVXXAKPVA

SEQ ID NO: 1589 - protein, 43 aa, Artificial Sequence
  GFR-binding peptide
  MOD_RES (2), (4), (37), (38): Xaa is C or S
RXGXSKVSMGENSLQETPVGMDDYYLITLPELKQPVXXAKGVK

SEQ ID NO: 1590 - protein, 42 aa, Artificial Sequence
  GFR-binding peptide
  MOD_RES (2), (4), (36), (37): Xaa is C or S
RXGXESKVMGNSLQEYTVVGKDYYLITLPELKQPVXXAKSAK

SEQ ID NO: 1591 - protein, 42 aa, Artificial Sequence
  GFR-binding peptide
  MOD_RES (2), (4), (36), (37): Xaa is C or S
SXGXRSKVMGNSLQEIIQQKDNYYLITLPEMKQPVXXPGASG

SEQ ID NO: 1592 - protein, 42 aa, Artificial Sequence
  GFR-binding peptide
  MOD_RES (2), (4), (36), (37): Xaa is C or S
RXGXASKVMDNSLQEVVNNAADYYLITLPELRQPVXXSAPAA

SEQ ID NO: 1593 - protein, 42 aa, Artificial Sequence
  GFR-binding peptide
  MOD_RES (2), (4), (36), (37): Xaa is C or S
RXGXSSKVMDNSLQEVVNNASDYYLITLPELRQPVXXTPPTS

SEQ ID NO: 1594 - protein, 42 aa, Artificial Sequence
  GFR-binding peptide
  MOD_RES (2), (4), (36), (37): Xaa is C or S
HXGXSSKVMNNSLQEIVNSSDDYYLITLPELKQPVXXPKPVH

SEQ ID NO: 1595 - protein, 41 aa, Artificial Sequence
  GFR-binding peptide
  MOD_RES (2), (4), (35), (36): Xaa is C or S
LXGXSKVIMNSLQELLVRGNDYYLITLPETKQPVXXTSPVR

SEQ ID NO: 1596 - protein, 41 aa, Artificial Sequence
  GFR-binding peptide
  MOD_RES (2), (4), (35), (36): Xaa is C or S
SXKXSKVIMNSLQEVKPKRGVYYLITLPELAQPVXXPAASA

SEQ ID NO: 1597 - protein, 41 aa, Artificial Sequence
  GFR-binding peptide
  MOD_RES (2), (4), (35), (36): Xaa is C or S
SXKXSKVIMNSLQEIKPTKGIYYLITLPELDQPVXXPSASA

SEQ ID NO: 1598 - protein, 44 aa, Artificial Sequence
  GFR-binding peptide
  MOD_RES (2), (4), (38): Xaa is C or S
RXEXQNHQELSMEGIHQGQHPKIRMIQMTINSQGTPVXELGEDN

SEQ ID NO: 1599 - protein, 42 aa, Artificial Sequence
  GFR-binding peptide
  MOD_RES (2), (4), (36), (37): Xaa is C or S
RXGXGEVVMDSMEGIVVKENEDMIQMTINSLETPVXXAKPIK

SEQ ID NO: 1600 - protein, 42 aa, Artificial Sequence
  GFR-binding peptide
  MOD_RES (2), (4), (36), (37): Xaa is C or S
RXAXSEVTMNSMEGIVVNKNEDMIQMTINSMKEPVXXPEPIG

SEQ ID NO: 1601 - protein, 42 aa, Artificial Sequence
  GFR-binding peptide
  MOD_RES (2), (4), (36), (37): Xaa is C or S
RXGXGEVVMESMEGIVVKDYEDMIQMTINSLETPVXXAKPIS

SEQ ID NO: 1602 - protein, 42 aa, Artificial Sequence
  GFR-binding peptide
  MOD_RES (2), (4), (36): Xaa is C or S
HXGXSRVVMNSMEGIIVNSSDDMIQMTINSLKTPAXTPKTVH

SEQ ID NO: 1603 - protein, 42 aa, Artificial Sequence
  GFR-binding peptide
  MOD_RES (2), (4), (36), (37): Xaa is C or S
HXGXSRVVMNSMEGIIVNSSDDMIQMTINSLKTPAXXPKPVY

SEQ ID NO: 1604 - protein, 42 aa, Artificial Sequence
  GFR-binding peptide
  MOD_RES (2), (4), (36), (37): Xaa is C or S
HXGXARVVMNSMEGIIVNSSDDMIQMTINSLQTPAXXPKPVT

SEQ ID NO: 1605 - protein, 42 aa, Artificial Sequence
  GFR-binding peptide
  MOD_RES (2), (4), (36), (37): Xaa is C or S
HXGXAKVVMNSMEGIIVNNSSDMIQMTINSLKTPAXXAKPVA

SEQ ID NO: 1606 - protein, 43 aa, Artificial Sequence
  GFR-binding peptide
  MOD_RES (2), (4), (37), (38): Xaa is C or S
RXGXEAVSMGESMEGITPVGMDDMIQMTINSLKTPVXXAKGVK

SEQ ID NO: 1607 - protein, 42 aa, Artificial Sequence
  GFR-binding peptide
  MOD_RES (2), (4), (36), (37): Xaa is C or S
RXGXESVAMGSMEGIYTVVGKDMIQMTINSLKTPVXXAKSAK

SEQ ID NO: 1608 - protein, 42 aa, Artificial Sequence
  GFR-binding peptide
  MOD_RES (2), (4), (36), (37): Xaa is C or S
SXGXRDVVMGSMEGIIIQQKDNMIQMTINSMKTPTXXPGASG

SEQ ID NO: 1609 - protein, 42 aa, Artificial Sequence
  GFR-binding peptide
  MOD_RES (2), (4), (36), (37): Xaa is C or S
RXGXAEVVMDSMEGIVVNNAADMIQMTINSLRAPVXXSAPAA

SEQ ID NO: 1610 - protein, 42 aa, Artificial Sequence
  GFR-binding peptide
  MOD_RES (2), (4), (36), (37): Xaa is C or S
RXGXSEVVMDSMEGIVVNNASDMIQMTINSLRTPVXXTPPTS

SEQ ID NO: 1611 - protein, 42 aa, Artificial Sequence
  GFR-binding peptide
  MOD_RES (2), (4), (36), (37): Xaa is C or S
HXGXSRVVMNSMEGIIVNSSDDMIQMTINSLKTPAXXPKPVH

SEQ ID NO: 1612 - protein, 41 aa, Artificial Sequence
  GFR-binding peptide
  MOD_RES (2), (4), (35), (36): Xaa is C or S
LXGXEEVIMSMEGILLVRGNDMIQMTINSTKVPAXXTSPVR

SEQ ID NO: 1613 - protein, 41 aa, Artificial Sequence
  GFR-binding peptide
  MOD_RES (2), (4), (35), (36): Xaa is C or S
SXKXSRVIMSMEGIVKPKRGVMIQMTINSLAQPVXXPAASA

SEQ ID NO: 1614 - protein, 41 aa, Artificial Sequence
  GFR-binding peptide
  MOD_RES (2), (4), (35), (36): Xaa is C or S
SXKXSKVIMSMEGIIKPTKGIMIQMTINSLDQSVXXPSASA

SEQ ID NO: 1615 - protein, 41 aa, Artificial Sequence
  GFR-binding peptide
  MOD_RES (2), (4), (35), (36): Xaa is C or S
SXKXSKVVMSMEGIVKPTRGVMIQMTINSLDQPVXXPSASA

SEQ ID NO: 1616 - protein, 44 aa, Artificial Sequence
  GFR-binding peptide
  MOD_RES (2), (4), (38): Xaa is C or S
RXEXQSHEELSMEGIHQGQHPKIRMIQMTINSQGTPVXELGEDN

SEQ ID NO: 1617 - protein, 45 aa, Artificial Sequence
  GFR-binding peptide
  MOD_RES (2), (4), (41): Xaa is C or S
AXAXELHEELRSMEGILKPKKRVYEMIQMTINSHHVRSPQXKVSS

SEQ ID NO: 1618 - protein, 45 aa, Artificial Sequence
  GFR-binding peptide
  MOD_RES (2), (4), (41): Xaa is C or S
EXKXALHDELTSMEGIFIPKKRVIEMIQMTINSLQVQTPRXQVNR

SEQ ID NO: 1619 - protein, 44 aa, Artificial Sequence
  GFR-binding peptide
  MOD_RES (2), (4), (38): Xaa is C or S
RXEXKSHELFSMEGLHQGQHPKIRMIQMTINSEETPVXELGEDN

SEQ ID NO: 1620 - protein, 42 aa, Artificial Sequence
  GFR-binding peptide
  MOD_RES (2), (4), (36), (37): Xaa is C or S
RXGXGEVVMDSMEGLVVKENEDMIQMTINSLETPVXXAKPIK

SEQ ID NO: 1621 - protein, 42 aa, Artificial Sequence
  GFR-binding peptide
  MOD_RES (2), (4), (36), (37): Xaa is C or S
RXAXSEVTMNSMEGLVVNKNEDMIQMTINSMKEPVXXPEPIG

SEQ ID NO: 1622 - protein, 42 aa, Artificial Sequence
  GFR-binding peptide
  MOD_RES (2), (4), (36), (37): Xaa is C or S
RXGXGEVVMESMEGLVVKDYEDMIQMTINSLETPVXXAKPIS

SEQ ID NO: 1623 - protein, 42 aa, Artificial Sequence
  GFR-binding peptide
  MOD_RES (2), (4), (36): Xaa is C or S
HXGXSRVVMNSMEGLIVNSSDDMIQMTINSLKTPAXTPKTVH

SEQ ID NO: 1624 - protein, 42 aa, Artificial Sequence
  GFR-binding peptide
  MOD_RES (2), (4), (36), (37): Xaa is C or S
HXGXSRVVMNSMEGLIVNSSDDMIQMTINSLKTPAXXPKPVY

SEQ ID NO: 1625 - protein, 42 aa, Artificial Sequence
  GFR-binding peptide
  MOD_RES (2), (4), (36), (37): Xaa is C or S
HXGXARVVMNSMEGLIVNSSDDMIQMTINSLQTPAXXPKPVT

SEQ ID NO: 1626 - protein, 42 aa, Artificial Sequence
  GFR-binding peptide
  MOD_RES (2), (4), (36), (37): Xaa is C or S
HXGXAKVVMNSMEGLIVNNSSDMIQMTINSLKTPAXXAKPVA

SEQ ID NO: 1627 - protein, 43 aa, Artificial Sequence
  GFR-binding peptide
  MOD_RES (2), (4), (37), (38): Xaa is C or S
RXGXEAVSMGESMEGLTPVGMDDMIQMTINSLKTPVXXAKGVK

SEQ ID NO: 1628 - protein, 42 aa, Artificial Sequence
  GFR-binding peptide
  MOD_RES (2), (4), (36), (37): Xaa is C or S
RXGXESVAMGSMEGLYTVVGKDMIQMTINSLKTPVXXAKSAK

SEQ ID NO: 1629 - protein, 42 aa, Artificial Sequence
  GFR-binding peptide
  MOD_RES (2), (4), (36), (37): Xaa is C or S
SXGXRDVVMGSMEGLIIQQKDNMIQMTINSMKTPTXXPGASG

SEQ ID NO: 1630 - protein, 42 aa, Artificial Sequence
  GFR-binding peptide
  MOD_RES (2), (4), (36), (37): Xaa is C or S
RXGXAEVVMDSMEGLVVNNAADMIQMTINSLRAPVXXSAPAA

SEQ ID NO: 1631 - protein, 42 aa, Artificial Sequence
  GFR-binding peptide
  MOD_RES (2), (4), (36), (37): Xaa is C or S
RXGXSEVVMDSMEGLVVNNASDMIQMTINSLRTPVXXTPPTS

SEQ ID NO: 1632 - protein, 42 aa, Artificial Sequence
  GFR-binding peptide
  MOD_RES (2), (4), (36), (37): Xaa is C or S
HXGXSRVVMNSMEGLIVNSSDDMIQMTINSLKTPAXXPKPVH

SEQ ID NO: 1633 - protein, 41 aa, Artificial Sequence
  GFR-binding peptide
  MOD_RES (2), (4), (35), (36): Xaa is C or S
LXGXEEVIMSMEGLLLVRGNDMIQMTINSTKVPAXXTSPVR

SEQ ID NO: 1634 - protein, 41 aa, Artificial Sequence
  GFR-binding peptide
  MOD_RES (2), (4), (35), (36): Xaa is C or S
SXKXSRVIMSMEGLVKPKRGVMIQMTINSLAQPVXXPAASA

SEQ ID NO: 1635 - protein, 41 aa, Artificial Sequence
  GFR-binding peptide
  MOD_RES (2), (4), (35), (36): Xaa is C or S
SXKXSKVIMSMEGLIKPTKGIMIQMTINSLDQSVXXPSASA

SEQ ID NO: 1636 - protein, 41 aa, Artificial Sequence
  GFR-binding peptide
  MOD_RES (2), (4), (35), (36): Xaa is C or S
SXKXSKVVMSMEGLVKPTRGVMIQMTINSLDQPVXXPSASA

SEQ ID NO: 1637 - protein, 44 aa, Artificial Sequence
  GFR-binding peptide
  MOD_RES (2), (4), (38): Xaa is C or S
RXEXKNHQLFSMEGLHQGQHPKIRMIQMTINSEETPVXELGEDN

SEQ ID NO: 1638 - protein, 45 aa, Artificial Sequence
  GFR-binding peptide
  MOD_RES (2), (4), (41): Xaa is C or S
AXAXELHEELRSMEGLLKPKKRVYEMIQMTINSHHVRSPQXKVSS

SEQ ID NO: 1639 - protein, 45 aa, Artificial Sequence
  GFR-binding peptide
  MOD_RES (2), (4), (41): Xaa is C or S
EXKXALHDELTSMEGLFIPKKRVIEMIQMTINSLQVQTPRXQVNR

SEQ ID NO: 1640 - protein, 45 aa, Artificial Sequence
  GFR-binding peptide
  MOD_RES (2), (4), (41): Xaa is C or S
EXKXALHEELTVQVEKFIPKKRVIEVKAVKVSRLQVRSPRXQVNR

SEQ ID NO: 1641 - protein, 42 aa, Artificial Sequence
  GFR-binding peptide
  MOD_RES (2), (4), (36), (37): Xaa is C or S
RXGXGEVVMDVQVEKVVKENEDVKAVKVSRLETPVXXAKPIK

SEQ ID NO: 1642 - protein, 42 aa, Artificial Sequence
  GFR-binding peptide
  MOD_RES (2), (4), (36), (37): Xaa is C or S
RXAXSEVTMNVQVEKVVNKNEDVKAVKVSRMKEPVXXPEPIG

SEQ ID NO: 1643 - protein, 42 aa, Artificial Sequence
  GFR-binding peptide
  MOD_RES (2), (4), (36), (37): Xaa is C or S
RXGXGEVVMEVQVEKVVKDYEDVKAVKVSRLETPVXXAKPIS

SEQ ID NO: 1644 - protein, 42 aa, Artificial Sequence
  GFR-binding peptide
  MOD_RES (2), (4), (36): Xaa is C or S
HXGXSRVVMNVQVEKIVNSSDDVKAVKVSRLKTPAXTPKTVH

SEQ ID NO: 1645 - protein, 42 aa, Artificial Sequence
  GFR-binding peptide
  MOD_RES (2), (4), (36), (37): Xaa is C or S
HXGXSRVVMNVQVEKIVNSSDDVKAVKVSRLKTPAXXPKPVY

SEQ ID NO: 1646 - protein, 42 aa, Artificial Sequence
  GFR-binding peptide
  MOD_RES (2), (4), (36), (37): Xaa is C or S
HXGXARVVMNVQVEKIVNSSDDVKAVKVSRLQTPAXXPKPVT

SEQ ID NO: 1647 - protein, 42 aa, Artificial Sequence
  GFR-binding peptide
  MOD_RES (2), (4), (36), (37): Xaa is C or S
HXGXAKVVMNVQVEKIVNNSSDVKAVKVSRLKTPAXXAKPVA

SEQ ID NO: 1648 - protein, 43 aa, Artificial Sequence
  GFR-binding peptide
  MOD_RES (2), (4), (37), (38): Xaa is C or S
RXGXEAVSMGEVQVEKTPVGMDDVKAVKVSRLKTPVXXAKGVK

SEQ ID NO: 1649 - protein, 42 aa, Artificial Sequence
  GFR-binding peptide
  MOD_RES (2), (4), (36), (37): Xaa is C or S
RXGXESVAMGVQVEKYTVVGKDVKAVKVSRLKTPVXXAKSAK

SEQ ID NO: 1650 - protein, 42 aa, Artificial Sequence
  GFR-binding peptide
  MOD_RES (2), (4), (36), (37): Xaa is C or S
SXGXRDVVMGVQVEKIIQQKDNVKAVKVSRMKTPTXXPGASG

SEQ ID NO: 1651 - protein, 42 aa, Artificial Sequence
  GFR-binding peptide
  MOD_RES (2), (4), (36), (37): Xaa is C or S
RXGXAEVVMDVQVEKVVNNAADVKAVKVSRLRAPVXXSAPAA

SEQ ID NO: 1652 - protein, 42 aa, Artificial Sequence
  GFR-binding peptide
  MOD_RES (2), (4), (36), (37): Xaa is C or S
RXGXSEVVMDVQVEKVVNNASDVKAVKVSRLRTPVXXTPPTS

SEQ ID NO: 1653 - protein, 42 aa, Artificial Sequence
  GFR-binding peptide
  MOD_RES (2), (4), (36), (37): Xaa is C or S
HXGXSRVVMNVQVEKIVNSSDDVKAVKVSRLKTPAXXPKPVH

SEQ ID NO: 1654 - protein, 41 aa, Artificial Sequence
  GFR-binding peptide
  MOD_RES (2), (4), (35), (36): Xaa is C or S
LXGXEEVIMVQVEKLLVRGNDVKAVKVSRTKVPAXXTSPVR

SEQ ID NO: 1655 - protein, 41 aa, Artificial Sequence
  GFR-binding peptide
  MOD_RES (2), (4), (35), (36): Xaa is C or S
SXKXSRVIMVQVEKVKPKRGVVKAVKVSRLAQPVXXPAASA

SEQ ID NO: 1656 - protein, 41 aa, Artificial Sequence
  GFR-binding peptide
  MOD_RES (2), (4), (35), (36): Xaa is C or S
SXKXSKVIMVQVEKIKPTKGIVKAVKVSRLDQSVXXPSASA

SEQ ID NO: 1657 - protein, 41 aa, Artificial Sequence
  GFR-binding peptide
  MOD_RES (2), (4), (35), (36): Xaa is C or S
SXKXSKVVMVQVEKVKPTRGVVKAVKVSRLDQPVXXPSASA

SEQ ID NO: 1658 - protein, 44 aa, Artificial Sequence
  GFR-binding peptide
  MOD_RES (2), (4), (38): Xaa is C or S
RXEXKNHQLFVQVEKHQGQHPKIRVKAVKVSREETPVXELGEDN

SEQ ID NO: 1659 - protein, 44 aa, Artificial Sequence
  GFR-binding peptide
  MOD_RES (2), (4), (38): Xaa is C or S
RXEXQSHEELVQVEKHQGQHPKIRVKAVKVSRQGTPVXELGEDN

SEQ ID NO: 1660 - protein, 45 aa, Artificial Sequence
  GFR-binding peptide
  MOD_RES (2), (4), (41): Xaa is C or S
EXKXALHDELTVQVEKFIPKKRVIEVKAVKVSRLQVQTPRXQVNR

SEQ ID NO: 1661 - protein, 45 aa, Artificial Sequence
  GFR-binding peptide
  MOD_RES (2), (4), (41): Xaa is C or S
AXAXELHDELRVTAKKLKPKKRVYEIKRVQVPRHHVQTPQXKVSS

SEQ ID NO: 1662 - protein, 42 aa, Artificial Sequence
  GFR-binding peptide
  MOD_RES (2), (4), (36), (37): Xaa is C or S
RXGXGEVVMDVTAKKVVKENEDIKRVQVPRLETPVXXAKPIK

SEQ ID NO: 1663 - protein, 42 aa, Artificial Sequence
  GFR-binding peptide
  MOD_RES (2), (4), (36), (37): Xaa is C or S
RXAXSEVTMNVTAKKVVNKNEDIKRVQVPRMKEPVXXPEPIG

SEQ ID NO: 1664 - protein, 42 aa, Artificial Sequence
  GFR-binding peptide
  MOD_RES (2), (4), (36), (37): Xaa is C or S
RXGXGEVVMEVTAKKVVKDYEDIKRVQVPRLETPVXXAKPIS

SEQ ID NO: 1665 - protein, 42 aa, Artificial Sequence
  GFR-binding peptide
  MOD_RES (2), (4), (36): Xaa is C or S
HXGXSRVVMNVTAKKIVNSSDDIKRVQVPRLKTPAXTPKTVH

SEQ ID NO: 1666 - protein, 42 aa, Artificial Sequence
  GFR-binding peptide
  MOD_RES (2), (4), (36), (37): Xaa is C or S
HXGXSRVVMNVTAKKIVNSSDDIKRVQVPRLKTPAXXPKPVY

SEQ ID NO: 1667 - protein, 42 aa, Artificial Sequence
  GFR-binding peptide
  MOD_RES (2), (4), (36), (37): Xaa is C or S
HXGXARVVMNVTAKKIVNSSDDIKRVQVPRLQTPAXXPKPVT

SEQ ID NO: 1668 - protein, 42 aa, Artificial Sequence
  GFR-binding peptide
  MOD_RES (2), (4), (36), (37): Xaa is C or S
HXGXAKVVMNVTAKKIVNNSSDIKRVQVPRLKTPAXXAKPVA

SEQ ID NO: 1669 - protein, 43 aa, Artificial Sequence
  GFR-binding peptide
  MOD_RES (2), (4), (37), (38): Xaa is C or S
RXGXEAVSMGEVTAKKTPVGMDDIKRVQVPRLKTPVXXAKGVK

SEQ ID NO: 1670 - protein, 42 aa, Artificial Sequence
  GFR-binding peptide
  MOD_RES (2), (4), (36), (37): Xaa is C or S
RXGXESVAMGVTAKKYTVVGKDIKRVQVPRLKTPVXXAKSAK

SEQ ID NO: 1671 - protein, 42 aa, Artificial Sequence
  GFR-binding peptide
  MOD_RES (2), (4), (36), (37): Xaa is C or S
SXGXRDVVMGVTAKKIIQQKDNIKRVQVPRMKTPTXXPGASG

SEQ ID NO: 1672 - protein, 42 aa, Artificial Sequence
  GFR-binding peptide
  MOD_RES (2), (4), (36), (37): Xaa is C or S
RXGXAEVVMDVTAKKVVNNAADIKRVQVPRLRAPVXXSAPAA

SEQ ID NO: 1673 - protein, 42 aa, Artificial Sequence
  GFR-binding peptide
  MOD_RES (2), (4), (36), (37): Xaa is C or S
RXGXSEVVMDVTAKKVVNNASDIKRVQVPRLRTPVXXTPPTS

SEQ ID NO: 1674 - protein, 42 aa, Artificial Sequence
  GFR-binding peptide
  MOD_RES (2), (4), (36), (37): Xaa is C or S
HXGXSRVVMNVTAKKIVNSSDDIKRVQVPRLKTPAXXPKPVH

SEQ ID NO: 1675 - protein, 41 aa, Artificial Sequence
  GFR-binding peptide
  MOD_RES (2), (4), (35), (36): Xaa is C or S
LXGXEEVIMVTAKKLLVRGNDIKRVQVPRTKVPAXXTSPVR

SEQ ID NO: 1676 - protein, 41 aa, Artificial Sequence
  GFR-binding peptide
  MOD_RES (2), (4), (35), (36): Xaa is C or S
SXKXSRVIMVTAKKVKPKRGVIKRVQVPRLAQPVXXPAASA

SEQ ID NO: 1677 - protein, 41 aa, Artificial Sequence
  GFR-binding peptide
  MOD_RES (2), (4), (35), (36): Xaa is C or S
SXKXSKVIMVTAKKIKPTKGIIKRVQVPRLDQSVXXPSASA

SEQ ID NO: 1678 - protein, 41 aa, Artificial Sequence
  GFR-binding peptide
  MOD_RES (2), (4), (35), (36): Xaa is C or S
SXKXSKVVMVTAKKVKPTRGVIKRVQVPRLDQPVXXPSASA

SEQ ID NO: 1679 - protein, 44 aa, Artificial Sequence
  GFR-binding peptide
  MOD_RES (2), (4), (38): Xaa is C or S
RXEXKNHQLFVTAKKHQGQHPKIRIKRVQVPREETPVXELGEDN

SEQ ID NO: 1680 - protein, 44 aa, Artificial Sequence
  GFR-binding peptide
  MOD_RES (2), (4), (38): Xaa is C or S
RXEXQSHEELVTAKKHQGQHPKIRIKRVQVPRQGTPVXELGEDN

SEQ ID NO: 1681 - protein, 45 aa, Artificial Sequence
  GFR-binding peptide
  MOD_RES (2), (4), (41): Xaa is C or S
AXAXELHEELRVTAKKLKPKKRVYEIKRVQVPRHHVRSPQXKVSS

SEQ ID NO: 1682 - protein, 30 aa, Artificial Sequence
  GFR-binding peptide
EVVMNQYNKLVVNKNEDLYLMSIASMKTPV

SEQ ID NO: 1683 - protein, 30 aa, Artificial Sequence
  GFR-binding peptide
EVVMNQYNKLIVNSSDDLYLMSIASLKTPV

SEQ ID NO: 1684 - protein, 30 aa, Artificial Sequence
  GFR-binding peptide
EVVMNQYNKLIVNSSDDLYLMSIASLQTPV

SEQ ID NO: 1685 - protein, 30 aa, Artificial Sequence
  GFR-binding peptide
EVVMNQYNKLIVNNSSDLYLMSIASLKTPV

SEQ ID NO: 1686 - protein, 32 aa, Artificial Sequence
  GFR-binding peptide
EVVSMGEQYNKLTPVGMDDLYLMSIASLKTPV

SEQ ID NO: 1687 - protein, 30 aa, Artificial Sequence
  GFR-binding peptide
EVVMGQYNKLYTVVGKDLYLMSIASLKTPV

SEQ ID NO: 1688 - protein, 30 aa, Artificial Sequence
  GFR-binding peptide
EVVMGQYNKLIIQQKDNLYLMSIASMKTPV

SEQ ID NO: 1689 - protein, 30 aa, Artificial Sequence
  GFR-binding peptide
EVVMDQYNKLVVNNAADLYLMSIASLRTPV

SEQ ID NO: 1690 - protein, 30 aa, Artificial Sequence
  GFR-binding peptide
EVVMDQYNKLVVNNASDLYLMSIASLRTPV

SEQ ID NO: 1691 - protein, 30 aa, Artificial Sequence
  GFR-binding peptide
EVVIMQYNKLLLVRGNDLYLMSIASTKTPV

SEQ ID NO: 1692 - protein, 30 aa, Artificial Sequence
  GFR-binding peptide
EVVIMQYNKLVKPKRGVLYLMSIASLATPV

SEQ ID NO: 1693 - protein, 30 aa, Artificial Sequence
  GFR-binding peptide
EVVIMQYNKLIKPTKGILYLMSIASLDTPV

SEQ ID NO: 1694 - protein, 30 aa, Artificial Sequence
  GFR-binding peptide
EVVVMQYNKLVKPTRGVLYLMSIASLDTPV

SEQ ID NO: 1695 - protein, 30 aa, Artificial Sequence
  GFR-binding peptide
EVTMNQYNKLVVNKNEDLYLMSIASMKEPV

SEQ ID NO: 1696 - protein, 30 aa, Artificial Sequence
  GFR-binding peptide
RVVMNQYNKLIVNSSDDLYLMSIASLKTPA

SEQ ID NO: 1697 - protein, 30 aa, Artificial Sequence
  GFR-binding peptide
RVVMNQYNKLIVNSSDDLYLMSIASLQTPA

SEQ ID NO: 1698 - protein, 30 aa, Artificial Sequence
  GFR-binding peptide
KVVMNQYNKLIVNNSSDLYLMSIASLKTPA

SEQ ID NO: 1699 - protein, 32 aa, Artificial Sequence
  GFR-binding peptide
EAVSMGEQYNKLTPVGMDDLYLMSIASLKTPV

SEQ ID NO: 1700 - protein, 30 aa, Artificial Sequence
  GFR-binding peptide
SVAMGQYNKLYTVVGKDLYLMSIASLKTPV

SEQ ID NO: 1701 - protein, 30 aa, Artificial Sequence
  GFR-binding peptide
DVVMGQYNKLIIQQKDNLYLMSIASMKTPT

SEQ ID NO: 1702 - protein, 30 aa, Artificial Sequence
  GFR-binding peptide
EVVMDQYNKLVVNNAADLYLMSIASLRAPV

SEQ ID NO: 1703 - protein, 30 aa, Artificial Sequence
  GFR-binding peptide
EEVIMQYNKLLLVRGNDLYLMSIASTKVPA

SEQ ID NO: 1704 - protein, 30 aa, Artificial Sequence
  GFR-binding peptide
SRVIMQYNKLVKPKRGVLYLMSIASLAQPV

SEQ ID NO: 1705 - protein, 30 aa, Artificial Sequence
  GFR-binding peptide
SKVIMQYNKLIKPTKGILYLMSIASLDQSV

SEQ ID NO: 1706 - protein, 30 aa, Artificial Sequence
  GFR-binding peptide
SKVVMQYNKLVKPTRGVLYLMSIASLDQPV

SEQ ID NO: 1707 - protein, 32 aa, Artificial Sequence
  GFR-binding peptide
NHQLFQYNKLHQGQHPKIRLYLMSIASEETPV

SEQ ID NO: 1708 - protein, 32 aa, Artificial Sequence
  GFR-binding peptide
SHEELQYNKLHQGQHPKIRLYLMSIASQGTPV

SEQ ID NO: 1709 - protein, 32 aa, Artificial Sequence
  GFR-binding peptide
HEELRQYNKLLKPKKRVYELYLMSIASHHVRS

SEQ ID NO: 1710 - protein, 32 aa, Artificial Sequence
  GFR-binding peptide
HDELTQYNKLFIPKKRVIELYLMSIASLQVQT

SEQ ID NO: 1711 - protein, 30 aa, Artificial Sequence
  GFR-binding peptide
EVTMDPYVKLVVKENEDFFLISLSSLEEPV

SEQ ID NO: 1712 - protein, 30 aa, Artificial Sequence
  GFR-binding peptide
EVTMEPYVKLVVKDYEDFFLISLSSLEEPV

SEQ ID NO: 1713 - protein, 30 aa, Artificial Sequence
  GFR-binding peptide
EVTMNPYVKLIVNSSDDFFLISLSSLKEPV

SEQ ID NO: 1714 - protein, 30 aa, Artificial Sequence
  GFR-binding peptide
EVTMNPYVKLIVNSSDDFFLISLSSLQEPV

SEQ ID NO: 1715 - protein, 30 aa, Artificial Sequence
  GFR-binding peptide
EVTMNPYVKLIVNNSSDFFLISLSSLKEPV

SEQ ID NO: 1716 - protein, 32 aa, Artificial Sequence
  GFR-binding peptide
EVTSMGEPYVKLTPVGMDDFFLISLSSLKEPV

SEQ ID NO: 1717 - protein, 30 aa, Artificial Sequence
  GFR-binding peptide
EVTMGPYVKLYTVVGKDFFLISLSSLKEPV

SEQ ID NO: 1718 - protein, 30 aa, Artificial Sequence
  GFR-binding peptide
EVTMGPYVKLIIQQKDNFFLISLSSMKEPV

SEQ ID NO: 1719 - protein, 30 aa, Artificial Sequence
  GFR-binding peptide
EVTMDPYVKLVVNNAADFFLISLSSLREPV

SEQ ID NO: 1720 - protein, 30 aa, Artificial Sequence
  GFR-binding peptide
EVTMDPYVKLVVNNASDFFLISLSSLREPV

SEQ ID NO: 1721 - protein, 30 aa, Artificial Sequence
  GFR-binding peptide
EVTIMPYVKLLLVRGNDFFLISLSSTKEPV

SEQ ID NO: 1722 - protein, 30 aa, Artificial Sequence
  GFR-binding peptide
EVTIMPYVKLVKPKRGVFFLISLSSLAEPV

SEQ ID NO: 1723 - protein, 30 aa, Artificial Sequence
  GFR-binding peptide
EVTIMPYVKLIKPTKGIFFLISLSSLDEPV

SEQ ID NO: 1724 - protein, 30 aa, Artificial Sequence
  GFR-binding peptide
EVTVMPYVKLVKPTRGVFFLISLSSLDEPV

SEQ ID NO: 1725 - protein, 30 aa, Artificial Sequence
  GFR-binding peptide
EVVMDPYVKLVVKENEDFFLISLSSLETPV

SEQ ID NO: 1726 - protein, 30 aa, Artificial Sequence
  GFR-binding peptide
EVVMEPYVKLVVKDYEDFFLISLSSLETPV

SEQ ID NO: 1727 - protein, 30 aa, Artificial Sequence
  GFR-binding peptide
RVVMNPYVKLIVNSSDDFFLISLSSLKTPA

SEQ ID NO: 1728 - protein, 30 aa, Artificial Sequence
  GFR-binding peptide
RVVMNPYVKLIVNSSDDFFLISLSSLQTPA

SEQ ID NO: 1729 - protein, 30 aa, Artificial Sequence
  GFR-binding peptide
KVVMNPYVKLIVNNSSDFFLISLSSLKTPA

SEQ ID NO: 1730 - protein, 32 aa, Artificial Sequence
  GFR-binding peptide
EAVSMGEPYVKLTPVGMDDFFLISLSSLKTPV

SEQ ID NO: 1731 - protein, 30 aa, Artificial Sequence
  GFR-binding peptide
SVAMGPYVKLYTVVGKDFFLISLSSLKTPV

SEQ ID NO: 1732 - protein, 30 aa, Artificial Sequence
  GFR-binding peptide
DVVMGPYVKLIIQQKDNFFLISLSSMKTPT

SEQ ID NO: 1733 - protein, 30 aa, Artificial Sequence
  GFR-binding peptide
EVVMDPYVKLVVNNAADFFLISLSSLRAPV

SEQ ID NO: 1734 - protein, 30 aa, Artificial Sequence
  GFR-binding peptide
EVVMDPYVKLVVNNASDFFLISLSSLRTPV

SEQ ID NO: 1735 - protein, 30 aa, Artificial Sequence
  GFR-binding peptide
EEVIMPYVKLLLVRGNDFFLISLSSTKVPA

SEQ ID NO: 1736 - protein, 30 aa, Artificial Sequence
  GFR-binding peptide
SRVIMPYVKLVKPKRGVFFLISLSSLAQPV

SEQ ID NO: 1737 - protein, 30 aa, Artificial Sequence
  GFR-binding peptide
SKVIMPYVKLIKPTKGIFFLISLSSLDQSV

SEQ ID NO: 1738 - protein, 30 aa, Artificial Sequence
  GFR-binding peptide
SKVVMPYVKLVKPTRGVFFLISLSSLDQPV

SEQ ID NO: 1739 - protein, 32 aa, Artificial Sequence
  GFR-binding peptide
NHQLFPYVKLHQGQHPKIRFFLISLSSEETPV

SEQ ID NO: 1740 - protein, 32 aa, Artificial Sequence
  GFR-binding peptide
SHEELPYVKLHQGQHPKIRFFLISLSSQGTPV

SEQ ID NO: 1741 - protein, 32 aa, Artificial Sequence
  GFR-binding peptide
HEELRPYVKLLKPKKRVYEFFLISLSSHHVRS

SEQ ID NO: 1742 - protein, 32 aa, Artificial Sequence
  GFR-binding peptide
HDELTPYVKLFIPKKRVIEFFLISLSSLQVQT

SEQ ID NO: 1743 - protein, 30 aa, Artificial Sequence
  GFR-binding peptide
RVVMDRYKKLVVKENEDFYLVSIANLETPA

SEQ ID NO: 1744 - protein, 30 aa, Artificial Sequence
  GFR-binding peptide
RVVMNRYKKLVVNKNEDFYLVSIANMKTPA

SEQ ID NO: 1745 - protein, 30 aa, Artificial Sequence
  GFR-binding peptide
RVVMERYKKLVVKDYEDFYLVSIANLETPA

SEQ ID NO: 1746 - protein, 30 aa, Artificial Sequence
  GFR-binding peptide
RVVMNRYKKLIVNNSSDFYLVSIANLKTPA

SEQ ID NO: 1747 - protein, 32 aa, Artificial Sequence
  GFR-binding peptide
RVVSMGERYKKLTPVGMDDFYLVSIANLKTPA

SEQ ID NO: 1748 - protein, 30 aa, Artificial Sequence
  GFR-binding peptide
RVVMGRYKKLYTVVGKDFYLVSIANLKTPA

SEQ ID NO: 1749 - protein, 30 aa, Artificial Sequence
  GFR-binding peptide
RVVMGRYKKLIIQQKDNFYLVSIANMKTPA

SEQ ID NO: 1750 - protein, 30 aa, Artificial Sequence
  GFR-binding peptide
RVVMDRYKKLVVNNAADFYLVSIANLRTPA

SEQ ID NO: 1751 - protein, 30 aa, Artificial Sequence
  GFR-binding peptide
RVVMDRYKKLVVNNASDFYLVSIANLRTPA

SEQ ID NO: 1752 - protein, 30 aa, Artificial Sequence
  GFR-binding peptide
RVVIMRYKKLLLVRGNDFYLVSIANTKTPA

SEQ ID NO: 1753 - protein, 30 aa, Artificial Sequence
  GFR-binding peptide
RVVIMRYKKLVKPKRGVFYLVSIANLATPA

SEQ ID NO: 1754 - protein, 30 aa, Artificial Sequence
  GFR-binding peptide
RVVIMRYKKLIKPTKGIFYLVSIANLDTPA

SEQ ID NO: 1755 - protein, 30 aa, Artificial Sequence
  GFR-binding peptide
RVVVMRYKKLVKPTRGVFYLVSIANLDTPA

SEQ ID NO: 1756 - protein, 30 aa, Artificial Sequence
  GFR-binding peptide
EVVMDRYKKLVVKENEDFYLVSIANLETPV

SEQ ID NO: 1757 - protein, 30 aa, Artificial Sequence
  GFR-binding peptide
EVTMNRYKKLVVNKNEDFYLVSIANMKEPV

SEQ ID NO: 1758 - protein, 30 aa, Artificial Sequence
  GFR-binding peptide
EVVMERYKKLVVKDYEDFYLVSIANLETPV

SEQ ID NO: 1759 - protein, 30 aa, Artificial Sequence
  GFR-binding peptide
KVVMNRYKKLIVNNSSDFYLVSIANLKTPA

SEQ ID NO: 1760 - protein, 32 aa, Artificial Sequence
  GFR-binding peptide
EAVSMGERYKKLTPVGMDDFYLVSIANLKTPV

SEQ ID NO: 1761 - protein, 30 aa, Artificial Sequence
  GFR-binding peptide
SVAMGRYKKLYTVVGKDFYLVSIANLKTPV

SEQ ID NO: 1762 - protein, 30 aa, Artificial Sequence
  GFR-binding peptide
DVVMGRYKKLIIQQKDNFYLVSIANMKTPT

SEQ ID NO: 1763 - protein, 30 aa, Artificial Sequence
  GFR-binding peptide
EVVMDRYKKLVVNNAADFYLVSIANLRAPV

SEQ ID NO: 1764 - protein, 30 aa, Artificial Sequence
  GFR-binding peptide
EVVMDRYKKLVVNNASDFYLVSIANLRTPV

SEQ ID NO: 1765 - protein, 30 aa, Artificial Sequence
  GFR-binding peptide
EEVIMRYKKLLLVRGNDFYLVSIANTKVPA

SEQ ID NO: 1766 - protein, 30 aa, Artificial Sequence
  GFR-binding peptide
SRVIMRYKKLVKPKRGVFYLVSIANLAQPV

SEQ ID NO: 1767 - protein, 30 aa, Artificial Sequence
  GFR-binding peptide
SKVIMRYKKLIKPTKGIFYLVSIANLDQSV

SEQ ID NO: 1768 - protein, 30 aa, Artificial Sequence
  GFR-binding peptide
SKVVMRYKKLVKPTRGVFYLVSIANLDQPV

SEQ ID NO: 1769 - protein, 32 aa, Artificial Sequence
  GFR-binding peptide
NHQLFRYKKLHQGQHPKIRFYLVSIANEETPV

SEQ ID NO: 1770 - protein, 32 aa, Artificial Sequence
  GFR-binding peptide
SHEELRYKKLHQGQHPKIRFYLVSIANQGTPV

SEQ ID NO: 1771 - protein, 32 aa, Artificial Sequence
  GFR-binding peptide
HEELRRYKKLLKPKKRVYEFYLVSIANHHVRS

SEQ ID NO: 1772 - protein, 32 aa, Artificial Sequence
  GFR-binding peptide
HDELTRYKKLFIPKKRVIEFYLVSIANLQVQT

SEQ ID NO: 1773 - protein, 30 aa, Artificial Sequence
  GFR-binding peptide
KVVMDRHKRLVVKENEDYYLVSTASLETPA

SEQ ID NO: 1774 - protein, 30 aa, Artificial Sequence
  GFR-binding peptide
KVVMNRHKRLVVNKNEDYYLVSTASMKTPA

SEQ ID NO: 1775 - protein, 30 aa, Artificial Sequence
  GFR-binding peptide
KVVMERHKRLVVKDYEDYYLVSTASLETPA

SEQ ID NO: 1776 - protein, 30 aa, Artificial Sequence
  GFR-binding peptide
KVVMNRHKRLIVNSSDDYYLVSTASLKTPA

SEQ ID NO: 1777 - protein, 30 aa, Artificial Sequence
  GFR-binding peptide
KVVMNRHKRLIVNSSDDYYLVSTASLQTPA

SEQ ID NO: 1778 - protein, 32 aa, Artificial Sequence
  GFR-binding peptide
KVVSMGERHKRLTPVGMDDYYLVSTASLKTPA

SEQ ID NO: 1779 - protein, 30 aa, Artificial Sequence
  GFR-binding peptide
KVVMGRHKRLYTVVGKDYYLVSTASLKTPA

SEQ ID NO: 1780 - protein, 30 aa, Artificial Sequence
  GFR-binding peptide
KVVMGRHKRLIIQQKDNYYLVSTASMKTPA

SEQ ID NO: 1781 - protein, 30 aa, Artificial Sequence
  GFR-binding peptide
KVVMDRHKRLVVNNAADYYLVSTASLRTPA

SEQ ID NO: 1782 - protein, 30 aa, Artificial Sequence
  GFR-binding peptide
KVVMDRHKRLVVNNASDYYLVSTASLRTPA

SEQ ID NO: 1783 - protein, 30 aa, Artificial Sequence
  GFR-binding peptide
KVVIMRHKRLLLVRGNDYYLVSTASTKTPA

SEQ ID NO: 1784 - protein, 30 aa, Artificial Sequence
  GFR-binding peptide
KVVIMRHKRLVKPKRGVYYLVSTASLATPA

SEQ ID NO: 1785 - protein, 30 aa, Artificial Sequence
  GFR-binding peptide
KVVIMRHKRLIKPTKGIYYLVSTASLDTPA

SEQ ID NO: 1786 - protein, 30 aa, Artificial Sequence
  GFR-binding peptide
KVVVMRHKRLVKPTRGVYYLVSTASLDTPA

SEQ ID NO: 1787 - protein, 30 aa, Artificial Sequence
  GFR-binding peptide
EVVMDRHKRLVVKENEDYYLVSTASLETPV

SEQ ID NO: 1788 - protein, 30 aa, Artificial Sequence
  GFR-binding peptide
EVTMNRHKRLVVNKNEDYYLVSTASMKEPV

SEQ ID NO: 1789 - protein, 30 aa, Artificial Sequence
  GFR-binding peptide
EVVMERHKRLVVKDYEDYYLVSTASLETPV

SEQ ID NO: 1790 - protein, 30 aa, Artificial Sequence
  GFR-binding peptide
RVVMNRHKRLIVNSSDDYYLVSTASLKTPA

SEQ ID NO: 1791 - protein, 30 aa, Artificial Sequence
  GFR-binding peptide
RVVMNRHKRLIVNSSDDYYLVSTASLQTPA

SEQ ID NO: 1792 - protein, 32 aa, Artificial Sequence
  GFR-binding peptide
EAVSMGERHKRLTPVGMDDYYLVSTASLKTPV

SEQ ID NO: 1793 - protein, 30 aa, Artificial Sequence
  GFR-binding peptide
SVAMGRHKRLYTVVGKDYYLVSTASLKTPV

SEQ ID NO: 1794 - protein, 30 aa, Artificial Sequence
  GFR-binding peptide
DVVMGRHKRLIIQQKDNYYLVSTASMKTPT

SEQ ID NO: 1795 - protein, 30 aa, Artificial Sequence
  GFR-binding peptide
EVVMDRHKRLVVNNAADYYLVSTASLRAPV

SEQ ID NO: 1796 - protein, 30 aa, Artificial Sequence
  GFR-binding peptide
EVVMDRHKRLVVNNASDYYLVSTASLRTPV

SEQ ID NO: 1797 - protein, 30 aa, Artificial Sequence
  GFR-binding peptide
EEVIMRHKRLLLVRGNDYYLVSTASTKVPA

SEQ ID NO: 1798 - protein, 30 aa, Artificial Sequence
  GFR-binding peptide
SRVIMRHKRLVKPKRGVYYLVSTASLAQPV

SEQ ID NO: 1799 - protein, 30 aa, Artificial Sequence
  GFR-binding peptide
SKVIMRHKRLIKPTKGIYYLVSTASLDQSV

SEQ ID NO: 1800 - protein, 30 aa, Artificial Sequence
  GFR-binding peptide
SKVVMRHKRLVKPTRGVYYLVSTASLDQPV

SEQ ID NO: 1801 - protein, 32 aa, Artificial Sequence
  GFR-binding peptide
NHQLFRHKRLHQGQHPKIRYYLVSTASEETPV

SEQ ID NO: 1802 - protein, 32 aa, Artificial Sequence
  GFR-binding peptide
SHEELRHKRLHQGQHPKIRYYLVSTASQGTPV

SEQ ID NO: 1803 - protein, 32 aa, Artificial Sequence
  GFR-binding peptide
HEELRRHKRLLKPKKRVYEYYLVSTASHHVRS

SEQ ID NO: 1804 - protein, 32 aa, Artificial Sequence
  GFR-binding peptide
HDELTRHKRLFIPKKRVIEYYLVSTASLQVQT

SEQ ID NO: 1805 - protein, 30 aa, Artificial Sequence
  GFR-binding peptide
EAVMDYHYKLVVKENEDKYLVSIPSLETPV

SEQ ID NO: 1806 - protein, 30 aa, Artificial Sequence
  GFR-binding peptide
EAVMNYHYKLVVNKNEDKYLVSIPSMKTPV

SEQ ID NO: 1807 - protein, 30 aa, Artificial Sequence
  GFR-binding peptide
EAVMEYHYKLVVKDYEDKYLVSIPSLETPV

SEQ ID NO: 1808 - protein, 30 aa, Artificial Sequence
  GFR-binding peptide
EAVMNYHYKLIVNSSDDKYLVSIPSLKTPV

SEQ ID NO: 1809 - protein, 30 aa, Artificial Sequence
  GFR-binding peptide
EAVMNYHYKLIVNSSDDKYLVSIPSLQTPV

SEQ ID NO: 1810 - protein, 30 aa, Artificial Sequence
  GFR-binding peptide
EAVMNYHYKLIVNNSSDKYLVSIPSLKTPV

SEQ ID NO: 1811 - protein, 30 aa, Artificial Sequence
  GFR-binding peptide
EAVMGYHYKLYTVVGKDKYLVSIPSLKTPV

SEQ ID NO: 1812 - protein, 30 aa, Artificial Sequence
  GFR-binding peptide
EAVMGYHYKLIIQQKDNKYLVSIPSMKTPV

SEQ ID NO: 1813 - protein, 30 aa, Artificial Sequence
  GFR-binding peptide
EAVMDYHYKLVVNNAADKYLVSIPSLRTPV

SEQ ID NO: 1814 - protein, 30 aa, Artificial Sequence
  GFR-binding peptide
EAVMDYHYKLVVNNASDKYLVSIPSLRTPV

SEQ ID NO: 1815 - protein, 30 aa, Artificial Sequence
  GFR-binding peptide
EAVIMYHYKLLLVRGNDKYLVSIPSTKTPV

SEQ ID NO: 1816 - protein, 30 aa, Artificial Sequence
  GFR-binding peptide
EAVIMYHYKLVKPKRGVKYLVSIPSLATPV

SEQ ID NO: 1817 - protein, 30 aa, Artificial Sequence
  GFR-binding peptide
EAVIMYHYKLIKPTKGIKYLVSIPSLDTPV

SEQ ID NO: 1818 - protein, 30 aa, Artificial Sequence
  GFR-binding peptide
EAVVMYHYKLVKPTRGVKYLVSIPSLDTPV

SEQ ID NO: 1819 - protein, 30 aa, Artificial Sequence
  GFR-binding peptide
EVVMDYHYKLVVKENEDKYLVSIPSLETPV

SEQ ID NO: 1820 - protein, 30 aa, Artificial Sequence
  GFR-binding peptide
EVTMNYHYKLVVNKNEDKYLVSIPSMKEPV

SEQ ID NO: 1821 - protein, 30 aa, Artificial Sequence
  GFR-binding peptide
EVVMEYHYKLVVKDYEDKYLVSIPSLETPV

SEQ ID NO: 1822 - protein, 30 aa, Artificial Sequence
  GFR-binding peptide
RVVMNYHYKLIVNSSDDKYLVSIPSLKTPA

SEQ ID NO: 1823 - protein, 30 aa, Artificial Sequence
  GFR-binding peptide
RVVMNYHYKLIVNSSDDKYLVSIPSLQTPA

SEQ ID NO: 1824 - protein, 30 aa, Artificial Sequence
  GFR-binding peptide
KVVMNYHYKLIVNNSSDKYLVSIPSLKTPA

SEQ ID NO: 1825 - protein, 30 aa, Artificial Sequence
  GFR-binding peptide
SVAMGYHYKLYTVVGKDKYLVSIPSLKTPV

SEQ ID NO: 1826 - protein, 30 aa, Artificial Sequence
  GFR-binding peptide
DVVMGYHYKLIIQQKDNKYLVSIPSMKTPT

SEQ ID NO: 1827 - protein, 30 aa, Artificial Sequence
  GFR-binding peptide
EVVMDYHYKLVVNNAADKYLVSIPSLRAPV

SEQ ID NO: 1828 - protein, 30 aa, Artificial Sequence
  GFR-binding peptide
EVVMDYHYKLVVNNASDKYLVSIPSLRTPV

SEQ ID NO: 1829 - protein, 30 aa, Artificial Sequence
  GFR-binding peptide
EEVIMYHYKLLLVRGNDKYLVSIPSTKVPA

SEQ ID NO: 1830 - protein, 30 aa, Artificial Sequence
  GFR-binding peptide
SRVIMYHYKLVKPKRGVKYLVSIPSLAQPV

SEQ ID NO: 1831 - protein, 30 aa, Artificial Sequence
  GFR-binding peptide
SKVIMYHYKLIKPTKGIKYLVSIPSLDQSV

SEQ ID NO: 1832 - protein, 30 aa, Artificial Sequence
  GFR-binding peptide
SKVVMYHYKLVKPTRGVKYLVSIPSLDQPV

SEQ ID NO: 1833 - protein, 32 aa, Artificial Sequence
  GFR-binding peptide
NHQLFYHYKLHQGQHPKIRKYLVSIPSEETPV

SEQ ID NO: 1834 - protein, 32 aa, Artificial Sequence
  GFR-binding peptide
SHEELYHYKLHQGQHPKIRKYLVSIPSQGTPV

SEQ ID NO: 1835 - protein, 32 aa, Artificial Sequence
  GFR-binding peptide
HEELRYHYKLLKPKKRVYEKYLVSIPSHHVRS

SEQ ID NO: 1836 - protein, 32 aa, Artificial Sequence
  GFR-binding peptide
HDELTYHYKLFIPKKRVIEKYLVSIPSLQVQT

SEQ ID NO: 1837 - protein, 30 aa, Artificial Sequence
  GFR-binding peptide
SVAMDEYKFKVVKENEDLYLISIPELETPV

SEQ ID NO: 1838 - protein, 30 aa, Artificial Sequence
  GFR-binding peptide
SVAMNEYKFKVVNKNEDLYLISIPEMKTPV

SEQ ID NO: 1839 - protein, 30 aa, Artificial Sequence
  GFR-binding peptide
SVAMEEYKFKVVKDYEDLYLISIPELETPV

SEQ ID NO: 1840 - protein, 30 aa, Artificial Sequence
  GFR-binding peptide
SVAMNEYKFKIVNSSDDLYLISIPELKTPV

SEQ ID NO: 1841 - protein, 30 aa, Artificial Sequence
  GFR-binding peptide
SVAMNEYKFKIVNSSDDLYLISIPELQTPV

SEQ ID NO: 1842 - protein, 30 aa, Artificial Sequence
  GFR-binding peptide
SVAMNEYKFKIVNNSSDLYLISIPELKTPV

SEQ ID NO: 1843 - protein, 32 aa, Artificial Sequence
  GFR-binding peptide
SVASMGEEYKFKTPVGMDDLYLISIPELKTPV

SEQ ID NO: 1844 - protein, 30 aa, Artificial Sequence
  GFR-binding peptide
SVAMGEYKFKIIQQKDNLYLISIPEMKTPV

SEQ ID NO: 1845 - protein, 30 aa, Artificial Sequence
  GFR-binding peptide
SVAMDEYKFKVVNNAADLYLISIPELRTPV

SEQ ID NO: 1846 - protein, 30 aa, Artificial Sequence
  GFR-binding peptide
SVAMDEYKFKVVNNASDLYLISIPELRTPV

SEQ ID NO: 1847 - protein, 30 aa, Artificial Sequence
  GFR-binding peptide
SVAIMEYKFKLLVRGNDLYLISIPETKTPV

SEQ ID NO: 1848 - protein, 30 aa, Artificial Sequence
  GFR-binding peptide
SVAIMEYKFKVKPKRGVLYLISIPELATPV

SEQ ID NO: 1849 - protein, 30 aa, Artificial Sequence
  GFR-binding peptide
SVAIMEYKFKIKPTKGILYLISIPELDTPV

SEQ ID NO: 1850 - protein, 30 aa, Artificial Sequence
  GFR-binding peptide
SVAVMEYKFKVKPTRGVLYLISIPELDTPV

SEQ ID NO: 1851 - protein, 30 aa, Artificial Sequence
  GFR-binding peptide
EVVMDEYKFKVVKENEDLYLISIPELETPV

SEQ ID NO: 1852 - protein, 30 aa, Artificial Sequence
  GFR-binding peptide
EVTMNEYKFKVVNKNEDLYLISIPEMKEPV

SEQ ID NO: 1853 - protein, 30 aa, Artificial Sequence
  GFR-binding peptide
EVVMEEYKFKVVKDYEDLYLISIPELETPV

SEQ ID NO: 1854 - protein, 30 aa, Artificial Sequence
  GFR-binding peptide
RVVMNEYKFKIVNSSDDLYLISIPELKTPA

SEQ ID NO: 1855 - protein, 30 aa, Artificial Sequence
  GFR-binding peptide
RVVMNEYKFKIVNSSDDLYLISIPELQTPA

SEQ ID NO: 1856 - protein, 30 aa, Artificial Sequence
  GFR-binding peptide
KVVMNEYKFKIVNNSSDLYLISIPELKTPA

SEQ ID NO: 1857 - protein, 32 aa, Artificial Sequence
  GFR-binding peptide
EAVSMGEEYKFKTPVGMDDLYLISIPELKTPV

SEQ ID NO: 1858 - protein, 30 aa, Artificial Sequence
  GFR-binding peptide
DVVMGEYKFKIIQQKDNLYLISIPEMKTPT

SEQ ID NO: 1859 - protein, 30 aa, Artificial Sequence
  GFR-binding peptide
EVVMDEYKFKVVNNAADLYLISIPELRAPV

SEQ ID NO: 1860 - protein, 30 aa, Artificial Sequence
  GFR-binding peptide
EVVMDEYKFKVVNNASDLYLISIPELRTPV

SEQ ID NO: 1861 - protein, 30 aa, Artificial Sequence
  GFR-binding peptide
EEVIMEYKFKLLVRGNDLYLISIPETKVPA

SEQ ID NO: 1862 - protein, 30 aa, Artificial Sequence
  GFR-binding peptide
SRVIMEYKFKVKPKRGVLYLISIPELAQPV

SEQ ID NO: 1863 - protein, 30 aa, Artificial Sequence
  GFR-binding peptide
SKVIMEYKFKIKPTKGILYLISIPELDQSV

SEQ ID NO: 1864 - protein, 30 aa, Artificial Sequence
  GFR-binding peptide
SKVVMEYKFKVKPTRGVLYLISIPELDQPV

SEQ ID NO: 1865 - protein, 32 aa, Artificial Sequence
  GFR-binding peptide
NHQLFEYKFKHQGQHPKIRLYLISIPEEETPV

SEQ ID NO: 1866 - protein, 32 aa, Artificial Sequence
  GFR-binding peptide
SHEELEYKFKHQGQHPKIRLYLISIPEQGTPV

SEQ ID NO: 1867 - protein, 32 aa, Artificial Sequence
  GFR-binding peptide
HEELREYKFKLKPKKRVYELYLISIPEHHVRS

SEQ ID NO: 1868 - protein, 32 aa, Artificial Sequence
  GFR-binding peptide
HDELTEYKFKFIPKKRVIELYLISIPELQVQT

SEQ ID NO: 1869 - protein, 30 aa, Artificial Sequence
  GFR-binding peptide
DVVMDPIKGYVVKENEDFYLMNIPSLETPT

SEQ ID NO: 1870 - protein, 30 aa, Artificial Sequence
  GFR-binding peptide
DVVMNPIKGYVVNKNEDFYLMNIPSMKTPT

SEQ ID NO: 1871 - protein, 30 aa, Artificial Sequence
  GFR-binding peptide
DVVMEPIKGYVVKDYEDFYLMNIPSLETPT

SEQ ID NO: 1872 - protein, 30 aa, Artificial Sequence
  GFR-binding peptide
DVVMNPIKGYIVNSSDDFYLMNIPSLKTPT

SEQ ID NO: 1873 - protein, 30 aa, Artificial Sequence
  GFR-binding peptide
DVVMNPIKGYIVNSSDDFYLMNIPSLQTPT

SEQ ID NO: 1874 - protein, 30 aa, Artificial Sequence
  GFR-binding peptide
DVVMNPIKGYIVNNSSDFYLMNIPSLKTPT

SEQ ID NO: 1875 - protein, 32 aa, Artificial Sequence
  GFR-binding peptide
DVVSMGEPIKGYTPVGMDDFYLMNIPSLKTPT

SEQ ID NO: 1876 - protein, 30 aa, Artificial Sequence
  GFR-binding peptide
DVVMGPIKGYYTVVGKDFYLMNIPSLKTPT

SEQ ID NO: 1877 - protein, 30 aa, Artificial Sequence
  GFR-binding peptide
DVVMDPIKGYVVNNAADFYLMNIPSLRTPT

SEQ ID NO: 1878 - protein, 30 aa, Artificial Sequence
  GFR-binding peptide
DVVMDPIKGYVVNNASDFYLMNIPSLRTPT

SEQ ID NO: 1879 - protein, 30 aa, Artificial Sequence
  GFR-binding peptide
DVVIMPIKGYLLVRGNDFYLMNIPSTKTPT

SEQ ID NO: 1880 - protein, 30 aa, Artificial Sequence
  GFR-binding peptide
DVVIMPIKGYVKPKRGVFYLMNIPSLATPT

SEQ ID NO: 1881 - protein, 30 aa, Artificial Sequence
  GFR-binding peptide
DVVIMPIKGYIKPTKGIFYLMNIPSLDTPT

SEQ ID NO: 1882 - protein, 30 aa, Artificial Sequence
  GFR-binding peptide
DVVVMPIKGYVKPTRGVFYLMNIPSLDTPT

SEQ ID NO: 1883 - protein, 30 aa, Artificial Sequence
  GFR-binding peptide
EVVMDPIKGYVVKENEDFYLMNIPSLETPV

SEQ ID NO: 1884 - protein, 30 aa, Artificial Sequence
  GFR-binding peptide
EVTMNPIKGYVVNKNEDFYLMNIPSMKEPV

SEQ ID NO: 1885 - protein, 30 aa, Artificial Sequence
  GFR-binding peptide
EVVMEPIKGYVVKDYEDFYLMNIPSLETPV

SEQ ID NO: 1886 - protein, 30 aa, Artificial Sequence
  GFR-binding peptide
RVVMNPIKGYIVNSSDDFYLMNIPSLKTPA

SEQ ID NO: 1887 - protein, 30 aa, Artificial Sequence
  GFR-binding peptide
RVVMNPIKGYIVNSSDDFYLMNIPSLQTPA

SEQ ID NO: 1888 - protein, 30 aa, Artificial Sequence
  GFR-binding peptide
KVVMNPIKGYIVNNSSDFYLMNIPSLKTPA

SEQ ID NO: 1889 - protein, 32 aa, Artificial Sequence
  GFR-binding peptide
EAVSMGEPIKGYTPVGMDDFYLMNIPSLKTPV

SEQ ID NO: 1890 - protein, 30 aa, Artificial Sequence
  GFR-binding peptide
SVAMGPIKGYYTVVGKDFYLMNIPSLKTPV

SEQ ID NO: 1891 - protein, 30 aa, Artificial Sequence
  GFR-binding peptide
EVVMDPIKGYVVNNAADFYLMNIPSLRAPV

SEQ ID NO: 1892 - protein, 30 aa, Artificial Sequence
  GFR-binding peptide
EVVMDPIKGYVVNNASDFYLMNIPSLRTPV

SEQ ID NO: 1893 - protein, 30 aa, Artificial Sequence
  GFR-binding peptide
EEVIMPIKGYLLVRGNDFYLMNIPSTKVPA

SEQ ID NO: 1894 - protein, 30 aa, Artificial Sequence
  GFR-binding peptide
SRVIMPIKGYVKPKRGVFYLMNIPSLAQPV

SEQ ID NO: 1895 - protein, 30 aa, Artificial Sequence
  GFR-binding peptide
SKVIMPIKGYIKPTKGIFYLMNIPSLDQSV

SEQ ID NO: 1896 - protein, 30 aa, Artificial Sequence
  GFR-binding peptide
SKVVMPIKGYVKPTRGVFYLMNIPSLDQPV

SEQ ID NO: 1897 - protein, 32 aa, Artificial Sequence
  GFR-binding peptide
NHQLFPIKGYHQGQHPKIRFYLMNIPSEETPV

SEQ ID NO: 1898 - protein, 32 aa, Artificial Sequence
  GFR-binding peptide
SHEELPIKGYHQGQHPKIRFYLMNIPSQGTPV

SEQ ID NO: 1899 - protein, 32 aa, Artificial Sequence
  GFR-binding peptide
HEELRPIKGYLKPKKRVYEFYLMNIPSHHVRS

SEQ ID NO: 1900 - protein, 32 aa, Artificial Sequence
  GFR-binding peptide
HDELTPIKGYFIPKKRVIEFYLMNIPSLQVQT

SEQ ID NO: 1901 - protein, 30 aa, Artificial Sequence
  GFR-binding peptide
EVVMDEYQKYVVKENEDIYLISIPSLEAPV

SEQ ID NO: 1902 - protein, 30 aa, Artificial Sequence
  GFR-binding peptide
EVVMNEYQKYVVNKNEDIYLISIPSMKAPV

SEQ ID NO: 1903 - protein, 30 aa, Artificial Sequence
  GFR-binding peptide
EVVMEEYQKYVVKDYEDIYLISIPSLEAPV

SEQ ID NO: 1904 - protein, 30 aa, Artificial Sequence
  GFR-binding peptide
EVVMNEYQKYIVNSSDDIYLISIPSLKAPV

SEQ ID NO: 1905 - protein, 30 aa, Artificial Sequence
  GFR-binding peptide
EVVMNEYQKYIVNSSDDIYLISIPSLQAPV

SEQ ID NO: 1906 - protein, 30 aa, Artificial Sequence
  GFR-binding peptide
EVVMNEYQKYIVNNSSDIYLISIPSLKAPV

SEQ ID NO: 1907 - protein, 32 aa, Artificial Sequence
  GFR-binding peptide
EVVSMGEEYQKYTPVGMDDIYLISIPSLKAPV

SEQ ID NO: 1908 - protein, 30 aa, Artificial Sequence
  GFR-binding peptide
EVVMGEYQKYYTVVGKDIYLISIPSLKAPV

SEQ ID NO: 1909 - protein, 30 aa, Artificial Sequence
  GFR-binding peptide
EVVMGEYQKYIIQQKDNIYLISIPSMKAPV

SEQ ID NO: 1910 - protein, 30 aa, Artificial Sequence
  GFR-binding peptide
EVVMDEYQKYVVNNASDIYLISIPSLRAPV

SEQ ID NO: 1911 - protein, 30 aa, Artificial Sequence
  GFR-binding peptide
EVVIMEYQKYLLVRGNDIYLISIPSTKAPV

SEQ ID NO: 1912 - protein, 30 aa, Artificial Sequence
  GFR-binding peptide
EVVIMEYQKYVKPKRGVIYLISIPSLAAPV

SEQ ID NO: 1913 - protein, 30 aa, Artificial Sequence
  GFR-binding peptide
EVVIMEYQKYIKPTKGIIYLISIPSLDAPV

SEQ ID NO: 1914 - protein, 30 aa, Artificial Sequence
  GFR-binding peptide
EVVVMEYQKYVKPTRGVIYLISIPSLDAPV

SEQ ID NO: 1915 - protein, 30 aa, Artificial Sequence
  GFR-binding peptide
EVVMDEYQKYVVKENEDIYLISIPSLETPV

SEQ ID NO: 1916 - protein, 30 aa, Artificial Sequence
  GFR-binding peptide
EVTMNEYQKYVVNKNEDIYLISIPSMKEPV

SEQ ID NO: 1917 - protein, 30 aa, Artificial Sequence
  GFR-binding peptide
EVVMEEYQKYVVKDYEDIYLISIPSLETPV

SEQ ID NO: 1918 - protein, 30 aa, Artificial Sequence
  GFR-binding peptide
RVVMNEYQKYIVNSSDDIYLISIPSLKTPA

SEQ ID NO: 1919 - protein, 30 aa, Artificial Sequence
  GFR-binding peptide
RVVMNEYQKYIVNSSDDIYLISIPSLQTPA

SEQ ID NO: 1920 - protein, 30 aa, Artificial Sequence
  GFR-binding peptide
KVVMNEYQKYIVNNSSDIYLISIPSLKTPA

SEQ ID NO: 1921 - protein, 30 aa, Artificial Sequence
  GFR-binding peptide
SVAMGEYQKYYTVVGKDIYLISIPSLKTPV

SEQ ID NO: 1922 - protein, 30 aa, Artificial Sequence
  GFR-binding peptide
DVVMGEYQKYIIQQKDNIYLISIPSMKTPT

SEQ ID NO: 1923 - protein, 30 aa, Artificial Sequence
  GFR-binding peptide
EVVMDEYQKYVVNNASDIYLISIPSLRTPV

SEQ ID NO: 1924 - protein, 30 aa, Artificial Sequence
  GFR-binding peptide
EEVIMEYQKYLLVRGNDIYLISIPSTKVPA

SEQ ID NO: 1925 - protein, 30 aa, Artificial Sequence
  GFR-binding peptide
SRVIMEYQKYVKPKRGVIYLISIPSLAQPV

SEQ ID NO: 1926 - protein, 30 aa, Artificial Sequence
  GFR-binding peptide
SKVIMEYQKYIKPTKGIIYLISIPSLDQSV

SEQ ID NO: 1927 - protein, 30 aa, Artificial Sequence
  GFR-binding peptide
SKVVMEYQKYVKPTRGVIYLISIPSLDQPV

SEQ ID NO: 1928 - protein, 32 aa, Artificial Sequence
  GFR-binding peptide
NHQLFEYQKYHQGQHPKIRIYLISIPSEETPV

SEQ ID NO: 1929 - protein, 32 aa, Artificial Sequence
  GFR-binding peptide
SHEELEYQKYHQGQHPKIRIYLISIPSQGTPV

SEQ ID NO: 1930 - protein, 32 aa, Artificial Sequence
  GFR-binding peptide
HEELREYQKYLKPKKRVYEIYLISIPSHHVRS

SEQ ID NO: 1931 - protein, 32 aa, Artificial Sequence
  GFR-binding peptide
HDELTEYQKYFIPKKRVIEIYLISIPSLQVQT

SEQ ID NO: 1932 - protein, 30 aa, Artificial Sequence
  GFR-binding peptide
EVVMDEYQKYVVKENEDIFLISIPSLETPV

SEQ ID NO: 1933 - protein, 30 aa, Artificial Sequence
  GFR-binding peptide
EVVMNEYQKYVVNKNEDIFLISIPSMKTPV

SEQ ID NO: 1934 - protein, 30 aa, Artificial Sequence
  GFR-binding peptide
EVVMEEYQKYVVKDYEDIFLISIPSLETPV

SEQ ID NO: 1935 - protein, 30 aa, Artificial Sequence
  GFR-binding peptide
EVVMNEYQKYIVNSSDDIFLISIPSLKTPV

SEQ ID NO: 1936 - protein, 30 aa, Artificial Sequence
  GFR-binding peptide
EVVMNEYQKYIVNSSDDIFLISIPSLQTPV

SEQ ID NO: 1937 - protein, 30 aa, Artificial Sequence
  GFR-binding peptide
EVVMNEYQKYIVNNSSDIFLISIPSLKTPV

SEQ ID NO: 1938 - protein, 32 aa, Artificial Sequence
  GFR-binding peptide
EVVSMGEEYQKYTPVGMDDIFLISIPSLKTPV

SEQ ID NO: 1939 - protein, 30 aa, Artificial Sequence
  GFR-binding peptide
EVVMGEYQKYYTVVGKDIFLISIPSLKTPV

SEQ ID NO: 1940 - protein, 30 aa, Artificial Sequence
  GFR-binding peptide
EVVMGEYQKYIIQQKDNIFLISIPSMKTPV

SEQ ID NO: 1941 - protein, 30 aa, Artificial Sequence
  GFR-binding peptide
EVVMDEYQKYVVNNAADIFLISIPSLRTPV

SEQ ID NO: 1942 - protein, 30 aa, Artificial Sequence
  GFR-binding peptide
EVVIMEYQKYLLVRGNDIFLISIPSTKTPV

SEQ ID NO: 1943 - protein, 30 aa, Artificial Sequence
  GFR-binding peptide
EVVIMEYQKYVKPKRGVIFLISIPSLATPV

SEQ ID NO: 1944 - protein, 30 aa, Artificial Sequence
  GFR-binding peptide
EVVIMEYQKYIKPTKGIIFLISIPSLDTPV

SEQ ID NO: 1945 - protein, 30 aa, Artificial Sequence
  GFR-binding peptide
EVVVMEYQKYVKPTRGVIFLISIPSLDTPV

SEQ ID NO: 1946 - protein, 30 aa, Artificial Sequence
  GFR-binding peptide
EVTMNEYQKYVVNKNEDIFLISIPSMKEPV

SEQ ID NO: 1947 - protein, 30 aa, Artificial Sequence
  GFR-binding peptide
RVVMNEYQKYIVNSSDDIFLISIPSLKTPA

SEQ ID NO: 1948 - protein, 30 aa, Artificial Sequence
  GFR-binding peptide
RVVMNEYQKYIVNSSDDIFLISIPSLQTPA

SEQ ID NO: 1949 - protein, 30 aa, Artificial Sequence
  GFR-binding peptide
KVVMNEYQKYIVNNSSDIFLISIPSLKTPA

SEQ ID NO: 1950 - protein, 32 aa, Artificial Sequence
  GFR-binding peptide
EAVSMGEEYQKYTPVGMDDIFLISIPSLKTPV

SEQ ID NO: 1951 - protein, 30 aa, Artificial Sequence
  GFR-binding peptide
SVAMGEYQKYYTVVGKDIFLISIPSLKTPV

SEQ ID NO: 1952 - protein, 30 aa, Artificial Sequence
  GFR-binding peptide
DVVMGEYQKYIIQQKDNIFLISIPSMKTPT

SEQ ID NO: 1953 - protein, 30 aa, Artificial Sequence
  GFR-binding peptide
EVVMDEYQKYVVNNAADIFLISIPSLRAPV

SEQ ID NO: 1954 - protein, 30 aa, Artificial Sequence
  GFR-binding peptide
EEVIMEYQKYLLVRGNDIFLISIPSTKVPA

SEQ ID NO: 1955 - protein, 30 aa, Artificial Sequence
  GFR-binding peptide
SRVIMEYQKYVKPKRGVIFLISIPSLAQPV

SEQ ID NO: 1956 - protein, 30 aa, Artificial Sequence
  GFR-binding peptide
SKVIMEYQKYIKPTKGIIFLISIPSLDQSV

SEQ ID NO: 1957 - protein, 30 aa, Artificial Sequence
  GFR-binding peptide
SKVVMEYQKYVKPTRGVIFLISIPSLDQPV

SEQ ID NO: 1958 - protein, 32 aa, Artificial Sequence
  GFR-binding peptide
NHQLFEYQKYHQGQHPKIRIFLISIPSEETPV

SEQ ID NO: 1959 - protein, 32 aa, Artificial Sequence
  GFR-binding peptide
SHEELEYQKYHQGQHPKIRIFLISIPSQGTPV

SEQ ID NO: 1960 - protein, 32 aa, Artificial Sequence
  GFR-binding peptide
HEELREYQKYLKPKKRVYEIFLISIPSHHVRS

SEQ ID NO: 1961 - protein, 32 aa, Artificial Sequence
  GFR-binding peptide
HDELTEYQKYFIPKKRVIEIFLISIPSLQVQT

SEQ ID NO: 1962 - protein, 30 aa, Artificial Sequence
  GFR-binding peptide
EEVMDDKHHDVVKENEDVYLMSLPKLEVPA

SEQ ID NO: 1963 - protein, 30 aa, Artificial Sequence
  GFR-binding peptide
EEVMNDKHHDVVNKNEDVYLMSLPKMKVPA

SEQ ID NO: 1964 - protein, 30 aa, Artificial Sequence
  GFR-binding peptide
EEVMEDKHHDVVKDYEDVYLMSLPKLEVPA

SEQ ID NO: 1965 - protein, 30 aa, Artificial Sequence
  GFR-binding peptide
EEVMNDKHHDIVNSSDDVYLMSLPKLKVPA

SEQ ID NO: 1966 - protein, 30 aa, Artificial Sequence
  GFR-binding peptide
EEVMNDKHHDIVNSSDDVYLMSLPKLQVPA

SEQ ID NO: 1967 - protein, 30 aa, Artificial Sequence
  GFR-binding peptide
EEVMNDKHHDIVNNSSDVYLMSLPKLKVPA

SEQ ID NO: 1968 - protein, 32 aa, Artificial Sequence
  GFR-binding peptide
EEVSMGEDKHHDTPVGMDDVYLMSLPKLKVPA

SEQ ID NO: 1969 - protein, 30 aa, Artificial Sequence
  GFR-binding peptide
EEVMGDKHHDYTVVGKDVYLMSLPKLKVPA

SEQ ID NO: 1970 - protein, 30 aa, Artificial Sequence
  GFR-binding peptide
EEVMGDKHHDIIQQKDNVYLMSLPKMKVPA

SEQ ID NO: 1971 - protein, 30 aa, Artificial Sequence
  GFR-binding peptide
EEVMDDKHHDVVNNAADVYLMSLPKLRVPA

SEQ ID NO: 1972 - protein, 30 aa, Artificial Sequence
  GFR-binding peptide
EEVMDDKHHDVVNNASDVYLMSLPKLRVPA

SEQ ID NO: 1973 - protein, 30 aa, Artificial Sequence
  GFR-binding peptide
EEVIMDKHHDVKPKRGVVYLMSLPKLAVPA

SEQ ID NO: 1974 - protein, 30 aa, Artificial Sequence
  GFR-binding peptide
EEVIMDKHHDIKPTKGIVYLMSLPKLDVPA

SEQ ID NO: 1975 - protein, 30 aa, Artificial Sequence
  GFR-binding peptide
EEVVMDKHHDVKPTRGVVYLMSLPKLDVPA

SEQ ID NO: 1976 - protein, 30 aa, Artificial Sequence
  GFR-binding peptide
EVVMDDKHHDVVKENEDVYLMSLPKLETPV

SEQ ID NO: 1977 - protein, 30 aa, Artificial Sequence
  GFR-binding peptide
EVTMNDKHHDVVNKNEDVYLMSLPKMKEPV

SEQ ID NO: 1978 - protein, 30 aa, Artificial Sequence
  GFR-binding peptide
EVVMEDKHHDVVKDYEDVYLMSLPKLETPV

SEQ ID NO: 1979 - protein, 30 aa, Artificial Sequence
  GFR-binding peptide
RVVMNDKHHDIVNSSDDVYLMSLPKLKTPA

SEQ ID NO: 1980 - protein, 30 aa, Artificial Sequence
  GFR-binding peptide
RVVMNDKHHDIVNSSDDVYLMSLPKLQTPA

SEQ ID NO: 1981 - protein, 30 aa, Artificial Sequence
  GFR-binding peptide
KVVMNDKHHDIVNNSSDVYLMSLPKLKTPA

SEQ ID NO: 1982 - protein, 32 aa, Artificial Sequence
  GFR-binding peptide
EAVSMGEDKHHDTPVGMDDVYLMSLPKLKTPV

SEQ ID NO: 1983 - protein, 30 aa, Artificial Sequence
  GFR-binding peptide
SVAMGDKHHDYTVVGKDVYLMSLPKLKTPV

SEQ ID NO: 1984 - protein, 30 aa, Artificial Sequence
  GFR-binding peptide
DVVMGDKHHDIIQQKDNVYLMSLPKMKTPT

SEQ ID NO: 1985 - protein, 30 aa, Artificial Sequence
  GFR-binding peptide
EVVMDDKHHDVVNNAADVYLMSLPKLRAPV

SEQ ID NO: 1986 - protein, 30 aa, Artificial Sequence
  GFR-binding peptide
EVVMDDKHHDVVNNASDVYLMSLPKLRTPV

SEQ ID NO: 1987 - protein, 30 aa, Artificial Sequence
  GFR-binding peptide
SRVIMDKHHDVKPKRGVVYLMSLPKLAQPV

SEQ ID NO: 1988 - protein, 30 aa, Artificial Sequence
  GFR-binding peptide
SKVIMDKHHDIKPTKGIVYLMSLPKLDQSV

SEQ ID NO: 1989 - protein, 30 aa, Artificial Sequence
  GFR-binding peptide
SKVVMDKHHDVKPTRGVVYLMSLPKLDQPV

SEQ ID NO: 1990 - protein, 32 aa, Artificial Sequence
  GFR-binding peptide
NHQLFDKHHDHQGQHPKIRVYLMSLPKEETPV

SEQ ID NO: 1991 - protein, 32 aa, Artificial Sequence
  GFR-binding peptide
SHEELDKHHDHQGQHPKIRVYLMSLPKQGTPV

SEQ ID NO: 1992 - protein, 32 aa, Artificial Sequence
  GFR-binding peptide
HEELRDKHHDLKPKKRVYEVYLMSLPKHHVRS

SEQ ID NO: 1993 - protein, 32 aa, Artificial Sequence
  GFR-binding peptide
HDELTDKHHDFIPKKRVIEVYLMSLPKLQVQT

SEQ ID NO: 1994 - protein, 30 aa, Artificial Sequence
  GFR-binding peptide
SRVMDNSLQEVVKENEDYYVIPLPELEQPV

SEQ ID NO: 1995 - protein, 30 aa, Artificial Sequence
  GFR-binding peptide
SRVMNNSLQEVVNKNEDYYVIPLPEMKQPV

SEQ ID NO: 1996 - protein, 30 aa, Artificial Sequence
  GFR-binding peptide
SRVMENSLQEVVKDYEDYYVIPLPELEQPV

SEQ ID NO: 1997 - protein, 30 aa, Artificial Sequence
  GFR-binding peptide
SRVMNNSLQEIVNSSDDYYVIPLPELKQPV

SEQ ID NO: 1998 - protein, 30 aa, Artificial Sequence
  GFR-binding peptide
SRVMNNSLQEIVNSSDDYYVIPLPELQQPV

SEQ ID NO: 1999 - protein, 30 aa, Artificial Sequence
  GFR-binding peptide
SRVMNNSLQEIVNNSSDYYVIPLPELKQPV

SEQ ID NO: 2000 - protein, 32 aa, Artificial Sequence
  GFR-binding peptide
SRVSMGENSLQETPVGMDDYYVIPLPELKQPV

SEQ ID NO: 2001 - protein, 30 aa, Artificial Sequence
  GFR-binding peptide
SRVMGNSLQEYTVVGKDYYVIPLPELKQPV

SEQ ID NO: 2002 - protein, 30 aa, Artificial Sequence
  GFR-binding peptide
SRVMGNSLQEIIQQKDNYYVIPLPEMKQPV

SEQ ID NO: 2003 - protein, 30 aa, Artificial Sequence
  GFR-binding peptide
SRVMDNSLQEVVNNAADYYVIPLPELRQPV

SEQ ID NO: 2004 - protein, 30 aa, Artificial Sequence
  GFR-binding peptide
SRVMDNSLQEVVNNASDYYVIPLPELRQPV

SEQ ID NO: 2005 - protein, 30 aa, Artificial Sequence
  GFR-binding peptide
SRVIMNSLQELLVRGNDYYVIPLPETKQPV

SEQ ID NO: 2006 - protein, 30 aa, Artificial Sequence
  GFR-binding peptide
SRVIMNSLQEIKPTKGIYYVIPLPELDQPV

SEQ ID NO: 2007 - protein, 30 aa, Artificial Sequence
  GFR-binding peptide
SRVVMNSLQEVKPTRGVYYVIPLPELDQPV

SEQ ID NO: 2008 - protein, 30 aa, Artificial Sequence
  GFR-binding peptide
EVVMDNSLQEVVKENEDYYVIPLPELETPV

SEQ ID NO: 2009 - protein, 30 aa, Artificial Sequence
  GFR-binding peptide
EVTMNNSLQEVVNKNEDYYVIPLPEMKEPV

SEQ ID NO: 2010 - protein, 30 aa, Artificial Sequence
  GFR-binding peptide
EVVMENSLQEVVKDYEDYYVIPLPELETPV

SEQ ID NO: 2011 - protein, 30 aa, Artificial Sequence
  GFR-binding peptide
RVVMNNSLQEIVNSSDDYYVIPLPELKTPA

SEQ ID NO: 2012 - protein, 30 aa, Artificial Sequence
  GFR-binding peptide
RVVMNNSLQEIVNSSDDYYVIPLPELQTPA

SEQ ID NO: 2013 - protein, 30 aa, Artificial Sequence
  GFR-binding peptide
KVVMNNSLQEIVNNSSDYYVIPLPELKTPA

SEQ ID NO: 2014 - protein, 32 aa, Artificial Sequence
  GFR-binding peptide
EAVSMGENSLQETPVGMDDYYVIPLPELKTPV

SEQ ID NO: 2015 - protein, 30 aa, Artificial Sequence
  GFR-binding peptide
SVAMGNSLQEYTVVGKDYYVIPLPELKTPV

SEQ ID NO: 2016 - protein, 30 aa, Artificial Sequence
  GFR-binding peptide
DVVMGNSLQEIIQQKDNYYVIPLPEMKTPT

SEQ ID NO: 2017 - protein, 30 aa, Artificial Sequence
  GFR-binding peptide
EVVMDNSLQEVVNNAADYYVIPLPELRAPV

SEQ ID NO: 2018 - protein, 30 aa, Artificial Sequence
  GFR-binding peptide
EVVMDNSLQEVVNNASDYYVIPLPELRTPV

SEQ ID NO: 2019 - protein, 30 aa, Artificial Sequence
  GFR-binding peptide
EEVIMNSLQELLVRGNDYYVIPLPETKVPA

SEQ ID NO: 2020 - protein, 30 aa, Artificial Sequence
  GFR-binding peptide
SKVIMNSLQEIKPTKGIYYVIPLPELDQSV

SEQ ID NO: 2021 - protein, 30 aa, Artificial Sequence
  GFR-binding peptide
SKVVMNSLQEVKPTRGVYYVIPLPELDQPV

SEQ ID NO: 2022 - protein, 32 aa, Artificial Sequence
  GFR-binding peptide
NHQLFNSLQEHQGQHPKIRYYVIPLPEEETPV

SEQ ID NO: 2023 - protein, 32 aa, Artificial Sequence
  GFR-binding peptide
SHEELNSLQEHQGQHPKIRYYVIPLPEQGTPV

SEQ ID NO: 2024 - protein, 32 aa, Artificial Sequence
  GFR-binding peptide
HEELRNSLQELKPKKRVYEYYVIPLPEHHVRS

SEQ ID NO: 2025 - protein, 32 aa, Artificial Sequence
  GFR-binding peptide
HDELTNSLQEFIPKKRVIEYYVIPLPELQVQT

SEQ ID NO: 2026 - protein, 30 aa, Artificial Sequence
  GFR-binding peptide
SKVMDNSLQEVVKENEDYYLITLPELEQSV

SEQ ID NO: 2027 - protein, 30 aa, Artificial Sequence
  GFR-binding peptide
SKVMNNSLQEVVNKNEDYYLITLPEMKQSV

SEQ ID NO: 2028 - protein, 30 aa, Artificial Sequence
  GFR-binding peptide
SKVMENSLQEVVKDYEDYYLITLPELEQSV

SEQ ID NO: 2029 - protein, 30 aa, Artificial Sequence
  GFR-binding peptide
SKVMNNSLQEIVNSSDDYYLITLPELKQSV

SEQ ID NO: 2030 - protein, 30 aa, Artificial Sequence
  GFR-binding peptide
SKVMNNSLQEIVNSSDDYYLITLPELQQSV

SEQ ID NO: 2031 - protein, 30 aa, Artificial Sequence
  GFR-binding peptide
SKVMNNSLQEIVNNSSDYYLITLPELKQSV

SEQ ID NO: 2032 - protein, 32 aa, Artificial Sequence
  GFR-binding peptide
SKVSMGENSLQETPVGMDDYYLITLPELKQSV

SEQ ID NO: 2033 - protein, 30 aa, Artificial Sequence
  GFR-binding peptide
SKVMGNSLQEYTVVGKDYYLITLPELKQSV

SEQ ID NO: 2034 - protein, 30 aa, Artificial Sequence
  GFR-binding peptide
SKVMGNSLQEIIQQKDNYYLITLPEMKQSV

SEQ ID NO: 2035 - protein, 30 aa, Artificial Sequence
  GFR-binding peptide
SKVMDNSLQEVVNNAADYYLITLPELRQSV

SEQ ID NO: 2036 - protein, 30 aa, Artificial Sequence
  GFR-binding peptide
SKVMDNSLQEVVNNASDYYLITLPELRQSV

SEQ ID NO: 2037 - protein, 30 aa, Artificial Sequence
  GFR-binding peptide
SKVIMNSLQELLVRGNDYYLITLPETKQSV

SEQ ID NO: 2038 - protein, 30 aa, Artificial Sequence
  GFR-binding peptide
SKVIMNSLQEVKPKRGVYYLITLPELAQSV

SEQ ID NO: 2039 - protein, 30 aa, Artificial Sequence
  GFR-binding peptide
SKVVMNSLQEVKPTRGVYYLITLPELDQSV

SEQ ID NO: 2040 - protein, 30 aa, Artificial Sequence
  GFR-binding peptide
EVVMDNSLQEVVKENEDYYLITLPELETPV

SEQ ID NO: 2041 - protein, 30 aa, Artificial Sequence
  GFR-binding peptide
EVTMNNSLQEVVNKNEDYYLITLPEMKEPV

SEQ ID NO: 2042 - protein, 30 aa, Artificial Sequence
  GFR-binding peptide
EVVMENSLQEVVKDYEDYYLITLPELETPV

SEQ ID NO: 2043 - protein, 30 aa, Artificial Sequence
  GFR-binding peptide
RVVMNNSLQEIVNSSDDYYLITLPELKTPA

SEQ ID NO: 2044 - protein, 30 aa, Artificial Sequence
  GFR-binding peptide
RVVMNNSLQEIVNSSDDYYLITLPELQTPA

SEQ ID NO: 2045 - protein, 30 aa, Artificial Sequence
  GFR-binding peptide
KVVMNNSLQEIVNNSSDYYLITLPELKTPA

SEQ ID NO: 2046 - protein, 32 aa, Artificial Sequence
  GFR-binding peptide
EAVSMGENSLQETPVGMDDYYLITLPELKTPV

SEQ ID NO: 2047 - protein, 30 aa, Artificial Sequence
  GFR-binding peptide
SVAMGNSLQEYTVVGKDYYLITLPELKTPV

SEQ ID NO: 2048 - protein, 30 aa, Artificial Sequence
  GFR-binding peptide
DVVMGNSLQEIIQQKDNYYLITLPEMKTPT

SEQ ID NO: 2049 - protein, 30 aa, Artificial Sequence
  GFR-binding peptide
EVVMDNSLQEVVNNAADYYLITLPELRAPV

SEQ ID NO: 2050 - protein, 30 aa, Artificial Sequence
  GFR-binding peptide
EVVMDNSLQEVVNNASDYYLITLPELRTPV

SEQ ID NO: 2051 - protein, 30 aa, Artificial Sequence
  GFR-binding peptide
EEVIMNSLQELLVRGNDYYLITLPETKVPA

SEQ ID NO: 2052 - protein, 30 aa, Artificial Sequence
  GFR-binding peptide
SRVIMNSLQEVKPKRGVYYLITLPELAQPV

SEQ ID NO: 2053 - protein, 32 aa, Artificial Sequence
  GFR-binding peptide
NHQLFNSLQEHQGQHPKIRYYLITLPEEETPV

SEQ ID NO: 2054 - protein, 32 aa, Artificial Sequence
  GFR-binding peptide
SHEELNSLQEHQGQHPKIRYYLITLPEQGTPV

SEQ ID NO: 2055 - protein, 32 aa, Artificial Sequence
  GFR-binding peptide
HEELRNSLQELKPKKRVYEYYLITLPEHHVRS

SEQ ID NO: 2056 - protein, 32 aa, Artificial Sequence
  GFR-binding peptide
HDELTNSLQEFIPKKRVIEYYLITLPELQVQT

SEQ ID NO: 2057 - protein, 30 aa, Artificial Sequence
  GFR-binding peptide
SKVMDNSLQEVVKENEDYYLITLPELEQPV

SEQ ID NO: 2058 - protein, 30 aa, Artificial Sequence
  GFR-binding peptide
SKVMNNSLQEVVNKNEDYYLITLPEMKQPV

SEQ ID NO: 2059 - protein, 30 aa, Artificial Sequence
  GFR-binding peptide
SKVMENSLQEVVKDYEDYYLITLPELEQPV

SEQ ID NO: 2060 - protein, 30 aa, Artificial Sequence
  GFR-binding peptide
SKVMNNSLQEIVNSSDDYYLITLPELKQPV

SEQ ID NO: 2061 - protein, 30 aa, Artificial Sequence
  GFR-binding peptide
SKVMNNSLQEIVNSSDDYYLITLPELQQPV

SEQ ID NO: 2062 - protein, 30 aa, Artificial Sequence
  GFR-binding peptide
SKVMNNSLQEIVNNSSDYYLITLPELKQPV

SEQ ID NO: 2063 - protein, 32 aa, Artificial Sequence
  GFR-binding peptide
SKVSMGENSLQETPVGMDDYYLITLPELKQPV

SEQ ID NO: 2064 - protein, 30 aa, Artificial Sequence
  GFR-binding peptide
SKVMGNSLQEYTVVGKDYYLITLPELKQPV

SEQ ID NO: 2065 - protein, 30 aa, Artificial Sequence
  GFR-binding peptide
SKVMGNSLQEIIQQKDNYYLITLPEMKQPV

SEQ ID NO: 2066 - protein, 30 aa, Artificial Sequence
  GFR-binding peptide
SKVMDNSLQEVVNNAADYYLITLPELRQPV

SEQ ID NO: 2067 - protein, 30 aa, Artificial Sequence
  GFR-binding peptide
SKVMDNSLQEVVNNASDYYLITLPELRQPV

SEQ ID NO: 2068 - protein, 30 aa, Artificial Sequence
  GFR-binding peptide
SKVIMNSLQELLVRGNDYYLITLPETKQPV

SEQ ID NO: 2069 - protein, 30 aa, Artificial Sequence
  GFR-binding peptide
SKVIMNSLQEVKPKRGVYYLITLPELAQPV

SEQ ID NO: 2070 - protein, 30 aa, Artificial Sequence
  GFR-binding peptide
SKVIMNSLQEIKPTKGIYYLITLPELDQPV

SEQ ID NO: 2071 - protein, 32 aa, Artificial Sequence
  GFR-binding peptide
NHQELSMEGIHQGQHPKIRMIQMTINSQGTPV

SEQ ID NO: 2072 - protein, 30 aa, Artificial Sequence
  GFR-binding peptide
EVVMDSMEGIVVKENEDMIQMTINSLETPV

SEQ ID NO: 2073 - protein, 30 aa, Artificial Sequence
  GFR-binding peptide
EVTMNSMEGIVVNKNEDMIQMTINSMKEPV

SEQ ID NO: 2074 - protein, 30 aa, Artificial Sequence
  GFR-binding peptide
EVVMESMEGIVVKDYEDMIQMTINSLETPV

SEQ ID NO: 2075 - protein, 30 aa, Artificial Sequence
  GFR-binding peptide
RVVMNSMEGIIVNSSDDMIQMTINSLKTPA

SEQ ID NO: 2076 - protein, 30 aa, Artificial Sequence
  GFR-binding peptide
RVVMNSMEGIIVNSSDDMIQMTINSLQTPA

SEQ ID NO: 2077 - protein, 30 aa, Artificial Sequence
  GFR-binding peptide
KVVMNSMEGIIVNNSSDMIQMTINSLKTPA

SEQ ID NO: 2078 - protein, 32 aa, Artificial Sequence
  GFR-binding peptide
EAVSMGESMEGITPVGMDDMIQMTINSLKTPV

SEQ ID NO: 2079 - protein, 30 aa, Artificial Sequence
  GFR-binding peptide
SVAMGSMEGIYTVVGKDMIQMTINSLKTPV

SEQ ID NO: 2080 - protein, 30 aa, Artificial Sequence
  GFR-binding peptide
DVVMGSMEGIIIQQKDNMIQMTINSMKTPT

SEQ ID NO: 2081 - protein, 30 aa, Artificial Sequence
  GFR-binding peptide
EVVMDSMEGIVVNNAADMIQMTINSLRAPV

SEQ ID NO: 2082 - protein, 30 aa, Artificial Sequence
  GFR-binding peptide
EVVMDSMEGIVVNNASDMIQMTINSLRTPV

SEQ ID NO: 2083 - protein, 30 aa, Artificial Sequence
  GFR-binding peptide
EEVIMSMEGILLVRGNDMIQMTINSTKVPA

SEQ ID NO: 2084 - protein, 30 aa, Artificial Sequence
  GFR-binding peptide
SRVIMSMEGIVKPKRGVMIQMTINSLAQPV

SEQ ID NO: 2085 - protein, 30 aa, Artificial Sequence
  GFR-binding peptide
SKVIMSMEGIIKPTKGIMIQMTINSLDQSV

SEQ ID NO: 2086 - protein, 30 aa, Artificial Sequence
  GFR-binding peptide
SKVVMSMEGIVKPTRGVMIQMTINSLDQPV

SEQ ID NO: 2087 - protein, 32 aa, Artificial Sequence
  GFR-binding peptide
SHEELSMEGIHQGQHPKIRMIQMTINSQGTPV

SEQ ID NO: 2088 - protein, 32 aa, Artificial Sequence
  GFR-binding peptide
HEELRSMEGILKPKKRVYEMIQMTINSHHVRS

SEQ ID NO: 2089 - protein, 32 aa, Artificial Sequence
  GFR-binding peptide
HDELTSMEGIFIPKKRVIEMIQMTINSLQVQT

SEQ ID NO: 2090 - protein, 32 aa, Artificial Sequence
  GFR-binding peptide
SHELFSMEGLHQGQHPKIRMIQMTINSEETPV

SEQ ID NO: 2091 - protein, 30 aa, Artificial Sequence
  GFR-binding peptide
EVVMDSMEGLVVKENEDMIQMTINSLETPV

SEQ ID NO: 2092 - protein, 30 aa, Artificial Sequence
  GFR-binding peptide
EVTMNSMEGLVVNKNEDMIQMTINSMKEPV

SEQ ID NO: 2093 - protein, 30 aa, Artificial Sequence
  GFR-binding peptide
EVVMESMEGLVVKDYEDMIQMTINSLETPV

SEQ ID NO: 2094 - protein, 30 aa, Artificial Sequence
  GFR-binding peptide
RVVMNSMEGLIVNSSDDMIQMTINSLKTPA

SEQ ID NO: 2095 - protein, 30 aa, Artificial Sequence
  GFR-binding peptide
RVVMNSMEGLIVNSSDDMIQMTINSLQTPA

SEQ ID NO: 2096 - protein, 30 aa, Artificial Sequence
  GFR-binding peptide
KVVMNSMEGLIVNNSSDMIQMTINSLKTPA

SEQ ID NO: 2097 - protein, 32 aa, Artificial Sequence
  GFR-binding peptide
EAVSMGESMEGLTPVGMDDMIQMTINSLKTPV

SEQ ID NO: 2098 - protein, 30 aa, Artificial Sequence
  GFR-binding peptide
SVAMGSMEGLYTVVGKDMIQMTINSLKTPV

SEQ ID NO: 2099 - protein, 30 aa, Artificial Sequence
  GFR-binding peptide
DVVMGSMEGLIIQQKDNMIQMTINSMKTPT

SEQ ID NO: 2100 - protein, 30 aa, Artificial Sequence
  GFR-binding peptide
EVVMDSMEGLVVNNAADMIQMTINSLRAPV

SEQ ID NO: 2101 - protein, 30 aa, Artificial Sequence
  GFR-binding peptide
EVVMDSMEGLVVNNASDMIQMTINSLRTPV

SEQ ID NO: 2102 - protein, 30 aa, Artificial Sequence
  GFR-binding peptide
EEVIMSMEGLLLVRGNDMIQMTINSTKVPA

SEQ ID NO: 2103 - protein, 30 aa, Artificial Sequence
  GFR-binding peptide
SRVIMSMEGLVKPKRGVMIQMTINSLAQPV

SEQ ID NO: 2104 - protein, 30 aa, Artificial Sequence
  GFR-binding peptide
SKVIMSMEGLIKPTKGIMIQMTINSLDQSV

SEQ ID NO: 2105 - protein, 30 aa, Artificial Sequence
  GFR-binding peptide
SKVVMSMEGLVKPTRGVMIQMTINSLDQPV

SEQ ID NO: 2106 - protein, 32 aa, Artificial Sequence
  GFR-binding peptide
NHQLFSMEGLHQGQHPKIRMIQMTINSEETPV

SEQ ID NO: 2107 - protein, 32 aa, Artificial Sequence
  GFR-binding peptide
HEELRSMEGLLKPKKRVYEMIQMTINSHHVRS

SEQ ID NO: 2108 - protein, 32 aa, Artificial Sequence
  GFR-binding peptide
HDELTSMEGLFIPKKRVIEMIQMTINSLQVQT

SEQ ID NO: 2109 - protein, 32 aa, Artificial Sequence
  GFR-binding peptide
HEELTVQVEKFIPKKRVIEVKAVKVSRLQVRS

SEQ ID NO: 2110 - protein, 30 aa, Artificial Sequence
  GFR-binding peptide
EVVMDVQVEKVVKENEDVKAVKVSRLETPV

SEQ ID NO: 2111 - protein, 30 aa, Artificial Sequence
  GFR-binding peptide
EVTMNVQVEKVVNKNEDVKAVKVSRMKEPV

SEQ ID NO: 2112 - protein, 30 aa, Artificial Sequence
  GFR-binding peptide
EVVMEVQVEKVVKDYEDVKAVKVSRLETPV

SEQ ID NO: 2113 - protein, 30 aa, Artificial Sequence
  GFR-binding peptide
RVVMNVQVEKIVNSSDDVKAVKVSRLKTPA

SEQ ID NO: 2114 - protein, 30 aa, Artificial Sequence
  GFR-binding peptide
RVVMNVQVEKIVNSSDDVKAVKVSRLQTPA

SEQ ID NO: 2115 - protein, 30 aa, Artificial Sequence
  GFR-binding peptide
KVVMNVQVEKIVNNSSDVKAVKVSRLKTPA

SEQ ID NO: 2116 - protein, 32 aa, Artificial Sequence
  GFR-binding peptide
EAVSMGEVQVEKTPVGMDDVKAVKVSRLKTPV

SEQ ID NO: 2117 - protein, 30 aa, Artificial Sequence
  GFR-binding peptide
SVAMGVQVEKYTVVGKDVKAVKVSRLKTPV

SEQ ID NO: 2118 - protein, 30 aa, Artificial Sequence
  GFR-binding peptide
DVVMGVQVEKIIQQKDNVKAVKVSRMKTPT

SEQ ID NO: 2119 - protein, 30 aa, Artificial Sequence
  GFR-binding peptide
EVVMDVQVEKVVNNAADVKAVKVSRLRAPV

SEQ ID NO: 2120 - protein, 30 aa, Artificial Sequence
  GFR-binding peptide
EVVMDVQVEKVVNNASDVKAVKVSRLRTPV

SEQ ID NO: 2121 - protein, 30 aa, Artificial Sequence
  GFR-binding peptide
EEVIMVQVEKLLVRGNDVKAVKVSRTKVPA

SEQ ID NO: 2122 - protein, 30 aa, Artificial Sequence
  GFR-binding peptide
SRVIMVQVEKVKPKRGVVKAVKVSRLAQPV

SEQ ID NO: 2123 - protein, 30 aa, Artificial Sequence
  GFR-binding peptide
SKVIMVQVEKIKPTKGIVKAVKVSRLDQSV

SEQ ID NO: 2124 - protein, 30 aa, Artificial Sequence
  GFR-binding peptide
SKVVMVQVEKVKPTRGVVKAVKVSRLDQPV

SEQ ID NO: 2125 - protein, 32 aa, Artificial Sequence
  GFR-binding peptide
NHQLFVQVEKHQGQHPKIRVKAVKVSREETPV

SEQ ID NO: 2126 - protein, 32 aa, Artificial Sequence
  GFR-binding peptide
SHEELVQVEKHQGQHPKIRVKAVKVSRQGTPV

SEQ ID NO: 2127 - protein, 32 aa, Artificial Sequence
  GFR-binding peptide
HDELTVQVEKFIPKKRVIEVKAVKVSRLQVQT

SEQ ID NO: 2128 - protein, 32 aa, Artificial Sequence
  GFR-binding peptide
HDELRVTAKKLKPKKRVYEIKRVQVPRHHVQT

SEQ ID NO: 2129 - protein, 30 aa, Artificial Sequence
  GFR-binding peptide
EVVMDVTAKKVVKENEDIKRVQVPRLETPV

SEQ ID NO: 2130 - protein, 30 aa, Artificial Sequence
  GFR-binding peptide
EVTMNVTAKKVVNKNEDIKRVQVPRMKEPV

SEQ ID NO: 2131 - protein, 30 aa, Artificial Sequence
  GFR-binding peptide
EVVMEVTAKKVVKDYEDIKRVQVPRLETPV

SEQ ID NO: 2132 - protein, 30 aa, Artificial Sequence
  GFR-binding peptide
RVVMNVTAKKIVNSSDDIKRVQVPRLKTPA

SEQ ID NO: 2133 - protein, 30 aa, Artificial Sequence
  GFR-binding peptide
RVVMNVTAKKIVNSSDDIKRVQVPRLQTPA

SEQ ID NO: 2134 - protein, 30 aa, Artificial Sequence
  GFR-binding peptide
KVVMNVTAKKIVNNSSDIKRVQVPRLKTPA

SEQ ID NO: 2135 - protein, 32 aa, Artificial Sequence
  GFR-binding peptide
EAVSMGEVTAKKTPVGMDDIKRVQVPRLKTPV

SEQ ID NO: 2136 - protein, 30 aa, Artificial Sequence
  GFR-binding peptide
SVAMGVTAKKYTVVGKDIKRVQVPRLKTPV

SEQ ID NO: 2137 - protein, 30 aa, Artificial Sequence
  GFR-binding peptide
DVVMGVTAKKIIQQKDNIKRVQVPRMKTPT

SEQ ID NO: 2138 - protein, 30 aa, Artificial Sequence
  GFR-binding peptide
EVVMDVTAKKVVNNAADIKRVQVPRLRAPV

SEQ ID NO: 2139 - protein, 30 aa, Artificial Sequence
  GFR-binding peptide
EVVMDVTAKKVVNNASDIKRVQVPRLRTPV

SEQ ID NO: 2140 - protein, 30 aa, Artificial Sequence
  GFR-binding peptide
EEVIMVTAKKLLVRGNDIKRVQVPRTKVPA

SEQ ID NO: 2141 - protein, 30 aa, Artificial Sequence
  GFR-binding peptide
SRVIMVTAKKVKPKRGVIKRVQVPRLAQPV

SEQ ID NO: 2142 - protein, 30 aa, Artificial Sequence
  GFR-binding peptide
SKVIMVTAKKIKPTKGIIKRVQVPRLDQSV

SEQ ID NO: 2143 - protein, 30 aa, Artificial Sequence
  GFR-binding peptide
SKVVMVTAKKVKPTRGVIKRVQVPRLDQPV

SEQ ID NO: 2144 - protein, 32 aa, Artificial Sequence
  GFR-binding peptide
NHQLFVTAKKHQGQHPKIRIKRVQVPREETPV

SEQ ID NO: 2145 - protein, 32 aa, Artificial Sequence
  GFR-binding peptide
SHEELVTAKKHQGQHPKIRIKRVQVPRQGTPV

SEQ ID NO: 2146 - protein, 32 aa, Artificial Sequence
  GFR-binding peptide
HEELRVTAKKLKPKKRVYEIKRVQVPRHHVRS

SEQ ID NO: 2147 - protein, 40 aa, Artificial Sequence
  GFR-binding peptide
IPKASSAPVGQRPVQMRKIDKGVVTYKKATVSSVEESGSL

SEQ ID NO: 2148 - protein, 38 aa, Artificial Sequence
  GFR-binding peptide
KASSVPQEERPVQMRKIGGGGGGGKKATVMIVRSSKSS

SEQ ID NO: 2149 - protein, 30 aa, Artificial Sequence
  GFR-binding peptide
VSQAARPVQTRKIDDMGVPTKKATVAAVKS

SEQ ID NO: 2150 - protein, 41 aa, Artificial Sequence
  GFR-binding peptide
PTSSAPTDLRSVKMAKVEIVRKKPIFKEVQVDMVVKASGSH

SEQ ID NO: 2151 - protein, 38 aa, Artificial Sequence
  GFR-binding peptide
PTSSVPTGGRSVKMAKVDKGVVTYKEVQVMVVAESKSS

SEQ ID NO: 2152 - protein, 40 aa, Artificial Sequence
  GFR-binding peptide
IPKASSVPQSSSNITMQIMGGGGGGGIGEMSSSVKSSGSL

SEQ ID NO: 2153 - protein, 41 aa, Artificial Sequence
  GFR-binding peptide
KASSSRVKMSNITVQIMRIKPHQGQHIGEMSVVEEHASGSH

SEQ ID NO: 2154 - protein, 32 aa, Artificial Sequence
  GFR-binding peptide
VPTAAEPLTMLYYEIVRKKPIFEQLSNMVEHS

SEQ ID NO: 2155 - protein, 38 aa, Artificial Sequence
  GFR-binding peptide
EPSSSRVRLEPLTTLYYGGGGGGGEQLSNVVEEHSKSS

SEQ ID NO: 2156 - protein, 34 aa, Artificial Sequence
  GFR-binding peptide
APVKMEPLPTVYYDDMGVPTEQLSNDMVEESGSL

SEQ ID NO: 2157 - protein, 40 aa, Artificial Sequence
  GFR-binding peptide
EPSSVSQAAEPLPIVYYRIKPHQGQHEQLSNMIVKSSKSS

SEQ ID NO: 2158 - protein, 10 aa, Artificial Sequence
  Peptide reported in US20130259924, SEQ ID NO:21667
VEQLSNMVVK

SEQ ID NO: 2159 - protein, 22 aa, Artificial Sequence
  Peptide reported in US5436228, SEQ ID NO:14
PIIYYVGRNVRVEQLSNMVVRA

SEQ ID NO: 2160 - protein, 23 aa, Artificial Sequence
  Comparative sequence
PIIYYVGRNVRVEQLSNMVVRRA

SEQ ID NO: 2161 - protein, 29 aa, Artificial Sequence
  Comparative sequence
DPLPIIYYVGRNVRVEQLSNMVVRACKCS

SEQ ID NO: 2162 - protein, 19 aa, Artificial Sequence
  Peptide reported in US20040039543, SEQ ID NO:107
ENVNLKKYRNMIVKSCGCH

SEQ ID NO: 2163 - protein, 15 aa, Artificial Sequence
  Peptide reported in US20130332133, SEQ ID NO:16645
TPTYSRPVQKAELTR

SEQ ID NO: 2164 - protein, 29 aa, Artificial Sequence
  Peptide reported in US20120216318, SEQ ID NO:347659
HIRSTTSSYVSLKSNITNRTIQTPTYSYT

SEQ ID NO: 2165 - protein, 38 aa, Artificial Sequence
  Peptide reported in US20110300149, SEQ ID NO:32
LMDLARMPSCLRGERAVPQDTTGYFTWSSNITPLNFIF

SEQ ID NO: 2166 - protein, 19 aa, Artificial Sequence
  Peptide reported in WO2013040142, SEQ ID NO:101213
NEVLRFCGIQVPEGDEPLT

SEQ ID NO: 2167 - protein, 21 aa, Artificial Sequence
  Peptide reported in WO2013040142, SEQ ID NO:89702
LNEVLRFCGIQVPEGDEPLTY

SEQ ID NO: 2168 - protein, 25 aa, Artificial Sequence
  Peptide reported in US20080081768, SEQ ID NO:28800
MSRVLFEPLTFLQTGSGLPDEKTLG

SEQ ID NO: 2169 - protein, 17 aa, Artificial Sequence
  Peptide reported in WO2013040142, SEQ ID NO:3157977
IKSPARHSAPTHQEPLP

SEQ ID NO: 2170 - protein, 21 aa, Artificial Sequence
  Peptide reported in JP06025288, SEQ ID NO:8
NPGASASPCCVSQDLEPLPIL

SEQ ID NO: 2171 - protein, 26 aa, Artificial Sequence
  Peptide reported in WO2013040142, SEQ ID NO:3137100
SHQSAGDSIKSPARHSAPTHQEPLPD

SEQ ID NO: 2172 - protein, 16 aa, Artificial Sequence
  Peptide reported in WO2013040142, SEQ ID NO:543064
PNYSVPAGNKPLSERE

SEQ ID NO: 2173 - protein, 23 aa, Artificial Sequence
  Peptide reported in WO2013040142, SEQ ID NO:866827
TKPLSSLLFPNWNTTTTPTPPRP

SEQ ID NO: 2174 - protein, 23 aa, Artificial Sequence
  Peptide reported in WO2013040142, SEQ ID NO:642255
CVTKPLSSLLFPNWNTTTTPTPP

SEQ ID NO: 2175 - protein, 21 aa, Artificial Sequence
  Peptide reported in WO2013040142, SEQ ID NO:133294
VGAAWWLREQGSPINTLAVPA

SEQ ID NO: 2176 - protein, 38 aa, Artificial Sequence
  Peptide reported in US20070083334, SEQ ID NO:958173
MQCRELVTQVTEEPISQTEDGEEQESTTTPRLKGQKKE

SEQ ID NO: 2177 - protein, 36 aa, Artificial Sequence
  Peptide reported in US8969040, SEQ ID NO:89
VPTKLEPISVLYKDDMGVPTLKYHYEGMAVSECGCR

SEQ ID NO: 2178 - protein, 36 aa, Artificial Sequence
  Peptide reported in US20120246748, SEQ ID NO:119912
SPISILVVPELDASLPEKRPSLDGFEALLVYNAPKA

SEQ ID NO: 2179 - protein, 37 aa, Artificial Sequence
  Peptide reported in US20040031072, SEQ ID NO:272830
  MOD_RES (3), (9), (18): Xaa is A
TLXPIVSSXNPSPISFRXIKILLHDLEVVPFPKSRVR

SEQ ID NO: 2180 - protein, 35 aa, Artificial Sequence
  Peptide reported in US8969040, SEQ ID NO:90
VPTKLSPISILYLDKGVVTYKFKYEGMSVAECGCR

SEQ ID NO: 2181 - protein, 36 aa, Artificial Sequence
  Peptide reported in US20140056902, SEQ ID NO:88
VPTKLSPISILYKDDMGVPTYKFKYEGMSVAECGCR

SEQ ID NO: 2182 - protein, 31 aa, Artificial Sequence
  Peptide reported in US20120244575, SEQ ID NO:4324
VPTELSPISLLYLDEFEKVTLKNYQDMVVDG

SEQ ID NO: 2183 - protein, 10 aa, Artificial Sequence
  Peptide reported in US20150153356, SEQ ID NO:51419
TPTVVSATSL

SEQ ID NO: 2184 - protein, 17 aa, Artificial Sequence
  Peptide reported in WO2013040142, SEQ ID NO:729730
SATSRLALSDVPAELAA

SEQ ID NO: 2185 - protein, 23 aa, Artificial Sequence
  Peptide reported in WO2013040142, SEQ ID NO:1139935
LGIAAIIFLQQVPAAFSATSPPG

SEQ ID NO: 2186 - protein, 33 aa, Artificial Sequence
  Peptide reported in EP1687419, SEQ ID NO:42
SVPAVCSATSATGPYSSVTVTSWPSIVATGGTT

SEQ ID NO: 2187 - protein, 33 aa, Artificial Sequence
  Peptide reported in EP1687419, SEQ ID NO:43
SVPAVCSATSATGPYSTATNTVWPSIVATGGTT

SEQ ID NO: 2188 - protein, 33 aa, Artificial Sequence
  Peptide reported in EP1687419, SEQ ID NO:45
SSVPAVCSATSATGPYSSGSVEVTFDVYATTVY

SEQ ID NO: 2189 - protein, 33 aa, Artificial Sequence
  Peptide reported in EP1687419, SEQ ID NO:46
SSVPAVCSATSATGPYSTATNTVWFDVYATTVY

SEQ ID NO: 2190 - protein, 49 aa, Artificial Sequence
  Peptide reported in US5688678, SEQ ID NO:8
VHLLKPHAVPKACCAPTKLSATSVLYYDSSNNVILRKHRNMVVRACGCH

SEQ ID NO: 2191 - protein, 23 aa, Artificial Sequence
  Peptide reported in WO2013040142, SEQ ID NO:2326359
ANINKDRDNVPAATSSLSKAYNP

SEQ ID NO: 2192 - protein, 29 aa, Artificial Sequence
  Peptide reported in WO2013040142, SEQ ID NO:3136558
SFRTARANAPTGRSSLSGEKEQQEASTHS

SEQ ID NO: 2193 - protein, 48 aa, Artificial Sequence
  Peptide reported in US20130333061, SEQ ID NO:139889
DKPEESSSTPTHAQCICSSLSEAIVSSVLSTRLVLSQISLTRAKRAFE

SEQ ID NO: 2194 - protein, 50 aa, Artificial Sequence
  Peptide reported in US20040172684, SEQ ID NO:47782
  MOD_RES (35), (38): Xaa is A
KGSEYEKLVVSGITQVYQSSLSWHGCKSCCEVQVXNLXILIRLYDVHYYN

SEQ ID NO: 2195 - protein, 50 aa, Artificial Sequence
  Peptide reported in US20130333061, SEQ ID NO:158498
MALPQPRGSSLSKAPVVVAPCMALKRVNIRSIVFEVLKTMNQNCIHETPN

SEQ ID NO: 2196 - protein, 36 aa, Artificial Sequence
  Peptide reported in US20120246748, SEQ ID NO:111359
MAAQDEWRDAITLTMGRDLKKVPQHLNAISVIDPVT

SEQ ID NO: 2197 - protein, 42 aa, Artificial Sequence
  Peptide reported in US20140130203, SEQ ID NO:119179
LSLLAPPEPVWNHETSYGSDCHVPTNVNAISKMIDKSNHQTG

SEQ ID NO: 2198 - protein, 31 aa, Artificial Sequence
  Peptide reported in US20120244575, SEQ ID NO:4530
APTKLNAISVLYFDDSSNVILKKYRNMIVKS

SEQ ID NO: 2199 - protein, 11 aa, Artificial Sequence
  Peptide reported in US20050250936, SEQ ID NO:71
APTQLSAISVL

SEQ ID NO: 2200 - protein, 18 aa, Artificial Sequence
  Peptide reported in WO2013040142, SEQ ID NO:2935795
FDSRVLKSAISFKENIIF

SEQ ID NO: 2201 - protein, 18 aa, Artificial Sequence
  Peptide reported in WO2009151288, SEQ ID NO:7
KIPKPSSAPTELSAISMC

SEQ ID NO: 2202 - protein, 18 aa, Artificial Sequence
  Peptide reported in WO2009151288, SEQ ID NO:3
CPKPSSAPTELSAISMLL

SEQ ID NO: 2203 - protein, 18 aa, Artificial Sequence
  Peptide reported in US5496552, SEQ ID NO:5
TCCVPELSAISMLYLDEN

SEQ ID NO: 2204 - protein, 19 aa, Artificial Sequence
  Peptide reported in WO2009151288, SEQ ID NO:6
KIPKPSSAPTELSAISMLC

SEQ ID NO: 2205 - protein, 20 aa, Artificial Sequence
  Peptide reported in WO2009151288, SEQ ID NO:5
KIPKPSSAPTELSAISMLYC

SEQ ID NO: 2206 - protein, 20 aa, Artificial Sequence
  Peptide reported in WO2009151288, SEQ ID NO:2
CIPKPSSAPTELSAISMLYL

SEQ ID NO: 2207 - protein, 21 aa, Artificial Sequence
  Peptide reported in WO2009151288, SEQ ID NO:1
CKIPKPSSAPTELSAISMLYL

SEQ ID NO: 2208 - protein, 22 aa, Artificial Sequence
  Peptide reported in WO2013040142, SEQ ID NO:629725
AETLHTLGLSAPVIESAISDAI

SEQ ID NO: 2209 - protein, 33 aa, Artificial Sequence
  Peptide reported in US20070083334, SEQ ID NO:966410
MRTESTPTTASAISYECLWSPPSNEAAKLHFDS

SEQ ID NO: 2210 - protein, 47 aa, Artificial Sequence
  Peptide reported in US20040031072, SEQ ID NO:188005
SRVLPIVVQGYVPVQDTKFLGIYYVIGPIIARVILSSSSAISSLNKS

SEQ ID NO: 2211 - protein, 37 aa, Artificial Sequence
  Comparative sequence
CCAPTELSAISVLYFDDSSNVILKKYRNMVVRACGCR

SEQ ID NO: 2212 - protein, 37 aa, Artificial Sequence
  Comparative sequence
CCAPTQLSAISVLYFDDSSNVILKKYRNMVVRACGCR

SEQ ID NO: 2213 - protein, 39 aa, Artificial Sequence
  Peptide reported in US20050250936, SEQ ID NO:123
KPCCAPTQLSAISVLYFDDSSNVILKKYRNMVVRACGCR

SEQ ID NO: 2214 - protein, 39 aa, Artificial Sequence
  Peptide reported in US20050250936, SEQ ID NO:122
KPCCAPTELSAISVLYFDDSSNVILKKYRNMVVRACGCR

SEQ ID NO: 2215 - protein, 30 aa, Artificial Sequence
  Comparative sequence
VPQTLDPLPIIYYVGRNVRVEQLSNMVVRA

SEQ ID NO: 2216 - protein, 34 aa, Artificial Sequence
  Peptide reported in US20050250936, SEQ ID NO:32
VPQTLDPLPIIYYVGRNVRVEQLSNMVVRACKCS

SEQ ID NO: 2217 - protein, 36 aa, Artificial Sequence
  Comparative sequence
CCVPQTLDPLPIIYYVGRNVRVEQLSNMVVRACKCS

SEQ ID NO: 2218 - protein, 31 aa, Artificial Sequence
  Comparative sequence
APTRLGALPVLYHLNDENVNLKKYRNMIVKS

SEQ ID NO: 2219 - protein, 35 aa, Artificial Sequence
  Peptide reported in US20050250936, SEQ ID NO:1
APTRLGALPVLYHLNDENVNLKKYRNMIVKSCGCH

SEQ ID NO: 2220 - protein, 37 aa, Artificial Sequence
  Peptide reported in US7015311, SEQ ID NO:123
CCAPTRLGALPVLYHLNDENVNLKKYRNMIVKSCGCH

SEQ ID NO: 2221 - protein, 31 aa, Artificial Sequence
  Peptide reported in US20120244575, SEQ ID NO:4402
VPTTLDAISMLFMNEHSKVVLKNYQDMVVDG

SEQ ID NO: 2222 - protein, 31 aa, Artificial Sequence
  Peptide reported in US20120244575, SEQ ID NO:4639
VPTTLEAISMLFMNEHSKVVLKNYQDMVVDG

SEQ ID NO: 2223 - protein, 34 aa, Artificial Sequence
  Peptide reported in US20020048763, SEQ ID NO:35995
MAFKDTGKAPVEPEVAIHRIRITLTSRSVKSLEK

SEQ ID NO: 2224 - protein, 18 aa, Artificial Sequence
  Peptide reported in WO2013040142, SEQ ID NO:4756276
LSTQVSQKPLSDKNQNLK

SEQ ID NO: 2225 - protein, 48 aa, Artificial Sequence
  Peptide reported in WO2013040142, SEQ ID NO:1315753
EYAKAWFKLLHRDMGPVQRYLGPLVPTQTWLWQDIVPAGKPLSDADVA

SEQ ID NO: 2226 - protein, 31 aa, Artificial Sequence
  Peptide reported in US20120244575, SEQ ID NO:4346
APTELSPISVLYFDQDNNVVLKKYNKMVVKA

SEQ ID NO: 2227 - protein, 31 aa, Artificial Sequence
  Peptide reported in US20120244575, SEQ ID NO:4582
APTKLSPISMLYYDNNDNVVLRHYEDMVVDE

SEQ ID NO: 2228 - protein, 31 aa, Artificial Sequence
  Comparative sequence
VPERLSPISVLFFDNSDNVVLRHYEDMVVDE

SEQ ID NO: 2229 - protein, 35 aa, Artificial Sequence
  Peptide reported in US20050250936, SEQ ID NO:13
VPERLSPISVLFFDNEDNVVLRHYEDMVVDECGCR

SEQ ID NO: 2230 - protein, 37 aa, Artificial Sequence
  Comparative sequence
CCVPERLSPISVLFFDNEDNVVLRHYEDMVVDECGCR

SEQ ID NO: 2231 - protein, 31 aa, Artificial Sequence
  Peptide reported in US20120244575, SEQ ID NO:4380
VPTELSSLSLLYTDEHGTVVLKVYQDMVVEG

SEQ ID NO: 2232 - protein, 31 aa, Artificial Sequence
  Peptide reported in US20120244575, SEQ ID NO:4451
VPTELSSLSLLYTDEHGAVVLKVYQDMVVEG

SEQ ID NO: 2233 - protein, 37 aa, Artificial Sequence
  Comparative sequence
CCVPTELNAISVLYFDDSSNVILKKYEDMVVEACGCR

SEQ ID NO: 2234 - protein, 39 aa, Artificial Sequence
  Peptide reported in US20050250936, SEQ ID NO:118
NSCCVPTELNAISVLYFDDSSNVILKKYEDMVVEACGCR

SEQ ID NO: 2235 - protein, 31 aa, Artificial Sequence
  Peptide reported in US20120244575, SEQ ID NO:4400
APTALSAISMLYFDESGNVVLRQYEDMVVEG

SEQ ID NO: 2236 - protein, 31 aa, Artificial Sequence
  Peptide reported in US20120244575, SEQ ID NO:4574
APTKLSAISMLYFDNDENVVLRQYEDMVVEA

SEQ ID NO: 2237 - protein, 37 aa, Artificial Sequence
  Comparative sequence
CCAPTQLSAISVLYFDDSSNVILKKYEDMVVEACGCR

SEQ ID NO: 2238 - protein, 37 aa, Artificial Sequence
  Comparative sequence
CCAPTELSAISVLYFDDSSNVILKKYEDMVVEACGCR

SEQ ID NO: 2239 - protein, 39 aa, Artificial Sequence
  Peptide reported in US20050250936, SEQ ID NO:120
KPCCAPTQLSAISVLYFDDSSNVILKKYEDMVVEACGCR

SEQ ID NO: 2240 - protein, 39 aa, Artificial Sequence
  Peptide reported in US20050250936, SEQ ID NO:119
KPCCAPTELSAISVLYFDDSSNVILKKYEDMVVEACGCR

SEQ ID NO: 2241 - protein, 33 aa, Artificial Sequence
  Peptide reported in US20120244575, SEQ ID NO:4616
VPTEEFNVTMQIMRIKPHQGQHIGEMSFLQHNK

SEQ ID NO: 2242 - protein, 30 aa, Artificial Sequence
  GFR-binding peptide
VPTAASAISILYLDAANNVVLKNYQAAVVE

SEQ ID NO: 2243 - protein, 32 aa, Artificial Sequence
  GFR-binding peptide
VPEAASSLSMLFFEIVRKKPIFLKVYPAATVE

SEQ ID NO: 2244 - protein, 32 aa, Artificial Sequence
  GFR-binding peptide
VPTVVSAISTLYLRIKPHQGQHLKNYQVVVVE

SEQ ID NO: 2245 - protein, 30 aa, Artificial Sequence
  GFR-binding peptide
APTLLNAISMLYFNDKQQIILKKYRLLVVR

SEQ ID NO: 2246 - protein, 30 aa, Artificial Sequence
  GFR-binding peptide
APTGGSATSMLYYDKGVVTYLRKHRGGVVK

SEQ ID NO: 2247 - protein, 30 aa, Artificial Sequence
  GFR-binding peptide
VPTSSSPISTLYIDKGVVTYLKYHYSSVAE

SEQ ID NO: 2248 - protein, 30 aa, Artificial Sequence
  GFR-binding peptide
VPTAAEPISMLYLDEYDKVVKFKYEAAAVS

SEQ ID NO: 2249 - protein, 30 aa, Artificial Sequence
  GFR-binding peptide
TPTSSSPINTLYFDDMGVPTYGKIPSSVVD

SEQ ID NO: 2250 - protein, 30 aa, Artificial Sequence
  GFR-binding peptide
VPTVVSPISMLYIDDMGVPTYKQYEVVVVE

SEQ ID NO: 2251 - protein, 30 aa, Artificial Sequence
  GFR-binding peptide
APVAAKPLSMLYVDKGVVTYDHHKDAAVEE

SEQ ID NO: 2252 - protein, 30 aa, Artificial Sequence
  GFR-binding peptide
VPQAAEPLPMLYYDKGVVTYEQLSNAAVRS

SEQ ID NO: 2253 - protein, 30 aa, Artificial Sequence
  GFR-binding peptide
VPQQQEPLTTLYYDEYDKVVEQLSNQQVKS

SEQ ID NO: 2254 - protein, 32 aa, Artificial Sequence
  GFR-binding peptide
VPTMMSNITTQIMRIKPHQGQHIGEMSMMQHN

SEQ ID NO: 2255 - protein, 30 aa, Artificial Sequence
  GFR-binding peptide
SRVAARSVKMAKVGGGGGGGKEVQVAAEEH

SEQ ID NO: 2256 - protein, 30 aa, Artificial Sequence
  GFR-binding peptide
VPTDDSATSTLYYDKGVVTYLRKHRDDEHS

SEQ ID NO: 2257 - protein, 30 aa, Artificial Sequence
  GFR-binding peptide
VPTGGEPLTTLYYNDKQQIIEQLSNGGEHS

SEQ ID NO: 2258 - protein, 30 aa, Artificial Sequence
  GFR-binding peptide
SRVLLRPVQMRKIDKGVVTYKKATVLLEEH

SEQ ID NO: 2259 - protein, 30 aa, Artificial Sequence
  GFR-binding peptide
TQVAARPVQTRKIDDMGVPTKKATVAAEDH

SEQ ID NO: 2260 - protein, 30 aa, Artificial Sequence; identical to SEQ ID NO: 993
  GFR-binding peptide

SEQ ID NO: 2261 - protein, 44 aa, Artificial Sequence
  GFR-binding peptide
NDEGLESVPTGQSPISILYIRIKPHQGQHYKQYELEEHSQSESR

SEQ ID NO: 2262 - protein, 42 aa, Artificial Sequence
  GFR-binding peptide
HVTKPTSVPTKLSPISILFIDDSSNVIYKQYENMVVESSGSH

SEQ ID NO: 2263 - protein, 41 aa, Artificial Sequence
  GFR-binding peptide
ASASPSSAPVDLKPLSMLYVIGKTPKIDHHKDMIVEESKSS

SEQ ID NO: 2264 - protein, 42 aa, Artificial Sequence
  GFR-binding peptide
KIPKASSVPQELEPLPIVYYDENEKVVEQLSNDMVRSGSGSR

SEQ ID NO: 2265 - protein, 42 aa, Artificial Sequence
  GFR-binding peptide
AVPKASSVPQKLEPLTILYYDSSNNVIEQLSNNMVKSASGSH

SEQ ID NO: 2266 - protein, 41 aa, Artificial Sequence
  GFR-binding peptide
RVPSTSSAPVKTSNITMQIMDNGRVLLLGEMSMIVEESGSL

SEQ ID NO: 2267 - protein, 41 aa, Artificial Sequence
  GFR-binding peptide
ASASPSSVSQDLRSVKVAKVIGKTPKIKEVQVMIVKSSKSS

SEQ ID NO: 2268 - protein, 42 aa, Artificial Sequence
  GFR-binding peptide
GIPEPSSVPTKMSAISTLYLDENKNVVLKNYQNMVVESSASR

SEQ ID NO: 2269 - protein, 38 aa, Artificial Sequence
  GFR-binding peptide
  MOD_RES (32), (33): Xaa is C or S
GEVVMDRYKKLVVKENEDFYLMSIANLETPVXXAKPIK

SEQ ID NO: 2270 - protein, 43 aa, Artificial Sequence
  GFR-binding peptide
  MOD_RES (2), (4), (38), (39): Xaa is C or S
  MOD_RES (16), (17), (18), (19), (20): Xaa is A or G
  MOD_RES (21), (22), (23), (24): Xaa is A or G or is absent
RXGXGEVVMEQYNKLXXXXXXXXXLYLMSIASLETPVXXAKPI

SEQ ID NO: 2271 - protein, 35 aa, Artificial Sequence
  GFR-binding peptide
  MOD_RES (2), (4): Xaa is C or S
HXGXARVVMNQYNKLIVNSSDDLYLVSIASLQTPA

SEQ ID NO: 2272 - protein, 34 aa, Artificial Sequence
  GFR-binding peptide
  MOD_RES (13), (14), (15), (16), (17): Xaa is A or G
  MOD_RES (18), (19), (20), (21): Xaa is A or G or is absent
EAVSMGERYKKLXXXXXXXXXFYLVSIANLKTPV

SEQ ID NO: 2273 - protein, 38 aa, Artificial Sequence
  GFR-binding peptide
  MOD_RES (1), (38): Xaa is C or S
  MOD_RES (14), (15), (16), (17), (18): Xaa is A or G
  MOD_RES (19), (20), (21), (22): Xaa is A or G or is absent
XALHDELTRHKRLXXXXXXXXXYYLVSTASLQVQTPRX

SEQ ID NO: 2274 - protein, 42 aa, Artificial Sequence
  GFR-binding peptide
  MOD_RES (1), (3), (38), (39): Xaa is C or S
  MOD_RES (16), (17), (18), (19), (20): Xaa is A or G
  MOD_RES (21), (22), (23), (24): Xaa is A or G or is absent
XGXEAVSMGERYKKLXXXXXXXXXFYLVSIANLKTPVXXAKG

SEQ ID NO: 2275 - protein, 40 aa, Artificial Sequence
  GFR-binding peptide
  MOD_RES (1), (3), (36), (37): Xaa is C or S
  MOD_RES (14), (15), (16), (17), (18): Xaa is A or G
  MOD_RES (19), (20), (21), (22): Xaa is A or G or is absent
XKXSRVIMQYNKLXXXXXXXXXLYLISIASLAQPVXXPAA

SEQ ID NO: 2276 - protein, 38 aa, Artificial Sequence
  GFR-binding peptide
  MOD_RES (32), (32): Xaa is C or S
SRVVMNRHKRLIVNSSDDYYLVSTASLKTPAXTPKTVH

SEQ ID NO: 2277 - protein, 33 aa, Artificial Sequence
  GFR-binding peptide
  MOD_RES (2), (2): Xaa is C or S
GXGEVVMDRYKKLVVKENEDFYLMSIANLETPV

SEQ ID NO: 2278 - protein, 38 aa, Artificial Sequence
  GFR-binding peptide
  MOD_RES (1), (3), (36), (37): Xaa is C or S
  MOD_RES (14), (15), (16), (17), (18): Xaa is A or G
  MOD_RES (19), (20), (21), (22): Xaa is A or G or is absent
XKXSKVIMYHYKLXXXXXXXXXKYLISIPSLDQSVXXP

SEQ ID NO: 2279 - protein, 38 aa, Artificial Sequence
  GFR-binding peptide
  MOD_RES (1), (3), (37), (38): Xaa is C or S
  MOD_RES (15), (16), (17), (18), (19): Xaa is A or G
  MOD_RES (20), (21), (22), (23): Xaa is A or G or is absent
XGXSRVVMNQYNKLXXXXXXXXXLYLVSIASLKTPAXX

SEQ ID NO: 2280 - protein, 36 aa, Artificial Sequence
  GFR-binding peptide
  MOD_RES (1), (33), (34): Xaa is C or S
XSRVVMNYHYKLIVNSSDDKYLVSIPSLKTPAXXPK

SEQ ID NO: 2281 - protein, 39 aa, Artificial Sequence
  GFR-binding peptide
  MOD_RES (2), (4), (36), (37): Xaa is C or S
HXGXAKVVMNRHKRLIVNNSSDYYLVSTASLKTPAXXAK

SEQ ID NO: 2282 - protein, 32 aa, Artificial Sequence
  GFR-binding peptide
  MOD_RES (1), (32): Xaa is C or S
XSKVVMYHYKLVKPTRGVKYLISIPSLDQPVX

SEQ ID NO: 2283 - protein, 37 aa, Artificial Sequence
  GFR-binding peptide
  MOD_RES (33), (34): Xaa is C or S
  MOD_RES (11), (12), (13), (14), (15): Xaa is A or G
  MOD_RES (16), (17), (18), (19): Xaa is A or G or is absent
RVVMNRHKRLXXXXXXXXXYYLVSTASLKTPAXXPKP

SEQ ID NO: 2284 - protein, 38 aa, Artificial Sequence
  GFR-binding peptide
  MOD_RES (1), (3), (34), (35): Xaa is C or S
XKXSRVIMQYNKLVKPKRGVLYLISIASLAQPVXXPAA

SEQ ID NO: 2285 - protein, 35 aa, Artificial Sequence
  GFR-binding peptide
  MOD_RES (1), (35): Xaa is C or S
  MOD_RES (13), (14), (15), (16), (17): Xaa is A or G
  MOD_RES (18), (19), (20), (21): Xaa is A or G or is absent
XSRVVMNRHKRLXXXXXXXXXYYLVSTASLKTPAX

SEQ ID NO: 2286 - protein, 39 aa, Artificial Sequence
  GFR-binding peptide
  MOD_RES (1), (34), (35): Xaa is C or S
  MOD_RES (12), (13), (14), (15), (16): Xaa is A or G
  MOD_RES (17), (18), (19), (20): Xaa is A or G or is absent
XSRVIMRHKRLXXXXXXXXXYYLISTASLAQPVXXPAAS

SEQ ID NO: 2287 - protein, 38 aa, Artificial Sequence
  GFR-binding peptide
  MOD_RES (32), (33): Xaa is C or S
SRVVMNRHKRLIVNSSDDYYLVSTASLKTPAXXPKPVY

SEQ ID NO: 2288 - protein, 35 aa, Artificial Sequence
  GFR-binding peptide
  MOD_RES (31), (32): Xaa is C or S
SKVIMRYKKLIKPTKGIFYLISIANLDQSVXXPSA

SEQ ID NO: 2289 - protein, 42 aa, Artificial Sequence
  GFR-binding peptide
  MOD_RES (1), (3), (37), (38): Xaa is C or S
  MOD_RES (15), (16), (17), (18), (19): Xaa is A or G
  MOD_RES (20), (21), (22), (23): Xaa is A or G or is absent
XGXGEVVMEYHYKLXXXXXXXXXKYLMSIPSLETPVXXAKPI

SEQ ID NO: 2290 - protein, 39 aa, Artificial Sequence
  GFR-binding peptide
  MOD_RES (2), (36), (37): Xaa is C or S
  MOD_RES (14), (15), (16), (17), (18): Xaa is A or G
  MOD_RES (19), (20), (21), (22): Xaa is A or G or is absent
GXARVVMNRHKRLXXXXXXXXXYYLVSTASLQTPAXXPK

SEQ ID NO: 2291 - protein, 35 aa, Artificial Sequence
  GFR-binding peptide
  MOD_RES (13), (14), (15), (16), (17): Xaa is A or G
  MOD_RES (18), (19), (20), (21): Xaa is A or G or is absent
ALHDELTRHKRLXXXXXXXXXYYLVSTASLQVQTP

SEQ ID NO: 2292 - protein, 30 aa, Artificial Sequence
  GFR-binding peptide
EVVMEQYNKLVVKDYEDLYLMSIASLETPV

SEQ ID NO: 2293 - protein, 42 aa, Artificial Sequence
  GFR-binding peptide
  MOD_RES (2), (4), (36), (37): Xaa is C or S
HXGXSRVVMNRYKKLIVNSSDDFYLVSIANLKTPAXXPKPVY

SEQ ID NO: 2294 - protein, 38 aa, Artificial Sequence
  GFR-binding peptide
  MOD_RES (2), (4), (37), (38): Xaa is C or S
  MOD_RES (15), (16), (17), (18), (19): Xaa is A or G
  MOD_RES (20), (21), (22), (23): Xaa is A or G or is absent
SXKXSKVVMYHYKLXXXXXXXXXKYLISIPSLDQPVXX

SEQ ID NO: 2295 - protein, 39 aa, Artificial Sequence
  GFR-binding peptide
  MOD_RES (1), (3), (38), (39): Xaa is C or S
  MOD_RES (16), (17), (18), (19), (20): Xaa is A or G
  MOD_RES (21), (22), (23), (24): Xaa is A or G or is absent
XGXEAVSMGEQYNKLXXXXXXXXXLYLVSIASLKTPVXX

SEQ ID NO: 2296 - protein, 33 aa, Artificial Sequence
  GFR-binding peptide
  MOD_RES (12), (13), (14), (15), (16): Xaa is A or G
  MOD_RES (17), (18), (19), (20): Xaa is A or G or is absent
GEVVMDRHKRLXXXXXXXXXYYLMSTASLETPV

SEQ ID NO: 2297 - protein, 32 aa, Artificial Sequence
  GFR-binding peptide
  MOD_RES (11), (12), (13), (14), (15): Xaa is A or G
  MOD_RES (16), (17), (18), (19): Xaa is A or G or is absent
EVVMDQYNKLXXXXXXXXXLYLMSIASLETPV

SEQ ID NO: 2298 - protein, 38 aa, Artificial Sequence
  GFR-binding peptide
  MOD_RES (1), (35), (36): Xaa is C or S
  MOD_RES (13), (14), (15), (16), (17): Xaa is A or G
  MOD_RES (18), (19), (20), (21): Xaa is A or G or is absent
XSRVVMNRYKKLXXXXXXXXXFYLVSIANLKTPAXXPK

SEQ ID NO: 2299 - protein, 39 aa, Artificial Sequence
  GFR-binding peptide
  MOD_RES (1), (3), (35), (36): Xaa is C or S
XGXGEVVMDRYKKLVVKENEDFYLMSIANLETPVXXAKP

SEQ ID NO: 2300 - protein, 35 aa, Artificial Sequence
  GFR-binding peptide
  MOD_RES (1), (32), (33): Xaa is C or S
XSKVIMQYNKLIKPTKGILYLISIASLDQSVXXPS

SEQ ID NO: 2301 - protein, 38 aa, Artificial Sequence
  GFR-binding peptide
  MOD_RES (1), (33): Xaa is C or S
XSRVVMNRYKKLIVNSSDDFYLVSIANLKTPAXTPKTV

SEQ ID NO: 2302 - protein, 32 aa, Artificial Sequence
  GFR-binding peptide
  MOD_RES (31), (32): Xaa is C or S
SKVIMYHYKLIKPTKGIKYLISIPSLDQSVXX

SEQ ID NO: 2303 - protein, 40 aa, Artificial Sequence
  GFR-binding peptide
  MOD_RES (1), (3), (36), (37): Xaa is C or S
  MOD_RES (14), (15), (16), (17), (18): Xaa is A or G
  MOD_RES (19), (20), (21), (22): Xaa is A or G or is absent
XKXSKVIMQYNKLXXXXXXXXXLYLISIASLDQSVXXPSA

SEQ ID NO: 2304 - protein, 41 aa, Artificial Sequence
  GFR-binding peptide
  MOD_RES (1), (35), (36): Xaa is C or S
  MOD_RES (13), (14), (15), (16), (17): Xaa is A or G
  MOD_RES (18), (19), (20), (21): Xaa is A or G or is absent
XGEVVMEYHYKLXXXXXXXXXKYLMSIPSLETPVXXAKPIS

SEQ ID NO: 2305 - protein, 34 aa, Artificial Sequence
  GFR-binding peptide
  MOD_RES (2), (2): Xaa is C or S
  MOD_RES (13), (14), (15), (16), (17): Xaa is A or G
  MOD_RES (18), (19), (20), (21): Xaa is A or G or is absent
KXSKVVMQYNKLXXXXXXXXXLYLISIASLDQPV

SEQ ID NO: 2306 - protein, 34 aa, Artificial Sequence
  GFR-binding peptide
  MOD_RES (32), (33): Xaa is C or S
GEVVMDRHKRLVVKENEDYYLMSTASLETPVXXA

SEQ ID NO: 2307 - protein, 32 aa, Artificial Sequence
  GFR-binding peptide
  MOD_RES (11), (12), (13), (14), (15): Xaa is A or G
  MOD_RES (16), (17), (18), (19): Xaa is A or G or is absent
HDELTRHKRLXXXXXXXXXYYLVSTASLQVQT

SEQ ID NO: 2308 - protein, 30 aa, Artificial Sequence
  GFR-binding peptide
EVVMEYHYKLVVKDYEDKYLMSIPSLETPV

SEQ ID NO: 2309 - protein, 43 aa, Artificial Sequence
  GFR-binding peptide
  MOD_RES (2), (4), (38), (39): Xaa is C or S
  MOD_RES (16), (17), (18), (19), (20): Xaa is A or G
  MOD_RES (21), (22), (23), (24): Xaa is A or G or is absent
RXGXGEVVMDYHYKLXXXXXXXXXKYLMSIPSLETPVXXAKPI

SEQ ID NO: 2310 - protein, 37 aa, Artificial Sequence
  GFR-binding peptide
  MOD_RES (31), (32): Xaa is C or S
RVVMNQYNKLIVNSSDDLYLVSIASLQTPAXXPKPVT

SEQ ID NO: 2311 - protein, 44 aa, Artificial Sequence
  GFR-binding peptide
  MOD_RES (2), (4), (38), (39): Xaa is C or S
  MOD_RES (16), (17), (18), (19), (20): Xaa is A or G
  MOD_RES (21), (22), (23), (24): Xaa is A or G or is absent
RXGXGEVVMDQYNKLXXXXXXXXXLYLMSIASLETPVXXAKPIK

SEQ ID NO: 2312 - protein, 32 aa, Artificial Sequence
  GFR-binding peptide
  MOD_RES (32), (32): Xaa is C or S
GEVVMEYHYKLVVKDYEDKYLMSIPSLETPVX

SEQ ID NO: 2313 - protein, 35 aa, Artificial Sequence
  GFR-binding peptide
  MOD_RES (1), (33), (34): Xaa is C or S
XGEVVMERHKRLVVKDYEDYYLMSTASLETPVXXA

SEQ ID NO: 2314 - protein, 35 aa, Artificial Sequence
  GFR-binding peptide
  MOD_RES (2), (35): Xaa is C or S
GXEAVSMGERHKRLTPVGMDDYYLVSTASLKTPVX

SEQ ID NO: 2315 - protein, 36 aa, Artificial Sequence
  GFR-binding peptide
  MOD_RES (35), (35): Xaa is C or S
HDELTRHKRLFIPKKRVIEYYLVSTASLQVQTPRXQ

SEQ ID NO: 2316 - protein, 38 aa, Artificial Sequence
  GFR-binding peptide
  MOD_RES (32), (32): Xaa is C or S
SRVVMNQYNKLIVNSSDDLYLVSIASLKTPAXTPKTVH

SEQ ID NO: 2317 - protein, 32 aa, Artificial Sequence
  GFR-binding peptide
  MOD_RES (1), (1): Xaa is C or S
XGEVVMEYHYKLVVKDYEDKYLMSIPSLETPV

SEQ ID NO: 2318 - protein, 37 aa, Artificial Sequence
  GFR-binding peptide
  MOD_RES (1), (3), (36), (37): Xaa is C or S
XGXEAVSMGEYHYKLTPVGMDDKYLVSIPSLKTPVXX

SEQ ID NO: 2319 - protein, 40 aa, Artificial Sequence
  GFR-binding peptide
  MOD_RES (2), (35), (36): Xaa is C or S
GXEAVSMGEQYNKLTPVGMDDLYLVSIASLKTPVXXAKGV

SEQ ID NO: 2320 - protein, 38 aa, Artificial Sequence
  GFR-binding peptide
  MOD_RES (36), (36): Xaa is C or S
  MOD_RES (12), (13), (14), (15), (16): Xaa is A or G
  MOD_RES (17), (18), (19), (20): Xaa is A or G or is absent
LHDELTQYNKLXXXXXXXXXLYLVSIASLQVQTPRXQV

SEQ ID NO: 2321 - protein, 39 aa, Artificial Sequence
  GFR-binding peptide
  MOD_RES (2), (39): Xaa is C or S
  MOD_RES (15), (16), (17), (18), (19): Xaa is A or G
  MOD_RES (20), (21), (22), (23): Xaa is A or G or is absent
KXALHDELTRHKRLXXXXXXXXXYYLVSTASLQVQTPRX

SEQ ID NO: 2322 - protein, 39 aa, Artificial Sequence
  GFR-binding peptide
  MOD_RES (2), (4), (38), (39): Xaa is C or S
  MOD_RES (16), (17), (18), (19), (20): Xaa is A or G
  MOD_RES (21), (22), (23), (24): Xaa is A or G or is absent
HXGXSRVVMNRHKRLXXXXXXXXXYYLVSTASLKTPAXX

SEQ ID NO: 2323 - protein, 37 aa, Artificial Sequence
  GFR-binding peptide
  MOD_RES (2), (4): Xaa is C or S
  MOD_RES (16), (17), (18), (19), (20): Xaa is A or G
  MOD_RES (21), (22), (23), (24): Xaa is A or G or is absent
HXGXAKVVMNRYKKLXXXXXXXXXFYLVSIANLKTPA

SEQ ID NO: 2324 - protein, 36 aa, Artificial Sequence
  GFR-binding peptide
  MOD_RES (13), (14), (15), (16), (17): Xaa is A or G
  MOD_RES (18), (19), (20), (21): Xaa is A or G or is absent
ALHDELTRYKKLXXXXXXXXXFYLVSIANLQVQTPR

SEQ ID NO: 2325 - protein, 38 aa, Artificial Sequence
  GFR-binding peptide
  MOD_RES (2), (34), (35): Xaa is C or S
GXGEVVMERHKRLVVKDYEDYYLMSTASLETPVXXAKP

SEQ ID NO: 2326 - protein, 34 aa, Artificial Sequence
  GFR-binding peptide
  MOD_RES (1), (34): Xaa is C or S
  MOD_RES (12), (13), (14), (15), (16): Xaa is A or G
  MOD_RES (17), (18), (19), (20): Xaa is A or G or is absent
XSKVIMYHYKLXXXXXXXXXKYLISIPSLDQSVX

SEQ ID NO: 2327 - protein, 32 aa, Artificial Sequence
  GFR-binding peptide
  MOD_RES (31), (32): Xaa is C or S
RVVMNRYKKLIVNSSDDFYLVSIANLQTPAXX

SEQ ID NO: 2328 - protein, 42 aa, Artificial Sequence
  GFR-binding peptide
  MOD_RES (2), (4), (37), (38): Xaa is C or S
  MOD_RES (15), (16), (17), (18), (19): Xaa is A or G
  MOD_RES (20), (21), (22), (23): Xaa is A or G or is absent
SXKXSKVIMYHYKLXXXXXXXXXKYLISIPSLDQSVXXPSAS

SEQ ID NO: 2329 - protein, 36 aa, Artificial Sequence
  GFR-binding peptide
  MOD_RES (1), (35), (36): Xaa is C or S
  MOD_RES (13), (14), (15), (16), (17): Xaa is A or G
  MOD_RES (18), (19), (20), (21): Xaa is A or G or is absent
XSRVVMNRHKRLXXXXXXXXXYYLVSTASLKTPAXX

SEQ ID NO: 2330 - protein, 33 aa, Artificial Sequence
  GFR-binding peptide
  MOD_RES (1), (1): Xaa is C or S
  MOD_RES (12), (13), (14), (15), (16): Xaa is A or G
  MOD_RES (17), (18), (19), (20): Xaa is A or G or is absent
XSKVVMYHYKLXXXXXXXXXKYLISIPSLDQPV

SEQ ID NO: 2331 - protein, 37 aa, Artificial Sequence
  GFR-binding peptide
  MOD_RES (1), (3): Xaa is C or S
  MOD_RES (16), (17), (18), (19), (20): Xaa is A or G
  MOD_RES (21), (22), (23), (24): Xaa is A or G or is absent
XKXALHDELTRHKRLXXXXXXXXXYYLVSTASLQVQT

SEQ ID NO: 2332 - protein, 35 aa, Artificial Sequence
  GFR-binding peptide
  MOD_RES (2), (4), (35): Xaa is C or S
SXKXSKVIMQYNKLIKPTKGILYLISIASLDQSVX

SEQ ID NO: 2333 - protein, 40 aa, Artificial Sequence
  GFR-binding peptide
  MOD_RES (1), (3), (36), (37): Xaa is C or S
XGXEAVSMGERYKKLTPVGMDDFYLVSIANLKTPVXXAKG

SEQ ID NO: 2334 - protein, 40 aa, Artificial Sequence
  GFR-binding peptide
  MOD_RES (1), (3), (35): Xaa is C or S
XGXSRVVMNRYKKLIVNSSDDFYLVSIANLKTPAXTPKTV

SEQ ID NO: 2335 - protein, 36 aa, Artificial Sequence
  GFR-binding peptide
  MOD_RES (1), (3): Xaa is C or S
  MOD_RES (15), (16), (17), (18), (19): Xaa is A or G
  MOD_RES (20), (21), (22), (23): Xaa is A or G or is absent
XGXSRVVMNYHYKLXXXXXXXXXKYLVSIPSLKTPA

SEQ ID NO: 2336 - protein, 39 aa, Artificial Sequence
  GFR-binding peptide
  MOD_RES (2), (35), (36): Xaa is C or S
  MOD_RES (13), (14), (15), (16), (17): Xaa is A or G
  MOD_RES (18), (19), (20), (21): Xaa is A or G or is absent
KXSKVIMQYNKLXXXXXXXXXLYLISIASLDQSVXXPSA

SEQ ID NO: 2337 - protein, 37 aa, Artificial Sequence
  GFR-binding peptide
  MOD_RES (1), (3), (35), (36): Xaa is C or S
XGXAKVVMNQYNKLIVNNSSDLYLVSIASLKTPAXXA

SEQ ID NO: 2338 - protein, 39 aa, Artificial Sequence
  GFR-binding peptide
  MOD_RES (2), (36), (37): Xaa is C or S
  MOD_RES (14), (15), (16), (17), (18): Xaa is A or G
  MOD_RES (19), (20), (21), (22): Xaa is A or G or is absent
GXGEVVMDQYNKLXXXXXXXXXLYLMSIASLETPVXXAK

SEQ ID NO: 2339 - protein, 38 aa, Artificial Sequence
  GFR-binding peptide
  MOD_RES (1), (38): Xaa is C or S
XALHDELTRHKRLFIPKKRVIEYYLVSTASLQVQTPRX

SEQ ID NO: 2340 - protein, 37 aa, Artificial Sequence
  GFR-binding peptide
  MOD_RES (1), (33), (34): Xaa is C or S
XARVVMNQYNKLIVNSSDDLYLVSIASLQTPAXXPKP

SEQ ID NO: 2341 - protein, 39 aa, Artificial Sequence
  GFR-binding peptide
  MOD_RES (33), (34): Xaa is C or S
  MOD_RES (11), (12), (13), (14), (15): Xaa is A or G
  MOD_RES (16), (17), (18), (19): Xaa is A or G or is absent
SKVVMYHYKLXXXXXXXXXKYLISIPSLDQPVXXPSASA

SEQ ID NO: 2342 - protein, 30 aa, Artificial Sequence
  GFR-binding peptide
SRVIMRHKRLVKPKRGVYYLISTASLAQPV

SEQ ID NO: 2343 - protein, 41 aa, Artificial Sequence
  GFR-binding peptide
  MOD_RES (1), (3), (37): Xaa is C or S
  MOD_RES (15), (16), (17), (18), (19): Xaa is A or G
  MOD_RES (20), (21), (22), (23): Xaa is A or G or is absent
XGXSRVVMNQYNKLXXXXXXXXXLYLVSIASLKTPAXTPKT

SEQ ID NO: 2344 - protein, 34 aa, Artificial Sequence
  GFR-binding peptide
  MOD_RES (31), (32): Xaa is C or S
SKVIMQYNKLIKPTKGILYLISIASLDQSVXXPS

SEQ ID NO: 2345 - protein, 43 aa, Artificial Sequence
  GFR-binding peptide
  MOD_RES (1), (3), (40): Xaa is C or S
  MOD_RES (16), (17), (18), (19), (20): Xaa is A or G
  MOD_RES (21), (22), (23), (24): Xaa is A or G or is absent
XKXALHDELTRHKRLXXXXXXXXXYYLVSTASLQVQTPRXQVN

SEQ ID NO: 2346 - protein, 39 aa, Artificial Sequence
  GFR-binding peptide
  MOD_RES (33), (34): Xaa is C or S
  MOD_RES (11), (12), (13), (14), (15): Xaa is A or G
  MOD_RES (16), (17), (18), (19): Xaa is A or G or is absent
KVVMNRHKRLXXXXXXXXXYYLVSTASLKTPAXXAKPVA

SEQ ID NO: 2347 - protein, 35 aa, Artificial Sequence
  GFR-binding peptide
  MOD_RES (2), (2): Xaa is C or S
  MOD_RES (14), (15), (16), (17), (18): Xaa is A or G
  MOD_RES (19), (20), (21), (22): Xaa is A or G or is absent
GXGEVVMERHKRLXXXXXXXXXYYLMSTASLETPV

SEQ ID NO: 2348 - protein, 43 aa, Artificial Sequence
  GFR-binding peptide
  MOD_RES (2), (4), (38), (39): Xaa is C or S
  MOD_RES (16), (17), (18), (19), (20): Xaa is A or G
  MOD_RES (21), (22), (23), (24): Xaa is A or G or is absent
HXGXSRVVMNYHYKLXXXXXXXXXKYLVSIPSLKTPAXXPKPV

SEQ ID NO: 2349 - protein, 38 aa, Artificial Sequence
  GFR-binding peptide
  MOD_RES (34), (35): Xaa is C or S
  MOD_RES (12), (13), (14), (15), (16): Xaa is A or G
  MOD_RES (17), (18), (19), (20): Xaa is A or G or is absent
SRVVMNQYNKLXXXXXXXXXLYLVSIASLKTPAXXPKP

SEQ ID NO: 2350 - protein, 39 aa, Artificial Sequence
  GFR-binding peptide
  MOD_RES (2), (4), (36), (37): Xaa is C or S
RXGXGEVVMDQYNKLVVKENEDLYLMSIASLETPVXXAK

SEQ ID NO: 2351 - protein, 38 aa, Artificial Sequence
  GFR-binding peptide
  MOD_RES (1), (3), (35), (36): Xaa is C or S
XGXARVVMNRYKKLIVNSSDDFYLVSIANLQTPAXXPK

SEQ ID NO: 2352 - protein, 33 aa, Artificial Sequence
  GFR-binding peptide
  MOD_RES (2), (33): Xaa is C or S
KXSKVIMYHYKLIKPTKGIKYLISIPSLDQSVX

SEQ ID NO: 2353 - protein, 42 aa, Artificial Sequence
  GFR-binding peptide
  MOD_RES (1), (3), (37), (38): Xaa is C or S
  MOD_RES (15), (16), (17), (18), (19): Xaa is A or G
  MOD_RES (20), (21), (22), (23): Xaa is A or G or is absent
XGXAKVVMNQYNKLXXXXXXXXXLYLVSIASLKTPAXXAKPV

SEQ ID NO: 2354 - protein, 36 aa, Artificial Sequence
  GFR-binding peptide
  MOD_RES (36), (36): Xaa is C or S
LHDELTYHYKLFIPKKRVIEKYLVSIPSLQVQTPRX

SEQ ID NO: 2355 - protein, 43 aa, Artificial Sequence
  GFR-binding peptide
  MOD_RES (2), (4), (38), (39): Xaa is C or S
  MOD_RES (16), (17), (18), (19), (20): Xaa is A or G
  MOD_RES (21), (22), (23), (24): Xaa is A or G or is absent
RXGXGEVVMDRHKRLXXXXXXXXXYYLMSTASLETPVXXAKPI

SEQ ID NO: 2356 - protein, 34 aa, Artificial Sequence
  GFR-binding peptide
  MOD_RES (1), (34): Xaa is C or S
  MOD_RES (12), (13), (14), (15), (16): Xaa is A or G
  MOD_RES (17), (18), (19), (20): Xaa is A or G or is absent
XSKVVMRYKKLXXXXXXXXXFYLISIANLDQPVX

SEQ ID NO: 2357 - protein, 43 aa, Artificial Sequence
  GFR-binding peptide
  MOD_RES (2), (4), (38), (39): Xaa is C or S
  MOD_RES (16), (17), (18), (19), (20): Xaa is A or G
  MOD_RES (21), (22), (23), (24): Xaa is A or G or is absent
HXGXARVVMNRYKKLXXXXXXXXXFYLVSIANLQTPAXXPKPV

SEQ ID NO: 2358 - protein, 33 aa, Artificial Sequence
  GFR-binding peptide
  MOD_RES (33), (33): Xaa is C or S
  MOD_RES (11), (12), (13), (14), (15): Xaa is A or G
  MOD_RES (16), (17), (18), (19): Xaa is A or G or is absent
SRVIMRYKKLXXXXXXXXXFYLISIANLAQPVX

SEQ ID NO: 2359 - protein, 38 aa, Artificial Sequence
  GFR-binding peptide
  MOD_RES (1), (34), (35): Xaa is C or S
  MOD_RES (12), (13), (14), (15), (16): Xaa is A or G
  MOD_RES (17), (18), (19), (20): Xaa is A or G or is absent
XSKVVMRYKKLXXXXXXXXXFYLISIANLDQPVXXPSA

SEQ ID NO: 2360 - protein, 37 aa, Artificial Sequence
  GFR-binding peptide
  MOD_RES (1), (3), (37): Xaa is C or S
  MOD_RES (15), (16), (17), (18), (19): Xaa is A or G
  MOD_RES (20), (21), (22), (23): Xaa is A or G or is absent
XGXGEVVMERYKKLXXXXXXXXXFYLMSIANLETPVX

SEQ ID NO: 2361 - protein, 39 aa, Artificial Sequence
  GFR-binding peptide
  MOD_RES (2), (36), (37): Xaa is C or S
  MOD_RES (14), (15), (16), (17), (18): Xaa is A or G
  MOD_RES (19), (20), (21), (22): Xaa is A or G or is absent
GXAKVVMNRHKRLXXXXXXXXXYYLVSTASLKTPAXXAK

SEQ ID NO: 2362 - protein, 34 aa, Artificial Sequence
  GFR-binding peptide
  MOD_RES (1), (33), (34): Xaa is C or S
XSRVVMNQYNKLIVNSSDDLYLVSIASLKTPAXX

SEQ ID NO: 2363 - protein, 39 aa, Artificial Sequence
  GFR-binding peptide
  MOD_RES (33), (34): Xaa is C or S
  MOD_RES (11), (12), (13), (14), (15): Xaa is A or G
  MOD_RES (16), (17), (18), (19): Xaa is A or G or is absent
SRVIMRYKKLXXXXXXXXXFYLISIANLAQPVXXPAASA

SEQ ID NO: 2364 - protein, 41 aa, Artificial Sequence
  GFR-binding peptide
  MOD_RES (2), (4), (37), (38): Xaa is C or S
  MOD_RES (15), (16), (17), (18), (19): Xaa is A or G
  MOD_RES (20), (21), (22), (23): Xaa is A or G or is absent
SXKXSRVIMQYNKLXXXXXXXXXLYLISIASLAQPVXXPAA

SEQ ID NO: 2365 - protein, 42 aa, Artificial Sequence
  GFR-binding peptide
  MOD_RES (1), (3), (40): Xaa is C or S
XKXALHDELTRYKKLFIPKKRVIEFYLVSIANLQVQTPRXQV

SEQ ID NO: 2366 - protein, 33 aa, Artificial Sequence
  GFR-binding peptide
HDELTRHKRLFIPKKRVIEYYLVSTASLQVQTP

SEQ ID NO: 2367 - protein, 35 aa, Artificial Sequence
  GFR-binding peptide
  MOD_RES (34), (35): Xaa is C or S
  MOD_RES (12), (13), (14), (15), (16): Xaa is A or G
  MOD_RES (17), (18), (19), (20): Xaa is A or G or is absent
SRVVMNQYNKLXXXXXXXXXLYLVSIASLKTPAXX

SEQ ID NO: 2368 - protein, 34 aa, Artificial Sequence
  GFR-binding peptide
  MOD_RES (32), (33): Xaa is C or S
GEVVMDQYNKLVVKENEDLYLMSIASLETPVXXA

SEQ ID NO: 2369 - protein, 33 aa, Artificial Sequence
  GFR-binding peptide
  MOD_RES (2), (2): Xaa is C or S
GXARVVMNRHKRLIVNSSDDYYLVSTASLQTPA

SEQ ID NO: 2370 - protein, 37 aa, Artificial Sequence
  GFR-binding peptide
  MOD_RES (32), (33): Xaa is C or S
GEVVMEYHYKLVVKDYEDKYLMSIPSLETPVXXAKPI

SEQ ID NO: 2371 - protein, 35 aa, Artificial Sequence
  GFR-binding peptide
  MOD_RES (13), (14), (15), (16), (17): Xaa is A or G
  MOD_RES (18), (19), (20), (21): Xaa is A or G or is absent
ALHDELTQYNKLXXXXXXXXXLYLVSIASLQVQTP

SEQ ID NO: 2372 - protein, 39 aa, Artificial Sequence
  GFR-binding peptide
  MOD_RES (2), (4): Xaa is C or S
  MOD_RES (17), (18), (19), (20), (21): Xaa is A or G
  MOD_RES (22), (23), (24), (25): Xaa is A or G or is absent
EXKXALHDELTRHKRLXXXXXXXXXYYLVSTASLQVQTP

SEQ ID NO: 2373 - protein, 34 aa, Artificial Sequence
  GFR-binding peptide
HDELTRYKKLFIPKKRVIEFYLVSIANLQVQTPR

SEQ ID NO: 2374 - protein, 38 aa, Artificial Sequence
  GFR-binding peptide
  MOD_RES (1), (33), (34): Xaa is C or S
XAKVVMNYHYKLIVNNSSDKYLVSIPSLKTPAXXAKPV

SEQ ID NO: 2375 - protein, 37 aa, Artificial Sequence
  GFR-binding peptide
  MOD_RES (1), (3): Xaa is C or S
  MOD_RES (16), (17), (18), (19), (20): Xaa is A or G
  MOD_RES (21), (22), (23), (24): Xaa is A or G or is absent
XKXALHDELTYHYKLXXXXXXXXXKYLVSIPSLQVQT

SEQ ID NO: 2376 - protein, 39 aa, Artificial Sequence
  GFR-binding peptide
  MOD_RES (2), (34), (35): Xaa is C or S
GXSRVVMNRHKRLIVNSSDDYYLVSTASLKTPAXXPKPV

SEQ ID NO: 2377 - protein, 37 aa, Artificial Sequence
  GFR-binding peptide
  MOD_RES (1), (33), (34): Xaa is C or S
XGEVVMEQYNKLVVKDYEDLYLMSIASLETPVXXAKP

SEQ ID NO: 2378 - protein, 37 aa, Artificial Sequence
  GFR-binding peptide
  MOD_RES (2), (4), (37): Xaa is C or S
RXGXEAVSMGERHKRLTPVGMDDYYLVSTASLKTPVX

SEQ ID NO: 2379 - protein, 42 aa, Artificial Sequence
  GFR-binding peptide
  MOD_RES (2), (4), (38), (39): Xaa is C or S
  MOD_RES (16), (17), (18), (19), (20): Xaa is A or G
  MOD_RES (21), (22), (23), (24): Xaa is A or G or is absent
HXGXSRVVMNQYNKLXXXXXXXXXLYLVSIASLKTPAXXPKP

SEQ ID NO: 2380 - protein, 38 aa, Artificial Sequence
  GFR-binding peptide
  MOD_RES (1), (3), (37), (38): Xaa is C or S
  MOD_RES (15), (16), (17), (18), (19): Xaa is A or G
  MOD_RES (20), (21), (22), (23): Xaa is A or G or is absent
XGXGEVVMDYHYKLXXXXXXXXXKYLMSIPSLETPVXX

SEQ ID NO: 2381 - protein, 39 aa, Artificial Sequence
  GFR-binding peptide
  MOD_RES (2), (36), (37): Xaa is C or S
  MOD_RES (14), (15), (16), (17), (18): Xaa is A or G
  MOD_RES (19), (20), (21), (22): Xaa is A or G or is absent
GXAKVVMNRYKKLXXXXXXXXXFYLVSIANLKTPAXXAK

SEQ ID NO: 2382 - protein, 38 aa, Artificial Sequence
  GFR-binding peptide
  MOD_RES (1), (3), (37), (38): Xaa is C or S
  MOD_RES (15), (16), (17), (18), (19): Xaa is A or G
  MOD_RES (20), (21), (22), (23): Xaa is A or G or is absent
XGXGEVVMEQYNKLXXXXXXXXXLYLMSIASLETPVXX

SEQ ID NO: 2383 - protein, 42 aa, Artificial Sequence
  GFR-binding peptide
  MOD_RES (2), (36), (37): Xaa is C or S
  MOD_RES (14), (15), (16), (17), (18): Xaa is A or G
  MOD_RES (19), (20), (21), (22): Xaa is A or G or is absent
GXGEVVMDYHYKLXXXXXXXXXKYLMSIPSLETPVXXAKPIK

SEQ ID NO: 2384 - protein, 35 aa, Artificial Sequence
  GFR-binding peptide
  MOD_RES (1), (33), (34): Xaa is C or S
XAKVVMNRHKRLIVNNSSDYYLVSTASLKTPAXXA

SEQ ID NO: 2385 - protein, 37 aa, Artificial Sequence
  GFR-binding peptide
  MOD_RES (31), (32): Xaa is C or S
RVVMNYHYKLIVNSSDDKYLVSIPSLQTPAXXPKPVT

SEQ ID NO: 2386 - protein, 36 aa, Artificial Sequence
  GFR-binding peptide
  MOD_RES (1), (3), (34), (35): Xaa is C or S
XKXSKVVMYHYKLVKPTRGVKYLISIPSLDQPVXXP

SEQ ID NO: 2387 - protein, 34 aa, Artificial Sequence
  GFR-binding peptide
  MOD_RES (33), (34): Xaa is C or S
  MOD_RES (11), (12), (13), (14), (15): Xaa is A or G
  MOD_RES (16), (17), (18), (19): Xaa is A or G or is absent
SKVIMQYNKLXXXXXXXXXLYLISIASLDQSVXX

SEQ ID NO: 2388 - protein, 44 aa, Artificial Sequence
  GFR-binding peptide
  MOD_RES (1), (3), (38), (39): Xaa is C or S
  MOD_RES (16), (17), (18), (19), (20): Xaa is A or G
  MOD_RES (21), (22), (23), (24): Xaa is A or G or is absent
XGXEAVSMGERYKKLXXXXXXXXXFYLVSIANLKTPVXXAKGVK

SEQ ID NO: 2389 - protein, 39 aa, Artificial Sequence
  GFR-binding peptide
  MOD_RES (1), (3), (37), (38): Xaa is C or S
  MOD_RES (15), (16), (17), (18), (19): Xaa is A or G
  MOD_RES (20), (21), (22), (23): Xaa is A or G or is absent
XGXSRVVMNRYKKLXXXXXXXXXFYLVSIANLKTPAXXP

SEQ ID NO: 2390 - protein, 35 aa, Artificial Sequence
  GFR-binding peptide
  MOD_RES (1), (32), (33): Xaa is C or S
XSKVIMRYKKLIKPTKGIFYLISIANLDQSVXXPS

SEQ ID NO: 2391 - protein, 40 aa, Artificial Sequence
  GFR-binding peptide
  MOD_RES (1), (3), (38), (39): Xaa is C or S
  MOD_RES (16), (17), (18), (19), (20): Xaa is A or G
  MOD_RES (21), (22), (23), (24): Xaa is A or G or is absent
XGXEAVSMGEYHYKLXXXXXXXXXKYLVSIPSLKTPVXXA

SEQ ID NO: 2392 - protein, 40 aa, Artificial Sequence
  GFR-binding peptide
  MOD_RES (36), (36): Xaa is C or S
LHDELTYHYKLFIPKKRVIEKYLVSIPSLQVQTPRXQVNR

SEQ ID NO: 2393 - protein, 35 aa, Artificial Sequence
  GFR-binding peptide
  MOD_RES (1), (3), (35): Xaa is C or S
XGXGEVVMDYHYKLVVKENEDKYLMSIPSLETPVX

SEQ ID NO: 2394 - protein, 41 aa, Artificial Sequence
  GFR-binding peptide
  MOD_RES (2), (36), (37): Xaa is C or S
  MOD_RES (14), (15), (16), (17), (18): Xaa is A or G
  MOD_RES (19), (20), (21), (22): Xaa is A or G or is absent
GXGEVVMDRYKKLXXXXXXXXXFYLMSIANLETPVXXAKPI

SEQ ID NO: 2395 - protein, 39 aa, Artificial Sequence
  GFR-binding peptide
  MOD_RES (1), (3), (37), (38): Xaa is C or S
  MOD_RES (15), (16), (17), (18), (19): Xaa is A or G
  MOD_RES (20), (21), (22), (23): Xaa is A or G or is absent
XGXGEVVMERHKRLXXXXXXXXXYYLMSTASLETPVXXA

SEQ ID NO: 2396 - protein, 38 aa, Artificial Sequence
  GFR-binding peptide
  MOD_RES (37), (37): Xaa is C or S
ALHDELTRYKKLFIPKKRVIEFYLVSIANLQVQTPRXQ

SEQ ID NO: 2397 - protein, 35 aa, Artificial Sequence
  GFR-binding peptide
  MOD_RES (33), (34): Xaa is C or S
  MOD_RES (11), (12), (13), (14), (15): Xaa is A or G
  MOD_RES (16), (17), (18), (19): Xaa is A or G or is absent
SRVIMRHKRLXXXXXXXXXYYLISTASLAQPVXXP

SEQ ID NO: 2398 - protein, 36 aa, Artificial Sequence
  GFR-binding peptide
  MOD_RES (1), (34), (35): Xaa is C or S
  MOD_RES (12), (13), (14), (15), (16): Xaa is A or G
  MOD_RES (17), (18), (19), (20): Xaa is A or G or is absent
XSKVIMRYKKLXXXXXXXXXFYLISIANLDQSVXXP

SEQ ID NO: 2399 - protein, 37 aa, Artificial Sequence
  GFR-binding peptide
  MOD_RES (1), (3), (37): Xaa is C or S
  MOD_RES (15), (16), (17), (18), (19): Xaa is A or G
  MOD_RES (20), (21), (22), (23): Xaa is A or G or is absent
XGXSRVVMNRYKKLXXXXXXXXXFYLVSIANLKTPAX

SEQ ID NO: 2400 - protein, 34 aa, Artificial Sequence
  GFR-binding peptide
  MOD_RES (1), (32), (33): Xaa is C or S
XSKVIMRHKRLIKPTKGIYYLISTASLDQSVXXP

SEQ ID NO: 2401 - protein, 41 aa, Artificial Sequence
  GFR-binding peptide
  MOD_RES (1), (3), (35), (36): Xaa is C or S
XGXARVVMNYHYKLIVNSSDDKYLVSIPSLQTPAXXPKPVT

SEQ ID NO: 2402 - protein, 38 aa, Artificial Sequence
  GFR-binding peptide
  MOD_RES (2), (4), (36), (37): Xaa is C or S
HXGXAKVVMNRYKKLIVNNSSDFYLVSIANLKTPAXXA

SEQ ID NO: 2403 - protein, 34 aa, Artificial Sequence
  GFR-binding peptide
  MOD_RES (33), (34): Xaa is C or S
  MOD_RES (11), (12), (13), (14), (15): Xaa is A or G
  MOD_RES (16), (17), (18), (19): Xaa is A or G or is absent
KVVMNQYNKLXXXXXXXXXLYLVSIASLKTPAXX

SEQ ID NO: 2404 - protein, 36 aa, Artificial Sequence
  GFR-binding peptide
  MOD_RES (2), (34), (35): Xaa is C or S
GXARVVMNRHKRLIVNSSDDYYLVSTASLQTPAXXP

SEQ ID NO: 2405 - protein, 40 aa, Artificial Sequence
  GFR-binding peptide
  MOD_RES (2), (4), (36), (37): Xaa is C or S
HXGXARVVMNYHYKLIVNSSDDKYLVSIPSLQTPAXXPKP

SEQ ID NO: 2406 - protein, 39 aa, Artificial Sequence
  GFR-binding peptide
  MOD_RES (2), (4), (38), (39): Xaa is C or S
  MOD_RES (16), (17), (18), (19), (20): Xaa is A or G
  MOD_RES (21), (22), (23), (24): Xaa is A or G or is absent
HXGXARVVMNRYKKLXXXXXXXXXFYLVSIANLQTPAXX

SEQ ID NO: 2407 - protein, 38 aa, Artificial Sequence
  GFR-binding peptide
  MOD_RES (33), (34): Xaa is C or S
  MOD_RES (11), (12), (13), (14), (15): Xaa is A or G
  MOD_RES (16), (17), (18), (19): Xaa is A or G or is absent
SKVIMRYKKLXXXXXXXXXFYLISIANLDQSVXXPSAS

SEQ ID NO: 2408 - protein, 34 aa, Artificial Sequence
  GFR-binding peptide
  MOD_RES (33), (34): Xaa is C or S
  MOD_RES (11), (12), (13), (14), (15): Xaa is A or G
  MOD_RES (16), (17), (18), (19): Xaa is A or G or is absent
RVVMNQYNKLXXXXXXXXXLYLVSIASLKTPAXX

SEQ ID NO: 2409 - protein, 32 aa, Artificial Sequence
  GFR-binding peptide
  MOD_RES (31), (31): Xaa is C or S
RVVMNQYNKLIVNSSDDLYLVSIASLKTPAXT

SEQ ID NO: 2410 - protein, 41 aa, Artificial Sequence
  GFR-binding peptide
  MOD_RES (1), (3), (35), (36): Xaa is C or S
XGXGEVVMEQYNKLVVKDYEDLYLMSIASLETPVXXAKPIS

SEQ ID NO: 2411 - protein, 34 aa, Artificial Sequence
  GFR-binding peptide
  MOD_RES (31), (32): Xaa is C or S
SKVIMYHYKLIKPTKGIKYLISIPSLDQSVXXPS

SEQ ID NO: 2412 - protein, 38 aa, Artificial Sequence
  GFR-binding peptide
  MOD_RES (2), (4), (36), (37): Xaa is C or S
RXGXGEVVMDYHYKLVVKENEDKYLMSIPSLETPVXXA

SEQ ID NO: 2413 - protein, 36 aa, Artificial Sequence
  GFR-binding peptide
  MOD_RES (2), (35), (36): Xaa is C or S
  MOD_RES (13), (14), (15), (16), (17): Xaa is A or G
  MOD_RES (18), (19), (20), (21): Xaa is A or G or is absent
KXSKVIMRHKRLXXXXXXXXXYYLISTASLDQSVXX

SEQ ID NO: 2414 - protein, 41 aa, Artificial Sequence
  GFR-binding peptide
  MOD_RES (37), (37): Xaa is C or S
ALHDELTRHKRLFIPKKRVIEYYLVSTASLQVQTPRXQVNR

SEQ ID NO: 2415 - protein, 39 aa, Artificial Sequence
  GFR-binding peptide
  MOD_RES (1), (3), (35), (36): Xaa is C or S
XGXARVVMNYHYKLIVNSSDDKYLVSIPSLQTPAXXPKP

SEQ ID NO: 2416 - protein, 36 aa, Artificial Sequence
  GFR-binding peptide
  MOD_RES (35), (35): Xaa is C or S
HDELTYHYKLFIPKKRVIEKYLVSIPSLQVQTPRXQ

SEQ ID NO: 2417 - protein, 38 aa, Artificial Sequence
  GFR-binding peptide
  MOD_RES (1), (33), (34): Xaa is C or S
XARVVMNYHYKLIVNSSDDKYLVSIPSLQTPAXXPKPV

SEQ ID NO: 2418 - protein, 36 aa, Artificial Sequence
  GFR-binding peptide
  MOD_RES (1), (32), (33): Xaa is C or S
XSKVIMRYKKLIKPTKGIFYLISIANLDQSVXXPSA

SEQ ID NO: 2419 - protein, 37 aa, Artificial Sequence
  GFR-binding peptide
  MOD_RES (1), (3), (34), (35): Xaa is C or S
XKXSKVVMRHKRLVKPTRGVYYLISTASLDQPVXXPS

SEQ ID NO: 2420 - protein, 40 aa, Artificial Sequence
  GFR-binding peptide
  MOD_RES (2), (4), (36), (37): Xaa is C or S
RXGXGEVVMEYHYKLVVKDYEDKYLMSIPSLETPVXXAKP

SEQ ID NO: 2421 - protein, 44 aa, Artificial Sequence
  GFR-binding peptide
  MOD_RES (1), (3), (40): Xaa is C or S
  MOD_RES (16), (17), (18), (19), (20): Xaa is A or G
  MOD_RES (21), (22), (23), (24): Xaa is A or G or is absent
XKXALHDELTQYNKLXXXXXXXXXLYLVSIASLQVQTPRXQVNR

SEQ ID NO: 2422 - protein, 41 aa, Artificial Sequence
  GFR-binding peptide
  MOD_RES (1), (38): Xaa is C or S
XALHDELTRYKKLFIPKKRVIEFYLVSIANLQVQTPRXQVN

SEQ ID NO: 2423 - protein, 37 aa, Artificial Sequence
  GFR-binding peptide
  MOD_RES (1), (35), (36): Xaa is C or S
  MOD_RES (13), (14), (15), (16), (17): Xaa is A or G
  MOD_RES (18), (19), (20), (21): Xaa is A or G or is absent
XGEVVMDQYNKLXXXXXXXXXLYLMSIASLETPVXXA

SEQ ID NO: 2424 - protein, 35 aa, Artificial Sequence
  GFR-binding peptide
  MOD_RES (2), (35): Xaa is C or S
  MOD_RES (13), (14), (15), (16), (17): Xaa is A or G
  MOD_RES (18), (19), (20), (21): Xaa is A or G or is absent
KXSKVIMQYNKLXXXXXXXXXLYLISIASLDQSVX

SEQ ID NO: 2425 - protein, 35 aa, Artificial Sequence
  GFR-binding peptide
  MOD_RES (2), (35): Xaa is C or S
  MOD_RES (13), (14), (15), (16), (17): Xaa is A or G
  MOD_RES (18), (19), (20), (21): Xaa is A or G or is absent
KXSKVVMRHKRLXXXXXXXXXYYLISTASLDQPVX

SEQ ID NO: 2426 - protein, 35 aa, Artificial Sequence
  GFR-binding peptide
  MOD_RES (2), (2): Xaa is C or S
  MOD_RES (14), (15), (16), (17), (18): Xaa is A or G
  MOD_RES (19), (20), (21), (22): Xaa is A or G or is absent
GXGEVVMERYKKLXXXXXXXXXFYLMSIANLETPV

SEQ ID NO: 2427 - protein, 36 aa, Artificial Sequence
  GFR-binding peptide
  MOD_RES (1), (33), (34): Xaa is C or S
XGEVVMEYHYKLVVKDYEDKYLMSIPSLETPVXXAK

SEQ ID NO: 2428 - protein, 32 aa, Artificial Sequence
  GFR-binding peptide
  MOD_RES (32), (32): Xaa is C or S
AKVVMNYHYKLIVNNSSDKYLVSIPSLKTPAX

SEQ ID NO: 2429 - protein, 37 aa, Artificial Sequence
  GFR-binding peptide
  MOD_RES (2), (4), (36), (37): Xaa is C or S
RXGXGEVVMERHKRLVVKDYEDYYLMSTASLETPVXX

SEQ ID NO: 2430 - protein, 41 aa, Artificial Sequence
  GFR-binding peptide
  MOD_RES (37), (37): Xaa is C or S
ALHDELTQYNKLFIPKKRVIELYLVSIASLQVQTPRXQVNR

SEQ ID NO: 2431 - protein, 40 aa, Artificial Sequence
  GFR-binding peptide
  MOD_RES (34), (35): Xaa is C or S
  MOD_RES (12), (13), (14), (15), (16): Xaa is A or G
  MOD_RES (17), (18), (19), (20): Xaa is A or G or is absent
GEVVMERHKRLXXXXXXXXXYYLMSTASLETPVXXAKPIS

SEQ ID NO: 2432 - protein, 35 aa, Artificial Sequence
  GFR-binding peptide
  MOD_RES (1), (33), (34): Xaa is C or S
XARVVMNRHKRLIVNSSDDYYLVSTASLQTPAXXP

SEQ ID NO: 2433 - protein, 37 aa, Artificial Sequence
  GFR-binding peptide
  MOD_RES (2), (36), (37): Xaa is C or S
  MOD_RES (14), (15), (16), (17), (18): Xaa is A or G
  MOD_RES (19), (20), (21), (22): Xaa is A or G or is absent
GXGEVVMEYHYKLXXXXXXXXXKYLMSIPSLETPVXX

SEQ ID NO: 2434 - protein, 36 aa, Artificial Sequence
  GFR-binding peptide
  MOD_RES (1), (1): Xaa is C or S
  MOD_RES (14), (15), (16), (17), (18): Xaa is A or G
  MOD_RES (19), (20), (21), (22): Xaa is A or G or is absent
XALHDELTYHYKLXXXXXXXXXKYLVSIPSLQVQTP

SEQ ID NO: 2435 - protein, 42 aa, Artificial Sequence
  GFR-binding peptide
  MOD_RES (1), (3), (37), (38): Xaa is C or S
  MOD_RES (15), (16), (17), (18), (19): Xaa is A or G
  MOD_RES (20), (21), (22), (23): Xaa is A or G or is absent
XGXSRVVMNRYKKLXXXXXXXXXFYLVSIANLKTPAXXPKPV

SEQ ID NO: 2436 - protein, 42 aa, Artificial Sequence
  GFR-binding peptide
  MOD_RES (2), (39): Xaa is C or S
  MOD_RES (15), (16), (17), (18), (19): Xaa is A or G
  MOD_RES (20), (21), (22), (23): Xaa is A or G or is absent
KXALHDELTQYNKLXXXXXXXXXLYLVSIASLQVQTPRXQVN

SEQ ID NO: 2437 - protein, 41 aa, Artificial Sequence
  GFR-binding peptide
  MOD_RES (2), (36), (37): Xaa is C or S
  MOD_RES (14), (15), (16), (17), (18): Xaa is A or G
  MOD_RES (19), (20), (21), (22): Xaa is A or G or is absent
GXGEVVMDRHKRLXXXXXXXXXYYLMSTASLETPVXXAKPI

SEQ ID NO: 2438 - protein, 34 aa, Artificial Sequence
  GFR-binding peptide
  MOD_RES (1), (3), (34): Xaa is C or S
XKXSRVIMQYNKLVKPKRGVLYLISIASLAQPVX

SEQ ID NO: 2439 - protein, 33 aa, Artificial Sequence
  GFR-binding peptide
  MOD_RES (31), (32): Xaa is C or S
EVVMDRYKKLVVKENEDFYLMSIANLETPVXXA

SEQ ID NO: 2440 - protein, 36 aa, Artificial Sequence
  GFR-binding peptide
  MOD_RES (33), (34): Xaa is C or S
EAVSMGERHKRLTPVGMDDYYLVSTASLKTPVXXAK

SEQ ID NO: 2441 - protein, 32 aa, Artificial Sequence
  GFR-binding peptide
  MOD_RES (11), (12), (13), (14), (15): Xaa is A or G
  MOD_RES (16), (17), (18), (19): Xaa is A or G or is absent
HDELTYHYKLXXXXXXXXXKYLVSIPSLQVQT

SEQ ID NO: 2442 - protein, 35 aa, Artificial Sequence
  GFR-binding peptide
  MOD_RES (31), (32): Xaa is C or S
EVVMERHKRLVVKDYEDYYLMSTASLETPVXXAKP

SEQ ID NO: 2443 - protein, 43 aa, Artificial Sequence
  GFR-binding peptide
  MOD_RES (2), (4), (37), (38): Xaa is C or S
  MOD_RES (15), (16), (17), (18), (19): Xaa is A or G
  MOD_RES (20), (21), (22), (23): Xaa is A or G or is absent
SXKXSRVIMRHKRLXXXXXXXXXYYLISTASLAQPVXXPAASA

SEQ ID NO: 2444 - protein, 37 aa, Artificial Sequence
  GFR-binding peptide
  MOD_RES (2), (2): Xaa is C or S
KXALHDELTRHKRLFIPKKRVIEYYLVSTASLQVQTP

SEQ ID NO: 2445 - protein, 37 aa, Artificial Sequence
  GFR-binding peptide
  MOD_RES (2), (36): Xaa is C or S
  MOD_RES (14), (15), (16), (17), (18): Xaa is A or G
  MOD_RES (19), (20), (21), (22): Xaa is A or G or is absent
GXSRVVMNYHYKLXXXXXXXXXKYLVSIPSLKTPAXT

SEQ ID NO: 2446 - protein, 39 aa, Artificial Sequence
  GFR-binding peptide
  MOD_RES (2), (35), (36): Xaa is C or S
  MOD_RES (13), (14), (15), (16), (17): Xaa is A or G
  MOD_RES (18), (19), (20), (21): Xaa is A or G or is absent
KXSKVVMRHKRLXXXXXXXXXYYLISTASLDQPVXXPSA

SEQ ID NO: 2447 - protein, 41 aa, Artificial Sequence
  GFR-binding peptide
  MOD_RES (1), (3), (40): Xaa is C or S
XKXALHDELTYHYKLFIPKKRVIEKYLVSIPSLQVQTPRXQ

SEQ ID NO: 2448 - protein, 31 aa, Artificial Sequence
  GFR-binding peptide
  MOD_RES (31), (31): Xaa is C or S
EVVMDRYKKLVVKENEDFYLMSIANLETPVX

SEQ ID NO: 2449 - protein, 36 aa, Artificial Sequence
  GFR-binding peptide
  MOD_RES (1), (3), (36): Xaa is C or S
XGXEAVSMGEYHYKLTPVGMDDKYLVSIPSLKTPVX

SEQ ID NO: 2450 - protein, 33 aa, Artificial Sequence
  GFR-binding peptide
  MOD_RES (32), (32): Xaa is C or S
SRVVMNRHKRLIVNSSDDYYLVSTASLKTPAXT

SEQ ID NO: 2451 - protein, 41 aa, Artificial Sequence
  GFR-binding peptide
  MOD_RES (1), (3), (37), (38): Xaa is C or S
  MOD_RES (15), (16), (17), (18), (19): Xaa is A or G
  MOD_RES (20), (21), (22), (23): Xaa is A or G or is absent
XGXARVVMNRHKRLXXXXXXXXXYYLVSTASLQTPAXXPKP

SEQ ID NO: 2452 - protein, 35 aa, Artificial Sequence
  GFR-binding peptide
  MOD_RES (2), (2): Xaa is C or S
  MOD_RES (14), (15), (16), (17), (18): Xaa is A or G
  MOD_RES (19), (20), (21), (22): Xaa is A or G or is absent
GXARVVMNYHYKLXXXXXXXXXKYLVSIPSLQTPA

SEQ ID NO: 2453 - protein, 38 aa, Artificial Sequence
  GFR-binding peptide
  MOD_RES (33), (34): Xaa is C or S
  MOD_RES (11), (12), (13), (14), (15): Xaa is A or G
  MOD_RES (16), (17), (18), (19): Xaa is A or G or is absent
EVVMDQYNKLXXXXXXXXXLYLMSIASLETPVXXAKPI

SEQ ID NO: 2454 - protein, 40 aa, Artificial Sequence
  GFR-binding peptide
  MOD_RES (2), (4), (36), (37): Xaa is C or S
RXGXGEVVMDRYKKLVVKENEDFYLMSIANLETPVXXAKP

SEQ ID NO: 2455 - protein, 34 aa, Artificial Sequence
  GFR-binding peptide
  MOD_RES (1), (3): Xaa is C or S
XGXSRVVMNRHKRLIVNSSDDYYLVSTASLKTPA

SEQ ID NO: 2456 - protein, 32 aa, Artificial Sequence
  GFR-binding peptide
  MOD_RES (31), (32): Xaa is C or S
SKVIMQYNKLIKPTKGILYLISIASLDQSVXX

SEQ ID NO: 2457 - protein, 39 aa, Artificial Sequence
  GFR-binding peptide
  MOD_RES (1), (3), (35), (36): Xaa is C or S
XGXAKVVMNRHKRLIVNNSSDYYLVSTASLKTPAXXAKP

SEQ ID NO: 2458 - protein, 33 aa, Artificial Sequence
  GFR-binding peptide
  MOD_RES (33), (33): Xaa is C or S
  MOD_RES (11), (12), (13), (14), (15): Xaa is A or G
  MOD_RES (16), (17), (18), (19): Xaa is A or G or is absent
EVVMERYKKLXXXXXXXXXFYLMSIANLETPVX

SEQ ID NO: 2459 - protein, 39 aa, Artificial Sequence
  GFR-binding peptide
  MOD_RES (33), (34): Xaa is C or S
  MOD_RES (11), (12), (13), (14), (15): Xaa is A or G
  MOD_RES (16), (17), (18), (19): Xaa is A or G or is absent
KVVMNYHYKLXXXXXXXXXKYLVSIPSLKTPAXXAKPVA

SEQ ID NO: 2460 - protein, 42 aa, Artificial Sequence
  GFR-binding peptide
  MOD_RES (1), (38): Xaa is C or S
XALHDELTYHYKLFIPKKRVIEKYLVSIPSLQVQTPRXQVNR

SEQ ID NO: 2461 - protein, 35 aa, Artificial Sequence
  GFR-binding peptide
  MOD_RES (35), (35): Xaa is C or S
  MOD_RES (13), (14), (15), (16), (17): Xaa is A or G
  MOD_RES (18), (19), (20), (21): Xaa is A or G or is absent
EAVSMGERHKRLXXXXXXXXXYYLVSTASLKTPVX

SEQ ID NO: 2462 - protein, 38 aa, Artificial Sequence
  GFR-binding peptide
  MOD_RES (1), (32), (33): Xaa is C or S
XSRVIMQYNKLVKPKRGVLYLISIASLAQPVXXPAASA

SEQ ID NO: 2463 - protein, 36 aa, Artificial Sequence
  GFR-binding peptide
  MOD_RES (2), (36): Xaa is C or S
  MOD_RES (14), (15), (16), (17), (18): Xaa is A or G
  MOD_RES (19), (20), (21), (22): Xaa is A or G or is absent
GXSRVVMNRHKRLXXXXXXXXXYYLVSTASLKTPAX

SEQ ID NO: 2464 - protein, 33 aa, Artificial Sequence
  GFR-binding peptide
  MOD_RES (33), (33): Xaa is C or S
  MOD_RES (11), (12), (13), (14), (15): Xaa is A or G
  MOD_RES (16), (17), (18), (19): Xaa is A or G or is absent
SKVVMQYNKLXXXXXXXXXLYLISIASLDQPVX

SEQ ID NO: 2465 - protein, 35 aa, Artificial Sequence
  GFR-binding peptide
  MOD_RES (35), (35): Xaa is C or S
  MOD_RES (13), (14), (15), (16), (17): Xaa is A or G
  MOD_RES (18), (19), (20), (21): Xaa is A or G or is absent
EAVSMGEQYNKLXXXXXXXXXLYLVSIASLKTPVX

SEQ ID NO: 2466 - protein, 32 aa, Artificial Sequence
  GFR-binding peptide
  MOD_RES (1), (32): Xaa is C or S
XSRVIMQYNKLVKPKRGVLYLISIASLAQPVX

SEQ ID NO: 2467 - protein, 41 aa, Artificial Sequence
  GFR-binding peptide
  MOD_RES (2), (39): Xaa is C or S
  MOD_RES (15), (16), (17), (18), (19): Xaa is A or G
  MOD_RES (20), (21), (22), (23): Xaa is A or G or is absent
KXALHDELTYHYKLXXXXXXXXXKYLVSIPSLQVQTPRXQV

SEQ ID NO: 2468 - protein, 39 aa, Artificial Sequence
  GFR-binding peptide
  MOD_RES (33), (34): Xaa is C or S
  MOD_RES (11), (12), (13), (14), (15): Xaa is A or G
  MOD_RES (16), (17), (18), (19): Xaa is A or G or is absent
RVVMNYHYKLXXXXXXXXXKYLVSIPSLQTPAXXPKPVT

SEQ ID NO: 2469 - protein, 40 aa, Artificial Sequence
  GFR-binding peptide
  MOD_RES (1), (3), (38), (39): Xaa is C or S
  MOD_RES (16), (17), (18), (19), (20): Xaa is A or G
  MOD_RES (21), (22), (23), (24): Xaa is A or G or is absent
XGXEAVSMGERHKRLXXXXXXXXXYYLVSTASLKTPVXXA

SEQ ID NO: 2470 - protein, 32 aa, Artificial Sequence
  GFR-binding peptide
  MOD_RES (11), (12), (13), (14), (15): Xaa is A or G
  MOD_RES (16), (17), (18), (19): Xaa is A or G or is absent
RVVMNRYKKLXXXXXXXXXFYLVSIANLQTPA

SEQ ID NO: 2471 - protein, 35 aa, Artificial Sequence
  GFR-binding peptide
  MOD_RES (34), (35): Xaa is C or S
  MOD_RES (12), (13), (14), (15), (16): Xaa is A or G
  MOD_RES (17), (18), (19), (20): Xaa is A or G or is absent
AKVVMNQYNKLXXXXXXXXXLYLVSIASLKTPAXX

SEQ ID NO: 2472 - protein, 37 aa, Artificial Sequence
  GFR-binding peptide
  MOD_RES (32), (33): Xaa is C or S
SRVVMNYHYKLIVNSSDDKYLVSIPSLKTPAXXPKPV

SEQ ID NO: 2473 - protein, 43 aa, Artificial Sequence
  GFR-binding peptide
  MOD_RES (2), (4), (39), (40): Xaa is C or S
  MOD_RES (17), (18), (19), (20), (21): Xaa is A or G
  MOD_RES (22), (23), (24), (25): Xaa is A or G or is absent
RXGXEAVSMGERYKKLXXXXXXXXXFYLVSIANLKTPVXXAKG

SEQ ID NO: 2474 - protein, 31 aa, Artificial Sequence
  GFR-binding peptide
  MOD_RES (1), (1): Xaa is C or S
XSKVVMQYNKLVKPTRGVLYLISIASLDQPV

SEQ ID NO: 2475 - protein, 40 aa, Artificial Sequence
  GFR-binding peptide
  MOD_RES (1), (3), (34), (35): Xaa is C or S
XKXSRVIMYHYKLVKPKRGVKYLISIPSLAQPVXXPAASA

SEQ ID NO: 2476 - protein, 39 aa, Artificial Sequence
  GFR-binding peptide
  MOD_RES (2), (36), (37): Xaa is C or S
  MOD_RES (14), (15), (16), (17), (18): Xaa is A or G
  MOD_RES (19), (20), (21), (22): Xaa is A or G or is absent
GXARVVMNRYKKLXXXXXXXXXFYLVSIANLQTPAXXPK

SEQ ID NO: 2477 - protein, 38 aa, Artificial Sequence
  GFR-binding peptide
  MOD_RES (2), (4): Xaa is C or S
  MOD_RES (17), (18), (19), (20), (21): Xaa is A or G
  MOD_RES (22), (23), (24), (25): Xaa is A or G or is absent
RXGXEAVSMGERYKKLXXXXXXXXXFYLVSIANLKTPV

SEQ ID NO: 2478 - protein, 35 aa, Artificial Sequence
  GFR-binding peptide
  MOD_RES (31), (32): Xaa is C or S
EVVMEYHYKLVVKDYEDKYLMSIPSLETPVXXAKP

SEQ ID NO: 2479 - protein, 40 aa, Artificial Sequence
  GFR-binding peptide
  MOD_RES (2), (34), (35): Xaa is C or S
GXGEVVMDQYNKLVVKENEDLYLMSIASLETPVXXAKPIK

SEQ ID NO: 2480 - protein, 36 aa, Artificial Sequence
  GFR-binding peptide
  MOD_RES (33), (34): Xaa is C or S
  MOD_RES (11), (12), (13), (14), (15): Xaa is A or G
  MOD_RES (16), (17), (18), (19): Xaa is A or G or is absent
EVVMEYHYKLXXXXXXXXXKYLMSIPSLETPVXXAK

SEQ ID NO: 2481 - protein, 37 aa, Artificial Sequence
  GFR-binding peptide
  MOD_RES (1), (3), (35), (36): Xaa is C or S
XGXARVVMNYHYKLIVNSSDDKYLVSIPSLQTPAXXP

SEQ ID NO: 2482 - protein, 35 aa, Artificial Sequence
  GFR-binding peptide
  MOD_RES (1), (1): Xaa is C or S
  MOD_RES (14), (15), (16), (17), (18): Xaa is A or G
  MOD_RES (19), (20), (21), (22): Xaa is A or G or is absent
XEAVSMGERYKKLXXXXXXXXXFYLVSIANLKTPV

SEQ ID NO: 2483 - protein, 41 aa, Artificial Sequence
  GFR-binding peptide
  MOD_RES (2), (4), (36), (37): Xaa is C or S
HXGXSRVVMNRYKKLIVNSSDDFYLVSIANLKTPAXXPKPV

SEQ ID NO: 2484 - protein, 40 aa, Artificial Sequence
  GFR-binding peptide
  MOD_RES (2), (4), (37), (38): Xaa is C or S
  MOD_RES (15), (16), (17), (18), (19): Xaa is A or G
  MOD_RES (20), (21), (22), (23): Xaa is A or G or is absent
SXKXSRVIMQYNKLXXXXXXXXXLYLISIASLAQPVXXPA

SEQ ID NO: 2485 - protein, 38 aa, Artificial Sequence
  GFR-binding peptide
  MOD_RES (32), (33): Xaa is C or S
SRVVMNQYNKLIVNSSDDLYLVSIASLKTPAXXPKPVY

SEQ ID NO: 2486 - protein, 33 aa, Artificial Sequence
  GFR-binding peptide
  MOD_RES (1), (33): Xaa is C or S
XSRVVMNRYKKLIVNSSDDFYLVSIANLKTPAX

SEQ ID NO: 2487 - protein, 39 aa, Artificial Sequence
  GFR-binding peptide
  MOD_RES (2), (4), (35), (36): Xaa is C or S
SXKXSKVVMRYKKLVKPTRGVFYLISIANLDQPVXXPSA

SEQ ID NO: 2488 - protein, 37 aa, Artificial Sequence
  GFR-binding peptide
  MOD_RES (34), (34): Xaa is C or S
  MOD_RES (12), (13), (14), (15), (16): Xaa is A or G
  MOD_RES (17), (18), (19), (20): Xaa is A or G or is absent
SRVVMNRYKKLXXXXXXXXXFYLVSIANLKTPAXTPK

SEQ ID NO: 2489 - protein, 39 aa, Artificial Sequence
  GFR-binding peptide
  MOD_RES (34), (35): Xaa is C or S
  MOD_RES (12), (13), (14), (15), (16): Xaa is A or G
  MOD_RES (17), (18), (19), (20): Xaa is A or G or is absent
GEVVMERYKKLXXXXXXXXXFYLMSIANLETPVXXAKPI

SEQ ID NO: 2490 - protein, 35 aa, Artificial Sequence
  GFR-binding peptide
  MOD_RES (1), (3): Xaa is C or S
  MOD_RES (14), (15), (16), (17), (18): Xaa is A or G
  MOD_RES (19), (20), (21), (22): Xaa is A or G or is absent
XKXSKVIMQYNKLXXXXXXXXXLYLISIASLDQSV

SEQ ID NO: 2491 - protein, 40 aa, Artificial Sequence
  GFR-binding peptide
  MOD_RES (2), (4), (35), (36): Xaa is C or S
SXKXSKVVMYHYKLVKPTRGVKYLISIPSLDQPVXXPSAS

SEQ ID NO: 2492 - protein, 43 aa, Artificial Sequence
  GFR-binding peptide
  MOD_RES (2), (4), (38), (39): Xaa is C or S
  MOD_RES (16), (17), (18), (19), (20): Xaa is A or G
  MOD_RES (21), (22), (23), (24): Xaa is A or G or is absent
RXGXGEVVMERHKRLXXXXXXXXXYYLMSTASLETPVXXAKPI

SEQ ID NO: 2493 - protein, 40 aa, Artificial Sequence
  GFR-binding peptide
  MOD_RES (2), (34): Xaa is C or S
GXSRVVMNQYNKLIVNSSDDLYLVSIASLKTPAXTPKTVH

SEQ ID NO: 2494 - protein, 33 aa, Artificial Sequence
  GFR-binding peptide
LHDELTQYNKLFIPKKRVIELYLVSIASLQVQT

SEQ ID NO: 2495 - protein, 34 aa, Artificial Sequence
  GFR-binding peptide
  MOD_RES (1), (32), (33): Xaa is C or S
XSRVIMRHKRLVKPKRGVYYLISTASLAQPVXXP

SEQ ID NO: 2496 - protein, 38 aa, Artificial Sequence
  GFR-binding peptide
  MOD_RES (34), (35): Xaa is C or S
  MOD_RES (12), (13), (14), (15), (16): Xaa is A or G
  MOD_RES (17), (18), (19), (20): Xaa is A or G or is absent
GEVVMEYHYKLXXXXXXXXXKYLMSIPSLETPVXXAKP

SEQ ID NO: 2497 - protein, 38 aa, Artificial Sequence
  GFR-binding peptide
  MOD_RES (2), (34), (35): Xaa is C or S
GXGEVVMDYHYKLVVKENEDKYLMSIPSLETPVXXAKP

SEQ ID NO: 2498 - protein, 34 aa, Artificial Sequence
  GFR-binding peptide
  MOD_RES (1), (3): Xaa is C or S
XGXSRVVMNQYNKLIVNSSDDLYLVSIASLKTPA

SEQ ID NO: 2499 - protein, 33 aa, Artificial Sequence
  GFR-binding peptide
HDELTYHYKLFIPKKRVIEKYLVSIPSLQVQTP

SEQ ID NO: 2500 - protein, 38 aa, Artificial Sequence
  GFR-binding peptide
  MOD_RES (2), (4), (35), (36): Xaa is C or S
SXKXSKVVMQYNKLVKPTRGVLYLISIASLDQPVXXPS

SEQ ID NO: 2501 - protein, 37 aa, Artificial Sequence
  GFR-binding peptide
  MOD_RES (33), (34): Xaa is C or S
  MOD_RES (11), (12), (13), (14), (15): Xaa is A or G
  MOD_RES (16), (17), (18), (19): Xaa is A or G or is absent
EVVMDRHKRLXXXXXXXXXYYLMSTASLETPVXXAKP

SEQ ID NO: 2502 - protein, 34 aa, Artificial Sequence
  GFR-binding peptide
  MOD_RES (2), (4): Xaa is C or S
SXKXSKVIMYHYKLIKPTKGIKYLISIPSLDQSV

SEQ ID NO: 2503 - protein, 34 aa, Artificial Sequence
  GFR-binding peptide
  MOD_RES (34), (34): Xaa is C or S
  MOD_RES (12), (13), (14), (15), (16): Xaa is A or G
  MOD_RES (17), (18), (19), (20): Xaa is A or G or is absent
ARVVMNRHKRLXXXXXXXXXYYLVSTASLQTPAX

SEQ ID NO: 2504 - protein, 38 aa, Artificial Sequence
  GFR-binding peptide
  MOD_RES (2), (4), (38): Xaa is C or S
  MOD_RES (16), (17), (18), (19), (20): Xaa is A or G
  MOD_RES (21), (22), (23), (24): Xaa is A or G or is absent
HXGXARVVMNYHYKLXXXXXXXXXKYLVSIPSLQTPAX

SEQ ID NO: 2505 - protein, 38 aa, Artificial Sequence
  GFR-binding peptide
  MOD_RES (2), (35), (36): Xaa is C or S
  MOD_RES (13), (14), (15), (16), (17): Xaa is A or G
  MOD_RES (18), (19), (20), (21): Xaa is A or G or is absent
KXSKVIMYHYKLXXXXXXXXXKYLISIPSLDQSVXXPS

SEQ ID NO: 2506 - protein, 32 aa, Artificial Sequence
  GFR-binding peptide
  MOD_RES (31), (31): Xaa is C or S
RVVMNYHYKLIVNSSDDKYLVSIPSLKTPAXT

SEQ ID NO: 2507 - protein, 43 aa, Artificial Sequence
  GFR-binding peptide
  MOD_RES (2), (39): Xaa is C or S
  MOD_RES (15), (16), (17), (18), (19): Xaa is A or G
  MOD_RES (20), (21), (22), (23): Xaa is A or G or is absent
KXALHDELTYHYKLXXXXXXXXXKYLVSIPSLQVQTPRXQVNR

SEQ ID NO: 2508 - protein, 35 aa, Artificial Sequence
  GFR-binding peptide
  MOD_RES (33), (33): Xaa is C or S
  MOD_RES (11), (12), (13), (14), (15): Xaa is A or G
  MOD_RES (16), (17), (18), (19): Xaa is A or G or is absent
RVVMNYHYKLXXXXXXXXXKYLVSIPSLKTPAXTP

SEQ ID NO: 2509 - protein, 39 aa, Artificial Sequence
  GFR-binding peptide
  MOD_RES (1), (3): Xaa is C or S
  MOD_RES (16), (17), (18), (19), (20): Xaa is A or G
  MOD_RES (21), (22), (23), (24): Xaa is A or G or is absent
XKXALHDELTRYKKLXXXXXXXXXFYLVSIANLQVQTPR

SEQ ID NO: 2510 - protein, 36 aa, Artificial Sequence
  GFR-binding peptide
  MOD_RES (2), (36): Xaa is C or S
  MOD_RES (14), (15), (16), (17), (18): Xaa is A or G
  MOD_RES (19), (20), (21), (22): Xaa is A or G or is absent
GXAKVVMNQYNKLXXXXXXXXXLYLVSIASLKTPAX

SEQ ID NO: 2511 - protein, 38 aa, Artificial Sequence
  GFR-binding peptide
  MOD_RES (2), (35), (36): Xaa is C or S
GXEAVSMGEQYNKLTPVGMDDLYLVSIASLKTPVXXAK

SEQ ID NO: 2512 - protein, 39 aa, Artificial Sequence
  GFR-binding peptide
  MOD_RES (1), (33), (34): Xaa is C or S
XARVVMNYHYKLIVNSSDDKYLVSIPSLQTPAXXPKPVT

SEQ ID NO: 2513 - protein, 38 aa, Artificial Sequence
  GFR-binding peptide
  MOD_RES (1), (3), (35), (36): Xaa is C or S
XGXGEVVMEYHYKLVVKDYEDKYLMSIPSLETPVXXAK

SEQ ID NO: 2514 - protein, 39 aa, Artificial Sequence
  GFR-binding peptide
  MOD_RES (35), (36): Xaa is C or S
  MOD_RES (13), (14), (15), (16), (17): Xaa is A or G
  MOD_RES (18), (19), (20), (21): Xaa is A or G or is absent
EAVSMGERYKKLXXXXXXXXXFYLVSIANLKTPVXXAKG

SEQ ID NO: 2515 - protein, 33 aa, Artificial Sequence
  GFR-binding peptide
  MOD_RES (32), (32): Xaa is C or S
SRVVMNQYNKLIVNSSDDLYLVSIASLKTPAXT

SEQ ID NO: 2516 - protein, 39 aa, Artificial Sequence
  GFR-binding peptide
  MOD_RES (1), (34), (35): Xaa is C or S
XEAVSMGEYHYKLTPVGMDDKYLVSIPSLKTPVXXAKGV

SEQ ID NO: 2517 - protein, 42 aa, Artificial Sequence
  GFR-binding peptide
  MOD_RES (1), (3), (37): Xaa is C or S
  MOD_RES (15), (16), (17), (18), (19): Xaa is A or G
  MOD_RES (20), (21), (22), (23): Xaa is A or G or is absent
XGXSRVVMNYHYKLXXXXXXXXXKYLVSIPSLKTPAXTPKTV

SEQ ID NO: 2518 - protein, 37 aa, Artificial Sequence
  GFR-binding peptide
  MOD_RES (33), (34): Xaa is C or S
  MOD_RES (11), (12), (13), (14), (15): Xaa is A or G
  MOD_RES (16), (17), (18), (19): Xaa is A or G or is absent
EVVMEQYNKLXXXXXXXXXLYLMSIASLETPVXXAKP

SEQ ID NO: 2519 - protein, 38 aa, Artificial Sequence
  GFR-binding peptide
  MOD_RES (34), (35): Xaa is C or S
  MOD_RES (12), (13), (14), (15), (16): Xaa is A or G
  MOD_RES (17), (18), (19), (20): Xaa is A or G or is absent
GEVVMERHKRLXXXXXXXXXYYLMSTASLETPVXXAKP

SEQ ID NO: 2520 - protein, 32 aa, Artificial Sequence
  GFR-binding peptide
  MOD_RES (2), (2): Xaa is C or S
KXSRVIMRHKRLVKPKRGVYYLISTASLAQPV

SEQ ID NO: 2521 - protein, 34 aa, Artificial Sequence
  GFR-binding peptide
  MOD_RES (34), (34): Xaa is C or S
  MOD_RES (12), (13), (14), (15), (16): Xaa is A or G
  MOD_RES (17), (18), (19), (20): Xaa is A or G or is absent
ARVVMNYHYKLXXXXXXXXXKYLVSIPSLQTPAX

SEQ ID NO: 2522 - protein, 34 aa, Artificial Sequence
  GFR-binding peptide
  MOD_RES (34), (34): Xaa is C or S
  MOD_RES (12), (13), (14), (15), (16): Xaa is A or G
  MOD_RES (17), (18), (19), (20): Xaa is A or G or is absent
AKVVMNQYNKLXXXXXXXXXLYLVSIASLKTPAX

SEQ ID NO: 2523 - protein, 36 aa, Artificial Sequence
  GFR-binding peptide
  MOD_RES (2), (36): Xaa is C or S
  MOD_RES (14), (15), (16), (17), (18): Xaa is A or G
  MOD_RES (19), (20), (21), (22): Xaa is A or G or is absent
GXGEVVMDRHKRLXXXXXXXXXYYLMSTASLETPVX

SEQ ID NO: 2524 - protein, 44 aa, Artificial Sequence
  GFR-binding peptide
  MOD_RES (1), (3), (40): Xaa is C or S
  MOD_RES (16), (17), (18), (19), (20): Xaa is A or G
  MOD_RES (21), (22), (23), (24): Xaa is A or G or is absent
XKXALHDELTYHYKLXXXXXXXXXKYLVSIPSLQVQTPRXQVNR

SEQ ID NO: 2525 - protein, 39 aa, Artificial Sequence
  GFR-binding peptide
  MOD_RES (1), (3), (34), (35): Xaa is C or S
XKXSKVIMQYNKLIKPTKGILYLISIASLDQSVXXPSAS

SEQ ID NO: 2526 - protein, 37 aa, Artificial Sequence
  GFR-binding peptide
  MOD_RES (2), (36): Xaa is C or S
  MOD_RES (14), (15), (16), (17), (18): Xaa is A or G
  MOD_RES (19), (20), (21), (22): Xaa is A or G or is absent
GXSRVVMNQYNKLXXXXXXXXXLYLVSIASLKTPAXT

SEQ ID NO: 2527 - protein, 33 aa, Artificial Sequence
  GFR-binding peptide
HDELTRYKKLFIPKKRVIEFYLVSIANLQVQTP

SEQ ID NO: 2528 - protein, 35 aa, Artificial Sequence
  GFR-binding peptide
  MOD_RES (2), (34): Xaa is C or S
GXSRVVMNRHKRLIVNSSDDYYLVSTASLKTPAXT

SEQ ID NO: 2529 - protein, 36 aa, Artificial Sequence
  GFR-binding peptide
  MOD_RES (1), (33), (34): Xaa is C or S
XARVVMNYHYKLIVNSSDDKYLVSIPSLQTPAXXPK

SEQ ID NO: 2530 - protein, 39 aa, Artificial Sequence
  GFR-binding peptide
  MOD_RES (1), (38): Xaa is C or S
  MOD_RES (14), (15), (16), (17), (18): Xaa is A or G
  MOD_RES (19), (20), (21), (22): Xaa is A or G or is absent
XALHDELTRYKKLXXXXXXXXXFYLVSIANLQVQTPRXQ

SEQ ID NO: 2531 - protein, 39 aa, Artificial Sequence
  GFR-binding peptide
  MOD_RES (2), (4), (38): Xaa is C or S
  MOD_RES (16), (17), (18), (19), (20): Xaa is A or G
  MOD_RES (21), (22), (23), (24): Xaa is A or G or is absent
HXGXSRVVMNQYNKLXXXXXXXXXLYLVSIASLKTPAXT

SEQ ID NO: 2532 - protein, 36 aa, Artificial Sequence
  GFR-binding peptide
  MOD_RES (34), (35): Xaa is C or S
  MOD_RES (12), (13), (14), (15), (16): Xaa is A or G
  MOD_RES (17), (18), (19), (20): Xaa is A or G or is absent
SRVVMNYHYKLXXXXXXXXXKYLVSIPSLKTPAXXP

SEQ ID NO: 2533 - protein, 34 aa, Artificial Sequence
  GFR-binding peptide
  MOD_RES (32), (33): Xaa is C or S
GEVVMERHKRLVVKDYEDYYLMSTASLETPVXXA

SEQ ID NO: 2534 - protein, 38 aa, Artificial Sequence
  GFR-binding peptide
  MOD_RES (2), (2): Xaa is C or S
  MOD_RES (15), (16), (17), (18), (19): Xaa is A or G
  MOD_RES (20), (21), (22), (23): Xaa is A or G or is absent
KXALHDELTQYNKLXXXXXXXXXLYLVSIASLQVQTPR

SEQ ID NO: 2535 - protein, 38 aa, Artificial Sequence
  GFR-binding peptide
  MOD_RES (1), (34), (35): Xaa is C or S
  MOD_RES (12), (13), (14), (15), (16): Xaa is A or G
  MOD_RES (17), (18), (19), (20): Xaa is A or G or is absent
XSKVIMQYNKLXXXXXXXXXLYLISIASLDQSVXXPSA

SEQ ID NO: 2536 - protein, 39 aa, Artificial Sequence
  GFR-binding peptide
  MOD_RES (35), (35): Xaa is C or S
HDELTYHYKLFIPKKRVIEKYLVSIPSLQVQTPRXQVNR

SEQ ID NO: 2537 - protein, 33 aa, Artificial Sequence
  GFR-binding peptide
  MOD_RES (2), (2): Xaa is C or S
GXAKVVMNRYKKLIVNNSSDFYLVSIANLKTPA

SEQ ID NO: 2538 - protein, 36 aa, Artificial Sequence
  GFR-binding peptide
  MOD_RES (1), (3), (35), (36): Xaa is C or S
XGXAKVVMNRYKKLIVNNSSDFYLVSIANLKTPAXX

SEQ ID NO: 2539 - protein, 37 aa, Artificial Sequence
  GFR-binding peptide
  MOD_RES (2), (33), (34): Xaa is C or S
KXSKVIMRYKKLIKPTKGIFYLISIANLDQSVXXPSA

SEQ ID NO: 2540 - protein, 43 aa, Artificial Sequence
  GFR-binding peptide
  MOD_RES (1), (3), (37), (38): Xaa is C or S
  MOD_RES (15), (16), (17), (18), (19): Xaa is A or G
  MOD_RES (20), (21), (22), (23): Xaa is A or G or is absent
XGXAKVVMNQYNKLXXXXXXXXXLYLVSIASLKTPAXXAKPVA

SEQ ID NO: 2541 - protein, 40 aa, Artificial Sequence
  GFR-binding peptide
  MOD_RES (34), (35): Xaa is C or S
  MOD_RES (12), (13), (14), (15), (16): Xaa is A or G
  MOD_RES (17), (18), (19), (20): Xaa is A or G or is absent
GEVVMEQYNKLXXXXXXXXXLYLMSIASLETPVXXAKPIS

SEQ ID NO: 2542 - protein, 40 aa, Artificial Sequence
  GFR-binding peptide
  MOD_RES (1), (3), (35), (36): Xaa is C or S
XGXGEVVMDQYNKLVVKENEDLYLMSIASLETPVXXAKPI

SEQ ID NO: 2543 - protein, 41 aa, Artificial Sequence
  GFR-binding peptide
  MOD_RES (1), (3), (37), (38): Xaa is C or S
  MOD_RES (15), (16), (17), (18), (19): Xaa is A or G
  MOD_RES (20), (21), (22), (23): Xaa is A or G or is absent
XGXAKVVMNRYKKLXXXXXXXXXFYLVSIANLKTPAXXAKP

SEQ ID NO: 2544 - protein, 41 aa, Artificial Sequence
  GFR-binding peptide
  MOD_RES (2), (4), (36), (37): Xaa is C or S
RXGXGEVVMDRYKKLVVKENEDFYLMSIANLETPVXXAKPI

SEQ ID NO: 2545 - protein, 41 aa, Artificial Sequence
  GFR-binding peptide
  MOD_RES (2), (4), (38), (39): Xaa is C or S
  MOD_RES (16), (17), (18), (19), (20): Xaa is A or G
  MOD_RES (21), (22), (23), (24): Xaa is A or G or is absent
HXGXAKVVMNQYNKLXXXXXXXXXLYLVSIASLKTPAXXAK

SEQ ID NO: 2546 - protein, 38 aa, Artificial Sequence
  GFR-binding peptide
  MOD_RES (1), (35), (36): Xaa is C or S
  MOD_RES (13), (14), (15), (16), (17): Xaa is A or G
  MOD_RES (18), (19), (20), (21): Xaa is A or G or is absent
XAKVVMNRHKRLXXXXXXXXXYYLVSTASLKTPAXXAK

SEQ ID NO: 2547 - protein, 35 aa, Artificial Sequence
  GFR-binding peptide
  MOD_RES (2), (34), (35): Xaa is C or S
GXGEVVMDRHKRLVVKENEDYYLMSTASLETPVXX

SEQ ID NO: 2548 - protein, 35 aa, Artificial Sequence
  GFR-binding peptide
  MOD_RES (32), (33): Xaa is C or S
ARVVMNRHKRLIVNSSDDYYLVSTASLQTPAXXPK

SEQ ID NO: 2549 - protein, 38 aa, Artificial Sequence
  GFR-binding peptide
  MOD_RES (2), (35), (36): Xaa is C or S
  MOD_RES (13), (14), (15), (16), (17): Xaa is A or G
  MOD_RES (18), (19), (20), (21): Xaa is A or G or is absent
KXSKVVMQYNKLXXXXXXXXXLYLISIASLDQPVXXPS

SEQ ID NO: 2550 - protein, 34 aa, Artificial Sequence
  GFR-binding peptide
  MOD_RES (1), (33): Xaa is C or S
XSRVVMNQYNKLIVNSSDDLYLVSIASLKTPAXT

SEQ ID NO: 2551 - protein, 41 aa, Artificial Sequence
  GFR-binding peptide
  MOD_RES (2), (4), (38), (39): Xaa is C or S
  MOD_RES (16), (17), (18), (19), (20): Xaa is A or G
  MOD_RES (21), (22), (23), (24): Xaa is A or G or is absent
RXGXGEVVMERYKKLXXXXXXXXXFYLMSIANLETPVXXAK

SEQ ID NO: 2552 - protein, 35 aa, Artificial Sequence
  GFR-binding peptide
  MOD_RES (2), (34), (35): Xaa is C or S
GXSRVVMNYHYKLIVNSSDDKYLVSIPSLKTPAXX

SEQ ID NO: 2553 - protein, 37 aa, Artificial Sequence
  GFR-binding peptide
  MOD_RES (2), (4), (37): Xaa is C or S
RXGXEAVSMGEYHYKLTPVGMDDKYLVSIPSLKTPVX

SEQ ID NO: 2554 - protein, 36 aa, Artificial Sequence
  GFR-binding peptide
  MOD_RES (32), (33): Xaa is C or S
GEVVMERYKKLVVKDYEDFYLMSIANLETPVXXAKP

SEQ ID NO: 2555 - protein, 33 aa, Artificial Sequence
  GFR-binding peptide
  MOD_RES (31), (32): Xaa is C or S
RVVMNYHYKLIVNSSDDKYLVSIPSLQTPAXXP

SEQ ID NO: 2556 - protein, 35 aa, Artificial Sequence
  GFR-binding peptide
  MOD_RES (1), (3): Xaa is C or S
  MOD_RES (14), (15), (16), (17), (18): Xaa is A or G
  MOD_RES (19), (20), (21), (22): Xaa is A or G or is absent
XKXSRVIMYHYKLXXXXXXXXXKYLISIPSLAQPV

SEQ ID NO: 2557 - protein, 37 aa, Artificial Sequence
  GFR-binding peptide
  MOD_RES (2), (4): Xaa is C or S
  MOD_RES (16), (17), (18), (19), (20): Xaa is A or G
  MOD_RES (21), (22), (23), (24): Xaa is A or G or is absent
HXGXSRVVMNQYNKLXXXXXXXXXLYLVSIASLKTPA

SEQ ID NO: 2558 - protein, 34 aa, Artificial Sequence
  GFR-binding peptide
  MOD_RES (2), (4): Xaa is C or S
SXKXSRVIMRYKKLVKPKRGVFYLISIANLAQPV

SEQ ID NO: 2559 - protein, 38 aa, Artificial Sequence
  GFR-binding peptide
  MOD_RES (33), (34): Xaa is C or S
EAVSMGEQYNKLTPVGMDDLYLVSIASLKTPVXXAKGV

SEQ ID NO: 2560 - protein, 36 aa, Artificial Sequence
  GFR-binding peptide
  MOD_RES (1), (3), (36): Xaa is C or S
  MOD_RES (14), (15), (16), (17), (18): Xaa is A or G
  MOD_RES (19), (20), (21), (22): Xaa is A or G or is absent
XKXSKVIMRHKRLXXXXXXXXXYYLISTASLDQSVX

SEQ ID NO: 2561 - protein, 38 aa, Artificial Sequence
  GFR-binding peptide
  MOD_RES (1), (3), (35), (36): Xaa is C or S
XGXAKVVMNYHYKLIVNNSSDKYLVSIPSLKTPAXXAK

SEQ ID NO: 2562 - protein, 36 aa, Artificial Sequence
  GFR-binding peptide
  MOD_RES (2), (4), (36): Xaa is C or S
RXGXGEVVMERHKRLVVKDYEDYYLMSTASLETPVX

SEQ ID NO: 2563 - protein, 40 aa, Artificial Sequence
  GFR-binding peptide
  MOD_RES (1), (3), (35), (36): Xaa is C or S
XGXARVVMNRYKKLIVNSSDDFYLVSIANLQTPAXXPKPV

SEQ ID NO: 2564 - protein, 38 aa, Artificial Sequence
  GFR-binding peptide
  MOD_RES (1), (34), (35): Xaa is C or S
XEAVSMGEYHYKLTPVGMDDKYLVSIPSLKTPVXXAKG

SEQ ID NO: 2565 - protein, 40 aa, Artificial Sequence
  GFR-binding peptide
  MOD_RES (1), (3), (35), (36): Xaa is C or S
XGXGEVVMDYHYKLVVKENEDKYLMSIPSLETPVXXAKPI

SEQ ID NO: 2566 - protein, 36 aa, Artificial Sequence
  GFR-binding peptide
  MOD_RES (1), (3), (36): Xaa is C or S
  MOD_RES (14), (15), (16), (17), (18): Xaa is A or G
  MOD_RES (19), (20), (21), (22): Xaa is A or G or is absent
XKXSRVIMYHYKLXXXXXXXXXKYLISIPSLAQPVX

SEQ ID NO: 2567 - protein, 34 aa, Artificial Sequence
  GFR-binding peptide
  MOD_RES (32), (33): Xaa is C or S
ARVVMNYHYKLIVNSSDDKYLVSIPSLQTPAXXP

SEQ ID NO: 2568 - protein, 39 aa, Artificial Sequence
  GFR-binding peptide
  MOD_RES (2), (35), (36): Xaa is C or S
GXEAVSMGERHKRLTPVGMDDYYLVSTASLKTPVXXAKG

SEQ ID NO: 2569 - protein, 35 aa, Artificial Sequence
  GFR-binding peptide
  MOD_RES (1), (33), (34): Xaa is C or S
XGEVVMERYKKLVVKDYEDFYLMSIANLETPVXXA

SEQ ID NO: 2570 - protein, 34 aa, Artificial Sequence
  GFR-binding peptide
  MOD_RES (2), (2): Xaa is C or S
  MOD_RES (13), (14), (15), (16), (17): Xaa is A or G
  MOD_RES (18), (19), (20), (21): Xaa is A or G or is absent
KXSKVVMRHKRLXXXXXXXXXYYLISTASLDQPV

SEQ ID NO: 2571 - protein, 39 aa, Artificial Sequence
  GFR-binding peptide
  MOD_RES (33), (34): Xaa is C or S
  MOD_RES (11), (12), (13), (14), (15): Xaa is A or G
  MOD_RES (16), (17), (18), (19): Xaa is A or G or is absent
RVVMNRHKRLXXXXXXXXXYYLVSTASLQTPAXXPKPVT

SEQ ID NO: 2572 - protein, 35 aa, Artificial Sequence
  GFR-binding peptide
  MOD_RES (31), (31): Xaa is C or S
RVVMNRYKKLIVNSSDDFYLVSIANLKTPAXTPKT

SEQ ID NO: 2573 - protein, 39 aa, Artificial Sequence
  GFR-binding peptide
  MOD_RES (1), (3), (34), (35): Xaa is C or S
XKXSKVVMQYNKLVKPTRGVLYLISIASLDQPVXXPSAS

SEQ ID NO: 2574 - protein, 35 aa, Artificial Sequence
  GFR-binding peptide
  MOD_RES (1), (3): Xaa is C or S
  MOD_RES (14), (15), (16), (17), (18): Xaa is A or G
  MOD_RES (19), (20), (21), (22): Xaa is A or G or is absent
XKXSKVIMRHKRLXXXXXXXXXYYLISTASLDQSV

SEQ ID NO: 2575 - protein, 42 aa, Artificial Sequence
  GFR-binding peptide
  MOD_RES (2), (36), (37): Xaa is C or S
  MOD_RES (14), (15), (16), (17), (18): Xaa is A or G
  MOD_RES (19), (20), (21), (22): Xaa is A or G or is absent
GXAKVVMNRHKRLXXXXXXXXXYYLVSTASLKTPAXXAKPVA

SEQ ID NO: 2576 - protein, 39 aa, Artificial Sequence
  GFR-binding peptide
  MOD_RES (1), (35), (36): Xaa is C or S
  MOD_RES (13), (14), (15), (16), (17): Xaa is A or G
  MOD_RES (18), (19), (20), (21): Xaa is A or G or is absent
XAKVVMNYHYKLXXXXXXXXXKYLVSIPSLKTPAXXAKP

SEQ ID NO: 2577 - protein, 36 aa, Artificial Sequence
  GFR-binding peptide
  MOD_RES (2), (4): Xaa is C or S
  MOD_RES (15), (16), (17), (18), (19): Xaa is A or G
  MOD_RES (20), (21), (22), (23): Xaa is A or G or is absent
SXKXSRVIMRHKRLXXXXXXXXXYYLISTASLAQPV

SEQ ID NO: 2578 - protein, 42 aa, Artificial Sequence
  GFR-binding peptide
  MOD_RES (2), (4), (38), (39): Xaa is C or S
  MOD_RES (16), (17), (18), (19), (20): Xaa is A or G
  MOD_RES (21), (22), (23), (24): Xaa is A or G or is absent
HXGXSRVVMNYHYKLXXXXXXXXXKYLVSIPSLKTPAXXPKP

SEQ ID NO: 2579 - protein, 38 aa, Artificial Sequence
  GFR-binding peptide
  MOD_RES (1), (3), (36), (37): Xaa is C or S
  MOD_RES (14), (15), (16), (17), (18): Xaa is A or G
  MOD_RES (19), (20), (21), (22): Xaa is A or G or is absent
XKXSRVIMRYKKLXXXXXXXXXFYLISIANLAQPVXXP

SEQ ID NO: 2580 - protein, 34 aa, Artificial Sequence
  GFR-binding peptide
LHDELTRYKKLFIPKKRVIEFYLVSIANLQVQTP

SEQ ID NO: 2581 - protein, 42 aa, Artificial Sequence
  GFR-binding peptide
  MOD_RES (1), (3), (37), (38): Xaa is C or S
  MOD_RES (15), (16), (17), (18), (19): Xaa is A or G
  MOD_RES (20), (21), (22), (23): Xaa is A or G or is absent
XGXGEVVMDYHYKLXXXXXXXXXKYLMSIPSLETPVXXAKPI

SEQ ID NO: 2582 - protein, 36 aa, Artificial Sequence
  GFR-binding peptide
  MOD_RES (1), (3): Xaa is C or S
  MOD_RES (15), (16), (17), (18), (19): Xaa is A or G
  MOD_RES (20), (21), (22), (23): Xaa is A or G or is absent
XGXAKVVMNRYKKLXXXXXXXXXFYLVSIANLKTPA

SEQ ID NO: 2583 - protein, 37 aa, Artificial Sequence
  GFR-binding peptide
  MOD_RES (35), (35): Xaa is C or S
  MOD_RES (11), (12), (13), (14), (15): Xaa is A or G
  MOD_RES (16), (17), (18), (19): Xaa is A or G or is absent
HDELTQYNKLXXXXXXXXXLYLVSIASLQVQTPRXQV

SEQ ID NO: 2584 - protein, 37 aa, Artificial Sequence
  GFR-binding peptide
  MOD_RES (1), (3): Xaa is C or S
  MOD_RES (16), (17), (18), (19), (20): Xaa is A or G
  MOD_RES (21), (22), (23), (24): Xaa is A or G or is absent
XKXALHDELTQYNKLXXXXXXXXXLYLVSIASLQVQT

SEQ ID NO: 2585 - protein, 36 aa, Artificial Sequence
  GFR-binding peptide
  MOD_RES (1), (32), (33): Xaa is C or S
XSKVIMQYNKLIKPTKGILYLISIASLDQSVXXPSA

SEQ ID NO: 2586 - protein, 38 aa, Artificial Sequence
  GFR-binding peptide
  MOD_RES (1), (34), (35): Xaa is C or S
  MOD_RES (12), (13), (14), (15), (16): Xaa is A or G
  MOD_RES (17), (18), (19), (20): Xaa is A or G or is absent
XSKVIMRHKRLXXXXXXXXXYYLISTASLDQSVXXPSA

SEQ ID NO: 2587 - protein, 38 aa, Artificial Sequence
  GFR-binding peptide
  MOD_RES (2), (4), (35), (36): Xaa is C or S
SXKXSKVIMYHYKLIKPTKGIKYLISIPSLDQSVXXPS

SEQ ID NO: 2588 - protein, 43 aa, Artificial Sequence
  GFR-binding peptide
  MOD_RES (2), (39): Xaa is C or S
KXALHDELTRYKKLFIPKKRVIEFYLVSIANLQVQTPRXQVNR

SEQ ID NO: 2589 - protein, 37 aa, Artificial Sequence
  GFR-binding peptide
  MOD_RES (1), (3), (36), (37): Xaa is C or S
  MOD_RES (14), (15), (16), (17), (18): Xaa is A or G
  MOD_RES (19), (20), (21), (22): Xaa is A or G or is absent
XKXSKVIMQYNKLXXXXXXXXXLYLISIASLDQSVXX

SEQ ID NO: 2590 - protein, 33 aa, Artificial Sequence
  GFR-binding peptide
  MOD_RES (31), (32): Xaa is C or S
RVVMNQYNKLIVNSSDDLYLVSIASLQTPAXXP

SEQ ID NO: 2591 - protein, 43 aa, Artificial Sequence
  GFR-binding peptide
  MOD_RES (2), (4), (39), (40): Xaa is C or S
  MOD_RES (17), (18), (19), (20), (21): Xaa is A or G
  MOD_RES (22), (23), (24), (25): Xaa is A or G or is absent
RXGXEAVSMGEYHYKLXXXXXXXXXKYLVSIPSLKTPVXXAKG

SEQ ID NO: 2592 - protein, 42 aa, Artificial Sequence
  GFR-binding peptide
  MOD_RES (2), (4), (36): Xaa is C or S
HXGXSRVVMNQYNKLIVNSSDDLYLVSIASLKTPAXTPKTVH

SEQ ID NO: 2593 - protein, 41 aa, Artificial Sequence
  GFR-binding peptide
  MOD_RES (2), (36): Xaa is C or S
  MOD_RES (14), (15), (16), (17), (18): Xaa is A or G
  MOD_RES (19), (20), (21), (22): Xaa is A or G or is absent
GXSRVVMNQYNKLXXXXXXXXXLYLVSIASLKTPAXTPKTV

SEQ ID NO: 2594 - protein, 36 aa, Artificial Sequence
  GFR-binding peptide
  MOD_RES (36), (36): Xaa is C or S
LHDELTRHKRLFIPKKRVIEYYLVSTASLQVQTPRX

SEQ ID NO: 2595 - protein, 39 aa, Artificial Sequence
  GFR-binding peptide
  MOD_RES (1), (38): Xaa is C or S
XALHDELTRYKKLFIPKKRVIEFYLVSIANLQVQTPRXQ

SEQ ID NO: 2596 - protein, 36 aa, Artificial Sequence
  GFR-binding peptide
  MOD_RES (1), (35): Xaa is C or S
  MOD_RES (13), (14), (15), (16), (17): Xaa is A or G
  MOD_RES (18), (19), (20), (21): Xaa is A or G or is absent
XSRVVMNRYKKLXXXXXXXXXFYLVSIANLKTPAXT

SEQ ID NO: 2597 - protein, 41 aa, Artificial Sequence
  GFR-binding peptide
  MOD_RES (2), (36), (37): Xaa is C or S
  MOD_RES (14), (15), (16), (17), (18): Xaa is A or G
  MOD_RES (19), (20), (21), (22): Xaa is A or G or is absent
GXSRVVMNRYKKLXXXXXXXXXFYLVSIANLKTPAXXPKPV

SEQ ID NO: 2598 - protein, 34 aa, Artificial Sequence
  GFR-binding peptide
  MOD_RES (2), (4): Xaa is C or S
SXKXSKVVMRHKRLVKPTRGVYYLISTASLDQPV

SEQ ID NO: 2599 - protein, 34 aa, Artificial Sequence
  GFR-binding peptide
  MOD_RES (1), (33), (34): Xaa is C or S
XARVVMNQYNKLIVNSSDDLYLVSIASLQTPAXX

SEQ ID NO: 2600 - protein, 36 aa, Artificial Sequence
  GFR-binding peptide
  MOD_RES (32), (33): Xaa is C or S
SRVVMNRHKRLIVNSSDDYYLVSTASLKTPAXXPKP

SEQ ID NO: 2601 - protein, 35 aa, Artificial Sequence
  GFR-binding peptide
  MOD_RES (1), (3): Xaa is C or S
XGXEAVSMGEYHYKLTPVGMDDKYLVSIPSLKTPV

SEQ ID NO: 2602 - protein, 36 aa, Artificial Sequence
  GFR-binding peptide
  MOD_RES (1), (34), (35): Xaa is C or S
  MOD_RES (12), (13), (14), (15), (16): Xaa is A or G
  MOD_RES (17), (18), (19), (20): Xaa is A or G or is absent
XSKVVMRHKRLXXXXXXXXXYYLISTASLDQPVXXP

SEQ ID NO: 2603 - protein, 44 aa, Artificial Sequence
  GFR-binding peptide
  MOD_RES (2), (4), (38), (39): Xaa is C or S
  MOD_RES (16), (17), (18), (19), (20): Xaa is A or G
  MOD_RES (21), (22), (23), (24): Xaa is A or G or is absent
RXGXGEVVMEQYNKLXXXXXXXXXLYLMSIASLETPVXXAKPIS

SEQ ID NO: 2604 - protein, 32 aa, Artificial Sequence
  GFR-binding peptide
  MOD_RES (11), (12), (13), (14), (15): Xaa is A or G
  MOD_RES (16), (17), (18), (19): Xaa is A or G or is absent
RVVMNRYKKLXXXXXXXXXFYLVSIANLKTPA

SEQ ID NO: 2605 - protein, 37 aa, Artificial Sequence
  GFR-binding peptide
  MOD_RES (1), (3), (35), (36): Xaa is C or S
XGXSRVVMNRYKKLIVNSSDDFYLVSIANLKTPAXXP

SEQ ID NO: 2606 - protein, 39 aa, Artificial Sequence
  GFR-binding peptide
  MOD_RES (1), (3), (37): Xaa is C or S
  MOD_RES (15), (16), (17), (18), (19): Xaa is A or G
  MOD_RES (20), (21), (22), (23): Xaa is A or G or is absent
XGXSRVVMNRYKKLXXXXXXXXXFYLVSIANLKTPAXTP

SEQ ID NO: 2607 - protein, 43 aa, Artificial Sequence
  GFR-binding peptide
  MOD_RES (1), (3), (37), (38): Xaa is C or S
  MOD_RES (15), (16), (17), (18), (19): Xaa is A or G
  MOD_RES (20), (21), (22), (23): Xaa is A or G or is absent
XGXAKVVMNYHYKLXXXXXXXXXKYLVSIPSLKTPAXXAKPVA

SEQ ID NO: 2608 - protein, 35 aa, Artificial Sequence
  GFR-binding peptide
  MOD_RES (2), (4), (35): Xaa is C or S
SXKXSKVVMRHKRLVKPTRGVYYLISTASLDQPVX

SEQ ID NO: 2609 - protein, 36 aa, Artificial Sequence
  GFR-binding peptide
  MOD_RES (2), (34): Xaa is C or S
GXSRVVMNYHYKLIVNSSDDKYLVSIPSLKTPAXTP

SEQ ID NO: 2610 - protein, 32 aa, Artificial Sequence
  GFR-binding peptide
  MOD_RES (11), (12), (13), (14), (15): Xaa is A or G
  MOD_RES (16), (17), (18), (19): Xaa is A or G or is absent
KVVMNRYKKLXXXXXXXXXFYLVSIANLKTPA

SEQ ID NO: 2611 - protein, 39 aa, Artificial Sequence
  GFR-binding peptide
  MOD_RES (1), (3), (38), (39): Xaa is C or S
  MOD_RES (16), (17), (18), (19), (20): Xaa is A or G
  MOD_RES (21), (22), (23), (24): Xaa is A or G or is absent
XGXEAVSMGERHKRLXXXXXXXXXYYLVSTASLKTPVXX

SEQ ID NO: 2612 - protein, 33 aa, Artificial Sequence
  GFR-binding peptide
  MOD_RES (1), (1): Xaa is C or S
  MOD_RES (12), (13), (14), (15), (16): Xaa is A or G
  MOD_RES (17), (18), (19), (20): Xaa is A or G or is absent
XSKVIMRYKKLXXXXXXXXXFYLISIANLDQSV

SEQ ID NO: 2613 - protein, 43 aa, Artificial Sequence
  GFR-binding peptide
  MOD_RES (2), (4), (38), (39): Xaa is C or S
  MOD_RES (16), (17), (18), (19), (20): Xaa is A or G
  MOD_RES (21), (22), (23), (24): Xaa is A or G or is absent
HXGXSRVVMNRHKRLXXXXXXXXXYYLVSTASLKTPAXXPKPV

SEQ ID NO: 2614 - protein, 35 aa, Artificial Sequence
  GFR-binding peptide
  MOD_RES (33), (34): Xaa is C or S
  MOD_RES (11), (12), (13), (14), (15): Xaa is A or G
  MOD_RES (16), (17), (18), (19): Xaa is A or G or is absent
SRVIMRYKKLXXXXXXXXXFYLISIANLAQPVXXP

SEQ ID NO: 2615 - protein, 38 aa, Artificial Sequence
  GFR-binding peptide
  MOD_RES (2), (2): Xaa is C or S
KXALHDELTRYKKLFIPKKRVIEFYLVSIANLQVQTPR

SEQ ID NO: 2616 - protein, 38 aa, Artificial Sequence
  GFR-binding peptide
  MOD_RES (35), (35): Xaa is C or S
HDELTYHYKLFIPKKRVIEKYLVSIPSLQVQTPRXQVN

SEQ ID NO: 2617 - protein, 37 aa, Artificial Sequence
  GFR-binding peptide
  MOD_RES (1), (1): Xaa is C or S
XALHDELTYHYKLFIPKKRVIEKYLVSIPSLQVQTPR

SEQ ID NO: 2618 - protein, 40 aa, Artificial Sequence
  GFR-binding peptide
  MOD_RES (2), (4), (35), (36): Xaa is C or S
SXKXSKVVMQYNKLVKPTRGVLYLISIASLDQPVXXPSAS

SEQ ID NO: 2619 - protein, 39 aa, Artificial Sequence
  GFR-binding peptide
  MOD_RES (1), (3), (35), (36): Xaa is C or S
XGXGEVVMERHKRLVVKDYEDYYLMSTASLETPVXXAKP

SEQ ID NO: 2620 - protein, 36 aa, Artificial Sequence
  GFR-binding peptide
  MOD_RES (1), (34), (35): Xaa is C or S
  MOD_RES (12), (13), (14), (15), (16): Xaa is A or G
  MOD_RES (17), (18), (19), (20): Xaa is A or G or is absent
XSKVVMQYNKLXXXXXXXXXLYLISIASLDQPVXXP

SEQ ID NO: 2621 - protein, 34 aa, Artificial Sequence
  GFR-binding peptide
  MOD_RES (31), (32): Xaa is C or S
RVVMNRYKKLIVNSSDDFYLVSIANLQTPAXXPK

SEQ ID NO: 2622 - protein, 41 aa, Artificial Sequence
  GFR-binding peptide
  MOD_RES (1), (3), (35), (36): Xaa is C or S
XGXARVVMNQYNKLIVNSSDDLYLVSIASLQTPAXXPKPVT

SEQ ID NO: 2623 - protein, 33 aa, Artificial Sequence
  GFR-binding peptide
  MOD_RES (1), (33): Xaa is C or S
XARVVMNQYNKLIVNSSDDLYLVSIASLQTPAX

SEQ ID NO: 2624 - protein, 42 aa, Artificial Sequence
  GFR-binding peptide
  MOD_RES (2), (4), (37), (38): Xaa is C or S
  MOD_RES (15), (16), (17), (18), (19): Xaa is A or G
  MOD_RES (20), (21), (22), (23): Xaa is A or G or is absent
SXKXSRVIMRHKRLXXXXXXXXXYYLISTASLAQPVXXPAAS

SEQ ID NO: 2625 - protein, 33 aa, Artificial Sequence
  GFR-binding peptide
  MOD_RES (31), (32): Xaa is C or S
SKVVMRHKRLVKPTRGVYYLISTASLDQPVXXP

SEQ ID NO: 2626 - protein, 35 aa, Artificial Sequence
  GFR-binding peptide
  MOD_RES (34), (35): Xaa is C or S
  MOD_RES (12), (13), (14), (15), (16): Xaa is A or G
  MOD_RES (17), (18), (19), (20): Xaa is A or G or is absent
GEVVMDYHYKLXXXXXXXXXKYLMSIPSLETPVXX

SEQ ID NO: 2627 - protein, 41 aa, Artificial Sequence
  GFR-binding peptide
  MOD_RES (2), (4), (35), (36): Xaa is C or S
SXKXSKVIMYHYKLIKPTKGIKYLISIPSLDQSVXXPSASA

SEQ ID NO: 2628 - protein, 31 aa, Artificial Sequence
  GFR-binding peptide
  MOD_RES (31), (31): Xaa is C or S
EVVMERYKKLVVKDYEDFYLMSIANLETPVX

SEQ ID NO: 2629 - protein, 37 aa, Artificial Sequence
  GFR-binding peptide
  MOD_RES (32), (32): Xaa is C or S
SRVVMNQYNKLIVNSSDDLYLVSIASLKTPAXTPKTV

SEQ ID NO: 2630 - protein, 35 aa, Artificial Sequence
  GFR-binding peptide
  MOD_RES (34), (34): Xaa is C or S
  MOD_RES (12), (13), (14), (15), (16): Xaa is A or G
  MOD_RES (17), (18), (19), (20): Xaa is A or G or is absent
SRVVMNQYNKLXXXXXXXXXLYLVSIASLKTPAXT

SEQ ID NO: 2631 - protein, 36 aa, Artificial Sequence
  GFR-binding peptide
  MOD_RES (33), (34): Xaa is C or S
  MOD_RES (11), (12), (13), (14), (15): Xaa is A or G
  MOD_RES (16), (17), (18), (19): Xaa is A or G or is absent
EVVMERHKRLXXXXXXXXXYYLMSTASLETPVXXAK

SEQ ID NO: 2632 - protein, 41 aa, Artificial Sequence
  GFR-binding peptide
  MOD_RES (2), (4), (36), (37): Xaa is C or S
RXGXGEVVMDQYNKLVVKENEDLYLMSIASLETPVXXAKPI

SEQ ID NO: 2633 - protein, 35 aa, Artificial Sequence
  GFR-binding peptide
ALHDELTQYNKLFIPKKRVIELYLVSIASLQVQTP

SEQ ID NO: 2634 - protein, 41 aa, Artificial Sequence
  GFR-binding peptide
  MOD_RES (2), (35), (36): Xaa is C or S
  MOD_RES (13), (14), (15), (16), (17): Xaa is A or G
  MOD_RES (18), (19), (20), (21): Xaa is A or G or is absent
KXSRVIMQYNKLXXXXXXXXXLYLISIASLAQPVXXPAASA

SEQ ID NO: 2635 - protein, 37 aa, Artificial Sequence
  GFR-binding peptide
  MOD_RES (2), (2): Xaa is C or S
KXALHDELTQYNKLFIPKKRVIELYLVSIASLQVQTP

SEQ ID NO: 2636 - protein, 39 aa, Artificial Sequence
  GFR-binding peptide
  MOD_RES (2), (37), (38): Xaa is C or S
  MOD_RES (15), (16), (17), (18), (19): Xaa is A or G
  MOD_RES (20), (21), (22), (23): Xaa is A or G or is absent
GXEAVSMGEYHYKLXXXXXXXXXKYLVSIPSLKTPVXXA

SEQ ID NO: 2637 - protein, 39 aa, Artificial Sequence
  GFR-binding peptide
  MOD_RES (2), (4), (37), (38): Xaa is C or S
  MOD_RES (15), (16), (17), (18), (19): Xaa is A or G
  MOD_RES (20), (21), (22), (23): Xaa is A or G or is absent
SXKXSKVVMRYKKLXXXXXXXXXFYLISIANLDQPVXXP

SEQ ID NO: 2638 - protein, 37 aa, Artificial Sequence
  GFR-binding peptide
  MOD_RES (1), (33), (34): Xaa is C or S
XSRVVMNQYNKLIVNSSDDLYLVSIASLKTPAXXPKP

SEQ ID NO: 2639 - protein, 38 aa, Artificial Sequence
  GFR-binding peptide
  MOD_RES (34), (34): Xaa is C or S
  MOD_RES (12), (13), (14), (15), (16): Xaa is A or G
  MOD_RES (17), (18), (19), (20): Xaa is A or G or is absent
SRVVMNQYNKLXXXXXXXXXLYLVSIASLKTPAXTPKT

SEQ ID NO: 2640 - protein, 39 aa, Artificial Sequence
  GFR-binding peptide
  MOD_RES (2), (36): Xaa is C or S
  MOD_RES (14), (15), (16), (17), (18): Xaa is A or G
  MOD_RES (19), (20), (21), (22): Xaa is A or G or is absent
GXSRVVMNRHKRLXXXXXXXXXYYLVSTASLKTPAXTPK

SEQ ID NO: 2641 - protein, 37 aa, Artificial Sequence
  GFR-binding peptide
  MOD_RES (32), (33): Xaa is C or S
GEVVMDYHYKLVVKENEDKYLMSIPSLETPVXXAKPI

SEQ ID NO: 2642 - protein, 37 aa, Artificial Sequence
  GFR-binding peptide
  MOD_RES (31), (32): Xaa is C or S
EVVMDRYKKLVVKENEDFYLMSIANLETPVXXAKPIK

SEQ ID NO: 2643 - protein, 43 aa, Artificial Sequence
  GFR-binding peptide
  MOD_RES (2), (4), (37), (38): Xaa is C or S
  MOD_RES (15), (16), (17), (18), (19): Xaa is A or G
  MOD_RES (20), (21), (22), (23): Xaa is A or G or is absent
SXKXSKVIMYHYKLXXXXXXXXXKYLISIPSLDQSVXXPSASA

SEQ ID NO: 2644 - protein, 35 aa, Artificial Sequence
  GFR-binding peptide
ALHDELTRHKRLFIPKKRVIEYYLVSTASLQVQTP

SEQ ID NO: 2645 - protein, 37 aa, Artificial Sequence
  GFR-binding peptide
  MOD_RES (1), (33): Xaa is C or S
XSRVVMNQYNKLIVNSSDDLYLVSIASLKTPAXTPKT

SEQ ID NO: 2646 - protein, 32 aa, Artificial Sequence
  GFR-binding peptide
  MOD_RES (1), (1): Xaa is C or S
XSRVVMNQYNKLIVNSSDDLYLVSIASLKTPA

SEQ ID NO: 2647 - protein, 42 aa, Artificial Sequence
  GFR-binding peptide
  MOD_RES (1), (38): Xaa is C or S
  MOD_RES (14), (15), (16), (17), (18): Xaa is A or G
  MOD_RES (19), (20), (21), (22): Xaa is A or G or is absent
XALHDELTQYNKLXXXXXXXXXLYLVSIASLQVQTPRXQVNR

SEQ ID NO: 2648 - protein, 39 aa, Artificial Sequence
  GFR-binding peptide
  MOD_RES (2), (34), (35): Xaa is C or S
GXARVVMNYHYKLIVNSSDDKYLVSIPSLQTPAXXPKPV

SEQ ID NO: 2649 - protein, 39 aa, Artificial Sequence
  GFR-binding peptide
  MOD_RES (2), (4), (38), (39): Xaa is C or S
  MOD_RES (16), (17), (18), (19), (20): Xaa is A or G
  MOD_RES (21), (22), (23), (24): Xaa is A or G or is absent
HXGXSRVVMNYHYKLXXXXXXXXXKYLVSIPSLKTPAXX

SEQ ID NO: 2650 - protein, 37 aa, Artificial Sequence
  GFR-binding peptide
  MOD_RES (1), (3), (35), (36): Xaa is C or S
XGXAKVVMNRHKRLIVNNSSDYYLVSTASLKTPAXXA

SEQ ID NO: 2651 - protein, 37 aa, Artificial Sequence
  GFR-binding peptide
  MOD_RES (1), (36), (37): Xaa is C or S
  MOD_RES (14), (15), (16), (17), (18): Xaa is A or G
  MOD_RES (19), (20), (21), (22): Xaa is A or G or is absent
XEAVSMGEYHYKLXXXXXXXXXKYLVSIPSLKTPVXX

SEQ ID NO: 2652 - protein, 39 aa, Artificial Sequence
  GFR-binding peptide
  MOD_RES (2), (4), (35), (36): Xaa is C or S
SXKXSRVIMQYNKLVKPKRGVLYLISIASLAQPVXXPAA

SEQ ID NO: 2653 - protein, 39 aa, Artificial Sequence
  GFR-binding peptide
  MOD_RES (34), (34): Xaa is C or S
  MOD_RES (12), (13), (14), (15), (16): Xaa is A or G
  MOD_RES (17), (18), (19), (20): Xaa is A or G or is absent
SRVVMNYHYKLXXXXXXXXXKYLVSIPSLKTPAXTPKTV

SEQ ID NO: 2654 - protein, 39 aa, Artificial Sequence
  GFR-binding peptide
  MOD_RES (2), (35), (36): Xaa is C or S
  MOD_RES (13), (14), (15), (16), (17): Xaa is A or G
  MOD_RES (18), (19), (20), (21): Xaa is A or G or is absent
KXSKVIMRHKRLXXXXXXXXXYYLISTASLDQSVXXPSA

SEQ ID NO: 2655 - protein, 42 aa, Artificial Sequence
  GFR-binding peptide
  MOD_RES (1), (38): Xaa is C or S
  MOD_RES (14), (15), (16), (17), (18): Xaa is A or G
  MOD_RES (19), (20), (21), (22): Xaa is A or G or is absent
XALHDELTYHYKLXXXXXXXXXKYLVSIPSLQVQTPRXQVNR

SEQ ID NO: 2656 - protein, 37 aa, Artificial Sequence
  GFR-binding peptide
  MOD_RES (1), (3), (36), (37): Xaa is C or S
  MOD_RES (14), (15), (16), (17), (18): Xaa is A or G
  MOD_RES (19), (20), (21), (22): Xaa is A or G or is absent
XKXSKVIMRHKRLXXXXXXXXXYYLISTASLDQSVXX

SEQ ID NO: 2657 - protein, 36 aa, Artificial Sequence
  GFR-binding peptide
  MOD_RES (1), (3): Xaa is C or S
  MOD_RES (15), (16), (17), (18), (19): Xaa is A or G
  MOD_RES (20), (21), (22), (23): Xaa is A or G or is absent
XGXSRVVMNQYNKLXXXXXXXXXLYLVSIASLKTPA

SEQ ID NO: 2658 - protein, 38 aa, Artificial Sequence
  GFR-binding peptide
  MOD_RES (1), (3), (37), (38): Xaa is C or S
  MOD_RES (15), (16), (17), (18), (19): Xaa is A or G
  MOD_RES (20), (21), (22), (23): Xaa is A or G or is absent
XGXARVVMNRYKKLXXXXXXXXXFYLVSIANLQTPAXX

SEQ ID NO: 2659 - protein, 35 aa, Artificial Sequence
  GFR-binding peptide
  MOD_RES (2), (4), (35): Xaa is C or S
SXKXSRVIMRYKKLVKPKRGVFYLISIANLAQPVX

SEQ ID NO: 2660 - protein, 37 aa, Artificial Sequence
  GFR-binding peptide
  MOD_RES (2), (33), (34): Xaa is C or S
KXSKVIMQYNKLIKPTKGILYLISIASLDQSVXXPSA

SEQ ID NO: 2661 - protein, 35 aa, Artificial Sequence
  GFR-binding peptide
  MOD_RES (1), (3), (34), (35): Xaa is C or S
XKXSRVIMQYNKLVKPKRGVLYLISIASLAQPVXX

SEQ ID NO: 2662 - protein, 38 aa, Artificial Sequence
  GFR-binding peptide
  MOD_RES (1), (3), (37), (38): Xaa is C or S
  MOD_RES (15), (16), (17), (18), (19): Xaa is A or G
  MOD_RES (20), (21), (22), (23): Xaa is A or G or is absent
XGXAKVVMNRYKKLXXXXXXXXXFYLVSIANLKTPAXX

SEQ ID NO: 2663 - protein, 37 aa, Artificial Sequence
  GFR-binding peptide
  MOD_RES (33), (34): Xaa is C or S
  MOD_RES (11), (12), (13), (14), (15): Xaa is A or G
  MOD_RES (16), (17), (18), (19): Xaa is A or G or is absent
EVVMDRYKKLXXXXXXXXXFYLMSIANLETPVXXAKP

SEQ ID NO: 2664 - protein, 36 aa, Artificial Sequence
  GFR-binding peptide
  MOD_RES (2), (36): Xaa is C or S
  MOD_RES (14), (15), (16), (17), (18): Xaa is A or G
  MOD_RES (19), (20), (21), (22): Xaa is A or G or is absent
GXGEVVMDRYKKLXXXXXXXXXFYLMSIANLETPVX

SEQ ID NO: 2665 - protein, 38 aa, Artificial Sequence
  GFR-binding peptide
  MOD_RES (1), (38): Xaa is C or S
XALHDELTRYKKLFIPKKRVIEFYLVSIANLQVQTPRX

SEQ ID NO: 2666 - protein, 38 aa, Artificial Sequence
  GFR-binding peptide
  MOD_RES (1), (35), (36): Xaa is C or S
  MOD_RES (13), (14), (15), (16), (17): Xaa is A or G
  MOD_RES (18), (19), (20), (21): Xaa is A or G or is absent
XARVVMNRHKRLXXXXXXXXXYYLVSTASLQTPAXXPK

SEQ ID NO: 2667 - protein, 33 aa, Artificial Sequence
  GFR-binding peptide
  MOD_RES (1), (1): Xaa is C or S
  MOD_RES (12), (13), (14), (15), (16): Xaa is A or G
  MOD_RES (17), (18), (19), (20): Xaa is A or G or is absent
XSKVVMQYNKLXXXXXXXXXLYLISIASLDQPV

SEQ ID NO: 2668 - protein, 34 aa, Artificial Sequence
  GFR-binding peptide
  MOD_RES (31), (31): Xaa is C or S
RVVMNQYNKLIVNSSDDLYLVSIASLKTPAXTPK

SEQ ID NO: 2669 - protein, 40 aa, Artificial Sequence
  GFR-binding peptide
  MOD_RES (2), (4), (38), (39): Xaa is C or S
  MOD_RES (16), (17), (18), (19), (20): Xaa is A or G
  MOD_RES (21), (22), (23), (24): Xaa is A or G or is absent
RXGXGEVVMDRHKRLXXXXXXXXXYYLMSTASLETPVXXA

SEQ ID NO: 2670 - protein, 31 aa, Artificial Sequence
  GFR-binding peptide
  MOD_RES (31), (31): Xaa is C or S
KVVMNYHYKLIVNNSSDKYLVSIPSLKTPAX

SEQ ID NO: 2671 - protein, 38 aa, Artificial Sequence
  GFR-binding peptide
  MOD_RES (35), (36): Xaa is C or S
  MOD_RES (13), (14), (15), (16), (17): Xaa is A or G
  MOD_RES (18), (19), (20), (21): Xaa is A or G or is absent
EAVSMGEYHYKLXXXXXXXXXKYLVSIPSLKTPVXXAK

SEQ ID NO: 2672 - protein, 39 aa, Artificial Sequence
  GFR-binding peptide
  MOD_RES (1), (33), (34): Xaa is C or S
XGEVVMEQYNKLVVKDYEDLYLMSIASLETPVXXAKPIS

SEQ ID NO: 2673 - protein, 38 aa, Artificial Sequence
  GFR-binding peptide
  MOD_RES (2), (36), (37): Xaa is C or S
  MOD_RES (14), (15), (16), (17), (18): Xaa is A or G
  MOD_RES (19), (20), (21), (22): Xaa is A or G or is absent
GXGEVVMDYHYKLXXXXXXXXXKYLMSIPSLETPVXXA

SEQ ID NO: 2674 - protein, 33 aa, Artificial Sequence
  GFR-binding peptide
  MOD_RES (1), (1): Xaa is C or S
XEAVSMGEYHYKLTPVGMDDKYLVSIPSLKTPV

(The sequence listing continues in the following parts.)

1-143. (canceled)

144. A peptide with between 25 and 60 amino acids, having growth factor receptor-binding capability or a peptidomimetic having growth factor receptor-binding capability with between 20 and 60 amino acids, wherein said peptidomimetic has a molecular weight between 2,000 and 8,000 Daltons:
wherein said peptide or peptidomimetic comprises a peptide with four amino acids, PEP1, and a peptide with five amino acids, PEP2;
wherein PEP1 is selected from the group consisting of SAIS (SEQ ID NO: 84116), SSLS (SEQ ID NO: 84121), NAIS (SEQ ID NO: 84113), SATS (SEQ ID NO: 84117), SPIS (SEQ ID NO: 84120), EPIS (SEQ ID NO: 84109), SPIN (SEQ ID NO: 84119), KPLS (SEQ ID NO: 84112), EPLP (SEQ ID NO: 84110), EPLT (SEQ ID NO: 84111), SNIT (SEQ ID NO: 84118), RSVK (SEQ ID NO: 84115) and RPVQ (SEQ ID NO: 84114);
wherein PEP2 is selected from the group consisting of LKNYQ (SEQ ID NO: 84230), LKVYP (SEQ ID NO: 84231), LKKYR (SEQ ID NO: 84229), LRKHR (SEQ ID NO: 84233), LKYHY (SEQ ID NO: 84232), KFKYE (SEQ ID NO: 84211), YGKIP (SEQ ID NO: 84397), YKQYE (SEQ ID NO: 84398), DHHKD (SEQ ID NO: 84149), EQLSN (SEQ ID NO: 84178), IGEMS (SEQ ID NO: 84209), LGEMS (SEQ ID NO: 84228), KEVQV (SEQ ID NO: 84210) and KKATV (SEQ ID NO: 84212); and
wherein said peptide or peptidomimetic comprises a peptide with three amino acids PEP3 and a peptide with three amino acids PEP4;
wherein PEP3 is selected from the group consisting of VPT, VPE, APT, TPT, VPA, APV, VPQ, VSQ, SRV and TQV;
wherein PEP4 is selected from the group consisting of VVE, TVE, VVR, VVK, VAE, AVS, VVD, VEE, VRS, VKS, QHN, EHS, EEH and EDH; and
wherein the root mean square deviation (RMSD) value of the structure coordinates of said peptide with between 20 and 50 amino acids or peptidomimetic with respect to the 3-dimensional structure coordinates of reference peptide (PEPREF) is 2.45 Å (Angstroms) or less, and wherein PEPREF is

| | | | | | | | | |
|---|---|---|---|---|---|---|---|---|
| ATOM | 511 | N | LYS | A | 1 | −14.570 | 46.437 | 27.424 |
| ATOM | 512 | CA | LYS | A | 1 | −13.512 | 45.748 | 28.151 |
| ATOM | 513 | C | LYS | A | 1 | −13.655 | 44.259 | 27.884 |
| ATOM | 514 | O | LYS | A | 1 | −12.769 | 43.463 | 28.197 |
| ATOM | 515 | CB | LYS | A | 1 | −13.605 | 46.029 | 29.652 |
| ATOM | 516 | CG | LYS | A | 1 | −13.640 | 47.509 | 29.991 |
| ATOM | 517 | CD | LYS | A | 1 | −12.615 | 48.297 | 29.183 |
| ATOM | 518 | CE | LYS | A | 1 | −12.625 | 49.768 | 29.575 |
| ATOM | 519 | NZ | LYS | A | 1 | −13.994 | 50.369 | 29.497 |
| ATOM | 520 | N | ILE | A | 2 | −14.792 | 43.890 | 27.309 |
| ATOM | 521 | CA | ILE | A | 2 | −15.051 | 42.499 | 26.967 |
| ATOM | 522 | C | ILE | A | 2 | −14.911 | 42.370 | 25.444 |
| ATOM | 523 | O | ILE | A | 2 | −15.531 | 43.125 | 24.683 |
| ATOM | 524 | CB | ILE | A | 2 | −16.466 | 42.065 | 27.401 |
| ATOM | 525 | CG1 | ILE | A | 2 | −16.630 | 42.238 | 28.915 |
| ATOM | 526 | CG2 | ILE | A | 2 | −16.710 | 40.629 | 26.985 |
| ATOM | 527 | CD1 | ILE | A | 2 | −15.631 | 41.478 | 29.30 |
| ATOM | 528 | N | PRO | A | 3 | −14.085 | 41.411 | 24.989 |
| ATOM | 529 | CA | PRO | A | 3 | −13.789 | 41.109 | 23.588 |
| ATOM | 530 | C | PRO | A | 3 | −14.998 | 40.695 | 22.768 |
| ATOM | 531 | O | PRO | A | 3 | −15.969 | 40.164 | 23.305 |
| ATOM | 532 | CB | PRO | A | 3 | −12.785 | 39.968 | 23.688 |
| ATOM | 533 | CG | PRO | A | 3 | −12.156 | 40.166 | 25.007 |
| ATOM | 534 | CD | PRO | A | 3 | −13.330 | 40.506 | 25.867 |
| ATOM | 535 | N | LYS | A | 4 | −14.937 | 40.937 | 21.463 |
| ATOM | 536 | CA | LYS | A | 4 | −16.023 | 40.529 | 20.590 |
| ATOM | 537 | C | LYS | A | 4 | −15.886 | 39.015 | 20.391 |
| ATOM | 538 | O | LYS | A | 4 | −14.903 | 38.415 | 20.831 |
| ATOM | 539 | CB | LYS | A | 4 | −15.926 | 41.244 | 19.245 |
| ATOM | 540 | CG | LYS | A | 4 | −15.802 | 42.751 | 19.355 |
| ATOM | 541 | CD | LYS | A | 4 | −16.292 | 43.433 | 18.083 |
| ATOM | 542 | CE | LYS | A | 4 | −16.162 | 44.943 | 18.177 |
| ATOM | 543 | NZ | LYS | A | 4 | −16.825 | 45.628 | 17.019 |
| ATOM | 544 | N | ALA | A | 5 | −16.85 | 38.393 | 19.759 |
| ATOM | 545 | CA | ALA | A | 5 | −16.811 | 36.955 | 19.507 |
| ATOM | 546 | C | ALA | A | 5 | −15.772 | 36.771 | 18.416 |
| ATOM | 547 | O | ALA | A | 5 | −15.727 | 37.534 | 17.455 |
| ATOM | 548 | CB | ALA | A | 5 | −18.168 | 36.419 | 19.043 |
| ATOM | 549 | N | CYS | A | 6 | −14.935 | 35.756 | 18.562 |
| ATOM | 550 | CA | CYS | A | 6 | −13.887 | 35.518 | 17.584 |
| ATOM | 551 | C | CYS | A | 6 | −14.347 | 34.765 | 16.338 |
| ATOM | 552 | O | CYS | A | 6 | −15.327 | 34.018 | 16.368 |
| ATOM | 553 | CB | CYS | A | 6 | −12.743 | 34.768 | 18.241 |
| ATOM | 554 | SG | CYS | A | 6 | −11.198 | 34.959 | 17.353 |
| ATOM | 555 | N | CYS | A | 7 | −13.623 | 34.973 | 15.243 |
| ATOM | 556 | CA | CYS | A | 7 | −13.931 | 34.328 | 13.969 |
| ATOM | 557 | C | CYS | A | 7 | −13.091 | 33.071 | 13.798 |
| ATOM | 558 | O | CYS | A | 7 | −11.961 | 33.123 | 13.302 |
| ATOM | 559 | CB | CYS | A | 7 | −13.653 | 35.290 | 12.824 |
| ATOM | 560 | SG | CYS | A | 7 | −13.930 | 34.633 | 11.154 |
| ATOM | 561 | N | VAL | A | 8 | −13.654 | 31.941 | 14.209 |
| ATOM | 562 | CA | VAL | A | 8 | −12.949 | 30.684 | 14.110 |
| ATOM | 563 | C | VAL | A | 8 | −13.653 | 29.733 | 13.157 |
| ATOM | 564 | O | VAL | A | 8 | −14.759 | 30.016 | 12.687 |
| ATOM | 565 | CB | VAL | A | 8 | −12.814 | 30.038 | 15.492 |
| ATOM | 566 | CG1 | VAL | A | 8 | −11.807 | 30.825 | 16.337 |
| ATOM | 567 | CG2 | VAL | A | 8 | −14.161 | 30.006 | 16.170 |
| ATOM | 568 | N | PRO | A | 9 | −13.003 | 28.601 | 12.828 |
| ATOM | 569 | CA | PRO | A | 9 | −13.593 | 27.615 | 11.918 |
| ATOM | 570 | C | PRO | A | 9 | −14.726 | 26.886 | 12.631 |
| ATOM | 571 | O | PRO | A | 9 | −14.581 | 26.476 | 13.780 |
| ATOM | 572 | CB | PRO | A | 9 | −12.423 | 26.676 | 11.601 |
| ATOM | 573 | CG | PRO | A | 9 | −11.204 | 27.487 | 11.925 |
| ATOM | 574 | CD | PRO | A | 9 | −11.620 | 28.226 | 13.163 |
| ATOM | 575 | N | THR | A | 10 | −15.847 | 26.721 | 11.942 |
| ATOM | 576 | CA | THR | A | 10 | −16.999 | 26.060 | 12.527 |
| ATOM | 577 | C | THR | A | 10 | −17.334 | 24.767 | 11.804 |
| ATOM | 578 | O | THR | A | 10 | −18.097 | 23.943 | 12.303 |
| ATOM | 579 | CB | THR | A | 10 | −18.211 | 27.010 | 12.523 |
| ATOM | 580 | OG1 | THR | A | 10 | −18.491 | 27.445 | 11.185 |
| ATOM | 581 | CG2 | THR | A | 10 | −17.902 | 28.230 | 13.375 |
| ATOM | 582 | N | GLU | A | 11 | −16.750 | 24.586 | 10.627 |
| ATOM | 583 | CA | GLU | A | 11 | −16.980 | 23.377 | 9.848 |
| ATOM | 584 | C | GLU | A | 11 | −15.643 | 22.935 | 9.246 |
| ATOM | 585 | O | GLU | A | 11 | −15.029 | 23.666 | 8.464 |
| ATOM | 586 | CB | GLU | A | 11 | −17.981 | 23.624 | 8.715 |
| ATOM | 587 | CG | GLU | A | 11 | −19.421 | 23.807 | 9.163 |
| ATOM | 588 | CD | GLU | A | 11 | −19.686 | 25.166 | 9.770 |
| ATOM | 589 | OE1 | GLU | A | 11 | −19.478 | 26.175 | 9.073 |
| ATOM | 590 | OE2 | GLU | A | 11 | −20.111 | 25.227 | 10.939 |
| ATOM | 591 | N | LEU | A | 12 | −15.183 | 21.749 | 9.622 |
| ATOM | 592 | CA | LEU | A | 12 | −13.923 | 21.254 | 9.104 |
| ATOM | 593 | C | LEU | A | 12 | −14.062 | 19.912 | 8.386 |
| ATOM | 594 | O | LEU | A | 12 | −15.136 | 19.299 | 8.359 |
| ATOM | 595 | CB | LEU | A | 12 | −12.893 | 21.144 | 10.230 |
| ATOM | 596 | CG | LEU | A | 12 | −12.660 | 22.422 | 11.054 |
| ATOM | 597 | CD1 | LEU | A | 12 | −13.475 | 22.350 | 12.337 |
| ATOM | 598 | CD2 | LEU | A | 12 | −11.181 | 22.586 | 11.399 |
| ATOM | 599 | N | SER | A | 13 | −12.971 | 19.476 | 7.771 |
| ATOM | 600 | CA | SER | A | 13 | −12.964 | 18.218 | 7.046 |
| ATOM | 601 | C | SER | A | 13 | −11.568 | 17.628 | 7.164 |
| ATOM | 602 | O | SER | A | 13 | −10.613 | 18.320 | 7.550 |
| ATOM | 603 | CB | SER | A | 13 | −13.346 | 18.435 | 5.578 |
| ATOM | 604 | OG | SER | A | 13 | −12.404 | 19.261 | 4.923 |
| ATOM | 605 | N | ALA | A | 14 | −11.449 | 16.352 | 6.818 |
| ATOM | 606 | CA | ALA | A | 14 | −10.179 | 15.665 | 6.949 |
| ATOM | 607 | C | ALA | A | 14 | −9.421 | 15.471 | 5.652 |
| ATOM | 608 | O | ALA | A | 14 | −9.941 | 15.720 | 4.563 |
| ATOM | 609 | CB | ALA | A | 14 | −10.413 | 14.306 | 7.626 |
| ATOM | 610 | N | ILE | A | 15 | −8.171 | 15.046 | 5.783 |
| ATOM | 611 | CA | ILE | A | 15 | −7.343 | 14.746 | 4.623 |
| ATOM | 612 | C | ILE | A | 15 | −6.475 | 13.559 | 5.004 |
| ATOM | 613 | O | ILE | A | 15 | −6.212 | 13.316 | 6.183 |
| ATOM | 614 | CB | ILE | A | 15 | −6.401 | 15.916 | 4.183 |
| ATOM | 615 | CG1 | ILE | A | 15 | −5.284 | 16.106 | 5.200 |
| ATOM | 616 | CG2 | ILE | A | 15 | −7.188 | 17.211 | 3.982 |
| ATOM | 617 | CD1 | ILE | A | 15 | −4.173 | 16.973 | 4.696 |
| ATOM | 618 | N | SER | A | 16 | −6.045 | 12.806 | 3.999 |
| ATOM | 619 | CA | SER | A | 16 | −5.187 | 11.662 | 4.242 |
| ATOM | 620 | C | SER | A | 16 | −3.740 | 12.089 | 4.217 |
| ATOM | 621 | O | SER | A | 16 | −3.360 | 13.020 | 3.508 |
| ATOM | 622 | CB | SER | A | 16 | −5.416 | 10.584 | 3.185 |
| ATOM | 623 | OG | SER | A | 16 | −6.667 | 9.971 | 3.401 |
| ATOM | 624 | N | MET | A | 17 | −2.933 | 11.409 | 5.012 |
| ATOM | 625 | CA | MET | A | 17 | −1.518 | 11.700 | 5.047 |
| ATOM | 626 | C | MET | A | 17 | −0.778 | 10.414 | 5.244 |
| ATOM | 627 | O | MET | A | 17 | −1.137 | 9.594 | 6.078 |
| ATOM | 628 | CB | MET | A | 17 | −1.170 | 12.694 | 6.164 |
| ATOM | 629 | CG | MET | A | 17 | −1.848 | 14.042 | 5.974 |
| ATOM | 630 | SD | MET | A | 17 | −1.017 | 15.431 | 6.760 |
| ATOM | 631 | CE | MET | A | 17 | −0.799 | 14.823 | 8.475 |
| ATOM | 632 | N | LEU | A | 18 | 0.238 | 10.231 | 4.426 |
| ATOM | 633 | CA | LEU | A | 18 | 1.077 | 9.065 | 4.508 |
| ATOM | 634 | C | LEU | A | 18 | 2.289 | 9.610 | 5.264 |
| ATOM | 635 | O | LEU | A | 18 | 2.939 | 10.565 | 4.818 |
| ATOM | 636 | CB | LEU | A | 18 | 1.461 | 8.608 | 3.100 |
| ATOM | 637 | CG | LEU | A | 18 | 2.324 | 7.355 | 2.955 |
| ATOM | 638 | CD1 | LEU | A | 18 | 1.553 | 6.145 | 3.445 |
| ATOM | 639 | CD2 | LEU | A | 18 | 2.723 | 7.190 | 1.492 |
| ATOM | 640 | N | TYR | A | 19 | 2.581 | 9.029 | 6.418 |
| ATOM | 641 | CA | TYR | A | 19 | 3.706 | 9.501 | 7.196 |
| ATOM | 642 | C | TYR | A | 19 | 4.434 | 8.333 | 7.835 |
| ATOM | 643 | O | TYR | A | 19 | 4.081 | 7.186 | 7.603 |
| ATOM | 644 | CB | TYR | A | 19 | 3.222 | 10.458 | 8.281 |
| ATOM | 645 | CG | TYR | A | 19 | 2.386 | 9.782 | 9.346 |
| ATOM | 646 | CD1 | TYR | A | 19 | 1.029 | 9.527 | 9.147 |
| ATOM | 647 | CD2 | TYR | A | 19 | 2.961 | 9.379 | 10.550 |
| ATOM | 648 | CE1 | TYR | A | 19 | 0.273 | 8.894 | 10.128 |
| ATOM | 649 | CE2 | TYR | A | 19 | 2.218 | 8.745 | 11.526 |
| ATOM | 650 | CZ | TYR | A | 19 | 0.877 | 8.508 | 11.317 |
| ATOM | 651 | OH | TYR | A | 19 | 0.134 | 7.922 | 12.318 |
| ATOM | 652 | N | LEU | A | 20 | 5.439 | 8.651 | 8.650 |
| ATOM | 653 | CA | LEU | A | 20 | 6.255 | 7.661 | 9.347 |
| ATOM | 654 | C | LEU | A | 20 | 6.210 | 7.946 | 10.847 |
| ATOM | 655 | O | LEU | A | 20 | 6.685 | 8.992 | 11.288 |
| ATOM | 656 | CB | LEU | A | 20 | 7.701 | 7.763 | 8.871 |
| ATOM | 657 | CG | LEU | A | 20 | 7.901 | 7.850 | 7.359 |
| ATOM | 658 | CD1 | LEU | A | 20 | 9.300 | 8.379 | 7.039 |
| ATOM | 659 | CD2 | LEU | A | 20 | 7.669 | 6.482 | 6.748 |
| ATOM | 660 | N | ASP | A | 21 | 5.652 | 7.035 | 11.639 |
| ATOM | 661 | CA | ASP | A | 21 | 5.594 | 7.282 | 13.071 |
| ATOM | 662 | C | ASP | A | 21 | 7.001 | 7.289 | 13.662 |
| ATOM | 663 | O | ASP | A | 21 | 7.985 | 7.185 | 12.932 |
| ATOM | 664 | CB | ASP | A | 21 | 4.714 | 6.244 | 13.786 |
| ATOM | 665 | CG | ASP | A | 21 | 5.292 | 4.837 | 13.752 |
| ATOM | 666 | OD1 | ASP | A | 21 | 6.533 | 4.678 | 13.775 |
| ATOM | 667 | OD2 | ASP | A | 21 | 4.491 | 3.882 | 13.732 |
| ATOM | 668 | N | GLU | A | 22 | 7.089 | 7.413 | 14.981 |
| ATOM | 669 | CA | GLU | A | 22 | 8.375 | 7.451 | 15.669 |
| ATOM | 670 | C | GLU | A | 22 | 9.250 | 6.212 | 15.463 |
| ATOM | 671 | O | GLU | A | 22 | 10.459 | 6.246 | 15.738 |
| ATOM | 672 | CB | GLU | A | 22 | 8.164 | 7.699 | 17.171 |
| ATOM | 673 | CG | GLU | A | 22 | 7.220 | 6.731 | 17.868 |
| ATOM | 674 | CD | GLU | A | 22 | 5.828 | 6.726 | 17.257 |
| ATOM | 675 | OE1 | GLU | A | 22 | 5.347 | 7.810 | 16.856 |
| ATOM | 676 | OE2 | GLU | A | 22 | 5.210 | 5.640 | 17.185 |
| ATOM | 677 | N | ASN | A | 23 | 8.646 | 5.133 | 14.966 |
| ATOM | 678 | CA | ASN | A | 23 | 9.377 | 3.889 | 14.727 |
| ATOM | 679 | C | ASN | A | 23 | 9.682 | 3.647 | 13.249 |
| ATOM | 680 | O | ASN | A | 23 | 10.095 | 2.554 | 12.853 |
| ATOM | 681 | CB | ASN | A | 23 | 8.591 | 2.707 | 15.299 |
| ATOM | 682 | CG | ASN | A | 23 | 8.384 | 2.827 | 16.794 |
| ATOM | 683 | OD1 | ASN | A | 23 | 9.349 | 2.930 | 17.560 |
| ATOM | 684 | ND2 | ASN | A | 23 | 7.125 | 2.819 | 17.221 |
| ATOM | 685 | N | GLU | A | 24 | 9.485 | 4.672 | 12.435 |
| ATOM | 686 | CA | GLU | A | 24 | 9.749 | 4.558 | 11.015 |
| ATOM | 687 | C | GLU | A | 24 | 8.790 | 3.603 | 10.299 |
| ATOM | 688 | O | GLU | A | 24 | 9.145 | 2.996 | 9.292 |
| ATOM | 689 | CB | GLU | A | 24 | 11.203 | 4.129 | 10.784 |
| ATOM | 690 | CG | GLU | A | 24 | 12.232 | 5.210 | 11.082 |
| ATOM | 691 | CD | GLU | A | 24 | 12.072 | 6.410 | 10.166 |
| ATOM | 692 | OE1 | GLU | A | 24 | 12.108 | 6.218 | 8.928 |
| ATOM | 693 | OE2 | GLU | A | 24 | 11.907 | 7.541 | 10.677 |
| ATOM | 694 | N | LYS | A | 25 | 7.580 | 3.459 | 10.826 |
| ATOM | 695 | CA | LYS | A | 25 | 6.583 | 2.624 | 10.175 |
| ATOM | 696 | C | LYS | A | 25 | 5.815 | 3.540 | 9.228 |
| ATOM | 697 | O | LYS | A | 25 | 5.553 | 4.692 | 9.552 |
| ATOM | 698 | CB | LYS | A | 25 | 5.602 | 2.039 | 11.182 |
| ATOM | 699 | CG | LYS | A | 25 | 6.163 | 0.963 | 12.058 |
| ATOM | 700 | CD | LYS | A | 25 | 5.068 | 0.387 | 12.947 |
| ATOM | 701 | CE | LYS | A | 25 | 5.648 | −0.511 | 14.031 |
| ATOM | 702 | NZ | LYS | A | 25 | 4.577 | −1.091 | 14.886 |
| ATOM | 703 | N | VAL | A | 26 | 5.455 | 3.037 | 8.057 |
| ATOM | 704 | CA | VAL | A | 26 | 4.713 | 3.849 | 7.116 |
| ATOM | 705 | C | VAL | A | 26 | 3.237 | 3.737 | 7.444 |
| ATOM | 706 | O | VAL | A | 26 | 2.657 | 2.659 | 7.383 |
| ATOM | 707 | CB | VAL | A | 26 | 4.969 | 3.396 | 5.681 |
| ATOM | 708 | CG1 | VAL | A | 26 | 4.250 | 4.317 | 4.708 |
| ATOM | 709 | CG2 | VAL | A | 26 | 6.462 | 3.393 | 5.422 |
| ATOM | 710 | N | VAL | A | 26 | 2.637 | 4.864 | 7.800 |
| ATOM | 711 | CA | VAL | A | 26 | 1.231 | 4.916 | 8.170 |
| ATOM | 712 | C | VAL | A | 26 | 0.418 | 5.778 | 7.213 |
| ATOM | 713 | O | VAL | A | 26 | 0.871 | 6.841 | 6.774 |
| ATOM | 714 | CB | VAL | A | 26 | 1.062 | 5.531 | 9.577 |
| ATOM | 715 | CG1 | VAL | A | 26 | −0.341 | 5.253 | 10.115 |
| ATOM | 716 | CG2 | VAL | A | 26 | 2.128 | 5.006 | 10.506 |
| ATOM | 717 | N | LEU | A | 27 | −0.779 | 5.306 | 6.887 |
| ATOM | 718 | CA | LEU | A | 27 | −1.706 | 6.048 | 6.040 |
| ATOM | 719 | C | LEU | A | 27 | −2.862 | 6.358 | 6.992 |
| ATOM | 720 | O | LEU | A | 27 | −3.679 | 5.497 | 7.297 |
| ATOM | 721 | CB | LEU | A | 27 | −2.201 | 5.189 | 4.876 |
| ATOM | 722 | CG | LEU | A | 27 | −3.204 | 5.898 | 3.952 |
| ATOM | 723 | CD1 | LEU | A | 27 | −2.519 | 7.077 | 3.262 |
| ATOM | 724 | CD2 | LEU | A | 27 | −3.755 | 4.925 | 2.929 |
| ATOM | 725 | N | LYS | A | 28 | −2.910 | 7.584 | 7.489 |
| ATOM | 726 | CA | LYS | A | 28 | −3.952 | 7.965 | 8.430 |
| ATOM | 727 | C | LYS | A | 28 | −4.831 | 9.082 | 7.881 |
| ATOM | 728 | O | LYS | A | 28 | −4.374 | 9.924 | 7.103 |
| ATOM | 729 | CB | LYS | A | 28 | −3.305 | 8.409 | 9.738 |
| ATOM | 730 | CG | LYS | A | 28 | −4.265 | 8.720 | 10.859 |
| ATOM | 731 | CD | LYS | A | 28 | −3.509 | 9.382 | 11.994 |
| ATOM | 732 | CE | LYS | A | 28 | −4.397 | 9.654 | 13.186 |
| ATOM | 733 | NZ | LYS | A | 28 | −4.839 | 8.377 | 13.816 |
| ATOM | 734 | N | ASN | A | 29 | −6.098 | 9.078 | 8.279 |
| ATOM | 735 | CA | ASN | A | 29 | −7.045 | 10.095 | 7.843 |
| ATOM | 736 | C | ASN | A | 29 | −7.147 | 11.103 | 8.979 |
| ATOM | 737 | O | ASN | A | 29 | −7.815 | 10.842 | 9.969 |
| ATOM | 738 | CB | ASN | A | 29 | −8.408 | 9.455 | 7.560 |
| ATOM | 739 | CG | ASN | A | 29 | −9.518 | 10.485 | 7.364 |
| ATOM | 740 | OD1 | ASN | A | 29 | −9.360 | 11.444 | 6.597 |
| ATOM | 741 | ND2 | ASN | A | 29 | −10.653 | 10.288 | 8.050 |
| ATOM | 742 | N | TYR | A | 30 | −6.473 | 12.241 | 8.837 |
| ATOM | 743 | CA | TYR | A | 30 | −6.470 | 13.278 | 9.869 |
| ATOM | 744 | C | TYR | A | 30 | −7.680 | 14.204 | 9.836 |
| ATOM | 745 | O | TYR | A | 30 | −7.928 | 14.870 | 8.835 |
| ATOM | 746 | CB | TYR | A | 30 | −5.197 | 14.130 | 9.768 |
| ATOM | 747 | CG | TYR | A | 30 | −3.913 | 13.420 | 10.155 |
| ATOM | 748 | CD1 | TYR | A | 30 | −3.378 | 12.394 | 9.363 |
| ATOM | 749 | CD2 | TYR | A | 30 | −3.220 | 13.792 | 11.306 |
| ATOM | 750 | CE1 | TYR | A | 30 | −2.181 | 11.765 | 9.713 |
| ATOM | 751 | CE2 | TYR | A | 30 | −2.032 | 13.171 | 11.665 |
| ATOM | 752 | CZ | TYR | A | 30 | −1.516 | 12.167 | 10.869 |
| ATOM | 753 | OH | TYR | A | 30 | −0.319 | 11.603 | 11.231 |
| ATOM | 754 | N | GLN | A | 31 | −8.408 | 14.254 | 10.950 |
| ATOM | 755 | CA | GLN | A | 31 | −9.606 | 15.088 | 11.089 |
| ATOM | 756 | C | GLN | A | 31 | −9.287 | 16.541 | 11.431 |
| ATOM | 757 | O | GLN | A | 31 | −8.213 | 16.847 | 11.925 |
| ATOM | 758 | CB | GLN | A | 31 | −10.500 | 14.541 | 12.202 |
| ATOM | 759 | CG | GLN | A | 31 | −10.807 | 13.074 | 12.104 |
| ATOM | 760 | CD | GLN | A | 31 | −11.744 | 12.749 | 10.969 |
| ATOM | 761 | OE1 | GLN | A | 31 | −11.900 | 11.582 | 10.602 |
| ATOM | 762 | NE2 | GLN | A | 31 | −12.385 | 13.773 | 10.405 |
| ATOM | 763 | N | ASP | A | 32 | −10.238 | 17.430 | 11.173 |
| ATOM | 764 | CA | ASP | A | 32 | −10.085 | 18.851 | 11.495 |
| ATOM | 765 | C | ASP | A | 32 | −8.867 | 19.494 | 10.842 |
| ATOM | 766 | O | ASP | A | 32 | −8.195 | 20.335 | 11.442 |
| ATOM | 767 | CB | ASP | A | 32 | −10.000 | 19.025 | 13.019 |
| ATOM | 768 | CG | ASP | A | 32 | −11.247 | 18.520 | 13.742 |
| ATOM | 769 | OD1 | ASP | A | 32 | −12.349 | 18.587 | 13.155 |
| ATOM | 770 | OD2 | ASP | A | 32 | −11.130 | 18.069 | 14.908 |
| ATOM | 771 | N | MET | A | 33 | −8.582 | 19.113 | 9.606 |
| ATOM | 772 | CA | MET | A | 33 | −7.426 | 19.662 | 8.918 |
| ATOM | 773 | C | MET | A | 33 | −7.780 | 20.808 | 7.987 |
| ATOM | 774 | O | MET | A | 33 | −7.021 | 21.768 | 7.855 |
| ATOM | 775 | CB | MET | A | 33 | −6.741 | 18.559 | 8.125 |
| ATOM | 776 | CG | MET | A | 33 | −6.037 | 17.540 | 8.980 |
| ATOM | 777 | SD | MET | A | 33 | −4.559 | 18.231 | 9.714 |
| ATOM | 778 | CE | MET | A | 33 | −3.406 | 18.041 | 8.318 |
| ATOM | 779 | N | VAL | A | 34 | −8.942 | 20.707 | 7.351 |
| ATOM | 780 | CA | VAL | A | 34 | −9.381 | 21.719 | 6.401 |
| ATOM | 781 | C | VAL | A | 34 | −10.579 | 22.536 | 6.858 |
| ATOM | 782 | O | VAL | A | 34 | −11.586 | 21.988 | 7.292 |
| ATOM | 783 | CB | VAL | A | 34 | −9.701 | 21.056 | 5.027 |
| ATOM | 784 | CG1 | VAL | A | 34 | −10.388 | 22.040 | 4.087 |
| ATOM | 785 | CG2 | VAL | A | 34 | −8.423 | 20.561 | 4.412 |
| ATOM | 786 | N | VAL | A | 35 | −10.465 | 23.855 | 6.739 |
| ATOM | 787 | CA | VAL | A | 35 | −11.553 | 24.745 | 7.113 |
| ATOM | 788 | C | VAL | A | 35 | −12.610 | 24.835 | 6.016 |
| ATOM | 789 | O | VAL | A | 35 | −12.373 | 25.403 | 4.950 |
| ATOM | 790 | CB | VAL | A | 35 | −11.057 | 26.176 | 7.407 |
| ATOM | 791 | CG1 | VAL | A | 35 | −12.240 | 27.097 | 7.601 |
| ATOM | 792 | CG2 | VAL | A | 35 | −10.222 | 26.186 | 8.655 |
| ATOM | 793 | N | GLU | A | 36 | −13.779 | 24.266 | 6.282 |
| ATOM | 794 | CA | GLU | A | 36 | −14.870 | 24.311 | 5.321 |
| ATOM | 795 | C | GLU | A | 36 | −15.702 | 25.565 | 5.572 |
| ATOM | 796 | O | GLU | A | 36 | −16.011 | 26.303 | 4.645 |
| ATOM | 797 | CB | GLU | A | 36 | −15.733 | 23.054 | 5.447 |
| ATOM | 798 | CG | GLU | A | 36 | −14.969 | 21.782 | 5.128 |
| ATOM | 799 | CD | GLU | A | 36 | −14.515 | 21.732 | 3.676 |
| ATOM | 800 | OE1 | GLU | A | 36 | −15.036 | 22.519 | 2.858 |
| ATOM | 801 | OE2 | GLU | A | 36 | −13.643 | 20.902 | 3.344 |
| ATOM | 802 | N | GLY | A | 37 | −16.053 | 25.811 | 6.829 |
| ATOM | 803 | CA | GLY | A | 37 | −16.834 | 26.990 | 7.152 |
| ATOM | 804 | C | GLY | A | 37 | −16.322 | 27.785 | 8.341 |
| ATOM | 805 | O | GLY | A | 37 | −15.671 | 27.249 | 9.237 |
| ATOM | 806 | N | CYS | A | 38 | −16.616 | 29.077 | 8.360 |
| ATOM | 807 | CA | CYS | A | 38 | −16.177 | 29.917 | 9.466 |
| ATOM | 808 | C | CYS | A | 38 | −17.347 | 30.502 | 10.249 |
| ATOM | 809 | O | CYS | A | 38 | −18.467 | 30.628 | 9.741 |
| ATOM | 810 | CB | CYS | A | 38 | −15.301 | 31.058 | 8.967 |
| ATOM | 811 | SG | CYS | A | 38 | −13.785 | 30.558 | 8.098 |
| ATOM | 812 | N | GLY | A | 39 | −17.079 | 30.867 | 11.494 |
| ATOM | 813 | CA | GLY | A | 39 | −18.129 | 31.430 | 12.309 |
| ATOM | 814 | C | GLY | A | 39 | −17.622 | 32.176 | 13.518 |
| ATOM | 815 | O | GLY | A | 39 | −16.425 | 32.235 | 13.791 |
| ATOM | 816 | N | CYS | A | 40 | −18.564 | 32.753 | 14.245 |
| ATOM | 817 | CA | CYS | A | 40 | −18.253 | 33.505 | 15.439 |
| ATOM | 818 | C | CYS | A | 40 | −18.543 | 32.670 | 16.665 |
| ATOM | 819 | O | CYS | A | 40 | −19.620 | 32.084 | 16.794 |
| ATOM | 820 | CB | CYS | A | 40 | −19.068 | 34.779 | 15.442 |
| ATOM | 821 | SG | CYS | A | 40 | −18.539 | 35.799 | 14.053 |

145. A peptide or a peptidomimetic according to claim 144, wherein said growth factor receptor is selected from the group consisting of platelet-derived growth factor, platelet-derived angiogenesis factor, vascularendothelial growth factor, platelet-derived epidermal growth factor, transforming growth factor beta, transforming growth factor A, epidermal growth factor, fibroblast growth factor, acidic fibroblast growth factor, basic fibroblast growth factor, insulin-like growth factors 1 and 2, keratinocyte growth factor, tumor necrosis factor, fibroblast growth factor and interleukin-1, Keratinocyte Growth Factor-2, and combinations thereof.

146. A peptide or a peptidomimetic according to claim 144, comprising a peptide with eight amino acids PEP12, and a peptide with five amino acids PEP2; wherein PEP12 is a peptide of general formula PEP1-AA¹⁷-PEP11; wherein AA¹⁷ is selected from the group consisting of G, A, V, L, I, P, F, M, W, T and S; wherein PEP11 is a peptide with 3 amino acids of general formula AA¹⁸-AA¹⁹-AA²⁰; wherein AA¹⁸ is selected from the group consisting of L, V, Q, A and R; wherein AA¹⁹ is selected from the group consisting of F, W, H, Y, I and K; wherein AA²⁰ is selected from the group consisting of L, F, Y, K, I, V and M.

147. A peptide or a peptidomimetic according to claim 146, wherein PEP11 is selected from the group consisting of LYL, LFF, LYF, LYY, LYK, LYI, LFI, LYV, VYY, QIM, AKV and RKI.

148. A peptide or a peptidomimetic according claim 144, comprising a peptide with five amino acids PEP5 and a peptide with between five and seven amino acids PEP6; wherein PEP5 is a peptide of general formula PEP3-AA¹¹-AA¹²; wherein PEP3 is selected from the group consisting of VPT, VPE, APT, TPT, VPA, APV, VPQ, VSQ, SRV and TQV; wherein AA¹¹ is selected from the group consisting of E, K, Q, R, A, D, G and H; and wherein AA¹² is selected from the group consisting of L, M, T, E, Q and H; wherein PEP6 is a peptide of general formula AA²⁶-AA²⁷-AA²⁸-AA²⁹-PEP4; wherein PEP4 is selected from the group consisting of VVE, TVE, VVR, VVK, VAE, AVS, VVD, VEE, VRS, VKS, QHN, EHS, EEH and EDH; wherein AA²⁶ is absent or selected from the group consisting of amino acids having an acidic group-containing side chain; wherein AA²⁷ and AA²⁸ are independently selected from the group consisting of amino acids having an acidic group-containing side chain and amino acids having an apolar side chain; and wherein AA²⁹ is absent or selected from the group consisting of amino acids having a polar, non-charged group-containing side chain.

149. A peptide or a peptidomimetic according claim 144, comprising a peptide with between six and twelve amino acids PEP9 and a peptide with between six and eleven amino acids PEP10; wherein PEP9 is a peptide of general formula PEP7-PEP5; wherein PEP5 is a peptide of formula PEP3-AA¹¹-AA¹²; wherein PEP3 is selected from the group consisting of VPT, VPE, APT, TPT, VPA, APV, VPQ, VSQ, SRV and TQV; wherein AA¹¹ is selected from the group consisting of E, K, Q, R, A, D, G and H; and wherein AA¹² is selected from the group consisting of L, M, T, E, Q and H; wherein PEP7 is an amino acid or a peptide with between two and seven amino acids of general formula AA¹-AA²-AA³-AA⁴-AA⁵-AA⁶-AA⁷; wherein AA¹, AA², AA³, AA⁴, and AA⁵ are independently absent or any naturally occurring and non-naturally occurring amino acids; wherein AA⁶ is absent or selected from the group consisting of S, T, C, E, Q, P and R; wherein AA⁷ is absent or is selected from the group consisting of S, T, C, E, Q, P and R; wherein PEP10 is a peptide of general formula PEP6-PEP8; wherein PEP6 is a peptide of formula AA²⁶-AA²⁷-AA²⁸-AA²⁹-PEP4; wherein PEP4 is selected from the group consisting of VVE, TVE, VVR, VVK, VAE, AVS, VVD, VEE, VRS, VKS, QHN, EHS, EEH and EDH; wherein AA²⁶ is absent or selected from the group consisting of amino acids having an acidic group-containing side chain; wherein AA²⁷ and AA²⁸ are independently selected from the group consisting of amino acids having an acidic group-containing side chain and amino acids having an apolar side chain; and wherein AA²⁹ is absent or selected from the group consisting of amino acids having a polar, non-charged group-containing side chain; wherein PEP8 is an amino acid or a peptide with between two and six amino acids of general formula AA³³-AA³⁴-AA³⁵-AA³⁶-AA³⁷-AA³⁸; AA³³ is absent or is selected from the group consisting of any naturally occurring and non-naturally occurring amino acids at the exception of amino acids having an aromatic group-containing side chain; AA³⁴ is absent or is selected from the group consisting of amino acids having an acidic group-containing side chain and amino acids having an aliphatic side chain; wherein AA³⁵ is absent or is selected from the group consisting of amino acids having a polar, non-charged group-containing side chain; wherein AA³⁶ is absent or is selected from the group consisting of amino acids having an acidic group-containing side chain and amino acids having an aliphatic side chain; wherein AA³⁷ is absent or is selected from the group consisting of amino acids having a polar, non-charged group-containing side chain; wherein AA³⁸ is absent or is selected from the group consisting of any naturally occurring and non-naturally occurring amino acids.

150. A peptide or a peptidomimetic according to claim 144, wherein the pair PEP1:PEP2 is selected from the group consisting of SAIS (SEQ ID NO: 84116): LKNYQ (SEQ ID NO: 84230), SSLS (SEQ ID NO: 84121):LKVYP (SEQ ID NO: 84231), NAIS (SEQ ID NO: 84113): LKKYR (SEQ ID NO: 84229), SATS (SEQ ID NO: 84117): LRKHR (SEQ ID NO: 84233), SPIS (SEQ ID NO: 84120): LKYHY (SEQ ID NO: 84232), EPIS (SEQ ID NO: 84109): KFKYE (SEQ ID NO: 84211), SPIN (SEQ ID NO: 84119): YGKIP (SEQ ID NO: 84397), SPIS (SEQ ID NO: 84120):YKQYE (SEQ ID NO: 84398), KPLS (SEQ ID NO: 84112): DHHKD (SEQ ID NO: 84149), EPLP (SEQ ID NO: 84110): EQLSN (SEQ ID NO: 84178), EPLT (SEQ ID NO: 84111):EQLSN (SEQ ID NO: 84178), SNIT (SEQ ID NO: 84118): IGEMS (SEQ ID NO: 84209), SNIT (SEQ ID NO: 84118): LGEMS (SEQ ID NO: 84228), RSVK (SEQ ID NO: 84115): KEVQV (SEQ ID NO: 84210) and RPVQ (SEQ ID NO: 84114): KKATV (SEQ ID NO: 84212).

151. A peptide or a peptidomimetic according to claim 150, wherein the pair PEP12:PEP2 is selected from the group consisting of SAIS-AA¹⁷-LYL (SEQ ID NO: 84881):LKNYQ (SEQ ID NO: 84230), SSLS-AA¹⁷-LFF (SEQ ID NO: 84889):LKVYP (SEQ ID NO: 84231), NAIS-AA¹⁷-LYF (SEQ ID NO: 84878):LKKYR (SEQ ID NO: 84229), SATS-AA¹⁷-LYY (SEQ ID NO: 84882):LRKHR (SEQ ID NO: 84233), SPIS-AA¹⁷-LYK (SEQ ID NO: 84887):LKYHY (SEQ ID NO: 84232), EPIS-AA¹⁷-LYL (SEQ ID NO: 84874):KFKYE (SEQ ID NO: 84211), SPIN-AA¹⁷-LYF (SEQ ID NO: 84884):YGKIP (SEQ ID NO: 84397), SPIS-AA¹⁷-LYI (SEQ ID NO: 84886):YKQYE (SEQ ID NO: 84398), SPIS-AA¹⁷-LFI (SEQ ID NO: 84885):YKQYE (SEQ ID NO: 84398), KPLS-AA¹⁷-LYV (SEQ ID NO: 84877):DHHKD (SEQ ID NO: 84149), EPLP-AA¹⁷-VYY (SEQ ID NO: 84875):EQLSN (SEQ ID NO: 84178), EPLT-AA¹⁷-LYY (SEQ ID NO: 84876):EQLSN (SEQ ID NO: 84178), SNIT-AA¹⁷-QIM (SEQ ID NO: 84883):IGEMS (SEQ ID NO: 84209), SNIT-AA¹⁷-QIM (SEQ ID NO: 84883):LGEMS (SEQ ID NO: 84228), RSVK-AA¹⁷-AKV (SEQ ID NO: 84880):KEVQV (SEQ ID NO: 84210) and RPVQ-AA¹⁷-RKI (SEQ ID NO: 84879):KKATV (SEQ ID NO: 84212); wherein AA¹⁷ is selected from the group consisting of G, A, V, L, I, P, F, M, W, T and S.

152. A peptide or a peptidomimetic according to claim 144, wherein the pair PEP3:PEP4 is selected from the group consisting of VPT:VVE, VPE:TVE, APT:VVR, APT:VVK, VPT:VAE, VPT:AVS, TPT:VVD, VPA:VVE, APV:VEE, VPQ:VRS, VSQ:VKS, VPQ:VKS, VPT:QHN, VPT:EHS, SRV:EEH and TQV:EDH.

153. A peptide or a peptidomimetic according to claim 148, wherein the pair PEP5:PEP6 is selected from the group consisting of VPT-AA¹¹-AA¹²:AA²⁶-AA²⁷-AA²⁸-AA²⁹-VVE, VPE-AA¹¹-AA¹²:AA²⁶-AA²⁷-AA²⁸-AA²⁹-TVE, APT-AA¹¹-AA¹²:AA²⁶-AA²⁷-AA²⁸-AA²⁹-VVR, APT-AA¹¹-AA¹²:AA²⁶-AA²⁷-AA²⁸-AA²⁹-VVK, VPT-AA¹¹-AA¹²:AA²⁶-AA²⁷-AA²⁸-AA²⁹-VAE, VPT-AA¹¹-AA¹²:AA²⁶-AA²⁷-AA²⁸-AA²⁹-AVS, TPT-AA¹¹-AA¹²:AA²⁶-AA²⁷-AA²⁸-AA²⁹-VVD, VPA-AA¹¹-AA¹²:AA²⁶-AA²⁷-AA²⁸-AA²⁹-VVE, APV-AA¹¹-AA¹²:AA²⁶-AA²⁷-AA²⁸-AA²⁹-VEE, VPQ-AA¹¹-AA¹²:AA²⁶-AA²⁷-AA²⁸-AA²⁹-VRS, VS Q-AA¹¹-AA¹²:AA²⁶-AA²⁷-AA²⁸-AA²⁹-VKS, VPQ-AA¹¹-AA¹²:AA²⁶-AA²⁷-AA²⁸-AA²⁹-VKS, VPT-AA¹¹-AA¹²:AA²⁶-AA²⁷-AA²⁸-AA²⁹-QHN, VPT-AA¹¹-AA¹²:AA²⁶-AA²⁷-AA²⁸-AA²⁹-EHS, SRV-AA¹¹-AA¹²:AA²⁶-AA²⁷-AA²⁸-AA²⁹-EEH and TQV-AA¹¹-AA¹²:AA²⁶-AA²⁷-AA²⁸-AA²⁹-EDH.

154. A peptide or a peptidomimetic according to claim 144, wherein the pair PEP1:PEP11 is selected from the group consisting of SAIS (SEQ ID NO: 84116):LYL, SSLS (SEQ ID NO: 84121):LFF, NAIS (SEQ ID NO: 84113):LYF, SATS (SEQ ID NO: 84117):LYY, SPIS (SEQ ID NO: 84120):LYK, SPIS (SEQ ID NO: 84120):LYI, SPIS (SEQ ID NO: 84120):LFI, EPIS (SEQ ID NO: 84109):LYL, SPIN (SEQ ID NO: 84119):LYF, KPLS (SEQ ID NO: 84112):LYV, EPLP (SEQ ID NO: 84110):VYY, EPLT (SEQ ID NO: 84111):LYY, SNIT (SEQ ID NO: 84118):QIM, RSVK (SEQ ID NO: 84115):AKV and RPVQ (SEQ ID NO: 84114):RKI.

155. A peptide or a peptidomimetic, according to claim 144, wherein said peptide or peptidomimetic may be any one of peptides of SEQ ID NO: 1 to 2157 and 2242 to 84108.

156. A peptide or a peptidomimetic, having growth factor receptor-binding capability, according to claim 144, comprising at least one biomaterial-affinity-containing group, wherein said at least one biomaterial-affinity-containing group provides said peptide, or a peptidomimetic, with the ability to covalently or non-covalently interact with a biomaterial.

157. A functionalized biomaterial comprising at least one peptide or a peptidomimetic, according to claim 144, and a biomaterial.

158. A medical device comprising at least one peptide or peptidomimetic, according to claim 144.

159. A medical composition comprising at least one peptide or peptidomimetic, according to claim 144, and a medically acceptable carrier.

160. A screening method for selecting a peptide or a peptidomimetic having the ability to induce tissue regeneration and cell differentiation, the method comprising the steps of (a) providing a molecular model of the 3D structure atomic coordinates of PEPREF as defined in claim 144 and (b) identifying a candidate analog having a RMSD value of 2.45 Å or less.

161. A method of producing a peptide or peptidomimetic having the ability to induce tissue regeneration and cell differentiation, the method comprising the steps of (a) providing a molecular model comprising the 3D structure atomic coordinates of PEPREF as defined in claim 144; (b) identifying a candidate analog having a RMSD of 2.45 Å or less; and (c) producing the candidate analog identified in step (b).

162. A computer system comprising: (a) a memory comprising the 3D structure atomic coordinates of PEPREF as defined in claim 144, and (b) a processor in electrical communication with the memory; wherein the processor generates a molecular model having a three dimensional shape representative of PEPREF.

163. A method of inducing cell differentiation, tissue regeneration, or tissue formation comprising the in-vitro, ex-vivo or in-vivo administration of an effective amount of a peptide or peptidomimetic according to claim 144; wherein said method is selected from the group consisting of pharmaceutical, surgical, dermatological, prophylactic, diagnostic, imaging methods, and any combination thereof.

164. A method of inducing cell differentiation, tissue regeneration, or tissue formation comprising the in-vitro, ex-vivo or in-vivo administration of an effective amount of a functionalized biomaterial according to claim 157; wherein said method is selected from the group consisting of pharmaceutical, surgical, dermatological, prophylactic, diagnostic, imaging methods, and any combination thereof.

165. A method of inducing cell differentiation, tissue regeneration, or tissue formation comprising the in-vitro, ex-vivo or in-vivo administration of an effective amount of a medical composition according to claim 159; wherein said method is selected from the group consisting of pharmaceutical, surgical, dermatological, prophylactic, diagnostic, imaging methods, and any combination thereof.

166. The method according to claim 163, wherein said method may be used for protecting a patient from a disease, condition, disorder, or pathology selected from the group consisting of enhancing osteogenesis, inducing bone formation, inducing osteocyte maturation, treating, preventing or diagnosing osteoporosis; enhancing chondrogenesis, inducing cartilage formation, inducing chondrocyte maturation, treating or preventing osteoarthritis, treating or preventing costochondritis, treating or preventing herniation, treating or preventing achondroplasia, treating, preventing or diagnosing relapsing polychondritis; enhancing endothelization, enhancing vascularization/angiogenesis, treating, preventing or diagnosing at least one of coronary artery disease, cardiomyopathy, hypertensive heart disease, heart failure, cor pulmonale, cardiac dysrhythmias, inflammatory heart disease, endocarditis, inflammatory cardiomegaly, myocarditis, valvular heart disease, cerebrovascular disease, peripheral arterial disease, congenital heart disease, or rheumatic heart disease; enhancing axonal dendritic neuron growth, promoting neuron-regeneration, treating, preventing or diagnosing neuron degeneration-related conditions and diseases; enhancing eye retina cell regeneration, treating, preventing or diagnosing eye retina cell degeneration-related conditions or diseases; enhancing renal functions, preventing, treating or diagnosing kidneys failure, chronic kidney disease, and/or renal fibrosis; enhancing fibrous tissue formation, promoting tendon and ligament regeneration, preventing, treating or diagnosing tendon/ligament cell degeneration; hair follicle tissue regeneration, hair follicle stem cell activation, preventing, treating or diagnosing alopecia areata, alopecia totalis, alopecia universalis, androgenic alopecia, telogen effluvium, anagen effluvium or chemotherapy-induced alopecia; enhancing tissue closure; promoting female fertility, and treating, preventing, or diagnosing female infertility; myopathies, muscular atrophy, disuse atrophy, denervation atrophy, muscular dystrophies such as the Duchenne muscular dystrophy (DMD), and the Becker muscular dystrophy (BMD), fibrosis, fibrositis, muscle weakness, fatigue, cramps, fibromyalgia, or chronic muscle pain syndrome; treating asthma, Chronic obstructive pulmonary disease, Chronic bronchitis, Emphysema, Cystic fibrosis, Pulmonary edema, Acute respiratory distress syndrome, Pneumoconiosis, Interstitial lung disease, Sarcoidosis, Idiopathic pulmonary fibrosis, Pulmonary embolism, Pulmonary hypertension, Pleural effusion, Pneumothorax, Mesothelioma, Granulomatosis with polyangiitis, Goodpasture syndrome, Pulmonary hyperplasia, Infant respiratory distress syndrome, Chronic obstructive pulmonary disease, Silicosis, Sleep Apnea, Severe Acute Respiratory Syndrome, Pulmonary fibrosis, Primary ciliary dyskinesia, Pneumoconiosis, Hypersensitivity Pneumonitis, Cryptogenic Organizing Pneumonia (Bronchiolitis Obliterans Organizing Pneumonia, Byssinosis, Bronchopulmonary Dysplasia, Bronchiolitis, Bronchiectasis, Asbestosis, Pertussis, Middle Eastern Respiratory Syndrome, Pneumonia, Tuberculosis, Bronchitis, Histoplasmosis, Coccidioidomycosis, and Acute bronchitis; treating anemia, Iron-deficiency anemia, Anemia of chronic disease, Pernicious anemia, Aplastic anemia, Autoimmune hemolytic anemia, Thalassemia, Sickle cell anemia, Polycythemia vera, Vitamin deficiency anemia, Hemolytic anemia, Thrombocytopenia, Idiopathic thrombocytopenic purpura, Heparin-induced thrombocytopenia, Thrombotic thrombocytopenic purpura, Essential thrombocytosis, Thrombosis, Hemophilia, von Willebrand disease, Hypercoaguable state, Deep venous thrombosis, Disseminated intravascular coagulation, Thrombocytopenia, Immune Thrombocytopenia, Drug-induced thrombocytopenia, Gestational thrombocytopenia, Thrombotic microangiopathies, Drug-induced thrombotic microangiopathies, Complement-mediated thrombotic microangiopathies, Mixed cryoglobulinemia, Eosinophilia, Eosinopenia, Idiopathic hypereosinophilic syndrome, Antiphospholipid syndrome, Glanzmann's thrombasthenia, Wiskott-Aldrich syndrome, Leishmania infection, Toxoplasmosis, Hereditary hypogammaglobulinemia, Nonfamilial hypogammaglobulinemia, Leukopenia, Agranulocytosis, Basopenia, Bernard-Soulier syndrome, Malaria, Sepsis, and Hemolytic uremic syndrome; treating obesity, Dercum's disease, Multiple symmetric lipomatosis, Familial multiple lipomatosis, Lipodystrophy, Lipedema, and Atherosclerosis.

167. The method according to claim 164, wherein said method may be used for protecting a patient from a disease, condition, disorder, or pathology selected from the group consisting of enhancing osteogenesis, inducing bone formation, inducing osteocyte maturation, treating, preventing or diagnosing osteoporosis; enhancing chondrogenesis, inducing cartilage formation, inducing chondrocyte maturation, treating or preventing osteoarthritis, treating or preventing costochondritis, treating or preventing herniation, treating or preventing achondroplasia, treating, preventing or diagnosing relapsing polychondritis; enhancing endothelization, enhancing vascularization/angiogenesis, treating, preventing or diagnosing at least one of coronary artery disease, cardiomyopathy, hypertensive heart disease, heart failure, cor pulmonale, cardiac dysrhythmias, inflammatory heart disease, endocarditis, inflammatory cardiomegaly, myocarditis, valvular heart disease, cerebrovascular disease, peripheral arterial disease, congenital heart disease, or rheumatic heart disease; enhancing axonal dendritic neuron growth, promoting neuron-regeneration, treating, preventing or diagnosing neuron degeneration-related conditions and diseases; enhancing eye retina cell regeneration, treating, preventing or diagnosing eye retina cell degeneration-related conditions or diseases; enhancing renal functions, preventing, treating or diagnosing kidneys failure, chronic kidney disease, and/or renal fibrosis; enhancing fibrous tissue formation, promoting tendon and ligament regeneration, preventing, treating or diagnosing tendon/ligament cell degeneration; hair follicle tissue regeneration, hair follicle stem cell activation, preventing, treating or diagnosing alopecia areata, alopecia totalis, alopecia universalis, androgenic alopecia, telogen effluvium, anagen effluvium or chemotherapy-induced alopecia; enhancing tissue closure; promoting female fertility, and treating, preventing, or diagnosing female infertility; myopathies, muscular atrophy, disuse atrophy, denervation atrophy, muscular dystrophies such as the Duchenne muscular dystrophy (DMD), and the Becker muscular dystrophy (BMD), fibrosis, fibrositis, muscle weakness, fatigue, cramps, fibromyalgia, or chronic muscle pain syndrome; treating asthma, Chronic obstructive pulmonary disease, Chronic bronchitis, Emphysema, Cystic fibrosis, Pulmonary edema, Acute respiratory distress syndrome, Pneumoconiosis, Interstitial lung disease, Sarcoidosis, Idiopathic pulmonary fibrosis, Pulmonary embolism, Pulmonary hypertension, Pleural effusion, Pneumothorax, Mesothelioma, Granulomatosis with polyangiitis, Goodpasture syndrome, Pulmonary hyperplasia, Infant respiratory distress syndrome, Chronic obstructive pulmonary disease, Silicosis, Sleep Apnea, Severe Acute Respiratory Syndrome, Pulmonary fibrosis, Primary ciliary dyskinesia, Pneumoconiosis, Hypersensitivity Pneumonitis, Cryptogenic Organizing Pneumonia (Bronchiolitis Obliterans Organizing Pneumonia, Byssinosis, Bronchopulmonary Dysplasia, Bronchiolitis, Bronchiectasis, Asbestosis, Pertussis, Middle Eastern Respiratory Syndrome, Pneumonia, Tuberculosis, Bronchitis, Histoplasmosis, Coccidioidomycosis, and Acute bronchitis; treating anemia, Iron-deficiency anemia, Anemia of chronic disease, Pernicious anemia, Aplastic anemia, Autoimmune hemolytic anemia, Thalassemia, Sickle cell anemia, Polycythemia vera, Vitamin deficiency anemia, Hemolytic anemia, Thrombocytopenia, Idiopathic thrombocytopenic purpura, Heparin-induced thrombocytopenia, Thrombotic thrombocytopenic purpura, Essential thrombocytosis, Thrombosis, Hemophilia, von Willebrand disease, Hypercoaguable state, Deep venous thrombosis, Disseminated intravascular coagulation, Thrombocytopenia, Immune Thrombocytopenia, Drug-induced thrombocytopenia, Gestational thrombocytopenia, Thrombotic microangiopathies, Drug-induced thrombotic microangiopathies, Complement-mediated thrombotic microangiopathies, Mixed cryoglobulinemia, Eosinophilia, Eosinopenia, Idiopathic hypereosinophilic syndrome, Antiphospholipid syndrome, Glanzmann's thrombasthenia, Wiskott-Aldrich syndrome, Leishmania infection, Toxoplasmosis, Hereditary hypogammaglobulinemia, Nonfamilial hypogammaglobulinemia, Leukopenia, Agranulocytosis, Basopenia, Bernard-Soulier syndrome, Malaria, Sepsis, and Hemolytic uremic syndrome; treating obesity, Dercum's disease, Multiple symmetric lipomatosis, Familial multiple lipomatosis, Lipodystrophy, Lipedema, and Atherosclerosis.

168. The method according to claim 165, wherein said method may be used for protecting a patient from a disease, condition, disorder, or pathology selected from the group consisting of enhancing osteogenesis, inducing bone formation, inducing osteocyte maturation, treating, preventing or diagnosing osteoporosis; enhancing chondrogenesis, inducing cartilage formation, inducing chondrocyte maturation, treating or preventing osteoarthritis, treating or preventing costochondritis, treating or preventing herniation, treating or preventing achondroplasia, treating, preventing or diagnosing relapsing polychondritis; enhancing endothelization, enhancing vascularization/angiogenesis, treating, preventing or diagnosing at least one of coronary artery disease, cardiomyopathy, hypertensive heart disease, heart failure, cor pulmonale, cardiac dysrhythmias, inflammatory heart disease, endocarditis, inflammatory cardiomegaly, myocarditis, valvular heart disease, cerebrovascular disease, peripheral arterial disease, congenital heart disease, or rheumatic heart disease; enhancing axonal dendritic neuron growth, promoting neuron-regeneration, treating, preventing or diagnosing neuron degeneration-related conditions and diseases; enhancing eye retina cell regeneration, treating, preventing or diagnosing eye retina cell degeneration-related conditions or diseases; enhancing renal functions, preventing, treating or diagnosing kidneys failure, chronic kidney disease, and/or renal fibrosis; enhancing fibrous tissue formation, promoting tendon and ligament regeneration, preventing, treating or diagnosing tendon/ligament cell degeneration; hair follicle tissue regeneration, hair follicle stem cell activation, preventing, treating or diagnosing alopecia areata, alopecia totalis, alopecia universalis, androgenic alopecia, telogen effluvium, anagen effluvium or chemotherapy-induced alopecia; enhancing tissue closure; promoting female fertility, and treating, preventing, or diagnosing female infertility; myopathies, muscular atrophy, disuse atrophy, denervation atrophy, muscular dystrophies such as the Duchenne muscular dystrophy (DMD), and the Becker muscular dystrophy (BMD), fibrosis, fibrositis, muscle weakness, fatigue, cramps, fibromyalgia, or chronic muscle pain syndrome; treating asthma, Chronic obstructive pulmonary disease, Chronic bronchitis, Emphysema, Cystic fibrosis, Pulmonary edema, Acute respiratory distress syndrome, Pneumoconiosis, Interstitial lung disease, Sarcoidosis, Idiopathic pulmonary fibrosis, Pulmonary embolism, Pulmonary hypertension, Pleural effusion, Pneumothorax, Mesothelioma, Granulomatosis with polyangiitis, Goodpasture syndrome, Pulmonary hyperplasia, Infant respiratory distress syndrome, Chronic obstructive pulmonary disease, Silicosis, Sleep Apnea, Severe Acute Respiratory Syndrome, Pulmonary fibrosis, Primary ciliary dyskinesia, Pneumoconiosis, Hypersensitivity Pneumonitis, Cryptogenic Organizing Pneumonia (Bronchiolitis Obliterans Organizing Pneumonia, Byssinosis, Bronchopulmonary Dysplasia, Bronchiolitis, Bronchiectasis, Asbestosis, Pertussis, Middle Eastern Respiratory Syndrome, Pneumonia, Tuberculosis, Bronchitis, Histoplasmosis, Coccidioidomycosis, and Acute bronchitis; treating anemia, Iron-deficiency anemia, Anemia of chronic disease, Pernicious anemia, Aplastic anemia, Autoimmune hemolytic anemia, Thalassemia, Sickle cell anemia, Polycythemia vera, Vitamin deficiency anemia, Hemolytic anemia, Thrombocytopenia, Idiopathic thrombocytopenic purpura, Heparin-induced thrombocytopenia, Thrombotic thrombocytopenic purpura, Essential thrombocytosis, Thrombosis, Hemophilia, von Willebrand disease, Hypercoaguable state, Deep venous thrombosis, Disseminated intravascular coagulation, Thrombocytopenia, Immune Thrombocytopenia, Drug-induced thrombocytopenia, Gestational thrombocytopenia, Thrombotic microangiopathies, Drug-induced thrombotic microangiopathies, Complement-mediated thrombotic microangiopathies, Mixed cryoglobulinemia, Eosinophilia, Eosinopenia, Idiopathic hypereosinophilic syndrome, Antiphospholipid syndrome, Glanzmann's thrombasthenia, Wiskott-Aldrich syndrome, Leishmania infection, Toxoplasmosis, Hereditary hypogammaglobulinemia, Nonfamilial hypogammaglobulinemia, Leukopenia, Agranulocytosis, Basopenia, Bernard-Soulier syndrome, Malaria, Sepsis, and Hemolytic uremic syndrome; treating obesity, Dercum's disease, Multiple symmetric lipomatosis, Familial multiple lipomatosis, Lipodystrophy, Lipedema, and Atherosclerosis.

169. A method of producing a physiologically functional and healthy cell, comprising the administration in-vitro, ex-vivo or in-vivo to a mesenchymal stem cell or progenitor cell, at any stage of differentiation thereof, of an effective amount of a peptide or a peptidomimetic according to claim 144, and wherein said physiologically functional and healthy cell is selected from the group consisting of an osteoblast, osteocyte, chondroblast, chondrocyte, neuroblast, neurocyte, Sertoli cells, Leydig cell, Germ cell, myoblast, myocyte, keratinocyte, endothelial cells, angioblast, fibroblast, fibrocyte, podocyte, areolar connective cells, adipocytes, pre-adipocytes/lipoblasts, epithelial cells, erythrocytes, alveolar cells, hematopoietic stem cells (HSC), myeloid progenitors, lymphoid progenitors, mast cells, myeloblasts, monocytes, macrophages, neutrophils, basophils, eosinophils, erythrocytes, megakaryocytes, thrombocytes, dendritic cells, small lymphocytes, T-lymphocytes (T-cells), B-lymphocytes (B-cells), and natural killer (NK)-cells.

170. A method of producing a physiologically functional and healthy cell, comprising the administration in-vitro, ex-vivo or in-vivo to a mesenchymal stem cell or progenitor cell, at any stage of differentiation thereof, of an effective amount of a functionalized biomaterial according to claim 157, and wherein said physiologically functional and healthy cell is selected from the group consisting of an osteoblast, osteocyte, chondroblast, chondrocyte, neuroblast, neurocyte, Sertoli cells, Leydig cell, Germ cell, myoblast, myocyte, keratinocyte, endothelial cells, angioblast, fibroblast, fibrocyte, podocyte, areolar connective cells, adipocytes, pre-adipocytes/lipoblasts, epithelial cells, erythrocytes, alveolar cells, hematopoietic stem cells (HSC), myeloid progenitors, lymphoid progenitors, mast cells, myeloblasts, monocytes, macrophages, neutrophils, basophils, eosinophils, erythrocytes, megakaryocytes, thrombocytes, dendritic cells, small lymphocytes, T-lymphocytes (T-cells), B-lymphocytes (B-cells), and natural killer (NK)-cells.

171. A method of producing a physiologically functional and healthy cell, comprising the administration in-vitro, ex-vivo or in-vivo to a mesenchymal stem cell or progenitor cell, at any stage of differentiation thereof, of an effective amount of a medical composition according to claim 159, and wherein said physiologically functional and healthy cell is selected from the group consisting of an osteoblast, osteocyte, chondroblast, chondrocyte, neuroblast, neurocyte, Sertoli cells, Leydig cell, Germ cell, myoblast, myocyte, keratinocyte, endothelial cells, angioblast, fibroblast, fibrocyte, podocyte, areolar connective cells, adipocytes, pre-adipocytes/lipoblasts, epithelial cells, erythrocytes, alveolar cells, hematopoietic stem cells (HSC), myeloid progenitors, lymphoid progenitors, mast cells, myeloblasts, monocytes, macrophages, neutrophils, basophils, eosinophils, erythrocytes, megakaryocytes, thrombocytes, dendritic cells, small lymphocytes, T-lymphocytes (T-cells), B-lymphocytes (B-cells), and natural killer (NK)-cells.

172. A surgical method for surgical treatment comprising the contacting of a peptide or a peptidomimetic according to claim 144 with a body part of a patient to be treated, wherein said contacting induces stem cell differentiation and tissue formation.

173. A surgical method for surgical treatment comprising the contacting of a functionalized biomaterial according to claim 157 with a body part of a patient to be treated, wherein said contacting induces stem cell differentiation and tissue formation.

174. A surgical method for surgical treatment comprising the contacting of a medical device according to claim 158 with a body part of a patient to be treated, wherein said contacting induces stem cell differentiation and tissue formation.

175. Kits for pharmaceutical, surgical, dermatological, prophylactic, diagnostic, or imaging functional association production, comprising at least one peptide or peptidomimetic according to claim 144, at least one bioactive carrier, each and every one of them provided in an amount effective to produce a pharmaceutical, surgical, dermatological, prophylactic, diagnostic, or imaging association to induce cell differentiation, promote tissue regeneration or protect a subject from a disease, disorder, pathology or condition selected from the group consisting of enhancing osteogenesis, inducing bone formation, inducing osteocyte maturation, treating, preventing or diagnosing osteoporosis; enhancing chondrogenesis, inducing cartilage formation, inducing chondrocyte maturation, treating or preventing osteoarthritis, treating or preventing costochondritis, treating or preventing herniation, treating or preventing achondroplasia, treating, preventing or diagnosing relapsing polychondritis; enhancing endothelization, enhancing vascularization/angiogenesis, treating, preventing or diagnosing at least one of coronary artery disease, cardiomyopathy, hypertensive heart disease, heart failure, cor pulmonale, cardiac dysrhythmias, inflammatory heart disease, endocarditis, inflammatory cardiomegaly, myocarditis, valvular heart disease, cerebrovascular disease, peripheral arterial disease, congenital heart disease, or rheumatic heart disease; enhancing axonal dendritic neuron growth, promoting neuron-regeneration, treating, preventing or diagnosing neuron degeneration-related conditions and diseases; enhancing eye retina cell regeneration, treating, preventing or diagnosing eye retina cell degeneration-related conditions or diseases; enhancing renal functions, preventing, treating or diagnosing kidneys failure, chronic kidney disease, and/or renal fibrosis; enhancing fibrous tissue formation, promoting tendon and ligament regeneration, preventing, treating or diagnosing tendon/ligament cell degeneration; hair follicle tissue regeneration, hair follicle stem cell activation, preventing, treating or diagnosing alopecia areata, alopecia totalis, alopecia universalis, androgenic alopecia, telogen effluvium, anagen effluvium or chemotherapy-induced alopecia; enhancing tissue closure; promoting female fertility, and treating, preventing, or diagnosing female infertility; myopathies, muscular atrophy, disuse atrophy, denervation atrophy, muscular dystrophies such as the Duchenne muscular dystrophy (DMD), and the Becker muscular dystrophy (BMD), fibrosis, fibrositis, muscle weakness, fatigue, cramps, fibromyalgia, or chronic muscle pain syndrome; treating asthma, Chronic obstructive pulmonary disease, Chronic bronchitis, Emphysema, Cystic fibrosis, Pulmonary edema, Acute respiratory distress syndrome, Pneumoconiosis, Interstitial lung disease, Sarcoidosis, Idiopathic pulmonary fibrosis, Pulmonary embolism, Pulmonary hypertension, Pleural effusion, Pneumothorax, Mesothelioma, Granulomatosis with polyangiitis, Goodpasture syndrome, Pulmonary hyperplasia, Infant respiratory distress syndrome, Chronic obstructive pulmonary disease, Silicosis, Sleep Apnea, Severe Acute Respiratory Syndrome, Pulmonary fibrosis, Primary ciliary dyskinesia, Pneumoconiosis, Hypersensitivity Pneumonitis, Cryptogenic Organizing Pneumonia (Bronchiolitis Obliterans Organizing Pneumonia, Byssinosis, Bronchopulmonary Dysplasia, Bronchiolitis, Bronchiectasis, Asbestosis, Pertussis, Middle Eastern Respiratory Syndrome, Pneumonia, Tuberculosis, Bronchitis, Histoplasmosis, Coccidioidomycosis, and Acute bronchitis; treating anemia, Iron-deficiency anemia, Anemia of chronic disease, Pernicious anemia, Aplastic anemia, Autoimmune hemolytic anemia, Thalassemia, Sickle cell anemia, Polycythemia vera, Vitamin deficiency anemia, Hemolytic anemia, Thrombocytopenia, Idiopathic thrombocytopenic purpura, Heparin-induced thrombocytopenia, Thrombotic thrombocytopenic purpura, Essential thrombocytosis, Thrombosis, Hemophilia, von Willebrand disease, Hypercoaguable state, Deep venous thrombosis, Disseminated intravascular coagulation, Thrombocytopenia, Immune Thrombocytopenia, Drug-induced thrombocytopenia, Gestational thrombocytopenia, Thrombotic microangiopathies, Drug-induced thrombotic microangiopathies, Complement-mediated thrombotic microangiopathies, Mixed cryoglobulinemia, Eosinophilia, Eosinopenia, Idiopathic hypereosinophilic syndrome, Antiphospholipid syndrome, Glanzmann's thrombasthenia, Wiskott-Aldrich syndrome, Leishmania infection, Toxoplasmosis, Hereditary hypogammaglobulinemia, Nonfamilial hypogammaglobulinemia, Leukopenia, Agranulocytosis, Basopenia, Bernard-Soulier syndrome, Malaria, Sepsis, and Hemolytic uremic syndrome; treating obesity, Dercum's disease, Multiple symmetric lipomatosis, Familial multiple lipomatosis, Lipodystrophy, Lipedema, and Atherosclerosis, when administered in-vitro, ex-vivo or in-vivo to a mesenchymal stem cell, progenitor cell, at any stage of differentiation thereof, or to a subject carrying such a cell, and packaging and instructions.

176. Kits for pharmaceutical, surgical, dermatological, prophylactic, diagnostic, or imaging functional association production, comprising at least one functionalized biomaterial according to claim 157, at least one bioactive carrier, each and every one of them provided in an amount effective to produce a pharmaceutical, surgical, dermatological, prophylactic, diagnostic, or imaging association to induce cell differentiation, promote tissue regeneration or protect a subject from a disease, disorder, pathology or condition selected from the group consisting of enhancing osteogenesis, inducing bone formation, inducing osteocyte maturation, treating, preventing or diagnosing osteoporosis; enhancing chondrogenesis, inducing cartilage formation, inducing chondrocyte maturation, treating or preventing osteoarthritis, treating or preventing costochondritis, treating or preventing herniation, treating or preventing achondroplasia, treating, preventing or diagnosing relapsing polychondritis; enhancing endothelization, enhancing vascularization/angiogenesis, treating, preventing or diagnosing at least one of coronary artery disease, cardiomyopathy, hypertensive heart disease, heart failure, cor pulmonale, cardiac dysrhythmias, inflammatory heart disease, endocarditis, inflammatory cardiomegaly, myocarditis, valvular heart disease, cerebrovascular disease, peripheral arterial disease, congenital heart disease, or rheumatic heart disease; enhancing axonal dendritic neuron growth, promoting neuron-regeneration, treating, preventing or diagnosing neuron degeneration-related conditions and diseases; enhancing eye retina cell regeneration, treating, preventing or diagnosing eye retina cell degeneration-related conditions or diseases; enhancing renal functions, preventing, treating or diagnosing kidneys failure, chronic kidney disease, and/or renal fibrosis; enhancing fibrous tissue formation, promoting tendon and ligament regeneration, preventing, treating or diagnosing tendon/ligament cell degeneration; hair follicle tissue regeneration, hair follicle stem cell activation, preventing, treating or diagnosing alopecia areata, alopecia totalis, alopecia universalis, androgenic alopecia, telogen effluvium, anagen effluvium or chemotherapy-induced alopecia; enhancing tissue closure; promoting female fertility, and treating, preventing, or diagnosing female infertility; myopathies, muscular atrophy, disuse atrophy, denervation atrophy, muscular dystrophies such as the Duchenne muscular dystrophy (DMD), and the Becker muscular dystrophy (BMD), fibrosis, fibrositis, muscle weakness, fatigue, cramps, fibromyalgia, or chronic muscle pain syndrome; treating asthma, Chronic obstructive pulmonary disease, Chronic bronchitis, Emphysema, Cystic fibrosis, Pulmonary edema, Acute respiratory distress syndrome, Pneumoconiosis, Interstitial lung disease, Sarcoidosis, Idiopathic pulmonary fibrosis, Pulmonary embolism, Pulmonary hypertension, Pleural effusion, Pneumothorax, Mesothelioma, Granulomatosis with polyangiitis, Goodpasture syndrome, Pulmonary hyperplasia, Infant respiratory distress syndrome, Chronic obstructive pulmonary disease, Silicosis, Sleep Apnea, Severe Acute Respiratory Syndrome, Pulmonary fibrosis, Primary ciliary dyskinesia, Pneumoconiosis, Hypersensitivity Pneumonitis, Cryptogenic Organizing Pneumonia (Bronchiolitis Obliterans Organizing Pneumonia, Byssinosis, Bronchopulmonary Dysplasia, Bronchiolitis, Bronchiectasis, Asbestosis, Pertussis, Middle Eastern Respiratory Syndrome, Pneumonia, Tuberculosis, Bronchitis, Histoplasmosis, Coccidioidomycosis, and Acute bronchitis; treating anemia, Iron-deficiency anemia, Anemia of chronic disease, Pernicious anemia, Aplastic anemia, Autoimmune hemolytic anemia, Thalassemia, Sickle cell anemia, Polycythemia vera, Vitamin deficiency anemia, Hemolytic anemia, Thrombocytopenia, Idiopathic thrombocytopenic purpura, Heparin-induced thrombocytopenia, Thrombotic thrombocytopenic purpura, Essential thrombocytosis, Thrombosis, Hemophilia, von Willebrand disease, Hypercoaguable state, Deep venous thrombosis, Disseminated intravascular coagulation, Thrombocytopenia, Immune Thrombocytopenia, Drug-induced thrombocytopenia, Gestational thrombocytopenia, Thrombotic microangiopathies, Drug-induced thrombotic microangiopathies, Complement-mediated thrombotic microangiopathies, Mixed cryoglobulinemia, Eosinophilia, Eosinopenia, Idiopathic hypereosinophilic syndrome, Antiphospholipid syndrome, Glanzmann's thrombasthenia, Wiskott-Aldrich syndrome, Leishmania infection, Toxoplasmosis, Hereditary hypogammaglobulinemia, Nonfamilial hypogammaglobulinemia, Leukopenia, Agranulocytosis, Basopenia, Bernard-Soulier syndrome, Malaria, Sepsis, and Hemolytic uremic syndrome; treating obesity, Dercum's disease, Multiple symmetric lipomatosis, Familial multiple lipomatosis, Lipodystrophy, Lipedema, and Atherosclerosis, when administered in-vitro, ex-vivo or in-vivo to a mesenchymal stem cell, progenitor cell, at any stage of differentiation thereof, or to a subject carrying such a cell, and packaging and instructions.

177. A medical device comprising at least one functionalized biomaterial according to claim 157.

178. A medical composition comprising at least one functionalized biomaterial according to claim 157, and a medically acceptable carrier.
